United States Patent Application Publication US 2015/0191722 A1 - sequence listing, part 3

SEQ ID NO: 64929 - DNA, 15 bp, Homo sapiens
tggatgaaaggttta

SEQ ID NO: 64930 - DNA, 15 bp, Homo sapiens
ctggatgaaaggttt

SEQ ID NO: 64931 - DNA, 15 bp, Homo sapiens
actggatgaaaggtt

SEQ ID NO: 64932 - DNA, 15 bp, Homo sapiens
aactggatgaaaggt

SEQ ID NO: 64933 - DNA, 15 bp, Homo sapiens
aaactggatgaaagg

SEQ ID NO: 64934 - DNA, 15 bp, Homo sapiens
gaaactggatgaaag

SEQ ID NO: 64935 - DNA, 15 bp, Homo sapiens
ggaaactggatgaaa

SEQ ID NO: 64936 - DNA, 15 bp, Homo sapiens
gggaaactggatgaa

SEQ ID NO: 64937 - DNA, 15 bp, Homo sapiens
ggggaaactggatga

SEQ ID NO: 64938 - DNA, 15 bp, Homo sapiens
tggggaaactggatg

SEQ ID NO: 64939 - DNA, 15 bp, Homo sapiens
ttggggaaactggat

SEQ ID NO: 64940 - DNA, 15 bp, Homo sapiens
attggggaaactgga

SEQ ID NO: 64941 - DNA, 15 bp, Homo sapiens
cattggggaaactgg

SEQ ID NO: 64942 - DNA, 15 bp, Homo sapiens
ccattggggaaactg

SEQ ID NO: 64943 - DNA, 15 bp, Homo sapiens
accattggggaaact

SEQ ID NO: 64944 - DNA, 15 bp, Homo sapiens
taccattggggaaac

SEQ ID NO: 64945 - DNA, 15 bp, Homo sapiens
ctaccattggggaaa

SEQ ID NO: 64946 - DNA, 15 bp, Homo sapiens
gctaccattggggaa

SEQ ID NO: 64947 - DNA, 15 bp, Homo sapiens
tgctaccattgggga

SEQ ID NO: 64948 - DNA, 15 bp, Homo sapiens
ctgctaccattgggg

SEQ ID NO: 64949 - DNA, 15 bp, Homo sapiens
gctgctaccattggg

SEQ ID NO: 64950 - DNA, 15 bp, Homo sapiens
tgctgctaccattgg

SEQ ID NO: 64951 - DNA, 15 bp, Homo sapiens
atgctgctaccattg

SEQ ID NO: 64952 - DNA, 15 bp, Homo sapiens
catgctgctaccatt

SEQ ID NO: 64953 - DNA, 15 bp, Homo sapiens
acatgctgctaccat

SEQ ID NO: 64954 - DNA, 15 bp, Homo sapiens
cacatgctgctacca

SEQ ID NO: 64955 - DNA, 15 bp, Homo sapiens
acacatgctgctacc

SEQ ID NO: 64956 - DNA, 15 bp, Homo sapiens
tacacatgctgctac

SEQ ID NO: 64957 - DNA, 15 bp, Homo sapiens
ttacacatgctgcta

SEQ ID NO: 64958 - DNA, 15 bp, Homo sapiens
gttacacatgctgct

SEQ ID NO: 64959 - DNA, 15 bp, Homo sapiens
agttacacatgctgc

SEQ ID NO: 64960 - DNA, 15 bp, Homo sapiens
cagttacacatgctg

SEQ ID NO: 64961 - DNA, 15 bp, Homo sapiens
acagttacacatgct

SEQ ID NO: 64962 - DNA, 15 bp, Homo sapiens
tacagttacacatgc

SEQ ID NO: 64963 - DNA, 15 bp, Homo sapiens
ctacagttacacatg

SEQ ID NO: 64964 - DNA, 15 bp, Homo sapiens
tctacagttacacat

SEQ ID NO: 64965 - DNA, 15 bp, Homo sapiens
ttctacagttacaca

SEQ ID NO: 64966 - DNA, 15 bp, Homo sapiens
attctacagttacac

SEQ ID NO: 64967 - DNA, 15 bp, Homo sapiens
tattctacagttaca

SEQ ID NO: 64968 - DNA, 15 bp, Homo sapiens
ctattctacagttac

SEQ ID NO: 64969 - DNA, 15 bp, Homo sapiens
actattctacagtta

SEQ ID NO: 64970 - DNA, 15 bp, Homo sapiens
tactattctacagtt

SEQ ID NO: 64971 - DNA, 15 bp, Homo sapiens
atactattctacagt

SEQ ID NO: 64972 - DNA, 15 bp, Homo sapiens
gatactattctacag

SEQ ID NO: 64973 - DNA, 15 bp, Homo sapiens
tgatactattctaca

SEQ ID NO: 64974 - DNA, 15 bp, Homo sapiens
ttgatactattctac

SEQ ID NO: 64975 - DNA, 15 bp, Homo sapiens
tttgatactattcta

SEQ ID NO: 64976 - DNA, 15 bp, Homo sapiens
ttttgatactattct

SEQ ID NO: 64977 - DNA, 15 bp, Homo sapiens
gttttgatactattc

SEQ ID NO: 64978 - DNA, 15 bp, Homo sapiens
ggttttgatactatt

SEQ ID NO: 64979 - DNA, 15 bp, Homo sapiens
tggttttgatactat

SEQ ID NO: 64980 - DNA, 15 bp, Homo sapiens
atggttttgatacta

SEQ ID NO: 64981 - DNA, 15 bp, Homo sapiens
catggttttgatact

SEQ ID NO: 64982 - DNA, 15 bp, Homo sapiens
tcatggttttgatac

SEQ ID NO: 64983 - DNA, 15 bp, Homo sapiens
ttcatggttttgata

SEQ ID NO: 64984 - DNA, 15 bp, Homo sapiens
tttcatggttttgat

SEQ ID NO: 64985 - DNA, 15 bp, Homo sapiens
atttcatggttttga

SEQ ID NO: 64986 - DNA, 15 bp, Homo sapiens
aatttcatggttttg

SEQ ID NO: 64987 - DNA, 15 bp, Homo sapiens
caatttcatggtttt

SEQ ID NO: 64988 - DNA, 15 bp, Homo sapiens
tcaatttcatggttt

SEQ ID NO: 64989 - DNA, 15 bp, Homo sapiens
gtcaatttcatggtt

SEQ ID NO: 64990 - DNA, 15 bp, Homo sapiens
tgtcaatttcatggt

SEQ ID NO: 64991 - DNA, 15 bp, Homo sapiens
atgtcaatttcatgg

SEQ ID NO: 64992 - DNA, 15 bp, Homo sapiens
tatgtcaatttcatg

SEQ ID NO: 64993 - DNA, 15 bp, Homo sapiens
ctatgtcaatttcat

SEQ ID NO: 64994 - DNA, 15 bp, Homo sapiens
cctatgtcaatttca

SEQ ID NO: 64995 - DNA, 15 bp, Homo sapiens
acctatgtcaatttc

SEQ ID NO: 64996 - DNA, 15 bp, Homo sapiens
tacctatgtcaattt

SEQ ID NO: 64997 - DNA, 15 bp, Homo sapiens
gtacctatgtcaatt

SEQ ID NO: 64998 - DNA, 15 bp, Homo sapiens
tgtacctatgtcaat

SEQ ID NO: 64999 - DNA, 15 bp, Homo sapiens
ttgtacctatgtcaa

SEQ ID NO: 65000 - DNA, 15 bp, Homo sapiens
attgtacctatgtca

SEQ ID NO: 65001 - DNA, 15 bp, Homo sapiens
aattgtacctatgtc

SEQ ID NO: 65002 - DNA, 15 bp, Homo sapiens
gaattgtacctatgt

SEQ ID NO: 65003 - DNA, 15 bp, Homo sapiens
tgaattgtacctatg

SEQ ID NO: 65004 - DNA, 15 bp, Homo sapiens
gtgaattgtacctat

SEQ ID NO: 65005 - DNA, 15 bp, Homo sapiens
tgtgaattgtaccta

SEQ ID NO: 65006 - DNA, 15 bp, Homo sapiens
ttgtgaattgtacct

SEQ ID NO: 65007 - DNA, 15 bp, Homo sapiens
tttgtgaattgtacc

SEQ ID NO: 65008 - DNA, 15 bp, Homo sapiens
gtttgtgaattgtac

SEQ ID NO: 65009 - DNA, 15 bp, Homo sapiens
ggtttgtgaattgta

SEQ ID NO: 65010 - DNA, 15 bp, Homo sapiens
aggtttgtgaattgt

SEQ ID NO: 65011 - DNA, 15 bp, Homo sapiens
aaggtttgtgaattg

SEQ ID NO: 65012 - DNA, 15 bp, Homo sapiens
gaaggtttgtgaatt

SEQ ID NO: 65013 - DNA, 15 bp, Homo sapiens
agaaggtttgtgaat

SEQ ID NO: 65014 - DNA, 15 bp, Homo sapiens
aagaaggtttgtgaa

SEQ ID NO: 65015 - DNA, 15 bp, Homo sapiens
gaagaaggtttgtga

SEQ ID NO: 65016 - DNA, 15 bp, Homo sapiens
tgaagaaggtttgtg

SEQ ID NO: 65017 - DNA, 15 bp, Homo sapiens
ctgaagaaggtttgt

SEQ ID NO: 65018 - DNA, 15 bp, Homo sapiens
tctgaagaaggtttg

SEQ ID NO: 65019 - DNA, 15 bp, Homo sapiens
atctgaagaaggttt

SEQ ID NO: 65020 - DNA, 15 bp, Homo sapiens
aatctgaagaaggtt

SEQ ID NO: 65021 - DNA, 15 bp, Homo sapiens
aaatctgaagaaggt

SEQ ID NO: 65022 - DNA, 15 bp, Homo sapiens
gaaatctgaagaagg

SEQ ID NO: 65023 - DNA, 15 bp, Homo sapiens
tgaaatctgaagaag

SEQ ID NO: 65024 - DNA, 15 bp, Homo sapiens
gtgaaatctgaagaa

SEQ ID NO: 65025 - DNA, 15 bp, Homo sapiens
agtgaaatctgaaga

SEQ ID NO: 65026 - DNA, 15 bp, Homo sapiens
tagtgaaatctgaag

SEQ ID NO: 65027 - DNA, 15 bp, Homo sapiens
ctagtgaaatctgaa

SEQ ID NO: 65028 - DNA, 15 bp, Homo sapiens
gctagtgaaatctga

SEQ ID NO: 65029 - DNA, 15 bp, Homo sapiens
agctagtgaaatctg

SEQ ID NO: 65030 - DNA, 15 bp, Homo sapiens
aagctagtgaaatct

SEQ ID NO: 65031 - DNA, 15 bp, Homo sapiens
aaagctagtgaaatc

SEQ ID NO: 65032 - DNA, 15 bp, Homo sapiens
taaagctagtgaaat

SEQ ID NO: 65033 - DNA, 15 bp, Homo sapiens
ataaagctagtgaaa

SEQ ID NO: 65034 - DNA, 15 bp, Homo sapiens
cataaagctagtgaa

SEQ ID NO: 65035 - DNA, 15 bp, Homo sapiens
acataaagctagtga

SEQ ID NO: 65036 - DNA, 15 bp, Homo sapiens
cacataaagctagtg

SEQ ID NO: 65037 - DNA, 15 bp, Homo sapiens
gcacataaagctagt

SEQ ID NO: 65038 - DNA, 15 bp, Homo sapiens
cgcacataaagctag

SEQ ID NO: 65039 - DNA, 15 bp, Homo sapiens
gcgcacataaagcta

SEQ ID NO: 65040 - DNA, 15 bp, Homo sapiens
agcgcacataaagct

SEQ ID NO: 65041 - DNA, 15 bp, Homo sapiens
gagcgcacataaagc

SEQ ID NO: 65042 - DNA, 15 bp, Homo sapiens
tgagcgcacataaag

SEQ ID NO: 65043 - DNA, 15 bp, Homo sapiens
atgagcgcacataaa

SEQ ID NO: 65044 - DNA, 15 bp, Homo sapiens
aatgagcgcacataa

SEQ ID NO: 65045 - DNA, 15 bp, Homo sapiens
aaatgagcgcacata

SEQ ID NO: 65046 - DNA, 15 bp, Homo sapiens
caaatgagcgcacat

SEQ ID NO: 65047 - DNA, 15 bp, Homo sapiens
acaaatgagcgcaca

SEQ ID NO: 65048 - DNA, 15 bp, Homo sapiens
cacaaatgagcgcac

SEQ ID NO: 65049 - DNA, 15 bp, Homo sapiens
acacaaatgagcgca

SEQ ID NO: 65050 - DNA, 15 bp, Homo sapiens
cacacaaatgagcgc

SEQ ID NO: 65051 - DNA, 15 bp, Homo sapiens
acacacaaatgagcg

SEQ ID NO: 65052 - DNA, 15 bp, Homo sapiens
cacacacaaatgagc

SEQ ID NO: 65053 - DNA, 15 bp, Homo sapiens
acacacacaaatgag

SEQ ID NO: 65054 - DNA, 15 bp, Homo sapiens
cacacacacaaatga

SEQ ID NO: 65055 - DNA, 15 bp, Homo sapiens
acacacacacaaatg

SEQ ID NO: 65056 - DNA, 15 bp, Homo sapiens
cacacacacacaaat

SEQ ID NO: 65057 - DNA, 15 bp, Homo sapiens
acacacacacacaaa

SEQ ID NO: 65058 - DNA, 15 bp, Homo sapiens
cacacacacacacaa

SEQ ID NO: 65059 - DNA, 15 bp, Homo sapiens
cgcacacacacacac

SEQ ID NO: 65060 - DNA, 15 bp, Homo sapiens
acgcacacacacaca

SEQ ID NO: 65061 - DNA, 15 bp, Homo sapiens
tacgcacacacacac

SEQ ID NO: 65062 - DNA, 15 bp, Homo sapiens
atacgcacacacaca

SEQ ID NO: 65063 - DNA, 15 bp, Homo sapiens
aatacgcacacacac

SEQ ID NO: 65064 - DNA, 15 bp, Homo sapiens
aaatacgcacacaca

SEQ ID NO: 65065 - DNA, 15 bp, Homo sapiens
taaatacgcacacac

SEQ ID NO: 65066 - DNA, 15 bp, Homo sapiens
ctaaatacgcacaca

SEQ ID NO: 65067 - DNA, 15 bp, Homo sapiens
actaaatacgcacac

SEQ ID NO: 65068 - DNA, 15 bp, Homo sapiens
aactaaatacgcaca

SEQ ID NO: 65069 - DNA, 15 bp, Homo sapiens
gaactaaatacgcac

SEQ ID NO: 65070 - DNA, 15 bp, Homo sapiens
agaactaaatacgca

SEQ ID NO: 65071 - DNA, 15 bp, Homo sapiens
tagaactaaatacgc

SEQ ID NO: 65072 - DNA, 15 bp, Homo sapiens
atagaactaaatacg

SEQ ID NO: 65073 - DNA, 15 bp, Homo sapiens
catagaactaaatac

SEQ ID NO: 65074 - DNA, 15 bp, Homo sapiens
gcatagaactaaata

SEQ ID NO: 65075 - DNA, 15 bp, Homo sapiens
tgcatagaactaaat

SEQ ID NO: 65076 - DNA, 15 bp, Homo sapiens
ttgcatagaactaaa

SEQ ID NO: 65077 - DNA, 15 bp, Homo sapiens
attgcatagaactaa

SEQ ID NO: 65078 - DNA, 15 bp, Homo sapiens
aattgcatagaacta

SEQ ID NO: 65079 - DNA, 15 bp, Homo sapiens
aaattgcatagaact

SEQ ID NO: 65080 - DNA, 15 bp, Homo sapiens
aaaattgcatagaac

SEQ ID NO: 65081 - DNA, 15 bp, Homo sapiens
taaaattgcatagaa

SEQ ID NO: 65082 - DNA, 15 bp, Homo sapiens
ataaaattgcataga

SEQ ID NO: 65083 - DNA, 15 bp, Homo sapiens
gataaaattgcatag

SEQ ID NO: 65084 - DNA, 15 bp, Homo sapiens
tgataaaattgcata

SEQ ID NO: 65085 - DNA, 15 bp, Homo sapiens
atgataaaattgcat

SEQ ID NO: 65086 - DNA, 15 bp, Homo sapiens
catgataaaattgca

SEQ ID NO: 65087 - DNA, 15 bp, Homo sapiens
acatgataaaattgc

SEQ ID NO: 65088 - DNA, 15 bp, Homo sapiens
cacatgataaaattg

SEQ ID NO: 65089 - DNA, 15 bp, Homo sapiens
acacatgataaaatt

SEQ ID NO: 65090 - DNA, 15 bp, Homo sapiens
cacacatgataaaat

SEQ ID NO: 65091 - DNA, 15 bp, Homo sapiens
tcacacatgataaaa

SEQ ID NO: 65092 - DNA, 15 bp, Homo sapiens
ttcacacatgataaa

SEQ ID NO: 65093 - DNA, 15 bp, Homo sapiens
attcacacatgataa

SEQ ID NO: 65094 - DNA, 15 bp, Homo sapiens
aattcacacatgata

SEQ ID NO: 65095 - DNA, 15 bp, Homo sapiens
gaattcacacatgat

SEQ ID NO: 65096 - DNA, 15 bp, Homo sapiens
tgaattcacacatga

SEQ ID NO: 65097 - DNA, 15 bp, Homo sapiens
atgaattcacacatg

SEQ ID NO: 65098 - DNA, 15 bp, Homo sapiens
catgaattcacacat

SEQ ID NO: 65099 - DNA, 15 bp, Homo sapiens
acatgaattcacaca

SEQ ID NO: 65100 - DNA, 15 bp, Homo sapiens
tacatgaattcacac

SEQ ID NO: 65101 - DNA, 15 bp, Homo sapiens
ttacatgaattcaca

SEQ ID NO: 65102 - DNA, 15 bp, Homo sapiens
attacatgaattcac

SEQ ID NO: 65103 - DNA, 15 bp, Homo sapiens
aattacatgaattca

SEQ ID NO: 65104 - DNA, 15 bp, Homo sapiens
taattacatgaattc

SEQ ID NO: 65105 - DNA, 15 bp, Homo sapiens
gtaattacatgaatt

SEQ ID NO: 65106 - DNA, 15 bp, Homo sapiens
agtaattacatgaat

SEQ ID NO: 65107 - DNA, 15 bp, Homo sapiens
tagtaattacatgaa

SEQ ID NO: 65108 - DNA, 15 bp, Homo sapiens
ctagtaattacatga

SEQ ID NO: 65109 - DNA, 15 bp, Homo sapiens
gctagtaattacatg

SEQ ID NO: 65110 - DNA, 15 bp, Homo sapiens
agctagtaattacat

SEQ ID NO: 65111 - DNA, 15 bp, Homo sapiens
gagctagtaattaca

SEQ ID NO: 65112 - DNA, 15 bp, Homo sapiens
tgagctagtaattac

SEQ ID NO: 65113 - DNA, 15 bp, Homo sapiens
ctgagctagtaatta

SEQ ID NO: 65114 - DNA, 15 bp, Homo sapiens
actgagctagtaatt

SEQ ID NO: 65115 - DNA, 15 bp, Homo sapiens
gactgagctagtaat

SEQ ID NO: 65116 - DNA, 15 bp, Homo sapiens
tgactgagctagtaa

SEQ ID NO: 65117 - DNA, 15 bp, Homo sapiens
ttgactgagctagta

SEQ ID NO: 65118 - DNA, 15 bp, Homo sapiens
cttgactgagctagt

SEQ ID NO: 65119 - DNA, 15 bp, Homo sapiens
gcttgactgagctag

SEQ ID NO: 65120 - DNA, 15 bp, Homo sapiens
agcttgactgagcta

SEQ ID NO: 65121 - DNA, 15 bp, Homo sapiens
cagcttgactgagct

SEQ ID NO: 65122 - DNA, 15 bp, Homo sapiens
gcagcttgactgagc

SEQ ID NO: 65123 - DNA, 15 bp, Homo sapiens
tgcagcttgactgag

SEQ ID NO: 65124 - DNA, 15 bp, Homo sapiens
ctgcagcttgactga

SEQ ID NO: 65125 - DNA, 15 bp, Homo sapiens
tctgcagcttgactg

SEQ ID NO: 65126 - DNA, 15 bp, Homo sapiens
ttctgcagcttgact

SEQ ID NO: 65127 - DNA, 15 bp, Homo sapiens
tttctgcagcttgac

SEQ ID NO: 65128 - DNA, 15 bp, Homo sapiens
atttctgcagcttga

SEQ ID NO: 65129 - DNA, 15 bp, Homo sapiens
tatttctgcagcttg

SEQ ID NO: 65130 - DNA, 15 bp, Homo sapiens
atatttctgcagctt

SEQ ID NO: 65131 - DNA, 15 bp, Homo sapiens
gatatttctgcagct

SEQ ID NO: 65132 - DNA, 15 bp, Homo sapiens
agatatttctgcagc

SEQ ID NO: 65133 - DNA, 15 bp, Homo sapiens
gagatatttctgcag

SEQ ID NO: 65134 - DNA, 15 bp, Homo sapiens
tgagatatttctgca

SEQ ID NO: 65135 - DNA, 15 bp, Homo sapiens
atgagatatttctgc

SEQ ID NO: 65136 - DNA, 15 bp, Homo sapiens
aatgagatatttctg

SEQ ID NO: 65137 - DNA, 15 bp, Homo sapiens
caatgagatatttct

SEQ ID NO: 65138 - DNA, 15 bp, Homo sapiens
acaatgagatatttc

SEQ ID NO: 65139 - DNA, 15 bp, Homo sapiens
gacaatgagatattt

SEQ ID NO: 65140 - DNA, 15 bp, Homo sapiens
tgacaatgagatatt

SEQ ID NO: 65141 - DNA, 15 bp, Homo sapiens
gtgacaatgagatat

SEQ ID NO: 65142 - DNA, 15 bp, Homo sapiens
tgtgacaatgagata

SEQ ID NO: 65143 - DNA, 15 bp, Homo sapiens
ttgtgacaatgagat

SEQ ID NO: 65144 - DNA, 15 bp, Homo sapiens
tttgtgacaatgaga

SEQ ID NO: 65145 - DNA, 15 bp, Homo sapiens
ctttgtgacaatgag

SEQ ID NO: 65146 - DNA, 15 bp, Homo sapiens
gctttgtgacaatga

SEQ ID NO: 65147 - DNA, 15 bp, Homo sapiens
agctttgtgacaatg

SEQ ID NO: 65148 - DNA, 15 bp, Homo sapiens
gagctttgtgacaat

SEQ ID NO: 65149 - DNA, 15 bp, Homo sapiens
ggagctttgtgacaa

SEQ ID NO: 65150 - DNA, 15 bp, Homo sapiens
aggagctttgtgaca

SEQ ID NO: 65151 - DNA, 15 bp, Homo sapiens
aaggagctttgtgac

SEQ ID NO: 65152 - DNA, 15 bp, Homo sapiens
gaaggagctttgtga

SEQ ID NO: 65153 - DNA, 15 bp, Homo sapiens
tgaaggagctttgtg

SEQ ID NO: 65154 - DNA, 15 bp, Homo sapiens
atgaaggagctttgt

SEQ ID NO: 65155 - DNA, 15 bp, Homo sapiens
catgaaggagctttg

SEQ ID NO: 65156 - DNA, 15 bp, Homo sapiens
gcatgaaggagcttt

SEQ ID NO: 65157 - DNA, 15 bp, Homo sapiens
agcatgaaggagctt

SEQ ID NO: 65158 - DNA, 15 bp, Homo sapiens
tagcatgaaggagct

SEQ ID NO: 65159 - DNA, 15 bp, Homo sapiens
gtagcatgaaggagc

SEQ ID NO: 65160 - DNA, 15 bp, Homo sapiens
ggtagcatgaaggag

SEQ ID NO: 65161 - DNA, 15 bp, Homo sapiens
gggtagcatgaagga

SEQ ID NO: 65162 - DNA, 15 bp, Homo sapiens
ggggtagcatgaagg

SEQ ID NO: 65163 - DNA, 15 bp, Homo sapiens
aggggtagcatgaag

SEQ ID NO: 65164 - DNA, 15 bp, Homo sapiens
aaggggtagcatgaa

SEQ ID NO: 65165 - DNA, 15 bp, Homo sapiens
taaggggtagcatga

SEQ ID NO: 65166 - DNA, 15 bp, Homo sapiens
ttaaggggtagcatg

SEQ ID NO: 65167 - DNA, 15 bp, Homo sapiens
attaaggggtagcat

SEQ ID NO: 65168 - DNA, 15 bp, Homo sapiens
cattaaggggtagca

SEQ ID NO: 65169 - DNA, 15 bp, Homo sapiens
ccattaaggggtagc

SEQ ID NO: 65170 - DNA, 15 bp, Homo sapiens
gccattaaggggtag

SEQ ID NO: 65171 - DNA, 15 bp, Homo sapiens
ggccattaaggggta

SEQ ID NO: 65172 - DNA, 15 bp, Homo sapiens
tggccattaaggggt

SEQ ID NO: 65173 - DNA, 15 bp, Homo sapiens
gtggccattaagggg

SEQ ID NO: 65174 - DNA, 15 bp, Homo sapiens
tgtggccattaaggg

SEQ ID NO: 65175 - DNA, 15 bp, Homo sapiens
ctgtggccattaagg

SEQ ID NO: 65176 - DNA, 15 bp, Homo sapiens
gctgtggccattaag

SEQ ID NO: 65177 - DNA, 15 bp, Homo sapiens
ggctgtggccattaa

SEQ ID NO: 65178 - DNA, 15 bp, Homo sapiens
tggctgtggccatta

SEQ ID NO: 65179 - DNA, 15 bp, Homo sapiens
gtggctgtggccatt

SEQ ID NO: 65180 - DNA, 15 bp, Homo sapiens
ggtggctgtggccat

SEQ ID NO: 65181 - DNA, 15 bp, Homo sapiens
aggtggctgtggcca

SEQ ID NO: 65182 - DNA, 15 bp, Homo sapiens
gaggtggctgtggcc

SEQ ID NO: 65183 - DNA, 15 bp, Homo sapiens
ggaggtggctgtggc

SEQ ID NO: 65184 - DNA, 15 bp, Homo sapiens
gggaggtggctgtgg

SEQ ID NO: 65185 - DNA, 15 bp, Homo sapiens
agggaggtggctgtg

SEQ ID NO: 65186 - DNA, 15 bp, Homo sapiens
aagggaggtggctgt

SEQ ID NO: 65187 - DNA, 15 bp, Homo sapiens
gaagggaggtggctg

SEQ ID NO: 65188 - DNA, 15 bp, Homo sapiens
agaagggaggtggct

SEQ ID NO: 65189 - DNA, 15 bp, Homo sapiens
aagaagggaggtggc

SEQ ID NO: 65190 - DNA, 15 bp, Homo sapiens
gaagaagggaggtgg

SEQ ID NO: 65191 - DNA, 15 bp, Homo sapiens
ggaagaagggaggtg

SEQ ID NO: 65192 - DNA, 15 bp, Homo sapiens
aggaagaagggaggt

SEQ ID NO: 65193 - DNA, 15 bp, Homo sapiens
gaggaagaagggagg

SEQ ID NO: 65194 - DNA, 15 bp, Homo sapiens
tgaggaagaagggag

SEQ ID NO: 65195 - DNA, 15 bp, Homo sapiens
ctgaggaagaaggga

SEQ ID NO: 65196 - DNA, 15 bp, Homo sapiens
actgaggaagaaggg

SEQ ID NO: 65197 - DNA, 15 bp, Homo sapiens
aactgaggaagaagg

SEQ ID NO: 65198 - DNA, 15 bp, Homo sapiens
gaactgaggaagaag

SEQ ID NO: 65199 - DNA, 15 bp, Homo sapiens
ggaactgaggaagaa

SEQ ID NO: 65200 - DNA, 15 bp, Homo sapiens
aggaactgaggaaga

SEQ ID NO: 65201 - DNA, 15 bp, Homo sapiens
caggaactgaggaag

SEQ ID NO: 65202 - DNA, 15 bp, Homo sapiens
tcaggaactgaggaa

SEQ ID NO: 65203 - DNA, 15 bp, Homo sapiens
gtcaggaactgagga

SEQ ID NO: 65204 - DNA, 15 bp, Homo sapiens
tgtcaggaactgagg

SEQ ID NO: 65205 - DNA, 15 bp, Homo sapiens
gtgtcaggaactgag

SEQ ID NO: 65206 - DNA, 15 bp, Homo sapiens
ggtgtcaggaactga

SEQ ID NO: 65207 - DNA, 15 bp, Homo sapiens
aggtgtcaggaactg

SEQ ID NO: 65208 - DNA, 15 bp, Homo sapiens
caggtgtcaggaact

SEQ ID NO: 65209 - DNA, 15 bp, Homo sapiens
acaggtgtcaggaac

SEQ ID NO: 65210 - DNA, 15 bp, Homo sapiens
gacaggtgtcaggaa

SEQ ID NO: 65211 - DNA, 15 bp, Homo sapiens
tgacaggtgtcagga

SEQ ID NO: 65212 - DNA, 15 bp, Homo sapiens
ttgacaggtgtcagg

SEQ ID NO: 65213 - DNA, 15 bp, Homo sapiens
gttgacaggtgtcag

SEQ ID NO: 65214 - DNA, 15 bp, Homo sapiens
ggttgacaggtgtca

SEQ ID NO: 65215 - DNA, 15 bp, Homo sapiens
tggttgacaggtgtc

SEQ ID NO: 65216 - DNA, 15 bp, Homo sapiens
gtggttgacaggtgt

SEQ ID NO: 65217 - DNA, 15 bp, Homo sapiens
agtggttgacaggtg

SEQ ID NO: 65218 - DNA, 15 bp, Homo sapiens
tagtggttgacaggt

SEQ ID NO: 65219 - DNA, 15 bp, Homo sapiens
ttagtggttgacagg

SEQ ID NO: 65220 - DNA, 15 bp, Homo sapiens
attagtggttgacag

SEQ ID NO: 65221 - DNA, 15 bp, Homo sapiens
cattagtggttgaca

SEQ ID NO: 65222 - DNA, 15 bp, Homo sapiens
gcattagtggttgac

SEQ ID NO: 65223 - DNA, 15 bp, Homo sapiens
cgcattagtggttga

SEQ ID NO: 65224 - DNA, 15 bp, Homo sapiens
acgcattagtggttg

SEQ ID NO: 65225 - DNA, 15 bp, Homo sapiens
aacgcattagtggtt

SEQ ID NO: 65226 - DNA, 15 bp, Homo sapiens
gaacgcattagtggt

SEQ ID NO: 65227 - DNA, 15 bp, Homo sapiens
ggaacgcattagtgg

SEQ ID NO: 65228 - DNA, 15 bp, Homo sapiens
aggaacgcattagtg

SEQ ID NO: 65229 - DNA, 15 bp, Homo sapiens
gaggaacgcattagt

SEQ ID NO: 65230 - DNA, 15 bp, Homo sapiens
cgaggaacgcattag

SEQ ID NO: 65231 - DNA, 15 bp, Homo sapiens
acgaggaacgcatta

SEQ ID NO: 65232 - DNA, 15 bp, Homo sapiens
aacgaggaacgcatt

SEQ ID NO: 65233 - DNA, 15 bp, Homo sapiens
aaacgaggaacgcat

SEQ ID NO: 65234 - DNA, 15 bp, Homo sapiens
aaaacgaggaacgca

SEQ ID NO: 65235 - DNA, 15 bp, Homo sapiens
aaaaacgaggaacgc

SEQ ID NO: 65236 - DNA, 15 bp, Homo sapiens
taaaaacgaggaacg

SEQ ID NO: 65237 - DNA, 15 bp, Homo sapiens
gtaaaaacgaggaac

SEQ ID NO: 65238 - DNA, 15 bp, Homo sapiens
tgtaaaaacgaggaa

SEQ ID NO: 65239 - DNA, 15 bp, Homo sapiens
ctgtaaaaacgagga

SEQ ID NO: 65240 - DNA, 15 bp, Homo sapiens
actgtaaaaacgagg

SEQ ID NO: 65241 - DNA, 15 bp, Homo sapiens
aactgtaaaaacgag

SEQ ID NO: 65242 - DNA, 15 bp, Homo sapiens
aaactgtaaaaacga

SEQ ID NO: 65243 - DNA, 15 bp, Homo sapiens
aaaactgtaaaaacg

SEQ ID NO: 65244 - DNA, 15 bp, Homo sapiens
taaaactgtaaaaac

SEQ ID NO: 65245 - DNA, 15 bp, Homo sapiens
ataaaactgtaaaaa

SEQ ID NO: 65246 - DNA, 15 bp, Homo sapiens
aataaaactgtaaaa

SEQ ID NO: 65247 - DNA, 15 bp, Homo sapiens
taataaaactgtaaa

SEQ ID NO: 65248 - DNA, 15 bp, Homo sapiens
ataataaaactgtaa

SEQ ID NO: 65249 - DNA, 15 bp, Homo sapiens
aataataaaactgta

SEQ ID NO: 65250 - DNA, 15 bp, Homo sapiens
aaataataaaactgt

SEQ ID NO: 65251 - DNA, 15 bp, Homo sapiens
gaaataataaaactg

SEQ ID NO: 65252 - DNA, 15 bp, Homo sapiens
agaaataataaaact

SEQ ID NO: 65253 - DNA, 15 bp, Homo sapiens
tagaaataataaaac

SEQ ID NO: 65254 - DNA, 15 bp, Homo sapiens
ctagaaataataaaa

SEQ ID NO: 65255 - DNA, 15 bp, Homo sapiens
tctagaaataataaa

SEQ ID NO: 65256 - DNA, 15 bp, Homo sapiens
ttctagaaataataa

SEQ ID NO: 65257 - DNA, 15 bp, Homo sapiens
attctagaaataata

SEQ ID NO: 65258 - DNA, 15 bp, Homo sapiens
cattctagaaataat

SEQ ID NO: 65259 - DNA, 15 bp, Homo sapiens
acattctagaaataa

SEQ ID NO: 65260 - DNA, 15 bp, Homo sapiens
aacattctagaaata

SEQ ID NO: 65261 - DNA, 15 bp, Homo sapiens
taacattctagaaat

SEQ ID NO: 65262 - DNA, 15 bp, Homo sapiens
gtaacattctagaaa

SEQ ID NO: 65263 - DNA, 15 bp, Homo sapiens
tgtaacattctagaa

SEQ ID NO: 65264 - DNA, 15 bp, Homo sapiens
atgtaacattctaga

SEQ ID NO: 65265 - DNA, 15 bp, Homo sapiens
tatgtaacattctag

SEQ ID NO: 65266 - DNA, 15 bp, Homo sapiens
ttatgtaacattcta

SEQ ID NO: 65267 - DNA, 15 bp, Homo sapiens
tttatgtaacattct

SEQ ID NO: 65268 - DNA, 15 bp, Homo sapiens
atttatgtaacattc

SEQ ID NO: 65269 - DNA, 15 bp, Homo sapiens
catttatgtaacatt

SEQ ID NO: 65270 - DNA, 15 bp, Homo sapiens
ccatttatgtaacat

SEQ ID NO: 65271 - DNA, 15 bp, Homo sapiens
tccatttatgtaaca

SEQ ID NO: 65272 - DNA, 15 bp, Homo sapiens
ttccatttatgtaac

SEQ ID NO: 65273 - DNA, 15 bp, Homo sapiens
gttccatttatgtaa

SEQ ID NO: 65274 - DNA, 15 bp, Homo sapiens
ggttccatttatgta

SEQ ID NO: 65275 - DNA, 15 bp, Homo sapiens
tggttccatttatgt

SEQ ID NO: 65276 - DNA, 15 bp, Homo sapiens
atggttccatttatg

SEQ ID NO: 65277 - DNA, 15 bp, Homo sapiens
tatggttccatttat

SEQ ID NO: 65278 - DNA, 15 bp, Homo sapiens
gtatggttccattta

SEQ ID NO: 65279 - DNA, 15 bp, Homo sapiens
tgtatggttccattt

SEQ ID NO: 65280 - DNA, 15 bp, Homo sapiens
ctgtatggttccatt

SEQ ID NO: 65281 - DNA, 15 bp, Homo sapiens
actgtatggttccat

SEQ ID NO: 65282 - DNA, 15 bp, Homo sapiens
tactgtatggttcca

SEQ ID NO: 65283 - DNA, 15 bp, Homo sapiens
ctactgtatggttcc

SEQ ID NO: 65284 - DNA, 15 bp, Homo sapiens
cctactgtatggttc

SEQ ID NO: 65285 - DNA, 15 bp, Homo sapiens
acctactgtatggtt

SEQ ID NO: 65286 - DNA, 15 bp, Homo sapiens
tacctactgtatggt

SEQ ID NO: 65287 - DNA, 15 bp, Homo sapiens
atacctactgtatgg

SEQ ID NO: 65288 - DNA, 15 bp, Homo sapiens
gatacctactgtatg

SEQ ID NO: 65289 - DNA, 15 bp, Homo sapiens
ggatacctactgtat

SEQ ID NO: 65290 - DNA, 15 bp, Homo sapiens
aggatacctactgta

SEQ ID NO: 65291 - DNA, 15 bp, Homo sapiens
aaggatacctactgt

SEQ ID NO: 65292 - DNA, 15 bp, Homo sapiens
aaaggatacctactg

SEQ ID NO: 65293 - DNA, 15 bp, Homo sapiens
aaaaggatacctact

SEQ ID NO: 65294 - DNA, 15 bp, Homo sapiens
caaaaggatacctac

SEQ ID NO: 65295 - DNA, 15 bp, Homo sapiens
tcaaaaggataccta

SEQ ID NO: 65296 - DNA, 15 bp, Homo sapiens
atcaaaaggatacct

SEQ ID NO: 65297 - DNA, 15 bp, Homo sapiens
tatcaaaaggatacc

SEQ ID NO: 65298 - DNA, 15 bp, Homo sapiens
gtatcaaaaggatac

SEQ ID NO: 65299 - DNA, 15 bp, Homo sapiens
agtatcaaaaggata

SEQ ID NO: 65300 - DNA, 15 bp, Homo sapiens
cagtatcaaaaggat

SEQ ID NO: 65301 - DNA, 15 bp, Homo sapiens
ccagtatcaaaagga

SEQ ID NO: 65302 - DNA, 15 bp, Homo sapiens
gccagtatcaaaagg

SEQ ID NO: 65303 - DNA, 15 bp, Homo sapiens
agccagtatcaaaag

SEQ ID NO: 65304 - DNA, 15 bp, Homo sapiens
aagccagtatcaaaa

SEQ ID NO: 65305 - DNA, 15 bp, Homo sapiens
aaagccagtatcaaa

SEQ ID NO: 65306 - DNA, 15 bp, Homo sapiens
aaaagccagtatcaa

SEQ ID NO: 65307 - DNA, 15 bp, Homo sapiens
aaaaagccagtatca

SEQ ID NO: 65308 - DNA, 15 bp, Homo sapiens
aaaaaagccagtatc

SEQ ID NO: 65309 - DNA, 15 bp, Homo sapiens
aaaaaaagccagtat

SEQ ID NO: 65310 - DNA, 15 bp, Homo sapiens
aaaaaaaagccagta

SEQ ID NO: 65311 - DNA, 15 bp, Homo sapiens
aaaaaaaaagccagt

SEQ ID NO: 65312 - DNA, 15 bp, Homo sapiens
aaaaaaaaaagccag

SEQ ID NO: 65313 - DNA, 15 bp, Homo sapiens
aaaaaaaaaaagcca

SEQ ID NO: 65314 - DNA, 15 bp, Homo sapiens
aaaaaaaaaaaagcc

SEQ ID NO: 65315 - DNA, 15 bp, Homo sapiens
gaaaaaaaaaaaaag

SEQ ID NO: 65316 - DNA, 15 bp, Homo sapiens
tgaaaaaaaaaaaaa

SEQ ID NO: 65317 - DNA, 15 bp, Homo sapiens
gtgaaaaaaaaaaaa

SEQ ID NO: 65318 - DNA, 15 bp, Homo sapiens
agtgaaaaaaaaaaa

SEQ ID NO: 65319 - DNA, 15 bp, Homo sapiens
gagtgaaaaaaaaaa

SEQ ID NO: 65320 - DNA, 15 bp, Homo sapiens
tgagtgaaaaaaaaa

SEQ ID NO: 65321 - DNA, 15 bp, Homo sapiens
ctgagtgaaaaaaaa

SEQ ID NO: 65322 - DNA, 15 bp, Homo sapiens
gctgagtgaaaaaaa

SEQ ID NO: 65323 - DNA, 15 bp, Homo sapiens
tgctgagtgaaaaaa

SEQ ID NO: 65324 - DNA, 15 bp, Homo sapiens
ctgctgagtgaaaaa

SEQ ID NO: 65325 - DNA, 15 bp, Homo sapiens
actgctgagtgaaaa

SEQ ID NO: 65326 - DNA, 15 bp, Homo sapiens
tactgctgagtgaaa

SEQ ID NO: 65327 - DNA, 15 bp, Homo sapiens
atactgctgagtgaa

SEQ ID NO: 65328 - DNA, 15 bp, Homo sapiens
aatactgctgagtga

SEQ ID NO: 65329 - DNA, 15 bp, Homo sapiens
gaatactgctgagtg

SEQ ID NO: 65330 - DNA, 15 bp, Homo sapiens
ggaatactgctgagt

SEQ ID NO: 65331 - DNA, 15 bp, Homo sapiens
gggaatactgctgag

SEQ ID NO: 65332 - DNA, 15 bp, Homo sapiens
agggaatactgctga

SEQ ID NO: 65333 - DNA, 15 bp, Homo sapiens
aagggaatactgctg

SEQ ID NO: 65334 - DNA, 15 bp, Homo sapiens
taagggaatactgct

SEQ ID NO: 65335 - DNA, 15 bp, Homo sapiens
ctaagggaatactgc

SEQ ID NO: 65336 - DNA, 15 bp, Homo sapiens
tctaagggaatactg

SEQ ID NO: 65337 - DNA, 15 bp, Homo sapiens
atctaagggaatact

SEQ ID NO: 65338 - DNA, 15 bp, Homo sapiens
gatctaagggaatac

SEQ ID NO: 65339 - DNA, 15 bp, Homo sapiens
agatctaagggaata

SEQ ID NO: 65340 - DNA, 15 bp, Homo sapiens
tagatctaagggaat

SEQ ID NO: 65341 - DNA, 15 bp, Homo sapiens
atagatctaagggaa

SEQ ID NO: 65342 - DNA, 15 bp, Homo sapiens
gatagatctaaggga

SEQ ID NO: 65343 - DNA, 15 bp, Homo sapiens
ggatagatctaaggg

SEQ ID NO: 65344 - DNA, 15 bp, Homo sapiens
tggatagatctaagg

SEQ ID NO: 65345 - DNA, 15 bp, Homo sapiens
ttggatagatctaag

SEQ ID NO: 65346 - DNA, 15 bp, Homo sapiens
cttggatagatctaa

SEQ ID NO: 65347 - DNA, 15 bp, Homo sapiens
acttggatagatcta

SEQ ID NO: 65348 - DNA, 15 bp, Homo sapiens
aacttggatagatct

SEQ ID NO: 65349 - DNA, 15 bp, Homo sapiens
caacttggatagatc

SEQ ID NO: 65350 - DNA, 15 bp, Homo sapiens
acaacttggatagat

SEQ ID NO: 65351 - DNA, 15 bp, Homo sapiens
cacaacttggataga

SEQ ID NO: 65352 - DNA, 15 bp, Homo sapiens
acacaacttggatag

SEQ ID NO: 65353 - DNA, 15 bp, Homo sapiens
cacacaacttggata

SEQ ID NO: 65354 - DNA, 15 bp, Homo sapiens
acacacaacttggat

SEQ ID NO: 65355 - DNA, 15 bp, Homo sapiens
cacacacaacttgga

SEQ ID NO: 65356 - DNA, 15 bp, Homo sapiens
acacacacaacttgg

SEQ ID NO: 65357 - DNA, 15 bp, Homo sapiens
gacacacacaacttg

SEQ ID NO: 65358 - DNA, 15 bp, Homo sapiens
tgacacacacaactt

SEQ ID NO: 65359 - DNA, 15 bp, Homo sapiens
ttgacacacacaact

SEQ ID NO: 65360 - DNA, 15 bp, Homo sapiens
gttgacacacacaac

SEQ ID NO: 65361 - DNA, 15 bp, Homo sapiens
tgttgacacacacaa

SEQ ID NO: 65362 - DNA, 15 bp, Homo sapiens
ctgttgacacacaca

SEQ ID NO: 65363 - DNA, 15 bp, Homo sapiens
actgttgacacacac

SEQ ID NO: 65364 - DNA, 15 bp, Homo sapiens
aactgttgacacaca

SEQ ID NO: 65365 - DNA, 15 bp, Homo sapiens
gaactgttgacacac

SEQ ID NO: 65366 - DNA, 15 bp, Homo sapiens
tgaactgttgacaca

SEQ ID NO: 65367 - DNA, 15 bp, Homo sapiens
atgaactgttgacac

SEQ ID NO: 65368 - DNA, 15 bp, Homo sapiens
aatgaactgttgaca

SEQ ID NO: 65369 - DNA, 15 bp, Homo sapiens
gaatgaactgttgac

SEQ ID NO: 65370 - DNA, 15 bp, Homo sapiens
ggaatgaactgttga

SEQ ID NO: 65371 - DNA, 15 bp, Homo sapiens
aggaatgaactgttg

SEQ ID NO: 65372 - DNA, 15 bp, Homo sapiens
gaggaatgaactgtt

SEQ ID NO: 65373 - DNA, 15 bp, Homo sapiens
agaggaatgaactgt

SEQ ID NO: 65374 - DNA, 15 bp, Homo sapiens
aagaggaatgaactg

SEQ ID NO: 65375 - DNA, 15 bp, Homo sapiens
gaagaggaatgaact

SEQ ID NO: 65376 - DNA, 15 bp, Homo sapiens
tgaagaggaatgaac

SEQ ID NO: 65377 - DNA, 15 bp, Homo sapiens
gtgaagaggaatgaa

SEQ ID NO: 65378 - DNA, 15 bp, Homo sapiens
agtgaagaggaatga

SEQ ID NO: 65379 - DNA, 15 bp, Homo sapiens
cagtgaagaggaatg

SEQ ID NO: 65380 - DNA, 15 bp, Homo sapiens
gcagtgaagaggaat

SEQ ID NO: 65381 - DNA, 15 bp, Homo sapiens
agcagtgaagaggaa

SEQ ID NO: 65382 - DNA, 15 bp, Homo sapiens
cagcagtgaagagga

SEQ ID NO: 65383 - DNA, 15 bp, Homo sapiens
tcagcagtgaagagg

SEQ ID NO: 65384 - DNA, 15 bp, Homo sapiens
ctcagcagtgaagag

SEQ ID NO: 65385 - DNA, 15 bp, Homo sapiens
actcagcagtgaaga

SEQ ID NO: 65386 - DNA, 15 bp, Homo sapiens
tactcagcagtgaag

SEQ ID NO: 65387 - DNA, 15 bp, Homo sapiens
ctactcagcagtgaa

SEQ ID NO: 65388 - DNA, 15 bp, Homo sapiens
actactcagcagtga

SEQ ID NO: 65389 - DNA, 15 bp, Homo sapiens
cactactcagcagtg

SEQ ID NO: 65390 - DNA, 15 bp, Homo sapiens
acactactcagcagt

SEQ ID NO: 65391 - DNA, 15 bp, Homo sapiens
aacactactcagcag

SEQ ID NO: 65392 - DNA, 15 bp, Homo sapiens
gaacactactcagca

SEQ ID NO: 65393 - DNA, 15 bp, Homo sapiens
ggaacactactcagc

SEQ ID NO: 65394 - DNA, 15 bp, Homo sapiens
gggaacactactcag

SEQ ID NO: 65395 - DNA, 15 bp, Homo sapiens
agggaacactactca

SEQ ID NO: 65396 - DNA, 15 bp, Homo sapiens
cagggaacactactc

SEQ ID NO: 65397 - DNA, 15 bp, Homo sapiens
ccagggaacactact

SEQ ID NO: 65398 - DNA, 15 bp, Homo sapiens
cccagggaacactac

SEQ ID NO: 65399 - DNA, 15 bp, Homo sapiens
tcccagggaacacta

SEQ ID NO: 65400 - DNA, 15 bp, Homo sapiens
ctcccagggaacact

SEQ ID NO: 65401 - DNA, 15 bp, Homo sapiens
cctcccagggaacac

SEQ ID NO: 65402 - DNA, 15 bp, Homo sapiens
ccctcccagggaaca

SEQ ID NO: 65403 - DNA, 15 bp, Homo sapiens
cccctcccagggaac

SEQ ID NO: 65404 - DNA, 15 bp, Homo sapiens
acccctcccagggaa

SEQ ID NO: 65405 - DNA, 15 bp, Homo sapiens
cacccctcccaggga

SEQ ID NO: 65406 - DNA, 15 bp, Homo sapiens
acacccctcccaggg

SEQ ID NO: 65407 - DNA, 15 bp, Homo sapiens
tacacccctcccagg

SEQ ID NO: 65408 - DNA, 15 bp, Homo sapiens
atacacccctcccag

SEQ ID NO: 65409 - DNA, 15 bp, Homo sapiens
gatacacccctccca

SEQ ID NO: 65410 - DNA, 15 bp, Homo sapiens
tgatacacccctccc

SEQ ID NO: 65411 - DNA, 15 bp, Homo sapiens
gtgatacacccctcc

SEQ ID NO: 65412 - DNA, 15 bp, Homo sapiens
tgtgatacacccctc

SEQ ID NO: 65413 - DNA, 15 bp, Homo sapiens
ctgtgatacacccct

SEQ ID NO: 65414 - DNA, 15 bp, Homo sapiens
actgtgatacacccc

SEQ ID NO: 65415 - DNA, 15 bp, Homo sapiens
aactgtgatacaccc

SEQ ID NO: 65416 - DNA, 15 bp, Homo sapiens
gaactgtgatacacc

SEQ ID NO: 65417 - DNA, 15 bp, Homo sapiens
ggaactgtgatacac

SEQ ID NO: 65418 - DNA, 15 bp, Homo sapiens
tggaactgtgataca

SEQ ID NO: 65419 - DNA, 15 bp, Homo sapiens
atggaactgtgatac

SEQ ID NO: 65420 - DNA, 15 bp, Homo sapiens
catggaactgtgata

SEQ ID NO: 65421 - DNA, 15 bp, Homo sapiens
ccatggaactgtgat

SEQ ID NO: 65422 - DNA, 15 bp, Homo sapiens
gccatggaactgtga

SEQ ID NO: 65423 - DNA, 15 bp, Homo sapiens
tgccatggaactgtg

SEQ ID NO: 65424 - DNA, 15 bp, Homo sapiens
atgccatggaactgt

SEQ ID NO: 65425 - DNA, 15 bp, Homo sapiens
aatgccatggaactg

SEQ ID NO: 65426 - DNA, 15 bp, Homo sapiens
aaatgccatggaact

SEQ ID NO: 65427 - DNA, 15 bp, Homo sapiens
aaaatgccatggaac

SEQ ID NO: 65428 - DNA, 15 bp, Homo sapiens
aaaaatgccatggaa

SEQ ID NO: 65429 - DNA, 15 bp, Homo sapiens
taaaaatgccatgga

SEQ ID NO: 65430 - DNA, 15 bp, Homo sapiens
ctaaaaatgccatgg

SEQ ID NO: 65431 - DNA, 15 bp, Homo sapiens
tctaaaaatgccatg

SEQ ID NO: 65432 - DNA, 15 bp, Homo sapiens
atctaaaaatgccat

SEQ ID NO: 65433 - DNA, 15 bp, Homo sapiens
catctaaaaatgcca

SEQ ID NO: 65434 - DNA, 15 bp, Homo sapiens
acatctaaaaatgcc

SEQ ID NO: 65435 - DNA, 15 bp, Homo sapiens
tacatctaaaaatgc

SEQ ID NO: 65436 - DNA, 15 bp, Homo sapiens
atacatctaaaaatg

SEQ ID NO: 65437 - DNA, 15 bp, Homo sapiens
aatacatctaaaaat

SEQ ID NO: 65438 - DNA, 15 bp, Homo sapiens
aaatacatctaaaaa

SEQ ID NO: 65439 - DNA, 15 bp, Homo sapiens
aaaatacatctaaaa

SEQ ID NO: 65440 - DNA, 15 bp, Homo sapiens
aaaaatacatctaaa

SEQ ID NO: 65441 - DNA, 15 bp, Homo sapiens
aaaaaatacatctaa

SEQ ID NO: 65442 - DNA, 15 bp, Homo sapiens
taaaaaatacatcta

SEQ ID NO: 65443 - DNA, 15 bp, Homo sapiens
ttaaaaaatacatct

SEQ ID NO: 65444 - DNA, 15 bp, Homo sapiens
tttaaaaaatacatc

SEQ ID NO: 65445 - DNA, 15 bp, Homo sapiens
gtttaaaaaatacat

SEQ ID NO: 65446 - DNA, 15 bp, Homo sapiens
tgtttaaaaaataca

SEQ ID NO: 65447 - DNA, 15 bp, Homo sapiens
ctgtttaaaaaatac

SEQ ID NO: 65448 - DNA, 15 bp, Homo sapiens
gctgtttaaaaaata

SEQ ID NO: 65449 - DNA, 15 bp, Homo sapiens
agctgtttaaaaaat

SEQ ID NO: 65450 - DNA, 15 bp, Homo sapiens
aagctgtttaaaaaa

SEQ ID NO: 65451 - DNA, 15 bp, Homo sapiens
aaagctgtttaaaaa

SEQ ID NO: 65452 - DNA, 15 bp, Homo sapiens
gaaagctgtttaaaa

SEQ ID NO: 65453 - DNA, 15 bp, Homo sapiens
tgaaagctgtttaaa

SEQ ID NO: 65454 - DNA, 15 bp, Homo sapiens
ctgaaagctgtttaa

SEQ ID NO: 65455 - DNA, 15 bp, Homo sapiens
gctgaaagctgttta

SEQ ID NO: 65456 - DNA, 15 bp, Homo sapiens
tgctgaaagctgttt

SEQ ID NO: 65457 - DNA, 15 bp, Homo sapiens
atgctgaaagctgtt

SEQ ID NO: 65458 - DNA, 15 bp, Homo sapiens
gatgctgaaagctgt

SEQ ID NO: 65459 - DNA, 15 bp, Homo sapiens
ggatgctgaaagctg

SEQ ID NO: 65460 - DNA, 15 bp, Homo sapiens
aggatgctgaaagct

SEQ ID NO: 65461 - DNA, 15 bp, Homo sapiens
gaggatgctgaaagc

SEQ ID NO: 65462 - DNA, 15 bp, Homo sapiens
agaggatgctgaaag

SEQ ID NO: 65463 - DNA, 15 bp, Homo sapiens
tagaggatgctgaaa

SEQ ID NO: 65464 - DNA, 15 bp, Homo sapiens
atagaggatgctgaa

SEQ ID NO: 65465 - DNA, 15 bp, Homo sapiens
aatagaggatgctga

SEQ ID NO: 65466 - DNA, 15 bp, Homo sapiens
aaatagaggatgctg

SEQ ID NO: 65467 - DNA, 15 bp, Homo sapiens
aaaatagaggatgct

SEQ ID NO: 65468 - DNA, 15 bp, Homo sapiens
taaaatagaggatgc

SEQ ID NO: 65469 - DNA, 15 bp, Homo sapiens
ttaaaatagaggatg

SEQ ID NO: 65470 - DNA, 15 bp, Homo sapiens
attaaaatagaggat

SEQ ID NO: 65471 - DNA, 15 bp, Homo sapiens
aattaaaatagagga

SEQ ID NO: 65472 - DNA, 15 bp, Homo sapiens
caattaaaatagagg

SEQ ID NO: 65473 - DNA, 15 bp, Homo sapiens
acaattaaaatagag

SEQ ID NO: 65474 - DNA, 15 bp, Homo sapiens
aacaattaaaataga

SEQ ID NO: 65475 - DNA, 15 bp, Homo sapiens
gaacaattaaaatag

SEQ ID NO: 65476 - DNA, 15 bp, Homo sapiens
tgaacaattaaaata

SEQ ID NO: 65477 - DNA, 15 bp, Homo sapiens
atgaacaattaaaat

SEQ ID NO: 65478 - DNA, 15 bp, Homo sapiens
gatgaacaattaaaa

SEQ ID NO: 65479 - DNA, 15 bp, Homo sapiens
tgatgaacaattaaa

SEQ ID NO: 65480 - DNA, 15 bp, Homo sapiens
ttgatgaacaattaa

SEQ ID NO: 65481 - DNA, 15 bp, Homo sapiens
cttgatgaacaatta

SEQ ID NO: 65482 - DNA, 15 bp, Homo sapiens
acttgatgaacaatt

SEQ ID NO: 65483 - DNA, 15 bp, Homo sapiens
gacttgatgaacaat

SEQ ID NO: 65484 - DNA, 15 bp, Homo sapiens
ggacttgatgaacaa

SEQ ID NO: 65485 - DNA, 15 bp, Homo sapiens
aggacttgatgaaca

SEQ ID NO: 65486 - DNA, 15 bp, Homo sapiens
aaggacttgatgaac

SEQ ID NO: 65487 - DNA, 15 bp, Homo sapiens
aaaggacttgatgaa

SEQ ID NO: 65488 - DNA, 15 bp, Homo sapiens
aaaaggacttgatga

SEQ ID NO: 65489 - DNA, 15 bp, Homo sapiens
aaaaaggacttgatg

SEQ ID NO: 65490 - DNA, 15 bp, Homo sapiens
gaaaaaggacttgat

SEQ ID NO: 65491 - DNA, 15 bp, Homo sapiens
ggaaaaaggacttga

SEQ ID NO: 65492 - DNA, 15 bp, Homo sapiens
gggaaaaaggacttg

SEQ ID NO: 65493 - DNA, 15 bp, Homo sapiens
tgggaaaaaggactt

SEQ ID NO: 65494 - DNA, 15 bp, Homo sapiens
ttgggaaaaaggact

SEQ ID NO: 65495 - DNA, 15 bp, Homo sapiens
attgggaaaaaggac

SEQ ID NO: 65496 - DNA, 15 bp, Homo sapiens
tattgggaaaaagga

SEQ ID NO: 65497 - DNA, 15 bp, Homo sapiens
ctattgggaaaaagg

SEQ ID NO: 65498 - DNA, 15 bp, Homo sapiens
tctattgggaaaaag

SEQ ID NO: 65499 - DNA, 15 bp, Homo sapiens
gtctattgggaaaaa

SEQ ID NO: 65500 - DNA, 15 bp, Homo sapiens
agtctattgggaaaa

SEQ ID NO: 65501 - DNA, 15 bp, Homo sapiens
gagtctattgggaaa

SEQ ID NO: 65502 - DNA, 15 bp, Homo sapiens
agagtctattgggaa

SEQ ID NO: 65503 - DNA, 15 bp, Homo sapiens
cagagtctattggga

SEQ ID NO: 65504 - DNA, 15 bp, Homo sapiens
tcagagtctattggg

SEQ ID NO: 65505 - DNA, 15 bp, Homo sapiens
ttcagagtctattgg

SEQ ID NO: 65506 - DNA, 15 bp, Homo sapiens
attcagagtctattg

SEQ ID NO: 65507 - DNA, 15 bp, Homo sapiens
cattcagagtctatt

SEQ ID NO: 65508 - DNA, 15 bp, Homo sapiens
gcattcagagtctat

SEQ ID NO: 65509 - DNA, 15 bp, Homo sapiens
agcattcagagtcta

SEQ ID NO: 65510 - DNA, 15 bp, Homo sapiens
gagcattcagagtct

SEQ ID NO: 65511 - DNA, 15 bp, Homo sapiens
ggagcattcagagtc

SEQ ID NO: 65512 - DNA, 15 bp, Homo sapiens
aggagcattcagagt

SEQ ID NO: 65513 - DNA, 15 bp, Homo sapiens
aaggagcattcagag

SEQ ID NO: 65514 - DNA, 15 bp, Homo sapiens
aaaggagcattcaga

SEQ ID NO: 65515 - DNA, 15 bp, Homo sapiens
taaaggagcattcag

SEQ ID NO: 65516 - DNA, 15 bp, Homo sapiens
ataaaggagcattca

SEQ ID NO: 65517 - DNA, 15 bp, Homo sapiens
gataaaggagcattc

SEQ ID NO: 65518 - DNA, 15 bp, Homo sapiens
tgataaaggagcatt

SEQ ID NO: 65519 - DNA, 15 bp, Homo sapiens
atgataaaggagcat

SEQ ID NO: 65520 - DNA, 15 bp, Homo sapiens
gatgataaaggagca

SEQ ID NO: 65521 - DNA, 15 bp, Homo sapiens
cgatgataaaggagc

SEQ ID NO: 65522 - DNA, 15 bp, Homo sapiens
acgatgataaaggag

SEQ ID NO: 65523 - DNA, 15 bp, Homo sapiens
tacgatgataaagga

SEQ ID NO: 65524 - DNA, 15 bp, Homo sapiens
atacgatgataaagg

SEQ ID NO: 65525 - DNA, 15 bp, Homo sapiens
aatacgatgataaag

SEQ ID NO: 65526 - DNA, 15 bp, Homo sapiens
gaatacgatgataaa

SEQ ID NO: 65527 - DNA, 15 bp, Homo sapiens
ggaatacgatgataa

SEQ ID NO: 65528 - DNA, 15 bp, Homo sapiens
gggaatacgatgata

SEQ ID NO: 65529 - DNA, 15 bp, Homo sapiens
tgggaatacgatgat

SEQ ID NO: 65530 - DNA, 15 bp, Homo sapiens
atgggaatacgatga

SEQ ID NO: 65531 - DNA, 15 bp, Homo sapiens
gatgggaatacgatg

SEQ ID NO: 65532 - DNA, 15 bp, Homo sapiens
tgatgggaatacgat

SEQ ID NO: 65533 - DNA, 15 bp, Homo sapiens
gtgatgggaatacga

SEQ ID NO: 65534 - DNA, 15 bp, Homo sapiens
ggtgatgggaatacg

SEQ ID NO: 65535 - DNA, 15 bp, Homo sapiens
tggtgatgggaatac

SEQ ID NO: 65536 - DNA, 15 bp, Homo sapiens
ttggtgatgggaata

SEQ ID NO: 65537 - DNA, 15 bp, Homo sapiens
gttggtgatgggaat

SEQ ID NO: 65538 - DNA, 15 bp, Homo sapiens
tgttggtgatgggaa

SEQ ID NO: 65539 - DNA, 15 bp, Homo sapiens
atgttggtgatggga

SEQ ID NO: 65540 - DNA, 15 bp, Homo sapiens
gatgttggtgatggg

SEQ ID NO: 65541 - DNA, 15 bp, Homo sapiens
tgatgttggtgatgg

SEQ ID NO: 65542 - DNA, 15 bp, Homo sapiens
ctgatgttggtgatg

SEQ ID NO: 65543 - DNA, 15 bp, Homo sapiens
actgatgttggtgat

SEQ ID NO: 65544 - DNA, 15 bp, Homo sapiens
tactgatgttggtga

SEQ ID NO: 65545 - DNA, 15 bp, Homo sapiens
gtactgatgttggtg

SEQ ID NO: 65546 - DNA, 15 bp, Homo sapiens
ggtactgatgttggt

SEQ ID NO: 65547 - DNA, 15 bp, Homo sapiens
gggtactgatgttgg

SEQ ID NO: 65548 - DNA, 15 bp, Homo sapiens
tgggtactgatgttg

SEQ ID NO: 65549 - DNA, 15 bp, Homo sapiens
ttgggtactgatgtt

SEQ ID NO: 65550 - DNA, 15 bp, Homo sapiens
tttgggtactgatgt

SEQ ID NO: 65551 - DNA, 15 bp, Homo sapiens
atttgggtactgatg

SEQ ID NO: 65552 - DNA, 15 bp, Homo sapiens
tatttgggtactgat

SEQ ID NO: 65553 - DNA, 15 bp, Homo sapiens
ctatttgggtactga

SEQ ID NO: 65554 - DNA, 15 bp, Homo sapiens
cctatttgggtactg

SEQ ID NO: 65555 - DNA, 15 bp, Homo sapiens
gcctatttgggtact

SEQ ID NO: 65556 - DNA, 15 bp, Homo sapiens
ggcctatttgggtac

SEQ ID NO: 65557 - DNA, 15 bp, Homo sapiens
gggcctatttgggta

SEQ ID NO: 65558 - DNA, 15 bp, Homo sapiens
agggcctatttgggt

SEQ ID NO: 65559 - DNA, 15 bp, Homo sapiens
tagggcctatttggg

SEQ ID NO: 65560 - DNA, 15 bp, Homo sapiens
ttagggcctatttgg

SEQ ID NO: 65561 - DNA, 15 bp, Homo sapiens
tttagggcctatttg

SEQ ID NO: 65562 - DNA, 15 bp, Homo sapiens
atttagggcctattt

SEQ ID NO: 65563 - DNA, 15 bp, Homo sapiens
tatttagggcctatt

SEQ ID NO: 65564 - DNA, 15 bp, Homo sapiens
ttatttagggcctat

SEQ ID NO: 65565 - DNA, 15 bp, Homo sapiens
tttatttagggccta

SEQ ID NO: 65566 - DNA, 15 bp, Homo sapiens
gtttatttagggcct

SEQ ID NO: 65567 - DNA, 15 bp, Homo sapiens
atgtttatttagggc

SEQ ID NO: 65568 - DNA, 15 bp, Homo sapiens
aatgtttatttaggg

SEQ ID NO: 65569 - DNA, 15 bp, Homo sapiens
aaatgtttatttagg

SEQ ID NO: 65570 - DNA, 15 bp, Homo sapiens
taaatgtttatttag

SEQ ID NO: 65571 - DNA, 15 bp, Homo sapiens
ataaatgtttattta

SEQ ID NO: 65572 - DNA, 15 bp, Homo sapiens
tataaatgtttattt

SEQ ID NO: 65573 - DNA, 15 bp, Homo sapiens
ctataaatgtttatt

SEQ ID NO: 65574 - DNA, 15 bp, Homo sapiens
gctataaatgtttat

SEQ ID NO: 65575 - DNA, 15 bp, Homo sapiens
ggctataaatgttta

SEQ ID NO: 65576 - DNA, 15 bp, Homo sapiens
aggctataaatgttt

SEQ ID NO: 65577 - DNA, 15 bp, Homo sapiens
gaggctataaatgtt

SEQ ID NO: 65578 - DNA, 15 bp, Homo sapiens
ggaggctataaatgt

SEQ ID NO: 65579 - DNA, 15 bp, Homo sapiens
aggaggctataaatg

SEQ ID NO: 65580 - DNA, 15 bp, Homo sapiens
caggaggctataaat

SEQ ID NO: 65581 - DNA, 15 bp, Homo sapiens
gcaggaggctataaa

SEQ ID NO: 65582 - DNA, 15 bp, Homo sapiens
ggcaggaggctataa

SEQ ID NO: 65583 - DNA, 15 bp, Homo sapiens
aggcaggaggctata

SEQ ID NO: 65584 - DNA, 15 bp, Homo sapiens
caggcaggaggctat

SEQ ID NO: 65585 - DNA, 15 bp, Homo sapiens
gcaggcaggaggcta

SEQ ID NO: 65586 - DNA, 15 bp, Homo sapiens
ggcaggcaggaggct

SEQ ID NO: 65587 - DNA, 15 bp, Homo sapiens
aggcaggcaggaggc

SEQ ID NO: 65588 - DNA, 15 bp, Homo sapiens
caggcaggcaggagg

SEQ ID NO: 65589 - DNA, 15 bp, Homo sapiens
tcaggcaggcaggag

SEQ ID NO: 65590 - DNA, 15 bp, Homo sapiens
ctcaggcaggcagga

SEQ ID NO: 65591 - DNA, 15 bp, Homo sapiens
tctcaggcaggcagg

SEQ ID NO: 65592 - DNA, 15 bp, Homo sapiens
ttctcaggcaggcag

SEQ ID NO: 65593 - DNA, 15 bp, Homo sapiens
tttctcaggcaggca

SEQ ID NO: 65594 - DNA, 15 bp, Homo sapiens
gtttctcaggcaggc

SEQ ID NO: 65595 - DNA, 15 bp, Homo sapiens
ggtttctcaggcagg

SEQ ID NO: 65596 - DNA, 15 bp, Homo sapiens
tggtttctcaggcag

SEQ ID NO: 65597 - DNA, 15 bp, Homo sapiens
ctggtttctcaggca

SEQ ID NO: 65598 - DNA, 15 bp, Homo sapiens
cctggtttctcaggc

SEQ ID NO: 65599 - DNA, 15 bp, Homo sapiens
ccctggtttctcagg

SEQ ID NO: 65600 - DNA, 15 bp, Homo sapiens
accctggtttctcag

SEQ ID NO: 65601 - DNA, 15 bp, Homo sapiens
caccctggtttctca

SEQ ID NO: 65602 - DNA, 15 bp, Homo sapiens
ccaccctggtttctc

SEQ ID NO: 65603 - DNA, 15 bp, Homo sapiens
tccaccctggtttct

SEQ ID NO: 65604 - DNA, 15 bp, Homo sapiens
gtccaccctggtttc

SEQ ID NO: 65605 - DNA, 15 bp, Homo sapiens
tgtccaccctggttt

SEQ ID NO: 65606 - DNA, 15 bp, Homo sapiens
atgtccaccctggtt

SEQ ID NO: 65607 - DNA, 15 bp, Homo sapiens
catgtccaccctggt

SEQ ID NO: 65608 - DNA, 15 bp, Homo sapiens
ccatgtccaccctgg

SEQ ID NO: 65609 - DNA, 15 bp, Homo sapiens
tccatgtccaccctg

SEQ ID NO: 65610 - DNA, 15 bp, Homo sapiens
ctccatgtccaccct

SEQ ID NO: 65611 - DNA, 15 bp, Homo sapiens
tctccatgtccaccc

SEQ ID NO: 65612 - DNA, 15 bp, Homo sapiens
ctctccatgtccacc

SEQ ID NO: 65613 - DNA, 15 bp, Homo sapiens
tctctccatgtccac

SEQ ID NO: 65614 - DNA, 15 bp, Homo sapiens
ttctctccatgtcca

SEQ ID NO: 65615 - DNA, 15 bp, Homo sapiens
cttctctccatgtcc

SEQ ID NO: 65616 - DNA, 15 bp, Homo sapiens
ccttctctccatgtc

SEQ ID NO: 65617 - DNA, 15 bp, Homo sapiens
gccttctctccatgt

SEQ ID NO: 65618 - DNA, 15 bp, Homo sapiens
tgccttctctccatg

SEQ ID NO: 65619 - DNA, 15 bp, Homo sapiens
gtgccttctctccat

SEQ ID NO: 65620 - DNA, 15 bp, Homo sapiens
agtgccttctctcca

SEQ ID NO: 65621 - DNA, 15 bp, Homo sapiens
aagtgccttctctcc

SEQ ID NO: 65622 - DNA, 15 bp, Homo sapiens
gaagtgccttctctc

SEQ ID NO: 65623 - DNA, 15 bp, Homo sapiens
agaagtgccttctct

SEQ ID NO: 65624 - DNA, 15 bp, Homo sapiens
cagaagtgccttctc

SEQ ID NO: 65625 - DNA, 15 bp, Homo sapiens
tcagaagtgccttct

SEQ ID NO: 65626 - DNA, 15 bp, Homo sapiens
ttcagaagtgccttc

SEQ ID NO: 65627 - DNA, 15 bp, Homo sapiens
tttcagaagtgcctt

SEQ ID NO: 65628 - DNA, 15 bp, Homo sapiens
ctttcagaagtgcct

SEQ ID NO: 65629 - DNA, 15 bp, Homo sapiens
actttcagaagtgcc

SEQ ID NO: 65630 - DNA, 15 bp, Homo sapiens
aactttcagaagtgc

SEQ ID NO: 65631 - DNA, 15 bp, Homo sapiens
gaactttcagaagtg

SEQ ID NO: 65632 - DNA, 15 bp, Homo sapiens
tgaactttcagaagt

SEQ ID NO: 65633 - DNA, 15 bp, Homo sapiens
ttgaactttcagaag

SEQ ID NO: 65634 - DNA, 15 bp, Homo sapiens
cttgaactttcagaa

SEQ ID NO: 65635 - DNA, 15 bp, Homo sapiens
gcttgaactttcaga

SEQ ID NO: 65636 - DNA, 15 bp, Homo sapiens
cgcttgaactttcag

SEQ ID NO: 65637 - DNA, 15 bp, Homo sapiens
gcgcttgaactttca

SEQ ID NO: 65638 - DNA, 15 bp, Homo sapiens
tgcgcttgaactttc

SEQ ID NO: 65639 - DNA, 15 bp, Homo sapiens
ctgcgcttgaacttt

SEQ ID NO: 65640 - DNA, 15 bp, Homo sapiens
actgcgcttgaactt

SEQ ID NO: 65641 - DNA, 15 bp, Homo sapiens
cactgcgcttgaact

SEQ ID NO: 65642 - DNA, 15 bp, Homo sapiens
gcactgcgcttgaac

SEQ ID NO: 65643 - DNA, 15 bp, Homo sapiens
ggcactgcgcttgaa

SEQ ID NO: 65644 - DNA, 15 bp, Homo sapiens
gggcactgcgcttga

SEQ ID NO: 65645 - DNA, 15 bp, Homo sapiens
agggcactgcgcttg

SEQ ID NO: 65646 - DNA, 15 bp, Homo sapiens
cagggcactgcgctt

SEQ ID NO: 65647 - DNA, 15 bp, Homo sapiens
acagggcactgcgct

SEQ ID NO: 65648 - DNA, 15 bp, Homo sapiens
cacagggcactgcgc

SEQ ID NO: 65649 - DNA, 15 bp, Homo sapiens
acacagggcactgcg

SEQ ID NO: 65650 - DNA, 15 bp, Homo sapiens
gacacagggcactgc

SEQ ID NO: 65651 - DNA, 15 bp, Homo sapiens
ggacacagggcactg

SEQ ID NO: 65652 - DNA, 15 bp, Homo sapiens
aggacacagggcact

SEQ ID NO: 65653 - DNA, 15 bp, Homo sapiens
aaggacacagggcac

SEQ ID NO: 65654 - DNA, 15 bp, Homo sapiens
taaggacacagggca

SEQ ID NO: 65655 - DNA, 15 bp, Homo sapiens
gtaaggacacagggc

SEQ ID NO: 65656 - DNA, 15 bp, Homo sapiens
tgtaaggacacaggg

SEQ ID NO: 65657 - DNA, 15 bp, Homo sapiens
gtgtaaggacacagg

SEQ ID NO: 65658 - DNA, 15 bp, Homo sapiens
agtgtaaggacacag

SEQ ID NO: 65659 - DNA, 15 bp, Homo sapiens
gagtgtaaggacaca

SEQ ID NO: 65660 - DNA, 15 bp, Homo sapiens
ggagtgtaaggacac

SEQ ID NO: 65661 - DNA, 15 bp, Homo sapiens
tggagtgtaaggaca

SEQ ID NO: 65662 - DNA, 15 bp, Homo sapiens
gtggagtgtaaggac

SEQ ID NO: 65663 - DNA, 15 bp, Homo sapiens
agtggagtgtaagga

SEQ ID NO: 65664 - DNA, 15 bp, Homo sapiens
gagtggagtgtaagg

SEQ ID NO: 65665 - DNA, 15 bp, Homo sapiens
ggagtggagtgtaag

SEQ ID NO: 65666 - DNA, 15 bp, Homo sapiens
aggagtggagtgtaa

SEQ ID NO: 65667 - DNA, 15 bp, Homo sapiens
gaggagtggagtgta

SEQ ID NO: 65668 - DNA, 15 bp, Homo sapiens
tgaggagtggagtgt

SEQ ID NO: 65669 - DNA, 15 bp, Homo sapiens
ctgaggagtggagtg

SEQ ID NO: 65670 - DNA, 15 bp, Homo sapiens
actgaggagtggagt

SEQ ID NO: 65671 - DNA, 15 bp, Homo sapiens
cactgaggagtggag

SEQ ID NO: 65672 - DNA, 15 bp, Homo sapiens
gcactgaggagtgga

SEQ ID NO: 65673 - DNA, 15 bp, Homo sapiens
agcactgaggagtgg

SEQ ID NO: 65674 - DNA, 15 bp, Homo sapiens
aagcactgaggagtg

SEQ ID NO: 65675 - DNA, 15 bp, Homo sapiens
aaagcactgaggagt

SEQ ID NO: 65676 - DNA, 15 bp, Homo sapiens
gaaagcactgaggag

SEQ ID NO: 65677 - DNA, 15 bp, Homo sapiens
agaaagcactgagga

SEQ ID NO: 65678 - DNA, 15 bp, Homo sapiens
cagaaagcactgagg

SEQ ID NO: 65679 - DNA, 15 bp, Homo sapiens
acagaaagcactgag

SEQ ID NO: 65680 - DNA, 15 bp, Homo sapiens
cacagaaagcactga

SEQ ID NO: 65681 - DNA, 15 bp, Homo sapiens
ccacagaaagcactg

SEQ ID NO: 65682 - DNA, 15 bp, Homo sapiens
cccacagaaagcact

SEQ ID NO: 65683 - DNA, 15 bp, Homo sapiens
acccacagaaagcac

SEQ ID NO: 65684 - DNA, 15 bp, Homo sapiens
aacccacagaaagca

SEQ ID NO: 65685 - DNA, 15 bp, Homo sapiens
gaacccacagaaagc

SEQ ID NO: 65686 - DNA, 15 bp, Homo sapiens
tgaacccacagaaag

SEQ ID NO: 65687 - DNA, 15 bp, Homo sapiens
atgaacccacagaaa

SEQ ID NO: 65688 - DNA, 15 bp, Homo sapiens
aatgaacccacagaa

SEQ ID NO: 65689 - DNA, 15 bp, Homo sapiens
aaatgaacccacaga

SEQ ID NO: 65690 - DNA, 15 bp, Homo sapiens
gaaatgaacccacag

SEQ ID NO: 65691 - DNA, 15 bp, Homo sapiens
agaaatgaacccaca

SEQ ID NO: 65692 - DNA, 15 bp, Homo sapiens
cagaaatgaacccac

SEQ ID NO: 65693 - DNA, 15 bp, Homo sapiens
acagaaatgaaccca

SEQ ID NO: 65694 - DNA, 15 bp, Homo sapiens
gacagaaatgaaccc

SEQ ID NO: 65695 - DNA, 15 bp, Homo sapiens
agacagaaatgaacc

SEQ ID NO: 65696 - DNA, 15 bp, Homo sapiens
aagacagaaatgaac

SEQ ID NO: 65697 - DNA, 15 bp, Homo sapiens
gaagacagaaatgaa

SEQ ID NO: 65698 - DNA, 15 bp, Homo sapiens
agaagacagaaatga

SEQ ID NO: 65699 - DNA, 15 bp, Homo sapiens
gagaagacagaaatg

SEQ ID NO: 65700 - DNA, 15 bp, Homo sapiens
agagaagacagaaat

SEQ ID NO: 65701 - DNA, 15 bp, Homo sapiens
gagagaagacagaaa

SEQ ID NO: 65702 - DNA, 15 bp, Homo sapiens
ggagagaagacagaa

SEQ ID NO: 65703 - DNA, 15 bp, Homo sapiens
aggagagaagacaga

SEQ ID NO: 65704 - DNA, 15 bp, Homo sapiens
caggagagaagacag

SEQ ID NO: 65705 - DNA, 15 bp, Homo sapiens
acaggagagaagaca

SEQ ID NO: 65706 - DNA, 15 bp, Homo sapiens
gacaggagagaagac

SEQ ID NO: 65707 - DNA, 15 bp, Homo sapiens
tgacaggagagaaga

SEQ ID NO: 65708 - DNA, 15 bp, Homo sapiens
gtgacaggagagaag

SEQ ID NO: 65709 - DNA, 15 bp, Homo sapiens
tgtgacaggagagaa

SEQ ID NO: 65710 - DNA, 15 bp, Homo sapiens
ctgtgacaggagaga

SEQ ID NO: 65711 - DNA, 15 bp, Homo sapiens
actgtgacaggagag

SEQ ID NO: 65712 - DNA, 15 bp, Homo sapiens
gactgtgacaggaga

SEQ ID NO: 65713 - DNA, 15 bp, Homo sapiens
agactgtgacaggag

SEQ ID NO: 65714 - DNA, 15 bp, Homo sapiens
cagactgtgacagga

SEQ ID NO: 65715 - DNA, 15 bp, Homo sapiens
gcagactgtgacagg

SEQ ID NO: 65716 - DNA, 15 bp, Homo sapiens
tgcagactgtgacag

SEQ ID NO: 65717 - DNA, 15 bp, Homo sapiens
atgcagactgtgaca

SEQ ID NO: 65718 - DNA, 15 bp, Homo sapiens
catgcagactgtgac

SEQ ID NO: 65719 - DNA, 15 bp, Homo sapiens
ccatgcagactgtga

SEQ ID NO: 65720 - DNA, 15 bp, Homo sapiens
tccatgcagactgtg

SEQ ID NO: 65721 - DNA, 15 bp, Homo sapiens
ctccatgcagactgt

SEQ ID NO: 65722 - DNA, 15 bp, Homo sapiens
cctccatgcagactg

SEQ ID NO: 65723 - DNA, 15 bp, Homo sapiens
tcctccatgcagact

SEQ ID NO: 65724 - DNA, 15 bp, Homo sapiens
ctcctccatgcagac

SEQ ID NO: 65725 - DNA, 15 bp, Homo sapiens
cctcctccatgcaga

SEQ ID NO: 65726 - DNA, 15 bp, Homo sapiens
tcctcctccatgcag

SEQ ID NO: 65727 - DNA, 15 bp, Homo sapiens
ttcctcctccatgca

SEQ ID NO: 65728 - DNA, 15 bp, Homo sapiens
gttcctcctccatgc

SEQ ID NO: 65729 - DNA, 15 bp, Homo sapiens
ggttcctcctccatg

SEQ ID NO: 65730 - DNA, 15 bp, Homo sapiens
gggttcctcctccat

SEQ ID NO: 65731 - DNA, 15 bp, Homo sapiens
tgggttcctcctcca

SEQ ID NO: 65732 - DNA, 15 bp, Homo sapiens
gtgggttcctcctcc

SEQ ID NO: 65733 - DNA, 15 bp, Homo sapiens
ggtgggttcctcctc

SEQ ID NO: 65734 - DNA, 15 bp, Homo sapiens
gggtgggttcctcct

SEQ ID NO: 65735 - DNA, 15 bp, Homo sapiens
tgggtgggttcctcc

SEQ ID NO: 65736 - DNA, 15 bp, Homo sapiens
gtgggtgggttcctc

SEQ ID NO: 65737 - DNA, 15 bp, Homo sapiens
agtgggtgggttcct

SEQ ID NO: 65738 - DNA, 15 bp, Homo sapiens
aagtgggtgggttcc

SEQ ID NO: 65739 - DNA, 15 bp, Homo sapiens
caagtgggtgggttc

SEQ ID NO: 65740 - DNA, 15 bp, Homo sapiens
tcaagtgggtgggtt

SEQ ID NO: 65741 - DNA, 15 bp, Homo sapiens
ttcaagtgggtgggt

SEQ ID NO: 65742 - DNA, 15 bp, Homo sapiens
cttcaagtgggtggg

SEQ ID NO: 65743 - DNA, 15 bp, Homo sapiens
gcttcaagtgggtgg

SEQ ID NO: 65744 - DNA, 15 bp, Homo sapiens
agcttcaagtgggtg

SEQ ID NO: 65745 - DNA, 15 bp, Homo sapiens
cagcttcaagtgggt

SEQ ID NO: 65746 - DNA, 15 bp, Homo sapiens
ccagcttcaagtggg

SEQ ID NO: 65747 - DNA, 15 bp, Homo sapiens
cccagcttcaagtgg

SEQ ID NO: 65748 - DNA, 15 bp, Homo sapiens
gcccagcttcaagtg

SEQ ID NO: 65749 - DNA, 15 bp, Homo sapiens
cgcccagcttcaagt

SEQ ID NO: 65750 - DNA, 15 bp, Homo sapiens
acgcccagcttcaag

SEQ ID NO: 65751 - DNA, 15 bp, Homo sapiens
cacgcccagcttcaa

SEQ ID NO: 65752 - DNA, 15 bp, Homo sapiens
acacgcccagcttca

SEQ ID NO: 65753 - DNA, 15 bp, Homo sapiens
gacacgcccagcttc

SEQ ID NO: 65754 - DNA, 15 bp, Homo sapiens
ggacacgcccagctt

SEQ ID NO: 65755 - DNA, 15 bp, Homo sapiens
tggacacgcccagct

SEQ ID NO: 65756 - DNA, 15 bp, Homo sapiens
atggacacgcccagc

SEQ ID NO: 65757 - DNA, 15 bp, Homo sapiens
aatggacacgcccag

SEQ ID NO: 65758 - DNA, 15 bp, Homo sapiens
gaatggacacgccca

SEQ ID NO: 65759 - DNA, 15 bp, Homo sapiens
tgaatggacacgccc

SEQ ID NO: 65760 - DNA, 15 bp, Homo sapiens
ctgaatggacacgcc

SEQ ID NO: 65761 - DNA, 15 bp, Homo sapiens
tctgaatggacacgc

SEQ ID NO: 65762 - DNA, 15 bp, Homo sapiens
ttctgaatggacacg

SEQ ID NO: 65763 - DNA, 15 bp, Homo sapiens
gttctgaatggacac

SEQ ID NO: 65764 - DNA, 15 bp, Homo sapiens
ggttctgaatggaca

SEQ ID NO: 65765 - DNA, 15 bp, Homo sapiens
aggttctgaatggac

SEQ ID NO: 65766 - DNA, 15 bp, Homo sapiens
caggttctgaatgga

SEQ ID NO: 65767 - DNA, 15 bp, Homo sapiens
ccaggttctgaatgg

SEQ ID NO: 65768 - DNA, 15 bp, Homo sapiens
accaggttctgaatg

SEQ ID NO: 65769 - DNA, 15 bp, Homo sapiens
taccaggttctgaat

SEQ ID NO: 65770 - DNA, 15 bp, Homo sapiens
ttaccaggttctgaa

SEQ ID NO: 65771 - DNA, 15 bp, Homo sapiens
tttaccaggttctga

SEQ ID NO: 65772 - DNA, 15 bp, Homo sapiens
ttttaccaggttctg

SEQ ID NO: 65773 - DNA, 15 bp, Homo sapiens
cttttaccaggttct

SEQ ID NO: 65774 - DNA, 15 bp, Homo sapiens
acttttaccaggttc

SEQ ID NO: 65775 - DNA, 15 bp, Homo sapiens
gacttttaccaggtt

SEQ ID NO: 65776 - DNA, 15 bp, Homo sapiens
agacttttaccaggt

SEQ ID NO: 65777 - DNA, 15 bp, Homo sapiens
tagacttttaccagg

SEQ ID NO: 65778 - DNA, 15 bp, Homo sapiens
gtagacttttaccag

SEQ ID NO: 65779 - DNA, 15 bp, Homo sapiens
ggtagacttttacca

SEQ ID NO: 65780 - DNA, 15 bp, Homo sapiens
cggtagacttttacc

SEQ ID NO: 65781 - DNA, 15 bp, Homo sapiens
tcggtagacttttac

SEQ ID NO: 65782 - DNA, 15 bp, Homo sapiens
ctcggtagactttta

SEQ ID NO: 65783 - DNA, 15 bp, Homo sapiens
tctcggtagactttt

SEQ ID NO: 65784 - DNA, 15 bp, Homo sapiens
atctcggtagacttt

SEQ ID NO: 65785 - DNA, 15 bp, Homo sapiens
catctcggtagactt

SEQ ID NO: 65786 - DNA, 15 bp, Homo sapiens
ccatctcggtagact

SEQ ID NO: 65787 - DNA, 15 bp, Homo sapiens
cccatctcggtagac

SEQ ID NO: 65788 - DNA, 15 bp, Homo sapiens
tcccatctcggtaga

SEQ ID NO: 65789 - DNA, 15 bp, Homo sapiens
atcccatctcggtag

SEQ ID NO: 65790 - DNA, 15 bp, Homo sapiens
catcccatctcggta

SEQ ID NO: 65791 - DNA, 15 bp, Homo sapiens
tcatcccatctcggt

SEQ ID NO: 65792 - DNA, 15 bp, Homo sapiens
ttcatcccatctcgg

SEQ ID NO: 65793 - DNA, 15 bp, Homo sapiens
cttcatcccatctcg

SEQ ID NO: 65794 - DNA, 15 bp, Homo sapiens
ccttcatcccatctc

SEQ ID NO: 65795 - DNA, 15 bp, Homo sapiens
accttcatcccatct

SEQ ID NO: 65796 - DNA, 15 bp, Homo sapiens
caccttcatcccatc

SEQ ID NO: 65797 - DNA, 15 bp, Homo sapiens
ccaccttcatcccat

SEQ ID NO: 65798 - DNA, 15 bp, Homo sapiens
gccaccttcatccca

SEQ ID NO: 65799 - DNA, 15 bp, Homo sapiens
agccaccttcatccc

SEQ ID NO: 65800 - DNA, 15 bp, Homo sapiens
cagccaccttcatcc

SEQ ID NO: 65801 - DNA, 15 bp, Homo sapiens
acagccaccttcatc

SEQ ID NO: 65802 - DNA, 15 bp, Homo sapiens
gacagccaccttcat

SEQ ID NO: 65803 - DNA, 15 bp, Homo sapiens
cgacagccaccttca

SEQ ID NO: 65804 - DNA, 15 bp, Homo sapiens
tcgacagccaccttc

SEQ ID NO: 65805 - DNA, 15 bp, Homo sapiens
atcgacagccacctt

SEQ ID NO: 65806 - DNA, 15 bp, Homo sapiens
catcgacagccacct

SEQ ID NO: 65807 - DNA, 15 bp, Homo sapiens
ccatcgacagccacc

SEQ ID NO: 65808 - DNA, 15 bp, Homo sapiens
gccatcgacagccac

SEQ ID NO: 65809 - DNA, 15 bp, Homo sapiens
ggccatcgacagcca

SEQ ID NO: 65810 - DNA, 15 bp, Homo sapiens
aggccatcgacagcc

SEQ ID NO: 65811 - DNA, 15 bp, Homo sapiens
caggccatcgacagc

SEQ ID NO: 65812 - DNA, 15 bp, Homo sapiens
ccaggccatcgacag

SEQ ID NO: 65813 - DNA, 15 bp, Homo sapiens
gccaggccatcgaca

SEQ ID NO: 65814 - DNA, 15 bp, Homo sapiens
tgccaggccatcgac

SEQ ID NO: 65815 - DNA, 15 bp, Homo sapiens
gtgccaggccatcga

SEQ ID NO: 65816 - DNA, 15 bp, Homo sapiens
agtgccaggccatcg

SEQ ID NO: 65817 - DNA, 15 bp, Homo sapiens
cagtgccaggccatc

SEQ ID NO: 65818 - DNA, 15 bp, Homo sapiens
tcagtgccaggccat

SEQ ID NO: 65819 - DNA, 15 bp, Homo sapiens
ttcagtgccaggcca

SEQ ID NO: 65820 - DNA, 15 bp, Homo sapiens
attcagtgccaggcc

SEQ ID NO: 65821 - DNA, 15 bp, Homo sapiens
aattcagtgccaggc

SEQ ID NO: 65822 - DNA, 15 bp, Homo sapiens
aaattcagtgccagg

SEQ ID NO: 65823 - DNA, 15 bp, Homo sapiens
aaaattcagtgccag

SEQ ID NO: 65824 - DNA, 15 bp, Homo sapiens
aaaaattcagtgcca

SEQ ID NO: 65825 - DNA, 15 bp, Homo sapiens
taaaaattcagtgcc

SEQ ID NO: 65826 - DNA, 15 bp, Homo sapiens
ataaaaattcagtgc

SEQ ID NO: 65827 - DNA, 15 bp, Homo sapiens
cataaaaattcagtg

SEQ ID NO: 65828 - DNA, 15 bp, Homo sapiens
tcataaaaattcagt

SEQ ID NO: 65829 - DNA, 15 bp, Homo sapiens
ctcataaaaattcag

SEQ ID NO: 65830 - DNA, 15 bp, Homo sapiens
cctcataaaaattca

SEQ ID NO: 65831 - DNA, 15 bp, Homo sapiens
ccctcataaaaattc

SEQ ID NO: 65832 - DNA, 15 bp, Homo sapiens
gccctcataaaaatt

SEQ ID NO: 65833 - DNA, 15 bp, Homo sapiens
ggccctcataaaaat

SEQ ID NO: 65834 - DNA, 15 bp, Homo sapiens
tggccctcataaaaa

SEQ ID NO: 65835 - DNA, 15 bp, Homo sapiens
ctggccctcataaaa

SEQ ID NO: 65836 - DNA, 15 bp, Homo sapiens
tctggccctcataaa

SEQ ID NO: 65837 - DNA, 15 bp, Homo sapiens
atctggccctcataa

SEQ ID NO: 65838 - DNA, 15 bp, Homo sapiens
gatctggccctcata

SEQ ID NO: 65839 - DNA, 15 bp, Homo sapiens
tgatctggccctcat

SEQ ID NO: 65840 - DNA, 15 bp, Homo sapiens
gtgatctggccctca

SEQ ID NO: 65841 - DNA, 15 bp, Homo sapiens
ggtgatctggccctc

SEQ ID NO: 65842 - DNA, 15 bp, Homo sapiens
aggtgatctggccct

SEQ ID NO: 65843 - DNA, 15 bp, Homo sapiens
gaggtgatctggccc

SEQ ID NO: 65844 - DNA, 15 bp, Homo sapiens
ggaggtgatctggcc

SEQ ID NO: 65845 - DNA, 15 bp, Homo sapiens
aggaggtgatctggc

SEQ ID NO: 65846 - DNA, 15 bp, Homo sapiens
aaggaggtgatctgg

SEQ ID NO: 65847 - DNA, 15 bp, Homo sapiens
gaaggaggtgatctg

SEQ ID NO: 65848 - DNA, 15 bp, Homo sapiens
ggaaggaggtgatct

SEQ ID NO: 65849 - DNA, 15 bp, Homo sapiens
aggaaggaggtgatc

SEQ ID NO: 65850 - DNA, 15 bp, Homo sapiens
caggaaggaggtgat

SEQ ID NO: 65851 - DNA, 15 bp, Homo sapiens
ccaggaaggaggtga

SEQ ID NO: 65852 - DNA, 15 bp, Homo sapiens
cccaggaaggaggtg

SEQ ID NO: 65853 - DNA, 15 bp, Homo sapiens
gcccaggaaggaggt

SEQ ID NO: 65854 - DNA, 15 bp, Homo sapiens
ggcccaggaaggagg

SEQ ID NO: 65855 - DNA, 15 bp, Homo sapiens
tggcccaggaaggag

SEQ ID NO: 65856 - DNA, 15 bp, Homo sapiens
gtggcccaggaagga

SEQ ID NO: 65857 - DNA, 15 bp, Homo sapiens
tgtggcccaggaagg

SEQ ID NO: 65858 - DNA, 15 bp, Homo sapiens
ttgtggcccaggaag

SEQ ID NO: 65859 - DNA, 15 bp, Homo sapiens
attgtggcccaggaa

SEQ ID NO: 65860 - DNA, 15 bp, Homo sapiens
cattgtggcccagga

SEQ ID NO: 65861 - DNA, 15 bp, Homo sapiens
ccattgtggcccagg

SEQ ID NO: 65862 - DNA, 15 bp, Homo sapiens
tccattgtggcccag

SEQ ID NO: 65863 - DNA, 15 bp, Homo sapiens
ctccattgtggccca

SEQ ID NO: 65864 - DNA, 15 bp, Homo sapiens
gctccattgtggccc

SEQ ID NO: 65865 - DNA, 15 bp, Homo sapiens
cgctccattgtggcc

SEQ ID NO: 65866 - DNA, 15 bp, Homo sapiens
ccgctccattgtggc

SEQ ID NO: 65867 - DNA, 15 bp, Homo sapiens
cccgctccattgtgg

SEQ ID NO: 65868 - DNA, 15 bp, Homo sapiens
ccccgctccattgtg

SEQ ID NO: 65869 - DNA, 15 bp, Homo sapiens
tccccgctccattgt

SEQ ID NO: 65870 - DNA, 15 bp, Homo sapiens
ttccccgctccattg

SEQ ID NO: 65871 - DNA, 15 bp, Homo sapiens
cttccccgctccatt

SEQ ID NO: 65872 - DNA, 15 bp, Homo sapiens
tcttccccgctccat

SEQ ID NO: 65873 - DNA, 15 bp, Homo sapiens
gtcttccccgctcca

SEQ ID NO: 65874 - DNA, 15 bp, Homo sapiens
cgtcttccccgctcc

SEQ ID NO: 65875 - DNA, 15 bp, Homo sapiens
tcgtcttccccgctc

SEQ ID NO: 65876 - DNA, 15 bp, Homo sapiens
gtcgtcttccccgct

SEQ ID NO: 65877 - DNA, 15 bp, Homo sapiens
ggtcgtcttccccgc

SEQ ID NO: 65878 - DNA, 15 bp, Homo sapiens
tggtcgtcttccccg

SEQ ID NO: 65879 - DNA, 15 bp, Homo sapiens
gtggtcgtcttcccc

SEQ ID NO: 65880 - DNA, 15 bp, Homo sapiens
ggtggtcgtcttccc

SEQ ID NO: 65881 - DNA, 15 bp, Homo sapiens
tggtggtcgtcttcc

SEQ ID NO: 65882 - DNA, 15 bp, Homo sapiens
atggtggtcgtcttc

SEQ ID NO: 65883 - DNA, 15 bp, Homo sapiens
catggtggtcgtctt

SEQ ID NO: 65884 - DNA, 15 bp, Homo sapiens
acatggtggtcgtct

SEQ ID NO: 65885 - DNA, 15 bp, Homo sapiens
tacatggtggtcgtc

SEQ ID NO: 65886 - DNA, 15 bp, Homo sapiens
ttacatggtggtcgt

SEQ ID NO: 65887 - DNA, 15 bp, Homo sapiens
cttacatggtggtcg

SEQ ID NO: 65888 - DNA, 15 bp, Homo sapiens
tcttacatggtggtc

SEQ ID NO: 65889 - DNA, 15 bp, Homo sapiens
ttcttacatggtggt

SEQ ID NO: 65890 - DNA, 15 bp, Homo sapiens
cttcttacatggtgg

SEQ ID NO: 65891 - DNA, 15 bp, Homo sapiens
tcttcttacatggtg

SEQ ID NO: 65892 - DNA, 15 bp, Homo sapiens
ctcttcttacatggt

SEQ ID NO: 65893 - DNA, 15 bp, Homo sapiens
cctcttcttacatgg

SEQ ID NO: 65894 - DNA, 15 bp, Homo sapiens
ccctcttcttacatg

SEQ ID NO: 65895 - DNA, 15 bp, Homo sapiens
accctcttcttacat

SEQ ID NO: 65896 - DNA, 15 bp, Homo sapiens
caccctcttcttaca

SEQ ID NO: 65897 - DNA, 15 bp, Homo sapiens
acaccctcttcttac

SEQ ID NO: 65898 - DNA, 15 bp, Homo sapiens
cacaccctcttctta

SEQ ID NO: 65899 - DNA, 15 bp, Homo sapiens
ccacaccctcttctt

SEQ ID NO: 65900 - DNA, 15 bp, Homo sapiens
accacaccctcttct

SEQ ID NO: 65901 - DNA, 15 bp, Homo sapiens
aaccacaccctcttc

SEQ ID NO: 65902 - DNA, 15 bp, Homo sapiens
gaaccacaccctctt

SEQ ID NO: 65903 - DNA, 15 bp, Homo sapiens
ggaaccacaccctct

SEQ ID NO: 65904 - DNA, 15 bp, Homo sapiens
gggaaccacaccctc

SEQ ID NO: 65905 - DNA, 15 bp, Homo sapiens
cgggaaccacaccct

SEQ ID NO: 65906 - DNA, 15 bp, Homo sapiens
gcgggaaccacaccc

SEQ ID NO: 65907 - DNA, 15 bp, Homo sapiens
tgcgggaaccacacc

SEQ ID NO: 65908 - DNA, 15 bp, Homo sapiens
ctgcgggaaccacac

SEQ ID NO: 65909 - DNA, 15 bp, Homo sapiens
tctgcgggaaccaca

SEQ ID NO: 65910 - DNA, 15 bp, Homo sapiens
ttctgcgggaaccac

SEQ ID NO: 65911 - DNA, 15 bp, Homo sapiens
attctgcgggaacca

SEQ ID NO: 65912 - DNA, 15 bp, Homo sapiens
gattctgcgggaacc

SEQ ID NO: 65913 - DNA, 15 bp, Homo sapiens
tgattctgcgggaac

SEQ ID NO: 65914 - DNA, 15 bp, Homo sapiens
ctgattctgcgggaa

SEQ ID NO: 65915 - DNA, 15 bp, Homo sapiens
gctgattctgcggga

SEQ ID NO: 65916 - DNA, 15 bp, Homo sapiens
ggctgattctgcggg

SEQ ID NO: 65917 - DNA, 15 bp, Homo sapiens
tggctgattctgcgg

SEQ ID NO: 65918 - DNA, 15 bp, Homo sapiens
gtggctgattctgcg

SEQ ID NO: 65919 - DNA, 15 bp, Homo sapiens
tgtggctgattctgc

SEQ ID NO: 65920 - DNA, 15 bp, Homo sapiens
ctgtggctgattctg

SEQ ID NO: 65921 - DNA, 15 bp, Homo sapiens
cctgtggctgattct

SEQ ID NO: 65922 - DNA, 15 bp, Homo sapiens
tcctgtggctgattc

SEQ ID NO: 65923 - DNA, 15 bp, Homo sapiens
ctcctgtggctgatt

SEQ ID NO: 65924 - DNA, 15 bp, Homo sapiens
cctcctgtggctgat

SEQ ID NO: 65925 - DNA, 15 bp, Homo sapiens
ccctcctgtggctga

SEQ ID NO: 65926 - DNA, 15 bp, Homo sapiens
accctcctgtggctg

SEQ ID NO: 65927 - DNA, 15 bp, Homo sapiens
aaccctcctgtggct

SEQ ID NO: 65928 - DNA, 15 bp, Homo sapiens
gaaccctcctgtggc

SEQ ID NO: 65929 - DNA, 15 bp, Homo sapiens
agaaccctcctgtgg

SEQ ID NO: 65930 - DNA, 15 bp, Homo sapiens
cagaaccctcctgtg

SEQ ID NO: 65931 - DNA, 15 bp, Homo sapiens
gcagaaccctcctgt

SEQ ID NO: 65932 - DNA, 15 bp, Homo sapiens
tgcagaaccctcctg

SEQ ID NO: 65933 - DNA, 15 bp, Homo sapiens
ctgcagaaccctcct

SEQ ID NO: 65934 - DNA, 15 bp, Homo sapiens
actgcagaaccctcc

SEQ ID NO: 65935 - DNA, 15 bp, Homo sapiens
tactgcagaaccctc

SEQ ID NO: 65936 - DNA, 15 bp, Homo sapiens
ctactgcagaaccct

SEQ ID NO: 65937 - DNA, 15 bp, Homo sapiens
tctactgcagaaccc

SEQ ID NO: 65938 - DNA, 15 bp, Homo sapiens
ctctactgcagaacc

SEQ ID NO: 65939 - DNA, 15 bp, Homo sapiens
actctactgcagaac

SEQ ID NO: 65940 - DNA, 15 bp, Homo sapiens
aactctactgcagaa

SEQ ID NO: 65941 - DNA, 15 bp, Homo sapiens
taactctactgcaga

SEQ ID NO: 65942 - DNA, 15 bp, Homo sapiens
ctaactctactgcag

SEQ ID NO: 65943 - DNA, 15 bp, Homo sapiens
tctaactctactgca

SEQ ID NO: 65944 - DNA, 15 bp, Homo sapiens
ttctaactctactgc

SEQ ID NO: 65945 - DNA, 15 bp, Homo sapiens
tttctaactctactg

SEQ ID NO: 65946 - DNA, 15 bp, Homo sapiens
atttctaactctact

SEQ ID NO: 65947 - DNA, 15 bp, Homo sapiens
aatttctaactctac

SEQ ID NO: 65948 - DNA, 15 bp, Homo sapiens
aaatttctaactcta

SEQ ID NO: 65949 - DNA, 15 bp, Homo sapiens
taaatttctaactct

SEQ ID NO: 65950 - DNA, 15 bp, Homo sapiens
ataaatttctaactc

SEQ ID NO: 65951 - DNA, 15 bp, Homo sapiens
tataaatttctaact

SEQ ID NO: 65952 - DNA, 15 bp, Homo sapiens
gtataaatttctaac

SEQ ID NO: 65953 - DNA, 15 bp, Homo sapiens
ggtataaatttctaa

SEQ ID NO: 65954 - DNA, 15 bp, Homo sapiens
aggtataaatttcta

SEQ ID NO: 65955 - DNA, 15 bp, Homo sapiens
aaggtataaatttct

SEQ ID NO: 65956 - DNA, 15 bp, Homo sapiens
taaggtataaatttc

SEQ ID NO: 65957 - DNA, 15 bp, Homo sapiens
ctaaggtataaattt

SEQ ID NO: 65958 - DNA, 15 bp, Homo sapiens
cctaaggtataaatt

SEQ ID NO: 65959 - DNA, 15 bp, Homo sapiens
tcctaaggtataaat

SEQ ID NO: 65960 - DNA, 15 bp, Homo sapiens
ttcctaaggtataaa

SEQ ID NO: 65961 - DNA, 15 bp, Homo sapiens
tttcctaaggtataa

SEQ ID NO: 65962 - DNA, 15 bp, Homo sapiens
gtttcctaaggtata

SEQ ID NO: 65963 - DNA, 15 bp, Homo sapiens
ggtttcctaaggtat

SEQ ID NO: 65964 - DNA, 15 bp, Homo sapiens
tggtttcctaaggta

SEQ ID NO: 65965 - DNA, 15 bp, Homo sapiens
atggtttcctaaggt

SEQ ID NO: 65966 - DNA, 15 bp, Homo sapiens
catggtttcctaagg

SEQ ID NO: 65967 - DNA, 15 bp, Homo sapiens
gcatggtttcctaag

SEQ ID NO: 65968 - DNA, 15 bp, Homo sapiens
agcatggtttcctaa

SEQ ID NO: 65969 - DNA, 15 bp, Homo sapiens
cagcatggtttccta

SEQ ID NO: 65970 - DNA, 15 bp, Homo sapiens
tcagcatggtttcct

SEQ ID NO: 65971 - DNA, 15 bp, Homo sapiens
atcagcatggtttcc

SEQ ID NO: 65972 - DNA, 15 bp, Homo sapiens
gatcagcatggtttc

SEQ ID NO: 65973 - DNA, 15 bp, Homo sapiens
ggatcagcatggttt

SEQ ID NO: 65974 - DNA, 15 bp, Homo sapiens
gggatcagcatggtt

SEQ ID NO: 65975 - DNA, 15 bp, Homo sapiens
agggatcagcatggt

SEQ ID NO: 65976 - DNA, 15 bp, Homo sapiens
cagggatcagcatgg

SEQ ID NO: 65977 - DNA, 15 bp, Homo sapiens
ccagggatcagcatg

SEQ ID NO: 65978 - DNA, 15 bp, Homo sapiens
cccagggatcagcat

SEQ ID NO: 65979 - DNA, 15 bp, Homo sapiens
gcccagggatcagca

SEQ ID NO: 65980 - DNA, 15 bp, Homo sapiens
ggcccagggatcagc

SEQ ID NO: 65981 - DNA, 15 bp, Homo sapiens
tggcccagggatcag

SEQ ID NO: 65982 - DNA, 15 bp, Homo sapiens
ttggcccagggatca

SEQ ID NO: 65983 - DNA, 15 bp, Homo sapiens
cttggcccagggatc

SEQ ID NO: 65984 - DNA, 15 bp, Homo sapiens
ccttggcccagggat

SEQ ID NO: 65985 - DNA, 15 bp, Homo sapiens
cccttggcccaggga

SEQ ID NO: 65986 - DNA, 15 bp, Homo sapiens
tcccttggcccaggg

SEQ ID NO: 65987 - DNA, 15 bp, Homo sapiens
ttcccttggcccagg

SEQ ID NO: 65988 - DNA, 15 bp, Homo sapiens
cttcccttggcccag

SEQ ID NO: 65989 - DNA, 15 bp, Homo sapiens
ccttcccttggccca

SEQ ID NO: 65990 - DNA, 15 bp, Homo sapiens
tccttcccttggccc

SEQ ID NO: 65991 - DNA, 15 bp, Homo sapiens
ctccttcccttggcc

SEQ ID NO: 65992 - DNA, 15 bp, Homo sapiens
gctccttcccttggc

SEQ ID NO: 65993 - DNA, 15 bp, Homo sapiens
tgctccttcccttgg

SEQ ID NO: 65994 - DNA, 15 bp, Homo sapiens
gtgctccttcccttg

SEQ ID NO: 65995 - DNA, 15 bp, Homo sapiens
tgtgctccttccctt

SEQ ID NO: 65996 - DNA, 15 bp, Homo sapiens
atgtgctccttccct

SEQ ID NO: 65997 - DNA, 15 bp, Homo sapiens
catgtgctccttccc

SEQ ID NO: 65998 - DNA, 15 bp, Homo sapiens
tcatgtgctccttcc

SEQ ID NO: 65999 - DNA, 15 bp, Homo sapiens
ctcatgtgctccttc

SEQ ID NO: 66000 - DNA, 15 bp, Homo sapiens
cctcatgtgctcctt

SEQ ID NO: 66001 - DNA, 15 bp, Homo sapiens
tcctcatgtgctcct

SEQ ID NO: 66002 - DNA, 15 bp, Homo sapiens
ctcctcatgtgctcc

SEQ ID NO: 66003 - DNA, 15 bp, Homo sapiens
actcctcatgtgctc

SEQ ID NO: 66004 - DNA, 15 bp, Homo sapiens
aactcctcatgtgct

SEQ ID NO: 66005 - DNA, 15 bp, Homo sapiens
caactcctcatgtgc

SEQ ID NO: 66006 - DNA, 15 bp, Homo sapiens
gcaactcctcatgtg

SEQ ID NO: 66007 - DNA, 15 bp, Homo sapiens
ggcaactcctcatgt

SEQ ID NO: 66008 - DNA, 15 bp, Homo sapiens
cggcaactcctcatg

SEQ ID NO: 66009 - DNA, 15 bp, Homo sapiens
tcggcaactcctcat

SEQ ID NO: 66010 - DNA, 15 bp, Homo sapiens
ttcggcaactcctca

SEQ ID NO: 66011 - DNA, 15 bp, Homo sapiens
attcggcaactcctc

SEQ ID NO: 66012 - DNA, 15 bp, Homo sapiens
cattcggcaactcct

SEQ ID NO: 66013 - DNA, 15 bp, Homo sapiens
acattcggcaactcc

SEQ ID NO: 66014 - DNA, 15 bp, Homo sapiens
cacattcggcaactc

SEQ ID NO: 66015 - DNA, 15 bp, Homo sapiens
tcacattcggcaact

SEQ ID NO: 66016 - DNA, 15 bp, Homo sapiens
ttcacattcggcaac

SEQ ID NO: 66017 - DNA, 15 bp, Homo sapiens
gttcacattcggcaa

SEQ ID NO: 66018 - DNA, 15 bp, Homo sapiens
tgttcacattcggca

SEQ ID NO: 66019 - DNA, 15 bp, Homo sapiens
atgttcacattcggc

SEQ ID NO: 66020 - DNA, 15 bp, Homo sapiens
catgttcacattcgg

SEQ ID NO: 66021 - DNA, 15 bp, Homo sapiens
acatgttcacattcg

SEQ ID NO: 66022 - DNA, 15 bp, Homo sapiens
aacatgttcacattc

SEQ ID NO: 66023 - DNA, 15 bp, Homo sapiens
taacatgttcacatt

SEQ ID NO: 66024 - DNA, 15 bp, Homo sapiens
ataacatgttcacat

SEQ ID NO: 66025 - DNA, 15 bp, Homo sapiens
gataacatgttcaca

SEQ ID NO: 66026 - DNA, 15 bp, Homo sapiens
agataacatgttcac

SEQ ID NO: 66027 - DNA, 15 bp, Homo sapiens
tagataacatgttca

SEQ ID NO: 66028 - DNA, 15 bp, Homo sapiens
ttagataacatgttc

SEQ ID NO: 66029 - DNA, 15 bp, Homo sapiens
attagataacatgtt

SEQ ID NO: 66030 - DNA, 15 bp, Homo sapiens
gattagataacatgt

SEQ ID NO: 66031 - DNA, 15 bp, Homo sapiens
tgattagataacatg

SEQ ID NO: 66032 - DNA, 15 bp, Homo sapiens
atgattagataacat

SEQ ID NO: 66033 - DNA, 15 bp, Homo sapiens
catgattagataaca

SEQ ID NO: 66034 - DNA, 15 bp, Homo sapiens
tcatgattagataac

SEQ ID NO: 66035 - DNA, 15 bp, Homo sapiens
ctcatgattagataa

SEQ ID NO: 66036 - DNA, 15 bp, Homo sapiens
actcatgattagata

SEQ ID NO: 66037 - DNA, 15 bp, Homo sapiens
cactcatgattagat

SEQ ID NO: 66038 - DNA, 15 bp, Homo sapiens
acactcatgattaga

SEQ ID NO: 66039 - DNA, 15 bp, Homo sapiens
gacactcatgattag

SEQ ID NO: 66040 - DNA, 15 bp, Homo sapiens
agacactcatgatta

SEQ ID NO: 66041 - DNA, 15 bp, Homo sapiens
aagacactcatgatt

SEQ ID NO: 66042 - DNA, 15 bp, Homo sapiens
aaagacactcatgat

SEQ ID NO: 66043 - DNA, 15 bp, Homo sapiens
gaaagacactcatga

SEQ ID NO: 66044 - DNA, 15 bp, Homo sapiens
ggaaagacactcatg

SEQ ID NO: 66045 - DNA, 15 bp, Homo sapiens
tggaaagacactcat

SEQ ID NO: 66046 - DNA, 15 bp, Homo sapiens
gtggaaagacactca

SEQ ID NO: 66047 - DNA, 15 bp, Homo sapiens
cgtggaaagacactc

SEQ ID NO: 66048 - DNA, 15 bp, Homo sapiens
acgtggaaagacact

SEQ ID NO: 66049 - DNA, 15 bp, Homo sapiens
cacgtggaaagacac

SEQ ID NO: 66050 - DNA, 15 bp, Homo sapiens
gcacgtggaaagaca

SEQ ID NO: 66051 - DNA, 15 bp, Homo sapiens
agcacgtggaaagac

SEQ ID NO: 66052 - DNA, 15 bp, Homo sapiens
tagcacgtggaaaga

SEQ ID NO: 66053 - DNA, 15 bp, Homo sapiens
ctagcacgtggaaag

SEQ ID NO: 66054 - DNA, 15 bp, Homo sapiens
actagcacgtggaaa

SEQ ID NO: 66055 - DNA, 15 bp, Homo sapiens
aactagcacgtggaa

SEQ ID NO: 66056 - DNA, 15 bp, Homo sapiens
aaactagcacgtgga

SEQ ID NO: 66057 - DNA, 15 bp, Homo sapiens
caaactagcacgtgg

SEQ ID NO: 66058 - DNA, 15 bp, Homo sapiens
gcaaactagcacgtg

SEQ ID NO: 66059 - DNA, 15 bp, Homo sapiens
agcaaactagcacgt

SEQ ID NO: 66060 - DNA, 15 bp, Homo sapiens
tagcaaactagcacg

SEQ ID NO: 66061 - DNA, 15 bp, Homo sapiens
ctagcaaactagcac

SEQ ID NO: 66062 - DNA, 15 bp, Homo sapiens
tctagcaaactagca

SEQ ID NO: 66063 - DNA, 15 bp, Homo sapiens
atctagcaaactagc

SEQ ID NO: 66064 - DNA, 15 bp, Homo sapiens
catctagcaaactag

SEQ ID NO: 66065 - DNA, 15 bp, Homo sapiens
acatctagcaaacta

SEQ ID NO: 66066 - DNA, 15 bp, Homo sapiens
aacatctagcaaact

SEQ ID NO: 66067 - DNA, 15 bp, Homo sapiens
taacatctagcaaac

SEQ ID NO: 66068 - DNA, 15 bp, Homo sapiens
ataacatctagcaaa

SEQ ID NO: 66069 - DNA, 15 bp, Homo sapiens
aataacatctagcaa

SEQ ID NO: 66070 - DNA, 15 bp, Homo sapiens
aaataacatctagca

SEQ ID NO: 66071 - DNA, 15 bp, Homo sapiens
gaaataacatctagc

SEQ ID NO: 66072 - DNA, 15 bp, Homo sapiens
agaaataacatctag

SEQ ID NO: 66073 - DNA, 15 bp, Homo sapiens
aagaaataacatcta

SEQ ID NO: 66074 - DNA, 15 bp, Homo sapiens
gaagaaataacatct

SEQ ID NO: 66075 - DNA, 15 bp, Homo sapiens
tgaagaaataacatc

SEQ ID NO: 66076 - DNA, 15 bp, Homo sapiens
ctgaagaaataacat

SEQ ID NO: 66077 - DNA, 15 bp, Homo sapiens
gctgaagaaataaca

SEQ ID NO: 66078 - DNA, 15 bp, Homo sapiens
ggctgaagaaataac

SEQ ID NO: 66079 - DNA, 15 bp, Homo sapiens
aggctgaagaaataa

SEQ ID NO: 66080 - DNA, 15 bp, Homo sapiens
taggctgaagaaata

SEQ ID NO: 66081 - DNA, 15 bp, Homo sapiens
ttaggctgaagaaat

SEQ ID NO: 66082 - DNA, 15 bp, Homo sapiens
tttaggctgaagaaa

SEQ ID NO: 66083 - DNA, 15 bp, Homo sapiens
ttttaggctgaagaa

SEQ ID NO: 66084 - DNA, 15 bp, Homo sapiens
gttttaggctgaaga

SEQ ID NO: 66085 - DNA, 15 bp, Homo sapiens
tgttttaggctgaag

SEQ ID NO: 66086 - DNA, 15 bp, Homo sapiens
ttgttttaggctgaa

SEQ ID NO: 66087 - DNA, 15 bp, Homo sapiens
cttgttttaggctga

SEQ ID NO: 66088 - DNA, 15 bp, Homo sapiens
gcttgttttaggctg

SEQ ID NO: 66089 - DNA, 15 bp, Homo sapiens
agcttgttttaggct

SEQ ID NO: 66090 - DNA, 15 bp, Homo sapiens
cagcttgttttaggc

SEQ ID NO: 66091 - DNA, 15 bp, Homo sapiens
ccagcttgttttagg

SEQ ID NO: 66092 - DNA, 15 bp, Homo sapiens
cccagcttgttttag

SEQ ID NO: 66093 - DNA, 15 bp, Homo sapiens
ccccagcttgtttta

SEQ ID NO: 66094 - DNA, 15 bp, Homo sapiens
gccccagcttgtttt

SEQ ID NO: 66095 - DNA, 15 bp, Homo sapiens
ggccccagcttgttt

SEQ ID NO: 66096 - DNA, 15 bp, Homo sapiens
aggccccagcttgtt

SEQ ID NO: 66097 - DNA, 15 bp, Homo sapiens
gaggccccagcttgt

SEQ ID NO: 66098 - DNA, 15 bp, Homo sapiens
tgaggccccagcttg

SEQ ID NO: 66099 - DNA, 15 bp, Homo sapiens
ctgaggccccagctt

SEQ ID NO: 66100 - DNA, 15 bp, Homo sapiens
tctgaggccccagct

SEQ ID NO: 66101 - DNA, 15 bp, Homo sapiens
atctgaggccccagc

SEQ ID NO: 66102 - DNA, 15 bp, Homo sapiens
catctgaggccccag

SEQ ID NO: 66103 - DNA, 15 bp, Homo sapiens
tcatctgaggcccca

SEQ ID NO: 66104 - DNA, 15 bp, Homo sapiens
gtcatctgaggcccc

SEQ ID NO: 66105 - DNA, 15 bp, Homo sapiens
ggtcatctgaggccc

SEQ ID NO: 66106 - DNA, 15 bp, Homo sapiens
aggtcatctgaggcc

SEQ ID NO: 66107 - DNA, 15 bp, Homo sapiens
aaggtcatctgaggc

SEQ ID NO: 66108 - DNA, 15 bp, Homo sapiens
aaaggtcatctgagg

SEQ ID NO: 66109 - DNA, 15 bp, Homo sapiens
gaaaggtcatctgag

SEQ ID NO: 66110 - DNA, 15 bp, Homo sapiens
ggaaaggtcatctga

SEQ ID NO: 66111 - DNA, 15 bp, Homo sapiens
gggaaaggtcatctg

SEQ ID NO: 66112 - DNA, 15 bp, Homo sapiens
tgggaaaggtcatct

SEQ ID NO: 66113 - DNA, 15 bp, Homo sapiens
atgggaaaggtcatc

SEQ ID NO: 66114 - DNA, 15 bp, Homo sapiens
catgggaaaggtcat

SEQ ID NO: 66115 - DNA, 15 bp, Homo sapiens
acatgggaaaggtca

SEQ ID NO: 66116 - DNA, 15 bp, Homo sapiens
tacatgggaaaggtc

SEQ ID NO: 66117 - DNA, 15 bp, Homo sapiens
ctacatgggaaaggt

SEQ ID NO: 66118 - DNA, 15 bp, Homo sapiens
actacatgggaaagg

SEQ ID NO: 66119 - DNA, 15 bp, Homo sapiens
aactacatgggaaag

SEQ ID NO: 66120 - DNA, 15 bp, Homo sapiens
gaactacatgggaaa

SEQ ID NO: 66121 - DNA, 15 bp, Homo sapiens
tgaactacatgggaa

SEQ ID NO: 66122 - DNA, 15 bp, Homo sapiens
gtgaactacatggga

SEQ ID NO: 66123 - DNA, 15 bp, Homo sapiens
tgtgaactacatggg

SEQ ID NO: 66124 - DNA, 15 bp, Homo sapiens
ctgtgaactacatgg

SEQ ID NO: 66125 - DNA, 15 bp, Homo sapiens
tctgtgaactacatg

SEQ ID NO: 66126 - DNA, 15 bp, Homo sapiens
ttctgtgaactacat

SEQ ID NO: 66127 - DNA, 15 bp, Homo sapiens
attctgtgaactaca

SEQ ID NO: 66128 - DNA, 15 bp, Homo sapiens
aattctgtgaactac

SEQ ID NO: 66129 - DNA, 15 bp, Homo sapiens
gaattctgtgaacta

SEQ ID NO: 66130 - DNA, 15 bp, Homo sapiens
agaattctgtgaact

SEQ ID NO: 66131 - DNA, 15 bp, Homo sapiens
cagaattctgtgaac

SEQ ID NO: 66132 - DNA, 15 bp, Homo sapiens
gcagaattctgtgaa

SEQ ID NO: 66133 - DNA, 15 bp, Homo sapiens
tgcagaattctgtga

SEQ ID NO: 66134 - DNA, 15 bp, Homo sapiens
ctgcagaattctgtg

SEQ ID NO: 66135 - DNA, 15 bp, Homo sapiens
actgcagaattctgt

SEQ ID NO: 66136 - DNA, 15 bp, Homo sapiens
cactgcagaattctg

SEQ ID NO: 66137 - DNA, 15 bp, Homo sapiens
ccactgcagaattct

SEQ ID NO: 66138 - DNA, 15 bp, Homo sapiens
accactgcagaattc

SEQ ID NO: 66139 - DNA, 15 bp, Homo sapiens
gaccactgcagaatt

SEQ ID NO: 66140 - DNA, 15 bp, Homo sapiens
agaccactgcagaat

SEQ ID NO: 66141 - DNA, 15 bp, Homo sapiens
aagaccactgcagaa

SEQ ID NO: 66142 - DNA, 15 bp, Homo sapiens
caagaccactgcaga

SEQ ID NO: 66143 - DNA, 15 bp, Homo sapiens
ccaagaccactgcag

SEQ ID NO: 66144 - DNA, 15 bp, Homo sapiens
tccaagaccactgca

SEQ ID NO: 66145 - DNA, 15 bp, Homo sapiens
ttccaagaccactgc

SEQ ID NO: 66146 - DNA, 15 bp, Homo sapiens
gttccaagaccactg

SEQ ID NO: 66147 - DNA, 15 bp, Homo sapiens
ggttccaagaccact

SEQ ID NO: 66148 - DNA, 15 bp, Homo sapiens
aggttccaagaccac

SEQ ID NO: 66149 - DNA, 15 bp, Homo sapiens
caggttccaagacca

SEQ ID NO: 66150 - DNA, 15 bp, Homo sapiens
gcaggttccaagacc

SEQ ID NO: 66151 - DNA, 15 bp, Homo sapiens
tgcaggttccaagac

SEQ ID NO: 66152 - DNA, 15 bp, Homo sapiens
ctgcaggttccaaga

SEQ ID NO: 66153 - DNA, 15 bp, Homo sapiens
gctgcaggttccaag

SEQ ID NO: 66154 - DNA, 15 bp, Homo sapiens
ggctgcaggttccaa

SEQ ID NO: 66155 - DNA, 15 bp, Homo sapiens
tggctgcaggttcca

SEQ ID NO: 66156 - DNA, 15 bp, Homo sapiens
gtggctgcaggttcc

SEQ ID NO: 66157 - DNA, 15 bp, Homo sapiens
cgtggctgcaggttc

SEQ ID NO: 66158 - DNA, 15 bp, Homo sapiens
tcgtggctgcaggtt

SEQ ID NO: 66159 - DNA, 15 bp, Homo sapiens
ttcgtggctgcaggt

SEQ ID NO: 66160 - DNA, 15 bp, Homo sapiens
tttcgtggctgcagg

SEQ ID NO: 66161 - DNA, 15 bp, Homo sapiens
ttttcgtggctgcag

SEQ ID NO: 66162 - DNA, 15 bp, Homo sapiens
cttttcgtggctgca

SEQ ID NO: 66163 - DNA, 15 bp, Homo sapiens
tcttttcgtggctgc

SEQ ID NO: 66164 - DNA, 15 bp, Homo sapiens
atcttttcgtggctg

SEQ ID NO: 66165 - DNA, 15 bp, Homo sapiens
tatcttttcgtggct

SEQ ID NO: 66166 - DNA, 15 bp, Homo sapiens
ctatcttttcgtggc

SEQ ID NO: 66167 - DNA, 15 bp, Homo sapiens
tctatcttttcgtgg

SEQ ID NO: 66168 - DNA, 15 bp, Homo sapiens
atctatcttttcgtg

SEQ ID NO: 66169 - DNA, 15 bp, Homo sapiens
aatctatcttttcgt

SEQ ID NO: 66170 - DNA, 15 bp, Homo sapiens
taatctatcttttcg

SEQ ID NO: 66171 - DNA, 15 bp, Homo sapiens
gtaatctatcttttc

SEQ ID NO: 66172 - DNA, 15 bp, Homo sapiens
tgtaatctatctttt

SEQ ID NO: 66173 - DNA, 15 bp, Homo sapiens
atgtaatctatcttt

SEQ ID NO: 66174 - DNA, 15 bp, Homo sapiens
tatgtaatctatctt

SEQ ID NO: 66175 - DNA, 15 bp, Homo sapiens
atatgtaatctatct

SEQ ID NO: 66176 - DNA, 15 bp, Homo sapiens
catatgtaatctatc

SEQ ID NO: 66177 - DNA, 15 bp, Homo sapiens
acatatgtaatctat

SEQ ID NO: 66178 - DNA, 15 bp, Homo sapiens
aacatatgtaatcta

SEQ ID NO: 66179 - DNA, 15 bp, Homo sapiens
caacatatgtaatct

SEQ ID NO: 66180 - DNA, 15 bp, Homo sapiens
ccaacatatgtaatc

SEQ ID NO: 66181 - DNA, 15 bp, Homo sapiens
tccaacatatgtaat

SEQ ID NO: 66182 - DNA, 15 bp, Homo sapiens
ctccaacatatgtaa

SEQ ID NO: 66183 - DNA, 15 bp, Homo sapiens
cctccaacatatgta

SEQ ID NO: 66184 - DNA, 15 bp, Homo sapiens
ccctccaacatatgt

SEQ ID NO: 66185 - DNA, 15 bp, Homo sapiens
tccctccaacatatg

SEQ ID NO: 66186 - DNA, 15 bp, Homo sapiens
ctccctccaacatat

SEQ ID NO: 66187 - DNA, 15 bp, Homo sapiens
actccctccaacata

SEQ ID NO: 66188 - DNA, 15 bp, Homo sapiens
aactccctccaacat

SEQ ID NO: 66189 - DNA, 15 bp, Homo sapiens
caactccctccaaca

SEQ ID NO: 66190 - DNA, 15 bp, Homo sapiens
ccaactccctccaac

SEQ ID NO: 66191 - DNA, 15 bp, Homo sapiens
accaactccctccaa

SEQ ID NO: 66192 - DNA, 15 bp, Homo sapiens
taccaactccctcca

SEQ ID NO: 66193 - DNA, 15 bp, Homo sapiens
ttaccaactccctcc

SEQ ID NO: 66194 - DNA, 15 bp, Homo sapiens
attaccaactccctc

SEQ ID NO: 66195 - DNA, 15 bp, Homo sapiens
aattaccaactccct

SEQ ID NO: 66196 - DNA, 15 bp, Homo sapiens
gaattaccaactccc

SEQ ID NO: 66197 - DNA, 15 bp, Homo sapiens
ggaattaccaactcc

SEQ ID NO: 66198 - DNA, 15 bp, Homo sapiens
gggaattaccaactc

SEQ ID NO: 66199 - DNA, 15 bp, Homo sapiens
tgggaattaccaact

SEQ ID NO: 66200 - DNA, 15 bp, Homo sapiens
ctgggaattaccaac

SEQ ID NO: 66201 - DNA, 15 bp, Homo sapiens
cctgggaattaccaa

SEQ ID NO: 66202 - DNA, 15 bp, Homo sapiens
tcctgggaattacca

SEQ ID NO: 66203 - DNA, 15 bp, Homo sapiens
ttcctgggaattacc

SEQ ID NO: 66204 - DNA, 15 bp, Homo sapiens
gttcctgggaattac

SEQ ID NO: 66205 - DNA, 15 bp, Homo sapiens
agttcctgggaatta

SEQ ID NO: 66206 - DNA, 15 bp, Homo sapiens
gagttcctgggaatt

SEQ ID NO: 66207 - DNA, 15 bp, Homo sapiens
agagttcctgggaat

SEQ ID NO: 66208 - DNA, 15 bp, Homo sapiens
cagagttcctgggaa

SEQ ID NO: 66209 - DNA, 15 bp, Homo sapiens
acagagttcctggga

SEQ ID NO: 66210 - DNA, 15 bp, Homo sapiens
gacagagttcctggg

SEQ ID NO: 66211 - DNA, 15 bp, Homo sapiens
agacagagttcctgg

SEQ ID NO: 66212 - DNA, 15 bp, Homo sapiens
gagacagagttcctg

SEQ ID NO: 66213 - DNA, 15 bp, Homo sapiens
agagacagagttcct

SEQ ID NO: 66214 - DNA, 15 bp, Homo sapiens
tagagacagagttcc

SEQ ID NO: 66215 - DNA, 15 bp, Homo sapiens
ttagagacagagttc

SEQ ID NO: 66216 - DNA, 15 bp, Homo sapiens
cttagagacagagtt

SEQ ID NO: 66217 - DNA, 15 bp, Homo sapiens
gcttagagacagagt

SEQ ID NO: 66218 - DNA, 15 bp, Homo sapiens
tgcttagagacagag

SEQ ID NO: 66219 - DNA, 15 bp, Homo sapiens
ctgcttagagacaga

SEQ ID NO: 66220 - DNA, 15 bp, Homo sapiens
tctgcttagagacag

SEQ ID NO: 66221 - DNA, 15 bp, Homo sapiens
atctgcttagagaca

SEQ ID NO: 66222 - DNA, 15 bp, Homo sapiens
catctgcttagagac

SEQ ID NO: 66223 - DNA, 15 bp, Homo sapiens
acatctgcttagaga

SEQ ID NO: 66224 - DNA, 15 bp, Homo sapiens
cacatctgcttagag

SEQ ID NO: 66225 - DNA, 15 bp, Homo sapiens
tcacatctgcttaga

SEQ ID NO: 66226 - DNA, 15 bp, Homo sapiens
ctcacatctgcttag

SEQ ID NO: 66227 - DNA, 15 bp, Homo sapiens
tctcacatctgctta

SEQ ID NO: 66228 - DNA, 15 bp, Homo sapiens
ttctcacatctgctt

SEQ ID NO: 66229 - DNA, 15 bp, Homo sapiens
cttctcacatctgct

SEQ ID NO: 66230 - DNA, 15 bp, Homo sapiens
gcttctcacatctgc

SEQ ID NO: 66231 - DNA, 15 bp, Homo sapiens
tgcttctcacatctg

SEQ ID NO: 66232 - DNA, 15 bp, Homo sapiens
gtgcttctcacatct

SEQ ID NO: 66233 - DNA, 15 bp, Homo sapiens
ggtgcttctcacatc

SEQ ID NO: 66234 - DNA, 15 bp, Homo sapiens
aggtgcttctcacat

SEQ ID NO: 66235 - DNA, 15 bp, Homo sapiens
caggtgcttctcaca

SEQ ID NO: 66236 - DNA, 15 bp, Homo sapiens
acaggtgcttctcac

SEQ ID NO: 66237 - DNA, 15 bp, Homo sapiens
cacaggtgcttctca

SEQ ID NO: 66238 - DNA, 15 bp, Homo sapiens
tcacaggtgcttctc

SEQ ID NO: 66239 - DNA, 15 bp, Homo sapiens
ctcacaggtgcttct

SEQ ID NO: 66240 - DNA, 15 bp, Homo sapiens
tctcacaggtgcttc

SEQ ID NO: 66241 - DNA, 15 bp, Homo sapiens
gtctcacaggtgctt

SEQ ID NO: 66242 - DNA, 15 bp, Homo sapiens
cgtctcacaggtgct

SEQ ID NO: 66243 - DNA, 15 bp, Homo sapiens
gcgtctcacaggtgc

SEQ ID NO: 66244 - DNA, 15 bp, Homo sapiens
tgcgtctcacaggtg

SEQ ID NO: 66245 - DNA, 15 bp, Homo sapiens
ttgcgtctcacaggt

SEQ ID NO: 66246 - DNA, 15 bp, Homo sapiens
attgcgtctcacagg

SEQ ID NO: 66247 - DNA, 15 bp, Homo sapiens
gattgcgtctcacag

SEQ ID NO: 66248 - DNA, 15 bp, Homo sapiens
tgattgcgtctcaca

SEQ ID NO: 66249 - DNA, 15 bp, Homo sapiens
ttgattgcgtctcac

SEQ ID NO: 66250 - DNA, 15 bp, Homo sapiens
cttgattgcgtctca

SEQ ID NO: 66251 - DNA, 15 bp, Homo sapiens
gcttgattgcgtctc

SEQ ID NO: 66252 - DNA, 15 bp, Homo sapiens
agcttgattgcgtct

SEQ ID NO: 66253 - DNA, 15 bp, Homo sapiens
cagcttgattgcgtc

SEQ ID NO: 66254 - DNA, 15 bp, Homo sapiens
ccagcttgattgcgt

SEQ ID NO: 66255 - DNA, 15 bp, Homo sapiens
cccagcttgattgcg

SEQ ID NO: 66256 - DNA, 15 bp, Homo sapiens
gcccagcttgattgc

SEQ ID NO: 66257 - DNA, 15 bp, Homo sapiens
tgcccagcttgattg

SEQ ID NO: 66258 - DNA, 15 bp, Homo sapiens
ctgcccagcttgatt

SEQ ID NO: 66259 - DNA, 15 bp, Homo sapiens
gctgcccagcttgat

SEQ ID NO: 66260 - DNA, 15 bp, Homo sapiens
agctgcccagcttga

SEQ ID NO: 66261 - DNA, 15 bp, Homo sapiens
cagctgcccagcttg

SEQ ID NO: 66262 - DNA, 15 bp, Homo sapiens
ccagctgcccagctt

SEQ ID NO: 66263 - DNA, 15 bp, Homo sapiens
gccagctgcccagct

SEQ ID NO: 66264 - DNA, 15 bp, Homo sapiens
agccagctgcccagc

SEQ ID NO: 66265 - DNA, 15 bp, Homo sapiens
aagccagctgcccag

SEQ ID NO: 66266 - DNA, 15 bp, Homo sapiens
caagccagctgccca

SEQ ID NO: 66267 - DNA, 15 bp, Homo sapiens
tcaagccagctgccc

SEQ ID NO: 66268 - DNA, 15 bp, Homo sapiens
atcaagccagctgcc

SEQ ID NO: 66269 - DNA, 15 bp, Homo sapiens
aatcaagccagctgc

SEQ ID NO: 66270 - DNA, 15 bp, Homo sapiens
caatcaagccagctg

SEQ ID NO: 66271 - DNA, 15 bp, Homo sapiens
gcaatcaagccagct

SEQ ID NO: 66272 - DNA, 15 bp, Homo sapiens
ggcaatcaagccagc

SEQ ID NO: 66273 - DNA, 15 bp, Homo sapiens
aggcaatcaagccag

SEQ ID NO: 66274 - DNA, 15 bp, Homo sapiens
aaggcaatcaagcca

SEQ ID NO: 66275 - DNA, 15 bp, Homo sapiens
gaaggcaatcaagcc

SEQ ID NO: 66276 - DNA, 15 bp, Homo sapiens
ggaaggcaatcaagc

SEQ ID NO: 66277 - DNA, 15 bp, Homo sapiens
gggaaggcaatcaag

SEQ ID NO: 66278 - DNA, 15 bp, Homo sapiens
agggaaggcaatcaa

SEQ ID NO: 66279 - DNA, 15 bp, Homo sapiens
cagggaaggcaatca

SEQ ID NO: 66280 - DNA, 15 bp, Homo sapiens
gcagggaaggcaatc

SEQ ID NO: 66281 - DNA, 15 bp, Homo sapiens
cgcagggaaggcaat

SEQ ID NO: 66282 - DNA, 15 bp, Homo sapiens
tcgcagggaaggcaa

SEQ ID NO: 66283 - DNA, 15 bp, Homo sapiens
gtcgcagggaaggca

SEQ ID NO: 66284 - DNA, 15 bp, Homo sapiens
ggtcgcagggaaggc

SEQ ID NO: 66285 - DNA, 15 bp, Homo sapiens
aggtcgcagggaagg

SEQ ID NO: 66286 - DNA, 15 bp, Homo sapiens
gaggtcgcagggaag

SEQ ID NO: 66287 - DNA, 15 bp, Homo sapiens
tgaggtcgcagggaa

SEQ ID NO: 66288 - DNA, 15 bp, Homo sapiens
ttgaggtcgcaggga

SEQ ID NO: 66289 - DNA, 15 bp, Homo sapiens
cttgaggtcgcaggg

SEQ ID NO: 66290 - DNA, 15 bp, Homo sapiens
ccttgaggtcgcagg

SEQ ID NO: 66291 - DNA, 15 bp, Homo sapiens
tccttgaggtcgcag

SEQ ID NO: 66292 - DNA, 15 bp, Homo sapiens
gtccttgaggtcgca

SEQ ID NO: 66293 - DNA, 15 bp, Homo sapiens
ggtccttgaggtcgc

SEQ ID NO: 66294 - DNA, 15 bp, Homo sapiens
aggtccttgaggtcg

SEQ ID NO: 66295 - DNA, 15 bp, Homo sapiens
aaggtccttgaggtc

SEQ ID NO: 66296 - DNA, 15 bp, Homo sapiens
taaggtccttgaggt

SEQ ID NO: 66297 - DNA, 15 bp, Homo sapiens
gtaaggtccttgagg

SEQ ID NO: 66298 - DNA, 15 bp, Homo sapiens
tgtaaggtccttgag

SEQ ID NO: 66299 - DNA, 15 bp, Homo sapiens
ctgtaaggtccttga

SEQ ID NO: 66300 - DNA, 15 bp, Homo sapiens
actgtaaggtccttg

SEQ ID NO: 66301 - DNA, 15 bp, Homo sapiens
cactgtaaggtcctt

SEQ ID NO: 66302 - DNA, 15 bp, Homo sapiens
ccactgtaaggtcct

SEQ ID NO: 66303 - DNA, 15 bp, Homo sapiens
cccactgtaaggtcc

SEQ ID NO: 66304 - DNA, 15 bp, Homo sapiens
acccactgtaaggtc

SEQ ID NO: 66305 - DNA, 15 bp, Homo sapiens
tacccactgtaaggt

SEQ ID NO: 66306 - DNA, 15 bp, Homo sapiens
ctacccactgtaagg

SEQ ID NO: 66307 - DNA, 15 bp, Homo sapiens
actacccactgtaag

SEQ ID NO: 66308 - DNA, 15 bp, Homo sapiens
tactacccactgtaa

SEQ ID NO: 66309 - DNA, 15 bp, Homo sapiens
atactacccactgta

SEQ ID NO: 66310 - DNA, 15 bp, Homo sapiens
gatactacccactgt

SEQ ID NO: 66311 - DNA, 15 bp, Homo sapiens
tgatactacccactg

SEQ ID NO: 66312 - DNA, 15 bp, Homo sapiens
ctgatactacccact

SEQ ID NO: 66313 - DNA, 15 bp, Homo sapiens
cctgatactacccac

SEQ ID NO: 66314 - DNA, 15 bp, Homo sapiens
tcctgatactaccca

SEQ ID NO: 66315 - DNA, 15 bp, Homo sapiens
ctcctgatactaccc

SEQ ID NO: 66316 - DNA, 15 bp, Homo sapiens
cctcctgatactacc

SEQ ID NO: 66317 - DNA, 15 bp, Homo sapiens
ccctcctgatactac

SEQ ID NO: 66318 - DNA, 15 bp, Homo sapiens
cccctcctgatacta

SEQ ID NO: 66319 - DNA, 15 bp, Homo sapiens
acccctcctgatact

SEQ ID NO: 66320 - DNA, 15 bp, Homo sapiens
gacccctcctgatac

SEQ ID NO: 66321 - DNA, 15 bp, Homo sapiens
tgacccctcctgata

SEQ ID NO: 66322 - DNA, 15 bp, Homo sapiens
ctgacccctcctgat

SEQ ID NO: 66323 - DNA, 15 bp, Homo sapiens
cctgacccctcctga

SEQ ID NO: 66324 - DNA, 15 bp, Homo sapiens
ccctgacccctcctg

SEQ ID NO: 66325 - DNA, 15 bp, Homo sapiens
cccctgacccctcct

SEQ ID NO: 66326 - DNA, 15 bp, Homo sapiens
gcccctgacccctcc

SEQ ID NO: 66327 - DNA, 15 bp, Homo sapiens
agcccctgacccctc

SEQ ID NO: 66328 - DNA, 15 bp, Homo sapiens
cagcccctgacccct

SEQ ID NO: 66329 - DNA, 15 bp, Homo sapiens
acagcccctgacccc

SEQ ID NO: 66330 - DNA, 15 bp, Homo sapiens
tacagcccctgaccc

SEQ ID NO: 66331 - DNA, 15 bp, Homo sapiens
ttacagcccctgacc

SEQ ID NO: 66332 - DNA, 15 bp, Homo sapiens
tttacagcccctgac

SEQ ID NO: 66333 - DNA, 15 bp, Homo sapiens
ctttacagcccctga

SEQ ID NO: 66334 - DNA, 15 bp, Homo sapiens
gctttacagcccctg

SEQ ID NO: 66335 - DNA, 15 bp, Homo sapiens
tgctttacagcccct

SEQ ID NO: 66336 - DNA, 15 bp, Homo sapiens
gtgctttacagcccc

SEQ ID NO: 66337 - DNA, 15 bp, Homo sapiens
ggtgctttacagccc

SEQ ID NO: 66338 - DNA, 15 bp, Homo sapiens
tggtgctttacagcc

SEQ ID NO: 66339 - DNA, 15 bp, Homo sapiens
ctggtgctttacagc

SEQ ID NO: 66340 - DNA, 15 bp, Homo sapiens
gctggtgctttacag

SEQ ID NO: 66341 - DNA, 15 bp, Homo sapiens
cgctggtgctttaca

SEQ ID NO: 66342 - DNA, 15 bp, Homo sapiens
acgctggtgctttac

SEQ ID NO: 66343 - DNA, 15 bp, Homo sapiens
aacgctggtgcttta

SEQ ID NO: 66344 - DNA, 15 bp, Homo sapiens
taacgctggtgcttt

SEQ ID NO: 66345 - DNA, 15 bp, Homo sapiens
ctaacgctggtgctt

SEQ ID NO: 66346 - DNA, 15 bp, Homo sapiens
gctaacgctggtgct

SEQ ID NO: 66347 - DNA, 15 bp, Homo sapiens
ggctaacgctggtgc

SEQ ID NO: 66348 - DNA, 15 bp, Homo sapiens
aggctaacgctggtg

SEQ ID NO: 66349 - DNA, 15 bp, Homo sapiens
gaggctaacgctggt

SEQ ID NO: 66350 - DNA, 15 bp, Homo sapiens
tgaggctaacgctgg

SEQ ID NO: 66351 - DNA, 15 bp, Homo sapiens
ctgaggctaacgctg

SEQ ID NO: 66352 - DNA, 15 bp, Homo sapiens
actgaggctaacgct

SEQ ID NO: 66353 - DNA, 15 bp, Homo sapiens
cactgaggctaacgc

SEQ ID NO: 66354 - DNA, 15 bp, Homo sapiens
ccactgaggctaacg

SEQ ID NO: 66355 - DNA, 15 bp, Homo sapiens
gccactgaggctaac

SEQ ID NO: 66356 - DNA, 15 bp, Homo sapiens
agccactgaggctaa

SEQ ID NO: 66357 - DNA, 15 bp, Homo sapiens
aagccactgaggcta

SEQ ID NO: 66358 - DNA, 15 bp, Homo sapiens
gaagccactgaggct

SEQ ID NO: 66359 - DNA, 15 bp, Homo sapiens
ggaagccactgaggc

SEQ ID NO: 66360 - DNA, 15 bp, Homo sapiens
tggaagccactgagg

SEQ ID NO: 66361 - DNA, 15 bp, Homo sapiens
ctggaagccactgag

SEQ ID NO: 66362 - DNA, 15 bp, Homo sapiens
gctggaagccactga

SEQ ID NO: 66363 - DNA, 15 bp, Homo sapiens
tgctggaagccactg

SEQ ID NO: 66364 - DNA, 15 bp, Homo sapiens
gtgctggaagccact

SEQ ID NO: 66365 - DNA, 15 bp, Homo sapiens
cgtgctggaagccac

SEQ ID NO: 66366 - DNA, 15 bp, Homo sapiens
tcgtgctggaagcca

SEQ ID NO: 66367 - DNA, 15 bp, Homo sapiens
atcgtgctggaagcc

SEQ ID NO: 66368 - DNA, 15 bp, Homo sapiens
aatcgtgctggaagc

SEQ ID NO: 66369 - DNA, 15 bp, Homo sapiens
gaatcgtgctggaag

SEQ ID NO: 66370 - DNA, 15 bp, Homo sapiens
ggaatcgtgctggaa

SEQ ID NO: 66371 - DNA, 15 bp, Homo sapiens
aggaatcgtgctgga

SEQ ID NO: 66372 - DNA, 15 bp, Homo sapiens
gaggaatcgtgctgg

SEQ ID NO: 66373 - DNA, 15 bp, Homo sapiens
tgaggaatcgtgctg

SEQ ID NO: 66374 - DNA, 15 bp, Homo sapiens
ttgaggaatcgtgct

SEQ ID NO: 66375 - DNA, 15 bp, Homo sapiens
gttgaggaatcgtgc

SEQ ID NO: 66376 - DNA, 15 bp, Homo sapiens
ggttgaggaatcgtg

SEQ ID NO: 66377 - DNA, 15 bp, Homo sapiens
tggttgaggaatcgt

SEQ ID NO: 66378 - DNA, 15 bp, Homo sapiens
atggttgaggaatcg

SEQ ID NO: 66379 - DNA, 15 bp, Homo sapiens
aatggttgaggaatc

SEQ ID NO: 66380 - DNA, 15 bp, Homo sapiens
gaatggttgaggaat

SEQ ID NO: 66381 - DNA, 15 bp, Homo sapiens
agaatggttgaggaa

SEQ ID NO: 66382 - DNA, 15 bp, Homo sapiens
tagaatggttgagga

SEQ ID NO: 66383 - DNA, 15 bp, Homo sapiens
ttagaatggttgagg

SEQ ID NO: 66384 - DNA, 15 bp, Homo sapiens
gttagaatggttgag

SEQ ID NO: 66385 - DNA, 15 bp, Homo sapiens
ggttagaatggttga

SEQ ID NO: 66386 - DNA, 15 bp, Homo sapiens
tggttagaatggttg

SEQ ID NO: 66387 - DNA, 15 bp, Homo sapiens
atggttagaatggtt

SEQ ID NO: 66388 - DNA, 15 bp, Homo sapiens
aatggttagaatggt

SEQ ID NO: 66389 - DNA, 15 bp, Homo sapiens
gaatggttagaatgg

SEQ ID NO: 66390 - DNA, 15 bp, Homo sapiens
ggaatggttagaatg

SEQ ID NO: 66391 - DNA, 15 bp, Homo sapiens
tggaatggttagaat

SEQ ID NO: 66392 - DNA, 15 bp, Homo sapiens
ttggaatggttagaa

SEQ ID NO: 66393 - DNA, 15 bp, Homo sapiens
tttggaatggttaga

SEQ ID NO: 66394 - DNA, 15 bp, Homo sapiens
ctttggaatggttag

SEQ ID NO: 66395 - DNA, 15 bp, Homo sapiens
cctttggaatggtta

SEQ ID NO: 66396 - DNA, 15 bp, Homo sapiens
ccctttggaatggtt

SEQ ID NO: 66397 - DNA, 15 bp, Homo sapiens
accctttggaatggt

SEQ ID NO: 66398 - DNA, 15 bp, Homo sapiens
taccctttggaatgg

SEQ ID NO: 66399 - DNA, 15 bp, Homo sapiens
ataccctttggaatg

SEQ ID NO: 66400 - DNA, 15 bp, Homo sapiens
tataccctttggaat

SEQ ID NO: 66401 - DNA, 15 bp, Homo sapiens
atataccctttggaa

SEQ ID NO: 66402 - DNA, 15 bp, Homo sapiens
gatataccctttgga

SEQ ID NO: 66403 - DNA, 15 bp, Homo sapiens
agatataccctttgg

SEQ ID NO: 66404 - DNA, 15 bp, Homo sapiens
aagatataccctttg

SEQ ID NO: 66405 - DNA, 15 bp, Homo sapiens
aaagatatacccttt

SEQ ID NO: 66406 - DNA, 15 bp, Homo sapiens
caaagatataccctt

SEQ ID NO: 66407 - DNA, 15 bp, Homo sapiens
ccaaagatataccct

SEQ ID NO: 66408 - DNA, 15 bp, Homo sapiens
cccaaagatataccc

SEQ ID NO: 66409 - DNA, 15 bp, Homo sapiens
ccccaaagatatacc

SEQ ID NO: 66410 - DNA, 15 bp, Homo sapiens
cccccaaagatatac

SEQ ID NO: 66411 - DNA, 15 bp, Homo sapiens
ccccccaaagatata

SEQ ID NO: 66412 - DNA, 15 bp, Homo sapiens
accccccaaagatat

SEQ ID NO: 66413 - DNA, 15 bp, Homo sapiens
caccccccaaagata

SEQ ID NO: 66414 - DNA, 15 bp, Homo sapiens
tcaccccccaaagat

SEQ ID NO: 66415 - DNA, 15 bp, Homo sapiens
gtcaccccccaaaga

SEQ ID NO: 66416 - DNA, 15 bp, Homo sapiens
tgtcaccccccaaag

SEQ ID NO: 66417 - DNA, 15 bp, Homo sapiens
atgtcaccccccaaa

SEQ ID NO: 66418 - DNA, 15 bp, Homo sapiens
aatgtcaccccccaa

SEQ ID NO: 66419 - DNA, 15 bp, Homo sapiens
gaatgtcacccccca

SEQ ID NO: 66420 - DNA, 15 bp, Homo sapiens
agaatgtcacccccc

SEQ ID NO: 66421 - DNA, 15 bp, Homo sapiens
aagaatgtcaccccc

SEQ ID NO: 66422 - DNA, 15 bp, Homo sapiens
aaagaatgtcacccc

SEQ ID NO: 66423 - DNA, 15 bp, Homo sapiens
aaaagaatgtcaccc

SEQ ID NO: 66424 - DNA, 15 bp, Homo sapiens
gaaaagaatgtcacc

SEQ ID NO: 66425 - DNA, 15 bp, Homo sapiens
ggaaaagaatgtcac

SEQ ID NO: 66426 - DNA, 15 bp, Homo sapiens
aggaaaagaatgtca

SEQ ID NO: 66427 - DNA, 15 bp, Homo sapiens
caggaaaagaatgtc

SEQ ID NO: 66428 - DNA, 15 bp, Homo sapiens
acaggaaaagaatgt

SEQ ID NO: 66429 - DNA, 15 bp, Homo sapiens
aacaggaaaagaatg

SEQ ID NO: 66430 - DNA, 15 bp, Homo sapiens
aaacaggaaaagaat

SEQ ID NO: 66431 - DNA, 15 bp, Homo sapiens
aaaacaggaaaagaa

SEQ ID NO: 66432 - DNA, 15 bp, Homo sapiens
gaaaacaggaaaaga

SEQ ID NO: 66433 - DNA, 15 bp, Homo sapiens
agaaaacaggaaaag

SEQ ID NO: 66434 - DNA, 15 bp, Homo sapiens
aagaaaacaggaaaa

SEQ ID NO: 66435 - DNA, 15 bp, Homo sapiens
aaagaaaacaggaaa

SEQ ID NO: 66436 - DNA, 15 bp, Homo sapiens
aaaagaaaacaggaa

SEQ ID NO: 66437 - DNA, 15 bp, Homo sapiens
aaaaagaaaacagga

SEQ ID NO: 66438 - DNA, 15 bp, Homo sapiens
taaaaagaaaacagg

SEQ ID NO: 66439 - DNA, 15 bp, Homo sapiens
ttaaaaagaaaacag

SEQ ID NO: 66440 - DNA, 15 bp, Homo sapiens
attaaaaagaaaaca

SEQ ID NO: 66441 - DNA, 15 bp, Homo sapiens
gattaaaaagaaaac

SEQ ID NO: 66442 - DNA, 15 bp, Homo sapiens
agattaaaaagaaaa

SEQ ID NO: 66443 - DNA, 15 bp, Homo sapiens
aagattaaaaagaaa

SEQ ID NO: 66444 - DNA, 15 bp, Homo sapiens
aaagattaaaaagaa

SEQ ID NO: 66445 - DNA, 15 bp, Homo sapiens
aaaagattaaaaaga

SEQ ID NO: 66446 - DNA, 15 bp, Homo sapiens
aaaaagattaaaaag

SEQ ID NO: 66447 - DNA, 15 bp, Homo sapiens
aaaaaagattaaaaa

SEQ ID NO: 66448 - DNA, 15 bp, Homo sapiens
aaaaaaagattaaaa

SEQ ID NO: 66449 - DNA, 15 bp, Homo sapiens
taaaaaaagattaaa

SEQ ID NO: 66450 - DNA, 15 bp, Homo sapiens
ttaaaaaaagattaa

SEQ ID NO: 66451 - DNA, 15 bp, Homo sapiens
tttaaaaaaagatta

SEQ ID NO: 66452 - DNA, 15 bp, Homo sapiens
ttttaaaaaaagatt

SEQ ID NO: 66453 - DNA, 15 bp, Homo sapiens
gttttaaaaaaagat

SEQ ID NO: 66454 - DNA, 15 bp, Homo sapiens
tgttttaaaaaaaga

SEQ ID NO: 66455 - DNA, 15 bp, Homo sapiens
atgttttaaaaaaag

SEQ ID NO: 66456 - DNA, 15 bp, Homo sapiens
tatgttttaaaaaaa

SEQ ID NO: 66457 - DNA, 15 bp, Homo sapiens
ctatgttttaaaaaa

SEQ ID NO: 66458 - DNA, 15 bp, Homo sapiens
tctatgttttaaaaa

SEQ ID NO: 66459 - DNA, 15 bp, Homo sapiens
ttctatgttttaaaa

SEQ ID NO: 66460 - DNA, 15 bp, Homo sapiens
attctatgttttaaa

SEQ ID NO: 66461 - DNA, 15 bp, Homo sapiens
aattctatgttttaa

SEQ ID NO: 66462 - DNA, 15 bp, Homo sapiens
taattctatgtttta

SEQ ID NO: 66463 - DNA, 15 bp, Homo sapiens
ttaattctatgtttt

SEQ ID NO: 66464 - DNA, 15 bp, Homo sapiens
attaattctatgttt

SEQ ID NO: 66465 - DNA, 15 bp, Homo sapiens
tattaattctatgtt

SEQ ID NO: 66466 - DNA, 15 bp, Homo sapiens
atattaattctatgt

SEQ ID NO: 66467 - DNA, 15 bp, Homo sapiens
tatattaattctatg

SEQ ID NO: 66468 - DNA, 15 bp, Homo sapiens
atatattaattctat

SEQ ID NO: 66469 - DNA, 15 bp, Homo sapiens
aatatattaattcta

SEQ ID NO: 66470 - DNA, 15 bp, Homo sapiens
taatatattaattct

SEQ ID NO: 66471 - DNA, 15 bp, Homo sapiens
ataatatattaattc

SEQ ID NO: 66472 - DNA, 15 bp, Homo sapiens
cataatatattaatt

SEQ ID NO: 66473 - DNA, 15 bp, Homo sapiens
tcataatatattaat

SEQ ID NO: 66474 - DNA, 15 bp, Homo sapiens
ctcataatatattaa

SEQ ID NO: 66475 - DNA, 15 bp, Homo sapiens
gctcataatatatta

SEQ ID NO: 66476 - DNA, 15 bp, Homo sapiens
agctcataatatatt

SEQ ID NO: 66477 - DNA, 15 bp, Homo sapiens
aagctcataatatat

SEQ ID NO: 66478 - DNA, 15 bp, Homo sapiens
aaagctcataatata

SEQ ID NO: 66479 - DNA, 15 bp, Homo sapiens
aaaagctcataatat

SEQ ID NO: 66480 - DNA, 15 bp, Homo sapiens
gaaaagctcataata

SEQ ID NO: 66481 - DNA, 15 bp, Homo sapiens
tgaaaagctcataat

SEQ ID NO: 66482 - DNA, 15 bp, Homo sapiens
ctgaaaagctcataa

SEQ ID NO: 66483 - DNA, 15 bp, Homo sapiens
tctgaaaagctcata

SEQ ID NO: 66484 - DNA, 15 bp, Homo sapiens
ttctgaaaagctcat

SEQ ID NO: 66485 - DNA, 15 bp, Homo sapiens
cttctgaaaagctca

SEQ ID NO: 66486 - DNA, 15 bp, Homo sapiens
tcttctgaaaagctc

SEQ ID NO: 66487 - DNA, 15 bp, Homo sapiens
atcttctgaaaagct

SEQ ID NO: 66488 - DNA, 15 bp, Homo sapiens
aatcttctgaaaagc

SEQ ID NO: 66489 - DNA, 15 bp, Homo sapiens
aaatcttctgaaaag

SEQ ID NO: 66490 - DNA, 15 bp, Homo sapiens
aaaatcttctgaaaa

SEQ ID NO: 66491 - DNA, 15 bp, Homo sapiens
aaaaatcttctgaaa

SEQ ID NO: 66492 - DNA, 15 bp, Homo sapiens
taaaaatcttctgaa

SEQ ID NO: 66493 - DNA, 15 bp, Homo sapiens
ttaaaaatcttctga

SEQ ID NO: 66494 - DNA, 15 bp, Homo sapiens
tttaaaaatcttctg

SEQ ID NO: 66495 - DNA, 15 bp, Homo sapiens
ttttaaaaatcttct

SEQ ID NO: 66496 - DNA, 15 bp, Homo sapiens
cttttaaaaatcttc

SEQ ID NO: 66497 - DNA, 15 bp, Homo sapiens
ccttttaaaaatctt

SEQ ID NO: 66498 - DNA, 15 bp, Homo sapiens
gccttttaaaaatct

SEQ ID NO: 66499 - DNA, 15 bp, Homo sapiens
tgccttttaaaaatc

SEQ ID NO: 66500 - DNA, 15 bp, Homo sapiens
ctgccttttaaaaat

SEQ ID NO: 66501 - DNA, 15 bp, Homo sapiens
actgccttttaaaaa

SEQ ID NO: 66502 - DNA, 15 bp, Homo sapiens
gactgccttttaaaa

SEQ ID NO: 66503 - DNA, 15 bp, Homo sapiens
tgactgccttttaaa

SEQ ID NO: 66504 - DNA, 15 bp, Homo sapiens
ctgactgccttttaa

SEQ ID NO: 66505 - DNA, 15 bp, Homo sapiens
tctgactgcctttta

SEQ ID NO: 66506 - DNA, 15 bp, Homo sapiens
ttctgactgcctttt

SEQ ID NO: 66507 - DNA, 15 bp, Homo sapiens
tttctgactgccttt

SEQ ID NO: 66508 - DNA, 15 bp, Homo sapiens
atttctgactgcctt

SEQ ID NO: 66509 - DNA, 15 bp, Homo sapiens
gatttctgactgcct

SEQ ID NO: 66510 - DNA, 15 bp, Homo sapiens
ggatttctgactgcc

SEQ ID NO: 66511 - DNA, 15 bp, Homo sapiens
aggatttctgactgc

SEQ ID NO: 66512 - DNA, 15 bp, Homo sapiens
taggatttctgactg

SEQ ID NO: 66513 - DNA, 15 bp, Homo sapiens
gtaggatttctgact

SEQ ID NO: 66514 - DNA, 15 bp, Homo sapiens
agtaggatttctgac

SEQ ID NO: 66515 - DNA, 15 bp, Homo sapiens
tagtaggatttctga

SEQ ID NO: 66516 - DNA, 15 bp, Homo sapiens
gtagtaggatttctg

SEQ ID NO: 66517 - DNA, 15 bp, Homo sapiens
ggtagtaggatttct

SEQ ID NO: 66518 - DNA, 15 bp, Homo sapiens
aggtagtaggatttc

SEQ ID NO: 66519 - DNA, 15 bp, Homo sapiens
taggtagtaggattt

SEQ ID NO: 66520 - DNA, 15 bp, Homo sapiens
ttaggtagtaggatt

SEQ ID NO: 66521 - DNA, 15 bp, Homo sapiens
gttaggtagtaggat

SEQ ID NO: 66522 - DNA, 15 bp, Homo sapiens
tgttaggtagtagga

SEQ ID NO: 66523 - DNA, 15 bp, Homo sapiens
gtgttaggtagtagg

SEQ ID NO: 66524 - DNA, 15 bp, Homo sapiens
tgtgttaggtagtag

SEQ ID NO: 66525 - DNA, 15 bp, Homo sapiens
ttgtgttaggtagta

SEQ ID NO: 66526 - DNA, 15 bp, Homo sapiens
tttgtgttaggtagt

SEQ ID NO: 66527 - DNA, 15 bp, Homo sapiens
ttttgtgttaggtag

SEQ ID NO: 66528 - DNA, 15 bp, Homo sapiens
tttttgtgttaggta

SEQ ID NO: 66529 - DNA, 15 bp, Homo sapiens
atttttgtgttaggt

SEQ ID NO: 66530 - DNA, 15 bp, Homo sapiens
aatttttgtgttagg

SEQ ID NO: 66531 - DNA, 15 bp, Homo sapiens
caatttttgtgttag

SEQ ID NO: 66532 - DNA, 15 bp, Homo sapiens
acaatttttgtgtta

SEQ ID NO: 66533 - DNA, 15 bp, Homo sapiens
aacaatttttgtgtt

SEQ ID NO: 66534 - DNA, 15 bp, Homo sapiens
aaacaatttttgtgt

SEQ ID NO: 66535 - DNA, 15 bp, Homo sapiens
aaaacaatttttgtg

SEQ ID NO: 66536 - DNA, 15 bp, Homo sapiens
aaaaacaatttttgt

SEQ ID NO: 66537 - DNA, 15 bp, Homo sapiens
taaaaacaatttttg

SEQ ID NO: 66538 - DNA, 15 bp, Homo sapiens
ataaaaacaattttt

SEQ ID NO: 66539 - DNA, 15 bp, Homo sapiens
gataaaaacaatttt

SEQ ID NO: 66540 - DNA, 15 bp, Homo sapiens
agataaaaacaattt

SEQ ID NO: 66541 - DNA, 15 bp, Homo sapiens
aagataaaaacaatt

SEQ ID NO: 66542 - DNA, 15 bp, Homo sapiens
aaagataaaaacaat

SEQ ID NO: 66543 - DNA, 15 bp, Homo sapiens
caaagataaaaacaa

SEQ ID NO: 66544 - DNA, 15 bp, Homo sapiens
tcaaagataaaaaca

SEQ ID NO: 66545 - DNA, 15 bp, Homo sapiens
ttcaaagataaaaac

SEQ ID NO: 66546 - DNA, 15 bp, Homo sapiens
attcaaagataaaaa

SEQ ID NO: 66547 - DNA, 15 bp, Homo sapiens
tattcaaagataaaa

SEQ ID NO: 66548 - DNA, 15 bp, Homo sapiens
ttattcaaagataaa

SEQ ID NO: 66549 - DNA, 15 bp, Homo sapiens
attattcaaagataa

SEQ ID NO: 66550 - DNA, 15 bp, Homo sapiens
tattattcaaagata

SEQ ID NO: 66551 - DNA, 15 bp, Homo sapiens
atattattcaaagat

SEQ ID NO: 66552 - DNA, 15 bp, Homo sapiens
catattattcaaaga

SEQ ID NO: 66553 - DNA, 15 bp, Homo sapiens
acatattattcaaag

SEQ ID NO: 66554 - DNA, 15 bp, Homo sapiens
aacatattattcaaa

SEQ ID NO: 66555 - DNA, 15 bp, Homo sapiens
gaacatattattcaa

SEQ ID NO: 66556 - DNA, 15 bp, Homo sapiens
agaacatattattca

SEQ ID NO: 66557 - DNA, 15 bp, Homo sapiens
aagaacatattattc

SEQ ID NO: 66558 - DNA, 15 bp, Homo sapiens
caagaacatattatt

SEQ ID NO: 66559 - DNA, 15 bp, Homo sapiens
acaagaacatattat

SEQ ID NO: 66560 - DNA, 15 bp, Homo sapiens
aacaagaacatatta

SEQ ID NO: 66561 - DNA, 15 bp, Homo sapiens
aaacaagaacatatt

SEQ ID NO: 66562 - DNA, 15 bp, Homo sapiens
caaacaagaacatat

SEQ ID NO: 66563 - DNA, 15 bp, Homo sapiens
acaaacaagaacata

SEQ ID NO: 66564 - DNA, 15 bp, Homo sapiens
gacaaacaagaacat

SEQ ID NO: 66565 - DNA, 15 bp, Homo sapiens
ggacaaacaagaaca

SEQ ID NO: 66566 - DNA, 15 bp, Homo sapiens
tggacaaacaagaac

SEQ ID NO: 66567 - DNA, 15 bp, Homo sapiens
atggacaaacaagaa

SEQ ID NO: 66568 - DNA, 15 bp, Homo sapiens
aatggacaaacaaga

SEQ ID NO: 66569 - DNA, 15 bp, Homo sapiens
aaatggacaaacaag

SEQ ID NO: 66570 - DNA, 15 bp, Homo sapiens
aaaatggacaaacaa

SEQ ID NO: 66571 - DNA, 15 bp, Homo sapiens
gaaaatggacaaaca

SEQ ID NO: 66572 - DNA, 15 bp, Homo sapiens
ggaaaatggacaaac

SEQ ID NO: 66573 - DNA, 15 bp, Homo sapiens
tggaaaatggacaaa

SEQ ID NO: 66574 - DNA, 15 bp, Homo sapiens
atggaaaatggacaa

SEQ ID NO: 66575 - DNA, 15 bp, Homo sapiens
catggaaaatggaca

SEQ ID NO: 66576 - DNA, 15 bp, Homo sapiens
gcatggaaaatggac

SEQ ID NO: 66577 - DNA, 15 bp, Homo sapiens
tgcatggaaaatgga

SEQ ID NO: 66578 - DNA, 15 bp, Homo sapiens
atgcatggaaaatgg

SEQ ID NO: 66579 - DNA, 15 bp, Homo sapiens
catgcatggaaaatg

SEQ ID NO: 66580 - DNA, 15 bp, Homo sapiens
gcatgcatggaaaat

SEQ ID NO: 66581 - DNA, 15 bp, Homo sapiens
cgcatgcatggaaaa

SEQ ID NO: 66582 - DNA, 15 bp, Homo sapiens
tcgcatgcatggaaa

SEQ ID NO: 66583 - DNA, 15 bp, Homo sapiens
atcgcatgcatggaa

SEQ ID NO: 66584 - DNA, 15 bp, Homo sapiens
catcgcatgcatgga

SEQ ID NO: 66585 - DNA, 15 bp, Homo sapiens
acatcgcatgcatgg

SEQ ID NO: 66586 - DNA, 15 bp, Homo sapiens
aacatcgcatgcatg

SEQ ID NO: 66587 - DNA, 15 bp, Homo sapiens
taacatcgcatgcat

SEQ ID NO: 66588 - DNA, 15 bp, Homo sapiens
ctaacatcgcatgca

SEQ ID NO: 66589 - DNA, 15 bp, Homo sapiens
cctaacatcgcatgc

SEQ ID NO: 66590 - DNA, 15 bp, Homo sapiens
gcctaacatcgcatg

SEQ ID NO: 66591 - DNA, 15 bp, Homo sapiens
tgcctaacatcgcat

SEQ ID NO: 66592 - DNA, 15 bp, Homo sapiens
atgcctaacatcgca

SEQ ID NO: 66593 - DNA, 15 bp, Homo sapiens
tatgcctaacatcgc

SEQ ID NO: 66594 - DNA, 15 bp, Homo sapiens
gtatgcctaacatcg

SEQ ID NO: 66595 - DNA, 15 bp, Homo sapiens
tgtatgcctaacatc

SEQ ID NO: 66596 - DNA, 15 bp, Homo sapiens
ttgtatgcctaacat

SEQ ID NO: 66597 - DNA, 15 bp, Homo sapiens
tttgtatgcctaaca

SEQ ID NO: 66598 - DNA, 15 bp, Homo sapiens
ttttgtatgcctaac

SEQ ID NO: 66599 - DNA, 15 bp, Homo sapiens
attttgtatgcctaa

SEQ ID NO: 66600 - DNA, 15 bp, Homo sapiens
tattttgtatgccta

SEQ ID NO: 66601 - DNA, 15 bp, Homo sapiens
gtattttgtatgcct

SEQ ID NO: 66602 - DNA, 15 bp, Homo sapiens
tgtattttgtatgcc

SEQ ID NO: 66603 - DNA, 15 bp, Homo sapiens
atgtattttgtatgc

SEQ ID NO: 66604 - DNA, 15 bp, Homo sapiens
aatgtattttgtatg

SEQ ID NO: 66605 - DNA, 15 bp, Homo sapiens
aaatgtattttgtat

SEQ ID NO: 66606 - DNA, 15 bp, Homo sapiens
aaaatgtattttgta

SEQ ID NO: 66607 - DNA, 15 bp, Homo sapiens
aaaaatgtattttgt

SEQ ID NO: 66608 - DNA, 15 bp, Homo sapiens
aaaaaatgtattttg

SEQ ID NO: 66609 - DNA, 15 bp, Homo sapiens
taaaaaatgtatttt

SEQ ID NO: 66610 - DNA, 15 bp, Homo sapiens
ttaaaaaatgtattt

SEQ ID NO: 66611 - DNA, 15 bp, Homo sapiens
tttaaaaaatgtatt

SEQ ID NO: 66612 - DNA, 15 bp, Homo sapiens
ctttaaaaaatgtat

SEQ ID NO: 66613 - DNA, 15 bp, Homo sapiens
tctttaaaaaatgta

SEQ ID NO: 66614 - DNA, 15 bp, Homo sapiens
ttctttaaaaaatgt

SEQ ID NO: 66615 - DNA, 15 bp, Homo sapiens
attctttaaaaaatg

SEQ ID NO: 66616 - DNA, 15 bp, Homo sapiens
tattctttaaaaaat

SEQ ID NO: 66617 - DNA, 15 bp, Homo sapiens
gtattctttaaaaaa

SEQ ID NO: 66618 - DNA, 15 bp, Homo sapiens
agtattctttaaaaa

SEQ ID NO: 66619 - DNA, 15 bp, Homo sapiens
aagtattctttaaaa

SEQ ID NO: 66620 - DNA, 15 bp, Homo sapiens
aaagtattctttaaa

SEQ ID NO: 66621 - DNA, 15 bp, Homo sapiens
gaaagtattctttaa

SEQ ID NO: 66622 - DNA, 15 bp, Homo sapiens
tgaaagtattcttta

SEQ ID NO: 66623 - DNA, 15 bp, Homo sapiens
atgaaagtattcttt

SEQ ID NO: 66624 - DNA, 15 bp, Homo sapiens
aatgaaagtattctt

SEQ ID NO: 66625 - DNA, 15 bp, Homo sapiens
caatgaaagtattct

SEQ ID NO: 66626 - DNA, 15 bp, Homo sapiens
gcaatgaaagtattc

SEQ ID NO: 66627 - DNA, 15 bp, Homo sapiens
tgcaatgaaagtatt

SEQ ID NO: 66628 - DNA, 15 bp, Homo sapiens
ctgcaatgaaagtat

SEQ ID NO: 66629 - DNA, 15 bp, Homo sapiens
tctgcaatgaaagta

SEQ ID NO: 66630 - DNA, 15 bp, Homo sapiens
atctgcaatgaaagt

SEQ ID NO: 66631 - DNA, 15 bp, Homo sapiens
aatctgcaatgaaag

SEQ ID NO: 66632 - DNA, 15 bp, Homo sapiens
caatctgcaatgaaa

SEQ ID NO: 66633 - DNA, 15 bp, Homo sapiens
ccaatctgcaatgaa

SEQ ID NO: 66634 - DNA, 15 bp, Homo sapiens
tccaatctgcaatga

SEQ ID NO: 66635 - DNA, 15 bp, Homo sapiens
ttccaatctgcaatg

SEQ ID NO: 66636 - DNA, 15 bp, Homo sapiens
tttccaatctgcaat

SEQ ID NO: 66637 - DNA, 15 bp, Homo sapiens
gtttccaatctgcaa

SEQ ID NO: 66638 - DNA, 15 bp, Homo sapiens
agtttccaatctgca

SEQ ID NO: 66639 - DNA, 15 bp, Homo sapiens
aagtttccaatctgc

SEQ ID NO: 66640 - DNA, 15 bp, Homo sapiens
gaagtttccaatctg

SEQ ID NO: 66641 - DNA, 15 bp, Homo sapiens
cgaagtttccaatct

SEQ ID NO: 66642 - DNA, 15 bp, Homo sapiens
acgaagtttccaatc

SEQ ID NO: 66643 - DNA, 15 bp, Homo sapiens
aacgaagtttccaat

SEQ ID NO: 66644 - DNA, 15 bp, Homo sapiens
aaacgaagtttccaa

SEQ ID NO: 66645 - DNA, 15 bp, Homo sapiens
taaacgaagtttcca

SEQ ID NO: 66646 - DNA, 15 bp, Homo sapiens
ttaaacgaagtttcc

SEQ ID NO: 66647 - DNA, 15 bp, Homo sapiens
tttaaacgaagtttc

SEQ ID NO: 66648 - DNA, 15 bp, Homo sapiens
ttttaaacgaagttt

SEQ ID NO: 66649 - DNA, 15 bp, Homo sapiens
tttttaaacgaagtt

SEQ ID NO: 66650 - DNA, 15 bp, Homo sapiens
ttttttaaacgaagt

SEQ ID NO: 66651 - DNA, 15 bp, Homo sapiens
attttttaaacgaag

SEQ ID NO: 66652 - DNA, 15 bp, Homo sapiens
cattttttaaacgaa

SEQ ID NO: 66653 - DNA, 15 bp, Homo sapiens
gcattttttaaacga

SEQ ID NO: 66654 - DNA, 15 bp, Homo sapiens
agcattttttaaacg

SEQ ID NO: 66655 - DNA, 15 bp, Homo sapiens
gagcattttttaaac

SEQ ID NO: 66656 - DNA, 15 bp, Homo sapiens
tgagcattttttaaa

SEQ ID NO: 66657 - DNA, 15 bp, Homo sapiens
atgagcattttttaa

SEQ ID NO: 66658 - DNA, 15 bp, Homo sapiens
tatgagcatttttta

SEQ ID NO: 66659 - DNA, 15 bp, Homo sapiens
gtatgagcatttttt

SEQ ID NO: 66660 - DNA, 15 bp, Homo sapiens
agtatgagcattttt

SEQ ID NO: 66661 - DNA, 15 bp, Homo sapiens
tagtatgagcatttt

SEQ ID NO: 66662 - DNA, 15 bp, Homo sapiens
ttagtatgagcattt

SEQ ID NO: 66663 - DNA, 15 bp, Homo sapiens
tttagtatgagcatt

SEQ ID NO: 66664 - DNA, 15 bp, Homo sapiens
ttttagtatgagcat

SEQ ID NO: 66665 - DNA, 15 bp, Homo sapiens
attttagtatgagca

SEQ ID NO: 66666 - DNA, 15 bp, Homo sapiens
aattttagtatgagc

SEQ ID NO: 66667 - DNA, 15 bp, Homo sapiens
caattttagtatgag

SEQ ID NO: 66668 - DNA, 15 bp, Homo sapiens
ccaattttagtatga

SEQ ID NO: 66669 - DNA, 15 bp, Homo sapiens
gccaattttagtatg

SEQ ID NO: 66670 - DNA, 15 bp, Homo sapiens
tgccaattttagtat

SEQ ID NO: 66671 - DNA, 15 bp, Homo sapiens
atgccaattttagta

SEQ ID NO: 66672 - DNA, 15 bp, Homo sapiens
aatgccaattttagt

SEQ ID NO: 66673 - DNA, 15 bp, Homo sapiens
aaatgccaattttag

SEQ ID NO: 66674 - DNA, 15 bp, Homo sapiens
gaaatgccaatttta

SEQ ID NO: 66675 - DNA, 15 bp, Homo sapiens
agaaatgccaatttt

SEQ ID NO: 66676 - DNA, 15 bp, Homo sapiens
tagaaatgccaattt

SEQ ID NO: 66677 - DNA, 15 bp, Homo sapiens
ttagaaatgccaatt

SEQ ID NO: 66678 - DNA, 15 bp, Homo sapiens
gttagaaatgccaat

SEQ ID NO: 66679 - DNA, 15 bp, Homo sapiens
ggttagaaatgccaa

SEQ ID NO: 66680 - DNA, 15 bp, Homo sapiens
gggttagaaatgcca

SEQ ID NO: 66681 - DNA, 15 bp, Homo sapiens
tgggttagaaatgcc

SEQ ID NO: 66682 - DNA, 15 bp, Homo sapiens
atgggttagaaatgc

SEQ ID NO: 66683 - DNA, 15 bp, Homo sapiens
tatgggttagaaatg

SEQ ID NO: 66684 - DNA, 15 bp, Homo sapiens
ctatgggttagaaat

SEQ ID NO: 66685 - DNA, 15 bp, Homo sapiens
cctatgggttagaaa

SEQ ID NO: 66686 - DNA, 15 bp, Homo sapiens
gcctatgggttagaa

SEQ ID NO: 66687 - DNA, 15 bp, Homo sapiens
ggcctatgggttaga

SEQ ID NO: 66688 - DNA, 15 bp, Homo sapiens
gggcctatgggttag

SEQ ID NO: 66689 - DNA, 15 bp, Homo sapiens
tgggcctatgggtta

SEQ ID NO: 66690 - DNA, 15 bp, Homo sapiens
gtgggcctatgggtt

SEQ ID NO: 66691 - DNA, 15 bp, Homo sapiens
agtgggcctatgggt

SEQ ID NO: 66692 - DNA, 15 bp, Homo sapiens
aagtgggcctatggg

SEQ ID NO: 66693 - DNA, 15 bp, Homo sapiens
caagtgggcctatgg

SEQ ID NO: 66694 - DNA, 15 bp, Homo sapiens
acaagtgggcctatg

SEQ ID NO: 66695 - DNA, 15 bp, Homo sapiens
tacaagtgggcctat

SEQ ID NO: 66696 - DNA, 15 bp, Homo sapiens
ctacaagtgggccta

SEQ ID NO: 66697 - DNA, 15 bp, Homo sapiens
actacaagtgggcct

SEQ ID NO: 66698 - DNA, 15 bp, Homo sapiens
aactacaagtgggcc

SEQ ID NO: 66699 - DNA, 15 bp, Homo sapiens
taactacaagtgggc

SEQ ID NO: 66700 - DNA, 15 bp, Homo sapiens
ataactacaagtggg

SEQ ID NO: 66701 - DNA, 15 bp, Homo sapiens
aataactacaagtgg

SEQ ID NO: 66702 - DNA, 15 bp, Homo sapiens
aaataactacaagtg

SEQ ID NO: 66703 - DNA, 15 bp, Homo sapiens
taaataactacaagt

SEQ ID NO: 66704 - DNA, 15 bp, Homo sapiens
gtaaataactacaag

SEQ ID NO: 66705 - DNA, 15 bp, Homo sapiens
ggtaaataactacaa

SEQ ID NO: 66706 - DNA, 15 bp, Homo sapiens
cggtaaataactaca

SEQ ID NO: 66707 - DNA, 15 bp, Homo sapiens
tcggtaaataactac

SEQ ID NO: 66708 - DNA, 15 bp, Homo sapiens
ttcggtaaataacta

SEQ ID NO: 66709 - DNA, 15 bp, Homo sapiens
cttcggtaaataact

SEQ ID NO: 66710 - DNA, 15 bp, Homo sapiens
gcttcggtaaataac

SEQ ID NO: 66711 - DNA, 15 bp, Homo sapiens
tgcttcggtaaataa

SEQ ID NO: 66712 - DNA, 15 bp, Homo sapiens
ttgcttcggtaaata

SEQ ID NO: 66713 - DNA, 15 bp, Homo sapiens
tttgcttcggtaaat

SEQ ID NO: 66714 - DNA, 15 bp, Homo sapiens
ttttgcttcggtaaa

SEQ ID NO: 66715 - DNA, 15 bp, Homo sapiens
cttttgcttcggtaa

SEQ ID NO: 66716 - DNA, 15 bp, Homo sapiens
ccttttgcttcggta

SEQ ID NO: 66717 - DNA, 15 bp, Homo sapiens
tccttttgcttcggt

SEQ ID NO: 66718 - DNA, 15 bp, Homo sapiens
gtccttttgcttcgg

SEQ ID NO: 66719 - DNA, 15 bp, Homo sapiens
tgtccttttgcttcg

SEQ ID NO: 66720 - DNA, 15 bp, Homo sapiens
ctgtccttttgcttc

SEQ ID NO: 66721 - DNA, 15 bp, Homo sapiens
gctgtccttttgctt

SEQ ID NO: 66722 - DNA, 15 bp, Homo sapiens
agctgtccttttgct

SEQ ID NO: 66723 - DNA, 15 bp, Homo sapiens
aagctgtccttttgc

SEQ ID NO: 66724 - DNA, 15 bp, Homo sapiens
aaagctgtccttttg

SEQ ID NO: 66725 - DNA, 15 bp, Homo sapiens
caaagctgtcctttt

SEQ ID NO: 66726 - DNA, 15 bp, Homo sapiens
gcaaagctgtccttt

SEQ ID NO: 66727 - DNA, 15 bp, Homo sapiens
agcaaagctgtcctt

SEQ ID NO: 66728 - DNA, 15 bp, Homo sapiens
aagcaaagctgtcct

SEQ ID NO: 66729 - DNA, 15 bp, Homo sapiens
aaagcaaagctgtcc

SEQ ID NO: 66730 - DNA, 15 bp, Homo sapiens
caaagcaaagctgtc

SEQ ID NO: 66731 - DNA, 15 bp, Homo sapiens
acaaagcaaagctgt

SEQ ID NO: 66732 - DNA, 15 bp, Homo sapiens
cacaaagcaaagctg

SEQ ID NO: 66733 - DNA, 15 bp, Homo sapiens
acacaaagcaaagct

SEQ ID NO: 66734 - DNA, 15 bp, Homo sapiens
cacacaaagcaaagc

SEQ ID NO: 66735 - DNA, 15 bp, Homo sapiens
ccacacaaagcaaag

SEQ ID NO: 66736 - DNA, 15 bp, Homo sapiens
cccacacaaagcaaa

SEQ ID NO: 66737 - DNA, 15 bp, Homo sapiens
acccacacaaagcaa

SEQ ID NO: 66738 - DNA, 15 bp, Homo sapiens
gacccacacaaagca

SEQ ID NO: 66739 - DNA, 15 bp, Homo sapiens
agacccacacaaagc

SEQ ID NO: 66740 - DNA, 15 bp, Homo sapiens
cagacccacacaaag

SEQ ID NO: 66741 - DNA, 15 bp, Homo sapiens
ccagacccacacaaa

SEQ ID NO: 66742 - DNA, 15 bp, Homo sapiens
accagacccacacaa

SEQ ID NO: 66743 - DNA, 15 bp, Homo sapiens
taccagacccacaca

SEQ ID NO: 66744 - DNA, 15 bp, Homo sapiens
ctaccagacccacac

SEQ ID NO: 66745 - DNA, 15 bp, Homo sapiens
cctaccagacccaca

SEQ ID NO: 66746 - DNA, 15 bp, Homo sapiens
ccctaccagacccac

SEQ ID NO: 66747 - DNA, 15 bp, Homo sapiens
accctaccagaccca

SEQ ID NO: 66748 - DNA, 15 bp, Homo sapiens
aaccctaccagaccc

SEQ ID NO: 66749 - DNA, 15 bp, Homo sapiens
gaaccctaccagacc

SEQ ID NO: 66750 - DNA, 15 bp, Homo sapiens
tgaaccctaccagac

SEQ ID NO: 66751 - DNA, 15 bp, Homo sapiens
atgaaccctaccaga

SEQ ID NO: 66752 - DNA, 15 bp, Homo sapiens
aatgaaccctaccag

SEQ ID NO: 66753 - DNA, 15 bp, Homo sapiens
taatgaaccctacca

SEQ ID NO: 66754 - DNA, 15 bp, Homo sapiens
ctaatgaaccctacc

SEQ ID NO: 66755 - DNA, 15 bp, Homo sapiens
tctaatgaaccctac

SEQ ID NO: 66756 - DNA, 15 bp, Homo sapiens
ttctaatgaacccta

SEQ ID NO: 66757 - DNA, 15 bp, Homo sapiens
tttctaatgaaccct

SEQ ID NO: 66758 - DNA, 15 bp, Homo sapiens
ctttctaatgaaccc

SEQ ID NO: 66759 - DNA, 15 bp, Homo sapiens
cctttctaatgaacc

SEQ ID NO: 66760 - DNA, 15 bp, Homo sapiens
tcctttctaatgaac

SEQ ID NO: 66761 - DNA, 15 bp, Homo sapiens
ttcctttctaatgaa

SEQ ID NO: 66762 - DNA, 15 bp, Homo sapiens
attcctttctaatga

SEQ ID NO: 66763 - DNA, 15 bp, Homo sapiens
cattcctttctaatg

SEQ ID NO: 66764 - DNA, 15 bp, Homo sapiens
ccattcctttctaat

SEQ ID NO: 66765 - DNA, 15 bp, Homo sapiens
cccattcctttctaa

SEQ ID NO: 66766 - DNA, 15 bp, Homo sapiens
ccccattcctttcta

SEQ ID NO: 66767 - DNA, 15 bp, Homo sapiens
cccccattcctttct

SEQ ID NO: 66768 - DNA, 15 bp, Homo sapiens
gcccccattcctttc

SEQ ID NO: 66769 - DNA, 15 bp, Homo sapiens
cgcccccattccttt

SEQ ID NO: 66770 - DNA, 15 bp, Homo sapiens
ccgcccccattcctt

SEQ ID NO: 66771 - DNA, 15 bp, Homo sapiens
accgcccccattcct

SEQ ID NO: 66772 - DNA, 15 bp, Homo sapiens
caccgcccccattcc

SEQ ID NO: 66773 - DNA, 15 bp, Homo sapiens
ccaccgcccccattc

SEQ ID NO: 66774 - DNA, 15 bp, Homo sapiens
cccaccgcccccatt

SEQ ID NO: 66775 - DNA, 15 bp, Homo sapiens
tcccaccgcccccat

SEQ ID NO: 66776 - DNA, 15 bp, Homo sapiens
ctcccaccgccccca

SEQ ID NO: 66777 - DNA, 15 bp, Homo sapiens
cctcccaccgccccc

SEQ ID NO: 66778 - DNA, 15 bp, Homo sapiens
ccctcccaccgcccc

SEQ ID NO: 66779 - DNA, 15 bp, Homo sapiens
accctcccaccgccc

SEQ ID NO: 66780 - DNA, 15 bp, Homo sapiens
aaccctcccaccgcc

SEQ ID NO: 66781 - DNA, 15 bp, Homo sapiens
caaccctcccaccgc

SEQ ID NO: 66782 - DNA, 15 bp, Homo sapiens
ccaaccctcccaccg

SEQ ID NO: 66783 - DNA, 15 bp, Homo sapiens
accaaccctcccacc

SEQ ID NO: 66784 - DNA, 15 bp, Homo sapiens
caccaaccctcccac

SEQ ID NO: 66785 - DNA, 15 bp, Homo sapiens
acaccaaccctccca

SEQ ID NO: 66786 - DNA, 15 bp, Homo sapiens
aacaccaaccctccc

SEQ ID NO: 66787 - DNA, 15 bp, Homo sapiens
gaacaccaaccctcc

SEQ ID NO: 66788 - DNA, 15 bp, Homo sapiens
agaacaccaaccctc

SEQ ID NO: 66789 - DNA, 15 bp, Homo sapiens
cagaacaccaaccct

SEQ ID NO: 66790 - DNA, 15 bp, Homo sapiens
acagaacaccaaccc

SEQ ID NO: 66791 - DNA, 15 bp, Homo sapiens
aacagaacaccaacc

SEQ ID NO: 66792 - DNA, 15 bp, Homo sapiens
gaacagaacaccaac

SEQ ID NO: 66793 - DNA, 15 bp, Homo sapiens
agaacagaacaccaa

SEQ ID NO: 66794 - DNA, 15 bp, Homo sapiens
gagaacagaacacca

SEQ ID NO: 66795 - DNA, 15 bp, Homo sapiens
agagaacagaacacc

SEQ ID NO: 66796 - DNA, 15 bp, Homo sapiens
gagagaacagaacac

SEQ ID NO: 66797 - DNA, 15 bp, Homo sapiens
agagagaacagaaca

SEQ ID NO: 66798 - DNA, 15 bp, Homo sapiens
cagagagaacagaac

SEQ ID NO: 66799 - DNA, 15 bp, Homo sapiens
gcagagagaacagaa

SEQ ID NO: 66800 - DNA, 15 bp, Homo sapiens
tgcagagagaacaga

SEQ ID NO: 66801 - DNA, 15 bp, Homo sapiens
ctgcagagagaacag

SEQ ID NO: 66802 - DNA, 15 bp, Homo sapiens
tctgcagagagaaca

SEQ ID NO: 66803 - DNA, 15 bp, Homo sapiens
gtctgcagagagaac

SEQ ID NO: 66804 - DNA, 15 bp, Homo sapiens
agtctgcagagagaa

SEQ ID NO: 66805 - DNA, 15 bp, Homo sapiens
cagtctgcagagaga

SEQ ID NO: 66806 - DNA, 15 bp, Homo sapiens
tcagtctgcagagag

SEQ ID NO: 66807 - DNA, 15 bp, Homo sapiens
ttcagtctgcagaga

SEQ ID NO: 66808 - DNA, 15 bp, Homo sapiens
attcagtctgcagag

SEQ ID NO: 66809 - DNA, 15 bp, Homo sapiens
cattcagtctgcaga

SEQ ID NO: 66810 - DNA, 15 bp, Homo sapiens
ccattcagtctgcag

SEQ ID NO: 66811 - DNA, 15 bp, Homo sapiens
tccattcagtctgca

SEQ ID NO: 66812 - DNA, 15 bp, Homo sapiens
ctccattcagtctgc

SEQ ID NO: 66813 - DNA, 15 bp, Homo sapiens
gctccattcagtctg

SEQ ID NO: 66814 - DNA, 15 bp, Homo sapiens
tgctccattcagtct

SEQ ID NO: 66815 - DNA, 15 bp, Homo sapiens
atgctccattcagtc

SEQ ID NO: 66816 - DNA, 15 bp, Homo sapiens
gatgctccattcagt

SEQ ID NO: 66817 - DNA, 15 bp, Homo sapiens
agatgctccattcag

SEQ ID NO: 66818 - DNA, 15 bp, Homo sapiens
tagatgctccattca

SEQ ID NO: 66819 - DNA, 15 bp, Homo sapiens
ctagatgctccattc

SEQ ID NO: 66820 - DNA, 15 bp, Homo sapiens
tctagatgctccatt

SEQ ID NO: 66821 - DNA, 15 bp, Homo sapiens
ctctagatgctccat

SEQ ID NO: 66822 - DNA, 15 bp, Homo sapiens
actctagatgctcca

SEQ ID NO: 66823 - DNA, 15 bp, Homo sapiens
aactctagatgctcc

SEQ ID NO: 66824 - DNA, 15 bp, Homo sapiens
taactctagatgctc

SEQ ID NO: 66825 - DNA, 15 bp, Homo sapiens
ttaactctagatgct

SEQ ID NO: 66826 - DNA, 15 bp, Homo sapiens
cttaactctagatgc

SEQ ID NO: 66827 - DNA, 15 bp, Homo sapiens
ccttaactctagatg

SEQ ID NO: 66828 - DNA, 15 bp, Homo sapiens
cccttaactctagat

SEQ ID NO: 66829 - DNA, 15 bp, Homo sapiens
acccttaactctaga

SEQ ID NO: 66830 - DNA, 15 bp, Homo sapiens
tacccttaactctag

SEQ ID NO: 66831 - DNA, 15 bp, Homo sapiens
ctacccttaactcta

SEQ ID NO: 66832 - DNA, 15 bp, Homo sapiens
cctacccttaactct

SEQ ID NO: 66833 - DNA, 15 bp, Homo sapiens
acctacccttaactc

SEQ ID NO: 66834 - DNA, 15 bp, Homo sapiens
gacctacccttaact

SEQ ID NO: 66835 - DNA, 15 bp, Homo sapiens
tgacctacccttaac

SEQ ID NO: 66836 - DNA, 15 bp, Homo sapiens
ttgacctacccttaa

SEQ ID NO: 66837 - DNA, 15 bp, Homo sapiens
gttgacctaccctta

SEQ ID NO: 66838 - DNA, 15 bp, Homo sapiens
ggttgacctaccctt

SEQ ID NO: 66839 - DNA, 15 bp, Homo sapiens
gggttgacctaccct

SEQ ID NO: 66840 - DNA, 15 bp, Homo sapiens
agggttgacctaccc

SEQ ID NO: 66841 - DNA, 15 bp, Homo sapiens
cagggttgacctacc

SEQ ID NO: 66842 - DNA, 15 bp, Homo sapiens
tcagggttgacctac

SEQ ID NO: 66843 - DNA, 15 bp, Homo sapiens
gtcagggttgaccta

SEQ ID NO: 66844 - DNA, 15 bp, Homo sapiens
agtcagggttgacct

SEQ ID NO: 66845 - DNA, 15 bp, Homo sapiens
aagtcagggttgacc

SEQ ID NO: 66846 - DNA, 15 bp, Homo sapiens
gaagtcagggttgac

SEQ ID NO: 66847 - DNA, 15 bp, Homo sapiens
agaagtcagggttga

SEQ ID NO: 66848 - DNA, 15 bp, Homo sapiens
cagaagtcagggttg

SEQ ID NO: 66849 - DNA, 15 bp, Homo sapiens
acagaagtcagggtt

SEQ ID NO: 66850 - DNA, 15 bp, Homo sapiens
tacagaagtcagggt

SEQ ID NO: 66851 - DNA, 15 bp, Homo sapiens
gtacagaagtcaggg

SEQ ID NO: 66852 - DNA, 15 bp, Homo sapiens
agtacagaagtcagg

SEQ ID NO: 66853 - DNA, 15 bp, Homo sapiens
aagtacagaagtcag

SEQ ID NO: 66854 - DNA, 15 bp, Homo sapiens
gaagtacagaagtca

SEQ ID NO: 66855 - DNA, 15 bp, Homo sapiens
agaagtacagaagtc

SEQ ID NO: 66856 - DNA, 15 bp, Homo sapiens
tagaagtacagaagt

SEQ ID NO: 66857 - DNA, 15 bp, Homo sapiens
ttagaagtacagaag

SEQ ID NO: 66858 - DNA, 15 bp, Homo sapiens
tttagaagtacagaa

SEQ ID NO: 66859 - DNA, 15 bp, Homo sapiens
atttagaagtacaga

SEQ ID NO: 66860 - DNA, 15 bp, Homo sapiens
aatttagaagtacag

SEQ ID NO: 66861 - DNA, 15 bp, Homo sapiens
aaatttagaagtaca

SEQ ID NO: 66862 - DNA, 15 bp, Homo sapiens
aaaatttagaagtac

SEQ ID NO: 66863 - DNA, 15 bp, Homo sapiens
aaaaatttagaagta

SEQ ID NO: 66864 - DNA, 15 bp, Homo sapiens
caaaaatttagaagt

SEQ ID NO: 66865 - DNA, 15 bp, Homo sapiens
acaaaaatttagaag

SEQ ID NO: 66866 - DNA, 15 bp, Homo sapiens
gacaaaaatttagaa

SEQ ID NO: 66867 - DNA, 15 bp, Homo sapiens
ggacaaaaatttaga

SEQ ID NO: 66868 - DNA, 15 bp, Homo sapiens
aggacaaaaatttag

SEQ ID NO: 66869 - DNA, 15 bp, Homo sapiens
gaggacaaaaattta

SEQ ID NO: 66870 - DNA, 15 bp, Homo sapiens
tgaggacaaaaattt

SEQ ID NO: 66871 - DNA, 15 bp, Homo sapiens
ctgaggacaaaaatt

SEQ ID NO: 66872 - DNA, 15 bp, Homo sapiens
cctgaggacaaaaat

SEQ ID NO: 66873 - DNA, 15 bp, Homo sapiens
acctgaggacaaaaa

SEQ ID NO: 66874 - DNA, 15 bp, Homo sapiens
gacctgaggacaaaa

SEQ ID NO: 66875 - DNA, 15 bp, Homo sapiens
tgacctgaggacaaa

SEQ ID NO: 66876 - DNA, 15 bp, Homo sapiens
ttgacctgaggacaa

SEQ ID NO: 66877 - DNA, 15 bp, Homo sapiens
attgacctgaggaca

SEQ ID NO: 66878 - DNA, 15 bp, Homo sapiens
gattgacctgaggac

SEQ ID NO: 66879 - DNA, 15 bp, Homo sapiens
ggattgacctgagga

SEQ ID NO: 66880 - DNA, 15 bp, Homo sapiens
aggattgacctgagg

SEQ ID NO: 66881 - DNA, 15 bp, Homo sapiens
caggattgacctgag

SEQ ID NO: 66882 - DNA, 15 bp, Homo sapiens
tcaggattgacctga

SEQ ID NO: 66883 - DNA, 15 bp, Homo sapiens
gtcaggattgacctg

SEQ ID NO: 66884 - DNA, 15 bp, Homo sapiens
ggtcaggattgacct

SEQ ID NO: 66885 - DNA, 15 bp, Homo sapiens
cggtcaggattgacc

SEQ ID NO: 66886 - DNA, 15 bp, Homo sapiens
ccggtcaggattgac

SEQ ID NO: 66887 - DNA, 15 bp, Homo sapiens
cccggtcaggattga

SEQ ID NO: 66888 - DNA, 15 bp, Homo sapiens
acccggtcaggattg

SEQ ID NO: 66889 - DNA, 15 bp, Homo sapiens
aacccggtcaggatt

SEQ ID NO: 66890 - DNA, 15 bp, Homo sapiens
caacccggtcaggat

SEQ ID NO: 66891 - DNA, 15 bp, Homo sapiens
acaacccggtcagga

SEQ ID NO: 66892 - DNA, 15 bp, Homo sapiens
aacaacccggtcagg

SEQ ID NO: 66893 - DNA, 15 bp, Homo sapiens
gaacaacccggtcag

SEQ ID NO: 66894 - DNA, 15 bp, Homo sapiens
ggaacaacccggtca

SEQ ID NO: 66895 - DNA, 15 bp, Homo sapiens
gggaacaacccggtc

SEQ ID NO: 66896 - DNA, 15 bp, Homo sapiens
ggggaacaacccggt

SEQ ID NO: 66897 - DNA, 15 bp, Homo sapiens
gggggaacaacccgg

SEQ ID NO: 66898 - DNA, 15 bp, Homo sapiens
ggggggaacaacccg

SEQ ID NO: 66899 - DNA, 15 bp, Homo sapiens
cggggggaacaaccc

SEQ ID NO: 66900 - DNA, 15 bp, Homo sapiens
tcggggggaacaacc

SEQ ID NO: 66901 - DNA, 15 bp, Homo sapiens
gtcggggggaacaac

SEQ ID NO: 66902 - DNA, 15 bp, Homo sapiens
ggtcggggggaacaa

SEQ ID NO: 66903 - DNA, 15 bp, Homo sapiens
aggtcggggggaaca

SEQ ID NO: 66904 - DNA, 15 bp, Homo sapiens
gaggtcggggggaac

SEQ ID NO: 66905 - DNA, 15 bp, Homo sapiens
cgaggtcggggggaa

SEQ ID NO: 66906 - DNA, 15 bp, Homo sapiens
ccgaggtcgggggga

SEQ ID NO: 66907 - DNA, 15 bp, Homo sapiens
cccgaggtcgggggg

SEQ ID NO: 66908 - DNA, 15 bp, Homo sapiens
gcccgaggtcggggg

SEQ ID NO: 66909 - DNA, 15 bp, Homo sapiens
tgcccgaggtcgggg

SEQ ID NO: 66910 - DNA, 15 bp, Homo sapiens
gtgcccgaggtcggg

SEQ ID NO: 66911 - DNA, 15 bp, Homo sapiens
ggtgcccgaggtcgg

SEQ ID NO: 66912 - DNA, 15 bp, Homo sapiens
cggtgcccgaggtcg

SEQ ID NO: 66913 - DNA, 15 bp, Homo sapiens
gcggtgcccgaggtc

SEQ ID NO: 66914 - DNA, 15 bp, Homo sapiens
ggcggtgcccgaggt

SEQ ID NO: 66915 - DNA, 15 bp, Homo sapiens
aggcggtgcccgagg

SEQ ID NO: 66916 - DNA, 15 bp, Homo sapiens
taggcggtgcccgag

SEQ ID NO: 66917 - DNA, 15 bp, Homo sapiens
gtaggcggtgcccga

SEQ ID NO: 66918 - DNA, 15 bp, Homo sapiens
tgtaggcggtgcccg

SEQ ID NO: 66919 - DNA, 15 bp, Homo sapiens
atgtaggcggtgccc

SEQ ID NO: 66920 - DNA, 15 bp, Homo sapiens
gatgtaggcggtgcc

SEQ ID NO: 66921 - DNA, 15 bp, Homo sapiens
ggatgtaggcggtgc

SEQ ID NO: 66922 - DNA, 15 bp, Homo sapiens
aggatgtaggcggtg

SEQ ID NO: 66923 - DNA, 15 bp, Homo sapiens
caggatgtaggcggt

SEQ ID NO: 66924 - DNA, 15 bp, Homo sapiens
ccaggatgtaggcgg

SEQ ID NO: 66925 - DNA, 15 bp, Homo sapiens
cccaggatgtaggcg

SEQ ID NO: 66926 - DNA, 15 bp, Homo sapiens
tcccaggatgtaggc

SEQ ID NO: 66927 - DNA, 15 bp, Homo sapiens
ttcccaggatgtagg

SEQ ID NO: 66928 - DNA, 15 bp, Homo sapiens
tttcccaggatgtag

SEQ ID NO: 66929 - DNA, 15 bp, Homo sapiens
ttttcccaggatgta

SEQ ID NO: 66930 - DNA, 15 bp, Homo sapiens
cttttcccaggatgt

SEQ ID NO: 66931 - DNA, 15 bp, Homo sapiens
tcttttcccaggatg

SEQ ID NO: 66932 - DNA, 15 bp, Homo sapiens
gtcttttcccaggat

SEQ ID NO: 66933 - DNA, 15 bp, Homo sapiens
tgtcttttcccagga

SEQ ID NO: 66934 - DNA, 15 bp, Homo sapiens
atgtcttttcccagg

SEQ ID NO: 66935 - DNA, 15 bp, Homo sapiens
aatgtcttttcccag

SEQ ID NO: 66936 - DNA, 15 bp, Homo sapiens
gaatgtcttttccca

SEQ ID NO: 66937 - DNA, 15 bp, Homo sapiens
cgaatgtcttttccc

SEQ ID NO: 66938 - DNA, 15 bp, Homo sapiens
gcgaatgtcttttcc

SEQ ID NO: 66939 - DNA, 15 bp, Homo sapiens
agcgaatgtcttttc

SEQ ID NO: 66940 - DNA, 15 bp, Homo sapiens
gagcgaatgtctttt

SEQ ID NO: 66941 - DNA, 15 bp, Homo sapiens
agagcgaatgtcttt

SEQ ID NO: 66942 - DNA, 15 bp, Homo sapiens
cagagcgaatgtctt

SEQ ID NO: 66943 - DNA, 15 bp, Homo sapiens
tcagagcgaatgtct

SEQ ID NO: 66944 - DNA, 15 bp, Homo sapiens
ctcagagcgaatgtc

SEQ ID NO: 66945 - DNA, 15 bp, Homo sapiens
tctcagagcgaatgt

SEQ ID NO: 66946 - DNA, 15 bp, Homo sapiens
atctcagagcgaatg

SEQ ID NO: 66947 - DNA, 15 bp, Homo sapiens
catctcagagcgaat

SEQ ID NO: 66948 - DNA, 15 bp, Homo sapiens
tcatctcagagcgaa

SEQ ID NO: 66949 - DNA, 15 bp, Homo sapiens
ctcatctcagagcga

SEQ ID NO: 66950 - DNA, 15 bp, Homo sapiens
gctcatctcagagcg

SEQ ID NO: 66951 - DNA, 15 bp, Homo sapiens
tgctcatctcagagc

SEQ ID NO: 66952 - DNA, 15 bp, Homo sapiens
gtgctcatctcagag

SEQ ID NO: 66953 - DNA, 15 bp, Homo sapiens
ggtgctcatctcaga

SEQ ID NO: 66954 - DNA, 15 bp, Homo sapiens
tggtgctcatctcag

SEQ ID NO: 66955 - DNA, 15 bp, Homo sapiens
atggtgctcatctca

SEQ ID NO: 66956 - DNA, 15 bp, Homo sapiens
gatggtgctcatctc

SEQ ID NO: 66957 - DNA, 15 bp, Homo sapiens
ggatggtgctcatct

SEQ ID NO: 66958 - DNA, 15 bp, Homo sapiens
cggatggtgctcatc

SEQ ID NO: 66959 - DNA, 15 bp, Homo sapiens
ccggatggtgctcat

SEQ ID NO: 66960 - DNA, 15 bp, Homo sapiens
gccggatggtgctca

SEQ ID NO: 66961 - DNA, 15 bp, Homo sapiens
tgccggatggtgctc

SEQ ID NO: 66962 - DNA, 15 bp, Homo sapiens
ctgccggatggtgct

SEQ ID NO: 66963 - DNA, 15 bp, Homo sapiens
tctgccggatggtgc

SEQ ID NO: 66964 - DNA, 15 bp, Homo sapiens
ttctgccggatggtg

SEQ ID NO: 66965 - DNA, 15 bp, Homo sapiens
gttctgccggatggt

SEQ ID NO: 66966 - DNA, 15 bp, Homo sapiens
ggttctgccggatgg

SEQ ID NO: 66967 - DNA, 15 bp, Homo sapiens
aggttctgccggatg

SEQ ID NO: 66968 - DNA, 15 bp, Homo sapiens
caggttctgccggat

SEQ ID NO: 66969 - DNA, 15 bp, Homo sapiens
ccaggttctgccgga

SEQ ID NO: 66970 - DNA, 15 bp, Homo sapiens
cccaggttctgccgg

SEQ ID NO: 66971 - DNA, 15 bp, Homo sapiens
ccccaggttctgccg

SEQ ID NO: 66972 - DNA, 15 bp, Homo sapiens
cccccaggttctgcc

SEQ ID NO: 66973 - DNA, 15 bp, Homo sapiens
acccccaggttctgc

SEQ ID NO: 66974 - DNA, 15 bp, Homo sapiens
gacccccaggttctg

SEQ ID NO: 66975 - DNA, 15 bp, Homo sapiens
agacccccaggttct

SEQ ID NO: 66976 - DNA, 15 bp, Homo sapiens
cagacccccaggttc

SEQ ID NO: 66977 - DNA, 15 bp, Homo sapiens
acagacccccaggtt

SEQ ID NO: 66978 - DNA, 15 bp, Homo sapiens
gacagacccccaggt

SEQ ID NO: 66979 - DNA, 15 bp, Homo sapiens
ggacagacccccagg

SEQ ID NO: 66980 - DNA, 15 bp, Homo sapiens
gggacagacccccag

SEQ ID NO: 66981 - DNA, 15 bp, Homo sapiens
ggggacagaccccca

SEQ ID NO: 66982 - DNA, 15 bp, Homo sapiens
tggggacagaccccc

SEQ ID NO: 66983 - DNA, 15 bp, Homo sapiens
ctggggacagacccc

SEQ ID NO: 66984 - DNA, 15 bp, Homo sapiens
gctggggacagaccc

SEQ ID NO: 66985 - DNA, 15 bp, Homo sapiens
tgctggggacagacc

SEQ ID NO: 66986 - DNA, 15 bp, Homo sapiens
atgctggggacagac

SEQ ID NO: 66987 - DNA, 15 bp, Homo sapiens
tatgctggggacaga

SEQ ID NO: 66988 - DNA, 15 bp, Homo sapiens
ttatgctggggacag

SEQ ID NO: 66989 - DNA, 15 bp, Homo sapiens
gttatgctggggaca

SEQ ID NO: 66990 - DNA, 15 bp, Homo sapiens
cgttatgctggggac

SEQ ID NO: 66991 - DNA, 15 bp, Homo sapiens
acgttatgctgggga

SEQ ID NO: 66992 - DNA, 15 bp, Homo sapiens
cacgttatgctgggg

SEQ ID NO: 66993 - DNA, 15 bp, Homo sapiens
gcacgttatgctggg

SEQ ID NO: 66994 - DNA, 15 bp, Homo sapiens
agcacgttatgctgg

SEQ ID NO: 66995 - DNA, 15 bp, Homo sapiens
cagcacgttatgctg

SEQ ID NO: 66996 - DNA, 15 bp, Homo sapiens
acagcacgttatgct

SEQ ID NO: 66997 - DNA, 15 bp, Homo sapiens
aacagcacgttatgc

SEQ ID NO: 66998 - DNA, 15 bp, Homo sapiens
aaacagcacgttatg

SEQ ID NO: 66999 - DNA, 15 bp, Homo sapiens
caaacagcacgttat

SEQ ID NO: 67000 - DNA, 15 bp, Homo sapiens
tcaaacagcacgtta

SEQ ID NO: 67001 - DNA, 15 bp, Homo sapiens
gtcaaacagcacgtt

SEQ ID NO: 67002 - DNA, 15 bp, Homo sapiens
tgtcaaacagcacgt

SEQ ID NO: 67003 - DNA, 15 bp, Homo sapiens
atgtcaaacagcacg

SEQ ID NO: 67004 - DNA, 15 bp, Homo sapiens
catgtcaaacagcac

SEQ ID NO: 67005 - DNA, 15 bp, Homo sapiens
acatgtcaaacagca

SEQ ID NO: 67006 - DNA, 15 bp, Homo sapiens
cacatgtcaaacagc

SEQ ID NO: 67007 - DNA, 15 bp, Homo sapiens
tcacatgtcaaacag

SEQ ID NO: 67008 - DNA, 15 bp, Homo sapiens
ctcacatgtcaaaca

SEQ ID NO: 67009 - DNA, 15 bp, Homo sapiens
actcacatgtcaaac

SEQ ID NO: 67010 - DNA, 15 bp, Homo sapiens
tactcacatgtcaaa

SEQ ID NO: 67011 - DNA, 15 bp, Homo sapiens
gtactcacatgtcaa

SEQ ID NO: 67012 - DNA, 15 bp, Homo sapiens
ggtactcacatgtca

SEQ ID NO: 67013 - DNA, 15 bp, Homo sapiens
tggtactcacatgtc

SEQ ID NO: 67014 - DNA, 15 bp, Homo sapiens
ctggtactcacatgt

SEQ ID NO: 67015 - DNA, 15 bp, Homo sapiens
gctggtactcacatg

SEQ ID NO: 67016 - DNA, 15 bp, Homo sapiens
tgctggtactcacat

SEQ ID NO: 67017 - DNA, 15 bp, Homo sapiens
ctgctggtactcaca

SEQ ID NO: 67018 - DNA, 15 bp, Homo sapiens
gctgctggtactcac

SEQ ID NO: 67019 - DNA, 15 bp, Homo sapiens
tgctgctggtactca

SEQ ID NO: 67020 - DNA, 15 bp, Homo sapiens
gtgctgctggtactc

SEQ ID NO: 67021 - DNA, 15 bp, Homo sapiens
cgtgctgctggtact

SEQ ID NO: 67022 - DNA, 15 bp, Homo sapiens
acgtgctgctggtac

SEQ ID NO: 67023 - DNA, 15 bp, Homo sapiens
aacgtgctgctggta

SEQ ID NO: 67024 - DNA, 15 bp, Homo sapiens
taacgtgctgctggt

SEQ ID NO: 67025 - DNA, 15 bp, Homo sapiens
ttaacgtgctgctgg

SEQ ID NO: 67026 - DNA, 15 bp, Homo sapiens
cttaacgtgctgctg

SEQ ID NO: 67027 - DNA, 15 bp, Homo sapiens
tcttaacgtgctgct

SEQ ID NO: 67028 - DNA, 15 bp, Homo sapiens
ttcttaacgtgctgc

SEQ ID NO: 67029 - DNA, 15 bp, Homo sapiens
attcttaacgtgctg

SEQ ID NO: 67030 - DNA, 15 bp, Homo sapiens
tattcttaacgtgct

SEQ ID NO: 67031 - DNA, 15 bp, Homo sapiens
ctattcttaacgtgc

SEQ ID NO: 67032 - DNA, 15 bp, Homo sapiens
cctattcttaacgtg

SEQ ID NO: 67033 - DNA, 15 bp, Homo sapiens
gcctattcttaacgt

SEQ ID NO: 67034 - DNA, 15 bp, Homo sapiens
ggcctattcttaacg

SEQ ID NO: 67035 - DNA, 15 bp, Homo sapiens
aggcctattcttaac

SEQ ID NO: 67036 - DNA, 15 bp, Homo sapiens
aaggcctattcttaa

SEQ ID NO: 67037 - DNA, 15 bp, Homo sapiens
aaaggcctattctta

SEQ ID NO: 67038 - DNA, 15 bp, Homo sapiens
aaaaggcctattctt

SEQ ID NO: 67039 - DNA, 15 bp, Homo sapiens
gaaaaggcctattct

SEQ ID NO: 67040 - DNA, 15 bp, Homo sapiens
agaaaaggcctattc

SEQ ID NO: 67041 - DNA, 15 bp, Homo sapiens
cagaaaaggcctatt

SEQ ID NO: 67042 - DNA, 15 bp, Homo sapiens
ccagaaaaggcctat

SEQ ID NO: 67043 - DNA, 15 bp, Homo sapiens
tccagaaaaggccta

SEQ ID NO: 67044 - DNA, 15 bp, Homo sapiens
atccagaaaaggcct

SEQ ID NO: 67045 - DNA, 15 bp, Homo sapiens
catccagaaaaggcc

SEQ ID NO: 67046 - DNA, 15 bp, Homo sapiens
acatccagaaaaggc

SEQ ID NO: 67047 - DNA, 15 bp, Homo sapiens
cacatccagaaaagg

SEQ ID NO: 67048 - DNA, 15 bp, Homo sapiens
acacatccagaaaag

SEQ ID NO: 67049 - DNA, 15 bp, Homo sapiens
cacacatccagaaaa

SEQ ID NO: 67050 - DNA, 15 bp, Homo sapiens
acacacatccagaaa

SEQ ID NO: 67051 - DNA, 15 bp, Homo sapiens
cacacacatccagaa

SEQ ID NO: 67052 - DNA, 15 bp, Homo sapiens
acacacacatccaga

SEQ ID NO: 67053 - DNA, 15 bp, Homo sapiens
cacacacacatccag

SEQ ID NO: 67054 - DNA, 15 bp, Homo sapiens
acacacacacatcca

SEQ ID NO: 67055 - DNA, 15 bp, Homo sapiens
gacacacacacatcc

SEQ ID NO: 67056 - DNA, 15 bp, Homo sapiens
tgacacacacacatc

SEQ ID NO: 67057 - DNA, 15 bp, Homo sapiens
atgacacacacacat

SEQ ID NO: 67058 - DNA, 15 bp, Homo sapiens
catgacacacacaca

SEQ ID NO: 67059 - DNA, 15 bp, Homo sapiens
gcatgacacacacac

SEQ ID NO: 67060 - DNA, 15 bp, Homo sapiens
ggcatgacacacaca

SEQ ID NO: 67061 - DNA, 15 bp, Homo sapiens
tggcatgacacacac

SEQ ID NO: 67062 - DNA, 15 bp, Homo sapiens
atggcatgacacaca

SEQ ID NO: 67063 - DNA, 15 bp, Homo sapiens
gatggcatgacacac

SEQ ID NO: 67064 - DNA, 15 bp, Homo sapiens
tgatggcatgacaca

SEQ ID NO: 67065 - DNA, 15 bp, Homo sapiens
atgatggcatgacac

SEQ ID NO: 67066 - DNA, 15 bp, Homo sapiens
catgatggcatgaca

SEQ ID NO: 67067 - DNA, 15 bp, Homo sapiens
ccatgatggcatgac

SEQ ID NO: 67068 - DNA, 15 bp, Homo sapiens
cccatgatggcatga

SEQ ID NO: 67069 - DNA, 15 bp, Homo sapiens
tcccatgatggcatg

SEQ ID NO: 67070 - DNA, 15 bp, Homo sapiens
ctcccatgatggcat

SEQ ID NO: 67071 - DNA, 15 bp, Homo sapiens
cctcccatgatggca

SEQ ID NO: 67072 - DNA, 15 bp, Homo sapiens
tcctcccatgatggc

SEQ ID NO: 67073 - DNA, 15 bp, Homo sapiens
ctcctcccatgatgg

SEQ ID NO: 67074 - DNA, 15 bp, Homo sapiens
actcctcccatgatg

SEQ ID NO: 67075 - DNA, 15 bp, Homo sapiens
cactcctcccatgat

SEQ ID NO: 67076 - DNA, 15 bp, Homo sapiens
ccactcctcccatga

SEQ ID NO: 67077 - DNA, 15 bp, Homo sapiens
cccactcctcccatg

SEQ ID NO: 67078 - DNA, 15 bp, Homo sapiens
tcccactcctcccat

SEQ ID NO: 67079 - DNA, 15 bp, Homo sapiens
gtcccactcctccca

SEQ ID NO: 67080 - DNA, 15 bp, Homo sapiens
agtcccactcctccc

SEQ ID NO: 67081 - DNA, 15 bp, Homo sapiens
aagtcccactcctcc

SEQ ID NO: 67082 - DNA, 15 bp, Homo sapiens
taagtcccactcctc

SEQ ID NO: 67083 - DNA, 15 bp, Homo sapiens
ttaagtcccactcct

SEQ ID NO: 67084 - DNA, 15 bp, Homo sapiens
cttaagtcccactcc

SEQ ID NO: 67085 - DNA, 15 bp, Homo sapiens
gcttaagtcccactc

SEQ ID NO: 67086 - DNA, 15 bp, Homo sapiens
tgcttaagtcccact

SEQ ID NO: 67087 - DNA, 15 bp, Homo sapiens
atgcttaagtcccac

SEQ ID NO: 67088 - DNA, 15 bp, Homo sapiens
aatgcttaagtccca

SEQ ID NO: 67089 - DNA, 15 bp, Homo sapiens
aaatgcttaagtccc

SEQ ID NO: 67090 - DNA, 15 bp, Homo sapiens
aaaatgcttaagtcc

SEQ ID NO: 67091 - DNA, 15 bp, Homo sapiens
taaaatgcttaagtc

SEQ ID NO: 67092 - DNA, 15 bp, Homo sapiens
gtaaaatgcttaagt

SEQ ID NO: 67093 - DNA, 15 bp, Homo sapiens
agtaaaatgcttaag

SEQ ID NO: 67094 - DNA, 15 bp, Homo sapiens
aagtaaaatgcttaa

SEQ ID NO: 67095 - DNA, 15 bp, Homo sapiens
aaagtaaaatgctta

SEQ ID NO: 67096 - DNA, 15 bp, Homo sapiens
caaagtaaaatgctt

SEQ ID NO: 67097 - DNA, 15 bp, Homo sapiens
gcaaagtaaaatgct

SEQ ID NO: 67098 - DNA, 15 bp, Homo sapiens
agcaaagtaaaatgc

SEQ ID NO: 67099 - DNA, 15 bp, Homo sapiens
cagcaaagtaaaatg

SEQ ID NO: 67100 - DNA, 15 bp, Homo sapiens
acagcaaagtaaaat

SEQ ID NO: 67101 - DNA, 15 bp, Homo sapiens
cacagcaaagtaaaa

SEQ ID NO: 67102 - DNA, 15 bp, Homo sapiens
acacagcaaagtaaa

SEQ ID NO: 67103 - DNA, 15 bp, Homo sapiens
aacacagcaaagtaa

SEQ ID NO: 67104 - DNA, 15 bp, Homo sapiens
aaacacagcaaagta

SEQ ID NO: 67105 - DNA, 15 bp, Homo sapiens
aaaacacagcaaagt

SEQ ID NO: 67106 - DNA, 15 bp, Homo sapiens
aaaaacacagcaaag

SEQ ID NO: 67107 - DNA, 15 bp, Homo sapiens
caaaaacacagcaaa

SEQ ID NO: 67108 - DNA, 15 bp, Homo sapiens
acaaaaacacagcaa

SEQ ID NO: 67109 - DNA, 15 bp, Homo sapiens
aacaaaaacacagca

SEQ ID NO: 67110 - DNA, 15 bp, Homo sapiens
aaacaaaaacacagc

SEQ ID NO: 67111 - DNA, 15 bp, Homo sapiens
aaaacaaaaacacag

SEQ ID NO: 67112 - DNA, 15 bp, Homo sapiens
aaaaacaaaaacaca

SEQ ID NO: 67113 - DNA, 15 bp, Homo sapiens
aaaaaacaaaaacac

SEQ ID NO: 67114 - DNA, 15 bp, Homo sapiens
gaaaaaacaaaaaca

SEQ ID NO: 67115 - DNA, 15 bp, Homo sapiens
agaaaaaacaaaaac

SEQ ID NO: 67116 - DNA, 15 bp, Homo sapiens
aagaaaaaacaaaaa

SEQ ID NO: 67117 - DNA, 15 bp, Homo sapiens
aaagaaaaaacaaaa

SEQ ID NO: 67118 - DNA, 15 bp, Homo sapiens
aaaagaaaaaacaaa

SEQ ID NO: 67119 - DNA, 15 bp, Homo sapiens
aaaaagaaaaaacaa

SEQ ID NO: 67120 - DNA, 15 bp, Homo sapiens
aaaaaagaaaaaaca

SEQ ID NO: 67121 - DNA, 15 bp, Homo sapiens
aaaaaaagaaaaaac

SEQ ID NO: 67122 - DNA, 15 bp, Homo sapiens
gaaaaaaagaaaaaa

SEQ ID NO: 67123 - DNA, 15 bp, Homo sapiens
aaaagaaaaaaagaa

SEQ ID NO: 67124 - DNA, 15 bp, Homo sapiens
aaaaagaaaaaaaga

SEQ ID NO: 67125 - DNA, 15 bp, Homo sapiens
aaaaaagaaaaaaag

SEQ ID NO: 67126 - DNA, 15 bp, Homo sapiens
taaaaaagaaaaaaa

SEQ ID NO: 67127 - DNA, 15 bp, Homo sapiens
ataaaaaagaaaaaa

SEQ ID NO: 67128 - DNA, 15 bp, Homo sapiens
aataaaaaagaaaaa

SEQ ID NO: 67129 - DNA, 15 bp, Homo sapiens
aaataaaaaagaaaa

SEQ ID NO: 67130 - DNA, 15 bp, Homo sapiens
aaaataaaaaagaaa

SEQ ID NO: 67131 - DNA, 15 bp, Homo sapiens
aaaaataaaaaagaa

SEQ ID NO: 67132 - DNA, 15 bp, Homo sapiens
aaaaaataaaaaaga

SEQ ID NO: 67133 - DNA, 15 bp, Homo sapiens
aaaaaaataaaaaag

SEQ ID NO: 67134 - DNA, 15 bp, Homo sapiens
ctcaaaaaaataaaa

SEQ ID NO: 67135 - DNA, 15 bp, Homo sapiens
tctcaaaaaaataaa

SEQ ID NO: 67136 - DNA, 15 bp, Homo sapiens
atctcaaaaaaataa

SEQ ID NO: 67137 - DNA, 15 bp, Homo sapiens
catctcaaaaaaata

SEQ ID NO: 67138 - DNA, 15 bp, Homo sapiens
ccatctcaaaaaaat

SEQ ID NO: 67139 - DNA, 15 bp, Homo sapiens
tacagagcgagactc

SEQ ID NO: 67140 - DNA, 15 bp, Homo sapiens
ctacagagcgagact

SEQ ID NO: 67141 - DNA, 15 bp, Homo sapiens
gctacagagcgagac

SEQ ID NO: 67142 - DNA, 15 bp, Homo sapiens
ggctacagagcgaga

SEQ ID NO: 67143 - DNA, 15 bp, Homo sapiens
tggctacagagcgag

SEQ ID NO: 67144 - DNA, 15 bp, Homo sapiens
ctggctacagagcga

SEQ ID NO: 67145 - DNA, 15 bp, Homo sapiens
cctggctacagagcg

SEQ ID NO: 67146 - DNA, 15 bp, Homo sapiens
gcctggctacagagc

SEQ ID NO: 67147 - DNA, 15 bp, Homo sapiens
agcctggctacagag

SEQ ID NO: 67148 - DNA, 15 bp, Homo sapiens
cagcctggctacaga

SEQ ID NO: 67149 - DNA, 15 bp, Homo sapiens
ccagcctggctacag

SEQ ID NO: 67150 - DNA, 15 bp, Homo sapiens
tccagcctggctaca

SEQ ID NO: 67151 - DNA, 15 bp, Homo sapiens
gtccagcctggctac

SEQ ID NO: 67152 - DNA, 15 bp, Homo sapiens
agtccagcctggcta

SEQ ID NO: 67153 - DNA, 15 bp, Homo sapiens
cagtccagcctggct

SEQ ID NO: 67154 - DNA, 15 bp, Homo sapiens
acagtccagcctggc

SEQ ID NO: 67155 - DNA, 15 bp, Homo sapiens
tacagtccagcctgg

SEQ ID NO: 67156 - DNA, 15 bp, Homo sapiens
ctacagtccagcctg

SEQ ID NO: 67157 - DNA, 15 bp, Homo sapiens
actacagtccagcct

SEQ ID NO: 67158 - DNA, 15 bp, Homo sapiens
cactacagtccagcc

SEQ ID NO: 67159 - DNA, 15 bp, Homo sapiens
ccactacagtccagc

SEQ ID NO: 67160 - DNA, 15 bp, Homo sapiens
gccactacagtccag

SEQ ID NO: 67161 - DNA, 15 bp, Homo sapiens
cgccactacagtcca

SEQ ID NO: 67162 - DNA, 15 bp, Homo sapiens
gcgccactacagtcc

SEQ ID NO: 67163 - DNA, 15 bp, Homo sapiens
cgcgccactacagtc

SEQ ID NO: 67164 - DNA, 15 bp, Homo sapiens
tcgcgccactacagt

SEQ ID NO: 67165 - DNA, 15 bp, Homo sapiens
atcgcgccactacag

SEQ ID NO: 67166 - DNA, 15 bp, Homo sapiens
gatcgcgccactaca

SEQ ID NO: 67167 - DNA, 15 bp, Homo sapiens
agatcgcgccactac

SEQ ID NO: 67168 - DNA, 15 bp, Homo sapiens
gagatcgcgccacta

SEQ ID NO: 67169 - DNA, 15 bp, Homo sapiens
ccgagatcgcgccac

SEQ ID NO: 67170 - DNA, 15 bp, Homo sapiens
gccgagatcgcgcca

SEQ ID NO: 67171 - DNA, 15 bp, Homo sapiens
agccgagatcgcgcc

SEQ ID NO: 67172 - DNA, 15 bp, Homo sapiens
gagccgagatcgcgc

SEQ ID NO: 67173 - DNA, 15 bp, Homo sapiens
tgagccgagatcgcg

SEQ ID NO: 67174 - DNA, 15 bp, Homo sapiens
gtgagccgagatcgc

SEQ ID NO: 67175 - DNA, 15 bp, Homo sapiens
caaggttgcagtgag

SEQ ID NO: 67176 - DNA, 15 bp, Homo sapiens
ccaaggttgcagtga

SEQ ID NO: 67177 - DNA, 15 bp, Homo sapiens
gccaaggttgcagtg

SEQ ID NO: 67178 - DNA, 15 bp, Homo sapiens
ggccaaggttgcagt

SEQ ID NO: 67179 - DNA, 15 bp, Homo sapiens
aggccaaggttgcag

SEQ ID NO: 67180 - DNA, 15 bp, Homo sapiens
gaggccaaggttgca

SEQ ID NO: 67181 - DNA, 15 bp, Homo sapiens
ggaggccaaggttgc

SEQ ID NO: 67182 - DNA, 15 bp, Homo sapiens
gggaggccaaggttg

SEQ ID NO: 67183 - DNA, 15 bp, Homo sapiens
tgggaggccaaggtt

SEQ ID NO: 67184 - DNA, 15 bp, Homo sapiens
ctgggaggccaaggt

SEQ ID NO: 67185 - DNA, 15 bp, Homo sapiens
cctgggaggccaagg

SEQ ID NO: 67186 - DNA, 15 bp, Homo sapiens
acctgggaggccaag

SEQ ID NO: 67187 - DNA, 15 bp, Homo sapiens
aacctgggaggccaa

SEQ ID NO: 67188 - DNA, 15 bp, Homo sapiens
gaacctgggaggcca

SEQ ID NO: 67189 - DNA, 15 bp, Homo sapiens
tgaacctgggaggcc

SEQ ID NO: 67190 - DNA, 15 bp, Homo sapiens
cgcttgaacctggga

SEQ ID NO: 67191 - DNA, 15 bp, Homo sapiens
tcgcttgaacctggg

SEQ ID NO: 67192 - DNA, 15 bp, Homo sapiens
atcgcttgaacctgg

SEQ ID NO: 67193 - DNA, 15 bp, Homo sapiens
aatcgcttgaacctg

SEQ ID NO: 67194 - DNA, 15 bp, Homo sapiens
gaatcgcttgaacct

SEQ ID NO: 67195 - DNA, 15 bp, Homo sapiens
gtcccagctactcgg

SEQ ID NO: 67196 - DNA, 15 bp, Homo sapiens
agtcccagctactcg

SEQ ID NO: 67197 - DNA, 15 bp, Homo sapiens
gagtcccagctactc

SEQ ID NO: 67198 - DNA, 15 bp, Homo sapiens
agagtcccagctact

SEQ ID NO: 67199 - DNA, 15 bp, Homo sapiens
tagagtcccagctac

SEQ ID NO: 67200 - DNA, 15 bp, Homo sapiens
ctagagtcccagcta

SEQ ID NO: 67201 - DNA, 15 bp, Homo sapiens
cctagagtcccagct

SEQ ID NO: 67202 - DNA, 15 bp, Homo sapiens
gcctagagtcccagc

SEQ ID NO: 67203 - DNA, 15 bp, Homo sapiens
tgcctagagtcccag

SEQ ID NO: 67204 - DNA, 15 bp, Homo sapiens
gtgcctagagtccca

SEQ ID NO: 67205 - DNA, 15 bp, Homo sapiens
tgtgcctagagtccc

SEQ ID NO: 67206 - DNA, 15 bp, Homo sapiens
gtgtgcctagagtcc

SEQ ID NO: 67207 - DNA, 15 bp, Homo sapiens
tgtgtgcctagagtc

SEQ ID NO: 67208 - DNA, 15 bp, Homo sapiens
gtgtgtgcctagagt

SEQ ID NO: 67209 - DNA, 15 bp, Homo sapiens
ggtgtgtgcctagag

SEQ ID NO: 67210 - DNA, 15 bp, Homo sapiens
tggtgtgtgcctaga

SEQ ID NO: 67211 - DNA, 15 bp, Homo sapiens
gtggtgtgtgcctag

SEQ ID NO: 67212 - DNA, 15 bp, Homo sapiens
ggtggtgtgtgccta

SEQ ID NO: 67213 - DNA, 15 bp, Homo sapiens
tggtggtgtgtgcct

SEQ ID NO: 67214 - DNA, 15 bp, Homo sapiens
atggtggtgtgtgcc

SEQ ID NO: 67215 - DNA, 15 bp, Homo sapiens
catggtggtgtgtgc

SEQ ID NO: 67216 - DNA, 15 bp, Homo sapiens
gcatggtggtgtgtg

SEQ ID NO: 67217 - DNA, 15 bp, Homo sapiens
ggcatggtggtgtgt

SEQ ID NO: 67218 - DNA, 15 bp, Homo sapiens
gggcatggtggtgtg

SEQ ID NO: 67219 - DNA, 15 bp, Homo sapiens
tgggcatggtggtgt

SEQ ID NO: 67220 - DNA, 15 bp, Homo sapiens
cacaaaaattagctg

SEQ ID NO: 67221 - DNA, 15 bp, Homo sapiens
acacaaaaattagct

SEQ ID NO: 67222 - DNA, 15 bp, Homo sapiens
aacacaaaaattagc

SEQ ID NO: 67223 - DNA, 15 bp, Homo sapiens
aaacacaaaaattag

SEQ ID NO: 67224 - DNA, 15 bp, Homo sapiens
aaaacacaaaaatta

SEQ ID NO: 67225 - DNA, 15 bp, Homo sapiens
aaaaacacaaaaatt

SEQ ID NO: 67226 - DNA, 15 bp, Homo sapiens
taaaaacacaaaaat

SEQ ID NO: 67227 - DNA, 15 bp, Homo sapiens
tctactaaaaacaca

SEQ ID NO: 67228 - DNA, 15 bp, Homo sapiens
ctctactaaaaacac

SEQ ID NO: 67229 - DNA, 15 bp, Homo sapiens
tctctactaaaaaca

SEQ ID NO: 67230 - DNA, 15 bp, Homo sapiens
gtctctactaaaaac

SEQ ID NO: 67231 - DNA, 15 bp, Homo sapiens
cattgagaccatcct

SEQ ID NO: 67232 - DNA, 15 bp, Homo sapiens
acattgagaccatcc

SEQ ID NO: 67233 - DNA, 15 bp, Homo sapiens
gacattgagaccatc

SEQ ID NO: 67234 - DNA, 15 bp, Homo sapiens
agacattgagaccat

SEQ ID NO: 67235 - DNA, 15 bp, Homo sapiens
aagacattgagacca

SEQ ID NO: 67236 - DNA, 15 bp, Homo sapiens
caagacattgagacc

SEQ ID NO: 67237 - DNA, 15 bp, Homo sapiens
tcaagacattgagac

SEQ ID NO: 67238 - DNA, 15 bp, Homo sapiens
gtcaagacattgaga

SEQ ID NO: 67239 - DNA, 15 bp, Homo sapiens
ggtcaagacattgag

SEQ ID NO: 67240 - DNA, 15 bp, Homo sapiens
aggtcaagacattga

SEQ ID NO: 67241 - DNA, 15 bp, Homo sapiens
gaggtcaagacattg

SEQ ID NO: 67242 - DNA, 15 bp, Homo sapiens
cgaggtcaagacatt

SEQ ID NO: 67243 - DNA, 15 bp, Homo sapiens
acgaggtcaagacat

SEQ ID NO: 67244 - DNA, 15 bp, Homo sapiens
cacgaggtcaagaca

SEQ ID NO: 67245 - DNA, 15 bp, Homo sapiens
tcacgaggtcaagac

SEQ ID NO: 67246 - DNA, 15 bp, Homo sapiens
accgaggtgggcgga

SEQ ID NO: 67247 - DNA, 15 bp, Homo sapiens
gaccgaggtgggcgg

SEQ ID NO: 67248 - DNA, 15 bp, Homo sapiens
agaccgaggtgggcg

SEQ ID NO: 67249 - DNA, 15 bp, Homo sapiens
gagaccgaggtgggc

SEQ ID NO: 67250 - DNA, 15 bp, Homo sapiens
ggagaccgaggtggg

SEQ ID NO: 67251 - DNA, 15 bp, Homo sapiens
gggagaccgaggtgg

SEQ ID NO: 67252 - DNA, 15 bp, Homo sapiens
tgggagaccgaggtg

SEQ ID NO: 67253 - DNA, 15 bp, Homo sapiens
ttgggagaccgaggt

SEQ ID NO: 67254 - DNA, 15 bp, Homo sapiens
tttgggagaccgagg

SEQ ID NO: 67255 - DNA, 15 bp, Homo sapiens
ctttgggagaccgag

SEQ ID NO: 67256 - DNA, 15 bp, Homo sapiens
actttgggagaccga

SEQ ID NO: 67257 - DNA, 15 bp, Homo sapiens
cactttgggagaccg

SEQ ID NO: 67258 - DNA, 15 bp, Homo sapiens
gcactttgggagacc

SEQ ID NO: 67259 - DNA, 15 bp, Homo sapiens
agcactttgggagac

SEQ ID NO: 67260 - DNA, 15 bp, Homo sapiens
cagcactttgggaga

SEQ ID NO: 67261 - DNA, 15 bp, Homo sapiens
ttcccagcactttgg

SEQ ID NO: 67262 - DNA, 15 bp, Homo sapiens
gttcccagcactttg

SEQ ID NO: 67263 - DNA, 15 bp, Homo sapiens
tgttcccagcacttt

SEQ ID NO: 67264 - DNA, 15 bp, Homo sapiens
gtgttcccagcactt

SEQ ID NO: 67265 - DNA, 15 bp, Homo sapiens
tgtgttcccagcact

SEQ ID NO: 67266 - DNA, 15 bp, Homo sapiens
ctgtgttcccagcac

SEQ ID NO: 67267 - DNA, 15 bp, Homo sapiens
cctgtgttcccagca

SEQ ID NO: 67268 - DNA, 15 bp, Homo sapiens
gcctgtgttcccagc

SEQ ID NO: 67269 - DNA, 15 bp, Homo sapiens
tgcctgtgttcccag

SEQ ID NO: 67270 - DNA, 15 bp, Homo sapiens
atgcctgtgttccca

SEQ ID NO: 67271 - DNA, 15 bp, Homo sapiens
catgcctgtgttccc

SEQ ID NO: 67272 - DNA, 15 bp, Homo sapiens
tcatgcctgtgttcc

SEQ ID NO: 67273 - DNA, 15 bp, Homo sapiens
ctcatgcctgtgttc

SEQ ID NO: 67274 - DNA, 15 bp, Homo sapiens
gctcatgcctgtgtt

SEQ ID NO: 67275 - DNA, 15 bp, Homo sapiens
ggctcatgcctgtgt

SEQ ID NO: 67276 - DNA, 15 bp, Homo sapiens
tggctcatgcctgtg

SEQ ID NO: 67277 - DNA, 15 bp, Homo sapiens
acacagtggctcatg

SEQ ID NO: 67278 - DNA, 15 bp, Homo sapiens
gacacagtggctcat

SEQ ID NO: 67279 - DNA, 15 bp, Homo sapiens
agacacagtggctca

SEQ ID NO: 67280 - DNA, 15 bp, Homo sapiens
cagacacagtggctc

SEQ ID NO: 67281 - DNA, 15 bp, Homo sapiens
ccagacacagtggct

SEQ ID NO: 67282 - DNA, 15 bp, Homo sapiens
gccagacacagtggc

SEQ ID NO: 67283 - DNA, 15 bp, Homo sapiens
ggccagacacagtgg

SEQ ID NO: 67284 - DNA, 15 bp, Homo sapiens
tggccagacacagtg

SEQ ID NO: 67285 - DNA, 15 bp, Homo sapiens
gtggccagacacagt

SEQ ID NO: 67286 - DNA, 15 bp, Homo sapiens
tgtggccagacacag

SEQ ID NO: 67287 - DNA, 15 bp, Homo sapiens
atgtggccagacaca

SEQ ID NO: 67288 - DNA, 15 bp, Homo sapiens
aatgtggccagacac

SEQ ID NO: 67289 - DNA, 15 bp, Homo sapiens
aaatgtggccagaca

SEQ ID NO: 67290 - DNA, 15 bp, Homo sapiens
aaaatgtggccagac

SEQ ID NO: 67291 - DNA, 15 bp, Homo sapiens
taaaatgtggccaga

SEQ ID NO: 67292 - DNA, 15 bp, Homo sapiens
gtaaaatgtggccag

SEQ ID NO: 67293 - DNA, 15 bp, Homo sapiens
agtaaaatgtggcca

SEQ ID NO: 67294 - DNA, 15 bp, Homo sapiens
aagtaaaatgtggcc

SEQ ID NO: 67295 - DNA, 15 bp, Homo sapiens
aaagtaaaatgtggc

SEQ ID NO: 67296 - DNA, 15 bp, Homo sapiens
gaaagtaaaatgtgg

SEQ ID NO: 67297 - DNA, 15 bp, Homo sapiens
agaaagtaaaatgtg

SEQ ID NO: 67298 - DNA, 15 bp, Homo sapiens
aagaaagtaaaatgt

SEQ ID NO: 67299 - DNA, 15 bp, Homo sapiens
aaagaaagtaaaatg

SEQ ID NO: 67300 - DNA, 15 bp, Homo sapiens
caaagaaagtaaaat

SEQ ID NO: 67301 - DNA, 15 bp, Homo sapiens
tcaaagaaagtaaaa

SEQ ID NO: 67302 - DNA, 15 bp, Homo sapiens
ttcaaagaaagtaaa

SEQ ID NO: 67303 - DNA, 15 bp, Homo sapiens
attcaaagaaagtaa

SEQ ID NO: 67304 - DNA, 15 bp, Homo sapiens
tattcaaagaaagta

SEQ ID NO: 67305 - DNA, 15 bp, Homo sapiens
atattcaaagaaagt

SEQ ID NO: 67306 - DNA, 15 bp, Homo sapiens
catattcaaagaaag

SEQ ID NO: 67307 - DNA, 15 bp, Homo sapiens
ccatattcaaagaaa

SEQ ID NO: 67308 - DNA, 15 bp, Homo sapiens
gccatattcaaagaa

SEQ ID NO: 67309 - DNA, 15 bp, Homo sapiens
tgccatattcaaaga

SEQ ID NO: 67310 - DNA, 15 bp, Homo sapiens
ctgccatattcaaag

SEQ ID NO: 67311 - DNA, 15 bp, Homo sapiens
cctgccatattcaaa

SEQ ID NO: 67312 - DNA, 15 bp, Homo sapiens
gcctgccatattcaa

SEQ ID NO: 67313 - DNA, 15 bp, Homo sapiens
agcctgccatattca

SEQ ID NO: 67314 - DNA, 15 bp, Homo sapiens
gagcctgccatattc

SEQ ID NO: 67315 - DNA, 15 bp, Homo sapiens
tgagcctgccatatt

SEQ ID NO: 67316 - DNA, 15 bp, Homo sapiens
gtgagcctgccatat

SEQ ID NO: 67317 - DNA, 15 bp, Homo sapiens
ggtgagcctgccata

SEQ ID NO: 67318 - DNA, 15 bp, Homo sapiens
aggtgagcctgccat

SEQ ID NO: 67319 - DNA, 15 bp, Homo sapiens
gaggtgagcctgcca

SEQ ID NO: 67320 - DNA, 15 bp, Homo sapiens
ggaggtgagcctgcc

SEQ ID NO: 67321 - DNA, 15 bp, Homo sapiens
cggaggtgagcctgc

SEQ ID NO: 67322 - DNA, 15 bp, Homo sapiens
acggaggtgagcctg

SEQ ID NO: 67323 - DNA, 15 bp, Homo sapiens
cacggaggtgagcct

SEQ ID NO: 67324 - DNA, 15 bp, Homo sapiens
tcacggaggtgagcc

SEQ ID NO: 67325 - DNA, 15 bp, Homo sapiens
ttcacggaggtgagc

SEQ ID NO: 67326 - DNA, 15 bp, Homo sapiens
gttcacggaggtgag

SEQ ID NO: 67327 - DNA, 15 bp, Homo sapiens
tgttcacggaggtga

SEQ ID NO: 67328 - DNA, 15 bp, Homo sapiens
gtgttcacggaggtg

SEQ ID NO: 67329 - DNA, 15 bp, Homo sapiens
ggtgttcacggaggt

SEQ ID NO: 67330 - DNA, 15 bp, Homo sapiens
aggtgttcacggagg

SEQ ID NO: 67331 - DNA, 15 bp, Homo sapiens
aaggtgttcacggag

SEQ ID NO: 67332 - DNA, 15 bp, Homo sapiens
caaggtgttcacgga

SEQ ID NO: 67333 - DNA, 15 bp, Homo sapiens
tcaaggtgttcacgg

SEQ ID NO: 67334 - DNA, 15 bp, Homo sapiens
ctcaaggtgttcacg

SEQ ID NO: 67335 - DNA, 15 bp, Homo sapiens
tctcaaggtgttcac

SEQ ID NO: 67336 - DNA, 15 bp, Homo sapiens
gtctcaaggtgttca

SEQ ID NO: 67337 - DNA, 15 bp, Homo sapiens
ggtctcaaggtgttc

SEQ ID NO: 67338 - DNA, 15 bp, Homo sapiens
aggtctcaaggtgtt

SEQ ID NO: 67339 - DNA, 15 bp, Homo sapiens
taggtctcaaggtgt

SEQ ID NO: 67340 - DNA, 15 bp, Homo sapiens
ctaggtctcaaggtg

SEQ ID NO: 67341 - DNA, 15 bp, Homo sapiens
actaggtctcaaggt

SEQ ID NO: 67342 - DNA, 15 bp, Homo sapiens
aactaggtctcaagg

SEQ ID NO: 67343 - DNA, 15 bp, Homo sapiens
caactaggtctcaag

SEQ ID NO: 67344 - DNA, 15 bp, Homo sapiens
acaactaggtctcaa

SEQ ID NO: 67345 - DNA, 15 bp, Homo sapiens
aacaactaggtctca

SEQ ID NO: 67346 - DNA, 15 bp, Homo sapiens
gaacaactaggtctc

SEQ ID NO: 67347 - DNA, 15 bp, Homo sapiens
agaacaactaggtct

SEQ ID NO: 67348 - DNA, 15 bp, Homo sapiens
aagaacaactaggtc

SEQ ID NO: 67349 - DNA, 15 bp, Homo sapiens
aaagaacaactaggt

SEQ ID NO: 67350 - DNA, 15 bp, Homo sapiens
caaagaacaactagg

SEQ ID NO: 67351 - DNA, 15 bp, Homo sapiens
tcaaagaacaactag

SEQ ID NO: 67352 - DNA, 15 bp, Homo sapiens
atcaaagaacaacta

SEQ ID NO: 67353 - DNA, 15 bp, Homo sapiens
aatcaaagaacaact

SEQ ID NO: 67354 - DNA, 15 bp, Homo sapiens
aaatcaaagaacaac

SEQ ID NO: 67355 - DNA, 15 bp, Homo sapiens
aaaatcaaagaacaa

SEQ ID NO: 67356 - DNA, 15 bp, Homo sapiens
taaaatcaaagaaca

SEQ ID NO: 67357 - DNA, 15 bp, Homo sapiens
ctaaaatcaaagaac

SEQ ID NO: 67358 - DNA, 15 bp, Homo sapiens
cctaaaatcaaagaa

SEQ ID NO: 67359 - DNA, 15 bp, Homo sapiens
tcctaaaatcaaaga

SEQ ID NO: 67360 - DNA, 15 bp, Homo sapiens
ctcctaaaatcaaag

SEQ ID NO: 67361 - DNA, 15 bp, Homo sapiens
tctcctaaaatcaaa

SEQ ID NO: 67362 - DNA, 15 bp, Homo sapiens
ttctcctaaaatcaa

SEQ ID NO: 67363 - DNA, 15 bp, Homo sapiens
cttctcctaaaatca

SEQ ID NO: 67364 - DNA, 15 bp, Homo sapiens
acttctcctaaaatc

SEQ ID NO: 67365 - DNA, 15 bp, Homo sapiens
cacttctcctaaaat

SEQ ID NO: 67366 - DNA, 15 bp, Homo sapiens
ccacttctcctaaaa

SEQ ID NO: 67367 - DNA, 15 bp, Homo sapiens
cccacttctcctaaa

SEQ ID NO: 67368 - DNA, 15 bp, Homo sapiens
tcccacttctcctaa

SEQ ID NO: 67369 - DNA, 15 bp, Homo sapiens
ctcccacttctccta

SEQ ID NO: 67370 - DNA, 15 bp, Homo sapiens
cctcccacttctcct

SEQ ID NO: 67371 - DNA, 15 bp, Homo sapiens
acctcccacttctcc

SEQ ID NO: 67372 - DNA, 15 bp, Homo sapiens
cacctcccacttctc

SEQ ID NO: 67373 - DNA, 15 bp, Homo sapiens
tcacctcccacttct

SEQ ID NO: 67374 - DNA, 15 bp, Homo sapiens
ttcacctcccacttc

SEQ ID NO: 67375 - DNA, 15 bp, Homo sapiens
attcacctcccactt

SEQ ID NO: 67376 - DNA, 15 bp, Homo sapiens
cattcacctcccact

SEQ ID NO: 67377 - DNA, 15 bp, Homo sapiens
ccattcacctcccac

SEQ ID NO: 67378 - DNA, 15 bp, Homo sapiens
accattcacctccca

SEQ ID NO: 67379 - DNA, 15 bp, Homo sapiens
aaccattcacctccc

SEQ ID NO: 67380 - DNA, 15 bp, Homo sapiens
caaccattcacctcc

SEQ ID NO: 67381 - DNA, 15 bp, Homo sapiens
tcaaccattcacctc

SEQ ID NO: 67382 - DNA, 15 bp, Homo sapiens
ctcaaccattcacct

SEQ ID NO: 67383 - DNA, 15 bp, Homo sapiens
gctcaaccattcacc

SEQ ID NO: 67384 - DNA, 15 bp, Homo sapiens
agctcaaccattcac

SEQ ID NO: 67385 - DNA, 15 bp, Homo sapiens
cagctcaaccattca

SEQ ID NO: 67386 - DNA, 15 bp, Homo sapiens
acagctcaaccattc

SEQ ID NO: 67387 - DNA, 15 bp, Homo sapiens
tacagctcaaccatt

SEQ ID NO: 67388 - DNA, 15 bp, Homo sapiens
ctacagctcaaccat

SEQ ID NO: 67389 - DNA, 15 bp, Homo sapiens
tctacagctcaacca

SEQ ID NO: 67390 - DNA, 15 bp, Homo sapiens
ctctacagctcaacc

SEQ ID NO: 67391 - DNA, 15 bp, Homo sapiens
cctctacagctcaac

SEQ ID NO: 67392 - DNA, 15 bp, Homo sapiens
acctctacagctcaa

SEQ ID NO: 67393 - DNA, 15 bp, Homo sapiens
cacctctacagctca

SEQ ID NO: 67394 - DNA, 15 bp, Homo sapiens
tcacctctacagctc

SEQ ID NO: 67395 - DNA, 15 bp, Homo sapiens
gtcacctctacagct

SEQ ID NO: 67396 - DNA, 15 bp, Homo sapiens
tgtcacctctacagc

SEQ ID NO: 67397 - DNA, 15 bp, Homo sapiens
atgtcacctctacag

SEQ ID NO: 67398 - DNA, 15 bp, Homo sapiens
gatgtcacctctaca

SEQ ID NO: 67399 - DNA, 15 bp, Homo sapiens
tgatgtcacctctac

SEQ ID NO: 67400 - DNA, 15 bp, Homo sapiens
ctgatgtcacctcta

SEQ ID NO: 67401 - DNA, 15 bp, Homo sapiens
gctgatgtcacctct

SEQ ID NO: 67402 - DNA, 15 bp, Homo sapiens
ggctgatgtcacctc

SEQ ID NO: 67403 - DNA, 15 bp, Homo sapiens
gggctgatgtcacct

SEQ ID NO: 67404 - DNA, 15 bp, Homo sapiens
tgggctgatgtcacc

SEQ ID NO: 67405 - DNA, 15 bp, Homo sapiens
ctgggctgatgtcac

SEQ ID NO: 67406 - DNA, 15 bp, Homo sapiens
gctgggctgatgtca

SEQ ID NO: 67407 - DNA, 15 bp, Homo sapiens
ggctgggctgatgtc

SEQ ID NO: 67408 - DNA, 15 bp, Homo sapiens
tggctgggctgatgt

SEQ ID NO: 67409 - DNA, 15 bp, Homo sapiens
ctggctgggctgatg

SEQ ID NO: 67410 - DNA, 15 bp, Homo sapiens
actggctgggctgat

SEQ ID NO: 67411 - DNA, 15 bp, Homo sapiens
cactggctgggctga

SEQ ID NO: 67412 - DNA, 15 bp, Homo sapiens
ccactggctgggctg

SEQ ID NO: 67413 - DNA, 15 bp, Homo sapiens
tccactggctgggct

SEQ ID NO: 67414 - DNA, 15 bp, Homo sapiens
atccactggctgggc

SEQ ID NO: 67415 - DNA, 15 bp, Homo sapiens
catccactggctggg

SEQ ID NO: 67416 - DNA, 15 bp, Homo sapiens
ccatccactggctgg

SEQ ID NO: 67417 - DNA, 15 bp, Homo sapiens
cccatccactggctg

SEQ ID NO: 67418 - DNA, 15 bp, Homo sapiens
ccccatccactggct

SEQ ID NO: 67419 - DNA, 15 bp, Homo sapiens
cccccatccactggc

SEQ ID NO: 67420 - DNA, 15 bp, Homo sapiens
gcccccatccactgg

SEQ ID NO: 67421 - DNA, 15 bp, Homo sapiens
agcccccatccactg

SEQ ID NO: 67422 - DNA, 15 bp, Homo sapiens
aagcccccatccact

SEQ ID NO: 67423 - DNA, 15 bp, Homo sapiens
caagcccccatccac

SEQ ID NO: 67424 - DNA, 15 bp, Homo sapiens
ccaagcccccatcca

SEQ ID NO: 67425 - DNA, 15 bp, Homo sapiens
cccaagcccccatcc

SEQ ID NO: 67426 - DNA, 15 bp, Homo sapiens
tcccaagcccccatc

SEQ ID NO: 67427 - DNA, 15 bp, Homo sapiens
ttcccaagcccccat

SEQ ID NO: 67428 - DNA, 15 bp, Homo sapiens
tttcccaagccccca

SEQ ID NO: 67429 - DNA, 15 bp, Homo sapiens
gtttcccaagccccc

SEQ ID NO: 67430 - DNA, 15 bp, Homo sapiens
tgtttcccaagcccc

SEQ ID NO: 67431 - DNA, 15 bp, Homo sapiens
atgtttcccaagccc

SEQ ID NO: 67432 - DNA, 15 bp, Homo sapiens
aatgtttcccaagcc

SEQ ID NO: 67433 - DNA, 15 bp, Homo sapiens
caatgtttcccaagc

SEQ ID NO: 67434 - DNA, 15 bp, Homo sapiens
gcaatgtttcccaag

SEQ ID NO: 67435 - DNA, 15 bp, Homo sapiens
agcaatgtttcccaa

SEQ ID NO: 67436 - DNA, 15 bp, Homo sapiens
aagcaatgtttccca

SEQ ID NO: 67437 - DNA, 15 bp, Homo sapiens
gaagcaatgtttccc

SEQ ID NO: 67438 - DNA, 15 bp, Homo sapiens
ggaagcaatgtttcc

SEQ ID NO: 67439 - DNA, 15 bp, Homo sapiens
gggaagcaatgtttc

SEQ ID NO: 67440 - DNA, 15 bp, Homo sapiens
tgggaagcaatgttt

SEQ ID NO: 67441 - DNA, 15 bp, Homo sapiens
atgggaagcaatgtt

SEQ ID NO: 67442 - DNA, 15 bp, Homo sapiens
aatgggaagcaatgt

SEQ ID NO: 67443 - DNA, 15 bp, Homo sapiens
taatgggaagcaatg

SEQ ID NO: 67444 - DNA, 15 bp, Homo sapiens
ataatgggaagcaat

SEQ ID NO: 67445 - DNA, 15 bp, Homo sapiens
aataatgggaagcaa

SEQ ID NO: 67446 - DNA, 15 bp, Homo sapiens
caataatgggaagca

SEQ ID NO: 67447 - DNA, 15 bp, Homo sapiens
acaataatgggaagc

SEQ ID NO: 67448 - DNA, 15 bp, Homo sapiens
gacaataatgggaag

SEQ ID NO: 67449 - DNA, 15 bp, Homo sapiens
tgacaataatgggaa

SEQ ID NO: 67450 - DNA, 15 bp, Homo sapiens
atgacaataatggga

SEQ ID NO: 67451 - DNA, 15 bp, Homo sapiens
catgacaataatggg

SEQ ID NO: 67452 - DNA, 15 bp, Homo sapiens
gcatgacaataatgg

SEQ ID NO: 67453 - DNA, 15 bp, Homo sapiens
agcatgacaataatg

SEQ ID NO: 67454 - DNA, 15 bp, Homo sapiens
cagcatgacaataat

SEQ ID NO: 67455 - DNA, 15 bp, Homo sapiens
ccagcatgacaataa

SEQ ID NO: 67456 - DNA, 15 bp, Homo sapiens
tccagcatgacaata

SEQ ID NO: 67457 - DNA, 15 bp, Homo sapiens
ctccagcatgacaat

SEQ ID NO: 67458 - DNA, 15 bp, Homo sapiens
cctccagcatgacaa

SEQ ID NO: 67459 - DNA, 15 bp, Homo sapiens
ccctccagcatgaca

SEQ ID NO: 67460 - DNA, 15 bp, Homo sapiens
gccctccagcatgac

SEQ ID NO: 67461 - DNA, 15 bp, Homo sapiens
ggccctccagcatga

SEQ ID NO: 67462 - DNA, 15 bp, Homo sapiens
gggccctccagcatg

SEQ ID NO: 67463 - DNA, 15 bp, Homo sapiens
agggccctccagcat

SEQ ID NO: 67464 - DNA, 15 bp, Homo sapiens
aagggccctccagca

SEQ ID NO: 67465 - DNA, 15 bp, Homo sapiens
aaagggccctccagc

SEQ ID NO: 67466 - DNA, 15 bp, Homo sapiens
taaagggccctccag

SEQ ID NO: 67467 - DNA, 15 bp, Homo sapiens
ctaaagggccctcca

SEQ ID NO: 67468 - DNA, 15 bp, Homo sapiens
gctaaagggccctcc

SEQ ID NO: 67469 - DNA, 15 bp, Homo sapiens
ggctaaagggccctc

SEQ ID NO: 67470 - DNA, 15 bp, Homo sapiens
gggctaaagggccct

SEQ ID NO: 67471 - DNA, 15 bp, Homo sapiens
tgggctaaagggccc

SEQ ID NO: 67472 - DNA, 15 bp, Homo sapiens
atgggctaaagggcc

SEQ ID NO: 67473 - DNA, 15 bp, Homo sapiens
gatgggctaaagggc

SEQ ID NO: 67474 - DNA, 15 bp, Homo sapiens
ggatgggctaaaggg

SEQ ID NO: 67475 - DNA, 15 bp, Homo sapiens
aggatgggctaaagg

SEQ ID NO: 67476 - DNA, 15 bp, Homo sapiens
gaggatgggctaaag

SEQ ID NO: 67477 - DNA, 15 bp, Homo sapiens
agaggatgggctaaa

SEQ ID NO: 67478 - DNA, 15 bp, Homo sapiens
gagaggatgggctaa

SEQ ID NO: 67479 - DNA, 15 bp, Homo sapiens
ggagaggatgggcta

SEQ ID NO: 67480 - DNA, 15 bp, Homo sapiens
gggagaggatgggct

SEQ ID NO: 67481 - DNA, 15 bp, Homo sapiens
ggggagaggatgggc

SEQ ID NO: 67482 - DNA, 15 bp, Homo sapiens
gggggagaggatggg

SEQ ID NO: 67483 - DNA, 15 bp, Homo sapiens
cgggggagaggatgg

SEQ ID NO: 67484 - DNA, 15 bp, Homo sapiens
gcgggggagaggatg

SEQ ID NO: 67485 - DNA, 15 bp, Homo sapiens
ggcgggggagaggat

SEQ ID NO: 67486 - DNA, 15 bp, Homo sapiens
tggcgggggagagga

SEQ ID NO: 67487 - DNA, 15 bp, Homo sapiens
gtggcgggggagagg

SEQ ID NO: 67488 - DNA, 15 bp, Homo sapiens
gagggtggcggggga

SEQ ID NO: 67489 - DNA, 15 bp, Homo sapiens
ggagggtggcggggg

SEQ ID NO: 67490 - DNA, 15 bp, Homo sapiens
aggagggtggcgggg

SEQ ID NO: 67491 - DNA, 15 bp, Homo sapiens
aaggagggtggcggg

SEQ ID NO: 67492 - DNA, 15 bp, Homo sapiens
taaggagggtggcgg

SEQ ID NO: 67493 - DNA, 15 bp, Homo sapiens
ataaggagggtggcg

SEQ ID NO: 67494 - DNA, 15 bp, Homo sapiens
aataaggagggtggc

SEQ ID NO: 67495 - DNA, 15 bp, Homo sapiens
caataaggagggtgg

SEQ ID NO: 67496 - DNA, 15 bp, Homo sapiens
tcaataaggagggtg

SEQ ID NO: 67497 - DNA, 15 bp, Homo sapiens
ctcaataaggagggt

SEQ ID NO: 67498 - DNA, 15 bp, Homo sapiens
cctcaataaggaggg

SEQ ID NO: 67499 - DNA, 15 bp, Homo sapiens
gcctcaataaggagg

SEQ ID NO: 67500 - DNA, 15 bp, Homo sapiens
ggcctcaataaggag

SEQ ID NO: 67501 - DNA, 15 bp, Homo sapiens
aggcctcaataagga

SEQ ID NO: 67502 - DNA, 15 bp, Homo sapiens
caggcctcaataagg

SEQ ID NO: 67503 - DNA, 15 bp, Homo sapiens
ccaggcctcaataag

SEQ ID NO: 67504 - DNA, 15 bp, Homo sapiens
tccaggcctcaataa

SEQ ID NO: 67505 - DNA, 15 bp, Homo sapiens
ctccaggcctcaata

SEQ ID NO: 67506 - DNA, 15 bp, Homo sapiens
gctccaggcctcaat

SEQ ID NO: 67507 - DNA, 15 bp, Homo sapiens
tgctccaggcctcaa

SEQ ID NO: 67508 - DNA, 15 bp, Homo sapiens
ctgctccaggcctca

SEQ ID NO: 67509 - DNA, 15 bp, Homo sapiens
tctgctccaggcctc

SEQ ID NO: 67510 - DNA, 15 bp, Homo sapiens
gtctgctccaggcct

SEQ ID NO: 67511 - DNA, 15 bp, Homo sapiens
agtctgctccaggcc

SEQ ID NO: 67512 - DNA, 15 bp, Homo sapiens
aagtctgctccaggc

SEQ ID NO: 67513 - DNA, 15 bp, Homo sapiens
gaagtctgctccagg

SEQ ID NO: 67514 - DNA, 15 bp, Homo sapiens
ggaagtctgctccag

SEQ ID NO: 67515 - DNA, 15 bp, Homo sapiens
gggaagtctgctcca

SEQ ID NO: 67516 - DNA, 15 bp, Homo sapiens
tgggaagtctgctcc

SEQ ID NO: 67517 - DNA, 15 bp, Homo sapiens
ctgggaagtctgctc

SEQ ID NO: 67518 - DNA, 15 bp, Homo sapiens
tctgggaagtctgct

SEQ ID NO: 67519 - DNA, 15 bp, Homo sapiens
gtctgggaagtctgc

SEQ ID NO: 67520 - DNA, 15 bp, Homo sapiens
ggtctgggaagtctg

SEQ ID NO: 67521 - DNA, 15 bp, Homo sapiens
aggtctgggaagtct

SEQ ID NO: 67522 - DNA, 15 bp, Homo sapiens
caggtctgggaagtc

SEQ ID NO: 67523 - DNA, 15 bp, Homo sapiens
ccaggtctgggaagt

SEQ ID NO: 67524 - DNA, 15 bp, Homo sapiens
accaggtctgggaag

SEQ ID NO: 67525 - DNA, 15 bp, Homo sapiens
taccaggtctgggaa

SEQ ID NO: 67526 - DNA, 15 bp, Homo sapiens
ctaccaggtctggga

SEQ ID NO: 67527 - DNA, 15 bp, Homo sapiens
actaccaggtctggg

SEQ ID NO: 67528 - DNA, 15 bp, Homo sapiens
cactaccaggtctgg

SEQ ID NO: 67529 - DNA, 15 bp, Homo sapiens
gcactaccaggtctg

SEQ ID NO: 67530 - DNA, 15 bp, Homo sapiens
agcactaccaggtct

SEQ ID NO: 67531 - DNA, 15 bp, Homo sapiens
aagcactaccaggtc

SEQ ID NO: 67532 - DNA, 15 bp, Homo sapiens
gaagcactaccaggt

SEQ ID NO: 67533 - DNA, 15 bp, Homo sapiens
tgaagcactaccagg

SEQ ID NO: 67534 - DNA, 15 bp, Homo sapiens
ctgaagcactaccag

SEQ ID NO: 67535 - DNA, 15 bp, Homo sapiens
cctgaagcactacca

SEQ ID NO: 67536 - DNA, 15 bp, Homo sapiens
ccctgaagcactacc

SEQ ID NO: 67537 - DNA, 15 bp, Homo sapiens
gccctgaagcactac

SEQ ID NO: 67538 - DNA, 15 bp, Homo sapiens
ggccctgaagcacta

SEQ ID NO: 67539 - DNA, 15 bp, Homo sapiens
gggccctgaagcact

SEQ ID NO: 67540 - DNA, 15 bp, Homo sapiens
agggccctgaagcac

SEQ ID NO: 67541 - DNA, 15 bp, Homo sapiens
cagggccctgaagca

SEQ ID NO: 67542 - DNA, 15 bp, Homo sapiens
ccagggccctgaagc

SEQ ID NO: 67543 - DNA, 15 bp, Homo sapiens
accagggccctgaag

SEQ ID NO: 67544 - DNA, 15 bp, Homo sapiens
taccagggccctgaa

SEQ ID NO: 67545 - DNA, 15 bp, Homo sapiens
ataccagggccctga

SEQ ID NO: 67546 - DNA, 15 bp, Homo sapiens
cataccagggccctg

SEQ ID NO: 67547 - DNA, 15 bp, Homo sapiens
tcataccagggccct

SEQ ID NO: 67548 - DNA, 15 bp, Homo sapiens
atcataccagggccc

SEQ ID NO: 67549 - DNA, 15 bp, Homo sapiens
catcataccagggcc

SEQ ID NO: 67550 - DNA, 15 bp, Homo sapiens
ccatcataccagggc

SEQ ID NO: 67551 - DNA, 15 bp, Homo sapiens
tccatcataccaggg

SEQ ID NO: 67552 - DNA, 15 bp, Homo sapiens
gtccatcataccagg

SEQ ID NO: 67553 - DNA, 15 bp, Homo sapiens
ggtccatcataccag

SEQ ID NO: 67554 - DNA, 15 bp, Homo sapiens
aggtccatcatacca

SEQ ID NO: 67555 - DNA, 15 bp, Homo sapiens
taggtccatcatacc

SEQ ID NO: 67556 - DNA, 15 bp, Homo sapiens
ataggtccatcatac

SEQ ID NO: 67557 - DNA, 15 bp, Homo sapiens
tataggtccatcata

SEQ ID NO: 67558 - DNA, 15 bp, Homo sapiens
atataggtccatcat

SEQ ID NO: 67559 - DNA, 15 bp, Homo sapiens
aatataggtccatca

SEQ ID NO: 67560 - DNA, 15 bp, Homo sapiens
aaatataggtccatc

SEQ ID NO: 67561 - DNA, 15 bp, Homo sapiens
caaatataggtccat

SEQ ID NO: 67562 - DNA, 15 bp, Homo sapiens
gcaaatataggtcca

SEQ ID NO: 67563 - DNA, 15 bp, Homo sapiens
agcaaatataggtcc

SEQ ID NO: 67564 - DNA, 15 bp, Homo sapiens
cagcaaatataggtc

SEQ ID NO: 67565 - DNA, 15 bp, Homo sapiens
gcagcaaatataggt

SEQ ID NO: 67566 - DNA, 15 bp, Homo sapiens
agcagcaaatatagg

SEQ ID NO: 67567 - DNA, 15 bp, Homo sapiens
aagcagcaaatatag

SEQ ID NO: 67568 - DNA, 15 bp, Homo sapiens
taagcagcaaatata

SEQ ID NO: 67569 - DNA, 15 bp, Homo sapiens
ttaagcagcaaatat

SEQ ID NO: 67570 - DNA, 15 bp, Homo sapiens
cttaagcagcaaata

SEQ ID NO: 67571 - DNA, 15 bp, Homo sapiens
tcttaagcagcaaat

SEQ ID NO: 67572 - DNA, 15 bp, Homo sapiens
gtcttaagcagcaaa

SEQ ID NO: 67573 - DNA, 15 bp, Homo sapiens
tgtcttaagcagcaa

SEQ ID NO: 67574 - DNA, 15 bp, Homo sapiens
atgtcttaagcagca

SEQ ID NO: 67575 - DNA, 15 bp, Homo sapiens
aatgtcttaagcagc

SEQ ID NO: 67576 - DNA, 15 bp, Homo sapiens
aaatgtcttaagcag

SEQ ID NO: 67577 - DNA, 15 bp, Homo sapiens
caaatgtcttaagca

SEQ ID NO: 67578 - DNA, 15 bp, Homo sapiens
gcaaatgtcttaagc

SEQ ID NO: 67579 - DNA, 15 bp, Homo sapiens
agcaaatgtcttaag

SEQ ID NO: 67580 - DNA, 15 bp, Homo sapiens
gagcaaatgtcttaa

SEQ ID NO: 67581 - DNA, 15 bp, Homo sapiens
ggagcaaatgtctta

SEQ ID NO: 67582 - DNA, 15 bp, Homo sapiens
gggagcaaatgtctt

SEQ ID NO: 67583 - DNA, 15 bp, Homo sapiens
tgggagcaaatgtct

SEQ ID NO: 67584 - DNA, 15 bp, Homo sapiens
gtgggagcaaatgtc

SEQ ID NO: 67585 - DNA, 15 bp, Homo sapiens
agtgggagcaaatgt

SEQ ID NO: 67586 - DNA, 15 bp, Homo sapiens
gagtgggagcaaatg

SEQ ID NO: 67587 - DNA, 15 bp, Homo sapiens
tgagtgggagcaaat

SEQ ID NO: 67588 - DNA, 15 bp, Homo sapiens
ctgagtgggagcaaa

SEQ ID NO: 67589 - DNA, 15 bp, Homo sapiens
cctgagtgggagcaa

SEQ ID NO: 67590 - DNA, 15 bp, Homo sapiens
acctgagtgggagca

SEQ ID NO: 67591 - DNA, 15 bp, Homo sapiens
aacctgagtgggagc

SEQ ID NO: 67592 - DNA, 15 bp, Homo sapiens
caacctgagtgggag

SEQ ID NO: 67593 - DNA, 15 bp, Homo sapiens
acaacctgagtggga

SEQ ID NO: 67594 - DNA, 15 bp, Homo sapiens
gacaacctgagtggg

SEQ ID NO: 67595 - DNA, 15 bp, Homo sapiens
ggacaacctgagtgg

SEQ ID NO: 67596 - DNA, 15 bp, Homo sapiens
gggacaacctgagtg

SEQ ID NO: 67597 - DNA, 15 bp, Homo sapiens
tgggacaacctgagt

SEQ ID NO: 67598 - DNA, 15 bp, Homo sapiens
atgggacaacctgag

SEQ ID NO: 67599 - DNA, 15 bp, Homo sapiens
gatgggacaacctga

SEQ ID NO: 67600 - DNA, 15 bp, Homo sapiens
tgatgggacaacctg

SEQ ID NO: 67601 - DNA, 15 bp, Homo sapiens
ctgatgggacaacct

SEQ ID NO: 67602 - DNA, 15 bp, Homo sapiens
gctgatgggacaacc

SEQ ID NO: 67603 - DNA, 15 bp, Homo sapiens
ggctgatgggacaac

SEQ ID NO: 67604 - DNA, 15 bp, Homo sapiens
tggctgatgggacaa

SEQ ID NO: 67605 - DNA, 15 bp, Homo sapiens
atggctgatgggaca

SEQ ID NO: 67606 - DNA, 15 bp, Homo sapiens
tatggctgatgggac

SEQ ID NO: 67607 - DNA, 15 bp, Homo sapiens
ttatggctgatggga

SEQ ID NO: 67608 - DNA, 15 bp, Homo sapiens
cttatggctgatggg

SEQ ID NO: 67609 - DNA, 15 bp, Homo sapiens
ccttatggctgatgg

SEQ ID NO: 67610 - DNA, 15 bp, Homo sapiens
gccttatggctgatg

SEQ ID NO: 67611 - DNA, 15 bp, Homo sapiens
ggccttatggctgat

SEQ ID NO: 67612 - DNA, 15 bp, Homo sapiens
gggccttatggctga

SEQ ID NO: 67613 - DNA, 15 bp, Homo sapiens
ggggccttatggctg

SEQ ID NO: 67614 - DNA, 15 bp, Homo sapiens
gggggccttatggct

SEQ ID NO: 67615 - DNA, 15 bp, Homo sapiens
tgggggccttatggc

SEQ ID NO: 67616 - DNA, 15 bp, Homo sapiens
ctgggggccttatgg

SEQ ID NO: 67617 - DNA, 15 bp, Homo sapiens
cctgggggccttatg

SEQ ID NO: 67618 - DNA, 15 bp, Homo sapiens
ccctgggggccttat

SEQ ID NO: 67619 - DNA, 15 bp, Homo sapiens
tccctgggggcctta

SEQ ID NO: 67620 - DNA, 15 bp, Homo sapiens
ctccctgggggcctt

SEQ ID NO: 67621 - DNA, 15 bp, Homo sapiens
gctccctgggggcct

SEQ ID NO: 67622 - DNA, 15 bp, Homo sapiens
ggctccctgggggcc

SEQ ID NO: 67623 - DNA, 15 bp, Homo sapiens
gggctccctgggggc

SEQ ID NO: 67624 - DNA, 15 bp, Homo sapiens
cgggctccctggggg

SEQ ID NO: 67625 - DNA, 15 bp, Homo sapiens
acgggctccctgggg

SEQ ID NO: 67626 - DNA, 15 bp, Homo sapiens
cacgggctccctggg

SEQ ID NO: 67627 - DNA, 15 bp, Homo sapiens
acacgggctccctgg

SEQ ID NO: 67628 - DNA, 15 bp, Homo sapiens
cacacgggctccctg

SEQ ID NO: 67629 - DNA, 15 bp, Homo sapiens
tcacacgggctccct

SEQ ID NO: 67630 - DNA, 15 bp, Homo sapiens
atcacacgggctccc

SEQ ID NO: 67631 - DNA, 15 bp, Homo sapiens
catcacacgggctcc

SEQ ID NO: 67632 - DNA, 15 bp, Homo sapiens
ccatcacacgggctc

SEQ ID NO: 67633 - DNA, 15 bp, Homo sapiens
tccatcacacgggct

SEQ ID NO: 67634 - DNA, 15 bp, Homo sapiens
ctccatcacacgggc

SEQ ID NO: 67635 - DNA, 15 bp, Homo sapiens
gctccatcacacggg

SEQ ID NO: 67636 - DNA, 15 bp, Homo sapiens
tgctccatcacacgg

SEQ ID NO: 67637 - DNA, 15 bp, Homo sapiens
ctgctccatcacacg

SEQ ID NO: 67638 - DNA, 15 bp, Homo sapiens
tctgctccatcacac

SEQ ID NO: 67639 - DNA, 15 bp, Homo sapiens
ctctgctccatcaca

SEQ ID NO: 67640 - DNA, 15 bp, Homo sapiens
tctctgctccatcac

SEQ ID NO: 67641 - DNA, 15 bp, Homo sapiens
ctctctgctccatca

SEQ ID NO: 67642 - DNA, 15 bp, Homo sapiens
tctctctgctccatc

SEQ ID NO: 67643 - DNA, 15 bp, Homo sapiens
ctctctctgctccat

SEQ ID NO: 67644 - DNA, 15 bp, Homo sapiens
tctctctctgctcca

SEQ ID NO: 67645 - DNA, 15 bp, Homo sapiens
gtctctctctgctcc

SEQ ID NO: 67646 - DNA, 15 bp, Homo sapiens
ggtctctctctgctc

SEQ ID NO: 67647 - DNA, 15 bp, Homo sapiens
aggtctctctctgct

SEQ ID NO: 67648 - DNA, 15 bp, Homo sapiens
caggtctctctctgc

SEQ ID NO: 67649 - DNA, 15 bp, Homo sapiens
tcaggtctctctctg

SEQ ID NO: 67650 - DNA, 15 bp, Homo sapiens
ctcaggtctctctct

SEQ ID NO: 67651 - DNA, 15 bp, Homo sapiens
gctcaggtctctctc

SEQ ID NO: 67652 - DNA, 15 bp, Homo sapiens
agctcaggtctctct

SEQ ID NO: 67653 - DNA, 15 bp, Homo sapiens
gagctcaggtctctc

SEQ ID NO: 67654 - DNA, 15 bp, Homo sapiens
agagctcaggtctct

SEQ ID NO: 67655 - DNA, 15 bp, Homo sapiens
cagagctcaggtctc

SEQ ID NO: 67656 - DNA, 15 bp, Homo sapiens
gcagagctcaggtct

SEQ ID NO: 67657 - DNA, 15 bp, Homo sapiens
tgcagagctcaggtc

SEQ ID NO: 67658 - DNA, 15 bp, Homo sapiens
ttgcagagctcaggt

SEQ ID NO: 67659 - DNA, 15 bp, Homo sapiens
attgcagagctcagg

SEQ ID NO: 67660 - DNA, 15 bp, Homo sapiens
gattgcagagctcag

SEQ ID NO: 67661 - DNA, 15 bp, Homo sapiens
agattgcagagctca

SEQ ID NO: 67662 - DNA, 15 bp, Homo sapiens
aagattgcagagctc

SEQ ID NO: 67663 - DNA, 15 bp, Homo sapiens
caagattgcagagct

SEQ ID NO: 67664 - DNA, 15 bp, Homo sapiens
ccaagattgcagagc

SEQ ID NO: 67665 - DNA, 15 bp, Homo sapiens
cccaagattgcagag

SEQ ID NO: 67666 - DNA, 15 bp, Homo sapiens
gcccaagattgcaga

SEQ ID NO: 67667 - DNA, 15 bp, Homo sapiens
tgcccaagattgcag

SEQ ID NO: 67668 - DNA, 15 bp, Homo sapiens
ttgcccaagattgca

SEQ ID NO: 67669 - DNA, 15 bp, Homo sapiens
cttgcccaagattgc

SEQ ID NO: 67670 - DNA, 15 bp, Homo sapiens
ccttgcccaagattg

SEQ ID NO: 67671 - DNA, 15 bp, Homo sapiens
gccttgcccaagatt

SEQ ID NO: 67672 - DNA, 15 bp, Homo sapiens
agccttgcccaagat

SEQ ID NO: 67673 - DNA, 15 bp, Homo sapiens
aagccttgcccaaga

SEQ ID NO: 67674 - DNA, 15 bp, Homo sapiens
aaagccttgcccaag

SEQ ID NO: 67675 - DNA, 15 bp, Homo sapiens
aaaagccttgcccaa

SEQ ID NO: 67676 - DNA, 15 bp, Homo sapiens
gaaaagccttgccca

SEQ ID NO: 67677 - DNA, 15 bp, Homo sapiens
ggaaaagccttgccc

SEQ ID NO: 67678 - DNA, 15 bp, Homo sapiens
gggaaaagccttgcc

SEQ ID NO: 67679 - DNA, 15 bp, Homo sapiens
agggaaaagccttgc

SEQ ID NO: 67680 - DNA, 15 bp, Homo sapiens
aagggaaaagccttg

SEQ ID NO: 67681 - DNA, 15 bp, Homo sapiens
taagggaaaagcctt

SEQ ID NO: 67682 - DNA, 15 bp, Homo sapiens
ataagggaaaagcct

SEQ ID NO: 67683 - DNA, 15 bp, Homo sapiens
cataagggaaaagcc

SEQ ID NO: 67684 - DNA, 15 bp, Homo sapiens
acataagggaaaagc

SEQ ID NO: 67685 - DNA, 15 bp, Homo sapiens
aacataagggaaaag

SEQ ID NO: 67686 - DNA, 15 bp, Homo sapiens
aaacataagggaaaa

SEQ ID NO: 67687 - DNA, 15 bp, Homo sapiens
gaaacataagggaaa

SEQ ID NO: 67688 - DNA, 15 bp, Homo sapiens
agaaacataagggaa

SEQ ID NO: 67689 - DNA, 15 bp, Homo sapiens
aagaaacataaggga

SEQ ID NO: 67690 - DNA, 15 bp, Homo sapiens
gaagaaacataaggg

SEQ ID NO: 67691 - DNA, 15 bp, Homo sapiens
agaagaaacataagg

SEQ ID NO: 67692 - DNA, 15 bp, Homo sapiens
aagaagaaacataag

SEQ ID NO: 67693 - DNA, 15 bp, Homo sapiens
taagaagaaacataa

SEQ ID NO: 67694 - DNA, 15 bp, Homo sapiens
ataagaagaaacata

SEQ ID NO: 67695 - DNA, 15 bp, Homo sapiens
gataagaagaaacat

SEQ ID NO: 67696 - DNA, 15 bp, Homo sapiens
agataagaagaaaca

SEQ ID NO: 67697 - DNA, 15 bp, Homo sapiens
tagataagaagaaac

SEQ ID NO: 67698 - DNA, 15 bp, Homo sapiens
ttagataagaagaaa

SEQ ID NO: 67699 - DNA, 15 bp, Homo sapiens
tttagataagaagaa

SEQ ID NO: 67700 - DNA, 15 bp, Homo sapiens
ctttagataagaaga

SEQ ID NO: 67701 - DNA, 15 bp, Homo sapiens
actttagataagaag

SEQ ID NO: 67702 - DNA, 15 bp, Homo sapiens
cactttagataagaa

SEQ ID NO: 67703 - DNA, 15 bp, Homo sapiens
tcactttagataaga

SEQ ID NO: 67704 - DNA, 15 bp, Homo sapiens
ttcactttagataag

SEQ ID NO: 67705 - DNA, 15 bp, Homo sapiens
gttcactttagataa

SEQ ID NO: 67706 - DNA, 15 bp, Homo sapiens
tgttcactttagata

SEQ ID NO: 67707 - DNA, 15 bp, Homo sapiens
ctgttcactttagat

SEQ ID NO: 67708 - DNA, 15 bp, Homo sapiens
gctgttcactttaga

SEQ ID NO: 67709 - DNA, 15 bp, Homo sapiens
agctgttcactttag

SEQ ID NO: 67710 - DNA, 15 bp, Homo sapiens
cagctgttcacttta

SEQ ID NO: 67711 - DNA, 15 bp, Homo sapiens
ccagctgttcacttt

SEQ ID NO: 67712 - DNA, 15 bp, Homo sapiens
cccagctgttcactt

SEQ ID NO: 67713 - DNA, 15 bp, Homo sapiens
ccccagctgttcact

SEQ ID NO: 67714 - DNA, 15 bp, Homo sapiens
gccccagctgttcac

SEQ ID NO: 67715 - DNA, 15 bp, Homo sapiens
agccccagctgttca

SEQ ID NO: 67716 - DNA, 15 bp, Homo sapiens
gagccccagctgttc

SEQ ID NO: 67717 - DNA, 15 bp, Homo sapiens
tgagccccagctgtt

SEQ ID NO: 67718 - DNA, 15 bp, Homo sapiens
atgagccccagctgt

SEQ ID NO: 67719 - DNA, 15 bp, Homo sapiens
catgagccccagctg

SEQ ID NO: 67720 - DNA, 15 bp, Homo sapiens
acatgagccccagct

SEQ ID NO: 67721 - DNA, 15 bp, Homo sapiens
cacatgagccccagc

SEQ ID NO: 67722 - DNA, 15 bp, Homo sapiens
gcacatgagccccag

SEQ ID NO: 67723 - DNA, 15 bp, Homo sapiens
agcacatgagcccca

SEQ ID NO: 67724 - DNA, 15 bp, Homo sapiens
gagcacatgagcccc

SEQ ID NO: 67725 - DNA, 15 bp, Homo sapiens
ggagcacatgagccc

SEQ ID NO: 67726 - DNA, 15 bp, Homo sapiens
gggagcacatgagcc

SEQ ID NO: 67727 - DNA, 15 bp, Homo sapiens
agggagcacatgagc

SEQ ID NO: 67728 - DNA, 15 bp, Homo sapiens
gagggagcacatgag

SEQ ID NO: 67729 - DNA, 15 bp, Homo sapiens
ggagggagcacatga

SEQ ID NO: 67730 - DNA, 15 bp, Homo sapiens
aggagggagcacatg

SEQ ID NO: 67731 - DNA, 15 bp, Homo sapiens
gaggagggagcacat

SEQ ID NO: 67732 - DNA, 15 bp, Homo sapiens
tgaggagggagcaca

SEQ ID NO: 67733 - DNA, 15 bp, Homo sapiens
atgaggagggagcac

SEQ ID NO: 67734 - DNA, 15 bp, Homo sapiens
gatgaggagggagca

SEQ ID NO: 67735 - DNA, 15 bp, Homo sapiens
agatgaggagggagc

SEQ ID NO: 67736 - DNA, 15 bp, Homo sapiens
tagatgaggagggag

SEQ ID NO: 67737 - DNA, 15 bp, Homo sapiens
ttagatgaggaggga

SEQ ID NO: 67738 - DNA, 15 bp, Homo sapiens
tttagatgaggaggg

SEQ ID NO: 67739 - DNA, 15 bp, Homo sapiens
ctttagatgaggagg

SEQ ID NO: 67740 - DNA, 15 bp, Homo sapiens
actttagatgaggag

SEQ ID NO: 67741 - DNA, 15 bp, Homo sapiens
cactttagatgagga

SEQ ID NO: 67742 - DNA, 15 bp, Homo sapiens
tcactttagatgagg

SEQ ID NO: 67743 - DNA, 15 bp, Homo sapiens
ttcactttagatgag

SEQ ID NO: 67744 - DNA, 15 bp, Homo sapiens
gttcactttagatga

SEQ ID NO: 67745 - DNA, 15 bp, Homo sapiens
tgttcactttagatg

SEQ ID NO: 67746 - DNA, 15 bp, Homo sapiens
gtgttcactttagat

SEQ ID NO: 67747 - DNA, 15 bp, Homo sapiens
tgtgttcactttaga

SEQ ID NO: 67748 - DNA, 15 bp, Homo sapiens
atgtgttcactttag

SEQ ID NO: 67749 - DNA, 15 bp, Homo sapiens
catgtgttcacttta

SEQ ID NO: 67750 - DNA, 15 bp, Homo sapiens
ccatgtgttcacttt

SEQ ID NO: 67751 - DNA, 15 bp, Homo sapiens
cccatgtgttcactt

SEQ ID NO: 67752 - DNA, 15 bp, Homo sapiens
ccccatgtgttcact

SEQ ID NO: 67753 - DNA, 15 bp, Homo sapiens
gccccatgtgttcac

SEQ ID NO: 67754 - DNA, 15 bp, Homo sapiens
agccccatgtgttca

SEQ ID NO: 67755 - DNA, 15 bp, Homo sapiens
gagccccatgtgttc

SEQ ID NO: 67756 - DNA, 15 bp, Homo sapiens
tgagccccatgtgtt

SEQ ID NO: 67757 - DNA, 15 bp, Homo sapiens
atgagccccatgtgt

SEQ ID NO: 67758 - DNA, 15 bp, Homo sapiens
catgagccccatgtg

SEQ ID NO: 67759 - DNA, 15 bp, Homo sapiens
acatgagccccatgt

SEQ ID NO: 67760 - DNA, 15 bp, Homo sapiens
cacatgagccccatg

SEQ ID NO: 67761 - DNA, 15 bp, Homo sapiens
gcacatgagccccat

SEQ ID NO: 67762 - DNA, 15 bp, Homo sapiens
tgcacatgagcccca

SEQ ID NO: 67763 - DNA, 15 bp, Homo sapiens
ctgcacatgagcccc

SEQ ID NO: 67764 - DNA, 15 bp, Homo sapiens
cctgcacatgagccc

SEQ ID NO: 67765 - DNA, 15 bp, Homo sapiens
ccctgcacatgagcc

SEQ ID NO: 67766 - DNA, 15 bp, Homo sapiens
accctgcacatgagc

SEQ ID NO: 67767 - DNA, 15 bp, Homo sapiens
gaccctgcacatgag

SEQ ID NO: 67768 - DNA, 15 bp, Homo sapiens
ggaccctgcacatga

SEQ ID NO: 67769 - DNA, 15 bp, Homo sapiens
aggaccctgcacatg

SEQ ID NO: 67770 - DNA, 15 bp, Homo sapiens
gaggaccctgcacat

SEQ ID NO: 67771 - DNA, 15 bp, Homo sapiens
ggaggaccctgcaca

SEQ ID NO: 67772 - DNA, 15 bp, Homo sapiens
gggaggaccctgcac

SEQ ID NO: 67773 - DNA, 15 bp, Homo sapiens
ggggaggaccctgca

SEQ ID NO: 67774 - DNA, 15 bp, Homo sapiens
cggggaggaccctgc

SEQ ID NO: 67775 - DNA, 15 bp, Homo sapiens
gcggggaggaccctg

SEQ ID NO: 67776 - DNA, 15 bp, Homo sapiens
agcggggaggaccct

SEQ ID NO: 67777 - DNA, 15 bp, Homo sapiens
aagcggggaggaccc

SEQ ID NO: 67778 - DNA, 15 bp, Homo sapiens
aaagcggggaggacc

SEQ ID NO: 67779 - DNA, 15 bp, Homo sapiens
gaaagcggggaggac

SEQ ID NO: 67780 - DNA, 15 bp, Homo sapiens
tgaaagcggggagga

SEQ ID NO: 67781 - DNA, 15 bp, Homo sapiens
ctgaaagcggggagg

SEQ ID NO: 67782 - DNA, 15 bp, Homo sapiens
tctgaaagcggggag

SEQ ID NO: 67783 - DNA, 15 bp, Homo sapiens
ctctgaaagcgggga

SEQ ID NO: 67784 - DNA, 15 bp, Homo sapiens
gctctgaaagcgggg

SEQ ID NO: 67785 - DNA, 15 bp, Homo sapiens
ggctctgaaagcggg

SEQ ID NO: 67786 - DNA, 15 bp, Homo sapiens
aggctctgaaagcgg

SEQ ID NO: 67787 - DNA, 15 bp, Homo sapiens
caggctctgaaagcg

SEQ ID NO: 67788 - DNA, 15 bp, Homo sapiens
tcaggctctgaaagc

SEQ ID NO: 67789 - DNA, 15 bp, Homo sapiens
ctcaggctctgaaag

SEQ ID NO: 67790 - DNA, 15 bp, Homo sapiens
cctcaggctctgaaa

SEQ ID NO: 67791 - DNA, 15 bp, Homo sapiens
acctcaggctctgaa

SEQ ID NO: 67792 - DNA, 15 bp, Homo sapiens
gacctcaggctctga

SEQ ID NO: 67793 - DNA, 15 bp, Homo sapiens
ggacctcaggctctg

SEQ ID NO: 67794 - DNA, 15 bp, Homo sapiens
gggacctcaggctct

SEQ ID NO: 67795 - DNA, 15 bp, Homo sapiens
ggggacctcaggctc

SEQ ID NO: 67796 - DNA, 15 bp, Homo sapiens
aggggacctcaggct

SEQ ID NO: 67797 - DNA, 15 bp, Homo sapiens
caggggacctcaggc

SEQ ID NO: 67798 - DNA, 15 bp, Homo sapiens
tcaggggacctcagg

SEQ ID NO: 67799 - DNA, 15 bp, Homo sapiens
ctcaggggacctcag

SEQ ID NO: 67800 - DNA, 15 bp, Homo sapiens
cctcaggggacctca

SEQ ID NO: 67801 - DNA, 15 bp, Homo sapiens
gcctcaggggacctc

SEQ ID NO: 67802 - DNA, 15 bp, Homo sapiens
agcctcaggggacct

SEQ ID NO: 67803 - DNA, 15 bp, Homo sapiens
gagcctcaggggacc

SEQ ID NO: 67804 - DNA, 15 bp, Homo sapiens
tgagcctcaggggac

SEQ ID NO: 67805 - DNA, 15 bp, Homo sapiens
ctgagcctcagggga

SEQ ID NO: 67806 - DNA, 15 bp, Homo sapiens
cctgagcctcagggg

SEQ ID NO: 67807 - DNA, 15 bp, Homo sapiens
tcctgagcctcaggg

SEQ ID NO: 67808 - DNA, 15 bp, Homo sapiens
ttcctgagcctcagg

SEQ ID NO: 67809 - DNA, 15 bp, Homo sapiens
cttcctgagcctcag

SEQ ID NO: 67810 - DNA, 15 bp, Homo sapiens
gccttcctgagcctc

SEQ ID NO: 67811 - DNA, 15 bp, Homo sapiens
agccttcctgagcct

SEQ ID NO: 67812 - DNA, 15 bp, Homo sapiens
cagccttcctgagcc

SEQ ID NO: 67813 - DNA, 15 bp, Homo sapiens
gcagccttcctgagc

SEQ ID NO: 67814 - DNA, 15 bp, Homo sapiens
agcagccttcctgag

SEQ ID NO: 67815 - DNA, 15 bp, Homo sapiens
gagcagccttcctga

SEQ ID NO: 67816 - DNA, 15 bp, Homo sapiens
ggagcagccttcctg

SEQ ID NO: 67817 - DNA, 15 bp, Homo sapiens
tggagcagccttcct

SEQ ID NO: 67818 - DNA, 15 bp, Homo sapiens
ctggagcagccttcc

SEQ ID NO: 67819 - DNA, 15 bp, Homo sapiens
cctggagcagccttc

SEQ ID NO: 67820 - DNA, 15 bp, Homo sapiens
acctggagcagcctt

SEQ ID NO: 67821 - DNA, 15 bp, Homo sapiens
cacctggagcagcct

SEQ ID NO: 67822 - DNA, 15 bp, Homo sapiens
tcacctggagcagcc

SEQ ID NO: 67823 - DNA, 15 bp, Homo sapiens
ctcacctggagcagc

SEQ ID NO: 67824 - DNA, 15 bp, Homo sapiens
actcacctggagcag

SEQ ID NO: 67825 - DNA, 15 bp, Homo sapiens
cactcacctggagca

SEQ ID NO: 67826 - DNA, 15 bp, Homo sapiens
gcactcacctggagc

SEQ ID NO: 67827 - DNA, 15 bp, Homo sapiens
ggcactcacctggag

SEQ ID NO: 67828 - DNA, 15 bp, Homo sapiens
cggcactcacctgga

SEQ ID NO: 67829 - DNA, 15 bp, Homo sapiens
tcggcactcacctgg

SEQ ID NO: 67830 - DNA, 15 bp, Homo sapiens
ctcggcactcacctg

SEQ ID NO: 67831 - DNA, 15 bp, Homo sapiens
gctcggcactcacct

SEQ ID NO: 67832 - DNA, 15 bp, Homo sapiens
agctcggcactcacc

SEQ ID NO: 67833 - DNA, 15 bp, Homo sapiens
cagctcggcactcac

SEQ ID NO: 67834 - DNA, 15 bp, Homo sapiens
tcagctcggcactca

SEQ ID NO: 67835 - DNA, 15 bp, Homo sapiens
gtcagctcggcactc

SEQ ID NO: 67836 - DNA, 15 bp, Homo sapiens
agtcagctcggcact

SEQ ID NO: 67837 - DNA, 15 bp, Homo sapiens
aagtcagctcggcac

SEQ ID NO: 67838 - DNA, 15 bp, Homo sapiens
gaagtcagctcggca

SEQ ID NO: 67839 - DNA, 15 bp, Homo sapiens
agaagtcagctcggc

SEQ ID NO: 67840 - DNA, 15 bp, Homo sapiens
aagaagtcagctcgg

SEQ ID NO: 67841 - DNA, 15 bp, Homo sapiens
caagaagtcagctcg

SEQ ID NO: 67842 - DNA, 15 bp, Homo sapiens
ccaagaagtcagctc

SEQ ID NO: 67843 - DNA, 15 bp, Homo sapiens
accaagaagtcagct

SEQ ID NO: 67844 - DNA, 15 bp, Homo sapiens
caccaagaagtcagc

SEQ ID NO: 67845 - DNA, 15 bp, Homo sapiens
ccaccaagaagtcag

SEQ ID NO: 67846 - DNA, 15 bp, Homo sapiens
tccaccaagaagtca

SEQ ID NO: 67847 - DNA, 15 bp, Homo sapiens
gtccaccaagaagtc

SEQ ID NO: 67848 - DNA, 15 bp, Homo sapiens
cgtccaccaagaagt

SEQ ID NO: 67849 - DNA, 15 bp, Homo sapiens
acgtccaccaagaag

SEQ ID NO: 67850 - DNA, 15 bp, Homo sapiens
cacgtccaccaagaa

SEQ ID NO: 67851 - DNA, 15 bp, Homo sapiens
gcacgtccaccaaga

SEQ ID NO: 67852 - DNA, 15 bp, Homo sapiens
agcacgtccaccaag

SEQ ID NO: 67853 - DNA, 15 bp, Homo sapiens
cagcacgtccaccaa

SEQ ID NO: 67854 - DNA, 15 bp, Homo sapiens
acagcacgtccacca

SEQ ID NO: 67855 - DNA, 15 bp, Homo sapiens
cacagcacgtccacc

SEQ ID NO: 67856 - DNA, 15 bp, Homo sapiens
ccacagcacgtccac

SEQ ID NO: 67857 - DNA, 15 bp, Homo sapiens
cccacagcacgtcca

SEQ ID NO: 67858 - DNA, 15 bp, Homo sapiens
ccccacagcacgtcc

SEQ ID NO: 67859 - DNA, 15 bp, Homo sapiens
tccccacagcacgtc

SEQ ID NO: 67860 - DNA, 15 bp, Homo sapiens
gtccccacagcacgt

SEQ ID NO: 67861 - DNA, 15 bp, Homo sapiens
tgtccccacagcacg

SEQ ID NO: 67862 - DNA, 15 bp, Homo sapiens
ctgtccccacagcac

SEQ ID NO: 67863 - DNA, 15 bp, Homo sapiens
gctgtccccacagca

SEQ ID NO: 67864 - DNA, 15 bp, Homo sapiens
ggctgtccccacagc

SEQ ID NO: 67865 - DNA, 15 bp, Homo sapiens
gggctgtccccacag

SEQ ID NO: 67866 - DNA, 15 bp, Homo sapiens
tgggctgtccccaca

SEQ ID NO: 67867 - DNA, 15 bp, Homo sapiens
atgggctgtccccac

SEQ ID NO: 67868 - DNA, 15 bp, Homo sapiens
aatgggctgtcccca

SEQ ID NO: 67869 - DNA, 15 bp, Homo sapiens
taatgggctgtcccc

SEQ ID NO: 67870 - DNA, 15 bp, Homo sapiens
ttaatgggctgtccc

SEQ ID NO: 67871 - DNA, 15 bp, Homo sapiens
tttaatgggctgtcc

SEQ ID NO: 67872 - DNA, 15 bp, Homo sapiens
ctttaatgggctgtc

SEQ ID NO: 67873 - DNA, 15 bp, Homo sapiens
tctttaatgggctgt

SEQ ID NO: 67874 - DNA, 15 bp, Homo sapiens
gtctttaatgggctg

SEQ ID NO: 67875 - DNA, 15 bp, Homo sapiens
ggtctttaatgggct

SEQ ID NO: 67876 - DNA, 15 bp, Homo sapiens
tggtctttaatgggc

SEQ ID NO: 67877 - DNA, 15 bp, Homo sapiens
gtggtctttaatggg

SEQ ID NO: 67878 - DNA, 15 bp, Homo sapiens
tgtggtctttaatgg

SEQ ID NO: 67879 - DNA, 15 bp, Homo sapiens
atgtggtctttaatg

SEQ ID NO: 67880 - DNA, 15 bp, Homo sapiens
gatgtggtctttaat

SEQ ID NO: 67881 - DNA, 15 bp, Homo sapiens
agatgtggtctttaa

SEQ ID NO: 67882 - DNA, 15 bp, Homo sapiens
aagatgtggtcttta

SEQ ID NO: 67883 - DNA, 15 bp, Homo sapiens
caagatgtggtcttt

SEQ ID NO: 67884 - DNA, 15 bp, Homo sapiens
ccaagatgtggtctt

SEQ ID NO: 67885 - DNA, 15 bp, Homo sapiens
cccaagatgtggtct

SEQ ID NO: 67886 - DNA, 15 bp, Homo sapiens
ccccaagatgtggtc

SEQ ID NO: 67887 - DNA, 15 bp, Homo sapiens
gccccaagatgtggt

SEQ ID NO: 67888 - DNA, 15 bp, Homo sapiens
ggccccaagatgtgg

SEQ ID NO: 67889 - DNA, 15 bp, Homo sapiens
gggccccaagatgtg

SEQ ID NO: 67890 - DNA, 15 bp, Homo sapiens
agggccccaagatgt

SEQ ID NO: 67891 - DNA, 15 bp, Homo sapiens
cagggccccaagatg

SEQ ID NO: 67892 - DNA, 15 bp, Homo sapiens
tcagggccccaagat

SEQ ID NO: 67893 - DNA, 15 bp, Homo sapiens
ttcagggccccaaga

SEQ ID NO: 67894 - DNA, 15 bp, Homo sapiens
tttcagggccccaag

SEQ ID NO: 67895 - DNA, 15 bp, Homo sapiens
atttcagggccccaa

SEQ ID NO: 67896 - DNA, 15 bp, Homo sapiens
aatttcagggcccca

SEQ ID NO: 67897 - DNA, 15 bp, Homo sapiens
caatttcagggcccc

SEQ ID NO: 67898 - DNA, 15 bp, Homo sapiens
tcaatttcagggccc

SEQ ID NO: 67899 - DNA, 15 bp, Homo sapiens
ttcaatttcagggcc

SEQ ID NO: 67900 - DNA, 15 bp, Homo sapiens
tttcaatttcagggc

SEQ ID NO: 67901 - DNA, 15 bp, Homo sapiens
ctttcaatttcaggg

SEQ ID NO: 67902 - DNA, 15 bp, Homo sapiens
actttcaatttcagg

SEQ ID NO: 67903 - DNA, 15 bp, Homo sapiens
aactttcaatttcag

SEQ ID NO: 67904 - DNA, 15 bp, Homo sapiens
caactttcaatttca

SEQ ID NO: 67905 - DNA, 15 bp, Homo sapiens
acaactttcaatttc

SEQ ID NO: 67906 - DNA, 15 bp, Homo sapiens
tacaactttcaattt

SEQ ID NO: 67907 - DNA, 15 bp, Homo sapiens
ttacaactttcaatt

SEQ ID NO: 67908 - DNA, 15 bp, Homo sapiens
gttacaactttcaat

SEQ ID NO: 67909 - DNA, 15 bp, Homo sapiens
agttacaactttcaa

SEQ ID NO: 67910 - DNA, 15 bp, Homo sapiens
cagttacaactttca

SEQ ID NO: 67911 - DNA, 15 bp, Homo sapiens
gcagttacaactttc

SEQ ID NO: 67912 - DNA, 15 bp, Homo sapiens
ggcagttacaacttt

SEQ ID NO: 67913 - DNA, 15 bp, Homo sapiens
aggcagttacaactt

SEQ ID NO: 67914 - DNA, 15 bp, Homo sapiens
caggcagttacaact

SEQ ID NO: 67915 - DNA, 15 bp, Homo sapiens
ccaggcagttacaac

SEQ ID NO: 67916 - DNA, 15 bp, Homo sapiens
accaggcagttacaa

SEQ ID NO: 67917 - DNA, 15 bp, Homo sapiens
caccaggcagttaca

SEQ ID NO: 67918 - DNA, 15 bp, Homo sapiens
gcaccaggcagttac

SEQ ID NO: 67919 - DNA, 15 bp, Homo sapiens
tgcaccaggcagtta

SEQ ID NO: 67920 - DNA, 15 bp, Homo sapiens
atgcaccaggcagtt

SEQ ID NO: 67921 - DNA, 15 bp, Homo sapiens
catgcaccaggcagt

SEQ ID NO: 67922 - DNA, 15 bp, Homo sapiens
ccatgcaccaggcag

SEQ ID NO: 67923 - DNA, 15 bp, Homo sapiens
accatgcaccaggca

SEQ ID NO: 67924 - DNA, 15 bp, Homo sapiens
caccatgcaccaggc

SEQ ID NO: 67925 - DNA, 15 bp, Homo sapiens
ccaccatgcaccagg

SEQ ID NO: 67926 - DNA, 15 bp, Homo sapiens
gccaccatgcaccag

SEQ ID NO: 67927 - DNA, 15 bp, Homo sapiens
ggccaccatgcacca

SEQ ID NO: 67928 - DNA, 15 bp, Homo sapiens
tggccaccatgcacc

SEQ ID NO: 67929 - DNA, 15 bp, Homo sapiens
ctggccaccatgcac

SEQ ID NO: 67930 - DNA, 15 bp, Homo sapiens
cctggccaccatgca

SEQ ID NO: 67931 - DNA, 15 bp, Homo sapiens
gcctggccaccatgc

SEQ ID NO: 67932 - DNA, 15 bp, Homo sapiens
ggcctggccaccatg

SEQ ID NO: 67933 - DNA, 15 bp, Homo sapiens
aggcctggccaccat

SEQ ID NO: 67934 - DNA, 15 bp, Homo sapiens
caggcctggccacca

SEQ ID NO: 67935 - DNA, 15 bp, Homo sapiens
gcaggcctggccacc

SEQ ID NO: 67936 - DNA, 15 bp, Homo sapiens
agcaggcctggccac

SEQ ID NO: 67937 - DNA, 15 bp, Homo sapiens
cagcaggcctggcca

SEQ ID NO: 67938 - DNA, 15 bp, Homo sapiens
ccagcaggcctggcc

SEQ ID NO: 67939 - DNA, 15 bp, Homo sapiens
tccagcaggcctggc

SEQ ID NO: 67940 - DNA, 15 bp, Homo sapiens
ttccagcaggcctgg

SEQ ID NO: 67941 - DNA, 15 bp, Homo sapiens
tttccagcaggcctg

SEQ ID NO: 67942 - DNA, 15 bp, Homo sapiens
gtttccagcaggcct

SEQ ID NO: 67943 - DNA, 15 bp, Homo sapiens
tgtttccagcaggcc

SEQ ID NO: 67944 - DNA, 15 bp, Homo sapiens
ctgtttccagcaggc

SEQ ID NO: 67945 - DNA, 15 bp, Homo sapiens
cctgtttccagcagg

SEQ ID NO: 67946 - DNA, 15 bp, Homo sapiens
acctgtttccagcag

SEQ ID NO: 67947 - DNA, 15 bp, Homo sapiens
aacctgtttccagca

SEQ ID NO: 67948 - DNA, 15 bp, Homo sapiens
caacctgtttccagc

SEQ ID NO: 67949 - DNA, 15 bp, Homo sapiens
ccaacctgtttccag

SEQ ID NO: 67950 - DNA, 15 bp, Homo sapiens
tccaacctgtttcca

SEQ ID NO: 67951 - DNA, 15 bp, Homo sapiens
ttccaacctgtttcc

SEQ ID NO: 67952 - DNA, 15 bp, Homo sapiens
cttccaacctgtttc

SEQ ID NO: 67953 - DNA, 15 bp, Homo sapiens
gcttccaacctgttt

SEQ ID NO: 67954 - DNA, 15 bp, Homo sapiens
cgcttccaacctgtt

SEQ ID NO: 67955 - DNA, 15 bp, Homo sapiens
tcgcttccaacctgt

SEQ ID NO: 67956 - DNA, 15 bp, Homo sapiens
atcgcttccaacctg

SEQ ID NO: 67957 - DNA, 15 bp, Homo sapiens
gatcgcttccaacct

SEQ ID NO: 67958 - DNA, 15 bp, Homo sapiens
agatcgcttccaacc

SEQ ID NO: 67959 - DNA, 15 bp, Homo sapiens
cagatcgcttccaac

SEQ ID NO: 67960 - DNA, 15 bp, Homo sapiens
acagatcgcttccaa

SEQ ID NO: 67961 - DNA, 15 bp, Homo sapiens
gacagatcgcttcca

SEQ ID NO: 67962 - DNA, 15 bp, Homo sapiens
tgacagatcgcttcc

SEQ ID NO: 67963 - DNA, 15 bp, Homo sapiens
gtgacagatcgcttc

SEQ ID NO: 67964 - DNA, 15 bp, Homo sapiens
ggtgacagatcgctt

SEQ ID NO: 67965 - DNA, 15 bp, Homo sapiens
aggtgacagatcgct

SEQ ID NO: 67966 - DNA, 15 bp, Homo sapiens
aaggtgacagatcgc

SEQ ID NO: 67967 - DNA, 15 bp, Homo sapiens
aaaggtgacagatcg

SEQ ID NO: 67968 - DNA, 15 bp, Homo sapiens
gaaaggtgacagatc

SEQ ID NO: 67969 - DNA, 15 bp, Homo sapiens
tgaaaggtgacagat

SEQ ID NO: 67970 - DNA, 15 bp, Homo sapiens
gtgaaaggtgacaga

SEQ ID NO: 67971 - DNA, 15 bp, Homo sapiens
agtgaaaggtgacag

SEQ ID NO: 67972 - DNA, 15 bp, Homo sapiens
aagtgaaaggtgaca

SEQ ID NO: 67973 - DNA, 15 bp, Homo sapiens
aaagtgaaaggtgac

SEQ ID NO: 67974 - DNA, 15 bp, Homo sapiens
caaagtgaaaggtga

SEQ ID NO: 67975 - DNA, 15 bp, Homo sapiens
tcaaagtgaaaggtg

SEQ ID NO: 67976 - DNA, 15 bp, Homo sapiens
atcaaagtgaaaggt

SEQ ID NO: 67977 - DNA, 15 bp, Homo sapiens
aatcaaagtgaaagg

SEQ ID NO: 67978 - DNA, 15 bp, Homo sapiens
aaatcaaagtgaaag

SEQ ID NO: 67979 - DNA, 15 bp, Homo sapiens
gaaatcaaagtgaaa

SEQ ID NO: 67980 - DNA, 15 bp, Homo sapiens
ggaaatcaaagtgaa

SEQ ID NO: 67981 - DNA, 15 bp, Homo sapiens
aggaaatcaaagtga

SEQ ID NO: 67982 - DNA, 15 bp, Homo sapiens
caggaaatcaaagtg

SEQ ID NO: 67983 - DNA, 15 bp, Homo sapiens
tcaggaaatcaaagt

SEQ ID NO: 67984 - DNA, 15 bp, Homo sapiens
ctcaggaaatcaaag

SEQ ID NO: 67985 - DNA, 15 bp, Homo sapiens
gctcaggaaatcaaa

SEQ ID NO: 67986 - DNA, 15 bp, Homo sapiens
tgctcaggaaatcaa

SEQ ID NO: 67987 - DNA, 15 bp, Homo sapiens
ctgctcaggaaatca

SEQ ID NO: 67988 - DNA, 15 bp, Homo sapiens
gctgctcaggaaatc

SEQ ID NO: 67989 - DNA, 15 bp, Homo sapiens
agctgctcaggaaat

SEQ ID NO: 67990 - DNA, 15 bp, Homo sapiens
gagctgctcaggaaa

SEQ ID NO: 67991 - DNA, 15 bp, Homo sapiens
tgagctgctcaggaa

SEQ ID NO: 67992 - DNA, 15 bp, Homo sapiens
atgagctgctcagga

SEQ ID NO: 67993 - DNA, 15 bp, Homo sapiens
catgagctgctcagg

SEQ ID NO: 67994 - DNA, 15 bp, Homo sapiens
acatgagctgctcag

SEQ ID NO: 67995 - DNA, 15 bp, Homo sapiens
cacatgagctgctca

SEQ ID NO: 67996 - DNA, 15 bp, Homo sapiens
ccacatgagctgctc

SEQ ID NO: 67997 - DNA, 15 bp, Homo sapiens
accacatgagctgct

SEQ ID NO: 67998 - DNA, 15 bp, Homo sapiens
aaccacatgagctgc

SEQ ID NO: 67999 - DNA, 15 bp, Homo sapiens
caaccacatgagctg

SEQ ID NO: 68000 - DNA, 15 bp, Homo sapiens
gcaaccacatgagct

SEQ ID NO: 68001 - DNA, 15 bp, Homo sapiens
agcaaccacatgagc

SEQ ID NO: 68002 - DNA, 15 bp, Homo sapiens
gagcaaccacatgag

SEQ ID NO: 68003 - DNA, 15 bp, Homo sapiens
tgagcaaccacatga

SEQ ID NO: 68004 - DNA, 15 bp, Homo sapiens
gtgagcaaccacatg

SEQ ID NO: 68005 - DNA, 15 bp, Homo sapiens
agtgagcaaccacat

SEQ ID NO: 68006 - DNA, 15 bp, Homo sapiens
cagtgagcaaccaca

SEQ ID NO: 68007 - DNA, 15 bp, Homo sapiens
acagtgagcaaccac

SEQ ID NO: 68008 - DNA, 15 bp, Homo sapiens
aacagtgagcaacca

SEQ ID NO: 68009 - DNA, 15 bp, Homo sapiens
caacagtgagcaacc

SEQ ID NO: 68010 - DNA, 15 bp, Homo sapiens
acaacagtgagcaac

SEQ ID NO: 68011 - DNA, 15 bp, Homo sapiens
aacaacagtgagcaa

SEQ ID NO: 68012 - DNA, 15 bp, Homo sapiens
gaacaacagtgagca

SEQ ID NO: 68013 - DNA, 15 bp, Homo sapiens
agaacaacagtgagc

SEQ ID NO: 68014 - DNA, 15 bp, Homo sapiens
tagaacaacagtgag

SEQ ID NO: 68015 - DNA, 15 bp, Homo sapiens
gtagaacaacagtga

SEQ ID NO: 68016 - DNA, 15 bp, Homo sapiens
ggtagaacaacagtg

SEQ ID NO: 68017 - DNA, 15 bp, Homo sapiens
aggtagaacaacagt

SEQ ID NO: 68018 - DNA, 15 bp, Homo sapiens
aaggtagaacaacag

SEQ ID NO: 68019 - DNA, 15 bp, Homo sapiens
caaggtagaacaaca

SEQ ID NO: 68020 - DNA, 15 bp, Homo sapiens
tcaaggtagaacaac

SEQ ID NO: 68021 - DNA, 15 bp, Homo sapiens
ttcaaggtagaacaa

SEQ ID NO: 68022 - DNA, 15 bp, Homo sapiens
attcaaggtagaaca

SEQ ID NO: 68023 - DNA, 15 bp, Homo sapiens
gattcaaggtagaac

SEQ ID NO: 68024 - DNA, 15 bp, Homo sapiens
agattcaaggtagaa

SEQ ID NO: 68025 - DNA, 15 bp, Homo sapiens
aagattcaaggtaga

SEQ ID NO: 68026 - DNA, 15 bp, Homo sapiens
caagattcaaggtag

SEQ ID NO: 68027 - DNA, 15 bp, Homo sapiens
tcaagattcaaggta

SEQ ID NO: 68028 - DNA, 15 bp, Homo sapiens
ttcaagattcaaggt

SEQ ID NO: 68029 - DNA, 15 bp, Homo sapiens
cttcaagattcaagg

SEQ ID NO: 68030 - DNA, 15 bp, Homo sapiens
tcttcaagattcaag

SEQ ID NO: 68031 - DNA, 15 bp, Homo sapiens
atcttcaagattcaa

SEQ ID NO: 68032 - DNA, 15 bp, Homo sapiens
aatcttcaagattca

SEQ ID NO: 68033 - DNA, 15 bp, Homo sapiens
taatcttcaagattc

SEQ ID NO: 68034 - DNA, 15 bp, Homo sapiens
ataatcttcaagatt

SEQ ID NO: 68035 - DNA, 15 bp, Homo sapiens
aataatcttcaagat

SEQ ID NO: 68036 - DNA, 15 bp, Homo sapiens
aaataatcttcaaga

SEQ ID NO: 68037 - DNA, 15 bp, Homo sapiens
aaaataatcttcaag

SEQ ID NO: 68038 - DNA, 15 bp, Homo sapiens
aaaaataatcttcaa

SEQ ID NO: 68039 - DNA, 15 bp, Homo sapiens
gaaaaataatcttca

SEQ ID NO: 68040 - DNA, 15 bp, Homo sapiens
tgaaaaataatcttc

SEQ ID NO: 68041 - DNA, 15 bp, Homo sapiens
ctgaaaaataatctt

SEQ ID NO: 68042 - DNA, 15 bp, Homo sapiens
tctgaaaaataatct

SEQ ID NO: 68043 - DNA, 15 bp, Homo sapiens
ttctgaaaaataatc

SEQ ID NO: 68044 - DNA, 15 bp, Homo sapiens
tttctgaaaaataat

SEQ ID NO: 68045 - DNA, 15 bp, Homo sapiens
atttctgaaaaataa

SEQ ID NO: 68046 - DNA, 15 bp, Homo sapiens
aatttctgaaaaata

SEQ ID NO: 68047 - DNA, 15 bp, Homo sapiens
caatttctgaaaaat

SEQ ID NO: 68048 - DNA, 15 bp, Homo sapiens
tcaatttctgaaaaa

SEQ ID NO: 68049 - DNA, 15 bp, Homo sapiens
atcaatttctgaaaa

SEQ ID NO: 68050 - DNA, 15 bp, Homo sapiens
tatcaatttctgaaa

SEQ ID NO: 68051 - DNA, 15 bp, Homo sapiens
ttatcaatttctgaa

SEQ ID NO: 68052 - DNA, 15 bp, Homo sapiens
tttatcaatttctga

SEQ ID NO: 68053 - DNA, 15 bp, Homo sapiens
ctttatcaatttctg

SEQ ID NO: 68054 - DNA, 15 bp, Homo sapiens
actttatcaatttct

SEQ ID NO: 68055 - DNA, 15 bp, Homo sapiens
aactttatcaatttc

SEQ ID NO: 68056 - DNA, 15 bp, Homo sapiens
taactttatcaattt

SEQ ID NO: 68057 - DNA, 15 bp, Homo sapiens
ataactttatcaatt

SEQ ID NO: 68058 - DNA, 15 bp, Homo sapiens
aataactttatcaat

SEQ ID NO: 68059 - DNA, 15 bp, Homo sapiens
aaataactttatcaa

SEQ ID NO: 68060 - DNA, 15 bp, Homo sapiens
aaaataactttatca

SEQ ID NO: 68061 - DNA, 15 bp, Homo sapiens
taaaataactttatc

SEQ ID NO: 68062 - DNA, 15 bp, Homo sapiens
ttaaaataactttat

SEQ ID NO: 68063 - DNA, 15 bp, Homo sapiens
tttaaaataacttta

SEQ ID NO: 68064 - DNA, 15 bp, Homo sapiens
ttttaaaataacttt

SEQ ID NO: 68065 - DNA, 15 bp, Homo sapiens
tttttaaaataactt

SEQ ID NO: 68066 - DNA, 15 bp, Homo sapiens
ctttttaaaataact

SEQ ID NO: 68067 - DNA, 15 bp, Homo sapiens
gctttttaaaataac

SEQ ID NO: 68068 - DNA, 15 bp, Homo sapiens
tgctttttaaaataa

SEQ ID NO: 68069 - DNA, 15 bp, Homo sapiens
gtgctttttaaaata

SEQ ID NO: 68070 - DNA, 15 bp, Homo sapiens
cgtgctttttaaaat

SEQ ID NO: 68071 - DNA, 15 bp, Homo sapiens
ccgtgctttttaaaa

SEQ ID NO: 68072 - DNA, 15 bp, Homo sapiens
cccgtgctttttaaa

SEQ ID NO: 68073 - DNA, 15 bp, Homo sapiens
ccccgtgctttttaa

SEQ ID NO: 68074 - DNA, 15 bp, Homo sapiens
tccccgtgcttttta

SEQ ID NO: 68075 - DNA, 15 bp, Homo sapiens
ctccccgtgcttttt

SEQ ID NO: 68076 - DNA, 15 bp, Homo sapiens
tctccccgtgctttt

SEQ ID NO: 68077 - DNA, 15 bp, Homo sapiens
ctctccccgtgcttt

SEQ ID NO: 68078 - DNA, 15 bp, Homo sapiens
tctctccccgtgctt

SEQ ID NO: 68079 - DNA, 15 bp, Homo sapiens
ttctctccccgtgct

SEQ ID NO: 68080 - DNA, 15 bp, Homo sapiens
tttctctccccgtgc

SEQ ID NO: 68081 - DNA, 15 bp, Homo sapiens
ttttctctccccgtg

SEQ ID NO: 68082 - DNA, 15 bp, Homo sapiens
tttttctctccccgt

SEQ ID NO: 68083 - DNA, 15 bp, Homo sapiens
atttttctctccccg

SEQ ID NO: 68084 - DNA, 15 bp, Homo sapiens
tatttttctctcccc

SEQ ID NO: 68085 - DNA, 15 bp, Homo sapiens
atatttttctctccc

SEQ ID NO: 68086 - DNA, 15 bp, Homo sapiens
catatttttctctcc

SEQ ID NO: 68087 - DNA, 15 bp, Homo sapiens
gcatatttttctctc

SEQ ID NO: 68088 - DNA, 15 bp, Homo sapiens
ggcatatttttctct

SEQ ID NO: 68089 - DNA, 15 bp, Homo sapiens
gggcatatttttctc

SEQ ID NO: 68090 - DNA, 15 bp, Homo sapiens
tgggcatatttttct

SEQ ID NO: 68091 - DNA, 15 bp, Homo sapiens
atgggcatatttttc

SEQ ID NO: 68092 - DNA, 15 bp, Homo sapiens
aatgggcatattttt

SEQ ID NO: 68093 - DNA, 15 bp, Homo sapiens
gaatgggcatatttt

SEQ ID NO: 68094 - DNA, 15 bp, Homo sapiens
agaatgggcatattt

SEQ ID NO: 68095 - DNA, 15 bp, Homo sapiens
gagaatgggcatatt

SEQ ID NO: 68096 - DNA, 15 bp, Homo sapiens
tgagaatgggcatat

SEQ ID NO: 68097 - DNA, 15 bp, Homo sapiens
atgagaatgggcata

SEQ ID NO: 68098 - DNA, 15 bp, Homo sapiens
gatgagaatgggcat

SEQ ID NO: 68099 - DNA, 15 bp, Homo sapiens
agatgagaatgggca

SEQ ID NO: 68100 - DNA, 15 bp, Homo sapiens
cagatgagaatgggc

SEQ ID NO: 68101 - DNA, 15 bp, Homo sapiens
acagatgagaatggg

SEQ ID NO: 68102 - DNA, 15 bp, Homo sapiens
aacagatgagaatgg

SEQ ID NO: 68103 - DNA, 15 bp, Homo sapiens
gaacagatgagaatg

SEQ ID NO: 68104 - DNA, 15 bp, Homo sapiens
agaacagatgagaat

SEQ ID NO: 68105 - DNA, 15 bp, Homo sapiens
cagaacagatgagaa

SEQ ID NO: 68106 - DNA, 15 bp, Homo sapiens
ccagaacagatgaga

SEQ ID NO: 68107 - DNA, 15 bp, Homo sapiens
cccagaacagatgag

SEQ ID NO: 68108 - DNA, 15 bp, Homo sapiens
gcccagaacagatga

SEQ ID NO: 68109 - DNA, 15 bp, Homo sapiens
ggcccagaacagatg

SEQ ID NO: 68110 - DNA, 15 bp, Homo sapiens
tggcccagaacagat

SEQ ID NO: 68111 - DNA, 15 bp, Homo sapiens
ctggcccagaacaga

SEQ ID NO: 68112 - DNA, 15 bp, Homo sapiens
cctggcccagaacag

SEQ ID NO: 68113 - DNA, 15 bp, Homo sapiens
ccctggcccagaaca

SEQ ID NO: 68114 - DNA, 15 bp, Homo sapiens
cccctggcccagaac

SEQ ID NO: 68115 - DNA, 15 bp, Homo sapiens
tcccctggcccagaa

SEQ ID NO: 68116 - DNA, 15 bp, Homo sapiens
gtcccctggcccaga

SEQ ID NO: 68117 - DNA, 15 bp, Homo sapiens
tgtcccctggcccag

SEQ ID NO: 68118 - DNA, 15 bp, Homo sapiens
gtgtcccctggccca

SEQ ID NO: 68119 - DNA, 15 bp, Homo sapiens
agtgtcccctggccc

SEQ ID NO: 68120 - DNA, 15 bp, Homo sapiens
cagtgtcccctggcc

SEQ ID NO: 68121 - DNA, 15 bp, Homo sapiens
acagtgtcccctggc

SEQ ID NO: 68122 - DNA, 15 bp, Homo sapiens
tacagtgtcccctgg

SEQ ID NO: 68123 - DNA, 15 bp, Homo sapiens
atacagtgtcccctg

SEQ ID NO: 68124 - DNA, 15 bp, Homo sapiens
aatacagtgtcccct

SEQ ID NO: 68125 - DNA, 15 bp, Homo sapiens
gaatacagtgtcccc

SEQ ID NO: 68126 - DNA, 15 bp, Homo sapiens
agaatacagtgtccc

SEQ ID NO: 68127 - DNA, 15 bp, Homo sapiens
cagaatacagtgtcc

SEQ ID NO: 68128 - DNA, 15 bp, Homo sapiens
ccagaatacagtgtc

SEQ ID NO: 68129 - DNA, 15 bp, Homo sapiens
cccagaatacagtgt

SEQ ID NO: 68130 - DNA, 15 bp, Homo sapiens
ccccagaatacagtg

SEQ ID NO: 68131 - DNA, 15 bp, Homo sapiens
accccagaatacagt

SEQ ID NO: 68132 - DNA, 15 bp, Homo sapiens
taccccagaatacag

SEQ ID NO: 68133 - DNA, 15 bp, Homo sapiens
ataccccagaataca

SEQ ID NO: 68134 - DNA, 15 bp, Homo sapiens
gataccccagaatac

SEQ ID NO: 68135 - DNA, 15 bp, Homo sapiens
ggataccccagaata

SEQ ID NO: 68136 - DNA, 15 bp, Homo sapiens
tggataccccagaat

SEQ ID NO: 68137 - DNA, 15 bp, Homo sapiens
ctggataccccagaa

SEQ ID NO: 68138 - DNA, 15 bp, Homo sapiens
actggataccccaga

SEQ ID NO: 68139 - DNA, 15 bp, Homo sapiens
tactggataccccag

SEQ ID NO: 68140 - DNA, 15 bp, Homo sapiens
ctactggatacccca

SEQ ID NO: 68141 - DNA, 15 bp, Homo sapiens
cctactggatacccc

SEQ ID NO: 68142 - DNA, 15 bp, Homo sapiens
ccctactggataccc

SEQ ID NO: 68143 - DNA, 15 bp, Homo sapiens
gccctactggatacc

SEQ ID NO: 68144 - DNA, 15 bp, Homo sapiens
ggccctactggatac

SEQ ID NO: 68145 - DNA, 15 bp, Homo sapiens
gggccctactggata

SEQ ID NO: 68146 - DNA, 15 bp, Homo sapiens
tgggccctactggat

SEQ ID NO: 68147 - DNA, 15 bp, Homo sapiens
ctgggccctactgga

SEQ ID NO: 68148 - DNA, 15 bp, Homo sapiens
tctgggccctactgg

SEQ ID NO: 68149 - DNA, 15 bp, Homo sapiens
ctctgggccctactg

SEQ ID NO: 68150 - DNA, 15 bp, Homo sapiens
gctctgggccctact

SEQ ID NO: 68151 - DNA, 15 bp, Homo sapiens
agctctgggccctac

SEQ ID NO: 68152 - DNA, 15 bp, Homo sapiens
cagctctgggcccta

SEQ ID NO: 68153 - DNA, 15 bp, Homo sapiens
tcagctctgggccct

SEQ ID NO: 68154 - DNA, 15 bp, Homo sapiens
gtcagctctgggccc

SEQ ID NO: 68155 - DNA, 15 bp, Homo sapiens
ggtcagctctgggcc

SEQ ID NO: 68156 - DNA, 15 bp, Homo sapiens
aggtcagctctgggc

SEQ ID NO: 68157 - DNA, 15 bp, Homo sapiens
caggtcagctctggg

SEQ ID NO: 68158 - DNA, 15 bp, Homo sapiens
gcaggtcagctctgg

SEQ ID NO: 68159 - DNA, 15 bp, Homo sapiens
ggcaggtcagctctg

SEQ ID NO: 68160 - DNA, 15 bp, Homo sapiens
aggcaggtcagctct

SEQ ID NO: 68161 - DNA, 15 bp, Homo sapiens
gaggcaggtcagctc

SEQ ID NO: 68162 - DNA, 15 bp, Homo sapiens
ggaggcaggtcagct

SEQ ID NO: 68163 - DNA, 15 bp, Homo sapiens
gggaggcaggtcagc

SEQ ID NO: 68164 - DNA, 15 bp, Homo sapiens
agggaggcaggtcag

SEQ ID NO: 68165 - DNA, 15 bp, Homo sapiens
cagggaggcaggtca

SEQ ID NO: 68166 - DNA, 15 bp, Homo sapiens
acagggaggcaggtc

SEQ ID NO: 68167 - DNA, 15 bp, Homo sapiens
gacagggaggcaggt

SEQ ID NO: 68168 - DNA, 15 bp, Homo sapiens
ggacagggaggcagg

SEQ ID NO: 68169 - DNA, 15 bp, Homo sapiens
gggacagggaggcag

SEQ ID NO: 68170 - DNA, 15 bp, Homo sapiens
ggggacagggaggca

SEQ ID NO: 68171 - DNA, 15 bp, Homo sapiens
tggggacagggaggc

SEQ ID NO: 68172 - DNA, 15 bp, Homo sapiens
ctggggacagggagg

SEQ ID NO: 68173 - DNA, 15 bp, Homo sapiens
cctggggacagggag

SEQ ID NO: 68174 - DNA, 15 bp, Homo sapiens
gcctggggacaggga

SEQ ID NO: 68175 - DNA, 15 bp, Homo sapiens
agcctggggacaggg

SEQ ID NO: 68176 - DNA, 15 bp, Homo sapiens
cagcctggggacagg

SEQ ID NO: 68177 - DNA, 15 bp, Homo sapiens
tcagcctggggacag

SEQ ID NO: 68178 - DNA, 15 bp, Homo sapiens
gtcagcctggggaca

SEQ ID NO: 68179 - DNA, 15 bp, Homo sapiens
agtcagcctggggac

SEQ ID NO: 68180 - DNA, 15 bp, Homo sapiens
cagtcagcctgggga

SEQ ID NO: 68181 - DNA, 15 bp, Homo sapiens
acagtcagcctgggg

SEQ ID NO: 68182 - DNA, 15 bp, Homo sapiens
gacagtcagcctggg

SEQ ID NO: 68183 - DNA, 15 bp, Homo sapiens
cgacagtcagcctgg

SEQ ID NO: 68184 - DNA, 15 bp, Homo sapiens
tcgacagtcagcctg

SEQ ID NO: 68185 - DNA, 15 bp, Homo sapiens
ttcgacagtcagcct

SEQ ID NO: 68186 - DNA, 15 bp, Homo sapiens
cttcgacagtcagcc

SEQ ID NO: 68187 - DNA, 15 bp, Homo sapiens
tcttcgacagtcagc

SEQ ID NO: 68188 - DNA, 15 bp, Homo sapiens
ttcttcgacagtcag

SEQ ID NO: 68189 - DNA, 15 bp, Homo sapiens
gttcttcgacagtca

SEQ ID NO: 68190 - DNA, 15 bp, Homo sapiens
tgttcttcgacagtc

SEQ ID NO: 68191 - DNA, 15 bp, Homo sapiens
gtgttcttcgacagt

SEQ ID NO: 68192 - DNA, 15 bp, Homo sapiens
tgtgttcttcgacag

SEQ ID NO: 68193 - DNA, 15 bp, Homo sapiens
atgtgttcttcgaca

SEQ ID NO: 68194 - DNA, 15 bp, Homo sapiens
gatgtgttcttcgac

SEQ ID NO: 68195 - DNA, 15 bp, Homo sapiens
agatgtgttcttcga

SEQ ID NO: 68196 - DNA, 15 bp, Homo sapiens
cagatgtgttcttcg

SEQ ID NO: 68197 - DNA, 15 bp, Homo sapiens
ccagatgtgttcttc

SEQ ID NO: 68198 - DNA, 15 bp, Homo sapiens
accagatgtgttctt

SEQ ID NO: 68199 - DNA, 15 bp, Homo sapiens
aaccagatgtgttct

SEQ ID NO: 68200 - DNA, 15 bp, Homo sapiens
gaaccagatgtgttc

SEQ ID NO: 68201 - DNA, 15 bp, Homo sapiens
agaaccagatgtgtt

SEQ ID NO: 68202 - DNA, 15 bp, Homo sapiens
tagaaccagatgtgt

SEQ ID NO: 68203 - DNA, 15 bp, Homo sapiens
atagaaccagatgtg

SEQ ID NO: 68204 - DNA, 15 bp, Homo sapiens
catagaaccagatgt

SEQ ID NO: 68205 - DNA, 15 bp, Homo sapiens
gcatagaaccagatg

SEQ ID NO: 68206 - DNA, 15 bp, Homo sapiens
ggcatagaaccagat

SEQ ID NO: 68207 - DNA, 15 bp, Homo sapiens
gggcatagaaccaga

SEQ ID NO: 68208 - DNA, 15 bp, Homo sapiens
cgggcatagaaccag

SEQ ID NO: 68209 - DNA, 15 bp, Homo sapiens
gcgggcatagaacca

SEQ ID NO: 68210 - DNA, 15 bp, Homo sapiens
agcgggcatagaacc

SEQ ID NO: 68211 - DNA, 15 bp, Homo sapiens
aagcgggcatagaac

SEQ ID NO: 68212 - DNA, 15 bp, Homo sapiens
caagcgggcatagaa

SEQ ID NO: 68213 - DNA, 15 bp, Homo sapiens
tcaagcgggcataga

SEQ ID NO: 68214 - DNA, 15 bp, Homo sapiens
ttcaagcgggcatag

SEQ ID NO: 68215 - DNA, 15 bp, Homo sapiens
tttcaagcgggcata

SEQ ID NO: 68216 - DNA, 15 bp, Homo sapiens
ctttcaagcgggcat

SEQ ID NO: 68217 - DNA, 15 bp, Homo sapiens
cctttcaagcgggca

SEQ ID NO: 68218 - DNA, 15 bp, Homo sapiens
ccctttcaagcgggc

SEQ ID NO: 68219 - DNA, 15 bp, Homo sapiens
gccctttcaagcggg

SEQ ID NO: 68220 - DNA, 15 bp, Homo sapiens
agccctttcaagcgg

SEQ ID NO: 68221 - DNA, 15 bp, Homo sapiens
gagccctttcaagcg

SEQ ID NO: 68222 - DNA, 15 bp, Homo sapiens
agagccctttcaagc

SEQ ID NO: 68223 - DNA, 15 bp, Homo sapiens
gagagccctttcaag

SEQ ID NO: 68224 - DNA, 15 bp, Homo sapiens
agagagccctttcaa

SEQ ID NO: 68225 - DNA, 15 bp, Homo sapiens
cagagagccctttca

SEQ ID NO: 68226 - DNA, 15 bp, Homo sapiens
tcagagagccctttc

SEQ ID NO: 68227 - DNA, 15 bp, Homo sapiens
ctcagagagcccttt

SEQ ID NO: 68228 - DNA, 15 bp, Homo sapiens
tctcagagagccctt

SEQ ID NO: 68229 - DNA, 15 bp, Homo sapiens
ttctcagagagccct

SEQ ID NO: 68230 - DNA, 15 bp, Homo sapiens
cttctcagagagccc

SEQ ID NO: 68231 - DNA, 15 bp, Homo sapiens
gcttctcagagagcc

SEQ ID NO: 68232 - DNA, 15 bp, Homo sapiens
tgcttctcagagagc

SEQ ID NO: 68233 - DNA, 15 bp, Homo sapiens
gtgcttctcagagag

SEQ ID NO: 68234 - DNA, 15 bp, Homo sapiens
cgtgcttctcagaga

SEQ ID NO: 68235 - DNA, 15 bp, Homo sapiens
acgtgcttctcagag

SEQ ID NO: 68236 - DNA, 15 bp, Homo sapiens
cacgtgcttctcaga

SEQ ID NO: 68237 - DNA, 15 bp, Homo sapiens
tcacgtgcttctcag

SEQ ID NO: 68238 - DNA, 15 bp, Homo sapiens
ttcacgtgcttctca

SEQ ID NO: 68239 - DNA, 15 bp, Homo sapiens
cttcacgtgcttctc

SEQ ID NO: 68240 - DNA, 15 bp, Homo sapiens
ccttcacgtgcttct

SEQ ID NO: 68241 - DNA, 15 bp, Homo sapiens
gccttcacgtgcttc

SEQ ID NO: 68242 - DNA, 15 bp, Homo sapiens
cgccttcacgtgctt

SEQ ID NO: 68243 - DNA, 15 bp, Homo sapiens
ccgccttcacgtgct

SEQ ID NO: 68244 - DNA, 15 bp, Homo sapiens
tccgccttcacgtgc

SEQ ID NO: 68245 - DNA, 15 bp, Homo sapiens
ctccgccttcacgtg

SEQ ID NO: 68246 - DNA, 15 bp, Homo sapiens
tctccgccttcacgt

SEQ ID NO: 68247 - DNA, 15 bp, Homo sapiens
atctccgccttcacg

SEQ ID NO: 68248 - DNA, 15 bp, Homo sapiens
catctccgccttcac

SEQ ID NO: 68249 - DNA, 15 bp, Homo sapiens
ccatctccgccttca

SEQ ID NO: 68250 - DNA, 15 bp, Homo sapiens
tccatctccgccttc

SEQ ID NO: 68251 - DNA, 15 bp, Homo sapiens
ctccatctccgcctt

SEQ ID NO: 68252 - DNA, 15 bp, Homo sapiens
gctccatctccgcct

SEQ ID NO: 68253 - DNA, 15 bp, Homo sapiens
tgctccatctccgcc

SEQ ID NO: 68254 - DNA, 15 bp, Homo sapiens
ctgctccatctccgc

SEQ ID NO: 68255 - DNA, 15 bp, Homo sapiens
tctgctccatctccg

SEQ ID NO: 68256 - DNA, 15 bp, Homo sapiens
atctgctccatctcc

SEQ ID NO: 68257 - DNA, 15 bp, Homo sapiens
catctgctccatctc

SEQ ID NO: 68258 - DNA, 15 bp, Homo sapiens
ccatctgctccatct

SEQ ID NO: 68259 - DNA, 15 bp, Homo sapiens
gccatctgctccatc

SEQ ID NO: 68260 - DNA, 15 bp, Homo sapiens
ggccatctgctccat

SEQ ID NO: 68261 - DNA, 15 bp, Homo sapiens
gggccatctgctcca

SEQ ID NO: 68262 - DNA, 15 bp, Homo sapiens
agggccatctgctcc

SEQ ID NO: 68263 - DNA, 15 bp, Homo sapiens
cagggccatctgctc

SEQ ID NO: 68264 - DNA, 15 bp, Homo sapiens
ccagggccatctgct

SEQ ID NO: 68265 - DNA, 15 bp, Homo sapiens
tccagggccatctgc

SEQ ID NO: 68266 - DNA, 15 bp, Homo sapiens
atccagggccatctg

SEQ ID NO: 68267 - DNA, 15 bp, Homo sapiens
catccagggccatct

SEQ ID NO: 68268 - DNA, 15 bp, Homo sapiens
acatccagggccatc

SEQ ID NO: 68269 - DNA, 15 bp, Homo sapiens
aacatccagggccat

SEQ ID NO: 68270 - DNA, 15 bp, Homo sapiens
caacatccagggcca

SEQ ID NO: 68271 - DNA, 15 bp, Homo sapiens
ccaacatccagggcc

SEQ ID NO: 68272 - DNA, 15 bp, Homo sapiens
accaacatccagggc

SEQ ID NO: 68273 - DNA, 15 bp, Homo sapiens
aaccaacatccaggg

SEQ ID NO: 68274 - DNA, 15 bp, Homo sapiens
aaaccaacatccagg

SEQ ID NO: 68275 - DNA, 15 bp, Homo sapiens
caaaccaacatccag

SEQ ID NO: 68276 - DNA, 15 bp, Homo sapiens
gcaaaccaacatcca

SEQ ID NO: 68277 - DNA, 15 bp, Homo sapiens
ggcaaaccaacatcc

SEQ ID NO: 68278 - DNA, 15 bp, Homo sapiens
tggcaaaccaacatc

SEQ ID NO: 68279 - DNA, 15 bp, Homo sapiens
atggcaaaccaacat

SEQ ID NO: 68280 - DNA, 15 bp, Homo sapiens
gatggcaaaccaaca

SEQ ID NO: 68281 - DNA, 15 bp, Homo sapiens
tgatggcaaaccaac

SEQ ID NO: 68282 - DNA, 15 bp, Homo sapiens
ttgatggcaaaccaa

SEQ ID NO: 68283 - DNA, 15 bp, Homo sapiens
cttgatggcaaacca

SEQ ID NO: 68284 - DNA, 15 bp, Homo sapiens
gcttgatggcaaacc

SEQ ID NO: 68285 - DNA, 15 bp, Homo sapiens
tgcttgatggcaaac

SEQ ID NO: 68286 - DNA, 15 bp, Homo sapiens
ttgcttgatggcaaa

SEQ ID NO: 68287 - DNA, 15 bp, Homo sapiens
cttgcttgatggcaa

SEQ ID NO: 68288 - DNA, 15 bp, Homo sapiens
gcttgcttgatggca

SEQ ID NO: 68289 - DNA, 15 bp, Homo sapiens
agcttgcttgatggc

SEQ ID NO: 68290 - DNA, 15 bp, Homo sapiens
cagcttgcttgatgg

SEQ ID NO: 68291 - DNA, 15 bp, Homo sapiens
tcagcttgcttgatg

SEQ ID NO: 68292 - DNA, 15 bp, Homo sapiens
ttcagcttgcttgat

SEQ ID NO: 68293 - DNA, 15 bp, Homo sapiens
tttcagcttgcttga

SEQ ID NO: 68294 - DNA, 15 bp, Homo sapiens
ttttcagcttgcttg

SEQ ID NO: 68295 - DNA, 15 bp, Homo sapiens
cttttcagcttgctt

SEQ ID NO: 68296 - DNA, 15 bp, Homo sapiens
gcttttcagcttgct

SEQ ID NO: 68297 - DNA, 15 bp, Homo sapiens
tgcttttcagcttgc

SEQ ID NO: 68298 - DNA, 15 bp, Homo sapiens
ttgcttttcagcttg

SEQ ID NO: 68299 - DNA, 15 bp, Homo sapiens
tttgcttttcagctt

SEQ ID NO: 68300 - DNA, 15 bp, Homo sapiens
ttttgcttttcagct

SEQ ID NO: 68301 - DNA, 15 bp, Homo sapiens
gttttgcttttcagc

SEQ ID NO: 68302 - DNA, 15 bp, Homo sapiens
tgttttgcttttcag

SEQ ID NO: 68303 - DNA, 15 bp, Homo sapiens
ttgttttgcttttca

SEQ ID NO: 68304 - DNA, 15 bp, Homo sapiens
cttgttttgcttttc

SEQ ID NO: 68305 - DNA, 15 bp, Homo sapiens
gcttgttttgctttt

SEQ ID NO: 68306 - DNA, 15 bp, Homo sapiens
ggcttgttttgcttt

SEQ ID NO: 68307 - DNA, 15 bp, Homo sapiens
tggcttgttttgctt

SEQ ID NO: 68308 - DNA, 15 bp, Homo sapiens
ctggcttgttttgct

SEQ ID NO: 68309 - DNA, 15 bp, Homo sapiens
gctggcttgttttgc

SEQ ID NO: 68310 - DNA, 15 bp, Homo sapiens
agctggcttgttttg

SEQ ID NO: 68311 - DNA, 15 bp, Homo sapiens
cagctggcttgtttt

SEQ ID NO: 68312 - DNA, 15 bp, Homo sapiens
acagctggcttgttt

SEQ ID NO: 68313 - DNA, 15 bp, Homo sapiens
gacagctggcttgtt

SEQ ID NO: 68314 - DNA, 15 bp, Homo sapiens
tgacagctggcttgt

SEQ ID NO: 68315 - DNA, 15 bp, Homo sapiens
ctgacagctggcttg

SEQ ID NO: 68316 - DNA, 15 bp, Homo sapiens
cctgacagctggctt

SEQ ID NO: 68317 - DNA, 15 bp, Homo sapiens
acctgacagctggct

SEQ ID NO: 68318 - DNA, 15 bp, Homo sapiens
cacctgacagctggc

SEQ ID NO: 68319 - DNA, 15 bp, Homo sapiens
gcacctgacagctgg

SEQ ID NO: 68320 - DNA, 15 bp, Homo sapiens
cgcacctgacagctg

SEQ ID NO: 68321 - DNA, 15 bp, Homo sapiens
ccgcacctgacagct

SEQ ID NO: 68322 - DNA, 15 bp, Homo sapiens
gccgcacctgacagc

SEQ ID NO: 68323 - DNA, 15 bp, Homo sapiens
ggccgcacctgacag

SEQ ID NO: 68324 - DNA, 15 bp, Homo sapiens
gggccgcacctgaca

SEQ ID NO: 68325 - DNA, 15 bp, Homo sapiens
tgggccgcacctgac

SEQ ID NO: 68326 - DNA, 15 bp, Homo sapiens
ctgggccgcacctga

SEQ ID NO: 68327 - DNA, 15 bp, Homo sapiens
tctgggccgcacctg

SEQ ID NO: 68328 - DNA, 15 bp, Homo sapiens
ctctgggccgcacct

SEQ ID NO: 68329 - DNA, 15 bp, Homo sapiens
gctctgggccgcacc

SEQ ID NO: 68330 - DNA, 15 bp, Homo sapiens
agctctgggccgcac

SEQ ID NO: 68331 - DNA, 15 bp, Homo sapiens
tagctctgggccgca

SEQ ID NO: 68332 - DNA, 15 bp, Homo sapiens
gtagctctgggccgc

SEQ ID NO: 68333 - DNA, 15 bp, Homo sapiens
ggtagctctgggccg

SEQ ID NO: 68334 - DNA, 15 bp, Homo sapiens
aggtagctctgggcc

SEQ ID NO: 68335 - DNA, 15 bp, Homo sapiens
aaggtagctctgggc

SEQ ID NO: 68336 - DNA, 15 bp, Homo sapiens
gaaggtagctctggg

SEQ ID NO: 68337 - DNA, 15 bp, Homo sapiens
ggaaggtagctctgg

SEQ ID NO: 68338 - DNA, 15 bp, Homo sapiens
gggaaggtagctctg

SEQ ID NO: 68339 - DNA, 15 bp, Homo sapiens
agggaaggtagctct

SEQ ID NO: 68340 - DNA, 15 bp, Homo sapiens
tagggaaggtagctc

SEQ ID NO: 68341 - DNA, 15 bp, Homo sapiens
atagggaaggtagct

SEQ ID NO: 68342 - DNA, 15 bp, Homo sapiens
gatagggaaggtagc

SEQ ID NO: 68343 - DNA, 15 bp, Homo sapiens
ggatagggaaggtag

SEQ ID NO: 68344 - DNA, 15 bp, Homo sapiens
gggatagggaaggta

SEQ ID NO: 68345 - DNA, 15 bp, Homo sapiens
agggatagggaaggt

SEQ ID NO: 68346 - DNA, 15 bp, Homo sapiens
gagggatagggaagg

SEQ ID NO: 68347 - DNA, 15 bp, Homo sapiens
agagggatagggaag

SEQ ID NO: 68348 - DNA, 15 bp, Homo sapiens
gagagggatagggaa

SEQ ID NO: 68349 - DNA, 15 bp, Homo sapiens
ggagagggataggga

SEQ ID NO: 68350 - DNA, 15 bp, Homo sapiens
gggagagggataggg

SEQ ID NO: 68351 - DNA, 15 bp, Homo sapiens
ggggagagggatagg

SEQ ID NO: 68352 - DNA, 15 bp, Homo sapiens
aggggagagggatag

SEQ ID NO: 68353 - DNA, 15 bp, Homo sapiens
gaggggagagggata

SEQ ID NO: 68354 - DNA, 15 bp, Homo sapiens
ggaggggagagggat

SEQ ID NO: 68355 - DNA, 15 bp, Homo sapiens
aggaggggagaggga

SEQ ID NO: 68356 - DNA, 15 bp, Homo sapiens
gaggaggggagaggg

SEQ ID NO: 68357 - DNA, 15 bp, Homo sapiens
ggaggaggggagagg

SEQ ID NO: 68358 - DNA, 15 bp, Homo sapiens
aggaggaggggagag

SEQ ID NO: 68359 - DNA, 15 bp, Homo sapiens
gaggaggaggggaga

SEQ ID NO: 68360 - DNA, 15 bp, Homo sapiens
ggaggaggaggggag

SEQ ID NO: 68361 - DNA, 15 bp, Homo sapiens
cggaggaggagggga

SEQ ID NO: 68362 - DNA, 15 bp, Homo sapiens
ccggaggaggagggg

SEQ ID NO: 68363 - DNA, 15 bp, Homo sapiens
gccggaggaggaggg

SEQ ID NO: 68364 - DNA, 15 bp, Homo sapiens
agccggaggaggagg

SEQ ID NO: 68365 - DNA, 15 bp, Homo sapiens
tagccggaggaggag

SEQ ID NO: 68366 - DNA, 15 bp, Homo sapiens
gtagccggaggagga

SEQ ID NO: 68367 - DNA, 15 bp, Homo sapiens
tgtagccggaggagg

SEQ ID NO: 68368 - DNA, 15 bp, Homo sapiens
gtgtagccggaggag

SEQ ID NO: 68369 - DNA, 15 bp, Homo sapiens
tgtgtagccggagga

SEQ ID NO: 68370 - DNA, 15 bp, Homo sapiens
gtgtgtagccggagg

SEQ ID NO: 68371 - DNA, 15 bp, Homo sapiens
tgtgtgtagccggag

SEQ ID NO: 68372 - DNA, 15 bp, Homo sapiens
atgtgtgtagccgga

SEQ ID NO: 68373 - DNA, 15 bp, Homo sapiens
catgtgtgtagccgg

SEQ ID NO: 68374 - DNA, 15 bp, Homo sapiens
gcatgtgtgtagccg

SEQ ID NO: 68375 - DNA, 15 bp, Homo sapiens
cgcatgtgtgtagcc

SEQ ID NO: 68376 - DNA, 15 bp, Homo sapiens
ccgcatgtgtgtagc

SEQ ID NO: 68377 - DNA, 15 bp, Homo sapiens
tccgcatgtgtgtag

SEQ ID NO: 68378 - DNA, 15 bp, Homo sapiens
ctccgcatgtgtgta

SEQ ID NO: 68379 - DNA, 15 bp, Homo sapiens
cctccgcatgtgtgt

SEQ ID NO: 68380 - DNA, 15 bp, Homo sapiens
tcctccgcatgtgtg

SEQ ID NO: 68381 - DNA, 15 bp, Homo sapiens
ttcctccgcatgtgt

SEQ ID NO: 68382 - DNA, 15 bp, Homo sapiens
tttcctccgcatgtg

SEQ ID NO: 68383 - DNA, 15 bp, Homo sapiens
ttttcctccgcatgt

SEQ ID NO: 68384 - DNA, 15 bp, Homo sapiens
attttcctccgcatg

SEQ ID NO: 68385 - DNA, 15 bp, Homo sapiens
gattttcctccgcat

SEQ ID NO: 68386 - DNA, 15 bp, Homo sapiens
tgattttcctccgca

SEQ ID NO: 68387 - DNA, 15 bp, Homo sapiens
ctgattttcctccgc

SEQ ID NO: 68388 - DNA, 15 bp, Homo sapiens
gctgattttcctccg

SEQ ID NO: 68389 - DNA, 15 bp, Homo sapiens
tgctgattttcctcc

SEQ ID NO: 68390 - DNA, 15 bp, Homo sapiens
gtgctgattttcctc

SEQ ID NO: 68391 - DNA, 15 bp, Homo sapiens
agtgctgattttcct

SEQ ID NO: 68392 - DNA, 15 bp, Homo sapiens
cagtgctgattttcc

SEQ ID NO: 68393 - DNA, 15 bp, Homo sapiens
gcagtgctgattttc

SEQ ID NO: 68394 - DNA, 15 bp, Homo sapiens
ggcagtgctgatttt

SEQ ID NO: 68395 - DNA, 15 bp, Homo sapiens
gggcagtgctgattt

SEQ ID NO: 68396 - DNA, 15 bp, Homo sapiens
ggggcagtgctgatt

SEQ ID NO: 68397 - DNA, 15 bp, Homo sapiens
tggggcagtgctgat

SEQ ID NO: 68398 - DNA, 15 bp, Homo sapiens
ctggggcagtgctga

SEQ ID NO: 68399 - DNA, 15 bp, Homo sapiens
cctggggcagtgctg

SEQ ID NO: 68400 - DNA, 15 bp, Homo sapiens
ccctggggcagtgct

SEQ ID NO: 68401 - DNA, 15 bp, Homo sapiens
accctggggcagtgc

SEQ ID NO: 68402 - DNA, 15 bp, Homo sapiens
gaccctggggcagtg

SEQ ID NO: 68403 - DNA, 15 bp, Homo sapiens
ggaccctggggcagt

SEQ ID NO: 68404 - DNA, 15 bp, Homo sapiens
gggaccctggggcag

SEQ ID NO: 68405 - DNA, 15 bp, Homo sapiens
tgggaccctggggca

SEQ ID NO: 68406 - DNA, 15 bp, Homo sapiens
ctgggaccctggggc

SEQ ID NO: 68407 - DNA, 15 bp, Homo sapiens
cctgggaccctgggg

SEQ ID NO: 68408 - DNA, 15 bp, Homo sapiens
gcctgggaccctggg

SEQ ID NO: 68409 - DNA, 15 bp, Homo sapiens
agcctgggaccctgg

SEQ ID NO: 68410 - DNA, 15 bp, Homo sapiens
cagcctgggaccctg

SEQ ID NO: 68411 - DNA, 15 bp, Homo sapiens
ccagcctgggaccct

SEQ ID NO: 68412 - DNA, 15 bp, Homo sapiens
cccagcctgggaccc

SEQ ID NO: 68413 - DNA, 15 bp, Homo sapiens
acccagcctgggacc

SEQ ID NO: 68414 - DNA, 15 bp, Homo sapiens
cacccagcctgggac

SEQ ID NO: 68415 - DNA, 15 bp, Homo sapiens
gcacccagcctggga

SEQ ID NO: 68416 - DNA, 15 bp, Homo sapiens
cgcacccagcctggg

SEQ ID NO: 68417 - DNA, 15 bp, Homo sapiens
ccgcacccagcctgg

SEQ ID NO: 68418 - DNA, 15 bp, Homo sapiens
accgcacccagcctg

SEQ ID NO: 68419 - DNA, 15 bp, Homo sapiens
aaccgcacccagcct

SEQ ID NO: 68420 - DNA, 15 bp, Homo sapiens
caaccgcacccagcc

SEQ ID NO: 68421 - DNA, 15 bp, Homo sapiens
ccaaccgcacccagc

SEQ ID NO: 68422 - DNA, 15 bp, Homo sapiens
accaaccgcacccag

SEQ ID NO: 68423 - DNA, 15 bp, Homo sapiens
taccaaccgcaccca

SEQ ID NO: 68424 - DNA, 15 bp, Homo sapiens
ttaccaaccgcaccc

SEQ ID NO: 68425 - DNA, 15 bp, Homo sapiens
gttaccaaccgcacc

SEQ ID NO: 68426 - DNA, 15 bp, Homo sapiens
tgttaccaaccgcac

SEQ ID NO: 68427 - DNA, 15 bp, Homo sapiens
ctgttaccaaccgca

SEQ ID NO: 68428 - DNA, 15 bp, Homo sapiens
tctgttaccaaccgc

SEQ ID NO: 68429 - DNA, 15 bp, Homo sapiens
ttctgttaccaaccg

SEQ ID NO: 68430 - DNA, 15 bp, Homo sapiens
tttctgttaccaacc

SEQ ID NO: 68431 - DNA, 15 bp, Homo sapiens
gtttctgttaccaac

SEQ ID NO: 68432 - DNA, 15 bp, Homo sapiens
agtttctgttaccaa

SEQ ID NO: 68433 - DNA, 15 bp, Homo sapiens
aagtttctgttacca

SEQ ID NO: 68434 - DNA, 15 bp, Homo sapiens
caagtttctgttacc

SEQ ID NO: 68435 - DNA, 15 bp, Homo sapiens
acaagtttctgttac

SEQ ID NO: 68436 - DNA, 15 bp, Homo sapiens
gacaagtttctgtta

SEQ ID NO: 68437 - DNA, 15 bp, Homo sapiens
ggacaagtttctgtt

SEQ ID NO: 68438 - DNA, 15 bp, Homo sapiens
gggacaagtttctgt

SEQ ID NO: 68439 - DNA, 15 bp, Homo sapiens
agggacaagtttctg

SEQ ID NO: 68440 - DNA, 15 bp, Homo sapiens
cagggacaagtttct

SEQ ID NO: 68441 - DNA, 15 bp, Homo sapiens
ccagggacaagtttc

SEQ ID NO: 68442 - DNA, 15 bp, Homo sapiens
gccagggacaagttt

SEQ ID NO: 68443 - DNA, 15 bp, Homo sapiens
agccagggacaagtt

SEQ ID NO: 68444 - DNA, 15 bp, Homo sapiens
cagccagggacaagt

SEQ ID NO: 68445 - DNA, 15 bp, Homo sapiens
acagccagggacaag

SEQ ID NO: 68446 - DNA, 15 bp, Homo sapiens
cacagccagggacaa

SEQ ID NO: 68447 - DNA, 15 bp, Homo sapiens
gcacagccagggaca

SEQ ID NO: 68448 - DNA, 15 bp, Homo sapiens
ggcacagccagggac

SEQ ID NO: 68449 - DNA, 15 bp, Homo sapiens
gggcacagccaggga

SEQ ID NO: 68450 - DNA, 15 bp, Homo sapiens
ggggcacagccaggg

SEQ ID NO: 68451 - DNA, 15 bp, Homo sapiens
aggggcacagccagg

SEQ ID NO: 68452 - DNA, 15 bp, Homo sapiens
taggggcacagccag

SEQ ID NO: 68453 - DNA, 15 bp, Homo sapiens
ctaggggcacagcca

SEQ ID NO: 68454 - DNA, 15 bp, Homo sapiens
cctaggggcacagcc

SEQ ID NO: 68455 - DNA, 15 bp, Homo sapiens
acctaggggcacagc

SEQ ID NO: 68456 - DNA, 15 bp, Homo sapiens
gacctaggggcacag

SEQ ID NO: 68457 - DNA, 15 bp, Homo sapiens
ggacctaggggcaca

SEQ ID NO: 68458 - DNA, 15 bp, Homo sapiens
aggacctaggggcac

SEQ ID NO: 68459 - DNA, 15 bp, Homo sapiens
gaggacctaggggca

SEQ ID NO: 68460 - DNA, 15 bp, Homo sapiens
agaggacctaggggc

SEQ ID NO: 68461 - DNA, 15 bp, Homo sapiens
cagaggacctagggg

SEQ ID NO: 68462 - DNA, 15 bp, Homo sapiens
gcagaggacctaggg

SEQ ID NO: 68463 - DNA, 15 bp, Homo sapiens
ggcagaggacctagg

SEQ ID NO: 68464 - DNA, 15 bp, Homo sapiens
aggcagaggacctag

SEQ ID NO: 68465 - DNA, 15 bp, Homo sapiens
aaggcagaggaccta

SEQ ID NO: 68466 - DNA, 15 bp, Homo sapiens
gaaggcagaggacct

SEQ ID NO: 68467 - DNA, 15 bp, Homo sapiens
tgaaggcagaggacc

SEQ ID NO: 68468 - DNA, 15 bp, Homo sapiens
gtgaaggcagaggac

SEQ ID NO: 68469 - DNA, 15 bp, Homo sapiens
agtgaaggcagagga

SEQ ID NO: 68470 - DNA, 15 bp, Homo sapiens
gagtgaaggcagagg

SEQ ID NO: 68471 - DNA, 15 bp, Homo sapiens
tgagtgaaggcagag

SEQ ID NO: 68472 - DNA, 15 bp, Homo sapiens
gtgagtgaaggcaga

SEQ ID NO: 68473 - DNA, 15 bp, Homo sapiens
agtgagtgaaggcag

SEQ ID NO: 68474 - DNA, 15 bp, Homo sapiens
cagtgagtgaaggca

SEQ ID NO: 68475 - DNA, 15 bp, Homo sapiens
acagtgagtgaaggc

SEQ ID NO: 68476 - DNA, 15 bp, Homo sapiens
gacagtgagtgaagg

SEQ ID NO: 68477 - DNA, 15 bp, Homo sapiens
agacagtgagtgaag

SEQ ID NO: 68478 - DNA, 15 bp, Homo sapiens
cagacagtgagtgaa

SEQ ID NO: 68479 - DNA, 15 bp, Homo sapiens
ccagacagtgagtga

SEQ ID NO: 68480 - DNA, 15 bp, Homo sapiens
cccagacagtgagtg

SEQ ID NO: 68481 - DNA, 15 bp, Homo sapiens
ccccagacagtgagt

SEQ ID NO: 68482 - DNA, 15 bp, Homo sapiens
gccccagacagtgag

SEQ ID NO: 68483 - DNA, 15 bp, Homo sapiens
agccccagacagtga

SEQ ID NO: 68484 - DNA, 15 bp, Homo sapiens
cagccccagacagtg

SEQ ID NO: 68485 - DNA, 15 bp, Homo sapiens
ccagccccagacagt

SEQ ID NO: 68486 - DNA, 15 bp, Homo sapiens
accagccccagacag

SEQ ID NO: 68487 - DNA, 15 bp, Homo sapiens
gaccagccccagaca

SEQ ID NO: 68488 - DNA, 15 bp, Homo sapiens
ggaccagccccagac

SEQ ID NO: 68489 - DNA, 15 bp, Homo sapiens
aggaccagccccaga

SEQ ID NO: 68490 - DNA, 15 bp, Homo sapiens
caggaccagccccag

SEQ ID NO: 68491 - DNA, 15 bp, Homo sapiens
ccaggaccagcccca

SEQ ID NO: 68492 - DNA, 15 bp, Homo sapiens
tccaggaccagcccc

SEQ ID NO: 68493 - DNA, 15 bp, Homo sapiens
ctccaggaccagccc

SEQ ID NO: 68494 - DNA, 15 bp, Homo sapiens
actccaggaccagcc

SEQ ID NO: 68495 - DNA, 15 bp, Homo sapiens
aactccaggaccagc

SEQ ID NO: 68496 - DNA, 15 bp, Homo sapiens
aaactccaggaccag

SEQ ID NO: 68497 - DNA, 15 bp, Homo sapiens
caaactccaggacca

SEQ ID NO: 68498 - DNA, 15 bp, Homo sapiens
acaaactccaggacc

SEQ ID NO: 68499 - DNA, 15 bp, Homo sapiens
gacaaactccaggac

SEQ ID NO: 68500 - DNA, 15 bp, Homo sapiens
agacaaactccagga

SEQ ID NO: 68501 - DNA, 15 bp, Homo sapiens
aagacaaactccagg

SEQ ID NO: 68502 - DNA, 15 bp, Homo sapiens
caagacaaactccag

SEQ ID NO: 68503 - DNA, 15 bp, Homo sapiens
gcaagacaaactcca

SEQ ID NO: 68504 - DNA, 15 bp, Homo sapiens
agcaagacaaactcc

SEQ ID NO: 68505 - DNA, 15 bp, Homo sapiens
gagcaagacaaactc

SEQ ID NO: 68506 - DNA, 15 bp, Homo sapiens
agagcaagacaaact

SEQ ID NO: 68507 - DNA, 15 bp, Homo sapiens
cagagcaagacaaac

SEQ ID NO: 68508 - DNA, 15 bp, Homo sapiens
acagagcaagacaaa

SEQ ID NO: 68509 - DNA, 15 bp, Homo sapiens
aacagagcaagacaa

SEQ ID NO: 68510 - DNA, 15 bp, Homo sapiens
aaacagagcaagaca

SEQ ID NO: 68511 - DNA, 15 bp, Homo sapiens
aaaacagagcaagac

SEQ ID NO: 68512 - DNA, 15 bp, Homo sapiens
aaaaacagagcaaga

SEQ ID NO: 68513 - DNA, 15 bp, Homo sapiens
aaaaaacagagcaag

SEQ ID NO: 68514 - DNA, 15 bp, Homo sapiens
aaaaaaacagagcaa

SEQ ID NO: 68515 - DNA, 15 bp, Homo sapiens
caaaaaaacagagca

SEQ ID NO: 68516 - DNA, 15 bp, Homo sapiens
tacaaaaaaacagag

SEQ ID NO: 68517 - DNA, 15 bp, Homo sapiens
ctacaaaaaaacaga

SEQ ID NO: 68518 - DNA, 15 bp, Homo sapiens
cctacaaaaaaacag

SEQ ID NO: 68519 - DNA, 15 bp, Homo sapiens
acctacaaaaaaaca

SEQ ID NO: 68520 - DNA, 15 bp, Homo sapiens
cacctacaaaaaaac

SEQ ID NO: 68521 - DNA, 15 bp, Homo sapiens
ccacctacaaaaaaa

SEQ ID NO: 68522 - DNA, 15 bp, Homo sapiens
tccacctacaaaaaa

SEQ ID NO: 68523 - DNA, 15 bp, Homo sapiens
ttccacctacaaaaa

SEQ ID NO: 68524 - DNA, 15 bp, Homo sapiens
attccacctacaaaa

SEQ ID NO: 68525 - DNA, 15 bp, Homo sapiens
cattccacctacaaa

SEQ ID NO: 68526 - DNA, 15 bp, Homo sapiens
gcattccacctacaa

SEQ ID NO: 68527 - DNA, 15 bp, Homo sapiens
tgcattccacctaca

SEQ ID NO: 68528 - DNA, 15 bp, Homo sapiens
ctgcattccacctac

SEQ ID NO: 68529 - DNA, 15 bp, Homo sapiens
tctgcattccaccta

SEQ ID NO: 68530 - DNA, 15 bp, Homo sapiens
ctctgcattccacct

SEQ ID NO: 68531 - DNA, 15 bp, Homo sapiens
tctctgcattccacc

SEQ ID NO: 68532 - DNA, 15 bp, Homo sapiens
ttctctgcattccac

SEQ ID NO: 68533 - DNA, 15 bp, Homo sapiens
tttctctgcattcca

SEQ ID NO: 68534 - DNA, 15 bp, Homo sapiens
ctttctctgcattcc

SEQ ID NO: 68535 - DNA, 15 bp, Homo sapiens
gctttctctgcattc

SEQ ID NO: 68536 - DNA, 15 bp, Homo sapiens
agctttctctgcatt

SEQ ID NO: 68537 - DNA, 15 bp, Homo sapiens
tagctttctctgcat

SEQ ID NO: 68538 - DNA, 15 bp, Homo sapiens
atagctttctctgca

SEQ ID NO: 68539 - DNA, 15 bp, Homo sapiens
gatagctttctctgc

SEQ ID NO: 68540 - DNA, 15 bp, Homo sapiens
agatagctttctctg

SEQ ID NO: 68541 - DNA, 15 bp, Homo sapiens
cagatagctttctct

SEQ ID NO: 68542 - DNA, 15 bp, Homo sapiens
acagatagctttctc

SEQ ID NO: 68543 - DNA, 15 bp, Homo sapiens
cacagatagctttct

SEQ ID NO: 68544 - DNA, 15 bp, Homo sapiens
ccacagatagctttc

SEQ ID NO: 68545 - DNA, 15 bp, Homo sapiens
gccacagatagcttt

SEQ ID NO: 68546 - DNA, 15 bp, Homo sapiens
ggccacagatagctt

SEQ ID NO: 68547 - DNA, 15 bp, Homo sapiens
aggccacagatagct

SEQ ID NO: 68548 - DNA, 15 bp, Homo sapiens
aaggccacagatagc

SEQ ID NO: 68549 - DNA, 15 bp, Homo sapiens
caaggccacagatag

SEQ ID NO: 68550 - DNA, 15 bp, Homo sapiens
ccaaggccacagata

SEQ ID NO: 68551 - DNA, 15 bp, Homo sapiens
gccaaggccacagat

SEQ ID NO: 68552 - DNA, 15 bp, Homo sapiens
ggccaaggccacaga

SEQ ID NO: 68553 - DNA, 15 bp, Homo sapiens
aggccaaggccacag

SEQ ID NO: 68554 - DNA, 15 bp, Homo sapiens
aaggccaaggccaca

SEQ ID NO: 68555 - DNA, 15 bp, Homo sapiens
aaaggccaaggccac

SEQ ID NO: 68556 - DNA, 15 bp, Homo sapiens
caaaggccaaggcca

SEQ ID NO: 68557 - DNA, 15 bp, Homo sapiens
acaaaggccaaggcc

SEQ ID NO: 68558 - DNA, 15 bp, Homo sapiens
gacaaaggccaaggc

SEQ ID NO: 68559 - DNA, 15 bp, Homo sapiens
cgacaaaggccaagg

SEQ ID NO: 68560 - DNA, 15 bp, Homo sapiens
ccgacaaaggccaag

SEQ ID NO: 68561 - DNA, 15 bp, Homo sapiens
cccgacaaaggccaa

SEQ ID NO: 68562 - DNA, 15 bp, Homo sapiens
ccccgacaaaggcca

SEQ ID NO: 68563 - DNA, 15 bp, Homo sapiens
cccccgacaaaggcc

SEQ ID NO: 68564 - DNA, 15 bp, Homo sapiens
tcccccgacaaaggc

SEQ ID NO: 68565 - DNA, 15 bp, Homo sapiens
atcccccgacaaagg

SEQ ID NO: 68566 - DNA, 15 bp, Homo sapiens
gatcccccgacaaag

SEQ ID NO: 68567 - DNA, 15 bp, Homo sapiens
agatcccccgacaaa

SEQ ID NO: 68568 - DNA, 15 bp, Homo sapiens
tagatcccccgacaa

SEQ ID NO: 68569 - DNA, 15 bp, Homo sapiens
ttagatcccccgaca

SEQ ID NO: 68570 - DNA, 15 bp, Homo sapiens
cttagatcccccgac

SEQ ID NO: 68571 - DNA, 15 bp, Homo sapiens
ccttagatcccccga

SEQ ID NO: 68572 - DNA, 15 bp, Homo sapiens
accttagatcccccg

SEQ ID NO: 68573 - DNA, 15 bp, Homo sapiens
aaccttagatccccc

SEQ ID NO: 68574 - DNA, 15 bp, Homo sapiens
caaccttagatcccc

SEQ ID NO: 68575 - DNA, 15 bp, Homo sapiens
acaaccttagatccc

SEQ ID NO: 68576 - DNA, 15 bp, Homo sapiens
gacaaccttagatcc

SEQ ID NO: 68577 - DNA, 15 bp, Homo sapiens
tgacaaccttagatc

SEQ ID NO: 68578 - DNA, 15 bp, Homo sapiens
atgacaaccttagat

SEQ ID NO: 68579 - DNA, 15 bp, Homo sapiens
aatgacaaccttaga

SEQ ID NO: 68580 - DNA, 15 bp, Homo sapiens
gaatgacaaccttag

SEQ ID NO: 68581 - DNA, 15 bp, Homo sapiens
agaatgacaacctta

SEQ ID NO: 68582 - DNA, 15 bp, Homo sapiens
cagaatgacaacctt

SEQ ID NO: 68583 - DNA, 15 bp, Homo sapiens
ccagaatgacaacct

SEQ ID NO: 68584 - DNA, 15 bp, Homo sapiens
tccagaatgacaacc

SEQ ID NO: 68585 - DNA, 15 bp, Homo sapiens
atccagaatgacaac

SEQ ID NO: 68586 - DNA, 15 bp, Homo sapiens
catccagaatgacaa

SEQ ID NO: 68587 - DNA, 15 bp, Homo sapiens
tcatccagaatgaca

SEQ ID NO: 68588 - DNA, 15 bp, Homo sapiens
ttcatccagaatgac

SEQ ID NO: 68589 - DNA, 15 bp, Homo sapiens
gttcatccagaatga

SEQ ID NO: 68590 - DNA, 15 bp, Homo sapiens
ggttcatccagaatg

SEQ ID NO: 68591 - DNA, 15 bp, Homo sapiens
gggttcatccagaat

SEQ ID NO: 68592 - DNA, 15 bp, Homo sapiens
tgggttcatccagaa

SEQ ID NO: 68593 - DNA, 15 bp, Homo sapiens
gtgggttcatccaga

SEQ ID NO: 68594 - DNA, 15 bp, Homo sapiens
tgtgggttcatccag

SEQ ID NO: 68595 - DNA, 15 bp, Homo sapiens
ctgtgggttcatcca

SEQ ID NO: 68596 - DNA, 15 bp, Homo sapiens
gctgtgggttcatcc

SEQ ID NO: 68597 - DNA, 15 bp, Homo sapiens
agctgtgggttcatc

SEQ ID NO: 68598 - DNA, 15 bp, Homo sapiens
cagctgtgggttcat

SEQ ID NO: 68599 - DNA, 15 bp, Homo sapiens
ccagctgtgggttca

SEQ ID NO: 68600 - DNA, 15 bp, Homo sapiens
accagctgtgggttc

SEQ ID NO: 68601 - DNA, 15 bp, Homo sapiens
caccagctgtgggtt

SEQ ID NO: 68602 - DNA, 15 bp, Homo sapiens
acaccagctgtgggt

SEQ ID NO: 68603 - DNA, 15 bp, Homo sapiens
cacaccagctgtggg

SEQ ID NO: 68604 - DNA, 15 bp, Homo sapiens
ccacaccagctgtgg

SEQ ID NO: 68605 - DNA, 15 bp, Homo sapiens
tccacaccagctgtg

SEQ ID NO: 68606 - DNA, 15 bp, Homo sapiens
gtccacaccagctgt

SEQ ID NO: 68607 - DNA, 15 bp, Homo sapiens
ggtccacaccagctg

SEQ ID NO: 68608 - DNA, 15 bp, Homo sapiens
gggtccacaccagct

SEQ ID NO: 68609 - DNA, 15 bp, Homo sapiens
agggtccacaccagc

SEQ ID NO: 68610 - DNA, 15 bp, Homo sapiens
aagggtccacaccag

SEQ ID NO: 68611 - DNA, 15 bp, Homo sapiens
taagggtccacacca

SEQ ID NO: 68612 - DNA, 15 bp, Homo sapiens
gtaagggtccacacc

SEQ ID NO: 68613 - DNA, 15 bp, Homo sapiens
agtaagggtccacac

SEQ ID NO: 68614 - DNA, 15 bp, Homo sapiens
gagtaagggtccaca

SEQ ID NO: 68615 - DNA, 15 bp, Homo sapiens
ggagtaagggtccac

SEQ ID NO: 68616 - DNA, 15 bp, Homo sapiens
gggagtaagggtcca

SEQ ID NO: 68617 - DNA, 15 bp, Homo sapiens
cgggagtaagggtcc

SEQ ID NO: 68618 - DNA, 15 bp, Homo sapiens
gcgggagtaagggtc

SEQ ID NO: 68619 - DNA, 15 bp, Homo sapiens
tgcgggagtaagggt

SEQ ID NO: 68620 - DNA, 15 bp, Homo sapiens
ctgcgggagtaaggg

SEQ ID NO: 68621 - DNA, 15 bp, Homo sapiens
cctgcgggagtaagg

SEQ ID NO: 68622 - DNA, 15 bp, Homo sapiens
ccctgcgggagtaag

SEQ ID NO: 68623 - DNA, 15 bp, Homo sapiens
cccctgcgggagtaa

SEQ ID NO: 68624 - DNA, 15 bp, Homo sapiens
tcccctgcgggagta

SEQ ID NO: 68625 - DNA, 15 bp, Homo sapiens
ttcccctgcgggagt

SEQ ID NO: 68626 - DNA, 15 bp, Homo sapiens
attcccctgcgggag

SEQ ID NO: 68627 - DNA, 15 bp, Homo sapiens
tattcccctgcggga

SEQ ID NO: 68628 - DNA, 15 bp, Homo sapiens
atattcccctgcggg

SEQ ID NO: 68629 - DNA, 15 bp, Homo sapiens
catattcccctgcgg

SEQ ID NO: 68630 - DNA, 15 bp, Homo sapiens
ccatattcccctgcg

SEQ ID NO: 68631 - DNA, 15 bp, Homo sapiens
cccatattcccctgc

SEQ ID NO: 68632 - DNA, 15 bp, Homo sapiens
tcccatattcccctg

SEQ ID NO: 68633 - DNA, 15 bp, Homo sapiens
ctcccatattcccct

SEQ ID NO: 68634 - DNA, 15 bp, Homo sapiens
gctcccatattcccc

SEQ ID NO: 68635 - DNA, 15 bp, Homo sapiens
agctcccatattccc

SEQ ID NO: 68636 - DNA, 15 bp, Homo sapiens
cagctcccatattcc

SEQ ID NO: 68637 - DNA, 15 bp, Homo sapiens
gcagctcccatattc

SEQ ID NO: 68638 - DNA, 15 bp, Homo sapiens
agcagctcccatatt

SEQ ID NO: 68639 - DNA, 15 bp, Homo sapiens
cagcagctcccatat

SEQ ID NO: 68640 - DNA, 15 bp, Homo sapiens
gcagcagctcccata

SEQ ID NO: 68641 - DNA, 15 bp, Homo sapiens
agcagcagctcccat

SEQ ID NO: 68642 - DNA, 15 bp, Homo sapiens
cagcagcagctccca

SEQ ID NO: 68643 - DNA, 15 bp, Homo sapiens
tcagcagcagctccc

SEQ ID NO: 68644 - DNA, 15 bp, Homo sapiens
ttcagcagcagctcc

SEQ ID NO: 68645 - DNA, 15 bp, Homo sapiens
tttcagcagcagctc

SEQ ID NO: 68646 - DNA, 15 bp, Homo sapiens
atttcagcagcagct

SEQ ID NO: 68647 - DNA, 15 bp, Homo sapiens
tatttcagcagcagc

SEQ ID NO: 68648 - DNA, 15 bp, Homo sapiens
gtatttcagcagcag

SEQ ID NO: 68649 - DNA, 15 bp, Homo sapiens
ggtatttcagcagca

SEQ ID NO: 68650 - DNA, 15 bp, Homo sapiens
cggtatttcagcagc

SEQ ID NO: 68651 - DNA, 15 bp, Homo sapiens
tcggtatttcagcag

SEQ ID NO: 68652 - DNA, 15 bp, Homo sapiens
gtcggtatttcagca

SEQ ID NO: 68653 - DNA, 15 bp, Homo sapiens
tgtcggtatttcagc

SEQ ID NO: 68654 - DNA, 15 bp, Homo sapiens
ttgtcggtatttcag

SEQ ID NO: 68655 - DNA, 15 bp, Homo sapiens
cttgtcggtatttca

SEQ ID NO: 68656 - DNA, 15 bp, Homo sapiens
ccttgtcggtatttc

SEQ ID NO: 68657 - DNA, 15 bp, Homo sapiens
accttgtcggtattt

SEQ ID NO: 68658 - DNA, 15 bp, Homo sapiens
caccttgtcggtatt

SEQ ID NO: 68659 - DNA, 15 bp, Homo sapiens
gcaccttgtcggtat

SEQ ID NO: 68660 - DNA, 15 bp, Homo sapiens
ggcaccttgtcggta

SEQ ID NO: 68661 - DNA, 15 bp, Homo sapiens
aggcaccttgtcggt

SEQ ID NO: 68662 - DNA, 15 bp, Homo sapiens
caggcaccttgtcgg

SEQ ID NO: 68663 - DNA, 15 bp, Homo sapiens
tcaggcaccttgtcg

SEQ ID NO: 68664 - DNA, 15 bp, Homo sapiens
atcaggcaccttgtc

SEQ ID NO: 68665 - DNA, 15 bp, Homo sapiens
catcaggcaccttgt

SEQ ID NO: 68666 - DNA, 15 bp, Homo sapiens
acatcaggcaccttg

SEQ ID NO: 68667 - DNA, 15 bp, Homo sapiens
cacatcaggcacctt

SEQ ID NO: 68668 - DNA, 15 bp, Homo sapiens
acacatcaggcacct

SEQ ID NO: 68669 - DNA, 15 bp, Homo sapiens
tacacatcaggcacc

SEQ ID NO: 68670 - DNA, 15 bp, Homo sapiens
atacacatcaggcac

SEQ ID NO: 68671 - DNA, 15 bp, Homo sapiens
aatacacatcaggca

SEQ ID NO: 68672 - DNA, 15 bp, Homo sapiens
aaatacacatcaggc

SEQ ID NO: 68673 - DNA, 15 bp, Homo sapiens
taaatacacatcagg

SEQ ID NO: 68674 - DNA, 15 bp, Homo sapiens
ataaatacacatcag

SEQ ID NO: 68675 - DNA, 15 bp, Homo sapiens
aataaatacacatca

SEQ ID NO: 68676 - DNA, 15 bp, Homo sapiens
gaataaatacacatc

SEQ ID NO: 68677 - DNA, 15 bp, Homo sapiens
agaataaatacacat

SEQ ID NO: 68678 - DNA, 15 bp, Homo sapiens
cagaataaatacaca

SEQ ID NO: 68679 - DNA, 15 bp, Homo sapiens
tcagaataaatacac

SEQ ID NO: 68680 - DNA, 15 bp, Homo sapiens
ctcagaataaataca

SEQ ID NO: 68681 - DNA, 15 bp, Homo sapiens
actcagaataaatac

SEQ ID NO: 68682 - DNA, 15 bp, Homo sapiens
tactcagaataaata

SEQ ID NO: 68683 - DNA, 15 bp, Homo sapiens
ttactcagaataaat

SEQ ID NO: 68684 - DNA, 15 bp, Homo sapiens
tttactcagaataaa

SEQ ID NO: 68685 - DNA, 15 bp, Homo sapiens
atttactcagaataa

SEQ ID NO: 68686 - DNA, 15 bp, Homo sapiens
catttactcagaata

SEQ ID NO: 68687 - DNA, 15 bp, Homo sapiens
ccatttactcagaat

SEQ ID NO: 68688 - DNA, 15 bp, Homo sapiens
tccatttactcagaa

SEQ ID NO: 68689 - DNA, 15 bp, Homo sapiens
gtccatttactcaga

SEQ ID NO: 68690 - DNA, 15 bp, Homo sapiens
agtccatttactcag

SEQ ID NO: 68691 - DNA, 15 bp, Homo sapiens
cagtccatttactca

SEQ ID NO: 68692 - DNA, 15 bp, Homo sapiens
tcagtccatttactc

SEQ ID NO: 68693 - DNA, 15 bp, Homo sapiens
ctcagtccatttact

SEQ ID NO: 68694 - DNA, 15 bp, Homo sapiens
tctcagtccatttac

SEQ ID NO: 68695 - DNA, 15 bp, Homo sapiens
ctctcagtccattta

SEQ ID NO: 68696 - DNA, 15 bp, Homo sapiens
tctctcagtccattt

SEQ ID NO: 68697 - DNA, 15 bp, Homo sapiens
ctctctcagtccatt

SEQ ID NO: 68698 - DNA, 15 bp, Homo sapiens
tctctctcagtccat

SEQ ID NO: 68699 - DNA, 15 bp, Homo sapiens
ctctctctcagtcca

SEQ ID NO: 68700 - DNA, 15 bp, Homo sapiens
gctctctctcagtcc

SEQ ID NO: 68701 - DNA, 15 bp, Homo sapiens
cgctctctctcagtc

SEQ ID NO: 68702 - DNA, 15 bp, Homo sapiens
ccgctctctctcagt

SEQ ID NO: 68703 - DNA, 15 bp, Homo sapiens
cccgctctctctcag

SEQ ID NO: 68704 - DNA, 15 bp, Homo sapiens
ccccgctctctctca

SEQ ID NO: 68705 - DNA, 15 bp, Homo sapiens
cccccgctctctctc

SEQ ID NO: 68706 - DNA, 15 bp, Homo sapiens
ccccccgctctctct

SEQ ID NO: 68707 - DNA, 15 bp, Homo sapiens
gccccccgctctctc

SEQ ID NO: 68708 - DNA, 15 bp, Homo sapiens
agccccccgctctct

SEQ ID NO: 68709 - DNA, 15 bp, Homo sapiens
aagccccccgctctc

SEQ ID NO: 68710 - DNA, 15 bp, Homo sapiens
aaagccccccgctct

SEQ ID NO: 68711 - DNA, 15 bp, Homo sapiens
aaaagccccccgctc

SEQ ID NO: 68712 - DNA, 15 bp, Homo sapiens
caaaagccccccgct

SEQ ID NO: 68713 - DNA, 15 bp, Homo sapiens
tcaaaagccccccgc

SEQ ID NO: 68714 - DNA, 15 bp, Homo sapiens
ctcaaaagccccccg

SEQ ID NO: 68715 - DNA, 15 bp, Homo sapiens
tctcaaaagcccccc

SEQ ID NO: 68716 - DNA, 15 bp, Homo sapiens
ttctcaaaagccccc

SEQ ID NO: 68717 - DNA, 15 bp, Homo sapiens
cttctcaaaagcccc

SEQ ID NO: 68718 - DNA, 15 bp, Homo sapiens
acttctcaaaagccc

SEQ ID NO: 68719 - DNA, 15 bp, Homo sapiens
cacttctcaaaagcc

SEQ ID NO: 68720 - DNA, 15 bp, Homo sapiens
acacttctcaaaagc

SEQ ID NO: 68721 - DNA, 15 bp, Homo sapiens
cacacttctcaaaag

SEQ ID NO: 68722 - DNA, 15 bp, Homo sapiens
ccacacttctcaaaa

SEQ ID NO: 68723 - DNA, 15 bp, Homo sapiens
gccacacttctcaaa

SEQ ID NO: 68724 - DNA, 15 bp, Homo sapiens
agccacacttctcaa

SEQ ID NO: 68725 - DNA, 15 bp, Homo sapiens
cagccacacttctca

SEQ ID NO: 68726 - DNA, 15 bp, Homo sapiens
acagccacacttctc

SEQ ID NO: 68727 - DNA, 15 bp, Homo sapiens
tacagccacacttct

SEQ ID NO: 68728 - DNA, 15 bp, Homo sapiens
atacagccacacttc

SEQ ID NO: 68729 - DNA, 15 bp, Homo sapiens
gatacagccacactt

SEQ ID NO: 68730 - DNA, 15 bp, Homo sapiens
agatacagccacact

SEQ ID NO: 68731 - DNA, 15 bp, Homo sapiens
gagatacagccacac

SEQ ID NO: 68732 - DNA, 15 bp, Homo sapiens
tgagatacagccaca

SEQ ID NO: 68733 - DNA, 15 bp, Homo sapiens
atgagatacagccac

SEQ ID NO: 68734 - DNA, 15 bp, Homo sapiens
catgagatacagcca

SEQ ID NO: 68735 - DNA, 15 bp, Homo sapiens
ccatgagatacagcc

SEQ ID NO: 68736 - DNA, 15 bp, Homo sapiens
gccatgagatacagc

SEQ ID NO: 68737 - DNA, 15 bp, Homo sapiens
agccatgagatacag

SEQ ID NO: 68738 - DNA, 15 bp, Homo sapiens
tagccatgagataca

SEQ ID NO: 68739 - DNA, 15 bp, Homo sapiens
ctagccatgagatac

SEQ ID NO: 68740 - DNA, 15 bp, Homo sapiens
cctagccatgagata

SEQ ID NO: 68741 - DNA, 15 bp, Homo sapiens
gcctagccatgagat

SEQ ID NO: 68742 - DNA, 15 bp, Homo sapiens
agcctagccatgaga

SEQ ID NO: 68743 - DNA, 15 bp, Homo sapiens
aagcctagccatgag

SEQ ID NO: 68744 - DNA, 15 bp, Homo sapiens
gaagcctagccatga

SEQ ID NO: 68745 - DNA, 15 bp, Homo sapiens
agaagcctagccatg

SEQ ID NO: 68746 - DNA, 15 bp, Homo sapiens
cagaagcctagccat

SEQ ID NO: 68747 - DNA, 15 bp, Homo sapiens
acagaagcctagcca

SEQ ID NO: 68748 - DNA, 15 bp, Homo sapiens
cacagaagcctagcc

SEQ ID NO: 68749 - DNA, 15 bp, Homo sapiens
tcacagaagcctagc

SEQ ID NO: 68750 - DNA, 15 bp, Homo sapiens
ttcacagaagcctag

SEQ ID NO: 68751 - DNA, 15 bp, Homo sapiens
cttcacagaagccta

SEQ ID NO: 68752 - DNA, 15 bp, Homo sapiens
gcttcacagaagcct

SEQ ID NO: 68753 - DNA, 15 bp, Homo sapiens
ggcttcacagaagcc

SEQ ID NO: 68754 - DNA, 15 bp, Homo sapiens
tggcttcacagaagc

SEQ ID NO: 68755 - DNA, 15 bp, Homo sapiens
atggcttcacagaag

SEQ ID NO: 68756 - DNA, 15 bp, Homo sapiens
catggcttcacagaa

SEQ ID NO: 68757 - DNA, 15 bp, Homo sapiens
ccatggcttcacaga

SEQ ID NO: 68758 - DNA, 15 bp, Homo sapiens
cccatggcttcacag

SEQ ID NO: 68759 - DNA, 15 bp, Homo sapiens
tcccatggcttcaca

SEQ ID NO: 68760 - DNA, 15 bp, Homo sapiens
atcccatggcttcac

SEQ ID NO: 68761 - DNA, 15 bp, Homo sapiens
tatcccatggcttca

SEQ ID NO: 68762 - DNA, 15 bp, Homo sapiens
gtatcccatggcttc

SEQ ID NO: 68763 - DNA, 15 bp, Homo sapiens
agtatcccatggctt

SEQ ID NO: 68764 - DNA, 15 bp, Homo sapiens
gagtatcccatggct

SEQ ID NO: 68765 - DNA, 15 bp, Homo sapiens
agagtatcccatggc

SEQ ID NO: 68766 - DNA, 15 bp, Homo sapiens
aagagtatcccatgg

SEQ ID NO: 68767 - DNA, 15 bp, Homo sapiens
gaagagtatcccatg

SEQ ID NO: 68768 - DNA, 15 bp, Homo sapiens
agaagagtatcccat

SEQ ID NO: 68769 - DNA, 15 bp, Homo sapiens
cagaagagtatccca

SEQ ID NO: 68770 - DNA, 15 bp, Homo sapiens
acagaagagtatccc

SEQ ID NO: 68771 - DNA, 15 bp, Homo sapiens
aacagaagagtatcc

SEQ ID NO: 68772 - DNA, 15 bp, Homo sapiens
taacagaagagtatc

SEQ ID NO: 68773 - DNA, 15 bp, Homo sapiens
ataacagaagagtat

SEQ ID NO: 68774 - DNA, 15 bp, Homo sapiens
gataacagaagagta

SEQ ID NO: 68775 - DNA, 15 bp, Homo sapiens
tgataacagaagagt

SEQ ID NO: 68776 - DNA, 15 bp, Homo sapiens
gtgataacagaagag

SEQ ID NO: 68777 - DNA, 15 bp, Homo sapiens
tgtgataacagaaga

SEQ ID NO: 68778 - DNA, 15 bp, Homo sapiens
ctgtgataacagaag

SEQ ID NO: 68779 - DNA, 15 bp, Homo sapiens
tctgtgataacagaa

SEQ ID NO: 68780 - DNA, 15 bp, Homo sapiens
ttctgtgataacaga

SEQ ID NO: 68781 - DNA, 15 bp, Homo sapiens
cttctgtgataacag

SEQ ID NO: 68782 - DNA, 15 bp, Homo sapiens
tcttctgtgataaca

SEQ ID NO: 68783 - DNA, 15 bp, Homo sapiens
ctcttctgtgataac

SEQ ID NO: 68784 - DNA, 15 bp, Homo sapiens
tctcttctgtgataa

SEQ ID NO: 68785 - DNA, 15 bp, Homo sapiens
atctcttctgtgata

SEQ ID NO: 68786 - DNA, 15 bp, Homo sapiens
tatctcttctgtgat

SEQ ID NO: 68787 - DNA, 15 bp, Homo sapiens
ttatctcttctgtga

SEQ ID NO: 68788 - DNA, 15 bp, Homo sapiens
tttatctcttctgtg

SEQ ID NO: 68789 - DNA, 15 bp, Homo sapiens
ctttatctcttctgt

SEQ ID NO: 68790 - DNA, 15 bp, Homo sapiens
cctttatctcttctg

SEQ ID NO: 68791 - DNA, 15 bp, Homo sapiens
ccctttatctcttct

SEQ ID NO: 68792 - DNA, 15 bp, Homo sapiens
gccctttatctcttc

SEQ ID NO: 68793 - DNA, 15 bp, Homo sapiens
tgccctttatctctt

SEQ ID NO: 68794 - DNA, 15 bp, Homo sapiens
atgccctttatctct

SEQ ID NO: 68795 - DNA, 15 bp, Homo sapiens
aatgccctttatctc

SEQ ID NO: 68796 - DNA, 15 bp, Homo sapiens
caatgccctttatct

SEQ ID NO: 68797 - DNA, 15 bp, Homo sapiens
tcaatgccctttatc

SEQ ID NO: 68798 - DNA, 15 bp, Homo sapiens
ctcaatgccctttat

SEQ ID NO: 68799 - DNA, 15 bp, Homo sapiens
tctcaatgcccttta

SEQ ID NO: 68800 - DNA, 15 bp, Homo sapiens
gtctcaatgcccttt

SEQ ID NO: 68801 - DNA, 15 bp, Homo sapiens
agtctcaatgccctt

SEQ ID NO: 68802 - DNA, 15 bp, Homo sapiens
cagtctcaatgccct

SEQ ID NO: 68803 - DNA, 15 bp, Homo sapiens
tcagtctcaatgccc

SEQ ID NO: 68804 - DNA, 15 bp, Homo sapiens
ctcagtctcaatgcc

SEQ ID NO: 68805 - DNA, 15 bp, Homo sapiens
tctcagtctcaatgc

SEQ ID NO: 68806 - DNA, 15 bp, Homo sapiens
atctcagtctcaatg

SEQ ID NO: 68807 - DNA, 15 bp, Homo sapiens
aatctcagtctcaat

SEQ ID NO: 68808 - DNA, 15 bp, Homo sapiens
gaatctcagtctcaa

SEQ ID NO: 68809 - DNA, 15 bp, Homo sapiens
ggaatctcagtctca

SEQ ID NO: 68810 - DNA, 15 bp, Homo sapiens
aggaatctcagtctc

SEQ ID NO: 68811 - DNA, 15 bp, Homo sapiens
caggaatctcagtct

SEQ ID NO: 68812 - DNA, 15 bp, Homo sapiens
tcaggaatctcagtc

SEQ ID NO: 68813 - DNA, 15 bp, Homo sapiens
ctcaggaatctcagt

SEQ ID NO: 68814 - DNA, 15 bp, Homo sapiens
tctcaggaatctcag

SEQ ID NO: 68815 - DNA, 15 bp, Homo sapiens
ctctcaggaatctca

SEQ ID NO: 68816 - DNA, 15 bp, Homo sapiens
cctctcaggaatctc

SEQ ID NO: 68817 - DNA, 15 bp, Homo sapiens
tcctctcaggaatct

SEQ ID NO: 68818 - DNA, 15 bp, Homo sapiens
ctcctctcaggaatc

SEQ ID NO: 68819 - DNA, 15 bp, Homo sapiens
tctcctctcaggaat

SEQ ID NO: 68820 - DNA, 15 bp, Homo sapiens
atctcctctcaggaa

SEQ ID NO: 68821 - DNA, 15 bp, Homo sapiens
catctcctctcagga

SEQ ID NO: 68822 - DNA, 15 bp, Homo sapiens
gcatctcctctcagg

SEQ ID NO: 68823 - DNA, 15 bp, Homo sapiens
agcatctcctctcag

SEQ ID NO: 68824 - DNA, 15 bp, Homo sapiens
cagcatctcctctca

SEQ ID NO: 68825 - DNA, 15 bp, Homo sapiens
acagcatctcctctc

SEQ ID NO: 68826 - DNA, 15 bp, Homo sapiens
cacagcatctcctct

SEQ ID NO: 68827 - DNA, 15 bp, Homo sapiens
acacagcatctcctc

SEQ ID NO: 68828 - DNA, 15 bp, Homo sapiens
gacacagcatctcct

SEQ ID NO: 68829 - DNA, 15 bp, Homo sapiens
agacacagcatctcc

SEQ ID NO: 68830 - DNA, 15 bp, Homo sapiens
aagacacagcatctc

SEQ ID NO: 68831 - DNA, 15 bp, Homo sapiens
aaagacacagcatct

SEQ ID NO: 68832 - DNA, 15 bp, Homo sapiens
taaagacacagcatc

SEQ ID NO: 68833 - DNA, 15 bp, Homo sapiens
ataaagacacagcat

SEQ ID NO: 68834 - DNA, 15 bp, Homo sapiens
aataaagacacagca

SEQ ID NO: 68835 - DNA, 15 bp, Homo sapiens
gaataaagacacagc

SEQ ID NO: 68836 - DNA, 15 bp, Homo sapiens
tgaataaagacacag

SEQ ID NO: 68837 - DNA, 15 bp, Homo sapiens
atgaataaagacaca

SEQ ID NO: 68838 - DNA, 15 bp, Homo sapiens
gatgaataaagacac

SEQ ID NO: 68839 - DNA, 15 bp, Homo sapiens
agatgaataaagaca

SEQ ID NO: 68840 - DNA, 15 bp, Homo sapiens
aagatgaataaagac

SEQ ID NO: 68841 - DNA, 15 bp, Homo sapiens
aaagatgaataaaga

SEQ ID NO: 68842 - DNA, 15 bp, Homo sapiens
aaaagatgaataaag

SEQ ID NO: 68843 - DNA, 15 bp, Homo sapiens
caaaaagatgaataa

SEQ ID NO: 68844 - DNA, 15 bp, Homo sapiens
acaaaaagatgaata

SEQ ID NO: 68845 - DNA, 15 bp, Homo sapiens
gacaaaaagatgaat

SEQ ID NO: 68846 - DNA, 15 bp, Homo sapiens
ggacaaaaagatgaa

SEQ ID NO: 68847 - DNA, 15 bp, Homo sapiens
gggacaaaaagatga

SEQ ID NO: 68848 - DNA, 15 bp, Homo sapiens
ggggacaaaaagatg

SEQ ID NO: 68849 - DNA, 15 bp, Homo sapiens
tggggacaaaaagat

SEQ ID NO: 68850 - DNA, 15 bp, Homo sapiens
ttggggacaaaaaga

SEQ ID NO: 68851 - DNA, 15 bp, Homo sapiens
gttggggacaaaaag

SEQ ID NO: 68852 - DNA, 15 bp, Homo sapiens
tgttggggacaaaaa

SEQ ID NO: 68853 - DNA, 15 bp, Homo sapiens
atgttggggacaaaa

SEQ ID NO: 68854 - DNA, 15 bp, Homo sapiens
catgttggggacaaa

SEQ ID NO: 68855 - DNA, 15 bp, Homo sapiens
ccatgttggggacaa

SEQ ID NO: 68856 - DNA, 15 bp, Homo sapiens
accatgttggggaca

SEQ ID NO: 68857 - DNA, 15 bp, Homo sapiens
caccatgttggggac

SEQ ID NO: 68858 - DNA, 15 bp, Homo sapiens
gcaccatgttgggga

SEQ ID NO: 68859 - DNA, 15 bp, Homo sapiens
tgcaccatgttgggg

SEQ ID NO: 68860 - DNA, 15 bp, Homo sapiens
gtgcaccatgttggg

SEQ ID NO: 68861 - DNA, 15 bp, Homo sapiens
agtgcaccatgttgg

SEQ ID NO: 68862 - DNA, 15 bp, Homo sapiens
tagtgcaccatgttg

SEQ ID NO: 68863 - DNA, 15 bp, Homo sapiens
ttagtgcaccatgtt

SEQ ID NO: 68864 - DNA, 15 bp, Homo sapiens
tttagtgcaccatgt

SEQ ID NO: 68865 - DNA, 15 bp, Homo sapiens
atttagtgcaccatg

SEQ ID NO: 68866 - DNA, 15 bp, Homo sapiens
aatttagtgcaccat

SEQ ID NO: 68867 - DNA, 15 bp, Homo sapiens
aaatttagtgcacca

SEQ ID NO: 68868 - DNA, 15 bp, Homo sapiens
taaatttagtgcacc

SEQ ID NO: 68869 - DNA, 15 bp, Homo sapiens
ataaatttagtgcac

SEQ ID NO: 68870 - DNA, 15 bp, Homo sapiens
cataaatttagtgca

SEQ ID NO: 68871 - DNA, 15 bp, Homo sapiens
ccataaatttagtgc

SEQ ID NO: 68872 - DNA, 15 bp, Homo sapiens
accataaatttagtg

SEQ ID NO: 68873 - DNA, 15 bp, Homo sapiens
aaccataaatttagt

SEQ ID NO: 68874 - DNA, 15 bp, Homo sapiens
taaccataaatttag

SEQ ID NO: 68875 - DNA, 15 bp, Homo sapiens
ctaaccataaattta

SEQ ID NO: 68876 - DNA, 15 bp, Homo sapiens
actaaccataaattt

SEQ ID NO: 68877 - DNA, 15 bp, Homo sapiens
aactaaccataaatt

SEQ ID NO: 68878 - DNA, 15 bp, Homo sapiens
caactaaccataaat

SEQ ID NO: 68879 - DNA, 15 bp, Homo sapiens
tcaactaaccataaa

SEQ ID NO: 68880 - DNA, 15 bp, Homo sapiens
ttcaactaaccataa

SEQ ID NO: 68881 - DNA, 15 bp, Homo sapiens
tttcaactaaccata

SEQ ID NO: 68882 - DNA, 15 bp, Homo sapiens
ctttcaactaaccat

SEQ ID NO: 68883 - DNA, 15 bp, Homo sapiens
cctttcaactaacca

SEQ ID NO: 68884 - DNA, 15 bp, Homo sapiens
ccctttcaactaacc

SEQ ID NO: 68885 - DNA, 15 bp, Homo sapiens
accctttcaactaac

SEQ ID NO: 68886 - DNA, 15 bp, Homo sapiens
caccctttcaactaa

SEQ ID NO: 68887 - DNA, 15 bp, Homo sapiens
ccaccctttcaacta

SEQ ID NO: 68888 - DNA, 15 bp, Homo sapiens
tccaccctttcaact

SEQ ID NO: 68889 - DNA, 15 bp, Homo sapiens
atccaccctttcaac

SEQ ID NO: 68890 - DNA, 15 bp, Homo sapiens
catccaccctttcaa

SEQ ID NO: 68891 - DNA, 15 bp, Homo sapiens
gcatccaccctttca

SEQ ID NO: 68892 - DNA, 15 bp, Homo sapiens
agcatccaccctttc

SEQ ID NO: 68893 - DNA, 15 bp, Homo sapiens
aagcatccacccttt

SEQ ID NO: 68894 - DNA, 15 bp, Homo sapiens
taagcatccaccctt

SEQ ID NO: 68895 - DNA, 15 bp, Homo sapiens
ttaagcatccaccct

SEQ ID NO: 68896 - DNA, 15 bp, Homo sapiens
tttaagcatccaccc

SEQ ID NO: 68897 - DNA, 15 bp, Homo sapiens
atttaagcatccacc

SEQ ID NO: 68898 - DNA, 15 bp, Homo sapiens
catttaagcatccac

SEQ ID NO: 68899 - DNA, 15 bp, Homo sapiens
tcatttaagcatcca

SEQ ID NO: 68900 - DNA, 15 bp, Homo sapiens
ttcatttaagcatcc

SEQ ID NO: 68901 - DNA, 15 bp, Homo sapiens
attcatttaagcatc

SEQ ID NO: 68902 - DNA, 15 bp, Homo sapiens
cattcatttaagcat

SEQ ID NO: 68903 - DNA, 15 bp, Homo sapiens
ccattcatttaagca

SEQ ID NO: 68904 - DNA, 15 bp, Homo sapiens
tccattcatttaagc

SEQ ID NO: 68905 - DNA, 15 bp, Homo sapiens
ttccattcatttaag

SEQ ID NO: 68906 - DNA, 15 bp, Homo sapiens
cttccattcatttaa

SEQ ID NO: 68907 - DNA, 15 bp, Homo sapiens
gcttccattcattta

SEQ ID NO: 68908 - DNA, 15 bp, Homo sapiens
cgcttccattcattt

SEQ ID NO: 68909 - DNA, 15 bp, Homo sapiens
ccgcttccattcatt

SEQ ID NO: 68910 - DNA, 15 bp, Homo sapiens
tccgcttccattcat

SEQ ID NO: 68911 - DNA, 15 bp, Homo sapiens
ctccgcttccattca

SEQ ID NO: 68912 - DNA, 15 bp, Homo sapiens
tctccgcttccattc

SEQ ID NO: 68913 - DNA, 15 bp, Homo sapiens
ctctccgcttccatt

SEQ ID NO: 68914 - DNA, 15 bp, Homo sapiens
cctctccgcttccat

SEQ ID NO: 68915 - DNA, 15 bp, Homo sapiens
ccctctccgcttcca

SEQ ID NO: 68916 - DNA, 15 bp, Homo sapiens
cccctctccgcttcc

SEQ ID NO: 68917 - DNA, 15 bp, Homo sapiens
gcccctctccgcttc

SEQ ID NO: 68918 - DNA, 15 bp, Homo sapiens
tgcccctctccgctt

SEQ ID NO: 68919 - DNA, 15 bp, Homo sapiens
ctgcccctctccgct

SEQ ID NO: 68920 - DNA, 15 bp, Homo sapiens
cctgcccctctccgc

SEQ ID NO: 68921 - DNA, 15 bp, Homo sapiens
tcctgcccctctccg

SEQ ID NO: 68922 - DNA, 15 bp, Homo sapiens
ttcctgcccctctcc

SEQ ID NO: 68923 - DNA, 15 bp, Homo sapiens
cttcctgcccctctc

SEQ ID NO: 68924 - DNA, 15 bp, Homo sapiens
tcttcctgcccctct

SEQ ID NO: 68925 - DNA, 15 bp, Homo sapiens
gtcttcctgcccctc

SEQ ID NO: 68926 - DNA, 15 bp, Homo sapiens
cgtcttcctgcccct

SEQ ID NO: 68927 - DNA, 15 bp, Homo sapiens
tcgtcttcctgcccc

SEQ ID NO: 68928 - DNA, 15 bp, Homo sapiens
atcgtcttcctgccc

SEQ ID NO: 68929 - DNA, 15 bp, Homo sapiens
aatcgtcttcctgcc

SEQ ID NO: 68930 - DNA, 15 bp, Homo sapiens
caatcgtcttcctgc

SEQ ID NO: 68931 - DNA, 15 bp, Homo sapiens
ccaatcgtcttcctg

SEQ ID NO: 68932 - DNA, 15 bp, Homo sapiens
cccaatcgtcttcct

SEQ ID NO: 68933 - DNA, 15 bp, Homo sapiens
gcccaatcgtcttcc

SEQ ID NO: 68934 - DNA, 15 bp, Homo sapiens
agcccaatcgtcttc

SEQ ID NO: 68935 - DNA, 15 bp, Homo sapiens
gagcccaatcgtctt

SEQ ID NO: 68936 - DNA, 15 bp, Homo sapiens
agagcccaatcgtct

SEQ ID NO: 68937 - DNA, 15 bp, Homo sapiens
gagagcccaatcgtc

SEQ ID NO: 68938 - DNA, 15 bp, Homo sapiens
agagagcccaatcgt

SEQ ID NO: 68939 - DNA, 15 bp, Homo sapiens
cagagagcccaatcg

SEQ ID NO: 68940 - DNA, 15 bp, Homo sapiens
ccagagagcccaatc

SEQ ID NO: 68941 - DNA, 15 bp, Homo sapiens
accagagagcccaat

SEQ ID NO: 68942 - DNA, 15 bp, Homo sapiens
aaccagagagcccaa

SEQ ID NO: 68943 - DNA, 15 bp, Homo sapiens
taaccagagagccca

SEQ ID NO: 68944 - DNA, 15 bp, Homo sapiens
ctaaccagagagccc

SEQ ID NO: 68945 - DNA, 15 bp, Homo sapiens
tctaaccagagagcc

SEQ ID NO: 68946 - DNA, 15 bp, Homo sapiens
ctctaaccagagagc

SEQ ID NO: 68947 - DNA, 15 bp, Homo sapiens
tctctaaccagagag

SEQ ID NO: 68948 - DNA, 15 bp, Homo sapiens
atctctaaccagaga

SEQ ID NO: 68949 - DNA, 15 bp, Homo sapiens
gatctctaaccagag

SEQ ID NO: 68950 - DNA, 15 bp, Homo sapiens
agatctctaaccaga

SEQ ID NO: 68951 - DNA, 15 bp, Homo sapiens
cagatctctaaccag

SEQ ID NO: 68952 - DNA, 15 bp, Homo sapiens
tcagatctctaacca

SEQ ID NO: 68953 - DNA, 15 bp, Homo sapiens
atcagatctctaacc

SEQ ID NO: 68954 - DNA, 15 bp, Homo sapiens
catcagatctctaac

SEQ ID NO: 68955 - DNA, 15 bp, Homo sapiens
acatcagatctctaa

SEQ ID NO: 68956 - DNA, 15 bp, Homo sapiens
cacatcagatctcta

SEQ ID NO: 68957 - DNA, 15 bp, Homo sapiens
ccacatcagatctct

SEQ ID NO: 68958 - DNA, 15 bp, Homo sapiens
accacatcagatctc

SEQ ID NO: 68959 - DNA, 15 bp, Homo sapiens
taccacatcagatct

SEQ ID NO: 68960 - DNA, 15 bp, Homo sapiens
gtaccacatcagatc

SEQ ID NO: 68961 - DNA, 15 bp, Homo sapiens
tgtaccacatcagat

SEQ ID NO: 68962 - DNA, 15 bp, Homo sapiens
ctgtaccacatcaga

SEQ ID NO: 68963 - DNA, 15 bp, Homo sapiens
actgtaccacatcag

SEQ ID NO: 68964 - DNA, 15 bp, Homo sapiens
tactgtaccacatca

SEQ ID NO: 68965 - DNA, 15 bp, Homo sapiens
atactgtaccacatc

SEQ ID NO: 68966 - DNA, 15 bp, Homo sapiens
catactgtaccacat

SEQ ID NO: 68967 - DNA, 15 bp, Homo sapiens
tcatactgtaccaca

SEQ ID NO: 68968 - DNA, 15 bp, Homo sapiens
ctcatactgtaccac

SEQ ID NO: 68969 - DNA, 15 bp, Homo sapiens
cctcatactgtacca

SEQ ID NO: 68970 - DNA, 15 bp, Homo sapiens
tcctcatactgtacc

SEQ ID NO: 68971 - DNA, 15 bp, Homo sapiens
ctcctcatactgtac

SEQ ID NO: 68972 - DNA, 15 bp, Homo sapiens
gctcctcatactgta

SEQ ID NO: 68973 - DNA, 15 bp, Homo sapiens
tgctcctcatactgt

SEQ ID NO: 68974 - DNA, 15 bp, Homo sapiens
gtgctcctcatactg

SEQ ID NO: 68975 - DNA, 15 bp, Homo sapiens
tgtgctcctcatact

SEQ ID NO: 68976 - DNA, 15 bp, Homo sapiens
ctgtgctcctcatac

SEQ ID NO: 68977 - DNA, 15 bp, Homo sapiens
cctgtgctcctcata

SEQ ID NO: 68978 - DNA, 15 bp, Homo sapiens
gcctgtgctcctcat

SEQ ID NO: 68979 - DNA, 15 bp, Homo sapiens
tgcctgtgctcctca

SEQ ID NO: 68980 - DNA, 15 bp, Homo sapiens
ctgcctgtgctcctc

SEQ ID NO: 68981 - DNA, 15 bp, Homo sapiens
cctgcctgtgctcct

SEQ ID NO: 68982 - DNA, 15 bp, Homo sapiens
gcctgcctgtgctcc

SEQ ID NO: 68983 - DNA, 15 bp, Homo sapiens
agcctgcctgtgctc

SEQ ID NO: 68984 - DNA, 15 bp, Homo sapiens
aagcctgcctgtgct

SEQ ID NO: 68985 - DNA, 15 bp, Homo sapiens
caagcctgcctgtgc

SEQ ID NO: 68986 - DNA, 15 bp, Homo sapiens
ccaagcctgcctgtg

SEQ ID NO: 68987 - DNA, 15 bp, Homo sapiens
tccaagcctgcctgt

SEQ ID NO: 68988 - DNA, 15 bp, Homo sapiens
ctccaagcctgcctg

SEQ ID NO: 68989 - DNA, 15 bp, Homo sapiens
gctccaagcctgcct

SEQ ID NO: 68990 - DNA, 15 bp, Homo sapiens
ggctccaagcctgcc

SEQ ID NO: 68991 - DNA, 15 bp, Homo sapiens
tggctccaagcctgc

SEQ ID NO: 68992 - DNA, 15 bp, Homo sapiens
ttggctccaagcctg

SEQ ID NO: 68993 - DNA, 15 bp, Homo sapiens
gttggctccaagcct

SEQ ID NO: 68994 - DNA, 15 bp, Homo sapiens
agttggctccaagcc

SEQ ID NO: 68995 - DNA, 15 bp, Homo sapiens
gagttggctccaagc

SEQ ID NO: 68996 - DNA, 15 bp, Homo sapiens
agagttggctccaag

SEQ ID NO: 68997 - DNA, 15 bp, Homo sapiens
cagagttggctccaa

SEQ ID NO: 68998 - DNA, 15 bp, Homo sapiens
ccagagttggctcca

SEQ ID NO: 68999 - DNA, 15 bp, Homo sapiens
gccagagttggctcc

SEQ ID NO: 69000 - DNA, 15 bp, Homo sapiens
agccagagttggctc

SEQ ID NO: 69001 - DNA, 15 bp, Homo sapiens
cagccagagttggct

SEQ ID NO: 69002 - DNA, 15 bp, Homo sapiens
ccagccagagttggc

SEQ ID NO: 69003 - DNA, 15 bp, Homo sapiens
gccagccagagttgg

SEQ ID NO: 69004 - DNA, 15 bp, Homo sapiens
ggccagccagagttg

SEQ ID NO: 69005 - DNA, 15 bp, Homo sapiens
gggccagccagagtt

SEQ ID NO: 69006 - DNA, 15 bp, Homo sapiens
agggccagccagagt

SEQ ID NO: 69007 - DNA, 15 bp, Homo sapiens
cagggccagccagag

SEQ ID NO: 69008 - DNA, 15 bp, Homo sapiens
tcagggccagccaga

SEQ ID NO: 69009 - DNA, 15 bp, Homo sapiens
ctcagggccagccag

SEQ ID NO: 69010 - DNA, 15 bp, Homo sapiens
tctcagggccagcca

SEQ ID NO: 69011 - DNA, 15 bp, Homo sapiens
gtctcagggccagcc

SEQ ID NO: 69012 - DNA, 15 bp, Homo sapiens
tgtctcagggccagc

SEQ ID NO: 69013 - DNA, 15 bp, Homo sapiens
atgtctcagggccag

SEQ ID NO: 69014 - DNA, 15 bp, Homo sapiens
aatgtctcagggcca

SEQ ID NO: 69015 - DNA, 15 bp, Homo sapiens
caatgtctcagggcc

SEQ ID NO: 69016 - DNA, 15 bp, Homo sapiens
ccaatgtctcagggc

SEQ ID NO: 69017 - DNA, 15 bp, Homo sapiens
cccaatgtctcaggg

SEQ ID NO: 69018 - DNA, 15 bp, Homo sapiens
tcccaatgtctcagg

SEQ ID NO: 69019 - DNA, 15 bp, Homo sapiens
ttcccaatgtctcag

SEQ ID NO: 69020 - DNA, 15 bp, Homo sapiens
tttcccaatgtctca

SEQ ID NO: 69021 - DNA, 15 bp, Homo sapiens
ctttcccaatgtctc

SEQ ID NO: 69022 - DNA, 15 bp, Homo sapiens
actttcccaatgtct

SEQ ID NO: 69023 - DNA, 15 bp, Homo sapiens
gactttcccaatgtc

SEQ ID NO: 69024 - DNA, 15 bp, Homo sapiens
tgactttcccaatgt

SEQ ID NO: 69025 - DNA, 15 bp, Homo sapiens
gtgactttcccaatg

SEQ ID NO: 69026 - DNA, 15 bp, Homo sapiens
tgtgactttcccaat

SEQ ID NO: 69027 - DNA, 15 bp, Homo sapiens
ttgtgactttcccaa

SEQ ID NO: 69028 - DNA, 15 bp, Homo sapiens
gttgtgactttccca

SEQ ID NO: 69029 - DNA, 15 bp, Homo sapiens
agttgtgactttccc

SEQ ID NO: 69030 - DNA, 15 bp, Homo sapiens
aagttgtgactttcc

SEQ ID NO: 69031 - DNA, 15 bp, Homo sapiens
caagttgtgactttc

SEQ ID NO: 69032 - DNA, 15 bp, Homo sapiens
gcaagttgtgacttt

SEQ ID NO: 69033 - DNA, 15 bp, Homo sapiens
ggcaagttgtgactt

SEQ ID NO: 69034 - DNA, 15 bp, Homo sapiens
aggcaagttgtgact

SEQ ID NO: 69035 - DNA, 15 bp, Homo sapiens
gaggcaagttgtgac

SEQ ID NO: 69036 - DNA, 15 bp, Homo sapiens
tgaggcaagttgtga

SEQ ID NO: 69037 - DNA, 15 bp, Homo sapiens
gtgaggcaagttgtg

SEQ ID NO: 69038 - DNA, 15 bp, Homo sapiens
ggtgaggcaagttgt

SEQ ID NO: 69039 - DNA, 15 bp, Homo sapiens
aggtgaggcaagttg

SEQ ID NO: 69040 - DNA, 15 bp, Homo sapiens
aaggtgaggcaagtt

SEQ ID NO: 69041 - DNA, 15 bp, Homo sapiens
gaaggtgaggcaagt

SEQ ID NO: 69042 - DNA, 15 bp, Homo sapiens
agaaggtgaggcaag

SEQ ID NO: 69043 - DNA, 15 bp, Homo sapiens
aagaaggtgaggcaa

SEQ ID NO: 69044 - DNA, 15 bp, Homo sapiens
aaagaaggtgaggca

SEQ ID NO: 69045 - DNA, 15 bp, Homo sapiens
caaagaaggtgaggc

SEQ ID NO: 69046 - DNA, 15 bp, Homo sapiens
gcaaagaaggtgagg

SEQ ID NO: 69047 - DNA, 15 bp, Homo sapiens
ggcaaagaaggtgag

SEQ ID NO: 69048 - DNA, 15 bp, Homo sapiens
cggcaaagaaggtga

SEQ ID NO: 69049 - DNA, 15 bp, Homo sapiens
tcggcaaagaaggtg

SEQ ID NO: 69050 - DNA, 15 bp, Homo sapiens
atcggcaaagaaggt

SEQ ID NO: 69051 - DNA, 15 bp, Homo sapiens
tatcggcaaagaagg

SEQ ID NO: 69052 - DNA, 15 bp, Homo sapiens
ttatcggcaaagaag

SEQ ID NO: 69053 - DNA, 15 bp, Homo sapiens
attatcggcaaagaa

SEQ ID NO: 69054 - DNA, 15 bp, Homo sapiens
tattatcggcaaaga

SEQ ID NO: 69055 - DNA, 15 bp, Homo sapiens
ttattatcggcaaag

SEQ ID NO: 69056 - DNA, 15 bp, Homo sapiens
attattatcggcaaa

SEQ ID NO: 69057 - DNA, 15 bp, Homo sapiens
tattattatcggcaa

SEQ ID NO: 69058 - DNA, 15 bp, Homo sapiens
ctattattatcggca

SEQ ID NO: 69059 - DNA, 15 bp, Homo sapiens
actattattatcggc

SEQ ID NO: 69060 - DNA, 15 bp, Homo sapiens
cactattattatcgg

SEQ ID NO: 69061 - DNA, 15 bp, Homo sapiens
ccactattattatcg

SEQ ID NO: 69062 - DNA, 15 bp, Homo sapiens
accactattattatc

SEQ ID NO: 69063 - DNA, 15 bp, Homo sapiens
caccactattattat

SEQ ID NO: 69064 - DNA, 15 bp, Homo sapiens
gcaccactattatta

SEQ ID NO: 69065 - DNA, 15 bp, Homo sapiens
agcaccactattatt

SEQ ID NO: 69066 - DNA, 15 bp, Homo sapiens
aagcaccactattat

SEQ ID NO: 69067 - DNA, 15 bp, Homo sapiens
taagcaccactatta

SEQ ID NO: 69068 - DNA, 15 bp, Homo sapiens
gtaagcaccactatt

SEQ ID NO: 69069 - DNA, 15 bp, Homo sapiens
ggtaagcaccactat

SEQ ID NO: 69070 - DNA, 15 bp, Homo sapiens
aggtaagcaccacta

SEQ ID NO: 69071 - DNA, 15 bp, Homo sapiens
gaggtaagcaccact

SEQ ID NO: 69072 - DNA, 15 bp, Homo sapiens
tgaggtaagcaccac

SEQ ID NO: 69073 - DNA, 15 bp, Homo sapiens
atgaggtaagcacca

SEQ ID NO: 69074 - DNA, 15 bp, Homo sapiens
tatgaggtaagcacc

SEQ ID NO: 69075 - DNA, 15 bp, Homo sapiens
ctatgaggtaagcac

SEQ ID NO: 69076 - DNA, 15 bp, Homo sapiens
tctatgaggtaagca

SEQ ID NO: 69077 - DNA, 15 bp, Homo sapiens
ctctatgaggtaagc

SEQ ID NO: 69078 - DNA, 15 bp, Homo sapiens
cctctatgaggtaag

SEQ ID NO: 69079 - DNA, 15 bp, Homo sapiens
tcctctatgaggtaa

SEQ ID NO: 69080 - DNA, 15 bp, Homo sapiens
atcctctatgaggta

SEQ ID NO: 69081 - DNA, 15 bp, Homo sapiens
aatcctctatgaggt

SEQ ID NO: 69082 - DNA, 15 bp, Homo sapiens
taatcctctatgagg

SEQ ID NO: 69083 - DNA, 15 bp, Homo sapiens
ttaatcctctatgag

SEQ ID NO: 69084 - DNA, 15 bp, Homo sapiens
tttaatcctctatga

SEQ ID NO: 69085 - DNA, 15 bp, Homo sapiens
atttaatcctctatg

SEQ ID NO: 69086 - DNA, 15 bp, Homo sapiens
aatttaatcctctat

SEQ ID NO: 69087 - DNA, 15 bp, Homo sapiens
taatttaatcctcta

SEQ ID NO: 69088 - DNA, 15 bp, Homo sapiens
ttaatttaatcctct

SEQ ID NO: 69089 - DNA, 15 bp, Homo sapiens
tttaatttaatcctc

SEQ ID NO: 69090 - DNA, 15 bp, Homo sapiens
atttaatttaatcct

SEQ ID NO: 69091 - DNA, 15 bp, Homo sapiens
catttaatttaatcc

SEQ ID NO: 69092 - DNA, 15 bp, Homo sapiens
tcatttaatttaatc

SEQ ID NO: 69093 - DNA, 15 bp, Homo sapiens
ctcatttaatttaat

SEQ ID NO: 69094 - DNA, 15 bp, Homo sapiens
tctcatttaatttaa

SEQ ID NO: 69095 - DNA, 15 bp, Homo sapiens
ttctcatttaattta

SEQ ID NO: 69096 - DNA, 15 bp, Homo sapiens
attctcatttaattt

SEQ ID NO: 69097 - DNA, 15 bp, Homo sapiens
cattctcatttaatt

SEQ ID NO: 69098 - DNA, 15 bp, Homo sapiens
gcattctcatttaat

SEQ ID NO: 69099 - DNA, 15 bp, Homo sapiens
tgcattctcatttaa

SEQ ID NO: 69100 - DNA, 15 bp, Homo sapiens
gtgcattctcattta

SEQ ID NO: 69101 - DNA, 15 bp, Homo sapiens
tgtgcattctcattt

SEQ ID NO: 69102 - DNA, 15 bp, Homo sapiens
gtgtgcattctcatt

SEQ ID NO: 69103 - DNA, 15 bp, Homo sapiens
tgtgtgcattctcat

SEQ ID NO: 69104 - DNA, 15 bp, Homo sapiens
ttgtgtgcattctca

SEQ ID NO: 69105 - DNA, 15 bp, Homo sapiens
tttgtgtgcattctc

SEQ ID NO: 69106 - DNA, 15 bp, Homo sapiens
gtttgtgtgcattct

SEQ ID NO: 69107 - DNA, 15 bp, Homo sapiens
ggtttgtgtgcattc

SEQ ID NO: 69108 - DNA, 15 bp, Homo sapiens
tggtttgtgtgcatt

SEQ ID NO: 69109 - DNA, 15 bp, Homo sapiens
gtggtttgtgtgcat

SEQ ID NO: 69110 - DNA, 15 bp, Homo sapiens
ggtggtttgtgtgca

SEQ ID NO: 69111 - DNA, 15 bp, Homo sapiens
aggtggtttgtgtgc

SEQ ID NO: 69112 - DNA, 15 bp, Homo sapiens
taggtggtttgtgtg

SEQ ID NO: 69113 - DNA, 15 bp, Homo sapiens
ctaggtggtttgtgt

SEQ ID NO: 69114 - DNA, 15 bp, Homo sapiens
gctaggtggtttgtg

SEQ ID NO: 69115 - DNA, 15 bp, Homo sapiens
tgctaggtggtttgt

SEQ ID NO: 69116 - DNA, 15 bp, Homo sapiens
gtgctaggtggtttg

SEQ ID NO: 69117 - DNA, 15 bp, Homo sapiens
tgtgctaggtggttt

SEQ ID NO: 69118 - DNA, 15 bp, Homo sapiens
ttgtgctaggtggtt

SEQ ID NO: 69119 - DNA, 15 bp, Homo sapiens
attgtgctaggtggt

SEQ ID NO: 69120 - DNA, 15 bp, Homo sapiens
cattgtgctaggtgg

SEQ ID NO: 69121 - DNA, 15 bp, Homo sapiens
gcattgtgctaggtg

SEQ ID NO: 69122 - DNA, 15 bp, Homo sapiens
ggcattgtgctaggt

SEQ ID NO: 69123 - DNA, 15 bp, Homo sapiens
aggcattgtgctagg

SEQ ID NO: 69124 - DNA, 15 bp, Homo sapiens
caggcattgtgctag

SEQ ID NO: 69125 - DNA, 15 bp, Homo sapiens
ccaggcattgtgcta

SEQ ID NO: 69126 - DNA, 15 bp, Homo sapiens
gccaggcattgtgct

SEQ ID NO: 69127 - DNA, 15 bp, Homo sapiens
tgccaggcattgtgc

SEQ ID NO: 69128 - DNA, 15 bp, Homo sapiens
atgccaggcattgtg

SEQ ID NO: 69129 - DNA, 15 bp, Homo sapiens
tatgccaggcattgt

SEQ ID NO: 69130 - DNA, 15 bp, Homo sapiens
atatgccaggcattg

SEQ ID NO: 69131 - DNA, 15 bp, Homo sapiens
tatatgccaggcatt

SEQ ID NO: 69132 - DNA, 15 bp, Homo sapiens
ctatatgccaggcat

SEQ ID NO: 69133 - DNA, 15 bp, Homo sapiens
gctatatgccaggca

SEQ ID NO: 69134 - DNA, 15 bp, Homo sapiens
tgctatatgccaggc

SEQ ID NO: 69135 - DNA, 15 bp, Homo sapiens
ttgctatatgccagg

SEQ ID NO: 69136 - DNA, 15 bp, Homo sapiens
cttgctatatgccag

SEQ ID NO: 69137 - DNA, 15 bp, Homo sapiens
acttgctatatgcca

SEQ ID NO: 69138 - DNA, 15 bp, Homo sapiens
aacttgctatatgcc

SEQ ID NO: 69139 - DNA, 15 bp, Homo sapiens
gaacttgctatatgc

SEQ ID NO: 69140 - DNA, 15 bp, Homo sapiens
ggaacttgctatatg

SEQ ID NO: 69141 - DNA, 15 bp, Homo sapiens
gggaacttgctatat

SEQ ID NO: 69142 - DNA, 15 bp, Homo sapiens
tgggaacttgctata

SEQ ID NO: 69143 - DNA, 15 bp, Homo sapiens
ttgggaacttgctat

SEQ ID NO: 69144 - DNA, 15 bp, Homo sapiens
tttgggaacttgcta

SEQ ID NO: 69145 - DNA, 15 bp, Homo sapiens
atttgggaacttgct

SEQ ID NO: 69146 - DNA, 15 bp, Homo sapiens
tatttgggaacttgc

SEQ ID NO: 69147 - DNA, 15 bp, Homo sapiens
ttatttgggaacttg

SEQ ID NO: 69148 - DNA, 15 bp, Homo sapiens
tttatttgggaactt

SEQ ID NO: 69149 - DNA, 15 bp, Homo sapiens
ttttatttgggaact

SEQ ID NO: 69150 - DNA, 15 bp, Homo sapiens
attttatttgggaac

SEQ ID NO: 69151 - DNA, 15 bp, Homo sapiens
cattttatttgggaa

SEQ ID NO: 69152 - DNA, 15 bp, Homo sapiens
gcattttatttggga

SEQ ID NO: 69153 - DNA, 15 bp, Homo sapiens
agcattttatttggg

SEQ ID NO: 69154 - DNA, 15 bp, Homo sapiens
tagcattttatttgg

SEQ ID NO: 69155 - DNA, 15 bp, Homo sapiens
gtagcattttatttg

SEQ ID NO: 69156 - DNA, 15 bp, Homo sapiens
agtagcattttattt

SEQ ID NO: 69157 - DNA, 15 bp, Homo sapiens
cagtagcattttatt

SEQ ID NO: 69158 - DNA, 15 bp, Homo sapiens
acagtagcattttat

SEQ ID NO: 69159 - DNA, 15 bp, Homo sapiens
aacagtagcatttta

SEQ ID NO: 69160 - DNA, 15 bp, Homo sapiens
gaacagtagcatttt

SEQ ID NO: 69161 - DNA, 15 bp, Homo sapiens
agaacagtagcattt

SEQ ID NO: 69162 - DNA, 15 bp, Homo sapiens
aagaacagtagcatt

SEQ ID NO: 69163 - DNA, 15 bp, Homo sapiens
taagaacagtagcat

SEQ ID NO: 69164 - DNA, 15 bp, Homo sapiens
gtaagaacagtagca

SEQ ID NO: 69165 - DNA, 15 bp, Homo sapiens
ggtaagaacagtagc

SEQ ID NO: 69166 - DNA, 15 bp, Homo sapiens
aggtaagaacagtag

SEQ ID NO: 69167 - DNA, 15 bp, Homo sapiens
gaggtaagaacagta

SEQ ID NO: 69168 - DNA, 15 bp, Homo sapiens
agaggtaagaacagt

SEQ ID NO: 69169 - DNA, 15 bp, Homo sapiens
cagaggtaagaacag

SEQ ID NO: 69170 - DNA, 15 bp, Homo sapiens
acagaggtaagaaca

SEQ ID NO: 69171 - DNA, 15 bp, Homo sapiens
cacagaggtaagaac

SEQ ID NO: 69172 - DNA, 15 bp, Homo sapiens
tcacagaggtaagaa

SEQ ID NO: 69173 - DNA, 15 bp, Homo sapiens
ctcacagaggtaaga

SEQ ID NO: 69174 - DNA, 15 bp, Homo sapiens
cctcacagaggtaag

SEQ ID NO: 69175 - DNA, 15 bp, Homo sapiens
tcctcacagaggtaa

SEQ ID NO: 69176 - DNA, 15 bp, Homo sapiens
atcctcacagaggta

SEQ ID NO: 69177 - DNA, 15 bp, Homo sapiens
catcctcacagaggt

SEQ ID NO: 69178 - DNA, 15 bp, Homo sapiens
acatcctcacagagg

SEQ ID NO: 69179 - DNA, 15 bp, Homo sapiens
cacatcctcacagag

SEQ ID NO: 69180 - DNA, 15 bp, Homo sapiens
ccacatcctcacaga

SEQ ID NO: 69181 - DNA, 15 bp, Homo sapiens
accacatcctcacag

SEQ ID NO: 69182 - DNA, 15 bp, Homo sapiens
taccacatcctcaca

SEQ ID NO: 69183 - DNA, 15 bp, Homo sapiens
gtaccacatcctcac

SEQ ID NO: 69184 - DNA, 15 bp, Homo sapiens
ggtaccacatcctca

SEQ ID NO: 69185 - DNA, 15 bp, Homo sapiens
aggtaccacatcctc

SEQ ID NO: 69186 - DNA, 15 bp, Homo sapiens
taggtaccacatcct

SEQ ID NO: 69187 - DNA, 15 bp, Homo sapiens
ataggtaccacatcc

SEQ ID NO: 69188 - DNA, 15 bp, Homo sapiens
tataggtaccacatc

SEQ ID NO: 69189 - DNA, 15 bp, Homo sapiens
atataggtaccacat

SEQ ID NO: 69190 - DNA, 15 bp, Homo sapiens
tatataggtaccaca

SEQ ID NO: 69191 - DNA, 15 bp, Homo sapiens
atatataggtaccac

SEQ ID NO: 69192 - DNA, 15 bp, Homo sapiens
tatatataggtacca

SEQ ID NO: 69193 - DNA, 15 bp, Homo sapiens
gtatatataggtacc

SEQ ID NO: 69194 - DNA, 15 bp, Homo sapiens
tgtatatataggtac

SEQ ID NO: 69195 - DNA, 15 bp, Homo sapiens
ttgtatatataggta

SEQ ID NO: 69196 - DNA, 15 bp, Homo sapiens
tttgtatatataggt

SEQ ID NO: 69197 - DNA, 15 bp, Homo sapiens
ctttgtatatatagg

SEQ ID NO: 69198 - DNA, 15 bp, Homo sapiens
gctttgtatatatag

SEQ ID NO: 69199 - DNA, 15 bp, Homo sapiens
agctttgtatatata

SEQ ID NO: 69200 - DNA, 15 bp, Homo sapiens
aagctttgtatatat

SEQ ID NO: 69201 - DNA, 15 bp, Homo sapiens
aaagctttgtatata

SEQ ID NO: 69202 - DNA, 15 bp, Homo sapiens
caaagctttgtatat

SEQ ID NO: 69203 - DNA, 15 bp, Homo sapiens
gcaaagctttgtata

SEQ ID NO: 69204 - DNA, 15 bp, Homo sapiens
ggcaaagctttgtat

SEQ ID NO: 69205 - DNA, 15 bp, Homo sapiens
tggcaaagctttgta

SEQ ID NO: 69206 - DNA, 15 bp, Homo sapiens
atggcaaagctttgt

SEQ ID NO: 69207 - DNA, 15 bp, Homo sapiens
aatggcaaagctttg

SEQ ID NO: 69208 - DNA, 15 bp, Homo sapiens
gaatggcaaagcttt

SEQ ID NO: 69209 - DNA, 15 bp, Homo sapiens
agaatggcaaagctt

SEQ ID NO: 69210 - DNA, 15 bp, Homo sapiens
tagaatggcaaagct

SEQ ID NO: 69211 - DNA, 15 bp, Homo sapiens
ctagaatggcaaagc

SEQ ID NO: 69212 - DNA, 15 bp, Homo sapiens
cctagaatggcaaag

SEQ ID NO: 69213 - DNA, 15 bp, Homo sapiens
ccctagaatggcaaa

SEQ ID NO: 69214 - DNA, 15 bp, Homo sapiens
cccctagaatggcaa

SEQ ID NO: 69215 - DNA, 15 bp, Homo sapiens
acccctagaatggca

SEQ ID NO: 69216 - DNA, 15 bp, Homo sapiens
gacccctagaatggc

SEQ ID NO: 69217 - DNA, 15 bp, Homo sapiens
tgacccctagaatgg

SEQ ID NO: 69218 - DNA, 15 bp, Homo sapiens
atgacccctagaatg

SEQ ID NO: 69219 - DNA, 15 bp, Homo sapiens
tatgacccctagaat

SEQ ID NO: 69220 - DNA, 15 bp, Homo sapiens
ctatgacccctagaa

SEQ ID NO: 69221 - DNA, 15 bp, Homo sapiens
gctatgacccctaga

SEQ ID NO: 69222 - DNA, 15 bp, Homo sapiens
ggctatgacccctag

SEQ ID NO: 69223 - DNA, 15 bp, Homo sapiens
tggctatgaccccta

SEQ ID NO: 69224 - DNA, 15 bp, Homo sapiens
atggctatgacccct

SEQ ID NO: 69225 - DNA, 15 bp, Homo sapiens
tatggctatgacccc

SEQ ID NO: 69226 - DNA, 15 bp, Homo sapiens
gtatggctatgaccc

SEQ ID NO: 69227 - DNA, 15 bp, Homo sapiens
tgtatggctatgacc

SEQ ID NO: 69228 - DNA, 15 bp, Homo sapiens
ctgtatggctatgac

SEQ ID NO: 69229 - DNA, 15 bp, Homo sapiens
cctgtatggctatga

SEQ ID NO: 69230 - DNA, 15 bp, Homo sapiens
ccctgtatggctatg

SEQ ID NO: 69231 - DNA, 15 bp, Homo sapiens
accctgtatggctat

SEQ ID NO: 69232 - DNA, 15 bp, Homo sapiens
caccctgtatggcta

SEQ ID NO: 69233 - DNA, 15 bp, Homo sapiens
tcaccctgtatggct

SEQ ID NO: 69234 - DNA, 15 bp, Homo sapiens
ttcaccctgtatggc

SEQ ID NO: 69235 - DNA, 15 bp, Homo sapiens
tttcaccctgtatgg

SEQ ID NO: 69236 - DNA, 15 bp, Homo sapiens
ctttcaccctgtatg

SEQ ID NO: 69237 - DNA, 15 bp, Homo sapiens
cctttcaccctgtat

SEQ ID NO: 69238 - DNA, 15 bp, Homo sapiens
acctttcaccctgta

SEQ ID NO: 69239 - DNA, 15 bp, Homo sapiens
cacctttcaccctgt

SEQ ID NO: 69240 - DNA, 15 bp, Homo sapiens
ccacctttcaccctg

SEQ ID NO: 69241 - DNA, 15 bp, Homo sapiens
gccacctttcaccct

SEQ ID NO: 69242 - DNA, 15 bp, Homo sapiens
agccacctttcaccc

SEQ ID NO: 69243 - DNA, 15 bp, Homo sapiens
aagccacctttcacc

SEQ ID NO: 69244 - DNA, 15 bp, Homo sapiens
gaagccacctttcac

SEQ ID NO: 69245 - DNA, 15 bp, Homo sapiens
ggaagccacctttca

SEQ ID NO: 69246 - DNA, 15 bp, Homo sapiens
tggaagccacctttc

SEQ ID NO: 69247 - DNA, 15 bp, Homo sapiens
ctggaagccaccttt

SEQ ID NO: 69248 - DNA, 15 bp, Homo sapiens
cctggaagccacctt

SEQ ID NO: 69249 - DNA, 15 bp, Homo sapiens
acctggaagccacct

SEQ ID NO: 69250 - DNA, 15 bp, Homo sapiens
gacctggaagccacc

SEQ ID NO: 69251 - DNA, 15 bp, Homo sapiens
agacctggaagccac

SEQ ID NO: 69252 - DNA, 15 bp, Homo sapiens
gagacctggaagcca

SEQ ID NO: 69253 - DNA, 15 bp, Homo sapiens
agagacctggaagcc

SEQ ID NO: 69254 - DNA, 15 bp, Homo sapiens
aagagacctggaagc

SEQ ID NO: 69255 - DNA, 15 bp, Homo sapiens
gaagagacctggaag

SEQ ID NO: 69256 - DNA, 15 bp, Homo sapiens
ggaagagacctggaa

SEQ ID NO: 69257 - DNA, 15 bp, Homo sapiens
tggaagagacctgga

SEQ ID NO: 69258 - DNA, 15 bp, Homo sapiens
ctggaagagacctgg

SEQ ID NO: 69259 - DNA, 15 bp, Homo sapiens
actggaagagacctg

SEQ ID NO: 69260 - DNA, 15 bp, Homo sapiens
cactggaagagacct

SEQ ID NO: 69261 - DNA, 15 bp, Homo sapiens
gcactggaagagacc

SEQ ID NO: 69262 - DNA, 15 bp, Homo sapiens
agcactggaagagac

SEQ ID NO: 69263 - DNA, 15 bp, Homo sapiens
aagcactggaagaga

SEQ ID NO: 69264 - DNA, 15 bp, Homo sapiens
taagcactggaagag

SEQ ID NO: 69265 - DNA, 15 bp, Homo sapiens
gtaagcactggaaga

SEQ ID NO: 69266 - DNA, 15 bp, Homo sapiens
ggtaagcactggaag

SEQ ID NO: 69267 - DNA, 15 bp, Homo sapiens
gggtaagcactggaa

SEQ ID NO: 69268 - DNA, 15 bp, Homo sapiens
ggggtaagcactgga

SEQ ID NO: 69269 - DNA, 15 bp, Homo sapiens
aggggtaagcactgg

SEQ ID NO: 69270 - DNA, 15 bp, Homo sapiens
caggggtaagcactg

SEQ ID NO: 69271 - DNA, 15 bp, Homo sapiens
gcaggggtaagcact

SEQ ID NO: 69272 - DNA, 15 bp, Homo sapiens
agcaggggtaagcac

SEQ ID NO: 69273 - DNA, 15 bp, Homo sapiens
tagcaggggtaagca

SEQ ID NO: 69274 - DNA, 15 bp, Homo sapiens
ttagcaggggtaagc

SEQ ID NO: 69275 - DNA, 15 bp, Homo sapiens
attagcaggggtaag

SEQ ID NO: 69276 - DNA, 15 bp, Homo sapiens
tattagcaggggtaa

SEQ ID NO: 69277 - DNA, 15 bp, Homo sapiens
atattagcaggggta

SEQ ID NO: 69278 - DNA, 15 bp, Homo sapiens
gatattagcaggggt

SEQ ID NO: 69279 - DNA, 15 bp, Homo sapiens
agatattagcagggg

SEQ ID NO: 69280 - DNA, 15 bp, Homo sapiens
gagatattagcaggg

SEQ ID NO: 69281 - DNA, 15 bp, Homo sapiens
agagatattagcagg

SEQ ID NO: 69282 - DNA, 15 bp, Homo sapiens
gagagatattagcag

SEQ ID NO: 69283 - DNA, 15 bp, Homo sapiens
agagagatattagca

SEQ ID NO: 69284 - DNA, 15 bp, Homo sapiens
tagagagatattagc

SEQ ID NO: 69285 - DNA, 15 bp, Homo sapiens
ctagagagatattag

SEQ ID NO: 69286 - DNA, 15 bp, Homo sapiens
ggactagagagatat

SEQ ID NO: 69287 - DNA, 15 bp, Homo sapiens
gggactagagagata

SEQ ID NO: 69288 - DNA, 15 bp, Homo sapiens
agggactagagagat

SEQ ID NO: 69289 - DNA, 15 bp, Homo sapiens
cagggactagagaga

SEQ ID NO: 69290 - DNA, 15 bp, Homo sapiens
acagggactagagag

SEQ ID NO: 69291 - DNA, 15 bp, Homo sapiens
gacagggactagaga

SEQ ID NO: 69292 - DNA, 15 bp, Homo sapiens
tgacagggactagag

SEQ ID NO: 69293 - DNA, 15 bp, Homo sapiens
gtgacagggactaga

SEQ ID NO: 69294 - DNA, 15 bp, Homo sapiens
agtgacagggactag

SEQ ID NO: 69295 - DNA, 15 bp, Homo sapiens
cagtgacagggacta

SEQ ID NO: 69296 - DNA, 15 bp, Homo sapiens
acagtgacagggact

SEQ ID NO: 69297 - DNA, 15 bp, Homo sapiens
cacagtgacagggac

SEQ ID NO: 69298 - DNA, 15 bp, Homo sapiens
tcacagtgacaggga

SEQ ID NO: 69299 - DNA, 15 bp, Homo sapiens
gtcacagtgacaggg

SEQ ID NO: 69300 - DNA, 15 bp, Homo sapiens
tgtcacagtgacagg

SEQ ID NO: 69301 - DNA, 15 bp, Homo sapiens
ttgtcacagtgacag

SEQ ID NO: 69302 - DNA, 15 bp, Homo sapiens
tttgtcacagtgaca

SEQ ID NO: 69303 - DNA, 15 bp, Homo sapiens
atttgtcacagtgac

SEQ ID NO: 69304 - DNA, 15 bp, Homo sapiens
gatttgtcacagtga

SEQ ID NO: 69305 - DNA, 15 bp, Homo sapiens
tgatttgtcacagtg

SEQ ID NO: 69306 - DNA, 15 bp, Homo sapiens
ctgatttgtcacagt

SEQ ID NO: 69307 - DNA, 15 bp, Homo sapiens
tctgatttgtcacag

SEQ ID NO: 69308 - DNA, 15 bp, Homo sapiens
ttctgatttgtcaca

SEQ ID NO: 69309 - DNA, 15 bp, Homo sapiens
gttctgatttgtcac

SEQ ID NO: 69310 - DNA, 15 bp, Homo sapiens
agttctgatttgtca

SEQ ID NO: 69311 - DNA, 15 bp, Homo sapiens
cagttctgatttgtc

SEQ ID NO: 69312 - DNA, 15 bp, Homo sapiens
tcagttctgatttgt

SEQ ID NO: 69313 - DNA, 15 bp, Homo sapiens
ctcagttctgatttg

SEQ ID NO: 69314 - DNA, 15 bp, Homo sapiens
tctcagttctgattt

SEQ ID NO: 69315 - DNA, 15 bp, Homo sapiens
ctctcagttctgatt

SEQ ID NO: 69316 - DNA, 15 bp, Homo sapiens
cctctcagttctgat

SEQ ID NO: 69317 - DNA, 15 bp, Homo sapiens
gcctctcagttctga

SEQ ID NO: 69318 - DNA, 15 bp, Homo sapiens
ggcctctcagttctg

SEQ ID NO: 69319 - DNA, 15 bp, Homo sapiens
aggcctctcagttct

SEQ ID NO: 69320 - DNA, 15 bp, Homo sapiens
gaggcctctcagttc

SEQ ID NO: 69321 - DNA, 15 bp, Homo sapiens
tgaggcctctcagtt

SEQ ID NO: 69322 - DNA, 15 bp, Homo sapiens
gtgaggcctctcagt

SEQ ID NO: 69323 - DNA, 15 bp, Homo sapiens
ggtgaggcctctcag

SEQ ID NO: 69324 - DNA, 15 bp, Homo sapiens
aggtgaggcctctca

SEQ ID NO: 69325 - DNA, 15 bp, Homo sapiens
caggtgaggcctctc

SEQ ID NO: 69326 - DNA, 15 bp, Homo sapiens
acaggtgaggcctct

SEQ ID NO: 69327 - DNA, 15 bp, Homo sapiens
gacaggtgaggcctc

SEQ ID NO: 69328 - DNA, 15 bp, Homo sapiens
ggacaggtgaggcct

SEQ ID NO: 69329 - DNA, 15 bp, Homo sapiens
gggacaggtgaggcc

SEQ ID NO: 69330 - DNA, 15 bp, Homo sapiens
tgggacaggtgaggc

SEQ ID NO: 69331 - DNA, 15 bp, Homo sapiens
gtgggacaggtgagg

SEQ ID NO: 69332 - DNA, 15 bp, Homo sapiens
tgtgggacaggtgag

SEQ ID NO: 69333 - DNA, 15 bp, Homo sapiens
atgtgggacaggtga

SEQ ID NO: 69334 - DNA, 15 bp, Homo sapiens
gatgtgggacaggtg

SEQ ID NO: 69335 - DNA, 15 bp, Homo sapiens
ggatgtgggacaggt

SEQ ID NO: 69336 - DNA, 15 bp, Homo sapiens
aggatgtgggacagg

SEQ ID NO: 69337 - DNA, 15 bp, Homo sapiens
aaggatgtgggacag

SEQ ID NO: 69338 - DNA, 15 bp, Homo sapiens
caaggatgtgggaca

SEQ ID NO: 69339 - DNA, 15 bp, Homo sapiens
acaaggatgtgggac

SEQ ID NO: 69340 - DNA, 15 bp, Homo sapiens
cacaaggatgtggga

SEQ ID NO: 69341 - DNA, 15 bp, Homo sapiens
acacaaggatgtggg

SEQ ID NO: 69342 - DNA, 15 bp, Homo sapiens
aacacaaggatgtgg

SEQ ID NO: 69343 - DNA, 15 bp, Homo sapiens
aaacacaaggatgtg

SEQ ID NO: 69344 - DNA, 15 bp, Homo sapiens
caaacacaaggatgt

SEQ ID NO: 69345 - DNA, 15 bp, Homo sapiens
acaaacacaaggatg

SEQ ID NO: 69346 - DNA, 15 bp, Homo sapiens
cacaaacacaaggat

SEQ ID NO: 69347 - DNA, 15 bp, Homo sapiens
gcacaaacacaagga

SEQ ID NO: 69348 - DNA, 15 bp, Homo sapiens
ggcacaaacacaagg

SEQ ID NO: 69349 - DNA, 15 bp, Homo sapiens
aggcacaaacacaag

SEQ ID NO: 69350 - DNA, 15 bp, Homo sapiens
caggcacaaacacaa

SEQ ID NO: 69351 - DNA, 15 bp, Homo sapiens
ccaggcacaaacaca

SEQ ID NO: 69352 - DNA, 15 bp, Homo sapiens
gccaggcacaaacac

SEQ ID NO: 69353 - DNA, 15 bp, Homo sapiens
tgccaggcacaaaca

SEQ ID NO: 69354 - DNA, 15 bp, Homo sapiens
ctgccaggcacaaac

SEQ ID NO: 69355 - DNA, 15 bp, Homo sapiens
cctgccaggcacaaa

SEQ ID NO: 69356 - DNA, 15 bp, Homo sapiens
gcctgccaggcacaa

SEQ ID NO: 69357 - DNA, 15 bp, Homo sapiens
ggcctgccaggcaca

SEQ ID NO: 69358 - DNA, 15 bp, Homo sapiens
cggcctgccaggcac

SEQ ID NO: 69359 - DNA, 15 bp, Homo sapiens
gcggcctgccaggca

SEQ ID NO: 69360 - DNA, 15 bp, Homo sapiens
tgcggcctgccaggc

SEQ ID NO: 69361 - DNA, 15 bp, Homo sapiens
gtgcggcctgccagg

SEQ ID NO: 69362 - DNA, 15 bp, Homo sapiens
ggtgcggcctgccag

SEQ ID NO: 69363 - DNA, 15 bp, Homo sapiens
tggtgcggcctgcca

SEQ ID NO: 69364 - DNA, 15 bp, Homo sapiens
atggtgcggcctgcc

SEQ ID NO: 69365 - DNA, 15 bp, Homo sapiens
aatggtgcggcctgc

SEQ ID NO: 69366 - DNA, 15 bp, Homo sapiens
taatggtgcggcctg

SEQ ID NO: 69367 - DNA, 15 bp, Homo sapiens
ataatggtgcggcct

SEQ ID NO: 69368 - DNA, 15 bp, Homo sapiens
aataatggtgcggcc

SEQ ID NO: 69369 - DNA, 15 bp, Homo sapiens
gaataatggtgcggc

SEQ ID NO: 69370 - DNA, 15 bp, Homo sapiens
agaataatggtgcgg

SEQ ID NO: 69371 - DNA, 15 bp, Homo sapiens
gagaataatggtgcg

SEQ ID NO: 69372 - DNA, 15 bp, Homo sapiens
agagaataatggtgc

SEQ ID NO: 69373 - DNA, 15 bp, Homo sapiens
gagagaataatggtg

SEQ ID NO: 69374 - DNA, 15 bp, Homo sapiens
agagagaataatggt

SEQ ID NO: 69375 - DNA, 15 bp, Homo sapiens
tagagagaataatgg

SEQ ID NO: 69376 - DNA, 15 bp, Homo sapiens
gtagagagaataatg

SEQ ID NO: 69377 - DNA, 15 bp, Homo sapiens
tgtagagagaataat

SEQ ID NO: 69378 - DNA, 15 bp, Homo sapiens
gtgtagagagaataa

SEQ ID NO: 69379 - DNA, 15 bp, Homo sapiens
tgtgtagagagaata

SEQ ID NO: 69380 - DNA, 15 bp, Homo sapiens
gtgtgtagagagaat

SEQ ID NO: 69381 - DNA, 15 bp, Homo sapiens
ggtgtgtagagagaa

SEQ ID NO: 69382 - DNA, 15 bp, Homo sapiens
tggtgtgtagagaga

SEQ ID NO: 69383 - DNA, 15 bp, Homo sapiens
gtggtgtgtagagag

SEQ ID NO: 69384 - DNA, 15 bp, Homo sapiens
tgtggtgtgtagaga

SEQ ID NO: 69385 - DNA, 15 bp, Homo sapiens
atgtggtgtgtagag

SEQ ID NO: 69386 - DNA, 15 bp, Homo sapiens
catgtggtgtgtaga

SEQ ID NO: 69387 - DNA, 15 bp, Homo sapiens
ccatgtggtgtgtag

SEQ ID NO: 69388 - DNA, 15 bp, Homo sapiens
tccatgtggtgtgta

SEQ ID NO: 69389 - DNA, 15 bp, Homo sapiens
atccatgtggtgtgt

SEQ ID NO: 69390 - DNA, 15 bp, Homo sapiens
catccatgtggtgtg

SEQ ID NO: 69391 - DNA, 15 bp, Homo sapiens
tcatccatgtggtgt

SEQ ID NO: 69392 - DNA, 15 bp, Homo sapiens
ttcatccatgtggtg

SEQ ID NO: 69393 - DNA, 15 bp, Homo sapiens
cttcatccatgtggt

SEQ ID NO: 69394 - DNA, 15 bp, Homo sapiens
gcttcatccatgtgg

SEQ ID NO: 69395 - DNA, 15 bp, Homo sapiens
cgcttcatccatgtg

SEQ ID NO: 69396 - DNA, 15 bp, Homo sapiens
ccgcttcatccatgt

SEQ ID NO: 69397 - DNA, 15 bp, Homo sapiens
tccgcttcatccatg

SEQ ID NO: 69398 - DNA, 15 bp, Homo sapiens
gtccgcttcatccat

SEQ ID NO: 69399 - DNA, 15 bp, Homo sapiens
cgtccgcttcatcca

SEQ ID NO: 69400 - DNA, 15 bp, Homo sapiens
acgtccgcttcatcc

SEQ ID NO: 69401 - DNA, 15 bp, Homo sapiens
gacgtccgcttcatc

SEQ ID NO: 69402 - DNA, 15 bp, Homo sapiens
ggacgtccgcttcat

SEQ ID NO: 69403 - DNA, 15 bp, Homo sapiens
aggacgtccgcttca

SEQ ID NO: 69404 - DNA, 15 bp, Homo sapiens
caggacgtccgcttc

SEQ ID NO: 69405 - DNA, 15 bp, Homo sapiens
ccaggacgtccgctt

SEQ ID NO: 69406 - DNA, 15 bp, Homo sapiens
cccaggacgtccgct

SEQ ID NO: 69407 - DNA, 15 bp, Homo sapiens
ccccaggacgtccgc

SEQ ID NO: 69408 - DNA, 15 bp, Homo sapiens
cccccaggacgtccg

SEQ ID NO: 69409 - DNA, 15 bp, Homo sapiens
tcccccaggacgtcc

SEQ ID NO: 69410 - DNA, 15 bp, Homo sapiens
gtcccccaggacgtc

SEQ ID NO: 69411 - DNA, 15 bp, Homo sapiens
tgtcccccaggacgt

SEQ ID NO: 69412 - DNA, 15 bp, Homo sapiens
ctgtcccccaggacg

SEQ ID NO: 69413 - DNA, 15 bp, Homo sapiens
cctgtcccccaggac

SEQ ID NO: 69414 - DNA, 15 bp, Homo sapiens
tcctgtcccccagga

SEQ ID NO: 69415 - DNA, 15 bp, Homo sapiens
atcctgtcccccagg

SEQ ID NO: 69416 - DNA, 15 bp, Homo sapiens
aatcctgtcccccag

SEQ ID NO: 69417 - DNA, 15 bp, Homo sapiens
caatcctgtccccca

SEQ ID NO: 69418 - DNA, 15 bp, Homo sapiens
gcaatcctgtccccc

SEQ ID NO: 69419 - DNA, 15 bp, Homo sapiens
ggcaatcctgtcccc

SEQ ID NO: 69420 - DNA, 15 bp, Homo sapiens
tggcaatcctgtccc

SEQ ID NO: 69421 - DNA, 15 bp, Homo sapiens
atggcaatcctgtcc

SEQ ID NO: 69422 - DNA, 15 bp, Homo sapiens
gatggcaatcctgtc

SEQ ID NO: 69423 - DNA, 15 bp, Homo sapiens
tgatggcaatcctgt

SEQ ID NO: 69424 - DNA, 15 bp, Homo sapiens
atgatggcaatcctg

SEQ ID NO: 69425 - DNA, 15 bp, Homo sapiens
gatgatggcaatcct

SEQ ID NO: 69426 - DNA, 15 bp, Homo sapiens
agatgatggcaatcc

SEQ ID NO: 69427 - DNA, 15 bp, Homo sapiens
gagatgatggcaatc

SEQ ID NO: 69428 - DNA, 15 bp, Homo sapiens
ggagatgatggcaat

SEQ ID NO: 69429 - DNA, 15 bp, Homo sapiens
gggagatgatggcaa

SEQ ID NO: 69430 - DNA, 15 bp, Homo sapiens
tgggagatgatggca

SEQ ID NO: 69431 - DNA, 15 bp, Homo sapiens
atgggagatgatggc

SEQ ID NO: 69432 - DNA, 15 bp, Homo sapiens
catgggagatgatgg

SEQ ID NO: 69433 - DNA, 15 bp, Homo sapiens
ccatgggagatgatg

SEQ ID NO: 69434 - DNA, 15 bp, Homo sapiens
cccatgggagatgat

SEQ ID NO: 69435 - DNA, 15 bp, Homo sapiens
tcccatgggagatga

SEQ ID NO: 69436 - DNA, 15 bp, Homo sapiens
ttcccatgggagatg

SEQ ID NO: 69437 - DNA, 15 bp, Homo sapiens
cttcccatgggagat

SEQ ID NO: 69438 - DNA, 15 bp, Homo sapiens
gcttcccatgggaga

SEQ ID NO: 69439 - DNA, 15 bp, Homo sapiens
agcttcccatgggag

SEQ ID NO: 69440 - DNA, 15 bp, Homo sapiens
cagcttcccatggga

SEQ ID NO: 69441 - DNA, 15 bp, Homo sapiens
acagcttcccatggg

SEQ ID NO: 69442 - DNA, 15 bp, Homo sapiens
cacagcttcccatgg

SEQ ID NO: 69443 - DNA, 15 bp, Homo sapiens
gcacagcttcccatg

SEQ ID NO: 69444 - DNA, 15 bp, Homo sapiens
agcacagcttcccat

SEQ ID NO: 69445 - DNA, 15 bp, Homo sapiens
cagcacagcttccca

SEQ ID NO: 69446 - DNA, 15 bp, Homo sapiens
acagcacagcttccc

SEQ ID NO: 69447 - DNA, 15 bp, Homo sapiens
cacagcacagcttcc

SEQ ID NO: 69448 - DNA, 15 bp, Homo sapiens
acacagcacagcttc

SEQ ID NO: 69449 - DNA, 15 bp, Homo sapiens
cacacagcacagctt

SEQ ID NO: 69450 - DNA, 15 bp, Homo sapiens
ccacacagcacagct

SEQ ID NO: 69451 - DNA, 15 bp, Homo sapiens
cccacacagcacagc

SEQ ID NO: 69452 - DNA, 15 bp, Homo sapiens
gcccacacagcacag

SEQ ID NO: 69453 - DNA, 15 bp, Homo sapiens
agcccacacagcaca

SEQ ID NO: 69454 - DNA, 15 bp, Homo sapiens
gagcccacacagcac

SEQ ID NO: 69455 - DNA, 15 bp, Homo sapiens
ggagcccacacagca

SEQ ID NO: 69456 - DNA, 15 bp, Homo sapiens
aggagcccacacagc

SEQ ID NO: 69457 - DNA, 15 bp, Homo sapiens
gaggagcccacacag

SEQ ID NO: 69458 - DNA, 15 bp, Homo sapiens
ggaggagcccacaca

SEQ ID NO: 69459 - DNA, 15 bp, Homo sapiens
gggaggagcccacac

SEQ ID NO: 69460 - DNA, 15 bp, Homo sapiens
agggaggagcccaca

SEQ ID NO: 69461 - DNA, 15 bp, Homo sapiens
cagggaggagcccac

SEQ ID NO: 69462 - DNA, 15 bp, Homo sapiens
acagggaggagccca

SEQ ID NO: 69463 - DNA, 15 bp, Homo sapiens
aacagggaggagccc

SEQ ID NO: 69464 - DNA, 15 bp, Homo sapiens
aaacagggaggagcc

SEQ ID NO: 69465 - DNA, 15 bp, Homo sapiens
gaaacagggaggagc

SEQ ID NO: 69466 - DNA, 15 bp, Homo sapiens
agaaacagggaggag

SEQ ID NO: 69467 - DNA, 15 bp, Homo sapiens
cagaaacagggagga

SEQ ID NO: 69468 - DNA, 15 bp, Homo sapiens
tcagaaacagggagg

SEQ ID NO: 69469 - DNA, 15 bp, Homo sapiens
ttcagaaacagggag

SEQ ID NO: 69470 - DNA, 15 bp, Homo sapiens
cttcagaaacaggga

SEQ ID NO: 69471 - DNA, 15 bp, Homo sapiens
tcttcagaaacaggg

SEQ ID NO: 69472 - DNA, 15 bp, Homo sapiens
ttcttcagaaacagg

SEQ ID NO: 69473 - DNA, 15 bp, Homo sapiens
gttcttcagaaacag

SEQ ID NO: 69474 - DNA, 15 bp, Homo sapiens
ggttcttcagaaaca

SEQ ID NO: 69475 - DNA, 15 bp, Homo sapiens
tggttcttcagaaac

SEQ ID NO: 69476 - DNA, 15 bp, Homo sapiens
ctggttcttcagaaa

SEQ ID NO: 69477 - DNA, 15 bp, Homo sapiens
gctggttcttcagaa

SEQ ID NO: 69478 - DNA, 15 bp, Homo sapiens
agctggttcttcaga

SEQ ID NO: 69479 - DNA, 15 bp, Homo sapiens
cagctggttcttcag

SEQ ID NO: 69480 - DNA, 15 bp, Homo sapiens
ccagctggttcttca

SEQ ID NO: 69481 - DNA, 15 bp, Homo sapiens
cccagctggttcttc

SEQ ID NO: 69482 - DNA, 15 bp, Homo sapiens
tcccagctggttctt

SEQ ID NO: 69483 - DNA, 15 bp, Homo sapiens
ttcccagctggttct

SEQ ID NO: 69484 - DNA, 15 bp, Homo sapiens
gttcccagctggttc

SEQ ID NO: 69485 - DNA, 15 bp, Homo sapiens
tgttcccagctggtt

SEQ ID NO: 69486 - DNA, 15 bp, Homo sapiens
ctgttcccagctggt

SEQ ID NO: 69487 - DNA, 15 bp, Homo sapiens
cctgttcccagctgg

SEQ ID NO: 69488 - DNA, 15 bp, Homo sapiens
gcctgttcccagctg

SEQ ID NO: 69489 - DNA, 15 bp, Homo sapiens
agcctgttcccagct

SEQ ID NO: 69490 - DNA, 15 bp, Homo sapiens
tagcctgttcccagc

SEQ ID NO: 69491 - DNA, 15 bp, Homo sapiens
gtagcctgttcccag

SEQ ID NO: 69492 - DNA, 15 bp, Homo sapiens
agtagcctgttccca

SEQ ID NO: 69493 - DNA, 15 bp, Homo sapiens
tagtagcctgttccc

SEQ ID NO: 69494 - DNA, 15 bp, Homo sapiens
gtagtagcctgttcc

SEQ ID NO: 69495 - DNA, 15 bp, Homo sapiens
ggtagtagcctgttc

SEQ ID NO: 69496 - DNA, 15 bp, Homo sapiens
aggtagtagcctgtt

SEQ ID NO: 69497 - DNA, 15 bp, Homo sapiens
caggtagtagcctgt

SEQ ID NO: 69498 - DNA, 15 bp, Homo sapiens
tcaggtagtagcctg

SEQ ID NO: 69499 - DNA, 15 bp, Homo sapiens
gtcaggtagtagcct

SEQ ID NO: 69500 - DNA, 15 bp, Homo sapiens
ggtcaggtagtagcc

SEQ ID NO: 69501 - DNA, 15 bp, Homo sapiens
aggtcaggtagtagc

SEQ ID NO: 69502 - DNA, 15 bp, Homo sapiens
aaggtcaggtagtag

SEQ ID NO: 69503 - DNA, 15 bp, Homo sapiens
caaggtcaggtagta

SEQ ID NO: 69504 - DNA, 15 bp, Homo sapiens
ccaaggtcaggtagt

SEQ ID NO: 69505 - DNA, 15 bp, Homo sapiens
accaaggtcaggtag

SEQ ID NO: 69506 - DNA, 15 bp, Homo sapiens
gaccaaggtcaggta

SEQ ID NO: 69507 - DNA, 15 bp, Homo sapiens
tgaccaaggtcaggt

SEQ ID NO: 69508 - DNA, 15 bp, Homo sapiens
ttgaccaaggtcagg

SEQ ID NO: 69509 - DNA, 15 bp, Homo sapiens
cttgaccaaggtcag

SEQ ID NO: 69510 - DNA, 15 bp, Homo sapiens
tcttgaccaaggtca

SEQ ID NO: 69511 - DNA, 15 bp, Homo sapiens
ttcttgaccaaggtc

SEQ ID NO: 69512 - DNA, 15 bp, Homo sapiens
tttcttgaccaaggt

SEQ ID NO: 69513 - DNA, 15 bp, Homo sapiens
ctttcttgaccaagg

SEQ ID NO: 69514 - DNA, 15 bp, Homo sapiens
tctttcttgaccaag

SEQ ID NO: 69515 - DNA, 15 bp, Homo sapiens
atctttcttgaccaa

SEQ ID NO: 69516 - DNA, 15 bp, Homo sapiens
catctttcttgacca

SEQ ID NO: 69517 - DNA, 15 bp, Homo sapiens
acatctttcttgacc

SEQ ID NO: 69518 - DNA, 15 bp, Homo sapiens
cacatctttcttgac

SEQ ID NO: 69519 - DNA, 15 bp, Homo sapiens
ccacatctttcttga

SEQ ID NO: 69520 - DNA, 15 bp, Homo sapiens
tccacatctttcttg

SEQ ID NO: 69521 - DNA, 15 bp, Homo sapiens
ttccacatctttctt

SEQ ID NO: 69522 - DNA, 15 bp, Homo sapiens
attccacatctttct

SEQ ID NO: 69523 - DNA, 15 bp, Homo sapiens
gattccacatctttc

SEQ ID NO: 69524 - DNA, 15 bp, Homo sapiens
ggattccacatcttt

SEQ ID NO: 69525 - DNA, 15 bp, Homo sapiens
aggattccacatctt

SEQ ID NO: 69526 - DNA, 15 bp, Homo sapiens
gaggattccacatct

SEQ ID NO: 69527 - DNA, 15 bp, Homo sapiens
ggaggattccacatc

SEQ ID NO: 69528 - DNA, 15 bp, Homo sapiens
gggaggattccacat

SEQ ID NO: 69529 - DNA, 15 bp, Homo sapiens
agggaggattccaca

SEQ ID NO: 69530 - DNA, 15 bp, Homo sapiens
gagggaggattccac

SEQ ID NO: 69531 - DNA, 15 bp, Homo sapiens
tgagggaggattcca

SEQ ID NO: 69532 - DNA, 15 bp, Homo sapiens
ctgagggaggattcc

SEQ ID NO: 69533 - DNA, 15 bp, Homo sapiens
actgagggaggattc

SEQ ID NO: 69534 - DNA, 15 bp, Homo sapiens
aactgagggaggatt

SEQ ID NO: 69535 - DNA, 15 bp, Homo sapiens
gaactgagggaggat

SEQ ID NO: 69536 - DNA, 15 bp, Homo sapiens
ggaactgagggagga

SEQ ID NO: 69537 - DNA, 15 bp, Homo sapiens
aggaactgagggagg

SEQ ID NO: 69538 - DNA, 15 bp, Homo sapiens
caggaactgagggag

SEQ ID NO: 69539 - DNA, 15 bp, Homo sapiens
gcaggaactgaggga

SEQ ID NO: 69540 - DNA, 15 bp, Homo sapiens
tgcaggaactgaggg

SEQ ID NO: 69541 - DNA, 15 bp, Homo sapiens
ctgcaggaactgagg

SEQ ID NO: 69542 - DNA, 15 bp, Homo sapiens
tctgcaggaactgag

SEQ ID NO: 69543 - DNA, 15 bp, Homo sapiens
ttctgcaggaactga

SEQ ID NO: 69544 - DNA, 15 bp, Homo sapiens
tttctgcaggaactg

SEQ ID NO: 69545 - DNA, 15 bp, Homo sapiens
gtttctgcaggaact

SEQ ID NO: 69546 - DNA, 15 bp, Homo sapiens
tgtttctgcaggaac

SEQ ID NO: 69547 - DNA, 15 bp, Homo sapiens
ctgtttctgcaggaa

SEQ ID NO: 69548 - DNA, 15 bp, Homo sapiens
actgtttctgcagga

SEQ ID NO: 69549 - DNA, 15 bp, Homo sapiens
tactgtttctgcagg

SEQ ID NO: 69550 - DNA, 15 bp, Homo sapiens
ctactgtttctgcag

SEQ ID NO: 69551 - DNA, 15 bp, Homo sapiens
actactgtttctgca

SEQ ID NO: 69552 - DNA, 15 bp, Homo sapiens
tactactgtttctgc

SEQ ID NO: 69553 - DNA, 15 bp, Homo sapiens
ctactactgtttctg

SEQ ID NO: 69554 - DNA, 15 bp, Homo sapiens
gctactactgtttct

SEQ ID NO: 69555 - DNA, 15 bp, Homo sapiens
tgctactactgtttc

SEQ ID NO: 69556 - DNA, 15 bp, Homo sapiens
gtgctactactgttt

SEQ ID NO: 69557 - DNA, 15 bp, Homo sapiens
agtgctactactgtt

SEQ ID NO: 69558 - DNA, 15 bp, Homo sapiens
cagtgctactactgt

SEQ ID NO: 69559 - DNA, 15 bp, Homo sapiens
acagtgctactactg

SEQ ID NO: 69560 - DNA, 15 bp, Homo sapiens
cacagtgctactact

SEQ ID NO: 69561 - DNA, 15 bp, Homo sapiens
acacagtgctactac

SEQ ID NO: 69562 - DNA, 15 bp, Homo sapiens
gacacagtgctacta

SEQ ID NO: 69563 - DNA, 15 bp, Homo sapiens
tgacacagtgctact

SEQ ID NO: 69564 - DNA, 15 bp, Homo sapiens
atgacacagtgctac

SEQ ID NO: 69565 - DNA, 15 bp, Homo sapiens
tatgacacagtgcta

SEQ ID NO: 69566 - DNA, 15 bp, Homo sapiens
gtatgacacagtgct

SEQ ID NO: 69567 - DNA, 15 bp, Homo sapiens
ggtatgacacagtgc

SEQ ID NO: 69568 - DNA, 15 bp, Homo sapiens
aggtatgacacagtg

SEQ ID NO: 69569 - DNA, 15 bp, Homo sapiens
caggtatgacacagt

SEQ ID NO: 69570 - DNA, 15 bp, Homo sapiens
tcaggtatgacacag

SEQ ID NO: 69571 - DNA, 15 bp, Homo sapiens
ttcaggtatgacaca

SEQ ID NO: 69572 - DNA, 15 bp, Homo sapiens
tttcaggtatgacac

SEQ ID NO: 69573 - DNA, 15 bp, Homo sapiens
ttttcaggtatgaca

SEQ ID NO: 69574 - DNA, 15 bp, Homo sapiens
tttttcaggtatgac

SEQ ID NO: 69575 - DNA, 15 bp, Homo sapiens
ctttttcaggtatga

SEQ ID NO: 69576 - DNA, 15 bp, Homo sapiens
cctttttcaggtatg

SEQ ID NO: 69577 - DNA, 15 bp, Homo sapiens
acctttttcaggtat

SEQ ID NO: 69578 - DNA, 15 bp, Homo sapiens
cacctttttcaggta

SEQ ID NO: 69579 - DNA, 15 bp, Homo sapiens
tcacctttttcaggt

SEQ ID NO: 69580 - DNA, 15 bp, Homo sapiens
ctcacctttttcagg

SEQ ID NO: 69581 - DNA, 15 bp, Homo sapiens
gctcacctttttcag

SEQ ID NO: 69582 - DNA, 15 bp, Homo sapiens
agctcacctttttca

SEQ ID NO: 69583 - DNA, 15 bp, Homo sapiens
cagctcacctttttc

SEQ ID NO: 69584 - DNA, 15 bp, Homo sapiens
gcagctcaccttttt

SEQ ID NO: 69585 - DNA, 15 bp, Homo sapiens
tgcagctcacctttt

SEQ ID NO: 69586 - DNA, 15 bp, Homo sapiens
ctgcagctcaccttt

SEQ ID NO: 69587 - DNA, 15 bp, Homo sapiens
actgcagctcacctt

SEQ ID NO: 69588 - DNA, 15 bp, Homo sapiens
gactgcagctcacct

SEQ ID NO: 69589 - DNA, 15 bp, Homo sapiens
agactgcagctcacc

SEQ ID NO: 69590 - DNA, 15 bp, Homo sapiens
aagactgcagctcac

SEQ ID NO: 69591 - DNA, 15 bp, Homo sapiens
caagactgcagctca

SEQ ID NO: 69592 - DNA, 15 bp, Homo sapiens
ccaagactgcagctc

SEQ ID NO: 69593 - DNA, 15 bp, Homo sapiens
accaagactgcagct

SEQ ID NO: 69594 - DNA, 15 bp, Homo sapiens
caccaagactgcagc

SEQ ID NO: 69595 - DNA, 15 bp, Homo sapiens
gcaccaagactgcag

SEQ ID NO: 69596 - DNA, 15 bp, Homo sapiens
agcaccaagactgca

SEQ ID NO: 69597 - DNA, 15 bp, Homo sapiens
cagcaccaagactgc

SEQ ID NO: 69598 - DNA, 15 bp, Homo sapiens
ccagcaccaagactg

SEQ ID NO: 69599 - DNA, 15 bp, Homo sapiens
cccagcaccaagact

SEQ ID NO: 69600 - DNA, 15 bp, Homo sapiens
gcccagcaccaagac

SEQ ID NO: 69601 - DNA, 15 bp, Homo sapiens
agcccagcaccaaga

SEQ ID NO: 69602 - DNA, 15 bp, Homo sapiens
cagcccagcaccaag

SEQ ID NO: 69603 - DNA, 15 bp, Homo sapiens
ccagcccagcaccaa

SEQ ID NO: 69604 - DNA, 15 bp, Homo sapiens
accagcccagcacca

SEQ ID NO: 69605 - DNA, 15 bp, Homo sapiens
caccagcccagcacc

SEQ ID NO: 69606 - DNA, 15 bp, Homo sapiens
acaccagcccagcac

SEQ ID NO: 69607 - DNA, 15 bp, Homo sapiens
aacaccagcccagca

SEQ ID NO: 69608 - DNA, 15 bp, Homo sapiens
caacaccagcccagc

SEQ ID NO: 69609 - DNA, 15 bp, Homo sapiens
ccaacaccagcccag

SEQ ID NO: 69610 - DNA, 15 bp, Homo sapiens
cccaacaccagccca

SEQ ID NO: 69611 - DNA, 15 bp, Homo sapiens
acccaacaccagccc

SEQ ID NO: 69612 - DNA, 15 bp, Homo sapiens
gacccaacaccagcc

SEQ ID NO: 69613 - DNA, 15 bp, Homo sapiens
agacccaacaccagc

SEQ ID NO: 69614 - DNA, 15 bp, Homo sapiens
cagacccaacaccag

SEQ ID NO: 69615 - DNA, 15 bp, Homo sapiens
ccagacccaacacca

SEQ ID NO: 69616 - DNA, 15 bp, Homo sapiens
cccagacccaacacc

SEQ ID NO: 69617 - DNA, 15 bp, Homo sapiens
gcccagacccaacac

SEQ ID NO: 69618 - DNA, 15 bp, Homo sapiens
tgcccagacccaaca

SEQ ID NO: 69619 - DNA, 15 bp, Homo sapiens
ctgcccagacccaac

SEQ ID NO: 69620 - DNA, 15 bp, Homo sapiens
gctgcccagacccaa

SEQ ID NO: 69621 - DNA, 15 bp, Homo sapiens
ggctgcccagaccca

SEQ ID NO: 69622 - DNA, 15 bp, Homo sapiens
tggctgcccagaccc

SEQ ID NO: 69623 - DNA, 15 bp, Homo sapiens
ctggctgcccagacc

SEQ ID NO: 69624 - DNA, 15 bp, Homo sapiens
cctggctgcccagac

SEQ ID NO: 69625 - DNA, 15 bp, Homo sapiens
tcctggctgcccaga

SEQ ID NO: 69626 - DNA, 15 bp, Homo sapiens
gtcctggctgcccag

SEQ ID NO: 69627 - DNA, 15 bp, Homo sapiens
agtcctggctgccca

SEQ ID NO: 69628 - DNA, 15 bp, Homo sapiens
aagtcctggctgccc

SEQ ID NO: 69629 - DNA, 15 bp, Homo sapiens
caagtcctggctgcc

SEQ ID NO: 69630 - DNA, 15 bp, Homo sapiens
gcaagtcctggctgc

SEQ ID NO: 69631 - DNA, 15 bp, Homo sapiens
agcaagtcctggctg

SEQ ID NO: 69632 - DNA, 15 bp, Homo sapiens
cagcaagtcctggct

SEQ ID NO: 69633 - DNA, 15 bp, Homo sapiens
ccagcaagtcctggc

SEQ ID NO: 69634 - DNA, 15 bp, Homo sapiens
gccagcaagtcctgg

SEQ ID NO: 69635 - DNA, 15 bp, Homo sapiens
agccagcaagtcctg

SEQ ID NO: 69636 - DNA, 15 bp, Homo sapiens
cagccagcaagtcct

SEQ ID NO: 69637 - DNA, 15 bp, Homo sapiens
acagccagcaagtcc

SEQ ID NO: 69638 - DNA, 15 bp, Homo sapiens
cacagccagcaagtc

SEQ ID NO: 69639 - DNA, 15 bp, Homo sapiens
tcacagccagcaagt

SEQ ID NO: 69640 - DNA, 15 bp, Homo sapiens
ttcacagccagcaag

SEQ ID NO: 69641 - DNA, 15 bp, Homo sapiens
attcacagccagcaa

SEQ ID NO: 69642 - DNA, 15 bp, Homo sapiens
cattcacagccagca

SEQ ID NO: 69643 - DNA, 15 bp, Homo sapiens
tcattcacagccagc

SEQ ID NO: 69644 - DNA, 15 bp, Homo sapiens
atcattcacagccag

SEQ ID NO: 69645 - DNA, 15 bp, Homo sapiens
aatcattcacagcca

SEQ ID NO: 69646 - DNA, 15 bp, Homo sapiens
aaatcattcacagcc

SEQ ID NO: 69647 - DNA, 15 bp, Homo sapiens
gaaatcattcacagc

SEQ ID NO: 69648 - DNA, 15 bp, Homo sapiens
agaaatcattcacag

SEQ ID NO: 69649 - DNA, 15 bp, Homo sapiens
gagaaatcattcaca

SEQ ID NO: 69650 - DNA, 15 bp, Homo sapiens
ggagaaatcattcac

SEQ ID NO: 69651 - DNA, 15 bp, Homo sapiens
tggagaaatcattca

SEQ ID NO: 69652 - DNA, 15 bp, Homo sapiens
atggagaaatcattc

SEQ ID NO: 69653 - DNA, 15 bp, Homo sapiens
gatggagaaatcatt

SEQ ID NO: 69654 - DNA, 15 bp, Homo sapiens
agatggagaaatcat

SEQ ID NO: 69655 - DNA, 15 bp, Homo sapiens
gagatggagaaatca

SEQ ID NO: 69656 - DNA, 15 bp, Homo sapiens
ggagatggagaaatc

SEQ ID NO: 69657 - DNA, 15 bp, Homo sapiens
tggagatggagaaat

SEQ ID NO: 69658 - DNA, 15 bp, Homo sapiens
gtggagatggagaaa

SEQ ID NO: 69659 - DNA, 15 bp, Homo sapiens
ggtggagatggagaa

SEQ ID NO: 69660 - DNA, 15 bp, Homo sapiens
gggtggagatggaga

SEQ ID NO: 69661 - DNA, 15 bp, Homo sapiens
ggggtggagatggag

SEQ ID NO: 69662 - DNA, 15 bp, Homo sapiens
aggggtggagatgga

SEQ ID NO: 69663 - DNA, 15 bp, Homo sapiens
aaggggtggagatgg

SEQ ID NO: 69664 - DNA, 15 bp, Homo sapiens
aaaggggtggagatg

SEQ ID NO: 69665 - DNA, 15 bp, Homo sapiens
aaaaggggtggagat

SEQ ID NO: 69666 - DNA, 15 bp, Homo sapiens
caaaaggggtggaga

SEQ ID NO: 69667 - DNA, 15 bp, Homo sapiens
gcaaaaggggtggag

SEQ ID NO: 69668 - DNA, 15 bp, Homo sapiens
ggcaaaaggggtgga

SEQ ID NO: 69669 - DNA, 15 bp, Homo sapiens
tggcaaaaggggtgg

SEQ ID NO: 69670 - DNA, 15 bp, Homo sapiens
atggcaaaaggggtg

SEQ ID NO: 69671 - DNA, 15 bp, Homo sapiens
catggcaaaaggggt

SEQ ID NO: 69672 - DNA, 15 bp, Homo sapiens
acatggcaaaagggg

SEQ ID NO: 69673 - DNA, 15 bp, Homo sapiens
aacatggcaaaaggg

SEQ ID NO: 69674 - DNA, 15 bp, Homo sapiens
caacatggcaaaagg

SEQ ID NO: 69675 - DNA, 15 bp, Homo sapiens
tcaacatggcaaaag

SEQ ID NO: 69676 - DNA, 15 bp, Homo sapiens
ttcaacatggcaaaa

SEQ ID NO: 69677 - DNA, 15 bp, Homo sapiens
tttcaacatggcaaa

SEQ ID NO: 69678 - DNA, 15 bp, Homo sapiens
gtttcaacatggcaa

SEQ ID NO: 69679 - DNA, 15 bp, Homo sapiens
ggtttcaacatggca

SEQ ID NO: 69680 - DNA, 15 bp, Homo sapiens
tggtttcaacatggc

SEQ ID NO: 69681 - DNA, 15 bp, Homo sapiens
gtggtttcaacatgg

SEQ ID NO: 69682 - DNA, 15 bp, Homo sapiens
ggtggtttcaacatg

SEQ ID NO: 69683 - DNA, 15 bp, Homo sapiens
tggtggtttcaacat

SEQ ID NO: 69684 - DNA, 15 bp, Homo sapiens
atggtggtttcaaca

SEQ ID NO: 69685 - DNA, 15 bp, Homo sapiens
gatggtggtttcaac

SEQ ID NO: 69686 - DNA, 15 bp, Homo sapiens
agatggtggtttcaa

SEQ ID NO: 69687 - DNA, 15 bp, Homo sapiens
gagatggtggtttca

SEQ ID NO: 69688 - DNA, 15 bp, Homo sapiens
ggagatggtggtttc

SEQ ID NO: 69689 - DNA, 15 bp, Homo sapiens
gggagatggtggttt

SEQ ID NO: 69690 - DNA, 15 bp, Homo sapiens
agggagatggtggtt

SEQ ID NO: 69691 - DNA, 15 bp, Homo sapiens
cagggagatggtggt

SEQ ID NO: 69692 - DNA, 15 bp, Homo sapiens
gcagggagatggtgg

SEQ ID NO: 69693 - DNA, 15 bp, Homo sapiens
agcagggagatggtg

SEQ ID NO: 69694 - DNA, 15 bp, Homo sapiens
gagcagggagatggt

SEQ ID NO: 69695 - DNA, 15 bp, Homo sapiens
agagcagggagatgg

SEQ ID NO: 69696 - DNA, 15 bp, Homo sapiens
cagagcagggagatg

SEQ ID NO: 69697 - DNA, 15 bp, Homo sapiens
acagagcagggagat

SEQ ID NO: 69698 - DNA, 15 bp, Homo sapiens
aacagagcagggaga

SEQ ID NO: 69699 - DNA, 15 bp, Homo sapiens
caacagagcagggag

SEQ ID NO: 69700 - DNA, 15 bp, Homo sapiens
gcaacagagcaggga

SEQ ID NO: 69701 - DNA, 15 bp, Homo sapiens
ggcaacagagcaggg

SEQ ID NO: 69702 - DNA, 15 bp, Homo sapiens
gggcaacagagcagg

SEQ ID NO: 69703 - DNA, 15 bp, Homo sapiens
ggggcaacagagcag

SEQ ID NO: 69704 - DNA, 15 bp, Homo sapiens
aggggcaacagagca

SEQ ID NO: 69705 - DNA, 15 bp, Homo sapiens
aaggggcaacagagc

SEQ ID NO: 69706 - DNA, 15 bp, Homo sapiens
aaaggggcaacagag

SEQ ID NO: 69707 - DNA, 15 bp, Homo sapiens
caaaggggcaacaga

SEQ ID NO: 69708 - DNA, 15 bp, Homo sapiens
tcaaaggggcaacag

SEQ ID NO: 69709 - DNA, 15 bp, Homo sapiens
ttcaaaggggcaaca

SEQ ID NO: 69710 - DNA, 15 bp, Homo sapiens
tttcaaaggggcaac

SEQ ID NO: 69711 - DNA, 15 bp, Homo sapiens
atttcaaaggggcaa

SEQ ID NO: 69712 - DNA, 15 bp, Homo sapiens
gatttcaaaggggca

SEQ ID NO: 69713 - DNA, 15 bp, Homo sapiens
tgatttcaaaggggc

SEQ ID NO: 69714 - DNA, 15 bp, Homo sapiens
atgatttcaaagggg

SEQ ID NO: 69715 - DNA, 15 bp, Homo sapiens
tatgatttcaaaggg

SEQ ID NO: 69716 - DNA, 15 bp, Homo sapiens
atatgatttcaaagg

SEQ ID NO: 69717 - DNA, 15 bp, Homo sapiens
gatatgatttcaaag

SEQ ID NO: 69718 - DNA, 15 bp, Homo sapiens
tgatatgatttcaaa

SEQ ID NO: 69719 - DNA, 15 bp, Homo sapiens
atgatatgatttcaa

SEQ ID NO: 69720 - DNA, 15 bp, Homo sapiens
tatgatatgatttca

SEQ ID NO: 69721 - DNA, 15 bp, Homo sapiens
gtatgatatgatttc

SEQ ID NO: 69722 - DNA, 15 bp, Homo sapiens
agtatgatatgattt

SEQ ID NO: 69723 - DNA, 15 bp, Homo sapiens
aagtatgatatgatt

SEQ ID NO: 69724 - DNA, 15 bp, Homo sapiens
taagtatgatatgat

SEQ ID NO: 69725 - DNA, 15 bp, Homo sapiens
ttaagtatgatatga

SEQ ID NO: 69726 - DNA, 15 bp, Homo sapiens
cttaagtatgatatg

SEQ ID NO: 69727 - DNA, 15 bp, Homo sapiens
ccttaagtatgatat

SEQ ID NO: 69728 - DNA, 15 bp, Homo sapiens
gccttaagtatgata

SEQ ID NO: 69729 - DNA, 15 bp, Homo sapiens
tgccttaagtatgat

SEQ ID NO: 69730 - DNA, 15 bp, Homo sapiens
atgccttaagtatga

SEQ ID NO: 69731 - DNA, 15 bp, Homo sapiens
catgccttaagtatg

SEQ ID NO: 69732 - DNA, 15 bp, Homo sapiens
ccatgccttaagtat

SEQ ID NO: 69733 - DNA, 15 bp, Homo sapiens
tccatgccttaagta

SEQ ID NO: 69734 - DNA, 15 bp, Homo sapiens
ttccatgccttaagt

SEQ ID NO: 69735 - DNA, 15 bp, Homo sapiens
tttccatgccttaag

SEQ ID NO: 69736 - DNA, 15 bp, Homo sapiens
ctttccatgccttaa

SEQ ID NO: 69737 - DNA, 15 bp, Homo sapiens
gctttccatgcctta

SEQ ID NO: 69738 - DNA, 15 bp, Homo sapiens
agctttccatgcctt

SEQ ID NO: 69739 - DNA, 15 bp, Homo sapiens
tagctttccatgcct

SEQ ID NO: 69740 - DNA, 15 bp, Homo sapiens
ttagctttccatgcc

SEQ ID NO: 69741 - DNA, 15 bp, Homo sapiens
cttagctttccatgc

SEQ ID NO: 69742 - DNA, 15 bp, Homo sapiens
ccttagctttccatg

SEQ ID NO: 69743 - DNA, 15 bp, Homo sapiens
cccttagctttccat

SEQ ID NO: 69744 - DNA, 15 bp, Homo sapiens
ccccttagctttcca

SEQ ID NO: 69745 - DNA, 15 bp, Homo sapiens
gccccttagctttcc

SEQ ID NO: 69746 - DNA, 15 bp, Homo sapiens
ggccccttagctttc

SEQ ID NO: 69747 - DNA, 15 bp, Homo sapiens
gggccccttagcttt

SEQ ID NO: 69748 - DNA, 15 bp, Homo sapiens
agggccccttagctt

SEQ ID NO: 69749 - DNA, 15 bp, Homo sapiens
gagggccccttagct

SEQ ID NO: 69750 - DNA, 15 bp, Homo sapiens
agagggccccttagc

SEQ ID NO: 69751 - DNA, 15 bp, Homo sapiens
cagagggccccttag

SEQ ID NO: 69752 - DNA, 15 bp, Homo sapiens
gcagagggcccctta

SEQ ID NO: 69753 - DNA, 15 bp, Homo sapiens
agcagagggcccctt

SEQ ID NO: 69754 - DNA, 15 bp, Homo sapiens
gagcagagggcccct

SEQ ID NO: 69755 - DNA, 15 bp, Homo sapiens
ggagcagagggcccc

SEQ ID NO: 69756 - DNA, 15 bp, Homo sapiens
gggagcagagggccc

SEQ ID NO: 69757 - DNA, 15 bp, Homo sapiens
tgggagcagagggcc

SEQ ID NO: 69758 - DNA, 15 bp, Homo sapiens
atgggagcagagggc

SEQ ID NO: 69759 - DNA, 15 bp, Homo sapiens
aatgggagcagaggg

SEQ ID NO: 69760 - DNA, 15 bp, Homo sapiens
caatgggagcagagg

SEQ ID NO: 69761 - DNA, 15 bp, Homo sapiens
acaatgggagcagag

SEQ ID NO: 69762 - DNA, 15 bp, Homo sapiens
cacaatgggagcaga

SEQ ID NO: 69763 - DNA, 15 bp, Homo sapiens
gcacaatgggagcag

SEQ ID NO: 69764 - DNA, 15 bp, Homo sapiens
agcacaatgggagca

SEQ ID NO: 69765 - DNA, 15 bp, Homo sapiens
tagcacaatgggagc

SEQ ID NO: 69766 - DNA, 15 bp, Homo sapiens
ctagcacaatgggag

SEQ ID NO: 69767 - DNA, 15 bp, Homo sapiens
actagcacaatggga

SEQ ID NO: 69768 - DNA, 15 bp, Homo sapiens
aactagcacaatggg

SEQ ID NO: 69769 - DNA, 15 bp, Homo sapiens
gaactagcacaatgg

SEQ ID NO: 69770 - DNA, 15 bp, Homo sapiens
agaactagcacaatg

SEQ ID NO: 69771 - DNA, 15 bp, Homo sapiens
cagaactagcacaat

SEQ ID NO: 69772 - DNA, 15 bp, Homo sapiens
acagaactagcacaa

SEQ ID NO: 69773 - DNA, 15 bp, Homo sapiens
aacagaactagcaca

SEQ ID NO: 69774 - DNA, 15 bp, Homo sapiens
caacagaactagcac

SEQ ID NO: 69775 - DNA, 15 bp, Homo sapiens
tcaacagaactagca

SEQ ID NO: 69776 - DNA, 15 bp, Homo sapiens
ttcaacagaactagc

SEQ ID NO: 69777 - DNA, 15 bp, Homo sapiens
attcaacagaactag

SEQ ID NO: 69778 - DNA, 15 bp, Homo sapiens
gattcaacagaacta

SEQ ID NO: 69779 - DNA, 15 bp, Homo sapiens
ggattcaacagaact

SEQ ID NO: 69780 - DNA, 15 bp, Homo sapiens
gggattcaacagaac

SEQ ID NO: 69781 - DNA, 15 bp, Homo sapiens
cgggattcaacagaa

SEQ ID NO: 69782 - DNA, 15 bp, Homo sapiens
acgggattcaacaga

SEQ ID NO: 69783 - DNA, 15 bp, Homo sapiens
aacgggattcaacag

SEQ ID NO: 69784 - DNA, 15 bp, Homo sapiens
aaacgggattcaaca

SEQ ID NO: 69785 - DNA, 15 bp, Homo sapiens
aaaacgggattcaac

SEQ ID NO: 69786 - DNA, 15 bp, Homo sapiens
gaaaacgggattcaa

SEQ ID NO: 69787 - DNA, 15 bp, Homo sapiens
ggaaaacgggattca

SEQ ID NO: 69788 - DNA, 15 bp, Homo sapiens
aggaaaacgggattc

SEQ ID NO: 69789 - DNA, 15 bp, Homo sapiens
aaggaaaacgggatt

SEQ ID NO: 69790 - DNA, 15 bp, Homo sapiens
aaaggaaaacgggat

SEQ ID NO: 69791 - DNA, 15 bp, Homo sapiens
aaaaggaaaacggga

SEQ ID NO: 69792 - DNA, 15 bp, Homo sapiens
gaaaaggaaaacggg

SEQ ID NO: 69793 - DNA, 15 bp, Homo sapiens
ggaaaaggaaaacgg

SEQ ID NO: 69794 - DNA, 15 bp, Homo sapiens
aggaaaaggaaaacg

SEQ ID NO: 69795 - DNA, 15 bp, Homo sapiens
taggaaaaggaaaac

SEQ ID NO: 69796 - DNA, 15 bp, Homo sapiens
ataggaaaaggaaaa

SEQ ID NO: 69797 - DNA, 15 bp, Homo sapiens
cataggaaaaggaaa

SEQ ID NO: 69798 - DNA, 15 bp, Homo sapiens
tcataggaaaaggaa

SEQ ID NO: 69799 - DNA, 15 bp, Homo sapiens
ctcataggaaaagga

SEQ ID NO: 69800 - DNA, 15 bp, Homo sapiens
cctcataggaaaagg

SEQ ID NO: 69801 - DNA, 15 bp, Homo sapiens
gcctcataggaaaag

SEQ ID NO: 69802 - DNA, 15 bp, Homo sapiens
tgcctcataggaaaa

SEQ ID NO: 69803 - DNA, 15 bp, Homo sapiens
gtgcctcataggaaa

SEQ ID NO: 69804 - DNA, 15 bp, Homo sapiens
tgtgcctcataggaa

SEQ ID NO: 69805 - DNA, 15 bp, Homo sapiens
ctgtgcctcatagga

SEQ ID NO: 69806 - DNA, 15 bp, Homo sapiens
tctgtgcctcatagg

SEQ ID NO: 69807 - DNA, 15 bp, Homo sapiens
ctctgtgcctcatag

SEQ ID NO: 69808 - DNA, 15 bp, Homo sapiens
tctctgtgcctcata

SEQ ID NO: 69809 - DNA, 15 bp, Homo sapiens
ctctctgtgcctcat

SEQ ID NO: 69810 - DNA, 15 bp, Homo sapiens
actctctgtgcctca

SEQ ID NO: 69811 - DNA, 15 bp, Homo sapiens
cactctctgtgcctc

SEQ ID NO: 69812 - DNA, 15 bp, Homo sapiens
tcactctctgtgcct

SEQ ID NO: 69813 - DNA, 15 bp, Homo sapiens
atcactctctgtgcc

SEQ ID NO: 69814 - DNA, 15 bp, Homo sapiens
catcactctctgtgc

SEQ ID NO: 69815 - DNA, 15 bp, Homo sapiens
ccatcactctctgtg

SEQ ID NO: 69816 - DNA, 15 bp, Homo sapiens
tccatcactctctgt

SEQ ID NO: 69817 - DNA, 15 bp, Homo sapiens
ctccatcactctctg

SEQ ID NO: 69818 - DNA, 15 bp, Homo sapiens
tctccatcactctct

SEQ ID NO: 69819 - DNA, 15 bp, Homo sapiens
ttctccatcactctc

SEQ ID NO: 69820 - DNA, 15 bp, Homo sapiens
cttctccatcactct

SEQ ID NO: 69821 - DNA, 15 bp, Homo sapiens
ccttctccatcactc

SEQ ID NO: 69822 - DNA, 15 bp, Homo sapiens
accttctccatcact

SEQ ID NO: 69823 - DNA, 15 bp, Homo sapiens
gaccttctccatcac

SEQ ID NO: 69824 - DNA, 15 bp, Homo sapiens
ggaccttctccatca

SEQ ID NO: 69825 - DNA, 15 bp, Homo sapiens
aggaccttctccatc

SEQ ID NO: 69826 - DNA, 15 bp, Homo sapiens
aaggaccttctccat

SEQ ID NO: 69827 - DNA, 15 bp, Homo sapiens
taaggaccttctcca

SEQ ID NO: 69828 - DNA, 15 bp, Homo sapiens
ctaaggaccttctcc

SEQ ID NO: 69829 - DNA, 15 bp, Homo sapiens
tctaaggaccttctc

SEQ ID NO: 69830 - DNA, 15 bp, Homo sapiens
ctctaaggaccttct

SEQ ID NO: 69831 - DNA, 15 bp, Homo sapiens
cctctaaggaccttc

SEQ ID NO: 69832 - DNA, 15 bp, Homo sapiens
tcctctaaggacctt

SEQ ID NO: 69833 - DNA, 15 bp, Homo sapiens
gtcctctaaggacct

SEQ ID NO: 69834 - DNA, 15 bp, Homo sapiens
tgtcctctaaggacc

SEQ ID NO: 69835 - DNA, 15 bp, Homo sapiens
atgtcctctaaggac

SEQ ID NO: 69836 - DNA, 15 bp, Homo sapiens
aatgtcctctaagga

SEQ ID NO: 69837 - DNA, 15 bp, Homo sapiens
taatgtcctctaagg

SEQ ID NO: 69838 - DNA, 15 bp, Homo sapiens
ataatgtcctctaag

SEQ ID NO: 69839 - DNA, 15 bp, Homo sapiens
aataatgtcctctaa

SEQ ID NO: 69840 - DNA, 15 bp, Homo sapiens
taataatgtcctcta

SEQ ID NO: 69841 - DNA, 15 bp, Homo sapiens
ataataatgtcctct

SEQ ID NO: 69842 - DNA, 15 bp, Homo sapiens
cataataatgtcctc

SEQ ID NO: 69843 - DNA, 15 bp, Homo sapiens
acataataatgtcct

SEQ ID NO: 69844 - DNA, 15 bp, Homo sapiens
gacataataatgtcc

SEQ ID NO: 69845 - DNA, 15 bp, Homo sapiens
tgacataataatgtc

SEQ ID NO: 69846 - DNA, 15 bp, Homo sapiens
ttgacataataatgt

SEQ ID NO: 69847 - DNA, 15 bp, Homo sapiens
tttgacataataatg

SEQ ID NO: 69848 - DNA, 15 bp, Homo sapiens
ctttgacataataat

SEQ ID NO: 69849 - DNA, 15 bp, Homo sapiens
tctttgacataataa

SEQ ID NO: 69850 - DNA, 15 bp, Homo sapiens
ttctttgacataata

SEQ ID NO: 69851 - DNA, 15 bp, Homo sapiens
tttctttgacataat

SEQ ID NO: 69852 - DNA, 15 bp, Homo sapiens
ttttctttgacataa

SEQ ID NO: 69853 - DNA, 15 bp, Homo sapiens
cttttctttgacata

SEQ ID NO: 69854 - DNA, 15 bp, Homo sapiens
tcttttctttgacat

SEQ ID NO: 69855 - DNA, 15 bp, Homo sapiens
ctcttttctttgaca

SEQ ID NO: 69856 - DNA, 15 bp, Homo sapiens
tctcttttctttgac

SEQ ID NO: 69857 - DNA, 15 bp, Homo sapiens
gtctcttttctttga

SEQ ID NO: 69858 - DNA, 15 bp, Homo sapiens
agtctcttttctttg

SEQ ID NO: 69859 - DNA, 15 bp, Homo sapiens
aagtctcttttcttt

SEQ ID NO: 69860 - DNA, 15 bp, Homo sapiens
caagtctcttttctt

SEQ ID NO: 69861 - DNA, 15 bp, Homo sapiens
acaagtctcttttct

SEQ ID NO: 69862 - DNA, 15 bp, Homo sapiens
gacaagtctcttttc

SEQ ID NO: 69863 - DNA, 15 bp, Homo sapiens
tgacaagtctctttt

SEQ ID NO: 69864 - DNA, 15 bp, Homo sapiens
ttgacaagtctcttt

SEQ ID NO: 69865 - DNA, 15 bp, Homo sapiens
cttgacaagtctctt

SEQ ID NO: 69866 - DNA, 15 bp, Homo sapiens
tcttgacaagtctct

SEQ ID NO: 69867 - DNA, 15 bp, Homo sapiens
ctcttgacaagtctc

SEQ ID NO: 69868 - DNA, 15 bp, Homo sapiens
cctcttgacaagtct

SEQ ID NO: 69869 - DNA, 15 bp, Homo sapiens
acctcttgacaagtc

SEQ ID NO: 69870 - DNA, 15 bp, Homo sapiens
tacctcttgacaagt

SEQ ID NO: 69871 - DNA, 15 bp, Homo sapiens
ttacctcttgacaag

SEQ ID NO: 69872 - DNA, 15 bp, Homo sapiens
cttacctcttgacaa

SEQ ID NO: 69873 - DNA, 15 bp, Homo sapiens
tcttacctcttgaca

SEQ ID NO: 69874 - DNA, 15 bp, Homo sapiens
ctcttacctcttgac

SEQ ID NO: 69875 - DNA, 15 bp, Homo sapiens
gctcttacctcttga

SEQ ID NO: 69876 - DNA, 15 bp, Homo sapiens
ggctcttacctcttg

SEQ ID NO: 69877 - DNA, 15 bp, Homo sapiens
aggctcttacctctt

SEQ ID NO: 69878 - DNA, 15 bp, Homo sapiens
aaggctcttacctct

SEQ ID NO: 69879 - DNA, 15 bp, Homo sapiens
caaggctcttacctc

SEQ ID NO: 69880 - DNA, 15 bp, Homo sapiens
ccaaggctcttacct

SEQ ID NO: 69881 - DNA, 15 bp, Homo sapiens
gccaaggctcttacc

SEQ ID NO: 69882 - DNA, 15 bp, Homo sapiens
agccaaggctcttac

SEQ ID NO: 69883 - DNA, 15 bp, Homo sapiens
tagccaaggctctta

SEQ ID NO: 69884 - DNA, 15 bp, Homo sapiens
gtagccaaggctctt

SEQ ID NO: 69885 - DNA, 15 bp, Homo sapiens
tgtagccaaggctct

SEQ ID NO: 69886 - DNA, 15 bp, Homo sapiens
ttgtagccaaggctc

SEQ ID NO: 69887 - DNA, 15 bp, Homo sapiens
tttgtagccaaggct

SEQ ID NO: 69888 - DNA, 15 bp, Homo sapiens
atttgtagccaaggc

SEQ ID NO: 69889 - DNA, 15 bp, Homo sapiens
catttgtagccaagg

SEQ ID NO: 69890 - DNA, 15 bp, Homo sapiens
tcatttgtagccaag

SEQ ID NO: 69891 - DNA, 15 bp, Homo sapiens
gtcatttgtagccaa

SEQ ID NO: 69892 - DNA, 15 bp, Homo sapiens
ggtcatttgtagcca

SEQ ID NO: 69893 - DNA, 15 bp, Homo sapiens
aggtcatttgtagcc

SEQ ID NO: 69894 - DNA, 15 bp, Homo sapiens
caggtcatttgtagc

SEQ ID NO: 69895 - DNA, 15 bp, Homo sapiens
ccaggtcatttgtag

SEQ ID NO: 69896 - DNA, 15 bp, Homo sapiens
accaggtcatttgta

SEQ ID NO: 69897 - DNA, 15 bp, Homo sapiens
caccaggtcatttgt

SEQ ID NO: 69898 - DNA, 15 bp, Homo sapiens
acaccaggtcatttg

SEQ ID NO: 69899 - DNA, 15 bp, Homo sapiens
aacaccaggtcattt

SEQ ID NO: 69900 - DNA, 15 bp, Homo sapiens
gaacaccaggtcatt

SEQ ID NO: 69901 - DNA, 15 bp, Homo sapiens
ggaacaccaggtcat

SEQ ID NO: 69902 - DNA, 15 bp, Homo sapiens
aggaacaccaggtca

SEQ ID NO: 69903 - DNA, 15 bp, Homo sapiens
caggaacaccaggtc

SEQ ID NO: 69904 - DNA, 15 bp, Homo sapiens
gcaggaacaccaggt

SEQ ID NO: 69905 - DNA, 15 bp, Homo sapiens
agcaggaacaccagg

SEQ ID NO: 69906 - DNA, 15 bp, Homo sapiens
gagcaggaacaccag

SEQ ID NO: 69907 - DNA, 15 bp, Homo sapiens
tgagcaggaacacca

SEQ ID NO: 69908 - DNA, 15 bp, Homo sapiens
atgagcaggaacacc

SEQ ID NO: 69909 - DNA, 15 bp, Homo sapiens
aatgagcaggaacac

SEQ ID NO: 69910 - DNA, 15 bp, Homo sapiens
taatgagcaggaaca

SEQ ID NO: 69911 - DNA, 15 bp, Homo sapiens
gtaatgagcaggaac

SEQ ID NO: 69912 - DNA, 15 bp, Homo sapiens
agtaatgagcaggaa

SEQ ID NO: 69913 - DNA, 15 bp, Homo sapiens
aagtaatgagcagga

SEQ ID NO: 69914 - DNA, 15 bp, Homo sapiens
aaagtaatgagcagg

SEQ ID NO: 69915 - DNA, 15 bp, Homo sapiens
aaaagtaatgagcag

SEQ ID NO: 69916 - DNA, 15 bp, Homo sapiens
gaaaagtaatgagca

SEQ ID NO: 69917 - DNA, 15 bp, Homo sapiens
tgaaaagtaatgagc

SEQ ID NO: 69918 - DNA, 15 bp, Homo sapiens
ttgaaaagtaatgag

SEQ ID NO: 69919 - DNA, 15 bp, Homo sapiens
attgaaaagtaatga

SEQ ID NO: 69920 - DNA, 15 bp, Homo sapiens
gattgaaaagtaatg

SEQ ID NO: 69921 - DNA, 15 bp, Homo sapiens
agattgaaaagtaat

SEQ ID NO: 69922 - DNA, 15 bp, Homo sapiens
gagattgaaaagtaa

SEQ ID NO: 69923 - DNA, 15 bp, Homo sapiens
tgagattgaaaagta

SEQ ID NO: 69924 - DNA, 15 bp, Homo sapiens
atgagattgaaaagt

SEQ ID NO: 69925 - DNA, 15 bp, Homo sapiens
aatgagattgaaaag

SEQ ID NO: 69926 - DNA, 15 bp, Homo sapiens
caatgagattgaaaa

SEQ ID NO: 69927 - DNA, 15 bp, Homo sapiens
tcaatgagattgaaa

SEQ ID NO: 69928 - DNA, 15 bp, Homo sapiens
gtcaatgagattgaa

SEQ ID NO: 69929 - DNA, 15 bp, Homo sapiens
ggtcaatgagattga

SEQ ID NO: 69930 - DNA, 15 bp, Homo sapiens
aggtcaatgagattg

SEQ ID NO: 69931 - DNA, 15 bp, Homo sapiens
aaggtcaatgagatt

SEQ ID NO: 69932 - DNA, 15 bp, Homo sapiens
taaggtcaatgagat

SEQ ID NO: 69933 - DNA, 15 bp, Homo sapiens
ttaaggtcaatgaga

SEQ ID NO: 69934 - DNA, 15 bp, Homo sapiens
gttaaggtcaatgag

SEQ ID NO: 69935 - DNA, 15 bp, Homo sapiens
agttaaggtcaatga

SEQ ID NO: 69936 - DNA, 15 bp, Homo sapiens
aagttaaggtcaatg

SEQ ID NO: 69937 - DNA, 15 bp, Homo sapiens
aaagttaaggtcaat

SEQ ID NO: 69938 - DNA, 15 bp, Homo sapiens
aaaagttaaggtcaa

SEQ ID NO: 69939 - DNA, 15 bp, Homo sapiens
taaaagttaaggtca

SEQ ID NO: 69940 - DNA, 15 bp, Homo sapiens
ttaaaagttaaggtc

SEQ ID NO: 69941 - DNA, 15 bp, Homo sapiens
tttaaaagttaaggt

SEQ ID NO: 69942 - DNA, 15 bp, Homo sapiens
gtttaaaagttaagg

SEQ ID NO: 69943 - DNA, 15 bp, Homo sapiens
agtttaaaagttaag

SEQ ID NO: 69944 - DNA, 15 bp, Homo sapiens
tagtttaaaagttaa

SEQ ID NO: 69945 - DNA, 15 bp, Homo sapiens
atagtttaaaagtta

SEQ ID NO: 69946 - DNA, 15 bp, Homo sapiens
tatagtttaaaagtt

SEQ ID NO: 69947 - DNA, 15 bp, Homo sapiens
ttatagtttaaaagt

SEQ ID NO: 69948 - DNA, 15 bp, Homo sapiens
tttatagtttaaaag

SEQ ID NO: 69949 - DNA, 15 bp, Homo sapiens
ttttatagtttaaaa

SEQ ID NO: 69950 - DNA, 15 bp, Homo sapiens
gttttatagtttaaa

SEQ ID NO: 69951 - DNA, 15 bp, Homo sapiens
tgttttatagtttaa

SEQ ID NO: 69952 - DNA, 15 bp, Homo sapiens
ctgttttatagttta

SEQ ID NO: 69953 - DNA, 15 bp, Homo sapiens
gctgttttatagttt

SEQ ID NO: 69954 - DNA, 15 bp, Homo sapiens
ggctgttttatagtt

SEQ ID NO: 69955 - DNA, 15 bp, Homo sapiens
tggctgttttatagt

SEQ ID NO: 69956 - DNA, 15 bp, Homo sapiens
ttggctgttttatag

SEQ ID NO: 69957 - DNA, 15 bp, Homo sapiens
attggctgttttata

SEQ ID NO: 69958 - DNA, 15 bp, Homo sapiens
tattggctgttttat

SEQ ID NO: 69959 - DNA, 15 bp, Homo sapiens
atattggctgtttta

SEQ ID NO: 69960 - DNA, 15 bp, Homo sapiens
aatattggctgtttt

SEQ ID NO: 69961 - DNA, 15 bp, Homo sapiens
aaatattggctgttt

SEQ ID NO: 69962 - DNA, 15 bp, Homo sapiens
taaatattggctgtt

SEQ ID NO: 69963 - DNA, 15 bp, Homo sapiens
ataaatattggctgt

SEQ ID NO: 69964 - DNA, 15 bp, Homo sapiens
aataaatattggctg

SEQ ID NO: 69965 - DNA, 15 bp, Homo sapiens
taataaatattggct

SEQ ID NO: 69966 - DNA, 15 bp, Homo sapiens
ctaataaatattggc

SEQ ID NO: 69967 - DNA, 15 bp, Homo sapiens
cctaataaatattgg

SEQ ID NO: 69968 - DNA, 15 bp, Homo sapiens
gcctaataaatattg

SEQ ID NO: 69969 - DNA, 15 bp, Homo sapiens
tgcctaataaatatt

SEQ ID NO: 69970 - DNA, 15 bp, Homo sapiens
gtgcctaataaatat

SEQ ID NO: 69971 - DNA, 15 bp, Homo sapiens
agtgcctaataaata

SEQ ID NO: 69972 - DNA, 15 bp, Homo sapiens
cagtgcctaataaat

SEQ ID NO: 69973 - DNA, 15 bp, Homo sapiens
tcagtgcctaataaa

SEQ ID NO: 69974 - DNA, 15 bp, Homo sapiens
atcagtgcctaataa

SEQ ID NO: 69975 - DNA, 15 bp, Homo sapiens
aatcagtgcctaata

SEQ ID NO: 69976 - DNA, 15 bp, Homo sapiens
aaatcagtgcctaat

SEQ ID NO: 69977 - DNA, 15 bp, Homo sapiens
gaaatcagtgcctaa

SEQ ID NO: 69978 - DNA, 15 bp, Homo sapiens
tgaaatcagtgccta

SEQ ID NO: 69979 - DNA, 15 bp, Homo sapiens
atgaaatcagtgcct

SEQ ID NO: 69980 - DNA, 15 bp, Homo sapiens
catgaaatcagtgcc

SEQ ID NO: 69981 - DNA, 15 bp, Homo sapiens
gcatgaaatcagtgc

SEQ ID NO: 69982 - DNA, 15 bp, Homo sapiens
ggcatgaaatcagtg

SEQ ID NO: 69983 - DNA, 15 bp, Homo sapiens
tggcatgaaatcagt

SEQ ID NO: 69984 - DNA, 15 bp, Homo sapiens
ctggcatgaaatcag

SEQ ID NO: 69985 - DNA, 15 bp, Homo sapiens
tctggcatgaaatca

SEQ ID NO: 69986 - DNA, 15 bp, Homo sapiens
ctctggcatgaaatc

SEQ ID NO: 69987 - DNA, 15 bp, Homo sapiens
tctctggcatgaaat

SEQ ID NO: 69988 - DNA, 15 bp, Homo sapiens
gtctctggcatgaaa

SEQ ID NO: 69989 - DNA, 15 bp, Homo sapiens
tgtctctggcatgaa

SEQ ID NO: 69990 - DNA, 15 bp, Homo sapiens
gtgtctctggcatga

SEQ ID NO: 69991 - DNA, 15 bp, Homo sapiens
agtgtctctggcatg

SEQ ID NO: 69992 - DNA, 15 bp, Homo sapiens
gagtgtctctggcat

SEQ ID NO: 69993 - DNA, 15 bp, Homo sapiens
agagtgtctctggca

SEQ ID NO: 69994 - DNA, 15 bp, Homo sapiens
cagagtgtctctggc

SEQ ID NO: 69995 - DNA, 15 bp, Homo sapiens
ccagagtgtctctgg

SEQ ID NO: 69996 - DNA, 15 bp, Homo sapiens
cccagagtgtctctg

SEQ ID NO: 69997 - DNA, 15 bp, Homo sapiens
gcccagagtgtctct

SEQ ID NO: 69998 - DNA, 15 bp, Homo sapiens
tgcccagagtgtctc

SEQ ID NO: 69999 - DNA, 15 bp, Homo sapiens
atgcccagagtgtct

SEQ ID NO: 70000 - DNA, 15 bp, Homo sapiens
catgcccagagtgtc

SEQ ID NO: 70001 - DNA, 15 bp, Homo sapiens
tcatgcccagagtgt

SEQ ID NO: 70002 - DNA, 15 bp, Homo sapiens
ttcatgcccagagtg

SEQ ID NO: 70003 - DNA, 15 bp, Homo sapiens
tttcatgcccagagt

SEQ ID NO: 70004 - DNA, 15 bp, Homo sapiens
ctttcatgcccagag

SEQ ID NO: 70005 - DNA, 15 bp, Homo sapiens
tctttcatgcccaga

SEQ ID NO: 70006 - DNA, 15 bp, Homo sapiens
ttctttcatgcccag

SEQ ID NO: 70007 - DNA, 15 bp, Homo sapiens
tttctttcatgccca

SEQ ID NO: 70008 - DNA, 15 bp, Homo sapiens
ctttctttcatgccc

SEQ ID NO: 70009 - DNA, 15 bp, Homo sapiens
actttctttcatgcc

SEQ ID NO: 70010 - DNA, 15 bp, Homo sapiens
tactttctttcatgc

SEQ ID NO: 70011 - DNA, 15 bp, Homo sapiens
ttactttctttcatg

SEQ ID NO: 70012 - DNA, 15 bp, Homo sapiens
attactttctttcat

SEQ ID NO: 70013 - DNA, 15 bp, Homo sapiens
cattactttctttca

SEQ ID NO: 70014 - DNA, 15 bp, Homo sapiens
tcattactttctttc

SEQ ID NO: 70015 - DNA, 15 bp, Homo sapiens
atcattactttcttt

SEQ ID NO: 70016 - DNA, 15 bp, Homo sapiens
tatcattactttctt

SEQ ID NO: 70017 - DNA, 15 bp, Homo sapiens
ttatcattactttct

SEQ ID NO: 70018 - DNA, 15 bp, Homo sapiens
attatcattactttc

SEQ ID NO: 70019 - DNA, 15 bp, Homo sapiens
tattatcattacttt

SEQ ID NO: 70020 - DNA, 15 bp, Homo sapiens
ctattatcattactt

SEQ ID NO: 70021 - DNA, 15 bp, Homo sapiens
actattatcattact

SEQ ID NO: 70022 - DNA, 15 bp, Homo sapiens
aactattatcattac

SEQ ID NO: 70023 - DNA, 15 bp, Homo sapiens
taactattatcatta

SEQ ID NO: 70024 - DNA, 15 bp, Homo sapiens
ttaactattatcatt

SEQ ID NO: 70025 - DNA, 15 bp, Homo sapiens
attaactattatcat

SEQ ID NO: 70026 - DNA, 15 bp, Homo sapiens
aattaactattatca

SEQ ID NO: 70027 - DNA, 15 bp, Homo sapiens
aaattaactattatc

SEQ ID NO: 70028 - DNA, 15 bp, Homo sapiens
aaaattaactattat

SEQ ID NO: 70029 - DNA, 15 bp, Homo sapiens
taaaattaactatta

SEQ ID NO: 70030 - DNA, 15 bp, Homo sapiens
ataaaattaactatt

SEQ ID NO: 70031 - DNA, 15 bp, Homo sapiens
tataaaattaactat

SEQ ID NO: 70032 - DNA, 15 bp, Homo sapiens
atataaaattaacta

SEQ ID NO: 70033 - DNA, 15 bp, Homo sapiens
tatataaaattaact

SEQ ID NO: 70034 - DNA, 15 bp, Homo sapiens
ctatataaaattaac

SEQ ID NO: 70035 - DNA, 15 bp, Homo sapiens
gctatataaaattaa

SEQ ID NO: 70036 - DNA, 15 bp, Homo sapiens
cgctatataaaatta

SEQ ID NO: 70037 - DNA, 15 bp, Homo sapiens
acgctatataaaatt

SEQ ID NO: 70038 - DNA, 15 bp, Homo sapiens
aacgctatataaaat

SEQ ID NO: 70039 - DNA, 15 bp, Homo sapiens
caacgctatataaaa

SEQ ID NO: 70040 - DNA, 15 bp, Homo sapiens
acaacgctatataaa

SEQ ID NO: 70041 - DNA, 15 bp, Homo sapiens
aacaacgctatataa

SEQ ID NO: 70042 - DNA, 15 bp, Homo sapiens
taacaacgctatata

SEQ ID NO: 70043 - DNA, 15 bp, Homo sapiens
gtaacaacgctatat

SEQ ID NO: 70044 - DNA, 15 bp, Homo sapiens
ggtaacaacgctata

SEQ ID NO: 70045 - DNA, 15 bp, Homo sapiens
tggtaacaacgctat

SEQ ID NO: 70046 - DNA, 15 bp, Homo sapiens
atggtaacaacgcta

SEQ ID NO: 70047 - DNA, 15 bp, Homo sapiens
aatggtaacaacgct

SEQ ID NO: 70048 - DNA, 15 bp, Homo sapiens
aaatggtaacaacgc

SEQ ID NO: 70049 - DNA, 15 bp, Homo sapiens
taaatggtaacaacg

SEQ ID NO: 70050 - DNA, 15 bp, Homo sapiens
gtaaatggtaacaac

SEQ ID NO: 70051 - DNA, 15 bp, Homo sapiens
tgtaaatggtaacaa

SEQ ID NO: 70052 - DNA, 15 bp, Homo sapiens
ttgtaaatggtaaca

SEQ ID NO: 70053 - DNA, 15 bp, Homo sapiens
gttgtaaatggtaac

SEQ ID NO: 70054 - DNA, 15 bp, Homo sapiens
ggttgtaaatggtaa

SEQ ID NO: 70055 - DNA, 15 bp, Homo sapiens
aggttgtaaatggta

SEQ ID NO: 70056 - DNA, 15 bp, Homo sapiens
aaggttgtaaatggt

SEQ ID NO: 70057 - DNA, 15 bp, Homo sapiens
aaaggttgtaaatgg

SEQ ID NO: 70058 - DNA, 15 bp, Homo sapiens
aaaaggttgtaaatg

SEQ ID NO: 70059 - DNA, 15 bp, Homo sapiens
aaaaaggttgtaaat

SEQ ID NO: 70060 - DNA, 15 bp, Homo sapiens
aaaaaaggttgtaaa

SEQ ID NO: 70061 - DNA, 15 bp, Homo sapiens
aaaaaaaggttgtaa

SEQ ID NO: 70062 - DNA, 15 bp, Homo sapiens
aaaaaaaaggttgta

SEQ ID NO: 70063 - DNA, 15 bp, Homo sapiens
aaaaaaaaaggttgt

SEQ ID NO: 70064 - DNA, 15 bp, Homo sapiens
aaaaaaaaaaggttg

SEQ ID NO: 70065 - DNA, 15 bp, Homo sapiens
aaaaaaaaaaaggtt

SEQ ID NO: 70066 - DNA, 15 bp, Homo sapiens
aaaaaaaaaaaaggt

SEQ ID NO: 70067 - DNA, 15 bp, Homo sapiens
aaaaaaaaaaaaagg

SEQ ID NO: 70068 - DNA, 15 bp, Homo sapiens
gttaaaaaaaaaaaa

SEQ ID NO: 70069 - DNA, 15 bp, Homo sapiens
ggttaaaaaaaaaaa

SEQ ID NO: 70070 - DNA, 15 bp, Homo sapiens
aggttaaaaaaaaaa

SEQ ID NO: 70071 - DNA, 15 bp, Homo sapiens
gaggttaaaaaaaaa

SEQ ID NO: 70072 - DNA, 15 bp, Homo sapiens
tagaggttaaaaaaa

SEQ ID NO: 70073 - DNA, 15 bp, Homo sapiens
atagaggttaaaaaa

SEQ ID NO: 70074 - DNA, 15 bp, Homo sapiens
gatagaggttaaaaa

SEQ ID NO: 70075 - DNA, 15 bp, Homo sapiens
tgatagaggttaaaa

SEQ ID NO: 70076 - DNA, 15 bp, Homo sapiens
atgatagaggttaaa

SEQ ID NO: 70077 - DNA, 15 bp, Homo sapiens
gatgatagaggttaa

SEQ ID NO: 70078 - DNA, 15 bp, Homo sapiens
agatgatagaggtta

SEQ ID NO: 70079 - DNA, 15 bp, Homo sapiens
gagatgatagaggtt

SEQ ID NO: 70080 - DNA, 15 bp, Homo sapiens
tgagatgatagaggt

SEQ ID NO: 70081 - DNA, 15 bp, Homo sapiens
ttgagatgatagagg

SEQ ID NO: 70082 - DNA, 15 bp, Homo sapiens
attgagatgatagag

SEQ ID NO: 70083 - DNA, 15 bp, Homo sapiens
aattgagatgataga

SEQ ID NO: 70084 - DNA, 15 bp, Homo sapiens
taattgagatgatag

SEQ ID NO: 70085 - DNA, 15 bp, Homo sapiens
ttaattgagatgata

SEQ ID NO: 70086 - DNA, 15 bp, Homo sapiens
tttaattgagatgat

SEQ ID NO: 70087 - DNA, 15 bp, Homo sapiens
ctttaattgagatga

SEQ ID NO: 70088 - DNA, 15 bp, Homo sapiens
actttaattgagatg

SEQ ID NO: 70089 - DNA, 15 bp, Homo sapiens
cactttaattgagat

SEQ ID NO: 70090 - DNA, 15 bp, Homo sapiens
gcactttaattgaga

SEQ ID NO: 70091 - DNA, 15 bp, Homo sapiens
tgcactttaattgag

SEQ ID NO: 70092 - DNA, 15 bp, Homo sapiens
ctgcactttaattga

SEQ ID NO: 70093 - DNA, 15 bp, Homo sapiens
tctgcactttaattg

SEQ ID NO: 70094 - DNA, 15 bp, Homo sapiens
ctctgcactttaatt

SEQ ID NO: 70095 - DNA, 15 bp, Homo sapiens
tctctgcactttaat

SEQ ID NO: 70096 - DNA, 15 bp, Homo sapiens
ctctctgcactttaa

SEQ ID NO: 70097 - DNA, 15 bp, Homo sapiens
tctctctgcacttta

SEQ ID NO: 70098 - DNA, 15 bp, Homo sapiens
gtctctctgcacttt

SEQ ID NO: 70099 - DNA, 15 bp, Homo sapiens
ggtctctctgcactt

SEQ ID NO: 70100 - DNA, 15 bp, Homo sapiens
gggtctctctgcact

SEQ ID NO: 70101 - DNA, 15 bp, Homo sapiens
agggtctctctgcac

SEQ ID NO: 70102 - DNA, 15 bp, Homo sapiens
cagggtctctctgca

SEQ ID NO: 70103 - DNA, 15 bp, Homo sapiens
ccagggtctctctgc

SEQ ID NO: 70104 - DNA, 15 bp, Homo sapiens
cccagggtctctctg

SEQ ID NO: 70105 - DNA, 15 bp, Homo sapiens
tcccagggtctctct

SEQ ID NO: 70106 - DNA, 15 bp, Homo sapiens
ttcccagggtctctc

SEQ ID NO: 70107 - DNA, 15 bp, Homo sapiens
cttcccagggtctct

SEQ ID NO: 70108 - DNA, 15 bp, Homo sapiens
tcttcccagggtctc

SEQ ID NO: 70109 - DNA, 15 bp, Homo sapiens
ttcttcccagggtct

SEQ ID NO: 70110 - DNA, 15 bp, Homo sapiens
cttcttcccagggtc

SEQ ID NO: 70111 - DNA, 15 bp, Homo sapiens
ccttcttcccagggt

SEQ ID NO: 70112 - DNA, 15 bp, Homo sapiens
accttcttcccaggg

SEQ ID NO: 70113 - DNA, 15 bp, Homo sapiens
taccttcttcccagg

SEQ ID NO: 70114 - DNA, 15 bp, Homo sapiens
ttaccttcttcccag

SEQ ID NO: 70115 - DNA, 15 bp, Homo sapiens
gttaccttcttccca

SEQ ID NO: 70116 - DNA, 15 bp, Homo sapiens
agttaccttcttccc

SEQ ID NO: 70117 - DNA, 15 bp, Homo sapiens
tagttaccttcttcc

SEQ ID NO: 70118 - DNA, 15 bp, Homo sapiens
atagttaccttcttc

SEQ ID NO: 70119 - DNA, 15 bp, Homo sapiens
tatagttaccttctt

SEQ ID NO: 70120 - DNA, 15 bp, Homo sapiens
atatagttaccttct

SEQ ID NO: 70121 - DNA, 15 bp, Homo sapiens
aatatagttaccttc

SEQ ID NO: 70122 - DNA, 15 bp, Homo sapiens
aaatatagttacctt

SEQ ID NO: 70123 - DNA, 15 bp, Homo sapiens
taaatatagttacct

SEQ ID NO: 70124 - DNA, 15 bp, Homo sapiens
ataaatatagttacc

SEQ ID NO: 70125 - DNA, 15 bp, Homo sapiens
aataaatatagttac

SEQ ID NO: 70126 - DNA, 15 bp, Homo sapiens
taataaatatagtta

SEQ ID NO: 70127 - DNA, 15 bp, Homo sapiens
ataataaatatagtt

SEQ ID NO: 70128 - DNA, 15 bp, Homo sapiens
gataataaatatagt

SEQ ID NO: 70129 - DNA, 15 bp, Homo sapiens
ggataataaatatag

SEQ ID NO: 70130 - DNA, 15 bp, Homo sapiens
gggataataaatata

SEQ ID NO: 70131 - DNA, 15 bp, Homo sapiens
tgggataataaatat

SEQ ID NO: 70132 - DNA, 15 bp, Homo sapiens
ctgggataataaata

SEQ ID NO: 70133 - DNA, 15 bp, Homo sapiens
tctgggataataaat

SEQ ID NO: 70134 - DNA, 15 bp, Homo sapiens
atctgggataataaa

SEQ ID NO: 70135 - DNA, 15 bp, Homo sapiens
catctgggataataa

SEQ ID NO: 70136 - DNA, 15 bp, Homo sapiens
tcatctgggataata

SEQ ID NO: 70137 - DNA, 15 bp, Homo sapiens
ctcatctgggataat

SEQ ID NO: 70138 - DNA, 15 bp, Homo sapiens
cctcatctgggataa

SEQ ID NO: 70139 - DNA, 15 bp, Homo sapiens
ccctcatctgggata

SEQ ID NO: 70140 - DNA, 15 bp, Homo sapiens
tccctcatctgggat

SEQ ID NO: 70141 - DNA, 15 bp, Homo sapiens
ttccctcatctggga

SEQ ID NO: 70142 - DNA, 15 bp, Homo sapiens
cttccctcatctggg

SEQ ID NO: 70143 - DNA, 15 bp, Homo sapiens
acttccctcatctgg

SEQ ID NO: 70144 - DNA, 15 bp, Homo sapiens
cacttccctcatctg

SEQ ID NO: 70145 - DNA, 15 bp, Homo sapiens
tcacttccctcatct

SEQ ID NO: 70146 - DNA, 15 bp, Homo sapiens
ctcacttccctcatc

SEQ ID NO: 70147 - DNA, 15 bp, Homo sapiens
cctcacttccctcat

SEQ ID NO: 70148 - DNA, 15 bp, Homo sapiens
gcctcacttccctca

SEQ ID NO: 70149 - DNA, 15 bp, Homo sapiens
agcctcacttccctc

SEQ ID NO: 70150 - DNA, 15 bp, Homo sapiens
aagcctcacttccct

SEQ ID NO: 70151 - DNA, 15 bp, Homo sapiens
caagcctcacttccc

SEQ ID NO: 70152 - DNA, 15 bp, Homo sapiens
acaagcctcacttcc

SEQ ID NO: 70153 - DNA, 15 bp, Homo sapiens
tacaagcctcacttc

SEQ ID NO: 70154 - DNA, 15 bp, Homo sapiens
ctacaagcctcactt

SEQ ID NO: 70155 - DNA, 15 bp, Homo sapiens
cctacaagcctcact

SEQ ID NO: 70156 - DNA, 15 bp, Homo sapiens
ccctacaagcctcac

SEQ ID NO: 70157 - DNA, 15 bp, Homo sapiens
tccctacaagcctca

SEQ ID NO: 70158 - DNA, 15 bp, Homo sapiens
ttccctacaagcctc

SEQ ID NO: 70159 - DNA, 15 bp, Homo sapiens
attccctacaagcct

SEQ ID NO: 70160 - DNA, 15 bp, Homo sapiens
aattccctacaagcc

SEQ ID NO: 70161 - DNA, 15 bp, Homo sapiens
caattccctacaagc

SEQ ID NO: 70162 - DNA, 15 bp, Homo sapiens
ccaattccctacaag

SEQ ID NO: 70163 - DNA, 15 bp, Homo sapiens
accaattccctacaa

SEQ ID NO: 70164 - DNA, 15 bp, Homo sapiens
taccaattccctaca

SEQ ID NO: 70165 - DNA, 15 bp, Homo sapiens
ctaccaattccctac

SEQ ID NO: 70166 - DNA, 15 bp, Homo sapiens
gctaccaattcccta

SEQ ID NO: 70167 - DNA, 15 bp, Homo sapiens
agctaccaattccct

SEQ ID NO: 70168 - DNA, 15 bp, Homo sapiens
cagctaccaattccc

SEQ ID NO: 70169 - DNA, 15 bp, Homo sapiens
tcagctaccaattcc

SEQ ID NO: 70170 - DNA, 15 bp, Homo sapiens
atcagctaccaattc

SEQ ID NO: 70171 - DNA, 15 bp, Homo sapiens
aatcagctaccaatt

SEQ ID NO: 70172 - DNA, 15 bp, Homo sapiens
gaatcagctaccaat

SEQ ID NO: 70173 - DNA, 15 bp, Homo sapiens
tgaatcagctaccaa

SEQ ID NO: 70174 - DNA, 15 bp, Homo sapiens
ttgaatcagctacca

SEQ ID NO: 70175 - DNA, 15 bp, Homo sapiens
cttgaatcagctacc

SEQ ID NO: 70176 - DNA, 15 bp, Homo sapiens
ccttgaatcagctac

SEQ ID NO: 70177 - DNA, 15 bp, Homo sapiens
accttgaatcagcta

SEQ ID NO: 70178 - DNA, 15 bp, Homo sapiens
gaccttgaatcagct

SEQ ID NO: 70179 - DNA, 15 bp, Homo sapiens
tgaccttgaatcagc

SEQ ID NO: 70180 - DNA, 15 bp, Homo sapiens
gtgaccttgaatcag

SEQ ID NO: 70181 - DNA, 15 bp, Homo sapiens
ggtgaccttgaatca

SEQ ID NO: 70182 - DNA, 15 bp, Homo sapiens
gggtgaccttgaatc

SEQ ID NO: 70183 - DNA, 15 bp, Homo sapiens
tgggtgaccttgaat

SEQ ID NO: 70184 - DNA, 15 bp, Homo sapiens
ctgggtgaccttgaa

SEQ ID NO: 70185 - DNA, 15 bp, Homo sapiens
gctgggtgaccttga

SEQ ID NO: 70186 - DNA, 15 bp, Homo sapiens
tgctgggtgaccttg

SEQ ID NO: 70187 - DNA, 15 bp, Homo sapiens
ctgctgggtgacctt

SEQ ID NO: 70188 - DNA, 15 bp, Homo sapiens
cctgctgggtgacct

SEQ ID NO: 70189 - DNA, 15 bp, Homo sapiens
acctgctgggtgacc

SEQ ID NO: 70190 - DNA, 15 bp, Homo sapiens
tacctgctgggtgac

SEQ ID NO: 70191 - DNA, 15 bp, Homo sapiens
ttacctgctgggtga

SEQ ID NO: 70192 - DNA, 15 bp, Homo sapiens
tttacctgctgggtg

SEQ ID NO: 70193 - DNA, 15 bp, Homo sapiens
atttacctgctgggt

SEQ ID NO: 70194 - DNA, 15 bp, Homo sapiens
tatttacctgctggg

SEQ ID NO: 70195 - DNA, 15 bp, Homo sapiens
ttatttacctgctgg

SEQ ID NO: 70196 - DNA, 15 bp, Homo sapiens
gttatttacctgctg

SEQ ID NO: 70197 - DNA, 15 bp, Homo sapiens
tgttatttacctgct

SEQ ID NO: 70198 - DNA, 15 bp, Homo sapiens
ctgttatttacctgc

SEQ ID NO: 70199 - DNA, 15 bp, Homo sapiens
actgttatttacctg

SEQ ID NO: 70200 - DNA, 15 bp, Homo sapiens
cactgttatttacct

SEQ ID NO: 70201 - DNA, 15 bp, Homo sapiens
ccactgttatttacc

SEQ ID NO: 70202 - DNA, 15 bp, Homo sapiens
accactgttatttac

SEQ ID NO: 70203 - DNA, 15 bp, Homo sapiens
caccactgttattta

SEQ ID NO: 70204 - DNA, 15 bp, Homo sapiens
ccaccactgttattt

SEQ ID NO: 70205 - DNA, 15 bp, Homo sapiens
cccaccactgttatt

SEQ ID NO: 70206 - DNA, 15 bp, Homo sapiens
tcccaccactgttat

SEQ ID NO: 70207 - DNA, 15 bp, Homo sapiens
gtcccaccactgtta

SEQ ID NO: 70208 - DNA, 15 bp, Homo sapiens
ggtcccaccactgtt

SEQ ID NO: 70209 - DNA, 15 bp, Homo sapiens
tggtcccaccactgt

SEQ ID NO: 70210 - DNA, 15 bp, Homo sapiens
ctggtcccaccactg

SEQ ID NO: 70211 - DNA, 15 bp, Homo sapiens
tctggtcccaccact

SEQ ID NO: 70212 - DNA, 15 bp, Homo sapiens
gtctggtcccaccac

SEQ ID NO: 70213 - DNA, 15 bp, Homo sapiens
ggtctggtcccacca

SEQ ID NO: 70214 - DNA, 15 bp, Homo sapiens
gggtctggtcccacc

SEQ ID NO: 70215 - DNA, 15 bp, Homo sapiens
tgggtctggtcccac

SEQ ID NO: 70216 - DNA, 15 bp, Homo sapiens
ttgggtctggtccca

SEQ ID NO: 70217 - DNA, 15 bp, Homo sapiens
attgggtctggtccc

SEQ ID NO: 70218 - DNA, 15 bp, Homo sapiens
aattgggtctggtcc

SEQ ID NO: 70219 - DNA, 15 bp, Homo sapiens
taattgggtctggtc

SEQ ID NO: 70220 - DNA, 15 bp, Homo sapiens
gtaattgggtctggt

SEQ ID NO: 70221 - DNA, 15 bp, Homo sapiens
ggtaattgggtctgg

SEQ ID NO: 70222 - DNA, 15 bp, Homo sapiens
tggtaattgggtctg

SEQ ID NO: 70223 - DNA, 15 bp, Homo sapiens
ctggtaattgggtct

SEQ ID NO: 70224 - DNA, 15 bp, Homo sapiens
cctggtaattgggtc

SEQ ID NO: 70225 - DNA, 15 bp, Homo sapiens
acctggtaattgggt

SEQ ID NO: 70226 - DNA, 15 bp, Homo sapiens
tacctggtaattggg

SEQ ID NO: 70227 - DNA, 15 bp, Homo sapiens
atacctggtaattgg

SEQ ID NO: 70228 - DNA, 15 bp, Homo sapiens
catacctggtaattg

SEQ ID NO: 70229 - DNA, 15 bp, Homo sapiens
acatacctggtaatt

SEQ ID NO: 70230 - DNA, 15 bp, Homo sapiens
aacatacctggtaat

SEQ ID NO: 70231 - DNA, 15 bp, Homo sapiens
aaacatacctggtaa

SEQ ID NO: 70232 - DNA, 15 bp, Homo sapiens
aaaacatacctggta

SEQ ID NO: 70233 - DNA, 15 bp, Homo sapiens
gaaaacatacctggt

SEQ ID NO: 70234 - DNA, 15 bp, Homo sapiens
ggaaaacatacctgg

SEQ ID NO: 70235 - DNA, 15 bp, Homo sapiens
aggaaaacatacctg

SEQ ID NO: 70236 - DNA, 15 bp, Homo sapiens
gaggaaaacatacct

SEQ ID NO: 70237 - DNA, 15 bp, Homo sapiens
agaggaaaacatacc

SEQ ID NO: 70238 - DNA, 15 bp, Homo sapiens
cagaggaaaacatac

SEQ ID NO: 70239 - DNA, 15 bp, Homo sapiens
acagaggaaaacata

SEQ ID NO: 70240 - DNA, 15 bp, Homo sapiens
tacagaggaaaacat

SEQ ID NO: 70241 - DNA, 15 bp, Homo sapiens
gtacagaggaaaaca

SEQ ID NO: 70242 - DNA, 15 bp, Homo sapiens
ggtacagaggaaaac

SEQ ID NO: 70243 - DNA, 15 bp, Homo sapiens
cggtacagaggaaaa

SEQ ID NO: 70244 - DNA, 15 bp, Homo sapiens
gcggtacagaggaaa

SEQ ID NO: 70245 - DNA, 15 bp, Homo sapiens
tgcggtacagaggaa

SEQ ID NO: 70246 - DNA, 15 bp, Homo sapiens
ctgcggtacagagga

SEQ ID NO: 70247 - DNA, 15 bp, Homo sapiens
actgcggtacagagg

SEQ ID NO: 70248 - DNA, 15 bp, Homo sapiens
tactgcggtacagag

SEQ ID NO: 70249 - DNA, 15 bp, Homo sapiens
gtactgcggtacaga

SEQ ID NO: 70250 - DNA, 15 bp, Homo sapiens
tgtactgcggtacag

SEQ ID NO: 70251 - DNA, 15 bp, Homo sapiens
atgtactgcggtaca

SEQ ID NO: 70252 - DNA, 15 bp, Homo sapiens
catgtactgcggtac

SEQ ID NO: 70253 - DNA, 15 bp, Homo sapiens
gcatgtactgcggta

SEQ ID NO: 70254 - DNA, 15 bp, Homo sapiens
ggcatgtactgcggt

SEQ ID NO: 70255 - DNA, 15 bp, Homo sapiens
aggcatgtactgcgg

SEQ ID NO: 70256 - DNA, 15 bp, Homo sapiens
caggcatgtactgcg

SEQ ID NO: 70257 - DNA, 15 bp, Homo sapiens
tcaggcatgtactgc

SEQ ID NO: 70258 - DNA, 15 bp, Homo sapiens
ctcaggcatgtactg

SEQ ID NO: 70259 - DNA, 15 bp, Homo sapiens
tctcaggcatgtact

SEQ ID NO: 70260 - DNA, 15 bp, Homo sapiens
atctcaggcatgtac

SEQ ID NO: 70261 - DNA, 15 bp, Homo sapiens
aatctcaggcatgta

SEQ ID NO: 70262 - DNA, 15 bp, Homo sapiens
aaatctcaggcatgt

SEQ ID NO: 70263 - DNA, 15 bp, Homo sapiens
taaatctcaggcatg

SEQ ID NO: 70264 - DNA, 15 bp, Homo sapiens
ataaatctcaggcat

SEQ ID NO: 70265 - DNA, 15 bp, Homo sapiens
aataaatctcaggca

SEQ ID NO: 70266 - DNA, 15 bp, Homo sapiens
aaataaatctcaggc

SEQ ID NO: 70267 - DNA, 15 bp, Homo sapiens
caaataaatctcagg

SEQ ID NO: 70268 - DNA, 15 bp, Homo sapiens
acaaataaatctcag

SEQ ID NO: 70269 - DNA, 15 bp, Homo sapiens
cacaaataaatctca

SEQ ID NO: 70270 - DNA, 15 bp, Homo sapiens
acacaaataaatctc

SEQ ID NO: 70271 - DNA, 15 bp, Homo sapiens
cacacaaataaatct

SEQ ID NO: 70272 - DNA, 15 bp, Homo sapiens
acacacaaataaatc

SEQ ID NO: 70273 - DNA, 15 bp, Homo sapiens
aacacacaaataaat

SEQ ID NO: 70274 - DNA, 15 bp, Homo sapiens
caacacacaaataaa

SEQ ID NO: 70275 - DNA, 15 bp, Homo sapiens
tcaacacacaaataa

SEQ ID NO: 70276 - DNA, 15 bp, Homo sapiens
ttcaacacacaaata

SEQ ID NO: 70277 - DNA, 15 bp, Homo sapiens
cttcaacacacaaat

SEQ ID NO: 70278 - DNA, 15 bp, Homo sapiens
gcttcaacacacaaa

SEQ ID NO: 70279 - DNA, 15 bp, Homo sapiens
ggcttcaacacacaa

SEQ ID NO: 70280 - DNA, 15 bp, Homo sapiens
tggcttcaacacaca

SEQ ID NO: 70281 - DNA, 15 bp, Homo sapiens
ctggcttcaacacac

SEQ ID NO: 70282 - DNA, 15 bp, Homo sapiens
actggcttcaacaca

SEQ ID NO: 70283 - DNA, 15 bp, Homo sapiens
cactggcttcaacac

SEQ ID NO: 70284 - DNA, 15 bp, Homo sapiens
ccactggcttcaaca

SEQ ID NO: 70285 - DNA, 15 bp, Homo sapiens
accactggcttcaac

SEQ ID NO: 70286 - DNA, 15 bp, Homo sapiens
taccactggcttcaa

SEQ ID NO: 70287 - DNA, 15 bp, Homo sapiens
gtaccactggcttca

SEQ ID NO: 70288 - DNA, 15 bp, Homo sapiens
ggtaccactggcttc

SEQ ID NO: 70289 - DNA, 15 bp, Homo sapiens
aggtaccactggctt

SEQ ID NO: 70290 - DNA, 15 bp, Homo sapiens
taggtaccactggct

SEQ ID NO: 70291 - DNA, 15 bp, Homo sapiens
ttaggtaccactggc

SEQ ID NO: 70292 - DNA, 15 bp, Homo sapiens
attaggtaccactgg

SEQ ID NO: 70293 - DNA, 15 bp, Homo sapiens
cattaggtaccactg

SEQ ID NO: 70294 - DNA, 15 bp, Homo sapiens
acattaggtaccact

SEQ ID NO: 70295 - DNA, 15 bp, Homo sapiens
tacattaggtaccac

SEQ ID NO: 70296 - DNA, 15 bp, Homo sapiens
atacattaggtacca

SEQ ID NO: 70297 - DNA, 15 bp, Homo sapiens
aatacattaggtacc

SEQ ID NO: 70298 - DNA, 15 bp, Homo sapiens
aaatacattaggtac

SEQ ID NO: 70299 - DNA, 15 bp, Homo sapiens
taaatacattaggta

SEQ ID NO: 70300 - DNA, 15 bp, Homo sapiens
gtaaatacattaggt

SEQ ID NO: 70301 - DNA, 15 bp, Homo sapiens
tgtaaatacattagg

SEQ ID NO: 70302 - DNA, 15 bp, Homo sapiens
atgtaaatacattag

SEQ ID NO: 70303 - DNA, 15 bp, Homo sapiens
gatgtaaatacatta

SEQ ID NO: 70304 - DNA, 15 bp, Homo sapiens
ggatgtaaatacatt

SEQ ID NO: 70305 - DNA, 15 bp, Homo sapiens
gggatgtaaatacat

SEQ ID NO: 70306 - DNA, 15 bp, Homo sapiens
tgggatgtaaataca

SEQ ID NO: 70307 - DNA, 15 bp, Homo sapiens
ttgggatgtaaatac

SEQ ID NO: 70308 - DNA, 15 bp, Homo sapiens
gttgggatgtaaata

SEQ ID NO: 70309 - DNA, 15 bp, Homo sapiens
ggttgggatgtaaat

SEQ ID NO: 70310 - DNA, 15 bp, Homo sapiens
aggttgggatgtaaa

SEQ ID NO: 70311 - DNA, 15 bp, Homo sapiens
caggttgggatgtaa

SEQ ID NO: 70312 - DNA, 15 bp, Homo sapiens
tcaggttgggatgta

SEQ ID NO: 70313 - DNA, 15 bp, Homo sapiens
ttcaggttgggatgt

SEQ ID NO: 70314 - DNA, 15 bp, Homo sapiens
tttcaggttgggatg

SEQ ID NO: 70315 - DNA, 15 bp, Homo sapiens
gtttcaggttgggat

SEQ ID NO: 70316 - DNA, 15 bp, Homo sapiens
agtttcaggttggga

SEQ ID NO: 70317 - DNA, 15 bp, Homo sapiens
gagtttcaggttggg

SEQ ID NO: 70318 - DNA, 15 bp, Homo sapiens
ggagtttcaggttgg

SEQ ID NO: 70319 - DNA, 15 bp, Homo sapiens
aggagtttcaggttg

SEQ ID NO: 70320 - DNA, 15 bp, Homo sapiens
taggagtttcaggtt

SEQ ID NO: 70321 - DNA, 15 bp, Homo sapiens
ataggagtttcaggt

SEQ ID NO: 70322 - DNA, 15 bp, Homo sapiens
gataggagtttcagg

SEQ ID NO: 70323 - DNA, 15 bp, Homo sapiens
ggataggagtttcag

SEQ ID NO: 70324 - DNA, 15 bp, Homo sapiens
tggataggagtttca

SEQ ID NO: 70325 - DNA, 15 bp, Homo sapiens
gtggataggagtttc

SEQ ID NO: 70326 - DNA, 15 bp, Homo sapiens
agtggataggagttt

SEQ ID NO: 70327 - DNA, 15 bp, Homo sapiens
aagtggataggagtt

SEQ ID NO: 70328 - DNA, 15 bp, Homo sapiens
taagtggataggagt

SEQ ID NO: 70329 - DNA, 15 bp, Homo sapiens
ataagtggataggag

SEQ ID NO: 70330 - DNA, 15 bp, Homo sapiens
aataagtggatagga

SEQ ID NO: 70331 - DNA, 15 bp, Homo sapiens
aaataagtggatagg

SEQ ID NO: 70332 - DNA, 15 bp, Homo sapiens
taaataagtggatag

SEQ ID NO: 70333 - DNA, 15 bp, Homo sapiens
gtaaataagtggata

SEQ ID NO: 70334 - DNA, 15 bp, Homo sapiens
ggtaaataagtggat

SEQ ID NO: 70335 - DNA, 15 bp, Homo sapiens
aggtaaataagtgga

SEQ ID NO: 70336 - DNA, 15 bp, Homo sapiens
aaggtaaataagtgg

SEQ ID NO: 70337 - DNA, 15 bp, Homo sapiens
aaaggtaaataagtg

SEQ ID NO: 70338 - DNA, 15 bp, Homo sapiens
aaaaggtaaataagt

SEQ ID NO: 70339 - DNA, 15 bp, Homo sapiens
taaaaggtaaataag

SEQ ID NO: 70340 - DNA, 15 bp, Homo sapiens
ttaaaaggtaaataa

SEQ ID NO: 70341 - DNA, 15 bp, Homo sapiens
attaaaaggtaaata

SEQ ID NO: 70342 - DNA, 15 bp, Homo sapiens
cattaaaaggtaaat

SEQ ID NO: 70343 - DNA, 15 bp, Homo sapiens
tcattaaaaggtaaa

SEQ ID NO: 70344 - DNA, 15 bp, Homo sapiens
ctcattaaaaggtaa

SEQ ID NO: 70345 - DNA, 15 bp, Homo sapiens
gctcattaaaaggta

SEQ ID NO: 70346 - DNA, 15 bp, Homo sapiens
ggctcattaaaaggt

SEQ ID NO: 70347 - DNA, 15 bp, Homo sapiens
aggctcattaaaagg

SEQ ID NO: 70348 - DNA, 15 bp, Homo sapiens
gaggctcattaaaag

SEQ ID NO: 70349 - DNA, 15 bp, Homo sapiens
agaggctcattaaaa

SEQ ID NO: 70350 - DNA, 15 bp, Homo sapiens
aagaggctcattaaa

SEQ ID NO: 70351 - DNA, 15 bp, Homo sapiens
taagaggctcattaa

SEQ ID NO: 70352 - DNA, 15 bp, Homo sapiens
ttaagaggctcatta

SEQ ID NO: 70353 - DNA, 15 bp, Homo sapiens
gttaagaggctcatt

SEQ ID NO: 70354 - DNA, 15 bp, Homo sapiens
agttaagaggctcat

SEQ ID NO: 70355 - DNA, 15 bp, Homo sapiens
gagttaagaggctca

SEQ ID NO: 70356 - DNA, 15 bp, Homo sapiens
tgagttaagaggctc

SEQ ID NO: 70357 - DNA, 15 bp, Homo sapiens
ttgagttaagaggct

SEQ ID NO: 70358 - DNA, 15 bp, Homo sapiens
cttgagttaagaggc

SEQ ID NO: 70359 - DNA, 15 bp, Homo sapiens
acttgagttaagagg

SEQ ID NO: 70360 - DNA, 15 bp, Homo sapiens
cacttgagttaagag

SEQ ID NO: 70361 - DNA, 15 bp, Homo sapiens
gcacttgagttaaga

SEQ ID NO: 70362 - DNA, 15 bp, Homo sapiens
tgcacttgagttaag

SEQ ID NO: 70363 - DNA, 15 bp, Homo sapiens
ctgcacttgagttaa

SEQ ID NO: 70364 - DNA, 15 bp, Homo sapiens
actgcacttgagtta

SEQ ID NO: 70365 - DNA, 15 bp, Homo sapiens
gactgcacttgagtt

SEQ ID NO: 70366 - DNA, 15 bp, Homo sapiens
agactgcacttgagt

SEQ ID NO: 70367 - DNA, 15 bp, Homo sapiens
cagactgcacttgag

SEQ ID NO: 70368 - DNA, 15 bp, Homo sapiens
tcagactgcacttga

SEQ ID NO: 70369 - DNA, 15 bp, Homo sapiens
ctcagactgcacttg

SEQ ID NO: 70370 - DNA, 15 bp, Homo sapiens
cctcagactgcactt

SEQ ID NO: 70371 - DNA, 15 bp, Homo sapiens
tcctcagactgcact

SEQ ID NO: 70372 - DNA, 15 bp, Homo sapiens
gtcctcagactgcac

SEQ ID NO: 70373 - DNA, 15 bp, Homo sapiens
ggtcctcagactgca

SEQ ID NO: 70374 - DNA, 15 bp, Homo sapiens
tggtcctcagactgc

SEQ ID NO: 70375 - DNA, 15 bp, Homo sapiens
ctggtcctcagactg

SEQ ID NO: 70376 - DNA, 15 bp, Homo sapiens
gctggtcctcagact

SEQ ID NO: 70377 - DNA, 15 bp, Homo sapiens
tgctggtcctcagac

SEQ ID NO: 70378 - DNA, 15 bp, Homo sapiens
ctgctggtcctcaga

SEQ ID NO: 70379 - DNA, 15 bp, Homo sapiens
gctgctggtcctcag

SEQ ID NO: 70380 - DNA, 15 bp, Homo sapiens
tgctgctggtcctca

SEQ ID NO: 70381 - DNA, 15 bp, Homo sapiens
atgctgctggtcctc

SEQ ID NO: 70382 - DNA, 15 bp, Homo sapiens
gatgctgctggtcct

SEQ ID NO: 70383 - DNA, 15 bp, Homo sapiens
tgatgctgctggtcc

SEQ ID NO: 70384 - DNA, 15 bp, Homo sapiens
ctgatgctgctggtc

SEQ ID NO: 70385 - DNA, 15 bp, Homo sapiens
cctgatgctgctggt

SEQ ID NO: 70386 - DNA, 15 bp, Homo sapiens
tcctgatgctgctgg

SEQ ID NO: 70387 - DNA, 15 bp, Homo sapiens
atcctgatgctgctg

SEQ ID NO: 70388 - DNA, 15 bp, Homo sapiens
gatcctgatgctgct

SEQ ID NO: 70389 - DNA, 15 bp, Homo sapiens
tgatcctgatgctgc

SEQ ID NO: 70390 - DNA, 15 bp, Homo sapiens
gtgatcctgatgctg

SEQ ID NO: 70391 - DNA, 15 bp, Homo sapiens
agtgatcctgatgct

SEQ ID NO: 70392 - DNA, 15 bp, Homo sapiens
aagtgatcctgatgc

SEQ ID NO: 70393 - DNA, 15 bp, Homo sapiens
caagtgatcctgatg

SEQ ID NO: 70394 - DNA, 15 bp, Homo sapiens
ccaagtgatcctgat

SEQ ID NO: 70395 - DNA, 15 bp, Homo sapiens
cccaagtgatcctga

SEQ ID NO: 70396 - DNA, 15 bp, Homo sapiens
tcccaagtgatcctg

SEQ ID NO: 70397 - DNA, 15 bp, Homo sapiens
ttcccaagtgatcct

SEQ ID NO: 70398 - DNA, 15 bp, Homo sapiens
gttcccaagtgatcc

SEQ ID NO: 70399 - DNA, 15 bp, Homo sapiens
agttcccaagtgatc

SEQ ID NO: 70400 - DNA, 15 bp, Homo sapiens
aagttcccaagtgat

SEQ ID NO: 70401 - DNA, 15 bp, Homo sapiens
caagttcccaagtga

SEQ ID NO: 70402 - DNA, 15 bp, Homo sapiens
acaagttcccaagtg

SEQ ID NO: 70403 - DNA, 15 bp, Homo sapiens
aacaagttcccaagt

SEQ ID NO: 70404 - DNA, 15 bp, Homo sapiens
taacaagttcccaag

SEQ ID NO: 70405 - DNA, 15 bp, Homo sapiens
ctaacaagttcccaa

SEQ ID NO: 70406 - DNA, 15 bp, Homo sapiens
tctaacaagttccca

SEQ ID NO: 70407 - DNA, 15 bp, Homo sapiens
ttctaacaagttccc

SEQ ID NO: 70408 - DNA, 15 bp, Homo sapiens
tttctaacaagttcc

SEQ ID NO: 70409 - DNA, 15 bp, Homo sapiens
atttctaacaagttc

SEQ ID NO: 70410 - DNA, 15 bp, Homo sapiens
aatttctaacaagtt

SEQ ID NO: 70411 - DNA, 15 bp, Homo sapiens
gaatttctaacaagt

SEQ ID NO: 70412 - DNA, 15 bp, Homo sapiens
tgaatttctaacaag

SEQ ID NO: 70413 - DNA, 15 bp, Homo sapiens
ctgaatttctaacaa

SEQ ID NO: 70414 - DNA, 15 bp, Homo sapiens
gctgaatttctaaca

SEQ ID NO: 70415 - DNA, 15 bp, Homo sapiens
tgctgaatttctaac

SEQ ID NO: 70416 - DNA, 15 bp, Homo sapiens
ttgctgaatttctaa

SEQ ID NO: 70417 - DNA, 15 bp, Homo sapiens
gttgctgaatttcta

SEQ ID NO: 70418 - DNA, 15 bp, Homo sapiens
ggttgctgaatttct

SEQ ID NO: 70419 - DNA, 15 bp, Homo sapiens
aggttgctgaatttc

SEQ ID NO: 70420 - DNA, 15 bp, Homo sapiens
caggttgctgaattt

SEQ ID NO: 70421 - DNA, 15 bp, Homo sapiens
ccaggttgctgaatt

SEQ ID NO: 70422 - DNA, 15 bp, Homo sapiens
cccaggttgctgaat

SEQ ID NO: 70423 - DNA, 15 bp, Homo sapiens
gcccaggttgctgaa

SEQ ID NO: 70424 - DNA, 15 bp, Homo sapiens
ggcccaggttgctga

SEQ ID NO: 70425 - DNA, 15 bp, Homo sapiens
gggcccaggttgctg

SEQ ID NO: 70426 - DNA, 15 bp, Homo sapiens
tgggcccaggttgct

SEQ ID NO: 70427 - DNA, 15 bp, Homo sapiens
ctgggcccaggttgc

SEQ ID NO: 70428 - DNA, 15 bp, Homo sapiens
gctgggcccaggttg

SEQ ID NO: 70429 - DNA, 15 bp, Homo sapiens
agctgggcccaggtt

SEQ ID NO: 70430 - DNA, 15 bp, Homo sapiens
gagctgggcccaggt

SEQ ID NO: 70431 - DNA, 15 bp, Homo sapiens
tgagctgggcccagg

SEQ ID NO: 70432 - DNA, 15 bp, Homo sapiens
ctgagctgggcccag

SEQ ID NO: 70433 - DNA, 15 bp, Homo sapiens
tctgagctgggccca

SEQ ID NO: 70434 - DNA, 15 bp, Homo sapiens
gtctgagctgggccc

SEQ ID NO: 70435 - DNA, 15 bp, Homo sapiens
ggtctgagctgggcc

SEQ ID NO: 70436 - DNA, 15 bp, Homo sapiens
aggtctgagctgggc

SEQ ID NO: 70437 - DNA, 15 bp, Homo sapiens
taggtctgagctggg

SEQ ID NO: 70438 - DNA, 15 bp, Homo sapiens
gtaggtctgagctgg

SEQ ID NO: 70439 - DNA, 15 bp, Homo sapiens
ggtaggtctgagctg

SEQ ID NO: 70440 - DNA, 15 bp, Homo sapiens
cggtaggtctgagct

SEQ ID NO: 70441 - DNA, 15 bp, Homo sapiens
tcggtaggtctgagc

SEQ ID NO: 70442 - DNA, 15 bp, Homo sapiens
ttcggtaggtctgag

SEQ ID NO: 70443 - DNA, 15 bp, Homo sapiens
attcggtaggtctga

SEQ ID NO: 70444 - DNA, 15 bp, Homo sapiens
gattcggtaggtctg

SEQ ID NO: 70445 - DNA, 15 bp, Homo sapiens
tgattcggtaggtct

SEQ ID NO: 70446 - DNA, 15 bp, Homo sapiens
ctgattcggtaggtc

SEQ ID NO: 70447 - DNA, 15 bp, Homo sapiens
tctgattcggtaggt

SEQ ID NO: 70448 - DNA, 15 bp, Homo sapiens
ttctgattcggtagg

SEQ ID NO: 70449 - DNA, 15 bp, Homo sapiens
attctgattcggtag

SEQ ID NO: 70450 - DNA, 15 bp, Homo sapiens
gattctgattcggta

SEQ ID NO: 70451 - DNA, 15 bp, Homo sapiens
agattctgattcggt

SEQ ID NO: 70452 - DNA, 15 bp, Homo sapiens
cagattctgattcgg

SEQ ID NO: 70453 - DNA, 15 bp, Homo sapiens
acagattctgattcg

SEQ ID NO: 70454 - DNA, 15 bp, Homo sapiens
cacagattctgattc

SEQ ID NO: 70455 - DNA, 15 bp, Homo sapiens
gcacagattctgatt

SEQ ID NO: 70456 - DNA, 15 bp, Homo sapiens
tgcacagattctgat

SEQ ID NO: 70457 - DNA, 15 bp, Homo sapiens
atgcacagattctga

SEQ ID NO: 70458 - DNA, 15 bp, Homo sapiens
aatgcacagattctg

SEQ ID NO: 70459 - DNA, 15 bp, Homo sapiens
aaatgcacagattct

SEQ ID NO: 70460 - DNA, 15 bp, Homo sapiens
aaaatgcacagattc

SEQ ID NO: 70461 - DNA, 15 bp, Homo sapiens
taaaatgcacagatt

SEQ ID NO: 70462 - DNA, 15 bp, Homo sapiens
ttaaaatgcacagat

SEQ ID NO: 70463 - DNA, 15 bp, Homo sapiens
gttaaaatgcacaga

SEQ ID NO: 70464 - DNA, 15 bp, Homo sapiens
tgttaaaatgcacag

SEQ ID NO: 70465 - DNA, 15 bp, Homo sapiens
ttgttaaaatgcaca

SEQ ID NO: 70466 - DNA, 15 bp, Homo sapiens
cttgttaaaatgcac

SEQ ID NO: 70467 - DNA, 15 bp, Homo sapiens
ccttgttaaaatgca

SEQ ID NO: 70468 - DNA, 15 bp, Homo sapiens
accttgttaaaatgc

SEQ ID NO: 70469 - DNA, 15 bp, Homo sapiens
aaccttgttaaaatg

SEQ ID NO: 70470 - DNA, 15 bp, Homo sapiens
gaaccttgttaaaat

SEQ ID NO: 70471 - DNA, 15 bp, Homo sapiens
agaaccttgttaaaa

SEQ ID NO: 70472 - DNA, 15 bp, Homo sapiens
aagaaccttgttaaa

SEQ ID NO: 70473 - DNA, 15 bp, Homo sapiens
caagaaccttgttaa

SEQ ID NO: 70474 - DNA, 15 bp, Homo sapiens
tcaagaaccttgtta

SEQ ID NO: 70475 - DNA, 15 bp, Homo sapiens
ctcaagaaccttgtt

SEQ ID NO: 70476 - DNA, 15 bp, Homo sapiens
actcaagaaccttgt

SEQ ID NO: 70477 - DNA, 15 bp, Homo sapiens
cactcaagaaccttg

SEQ ID NO: 70478 - DNA, 15 bp, Homo sapiens
ccactcaagaacctt

SEQ ID NO: 70479 - DNA, 15 bp, Homo sapiens
accactcaagaacct

SEQ ID NO: 70480 - DNA, 15 bp, Homo sapiens
aaccactcaagaacc

SEQ ID NO: 70481 - DNA, 15 bp, Homo sapiens
caaccactcaagaac

SEQ ID NO: 70482 - DNA, 15 bp, Homo sapiens
tcaaccactcaagaa

SEQ ID NO: 70483 - DNA, 15 bp, Homo sapiens
ttcaaccactcaaga

SEQ ID NO: 70484 - DNA, 15 bp, Homo sapiens
gttcaaccactcaag

SEQ ID NO: 70485 - DNA, 15 bp, Homo sapiens
tgttcaaccactcaa

SEQ ID NO: 70486 - DNA, 15 bp, Homo sapiens
gtgttcaaccactca

SEQ ID NO: 70487 - DNA, 15 bp, Homo sapiens
tgtgttcaaccactc

SEQ ID NO: 70488 - DNA, 15 bp, Homo sapiens
gtgtgttcaaccact

SEQ ID NO: 70489 - DNA, 15 bp, Homo sapiens
tgtgtgttcaaccac

SEQ ID NO: 70490 - DNA, 15 bp, Homo sapiens
atgtgtgttcaacca

SEQ ID NO: 70491 - DNA, 15 bp, Homo sapiens
aatgtgtgttcaacc

SEQ ID NO: 70492 - DNA, 15 bp, Homo sapiens
taatgtgtgttcaac

SEQ ID NO: 70493 - DNA, 15 bp, Homo sapiens
ttaatgtgtgttcaa

SEQ ID NO: 70494 - DNA, 15 bp, Homo sapiens
tttaatgtgtgttca

SEQ ID NO: 70495 - DNA, 15 bp, Homo sapiens
ctttaatgtgtgttc

SEQ ID NO: 70496 - DNA, 15 bp, Homo sapiens
gctttaatgtgtgtt

SEQ ID NO: 70497 - DNA, 15 bp, Homo sapiens
tgctttaatgtgtgt

SEQ ID NO: 70498 - DNA, 15 bp, Homo sapiens
atgctttaatgtgtg

SEQ ID NO: 70499 - DNA, 15 bp, Homo sapiens
catgctttaatgtgt

SEQ ID NO: 70500 - DNA, 15 bp, Homo sapiens
tcatgctttaatgtg

SEQ ID NO: 70501 - DNA, 15 bp, Homo sapiens
ctcatgctttaatgt

SEQ ID NO: 70502 - DNA, 15 bp, Homo sapiens
tctcatgctttaatg

SEQ ID NO: 70503 - DNA, 15 bp, Homo sapiens
ttctcatgctttaat

SEQ ID NO: 70504 - DNA, 15 bp, Homo sapiens
cttctcatgctttaa

SEQ ID NO: 70505 - DNA, 15 bp, Homo sapiens
gcttctcatgcttta

SEQ ID NO: 70506 - DNA, 15 bp, Homo sapiens
tgcttctcatgcttt

SEQ ID NO: 70507 - DNA, 15 bp, Homo sapiens
atgcttctcatgctt

SEQ ID NO: 70508 - DNA, 15 bp, Homo sapiens
aatgcttctcatgct

SEQ ID NO: 70509 - DNA, 15 bp, Homo sapiens
caatgcttctcatgc

SEQ ID NO: 70510 - DNA, 15 bp, Homo sapiens
tcaatgcttctcatg

SEQ ID NO: 70511 - DNA, 15 bp, Homo sapiens
ttcaatgcttctcat

SEQ ID NO: 70512 - DNA, 15 bp, Homo sapiens
gttcaatgcttctca

SEQ ID NO: 70513 - DNA, 15 bp, Homo sapiens
agttcaatgcttctc

SEQ ID NO: 70514 - DNA, 15 bp, Homo sapiens
tagttcaatgcttct

SEQ ID NO: 70515 - DNA, 15 bp, Homo sapiens
ctagttcaatgcttc

SEQ ID NO: 70516 - DNA, 15 bp, Homo sapiens
tctagttcaatgctt

SEQ ID NO: 70517 - DNA, 15 bp, Homo sapiens
gtctagttcaatgct

SEQ ID NO: 70518 - DNA, 15 bp, Homo sapiens
tgtctagttcaatgc

SEQ ID NO: 70519 - DNA, 15 bp, Homo sapiens
atgtctagttcaatg

SEQ ID NO: 70520 - DNA, 15 bp, Homo sapiens
catgtctagttcaat

SEQ ID NO: 70521 - DNA, 15 bp, Homo sapiens
acatgtctagttcaa

SEQ ID NO: 70522 - DNA, 15 bp, Homo sapiens
tacatgtctagttca

SEQ ID NO: 70523 - DNA, 15 bp, Homo sapiens
ctacatgtctagttc

SEQ ID NO: 70524 - DNA, 15 bp, Homo sapiens
gctacatgtctagtt

SEQ ID NO: 70525 - DNA, 15 bp, Homo sapiens
ggctacatgtctagt

SEQ ID NO: 70526 - DNA, 15 bp, Homo sapiens
tggctacatgtctag

SEQ ID NO: 70527 - DNA, 15 bp, Homo sapiens
ctggctacatgtcta

SEQ ID NO: 70528 - DNA, 15 bp, Homo sapiens
cctggctacatgtct

SEQ ID NO: 70529 - DNA, 15 bp, Homo sapiens
acctggctacatgtc

SEQ ID NO: 70530 - DNA, 15 bp, Homo sapiens
tacctggctacatgt

SEQ ID NO: 70531 - DNA, 15 bp, Homo sapiens
ttacctggctacatg

SEQ ID NO: 70532 - DNA, 15 bp, Homo sapiens
tttacctggctacat

SEQ ID NO: 70533 - DNA, 15 bp, Homo sapiens
ctttacctggctaca

SEQ ID NO: 70534 - DNA, 15 bp, Homo sapiens
cctttacctggctac

SEQ ID NO: 70535 - DNA, 15 bp, Homo sapiens
gcctttacctggcta

SEQ ID NO: 70536 - DNA, 15 bp, Homo sapiens
ggcctttacctggct

SEQ ID NO: 70537 - DNA, 15 bp, Homo sapiens
aggcctttacctggc

SEQ ID NO: 70538 - DNA, 15 bp, Homo sapiens
aaggcctttacctgg

SEQ ID NO: 70539 - DNA, 15 bp, Homo sapiens
caaggcctttacctg

SEQ ID NO: 70540 - DNA, 15 bp, Homo sapiens
gcaaggcctttacct

SEQ ID NO: 70541 - DNA, 15 bp, Homo sapiens
ggcaaggcctttacc

SEQ ID NO: 70542 - DNA, 15 bp, Homo sapiens
aggcaaggcctttac

SEQ ID NO: 70543 - DNA, 15 bp, Homo sapiens
caggcaaggccttta

SEQ ID NO: 70544 - DNA, 15 bp, Homo sapiens
tcaggcaaggccttt

SEQ ID NO: 70545 - DNA, 15 bp, Homo sapiens
ctcaggcaaggcctt

SEQ ID NO: 70546 - DNA, 15 bp, Homo sapiens
tctcaggcaaggcct

SEQ ID NO: 70547 - DNA, 15 bp, Homo sapiens
atctcaggcaaggcc

SEQ ID NO: 70548 - DNA, 15 bp, Homo sapiens
catctcaggcaaggc

SEQ ID NO: 70549 - DNA, 15 bp, Homo sapiens
ccatctcaggcaagg

SEQ ID NO: 70550 - DNA, 15 bp, Homo sapiens
accatctcaggcaag

SEQ ID NO: 70551 - DNA, 15 bp, Homo sapiens
aaccatctcaggcaa

SEQ ID NO: 70552 - DNA, 15 bp, Homo sapiens
caaccatctcaggca

SEQ ID NO: 70553 - DNA, 15 bp, Homo sapiens
ccaaccatctcaggc

SEQ ID NO: 70554 - DNA, 15 bp, Homo sapiens
gccaaccatctcagg

SEQ ID NO: 70555 - DNA, 15 bp, Homo sapiens
tgccaaccatctcag

SEQ ID NO: 70556 - DNA, 15 bp, Homo sapiens
ttgccaaccatctca

SEQ ID NO: 70557 - DNA, 15 bp, Homo sapiens
tttgccaaccatctc

SEQ ID NO: 70558 - DNA, 15 bp, Homo sapiens
ctttgccaaccatct

SEQ ID NO: 70559 - DNA, 15 bp, Homo sapiens
cctttgccaaccatc

SEQ ID NO: 70560 - DNA, 15 bp, Homo sapiens
gcctttgccaaccat

SEQ ID NO: 70561 - DNA, 15 bp, Homo sapiens
ggcctttgccaacca

SEQ ID NO: 70562 - DNA, 15 bp, Homo sapiens
aggcctttgccaacc

SEQ ID NO: 70563 - DNA, 15 bp, Homo sapiens
gaggcctttgccaac

SEQ ID NO: 70564 - DNA, 15 bp, Homo sapiens
tgaggcctttgccaa

SEQ ID NO: 70565 - DNA, 15 bp, Homo sapiens
atgaggcctttgcca

SEQ ID NO: 70566 - DNA, 15 bp, Homo sapiens
aatgaggcctttgcc

SEQ ID NO: 70567 - DNA, 15 bp, Homo sapiens
caatgaggcctttgc

SEQ ID NO: 70568 - DNA, 15 bp, Homo sapiens
gcaatgaggcctttg

SEQ ID NO: 70569 - DNA, 15 bp, Homo sapiens
tgcaatgaggccttt

SEQ ID NO: 70570 - DNA, 15 bp, Homo sapiens
ctgcaatgaggcctt

SEQ ID NO: 70571 - DNA, 15 bp, Homo sapiens
gctgcaatgaggcct

SEQ ID NO: 70572 - DNA, 15 bp, Homo sapiens
tgctgcaatgaggcc

SEQ ID NO: 70573 - DNA, 15 bp, Homo sapiens
atgctgcaatgaggc

SEQ ID NO: 70574 - DNA, 15 bp, Homo sapiens
aatgctgcaatgagg

SEQ ID NO: 70575 - DNA, 15 bp, Homo sapiens
gaatgctgcaatgag

SEQ ID NO: 70576 - DNA, 15 bp, Homo sapiens
tgaatgctgcaatga

SEQ ID NO: 70577 - DNA, 15 bp, Homo sapiens
atgaatgctgcaatg

SEQ ID NO: 70578 - DNA, 15 bp, Homo sapiens
aatgaatgctgcaat

SEQ ID NO: 70579 - DNA, 15 bp, Homo sapiens
caatgaatgctgcaa

SEQ ID NO: 70580 - DNA, 15 bp, Homo sapiens
ccaatgaatgctgca

SEQ ID NO: 70581 - DNA, 15 bp, Homo sapiens
gccaatgaatgctgc

SEQ ID NO: 70582 - DNA, 15 bp, Homo sapiens
tgccaatgaatgctg

SEQ ID NO: 70583 - DNA, 15 bp, Homo sapiens
ctgccaatgaatgct

SEQ ID NO: 70584 - DNA, 15 bp, Homo sapiens
cctgccaatgaatgc

SEQ ID NO: 70585 - DNA, 15 bp, Homo sapiens
gcctgccaatgaatg

SEQ ID NO: 70586 - DNA, 15 bp, Homo sapiens
ggcctgccaatgaat

SEQ ID NO: 70587 - DNA, 15 bp, Homo sapiens
tggcctgccaatgaa

SEQ ID NO: 70588 - DNA, 15 bp, Homo sapiens
gtggcctgccaatga

SEQ ID NO: 70589 - DNA, 15 bp, Homo sapiens
tgtggcctgccaatg

SEQ ID NO: 70590 - DNA, 15 bp, Homo sapiens
ctgtggcctgccaat

SEQ ID NO: 70591 - DNA, 15 bp, Homo sapiens
actgtggcctgccaa

SEQ ID NO: 70592 - DNA, 15 bp, Homo sapiens
aactgtggcctgcca

SEQ ID NO: 70593 - DNA, 15 bp, Homo sapiens
gaactgtggcctgcc

SEQ ID NO: 70594 - DNA, 15 bp, Homo sapiens
agaactgtggcctgc

SEQ ID NO: 70595 - DNA, 15 bp, Homo sapiens
aagaactgtggcctg

SEQ ID NO: 70596 - DNA, 15 bp, Homo sapiens
aaagaactgtggcct

SEQ ID NO: 70597 - DNA, 15 bp, Homo sapiens
aaaagaactgtggcc

SEQ ID NO: 70598 - DNA, 15 bp, Homo sapiens
caaaagaactgtggc

SEQ ID NO: 70599 - DNA, 15 bp, Homo sapiens
ccaaaagaactgtgg

SEQ ID NO: 70600 - DNA, 15 bp, Homo sapiens
gccaaaagaactgtg

SEQ ID NO: 70601 - DNA, 15 bp, Homo sapiens
tgccaaaagaactgt

SEQ ID NO: 70602 - DNA, 15 bp, Homo sapiens
ctgccaaaagaactg

SEQ ID NO: 70603 - DNA, 15 bp, Homo sapiens
gctgccaaaagaact

SEQ ID NO: 70604 - DNA, 15 bp, Homo sapiens
agctgccaaaagaac

SEQ ID NO: 70605 - DNA, 15 bp, Homo sapiens
gagctgccaaaagaa

SEQ ID NO: 70606 - DNA, 15 bp, Homo sapiens
agagctgccaaaaga

SEQ ID NO: 70607 - DNA, 15 bp, Homo sapiens
cagagctgccaaaag

SEQ ID NO: 70608 - DNA, 15 bp, Homo sapiens
gcagagctgccaaaa

SEQ ID NO: 70609 - DNA, 15 bp, Homo sapiens
agcagagctgccaaa

SEQ ID NO: 70610 - DNA, 15 bp, Homo sapiens
aagcagagctgccaa

SEQ ID NO: 70611 - DNA, 15 bp, Homo sapiens
gaagcagagctgcca

SEQ ID NO: 70612 - DNA, 15 bp, Homo sapiens
ggaagcagagctgcc

SEQ ID NO: 70613 - DNA, 15 bp, Homo sapiens
aggaagcagagctgc

SEQ ID NO: 70614 - DNA, 15 bp, Homo sapiens
caggaagcagagctg

SEQ ID NO: 70615 - DNA, 15 bp, Homo sapiens
tcaggaagcagagct

SEQ ID NO: 70616 - DNA, 15 bp, Homo sapiens
gtcaggaagcagagc

SEQ ID NO: 70617 - DNA, 15 bp, Homo sapiens
ggtcaggaagcagag

SEQ ID NO: 70618 - DNA, 15 bp, Homo sapiens
aggtcaggaagcaga

SEQ ID NO: 70619 - DNA, 15 bp, Homo sapiens
aaggtcaggaagcag

SEQ ID NO: 70620 - DNA, 15 bp, Homo sapiens
aaaggtcaggaagca

SEQ ID NO: 70621 - DNA, 15 bp, Homo sapiens
gaaaggtcaggaagc

SEQ ID NO: 70622 - DNA, 15 bp, Homo sapiens
tgaaaggtcaggaag

SEQ ID NO: 70623 - DNA, 15 bp, Homo sapiens
gtgaaaggtcaggaa

SEQ ID NO: 70624 - DNA, 15 bp, Homo sapiens
ggtgaaaggtcagga

SEQ ID NO: 70625 - DNA, 15 bp, Homo sapiens
gggtgaaaggtcagg

SEQ ID NO: 70626 - DNA, 15 bp, Homo sapiens
agggtgaaaggtcag

SEQ ID NO: 70627 - DNA, 15 bp, Homo sapiens
gagggtgaaaggtca

SEQ ID NO: 70628 - DNA, 15 bp, Homo sapiens
tgagggtgaaaggtc

SEQ ID NO: 70629 - DNA, 15 bp, Homo sapiens
ctgagggtgaaaggt

SEQ ID NO: 70630 - DNA, 15 bp, Homo sapiens
cctgagggtgaaagg

SEQ ID NO: 70631 - DNA, 15 bp, Homo sapiens
tcctgagggtgaaag

SEQ ID NO: 70632 - DNA, 15 bp, Homo sapiens
ttcctgagggtgaaa

SEQ ID NO: 70633 - DNA, 15 bp, Homo sapiens
cttcctgagggtgaa

SEQ ID NO: 70634 - DNA, 15 bp, Homo sapiens
gcttcctgagggtga

SEQ ID NO: 70635 - DNA, 15 bp, Homo sapiens
cgcttcctgagggtg

SEQ ID NO: 70636 - DNA, 15 bp, Homo sapiens
tcgcttcctgagggt

SEQ ID NO: 70637 - DNA, 15 bp, Homo sapiens
ctcgcttcctgaggg

SEQ ID NO: 70638 - DNA, 15 bp, Homo sapiens
cctcgcttcctgagg

SEQ ID NO: 70639 - DNA, 15 bp, Homo sapiens
gcctcgcttcctgag

SEQ ID NO: 70640 - DNA, 15 bp, Homo sapiens
agcctcgcttcctga

SEQ ID NO: 70641 - DNA, 15 bp, Homo sapiens
cagcctcgcttcctg

SEQ ID NO: 70642 - DNA, 15 bp, Homo sapiens
acagcctcgcttcct

SEQ ID NO: 70643 - DNA, 15 bp, Homo sapiens
aacagcctcgcttcc

SEQ ID NO: 70644 - DNA, 15 bp, Homo sapiens
gaacagcctcgcttc

SEQ ID NO: 70645 - DNA, 15 bp, Homo sapiens
tgaacagcctcgctt

SEQ ID NO: 70646 - DNA, 15 bp, Homo sapiens
gtgaacagcctcgct

SEQ ID NO: 70647 - DNA, 15 bp, Homo sapiens
tgtgaacagcctcgc

SEQ ID NO: 70648 - DNA, 15 bp, Homo sapiens
gtgtgaacagcctcg

SEQ ID NO: 70649 - DNA, 15 bp, Homo sapiens
cgtgtgaacagcctc

SEQ ID NO: 70650 - DNA, 15 bp, Homo sapiens
ccgtgtgaacagcct

SEQ ID NO: 70651 - DNA, 15 bp, Homo sapiens
gccgtgtgaacagcc

SEQ ID NO: 70652 - DNA, 15 bp, Homo sapiens
tgccgtgtgaacagc

SEQ ID NO: 70653 - DNA, 15 bp, Homo sapiens
gtgccgtgtgaacag

SEQ ID NO: 70654 - DNA, 15 bp, Homo sapiens
tgtgccgtgtgaaca

SEQ ID NO: 70655 - DNA, 15 bp, Homo sapiens
gtgtgccgtgtgaac

SEQ ID NO: 70656 - DNA, 15 bp, Homo sapiens
tgtgtgccgtgtgaa

SEQ ID NO: 70657 - DNA, 15 bp, Homo sapiens
gtgtgtgccgtgtga

SEQ ID NO: 70658 - DNA, 15 bp, Homo sapiens
tgtgtgtgccgtgtg

SEQ ID NO: 70659 - DNA, 15 bp, Homo sapiens
atgtgtgtgccgtgt

SEQ ID NO: 70660 - DNA, 15 bp, Homo sapiens
catgtgtgtgccgtg

SEQ ID NO: 70661 - DNA, 15 bp, Homo sapiens
gcatgtgtgtgccgt

SEQ ID NO: 70662 - DNA, 15 bp, Homo sapiens
ggcatgtgtgtgccg

SEQ ID NO: 70663 - DNA, 15 bp, Homo sapiens
tggcatgtgtgtgcc

SEQ ID NO: 70664 - DNA, 15 bp, Homo sapiens
ctggcatgtgtgtgc

SEQ ID NO: 70665 - DNA, 15 bp, Homo sapiens
tctggcatgtgtgtg

SEQ ID NO: 70666 - DNA, 15 bp, Homo sapiens
gtctggcatgtgtgt

SEQ ID NO: 70667 - DNA, 15 bp, Homo sapiens
tgtctggcatgtgtg

SEQ ID NO: 70668 - DNA, 15 bp, Homo sapiens
ctgtctggcatgtgt

SEQ ID NO: 70669 - DNA, 15 bp, Homo sapiens
cctgtctggcatgtg

SEQ ID NO: 70670 - DNA, 15 bp, Homo sapiens
ccctgtctggcatgt

SEQ ID NO: 70671 - DNA, 15 bp, Homo sapiens
accctgtctggcatg

SEQ ID NO: 70672 - DNA, 15 bp, Homo sapiens
gaccctgtctggcat

SEQ ID NO: 70673 - DNA, 15 bp, Homo sapiens
ggaccctgtctggca

SEQ ID NO: 70674 - DNA, 15 bp, Homo sapiens
aggaccctgtctggc

SEQ ID NO: 70675 - DNA, 15 bp, Homo sapiens
gaggaccctgtctgg

SEQ ID NO: 70676 - DNA, 15 bp, Homo sapiens
agaggaccctgtctg

SEQ ID NO: 70677 - DNA, 15 bp, Homo sapiens
cagaggaccctgtct

SEQ ID NO: 70678 - DNA, 15 bp, Homo sapiens
tcagaggaccctgtc

SEQ ID NO: 70679 - DNA, 15 bp, Homo sapiens
ttcagaggaccctgt

SEQ ID NO: 70680 - DNA, 15 bp, Homo sapiens
cttcagaggaccctg

SEQ ID NO: 70681 - DNA, 15 bp, Homo sapiens
gcttcagaggaccct

SEQ ID NO: 70682 - DNA, 15 bp, Homo sapiens
ggcttcagaggaccc

SEQ ID NO: 70683 - DNA, 15 bp, Homo sapiens
tggcttcagaggacc

SEQ ID NO: 70684 - DNA, 15 bp, Homo sapiens
gtggcttcagaggac

SEQ ID NO: 70685 - DNA, 15 bp, Homo sapiens
cgtggcttcagagga

SEQ ID NO: 70686 - DNA, 15 bp, Homo sapiens
ccgtggcttcagagg

SEQ ID NO: 70687 - DNA, 15 bp, Homo sapiens
gccgtggcttcagag

SEQ ID NO: 70688 - DNA, 15 bp, Homo sapiens
agccgtggcttcaga

SEQ ID NO: 70689 - DNA, 15 bp, Homo sapiens
cagccgtggcttcag

SEQ ID NO: 70690 - DNA, 15 bp, Homo sapiens
gcagccgtggcttca

SEQ ID NO: 70691 - DNA, 15 bp, Homo sapiens
ggcagccgtggcttc

SEQ ID NO: 70692 - DNA, 15 bp, Homo sapiens
tggcagccgtggctt

SEQ ID NO: 70693 - DNA, 15 bp, Homo sapiens
ctggcagccgtggct

SEQ ID NO: 70694 - DNA, 15 bp, Homo sapiens
actggcagccgtggc

SEQ ID NO: 70695 - DNA, 15 bp, Homo sapiens
cactggcagccgtgg

SEQ ID NO: 70696 - DNA, 15 bp, Homo sapiens
gcactggcagccgtg

SEQ ID NO: 70697 - DNA, 15 bp, Homo sapiens
tgcactggcagccgt

SEQ ID NO: 70698 - DNA, 15 bp, Homo sapiens
atgcactggcagccg

SEQ ID NO: 70699 - DNA, 15 bp, Homo sapiens
catgcactggcagcc

SEQ ID NO: 70700 - DNA, 15 bp, Homo sapiens
acatgcactggcagc

SEQ ID NO: 70701 - DNA, 15 bp, Homo sapiens
cacatgcactggcag

SEQ ID NO: 70702 - DNA, 15 bp, Homo sapiens
acacatgcactggca

SEQ ID NO: 70703 - DNA, 15 bp, Homo sapiens
gacacatgcactggc

SEQ ID NO: 70704 - DNA, 15 bp, Homo sapiens
ggacacatgcactgg

SEQ ID NO: 70705 - DNA, 15 bp, Homo sapiens
gggacacatgcactg

SEQ ID NO: 70706 - DNA, 15 bp, Homo sapiens
tgggacacatgcact

SEQ ID NO: 70707 - DNA, 15 bp, Homo sapiens
ctgggacacatgcac

SEQ ID NO: 70708 - DNA, 15 bp, Homo sapiens
cctgggacacatgca

SEQ ID NO: 70709 - DNA, 15 bp, Homo sapiens
ccctgggacacatgc

SEQ ID NO: 70710 - DNA, 15 bp, Homo sapiens
tccctgggacacatg

SEQ ID NO: 70711 - DNA, 15 bp, Homo sapiens
ttccctgggacacat

SEQ ID NO: 70712 - DNA, 15 bp, Homo sapiens
tttccctgggacaca

SEQ ID NO: 70713 - DNA, 15 bp, Homo sapiens
ctttccctgggacac

SEQ ID NO: 70714 - DNA, 15 bp, Homo sapiens
gctttccctgggaca

SEQ ID NO: 70715 - DNA, 15 bp, Homo sapiens
agctttccctgggac

SEQ ID NO: 70716 - DNA, 15 bp, Homo sapiens
aagctttccctggga

SEQ ID NO: 70717 - DNA, 15 bp, Homo sapiens
aaagctttccctggg

SEQ ID NO: 70718 - DNA, 15 bp, Homo sapiens
aaaagctttccctgg

SEQ ID NO: 70719 - DNA, 15 bp, Homo sapiens
aaaaagctttccctg

SEQ ID NO: 70720 - DNA, 15 bp, Homo sapiens
gaaaaagctttccct

SEQ ID NO: 70721 - DNA, 15 bp, Homo sapiens
ggaaaaagctttccc

SEQ ID NO: 70722 - DNA, 15 bp, Homo sapiens
aggaaaaagctttcc

SEQ ID NO: 70723 - DNA, 15 bp, Homo sapiens
aaggaaaaagctttc

SEQ ID NO: 70724 - DNA, 15 bp, Homo sapiens
aaaggaaaaagcttt

SEQ ID NO: 70725 - DNA, 15 bp, Homo sapiens
taaaggaaaaagctt

SEQ ID NO: 70726 - DNA, 15 bp, Homo sapiens
ctaaaggaaaaagct

SEQ ID NO: 70727 - DNA, 15 bp, Homo sapiens
actaaaggaaaaagc

SEQ ID NO: 70728 - DNA, 15 bp, Homo sapiens
aactaaaggaaaaag

SEQ ID NO: 70729 - DNA, 15 bp, Homo sapiens
gaactaaaggaaaaa

SEQ ID NO: 70730 - DNA, 15 bp, Homo sapiens
agaactaaaggaaaa

SEQ ID NO: 70731 - DNA, 15 bp, Homo sapiens
gagaactaaaggaaa

SEQ ID NO: 70732 - DNA, 15 bp, Homo sapiens
tgagaactaaaggaa

SEQ ID NO: 70733 - DNA, 15 bp, Homo sapiens
gtgagaactaaagga

SEQ ID NO: 70734 - DNA, 15 bp, Homo sapiens
tgtgagaactaaagg

SEQ ID NO: 70735 - DNA, 15 bp, Homo sapiens
gtgtgagaactaaag

SEQ ID NO: 70736 - DNA, 15 bp, Homo sapiens
tgtgtgagaactaaa

SEQ ID NO: 70737 - DNA, 15 bp, Homo sapiens
ttgtgtgagaactaa

SEQ ID NO: 70738 - DNA, 15 bp, Homo sapiens
gttgtgtgagaacta

SEQ ID NO: 70739 - DNA, 15 bp, Homo sapiens
tgttgtgtgagaact

SEQ ID NO: 70740 - DNA, 15 bp, Homo sapiens
ctgttgtgtgagaac

SEQ ID NO: 70741 - DNA, 15 bp, Homo sapiens
tctgttgtgtgagaa

SEQ ID NO: 70742 - DNA, 15 bp, Homo sapiens
ctctgttgtgtgaga

SEQ ID NO: 70743 - DNA, 15 bp, Homo sapiens
gctctgttgtgtgag

SEQ ID NO: 70744 - DNA, 15 bp, Homo sapiens
agctctgttgtgtga

SEQ ID NO: 70745 - DNA, 15 bp, Homo sapiens
aagctctgttgtgtg

SEQ ID NO: 70746 - DNA, 15 bp, Homo sapiens
gaagctctgttgtgt

SEQ ID NO: 70747 - DNA, 15 bp, Homo sapiens
agaagctctgttgtg

SEQ ID NO: 70748 - DNA, 15 bp, Homo sapiens
aagaagctctgttgt

SEQ ID NO: 70749 - DNA, 15 bp, Homo sapiens
caagaagctctgttg

SEQ ID NO: 70750 - DNA, 15 bp, Homo sapiens
ccaagaagctctgtt

SEQ ID NO: 70751 - DNA, 15 bp, Homo sapiens
tccaagaagctctgt

SEQ ID NO: 70752 - DNA, 15 bp, Homo sapiens
ttccaagaagctctg

SEQ ID NO: 70753 - DNA, 15 bp, Homo sapiens
cttccaagaagctct

SEQ ID NO: 70754 - DNA, 15 bp, Homo sapiens
gcttccaagaagctc

SEQ ID NO: 70755 - DNA, 15 bp, Homo sapiens
ggcttccaagaagct

SEQ ID NO: 70756 - DNA, 15 bp, Homo sapiens
gggcttccaagaagc

SEQ ID NO: 70757 - DNA, 15 bp, Homo sapiens
agggcttccaagaag

SEQ ID NO: 70758 - DNA, 15 bp, Homo sapiens
gagggcttccaagaa

SEQ ID NO: 70759 - DNA, 15 bp, Homo sapiens
ggagggcttccaaga

SEQ ID NO: 70760 - DNA, 15 bp, Homo sapiens
gggagggcttccaag

SEQ ID NO: 70761 - DNA, 15 bp, Homo sapiens
ggggagggcttccaa

SEQ ID NO: 70762 - DNA, 15 bp, Homo sapiens
cggggagggcttcca

SEQ ID NO: 70763 - DNA, 15 bp, Homo sapiens
ccggggagggcttcc

SEQ ID NO: 70764 - DNA, 15 bp, Homo sapiens
gccggggagggcttc

SEQ ID NO: 70765 - DNA, 15 bp, Homo sapiens
cgccggggagggctt

SEQ ID NO: 70766 - DNA, 15 bp, Homo sapiens
tcgccggggagggct

SEQ ID NO: 70767 - DNA, 15 bp, Homo sapiens
ttcgccggggagggc

SEQ ID NO: 70768 - DNA, 15 bp, Homo sapiens
cttcgccggggaggg

SEQ ID NO: 70769 - DNA, 15 bp, Homo sapiens
ccttcgccggggagg

SEQ ID NO: 70770 - DNA, 15 bp, Homo sapiens
accttcgccggggag

SEQ ID NO: 70771 - DNA, 15 bp, Homo sapiens
caccttcgccgggga

SEQ ID NO: 70772 - DNA, 15 bp, Homo sapiens
gcaccttcgccgggg

SEQ ID NO: 70773 - DNA, 15 bp, Homo sapiens
agcaccttcgccggg

SEQ ID NO: 70774 - DNA, 15 bp, Homo sapiens
cagcaccttcgccgg

SEQ ID NO: 70775 - DNA, 15 bp, Homo sapiens
ccagcaccttcgccg

SEQ ID NO: 70776 - DNA, 15 bp, Homo sapiens
accagcaccttcgcc

SEQ ID NO: 70777 - DNA, 15 bp, Homo sapiens
caccagcaccttcgc

SEQ ID NO: 70778 - DNA, 15 bp, Homo sapiens
ccaccagcaccttcg

SEQ ID NO: 70779 - DNA, 15 bp, Homo sapiens
gccaccagcaccttc

SEQ ID NO: 70780 - DNA, 15 bp, Homo sapiens
agccaccagcacctt

SEQ ID NO: 70781 - DNA, 15 bp, Homo sapiens
gagccaccagcacct

SEQ ID NO: 70782 - DNA, 15 bp, Homo sapiens
agagccaccagcacc

SEQ ID NO: 70783 - DNA, 15 bp, Homo sapiens
cagagccaccagcac

SEQ ID NO: 70784 - DNA, 15 bp, Homo sapiens
gcagagccaccagca

SEQ ID NO: 70785 - DNA, 15 bp, Homo sapiens
ggcagagccaccagc

SEQ ID NO: 70786 - DNA, 15 bp, Homo sapiens
aggcagagccaccag

SEQ ID NO: 70787 - DNA, 15 bp, Homo sapiens
aaggcagagccacca

SEQ ID NO: 70788 - DNA, 15 bp, Homo sapiens
caaggcagagccacc

SEQ ID NO: 70789 - DNA, 15 bp, Homo sapiens
gcaaggcagagccac

SEQ ID NO: 70790 - DNA, 15 bp, Homo sapiens
agcaaggcagagcca

SEQ ID NO: 70791 - DNA, 15 bp, Homo sapiens
gagcaaggcagagcc

SEQ ID NO: 70792 - DNA, 15 bp, Homo sapiens
ggagcaaggcagagc

SEQ ID NO: 70793 - DNA, 15 bp, Homo sapiens
cggagcaaggcagag

SEQ ID NO: 70794 - DNA, 15 bp, Homo sapiens
acggagcaaggcaga

SEQ ID NO: 70795 - DNA, 15 bp, Homo sapiens
gacggagcaaggcag

SEQ ID NO: 70796 - DNA, 15 bp, Homo sapiens
ggacggagcaaggca

SEQ ID NO: 70797 - DNA, 15 bp, Homo sapiens
gggacggagcaaggc

SEQ ID NO: 70798 - DNA, 15 bp, Homo sapiens
agggacggagcaagg

SEQ ID NO: 70799 - DNA, 15 bp, Homo sapiens
cagggacggagcaag

SEQ ID NO: 70800 - DNA, 15 bp, Homo sapiens
tcagggacggagcaa

SEQ ID NO: 70801 - DNA, 15 bp, Homo sapiens
gtcagggacggagca

SEQ ID NO: 70802 - DNA, 15 bp, Homo sapiens
ggtcagggacggagc

SEQ ID NO: 70803 - DNA, 15 bp, Homo sapiens
gggtcagggacggag

SEQ ID NO: 70804 - DNA, 15 bp, Homo sapiens
cgggtcagggacgga

SEQ ID NO: 70805 - DNA, 15 bp, Homo sapiens
acgggtcagggacgg

SEQ ID NO: 70806 - DNA, 15 bp, Homo sapiens
aacgggtcagggacg

SEQ ID NO: 70807 - DNA, 15 bp, Homo sapiens
gaacgggtcagggac

SEQ ID NO: 70808 - DNA, 15 bp, Homo sapiens
agaacgggtcaggga

SEQ ID NO: 70809 - DNA, 15 bp, Homo sapiens
gagaacgggtcaggg

SEQ ID NO: 70810 - DNA, 15 bp, Homo sapiens
tgagaacgggtcagg

SEQ ID NO: 70811 - DNA, 15 bp, Homo sapiens
gtgagaacgggtcag

SEQ ID NO: 70812 - DNA, 15 bp, Homo sapiens
ggtgagaacgggtca

SEQ ID NO: 70813 - DNA, 15 bp, Homo sapiens
aggtgagaacgggtc

SEQ ID NO: 70814 - DNA, 15 bp, Homo sapiens
gaggtgagaacgggt

SEQ ID NO: 70815 - DNA, 15 bp, Homo sapiens
ggaggtgagaacggg

SEQ ID NO: 70816 - DNA, 15 bp, Homo sapiens
aggaggtgagaacgg

SEQ ID NO: 70817 - DNA, 15 bp, Homo sapiens
aaggaggtgagaacg

SEQ ID NO: 70818 - DNA, 15 bp, Homo sapiens
gaaggaggtgagaac

SEQ ID NO: 70819 - DNA, 15 bp, Homo sapiens
agaaggaggtgagaa

SEQ ID NO: 70820 - DNA, 15 bp, Homo sapiens
aagaaggaggtgaga

SEQ ID NO: 70821 - DNA, 15 bp, Homo sapiens
aaagaaggaggtgag

SEQ ID NO: 70822 - DNA, 15 bp, Homo sapiens
caaagaaggaggtga

SEQ ID NO: 70823 - DNA, 15 bp, Homo sapiens
gcaaagaaggaggtg

SEQ ID NO: 70824 - DNA, 15 bp, Homo sapiens
ggcaaagaaggaggt

SEQ ID NO: 70825 - DNA, 15 bp, Homo sapiens
tggcaaagaaggagg

SEQ ID NO: 70826 - DNA, 15 bp, Homo sapiens
atggcaaagaaggag

SEQ ID NO: 70827 - DNA, 15 bp, Homo sapiens
gatggcaaagaagga

SEQ ID NO: 70828 - DNA, 15 bp, Homo sapiens
tgatggcaaagaagg

SEQ ID NO: 70829 - DNA, 15 bp, Homo sapiens
ctgatggcaaagaag

SEQ ID NO: 70830 - DNA, 15 bp, Homo sapiens
cctgatggcaaagaa

SEQ ID NO: 70831 - DNA, 15 bp, Homo sapiens
tcctgatggcaaaga

SEQ ID NO: 70832 - DNA, 15 bp, Homo sapiens
ctcctgatggcaaag

SEQ ID NO: 70833 - DNA, 15 bp, Homo sapiens
cctcctgatggcaaa

SEQ ID NO: 70834 - DNA, 15 bp, Homo sapiens
tcctcctgatggcaa

SEQ ID NO: 70835 - DNA, 15 bp, Homo sapiens
gtcctcctgatggca

SEQ ID NO: 70836 - DNA, 15 bp, Homo sapiens
tgtcctcctgatggc

SEQ ID NO: 70837 - DNA, 15 bp, Homo sapiens
ctgtcctcctgatgg

SEQ ID NO: 70838 - DNA, 15 bp, Homo sapiens
actgtcctcctgatg

SEQ ID NO: 70839 - DNA, 15 bp, Homo sapiens
cactgtcctcctgat

SEQ ID NO: 70840 - DNA, 15 bp, Homo sapiens
acactgtcctcctga

SEQ ID NO: 70841 - DNA, 15 bp, Homo sapiens
aacactgtcctcctg

SEQ ID NO: 70842 - DNA, 15 bp, Homo sapiens
aaacactgtcctcct

SEQ ID NO: 70843 - DNA, 15 bp, Homo sapiens
gaaacactgtcctcc

SEQ ID NO: 70844 - DNA, 15 bp, Homo sapiens
agaaacactgtcctc

SEQ ID NO: 70845 - DNA, 15 bp, Homo sapiens
gagaaacactgtcct

SEQ ID NO: 70846 - DNA, 15 bp, Homo sapiens
tgagaaacactgtcc

SEQ ID NO: 70847 - DNA, 15 bp, Homo sapiens
ctgagaaacactgtc

SEQ ID NO: 70848 - DNA, 15 bp, Homo sapiens
tctgagaaacactgt

SEQ ID NO: 70849 - DNA, 15 bp, Homo sapiens
ctctgagaaacactg

SEQ ID NO: 70850 - DNA, 15 bp, Homo sapiens
gctctgagaaacact

SEQ ID NO: 70851 - DNA, 15 bp, Homo sapiens
tgctctgagaaacac

SEQ ID NO: 70852 - DNA, 15 bp, Homo sapiens
ctgctctgagaaaca

SEQ ID NO: 70853 - DNA, 15 bp, Homo sapiens
actgctctgagaaac

SEQ ID NO: 70854 - DNA, 15 bp, Homo sapiens
aactgctctgagaaa

SEQ ID NO: 70855 - DNA, 15 bp, Homo sapiens
gaactgctctgagaa

SEQ ID NO: 70856 - DNA, 15 bp, Homo sapiens
agaactgctctgaga

SEQ ID NO: 70857 - DNA, 15 bp, Homo sapiens
cagaactgctctgag

SEQ ID NO: 70858 - DNA, 15 bp, Homo sapiens
tcagaactgctctga

SEQ ID NO: 70859 - DNA, 15 bp, Homo sapiens
atcagaactgctctg

SEQ ID NO: 70860 - DNA, 15 bp, Homo sapiens
catcagaactgctct

SEQ ID NO: 70861 - DNA, 15 bp, Homo sapiens
gcatcagaactgctc

SEQ ID NO: 70862 - DNA, 15 bp, Homo sapiens
agcatcagaactgct

SEQ ID NO: 70863 - DNA, 15 bp, Homo sapiens
cagcatcagaactgc

SEQ ID NO: 70864 - DNA, 15 bp, Homo sapiens
ccagcatcagaactg

SEQ ID NO: 70865 - DNA, 15 bp, Homo sapiens
gccagcatcagaact

SEQ ID NO: 70866 - DNA, 15 bp, Homo sapiens
ggccagcatcagaac

SEQ ID NO: 70867 - DNA, 15 bp, Homo sapiens
aggccagcatcagaa

SEQ ID NO: 70868 - DNA, 15 bp, Homo sapiens
caggccagcatcaga

SEQ ID NO: 70869 - DNA, 15 bp, Homo sapiens
ccaggccagcatcag

SEQ ID NO: 70870 - DNA, 15 bp, Homo sapiens
cccaggccagcatca

SEQ ID NO: 70871 - DNA, 15 bp, Homo sapiens
gcccaggccagcatc

SEQ ID NO: 70872 - DNA, 15 bp, Homo sapiens
tgcccaggccagcat

SEQ ID NO: 70873 - DNA, 15 bp, Homo sapiens
ctgcccaggccagca

SEQ ID NO: 70874 - DNA, 15 bp, Homo sapiens
gctgcccaggccagc

SEQ ID NO: 70875 - DNA, 15 bp, Homo sapiens
cgctgcccaggccag

SEQ ID NO: 70876 - DNA, 15 bp, Homo sapiens
tcgctgcccaggcca

SEQ ID NO: 70877 - DNA, 15 bp, Homo sapiens
gtcgctgcccaggcc

SEQ ID NO: 70878 - DNA, 15 bp, Homo sapiens
ggtcgctgcccaggc

SEQ ID NO: 70879 - DNA, 15 bp, Homo sapiens
tggtcgctgcccagg

SEQ ID NO: 70880 - DNA, 15 bp, Homo sapiens
atggtcgctgcccag

SEQ ID NO: 70881 - DNA, 15 bp, Homo sapiens
catggtcgctgccca

SEQ ID NO: 70882 - DNA, 15 bp, Homo sapiens
tcatggtcgctgccc

SEQ ID NO: 70883 - DNA, 15 bp, Homo sapiens
ctcatggtcgctgcc

SEQ ID NO: 70884 - DNA, 15 bp, Homo sapiens
tctcatggtcgctgc

SEQ ID NO: 70885 - DNA, 15 bp, Homo sapiens
ctctcatggtcgctg

SEQ ID NO: 70886 - DNA, 15 bp, Homo sapiens
actctcatggtcgct

SEQ ID NO: 70887 - DNA, 15 bp, Homo sapiens
cactctcatggtcgc

SEQ ID NO: 70888 - DNA, 15 bp, Homo sapiens
tcactctcatggtcg

SEQ ID NO: 70889 - DNA, 15 bp, Homo sapiens
gtcactctcatggtc

SEQ ID NO: 70890 - DNA, 15 bp, Homo sapiens
tgtcactctcatggt

SEQ ID NO: 70891 - DNA, 15 bp, Homo sapiens
gtgtcactctcatgg

SEQ ID NO: 70892 - DNA, 15 bp, Homo sapiens
cgtgtcactctcatg

SEQ ID NO: 70893 - DNA, 15 bp, Homo sapiens
gcgtgtcactctcat

SEQ ID NO: 70894 - DNA, 15 bp, Homo sapiens
agcgtgtcactctca

SEQ ID NO: 70895 - DNA, 15 bp, Homo sapiens
cagcgtgtcactctc

SEQ ID NO: 70896 - DNA, 15 bp, Homo sapiens
tcagcgtgtcactct

SEQ ID NO: 70897 - DNA, 15 bp, Homo sapiens
gtcagcgtgtcactc

SEQ ID NO: 70898 - DNA, 15 bp, Homo sapiens
ggtcagcgtgtcact

SEQ ID NO: 70899 - DNA, 15 bp, Homo sapiens
tggtcagcgtgtcac

SEQ ID NO: 70900 - DNA, 15 bp, Homo sapiens
atggtcagcgtgtca

SEQ ID NO: 70901 - DNA, 15 bp, Homo sapiens
gatggtcagcgtgtc

SEQ ID NO: 70902 - DNA, 15 bp, Homo sapiens
cgatggtcagcgtgt

SEQ ID NO: 70903 - DNA, 15 bp, Homo sapiens
ccgatggtcagcgtg

SEQ ID NO: 70904 - DNA, 15 bp, Homo sapiens
accgatggtcagcgt

SEQ ID NO: 70905 - DNA, 15 bp, Homo sapiens
taccgatggtcagcg

SEQ ID NO: 70906 - DNA, 15 bp, Homo sapiens
ttaccgatggtcagc

SEQ ID NO: 70907 - DNA, 15 bp, Homo sapiens
cttaccgatggtcag

SEQ ID NO: 70908 - DNA, 15 bp, Homo sapiens
ccttaccgatggtca

SEQ ID NO: 70909 - DNA, 15 bp, Homo sapiens
tccttaccgatggtc

SEQ ID NO: 70910 - DNA, 15 bp, Homo sapiens
gtccttaccgatggt

SEQ ID NO: 70911 - DNA, 15 bp, Homo sapiens
agtccttaccgatgg

SEQ ID NO: 70912 - DNA, 15 bp, Homo sapiens
gagtccttaccgatg

SEQ ID NO: 70913 - DNA, 15 bp, Homo sapiens
agagtccttaccgat

SEQ ID NO: 70914 - DNA, 15 bp, Homo sapiens
cagagtccttaccga

SEQ ID NO: 70915 - DNA, 15 bp, Homo sapiens
ccagagtccttaccg

SEQ ID NO: 70916 - DNA, 15 bp, Homo sapiens
cccagagtccttacc

SEQ ID NO: 70917 - DNA, 15 bp, Homo sapiens
ccccagagtccttac

SEQ ID NO: 70918 - DNA, 15 bp, Homo sapiens
accccagagtcctta

SEQ ID NO: 70919 - DNA, 15 bp, Homo sapiens
aaccccagagtcctt

SEQ ID NO: 70920 - DNA, 15 bp, Homo sapiens
aaaccccagagtcct

SEQ ID NO: 70921 - DNA, 15 bp, Homo sapiens
gaaaccccagagtcc

SEQ ID NO: 70922 - DNA, 15 bp, Homo sapiens
agaaaccccagagtc

SEQ ID NO: 70923 - DNA, 15 bp, Homo sapiens
aagaaaccccagagt

SEQ ID NO: 70924 - DNA, 15 bp, Homo sapiens
taagaaaccccagag

SEQ ID NO: 70925 - DNA, 15 bp, Homo sapiens
ataagaaaccccaga

SEQ ID NO: 70926 - DNA, 15 bp, Homo sapiens
aataagaaaccccag

SEQ ID NO: 70927 - DNA, 15 bp, Homo sapiens
gaataagaaacccca

SEQ ID NO: 70928 - DNA, 15 bp, Homo sapiens
tgaataagaaacccc

SEQ ID NO: 70929 - DNA, 15 bp, Homo sapiens
ctgaataagaaaccc

SEQ ID NO: 70930 - DNA, 15 bp, Homo sapiens
cctgaataagaaacc

SEQ ID NO: 70931 - DNA, 15 bp, Homo sapiens
acctgaataagaaac

SEQ ID NO: 70932 - DNA, 15 bp, Homo sapiens
cacctgaataagaaa

SEQ ID NO: 70933 - DNA, 15 bp, Homo sapiens
ccacctgaataagaa

SEQ ID NO: 70934 - DNA, 15 bp, Homo sapiens
accacctgaataaga

SEQ ID NO: 70935 - DNA, 15 bp, Homo sapiens
caccacctgaataag

SEQ ID NO: 70936 - DNA, 15 bp, Homo sapiens
gcaccacctgaataa

SEQ ID NO: 70937 - DNA, 15 bp, Homo sapiens
ggcaccacctgaata

SEQ ID NO: 70938 - DNA, 15 bp, Homo sapiens
aggcaccacctgaat

SEQ ID NO: 70939 - DNA, 15 bp, Homo sapiens
caggcaccacctgaa

SEQ ID NO: 70940 - DNA, 15 bp, Homo sapiens
tcaggcaccacctga

SEQ ID NO: 70941 - DNA, 15 bp, Homo sapiens
ctcaggcaccacctg

SEQ ID NO: 70942 - DNA, 15 bp, Homo sapiens
gctcaggcaccacct

SEQ ID NO: 70943 - DNA, 15 bp, Homo sapiens
agctcaggcaccacc

SEQ ID NO: 70944 - DNA, 15 bp, Homo sapiens
aagctcaggcaccac

SEQ ID NO: 70945 - DNA, 15 bp, Homo sapiens
gaagctcaggcacca

SEQ ID NO: 70946 - DNA, 15 bp, Homo sapiens
ggaagctcaggcacc

SEQ ID NO: 70947 - DNA, 15 bp, Homo sapiens
gggaagctcaggcac

SEQ ID NO: 70948 - DNA, 15 bp, Homo sapiens
ggggaagctcaggca

SEQ ID NO: 70949 - DNA, 15 bp, Homo sapiens
gggggaagctcaggc

SEQ ID NO: 70950 - DNA, 15 bp, Homo sapiens
tgggggaagctcagg

SEQ ID NO: 70951 - DNA, 15 bp, Homo sapiens
ctgggggaagctcag

SEQ ID NO: 70952 - DNA, 15 bp, Homo sapiens
gctgggggaagctca

SEQ ID NO: 70953 - DNA, 15 bp, Homo sapiens
agctgggggaagctc

SEQ ID NO: 70954 - DNA, 15 bp, Homo sapiens
cagctgggggaagct

SEQ ID NO: 70955 - DNA, 15 bp, Homo sapiens
ccagctgggggaagc

SEQ ID NO: 70956 - DNA, 15 bp, Homo sapiens
cccagctgggggaag

SEQ ID NO: 70957 - DNA, 15 bp, Homo sapiens
gcccagctgggggaa

SEQ ID NO: 70958 - DNA, 15 bp, Homo sapiens
tgcccagctggggga

SEQ ID NO: 70959 - DNA, 15 bp, Homo sapiens
ctgcccagctggggg

SEQ ID NO: 70960 - DNA, 15 bp, Homo sapiens
tctgcccagctgggg

SEQ ID NO: 70961 - DNA, 15 bp, Homo sapiens
ctctgcccagctggg

SEQ ID NO: 70962 - DNA, 15 bp, Homo sapiens
actctgcccagctgg

SEQ ID NO: 70963 - DNA, 15 bp, Homo sapiens
cactctgcccagctg

SEQ ID NO: 70964 - DNA, 15 bp, Homo sapiens
ccactctgcccagct

SEQ ID NO: 70965 - DNA, 15 bp, Homo sapiens
tccactctgcccagc

SEQ ID NO: 70966 - DNA, 15 bp, Homo sapiens
ctccactctgcccag

SEQ ID NO: 70967 - DNA, 15 bp, Homo sapiens
cctccactctgccca

SEQ ID NO: 70968 - DNA, 15 bp, Homo sapiens
gcctccactctgccc

SEQ ID NO: 70969 - DNA, 15 bp, Homo sapiens
tgcctccactctgcc

SEQ ID NO: 70970 - DNA, 15 bp, Homo sapiens
ctgcctccactctgc

SEQ ID NO: 70971 - DNA, 15 bp, Homo sapiens
tctgcctccactctg

SEQ ID NO: 70972 - DNA, 15 bp, Homo sapiens
ctctgcctccactct

SEQ ID NO: 70973 - DNA, 15 bp, Homo sapiens
cctctgcctccactc

SEQ ID NO: 70974 - DNA, 15 bp, Homo sapiens
tcctctgcctccact

SEQ ID NO: 70975 - DNA, 15 bp, Homo sapiens
ctcctctgcctccac

SEQ ID NO: 70976 - DNA, 15 bp, Homo sapiens
cctcctctgcctcca

SEQ ID NO: 70977 - DNA, 15 bp, Homo sapiens
tcctcctctgcctcc

SEQ ID NO: 70978 - DNA, 15 bp, Homo sapiens
ctcctcctctgcctc

SEQ ID NO: 70979 - DNA, 15 bp, Homo sapiens
tctcctcctctgcct

SEQ ID NO: 70980 - DNA, 15 bp, Homo sapiens
ctctcctcctctgcc

SEQ ID NO: 70981 - DNA, 15 bp, Homo sapiens
cctctcctcctctgc

SEQ ID NO: 70982 - DNA, 15 bp, Homo sapiens
acctctcctcctctg

SEQ ID NO: 70983 - DNA, 15 bp, Homo sapiens
cacctctcctcctct

SEQ ID NO: 70984 - DNA, 15 bp, Homo sapiens
gcacctctcctcctc

SEQ ID NO: 70985 - DNA, 15 bp, Homo sapiens
tgcacctctcctcct

SEQ ID NO: 70986 - DNA, 15 bp, Homo sapiens
ctgcacctctcctcc

SEQ ID NO: 70987 - DNA, 15 bp, Homo sapiens
tctgcacctctcctc

SEQ ID NO: 70988 - DNA, 15 bp, Homo sapiens
ctctgcacctctcct

SEQ ID NO: 70989 - DNA, 15 bp, Homo sapiens
cctctgcacctctcc

SEQ ID NO: 70990 - DNA, 15 bp, Homo sapiens
gcctctgcacctctc

SEQ ID NO: 70991 - DNA, 15 bp, Homo sapiens
agcctctgcacctct

SEQ ID NO: 70992 - DNA, 15 bp, Homo sapiens
cagcctctgcacctc

SEQ ID NO: 70993 - DNA, 15 bp, Homo sapiens
ccagcctctgcacct

SEQ ID NO: 70994 - DNA, 15 bp, Homo sapiens
accagcctctgcacc

SEQ ID NO: 70995 - DNA, 15 bp, Homo sapiens
caccagcctctgcac

SEQ ID NO: 70996 - DNA, 15 bp, Homo sapiens
ccaccagcctctgca

SEQ ID NO: 70997 - DNA, 15 bp, Homo sapiens
gccaccagcctctgc

SEQ ID NO: 70998 - DNA, 15 bp, Homo sapiens
cgccaccagcctctg

SEQ ID NO: 70999 - DNA, 15 bp, Homo sapiens
gcgccaccagcctct

SEQ ID NO: 71000 - DNA, 15 bp, Homo sapiens
agcgccaccagcctc

SEQ ID NO: 71001 - DNA, 15 bp, Homo sapiens
cagcgccaccagcct

SEQ ID NO: 71002 - DNA, 15 bp, Homo sapiens
tcagcgccaccagcc

SEQ ID NO: 71003 - DNA, 15 bp, Homo sapiens
gtcagcgccaccagc

SEQ ID NO: 71004 - DNA, 15 bp, Homo sapiens
agtcagcgccaccag

SEQ ID NO: 71005 - DNA, 15 bp, Homo sapiens
gagtcagcgccacca

SEQ ID NO: 71006 - DNA, 15 bp, Homo sapiens
tgagtcagcgccacc

SEQ ID NO: 71007 - DNA, 15 bp, Homo sapiens
ttgagtcagcgccac

SEQ ID NO: 71008 - DNA, 15 bp, Homo sapiens
cttgagtcagcgcca

SEQ ID NO: 71009 - DNA, 15 bp, Homo sapiens
ccttgagtcagcgcc

SEQ ID NO: 71010 - DNA, 15 bp, Homo sapiens
accttgagtcagcgc

SEQ ID NO: 71011 - DNA, 15 bp, Homo sapiens
aaccttgagtcagcg

SEQ ID NO: 71012 - DNA, 15 bp, Homo sapiens
aaaccttgagtcagc

SEQ ID NO: 71013 - DNA, 15 bp, Homo sapiens
caaaccttgagtcag

SEQ ID NO: 71014 - DNA, 15 bp, Homo sapiens
gcaaaccttgagtca

SEQ ID NO: 71015 - DNA, 15 bp, Homo sapiens
agcaaaccttgagtc

SEQ ID NO: 71016 - DNA, 15 bp, Homo sapiens
cagcaaaccttgagt

SEQ ID NO: 71017 - DNA, 15 bp, Homo sapiens
gcagcaaaccttgag

SEQ ID NO: 71018 - DNA, 15 bp, Homo sapiens
agcagcaaaccttga

SEQ ID NO: 71019 - DNA, 15 bp, Homo sapiens
cagcagcaaaccttg

SEQ ID NO: 71020 - DNA, 15 bp, Homo sapiens
ccagcagcaaacctt

SEQ ID NO: 71021 - DNA, 15 bp, Homo sapiens
cccagcagcaaacct

SEQ ID NO: 71022 - DNA, 15 bp, Homo sapiens
gcccagcagcaaacc

SEQ ID NO: 71023 - DNA, 15 bp, Homo sapiens
agcccagcagcaaac

SEQ ID NO: 71024 - DNA, 15 bp, Homo sapiens
cagcccagcagcaaa

SEQ ID NO: 71025 - DNA, 15 bp, Homo sapiens
ccagcccagcagcaa

SEQ ID NO: 71026 - DNA, 15 bp, Homo sapiens
cccagcccagcagca

SEQ ID NO: 71027 - DNA, 15 bp, Homo sapiens
ccccagcccagcagc

SEQ ID NO: 71028 - DNA, 15 bp, Homo sapiens
gccccagcccagcag

SEQ ID NO: 71029 - DNA, 15 bp, Homo sapiens
agccccagcccagca

SEQ ID NO: 71030 - DNA, 15 bp, Homo sapiens
cagccccagcccagc

SEQ ID NO: 71031 - DNA, 15 bp, Homo sapiens
ccagccccagcccag

SEQ ID NO: 71032 - DNA, 15 bp, Homo sapiens
cccagccccagccca

SEQ ID NO: 71033 - DNA, 15 bp, Homo sapiens
acccagccccagccc

SEQ ID NO: 71034 - DNA, 15 bp, Homo sapiens
cacccagccccagcc

SEQ ID NO: 71035 - DNA, 15 bp, Homo sapiens
ccacccagccccagc

SEQ ID NO: 71036 - DNA, 15 bp, Homo sapiens
gccacccagccccag

SEQ ID NO: 71037 - DNA, 15 bp, Homo sapiens
agccacccagcccca

SEQ ID NO: 71038 - DNA, 15 bp, Homo sapiens
cagccacccagcccc

SEQ ID NO: 71039 - DNA, 15 bp, Homo sapiens
gcagccacccagccc

SEQ ID NO: 71040 - DNA, 15 bp, Homo sapiens
cgcagccacccagcc

SEQ ID NO: 71041 - DNA, 15 bp, Homo sapiens
ccgcagccacccagc

SEQ ID NO: 71042 - DNA, 15 bp, Homo sapiens
cccgcagccacccag

SEQ ID NO: 71043 - DNA, 15 bp, Homo sapiens
acccgcagccaccca

SEQ ID NO: 71044 - DNA, 15 bp, Homo sapiens
cacccgcagccaccc

SEQ ID NO: 71045 - DNA, 15 bp, Homo sapiens
acacccgcagccacc

SEQ ID NO: 71046 - DNA, 15 bp, Homo sapiens
cacacccgcagccac

SEQ ID NO: 71047 - DNA, 15 bp, Homo sapiens
ccacacccgcagcca

SEQ ID NO: 71048 - DNA, 15 bp, Homo sapiens
cccacacccgcagcc

SEQ ID NO: 71049 - DNA, 15 bp, Homo sapiens
tcccacacccgcagc

SEQ ID NO: 71050 - DNA, 15 bp, Homo sapiens
ctcccacacccgcag

SEQ ID NO: 71051 - DNA, 15 bp, Homo sapiens
gctcccacacccgca

SEQ ID NO: 71052 - DNA, 15 bp, Homo sapiens
tgctcccacacccgc

SEQ ID NO: 71053 - DNA, 15 bp, Homo sapiens
ctgctcccacacccg

SEQ ID NO: 71054 - DNA, 15 bp, Homo sapiens
gctgctcccacaccc

SEQ ID NO: 71055 - DNA, 15 bp, Homo sapiens
agctgctcccacacc

SEQ ID NO: 71056 - DNA, 15 bp, Homo sapiens
aagctgctcccacac

SEQ ID NO: 71057 - DNA, 15 bp, Homo sapiens
caagctgctcccaca

SEQ ID NO: 71058 - DNA, 15 bp, Homo sapiens
ccaagctgctcccac

SEQ ID NO: 71059 - DNA, 15 bp, Homo sapiens
accaagctgctccca

SEQ ID NO: 71060 - DNA, 15 bp, Homo sapiens
caccaagctgctccc

SEQ ID NO: 71061 - DNA, 15 bp, Homo sapiens
ccaccaagctgctcc

SEQ ID NO: 71062 - DNA, 15 bp, Homo sapiens
gccaccaagctgctc

SEQ ID NO: 71063 - DNA, 15 bp, Homo sapiens
cgccaccaagctgct

SEQ ID NO: 71064 - DNA, 15 bp, Homo sapiens
ccgccaccaagctgc

SEQ ID NO: 71065 - DNA, 15 bp, Homo sapiens
cccgccaccaagctg

SEQ ID NO: 71066 - DNA, 15 bp, Homo sapiens
acccgccaccaagct

SEQ ID NO: 71067 - DNA, 15 bp, Homo sapiens
aacccgccaccaagc

SEQ ID NO: 71068 - DNA, 15 bp, Homo sapiens
caacccgccaccaag

SEQ ID NO: 71069 - DNA, 15 bp, Homo sapiens
ccaacccgccaccaa

SEQ ID NO: 71070 - DNA, 15 bp, Homo sapiens
gccaacccgccacca

SEQ ID NO: 71071 - DNA, 15 bp, Homo sapiens
ggccaacccgccacc

SEQ ID NO: 71072 - DNA, 15 bp, Homo sapiens
aggccaacccgccac

SEQ ID NO: 71073 - DNA, 15 bp, Homo sapiens
taggccaacccgcca

SEQ ID NO: 71074 - DNA, 15 bp, Homo sapiens
ttaggccaacccgcc

SEQ ID NO: 71075 - DNA, 15 bp, Homo sapiens
attaggccaacccgc

SEQ ID NO: 71076 - DNA, 15 bp, Homo sapiens
cattaggccaacccg

SEQ ID NO: 71077 - DNA, 15 bp, Homo sapiens
gcattaggccaaccc

SEQ ID NO: 71078 - DNA, 15 bp, Homo sapiens
agcattaggccaacc

SEQ ID NO: 71079 - DNA, 15 bp, Homo sapiens
aagcattaggccaac

SEQ ID NO: 71080 - DNA, 15 bp, Homo sapiens
caagcattaggccaa

SEQ ID NO: 71081 - DNA, 15 bp, Homo sapiens
gcaagcattaggcca

SEQ ID NO: 71082 - DNA, 15 bp, Homo sapiens
agcaagcattaggcc

SEQ ID NO: 71083 - DNA, 15 bp, Homo sapiens
cagcaagcattaggc

SEQ ID NO: 71084 - DNA, 15 bp, Homo sapiens
ccagcaagcattagg

SEQ ID NO: 71085 - DNA, 15 bp, Homo sapiens
cccagcaagcattag

SEQ ID NO: 71086 - DNA, 15 bp, Homo sapiens
ccccagcaagcatta

SEQ ID NO: 71087 - DNA, 15 bp, Homo sapiens
accccagcaagcatt

SEQ ID NO: 71088 - DNA, 15 bp, Homo sapiens
caccccagcaagcat

SEQ ID NO: 71089 - DNA, 15 bp, Homo sapiens
gcaccccagcaagca

SEQ ID NO: 71090 - DNA, 15 bp, Homo sapiens
ggcaccccagcaagc

SEQ ID NO: 71091 - DNA, 15 bp, Homo sapiens
aggcaccccagcaag

SEQ ID NO: 71092 - DNA, 15 bp, Homo sapiens
caggcaccccagcaa

SEQ ID NO: 71093 - DNA, 15 bp, Homo sapiens
ccaggcaccccagca

SEQ ID NO: 71094 - DNA, 15 bp, Homo sapiens
cccaggcaccccagc

SEQ ID NO: 71095 - DNA, 15 bp, Homo sapiens
ccccaggcaccccag

SEQ ID NO: 71096 - DNA, 15 bp, Homo sapiens
gccccaggcacccca

SEQ ID NO: 71097 - DNA, 15 bp, Homo sapiens
agccccaggcacccc

SEQ ID NO: 71098 - DNA, 15 bp, Homo sapiens
gagccccaggcaccc

SEQ ID NO: 71099 - DNA, 15 bp, Homo sapiens
cgagccccaggcacc

SEQ ID NO: 71100 - DNA, 15 bp, Homo sapiens
ccgagccccaggcac

SEQ ID NO: 71101 - DNA, 15 bp, Homo sapiens
accgagccccaggca

SEQ ID NO: 71102 - DNA, 15 bp, Homo sapiens
aaccgagccccaggc

SEQ ID NO: 71103 - DNA, 15 bp, Homo sapiens
aaaccgagccccagg

SEQ ID NO: 71104 - DNA, 15 bp, Homo sapiens
caaaccgagccccag

SEQ ID NO: 71105 - DNA, 15 bp, Homo sapiens
ccaaaccgagcccca

SEQ ID NO: 71106 - DNA, 15 bp, Homo sapiens
cccaaaccgagcccc

SEQ ID NO: 71107 - DNA, 15 bp, Homo sapiens
tcccaaaccgagccc

SEQ ID NO: 71108 - DNA, 15 bp, Homo sapiens
ctcccaaaccgagcc

SEQ ID NO: 71109 - DNA, 15 bp, Homo sapiens
gctcccaaaccgagc

SEQ ID NO: 71110 - DNA, 15 bp, Homo sapiens
agctcccaaaccgag

SEQ ID NO: 71111 - DNA, 15 bp, Homo sapiens
tagctcccaaaccga

SEQ ID NO: 71112 - DNA, 15 bp, Homo sapiens
ctagctcccaaaccg

SEQ ID NO: 71113 - DNA, 15 bp, Homo sapiens
gctagctcccaaacc

SEQ ID NO: 71114 - DNA, 15 bp, Homo sapiens
tgctagctcccaaac

SEQ ID NO: 71115 - DNA, 15 bp, Homo sapiens
ctgctagctcccaaa

SEQ ID NO: 71116 - DNA, 15 bp, Homo sapiens
cctgctagctcccaa

SEQ ID NO: 71117 - DNA, 15 bp, Homo sapiens
ccctgctagctccca

SEQ ID NO: 71118 - DNA, 15 bp, Homo sapiens
gccctgctagctccc

SEQ ID NO: 71119 - DNA, 15 bp, Homo sapiens
tgccctgctagctcc

SEQ ID NO: 71120 - DNA, 15 bp, Homo sapiens
ctgccctgctagctc

SEQ ID NO: 71121 - DNA, 15 bp, Homo sapiens
actgccctgctagct

SEQ ID NO: 71122 - DNA, 15 bp, Homo sapiens
cactgccctgctagc

SEQ ID NO: 71123 - DNA, 15 bp, Homo sapiens
acactgccctgctag

SEQ ID NO: 71124 - DNA, 15 bp, Homo sapiens
gacactgccctgcta

SEQ ID NO: 71125 - DNA, 15 bp, Homo sapiens
ggacactgccctgct

SEQ ID NO: 71126 - DNA, 15 bp, Homo sapiens
gggacactgccctgc

SEQ ID NO: 71127 - DNA, 15 bp, Homo sapiens
tgggacactgccctg

SEQ ID NO: 71128 - DNA, 15 bp, Homo sapiens
ctgggacactgccct

SEQ ID NO: 71129 - DNA, 15 bp, Homo sapiens
tctgggacactgccc

SEQ ID NO: 71130 - DNA, 15 bp, Homo sapiens
ctctgggacactgcc

SEQ ID NO: 71131 - DNA, 15 bp, Homo sapiens
tctctgggacactgc

SEQ ID NO: 71132 - DNA, 15 bp, Homo sapiens
ctctctgggacactg

SEQ ID NO: 71133 - DNA, 15 bp, Homo sapiens
gctctctgggacact

SEQ ID NO: 71134 - DNA, 15 bp, Homo sapiens
agctctctgggacac

SEQ ID NO: 71135 - DNA, 15 bp, Homo sapiens
cagctctctgggaca

SEQ ID NO: 71136 - DNA, 15 bp, Homo sapiens
tcagctctctgggac

SEQ ID NO: 71137 - DNA, 15 bp, Homo sapiens
ctcagctctctggga

SEQ ID NO: 71138 - DNA, 15 bp, Homo sapiens
tctcagctctctggg

SEQ ID NO: 71139 - DNA, 15 bp, Homo sapiens
atctcagctctctgg

SEQ ID NO: 71140 - DNA, 15 bp, Homo sapiens
catctcagctctctg

SEQ ID NO: 71141 - DNA, 15 bp, Homo sapiens
tcatctcagctctct

SEQ ID NO: 71142 - DNA, 15 bp, Homo sapiens
atcatctcagctctc

SEQ ID NO: 71143 - DNA, 15 bp, Homo sapiens
aatcatctcagctct

SEQ ID NO: 71144 - DNA, 15 bp, Homo sapiens
caatcatctcagctc

SEQ ID NO: 71145 - DNA, 15 bp, Homo sapiens
ccaatcatctcagct

SEQ ID NO: 71146 - DNA, 15 bp, Homo sapiens
cccaatcatctcagc

SEQ ID NO: 71147 - DNA, 15 bp, Homo sapiens
ccccaatcatctcag

SEQ ID NO: 71148 - DNA, 15 bp, Homo sapiens
accccaatcatctca

SEQ ID NO: 71149 - DNA, 15 bp, Homo sapiens
aaccccaatcatctc

SEQ ID NO: 71150 - DNA, 15 bp, Homo sapiens
aaaccccaatcatct

SEQ ID NO: 71151 - DNA, 15 bp, Homo sapiens
caaaccccaatcatc

SEQ ID NO: 71152 - DNA, 15 bp, Homo sapiens
ccaaaccccaatcat

SEQ ID NO: 71153 - DNA, 15 bp, Homo sapiens
cccaaaccccaatca

SEQ ID NO: 71154 - DNA, 15 bp, Homo sapiens
ccccaaaccccaatc

SEQ ID NO: 71155 - DNA, 15 bp, Homo sapiens
tccccaaaccccaat

SEQ ID NO: 71156 - DNA, 15 bp, Homo sapiens
ttccccaaaccccaa

SEQ ID NO: 71157 - DNA, 15 bp, Homo sapiens
attccccaaacccca

SEQ ID NO: 71158 - DNA, 15 bp, Homo sapiens
gattccccaaacccc

SEQ ID NO: 71159 - DNA, 15 bp, Homo sapiens
ggattccccaaaccc

SEQ ID NO: 71160 - DNA, 15 bp, Homo sapiens
gggattccccaaacc

SEQ ID NO: 71161 - DNA, 15 bp, Homo sapiens
agggattccccaaac

SEQ ID NO: 71162 - DNA, 15 bp, Homo sapiens
aagggattccccaaa

SEQ ID NO: 71163 - DNA, 15 bp, Homo sapiens
taagggattccccaa

SEQ ID NO: 71164 - DNA, 15 bp, Homo sapiens
ctaagggattcccca

SEQ ID NO: 71165 - DNA, 15 bp, Homo sapiens
cctaagggattcccc

SEQ ID NO: 71166 - DNA, 15 bp, Homo sapiens
ccctaagggattccc

SEQ ID NO: 71167 - DNA, 15 bp, Homo sapiens
cccctaagggattcc

SEQ ID NO: 71168 - DNA, 15 bp, Homo sapiens
tcccctaagggattc

SEQ ID NO: 71169 - DNA, 15 bp, Homo sapiens
ctcccctaagggatt

SEQ ID NO: 71170 - DNA, 15 bp, Homo sapiens
actcccctaagggat

SEQ ID NO: 71171 - DNA, 15 bp, Homo sapiens
cactcccctaaggga

SEQ ID NO: 71172 - DNA, 15 bp, Homo sapiens
ccactcccctaaggg

SEQ ID NO: 71173 - DNA, 15 bp, Homo sapiens
tccactcccctaagg

SEQ ID NO: 71174 - DNA, 15 bp, Homo sapiens
gtccactcccctaag

SEQ ID NO: 71175 - DNA, 15 bp, Homo sapiens
tgtccactcccctaa

SEQ ID NO: 71176 - DNA, 15 bp, Homo sapiens
gtgtccactccccta

SEQ ID NO: 71177 - DNA, 15 bp, Homo sapiens
agtgtccactcccct

SEQ ID NO: 71178 - DNA, 15 bp, Homo sapiens
cagtgtccactcccc

SEQ ID NO: 71179 - DNA, 15 bp, Homo sapiens
tcagtgtccactccc

SEQ ID NO: 71180 - DNA, 15 bp, Homo sapiens
ttcagtgtccactcc

SEQ ID NO: 71181 - DNA, 15 bp, Homo sapiens
attcagtgtccactc

SEQ ID NO: 71182 - DNA, 15 bp, Homo sapiens
tattcagtgtccact

SEQ ID NO: 71183 - DNA, 15 bp, Homo sapiens
gtattcagtgtccac

SEQ ID NO: 71184 - DNA, 15 bp, Homo sapiens
ggtattcagtgtcca

SEQ ID NO: 71185 - DNA, 15 bp, Homo sapiens
tggtattcagtgtcc

SEQ ID NO: 71186 - DNA, 15 bp, Homo sapiens
ctggtattcagtgtc

SEQ ID NO: 71187 - DNA, 15 bp, Homo sapiens
cctggtattcagtgt

SEQ ID NO: 71188 - DNA, 15 bp, Homo sapiens
ccctggtattcagtg

SEQ ID NO: 71189 - DNA, 15 bp, Homo sapiens
tccctggtattcagt

SEQ ID NO: 71190 - DNA, 15 bp, Homo sapiens
atccctggtattcag

SEQ ID NO: 71191 - DNA, 15 bp, Homo sapiens
catccctggtattca

SEQ ID NO: 71192 - DNA, 15 bp, Homo sapiens
tcatccctggtattc

SEQ ID NO: 71193 - DNA, 15 bp, Homo sapiens
ctcatccctggtatt

SEQ ID NO: 71194 - DNA, 15 bp, Homo sapiens
cctcatccctggtat

SEQ ID NO: 71195 - DNA, 15 bp, Homo sapiens
tcctcatccctggta

SEQ ID NO: 71196 - DNA, 15 bp, Homo sapiens
ctcctcatccctggt

SEQ ID NO: 71197 - DNA, 15 bp, Homo sapiens
gctcctcatccctgg

SEQ ID NO: 71198 - DNA, 15 bp, Homo sapiens
agctcctcatccctg

SEQ ID NO: 71199 - DNA, 15 bp, Homo sapiens
cagctcctcatccct

SEQ ID NO: 71200 - DNA, 15 bp, Homo sapiens
tcagctcctcatccc

SEQ ID NO: 71201 - DNA, 15 bp, Homo sapiens
ctcagctcctcatcc

SEQ ID NO: 71202 - DNA, 15 bp, Homo sapiens
cctcagctcctcatc

SEQ ID NO: 71203 - DNA, 15 bp, Homo sapiens
ccctcagctcctcat

SEQ ID NO: 71204 - DNA, 15 bp, Homo sapiens
gccctcagctcctca

SEQ ID NO: 71205 - DNA, 15 bp, Homo sapiens
ggccctcagctcctc

SEQ ID NO: 71206 - DNA, 15 bp, Homo sapiens
tggccctcagctcct

SEQ ID NO: 71207 - DNA, 15 bp, Homo sapiens
ttggccctcagctcc

SEQ ID NO: 71208 - DNA, 15 bp, Homo sapiens
cttggccctcagctc

SEQ ID NO: 71209 - DNA, 15 bp, Homo sapiens
gcttggccctcagct

SEQ ID NO: 71210 - DNA, 15 bp, Homo sapiens
ggcttggccctcagc

SEQ ID NO: 71211 - DNA, 15 bp, Homo sapiens
tggcttggccctcag

SEQ ID NO: 71212 - DNA, 15 bp, Homo sapiens
ctggcttggccctca

SEQ ID NO: 71213 - DNA, 15 bp, Homo sapiens
cctggcttggccctc

SEQ ID NO: 71214 - DNA, 15 bp, Homo sapiens
tcctggcttggccct

SEQ ID NO: 71215 - DNA, 15 bp, Homo sapiens
ctcctggcttggccc

SEQ ID NO: 71216 - DNA, 15 bp, Homo sapiens
cctcctggcttggcc

SEQ ID NO: 71217 - DNA, 15 bp, Homo sapiens
ccctcctggcttggc

SEQ ID NO: 71218 - DNA, 15 bp, Homo sapiens
accctcctggcttgg

SEQ ID NO: 71219 - DNA, 15 bp, Homo sapiens
caccctcctggcttg

SEQ ID NO: 71220 - DNA, 15 bp, Homo sapiens
ccaccctcctggctt

SEQ ID NO: 71221 - DNA, 15 bp, Homo sapiens
cccaccctcctggct

SEQ ID NO: 71222 - DNA, 15 bp, Homo sapiens
tcccaccctcctggc

SEQ ID NO: 71223 - DNA, 15 bp, Homo sapiens
atcccaccctcctgg

SEQ ID NO: 71224 - DNA, 15 bp, Homo sapiens
aatcccaccctcctg

SEQ ID NO: 71225 - DNA, 15 bp, Homo sapiens
aaatcccaccctcct

SEQ ID NO: 71226 - DNA, 15 bp, Homo sapiens
caaatcccaccctcc

SEQ ID NO: 71227 - DNA, 15 bp, Homo sapiens
tcaaatcccaccctc

SEQ ID NO: 71228 - DNA, 15 bp, Homo sapiens
ctcaaatcccaccct

SEQ ID NO: 71229 - DNA, 15 bp, Homo sapiens
gctcaaatcccaccc

SEQ ID NO: 71230 - DNA, 15 bp, Homo sapiens
agctcaaatcccacc

SEQ ID NO: 71231 - DNA, 15 bp, Homo sapiens
aagctcaaatcccac

SEQ ID NO: 71232 - DNA, 15 bp, Homo sapiens
taagctcaaatccca

SEQ ID NO: 71233 - DNA, 15 bp, Homo sapiens
ctaagctcaaatccc

SEQ ID NO: 71234 - DNA, 15 bp, Homo sapiens
actaagctcaaatcc

SEQ ID NO: 71235 - DNA, 15 bp, Homo sapiens
tactaagctcaaatc

SEQ ID NO: 71236 - DNA, 15 bp, Homo sapiens
gtactaagctcaaat

SEQ ID NO: 71237 - DNA, 15 bp, Homo sapiens
tgtactaagctcaaa

SEQ ID NO: 71238 - DNA, 15 bp, Homo sapiens
atgtactaagctcaa

SEQ ID NO: 71239 - DNA, 15 bp, Homo sapiens
tatgtactaagctca

SEQ ID NO: 71240 - DNA, 15 bp, Homo sapiens
ttatgtactaagctc

SEQ ID NO: 71241 - DNA, 15 bp, Homo sapiens
cttatgtactaagct

SEQ ID NO: 71242 - DNA, 15 bp, Homo sapiens
tcttatgtactaagc

SEQ ID NO: 71243 - DNA, 15 bp, Homo sapiens
ttcttatgtactaag

SEQ ID NO: 71244 - DNA, 15 bp, Homo sapiens
cttcttatgtactaa

SEQ ID NO: 71245 - DNA, 15 bp, Homo sapiens
tcttcttatgtacta

SEQ ID NO: 71246 - DNA, 15 bp, Homo sapiens
ctcttcttatgtact

SEQ ID NO: 71247 - DNA, 15 bp, Homo sapiens
actcttcttatgtac

SEQ ID NO: 71248 - DNA, 15 bp, Homo sapiens
cactcttcttatgta

SEQ ID NO: 71249 - DNA, 15 bp, Homo sapiens
tcactcttcttatgt

SEQ ID NO: 71250 - DNA, 15 bp, Homo sapiens
ctcactcttcttatg

SEQ ID NO: 71251 - DNA, 15 bp, Homo sapiens
tctcactcttcttat

SEQ ID NO: 71252 - DNA, 15 bp, Homo sapiens
ctctcactcttctta

SEQ ID NO: 71253 - DNA, 15 bp, Homo sapiens
gctctcactcttctt

SEQ ID NO: 71254 - DNA, 15 bp, Homo sapiens
ggctctcactcttct

SEQ ID NO: 71255 - DNA, 15 bp, Homo sapiens
gggctctcactcttc

SEQ ID NO: 71256 - DNA, 15 bp, Homo sapiens
tgggctctcactctt

SEQ ID NO: 71257 - DNA, 15 bp, Homo sapiens
ctgggctctcactct

SEQ ID NO: 71258 - DNA, 15 bp, Homo sapiens
cctgggctctcactc

SEQ ID NO: 71259 - DNA, 15 bp, Homo sapiens
tcctgggctctcact

SEQ ID NO: 71260 - DNA, 15 bp, Homo sapiens
ctcctgggctctcac

SEQ ID NO: 71261 - DNA, 15 bp, Homo sapiens
tctcctgggctctca

SEQ ID NO: 71262 - DNA, 15 bp, Homo sapiens
atctcctgggctctc

SEQ ID NO: 71263 - DNA, 15 bp, Homo sapiens
catctcctgggctct

SEQ ID NO: 71264 - DNA, 15 bp, Homo sapiens
tcatctcctgggctc

SEQ ID NO: 71265 - DNA, 15 bp, Homo sapiens
ctcatctcctgggct

SEQ ID NO: 71266 - DNA, 15 bp, Homo sapiens
cctcatctcctgggc

SEQ ID NO: 71267 - DNA, 15 bp, Homo sapiens
tcctcatctcctggg

SEQ ID NO: 71268 - DNA, 15 bp, Homo sapiens
ttcctcatctcctgg

SEQ ID NO: 71269 - DNA, 15 bp, Homo sapiens
gttcctcatctcctg

SEQ ID NO: 71270 - DNA, 15 bp, Homo sapiens
tgttcctcatctcct

SEQ ID NO: 71271 - DNA, 15 bp, Homo sapiens
ctgttcctcatctcc

SEQ ID NO: 71272 - DNA, 15 bp, Homo sapiens
gctgttcctcatctc

SEQ ID NO: 71273 - DNA, 15 bp, Homo sapiens
ggctgttcctcatct

SEQ ID NO: 71274 - DNA, 15 bp, Homo sapiens
aggctgttcctcatc

SEQ ID NO: 71275 - DNA, 15 bp, Homo sapiens
aaggctgttcctcat

SEQ ID NO: 71276 - DNA, 15 bp, Homo sapiens
gaaggctgttcctca

SEQ ID NO: 71277 - DNA, 15 bp, Homo sapiens
ggaaggctgttcctc

SEQ ID NO: 71278 - DNA, 15 bp, Homo sapiens
tggaaggctgttcct

SEQ ID NO: 71279 - DNA, 15 bp, Homo sapiens
ctggaaggctgttcc

SEQ ID NO: 71280 - DNA, 15 bp, Homo sapiens
tctggaaggctgttc

SEQ ID NO: 71281 - DNA, 15 bp, Homo sapiens
atctggaaggctgtt

SEQ ID NO: 71282 - DNA, 15 bp, Homo sapiens
aatctggaaggctgt

SEQ ID NO: 71283 - DNA, 15 bp, Homo sapiens
aaatctggaaggctg

SEQ ID NO: 71284 - DNA, 15 bp, Homo sapiens
aaaatctggaaggct

SEQ ID NO: 71285 - DNA, 15 bp, Homo sapiens
aaaaatctggaaggc

SEQ ID NO: 71286 - DNA, 15 bp, Homo sapiens
gaaaaatctggaagg

SEQ ID NO: 71287 - DNA, 15 bp, Homo sapiens
agaaaaatctggaag

SEQ ID NO: 71288 - DNA, 15 bp, Homo sapiens
aagaaaaatctggaa

SEQ ID NO: 71289 - DNA, 15 bp, Homo sapiens
caagaaaaatctgga

SEQ ID NO: 71290 - DNA, 15 bp, Homo sapiens
ccaagaaaaatctgg

SEQ ID NO: 71291 - DNA, 15 bp, Homo sapiens
cccaagaaaaatctg

SEQ ID NO: 71292 - DNA, 15 bp, Homo sapiens
acccaagaaaaatct

SEQ ID NO: 71293 - DNA, 15 bp, Homo sapiens
tacccaagaaaaatc

SEQ ID NO: 71294 - DNA, 15 bp, Homo sapiens
ctacccaagaaaaat

SEQ ID NO: 71295 - DNA, 15 bp, Homo sapiens
gctacccaagaaaaa

SEQ ID NO: 71296 - DNA, 15 bp, Homo sapiens
cgctacccaagaaaa

SEQ ID NO: 71297 - DNA, 15 bp, Homo sapiens
acgctacccaagaaa

SEQ ID NO: 71298 - DNA, 15 bp, Homo sapiens
cacgctacccaagaa

SEQ ID NO: 71299 - DNA, 15 bp, Homo sapiens
acacgctacccaaga

SEQ ID NO: 71300 - DNA, 15 bp, Homo sapiens
cacacgctacccaag

SEQ ID NO: 71301 - DNA, 15 bp, Homo sapiens
acacacgctacccaa

SEQ ID NO: 71302 - DNA, 15 bp, Homo sapiens
tacacacgctaccca

SEQ ID NO: 71303 - DNA, 15 bp, Homo sapiens
ctacacacgctaccc

SEQ ID NO: 71304 - DNA, 15 bp, Homo sapiens
cctacacacgctacc

SEQ ID NO: 71305 - DNA, 15 bp, Homo sapiens
tcctacacacgctac

SEQ ID NO: 71306 - DNA, 15 bp, Homo sapiens
ctcctacacacgcta

SEQ ID NO: 71307 - DNA, 15 bp, Homo sapiens
cctcctacacacgct

SEQ ID NO: 71308 - DNA, 15 bp, Homo sapiens
gcctcctacacacgc

SEQ ID NO: 71309 - DNA, 15 bp, Homo sapiens
ggcctcctacacacg

SEQ ID NO: 71310 - DNA, 15 bp, Homo sapiens
tggcctcctacacac

SEQ ID NO: 71311 - DNA, 15 bp, Homo sapiens
ctggcctcctacaca

SEQ ID NO: 71312 - DNA, 15 bp, Homo sapiens
actggcctcctacac

SEQ ID NO: 71313 - DNA, 15 bp, Homo sapiens
cactggcctcctaca

SEQ ID NO: 71314 - DNA, 15 bp, Homo sapiens
acactggcctcctac

SEQ ID NO: 71315 - DNA, 15 bp, Homo sapiens
gacactggcctccta

SEQ ID NO: 71316 - DNA, 15 bp, Homo sapiens
tgacactggcctcct

SEQ ID NO: 71317 - DNA, 15 bp, Homo sapiens
gtgacactggcctcc

SEQ ID NO: 71318 - DNA, 15 bp, Homo sapiens
ggtgacactggcctc

SEQ ID NO: 71319 - DNA, 15 bp, Homo sapiens
tggtgacactggcct

SEQ ID NO: 71320 - DNA, 15 bp, Homo sapiens
ctggtgacactggcc

SEQ ID NO: 71321 - DNA, 15 bp, Homo sapiens
actggtgacactggc

SEQ ID NO: 71322 - DNA, 15 bp, Homo sapiens
tactggtgacactgg

SEQ ID NO: 71323 - DNA, 15 bp, Homo sapiens
ctactggtgacactg

SEQ ID NO: 71324 - DNA, 15 bp, Homo sapiens
gctactggtgacact

SEQ ID NO: 71325 - DNA, 15 bp, Homo sapiens
tgctactggtgacac

SEQ ID NO: 71326 - DNA, 15 bp, Homo sapiens
atgctactggtgaca

SEQ ID NO: 71327 - DNA, 15 bp, Homo sapiens
tatgctactggtgac

SEQ ID NO: 71328 - DNA, 15 bp, Homo sapiens
atatgctactggtga

SEQ ID NO: 71329 - DNA, 15 bp, Homo sapiens
catatgctactggtg

SEQ ID NO: 71330 - DNA, 15 bp, Homo sapiens
acatatgctactggt

SEQ ID NO: 71331 - DNA, 15 bp, Homo sapiens
cacatatgctactgg

SEQ ID NO: 71332 - DNA, 15 bp, Homo sapiens
ccacatatgctactg

SEQ ID NO: 71333 - DNA, 15 bp, Homo sapiens
tccacatatgctact

SEQ ID NO: 71334 - DNA, 15 bp, Homo sapiens
ttccacatatgctac

SEQ ID NO: 71335 - DNA, 15 bp, Homo sapiens
gttccacatatgcta

SEQ ID NO: 71336 - DNA, 15 bp, Homo sapiens
tgttccacatatgct

SEQ ID NO: 71337 - DNA, 15 bp, Homo sapiens
ctgttccacatatgc

SEQ ID NO: 71338 - DNA, 15 bp, Homo sapiens
tctgttccacatatg

SEQ ID NO: 71339 - DNA, 15 bp, Homo sapiens
ttctgttccacatat

SEQ ID NO: 71340 - DNA, 15 bp, Homo sapiens
cttctgttccacata

SEQ ID NO: 71341 - DNA, 15 bp, Homo sapiens
acttctgttccacat

SEQ ID NO: 71342 - DNA, 15 bp, Homo sapiens
gacttctgttccaca

SEQ ID NO: 71343 - DNA, 15 bp, Homo sapiens
agacttctgttccac

SEQ ID NO: 71344 - DNA, 15 bp, Homo sapiens
aagacttctgttcca

SEQ ID NO: 71345 - DNA, 15 bp, Homo sapiens
caagacttctgttcc

SEQ ID NO: 71346 - DNA, 15 bp, Homo sapiens
tcaagacttctgttc

SEQ ID NO: 71347 - DNA, 15 bp, Homo sapiens
gtcaagacttctgtt

SEQ ID NO: 71348 - DNA, 15 bp, Homo sapiens
ggtcaagacttctgt

SEQ ID NO: 71349 - DNA, 15 bp, Homo sapiens
gggtcaagacttctg

SEQ ID NO: 71350 - DNA, 15 bp, Homo sapiens
agggtcaagacttct

SEQ ID NO: 71351 - DNA, 15 bp, Homo sapiens
aagggtcaagacttc

SEQ ID NO: 71352 - DNA, 15 bp, Homo sapiens
caagggtcaagactt

SEQ ID NO: 71353 - DNA, 15 bp, Homo sapiens
gcaagggtcaagact

SEQ ID NO: 71354 - DNA, 15 bp, Homo sapiens
agcaagggtcaagac

SEQ ID NO: 71355 - DNA, 15 bp, Homo sapiens
tagcaagggtcaaga

SEQ ID NO: 71356 - DNA, 15 bp, Homo sapiens
atagcaagggtcaag

SEQ ID NO: 71357 - DNA, 15 bp, Homo sapiens
gatagcaagggtcaa

SEQ ID NO: 71358 - DNA, 15 bp, Homo sapiens
agatagcaagggtca

SEQ ID NO: 71359 - DNA, 15 bp, Homo sapiens
gagatagcaagggtc

SEQ ID NO: 71360 - DNA, 15 bp, Homo sapiens
agagatagcaagggt

SEQ ID NO: 71361 - DNA, 15 bp, Homo sapiens
cagagatagcaaggg

SEQ ID NO: 71362 - DNA, 15 bp, Homo sapiens
gcagagatagcaagg

SEQ ID NO: 71363 - DNA, 15 bp, Homo sapiens
ggcagagatagcaag

SEQ ID NO: 71364 - DNA, 15 bp, Homo sapiens
aggcagagatagcaa

SEQ ID NO: 71365 - DNA, 15 bp, Homo sapiens
taggcagagatagca

SEQ ID NO: 71366 - DNA, 15 bp, Homo sapiens
ctaggcagagatagc

SEQ ID NO: 71367 - DNA, 15 bp, Homo sapiens
actaggcagagatag

SEQ ID NO: 71368 - DNA, 15 bp, Homo sapiens
gactaggcagagata

SEQ ID NO: 71369 - DNA, 15 bp, Homo sapiens
ggactaggcagagat

SEQ ID NO: 71370 - DNA, 15 bp, Homo sapiens
aggactaggcagaga

SEQ ID NO: 71371 - DNA, 15 bp, Homo sapiens
taggactaggcagag

SEQ ID NO: 71372 - DNA, 15 bp, Homo sapiens
ttaggactaggcaga

SEQ ID NO: 71373 - DNA, 15 bp, Homo sapiens
attaggactaggcag

SEQ ID NO: 71374 - DNA, 15 bp, Homo sapiens
cattaggactaggca

SEQ ID NO: 71375 - DNA, 15 bp, Homo sapiens
ccattaggactaggc

SEQ ID NO: 71376 - DNA, 15 bp, Homo sapiens
gccattaggactagg

SEQ ID NO: 71377 - DNA, 15 bp, Homo sapiens
agccattaggactag

SEQ ID NO: 71378 - DNA, 15 bp, Homo sapiens
cagccattaggacta

SEQ ID NO: 71379 - DNA, 15 bp, Homo sapiens
ccagccattaggact

SEQ ID NO: 71380 - DNA, 15 bp, Homo sapiens
gccagccattaggac

SEQ ID NO: 71381 - DNA, 15 bp, Homo sapiens
agccagccattagga

SEQ ID NO: 71382 - DNA, 15 bp, Homo sapiens
aagccagccattagg

SEQ ID NO: 71383 - DNA, 15 bp, Homo sapiens
aaagccagccattag

SEQ ID NO: 71384 - DNA, 15 bp, Homo sapiens
aaaagccagccatta

SEQ ID NO: 71385 - DNA, 15 bp, Homo sapiens
gaaaagccagccatt

SEQ ID NO: 71386 - DNA, 15 bp, Homo sapiens
ggaaaagccagccat

SEQ ID NO: 71387 - DNA, 15 bp, Homo sapiens
gggaaaagccagcca

SEQ ID NO: 71388 - DNA, 15 bp, Homo sapiens
tgggaaaagccagcc

SEQ ID NO: 71389 - DNA, 15 bp, Homo sapiens
ctgggaaaagccagc

SEQ ID NO: 71390 - DNA, 15 bp, Homo sapiens
cctgggaaaagccag

SEQ ID NO: 71391 - DNA, 15 bp, Homo sapiens
tcctgggaaaagcca

SEQ ID NO: 71392 - DNA, 15 bp, Homo sapiens
ttcctgggaaaagcc

SEQ ID NO: 71393 - DNA, 15 bp, Homo sapiens
cttcctgggaaaagc

SEQ ID NO: 71394 - DNA, 15 bp, Homo sapiens
ccttcctgggaaaag

SEQ ID NO: 71395 - DNA, 15 bp, Homo sapiens
gccttcctgggaaaa

SEQ ID NO: 71396 - DNA, 15 bp, Homo sapiens
agccttcctgggaaa

SEQ ID NO: 71397 - DNA, 15 bp, Homo sapiens
aagccttcctgggaa

SEQ ID NO: 71398 - DNA, 15 bp, Homo sapiens
gaagccttcctggga

SEQ ID NO: 71399 - DNA, 15 bp, Homo sapiens
agaagccttcctggg

SEQ ID NO: 71400 - DNA, 15 bp, Homo sapiens
cagaagccttcctgg

SEQ ID NO: 71401 - DNA, 15 bp, Homo sapiens
gcagaagccttcctg

SEQ ID NO: 71402 - DNA, 15 bp, Homo sapiens
agcagaagccttcct

SEQ ID NO: 71403 - DNA, 15 bp, Homo sapiens
aagcagaagccttcc

SEQ ID NO: 71404 - DNA, 15 bp, Homo sapiens
gaagcagaagccttc

SEQ ID NO: 71405 - DNA, 15 bp, Homo sapiens
ggaagcagaagcctt

SEQ ID NO: 71406 - DNA, 15 bp, Homo sapiens
tggaagcagaagcct

SEQ ID NO: 71407 - DNA, 15 bp, Homo sapiens
atggaagcagaagcc

SEQ ID NO: 71408 - DNA, 15 bp, Homo sapiens
catggaagcagaagc

SEQ ID NO: 71409 - DNA, 15 bp, Homo sapiens
ccatggaagcagaag

SEQ ID NO: 71410 - DNA, 15 bp, Homo sapiens
tccatggaagcagaa

SEQ ID NO: 71411 - DNA, 15 bp, Homo sapiens
gtccatggaagcaga

SEQ ID NO: 71412 - DNA, 15 bp, Homo sapiens
agtccatggaagcag

SEQ ID NO: 71413 - DNA, 15 bp, Homo sapiens
cagtccatggaagca

SEQ ID NO: 71414 - DNA, 15 bp, Homo sapiens
acagtccatggaagc

SEQ ID NO: 71415 - DNA, 15 bp, Homo sapiens
aacagtccatggaag

SEQ ID NO: 71416 - DNA, 15 bp, Homo sapiens
taacagtccatggaa

SEQ ID NO: 71417 - DNA, 15 bp, Homo sapiens
ctaacagtccatgga

SEQ ID NO: 71418 - DNA, 15 bp, Homo sapiens
tctaacagtccatgg

SEQ ID NO: 71419 - DNA, 15 bp, Homo sapiens
atctaacagtccatg

SEQ ID NO: 71420 - DNA, 15 bp, Homo sapiens
aatctaacagtccat

SEQ ID NO: 71421 - DNA, 15 bp, Homo sapiens
taatctaacagtcca

SEQ ID NO: 71422 - DNA, 15 bp, Homo sapiens
ttaatctaacagtcc

SEQ ID NO: 71423 - DNA, 15 bp, Homo sapiens
gttaatctaacagtc

SEQ ID NO: 71424 - DNA, 15 bp, Homo sapiens
ggttaatctaacagt

SEQ ID NO: 71425 - DNA, 15 bp, Homo sapiens
gggttaatctaacag

SEQ ID NO: 71426 - DNA, 15 bp, Homo sapiens
agggttaatctaaca

SEQ ID NO: 71427 - DNA, 15 bp, Homo sapiens
aagggttaatctaac

SEQ ID NO: 71428 - DNA, 15 bp, Homo sapiens
aaagggttaatctaa

SEQ ID NO: 71429 - DNA, 15 bp, Homo sapiens
taaagggttaatcta

SEQ ID NO: 71430 - DNA, 15 bp, Homo sapiens
ataaagggttaatct

SEQ ID NO: 71431 - DNA, 15 bp, Homo sapiens
aataaagggttaatc

SEQ ID NO: 71432 - DNA, 15 bp, Homo sapiens
aaataaagggttaat

SEQ ID NO: 71433 - DNA, 15 bp, Homo sapiens
taaataaagggttaa

SEQ ID NO: 71434 - DNA, 15 bp, Homo sapiens
ctaaataaagggtta

SEQ ID NO: 71435 - DNA, 15 bp, Homo sapiens
cctaaataaagggtt

SEQ ID NO: 71436 - DNA, 15 bp, Homo sapiens
acctaaataaagggt

SEQ ID NO: 71437 - DNA, 15 bp, Homo sapiens
tacctaaataaaggg

SEQ ID NO: 71438 - DNA, 15 bp, Homo sapiens
ttacctaaataaagg

SEQ ID NO: 71439 - DNA, 15 bp, Homo sapiens
tttacctaaataaag

SEQ ID NO: 71440 - DNA, 15 bp, Homo sapiens
atttacctaaataaa

SEQ ID NO: 71441 - DNA, 15 bp, Homo sapiens
catttacctaaataa

SEQ ID NO: 71442 - DNA, 15 bp, Homo sapiens
tcatttacctaaata

SEQ ID NO: 71443 - DNA, 15 bp, Homo sapiens
ctcatttacctaaat

SEQ ID NO: 71444 - DNA, 15 bp, Homo sapiens
cctcatttacctaaa

SEQ ID NO: 71445 - DNA, 15 bp, Homo sapiens
ccctcatttacctaa

SEQ ID NO: 71446 - DNA, 15 bp, Homo sapiens
tccctcatttaccta

SEQ ID NO: 71447 - DNA, 15 bp, Homo sapiens
ttccctcatttacct

SEQ ID NO: 71448 - DNA, 15 bp, Homo sapiens
gttccctcatttacc

SEQ ID NO: 71449 - DNA, 15 bp, Homo sapiens
ggttccctcatttac

SEQ ID NO: 71450 - DNA, 15 bp, Homo sapiens
aggttccctcattta

SEQ ID NO: 71451 - DNA, 15 bp, Homo sapiens
taggttccctcattt

SEQ ID NO: 71452 - DNA, 15 bp, Homo sapiens
gtaggttccctcatt

SEQ ID NO: 71453 - DNA, 15 bp, Homo sapiens
agtaggttccctcat

SEQ ID NO: 71454 - DNA, 15 bp, Homo sapiens
aagtaggttccctca

SEQ ID NO: 71455 - DNA, 15 bp, Homo sapiens
aaagtaggttccctc

SEQ ID NO: 71456 - DNA, 15 bp, Homo sapiens
taaagtaggttccct

SEQ ID NO: 71457 - DNA, 15 bp, Homo sapiens
ataaagtaggttccc

SEQ ID NO: 71458 - DNA, 15 bp, Homo sapiens
tataaagtaggttcc

SEQ ID NO: 71459 - DNA, 15 bp, Homo sapiens
ttataaagtaggttc

SEQ ID NO: 71460 - DNA, 15 bp, Homo sapiens
cttataaagtaggtt

SEQ ID NO: 71461 - DNA, 15 bp, Homo sapiens
gcttataaagtaggt

SEQ ID NO: 71462 - DNA, 15 bp, Homo sapiens
tgcttataaagtagg

SEQ ID NO: 71463 - DNA, 15 bp, Homo sapiens
atgcttataaagtag

SEQ ID NO: 71464 - DNA, 15 bp, Homo sapiens
tatgcttataaagta

SEQ ID NO: 71465 - DNA, 15 bp, Homo sapiens
ctatgcttataaagt

SEQ ID NO: 71466 - DNA, 15 bp, Homo sapiens
cctatgcttataaag

SEQ ID NO: 71467 - DNA, 15 bp, Homo sapiens
tcctatgcttataaa

SEQ ID NO: 71468 - DNA, 15 bp, Homo sapiens
ttcctatgcttataa

SEQ ID NO: 71469 - DNA, 15 bp, Homo sapiens
tttcctatgcttata

SEQ ID NO: 71470 - DNA, 15 bp, Homo sapiens
ctttcctatgcttat

SEQ ID NO: 71471 - DNA, 15 bp, Homo sapiens
cctttcctatgctta

SEQ ID NO: 71472 - DNA, 15 bp, Homo sapiens
ccctttcctatgctt

SEQ ID NO: 71473 - DNA, 15 bp, Homo sapiens
accctttcctatgct

SEQ ID NO: 71474 - DNA, 15 bp, Homo sapiens
caccctttcctatgc

SEQ ID NO: 71475 - DNA, 15 bp, Homo sapiens
tcaccctttcctatg

SEQ ID NO: 71476 - DNA, 15 bp, Homo sapiens
ttcaccctttcctat

SEQ ID NO: 71477 - DNA, 15 bp, Homo sapiens
cttcaccctttccta

SEQ ID NO: 71478 - DNA, 15 bp, Homo sapiens
tcttcaccctttcct

SEQ ID NO: 71479 - DNA, 15 bp, Homo sapiens
ttcttcaccctttcc

SEQ ID NO: 71480 - DNA, 15 bp, Homo sapiens
attcttcaccctttc

SEQ ID NO: 71481 - DNA, 15 bp, Homo sapiens
gattcttcacccttt

SEQ ID NO: 71482 - DNA, 15 bp, Homo sapiens
agattcttcaccctt

SEQ ID NO: 71483 - DNA, 15 bp, Homo sapiens
aagattcttcaccct

SEQ ID NO: 71484 - DNA, 15 bp, Homo sapiens
aaagattcttcaccc

SEQ ID NO: 71485 - DNA, 15 bp, Homo sapiens
aaaagattcttcacc

SEQ ID NO: 71486 - DNA, 15 bp, Homo sapiens
taaaagattcttcac

SEQ ID NO: 71487 - DNA, 15 bp, Homo sapiens
ttaaaagattcttca

SEQ ID NO: 71488 - DNA, 15 bp, Homo sapiens
cttaaaagattcttc

SEQ ID NO: 71489 - DNA, 15 bp, Homo sapiens
tcttaaaagattctt

SEQ ID NO: 71490 - DNA, 15 bp, Homo sapiens
atcttaaaagattct

SEQ ID NO: 71491 - DNA, 15 bp, Homo sapiens
aatcttaaaagattc

SEQ ID NO: 71492 - DNA, 15 bp, Homo sapiens
gaatcttaaaagatt

SEQ ID NO: 71493 - DNA, 15 bp, Homo sapiens
ggaatcttaaaagat

SEQ ID NO: 71494 - DNA, 15 bp, Homo sapiens
aggaatcttaaaaga

SEQ ID NO: 71495 - DNA, 15 bp, Homo sapiens
aaggaatcttaaaag

SEQ ID NO: 71496 - DNA, 15 bp, Homo sapiens
aaaggaatcttaaaa

SEQ ID NO: 71497 - DNA, 15 bp, Homo sapiens
taaaggaatcttaaa

SEQ ID NO: 71498 - DNA, 15 bp, Homo sapiens
gtaaaggaatcttaa

SEQ ID NO: 71499 - DNA, 15 bp, Homo sapiens
agtaaaggaatctta

SEQ ID NO: 71500 - DNA, 15 bp, Homo sapiens
gagtaaaggaatctt

SEQ ID NO: 71501 - DNA, 15 bp, Homo sapiens
tgagtaaaggaatct

SEQ ID NO: 71502 - DNA, 15 bp, Homo sapiens
ttgagtaaaggaatc

SEQ ID NO: 71503 - DNA, 15 bp, Homo sapiens
cttgagtaaaggaat

SEQ ID NO: 71504 - DNA, 15 bp, Homo sapiens
acttgagtaaaggaa

SEQ ID NO: 71505 - DNA, 15 bp, Homo sapiens
aacttgagtaaagga

SEQ ID NO: 71506 - DNA, 15 bp, Homo sapiens
aaacttgagtaaagg

SEQ ID NO: 71507 - DNA, 15 bp, Homo sapiens
aaaacttgagtaaag

SEQ ID NO: 71508 - DNA, 15 bp, Homo sapiens
gaaaacttgagtaaa

SEQ ID NO: 71509 - DNA, 15 bp, Homo sapiens
agaaaacttgagtaa

SEQ ID NO: 71510 - DNA, 15 bp, Homo sapiens
aagaaaacttgagta

SEQ ID NO: 71511 - DNA, 15 bp, Homo sapiens
aaagaaaacttgagt

SEQ ID NO: 71512 - DNA, 15 bp, Homo sapiens
aaaagaaaacttgag

SEQ ID NO: 71513 - DNA, 15 bp, Homo sapiens
caaaagaaaacttga

SEQ ID NO: 71514 - DNA, 15 bp, Homo sapiens
tcaaaagaaaacttg

SEQ ID NO: 71515 - DNA, 15 bp, Homo sapiens
ttcaaaagaaaactt

SEQ ID NO: 71516 - DNA, 15 bp, Homo sapiens
cttcaaaagaaaact

SEQ ID NO: 71517 - DNA, 15 bp, Homo sapiens
tcttcaaaagaaaac

SEQ ID NO: 71518 - DNA, 15 bp, Homo sapiens
ttcttcaaaagaaaa

SEQ ID NO: 71519 - DNA, 15 bp, Homo sapiens
attcttcaaaagaaa

SEQ ID NO: 71520 - DNA, 15 bp, Homo sapiens
gattcttcaaaagaa

SEQ ID NO: 71521 - DNA, 15 bp, Homo sapiens
ggattcttcaaaaga

SEQ ID NO: 71522 - DNA, 15 bp, Homo sapiens
gggattcttcaaaag

SEQ ID NO: 71523 - DNA, 15 bp, Homo sapiens
tgggattcttcaaaa

SEQ ID NO: 71524 - DNA, 15 bp, Homo sapiens
ctgggattcttcaaa

SEQ ID NO: 71525 - DNA, 15 bp, Homo sapiens
tctgggattcttcaa

SEQ ID NO: 71526 - DNA, 15 bp, Homo sapiens
ctctgggattcttca

SEQ ID NO: 71527 - DNA, 15 bp, Homo sapiens
gctctgggattcttc

SEQ ID NO: 71528 - DNA, 15 bp, Homo sapiens
agctctgggattctt

SEQ ID NO: 71529 - DNA, 15 bp, Homo sapiens
aagctctgggattct

SEQ ID NO: 71530 - DNA, 15 bp, Homo sapiens
taagctctgggattc

SEQ ID NO: 71531 - DNA, 15 bp, Homo sapiens
ctaagctctgggatt

SEQ ID NO: 71532 - DNA, 15 bp, Homo sapiens
cctaagctctgggat

SEQ ID NO: 71533 - DNA, 15 bp, Homo sapiens
gcctaagctctggga

SEQ ID NO: 71534 - DNA, 15 bp, Homo sapiens
tgcctaagctctggg

SEQ ID NO: 71535 - DNA, 15 bp, Homo sapiens
ttgcctaagctctgg

SEQ ID NO: 71536 - DNA, 15 bp, Homo sapiens
attgcctaagctctg

SEQ ID NO: 71537 - DNA, 15 bp, Homo sapiens
tattgcctaagctct

SEQ ID NO: 71538 - DNA, 15 bp, Homo sapiens
ctattgcctaagctc

SEQ ID NO: 71539 - DNA, 15 bp, Homo sapiens
tctattgcctaagct

SEQ ID NO: 71540 - DNA, 15 bp, Homo sapiens
gtctattgcctaagc

SEQ ID NO: 71541 - DNA, 15 bp, Homo sapiens
tgtctattgcctaag

SEQ ID NO: 71542 - DNA, 15 bp, Homo sapiens
gtgtctattgcctaa

SEQ ID NO: 71543 - DNA, 15 bp, Homo sapiens
ggtgtctattgccta

SEQ ID NO: 71544 - DNA, 15 bp, Homo sapiens
tggtgtctattgcct

SEQ ID NO: 71545 - DNA, 15 bp, Homo sapiens
ctggtgtctattgcc

SEQ ID NO: 71546 - DNA, 15 bp, Homo sapiens
tctggtgtctattgc

SEQ ID NO: 71547 - DNA, 15 bp, Homo sapiens
gtctggtgtctattg

SEQ ID NO: 71548 - DNA, 15 bp, Homo sapiens
agtctggtgtctatt

SEQ ID NO: 71549 - DNA, 15 bp, Homo sapiens
aagtctggtgtctat

SEQ ID NO: 71550 - DNA, 15 bp, Homo sapiens
aaagtctggtgtcta

SEQ ID NO: 71551 - DNA, 15 bp, Homo sapiens
caaagtctggtgtct

SEQ ID NO: 71552 - DNA, 15 bp, Homo sapiens
tcaaagtctggtgtc

SEQ ID NO: 71553 - DNA, 15 bp, Homo sapiens
ctcaaagtctggtgt

SEQ ID NO: 71554 - DNA, 15 bp, Homo sapiens
gctcaaagtctggtg

SEQ ID NO: 71555 - DNA, 15 bp, Homo sapiens
ggctcaaagtctggt

SEQ ID NO: 71556 - DNA, 15 bp, Homo sapiens
aggctcaaagtctgg

SEQ ID NO: 71557 - DNA, 15 bp, Homo sapiens
gaggctcaaagtctg

SEQ ID NO: 71558 - DNA, 15 bp, Homo sapiens
tgaggctcaaagtct

SEQ ID NO: 71559 - DNA, 15 bp, Homo sapiens
ctgaggctcaaagtc

SEQ ID NO: 71560 - DNA, 15 bp, Homo sapiens
actgaggctcaaagt

SEQ ID NO: 71561 - DNA, 15 bp, Homo sapiens
aactgaggctcaaag

SEQ ID NO: 71562 - DNA, 15 bp, Homo sapiens
taactgaggctcaaa

SEQ ID NO: 71563 - DNA, 15 bp, Homo sapiens
ataactgaggctcaa

SEQ ID NO: 71564 - DNA, 15 bp, Homo sapiens
gataactgaggctca

SEQ ID NO: 71565 - DNA, 15 bp, Homo sapiens
ggataactgaggctc

SEQ ID NO: 71566 - DNA, 15 bp, Homo sapiens
tggataactgaggct

SEQ ID NO: 71567 - DNA, 15 bp, Homo sapiens
atggataactgaggc

SEQ ID NO: 71568 - DNA, 15 bp, Homo sapiens
aatggataactgagg

SEQ ID NO: 71569 - DNA, 15 bp, Homo sapiens
gaatggataactgag

SEQ ID NO: 71570 - DNA, 15 bp, Homo sapiens
tgaatggataactga

SEQ ID NO: 71571 - DNA, 15 bp, Homo sapiens
gtgaatggataactg

SEQ ID NO: 71572 - DNA, 15 bp, Homo sapiens
ggtgaatggataact

SEQ ID NO: 71573 - DNA, 15 bp, Homo sapiens
gggtgaatggataac

SEQ ID NO: 71574 - DNA, 15 bp, Homo sapiens
tgggtgaatggataa

SEQ ID NO: 71575 - DNA, 15 bp, Homo sapiens
atgggtgaatggata

SEQ ID NO: 71576 - DNA, 15 bp, Homo sapiens
gatgggtgaatggat

SEQ ID NO: 71577 - DNA, 15 bp, Homo sapiens
ggatgggtgaatgga

SEQ ID NO: 71578 - DNA, 15 bp, Homo sapiens
tggatgggtgaatgg

SEQ ID NO: 71579 - DNA, 15 bp, Homo sapiens
gtggatgggtgaatg

SEQ ID NO: 71580 - DNA, 15 bp, Homo sapiens
ggtggatgggtgaat

SEQ ID NO: 71581 - DNA, 15 bp, Homo sapiens
gggtggatgggtgaa

SEQ ID NO: 71582 - DNA, 15 bp, Homo sapiens
tgggtggatgggtga

SEQ ID NO: 71583 - DNA, 15 bp, Homo sapiens
gtgggtggatgggtg

SEQ ID NO: 71584 - DNA, 15 bp, Homo sapiens
ggtgggtggatgggt

SEQ ID NO: 71585 - DNA, 15 bp, Homo sapiens
gggtgggtggatggg

SEQ ID NO: 71586 - DNA, 15 bp, Homo sapiens
tgggtgggtggatgg

SEQ ID NO: 71587 - DNA, 15 bp, Homo sapiens
gtgggtgggtggatg

SEQ ID NO: 71588 - DNA, 15 bp, Homo sapiens
ggtgggtgggtggat

SEQ ID NO: 71589 - DNA, 15 bp, Homo sapiens
gggtgggtgggtgga

SEQ ID NO: 71590 - DNA, 15 bp, Homo sapiens
tgggtgggtgggtgg

SEQ ID NO: 71591 - DNA, 15 bp, Homo sapiens
gtgggtgggtgggtg

SEQ ID NO: 71592 - DNA, 15 bp, Homo sapiens
ggtgggtgggtgggt

SEQ ID NO: 71593 - DNA, 15 bp, Homo sapiens
gggtgggtgggtggg

SEQ ID NO: 71594 - DNA, 15 bp, Homo sapiens
atgggtgggtgggtg

SEQ ID NO: 71595 - DNA, 15 bp, Homo sapiens
gatgggtgggtgggt

SEQ ID NO: 71596 - DNA, 15 bp, Homo sapiens
ggatgggtgggtggg

SEQ ID NO: 71597 - DNA, 15 bp, Homo sapiens
aggatgggtgggtgg

SEQ ID NO: 71598 - DNA, 15 bp, Homo sapiens
aaggatgggtgggtg

SEQ ID NO: 71599 - DNA, 15 bp, Homo sapiens
gaaggatgggtgggt

SEQ ID NO: 71600 - DNA, 15 bp, Homo sapiens
ggaaggatgggtggg

SEQ ID NO: 71601 - DNA, 15 bp, Homo sapiens
tggaaggatgggtgg

SEQ ID NO: 71602 - DNA, 15 bp, Homo sapiens
atggaaggatgggtg

SEQ ID NO: 71603 - DNA, 15 bp, Homo sapiens
gatggaaggatgggt

SEQ ID NO: 71604 - DNA, 15 bp, Homo sapiens
ggatggaaggatggg

SEQ ID NO: 71605 - DNA, 15 bp, Homo sapiens
aggatggaaggatgg

SEQ ID NO: 71606 - DNA, 15 bp, Homo sapiens
gaggatggaaggatg

SEQ ID NO: 71607 - DNA, 15 bp, Homo sapiens
ggaggatggaaggat

SEQ ID NO: 71608 - DNA, 15 bp, Homo sapiens
gggaggatggaagga

SEQ ID NO: 71609 - DNA, 15 bp, Homo sapiens
tgggaggatggaagg

SEQ ID NO: 71610 - DNA, 15 bp, Homo sapiens
atgggaggatggaag

SEQ ID NO: 71611 - DNA, 15 bp, Homo sapiens
gatgggaggatggaa

SEQ ID NO: 71612 - DNA, 15 bp, Homo sapiens
ggatgggaggatgga

SEQ ID NO: 71613 - DNA, 15 bp, Homo sapiens
aggatgggaggatgg

SEQ ID NO: 71614 - DNA, 15 bp, Homo sapiens
gaggatgggaggatg

SEQ ID NO: 71615 - DNA, 15 bp, Homo sapiens
ggaggatgggaggat

SEQ ID NO: 71616 - DNA, 15 bp, Homo sapiens
gggaggatgggagga

SEQ ID NO: 71617 - DNA, 15 bp, Homo sapiens
tgggaggatgggagg

SEQ ID NO: 71618 - DNA, 15 bp, Homo sapiens
atgggaggatgggag

SEQ ID NO: 71619 - DNA, 15 bp, Homo sapiens
aatgggaggatggga

SEQ ID NO: 71620 - DNA, 15 bp, Homo sapiens
gaatgggaggatggg

SEQ ID NO: 71621 - DNA, 15 bp, Homo sapiens
tgaatgggaggatgg

SEQ ID NO: 71622 - DNA, 15 bp, Homo sapiens
gtgaatgggaggatg

SEQ ID NO: 71623 - DNA, 15 bp, Homo sapiens
ggtgaatgggaggat

SEQ ID NO: 71624 - DNA, 15 bp, Homo sapiens
gggtgaatgggagga

SEQ ID NO: 71625 - DNA, 15 bp, Homo sapiens
tgggtgaatgggagg

SEQ ID NO: 71626 - DNA, 15 bp, Homo sapiens
atgggtgaatgggag

SEQ ID NO: 71627 - DNA, 15 bp, Homo sapiens
gatgggtgaatggga

SEQ ID NO: 71628 - DNA, 15 bp, Homo sapiens
ggatgggtgaatggg

SEQ ID NO: 71629 - DNA, 15 bp, Homo sapiens
atgggtggatgggtg

SEQ ID NO: 71630 - DNA, 15 bp, Homo sapiens
gatgggtggatgggt

SEQ ID NO: 71631 - DNA, 15 bp, Homo sapiens
ggatgggtggatggg

SEQ ID NO: 71632 - DNA, 15 bp, Homo sapiens
tggatgggtggatgg

SEQ ID NO: 71633 - DNA, 15 bp, Homo sapiens
ctggatgggtggatg

SEQ ID NO: 71634 - DNA, 15 bp, Homo sapiens
gctggatgggtggat

SEQ ID NO: 71635 - DNA, 15 bp, Homo sapiens
agctggatgggtgga

SEQ ID NO: 71636 - DNA, 15 bp, Homo sapiens
cagctggatgggtgg

SEQ ID NO: 71637 - DNA, 15 bp, Homo sapiens
acagctggatgggtg

SEQ ID NO: 71638 - DNA, 15 bp, Homo sapiens
gacagctggatgggt

SEQ ID NO: 71639 - DNA, 15 bp, Homo sapiens
ggacagctggatggg

SEQ ID NO: 71640 - DNA, 15 bp, Homo sapiens
tggacagctggatgg

SEQ ID NO: 71641 - DNA, 15 bp, Homo sapiens
gtggacagctggatg

SEQ ID NO: 71642 - DNA, 15 bp, Homo sapiens
ggtggacagctggat

SEQ ID NO: 71643 - DNA, 15 bp, Homo sapiens
gggtggacagctgga

SEQ ID NO: 71644 - DNA, 15 bp, Homo sapiens
tgggtggacagctgg

SEQ ID NO: 71645 - DNA, 15 bp, Homo sapiens
atgggtggacagctg

SEQ ID NO: 71646 - DNA, 15 bp, Homo sapiens
aatgggtggacagct

SEQ ID NO: 71647 - DNA, 15 bp, Homo sapiens
gaatgggtggacagc

SEQ ID NO: 71648 - DNA, 15 bp, Homo sapiens
agaatgggtggacag

SEQ ID NO: 71649 - DNA, 15 bp, Homo sapiens
tagaatgggtggaca

SEQ ID NO: 71650 - DNA, 15 bp, Homo sapiens
gtagaatgggtggac

SEQ ID NO: 71651 - DNA, 15 bp, Homo sapiens
tgtagaatgggtgga

SEQ ID NO: 71652 - DNA, 15 bp, Homo sapiens
gtgtagaatgggtgg

SEQ ID NO: 71653 - DNA, 15 bp, Homo sapiens
agtgtagaatgggtg

SEQ ID NO: 71654 - DNA, 15 bp, Homo sapiens
cagtgtagaatgggt

SEQ ID NO: 71655 - DNA, 15 bp, Homo sapiens
tcagtgtagaatggg

SEQ ID NO: 71656 - DNA, 15 bp, Homo sapiens
ctcagtgtagaatgg

SEQ ID NO: 71657 - DNA, 15 bp, Homo sapiens
actcagtgtagaatg

SEQ ID NO: 71658 - DNA, 15 bp, Homo sapiens
tactcagtgtagaat

SEQ ID NO: 71659 - DNA, 15 bp, Homo sapiens
gtactcagtgtagaa

SEQ ID NO: 71660 - DNA, 15 bp, Homo sapiens
ggtactcagtgtaga

SEQ ID NO: 71661 - DNA, 15 bp, Homo sapiens
aggtactcagtgtag

SEQ ID NO: 71662 - DNA, 15 bp, Homo sapiens
taggtactcagtgta

SEQ ID NO: 71663 - DNA, 15 bp, Homo sapiens
ataggtactcagtgt

SEQ ID NO: 71664 - DNA, 15 bp, Homo sapiens
tataggtactcagtg

SEQ ID NO: 71665 - DNA, 15 bp, Homo sapiens
ttataggtactcagt

SEQ ID NO: 71666 - DNA, 15 bp, Homo sapiens
attataggtactcag

SEQ ID NO: 71667 - DNA, 15 bp, Homo sapiens
cattataggtactca

SEQ ID NO: 71668 - DNA, 15 bp, Homo sapiens
acattataggtactc

SEQ ID NO: 71669 - DNA, 15 bp, Homo sapiens
cacattataggtact

SEQ ID NO: 71670 - DNA, 15 bp, Homo sapiens
gcacattataggtac

SEQ ID NO: 71671 - DNA, 15 bp, Homo sapiens
ggcacattataggta

SEQ ID NO: 71672 - DNA, 15 bp, Homo sapiens
aggcacattataggt

SEQ ID NO: 71673 - DNA, 15 bp, Homo sapiens
caggcacattatagg

SEQ ID NO: 71674 - DNA, 15 bp, Homo sapiens
ccaggcacattatag

SEQ ID NO: 71675 - DNA, 15 bp, Homo sapiens
gccaggcacattata

SEQ ID NO: 71676 - DNA, 15 bp, Homo sapiens
agccaggcacattat

SEQ ID NO: 71677 - DNA, 15 bp, Homo sapiens
aagccaggcacatta

SEQ ID NO: 71678 - DNA, 15 bp, Homo sapiens
aaagccaggcacatt

SEQ ID NO: 71679 - DNA, 15 bp, Homo sapiens
caaagccaggcacat

SEQ ID NO: 71680 - DNA, 15 bp, Homo sapiens
ccaaagccaggcaca

SEQ ID NO: 71681 - DNA, 15 bp, Homo sapiens
accaaagccaggcac

SEQ ID NO: 71682 - DNA, 15 bp, Homo sapiens
caccaaagccaggca

SEQ ID NO: 71683 - DNA, 15 bp, Homo sapiens
tcaccaaagccaggc

SEQ ID NO: 71684 - DNA, 15 bp, Homo sapiens
atcaccaaagccagg

SEQ ID NO: 71685 - DNA, 15 bp, Homo sapiens
tatcaccaaagccag

SEQ ID NO: 71686 - DNA, 15 bp, Homo sapiens
gtatcaccaaagcca

SEQ ID NO: 71687 - DNA, 15 bp, Homo sapiens
tgtatcaccaaagcc

SEQ ID NO: 71688 - DNA, 15 bp, Homo sapiens
ttgtatcaccaaagc

SEQ ID NO: 71689 - DNA, 15 bp, Homo sapiens
tttgtatcaccaaag

SEQ ID NO: 71690 - DNA, 15 bp, Homo sapiens
ctttgtatcaccaaa

SEQ ID NO: 71691 - DNA, 15 bp, Homo sapiens
cctttgtatcaccaa

SEQ ID NO: 71692 - DNA, 15 bp, Homo sapiens
acctttgtatcacca

SEQ ID NO: 71693 - DNA, 15 bp, Homo sapiens
cacctttgtatcacc

SEQ ID NO: 71694 - DNA, 15 bp, Homo sapiens
tcacctttgtatcac

SEQ ID NO: 71695 - DNA, 15 bp, Homo sapiens
ttcacctttgtatca

SEQ ID NO: 71696 - DNA, 15 bp, Homo sapiens
attcacctttgtatc

SEQ ID NO: 71697 - DNA, 15 bp, Homo sapiens
tattcacctttgtat

SEQ ID NO: 71698 - DNA, 15 bp, Homo sapiens
ttattcacctttgta

SEQ ID NO: 71699 - DNA, 15 bp, Homo sapiens
cttattcacctttgt

SEQ ID NO: 71700 - DNA, 15 bp, Homo sapiens
tcttattcacctttg

SEQ ID NO: 71701 - DNA, 15 bp, Homo sapiens
gtcttattcaccttt

SEQ ID NO: 71702 - DNA, 15 bp, Homo sapiens
tgtcttattcacctt

SEQ ID NO: 71703 - DNA, 15 bp, Homo sapiens
atgtcttattcacct

SEQ ID NO: 71704 - DNA, 15 bp, Homo sapiens
tatgtcttattcacc

SEQ ID NO: 71705 - DNA, 15 bp, Homo sapiens
ctatgtcttattcac

SEQ ID NO: 71706 - DNA, 15 bp, Homo sapiens
actatgtcttattca

SEQ ID NO: 71707 - DNA, 15 bp, Homo sapiens
gactatgtcttattc

SEQ ID NO: 71708 - DNA, 15 bp, Homo sapiens
ggactatgtcttatt

SEQ ID NO: 71709 - DNA, 15 bp, Homo sapiens
aggactatgtcttat

SEQ ID NO: 71710 - DNA, 15 bp, Homo sapiens
aaggactatgtctta

SEQ ID NO: 71711 - DNA, 15 bp, Homo sapiens
aaaggactatgtctt

SEQ ID NO: 71712 - DNA, 15 bp, Homo sapiens
gaaaggactatgtct

SEQ ID NO: 71713 - DNA, 15 bp, Homo sapiens
ggaaaggactatgtc

SEQ ID NO: 71714 - DNA, 15 bp, Homo sapiens
aggaaaggactatgt

SEQ ID NO: 71715 - DNA, 15 bp, Homo sapiens
aaggaaaggactatg

SEQ ID NO: 71716 - DNA, 15 bp, Homo sapiens
aaaggaaaggactat

SEQ ID NO: 71717 - DNA, 15 bp, Homo sapiens
caaaggaaaggacta

SEQ ID NO: 71718 - DNA, 15 bp, Homo sapiens
gcaaaggaaaggact

SEQ ID NO: 71719 - DNA, 15 bp, Homo sapiens
ggcaaaggaaaggac

SEQ ID NO: 71720 - DNA, 15 bp, Homo sapiens
gggggcaaaggaaag

SEQ ID NO: 71721 - DNA, 15 bp, Homo sapiens
tgggggcaaaggaaa

SEQ ID NO: 71722 - DNA, 15 bp, Homo sapiens
ttgggggcaaaggaa

SEQ ID NO: 71723 - DNA, 15 bp, Homo sapiens
gttgggggcaaagga

SEQ ID NO: 71724 - DNA, 15 bp, Homo sapiens
ggttgggggcaaagg

SEQ ID NO: 71725 - DNA, 15 bp, Homo sapiens
gggttgggggcaaag

SEQ ID NO: 71726 - DNA, 15 bp, Homo sapiens
agggttgggggcaaa

SEQ ID NO: 71727 - DNA, 15 bp, Homo sapiens
gagggttgggggcaa

SEQ ID NO: 71728 - DNA, 15 bp, Homo sapiens
tgagggttgggggca

SEQ ID NO: 71729 - DNA, 15 bp, Homo sapiens
ctgagggttgggggc

SEQ ID NO: 71730 - DNA, 15 bp, Homo sapiens
tctgagggttggggg

SEQ ID NO: 71731 - DNA, 15 bp, Homo sapiens
gtctgagggttgggg

SEQ ID NO: 71732 - DNA, 15 bp, Homo sapiens
ggtctgagggttggg

SEQ ID NO: 71733 - DNA, 15 bp, Homo sapiens
tggtctgagggttgg

SEQ ID NO: 71734 - DNA, 15 bp, Homo sapiens
ctggtctgagggttg

SEQ ID NO: 71735 - DNA, 15 bp, Homo sapiens
tctggtctgagggtt

SEQ ID NO: 71736 - DNA, 15 bp, Homo sapiens
ctctggtctgagggt

SEQ ID NO: 71737 - DNA, 15 bp, Homo sapiens
tctctggtctgaggg

SEQ ID NO: 71738 - DNA, 15 bp, Homo sapiens
atctctggtctgagg

SEQ ID NO: 71739 - DNA, 15 bp, Homo sapiens
catctctggtctgag

SEQ ID NO: 71740 - DNA, 15 bp, Homo sapiens
tcatctctggtctga

SEQ ID NO: 71741 - DNA, 15 bp, Homo sapiens
ttcatctctggtctg

SEQ ID NO: 71742 - DNA, 15 bp, Homo sapiens
gttcatctctggtct

SEQ ID NO: 71743 - DNA, 15 bp, Homo sapiens
tgttcatctctggtc

SEQ ID NO: 71744 - DNA, 15 bp, Homo sapiens
atgttcatctctggt

SEQ ID NO: 71745 - DNA, 15 bp, Homo sapiens
catgttcatctctgg

SEQ ID NO: 71746 - DNA, 15 bp, Homo sapiens
acatgttcatctctg

SEQ ID NO: 71747 - DNA, 15 bp, Homo sapiens
cacatgttcatctct

SEQ ID NO: 71748 - DNA, 15 bp, Homo sapiens
ccacatgttcatctc

SEQ ID NO: 71749 - DNA, 15 bp, Homo sapiens
tccacatgttcatct

SEQ ID NO: 71750 - DNA, 15 bp, Homo sapiens
ttccacatgttcatc

SEQ ID NO: 71751 - DNA, 15 bp, Homo sapiens
attccacatgttcat

SEQ ID NO: 71752 - DNA, 15 bp, Homo sapiens
cattccacatgttca

SEQ ID NO: 71753 - DNA, 15 bp, Homo sapiens
tcattccacatgttc

SEQ ID NO: 71754 - DNA, 15 bp, Homo sapiens
gtcattccacatgtt

SEQ ID NO: 71755 - DNA, 15 bp, Homo sapiens
ggtcattccacatgt

SEQ ID NO: 71756 - DNA, 15 bp, Homo sapiens
aggtcattccacatg

SEQ ID NO: 71757 - DNA, 15 bp, Homo sapiens
taggtcattccacat

SEQ ID NO: 71758 - DNA, 15 bp, Homo sapiens
ttaggtcattccaca

SEQ ID NO: 71759 - DNA, 15 bp, Homo sapiens
tttaggtcattccac

SEQ ID NO: 71760 - DNA, 15 bp, Homo sapiens
gtttaggtcattcca

SEQ ID NO: 71761 - DNA, 15 bp, Homo sapiens
tgtttaggtcattcc

SEQ ID NO: 71762 - DNA, 15 bp, Homo sapiens
gtgtttaggtcattc

SEQ ID NO: 71763 - DNA, 15 bp, Homo sapiens
ggtgtttaggtcatt

SEQ ID NO: 71764 - DNA, 15 bp, Homo sapiens
aggtgtttaggtcat

SEQ ID NO: 71765 - DNA, 15 bp, Homo sapiens
caggtgtttaggtca

SEQ ID NO: 71766 - DNA, 15 bp, Homo sapiens
ccaggtgtttaggtc

SEQ ID NO: 71767 - DNA, 15 bp, Homo sapiens
tccaggtgtttaggt

SEQ ID NO: 71768 - DNA, 15 bp, Homo sapiens
ttccaggtgtttagg

SEQ ID NO: 71769 - DNA, 15 bp, Homo sapiens
gttccaggtgtttag

SEQ ID NO: 71770 - DNA, 15 bp, Homo sapiens
tgttccaggtgttta

SEQ ID NO: 71771 - DNA, 15 bp, Homo sapiens
ctgttccaggtgttt

SEQ ID NO: 71772 - DNA, 15 bp, Homo sapiens
cctgttccaggtgtt

SEQ ID NO: 71773 - DNA, 15 bp, Homo sapiens
acctgttccaggtgt

SEQ ID NO: 71774 - DNA, 15 bp, Homo sapiens
cacctgttccaggtg

SEQ ID NO: 71775 - DNA, 15 bp, Homo sapiens
acacctgttccaggt

SEQ ID NO: 71776 - DNA, 15 bp, Homo sapiens
cacacctgttccagg

SEQ ID NO: 71777 - DNA, 15 bp, Homo sapiens
ccacacctgttccag

SEQ ID NO: 71778 - DNA, 15 bp, Homo sapiens
accacacctgttcca

SEQ ID NO: 71779 - DNA, 15 bp, Homo sapiens
caccacacctgttcc

SEQ ID NO: 71780 - DNA, 15 bp, Homo sapiens
acaccacacctgttc

SEQ ID NO: 71781 - DNA, 15 bp, Homo sapiens
tacaccacacctgtt

SEQ ID NO: 71782 - DNA, 15 bp, Homo sapiens
atacaccacacctgt

SEQ ID NO: 71783 - DNA, 15 bp, Homo sapiens
catacaccacacctg

SEQ ID NO: 71784 - DNA, 15 bp, Homo sapiens
tcatacaccacacct

SEQ ID NO: 71785 - DNA, 15 bp, Homo sapiens
ctcatacaccacacc

SEQ ID NO: 71786 - DNA, 15 bp, Homo sapiens
gctcatacaccacac

SEQ ID NO: 71787 - DNA, 15 bp, Homo sapiens
cgctcatacaccaca

SEQ ID NO: 71788 - DNA, 15 bp, Homo sapiens
ccgctcatacaccac

SEQ ID NO: 71789 - DNA, 15 bp, Homo sapiens
gccgctcatacacca

SEQ ID NO: 71790 - DNA, 15 bp, Homo sapiens
tgccgctcatacacc

SEQ ID NO: 71791 - DNA, 15 bp, Homo sapiens
ctgccgctcatacac

SEQ ID NO: 71792 - DNA, 15 bp, Homo sapiens
cctgccgctcataca

SEQ ID NO: 71793 - DNA, 15 bp, Homo sapiens
gcctgccgctcatac

SEQ ID NO: 71794 - DNA, 15 bp, Homo sapiens
ggcctgccgctcata

SEQ ID NO: 71795 - DNA, 15 bp, Homo sapiens
aggcctgccgctcat

SEQ ID NO: 71796 - DNA, 15 bp, Homo sapiens
gaggcctgccgctca

SEQ ID NO: 71797 - DNA, 15 bp, Homo sapiens
agaggcctgccgctc

SEQ ID NO: 71798 - DNA, 15 bp, Homo sapiens
cagaggcctgccgct

SEQ ID NO: 71799 - DNA, 15 bp, Homo sapiens
tcagaggcctgccgc

SEQ ID NO: 71800 - DNA, 15 bp, Homo sapiens
atcagaggcctgccg

SEQ ID NO: 71801 - DNA, 15 bp, Homo sapiens
catcagaggcctgcc

SEQ ID NO: 71802 - DNA, 15 bp, Homo sapiens
tcatcagaggcctgc

SEQ ID NO: 71803 - DNA, 15 bp, Homo sapiens
ctcatcagaggcctg

SEQ ID NO: 71804 - DNA, 15 bp, Homo sapiens
tctcatcagaggcct

SEQ ID NO: 71805 - DNA, 15 bp, Homo sapiens
ctctcatcagaggcc

SEQ ID NO: 71806 - DNA, 15 bp, Homo sapiens
cctctcatcagaggc

SEQ ID NO: 71807 - DNA, 15 bp, Homo sapiens
ccctctcatcagagg

SEQ ID NO: 71808 - DNA, 15 bp, Homo sapiens
accctctcatcagag

SEQ ID NO: 71809 - DNA, 15 bp, Homo sapiens
caccctctcatcaga

SEQ ID NO: 71810 - DNA, 15 bp, Homo sapiens
ccaccctctcatcag

SEQ ID NO: 71811 - DNA, 15 bp, Homo sapiens
cccaccctctcatca

SEQ ID NO: 71812 - DNA, 15 bp, Homo sapiens
ccccaccctctcatc

SEQ ID NO: 71813 - DNA, 15 bp, Homo sapiens
cccccaccctctcat

SEQ ID NO: 71814 - DNA, 15 bp, Homo sapiens
tcccccaccctctca

SEQ ID NO: 71815 - DNA, 15 bp, Homo sapiens
atcccccaccctctc

SEQ ID NO: 71816 - DNA, 15 bp, Homo sapiens
catcccccaccctct

SEQ ID NO: 71817 - DNA, 15 bp, Homo sapiens
ccatcccccaccctc

SEQ ID NO: 71818 - DNA, 15 bp, Homo sapiens
gccatcccccaccct

SEQ ID NO: 71819 - DNA, 15 bp, Homo sapiens
ggccatcccccaccc

SEQ ID NO: 71820 - DNA, 15 bp, Homo sapiens
tggccatcccccacc

SEQ ID NO: 71821 - DNA, 15 bp, Homo sapiens
ctggccatcccccac

SEQ ID NO: 71822 - DNA, 15 bp, Homo sapiens
gctggccatccccca

SEQ ID NO: 71823 - DNA, 15 bp, Homo sapiens
ggctggccatccccc

SEQ ID NO: 71824 - DNA, 15 bp, Homo sapiens
gggctggccatcccc

SEQ ID NO: 71825 - DNA, 15 bp, Homo sapiens
agggctggccatccc

SEQ ID NO: 71826 - DNA, 15 bp, Homo sapiens
gagggctggccatcc

SEQ ID NO: 71827 - DNA, 15 bp, Homo sapiens
tgagggctggccatc

SEQ ID NO: 71828 - DNA, 15 bp, Homo sapiens
gtgagggctggccat

SEQ ID NO: 71829 - DNA, 15 bp, Homo sapiens
agtgagggctggcca

SEQ ID NO: 71830 - DNA, 15 bp, Homo sapiens
gagtgagggctggcc

SEQ ID NO: 71831 - DNA, 15 bp, Homo sapiens
ggagtgagggctggc

SEQ ID NO: 71832 - DNA, 15 bp, Homo sapiens
cggagtgagggctgg

SEQ ID NO: 71833 - DNA, 15 bp, Homo sapiens
tcggagtgagggctg

SEQ ID NO: 71834 - DNA, 15 bp, Homo sapiens
ttcggagtgagggct

SEQ ID NO: 71835 - DNA, 15 bp, Homo sapiens
cttcggagtgagggc

SEQ ID NO: 71836 - DNA, 15 bp, Homo sapiens
gcttcggagtgaggg

SEQ ID NO: 71837 - DNA, 15 bp, Homo sapiens
ggcttcggagtgagg

SEQ ID NO: 71838 - DNA, 15 bp, Homo sapiens
gggcttcggagtgag

SEQ ID NO: 71839 - DNA, 15 bp, Homo sapiens
ggggcttcggagtga

SEQ ID NO: 71840 - DNA, 15 bp, Homo sapiens
aggggcttcggagtg

SEQ ID NO: 71841 - DNA, 15 bp, Homo sapiens
gaggggcttcggagt

SEQ ID NO: 71842 - DNA, 15 bp, Homo sapiens
agaggggcttcggag

SEQ ID NO: 71843 - DNA, 15 bp, Homo sapiens
cagaggggcttcgga

SEQ ID NO: 71844 - DNA, 15 bp, Homo sapiens
tcagaggggcttcgg

SEQ ID NO: 71845 - DNA, 15 bp, Homo sapiens
ctcagaggggcttcg

SEQ ID NO: 71846 - DNA, 15 bp, Homo sapiens
actcagaggggcttc

SEQ ID NO: 71847 - DNA, 15 bp, Homo sapiens
aactcagaggggctt

SEQ ID NO: 71848 - DNA, 15 bp, Homo sapiens
caactcagaggggct

SEQ ID NO: 71849 - DNA, 15 bp, Homo sapiens
tcaactcagaggggc

SEQ ID NO: 71850 - DNA, 15 bp, Homo sapiens
atcaactcagagggg

SEQ ID NO: 71851 - DNA, 15 bp, Homo sapiens
aatcaactcagaggg

SEQ ID NO: 71852 - DNA, 15 bp, Homo sapiens
caatcaactcagagg

SEQ ID NO: 71853 - DNA, 15 bp, Homo sapiens
tcaatcaactcagag

SEQ ID NO: 71854 - DNA, 15 bp, Homo sapiens
ctcaatcaactcaga

SEQ ID NO: 71855 - DNA, 15 bp, Homo sapiens
gctcaatcaactcag

SEQ ID NO: 71856 - DNA, 15 bp, Homo sapiens
ggctcaatcaactca

SEQ ID NO: 71857 - DNA, 15 bp, Homo sapiens
tggctcaatcaactc

SEQ ID NO: 71858 - DNA, 15 bp, Homo sapiens
atggctcaatcaact

SEQ ID NO: 71859 - DNA, 15 bp, Homo sapiens
gatggctcaatcaac

SEQ ID NO: 71860 - DNA, 15 bp, Homo sapiens
agatggctcaatcaa

SEQ ID NO: 71861 - DNA, 15 bp, Homo sapiens
aagatggctcaatca

SEQ ID NO: 71862 - DNA, 15 bp, Homo sapiens
aaagatggctcaatc

SEQ ID NO: 71863 - DNA, 15 bp, Homo sapiens
caaagatggctcaat

SEQ ID NO: 71864 - DNA, 15 bp, Homo sapiens
gcaaagatggctcaa

SEQ ID NO: 71865 - DNA, 15 bp, Homo sapiens
tgcaaagatggctca

SEQ ID NO: 71866 - DNA, 15 bp, Homo sapiens
atgcaaagatggctc

SEQ ID NO: 71867 - DNA, 15 bp, Homo sapiens
aatgcaaagatggct

SEQ ID NO: 71868 - DNA, 15 bp, Homo sapiens
gaatgcaaagatggc

SEQ ID NO: 71869 - DNA, 15 bp, Homo sapiens
agaatgcaaagatgg

SEQ ID NO: 71870 - DNA, 15 bp, Homo sapiens
cagaatgcaaagatg

SEQ ID NO: 71871 - DNA, 15 bp, Homo sapiens
ccagaatgcaaagat

SEQ ID NO: 71872 - DNA, 15 bp, Homo sapiens
accagaatgcaaaga

SEQ ID NO: 71873 - DNA, 15 bp, Homo sapiens
gaccagaatgcaaag

SEQ ID NO: 71874 - DNA, 15 bp, Homo sapiens
ggaccagaatgcaaa

SEQ ID NO: 71875 - DNA, 15 bp, Homo sapiens
gggaccagaatgcaa

SEQ ID NO: 71876 - DNA, 15 bp, Homo sapiens
agggaccagaatgca

SEQ ID NO: 71877 - DNA, 15 bp, Homo sapiens
cagggaccagaatgc

SEQ ID NO: 71878 - DNA, 15 bp, Homo sapiens
gcagggaccagaatg

SEQ ID NO: 71879 - DNA, 15 bp, Homo sapiens
tgcagggaccagaat

SEQ ID NO: 71880 - DNA, 15 bp, Homo sapiens
ctgcagggaccagaa

SEQ ID NO: 71881 - DNA, 15 bp, Homo sapiens
tctgcagggaccaga

SEQ ID NO: 71882 - DNA, 15 bp, Homo sapiens
atctgcagggaccag

SEQ ID NO: 71883 - DNA, 15 bp, Homo sapiens
catctgcagggacca

SEQ ID NO: 71884 - DNA, 15 bp, Homo sapiens
acatctgcagggacc

SEQ ID NO: 71885 - DNA, 15 bp, Homo sapiens
gacatctgcagggac

SEQ ID NO: 71886 - DNA, 15 bp, Homo sapiens
agacatctgcaggga

SEQ ID NO: 71887 - DNA, 15 bp, Homo sapiens
gagacatctgcaggg

SEQ ID NO: 71888 - DNA, 15 bp, Homo sapiens
agagacatctgcagg

SEQ ID NO: 71889 - DNA, 15 bp, Homo sapiens
cagagacatctgcag

SEQ ID NO: 71890 - DNA, 15 bp, Homo sapiens
gcagagacatctgca

SEQ ID NO: 71891 - DNA, 15 bp, Homo sapiens
agcagagacatctgc

SEQ ID NO: 71892 - DNA, 15 bp, Homo sapiens
tagcagagacatctg

SEQ ID NO: 71893 - DNA, 15 bp, Homo sapiens
atagcagagacatct

SEQ ID NO: 71894 - DNA, 15 bp, Homo sapiens
gatagcagagacatc

SEQ ID NO: 71895 - DNA, 15 bp, Homo sapiens
agatagcagagacat

SEQ ID NO: 71896 - DNA, 15 bp, Homo sapiens
gagatagcagagaca

SEQ ID NO: 71897 - DNA, 15 bp, Homo sapiens
ggagatagcagagac

SEQ ID NO: 71898 - DNA, 15 bp, Homo sapiens
tggagatagcagaga

SEQ ID NO: 71899 - DNA, 15 bp, Homo sapiens
ttggagatagcagag

SEQ ID NO: 71900 - DNA, 15 bp, Homo sapiens
gttggagatagcaga

SEQ ID NO: 71901 - DNA, 15 bp, Homo sapiens
ggttggagatagcag

SEQ ID NO: 71902 - DNA, 15 bp, Homo sapiens
aggttggagatagca

SEQ ID NO: 71903 - DNA, 15 bp, Homo sapiens
gaggttggagatagc

SEQ ID NO: 71904 - DNA, 15 bp, Homo sapiens
tgaggttggagatag

SEQ ID NO: 71905 - DNA, 15 bp, Homo sapiens
atgaggttggagata

SEQ ID NO: 71906 - DNA, 15 bp, Homo sapiens
gatgaggttggagat

SEQ ID NO: 71907 - DNA, 15 bp, Homo sapiens
tgatgaggttggaga

SEQ ID NO: 71908 - DNA, 15 bp, Homo sapiens
ctgatgaggttggag

SEQ ID NO: 71909 - DNA, 15 bp, Homo sapiens
cctgatgaggttgga

SEQ ID NO: 71910 - DNA, 15 bp, Homo sapiens
tcctgatgaggttgg

SEQ ID NO: 71911 - DNA, 15 bp, Homo sapiens
ttcctgatgaggttg

SEQ ID NO: 71912 - DNA, 15 bp, Homo sapiens
cttcctgatgaggtt

SEQ ID NO: 71913 - DNA, 15 bp, Homo sapiens
gcttcctgatgaggt

SEQ ID NO: 71914 - DNA, 15 bp, Homo sapiens
tgcttcctgatgagg

SEQ ID NO: 71915 - DNA, 15 bp, Homo sapiens
atgcttcctgatgag

SEQ ID NO: 71916 - DNA, 15 bp, Homo sapiens
catgcttcctgatga

SEQ ID NO: 71917 - DNA, 15 bp, Homo sapiens
acatgcttcctgatg

SEQ ID NO: 71918 - DNA, 15 bp, Homo sapiens
cacatgcttcctgat

SEQ ID NO: 71919 - DNA, 15 bp, Homo sapiens
acacatgcttcctga

SEQ ID NO: 71920 - DNA, 15 bp, Homo sapiens
gacacatgcttcctg

SEQ ID NO: 71921 - DNA, 15 bp, Homo sapiens
agacacatgcttcct

SEQ ID NO: 71922 - DNA, 15 bp, Homo sapiens
cagacacatgcttcc

SEQ ID NO: 71923 - DNA, 15 bp, Homo sapiens
tcagacacatgcttc

SEQ ID NO: 71924 - DNA, 15 bp, Homo sapiens
ttcagacacatgctt

SEQ ID NO: 71925 - DNA, 15 bp, Homo sapiens
cttcagacacatgct

SEQ ID NO: 71926 - DNA, 15 bp, Homo sapiens
ggcttcagacacatg

SEQ ID NO: 71927 - DNA, 15 bp, Homo sapiens
gggcttcagacacat

SEQ ID NO: 71928 - DNA, 15 bp, Homo sapiens
cgggcttcagacaca

SEQ ID NO: 71929 - DNA, 15 bp, Homo sapiens
ccgggcttcagacac

SEQ ID NO: 71930 - DNA, 15 bp, Homo sapiens
gccgggcttcagaca

SEQ ID NO: 71931 - DNA, 15 bp, Homo sapiens
agccgggcttcagac

SEQ ID NO: 71932 - DNA, 15 bp, Homo sapiens
cagccgggcttcaga

SEQ ID NO: 71933 - DNA, 15 bp, Homo sapiens
ccagccgggcttcag

SEQ ID NO: 71934 - DNA, 15 bp, Homo sapiens
accagccgggcttca

SEQ ID NO: 71935 - DNA, 15 bp, Homo sapiens
caccagccgggcttc

SEQ ID NO: 71936 - DNA, 15 bp, Homo sapiens
ccaccagccgggctt

SEQ ID NO: 71937 - DNA, 15 bp, Homo sapiens
tccaccagccgggct

SEQ ID NO: 71938 - DNA, 15 bp, Homo sapiens
ttccaccagccgggc

SEQ ID NO: 71939 - DNA, 15 bp, Homo sapiens
cttccaccagccggg

SEQ ID NO: 71940 - DNA, 15 bp, Homo sapiens
tcttccaccagccgg

SEQ ID NO: 71941 - DNA, 15 bp, Homo sapiens
gtcttccaccagccg

SEQ ID NO: 71942 - DNA, 15 bp, Homo sapiens
tgtcttccaccagcc

SEQ ID NO: 71943 - DNA, 15 bp, Homo sapiens
atgtcttccaccagc

SEQ ID NO: 71944 - DNA, 15 bp, Homo sapiens
tatgtcttccaccag

SEQ ID NO: 71945 - DNA, 15 bp, Homo sapiens
ctatgtcttccacca

SEQ ID NO: 71946 - DNA, 15 bp, Homo sapiens
cctatgtcttccacc

SEQ ID NO: 71947 - DNA, 15 bp, Homo sapiens
ccctatgtcttccac

SEQ ID NO: 71948 - DNA, 15 bp, Homo sapiens
gccctatgtcttcca

SEQ ID NO: 71949 - DNA, 15 bp, Homo sapiens
tgccctatgtcttcc

SEQ ID NO: 71950 - DNA, 15 bp, Homo sapiens
atgccctatgtcttc

SEQ ID NO: 71951 - DNA, 15 bp, Homo sapiens
catgccctatgtctt

SEQ ID NO: 71952 - DNA, 15 bp, Homo sapiens
tcatgccctatgtct

SEQ ID NO: 71953 - DNA, 15 bp, Homo sapiens
ctcatgccctatgtc

SEQ ID NO: 71954 - DNA, 15 bp, Homo sapiens
gctcatgccctatgt

SEQ ID NO: 71955 - DNA, 15 bp, Homo sapiens
agctcatgccctatg

SEQ ID NO: 71956 - DNA, 15 bp, Homo sapiens
cagctcatgccctat

SEQ ID NO: 71957 - DNA, 15 bp, Homo sapiens
tcagctcatgcccta

SEQ ID NO: 71958 - DNA, 15 bp, Homo sapiens
gtcagctcatgccct

SEQ ID NO: 71959 - DNA, 15 bp, Homo sapiens
ggtcagctcatgccc

SEQ ID NO: 71960 - DNA, 15 bp, Homo sapiens
aggtcagctcatgcc

SEQ ID NO: 71961 - DNA, 15 bp, Homo sapiens
taggtcagctcatgc

SEQ ID NO: 71962 - DNA, 15 bp, Homo sapiens
ataggtcagctcatg

SEQ ID NO: 71963 - DNA, 15 bp, Homo sapiens
cataggtcagctcat

SEQ ID NO: 71964 - DNA, 15 bp, Homo sapiens
acataggtcagctca

SEQ ID NO: 71965 - DNA, 15 bp, Homo sapiens
cacataggtcagctc

SEQ ID NO: 71966 - DNA, 15 bp, Homo sapiens
gcacataggtcagct

SEQ ID NO: 71967 - DNA, 15 bp, Homo sapiens
agcacataggtcagc

SEQ ID NO: 71968 - DNA, 15 bp, Homo sapiens
cagcacataggtcag

SEQ ID NO: 71969 - DNA, 15 bp, Homo sapiens
gcagcacataggtca

SEQ ID NO: 71970 - DNA, 15 bp, Homo sapiens
ggcagcacataggtc

SEQ ID NO: 71971 - DNA, 15 bp, Homo sapiens
tggcagcacataggt

SEQ ID NO: 71972 - DNA, 15 bp, Homo sapiens
atggcagcacatagg

SEQ ID NO: 71973 - DNA, 15 bp, Homo sapiens
tatggcagcacatag

SEQ ID NO: 71974 - DNA, 15 bp, Homo sapiens
atatggcagcacata

SEQ ID NO: 71975 - DNA, 15 bp, Homo sapiens
catatggcagcacat

SEQ ID NO: 71976 - DNA, 15 bp, Homo sapiens
tcatatggcagcaca

SEQ ID NO: 71977 - DNA, 15 bp, Homo sapiens
ttcatatggcagcac

SEQ ID NO: 71978 - DNA, 15 bp, Homo sapiens
cttcatatggcagca

SEQ ID NO: 71979 - DNA, 15 bp, Homo sapiens
gcttcatatggcagc

SEQ ID NO: 71980 - DNA, 15 bp, Homo sapiens
agcttcatatggcag

SEQ ID NO: 71981 - DNA, 15 bp, Homo sapiens
cagcttcatatggca

SEQ ID NO: 71982 - DNA, 15 bp, Homo sapiens
gcagcttcatatggc

SEQ ID NO: 71983 - DNA, 15 bp, Homo sapiens
agcagcttcatatgg

SEQ ID NO: 71984 - DNA, 15 bp, Homo sapiens
tagcagcttcatatg

SEQ ID NO: 71985 - DNA, 15 bp, Homo sapiens
ttagcagcttcatat

SEQ ID NO: 71986 - DNA, 15 bp, Homo sapiens
cttagcagcttcata

SEQ ID NO: 71987 - DNA, 15 bp, Homo sapiens
ccttagcagcttcat

SEQ ID NO: 71988 - DNA, 15 bp, Homo sapiens
tccttagcagcttca

SEQ ID NO: 71989 - DNA, 15 bp, Homo sapiens
ctccttagcagcttc

SEQ ID NO: 71990 - DNA, 15 bp, Homo sapiens
cctccttagcagctt

SEQ ID NO: 71991 - DNA, 15 bp, Homo sapiens
ccctccttagcagct

SEQ ID NO: 71992 - DNA, 15 bp, Homo sapiens
tccctccttagcagc

SEQ ID NO: 71993 - DNA, 15 bp, Homo sapiens
ctccctccttagcag

SEQ ID NO: 71994 - DNA, 15 bp, Homo sapiens
gctccctccttagca

SEQ ID NO: 71995 - DNA, 15 bp, Homo sapiens
ggctccctccttagc

SEQ ID NO: 71996 - DNA, 15 bp, Homo sapiens
aggctccctccttag

SEQ ID NO: 71997 - DNA, 15 bp, Homo sapiens
aaggctccctcctta

SEQ ID NO: 71998 - DNA, 15 bp, Homo sapiens
aaaggctccctcctt

SEQ ID NO: 71999 - DNA, 15 bp, Homo sapiens
caaaggctccctcct

SEQ ID NO: 72000 - DNA, 15 bp, Homo sapiens
acaaaggctccctcc

SEQ ID NO: 72001 - DNA, 15 bp, Homo sapiens
cacaaaggctccctc

SEQ ID NO: 72002 - DNA, 15 bp, Homo sapiens
ccacaaaggctccct

SEQ ID NO: 72003 - DNA, 15 bp, Homo sapiens
tccacaaaggctccc

SEQ ID NO: 72004 - DNA, 15 bp, Homo sapiens
ttccacaaaggctcc

SEQ ID NO: 72005 - DNA, 15 bp, Homo sapiens
gttccacaaaggctc

SEQ ID NO: 72006 - DNA, 15 bp, Homo sapiens
agttccacaaaggct

SEQ ID NO: 72007 - DNA, 15 bp, Homo sapiens
gagttccacaaaggc

SEQ ID NO: 72008 - DNA, 15 bp, Homo sapiens
agagttccacaaagg

SEQ ID NO: 72009 - DNA, 15 bp, Homo sapiens
aagagttccacaaag

SEQ ID NO: 72010 - DNA, 15 bp, Homo sapiens
aaagagttccacaaa

SEQ ID NO: 72011 - DNA, 15 bp, Homo sapiens
gaaagagttccacaa

SEQ ID NO: 72012 - DNA, 15 bp, Homo sapiens
tgaaagagttccaca

SEQ ID NO: 72013 - DNA, 15 bp, Homo sapiens
atgaaagagttccac

SEQ ID NO: 72014 - DNA, 15 bp, Homo sapiens
catgaaagagttcca

SEQ ID NO: 72015 - DNA, 15 bp, Homo sapiens
tcatgaaagagttcc

SEQ ID NO: 72016 - DNA, 15 bp, Homo sapiens
ctcatgaaagagttc

SEQ ID NO: 72017 - DNA, 15 bp, Homo sapiens
tctcatgaaagagtt

SEQ ID NO: 72018 - DNA, 15 bp, Homo sapiens
atctcatgaaagagt

SEQ ID NO: 72019 - DNA, 15 bp, Homo sapiens
aatctcatgaaagag

SEQ ID NO: 72020 - DNA, 15 bp, Homo sapiens
caatctcatgaaaga

SEQ ID NO: 72021 - DNA, 15 bp, Homo sapiens
tcaatctcatgaaag

SEQ ID NO: 72022 - DNA, 15 bp, Homo sapiens
atcaatctcatgaaa

SEQ ID NO: 72023 - DNA, 15 bp, Homo sapiens
catcaatctcatgaa

SEQ ID NO: 72024 - DNA, 15 bp, Homo sapiens
tcatcaatctcatga

SEQ ID NO: 72025 - DNA, 15 bp, Homo sapiens
gtcatcaatctcatg

SEQ ID NO: 72026 - DNA, 15 bp, Homo sapiens
ggtcatcaatctcat

SEQ ID NO: 72027 - DNA, 15 bp, Homo sapiens
cggtcatcaatctca

SEQ ID NO: 72028 - DNA, 15 bp, Homo sapiens
ccggtcatcaatctc

SEQ ID NO: 72029 - DNA, 15 bp, Homo sapiens
gccggtcatcaatct

SEQ ID NO: 72030 - DNA, 15 bp, Homo sapiens
agccggtcatcaatc

SEQ ID NO: 72031 - DNA, 15 bp, Homo sapiens
gagccggtcatcaat

SEQ ID NO: 72032 - DNA, 15 bp, Homo sapiens
agagccggtcatcaa

SEQ ID NO: 72033 - DNA, 15 bp, Homo sapiens
gagagccggtcatca

SEQ ID NO: 72034 - DNA, 15 bp, Homo sapiens
tgagagccggtcatc

SEQ ID NO: 72035 - DNA, 15 bp, Homo sapiens
ctgagagccggtcat

SEQ ID NO: 72036 - DNA, 15 bp, Homo sapiens
tctgagagccggtca

SEQ ID NO: 72037 - DNA, 15 bp, Homo sapiens
gtctgagagccggtc

SEQ ID NO: 72038 - DNA, 15 bp, Homo sapiens
ggtctgagagccggt

SEQ ID NO: 72039 - DNA, 15 bp, Homo sapiens
aggtctgagagccgg

SEQ ID NO: 72040 - DNA, 15 bp, Homo sapiens
caggtctgagagccg

SEQ ID NO: 72041 - DNA, 15 bp, Homo sapiens
ccaggtctgagagcc

SEQ ID NO: 72042 - DNA, 15 bp, Homo sapiens
cccaggtctgagagc

SEQ ID NO: 72043 - DNA, 15 bp, Homo sapiens
gcccaggtctgagag

SEQ ID NO: 72044 - DNA, 15 bp, Homo sapiens
tgcccaggtctgaga

SEQ ID NO: 72045 - DNA, 15 bp, Homo sapiens
atgcccaggtctgag

SEQ ID NO: 72046 - DNA, 15 bp, Homo sapiens
aatgcccaggtctga

SEQ ID NO: 72047 - DNA, 15 bp, Homo sapiens
aaatgcccaggtctg

SEQ ID NO: 72048 - DNA, 15 bp, Homo sapiens
gaaatgcccaggtct

SEQ ID NO: 72049 - DNA, 15 bp, Homo sapiens
agaaatgcccaggtc

SEQ ID NO: 72050 - DNA, 15 bp, Homo sapiens
tagaaatgcccaggt

SEQ ID NO: 72051 - DNA, 15 bp, Homo sapiens
ctagaaatgcccagg

SEQ ID NO: 72052 - DNA, 15 bp, Homo sapiens
actagaaatgcccag

SEQ ID NO: 72053 - DNA, 15 bp, Homo sapiens
aactagaaatgccca

SEQ ID NO: 72054 - DNA, 15 bp, Homo sapiens
taactagaaatgccc

SEQ ID NO: 72055 - DNA, 15 bp, Homo sapiens
ataactagaaatgcc

SEQ ID NO: 72056 - DNA, 15 bp, Homo sapiens
cataactagaaatgc

SEQ ID NO: 72057 - DNA, 15 bp, Homo sapiens
ccataactagaaatg

SEQ ID NO: 72058 - DNA, 15 bp, Homo sapiens
gccataactagaaat

SEQ ID NO: 72059 - DNA, 15 bp, Homo sapiens
tgccataactagaaa

SEQ ID NO: 72060 - DNA, 15 bp, Homo sapiens
atgccataactagaa

SEQ ID NO: 72061 - DNA, 15 bp, Homo sapiens
gatgccataactaga

SEQ ID NO: 72062 - DNA, 15 bp, Homo sapiens
agatgccataactag

SEQ ID NO: 72063 - DNA, 15 bp, Homo sapiens
gagatgccataacta

SEQ ID NO: 72064 - DNA, 15 bp, Homo sapiens
tgagatgccataact

SEQ ID NO: 72065 - DNA, 15 bp, Homo sapiens
ctgagatgccataac

SEQ ID NO: 72066 - DNA, 15 bp, Homo sapiens
tctgagatgccataa

SEQ ID NO: 72067 - DNA, 15 bp, Homo sapiens
ctctgagatgccata

SEQ ID NO: 72068 - DNA, 15 bp, Homo sapiens
tctctgagatgccat

SEQ ID NO: 72069 - DNA, 15 bp, Homo sapiens
gtctctgagatgcca

SEQ ID NO: 72070 - DNA, 15 bp, Homo sapiens
cgtctctgagatgcc

SEQ ID NO: 72071 - DNA, 15 bp, Homo sapiens
tcgtctctgagatgc

SEQ ID NO: 72072 - DNA, 15 bp, Homo sapiens
gtcgtctctgagatg

SEQ ID NO: 72073 - DNA, 15 bp, Homo sapiens
ggtcgtctctgagat

SEQ ID NO: 72074 - DNA, 15 bp, Homo sapiens
gggtcgtctctgaga

SEQ ID NO: 72075 - DNA, 15 bp, Homo sapiens
agggtcgtctctgag

SEQ ID NO: 72076 - DNA, 15 bp, Homo sapiens
cagggtcgtctctga

SEQ ID NO: 72077 - DNA, 15 bp, Homo sapiens
ccagggtcgtctctg

SEQ ID NO: 72078 - DNA, 15 bp, Homo sapiens
tccagggtcgtctct

SEQ ID NO: 72079 - DNA, 15 bp, Homo sapiens
ttccagggtcgtctc

SEQ ID NO: 72080 - DNA, 15 bp, Homo sapiens
cttccagggtcgtct

SEQ ID NO: 72081 - DNA, 15 bp, Homo sapiens
tcttccagggtcgtc

SEQ ID NO: 72082 - DNA, 15 bp, Homo sapiens
ttcttccagggtcgt

SEQ ID NO: 72083 - DNA, 15 bp, Homo sapiens
cttcttccagggtcg

SEQ ID NO: 72084 - DNA, 15 bp, Homo sapiens
acttcttccagggtc

SEQ ID NO: 72085 - DNA, 15 bp, Homo sapiens
tacttcttccagggt

SEQ ID NO: 72086 - DNA, 15 bp, Homo sapiens
ttacttcttccaggg

SEQ ID NO: 72087 - DNA, 15 bp, Homo sapiens
cttacttcttccagg

SEQ ID NO: 72088 - DNA, 15 bp, Homo sapiens
acttacttcttccag

SEQ ID NO: 72089 - DNA, 15 bp, Homo sapiens
aacttacttcttcca

SEQ ID NO: 72090 - DNA, 15 bp, Homo sapiens
taacttacttcttcc

SEQ ID NO: 72091 - DNA, 15 bp, Homo sapiens
ttaacttacttcttc

SEQ ID NO: 72092 - DNA, 15 bp, Homo sapiens
cttaacttacttctt

SEQ ID NO: 72093 - DNA, 15 bp, Homo sapiens
acttaacttacttct

SEQ ID NO: 72094 - DNA, 15 bp, Homo sapiens
cacttaacttacttc

SEQ ID NO: 72095 - DNA, 15 bp, Homo sapiens
ccacttaacttactt

SEQ ID NO: 72096 - DNA, 15 bp, Homo sapiens
gccacttaacttact

SEQ ID NO: 72097 - DNA, 15 bp, Homo sapiens
agccacttaacttac

SEQ ID NO: 72098 - DNA, 15 bp, Homo sapiens
cagccacttaactta

SEQ ID NO: 72099 - DNA, 15 bp, Homo sapiens
tcagccacttaactt

SEQ ID NO: 72100 - DNA, 15 bp, Homo sapiens
gtcagccacttaact

SEQ ID NO: 72101 - DNA, 15 bp, Homo sapiens
agtcagccacttaac

SEQ ID NO: 72102 - DNA, 15 bp, Homo sapiens
cagtcagccacttaa

SEQ ID NO: 72103 - DNA, 15 bp, Homo sapiens
acagtcagccactta

SEQ ID NO: 72104 - DNA, 15 bp, Homo sapiens
gacagtcagccactt

SEQ ID NO: 72105 - DNA, 15 bp, Homo sapiens
cgacagtcagccact

SEQ ID NO: 72106 - DNA, 15 bp, Homo sapiens
ccgacagtcagccac

SEQ ID NO: 72107 - DNA, 15 bp, Homo sapiens
tccgacagtcagcca

SEQ ID NO: 72108 - DNA, 15 bp, Homo sapiens
ttccgacagtcagcc

SEQ ID NO: 72109 - DNA, 15 bp, Homo sapiens
attccgacagtcagc

SEQ ID NO: 72110 - DNA, 15 bp, Homo sapiens
tattccgacagtcag

SEQ ID NO: 72111 - DNA, 15 bp, Homo sapiens
atattccgacagtca

SEQ ID NO: 72112 - DNA, 15 bp, Homo sapiens
tatattccgacagtc

SEQ ID NO: 72113 - DNA, 15 bp, Homo sapiens
atatattccgacagt

SEQ ID NO: 72114 - DNA, 15 bp, Homo sapiens
tatatattccgacag

SEQ ID NO: 72115 - DNA, 15 bp, Homo sapiens
ctatatattccgaca

SEQ ID NO: 72116 - DNA, 15 bp, Homo sapiens
gctatatattccgac

SEQ ID NO: 72117 - DNA, 15 bp, Homo sapiens
tgctatatattccga

SEQ ID NO: 72118 - DNA, 15 bp, Homo sapiens
ttgctatatattccg

SEQ ID NO: 72119 - DNA, 15 bp, Homo sapiens
cttgctatatattcc

SEQ ID NO: 72120 - DNA, 15 bp, Homo sapiens
ccttgctatatattc

SEQ ID NO: 72121 - DNA, 15 bp, Homo sapiens
gccttgctatatatt

SEQ ID NO: 72122 - DNA, 15 bp, Homo sapiens
ggccttgctatatat

SEQ ID NO: 72123 - DNA, 15 bp, Homo sapiens
tggccttgctatata

SEQ ID NO: 72124 - DNA, 15 bp, Homo sapiens
ttggccttgctatat

SEQ ID NO: 72125 - DNA, 15 bp, Homo sapiens
tttggccttgctata

SEQ ID NO: 72126 - DNA, 15 bp, Homo sapiens
atttggccttgctat

SEQ ID NO: 72127 - DNA, 15 bp, Homo sapiens
catttggccttgcta

SEQ ID NO: 72128 - DNA, 15 bp, Homo sapiens
acatttggccttgct

SEQ ID NO: 72129 - DNA, 15 bp, Homo sapiens
gacatttggccttgc

SEQ ID NO: 72130 - DNA, 15 bp, Homo sapiens
ggacatttggccttg

SEQ ID NO: 72131 - DNA, 15 bp, Homo sapiens
aggacatttggcctt

SEQ ID NO: 72132 - DNA, 15 bp, Homo sapiens
taggacatttggcct

SEQ ID NO: 72133 - DNA, 15 bp, Homo sapiens
ttaggacatttggcc

SEQ ID NO: 72134 - DNA, 15 bp, Homo sapiens
cttaggacatttggc

SEQ ID NO: 72135 - DNA, 15 bp, Homo sapiens
ccttaggacatttgg

SEQ ID NO: 72136 - DNA, 15 bp, Homo sapiens
gccttaggacatttg

SEQ ID NO: 72137 - DNA, 15 bp, Homo sapiens
ggccttaggacattt

SEQ ID NO: 72138 - DNA, 15 bp, Homo sapiens
tggccttaggacatt

SEQ ID NO: 72139 - DNA, 15 bp, Homo sapiens
ctggccttaggacat

SEQ ID NO: 72140 - DNA, 15 bp, Homo sapiens
tctggccttaggaca

SEQ ID NO: 72141 - DNA, 15 bp, Homo sapiens
gtctggccttaggac

SEQ ID NO: 72142 - DNA, 15 bp, Homo sapiens
ggtctggccttagga

SEQ ID NO: 72143 - DNA, 15 bp, Homo sapiens
tggtctggccttagg

SEQ ID NO: 72144 - DNA, 15 bp, Homo sapiens
ctggtctggccttag

SEQ ID NO: 72145 - DNA, 15 bp, Homo sapiens
actggtctggcctta

SEQ ID NO: 72146 - DNA, 15 bp, Homo sapiens
tactggtctggcctt

SEQ ID NO: 72147 - DNA, 15 bp, Homo sapiens
ctactggtctggcct

SEQ ID NO: 72148 - DNA, 15 bp, Homo sapiens
gctactggtctggcc

SEQ ID NO: 72149 - DNA, 15 bp, Homo sapiens
ggctactggtctggc

SEQ ID NO: 72150 - DNA, 15 bp, Homo sapiens
aggctactggtctgg

SEQ ID NO: 72151 - DNA, 15 bp, Homo sapiens
caggctactggtctg

SEQ ID NO: 72152 - DNA, 15 bp, Homo sapiens
gcaggctactggtct

SEQ ID NO: 72153 - DNA, 15 bp, Homo sapiens
tgcaggctactggtc

SEQ ID NO: 72154 - DNA, 15 bp, Homo sapiens
atgcaggctactggt

SEQ ID NO: 72155 - DNA, 15 bp, Homo sapiens
aatgcaggctactgg

SEQ ID NO: 72156 - DNA, 15 bp, Homo sapiens
caatgcaggctactg

SEQ ID NO: 72157 - DNA, 15 bp, Homo sapiens
ccaatgcaggctact

SEQ ID NO: 72158 - DNA, 15 bp, Homo sapiens
cccaatgcaggctac

SEQ ID NO: 72159 - DNA, 15 bp, Homo sapiens
tcccaatgcaggcta

SEQ ID NO: 72160 - DNA, 15 bp, Homo sapiens
ctcccaatgcaggct

SEQ ID NO: 72161 - DNA, 15 bp, Homo sapiens
gctcccaatgcaggc

SEQ ID NO: 72162 - DNA, 15 bp, Homo sapiens
tgctcccaatgcagg

SEQ ID NO: 72163 - DNA, 15 bp, Homo sapiens
ctgctcccaatgcag

SEQ ID NO: 72164 - DNA, 15 bp, Homo sapiens
cctgctcccaatgca

SEQ ID NO: 72165 - DNA, 15 bp, Homo sapiens
tcctgctcccaatgc

SEQ ID NO: 72166 - DNA, 15 bp, Homo sapiens
atcctgctcccaatg

SEQ ID NO: 72167 - DNA, 15 bp, Homo sapiens
aatcctgctcccaat

SEQ ID NO: 72168 - DNA, 15 bp, Homo sapiens
taatcctgctcccaa

SEQ ID NO: 72169 - DNA, 15 bp, Homo sapiens
ataatcctgctccca

SEQ ID NO: 72170 - DNA, 15 bp, Homo sapiens
gataatcctgctccc

SEQ ID NO: 72171 - DNA, 15 bp, Homo sapiens
tgataatcctgctcc

SEQ ID NO: 72172 - DNA, 15 bp, Homo sapiens
atgataatcctgctc

SEQ ID NO: 72173 - DNA, 15 bp, Homo sapiens
catgataatcctgct

SEQ ID NO: 72174 - DNA, 15 bp, Homo sapiens
ccatgataatcctgc

SEQ ID NO: 72175 - DNA, 15 bp, Homo sapiens
tccatgataatcctg

SEQ ID NO: 72176 - DNA, 15 bp, Homo sapiens
ctccatgataatcct

SEQ ID NO: 72177 - DNA, 15 bp, Homo sapiens
actccatgataatcc

SEQ ID NO: 72178 - DNA, 15 bp, Homo sapiens
aactccatgataatc

SEQ ID NO: 72179 - DNA, 15 bp, Homo sapiens
taactccatgataat

SEQ ID NO: 72180 - DNA, 15 bp, Homo sapiens
ctaactccatgataa

SEQ ID NO: 72181 - DNA, 15 bp, Homo sapiens
actaactccatgata

SEQ ID NO: 72182 - DNA, 15 bp, Homo sapiens
gactaactccatgat

SEQ ID NO: 72183 - DNA, 15 bp, Homo sapiens
tgactaactccatga

SEQ ID NO: 72184 - DNA, 15 bp, Homo sapiens
atgactaactccatg

SEQ ID NO: 72185 - DNA, 15 bp, Homo sapiens
aatgactaactccat

SEQ ID NO: 72186 - DNA, 15 bp, Homo sapiens
caatgactaactcca

SEQ ID NO: 72187 - DNA, 15 bp, Homo sapiens
tcaatgactaactcc

SEQ ID NO: 72188 - DNA, 15 bp, Homo sapiens
ctcaatgactaactc

SEQ ID NO: 72189 - DNA, 15 bp, Homo sapiens
actcaatgactaact

SEQ ID NO: 72190 - DNA, 15 bp, Homo sapiens
aactcaatgactaac

SEQ ID NO: 72191 - DNA, 15 bp, Homo sapiens
aaactcaatgactaa

SEQ ID NO: 72192 - DNA, 15 bp, Homo sapiens
aaaactcaatgacta

SEQ ID NO: 72193 - DNA, 15 bp, Homo sapiens
aaaaactcaatgact

SEQ ID NO: 72194 - DNA, 15 bp, Homo sapiens
taaaaactcaatgac

SEQ ID NO: 72195 - DNA, 15 bp, Homo sapiens
ctaaaaactcaatga

SEQ ID NO: 72196 - DNA, 15 bp, Homo sapiens
cctaaaaactcaatg

SEQ ID NO: 72197 - DNA, 15 bp, Homo sapiens
acctaaaaactcaat

SEQ ID NO: 72198 - DNA, 15 bp, Homo sapiens
gacctaaaaactcaa

SEQ ID NO: 72199 - DNA, 15 bp, Homo sapiens
tgacctaaaaactca

SEQ ID NO: 72200 - DNA, 15 bp, Homo sapiens
atgacctaaaaactc

SEQ ID NO: 72201 - DNA, 15 bp, Homo sapiens
gatgacctaaaaact

SEQ ID NO: 72202 - DNA, 15 bp, Homo sapiens
cgatgacctaaaaac

SEQ ID NO: 72203 - DNA, 15 bp, Homo sapiens
tcgatgacctaaaaa

SEQ ID NO: 72204 - DNA, 15 bp, Homo sapiens
gtcgatgacctaaaa

SEQ ID NO: 72205 - DNA, 15 bp, Homo sapiens
tgtcgatgacctaaa

SEQ ID NO: 72206 - DNA, 15 bp, Homo sapiens
atgtcgatgacctaa

SEQ ID NO: 72207 - DNA, 15 bp, Homo sapiens
gatgtcgatgaccta

SEQ ID NO: 72208 - DNA, 15 bp, Homo sapiens
agatgtcgatgacct

SEQ ID NO: 72209 - DNA, 15 bp, Homo sapiens
cagatgtcgatgacc

SEQ ID NO: 72210 - DNA, 15 bp, Homo sapiens
tcagatgtcgatgac

SEQ ID NO: 72211 - DNA, 15 bp, Homo sapiens
atcagatgtcgatga

SEQ ID NO: 72212 - DNA, 15 bp, Homo sapiens
aatcagatgtcgatg

SEQ ID NO: 72213 - DNA, 15 bp, Homo sapiens
taatcagatgtcgat

SEQ ID NO: 72214 - DNA, 15 bp, Homo sapiens
ttaatcagatgtcga

SEQ ID NO: 72215 - DNA, 15 bp, Homo sapiens
attaatcagatgtcg

SEQ ID NO: 72216 - DNA, 15 bp, Homo sapiens
cattaatcagatgtc

SEQ ID NO: 72217 - DNA, 15 bp, Homo sapiens
acattaatcagatgt

SEQ ID NO: 72218 - DNA, 15 bp, Homo sapiens
aacattaatcagatg

SEQ ID NO: 72219 - DNA, 15 bp, Homo sapiens
caacattaatcagat

SEQ ID NO: 72220 - DNA, 15 bp, Homo sapiens
ccaacattaatcaga

SEQ ID NO: 72221 - DNA, 15 bp, Homo sapiens
gccaacattaatcag

SEQ ID NO: 72222 - DNA, 15 bp, Homo sapiens
ggccaacattaatca

SEQ ID NO: 72223 - DNA, 15 bp, Homo sapiens
gggccaacattaatc

SEQ ID NO: 72224 - DNA, 15 bp, Homo sapiens
ggggccaacattaat

SEQ ID NO: 72225 - DNA, 15 bp, Homo sapiens
tggggccaacattaa

SEQ ID NO: 72226 - DNA, 15 bp, Homo sapiens
ctggggccaacatta

SEQ ID NO: 72227 - DNA, 15 bp, Homo sapiens
actggggccaacatt

SEQ ID NO: 72228 - DNA, 15 bp, Homo sapiens
cactggggccaacat

SEQ ID NO: 72229 - DNA, 15 bp, Homo sapiens
tcactggggccaaca

SEQ ID NO: 72230 - DNA, 15 bp, Homo sapiens
ctcactggggccaac

SEQ ID NO: 72231 - DNA, 15 bp, Homo sapiens
gctcactggggccaa

SEQ ID NO: 72232 - DNA, 15 bp, Homo sapiens
ggctcactggggcca

SEQ ID NO: 72233 - DNA, 15 bp, Homo sapiens
tggctcactggggcc

SEQ ID NO: 72234 - DNA, 15 bp, Homo sapiens
atggctcactggggc

SEQ ID NO: 72235 - DNA, 15 bp, Homo sapiens
aatggctcactgggg

SEQ ID NO: 72236 - DNA, 15 bp, Homo sapiens
aaatggctcactggg

SEQ ID NO: 72237 - DNA, 15 bp, Homo sapiens
taaatggctcactgg

SEQ ID NO: 72238 - DNA, 15 bp, Homo sapiens
ttaaatggctcactg

SEQ ID NO: 72239 - DNA, 15 bp, Homo sapiens
cttaaatggctcact

SEQ ID NO: 72240 - DNA, 15 bp, Homo sapiens
tcttaaatggctcac

SEQ ID NO: 72241 - DNA, 15 bp, Homo sapiens
atcttaaatggctca

SEQ ID NO: 72242 - DNA, 15 bp, Homo sapiens
catcttaaatggctc

SEQ ID NO: 72243 - DNA, 15 bp, Homo sapiens
ccatcttaaatggct

SEQ ID NO: 72244 - DNA, 15 bp, Homo sapiens
accatcttaaatggc

SEQ ID NO: 72245 - DNA, 15 bp, Homo sapiens
taccatcttaaatgg

SEQ ID NO: 72246 - DNA, 15 bp, Homo sapiens
ctaccatcttaaatg

SEQ ID NO: 72247 - DNA, 15 bp, Homo sapiens
actaccatcttaaat

SEQ ID NO: 72248 - DNA, 15 bp, Homo sapiens
cactaccatcttaaa

SEQ ID NO: 72249 - DNA, 15 bp, Homo sapiens
ccactaccatcttaa

SEQ ID NO: 72250 - DNA, 15 bp, Homo sapiens
cccactaccatctta

SEQ ID NO: 72251 - DNA, 15 bp, Homo sapiens
tcccactaccatctt

SEQ ID NO: 72252 - DNA, 15 bp, Homo sapiens
ctcccactaccatct

SEQ ID NO: 72253 - DNA, 15 bp, Homo sapiens
tctcccactaccatc

SEQ ID NO: 72254 - DNA, 15 bp, Homo sapiens
atctcccactaccat

SEQ ID NO: 72255 - DNA, 15 bp, Homo sapiens
tatctcccactacca

SEQ ID NO: 72256 - DNA, 15 bp, Homo sapiens
ctatctcccactacc

SEQ ID NO: 72257 - DNA, 15 bp, Homo sapiens
gctatctcccactac

SEQ ID NO: 72258 - DNA, 15 bp, Homo sapiens
tgctatctcccacta

SEQ ID NO: 72259 - DNA, 15 bp, Homo sapiens
ctgctatctcccact

SEQ ID NO: 72260 - DNA, 15 bp, Homo sapiens
cctgctatctcccac

SEQ ID NO: 72261 - DNA, 15 bp, Homo sapiens
tcctgctatctccca

SEQ ID NO: 72262 - DNA, 15 bp, Homo sapiens
ttcctgctatctccc

SEQ ID NO: 72263 - DNA, 15 bp, Homo sapiens
tttcctgctatctcc

SEQ ID NO: 72264 - DNA, 15 bp, Homo sapiens
ctttcctgctatctc

SEQ ID NO: 72265 - DNA, 15 bp, Homo sapiens
tctttcctgctatct

SEQ ID NO: 72266 - DNA, 15 bp, Homo sapiens
ttctttcctgctatc

SEQ ID NO: 72267 - DNA, 15 bp, Homo sapiens
cttctttcctgctat

SEQ ID NO: 72268 - DNA, 15 bp, Homo sapiens
acttctttcctgcta

SEQ ID NO: 72269 - DNA, 15 bp, Homo sapiens
cacttctttcctgct

SEQ ID NO: 72270 - DNA, 15 bp, Homo sapiens
acacttctttcctgc

SEQ ID NO: 72271 - DNA, 15 bp, Homo sapiens
aacacttctttcctg

SEQ ID NO: 72272 - DNA, 15 bp, Homo sapiens
aaacacttctttcct

SEQ ID NO: 72273 - DNA, 15 bp, Homo sapiens
aaaacacttctttcc

SEQ ID NO: 72274 - DNA, 15 bp, Homo sapiens
gaaaacacttctttc

SEQ ID NO: 72275 - DNA, 15 bp, Homo sapiens
ggaaaacacttcttt

SEQ ID NO: 72276 - DNA, 15 bp, Homo sapiens
aggaaaacacttctt

SEQ ID NO: 72277 - DNA, 15 bp, Homo sapiens
gaggaaaacacttct

SEQ ID NO: 72278 - DNA, 15 bp, Homo sapiens
agaggaaaacacttc

SEQ ID NO: 72279 - DNA, 15 bp, Homo sapiens
cagaggaaaacactt

SEQ ID NO: 72280 - DNA, 15 bp, Homo sapiens
acagaggaaaacact

SEQ ID NO: 72281 - DNA, 15 bp, Homo sapiens
tacagaggaaaacac

SEQ ID NO: 72282 - DNA, 15 bp, Homo sapiens
tggtacagaggaaaa

SEQ ID NO: 72283 - DNA, 15 bp, Homo sapiens
gtggtacagaggaaa

SEQ ID NO: 72284 - DNA, 15 bp, Homo sapiens
tgtggtacagaggaa

SEQ ID NO: 72285 - DNA, 15 bp, Homo sapiens
ctgtggtacagagga

SEQ ID NO: 72286 - DNA, 15 bp, Homo sapiens
actgtggtacagagg

SEQ ID NO: 72287 - DNA, 15 bp, Homo sapiens
tactgtggtacagag

SEQ ID NO: 72288 - DNA, 15 bp, Homo sapiens
gtactgtggtacaga

SEQ ID NO: 72289 - DNA, 15 bp, Homo sapiens
tgtactgtggtacag

SEQ ID NO: 72290 - DNA, 15 bp, Homo sapiens
atgtactgtggtaca

SEQ ID NO: 72291 - DNA, 15 bp, Homo sapiens
catgtactgtggtac

SEQ ID NO: 72292 - DNA, 15 bp, Homo sapiens
gcatgtactgtggta

SEQ ID NO: 72293 - DNA, 15 bp, Homo sapiens
ggcatgtactgtggt

SEQ ID NO: 72294 - DNA, 15 bp, Homo sapiens
aggcatgtactgtgg

SEQ ID NO: 72295 - DNA, 15 bp, Homo sapiens
caggcatgtactgtg

SEQ ID NO: 72296 - DNA, 15 bp, Homo sapiens
tcaggcatgtactgt

SEQ ID NO: 72297 - DNA, 15 bp, Homo sapiens
caaatctcaggcatg

SEQ ID NO: 72298 - DNA, 15 bp, Homo sapiens
acaaatctcaggcat

SEQ ID NO: 72299 - DNA, 15 bp, Homo sapiens
cacaaatctcaggca

SEQ ID NO: 72300 - DNA, 15 bp, Homo sapiens
acacaaatctcaggc

SEQ ID NO: 72301 - DNA, 15 bp, Homo sapiens
cacacaaatctcagg

SEQ ID NO: 72302 - DNA, 15 bp, Homo sapiens
acacacaaatctcag

SEQ ID NO: 72303 - DNA, 15 bp, Homo sapiens
aacacacaaatctca

SEQ ID NO: 72304 - DNA, 15 bp, Homo sapiens
caacacacaaatctc

SEQ ID NO: 72305 - DNA, 15 bp, Homo sapiens
tcaacacacaaatct

SEQ ID NO: 72306 - DNA, 15 bp, Homo sapiens
ttcaacacacaaatc

SEQ ID NO: 72307 - DNA, 15 bp, Homo sapiens
tttcaacacacaaat

SEQ ID NO: 72308 - DNA, 15 bp, Homo sapiens
gtttcaacacacaaa

SEQ ID NO: 72309 - DNA, 15 bp, Homo sapiens
ggtttcaacacacaa

SEQ ID NO: 72310 - DNA, 15 bp, Homo sapiens
tggtttcaacacaca

SEQ ID NO: 72311 - DNA, 15 bp, Homo sapiens
ctggtttcaacacac

SEQ ID NO: 72312 - DNA, 15 bp, Homo sapiens
actggtttcaacaca

SEQ ID NO: 72313 - DNA, 15 bp, Homo sapiens
cactggtttcaacac

SEQ ID NO: 72314 - DNA, 15 bp, Homo sapiens
ccactggtttcaaca

SEQ ID NO: 72315 - DNA, 15 bp, Homo sapiens
accactggtttcaac

SEQ ID NO: 72316 - DNA, 15 bp, Homo sapiens
taccactggtttcaa

SEQ ID NO: 72317 - DNA, 15 bp, Homo sapiens
gtaccactggtttca

SEQ ID NO: 72318 - DNA, 15 bp, Homo sapiens
ggtaccactggtttc

SEQ ID NO: 72319 - DNA, 15 bp, Homo sapiens
aggtaccactggttt

SEQ ID NO: 72320 - DNA, 15 bp, Homo sapiens
taggtaccactggtt

SEQ ID NO: 72321 - DNA, 15 bp, Homo sapiens
ttaggtaccactggt

SEQ ID NO: 72322 - DNA, 15 bp, Homo sapiens
gttaggtaccactgg

SEQ ID NO: 72323 - DNA, 15 bp, Homo sapiens
tgttaggtaccactg

SEQ ID NO: 72324 - DNA, 15 bp, Homo sapiens
gtgttaggtaccact

SEQ ID NO: 72325 - DNA, 15 bp, Homo sapiens
tgtgttaggtaccac

SEQ ID NO: 72326 - DNA, 15 bp, Homo sapiens
atgtgttaggtacca

SEQ ID NO: 72327 - DNA, 15 bp, Homo sapiens
aatgtgttaggtacc

SEQ ID NO: 72328 - DNA, 15 bp, Homo sapiens
aaatgtgttaggtac

SEQ ID NO: 72329 - DNA, 15 bp, Homo sapiens
taaatgtgttaggta

SEQ ID NO: 72330 - DNA, 15 bp, Homo sapiens
gtaaatgtgttaggt

SEQ ID NO: 72331 - DNA, 15 bp, Homo sapiens
tgtaaatgtgttagg

SEQ ID NO: 72332 - DNA, 15 bp, Homo sapiens
atgtaaatgtgttag

SEQ ID NO: 72333 - DNA, 15 bp, Homo sapiens
gatgtaaatgtgtta

SEQ ID NO: 72334 - DNA, 15 bp, Homo sapiens
ggatgtaaatgtgtt

SEQ ID NO: 72335 - DNA, 15 bp, Homo sapiens
gggatgtaaatgtgt

SEQ ID NO: 72336 - DNA, 15 bp, Homo sapiens
tgggatgtaaatgtg

SEQ ID NO: 72337 - DNA, 15 bp, Homo sapiens
ttgggatgtaaatgt

SEQ ID NO: 72338 - DNA, 15 bp, Homo sapiens
gttgggatgtaaatg

SEQ ID NO: 72339 - DNA, 15 bp, Homo sapiens
aaggttgggatgtaa

SEQ ID NO: 72340 - DNA, 15 bp, Homo sapiens
taaggttgggatgta

SEQ ID NO: 72341 - DNA, 15 bp, Homo sapiens
ttaaggttgggatgt

SEQ ID NO: 72342 - DNA, 15 bp, Homo sapiens
tttaaggttgggatg

SEQ ID NO: 72343 - DNA, 15 bp, Homo sapiens
gtttaaggttgggat

SEQ ID NO: 72344 - DNA, 15 bp, Homo sapiens
agtttaaggttggga

SEQ ID NO: 72345 - DNA, 15 bp, Homo sapiens
gagtttaaggttggg

SEQ ID NO: 72346 - DNA, 15 bp, Homo sapiens
ggagtttaaggttgg

SEQ ID NO: 72347 - DNA, 15 bp, Homo sapiens
aggagtttaaggttg

SEQ ID NO: 72348 - DNA, 15 bp, Homo sapiens
taggagtttaaggtt

SEQ ID NO: 72349 - DNA, 15 bp, Homo sapiens
ataggagtttaaggt

SEQ ID NO: 72350 - DNA, 15 bp, Homo sapiens
cataggagtttaagg

SEQ ID NO: 72351 - DNA, 15 bp, Homo sapiens
gcataggagtttaag

SEQ ID NO: 72352 - DNA, 15 bp, Homo sapiens
tgcataggagtttaa

SEQ ID NO: 72353 - DNA, 15 bp, Homo sapiens
gtgcataggagttta

SEQ ID NO: 72354 - DNA, 15 bp, Homo sapiens
agtgcataggagttt

SEQ ID NO: 72355 - DNA, 15 bp, Homo sapiens
aagtgcataggagtt

SEQ ID NO: 72356 - DNA, 15 bp, Homo sapiens
taagtgcataggagt

SEQ ID NO: 72357 - DNA, 15 bp, Homo sapiens
ataagtgcataggag

SEQ ID NO: 72358 - DNA, 15 bp, Homo sapiens
aataagtgcatagga

SEQ ID NO: 72359 - DNA, 15 bp, Homo sapiens
aaataagtgcatagg

SEQ ID NO: 72360 - DNA, 15 bp, Homo sapiens
taaataagtgcatag

SEQ ID NO: 72361 - DNA, 15 bp, Homo sapiens
gtaaataagtgcata

SEQ ID NO: 72362 - DNA, 15 bp, Homo sapiens
ggtaaataagtgcat

SEQ ID NO: 72363 - DNA, 15 bp, Homo sapiens
gggtaaataagtgca

SEQ ID NO: 72364 - DNA, 15 bp, Homo sapiens
agggtaaataagtgc

SEQ ID NO: 72365 - DNA, 15 bp, Homo sapiens
aagggtaaataagtg

SEQ ID NO: 72366 - DNA, 15 bp, Homo sapiens
aaagggtaaataagt

SEQ ID NO: 72367 - DNA, 15 bp, Homo sapiens
taaagggtaaataag

SEQ ID NO: 72368 - DNA, 15 bp, Homo sapiens
ttaaagggtaaataa

SEQ ID NO: 72369 - DNA, 15 bp, Homo sapiens
attaaagggtaaata

SEQ ID NO: 72370 - DNA, 15 bp, Homo sapiens
cattaaagggtaaat

SEQ ID NO: 72371 - DNA, 15 bp, Homo sapiens
tcattaaagggtaaa

SEQ ID NO: 72372 - DNA, 15 bp, Homo sapiens
ctcattaaagggtaa

SEQ ID NO: 72373 - DNA, 15 bp, Homo sapiens
gctcattaaagggta

SEQ ID NO: 72374 - DNA, 15 bp, Homo sapiens
ggctcattaaagggt

SEQ ID NO: 72375 - DNA, 15 bp, Homo sapiens
aggctcattaaaggg

SEQ ID NO: 72376 - DNA, 15 bp, Homo sapiens
gaggctcattaaagg

SEQ ID NO: 72377 - DNA, 15 bp, Homo sapiens
agaggctcattaaag

SEQ ID NO: 72378 - DNA, 15 bp, Homo sapiens
aaagaggctcattaa

SEQ ID NO: 72379 - DNA, 15 bp, Homo sapiens
taaagaggctcatta

SEQ ID NO: 72380 - DNA, 15 bp, Homo sapiens
gtaaagaggctcatt

SEQ ID NO: 72381 - DNA, 15 bp, Homo sapiens
agtaaagaggctcat

SEQ ID NO: 72382 - DNA, 15 bp, Homo sapiens
aagtaaagaggctca

SEQ ID NO: 72383 - DNA, 15 bp, Homo sapiens
taagtaaagaggctc

SEQ ID NO: 72384 - DNA, 15 bp, Homo sapiens
ttaagtaaagaggct

SEQ ID NO: 72385 - DNA, 15 bp, Homo sapiens
cttaagtaaagaggc

SEQ ID NO: 72386 - DNA, 15 bp, Homo sapiens
acttaagtaaagagg

SEQ ID NO: 72387 - DNA, 15 bp, Homo sapiens
tacttaagtaaagag

SEQ ID NO: 72388 - DNA, 15 bp, Homo sapiens
gtacttaagtaaaga

SEQ ID NO: 72389 - DNA, 15 bp, Homo sapiens
tgtacttaagtaaag

SEQ ID NO: 72390 - DNA, 15 bp, Homo sapiens
ctgtacttaagtaaa

SEQ ID NO: 72391 - DNA, 15 bp, Homo sapiens
actgtacttaagtaa

SEQ ID NO: 72392 - DNA, 15 bp, Homo sapiens
cactgtacttaagta

SEQ ID NO: 72393 - DNA, 15 bp, Homo sapiens
acactgtacttaagt

SEQ ID NO: 72394 - DNA, 15 bp, Homo sapiens
cacactgtacttaag

SEQ ID NO: 72395 - DNA, 15 bp, Homo sapiens
tcacactgtacttaa

SEQ ID NO: 72396 - DNA, 15 bp, Homo sapiens
ctcacactgtactta

SEQ ID NO: 72397 - DNA, 15 bp, Homo sapiens
cctcacactgtactt

SEQ ID NO: 72398 - DNA, 15 bp, Homo sapiens
tcctcacactgtact

SEQ ID NO: 72399 - DNA, 15 bp, Homo sapiens
ttcctcacactgtac

SEQ ID NO: 72400 - DNA, 15 bp, Homo sapiens
gttcctcacactgta

SEQ ID NO: 72401 - DNA, 15 bp, Homo sapiens
tgttcctcacactgt

SEQ ID NO: 72402 - DNA, 15 bp, Homo sapiens
ctgttcctcacactg

SEQ ID NO: 72403 - DNA, 15 bp, Homo sapiens
gctgttcctcacact

SEQ ID NO: 72404 - DNA, 15 bp, Homo sapiens
cgctgttcctcacac

SEQ ID NO: 72405 - DNA, 15 bp, Homo sapiens
ccgctgttcctcaca

SEQ ID NO: 72406 - DNA, 15 bp, Homo sapiens
gccgctgttcctcac

SEQ ID NO: 72407 - DNA, 15 bp, Homo sapiens
tgccgctgttcctca

SEQ ID NO: 72408 - DNA, 15 bp, Homo sapiens
atgccgctgttcctc

SEQ ID NO: 72409 - DNA, 15 bp, Homo sapiens
gatgccgctgttcct

SEQ ID NO: 72410 - DNA, 15 bp, Homo sapiens
tgatgccgctgttcc

SEQ ID NO: 72411 - DNA, 15 bp, Homo sapiens
ctgatgccgctgttc

SEQ ID NO: 72412 - DNA, 15 bp, Homo sapiens
cctgatgccgctgtt

SEQ ID NO: 72413 - DNA, 15 bp, Homo sapiens
tcctgatgccgctgt

SEQ ID NO: 72414 - DNA, 15 bp, Homo sapiens
atcctgatgccgctg

SEQ ID NO: 72415 - DNA, 15 bp, Homo sapiens
gatcctgatgccgct

SEQ ID NO: 72416 - DNA, 15 bp, Homo sapiens
tgatcctgatgccgc

SEQ ID NO: 72417 - DNA, 15 bp, Homo sapiens
gtgatcctgatgccg

SEQ ID NO: 72418 - DNA, 15 bp, Homo sapiens
agtgatcctgatgcc

SEQ ID NO: 72419 - DNA, 15 bp, Homo sapiens
agttgctgaatttct

SEQ ID NO: 72420 - DNA, 15 bp, Homo sapiens
aagttgctgaatttc

SEQ ID NO: 72421 - DNA, 15 bp, Homo sapiens
caagttgctgaattt

SEQ ID NO: 72422 - DNA, 15 bp, Homo sapiens
ccaagttgctgaatt

SEQ ID NO: 72423 - DNA, 15 bp, Homo sapiens
cccaagttgctgaat

SEQ ID NO: 72424 - DNA, 15 bp, Homo sapiens
gcccaagttgctgaa

SEQ ID NO: 72425 - DNA, 15 bp, Homo sapiens
ggcccaagttgctga

SEQ ID NO: 72426 - DNA, 15 bp, Homo sapiens
gggcccaagttgctg

SEQ ID NO: 72427 - DNA, 15 bp, Homo sapiens
tgggcccaagttgct

SEQ ID NO: 72428 - DNA, 15 bp, Homo sapiens
ctgggcccaagttgc

SEQ ID NO: 72429 - DNA, 15 bp, Homo sapiens
gctgggcccaagttg

SEQ ID NO: 72430 - DNA, 15 bp, Homo sapiens
agctgggcccaagtt

SEQ ID NO: 72431 - DNA, 15 bp, Homo sapiens
gagctgggcccaagt

SEQ ID NO: 72432 - DNA, 15 bp, Homo sapiens
tgagctgggcccaag

SEQ ID NO: 72433 - DNA, 15 bp, Homo sapiens
ctgagctgggcccaa

SEQ ID NO: 72434 - DNA, 15 bp, Homo sapiens
agtaggtctgagctg

SEQ ID NO: 72435 - DNA, 15 bp, Homo sapiens
cagtaggtctgagct

SEQ ID NO: 72436 - DNA, 15 bp, Homo sapiens
tcagtaggtctgagc

SEQ ID NO: 72437 - DNA, 15 bp, Homo sapiens
ttcagtaggtctgag

SEQ ID NO: 72438 - DNA, 15 bp, Homo sapiens
attcagtaggtctga

SEQ ID NO: 72439 - DNA, 15 bp, Homo sapiens
gattcagtaggtctg

SEQ ID NO: 72440 - DNA, 15 bp, Homo sapiens
tgattcagtaggtct

SEQ ID NO: 72441 - DNA, 15 bp, Homo sapiens
ctgattcagtaggtc

SEQ ID NO: 72442 - DNA, 15 bp, Homo sapiens
tctgattcagtaggt

SEQ ID NO: 72443 - DNA, 15 bp, Homo sapiens
ttctgattcagtagg

SEQ ID NO: 72444 - DNA, 15 bp, Homo sapiens
attctgattcagtag

SEQ ID NO: 72445 - DNA, 15 bp, Homo sapiens
gattctgattcagta

SEQ ID NO: 72446 - DNA, 15 bp, Homo sapiens
tgattctgattcagt

SEQ ID NO: 72447 - DNA, 15 bp, Homo sapiens
ctgattctgattcag

SEQ ID NO: 72448 - DNA, 15 bp, Homo sapiens
cctgattctgattca

SEQ ID NO: 72449 - DNA, 15 bp, Homo sapiens
tcctgattctgattc

SEQ ID NO: 72450 - DNA, 15 bp, Homo sapiens
ctcctgattctgatt

SEQ ID NO: 72451 - DNA, 15 bp, Homo sapiens
gctcctgattctgat

SEQ ID NO: 72452 - DNA, 15 bp, Homo sapiens
tgctcctgattctga

SEQ ID NO: 72453 - DNA, 15 bp, Homo sapiens
ttgctcctgattctg

SEQ ID NO: 72454 - DNA, 15 bp, Homo sapiens
attgctcctgattct

SEQ ID NO: 72455 - DNA, 15 bp, Homo sapiens
aattgctcctgattc

SEQ ID NO: 72456 - DNA, 15 bp, Homo sapiens
gaattgctcctgatt

SEQ ID NO: 72457 - DNA, 15 bp, Homo sapiens
agaattgctcctgat

SEQ ID NO: 72458 - DNA, 15 bp, Homo sapiens
gagaattgctcctga

SEQ ID NO: 72459 - DNA, 15 bp, Homo sapiens
agagaattgctcctg

SEQ ID NO: 72460 - DNA, 15 bp, Homo sapiens
cagagaattgctcct

SEQ ID NO: 72461 - DNA, 15 bp, Homo sapiens
ccagagaattgctcc

SEQ ID NO: 72462 - DNA, 15 bp, Homo sapiens
accagagaattgctc

SEQ ID NO: 72463 - DNA, 15 bp, Homo sapiens
caccagagaattgct

SEQ ID NO: 72464 - DNA, 15 bp, Homo sapiens
acaccagagaattgc

SEQ ID NO: 72465 - DNA, 15 bp, Homo sapiens
cacaccagagaattg

SEQ ID NO: 72466 - DNA, 15 bp, Homo sapiens
tcacaccagagaatt

SEQ ID NO: 72467 - DNA, 15 bp, Homo sapiens
gtcacaccagagaat

SEQ ID NO: 72468 - DNA, 15 bp, Homo sapiens
agtcacaccagagaa

SEQ ID NO: 72469 - DNA, 15 bp, Homo sapiens
cagtcacaccagaga

SEQ ID NO: 72470 - DNA, 15 bp, Homo sapiens
acagtcacaccagag

SEQ ID NO: 72471 - DNA, 15 bp, Homo sapiens
cacagtcacaccaga

SEQ ID NO: 72472 - DNA, 15 bp, Homo sapiens
acacagtcacaccag

SEQ ID NO: 72473 - DNA, 15 bp, Homo sapiens
gacacagtcacacca

SEQ ID NO: 72474 - DNA, 15 bp, Homo sapiens
tgacacagtcacacc

SEQ ID NO: 72475 - DNA, 15 bp, Homo sapiens
gtgacacagtcacac

SEQ ID NO: 72476 - DNA, 15 bp, Homo sapiens
tgtgacacagtcaca

SEQ ID NO: 72477 - DNA, 15 bp, Homo sapiens
ctgtgacacagtcac

SEQ ID NO: 72478 - DNA, 15 bp, Homo sapiens
gctgtgacacagtca

SEQ ID NO: 72479 - DNA, 15 bp, Homo sapiens
ggctgtgacacagtc

SEQ ID NO: 72480 - DNA, 15 bp, Homo sapiens
tggctgtgacacagt

SEQ ID NO: 72481 - DNA, 15 bp, Homo sapiens
ctggctgtgacacag

SEQ ID NO: 72482 - DNA, 15 bp, Homo sapiens
cctggctgtgacaca

SEQ ID NO: 72483 - DNA, 15 bp, Homo sapiens
acctggctgtgacac

SEQ ID NO: 72484 - DNA, 15 bp, Homo sapiens
tacctggctgtgaca

SEQ ID NO: 72485 - DNA, 15 bp, Homo sapiens
atacctggctgtgac

SEQ ID NO: 72486 - DNA, 15 bp, Homo sapiens
gatacctggctgtga

SEQ ID NO: 72487 - DNA, 15 bp, Homo sapiens
tgatacctggctgtg

SEQ ID NO: 72488 - DNA, 15 bp, Homo sapiens
ttgatacctggctgt

SEQ ID NO: 72489 - DNA, 15 bp, Homo sapiens
gttgatacctggctg

SEQ ID NO: 72490 - DNA, 15 bp, Homo sapiens
agttgatacctggct

SEQ ID NO: 72491 - DNA, 15 bp, Homo sapiens
cagttgatacctggc

SEQ ID NO: 72492 - DNA, 15 bp, Homo sapiens
ccagttgatacctgg

SEQ ID NO: 72493 - DNA, 15 bp, Homo sapiens
tccagttgatacctg

SEQ ID NO: 72494 - DNA, 15 bp, Homo sapiens
atccagttgatacct

SEQ ID NO: 72495 - DNA, 15 bp, Homo sapiens
aatccagttgatacc

SEQ ID NO: 72496 - DNA, 15 bp, Homo sapiens
gaatccagttgatac

SEQ ID NO: 72497 - DNA, 15 bp, Homo sapiens
agaatccagttgata

SEQ ID NO: 72498 - DNA, 15 bp, Homo sapiens
gagaatccagttgat

SEQ ID NO: 72499 - DNA, 15 bp, Homo sapiens
tgagaatccagttga

SEQ ID NO: 72500 - DNA, 15 bp, Homo sapiens
atgagaatccagttg

SEQ ID NO: 72501 - DNA, 15 bp, Homo sapiens
tatgagaatccagtt

SEQ ID NO: 72502 - DNA, 15 bp, Homo sapiens
gtatgagaatccagt

SEQ ID NO: 72503 - DNA, 15 bp, Homo sapiens
tgtatgagaatccag

SEQ ID NO: 72504 - DNA, 15 bp, Homo sapiens
atgtatgagaatcca

SEQ ID NO: 72505 - DNA, 15 bp, Homo sapiens
tatgtatgagaatcc

SEQ ID NO: 72506 - DNA, 15 bp, Homo sapiens
ctatgtatgagaatc

SEQ ID NO: 72507 - DNA, 15 bp, Homo sapiens
cctatgtatgagaat

SEQ ID NO: 72508 - DNA, 15 bp, Homo sapiens
tcctatgtatgagaa

SEQ ID NO: 72509 - DNA, 15 bp, Homo sapiens
ttcctatgtatgaga

SEQ ID NO: 72510 - DNA, 15 bp, Homo sapiens
tttcctatgtatgag

SEQ ID NO: 72511 - DNA, 15 bp, Homo sapiens
atttcctatgtatga

SEQ ID NO: 72512 - DNA, 15 bp, Homo sapiens
catttcctatgtatg

SEQ ID NO: 72513 - DNA, 15 bp, Homo sapiens
tcatttcctatgtat

SEQ ID NO: 72514 - DNA, 15 bp, Homo sapiens
gtcatttcctatgta

SEQ ID NO: 72515 - DNA, 15 bp, Homo sapiens
tgtcatttcctatgt

SEQ ID NO: 72516 - DNA, 15 bp, Homo sapiens
ttgtcatttcctatg

SEQ ID NO: 72517 - DNA, 15 bp, Homo sapiens
tttgtcatttcctat

SEQ ID NO: 72518 - DNA, 15 bp, Homo sapiens
gtttgtcatttccta

SEQ ID NO: 72519 - DNA, 15 bp, Homo sapiens
cgtttgtcatttcct

SEQ ID NO: 72520 - DNA, 15 bp, Homo sapiens
acgtttgtcatttcc

SEQ ID NO: 72521 - DNA, 15 bp, Homo sapiens
aacgtttgtcatttc

SEQ ID NO: 72522 - DNA, 15 bp, Homo sapiens
aaacgtttgtcattt

SEQ ID NO: 72523 - DNA, 15 bp, Homo sapiens
taaacgtttgtcatt

SEQ ID NO: 72524 - DNA, 15 bp, Homo sapiens
ataaacgtttgtcat

SEQ ID NO: 72525 - DNA, 15 bp, Homo sapiens
cataaacgtttgtca

SEQ ID NO: 72526 - DNA, 15 bp, Homo sapiens
ccataaacgtttgtc

SEQ ID NO: 72527 - DNA, 15 bp, Homo sapiens
tccataaacgtttgt

SEQ ID NO: 72528 - DNA, 15 bp, Homo sapiens
atccataaacgtttg

SEQ ID NO: 72529 - DNA, 15 bp, Homo sapiens
catccataaacgttt

SEQ ID NO: 72530 - DNA, 15 bp, Homo sapiens
ccatccataaacgtt

SEQ ID NO: 72531 - DNA, 15 bp, Homo sapiens
tccatccataaacgt

SEQ ID NO: 72532 - DNA, 15 bp, Homo sapiens
atccatccataaacg

SEQ ID NO: 72533 - DNA, 15 bp, Homo sapiens
tatccatccataaac

SEQ ID NO: 72534 - DNA, 15 bp, Homo sapiens
ctatccatccataaa

SEQ ID NO: 72535 - DNA, 15 bp, Homo sapiens
actatccatccataa

SEQ ID NO: 72536 - DNA, 15 bp, Homo sapiens
gactatccatccata

SEQ ID NO: 72537 - DNA, 15 bp, Homo sapiens
agactatccatccat

SEQ ID NO: 72538 - DNA, 15 bp, Homo sapiens
tagactatccatcca

SEQ ID NO: 72539 - DNA, 15 bp, Homo sapiens
gtagactatccatcc

SEQ ID NO: 72540 - DNA, 15 bp, Homo sapiens
agtagactatccatc

SEQ ID NO: 72541 - DNA, 15 bp, Homo sapiens
aagtagactatccat

SEQ ID NO: 72542 - DNA, 15 bp, Homo sapiens
caagtagactatcca

SEQ ID NO: 72543 - DNA, 15 bp, Homo sapiens
acaagtagactatcc

SEQ ID NO: 72544 - DNA, 15 bp, Homo sapiens
cacaagtagactatc

SEQ ID NO: 72545 - DNA, 15 bp, Homo sapiens
gcacaagtagactat

SEQ ID NO: 72546 - DNA, 15 bp, Homo sapiens
ggcacaagtagacta

SEQ ID NO: 72547 - DNA, 15 bp, Homo sapiens
tggcacaagtagact

SEQ ID NO: 72548 - DNA, 15 bp, Homo sapiens
ctggcacaagtagac

SEQ ID NO: 72549 - DNA, 15 bp, Homo sapiens
cctggcacaagtaga

SEQ ID NO: 72550 - DNA, 15 bp, Homo sapiens
acctggcacaagtag

SEQ ID NO: 72551 - DNA, 15 bp, Homo sapiens
cacctggcacaagta

SEQ ID NO: 72552 - DNA, 15 bp, Homo sapiens
gcacctggcacaagt

SEQ ID NO: 72553 - DNA, 15 bp, Homo sapiens
agcacctggcacaag

SEQ ID NO: 72554 - DNA, 15 bp, Homo sapiens
cagcacctggcacaa

SEQ ID NO: 72555 - DNA, 15 bp, Homo sapiens
tcagcacctggcaca

SEQ ID NO: 72556 - DNA, 15 bp, Homo sapiens
ctcagcacctggcac

SEQ ID NO: 72557 - DNA, 15 bp, Homo sapiens
tctcagcacctggca

SEQ ID NO: 72558 - DNA, 15 bp, Homo sapiens
atctcagcacctggc

SEQ ID NO: 72559 - DNA, 15 bp, Homo sapiens
aatctcagcacctgg

SEQ ID NO: 72560 - DNA, 15 bp, Homo sapiens
aaatctcagcacctg

SEQ ID NO: 72561 - DNA, 15 bp, Homo sapiens
caaatctcagcacct

SEQ ID NO: 72562 - DNA, 15 bp, Homo sapiens
acaaatctcagcacc

SEQ ID NO: 72563 - DNA, 15 bp, Homo sapiens
aacaaatctcagcac

SEQ ID NO: 72564 - DNA, 15 bp, Homo sapiens
aaacaaatctcagca

SEQ ID NO: 72565 - DNA, 15 bp, Homo sapiens
aaaacaaatctcagc

SEQ ID NO: 72566 - DNA, 15 bp, Homo sapiens
aaaaacaaatctcag

SEQ ID NO: 72567 - DNA, 15 bp, Homo sapiens
aaaaaacaaatctca

SEQ ID NO: 72568 - DNA, 15 bp, Homo sapiens
caaaaaacaaatctc

SEQ ID NO: 72569 - DNA, 15 bp, Homo sapiens
acaaaaaacaaatct

SEQ ID NO: 72570 - DNA, 15 bp, Homo sapiens
aacaaaaaacaaatc

SEQ ID NO: 72571 - DNA, 15 bp, Homo sapiens
aaacaaaaaacaaat

SEQ ID NO: 72572 - DNA, 15 bp, Homo sapiens
aaaacaaaaaacaaa

SEQ ID NO: 72573 - DNA, 15 bp, Homo sapiens
aaaaacaaaaaacaa

SEQ ID NO: 72574 - DNA, 15 bp, Homo sapiens
aaaaaacaaaaaaca

SEQ ID NO: 72575 - DNA, 15 bp, Homo sapiens
caaaaaacaaaaaac

SEQ ID NO: 72576 - DNA, 15 bp, Homo sapiens
tcaaaaaacaaaaaa

SEQ ID NO: 72577 - DNA, 15 bp, Homo sapiens
atcaaaaaacaaaaa

SEQ ID NO: 72578 - DNA, 15 bp, Homo sapiens
aatcaaaaaacaaaa

SEQ ID NO: 72579 - DNA, 15 bp, Homo sapiens
aaatcaaaaaacaaa

SEQ ID NO: 72580 - DNA, 15 bp, Homo sapiens
aaaatcaaaaaacaa

SEQ ID NO: 72581 - DNA, 15 bp, Homo sapiens
aaaaatcaaaaaaca

SEQ ID NO: 72582 - DNA, 15 bp, Homo sapiens
aaaaaatcaaaaaac

SEQ ID NO: 72583 - DNA, 15 bp, Homo sapiens
aaaaaaatcaaaaaa

SEQ ID NO: 72584 - DNA, 15 bp, Homo sapiens
aaaaaaaatcaaaaa

SEQ ID NO: 72585 - DNA, 15 bp, Homo sapiens
aaaaaaaaatcaaaa

SEQ ID NO: 72586 - DNA, 15 bp, Homo sapiens
taaaaaaaaatcaaa

SEQ ID NO: 72587 - DNA, 15 bp, Homo sapiens
ttaaaaaaaaatcaa

SEQ ID NO: 72588 - DNA, 15 bp, Homo sapiens
attaaaaaaaaatca

SEQ ID NO: 72589 - DNA, 15 bp, Homo sapiens
gattaaaaaaaaatc

SEQ ID NO: 72590 - DNA, 15 bp, Homo sapiens
tgattaaaaaaaaat

SEQ ID NO: 72591 - DNA, 15 bp, Homo sapiens
gtgattaaaaaaaaa

SEQ ID NO: 72592 - DNA, 15 bp, Homo sapiens
agtgattaaaaaaaa

SEQ ID NO: 72593 - DNA, 15 bp, Homo sapiens
cagtgattaaaaaaa

SEQ ID NO: 72594 - DNA, 15 bp, Homo sapiens
acagtgattaaaaaa

SEQ ID NO: 72595 - DNA, 15 bp, Homo sapiens
cacagtgattaaaaa

SEQ ID NO: 72596 - DNA, 15 bp, Homo sapiens
tcacagtgattaaaa

SEQ ID NO: 72597 - DNA, 15 bp, Homo sapiens
gtcacagtgattaaa

SEQ ID NO: 72598 - DNA, 15 bp, Homo sapiens
ggtcacagtgattaa

SEQ ID NO: 72599 - DNA, 15 bp, Homo sapiens
aggtcacagtgatta

SEQ ID NO: 72600 - DNA, 15 bp, Homo sapiens
gaggtcacagtgatt

SEQ ID NO: 72601 - DNA, 15 bp, Homo sapiens
tgaggtcacagtgat

SEQ ID NO: 72602 - DNA, 15 bp, Homo sapiens
atgaggtcacagtga

SEQ ID NO: 72603 - DNA, 15 bp, Homo sapiens
aatgaggtcacagtg

SEQ ID NO: 72604 - DNA, 15 bp, Homo sapiens
aaatgaggtcacagt

SEQ ID NO: 72605 - DNA, 15 bp, Homo sapiens
taaatgaggtcacag

SEQ ID NO: 72606 - DNA, 15 bp, Homo sapiens
ttaaatgaggtcaca

SEQ ID NO: 72607 - DNA, 15 bp, Homo sapiens
attaaatgaggtcac

SEQ ID NO: 72608 - DNA, 15 bp, Homo sapiens
aattaaatgaggtca

SEQ ID NO: 72609 - DNA, 15 bp, Homo sapiens
gaattaaatgaggtc

SEQ ID NO: 72610 - DNA, 15 bp, Homo sapiens
agaattaaatgaggt

SEQ ID NO: 72611 - DNA, 15 bp, Homo sapiens
gagaattaaatgagg

SEQ ID NO: 72612 - DNA, 15 bp, Homo sapiens
tgagaattaaatgag

SEQ ID NO: 72613 - DNA, 15 bp, Homo sapiens
ttgagaattaaatga

SEQ ID NO: 72614 - DNA, 15 bp, Homo sapiens
tttgagaattaaatg

SEQ ID NO: 72615 - DNA, 15 bp, Homo sapiens
ttttgagaattaaat

SEQ ID NO: 72616 - DNA, 15 bp, Homo sapiens
tttttgagaattaaa

SEQ ID NO: 72617 - DNA, 15 bp, Homo sapiens
ttttttgagaattaa

SEQ ID NO: 72618 - DNA, 15 bp, Homo sapiens
tttttttgagaatta

SEQ ID NO: 72619 - DNA, 15 bp, Homo sapiens
ctttttttgagaatt

SEQ ID NO: 72620 - DNA, 15 bp, Homo sapiens
tctttttttgagaat

SEQ ID NO: 72621 - DNA, 15 bp, Homo sapiens
atctttttttgagaa

SEQ ID NO: 72622 - DNA, 15 bp, Homo sapiens
catctttttttgaga

SEQ ID NO: 72623 - DNA, 15 bp, Homo sapiens
tcatctttttttgag

SEQ ID NO: 72624 - DNA, 15 bp, Homo sapiens
ttcatctttttttga

SEQ ID NO: 72625 - DNA, 15 bp, Homo sapiens
tttcatctttttttg

SEQ ID NO: 72626 - DNA, 15 bp, Homo sapiens
attttttcatctttt

SEQ ID NO: 72627 - DNA, 15 bp, Homo sapiens
cattttttcatcttt

SEQ ID NO: 72628 - DNA, 15 bp, Homo sapiens
tcattttttcatctt

SEQ ID NO: 72629 - DNA, 15 bp, Homo sapiens
ttcattttttcatct

SEQ ID NO: 72630 - DNA, 15 bp, Homo sapiens
gttcattttttcatc

SEQ ID NO: 72631 - DNA, 15 bp, Homo sapiens
tgttcattttttcat

SEQ ID NO: 72632 - DNA, 15 bp, Homo sapiens
gtgttcattttttca

SEQ ID NO: 72633 - DNA, 15 bp, Homo sapiens
agtgttcattttttc

SEQ ID NO: 72634 - DNA, 15 bp, Homo sapiens
gagtgttcatttttt

SEQ ID NO: 72635 - DNA, 15 bp, Homo sapiens
tgagtgttcattttt

SEQ ID NO: 72636 - DNA, 15 bp, Homo sapiens
ctgagtgttcatttt

SEQ ID NO: 72637 - DNA, 15 bp, Homo sapiens
cctgagtgttcattt

SEQ ID NO: 72638 - DNA, 15 bp, Homo sapiens
tcctgagtgttcatt

SEQ ID NO: 72639 - DNA, 15 bp, Homo sapiens
ttcctgagtgttcat

SEQ ID NO: 72640 - DNA, 15 bp, Homo sapiens
attcctgagtgttca

SEQ ID NO: 72641 - DNA, 15 bp, Homo sapiens
cattcctgagtgttc

SEQ ID NO: 72642 - DNA, 15 bp, Homo sapiens
gcattcctgagtgtt

SEQ ID NO: 72643 - DNA, 15 bp, Homo sapiens
agcattcctgagtgt

SEQ ID NO: 72644 - DNA, 15 bp, Homo sapiens
cagcattcctgagtg

SEQ ID NO: 72645 - DNA, 15 bp, Homo sapiens
tcagcattcctgagt

SEQ ID NO: 72646 - DNA, 15 bp, Homo sapiens
gtcagcattcctgag

SEQ ID NO: 72647 - DNA, 15 bp, Homo sapiens
tgtcagcattcctga

SEQ ID NO: 72648 - DNA, 15 bp, Homo sapiens
atgtcagcattcctg

SEQ ID NO: 72649 - DNA, 15 bp, Homo sapiens
catgtcagcattcct

SEQ ID NO: 72650 - DNA, 15 bp, Homo sapiens
tcatgtcagcattcc

SEQ ID NO: 72651 - DNA, 15 bp, Homo sapiens
ctcatgtcagcattc

SEQ ID NO: 72652 - DNA, 15 bp, Homo sapiens
tctcatgtcagcatt

SEQ ID NO: 72653 - DNA, 15 bp, Homo sapiens
atctcatgtcagcat

SEQ ID NO: 72654 - DNA, 15 bp, Homo sapiens
aatctcatgtcagca

SEQ ID NO: 72655 - DNA, 15 bp, Homo sapiens
gaatctcatgtcagc

SEQ ID NO: 72656 - DNA, 15 bp, Homo sapiens
tgaatctcatgtcag

SEQ ID NO: 72657 - DNA, 15 bp, Homo sapiens
ctgaatctcatgtca

SEQ ID NO: 72658 - DNA, 15 bp, Homo sapiens
tctgaatctcatgtc

SEQ ID NO: 72659 - DNA, 15 bp, Homo sapiens
ttctgaatctcatgt

SEQ ID NO: 72660 - DNA, 15 bp, Homo sapiens
attctgaatctcatg

SEQ ID NO: 72661 - DNA, 15 bp, Homo sapiens
gattctgaatctcat

SEQ ID NO: 72662 - DNA, 15 bp, Homo sapiens
tgattctgaatctca

SEQ ID NO: 72663 - DNA, 15 bp, Homo sapiens
ctgattctgaatctc

SEQ ID NO: 72664 - DNA, 15 bp, Homo sapiens
cctgattctgaatct

SEQ ID NO: 72665 - DNA, 15 bp, Homo sapiens
ccctgattctgaatc

SEQ ID NO: 72666 - DNA, 15 bp, Homo sapiens
cccctgattctgaat

SEQ ID NO: 72667 - DNA, 15 bp, Homo sapiens
acccctgattctgaa

SEQ ID NO: 72668 - DNA, 15 bp, Homo sapiens
aacccctgattctga

SEQ ID NO: 72669 - DNA, 15 bp, Homo sapiens
aaacccctgattctg

SEQ ID NO: 72670 - DNA, 15 bp, Homo sapiens
caaacccctgattct

SEQ ID NO: 72671 - DNA, 15 bp, Homo sapiens
ccaaacccctgattc

SEQ ID NO: 72672 - DNA, 15 bp, Homo sapiens
cccaaacccctgatt

SEQ ID NO: 72673 - DNA, 15 bp, Homo sapiens
ccccaaacccctgat

SEQ ID NO: 72674 - DNA, 15 bp, Homo sapiens
gccccaaacccctga

SEQ ID NO: 72675 - DNA, 15 bp, Homo sapiens
agccccaaacccctg

SEQ ID NO: 72676 - DNA, 15 bp, Homo sapiens
aagccccaaacccct

SEQ ID NO: 72677 - DNA, 15 bp, Homo sapiens
gaagccccaaacccc

SEQ ID NO: 72678 - DNA, 15 bp, Homo sapiens
tgaagccccaaaccc

SEQ ID NO: 72679 - DNA, 15 bp, Homo sapiens
ttgaagccccaaacc

SEQ ID NO: 72680 - DNA, 15 bp, Homo sapiens
tttgaagccccaaac

SEQ ID NO: 72681 - DNA, 15 bp, Homo sapiens
ctttgaagccccaaa

SEQ ID NO: 72682 - DNA, 15 bp, Homo sapiens
actttgaagccccaa

SEQ ID NO: 72683 - DNA, 15 bp, Homo sapiens
gactttgaagcccca

SEQ ID NO: 72684 - DNA, 15 bp, Homo sapiens
ggactttgaagcccc

SEQ ID NO: 72685 - DNA, 15 bp, Homo sapiens
tggactttgaagccc

SEQ ID NO: 72686 - DNA, 15 bp, Homo sapiens
atggactttgaagcc

SEQ ID NO: 72687 - DNA, 15 bp, Homo sapiens
gatggactttgaagc

SEQ ID NO: 72688 - DNA, 15 bp, Homo sapiens
ggatggactttgaag

SEQ ID NO: 72689 - DNA, 15 bp, Homo sapiens
aggatggactttgaa

SEQ ID NO: 72690 - DNA, 15 bp, Homo sapiens
gaggatggactttga

SEQ ID NO: 72691 - DNA, 15 bp, Homo sapiens
agaggatggactttg

SEQ ID NO: 72692 - DNA, 15 bp, Homo sapiens
gagaggatggacttt

SEQ ID NO: 72693 - DNA, 15 bp, Homo sapiens
agagaggatggactt

SEQ ID NO: 72694 - DNA, 15 bp, Homo sapiens
aagagaggatggact

SEQ ID NO: 72695 - DNA, 15 bp, Homo sapiens
aaagagaggatggac

SEQ ID NO: 72696 - DNA, 15 bp, Homo sapiens
taaagagaggatgga

SEQ ID NO: 72697 - DNA, 15 bp, Homo sapiens
ataaagagaggatgg

SEQ ID NO: 72698 - DNA, 15 bp, Homo sapiens
gataaagagaggatg

SEQ ID NO: 72699 - DNA, 15 bp, Homo sapiens
ggataaagagaggat

SEQ ID NO: 72700 - DNA, 15 bp, Homo sapiens
tggataaagagagga

SEQ ID NO: 72701 - DNA, 15 bp, Homo sapiens
atggataaagagagg

SEQ ID NO: 72702 - DNA, 15 bp, Homo sapiens
catggataaagagag

SEQ ID NO: 72703 - DNA, 15 bp, Homo sapiens
acatggataaagaga

SEQ ID NO: 72704 - DNA, 15 bp, Homo sapiens
tacatggataaagag

SEQ ID NO: 72705 - DNA, 15 bp, Homo sapiens
ttacatggataaaga

SEQ ID NO: 72706 - DNA, 15 bp, Homo sapiens
attacatggataaag

SEQ ID NO: 72707 - DNA, 15 bp, Homo sapiens
cattacatggataaa

SEQ ID NO: 72708 - DNA, 15 bp, Homo sapiens
gcattacatggataa

SEQ ID NO: 72709 - DNA, 15 bp, Homo sapiens
ggcattacatggata

SEQ ID NO: 72710 - DNA, 15 bp, Homo sapiens
aggcattacatggat

SEQ ID NO: 72711 - DNA, 15 bp, Homo sapiens
gaggcattacatgga

SEQ ID NO: 72712 - DNA, 15 bp, Homo sapiens
ggaggcattacatgg

SEQ ID NO: 72713 - DNA, 15 bp, Homo sapiens
gggaggcattacatg

SEQ ID NO: 72714 - DNA, 15 bp, Homo sapiens
ggggaggcattacat

SEQ ID NO: 72715 - DNA, 15 bp, Homo sapiens
aggggaggcattaca

SEQ ID NO: 72716 - DNA, 15 bp, Homo sapiens
aaggggaggcattac

SEQ ID NO: 72717 - DNA, 15 bp, Homo sapiens
taaggggaggcatta

SEQ ID NO: 72718 - DNA, 15 bp, Homo sapiens
ctaaggggaggcatt

SEQ ID NO: 72719 - DNA, 15 bp, Homo sapiens
tctaaggggaggcat

SEQ ID NO: 72720 - DNA, 15 bp, Homo sapiens
ctctaaggggaggca

SEQ ID NO: 72721 - DNA, 15 bp, Homo sapiens
tctctaaggggaggc

SEQ ID NO: 72722 - DNA, 15 bp, Homo sapiens
atctctaaggggagg

SEQ ID NO: 72723 - DNA, 15 bp, Homo sapiens
tatctctaaggggag

SEQ ID NO: 72724 - DNA, 15 bp, Homo sapiens
gtatctctaagggga

SEQ ID NO: 72725 - DNA, 15 bp, Homo sapiens
tgtatctctaagggg

SEQ ID NO: 72726 - DNA, 15 bp, Homo sapiens
ttgtatctctaaggg

SEQ ID NO: 72727 - DNA, 15 bp, Homo sapiens
gttgtatctctaagg

SEQ ID NO: 72728 - DNA, 15 bp, Homo sapiens
tgttgtatctctaag

SEQ ID NO: 72729 - DNA, 15 bp, Homo sapiens
atgttgtatctctaa

SEQ ID NO: 72730 - DNA, 15 bp, Homo sapiens
gatgttgtatctcta

SEQ ID NO: 72731 - DNA, 15 bp, Homo sapiens
tgatgttgtatctct

SEQ ID NO: 72732 - DNA, 15 bp, Homo sapiens
gtgatgttgtatctc

SEQ ID NO: 72733 - DNA, 15 bp, Homo sapiens
tgtgatgttgtatct

SEQ ID NO: 72734 - DNA, 15 bp, Homo sapiens
ctgtgatgttgtatc

SEQ ID NO: 72735 - DNA, 15 bp, Homo sapiens
tctgtgatgttgtat

SEQ ID NO: 72736 - DNA, 15 bp, Homo sapiens
gtctgtgatgttgta

SEQ ID NO: 72737 - DNA, 15 bp, Homo sapiens
ggtctgtgatgttgt

SEQ ID NO: 72738 - DNA, 15 bp, Homo sapiens
aggtctgtgatgttg

SEQ ID NO: 72739 - DNA, 15 bp, Homo sapiens
aaggtctgtgatgtt

SEQ ID NO: 72740 - DNA, 15 bp, Homo sapiens
caaggtctgtgatgt

SEQ ID NO: 72741 - DNA, 15 bp, Homo sapiens
tcaaggtctgtgatg

SEQ ID NO: 72742 - DNA, 15 bp, Homo sapiens
ttcaaggtctgtgat

SEQ ID NO: 72743 - DNA, 15 bp, Homo sapiens
cttcaaggtctgtga

SEQ ID NO: 72744 - DNA, 15 bp, Homo sapiens
ccttcaaggtctgtg

SEQ ID NO: 72745 - DNA, 15 bp, Homo sapiens
gccttcaaggtctgt

SEQ ID NO: 72746 - DNA, 15 bp, Homo sapiens
agccttcaaggtctg

SEQ ID NO: 72747 - DNA, 15 bp, Homo sapiens
cagccttcaaggtct

SEQ ID NO: 72748 - DNA, 15 bp, Homo sapiens
tcagccttcaaggtc

SEQ ID NO: 72749 - DNA, 15 bp, Homo sapiens
ttcagccttcaaggt

SEQ ID NO: 72750 - DNA, 15 bp, Homo sapiens
cttcagccttcaagg

SEQ ID NO: 72751 - DNA, 15 bp, Homo sapiens
ccttcagccttcaag

SEQ ID NO: 72752 - DNA, 15 bp, Homo sapiens
cccttcagccttcaa

SEQ ID NO: 72753 - DNA, 15 bp, Homo sapiens
ccccttcagccttca

SEQ ID NO: 72754 - DNA, 15 bp, Homo sapiens
tccccttcagccttc

SEQ ID NO: 72755 - DNA, 15 bp, Homo sapiens
atccccttcagcctt

SEQ ID NO: 72756 - DNA, 15 bp, Homo sapiens
tatccccttcagcct

SEQ ID NO: 72757 - DNA, 15 bp, Homo sapiens
atatccccttcagcc

SEQ ID NO: 72758 - DNA, 15 bp, Homo sapiens
tatatccccttcagc

SEQ ID NO: 72759 - DNA, 15 bp, Homo sapiens
ttatatccccttcag

SEQ ID NO: 72760 - DNA, 15 bp, Homo sapiens
tttatatccccttca

SEQ ID NO: 72761 - DNA, 15 bp, Homo sapiens
ttttatatccccttc

SEQ ID NO: 72762 - DNA, 15 bp, Homo sapiens
cttttatatcccctt

SEQ ID NO: 72763 - DNA, 15 bp, Homo sapiens
gcttttatatcccct

SEQ ID NO: 72764 - DNA, 15 bp, Homo sapiens
agcttttatatcccc

SEQ ID NO: 72765 - DNA, 15 bp, Homo sapiens
cagcttttatatccc

SEQ ID NO: 72766 - DNA, 15 bp, Homo sapiens
acagcttttatatcc

SEQ ID NO: 72767 - DNA, 15 bp, Homo sapiens
gacagcttttatatc

SEQ ID NO: 72768 - DNA, 15 bp, Homo sapiens
agacagcttttatat

SEQ ID NO: 72769 - DNA, 15 bp, Homo sapiens
cagacagcttttata

SEQ ID NO: 72770 - DNA, 15 bp, Homo sapiens
ccagacagcttttat

SEQ ID NO: 72771 - DNA, 15 bp, Homo sapiens
gccagacagctttta

SEQ ID NO: 72772 - DNA, 15 bp, Homo sapiens
ggccagacagctttt

SEQ ID NO: 72773 - DNA, 15 bp, Homo sapiens
tggccagacagcttt

SEQ ID NO: 72774 - DNA, 15 bp, Homo sapiens
ttggccagacagctt

SEQ ID NO: 72775 - DNA, 15 bp, Homo sapiens
cttggccagacagct

SEQ ID NO: 72776 - DNA, 15 bp, Homo sapiens
acttggccagacagc

SEQ ID NO: 72777 - DNA, 15 bp, Homo sapiens
cacttggccagacag

SEQ ID NO: 72778 - DNA, 15 bp, Homo sapiens
ccacttggccagaca

SEQ ID NO: 72779 - DNA, 15 bp, Homo sapiens
accacttggccagac

SEQ ID NO: 72780 - DNA, 15 bp, Homo sapiens
gaccacttggccaga

SEQ ID NO: 72781 - DNA, 15 bp, Homo sapiens
agaccacttggccag

SEQ ID NO: 72782 - DNA, 15 bp, Homo sapiens
gagaccacttggcca

SEQ ID NO: 72783 - DNA, 15 bp, Homo sapiens
ggagaccacttggcc

SEQ ID NO: 72784 - DNA, 15 bp, Homo sapiens
tggagaccacttggc

SEQ ID NO: 72785 - DNA, 15 bp, Homo sapiens
ttggagaccacttgg

SEQ ID NO: 72786 - DNA, 15 bp, Homo sapiens
cttggagaccacttg

SEQ ID NO: 72787 - DNA, 15 bp, Homo sapiens
gcttggagaccactt

SEQ ID NO: 72788 - DNA, 15 bp, Homo sapiens
agcttggagaccact

SEQ ID NO: 72789 - DNA, 15 bp, Homo sapiens
aagcttggagaccac

SEQ ID NO: 72790 - DNA, 15 bp, Homo sapiens
caagcttggagacca

SEQ ID NO: 72791 - DNA, 15 bp, Homo sapiens
tcaagcttggagacc

SEQ ID NO: 72792 - DNA, 15 bp, Homo sapiens
gtcaagcttggagac

SEQ ID NO: 72793 - DNA, 15 bp, Homo sapiens
tgtcaagcttggaga

SEQ ID NO: 72794 - DNA, 15 bp, Homo sapiens
ctgtcaagcttggag

SEQ ID NO: 72795 - DNA, 15 bp, Homo sapiens
actgtcaagcttgga

SEQ ID NO: 72796 - DNA, 15 bp, Homo sapiens
cactgtcaagcttgg

SEQ ID NO: 72797 - DNA, 15 bp, Homo sapiens
gcactgtcaagcttg

SEQ ID NO: 72798 - DNA, 15 bp, Homo sapiens
tgcactgtcaagctt

SEQ ID NO: 72799 - DNA, 15 bp, Homo sapiens
ctgcactgtcaagct

SEQ ID NO: 72800 - DNA, 15 bp, Homo sapiens
gctgcactgtcaagc

SEQ ID NO: 72801 - DNA, 15 bp, Homo sapiens
tgctgcactgtcaag

SEQ ID NO: 72802 - DNA, 15 bp, Homo sapiens
ctgctgcactgtcaa

SEQ ID NO: 72803 - DNA, 15 bp, Homo sapiens
tctgctgcactgtca

SEQ ID NO: 72804 - DNA, 15 bp, Homo sapiens
ttctgctgcactgtc

SEQ ID NO: 72805 - DNA, 15 bp, Homo sapiens
attctgctgcactgt

SEQ ID NO: 72806 - DNA, 15 bp, Homo sapiens
gattctgctgcactg

SEQ ID NO: 72807 - DNA, 15 bp, Homo sapiens
tgattctgctgcact

SEQ ID NO: 72808 - DNA, 15 bp, Homo sapiens
gtgattctgctgcac

SEQ ID NO: 72809 - DNA, 15 bp, Homo sapiens
ggtgattctgctgca

SEQ ID NO: 72810 - DNA, 15 bp, Homo sapiens
aggtgattctgctgc

SEQ ID NO: 72811 - DNA, 15 bp, Homo sapiens
caggtgattctgctg

SEQ ID NO: 72812 - DNA, 15 bp, Homo sapiens
ccaggtgattctgct

SEQ ID NO: 72813 - DNA, 15 bp, Homo sapiens
cccaggtgattctgc

SEQ ID NO: 72814 - DNA, 15 bp, Homo sapiens
ccccaggtgattctg

SEQ ID NO: 72815 - DNA, 15 bp, Homo sapiens
tccccaggtgattct

SEQ ID NO: 72816 - DNA, 15 bp, Homo sapiens
atccccaggtgattc

SEQ ID NO: 72817 - DNA, 15 bp, Homo sapiens
tatccccaggtgatt

SEQ ID NO: 72818 - DNA, 15 bp, Homo sapiens
atatccccaggtgat

SEQ ID NO: 72819 - DNA, 15 bp, Homo sapiens
aatatccccaggtga

SEQ ID NO: 72820 - DNA, 15 bp, Homo sapiens
taatatccccaggtg

SEQ ID NO: 72821 - DNA, 15 bp, Homo sapiens
ataatatccccaggt

SEQ ID NO: 72822 - DNA, 15 bp, Homo sapiens
aataatatccccagg

SEQ ID NO: 72823 - DNA, 15 bp, Homo sapiens
taataatatccccag

SEQ ID NO: 72824 - DNA, 15 bp, Homo sapiens
ttaataatatcccca

SEQ ID NO: 72825 - DNA, 15 bp, Homo sapiens
tttaataatatcccc

SEQ ID NO: 72826 - DNA, 15 bp, Homo sapiens
ttttaataatatccc

SEQ ID NO: 72827 - DNA, 15 bp, Homo sapiens
tttttaataatatcc

SEQ ID NO: 72828 - DNA, 15 bp, Homo sapiens
atttttaataatatc

SEQ ID NO: 72829 - DNA, 15 bp, Homo sapiens
tatttttaataatat

SEQ ID NO: 72830 - DNA, 15 bp, Homo sapiens
ttatttttaataata

SEQ ID NO: 72831 - DNA, 15 bp, Homo sapiens
tttatttttaataat

SEQ ID NO: 72832 - DNA, 15 bp, Homo sapiens
gtttatttttaataa

SEQ ID NO: 72833 - DNA, 15 bp, Homo sapiens
tgtttatttttaata

SEQ ID NO: 72834 - DNA, 15 bp, Homo sapiens
atgtttatttttaat

SEQ ID NO: 72835 - DNA, 15 bp, Homo sapiens
tatgtttatttttaa

SEQ ID NO: 72836 - DNA, 15 bp, Homo sapiens
gtatgtttattttta

SEQ ID NO: 72837 - DNA, 15 bp, Homo sapiens
agtatgtttattttt

SEQ ID NO: 72838 - DNA, 15 bp, Homo sapiens
tagtatgtttatttt

SEQ ID NO: 72839 - DNA, 15 bp, Homo sapiens
ttagtatgtttattt

SEQ ID NO: 72840 - DNA, 15 bp, Homo sapiens
cttagtatgtttatt

SEQ ID NO: 72841 - DNA, 15 bp, Homo sapiens
ccttagtatgtttat

SEQ ID NO: 72842 - DNA, 15 bp, Homo sapiens
accttagtatgttta

SEQ ID NO: 72843 - DNA, 15 bp, Homo sapiens
aaccttagtatgttt

SEQ ID NO: 72844 - DNA, 15 bp, Homo sapiens
aaaccttagtatgtt

SEQ ID NO: 72845 - DNA, 15 bp, Homo sapiens
caaaccttagtatgt

SEQ ID NO: 72846 - DNA, 15 bp, Homo sapiens
ccaaaccttagtatg

SEQ ID NO: 72847 - DNA, 15 bp, Homo sapiens
gccaaaccttagtat

SEQ ID NO: 72848 - DNA, 15 bp, Homo sapiens
agccaaaccttagta

SEQ ID NO: 72849 - DNA, 15 bp, Homo sapiens
aagccaaaccttagt

SEQ ID NO: 72850 - DNA, 15 bp, Homo sapiens
gaagccaaaccttag

SEQ ID NO: 72851 - DNA, 15 bp, Homo sapiens
tgaagccaaacctta

SEQ ID NO: 72852 - DNA, 15 bp, Homo sapiens
ctgaagccaaacctt

SEQ ID NO: 72853 - DNA, 15 bp, Homo sapiens
cctgaagccaaacct

SEQ ID NO: 72854 - DNA, 15 bp, Homo sapiens
ccctgaagccaaacc

SEQ ID NO: 72855 - DNA, 15 bp, Homo sapiens
gccctgaagccaaac

SEQ ID NO: 72856 - DNA, 15 bp, Homo sapiens
ggccctgaagccaaa

SEQ ID NO: 72857 - DNA, 15 bp, Homo sapiens
aggccctgaagccaa

SEQ ID NO: 72858 - DNA, 15 bp, Homo sapiens
caggccctgaagcca

SEQ ID NO: 72859 - DNA, 15 bp, Homo sapiens
acaggccctgaagcc

SEQ ID NO: 72860 - DNA, 15 bp, Homo sapiens
cacaggccctgaagc

SEQ ID NO: 72861 - DNA, 15 bp, Homo sapiens
tcacaggccctgaag

SEQ ID NO: 72862 - DNA, 15 bp, Homo sapiens
ttcacaggccctgaa

SEQ ID NO: 72863 - DNA, 15 bp, Homo sapiens
attcacaggccctga

SEQ ID NO: 72864 - DNA, 15 bp, Homo sapiens
gattcacaggccctg

SEQ ID NO: 72865 - DNA, 15 bp, Homo sapiens
tgattcacaggccct

SEQ ID NO: 72866 - DNA, 15 bp, Homo sapiens
ctgattcacaggccc

SEQ ID NO: 72867 - DNA, 15 bp, Homo sapiens
tctgattcacaggcc

SEQ ID NO: 72868 - DNA, 15 bp, Homo sapiens
ttctgattcacaggc

SEQ ID NO: 72869 - DNA, 15 bp, Homo sapiens
attctgattcacagg

SEQ ID NO: 72870 - DNA, 15 bp, Homo sapiens
aattctgattcacag

SEQ ID NO: 72871 - DNA, 15 bp, Homo sapiens
aaattctgattcaca

SEQ ID NO: 72872 - DNA, 15 bp, Homo sapiens
gaaattctgattcac

SEQ ID NO: 72873 - DNA, 15 bp, Homo sapiens
agaaattctgattca

SEQ ID NO: 72874 - DNA, 15 bp, Homo sapiens
cagaaattctgattc

SEQ ID NO: 72875 - DNA, 15 bp, Homo sapiens
ccagaaattctgatt

SEQ ID NO: 72876 - DNA, 15 bp, Homo sapiens
tccagaaattctgat

SEQ ID NO: 72877 - DNA, 15 bp, Homo sapiens
ctccagaaattctga

SEQ ID NO: 72878 - DNA, 15 bp, Homo sapiens
cctccagaaattctg

SEQ ID NO: 72879 - DNA, 15 bp, Homo sapiens
acctccagaaattct

SEQ ID NO: 72880 - DNA, 15 bp, Homo sapiens
cacctccagaaattc

SEQ ID NO: 72881 - DNA, 15 bp, Homo sapiens
tcacctccagaaatt

SEQ ID NO: 72882 - DNA, 15 bp, Homo sapiens
ctcacctccagaaat

SEQ ID NO: 72883 - DNA, 15 bp, Homo sapiens
cctcacctccagaaa

SEQ ID NO: 72884 - DNA, 15 bp, Homo sapiens
gcctcacctccagaa

SEQ ID NO: 72885 - DNA, 15 bp, Homo sapiens
ggcctcacctccaga

SEQ ID NO: 72886 - DNA, 15 bp, Homo sapiens
aggcctcacctccag

SEQ ID NO: 72887 - DNA, 15 bp, Homo sapiens
aaggcctcacctcca

SEQ ID NO: 72888 - DNA, 15 bp, Homo sapiens
caaggcctcacctcc

SEQ ID NO: 72889 - DNA, 15 bp, Homo sapiens
tcaaggcctcacctc

SEQ ID NO: 72890 - DNA, 15 bp, Homo sapiens
ttcaaggcctcacct

SEQ ID NO: 72891 - DNA, 15 bp, Homo sapiens
cttcaaggcctcacc

SEQ ID NO: 72892 - DNA, 15 bp, Homo sapiens
acttcaaggcctcac

SEQ ID NO: 72893 - DNA, 15 bp, Homo sapiens
gacttcaaggcctca

SEQ ID NO: 72894 - DNA, 15 bp, Homo sapiens
agacttcaaggcctc

SEQ ID NO: 72895 - DNA, 15 bp, Homo sapiens
cagacttcaaggcct

SEQ ID NO: 72896 - DNA, 15 bp, Homo sapiens
acagacttcaaggcc

SEQ ID NO: 72897 - DNA, 15 bp, Homo sapiens
tacagacttcaaggc

SEQ ID NO: 72898 - DNA, 15 bp, Homo sapiens
atacagacttcaagg

SEQ ID NO: 72899 - DNA, 15 bp, Homo sapiens
aatacagacttcaag

SEQ ID NO: 72900 - DNA, 15 bp, Homo sapiens
aaatacagacttcaa

SEQ ID NO: 72901 - DNA, 15 bp, Homo sapiens
gaaatacagacttca

SEQ ID NO: 72902 - DNA, 15 bp, Homo sapiens
agaaatacagacttc

SEQ ID NO: 72903 - DNA, 15 bp, Homo sapiens
tagaaatacagactt

SEQ ID NO: 72904 - DNA, 15 bp, Homo sapiens
atagaaatacagact

SEQ ID NO: 72905 - DNA, 15 bp, Homo sapiens
aatagaaatacagac

SEQ ID NO: 72906 - DNA, 15 bp, Homo sapiens
caatagaaatacaga

SEQ ID NO: 72907 - DNA, 15 bp, Homo sapiens
gcaatagaaatacag

SEQ ID NO: 72908 - DNA, 15 bp, Homo sapiens
tgcaatagaaataca

SEQ ID NO: 72909 - DNA, 15 bp, Homo sapiens
atgcaatagaaatac

SEQ ID NO: 72910 - DNA, 15 bp, Homo sapiens
tatgcaatagaaata

SEQ ID NO: 72911 - DNA, 15 bp, Homo sapiens
gtatgcaatagaaat

SEQ ID NO: 72912 - DNA, 15 bp, Homo sapiens
agtatgcaatagaaa

SEQ ID NO: 72913 - DNA, 15 bp, Homo sapiens
aagtatgcaatagaa

SEQ ID NO: 72914 - DNA, 15 bp, Homo sapiens
aaagtatgcaataga

SEQ ID NO: 72915 - DNA, 15 bp, Homo sapiens
caaagtatgcaatag

SEQ ID NO: 72916 - DNA, 15 bp, Homo sapiens
ccaaagtatgcaata

SEQ ID NO: 72917 - DNA, 15 bp, Homo sapiens
tccaaagtatgcaat

SEQ ID NO: 72918 - DNA, 15 bp, Homo sapiens
gtccaaagtatgcaa

SEQ ID NO: 72919 - DNA, 15 bp, Homo sapiens
tgtccaaagtatgca

SEQ ID NO: 72920 - DNA, 15 bp, Homo sapiens
gtgtccaaagtatgc

SEQ ID NO: 72921 - DNA, 15 bp, Homo sapiens
tgtgtccaaagtatg

SEQ ID NO: 72922 - DNA, 15 bp, Homo sapiens
ctgtgtccaaagtat

SEQ ID NO: 72923 - DNA, 15 bp, Homo sapiens
actgtgtccaaagta

SEQ ID NO: 72924 - DNA, 15 bp, Homo sapiens
cactgtgtccaaagt

SEQ ID NO: 72925 - DNA, 15 bp, Homo sapiens
ccactgtgtccaaag

SEQ ID NO: 72926 - DNA, 15 bp, Homo sapiens
accactgtgtccaaa

SEQ ID NO: 72927 - DNA, 15 bp, Homo sapiens
gaccactgtgtccaa

SEQ ID NO: 72928 - DNA, 15 bp, Homo sapiens
agaccactgtgtcca

SEQ ID NO: 72929 - DNA, 15 bp, Homo sapiens
tagaccactgtgtcc

SEQ ID NO: 72930 - DNA, 15 bp, Homo sapiens
atagaccactgtgtc

SEQ ID NO: 72931 - DNA, 15 bp, Homo sapiens
tatagaccactgtgt

SEQ ID NO: 72932 - DNA, 15 bp, Homo sapiens
ctatagaccactgtg

SEQ ID NO: 72933 - DNA, 15 bp, Homo sapiens
tctatagaccactgt

SEQ ID NO: 72934 - DNA, 15 bp, Homo sapiens
gtctatagaccactg

SEQ ID NO: 72935 - DNA, 15 bp, Homo sapiens
agtctatagaccact

SEQ ID NO: 72936 - DNA, 15 bp, Homo sapiens
tagtctatagaccac

SEQ ID NO: 72937 - DNA, 15 bp, Homo sapiens
ctagtctatagacca

SEQ ID NO: 72938 - DNA, 15 bp, Homo sapiens
tctagtctatagacc

SEQ ID NO: 72939 - DNA, 15 bp, Homo sapiens
ctctagtctatagac

SEQ ID NO: 72940 - DNA, 15 bp, Homo sapiens
actctagtctataga

SEQ ID NO: 72941 - DNA, 15 bp, Homo sapiens
aactctagtctatag

SEQ ID NO: 72942 - DNA, 15 bp, Homo sapiens
aaactctagtctata

SEQ ID NO: 72943 - DNA, 15 bp, Homo sapiens
caaactctagtctat

SEQ ID NO: 72944 - DNA, 15 bp, Homo sapiens
ccaaactctagtcta

SEQ ID NO: 72945 - DNA, 15 bp, Homo sapiens
tccaaactctagtct

SEQ ID NO: 72946 - DNA, 15 bp, Homo sapiens
ttccaaactctagtc

SEQ ID NO: 72947 - DNA, 15 bp, Homo sapiens
tttccaaactctagt

SEQ ID NO: 72948 - DNA, 15 bp, Homo sapiens
atttccaaactctag

SEQ ID NO: 72949 - DNA, 15 bp, Homo sapiens
catttccaaactcta

SEQ ID NO: 72950 - DNA, 15 bp, Homo sapiens
tcatttccaaactct

SEQ ID NO: 72951 - DNA, 15 bp, Homo sapiens
atcatttccaaactc

SEQ ID NO: 72952 - DNA, 15 bp, Homo sapiens
aatcatttccaaact

SEQ ID NO: 72953 - DNA, 15 bp, Homo sapiens
caatcatttccaaac

SEQ ID NO: 72954 - DNA, 15 bp, Homo sapiens
gcaatcatttccaaa

SEQ ID NO: 72955 - DNA, 15 bp, Homo sapiens
cgcaatcatttccaa

SEQ ID NO: 72956 - DNA, 15 bp, Homo sapiens
gcgcaatcatttcca

SEQ ID NO: 72957 - DNA, 15 bp, Homo sapiens
agcgcaatcatttcc

SEQ ID NO: 72958 - DNA, 15 bp, Homo sapiens
gagcgcaatcatttc

SEQ ID NO: 72959 - DNA, 15 bp, Homo sapiens
tgagcgcaatcattt

SEQ ID NO: 72960 - DNA, 15 bp, Homo sapiens
atgagcgcaatcatt

SEQ ID NO: 72961 - DNA, 15 bp, Homo sapiens
aatgagcgcaatcat

SEQ ID NO: 72962 - DNA, 15 bp, Homo sapiens
gaatgagcgcaatca

SEQ ID NO: 72963 - DNA, 15 bp, Homo sapiens
tgaatgagcgcaatc

SEQ ID NO: 72964 - DNA, 15 bp, Homo sapiens
ctgaatgagcgcaat

SEQ ID NO: 72965 - DNA, 15 bp, Homo sapiens
tctgaatgagcgcaa

SEQ ID NO: 72966 - DNA, 15 bp, Homo sapiens
atctgaatgagcgca

SEQ ID NO: 72967 - DNA, 15 bp, Homo sapiens
aatctgaatgagcgc

SEQ ID NO: 72968 - DNA, 15 bp, Homo sapiens
gaatctgaatgagcg

SEQ ID NO: 72969 - DNA, 15 bp, Homo sapiens
agaatctgaatgagc

SEQ ID NO: 72970 - DNA, 15 bp, Homo sapiens
gagaatctgaatgag

SEQ ID NO: 72971 - DNA, 15 bp, Homo sapiens
agagaatctgaatga

SEQ ID NO: 72972 - DNA, 15 bp, Homo sapiens
aagagaatctgaatg

SEQ ID NO: 72973 - DNA, 15 bp, Homo sapiens
gaagagaatctgaat

SEQ ID NO: 72974 - DNA, 15 bp, Homo sapiens
agaagagaatctgaa

SEQ ID NO: 72975 - DNA, 15 bp, Homo sapiens
cagaagagaatctga

SEQ ID NO: 72976 - DNA, 15 bp, Homo sapiens
tcagaagagaatctg

SEQ ID NO: 72977 - DNA, 15 bp, Homo sapiens
atcagaagagaatct

SEQ ID NO: 72978 - DNA, 15 bp, Homo sapiens
catcagaagagaatc

SEQ ID NO: 72979 - DNA, 15 bp, Homo sapiens
acatcagaagagaat

SEQ ID NO: 72980 - DNA, 15 bp, Homo sapiens
aacatcagaagagaa

SEQ ID NO: 72981 - DNA, 15 bp, Homo sapiens
aaacatcagaagaga

SEQ ID NO: 72982 - DNA, 15 bp, Homo sapiens
caaacatcagaagag

SEQ ID NO: 72983 - DNA, 15 bp, Homo sapiens
tcaaacatcagaaga

SEQ ID NO: 72984 - DNA, 15 bp, Homo sapiens
ttcaaacatcagaag

SEQ ID NO: 72985 - DNA, 15 bp, Homo sapiens
attcaaacatcagaa

SEQ ID NO: 72986 - DNA, 15 bp, Homo sapiens
aattcaaacatcaga

SEQ ID NO: 72987 - DNA, 15 bp, Homo sapiens
caattcaaacatcag

SEQ ID NO: 72988 - DNA, 15 bp, Homo sapiens
gcaattcaaacatca

SEQ ID NO: 72989 - DNA, 15 bp, Homo sapiens
agcaattcaaacatc

SEQ ID NO: 72990 - DNA, 15 bp, Homo sapiens
cagcaattcaaacat

SEQ ID NO: 72991 - DNA, 15 bp, Homo sapiens
gcagcaattcaaaca

SEQ ID NO: 72992 - DNA, 15 bp, Homo sapiens
ggcagcaattcaaac

SEQ ID NO: 72993 - DNA, 15 bp, Homo sapiens
tggcagcaattcaaa

SEQ ID NO: 72994 - DNA, 15 bp, Homo sapiens
atggcagcaattcaa

SEQ ID NO: 72995 - DNA, 15 bp, Homo sapiens
gatggcagcaattca

SEQ ID NO: 72996 - DNA, 15 bp, Homo sapiens
tgatggcagcaattc

SEQ ID NO: 72997 - DNA, 15 bp, Homo sapiens
atgatggcagcaatt

SEQ ID NO: 72998 - DNA, 15 bp, Homo sapiens
tatgatggcagcaat

SEQ ID NO: 72999 - DNA, 15 bp, Homo sapiens
atatgatggcagcaa

SEQ ID NO: 73000 - DNA, 15 bp, Homo sapiens
aatatgatggcagca

SEQ ID NO: 73001 - DNA, 15 bp, Homo sapiens
aaatatgatggcagc

SEQ ID NO: 73002 - DNA, 15 bp, Homo sapiens
gaaatatgatggcag

SEQ ID NO: 73003 - DNA, 15 bp, Homo sapiens
agaaatatgatggca

SEQ ID NO: 73004 - DNA, 15 bp, Homo sapiens
tagaaatatgatggc

SEQ ID NO: 73005 - DNA, 15 bp, Homo sapiens
ctagaaatatgatgg

SEQ ID NO: 73006 - DNA, 15 bp, Homo sapiens
actagaaatatgatg

SEQ ID NO: 73007 - DNA, 15 bp, Homo sapiens
cactagaaatatgat

SEQ ID NO: 73008 - DNA, 15 bp, Homo sapiens
gcactagaaatatga

SEQ ID NO: 73009 - DNA, 15 bp, Homo sapiens
agcactagaaatatg

SEQ ID NO: 73010 - DNA, 15 bp, Homo sapiens
gagcactagaaatat

SEQ ID NO: 73011 - DNA, 15 bp, Homo sapiens
agagcactagaaata

SEQ ID NO: 73012 - DNA, 15 bp, Homo sapiens
tagagcactagaaat

SEQ ID NO: 73013 - DNA, 15 bp, Homo sapiens
atagagcactagaaa

SEQ ID NO: 73014 - DNA, 15 bp, Homo sapiens
aatagagcactagaa

SEQ ID NO: 73015 - DNA, 15 bp, Homo sapiens
aaatagagcactaga

SEQ ID NO: 73016 - DNA, 15 bp, Homo sapiens
gaaatagagcactag

SEQ ID NO: 73017 - DNA, 15 bp, Homo sapiens
ggaaatagagcacta

SEQ ID NO: 73018 - DNA, 15 bp, Homo sapiens
aggaaatagagcact

SEQ ID NO: 73019 - DNA, 15 bp, Homo sapiens
gaggaaatagagcac

SEQ ID NO: 73020 - DNA, 15 bp, Homo sapiens
ggaggaaatagagca

SEQ ID NO: 73021 - DNA, 15 bp, Homo sapiens
aggaggaaatagagc

SEQ ID NO: 73022 - DNA, 15 bp, Homo sapiens
caggaggaaatagag

SEQ ID NO: 73023 - DNA, 15 bp, Homo sapiens
gcaggaggaaataga

SEQ ID NO: 73024 - DNA, 15 bp, Homo sapiens
agcaggaggaaatag

SEQ ID NO: 73025 - DNA, 15 bp, Homo sapiens
gagcaggaggaaata

SEQ ID NO: 73026 - DNA, 15 bp, Homo sapiens
tgagcaggaggaaat

SEQ ID NO: 73027 - DNA, 15 bp, Homo sapiens
atgagcaggaggaaa

SEQ ID NO: 73028 - DNA, 15 bp, Homo sapiens
aatgagcaggaggaa

SEQ ID NO: 73029 - DNA, 15 bp, Homo sapiens
gaatgagcaggagga

SEQ ID NO: 73030 - DNA, 15 bp, Homo sapiens
agaatgagcaggagg

SEQ ID NO: 73031 - DNA, 15 bp, Homo sapiens
cagaatgagcaggag

SEQ ID NO: 73032 - DNA, 15 bp, Homo sapiens
acagaatgagcagga

SEQ ID NO: 73033 - DNA, 15 bp, Homo sapiens
gacagaatgagcagg

SEQ ID NO: 73034 - DNA, 15 bp, Homo sapiens
agacagaatgagcag

SEQ ID NO: 73035 - DNA, 15 bp, Homo sapiens
aagacagaatgagca

SEQ ID NO: 73036 - DNA, 15 bp, Homo sapiens
caagacagaatgagc

SEQ ID NO: 73037 - DNA, 15 bp, Homo sapiens
ccaagacagaatgag

SEQ ID NO: 73038 - DNA, 15 bp, Homo sapiens
tccaagacagaatga

SEQ ID NO: 73039 - DNA, 15 bp, Homo sapiens
atccaagacagaatg

SEQ ID NO: 73040 - DNA, 15 bp, Homo sapiens
tatccaagacagaat

SEQ ID NO: 73041 - DNA, 15 bp, Homo sapiens
ttatccaagacagaa

SEQ ID NO: 73042 - DNA, 15 bp, Homo sapiens
gttatccaagacaga

SEQ ID NO: 73043 - DNA, 15 bp, Homo sapiens
agttatccaagacag

SEQ ID NO: 73044 - DNA, 15 bp, Homo sapiens
aagttatccaagaca

SEQ ID NO: 73045 - DNA, 15 bp, Homo sapiens
taagttatccaagac

SEQ ID NO: 73046 - DNA, 15 bp, Homo sapiens
ataagttatccaaga

SEQ ID NO: 73047 - DNA, 15 bp, Homo sapiens
gataagttatccaag

SEQ ID NO: 73048 - DNA, 15 bp, Homo sapiens
tgataagttatccaa

SEQ ID NO: 73049 - DNA, 15 bp, Homo sapiens
atgataagttatcca

SEQ ID NO: 73050 - DNA, 15 bp, Homo sapiens
tatgataagttatcc

SEQ ID NO: 73051 - DNA, 15 bp, Homo sapiens
ctatgataagttatc

SEQ ID NO: 73052 - DNA, 15 bp, Homo sapiens
actatgataagttat

SEQ ID NO: 73053 - DNA, 15 bp, Homo sapiens
tactatgataagtta

SEQ ID NO: 73054 - DNA, 15 bp, Homo sapiens
gtactatgataagtt

SEQ ID NO: 73055 - DNA, 15 bp, Homo sapiens
agtactatgataagt

SEQ ID NO: 73056 - DNA, 15 bp, Homo sapiens
tagtactatgataag

SEQ ID NO: 73057 - DNA, 15 bp, Homo sapiens
ctagtactatgataa

SEQ ID NO: 73058 - DNA, 15 bp, Homo sapiens
gctagtactatgata

SEQ ID NO: 73059 - DNA, 15 bp, Homo sapiens
ggctagtactatgat

SEQ ID NO: 73060 - DNA, 15 bp, Homo sapiens
aggctagtactatga

SEQ ID NO: 73061 - DNA, 15 bp, Homo sapiens
taggctagtactatg

SEQ ID NO: 73062 - DNA, 15 bp, Homo sapiens
gtaggctagtactat

SEQ ID NO: 73063 - DNA, 15 bp, Homo sapiens
agtaggctagtacta

SEQ ID NO: 73064 - DNA, 15 bp, Homo sapiens
gagtaggctagtact

SEQ ID NO: 73065 - DNA, 15 bp, Homo sapiens
tgagtaggctagtac

SEQ ID NO: 73066 - DNA, 15 bp, Homo sapiens
ttgagtaggctagta

SEQ ID NO: 73067 - DNA, 15 bp, Homo sapiens
tttgagtaggctagt

SEQ ID NO: 73068 - DNA, 15 bp, Homo sapiens
ctttgagtaggctag

SEQ ID NO: 73069 - DNA, 15 bp, Homo sapiens
tctttgagtaggcta

SEQ ID NO: 73070 - DNA, 15 bp, Homo sapiens
atctttgagtaggct

SEQ ID NO: 73071 - DNA, 15 bp, Homo sapiens
aatctttgagtaggc

SEQ ID NO: 73072 - DNA, 15 bp, Homo sapiens
aaatctttgagtagg

SEQ ID NO: 73073 - DNA, 15 bp, Homo sapiens
taaatctttgagtag

SEQ ID NO: 73074 - DNA, 15 bp, Homo sapiens
ctaaatctttgagta

SEQ ID NO: 73075 - DNA, 15 bp, Homo sapiens
tctaaatctttgagt

SEQ ID NO: 73076 - DNA, 15 bp, Homo sapiens
ctctaaatctttgag

SEQ ID NO: 73077 - DNA, 15 bp, Homo sapiens
gctctaaatctttga

SEQ ID NO: 73078 - DNA, 15 bp, Homo sapiens
ggctctaaatctttg

SEQ ID NO: 73079 - DNA, 15 bp, Homo sapiens
tggctctaaatcttt

SEQ ID NO: 73080 - DNA, 15 bp, Homo sapiens
gtggctctaaatctt

SEQ ID NO: 73081 - DNA, 15 bp, Homo sapiens
tgtggctctaaatct

SEQ ID NO: 73082 - DNA, 15 bp, Homo sapiens
ctgtggctctaaatc

SEQ ID NO: 73083 - DNA, 15 bp, Homo sapiens
actgtggctctaaat

SEQ ID NO: 73084 - DNA, 15 bp, Homo sapiens
gactgtggctctaaa

SEQ ID NO: 73085 - DNA, 15 bp, Homo sapiens
ggactgtggctctaa

SEQ ID NO: 73086 - DNA, 15 bp, Homo sapiens
aggactgtggctcta

SEQ ID NO: 73087 - DNA, 15 bp, Homo sapiens
caggactgtggctct

SEQ ID NO: 73088 - DNA, 15 bp, Homo sapiens
tcaggactgtggctc

SEQ ID NO: 73089 - DNA, 15 bp, Homo sapiens
ttcaggactgtggct

SEQ ID NO: 73090 - DNA, 15 bp, Homo sapiens
tttcaggactgtggc

SEQ ID NO: 73091 - DNA, 15 bp, Homo sapiens
ctttcaggactgtgg

SEQ ID NO: 73092 - DNA, 15 bp, Homo sapiens
tctttcaggactgtg

SEQ ID NO: 73093 - DNA, 15 bp, Homo sapiens
ttctttcaggactgt

SEQ ID NO: 73094 - DNA, 15 bp, Homo sapiens
cttctttcaggactg

SEQ ID NO: 73095 - DNA, 15 bp, Homo sapiens
gcttctttcaggact

SEQ ID NO: 73096 - DNA, 15 bp, Homo sapiens
ggcttctttcaggac

SEQ ID NO: 73097 - DNA, 15 bp, Homo sapiens
tggcttctttcagga

SEQ ID NO: 73098 - DNA, 15 bp, Homo sapiens
gtggcttctttcagg

SEQ ID NO: 73099 - DNA, 15 bp, Homo sapiens
agtggcttctttcag

SEQ ID NO: 73100 - DNA, 15 bp, Homo sapiens
aagtggcttctttca

SEQ ID NO: 73101 - DNA, 15 bp, Homo sapiens
caagtggcttctttc

SEQ ID NO: 73102 - DNA, 15 bp, Homo sapiens
tcaagtggcttcttt

SEQ ID NO: 73103 - DNA, 15 bp, Homo sapiens
gtcaagtggcttctt

SEQ ID NO: 73104 - DNA, 15 bp, Homo sapiens
agtcaagtggcttct

SEQ ID NO: 73105 - DNA, 15 bp, Homo sapiens
gagtcaagtggcttc

SEQ ID NO: 73106 - DNA, 15 bp, Homo sapiens
tgagtcaagtggctt

SEQ ID NO: 73107 - DNA, 15 bp, Homo sapiens
atgagtcaagtggct

SEQ ID NO: 73108 - DNA, 15 bp, Homo sapiens
aatgagtcaagtggc

SEQ ID NO: 73109 - DNA, 15 bp, Homo sapiens
gaatgagtcaagtgg

SEQ ID NO: 73110 - DNA, 15 bp, Homo sapiens
ggaatgagtcaagtg

SEQ ID NO: 73111 - DNA, 15 bp, Homo sapiens
gggaatgagtcaagt

SEQ ID NO: 73112 - DNA, 15 bp, Homo sapiens
agggaatgagtcaag

SEQ ID NO: 73113 - DNA, 15 bp, Homo sapiens
cagggaatgagtcaa

SEQ ID NO: 73114 - DNA, 15 bp, Homo sapiens
acagggaatgagtca

SEQ ID NO: 73115 - DNA, 15 bp, Homo sapiens
tacagggaatgagtc

SEQ ID NO: 73116 - DNA, 15 bp, Homo sapiens
ctacagggaatgagt

SEQ ID NO: 73117 - DNA, 15 bp, Homo sapiens
cctacagggaatgag

SEQ ID NO: 73118 - DNA, 15 bp, Homo sapiens
acctacagggaatga

SEQ ID NO: 73119 - DNA, 15 bp, Homo sapiens
aacctacagggaatg

SEQ ID NO: 73120 - DNA, 15 bp, Homo sapiens
gaacctacagggaat

SEQ ID NO: 73121 - DNA, 15 bp, Homo sapiens
tgaacctacagggaa

SEQ ID NO: 73122 - DNA, 15 bp, Homo sapiens
ctgaacctacaggga

SEQ ID NO: 73123 - DNA, 15 bp, Homo sapiens
tctgaacctacaggg

SEQ ID NO: 73124 - DNA, 15 bp, Homo sapiens
ttctgaacctacagg

SEQ ID NO: 73125 - DNA, 15 bp, Homo sapiens
attctgaacctacag

SEQ ID NO: 73126 - DNA, 15 bp, Homo sapiens
tattctgaacctaca

SEQ ID NO: 73127 - DNA, 15 bp, Homo sapiens
ttattctgaacctac

SEQ ID NO: 73128 - DNA, 15 bp, Homo sapiens
tttattctgaaccta

SEQ ID NO: 73129 - DNA, 15 bp, Homo sapiens
atttattctgaacct

SEQ ID NO: 73130 - DNA, 15 bp, Homo sapiens
aatttattctgaacc

SEQ ID NO: 73131 - DNA, 15 bp, Homo sapiens
aaatttattctgaac

SEQ ID NO: 73132 - DNA, 15 bp, Homo sapiens
gaaatttattctgaa

SEQ ID NO: 73133 - DNA, 15 bp, Homo sapiens
agaaatttattctga

SEQ ID NO: 73134 - DNA, 15 bp, Homo sapiens
aagaaatttattctg

SEQ ID NO: 73135 - DNA, 15 bp, Homo sapiens
gaagaaatttattct

SEQ ID NO: 73136 - DNA, 15 bp, Homo sapiens
agaagaaatttattc

SEQ ID NO: 73137 - DNA, 15 bp, Homo sapiens
cagaagaaatttatt

SEQ ID NO: 73138 - DNA, 15 bp, Homo sapiens
gcagaagaaatttat

SEQ ID NO: 73139 - DNA, 15 bp, Homo sapiens
cgcagaagaaattta

SEQ ID NO: 73140 - DNA, 15 bp, Homo sapiens
gcgcagaagaaattt

SEQ ID NO: 73141 - DNA, 15 bp, Homo sapiens
tgcgcagaagaaatt

SEQ ID NO: 73142 - DNA, 15 bp, Homo sapiens
ctgcgcagaagaaat

SEQ ID NO: 73143 - DNA, 15 bp, Homo sapiens
actgcgcagaagaaa

SEQ ID NO: 73144 - DNA, 15 bp, Homo sapiens
cactgcgcagaagaa

SEQ ID NO: 73145 - DNA, 15 bp, Homo sapiens
acactgcgcagaaga

SEQ ID NO: 73146 - DNA, 15 bp, Homo sapiens
gacactgcgcagaag

SEQ ID NO: 73147 - DNA, 15 bp, Homo sapiens
agacactgcgcagaa

SEQ ID NO: 73148 - DNA, 15 bp, Homo sapiens
cagacactgcgcaga

SEQ ID NO: 73149 - DNA, 15 bp, Homo sapiens
acagacactgcgcag

SEQ ID NO: 73150 - DNA, 15 bp, Homo sapiens
gacagacactgcgca

SEQ ID NO: 73151 - DNA, 15 bp, Homo sapiens
tgacagacactgcgc

SEQ ID NO: 73152 - DNA, 15 bp, Homo sapiens
atgacagacactgcg

SEQ ID NO: 73153 - DNA, 15 bp, Homo sapiens
tatgacagacactgc

SEQ ID NO: 73154 - DNA, 15 bp, Homo sapiens
ctatgacagacactg

SEQ ID NO: 73155 - DNA, 15 bp, Homo sapiens
gctatgacagacact

SEQ ID NO: 73156 - DNA, 15 bp, Homo sapiens
agctatgacagacac

SEQ ID NO: 73157 - DNA, 15 bp, Homo sapiens
aagctatgacagaca

SEQ ID NO: 73158 - DNA, 15 bp, Homo sapiens
aaagctatgacagac

SEQ ID NO: 73159 - DNA, 15 bp, Homo sapiens
aaaagctatgacaga

SEQ ID NO: 73160 - DNA, 15 bp, Homo sapiens
aaaaagctatgacag

SEQ ID NO: 73161 - DNA, 15 bp, Homo sapiens
aaaaaagctatgaca

SEQ ID NO: 73162 - DNA, 15 bp, Homo sapiens
aaaaaaagctatgac

SEQ ID NO: 73163 - DNA, 15 bp, Homo sapiens
taaaaaaagctatga

SEQ ID NO: 73164 - DNA, 15 bp, Homo sapiens
ttaaaaaaagctatg

SEQ ID NO: 73165 - DNA, 15 bp, Homo sapiens
tttaaaaaaagctat

SEQ ID NO: 73166 - DNA, 15 bp, Homo sapiens
atttaaaaaaagcta

SEQ ID NO: 73167 - DNA, 15 bp, Homo sapiens
aatttaaaaaaagct

SEQ ID NO: 73168 - DNA, 15 bp, Homo sapiens
aaatttaaaaaaagc

SEQ ID NO: 73169 - DNA, 15 bp, Homo sapiens
aaaatttaaaaaaag

SEQ ID NO: 73170 - DNA, 15 bp, Homo sapiens
aaaaatttaaaaaaa

SEQ ID NO: 73171 - DNA, 15 bp, Homo sapiens
aaaaaatttaaaaaa

SEQ ID NO: 73172 - DNA, 15 bp, Homo sapiens
aaaaaaatttaaaaa

SEQ ID NO: 73173 - DNA, 15 bp, Homo sapiens
aaaaaaaatttaaaa

SEQ ID NO: 73174 - DNA, 15 bp, Homo sapiens
taaaaaaaaatttaa

SEQ ID NO: 73175 - DNA, 15 bp, Homo sapiens
ataaaaaaaaattta

SEQ ID NO: 73176 - DNA, 15 bp, Homo sapiens
aataaaaaaaaattt

SEQ ID NO: 73177 - DNA, 15 bp, Homo sapiens
aaataaaaaaaaatt

SEQ ID NO: 73178 - DNA, 15 bp, Homo sapiens
aaaataaaaaaaaat

SEQ ID NO: 73179 - DNA, 15 bp, Homo sapiens
aaaaataaaaaaaaa

SEQ ID NO: 73180 - DNA, 15 bp, Homo sapiens
caaaaataaaaaaaa

SEQ ID NO: 73181 - DNA, 15 bp, Homo sapiens
tcaaaaataaaaaaa

SEQ ID NO: 73182 - DNA, 15 bp, Homo sapiens
atcaaaaataaaaaa

SEQ ID NO: 73183 - DNA, 15 bp, Homo sapiens
catcaaaaataaaaa

SEQ ID NO: 73184 - DNA, 15 bp, Homo sapiens
tcatcaaaaataaaa

SEQ ID NO: 73185 - DNA, 15 bp, Homo sapiens
ctcatcaaaaataaa

SEQ ID NO: 73186 - DNA, 15 bp, Homo sapiens
tctcatcaaaaataa

SEQ ID NO: 73187 - DNA, 15 bp, Homo sapiens
gtctcatcaaaaata

SEQ ID NO: 73188 - DNA, 15 bp, Homo sapiens
agtctcatcaaaaat

SEQ ID NO: 73189 - DNA, 15 bp, Homo sapiens
cagtctcatcaaaaa

SEQ ID NO: 73190 - DNA, 15 bp, Homo sapiens
ccagtctcatcaaaa

SEQ ID NO: 73191 - DNA, 15 bp, Homo sapiens
tccagtctcatcaaa

SEQ ID NO: 73192 - DNA, 15 bp, Homo sapiens
ctccagtctcatcaa

SEQ ID NO: 73193 - DNA, 15 bp, Homo sapiens
actccagtctcatca

SEQ ID NO: 73194 - DNA, 15 bp, Homo sapiens
aactccagtctcatc

SEQ ID NO: 73195 - DNA, 15 bp, Homo sapiens
aaactccagtctcat

SEQ ID NO: 73196 - DNA, 15 bp, Homo sapiens
aaaactccagtctca

SEQ ID NO: 73197 - DNA, 15 bp, Homo sapiens
caaaactccagtctc

SEQ ID NO: 73198 - DNA, 15 bp, Homo sapiens
gcaaaactccagtct

SEQ ID NO: 73199 - DNA, 15 bp, Homo sapiens
agcaaaactccagtc

SEQ ID NO: 73200 - DNA, 15 bp, Homo sapiens
gagcaaaactccagt

SEQ ID NO: 73201 - DNA, 15 bp, Homo sapiens
agagcaaaactccag

SEQ ID NO: 73202 - DNA, 15 bp, Homo sapiens
taagagcaaaactcc

SEQ ID NO: 73203 - DNA, 15 bp, Homo sapiens
ataagagcaaaactc

SEQ ID NO: 73204 - DNA, 15 bp, Homo sapiens
aataagagcaaaact

SEQ ID NO: 73205 - DNA, 15 bp, Homo sapiens
caataagagcaaaac

SEQ ID NO: 73206 - DNA, 15 bp, Homo sapiens
gcaataagagcaaaa

SEQ ID NO: 73207 - DNA, 15 bp, Homo sapiens
ggcaataagagcaaa

SEQ ID NO: 73208 - DNA, 15 bp, Homo sapiens
gggcaataagagcaa

SEQ ID NO: 73209 - DNA, 15 bp, Homo sapiens
tgggcaataagagca

SEQ ID NO: 73210 - DNA, 15 bp, Homo sapiens
ttgggcaataagagc

SEQ ID NO: 73211 - DNA, 15 bp, Homo sapiens
cttgggcaataagag

SEQ ID NO: 73212 - DNA, 15 bp, Homo sapiens
gcttgggcaataaga

SEQ ID NO: 73213 - DNA, 15 bp, Homo sapiens
agcttgggcaataag

SEQ ID NO: 73214 - DNA, 15 bp, Homo sapiens
cagcttgggcaataa

SEQ ID NO: 73215 - DNA, 15 bp, Homo sapiens
ccagcttgggcaata

SEQ ID NO: 73216 - DNA, 15 bp, Homo sapiens
tccagcttgggcaat

SEQ ID NO: 73217 - DNA, 15 bp, Homo sapiens
ctccagcttgggcaa

SEQ ID NO: 73218 - DNA, 15 bp, Homo sapiens
actccagcttgggca

SEQ ID NO: 73219 - DNA, 15 bp, Homo sapiens
cactccagcttgggc

SEQ ID NO: 73220 - DNA, 15 bp, Homo sapiens
gcactccagcttggg

SEQ ID NO: 73221 - DNA, 15 bp, Homo sapiens
tgcactccagcttgg

SEQ ID NO: 73222 - DNA, 15 bp, Homo sapiens
ctgcactccagcttg

SEQ ID NO: 73223 - DNA, 15 bp, Homo sapiens
actgcactccagctt

SEQ ID NO: 73224 - DNA, 15 bp, Homo sapiens
cactgcactccagct

SEQ ID NO: 73225 - DNA, 15 bp, Homo sapiens
aatcgcaccactgca

SEQ ID NO: 73226 - DNA, 15 bp, Homo sapiens
aaatcgcaccactgc

SEQ ID NO: 73227 - DNA, 15 bp, Homo sapiens
aaaatcgcaccactg

SEQ ID NO: 73228 - DNA, 15 bp, Homo sapiens
caaaatcgcaccact

SEQ ID NO: 73229 - DNA, 15 bp, Homo sapiens
ccaaaatcgcaccac

SEQ ID NO: 73230 - DNA, 15 bp, Homo sapiens
gccaaaatcgcacca

SEQ ID NO: 73231 - DNA, 15 bp, Homo sapiens
agccaaaatcgcacc

SEQ ID NO: 73232 - DNA, 15 bp, Homo sapiens
gagccaaaatcgcac

SEQ ID NO: 73233 - DNA, 15 bp, Homo sapiens
tgagccaaaatcgca

SEQ ID NO: 73234 - DNA, 15 bp, Homo sapiens
gtgagccaaaatcgc

SEQ ID NO: 73235 - DNA, 15 bp, Homo sapiens
agtgagccaaaatcg

SEQ ID NO: 73236 - DNA, 15 bp, Homo sapiens
cagtgagccaaaatc

SEQ ID NO: 73237 - DNA, 15 bp, Homo sapiens
gcagtgagccaaaat

SEQ ID NO: 73238 - DNA, 15 bp, Homo sapiens
tgcagtgagccaaaa

SEQ ID NO: 73239 - DNA, 15 bp, Homo sapiens
ttgcagtgagccaaa

SEQ ID NO: 73240 - DNA, 15 bp, Homo sapiens
tgggaggtggaggtt

SEQ ID NO: 73241 - DNA, 15 bp, Homo sapiens
atctcagctacttgg

SEQ ID NO: 73242 - DNA, 15 bp, Homo sapiens
aatctcagctacttg

SEQ ID NO: 73243 - DNA, 15 bp, Homo sapiens
taatctcagctactt

SEQ ID NO: 73244 - DNA, 15 bp, Homo sapiens
ttgtaatctcagcta

SEQ ID NO: 73245 - DNA, 15 bp, Homo sapiens
cttgtaatctcagct

SEQ ID NO: 73246 - DNA, 15 bp, Homo sapiens
gcttgtaatctcagc

SEQ ID NO: 73247 - DNA, 15 bp, Homo sapiens
tgcttgtaatctcag

SEQ ID NO: 73248 - DNA, 15 bp, Homo sapiens
atgcttgtaatctca

SEQ ID NO: 73249 - DNA, 15 bp, Homo sapiens
catgcttgtaatctc

SEQ ID NO: 73250 - DNA, 15 bp, Homo sapiens
acatgcttgtaatct

SEQ ID NO: 73251 - DNA, 15 bp, Homo sapiens
cacatgcttgtaatc

SEQ ID NO: 73252 - DNA, 15 bp, Homo sapiens
gcacatgcttgtaat

SEQ ID NO: 73253 - DNA, 15 bp, Homo sapiens
agcacatgcttgtaa

SEQ ID NO: 73254 - DNA, 15 bp, Homo sapiens
tagcacatgcttgta

SEQ ID NO: 73255 - DNA, 15 bp, Homo sapiens
gtagcacatgcttgt

SEQ ID NO: 73256 - DNA, 15 bp, Homo sapiens
ggtagcacatgcttg

SEQ ID NO: 73257 - DNA, 15 bp, Homo sapiens
tggtagcacatgctt

SEQ ID NO: 73258 - DNA, 15 bp, Homo sapiens
gtggtagcacatgct

SEQ ID NO: 73259 - DNA, 15 bp, Homo sapiens
cgtggtagcacatgc

SEQ ID NO: 73260 - DNA, 15 bp, Homo sapiens
gcgtggtagcacatg

SEQ ID NO: 73261 - DNA, 15 bp, Homo sapiens
ggcgtggtagcacat

SEQ ID NO: 73262 - DNA, 15 bp, Homo sapiens
gggcgtggtagcaca

SEQ ID NO: 73263 - DNA, 15 bp, Homo sapiens
tgggcgtggtagcac

SEQ ID NO: 73264 - DNA, 15 bp, Homo sapiens
ctgggcgtggtagca

SEQ ID NO: 73265 - DNA, 15 bp, Homo sapiens
gctgggcgtggtagc

SEQ ID NO: 73266 - DNA, 15 bp, Homo sapiens
agctgggcgtggtag

SEQ ID NO: 73267 - DNA, 15 bp, Homo sapiens
tagctgggcgtggta

SEQ ID NO: 73268 - DNA, 15 bp, Homo sapiens
acccatctctactaa

SEQ ID NO: 73269 - DNA, 15 bp, Homo sapiens
aacccatctctacta

SEQ ID NO: 73270 - DNA, 15 bp, Homo sapiens
aaacccatctctact

SEQ ID NO: 73271 - DNA, 15 bp, Homo sapiens
aaaacccatctctac

SEQ ID NO: 73272 - DNA, 15 bp, Homo sapiens
taaaacccatctcta

SEQ ID NO: 73273 - DNA, 15 bp, Homo sapiens
ataaaacccatctct

SEQ ID NO: 73274 - DNA, 15 bp, Homo sapiens
gataaaacccatctc

SEQ ID NO: 73275 - DNA, 15 bp, Homo sapiens
ggataaaacccatct

SEQ ID NO: 73276 - DNA, 15 bp, Homo sapiens
tggataaaacccatc

SEQ ID NO: 73277 - DNA, 15 bp, Homo sapiens
atggataaaacccat

SEQ ID NO: 73278 - DNA, 15 bp, Homo sapiens
catggataaaaccca

SEQ ID NO: 73279 - DNA, 15 bp, Homo sapiens
acatggataaaaccc

SEQ ID NO: 73280 - DNA, 15 bp, Homo sapiens
aacatggataaaacc

SEQ ID NO: 73281 - DNA, 15 bp, Homo sapiens
caacatggataaaac

SEQ ID NO: 73282 - DNA, 15 bp, Homo sapiens
ccaacatggataaaa

SEQ ID NO: 73283 - DNA, 15 bp, Homo sapiens
accaacatggataaa

SEQ ID NO: 73284 - DNA, 15 bp, Homo sapiens
gaccaacatggataa

SEQ ID NO: 73285 - DNA, 15 bp, Homo sapiens
tgaccaacatggata

SEQ ID NO: 73286 - DNA, 15 bp, Homo sapiens
ctgaccaacatggat

SEQ ID NO: 73287 - DNA, 15 bp, Homo sapiens
ctcgagaccagcctg

SEQ ID NO: 73288 - DNA, 15 bp, Homo sapiens
gctcgagaccagcct

SEQ ID NO: 73289 - DNA, 15 bp, Homo sapiens
agctcgagaccagcc

SEQ ID NO: 73290 - DNA, 15 bp, Homo sapiens
gagctcgagaccagc

SEQ ID NO: 73291 - DNA, 15 bp, Homo sapiens
ggagctcgagaccag

SEQ ID NO: 73292 - DNA, 15 bp, Homo sapiens
tggagctcgagacca

SEQ ID NO: 73293 - DNA, 15 bp, Homo sapiens
ctggagctcgagacc

SEQ ID NO: 73294 - DNA, 15 bp, Homo sapiens
tctggagctcgagac

SEQ ID NO: 73295 - DNA, 15 bp, Homo sapiens
gtctggagctcgaga

SEQ ID NO: 73296 - DNA, 15 bp, Homo sapiens
ggtctggagctcgag

SEQ ID NO: 73297 - DNA, 15 bp, Homo sapiens
aggtctggagctcga

SEQ ID NO: 73298 - DNA, 15 bp, Homo sapiens
gaggtctggagctcg

SEQ ID NO: 73299 - DNA, 15 bp, Homo sapiens
tgaggtctggagctc

SEQ ID NO: 73300 - DNA, 15 bp, Homo sapiens
ctgaggtctggagct

SEQ ID NO: 73301 - DNA, 15 bp, Homo sapiens
cctgaggtctggagc

SEQ ID NO: 73302 - DNA, 15 bp, Homo sapiens
acctgaggtctggag

SEQ ID NO: 73303 - DNA, 15 bp, Homo sapiens
cacctgaggtctgga

SEQ ID NO: 73304 - DNA, 15 bp, Homo sapiens
tcacctgaggtctgg

SEQ ID NO: 73305 - DNA, 15 bp, Homo sapiens
atcacctgaggtctg

SEQ ID NO: 73306 - DNA, 15 bp, Homo sapiens
gatcacctgaggtct

SEQ ID NO: 73307 - DNA, 15 bp, Homo sapiens
ggcagatcacctgag

SEQ ID NO: 73308 - DNA, 15 bp, Homo sapiens
gggcagatcacctga

SEQ ID NO: 73309 - DNA, 15 bp, Homo sapiens
cgggcagatcacctg

SEQ ID NO: 73310 - DNA, 15 bp, Homo sapiens
gcgggcagatcacct

SEQ ID NO: 73311 - DNA, 15 bp, Homo sapiens
ggcgggcagatcacc

SEQ ID NO: 73312 - DNA, 15 bp, Homo sapiens
gaggcgggcagatca

SEQ ID NO: 73313 - DNA, 15 bp, Homo sapiens
cgaggcgggcagatc

SEQ ID NO: 73314 - DNA, 15 bp, Homo sapiens
ccgaggcgggcagat

SEQ ID NO: 73315 - DNA, 15 bp, Homo sapiens
gccgaggcgggcaga

SEQ ID NO: 73316 - DNA, 15 bp, Homo sapiens
ggccgaggcgggcag

SEQ ID NO: 73317 - DNA, 15 bp, Homo sapiens
aggccgaggcgggca

SEQ ID NO: 73318 - DNA, 15 bp, Homo sapiens
ggcctataatcccag

SEQ ID NO: 73319 - DNA, 15 bp, Homo sapiens
aggcctataatccca

SEQ ID NO: 73320 - DNA, 15 bp, Homo sapiens
caggcctataatccc

SEQ ID NO: 73321 - DNA, 15 bp, Homo sapiens
tcaggcctataatcc

SEQ ID NO: 73322 - DNA, 15 bp, Homo sapiens
ctcaggcctataatc

SEQ ID NO: 73323 - DNA, 15 bp, Homo sapiens
gctcaggcctataat

SEQ ID NO: 73324 - DNA, 15 bp, Homo sapiens
ggctcaggcctataa

SEQ ID NO: 73325 - DNA, 15 bp, Homo sapiens
tggctcaggcctata

SEQ ID NO: 73326 - DNA, 15 bp, Homo sapiens
gtggctcaggcctat

SEQ ID NO: 73327 - DNA, 15 bp, Homo sapiens
tgtggctcaggccta

SEQ ID NO: 73328 - DNA, 15 bp, Homo sapiens
ctgtggctcaggcct

SEQ ID NO: 73329 - DNA, 15 bp, Homo sapiens
gctgtggctcaggcc

SEQ ID NO: 73330 - DNA, 15 bp, Homo sapiens
cgctgtggctcaggc

SEQ ID NO: 73331 - DNA, 15 bp, Homo sapiens
gcgctgtggctcagg

SEQ ID NO: 73332 - DNA, 15 bp, Homo sapiens
agcgctgtggctcag

SEQ ID NO: 73333 - DNA, 15 bp, Homo sapiens
gagcgctgtggctca

SEQ ID NO: 73334 - DNA, 15 bp, Homo sapiens
tgagcgctgtggctc

SEQ ID NO: 73335 - DNA, 15 bp, Homo sapiens
ctgagcgctgtggct

SEQ ID NO: 73336 - DNA, 15 bp, Homo sapiens
gctgagcgctgtggc

SEQ ID NO: 73337 - DNA, 15 bp, Homo sapiens
ggctgagcgctgtgg

SEQ ID NO: 73338 - DNA, 15 bp, Homo sapiens
tggctgagcgctgtg

SEQ ID NO: 73339 - DNA, 15 bp, Homo sapiens
atggctgagcgctgt

SEQ ID NO: 73340 - DNA, 15 bp, Homo sapiens
tatggctgagcgctg

SEQ ID NO: 73341 - DNA, 15 bp, Homo sapiens
ttatggctgagcgct

SEQ ID NO: 73342 - DNA, 15 bp, Homo sapiens
gttatggctgagcgc

SEQ ID NO: 73343 - DNA, 15 bp, Homo sapiens
agttatggctgagcg

SEQ ID NO: 73344 - DNA, 15 bp, Homo sapiens
aagttatggctgagc

SEQ ID NO: 73345 - DNA, 15 bp, Homo sapiens
aaagttatggctgag

SEQ ID NO: 73346 - DNA, 15 bp, Homo sapiens
taaagttatggctga

SEQ ID NO: 73347 - DNA, 15 bp, Homo sapiens
ttaaagttatggctg

SEQ ID NO: 73348 - DNA, 15 bp, Homo sapiens
attaaagttatggct

SEQ ID NO: 73349 - DNA, 15 bp, Homo sapiens
aattaaagttatggc

SEQ ID NO: 73350 - DNA, 15 bp, Homo sapiens
aaattaaagttatgg

SEQ ID NO: 73351 - DNA, 15 bp, Homo sapiens
caaattaaagttatg

SEQ ID NO: 73352 - DNA, 15 bp, Homo sapiens
tcaaattaaagttat

SEQ ID NO: 73353 - DNA, 15 bp, Homo sapiens
ttcaaattaaagtta

SEQ ID NO: 73354 - DNA, 15 bp, Homo sapiens
tttcaaattaaagtt

SEQ ID NO: 73355 - DNA, 15 bp, Homo sapiens
ttttcaaattaaagt

SEQ ID NO: 73356 - DNA, 15 bp, Homo sapiens
attttcaaattaaag

SEQ ID NO: 73357 - DNA, 15 bp, Homo sapiens
cattttcaaattaaa

SEQ ID NO: 73358 - DNA, 15 bp, Homo sapiens
tcattttcaaattaa

SEQ ID NO: 73359 - DNA, 15 bp, Homo sapiens
atcattttcaaatta

SEQ ID NO: 73360 - DNA, 15 bp, Homo sapiens
aatcattttcaaatt

SEQ ID NO: 73361 - DNA, 15 bp, Homo sapiens
caatcattttcaaat

SEQ ID NO: 73362 - DNA, 15 bp, Homo sapiens
acaatcattttcaaa

SEQ ID NO: 73363 - DNA, 15 bp, Homo sapiens
gacaatcattttcaa

SEQ ID NO: 73364 - DNA, 15 bp, Homo sapiens
agacaatcattttca

SEQ ID NO: 73365 - DNA, 15 bp, Homo sapiens
tagacaatcattttc

SEQ ID NO: 73366 - DNA, 15 bp, Homo sapiens
ctagacaatcatttt

SEQ ID NO: 73367 - DNA, 15 bp, Homo sapiens
gctagacaatcattt

SEQ ID NO: 73368 - DNA, 15 bp, Homo sapiens
agctagacaatcatt

SEQ ID NO: 73369 - DNA, 15 bp, Homo sapiens
aagctagacaatcat

SEQ ID NO: 73370 - DNA, 15 bp, Homo sapiens
caagctagacaatca

SEQ ID NO: 73371 - DNA, 15 bp, Homo sapiens
tcaagctagacaatc

SEQ ID NO: 73372 - DNA, 15 bp, Homo sapiens
atcaagctagacaat

SEQ ID NO: 73373 - DNA, 15 bp, Homo sapiens
tatcaagctagacaa

SEQ ID NO: 73374 - DNA, 15 bp, Homo sapiens
ctatcaagctagaca

SEQ ID NO: 73375 - DNA, 15 bp, Homo sapiens
gctatcaagctagac

SEQ ID NO: 73376 - DNA, 15 bp, Homo sapiens
agctatcaagctaga

SEQ ID NO: 73377 - DNA, 15 bp, Homo sapiens
gagctatcaagctag

SEQ ID NO: 73378 - DNA, 15 bp, Homo sapiens
agagctatcaagcta

SEQ ID NO: 73379 - DNA, 15 bp, Homo sapiens
gagagctatcaagct

SEQ ID NO: 73380 - DNA, 15 bp, Homo sapiens
tgagagctatcaagc

SEQ ID NO: 73381 - DNA, 15 bp, Homo sapiens
gtgagagctatcaag

SEQ ID NO: 73382 - DNA, 15 bp, Homo sapiens
ggtgagagctatcaa

SEQ ID NO: 73383 - DNA, 15 bp, Homo sapiens
tggtgagagctatca

SEQ ID NO: 73384 - DNA, 15 bp, Homo sapiens
gtggtgagagctatc

SEQ ID NO: 73385 - DNA, 15 bp, Homo sapiens
agtggtgagagctat

SEQ ID NO: 73386 - DNA, 15 bp, Homo sapiens
cagtggtgagagcta

SEQ ID NO: 73387 - DNA, 15 bp, Homo sapiens
tcagtggtgagagct

SEQ ID NO: 73388 - DNA, 15 bp, Homo sapiens
ctcagtggtgagagc

SEQ ID NO: 73389 - DNA, 15 bp, Homo sapiens
cctcagtggtgagag

SEQ ID NO: 73390 - DNA, 15 bp, Homo sapiens
tcctcagtggtgaga

SEQ ID NO: 73391 - DNA, 15 bp, Homo sapiens
ttcctcagtggtgag

SEQ ID NO: 73392 - DNA, 15 bp, Homo sapiens
tttcctcagtggtga

SEQ ID NO: 73393 - DNA, 15 bp, Homo sapiens
atttcctcagtggtg

SEQ ID NO: 73394 - DNA, 15 bp, Homo sapiens
catttcctcagtggt

SEQ ID NO: 73395 - DNA, 15 bp, Homo sapiens
acatttcctcagtgg

SEQ ID NO: 73396 - DNA, 15 bp, Homo sapiens
aacatttcctcagtg

SEQ ID NO: 73397 - DNA, 15 bp, Homo sapiens
gaacatttcctcagt

SEQ ID NO: 73398 - DNA, 15 bp, Homo sapiens
agaacatttcctcag

SEQ ID NO: 73399 - DNA, 15 bp, Homo sapiens
gagaacatttcctca

SEQ ID NO: 73400 - DNA, 15 bp, Homo sapiens
agagaacatttcctc

SEQ ID NO: 73401 - DNA, 15 bp, Homo sapiens
cagagaacatttcct

SEQ ID NO: 73402 - DNA, 15 bp, Homo sapiens
ccagagaacatttcc

SEQ ID NO: 73403 - DNA, 15 bp, Homo sapiens
gccagagaacatttc

SEQ ID NO: 73404 - DNA, 15 bp, Homo sapiens
tgccagagaacattt

SEQ ID NO: 73405 - DNA, 15 bp, Homo sapiens
ttgccagagaacatt

SEQ ID NO: 73406 - DNA, 15 bp, Homo sapiens
tttgccagagaacat

SEQ ID NO: 73407 - DNA, 15 bp, Homo sapiens
ttttgccagagaaca

SEQ ID NO: 73408 - DNA, 15 bp, Homo sapiens
tttttgccagagaac

SEQ ID NO: 73409 - DNA, 15 bp, Homo sapiens
gtttttgccagagaa

SEQ ID NO: 73410 - DNA, 15 bp, Homo sapiens
cgtttttgccagaga

SEQ ID NO: 73411 - DNA, 15 bp, Homo sapiens
ccgtttttgccagag

SEQ ID NO: 73412 - DNA, 15 bp, Homo sapiens
gccgtttttgccaga

SEQ ID NO: 73413 - DNA, 15 bp, Homo sapiens
agccgtttttgccag

SEQ ID NO: 73414 - DNA, 15 bp, Homo sapiens
aagccgtttttgcca

SEQ ID NO: 73415 - DNA, 15 bp, Homo sapiens
gaagccgtttttgcc

SEQ ID NO: 73416 - DNA, 15 bp, Homo sapiens
agaagccgtttttgc

SEQ ID NO: 73417 - DNA, 15 bp, Homo sapiens
gagaagccgtttttg

SEQ ID NO: 73418 - DNA, 15 bp, Homo sapiens
agagaagccgttttt

SEQ ID NO: 73419 - DNA, 15 bp, Homo sapiens
gagagaagccgtttt

SEQ ID NO: 73420 - DNA, 15 bp, Homo sapiens
ggagagaagccgttt

SEQ ID NO: 73421 - DNA, 15 bp, Homo sapiens
gggagagaagccgtt

SEQ ID NO: 73422 - DNA, 15 bp, Homo sapiens
tgggagagaagccgt

SEQ ID NO: 73423 - DNA, 15 bp, Homo sapiens
ctgggagagaagccg

SEQ ID NO: 73424 - DNA, 15 bp, Homo sapiens
cctgggagagaagcc

SEQ ID NO: 73425 - DNA, 15 bp, Homo sapiens
acctgggagagaagc

SEQ ID NO: 73426 - DNA, 15 bp, Homo sapiens
tacctgggagagaag

SEQ ID NO: 73427 - DNA, 15 bp, Homo sapiens
ttacctgggagagaa

SEQ ID NO: 73428 - DNA, 15 bp, Homo sapiens
gttacctgggagaga

SEQ ID NO: 73429 - DNA, 15 bp, Homo sapiens
agttacctgggagag

SEQ ID NO: 73430 - DNA, 15 bp, Homo sapiens
gagttacctgggaga

SEQ ID NO: 73431 - DNA, 15 bp, Homo sapiens
agagttacctgggag

SEQ ID NO: 73432 - DNA, 15 bp, Homo sapiens
cagagttacctggga

SEQ ID NO: 73433 - DNA, 15 bp, Homo sapiens
tcagagttacctggg

SEQ ID NO: 73434 - DNA, 15 bp, Homo sapiens
ctcagagttacctgg

SEQ ID NO: 73435 - DNA, 15 bp, Homo sapiens
tctcagagttacctg

SEQ ID NO: 73436 - DNA, 15 bp, Homo sapiens
ttctcagagttacct

SEQ ID NO: 73437 - DNA, 15 bp, Homo sapiens
tttctcagagttacc

SEQ ID NO: 73438 - DNA, 15 bp, Homo sapiens
ctttctcagagttac

SEQ ID NO: 73439 - DNA, 15 bp, Homo sapiens
actttctcagagtta

SEQ ID NO: 73440 - DNA, 15 bp, Homo sapiens
cactttctcagagtt

SEQ ID NO: 73441 - DNA, 15 bp, Homo sapiens
acactttctcagagt

SEQ ID NO: 73442 - DNA, 15 bp, Homo sapiens
aacactttctcagag

SEQ ID NO: 73443 - DNA, 15 bp, Homo sapiens
taacactttctcaga

SEQ ID NO: 73444 - DNA, 15 bp, Homo sapiens
ataacactttctcag

SEQ ID NO: 73445 - DNA, 15 bp, Homo sapiens
aataacactttctca

SEQ ID NO: 73446 - DNA, 15 bp, Homo sapiens
taataacactttctc

SEQ ID NO: 73447 - DNA, 15 bp, Homo sapiens
ttaataacactttct

SEQ ID NO: 73448 - DNA, 15 bp, Homo sapiens
cttaataacactttc

SEQ ID NO: 73449 - DNA, 15 bp, Homo sapiens
tcttaataacacttt

SEQ ID NO: 73450 - DNA, 15 bp, Homo sapiens
ttcttaataacactt

SEQ ID NO: 73451 - DNA, 15 bp, Homo sapiens
tttcttaataacact

SEQ ID NO: 73452 - DNA, 15 bp, Homo sapiens
atttcttaataacac

SEQ ID NO: 73453 - DNA, 15 bp, Homo sapiens
catttcttaataaca

SEQ ID NO: 73454 - DNA, 15 bp, Homo sapiens
acatttcttaataac

SEQ ID NO: 73455 - DNA, 15 bp, Homo sapiens
cacatttcttaataa

SEQ ID NO: 73456 - DNA, 15 bp, Homo sapiens
ccacatttcttaata

SEQ ID NO: 73457 - DNA, 15 bp, Homo sapiens
gccacatttcttaat

SEQ ID NO: 73458 - DNA, 15 bp, Homo sapiens
agccacatttcttaa

SEQ ID NO: 73459 - DNA, 15 bp, Homo sapiens
aagccacatttctta

SEQ ID NO: 73460 - DNA, 15 bp, Homo sapiens
gaagccacatttctt

SEQ ID NO: 73461 - DNA, 15 bp, Homo sapiens
agaagccacatttct

SEQ ID NO: 73462 - DNA, 15 bp, Homo sapiens
tagaagccacatttc

SEQ ID NO: 73463 - DNA, 15 bp, Homo sapiens
gtagaagccacattt

SEQ ID NO: 73464 - DNA, 15 bp, Homo sapiens
agtagaagccacatt

SEQ ID NO: 73465 - DNA, 15 bp, Homo sapiens
aagtagaagccacat

SEQ ID NO: 73466 - DNA, 15 bp, Homo sapiens
aaagtagaagccaca

SEQ ID NO: 73467 - DNA, 15 bp, Homo sapiens
gaaagtagaagccac

SEQ ID NO: 73468 - DNA, 15 bp, Homo sapiens
agaaagtagaagcca

SEQ ID NO: 73469 - DNA, 15 bp, Homo sapiens
gagaaagtagaagcc

SEQ ID NO: 73470 - DNA, 15 bp, Homo sapiens
agagaaagtagaagc

SEQ ID NO: 73471 - DNA, 15 bp, Homo sapiens
cagagaaagtagaag

SEQ ID NO: 73472 - DNA, 15 bp, Homo sapiens
acagagaaagtagaa

SEQ ID NO: 73473 - DNA, 15 bp, Homo sapiens
gacagagaaagtaga

SEQ ID NO: 73474 - DNA, 15 bp, Homo sapiens
agacagagaaagtag

SEQ ID NO: 73475 - DNA, 15 bp, Homo sapiens
aagacagagaaagta

SEQ ID NO: 73476 - DNA, 15 bp, Homo sapiens
taagacagagaaagt

SEQ ID NO: 73477 - DNA, 15 bp, Homo sapiens
gtaagacagagaaag

SEQ ID NO: 73478 - DNA, 15 bp, Homo sapiens
cgtaagacagagaaa

SEQ ID NO: 73479 - DNA, 15 bp, Homo sapiens
ccgtaagacagagaa

SEQ ID NO: 73480 - DNA, 15 bp, Homo sapiens
cccgtaagacagaga

SEQ ID NO: 73481 - DNA, 15 bp, Homo sapiens
ccccgtaagacagag

SEQ ID NO: 73482 - DNA, 15 bp, Homo sapiens
gccccgtaagacaga

SEQ ID NO: 73483 - DNA, 15 bp, Homo sapiens
agccccgtaagacag

SEQ ID NO: 73484 - DNA, 15 bp, Homo sapiens
tagccccgtaagaca

SEQ ID NO: 73485 - DNA, 15 bp, Homo sapiens
ttagccccgtaagac

SEQ ID NO: 73486 - DNA, 15 bp, Homo sapiens
gttagccccgtaaga

SEQ ID NO: 73487 - DNA, 15 bp, Homo sapiens
tgttagccccgtaag

SEQ ID NO: 73488 - DNA, 15 bp, Homo sapiens
atgttagccccgtaa

SEQ ID NO: 73489 - DNA, 15 bp, Homo sapiens
catgttagccccgta

SEQ ID NO: 73490 - DNA, 15 bp, Homo sapiens
gcatgttagccccgt

SEQ ID NO: 73491 - DNA, 15 bp, Homo sapiens
ggcatgttagccccg

SEQ ID NO: 73492 - DNA, 15 bp, Homo sapiens
tggcatgttagcccc

SEQ ID NO: 73493 - DNA, 15 bp, Homo sapiens
gtggcatgttagccc

SEQ ID NO: 73494 - DNA, 15 bp, Homo sapiens
agtggcatgttagcc

SEQ ID NO: 73495 - DNA, 15 bp, Homo sapiens
gagtggcatgttagc

SEQ ID NO: 73496 - DNA, 15 bp, Homo sapiens
tgagtggcatgttag

SEQ ID NO: 73497 - DNA, 15 bp, Homo sapiens
ctgagtggcatgtta

SEQ ID NO: 73498 - DNA, 15 bp, Homo sapiens
actgagtggcatgtt

SEQ ID NO: 73499 - DNA, 15 bp, Homo sapiens
tactgagtggcatgt

SEQ ID NO: 73500 - DNA, 15 bp, Homo sapiens
ttactgagtggcatg

SEQ ID NO: 73501 - DNA, 15 bp, Homo sapiens
attactgagtggcat

SEQ ID NO: 73502 - DNA, 15 bp, Homo sapiens
tattactgagtggca

SEQ ID NO: 73503 - DNA, 15 bp, Homo sapiens
atattactgagtggc

SEQ ID NO: 73504 - DNA, 15 bp, Homo sapiens
tatattactgagtgg

SEQ ID NO: 73505 - DNA, 15 bp, Homo sapiens
ttatattactgagtg

SEQ ID NO: 73506 - DNA, 15 bp, Homo sapiens
attatattactgagt

SEQ ID NO: 73507 - DNA, 15 bp, Homo sapiens
tattatattactgag

SEQ ID NO: 73508 - DNA, 15 bp, Homo sapiens
ttattatattactga

SEQ ID NO: 73509 - DNA, 15 bp, Homo sapiens
attattatattactg

SEQ ID NO: 73510 - DNA, 15 bp, Homo sapiens
gattattatattact

SEQ ID NO: 73511 - DNA, 15 bp, Homo sapiens
cgattattatattac

SEQ ID NO: 73512 - DNA, 15 bp, Homo sapiens
acgattattatatta

SEQ ID NO: 73513 - DNA, 15 bp, Homo sapiens
cacgattattatatt

SEQ ID NO: 73514 - DNA, 15 bp, Homo sapiens
ccacgattattatat

SEQ ID NO: 73515 - DNA, 15 bp, Homo sapiens
gccacgattattata

SEQ ID NO: 73516 - DNA, 15 bp, Homo sapiens
tgccacgattattat

SEQ ID NO: 73517 - DNA, 15 bp, Homo sapiens
ctgccacgattatta

SEQ ID NO: 73518 - DNA, 15 bp, Homo sapiens
actgccacgattatt

SEQ ID NO: 73519 - DNA, 15 bp, Homo sapiens
cactgccacgattat

SEQ ID NO: 73520 - DNA, 15 bp, Homo sapiens
ccactgccacgatta

SEQ ID NO: 73521 - DNA, 15 bp, Homo sapiens
accactgccacgatt

SEQ ID NO: 73522 - DNA, 15 bp, Homo sapiens
caccactgccacgat

SEQ ID NO: 73523 - DNA, 15 bp, Homo sapiens
tcaccactgccacga

SEQ ID NO: 73524 - DNA, 15 bp, Homo sapiens
gtcaccactgccacg

SEQ ID NO: 73525 - DNA, 15 bp, Homo sapiens
agtcaccactgccac

SEQ ID NO: 73526 - DNA, 15 bp, Homo sapiens
tagtcaccactgcca

SEQ ID NO: 73527 - DNA, 15 bp, Homo sapiens
gtagtcaccactgcc

SEQ ID NO: 73528 - DNA, 15 bp, Homo sapiens
agtagtcaccactgc

SEQ ID NO: 73529 - DNA, 15 bp, Homo sapiens
gagtagtcaccactg

SEQ ID NO: 73530 - DNA, 15 bp, Homo sapiens
agagtagtcaccact

SEQ ID NO: 73531 - DNA, 15 bp, Homo sapiens
gagagtagtcaccac

SEQ ID NO: 73532 - DNA, 15 bp, Homo sapiens
cgagagtagtcacca

SEQ ID NO: 73533 - DNA, 15 bp, Homo sapiens
acgagagtagtcacc

SEQ ID NO: 73534 - DNA, 15 bp, Homo sapiens
tacgagagtagtcac

SEQ ID NO: 73535 - DNA, 15 bp, Homo sapiens
ttacgagagtagtca

SEQ ID NO: 73536 - DNA, 15 bp, Homo sapiens
attacgagagtagtc

SEQ ID NO: 73537 - DNA, 15 bp, Homo sapiens
cattacgagagtagt

SEQ ID NO: 73538 - DNA, 15 bp, Homo sapiens
acattacgagagtag

SEQ ID NO: 73539 - DNA, 15 bp, Homo sapiens
aacattacgagagta

SEQ ID NO: 73540 - DNA, 15 bp, Homo sapiens
caacattacgagagt

SEQ ID NO: 73541 - DNA, 15 bp, Homo sapiens
ccaacattacgagag

SEQ ID NO: 73542 - DNA, 15 bp, Homo sapiens
accaacattacgaga

SEQ ID NO: 73543 - DNA, 15 bp, Homo sapiens
caccaacattacgag

SEQ ID NO: 73544 - DNA, 15 bp, Homo sapiens
gcaccaacattacga

SEQ ID NO: 73545 - DNA, 15 bp, Homo sapiens
agcaccaacattacg

SEQ ID NO: 73546 - DNA, 15 bp, Homo sapiens
aagcaccaacattac

SEQ ID NO: 73547 - DNA, 15 bp, Homo sapiens
taagcaccaacatta

SEQ ID NO: 73548 - DNA, 15 bp, Homo sapiens
ataagcaccaacatt

SEQ ID NO: 73549 - DNA, 15 bp, Homo sapiens
tataagcaccaacat

SEQ ID NO: 73550 - DNA, 15 bp, Homo sapiens
ttataagcaccaaca

SEQ ID NO: 73551 - DNA, 15 bp, Homo sapiens
attataagcaccaac

SEQ ID NO: 73552 - DNA, 15 bp, Homo sapiens
cattataagcaccaa

SEQ ID NO: 73553 - DNA, 15 bp, Homo sapiens
acattataagcacca

SEQ ID NO: 73554 - DNA, 15 bp, Homo sapiens
aacattataagcacc

SEQ ID NO: 73555 - DNA, 15 bp, Homo sapiens
gaacattataagcac

SEQ ID NO: 73556 - DNA, 15 bp, Homo sapiens
agaacattataagca

SEQ ID NO: 73557 - DNA, 15 bp, Homo sapiens
gagaacattataagc

SEQ ID NO: 73558 - DNA, 15 bp, Homo sapiens
tgagaacattataag

SEQ ID NO: 73559 - DNA, 15 bp, Homo sapiens
atgagaacattataa

SEQ ID NO: 73560 - DNA, 15 bp, Homo sapiens
gatgagaacattata

SEQ ID NO: 73561 - DNA, 15 bp, Homo sapiens
agatgagaacattat

SEQ ID NO: 73562 - DNA, 15 bp, Homo sapiens
gagatgagaacatta

SEQ ID NO: 73563 - DNA, 15 bp, Homo sapiens
agagatgagaacatt

SEQ ID NO: 73564 - DNA, 15 bp, Homo sapiens
gagagatgagaacat

SEQ ID NO: 73565 - DNA, 15 bp, Homo sapiens
agagagatgagaaca

SEQ ID NO: 73566 - DNA, 15 bp, Homo sapiens
gagagagatgagaac

SEQ ID NO: 73567 - DNA, 15 bp, Homo sapiens
tgagagagatgagaa

SEQ ID NO: 73568 - DNA, 15 bp, Homo sapiens
atgagagagatgaga

SEQ ID NO: 73569 - DNA, 15 bp, Homo sapiens
aatgagagagatgag

SEQ ID NO: 73570 - DNA, 15 bp, Homo sapiens
aaatgagagagatga

SEQ ID NO: 73571 - DNA, 15 bp, Homo sapiens
aaaatgagagagatg

SEQ ID NO: 73572 - DNA, 15 bp, Homo sapiens
gaaaatgagagagat

SEQ ID NO: 73573 - DNA, 15 bp, Homo sapiens
ggaaaatgagagaga

SEQ ID NO: 73574 - DNA, 15 bp, Homo sapiens
tggaaaatgagagag

SEQ ID NO: 73575 - DNA, 15 bp, Homo sapiens
ctggaaaatgagaga

SEQ ID NO: 73576 - DNA, 15 bp, Homo sapiens
tctggaaaatgagag

SEQ ID NO: 73577 - DNA, 15 bp, Homo sapiens
atctggaaaatgaga

SEQ ID NO: 73578 - DNA, 15 bp, Homo sapiens
tatctggaaaatgag

SEQ ID NO: 73579 - DNA, 15 bp, Homo sapiens
atatctggaaaatga

SEQ ID NO: 73580 - DNA, 15 bp, Homo sapiens
aatatctggaaaatg

SEQ ID NO: 73581 - DNA, 15 bp, Homo sapiens
gaatatctggaaaat

SEQ ID NO: 73582 - DNA, 15 bp, Homo sapiens
ggaatatctggaaaa

SEQ ID NO: 73583 - DNA, 15 bp, Homo sapiens
aggaatatctggaaa

SEQ ID NO: 73584 - DNA, 15 bp, Homo sapiens
gaggaatatctggaa

SEQ ID NO: 73585 - DNA, 15 bp, Homo sapiens
tgaggaatatctgga

SEQ ID NO: 73586 - DNA, 15 bp, Homo sapiens
ttgaggaatatctgg

SEQ ID NO: 73587 - DNA, 15 bp, Homo sapiens
cttgaggaatatctg

SEQ ID NO: 73588 - DNA, 15 bp, Homo sapiens
ccttgaggaatatct

SEQ ID NO: 73589 - DNA, 15 bp, Homo sapiens
accttgaggaatatc

SEQ ID NO: 73590 - DNA, 15 bp, Homo sapiens
caccttgaggaatat

SEQ ID NO: 73591 - DNA, 15 bp, Homo sapiens
ccaccttgaggaata

SEQ ID NO: 73592 - DNA, 15 bp, Homo sapiens
gccaccttgaggaat

SEQ ID NO: 73593 - DNA, 15 bp, Homo sapiens
ggccaccttgaggaa

SEQ ID NO: 73594 - DNA, 15 bp, Homo sapiens
cggccaccttgagga

SEQ ID NO: 73595 - DNA, 15 bp, Homo sapiens
tcggccaccttgagg

SEQ ID NO: 73596 - DNA, 15 bp, Homo sapiens
ttcggccaccttgag

SEQ ID NO: 73597 - DNA, 15 bp, Homo sapiens
cttcggccaccttga

SEQ ID NO: 73598 - DNA, 15 bp, Homo sapiens
tcttcggccaccttg

SEQ ID NO: 73599 - DNA, 15 bp, Homo sapiens
ctcttcggccacctt

SEQ ID NO: 73600 - DNA, 15 bp, Homo sapiens
tctcttcggccacct

SEQ ID NO: 73601 - DNA, 15 bp, Homo sapiens
ctctcttcggccacc

SEQ ID NO: 73602 - DNA, 15 bp, Homo sapiens
actctcttcggccac

SEQ ID NO: 73603 - DNA, 15 bp, Homo sapiens
cactctcttcggcca

SEQ ID NO: 73604 - DNA, 15 bp, Homo sapiens
ccactctcttcggcc

SEQ ID NO: 73605 - DNA, 15 bp, Homo sapiens
cccactctcttcggc

SEQ ID NO: 73606 - DNA, 15 bp, Homo sapiens
ccccactctcttcgg

SEQ ID NO: 73607 - DNA, 15 bp, Homo sapiens
accccactctcttcg

SEQ ID NO: 73608 - DNA, 15 bp, Homo sapiens
caccccactctcttc

SEQ ID NO: 73609 - DNA, 15 bp, Homo sapiens
ccaccccactctctt

SEQ ID NO: 73610 - DNA, 15 bp, Homo sapiens
tccaccccactctct

SEQ ID NO: 73611 - DNA, 15 bp, Homo sapiens
atccaccccactctc

SEQ ID NO: 73612 - DNA, 15 bp, Homo sapiens
catccaccccactct

SEQ ID NO: 73613 - DNA, 15 bp, Homo sapiens
gcatccaccccactc

SEQ ID NO: 73614 - DNA, 15 bp, Homo sapiens
agcatccaccccact

SEQ ID NO: 73615 - DNA, 15 bp, Homo sapiens
cagcatccaccccac

SEQ ID NO: 73616 - DNA, 15 bp, Homo sapiens
tcagcatccacccca

SEQ ID NO: 73617 - DNA, 15 bp, Homo sapiens
ctcagcatccacccc

SEQ ID NO: 73618 - DNA, 15 bp, Homo sapiens
tctcagcatccaccc

SEQ ID NO: 73619 - DNA, 15 bp, Homo sapiens
gtctcagcatccacc

SEQ ID NO: 73620 - DNA, 15 bp, Homo sapiens
ggtctcagcatccac

SEQ ID NO: 73621 - DNA, 15 bp, Homo sapiens
aggtctcagcatcca

SEQ ID NO: 73622 - DNA, 15 bp, Homo sapiens
gaggtctcagcatcc

SEQ ID NO: 73623 - DNA, 15 bp, Homo sapiens
tgaggtctcagcatc

SEQ ID NO: 73624 - DNA, 15 bp, Homo sapiens
ctgaggtctcagcat

SEQ ID NO: 73625 - DNA, 15 bp, Homo sapiens
cctgaggtctcagca

SEQ ID NO: 73626 - DNA, 15 bp, Homo sapiens
acctgaggtctcagc

SEQ ID NO: 73627 - DNA, 15 bp, Homo sapiens
tacctgaggtctcag

SEQ ID NO: 73628 - DNA, 15 bp, Homo sapiens
ttacctgaggtctca

SEQ ID NO: 73629 - DNA, 15 bp, Homo sapiens
gttacctgaggtctc

SEQ ID NO: 73630 - DNA, 15 bp, Homo sapiens
agttacctgaggtct

SEQ ID NO: 73631 - DNA, 15 bp, Homo sapiens
cagttacctgaggtc

SEQ ID NO: 73632 - DNA, 15 bp, Homo sapiens
gcagttacctgaggt

SEQ ID NO: 73633 - DNA, 15 bp, Homo sapiens
ggcagttacctgagg

SEQ ID NO: 73634 - DNA, 15 bp, Homo sapiens
aggcagttacctgag

SEQ ID NO: 73635 - DNA, 15 bp, Homo sapiens
aaggcagttacctga

SEQ ID NO: 73636 - DNA, 15 bp, Homo sapiens
caaggcagttacctg

SEQ ID NO: 73637 - DNA, 15 bp, Homo sapiens
tcaaggcagttacct

SEQ ID NO: 73638 - DNA, 15 bp, Homo sapiens
ctcaaggcagttacc

SEQ ID NO: 73639 - DNA, 15 bp, Homo sapiens
cctcaaggcagttac

SEQ ID NO: 73640 - DNA, 15 bp, Homo sapiens
ccctcaaggcagtta

SEQ ID NO: 73641 - DNA, 15 bp, Homo sapiens
tccctcaaggcagtt

SEQ ID NO: 73642 - DNA, 15 bp, Homo sapiens
ctccctcaaggcagt

SEQ ID NO: 73643 - DNA, 15 bp, Homo sapiens
tctccctcaaggcag

SEQ ID NO: 73644 - DNA, 15 bp, Homo sapiens
ttctccctcaaggca

SEQ ID NO: 73645 - DNA, 15 bp, Homo sapiens
attctccctcaaggc

SEQ ID NO: 73646 - DNA, 15 bp, Homo sapiens
cattctccctcaagg

SEQ ID NO: 73647 - DNA, 15 bp, Homo sapiens
ccattctccctcaag

SEQ ID NO: 73648 - DNA, 15 bp, Homo sapiens
gccattctccctcaa

SEQ ID NO: 73649 - DNA, 15 bp, Homo sapiens
tgccattctccctca

SEQ ID NO: 73650 - DNA, 15 bp, Homo sapiens
gtgccattctccctc

SEQ ID NO: 73651 - DNA, 15 bp, Homo sapiens
tgtgccattctccct

SEQ ID NO: 73652 - DNA, 15 bp, Homo sapiens
gtgtgccattctccc

SEQ ID NO: 73653 - DNA, 15 bp, Homo sapiens
agtgtgccattctcc

SEQ ID NO: 73654 - DNA, 15 bp, Homo sapiens
aagtgtgccattctc

SEQ ID NO: 73655 - DNA, 15 bp, Homo sapiens
taagtgtgccattct

SEQ ID NO: 73656 - DNA, 15 bp, Homo sapiens
ttaagtgtgccattc

SEQ ID NO: 73657 - DNA, 15 bp, Homo sapiens
cttaagtgtgccatt

SEQ ID NO: 73658 - DNA, 15 bp, Homo sapiens
tcttaagtgtgccat

SEQ ID NO: 73659 - DNA, 15 bp, Homo sapiens
atcttaagtgtgcca

SEQ ID NO: 73660 - DNA, 15 bp, Homo sapiens
tatcttaagtgtgcc

SEQ ID NO: 73661 - DNA, 15 bp, Homo sapiens
ctatcttaagtgtgc

SEQ ID NO: 73662 - DNA, 15 bp, Homo sapiens
actatcttaagtgtg

SEQ ID NO: 73663 - DNA, 15 bp, Homo sapiens
cactatcttaagtgt

SEQ ID NO: 73664 - DNA, 15 bp, Homo sapiens
gcactatcttaagtg

SEQ ID NO: 73665 - DNA, 15 bp, Homo sapiens
ggcactatcttaagt

SEQ ID NO: 73666 - DNA, 15 bp, Homo sapiens
aggcactatcttaag

SEQ ID NO: 73667 - DNA, 15 bp, Homo sapiens
aaggcactatcttaa

SEQ ID NO: 73668 - DNA, 15 bp, Homo sapiens
gaaggcactatctta

SEQ ID NO: 73669 - DNA, 15 bp, Homo sapiens
agaaggcactatctt

SEQ ID NO: 73670 - DNA, 15 bp, Homo sapiens
cagaaggcactatct

SEQ ID NO: 73671 - DNA, 15 bp, Homo sapiens
gcagaaggcactatc

SEQ ID NO: 73672 - DNA, 15 bp, Homo sapiens
agcagaaggcactat

SEQ ID NO: 73673 - DNA, 15 bp, Homo sapiens
cagcagaaggcacta

SEQ ID NO: 73674 - DNA, 15 bp, Homo sapiens
ccagcagaaggcact

SEQ ID NO: 73675 - DNA, 15 bp, Homo sapiens
gccagcagaaggcac

SEQ ID NO: 73676 - DNA, 15 bp, Homo sapiens
agccagcagaaggca

SEQ ID NO: 73677 - DNA, 15 bp, Homo sapiens
aagccagcagaaggc

SEQ ID NO: 73678 - DNA, 15 bp, Homo sapiens
aaagccagcagaagg

SEQ ID NO: 73679 - DNA, 15 bp, Homo sapiens
gaaagccagcagaag

SEQ ID NO: 73680 - DNA, 15 bp, Homo sapiens
agaaagccagcagaa

SEQ ID NO: 73681 - DNA, 15 bp, Homo sapiens
gagaaagccagcaga

SEQ ID NO: 73682 - DNA, 15 bp, Homo sapiens
tgagaaagccagcag

SEQ ID NO: 73683 - DNA, 15 bp, Homo sapiens
ctgagaaagccagca

SEQ ID NO: 73684 - DNA, 15 bp, Homo sapiens
actgagaaagccagc

SEQ ID NO: 73685 - DNA, 15 bp, Homo sapiens
cactgagaaagccag

SEQ ID NO: 73686 - DNA, 15 bp, Homo sapiens
gcactgagaaagcca

SEQ ID NO: 73687 - DNA, 15 bp, Homo sapiens
tgcactgagaaagcc

SEQ ID NO: 73688 - DNA, 15 bp, Homo sapiens
gtgcactgagaaagc

SEQ ID NO: 73689 - DNA, 15 bp, Homo sapiens
cgtgcactgagaaag

SEQ ID NO: 73690 - DNA, 15 bp, Homo sapiens
tcgtgcactgagaaa

SEQ ID NO: 73691 - DNA, 15 bp, Homo sapiens
ctcgtgcactgagaa

SEQ ID NO: 73692 - DNA, 15 bp, Homo sapiens
actcgtgcactgaga

SEQ ID NO: 73693 - DNA, 15 bp, Homo sapiens
tactcgtgcactgag

SEQ ID NO: 73694 - DNA, 15 bp, Homo sapiens
atactcgtgcactga

SEQ ID NO: 73695 - DNA, 15 bp, Homo sapiens
aatactcgtgcactg

SEQ ID NO: 73696 - DNA, 15 bp, Homo sapiens
caatactcgtgcact

SEQ ID NO: 73697 - DNA, 15 bp, Homo sapiens
acaatactcgtgcac

SEQ ID NO: 73698 - DNA, 15 bp, Homo sapiens
aacaatactcgtgca

SEQ ID NO: 73699 - DNA, 15 bp, Homo sapiens
gaacaatactcgtgc

SEQ ID NO: 73700 - DNA, 15 bp, Homo sapiens
ggaacaatactcgtg

SEQ ID NO: 73701 - DNA, 15 bp, Homo sapiens
aggaacaatactcgt

SEQ ID NO: 73702 - DNA, 15 bp, Homo sapiens
aaggaacaatactcg

SEQ ID NO: 73703 - DNA, 15 bp, Homo sapiens
aaaggaacaatactc

SEQ ID NO: 73704 - DNA, 15 bp, Homo sapiens
gaaaggaacaatact

SEQ ID NO: 73705 - DNA, 15 bp, Homo sapiens
ggaaaggaacaatac

SEQ ID NO: 73706 - DNA, 15 bp, Homo sapiens
gggaaaggaacaata

SEQ ID NO: 73707 - DNA, 15 bp, Homo sapiens
agggaaaggaacaat

SEQ ID NO: 73708 - DNA, 15 bp, Homo sapiens
aagggaaaggaacaa

SEQ ID NO: 73709 - DNA, 15 bp, Homo sapiens
aaagggaaaggaaca

SEQ ID NO: 73710 - DNA, 15 bp, Homo sapiens
caaagggaaaggaac

SEQ ID NO: 73711 - DNA, 15 bp, Homo sapiens
tcaaagggaaaggaa

SEQ ID NO: 73712 - DNA, 15 bp, Homo sapiens
ttcaaagggaaagga

SEQ ID NO: 73713 - DNA, 15 bp, Homo sapiens
attcaaagggaaagg

SEQ ID NO: 73714 - DNA, 15 bp, Homo sapiens
aattcaaagggaaag

SEQ ID NO: 73715 - DNA, 15 bp, Homo sapiens
caattcaaagggaaa

SEQ ID NO: 73716 - DNA, 15 bp, Homo sapiens
acaattcaaagggaa

SEQ ID NO: 73717 - DNA, 15 bp, Homo sapiens
aacaattcaaaggga

SEQ ID NO: 73718 - DNA, 15 bp, Homo sapiens
gaacaattcaaaggg

SEQ ID NO: 73719 - DNA, 15 bp, Homo sapiens
agaacaattcaaagg

SEQ ID NO: 73720 - DNA, 15 bp, Homo sapiens
tagaacaattcaaag

SEQ ID NO: 73721 - DNA, 15 bp, Homo sapiens
atagaacaattcaaa

SEQ ID NO: 73722 - DNA, 15 bp, Homo sapiens
aatagaacaattcaa

SEQ ID NO: 73723 - DNA, 15 bp, Homo sapiens
caatagaacaattca

SEQ ID NO: 73724 - DNA, 15 bp, Homo sapiens
gcaatagaacaattc

SEQ ID NO: 73725 - DNA, 15 bp, Homo sapiens
tgcaatagaacaatt

SEQ ID NO: 73726 - DNA, 15 bp, Homo sapiens
atgcaatagaacaat

SEQ ID NO: 73727 - DNA, 15 bp, Homo sapiens
aatgcaatagaacaa

SEQ ID NO: 73728 - DNA, 15 bp, Homo sapiens
gaatgcaatagaaca

SEQ ID NO: 73729 - DNA, 15 bp, Homo sapiens
agaatgcaatagaac

SEQ ID NO: 73730 - DNA, 15 bp, Homo sapiens
gagaatgcaatagaa

SEQ ID NO: 73731 - DNA, 15 bp, Homo sapiens
tgagaatgcaataga

SEQ ID NO: 73732 - DNA, 15 bp, Homo sapiens
atgagaatgcaatag

SEQ ID NO: 73733 - DNA, 15 bp, Homo sapiens
aatgagaatgcaata

SEQ ID NO: 73734 - DNA, 15 bp, Homo sapiens
aaatgagaatgcaat

SEQ ID NO: 73735 - DNA, 15 bp, Homo sapiens
caaatgagaatgcaa

SEQ ID NO: 73736 - DNA, 15 bp, Homo sapiens
acaaatgagaatgca

SEQ ID NO: 73737 - DNA, 15 bp, Homo sapiens
tacaaatgagaatgc

SEQ ID NO: 73738 - DNA, 15 bp, Homo sapiens
ctacaaatgagaatg

SEQ ID NO: 73739 - DNA, 15 bp, Homo sapiens
tctacaaatgagaat

SEQ ID NO: 73740 - DNA, 15 bp, Homo sapiens
ctctacaaatgagaa

SEQ ID NO: 73741 - DNA, 15 bp, Homo sapiens
actctacaaatgaga

SEQ ID NO: 73742 - DNA, 15 bp, Homo sapiens
cactctacaaatgag

SEQ ID NO: 73743 - DNA, 15 bp, Homo sapiens
acactctacaaatga

SEQ ID NO: 73744 - DNA, 15 bp, Homo sapiens
tacactctacaaatg

SEQ ID NO: 73745 - DNA, 15 bp, Homo sapiens
ctacactctacaaat

SEQ ID NO: 73746 - DNA, 15 bp, Homo sapiens
cctacactctacaaa

SEQ ID NO: 73747 - DNA, 15 bp, Homo sapiens
acctacactctacaa

SEQ ID NO: 73748 - DNA, 15 bp, Homo sapiens
aacctacactctaca

SEQ ID NO: 73749 - DNA, 15 bp, Homo sapiens
aaacctacactctac

SEQ ID NO: 73750 - DNA, 15 bp, Homo sapiens
caaacctacactcta

SEQ ID NO: 73751 - DNA, 15 bp, Homo sapiens
acaaacctacactct

SEQ ID NO: 73752 - DNA, 15 bp, Homo sapiens
aacaaacctacactc

SEQ ID NO: 73753 - DNA, 15 bp, Homo sapiens
caacaaacctacact

SEQ ID NO: 73754 - DNA, 15 bp, Homo sapiens
gcaacaaacctacac

SEQ ID NO: 73755 - DNA, 15 bp, Homo sapiens
tgcaacaaacctaca

SEQ ID NO: 73756 - DNA, 15 bp, Homo sapiens
ctgcaacaaacctac

SEQ ID NO: 73757 - DNA, 15 bp, Homo sapiens
tctgcaacaaaccta

SEQ ID NO: 73758 - DNA, 15 bp, Homo sapiens
atctgcaacaaacct

SEQ ID NO: 73759 - DNA, 15 bp, Homo sapiens
catctgcaacaaacc

SEQ ID NO: 73760 - DNA, 15 bp, Homo sapiens
ccatctgcaacaaac

SEQ ID NO: 73761 - DNA, 15 bp, Homo sapiens
cccatctgcaacaaa

SEQ ID NO: 73762 - DNA, 15 bp, Homo sapiens
ccccatctgcaacaa

SEQ ID NO: 73763 - DNA, 15 bp, Homo sapiens
tccccatctgcaaca

SEQ ID NO: 73764 - DNA, 15 bp, Homo sapiens
ttccccatctgcaac

SEQ ID NO: 73765 - DNA, 15 bp, Homo sapiens
cttccccatctgcaa

SEQ ID NO: 73766 - DNA, 15 bp, Homo sapiens
ccttccccatctgca

SEQ ID NO: 73767 - DNA, 15 bp, Homo sapiens
accttccccatctgc

SEQ ID NO: 73768 - DNA, 15 bp, Homo sapiens
aaccttccccatctg

SEQ ID NO: 73769 - DNA, 15 bp, Homo sapiens
aaaccttccccatct

SEQ ID NO: 73770 - DNA, 15 bp, Homo sapiens
caaaccttccccatc

SEQ ID NO: 73771 - DNA, 15 bp, Homo sapiens
acaaaccttccccat

SEQ ID NO: 73772 - DNA, 15 bp, Homo sapiens
aacaaaccttcccca

SEQ ID NO: 73773 - DNA, 15 bp, Homo sapiens
aaacaaaccttcccc

SEQ ID NO: 73774 - DNA, 15 bp, Homo sapiens
aaaacaaaccttccc

SEQ ID NO: 73775 - DNA, 15 bp, Homo sapiens
caaaacaaaccttcc

SEQ ID NO: 73776 - DNA, 15 bp, Homo sapiens
acaaaacaaaccttc

SEQ ID NO: 73777 - DNA, 15 bp, Homo sapiens
aacaaaacaaacctt

SEQ ID NO: 73778 - DNA, 15 bp, Homo sapiens
caacaaaacaaacct

SEQ ID NO: 73779 - DNA, 15 bp, Homo sapiens
acaacaaaacaaacc

SEQ ID NO: 73780 - DNA, 15 bp, Homo sapiens
tacaacaaaacaaac

SEQ ID NO: 73781 - DNA, 15 bp, Homo sapiens
ttacaacaaaacaaa

SEQ ID NO: 73782 - DNA, 15 bp, Homo sapiens
tttacaacaaaacaa

SEQ ID NO: 73783 - DNA, 15 bp, Homo sapiens
atttacaacaaaaca

SEQ ID NO: 73784 - DNA, 15 bp, Homo sapiens
tatttacaacaaaac

SEQ ID NO: 73785 - DNA, 15 bp, Homo sapiens
ttatttacaacaaaa

SEQ ID NO: 73786 - DNA, 15 bp, Homo sapiens
tttatttacaacaaa

SEQ ID NO: 73787 - DNA, 15 bp, Homo sapiens
ttttatttacaacaa

SEQ ID NO: 73788 - DNA, 15 bp, Homo sapiens
attttatttacaaca

SEQ ID NO: 73789 - DNA, 15 bp, Homo sapiens
tattttatttacaac

SEQ ID NO: 73790 - DNA, 15 bp, Homo sapiens
ttattttatttacaa

SEQ ID NO: 73791 - DNA, 15 bp, Homo sapiens
tttattttatttaca

SEQ ID NO: 73792 - DNA, 15 bp, Homo sapiens
ctttattttatttac

SEQ ID NO: 73793 - DNA, 15 bp, Homo sapiens
actttattttattta

SEQ ID NO: 73794 - DNA, 15 bp, Homo sapiens
atactttattttatt

SEQ ID NO: 73795 - DNA, 15 bp, Homo sapiens
catactttattttat

SEQ ID NO: 73796 - DNA, 15 bp, Homo sapiens
ccatactttatttta

SEQ ID NO: 73797 - DNA, 15 bp, Homo sapiens
cccatactttatttt

SEQ ID NO: 73798 - DNA, 15 bp, Homo sapiens
tcccatactttattt

SEQ ID NO: 73799 - DNA, 15 bp, Homo sapiens
atcccatactttatt

SEQ ID NO: 73800 - DNA, 15 bp, Homo sapiens
aatcccatactttat

SEQ ID NO: 73801 - DNA, 15 bp, Homo sapiens
gaatcccatacttta

SEQ ID NO: 73802 - DNA, 15 bp, Homo sapiens
agaatcccatacttt

SEQ ID NO: 73803 - DNA, 15 bp, Homo sapiens
aagaatcccatactt

SEQ ID NO: 73804 - DNA, 15 bp, Homo sapiens
aaagaatcccatact

SEQ ID NO: 73805 - DNA, 15 bp, Homo sapiens
gaaagaatcccatac

SEQ ID NO: 73806 - DNA, 15 bp, Homo sapiens
ggaaagaatcccata

SEQ ID NO: 73807 - DNA, 15 bp, Homo sapiens
aggaaagaatcccat

SEQ ID NO: 73808 - DNA, 15 bp, Homo sapiens
aaggaaagaatccca

SEQ ID NO: 73809 - DNA, 15 bp, Homo sapiens
caaggaaagaatccc

SEQ ID NO: 73810 - DNA, 15 bp, Homo sapiens
acaaggaaagaatcc

SEQ ID NO: 73811 - DNA, 15 bp, Homo sapiens
cacaaggaaagaatc

SEQ ID NO: 73812 - DNA, 15 bp, Homo sapiens
gcacaaggaaagaat

SEQ ID NO: 73813 - DNA, 15 bp, Homo sapiens
ggcacaaggaaagaa

SEQ ID NO: 73814 - DNA, 15 bp, Homo sapiens
aggcacaaggaaaga

SEQ ID NO: 73815 - DNA, 15 bp, Homo sapiens
aaggcacaaggaaag

SEQ ID NO: 73816 - DNA, 15 bp, Homo sapiens
gaaggcacaaggaaa

SEQ ID NO: 73817 - DNA, 15 bp, Homo sapiens
tgaaggcacaaggaa

SEQ ID NO: 73818 - DNA, 15 bp, Homo sapiens
ctgaaggcacaagga

SEQ ID NO: 73819 - DNA, 15 bp, Homo sapiens
tctgaaggcacaagg

SEQ ID NO: 73820 - DNA, 15 bp, Homo sapiens
atctgaaggcacaag

SEQ ID NO: 73821 - DNA, 15 bp, Homo sapiens
catctgaaggcacaa

SEQ ID NO: 73822 - DNA, 15 bp, Homo sapiens
ccatctgaaggcaca

SEQ ID NO: 73823 - DNA, 15 bp, Homo sapiens
accatctgaaggcac

SEQ ID NO: 73824 - DNA, 15 bp, Homo sapiens
taccatctgaaggca

SEQ ID NO: 73825 - DNA, 15 bp, Homo sapiens
gtaccatctgaaggc

SEQ ID NO: 73826 - DNA, 15 bp, Homo sapiens
ggtaccatctgaagg

SEQ ID NO: 73827 - DNA, 15 bp, Homo sapiens
aggtaccatctgaag

SEQ ID NO: 73828 - DNA, 15 bp, Homo sapiens
aaggtaccatctgaa

SEQ ID NO: 73829 - DNA, 15 bp, Homo sapiens
caaggtaccatctga

SEQ ID NO: 73830 - DNA, 15 bp, Homo sapiens
gcaaggtaccatctg

SEQ ID NO: 73831 - DNA, 15 bp, Homo sapiens
ggcaaggtaccatct

SEQ ID NO: 73832 - DNA, 15 bp, Homo sapiens
tggcaaggtaccatc

SEQ ID NO: 73833 - DNA, 15 bp, Homo sapiens
ctggcaaggtaccat

SEQ ID NO: 73834 - DNA, 15 bp, Homo sapiens
gctggcaaggtacca

SEQ ID NO: 73835 - DNA, 15 bp, Homo sapiens
tgctggcaaggtacc

SEQ ID NO: 73836 - DNA, 15 bp, Homo sapiens
ttgctggcaaggtac

SEQ ID NO: 73837 - DNA, 15 bp, Homo sapiens
cttgctggcaaggta

SEQ ID NO: 73838 - DNA, 15 bp, Homo sapiens
tcttgctggcaaggt

SEQ ID NO: 73839 - DNA, 15 bp, Homo sapiens
gtcttgctggcaagg

SEQ ID NO: 73840 - DNA, 15 bp, Homo sapiens
cgtcttgctggcaag

SEQ ID NO: 73841 - DNA, 15 bp, Homo sapiens
tcgtcttgctggcaa

SEQ ID NO: 73842 - DNA, 15 bp, Homo sapiens
ttcgtcttgctggca

SEQ ID NO: 73843 - DNA, 15 bp, Homo sapiens
tttcgtcttgctggc

SEQ ID NO: 73844 - DNA, 15 bp, Homo sapiens
gtttcgtcttgctgg

SEQ ID NO: 73845 - DNA, 15 bp, Homo sapiens
tgtttcgtcttgctg

SEQ ID NO: 73846 - DNA, 15 bp, Homo sapiens
ctgtttcgtcttgct

SEQ ID NO: 73847 - DNA, 15 bp, Homo sapiens
cctgtttcgtcttgc

SEQ ID NO: 73848 - DNA, 15 bp, Homo sapiens
gcctgtttcgtcttg

SEQ ID NO: 73849 - DNA, 15 bp, Homo sapiens
cgcctgtttcgtctt

SEQ ID NO: 73850 - DNA, 15 bp, Homo sapiens
ccgcctgtttcgtct

SEQ ID NO: 73851 - DNA, 15 bp, Homo sapiens
cccgcctgtttcgtc

SEQ ID NO: 73852 - DNA, 15 bp, Homo sapiens
gcccgcctgtttcgt

SEQ ID NO: 73853 - DNA, 15 bp, Homo sapiens
ggcccgcctgtttcg

SEQ ID NO: 73854 - DNA, 15 bp, Homo sapiens
aggcccgcctgtttc

SEQ ID NO: 73855 - DNA, 15 bp, Homo sapiens
aaggcccgcctgttt

SEQ ID NO: 73856 - DNA, 15 bp, Homo sapiens
gaaggcccgcctgtt

SEQ ID NO: 73857 - DNA, 15 bp, Homo sapiens
cgaaggcccgcctgt

SEQ ID NO: 73858 - DNA, 15 bp, Homo sapiens
ccgaaggcccgcctg

SEQ ID NO: 73859 - DNA, 15 bp, Homo sapiens
cccgaaggcccgcct

SEQ ID NO: 73860 - DNA, 15 bp, Homo sapiens
ccccgaaggcccgcc

SEQ ID NO: 73861 - DNA, 15 bp, Homo sapiens
tccccgaaggcccgc

SEQ ID NO: 73862 - DNA, 15 bp, Homo sapiens
gtccccgaaggcccg

SEQ ID NO: 73863 - DNA, 15 bp, Homo sapiens
tgtccccgaaggccc

SEQ ID NO: 73864 - DNA, 15 bp, Homo sapiens
ttgtccccgaaggcc

SEQ ID NO: 73865 - DNA, 15 bp, Homo sapiens
cttgtccccgaaggc

SEQ ID NO: 73866 - DNA, 15 bp, Homo sapiens
gcttgtccccgaagg

SEQ ID NO: 73867 - DNA, 15 bp, Homo sapiens
tgcttgtccccgaag

SEQ ID NO: 73868 - DNA, 15 bp, Homo sapiens
ctgcttgtccccgaa

SEQ ID NO: 73869 - DNA, 15 bp, Homo sapiens
tctgcttgtccccga

SEQ ID NO: 73870 - DNA, 15 bp, Homo sapiens
ctctgcttgtccccg

SEQ ID NO: 73871 - DNA, 15 bp, Homo sapiens
gctctgcttgtcccc

SEQ ID NO: 73872 - DNA, 15 bp, Homo sapiens
agctctgcttgtccc

SEQ ID NO: 73873 - DNA, 15 bp, Homo sapiens
cagctctgcttgtcc

SEQ ID NO: 73874 - DNA, 15 bp, Homo sapiens
acagctctgcttgtc

SEQ ID NO: 73875 - DNA, 15 bp, Homo sapiens
gacagctctgcttgt

SEQ ID NO: 73876 - DNA, 15 bp, Homo sapiens
agacagctctgcttg

SEQ ID NO: 73877 - DNA, 15 bp, Homo sapiens
aagacagctctgctt

SEQ ID NO: 73878 - DNA, 15 bp, Homo sapiens
gaagacagctctgct

SEQ ID NO: 73879 - DNA, 15 bp, Homo sapiens
cgaagacagctctgc

SEQ ID NO: 73880 - DNA, 15 bp, Homo sapiens
gcgaagacagctctg

SEQ ID NO: 73881 - DNA, 15 bp, Homo sapiens
ggcgaagacagctct

SEQ ID NO: 73882 - DNA, 15 bp, Homo sapiens
gggcgaagacagctc

SEQ ID NO: 73883 - DNA, 15 bp, Homo sapiens
cgggcgaagacagct

SEQ ID NO: 73884 - DNA, 15 bp, Homo sapiens
acgggcgaagacagc

SEQ ID NO: 73885 - DNA, 15 bp, Homo sapiens
aacgggcgaagacag

SEQ ID NO: 73886 - DNA, 15 bp, Homo sapiens
gaacgggcgaagaca

SEQ ID NO: 73887 - DNA, 15 bp, Homo sapiens
tgaacgggcgaagac

SEQ ID NO: 73888 - DNA, 15 bp, Homo sapiens
gtgaacgggcgaaga

SEQ ID NO: 73889 - DNA, 15 bp, Homo sapiens
agtgaacgggcgaag

SEQ ID NO: 73890 - DNA, 15 bp, Homo sapiens
cagtgaacgggcgaa

SEQ ID NO: 73891 - DNA, 15 bp, Homo sapiens
tcagtgaacgggcga

SEQ ID NO: 73892 - DNA, 15 bp, Homo sapiens
ttcagtgaacgggcg

SEQ ID NO: 73893 - DNA, 15 bp, Homo sapiens
cttcagtgaacgggc

SEQ ID NO: 73894 - DNA, 15 bp, Homo sapiens
tcttcagtgaacggg

SEQ ID NO: 73895 - DNA, 15 bp, Homo sapiens
atcttcagtgaacgg

SEQ ID NO: 73896 - DNA, 15 bp, Homo sapiens
catcttcagtgaacg

SEQ ID NO: 73897 - DNA, 15 bp, Homo sapiens
tcatcttcagtgaac

SEQ ID NO: 73898 - DNA, 15 bp, Homo sapiens
atcatcttcagtgaa

SEQ ID NO: 73899 - DNA, 15 bp, Homo sapiens
catcatcttcagtga

SEQ ID NO: 73900 - DNA, 15 bp, Homo sapiens
gcatcatcttcagtg

SEQ ID NO: 73901 - DNA, 15 bp, Homo sapiens
agcatcatcttcagt

SEQ ID NO: 73902 - DNA, 15 bp, Homo sapiens
cagcatcatcttcag

SEQ ID NO: 73903 - DNA, 15 bp, Homo sapiens
gcagcatcatcttca

SEQ ID NO: 73904 - DNA, 15 bp, Homo sapiens
agcagcatcatcttc

SEQ ID NO: 73905 - DNA, 15 bp, Homo sapiens
cagcagcatcatctt

SEQ ID NO: 73906 - DNA, 15 bp, Homo sapiens
tcagcagcatcatct

SEQ ID NO: 73907 - DNA, 15 bp, Homo sapiens
atcagcagcatcatc

SEQ ID NO: 73908 - DNA, 15 bp, Homo sapiens
gatcagcagcatcat

SEQ ID NO: 73909 - DNA, 15 bp, Homo sapiens
ggatcagcagcatca

SEQ ID NO: 73910 - DNA, 15 bp, Homo sapiens
tggatcagcagcatc

SEQ ID NO: 73911 - DNA, 15 bp, Homo sapiens
ttggatcagcagcat

SEQ ID NO: 73912 - DNA, 15 bp, Homo sapiens
tttggatcagcagca

SEQ ID NO: 73913 - DNA, 15 bp, Homo sapiens
atttggatcagcagc

SEQ ID NO: 73914 - DNA, 15 bp, Homo sapiens
catttggatcagcag

SEQ ID NO: 73915 - DNA, 15 bp, Homo sapiens
tcatttggatcagca

SEQ ID NO: 73916 - DNA, 15 bp, Homo sapiens
atcatttggatcagc

SEQ ID NO: 73917 - DNA, 15 bp, Homo sapiens
aatcatttggatcag

SEQ ID NO: 73918 - DNA, 15 bp, Homo sapiens
gaatcatttggatca

SEQ ID NO: 73919 - DNA, 15 bp, Homo sapiens
agaatcatttggatc

SEQ ID NO: 73920 - DNA, 15 bp, Homo sapiens
cagaatcatttggat

SEQ ID NO: 73921 - DNA, 15 bp, Homo sapiens
tcagaatcatttgga

SEQ ID NO: 73922 - DNA, 15 bp, Homo sapiens
gtcagaatcatttgg

SEQ ID NO: 73923 - DNA, 15 bp, Homo sapiens
tgtcagaatcatttg

SEQ ID NO: 73924 - DNA, 15 bp, Homo sapiens
atgtcagaatcattt

SEQ ID NO: 73925 - DNA, 15 bp, Homo sapiens
tatgtcagaatcatt

SEQ ID NO: 73926 - DNA, 15 bp, Homo sapiens
ctatgtcagaatcat

SEQ ID NO: 73927 - DNA, 15 bp, Homo sapiens
tctatgtcagaatca

SEQ ID NO: 73928 - DNA, 15 bp, Homo sapiens
gtctatgtcagaatc

SEQ ID NO: 73929 - DNA, 15 bp, Homo sapiens
ggtctatgtcagaat

SEQ ID NO: 73930 - DNA, 15 bp, Homo sapiens
gggtctatgtcagaa

SEQ ID NO: 73931 - DNA, 15 bp, Homo sapiens
tgggtctatgtcaga

SEQ ID NO: 73932 - DNA, 15 bp, Homo sapiens
ctgggtctatgtcag

SEQ ID NO: 73933 - DNA, 15 bp, Homo sapiens
cctgggtctatgtca

SEQ ID NO: 73934 - DNA, 15 bp, Homo sapiens
acctgggtctatgtc

SEQ ID NO: 73935 - DNA, 15 bp, Homo sapiens
gacctgggtctatgt

SEQ ID NO: 73936 - DNA, 15 bp, Homo sapiens
agacctgggtctatg

SEQ ID NO: 73937 - DNA, 15 bp, Homo sapiens
cagacctgggtctat

SEQ ID NO: 73938 - DNA, 15 bp, Homo sapiens
acagacctgggtcta

SEQ ID NO: 73939 - DNA, 15 bp, Homo sapiens
aacagacctgggtct

SEQ ID NO: 73940 - DNA, 15 bp, Homo sapiens
taacagacctgggtc

SEQ ID NO: 73941 - DNA, 15 bp, Homo sapiens
ctaacagacctgggt

SEQ ID NO: 73942 - DNA, 15 bp, Homo sapiens
cctaacagacctggg

SEQ ID NO: 73943 - DNA, 15 bp, Homo sapiens
ccctaacagacctgg

SEQ ID NO: 73944 - DNA, 15 bp, Homo sapiens
gccctaacagacctg

SEQ ID NO: 73945 - DNA, 15 bp, Homo sapiens
tgccctaacagacct

SEQ ID NO: 73946 - DNA, 15 bp, Homo sapiens
ttgccctaacagacc

SEQ ID NO: 73947 - DNA, 15 bp, Homo sapiens
cttgccctaacagac

SEQ ID NO: 73948 - DNA, 15 bp, Homo sapiens
tcttgccctaacaga

SEQ ID NO: 73949 - DNA, 15 bp, Homo sapiens
atcttgccctaacag

SEQ ID NO: 73950 - DNA, 15 bp, Homo sapiens
gatcttgccctaaca

SEQ ID NO: 73951 - DNA, 15 bp, Homo sapiens
tgatcttgccctaac

SEQ ID NO: 73952 - DNA, 15 bp, Homo sapiens
ttgatcttgccctaa

SEQ ID NO: 73953 - DNA, 15 bp, Homo sapiens
tttgatcttgcccta

SEQ ID NO: 73954 - DNA, 15 bp, Homo sapiens
gtttgatcttgccct

SEQ ID NO: 73955 - DNA, 15 bp, Homo sapiens
tgtttgatcttgccc

SEQ ID NO: 73956 - DNA, 15 bp, Homo sapiens
ctgtttgatcttgcc

SEQ ID NO: 73957 - DNA, 15 bp, Homo sapiens
actgtttgatcttgc

SEQ ID NO: 73958 - DNA, 15 bp, Homo sapiens
cactgtttgatcttg

SEQ ID NO: 73959 - DNA, 15 bp, Homo sapiens
acactgtttgatctt

SEQ ID NO: 73960 - DNA, 15 bp, Homo sapiens
gacactgtttgatct

SEQ ID NO: 73961 - DNA, 15 bp, Homo sapiens
ggacactgtttgatc

SEQ ID NO: 73962 - DNA, 15 bp, Homo sapiens
aggacactgtttgat

SEQ ID NO: 73963 - DNA, 15 bp, Homo sapiens
taggacactgtttga

SEQ ID NO: 73964 - DNA, 15 bp, Homo sapiens
gtaggacactgtttg

SEQ ID NO: 73965 - DNA, 15 bp, Homo sapiens
agtaggacactgttt

SEQ ID NO: 73966 - DNA, 15 bp, Homo sapiens
cagtaggacactgtt

SEQ ID NO: 73967 - DNA, 15 bp, Homo sapiens
acagtaggacactgt

SEQ ID NO: 73968 - DNA, 15 bp, Homo sapiens
aacagtaggacactg

SEQ ID NO: 73969 - DNA, 15 bp, Homo sapiens
aaacagtaggacact

SEQ ID NO: 73970 - DNA, 15 bp, Homo sapiens
caaacagtaggacac

SEQ ID NO: 73971 - DNA, 15 bp, Homo sapiens
tcaaacagtaggaca

SEQ ID NO: 73972 - DNA, 15 bp, Homo sapiens
ttcaaacagtaggac

SEQ ID NO: 73973 - DNA, 15 bp, Homo sapiens
attcaaacagtagga

SEQ ID NO: 73974 - DNA, 15 bp, Homo sapiens
cattcaaacagtagg

SEQ ID NO: 73975 - DNA, 15 bp, Homo sapiens
acattcaaacagtag

SEQ ID NO: 73976 - DNA, 15 bp, Homo sapiens
cacattcaaacagta

SEQ ID NO: 73977 - DNA, 15 bp, Homo sapiens
tcacattcaaacagt

SEQ ID NO: 73978 - DNA, 15 bp, Homo sapiens
ttcacattcaaacag

SEQ ID NO: 73979 - DNA, 15 bp, Homo sapiens
tttcacattcaaaca

SEQ ID NO: 73980 - DNA, 15 bp, Homo sapiens
atttcacattcaaac

SEQ ID NO: 73981 - DNA, 15 bp, Homo sapiens
aatttcacattcaaa

SEQ ID NO: 73982 - DNA, 15 bp, Homo sapiens
gaatttcacattcaa

SEQ ID NO: 73983 - DNA, 15 bp, Homo sapiens
agaatttcacattca

SEQ ID NO: 73984 - DNA, 15 bp, Homo sapiens
gagaatttcacattc

SEQ ID NO: 73985 - DNA, 15 bp, Homo sapiens
agagaatttcacatt

SEQ ID NO: 73986 - DNA, 15 bp, Homo sapiens
gagagaatttcacat

SEQ ID NO: 73987 - DNA, 15 bp, Homo sapiens
agagagaatttcaca

SEQ ID NO: 73988 - DNA, 15 bp, Homo sapiens
gagagagaatttcac

SEQ ID NO: 73989 - DNA, 15 bp, Homo sapiens
tgagagagaatttca

SEQ ID NO: 73990 - DNA, 15 bp, Homo sapiens
atgagagagaatttc

SEQ ID NO: 73991 - DNA, 15 bp, Homo sapiens
catgagagagaattt

SEQ ID NO: 73992 - DNA, 15 bp, Homo sapiens
gcatgagagagaatt

SEQ ID NO: 73993 - DNA, 15 bp, Homo sapiens
agcatgagagagaat

SEQ ID NO: 73994 - DNA, 15 bp, Homo sapiens
gagcatgagagagaa

SEQ ID NO: 73995 - DNA, 15 bp, Homo sapiens
agagcatgagagaga

SEQ ID NO: 73996 - DNA, 15 bp, Homo sapiens
gagagcatgagagag

SEQ ID NO: 73997 - DNA, 15 bp, Homo sapiens
tgagagcatgagaga

SEQ ID NO: 73998 - DNA, 15 bp, Homo sapiens
gtgagagcatgagag

SEQ ID NO: 73999 - DNA, 15 bp, Homo sapiens
ggtgagagcatgaga

SEQ ID NO: 74000 - DNA, 15 bp, Homo sapiens
aggtgagagcatgag

SEQ ID NO: 74001 - DNA, 15 bp, Homo sapiens
caggtgagagcatga

SEQ ID NO: 74002 - DNA, 15 bp, Homo sapiens
acaggtgagagcatg

SEQ ID NO: 74003 - DNA, 15 bp, Homo sapiens
aacaggtgagagcat

SEQ ID NO: 74004 - DNA, 15 bp, Homo sapiens
aaacaggtgagagca

SEQ ID NO: 74005 - DNA, 15 bp, Homo sapiens
aaaacaggtgagagc

SEQ ID NO: 74006 - DNA, 15 bp, Homo sapiens
gaaaacaggtgagag

SEQ ID NO: 74007 - DNA, 15 bp, Homo sapiens
agaaaacaggtgaga

SEQ ID NO: 74008 - DNA, 15 bp, Homo sapiens
aagaaaacaggtgag

SEQ ID NO: 74009 - DNA, 15 bp, Homo sapiens
aaagaaaacaggtga

SEQ ID NO: 74010 - DNA, 15 bp, Homo sapiens
caaagaaaacaggtg

SEQ ID NO: 74011 - DNA, 15 bp, Homo sapiens
ccaaagaaaacaggt

SEQ ID NO: 74012 - DNA, 15 bp, Homo sapiens
tccaaagaaaacagg

SEQ ID NO: 74013 - DNA, 15 bp, Homo sapiens
atccaaagaaaacag

SEQ ID NO: 74014 - DNA, 15 bp, Homo sapiens
catccaaagaaaaca

SEQ ID NO: 74015 - DNA, 15 bp, Homo sapiens
ccatccaaagaaaac

SEQ ID NO: 74016 - DNA, 15 bp, Homo sapiens
gccatccaaagaaaa

SEQ ID NO: 74017 - DNA, 15 bp, Homo sapiens
ggccatccaaagaaa

SEQ ID NO: 74018 - DNA, 15 bp, Homo sapiens
aggccatccaaagaa

SEQ ID NO: 74019 - DNA, 15 bp, Homo sapiens
aaggccatccaaaga

SEQ ID NO: 74020 - DNA, 15 bp, Homo sapiens
aaaggccatccaaag

SEQ ID NO: 74021 - DNA, 15 bp, Homo sapiens
taaaggccatccaaa

SEQ ID NO: 74022 - DNA, 15 bp, Homo sapiens
ctaaaggccatccaa

SEQ ID NO: 74023 - DNA, 15 bp, Homo sapiens
gctaaaggccatcca

SEQ ID NO: 74024 - DNA, 15 bp, Homo sapiens
ggctaaaggccatcc

SEQ ID NO: 74025 - DNA, 15 bp, Homo sapiens
tggctaaaggccatc

SEQ ID NO: 74026 - DNA, 15 bp, Homo sapiens
ttggctaaaggccat

SEQ ID NO: 74027 - DNA, 15 bp, Homo sapiens
cttggctaaaggcca

SEQ ID NO: 74028 - DNA, 15 bp, Homo sapiens
ccttggctaaaggcc

SEQ ID NO: 74029 - DNA, 15 bp, Homo sapiens
accttggctaaaggc

SEQ ID NO: 74030 - DNA, 15 bp, Homo sapiens
caccttggctaaagg

SEQ ID NO: 74031 - DNA, 15 bp, Homo sapiens
tcaccttggctaaag

SEQ ID NO: 74032 - DNA, 15 bp, Homo sapiens
atcaccttggctaaa

SEQ ID NO: 74033 - DNA, 15 bp, Homo sapiens
tatcaccttggctaa

SEQ ID NO: 74034 - DNA, 15 bp, Homo sapiens
ctatcaccttggcta

SEQ ID NO: 74035 - DNA, 15 bp, Homo sapiens
tctatcaccttggct

SEQ ID NO: 74036 - DNA, 15 bp, Homo sapiens
atctatcaccttggc

SEQ ID NO: 74037 - DNA, 15 bp, Homo sapiens
gatctatcaccttgg

SEQ ID NO: 74038 - DNA, 15 bp, Homo sapiens
ggatctatcaccttg

SEQ ID NO: 74039 - DNA, 15 bp, Homo sapiens
gggatctatcacctt

SEQ ID NO: 74040 - DNA, 15 bp, Homo sapiens
agggatctatcacct

SEQ ID NO: 74041 - DNA, 15 bp, Homo sapiens
tagggatctatcacc

SEQ ID NO: 74042 - DNA, 15 bp, Homo sapiens
gtagggatctatcac

SEQ ID NO: 74043 - DNA, 15 bp, Homo sapiens
tgtagggatctatca

SEQ ID NO: 74044 - DNA, 15 bp, Homo sapiens
ctgtagggatctatc

SEQ ID NO: 74045 - DNA, 15 bp, Homo sapiens
tctgtagggatctat

SEQ ID NO: 74046 - DNA, 15 bp, Homo sapiens
ctctgtagggatcta

SEQ ID NO: 74047 - DNA, 15 bp, Homo sapiens
actctgtagggatct

SEQ ID NO: 74048 - DNA, 15 bp, Homo sapiens
gactctgtagggatc

SEQ ID NO: 74049 - DNA, 15 bp, Homo sapiens
ggactctgtagggat

SEQ ID NO: 74050 - DNA, 15 bp, Homo sapiens
tggactctgtaggga

SEQ ID NO: 74051 - DNA, 15 bp, Homo sapiens
ttggactctgtaggg

SEQ ID NO: 74052 - DNA, 15 bp, Homo sapiens
tttggactctgtagg

SEQ ID NO: 74053 - DNA, 15 bp, Homo sapiens
ctttggactctgtag

SEQ ID NO: 74054 - DNA, 15 bp, Homo sapiens
tctttggactctgta

SEQ ID NO: 74055 - DNA, 15 bp, Homo sapiens
ctctttggactctgt

SEQ ID NO: 74056 - DNA, 15 bp, Homo sapiens
tctctttggactctg

SEQ ID NO: 74057 - DNA, 15 bp, Homo sapiens
ttctctttggactct

SEQ ID NO: 74058 - DNA, 15 bp, Homo sapiens
cttctctttggactc

SEQ ID NO: 74059 - DNA, 15 bp, Homo sapiens
acttctctttggact

SEQ ID NO: 74060 - DNA, 15 bp, Homo sapiens
cacttctctttggac

SEQ ID NO: 74061 - DNA, 15 bp, Homo sapiens
tcacttctctttgga

SEQ ID NO: 74062 - DNA, 15 bp, Homo sapiens
ctcacttctctttgg

SEQ ID NO: 74063 - DNA, 15 bp, Homo sapiens
cctcacttctctttg

SEQ ID NO: 74064 - DNA, 15 bp, Homo sapiens
tcctcacttctcttt

SEQ ID NO: 74065 - DNA, 15 bp, Homo sapiens
ttcctcacttctctt

SEQ ID NO: 74066 - DNA, 15 bp, Homo sapiens
tttcctcacttctct

SEQ ID NO: 74067 - DNA, 15 bp, Homo sapiens
atttcctcacttctc

SEQ ID NO: 74068 - DNA, 15 bp, Homo sapiens
catttcctcacttct

SEQ ID NO: 74069 - DNA, 15 bp, Homo sapiens
ccatttcctcacttc

SEQ ID NO: 74070 - DNA, 15 bp, Homo sapiens
accatttcctcactt

SEQ ID NO: 74071 - DNA, 15 bp, Homo sapiens
taccatttcctcact

SEQ ID NO: 74072 - DNA, 15 bp, Homo sapiens
ttaccatttcctcac

SEQ ID NO: 74073 - DNA, 15 bp, Homo sapiens
tttaccatttcctca

SEQ ID NO: 74074 - DNA, 15 bp, Homo sapiens
ttttaccatttcctc

SEQ ID NO: 74075 - DNA, 15 bp, Homo sapiens
cttttaccatttcct

SEQ ID NO: 74076 - DNA, 15 bp, Homo sapiens
gcttttaccatttcc

SEQ ID NO: 74077 - DNA, 15 bp, Homo sapiens
ggcttttaccatttc

SEQ ID NO: 74078 - DNA, 15 bp, Homo sapiens
tggcttttaccattt

SEQ ID NO: 74079 - DNA, 15 bp, Homo sapiens
gtggcttttaccatt

SEQ ID NO: 74080 - DNA, 15 bp, Homo sapiens
agtggcttttaccat

SEQ ID NO: 74081 - DNA, 15 bp, Homo sapiens
aagtggcttttacca

SEQ ID NO: 74082 - DNA, 15 bp, Homo sapiens
caagtggcttttacc

SEQ ID NO: 74083 - DNA, 15 bp, Homo sapiens
acaagtggcttttac

SEQ ID NO: 74084 - DNA, 15 bp, Homo sapiens
aacaagtggctttta

SEQ ID NO: 74085 - DNA, 15 bp, Homo sapiens
gaacaagtggctttt

SEQ ID NO: 74086 - DNA, 15 bp, Homo sapiens
agaacaagtggcttt

SEQ ID NO: 74087 - DNA, 15 bp, Homo sapiens
aagaacaagtggctt

SEQ ID NO: 74088 - DNA, 15 bp, Homo sapiens
aaagaacaagtggct

SEQ ID NO: 74089 - DNA, 15 bp, Homo sapiens
caaagaacaagtggc

SEQ ID NO: 74090 - DNA, 15 bp, Homo sapiens
gcaaagaacaagtgg

SEQ ID NO: 74091 - DNA, 15 bp, Homo sapiens
tgcaaagaacaagtg

SEQ ID NO: 74092 - DNA, 15 bp, Homo sapiens
ctgcaaagaacaagt

SEQ ID NO: 74093 - DNA, 15 bp, Homo sapiens
gctgcaaagaacaag

SEQ ID NO: 74094 - DNA, 15 bp, Homo sapiens
tgctgcaaagaacaa

SEQ ID NO: 74095 - DNA, 15 bp, Homo sapiens
atgctgcaaagaaca

SEQ ID NO: 74096 - DNA, 15 bp, Homo sapiens
gatgctgcaaagaac

SEQ ID NO: 74097 - DNA, 15 bp, Homo sapiens
cgatgctgcaaagaa

SEQ ID NO: 74098 - DNA, 15 bp, Homo sapiens
acgatgctgcaaaga

SEQ ID NO: 74099 - DNA, 15 bp, Homo sapiens
cacgatgctgcaaag

SEQ ID NO: 74100 - DNA, 15 bp, Homo sapiens
gcacgatgctgcaaa

SEQ ID NO: 74101 - DNA, 15 bp, Homo sapiens
tgcacgatgctgcaa

SEQ ID NO: 74102 - DNA, 15 bp, Homo sapiens
atgcacgatgctgca

SEQ ID NO: 74103 - DNA, 15 bp, Homo sapiens
catgcacgatgctgc

SEQ ID NO: 74104 - DNA, 15 bp, Homo sapiens
acatgcacgatgctg

SEQ ID NO: 74105 - DNA, 15 bp, Homo sapiens
cacatgcacgatgct

SEQ ID NO: 74106 - DNA, 15 bp, Homo sapiens
tcacatgcacgatgc

SEQ ID NO: 74107 - DNA, 15 bp, Homo sapiens
atcacatgcacgatg

SEQ ID NO: 74108 - DNA, 15 bp, Homo sapiens
gatcacatgcacgat

SEQ ID NO: 74109 - DNA, 15 bp, Homo sapiens
tgatcacatgcacga

SEQ ID NO: 74110 - DNA, 15 bp, Homo sapiens
ttgatcacatgcacg

SEQ ID NO: 74111 - DNA, 15 bp, Homo sapiens
tttgatcacatgcac

SEQ ID NO: 74112 - DNA, 15 bp, Homo sapiens
gtttgatcacatgca

SEQ ID NO: 74113 - DNA, 15 bp, Homo sapiens
ggtttgatcacatgc

SEQ ID NO: 74114 - DNA, 15 bp, Homo sapiens
aggtttgatcacatg

SEQ ID NO: 74115 - DNA, 15 bp, Homo sapiens
caggtttgatcacat

SEQ ID NO: 74116 - DNA, 15 bp, Homo sapiens
tcaggtttgatcaca

SEQ ID NO: 74117 - DNA, 15 bp, Homo sapiens
ttcaggtttgatcac

SEQ ID NO: 74118 - DNA, 15 bp, Homo sapiens
tttcaggtttgatca

SEQ ID NO: 74119 - DNA, 15 bp, Homo sapiens
ctttcaggtttgatc

SEQ ID NO: 74120 - DNA, 15 bp, Homo sapiens
tctttcaggtttgat

SEQ ID NO: 74121 - DNA, 15 bp, Homo sapiens
ctctttcaggtttga

SEQ ID NO: 74122 - DNA, 15 bp, Homo sapiens
gctctttcaggtttg

SEQ ID NO: 74123 - DNA, 15 bp, Homo sapiens
ggctctttcaggttt

SEQ ID NO: 74124 - DNA, 15 bp, Homo sapiens
aggctctttcaggtt

SEQ ID NO: 74125 - DNA, 15 bp, Homo sapiens
taggctctttcaggt

SEQ ID NO: 74126 - DNA, 15 bp, Homo sapiens
ataggctctttcagg

SEQ ID NO: 74127 - DNA, 15 bp, Homo sapiens
gataggctctttcag

SEQ ID NO: 74128 - DNA, 15 bp, Homo sapiens
ggataggctctttca

SEQ ID NO: 74129 - DNA, 15 bp, Homo sapiens
tggataggctctttc

SEQ ID NO: 74130 - DNA, 15 bp, Homo sapiens
atggataggctcttt

SEQ ID NO: 74131 - DNA, 15 bp, Homo sapiens
tatggataggctctt

SEQ ID NO: 74132 - DNA, 15 bp, Homo sapiens
atatggataggctct

SEQ ID NO: 74133 - DNA, 15 bp, Homo sapiens
gatatggataggctc

SEQ ID NO: 74134 - DNA, 15 bp, Homo sapiens
tgatatggataggct

SEQ ID NO: 74135 - DNA, 15 bp, Homo sapiens
gtgatatggataggc

SEQ ID NO: 74136 - DNA, 15 bp, Homo sapiens
agtgatatggatagg

SEQ ID NO: 74137 - DNA, 15 bp, Homo sapiens
aagtgatatggatag

SEQ ID NO: 74138 - DNA, 15 bp, Homo sapiens
gaagtgatatggata

SEQ ID NO: 74139 - DNA, 15 bp, Homo sapiens
ggaagtgatatggat

SEQ ID NO: 74140 - DNA, 15 bp, Homo sapiens
aggaagtgatatgga

SEQ ID NO: 74141 - DNA, 15 bp, Homo sapiens
aaggaagtgatatgg

SEQ ID NO: 74142 - DNA, 15 bp, Homo sapiens
aaaggaagtgatatg

SEQ ID NO: 74143 - DNA, 15 bp, Homo sapiens
taaaggaagtgatat

SEQ ID NO: 74144 - DNA, 15 bp, Homo sapiens
ttaaaggaagtgata

SEQ ID NO: 74145 - DNA, 15 bp, Homo sapiens
tttaaaggaagtgat

SEQ ID NO: 74146 - DNA, 15 bp, Homo sapiens
ctttaaaggaagtga

SEQ ID NO: 74147 - DNA, 15 bp, Homo sapiens
tctttaaaggaagtg

SEQ ID NO: 74148 - DNA, 15 bp, Homo sapiens
gtctttaaaggaagt

SEQ ID NO: 74149 - DNA, 15 bp, Homo sapiens
tgtctttaaaggaag

SEQ ID NO: 74150 - DNA, 15 bp, Homo sapiens
atgtctttaaaggaa

SEQ ID NO: 74151 - DNA, 15 bp, Homo sapiens
tatgtctttaaagga

SEQ ID NO: 74152 - DNA, 15 bp, Homo sapiens
ttatgtctttaaagg

SEQ ID NO: 74153 - DNA, 15 bp, Homo sapiens
tttatgtctttaaag

SEQ ID NO: 74154 - DNA, 15 bp, Homo sapiens
ctttatgtctttaaa

SEQ ID NO: 74155 - DNA, 15 bp, Homo sapiens
tctttatgtctttaa

SEQ ID NO: 74156 - DNA, 15 bp, Homo sapiens
atctttatgtcttta

SEQ ID NO: 74157 - DNA, 15 bp, Homo sapiens
catctttatgtcttt

SEQ ID NO: 74158 - DNA, 15 bp, Homo sapiens
ccatctttatgtctt

SEQ ID NO: 74159 - DNA, 15 bp, Homo sapiens
accatctttatgtct

SEQ ID NO: 74160 - DNA, 15 bp, Homo sapiens
caccatctttatgtc

SEQ ID NO: 74161 - DNA, 15 bp, Homo sapiens
gcaccatctttatgt

SEQ ID NO: 74162 - DNA, 15 bp, Homo sapiens
ggcaccatctttatg

SEQ ID NO: 74163 - DNA, 15 bp, Homo sapiens
aggcaccatctttat

SEQ ID NO: 74164 - DNA, 15 bp, Homo sapiens
gaggcaccatcttta

SEQ ID NO: 74165 - DNA, 15 bp, Homo sapiens
tgaggcaccatcttt

SEQ ID NO: 74166 - DNA, 15 bp, Homo sapiens
ttgaggcaccatctt

SEQ ID NO: 74167 - DNA, 15 bp, Homo sapiens
attgaggcaccatct

SEQ ID NO: 74168 - DNA, 15 bp, Homo sapiens
gattgaggcaccatc

SEQ ID NO: 74169 - DNA, 15 bp, Homo sapiens
ggattgaggcaccat

SEQ ID NO: 74170 - DNA, 15 bp, Homo sapiens
aggattgaggcacca

SEQ ID NO: 74171 - DNA, 15 bp, Homo sapiens
gaggattgaggcacc

SEQ ID NO: 74172 - DNA, 15 bp, Homo sapiens
agaggattgaggcac

SEQ ID NO: 74173 - DNA, 15 bp, Homo sapiens
cagaggattgaggca

SEQ ID NO: 74174 - DNA, 15 bp, Homo sapiens
tcagaggattgaggc

SEQ ID NO: 74175 - DNA, 15 bp, Homo sapiens
ttcagaggattgagg

SEQ ID NO: 74176 - DNA, 15 bp, Homo sapiens
gttcagaggattgag

SEQ ID NO: 74177 - DNA, 15 bp, Homo sapiens
ggttcagaggattga

SEQ ID NO: 74178 - DNA, 15 bp, Homo sapiens
gggttcagaggattg

SEQ ID NO: 74179 - DNA, 15 bp, Homo sapiens
tgggttcagaggatt

SEQ ID NO: 74180 - DNA, 15 bp, Homo sapiens
atgggttcagaggat

SEQ ID NO: 74181 - DNA, 15 bp, Homo sapiens
catgggttcagagga

SEQ ID NO: 74182 - DNA, 15 bp, Homo sapiens
acatgggttcagagg

SEQ ID NO: 74183 - DNA, 15 bp, Homo sapiens
tacatgggttcagag

SEQ ID NO: 74184 - DNA, 15 bp, Homo sapiens
atacatgggttcaga

SEQ ID NO: 74185 - DNA, 15 bp, Homo sapiens
aatacatgggttcag

SEQ ID NO: 74186 - DNA, 15 bp, Homo sapiens
aaatacatgggttca

SEQ ID NO: 74187 - DNA, 15 bp, Homo sapiens
taaatacatgggttc

SEQ ID NO: 74188 - DNA, 15 bp, Homo sapiens
ataaatacatgggtt

SEQ ID NO: 74189 - DNA, 15 bp, Homo sapiens
aataaatacatgggt

SEQ ID NO: 74190 - DNA, 15 bp, Homo sapiens
taataaatacatggg

SEQ ID NO: 74191 - DNA, 15 bp, Homo sapiens
ataataaatacatgg

SEQ ID NO: 74192 - DNA, 15 bp, Homo sapiens
gataataaatacatg

SEQ ID NO: 74193 - DNA, 15 bp, Homo sapiens
agataataaatacat

SEQ ID NO: 74194 - DNA, 15 bp, Homo sapiens
aagataataaataca

SEQ ID NO: 74195 - DNA, 15 bp, Homo sapiens
aaagataataaatac

SEQ ID NO: 74196 - DNA, 15 bp, Homo sapiens
aaaagataataaata

SEQ ID NO: 74197 - DNA, 15 bp, Homo sapiens
gaaaagataataaat

SEQ ID NO: 74198 - DNA, 15 bp, Homo sapiens
agaaaagataataaa

SEQ ID NO: 74199 - DNA, 15 bp, Homo sapiens
cagaaaagataataa

SEQ ID NO: 74200 - DNA, 15 bp, Homo sapiens
gcagaaaagataata

SEQ ID NO: 74201 - DNA, 15 bp, Homo sapiens
cgcagaaaagataat

SEQ ID NO: 74202 - DNA, 15 bp, Homo sapiens
ccgcagaaaagataa

SEQ ID NO: 74203 - DNA, 15 bp, Homo sapiens
cccgcagaaaagata

SEQ ID NO: 74204 - DNA, 15 bp, Homo sapiens
ccccgcagaaaagat

SEQ ID NO: 74205 - DNA, 15 bp, Homo sapiens
accccgcagaaaaga

SEQ ID NO: 74206 - DNA, 15 bp, Homo sapiens
gaccccgcagaaaag

SEQ ID NO: 74207 - DNA, 15 bp, Homo sapiens
ggaccccgcagaaaa

SEQ ID NO: 74208 - DNA, 15 bp, Homo sapiens
aggaccccgcagaaa

SEQ ID NO: 74209 - DNA, 15 bp, Homo sapiens
taggaccccgcagaa

SEQ ID NO: 74210 - DNA, 15 bp, Homo sapiens
ctaggaccccgcaga

SEQ ID NO: 74211 - DNA, 15 bp, Homo sapiens
actaggaccccgcag

SEQ ID NO: 74212 - DNA, 15 bp, Homo sapiens
aactaggaccccgca

SEQ ID NO: 74213 - DNA, 15 bp, Homo sapiens
aaactaggaccccgc

SEQ ID NO: 74214 - DNA, 15 bp, Homo sapiens
gaaactaggaccccg

SEQ ID NO: 74215 - DNA, 15 bp, Homo sapiens
agaaactaggacccc

SEQ ID NO: 74216 - DNA, 15 bp, Homo sapiens
aagaaactaggaccc

SEQ ID NO: 74217 - DNA, 15 bp, Homo sapiens
caagaaactaggacc

SEQ ID NO: 74218 - DNA, 15 bp, Homo sapiens
acaagaaactaggac

SEQ ID NO: 74219 - DNA, 15 bp, Homo sapiens
tacaagaaactagga

SEQ ID NO: 74220 - DNA, 15 bp, Homo sapiens
atacaagaaactagg

SEQ ID NO: 74221 - DNA, 15 bp, Homo sapiens
tatacaagaaactag

SEQ ID NO: 74222 - DNA, 15 bp, Homo sapiens
gtatacaagaaacta

SEQ ID NO: 74223 - DNA, 15 bp, Homo sapiens
tgtatacaagaaact

SEQ ID NO: 74224 - DNA, 15 bp, Homo sapiens
atgtatacaagaaac

SEQ ID NO: 74225 - DNA, 15 bp, Homo sapiens
aatgtatacaagaaa

SEQ ID NO: 74226 - DNA, 15 bp, Homo sapiens
taatgtatacaagaa

SEQ ID NO: 74227 - DNA, 15 bp, Homo sapiens
ctaatgtatacaaga

SEQ ID NO: 74228 - DNA, 15 bp, Homo sapiens
cctaatgtatacaag

SEQ ID NO: 74229 - DNA, 15 bp, Homo sapiens
acctaatgtatacaa

SEQ ID NO: 74230 - DNA, 15 bp, Homo sapiens
cacctaatgtataca

SEQ ID NO: 74231 - DNA, 15 bp, Homo sapiens
acacctaatgtatac

SEQ ID NO: 74232 - DNA, 15 bp, Homo sapiens
aacacctaatgtata

SEQ ID NO: 74233 - DNA, 15 bp, Homo sapiens
aaacacctaatgtat

SEQ ID NO: 74234 - DNA, 15 bp, Homo sapiens
taaacacctaatgta

SEQ ID NO: 74235 - DNA, 15 bp, Homo sapiens
ttaaacacctaatgt

SEQ ID NO: 74236 - DNA, 15 bp, Homo sapiens
attaaacacctaatg

SEQ ID NO: 74237 - DNA, 15 bp, Homo sapiens
aattaaacacctaat

SEQ ID NO: 74238 - DNA, 15 bp, Homo sapiens
caattaaacacctaa

SEQ ID NO: 74239 - DNA, 15 bp, Homo sapiens
acaattaaacaccta

SEQ ID NO: 74240 - DNA, 15 bp, Homo sapiens
aacaattaaacacct

SEQ ID NO: 74241 - DNA, 15 bp, Homo sapiens
caacaattaaacacc

SEQ ID NO: 74242 - DNA, 15 bp, Homo sapiens
tcaacaattaaacac

SEQ ID NO: 74243 - DNA, 15 bp, Homo sapiens
ttcaacaattaaaca

SEQ ID NO: 74244 - DNA, 15 bp, Homo sapiens
gttcaacaattaaac

SEQ ID NO: 74245 - DNA, 15 bp, Homo sapiens
tgttcaacaattaaa

SEQ ID NO: 74246 - DNA, 15 bp, Homo sapiens
ttgttcaacaattaa

SEQ ID NO: 74247 - DNA, 15 bp, Homo sapiens
tttgttcaacaatta

SEQ ID NO: 74248 - DNA, 15 bp, Homo sapiens
atttgttcaacaatt

SEQ ID NO: 74249 - DNA, 15 bp, Homo sapiens
tatttgttcaacaat

SEQ ID NO: 74250 - DNA, 15 bp, Homo sapiens
atatttgttcaacaa

SEQ ID NO: 74251 - DNA, 15 bp, Homo sapiens
aatatttgttcaaca

SEQ ID NO: 74252 - DNA, 15 bp, Homo sapiens
gaatatttgttcaac

SEQ ID NO: 74253 - DNA, 15 bp, Homo sapiens
tgaatatttgttcaa

SEQ ID NO: 74254 - DNA, 15 bp, Homo sapiens
atgaatatttgttca

SEQ ID NO: 74255 - DNA, 15 bp, Homo sapiens
aatgaatatttgttc

SEQ ID NO: 74256 - DNA, 15 bp, Homo sapiens
gaatgaatatttgtt

SEQ ID NO: 74257 - DNA, 15 bp, Homo sapiens
cgaatgaatatttgt

SEQ ID NO: 74258 - DNA, 15 bp, Homo sapiens
tcgaatgaatatttg

SEQ ID NO: 74259 - DNA, 15 bp, Homo sapiens
ctcgaatgaatattt

SEQ ID NO: 74260 - DNA, 15 bp, Homo sapiens
actcgaatgaatatt

SEQ ID NO: 74261 - DNA, 15 bp, Homo sapiens
tactcgaatgaatat

SEQ ID NO: 74262 - DNA, 15 bp, Homo sapiens
ctactcgaatgaata

SEQ ID NO: 74263 - DNA, 15 bp, Homo sapiens
tctactcgaatgaat

SEQ ID NO: 74264 - DNA, 15 bp, Homo sapiens
atctactcgaatgaa

SEQ ID NO: 74265 - DNA, 15 bp, Homo sapiens
catctactcgaatga

SEQ ID NO: 74266 - DNA, 15 bp, Homo sapiens
tcatctactcgaatg

SEQ ID NO: 74267 - DNA, 15 bp, Homo sapiens
ctcatctactcgaat

SEQ ID NO: 74268 - DNA, 15 bp, Homo sapiens
actcatctactcgaa

SEQ ID NO: 74269 - DNA, 15 bp, Homo sapiens
cactcatctactcga

SEQ ID NO: 74270 - DNA, 15 bp, Homo sapiens
tcactcatctactcg

SEQ ID NO: 74271 - DNA, 15 bp, Homo sapiens
atcactcatctactc

SEQ ID NO: 74272 - DNA, 15 bp, Homo sapiens
aatcactcatctact

SEQ ID NO: 74273 - DNA, 15 bp, Homo sapiens
aaatcactcatctac

SEQ ID NO: 74274 - DNA, 15 bp, Homo sapiens
aaaatcactcatcta

SEQ ID NO: 74275 - DNA, 15 bp, Homo sapiens
caaaatcactcatct

SEQ ID NO: 74276 - DNA, 15 bp, Homo sapiens
tcaaaatcactcatc

SEQ ID NO: 74277 - DNA, 15 bp, Homo sapiens
ttcaaaatcactcat

SEQ ID NO: 74278 - DNA, 15 bp, Homo sapiens
tttcaaaatcactca

SEQ ID NO: 74279 - DNA, 15 bp, Homo sapiens
ctttcaaaatcactc

SEQ ID NO: 74280 - DNA, 15 bp, Homo sapiens
tctttcaaaatcact

SEQ ID NO: 74281 - DNA, 15 bp, Homo sapiens
ctctttcaaaatcac

SEQ ID NO: 74282 - DNA, 15 bp, Homo sapiens
actctttcaaaatca

SEQ ID NO: 74283 - DNA, 15 bp, Homo sapiens
gactctttcaaaatc

SEQ ID NO: 74284 - DNA, 15 bp, Homo sapiens
tgactctttcaaaat

SEQ ID NO: 74285 - DNA, 15 bp, Homo sapiens
ctgactctttcaaaa

SEQ ID NO: 74286 - DNA, 15 bp, Homo sapiens
tctgactctttcaaa

SEQ ID NO: 74287 - DNA, 15 bp, Homo sapiens
ttctgactctttcaa

SEQ ID NO: 74288 - DNA, 15 bp, Homo sapiens
tttctgactctttca

SEQ ID NO: 74289 - DNA, 15 bp, Homo sapiens
ctttctgactctttc

SEQ ID NO: 74290 - DNA, 15 bp, Homo sapiens
cctttctgactcttt

SEQ ID NO: 74291 - DNA, 15 bp, Homo sapiens
ccctttctgactctt

SEQ ID NO: 74292 - DNA, 15 bp, Homo sapiens
cccctttctgactct

SEQ ID NO: 74293 - DNA, 15 bp, Homo sapiens
tcccctttctgactc

SEQ ID NO: 74294 - DNA, 15 bp, Homo sapiens
ttcccctttctgact

SEQ ID NO: 74295 - DNA, 15 bp, Homo sapiens
attcccctttctgac

SEQ ID NO: 74296 - DNA, 15 bp, Homo sapiens
aattcccctttctga

SEQ ID NO: 74297 - DNA, 15 bp, Homo sapiens
aaattcccctttctg

SEQ ID NO: 74298 - DNA, 15 bp, Homo sapiens
caaattcccctttct

SEQ ID NO: 74299 - DNA, 15 bp, Homo sapiens
gcaaattcccctttc

SEQ ID NO: 74300 - DNA, 15 bp, Homo sapiens
agcaaattccccttt

SEQ ID NO: 74301 - DNA, 15 bp, Homo sapiens
cagcaaattcccctt

SEQ ID NO: 74302 - DNA, 15 bp, Homo sapiens
acagcaaattcccct

SEQ ID NO: 74303 - DNA, 15 bp, Homo sapiens
aacagcaaattcccc

SEQ ID NO: 74304 - DNA, 15 bp, Homo sapiens
taacagcaaattccc

SEQ ID NO: 74305 - DNA, 15 bp, Homo sapiens
ctaacagcaaattcc

SEQ ID NO: 74306 - DNA, 15 bp, Homo sapiens
tctaacagcaaattc

SEQ ID NO: 74307 - DNA, 15 bp, Homo sapiens
ctctaacagcaaatt

SEQ ID NO: 74308 - DNA, 15 bp, Homo sapiens
actctaacagcaaat

SEQ ID NO: 74309 - DNA, 15 bp, Homo sapiens
aactctaacagcaaa

SEQ ID NO: 74310 - DNA, 15 bp, Homo sapiens
taactctaacagcaa

SEQ ID NO: 74311 - DNA, 15 bp, Homo sapiens
ttaactctaacagca

SEQ ID NO: 74312 - DNA, 15 bp, Homo sapiens
attaactctaacagc

SEQ ID NO: 74313 - DNA, 15 bp, Homo sapiens
aattaactctaacag

SEQ ID NO: 74314 - DNA, 15 bp, Homo sapiens
caattaactctaaca

SEQ ID NO: 74315 - DNA, 15 bp, Homo sapiens
acaattaactctaac

SEQ ID NO: 74316 - DNA, 15 bp, Homo sapiens
tacaattaactctaa

SEQ ID NO: 74317 - DNA, 15 bp, Homo sapiens
gtacaattaactcta

SEQ ID NO: 74318 - DNA, 15 bp, Homo sapiens
ggtacaattaactct

SEQ ID NO: 74319 - DNA, 15 bp, Homo sapiens
gggtacaattaactc

SEQ ID NO: 74320 - DNA, 15 bp, Homo sapiens
agggtacaattaact

SEQ ID NO: 74321 - DNA, 15 bp, Homo sapiens
tagggtacaattaac

SEQ ID NO: 74322 - DNA, 15 bp, Homo sapiens
ttagggtacaattaa

SEQ ID NO: 74323 - DNA, 15 bp, Homo sapiens
cttagggtacaatta

SEQ ID NO: 74324 - DNA, 15 bp, Homo sapiens
tcttagggtacaatt

SEQ ID NO: 74325 - DNA, 15 bp, Homo sapiens
gtcttagggtacaat

SEQ ID NO: 74326 - DNA, 15 bp, Homo sapiens
agtcttagggtacaa

SEQ ID NO: 74327 - DNA, 15 bp, Homo sapiens
aagtcttagggtaca

SEQ ID NO: 74328 - DNA, 15 bp, Homo sapiens
taagtcttagggtac

SEQ ID NO: 74329 - DNA, 15 bp, Homo sapiens
ctaagtcttagggta

SEQ ID NO: 74330 - DNA, 15 bp, Homo sapiens
tctaagtcttagggt

SEQ ID NO: 74331 - DNA, 15 bp, Homo sapiens
atctaagtcttaggg

SEQ ID NO: 74332 - DNA, 15 bp, Homo sapiens
tatctaagtcttagg

SEQ ID NO: 74333 - DNA, 15 bp, Homo sapiens
atatctaagtcttag

SEQ ID NO: 74334 - DNA, 15 bp, Homo sapiens
aatatctaagtctta

SEQ ID NO: 74335 - DNA, 15 bp, Homo sapiens
aaatatctaagtctt

SEQ ID NO: 74336 - DNA, 15 bp, Homo sapiens
caaatatctaagtct

SEQ ID NO: 74337 - DNA, 15 bp, Homo sapiens
tcaaatatctaagtc

SEQ ID NO: 74338 - DNA, 15 bp, Homo sapiens
ctcaaatatctaagt

SEQ ID NO: 74339 - DNA, 15 bp, Homo sapiens
cctcaaatatctaag

SEQ ID NO: 74340 - DNA, 15 bp, Homo sapiens
gcctcaaatatctaa

SEQ ID NO: 74341 - DNA, 15 bp, Homo sapiens
agcctcaaatatcta

SEQ ID NO: 74342 - DNA, 15 bp, Homo sapiens
cagcctcaaatatct

SEQ ID NO: 74343 - DNA, 15 bp, Homo sapiens
ccagcctcaaatatc

SEQ ID NO: 74344 - DNA, 15 bp, Homo sapiens
cccagcctcaaatat

SEQ ID NO: 74345 - DNA, 15 bp, Homo sapiens
gcccagcctcaaata

SEQ ID NO: 74346 - DNA, 15 bp, Homo sapiens
tgcccagcctcaaat

SEQ ID NO: 74347 - DNA, 15 bp, Homo sapiens
atgcccagcctcaaa

SEQ ID NO: 74348 - DNA, 15 bp, Homo sapiens
catgcccagcctcaa

SEQ ID NO: 74349 - DNA, 15 bp, Homo sapiens
ccatgcccagcctca

SEQ ID NO: 74350 - DNA, 15 bp, Homo sapiens
accatgcccagcctc

SEQ ID NO: 74351 - DNA, 15 bp, Homo sapiens
tggcatgagccacca

SEQ ID NO: 74352 - DNA, 15 bp, Homo sapiens
ctggcatgagccacc

SEQ ID NO: 74353 - DNA, 15 bp, Homo sapiens
actggcatgagccac

SEQ ID NO: 74354 - DNA, 15 bp, Homo sapiens
tactggcatgagcca

SEQ ID NO: 74355 - DNA, 15 bp, Homo sapiens
ttactggcatgagcc

SEQ ID NO: 74356 - DNA, 15 bp, Homo sapiens
attactggcatgagc

SEQ ID NO: 74357 - DNA, 15 bp, Homo sapiens
gattactggcatgag

SEQ ID NO: 74358 - DNA, 15 bp, Homo sapiens
ggattactggcatga

SEQ ID NO: 74359 - DNA, 15 bp, Homo sapiens
gggattactggcatg

SEQ ID NO: 74360 - DNA, 15 bp, Homo sapiens
tgggattactggcat

SEQ ID NO: 74361 - DNA, 15 bp, Homo sapiens
ctgggattactggca

SEQ ID NO: 74362 - DNA, 15 bp, Homo sapiens
gctgggattactggc

SEQ ID NO: 74363 - DNA, 15 bp, Homo sapiens
cgctgggattactgg

SEQ ID NO: 74364 - DNA, 15 bp, Homo sapiens
gcgctgggattactg

SEQ ID NO: 74365 - DNA, 15 bp, Homo sapiens
agcgctgggattact

SEQ ID NO: 74366 - DNA, 15 bp, Homo sapiens
aagcgctgggattac

SEQ ID NO: 74367 - DNA, 15 bp, Homo sapiens
aaagcgctgggatta

SEQ ID NO: 74368 - DNA, 15 bp, Homo sapiens
caaagcgctgggatt

SEQ ID NO: 74369 - DNA, 15 bp, Homo sapiens
tcaaagcgctgggat

SEQ ID NO: 74370 - DNA, 15 bp, Homo sapiens
ctcaaagcgctggga

SEQ ID NO: 74371 - DNA, 15 bp, Homo sapiens
tctcaaagcgctggg

SEQ ID NO: 74372 - DNA, 15 bp, Homo sapiens
ctctcaaagcgctgg

SEQ ID NO: 74373 - DNA, 15 bp, Homo sapiens
cctctcaaagcgctg

SEQ ID NO: 74374 - DNA, 15 bp, Homo sapiens
gcctctcaaagcgct

SEQ ID NO: 74375 - DNA, 15 bp, Homo sapiens
agcctctcaaagcgc

SEQ ID NO: 74376 - DNA, 15 bp, Homo sapiens
cagcctctcaaagcg

SEQ ID NO: 74377 - DNA, 15 bp, Homo sapiens
tcagcctctcaaagc

SEQ ID NO: 74378 - DNA, 15 bp, Homo sapiens
cccacctcagcctct

SEQ ID NO: 74379 - DNA, 15 bp, Homo sapiens
acccacctcagcctc

SEQ ID NO: 74380 - DNA, 15 bp, Homo sapiens
tacccacctcagcct

SEQ ID NO: 74381 - DNA, 15 bp, Homo sapiens
ctacccacctcagcc

SEQ ID NO: 74382 - DNA, 15 bp, Homo sapiens
tctacccacctcagc

SEQ ID NO: 74383 - DNA, 15 bp, Homo sapiens
atctacccacctcag

SEQ ID NO: 74384 - DNA, 15 bp, Homo sapiens
gatctacccacctca

SEQ ID NO: 74385 - DNA, 15 bp, Homo sapiens
tgatctacccacctc

SEQ ID NO: 74386 - DNA, 15 bp, Homo sapiens
gtgatctacccacct

SEQ ID NO: 74387 - DNA, 15 bp, Homo sapiens
ggtgatctacccacc

SEQ ID NO: 74388 - DNA, 15 bp, Homo sapiens
aggtgatctacccac

SEQ ID NO: 74389 - DNA, 15 bp, Homo sapiens
caggtgatctaccca

SEQ ID NO: 74390 - DNA, 15 bp, Homo sapiens
tcaggtgatctaccc

SEQ ID NO: 74391 - DNA, 15 bp, Homo sapiens
ctcaggtgatctacc

SEQ ID NO: 74392 - DNA, 15 bp, Homo sapiens
cctcaggtgatctac

SEQ ID NO: 74393 - DNA, 15 bp, Homo sapiens
acctcaggtgatcta

SEQ ID NO: 74394 - DNA, 15 bp, Homo sapiens
gacctcaggtgatct

SEQ ID NO: 74395 - DNA, 15 bp, Homo sapiens
actggtctcaaactc

SEQ ID NO: 74396 - DNA, 15 bp, Homo sapiens
gactggtctcaaact

SEQ ID NO: 74397 - DNA, 15 bp, Homo sapiens
agactggtctcaaac

SEQ ID NO: 74398 - DNA, 15 bp, Homo sapiens
cagactggtctcaaa

SEQ ID NO: 74399 - DNA, 15 bp, Homo sapiens
tcagactggtctcaa

SEQ ID NO: 74400 - DNA, 15 bp, Homo sapiens
gtcagactggtctca

SEQ ID NO: 74401 - DNA, 15 bp, Homo sapiens
ggtcagactggtctc

SEQ ID NO: 74402 - DNA, 15 bp, Homo sapiens
tggtcagactggtct

SEQ ID NO: 74403 - DNA, 15 bp, Homo sapiens
ttggtcagactggtc

SEQ ID NO: 74404 - DNA, 15 bp, Homo sapiens
gttggtcagactggt

SEQ ID NO: 74405 - DNA, 15 bp, Homo sapiens
tgttggtcagactgg

SEQ ID NO: 74406 - DNA, 15 bp, Homo sapiens
ttgttggtcagactg

SEQ ID NO: 74407 - DNA, 15 bp, Homo sapiens
cttgttggtcagact

SEQ ID NO: 74408 - DNA, 15 bp, Homo sapiens
ccttgttggtcagac

SEQ ID NO: 74409 - DNA, 15 bp, Homo sapiens
accttgttggtcaga

SEQ ID NO: 74410 - DNA, 15 bp, Homo sapiens
caccttgttggtcag

SEQ ID NO: 74411 - DNA, 15 bp, Homo sapiens
tcaccttgttggtca

SEQ ID NO: 74412 - DNA, 15 bp, Homo sapiens
ttcaccttgttggtc

SEQ ID NO: 74413 - DNA, 15 bp, Homo sapiens
tttcaccttgttggt

SEQ ID NO: 74414 - DNA, 15 bp, Homo sapiens
gtttcaccttgttgg

SEQ ID NO: 74415 - DNA, 15 bp, Homo sapiens
ggtttcaccttgttg

SEQ ID NO: 74416 - DNA, 15 bp, Homo sapiens
gggtttcaccttgtt

SEQ ID NO: 74417 - DNA, 15 bp, Homo sapiens
ggggtttcaccttgt

SEQ ID NO: 74418 - DNA, 15 bp, Homo sapiens
cggggtttcaccttg

SEQ ID NO: 74419 - DNA, 15 bp, Homo sapiens
acggggtttcacctt

SEQ ID NO: 74420 - DNA, 15 bp, Homo sapiens
gacggggtttcacct

SEQ ID NO: 74421 - DNA, 15 bp, Homo sapiens
atttagtagagacgg

SEQ ID NO: 74422 - DNA, 15 bp, Homo sapiens
tatttagtagagacg

SEQ ID NO: 74423 - DNA, 15 bp, Homo sapiens
gtatttagtagagac

SEQ ID NO: 74424 - DNA, 15 bp, Homo sapiens
tgtatttagtagaga

SEQ ID NO: 74425 - DNA, 15 bp, Homo sapiens
ttgtatttagtagag

SEQ ID NO: 74426 - DNA, 15 bp, Homo sapiens
tttgtatttagtaga

SEQ ID NO: 74427 - DNA, 15 bp, Homo sapiens
ttttgtatttagtag

SEQ ID NO: 74428 - DNA, 15 bp, Homo sapiens
tttttgtatttagta

SEQ ID NO: 74429 - DNA, 15 bp, Homo sapiens
ttttttgtatttagt

SEQ ID NO: 74430 - DNA, 15 bp, Homo sapiens
attttttgtatttag

SEQ ID NO: 74431 - DNA, 15 bp, Homo sapiens
aattttttgtattta

SEQ ID NO: 74432 - DNA, 15 bp, Homo sapiens
tcggctaattttttg

SEQ ID NO: 74433 - DNA, 15 bp, Homo sapiens
ctcggctaatttttt

SEQ ID NO: 74434 - DNA, 15 bp, Homo sapiens
actcggctaattttt

SEQ ID NO: 74435 - DNA, 15 bp, Homo sapiens
cactcggctaatttt

SEQ ID NO: 74436 - DNA, 15 bp, Homo sapiens
acactcggctaattt

SEQ ID NO: 74437 - DNA, 15 bp, Homo sapiens
cacactcggctaatt

SEQ ID NO: 74438 - DNA, 15 bp, Homo sapiens
ccacactcggctaat

SEQ ID NO: 74439 - DNA, 15 bp, Homo sapiens
accacactcggctaa

SEQ ID NO: 74440 - DNA, 15 bp, Homo sapiens
caccacactcggcta

SEQ ID NO: 74441 - DNA, 15 bp, Homo sapiens
ccaccacactcggct

SEQ ID NO: 74442 - DNA, 15 bp, Homo sapiens
gccaccacactcggc

SEQ ID NO: 74443 - DNA, 15 bp, Homo sapiens
tgccaccacactcgg

SEQ ID NO: 74444 - DNA, 15 bp, Homo sapiens
gtgccaccacactcg

SEQ ID NO: 74445 - DNA, 15 bp, Homo sapiens
tgtgccaccacactc

SEQ ID NO: 74446 - DNA, 15 bp, Homo sapiens
atgtgccaccacact

SEQ ID NO: 74447 - DNA, 15 bp, Homo sapiens
catgtgccaccacac

SEQ ID NO: 74448 - DNA, 15 bp, Homo sapiens
gcatgtgccaccaca

SEQ ID NO: 74449 - DNA, 15 bp, Homo sapiens
gacaggcatgtgcca

SEQ ID NO: 74450 - DNA, 15 bp, Homo sapiens
tgacaggcatgtgcc

SEQ ID NO: 74451 - DNA, 15 bp, Homo sapiens
atgacaggcatgtgc

SEQ ID NO: 74452 - DNA, 15 bp, Homo sapiens
gatgacaggcatgtg

SEQ ID NO: 74453 - DNA, 15 bp, Homo sapiens
ggatgacaggcatgt

SEQ ID NO: 74454 - DNA, 15 bp, Homo sapiens
gggatgacaggcatg

SEQ ID NO: 74455 - DNA, 15 bp, Homo sapiens
tgggatgacaggcat

SEQ ID NO: 74456 - DNA, 15 bp, Homo sapiens
ctgggatgacaggca

SEQ ID NO: 74457 - DNA, 15 bp, Homo sapiens
gctgggatgacaggc

SEQ ID NO: 74458 - DNA, 15 bp, Homo sapiens
agctgggatgacagg

SEQ ID NO: 74459 - DNA, 15 bp, Homo sapiens
tagctgggatgacag

SEQ ID NO: 74460 - DNA, 15 bp, Homo sapiens
gtagctgggatgaca

SEQ ID NO: 74461 - DNA, 15 bp, Homo sapiens
agtagctgggatgac

SEQ ID NO: 74462 - DNA, 15 bp, Homo sapiens
aagtagctgggatga

SEQ ID NO: 74463 - DNA, 15 bp, Homo sapiens
caagtagctgggatg

SEQ ID NO: 74464 - DNA, 15 bp, Homo sapiens
ccaagtagctgggat

SEQ ID NO: 74465 - DNA, 15 bp, Homo sapiens
cagcctcccaagtag

SEQ ID NO: 74466 - DNA, 15 bp, Homo sapiens
tcagcctcccaagta

SEQ ID NO: 74467 - DNA, 15 bp, Homo sapiens
gactgcaacctctgc

SEQ ID NO: 74468 - DNA, 15 bp, Homo sapiens
tgactgcaacctctg

SEQ ID NO: 74469 - DNA, 15 bp, Homo sapiens
ctgactgcaacctct

SEQ ID NO: 74470 - DNA, 15 bp, Homo sapiens
gctgactgcaacctc

SEQ ID NO: 74471 - DNA, 15 bp, Homo sapiens
ggctgactgcaacct

SEQ ID NO: 74472 - DNA, 15 bp, Homo sapiens
tggctgactgcaacc

SEQ ID NO: 74473 - DNA, 15 bp, Homo sapiens
gtggctgactgcaac

SEQ ID NO: 74474 - DNA, 15 bp, Homo sapiens
cgtggctgactgcaa

SEQ ID NO: 74475 - DNA, 15 bp, Homo sapiens
ccgtggctgactgca

SEQ ID NO: 74476 - DNA, 15 bp, Homo sapiens
accgtggctgactgc

SEQ ID NO: 74477 - DNA, 15 bp, Homo sapiens
aaccgtggctgactg

SEQ ID NO: 74478 - DNA, 15 bp, Homo sapiens
caaccgtggctgact

SEQ ID NO: 74479 - DNA, 15 bp, Homo sapiens
gcaaccgtggctgac

SEQ ID NO: 74480 - DNA, 15 bp, Homo sapiens
cgcaaccgtggctga

SEQ ID NO: 74481 - DNA, 15 bp, Homo sapiens
gcgcaaccgtggctg

SEQ ID NO: 74482 - DNA, 15 bp, Homo sapiens
ggcgcaaccgtggct

SEQ ID NO: 74483 - DNA, 15 bp, Homo sapiens
tggcgcaaccgtggc

SEQ ID NO: 74484 - DNA, 15 bp, Homo sapiens
atggcgcaaccgtgg

SEQ ID NO: 74485 - DNA, 15 bp, Homo sapiens
aatggcgcaaccgtg

SEQ ID NO: 74486 - DNA, 15 bp, Homo sapiens
caatggcgcaaccgt

SEQ ID NO: 74487 - DNA, 15 bp, Homo sapiens
gcaatggcgcaaccg

SEQ ID NO: 74488 - DNA, 15 bp, Homo sapiens
tgcaatggcgcaacc

SEQ ID NO: 74489 - DNA, 15 bp, Homo sapiens
gtgcaatggcgcaac

SEQ ID NO: 74490 - DNA, 15 bp, Homo sapiens
tctggagtgcaatgg

SEQ ID NO: 74491 - DNA, 15 bp, Homo sapiens
gtctggagtgcaatg

SEQ ID NO: 74492 - DNA, 15 bp, Homo sapiens
agtctggagtgcaat

SEQ ID NO: 74493 - DNA, 15 bp, Homo sapiens
cagtctggagtgcaa

SEQ ID NO: 74494 - DNA, 15 bp, Homo sapiens
ccagtctggagtgca

SEQ ID NO: 74495 - DNA, 15 bp, Homo sapiens
cccagtctggagtgc

SEQ ID NO: 74496 - DNA, 15 bp, Homo sapiens
gcccagtctggagtg

SEQ ID NO: 74497 - DNA, 15 bp, Homo sapiens
tgcccagtctggagt

SEQ ID NO: 74498 - DNA, 15 bp, Homo sapiens
ttgcccagtctggag

SEQ ID NO: 74499 - DNA, 15 bp, Homo sapiens
gttgcccagtctgga

SEQ ID NO: 74500 - DNA, 15 bp, Homo sapiens
tgttgcccagtctgg

SEQ ID NO: 74501 - DNA, 15 bp, Homo sapiens
ttgttgcccagtctg

SEQ ID NO: 74502 - DNA, 15 bp, Homo sapiens
cttgttgcccagtct

SEQ ID NO: 74503 - DNA, 15 bp, Homo sapiens
tcttgttgcccagtc

SEQ ID NO: 74504 - DNA, 15 bp, Homo sapiens
ctcttgttgcccagt

SEQ ID NO: 74505 - DNA, 15 bp, Homo sapiens
actcttgttgcccag

SEQ ID NO: 74506 - DNA, 15 bp, Homo sapiens
cactcttgttgccca

SEQ ID NO: 74507 - DNA, 15 bp, Homo sapiens
tcactcttgttgccc

SEQ ID NO: 74508 - DNA, 15 bp, Homo sapiens
ttcactcttgttgcc

SEQ ID NO: 74509 - DNA, 15 bp, Homo sapiens
tttcactcttgttgc

SEQ ID NO: 74510 - DNA, 15 bp, Homo sapiens
ttttcactcttgttg

SEQ ID NO: 74511 - DNA, 15 bp, Homo sapiens
gttttcactcttgtt

SEQ ID NO: 74512 - DNA, 15 bp, Homo sapiens
agttttcactcttgt

SEQ ID NO: 74513 - DNA, 15 bp, Homo sapiens
gagttttcactcttg

SEQ ID NO: 74514 - DNA, 15 bp, Homo sapiens
ggagttttcactctt

SEQ ID NO: 74515 - DNA, 15 bp, Homo sapiens
tggagttttcactct

SEQ ID NO: 74516 - DNA, 15 bp, Homo sapiens
atggagttttcactc

SEQ ID NO: 74517 - DNA, 15 bp, Homo sapiens
gatggagttttcact

SEQ ID NO: 74518 - DNA, 15 bp, Homo sapiens
agatggagttttcac

SEQ ID NO: 74519 - DNA, 15 bp, Homo sapiens
gagatggagttttca

SEQ ID NO: 74520 - DNA, 15 bp, Homo sapiens
tgagatggagttttc

SEQ ID NO: 74521 - DNA, 15 bp, Homo sapiens
ttgagatggagtttt

SEQ ID NO: 74522 - DNA, 15 bp, Homo sapiens
cttttttgagatgga

SEQ ID NO: 74523 - DNA, 15 bp, Homo sapiens
tcttttttgagatgg

SEQ ID NO: 74524 - DNA, 15 bp, Homo sapiens
ttcttttttgagatg

SEQ ID NO: 74525 - DNA, 15 bp, Homo sapiens
tttcttttttgagat

SEQ ID NO: 74526 - DNA, 15 bp, Homo sapiens
ttttcttttttgaga

SEQ ID NO: 74527 - DNA, 15 bp, Homo sapiens
tttttcttttttgag

SEQ ID NO: 74528 - DNA, 15 bp, Homo sapiens
ttttttcttttttga

SEQ ID NO: 74529 - DNA, 15 bp, Homo sapiens
tttttttcttttttg

SEQ ID NO: 74530 - DNA, 15 bp, Homo sapiens
ttttttttctttttt

SEQ ID NO: 74531 - DNA, 15 bp, Homo sapiens
tttttttttcttttt

SEQ ID NO: 74532 - DNA, 15 bp, Homo sapiens
ctttttttttctttt

SEQ ID NO: 74533 - DNA, 15 bp, Homo sapiens
tctttttttttcttt

SEQ ID NO: 74534 - DNA, 15 bp, Homo sapiens
ttctttttttttctt

SEQ ID NO: 74535 - DNA, 15 bp, Homo sapiens
attctttttttttct

SEQ ID NO: 74536 - DNA, 15 bp, Homo sapiens
aattctttttttttc

SEQ ID NO: 74537 - DNA, 15 bp, Homo sapiens
taattcttttttttt

SEQ ID NO: 74538 - DNA, 15 bp, Homo sapiens
ctaattctttttttt

SEQ ID NO: 74539 - DNA, 15 bp, Homo sapiens
tctaattcttttttt

SEQ ID NO: 74540 - DNA, 15 bp, Homo sapiens
atctaattctttttt

SEQ ID NO: 74541 - DNA, 15 bp, Homo sapiens
tatctaattcttttt

SEQ ID NO: 74542 - DNA, 15 bp, Homo sapiens
atatctaattctttt

SEQ ID NO: 74543 - DNA, 15 bp, Homo sapiens
aatatctaattcttt

SEQ ID NO: 74544 - DNA, 15 bp, Homo sapiens
aaatatctaattctt

SEQ ID NO: 74545 - DNA, 15 bp, Homo sapiens
aaaatatctaattct

SEQ ID NO: 74546 - DNA, 15 bp, Homo sapiens
caaaatatctaattc

SEQ ID NO: 74547 - DNA, 15 bp, Homo sapiens
ccaaaatatctaatt

SEQ ID NO: 74548 - DNA, 15 bp, Homo sapiens
tccaaaatatctaat

SEQ ID NO: 74549 - DNA, 15 bp, Homo sapiens
atccaaaatatctaa

SEQ ID NO: 74550 - DNA, 15 bp, Homo sapiens
catccaaaatatcta

SEQ ID NO: 74551 - DNA, 15 bp, Homo sapiens
tcatccaaaatatct

SEQ ID NO: 74552 - DNA, 15 bp, Homo sapiens
ctcatccaaaatatc

SEQ ID NO: 74553 - DNA, 15 bp, Homo sapiens
actcatccaaaatat

SEQ ID NO: 74554 - DNA, 15 bp, Homo sapiens
cactcatccaaaata

SEQ ID NO: 74555 - DNA, 15 bp, Homo sapiens
acactcatccaaaat

SEQ ID NO: 74556 - DNA, 15 bp, Homo sapiens
cacactcatccaaaa

SEQ ID NO: 74557 - DNA, 15 bp, Homo sapiens
acacactcatccaaa

SEQ ID NO: 74558 - DNA, 15 bp, Homo sapiens
gacacactcatccaa

SEQ ID NO: 74559 - DNA, 15 bp, Homo sapiens
agacacactcatcca

SEQ ID NO: 74560 - DNA, 15 bp, Homo sapiens
aagacacactcatcc

SEQ ID NO: 74561 - DNA, 15 bp, Homo sapiens
aaagacacactcatc

SEQ ID NO: 74562 - DNA, 15 bp, Homo sapiens
caaagacacactcat

SEQ ID NO: 74563 - DNA, 15 bp, Homo sapiens
acaaagacacactca

SEQ ID NO: 74564 - DNA, 15 bp, Homo sapiens
cacaaagacacactc

SEQ ID NO: 74565 - DNA, 15 bp, Homo sapiens
acacaaagacacact

SEQ ID NO: 74566 - DNA, 15 bp, Homo sapiens
cacacaaagacacac

SEQ ID NO: 74567 - DNA, 15 bp, Homo sapiens
acacacaaagacaca

SEQ ID NO: 74568 - DNA, 15 bp, Homo sapiens
aacacacaaagacac

SEQ ID NO: 74569 - DNA, 15 bp, Homo sapiens
aaacacacaaagaca

SEQ ID NO: 74570 - DNA, 15 bp, Homo sapiens
taaacacacaaagac

SEQ ID NO: 74571 - DNA, 15 bp, Homo sapiens
ttaaacacacaaaga

SEQ ID NO: 74572 - DNA, 15 bp, Homo sapiens
gttaaacacacaaag

SEQ ID NO: 74573 - DNA, 15 bp, Homo sapiens
agttaaacacacaaa

SEQ ID NO: 74574 - DNA, 15 bp, Homo sapiens
cagttaaacacacaa

SEQ ID NO: 74575 - DNA, 15 bp, Homo sapiens
tcagttaaacacaca

SEQ ID NO: 74576 - DNA, 15 bp, Homo sapiens
ctcagttaaacacac

SEQ ID NO: 74577 - DNA, 15 bp, Homo sapiens
tctcagttaaacaca

SEQ ID NO: 74578 - DNA, 15 bp, Homo sapiens
atctcagttaaacac

SEQ ID NO: 74579 - DNA, 15 bp, Homo sapiens
catctcagttaaaca

SEQ ID NO: 74580 - DNA, 15 bp, Homo sapiens
ccatctcagttaaac

SEQ ID NO: 74581 - DNA, 15 bp, Homo sapiens
tccatctcagttaaa

SEQ ID NO: 74582 - DNA, 15 bp, Homo sapiens
ctccatctcagttaa

SEQ ID NO: 74583 - DNA, 15 bp, Homo sapiens
tctccatctcagtta

SEQ ID NO: 74584 - DNA, 15 bp, Homo sapiens
ctctccatctcagtt

SEQ ID NO: 74585 - DNA, 15 bp, Homo sapiens
cctctccatctcagt

SEQ ID NO: 74586 - DNA, 15 bp, Homo sapiens
tcctctccatctcag

SEQ ID NO: 74587 - DNA, 15 bp, Homo sapiens
ctcctctccatctca

SEQ ID NO: 74588 - DNA, 15 bp, Homo sapiens
tctcctctccatctc

SEQ ID NO: 74589 - DNA, 15 bp, Homo sapiens
ctctcctctccatct

SEQ ID NO: 74590 - DNA, 15 bp, Homo sapiens
gctctcctctccatc

SEQ ID NO: 74591 - DNA, 15 bp, Homo sapiens
agctctcctctccat

SEQ ID NO: 74592 - DNA, 15 bp, Homo sapiens
tagctctcctctcca

SEQ ID NO: 74593 - DNA, 15 bp, Homo sapiens
ttagctctcctctcc

SEQ ID NO: 74594 - DNA, 15 bp, Homo sapiens
cttagctctcctctc

SEQ ID NO: 74595 - DNA, 15 bp, Homo sapiens
tcttagctctcctct

SEQ ID NO: 74596 - DNA, 15 bp, Homo sapiens
gtcttagctctcctc

SEQ ID NO: 74597 - DNA, 15 bp, Homo sapiens
tgtcttagctctcct

SEQ ID NO: 74598 - DNA, 15 bp, Homo sapiens
atgtcttagctctcc

SEQ ID NO: 74599 - DNA, 15 bp, Homo sapiens
gatgtcttagctctc

SEQ ID NO: 74600 - DNA, 15 bp, Homo sapiens
tgatgtcttagctct

SEQ ID NO: 74601 - DNA, 15 bp, Homo sapiens
ttgatgtcttagctc

SEQ ID NO: 74602 - DNA, 15 bp, Homo sapiens
tttgatgtcttagct

SEQ ID NO: 74603 - DNA, 15 bp, Homo sapiens
gtttgatgtcttagc

SEQ ID NO: 74604 - DNA, 15 bp, Homo sapiens
tgtttgatgtcttag

SEQ ID NO: 74605 - DNA, 15 bp, Homo sapiens
ttgtttgatgtctta

SEQ ID NO: 74606 - DNA, 15 bp, Homo sapiens
tttgtttgatgtctt

SEQ ID NO: 74607 - DNA, 15 bp, Homo sapiens
atttgtttgatgtct

SEQ ID NO: 74608 - DNA, 15 bp, Homo sapiens
tatttgtttgatgtc

SEQ ID NO: 74609 - DNA, 15 bp, Homo sapiens
atatttgtttgatgt

SEQ ID NO: 74610 - DNA, 15 bp, Homo sapiens
aatatttgtttgatg

SEQ ID NO: 74611 - DNA, 15 bp, Homo sapiens
caatatttgtttgat

SEQ ID NO: 74612 - DNA, 15 bp, Homo sapiens
acaatatttgtttga

SEQ ID NO: 74613 - DNA, 15 bp, Homo sapiens
aacaatatttgtttg

SEQ ID NO: 74614 - DNA, 15 bp, Homo sapiens
taacaatatttgttt

SEQ ID NO: 74615 - DNA, 15 bp, Homo sapiens
ttaacaatatttgtt

SEQ ID NO: 74616 - DNA, 15 bp, Homo sapiens
cttaacaatatttgt

SEQ ID NO: 74617 - DNA, 15 bp, Homo sapiens
tcttaacaatatttg

SEQ ID NO: 74618 - DNA, 15 bp, Homo sapiens
atcttaacaatattt

SEQ ID NO: 74619 - DNA, 15 bp, Homo sapiens
catcttaacaatatt

SEQ ID NO: 74620 - DNA, 15 bp, Homo sapiens
acatcttaacaatat

SEQ ID NO: 74621 - DNA, 15 bp, Homo sapiens
tacatcttaacaata

SEQ ID NO: 74622 - DNA, 15 bp, Homo sapiens
ttacatcttaacaat

SEQ ID NO: 74623 - DNA, 15 bp, Homo sapiens
tttacatcttaacaa

SEQ ID NO: 74624 - DNA, 15 bp, Homo sapiens
ttttacatcttaaca

SEQ ID NO: 74625 - DNA, 15 bp, Homo sapiens
cttttacatcttaac

SEQ ID NO: 74626 - DNA, 15 bp, Homo sapiens
gcttttacatcttaa

SEQ ID NO: 74627 - DNA, 15 bp, Homo sapiens
tgcttttacatctta

SEQ ID NO: 74628 - DNA, 15 bp, Homo sapiens
gtgcttttacatctt

SEQ ID NO: 74629 - DNA, 15 bp, Homo sapiens
tgtgcttttacatct

SEQ ID NO: 74630 - DNA, 15 bp, Homo sapiens
atgtgcttttacatc

SEQ ID NO: 74631 - DNA, 15 bp, Homo sapiens
gatgtgcttttacat

SEQ ID NO: 74632 - DNA, 15 bp, Homo sapiens
tgatgtgcttttaca

SEQ ID NO: 74633 - DNA, 15 bp, Homo sapiens
ctgatgtgcttttac

SEQ ID NO: 74634 - DNA, 15 bp, Homo sapiens
actgatgtgctttta

SEQ ID NO: 74635 - DNA, 15 bp, Homo sapiens
aactgatgtgctttt

SEQ ID NO: 74636 - DNA, 15 bp, Homo sapiens
taactgatgtgcttt

SEQ ID NO: 74637 - DNA, 15 bp, Homo sapiens
ctaactgatgtgctt

SEQ ID NO: 74638 - DNA, 15 bp, Homo sapiens
cctaactgatgtgct

SEQ ID NO: 74639 - DNA, 15 bp, Homo sapiens
acctaactgatgtgc

SEQ ID NO: 74640 - DNA, 15 bp, Homo sapiens
tacctaactgatgtg

SEQ ID NO: 74641 - DNA, 15 bp, Homo sapiens
atacctaactgatgt

SEQ ID NO: 74642 - DNA, 15 bp, Homo sapiens
gatacctaactgatg

SEQ ID NO: 74643 - DNA, 15 bp, Homo sapiens
tgatacctaactgat

SEQ ID NO: 74644 - DNA, 15 bp, Homo sapiens
atgatacctaactga

SEQ ID NO: 74645 - DNA, 15 bp, Homo sapiens
aatgatacctaactg

SEQ ID NO: 74646 - DNA, 15 bp, Homo sapiens
taatgatacctaact

SEQ ID NO: 74647 - DNA, 15 bp, Homo sapiens
ctaatgatacctaac

SEQ ID NO: 74648 - DNA, 15 bp, Homo sapiens
actaatgatacctaa

SEQ ID NO: 74649 - DNA, 15 bp, Homo sapiens
aactaatgataccta

SEQ ID NO: 74650 - DNA, 15 bp, Homo sapiens
aaactaatgatacct

SEQ ID NO: 74651 - DNA, 15 bp, Homo sapiens
taaactaatgatacc

SEQ ID NO: 74652 - DNA, 15 bp, Homo sapiens
ctaaactaatgatac

SEQ ID NO: 74653 - DNA, 15 bp, Homo sapiens
cctaaactaatgata

SEQ ID NO: 74654 - DNA, 15 bp, Homo sapiens
tcctaaactaatgat

SEQ ID NO: 74655 - DNA, 15 bp, Homo sapiens
gtcctaaactaatga

SEQ ID NO: 74656 - DNA, 15 bp, Homo sapiens
tgtcctaaactaatg

SEQ ID NO: 74657 - DNA, 15 bp, Homo sapiens
ttgtcctaaactaat

SEQ ID NO: 74658 - DNA, 15 bp, Homo sapiens
cttgtcctaaactaa

SEQ ID NO: 74659 - DNA, 15 bp, Homo sapiens
ccttgtcctaaacta

SEQ ID NO: 74660 - DNA, 15 bp, Homo sapiens
tccttgtcctaaact

SEQ ID NO: 74661 - DNA, 15 bp, Homo sapiens
atccttgtcctaaac

SEQ ID NO: 74662 - DNA, 15 bp, Homo sapiens
aatccttgtcctaaa

SEQ ID NO: 74663 - DNA, 15 bp, Homo sapiens
aaatccttgtcctaa

SEQ ID NO: 74664 - DNA, 15 bp, Homo sapiens
gaaatccttgtccta

SEQ ID NO: 74665 - DNA, 15 bp, Homo sapiens
agaaatccttgtcct

SEQ ID NO: 74666 - DNA, 15 bp, Homo sapiens
tagaaatccttgtcc

SEQ ID NO: 74667 - DNA, 15 bp, Homo sapiens
ctagaaatccttgtc

SEQ ID NO: 74668 - DNA, 15 bp, Homo sapiens
tctagaaatccttgt

SEQ ID NO: 74669 - DNA, 15 bp, Homo sapiens
ttctagaaatccttg

SEQ ID NO: 74670 - DNA, 15 bp, Homo sapiens
tttctagaaatcctt

SEQ ID NO: 74671 - DNA, 15 bp, Homo sapiens
ttttctagaaatcct

SEQ ID NO: 74672 - DNA, 15 bp, Homo sapiens
attttctagaaatcc

SEQ ID NO: 74673 - DNA, 15 bp, Homo sapiens
aattttctagaaatc

SEQ ID NO: 74674 - DNA, 15 bp, Homo sapiens
aaattttctagaaat

SEQ ID NO: 74675 - DNA, 15 bp, Homo sapiens
aaaattttctagaaa

SEQ ID NO: 74676 - DNA, 15 bp, Homo sapiens
aaaaattttctagaa

SEQ ID NO: 74677 - DNA, 15 bp, Homo sapiens
taaaaattttctaga

SEQ ID NO: 74678 - DNA, 15 bp, Homo sapiens
ctaaaaattttctag

SEQ ID NO: 74679 - DNA, 15 bp, Homo sapiens
cctaaaaattttcta

SEQ ID NO: 74680 - DNA, 15 bp, Homo sapiens
tcctaaaaattttct

SEQ ID NO: 74681 - DNA, 15 bp, Homo sapiens
ttcctaaaaattttc

SEQ ID NO: 74682 - DNA, 15 bp, Homo sapiens
gttcctaaaaatttt

SEQ ID NO: 74683 - DNA, 15 bp, Homo sapiens
tgttcctaaaaattt

SEQ ID NO: 74684 - DNA, 15 bp, Homo sapiens
ctgttcctaaaaatt

SEQ ID NO: 74685 - DNA, 15 bp, Homo sapiens
tctgttcctaaaaat

SEQ ID NO: 74686 - DNA, 15 bp, Homo sapiens
ttctgttcctaaaaa

SEQ ID NO: 74687 - DNA, 15 bp, Homo sapiens
tttctgttcctaaaa

SEQ ID NO: 74688 - DNA, 15 bp, Homo sapiens
ttttctgttcctaaa

SEQ ID NO: 74689 - DNA, 15 bp, Homo sapiens
gttttctgttcctaa

SEQ ID NO: 74690 - DNA, 15 bp, Homo sapiens
agttttctgttccta

SEQ ID NO: 74691 - DNA, 15 bp, Homo sapiens
aagttttctgttcct

SEQ ID NO: 74692 - DNA, 15 bp, Homo sapiens
aaagttttctgttcc

SEQ ID NO: 74693 - DNA, 15 bp, Homo sapiens
gaaagttttctgttc

SEQ ID NO: 74694 - DNA, 15 bp, Homo sapiens
ggaaagttttctgtt

SEQ ID NO: 74695 - DNA, 15 bp, Homo sapiens
tggaaagttttctgt

SEQ ID NO: 74696 - DNA, 15 bp, Homo sapiens
ctggaaagttttctg

SEQ ID NO: 74697 - DNA, 15 bp, Homo sapiens
actggaaagttttct

SEQ ID NO: 74698 - DNA, 15 bp, Homo sapiens
aactggaaagttttc

SEQ ID NO: 74699 - DNA, 15 bp, Homo sapiens
gaactggaaagtttt

SEQ ID NO: 74700 - DNA, 15 bp, Homo sapiens
agaactggaaagttt

SEQ ID NO: 74701 - DNA, 15 bp, Homo sapiens
gagaactggaaagtt

SEQ ID NO: 74702 - DNA, 15 bp, Homo sapiens
agagaactggaaagt

SEQ ID NO: 74703 - DNA, 15 bp, Homo sapiens
gagagaactggaaag

SEQ ID NO: 74704 - DNA, 15 bp, Homo sapiens
tgagagaactggaaa

SEQ ID NO: 74705 - DNA, 15 bp, Homo sapiens
gtgagagaactggaa

SEQ ID NO: 74706 - DNA, 15 bp, Homo sapiens
ggtgagagaactgga

SEQ ID NO: 74707 - DNA, 15 bp, Homo sapiens
gggtgagagaactgg

SEQ ID NO: 74708 - DNA, 15 bp, Homo sapiens
ggggtgagagaactg

SEQ ID NO: 74709 - DNA, 15 bp, Homo sapiens
aggggtgagagaact

SEQ ID NO: 74710 - DNA, 15 bp, Homo sapiens
caggggtgagagaac

SEQ ID NO: 74711 - DNA, 15 bp, Homo sapiens
gcaggggtgagagaa

SEQ ID NO: 74712 - DNA, 15 bp, Homo sapiens
agcaggggtgagaga

SEQ ID NO: 74713 - DNA, 15 bp, Homo sapiens
gagcaggggtgagag

SEQ ID NO: 74714 - DNA, 15 bp, Homo sapiens
tgagcaggggtgaga

SEQ ID NO: 74715 - DNA, 15 bp, Homo sapiens
ttgagcaggggtgag

SEQ ID NO: 74716 - DNA, 15 bp, Homo sapiens
tttgagcaggggtga

SEQ ID NO: 74717 - DNA, 15 bp, Homo sapiens
ctttgagcaggggtg

SEQ ID NO: 74718 - DNA, 15 bp, Homo sapiens
tctttgagcaggggt

SEQ ID NO: 74719 - DNA, 15 bp, Homo sapiens
ctctttgagcagggg

SEQ ID NO: 74720 - DNA, 15 bp, Homo sapiens
actctttgagcaggg

SEQ ID NO: 74721 - DNA, 15 bp, Homo sapiens
cactctttgagcagg

SEQ ID NO: 74722 - DNA, 15 bp, Homo sapiens
acactctttgagcag

SEQ ID NO: 74723 - DNA, 15 bp, Homo sapiens
tacactctttgagca

SEQ ID NO: 74724 - DNA, 15 bp, Homo sapiens
atacactctttgagc

SEQ ID NO: 74725 - DNA, 15 bp, Homo sapiens
catacactctttgag

SEQ ID NO: 74726 - DNA, 15 bp, Homo sapiens
ccatacactctttga

SEQ ID NO: 74727 - DNA, 15 bp, Homo sapiens
gccatacactctttg

SEQ ID NO: 74728 - DNA, 15 bp, Homo sapiens
agccatacactcttt

SEQ ID NO: 74729 - DNA, 15 bp, Homo sapiens
gagccatacactctt

SEQ ID NO: 74730 - DNA, 15 bp, Homo sapiens
agagccatacactct

SEQ ID NO: 74731 - DNA, 15 bp, Homo sapiens
aagagccatacactc

SEQ ID NO: 74732 - DNA, 15 bp, Homo sapiens
taagagccatacact

SEQ ID NO: 74733 - DNA, 15 bp, Homo sapiens
gtaagagccatacac

SEQ ID NO: 74734 - DNA, 15 bp, Homo sapiens
tgtaagagccataca

SEQ ID NO: 74735 - DNA, 15 bp, Homo sapiens
atgtaagagccatac

SEQ ID NO: 74736 - DNA, 15 bp, Homo sapiens
aatgtaagagccata

SEQ ID NO: 74737 - DNA, 15 bp, Homo sapiens
taatgtaagagccat

SEQ ID NO: 74738 - DNA, 15 bp, Homo sapiens
ataatgtaagagcca

SEQ ID NO: 74739 - DNA, 15 bp, Homo sapiens
tataatgtaagagcc

SEQ ID NO: 74740 - DNA, 15 bp, Homo sapiens
atataatgtaagagc

SEQ ID NO: 74741 - DNA, 15 bp, Homo sapiens
tatataatgtaagag

SEQ ID NO: 74742 - DNA, 15 bp, Homo sapiens
atatataatgtaaga

SEQ ID NO: 74743 - DNA, 15 bp, Homo sapiens
tatatataatgtaag

SEQ ID NO: 74744 - DNA, 15 bp, Homo sapiens
ttatatataatgtaa

SEQ ID NO: 74745 - DNA, 15 bp, Homo sapiens
gttatatataatgta

SEQ ID NO: 74746 - DNA, 15 bp, Homo sapiens
agttatatataatgt

SEQ ID NO: 74747 - DNA, 15 bp, Homo sapiens
cagttatatataatg

SEQ ID NO: 74748 - DNA, 15 bp, Homo sapiens
gcagttatatataat

SEQ ID NO: 74749 - DNA, 15 bp, Homo sapiens
ggcagttatatataa

SEQ ID NO: 74750 - DNA, 15 bp, Homo sapiens
aggcagttatatata

SEQ ID NO: 74751 - DNA, 15 bp, Homo sapiens
caggcagttatatat

SEQ ID NO: 74752 - DNA, 15 bp, Homo sapiens
tcaggcagttatata

SEQ ID NO: 74753 - DNA, 15 bp, Homo sapiens
gtcaggcagttatat

SEQ ID NO: 74754 - DNA, 15 bp, Homo sapiens
agtcaggcagttata

SEQ ID NO: 74755 - DNA, 15 bp, Homo sapiens
aagtcaggcagttat

SEQ ID NO: 74756 - DNA, 15 bp, Homo sapiens
gaagtcaggcagtta

SEQ ID NO: 74757 - DNA, 15 bp, Homo sapiens
tgaagtcaggcagtt

SEQ ID NO: 74758 - DNA, 15 bp, Homo sapiens
atgaagtcaggcagt

SEQ ID NO: 74759 - DNA, 15 bp, Homo sapiens
tatgaagtcaggcag

SEQ ID NO: 74760 - DNA, 15 bp, Homo sapiens
gtatgaagtcaggca

SEQ ID NO: 74761 - DNA, 15 bp, Homo sapiens
tgtatgaagtcaggc

SEQ ID NO: 74762 - DNA, 15 bp, Homo sapiens
ctgtatgaagtcagg

SEQ ID NO: 74763 - DNA, 15 bp, Homo sapiens
actgtatgaagtcag

SEQ ID NO: 74764 - DNA, 15 bp, Homo sapiens
tactgtatgaagtca

SEQ ID NO: 74765 - DNA, 15 bp, Homo sapiens
atactgtatgaagtc

SEQ ID NO: 74766 - DNA, 15 bp, Homo sapiens
gatactgtatgaagt

SEQ ID NO: 74767 - DNA, 15 bp, Homo sapiens
tgatactgtatgaag

SEQ ID NO: 74768 - DNA, 15 bp, Homo sapiens
ctgatactgtatgaa

SEQ ID NO: 74769 - DNA, 15 bp, Homo sapiens
actgatactgtatga

SEQ ID NO: 74770 - DNA, 15 bp, Homo sapiens
tactgatactgtatg

SEQ ID NO: 74771 - DNA, 15 bp, Homo sapiens
gtactgatactgtat

SEQ ID NO: 74772 - DNA, 15 bp, Homo sapiens
agtactgatactgta

SEQ ID NO: 74773 - DNA, 15 bp, Homo sapiens
aagtactgatactgt

SEQ ID NO: 74774 - DNA, 15 bp, Homo sapiens
taagtactgatactg

SEQ ID NO: 74775 - DNA, 15 bp, Homo sapiens
ctaagtactgatact

SEQ ID NO: 74776 - DNA, 15 bp, Homo sapiens
tctaagtactgatac

SEQ ID NO: 74777 - DNA, 15 bp, Homo sapiens
atctaagtactgata

SEQ ID NO: 74778 - DNA, 15 bp, Homo sapiens
gatctaagtactgat

SEQ ID NO: 74779 - DNA, 15 bp, Homo sapiens
tgatctaagtactga

SEQ ID NO: 74780 - DNA, 15 bp, Homo sapiens
atgatctaagtactg

SEQ ID NO: 74781 - DNA, 15 bp, Homo sapiens
aatgatctaagtact

SEQ ID NO: 74782 - DNA, 15 bp, Homo sapiens
aaatgatctaagtac

SEQ ID NO: 74783 - DNA, 15 bp, Homo sapiens
caaatgatctaagta

SEQ ID NO: 74784 - DNA, 15 bp, Homo sapiens
tcaaatgatctaagt

SEQ ID NO: 74785 - DNA, 15 bp, Homo sapiens
ttcaaatgatctaag

SEQ ID NO: 74786 - DNA, 15 bp, Homo sapiens
tttcaaatgatctaa

SEQ ID NO: 74787 - DNA, 15 bp, Homo sapiens
atttcaaatgatcta

SEQ ID NO: 74788 - DNA, 15 bp, Homo sapiens
catttcaaatgatct

SEQ ID NO: 74789 - DNA, 15 bp, Homo sapiens
acatttcaaatgatc

SEQ ID NO: 74790 - DNA, 15 bp, Homo sapiens
cacatttcaaatgat

SEQ ID NO: 74791 - DNA, 15 bp, Homo sapiens
acacatttcaaatga

SEQ ID NO: 74792 - DNA, 15 bp, Homo sapiens
gacacatttcaaatg

SEQ ID NO: 74793 - DNA, 15 bp, Homo sapiens
ggacacatttcaaat

SEQ ID NO: 74794 - DNA, 15 bp, Homo sapiens
tggacacatttcaaa

SEQ ID NO: 74795 - DNA, 15 bp, Homo sapiens
gtggacacatttcaa

SEQ ID NO: 74796 - DNA, 15 bp, Homo sapiens
cgtggacacatttca

SEQ ID NO: 74797 - DNA, 15 bp, Homo sapiens
acgtggacacatttc

SEQ ID NO: 74798 - DNA, 15 bp, Homo sapiens
aacgtggacacattt

SEQ ID NO: 74799 - DNA, 15 bp, Homo sapiens
aaacgtggacacatt

SEQ ID NO: 74800 - DNA, 15 bp, Homo sapiens
aaaacgtggacacat

SEQ ID NO: 74801 - DNA, 15 bp, Homo sapiens
taaaacgtggacaca

SEQ ID NO: 74802 - DNA, 15 bp, Homo sapiens
gtaaaacgtggacac

SEQ ID NO: 74803 - DNA, 15 bp, Homo sapiens
ggtaaaacgtggaca

SEQ ID NO: 74804 - DNA, 15 bp, Homo sapiens
tggtaaaacgtggac

SEQ ID NO: 74805 - DNA, 15 bp, Homo sapiens
ttggtaaaacgtgga

SEQ ID NO: 74806 - DNA, 15 bp, Homo sapiens
tttggtaaaacgtgg

SEQ ID NO: 74807 - DNA, 15 bp, Homo sapiens
ttttggtaaaacgtg

SEQ ID NO: 74808 - DNA, 15 bp, Homo sapiens
attttggtaaaacgt

SEQ ID NO: 74809 - DNA, 15 bp, Homo sapiens
tattttggtaaaacg

SEQ ID NO: 74810 - DNA, 15 bp, Homo sapiens
atattttggtaaaac

SEQ ID NO: 74811 - DNA, 15 bp, Homo sapiens
tatattttggtaaaa

SEQ ID NO: 74812 - DNA, 15 bp, Homo sapiens
ttatattttggtaaa

SEQ ID NO: 74813 - DNA, 15 bp, Homo sapiens
attatattttggtaa

SEQ ID NO: 74814 - DNA, 15 bp, Homo sapiens
tattatattttggta

SEQ ID NO: 74815 - DNA, 15 bp, Homo sapiens
ctattatattttggt

SEQ ID NO: 74816 - DNA, 15 bp, Homo sapiens
cctattatattttgg

SEQ ID NO: 74817 - DNA, 15 bp, Homo sapiens
ccctattatattttg

SEQ ID NO: 74818 - DNA, 15 bp, Homo sapiens
accctattatatttt

SEQ ID NO: 74819 - DNA, 15 bp, Homo sapiens
caccctattatattt

SEQ ID NO: 74820 - DNA, 15 bp, Homo sapiens
tcaccctattatatt

SEQ ID NO: 74821 - DNA, 15 bp, Homo sapiens
ctcaccctattatat

SEQ ID NO: 74822 - DNA, 15 bp, Homo sapiens
tctcaccctattata

SEQ ID NO: 74823 - DNA, 15 bp, Homo sapiens
ttctcaccctattat

SEQ ID NO: 74824 - DNA, 15 bp, Homo sapiens
cttctcaccctatta

SEQ ID NO: 74825 - DNA, 15 bp, Homo sapiens
gcttctcaccctatt

SEQ ID NO: 74826 - DNA, 15 bp, Homo sapiens
agcttctcaccctat

SEQ ID NO: 74827 - DNA, 15 bp, Homo sapiens
cagcttctcacccta

SEQ ID NO: 74828 - DNA, 15 bp, Homo sapiens
tcagcttctcaccct

SEQ ID NO: 74829 - DNA, 15 bp, Homo sapiens
ctcagcttctcaccc

SEQ ID NO: 74830 - DNA, 15 bp, Homo sapiens
tctcagcttctcacc

SEQ ID NO: 74831 - DNA, 15 bp, Homo sapiens
atctcagcttctcac

SEQ ID NO: 74832 - DNA, 15 bp, Homo sapiens
catctcagcttctca

SEQ ID NO: 74833 - DNA, 15 bp, Homo sapiens
gcatctcagcttctc

SEQ ID NO: 74834 - DNA, 15 bp, Homo sapiens
agcatctcagcttct

SEQ ID NO: 74835 - DNA, 15 bp, Homo sapiens
tagcatctcagcttc

SEQ ID NO: 74836 - DNA, 15 bp, Homo sapiens
ttagcatctcagctt

SEQ ID NO: 74837 - DNA, 15 bp, Homo sapiens
attagcatctcagct

SEQ ID NO: 74838 - DNA, 15 bp, Homo sapiens
aattagcatctcagc

SEQ ID NO: 74839 - DNA, 15 bp, Homo sapiens
caattagcatctcag

SEQ ID NO: 74840 - DNA, 15 bp, Homo sapiens
gcaattagcatctca

SEQ ID NO: 74841 - DNA, 15 bp, Homo sapiens
ggcaattagcatctc

SEQ ID NO: 74842 - DNA, 15 bp, Homo sapiens
tggcaattagcatct

SEQ ID NO: 74843 - DNA, 15 bp, Homo sapiens
atggcaattagcatc

SEQ ID NO: 74844 - DNA, 15 bp, Homo sapiens
aatggcaattagcat

SEQ ID NO: 74845 - DNA, 15 bp, Homo sapiens
caatggcaattagca

SEQ ID NO: 74846 - DNA, 15 bp, Homo sapiens
acaatggcaattagc

SEQ ID NO: 74847 - DNA, 15 bp, Homo sapiens
cacaatggcaattag

SEQ ID NO: 74848 - DNA, 15 bp, Homo sapiens
acacaatggcaatta

SEQ ID NO: 74849 - DNA, 15 bp, Homo sapiens
tacacaatggcaatt

SEQ ID NO: 74850 - DNA, 15 bp, Homo sapiens
atacacaatggcaat

SEQ ID NO: 74851 - DNA, 15 bp, Homo sapiens
aatacacaatggcaa

SEQ ID NO: 74852 - DNA, 15 bp, Homo sapiens
gaatacacaatggca

SEQ ID NO: 74853 - DNA, 15 bp, Homo sapiens
agaatacacaatggc

SEQ ID NO: 74854 - DNA, 15 bp, Homo sapiens
gagaatacacaatgg

SEQ ID NO: 74855 - DNA, 15 bp, Homo sapiens
tgagaatacacaatg

SEQ ID NO: 74856 - DNA, 15 bp, Homo sapiens
ttgagaatacacaat

SEQ ID NO: 74857 - DNA, 15 bp, Homo sapiens
tttgagaatacacaa

SEQ ID NO: 74858 - DNA, 15 bp, Homo sapiens
atttgagaatacaca

SEQ ID NO: 74859 - DNA, 15 bp, Homo sapiens
tatttgagaatacac

SEQ ID NO: 74860 - DNA, 15 bp, Homo sapiens
atatttgagaataca

SEQ ID NO: 74861 - DNA, 15 bp, Homo sapiens
catatttgagaatac

SEQ ID NO: 74862 - DNA, 15 bp, Homo sapiens
acatatttgagaata

SEQ ID NO: 74863 - DNA, 15 bp, Homo sapiens
gacatatttgagaat

SEQ ID NO: 74864 - DNA, 15 bp, Homo sapiens
tgacatatttgagaa

SEQ ID NO: 74865 - DNA, 15 bp, Homo sapiens
ttgacatatttgaga

SEQ ID NO: 74866 - DNA, 15 bp, Homo sapiens
cttgacatatttgag

SEQ ID NO: 74867 - DNA, 15 bp, Homo sapiens
gcttgacatatttga

SEQ ID NO: 74868 - DNA, 15 bp, Homo sapiens
agcttgacatatttg

SEQ ID NO: 74869 - DNA, 15 bp, Homo sapiens
tagcttgacatattt

SEQ ID NO: 74870 - DNA, 15 bp, Homo sapiens
gtagcttgacatatt

SEQ ID NO: 74871 - DNA, 15 bp, Homo sapiens
cgtagcttgacatat

SEQ ID NO: 74872 - DNA, 15 bp, Homo sapiens
acgtagcttgacata

SEQ ID NO: 74873 - DNA, 15 bp, Homo sapiens
tacgtagcttgacat

SEQ ID NO: 74874 - DNA, 15 bp, Homo sapiens
gtacgtagcttgaca

SEQ ID NO: 74875 - DNA, 15 bp, Homo sapiens
tgtacgtagcttgac

SEQ ID NO: 74876 - DNA, 15 bp, Homo sapiens
atgtacgtagcttga

SEQ ID NO: 74877 - DNA, 15 bp, Homo sapiens
catgtacgtagcttg

SEQ ID NO: 74878 - DNA, 15 bp, Homo sapiens
ccatgtacgtagctt

SEQ ID NO: 74879 - DNA, 15 bp, Homo sapiens
gccatgtacgtagct

SEQ ID NO: 74880 - DNA, 15 bp, Homo sapiens
ggccatgtacgtagc

SEQ ID NO: 74881 - DNA, 15 bp, Homo sapiens
aggccatgtacgtag

SEQ ID NO: 74882 - DNA, 15 bp, Homo sapiens
caggccatgtacgta

SEQ ID NO: 74883 - DNA, 15 bp, Homo sapiens
acaggccatgtacgt

SEQ ID NO: 74884 - DNA, 15 bp, Homo sapiens
aacaggccatgtacg

SEQ ID NO: 74885 - DNA, 15 bp, Homo sapiens
aaacaggccatgtac

SEQ ID NO: 74886 - DNA, 15 bp, Homo sapiens
gaaacaggccatgta

SEQ ID NO: 74887 - DNA, 15 bp, Homo sapiens
tgaaacaggccatgt

SEQ ID NO: 74888 - DNA, 15 bp, Homo sapiens
atgaaacaggccatg

SEQ ID NO: 74889 - DNA, 15 bp, Homo sapiens
tatgaaacaggccat

SEQ ID NO: 74890 - DNA, 15 bp, Homo sapiens
ctatgaaacaggcca

SEQ ID NO: 74891 - DNA, 15 bp, Homo sapiens
tctatgaaacaggcc

SEQ ID NO: 74892 - DNA, 15 bp, Homo sapiens
ctctatgaaacaggc

SEQ ID NO: 74893 - DNA, 15 bp, Homo sapiens
actctatgaaacagg

SEQ ID NO: 74894 - DNA, 15 bp, Homo sapiens
tactctatgaaacag

SEQ ID NO: 74895 - DNA, 15 bp, Homo sapiens
ctactctatgaaaca

SEQ ID NO: 74896 - DNA, 15 bp, Homo sapiens
actactctatgaaac

SEQ ID NO: 74897 - DNA, 15 bp, Homo sapiens
gactactctatgaaa

SEQ ID NO: 74898 - DNA, 15 bp, Homo sapiens
agactactctatgaa

SEQ ID NO: 74899 - DNA, 15 bp, Homo sapiens
tagactactctatga

SEQ ID NO: 74900 - DNA, 15 bp, Homo sapiens
atagactactctatg

SEQ ID NO: 74901 - DNA, 15 bp, Homo sapiens
tatagactactctat

SEQ ID NO: 74902 - DNA, 15 bp, Homo sapiens
ttatagactactcta

SEQ ID NO: 74903 - DNA, 15 bp, Homo sapiens
cttatagactactct

SEQ ID NO: 74904 - DNA, 15 bp, Homo sapiens
tcttatagactactc

SEQ ID NO: 74905 - DNA, 15 bp, Homo sapiens
ttcttatagactact

SEQ ID NO: 74906 - DNA, 15 bp, Homo sapiens
tttcttatagactac

SEQ ID NO: 74907 - DNA, 15 bp, Homo sapiens
atttcttatagacta

SEQ ID NO: 74908 - DNA, 15 bp, Homo sapiens
aatttcttatagact

SEQ ID NO: 74909 - DNA, 15 bp, Homo sapiens
caatttcttatagac

SEQ ID NO: 74910 - DNA, 15 bp, Homo sapiens
tcaatttcttataga

SEQ ID NO: 74911 - DNA, 15 bp, Homo sapiens
atcaatttcttatag

SEQ ID NO: 74912 - DNA, 15 bp, Homo sapiens
catcaatttcttata

SEQ ID NO: 74913 - DNA, 15 bp, Homo sapiens
tcatcaatttcttat

SEQ ID NO: 74914 - DNA, 15 bp, Homo sapiens
gtcatcaatttctta

SEQ ID NO: 74915 - DNA, 15 bp, Homo sapiens
agtcatcaatttctt

SEQ ID NO: 74916 - DNA, 15 bp, Homo sapiens
aagtcatcaatttct

SEQ ID NO: 74917 - DNA, 15 bp, Homo sapiens
caagtcatcaatttc

SEQ ID NO: 74918 - DNA, 15 bp, Homo sapiens
tcaagtcatcaattt

SEQ ID NO: 74919 - DNA, 15 bp, Homo sapiens
atcaagtcatcaatt

SEQ ID NO: 74920 - DNA, 15 bp, Homo sapiens
aatcaagtcatcaat

SEQ ID NO: 74921 - DNA, 15 bp, Homo sapiens
gaatcaagtcatcaa

SEQ ID NO: 74922 - DNA, 15 bp, Homo sapiens
tgaatcaagtcatca

SEQ ID NO: 74923 - DNA, 15 bp, Homo sapiens
atgaatcaagtcatc

SEQ ID NO: 74924 - DNA, 15 bp, Homo sapiens
gatgaatcaagtcat

SEQ ID NO: 74925 - DNA, 15 bp, Homo sapiens
ggatgaatcaagtca

SEQ ID NO: 74926 - DNA, 15 bp, Homo sapiens
cggatgaatcaagtc

SEQ ID NO: 74927 - DNA, 15 bp, Homo sapiens
tcggatgaatcaagt

SEQ ID NO: 74928 - DNA, 15 bp, Homo sapiens
ttcggatgaatcaag

SEQ ID NO: 74929 - DNA, 15 bp, Homo sapiens
attcggatgaatcaa

SEQ ID NO: 74930 - DNA, 15 bp, Homo sapiens
cattcggatgaatca

SEQ ID NO: 74931 - DNA, 15 bp, Homo sapiens
ccattcggatgaatc

SEQ ID NO: 74932 - DNA, 15 bp, Homo sapiens
gccattcggatgaat

SEQ ID NO: 74933 - DNA, 15 bp, Homo sapiens
agccattcggatgaa

SEQ ID NO: 74934 - DNA, 15 bp, Homo sapiens
cagccattcggatga

SEQ ID NO: 74935 - DNA, 15 bp, Homo sapiens
ccagccattcggatg

SEQ ID NO: 74936 - DNA, 15 bp, Homo sapiens
gccagccattcggat

SEQ ID NO: 74937 - DNA, 15 bp, Homo sapiens
agccagccattcgga

SEQ ID NO: 74938 - DNA, 15 bp, Homo sapiens
cagccagccattcgg

SEQ ID NO: 74939 - DNA, 15 bp, Homo sapiens
acagccagccattcg

SEQ ID NO: 74940 - DNA, 15 bp, Homo sapiens
tacagccagccattc

SEQ ID NO: 74941 - DNA, 15 bp, Homo sapiens
ttacagccagccatt

SEQ ID NO: 74942 - DNA, 15 bp, Homo sapiens
gttacagccagccat

SEQ ID NO: 74943 - DNA, 15 bp, Homo sapiens
tgttacagccagcca

SEQ ID NO: 74944 - DNA, 15 bp, Homo sapiens
gtgttacagccagcc

SEQ ID NO: 74945 - DNA, 15 bp, Homo sapiens
ggtgttacagccagc

SEQ ID NO: 74946 - DNA, 15 bp, Homo sapiens
aggtgttacagccag

SEQ ID NO: 74947 - DNA, 15 bp, Homo sapiens
caggtgttacagcca

SEQ ID NO: 74948 - DNA, 15 bp, Homo sapiens
ccaggtgttacagcc

SEQ ID NO: 74949 - DNA, 15 bp, Homo sapiens
accaggtgttacagc

SEQ ID NO: 74950 - DNA, 15 bp, Homo sapiens
aaccaggtgttacag

SEQ ID NO: 74951 - DNA, 15 bp, Homo sapiens
taaccaggtgttaca

SEQ ID NO: 74952 - DNA, 15 bp, Homo sapiens
gtaaccaggtgttac

SEQ ID NO: 74953 - DNA, 15 bp, Homo sapiens
cgtaaccaggtgtta

SEQ ID NO: 74954 - DNA, 15 bp, Homo sapiens
gcgtaaccaggtgtt

SEQ ID NO: 74955 - DNA, 15 bp, Homo sapiens
tgcgtaaccaggtgt

SEQ ID NO: 74956 - DNA, 15 bp, Homo sapiens
atgcgtaaccaggtg

SEQ ID NO: 74957 - DNA, 15 bp, Homo sapiens
catgcgtaaccaggt

SEQ ID NO: 74958 - DNA, 15 bp, Homo sapiens
tcatgcgtaaccagg

SEQ ID NO: 74959 - DNA, 15 bp, Homo sapiens
ttcatgcgtaaccag

SEQ ID NO: 74960 - DNA, 15 bp, Homo sapiens
gttcatgcgtaacca

SEQ ID NO: 74961 - DNA, 15 bp, Homo sapiens
tgttcatgcgtaacc

SEQ ID NO: 74962 - DNA, 15 bp, Homo sapiens
gtgttcatgcgtaac

SEQ ID NO: 74963 - DNA, 15 bp, Homo sapiens
ggtgttcatgcgtaa

SEQ ID NO: 74964 - DNA, 15 bp, Homo sapiens
aggtgttcatgcgta

SEQ ID NO: 74965 - DNA, 15 bp, Homo sapiens
gaggtgttcatgcgt

SEQ ID NO: 74966 - DNA, 15 bp, Homo sapiens
agaggtgttcatgcg

SEQ ID NO: 74967 - DNA, 15 bp, Homo sapiens
aagaggtgttcatgc

SEQ ID NO: 74968 - DNA, 15 bp, Homo sapiens
aaagaggtgttcatg

SEQ ID NO: 74969 - DNA, 15 bp, Homo sapiens
aaaagaggtgttcat

SEQ ID NO: 74970 - DNA, 15 bp, Homo sapiens
gaaaagaggtgttca

SEQ ID NO: 74971 - DNA, 15 bp, Homo sapiens
tgaaaagaggtgttc

SEQ ID NO: 74972 - DNA, 15 bp, Homo sapiens
ctgaaaagaggtgtt

SEQ ID NO: 74973 - DNA, 15 bp, Homo sapiens
actgaaaagaggtgt

SEQ ID NO: 74974 - DNA, 15 bp, Homo sapiens
aactgaaaagaggtg

SEQ ID NO: 74975 - DNA, 15 bp, Homo sapiens
caactgaaaagaggt

SEQ ID NO: 74976 - DNA, 15 bp, Homo sapiens
acaactgaaaagagg

SEQ ID NO: 74977 - DNA, 15 bp, Homo sapiens
gacaactgaaaagag

SEQ ID NO: 74978 - DNA, 15 bp, Homo sapiens
agacaactgaaaaga

SEQ ID NO: 74979 - DNA, 15 bp, Homo sapiens
gagacaactgaaaag

SEQ ID NO: 74980 - DNA, 15 bp, Homo sapiens
tgagacaactgaaaa

SEQ ID NO: 74981 - DNA, 15 bp, Homo sapiens
ttgagacaactgaaa

SEQ ID NO: 74982 - DNA, 15 bp, Homo sapiens
cttgagacaactgaa

SEQ ID NO: 74983 - DNA, 15 bp, Homo sapiens
tcttgagacaactga

SEQ ID NO: 74984 - DNA, 15 bp, Homo sapiens
gtcttgagacaactg

SEQ ID NO: 74985 - DNA, 15 bp, Homo sapiens
tgtcttgagacaact

SEQ ID NO: 74986 - DNA, 15 bp, Homo sapiens
gtgtcttgagacaac

SEQ ID NO: 74987 - DNA, 15 bp, Homo sapiens
ggtgtcttgagacaa

SEQ ID NO: 74988 - DNA, 15 bp, Homo sapiens
aggtgtcttgagaca

SEQ ID NO: 74989 - DNA, 15 bp, Homo sapiens
aaggtgtcttgagac

SEQ ID NO: 74990 - DNA, 15 bp, Homo sapiens
aaaggtgtcttgaga

SEQ ID NO: 74991 - DNA, 15 bp, Homo sapiens
gaaaggtgtcttgag

SEQ ID NO: 74992 - DNA, 15 bp, Homo sapiens
agaaaggtgtcttga

SEQ ID NO: 74993 - DNA, 15 bp, Homo sapiens
aagaaaggtgtcttg

SEQ ID NO: 74994 - DNA, 15 bp, Homo sapiens
aaagaaaggtgtctt

SEQ ID NO: 74995 - DNA, 15 bp, Homo sapiens
aaaagaaaggtgtct

SEQ ID NO: 74996 - DNA, 15 bp, Homo sapiens
gaaaagaaaggtgtc

SEQ ID NO: 74997 - DNA, 15 bp, Homo sapiens
agaaaagaaaggtgt

SEQ ID NO: 74998 - DNA, 15 bp, Homo sapiens
cagaaaagaaaggtg

SEQ ID NO: 74999 - DNA, 15 bp, Homo sapiens
acagaaaagaaaggt

SEQ ID NO: 75000 - DNA, 15 bp, Homo sapiens
tacagaaaagaaagg

SEQ ID NO: 75001 - DNA, 15 bp, Homo sapiens
gtacagaaaagaaag

SEQ ID NO: 75002 - DNA, 15 bp, Homo sapiens
agtacagaaaagaaa

SEQ ID NO: 75003 - DNA, 15 bp, Homo sapiens
aagtacagaaaagaa

SEQ ID NO: 75004 - DNA, 15 bp, Homo sapiens
taagtacagaaaaga

SEQ ID NO: 75005 - DNA, 15 bp, Homo sapiens
ataagtacagaaaag

SEQ ID NO: 75006 - DNA, 15 bp, Homo sapiens
gataagtacagaaaa

SEQ ID NO: 75007 - DNA, 15 bp, Homo sapiens
tgataagtacagaaa

SEQ ID NO: 75008 - DNA, 15 bp, Homo sapiens
ctgataagtacagaa

SEQ ID NO: 75009 - DNA, 15 bp, Homo sapiens
tctgataagtacaga

SEQ ID NO: 75010 - DNA, 15 bp, Homo sapiens
gtctgataagtacag

SEQ ID NO: 75011 - DNA, 15 bp, Homo sapiens
tgtctgataagtaca

SEQ ID NO: 75012 - DNA, 15 bp, Homo sapiens
ttgtctgataagtac

SEQ ID NO: 75013 - DNA, 15 bp, Homo sapiens
cttgtctgataagta

SEQ ID NO: 75014 - DNA, 15 bp, Homo sapiens
ccttgtctgataagt

SEQ ID NO: 75015 - DNA, 15 bp, Homo sapiens
tccttgtctgataag

SEQ ID NO: 75016 - DNA, 15 bp, Homo sapiens
gtccttgtctgataa

SEQ ID NO: 75017 - DNA, 15 bp, Homo sapiens
agtccttgtctgata

SEQ ID NO: 75018 - DNA, 15 bp, Homo sapiens
cagtccttgtctgat

SEQ ID NO: 75019 - DNA, 15 bp, Homo sapiens
tcagtccttgtctga

SEQ ID NO: 75020 - DNA, 15 bp, Homo sapiens
ttcagtccttgtctg

SEQ ID NO: 75021 - DNA, 15 bp, Homo sapiens
tttcagtccttgtct

SEQ ID NO: 75022 - DNA, 15 bp, Homo sapiens
ctttcagtccttgtc

SEQ ID NO: 75023 - DNA, 15 bp, Homo sapiens
cctttcagtccttgt

SEQ ID NO: 75024 - DNA, 15 bp, Homo sapiens
gcctttcagtccttg

SEQ ID NO: 75025 - DNA, 15 bp, Homo sapiens
tgcctttcagtcctt

SEQ ID NO: 75026 - DNA, 15 bp, Homo sapiens
ctgcctttcagtcct

SEQ ID NO: 75027 - DNA, 15 bp, Homo sapiens
tctgcctttcagtcc

SEQ ID NO: 75028 - DNA, 15 bp, Homo sapiens
ctctgcctttcagtc

SEQ ID NO: 75029 - DNA, 15 bp, Homo sapiens
tctctgcctttcagt

SEQ ID NO: 75030 - DNA, 15 bp, Homo sapiens
gtctctgcctttcag

SEQ ID NO: 75031 - DNA, 15 bp, Homo sapiens
agtctctgcctttca

SEQ ID NO: 75032 - DNA, 15 bp, Homo sapiens
cagtctctgcctttc

SEQ ID NO: 75033 - DNA, 15 bp, Homo sapiens
gcagtctctgccttt

SEQ ID NO: 75034 - DNA, 15 bp, Homo sapiens
agcagtctctgcctt

SEQ ID NO: 75035 - DNA, 15 bp, Homo sapiens
tagcagtctctgcct

SEQ ID NO: 75036 - DNA, 15 bp, Homo sapiens
gtagcagtctctgcc

SEQ ID NO: 75037 - DNA, 15 bp, Homo sapiens
agtagcagtctctgc

SEQ ID NO: 75038 - DNA, 15 bp, Homo sapiens
cagtagcagtctctg

SEQ ID NO: 75039 - DNA, 15 bp, Homo sapiens
acagtagcagtctct

SEQ ID NO: 75040 - DNA, 15 bp, Homo sapiens
aacagtagcagtctc

SEQ ID NO: 75041 - DNA, 15 bp, Homo sapiens
taacagtagcagtct

SEQ ID NO: 75042 - DNA, 15 bp, Homo sapiens
ctaacagtagcagtc

SEQ ID NO: 75043 - DNA, 15 bp, Homo sapiens
tctaacagtagcagt

SEQ ID NO: 75044 - DNA, 15 bp, Homo sapiens
gtctaacagtagcag

SEQ ID NO: 75045 - DNA, 15 bp, Homo sapiens
tgtctaacagtagca

SEQ ID NO: 75046 - DNA, 15 bp, Homo sapiens
atgtctaacagtagc

SEQ ID NO: 75047 - DNA, 15 bp, Homo sapiens
aatgtctaacagtag

SEQ ID NO: 75048 - DNA, 15 bp, Homo sapiens
aaatgtctaacagta

SEQ ID NO: 75049 - DNA, 15 bp, Homo sapiens
aaaatgtctaacagt

SEQ ID NO: 75050 - DNA, 15 bp, Homo sapiens
caaaatgtctaacag

SEQ ID NO: 75051 - DNA, 15 bp, Homo sapiens
tcaaaatgtctaaca

SEQ ID NO: 75052 - DNA, 15 bp, Homo sapiens
ctcaaaatgtctaac

SEQ ID NO: 75053 - DNA, 15 bp, Homo sapiens
actcaaaatgtctaa

SEQ ID NO: 75054 - DNA, 15 bp, Homo sapiens
gactcaaaatgtcta

SEQ ID NO: 75055 - DNA, 15 bp, Homo sapiens
tgactcaaaatgtct

SEQ ID NO: 75056 - DNA, 15 bp, Homo sapiens
ttgactcaaaatgtc

SEQ ID NO: 75057 - DNA, 15 bp, Homo sapiens
cttgactcaaaatgt

SEQ ID NO: 75058 - DNA, 15 bp, Homo sapiens
gcttgactcaaaatg

SEQ ID NO: 75059 - DNA, 15 bp, Homo sapiens
agcttgactcaaaat

SEQ ID NO: 75060 - DNA, 15 bp, Homo sapiens
aagcttgactcaaaa

SEQ ID NO: 75061 - DNA, 15 bp, Homo sapiens
aaagcttgactcaaa

SEQ ID NO: 75062 - DNA, 15 bp, Homo sapiens
aaaagcttgactcaa

SEQ ID NO: 75063 - DNA, 15 bp, Homo sapiens
gaaaagcttgactca

SEQ ID NO: 75064 - DNA, 15 bp, Homo sapiens
ggaaaagcttgactc

SEQ ID NO: 75065 - DNA, 15 bp, Homo sapiens
aggaaaagcttgact

SEQ ID NO: 75066 - DNA, 15 bp, Homo sapiens
aaggaaaagcttgac

SEQ ID NO: 75067 - DNA, 15 bp, Homo sapiens
caaggaaaagcttga

SEQ ID NO: 75068 - DNA, 15 bp, Homo sapiens
ccaaggaaaagcttg

SEQ ID NO: 75069 - DNA, 15 bp, Homo sapiens
tccaaggaaaagctt

SEQ ID NO: 75070 - DNA, 15 bp, Homo sapiens
gtccaaggaaaagct

SEQ ID NO: 75071 - DNA, 15 bp, Homo sapiens
atgtccaaggaaaag

SEQ ID NO: 75072 - DNA, 15 bp, Homo sapiens
tatgtccaaggaaaa

SEQ ID NO: 75073 - DNA, 15 bp, Homo sapiens
ctatgtccaaggaaa

SEQ ID NO: 75074 - DNA, 15 bp, Homo sapiens
gctatgtccaaggaa

SEQ ID NO: 75075 - DNA, 15 bp, Homo sapiens
agctatgtccaagga

SEQ ID NO: 75076 - DNA, 15 bp, Homo sapiens
aagctatgtccaagg

SEQ ID NO: 75077 - DNA, 15 bp, Homo sapiens
aaagctatgtccaag

SEQ ID NO: 75078 - DNA, 15 bp, Homo sapiens
caaagctatgtccaa

SEQ ID NO: 75079 - DNA, 15 bp, Homo sapiens
acaaagctatgtcca

SEQ ID NO: 75080 - DNA, 15 bp, Homo sapiens
gacaaagctatgtcc

SEQ ID NO: 75081 - DNA, 15 bp, Homo sapiens
tgacaaagctatgtc

SEQ ID NO: 75082 - DNA, 15 bp, Homo sapiens
atgacaaagctatgt

SEQ ID NO: 75083 - DNA, 15 bp, Homo sapiens
catgacaaagctatg

SEQ ID NO: 75084 - DNA, 15 bp, Homo sapiens
tcatgacaaagctat

SEQ ID NO: 75085 - DNA, 15 bp, Homo sapiens
ttcatgacaaagcta

SEQ ID NO: 75086 - DNA, 15 bp, Homo sapiens
tttcatgacaaagct

SEQ ID NO: 75087 - DNA, 15 bp, Homo sapiens
ctttcatgacaaagc

SEQ ID NO: 75088 - DNA, 15 bp, Homo sapiens
gctttcatgacaaag

SEQ ID NO: 75089 - DNA, 15 bp, Homo sapiens
ggctttcatgacaaa

SEQ ID NO: 75090 - DNA, 15 bp, Homo sapiens
gggctttcatgacaa

SEQ ID NO: 75091 - DNA, 15 bp, Homo sapiens
agggctttcatgaca

SEQ ID NO: 75092 - DNA, 15 bp, Homo sapiens
aagggctttcatgac

SEQ ID NO: 75093 - DNA, 15 bp, Homo sapiens
aaagggctttcatga

SEQ ID NO: 75094 - DNA, 15 bp, Homo sapiens
taaagggctttcatg

SEQ ID NO: 75095 - DNA, 15 bp, Homo sapiens
gtaaagggctttcat

SEQ ID NO: 75096 - DNA, 15 bp, Homo sapiens
agtaaagggctttca

SEQ ID NO: 75097 - DNA, 15 bp, Homo sapiens
aagtaaagggctttc

SEQ ID NO: 75098 - DNA, 15 bp, Homo sapiens
gaagtaaagggcttt

SEQ ID NO: 75099 - DNA, 15 bp, Homo sapiens
agaagtaaagggctt

SEQ ID NO: 75100 - DNA, 15 bp, Homo sapiens
cagaagtaaagggct

SEQ ID NO: 75101 - DNA, 15 bp, Homo sapiens
tcagaagtaaagggc

SEQ ID NO: 75102 - DNA, 15 bp, Homo sapiens
ctcagaagtaaaggg

SEQ ID NO: 75103 - DNA, 15 bp, Homo sapiens
tctcagaagtaaagg

SEQ ID NO: 75104 - DNA, 15 bp, Homo sapiens
ttctcagaagtaaag

SEQ ID NO: 75105 - DNA, 15 bp, Homo sapiens
tttctcagaagtaaa

SEQ ID NO: 75106 - DNA, 15 bp, Homo sapiens
gtttctcagaagtaa

SEQ ID NO: 75107 - DNA, 15 bp, Homo sapiens
agtttctcagaagta

SEQ ID NO: 75108 - DNA, 15 bp, Homo sapiens
aagtttctcagaagt

SEQ ID NO: 75109 - DNA, 15 bp, Homo sapiens
gaagtttctcagaag

SEQ ID NO: 75110 - DNA, 15 bp, Homo sapiens
agaagtttctcagaa

SEQ ID NO: 75111 - DNA, 15 bp, Homo sapiens
tagaagtttctcaga

SEQ ID NO: 75112 - DNA, 15 bp, Homo sapiens
ctagaagtttctcag

SEQ ID NO: 75113 - DNA, 15 bp, Homo sapiens
gctagaagtttctca

SEQ ID NO: 75114 - DNA, 15 bp, Homo sapiens
agctagaagtttctc

SEQ ID NO: 75115 - DNA, 15 bp, Homo sapiens
aagctagaagtttct

SEQ ID NO: 75116 - DNA, 15 bp, Homo sapiens
gaagctagaagtttc

SEQ ID NO: 75117 - DNA, 15 bp, Homo sapiens
tgaagctagaagttt

SEQ ID NO: 75118 - DNA, 15 bp, Homo sapiens
ctgaagctagaagtt

SEQ ID NO: 75119 - DNA, 15 bp, Homo sapiens
tctgaagctagaagt

SEQ ID NO: 75120 - DNA, 15 bp, Homo sapiens
gtctgaagctagaag

SEQ ID NO: 75121 - DNA, 15 bp, Homo sapiens
tgtctgaagctagaa

SEQ ID NO: 75122 - DNA, 15 bp, Homo sapiens
gtgtctgaagctaga

SEQ ID NO: 75123 - DNA, 15 bp, Homo sapiens
tgtgtctgaagctag

SEQ ID NO: 75124 - DNA, 15 bp, Homo sapiens
atgtgtctgaagcta

SEQ ID NO: 75125 - DNA, 15 bp, Homo sapiens
catgtgtctgaagct

SEQ ID NO: 75126 - DNA, 15 bp, Homo sapiens
gcatgtgtctgaagc

SEQ ID NO: 75127 - DNA, 15 bp, Homo sapiens
ggcatgtgtctgaag

SEQ ID NO: 75128 - DNA, 15 bp, Homo sapiens
aggcatgtgtctgaa

SEQ ID NO: 75129 - DNA, 15 bp, Homo sapiens
aaggcatgtgtctga

SEQ ID NO: 75130 - DNA, 15 bp, Homo sapiens
gaaggcatgtgtctg

SEQ ID NO: 75131 - DNA, 15 bp, Homo sapiens
tgaaggcatgtgtct

SEQ ID NO: 75132 - DNA, 15 bp, Homo sapiens
ttgaaggcatgtgtc

SEQ ID NO: 75133 - DNA, 15 bp, Homo sapiens
cttgaaggcatgtgt

SEQ ID NO: 75134 - DNA, 15 bp, Homo sapiens
tcttgaaggcatgtg

SEQ ID NO: 75135 - DNA, 15 bp, Homo sapiens
atcttgaaggcatgt

SEQ ID NO: 75136 - DNA, 15 bp, Homo sapiens
tatcttgaaggcatg

SEQ ID NO: 75137 - DNA, 15 bp, Homo sapiens
ctatcttgaaggcat

SEQ ID NO: 75138 - DNA, 15 bp, Homo sapiens
actatcttgaaggca

SEQ ID NO: 75139 - DNA, 15 bp, Homo sapiens
aactatcttgaaggc

SEQ ID NO: 75140 - DNA, 15 bp, Homo sapiens
caactatcttgaagg

SEQ ID NO: 75141 - DNA, 15 bp, Homo sapiens
acaactatcttgaag

SEQ ID NO: 75142 - DNA, 15 bp, Homo sapiens
aacaactatcttgaa

SEQ ID NO: 75143 - DNA, 15 bp, Homo sapiens
caacaactatcttga

SEQ ID NO: 75144 - DNA, 15 bp, Homo sapiens
tcaacaactatcttg

SEQ ID NO: 75145 - DNA, 15 bp, Homo sapiens
ttcaacaactatctt

SEQ ID NO: 75146 - DNA, 15 bp, Homo sapiens
cttcaacaactatct

SEQ ID NO: 75147 - DNA, 15 bp, Homo sapiens
tcttcaacaactatc

SEQ ID NO: 75148 - DNA, 15 bp, Homo sapiens
gtcttcaacaactat

SEQ ID NO: 75149 - DNA, 15 bp, Homo sapiens
tgtcttcaacaacta

SEQ ID NO: 75150 - DNA, 15 bp, Homo sapiens
gtgtcttcaacaact

SEQ ID NO: 75151 - DNA, 15 bp, Homo sapiens
ggtgtcttcaacaac

SEQ ID NO: 75152 - DNA, 15 bp, Homo sapiens
tggtgtcttcaacaa

SEQ ID NO: 75153 - DNA, 15 bp, Homo sapiens
ctggtgtcttcaaca

SEQ ID NO: 75154 - DNA, 15 bp, Homo sapiens
tctggtgtcttcaac

SEQ ID NO: 75155 - DNA, 15 bp, Homo sapiens
ttctggtgtcttcaa

SEQ ID NO: 75156 - DNA, 15 bp, Homo sapiens
cttctggtgtcttca

SEQ ID NO: 75157 - DNA, 15 bp, Homo sapiens
tcttctggtgtcttc

SEQ ID NO: 75158 - DNA, 15 bp, Homo sapiens
ttcttctggtgtctt

SEQ ID NO: 75159 - DNA, 15 bp, Homo sapiens
cttcttctggtgtct

SEQ ID NO: 75160 - DNA, 15 bp, Homo sapiens
ccttcttctggtgtc

SEQ ID NO: 75161 - DNA, 15 bp, Homo sapiens
tccttcttctggtgt

SEQ ID NO: 75162 - DNA, 15 bp, Homo sapiens
ctccttcttctggtg

SEQ ID NO: 75163 - DNA, 15 bp, Homo sapiens
gctccttcttctggt

SEQ ID NO: 75164 - DNA, 15 bp, Homo sapiens
tgctccttcttctgg

SEQ ID NO: 75165 - DNA, 15 bp, Homo sapiens
atgctccttcttctg

SEQ ID NO: 75166 - DNA, 15 bp, Homo sapiens
catgctccttcttct

SEQ ID NO: 75167 - DNA, 15 bp, Homo sapiens
ccatgctccttcttc

SEQ ID NO: 75168 - DNA, 15 bp, Homo sapiens
gccatgctccttctt

SEQ ID NO: 75169 - DNA, 15 bp, Homo sapiens
tgccatgctccttct

SEQ ID NO: 75170 - DNA, 15 bp, Homo sapiens
ttgccatgctccttc

SEQ ID NO: 75171 - DNA, 15 bp, Homo sapiens
attgccatgctcctt

SEQ ID NO: 75172 - DNA, 15 bp, Homo sapiens
cattgccatgctcct

SEQ ID NO: 75173 - DNA, 15 bp, Homo sapiens
gcattgccatgctcc

SEQ ID NO: 75174 - DNA, 15 bp, Homo sapiens
ggcattgccatgctc

SEQ ID NO: 75175 - DNA, 15 bp, Homo sapiens
cggcattgccatgct

SEQ ID NO: 75176 - DNA, 15 bp, Homo sapiens
tcggcattgccatgc

SEQ ID NO: 75177 - DNA, 15 bp, Homo sapiens
ttcggcattgccatg

SEQ ID NO: 75178 - DNA, 15 bp, Homo sapiens
tttcggcattgccat

SEQ ID NO: 75179 - DNA, 15 bp, Homo sapiens
ttttcggcattgcca

SEQ ID NO: 75180 - DNA, 15 bp, Homo sapiens
gttttcggcattgcc

SEQ ID NO: 75181 - DNA, 15 bp, Homo sapiens
tgttttcggcattgc

SEQ ID NO: 75182 - DNA, 15 bp, Homo sapiens
gtgttttcggcattg

SEQ ID NO: 75183 - DNA, 15 bp, Homo sapiens
ggtgttttcggcatt

SEQ ID NO: 75184 - DNA, 15 bp, Homo sapiens
aggtgttttcggcat

SEQ ID NO: 75185 - DNA, 15 bp, Homo sapiens
taggtgttttcggca

SEQ ID NO: 75186 - DNA, 15 bp, Homo sapiens
ttaggtgttttcggc

SEQ ID NO: 75187 - DNA, 15 bp, Homo sapiens
cttaggtgttttcgg

SEQ ID NO: 75188 - DNA, 15 bp, Homo sapiens
tcttaggtgttttcg

SEQ ID NO: 75189 - DNA, 15 bp, Homo sapiens
atcttaggtgttttc

SEQ ID NO: 75190 - DNA, 15 bp, Homo sapiens
tatcttaggtgtttt

SEQ ID NO: 75191 - DNA, 15 bp, Homo sapiens
ttatcttaggtgttt

SEQ ID NO: 75192 - DNA, 15 bp, Homo sapiens
attatcttaggtgtt

SEQ ID NO: 75193 - DNA, 15 bp, Homo sapiens
tattatcttaggtgt

SEQ ID NO: 75194 - DNA, 15 bp, Homo sapiens
ctattatcttaggtg

SEQ ID NO: 75195 - DNA, 15 bp, Homo sapiens
cctattatcttaggt

SEQ ID NO: 75196 - DNA, 15 bp, Homo sapiens
acctattatcttagg

SEQ ID NO: 75197 - DNA, 15 bp, Homo sapiens
cacctattatcttag

SEQ ID NO: 75198 - DNA, 15 bp, Homo sapiens
tcacctattatctta

SEQ ID NO: 75199 - DNA, 15 bp, Homo sapiens
gtcacctattatctt

SEQ ID NO: 75200 - DNA, 15 bp, Homo sapiens
ggtcacctattatct

SEQ ID NO: 75201 - DNA, 15 bp, Homo sapiens
aggtcacctattatc

SEQ ID NO: 75202 - DNA, 15 bp, Homo sapiens
aaggtcacctattat

SEQ ID NO: 75203 - DNA, 15 bp, Homo sapiens
gaaggtcacctatta

SEQ ID NO: 75204 - DNA, 15 bp, Homo sapiens
tgaaggtcacctatt

SEQ ID NO: 75205 - DNA, 15 bp, Homo sapiens
ctgaaggtcacctat

SEQ ID NO: 75206 - DNA, 15 bp, Homo sapiens
actgaaggtcaccta

SEQ ID NO: 75207 - DNA, 15 bp, Homo sapiens
cactgaaggtcacct

SEQ ID NO: 75208 - DNA, 15 bp, Homo sapiens
acactgaaggtcacc

SEQ ID NO: 75209 - DNA, 15 bp, Homo sapiens
aacactgaaggtcac

SEQ ID NO: 75210 - DNA, 15 bp, Homo sapiens
caacactgaaggtca

SEQ ID NO: 75211 - DNA, 15 bp, Homo sapiens
ccaacactgaaggtc

SEQ ID NO: 75212 - DNA, 15 bp, Homo sapiens
gccaacactgaaggt

SEQ ID NO: 75213 - DNA, 15 bp, Homo sapiens
agccaacactgaagg

SEQ ID NO: 75214 - DNA, 15 bp, Homo sapiens
aagccaacactgaag

SEQ ID NO: 75215 - DNA, 15 bp, Homo sapiens
gaagccaacactgaa

SEQ ID NO: 75216 - DNA, 15 bp, Homo sapiens
agaagccaacactga

SEQ ID NO: 75217 - DNA, 15 bp, Homo sapiens
aagaagccaacactg

SEQ ID NO: 75218 - DNA, 15 bp, Homo sapiens
caagaagccaacact

SEQ ID NO: 75219 - DNA, 15 bp, Homo sapiens
gcaagaagccaacac

SEQ ID NO: 75220 - DNA, 15 bp, Homo sapiens
tgcaagaagccaaca

SEQ ID NO: 75221 - DNA, 15 bp, Homo sapiens
ctgcaagaagccaac

SEQ ID NO: 75222 - DNA, 15 bp, Homo sapiens
tctgcaagaagccaa

SEQ ID NO: 75223 - DNA, 15 bp, Homo sapiens
ttctgcaagaagcca

SEQ ID NO: 75224 - DNA, 15 bp, Homo sapiens
attctgcaagaagcc

SEQ ID NO: 75225 - DNA, 15 bp, Homo sapiens
gattctgcaagaagc

SEQ ID NO: 75226 - DNA, 15 bp, Homo sapiens
ggattctgcaagaag

SEQ ID NO: 75227 - DNA, 15 bp, Homo sapiens
tggattctgcaagaa

SEQ ID NO: 75228 - DNA, 15 bp, Homo sapiens
ctggattctgcaaga

SEQ ID NO: 75229 - DNA, 15 bp, Homo sapiens
tctggattctgcaag

SEQ ID NO: 75230 - DNA, 15 bp, Homo sapiens
ctctggattctgcaa

SEQ ID NO: 75231 - DNA, 15 bp, Homo sapiens
tctctggattctgca

SEQ ID NO: 75232 - DNA, 15 bp, Homo sapiens
ctctctggattctgc

SEQ ID NO: 75233 - DNA, 15 bp, Homo sapiens
tctctctggattctg

SEQ ID NO: 75234 - DNA, 15 bp, Homo sapiens
gtctctctggattct

SEQ ID NO: 75235 - DNA, 15 bp, Homo sapiens
tgtctctctggattc

SEQ ID NO: 75236 - DNA, 15 bp, Homo sapiens
ctgtctctctggatt

SEQ ID NO: 75237 - DNA, 15 bp, Homo sapiens
tctgtctctctggat

SEQ ID NO: 75238 - DNA, 15 bp, Homo sapiens
gtctgtctctctgga

SEQ ID NO: 75239 - DNA, 15 bp, Homo sapiens
agtctgtctctctgg

SEQ ID NO: 75240 - DNA, 15 bp, Homo sapiens
aagtctgtctctctg

SEQ ID NO: 75241 - DNA, 15 bp, Homo sapiens
caagtctgtctctct

SEQ ID NO: 75242 - DNA, 15 bp, Homo sapiens
gcaagtctgtctctc

SEQ ID NO: 75243 - DNA, 15 bp, Homo sapiens
agcaagtctgtctct

SEQ ID NO: 75244 - DNA, 15 bp, Homo sapiens
gagcaagtctgtctc

SEQ ID NO: 75245 - DNA, 15 bp, Homo sapiens
tgagcaagtctgtct

SEQ ID NO: 75246 - DNA, 15 bp, Homo sapiens
ctgagcaagtctgtc

SEQ ID NO: 75247 - DNA, 15 bp, Homo sapiens
actgagcaagtctgt

SEQ ID NO: 75248 - DNA, 15 bp, Homo sapiens
cactgagcaagtctg

SEQ ID NO: 75249 - DNA, 15 bp, Homo sapiens
ccactgagcaagtct

SEQ ID NO: 75250 - DNA, 15 bp, Homo sapiens
cccactgagcaagtc

SEQ ID NO: 75251 - DNA, 15 bp, Homo sapiens
tcccactgagcaagt

SEQ ID NO: 75252 - DNA, 15 bp, Homo sapiens
atcccactgagcaag

SEQ ID NO: 75253 - DNA, 15 bp, Homo sapiens
catcccactgagcaa

SEQ ID NO: 75254 - DNA, 15 bp, Homo sapiens
ccatcccactgagca

SEQ ID NO: 75255 - DNA, 15 bp, Homo sapiens
tccatcccactgagc

SEQ ID NO: 75256 - DNA, 15 bp, Homo sapiens
atccatcccactgag

SEQ ID NO: 75257 - DNA, 15 bp, Homo sapiens
catccatcccactga

SEQ ID NO: 75258 - DNA, 15 bp, Homo sapiens
ccatccatcccactg

SEQ ID NO: 75259 - DNA, 15 bp, Homo sapiens
gccatccatcccact

SEQ ID NO: 75260 - DNA, 15 bp, Homo sapiens
tgccatccatcccac

SEQ ID NO: 75261 - DNA, 15 bp, Homo sapiens
ttgccatccatccca

SEQ ID NO: 75262 - DNA, 15 bp, Homo sapiens
tttgccatccatccc

SEQ ID NO: 75263 - DNA, 15 bp, Homo sapiens
ctttgccatccatcc

SEQ ID NO: 75264 - DNA, 15 bp, Homo sapiens
cctttgccatccatc

SEQ ID NO: 75265 - DNA, 15 bp, Homo sapiens
ccctttgccatccat

SEQ ID NO: 75266 - DNA, 15 bp, Homo sapiens
accctttgccatcca

SEQ ID NO: 75267 - DNA, 15 bp, Homo sapiens
gaccctttgccatcc

SEQ ID NO: 75268 - DNA, 15 bp, Homo sapiens
ggaccctttgccatc

SEQ ID NO: 75269 - DNA, 15 bp, Homo sapiens
aggaccctttgccat

SEQ ID NO: 75270 - DNA, 15 bp, Homo sapiens
taggaccctttgcca

SEQ ID NO: 75271 - DNA, 15 bp, Homo sapiens
gtaggaccctttgcc

SEQ ID NO: 75272 - DNA, 15 bp, Homo sapiens
ggtaggaccctttgc

SEQ ID NO: 75273 - DNA, 15 bp, Homo sapiens
tggtaggaccctttg

SEQ ID NO: 75274 - DNA, 15 bp, Homo sapiens
ctggtaggacccttt

SEQ ID NO: 75275 - DNA, 15 bp, Homo sapiens
cctggtaggaccctt

SEQ ID NO: 75276 - DNA, 15 bp, Homo sapiens
acctggtaggaccct

SEQ ID NO: 75277 - DNA, 15 bp, Homo sapiens
cacctggtaggaccc

SEQ ID NO: 75278 - DNA, 15 bp, Homo sapiens
tcacctggtaggacc

SEQ ID NO: 75279 - DNA, 15 bp, Homo sapiens
ttcacctggtaggac

SEQ ID NO: 75280 - DNA, 15 bp, Homo sapiens
tttcacctggtagga

SEQ ID NO: 75281 - DNA, 15 bp, Homo sapiens
ctttcacctggtagg

SEQ ID NO: 75282 - DNA, 15 bp, Homo sapiens
cctttcacctggtag

SEQ ID NO: 75283 - DNA, 15 bp, Homo sapiens
gcctttcacctggta

SEQ ID NO: 75284 - DNA, 15 bp, Homo sapiens
agcctttcacctggt

SEQ ID NO: 75285 - DNA, 15 bp, Homo sapiens
cagcctttcacctgg

SEQ ID NO: 75286 - DNA, 15 bp, Homo sapiens
ccagcctttcacctg

SEQ ID NO: 75287 - DNA, 15 bp, Homo sapiens
tccagcctttcacct

SEQ ID NO: 75288 - DNA, 15 bp, Homo sapiens
ttccagcctttcacc

SEQ ID NO: 75289 - DNA, 15 bp, Homo sapiens
tttccagcctttcac

SEQ ID NO: 75290 - DNA, 15 bp, Homo sapiens
gtttccagcctttca

SEQ ID NO: 75291 - DNA, 15 bp, Homo sapiens
agtttccagcctttc

SEQ ID NO: 75292 - DNA, 15 bp, Homo sapiens
aagtttccagccttt

SEQ ID NO: 75293 - DNA, 15 bp, Homo sapiens
taagtttccagcctt

SEQ ID NO: 75294 - DNA, 15 bp, Homo sapiens
gtaagtttccagcct

SEQ ID NO: 75295 - DNA, 15 bp, Homo sapiens
tgtaagtttccagcc

SEQ ID NO: 75296 - DNA, 15 bp, Homo sapiens
gtgtaagtttccagc

SEQ ID NO: 75297 - DNA, 15 bp, Homo sapiens
tgtgtaagtttccag

SEQ ID NO: 75298 - DNA, 15 bp, Homo sapiens
ctgtgtaagtttcca

SEQ ID NO: 75299 - DNA, 15 bp, Homo sapiens
gctgtgtaagtttcc

SEQ ID NO: 75300 - DNA, 15 bp, Homo sapiens
tgctgtgtaagtttc

SEQ ID NO: 75301 - DNA, 15 bp, Homo sapiens
ttgctgtgtaagttt

SEQ ID NO: 75302 - DNA, 15 bp, Homo sapiens
gttgctgtgtaagtt

SEQ ID NO: 75303 - DNA, 15 bp, Homo sapiens
tgttgctgtgtaagt

SEQ ID NO: 75304 - DNA, 15 bp, Homo sapiens
ctgttgctgtgtaag

SEQ ID NO: 75305 - DNA, 15 bp, Homo sapiens
actgttgctgtgtaa

SEQ ID NO: 75306 - DNA, 15 bp, Homo sapiens
aactgttgctgtgta

SEQ ID NO: 75307 - DNA, 15 bp, Homo sapiens
aaactgttgctgtgt

SEQ ID NO: 75308 - DNA, 15 bp, Homo sapiens
caaactgttgctgtg

SEQ ID NO: 75309 - DNA, 15 bp, Homo sapiens
acaaactgttgctgt

SEQ ID NO: 75310 - DNA, 15 bp, Homo sapiens
cacaaactgttgctg

SEQ ID NO: 75311 - DNA, 15 bp, Homo sapiens
ccacaaactgttgct

SEQ ID NO: 75312 - DNA, 15 bp, Homo sapiens
gccacaaactgttgc

SEQ ID NO: 75313 - DNA, 15 bp, Homo sapiens
ggccacaaactgttg

SEQ ID NO: 75314 - DNA, 15 bp, Homo sapiens
gggccacaaactgtt

SEQ ID NO: 75315 - DNA, 15 bp, Homo sapiens
agggccacaaactgt

SEQ ID NO: 75316 - DNA, 15 bp, Homo sapiens
aagggccacaaactg

SEQ ID NO: 75317 - DNA, 15 bp, Homo sapiens
aaagggccacaaact

SEQ ID NO: 75318 - DNA, 15 bp, Homo sapiens
aaaagggccacaaac

SEQ ID NO: 75319 - DNA, 15 bp, Homo sapiens
caaaagggccacaaa

SEQ ID NO: 75320 - DNA, 15 bp, Homo sapiens
acaaaagggccacaa

SEQ ID NO: 75321 - DNA, 15 bp, Homo sapiens
cacaaaagggccaca

SEQ ID NO: 75322 - DNA, 15 bp, Homo sapiens
ccacaaaagggccac

SEQ ID NO: 75323 - DNA, 15 bp, Homo sapiens
tccacaaaagggcca

SEQ ID NO: 75324 - DNA, 15 bp, Homo sapiens
ttccacaaaagggcc

SEQ ID NO: 75325 - DNA, 15 bp, Homo sapiens
cttccacaaaagggc

SEQ ID NO: 75326 - DNA, 15 bp, Homo sapiens
tcttccacaaaaggg

SEQ ID NO: 75327 - DNA, 15 bp, Homo sapiens
ctcttccacaaaagg

SEQ ID NO: 75328 - DNA, 15 bp, Homo sapiens
tctcttccacaaaag

SEQ ID NO: 75329 - DNA, 15 bp, Homo sapiens
gtctcttccacaaaa

SEQ ID NO: 75330 - DNA, 15 bp, Homo sapiens
agtctcttccacaaa

SEQ ID NO: 75331 - DNA, 15 bp, Homo sapiens
cagtctcttccacaa

SEQ ID NO: 75332 - DNA, 15 bp, Homo sapiens
gcagtctcttccaca

SEQ ID NO: 75333 - DNA, 15 bp, Homo sapiens
agcagtctcttccac

SEQ ID NO: 75334 - DNA, 15 bp, Homo sapiens
tagcagtctcttcca

SEQ ID NO: 75335 - DNA, 15 bp, Homo sapiens
ttagcagtctcttcc

SEQ ID NO: 75336 - DNA, 15 bp, Homo sapiens
attagcagtctcttc

SEQ ID NO: 75337 - DNA, 15 bp, Homo sapiens
aattagcagtctctt

SEQ ID NO: 75338 - DNA, 15 bp, Homo sapiens
caattagcagtctct

SEQ ID NO: 75339 - DNA, 15 bp, Homo sapiens
gcaattagcagtctc

SEQ ID NO: 75340 - DNA, 15 bp, Homo sapiens
ggcaattagcagtct

SEQ ID NO: 75341 - DNA, 15 bp, Homo sapiens
tggcaattagcagtc

SEQ ID NO: 75342 - DNA, 15 bp, Homo sapiens
ctggcaattagcagt

SEQ ID NO: 75343 - DNA, 15 bp, Homo sapiens
tctggcaattagcag

SEQ ID NO: 75344 - DNA, 15 bp, Homo sapiens
gtctggcaattagca

SEQ ID NO: 75345 - DNA, 15 bp, Homo sapiens
cgtctggcaattagc

SEQ ID NO: 75346 - DNA, 15 bp, Homo sapiens
ccgtctggcaattag

SEQ ID NO: 75347 - DNA, 15 bp, Homo sapiens
tccgtctggcaatta

SEQ ID NO: 75348 - DNA, 15 bp, Homo sapiens
ctccgtctggcaatt

SEQ ID NO: 75349 - DNA, 15 bp, Homo sapiens
actccgtctggcaat

SEQ ID NO: 75350 - DNA, 15 bp, Homo sapiens
gactccgtctggcaa

SEQ ID NO: 75351 - DNA, 15 bp, Homo sapiens
cgactccgtctggca

SEQ ID NO: 75352 - DNA, 15 bp, Homo sapiens
ccgactccgtctggc

SEQ ID NO: 75353 - DNA, 15 bp, Homo sapiens
tccgactccgtctgg

SEQ ID NO: 75354 - DNA, 15 bp, Homo sapiens
ttccgactccgtctg

SEQ ID NO: 75355 - DNA, 15 bp, Homo sapiens
tttccgactccgtct

SEQ ID NO: 75356 - DNA, 15 bp, Homo sapiens
ctttccgactccgtc

SEQ ID NO: 75357 - DNA, 15 bp, Homo sapiens
cctttccgactccgt

SEQ ID NO: 75358 - DNA, 15 bp, Homo sapiens
tcctttccgactccg

SEQ ID NO: 75359 - DNA, 15 bp, Homo sapiens
atcctttccgactcc

SEQ ID NO: 75360 - DNA, 15 bp, Homo sapiens
aatcctttccgactc

SEQ ID NO: 75361 - DNA, 15 bp, Homo sapiens
aaatcctttccgact

SEQ ID NO: 75362 - DNA, 15 bp, Homo sapiens
aaaatcctttccgac

SEQ ID NO: 75363 - DNA, 15 bp, Homo sapiens
aaaaatcctttccga

SEQ ID NO: 75364 - DNA, 15 bp, Homo sapiens
aaaaaatcctttccg

SEQ ID NO: 75365 - DNA, 15 bp, Homo sapiens
caaaaaatcctttcc

SEQ ID NO: 75366 - DNA, 15 bp, Homo sapiens
gcaaaaaatcctttc

SEQ ID NO: 75367 - DNA, 15 bp, Homo sapiens
agcaaaaaatccttt

SEQ ID NO: 75368 - DNA, 15 bp, Homo sapiens
gagcaaaaaatcctt

SEQ ID NO: 75369 - DNA, 15 bp, Homo sapiens
tgagcaaaaaatcct

SEQ ID NO: 75370 - DNA, 15 bp, Homo sapiens
ctgagcaaaaaatcc

SEQ ID NO: 75371 - DNA, 15 bp, Homo sapiens
cctgagcaaaaaatc

SEQ ID NO: 75372 - DNA, 15 bp, Homo sapiens
acctgagcaaaaaat

SEQ ID NO: 75373 - DNA, 15 bp, Homo sapiens
cacctgagcaaaaaa

SEQ ID NO: 75374 - DNA, 15 bp, Homo sapiens
tcacctgagcaaaaa

SEQ ID NO: 75375 - DNA, 15 bp, Homo sapiens
ctcacctgagcaaaa

SEQ ID NO: 75376 - DNA, 15 bp, Homo sapiens
tctcacctgagcaaa

SEQ ID NO: 75377 - DNA, 15 bp, Homo sapiens
gtctcacctgagcaa

SEQ ID NO: 75378 - DNA, 15 bp, Homo sapiens
cgtctcacctgagca

SEQ ID NO: 75379 - DNA, 15 bp, Homo sapiens
acgtctcacctgagc

SEQ ID NO: 75380 - DNA, 15 bp, Homo sapiens
cacgtctcacctgag

SEQ ID NO: 75381 - DNA, 15 bp, Homo sapiens
gcacgtctcacctga

SEQ ID NO: 75382 - DNA, 15 bp, Homo sapiens
agcacgtctcacctg

SEQ ID NO: 75383 - DNA, 15 bp, Homo sapiens
cagcacgtctcacct

SEQ ID NO: 75384 - DNA, 15 bp, Homo sapiens
acagcacgtctcacc

SEQ ID NO: 75385 - DNA, 15 bp, Homo sapiens
aacagcacgtctcac

SEQ ID NO: 75386 - DNA, 15 bp, Homo sapiens
aaacagcacgtctca

SEQ ID NO: 75387 - DNA, 15 bp, Homo sapiens
aaaacagcacgtctc

SEQ ID NO: 75388 - DNA, 15 bp, Homo sapiens
gaaaacagcacgtct

SEQ ID NO: 75389 - DNA, 15 bp, Homo sapiens
cgaaaacagcacgtc

SEQ ID NO: 75390 - DNA, 15 bp, Homo sapiens
gcgaaaacagcacgt

SEQ ID NO: 75391 - DNA, 15 bp, Homo sapiens
ggcgaaaacagcacg

SEQ ID NO: 75392 - DNA, 15 bp, Homo sapiens
tggcgaaaacagcac

SEQ ID NO: 75393 - DNA, 15 bp, Homo sapiens
ctggcgaaaacagca

SEQ ID NO: 75394 - DNA, 15 bp, Homo sapiens
tctggcgaaaacagc

SEQ ID NO: 75395 - DNA, 15 bp, Homo sapiens
ctctggcgaaaacag

SEQ ID NO: 75396 - DNA, 15 bp, Homo sapiens
tctctggcgaaaaca

SEQ ID NO: 75397 - DNA, 15 bp, Homo sapiens
gtctctggcgaaaac

SEQ ID NO: 75398 - DNA, 15 bp, Homo sapiens
agtctctggcgaaaa

SEQ ID NO: 75399 - DNA, 15 bp, Homo sapiens
gagtctctggcgaaa

SEQ ID NO: 75400 - DNA, 15 bp, Homo sapiens
agagtctctggcgaa

SEQ ID NO: 75401 - DNA, 15 bp, Homo sapiens
cagagtctctggcga

SEQ ID NO: 75402 - DNA, 15 bp, Homo sapiens
ccagagtctctggcg

SEQ ID NO: 75403 - DNA, 15 bp, Homo sapiens
gccagagtctctggc

SEQ ID NO: 75404 - DNA, 15 bp, Homo sapiens
agccagagtctctgg

SEQ ID NO: 75405 - DNA, 15 bp, Homo sapiens
aagccagagtctctg

SEQ ID NO: 75406 - DNA, 15 bp, Homo sapiens
gaagccagagtctct

SEQ ID NO: 75407 - DNA, 15 bp, Homo sapiens
tgaagccagagtctc

SEQ ID NO: 75408 - DNA, 15 bp, Homo sapiens
atgaagccagagtct

SEQ ID NO: 75409 - DNA, 15 bp, Homo sapiens
catgaagccagagtc

SEQ ID NO: 75410 - DNA, 15 bp, Homo sapiens
ccatgaagccagagt

SEQ ID NO: 75411 - DNA, 15 bp, Homo sapiens
cccatgaagccagag

SEQ ID NO: 75412 - DNA, 15 bp, Homo sapiens
acccatgaagccaga

SEQ ID NO: 75413 - DNA, 15 bp, Homo sapiens
cacccatgaagccag

SEQ ID NO: 75414 - DNA, 15 bp, Homo sapiens
ccacccatgaagcca

SEQ ID NO: 75415 - DNA, 15 bp, Homo sapiens
cccacccatgaagcc

SEQ ID NO: 75416 - DNA, 15 bp, Homo sapiens
gcccacccatgaagc

SEQ ID NO: 75417 - DNA, 15 bp, Homo sapiens
agcccacccatgaag

SEQ ID NO: 75418 - DNA, 15 bp, Homo sapiens
cagcccacccatgaa

SEQ ID NO: 75419 - DNA, 15 bp, Homo sapiens
gcagcccacccatga

SEQ ID NO: 75420 - DNA, 15 bp, Homo sapiens
tgcagcccacccatg

SEQ ID NO: 75421 - DNA, 15 bp, Homo sapiens
ctgcagcccacccat

SEQ ID NO: 75422 - DNA, 15 bp, Homo sapiens
cctgcagcccaccca

SEQ ID NO: 75423 - DNA, 15 bp, Homo sapiens
gcctgcagcccaccc

SEQ ID NO: 75424 - DNA, 15 bp, Homo sapiens
agcctgcagcccacc

SEQ ID NO: 75425 - DNA, 15 bp, Homo sapiens
gagcctgcagcccac

SEQ ID NO: 75426 - DNA, 15 bp, Homo sapiens
agagcctgcagccca

SEQ ID NO: 75427 - DNA, 15 bp, Homo sapiens
cagagcctgcagccc

SEQ ID NO: 75428 - DNA, 15 bp, Homo sapiens
acagagcctgcagcc

SEQ ID NO: 75429 - DNA, 15 bp, Homo sapiens
cacagagcctgcagc

SEQ ID NO: 75430 - DNA, 15 bp, Homo sapiens
tcacagagcctgcag

SEQ ID NO: 75431 - DNA, 15 bp, Homo sapiens
gtcacagagcctgca

SEQ ID NO: 75432 - DNA, 15 bp, Homo sapiens
ggtcacagagcctgc

SEQ ID NO: 75433 - DNA, 15 bp, Homo sapiens
tggtcacagagcctg

SEQ ID NO: 75434 - DNA, 15 bp, Homo sapiens
ctggtcacagagcct

SEQ ID NO: 75435 - DNA, 15 bp, Homo sapiens
actggtcacagagcc

SEQ ID NO: 75436 - DNA, 15 bp, Homo sapiens
cactggtcacagagc

SEQ ID NO: 75437 - DNA, 15 bp, Homo sapiens
tcactggtcacagag

SEQ ID NO: 75438 - DNA, 15 bp, Homo sapiens
ttcactggtcacaga

SEQ ID NO: 75439 - DNA, 15 bp, Homo sapiens
cttcactggtcacag

SEQ ID NO: 75440 - DNA, 15 bp, Homo sapiens
ccttcactggtcaca

SEQ ID NO: 75441 - DNA, 15 bp, Homo sapiens
gccttcactggtcac

SEQ ID NO: 75442 - DNA, 15 bp, Homo sapiens
tgccttcactggtca

SEQ ID NO: 75443 - DNA, 15 bp, Homo sapiens
ctgccttcactggtc

SEQ ID NO: 75444 - DNA, 15 bp, Homo sapiens
cctgccttcactggt

SEQ ID NO: 75445 - DNA, 15 bp, Homo sapiens
tcctgccttcactgg

SEQ ID NO: 75446 - DNA, 15 bp, Homo sapiens
atcctgccttcactg

SEQ ID NO: 75447 - DNA, 15 bp, Homo sapiens
tatcctgccttcact

SEQ ID NO: 75448 - DNA, 15 bp, Homo sapiens
ctatcctgccttcac

SEQ ID NO: 75449 - DNA, 15 bp, Homo sapiens
gctatcctgccttca

SEQ ID NO: 75450 - DNA, 15 bp, Homo sapiens
tgctatcctgccttc

SEQ ID NO: 75451 - DNA, 15 bp, Homo sapiens
atgctatcctgcctt

SEQ ID NO: 75452 - DNA, 15 bp, Homo sapiens
gatgctatcctgcct

SEQ ID NO: 75453 - DNA, 15 bp, Homo sapiens
ggatgctatcctgcc

SEQ ID NO: 75454 - DNA, 15 bp, Homo sapiens
aggatgctatcctgc

SEQ ID NO: 75455 - DNA, 15 bp, Homo sapiens
caggatgctatcctg

SEQ ID NO: 75456 - DNA, 15 bp, Homo sapiens
ccaggatgctatcct

SEQ ID NO: 75457 - DNA, 15 bp, Homo sapiens
accaggatgctatcc

SEQ ID NO: 75458 - DNA, 15 bp, Homo sapiens
gaccaggatgctatc

SEQ ID NO: 75459 - DNA, 15 bp, Homo sapiens
tgaccaggatgctat

SEQ ID NO: 75460 - DNA, 15 bp, Homo sapiens
ttgaccaggatgcta

SEQ ID NO: 75461 - DNA, 15 bp, Homo sapiens
cttgaccaggatgct

SEQ ID NO: 75462 - DNA, 15 bp, Homo sapiens
tcttgaccaggatgc

SEQ ID NO: 75463 - DNA, 15 bp, Homo sapiens
atcttgaccaggatg

SEQ ID NO: 75464 - DNA, 15 bp, Homo sapiens
tatcttgaccaggat

SEQ ID NO: 75465 - DNA, 15 bp, Homo sapiens
atatcttgaccagga

SEQ ID NO: 75466 - DNA, 15 bp, Homo sapiens
catatcttgaccagg

SEQ ID NO: 75467 - DNA, 15 bp, Homo sapiens
ccatatcttgaccag

SEQ ID NO: 75468 - DNA, 15 bp, Homo sapiens
tccatatcttgacca

SEQ ID NO: 75469 - DNA, 15 bp, Homo sapiens
atccatatcttgacc

SEQ ID NO: 75470 - DNA, 15 bp, Homo sapiens
catccatatcttgac

SEQ ID NO: 75471 - DNA, 15 bp, Homo sapiens
gcatccatatcttga

SEQ ID NO: 75472 - DNA, 15 bp, Homo sapiens
ggcatccatatcttg

SEQ ID NO: 75473 - DNA, 15 bp, Homo sapiens
cggcatccatatctt

SEQ ID NO: 75474 - DNA, 15 bp, Homo sapiens
ccggcatccatatct

SEQ ID NO: 75475 - DNA, 15 bp, Homo sapiens
tccggcatccatatc

SEQ ID NO: 75476 - DNA, 15 bp, Homo sapiens
ctccggcatccatat

SEQ ID NO: 75477 - DNA, 15 bp, Homo sapiens
gctccggcatccata

SEQ ID NO: 75478 - DNA, 15 bp, Homo sapiens
ggctccggcatccat

SEQ ID NO: 75479 - DNA, 15 bp, Homo sapiens
tggctccggcatcca

SEQ ID NO: 75480 - DNA, 15 bp, Homo sapiens
ctggctccggcatcc

SEQ ID NO: 75481 - DNA, 15 bp, Homo sapiens
tctggctccggcatc

SEQ ID NO: 75482 - DNA, 15 bp, Homo sapiens
atctggctccggcat

SEQ ID NO: 75483 - DNA, 15 bp, Homo sapiens
aatctggctccggca

SEQ ID NO: 75484 - DNA, 15 bp, Homo sapiens
aaatctggctccggc

SEQ ID NO: 75485 - DNA, 15 bp, Homo sapiens
taaatctggctccgg

SEQ ID NO: 75486 - DNA, 15 bp, Homo sapiens
ataaatctggctccg

SEQ ID NO: 75487 - DNA, 15 bp, Homo sapiens
gataaatctggctcc

SEQ ID NO: 75488 - DNA, 15 bp, Homo sapiens
agataaatctggctc

SEQ ID NO: 75489 - DNA, 15 bp, Homo sapiens
cagataaatctggct

SEQ ID NO: 75490 - DNA, 15 bp, Homo sapiens
acagataaatctggc

SEQ ID NO: 75491 - DNA, 15 bp, Homo sapiens
tacagataaatctgg

SEQ ID NO: 75492 - DNA, 15 bp, Homo sapiens
atacagataaatctg

SEQ ID NO: 75493 - DNA, 15 bp, Homo sapiens
aatacagataaatct

SEQ ID NO: 75494 - DNA, 15 bp, Homo sapiens
aaatacagataaatc

SEQ ID NO: 75495 - DNA, 15 bp, Homo sapiens
gaaatacagataaat

SEQ ID NO: 75496 - DNA, 15 bp, Homo sapiens
tgaaatacagataaa

SEQ ID NO: 75497 - DNA, 15 bp, Homo sapiens
ttgaaatacagataa

SEQ ID NO: 75498 - DNA, 15 bp, Homo sapiens
attgaaatacagata

SEQ ID NO: 75499 - DNA, 15 bp, Homo sapiens
gattgaaatacagat

SEQ ID NO: 75500 - DNA, 15 bp, Homo sapiens
ggattgaaatacaga

SEQ ID NO: 75501 - DNA, 15 bp, Homo sapiens
gggattgaaatacag

SEQ ID NO: 75502 - DNA, 15 bp, Homo sapiens
tgggattgaaataca

SEQ ID NO: 75503 - DNA, 15 bp, Homo sapiens
ctgggattgaaatac

SEQ ID NO: 75504 - DNA, 15 bp, Homo sapiens
actgggattgaaata

SEQ ID NO: 75505 - DNA, 15 bp, Homo sapiens
aactgggattgaaat

SEQ ID NO: 75506 - DNA, 15 bp, Homo sapiens
gaactgggattgaaa

SEQ ID NO: 75507 - DNA, 15 bp, Homo sapiens
agaactgggattgaa

SEQ ID NO: 75508 - DNA, 15 bp, Homo sapiens
tagaactgggattga

SEQ ID NO: 75509 - DNA, 15 bp, Homo sapiens
atagaactgggattg

SEQ ID NO: 75510 - DNA, 15 bp, Homo sapiens
aatagaactgggatt

SEQ ID NO: 75511 - DNA, 15 bp, Homo sapiens
gaatagaactgggat

SEQ ID NO: 75512 - DNA, 15 bp, Homo sapiens
ggaatagaactggga

SEQ ID NO: 75513 - DNA, 15 bp, Homo sapiens
aggaatagaactggg

SEQ ID NO: 75514 - DNA, 15 bp, Homo sapiens
aaggaatagaactgg

SEQ ID NO: 75515 - DNA, 15 bp, Homo sapiens
caaggaatagaactg

SEQ ID NO: 75516 - DNA, 15 bp, Homo sapiens
gcaaggaatagaact

SEQ ID NO: 75517 - DNA, 15 bp, Homo sapiens
ggcaaggaatagaac

SEQ ID NO: 75518 - DNA, 15 bp, Homo sapiens
tggcaaggaatagaa

SEQ ID NO: 75519 - DNA, 15 bp, Homo sapiens
ctggcaaggaataga

SEQ ID NO: 75520 - DNA, 15 bp, Homo sapiens
actggcaaggaatag

SEQ ID NO: 75521 - DNA, 15 bp, Homo sapiens
aactggcaaggaata

SEQ ID NO: 75522 - DNA, 15 bp, Homo sapiens
caactggcaaggaat

SEQ ID NO: 75523 - DNA, 15 bp, Homo sapiens
acaactggcaaggaa

SEQ ID NO: 75524 - DNA, 15 bp, Homo sapiens
cacaactggcaagga

SEQ ID NO: 75525 - DNA, 15 bp, Homo sapiens
acacaactggcaagg

SEQ ID NO: 75526 - DNA, 15 bp, Homo sapiens
tacacaactggcaag

SEQ ID NO: 75527 - DNA, 15 bp, Homo sapiens
atacacaactggcaa

SEQ ID NO: 75528 - DNA, 15 bp, Homo sapiens
gatacacaactggca

SEQ ID NO: 75529 - DNA, 15 bp, Homo sapiens
ggatacacaactggc

SEQ ID NO: 75530 - DNA, 15 bp, Homo sapiens
cggatacacaactgg

SEQ ID NO: 75531 - DNA, 15 bp, Homo sapiens
gcggatacacaactg

SEQ ID NO: 75532 - DNA, 15 bp, Homo sapiens
agcggatacacaact

SEQ ID NO: 75533 - DNA, 15 bp, Homo sapiens
cagcggatacacaac

SEQ ID NO: 75534 - DNA, 15 bp, Homo sapiens
ccagcggatacacaa

SEQ ID NO: 75535 - DNA, 15 bp, Homo sapiens
gccagcggatacaca

SEQ ID NO: 75536 - DNA, 15 bp, Homo sapiens
tgccagcggatacac

SEQ ID NO: 75537 - DNA, 15 bp, Homo sapiens
ttgccagcggataca

SEQ ID NO: 75538 - DNA, 15 bp, Homo sapiens
cttgccagcggatac

SEQ ID NO: 75539 - DNA, 15 bp, Homo sapiens
acttgccagcggata

SEQ ID NO: 75540 - DNA, 15 bp, Homo sapiens
aacttgccagcggat

SEQ ID NO: 75541 - DNA, 15 bp, Homo sapiens
taacttgccagcgga

SEQ ID NO: 75542 - DNA, 15 bp, Homo sapiens
gtaacttgccagcgg

SEQ ID NO: 75543 - DNA, 15 bp, Homo sapiens
agtaacttgccagcg

SEQ ID NO: 75544 - DNA, 15 bp, Homo sapiens
aagtaacttgccagc

SEQ ID NO: 75545 - DNA, 15 bp, Homo sapiens
gaagtaacttgccag

SEQ ID NO: 75546 - DNA, 15 bp, Homo sapiens
agaagtaacttgcca

SEQ ID NO: 75547 - DNA, 15 bp, Homo sapiens
gagaagtaacttgcc

SEQ ID NO: 75548 - DNA, 15 bp, Homo sapiens
agagaagtaacttgc

SEQ ID NO: 75549 - DNA, 15 bp, Homo sapiens
tagagaagtaacttg

SEQ ID NO: 75550 - DNA, 15 bp, Homo sapiens
atagagaagtaactt

SEQ ID NO: 75551 - DNA, 15 bp, Homo sapiens
catagagaagtaact

SEQ ID NO: 75552 - DNA, 15 bp, Homo sapiens
gcatagagaagtaac

SEQ ID NO: 75553 - DNA, 15 bp, Homo sapiens
ggcatagagaagtaa

SEQ ID NO: 75554 - DNA, 15 bp, Homo sapiens
aggcatagagaagta

SEQ ID NO: 75555 - DNA, 15 bp, Homo sapiens
gaggcatagagaagt

SEQ ID NO: 75556 - DNA, 15 bp, Homo sapiens
tgaggcatagagaag

SEQ ID NO: 75557 - DNA, 15 bp, Homo sapiens
ttgaggcatagagaa

SEQ ID NO: 75558 - DNA, 15 bp, Homo sapiens
attgaggcatagaga

SEQ ID NO: 75559 - DNA, 15 bp, Homo sapiens
gattgaggcatagag

SEQ ID NO: 75560 - DNA, 15 bp, Homo sapiens
agattgaggcataga

SEQ ID NO: 75561 - DNA, 15 bp, Homo sapiens
gagattgaggcatag

SEQ ID NO: 75562 - DNA, 15 bp, Homo sapiens
ggagattgaggcata

SEQ ID NO: 75563 - DNA, 15 bp, Homo sapiens
aggagattgaggcat

SEQ ID NO: 75564 - DNA, 15 bp, Homo sapiens
gaggagattgaggca

SEQ ID NO: 75565 - DNA, 15 bp, Homo sapiens
tgaggagattgaggc

SEQ ID NO: 75566 - DNA, 15 bp, Homo sapiens
atgaggagattgagg

SEQ ID NO: 75567 - DNA, 15 bp, Homo sapiens
gatgaggagattgag

SEQ ID NO: 75568 - DNA, 15 bp, Homo sapiens
agatgaggagattga

SEQ ID NO: 75569 - DNA, 15 bp, Homo sapiens
cagatgaggagattg

SEQ ID NO: 75570 - DNA, 15 bp, Homo sapiens
acagatgaggagatt

SEQ ID NO: 75571 - DNA, 15 bp, Homo sapiens
tacagatgaggagat

SEQ ID NO: 75572 - DNA, 15 bp, Homo sapiens
ttacagatgaggaga

SEQ ID NO: 75573 - DNA, 15 bp, Homo sapiens
tttacagatgaggag

SEQ ID NO: 75574 - DNA, 15 bp, Homo sapiens
ttttacagatgagga

SEQ ID NO: 75575 - DNA, 15 bp, Homo sapiens
attttacagatgagg

SEQ ID NO: 75576 - DNA, 15 bp, Homo sapiens
cccattttacagatg

SEQ ID NO: 75577 - DNA, 15 bp, Homo sapiens
ccccattttacagat

SEQ ID NO: 75578 - DNA, 15 bp, Homo sapiens
tccccattttacaga

SEQ ID NO: 75579 - DNA, 15 bp, Homo sapiens
atccccattttacag

SEQ ID NO: 75580 - DNA, 15 bp, Homo sapiens
tatccccattttaca

SEQ ID NO: 75581 - DNA, 15 bp, Homo sapiens
ttatccccattttac

SEQ ID NO: 75582 - DNA, 15 bp, Homo sapiens
attatccccatttta

SEQ ID NO: 75583 - DNA, 15 bp, Homo sapiens
tattatccccatttt

SEQ ID NO: 75584 - DNA, 15 bp, Homo sapiens
ttattatccccattt

SEQ ID NO: 75585 - DNA, 15 bp, Homo sapiens
attattatccccatt

SEQ ID NO: 75586 - DNA, 15 bp, Homo sapiens
tattattatccccat

SEQ ID NO: 75587 - DNA, 15 bp, Homo sapiens
atattattatcccca

SEQ ID NO: 75588 - DNA, 15 bp, Homo sapiens
aatattattatcccc

SEQ ID NO: 75589 - DNA, 15 bp, Homo sapiens
taatattattatccc

SEQ ID NO: 75590 - DNA, 15 bp, Homo sapiens
gtaatattattatcc

SEQ ID NO: 75591 - DNA, 15 bp, Homo sapiens
ggtaatattattatc

SEQ ID NO: 75592 - DNA, 15 bp, Homo sapiens
aggtaatattattat

SEQ ID NO: 75593 - DNA, 15 bp, Homo sapiens
caggtaatattatta

SEQ ID NO: 75594 - DNA, 15 bp, Homo sapiens
gcaggtaatattatt

SEQ ID NO: 75595 - DNA, 15 bp, Homo sapiens
tgcaggtaatattat

SEQ ID NO: 75596 - DNA, 15 bp, Homo sapiens
ttgcaggtaatatta

SEQ ID NO: 75597 - DNA, 15 bp, Homo sapiens
attgcaggtaatatt

SEQ ID NO: 75598 - DNA, 15 bp, Homo sapiens
tattgcaggtaatat

SEQ ID NO: 75599 - DNA, 15 bp, Homo sapiens
gtattgcaggtaata

SEQ ID NO: 75600 - DNA, 15 bp, Homo sapiens
tgtattgcaggtaat

SEQ ID NO: 75601 - DNA, 15 bp, Homo sapiens
ctgtattgcaggtaa

SEQ ID NO: 75602 - DNA, 15 bp, Homo sapiens
cctgtattgcaggta

SEQ ID NO: 75603 - DNA, 15 bp, Homo sapiens
ccctgtattgcaggt

SEQ ID NO: 75604 - DNA, 15 bp, Homo sapiens
accctgtattgcagg

SEQ ID NO: 75605 - DNA, 15 bp, Homo sapiens
aaccctgtattgcag

SEQ ID NO: 75606 - DNA, 15 bp, Homo sapiens
caaccctgtattgca

SEQ ID NO: 75607 - DNA, 15 bp, Homo sapiens
acaaccctgtattgc

SEQ ID NO: 75608 - DNA, 15 bp, Homo sapiens
aacaaccctgtattg

SEQ ID NO: 75609 - DNA, 15 bp, Homo sapiens
taacaaccctgtatt

SEQ ID NO: 75610 - DNA, 15 bp, Homo sapiens
gtaacaaccctgtat

SEQ ID NO: 75611 - DNA, 15 bp, Homo sapiens
cgtaacaaccctgta

SEQ ID NO: 75612 - DNA, 15 bp, Homo sapiens
tcgtaacaaccctgt

SEQ ID NO: 75613 - DNA, 15 bp, Homo sapiens
ttcgtaacaaccctg

SEQ ID NO: 75614 - DNA, 15 bp, Homo sapiens
tttcgtaacaaccct

SEQ ID NO: 75615 - DNA, 15 bp, Homo sapiens
ttttcgtaacaaccc

SEQ ID NO: 75616 - DNA, 15 bp, Homo sapiens
attttcgtaacaacc

SEQ ID NO: 75617 - DNA, 15 bp, Homo sapiens
tattttcgtaacaac

SEQ ID NO: 75618 - DNA, 15 bp, Homo sapiens
ttattttcgtaacaa

SEQ ID NO: 75619 - DNA, 15 bp, Homo sapiens
tttattttcgtaaca

SEQ ID NO: 75620 - DNA, 15 bp, Homo sapiens
ttttattttcgtaac

SEQ ID NO: 75621 - DNA, 15 bp, Homo sapiens
tttttattttcgtaa

SEQ ID NO: 75622 - DNA, 15 bp, Homo sapiens
atttttattttcgta

SEQ ID NO: 75623 - DNA, 15 bp, Homo sapiens
catttttattttcgt

SEQ ID NO: 75624 - DNA, 15 bp, Homo sapiens
tcatttttattttcg

SEQ ID NO: 75625 - DNA, 15 bp, Homo sapiens
ttcatttttattttc

SEQ ID NO: 75626 - DNA, 15 bp, Homo sapiens
attcatttttatttt

SEQ ID NO: 75627 - DNA, 15 bp, Homo sapiens
tattcatttttattt

SEQ ID NO: 75628 - DNA, 15 bp, Homo sapiens
ctattcatttttatt

SEQ ID NO: 75629 - DNA, 15 bp, Homo sapiens
cctattcatttttat

SEQ ID NO: 75630 - DNA, 15 bp, Homo sapiens
acctattcattttta

SEQ ID NO: 75631 - DNA, 15 bp, Homo sapiens
cacctattcattttt

SEQ ID NO: 75632 - DNA, 15 bp, Homo sapiens
gcacctattcatttt

SEQ ID NO: 75633 - DNA, 15 bp, Homo sapiens
agcacctattcattt

SEQ ID NO: 75634 - DNA, 15 bp, Homo sapiens
aagcacctattcatt

SEQ ID NO: 75635 - DNA, 15 bp, Homo sapiens
taagcacctattcat

SEQ ID NO: 75636 - DNA, 15 bp, Homo sapiens
ctaagcacctattca

SEQ ID NO: 75637 - DNA, 15 bp, Homo sapiens
tctaagcacctattc

SEQ ID NO: 75638 - DNA, 15 bp, Homo sapiens
ttctaagcacctatt

SEQ ID NO: 75639 - DNA, 15 bp, Homo sapiens
attctaagcacctat

SEQ ID NO: 75640 - DNA, 15 bp, Homo sapiens
cattctaagcaccta

SEQ ID NO: 75641 - DNA, 15 bp, Homo sapiens
ccattctaagcacct

SEQ ID NO: 75642 - DNA, 15 bp, Homo sapiens
cccattctaagcacc

SEQ ID NO: 75643 - DNA, 15 bp, Homo sapiens
ccccattctaagcac

SEQ ID NO: 75644 - DNA, 15 bp, Homo sapiens
gccccattctaagca

SEQ ID NO: 75645 - DNA, 15 bp, Homo sapiens
ggccccattctaagc

SEQ ID NO: 75646 - DNA, 15 bp, Homo sapiens
aggccccattctaag

SEQ ID NO: 75647 - DNA, 15 bp, Homo sapiens
caggccccattctaa

SEQ ID NO: 75648 - DNA, 15 bp, Homo sapiens
tcaggccccattcta

SEQ ID NO: 75649 - DNA, 15 bp, Homo sapiens
gtcaggccccattct

SEQ ID NO: 75650 - DNA, 15 bp, Homo sapiens
tgtcaggccccattc

SEQ ID NO: 75651 - DNA, 15 bp, Homo sapiens
atgtcaggccccatt

SEQ ID NO: 75652 - DNA, 15 bp, Homo sapiens
aatgtcaggccccat

SEQ ID NO: 75653 - DNA, 15 bp, Homo sapiens
taatgtcaggcccca

SEQ ID NO: 75654 - DNA, 15 bp, Homo sapiens
ctaatgtcaggcccc

SEQ ID NO: 75655 - DNA, 15 bp, Homo sapiens
actaatgtcaggccc

SEQ ID NO: 75656 - DNA, 15 bp, Homo sapiens
tactaatgtcaggcc

SEQ ID NO: 75657 - DNA, 15 bp, Homo sapiens
ttactaatgtcaggc

SEQ ID NO: 75658 - DNA, 15 bp, Homo sapiens
cttactaatgtcagg

SEQ ID NO: 75659 - DNA, 15 bp, Homo sapiens
acttactaatgtcag

SEQ ID NO: 75660 - DNA, 15 bp, Homo sapiens
cacttactaatgtca

SEQ ID NO: 75661 - DNA, 15 bp, Homo sapiens
gcacttactaatgtc

SEQ ID NO: 75662 - DNA, 15 bp, Homo sapiens
agcacttactaatgt

SEQ ID NO: 75663 - DNA, 15 bp, Homo sapiens
aagcacttactaatg

SEQ ID NO: 75664 - DNA, 15 bp, Homo sapiens
taagcacttactaat

SEQ ID NO: 75665 - DNA, 15 bp, Homo sapiens
ctaagcacttactaa

SEQ ID NO: 75666 - DNA, 15 bp, Homo sapiens
actaagcacttacta

SEQ ID NO: 75667 - DNA, 15 bp, Homo sapiens
aactaagcacttact

SEQ ID NO: 75668 - DNA, 15 bp, Homo sapiens
aaactaagcacttac

SEQ ID NO: 75669 - DNA, 15 bp, Homo sapiens
aaaactaagcactta

SEQ ID NO: 75670 - DNA, 15 bp, Homo sapiens
caaaactaagcactt

SEQ ID NO: 75671 - DNA, 15 bp, Homo sapiens
acaaaactaagcact

SEQ ID NO: 75672 - DNA, 15 bp, Homo sapiens
cacaaaactaagcac

SEQ ID NO: 75673 - DNA, 15 bp, Homo sapiens
acacaaaactaagca

SEQ ID NO: 75674 - DNA, 15 bp, Homo sapiens
cacacaaaactaagc

SEQ ID NO: 75675 - DNA, 15 bp, Homo sapiens
acacacaaaactaag

SEQ ID NO: 75676 - DNA, 15 bp, Homo sapiens
cacacacaaaactaa

SEQ ID NO: 75677 - DNA, 15 bp, Homo sapiens
acacacacaaaacta

SEQ ID NO: 75678 - DNA, 15 bp, Homo sapiens
tacacacacaaaact

SEQ ID NO: 75679 - DNA, 15 bp, Homo sapiens
atacacacacaaaac

SEQ ID NO: 75680 - DNA, 15 bp, Homo sapiens
tatacacacacaaaa

SEQ ID NO: 75681 - DNA, 15 bp, Homo sapiens
atatacacacacaaa

SEQ ID NO: 75682 - DNA, 15 bp, Homo sapiens
catatacacacacaa

SEQ ID NO: 75683 - DNA, 15 bp, Homo sapiens
acatatacacacaca

SEQ ID NO: 75684 - DNA, 15 bp, Homo sapiens
aacatatacacacac

SEQ ID NO: 75685 - DNA, 15 bp, Homo sapiens
taacatatacacaca

SEQ ID NO: 75686 - DNA, 15 bp, Homo sapiens
ataacatatacacac

SEQ ID NO: 75687 - DNA, 15 bp, Homo sapiens
aataacatatacaca

SEQ ID NO: 75688 - DNA, 15 bp, Homo sapiens
aaataacatatacac

SEQ ID NO: 75689 - DNA, 15 bp, Homo sapiens
aaaataacatataca

SEQ ID NO: 75690 - DNA, 15 bp, Homo sapiens
aaaaataacatatac

SEQ ID NO: 75691 - DNA, 15 bp, Homo sapiens
taaaaataacatata

SEQ ID NO: 75692 - DNA, 15 bp, Homo sapiens
ataaaaataacatat

SEQ ID NO: 75693 - DNA, 15 bp, Homo sapiens
aataaaaataacata

SEQ ID NO: 75694 - DNA, 15 bp, Homo sapiens
aaataaaaataacat

SEQ ID NO: 75695 - DNA, 15 bp, Homo sapiens
aaaataaaaataaca

SEQ ID NO: 75696 - DNA, 15 bp, Homo sapiens
caaaataaaaataac

SEQ ID NO: 75697 - DNA, 15 bp, Homo sapiens
ccaaaataaaaataa

SEQ ID NO: 75698 - DNA, 15 bp, Homo sapiens
tccaaaataaaaata

SEQ ID NO: 75699 - DNA, 15 bp, Homo sapiens
ctccaaaataaaaat

SEQ ID NO: 75700 - DNA, 15 bp, Homo sapiens
cctccaaaataaaaa

SEQ ID NO: 75701 - DNA, 15 bp, Homo sapiens
tcctccaaaataaaa

SEQ ID NO: 75702 - DNA, 15 bp, Homo sapiens
ctcctccaaaataaa

SEQ ID NO: 75703 - DNA, 15 bp, Homo sapiens
tctcctccaaaataa

SEQ ID NO: 75704 - DNA, 15 bp, Homo sapiens
ttctcctccaaaata

SEQ ID NO: 75705 - DNA, 15 bp, Homo sapiens
gttctcctccaaaat

SEQ ID NO: 75706 - DNA, 15 bp, Homo sapiens
tgttctcctccaaaa

SEQ ID NO: 75707 - DNA, 15 bp, Homo sapiens
atgttctcctccaaa

SEQ ID NO: 75708 - DNA, 15 bp, Homo sapiens
tatgttctcctccaa

SEQ ID NO: 75709 - DNA, 15 bp, Homo sapiens
ttatgttctcctcca

SEQ ID NO: 75710 - DNA, 15 bp, Homo sapiens
tttatgttctcctcc

SEQ ID NO: 75711 - DNA, 15 bp, Homo sapiens
ttttatgttctcctc

SEQ ID NO: 75712 - DNA, 15 bp, Homo sapiens
tttttatgttctcct

SEQ ID NO: 75713 - DNA, 15 bp, Homo sapiens
ctttttatgttctcc

SEQ ID NO: 75714 - DNA, 15 bp, Homo sapiens
cctttttatgttctc

SEQ ID NO: 75715 - DNA, 15 bp, Homo sapiens
tcctttttatgttct

SEQ ID NO: 75716 - DNA, 15 bp, Homo sapiens
gtcctttttatgttc

SEQ ID NO: 75717 - DNA, 15 bp, Homo sapiens
tgtcctttttatgtt

SEQ ID NO: 75718 - DNA, 15 bp, Homo sapiens
ttgtcctttttatgt

SEQ ID NO: 75719 - DNA, 15 bp, Homo sapiens
tttgtcctttttatg

SEQ ID NO: 75720 - DNA, 15 bp, Homo sapiens
ctttgtcctttttat

SEQ ID NO: 75721 - DNA, 15 bp, Homo sapiens
actttgtccttttta

SEQ ID NO: 75722 - DNA, 15 bp, Homo sapiens
cactttgtccttttt

SEQ ID NO: 75723 - DNA, 15 bp, Homo sapiens
acactttgtcctttt

SEQ ID NO: 75724 - DNA, 15 bp, Homo sapiens
tacactttgtccttt

SEQ ID NO: 75725 - DNA, 15 bp, Homo sapiens
ctacactttgtcctt

SEQ ID NO: 75726 - DNA, 15 bp, Homo sapiens
tctacactttgtcct

SEQ ID NO: 75727 - DNA, 15 bp, Homo sapiens
ttctacactttgtcc

SEQ ID NO: 75728 - DNA, 15 bp, Homo sapiens
tttctacactttgtc

SEQ ID NO: 75729 - DNA, 15 bp, Homo sapiens
ttttctacactttgt

SEQ ID NO: 75730 - DNA, 15 bp, Homo sapiens
tttttctacactttg

SEQ ID NO: 75731 - DNA, 15 bp, Homo sapiens
gtttttctacacttt

SEQ ID NO: 75732 - DNA, 15 bp, Homo sapiens
agtttttctacactt

SEQ ID NO: 75733 - DNA, 15 bp, Homo sapiens
cagtttttctacact

SEQ ID NO: 75734 - DNA, 15 bp, Homo sapiens
ccagtttttctacac

SEQ ID NO: 75735 - DNA, 15 bp, Homo sapiens
accagtttttctaca

SEQ ID NO: 75736 - DNA, 15 bp, Homo sapiens
aaccagtttttctac

SEQ ID NO: 75737 - DNA, 15 bp, Homo sapiens
caaccagtttttcta

SEQ ID NO: 75738 - DNA, 15 bp, Homo sapiens
ccaaccagtttttct

SEQ ID NO: 75739 - DNA, 15 bp, Homo sapiens
cccaaccagtttttc

SEQ ID NO: 75740 - DNA, 15 bp, Homo sapiens
acccaaccagttttt

SEQ ID NO: 75741 - DNA, 15 bp, Homo sapiens
cacccaaccagtttt

SEQ ID NO: 75742 - DNA, 15 bp, Homo sapiens
acacccaaccagttt

SEQ ID NO: 75743 - DNA, 15 bp, Homo sapiens
tacacccaaccagtt

SEQ ID NO: 75744 - DNA, 15 bp, Homo sapiens
atacacccaaccagt

SEQ ID NO: 75745 - DNA, 15 bp, Homo sapiens
aatacacccaaccag

SEQ ID NO: 75746 - DNA, 15 bp, Homo sapiens
gaatacacccaacca

SEQ ID NO: 75747 - DNA, 15 bp, Homo sapiens
tgaatacacccaacc

SEQ ID NO: 75748 - DNA, 15 bp, Homo sapiens
ctgaatacacccaac

SEQ ID NO: 75749 - DNA, 15 bp, Homo sapiens
gctgaatacacccaa

SEQ ID NO: 75750 - DNA, 15 bp, Homo sapiens
agctgaatacaccca

SEQ ID NO: 75751 - DNA, 15 bp, Homo sapiens
cagctgaatacaccc

SEQ ID NO: 75752 - DNA, 15 bp, Homo sapiens
acagctgaatacacc

SEQ ID NO: 75753 - DNA, 15 bp, Homo sapiens
gacagctgaatacac

SEQ ID NO: 75754 - DNA, 15 bp, Homo sapiens
tgacagctgaataca

SEQ ID NO: 75755 - DNA, 15 bp, Homo sapiens
atgacagctgaatac

SEQ ID NO: 75756 - DNA, 15 bp, Homo sapiens
tatgacagctgaata

SEQ ID NO: 75757 - DNA, 15 bp, Homo sapiens
ttatgacagctgaat

SEQ ID NO: 75758 - DNA, 15 bp, Homo sapiens
gttatgacagctgaa

SEQ ID NO: 75759 - DNA, 15 bp, Homo sapiens
tgttatgacagctga

SEQ ID NO: 75760 - DNA, 15 bp, Homo sapiens
atgttatgacagctg

SEQ ID NO: 75761 - DNA, 15 bp, Homo sapiens
catgttatgacagct

SEQ ID NO: 75762 - DNA, 15 bp, Homo sapiens
tcatgttatgacagc

SEQ ID NO: 75763 - DNA, 15 bp, Homo sapiens
ctcatgttatgacag

SEQ ID NO: 75764 - DNA, 15 bp, Homo sapiens
tctcatgttatgaca

SEQ ID NO: 75765 - DNA, 15 bp, Homo sapiens
ctctcatgttatgac

SEQ ID NO: 75766 - DNA, 15 bp, Homo sapiens
actctcatgttatga

SEQ ID NO: 75767 - DNA, 15 bp, Homo sapiens
aactctcatgttatg

SEQ ID NO: 75768 - DNA, 15 bp, Homo sapiens
caactctcatgttat

SEQ ID NO: 75769 - DNA, 15 bp, Homo sapiens
acaactctcatgtta

SEQ ID NO: 75770 - DNA, 15 bp, Homo sapiens
aacaactctcatgtt

SEQ ID NO: 75771 - DNA, 15 bp, Homo sapiens
taacaactctcatgt

SEQ ID NO: 75772 - DNA, 15 bp, Homo sapiens
ataacaactctcatg

SEQ ID NO: 75773 - DNA, 15 bp, Homo sapiens
cataacaactctcat

SEQ ID NO: 75774 - DNA, 15 bp, Homo sapiens
gcataacaactctca

SEQ ID NO: 75775 - DNA, 15 bp, Homo sapiens
ggcataacaactctc

SEQ ID NO: 75776 - DNA, 15 bp, Homo sapiens
gggcataacaactct

SEQ ID NO: 75777 - DNA, 15 bp, Homo sapiens
tgggcataacaactc

SEQ ID NO: 75778 - DNA, 15 bp, Homo sapiens
ctgggcataacaact

SEQ ID NO: 75779 - DNA, 15 bp, Homo sapiens
tctgggcataacaac

SEQ ID NO: 75780 - DNA, 15 bp, Homo sapiens
atctgggcataacaa

SEQ ID NO: 75781 - DNA, 15 bp, Homo sapiens
catctgggcataaca

SEQ ID NO: 75782 - DNA, 15 bp, Homo sapiens
gcatctgggcataac

SEQ ID NO: 75783 - DNA, 15 bp, Homo sapiens
tgcatctgggcataa

SEQ ID NO: 75784 - DNA, 15 bp, Homo sapiens
gtgcatctgggcata

SEQ ID NO: 75785 - DNA, 15 bp, Homo sapiens
agtgcatctgggcat

SEQ ID NO: 75786 - DNA, 15 bp, Homo sapiens
aagtgcatctgggca

SEQ ID NO: 75787 - DNA, 15 bp, Homo sapiens
caagtgcatctgggc

SEQ ID NO: 75788 - DNA, 15 bp, Homo sapiens
tcaagtgcatctggg

SEQ ID NO: 75789 - DNA, 15 bp, Homo sapiens
gtcaagtgcatctgg

SEQ ID NO: 75790 - DNA, 15 bp, Homo sapiens
tgtcaagtgcatctg

SEQ ID NO: 75791 - DNA, 15 bp, Homo sapiens
atgtcaagtgcatct

SEQ ID NO: 75792 - DNA, 15 bp, Homo sapiens
catgtcaagtgcatc

SEQ ID NO: 75793 - DNA, 15 bp, Homo sapiens
acatgtcaagtgcat

SEQ ID NO: 75794 - DNA, 15 bp, Homo sapiens
cacatgtcaagtgca

SEQ ID NO: 75795 - DNA, 15 bp, Homo sapiens
tcacatgtcaagtgc

SEQ ID NO: 75796 - DNA, 15 bp, Homo sapiens
ttcacatgtcaagtg

SEQ ID NO: 75797 - DNA, 15 bp, Homo sapiens
attcacatgtcaagt

SEQ ID NO: 75798 - DNA, 15 bp, Homo sapiens
aattcacatgtcaag

SEQ ID NO: 75799 - DNA, 15 bp, Homo sapiens
aaattcacatgtcaa

SEQ ID NO: 75800 - DNA, 15 bp, Homo sapiens
taaattcacatgtca

SEQ ID NO: 75801 - DNA, 15 bp, Homo sapiens
ataaattcacatgtc

SEQ ID NO: 75802 - DNA, 15 bp, Homo sapiens
aataaattcacatgt

SEQ ID NO: 75803 - DNA, 15 bp, Homo sapiens
taataaattcacatg

SEQ ID NO: 75804 - DNA, 15 bp, Homo sapiens
ctaataaattcacat

SEQ ID NO: 75805 - DNA, 15 bp, Homo sapiens
tctaataaattcaca

SEQ ID NO: 75806 - DNA, 15 bp, Homo sapiens
ttctaataaattcac

SEQ ID NO: 75807 - DNA, 15 bp, Homo sapiens
tttctaataaattca

SEQ ID NO: 75808 - DNA, 15 bp, Homo sapiens
gtttctaataaattc

SEQ ID NO: 75809 - DNA, 15 bp, Homo sapiens
tgtttctaataaatt

SEQ ID NO: 75810 - DNA, 15 bp, Homo sapiens
atgtttctaataaat

SEQ ID NO: 75811 - DNA, 15 bp, Homo sapiens
catgtttctaataaa

SEQ ID NO: 75812 - DNA, 15 bp, Homo sapiens
tcatgtttctaataa

SEQ ID NO: 75813 - DNA, 15 bp, Homo sapiens
atcatgtttctaata

SEQ ID NO: 75814 - DNA, 15 bp, Homo sapiens
aatcatgtttctaat

SEQ ID NO: 75815 - DNA, 15 bp, Homo sapiens
aaatcatgtttctaa

SEQ ID NO: 75816 - DNA, 15 bp, Homo sapiens
aaaatcatgtttcta

SEQ ID NO: 75817 - DNA, 15 bp, Homo sapiens
aaaaatcatgtttct

SEQ ID NO: 75818 - DNA, 15 bp, Homo sapiens
gaaaaatcatgtttc

SEQ ID NO: 75819 - DNA, 15 bp, Homo sapiens
agaaaaatcatgttt

SEQ ID NO: 75820 - DNA, 15 bp, Homo sapiens
gagaaaaatcatgtt

SEQ ID NO: 75821 - DNA, 15 bp, Homo sapiens
agagaaaaatcatgt

SEQ ID NO: 75822 - DNA, 15 bp, Homo sapiens
cagagaaaaatcatg

SEQ ID NO: 75823 - DNA, 15 bp, Homo sapiens
tcagagaaaaatcat

SEQ ID NO: 75824 - DNA, 15 bp, Homo sapiens
ctcagagaaaaatca

SEQ ID NO: 75825 - DNA, 15 bp, Homo sapiens
actcagagaaaaatc

SEQ ID NO: 75826 - DNA, 15 bp, Homo sapiens
aactcagagaaaaat

SEQ ID NO: 75827 - DNA, 15 bp, Homo sapiens
caactcagagaaaaa

SEQ ID NO: 75828 - DNA, 15 bp, Homo sapiens
tcaactcagagaaaa

SEQ ID NO: 75829 - DNA, 15 bp, Homo sapiens
atcaactcagagaaa

SEQ ID NO: 75830 - DNA, 15 bp, Homo sapiens
catcaactcagagaa

SEQ ID NO: 75831 - DNA, 15 bp, Homo sapiens
acatcaactcagaga

SEQ ID NO: 75832 - DNA, 15 bp, Homo sapiens
aacatcaactcagag

SEQ ID NO: 75833 - DNA, 15 bp, Homo sapiens
aaacatcaactcaga

SEQ ID NO: 75834 - DNA, 15 bp, Homo sapiens
taaacatcaactcag

SEQ ID NO: 75835 - DNA, 15 bp, Homo sapiens
ttaaacatcaactca

SEQ ID NO: 75836 - DNA, 15 bp, Homo sapiens
gttaaacatcaactc

SEQ ID NO: 75837 - DNA, 15 bp, Homo sapiens
agttaaacatcaact

SEQ ID NO: 75838 - DNA, 15 bp, Homo sapiens
gagttaaacatcaac

SEQ ID NO: 75839 - DNA, 15 bp, Homo sapiens
tgagttaaacatcaa

SEQ ID NO: 75840 - DNA, 15 bp, Homo sapiens
ttgagttaaacatca

SEQ ID NO: 75841 - DNA, 15 bp, Homo sapiens
tttgagttaaacatc

SEQ ID NO: 75842 - DNA, 15 bp, Homo sapiens
gtttgagttaaacat

SEQ ID NO: 75843 - DNA, 15 bp, Homo sapiens
agtttgagttaaaca

SEQ ID NO: 75844 - DNA, 15 bp, Homo sapiens
cagtttgagttaaac

SEQ ID NO: 75845 - DNA, 15 bp, Homo sapiens
tcagtttgagttaaa

SEQ ID NO: 75846 - DNA, 15 bp, Homo sapiens
atcagtttgagttaa

SEQ ID NO: 75847 - DNA, 15 bp, Homo sapiens
tatcagtttgagtta

SEQ ID NO: 75848 - DNA, 15 bp, Homo sapiens
ctatcagtttgagtt

SEQ ID NO: 75849 - DNA, 15 bp, Homo sapiens
tctatcagtttgagt

SEQ ID NO: 75850 - DNA, 15 bp, Homo sapiens
ttctatcagtttgag

SEQ ID NO: 75851 - DNA, 15 bp, Homo sapiens
tttctatcagtttga

SEQ ID NO: 75852 - DNA, 15 bp, Homo sapiens
ttttctatcagtttg

SEQ ID NO: 75853 - DNA, 15 bp, Homo sapiens
cttttctatcagttt

SEQ ID NO: 75854 - DNA, 15 bp, Homo sapiens
tcttttctatcagtt

SEQ ID NO: 75855 - DNA, 15 bp, Homo sapiens
atcttttctatcagt

SEQ ID NO: 75856 - DNA, 15 bp, Homo sapiens
tatcttttctatcag

SEQ ID NO: 75857 - DNA, 15 bp, Homo sapiens
ctatcttttctatca

SEQ ID NO: 75858 - DNA, 15 bp, Homo sapiens
cctatcttttctatc

SEQ ID NO: 75859 - DNA, 15 bp, Homo sapiens
acctatcttttctat

SEQ ID NO: 75860 - DNA, 15 bp, Homo sapiens
gacctatcttttcta

SEQ ID NO: 75861 - DNA, 15 bp, Homo sapiens
tgacctatcttttct

SEQ ID NO: 75862 - DNA, 15 bp, Homo sapiens
ctgacctatcttttc

SEQ ID NO: 75863 - DNA, 15 bp, Homo sapiens
tctgacctatctttt

SEQ ID NO: 75864 - DNA, 15 bp, Homo sapiens
ttctgacctatcttt

SEQ ID NO: 75865 - DNA, 15 bp, Homo sapiens
attctgacctatctt

SEQ ID NO: 75866 - DNA, 15 bp, Homo sapiens
tattctgacctatct

SEQ ID NO: 75867 - DNA, 15 bp, Homo sapiens
atattctgacctatc

SEQ ID NO: 75868 - DNA, 15 bp, Homo sapiens
tatattctgacctat

SEQ ID NO: 75869 - DNA, 15 bp, Homo sapiens
ctatattctgaccta

SEQ ID NO: 75870 - DNA, 15 bp, Homo sapiens
actatattctgacct

SEQ ID NO: 75871 - DNA, 15 bp, Homo sapiens
aactatattctgacc

SEQ ID NO: 75872 - DNA, 15 bp, Homo sapiens
caactatattctgac

SEQ ID NO: 75873 - DNA, 15 bp, Homo sapiens
ccaactatattctga

SEQ ID NO: 75874 - DNA, 15 bp, Homo sapiens
gccaactatattctg

SEQ ID NO: 75875 - DNA, 15 bp, Homo sapiens
ggccaactatattct

SEQ ID NO: 75876 - DNA, 15 bp, Homo sapiens
tggccaactatattc

SEQ ID NO: 75877 - DNA, 15 bp, Homo sapiens
ttggccaactatatt

SEQ ID NO: 75878 - DNA, 15 bp, Homo sapiens
gttggccaactatat

SEQ ID NO: 75879 - DNA, 15 bp, Homo sapiens
tgttggccaactata

SEQ ID NO: 75880 - DNA, 15 bp, Homo sapiens
ctgttggccaactat

SEQ ID NO: 75881 - DNA, 15 bp, Homo sapiens
tctgttggccaacta

SEQ ID NO: 75882 - DNA, 15 bp, Homo sapiens
ctctgttggccaact

SEQ ID NO: 75883 - DNA, 15 bp, Homo sapiens
tctctgttggccaac

SEQ ID NO: 75884 - DNA, 15 bp, Homo sapiens
ttctctgttggccaa

SEQ ID NO: 75885 - DNA, 15 bp, Homo sapiens
cttctctgttggcca

SEQ ID NO: 75886 - DNA, 15 bp, Homo sapiens
tcttctctgttggcc

SEQ ID NO: 75887 - DNA, 15 bp, Homo sapiens
gtcttctctgttggc

SEQ ID NO: 75888 - DNA, 15 bp, Homo sapiens
agtcttctctgttgg

SEQ ID NO: 75889 - DNA, 15 bp, Homo sapiens
aagtcttctctgttg

SEQ ID NO: 75890 - DNA, 15 bp, Homo sapiens
caagtcttctctgtt

SEQ ID NO: 75891 - DNA, 15 bp, Homo sapiens
acaagtcttctctgt

SEQ ID NO: 75892 - DNA, 15 bp, Homo sapiens
aacaagtcttctctg

SEQ ID NO: 75893 - DNA, 15 bp, Homo sapiens
taacaagtcttctct

SEQ ID NO: 75894 - DNA, 15 bp, Homo sapiens
ctaacaagtcttctc

SEQ ID NO: 75895 - DNA, 15 bp, Homo sapiens
tctaacaagtcttct

SEQ ID NO: 75896 - DNA, 15 bp, Homo sapiens
gtctaacaagtcttc

SEQ ID NO: 75897 - DNA, 15 bp, Homo sapiens
agtctaacaagtctt

SEQ ID NO: 75898 - DNA, 15 bp, Homo sapiens
tagtctaacaagtct

SEQ ID NO: 75899 - DNA, 15 bp, Homo sapiens
atagtctaacaagtc

SEQ ID NO: 75900 - DNA, 15 bp, Homo sapiens
aatagtctaacaagt

SEQ ID NO: 75901 - DNA, 15 bp, Homo sapiens
caatagtctaacaag

SEQ ID NO: 75902 - DNA, 15 bp, Homo sapiens
acaatagtctaacaa

SEQ ID NO: 75903 - DNA, 15 bp, Homo sapiens
gacaatagtctaaca

SEQ ID NO: 75904 - DNA, 15 bp, Homo sapiens
agacaatagtctaac

SEQ ID NO: 75905 - DNA, 15 bp, Homo sapiens
cagacaatagtctaa

SEQ ID NO: 75906 - DNA, 15 bp, Homo sapiens
gcagacaatagtcta

SEQ ID NO: 75907 - DNA, 15 bp, Homo sapiens
tgcagacaatagtct

SEQ ID NO: 75908 - DNA, 15 bp, Homo sapiens
atgcagacaatagtc

SEQ ID NO: 75909 - DNA, 15 bp, Homo sapiens
catgcagacaatagt

SEQ ID NO: 75910 - DNA, 15 bp, Homo sapiens
acatgcagacaatag

SEQ ID NO: 75911 - DNA, 15 bp, Homo sapiens
gacatgcagacaata

SEQ ID NO: 75912 - DNA, 15 bp, Homo sapiens
tgacatgcagacaat

SEQ ID NO: 75913 - DNA, 15 bp, Homo sapiens
ctgacatgcagacaa

SEQ ID NO: 75914 - DNA, 15 bp, Homo sapiens
actgacatgcagaca

SEQ ID NO: 75915 - DNA, 15 bp, Homo sapiens
cactgacatgcagac

SEQ ID NO: 75916 - DNA, 15 bp, Homo sapiens
acactgacatgcaga

SEQ ID NO: 75917 - DNA, 15 bp, Homo sapiens
aacactgacatgcag

SEQ ID NO: 75918 - DNA, 15 bp, Homo sapiens
aaacactgacatgca

SEQ ID NO: 75919 - DNA, 15 bp, Homo sapiens
caaacactgacatgc

SEQ ID NO: 75920 - DNA, 15 bp, Homo sapiens
gcaaacactgacatg

SEQ ID NO: 75921 - DNA, 15 bp, Homo sapiens
tgcaaacactgacat

SEQ ID NO: 75922 - DNA, 15 bp, Homo sapiens
atgcaaacactgaca

SEQ ID NO: 75923 - DNA, 15 bp, Homo sapiens
catgcaaacactgac

SEQ ID NO: 75924 - DNA, 15 bp, Homo sapiens
gcatgcaaacactga

SEQ ID NO: 75925 - DNA, 15 bp, Homo sapiens
agcatgcaaacactg

SEQ ID NO: 75926 - DNA, 15 bp, Homo sapiens
tagcatgcaaacact

SEQ ID NO: 75927 - DNA, 15 bp, Homo sapiens
ttagcatgcaaacac

SEQ ID NO: 75928 - DNA, 15 bp, Homo sapiens
gttagcatgcaaaca

SEQ ID NO: 75929 - DNA, 15 bp, Homo sapiens
agttagcatgcaaac

SEQ ID NO: 75930 - DNA, 15 bp, Homo sapiens
aagttagcatgcaaa

SEQ ID NO: 75931 - DNA, 15 bp, Homo sapiens
caagttagcatgcaa

SEQ ID NO: 75932 - DNA, 15 bp, Homo sapiens
gcaagttagcatgca

SEQ ID NO: 75933 - DNA, 15 bp, Homo sapiens
agcaagttagcatgc

SEQ ID NO: 75934 - DNA, 15 bp, Homo sapiens
aagcaagttagcatg

SEQ ID NO: 75935 - DNA, 15 bp, Homo sapiens
taagcaagttagcat

SEQ ID NO: 75936 - DNA, 15 bp, Homo sapiens
ctaagcaagttagca

SEQ ID NO: 75937 - DNA, 15 bp, Homo sapiens
actaagcaagttagc

SEQ ID NO: 75938 - DNA, 15 bp, Homo sapiens
aactaagcaagttag

SEQ ID NO: 75939 - DNA, 15 bp, Homo sapiens
taactaagcaagtta

SEQ ID NO: 75940 - DNA, 15 bp, Homo sapiens
ctaactaagcaagtt

SEQ ID NO: 75941 - DNA, 15 bp, Homo sapiens
tctaactaagcaagt

SEQ ID NO: 75942 - DNA, 15 bp, Homo sapiens
ttctaactaagcaag

SEQ ID NO: 75943 - DNA, 15 bp, Homo sapiens
tttctaactaagcaa

SEQ ID NO: 75944 - DNA, 15 bp, Homo sapiens
ctttctaactaagca

SEQ ID NO: 75945 - DNA, 15 bp, Homo sapiens
cctttctaactaagc

SEQ ID NO: 75946 - DNA, 15 bp, Homo sapiens
acctttctaactaag

SEQ ID NO: 75947 - DNA, 15 bp, Homo sapiens
aacctttctaactaa

SEQ ID NO: 75948 - DNA, 15 bp, Homo sapiens
taacctttctaacta

SEQ ID NO: 75949 - DNA, 15 bp, Homo sapiens
ttaacctttctaact

SEQ ID NO: 75950 - DNA, 15 bp, Homo sapiens
tttaacctttctaac

SEQ ID NO: 75951 - DNA, 15 bp, Homo sapiens
atttaacctttctaa

SEQ ID NO: 75952 - DNA, 15 bp, Homo sapiens
aatttaacctttcta

SEQ ID NO: 75953 - DNA, 15 bp, Homo sapiens
aaatttaacctttct

SEQ ID NO: 75954 - DNA, 15 bp, Homo sapiens
aaaatttaacctttc

SEQ ID NO: 75955 - DNA, 15 bp, Homo sapiens
aaaaatttaaccttt

SEQ ID NO: 75956 - DNA, 15 bp, Homo sapiens
aaaaaatttaacctt

SEQ ID NO: 75957 - DNA, 15 bp, Homo sapiens
gaaaaaatttaacct

SEQ ID NO: 75958 - DNA, 15 bp, Homo sapiens
tgaaaaaatttaacc

SEQ ID NO: 75959 - DNA, 15 bp, Homo sapiens
gtgaaaaaatttaac

SEQ ID NO: 75960 - DNA, 15 bp, Homo sapiens
agtgaaaaaatttaa

SEQ ID NO: 75961 - DNA, 15 bp, Homo sapiens
gagtgaaaaaattta

SEQ ID NO: 75962 - DNA, 15 bp, Homo sapiens
agagtgaaaaaattt

SEQ ID NO: 75963 - DNA, 15 bp, Homo sapiens
tagagtgaaaaaatt

SEQ ID NO: 75964 - DNA, 15 bp, Homo sapiens
atagagtgaaaaaat

SEQ ID NO: 75965 - DNA, 15 bp, Homo sapiens
tatagagtgaaaaaa

SEQ ID NO: 75966 - DNA, 15 bp, Homo sapiens
ttatagagtgaaaaa

SEQ ID NO: 75967 - DNA, 15 bp, Homo sapiens
tttatagagtgaaaa

SEQ ID NO: 75968 - DNA, 15 bp, Homo sapiens
ttttatagagtgaaa

SEQ ID NO: 75969 - DNA, 15 bp, Homo sapiens
attttatagagtgaa

SEQ ID NO: 75970 - DNA, 15 bp, Homo sapiens
gattttatagagtga

SEQ ID NO: 75971 - DNA, 15 bp, Homo sapiens
tgattttatagagtg

SEQ ID NO: 75972 - DNA, 15 bp, Homo sapiens
ttgattttatagagt

SEQ ID NO: 75973 - DNA, 15 bp, Homo sapiens
cttgattttatagag

SEQ ID NO: 75974 - DNA, 15 bp, Homo sapiens
tcttgattttataga

SEQ ID NO: 75975 - DNA, 15 bp, Homo sapiens
ttcttgattttatag

SEQ ID NO: 75976 - DNA, 15 bp, Homo sapiens
tttcttgattttata

SEQ ID NO: 75977 - DNA, 15 bp, Homo sapiens
atttcttgattttat

SEQ ID NO: 75978 - DNA, 15 bp, Homo sapiens
tatttcttgatttta

SEQ ID NO: 75979 - DNA, 15 bp, Homo sapiens
atatttcttgatttt

SEQ ID NO: 75980 - DNA, 15 bp, Homo sapiens
tatatttcttgattt

SEQ ID NO: 75981 - DNA, 15 bp, Homo sapiens
ctatatttcttgatt

SEQ ID NO: 75982 - DNA, 15 bp, Homo sapiens
tctatatttcttgat

SEQ ID NO: 75983 - DNA, 15 bp, Homo sapiens
ctctatatttcttga

SEQ ID NO: 75984 - DNA, 15 bp, Homo sapiens
tctctatatttcttg

SEQ ID NO: 75985 - DNA, 15 bp, Homo sapiens
ttctctatatttctt

SEQ ID NO: 75986 - DNA, 15 bp, Homo sapiens
tttctctatatttct

SEQ ID NO: 75987 - DNA, 15 bp, Homo sapiens
ttttctctatatttc

SEQ ID NO: 75988 - DNA, 15 bp, Homo sapiens
cttttctctatattt

SEQ ID NO: 75989 - DNA, 15 bp, Homo sapiens
ccttttctctatatt

SEQ ID NO: 75990 - DNA, 15 bp, Homo sapiens
accttttctctatat

SEQ ID NO: 75991 - DNA, 15 bp, Homo sapiens
gaccttttctctata

SEQ ID NO: 75992 - DNA, 15 bp, Homo sapiens
agaccttttctctat

SEQ ID NO: 75993 - DNA, 15 bp, Homo sapiens
cagaccttttctcta

SEQ ID NO: 75994 - DNA, 15 bp, Homo sapiens
gcagaccttttctct

SEQ ID NO: 75995 - DNA, 15 bp, Homo sapiens
tgcagaccttttctc

SEQ ID NO: 75996 - DNA, 15 bp, Homo sapiens
ctgcagaccttttct

SEQ ID NO: 75997 - DNA, 15 bp, Homo sapiens
tctgcagaccttttc

SEQ ID NO: 75998 - DNA, 15 bp, Homo sapiens
ctctgcagacctttt

SEQ ID NO: 75999 - DNA, 15 bp, Homo sapiens
tctctgcagaccttt

SEQ ID NO: 76000 - DNA, 15 bp, Homo sapiens
ctctctgcagacctt

SEQ ID NO: 76001 - DNA, 15 bp, Homo sapiens
actctctgcagacct

SEQ ID NO: 76002 - DNA, 15 bp, Homo sapiens
gactctctgcagacc

SEQ ID NO: 76003 - DNA, 15 bp, Homo sapiens
agactctctgcagac

SEQ ID NO: 76004 - DNA, 15 bp, Homo sapiens
aagactctctgcaga

SEQ ID NO: 76005 - DNA, 15 bp, Homo sapiens
aaagactctctgcag

SEQ ID NO: 76006 - DNA, 15 bp, Homo sapiens
gaaagactctctgca

SEQ ID NO: 76007 - DNA, 15 bp, Homo sapiens
tgaaagactctctgc

SEQ ID NO: 76008 - DNA, 15 bp, Homo sapiens
atgaaagactctctg

SEQ ID NO: 76009 - DNA, 15 bp, Homo sapiens
aatgaaagactctct

SEQ ID NO: 76010 - DNA, 15 bp, Homo sapiens
aaatgaaagactctc

SEQ ID NO: 76011 - DNA, 15 bp, Homo sapiens
caaatgaaagactct

SEQ ID NO: 76012 - DNA, 15 bp, Homo sapiens
tcaaatgaaagactc

SEQ ID NO: 76013 - DNA, 15 bp, Homo sapiens
atcaaatgaaagact

SEQ ID NO: 76014 - DNA, 15 bp, Homo sapiens
catcaaatgaaagac

SEQ ID NO: 76015 - DNA, 15 bp, Homo sapiens
tcatcaaatgaaaga

SEQ ID NO: 76016 - DNA, 15 bp, Homo sapiens
atcatcaaatgaaag

SEQ ID NO: 76017 - DNA, 15 bp, Homo sapiens
catcatcaaatgaaa

SEQ ID NO: 76018 - DNA, 15 bp, Homo sapiens
acatcatcaaatgaa

SEQ ID NO: 76019 - DNA, 15 bp, Homo sapiens
cacatcatcaaatga

SEQ ID NO: 76020 - DNA, 15 bp, Homo sapiens
ccacatcatcaaatg

SEQ ID NO: 76021 - DNA, 15 bp, Homo sapiens
tccacatcatcaaat

SEQ ID NO: 76022 - DNA, 15 bp, Homo sapiens
atccacatcatcaaa

SEQ ID NO: 76023 - DNA, 15 bp, Homo sapiens
tatccacatcatcaa

SEQ ID NO: 76024 - DNA, 15 bp, Homo sapiens
atatccacatcatca

SEQ ID NO: 76025 - DNA, 15 bp, Homo sapiens
aatatccacatcatc

SEQ ID NO: 76026 - DNA, 15 bp, Homo sapiens
caatatccacatcat

SEQ ID NO: 76027 - DNA, 15 bp, Homo sapiens
acaatatccacatca

SEQ ID NO: 76028 - DNA, 15 bp, Homo sapiens
aacaatatccacatc

SEQ ID NO: 76029 - DNA, 15 bp, Homo sapiens
taacaatatccacat

SEQ ID NO: 76030 - DNA, 15 bp, Homo sapiens
ttaacaatatccaca

SEQ ID NO: 76031 - DNA, 15 bp, Homo sapiens
cttaacaatatccac

SEQ ID NO: 76032 - DNA, 15 bp, Homo sapiens
tcttaacaatatcca

SEQ ID NO: 76033 - DNA, 15 bp, Homo sapiens
ctcttaacaatatcc

SEQ ID NO: 76034 - DNA, 15 bp, Homo sapiens
gctcttaacaatatc

SEQ ID NO: 76035 - DNA, 15 bp, Homo sapiens
cgctcttaacaatat

SEQ ID NO: 76036 - DNA, 15 bp, Homo sapiens
ccgctcttaacaata

SEQ ID NO: 76037 - DNA, 15 bp, Homo sapiens
cccgctcttaacaat

SEQ ID NO: 76038 - DNA, 15 bp, Homo sapiens
tcccgctcttaacaa

SEQ ID NO: 76039 - DNA, 15 bp, Homo sapiens
ctcccgctcttaaca

SEQ ID NO: 76040 - DNA, 15 bp, Homo sapiens
actcccgctcttaac

SEQ ID NO: 76041 - DNA, 15 bp, Homo sapiens
aactcccgctcttaa

SEQ ID NO: 76042 - DNA, 15 bp, Homo sapiens
aaactcccgctctta

SEQ ID NO: 76043 - DNA, 15 bp, Homo sapiens
caaactcccgctctt

SEQ ID NO: 76044 - DNA, 15 bp, Homo sapiens
ccaaactcccgctct

SEQ ID NO: 76045 - DNA, 15 bp, Homo sapiens
tccaaactcccgctc

SEQ ID NO: 76046 - DNA, 15 bp, Homo sapiens
ctccaaactcccgct

SEQ ID NO: 76047 - DNA, 15 bp, Homo sapiens
gctccaaactcccgc

SEQ ID NO: 76048 - DNA, 15 bp, Homo sapiens
tgctccaaactcccg

SEQ ID NO: 76049 - DNA, 15 bp, Homo sapiens
atgctccaaactccc

SEQ ID NO: 76050 - DNA, 15 bp, Homo sapiens
tatgctccaaactcc

SEQ ID NO: 76051 - DNA, 15 bp, Homo sapiens
gtatgctccaaactc

SEQ ID NO: 76052 - DNA, 15 bp, Homo sapiens
tgtatgctccaaact

SEQ ID NO: 76053 - DNA, 15 bp, Homo sapiens
ctgtatgctccaaac

SEQ ID NO: 76054 - DNA, 15 bp, Homo sapiens
tctgtatgctccaaa

SEQ ID NO: 76055 - DNA, 15 bp, Homo sapiens
ctctgtatgctccaa

SEQ ID NO: 76056 - DNA, 15 bp, Homo sapiens
gctctgtatgctcca

SEQ ID NO: 76057 - DNA, 15 bp, Homo sapiens
agctctgtatgctcc

SEQ ID NO: 76058 - DNA, 15 bp, Homo sapiens
gagctctgtatgctc

SEQ ID NO: 76059 - DNA, 15 bp, Homo sapiens
tgagctctgtatgct

SEQ ID NO: 76060 - DNA, 15 bp, Homo sapiens
ttgagctctgtatgc

SEQ ID NO: 76061 - DNA, 15 bp, Homo sapiens
cttgagctctgtatg

SEQ ID NO: 76062 - DNA, 15 bp, Homo sapiens
acttgagctctgtat

SEQ ID NO: 76063 - DNA, 15 bp, Homo sapiens
aacttgagctctgta

SEQ ID NO: 76064 - DNA, 15 bp, Homo sapiens
caacttgagctctgt

SEQ ID NO: 76065 - DNA, 15 bp, Homo sapiens
tcaacttgagctctg

SEQ ID NO: 76066 - DNA, 15 bp, Homo sapiens
ttcaacttgagctct

SEQ ID NO: 76067 - DNA, 15 bp, Homo sapiens
attcaacttgagctc

SEQ ID NO: 76068 - DNA, 15 bp, Homo sapiens
gattcaacttgagct

SEQ ID NO: 76069 - DNA, 15 bp, Homo sapiens
ggattcaacttgagc

SEQ ID NO: 76070 - DNA, 15 bp, Homo sapiens
aggattcaacttgag

SEQ ID NO: 76071 - DNA, 15 bp, Homo sapiens
caggattcaacttga

SEQ ID NO: 76072 - DNA, 15 bp, Homo sapiens
tcaggattcaacttg

SEQ ID NO: 76073 - DNA, 15 bp, Homo sapiens
gtcaggattcaactt

SEQ ID NO: 76074 - DNA, 15 bp, Homo sapiens
agtcaggattcaact

SEQ ID NO: 76075 - DNA, 15 bp, Homo sapiens
aagtcaggattcaac

SEQ ID NO: 76076 - DNA, 15 bp, Homo sapiens
aaagtcaggattcaa

SEQ ID NO: 76077 - DNA, 15 bp, Homo sapiens
caaagtcaggattca

SEQ ID NO: 76078 - DNA, 15 bp, Homo sapiens
gcaaagtcaggattc

SEQ ID NO: 76079 - DNA, 15 bp, Homo sapiens
agcaaagtcaggatt

SEQ ID NO: 76080 - DNA, 15 bp, Homo sapiens
tagcaaagtcaggat

SEQ ID NO: 76081 - DNA, 15 bp, Homo sapiens
gtagcaaagtcagga

SEQ ID NO: 76082 - DNA, 15 bp, Homo sapiens
agtagcaaagtcagg

SEQ ID NO: 76083 - DNA, 15 bp, Homo sapiens
aagtagcaaagtcag

SEQ ID NO: 76084 - DNA, 15 bp, Homo sapiens
taagtagcaaagtca

SEQ ID NO: 76085 - DNA, 15 bp, Homo sapiens
ataagtagcaaagtc

SEQ ID NO: 76086 - DNA, 15 bp, Homo sapiens
aataagtagcaaagt

SEQ ID NO: 76087 - DNA, 15 bp, Homo sapiens
caataagtagcaaag

SEQ ID NO: 76088 - DNA, 15 bp, Homo sapiens
ccaataagtagcaaa

SEQ ID NO: 76089 - DNA, 15 bp, Homo sapiens
gccaataagtagcaa

SEQ ID NO: 76090 - DNA, 15 bp, Homo sapiens
agccaataagtagca

SEQ ID NO: 76091 - DNA, 15 bp, Homo sapiens
tagccaataagtagc

SEQ ID NO: 76092 - DNA, 15 bp, Homo sapiens
atagccaataagtag

SEQ ID NO: 76093 - DNA, 15 bp, Homo sapiens
tatagccaataagta

SEQ ID NO: 76094 - DNA, 15 bp, Homo sapiens
atatagccaataagt

SEQ ID NO: 76095 - DNA, 15 bp, Homo sapiens
catatagccaataag

SEQ ID NO: 76096 - DNA, 15 bp, Homo sapiens
tcatatagccaataa

SEQ ID NO: 76097 - DNA, 15 bp, Homo sapiens
gtcatatagccaata

SEQ ID NO: 76098 - DNA, 15 bp, Homo sapiens
ggtcatatagccaat

SEQ ID NO: 76099 - DNA, 15 bp, Homo sapiens
aggtcatatagccaa

SEQ ID NO: 76100 - DNA, 15 bp, Homo sapiens
aaggtcatatagcca

SEQ ID NO: 76101 - DNA, 15 bp, Homo sapiens
caaggtcatatagcc

SEQ ID NO: 76102 - DNA, 15 bp, Homo sapiens
ccaaggtcatatagc

SEQ ID NO: 76103 - DNA, 15 bp, Homo sapiens
cccaaggtcatatag

SEQ ID NO: 76104 - DNA, 15 bp, Homo sapiens
gcccaaggtcatata

SEQ ID NO: 76105 - DNA, 15 bp, Homo sapiens
tgcccaaggtcatat

SEQ ID NO: 76106 - DNA, 15 bp, Homo sapiens
ttgcccaaggtcata

SEQ ID NO: 76107 - DNA, 15 bp, Homo sapiens
cttgcccaaggtcat

SEQ ID NO: 76108 - DNA, 15 bp, Homo sapiens
gcttgcccaaggtca

SEQ ID NO: 76109 - DNA, 15 bp, Homo sapiens
agcttgcccaaggtc

SEQ ID NO: 76110 - DNA, 15 bp, Homo sapiens
cagcttgcccaaggt

SEQ ID NO: 76111 - DNA, 15 bp, Homo sapiens
gcagcttgcccaagg

SEQ ID NO: 76112 - DNA, 15 bp, Homo sapiens
agcagcttgcccaag

SEQ ID NO: 76113 - DNA, 15 bp, Homo sapiens
aagcagcttgcccaa

SEQ ID NO: 76114 - DNA, 15 bp, Homo sapiens
taagcagcttgccca

SEQ ID NO: 76115 - DNA, 15 bp, Homo sapiens
ctaagcagcttgccc

SEQ ID NO: 76116 - DNA, 15 bp, Homo sapiens
actaagcagcttgcc

SEQ ID NO: 76117 - DNA, 15 bp, Homo sapiens
gactaagcagcttgc

SEQ ID NO: 76118 - DNA, 15 bp, Homo sapiens
agactaagcagcttg

SEQ ID NO: 76119 - DNA, 15 bp, Homo sapiens
gagactaagcagctt

SEQ ID NO: 76120 - DNA, 15 bp, Homo sapiens
agagactaagcagct

SEQ ID NO: 76121 - DNA, 15 bp, Homo sapiens
gagagactaagcagc

SEQ ID NO: 76122 - DNA, 15 bp, Homo sapiens
agagagactaagcag

SEQ ID NO: 76123 - DNA, 15 bp, Homo sapiens
cagagagactaagca

SEQ ID NO: 76124 - DNA, 15 bp, Homo sapiens
tcagagagactaagc

SEQ ID NO: 76125 - DNA, 15 bp, Homo sapiens
atcagagagactaag

SEQ ID NO: 76126 - DNA, 15 bp, Homo sapiens
gatcagagagactaa

SEQ ID NO: 76127 - DNA, 15 bp, Homo sapiens
ggatcagagagacta

SEQ ID NO: 76128 - DNA, 15 bp, Homo sapiens
aggatcagagagact

SEQ ID NO: 76129 - DNA, 15 bp, Homo sapiens
gaggatcagagagac

SEQ ID NO: 76130 - DNA, 15 bp, Homo sapiens
tgaggatcagagaga

SEQ ID NO: 76131 - DNA, 15 bp, Homo sapiens
ctgaggatcagagag

SEQ ID NO: 76132 - DNA, 15 bp, Homo sapiens
actgaggatcagaga

SEQ ID NO: 76133 - DNA, 15 bp, Homo sapiens
aactgaggatcagag

SEQ ID NO: 76134 - DNA, 15 bp, Homo sapiens
taactgaggatcaga

SEQ ID NO: 76135 - DNA, 15 bp, Homo sapiens
gtaactgaggatcag

SEQ ID NO: 76136 - DNA, 15 bp, Homo sapiens
ggtaactgaggatca

SEQ ID NO: 76137 - DNA, 15 bp, Homo sapiens
aggtaactgaggatc

SEQ ID NO: 76138 - DNA, 15 bp, Homo sapiens
aaggtaactgaggat

SEQ ID NO: 76139 - DNA, 15 bp, Homo sapiens
aaaggtaactgagga

SEQ ID NO: 76140 - DNA, 15 bp, Homo sapiens
caaaggtaactgagg

SEQ ID NO: 76141 - DNA, 15 bp, Homo sapiens
acaaaggtaactgag

SEQ ID NO: 76142 - DNA, 15 bp, Homo sapiens
aacaaaggtaactga

SEQ ID NO: 76143 - DNA, 15 bp, Homo sapiens
aaacaaaggtaactg

SEQ ID NO: 76144 - DNA, 15 bp, Homo sapiens
caaacaaaggtaact

SEQ ID NO: 76145 - DNA, 15 bp, Homo sapiens
acaaacaaaggtaac

SEQ ID NO: 76146 - DNA, 15 bp, Homo sapiens
aacaaacaaaggtaa

SEQ ID NO: 76147 - DNA, 15 bp, Homo sapiens
caacaaacaaaggta

SEQ ID NO: 76148 - DNA, 15 bp, Homo sapiens
tcaacaaacaaaggt

SEQ ID NO: 76149 - DNA, 15 bp, Homo sapiens
atcaacaaacaaagg

SEQ ID NO: 76150 - DNA, 15 bp, Homo sapiens
catcaacaaacaaag

SEQ ID NO: 76151 - DNA, 15 bp, Homo sapiens
tcatcaacaaacaaa

SEQ ID NO: 76152 - DNA, 15 bp, Homo sapiens
atcatcaacaaacaa

SEQ ID NO: 76153 - DNA, 15 bp, Homo sapiens
catcatcaacaaaca

SEQ ID NO: 76154 - DNA, 15 bp, Homo sapiens
tcatcatcaacaaac

SEQ ID NO: 76155 - DNA, 15 bp, Homo sapiens
gtcatcatcaacaaa

SEQ ID NO: 76156 - DNA, 15 bp, Homo sapiens
ggtcatcatcaacaa

SEQ ID NO: 76157 - DNA, 15 bp, Homo sapiens
tggtcatcatcaaca

SEQ ID NO: 76158 - DNA, 15 bp, Homo sapiens
atggtcatcatcaac

SEQ ID NO: 76159 - DNA, 15 bp, Homo sapiens
aatggtcatcatcaa

SEQ ID NO: 76160 - DNA, 15 bp, Homo sapiens
caatggtcatcatca

SEQ ID NO: 76161 - DNA, 15 bp, Homo sapiens
tcaatggtcatcatc

SEQ ID NO: 76162 - DNA, 15 bp, Homo sapiens
atcaatggtcatcat

SEQ ID NO: 76163 - DNA, 15 bp, Homo sapiens
tatcaatggtcatca

SEQ ID NO: 76164 - DNA, 15 bp, Homo sapiens
ttatcaatggtcatc

SEQ ID NO: 76165 - DNA, 15 bp, Homo sapiens
gttatcaatggtcat

SEQ ID NO: 76166 - DNA, 15 bp, Homo sapiens
tgttatcaatggtca

SEQ ID NO: 76167 - DNA, 15 bp, Homo sapiens
gtgttatcaatggtc

SEQ ID NO: 76168 - DNA, 15 bp, Homo sapiens
tgtgttatcaatggt

SEQ ID NO: 76169 - DNA, 15 bp, Homo sapiens
ttgtgttatcaatgg

SEQ ID NO: 76170 - DNA, 15 bp, Homo sapiens
gttgtgttatcaatg

SEQ ID NO: 76171 - DNA, 15 bp, Homo sapiens
ggttgtgttatcaat

SEQ ID NO: 76172 - DNA, 15 bp, Homo sapiens
tggttgtgttatcaa

SEQ ID NO: 76173 - DNA, 15 bp, Homo sapiens
atggttgtgttatca

SEQ ID NO: 76174 - DNA, 15 bp, Homo sapiens
tatggttgtgttatc

SEQ ID NO: 76175 - DNA, 15 bp, Homo sapiens
ttatggttgtgttat

SEQ ID NO: 76176 - DNA, 15 bp, Homo sapiens
tttatggttgtgtta

SEQ ID NO: 76177 - DNA, 15 bp, Homo sapiens
atttatggttgtgtt

SEQ ID NO: 76178 - DNA, 15 bp, Homo sapiens
tatttatggttgtgt

SEQ ID NO: 76179 - DNA, 15 bp, Homo sapiens
ttatttatggttgtg

SEQ ID NO: 76180 - DNA, 15 bp, Homo sapiens
attatttatggttgt

SEQ ID NO: 76181 - DNA, 15 bp, Homo sapiens
cattatttatggttg

SEQ ID NO: 76182 - DNA, 15 bp, Homo sapiens
tcattatttatggtt

SEQ ID NO: 76183 - DNA, 15 bp, Homo sapiens
gtcattatttatggt

SEQ ID NO: 76184 - DNA, 15 bp, Homo sapiens
tgtcattatttatgg

SEQ ID NO: 76185 - DNA, 15 bp, Homo sapiens
ttgtcattatttatg

SEQ ID NO: 76186 - DNA, 15 bp, Homo sapiens
gttgtcattatttat

SEQ ID NO: 76187 - DNA, 15 bp, Homo sapiens
tgttgtcattattta

SEQ ID NO: 76188 - DNA, 15 bp, Homo sapiens
atgttgtcattattt

SEQ ID NO: 76189 - DNA, 15 bp, Homo sapiens
tatgttgtcattatt

SEQ ID NO: 76190 - DNA, 15 bp, Homo sapiens
ctatgttgtcattat

SEQ ID NO: 76191 - DNA, 15 bp, Homo sapiens
tctatgttgtcatta

SEQ ID NO: 76192 - DNA, 15 bp, Homo sapiens
ctctatgttgtcatt

SEQ ID NO: 76193 - DNA, 15 bp, Homo sapiens
tctctatgttgtcat

SEQ ID NO: 76194 - DNA, 15 bp, Homo sapiens
atctctatgttgtca

SEQ ID NO: 76195 - DNA, 15 bp, Homo sapiens
tatctctatgttgtc

SEQ ID NO: 76196 - DNA, 15 bp, Homo sapiens
ctatctctatgttgt

SEQ ID NO: 76197 - DNA, 15 bp, Homo sapiens
actatctctatgttg

SEQ ID NO: 76198 - DNA, 15 bp, Homo sapiens
aactatctctatgtt

SEQ ID NO: 76199 - DNA, 15 bp, Homo sapiens
gaactatctctatgt

SEQ ID NO: 76200 - DNA, 15 bp, Homo sapiens
agaactatctctatg

SEQ ID NO: 76201 - DNA, 15 bp, Homo sapiens
gagaactatctctat

SEQ ID NO: 76202 - DNA, 15 bp, Homo sapiens
tgagaactatctcta

SEQ ID NO: 76203 - DNA, 15 bp, Homo sapiens
atgagaactatctct

SEQ ID NO: 76204 - DNA, 15 bp, Homo sapiens
aatgagaactatctc

SEQ ID NO: 76205 - DNA, 15 bp, Homo sapiens
taatgagaactatct

SEQ ID NO: 76206 - DNA, 15 bp, Homo sapiens
ataatgagaactatc

SEQ ID NO: 76207 - DNA, 15 bp, Homo sapiens
tataatgagaactat

SEQ ID NO: 76208 - DNA, 15 bp, Homo sapiens
ctataatgagaacta

SEQ ID NO: 76209 - DNA, 15 bp, Homo sapiens
actataatgagaact

SEQ ID NO: 76210 - DNA, 15 bp, Homo sapiens
tactataatgagaac

SEQ ID NO: 76211 - DNA, 15 bp, Homo sapiens
ctactataatgagaa

SEQ ID NO: 76212 - DNA, 15 bp, Homo sapiens
actactataatgaga

SEQ ID NO: 76213 - DNA, 15 bp, Homo sapiens
aactactataatgag

SEQ ID NO: 76214 - DNA, 15 bp, Homo sapiens
caactactataatga

SEQ ID NO: 76215 - DNA, 15 bp, Homo sapiens
tataacaactactat

SEQ ID NO: 76216 - DNA, 15 bp, Homo sapiens
gtataacaactacta

SEQ ID NO: 76217 - DNA, 15 bp, Homo sapiens
tgtataacaactact

SEQ ID NO: 76218 - DNA, 15 bp, Homo sapiens
ctgtataacaactac

SEQ ID NO: 76219 - DNA, 15 bp, Homo sapiens
tctgtataacaacta

SEQ ID NO: 76220 - DNA, 15 bp, Homo sapiens
ttctgtataacaact

SEQ ID NO: 76221 - DNA, 15 bp, Homo sapiens
attctgtataacaac

SEQ ID NO: 76222 - DNA, 15 bp, Homo sapiens
aattctgtataacaa

SEQ ID NO: 76223 - DNA, 15 bp, Homo sapiens
taattctgtataaca

SEQ ID NO: 76224 - DNA, 15 bp, Homo sapiens
ataattctgtataac

SEQ ID NO: 76225 - DNA, 15 bp, Homo sapiens
aataattctgtataa

SEQ ID NO: 76226 - DNA, 15 bp, Homo sapiens
gaataattctgtata

SEQ ID NO: 76227 - DNA, 15 bp, Homo sapiens
tgaataattctgtat

SEQ ID NO: 76228 - DNA, 15 bp, Homo sapiens
gtgaataattctgta

SEQ ID NO: 76229 - DNA, 15 bp, Homo sapiens
agtgaataattctgt

SEQ ID NO: 76230 - DNA, 15 bp, Homo sapiens
gagtgaataattctg

SEQ ID NO: 76231 - DNA, 15 bp, Homo sapiens
tgagtgaataattct

SEQ ID NO: 76232 - DNA, 15 bp, Homo sapiens
ttgagtgaataattc

SEQ ID NO: 76233 - DNA, 15 bp, Homo sapiens
attgagtgaataatt

SEQ ID NO: 76234 - DNA, 15 bp, Homo sapiens
cattgagtgaataat

SEQ ID NO: 76235 - DNA, 15 bp, Homo sapiens
acattgagtgaataa

SEQ ID NO: 76236 - DNA, 15 bp, Homo sapiens
aacattgagtgaata

SEQ ID NO: 76237 - DNA, 15 bp, Homo sapiens
taacattgagtgaat

SEQ ID NO: 76238 - DNA, 15 bp, Homo sapiens
ttaacattgagtgaa

SEQ ID NO: 76239 - DNA, 15 bp, Homo sapiens
attaacattgagtga

SEQ ID NO: 76240 - DNA, 15 bp, Homo sapiens
aattaacattgagtg

SEQ ID NO: 76241 - DNA, 15 bp, Homo sapiens
aaattaacattgagt

SEQ ID NO: 76242 - DNA, 15 bp, Homo sapiens
aaaattaacattgag

SEQ ID NO: 76243 - DNA, 15 bp, Homo sapiens
gaaaattaacattga

SEQ ID NO: 76244 - DNA, 15 bp, Homo sapiens
agaaaattaacattg

SEQ ID NO: 76245 - DNA, 15 bp, Homo sapiens
cagaaaattaacatt

SEQ ID NO: 76246 - DNA, 15 bp, Homo sapiens
gcagaaaattaacat

SEQ ID NO: 76247 - DNA, 15 bp, Homo sapiens
tgcagaaaattaaca

SEQ ID NO: 76248 - DNA, 15 bp, Homo sapiens
atgcagaaaattaac

SEQ ID NO: 76249 - DNA, 15 bp, Homo sapiens
aatgcagaaaattaa

SEQ ID NO: 76250 - DNA, 15 bp, Homo sapiens
caatgcagaaaatta

SEQ ID NO: 76251 - DNA, 15 bp, Homo sapiens
tcaatgcagaaaatt

SEQ ID NO: 76252 - DNA, 15 bp, Homo sapiens
ttcaatgcagaaaat

SEQ ID NO: 76253 - DNA, 15 bp, Homo sapiens
tttcaatgcagaaaa

SEQ ID NO: 76254 - DNA, 15 bp, Homo sapiens
atttcaatgcagaaa

SEQ ID NO: 76255 - DNA, 15 bp, Homo sapiens
gatttcaatgcagaa

SEQ ID NO: 76256 - DNA, 15 bp, Homo sapiens
ggatttcaatgcaga

SEQ ID NO: 76257 - DNA, 15 bp, Homo sapiens
gggatttcaatgcag

SEQ ID NO: 76258 - DNA, 15 bp, Homo sapiens
tgggatttcaatgca

SEQ ID NO: 76259 - DNA, 15 bp, Homo sapiens
ctgggatttcaatgc

SEQ ID NO: 76260 - DNA, 15 bp, Homo sapiens
tctgggatttcaatg

SEQ ID NO: 76261 - DNA, 15 bp, Homo sapiens
ttctgggatttcaat

SEQ ID NO: 76262 - DNA, 15 bp, Homo sapiens
gttctgggatttcaa

SEQ ID NO: 76263 - DNA, 15 bp, Homo sapiens
tgttctgggatttca

SEQ ID NO: 76264 - DNA, 15 bp, Homo sapiens
atgttctgggatttc

SEQ ID NO: 76265 - DNA, 15 bp, Homo sapiens
aatgttctgggattt

SEQ ID NO: 76266 - DNA, 15 bp, Homo sapiens
taatgttctgggatt

SEQ ID NO: 76267 - DNA, 15 bp, Homo sapiens
ctaatgttctgggat

SEQ ID NO: 76268 - DNA, 15 bp, Homo sapiens
tctaatgttctggga

SEQ ID NO: 76269 - DNA, 15 bp, Homo sapiens
ttctaatgttctggg

SEQ ID NO: 76270 - DNA, 15 bp, Homo sapiens
attctaatgttctgg

SEQ ID NO: 76271 - DNA, 15 bp, Homo sapiens
aattctaatgttctg

SEQ ID NO: 76272 - DNA, 15 bp, Homo sapiens
caattctaatgttct

SEQ ID NO: 76273 - DNA, 15 bp, Homo sapiens
ccaattctaatgttc

SEQ ID NO: 76274 - DNA, 15 bp, Homo sapiens
cccaattctaatgtt

SEQ ID NO: 76275 - DNA, 15 bp, Homo sapiens
ccccaattctaatgt

SEQ ID NO: 76276 - DNA, 15 bp, Homo sapiens
cccccaattctaatg

SEQ ID NO: 76277 - DNA, 15 bp, Homo sapiens
gcccccaattctaat

SEQ ID NO: 76278 - DNA, 15 bp, Homo sapiens
tgcccccaattctaa

SEQ ID NO: 76279 - DNA, 15 bp, Homo sapiens
atgcccccaattcta

SEQ ID NO: 76280 - DNA, 15 bp, Homo sapiens
aatgcccccaattct

SEQ ID NO: 76281 - DNA, 15 bp, Homo sapiens
taatgcccccaattc

SEQ ID NO: 76282 - DNA, 15 bp, Homo sapiens
ataatgcccccaatt

SEQ ID NO: 76283 - DNA, 15 bp, Homo sapiens
aataatgcccccaat

SEQ ID NO: 76284 - DNA, 15 bp, Homo sapiens
aaataatgcccccaa

SEQ ID NO: 76285 - DNA, 15 bp, Homo sapiens
caaataatgccccca

SEQ ID NO: 76286 - DNA, 15 bp, Homo sapiens
tcaaataatgccccc

SEQ ID NO: 76287 - DNA, 15 bp, Homo sapiens
ttcaaataatgcccc

SEQ ID NO: 76288 - DNA, 15 bp, Homo sapiens
attcaaataatgccc

SEQ ID NO: 76289 - DNA, 15 bp, Homo sapiens
gattcaaataatgcc

SEQ ID NO: 76290 - DNA, 15 bp, Homo sapiens
agattcaaataatgc

SEQ ID NO: 76291 - DNA, 15 bp, Homo sapiens
aagattcaaataatg

SEQ ID NO: 76292 - DNA, 15 bp, Homo sapiens
aaagattcaaataat

SEQ ID NO: 76293 - DNA, 15 bp, Homo sapiens
taaagattcaaataa

SEQ ID NO: 76294 - DNA, 15 bp, Homo sapiens
ttaaagattcaaata

SEQ ID NO: 76295 - DNA, 15 bp, Homo sapiens
cttaaagattcaaat

SEQ ID NO: 76296 - DNA, 15 bp, Homo sapiens
ccttaaagattcaaa

SEQ ID NO: 76297 - DNA, 15 bp, Homo sapiens
accttaaagattcaa

SEQ ID NO: 76298 - DNA, 15 bp, Homo sapiens
aaccttaaagattca

SEQ ID NO: 76299 - DNA, 15 bp, Homo sapiens
taaccttaaagattc

SEQ ID NO: 76300 - DNA, 15 bp, Homo sapiens
ataaccttaaagatt

SEQ ID NO: 76301 - DNA, 15 bp, Homo sapiens
tataaccttaaagat

SEQ ID NO: 76302 - DNA, 15 bp, Homo sapiens
ttataaccttaaaga

SEQ ID NO: 76303 - DNA, 15 bp, Homo sapiens
cttataaccttaaag

SEQ ID NO: 76304 - DNA, 15 bp, Homo sapiens
ccttataaccttaaa

SEQ ID NO: 76305 - DNA, 15 bp, Homo sapiens
tccttataaccttaa

SEQ ID NO: 76306 - DNA, 15 bp, Homo sapiens
ttccttataacctta

SEQ ID NO: 76307 - DNA, 15 bp, Homo sapiens
attccttataacctt

SEQ ID NO: 76308 - DNA, 15 bp, Homo sapiens
tattccttataacct

SEQ ID NO: 76309 - DNA, 15 bp, Homo sapiens
gtattccttataacc

SEQ ID NO: 76310 - DNA, 15 bp, Homo sapiens
tgtattccttataac

SEQ ID NO: 76311 - DNA, 15 bp, Homo sapiens
atgtattccttataa

SEQ ID NO: 76312 - DNA, 15 bp, Homo sapiens
aatgtattccttata

SEQ ID NO: 76313 - DNA, 15 bp, Homo sapiens
aaatgtattccttat

SEQ ID NO: 76314 - DNA, 15 bp, Homo sapiens
gaaatgtattcctta

SEQ ID NO: 76315 - DNA, 15 bp, Homo sapiens
agaaatgtattcctt

SEQ ID NO: 76316 - DNA, 15 bp, Homo sapiens
gagaaatgtattcct

SEQ ID NO: 76317 - DNA, 15 bp, Homo sapiens
tgagaaatgtattcc

SEQ ID NO: 76318 - DNA, 15 bp, Homo sapiens
ctgagaaatgtattc

SEQ ID NO: 76319 - DNA, 15 bp, Homo sapiens
gctgagaaatgtatt

SEQ ID NO: 76320 - DNA, 15 bp, Homo sapiens
tgctgagaaatgtat

SEQ ID NO: 76321 - DNA, 15 bp, Homo sapiens
ttgctgagaaatgta

SEQ ID NO: 76322 - DNA, 15 bp, Homo sapiens
attgctgagaaatgt

SEQ ID NO: 76323 - DNA, 15 bp, Homo sapiens
tattgctgagaaatg

SEQ ID NO: 76324 - DNA, 15 bp, Homo sapiens
ttattgctgagaaat

SEQ ID NO: 76325 - DNA, 15 bp, Homo sapiens
tttattgctgagaaa

SEQ ID NO: 76326 - DNA, 15 bp, Homo sapiens
atttattgctgagaa

SEQ ID NO: 76327 - DNA, 15 bp, Homo sapiens
catttattgctgaga

SEQ ID NO: 76328 - DNA, 15 bp, Homo sapiens
ccatttattgctgag

SEQ ID NO: 76329 - DNA, 15 bp, Homo sapiens
tccatttattgctga

SEQ ID NO: 76330 - DNA, 15 bp, Homo sapiens
ttccatttattgctg

SEQ ID NO: 76331 - DNA, 15 bp, Homo sapiens
cttccatttattgct

SEQ ID NO: 76332 - DNA, 15 bp, Homo sapiens
ccttccatttattgc

SEQ ID NO: 76333 - DNA, 15 bp, Homo sapiens
tccttccatttattg

SEQ ID NO: 76334 - DNA, 15 bp, Homo sapiens
ctccttccatttatt

SEQ ID NO: 76335 - DNA, 15 bp, Homo sapiens
actccttccatttat

SEQ ID NO: 76336 - DNA, 15 bp, Homo sapiens
aactccttccattta

SEQ ID NO: 76337 - DNA, 15 bp, Homo sapiens
aaactccttccattt

SEQ ID NO: 76338 - DNA, 15 bp, Homo sapiens
aaaactccttccatt

SEQ ID NO: 76339 - DNA, 15 bp, Homo sapiens
caaaactccttccat

SEQ ID NO: 76340 - DNA, 15 bp, Homo sapiens
ccaaaactccttcca

SEQ ID NO: 76341 - DNA, 15 bp, Homo sapiens
cccaaaactccttcc

SEQ ID NO: 76342 - DNA, 15 bp, Homo sapiens
acccaaaactccttc

SEQ ID NO: 76343 - DNA, 15 bp, Homo sapiens
aacccaaaactcctt

SEQ ID NO: 76344 - DNA, 15 bp, Homo sapiens
taacccaaaactcct

SEQ ID NO: 76345 - DNA, 15 bp, Homo sapiens
ttaacccaaaactcc

SEQ ID NO: 76346 - DNA, 15 bp, Homo sapiens
gttaacccaaaactc

SEQ ID NO: 76347 - DNA, 15 bp, Homo sapiens
agttaacccaaaact

SEQ ID NO: 76348 - DNA, 15 bp, Homo sapiens
aagttaacccaaaac

SEQ ID NO: 76349 - DNA, 15 bp, Homo sapiens
taagttaacccaaaa

SEQ ID NO: 76350 - DNA, 15 bp, Homo sapiens
ataagttaacccaaa

SEQ ID NO: 76351 - DNA, 15 bp, Homo sapiens
tataagttaacccaa

SEQ ID NO: 76352 - DNA, 15 bp, Homo sapiens
ttataagttaaccca

SEQ ID NO: 76353 - DNA, 15 bp, Homo sapiens
tttataagttaaccc

SEQ ID NO: 76354 - DNA, 15 bp, Homo sapiens
ctttataagttaacc

SEQ ID NO: 76355 - DNA, 15 bp, Homo sapiens
actttataagttaac

SEQ ID NO: 76356 - DNA, 15 bp, Homo sapiens
tactttataagttaa

SEQ ID NO: 76357 - DNA, 15 bp, Homo sapiens
atactttataagtta

SEQ ID NO: 76358 - DNA, 15 bp, Homo sapiens
tatactttataagtt

SEQ ID NO: 76359 - DNA, 15 bp, Homo sapiens
gtatactttataagt

SEQ ID NO: 76360 - DNA, 15 bp, Homo sapiens
ggtatactttataag

SEQ ID NO: 76361 - DNA, 15 bp, Homo sapiens
gggtatactttataa

SEQ ID NO: 76362 - DNA, 15 bp, Homo sapiens
tgggtatactttata

SEQ ID NO: 76363 - DNA, 15 bp, Homo sapiens
ttgggtatactttat

SEQ ID NO: 76364 - DNA, 15 bp, Homo sapiens
cttgggtatacttta

SEQ ID NO: 76365 - DNA, 15 bp, Homo sapiens
acttgggtatacttt

SEQ ID NO: 76366 - DNA, 15 bp, Homo sapiens
gacttgggtatactt

SEQ ID NO: 76367 - DNA, 15 bp, Homo sapiens
tgacttgggtatact

SEQ ID NO: 76368 - DNA, 15 bp, Homo sapiens
atgacttgggtatac

SEQ ID NO: 76369 - DNA, 15 bp, Homo sapiens
aatgacttgggtata

SEQ ID NO: 76370 - DNA, 15 bp, Homo sapiens
aaatgacttgggtat

SEQ ID NO: 76371 - DNA, 15 bp, Homo sapiens
aaaatgacttgggta

SEQ ID NO: 76372 - DNA, 15 bp, Homo sapiens
aaaaatgacttgggt

SEQ ID NO: 76373 - DNA, 15 bp, Homo sapiens
aaaaaatgacttggg

SEQ ID NO: 76374 - DNA, 15 bp, Homo sapiens
aaaaaaatgacttgg

SEQ ID NO: 76375 - DNA, 15 bp, Homo sapiens
aaaaaaaatgacttg

SEQ ID NO: 76376 - DNA, 15 bp, Homo sapiens
aaaaaaaaatgactt

SEQ ID NO: 76377 - DNA, 15 bp, Homo sapiens
gaaaaaaaaatgact

SEQ ID NO: 76378 - DNA, 15 bp, Homo sapiens
tgaaaaaaaaatgac

SEQ ID NO: 76379 - DNA, 15 bp, Homo sapiens
ctgaaaaaaaaatga

SEQ ID NO: 76380 - DNA, 15 bp, Homo sapiens
tctgaaaaaaaaatg

SEQ ID NO: 76381 - DNA, 15 bp, Homo sapiens
ctctgaaaaaaaaat

SEQ ID NO: 76382 - DNA, 15 bp, Homo sapiens
tctctgaaaaaaaaa

SEQ ID NO: 76383 - DNA, 15 bp, Homo sapiens
ttctctgaaaaaaaa

SEQ ID NO: 76384 - DNA, 15 bp, Homo sapiens
cttctctgaaaaaaa

SEQ ID NO: 76385 - DNA, 15 bp, Homo sapiens
tcttctctgaaaaaa

SEQ ID NO: 76386 - DNA, 15 bp, Homo sapiens
atcttctctgaaaaa

SEQ ID NO: 76387 - DNA, 15 bp, Homo sapiens
tatcttctctgaaaa

SEQ ID NO: 76388 - DNA, 15 bp, Homo sapiens
atatcttctctgaaa

SEQ ID NO: 76389 - DNA, 15 bp, Homo sapiens
catatcttctctgaa

SEQ ID NO: 76390 - DNA, 15 bp, Homo sapiens
ccatatcttctctga

SEQ ID NO: 76391 - DNA, 15 bp, Homo sapiens
accatatcttctctg

SEQ ID NO: 76392 - DNA, 15 bp, Homo sapiens
taccatatcttctct

SEQ ID NO: 76393 - DNA, 15 bp, Homo sapiens
ctaccatatcttctc

SEQ ID NO: 76394 - DNA, 15 bp, Homo sapiens
tctaccatatcttct

SEQ ID NO: 76395 - DNA, 15 bp, Homo sapiens
ttctaccatatcttc

SEQ ID NO: 76396 - DNA, 15 bp, Homo sapiens
tttctaccatatctt

SEQ ID NO: 76397 - DNA, 15 bp, Homo sapiens
ctttctaccatatct

SEQ ID NO: 76398 - DNA, 15 bp, Homo sapiens
actttctaccatatc

SEQ ID NO: 76399 - DNA, 15 bp, Homo sapiens
gactttctaccatat

SEQ ID NO: 76400 - DNA, 15 bp, Homo sapiens
agactttctaccata

SEQ ID NO: 76401 - DNA, 15 bp, Homo sapiens
aagactttctaccat

SEQ ID NO: 76402 - DNA, 15 bp, Homo sapiens
taagactttctacca

SEQ ID NO: 76403 - DNA, 15 bp, Homo sapiens
ctaagactttctacc

SEQ ID NO: 76404 - DNA, 15 bp, Homo sapiens
cctaagactttctac

SEQ ID NO: 76405 - DNA, 15 bp, Homo sapiens
tcctaagactttcta

SEQ ID NO: 76406 - DNA, 15 bp, Homo sapiens
ctcctaagactttct

SEQ ID NO: 76407 - DNA, 15 bp, Homo sapiens
cctcctaagactttc

SEQ ID NO: 76408 - DNA, 15 bp, Homo sapiens
acctcctaagacttt

SEQ ID NO: 76409 - DNA, 15 bp, Homo sapiens
aacctcctaagactt

SEQ ID NO: 76410 - DNA, 15 bp, Homo sapiens
caacctcctaagact

SEQ ID NO: 76411 - DNA, 15 bp, Homo sapiens
tcaacctcctaagac

SEQ ID NO: 76412 - DNA, 15 bp, Homo sapiens
ttcaacctcctaaga

SEQ ID NO: 76413 - DNA, 15 bp, Homo sapiens
cttcaacctcctaag

SEQ ID NO: 76414 - DNA, 15 bp, Homo sapiens
tcttcaacctcctaa

SEQ ID NO: 76415 - DNA, 15 bp, Homo sapiens
ttcttcaacctccta

SEQ ID NO: 76416 - DNA, 15 bp, Homo sapiens
cttcttcaacctcct

SEQ ID NO: 76417 - DNA, 15 bp, Homo sapiens
ccttcttcaacctcc

SEQ ID NO: 76418 - DNA, 15 bp, Homo sapiens
tccttcttcaacctc

SEQ ID NO: 76419 - DNA, 15 bp, Homo sapiens
ttccttcttcaacct

SEQ ID NO: 76420 - DNA, 15 bp, Homo sapiens
attccttcttcaacc

SEQ ID NO: 76421 - DNA, 15 bp, Homo sapiens
aattccttcttcaac

SEQ ID NO: 76422 - DNA, 15 bp, Homo sapiens
caattccttcttcaa

SEQ ID NO: 76423 - DNA, 15 bp, Homo sapiens
ccaattccttcttca

SEQ ID NO: 76424 - DNA, 15 bp, Homo sapiens
tccaattccttcttc

SEQ ID NO: 76425 - DNA, 15 bp, Homo sapiens
atccaattccttctt

SEQ ID NO: 76426 - DNA, 15 bp, Homo sapiens
tatccaattccttct

SEQ ID NO: 76427 - DNA, 15 bp, Homo sapiens
atatccaattccttc

SEQ ID NO: 76428 - DNA, 15 bp, Homo sapiens
aatatccaattcctt

SEQ ID NO: 76429 - DNA, 15 bp, Homo sapiens
aaatatccaattcct

SEQ ID NO: 76430 - DNA, 15 bp, Homo sapiens
taaatatccaattcc

SEQ ID NO: 76431 - DNA, 15 bp, Homo sapiens
ataaatatccaattc

SEQ ID NO: 76432 - DNA, 15 bp, Homo sapiens
aataaatatccaatt

SEQ ID NO: 76433 - DNA, 15 bp, Homo sapiens
gaataaatatccaat

SEQ ID NO: 76434 - DNA, 15 bp, Homo sapiens
agaataaatatccaa

SEQ ID NO: 76435 - DNA, 15 bp, Homo sapiens
aagaataaatatcca

SEQ ID NO: 76436 - DNA, 15 bp, Homo sapiens
aaagaataaatatcc

SEQ ID NO: 76437 - DNA, 15 bp, Homo sapiens
gaaagaataaatatc

SEQ ID NO: 76438 - DNA, 15 bp, Homo sapiens
agaaagaataaatat

SEQ ID NO: 76439 - DNA, 15 bp, Homo sapiens
cagaaagaataaata

SEQ ID NO: 76440 - DNA, 15 bp, Homo sapiens
tcagaaagaataaat

SEQ ID NO: 76441 - DNA, 15 bp, Homo sapiens
ctcagaaagaataaa

SEQ ID NO: 76442 - DNA, 15 bp, Homo sapiens
tctcagaaagaataa

SEQ ID NO: 76443 - DNA, 15 bp, Homo sapiens
gtctcagaaagaata

SEQ ID NO: 76444 - DNA, 15 bp, Homo sapiens
agtctcagaaagaat

SEQ ID NO: 76445 - DNA, 15 bp, Homo sapiens
tagtctcagaaagaa

SEQ ID NO: 76446 - DNA, 15 bp, Homo sapiens
atagtctcagaaaga

SEQ ID NO: 76447 - DNA, 15 bp, Homo sapiens
gatagtctcagaaag

SEQ ID NO: 76448 - DNA, 15 bp, Homo sapiens
tgatagtctcagaaa

SEQ ID NO: 76449 - DNA, 15 bp, Homo sapiens
atgatagtctcagaa

SEQ ID NO: 76450 - DNA, 15 bp, Homo sapiens
catgatagtctcaga

SEQ ID NO: 76451 - DNA, 15 bp, Homo sapiens
ccatgatagtctcag

SEQ ID NO: 76452 - DNA, 15 bp, Homo sapiens
cccatgatagtctca

SEQ ID NO: 76453 - DNA, 15 bp, Homo sapiens
tcccatgatagtctc

SEQ ID NO: 76454 - DNA, 15 bp, Homo sapiens
ctcccatgatagtct

SEQ ID NO: 76455 - DNA, 15 bp, Homo sapiens
tctcccatgatagtc

SEQ ID NO: 76456 - DNA, 15 bp, Homo sapiens
atctcccatgatagt

SEQ ID NO: 76457 - DNA, 15 bp, Homo sapiens
tatctcccatgatag

SEQ ID NO: 76458 - DNA, 15 bp, Homo sapiens
ttatctcccatgata

SEQ ID NO: 76459 - DNA, 15 bp, Homo sapiens
attatctcccatgat

SEQ ID NO: 76460 - DNA, 15 bp, Homo sapiens
cattatctcccatga

SEQ ID NO: 76461 - DNA, 15 bp, Homo sapiens
tcattatctcccatg

SEQ ID NO: 76462 - DNA, 15 bp, Homo sapiens
gtcattatctcccat

SEQ ID NO: 76463 - DNA, 15 bp, Homo sapiens
agtcattatctccca

SEQ ID NO: 76464 - DNA, 15 bp, Homo sapiens
tagtcattatctccc

SEQ ID NO: 76465 - DNA, 15 bp, Homo sapiens
atagtcattatctcc

SEQ ID NO: 76466 - DNA, 15 bp, Homo sapiens
catagtcattatctc

SEQ ID NO: 76467 - DNA, 15 bp, Homo sapiens
ccatagtcattatct

SEQ ID NO: 76468 - DNA, 15 bp, Homo sapiens
accatagtcattatc

SEQ ID NO: 76469 - DNA, 15 bp, Homo sapiens
aaccatagtcattat

SEQ ID NO: 76470 - DNA, 15 bp, Homo sapiens
caaccatagtcatta

SEQ ID NO: 76471 - DNA, 15 bp, Homo sapiens
acaaccatagtcatt

SEQ ID NO: 76472 - DNA, 15 bp, Homo sapiens
gacaaccatagtcat

SEQ ID NO: 76473 - DNA, 15 bp, Homo sapiens
ggacaaccatagtca

SEQ ID NO: 76474 - DNA, 15 bp, Homo sapiens
tggacaaccatagtc

SEQ ID NO: 76475 - DNA, 15 bp, Homo sapiens
atggacaaccatagt

SEQ ID NO: 76476 - DNA, 15 bp, Homo sapiens
catggacaaccatag

SEQ ID NO: 76477 - DNA, 15 bp, Homo sapiens
tcatggacaaccata

SEQ ID NO: 76478 - DNA, 15 bp, Homo sapiens
atcatggacaaccat

SEQ ID NO: 76479 - DNA, 15 bp, Homo sapiens
aatcatggacaacca

SEQ ID NO: 76480 - DNA, 15 bp, Homo sapiens
caatcatggacaacc

SEQ ID NO: 76481 - DNA, 15 bp, Homo sapiens
ccaatcatggacaac

SEQ ID NO: 76482 - DNA, 15 bp, Homo sapiens
tccaatcatggacaa

SEQ ID NO: 76483 - DNA, 15 bp, Homo sapiens
ctccaatcatggaca

SEQ ID NO: 76484 - DNA, 15 bp, Homo sapiens
gctccaatcatggac

SEQ ID NO: 76485 - DNA, 15 bp, Homo sapiens
ggctccaatcatgga

SEQ ID NO: 76486 - DNA, 15 bp, Homo sapiens
cggctccaatcatgg

SEQ ID NO: 76487 - DNA, 15 bp, Homo sapiens
acggctccaatcatg

SEQ ID NO: 76488 - DNA, 15 bp, Homo sapiens
aacggctccaatcat

SEQ ID NO: 76489 - DNA, 15 bp, Homo sapiens
caacggctccaatca

SEQ ID NO: 76490 - DNA, 15 bp, Homo sapiens
gcaacggctccaatc

SEQ ID NO: 76491 - DNA, 15 bp, Homo sapiens
agcaacggctccaat

SEQ ID NO: 76492 - DNA, 15 bp, Homo sapiens
cagcaacggctccaa

SEQ ID NO: 76493 - DNA, 15 bp, Homo sapiens
acagcaacggctcca

SEQ ID NO: 76494 - DNA, 15 bp, Homo sapiens
tacagcaacggctcc

SEQ ID NO: 76495 - DNA, 15 bp, Homo sapiens
ctacagcaacggctc

SEQ ID NO: 76496 - DNA, 15 bp, Homo sapiens
tctacagcaacggct

SEQ ID NO: 76497 - DNA, 15 bp, Homo sapiens
ctctacagcaacggc

SEQ ID NO: 76498 - DNA, 15 bp, Homo sapiens
actctacagcaacgg

SEQ ID NO: 76499 - DNA, 15 bp, Homo sapiens
aactctacagcaacg

SEQ ID NO: 76500 - DNA, 15 bp, Homo sapiens
caactctacagcaac

SEQ ID NO: 76501 - DNA, 15 bp, Homo sapiens
ccaactctacagcaa

SEQ ID NO: 76502 - DNA, 15 bp, Homo sapiens
accaactctacagca

SEQ ID NO: 76503 - DNA, 15 bp, Homo sapiens
aaccaactctacagc

SEQ ID NO: 76504 - DNA, 15 bp, Homo sapiens
aaaccaactctacag

SEQ ID NO: 76505 - DNA, 15 bp, Homo sapiens
aaaaccaactctaca

SEQ ID NO: 76506 - DNA, 15 bp, Homo sapiens
taaaaccaactctac

SEQ ID NO: 76507 - DNA, 15 bp, Homo sapiens
ataaaaccaactcta

SEQ ID NO: 76508 - DNA, 15 bp, Homo sapiens
aataaaaccaactct

SEQ ID NO: 76509 - DNA, 15 bp, Homo sapiens
taataaaaccaactc

SEQ ID NO: 76510 - DNA, 15 bp, Homo sapiens
ataataaaaccaact

SEQ ID NO: 76511 - DNA, 15 bp, Homo sapiens
tataataaaaccaac

SEQ ID NO: 76512 - DNA, 15 bp, Homo sapiens
ctataataaaaccaa

SEQ ID NO: 76513 - DNA, 15 bp, Homo sapiens
actataataaaacca

SEQ ID NO: 76514 - DNA, 15 bp, Homo sapiens
cactataataaaacc

SEQ ID NO: 76515 - DNA, 15 bp, Homo sapiens
acactataataaaac

SEQ ID NO: 76516 - DNA, 15 bp, Homo sapiens
tacactataataaaa

SEQ ID NO: 76517 - DNA, 15 bp, Homo sapiens
ctacactataataaa

SEQ ID NO: 76518 - DNA, 15 bp, Homo sapiens
cctacactataataa

SEQ ID NO: 76519 - DNA, 15 bp, Homo sapiens
tcctacactataata

SEQ ID NO: 76520 - DNA, 15 bp, Homo sapiens
atcctacactataat

SEQ ID NO: 76521 - DNA, 15 bp, Homo sapiens
aatcctacactataa

SEQ ID NO: 76522 - DNA, 15 bp, Homo sapiens
aaatcctacactata

SEQ ID NO: 76523 - DNA, 15 bp, Homo sapiens
caaatcctacactat

SEQ ID NO: 76524 - DNA, 15 bp, Homo sapiens
tcaaatcctacacta

SEQ ID NO: 76525 - DNA, 15 bp, Homo sapiens
ttcaaatcctacact

SEQ ID NO: 76526 - DNA, 15 bp, Homo sapiens
attcaaatcctacac

SEQ ID NO: 76527 - DNA, 15 bp, Homo sapiens
cattcaaatcctaca

SEQ ID NO: 76528 - DNA, 15 bp, Homo sapiens
ccattcaaatcctac

SEQ ID NO: 76529 - DNA, 15 bp, Homo sapiens
cccattcaaatccta

SEQ ID NO: 76530 - DNA, 15 bp, Homo sapiens
gcccattcaaatcct

SEQ ID NO: 76531 - DNA, 15 bp, Homo sapiens
ggcccattcaaatcc

SEQ ID NO: 76532 - DNA, 15 bp, Homo sapiens
tggcccattcaaatc

SEQ ID NO: 76533 - DNA, 15 bp, Homo sapiens
atggcccattcaaat

SEQ ID NO: 76534 - DNA, 15 bp, Homo sapiens
catggcccattcaaa

SEQ ID NO: 76535 - DNA, 15 bp, Homo sapiens
acatggcccattcaa

SEQ ID NO: 76536 - DNA, 15 bp, Homo sapiens
cacatggcccattca

SEQ ID NO: 76537 - DNA, 15 bp, Homo sapiens
acacatggcccattc

SEQ ID NO: 76538 - DNA, 15 bp, Homo sapiens
aacacatggcccatt

SEQ ID NO: 76539 - DNA, 15 bp, Homo sapiens
gaacacatggcccat

SEQ ID NO: 76540 - DNA, 15 bp, Homo sapiens
agaacacatggccca

SEQ ID NO: 76541 - DNA, 15 bp, Homo sapiens
gagaacacatggccc

SEQ ID NO: 76542 - DNA, 15 bp, Homo sapiens
tgagaacacatggcc

SEQ ID NO: 76543 - DNA, 15 bp, Homo sapiens
ctgagaacacatggc

SEQ ID NO: 76544 - DNA, 15 bp, Homo sapiens
tctgagaacacatgg

SEQ ID NO: 76545 - DNA, 15 bp, Homo sapiens
gtctgagaacacatg

SEQ ID NO: 76546 - DNA, 15 bp, Homo sapiens
ggtctgagaacacat

SEQ ID NO: 76547 - DNA, 15 bp, Homo sapiens
aggtctgagaacaca

SEQ ID NO: 76548 - DNA, 15 bp, Homo sapiens
gaggtctgagaacac

SEQ ID NO: 76549 - DNA, 15 bp, Homo sapiens
tgaggtctgagaaca

SEQ ID NO: 76550 - DNA, 15 bp, Homo sapiens
ctgaggtctgagaac

SEQ ID NO: 76551 - DNA, 15 bp, Homo sapiens
tctgaggtctgagaa

SEQ ID NO: 76552 - DNA, 15 bp, Homo sapiens
atctgaggtctgaga

SEQ ID NO: 76553 - DNA, 15 bp, Homo sapiens
aatctgaggtctgag

SEQ ID NO: 76554 - DNA, 15 bp, Homo sapiens
taatctgaggtctga

SEQ ID NO: 76555 - DNA, 15 bp, Homo sapiens
ttaatctgaggtctg

SEQ ID NO: 76556 - DNA, 15 bp, Homo sapiens
tttaatctgaggtct

SEQ ID NO: 76557 - DNA, 15 bp, Homo sapiens
ttttaatctgaggtc

SEQ ID NO: 76558 - DNA, 15 bp, Homo sapiens
attttaatctgaggt

SEQ ID NO: 76559 - DNA, 15 bp, Homo sapiens
cattttaatctgagg

SEQ ID NO: 76560 - DNA, 15 bp, Homo sapiens
tcattttaatctgag

SEQ ID NO: 76561 - DNA, 15 bp, Homo sapiens
ctcattttaatctga

SEQ ID NO: 76562 - DNA, 15 bp, Homo sapiens
tctcattttaatctg

SEQ ID NO: 76563 - DNA, 15 bp, Homo sapiens
ttctcattttaatct

SEQ ID NO: 76564 - DNA, 15 bp, Homo sapiens
tttctcattttaatc

SEQ ID NO: 76565 - DNA, 15 bp, Homo sapiens
ttttctcattttaat

SEQ ID NO: 76566 - DNA, 15 bp, Homo sapiens
gttttctcattttaa

SEQ ID NO: 76567 - DNA, 15 bp, Homo sapiens
agttttctcatttta

SEQ ID NO: 76568 - DNA, 15 bp, Homo sapiens
cagttttctcatttt

SEQ ID NO: 76569 - DNA, 15 bp, Homo sapiens
tcagttttctcattt

SEQ ID NO: 76570 - DNA, 15 bp, Homo sapiens
ctcagttttctcatt

SEQ ID NO: 76571 - DNA, 15 bp, Homo sapiens
gcctcagttttctca

SEQ ID NO: 76572 - DNA, 15 bp, Homo sapiens
ggcctcagttttctc

SEQ ID NO: 76573 - DNA, 15 bp, Homo sapiens
tggcctcagttttct

SEQ ID NO: 76574 - DNA, 15 bp, Homo sapiens
ctggcctcagttttc

SEQ ID NO: 76575 - DNA, 15 bp, Homo sapiens
actggcctcagtttt

SEQ ID NO: 76576 - DNA, 15 bp, Homo sapiens
cactggcctcagttt

SEQ ID NO: 76577 - DNA, 15 bp, Homo sapiens
ccactggcctcagtt

SEQ ID NO: 76578 - DNA, 15 bp, Homo sapiens
cccactggcctcagt

SEQ ID NO: 76579 - DNA, 15 bp, Homo sapiens
ccccactggcctcag

SEQ ID NO: 76580 - DNA, 15 bp, Homo sapiens
tccccactggcctca

SEQ ID NO: 76581 - DNA, 15 bp, Homo sapiens
ctccccactggcctc

SEQ ID NO: 76582 - DNA, 15 bp, Homo sapiens
gctccccactggcct

SEQ ID NO: 76583 - DNA, 15 bp, Homo sapiens
cgctccccactggcc

SEQ ID NO: 76584 - DNA, 15 bp, Homo sapiens
acgctccccactggc

SEQ ID NO: 76585 - DNA, 15 bp, Homo sapiens
cacgctccccactgg

SEQ ID NO: 76586 - DNA, 15 bp, Homo sapiens
tcacgctccccactg

SEQ ID NO: 76587 - DNA, 15 bp, Homo sapiens
gtcacgctccccact

SEQ ID NO: 76588 - DNA, 15 bp, Homo sapiens
agtcacgctccccac

SEQ ID NO: 76589 - DNA, 15 bp, Homo sapiens
aagtcacgctcccca

SEQ ID NO: 76590 - DNA, 15 bp, Homo sapiens
gaagtcacgctcccc

SEQ ID NO: 76591 - DNA, 15 bp, Homo sapiens
tgaagtcacgctccc

SEQ ID NO: 76592 - DNA, 15 bp, Homo sapiens
gtgaagtcacgctcc

SEQ ID NO: 76593 - DNA, 15 bp, Homo sapiens
tgtgaagtcacgctc

SEQ ID NO: 76594 - DNA, 15 bp, Homo sapiens
atgtgaagtcacgct

SEQ ID NO: 76595 - DNA, 15 bp, Homo sapiens
catgtgaagtcacgc

SEQ ID NO: 76596 - DNA, 15 bp, Homo sapiens
ccatgtgaagtcacg

SEQ ID NO: 76597 - DNA, 15 bp, Homo sapiens
cccatgtgaagtcac

SEQ ID NO: 76598 - DNA, 15 bp, Homo sapiens
acccatgtgaagtca

SEQ ID NO: 76599 - DNA, 15 bp, Homo sapiens
tacccatgtgaagtc

SEQ ID NO: 76600 - DNA, 15 bp, Homo sapiens
gtacccatgtgaagt

SEQ ID NO: 76601 - DNA, 15 bp, Homo sapiens
tgtacccatgtgaag

SEQ ID NO: 76602 - DNA, 15 bp, Homo sapiens
gtgtacccatgtgaa

SEQ ID NO: 76603 - DNA, 15 bp, Homo sapiens
agtgtacccatgtga

SEQ ID NO: 76604 - DNA, 15 bp, Homo sapiens
aagtgtacccatgtg

SEQ ID NO: 76605 - DNA, 15 bp, Homo sapiens
caagtgtacccatgt

SEQ ID NO: 76606 - DNA, 15 bp, Homo sapiens
acaagtgtacccatg

SEQ ID NO: 76607 - DNA, 15 bp, Homo sapiens
cacaagtgtacccat

SEQ ID NO: 76608 - DNA, 15 bp, Homo sapiens
gcacaagtgtaccca

SEQ ID NO: 76609 - DNA, 15 bp, Homo sapiens
agcacaagtgtaccc

SEQ ID NO: 76610 - DNA, 15 bp, Homo sapiens
tagcacaagtgtacc

SEQ ID NO: 76611 - DNA, 15 bp, Homo sapiens
ctagcacaagtgtac

SEQ ID NO: 76612 - DNA, 15 bp, Homo sapiens
tctagcacaagtgta

SEQ ID NO: 76613 - DNA, 15 bp, Homo sapiens
ctctagcacaagtgt

SEQ ID NO: 76614 - DNA, 15 bp, Homo sapiens
tctctagcacaagtg

SEQ ID NO: 76615 - DNA, 15 bp, Homo sapiens
gtctctagcacaagt

SEQ ID NO: 76616 - DNA, 15 bp, Homo sapiens
tgtctctagcacaag

SEQ ID NO: 76617 - DNA, 15 bp, Homo sapiens
ctgtctctagcacaa

SEQ ID NO: 76618 - DNA, 15 bp, Homo sapiens
tctgtctctagcaca

SEQ ID NO: 76619 - DNA, 15 bp, Homo sapiens
ttctgtctctagcac

SEQ ID NO: 76620 - DNA, 15 bp, Homo sapiens
gttctgtctctagca

SEQ ID NO: 76621 - DNA, 15 bp, Homo sapiens
ggttctgtctctagc

SEQ ID NO: 76622 - DNA, 15 bp, Homo sapiens
tggttctgtctctag

SEQ ID NO: 76623 - DNA, 15 bp, Homo sapiens
ctggttctgtctcta

SEQ ID NO: 76624 - DNA, 15 bp, Homo sapiens
cctggttctgtctct

SEQ ID NO: 76625 - DNA, 15 bp, Homo sapiens
tcctggttctgtctc

SEQ ID NO: 76626 - DNA, 15 bp, Homo sapiens
atcctggttctgtct

SEQ ID NO: 76627 - DNA, 15 bp, Homo sapiens
aatcctggttctgtc

SEQ ID NO: 76628 - DNA, 15 bp, Homo sapiens
gaatcctggttctgt

SEQ ID NO: 76629 - DNA, 15 bp, Homo sapiens
tgaatcctggttctg

SEQ ID NO: 76630 - DNA, 15 bp, Homo sapiens
ctgaatcctggttct

SEQ ID NO: 76631 - DNA, 15 bp, Homo sapiens
cctgaatcctggttc

SEQ ID NO: 76632 - DNA, 15 bp, Homo sapiens
tcctgaatcctggtt

SEQ ID NO: 76633 - DNA, 15 bp, Homo sapiens
gtcctgaatcctggt

SEQ ID NO: 76634 - DNA, 15 bp, Homo sapiens
agtcctgaatcctgg

SEQ ID NO: 76635 - DNA, 15 bp, Homo sapiens
aagtcctgaatcctg

SEQ ID NO: 76636 - DNA, 15 bp, Homo sapiens
gaagtcctgaatcct

SEQ ID NO: 76637 - DNA, 15 bp, Homo sapiens
agaagtcctgaatcc

SEQ ID NO: 76638 - DNA, 15 bp, Homo sapiens
cagaagtcctgaatc

SEQ ID NO: 76639 - DNA, 15 bp, Homo sapiens
ccagaagtcctgaat

SEQ ID NO: 76640 - DNA, 15 bp, Homo sapiens
gccagaagtcctgaa

SEQ ID NO: 76641 - DNA, 15 bp, Homo sapiens
agccagaagtcctga

SEQ ID NO: 76642 - DNA, 15 bp, Homo sapiens
gagccagaagtcctg

SEQ ID NO: 76643 - DNA, 15 bp, Homo sapiens
ggagccagaagtcct

SEQ ID NO: 76644 - DNA, 15 bp, Homo sapiens
aggagccagaagtcc

SEQ ID NO: 76645 - DNA, 15 bp, Homo sapiens
caggagccagaagtc

SEQ ID NO: 76646 - DNA, 15 bp, Homo sapiens
ccaggagccagaagt

SEQ ID NO: 76647 - DNA, 15 bp, Homo sapiens
accaggagccagaag

SEQ ID NO: 76648 - DNA, 15 bp, Homo sapiens
gaccaggagccagaa

SEQ ID NO: 76649 - DNA, 15 bp, Homo sapiens
ggaccaggagccaga

SEQ ID NO: 76650 - DNA, 15 bp, Homo sapiens
aggaccaggagccag

SEQ ID NO: 76651 - DNA, 15 bp, Homo sapiens
caggaccaggagcca

SEQ ID NO: 76652 - DNA, 15 bp, Homo sapiens
ccaggaccaggagcc

SEQ ID NO: 76653 - DNA, 15 bp, Homo sapiens
cccaggaccaggagc

SEQ ID NO: 76654 - DNA, 15 bp, Homo sapiens
acccaggaccaggag

SEQ ID NO: 76655 - DNA, 15 bp, Homo sapiens
aacccaggaccagga

SEQ ID NO: 76656 - DNA, 15 bp, Homo sapiens
gaacccaggaccagg

SEQ ID NO: 76657 - DNA, 15 bp, Homo sapiens
tgaacccaggaccag

SEQ ID NO: 76658 - DNA, 15 bp, Homo sapiens
atgaacccaggacca

SEQ ID NO: 76659 - DNA, 15 bp, Homo sapiens
catgaacccaggacc

SEQ ID NO: 76660 - DNA, 15 bp, Homo sapiens
ccatgaacccaggac

SEQ ID NO: 76661 - DNA, 15 bp, Homo sapiens
gccatgaacccagga

SEQ ID NO: 76662 - DNA, 15 bp, Homo sapiens
ggccatgaacccagg

SEQ ID NO: 76663 - DNA, 15 bp, Homo sapiens
gggccatgaacccag

SEQ ID NO: 76664 - DNA, 15 bp, Homo sapiens
tgggccatgaaccca

SEQ ID NO: 76665 - DNA, 15 bp, Homo sapiens
ttgggccatgaaccc

SEQ ID NO: 76666 - DNA, 15 bp, Homo sapiens
attgggccatgaacc

SEQ ID NO: 76667 - DNA, 15 bp, Homo sapiens
cattgggccatgaac

SEQ ID NO: 76668 - DNA, 15 bp, Homo sapiens
acattgggccatgaa

SEQ ID NO: 76669 - DNA, 15 bp, Homo sapiens
tacattgggccatga

SEQ ID NO: 76670 - DNA, 15 bp, Homo sapiens
ctacattgggccatg

SEQ ID NO: 76671 - DNA, 15 bp, Homo sapiens
actacattgggccat

SEQ ID NO: 76672 - DNA, 15 bp, Homo sapiens
gactacattgggcca

SEQ ID NO: 76673 - DNA, 15 bp, Homo sapiens
agactacattgggcc

SEQ ID NO: 76674 - DNA, 15 bp, Homo sapiens
aagactacattgggc

SEQ ID NO: 76675 - DNA, 15 bp, Homo sapiens
aaagactacattggg

SEQ ID NO: 76676 - DNA, 15 bp, Homo sapiens
gaaagactacattgg

SEQ ID NO: 76677 - DNA, 15 bp, Homo sapiens
agaaagactacattg

SEQ ID NO: 76678 - DNA, 15 bp, Homo sapiens
gagaaagactacatt

SEQ ID NO: 76679 - DNA, 15 bp, Homo sapiens
tgagaaagactacat

SEQ ID NO: 76680 - DNA, 15 bp, Homo sapiens
ctgagaaagactaca

SEQ ID NO: 76681 - DNA, 15 bp, Homo sapiens
actgagaaagactac

SEQ ID NO: 76682 - DNA, 15 bp, Homo sapiens
gactgagaaagacta

SEQ ID NO: 76683 - DNA, 15 bp, Homo sapiens
agactgagaaagact

SEQ ID NO: 76684 - DNA, 15 bp, Homo sapiens
aagactgagaaagac

SEQ ID NO: 76685 - DNA, 15 bp, Homo sapiens
gaagactgagaaaga

SEQ ID NO: 76686 - DNA, 15 bp, Homo sapiens
tgaagactgagaaag

SEQ ID NO: 76687 - DNA, 15 bp, Homo sapiens
ctgaagactgagaaa

SEQ ID NO: 76688 - DNA, 15 bp, Homo sapiens
cctgaagactgagaa

SEQ ID NO: 76689 - DNA, 15 bp, Homo sapiens
tcctgaagactgaga

SEQ ID NO: 76690 - DNA, 15 bp, Homo sapiens
ctcctgaagactgag

SEQ ID NO: 76691 - DNA, 15 bp, Homo sapiens
cctcctgaagactga

SEQ ID NO: 76692 - DNA, 15 bp, Homo sapiens
tcctcctgaagactg

SEQ ID NO: 76693 - DNA, 15 bp, Homo sapiens
ctcctcctgaagact

SEQ ID NO: 76694 - DNA, 15 bp, Homo sapiens
cctcctcctgaagac

SEQ ID NO: 76695 - DNA, 15 bp, Homo sapiens
tcctcctcctgaaga

SEQ ID NO: 76696 - DNA, 15 bp, Homo sapiens
ttcctcctcctgaag

SEQ ID NO: 76697 - DNA, 15 bp, Homo sapiens
cttcctcctcctgaa

SEQ ID NO: 76698 - DNA, 15 bp, Homo sapiens
ccttcctcctcctga

SEQ ID NO: 76699 - DNA, 15 bp, Homo sapiens
cccttcctcctcctg

SEQ ID NO: 76700 - DNA, 15 bp, Homo sapiens
gcccttcctcctcct

SEQ ID NO: 76701 - DNA, 15 bp, Homo sapiens
tgcccttcctcctcc

SEQ ID NO: 76702 - DNA, 15 bp, Homo sapiens
ctgcccttcctcctc

SEQ ID NO: 76703 - DNA, 15 bp, Homo sapiens
cctgcccttcctcct

SEQ ID NO: 76704 - DNA, 15 bp, Homo sapiens
tcctgcccttcctcc

SEQ ID NO: 76705 - DNA, 15 bp, Homo sapiens
gtcctgcccttcctc

SEQ ID NO: 76706 - DNA, 15 bp, Homo sapiens
ggtcctgcccttcct

SEQ ID NO: 76707 - DNA, 15 bp, Homo sapiens
gggtcctgcccttcc

SEQ ID NO: 76708 - DNA, 15 bp, Homo sapiens
tgggtcctgcccttc

SEQ ID NO: 76709 - DNA, 15 bp, Homo sapiens
ctgggtcctgccctt

SEQ ID NO: 76710 - DNA, 15 bp, Homo sapiens
actgggtcctgccct

SEQ ID NO: 76711 - DNA, 15 bp, Homo sapiens
cactgggtcctgccc

SEQ ID NO: 76712 - DNA, 15 bp, Homo sapiens
acactgggtcctgcc

SEQ ID NO: 76713 - DNA, 15 bp, Homo sapiens
aacactgggtcctgc

SEQ ID NO: 76714 - DNA, 15 bp, Homo sapiens
gaacactgggtcctg

SEQ ID NO: 76715 - DNA, 15 bp, Homo sapiens
agaacactgggtcct

SEQ ID NO: 76716 - DNA, 15 bp, Homo sapiens
cagaacactgggtcc

SEQ ID NO: 76717 - DNA, 15 bp, Homo sapiens
tcagaacactgggtc

SEQ ID NO: 76718 - DNA, 15 bp, Homo sapiens
ctcagaacactgggt

SEQ ID NO: 76719 - DNA, 15 bp, Homo sapiens
actcagaacactggg

SEQ ID NO: 76720 - DNA, 15 bp, Homo sapiens
gactcagaacactgg

SEQ ID NO: 76721 - DNA, 15 bp, Homo sapiens
tgactcagaacactg

SEQ ID NO: 76722 - DNA, 15 bp, Homo sapiens
gtgactcagaacact

SEQ ID NO: 76723 - DNA, 15 bp, Homo sapiens
ggtgactcagaacac

SEQ ID NO: 76724 - DNA, 15 bp, Homo sapiens
gggtgactcagaaca

SEQ ID NO: 76725 - DNA, 15 bp, Homo sapiens
agggtgactcagaac

SEQ ID NO: 76726 - DNA, 15 bp, Homo sapiens
cagggtgactcagaa

SEQ ID NO: 76727 - DNA, 15 bp, Homo sapiens
tcagggtgactcaga

SEQ ID NO: 76728 - DNA, 15 bp, Homo sapiens
ttcagggtgactcag

SEQ ID NO: 76729 - DNA, 15 bp, Homo sapiens
attcagggtgactca

SEQ ID NO: 76730 - DNA, 15 bp, Homo sapiens
cattcagggtgactc

SEQ ID NO: 76731 - DNA, 15 bp, Homo sapiens
acattcagggtgact

SEQ ID NO: 76732 - DNA, 15 bp, Homo sapiens
cacattcagggtgac

SEQ ID NO: 76733 - DNA, 15 bp, Homo sapiens
tcacattcagggtga

SEQ ID NO: 76734 - DNA, 15 bp, Homo sapiens
ctcacattcagggtg

SEQ ID NO: 76735 - DNA, 15 bp, Homo sapiens
gctcacattcagggt

SEQ ID NO: 76736 - DNA, 15 bp, Homo sapiens
tgctcacattcaggg

SEQ ID NO: 76737 - DNA, 15 bp, Homo sapiens
gtgctcacattcagg

SEQ ID NO: 76738 - DNA, 15 bp, Homo sapiens
agtgctcacattcag

SEQ ID NO: 76739 - DNA, 15 bp, Homo sapiens
tagtgctcacattca

SEQ ID NO: 76740 - DNA, 15 bp, Homo sapiens
atagtgctcacattc

SEQ ID NO: 76741 - DNA, 15 bp, Homo sapiens
aatagtgctcacatt

SEQ ID NO: 76742 - DNA, 15 bp, Homo sapiens
aaatagtgctcacat

SEQ ID NO: 76743 - DNA, 15 bp, Homo sapiens
taaatagtgctcaca

SEQ ID NO: 76744 - DNA, 15 bp, Homo sapiens
gtaaatagtgctcac

SEQ ID NO: 76745 - DNA, 15 bp, Homo sapiens
agtaaatagtgctca

SEQ ID NO: 76746 - DNA, 15 bp, Homo sapiens
aagtaaatagtgctc

SEQ ID NO: 76747 - DNA, 15 bp, Homo sapiens
gaagtaaatagtgct

SEQ ID NO: 76748 - DNA, 15 bp, Homo sapiens
cgaagtaaatagtgc

SEQ ID NO: 76749 - DNA, 15 bp, Homo sapiens
acgaagtaaatagtg

SEQ ID NO: 76750 - DNA, 15 bp, Homo sapiens
cacgaagtaaatagt

SEQ ID NO: 76751 - DNA, 15 bp, Homo sapiens
tcacgaagtaaatag

SEQ ID NO: 76752 - DNA, 15 bp, Homo sapiens
ttcacgaagtaaata

SEQ ID NO: 76753 - DNA, 15 bp, Homo sapiens
gttcacgaagtaaat

SEQ ID NO: 76754 - DNA, 15 bp, Homo sapiens
agttcacgaagtaaa

SEQ ID NO: 76755 - DNA, 15 bp, Homo sapiens
aagttcacgaagtaa

SEQ ID NO: 76756 - DNA, 15 bp, Homo sapiens
gaagttcacgaagta

SEQ ID NO: 76757 - DNA, 15 bp, Homo sapiens
agaagttcacgaagt

SEQ ID NO: 76758 - DNA, 15 bp, Homo sapiens
aagaagttcacgaag

SEQ ID NO: 76759 - DNA, 15 bp, Homo sapiens
caagaagttcacgaa

SEQ ID NO: 76760 - DNA, 15 bp, Homo sapiens
ccaagaagttcacga

SEQ ID NO: 76761 - DNA, 15 bp, Homo sapiens
gccaagaagttcacg

SEQ ID NO: 76762 - DNA, 15 bp, Homo sapiens
agccaagaagttcac

SEQ ID NO: 76763 - DNA, 15 bp, Homo sapiens
aagccaagaagttca

SEQ ID NO: 76764 - DNA, 15 bp, Homo sapiens
taagccaagaagttc

SEQ ID NO: 76765 - DNA, 15 bp, Homo sapiens
ctaagccaagaagtt

SEQ ID NO: 76766 - DNA, 15 bp, Homo sapiens
actaagccaagaagt

SEQ ID NO: 76767 - DNA, 15 bp, Homo sapiens
cactaagccaagaag

SEQ ID NO: 76768 - DNA, 15 bp, Homo sapiens
gcactaagccaagaa

SEQ ID NO: 76769 - DNA, 15 bp, Homo sapiens
ggcactaagccaaga

SEQ ID NO: 76770 - DNA, 15 bp, Homo sapiens
aggcactaagccaag

SEQ ID NO: 76771 - DNA, 15 bp, Homo sapiens
gaggcactaagccaa

SEQ ID NO: 76772 - DNA, 15 bp, Homo sapiens
agaggcactaagcca

SEQ ID NO: 76773 - DNA, 15 bp, Homo sapiens
cagaggcactaagcc

SEQ ID NO: 76774 - DNA, 15 bp, Homo sapiens
gcagaggcactaagc

SEQ ID NO: 76775 - DNA, 15 bp, Homo sapiens
ggcagaggcactaag

SEQ ID NO: 76776 - DNA, 15 bp, Homo sapiens
tggcagaggcactaa

SEQ ID NO: 76777 - DNA, 15 bp, Homo sapiens
ctggcagaggcacta

SEQ ID NO: 76778 - DNA, 15 bp, Homo sapiens
cctggcagaggcact

SEQ ID NO: 76779 - DNA, 15 bp, Homo sapiens
acctggcagaggcac

SEQ ID NO: 76780 - DNA, 15 bp, Homo sapiens
cacctggcagaggca

SEQ ID NO: 76781 - DNA, 15 bp, Homo sapiens
ccacctggcagaggc

SEQ ID NO: 76782 - DNA, 15 bp, Homo sapiens
gccacctggcagagg

SEQ ID NO: 76783 - DNA, 15 bp, Homo sapiens
ggccacctggcagag

SEQ ID NO: 76784 - DNA, 15 bp, Homo sapiens
tggccacctggcaga

SEQ ID NO: 76785 - DNA, 15 bp, Homo sapiens
atggccacctggcag

SEQ ID NO: 76786 - DNA, 15 bp, Homo sapiens
tatggccacctggca

SEQ ID NO: 76787 - DNA, 15 bp, Homo sapiens
ttatggccacctggc

SEQ ID NO: 76788 - DNA, 15 bp, Homo sapiens
gttatggccacctgg

SEQ ID NO: 76789 - DNA, 15 bp, Homo sapiens
ggttatggccacctg

SEQ ID NO: 76790 - DNA, 15 bp, Homo sapiens
aggttatggccacct

SEQ ID NO: 76791 - DNA, 15 bp, Homo sapiens
gaggttatggccacc

SEQ ID NO: 76792 - DNA, 15 bp, Homo sapiens
agaggttatggccac

SEQ ID NO: 76793 - DNA, 15 bp, Homo sapiens
cagaggttatggcca

SEQ ID NO: 76794 - DNA, 15 bp, Homo sapiens
ccagaggttatggcc

SEQ ID NO: 76795 - DNA, 15 bp, Homo sapiens
gccagaggttatggc

SEQ ID NO: 76796 - DNA, 15 bp, Homo sapiens
ggccagaggttatgg

SEQ ID NO: 76797 - DNA, 15 bp, Homo sapiens
aggccagaggttatg

SEQ ID NO: 76798 - DNA, 15 bp, Homo sapiens
aaggccagaggttat

SEQ ID NO: 76799 - DNA, 15 bp, Homo sapiens
caaggccagaggtta

SEQ ID NO: 76800 - DNA, 15 bp, Homo sapiens
acaaggccagaggtt

SEQ ID NO: 76801 - DNA, 15 bp, Homo sapiens
cacaaggccagaggt

SEQ ID NO: 76802 - DNA, 15 bp, Homo sapiens
acacaaggccagagg

SEQ ID NO: 76803 - DNA, 15 bp, Homo sapiens
aacacaaggccagag

SEQ ID NO: 76804 - DNA, 15 bp, Homo sapiens
caacacaaggccaga

SEQ ID NO: 76805 - DNA, 15 bp, Homo sapiens
gcaacacaaggccag

SEQ ID NO: 76806 - DNA, 15 bp, Homo sapiens
ggcaacacaaggcca

SEQ ID NO: 76807 - DNA, 15 bp, Homo sapiens
tggcaacacaaggcc

SEQ ID NO: 76808 - DNA, 15 bp, Homo sapiens
ctggcaacacaaggc

SEQ ID NO: 76809 - DNA, 15 bp, Homo sapiens
tctggcaacacaagg

SEQ ID NO: 76810 - DNA, 15 bp, Homo sapiens
ctctggcaacacaag

SEQ ID NO: 76811 - DNA, 15 bp, Homo sapiens
tctctggcaacacaa

SEQ ID NO: 76812 - DNA, 15 bp, Homo sapiens
ttctctggcaacaca

SEQ ID NO: 76813 - DNA, 15 bp, Homo sapiens
tttctctggcaacac

SEQ ID NO: 76814 - DNA, 15 bp, Homo sapiens
ttttctctggcaaca

SEQ ID NO: 76815 - DNA, 15 bp, Homo sapiens
cttttctctggcaac

SEQ ID NO: 76816 - DNA, 15 bp, Homo sapiens
ccttttctctggcaa

SEQ ID NO: 76817 - DNA, 15 bp, Homo sapiens
accttttctctggca

SEQ ID NO: 76818 - DNA, 15 bp, Homo sapiens
aaccttttctctggc

SEQ ID NO: 76819 - DNA, 15 bp, Homo sapiens
aaaccttttctctgg

SEQ ID NO: 76820 - DNA, 15 bp, Homo sapiens
taaaccttttctctg

SEQ ID NO: 76821 - DNA, 15 bp, Homo sapiens
ctaaaccttttctct

SEQ ID NO: 76822 - DNA, 15 bp, Homo sapiens
actaaaccttttctc

SEQ ID NO: 76823 - DNA, 15 bp, Homo sapiens
aactaaaccttttct

SEQ ID NO: 76824 - DNA, 15 bp, Homo sapiens
aaactaaaccttttc

SEQ ID NO: 76825 - DNA, 15 bp, Homo sapiens
aaaactaaacctttt

SEQ ID NO: 76826 - DNA, 15 bp, Homo sapiens
gaaaactaaaccttt

SEQ ID NO: 76827 - DNA, 15 bp, Homo sapiens
tgaaaactaaacctt

SEQ ID NO: 76828 - DNA, 15 bp, Homo sapiens
ctgaaaactaaacct

SEQ ID NO: 76829 - DNA, 15 bp, Homo sapiens
cctgaaaactaaacc

SEQ ID NO: 76830 - DNA, 15 bp, Homo sapiens
gcctgaaaactaaac

SEQ ID NO: 76831 - DNA, 15 bp, Homo sapiens
agcctgaaaactaaa

SEQ ID NO: 76832 - DNA, 15 bp, Homo sapiens
gagcctgaaaactaa

SEQ ID NO: 76833 - DNA, 15 bp, Homo sapiens
ggagcctgaaaacta

SEQ ID NO: 76834 - DNA, 15 bp, Homo sapiens
tggagcctgaaaact

SEQ ID NO: 76835 - DNA, 15 bp, Homo sapiens
atggagcctgaaaac

SEQ ID NO: 76836 - DNA, 15 bp, Homo sapiens
aatggagcctgaaaa

SEQ ID NO: 76837 - DNA, 15 bp, Homo sapiens
caatggagcctgaaa

SEQ ID NO: 76838 - DNA, 15 bp, Homo sapiens
gcaatggagcctgaa

SEQ ID NO: 76839 - DNA, 15 bp, Homo sapiens
agcaatggagcctga

SEQ ID NO: 76840 - DNA, 15 bp, Homo sapiens
aagcaatggagcctg

SEQ ID NO: 76841 - DNA, 15 bp, Homo sapiens
gaagcaatggagcct

SEQ ID NO: 76842 - DNA, 15 bp, Homo sapiens
ggaagcaatggagcc

SEQ ID NO: 76843 - DNA, 15 bp, Homo sapiens
gggaagcaatggagc

SEQ ID NO: 76844 - DNA, 15 bp, Homo sapiens
tgggaagcaatggag

SEQ ID NO: 76845 - DNA, 15 bp, Homo sapiens
ctgggaagcaatgga

SEQ ID NO: 76846 - DNA, 15 bp, Homo sapiens
gctgggaagcaatgg

SEQ ID NO: 76847 - DNA, 15 bp, Homo sapiens
agctgggaagcaatg

SEQ ID NO: 76848 - DNA, 15 bp, Homo sapiens
cagctgggaagcaat

SEQ ID NO: 76849 - DNA, 15 bp, Homo sapiens
gcagctgggaagcaa

SEQ ID NO: 76850 - DNA, 15 bp, Homo sapiens
ggcagctgggaagca

SEQ ID NO: 76851 - DNA, 15 bp, Homo sapiens
tggcagctgggaagc

SEQ ID NO: 76852 - DNA, 15 bp, Homo sapiens
ttggcagctgggaag

SEQ ID NO: 76853 - DNA, 15 bp, Homo sapiens
cttggcagctgggaa

SEQ ID NO: 76854 - DNA, 15 bp, Homo sapiens
tcttggcagctggga

SEQ ID NO: 76855 - DNA, 15 bp, Homo sapiens
ttcttggcagctggg

SEQ ID NO: 76856 - DNA, 15 bp, Homo sapiens
attcttggcagctgg

SEQ ID NO: 76857 - DNA, 15 bp, Homo sapiens
cattcttggcagctg

SEQ ID NO: 76858 - DNA, 15 bp, Homo sapiens
gcattcttggcagct

SEQ ID NO: 76859 - DNA, 15 bp, Homo sapiens
ggcattcttggcagc

SEQ ID NO: 76860 - DNA, 15 bp, Homo sapiens
aggcattcttggcag

SEQ ID NO: 76861 - DNA, 15 bp, Homo sapiens
aaggcattcttggca

SEQ ID NO: 76862 - DNA, 15 bp, Homo sapiens
caaggcattcttggc

SEQ ID NO: 76863 - DNA, 15 bp, Homo sapiens
ccaaggcattcttgg

SEQ ID NO: 76864 - DNA, 15 bp, Homo sapiens
accaaggcattcttg

SEQ ID NO: 76865 - DNA, 15 bp, Homo sapiens
caccaaggcattctt

SEQ ID NO: 76866 - DNA, 15 bp, Homo sapiens
gcaccaaggcattct

SEQ ID NO: 76867 - DNA, 15 bp, Homo sapiens
tgcaccaaggcattc

SEQ ID NO: 76868 - DNA, 15 bp, Homo sapiens
ctgcaccaaggcatt

SEQ ID NO: 76869 - DNA, 15 bp, Homo sapiens
gctgcaccaaggcat

SEQ ID NO: 76870 - DNA, 15 bp, Homo sapiens
tgctgcaccaaggca

SEQ ID NO: 76871 - DNA, 15 bp, Homo sapiens
gtgctgcaccaaggc

SEQ ID NO: 76872 - DNA, 15 bp, Homo sapiens
tgtgctgcaccaagg

SEQ ID NO: 76873 - DNA, 15 bp, Homo sapiens
ctgtgctgcaccaag

SEQ ID NO: 76874 - DNA, 15 bp, Homo sapiens
actgtgctgcaccaa

SEQ ID NO: 76875 - DNA, 15 bp, Homo sapiens
gactgtgctgcacca

SEQ ID NO: 76876 - DNA, 15 bp, Homo sapiens
tgactgtgctgcacc

SEQ ID NO: 76877 - DNA, 15 bp, Homo sapiens
atgactgtgctgcac

SEQ ID NO: 76878 - DNA, 15 bp, Homo sapiens
tatgactgtgctgca

SEQ ID NO: 76879 - DNA, 15 bp, Homo sapiens
ctatgactgtgctgc

SEQ ID NO: 76880 - DNA, 15 bp, Homo sapiens
cctatgactgtgctg

SEQ ID NO: 76881 - DNA, 15 bp, Homo sapiens
gcctatgactgtgct

SEQ ID NO: 76882 - DNA, 15 bp, Homo sapiens
ggcctatgactgtgc

SEQ ID NO: 76883 - DNA, 15 bp, Homo sapiens
gggcctatgactgtg

SEQ ID NO: 76884 - DNA, 15 bp, Homo sapiens
agggcctatgactgt

SEQ ID NO: 76885 - DNA, 15 bp, Homo sapiens
cagggcctatgactg

SEQ ID NO: 76886 - DNA, 15 bp, Homo sapiens
gcagggcctatgact

SEQ ID NO: 76887 - DNA, 15 bp, Homo sapiens
tgcagggcctatgac

SEQ ID NO: 76888 - DNA, 15 bp, Homo sapiens
atgcagggcctatga

SEQ ID NO: 76889 - DNA, 15 bp, Homo sapiens
aatgcagggcctatg

SEQ ID NO: 76890 - DNA, 15 bp, Homo sapiens
gaatgcagggcctat

SEQ ID NO: 76891 - DNA, 15 bp, Homo sapiens
ggaatgcagggccta

SEQ ID NO: 76892 - DNA, 15 bp, Homo sapiens
aggaatgcagggcct

SEQ ID NO: 76893 - DNA, 15 bp, Homo sapiens
gaggaatgcagggcc

SEQ ID NO: 76894 - DNA, 15 bp, Homo sapiens
tgaggaatgcagggc

SEQ ID NO: 76895 - DNA, 15 bp, Homo sapiens
atgaggaatgcaggg

SEQ ID NO: 76896 - DNA, 15 bp, Homo sapiens
aatgaggaatgcagg

SEQ ID NO: 76897 - DNA, 15 bp, Homo sapiens
caatgaggaatgcag

SEQ ID NO: 76898 - DNA, 15 bp, Homo sapiens
gcaatgaggaatgca

SEQ ID NO: 76899 - DNA, 15 bp, Homo sapiens
ggcaatgaggaatgc

SEQ ID NO: 76900 - DNA, 15 bp, Homo sapiens
cggcaatgaggaatg

SEQ ID NO: 76901 - DNA, 15 bp, Homo sapiens
acggcaatgaggaat

SEQ ID NO: 76902 - DNA, 15 bp, Homo sapiens
cacggcaatgaggaa

SEQ ID NO: 76903 - DNA, 15 bp, Homo sapiens
gcacggcaatgagga

SEQ ID NO: 76904 - DNA, 15 bp, Homo sapiens
agcacggcaatgagg

SEQ ID NO: 76905 - DNA, 15 bp, Homo sapiens
cagcacggcaatgag

SEQ ID NO: 76906 - DNA, 15 bp, Homo sapiens
ccagcacggcaatga

SEQ ID NO: 76907 - DNA, 15 bp, Homo sapiens
accagcacggcaatg

SEQ ID NO: 76908 - DNA, 15 bp, Homo sapiens
aaccagcacggcaat

SEQ ID NO: 76909 - DNA, 15 bp, Homo sapiens
caaccagcacggcaa

SEQ ID NO: 76910 - DNA, 15 bp, Homo sapiens
ccaaccagcacggca

SEQ ID NO: 76911 - DNA, 15 bp, Homo sapiens
accaaccagcacggc

SEQ ID NO: 76912 - DNA, 15 bp, Homo sapiens
gaccaaccagcacgg

SEQ ID NO: 76913 - DNA, 15 bp, Homo sapiens
cgaccaaccagcacg

SEQ ID NO: 76914 - DNA, 15 bp, Homo sapiens
ccgaccaaccagcac

SEQ ID NO: 76915 - DNA, 15 bp, Homo sapiens
cccgaccaaccagca

SEQ ID NO: 76916 - DNA, 15 bp, Homo sapiens
ccccgaccaaccagc

SEQ ID NO: 76917 - DNA, 15 bp, Homo sapiens
tccccgaccaaccag

SEQ ID NO: 76918 - DNA, 15 bp, Homo sapiens
ctccccgaccaacca

SEQ ID NO: 76919 - DNA, 15 bp, Homo sapiens
cctccccgaccaacc

SEQ ID NO: 76920 - DNA, 15 bp, Homo sapiens
acctccccgaccaac

SEQ ID NO: 76921 - DNA, 15 bp, Homo sapiens
cacctccccgaccaa

SEQ ID NO: 76922 - DNA, 15 bp, Homo sapiens
ccacctccccgacca

SEQ ID NO: 76923 - DNA, 15 bp, Homo sapiens
cccacctccccgacc

SEQ ID NO: 76924 - DNA, 15 bp, Homo sapiens
gcccacctccccgac

SEQ ID NO: 76925 - DNA, 15 bp, Homo sapiens
agcccacctccccga

SEQ ID NO: 76926 - DNA, 15 bp, Homo sapiens
cagcccacctccccg

SEQ ID NO: 76927 - DNA, 15 bp, Homo sapiens
ccagcccacctcccc

SEQ ID NO: 76928 - DNA, 15 bp, Homo sapiens
tccagcccacctccc

SEQ ID NO: 76929 - DNA, 15 bp, Homo sapiens
gtccagcccacctcc

SEQ ID NO: 76930 - DNA, 15 bp, Homo sapiens
agtccagcccacctc

SEQ ID NO: 76931 - DNA, 15 bp, Homo sapiens
gagtccagcccacct

SEQ ID NO: 76932 - DNA, 15 bp, Homo sapiens
cgagtccagcccacc

SEQ ID NO: 76933 - DNA, 15 bp, Homo sapiens
acgagtccagcccac

SEQ ID NO: 76934 - DNA, 15 bp, Homo sapiens
tacgagtccagccca

SEQ ID NO: 76935 - DNA, 15 bp, Homo sapiens
ctacgagtccagccc

SEQ ID NO: 76936 - DNA, 15 bp, Homo sapiens
cctacgagtccagcc

SEQ ID NO: 76937 - DNA, 15 bp, Homo sapiens
ccctacgagtccagc

SEQ ID NO: 76938 - DNA, 15 bp, Homo sapiens
tccctacgagtccag

SEQ ID NO: 76939 - DNA, 15 bp, Homo sapiens
atccctacgagtcca

SEQ ID NO: 76940 - DNA, 15 bp, Homo sapiens
aatccctacgagtcc

SEQ ID NO: 76941 - DNA, 15 bp, Homo sapiens
aaatccctacgagtc

SEQ ID NO: 76942 - DNA, 15 bp, Homo sapiens
caaatccctacgagt

SEQ ID NO: 76943 - DNA, 15 bp, Homo sapiens
gcaaatccctacgag

SEQ ID NO: 76944 - DNA, 15 bp, Homo sapiens
ggcaaatccctacga

SEQ ID NO: 76945 - DNA, 15 bp, Homo sapiens
gggcaaatccctacg

SEQ ID NO: 76946 - DNA, 15 bp, Homo sapiens
ggggcaaatccctac

SEQ ID NO: 76947 - DNA, 15 bp, Homo sapiens
aggggcaaatcccta

SEQ ID NO: 76948 - DNA, 15 bp, Homo sapiens
aaggggcaaatccct

SEQ ID NO: 76949 - DNA, 15 bp, Homo sapiens
caaggggcaaatccc

SEQ ID NO: 76950 - DNA, 15 bp, Homo sapiens
ccaaggggcaaatcc

SEQ ID NO: 76951 - DNA, 15 bp, Homo sapiens
gccaaggggcaaatc

SEQ ID NO: 76952 - DNA, 15 bp, Homo sapiens
ggccaaggggcaaat

SEQ ID NO: 76953 - DNA, 15 bp, Homo sapiens
aggccaaggggcaaa

SEQ ID NO: 76954 - DNA, 15 bp, Homo sapiens
aaggccaaggggcaa

SEQ ID NO: 76955 - DNA, 15 bp, Homo sapiens
caaggccaaggggca

SEQ ID NO: 76956 - DNA, 15 bp, Homo sapiens
acaaggccaaggggc

SEQ ID NO: 76957 - DNA, 15 bp, Homo sapiens
aacaaggccaagggg

SEQ ID NO: 76958 - DNA, 15 bp, Homo sapiens
aaacaaggccaaggg

SEQ ID NO: 76959 - DNA, 15 bp, Homo sapiens
gaaacaaggccaagg

SEQ ID NO: 76960 - DNA, 15 bp, Homo sapiens
agaaacaaggccaag

SEQ ID NO: 76961 - DNA, 15 bp, Homo sapiens
tagaaacaaggccaa

SEQ ID NO: 76962 - DNA, 15 bp, Homo sapiens
ttagaaacaaggcca

SEQ ID NO: 76963 - DNA, 15 bp, Homo sapiens
gttagaaacaaggcc

SEQ ID NO: 76964 - DNA, 15 bp, Homo sapiens
tgttagaaacaaggc

SEQ ID NO: 76965 - DNA, 15 bp, Homo sapiens
gtgttagaaacaagg

SEQ ID NO: 76966 - DNA, 15 bp, Homo sapiens
agtgttagaaacaag

SEQ ID NO: 76967 - DNA, 15 bp, Homo sapiens
aagtgttagaaacaa

SEQ ID NO: 76968 - DNA, 15 bp, Homo sapiens
caagtgttagaaaca

SEQ ID NO: 76969 - DNA, 15 bp, Homo sapiens
gcaagtgttagaaac

SEQ ID NO: 76970 - DNA, 15 bp, Homo sapiens
ggcaagtgttagaaa

SEQ ID NO: 76971 - DNA, 15 bp, Homo sapiens
cggcaagtgttagaa

SEQ ID NO: 76972 - DNA, 15 bp, Homo sapiens
acggcaagtgttaga

SEQ ID NO: 76973 - DNA, 15 bp, Homo sapiens
aacggcaagtgttag

SEQ ID NO: 76974 - DNA, 15 bp, Homo sapiens
aaacggcaagtgtta

SEQ ID NO: 76975 - DNA, 15 bp, Homo sapiens
gaaacggcaagtgtt

SEQ ID NO: 76976 - DNA, 15 bp, Homo sapiens
ggaaacggcaagtgt

SEQ ID NO: 76977 - DNA, 15 bp, Homo sapiens
aggaaacggcaagtg

SEQ ID NO: 76978 - DNA, 15 bp, Homo sapiens
caggaaacggcaagt

SEQ ID NO: 76979 - DNA, 15 bp, Homo sapiens
gcaggaaacggcaag

SEQ ID NO: 76980 - DNA, 15 bp, Homo sapiens
agcaggaaacggcaa

SEQ ID NO: 76981 - DNA, 15 bp, Homo sapiens
cagcaggaaacggca

SEQ ID NO: 76982 - DNA, 15 bp, Homo sapiens
acagcaggaaacggc

SEQ ID NO: 76983 - DNA, 15 bp, Homo sapiens
gacagcaggaaacgg

SEQ ID NO: 76984 - DNA, 15 bp, Homo sapiens
ggacagcaggaaacg

SEQ ID NO: 76985 - DNA, 15 bp, Homo sapiens
gggacagcaggaaac

SEQ ID NO: 76986 - DNA, 15 bp, Homo sapiens
ggggacagcaggaaa

SEQ ID NO: 76987 - DNA, 15 bp, Homo sapiens
gggggacagcaggaa

SEQ ID NO: 76988 - DNA, 15 bp, Homo sapiens
agggggacagcagga

SEQ ID NO: 76989 - DNA, 15 bp, Homo sapiens
cagggggacagcagg

SEQ ID NO: 76990 - DNA, 15 bp, Homo sapiens
gcagggggacagcag

SEQ ID NO: 76991 - DNA, 15 bp, Homo sapiens
ggcagggggacagca

SEQ ID NO: 76992 - DNA, 15 bp, Homo sapiens
gggcagggggacagc

SEQ ID NO: 76993 - DNA, 15 bp, Homo sapiens
ggggcagggggacag

SEQ ID NO: 76994 - DNA, 15 bp, Homo sapiens
gggggcagggggaca

SEQ ID NO: 76995 - DNA, 15 bp, Homo sapiens
agggggcagggggac

SEQ ID NO: 76996 - DNA, 15 bp, Homo sapiens
gagggggcaggggga

SEQ ID NO: 76997 - DNA, 15 bp, Homo sapiens
ggagggggcaggggg

SEQ ID NO: 76998 - DNA, 15 bp, Homo sapiens
tggagggggcagggg

SEQ ID NO: 76999 - DNA, 15 bp, Homo sapiens
gtggagggggcaggg

SEQ ID NO: 77000 - DNA, 15 bp, Homo sapiens
agtggagggggcagg

SEQ ID NO: 77001 - DNA, 15 bp, Homo sapiens
cagtggagggggcag

SEQ ID NO: 77002 - DNA, 15 bp, Homo sapiens
gcagtggagggggca

SEQ ID NO: 77003 - DNA, 15 bp, Homo sapiens
ggcagtggagggggc

SEQ ID NO: 77004 - DNA, 15 bp, Homo sapiens
aggcagtggaggggg

SEQ ID NO: 77005 - DNA, 15 bp, Homo sapiens
caggcagtggagggg

SEQ ID NO: 77006 - DNA, 15 bp, Homo sapiens
ccaggcagtggaggg

SEQ ID NO: 77007 - DNA, 15 bp, Homo sapiens
cccaggcagtggagg

SEQ ID NO: 77008 - DNA, 15 bp, Homo sapiens
acccaggcagtggag

SEQ ID NO: 77009 - DNA, 15 bp, Homo sapiens
tacccaggcagtgga

SEQ ID NO: 77010 - DNA, 15 bp, Homo sapiens
ttacccaggcagtgg

SEQ ID NO: 77011 - DNA, 15 bp, Homo sapiens
tttacccaggcagtg

SEQ ID NO: 77012 - DNA, 15 bp, Homo sapiens
ctttacccaggcagt

SEQ ID NO: 77013 - DNA, 15 bp, Homo sapiens
tctttacccaggcag

SEQ ID NO: 77014 - DNA, 15 bp, Homo sapiens
atctttacccaggca

SEQ ID NO: 77015 - DNA, 15 bp, Homo sapiens
aatctttacccaggc

SEQ ID NO: 77016 - DNA, 15 bp, Homo sapiens
caatctttacccagg

SEQ ID NO: 77017 - DNA, 15 bp, Homo sapiens
acaatctttacccag

SEQ ID NO: 77018 - DNA, 15 bp, Homo sapiens
gacaatctttaccca

SEQ ID NO: 77019 - DNA, 15 bp, Homo sapiens
agacaatctttaccc

SEQ ID NO: 77020 - DNA, 15 bp, Homo sapiens
aagacaatctttacc

SEQ ID NO: 77021 - DNA, 15 bp, Homo sapiens
caagacaatctttac

SEQ ID NO: 77022 - DNA, 15 bp, Homo sapiens
gcaagacaatcttta

SEQ ID NO: 77023 - DNA, 15 bp, Homo sapiens
ggcaagacaatcttt

SEQ ID NO: 77024 - DNA, 15 bp, Homo sapiens
tggcaagacaatctt

SEQ ID NO: 77025 - DNA, 15 bp, Homo sapiens
ctggcaagacaatct

SEQ ID NO: 77026 - DNA, 15 bp, Homo sapiens
gctggcaagacaatc

SEQ ID NO: 77027 - DNA, 15 bp, Homo sapiens
agctggcaagacaat

SEQ ID NO: 77028 - DNA, 15 bp, Homo sapiens
cagctggcaagacaa

SEQ ID NO: 77029 - DNA, 15 bp, Homo sapiens
acagctggcaagaca

SEQ ID NO: 77030 - DNA, 15 bp, Homo sapiens
cacagctggcaagac

SEQ ID NO: 77031 - DNA, 15 bp, Homo sapiens
acacagctggcaaga

SEQ ID NO: 77032 - DNA, 15 bp, Homo sapiens
aacacagctggcaag

SEQ ID NO: 77033 - DNA, 15 bp, Homo sapiens
aaacacagctggcaa

SEQ ID NO: 77034 - DNA, 15 bp, Homo sapiens
caaacacagctggca

SEQ ID NO: 77035 - DNA, 15 bp, Homo sapiens
acaaacacagctggc

SEQ ID NO: 77036 - DNA, 15 bp, Homo sapiens
gacaaacacagctgg

SEQ ID NO: 77037 - DNA, 15 bp, Homo sapiens
agacaaacacagctg

SEQ ID NO: 77038 - DNA, 15 bp, Homo sapiens
cagacaaacacagct

SEQ ID NO: 77039 - DNA, 15 bp, Homo sapiens
gcagacaaacacagc

SEQ ID NO: 77040 - DNA, 15 bp, Homo sapiens
tgcagacaaacacag

SEQ ID NO: 77041 - DNA, 15 bp, Homo sapiens
atgcagacaaacaca

SEQ ID NO: 77042 - DNA, 15 bp, Homo sapiens
aatgcagacaaacac

SEQ ID NO: 77043 - DNA, 15 bp, Homo sapiens
caatgcagacaaaca

SEQ ID NO: 77044 - DNA, 15 bp, Homo sapiens
gcaatgcagacaaac

SEQ ID NO: 77045 - DNA, 15 bp, Homo sapiens
ggcaatgcagacaaa

SEQ ID NO: 77046 - DNA, 15 bp, Homo sapiens
gggcaatgcagacaa

SEQ ID NO: 77047 - DNA, 15 bp, Homo sapiens
agggcaatgcagaca

SEQ ID NO: 77048 - DNA, 15 bp, Homo sapiens
aagggcaatgcagac

SEQ ID NO: 77049 - DNA, 15 bp, Homo sapiens
caagggcaatgcaga

SEQ ID NO: 77050 - DNA, 15 bp, Homo sapiens
acaagggcaatgcag

SEQ ID NO: 77051 - DNA, 15 bp, Homo sapiens
cacaagggcaatgca

SEQ ID NO: 77052 - DNA, 15 bp, Homo sapiens
acacaagggcaatgc

SEQ ID NO: 77053 - DNA, 15 bp, Homo sapiens
aacacaagggcaatg

SEQ ID NO: 77054 - DNA, 15 bp, Homo sapiens
gaacacaagggcaat

SEQ ID NO: 77055 - DNA, 15 bp, Homo sapiens
tgaacacaagggcaa

SEQ ID NO: 77056 - DNA, 15 bp, Homo sapiens
ctgaacacaagggca

SEQ ID NO: 77057 - DNA, 15 bp, Homo sapiens
gctgaacacaagggc

SEQ ID NO: 77058 - DNA, 15 bp, Homo sapiens
ggctgaacacaaggg

SEQ ID NO: 77059 - DNA, 15 bp, Homo sapiens
aggctgaacacaagg

SEQ ID NO: 77060 - DNA, 15 bp, Homo sapiens
caggctgaacacaag

SEQ ID NO: 77061 - DNA, 15 bp, Homo sapiens
tcaggctgaacacaa

SEQ ID NO: 77062 - DNA, 15 bp, Homo sapiens
atcaggctgaacaca

SEQ ID NO: 77063 - DNA, 15 bp, Homo sapiens
gatcaggctgaacac

SEQ ID NO: 77064 - DNA, 15 bp, Homo sapiens
cgatcaggctgaaca

SEQ ID NO: 77065 - DNA, 15 bp, Homo sapiens
acgatcaggctgaac

SEQ ID NO: 77066 - DNA, 15 bp, Homo sapiens
cacgatcaggctgaa

SEQ ID NO: 77067 - DNA, 15 bp, Homo sapiens
gcacgatcaggctga

SEQ ID NO: 77068 - DNA, 15 bp, Homo sapiens
ggcacgatcaggctg

SEQ ID NO: 77069 - DNA, 15 bp, Homo sapiens
tggcacgatcaggct

SEQ ID NO: 77070 - DNA, 15 bp, Homo sapiens
gtggcacgatcaggc

SEQ ID NO: 77071 - DNA, 15 bp, Homo sapiens
ggtggcacgatcagg

SEQ ID NO: 77072 - DNA, 15 bp, Homo sapiens
gggtggcacgatcag

SEQ ID NO: 77073 - DNA, 15 bp, Homo sapiens
agggtggcacgatca

SEQ ID NO: 77074 - DNA, 15 bp, Homo sapiens
aagggtggcacgatc

SEQ ID NO: 77075 - DNA, 15 bp, Homo sapiens
aaagggtggcacgat

SEQ ID NO: 77076 - DNA, 15 bp, Homo sapiens
caaagggtggcacga

SEQ ID NO: 77077 - DNA, 15 bp, Homo sapiens
ccaaagggtggcacg

SEQ ID NO: 77078 - DNA, 15 bp, Homo sapiens
gccaaagggtggcac

SEQ ID NO: 77079 - DNA, 15 bp, Homo sapiens
tgccaaagggtggca

SEQ ID NO: 77080 - DNA, 15 bp, Homo sapiens
ttgccaaagggtggc

SEQ ID NO: 77081 - DNA, 15 bp, Homo sapiens
cttgccaaagggtgg

SEQ ID NO: 77082 - DNA, 15 bp, Homo sapiens
acttgccaaagggtg

SEQ ID NO: 77083 - DNA, 15 bp, Homo sapiens
tacttgccaaagggt

SEQ ID NO: 77084 - DNA, 15 bp, Homo sapiens
gtacttgccaaaggg

SEQ ID NO: 77085 - DNA, 15 bp, Homo sapiens
ggtacttgccaaagg

SEQ ID NO: 77086 - DNA, 15 bp, Homo sapiens
gggtacttgccaaag

SEQ ID NO: 77087 - DNA, 15 bp, Homo sapiens
ggggtacttgccaaa

SEQ ID NO: 77088 - DNA, 15 bp, Homo sapiens
tggggtacttgccaa

SEQ ID NO: 77089 - DNA, 15 bp, Homo sapiens
ctggggtacttgcca

SEQ ID NO: 77090 - DNA, 15 bp, Homo sapiens
gctggggtacttgcc

SEQ ID NO: 77091 - DNA, 15 bp, Homo sapiens
ggctggggtacttgc

SEQ ID NO: 77092 - DNA, 15 bp, Homo sapiens
aggctggggtacttg

SEQ ID NO: 77093 - DNA, 15 bp, Homo sapiens
caggctggggtactt

SEQ ID NO: 77094 - DNA, 15 bp, Homo sapiens
ccaggctggggtact

SEQ ID NO: 77095 - DNA, 15 bp, Homo sapiens
tccaggctggggtac

SEQ ID NO: 77096 - DNA, 15 bp, Homo sapiens
ttccaggctggggta

SEQ ID NO: 77097 - DNA, 15 bp, Homo sapiens
gttccaggctggggt

SEQ ID NO: 77098 - DNA, 15 bp, Homo sapiens
agttccaggctgggg

SEQ ID NO: 77099 - DNA, 15 bp, Homo sapiens
aagttccaggctggg

SEQ ID NO: 77100 - DNA, 15 bp, Homo sapiens
gaagttccaggctgg

SEQ ID NO: 77101 - DNA, 15 bp, Homo sapiens
tgaagttccaggctg

SEQ ID NO: 77102 - DNA, 15 bp, Homo sapiens
ctgaagttccaggct

SEQ ID NO: 77103 - DNA, 15 bp, Homo sapiens
gctgaagttccaggc

SEQ ID NO: 77104 - DNA, 15 bp, Homo sapiens
ggctgaagttccagg

SEQ ID NO: 77105 - DNA, 15 bp, Homo sapiens
gggctgaagttccag

SEQ ID NO: 77106 - DNA, 15 bp, Homo sapiens
agggctgaagttcca

SEQ ID NO: 77107 - DNA, 15 bp, Homo sapiens
cagggctgaagttcc

SEQ ID NO: 77108 - DNA, 15 bp, Homo sapiens
ccagggctgaagttc

SEQ ID NO: 77109 - DNA, 15 bp, Homo sapiens
tccagggctgaagtt

SEQ ID NO: 77110 - DNA, 15 bp, Homo sapiens
atccagggctgaagt

SEQ ID NO: 77111 - DNA, 15 bp, Homo sapiens
catccagggctgaag

SEQ ID NO: 77112 - DNA, 15 bp, Homo sapiens
acatccagggctgaa

SEQ ID NO: 77113 - DNA, 15 bp, Homo sapiens
tacatccagggctga

SEQ ID NO: 77114 - DNA, 15 bp, Homo sapiens
gtacatccagggctg

SEQ ID NO: 77115 - DNA, 15 bp, Homo sapiens
tgtacatccagggct

SEQ ID NO: 77116 - DNA, 15 bp, Homo sapiens
ttgtacatccagggc

SEQ ID NO: 77117 - DNA, 15 bp, Homo sapiens
gttgtacatccaggg

SEQ ID NO: 77118 - DNA, 15 bp, Homo sapiens
cgttgtacatccagg

SEQ ID NO: 77119 - DNA, 15 bp, Homo sapiens
tcgttgtacatccag

SEQ ID NO: 77120 - DNA, 15 bp, Homo sapiens
ttcgttgtacatcca

SEQ ID NO: 77121 - DNA, 15 bp, Homo sapiens
gttcgttgtacatcc

SEQ ID NO: 77122 - DNA, 15 bp, Homo sapiens
tgttcgttgtacatc

SEQ ID NO: 77123 - DNA, 15 bp, Homo sapiens
ctgttcgttgtacat

SEQ ID NO: 77124 - DNA, 15 bp, Homo sapiens
actgttcgttgtaca

SEQ ID NO: 77125 - DNA, 15 bp, Homo sapiens
tactgttcgttgtac

SEQ ID NO: 77126 - DNA, 15 bp, Homo sapiens
gtactgttcgttgta

SEQ ID NO: 77127 - DNA, 15 bp, Homo sapiens
tgtactgttcgttgt

SEQ ID NO: 77128 - DNA, 15 bp, Homo sapiens
gtgtactgttcgttg

SEQ ID NO: 77129 - DNA, 15 bp, Homo sapiens
tgtgtactgttcgtt

SEQ ID NO: 77130 - DNA, 15 bp, Homo sapiens
atgtgtactgttcgt

SEQ ID NO: 77131 - DNA, 15 bp, Homo sapiens
aatgtgtactgttcg

SEQ ID NO: 77132 - DNA, 15 bp, Homo sapiens
aaatgtgtactgttc

SEQ ID NO: 77133 - DNA, 15 bp, Homo sapiens
caaatgtgtactgtt

SEQ ID NO: 77134 - DNA, 15 bp, Homo sapiens
acaaatgtgtactgt

SEQ ID NO: 77135 - DNA, 15 bp, Homo sapiens
gacaaatgtgtactg

SEQ ID NO: 77136 - DNA, 15 bp, Homo sapiens
tgacaaatgtgtact

SEQ ID NO: 77137 - DNA, 15 bp, Homo sapiens
ctgacaaatgtgtac

SEQ ID NO: 77138 - DNA, 15 bp, Homo sapiens
cctgacaaatgtgta

SEQ ID NO: 77139 - DNA, 15 bp, Homo sapiens
acctgacaaatgtgt

SEQ ID NO: 77140 - DNA, 15 bp, Homo sapiens
tacctgacaaatgtg

SEQ ID NO: 77141 - DNA, 15 bp, Homo sapiens
atacctgacaaatgt

SEQ ID NO: 77142 - DNA, 15 bp, Homo sapiens
catacctgacaaatg

SEQ ID NO: 77143 - DNA, 15 bp, Homo sapiens
acatacctgacaaat

SEQ ID NO: 77144 - DNA, 15 bp, Homo sapiens
aacatacctgacaaa

SEQ ID NO: 77145 - DNA, 15 bp, Homo sapiens
aaacatacctgacaa

SEQ ID NO: 77146 - DNA, 15 bp, Homo sapiens
caaacatacctgaca

SEQ ID NO: 77147 - DNA, 15 bp, Homo sapiens
acaaacatacctgac

SEQ ID NO: 77148 - DNA, 15 bp, Homo sapiens
gacaaacatacctga

SEQ ID NO: 77149 - DNA, 15 bp, Homo sapiens
agacaaacatacctg

SEQ ID NO: 77150 - DNA, 15 bp, Homo sapiens
aagacaaacatacct

SEQ ID NO: 77151 - DNA, 15 bp, Homo sapiens
gaagacaaacatacc

SEQ ID NO: 77152 - DNA, 15 bp, Homo sapiens
agaagacaaacatac

SEQ ID NO: 77153 - DNA, 15 bp, Homo sapiens
tagaagacaaacata

SEQ ID NO: 77154 - DNA, 15 bp, Homo sapiens
gtagaagacaaacat

SEQ ID NO: 77155 - DNA, 15 bp, Homo sapiens
tgtagaagacaaaca

SEQ ID NO: 77156 - DNA, 15 bp, Homo sapiens
atgtagaagacaaac

SEQ ID NO: 77157 - DNA, 15 bp, Homo sapiens
gatgtagaagacaaa

SEQ ID NO: 77158 - DNA, 15 bp, Homo sapiens
ggatgtagaagacaa

SEQ ID NO: 77159 - DNA, 15 bp, Homo sapiens
gggatgtagaagaca

SEQ ID NO: 77160 - DNA, 15 bp, Homo sapiens
tgggatgtagaagac

SEQ ID NO: 77161 - DNA, 15 bp, Homo sapiens
ctgggatgtagaaga

SEQ ID NO: 77162 - DNA, 15 bp, Homo sapiens
cctgggatgtagaag

SEQ ID NO: 77163 - DNA, 15 bp, Homo sapiens
tcctgggatgtagaa

SEQ ID NO: 77164 - DNA, 15 bp, Homo sapiens
ctcctgggatgtaga

SEQ ID NO: 77165 - DNA, 15 bp, Homo sapiens
cctcctgggatgtag

SEQ ID NO: 77166 - DNA, 15 bp, Homo sapiens
ccctcctgggatgta

SEQ ID NO: 77167 - DNA, 15 bp, Homo sapiens
cccctcctgggatgt

SEQ ID NO: 77168 - DNA, 15 bp, Homo sapiens
ccccctcctgggatg

SEQ ID NO: 77169 - DNA, 15 bp, Homo sapiens
accccctcctgggat

SEQ ID NO: 77170 - DNA, 15 bp, Homo sapiens
taccccctcctggga

SEQ ID NO: 77171 - DNA, 15 bp, Homo sapiens
ttaccccctcctggg

SEQ ID NO: 77172 - DNA, 15 bp, Homo sapiens
cttaccccctcctgg

SEQ ID NO: 77173 - DNA, 15 bp, Homo sapiens
tcttaccccctcctg

SEQ ID NO: 77174 - DNA, 15 bp, Homo sapiens
atcttaccccctcct

SEQ ID NO: 77175 - DNA, 15 bp, Homo sapiens
aatcttaccccctcc

SEQ ID NO: 77176 - DNA, 15 bp, Homo sapiens
gaatcttaccccctc

SEQ ID NO: 77177 - DNA, 15 bp, Homo sapiens
cgaatcttaccccct

SEQ ID NO: 77178 - DNA, 15 bp, Homo sapiens
tcgaatcttaccccc

SEQ ID NO: 77179 - DNA, 15 bp, Homo sapiens
ctcgaatcttacccc

SEQ ID NO: 77180 - DNA, 15 bp, Homo sapiens
gctcgaatcttaccc

SEQ ID NO: 77181 - DNA, 15 bp, Homo sapiens
tgctcgaatcttacc

SEQ ID NO: 77182 - DNA, 15 bp, Homo sapiens
ctgctcgaatcttac

SEQ ID NO: 77183 - DNA, 15 bp, Homo sapiens
tctgctcgaatctta

SEQ ID NO: 77184 - DNA, 15 bp, Homo sapiens
gtctgctcgaatctt

SEQ ID NO: 77185 - DNA, 15 bp, Homo sapiens
ggtctgctcgaatct

SEQ ID NO: 77186 - DNA, 15 bp, Homo sapiens
tggtctgctcgaatc

SEQ ID NO: 77187 - DNA, 15 bp, Homo sapiens
ttggtctgctcgaat

SEQ ID NO: 77188 - DNA, 15 bp, Homo sapiens
tttggtctgctcgaa

SEQ ID NO: 77189 - DNA, 15 bp, Homo sapiens
ctttggtctgctcga

SEQ ID NO: 77190 - DNA, 15 bp, Homo sapiens
tctttggtctgctcg

SEQ ID NO: 77191 - DNA, 15 bp, Homo sapiens
atctttggtctgctc

SEQ ID NO: 77192 - DNA, 15 bp, Homo sapiens
catctttggtctgct

SEQ ID NO: 77193 - DNA, 15 bp, Homo sapiens
acatctttggtctgc

SEQ ID NO: 77194 - DNA, 15 bp, Homo sapiens
aacatctttggtctg

SEQ ID NO: 77195 - DNA, 15 bp, Homo sapiens
aaacatctttggtct

SEQ ID NO: 77196 - DNA, 15 bp, Homo sapiens
taaacatctttggtc

SEQ ID NO: 77197 - DNA, 15 bp, Homo sapiens
gtaaacatctttggt

SEQ ID NO: 77198 - DNA, 15 bp, Homo sapiens
cgtaaacatctttgg

SEQ ID NO: 77199 - DNA, 15 bp, Homo sapiens
tcgtaaacatctttg

SEQ ID NO: 77200 - DNA, 15 bp, Homo sapiens
ctcgtaaacatcttt

SEQ ID NO: 77201 - DNA, 15 bp, Homo sapiens
cctcgtaaacatctt

SEQ ID NO: 77202 - DNA, 15 bp, Homo sapiens
ccctcgtaaacatct

SEQ ID NO: 77203 - DNA, 15 bp, Homo sapiens
gccctcgtaaacatc

SEQ ID NO: 77204 - DNA, 15 bp, Homo sapiens
ggccctcgtaaacat

SEQ ID NO: 77205 - DNA, 15 bp, Homo sapiens
tggccctcgtaaaca

SEQ ID NO: 77206 - DNA, 15 bp, Homo sapiens
ttggccctcgtaaac

SEQ ID NO: 77207 - DNA, 15 bp, Homo sapiens
cttggccctcgtaaa

SEQ ID NO: 77208 - DNA, 15 bp, Homo sapiens
ccttggccctcgtaa

SEQ ID NO: 77209 - DNA, 15 bp, Homo sapiens
cccttggccctcgta

SEQ ID NO: 77210 - DNA, 15 bp, Homo sapiens
tcccttggccctcgt

SEQ ID NO: 77211 - DNA, 15 bp, Homo sapiens
ttcccttggccctcg

SEQ ID NO: 77212 - DNA, 15 bp, Homo sapiens
attcccttggccctc

SEQ ID NO: 77213 - DNA, 15 bp, Homo sapiens
cattcccttggccct

SEQ ID NO: 77214 - DNA, 15 bp, Homo sapiens
ccattcccttggccc

SEQ ID NO: 77215 - DNA, 15 bp, Homo sapiens
tccattcccttggcc

SEQ ID NO: 77216 - DNA, 15 bp, Homo sapiens
gtccattcccttggc

SEQ ID NO: 77217 - DNA, 15 bp, Homo sapiens
agtccattcccttgg

SEQ ID NO: 77218 - DNA, 15 bp, Homo sapiens
aagtccattcccttg

SEQ ID NO: 77219 - DNA, 15 bp, Homo sapiens
gaagtccattccctt

SEQ ID NO: 77220 - DNA, 15 bp, Homo sapiens
tgaagtccattccct

SEQ ID NO: 77221 - DNA, 15 bp, Homo sapiens
ctgaagtccattccc

SEQ ID NO: 77222 - DNA, 15 bp, Homo sapiens
tctgaagtccattcc

SEQ ID NO: 77223 - DNA, 15 bp, Homo sapiens
ttctgaagtccattc

SEQ ID NO: 77224 - DNA, 15 bp, Homo sapiens
attctgaagtccatt

SEQ ID NO: 77225 - DNA, 15 bp, Homo sapiens
aattctgaagtccat

SEQ ID NO: 77226 - DNA, 15 bp, Homo sapiens
taattctgaagtcca

SEQ ID NO: 77227 - DNA, 15 bp, Homo sapiens
gtaattctgaagtcc

SEQ ID NO: 77228 - DNA, 15 bp, Homo sapiens
tgtaattctgaagtc

SEQ ID NO: 77229 - DNA, 15 bp, Homo sapiens
gtgtaattctgaagt

SEQ ID NO: 77230 - DNA, 15 bp, Homo sapiens
cgtgtaattctgaag

SEQ ID NO: 77231 - DNA, 15 bp, Homo sapiens
ccgtgtaattctgaa

SEQ ID NO: 77232 - DNA, 15 bp, Homo sapiens
accgtgtaattctga

SEQ ID NO: 77233 - DNA, 15 bp, Homo sapiens
caccgtgtaattctg

SEQ ID NO: 77234 - DNA, 15 bp, Homo sapiens
ccaccgtgtaattct

SEQ ID NO: 77235 - DNA, 15 bp, Homo sapiens
tccaccgtgtaattc

SEQ ID NO: 77236 - DNA, 15 bp, Homo sapiens
ttccaccgtgtaatt

SEQ ID NO: 77237 - DNA, 15 bp, Homo sapiens
attccaccgtgtaat

SEQ ID NO: 77238 - DNA, 15 bp, Homo sapiens
cattccaccgtgtaa

SEQ ID NO: 77239 - DNA, 15 bp, Homo sapiens
tcattccaccgtgta

SEQ ID NO: 77240 - DNA, 15 bp, Homo sapiens
ttcattccaccgtgt

SEQ ID NO: 77241 - DNA, 15 bp, Homo sapiens
attcattccaccgtg

SEQ ID NO: 77242 - DNA, 15 bp, Homo sapiens
aattcattccaccgt

SEQ ID NO: 77243 - DNA, 15 bp, Homo sapiens
aaattcattccaccg

SEQ ID NO: 77244 - DNA, 15 bp, Homo sapiens
aaaattcattccacc

SEQ ID NO: 77245 - DNA, 15 bp, Homo sapiens
taaaattcattccac

SEQ ID NO: 77246 - DNA, 15 bp, Homo sapiens
gtaaaattcattcca

SEQ ID NO: 77247 - DNA, 15 bp, Homo sapiens
agtaaaattcattcc

SEQ ID NO: 77248 - DNA, 15 bp, Homo sapiens
cagtaaaattcattc

SEQ ID NO: 77249 - DNA, 15 bp, Homo sapiens
gcagtaaaattcatt

SEQ ID NO: 77250 - DNA, 15 bp, Homo sapiens
agcagtaaaattcat

SEQ ID NO: 77251 - DNA, 15 bp, Homo sapiens
cagcagtaaaattca

SEQ ID NO: 77252 - DNA, 15 bp, Homo sapiens
gcagcagtaaaattc

SEQ ID NO: 77253 - DNA, 15 bp, Homo sapiens
cgcagcagtaaaatt

SEQ ID NO: 77254 - DNA, 15 bp, Homo sapiens
ccgcagcagtaaaat

SEQ ID NO: 77255 - DNA, 15 bp, Homo sapiens
gccgcagcagtaaaa

SEQ ID NO: 77256 - DNA, 15 bp, Homo sapiens
agccgcagcagtaaa

SEQ ID NO: 77257 - DNA, 15 bp, Homo sapiens
gagccgcagcagtaa

SEQ ID NO: 77258 - DNA, 15 bp, Homo sapiens
tgagccgcagcagta

SEQ ID NO: 77259 - DNA, 15 bp, Homo sapiens
ctgagccgcagcagt

SEQ ID NO: 77260 - DNA, 15 bp, Homo sapiens
cctgagccgcagcag

SEQ ID NO: 77261 - DNA, 15 bp, Homo sapiens
acctgagccgcagca

SEQ ID NO: 77262 - DNA, 15 bp, Homo sapiens
gacctgagccgcagc

SEQ ID NO: 77263 - DNA, 15 bp, Homo sapiens
ggacctgagccgcag

SEQ ID NO: 77264 - DNA, 15 bp, Homo sapiens
gggacctgagccgca

SEQ ID NO: 77265 - DNA, 15 bp, Homo sapiens
agggacctgagccgc

SEQ ID NO: 77266 - DNA, 15 bp, Homo sapiens
cagggacctgagccg

SEQ ID NO: 77267 - DNA, 15 bp, Homo sapiens
acagggacctgagcc

SEQ ID NO: 77268 - DNA, 15 bp, Homo sapiens
tacagggacctgagc

SEQ ID NO: 77269 - DNA, 15 bp, Homo sapiens
atacagggacctgag

SEQ ID NO: 77270 - DNA, 15 bp, Homo sapiens
tatacagggacctga

SEQ ID NO: 77271 - DNA, 15 bp, Homo sapiens
ttatacagggacctg

SEQ ID NO: 77272 - DNA, 15 bp, Homo sapiens
cttatacagggacct

SEQ ID NO: 77273 - DNA, 15 bp, Homo sapiens
gcttatacagggacc

SEQ ID NO: 77274 - DNA, 15 bp, Homo sapiens
agcttatacagggac

SEQ ID NO: 77275 - DNA, 15 bp, Homo sapiens
tagcttatacaggga

SEQ ID NO: 77276 - DNA, 15 bp, Homo sapiens
ttagcttatacaggg

SEQ ID NO: 77277 - DNA, 15 bp, Homo sapiens
attagcttatacagg

SEQ ID NO: 77278 - DNA, 15 bp, Homo sapiens
tattagcttatacag

SEQ ID NO: 77279 - DNA, 15 bp, Homo sapiens
gtattagcttataca

SEQ ID NO: 77280 - DNA, 15 bp, Homo sapiens
agtattagcttatac

SEQ ID NO: 77281 - DNA, 15 bp, Homo sapiens
cagtattagcttata

SEQ ID NO: 77282 - DNA, 15 bp, Homo sapiens
gcagtattagcttat

SEQ ID NO: 77283 - DNA, 15 bp, Homo sapiens
tgcagtattagctta

SEQ ID NO: 77284 - DNA, 15 bp, Homo sapiens
atgcagtattagctt

SEQ ID NO: 77285 - DNA, 15 bp, Homo sapiens
catgcagtattagct

SEQ ID NO: 77286 - DNA, 15 bp, Homo sapiens
gcatgcagtattagc

SEQ ID NO: 77287 - DNA, 15 bp, Homo sapiens
tgcatgcagtattag

SEQ ID NO: 77288 - DNA, 15 bp, Homo sapiens
atgcatgcagtatta

SEQ ID NO: 77289 - DNA, 15 bp, Homo sapiens
tatgcatgcagtatt

SEQ ID NO: 77290 - DNA, 15 bp, Homo sapiens
ctatgcatgcagtat

SEQ ID NO: 77291 - DNA, 15 bp, Homo sapiens
tctatgcatgcagta

SEQ ID NO: 77292 - DNA, 15 bp, Homo sapiens
ttctatgcatgcagt

SEQ ID NO: 77293 - DNA, 15 bp, Homo sapiens
gttctatgcatgcag

SEQ ID NO: 77294 - DNA, 15 bp, Homo sapiens
tgttctatgcatgca

SEQ ID NO: 77295 - DNA, 15 bp, Homo sapiens
ctgttctatgcatgc

SEQ ID NO: 77296 - DNA, 15 bp, Homo sapiens
gctgttctatgcatg

SEQ ID NO: 77297 - DNA, 15 bp, Homo sapiens
tgctgttctatgcat

SEQ ID NO: 77298 - DNA, 15 bp, Homo sapiens
ctgctgttctatgca

SEQ ID NO: 77299 - DNA, 15 bp, Homo sapiens
gctgctgttctatgc

SEQ ID NO: 77300 - DNA, 15 bp, Homo sapiens
cgctgctgttctatg

SEQ ID NO: 77301 - DNA, 15 bp, Homo sapiens
tcgctgctgttctat

SEQ ID NO: 77302 - DNA, 15 bp, Homo sapiens
ttcgctgctgttcta

SEQ ID NO: 77303 - DNA, 15 bp, Homo sapiens
gttcgctgctgttct

SEQ ID NO: 77304 - DNA, 15 bp, Homo sapiens
agttcgctgctgttc

SEQ ID NO: 77305 - DNA, 15 bp, Homo sapiens
tagttcgctgctgtt

SEQ ID NO: 77306 - DNA, 15 bp, Homo sapiens
ttagttcgctgctgt

SEQ ID NO: 77307 - DNA, 15 bp, Homo sapiens
gttagttcgctgctg

SEQ ID NO: 77308 - DNA, 15 bp, Homo sapiens
ggttagttcgctgct

SEQ ID NO: 77309 - DNA, 15 bp, Homo sapiens
gggttagttcgctgc

SEQ ID NO: 77310 - DNA, 15 bp, Homo sapiens
agggttagttcgctg

SEQ ID NO: 77311 - DNA, 15 bp, Homo sapiens
cagggttagttcgct

SEQ ID NO: 77312 - DNA, 15 bp, Homo sapiens
tcagggttagttcgc

SEQ ID NO: 77313 - DNA, 15 bp, Homo sapiens
ttcagggttagttcg

SEQ ID NO: 77314 - DNA, 15 bp, Homo sapiens
attcagggttagttc

SEQ ID NO: 77315 - DNA, 15 bp, Homo sapiens
tattcagggttagtt

SEQ ID NO: 77316 - DNA, 15 bp, Homo sapiens
ttattcagggttagt

SEQ ID NO: 77317 - DNA, 15 bp, Homo sapiens
attattcagggttag

SEQ ID NO: 77318 - DNA, 15 bp, Homo sapiens
tattattcagggtta

SEQ ID NO: 77319 - DNA, 15 bp, Homo sapiens
ctattattcagggtt

SEQ ID NO: 77320 - DNA, 15 bp, Homo sapiens
cctattattcagggt

SEQ ID NO: 77321 - DNA, 15 bp, Homo sapiens
gcctattattcaggg

SEQ ID NO: 77322 - DNA, 15 bp, Homo sapiens
ggcctattattcagg

SEQ ID NO: 77323 - DNA, 15 bp, Homo sapiens
tggcctattattcag

SEQ ID NO: 77324 - DNA, 15 bp, Homo sapiens
ctggcctattattca

SEQ ID NO: 77325 - DNA, 15 bp, Homo sapiens
actggcctattattc

SEQ ID NO: 77326 - DNA, 15 bp, Homo sapiens
gactggcctattatt

SEQ ID NO: 77327 - DNA, 15 bp, Homo sapiens
agactggcctattat

SEQ ID NO: 77328 - DNA, 15 bp, Homo sapiens
aagactggcctatta

SEQ ID NO: 77329 - DNA, 15 bp, Homo sapiens
gaagactggcctatt

SEQ ID NO: 77330 - DNA, 15 bp, Homo sapiens
agaagactggcctat

SEQ ID NO: 77331 - DNA, 15 bp, Homo sapiens
cagaagactggccta

SEQ ID NO: 77332 - DNA, 15 bp, Homo sapiens
acagaagactggcct

SEQ ID NO: 77333 - DNA, 15 bp, Homo sapiens
aacagaagactggcc

SEQ ID NO: 77334 - DNA, 15 bp, Homo sapiens
caacagaagactggc

SEQ ID NO: 77335 - DNA, 15 bp, Homo sapiens
tcaacagaagactgg

SEQ ID NO: 77336 - DNA, 15 bp, Homo sapiens
ctcaacagaagactg

SEQ ID NO: 77337 - DNA, 15 bp, Homo sapiens
gctcaacagaagact

SEQ ID NO: 77338 - DNA, 15 bp, Homo sapiens
ggctcaacagaagac

SEQ ID NO: 77339 - DNA, 15 bp, Homo sapiens
aggctcaacagaaga

SEQ ID NO: 77340 - DNA, 15 bp, Homo sapiens
aaggctcaacagaag

SEQ ID NO: 77341 - DNA, 15 bp, Homo sapiens
aaaggctcaacagaa

SEQ ID NO: 77342 - DNA, 15 bp, Homo sapiens
gaaaggctcaacaga

SEQ ID NO: 77343 - DNA, 15 bp, Homo sapiens
tgaaaggctcaacag

SEQ ID NO: 77344 - DNA, 15 bp, Homo sapiens
ctgaaaggctcaaca

SEQ ID NO: 77345 - DNA, 15 bp, Homo sapiens
gctgaaaggctcaac

SEQ ID NO: 77346 - DNA, 15 bp, Homo sapiens
ggctgaaaggctcaa

SEQ ID NO: 77347 - DNA, 15 bp, Homo sapiens
aggctgaaaggctca

SEQ ID NO: 77348 - DNA, 15 bp, Homo sapiens
gaggctgaaaggctc

SEQ ID NO: 77349 - DNA, 15 bp, Homo sapiens
agaggctgaaaggct

SEQ ID NO: 77350 - DNA, 15 bp, Homo sapiens
gagaggctgaaaggc

SEQ ID NO: 77351 - DNA, 15 bp, Homo sapiens
agagaggctgaaagg

SEQ ID NO: 77352 - DNA, 15 bp, Homo sapiens
gagagaggctgaaag

SEQ ID NO: 77353 - DNA, 15 bp, Homo sapiens
ggagagaggctgaaa

SEQ ID NO: 77354 - DNA, 15 bp, Homo sapiens
aggagagaggctgaa

SEQ ID NO: 77355 - DNA, 15 bp, Homo sapiens
gaggagagaggctga

SEQ ID NO: 77356 - DNA, 15 bp, Homo sapiens
agaggagagaggctg

SEQ ID NO: 77357 - DNA, 15 bp, Homo sapiens
aagaggagagaggct

SEQ ID NO: 77358 - DNA, 15 bp, Homo sapiens
gaagaggagagaggc

SEQ ID NO: 77359 - DNA, 15 bp, Homo sapiens
tgaagaggagagagg

SEQ ID NO: 77360 - DNA, 15 bp, Homo sapiens
atgaagaggagagag

SEQ ID NO: 77361 - DNA, 15 bp, Homo sapiens
gatgaagaggagaga

SEQ ID NO: 77362 - DNA, 15 bp, Homo sapiens
ggatgaagaggagag

SEQ ID NO: 77363 - DNA, 15 bp, Homo sapiens
aggatgaagaggaga

SEQ ID NO: 77364 - DNA, 15 bp, Homo sapiens
taggatgaagaggag

SEQ ID NO: 77365 - DNA, 15 bp, Homo sapiens
gtaggatgaagagga

SEQ ID NO: 77366 - DNA, 15 bp, Homo sapiens
agtaggatgaagagg

SEQ ID NO: 77367 - DNA, 15 bp, Homo sapiens
cagtaggatgaagag

SEQ ID NO: 77368 - DNA, 15 bp, Homo sapiens
acagtaggatgaaga

SEQ ID NO: 77369 - DNA, 15 bp, Homo sapiens
aacagtaggatgaag

SEQ ID NO: 77370 - DNA, 15 bp, Homo sapiens
caacagtaggatgaa

SEQ ID NO: 77371 - DNA, 15 bp, Homo sapiens
acaacagtaggatga

SEQ ID NO: 77372 - DNA, 15 bp, Homo sapiens
gacaacagtaggatg

SEQ ID NO: 77373 - DNA, 15 bp, Homo sapiens
tgacaacagtaggat

SEQ ID NO: 77374 - DNA, 15 bp, Homo sapiens
ctgacaacagtagga

SEQ ID NO: 77375 - DNA, 15 bp, Homo sapiens
cctgacaacagtagg

SEQ ID NO: 77376 - DNA, 15 bp, Homo sapiens
tcctgacaacagtag

SEQ ID NO: 77377 - DNA, 15 bp, Homo sapiens
ttcctgacaacagta

SEQ ID NO: 77378 - DNA, 15 bp, Homo sapiens
gttcctgacaacagt

SEQ ID NO: 77379 - DNA, 15 bp, Homo sapiens
tgttcctgacaacag

SEQ ID NO: 77380 - DNA, 15 bp, Homo sapiens
ctgttcctgacaaca

SEQ ID NO: 77381 - DNA, 15 bp, Homo sapiens
gctgttcctgacaac

SEQ ID NO: 77382 - DNA, 15 bp, Homo sapiens
ggctgttcctgacaa

SEQ ID NO: 77383 - DNA, 15 bp, Homo sapiens
tggctgttcctgaca

SEQ ID NO: 77384 - DNA, 15 bp, Homo sapiens
gtggctgttcctgac

SEQ ID NO: 77385 - DNA, 15 bp, Homo sapiens
tgtggctgttcctga

SEQ ID NO: 77386 - DNA, 15 bp, Homo sapiens
atgtggctgttcctg

SEQ ID NO: 77387 - DNA, 15 bp, Homo sapiens
catgtggctgttcct

SEQ ID NO: 77388 - DNA, 15 bp, Homo sapiens
acatgtggctgttcc

SEQ ID NO: 77389 - DNA, 15 bp, Homo sapiens
cacatgtggctgttc

SEQ ID NO: 77390 - DNA, 15 bp, Homo sapiens
acacatgtggctgtt

SEQ ID NO: 77391 - DNA, 15 bp, Homo sapiens
aacacatgtggctgt

SEQ ID NO: 77392 - DNA, 15 bp, Homo sapiens
aaacacatgtggctg

SEQ ID NO: 77393 - DNA, 15 bp, Homo sapiens
aaaacacatgtggct

SEQ ID NO: 77394 - DNA, 15 bp, Homo sapiens
taaaacacatgtggc

SEQ ID NO: 77395 - DNA, 15 bp, Homo sapiens
ctaaaacacatgtgg

SEQ ID NO: 77396 - DNA, 15 bp, Homo sapiens
cctaaaacacatgtg

SEQ ID NO: 77397 - DNA, 15 bp, Homo sapiens
acctaaaacacatgt

SEQ ID NO: 77398 - DNA, 15 bp, Homo sapiens
cacctaaaacacatg

SEQ ID NO: 77399 - DNA, 15 bp, Homo sapiens
tcacctaaaacacat

SEQ ID NO: 77400 - DNA, 15 bp, Homo sapiens
ttcacctaaaacaca

SEQ ID NO: 77401 - DNA, 15 bp, Homo sapiens
tttcacctaaaacac

SEQ ID NO: 77402 - DNA, 15 bp, Homo sapiens
atttcacctaaaaca

SEQ ID NO: 77403 - DNA, 15 bp, Homo sapiens
tatttcacctaaaac

SEQ ID NO: 77404 - DNA, 15 bp, Homo sapiens
ttatttcacctaaaa

SEQ ID NO: 77405 - DNA, 15 bp, Homo sapiens
attatttcacctaaa

SEQ ID NO: 77406 - DNA, 15 bp, Homo sapiens
gattatttcacctaa

SEQ ID NO: 77407 - DNA, 15 bp, Homo sapiens
ggattatttcaccta

SEQ ID NO: 77408 - DNA, 15 bp, Homo sapiens
tggattatttcacct

SEQ ID NO: 77409 - DNA, 15 bp, Homo sapiens
gtggattatttcacc

SEQ ID NO: 77410 - DNA, 15 bp, Homo sapiens
ggtggattatttcac

SEQ ID NO: 77411 - DNA, 15 bp, Homo sapiens
gggtggattatttca

SEQ ID NO: 77412 - DNA, 15 bp, Homo sapiens
agggtggattatttc

SEQ ID NO: 77413 - DNA, 15 bp, Homo sapiens
aagggtggattattt

SEQ ID NO: 77414 - DNA, 15 bp, Homo sapiens
caagggtggattatt

SEQ ID NO: 77415 - DNA, 15 bp, Homo sapiens
gcaagggtggattat

SEQ ID NO: 77416 - DNA, 15 bp, Homo sapiens
tgcaagggtggatta

SEQ ID NO: 77417 - DNA, 15 bp, Homo sapiens
ttgcaagggtggatt

SEQ ID NO: 77418 - DNA, 15 bp, Homo sapiens
tttgcaagggtggat

SEQ ID NO: 77419 - DNA, 15 bp, Homo sapiens
ttttgcaagggtgga

SEQ ID NO: 77420 - DNA, 15 bp, Homo sapiens
tttttgcaagggtgg

SEQ ID NO: 77421 - DNA, 15 bp, Homo sapiens
atttttgcaagggtg

SEQ ID NO: 77422 - DNA, 15 bp, Homo sapiens
gatttttgcaagggt

SEQ ID NO: 77423 - DNA, 15 bp, Homo sapiens
ggatttttgcaaggg

SEQ ID NO: 77424 - DNA, 15 bp, Homo sapiens
tggatttttgcaagg

SEQ ID NO: 77425 - DNA, 15 bp, Homo sapiens
atggatttttgcaag

SEQ ID NO: 77426 - DNA, 15 bp, Homo sapiens
catggatttttgcaa

SEQ ID NO: 77427 - DNA, 15 bp, Homo sapiens
tcatggatttttgca

SEQ ID NO: 77428 - DNA, 15 bp, Homo sapiens
atcatggatttttgc

SEQ ID NO: 77429 - DNA, 15 bp, Homo sapiens
aatcatggatttttg

SEQ ID NO: 77430 - DNA, 15 bp, Homo sapiens
taatcatggattttt

SEQ ID NO: 77431 - DNA, 15 bp, Homo sapiens
ttaatcatggatttt

SEQ ID NO: 77432 - DNA, 15 bp, Homo sapiens
cttaatcatggattt

SEQ ID NO: 77433 - DNA, 15 bp, Homo sapiens
acttaatcatggatt

SEQ ID NO: 77434 - DNA, 15 bp, Homo sapiens
aacttaatcatggat

SEQ ID NO: 77435 - DNA, 15 bp, Homo sapiens
taacttaatcatgga

SEQ ID NO: 77436 - DNA, 15 bp, Homo sapiens
ataacttaatcatgg

SEQ ID NO: 77437 - DNA, 15 bp, Homo sapiens
tataacttaatcatg

SEQ ID NO: 77438 - DNA, 15 bp, Homo sapiens
ttataacttaatcat

SEQ ID NO: 77439 - DNA, 15 bp, Homo sapiens
tttataacttaatca

SEQ ID NO: 77440 - DNA, 15 bp, Homo sapiens
ttttataacttaatc

SEQ ID NO: 77441 - DNA, 15 bp, Homo sapiens
attttataacttaat

SEQ ID NO: 77442 - DNA, 15 bp, Homo sapiens
tattttataacttaa

SEQ ID NO: 77443 - DNA, 15 bp, Homo sapiens
atattttataactta

SEQ ID NO: 77444 - DNA, 15 bp, Homo sapiens
aatattttataactt

SEQ ID NO: 77445 - DNA, 15 bp, Homo sapiens
aaatattttataact

SEQ ID NO: 77446 - DNA, 15 bp, Homo sapiens
caaatattttataac

SEQ ID NO: 77447 - DNA, 15 bp, Homo sapiens
ccaaatattttataa

SEQ ID NO: 77448 - DNA, 15 bp, Homo sapiens
tccaaatattttata

SEQ ID NO: 77449 - DNA, 15 bp, Homo sapiens
atccaaatattttat

SEQ ID NO: 77450 - DNA, 15 bp, Homo sapiens
aatccaaatatttta

SEQ ID NO: 77451 - DNA, 15 bp, Homo sapiens
aaatccaaatatttt

SEQ ID NO: 77452 - DNA, 15 bp, Homo sapiens
caaatccaaatattt

SEQ ID NO: 77453 - DNA, 15 bp, Homo sapiens
acaaatccaaatatt

SEQ ID NO: 77454 - DNA, 15 bp, Homo sapiens
cacaaatccaaatat

SEQ ID NO: 77455 - DNA, 15 bp, Homo sapiens
ccacaaatccaaata

SEQ ID NO: 77456 - DNA, 15 bp, Homo sapiens
tccacaaatccaaat

SEQ ID NO: 77457 - DNA, 15 bp, Homo sapiens
ctccacaaatccaaa

SEQ ID NO: 77458 - DNA, 15 bp, Homo sapiens
gctccacaaatccaa

SEQ ID NO: 77459 - DNA, 15 bp, Homo sapiens
agctccacaaatcca

SEQ ID NO: 77460 - DNA, 15 bp, Homo sapiens
cagctccacaaatcc

SEQ ID NO: 77461 - DNA, 15 bp, Homo sapiens
acagctccacaaatc

SEQ ID NO: 77462 - DNA, 15 bp, Homo sapiens
cacagctccacaaat

SEQ ID NO: 77463 - DNA, 15 bp, Homo sapiens
acacagctccacaaa

SEQ ID NO: 77464 - DNA, 15 bp, Homo sapiens
aacacagctccacaa

SEQ ID NO: 77465 - DNA, 15 bp, Homo sapiens
aaacacagctccaca

SEQ ID NO: 77466 - DNA, 15 bp, Homo sapiens
aaaacacagctccac

SEQ ID NO: 77467 - DNA, 15 bp, Homo sapiens
taaaacacagctcca

SEQ ID NO: 77468 - DNA, 15 bp, Homo sapiens
ttaaaacacagctcc

SEQ ID NO: 77469 - DNA, 15 bp, Homo sapiens
attaaaacacagctc

SEQ ID NO: 77470 - DNA, 15 bp, Homo sapiens
aattaaaacacagct

SEQ ID NO: 77471 - DNA, 15 bp, Homo sapiens
gaattaaaacacagc

SEQ ID NO: 77472 - DNA, 15 bp, Homo sapiens
agaattaaaacacag

SEQ ID NO: 77473 - DNA, 15 bp, Homo sapiens
cagaattaaaacaca

SEQ ID NO: 77474 - DNA, 15 bp, Homo sapiens
acagaattaaaacac

SEQ ID NO: 77475 - DNA, 15 bp, Homo sapiens
tacagaattaaaaca

SEQ ID NO: 77476 - DNA, 15 bp, Homo sapiens
ttacagaattaaaac

SEQ ID NO: 77477 - DNA, 15 bp, Homo sapiens
gttacagaattaaaa

SEQ ID NO: 77478 - DNA, 15 bp, Homo sapiens
agttacagaattaaa

SEQ ID NO: 77479 - DNA, 15 bp, Homo sapiens
cagttacagaattaa

SEQ ID NO: 77480 - DNA, 15 bp, Homo sapiens
tcagttacagaatta

SEQ ID NO: 77481 - DNA, 15 bp, Homo sapiens
ctcagttacagaatt

SEQ ID NO: 77482 - DNA, 15 bp, Homo sapiens
actcagttacagaat

SEQ ID NO: 77483 - DNA, 15 bp, Homo sapiens
gactcagttacagaa

SEQ ID NO: 77484 - DNA, 15 bp, Homo sapiens
tgactcagttacaga

SEQ ID NO: 77485 - DNA, 15 bp, Homo sapiens
gtgactcagttacag

SEQ ID NO: 77486 - DNA, 15 bp, Homo sapiens
tgtgactcagttaca

SEQ ID NO: 77487 - DNA, 15 bp, Homo sapiens
ctgtgactcagttac

SEQ ID NO: 77488 - DNA, 15 bp, Homo sapiens
cctgtgactcagtta

SEQ ID NO: 77489 - DNA, 15 bp, Homo sapiens
ccctgtgactcagtt

SEQ ID NO: 77490 - DNA, 15 bp, Homo sapiens
gccctgtgactcagt

SEQ ID NO: 77491 - DNA, 15 bp, Homo sapiens
tgccctgtgactcag

SEQ ID NO: 77492 - DNA, 15 bp, Homo sapiens
gtgccctgtgactca

SEQ ID NO: 77493 - DNA, 15 bp, Homo sapiens
tgtgccctgtgactc

SEQ ID NO: 77494 - DNA, 15 bp, Homo sapiens
gtgtgccctgtgact

SEQ ID NO: 77495 - DNA, 15 bp, Homo sapiens
agtgtgccctgtgac

SEQ ID NO: 77496 - DNA, 15 bp, Homo sapiens
cagtgtgccctgtga

SEQ ID NO: 77497 - DNA, 15 bp, Homo sapiens
acagtgtgccctgtg

SEQ ID NO: 77498 - DNA, 15 bp, Homo sapiens
gacagtgtgccctgt

SEQ ID NO: 77499 - DNA, 15 bp, Homo sapiens
tgacagtgtgccctg

SEQ ID NO: 77500 - DNA, 15 bp, Homo sapiens
ttgacagtgtgccct

SEQ ID NO: 77501 - DNA, 15 bp, Homo sapiens
tttgacagtgtgccc

SEQ ID NO: 77502 - DNA, 15 bp, Homo sapiens
ctttgacagtgtgcc

SEQ ID NO: 77503 - DNA, 15 bp, Homo sapiens
gctttgacagtgtgc

SEQ ID NO: 77504 - DNA, 15 bp, Homo sapiens
tgctttgacagtgtg

SEQ ID NO: 77505 - DNA, 15 bp, Homo sapiens
atgctttgacagtgt

SEQ ID NO: 77506 - DNA, 15 bp, Homo sapiens
tatgctttgacagtg

SEQ ID NO: 77507 - DNA, 15 bp, Homo sapiens
ctatgctttgacagt

SEQ ID NO: 77508 - DNA, 15 bp, Homo sapiens
tctatgctttgacag

SEQ ID NO: 77509 - DNA, 15 bp, Homo sapiens
ttctatgctttgaca

SEQ ID NO: 77510 - DNA, 15 bp, Homo sapiens
gttctatgctttgac

SEQ ID NO: 77511 - DNA, 15 bp, Homo sapiens
ggttctatgctttga

SEQ ID NO: 77512 - DNA, 15 bp, Homo sapiens
aggttctatgctttg

SEQ ID NO: 77513 - DNA, 15 bp, Homo sapiens
gaggttctatgcttt

SEQ ID NO: 77514 - DNA, 15 bp, Homo sapiens
ggaggttctatgctt

SEQ ID NO: 77515 - DNA, 15 bp, Homo sapiens
tggaggttctatgct

SEQ ID NO: 77516 - DNA, 15 bp, Homo sapiens
ctggaggttctatgc

SEQ ID NO: 77517 - DNA, 15 bp, Homo sapiens
tctggaggttctatg

SEQ ID NO: 77518 - DNA, 15 bp, Homo sapiens
ctctggaggttctat

SEQ ID NO: 77519 - DNA, 15 bp, Homo sapiens
tctctggaggttcta

SEQ ID NO: 77520 - DNA, 15 bp, Homo sapiens
gtctctggaggttct

SEQ ID NO: 77521 - DNA, 15 bp, Homo sapiens
agtctctggaggttc

SEQ ID NO: 77522 - DNA, 15 bp, Homo sapiens
aagtctctggaggtt

SEQ ID NO: 77523 - DNA, 15 bp, Homo sapiens
caagtctctggaggt

SEQ ID NO: 77524 - DNA, 15 bp, Homo sapiens
acaagtctctggagg

SEQ ID NO: 77525 - DNA, 15 bp, Homo sapiens
aacaagtctctggag

SEQ ID NO: 77526 - DNA, 15 bp, Homo sapiens
aaacaagtctctgga

SEQ ID NO: 77527 - DNA, 15 bp, Homo sapiens
aaaacaagtctctgg

SEQ ID NO: 77528 - DNA, 15 bp, Homo sapiens
gaaaacaagtctctg

SEQ ID NO: 77529 - DNA, 15 bp, Homo sapiens
agaaaacaagtctct

SEQ ID NO: 77530 - DNA, 15 bp, Homo sapiens
cagaaaacaagtctc

SEQ ID NO: 77531 - DNA, 15 bp, Homo sapiens
gcagaaaacaagtct

SEQ ID NO: 77532 - DNA, 15 bp, Homo sapiens
tgcagaaaacaagtc

SEQ ID NO: 77533 - DNA, 15 bp, Homo sapiens
ttgcagaaaacaagt

SEQ ID NO: 77534 - DNA, 15 bp, Homo sapiens
tttgcagaaaacaag

SEQ ID NO: 77535 - DNA, 15 bp, Homo sapiens
ctttgcagaaaacaa

SEQ ID NO: 77536 - DNA, 15 bp, Homo sapiens
actttgcagaaaaca

SEQ ID NO: 77537 - DNA, 15 bp, Homo sapiens
tactttgcagaaaac

SEQ ID NO: 77538 - DNA, 15 bp, Homo sapiens
atactttgcagaaaa

SEQ ID NO: 77539 - DNA, 15 bp, Homo sapiens
tatactttgcagaaa

SEQ ID NO: 77540 - DNA, 15 bp, Homo sapiens
ttatactttgcagaa

SEQ ID NO: 77541 - DNA, 15 bp, Homo sapiens
attatactttgcaga

SEQ ID NO: 77542 - DNA, 15 bp, Homo sapiens
aattatactttgcag

SEQ ID NO: 77543 - DNA, 15 bp, Homo sapiens
gaattatactttgca

SEQ ID NO: 77544 - DNA, 15 bp, Homo sapiens
tgaattatactttgc

SEQ ID NO: 77545 - DNA, 15 bp, Homo sapiens
atgaattatactttg

SEQ ID NO: 77546 - DNA, 15 bp, Homo sapiens
catgaattatacttt

SEQ ID NO: 77547 - DNA, 15 bp, Homo sapiens
acatgaattatactt

SEQ ID NO: 77548 - DNA, 15 bp, Homo sapiens
tacatgaattatact

SEQ ID NO: 77549 - DNA, 15 bp, Homo sapiens
ttacatgaattatac

SEQ ID NO: 77550 - DNA, 15 bp, Homo sapiens
attacatgaattata

SEQ ID NO: 77551 - DNA, 15 bp, Homo sapiens
aattacatgaattat

SEQ ID NO: 77552 - DNA, 15 bp, Homo sapiens
taattacatgaatta

SEQ ID NO: 77553 - DNA, 15 bp, Homo sapiens
ataattacatgaatt

SEQ ID NO: 77554 - DNA, 15 bp, Homo sapiens
aataattacatgaat

SEQ ID NO: 77555 - DNA, 15 bp, Homo sapiens
taataattacatgaa

SEQ ID NO: 77556 - DNA, 15 bp, Homo sapiens
ataataattacatga

SEQ ID NO: 77557 - DNA, 15 bp, Homo sapiens
gataataattacatg

SEQ ID NO: 77558 - DNA, 15 bp, Homo sapiens
agataataattacat

SEQ ID NO: 77559 - DNA, 15 bp, Homo sapiens
tagataataattaca

SEQ ID NO: 77560 - DNA, 15 bp, Homo sapiens
atagataataattac

SEQ ID NO: 77561 - DNA, 15 bp, Homo sapiens
aatagataataatta

SEQ ID NO: 77562 - DNA, 15 bp, Homo sapiens
gaatagataataatt

SEQ ID NO: 77563 - DNA, 15 bp, Homo sapiens
agaatagataataat

SEQ ID NO: 77564 - DNA, 15 bp, Homo sapiens
cagaatagataataa

SEQ ID NO: 77565 - DNA, 15 bp, Homo sapiens
acagaatagataata

SEQ ID NO: 77566 - DNA, 15 bp, Homo sapiens
aacagaatagataat

SEQ ID NO: 77567 - DNA, 15 bp, Homo sapiens
taacagaatagataa

SEQ ID NO: 77568 - DNA, 15 bp, Homo sapiens
ataacagaatagata

SEQ ID NO: 77569 - DNA, 15 bp, Homo sapiens
tataacagaatagat

SEQ ID NO: 77570 - DNA, 15 bp, Homo sapiens
atataacagaataga

SEQ ID NO: 77571 - DNA, 15 bp, Homo sapiens
aatataacagaatag

SEQ ID NO: 77572 - DNA, 15 bp, Homo sapiens
aaatataacagaata

SEQ ID NO: 77573 - DNA, 15 bp, Homo sapiens
caaatataacagaat

SEQ ID NO: 77574 - DNA, 15 bp, Homo sapiens
ccaaatataacagaa

SEQ ID NO: 77575 - DNA, 15 bp, Homo sapiens
cccaaatataacaga

SEQ ID NO: 77576 - DNA, 15 bp, Homo sapiens
tcccaaatataacag

SEQ ID NO: 77577 - DNA, 15 bp, Homo sapiens
atcccaaatataaca

SEQ ID NO: 77578 - DNA, 15 bp, Homo sapiens
catcccaaatataac

SEQ ID NO: 77579 - DNA, 15 bp, Homo sapiens
acatcccaaatataa

SEQ ID NO: 77580 - DNA, 15 bp, Homo sapiens
aacatcccaaatata

SEQ ID NO: 77581 - DNA, 15 bp, Homo sapiens
taacatcccaaatat

SEQ ID NO: 77582 - DNA, 15 bp, Homo sapiens
ctaacatcccaaata

SEQ ID NO: 77583 - DNA, 15 bp, Homo sapiens
cctaacatcccaaat

SEQ ID NO: 77584 - DNA, 15 bp, Homo sapiens
acctaacatcccaaa

SEQ ID NO: 77585 - DNA, 15 bp, Homo sapiens
tacctaacatcccaa

SEQ ID NO: 77586 - DNA, 15 bp, Homo sapiens
ctacctaacatccca

SEQ ID NO: 77587 - DNA, 15 bp, Homo sapiens
actacctaacatccc

SEQ ID NO: 77588 - DNA, 15 bp, Homo sapiens
cactacctaacatcc

SEQ ID NO: 77589 - DNA, 15 bp, Homo sapiens
acactacctaacatc

SEQ ID NO: 77590 - DNA, 15 bp, Homo sapiens
aacactacctaacat

SEQ ID NO: 77591 - DNA, 15 bp, Homo sapiens
aaacactacctaaca

SEQ ID NO: 77592 - DNA, 15 bp, Homo sapiens
caaacactacctaac

SEQ ID NO: 77593 - DNA, 15 bp, Homo sapiens
acaaacactacctaa

SEQ ID NO: 77594 - DNA, 15 bp, Homo sapiens
aacaaacactaccta

SEQ ID NO: 77595 - DNA, 15 bp, Homo sapiens
gaacaaacactacct

SEQ ID NO: 77596 - DNA, 15 bp, Homo sapiens
agaacaaacactacc

SEQ ID NO: 77597 - DNA, 15 bp, Homo sapiens
aagaacaaacactac

SEQ ID NO: 77598 - DNA, 15 bp, Homo sapiens
aaagaacaaacacta

SEQ ID NO: 77599 - DNA, 15 bp, Homo sapiens
taaagaacaaacact

SEQ ID NO: 77600 - DNA, 15 bp, Homo sapiens
ctaaagaacaaacac

SEQ ID NO: 77601 - DNA, 15 bp, Homo sapiens
tctaaagaacaaaca

SEQ ID NO: 77602 - DNA, 15 bp, Homo sapiens
atctaaagaacaaac

SEQ ID NO: 77603 - DNA, 15 bp, Homo sapiens
tatctaaagaacaaa

SEQ ID NO: 77604 - DNA, 15 bp, Homo sapiens
ttatctaaagaacaa

SEQ ID NO: 77605 - DNA, 15 bp, Homo sapiens
tttatctaaagaaca

SEQ ID NO: 77606 - DNA, 15 bp, Homo sapiens
ttttatctaaagaac

SEQ ID NO: 77607 - DNA, 15 bp, Homo sapiens
tttttatctaaagaa

SEQ ID NO: 77608 - DNA, 15 bp, Homo sapiens
atttttatctaaaga

SEQ ID NO: 77609 - DNA, 15 bp, Homo sapiens
tatttttatctaaag

SEQ ID NO: 77610 - DNA, 15 bp, Homo sapiens
atatttttatctaaa

SEQ ID NO: 77611 - DNA, 15 bp, Homo sapiens
gatatttttatctaa

SEQ ID NO: 77612 - DNA, 15 bp, Homo sapiens
ggatatttttatcta

SEQ ID NO: 77613 - DNA, 15 bp, Homo sapiens
gggatatttttatct

SEQ ID NO: 77614 - DNA, 15 bp, Homo sapiens
ggggatatttttatc

SEQ ID NO: 77615 - DNA, 15 bp, Homo sapiens
gggggatatttttat

SEQ ID NO: 77616 - DNA, 15 bp, Homo sapiens
tgggggatattttta

SEQ ID NO: 77617 - DNA, 15 bp, Homo sapiens
gtgggggatattttt

SEQ ID NO: 77618 - DNA, 15 bp, Homo sapiens
agtgggggatatttt

SEQ ID NO: 77619 - DNA, 15 bp, Homo sapiens
gagtgggggatattt

SEQ ID NO: 77620 - DNA, 15 bp, Homo sapiens
agagtgggggatatt

SEQ ID NO: 77621 - DNA, 15 bp, Homo sapiens
cagagtgggggatat

SEQ ID NO: 77622 - DNA, 15 bp, Homo sapiens
acagagtgggggata

SEQ ID NO: 77623 - DNA, 15 bp, Homo sapiens
tacagagtgggggat

SEQ ID NO: 77624 - DNA, 15 bp, Homo sapiens
ttacagagtggggga

SEQ ID NO: 77625 - DNA, 15 bp, Homo sapiens
gttacagagtggggg

SEQ ID NO: 77626 - DNA, 15 bp, Homo sapiens
tgttacagagtgggg

SEQ ID NO: 77627 - DNA, 15 bp, Homo sapiens
ttgttacagagtggg

SEQ ID NO: 77628 - DNA, 15 bp, Homo sapiens
attgttacagagtgg

SEQ ID NO: 77629 - DNA, 15 bp, Homo sapiens
tattgttacagagtg

SEQ ID NO: 77630 - DNA, 15 bp, Homo sapiens
gtattgttacagagt

SEQ ID NO: 77631 - DNA, 15 bp, Homo sapiens
tgtattgttacagag

SEQ ID NO: 77632 - DNA, 15 bp, Homo sapiens
atgtattgttacaga

SEQ ID NO: 77633 - DNA, 15 bp, Homo sapiens
aatgtattgttacag

SEQ ID NO: 77634 - DNA, 15 bp, Homo sapiens
taatgtattgttaca

SEQ ID NO: 77635 - DNA, 15 bp, Homo sapiens
ttaatgtattgttac

SEQ ID NO: 77636 - DNA, 15 bp, Homo sapiens
tttaatgtattgtta

SEQ ID NO: 77637 - DNA, 15 bp, Homo sapiens
atttaatgtattgtt

SEQ ID NO: 77638 - DNA, 15 bp, Homo sapiens
gatttaatgtattgt

SEQ ID NO: 77639 - DNA, 15 bp, Homo sapiens
tgatttaatgtattg

SEQ ID NO: 77640 - DNA, 15 bp, Homo sapiens
ttgatttaatgtatt

SEQ ID NO: 77641 - DNA, 15 bp, Homo sapiens
tttgatttaatgtat

SEQ ID NO: 77642 - DNA, 15 bp, Homo sapiens
ctttgatttaatgta

SEQ ID NO: 77643 - DNA, 15 bp, Homo sapiens
tctttgatttaatgt

SEQ ID NO: 77644 - DNA, 15 bp, Homo sapiens
ttctttgatttaatg

SEQ ID NO: 77645 - DNA, 15 bp, Homo sapiens
tttctttgatttaat

SEQ ID NO: 77646 - DNA, 15 bp, Homo sapiens
ttttctttgatttaa

SEQ ID NO: 77647 - DNA, 15 bp, Homo sapiens
cttttctttgattta

SEQ ID NO: 77648 - DNA, 15 bp, Homo sapiens
ccttttctttgattt

SEQ ID NO: 77649 - DNA, 15 bp, Homo sapiens
tccttttctttgatt

SEQ ID NO: 77650 - DNA, 15 bp, Homo sapiens
gtccttttctttgat

SEQ ID NO: 77651 - DNA, 15 bp, Homo sapiens
tgtccttttctttga

SEQ ID NO: 77652 - DNA, 15 bp, Homo sapiens
ttgtccttttctttg

SEQ ID NO: 77653 - DNA, 15 bp, Homo sapiens
tttgtccttttcttt

SEQ ID NO: 77654 - DNA, 15 bp, Homo sapiens
ctttgtccttttctt

SEQ ID NO: 77655 - DNA, 15 bp, Homo sapiens
cctttgtccttttct

SEQ ID NO: 77656 - DNA, 15 bp, Homo sapiens
tcctttgtccttttc

SEQ ID NO: 77657 - DNA, 15 bp, Homo sapiens
atcctttgtcctttt

SEQ ID NO: 77658 - DNA, 15 bp, Homo sapiens
aatcctttgtccttt

SEQ ID NO: 77659 - DNA, 15 bp, Homo sapiens
aaatcctttgtcctt

SEQ ID NO: 77660 - DNA, 15 bp, Homo sapiens
aaaatcctttgtcct

SEQ ID NO: 77661 - DNA, 15 bp, Homo sapiens
aaaaatcctttgtcc

SEQ ID NO: 77662 - DNA, 15 bp, Homo sapiens
gaaaaatcctttgtc

SEQ ID NO: 77663 - DNA, 15 bp, Homo sapiens
agaaaaatcctttgt

SEQ ID NO: 77664 - DNA, 15 bp, Homo sapiens
cagaaaaatcctttg

SEQ ID NO: 77665 - DNA, 15 bp, Homo sapiens
ccagaaaaatccttt

SEQ ID NO: 77666 - DNA, 15 bp, Homo sapiens
cccagaaaaatcctt

SEQ ID NO: 77667 - DNA, 15 bp, Homo sapiens
acccagaaaaatcct

SEQ ID NO: 77668 - DNA, 15 bp, Homo sapiens
gacccagaaaaatcc

SEQ ID NO: 77669 - DNA, 15 bp, Homo sapiens
agacccagaaaaatc

SEQ ID NO: 77670 - DNA, 15 bp, Homo sapiens
aagacccagaaaaat

SEQ ID NO: 77671 - DNA, 15 bp, Homo sapiens
caagacccagaaaaa

SEQ ID NO: 77672 - DNA, 15 bp, Homo sapiens
acaagacccagaaaa

SEQ ID NO: 77673 - DNA, 15 bp, Homo sapiens
aacaagacccagaaa

SEQ ID NO: 77674 - DNA, 15 bp, Homo sapiens
taacaagacccagaa

SEQ ID NO: 77675 - DNA, 15 bp, Homo sapiens
ctaacaagacccaga

SEQ ID NO: 77676 - DNA, 15 bp, Homo sapiens
gctaacaagacccag

SEQ ID NO: 77677 - DNA, 15 bp, Homo sapiens
tgctaacaagaccca

SEQ ID NO: 77678 - DNA, 15 bp, Homo sapiens
ctgctaacaagaccc

SEQ ID NO: 77679 - DNA, 15 bp, Homo sapiens
cctgctaacaagacc

SEQ ID NO: 77680 - DNA, 15 bp, Homo sapiens
tcctgctaacaagac

SEQ ID NO: 77681 - DNA, 15 bp, Homo sapiens
ctcctgctaacaaga

SEQ ID NO: 77682 - DNA, 15 bp, Homo sapiens
gctcctgctaacaag

SEQ ID NO: 77683 - DNA, 15 bp, Homo sapiens
agctcctgctaacaa

SEQ ID NO: 77684 - DNA, 15 bp, Homo sapiens
aagctcctgctaaca

SEQ ID NO: 77685 - DNA, 15 bp, Homo sapiens
aaagctcctgctaac

SEQ ID NO: 77686 - DNA, 15 bp, Homo sapiens
gaaagctcctgctaa

SEQ ID NO: 77687 - DNA, 15 bp, Homo sapiens
agaaagctcctgcta

SEQ ID NO: 77688 - DNA, 15 bp, Homo sapiens
aagaaagctcctgct

SEQ ID NO: 77689 - DNA, 15 bp, Homo sapiens
gaagaaagctcctgc

SEQ ID NO: 77690 - DNA, 15 bp, Homo sapiens
tgaagaaagctcctg

SEQ ID NO: 77691 - DNA, 15 bp, Homo sapiens
ctgaagaaagctcct

SEQ ID NO: 77692 - DNA, 15 bp, Homo sapiens
actgaagaaagctcc

SEQ ID NO: 77693 - DNA, 15 bp, Homo sapiens
gactgaagaaagctc

SEQ ID NO: 77694 - DNA, 15 bp, Homo sapiens
ggactgaagaaagct

SEQ ID NO: 77695 - DNA, 15 bp, Homo sapiens
aggactgaagaaagc

SEQ ID NO: 77696 - DNA, 15 bp, Homo sapiens
caggactgaagaaag

SEQ ID NO: 77697 - DNA, 15 bp, Homo sapiens
tcaggactgaagaaa

SEQ ID NO: 77698 - DNA, 15 bp, Homo sapiens
ttcaggactgaagaa

SEQ ID NO: 77699 - DNA, 15 bp, Homo sapiens
tttcaggactgaaga

SEQ ID NO: 77700 - DNA, 15 bp, Homo sapiens
ctttcaggactgaag

SEQ ID NO: 77701 - DNA, 15 bp, Homo sapiens
tctttcaggactgaa

SEQ ID NO: 77702 - DNA, 15 bp, Homo sapiens
atctttcaggactga

SEQ ID NO: 77703 - DNA, 15 bp, Homo sapiens
aatctttcaggactg

SEQ ID NO: 77704 - DNA, 15 bp, Homo sapiens
aaatctttcaggact

SEQ ID NO: 77705 - DNA, 15 bp, Homo sapiens
caaatctttcaggac

SEQ ID NO: 77706 - DNA, 15 bp, Homo sapiens
acaaatctttcagga

SEQ ID NO: 77707 - DNA, 15 bp, Homo sapiens
tacaaatctttcagg

SEQ ID NO: 77708 - DNA, 15 bp, Homo sapiens
ctacaaatctttcag

SEQ ID NO: 77709 - DNA, 15 bp, Homo sapiens
tctacaaatctttca

SEQ ID NO: 77710 - DNA, 15 bp, Homo sapiens
gtctacaaatctttc

SEQ ID NO: 77711 - DNA, 15 bp, Homo sapiens
ggtctacaaatcttt

SEQ ID NO: 77712 - DNA, 15 bp, Homo sapiens
aggtctacaaatctt

SEQ ID NO: 77713 - DNA, 15 bp, Homo sapiens
caggtctacaaatct

SEQ ID NO: 77714 - DNA, 15 bp, Homo sapiens
acaggtctacaaatc

SEQ ID NO: 77715 - DNA, 15 bp, Homo sapiens
tacaggtctacaaat

SEQ ID NO: 77716 - DNA, 15 bp, Homo sapiens
ctacaggtctacaaa

SEQ ID NO: 77717 - DNA, 15 bp, Homo sapiens
tctacaggtctacaa

SEQ ID NO: 77718 - DNA, 15 bp, Homo sapiens
atctacaggtctaca

SEQ ID NO: 77719 - DNA, 15 bp, Homo sapiens
catctacaggtctac

SEQ ID NO: 77720 - DNA, 15 bp, Homo sapiens
ccatctacaggtcta

SEQ ID NO: 77721 - DNA, 15 bp, Homo sapiens
cccatctacaggtct

SEQ ID NO: 77722 - DNA, 15 bp, Homo sapiens
ccccatctacaggtc

SEQ ID NO: 77723 - DNA, 15 bp, Homo sapiens
cccccatctacaggt

SEQ ID NO: 77724 - DNA, 15 bp, Homo sapiens
tcccccatctacagg

SEQ ID NO: 77725 - DNA, 15 bp, Homo sapiens
ttcccccatctacag

SEQ ID NO: 77726 - DNA, 15 bp, Homo sapiens
gttcccccatctaca

SEQ ID NO: 77727 - DNA, 15 bp, Homo sapiens
agttcccccatctac

SEQ ID NO: 77728 - DNA, 15 bp, Homo sapiens
cagttcccccatcta

SEQ ID NO: 77729 - DNA, 15 bp, Homo sapiens
acagttcccccatct

SEQ ID NO: 77730 - DNA, 15 bp, Homo sapiens
cacagttcccccatc

SEQ ID NO: 77731 - DNA, 15 bp, Homo sapiens
acacagttcccccat

SEQ ID NO: 77732 - DNA, 15 bp, Homo sapiens
gacacagttccccca

SEQ ID NO: 77733 - DNA, 15 bp, Homo sapiens
tgacacagttccccc

SEQ ID NO: 77734 - DNA, 15 bp, Homo sapiens
ctgacacagttcccc

SEQ ID NO: 77735 - DNA, 15 bp, Homo sapiens
actgacacagttccc

SEQ ID NO: 77736 - DNA, 15 bp, Homo sapiens
cactgacacagttcc

SEQ ID NO: 77737 - DNA, 15 bp, Homo sapiens
tcactgacacagttc

SEQ ID NO: 77738 - DNA, 15 bp, Homo sapiens
atcactgacacagtt

SEQ ID NO: 77739 - DNA, 15 bp, Homo sapiens
tatcactgacacagt

SEQ ID NO: 77740 - DNA, 15 bp, Homo sapiens
gtatcactgacacag

SEQ ID NO: 77741 - DNA, 15 bp, Homo sapiens
tgtatcactgacaca

SEQ ID NO: 77742 - DNA, 15 bp, Homo sapiens
ttgtatcactgacac

SEQ ID NO: 77743 - DNA, 15 bp, Homo sapiens
tttgtatcactgaca

SEQ ID NO: 77744 - DNA, 15 bp, Homo sapiens
ttttgtatcactgac

SEQ ID NO: 77745 - DNA, 15 bp, Homo sapiens
cttttgtatcactga

SEQ ID NO: 77746 - DNA, 15 bp, Homo sapiens
ccttttgtatcactg

SEQ ID NO: 77747 - DNA, 15 bp, Homo sapiens
cccttttgtatcact

SEQ ID NO: 77748 - DNA, 15 bp, Homo sapiens
tcccttttgtatcac

SEQ ID NO: 77749 - DNA, 15 bp, Homo sapiens
ttcccttttgtatca

SEQ ID NO: 77750 - DNA, 15 bp, Homo sapiens
cttcccttttgtatc

SEQ ID NO: 77751 - DNA, 15 bp, Homo sapiens
gcttcccttttgtat

SEQ ID NO: 77752 - DNA, 15 bp, Homo sapiens
tgcttcccttttgta

SEQ ID NO: 77753 - DNA, 15 bp, Homo sapiens
atgcttcccttttgt

SEQ ID NO: 77754 - DNA, 15 bp, Homo sapiens
aatgcttcccttttg

SEQ ID NO: 77755 - DNA, 15 bp, Homo sapiens
aaatgcttccctttt

SEQ ID NO: 77756 - DNA, 15 bp, Homo sapiens
taaatgcttcccttt

SEQ ID NO: 77757 - DNA, 15 bp, Homo sapiens
ttaaatgcttccctt

SEQ ID NO: 77758 - DNA, 15 bp, Homo sapiens
tttaaatgcttccct

SEQ ID NO: 77759 - DNA, 15 bp, Homo sapiens
ttttaaatgcttccc

SEQ ID NO: 77760 - DNA, 15 bp, Homo sapiens
tttttaaatgcttcc

SEQ ID NO: 77761 - DNA, 15 bp, Homo sapiens
ttttttaaatgcttc

SEQ ID NO: 77762 - DNA, 15 bp, Homo sapiens
tttttttaaatgctt

SEQ ID NO: 77763 - DNA, 15 bp, Homo sapiens
ttttttttaaatgct

SEQ ID NO: 77764 - DNA, 15 bp, Homo sapiens
tttttttttaaatgc

SEQ ID NO: 77765 - DNA, 15 bp, Homo sapiens
ttttttttttaaatg

SEQ ID NO: 77766 - DNA, 15 bp, Homo sapiens
ttttttttttttaaa

SEQ ID NO: 77767 - DNA, 15 bp, Homo sapiens
cttttttttttttaa

SEQ ID NO: 77768 - DNA, 15 bp, Homo sapiens
actttttttttttta

SEQ ID NO: 77769 - DNA, 15 bp, Homo sapiens
tactttttttttttt

SEQ ID NO: 77770 - DNA, 15 bp, Homo sapiens
atacttttttttttt

SEQ ID NO: 77771 - DNA, 15 bp, Homo sapiens
tatactttttttttt

SEQ ID NO: 77772 - DNA, 15 bp, Homo sapiens
atatacttttttttt

SEQ ID NO: 77773 - DNA, 15 bp, Homo sapiens
tatatactttttttt

SEQ ID NO: 77774 - DNA, 15 bp, Homo sapiens
atatatacttttttt

SEQ ID NO: 77775 - DNA, 15 bp, Homo sapiens
tatatatactttttt

SEQ ID NO: 77776 - DNA, 15 bp, Homo sapiens
atatatatacttttt

SEQ ID NO: 77777 - DNA, 15 bp, Homo sapiens
tatatatatactttt

SEQ ID NO: 77778 - DNA, 15 bp, Homo sapiens
catatatatatatat

SEQ ID NO: 77779 - DNA, 15 bp, Homo sapiens
acatatatatatata

SEQ ID NO: 77780 - DNA, 15 bp, Homo sapiens
tacatatatatatat

SEQ ID NO: 77781 - DNA, 15 bp, Homo sapiens
ttacatatatatata

SEQ ID NO: 77782 - DNA, 15 bp, Homo sapiens
attacatatatatat

SEQ ID NO: 77783 - DNA, 15 bp, Homo sapiens
cattacatatatata

SEQ ID NO: 77784 - DNA, 15 bp, Homo sapiens
acattacatatatat

SEQ ID NO: 77785 - DNA, 15 bp, Homo sapiens
cacattacatatata

SEQ ID NO: 77786 - DNA, 15 bp, Homo sapiens
tcacattacatatat

SEQ ID NO: 77787 - DNA, 15 bp, Homo sapiens
ttcacattacatata

SEQ ID NO: 77788 - DNA, 15 bp, Homo sapiens
attcacattacatat

SEQ ID NO: 77789 - DNA, 15 bp, Homo sapiens
aattcacattacata

SEQ ID NO: 77790 - DNA, 15 bp, Homo sapiens
caattcacattacat

SEQ ID NO: 77791 - DNA, 15 bp, Homo sapiens
ccaattcacattaca

SEQ ID NO: 77792 - DNA, 15 bp, Homo sapiens
gccaattcacattac

SEQ ID NO: 77793 - DNA, 15 bp, Homo sapiens
ggccaattcacatta

SEQ ID NO: 77794 - DNA, 15 bp, Homo sapiens
aggccaattcacatt

SEQ ID NO: 77795 - DNA, 15 bp, Homo sapiens
gaggccaattcacat

SEQ ID NO: 77796 - DNA, 15 bp, Homo sapiens
agaggccaattcaca

SEQ ID NO: 77797 - DNA, 15 bp, Homo sapiens
aagaggccaattcac

SEQ ID NO: 77798 - DNA, 15 bp, Homo sapiens
aaagaggccaattca

SEQ ID NO: 77799 - DNA, 15 bp, Homo sapiens
aaaagaggccaattc

SEQ ID NO: 77800 - DNA, 15 bp, Homo sapiens
aaaaagaggccaatt

SEQ ID NO: 77801 - DNA, 15 bp, Homo sapiens
gaaaaagaggccaat

SEQ ID NO: 77802 - DNA, 15 bp, Homo sapiens
agaaaaagaggccaa

SEQ ID NO: 77803 - DNA, 15 bp, Homo sapiens
gagaaaaagaggcca

SEQ ID NO: 77804 - DNA, 15 bp, Homo sapiens
agagaaaaagaggcc

SEQ ID NO: 77805 - DNA, 15 bp, Homo sapiens
tagagaaaaagaggc

SEQ ID NO: 77806 - DNA, 15 bp, Homo sapiens
ttagagaaaaagagg

SEQ ID NO: 77807 - DNA, 15 bp, Homo sapiens
cttagagaaaaagag

SEQ ID NO: 77808 - DNA, 15 bp, Homo sapiens
gcttagagaaaaaga

SEQ ID NO: 77809 - DNA, 15 bp, Homo sapiens
ggcttagagaaaaag

SEQ ID NO: 77810 - DNA, 15 bp, Homo sapiens
gggcttagagaaaaa

SEQ ID NO: 77811 - DNA, 15 bp, Homo sapiens
tgggcttagagaaaa

SEQ ID NO: 77812 - DNA, 15 bp, Homo sapiens
gtgggcttagagaaa

SEQ ID NO: 77813 - DNA, 15 bp, Homo sapiens
tgtgggcttagagaa

SEQ ID NO: 77814 - DNA, 15 bp, Homo sapiens
atgtgggcttagaga

SEQ ID NO: 77815 - DNA, 15 bp, Homo sapiens
aatgtgggcttagag

SEQ ID NO: 77816 - DNA, 15 bp, Homo sapiens
aaatgtgggcttaga

SEQ ID NO: 77817 - DNA, 15 bp, Homo sapiens
aaaatgtgggcttag

SEQ ID NO: 77818 - DNA, 15 bp, Homo sapiens
gaaaatgtgggctta

SEQ ID NO: 77819 - DNA, 15 bp, Homo sapiens
agaaaatgtgggctt

SEQ ID NO: 77820 - DNA, 15 bp, Homo sapiens
aagaaaatgtgggct

SEQ ID NO: 77821 - DNA, 15 bp, Homo sapiens
gaagaaaatgtgggc

SEQ ID NO: 77822 - DNA, 15 bp, Homo sapiens
agaagaaaatgtggg

SEQ ID NO: 77823 - DNA, 15 bp, Homo sapiens
aagaagaaaatgtgg

SEQ ID NO: 77824 - DNA, 15 bp, Homo sapiens
taagaagaaaatgtg

SEQ ID NO: 77825 - DNA, 15 bp, Homo sapiens
gtaagaagaaaatgt

SEQ ID NO: 77826 - DNA, 15 bp, Homo sapiens
tgtaagaagaaaatg

SEQ ID NO: 77827 - DNA, 15 bp, Homo sapiens
atgtaagaagaaaat

SEQ ID NO: 77828 - DNA, 15 bp, Homo sapiens
tatgtaagaagaaaa

SEQ ID NO: 77829 - DNA, 15 bp, Homo sapiens
ctatgtaagaagaaa

SEQ ID NO: 77830 - DNA, 15 bp, Homo sapiens
actatgtaagaagaa

SEQ ID NO: 77831 - DNA, 15 bp, Homo sapiens
aactatgtaagaaga

SEQ ID NO: 77832 - DNA, 15 bp, Homo sapiens
gaactatgtaagaag

SEQ ID NO: 77833 - DNA, 15 bp, Homo sapiens
tgaactatgtaagaa

SEQ ID NO: 77834 - DNA, 15 bp, Homo sapiens
ctgaactatgtaaga

SEQ ID NO: 77835 - DNA, 15 bp, Homo sapiens
cctgaactatgtaag

SEQ ID NO: 77836 - DNA, 15 bp, Homo sapiens
acctgaactatgtaa

SEQ ID NO: 77837 - DNA, 15 bp, Homo sapiens
aacctgaactatgta

SEQ ID NO: 77838 - DNA, 15 bp, Homo sapiens
aaacctgaactatgt

SEQ ID NO: 77839 - DNA, 15 bp, Homo sapiens
taaacctgaactatg

SEQ ID NO: 77840 - DNA, 15 bp, Homo sapiens
gtaaacctgaactat

SEQ ID NO: 77841 - DNA, 15 bp, Homo sapiens
agtaaacctgaacta

SEQ ID NO: 77842 - DNA, 15 bp, Homo sapiens
aagtaaacctgaact

SEQ ID NO: 77843 - DNA, 15 bp, Homo sapiens
aaagtaaacctgaac

SEQ ID NO: 77844 - DNA, 15 bp, Homo sapiens
taaagtaaacctgaa

SEQ ID NO: 77845 - DNA, 15 bp, Homo sapiens
ataaagtaaacctga

SEQ ID NO: 77846 - DNA, 15 bp, Homo sapiens
aataaagtaaacctg

SEQ ID NO: 77847 - DNA, 15 bp, Homo sapiens
aaataaagtaaacct

SEQ ID NO: 77848 - DNA, 15 bp, Homo sapiens
aaaataaagtaaacc

SEQ ID NO: 77849 - DNA, 15 bp, Homo sapiens
aaaaataaagtaaac

SEQ ID NO: 77850 - DNA, 15 bp, Homo sapiens
aaaaaataaagtaaa

SEQ ID NO: 77851 - DNA, 15 bp, Homo sapiens
gaaaaaataaagtaa

SEQ ID NO: 77852 - DNA, 15 bp, Homo sapiens
ggaaaaaataaagta

SEQ ID NO: 77853 - DNA, 15 bp, Homo sapiens
aggaaaaaataaagt

SEQ ID NO: 77854 - DNA, 15 bp, Homo sapiens
aaggaaaaaataaag

SEQ ID NO: 77855 - DNA, 15 bp, Homo sapiens
aaaggaaaaaataaa

SEQ ID NO: 77856 - DNA, 15 bp, Homo sapiens
gaaaggaaaaaataa

SEQ ID NO: 77857 - DNA, 15 bp, Homo sapiens
ggaaaggaaaaaata

SEQ ID NO: 77858 - DNA, 15 bp, Homo sapiens
cggaaaggaaaaaat

SEQ ID NO: 77859 - DNA, 15 bp, Homo sapiens
ccggaaaggaaaaaa

SEQ ID NO: 77860 - DNA, 15 bp, Homo sapiens
gccggaaaggaaaaa

SEQ ID NO: 77861 - DNA, 15 bp, Homo sapiens
agccggaaaggaaaa

SEQ ID NO: 77862 - DNA, 15 bp, Homo sapiens
cagccggaaaggaaa

SEQ ID NO: 77863 - DNA, 15 bp, Homo sapiens
gcagccggaaaggaa

SEQ ID NO: 77864 - DNA, 15 bp, Homo sapiens
agcagccggaaagga

SEQ ID NO: 77865 - DNA, 15 bp, Homo sapiens
cagcagccggaaagg

SEQ ID NO: 77866 - DNA, 15 bp, Homo sapiens
tcagcagccggaaag

SEQ ID NO: 77867 - DNA, 15 bp, Homo sapiens
gtcagcagccggaaa

SEQ ID NO: 77868 - DNA, 15 bp, Homo sapiens
ggtcagcagccggaa

SEQ ID NO: 77869 - DNA, 15 bp, Homo sapiens
gggtcagcagccgga

SEQ ID NO: 77870 - DNA, 15 bp, Homo sapiens
agggtcagcagccgg

SEQ ID NO: 77871 - DNA, 15 bp, Homo sapiens
cagggtcagcagccg

SEQ ID NO: 77872 - DNA, 15 bp, Homo sapiens
acagggtcagcagcc

SEQ ID NO: 77873 - DNA, 15 bp, Homo sapiens
tacagggtcagcagc

SEQ ID NO: 77874 - DNA, 15 bp, Homo sapiens
atacagggtcagcag

SEQ ID NO: 77875 - DNA, 15 bp, Homo sapiens
aatacagggtcagca

SEQ ID NO: 77876 - DNA, 15 bp, Homo sapiens
caatacagggtcagc

SEQ ID NO: 77877 - DNA, 15 bp, Homo sapiens
gcaatacagggtcag

SEQ ID NO: 77878 - DNA, 15 bp, Homo sapiens
ggcaatacagggtca

SEQ ID NO: 77879 - DNA, 15 bp, Homo sapiens
gggcaatacagggtc

SEQ ID NO: 77880 - DNA, 15 bp, Homo sapiens
cgggcaatacagggt

SEQ ID NO: 77881 - DNA, 15 bp, Homo sapiens
acgggcaatacaggg

SEQ ID NO: 77882 - DNA, 15 bp, Homo sapiens
tacgggcaatacagg

SEQ ID NO: 77883 - DNA, 15 bp, Homo sapiens
ctacgggcaatacag

SEQ ID NO: 77884 - DNA, 15 bp, Homo sapiens
actacgggcaataca

SEQ ID NO: 77885 - DNA, 15 bp, Homo sapiens
aactacgggcaatac

SEQ ID NO: 77886 - DNA, 15 bp, Homo sapiens
caactacgggcaata

SEQ ID NO: 77887 - DNA, 15 bp, Homo sapiens
acaactacgggcaat

SEQ ID NO: 77888 - DNA, 15 bp, Homo sapiens
cacaactacgggcaa

SEQ ID NO: 77889 - DNA, 15 bp, Homo sapiens
ccacaactacgggca

SEQ ID NO: 77890 - DNA, 15 bp, Homo sapiens
tccacaactacgggc

SEQ ID NO: 77891 - DNA, 15 bp, Homo sapiens
ttccacaactacggg

SEQ ID NO: 77892 - DNA, 15 bp, Homo sapiens
gttccacaactacgg

SEQ ID NO: 77893 - DNA, 15 bp, Homo sapiens
tgttccacaactacg

SEQ ID NO: 77894 - DNA, 15 bp, Homo sapiens
atgttccacaactac

SEQ ID NO: 77895 - DNA, 15 bp, Homo sapiens
tatgttccacaacta

SEQ ID NO: 77896 - DNA, 15 bp, Homo sapiens
ctatgttccacaact

SEQ ID NO: 77897 - DNA, 15 bp, Homo sapiens
gctatgttccacaac

SEQ ID NO: 77898 - DNA, 15 bp, Homo sapiens
tgctatgttccacaa

SEQ ID NO: 77899 - DNA, 15 bp, Homo sapiens
atgctatgttccaca

SEQ ID NO: 77900 - DNA, 15 bp, Homo sapiens
catgctatgttccac

SEQ ID NO: 77901 - DNA, 15 bp, Homo sapiens
acatgctatgttcca

SEQ ID NO: 77902 - DNA, 15 bp, Homo sapiens
cacatgctatgttcc

SEQ ID NO: 77903 - DNA, 15 bp, Homo sapiens
acacatgctatgttc

SEQ ID NO: 77904 - DNA, 15 bp, Homo sapiens
aacacatgctatgtt

SEQ ID NO: 77905 - DNA, 15 bp, Homo sapiens
aaacacatgctatgt

SEQ ID NO: 77906 - DNA, 15 bp, Homo sapiens
caaacacatgctatg

SEQ ID NO: 77907 - DNA, 15 bp, Homo sapiens
acaaacacatgctat

SEQ ID NO: 77908 - DNA, 15 bp, Homo sapiens
cacaaacacatgcta

SEQ ID NO: 77909 - DNA, 15 bp, Homo sapiens
tcacaaacacatgct

SEQ ID NO: 77910 - DNA, 15 bp, Homo sapiens
gtcacaaacacatgc

SEQ ID NO: 77911 - DNA, 15 bp, Homo sapiens
ggtcacaaacacatg

SEQ ID NO: 77912 - DNA, 15 bp, Homo sapiens
aggtcacaaacacat

SEQ ID NO: 77913 - DNA, 15 bp, Homo sapiens
caggtcacaaacaca

SEQ ID NO: 77914 - DNA, 15 bp, Homo sapiens
acaggtcacaaacac

SEQ ID NO: 77915 - DNA, 15 bp, Homo sapiens
cacaggtcacaaaca

SEQ ID NO: 77916 - DNA, 15 bp, Homo sapiens
gcacaggtcacaaac

SEQ ID NO: 77917 - DNA, 15 bp, Homo sapiens
ggcacaggtcacaaa

SEQ ID NO: 77918 - DNA, 15 bp, Homo sapiens
aggcacaggtcacaa

SEQ ID NO: 77919 - DNA, 15 bp, Homo sapiens
caggcacaggtcaca

SEQ ID NO: 77920 - DNA, 15 bp, Homo sapiens
acaggcacaggtcac

SEQ ID NO: 77921 - DNA, 15 bp, Homo sapiens
aacaggcacaggtca

SEQ ID NO: 77922 - DNA, 15 bp, Homo sapiens
taacaggcacaggtc

SEQ ID NO: 77923 - DNA, 15 bp, Homo sapiens
ataacaggcacaggt

SEQ ID NO: 77924 - DNA, 15 bp, Homo sapiens
aataacaggcacagg

SEQ ID NO: 77925 - DNA, 15 bp, Homo sapiens
aaataacaggcacag

SEQ ID NO: 77926 - DNA, 15 bp, Homo sapiens
aaaataacaggcaca

SEQ ID NO: 77927 - DNA, 15 bp, Homo sapiens
aaaaataacaggcac

SEQ ID NO: 77928 - DNA, 15 bp, Homo sapiens
caaaaataacaggca

SEQ ID NO: 77929 - DNA, 15 bp, Homo sapiens
acaaaaataacaggc

SEQ ID NO: 77930 - DNA, 15 bp, Homo sapiens
cacaaaaataacagg

SEQ ID NO: 77931 - DNA, 15 bp, Homo sapiens
gcacaaaaataacag

SEQ ID NO: 77932 - DNA, 15 bp, Homo sapiens
agcacaaaaataaca

SEQ ID NO: 77933 - DNA, 15 bp, Homo sapiens
aagcacaaaaataac

SEQ ID NO: 77934 - DNA, 15 bp, Homo sapiens
aaagcacaaaaataa

SEQ ID NO: 77935 - DNA, 15 bp, Homo sapiens
gaaagcacaaaaata

SEQ ID NO: 77936 - DNA, 15 bp, Homo sapiens
agaaagcacaaaaat

SEQ ID NO: 77937 - DNA, 15 bp, Homo sapiens
tagaaagcacaaaaa

SEQ ID NO: 77938 - DNA, 15 bp, Homo sapiens
ctagaaagcacaaaa

SEQ ID NO: 77939 - DNA, 15 bp, Homo sapiens
actagaaagcacaaa

SEQ ID NO: 77940 - DNA, 15 bp, Homo sapiens
aactagaaagcacaa

SEQ ID NO: 77941 - DNA, 15 bp, Homo sapiens
caactagaaagcaca

SEQ ID NO: 77942 - DNA, 15 bp, Homo sapiens
acaactagaaagcac

SEQ ID NO: 77943 - DNA, 15 bp, Homo sapiens
cacaactagaaagca

SEQ ID NO: 77944 - DNA, 15 bp, Homo sapiens
gcacaactagaaagc

SEQ ID NO: 77945 - DNA, 15 bp, Homo sapiens
tgcacaactagaaag

SEQ ID NO: 77946 - DNA, 15 bp, Homo sapiens
atgcacaactagaaa

SEQ ID NO: 77947 - DNA, 15 bp, Homo sapiens
catgcacaactagaa

SEQ ID NO: 77948 - DNA, 15 bp, Homo sapiens
gcatgcacaactaga

SEQ ID NO: 77949 - DNA, 15 bp, Homo sapiens
tgcatgcacaactag

SEQ ID NO: 77950 - DNA, 15 bp, Homo sapiens
ttgcatgcacaacta

SEQ ID NO: 77951 - DNA, 15 bp, Homo sapiens
tttgcatgcacaact

SEQ ID NO: 77952 - DNA, 15 bp, Homo sapiens
ctttgcatgcacaac

SEQ ID NO: 77953 - DNA, 15 bp, Homo sapiens
tctttgcatgcacaa

SEQ ID NO: 77954 - DNA, 15 bp, Homo sapiens
ctctttgcatgcaca

SEQ ID NO: 77955 - DNA, 15 bp, Homo sapiens
actctttgcatgcac

SEQ ID NO: 77956 - DNA, 15 bp, Homo sapiens
tactctttgcatgca

SEQ ID NO: 77957 - DNA, 15 bp, Homo sapiens
gtactctttgcatgc

SEQ ID NO: 77958 - DNA, 15 bp, Homo sapiens
tgtactctttgcatg

SEQ ID NO: 77959 - DNA, 15 bp, Homo sapiens
ttgtactctttgcat

SEQ ID NO: 77960 - DNA, 15 bp, Homo sapiens
tttgtactctttgca

SEQ ID NO: 77961 - DNA, 15 bp, Homo sapiens
ctttgtactctttgc

SEQ ID NO: 77962 - DNA, 15 bp, Homo sapiens
actttgtactctttg

SEQ ID NO: 77963 - DNA, 15 bp, Homo sapiens
aactttgtactcttt

SEQ ID NO: 77964 - DNA, 15 bp, Homo sapiens
aaactttgtactctt

SEQ ID NO: 77965 - DNA, 15 bp, Homo sapiens
aaaactttgtactct

SEQ ID NO: 77966 - DNA, 15 bp, Homo sapiens
gaaaactttgtactc

SEQ ID NO: 77967 - DNA, 15 bp, Homo sapiens
agaaaactttgtact

SEQ ID NO: 77968 - DNA, 15 bp, Homo sapiens
aagaaaactttgtac

SEQ ID NO: 77969 - DNA, 15 bp, Homo sapiens
caagaaaactttgta

SEQ ID NO: 77970 - DNA, 15 bp, Homo sapiens
gcaagaaaactttgt

SEQ ID NO: 77971 - DNA, 15 bp, Homo sapiens
ggcaagaaaactttg

SEQ ID NO: 77972 - DNA, 15 bp, Homo sapiens
gggcaagaaaacttt

SEQ ID NO: 77973 - DNA, 15 bp, Homo sapiens
agggcaagaaaactt

SEQ ID NO: 77974 - DNA, 15 bp, Homo sapiens
aagggcaagaaaact

SEQ ID NO: 77975 - DNA, 15 bp, Homo sapiens
aaagggcaagaaaac

SEQ ID NO: 77976 - DNA, 15 bp, Homo sapiens
gaaagggcaagaaaa

SEQ ID NO: 77977 - DNA, 15 bp, Homo sapiens
agaaagggcaagaaa

SEQ ID NO: 77978 - DNA, 15 bp, Homo sapiens
aagaaagggcaagaa

SEQ ID NO: 77979 - DNA, 15 bp, Homo sapiens
caagaaagggcaaga

SEQ ID NO: 77980 - DNA, 15 bp, Homo sapiens
ccaagaaagggcaag

SEQ ID NO: 77981 - DNA, 15 bp, Homo sapiens
tccaagaaagggcaa

SEQ ID NO: 77982 - DNA, 15 bp, Homo sapiens
ttccaagaaagggca

SEQ ID NO: 77983 - DNA, 15 bp, Homo sapiens
tttccaagaaagggc

SEQ ID NO: 77984 - DNA, 15 bp, Homo sapiens
ttttccaagaaaggg

SEQ ID NO: 77985 - DNA, 15 bp, Homo sapiens
attttccaagaaagg

SEQ ID NO: 77986 - DNA, 15 bp, Homo sapiens
gattttccaagaaag

SEQ ID NO: 77987 - DNA, 15 bp, Homo sapiens
ggattttccaagaaa

SEQ ID NO: 77988 - DNA, 15 bp, Homo sapiens
aggattttccaagaa

SEQ ID NO: 77989 - DNA, 15 bp, Homo sapiens
caggattttccaaga

SEQ ID NO: 77990 - DNA, 15 bp, Homo sapiens
gcaggattttccaag

SEQ ID NO: 77991 - DNA, 15 bp, Homo sapiens
agcaggattttccaa

SEQ ID NO: 77992 - DNA, 15 bp, Homo sapiens
aagcaggattttcca

SEQ ID NO: 77993 - DNA, 15 bp, Homo sapiens
caagcaggattttcc

SEQ ID NO: 77994 - DNA, 15 bp, Homo sapiens
acaagcaggattttc

SEQ ID NO: 77995 - DNA, 15 bp, Homo sapiens
gacaagcaggatttt

SEQ ID NO: 77996 - DNA, 15 bp, Homo sapiens
agacaagcaggattt

SEQ ID NO: 77997 - DNA, 15 bp, Homo sapiens
cagacaagcaggatt

SEQ ID NO: 77998 - DNA, 15 bp, Homo sapiens
acagacaagcaggat

SEQ ID NO: 77999 - DNA, 15 bp, Homo sapiens
cacagacaagcagga

SEQ ID NO: 78000 - DNA, 15 bp, Homo sapiens
gcacagacaagcagg

SEQ ID NO: 78001 - DNA, 15 bp, Homo sapiens
ggcacagacaagcag

SEQ ID NO: 78002 - DNA, 15 bp, Homo sapiens
tggcacagacaagca

SEQ ID NO: 78003 - DNA, 15 bp, Homo sapiens
ttggcacagacaagc

SEQ ID NO: 78004 - DNA, 15 bp, Homo sapiens
tttggcacagacaag

SEQ ID NO: 78005 - DNA, 15 bp, Homo sapiens
ctttggcacagacaa

SEQ ID NO: 78006 - DNA, 15 bp, Homo sapiens
cctttggcacagaca

SEQ ID NO: 78007 - DNA, 15 bp, Homo sapiens
ccctttggcacagac

SEQ ID NO: 78008 - DNA, 15 bp, Homo sapiens
tccctttggcacaga

SEQ ID NO: 78009 - DNA, 15 bp, Homo sapiens
atccctttggcacag

SEQ ID NO: 78010 - DNA, 15 bp, Homo sapiens
tatccctttggcaca

SEQ ID NO: 78011 - DNA, 15 bp, Homo sapiens
ttatccctttggcac

SEQ ID NO: 78012 - DNA, 15 bp, Homo sapiens
attatccctttggca

SEQ ID NO: 78013 - DNA, 15 bp, Homo sapiens
aattatccctttggc

SEQ ID NO: 78014 - DNA, 15 bp, Homo sapiens
caattatccctttgg

SEQ ID NO: 78015 - DNA, 15 bp, Homo sapiens
acaattatccctttg

SEQ ID NO: 78016 - DNA, 15 bp, Homo sapiens
cacaattatcccttt

SEQ ID NO: 78017 - DNA, 15 bp, Homo sapiens
tcacaattatccctt

SEQ ID NO: 78018 - DNA, 15 bp, Homo sapiens
ttcacaattatccct

SEQ ID NO: 78019 - DNA, 15 bp, Homo sapiens
tttcacaattatccc

SEQ ID NO: 78020 - DNA, 15 bp, Homo sapiens
ctttcacaattatcc

SEQ ID NO: 78021 - DNA, 15 bp, Homo sapiens
gctttcacaattatc

SEQ ID NO: 78022 - DNA, 15 bp, Homo sapiens
tgctttcacaattat

SEQ ID NO: 78023 - DNA, 15 bp, Homo sapiens
gtgctttcacaatta

SEQ ID NO: 78024 - DNA, 15 bp, Homo sapiens
agtgctttcacaatt

SEQ ID NO: 78025 - DNA, 15 bp, Homo sapiens
aagtgctttcacaat

SEQ ID NO: 78026 - DNA, 15 bp, Homo sapiens
aaagtgctttcacaa

SEQ ID NO: 78027 - DNA, 15 bp, Homo sapiens
aaaagtgctttcaca

SEQ ID NO: 78028 - DNA, 15 bp, Homo sapiens
caaaagtgctttcac

SEQ ID NO: 78029 - DNA, 15 bp, Homo sapiens
tcaaaagtgctttca

SEQ ID NO: 78030 - DNA, 15 bp, Homo sapiens
ttcaaaagtgctttc

SEQ ID NO: 78031 - DNA, 15 bp, Homo sapiens
tttcaaaagtgcttt

SEQ ID NO: 78032 - DNA, 15 bp, Homo sapiens
atttcaaaagtgctt

SEQ ID NO: 78033 - DNA, 15 bp, Homo sapiens
tatttcaaaagtgct

SEQ ID NO: 78034 - DNA, 15 bp, Homo sapiens
gtatttcaaaagtgc

SEQ ID NO: 78035 - DNA, 15 bp, Homo sapiens
agtatttcaaaagtg

SEQ ID NO: 78036 - DNA, 15 bp, Homo sapiens
aagtatttcaaaagt

SEQ ID NO: 78037 - DNA, 15 bp, Homo sapiens
taagtatttcaaaag

SEQ ID NO: 78038 - DNA, 15 bp, Homo sapiens
ttaagtatttcaaaa

SEQ ID NO: 78039 - DNA, 15 bp, Homo sapiens
attaagtatttcaaa

SEQ ID NO: 78040 - DNA, 15 bp, Homo sapiens
cattaagtatttcaa

SEQ ID NO: 78041 - DNA, 15 bp, Homo sapiens
tcattaagtatttca

SEQ ID NO: 78042 - DNA, 15 bp, Homo sapiens
ctcattaagtatttc

SEQ ID NO: 78043 - DNA, 15 bp, Homo sapiens
actcattaagtattt

SEQ ID NO: 78044 - DNA, 15 bp, Homo sapiens
aactcattaagtatt

SEQ ID NO: 78045 - DNA, 15 bp, Homo sapiens
caactcattaagtat

SEQ ID NO: 78046 - DNA, 15 bp, Homo sapiens
tcaactcattaagta

SEQ ID NO: 78047 - DNA, 15 bp, Homo sapiens
atcaactcattaagt

SEQ ID NO: 78048 - DNA, 15 bp, Homo sapiens
aatcaactcattaag

SEQ ID NO: 78049 - DNA, 15 bp, Homo sapiens
aaatcaactcattaa

SEQ ID NO: 78050 - DNA, 15 bp, Homo sapiens
aaaatcaactcatta

SEQ ID NO: 78051 - DNA, 15 bp, Homo sapiens
gaaaatcaactcatt

SEQ ID NO: 78052 - DNA, 15 bp, Homo sapiens
agaaaatcaactcat

SEQ ID NO: 78053 - DNA, 15 bp, Homo sapiens
aagaaaatcaactca

SEQ ID NO: 78054 - DNA, 15 bp, Homo sapiens
gaagaaaatcaactc

SEQ ID NO: 78055 - DNA, 15 bp, Homo sapiens
tgaagaaaatcaact

SEQ ID NO: 78056 - DNA, 15 bp, Homo sapiens
ttgaagaaaatcaac

SEQ ID NO: 78057 - DNA, 15 bp, Homo sapiens
tttgaagaaaatcaa

SEQ ID NO: 78058 - DNA, 15 bp, Homo sapiens
atttgaagaaaatca

SEQ ID NO: 78059 - DNA, 15 bp, Homo sapiens
aatttgaagaaaatc

SEQ ID NO: 78060 - DNA, 15 bp, Homo sapiens
taatttgaagaaaat

SEQ ID NO: 78061 - DNA, 15 bp, Homo sapiens
ttaatttgaagaaaa

SEQ ID NO: 78062 - DNA, 15 bp, Homo sapiens
tttaatttgaagaaa

SEQ ID NO: 78063 - DNA, 15 bp, Homo sapiens
ttttaatttgaagaa

SEQ ID NO: 78064 - DNA, 15 bp, Homo sapiens
tttttaatttgaaga

SEQ ID NO: 78065 - DNA, 15 bp, Homo sapiens
ttttttaatttgaag

SEQ ID NO: 78066 - DNA, 15 bp, Homo sapiens
tttttttaatttgaa

SEQ ID NO: 78067 - DNA, 15 bp, Homo sapiens
ttttttttaatttga

SEQ ID NO: 78068 - DNA, 15 bp, Homo sapiens
attttttttaatttg

SEQ ID NO: 78069 - DNA, 15 bp, Homo sapiens
tattttttttaattt

SEQ ID NO: 78070 - DNA, 15 bp, Homo sapiens
atattttttttaatt

SEQ ID NO: 78071 - DNA, 15 bp, Homo sapiens
tatattttttttaat

SEQ ID NO: 78072 - DNA, 15 bp, Homo sapiens
atatattttttttaa

SEQ ID NO: 78073 - DNA, 15 bp, Homo sapiens
tatatatttttttta

SEQ ID NO: 78074 - DNA, 15 bp, Homo sapiens
ttatatatttttttt

SEQ ID NO: 78075 - DNA, 15 bp, Homo sapiens
tttatatattttttt

SEQ ID NO: 78076 - DNA, 15 bp, Homo sapiens
atttatatatttttt

SEQ ID NO: 78077 - DNA, 15 bp, Homo sapiens
catttatatattttt

SEQ ID NO: 78078 - DNA, 15 bp, Homo sapiens
acatttatatatttt

SEQ ID NO: 78079 - DNA, 15 bp, Homo sapiens
tacatttatatattt

SEQ ID NO: 78080 - DNA, 15 bp, Homo sapiens
atacatttatatatt

SEQ ID NO: 78081 - DNA, 15 bp, Homo sapiens
tatacatttatatat

SEQ ID NO: 78082 - DNA, 15 bp, Homo sapiens
atatacatttatata

SEQ ID NO: 78083 - DNA, 15 bp, Homo sapiens
catatacatttatat

SEQ ID NO: 78084 - DNA, 15 bp, Homo sapiens
acatatacatttata

SEQ ID NO: 78085 - DNA, 15 bp, Homo sapiens
cacatatacatttat

SEQ ID NO: 78086 - DNA, 15 bp, Homo sapiens
acacatatacattta

SEQ ID NO: 78087 - DNA, 15 bp, Homo sapiens
tacacatatacattt

SEQ ID NO: 78088 - DNA, 15 bp, Homo sapiens
atacacatatacatt

SEQ ID NO: 78089 - DNA, 15 bp, Homo sapiens
catacacatatacat

SEQ ID NO: 78090 - DNA, 15 bp, Homo sapiens
acatacacatataca

SEQ ID NO: 78091 - DNA, 15 bp, Homo sapiens
tacatacacatatac

SEQ ID NO: 78092 - DNA, 15 bp, Homo sapiens
gtacatacacatata

SEQ ID NO: 78093 - DNA, 15 bp, Homo sapiens
tgtacatacacatat

SEQ ID NO: 78094 - DNA, 15 bp, Homo sapiens
atgtacatacacata

SEQ ID NO: 78095 - DNA, 15 bp, Homo sapiens
catgtacatacacat

SEQ ID NO: 78096 - DNA, 15 bp, Homo sapiens
acatgtacatacaca

SEQ ID NO: 78097 - DNA, 15 bp, Homo sapiens
cacatgtacatacac

SEQ ID NO: 78098 - DNA, 15 bp, Homo sapiens
acacatgtacataca

SEQ ID NO: 78099 - DNA, 15 bp, Homo sapiens
cacacatgtacatac

SEQ ID NO: 78100 - DNA, 15 bp, Homo sapiens
acacacatgtacata

SEQ ID NO: 78101 - DNA, 15 bp, Homo sapiens
tacacacatgtacat

SEQ ID NO: 78102 - DNA, 15 bp, Homo sapiens
gtacacacatgtaca

SEQ ID NO: 78103 - DNA, 15 bp, Homo sapiens
tgtacacacatgtac

SEQ ID NO: 78104 - DNA, 15 bp, Homo sapiens
gtgtacacacatgta

SEQ ID NO: 78105 - DNA, 15 bp, Homo sapiens
tgtgtacacacatgt

SEQ ID NO: 78106 - DNA, 15 bp, Homo sapiens
atgtgtacacacatg

SEQ ID NO: 78107 - DNA, 15 bp, Homo sapiens
tatgtgtacacacat

SEQ ID NO: 78108 - DNA, 15 bp, Homo sapiens
gtatgtgtacacaca

SEQ ID NO: 78109 - DNA, 15 bp, Homo sapiens
tgtatgtgtacacac

SEQ ID NO: 78110 - DNA, 15 bp, Homo sapiens
gtgtatgtgtacaca

SEQ ID NO: 78111 - DNA, 15 bp, Homo sapiens
tgtgtatgtgtacac

SEQ ID NO: 78112 - DNA, 15 bp, Homo sapiens
gtgtgtatgtgtaca

SEQ ID NO: 78113 - DNA, 15 bp, Homo sapiens
ggtgtgtatgtgtac

SEQ ID NO: 78114 - DNA, 15 bp, Homo sapiens
aggtgtgtatgtgta

SEQ ID NO: 78115 - DNA, 15 bp, Homo sapiens
aaggtgtgtatgtgt

SEQ ID NO: 78116 - DNA, 15 bp, Homo sapiens
aaaggtgtgtatgtg

SEQ ID NO: 78117 - DNA, 15 bp, Homo sapiens
taaaggtgtgtatgt

SEQ ID NO: 78118 - DNA, 15 bp, Homo sapiens
ataaaggtgtgtatg

SEQ ID NO: 78119 - DNA, 15 bp, Homo sapiens
tataaaggtgtgtat

SEQ ID NO: 78120 - DNA, 15 bp, Homo sapiens
gtataaaggtgtgta

SEQ ID NO: 78121 - DNA, 15 bp, Homo sapiens
tgtataaaggtgtgt

SEQ ID NO: 78122 - DNA, 15 bp, Homo sapiens
atgtataaaggtgtg

SEQ ID NO: 78123 - DNA, 15 bp, Homo sapiens
tatgtataaaggtgt

SEQ ID NO: 78124 - DNA, 15 bp, Homo sapiens
gtatgtataaaggtg

SEQ ID NO: 78125 - DNA, 15 bp, Homo sapiens
tgtatgtataaaggt

SEQ ID NO: 78126 - DNA, 15 bp, Homo sapiens
ctgtatgtataaagg

SEQ ID NO: 78127 - DNA, 15 bp, Homo sapiens
gctgtatgtataaag

SEQ ID NO: 78128 - DNA, 15 bp, Homo sapiens
ggctgtatgtataaa

SEQ ID NO: 78129 - DNA, 15 bp, Homo sapiens
gggctgtatgtataa

SEQ ID NO: 78130 - DNA, 15 bp, Homo sapiens
tgggctgtatgtata

SEQ ID NO: 78131 - DNA, 15 bp, Homo sapiens
atgggctgtatgtat

SEQ ID NO: 78132 - DNA, 15 bp, Homo sapiens
aatgggctgtatgta

SEQ ID NO: 78133 - DNA, 15 bp, Homo sapiens
aaatgggctgtatgt

SEQ ID NO: 78134 - DNA, 15 bp, Homo sapiens
taaatgggctgtatg

SEQ ID NO: 78135 - DNA, 15 bp, Homo sapiens
ttaaatgggctgtat

SEQ ID NO: 78136 - DNA, 15 bp, Homo sapiens
tttaaatgggctgta

SEQ ID NO: 78137 - DNA, 15 bp, Homo sapiens
ttttaaatgggctgt

SEQ ID NO: 78138 - DNA, 15 bp, Homo sapiens
gttttaaatgggctg

SEQ ID NO: 78139 - DNA, 15 bp, Homo sapiens
tgttttaaatgggct

SEQ ID NO: 78140 - DNA, 15 bp, Homo sapiens
ttgttttaaatgggc

SEQ ID NO: 78141 - DNA, 15 bp, Homo sapiens
cttgttttaaatggg

SEQ ID NO: 78142 - DNA, 15 bp, Homo sapiens
gcttgttttaaatgg

SEQ ID NO: 78143 - DNA, 15 bp, Homo sapiens
agcttgttttaaatg

SEQ ID NO: 78144 - DNA, 15 bp, Homo sapiens
gagcttgttttaaat

SEQ ID NO: 78145 - DNA, 15 bp, Homo sapiens
ggagcttgttttaaa

SEQ ID NO: 78146 - DNA, 15 bp, Homo sapiens
tggagcttgttttaa

SEQ ID NO: 78147 - DNA, 15 bp, Homo sapiens
gtggagcttgtttta

SEQ ID NO: 78148 - DNA, 15 bp, Homo sapiens
agtggagcttgtttt

SEQ ID NO: 78149 - DNA, 15 bp, Homo sapiens
aagtggagcttgttt

SEQ ID NO: 78150 - DNA, 15 bp, Homo sapiens
aaagtggagcttgtt

SEQ ID NO: 78151 - DNA, 15 bp, Homo sapiens
caaagtggagcttgt

SEQ ID NO: 78152 - DNA, 15 bp, Homo sapiens
ccaaagtggagcttg

SEQ ID NO: 78153 - DNA, 15 bp, Homo sapiens
tccaaagtggagctt

SEQ ID NO: 78154 - DNA, 15 bp, Homo sapiens
ctccaaagtggagct

SEQ ID NO: 78155 - DNA, 15 bp, Homo sapiens
actccaaagtggagc

SEQ ID NO: 78156 - DNA, 15 bp, Homo sapiens
cactccaaagtggag

SEQ ID NO: 78157 - DNA, 15 bp, Homo sapiens
gcactccaaagtgga

SEQ ID NO: 78158 - DNA, 15 bp, Homo sapiens
agcactccaaagtgg

SEQ ID NO: 78159 - DNA, 15 bp, Homo sapiens
gagcactccaaagtg

SEQ ID NO: 78160 - DNA, 15 bp, Homo sapiens
agagcactccaaagt

SEQ ID NO: 78161 - DNA, 15 bp, Homo sapiens
tagagcactccaaag

SEQ ID NO: 78162 - DNA, 15 bp, Homo sapiens
gtagagcactccaaa

SEQ ID NO: 78163 - DNA, 15 bp, Homo sapiens
cgtagagcactccaa

SEQ ID NO: 78164 - DNA, 15 bp, Homo sapiens
acgtagagcactcca

SEQ ID NO: 78165 - DNA, 15 bp, Homo sapiens
gacgtagagcactcc

SEQ ID NO: 78166 - DNA, 15 bp, Homo sapiens
tgacgtagagcactc

SEQ ID NO: 78167 - DNA, 15 bp, Homo sapiens
gtgacgtagagcact

SEQ ID NO: 78168 - DNA, 15 bp, Homo sapiens
ggtgacgtagagcac

SEQ ID NO: 78169 - DNA, 15 bp, Homo sapiens
gggtgacgtagagca

SEQ ID NO: 78170 - DNA, 15 bp, Homo sapiens
agggtgacgtagagc

SEQ ID NO: 78171 - DNA, 15 bp, Homo sapiens
cagggtgacgtagag

SEQ ID NO: 78172 - DNA, 15 bp, Homo sapiens
tcagggtgacgtaga

SEQ ID NO: 78173 - DNA, 15 bp, Homo sapiens
atcagggtgacgtag

SEQ ID NO: 78174 - DNA, 15 bp, Homo sapiens
catcagggtgacgta

SEQ ID NO: 78175 - DNA, 15 bp, Homo sapiens
gcatcagggtgacgt

SEQ ID NO: 78176 - DNA, 15 bp, Homo sapiens
ggcatcagggtgacg

SEQ ID NO: 78177 - DNA, 15 bp, Homo sapiens
cggcatcagggtgac

SEQ ID NO: 78178 - DNA, 15 bp, Homo sapiens
tcggcatcagggtga

SEQ ID NO: 78179 - DNA, 15 bp, Homo sapiens
ttcggcatcagggtg

SEQ ID NO: 78180 - DNA, 15 bp, Homo sapiens
attcggcatcagggt

SEQ ID NO: 78181 - DNA, 15 bp, Homo sapiens
tattcggcatcaggg

SEQ ID NO: 78182 - DNA, 15 bp, Homo sapiens
gtattcggcatcagg

SEQ ID NO: 78183 - DNA, 15 bp, Homo sapiens
tgtattcggcatcag

SEQ ID NO: 78184 - DNA, 15 bp, Homo sapiens
ctgtattcggcatca

SEQ ID NO: 78185 - DNA, 15 bp, Homo sapiens
cctgtattcggcatc

SEQ ID NO: 78186 - DNA, 15 bp, Homo sapiens
ccctgtattcggcat

SEQ ID NO: 78187 - DNA, 15 bp, Homo sapiens
gccctgtattcggca

SEQ ID NO: 78188 - DNA, 15 bp, Homo sapiens
ggccctgtattcggc

SEQ ID NO: 78189 - DNA, 15 bp, Homo sapiens
tggccctgtattcgg

SEQ ID NO: 78190 - DNA, 15 bp, Homo sapiens
ctggccctgtattcg

SEQ ID NO: 78191 - DNA, 15 bp, Homo sapiens
tctggccctgtattc

SEQ ID NO: 78192 - DNA, 15 bp, Homo sapiens
ctctggccctgtatt

SEQ ID NO: 78193 - DNA, 15 bp, Homo sapiens
actctggccctgtat

SEQ ID NO: 78194 - DNA, 15 bp, Homo sapiens
gactctggccctgta

SEQ ID NO: 78195 - DNA, 15 bp, Homo sapiens
agactctggccctgt

SEQ ID NO: 78196 - DNA, 15 bp, Homo sapiens
cagactctggccctg

SEQ ID NO: 78197 - DNA, 15 bp, Homo sapiens
tcagactctggccct

SEQ ID NO: 78198 - DNA, 15 bp, Homo sapiens
ctcagactctggccc

SEQ ID NO: 78199 - DNA, 15 bp, Homo sapiens
tctcagactctggcc

SEQ ID NO: 78200 - DNA, 15 bp, Homo sapiens
atctcagactctggc

SEQ ID NO: 78201 - DNA, 15 bp, Homo sapiens
gatctcagactctgg

SEQ ID NO: 78202 - DNA, 15 bp, Homo sapiens
ggatctcagactctg

SEQ ID NO: 78203 - DNA, 15 bp, Homo sapiens
aggatctcagactct

SEQ ID NO: 78204 - DNA, 15 bp, Homo sapiens
aaggatctcagactc

SEQ ID NO: 78205 - DNA, 15 bp, Homo sapiens
gaaggatctcagact

SEQ ID NO: 78206 - DNA, 15 bp, Homo sapiens
agaaggatctcagac

SEQ ID NO: 78207 - DNA, 15 bp, Homo sapiens
cagaaggatctcaga

SEQ ID NO: 78208 - DNA, 15 bp, Homo sapiens
ccagaaggatctcag

SEQ ID NO: 78209 - DNA, 15 bp, Homo sapiens
cccagaaggatctca

SEQ ID NO: 78210 - DNA, 15 bp, Homo sapiens
acccagaaggatctc

SEQ ID NO: 78211 - DNA, 15 bp, Homo sapiens
cacccagaaggatct

SEQ ID NO: 78212 - DNA, 15 bp, Homo sapiens
ccacccagaaggatc

SEQ ID NO: 78213 - DNA, 15 bp, Homo sapiens
accacccagaaggat

SEQ ID NO: 78214 - DNA, 15 bp, Homo sapiens
aaccacccagaagga

SEQ ID NO: 78215 - DNA, 15 bp, Homo sapiens
aaaccacccagaagg

SEQ ID NO: 78216 - DNA, 15 bp, Homo sapiens
gaaaccacccagaag

SEQ ID NO: 78217 - DNA, 15 bp, Homo sapiens
agaaaccacccagaa

SEQ ID NO: 78218 - DNA, 15 bp, Homo sapiens
cagaaaccacccaga

SEQ ID NO: 78219 - DNA, 15 bp, Homo sapiens
acagaaaccacccag

SEQ ID NO: 78220 - DNA, 15 bp, Homo sapiens
cacagaaaccaccca

SEQ ID NO: 78221 - DNA, 15 bp, Homo sapiens
acacagaaaccaccc

SEQ ID NO: 78222 - DNA, 15 bp, Homo sapiens
aacacagaaaccacc

SEQ ID NO: 78223 - DNA, 15 bp, Homo sapiens
aaacacagaaaccac

SEQ ID NO: 78224 - DNA, 15 bp, Homo sapiens
aaaacacagaaacca

SEQ ID NO: 78225 - DNA, 15 bp, Homo sapiens
caaaacacagaaacc

SEQ ID NO: 78226 - DNA, 15 bp, Homo sapiens
acaaaacacagaaac

SEQ ID NO: 78227 - DNA, 15 bp, Homo sapiens
aacaaaacacagaaa

SEQ ID NO: 78228 - DNA, 15 bp, Homo sapiens
gaacaaaacacagaa

SEQ ID NO: 78229 - DNA, 15 bp, Homo sapiens
tgaacaaaacacaga

SEQ ID NO: 78230 - DNA, 15 bp, Homo sapiens
atgaacaaaacacag

SEQ ID NO: 78231 - DNA, 15 bp, Homo sapiens
aatgaacaaaacaca

SEQ ID NO: 78232 - DNA, 15 bp, Homo sapiens
aaatgaacaaaacac

SEQ ID NO: 78233 - DNA, 15 bp, Homo sapiens
gaaatgaacaaaaca

SEQ ID NO: 78234 - DNA, 15 bp, Homo sapiens
agaaatgaacaaaac

SEQ ID NO: 78235 - DNA, 15 bp, Homo sapiens
cagaaatgaacaaaa

SEQ ID NO: 78236 - DNA, 15 bp, Homo sapiens
acagaaatgaacaaa

SEQ ID NO: 78237 - DNA, 15 bp, Homo sapiens
aacagaaatgaacaa

SEQ ID NO: 78238 - DNA, 15 bp, Homo sapiens
aaacagaaatgaaca

SEQ ID NO: 78239 - DNA, 15 bp, Homo sapiens
aaaacagaaatgaac

SEQ ID NO: 78240 - DNA, 15 bp, Homo sapiens
taaaacagaaatgaa

SEQ ID NO: 78241 - DNA, 15 bp, Homo sapiens
ttaaaacagaaatga

SEQ ID NO: 78242 - DNA, 15 bp, Homo sapiens
cttaaaacagaaatg

SEQ ID NO: 78243 - DNA, 15 bp, Homo sapiens
tcttaaaacagaaat

SEQ ID NO: 78244 - DNA, 15 bp, Homo sapiens
ctcttaaaacagaaa

SEQ ID NO: 78245 - DNA, 15 bp, Homo sapiens
gctcttaaaacagaa

SEQ ID NO: 78246 - DNA, 15 bp, Homo sapiens
ggctcttaaaacaga

SEQ ID NO: 78247 - DNA, 15 bp, Homo sapiens
aggctcttaaaacag

SEQ ID NO: 78248 - DNA, 15 bp, Homo sapiens
caggctcttaaaaca

SEQ ID NO: 78249 - DNA, 15 bp, Homo sapiens
acaggctcttaaaac

SEQ ID NO: 78250 - DNA, 15 bp, Homo sapiens
gacaggctcttaaaa

SEQ ID NO: 78251 - DNA, 15 bp, Homo sapiens
tgacaggctcttaaa

SEQ ID NO: 78252 - DNA, 15 bp, Homo sapiens
gtgacaggctcttaa

SEQ ID NO: 78253 - DNA, 15 bp, Homo sapiens
tgtgacaggctctta

SEQ ID NO: 78254 - DNA, 15 bp, Homo sapiens
ctgtgacaggctctt

SEQ ID NO: 78255 - DNA, 15 bp, Homo sapiens
tctgtgacaggctct

SEQ ID NO: 78256 - DNA, 15 bp, Homo sapiens
ctctgtgacaggctc

SEQ ID NO: 78257 - DNA, 15 bp, Homo sapiens
tctctgtgacaggct

SEQ ID NO: 78258 - DNA, 15 bp, Homo sapiens
ttctctgtgacaggc

SEQ ID NO: 78259 - DNA, 15 bp, Homo sapiens
tttctctgtgacagg

SEQ ID NO: 78260 - DNA, 15 bp, Homo sapiens
atttctctgtgacag

SEQ ID NO: 78261 - DNA, 15 bp, Homo sapiens
catttctctgtgaca

SEQ ID NO: 78262 - DNA, 15 bp, Homo sapiens
gcatttctctgtgac

SEQ ID NO: 78263 - DNA, 15 bp, Homo sapiens
agcatttctctgtga

SEQ ID NO: 78264 - DNA, 15 bp, Homo sapiens
aagcatttctctgtg

SEQ ID NO: 78265 - DNA, 15 bp, Homo sapiens
gaagcatttctctgt

SEQ ID NO: 78266 - DNA, 15 bp, Homo sapiens
ggaagcatttctctg

SEQ ID NO: 78267 - DNA, 15 bp, Homo sapiens
aggaagcatttctct

SEQ ID NO: 78268 - DNA, 15 bp, Homo sapiens
taggaagcatttctc

SEQ ID NO: 78269 - DNA, 15 bp, Homo sapiens
ttaggaagcatttct

SEQ ID NO: 78270 - DNA, 15 bp, Homo sapiens
tttaggaagcatttc

SEQ ID NO: 78271 - DNA, 15 bp, Homo sapiens
ttttaggaagcattt

SEQ ID NO: 78272 - DNA, 15 bp, Homo sapiens
attttaggaagcatt

SEQ ID NO: 78273 - DNA, 15 bp, Homo sapiens
cattttaggaagcat

SEQ ID NO: 78274 - DNA, 15 bp, Homo sapiens
acattttaggaagca

SEQ ID NO: 78275 - DNA, 15 bp, Homo sapiens
aacattttaggaagc

SEQ ID NO: 78276 - DNA, 15 bp, Homo sapiens
aaacattttaggaag

SEQ ID NO: 78277 - DNA, 15 bp, Homo sapiens
taaacattttaggaa

SEQ ID NO: 78278 - DNA, 15 bp, Homo sapiens
ttaaacattttagga

SEQ ID NO: 78279 - DNA, 15 bp, Homo sapiens
attaaacattttagg

SEQ ID NO: 78280 - DNA, 15 bp, Homo sapiens
aattaaacattttag

SEQ ID NO: 78281 - DNA, 15 bp, Homo sapiens
aaattaaacatttta

SEQ ID NO: 78282 - DNA, 15 bp, Homo sapiens
taaattaaacatttt

SEQ ID NO: 78283 - DNA, 15 bp, Homo sapiens
ataaattaaacattt

SEQ ID NO: 78284 - DNA, 15 bp, Homo sapiens
tataaattaaacatt

SEQ ID NO: 78285 - DNA, 15 bp, Homo sapiens
ttataaattaaacat

SEQ ID NO: 78286 - DNA, 15 bp, Homo sapiens
tttataaattaaaca

SEQ ID NO: 78287 - DNA, 15 bp, Homo sapiens
ttttataaattaaac

SEQ ID NO: 78288 - DNA, 15 bp, Homo sapiens
tttttataaattaaa

SEQ ID NO: 78289 - DNA, 15 bp, Homo sapiens
gtttttataaattaa

SEQ ID NO: 78290 - DNA, 15 bp, Homo sapiens
tgtttttataaatta

SEQ ID NO: 78291 - DNA, 15 bp, Homo sapiens
atgtttttataaatt

SEQ ID NO: 78292 - DNA, 15 bp, Homo sapiens
aatgtttttataaat

SEQ ID NO: 78293 - DNA, 15 bp, Homo sapiens
aaatgtttttataaa

SEQ ID NO: 78294 - DNA, 15 bp, Homo sapiens
aaaatgtttttataa

SEQ ID NO: 78295 - DNA, 15 bp, Homo sapiens
aaaaatgtttttata

SEQ ID NO: 78296 - DNA, 15 bp, Homo sapiens
taaaaatgtttttat

SEQ ID NO: 78297 - DNA, 15 bp, Homo sapiens
ataaaaatgttttta

SEQ ID NO: 78298 - DNA, 15 bp, Homo sapiens
gataaaaatgttttt

SEQ ID NO: 78299 - DNA, 15 bp, Homo sapiens
agataaaaatgtttt

SEQ ID NO: 78300 - DNA, 15 bp, Homo sapiens
gagataaaaatgttt

SEQ ID NO: 78301 - DNA, 15 bp, Homo sapiens
agagataaaaatgtt

SEQ ID NO: 78302 - DNA, 15 bp, Homo sapiens
gagagataaaaatgt

SEQ ID NO: 78303 - DNA, 15 bp, Homo sapiens
cgagagataaaaatg

SEQ ID NO: 78304 - DNA, 15 bp, Homo sapiens
tcgagagataaaaat

SEQ ID NO: 78305 - DNA, 15 bp, Homo sapiens
atcgagagataaaaa

SEQ ID NO: 78306 - DNA, 15 bp, Homo sapiens
aatcgagagataaaa

SEQ ID NO: 78307 - DNA, 15 bp, Homo sapiens
taatcgagagataaa

SEQ ID NO: 78308 - DNA, 15 bp, Homo sapiens
gtaatcgagagataa

SEQ ID NO: 78309 - DNA, 15 bp, Homo sapiens
agtaatcgagagata

SEQ ID NO: 78310 - DNA, 15 bp, Homo sapiens
cagtaatcgagagat

SEQ ID NO: 78311 - DNA, 15 bp, Homo sapiens
ccagtaatcgagaga

SEQ ID NO: 78312 - DNA, 15 bp, Homo sapiens
accagtaatcgagag

SEQ ID NO: 78313 - DNA, 15 bp, Homo sapiens
aaccagtaatcgaga

SEQ ID NO: 78314 - DNA, 15 bp, Homo sapiens
aaaccagtaatcgag

SEQ ID NO: 78315 - DNA, 15 bp, Homo sapiens
aaaaccagtaatcga

SEQ ID NO: 78316 - DNA, 15 bp, Homo sapiens
taaaaccagtaatcg

SEQ ID NO: 78317 - DNA, 15 bp, Homo sapiens
ttaaaaccagtaatc

SEQ ID NO: 78318 - DNA, 15 bp, Homo sapiens
attaaaaccagtaat

SEQ ID NO: 78319 - DNA, 15 bp, Homo sapiens
cattaaaaccagtaa

SEQ ID NO: 78320 - DNA, 15 bp, Homo sapiens
tcattaaaaccagta

SEQ ID NO: 78321 - DNA, 15 bp, Homo sapiens
ttcattaaaaccagt

SEQ ID NO: 78322 - DNA, 15 bp, Homo sapiens
attcattaaaaccag

SEQ ID NO: 78323 - DNA, 15 bp, Homo sapiens
aattcattaaaacca

SEQ ID NO: 78324 - DNA, 15 bp, Homo sapiens
taattcattaaaacc

SEQ ID NO: 78325 - DNA, 15 bp, Homo sapiens
gtaattcattaaaac

SEQ ID NO: 78326 - DNA, 15 bp, Homo sapiens
agtaattcattaaaa

SEQ ID NO: 78327 - DNA, 15 bp, Homo sapiens
tagtaattcattaaa

SEQ ID NO: 78328 - DNA, 15 bp, Homo sapiens
ttagtaattcattaa

SEQ ID NO: 78329 - DNA, 15 bp, Homo sapiens
cttagtaattcatta

SEQ ID NO: 78330 - DNA, 15 bp, Homo sapiens
gcttagtaattcatt

SEQ ID NO: 78331 - DNA, 15 bp, Homo sapiens
agcttagtaattcat

SEQ ID NO: 78332 - DNA, 15 bp, Homo sapiens
cagcttagtaattca

SEQ ID NO: 78333 - DNA, 15 bp, Homo sapiens
ccagcttagtaattc

SEQ ID NO: 78334 - DNA, 15 bp, Homo sapiens
gccagcttagtaatt

SEQ ID NO: 78335 - DNA, 15 bp, Homo sapiens
agccagcttagtaat

SEQ ID NO: 78336 - DNA, 15 bp, Homo sapiens
cagccagcttagtaa

SEQ ID NO: 78337 - DNA, 15 bp, Homo sapiens
gcagccagcttagta

SEQ ID NO: 78338 - DNA, 15 bp, Homo sapiens
ggcagccagcttagt

SEQ ID NO: 78339 - DNA, 15 bp, Homo sapiens
aggcagccagcttag

SEQ ID NO: 78340 - DNA, 15 bp, Homo sapiens
gaggcagccagctta

SEQ ID NO: 78341 - DNA, 15 bp, Homo sapiens
agaggcagccagctt

SEQ ID NO: 78342 - DNA, 15 bp, Homo sapiens
gagaggcagccagct

SEQ ID NO: 78343 - DNA, 15 bp, Homo sapiens
tgagaggcagccagc

SEQ ID NO: 78344 - DNA, 15 bp, Homo sapiens
atgagaggcagccag

SEQ ID NO: 78345 - DNA, 15 bp, Homo sapiens
catgagaggcagcca

SEQ ID NO: 78346 - DNA, 15 bp, Homo sapiens
acatgagaggcagcc

SEQ ID NO: 78347 - DNA, 15 bp, Homo sapiens
tacatgagaggcagc

SEQ ID NO: 78348 - DNA, 15 bp, Homo sapiens
gtacatgagaggcag

SEQ ID NO: 78349 - DNA, 15 bp, Homo sapiens
ggtacatgagaggca

SEQ ID NO: 78350 - DNA, 15 bp, Homo sapiens
gggtacatgagaggc

SEQ ID NO: 78351 - DNA, 15 bp, Homo sapiens
tgggtacatgagagg

SEQ ID NO: 78352 - DNA, 15 bp, Homo sapiens
gtgggtacatgagag

SEQ ID NO: 78353 - DNA, 15 bp, Homo sapiens
tgtgggtacatgaga

SEQ ID NO: 78354 - DNA, 15 bp, Homo sapiens
ctgtgggtacatgag

SEQ ID NO: 78355 - DNA, 15 bp, Homo sapiens
gctgtgggtacatga

SEQ ID NO: 78356 - DNA, 15 bp, Homo sapiens
tgctgtgggtacatg

SEQ ID NO: 78357 - DNA, 15 bp, Homo sapiens
ttgctgtgggtacat

SEQ ID NO: 78358 - DNA, 15 bp, Homo sapiens
attgctgtgggtaca

SEQ ID NO: 78359 - DNA, 15 bp, Homo sapiens
cattgctgtgggtac

SEQ ID NO: 78360 - DNA, 15 bp, Homo sapiens
tcattgctgtgggta

SEQ ID NO: 78361 - DNA, 15 bp, Homo sapiens
atcattgctgtgggt

SEQ ID NO: 78362 - DNA, 15 bp, Homo sapiens
catcattgctgtggg

SEQ ID NO: 78363 - DNA, 15 bp, Homo sapiens
gcatcattgctgtgg

SEQ ID NO: 78364 - DNA, 15 bp, Homo sapiens
agcatcattgctgtg

SEQ ID NO: 78365 - DNA, 15 bp, Homo sapiens
gagcatcattgctgt

SEQ ID NO: 78366 - DNA, 15 bp, Homo sapiens
ggagcatcattgctg

SEQ ID NO: 78367 - DNA, 15 bp, Homo sapiens
aggagcatcattgct

SEQ ID NO: 78368 - DNA, 15 bp, Homo sapiens
caggagcatcattgc

SEQ ID NO: 78369 - DNA, 15 bp, Homo sapiens
tcaggagcatcattg

SEQ ID NO: 78370 - DNA, 15 bp, Homo sapiens
ctcaggagcatcatt

SEQ ID NO: 78371 - DNA, 15 bp, Homo sapiens
cctcaggagcatcat

SEQ ID NO: 78372 - DNA, 15 bp, Homo sapiens
tcctcaggagcatca

SEQ ID NO: 78373 - DNA, 15 bp, Homo sapiens
gtcctcaggagcatc

SEQ ID NO: 78374 - DNA, 15 bp, Homo sapiens
tgtcctcaggagcat

SEQ ID NO: 78375 - DNA, 15 bp, Homo sapiens
gtgtcctcaggagca

SEQ ID NO: 78376 - DNA, 15 bp, Homo sapiens
cgtgtcctcaggagc

SEQ ID NO: 78377 - DNA, 15 bp, Homo sapiens
ccgtgtcctcaggag

SEQ ID NO: 78378 - DNA, 15 bp, Homo sapiens
cccgtgtcctcagga

SEQ ID NO: 78379 - DNA, 15 bp, Homo sapiens
tcccgtgtcctcagg

SEQ ID NO: 78380 - DNA, 15 bp, Homo sapiens
ttcccgtgtcctcag

SEQ ID NO: 78381 - DNA, 15 bp, Homo sapiens
gttcccgtgtcctca

SEQ ID NO: 78382 - DNA, 15 bp, Homo sapiens
ggttcccgtgtcctc

SEQ ID NO: 78383 - DNA, 15 bp, Homo sapiens
gggttcccgtgtcct

SEQ ID NO: 78384 - DNA, 15 bp, Homo sapiens
agggttcccgtgtcc

SEQ ID NO: 78385 - DNA, 15 bp, Homo sapiens
cagggttcccgtgtc

SEQ ID NO: 78386 - DNA, 15 bp, Homo sapiens
ccagggttcccgtgt

SEQ ID NO: 78387 - DNA, 15 bp, Homo sapiens
tccagggttcccgtg

SEQ ID NO: 78388 - DNA, 15 bp, Homo sapiens
ttccagggttcccgt

SEQ ID NO: 78389 - DNA, 15 bp, Homo sapiens
gttccagggttcccg

SEQ ID NO: 78390 - DNA, 15 bp, Homo sapiens
agttccagggttccc

SEQ ID NO: 78391 - DNA, 15 bp, Homo sapiens
gagttccagggttcc

SEQ ID NO: 78392 - DNA, 15 bp, Homo sapiens
agagttccagggttc

SEQ ID NO: 78393 - DNA, 15 bp, Homo sapiens
aagagttccagggtt

SEQ ID NO: 78394 - DNA, 15 bp, Homo sapiens
taagagttccagggt

SEQ ID NO: 78395 - DNA, 15 bp, Homo sapiens
ttaagagttccaggg

SEQ ID NO: 78396 - DNA, 15 bp, Homo sapiens
tttaagagttccagg

SEQ ID NO: 78397 - DNA, 15 bp, Homo sapiens
gtttaagagttccag

SEQ ID NO: 78398 - DNA, 15 bp, Homo sapiens
cgtttaagagttcca

SEQ ID NO: 78399 - DNA, 15 bp, Homo sapiens
gcgtttaagagttcc

SEQ ID NO: 78400 - DNA, 15 bp, Homo sapiens
ggcgtttaagagttc

SEQ ID NO: 78401 - DNA, 15 bp, Homo sapiens
gggcgtttaagagtt

SEQ ID NO: 78402 - DNA, 15 bp, Homo sapiens
agggcgtttaagagt

SEQ ID NO: 78403 - DNA, 15 bp, Homo sapiens
gagggcgtttaagag

SEQ ID NO: 78404 - DNA, 15 bp, Homo sapiens
tgagggcgtttaaga

SEQ ID NO: 78405 - DNA, 15 bp, Homo sapiens
gtgagggcgtttaag

SEQ ID NO: 78406 - DNA, 15 bp, Homo sapiens
ggtgagggcgtttaa

SEQ ID NO: 78407 - DNA, 15 bp, Homo sapiens
tggtgagggcgttta

SEQ ID NO: 78408 - DNA, 15 bp, Homo sapiens
ttggtgagggcgttt

SEQ ID NO: 78409 - DNA, 15 bp, Homo sapiens
tttggtgagggcgtt

SEQ ID NO: 78410 - DNA, 15 bp, Homo sapiens
ctttggtgagggcgt

SEQ ID NO: 78411 - DNA, 15 bp, Homo sapiens
tctttggtgagggcg

SEQ ID NO: 78412 - DNA, 15 bp, Homo sapiens
gtctttggtgagggc

SEQ ID NO: 78413 - DNA, 15 bp, Homo sapiens
ggtctttggtgaggg

SEQ ID NO: 78414 - DNA, 15 bp, Homo sapiens
gggtctttggtgagg

SEQ ID NO: 78415 - DNA, 15 bp, Homo sapiens
agggtctttggtgag

SEQ ID NO: 78416 - DNA, 15 bp, Homo sapiens
cagggtctttggtga

SEQ ID NO: 78417 - DNA, 15 bp, Homo sapiens
ccagggtctttggtg

SEQ ID NO: 78418 - DNA, 15 bp, Homo sapiens
gccagggtctttggt

SEQ ID NO: 78419 - DNA, 15 bp, Homo sapiens
agccagggtctttgg

SEQ ID NO: 78420 - DNA, 15 bp, Homo sapiens
aagccagggtctttg

SEQ ID NO: 78421 - DNA, 15 bp, Homo sapiens
gaagccagggtcttt

SEQ ID NO: 78422 - DNA, 15 bp, Homo sapiens
cgaagccagggtctt

SEQ ID NO: 78423 - DNA, 15 bp, Homo sapiens
ccgaagccagggtct

SEQ ID NO: 78424 - DNA, 15 bp, Homo sapiens
cccgaagccagggtc

SEQ ID NO: 78425 - DNA, 15 bp, Homo sapiens
tcccgaagccagggt

SEQ ID NO: 78426 - DNA, 15 bp, Homo sapiens
gtcccgaagccaggg

SEQ ID NO: 78427 - DNA, 15 bp, Homo sapiens
ggtcccgaagccagg

SEQ ID NO: 78428 - DNA, 15 bp, Homo sapiens
gggtcccgaagccag

SEQ ID NO: 78429 - DNA, 15 bp, Homo sapiens
cgggtcccgaagcca

SEQ ID NO: 78430 - DNA, 15 bp, Homo sapiens
gcgggtcccgaagcc

SEQ ID NO: 78431 - DNA, 15 bp, Homo sapiens
agcgggtcccgaagc

SEQ ID NO: 78432 - DNA, 15 bp, Homo sapiens
cagcgggtcccgaag

SEQ ID NO: 78433 - DNA, 15 bp, Homo sapiens
acagcgggtcccgaa

SEQ ID NO: 78434 - DNA, 15 bp, Homo sapiens
tacagcgggtcccga

SEQ ID NO: 78435 - DNA, 15 bp, Homo sapiens
atacagcgggtcccg

SEQ ID NO: 78436 - DNA, 15 bp, Homo sapiens
catacagcgggtccc

SEQ ID NO: 78437 - DNA, 15 bp, Homo sapiens
ccatacagcgggtcc

SEQ ID NO: 78438 - DNA, 15 bp, Homo sapiens
tccatacagcgggtc

SEQ ID NO: 78439 - DNA, 15 bp, Homo sapiens
ttccatacagcgggt

SEQ ID NO: 78440 - DNA, 15 bp, Homo sapiens
cttccatacagcggg

SEQ ID NO: 78441 - DNA, 15 bp, Homo sapiens
ccttccatacagcgg

SEQ ID NO: 78442 - DNA, 15 bp, Homo sapiens
tccttccatacagcg

SEQ ID NO: 78443 - DNA, 15 bp, Homo sapiens
ttccttccatacagc

SEQ ID NO: 78444 - DNA, 15 bp, Homo sapiens
tttccttccatacag

SEQ ID NO: 78445 - DNA, 15 bp, Homo sapiens
gtttccttccataca

SEQ ID NO: 78446 - DNA, 15 bp, Homo sapiens
ggtttccttccatac

SEQ ID NO: 78447 - DNA, 15 bp, Homo sapiens
gggtttccttccata

SEQ ID NO: 78448 - DNA, 15 bp, Homo sapiens
tgggtttccttccat

SEQ ID NO: 78449 - DNA, 15 bp, Homo sapiens
ttgggtttccttcca

SEQ ID NO: 78450 - DNA, 15 bp, Homo sapiens
attgggtttccttcc

SEQ ID NO: 78451 - DNA, 15 bp, Homo sapiens
gattgggtttccttc

SEQ ID NO: 78452 - DNA, 15 bp, Homo sapiens
ggattgggtttcctt

SEQ ID NO: 78453 - DNA, 15 bp, Homo sapiens
gggattgggtttcct

SEQ ID NO: 78454 - DNA, 15 bp, Homo sapiens
cgggattgggtttcc

SEQ ID NO: 78455 - DNA, 15 bp, Homo sapiens
acgggattgggtttc

SEQ ID NO: 78456 - DNA, 15 bp, Homo sapiens
cacgggattgggttt

SEQ ID NO: 78457 - DNA, 15 bp, Homo sapiens
tcacgggattgggtt

SEQ ID NO: 78458 - DNA, 15 bp, Homo sapiens
ctcacgggattgggt

SEQ ID NO: 78459 - DNA, 15 bp, Homo sapiens
actcacgggattggg

SEQ ID NO: 78460 - DNA, 15 bp, Homo sapiens
cactcacgggattgg

SEQ ID NO: 78461 - DNA, 15 bp, Homo sapiens
gcactcacgggattg

SEQ ID NO: 78462 - DNA, 15 bp, Homo sapiens
ggcactcacgggatt

SEQ ID NO: 78463 - DNA, 15 bp, Homo sapiens
tggcactcacgggat

SEQ ID NO: 78464 - DNA, 15 bp, Homo sapiens
gtggcactcacggga

SEQ ID NO: 78465 - DNA, 15 bp, Homo sapiens
agtggcactcacggg

SEQ ID NO: 78466 - DNA, 15 bp, Homo sapiens
aagtggcactcacgg

SEQ ID NO: 78467 - DNA, 15 bp, Homo sapiens
aaagtggcactcacg

SEQ ID NO: 78468 - DNA, 15 bp, Homo sapiens
taaagtggcactcac

SEQ ID NO: 78469 - DNA, 15 bp, Homo sapiens
ctaaagtggcactca

SEQ ID NO: 78470 - DNA, 15 bp, Homo sapiens
gctaaagtggcactc

SEQ ID NO: 78471 - DNA, 15 bp, Homo sapiens
ggctaaagtggcact

SEQ ID NO: 78472 - DNA, 15 bp, Homo sapiens
tggctaaagtggcac

SEQ ID NO: 78473 - DNA, 15 bp, Homo sapiens
atggctaaagtggca

SEQ ID NO: 78474 - DNA, 15 bp, Homo sapiens
tatggctaaagtggc

SEQ ID NO: 78475 - DNA, 15 bp, Homo sapiens
ttatggctaaagtgg

SEQ ID NO: 78476 - DNA, 15 bp, Homo sapiens
cttatggctaaagtg

SEQ ID NO: 78477 - DNA, 15 bp, Homo sapiens
gcttatggctaaagt

SEQ ID NO: 78478 - DNA, 15 bp, Homo sapiens
tgcttatggctaaag

SEQ ID NO: 78479 - DNA, 15 bp, Homo sapiens
ctgcttatggctaaa

SEQ ID NO: 78480 - DNA, 15 bp, Homo sapiens
cctgcttatggctaa

SEQ ID NO: 78481 - DNA, 15 bp, Homo sapiens
gcctgcttatggcta

SEQ ID NO: 78482 - DNA, 15 bp, Homo sapiens
agcctgcttatggct

SEQ ID NO: 78483 - DNA, 15 bp, Homo sapiens
aagcctgcttatggc

SEQ ID NO: 78484 - DNA, 15 bp, Homo sapiens
gaagcctgcttatgg

SEQ ID NO: 78485 - DNA, 15 bp, Homo sapiens
agaagcctgcttatg

SEQ ID NO: 78486 - DNA, 15 bp, Homo sapiens
aagaagcctgcttat

SEQ ID NO: 78487 - DNA, 15 bp, Homo sapiens
caagaagcctgctta

SEQ ID NO: 78488 - DNA, 15 bp, Homo sapiens
acaagaagcctgctt

SEQ ID NO: 78489 - DNA, 15 bp, Homo sapiens
cacaagaagcctgct

SEQ ID NO: 78490 - DNA, 15 bp, Homo sapiens
gcacaagaagcctgc

SEQ ID NO: 78491 - DNA, 15 bp, Homo sapiens
agcacaagaagcctg

SEQ ID NO: 78492 - DNA, 15 bp, Homo sapiens
aagcacaagaagcct

SEQ ID NO: 78493 - DNA, 15 bp, Homo sapiens
caagcacaagaagcc

SEQ ID NO: 78494 - DNA, 15 bp, Homo sapiens
acaagcacaagaagc

SEQ ID NO: 78495 - DNA, 15 bp, Homo sapiens
aacaagcacaagaag

SEQ ID NO: 78496 - DNA, 15 bp, Homo sapiens
caacaagcacaagaa

SEQ ID NO: 78497 - DNA, 15 bp, Homo sapiens
gcaacaagcacaaga

SEQ ID NO: 78498 - DNA, 15 bp, Homo sapiens
ggcaacaagcacaag

SEQ ID NO: 78499 - DNA, 15 bp, Homo sapiens
aggcaacaagcacaa

SEQ ID NO: 78500 - DNA, 15 bp, Homo sapiens
caggcaacaagcaca

SEQ ID NO: 78501 - DNA, 15 bp, Homo sapiens
ccaggcaacaagcac

SEQ ID NO: 78502 - DNA, 15 bp, Homo sapiens
accaggcaacaagca

SEQ ID NO: 78503 - DNA, 15 bp, Homo sapiens
aaccaggcaacaagc

SEQ ID NO: 78504 - DNA, 15 bp, Homo sapiens
aaaccaggcaacaag

SEQ ID NO: 78505 - DNA, 15 bp, Homo sapiens
caaaccaggcaacaa

SEQ ID NO: 78506 - DNA, 15 bp, Homo sapiens
tcaaaccaggcaaca

SEQ ID NO: 78507 - DNA, 15 bp, Homo sapiens
atcaaaccaggcaac

SEQ ID NO: 78508 - DNA, 15 bp, Homo sapiens
aatcaaaccaggcaa

SEQ ID NO: 78509 - DNA, 15 bp, Homo sapiens
aaatcaaaccaggca

SEQ ID NO: 78510 - DNA, 15 bp, Homo sapiens
gaaatcaaaccaggc

SEQ ID NO: 78511 - DNA, 15 bp, Homo sapiens
agaaatcaaaccagg

SEQ ID NO: 78512 - DNA, 15 bp, Homo sapiens
tagaaatcaaaccag

SEQ ID NO: 78513 - DNA, 15 bp, Homo sapiens
ttagaaatcaaacca

SEQ ID NO: 78514 - DNA, 15 bp, Homo sapiens
attagaaatcaaacc

SEQ ID NO: 78515 - DNA, 15 bp, Homo sapiens
tattagaaatcaaac

SEQ ID NO: 78516 - DNA, 15 bp, Homo sapiens
atattagaaatcaaa

SEQ ID NO: 78517 - DNA, 15 bp, Homo sapiens
catattagaaatcaa

SEQ ID NO: 78518 - DNA, 15 bp, Homo sapiens
gcatattagaaatca

SEQ ID NO: 78519 - DNA, 15 bp, Homo sapiens
agcatattagaaatc

SEQ ID NO: 78520 - DNA, 15 bp, Homo sapiens
cagcatattagaaat

SEQ ID NO: 78521 - DNA, 15 bp, Homo sapiens
gcagcatattagaaa

SEQ ID NO: 78522 - DNA, 15 bp, Homo sapiens
tgcagcatattagaa

SEQ ID NO: 78523 - DNA, 15 bp, Homo sapiens
atgcagcatattaga

SEQ ID NO: 78524 - DNA, 15 bp, Homo sapiens
aatgcagcatattag

SEQ ID NO: 78525 - DNA, 15 bp, Homo sapiens
aaatgcagcatatta

SEQ ID NO: 78526 - DNA, 15 bp, Homo sapiens
taaatgcagcatatt

SEQ ID NO: 78527 - DNA, 15 bp, Homo sapiens
ataaatgcagcatat

SEQ ID NO: 78528 - DNA, 15 bp, Homo sapiens
gataaatgcagcata

SEQ ID NO: 78529 - DNA, 15 bp, Homo sapiens
tgataaatgcagcat

SEQ ID NO: 78530 - DNA, 15 bp, Homo sapiens
ttgataaatgcagca

SEQ ID NO: 78531 - DNA, 15 bp, Homo sapiens
gttgataaatgcagc

SEQ ID NO: 78532 - DNA, 15 bp, Homo sapiens
agttgataaatgcag

SEQ ID NO: 78533 - DNA, 15 bp, Homo sapiens
cagttgataaatgca

SEQ ID NO: 78534 - DNA, 15 bp, Homo sapiens
gcagttgataaatgc

SEQ ID NO: 78535 - DNA, 15 bp, Homo sapiens
tgcagttgataaatg

SEQ ID NO: 78536 - DNA, 15 bp, Homo sapiens
atgcagttgataaat

SEQ ID NO: 78537 - DNA, 15 bp, Homo sapiens
catgcagttgataaa

SEQ ID NO: 78538 - DNA, 15 bp, Homo sapiens
gcatgcagttgataa

SEQ ID NO: 78539 - DNA, 15 bp, Homo sapiens
ggcatgcagttgata

SEQ ID NO: 78540 - DNA, 15 bp, Homo sapiens
tggcatgcagttgat

SEQ ID NO: 78541 - DNA, 15 bp, Homo sapiens
gtggcatgcagttga

SEQ ID NO: 78542 - DNA, 15 bp, Homo sapiens
tgtggcatgcagttg

SEQ ID NO: 78543 - DNA, 15 bp, Homo sapiens
atgtggcatgcagtt

SEQ ID NO: 78544 - DNA, 15 bp, Homo sapiens
aatgtggcatgcagt

SEQ ID NO: 78545 - DNA, 15 bp, Homo sapiens
caatgtggcatgcag

SEQ ID NO: 78546 - DNA, 15 bp, Homo sapiens
acaatgtggcatgca

SEQ ID NO: 78547 - DNA, 15 bp, Homo sapiens
cacaatgtggcatgc

SEQ ID NO: 78548 - DNA, 15 bp, Homo sapiens
tcacaatgtggcatg

SEQ ID NO: 78549 - DNA, 15 bp, Homo sapiens
gtcacaatgtggcat

SEQ ID NO: 78550 - DNA, 15 bp, Homo sapiens
ggtcacaatgtggca

SEQ ID NO: 78551 - DNA, 15 bp, Homo sapiens
cggtcacaatgtggc

SEQ ID NO: 78552 - DNA, 15 bp, Homo sapiens
gcggtcacaatgtgg

SEQ ID NO: 78553 - DNA, 15 bp, Homo sapiens
ggcggtcacaatgtg

SEQ ID NO: 78554 - DNA, 15 bp, Homo sapiens
tggcggtcacaatgt

SEQ ID NO: 78555 - DNA, 15 bp, Homo sapiens
ctggcggtcacaatg

SEQ ID NO: 78556 - DNA, 15 bp, Homo sapiens
gctggcggtcacaat

SEQ ID NO: 78557 - DNA, 15 bp, Homo sapiens
tgctggcggtcacaa

SEQ ID NO: 78558 - DNA, 15 bp, Homo sapiens
atgctggcggtcaca

SEQ ID NO: 78559 - DNA, 15 bp, Homo sapiens
aatgctggcggtcac

SEQ ID NO: 78560 - DNA, 15 bp, Homo sapiens
aaatgctggcggtca

SEQ ID NO: 78561 - DNA, 15 bp, Homo sapiens
caaatgctggcggtc

SEQ ID NO: 78562 - DNA, 15 bp, Homo sapiens
gcaaatgctggcggt

SEQ ID NO: 78563 - DNA, 15 bp, Homo sapiens
ggcaaatgctggcgg

SEQ ID NO: 78564 - DNA, 15 bp, Homo sapiens
gggcaaatgctggcg

SEQ ID NO: 78565 - DNA, 15 bp, Homo sapiens
agggcaaatgctggc

SEQ ID NO: 78566 - DNA, 15 bp, Homo sapiens
aagggcaaatgctgg

SEQ ID NO: 78567 - DNA, 15 bp, Homo sapiens
aaagggcaaatgctg

SEQ ID NO: 78568 - DNA, 15 bp, Homo sapiens
caaagggcaaatgct

SEQ ID NO: 78569 - DNA, 15 bp, Homo sapiens
tcaaagggcaaatgc

SEQ ID NO: 78570 - DNA, 15 bp, Homo sapiens
ttcaaagggcaaatg

SEQ ID NO: 78571 - DNA, 15 bp, Homo sapiens
attcaaagggcaaat

SEQ ID NO: 78572 - DNA, 15 bp, Homo sapiens
aattcaaagggcaaa

SEQ ID NO: 78573 - DNA, 15 bp, Homo sapiens
taattcaaagggcaa

SEQ ID NO: 78574 - DNA, 15 bp, Homo sapiens
ataattcaaagggca

SEQ ID NO: 78575 - DNA, 15 bp, Homo sapiens
aataattcaaagggc

SEQ ID NO: 78576 - DNA, 15 bp, Homo sapiens
taataattcaaaggg

SEQ ID NO: 78577 - DNA, 15 bp, Homo sapiens
ataataattcaaagg

SEQ ID NO: 78578 - DNA, 15 bp, Homo sapiens
aataataattcaaag

SEQ ID NO: 78579 - DNA, 15 bp, Homo sapiens
taataataattcaaa

SEQ ID NO: 78580 - DNA, 15 bp, Homo sapiens
ataataataattcaa

SEQ ID NO: 78581 - DNA, 15 bp, Homo sapiens
cataataataattca

SEQ ID NO: 78582 - DNA, 15 bp, Homo sapiens
acataataataattc

SEQ ID NO: 78583 - DNA, 15 bp, Homo sapiens
aacataataataatt

SEQ ID NO: 78584 - DNA, 15 bp, Homo sapiens
aaacataataataat

SEQ ID NO: 78585 - DNA, 15 bp, Homo sapiens
aaaacataataataa

SEQ ID NO: 78586 - DNA, 15 bp, Homo sapiens
taaaacataataata

SEQ ID NO: 78587 - DNA, 15 bp, Homo sapiens
ataaaacataataat

SEQ ID NO: 78588 - DNA, 15 bp, Homo sapiens
aataaaacataataa

SEQ ID NO: 78589 - DNA, 15 bp, Homo sapiens
aaataaaacataata

SEQ ID NO: 78590 - DNA, 15 bp, Homo sapiens
taaataaaacataat

SEQ ID NO: 78591 - DNA, 15 bp, Homo sapiens
gtaaataaaacataa

SEQ ID NO: 78592 - DNA, 15 bp, Homo sapiens
tgtaaataaaacata

SEQ ID NO: 78593 - DNA, 15 bp, Homo sapiens
ttgtaaataaaacat

SEQ ID NO: 78594 - DNA, 15 bp, Homo sapiens
tttgtaaataaaaca

SEQ ID NO: 78595 - DNA, 15 bp, Homo sapiens
ttttgtaaataaaac

SEQ ID NO: 78596 - DNA, 15 bp, Homo sapiens
tttttgtaaataaaa

SEQ ID NO: 78597 - DNA, 15 bp, Homo sapiens
ctttttgtaaataaa

SEQ ID NO: 78598 - DNA, 15 bp, Homo sapiens
gctttttgtaaataa

SEQ ID NO: 78599 - DNA, 15 bp, Homo sapiens
cgctttttgtaaata

SEQ ID NO: 78600 - DNA, 15 bp, Homo sapiens
tcgctttttgtaaat

SEQ ID NO: 78601 - DNA, 15 bp, Homo sapiens
ttcgctttttgtaaa

SEQ ID NO: 78602 - DNA, 15 bp, Homo sapiens
cttcgctttttgtaa

SEQ ID NO: 78603 - DNA, 15 bp, Homo sapiens
ccttcgctttttgta

SEQ ID NO: 78604 - DNA, 15 bp, Homo sapiens
accttcgctttttgt

SEQ ID NO: 78605 - DNA, 15 bp, Homo sapiens
taccttcgctttttg

SEQ ID NO: 78606 - DNA, 15 bp, Homo sapiens
ctaccttcgcttttt

SEQ ID NO: 78607 - DNA, 15 bp, Homo sapiens
actaccttcgctttt

SEQ ID NO: 78608 - DNA, 15 bp, Homo sapiens
tactaccttcgcttt

SEQ ID NO: 78609 - DNA, 15 bp, Homo sapiens
ttactaccttcgctt

SEQ ID NO: 78610 - DNA, 15 bp, Homo sapiens
gttactaccttcgct

SEQ ID NO: 78611 - DNA, 15 bp, Homo sapiens
ggttactaccttcgc

SEQ ID NO: 78612 - DNA, 15 bp, Homo sapiens
cggttactaccttcg

SEQ ID NO: 78613 - DNA, 15 bp, Homo sapiens
tcggttactaccttc

SEQ ID NO: 78614 - DNA, 15 bp, Homo sapiens
ttcggttactacctt

SEQ ID NO: 78615 - DNA, 15 bp, Homo sapiens
gttcggttactacct

SEQ ID NO: 78616 - DNA, 15 bp, Homo sapiens
agttcggttactacc

SEQ ID NO: 78617 - DNA, 15 bp, Homo sapiens
tagttcggttactac

SEQ ID NO: 78618 - DNA, 15 bp, Homo sapiens
ttagttcggttacta

SEQ ID NO: 78619 - DNA, 15 bp, Homo sapiens
tttagttcggttact

SEQ ID NO: 78620 - DNA, 15 bp, Homo sapiens
atttagttcggttac

SEQ ID NO: 78621 - DNA, 15 bp, Homo sapiens
aatttagttcggtta

SEQ ID NO: 78622 - DNA, 15 bp, Homo sapiens
taatttagttcggtt

SEQ ID NO: 78623 - DNA, 15 bp, Homo sapiens
ataatttagttcggt

SEQ ID NO: 78624 - DNA, 15 bp, Homo sapiens
gataatttagttcgg

SEQ ID NO: 78625 - DNA, 15 bp, Homo sapiens
agataatttagttcg

SEQ ID NO: 78626 - DNA, 15 bp, Homo sapiens
tagataatttagttc

SEQ ID NO: 78627 - DNA, 15 bp, Homo sapiens
ctagataatttagtt

SEQ ID NO: 78628 - DNA, 15 bp, Homo sapiens
cctagataatttagt

SEQ ID NO: 78629 - DNA, 15 bp, Homo sapiens
tcctagataatttag

SEQ ID NO: 78630 - DNA, 15 bp, Homo sapiens
ttcctagataattta

SEQ ID NO: 78631 - DNA, 15 bp, Homo sapiens
gttcctagataattt

SEQ ID NO: 78632 - DNA, 15 bp, Homo sapiens
tgttcctagataatt

SEQ ID NO: 78633 - DNA, 15 bp, Homo sapiens
ttgttcctagataat

SEQ ID NO: 78634 - DNA, 15 bp, Homo sapiens
tttgttcctagataa

SEQ ID NO: 78635 - DNA, 15 bp, Homo sapiens
gtttgttcctagata

SEQ ID NO: 78636 - DNA, 15 bp, Homo sapiens
cgtttgttcctagat

SEQ ID NO: 78637 - DNA, 15 bp, Homo sapiens
acgtttgttcctaga

SEQ ID NO: 78638 - DNA, 15 bp, Homo sapiens
aacgtttgttcctag

SEQ ID NO: 78639 - DNA, 15 bp, Homo sapiens
aaacgtttgttccta

SEQ ID NO: 78640 - DNA, 15 bp, Homo sapiens
caaacgtttgttcct

SEQ ID NO: 78641 - DNA, 15 bp, Homo sapiens
ccaaacgtttgttcc

SEQ ID NO: 78642 - DNA, 15 bp, Homo sapiens
tccaaacgtttgttc

SEQ ID NO: 78643 - DNA, 15 bp, Homo sapiens
ctccaaacgtttgtt

SEQ ID NO: 78644 - DNA, 15 bp, Homo sapiens
tctccaaacgtttgt

SEQ ID NO: 78645 - DNA, 15 bp, Homo sapiens
ctctccaaacgtttg

SEQ ID NO: 78646 - DNA, 15 bp, Homo sapiens
actctccaaacgttt

SEQ ID NO: 78647 - DNA, 15 bp, Homo sapiens
gactctccaaacgtt

SEQ ID NO: 78648 - DNA, 15 bp, Homo sapiens
agactctccaaacgt

SEQ ID NO: 78649 - DNA, 15 bp, Homo sapiens
aagactctccaaacg

SEQ ID NO: 78650 - DNA, 15 bp, Homo sapiens
gaagactctccaaac

SEQ ID NO: 78651 - DNA, 15 bp, Homo sapiens
agaagactctccaaa

SEQ ID NO: 78652 - DNA, 15 bp, Homo sapiens
tagaagactctccaa

SEQ ID NO: 78653 - DNA, 15 bp, Homo sapiens
ttagaagactctcca

SEQ ID NO: 78654 - DNA, 15 bp, Homo sapiens
gttagaagactctcc

SEQ ID NO: 78655 - DNA, 15 bp, Homo sapiens
tgttagaagactctc

SEQ ID NO: 78656 - DNA, 15 bp, Homo sapiens
gtgttagaagactct

SEQ ID NO: 78657 - DNA, 15 bp, Homo sapiens
ggtgttagaagactc

SEQ ID NO: 78658 - DNA, 15 bp, Homo sapiens
cggtgttagaagact

SEQ ID NO: 78659 - DNA, 15 bp, Homo sapiens
acggtgttagaagac

SEQ ID NO: 78660 - DNA, 15 bp, Homo sapiens
cacggtgttagaaga

SEQ ID NO: 78661 - DNA, 15 bp, Homo sapiens
gcacggtgttagaag

SEQ ID NO: 78662 - DNA, 15 bp, Homo sapiens
tgcacggtgttagaa

SEQ ID NO: 78663 - DNA, 15 bp, Homo sapiens
ttgcacggtgttaga

SEQ ID NO: 78664 - DNA, 15 bp, Homo sapiens
tttgcacggtgttag

SEQ ID NO: 78665 - DNA, 15 bp, Homo sapiens
ctttgcacggtgtta

SEQ ID NO: 78666 - DNA, 15 bp, Homo sapiens
gctttgcacggtgtt

SEQ ID NO: 78667 - DNA, 15 bp, Homo sapiens
tgctttgcacggtgt

SEQ ID NO: 78668 - DNA, 15 bp, Homo sapiens
gtgctttgcacggtg

SEQ ID NO: 78669 - DNA, 15 bp, Homo sapiens
cgtgctttgcacggt

SEQ ID NO: 78670 - DNA, 15 bp, Homo sapiens
acgtgctttgcacgg

SEQ ID NO: 78671 - DNA, 15 bp, Homo sapiens
gacgtgctttgcacg

SEQ ID NO: 78672 - DNA, 15 bp, Homo sapiens
tgacgtgctttgcac

SEQ ID NO: 78673 - DNA, 15 bp, Homo sapiens
atgacgtgctttgca

SEQ ID NO: 78674 - DNA, 15 bp, Homo sapiens
aatgacgtgctttgc

SEQ ID NO: 78675 - DNA, 15 bp, Homo sapiens
taatgacgtgctttg

SEQ ID NO: 78676 - DNA, 15 bp, Homo sapiens
gtaatgacgtgcttt

SEQ ID NO: 78677 - DNA, 15 bp, Homo sapiens
tgtaatgacgtgctt

SEQ ID NO: 78678 - DNA, 15 bp, Homo sapiens
ctgtaatgacgtgct

SEQ ID NO: 78679 - DNA, 15 bp, Homo sapiens
tctgtaatgacgtgc

SEQ ID NO: 78680 - DNA, 15 bp, Homo sapiens
gtctgtaatgacgtg

SEQ ID NO: 78681 - DNA, 15 bp, Homo sapiens
tgtctgtaatgacgt

SEQ ID NO: 78682 - DNA, 15 bp, Homo sapiens
atgtctgtaatgacg

SEQ ID NO: 78683 - DNA, 15 bp, Homo sapiens
aatgtctgtaatgac

SEQ ID NO: 78684 - DNA, 15 bp, Homo sapiens
aaatgtctgtaatga

SEQ ID NO: 78685 - DNA, 15 bp, Homo sapiens
caaatgtctgtaatg

SEQ ID NO: 78686 - DNA, 15 bp, Homo sapiens
acaaatgtctgtaat

SEQ ID NO: 78687 - DNA, 15 bp, Homo sapiens
aacaaatgtctgtaa

SEQ ID NO: 78688 - DNA, 15 bp, Homo sapiens
aaacaaatgtctgta

SEQ ID NO: 78689 - DNA, 15 bp, Homo sapiens
taaacaaatgtctgt

SEQ ID NO: 78690 - DNA, 15 bp, Homo sapiens
gtaaacaaatgtctg

SEQ ID NO: 78691 - DNA, 15 bp, Homo sapiens
agtaaacaaatgtct

SEQ ID NO: 78692 - DNA, 15 bp, Homo sapiens
cagtaaacaaatgtc

SEQ ID NO: 78693 - DNA, 15 bp, Homo sapiens
tcagtaaacaaatgt

SEQ ID NO: 78694 - DNA, 15 bp, Homo sapiens
atcagtaaacaaatg

SEQ ID NO: 78695 - DNA, 15 bp, Homo sapiens
aatcagtaaacaaat

SEQ ID NO: 78696 - DNA, 15 bp, Homo sapiens
aaatcagtaaacaaa

SEQ ID NO: 78697 - DNA, 15 bp, Homo sapiens
taaatcagtaaacaa

SEQ ID NO: 78698 - DNA, 15 bp, Homo sapiens
ctaaatcagtaaaca

SEQ ID NO: 78699 - DNA, 15 bp, Homo sapiens
tctaaatcagtaaac

SEQ ID NO: 78700 - DNA, 15 bp, Homo sapiens
ttctaaatcagtaaa

SEQ ID NO: 78701 - DNA, 15 bp, Homo sapiens
gttctaaatcagtaa

SEQ ID NO: 78702 - DNA, 15 bp, Homo sapiens
ggttctaaatcagta

SEQ ID NO: 78703 - DNA, 15 bp, Homo sapiens
aggttctaaatcagt

SEQ ID NO: 78704 - DNA, 15 bp, Homo sapiens
aaggttctaaatcag

SEQ ID NO: 78705 - DNA, 15 bp, Homo sapiens
taaggttctaaatca

SEQ ID NO: 78706 - DNA, 15 bp, Homo sapiens
ttaaggttctaaatc

SEQ ID NO: 78707 - DNA, 15 bp, Homo sapiens
attaaggttctaaat

SEQ ID NO: 78708 - DNA, 15 bp, Homo sapiens
tattaaggttctaaa

SEQ ID NO: 78709 - DNA, 15 bp, Homo sapiens
atattaaggttctaa

SEQ ID NO: 78710 - DNA, 15 bp, Homo sapiens
aatattaaggttcta

SEQ ID NO: 78711 - DNA, 15 bp, Homo sapiens
aaatattaaggttct

SEQ ID NO: 78712 - DNA, 15 bp, Homo sapiens
taaatattaaggttc

SEQ ID NO: 78713 - DNA, 15 bp, Homo sapiens
ttaaatattaaggtt

SEQ ID NO: 78714 - DNA, 15 bp, Homo sapiens
attaaatattaaggt

SEQ ID NO: 78715 - DNA, 15 bp, Homo sapiens
aattaaatattaagg

SEQ ID NO: 78716 - DNA, 15 bp, Homo sapiens
aaattaaatattaag

SEQ ID NO: 78717 - DNA, 15 bp, Homo sapiens
ttaaattaaatatta

SEQ ID NO: 78718 - DNA, 15 bp, Homo sapiens
tttaaattaaatatt

SEQ ID NO: 78719 - DNA, 15 bp, Homo sapiens
atttaaattaaatat

SEQ ID NO: 78720 - DNA, 15 bp, Homo sapiens
tatttaaattaaata

SEQ ID NO: 78721 - DNA, 15 bp, Homo sapiens
ctatttaaattaaat

SEQ ID NO: 78722 - DNA, 15 bp, Homo sapiens
gctatttaaattaaa

SEQ ID NO: 78723 - DNA, 15 bp, Homo sapiens
tgctatttaaattaa

SEQ ID NO: 78724 - DNA, 15 bp, Homo sapiens
gtgctatttaaatta

SEQ ID NO: 78725 - DNA, 15 bp, Homo sapiens
agtgctatttaaatt

SEQ ID NO: 78726 - DNA, 15 bp, Homo sapiens
aagtgctatttaaat

SEQ ID NO: 78727 - DNA, 15 bp, Homo sapiens
aaagtgctatttaaa

SEQ ID NO: 78728 - DNA, 15 bp, Homo sapiens
taaagtgctatttaa

SEQ ID NO: 78729 - DNA, 15 bp, Homo sapiens
gtaaagtgctattta

SEQ ID NO: 78730 - DNA, 15 bp, Homo sapiens
tgtaaagtgctattt

SEQ ID NO: 78731 - DNA, 15 bp, Homo sapiens
gtgtaaagtgctatt

SEQ ID NO: 78732 - DNA, 15 bp, Homo sapiens
agtgtaaagtgctat

SEQ ID NO: 78733 - DNA, 15 bp, Homo sapiens
aagtgtaaagtgcta

SEQ ID NO: 78734 - DNA, 15 bp, Homo sapiens
taagtgtaaagtgct

SEQ ID NO: 78735 - DNA, 15 bp, Homo sapiens
gtaagtgtaaagtgc

SEQ ID NO: 78736 - DNA, 15 bp, Homo sapiens
agtaagtgtaaagtg

SEQ ID NO: 78737 - DNA, 15 bp, Homo sapiens
cagtaagtgtaaagt

SEQ ID NO: 78738 - DNA, 15 bp, Homo sapiens
tcagtaagtgtaaag

SEQ ID NO: 78739 - DNA, 15 bp, Homo sapiens
atcagtaagtgtaaa

SEQ ID NO: 78740 - DNA, 15 bp, Homo sapiens
catcagtaagtgtaa

SEQ ID NO: 78741 - DNA, 15 bp, Homo sapiens
tcatcagtaagtgta

SEQ ID NO: 78742 - DNA, 15 bp, Homo sapiens
ttcatcagtaagtgt

SEQ ID NO: 78743 - DNA, 15 bp, Homo sapiens
tttcatcagtaagtg

SEQ ID NO: 78744 - DNA, 15 bp, Homo sapiens
atttcatcagtaagt

SEQ ID NO: 78745 - DNA, 15 bp, Homo sapiens
catttcatcagtaag

SEQ ID NO: 78746 - DNA, 15 bp, Homo sapiens
gcatttcatcagtaa

SEQ ID NO: 78747 - DNA, 15 bp, Homo sapiens
agcatttcatcagta

SEQ ID NO: 78748 - DNA, 15 bp, Homo sapiens
aagcatttcatcagt

SEQ ID NO: 78749 - DNA, 15 bp, Homo sapiens
aaagcatttcatcag

SEQ ID NO: 78750 - DNA, 15 bp, Homo sapiens
aaaagcatttcatca

SEQ ID NO: 78751 - DNA, 15 bp, Homo sapiens
gaaaagcatttcatc

SEQ ID NO: 78752 - DNA, 15 bp, Homo sapiens
ggaaaagcatttcat

SEQ ID NO: 78753 - DNA, 15 bp, Homo sapiens
aggaaaagcatttca

SEQ ID NO: 78754 - DNA, 15 bp, Homo sapiens
aaggaaaagcatttc

SEQ ID NO: 78755 - DNA, 15 bp, Homo sapiens
aaaggaaaagcattt

SEQ ID NO: 78756 - DNA, 15 bp, Homo sapiens
gaaaggaaaagcatt

SEQ ID NO: 78757 - DNA, 15 bp, Homo sapiens
agaaaggaaaagcat

SEQ ID NO: 78758 - DNA, 15 bp, Homo sapiens
aagaaaggaaaagca

SEQ ID NO: 78759 - DNA, 15 bp, Homo sapiens
aaagaaaggaaaagc

SEQ ID NO: 78760 - DNA, 15 bp, Homo sapiens
gaaagaaaggaaaag

SEQ ID NO: 78761 - DNA, 15 bp, Homo sapiens
agaaagaaaggaaaa

SEQ ID NO: 78762 - DNA, 15 bp, Homo sapiens
gagaaagaaaggaaa

SEQ ID NO: 78763 - DNA, 15 bp, Homo sapiens
agagaaagaaaggaa

SEQ ID NO: 78764 - DNA, 15 bp, Homo sapiens
gagagaaagaaagga

SEQ ID NO: 78765 - DNA, 15 bp, Homo sapiens
ggagagaaagaaagg

SEQ ID NO: 78766 - DNA, 15 bp, Homo sapiens
gggagagaaagaaag

SEQ ID NO: 78767 - DNA, 15 bp, Homo sapiens
tgggagagaaagaaa

SEQ ID NO: 78768 - DNA, 15 bp, Homo sapiens
ctgggagagaaagaa

SEQ ID NO: 78769 - DNA, 15 bp, Homo sapiens
gctgggagagaaaga

SEQ ID NO: 78770 - DNA, 15 bp, Homo sapiens
ggctgggagagaaag

SEQ ID NO: 78771 - DNA, 15 bp, Homo sapiens
gggctgggagagaaa

SEQ ID NO: 78772 - DNA, 15 bp, Homo sapiens
ggggctgggagagaa

SEQ ID NO: 78773 - DNA, 15 bp, Homo sapiens
aggggctgggagaga

SEQ ID NO: 78774 - DNA, 15 bp, Homo sapiens
caggggctgggagag

SEQ ID NO: 78775 - DNA, 15 bp, Homo sapiens
acaggggctgggaga

SEQ ID NO: 78776 - DNA, 15 bp, Homo sapiens
tacaggggctgggag

SEQ ID NO: 78777 - DNA, 15 bp, Homo sapiens
gtacaggggctggga

SEQ ID NO: 78778 - DNA, 15 bp, Homo sapiens
agtacaggggctggg

SEQ ID NO: 78779 - DNA, 15 bp, Homo sapiens
aagtacaggggctgg

SEQ ID NO: 78780 - DNA, 15 bp, Homo sapiens
taagtacaggggctg

SEQ ID NO: 78781 - DNA, 15 bp, Homo sapiens
ttaagtacaggggct

SEQ ID NO: 78782 - DNA, 15 bp, Homo sapiens
cttaagtacaggggc

SEQ ID NO: 78783 - DNA, 15 bp, Homo sapiens
acttaagtacagggg

SEQ ID NO: 78784 - DNA, 15 bp, Homo sapiens
cacttaagtacaggg

SEQ ID NO: 78785 - DNA, 15 bp, Homo sapiens
gcacttaagtacagg

SEQ ID NO: 78786 - DNA, 15 bp, Homo sapiens
agcacttaagtacag

SEQ ID NO: 78787 - DNA, 15 bp, Homo sapiens
aagcacttaagtaca

SEQ ID NO: 78788 - DNA, 15 bp, Homo sapiens
gaagcacttaagtac

SEQ ID NO: 78789 - DNA, 15 bp, Homo sapiens
tgaagcacttaagta

SEQ ID NO: 78790 - DNA, 15 bp, Homo sapiens
ttgaagcacttaagt

SEQ ID NO: 78791 - DNA, 15 bp, Homo sapiens
attgaagcacttaag

SEQ ID NO: 78792 - DNA, 15 bp, Homo sapiens
tattgaagcacttaa

SEQ ID NO: 78793 - DNA, 15 bp, Homo sapiens
ctattgaagcactta

SEQ ID NO: 78794 - DNA, 15 bp, Homo sapiens
cctattgaagcactt

SEQ ID NO: 78795 - DNA, 15 bp, Homo sapiens
gcctattgaagcact

SEQ ID NO: 78796 - DNA, 15 bp, Homo sapiens
agcctattgaagcac

SEQ ID NO: 78797 - DNA, 15 bp, Homo sapiens
gagcctattgaagca

SEQ ID NO: 78798 - DNA, 15 bp, Homo sapiens
agagcctattgaagc

SEQ ID NO: 78799 - DNA, 15 bp, Homo sapiens
gagagcctattgaag

SEQ ID NO: 78800 - DNA, 15 bp, Homo sapiens
tgagagcctattgaa

SEQ ID NO: 78801 - DNA, 15 bp, Homo sapiens
atgagagcctattga

SEQ ID NO: 78802 - DNA, 15 bp, Homo sapiens
aatgagagcctattg

SEQ ID NO: 78803 - DNA, 15 bp, Homo sapiens
taatgagagcctatt

SEQ ID NO: 78804 - DNA, 15 bp, Homo sapiens
ataatgagagcctat

SEQ ID NO: 78805 - DNA, 15 bp, Homo sapiens
tataatgagagccta

SEQ ID NO: 78806 - DNA, 15 bp, Homo sapiens
atataatgagagcct

SEQ ID NO: 78807 - DNA, 15 bp, Homo sapiens
tatataatgagagcc

SEQ ID NO: 78808 - DNA, 15 bp, Homo sapiens
atatataatgagagc

SEQ ID NO: 78809 - DNA, 15 bp, Homo sapiens
catatataatgagag

SEQ ID NO: 78810 - DNA, 15 bp, Homo sapiens
tcatatataatgaga

SEQ ID NO: 78811 - DNA, 15 bp, Homo sapiens
atcatatataatgag

SEQ ID NO: 78812 - DNA, 15 bp, Homo sapiens
aatcatatataatga

SEQ ID NO: 78813 - DNA, 15 bp, Homo sapiens
aaatcatatataatg

SEQ ID NO: 78814 - DNA, 15 bp, Homo sapiens
aaaatcatatataat

SEQ ID NO: 78815 - DNA, 15 bp, Homo sapiens
aaaaatcatatataa

SEQ ID NO: 78816 - DNA, 15 bp, Homo sapiens
taaaaatcatatata

SEQ ID NO: 78817 - DNA, 15 bp, Homo sapiens
ctaaaaatcatatat

SEQ ID NO: 78818 - DNA, 15 bp, Homo sapiens
cctaaaaatcatata

SEQ ID NO: 78819 - DNA, 15 bp, Homo sapiens
acctaaaaatcatat

SEQ ID NO: 78820 - DNA, 15 bp, Homo sapiens
aacctaaaaatcata

SEQ ID NO: 78821 - DNA, 15 bp, Homo sapiens
aaacctaaaaatcat

SEQ ID NO: 78822 - DNA, 15 bp, Homo sapiens
aaaacctaaaaatca

SEQ ID NO: 78823 - DNA, 15 bp, Homo sapiens
caaaacctaaaaatc

SEQ ID NO: 78824 - DNA, 15 bp, Homo sapiens
gcaaaacctaaaaat

SEQ ID NO: 78825 - DNA, 15 bp, Homo sapiens
agcaaaacctaaaaa

SEQ ID NO: 78826 - DNA, 15 bp, Homo sapiens
aagcaaaacctaaaa

SEQ ID NO: 78827 - DNA, 15 bp, Homo sapiens
taagcaaaacctaaa

SEQ ID NO: 78828 - DNA, 15 bp, Homo sapiens
ataagcaaaacctaa

SEQ ID NO: 78829 - DNA, 15 bp, Homo sapiens
gataagcaaaaccta

SEQ ID NO: 78830 - DNA, 15 bp, Homo sapiens
tgataagcaaaacct

SEQ ID NO: 78831 - DNA, 15 bp, Homo sapiens
ctgataagcaaaacc

SEQ ID NO: 78832 - DNA, 15 bp, Homo sapiens
gctgataagcaaaac

SEQ ID NO: 78833 - DNA, 15 bp, Homo sapiens
agctgataagcaaaa

SEQ ID NO: 78834 - DNA, 15 bp, Homo sapiens
aagctgataagcaaa

SEQ ID NO: 78835 - DNA, 15 bp, Homo sapiens
gaagctgataagcaa

SEQ ID NO: 78836 - DNA, 15 bp, Homo sapiens
agaagctgataagca

SEQ ID NO: 78837 - DNA, 15 bp, Homo sapiens
aagaagctgataagc

SEQ ID NO: 78838 - DNA, 15 bp, Homo sapiens
gaagaagctgataag

SEQ ID NO: 78839 - DNA, 15 bp, Homo sapiens
cgaagaagctgataa

SEQ ID NO: 78840 - DNA, 15 bp, Homo sapiens
gcgaagaagctgata

SEQ ID NO: 78841 - DNA, 15 bp, Homo sapiens
agcgaagaagctgat

SEQ ID NO: 78842 - DNA, 15 bp, Homo sapiens
aagcgaagaagctga

SEQ ID NO: 78843 - DNA, 15 bp, Homo sapiens
aaagcgaagaagctg

SEQ ID NO: 78844 - DNA, 15 bp, Homo sapiens
aaaagcgaagaagct

SEQ ID NO: 78845 - DNA, 15 bp, Homo sapiens
taaaagcgaagaagc

SEQ ID NO: 78846 - DNA, 15 bp, Homo sapiens
ataaaagcgaagaag

SEQ ID NO: 78847 - DNA, 15 bp, Homo sapiens
tataaaagcgaagaa

SEQ ID NO: 78848 - DNA, 15 bp, Homo sapiens
ttataaaagcgaaga

SEQ ID NO: 78849 - DNA, 15 bp, Homo sapiens
attataaaagcgaag

SEQ ID NO: 78850 - DNA, 15 bp, Homo sapiens
gattataaaagcgaa

SEQ ID NO: 78851 - DNA, 15 bp, Homo sapiens
agattataaaagcga

SEQ ID NO: 78852 - DNA, 15 bp, Homo sapiens
cagattataaaagcg

SEQ ID NO: 78853 - DNA, 15 bp, Homo sapiens
tcagattataaaagc

SEQ ID NO: 78854 - DNA, 15 bp, Homo sapiens
ttcagattataaaag

SEQ ID NO: 78855 - DNA, 15 bp, Homo sapiens
tttcagattataaaa

SEQ ID NO: 78856 - DNA, 15 bp, Homo sapiens
ttttcagattataaa

SEQ ID NO: 78857 - DNA, 15 bp, Homo sapiens
cttttcagattataa

SEQ ID NO: 78858 - DNA, 15 bp, Homo sapiens
tcttttcagattata

SEQ ID NO: 78859 - DNA, 15 bp, Homo sapiens
atcttttcagattat

SEQ ID NO: 78860 - DNA, 15 bp, Homo sapiens
catcttttcagatta

SEQ ID NO: 78861 - DNA, 15 bp, Homo sapiens
ccatcttttcagatt

SEQ ID NO: 78862 - DNA, 15 bp, Homo sapiens
gccatcttttcagat

SEQ ID NO: 78863 - DNA, 15 bp, Homo sapiens
tgccatcttttcaga

SEQ ID NO: 78864 - DNA, 15 bp, Homo sapiens
atgccatcttttcag

SEQ ID NO: 78865 - DNA, 15 bp, Homo sapiens
tatgccatcttttca

SEQ ID NO: 78866 - DNA, 15 bp, Homo sapiens
atatgccatcttttc

SEQ ID NO: 78867 - DNA, 15 bp, Homo sapiens
catatgccatctttt

SEQ ID NO: 78868 - DNA, 15 bp, Homo sapiens
tcatatgccatcttt

SEQ ID NO: 78869 - DNA, 15 bp, Homo sapiens
ttcatatgccatctt

SEQ ID NO: 78870 - DNA, 15 bp, Homo sapiens
attcatatgccatct

SEQ ID NO: 78871 - DNA, 15 bp, Homo sapiens
aattcatatgccatc

SEQ ID NO: 78872 - DNA, 15 bp, Homo sapiens
aaattcatatgccat

SEQ ID NO: 78873 - DNA, 15 bp, Homo sapiens
aaaattcatatgcca

SEQ ID NO: 78874 - DNA, 15 bp, Homo sapiens
aaaaattcatatgcc

SEQ ID NO: 78875 - DNA, 15 bp, Homo sapiens
taaaaattcatatgc

SEQ ID NO: 78876 - DNA, 15 bp, Homo sapiens
ataaaaattcatatg

SEQ ID NO: 78877 - DNA, 15 bp, Homo sapiens
tataaaaattcatat

SEQ ID NO: 78878 - DNA, 15 bp, Homo sapiens
ttataaaaattcata

SEQ ID NO: 78879 - DNA, 15 bp, Homo sapiens
tttataaaaattcat

SEQ ID NO: 78880 - DNA, 15 bp, Homo sapiens
ttttataaaaattca

SEQ ID NO: 78881 - DNA, 15 bp, Homo sapiens
tttttataaaaattc

SEQ ID NO: 78882 - DNA, 15 bp, Homo sapiens
ctttttataaaaatt

SEQ ID NO: 78883 - DNA, 15 bp, Homo sapiens
cctttttataaaaat

SEQ ID NO: 78884 - DNA, 15 bp, Homo sapiens
ccctttttataaaaa

SEQ ID NO: 78885 - DNA, 15 bp, Homo sapiens
tccctttttataaaa

SEQ ID NO: 78886 - DNA, 15 bp, Homo sapiens
gtccctttttataaa

SEQ ID NO: 78887 - DNA, 15 bp, Homo sapiens
tgtccctttttataa

SEQ ID NO: 78888 - DNA, 15 bp, Homo sapiens
gtgtccctttttata

SEQ ID NO: 78889 - DNA, 15 bp, Homo sapiens
agtgtccctttttat

SEQ ID NO: 78890 - DNA, 15 bp, Homo sapiens
aagtgtcccttttta

SEQ ID NO: 78891 - DNA, 15 bp, Homo sapiens
aaagtgtcccttttt

SEQ ID NO: 78892 - DNA, 15 bp, Homo sapiens
gaaagtgtccctttt

SEQ ID NO: 78893 - DNA, 15 bp, Homo sapiens
agaaagtgtcccttt

SEQ ID NO: 78894 - DNA, 15 bp, Homo sapiens
aagaaagtgtccctt

SEQ ID NO: 78895 - DNA, 15 bp, Homo sapiens
gaagaaagtgtccct

SEQ ID NO: 78896 - DNA, 15 bp, Homo sapiens
agaagaaagtgtccc

SEQ ID NO: 78897 - DNA, 15 bp, Homo sapiens
aagaagaaagtgtcc

SEQ ID NO: 78898 - DNA, 15 bp, Homo sapiens
gaagaagaaagtgtc

SEQ ID NO: 78899 - DNA, 15 bp, Homo sapiens
agaagaagaaagtgt

SEQ ID NO: 78900 - DNA, 15 bp, Homo sapiens
gagaagaagaaagtg

SEQ ID NO: 78901 - DNA, 15 bp, Homo sapiens
tgagaagaagaaagt

SEQ ID NO: 78902 - DNA, 15 bp, Homo sapiens
ttgagaagaagaaag

SEQ ID NO: 78903 - DNA, 15 bp, Homo sapiens
tttgagaagaagaaa

SEQ ID NO: 78904 - DNA, 15 bp, Homo sapiens
atttgagaagaagaa

SEQ ID NO: 78905 - DNA, 15 bp, Homo sapiens
aatttgagaagaaga

SEQ ID NO: 78906 - DNA, 15 bp, Homo sapiens
caatttgagaagaag

SEQ ID NO: 78907 - DNA, 15 bp, Homo sapiens
acaatttgagaagaa

SEQ ID NO: 78908 - DNA, 15 bp, Homo sapiens
tacaatttgagaaga

SEQ ID NO: 78909 - DNA, 15 bp, Homo sapiens
atacaatttgagaag

SEQ ID NO: 78910 - DNA, 15 bp, Homo sapiens
tatacaatttgagaa

SEQ ID NO: 78911 - DNA, 15 bp, Homo sapiens
atatacaatttgaga

SEQ ID NO: 78912 - DNA, 15 bp, Homo sapiens
aatatacaatttgag

SEQ ID NO: 78913 - DNA, 15 bp, Homo sapiens
aaatatacaatttga

SEQ ID NO: 78914 - DNA, 15 bp, Homo sapiens
aaaatatacaatttg

SEQ ID NO: 78915 - DNA, 15 bp, Homo sapiens
aaaaatatacaattt

SEQ ID NO: 78916 - DNA, 15 bp, Homo sapiens
taaaaatatacaatt

SEQ ID NO: 78917 - DNA, 15 bp, Homo sapiens
ataaaaatatacaat

SEQ ID NO: 78918 - DNA, 15 bp, Homo sapiens
aataaaaatatacaa

SEQ ID NO: 78919 - DNA, 15 bp, Homo sapiens
caataaaaatataca

SEQ ID NO: 78920 - DNA, 15 bp, Homo sapiens
acaataaaaatatac

SEQ ID NO: 78921 - DNA, 15 bp, Homo sapiens
tacaataaaaatata

SEQ ID NO: 78922 - DNA, 15 bp, Homo sapiens
gtacaataaaaatat

SEQ ID NO: 78923 - DNA, 15 bp, Homo sapiens
agtacaataaaaata

SEQ ID NO: 78924 - DNA, 15 bp, Homo sapiens
aagtacaataaaaat

SEQ ID NO: 78925 - DNA, 15 bp, Homo sapiens
aaagtacaataaaaa

SEQ ID NO: 78926 - DNA, 15 bp, Homo sapiens
gaaagtacaataaaa

SEQ ID NO: 78927 - DNA, 15 bp, Homo sapiens
ggaaagtacaataaa

SEQ ID NO: 78928 - DNA, 15 bp, Homo sapiens
aggaaagtacaataa

SEQ ID NO: 78929 - DNA, 15 bp, Homo sapiens
aaggaaagtacaata

SEQ ID NO: 78930 - DNA, 15 bp, Homo sapiens
gaaggaaagtacaat

SEQ ID NO: 78931 - DNA, 15 bp, Homo sapiens
tgaaggaaagtacaa

SEQ ID NO: 78932 - DNA, 15 bp, Homo sapiens
ttgaaggaaagtaca

SEQ ID NO: 78933 - DNA, 15 bp, Homo sapiens
tttgaaggaaagtac

SEQ ID NO: 78934 - DNA, 15 bp, Homo sapiens
ttttgaaggaaagta

SEQ ID NO: 78935 - DNA, 15 bp, Homo sapiens
gttttgaaggaaagt

SEQ ID NO: 78936 - DNA, 15 bp, Homo sapiens
ggttttgaaggaaag

SEQ ID NO: 78937 - DNA, 15 bp, Homo sapiens
gggttttgaaggaaa

SEQ ID NO: 78938 - DNA, 15 bp, Homo sapiens
ggggttttgaaggaa

SEQ ID NO: 78939 - DNA, 15 bp, Homo sapiens
gggggttttgaagga

SEQ ID NO: 78940 - DNA, 15 bp, Homo sapiens
agggggttttgaagg

SEQ ID NO: 78941 - DNA, 15 bp, Homo sapiens
aagggggttttgaag

SEQ ID NO: 78942 - DNA, 15 bp, Homo sapiens
aaagggggttttgaa

SEQ ID NO: 78943 - DNA, 15 bp, Homo sapiens
aaaagggggttttga

SEQ ID NO: 78944 - DNA, 15 bp, Homo sapiens
taaaagggggttttg

SEQ ID NO: 78945 - DNA, 15 bp, Homo sapiens
ttaaaagggggtttt

SEQ ID NO: 78946 - DNA, 15 bp, Homo sapiens
tttaaaagggggttt

SEQ ID NO: 78947 - DNA, 15 bp, Homo sapiens
ttttaaaagggggtt

SEQ ID NO: 78948 - DNA, 15 bp, Homo sapiens
tttttaaaagggggt

SEQ ID NO: 78949 - DNA, 15 bp, Homo sapiens
ctttttaaaaggggg

SEQ ID NO: 78950 - DNA, 15 bp, Homo sapiens
actttttaaaagggg

SEQ ID NO: 78951 - DNA, 15 bp, Homo sapiens
tactttttaaaaggg

SEQ ID NO: 78952 - DNA, 15 bp, Homo sapiens
ttactttttaaaagg

SEQ ID NO: 78953 - DNA, 15 bp, Homo sapiens
cttactttttaaaag

SEQ ID NO: 78954 - DNA, 15 bp, Homo sapiens
gcttactttttaaaa

SEQ ID NO: 78955 - DNA, 15 bp, Homo sapiens
tgcttactttttaaa

SEQ ID NO: 78956 - DNA, 15 bp, Homo sapiens
ctgcttactttttaa

SEQ ID NO: 78957 - DNA, 15 bp, Homo sapiens
actgcttacttttta

SEQ ID NO: 78958 - DNA, 15 bp, Homo sapiens
cactgcttacttttt

SEQ ID NO: 78959 - DNA, 15 bp, Homo sapiens
ccactgcttactttt

SEQ ID NO: 78960 - DNA, 15 bp, Homo sapiens
tccactgcttacttt

SEQ ID NO: 78961 - DNA, 15 bp, Homo sapiens
atccactgcttactt

SEQ ID NO: 78962 - DNA, 15 bp, Homo sapiens
tatccactgcttact

SEQ ID NO: 78963 - DNA, 15 bp, Homo sapiens
ttatccactgcttac

SEQ ID NO: 78964 - DNA, 15 bp, Homo sapiens
tttatccactgctta

SEQ ID NO: 78965 - DNA, 15 bp, Homo sapiens
atttatccactgctt

SEQ ID NO: 78966 - DNA, 15 bp, Homo sapiens
tatttatccactgct

SEQ ID NO: 78967 - DNA, 15 bp, Homo sapiens
ttatttatccactgc

SEQ ID NO: 78968 - DNA, 15 bp, Homo sapiens
tttatttatccactg

SEQ ID NO: 78969 - DNA, 15 bp, Homo sapiens
atttatttatccact

SEQ ID NO: 78970 - DNA, 15 bp, Homo sapiens
aatttatttatccac

SEQ ID NO: 78971 - DNA, 15 bp, Homo sapiens
gaatttatttatcca

SEQ ID NO: 78972 - DNA, 15 bp, Homo sapiens
tgaatttatttatcc

SEQ ID NO: 78973 - DNA, 15 bp, Homo sapiens
ctgaatttatttatc

SEQ ID NO: 78974 - DNA, 15 bp, Homo sapiens
actgaatttatttat

SEQ ID NO: 78975 - DNA, 15 bp, Homo sapiens
cactgaatttattta

SEQ ID NO: 78976 - DNA, 15 bp, Homo sapiens
tcactgaatttattt

SEQ ID NO: 78977 - DNA, 15 bp, Homo sapiens
ttcactgaatttatt

SEQ ID NO: 78978 - DNA, 15 bp, Homo sapiens
cttcactgaatttat

SEQ ID NO: 78979 - DNA, 15 bp, Homo sapiens
gcttcactgaattta

SEQ ID NO: 78980 - DNA, 15 bp, Homo sapiens
tgcttcactgaattt

SEQ ID NO: 78981 - DNA, 15 bp, Homo sapiens
atgcttcactgaatt

SEQ ID NO: 78982 - DNA, 15 bp, Homo sapiens
gatgcttcactgaat

SEQ ID NO: 78983 - DNA, 15 bp, Homo sapiens
ggatgcttcactgaa

SEQ ID NO: 78984 - DNA, 15 bp, Homo sapiens
tggatgcttcactga

SEQ ID NO: 78985 - DNA, 15 bp, Homo sapiens
atggatgcttcactg

SEQ ID NO: 78986 - DNA, 15 bp, Homo sapiens
tatggatgcttcact

SEQ ID NO: 78987 - DNA, 15 bp, Homo sapiens
atatggatgcttcac

SEQ ID NO: 78988 - DNA, 15 bp, Homo sapiens
catatggatgcttca

SEQ ID NO: 78989 - DNA, 15 bp, Homo sapiens
tcatatggatgcttc

SEQ ID NO: 78990 - DNA, 15 bp, Homo sapiens
gtcatatggatgctt

SEQ ID NO: 78991 - DNA, 15 bp, Homo sapiens
ggtcatatggatgct

SEQ ID NO: 78992 - DNA, 15 bp, Homo sapiens
gggtcatatggatgc

SEQ ID NO: 78993 - DNA, 15 bp, Homo sapiens
agggtcatatggatg

SEQ ID NO: 78994 - DNA, 15 bp, Homo sapiens
aagggtcatatggat

SEQ ID NO: 78995 - DNA, 15 bp, Homo sapiens
taagggtcatatgga

SEQ ID NO: 78996 - DNA, 15 bp, Homo sapiens
ttaagggtcatatgg

SEQ ID NO: 78997 - DNA, 15 bp, Homo sapiens
cttaagggtcatatg

SEQ ID NO: 78998 - DNA, 15 bp, Homo sapiens
acttaagggtcatat

SEQ ID NO: 78999 - DNA, 15 bp, Homo sapiens
cacttaagggtcata

SEQ ID NO: 79000 - DNA, 15 bp, Homo sapiens
tcacttaagggtcat

SEQ ID NO: 79001 - DNA, 15 bp, Homo sapiens
ctcacttaagggtca

SEQ ID NO: 79002 - DNA, 15 bp, Homo sapiens
actcacttaagggtc

SEQ ID NO: 79003 - DNA, 15 bp, Homo sapiens
cactcacttaagggt

SEQ ID NO: 79004 - DNA, 15 bp, Homo sapiens
acactcacttaaggg

SEQ ID NO: 79005 - DNA, 15 bp, Homo sapiens
tacactcacttaagg

SEQ ID NO: 79006 - DNA, 15 bp, Homo sapiens
ctacactcacttaag

SEQ ID NO: 79007 - DNA, 15 bp, Homo sapiens
cctacactcacttaa

SEQ ID NO: 79008 - DNA, 15 bp, Homo sapiens
ccctacactcactta

SEQ ID NO: 79009 - DNA, 15 bp, Homo sapiens
cccctacactcactt

SEQ ID NO: 79010 - DNA, 15 bp, Homo sapiens
tcccctacactcact

SEQ ID NO: 79011 - DNA, 15 bp, Homo sapiens
ttcccctacactcac

SEQ ID NO: 79012 - DNA, 15 bp, Homo sapiens
cttcccctacactca

SEQ ID NO: 79013 - DNA, 15 bp, Homo sapiens
ccttcccctacactc

SEQ ID NO: 79014 - DNA, 15 bp, Homo sapiens
cccttcccctacact

SEQ ID NO: 79015 - DNA, 15 bp, Homo sapiens
tcccttcccctacac

SEQ ID NO: 79016 - DNA, 15 bp, Homo sapiens
ctcccttcccctaca

SEQ ID NO: 79017 - DNA, 15 bp, Homo sapiens
cctcccttcccctac

SEQ ID NO: 79018 - DNA, 15 bp, Homo sapiens
acctcccttccccta

SEQ ID NO: 79019 - DNA, 15 bp, Homo sapiens
gacctcccttcccct

SEQ ID NO: 79020 - DNA, 15 bp, Homo sapiens
tgacctcccttcccc

SEQ ID NO: 79021 - DNA, 15 bp, Homo sapiens
gtgacctcccttccc

SEQ ID NO: 79022 - DNA, 15 bp, Homo sapiens
ggtgacctcccttcc

SEQ ID NO: 79023 - DNA, 15 bp, Homo sapiens
tggtgacctcccttc

SEQ ID NO: 79024 - DNA, 15 bp, Homo sapiens
ctggtgacctccctt

SEQ ID NO: 79025 - DNA, 15 bp, Homo sapiens
tctggtgacctccct

SEQ ID NO: 79026 - DNA, 15 bp, Homo sapiens
atctggtgacctccc

SEQ ID NO: 79027 - DNA, 15 bp, Homo sapiens
gatctggtgacctcc

SEQ ID NO: 79028 - DNA, 15 bp, Homo sapiens
tgatctggtgacctc

SEQ ID NO: 79029 - DNA, 15 bp, Homo sapiens
gtgatctggtgacct

SEQ ID NO: 79030 - DNA, 15 bp, Homo sapiens
agtgatctggtgacc

SEQ ID NO: 79031 - DNA, 15 bp, Homo sapiens
cagtgatctggtgac

SEQ ID NO: 79032 - DNA, 15 bp, Homo sapiens
acagtgatctggtga

SEQ ID NO: 79033 - DNA, 15 bp, Homo sapiens
cacagtgatctggtg

SEQ ID NO: 79034 - DNA, 15 bp, Homo sapiens
tcacagtgatctggt

SEQ ID NO: 79035 - DNA, 15 bp, Homo sapiens
ctcacagtgatctgg

SEQ ID NO: 79036 - DNA, 15 bp, Homo sapiens
actcacagtgatctg

SEQ ID NO: 79037 - DNA, 15 bp, Homo sapiens
cactcacagtgatct

SEQ ID NO: 79038 - DNA, 15 bp, Homo sapiens
tcactcacagtgatc

SEQ ID NO: 79039 - DNA, 15 bp, Homo sapiens
ttcactcacagtgat

SEQ ID NO: 79040 - DNA, 15 bp, Homo sapiens
cttcactcacagtga

SEQ ID NO: 79041 - DNA, 15 bp, Homo sapiens
tcttcactcacagtg

SEQ ID NO: 79042 - DNA, 15 bp, Homo sapiens
atcttcactcacagt

SEQ ID NO: 79043 - DNA, 15 bp, Homo sapiens
catcttcactcacag

SEQ ID NO: 79044 - DNA, 15 bp, Homo sapiens
ccatcttcactcaca

SEQ ID NO: 79045 - DNA, 15 bp, Homo sapiens
accatcttcactcac

SEQ ID NO: 79046 - DNA, 15 bp, Homo sapiens
caccatcttcactca

SEQ ID NO: 79047 - DNA, 15 bp, Homo sapiens
ccaccatcttcactc

SEQ ID NO: 79048 - DNA, 15 bp, Homo sapiens
tccaccatcttcact

SEQ ID NO: 79049 - DNA, 15 bp, Homo sapiens
ctccaccatcttcac

SEQ ID NO: 79050 - DNA, 15 bp, Homo sapiens
tctccaccatcttca

SEQ ID NO: 79051 - DNA, 15 bp, Homo sapiens
ctctccaccatcttc

SEQ ID NO: 79052 - DNA, 15 bp, Homo sapiens
cctctccaccatctt

SEQ ID NO: 79053 - DNA, 15 bp, Homo sapiens
acctctccaccatct

SEQ ID NO: 79054 - DNA, 15 bp, Homo sapiens
cacctctccaccatc

SEQ ID NO: 79055 - DNA, 15 bp, Homo sapiens
tcacctctccaccat

SEQ ID NO: 79056 - DNA, 15 bp, Homo sapiens
ctcacctctccacca

SEQ ID NO: 79057 - DNA, 15 bp, Homo sapiens
cctcacctctccacc

SEQ ID NO: 79058 - DNA, 15 bp, Homo sapiens
tcctcacctctccac

SEQ ID NO: 79059 - DNA, 15 bp, Homo sapiens
atcctcacctctcca

SEQ ID NO: 79060 - DNA, 15 bp, Homo sapiens
gatcctcacctctcc

SEQ ID NO: 79061 - DNA, 15 bp, Homo sapiens
agatcctcacctctc

SEQ ID NO: 79062 - DNA, 15 bp, Homo sapiens
aagatcctcacctct

SEQ ID NO: 79063 - DNA, 15 bp, Homo sapiens
taagatcctcacctc

SEQ ID NO: 79064 - DNA, 15 bp, Homo sapiens
ataagatcctcacct

SEQ ID NO: 79065 - DNA, 15 bp, Homo sapiens
cataagatcctcacc

SEQ ID NO: 79066 - DNA, 15 bp, Homo sapiens
tcataagatcctcac

SEQ ID NO: 79067 - DNA, 15 bp, Homo sapiens
ctcataagatcctca

SEQ ID NO: 79068 - DNA, 15 bp, Homo sapiens
cctcataagatcctc

SEQ ID NO: 79069 - DNA, 15 bp, Homo sapiens
gcctcataagatcct

SEQ ID NO: 79070 - DNA, 15 bp, Homo sapiens
ggcctcataagatcc

SEQ ID NO: 79071 - DNA, 15 bp, Homo sapiens
cggcctcataagatc

SEQ ID NO: 79072 - DNA, 15 bp, Homo sapiens
acggcctcataagat

SEQ ID NO: 79073 - DNA, 15 bp, Homo sapiens
cacggcctcataaga

SEQ ID NO: 79074 - DNA, 15 bp, Homo sapiens
gcacggcctcataag

SEQ ID NO: 79075 - DNA, 15 bp, Homo sapiens
agcacggcctcataa

SEQ ID NO: 79076 - DNA, 15 bp, Homo sapiens
gagcacggcctcata

SEQ ID NO: 79077 - DNA, 15 bp, Homo sapiens
tgagcacggcctcat

SEQ ID NO: 79078 - DNA, 15 bp, Homo sapiens
ttgagcacggcctca

SEQ ID NO: 79079 - DNA, 15 bp, Homo sapiens
cttgagcacggcctc

SEQ ID NO: 79080 - DNA, 15 bp, Homo sapiens
ccttgagcacggcct

SEQ ID NO: 79081 - DNA, 15 bp, Homo sapiens
gccttgagcacggcc

SEQ ID NO: 79082 - DNA, 15 bp, Homo sapiens
agccttgagcacggc

SEQ ID NO: 79083 - DNA, 15 bp, Homo sapiens
cagccttgagcacgg

SEQ ID NO: 79084 - DNA, 15 bp, Homo sapiens
ccagccttgagcacg

SEQ ID NO: 79085 - DNA, 15 bp, Homo sapiens
accagccttgagcac

SEQ ID NO: 79086 - DNA, 15 bp, Homo sapiens
taccagccttgagca

SEQ ID NO: 79087 - DNA, 15 bp, Homo sapiens
ctaccagccttgagc

SEQ ID NO: 79088 - DNA, 15 bp, Homo sapiens
tctaccagccttgag

SEQ ID NO: 79089 - DNA, 15 bp, Homo sapiens
ctctaccagccttga

SEQ ID NO: 79090 - DNA, 15 bp, Homo sapiens
cctctaccagccttg

SEQ ID NO: 79091 - DNA, 15 bp, Homo sapiens
acctctaccagcctt

SEQ ID NO: 79092 - DNA, 15 bp, Homo sapiens
cacctctaccagcct

SEQ ID NO: 79093 - DNA, 15 bp, Homo sapiens
ccacctctaccagcc

SEQ ID NO: 79094 - DNA, 15 bp, Homo sapiens
cccacctctaccagc

SEQ ID NO: 79095 - DNA, 15 bp, Homo sapiens
acccacctctaccag

SEQ ID NO: 79096 - DNA, 15 bp, Homo sapiens
aacccacctctacca

SEQ ID NO: 79097 - DNA, 15 bp, Homo sapiens
taacccacctctacc

SEQ ID NO: 79098 - DNA, 15 bp, Homo sapiens
ctaacccacctctac

SEQ ID NO: 79099 - DNA, 15 bp, Homo sapiens
actaacccacctcta

SEQ ID NO: 79100 - DNA, 15 bp, Homo sapiens
cactaacccacctct

SEQ ID NO: 79101 - DNA, 15 bp, Homo sapiens
acactaacccacctc

SEQ ID NO: 79102 - DNA, 15 bp, Homo sapiens
aacactaacccacct

SEQ ID NO: 79103 - DNA, 15 bp, Homo sapiens
aaacactaacccacc

SEQ ID NO: 79104 - DNA, 15 bp, Homo sapiens
gaaacactaacccac

SEQ ID NO: 79105 - DNA, 15 bp, Homo sapiens
ggaaacactaaccca

SEQ ID NO: 79106 - DNA, 15 bp, Homo sapiens
tggaaacactaaccc

SEQ ID NO: 79107 - DNA, 15 bp, Homo sapiens
ctggaaacactaacc

SEQ ID NO: 79108 - DNA, 15 bp, Homo sapiens
cctggaaacactaac

SEQ ID NO: 79109 - DNA, 15 bp, Homo sapiens
acctggaaacactaa

SEQ ID NO: 79110 - DNA, 15 bp, Homo sapiens
aacctggaaacacta

SEQ ID NO: 79111 - DNA, 15 bp, Homo sapiens
aaacctggaaacact

SEQ ID NO: 79112 - DNA, 15 bp, Homo sapiens
taaacctggaaacac

SEQ ID NO: 79113 - DNA, 15 bp, Homo sapiens
ctaaacctggaaaca

SEQ ID NO: 79114 - DNA, 15 bp, Homo sapiens
cctaaacctggaaac

SEQ ID NO: 79115 - DNA, 15 bp, Homo sapiens
gcctaaacctggaaa

SEQ ID NO: 79116 - DNA, 15 bp, Homo sapiens
tgcctaaacctggaa

SEQ ID NO: 79117 - DNA, 15 bp, Homo sapiens
ctgcctaaacctgga

SEQ ID NO: 79118 - DNA, 15 bp, Homo sapiens
tctgcctaaacctgg

SEQ ID NO: 79119 - DNA, 15 bp, Homo sapiens
ttctgcctaaacctg

SEQ ID NO: 79120 - DNA, 15 bp, Homo sapiens
attctgcctaaacct

SEQ ID NO: 79121 - DNA, 15 bp, Homo sapiens
gattctgcctaaacc

SEQ ID NO: 79122 - DNA, 15 bp, Homo sapiens
agattctgcctaaac

SEQ ID NO: 79123 - DNA, 15 bp, Homo sapiens
gagattctgcctaaa

SEQ ID NO: 79124 - DNA, 15 bp, Homo sapiens
tgagattctgcctaa

SEQ ID NO: 79125 - DNA, 15 bp, Homo sapiens
ctgagattctgccta

SEQ ID NO: 79126 - DNA, 15 bp, Homo sapiens
gctgagattctgcct

SEQ ID NO: 79127 - DNA, 15 bp, Homo sapiens
agctgagattctgcc

SEQ ID NO: 79128 - DNA, 15 bp, Homo sapiens
cagctgagattctgc

SEQ ID NO: 79129 - DNA, 15 bp, Homo sapiens
tcagctgagattctg

SEQ ID NO: 79130 - DNA, 15 bp, Homo sapiens
ctcagctgagattct

SEQ ID NO: 79131 - DNA, 15 bp, Homo sapiens
cctcagctgagattc

SEQ ID NO: 79132 - DNA, 15 bp, Homo sapiens
acctcagctgagatt

SEQ ID NO: 79133 - DNA, 15 bp, Homo sapiens
gacctcagctgagat

SEQ ID NO: 79134 - DNA, 15 bp, Homo sapiens
tgacctcagctgaga

SEQ ID NO: 79135 - DNA, 15 bp, Homo sapiens
atgacctcagctgag

SEQ ID NO: 79136 - DNA, 15 bp, Homo sapiens
catgacctcagctga

SEQ ID NO: 79137 - DNA, 15 bp, Homo sapiens
tcatgacctcagctg

SEQ ID NO: 79138 - DNA, 15 bp, Homo sapiens
ttcatgacctcagct

SEQ ID NO: 79139 - DNA, 15 bp, Homo sapiens
tttcatgacctcagc

SEQ ID NO: 79140 - DNA, 15 bp, Homo sapiens
gtttcatgacctcag

SEQ ID NO: 79141 - DNA, 15 bp, Homo sapiens
tgtttcatgacctca

SEQ ID NO: 79142 - DNA, 15 bp, Homo sapiens
ttgtttcatgacctc

SEQ ID NO: 79143 - DNA, 15 bp, Homo sapiens
gttgtttcatgacct

SEQ ID NO: 79144 - DNA, 15 bp, Homo sapiens
tgttgtttcatgacc

SEQ ID NO: 79145 - DNA, 15 bp, Homo sapiens
ctgttgtttcatgac

SEQ ID NO: 79146 - DNA, 15 bp, Homo sapiens
actgttgtttcatga

SEQ ID NO: 79147 - DNA, 15 bp, Homo sapiens
cactgttgtttcatg

SEQ ID NO: 79148 - DNA, 15 bp, Homo sapiens
tcactgttgtttcat

SEQ ID NO: 79149 - DNA, 15 bp, Homo sapiens
atcactgttgtttca

SEQ ID NO: 79150 - DNA, 15 bp, Homo sapiens
gatcactgttgtttc

SEQ ID NO: 79151 - DNA, 15 bp, Homo sapiens
agatcactgttgttt

SEQ ID NO: 79152 - DNA, 15 bp, Homo sapiens
gagatcactgttgtt

SEQ ID NO: 79153 - DNA, 15 bp, Homo sapiens
agagatcactgttgt

SEQ ID NO: 79154 - DNA, 15 bp, Homo sapiens
cagagatcactgttg

SEQ ID NO: 79155 - DNA, 15 bp, Homo sapiens
tcagagatcactgtt

SEQ ID NO: 79156 - DNA, 15 bp, Homo sapiens
ttcagagatcactgt

SEQ ID NO: 79157 - DNA, 15 bp, Homo sapiens
tttcagagatcactg

SEQ ID NO: 79158 - DNA, 15 bp, Homo sapiens
ttttcagagatcact

SEQ ID NO: 79159 - DNA, 15 bp, Homo sapiens
tttttcagagatcac

SEQ ID NO: 79160 - DNA, 15 bp, Homo sapiens
atttttcagagatca

SEQ ID NO: 79161 - DNA, 15 bp, Homo sapiens
aatttttcagagatc

SEQ ID NO: 79162 - DNA, 15 bp, Homo sapiens
taatttttcagagat

SEQ ID NO: 79163 - DNA, 15 bp, Homo sapiens
ataatttttcagaga

SEQ ID NO: 79164 - DNA, 15 bp, Homo sapiens
cataatttttcagag

SEQ ID NO: 79165 - DNA, 15 bp, Homo sapiens
ccataatttttcaga

SEQ ID NO: 79166 - DNA, 15 bp, Homo sapiens
gccataatttttcag

SEQ ID NO: 79167 - DNA, 15 bp, Homo sapiens
tgccataatttttca

SEQ ID NO: 79168 - DNA, 15 bp, Homo sapiens
ttgccataatttttc

SEQ ID NO: 79169 - DNA, 15 bp, Homo sapiens
cttgccataattttt

SEQ ID NO: 79170 - DNA, 15 bp, Homo sapiens
ccttgccataatttt

SEQ ID NO: 79171 - DNA, 15 bp, Homo sapiens
accttgccataattt

SEQ ID NO: 79172 - DNA, 15 bp, Homo sapiens
caccttgccataatt

SEQ ID NO: 79173 - DNA, 15 bp, Homo sapiens
ccaccttgccataat

SEQ ID NO: 79174 - DNA, 15 bp, Homo sapiens
cccaccttgccataa

SEQ ID NO: 79175 - DNA, 15 bp, Homo sapiens
tcccaccttgccata

SEQ ID NO: 79176 - DNA, 15 bp, Homo sapiens
ttcccaccttgccat

SEQ ID NO: 79177 - DNA, 15 bp, Homo sapiens
cttcccaccttgcca

SEQ ID NO: 79178 - DNA, 15 bp, Homo sapiens
ccttcccaccttgcc

SEQ ID NO: 79179 - DNA, 15 bp, Homo sapiens
accttcccaccttgc

SEQ ID NO: 79180 - DNA, 15 bp, Homo sapiens
caccttcccaccttg

SEQ ID NO: 79181 - DNA, 15 bp, Homo sapiens
gcaccttcccacctt

SEQ ID NO: 79182 - DNA, 15 bp, Homo sapiens
agcaccttcccacct

SEQ ID NO: 79183 - DNA, 15 bp, Homo sapiens
cagcaccttcccacc

SEQ ID NO: 79184 - DNA, 15 bp, Homo sapiens
ccagcaccttcccac

SEQ ID NO: 79185 - DNA, 15 bp, Homo sapiens
tccagcaccttccca

SEQ ID NO: 79186 - DNA, 15 bp, Homo sapiens
ctccagcaccttccc

SEQ ID NO: 79187 - DNA, 15 bp, Homo sapiens
tctccagcaccttcc

SEQ ID NO: 79188 - DNA, 15 bp, Homo sapiens
ttctccagcaccttc

SEQ ID NO: 79189 - DNA, 15 bp, Homo sapiens
attctccagcacctt

SEQ ID NO: 79190 - DNA, 15 bp, Homo sapiens
aattctccagcacct

SEQ ID NO: 79191 - DNA, 15 bp, Homo sapiens
caattctccagcacc

SEQ ID NO: 79192 - DNA, 15 bp, Homo sapiens
ccaattctccagcac

SEQ ID NO: 79193 - DNA, 15 bp, Homo sapiens
tccaattctccagca

SEQ ID NO: 79194 - DNA, 15 bp, Homo sapiens
ctccaattctccagc

SEQ ID NO: 79195 - DNA, 15 bp, Homo sapiens
tctccaattctccag

SEQ ID NO: 79196 - DNA, 15 bp, Homo sapiens
ctctccaattctcca

SEQ ID NO: 79197 - DNA, 15 bp, Homo sapiens
cctctccaattctcc

SEQ ID NO: 79198 - DNA, 15 bp, Homo sapiens
ccctctccaattctc

SEQ ID NO: 79199 - DNA, 15 bp, Homo sapiens
cccctctccaattct

SEQ ID NO: 79200 - DNA, 15 bp, Homo sapiens
ccccctctccaattc

SEQ ID NO: 79201 - DNA, 15 bp, Homo sapiens
gccccctctccaatt

SEQ ID NO: 79202 - DNA, 15 bp, Homo sapiens
tgccccctctccaat

SEQ ID NO: 79203 - DNA, 15 bp, Homo sapiens
ttgccccctctccaa

SEQ ID NO: 79204 - DNA, 15 bp, Homo sapiens
tttgccccctctcca

SEQ ID NO: 79205 - DNA, 15 bp, Homo sapiens
gtttgccccctctcc

SEQ ID NO: 79206 - DNA, 15 bp, Homo sapiens
agtttgccccctctc

SEQ ID NO: 79207 - DNA, 15 bp, Homo sapiens
aagtttgccccctct

SEQ ID NO: 79208 - DNA, 15 bp, Homo sapiens
caagtttgccccctc

SEQ ID NO: 79209 - DNA, 15 bp, Homo sapiens
tcaagtttgccccct

SEQ ID NO: 79210 - DNA, 15 bp, Homo sapiens
gtcaagtttgccccc

SEQ ID NO: 79211 - DNA, 15 bp, Homo sapiens
agtcaagtttgcccc

SEQ ID NO: 79212 - DNA, 15 bp, Homo sapiens
aagtcaagtttgccc

SEQ ID NO: 79213 - DNA, 15 bp, Homo sapiens
aaagtcaagtttgcc

SEQ ID NO: 79214 - DNA, 15 bp, Homo sapiens
gaaagtcaagtttgc

SEQ ID NO: 79215 - DNA, 15 bp, Homo sapiens
tgaaagtcaagtttg

SEQ ID NO: 79216 - DNA, 15 bp, Homo sapiens
ttgaaagtcaagttt

SEQ ID NO: 79217 - DNA, 15 bp, Homo sapiens
cttgaaagtcaagtt

SEQ ID NO: 79218 - DNA, 15 bp, Homo sapiens
acttgaaagtcaagt

SEQ ID NO: 79219 - DNA, 15 bp, Homo sapiens
aacttgaaagtcaag

SEQ ID NO: 79220 - DNA, 15 bp, Homo sapiens
aaacttgaaagtcaa

SEQ ID NO: 79221 - DNA, 15 bp, Homo sapiens
gaaacttgaaagtca

SEQ ID NO: 79222 - DNA, 15 bp, Homo sapiens
tgaaacttgaaagtc

SEQ ID NO: 79223 - DNA, 15 bp, Homo sapiens
ttgaaacttgaaagt

SEQ ID NO: 79224 - DNA, 15 bp, Homo sapiens
attgaaacttgaaag

SEQ ID NO: 79225 - DNA, 15 bp, Homo sapiens
cattgaaacttgaaa

SEQ ID NO: 79226 - DNA, 15 bp, Homo sapiens
ccattgaaacttgaa

SEQ ID NO: 79227 - DNA, 15 bp, Homo sapiens
cccattgaaacttga

SEQ ID NO: 79228 - DNA, 15 bp, Homo sapiens
tcccattgaaacttg

SEQ ID NO: 79229 - DNA, 15 bp, Homo sapiens
ttcccattgaaactt

SEQ ID NO: 79230 - DNA, 15 bp, Homo sapiens
cttcccattgaaact

SEQ ID NO: 79231 - DNA, 15 bp, Homo sapiens
tcttcccattgaaac

SEQ ID NO: 79232 - DNA, 15 bp, Homo sapiens
atcttcccattgaaa

SEQ ID NO: 79233 - DNA, 15 bp, Homo sapiens
tatcttcccattgaa

SEQ ID NO: 79234 - DNA, 15 bp, Homo sapiens
ctatcttcccattga

SEQ ID NO: 79235 - DNA, 15 bp, Homo sapiens
cctatcttcccattg

SEQ ID NO: 79236 - DNA, 15 bp, Homo sapiens
acctatcttcccatt

SEQ ID NO: 79237 - DNA, 15 bp, Homo sapiens
cacctatcttcccat

SEQ ID NO: 79238 - DNA, 15 bp, Homo sapiens
tcacctatcttccca

SEQ ID NO: 79239 - DNA, 15 bp, Homo sapiens
gtcacctatcttccc

SEQ ID NO: 79240 - DNA, 15 bp, Homo sapiens
agtcacctatcttcc

SEQ ID NO: 79241 - DNA, 15 bp, Homo sapiens
gagtcacctatcttc

SEQ ID NO: 79242 - DNA, 15 bp, Homo sapiens
agagtcacctatctt

SEQ ID NO: 79243 - DNA, 15 bp, Homo sapiens
cagagtcacctatct

SEQ ID NO: 79244 - DNA, 15 bp, Homo sapiens
gcagagtcacctatc

SEQ ID NO: 79245 - DNA, 15 bp, Homo sapiens
tgcagagtcacctat

SEQ ID NO: 79246 - DNA, 15 bp, Homo sapiens
gtgcagagtcaccta

SEQ ID NO: 79247 - DNA, 15 bp, Homo sapiens
tgtgcagagtcacct

SEQ ID NO: 79248 - DNA, 15 bp, Homo sapiens
gtgtgcagagtcacc

SEQ ID NO: 79249 - DNA, 15 bp, Homo sapiens
ggtgtgcagagtcac

SEQ ID NO: 79250 - DNA, 15 bp, Homo sapiens
tggtgtgcagagtca

SEQ ID NO: 79251 - DNA, 15 bp, Homo sapiens
gtggtgtgcagagtc

SEQ ID NO: 79252 - DNA, 15 bp, Homo sapiens
tgtggtgtgcagagt

SEQ ID NO: 79253 - DNA, 15 bp, Homo sapiens
ctgtggtgtgcagag

SEQ ID NO: 79254 - DNA, 15 bp, Homo sapiens
tctgtggtgtgcaga

SEQ ID NO: 79255 - DNA, 15 bp, Homo sapiens
ttctgtggtgtgcag

SEQ ID NO: 79256 - DNA, 15 bp, Homo sapiens
gttctgtggtgtgca

SEQ ID NO: 79257 - DNA, 15 bp, Homo sapiens
tgttctgtggtgtgc

SEQ ID NO: 79258 - DNA, 15 bp, Homo sapiens
ctgttctgtggtgtg

SEQ ID NO: 79259 - DNA, 15 bp, Homo sapiens
actgttctgtggtgt

SEQ ID NO: 79260 - DNA, 15 bp, Homo sapiens
cactgttctgtggtg

SEQ ID NO: 79261 - DNA, 15 bp, Homo sapiens
tcactgttctgtggt

SEQ ID NO: 79262 - DNA, 15 bp, Homo sapiens
ctcactgttctgtgg

SEQ ID NO: 79263 - DNA, 15 bp, Homo sapiens
gctcactgttctgtg

SEQ ID NO: 79264 - DNA, 15 bp, Homo sapiens
tgctcactgttctgt

SEQ ID NO: 79265 - DNA, 15 bp, Homo sapiens
atgctcactgttctg

SEQ ID NO: 79266 - DNA, 15 bp, Homo sapiens
catgctcactgttct

SEQ ID NO: 79267 - DNA, 15 bp, Homo sapiens
tcatgctcactgttc

SEQ ID NO: 79268 - DNA, 15 bp, Homo sapiens
atcatgctcactgtt

SEQ ID NO: 79269 - DNA, 15 bp, Homo sapiens
tatcatgctcactgt

SEQ ID NO: 79270 - DNA, 15 bp, Homo sapiens
ttatcatgctcactg

SEQ ID NO: 79271 - DNA, 15 bp, Homo sapiens
gttatcatgctcact

SEQ ID NO: 79272 - DNA, 15 bp, Homo sapiens
ggttatcatgctcac

SEQ ID NO: 79273 - DNA, 15 bp, Homo sapiens
aggttatcatgctca

SEQ ID NO: 79274 - DNA, 15 bp, Homo sapiens
caggttatcatgctc

SEQ ID NO: 79275 - DNA, 15 bp, Homo sapiens
acaggttatcatgct

SEQ ID NO: 79276 - DNA, 15 bp, Homo sapiens
aacaggttatcatgc

SEQ ID NO: 79277 - DNA, 15 bp, Homo sapiens
aaacaggttatcatg

SEQ ID NO: 79278 - DNA, 15 bp, Homo sapiens
taaacaggttatcat

SEQ ID NO: 79279 - DNA, 15 bp, Homo sapiens
ataaacaggttatca

SEQ ID NO: 79280 - DNA, 15 bp, Homo sapiens
tataaacaggttatc

SEQ ID NO: 79281 - DNA, 15 bp, Homo sapiens
gtataaacaggttat

SEQ ID NO: 79282 - DNA, 15 bp, Homo sapiens
tgtataaacaggtta

SEQ ID NO: 79283 - DNA, 15 bp, Homo sapiens
ttgtataaacaggtt

SEQ ID NO: 79284 - DNA, 15 bp, Homo sapiens
cttgtataaacaggt

SEQ ID NO: 79285 - DNA, 15 bp, Homo sapiens
ccttgtataaacagg

SEQ ID NO: 79286 - DNA, 15 bp, Homo sapiens
accttgtataaacag

SEQ ID NO: 79287 - DNA, 15 bp, Homo sapiens
aaccttgtataaaca

SEQ ID NO: 79288 - DNA, 15 bp, Homo sapiens
gaaccttgtataaac

SEQ ID NO: 79289 - DNA, 15 bp, Homo sapiens
agaaccttgtataaa

SEQ ID NO: 79290 - DNA, 15 bp, Homo sapiens
tagaaccttgtataa

SEQ ID NO: 79291 - DNA, 15 bp, Homo sapiens
ctagaaccttgtata

SEQ ID NO: 79292 - DNA, 15 bp, Homo sapiens
tctagaaccttgtat

SEQ ID NO: 79293 - DNA, 15 bp, Homo sapiens
ctctagaaccttgta

SEQ ID NO: 79294 - DNA, 15 bp, Homo sapiens
gctctagaaccttgt

SEQ ID NO: 79295 - DNA, 15 bp, Homo sapiens
tgctctagaaccttg

SEQ ID NO: 79296 - DNA, 15 bp, Homo sapiens
ctgctctagaacctt

SEQ ID NO: 79297 - DNA, 15 bp, Homo sapiens
tctgctctagaacct

SEQ ID NO: 79298 - DNA, 15 bp, Homo sapiens
atctgctctagaacc

SEQ ID NO: 79299 - DNA, 15 bp, Homo sapiens
aatctgctctagaac

SEQ ID NO: 79300 - DNA, 15 bp, Homo sapiens
aaatctgctctagaa

SEQ ID NO: 79301 - DNA, 15 bp, Homo sapiens
gaaatctgctctaga

SEQ ID NO: 79302 - DNA, 15 bp, Homo sapiens
agaaatctgctctag

SEQ ID NO: 79303 - DNA, 15 bp, Homo sapiens
tagaaatctgctcta

SEQ ID NO: 79304 - DNA, 15 bp, Homo sapiens
ttagaaatctgctct

SEQ ID NO: 79305 - DNA, 15 bp, Homo sapiens
tttagaaatctgctc

SEQ ID NO: 79306 - DNA, 15 bp, Homo sapiens
atttagaaatctgct

SEQ ID NO: 79307 - DNA, 15 bp, Homo sapiens
catttagaaatctgc

SEQ ID NO: 79308 - DNA, 15 bp, Homo sapiens
ccatttagaaatctg

SEQ ID NO: 79309 - DNA, 15 bp, Homo sapiens
tccatttagaaatct

SEQ ID NO: 79310 - DNA, 15 bp, Homo sapiens
atccatttagaaatc

SEQ ID NO: 79311 - DNA, 15 bp, Homo sapiens
tatccatttagaaat

SEQ ID NO: 79312 - DNA, 15 bp, Homo sapiens
ctatccatttagaaa

SEQ ID NO: 79313 - DNA, 15 bp, Homo sapiens
gctatccatttagaa

SEQ ID NO: 79314 - DNA, 15 bp, Homo sapiens
agctatccatttaga

SEQ ID NO: 79315 - DNA, 15 bp, Homo sapiens
tagctatccatttag

SEQ ID NO: 79316 - DNA, 15 bp, Homo sapiens
gtagctatccattta

SEQ ID NO: 79317 - DNA, 15 bp, Homo sapiens
agtagctatccattt

SEQ ID NO: 79318 - DNA, 15 bp, Homo sapiens
cagtagctatccatt

SEQ ID NO: 79319 - DNA, 15 bp, Homo sapiens
acagtagctatccat

SEQ ID NO: 79320 - DNA, 15 bp, Homo sapiens
cacagtagctatcca

SEQ ID NO: 79321 - DNA, 15 bp, Homo sapiens
acacagtagctatcc

SEQ ID NO: 79322 - DNA, 15 bp, Homo sapiens
cacacagtagctatc

SEQ ID NO: 79323 - DNA, 15 bp, Homo sapiens
gcacacagtagctat

SEQ ID NO: 79324 - DNA, 15 bp, Homo sapiens
agcacacagtagcta

SEQ ID NO: 79325 - DNA, 15 bp, Homo sapiens
aagcacacagtagct

SEQ ID NO: 79326 - DNA, 15 bp, Homo sapiens
caagcacacagtagc

SEQ ID NO: 79327 - DNA, 15 bp, Homo sapiens
acaagcacacagtag

SEQ ID NO: 79328 - DNA, 15 bp, Homo sapiens
aacaagcacacagta

SEQ ID NO: 79329 - DNA, 15 bp, Homo sapiens
aaacaagcacacagt

SEQ ID NO: 79330 - DNA, 15 bp, Homo sapiens
caaacaagcacacag

SEQ ID NO: 79331 - DNA, 15 bp, Homo sapiens
acaaacaagcacaca

SEQ ID NO: 79332 - DNA, 15 bp, Homo sapiens
aacaaacaagcacac

SEQ ID NO: 79333 - DNA, 15 bp, Homo sapiens
gaacaaacaagcaca

SEQ ID NO: 79334 - DNA, 15 bp, Homo sapiens
agaacaaacaagcac

SEQ ID NO: 79335 - DNA, 15 bp, Homo sapiens
aagaacaaacaagca

SEQ ID NO: 79336 - DNA, 15 bp, Homo sapiens
taagaacaaacaagc

SEQ ID NO: 79337 - DNA, 15 bp, Homo sapiens
ttaagaacaaacaag

SEQ ID NO: 79338 - DNA, 15 bp, Homo sapiens
attaagaacaaacaa

SEQ ID NO: 79339 - DNA, 15 bp, Homo sapiens
aattaagaacaaaca

SEQ ID NO: 79340 - DNA, 15 bp, Homo sapiens
taattaagaacaaac

SEQ ID NO: 79341 - DNA, 15 bp, Homo sapiens
ctaattaagaacaaa

SEQ ID NO: 79342 - DNA, 15 bp, Homo sapiens
actaattaagaacaa

SEQ ID NO: 79343 - DNA, 15 bp, Homo sapiens
tactaattaagaaca

SEQ ID NO: 79344 - DNA, 15 bp, Homo sapiens
atactaattaagaac

SEQ ID NO: 79345 - DNA, 15 bp, Homo sapiens
aatactaattaagaa

SEQ ID NO: 79346 - DNA, 15 bp, Homo sapiens
caatactaattaaga

SEQ ID NO: 79347 - DNA, 15 bp, Homo sapiens
ccaatactaattaag

SEQ ID NO: 79348 - DNA, 15 bp, Homo sapiens
tccaatactaattaa

SEQ ID NO: 79349 - DNA, 15 bp, Homo sapiens
atccaatactaatta

SEQ ID NO: 79350 - DNA, 15 bp, Homo sapiens
tatccaatactaatt

SEQ ID NO: 79351 - DNA, 15 bp, Homo sapiens
ctatccaatactaat

SEQ ID NO: 79352 - DNA, 15 bp, Homo sapiens
actatccaatactaa

SEQ ID NO: 79353 - DNA, 15 bp, Homo sapiens
aactatccaatacta

SEQ ID NO: 79354 - DNA, 15 bp, Homo sapiens
taactatccaatact

SEQ ID NO: 79355 - DNA, 15 bp, Homo sapiens
gtaactatccaatac

SEQ ID NO: 79356 - DNA, 15 bp, Homo sapiens
agtaactatccaata

SEQ ID NO: 79357 - DNA, 15 bp, Homo sapiens
tagtaactatccaat

SEQ ID NO: 79358 - DNA, 15 bp, Homo sapiens
ttagtaactatccaa

SEQ ID NO: 79359 - DNA, 15 bp, Homo sapiens
tttagtaactatcca

SEQ ID NO: 79360 - DNA, 15 bp, Homo sapiens
atttagtaactatcc

SEQ ID NO: 79361 - DNA, 15 bp, Homo sapiens
tatttagtaactatc

SEQ ID NO: 79362 - DNA, 15 bp, Homo sapiens
gtatttagtaactat

SEQ ID NO: 79363 - DNA, 15 bp, Homo sapiens
agtatttagtaacta

SEQ ID NO: 79364 - DNA, 15 bp, Homo sapiens
aagtatttagtaact

SEQ ID NO: 79365 - DNA, 15 bp, Homo sapiens
caagtatttagtaac

SEQ ID NO: 79366 - DNA, 15 bp, Homo sapiens
acaagtatttagtaa

SEQ ID NO: 79367 - DNA, 15 bp, Homo sapiens
aacaagtatttagta

SEQ ID NO: 79368 - DNA, 15 bp, Homo sapiens
taacaagtatttagt

SEQ ID NO: 79369 - DNA, 15 bp, Homo sapiens
ctaacaagtatttag

SEQ ID NO: 79370 - DNA, 15 bp, Homo sapiens
actaacaagtattta

SEQ ID NO: 79371 - DNA, 15 bp, Homo sapiens
tactaacaagtattt

SEQ ID NO: 79372 - DNA, 15 bp, Homo sapiens
gtactaacaagtatt

SEQ ID NO: 79373 - DNA, 15 bp, Homo sapiens
agtactaacaagtat

SEQ ID NO: 79374 - DNA, 15 bp, Homo sapiens
aagtactaacaagta

SEQ ID NO: 79375 - DNA, 15 bp, Homo sapiens
taagtactaacaagt

SEQ ID NO: 79376 - DNA, 15 bp, Homo sapiens
ctaagtactaacaag

SEQ ID NO: 79377 - DNA, 15 bp, Homo sapiens
actaagtactaacaa

SEQ ID NO: 79378 - DNA, 15 bp, Homo sapiens
tactaagtactaaca

SEQ ID NO: 79379 - DNA, 15 bp, Homo sapiens
gtactaagtactaac

SEQ ID NO: 79380 - DNA, 15 bp, Homo sapiens
tgtactaagtactaa

SEQ ID NO: 79381 - DNA, 15 bp, Homo sapiens
atgtactaagtacta

SEQ ID NO: 79382 - DNA, 15 bp, Homo sapiens
tatgtactaagtact

SEQ ID NO: 79383 - DNA, 15 bp, Homo sapiens
ttatgtactaagtac

SEQ ID NO: 79384 - DNA, 15 bp, Homo sapiens
attatgtactaagta

SEQ ID NO: 79385 - DNA, 15 bp, Homo sapiens
cattatgtactaagt

SEQ ID NO: 79386 - DNA, 15 bp, Homo sapiens
ccattatgtactaag

SEQ ID NO: 79387 - DNA, 15 bp, Homo sapiens
cccattatgtactaa

SEQ ID NO: 79388 - DNA, 15 bp, Homo sapiens
acccattatgtacta

SEQ ID NO: 79389 - DNA, 15 bp, Homo sapiens
cacccattatgtact

SEQ ID NO: 79390 - DNA, 15 bp, Homo sapiens
ccacccattatgtac

SEQ ID NO: 79391 - DNA, 15 bp, Homo sapiens
accacccattatgta

SEQ ID NO: 79392 - DNA, 15 bp, Homo sapiens
taccacccattatgt

SEQ ID NO: 79393 - DNA, 15 bp, Homo sapiens
ttaccacccattatg

SEQ ID NO: 79394 - DNA, 15 bp, Homo sapiens
tttaccacccattat

SEQ ID NO: 79395 - DNA, 15 bp, Homo sapiens
atttaccacccatta

SEQ ID NO: 79396 - DNA, 15 bp, Homo sapiens
gatttaccacccatt

SEQ ID NO: 79397 - DNA, 15 bp, Homo sapiens
ggatttaccacccat

SEQ ID NO: 79398 - DNA, 15 bp, Homo sapiens
aggatttaccaccca

SEQ ID NO: 79399 - DNA, 15 bp, Homo sapiens
taggatttaccaccc

SEQ ID NO: 79400 - DNA, 15 bp, Homo sapiens
ctaggatttaccacc

SEQ ID NO: 79401 - DNA, 15 bp, Homo sapiens
gctaggatttaccac

SEQ ID NO: 79402 - DNA, 15 bp, Homo sapiens
tgctaggatttacca

SEQ ID NO: 79403 - DNA, 15 bp, Homo sapiens
ctgctaggatttacc

SEQ ID NO: 79404 - DNA, 15 bp, Homo sapiens
gctgctaggatttac

SEQ ID NO: 79405 - DNA, 15 bp, Homo sapiens
agctgctaggattta

SEQ ID NO: 79406 - DNA, 15 bp, Homo sapiens
tagctgctaggattt

SEQ ID NO: 79407 - DNA, 15 bp, Homo sapiens
ttagctgctaggatt

SEQ ID NO: 79408 - DNA, 15 bp, Homo sapiens
attagctgctaggat

SEQ ID NO: 79409 - DNA, 15 bp, Homo sapiens
tattagctgctagga

SEQ ID NO: 79410 - DNA, 15 bp, Homo sapiens
atattagctgctagg

SEQ ID NO: 79411 - DNA, 15 bp, Homo sapiens
aatattagctgctag

SEQ ID NO: 79412 - DNA, 15 bp, Homo sapiens
caatattagctgcta

SEQ ID NO: 79413 - DNA, 15 bp, Homo sapiens
ccaatattagctgct

SEQ ID NO: 79414 - DNA, 15 bp, Homo sapiens
accaatattagctgc

SEQ ID NO: 79415 - DNA, 15 bp, Homo sapiens
aaccaatattagctg

SEQ ID NO: 79416 - DNA, 15 bp, Homo sapiens
gaaccaatattagct

SEQ ID NO: 79417 - DNA, 15 bp, Homo sapiens
ggaaccaatattagc

SEQ ID NO: 79418 - DNA, 15 bp, Homo sapiens
gggaaccaatattag

SEQ ID NO: 79419 - DNA, 15 bp, Homo sapiens
tgggaaccaatatta

SEQ ID NO: 79420 - DNA, 15 bp, Homo sapiens
ttgggaaccaatatt

SEQ ID NO: 79421 - DNA, 15 bp, Homo sapiens
tttgggaaccaatat

SEQ ID NO: 79422 - DNA, 15 bp, Homo sapiens
atttgggaaccaata

SEQ ID NO: 79423 - DNA, 15 bp, Homo sapiens
tatttgggaaccaat

SEQ ID NO: 79424 - DNA, 15 bp, Homo sapiens
ttatttgggaaccaa

SEQ ID NO: 79425 - DNA, 15 bp, Homo sapiens
gttatttgggaacca

SEQ ID NO: 79426 - DNA, 15 bp, Homo sapiens
ggttatttgggaacc

SEQ ID NO: 79427 - DNA, 15 bp, Homo sapiens
tggttatttgggaac

SEQ ID NO: 79428 - DNA, 15 bp, Homo sapiens
ctggttatttgggaa

SEQ ID NO: 79429 - DNA, 15 bp, Homo sapiens
tctggttatttggga

SEQ ID NO: 79430 - DNA, 15 bp, Homo sapiens
atctggttatttggg

SEQ ID NO: 79431 - DNA, 15 bp, Homo sapiens
catctggttatttgg

SEQ ID NO: 79432 - DNA, 15 bp, Homo sapiens
tcatctggttatttg

SEQ ID NO: 79433 - DNA, 15 bp, Homo sapiens
gtcatctggttattt

SEQ ID NO: 79434 - DNA, 15 bp, Homo sapiens
tgtcatctggttatt

SEQ ID NO: 79435 - DNA, 15 bp, Homo sapiens
ttgtcatctggttat

SEQ ID NO: 79436 - DNA, 15 bp, Homo sapiens
cttgtcatctggtta

SEQ ID NO: 79437 - DNA, 15 bp, Homo sapiens
ccttgtcatctggtt

SEQ ID NO: 79438 - DNA, 15 bp, Homo sapiens
tccttgtcatctggt

SEQ ID NO: 79439 - DNA, 15 bp, Homo sapiens
atccttgtcatctgg

SEQ ID NO: 79440 - DNA, 15 bp, Homo sapiens
tatccttgtcatctg

SEQ ID NO: 79441 - DNA, 15 bp, Homo sapiens
ctatccttgtcatct

SEQ ID NO: 79442 - DNA, 15 bp, Homo sapiens
tctatccttgtcatc

SEQ ID NO: 79443 - DNA, 15 bp, Homo sapiens
ctctatccttgtcat

SEQ ID NO: 79444 - DNA, 15 bp, Homo sapiens
tctctatccttgtca

SEQ ID NO: 79445 - DNA, 15 bp, Homo sapiens
ttctctatccttgtc

SEQ ID NO: 79446 - DNA, 15 bp, Homo sapiens
cttctctatccttgt

SEQ ID NO: 79447 - DNA, 15 bp, Homo sapiens
ccttctctatccttg

SEQ ID NO: 79448 - DNA, 15 bp, Homo sapiens
tccttctctatcctt

SEQ ID NO: 79449 - DNA, 15 bp, Homo sapiens
gtccttctctatcct

SEQ ID NO: 79450 - DNA, 15 bp, Homo sapiens
tgtccttctctatcc

SEQ ID NO: 79451 - DNA, 15 bp, Homo sapiens
gtgtccttctctatc

SEQ ID NO: 79452 - DNA, 15 bp, Homo sapiens
tgtgtccttctctat

SEQ ID NO: 79453 - DNA, 15 bp, Homo sapiens
ctgtgtccttctcta

SEQ ID NO: 79454 - DNA, 15 bp, Homo sapiens
tctgtgtccttctct

SEQ ID NO: 79455 - DNA, 15 bp, Homo sapiens
gtctgtgtccttctc

SEQ ID NO: 79456 - DNA, 15 bp, Homo sapiens
tgtctgtgtccttct

SEQ ID NO: 79457 - DNA, 15 bp, Homo sapiens
gtgtctgtgtccttc

SEQ ID NO: 79458 - DNA, 15 bp, Homo sapiens
cgtgtctgtgtcctt

SEQ ID NO: 79459 - DNA, 15 bp, Homo sapiens
ccgtgtctgtgtcct

SEQ ID NO: 79460 - DNA, 15 bp, Homo sapiens
gccgtgtctgtgtcc

SEQ ID NO: 79461 - DNA, 15 bp, Homo sapiens
ggccgtgtctgtgtc

SEQ ID NO: 79462 - DNA, 15 bp, Homo sapiens
aggccgtgtctgtgt

SEQ ID NO: 79463 - DNA, 15 bp, Homo sapiens
taggccgtgtctgtg

SEQ ID NO: 79464 - DNA, 15 bp, Homo sapiens
ataggccgtgtctgt

SEQ ID NO: 79465 - DNA, 15 bp, Homo sapiens
gataggccgtgtctg

SEQ ID NO: 79466 - DNA, 15 bp, Homo sapiens
agataggccgtgtct

SEQ ID NO: 79467 - DNA, 15 bp, Homo sapiens
cagataggccgtgtc

SEQ ID NO: 79468 - DNA, 15 bp, Homo sapiens
ccagataggccgtgt

SEQ ID NO: 79469 - DNA, 15 bp, Homo sapiens
tccagataggccgtg

SEQ ID NO: 79470 - DNA, 15 bp, Homo sapiens
atccagataggccgt

SEQ ID NO: 79471 - DNA, 15 bp, Homo sapiens
aatccagataggccg

SEQ ID NO: 79472 - DNA, 15 bp, Homo sapiens
aaatccagataggcc

SEQ ID NO: 79473 - DNA, 15 bp, Homo sapiens
gaaatccagataggc

SEQ ID NO: 79474 - DNA, 15 bp, Homo sapiens
tgaaatccagatagg

SEQ ID NO: 79475 - DNA, 15 bp, Homo sapiens
atgaaatccagatag

SEQ ID NO: 79476 - DNA, 15 bp, Homo sapiens
catgaaatccagata

SEQ ID NO: 79477 - DNA, 15 bp, Homo sapiens
ccatgaaatccagat

SEQ ID NO: 79478 - DNA, 15 bp, Homo sapiens
accatgaaatccaga

SEQ ID NO: 79479 - DNA, 15 bp, Homo sapiens
caccatgaaatccag

SEQ ID NO: 79480 - DNA, 15 bp, Homo sapiens
gcaccatgaaatcca

SEQ ID NO: 79481 - DNA, 15 bp, Homo sapiens
ggcaccatgaaatcc

SEQ ID NO: 79482 - DNA, 15 bp, Homo sapiens
aggcaccatgaaatc

SEQ ID NO: 79483 - DNA, 15 bp, Homo sapiens
aaggcaccatgaaat

SEQ ID NO: 79484 - DNA, 15 bp, Homo sapiens
aaaggcaccatgaaa

SEQ ID NO: 79485 - DNA, 15 bp, Homo sapiens
caaaggcaccatgaa

SEQ ID NO: 79486 - DNA, 15 bp, Homo sapiens
tcaaaggcaccatga

SEQ ID NO: 79487 - DNA, 15 bp, Homo sapiens
atcaaaggcaccatg

SEQ ID NO: 79488 - DNA, 15 bp, Homo sapiens
aatcaaaggcaccat

SEQ ID NO: 79489 - DNA, 15 bp, Homo sapiens
aaatcaaaggcacca

SEQ ID NO: 79490 - DNA, 15 bp, Homo sapiens
aaaatcaaaggcacc

SEQ ID NO: 79491 - DNA, 15 bp, Homo sapiens
gaaaatcaaaggcac

SEQ ID NO: 79492 - DNA, 15 bp, Homo sapiens
ggaaaatcaaaggca

SEQ ID NO: 79493 - DNA, 15 bp, Homo sapiens
tggaaaatcaaaggc

SEQ ID NO: 79494 - DNA, 15 bp, Homo sapiens
gtggaaaatcaaagg

SEQ ID NO: 79495 - DNA, 15 bp, Homo sapiens
tgtggaaaatcaaag

SEQ ID NO: 79496 - DNA, 15 bp, Homo sapiens
atgtggaaaatcaaa

SEQ ID NO: 79497 - DNA, 15 bp, Homo sapiens
catgtggaaaatcaa

SEQ ID NO: 79498 - DNA, 15 bp, Homo sapiens
tcatgtggaaaatca

SEQ ID NO: 79499 - DNA, 15 bp, Homo sapiens
ttcatgtggaaaatc

SEQ ID NO: 79500 - DNA, 15 bp, Homo sapiens
cttcatgtggaaaat

SEQ ID NO: 79501 - DNA, 15 bp, Homo sapiens
ccttcatgtggaaaa

SEQ ID NO: 79502 - DNA, 15 bp, Homo sapiens
accttcatgtggaaa

SEQ ID NO: 79503 - DNA, 15 bp, Homo sapiens
aaccttcatgtggaa

SEQ ID NO: 79504 - DNA, 15 bp, Homo sapiens
caaccttcatgtgga

SEQ ID NO: 79505 - DNA, 15 bp, Homo sapiens
acaaccttcatgtgg

SEQ ID NO: 79506 - DNA, 15 bp, Homo sapiens
cacaaccttcatgtg

SEQ ID NO: 79507 - DNA, 15 bp, Homo sapiens
acacaaccttcatgt

SEQ ID NO: 79508 - DNA, 15 bp, Homo sapiens
tacacaaccttcatg

SEQ ID NO: 79509 - DNA, 15 bp, Homo sapiens
ctacacaaccttcat

SEQ ID NO: 79510 - DNA, 15 bp, Homo sapiens
cctacacaaccttca

SEQ ID NO: 79511 - DNA, 15 bp, Homo sapiens
ccctacacaaccttc

SEQ ID NO: 79512 - DNA, 15 bp, Homo sapiens
tccctacacaacctt

SEQ ID NO: 79513 - DNA, 15 bp, Homo sapiens
ttccctacacaacct

SEQ ID NO: 79514 - DNA, 15 bp, Homo sapiens
cttccctacacaacc

SEQ ID NO: 79515 - DNA, 15 bp, Homo sapiens
tcttccctacacaac

SEQ ID NO: 79516 - DNA, 15 bp, Homo sapiens
atcttccctacacaa

SEQ ID NO: 79517 - DNA, 15 bp, Homo sapiens
tatcttccctacaca

SEQ ID NO: 79518 - DNA, 15 bp, Homo sapiens
ctatcttccctacac

SEQ ID NO: 79519 - DNA, 15 bp, Homo sapiens
tctatcttccctaca

SEQ ID NO: 79520 - DNA, 15 bp, Homo sapiens
ttctatcttccctac

SEQ ID NO: 79521 - DNA, 15 bp, Homo sapiens
cttctatcttcccta

SEQ ID NO: 79522 - DNA, 15 bp, Homo sapiens
gcttctatcttccct

SEQ ID NO: 79523 - DNA, 15 bp, Homo sapiens
tgcttctatcttccc

SEQ ID NO: 79524 - DNA, 15 bp, Homo sapiens
atgcttctatcttcc

SEQ ID NO: 79525 - DNA, 15 bp, Homo sapiens
catgcttctatcttc

SEQ ID NO: 79526 - DNA, 15 bp, Homo sapiens
tcatgcttctatctt

SEQ ID NO: 79527 - DNA, 15 bp, Homo sapiens
ctcatgcttctatct

SEQ ID NO: 79528 - DNA, 15 bp, Homo sapiens
tctcatgcttctatc

SEQ ID NO: 79529 - DNA, 15 bp, Homo sapiens
atctcatgcttctat

SEQ ID NO: 79530 - DNA, 15 bp, Homo sapiens
catctcatgcttcta

SEQ ID NO: 79531 - DNA, 15 bp, Homo sapiens
tcatctcatgcttct

SEQ ID NO: 79532 - DNA, 15 bp, Homo sapiens
ctcatctcatgcttc

SEQ ID NO: 79533 - DNA, 15 bp, Homo sapiens
tctcatctcatgctt

SEQ ID NO: 79534 - DNA, 15 bp, Homo sapiens
atctcatctcatgct

SEQ ID NO: 79535 - DNA, 15 bp, Homo sapiens
catctcatctcatgc

SEQ ID NO: 79536 - DNA, 15 bp, Homo sapiens
tcatctcatctcatg

SEQ ID NO: 79537 - DNA, 15 bp, Homo sapiens
atcatctcatctcat

SEQ ID NO: 79538 - DNA, 15 bp, Homo sapiens
tatcatctcatctca

SEQ ID NO: 79539 - DNA, 15 bp, Homo sapiens
ttatcatctcatctc

SEQ ID NO: 79540 - DNA, 15 bp, Homo sapiens
attatcatctcatct

SEQ ID NO: 79541 - DNA, 15 bp, Homo sapiens
tattatcatctcatc

SEQ ID NO: 79542 - DNA, 15 bp, Homo sapiens
atattatcatctcat

SEQ ID NO: 79543 - DNA, 15 bp, Homo sapiens
tatattatcatctca

SEQ ID NO: 79544 - DNA, 15 bp, Homo sapiens
ctatattatcatctc

SEQ ID NO: 79545 - DNA, 15 bp, Homo sapiens
actatattatcatct

SEQ ID NO: 79546 - DNA, 15 bp, Homo sapiens
aactatattatcatc

SEQ ID NO: 79547 - DNA, 15 bp, Homo sapiens
taactatattatcat

SEQ ID NO: 79548 - DNA, 15 bp, Homo sapiens
ataactatattatca

SEQ ID NO: 79549 - DNA, 15 bp, Homo sapiens
gataactatattatc

SEQ ID NO: 79550 - DNA, 15 bp, Homo sapiens
agataactatattat

SEQ ID NO: 79551 - DNA, 15 bp, Homo sapiens
cagataactatatta

SEQ ID NO: 79552 - DNA, 15 bp, Homo sapiens
ccagataactatatt

SEQ ID NO: 79553 - DNA, 15 bp, Homo sapiens
tccagataactatat

SEQ ID NO: 79554 - DNA, 15 bp, Homo sapiens
atccagataactata

SEQ ID NO: 79555 - DNA, 15 bp, Homo sapiens
aatccagataactat

SEQ ID NO: 79556 - DNA, 15 bp, Homo sapiens
gaatccagataacta

SEQ ID NO: 79557 - DNA, 15 bp, Homo sapiens
tgaatccagataact

SEQ ID NO: 79558 - DNA, 15 bp, Homo sapiens
atgaatccagataac

SEQ ID NO: 79559 - DNA, 15 bp, Homo sapiens
gatgaatccagataa

SEQ ID NO: 79560 - DNA, 15 bp, Homo sapiens
tgatgaatccagata

SEQ ID NO: 79561 - DNA, 15 bp, Homo sapiens
gtgatgaatccagat

SEQ ID NO: 79562 - DNA, 15 bp, Homo sapiens
agtgatgaatccaga

SEQ ID NO: 79563 - DNA, 15 bp, Homo sapiens
cagtgatgaatccag

SEQ ID NO: 79564 - DNA, 15 bp, Homo sapiens
ccagtgatgaatcca

SEQ ID NO: 79565 - DNA, 15 bp, Homo sapiens
gccagtgatgaatcc

SEQ ID NO: 79566 - DNA, 15 bp, Homo sapiens
ggccagtgatgaatc

SEQ ID NO: 79567 - DNA, 15 bp, Homo sapiens
tggccagtgatgaat

SEQ ID NO: 79568 - DNA, 15 bp, Homo sapiens
ctggccagtgatgaa

SEQ ID NO: 79569 - DNA, 15 bp, Homo sapiens
gctggccagtgatga

SEQ ID NO: 79570 - DNA, 15 bp, Homo sapiens
agctggccagtgatg

SEQ ID NO: 79571 - DNA, 15 bp, Homo sapiens
cagctggccagtgat

SEQ ID NO: 79572 - DNA, 15 bp, Homo sapiens
tcagctggccagtga

SEQ ID NO: 79573 - DNA, 15 bp, Homo sapiens
ttcagctggccagtg

SEQ ID NO: 79574 - DNA, 15 bp, Homo sapiens
gttcagctggccagt

SEQ ID NO: 79575 - DNA, 15 bp, Homo sapiens
ggttcagctggccag

SEQ ID NO: 79576 - DNA, 15 bp, Homo sapiens
tggttcagctggcca

SEQ ID NO: 79577 - DNA, 15 bp, Homo sapiens
atggttcagctggcc

SEQ ID NO: 79578 - DNA, 15 bp, Homo sapiens
tatggttcagctggc

SEQ ID NO: 79579 - DNA, 15 bp, Homo sapiens
atatggttcagctgg

SEQ ID NO: 79580 - DNA, 15 bp, Homo sapiens
catatggttcagctg

SEQ ID NO: 79581 - DNA, 15 bp, Homo sapiens
tcatatggttcagct

SEQ ID NO: 79582 - DNA, 15 bp, Homo sapiens
ttcatatggttcagc

SEQ ID NO: 79583 - DNA, 15 bp, Homo sapiens
gttcatatggttcag

SEQ ID NO: 79584 - DNA, 15 bp, Homo sapiens
agttcatatggttca

SEQ ID NO: 79585 - DNA, 15 bp, Homo sapiens
gagttcatatggttc

SEQ ID NO: 79586 - DNA, 15 bp, Homo sapiens
tgagttcatatggtt

SEQ ID NO: 79587 - DNA, 15 bp, Homo sapiens
atgagttcatatggt

SEQ ID NO: 79588 - DNA, 15 bp, Homo sapiens
catgagttcatatgg

SEQ ID NO: 79589 - DNA, 15 bp, Homo sapiens
ccatgagttcatatg

SEQ ID NO: 79590 - DNA, 15 bp, Homo sapiens
tccatgagttcatat

SEQ ID NO: 79591 - DNA, 15 bp, Homo sapiens
atccatgagttcata

SEQ ID NO: 79592 - DNA, 15 bp, Homo sapiens
aatccatgagttcat

SEQ ID NO: 79593 - DNA, 15 bp, Homo sapiens
caatccatgagttca

SEQ ID NO: 79594 - DNA, 15 bp, Homo sapiens
tcaatccatgagttc

SEQ ID NO: 79595 - DNA, 15 bp, Homo sapiens
atcaatccatgagtt

SEQ ID NO: 79596 - DNA, 15 bp, Homo sapiens
catcaatccatgagt

SEQ ID NO: 79597 - DNA, 15 bp, Homo sapiens
gcatcaatccatgag

SEQ ID NO: 79598 - DNA, 15 bp, Homo sapiens
agcatcaatccatga

SEQ ID NO: 79599 - DNA, 15 bp, Homo sapiens
tagcatcaatccatg

SEQ ID NO: 79600 - DNA, 15 bp, Homo sapiens
ctagcatcaatccat

SEQ ID NO: 79601 - DNA, 15 bp, Homo sapiens
gctagcatcaatcca

SEQ ID NO: 79602 - DNA, 15 bp, Homo sapiens
agctagcatcaatcc

SEQ ID NO: 79603 - DNA, 15 bp, Homo sapiens
aagctagcatcaatc

SEQ ID NO: 79604 - DNA, 15 bp, Homo sapiens
taagctagcatcaat

SEQ ID NO: 79605 - DNA, 15 bp, Homo sapiens
ctaagctagcatcaa

SEQ ID NO: 79606 - DNA, 15 bp, Homo sapiens
cctaagctagcatca

SEQ ID NO: 79607 - DNA, 15 bp, Homo sapiens
tcctaagctagcatc

SEQ ID NO: 79608 - DNA, 15 bp, Homo sapiens
ttcctaagctagcat

SEQ ID NO: 79609 - DNA, 15 bp, Homo sapiens
cttcctaagctagca

SEQ ID NO: 79610 - DNA, 15 bp, Homo sapiens
ccttcctaagctagc

SEQ ID NO: 79611 - DNA, 15 bp, Homo sapiens
gccttcctaagctag

SEQ ID NO: 79612 - DNA, 15 bp, Homo sapiens
agccttcctaagcta

SEQ ID NO: 79613 - DNA, 15 bp, Homo sapiens
gagccttcctaagct

SEQ ID NO: 79614 - DNA, 15 bp, Homo sapiens
agagccttcctaagc

SEQ ID NO: 79615 - DNA, 15 bp, Homo sapiens
cagagccttcctaag

SEQ ID NO: 79616 - DNA, 15 bp, Homo sapiens
acagagccttcctaa

SEQ ID NO: 79617 - DNA, 15 bp, Homo sapiens
tacagagccttccta

SEQ ID NO: 79618 - DNA, 15 bp, Homo sapiens
ctacagagccttcct

SEQ ID NO: 79619 - DNA, 15 bp, Homo sapiens
cctacagagccttcc

SEQ ID NO: 79620 - DNA, 15 bp, Homo sapiens
tcctacagagccttc

SEQ ID NO: 79621 - DNA, 15 bp, Homo sapiens
ctcctacagagcctt

SEQ ID NO: 79622 - DNA, 15 bp, Homo sapiens
gctcctacagagcct

SEQ ID NO: 79623 - DNA, 15 bp, Homo sapiens
ggctcctacagagcc

SEQ ID NO: 79624 - DNA, 15 bp, Homo sapiens
tggctcctacagagc

SEQ ID NO: 79625 - DNA, 15 bp, Homo sapiens
ctggctcctacagag

SEQ ID NO: 79626 - DNA, 15 bp, Homo sapiens
tctggctcctacaga

SEQ ID NO: 79627 - DNA, 15 bp, Homo sapiens
ttctggctcctacag

SEQ ID NO: 79628 - DNA, 15 bp, Homo sapiens
gttctggctcctaca

SEQ ID NO: 79629 - DNA, 15 bp, Homo sapiens
agttctggctcctac

SEQ ID NO: 79630 - DNA, 15 bp, Homo sapiens
cagttctggctccta

SEQ ID NO: 79631 - DNA, 15 bp, Homo sapiens
ccagttctggctcct

SEQ ID NO: 79632 - DNA, 15 bp, Homo sapiens
cccagttctggctcc

SEQ ID NO: 79633 - DNA, 15 bp, Homo sapiens
gcccagttctggctc

SEQ ID NO: 79634 - DNA, 15 bp, Homo sapiens
agcccagttctggct

SEQ ID NO: 79635 - DNA, 15 bp, Homo sapiens
cagcccagttctggc

SEQ ID NO: 79636 - DNA, 15 bp, Homo sapiens
tcagcccagttctgg

SEQ ID NO: 79637 - DNA, 15 bp, Homo sapiens
ctcagcccagttctg

SEQ ID NO: 79638 - DNA, 15 bp, Homo sapiens
tctcagcccagttct

SEQ ID NO: 79639 - DNA, 15 bp, Homo sapiens
ctctcagcccagttc

SEQ ID NO: 79640 - DNA, 15 bp, Homo sapiens
gctctcagcccagtt

SEQ ID NO: 79641 - DNA, 15 bp, Homo sapiens
ggctctcagcccagt

SEQ ID NO: 79642 - DNA, 15 bp, Homo sapiens
tggctctcagcccag

SEQ ID NO: 79643 - DNA, 15 bp, Homo sapiens
ctggctctcagccca

SEQ ID NO: 79644 - DNA, 15 bp, Homo sapiens
gctggctctcagccc

SEQ ID NO: 79645 - DNA, 15 bp, Homo sapiens
ggctggctctcagcc

SEQ ID NO: 79646 - DNA, 15 bp, Homo sapiens
gggctggctctcagc

SEQ ID NO: 79647 - DNA, 15 bp, Homo sapiens
tgggctggctctcag

SEQ ID NO: 79648 - DNA, 15 bp, Homo sapiens
atgggctggctctca

SEQ ID NO: 79649 - DNA, 15 bp, Homo sapiens
tatgggctggctctc

SEQ ID NO: 79650 - DNA, 15 bp, Homo sapiens
ctatgggctggctct

SEQ ID NO: 79651 - DNA, 15 bp, Homo sapiens
tctatgggctggctc

SEQ ID NO: 79652 - DNA, 15 bp, Homo sapiens
ctctatgggctggct

SEQ ID NO: 79653 - DNA, 15 bp, Homo sapiens
tctctatgggctggc

SEQ ID NO: 79654 - DNA, 15 bp, Homo sapiens
gtctctatgggctgg

SEQ ID NO: 79655 - DNA, 15 bp, Homo sapiens
tgtctctatgggctg

SEQ ID NO: 79656 - DNA, 15 bp, Homo sapiens
ttgtctctatgggct

SEQ ID NO: 79657 - DNA, 15 bp, Homo sapiens
tttgtctctatgggc

SEQ ID NO: 79658 - DNA, 15 bp, Homo sapiens
ttttgtctctatggg

SEQ ID NO: 79659 - DNA, 15 bp, Homo sapiens
cttttgtctctatgg

SEQ ID NO: 79660 - DNA, 15 bp, Homo sapiens
tcttttgtctctatg

SEQ ID NO: 79661 - DNA, 15 bp, Homo sapiens
ctcttttgtctctat

SEQ ID NO: 79662 - DNA, 15 bp, Homo sapiens
cctcttttgtctcta

SEQ ID NO: 79663 - DNA, 15 bp, Homo sapiens
gcctcttttgtctct

SEQ ID NO: 79664 - DNA, 15 bp, Homo sapiens
ggcctcttttgtctc

SEQ ID NO: 79665 - DNA, 15 bp, Homo sapiens
gggcctcttttgtct

SEQ ID NO: 79666 - DNA, 15 bp, Homo sapiens
cgggcctcttttgtc

SEQ ID NO: 79667 - DNA, 15 bp, Homo sapiens
ccgggcctcttttgt

SEQ ID NO: 79668 - DNA, 15 bp, Homo sapiens
gccgggcctcttttg

SEQ ID NO: 79669 - DNA, 15 bp, Homo sapiens
ggccgggcctctttt

SEQ ID NO: 79670 - DNA, 15 bp, Homo sapiens
gggccgggcctcttt

SEQ ID NO: 79671 - DNA, 15 bp, Homo sapiens
agggccgggcctctt

SEQ ID NO: 79672 - DNA, 15 bp, Homo sapiens
cagggccgggcctct

SEQ ID NO: 79673 - DNA, 15 bp, Homo sapiens
tcagggccgggcctc

SEQ ID NO: 79674 - DNA, 15 bp, Homo sapiens
gtcagggccgggcct

SEQ ID NO: 79675 - DNA, 15 bp, Homo sapiens
tgtcagggccgggcc

SEQ ID NO: 79676 - DNA, 15 bp, Homo sapiens
atgtcagggccgggc

SEQ ID NO: 79677 - DNA, 15 bp, Homo sapiens
gatgtcagggccggg

SEQ ID NO: 79678 - DNA, 15 bp, Homo sapiens
tgatgtcagggccgg

SEQ ID NO: 79679 - DNA, 15 bp, Homo sapiens
ctgatgtcagggccg

SEQ ID NO: 79680 - DNA, 15 bp, Homo sapiens
tctgatgtcagggcc

SEQ ID NO: 79681 - DNA, 15 bp, Homo sapiens
ctctgatgtcagggc

SEQ ID NO: 79682 - DNA, 15 bp, Homo sapiens
cctctgatgtcaggg

SEQ ID NO: 79683 - DNA, 15 bp, Homo sapiens
ccctctgatgtcagg

SEQ ID NO: 79684 - DNA, 15 bp, Homo sapiens
accctctgatgtcag

SEQ ID NO: 79685 - DNA, 15 bp, Homo sapiens
aaccctctgatgtca

SEQ ID NO: 79686 - DNA, 15 bp, Homo sapiens
gaaccctctgatgtc

SEQ ID NO: 79687 - DNA, 15 bp, Homo sapiens
tgaaccctctgatgt

SEQ ID NO: 79688 - DNA, 15 bp, Homo sapiens
ttgaaccctctgatg

SEQ ID NO: 79689 - DNA, 15 bp, Homo sapiens
tttgaaccctctgat

SEQ ID NO: 79690 - DNA, 15 bp, Homo sapiens
gtttgaaccctctga

SEQ ID NO: 79691 - DNA, 15 bp, Homo sapiens
tgtttgaaccctctg

SEQ ID NO: 79692 - DNA, 15 bp, Homo sapiens
atgtttgaaccctct

SEQ ID NO: 79693 - DNA, 15 bp, Homo sapiens
catgtttgaaccctc

SEQ ID NO: 79694 - DNA, 15 bp, Homo sapiens
tcatgtttgaaccct

SEQ ID NO: 79695 - DNA, 15 bp, Homo sapiens
atcatgtttgaaccc

SEQ ID NO: 79696 - DNA, 15 bp, Homo sapiens
catcatgtttgaacc

SEQ ID NO: 79697 - DNA, 15 bp, Homo sapiens
acatcatgtttgaac

SEQ ID NO: 79698 - DNA, 15 bp, Homo sapiens
gacatcatgtttgaa

SEQ ID NO: 79699 - DNA, 15 bp, Homo sapiens
agacatcatgtttga

SEQ ID NO: 79700 - DNA, 15 bp, Homo sapiens
cagacatcatgtttg

SEQ ID NO: 79701 - DNA, 15 bp, Homo sapiens
tcagacatcatgttt

SEQ ID NO: 79702 - DNA, 15 bp, Homo sapiens
ctcagacatcatgtt

SEQ ID NO: 79703 - DNA, 15 bp, Homo sapiens
gctcagacatcatgt

SEQ ID NO: 79704 - DNA, 15 bp, Homo sapiens
ggctcagacatcatg

SEQ ID NO: 79705 - DNA, 15 bp, Homo sapiens
gggctcagacatcat

SEQ ID NO: 79706 - DNA, 15 bp, Homo sapiens
ggggctcagacatca

SEQ ID NO: 79707 - DNA, 15 bp, Homo sapiens
tggggctcagacatc

SEQ ID NO: 79708 - DNA, 15 bp, Homo sapiens
gtggggctcagacat

SEQ ID NO: 79709 - DNA, 15 bp, Homo sapiens
ggtggggctcagaca

SEQ ID NO: 79710 - DNA, 15 bp, Homo sapiens
aggtggggctcagac

SEQ ID NO: 79711 - DNA, 15 bp, Homo sapiens
taggtggggctcaga

SEQ ID NO: 79712 - DNA, 15 bp, Homo sapiens
gtaggtggggctcag

SEQ ID NO: 79713 - DNA, 15 bp, Homo sapiens
tgtaggtggggctca

SEQ ID NO: 79714 - DNA, 15 bp, Homo sapiens
ctgtaggtggggctc

SEQ ID NO: 79715 - DNA, 15 bp, Homo sapiens
actgtaggtggggct

SEQ ID NO: 79716 - DNA, 15 bp, Homo sapiens
gactgtaggtggggc

SEQ ID NO: 79717 - DNA, 15 bp, Homo sapiens
agactgtaggtgggg

SEQ ID NO: 79718 - DNA, 15 bp, Homo sapiens
cagactgtaggtggg

SEQ ID NO: 79719 - DNA, 15 bp, Homo sapiens
gcagactgtaggtgg

SEQ ID NO: 79720 - DNA, 15 bp, Homo sapiens
ggcagactgtaggtg

SEQ ID NO: 79721 - DNA, 15 bp, Homo sapiens
cggcagactgtaggt

SEQ ID NO: 79722 - DNA, 15 bp, Homo sapiens
ccggcagactgtagg

SEQ ID NO: 79723 - DNA, 15 bp, Homo sapiens
tccggcagactgtag

SEQ ID NO: 79724 - DNA, 15 bp, Homo sapiens
ctccggcagactgta

SEQ ID NO: 79725 - DNA, 15 bp, Homo sapiens
cctccggcagactgt

SEQ ID NO: 79726 - DNA, 15 bp, Homo sapiens
acctccggcagactg

SEQ ID NO: 79727 - DNA, 15 bp, Homo sapiens
cacctccggcagact

SEQ ID NO: 79728 - DNA, 15 bp, Homo sapiens
ccacctccggcagac

SEQ ID NO: 79729 - DNA, 15 bp, Homo sapiens
accacctccggcaga

SEQ ID NO: 79730 - DNA, 15 bp, Homo sapiens
aaccacctccggcag

SEQ ID NO: 79731 - DNA, 15 bp, Homo sapiens
caaccacctccggca

SEQ ID NO: 79732 - DNA, 15 bp, Homo sapiens
ccaaccacctccggc

SEQ ID NO: 79733 - DNA, 15 bp, Homo sapiens
tccaaccacctccgg

SEQ ID NO: 79734 - DNA, 15 bp, Homo sapiens
ttccaaccacctccg

SEQ ID NO: 79735 - DNA, 15 bp, Homo sapiens
cttccaaccacctcc

SEQ ID NO: 79736 - DNA, 15 bp, Homo sapiens
ccttccaaccacctc

SEQ ID NO: 79737 - DNA, 15 bp, Homo sapiens
tccttccaaccacct

SEQ ID NO: 79738 - DNA, 15 bp, Homo sapiens
ttccttccaaccacc

SEQ ID NO: 79739 - DNA, 15 bp, Homo sapiens
cttccttccaaccac

SEQ ID NO: 79740 - DNA, 15 bp, Homo sapiens
tcttccttccaacca

SEQ ID NO: 79741 - DNA, 15 bp, Homo sapiens
ctcttccttccaacc

SEQ ID NO: 79742 - DNA, 15 bp, Homo sapiens
gctcttccttccaac

SEQ ID NO: 79743 - DNA, 15 bp, Homo sapiens
ggctcttccttccaa

SEQ ID NO: 79744 - DNA, 15 bp, Homo sapiens
aggctcttccttcca

SEQ ID NO: 79745 - DNA, 15 bp, Homo sapiens
aaggctcttccttcc

SEQ ID NO: 79746 - DNA, 15 bp, Homo sapiens
aaaggctcttccttc

SEQ ID NO: 79747 - DNA, 15 bp, Homo sapiens
taaaggctcttcctt

SEQ ID NO: 79748 - DNA, 15 bp, Homo sapiens
ataaaggctcttcct

SEQ ID NO: 79749 - DNA, 15 bp, Homo sapiens
gataaaggctcttcc

SEQ ID NO: 79750 - DNA, 15 bp, Homo sapiens
ggataaaggctcttc

SEQ ID NO: 79751 - DNA, 15 bp, Homo sapiens
aggataaaggctctt

SEQ ID NO: 79752 - DNA, 15 bp, Homo sapiens
aaggataaaggctct

SEQ ID NO: 79753 - DNA, 15 bp, Homo sapiens
taaggataaaggctc

SEQ ID NO: 79754 - DNA, 15 bp, Homo sapiens
gtaaggataaaggct

SEQ ID NO: 79755 - DNA, 15 bp, Homo sapiens
tgtaaggataaaggc

SEQ ID NO: 79756 - DNA, 15 bp, Homo sapiens
ttgtaaggataaagg

SEQ ID NO: 79757 - DNA, 15 bp, Homo sapiens
attgtaaggataaag

SEQ ID NO: 79758 - DNA, 15 bp, Homo sapiens
aattgtaaggataaa

SEQ ID NO: 79759 - DNA, 15 bp, Homo sapiens
gaattgtaaggataa

SEQ ID NO: 79760 - DNA, 15 bp, Homo sapiens
agaattgtaaggata

SEQ ID NO: 79761 - DNA, 15 bp, Homo sapiens
aagaattgtaaggat

SEQ ID NO: 79762 - DNA, 15 bp, Homo sapiens
taagaattgtaagga

SEQ ID NO: 79763 - DNA, 15 bp, Homo sapiens
gtaagaattgtaagg

SEQ ID NO: 79764 - DNA, 15 bp, Homo sapiens
agtaagaattgtaag

SEQ ID NO: 79765 - DNA, 15 bp, Homo sapiens
cagtaagaattgtaa

SEQ ID NO: 79766 - DNA, 15 bp, Homo sapiens
tcagtaagaattgta

SEQ ID NO: 79767 - DNA, 15 bp, Homo sapiens
ttcagtaagaattgt

SEQ ID NO: 79768 - DNA, 15 bp, Homo sapiens
tttcagtaagaattg

SEQ ID NO: 79769 - DNA, 15 bp, Homo sapiens
atttcagtaagaatt

SEQ ID NO: 79770 - DNA, 15 bp, Homo sapiens
aatttcagtaagaat

SEQ ID NO: 79771 - DNA, 15 bp, Homo sapiens
gaatttcagtaagaa

SEQ ID NO: 79772 - DNA, 15 bp, Homo sapiens
tgaatttcagtaaga

SEQ ID NO: 79773 - DNA, 15 bp, Homo sapiens
ttgaatttcagtaag

SEQ ID NO: 79774 - DNA, 15 bp, Homo sapiens
tttgaatttcagtaa

SEQ ID NO: 79775 - DNA, 15 bp, Homo sapiens
atttgaatttcagta

SEQ ID NO: 79776 - DNA, 15 bp, Homo sapiens
aatttgaatttcagt

SEQ ID NO: 79777 - DNA, 15 bp, Homo sapiens
aaatttgaatttcag

SEQ ID NO: 79778 - DNA, 15 bp, Homo sapiens
aaaatttgaatttca

SEQ ID NO: 79779 - DNA, 15 bp, Homo sapiens
aaaaatttgaatttc

SEQ ID NO: 79780 - DNA, 15 bp, Homo sapiens
taaaaatttgaattt

SEQ ID NO: 79781 - DNA, 15 bp, Homo sapiens
ctaaaaatttgaatt

SEQ ID NO: 79782 - DNA, 15 bp, Homo sapiens
cctaaaaatttgaat

SEQ ID NO: 79783 - DNA, 15 bp, Homo sapiens
acctaaaaatttgaa

SEQ ID NO: 79784 - DNA, 15 bp, Homo sapiens
aacctaaaaatttga

SEQ ID NO: 79785 - DNA, 15 bp, Homo sapiens
aaacctaaaaatttg

SEQ ID NO: 79786 - DNA, 15 bp, Homo sapiens
aaaacctaaaaattt

SEQ ID NO: 79787 - DNA, 15 bp, Homo sapiens
caaaacctaaaaatt

SEQ ID NO: 79788 - DNA, 15 bp, Homo sapiens
tgcaaaacctaaaaa

SEQ ID NO: 79789 - DNA, 15 bp, Homo sapiens
ttgcaaaacctaaaa

SEQ ID NO: 79790 - DNA, 15 bp, Homo sapiens
tttgcaaaacctaaa

SEQ ID NO: 79791 - DNA, 15 bp, Homo sapiens
ttttgcaaaacctaa

SEQ ID NO: 79792 - DNA, 15 bp, Homo sapiens
tttttgcaaaaccta

SEQ ID NO: 79793 - DNA, 15 bp, Homo sapiens
ttttttgcaaaacct

SEQ ID NO: 79794 - DNA, 15 bp, Homo sapiens
tttttttgcaaaacc

SEQ ID NO: 79795 - DNA, 15 bp, Homo sapiens
atttttttgcaaaac

SEQ ID NO: 79796 - DNA, 15 bp, Homo sapiens
catttttttgcaaaa

SEQ ID NO: 79797 - DNA, 15 bp, Homo sapiens
ccatttttttgcaaa

SEQ ID NO: 79798 - DNA, 15 bp, Homo sapiens
accatttttttgcaa

SEQ ID NO: 79799 - DNA, 15 bp, Homo sapiens
caccatttttttgca

SEQ ID NO: 79800 - DNA, 15 bp, Homo sapiens
ccaccatttttttgc

SEQ ID NO: 79801 - DNA, 15 bp, Homo sapiens
tccaccatttttttg

SEQ ID NO: 79802 - DNA, 15 bp, Homo sapiens
gtccaccattttttt

SEQ ID NO: 79803 - DNA, 15 bp, Homo sapiens
ggtccaccatttttt

SEQ ID NO: 79804 - DNA, 15 bp, Homo sapiens
aggtccaccattttt

SEQ ID NO: 79805 - DNA, 15 bp, Homo sapiens
caggtccaccatttt

SEQ ID NO: 79806 - DNA, 15 bp, Homo sapiens
tcaggtccaccattt

SEQ ID NO: 79807 - DNA, 15 bp, Homo sapiens
ttcaggtccaccatt

SEQ ID NO: 79808 - DNA, 15 bp, Homo sapiens
cttcaggtccaccat

SEQ ID NO: 79809 - DNA, 15 bp, Homo sapiens
ccttcaggtccacca

SEQ ID NO: 79810 - DNA, 15 bp, Homo sapiens
tccttcaggtccacc

SEQ ID NO: 79811 - DNA, 15 bp, Homo sapiens
ttccttcaggtccac

SEQ ID NO: 79812 - DNA, 15 bp, Homo sapiens
tttccttcaggtcca

SEQ ID NO: 79813 - DNA, 15 bp, Homo sapiens
atttccttcaggtcc

SEQ ID NO: 79814 - DNA, 15 bp, Homo sapiens
aatttccttcaggtc

SEQ ID NO: 79815 - DNA, 15 bp, Homo sapiens
aaatttccttcaggt

SEQ ID NO: 79816 - DNA, 15 bp, Homo sapiens
caaatttccttcagg

SEQ ID NO: 79817 - DNA, 15 bp, Homo sapiens
tcaaatttccttcag

SEQ ID NO: 79818 - DNA, 15 bp, Homo sapiens
gtcaaatttccttca

SEQ ID NO: 79819 - DNA, 15 bp, Homo sapiens
tgtcaaatttccttc

SEQ ID NO: 79820 - DNA, 15 bp, Homo sapiens
ctgtcaaatttcctt

SEQ ID NO: 79821 - DNA, 15 bp, Homo sapiens
cctgtcaaatttcct

SEQ ID NO: 79822 - DNA, 15 bp, Homo sapiens
tcctgtcaaatttcc

SEQ ID NO: 79823 - DNA, 15 bp, Homo sapiens
ctcctgtcaaatttc

SEQ ID NO: 79824 - DNA, 15 bp, Homo sapiens
gctcctgtcaaattt

SEQ ID NO: 79825 - DNA, 15 bp, Homo sapiens
tgctcctgtcaaatt

SEQ ID NO: 79826 - DNA, 15 bp, Homo sapiens
atgctcctgtcaaat

SEQ ID NO: 79827 - DNA, 15 bp, Homo sapiens
catgctcctgtcaaa

SEQ ID NO: 79828 - DNA, 15 bp, Homo sapiens
acatgctcctgtcaa

SEQ ID NO: 79829 - DNA, 15 bp, Homo sapiens
gacatgctcctgtca

SEQ ID NO: 79830 - DNA, 15 bp, Homo sapiens
agacatgctcctgtc

SEQ ID NO: 79831 - DNA, 15 bp, Homo sapiens
gagacatgctcctgt

SEQ ID NO: 79832 - DNA, 15 bp, Homo sapiens
tgagacatgctcctg

SEQ ID NO: 79833 - DNA, 15 bp, Homo sapiens
ctgagacatgctcct

SEQ ID NO: 79834 - DNA, 15 bp, Homo sapiens
gctgagacatgctcc

SEQ ID NO: 79835 - DNA, 15 bp, Homo sapiens
agctgagacatgctc

SEQ ID NO: 79836 - DNA, 15 bp, Homo sapiens
cagctgagacatgct

SEQ ID NO: 79837 - DNA, 15 bp, Homo sapiens
acagctgagacatgc

SEQ ID NO: 79838 - DNA, 15 bp, Homo sapiens
tacagctgagacatg

SEQ ID NO: 79839 - DNA, 15 bp, Homo sapiens
atacagctgagacat

SEQ ID NO: 79840 - DNA, 15 bp, Homo sapiens
aatacagctgagaca

SEQ ID NO: 79841 - DNA, 15 bp, Homo sapiens
aaatacagctgagac

SEQ ID NO: 79842 - DNA, 15 bp, Homo sapiens
taaatacagctgaga

SEQ ID NO: 79843 - DNA, 15 bp, Homo sapiens
ttaaatacagctgag

SEQ ID NO: 79844 - DNA, 15 bp, Homo sapiens
tttaaatacagctga

SEQ ID NO: 79845 - DNA, 15 bp, Homo sapiens
atttaaatacagctg

SEQ ID NO: 79846 - DNA, 15 bp, Homo sapiens
aatttaaatacagct

SEQ ID NO: 79847 - DNA, 15 bp, Homo sapiens
aaatttaaatacagc

SEQ ID NO: 79848 - DNA, 15 bp, Homo sapiens
caaatttaaatacag

SEQ ID NO: 79849 - DNA, 15 bp, Homo sapiens
acaaatttaaataca

SEQ ID NO: 79850 - DNA, 15 bp, Homo sapiens
gacaaatttaaatac

SEQ ID NO: 79851 - DNA, 15 bp, Homo sapiens
agacaaatttaaata

SEQ ID NO: 79852 - DNA, 15 bp, Homo sapiens
gagacaaatttaaat

SEQ ID NO: 79853 - DNA, 15 bp, Homo sapiens
tgagacaaatttaaa

SEQ ID NO: 79854 - DNA, 15 bp, Homo sapiens
ctgagacaaatttaa

SEQ ID NO: 79855 - DNA, 15 bp, Homo sapiens
gctgagacaaattta

SEQ ID NO: 79856 - DNA, 15 bp, Homo sapiens
ggctgagacaaattt

SEQ ID NO: 79857 - DNA, 15 bp, Homo sapiens
tggctgagacaaatt

SEQ ID NO: 79858 - DNA, 15 bp, Homo sapiens
ttggctgagacaaat

SEQ ID NO: 79859 - DNA, 15 bp, Homo sapiens
attggctgagacaaa

SEQ ID NO: 79860 - DNA, 15 bp, Homo sapiens
gattggctgagacaa

SEQ ID NO: 79861 - DNA, 15 bp, Homo sapiens
ggattggctgagaca

SEQ ID NO: 79862 - DNA, 15 bp, Homo sapiens
gggattggctgagac

SEQ ID NO: 79863 - DNA, 15 bp, Homo sapiens
ggggattggctgaga

SEQ ID NO: 79864 - DNA, 15 bp, Homo sapiens
aggggattggctgag

SEQ ID NO: 79865 - DNA, 15 bp, Homo sapiens
aaggggattggctga

SEQ ID NO: 79866 - DNA, 15 bp, Homo sapiens
aaaggggattggctg

SEQ ID NO: 79867 - DNA, 15 bp, Homo sapiens
aaaaggggattggct

SEQ ID NO: 79868 - DNA, 15 bp, Homo sapiens
caaaaggggattggc

SEQ ID NO: 79869 - DNA, 15 bp, Homo sapiens
tcaaaaggggattgg

SEQ ID NO: 79870 - DNA, 15 bp, Homo sapiens
ttcaaaaggggattg

SEQ ID NO: 79871 - DNA, 15 bp, Homo sapiens
attcaaaaggggatt

SEQ ID NO: 79872 - DNA, 15 bp, Homo sapiens
cattcaaaaggggat

SEQ ID NO: 79873 - DNA, 15 bp, Homo sapiens
acattcaaaagggga

SEQ ID NO: 79874 - DNA, 15 bp, Homo sapiens
aacattcaaaagggg

SEQ ID NO: 79875 - DNA, 15 bp, Homo sapiens
gaacattcaaaaggg

SEQ ID NO: 79876 - DNA, 15 bp, Homo sapiens
tgaacattcaaaagg

SEQ ID NO: 79877 - DNA, 15 bp, Homo sapiens
ctgaacattcaaaag

SEQ ID NO: 79878 - DNA, 15 bp, Homo sapiens
tctgaacattcaaaa

SEQ ID NO: 79879 - DNA, 15 bp, Homo sapiens
ctctgaacattcaaa

SEQ ID NO: 79880 - DNA, 15 bp, Homo sapiens
actctgaacattcaa

SEQ ID NO: 79881 - DNA, 15 bp, Homo sapiens
cactctgaacattca

SEQ ID NO: 79882 - DNA, 15 bp, Homo sapiens
acactctgaacattc

SEQ ID NO: 79883 - DNA, 15 bp, Homo sapiens
tacactctgaacatt

SEQ ID NO: 79884 - DNA, 15 bp, Homo sapiens
ttacactctgaacat

SEQ ID NO: 79885 - DNA, 15 bp, Homo sapiens
cttacactctgaaca

SEQ ID NO: 79886 - DNA, 15 bp, Homo sapiens
gcttacactctgaac

SEQ ID NO: 79887 - DNA, 15 bp, Homo sapiens
agcttacactctgaa

SEQ ID NO: 79888 - DNA, 15 bp, Homo sapiens
aagcttacactctga

SEQ ID NO: 79889 - DNA, 15 bp, Homo sapiens
gaagcttacactctg

SEQ ID NO: 79890 - DNA, 15 bp, Homo sapiens
tgaagcttacactct

SEQ ID NO: 79891 - DNA, 15 bp, Homo sapiens
ctgaagcttacactc

SEQ ID NO: 79892 - DNA, 15 bp, Homo sapiens
cctgaagcttacact

SEQ ID NO: 79893 - DNA, 15 bp, Homo sapiens
tcctgaagcttacac

SEQ ID NO: 79894 - DNA, 15 bp, Homo sapiens
ctcctgaagcttaca

SEQ ID NO: 79895 - DNA, 15 bp, Homo sapiens
cctcctgaagcttac

SEQ ID NO: 79896 - DNA, 15 bp, Homo sapiens
ccctcctgaagctta

SEQ ID NO: 79897 - DNA, 15 bp, Homo sapiens
gccctcctgaagctt

SEQ ID NO: 79898 - DNA, 15 bp, Homo sapiens
tgccctcctgaagct

SEQ ID NO: 79899 - DNA, 15 bp, Homo sapiens
ctgccctcctgaagc

SEQ ID NO: 79900 - DNA, 15 bp, Homo sapiens
gctgccctcctgaag

SEQ ID NO: 79901 - DNA, 15 bp, Homo sapiens
cgctgccctcctgaa

SEQ ID NO: 79902 - DNA, 15 bp, Homo sapiens
gcgctgccctcctga

SEQ ID NO: 79903 - DNA, 15 bp, Homo sapiens
cgcgctgccctcctg

SEQ ID NO: 79904 - DNA, 15 bp, Homo sapiens
acgcgctgccctcct

SEQ ID NO: 79905 - DNA, 15 bp, Homo sapiens
gacgcgctgccctcc

SEQ ID NO: 79906 - DNA, 15 bp, Homo sapiens
agacgcgctgccctc

SEQ ID NO: 79907 - DNA, 15 bp, Homo sapiens
aagacgcgctgccct

SEQ ID NO: 79908 - DNA, 15 bp, Homo sapiens
taagacgcgctgccc

SEQ ID NO: 79909 - DNA, 15 bp, Homo sapiens
ctaagacgcgctgcc

SEQ ID NO: 79910 - DNA, 15 bp, Homo sapiens
actaagacgcgctgc

SEQ ID NO: 79911 - DNA, 15 bp, Homo sapiens
cactaagacgcgctg

SEQ ID NO: 79912 - DNA, 15 bp, Homo sapiens
acactaagacgcgct

SEQ ID NO: 79913 - DNA, 15 bp, Homo sapiens
cacactaagacgcgc

SEQ ID NO: 79914 - DNA, 15 bp, Homo sapiens
tcacactaagacgcg

SEQ ID NO: 79915 - DNA, 15 bp, Homo sapiens
gtcacactaagacgc

SEQ ID NO: 79916 - DNA, 15 bp, Homo sapiens
agtcacactaagacg

SEQ ID NO: 79917 - DNA, 15 bp, Homo sapiens
aagtcacactaagac

SEQ ID NO: 79918 - DNA, 15 bp, Homo sapiens
aaagtcacactaaga

SEQ ID NO: 79919 - DNA, 15 bp, Homo sapiens
aaaagtcacactaag

SEQ ID NO: 79920 - DNA, 15 bp, Homo sapiens
gaaaagtcacactaa

SEQ ID NO: 79921 - DNA, 15 bp, Homo sapiens
agaaaagtcacacta

SEQ ID NO: 79922 - DNA, 15 bp, Homo sapiens
cagaaaagtcacact

SEQ ID NO: 79923 - DNA, 15 bp, Homo sapiens
ccagaaaagtcacac

SEQ ID NO: 79924 - DNA, 15 bp, Homo sapiens
accagaaaagtcaca

SEQ ID NO: 79925 - DNA, 15 bp, Homo sapiens
gaccagaaaagtcac

SEQ ID NO: 79926 - DNA, 15 bp, Homo sapiens
tgaccagaaaagtca

SEQ ID NO: 79927 - DNA, 15 bp, Homo sapiens
ctgaccagaaaagtc

SEQ ID NO: 79928 - DNA, 15 bp, Homo sapiens
actgaccagaaaagt

SEQ ID NO: 79929 - DNA, 15 bp, Homo sapiens
aactgaccagaaaag

SEQ ID NO: 79930 - DNA, 15 bp, Homo sapiens
gaactgaccagaaaa

SEQ ID NO: 79931 - DNA, 15 bp, Homo sapiens
tgaactgaccagaaa

SEQ ID NO: 79932 - DNA, 15 bp, Homo sapiens
ctgaactgaccagaa

SEQ ID NO: 79933 - DNA, 15 bp, Homo sapiens
cctgaactgaccaga

SEQ ID NO: 79934 - DNA, 15 bp, Homo sapiens
acctgaactgaccag

SEQ ID NO: 79935 - DNA, 15 bp, Homo sapiens
cacctgaactgacca

SEQ ID NO: 79936 - DNA, 15 bp, Homo sapiens
gcacctgaactgacc

SEQ ID NO: 79937 - DNA, 15 bp, Homo sapiens
agcacctgaactgac

SEQ ID NO: 79938 - DNA, 15 bp, Homo sapiens
aagcacctgaactga

SEQ ID NO: 79939 - DNA, 15 bp, Homo sapiens
aaagcacctgaactg

SEQ ID NO: 79940 - DNA, 15 bp, Homo sapiens
taaagcacctgaact

SEQ ID NO: 79941 - DNA, 15 bp, Homo sapiens
ttaaagcacctgaac

SEQ ID NO: 79942 - DNA, 15 bp, Homo sapiens
cttaaagcacctgaa

SEQ ID NO: 79943 - DNA, 15 bp, Homo sapiens
ccttaaagcacctga

SEQ ID NO: 79944 - DNA, 15 bp, Homo sapiens
tccttaaagcacctg

SEQ ID NO: 79945 - DNA, 15 bp, Homo sapiens
ctccttaaagcacct

SEQ ID NO: 79946 - DNA, 15 bp, Homo sapiens
tctccttaaagcacc

SEQ ID NO: 79947 - DNA, 15 bp, Homo sapiens
gtctccttaaagcac

SEQ ID NO: 79948 - DNA, 15 bp, Homo sapiens
tgtctccttaaagca

SEQ ID NO: 79949 - DNA, 15 bp, Homo sapiens
ttgtctccttaaagc

SEQ ID NO: 79950 - DNA, 15 bp, Homo sapiens
attgtctccttaaag

SEQ ID NO: 79951 - DNA, 15 bp, Homo sapiens
aattgtctccttaaa

SEQ ID NO: 79952 - DNA, 15 bp, Homo sapiens
taattgtctccttaa

SEQ ID NO: 79953 - DNA, 15 bp, Homo sapiens
ctaattgtctcctta

SEQ ID NO: 79954 - DNA, 15 bp, Homo sapiens
tctaattgtctcctt

SEQ ID NO: 79955 - DNA, 15 bp, Homo sapiens
ctctaattgtctcct

SEQ ID NO: 79956 - DNA, 15 bp, Homo sapiens
tctctaattgtctcc

SEQ ID NO: 79957 - DNA, 15 bp, Homo sapiens
atctctaattgtctc

SEQ ID NO: 79958 - DNA, 15 bp, Homo sapiens
gatctctaattgtct

SEQ ID NO: 79959 - DNA, 15 bp, Homo sapiens
tgatctctaattgtc

SEQ ID NO: 79960 - DNA, 15 bp, Homo sapiens
ttgatctctaattgt

SEQ ID NO: 79961 - DNA, 15 bp, Homo sapiens
attgatctctaattg

SEQ ID NO: 79962 - DNA, 15 bp, Homo sapiens
gattgatctctaatt

SEQ ID NO: 79963 - DNA, 15 bp, Homo sapiens
agattgatctctaat

SEQ ID NO: 79964 - DNA, 15 bp, Homo sapiens
cagattgatctctaa

SEQ ID NO: 79965 - DNA, 15 bp, Homo sapiens
ccagattgatctcta

SEQ ID NO: 79966 - DNA, 15 bp, Homo sapiens
tccagattgatctct

SEQ ID NO: 79967 - DNA, 15 bp, Homo sapiens
ttccagattgatctc

SEQ ID NO: 79968 - DNA, 15 bp, Homo sapiens
tttccagattgatct

SEQ ID NO: 79969 - DNA, 15 bp, Homo sapiens
ttttccagattgatc

SEQ ID NO: 79970 - DNA, 15 bp, Homo sapiens
gttttccagattgat

SEQ ID NO: 79971 - DNA, 15 bp, Homo sapiens
agttttccagattga

SEQ ID NO: 79972 - DNA, 15 bp, Homo sapiens
aagttttccagattg

SEQ ID NO: 79973 - DNA, 15 bp, Homo sapiens
gaagttttccagatt

SEQ ID NO: 79974 - DNA, 15 bp, Homo sapiens
tgaagttttccagat

SEQ ID NO: 79975 - DNA, 15 bp, Homo sapiens
atgaagttttccaga

SEQ ID NO: 79976 - DNA, 15 bp, Homo sapiens
aatgaagttttccag

SEQ ID NO: 79977 - DNA, 15 bp, Homo sapiens
aaatgaagttttcca

SEQ ID NO: 79978 - DNA, 15 bp, Homo sapiens
caaatgaagttttcc

SEQ ID NO: 79979 - DNA, 15 bp, Homo sapiens
tcaaatgaagttttc

SEQ ID NO: 79980 - DNA, 15 bp, Homo sapiens
ttcaaatgaagtttt

SEQ ID NO: 79981 - DNA, 15 bp, Homo sapiens
attcaaatgaagttt

SEQ ID NO: 79982 - DNA, 15 bp, Homo sapiens
aattcaaatgaagtt

SEQ ID NO: 79983 - DNA, 15 bp, Homo sapiens
aaattcaaatgaagt

SEQ ID NO: 79984 - DNA, 15 bp, Homo sapiens
aaaattcaaatgaag

SEQ ID NO: 79985 - DNA, 15 bp, Homo sapiens
aaaaattcaaatgaa

SEQ ID NO: 79986 - DNA, 15 bp, Homo sapiens
taaaaattcaaatga

SEQ ID NO: 79987 - DNA, 15 bp, Homo sapiens
ttaaaaattcaaatg

SEQ ID NO: 79988 - DNA, 15 bp, Homo sapiens
attaaaaattcaaat

SEQ ID NO: 79989 - DNA, 15 bp, Homo sapiens
tattaaaaattcaaa

SEQ ID NO: 79990 - DNA, 15 bp, Homo sapiens
gtattaaaaattcaa

SEQ ID NO: 79991 - DNA, 15 bp, Homo sapiens
tgtattaaaaattca

SEQ ID NO: 79992 - DNA, 15 bp, Homo sapiens
atgtattaaaaattc

SEQ ID NO: 79993 - DNA, 15 bp, Homo sapiens
tatgtattaaaaatt

SEQ ID NO: 79994 - DNA, 15 bp, Homo sapiens
ttatgtattaaaaat

SEQ ID NO: 79995 - DNA, 15 bp, Homo sapiens
cttatgtattaaaaa

SEQ ID NO: 79996 - DNA, 15 bp, Homo sapiens
tcttatgtattaaaa

SEQ ID NO: 79997 - DNA, 15 bp, Homo sapiens
ttcttatgtattaaa

SEQ ID NO: 79998 - DNA, 15 bp, Homo sapiens
tttcttatgtattaa

SEQ ID NO: 79999 - DNA, 15 bp, Homo sapiens
ttttcttatgtatta

SEQ ID NO: 80000 - DNA, 15 bp, Homo sapiens
gttttcttatgtatt

SEQ ID NO: 80001 - DNA, 15 bp, Homo sapiens
tgttttcttatgtat

SEQ ID NO: 80002 - DNA, 15 bp, Homo sapiens
ttgttttcttatgta

SEQ ID NO: 80003 - DNA, 15 bp, Homo sapiens
attgttttcttatgt

SEQ ID NO: 80004 - DNA, 15 bp, Homo sapiens
tattgttttcttatg

SEQ ID NO: 80005 - DNA, 15 bp, Homo sapiens
ttattgttttcttat

SEQ ID NO: 80006 - DNA, 15 bp, Homo sapiens
cttattgttttctta

SEQ ID NO: 80007 - DNA, 15 bp, Homo sapiens
tcttattgttttctt

SEQ ID NO: 80008 - DNA, 15 bp, Homo sapiens
ttcttattgttttct

SEQ ID NO: 80009 - DNA, 15 bp, Homo sapiens
tttcttattgttttc

SEQ ID NO: 80010 - DNA, 15 bp, Homo sapiens
atttcttattgtttt

SEQ ID NO: 80011 - DNA, 15 bp, Homo sapiens
tatttcttattgttt

SEQ ID NO: 80012 - DNA, 15 bp, Homo sapiens
ctatttcttattgtt

SEQ ID NO: 80013 - DNA, 15 bp, Homo sapiens
actatttcttattgt

SEQ ID NO: 80014 - DNA, 15 bp, Homo sapiens
aactatttcttattg

SEQ ID NO: 80015 - DNA, 15 bp, Homo sapiens
taactatttcttatt

SEQ ID NO: 80016 - DNA, 15 bp, Homo sapiens
ttaactatttcttat

SEQ ID NO: 80017 - DNA, 15 bp, Homo sapiens
tttaactatttctta

SEQ ID NO: 80018 - DNA, 15 bp, Homo sapiens
ttttaactatttctt

SEQ ID NO: 80019 - DNA, 15 bp, Homo sapiens
tttttaactatttct

SEQ ID NO: 80020 - DNA, 15 bp, Homo sapiens
atttttaactatttc

SEQ ID NO: 80021 - DNA, 15 bp, Homo sapiens
tatttttaactattt

SEQ ID NO: 80022 - DNA, 15 bp, Homo sapiens
atatttttaactatt

SEQ ID NO: 80023 - DNA, 15 bp, Homo sapiens
tatatttttaactat

SEQ ID NO: 80024 - DNA, 15 bp, Homo sapiens
atatatttttaacta

SEQ ID NO: 80025 - DNA, 15 bp, Homo sapiens
tatatatttttaact

SEQ ID NO: 80026 - DNA, 15 bp, Homo sapiens
atatatatttttaac

SEQ ID NO: 80027 - DNA, 15 bp, Homo sapiens
aatatatatttttaa

SEQ ID NO: 80028 - DNA, 15 bp, Homo sapiens
aaatatatattttta

SEQ ID NO: 80029 - DNA, 15 bp, Homo sapiens
taaatatatattttt

SEQ ID NO: 80030 - DNA, 15 bp, Homo sapiens
ataaatatatatttt

SEQ ID NO: 80031 - DNA, 15 bp, Homo sapiens
tataaatatatattt

SEQ ID NO: 80032 - DNA, 15 bp, Homo sapiens
ttataaatatatatt

SEQ ID NO: 80033 - DNA, 15 bp, Homo sapiens
attataaatatatat

SEQ ID NO: 80034 - DNA, 15 bp, Homo sapiens
tattataaatatata

SEQ ID NO: 80035 - DNA, 15 bp, Homo sapiens
atattataaatatat

SEQ ID NO: 80036 - DNA, 15 bp, Homo sapiens
tatattataaatata

SEQ ID NO: 80037 - DNA, 15 bp, Homo sapiens
atatattataaatat

SEQ ID NO: 80038 - DNA, 15 bp, Homo sapiens
tatatattataaata

SEQ ID NO: 80039 - DNA, 15 bp, Homo sapiens
atatatattataaat

SEQ ID NO: 80040 - DNA, 15 bp, Homo sapiens
tatatatattataaa

SEQ ID NO: 80041 - DNA, 15 bp, Homo sapiens
atatatatattataa

SEQ ID NO: 80042 - DNA, 15 bp, Homo sapiens
acatatatatattat

SEQ ID NO: 80043 - DNA, 15 bp, Homo sapiens
cacatatatatatta

SEQ ID NO: 80044 - DNA, 15 bp, Homo sapiens
acacatatatatatt

SEQ ID NO: 80045 - DNA, 15 bp, Homo sapiens
cacacatatatatat

SEQ ID NO: 80046 - DNA, 15 bp, Homo sapiens
acacacatatatata

SEQ ID NO: 80047 - DNA, 15 bp, Homo sapiens
cacacacatatatat

SEQ ID NO: 80048 - DNA, 15 bp, Homo sapiens
acacacacatatata

SEQ ID NO: 80049 - DNA, 15 bp, Homo sapiens
cacacacacatatat

SEQ ID NO: 80050 - DNA, 15 bp, Homo sapiens
atatacacacacaca

SEQ ID NO: 80051 - DNA, 15 bp, Homo sapiens
tatatacacacacac

SEQ ID NO: 80052 - DNA, 15 bp, Homo sapiens
atatatacacacaca

SEQ ID NO: 80053 - DNA, 15 bp, Homo sapiens
tatatatacacacac

SEQ ID NO: 80054 - DNA, 15 bp, Homo sapiens
atatatatacacaca

SEQ ID NO: 80055 - DNA, 15 bp, Homo sapiens
tatatatatacacac

SEQ ID NO: 80056 - DNA, 15 bp, Homo sapiens
atatatatatacaca

SEQ ID NO: 80057 - DNA, 15 bp, Homo sapiens
tatatatatatacac

SEQ ID NO: 80058 - DNA, 15 bp, Homo sapiens
atatatatatataca

SEQ ID NO: 80059 - DNA, 15 bp, Homo sapiens
aatatatatatatac

SEQ ID NO: 80060 - DNA, 15 bp, Homo sapiens
aataaaatatatata

SEQ ID NO: 80061 - DNA, 15 bp, Homo sapiens
aaataaaatatatat

SEQ ID NO: 80062 - DNA, 15 bp, Homo sapiens
taaataaaatatata

SEQ ID NO: 80063 - DNA, 15 bp, Homo sapiens
ataaataaaatatat

SEQ ID NO: 80064 - DNA, 15 bp, Homo sapiens
aataaataaaatata

SEQ ID NO: 80065 - DNA, 15 bp, Homo sapiens
aaataaataaaatat

SEQ ID NO: 80066 - DNA, 15 bp, Homo sapiens
taaataaataaaata

SEQ ID NO: 80067 - DNA, 15 bp, Homo sapiens
ataaataaataaaat

SEQ ID NO: 80068 - DNA, 15 bp, Homo sapiens
aaaaaaaaataaata

SEQ ID NO: 80069 - DNA, 15 bp, Homo sapiens
caaaaaaaaataaat

SEQ ID NO: 80070 - DNA, 15 bp, Homo sapiens
tcaaaaaaaaataaa

SEQ ID NO: 80071 - DNA, 15 bp, Homo sapiens
ctcaaaaaaaaataa

SEQ ID NO: 80072 - DNA, 15 bp, Homo sapiens
tctcaaaaaaaaata

SEQ ID NO: 80073 - DNA, 15 bp, Homo sapiens
atctcaaaaaaaaat

SEQ ID NO: 80074 - DNA, 15 bp, Homo sapiens
aacagagcgagactc

SEQ ID NO: 80075 - DNA, 15 bp, Homo sapiens
caacagagcgagact

SEQ ID NO: 80076 - DNA, 15 bp, Homo sapiens
gcaacagagcgagac

SEQ ID NO: 80077 - DNA, 15 bp, Homo sapiens
ggcaacagagcgaga

SEQ ID NO: 80078 - DNA, 15 bp, Homo sapiens
gggcaacagagcgag

SEQ ID NO: 80079 - DNA, 15 bp, Homo sapiens
tgggcaacagagcga

SEQ ID NO: 80080 - DNA, 15 bp, Homo sapiens
ctgggcaacagagcg

SEQ ID NO: 80081 - DNA, 15 bp, Homo sapiens
tgagccactgcactc

SEQ ID NO: 80082 - DNA, 15 bp, Homo sapiens
ttgagccactgcact

SEQ ID NO: 80083 - DNA, 15 bp, Homo sapiens
attgagccactgcac

SEQ ID NO: 80084 - DNA, 15 bp, Homo sapiens
gattgagccactgca

SEQ ID NO: 80085 - DNA, 15 bp, Homo sapiens
agattgagccactgc

SEQ ID NO: 80086 - DNA, 15 bp, Homo sapiens
aagattgagccactg

SEQ ID NO: 80087 - DNA, 15 bp, Homo sapiens
caagattgagccact

SEQ ID NO: 80088 - DNA, 15 bp, Homo sapiens
ccaagattgagccac

SEQ ID NO: 80089 - DNA, 15 bp, Homo sapiens
gccaagattgagcca

SEQ ID NO: 80090 - DNA, 15 bp, Homo sapiens
agccaagattgagcc

SEQ ID NO: 80091 - DNA, 15 bp, Homo sapiens
gagccaagattgagc

SEQ ID NO: 80092 - DNA, 15 bp, Homo sapiens
tgagccaagattgag

SEQ ID NO: 80093 - DNA, 15 bp, Homo sapiens
gtgagccaagattga

SEQ ID NO: 80094 - DNA, 15 bp, Homo sapiens
ggcagtgagccaaga

SEQ ID NO: 80095 - DNA, 15 bp, Homo sapiens
tggcagtgagccaag

SEQ ID NO: 80096 - DNA, 15 bp, Homo sapiens
gtggcagtgagccaa

SEQ ID NO: 80097 - DNA, 15 bp, Homo sapiens
ggtggcagtgagcca

SEQ ID NO: 80098 - DNA, 15 bp, Homo sapiens
aggtggcagtgagcc

SEQ ID NO: 80099 - DNA, 15 bp, Homo sapiens
gaggtggcagtgagc

SEQ ID NO: 80100 - DNA, 15 bp, Homo sapiens
agaggtggcagtgag

SEQ ID NO: 80101 - DNA, 15 bp, Homo sapiens
cagaggtggcagtga

SEQ ID NO: 80102 - DNA, 15 bp, Homo sapiens
gcagaggtggcagtg

SEQ ID NO: 80103 - DNA, 15 bp, Homo sapiens
ggcagaggtggcagt

SEQ ID NO: 80104 - DNA, 15 bp, Homo sapiens
aggcagaggtggcag

SEQ ID NO: 80105 - DNA, 15 bp, Homo sapiens
gaggcagaggtggca

SEQ ID NO: 80106 - DNA, 15 bp, Homo sapiens
ggaggcagaggtggc

SEQ ID NO: 80107 - DNA, 15 bp, Homo sapiens
gggaggcagaggtgg

SEQ ID NO: 80108 - DNA, 15 bp, Homo sapiens
tgggaggcagaggtg

SEQ ID NO: 80109 - DNA, 15 bp, Homo sapiens
taggagaatcacttg

SEQ ID NO: 80110 - DNA, 15 bp, Homo sapiens
gtaggagaatcactt

SEQ ID NO: 80111 - DNA, 15 bp, Homo sapiens
ggtaggagaatcact

SEQ ID NO: 80112 - DNA, 15 bp, Homo sapiens
aggtaggagaatcac

SEQ ID NO: 80113 - DNA, 15 bp, Homo sapiens
gaggtaggagaatca

SEQ ID NO: 80114 - DNA, 15 bp, Homo sapiens
tgaggtaggagaatc

SEQ ID NO: 80115 - DNA, 15 bp, Homo sapiens
ctgaggtaggagaat

SEQ ID NO: 80116 - DNA, 15 bp, Homo sapiens
gctgaggtaggagaa

SEQ ID NO: 80117 - DNA, 15 bp, Homo sapiens
ggctgaggtaggaga

SEQ ID NO: 80118 - DNA, 15 bp, Homo sapiens
aggctgaggtaggag

SEQ ID NO: 80119 - DNA, 15 bp, Homo sapiens
gaggctgaggtagga

SEQ ID NO: 80120 - DNA, 15 bp, Homo sapiens
ggaggctgaggtagg

SEQ ID NO: 80121 - DNA, 15 bp, Homo sapiens
aggaggctgaggtag

SEQ ID NO: 80122 - DNA, 15 bp, Homo sapiens
caggaggctgaggta

SEQ ID NO: 80123 - DNA, 15 bp, Homo sapiens
tcaggaggctgaggt

SEQ ID NO: 80124 - DNA, 15 bp, Homo sapiens
atgcttgtaatccca

SEQ ID NO: 80125 - DNA, 15 bp, Homo sapiens
catgcttgtaatccc

SEQ ID NO: 80126 - DNA, 15 bp, Homo sapiens
acatgcttgtaatcc

SEQ ID NO: 80127 - DNA, 15 bp, Homo sapiens
ggcacatgcttgtaa

SEQ ID NO: 80128 - DNA, 15 bp, Homo sapiens
tggcacatgcttgta

SEQ ID NO: 80129 - DNA, 15 bp, Homo sapiens
gtggcacatgcttgt

SEQ ID NO: 80130 - DNA, 15 bp, Homo sapiens
ggtggcacatgcttg

SEQ ID NO: 80131 - DNA, 15 bp, Homo sapiens
tggtggcacatgctt

SEQ ID NO: 80132 - DNA, 15 bp, Homo sapiens
gtggtggcacatgct

SEQ ID NO: 80133 - DNA, 15 bp, Homo sapiens
tgtggtggcacatgc

SEQ ID NO: 80134 - DNA, 15 bp, Homo sapiens
gtgtggtggcacatg

SEQ ID NO: 80135 - DNA, 15 bp, Homo sapiens
agtgtggtggcacat

SEQ ID NO: 80136 - DNA, 15 bp, Homo sapiens
cagtgtggtggcaca

SEQ ID NO: 80137 - DNA, 15 bp, Homo sapiens
ccagtgtggtggcac

SEQ ID NO: 80138 - DNA, 15 bp, Homo sapiens
gccagtgtggtggca

SEQ ID NO: 80139 - DNA, 15 bp, Homo sapiens
agccagtgtggtggc

SEQ ID NO: 80140 - DNA, 15 bp, Homo sapiens
tagccagtgtggtgg

SEQ ID NO: 80141 - DNA, 15 bp, Homo sapiens
ttagccagtgtggtg

SEQ ID NO: 80142 - DNA, 15 bp, Homo sapiens
attagccagtgtggt

SEQ ID NO: 80143 - DNA, 15 bp, Homo sapiens
aattagccagtgtgg

SEQ ID NO: 80144 - DNA, 15 bp, Homo sapiens
aaattagccagtgtg

SEQ ID NO: 80145 - DNA, 15 bp, Homo sapiens
aaaattagccagtgt

SEQ ID NO: 80146 - DNA, 15 bp, Homo sapiens
aaaaattagccagtg

SEQ ID NO: 80147 - DNA, 15 bp, Homo sapiens
gaaaaattagccagt

SEQ ID NO: 80148 - DNA, 15 bp, Homo sapiens
agaaaaattagccag

SEQ ID NO: 80149 - DNA, 15 bp, Homo sapiens
tagaaaaattagcca

SEQ ID NO: 80150 - DNA, 15 bp, Homo sapiens
ttagaaaaattagcc

SEQ ID NO: 80151 - DNA, 15 bp, Homo sapiens
attagaaaaattagc

SEQ ID NO: 80152 - DNA, 15 bp, Homo sapiens
aattagaaaaattag

SEQ ID NO: 80153 - DNA, 15 bp, Homo sapiens
aaattagaaaaatta

SEQ ID NO: 80154 - DNA, 15 bp, Homo sapiens
aaaattagaaaaatt

SEQ ID NO: 80155 - DNA, 15 bp, Homo sapiens
ctaaaattagaaaaa

SEQ ID NO: 80156 - DNA, 15 bp, Homo sapiens
actaaaattagaaaa

SEQ ID NO: 80157 - DNA, 15 bp, Homo sapiens
tactaaaattagaaa

SEQ ID NO: 80158 - DNA, 15 bp, Homo sapiens
ctactaaaattagaa

SEQ ID NO: 80159 - DNA, 15 bp, Homo sapiens
tctactaaaattaga

SEQ ID NO: 80160 - DNA, 15 bp, Homo sapiens
ctctactaaaattag

SEQ ID NO: 80161 - DNA, 15 bp, Homo sapiens
tctctactaaaatta

SEQ ID NO: 80162 - DNA, 15 bp, Homo sapiens
atctctactaaaatt

SEQ ID NO: 80163 - DNA, 15 bp, Homo sapiens
catctctactaaaat

SEQ ID NO: 80164 - DNA, 15 bp, Homo sapiens
tccatctctactaaa

SEQ ID NO: 80165 - DNA, 15 bp, Homo sapiens
ctccatctctactaa

SEQ ID NO: 80166 - DNA, 15 bp, Homo sapiens
actccatctctacta

SEQ ID NO: 80167 - DNA, 15 bp, Homo sapiens
aactccatctctact

SEQ ID NO: 80168 - DNA, 15 bp, Homo sapiens
aaactccatctctac

SEQ ID NO: 80169 - DNA, 15 bp, Homo sapiens
gaaactccatctcta

SEQ ID NO: 80170 - DNA, 15 bp, Homo sapiens
tgaaactccatctct

SEQ ID NO: 80171 - DNA, 15 bp, Homo sapiens
gtgaaactccatctc

SEQ ID NO: 80172 - DNA, 15 bp, Homo sapiens
ggtgaaactccatct

SEQ ID NO: 80173 - DNA, 15 bp, Homo sapiens
tggtgaaactccatc

SEQ ID NO: 80174 - DNA, 15 bp, Homo sapiens
atggtgaaactccat

SEQ ID NO: 80175 - DNA, 15 bp, Homo sapiens
catggtgaaactcca

SEQ ID NO: 80176 - DNA, 15 bp, Homo sapiens
acatggtgaaactcc

SEQ ID NO: 80177 - DNA, 15 bp, Homo sapiens
tccaacatggtgaaa

SEQ ID NO: 80178 - DNA, 15 bp, Homo sapiens
gtccaacatggtgaa

SEQ ID NO: 80179 - DNA, 15 bp, Homo sapiens
tgtccaacatggtga

SEQ ID NO: 80180 - DNA, 15 bp, Homo sapiens
ctgtccaacatggtg

SEQ ID NO: 80181 - DNA, 15 bp, Homo sapiens
cctgtccaacatggt

SEQ ID NO: 80182 - DNA, 15 bp, Homo sapiens
tcctgtccaacatgg

SEQ ID NO: 80183 - DNA, 15 bp, Homo sapiens
atcctgtccaacatg

SEQ ID NO: 80184 - DNA, 15 bp, Homo sapiens
catcctgtccaacat

SEQ ID NO: 80185 - DNA, 15 bp, Homo sapiens
ccatcctgtccaaca

SEQ ID NO: 80186 - DNA, 15 bp, Homo sapiens
accatcctgtccaac

SEQ ID NO: 80187 - DNA, 15 bp, Homo sapiens
gaccatcctgtccaa

SEQ ID NO: 80188 - DNA, 15 bp, Homo sapiens
agaccatcctgtcca

SEQ ID NO: 80189 - DNA, 15 bp, Homo sapiens
aagaccatcctgtcc

SEQ ID NO: 80190 - DNA, 15 bp, Homo sapiens
caagaccatcctgtc

SEQ ID NO: 80191 - DNA, 15 bp, Homo sapiens
tcaagaccatcctgt

SEQ ID NO: 80192 - DNA, 15 bp, Homo sapiens
ttcaagaccatcctg

SEQ ID NO: 80193 - DNA, 15 bp, Homo sapiens
gttcaagaccatcct

SEQ ID NO: 80194 - DNA, 15 bp, Homo sapiens
agttcaagaccatcc

SEQ ID NO: 80195 - DNA, 15 bp, Homo sapiens
gagttcaagaccatc

SEQ ID NO: 80196 - DNA, 15 bp, Homo sapiens
ggagttcaagaccat

SEQ ID NO: 80197 - DNA, 15 bp, Homo sapiens
agtcaggagttcaag

SEQ ID NO: 80198 - DNA, 15 bp, Homo sapiens
aagtcaggagttcaa

SEQ ID NO: 80199 - DNA, 15 bp, Homo sapiens
taagtcaggagttca

SEQ ID NO: 80200 - DNA, 15 bp, Homo sapiens
ctaagtcaggagttc

SEQ ID NO: 80201 - DNA, 15 bp, Homo sapiens
actaagtcaggagtt

SEQ ID NO: 80202 - DNA, 15 bp, Homo sapiens
cactaagtcaggagt

SEQ ID NO: 80203 - DNA, 15 bp, Homo sapiens
tcactaagtcaggag

SEQ ID NO: 80204 - DNA, 15 bp, Homo sapiens
atcactaagtcagga

SEQ ID NO: 80205 - DNA, 15 bp, Homo sapiens
gatcactaagtcagg

SEQ ID NO: 80206 - DNA, 15 bp, Homo sapiens
ggatcactaagtcag

SEQ ID NO: 80207 - DNA, 15 bp, Homo sapiens
tggatcactaagtca

SEQ ID NO: 80208 - DNA, 15 bp, Homo sapiens
gtggatcactaagtc

SEQ ID NO: 80209 - DNA, 15 bp, Homo sapiens
ggtggatcactaagt

SEQ ID NO: 80210 - DNA, 15 bp, Homo sapiens
gggtggatcactaag

SEQ ID NO: 80211 - DNA, 15 bp, Homo sapiens
cgggtggatcactaa

SEQ ID NO: 80212 - DNA, 15 bp, Homo sapiens
gcgggtggatcacta

SEQ ID NO: 80213 - DNA, 15 bp, Homo sapiens
gaaggcgggtggatc

SEQ ID NO: 80214 - DNA, 15 bp, Homo sapiens
cgaaggcgggtggat

SEQ ID NO: 80215 - DNA, 15 bp, Homo sapiens
gcgaaggcgggtgga

SEQ ID NO: 80216 - DNA, 15 bp, Homo sapiens
ggcgaaggcgggtgg

SEQ ID NO: 80217 - DNA, 15 bp, Homo sapiens
aggcgaaggcgggtg

SEQ ID NO: 80218 - DNA, 15 bp, Homo sapiens
gaggcgaaggcgggt

SEQ ID NO: 80219 - DNA, 15 bp, Homo sapiens
ggaggcgaaggcggg

SEQ ID NO: 80220 - DNA, 15 bp, Homo sapiens
gggaggcgaaggcgg

SEQ ID NO: 80221 - DNA, 15 bp, Homo sapiens
tgggaggcgaaggcg

SEQ ID NO: 80222 - DNA, 15 bp, Homo sapiens
ttgggaggcgaaggc

SEQ ID NO: 80223 - DNA, 15 bp, Homo sapiens
tttgggaggcgaagg

SEQ ID NO: 80224 - DNA, 15 bp, Homo sapiens
ctttgggaggcgaag

SEQ ID NO: 80225 - DNA, 15 bp, Homo sapiens
actttgggaggcgaa

SEQ ID NO: 80226 - DNA, 15 bp, Homo sapiens
aactttgggaggcga

SEQ ID NO: 80227 - DNA, 15 bp, Homo sapiens
gaactttgggaggcg

SEQ ID NO: 80228 - DNA, 15 bp, Homo sapiens
agaactttgggaggc

SEQ ID NO: 80229 - DNA, 15 bp, Homo sapiens
cagaactttgggagg

SEQ ID NO: 80230 - DNA, 15 bp, Homo sapiens
ccagaactttgggag

SEQ ID NO: 80231 - DNA, 15 bp, Homo sapiens
cccagaactttggga

SEQ ID NO: 80232 - DNA, 15 bp, Homo sapiens
tcccagaactttggg

SEQ ID NO: 80233 - DNA, 15 bp, Homo sapiens
atcccagaactttgg

SEQ ID NO: 80234 - DNA, 15 bp, Homo sapiens
gtaatcccagaactt

SEQ ID NO: 80235 - DNA, 15 bp, Homo sapiens
tgtaatcccagaact

SEQ ID NO: 80236 - DNA, 15 bp, Homo sapiens
ctgtaatcccagaac

SEQ ID NO: 80237 - DNA, 15 bp, Homo sapiens
cctgtaatcccagaa

SEQ ID NO: 80238 - DNA, 15 bp, Homo sapiens
gcctgtaatcccaga

SEQ ID NO: 80239 - DNA, 15 bp, Homo sapiens
atggctcatgcctgt

SEQ ID NO: 80240 - DNA, 15 bp, Homo sapiens
gatggctcatgcctg

SEQ ID NO: 80241 - DNA, 15 bp, Homo sapiens
cgatggctcatgcct

SEQ ID NO: 80242 - DNA, 15 bp, Homo sapiens
acgatggctcatgcc

SEQ ID NO: 80243 - DNA, 15 bp, Homo sapiens
cacgatggctcatgc

SEQ ID NO: 80244 - DNA, 15 bp, Homo sapiens
gcacgatggctcatg

SEQ ID NO: 80245 - DNA, 15 bp, Homo sapiens
ggcacgatggctcat

SEQ ID NO: 80246 - DNA, 15 bp, Homo sapiens
aggcacgatggctca

SEQ ID NO: 80247 - DNA, 15 bp, Homo sapiens
caggcacgatggctc

SEQ ID NO: 80248 - DNA, 15 bp, Homo sapiens
ccaggcacgatggct

SEQ ID NO: 80249 - DNA, 15 bp, Homo sapiens
gccaggcacgatggc

SEQ ID NO: 80250 - DNA, 15 bp, Homo sapiens
tgccaggcacgatgg

SEQ ID NO: 80251 - DNA, 15 bp, Homo sapiens
ttgccaggcacgatg

SEQ ID NO: 80252 - DNA, 15 bp, Homo sapiens
attgccaggcacgat

SEQ ID NO: 80253 - DNA, 15 bp, Homo sapiens
aattgccaggcacga

SEQ ID NO: 80254 - DNA, 15 bp, Homo sapiens
taattgccaggcacg

SEQ ID NO: 80255 - DNA, 15 bp, Homo sapiens
ataattgccaggcac

SEQ ID NO: 80256 - DNA, 15 bp, Homo sapiens
tataattgccaggca

SEQ ID NO: 80257 - DNA, 15 bp, Homo sapiens
atataattgccaggc

SEQ ID NO: 80258 - DNA, 15 bp, Homo sapiens
aatataattgccagg

SEQ ID NO: 80259 - DNA, 15 bp, Homo sapiens
aaatataattgccag

SEQ ID NO: 80260 - DNA, 15 bp, Homo sapiens
taaatataattgcca

SEQ ID NO: 80261 - DNA, 15 bp, Homo sapiens
ttaaatataattgcc

SEQ ID NO: 80262 - DNA, 15 bp, Homo sapiens
attaaatataattgc

SEQ ID NO: 80263 - DNA, 15 bp, Homo sapiens
tattaaatataattg

SEQ ID NO: 80264 - DNA, 15 bp, Homo sapiens
atattaaatataatt

SEQ ID NO: 80265 - DNA, 15 bp, Homo sapiens
aatattaaatataat

SEQ ID NO: 80266 - DNA, 15 bp, Homo sapiens
aaatattaaatataa

SEQ ID NO: 80267 - DNA, 15 bp, Homo sapiens
taaatattaaatata

SEQ ID NO: 80268 - DNA, 15 bp, Homo sapiens
ttaaatattaaatat

SEQ ID NO: 80269 - DNA, 15 bp, Homo sapiens
attaaatattaaata

SEQ ID NO: 80270 - DNA, 15 bp, Homo sapiens
tattaaatattaaat

SEQ ID NO: 80271 - DNA, 15 bp, Homo sapiens
ttattaaatattaaa

SEQ ID NO: 80272 - DNA, 15 bp, Homo sapiens
attattaaatattaa

SEQ ID NO: 80273 - DNA, 15 bp, Homo sapiens
tattattaaatatta

SEQ ID NO: 80274 - DNA, 15 bp, Homo sapiens
ttattattaaatatt

SEQ ID NO: 80275 - DNA, 15 bp, Homo sapiens
cttattattaaatat

SEQ ID NO: 80276 - DNA, 15 bp, Homo sapiens
ccttattattaaata

SEQ ID NO: 80277 - DNA, 15 bp, Homo sapiens
tccttattattaaat

SEQ ID NO: 80278 - DNA, 15 bp, Homo sapiens
ttccttattattaaa

SEQ ID NO: 80279 - DNA, 15 bp, Homo sapiens
tttccttattattaa

SEQ ID NO: 80280 - DNA, 15 bp, Homo sapiens
atttccttattatta

SEQ ID NO: 80281 - DNA, 15 bp, Homo sapiens
tatttccttattatt

SEQ ID NO: 80282 - DNA, 15 bp, Homo sapiens
ttatttccttattat

SEQ ID NO: 80283 - DNA, 15 bp, Homo sapiens
attatttccttatta

SEQ ID NO: 80284 - DNA, 15 bp, Homo sapiens
aattatttccttatt

SEQ ID NO: 80285 - DNA, 15 bp, Homo sapiens
caattatttccttat

SEQ ID NO: 80286 - DNA, 15 bp, Homo sapiens
gcaattatttcctta

SEQ ID NO: 80287 - DNA, 15 bp, Homo sapiens
agcaattatttcctt

SEQ ID NO: 80288 - DNA, 15 bp, Homo sapiens
cagcaattatttcct

SEQ ID NO: 80289 - DNA, 15 bp, Homo sapiens
acagcaattatttcc

SEQ ID NO: 80290 - DNA, 15 bp, Homo sapiens
tacagcaattatttc

SEQ ID NO: 80291 - DNA, 15 bp, Homo sapiens
ttacagcaattattt

SEQ ID NO: 80292 - DNA, 15 bp, Homo sapiens
gttacagcaattatt

SEQ ID NO: 80293 - DNA, 15 bp, Homo sapiens
agttacagcaattat

SEQ ID NO: 80294 - DNA, 15 bp, Homo sapiens
aagttacagcaatta

SEQ ID NO: 80295 - DNA, 15 bp, Homo sapiens
aaagttacagcaatt

SEQ ID NO: 80296 - DNA, 15 bp, Homo sapiens
taaagttacagcaat

SEQ ID NO: 80297 - DNA, 15 bp, Homo sapiens
gtaaagttacagcaa

SEQ ID NO: 80298 - DNA, 15 bp, Homo sapiens
agtaaagttacagca

SEQ ID NO: 80299 - DNA, 15 bp, Homo sapiens
aagtaaagttacagc

SEQ ID NO: 80300 - DNA, 15 bp, Homo sapiens
aaagtaaagttacag

SEQ ID NO: 80301 - DNA, 15 bp, Homo sapiens
taaagtaaagttaca

SEQ ID NO: 80302 - DNA, 15 bp, Homo sapiens
ttaaagtaaagttac

SEQ ID NO: 80303 - DNA, 15 bp, Homo sapiens
tttaaagtaaagtta

SEQ ID NO: 80304 - DNA, 15 bp, Homo sapiens
atttaaagtaaagtt

SEQ ID NO: 80305 - DNA, 15 bp, Homo sapiens
aatttaaagtaaagt

SEQ ID NO: 80306 - DNA, 15 bp, Homo sapiens
caatttaaagtaaag

SEQ ID NO: 80307 - DNA, 15 bp, Homo sapiens
acaatttaaagtaaa

SEQ ID NO: 80308 - DNA, 15 bp, Homo sapiens
cacaatttaaagtaa

SEQ ID NO: 80309 - DNA, 15 bp, Homo sapiens
ccacaatttaaagta

SEQ ID NO: 80310 - DNA, 15 bp, Homo sapiens
tccacaatttaaagt

SEQ ID NO: 80311 - DNA, 15 bp, Homo sapiens
ttccacaatttaaag

SEQ ID NO: 80312 - DNA, 15 bp, Homo sapiens
attccacaatttaaa

SEQ ID NO: 80313 - DNA, 15 bp, Homo sapiens
aattccacaatttaa

SEQ ID NO: 80314 - DNA, 15 bp, Homo sapiens
gaattccacaattta

SEQ ID NO: 80315 - DNA, 15 bp, Homo sapiens
agaattccacaattt

SEQ ID NO: 80316 - DNA, 15 bp, Homo sapiens
cagaattccacaatt

SEQ ID NO: 80317 - DNA, 15 bp, Homo sapiens
tcagaattccacaat

SEQ ID NO: 80318 - DNA, 15 bp, Homo sapiens
ttcagaattccacaa

SEQ ID NO: 80319 - DNA, 15 bp, Homo sapiens
tttcagaattccaca

SEQ ID NO: 80320 - DNA, 15 bp, Homo sapiens
gtttcagaattccac

SEQ ID NO: 80321 - DNA, 15 bp, Homo sapiens
agtttcagaattcca

SEQ ID NO: 80322 - DNA, 15 bp, Homo sapiens
cagtttcagaattcc

SEQ ID NO: 80323 - DNA, 15 bp, Homo sapiens
ccagtttcagaattc

SEQ ID NO: 80324 - DNA, 15 bp, Homo sapiens
tccagtttcagaatt

SEQ ID NO: 80325 - DNA, 15 bp, Homo sapiens
ttccagtttcagaat

SEQ ID NO: 80326 - DNA, 15 bp, Homo sapiens
cttccagtttcagaa

SEQ ID NO: 80327 - DNA, 15 bp, Homo sapiens
ccttccagtttcaga

SEQ ID NO: 80328 - DNA, 15 bp, Homo sapiens
cccttccagtttcag

SEQ ID NO: 80329 - DNA, 15 bp, Homo sapiens
tcccttccagtttca

SEQ ID NO: 80330 - DNA, 15 bp, Homo sapiens
ttcccttccagtttc

SEQ ID NO: 80331 - DNA, 15 bp, Homo sapiens
gttcccttccagttt

SEQ ID NO: 80332 - DNA, 15 bp, Homo sapiens
agttcccttccagtt

SEQ ID NO: 80333 - DNA, 15 bp, Homo sapiens
cagttcccttccagt

SEQ ID NO: 80334 - DNA, 15 bp, Homo sapiens
ccagttcccttccag

SEQ ID NO: 80335 - DNA, 15 bp, Homo sapiens
tccagttcccttcca

SEQ ID NO: 80336 - DNA, 15 bp, Homo sapiens
ttccagttcccttcc

SEQ ID NO: 80337 - DNA, 15 bp, Homo sapiens
tttccagttcccttc

SEQ ID NO: 80338 - DNA, 15 bp, Homo sapiens
atttccagttccctt

SEQ ID NO: 80339 - DNA, 15 bp, Homo sapiens
catttccagttccct

SEQ ID NO: 80340 - DNA, 15 bp, Homo sapiens
tcatttccagttccc

SEQ ID NO: 80341 - DNA, 15 bp, Homo sapiens
gtcatttccagttcc

SEQ ID NO: 80342 - DNA, 15 bp, Homo sapiens
agtcatttccagttc

SEQ ID NO: 80343 - DNA, 15 bp, Homo sapiens
aagtcatttccagtt

SEQ ID NO: 80344 - DNA, 15 bp, Homo sapiens
caagtcatttccagt

SEQ ID NO: 80345 - DNA, 15 bp, Homo sapiens
acaagtcatttccag

SEQ ID NO: 80346 - DNA, 15 bp, Homo sapiens
aacaagtcatttcca

SEQ ID NO: 80347 - DNA, 15 bp, Homo sapiens
caacaagtcatttcc

SEQ ID NO: 80348 - DNA, 15 bp, Homo sapiens
tcaacaagtcatttc

SEQ ID NO: 80349 - DNA, 15 bp, Homo sapiens
ttcaacaagtcattt

SEQ ID NO: 80350 - DNA, 15 bp, Homo sapiens
attcaacaagtcatt

SEQ ID NO: 80351 - DNA, 15 bp, Homo sapiens
gattcaacaagtcat

SEQ ID NO: 80352 - DNA, 15 bp, Homo sapiens
tgattcaacaagtca

SEQ ID NO: 80353 - DNA, 15 bp, Homo sapiens
ttgattcaacaagtc

SEQ ID NO: 80354 - DNA, 15 bp, Homo sapiens
tttgattcaacaagt

SEQ ID NO: 80355 - DNA, 15 bp, Homo sapiens
atttgattcaacaag

SEQ ID NO: 80356 - DNA, 15 bp, Homo sapiens
gatttgattcaacaa

SEQ ID NO: 80357 - DNA, 15 bp, Homo sapiens
tgatttgattcaaca

SEQ ID NO: 80358 - DNA, 15 bp, Homo sapiens
atgatttgattcaac

SEQ ID NO: 80359 - DNA, 15 bp, Homo sapiens
aatgatttgattcaa

SEQ ID NO: 80360 - DNA, 15 bp, Homo sapiens
aaatgatttgattca

SEQ ID NO: 80361 - DNA, 15 bp, Homo sapiens
aaaatgatttgattc

SEQ ID NO: 80362 - DNA, 15 bp, Homo sapiens
taaaatgatttgatt

SEQ ID NO: 80363 - DNA, 15 bp, Homo sapiens
ttaaaatgatttgat

SEQ ID NO: 80364 - DNA, 15 bp, Homo sapiens
tttaaaatgatttga

SEQ ID NO: 80365 - DNA, 15 bp, Homo sapiens
gtttaaaatgatttg

SEQ ID NO: 80366 - DNA, 15 bp, Homo sapiens
agtttaaaatgattt

SEQ ID NO: 80367 - DNA, 15 bp, Homo sapiens
aagtttaaaatgatt

SEQ ID NO: 80368 - DNA, 15 bp, Homo sapiens
aaagtttaaaatgat

SEQ ID NO: 80369 - DNA, 15 bp, Homo sapiens
aaaagtttaaaatga

SEQ ID NO: 80370 - DNA, 15 bp, Homo sapiens
taaaagtttaaaatg

SEQ ID NO: 80371 - DNA, 15 bp, Homo sapiens
ataaaagtttaaaat

SEQ ID NO: 80372 - DNA, 15 bp, Homo sapiens
aataaaagtttaaaa

SEQ ID NO: 80373 - DNA, 15 bp, Homo sapiens
aaataaaagtttaaa

SEQ ID NO: 80374 - DNA, 15 bp, Homo sapiens
aaaataaaagtttaa

SEQ ID NO: 80375 - DNA, 15 bp, Homo sapiens
caaaataaaagttta

SEQ ID NO: 80376 - DNA, 15 bp, Homo sapiens
gcaaaataaaagttt

SEQ ID NO: 80377 - DNA, 15 bp, Homo sapiens
ggcaaaataaaagtt

SEQ ID NO: 80378 - DNA, 15 bp, Homo sapiens
tggcaaaataaaagt

SEQ ID NO: 80379 - DNA, 15 bp, Homo sapiens
ctggcaaaataaaag

SEQ ID NO: 80380 - DNA, 15 bp, Homo sapiens
actggcaaaataaaa

SEQ ID NO: 80381 - DNA, 15 bp, Homo sapiens
cactggcaaaataaa

SEQ ID NO: 80382 - DNA, 15 bp, Homo sapiens
ccactggcaaaataa

SEQ ID NO: 80383 - DNA, 15 bp, Homo sapiens
tccactggcaaaata

SEQ ID NO: 80384 - DNA, 15 bp, Homo sapiens
ttccactggcaaaat

SEQ ID NO: 80385 - DNA, 15 bp, Homo sapiens
tttccactggcaaaa

SEQ ID NO: 80386 - DNA, 15 bp, Homo sapiens
ttttccactggcaaa

SEQ ID NO: 80387 - DNA, 15 bp, Homo sapiens
tttttccactggcaa

SEQ ID NO: 80388 - DNA, 15 bp, Homo sapiens
ttttttccactggca

SEQ ID NO: 80389 - DNA, 15 bp, Homo sapiens
attttttccactggc

SEQ ID NO: 80390 - DNA, 15 bp, Homo sapiens
tattttttccactgg

SEQ ID NO: 80391 - DNA, 15 bp, Homo sapiens
ttattttttccactg

SEQ ID NO: 80392 - DNA, 15 bp, Homo sapiens
cttattttttccact

SEQ ID NO: 80393 - DNA, 15 bp, Homo sapiens
gcttattttttccac

SEQ ID NO: 80394 - DNA, 15 bp, Homo sapiens
ggcttattttttcca

SEQ ID NO: 80395 - DNA, 15 bp, Homo sapiens
gggcttattttttcc

SEQ ID NO: 80396 - DNA, 15 bp, Homo sapiens
ggggcttattttttc

SEQ ID NO: 80397 - DNA, 15 bp, Homo sapiens
gggggcttatttttt

SEQ ID NO: 80398 - DNA, 15 bp, Homo sapiens
tgggggcttattttt

SEQ ID NO: 80399 - DNA, 15 bp, Homo sapiens
ttgggggcttatttt

SEQ ID NO: 80400 - DNA, 15 bp, Homo sapiens
tttgggggcttattt

SEQ ID NO: 80401 - DNA, 15 bp, Homo sapiens
ttttgggggcttatt

SEQ ID NO: 80402 - DNA, 15 bp, Homo sapiens
cttttgggggcttat

SEQ ID NO: 80403 - DNA, 15 bp, Homo sapiens
tcttttgggggctta

SEQ ID NO: 80404 - DNA, 15 bp, Homo sapiens
ctcttttgggggctt

SEQ ID NO: 80405 - DNA, 15 bp, Homo sapiens
gctcttttgggggct

SEQ ID NO: 80406 - DNA, 15 bp, Homo sapiens
tgctcttttgggggc

SEQ ID NO: 80407 - DNA, 15 bp, Homo sapiens
ctgctcttttggggg

SEQ ID NO: 80408 - DNA, 15 bp, Homo sapiens
cctgctcttttgggg

SEQ ID NO: 80409 - DNA, 15 bp, Homo sapiens
ccctgctcttttggg

SEQ ID NO: 80410 - DNA, 15 bp, Homo sapiens
cccctgctcttttgg

SEQ ID NO: 80411 - DNA, 15 bp, Homo sapiens
tcccctgctcttttg

SEQ ID NO: 80412 - DNA, 15 bp, Homo sapiens
gtcccctgctctttt

SEQ ID NO: 80413 - DNA, 15 bp, Homo sapiens
ggtcccctgctcttt

SEQ ID NO: 80414 - DNA, 15 bp, Homo sapiens
aggtcccctgctctt

SEQ ID NO: 80415 - DNA, 15 bp, Homo sapiens
caggtcccctgctct

SEQ ID NO: 80416 - DNA, 15 bp, Homo sapiens
gcaggtcccctgctc

SEQ ID NO: 80417 - DNA, 15 bp, Homo sapiens
agcaggtcccctgct

SEQ ID NO: 80418 - DNA, 15 bp, Homo sapiens
cagcaggtcccctgc

SEQ ID NO: 80419 - DNA, 15 bp, Homo sapiens
tcagcaggtcccctg

SEQ ID NO: 80420 - DNA, 15 bp, Homo sapiens
atcagcaggtcccct

SEQ ID NO: 80421 - DNA, 15 bp, Homo sapiens
catcagcaggtcccc

SEQ ID NO: 80422 - DNA, 15 bp, Homo sapiens
acatcagcaggtccc

SEQ ID NO: 80423 - DNA, 15 bp, Homo sapiens
gacatcagcaggtcc

SEQ ID NO: 80424 - DNA, 15 bp, Homo sapiens
ggacatcagcaggtc

SEQ ID NO: 80425 - DNA, 15 bp, Homo sapiens
gggacatcagcaggt

SEQ ID NO: 80426 - DNA, 15 bp, Homo sapiens
tgggacatcagcagg

SEQ ID NO: 80427 - DNA, 15 bp, Homo sapiens
gtgggacatcagcag

SEQ ID NO: 80428 - DNA, 15 bp, Homo sapiens
tgtgggacatcagca

SEQ ID NO: 80429 - DNA, 15 bp, Homo sapiens
ctgtgggacatcagc

SEQ ID NO: 80430 - DNA, 15 bp, Homo sapiens
actgtgggacatcag

SEQ ID NO: 80431 - DNA, 15 bp, Homo sapiens
tactgtgggacatca

SEQ ID NO: 80432 - DNA, 15 bp, Homo sapiens
ttactgtgggacatc

SEQ ID NO: 80433 - DNA, 15 bp, Homo sapiens
attactgtgggacat

SEQ ID NO: 80434 - DNA, 15 bp, Homo sapiens
aattactgtgggaca

SEQ ID NO: 80435 - DNA, 15 bp, Homo sapiens
gaattactgtgggac

SEQ ID NO: 80436 - DNA, 15 bp, Homo sapiens
tgaattactgtggga

SEQ ID NO: 80437 - DNA, 15 bp, Homo sapiens
ctgaattactgtggg

SEQ ID NO: 80438 - DNA, 15 bp, Homo sapiens
tctgaattactgtgg

SEQ ID NO: 80439 - DNA, 15 bp, Homo sapiens
ctctgaattactgtg

SEQ ID NO: 80440 - DNA, 15 bp, Homo sapiens
gctctgaattactgt

SEQ ID NO: 80441 - DNA, 15 bp, Homo sapiens
agctctgaattactg

SEQ ID NO: 80442 - DNA, 15 bp, Homo sapiens
cagctctgaattact

SEQ ID NO: 80443 - DNA, 15 bp, Homo sapiens
ccagctctgaattac

SEQ ID NO: 80444 - DNA, 15 bp, Homo sapiens
tccagctctgaatta

SEQ ID NO: 80445 - DNA, 15 bp, Homo sapiens
ctccagctctgaatt

SEQ ID NO: 80446 - DNA, 15 bp, Homo sapiens
tctccagctctgaat

SEQ ID NO: 80447 - DNA, 15 bp, Homo sapiens
atctccagctctgaa

SEQ ID NO: 80448 - DNA, 15 bp, Homo sapiens
catctccagctctga

SEQ ID NO: 80449 - DNA, 15 bp, Homo sapiens
tcatctccagctctg

SEQ ID NO: 80450 - DNA, 15 bp, Homo sapiens
ctcatctccagctct

SEQ ID NO: 80451 - DNA, 15 bp, Homo sapiens
cctcatctccagctc

SEQ ID NO: 80452 - DNA, 15 bp, Homo sapiens
acctcatctccagct

SEQ ID NO: 80453 - DNA, 15 bp, Homo sapiens
aacctcatctccagc

SEQ ID NO: 80454 - DNA, 15 bp, Homo sapiens
caacctcatctccag

SEQ ID NO: 80455 - DNA, 15 bp, Homo sapiens
tcaacctcatctcca

SEQ ID NO: 80456 - DNA, 15 bp, Homo sapiens
ttcaacctcatctcc

SEQ ID NO: 80457 - DNA, 15 bp, Homo sapiens
cttcaacctcatctc

SEQ ID NO: 80458 - DNA, 15 bp, Homo sapiens
ccttcaacctcatct

SEQ ID NO: 80459 - DNA, 15 bp, Homo sapiens
gccttcaacctcatc

SEQ ID NO: 80460 - DNA, 15 bp, Homo sapiens
agccttcaacctcat

SEQ ID NO: 80461 - DNA, 15 bp, Homo sapiens
aagccttcaacctca

SEQ ID NO: 80462 - DNA, 15 bp, Homo sapiens
aaagccttcaacctc

SEQ ID NO: 80463 - DNA, 15 bp, Homo sapiens
caaagccttcaacct

SEQ ID NO: 80464 - DNA, 15 bp, Homo sapiens
acaaagccttcaacc

SEQ ID NO: 80465 - DNA, 15 bp, Homo sapiens
cacaaagccttcaac

SEQ ID NO: 80466 - DNA, 15 bp, Homo sapiens
acacaaagccttcaa

SEQ ID NO: 80467 - DNA, 15 bp, Homo sapiens
gacacaaagccttca

SEQ ID NO: 80468 - DNA, 15 bp, Homo sapiens
agacacaaagccttc

SEQ ID NO: 80469 - DNA, 15 bp, Homo sapiens
aagacacaaagcctt

SEQ ID NO: 80470 - DNA, 15 bp, Homo sapiens
taagacacaaagcct

SEQ ID NO: 80471 - DNA, 15 bp, Homo sapiens
ataagacacaaagcc

SEQ ID NO: 80472 - DNA, 15 bp, Homo sapiens
gataagacacaaagc

SEQ ID NO: 80473 - DNA, 15 bp, Homo sapiens
agataagacacaaag

SEQ ID NO: 80474 - DNA, 15 bp, Homo sapiens
gagataagacacaaa

SEQ ID NO: 80475 - DNA, 15 bp, Homo sapiens
ggagataagacacaa

SEQ ID NO: 80476 - DNA, 15 bp, Homo sapiens
tggagataagacaca

SEQ ID NO: 80477 - DNA, 15 bp, Homo sapiens
ctggagataagacac

SEQ ID NO: 80478 - DNA, 15 bp, Homo sapiens
cctggagataagaca

SEQ ID NO: 80479 - DNA, 15 bp, Homo sapiens
ccctggagataagac

SEQ ID NO: 80480 - DNA, 15 bp, Homo sapiens
tccctggagataaga

SEQ ID NO: 80481 - DNA, 15 bp, Homo sapiens
ttccctggagataag

SEQ ID NO: 80482 - DNA, 15 bp, Homo sapiens
tttccctggagataa

SEQ ID NO: 80483 - DNA, 15 bp, Homo sapiens
ttttccctggagata

SEQ ID NO: 80484 - DNA, 15 bp, Homo sapiens
attttccctggagat

SEQ ID NO: 80485 - DNA, 15 bp, Homo sapiens
aattttccctggaga

SEQ ID NO: 80486 - DNA, 15 bp, Homo sapiens
aaattttccctggag

SEQ ID NO: 80487 - DNA, 15 bp, Homo sapiens
caaattttccctgga

SEQ ID NO: 80488 - DNA, 15 bp, Homo sapiens
acaaattttccctgg

SEQ ID NO: 80489 - DNA, 15 bp, Homo sapiens
tacaaattttccctg

SEQ ID NO: 80490 - DNA, 15 bp, Homo sapiens
ctacaaattttccct

SEQ ID NO: 80491 - DNA, 15 bp, Homo sapiens
tctacaaattttccc

SEQ ID NO: 80492 - DNA, 15 bp, Homo sapiens
gtctacaaattttcc

SEQ ID NO: 80493 - DNA, 15 bp, Homo sapiens
tgtctacaaattttc

SEQ ID NO: 80494 - DNA, 15 bp, Homo sapiens
ctgtctacaaatttt

SEQ ID NO: 80495 - DNA, 15 bp, Homo sapiens
gctgtctacaaattt

SEQ ID NO: 80496 - DNA, 15 bp, Homo sapiens
cgctgtctacaaatt

SEQ ID NO: 80497 - DNA, 15 bp, Homo sapiens
acgctgtctacaaat

SEQ ID NO: 80498 - DNA, 15 bp, Homo sapiens
tacgctgtctacaaa

SEQ ID NO: 80499 - DNA, 15 bp, Homo sapiens
ctacgctgtctacaa

SEQ ID NO: 80500 - DNA, 15 bp, Homo sapiens
gctacgctgtctaca

SEQ ID NO: 80501 - DNA, 15 bp, Homo sapiens
agctacgctgtctac

SEQ ID NO: 80502 - DNA, 15 bp, Homo sapiens
gagctacgctgtcta

SEQ ID NO: 80503 - DNA, 15 bp, Homo sapiens
agagctacgctgtct

SEQ ID NO: 80504 - DNA, 15 bp, Homo sapiens
aagagctacgctgtc

SEQ ID NO: 80505 - DNA, 15 bp, Homo sapiens
aaagagctacgctgt

SEQ ID NO: 80506 - DNA, 15 bp, Homo sapiens
taaagagctacgctg

SEQ ID NO: 80507 - DNA, 15 bp, Homo sapiens
ataaagagctacgct

SEQ ID NO: 80508 - DNA, 15 bp, Homo sapiens
cataaagagctacgc

SEQ ID NO: 80509 - DNA, 15 bp, Homo sapiens
acataaagagctacg

SEQ ID NO: 80510 - DNA, 15 bp, Homo sapiens
cacataaagagctac

SEQ ID NO: 80511 - DNA, 15 bp, Homo sapiens
tcacataaagagcta

SEQ ID NO: 80512 - DNA, 15 bp, Homo sapiens
gtcacataaagagct

SEQ ID NO: 80513 - DNA, 15 bp, Homo sapiens
cgtcacataaagagc

SEQ ID NO: 80514 - DNA, 15 bp, Homo sapiens
tcgtcacataaagag

SEQ ID NO: 80515 - DNA, 15 bp, Homo sapiens
ctcgtcacataaaga

SEQ ID NO: 80516 - DNA, 15 bp, Homo sapiens
gctcgtcacataaag

SEQ ID NO: 80517 - DNA, 15 bp, Homo sapiens
tgctcgtcacataaa

SEQ ID NO: 80518 - DNA, 15 bp, Homo sapiens
atgctcgtcacataa

SEQ ID NO: 80519 - DNA, 15 bp, Homo sapiens
aatgctcgtcacata

SEQ ID NO: 80520 - DNA, 15 bp, Homo sapiens
gaatgctcgtcacat

SEQ ID NO: 80521 - DNA, 15 bp, Homo sapiens
agaatgctcgtcaca

SEQ ID NO: 80522 - DNA, 15 bp, Homo sapiens
gagaatgctcgtcac

SEQ ID NO: 80523 - DNA, 15 bp, Homo sapiens
tgagaatgctcgtca

SEQ ID NO: 80524 - DNA, 15 bp, Homo sapiens
gtgagaatgctcgtc

SEQ ID NO: 80525 - DNA, 15 bp, Homo sapiens
ggtgagaatgctcgt

SEQ ID NO: 80526 - DNA, 15 bp, Homo sapiens
gggtgagaatgctcg

SEQ ID NO: 80527 - DNA, 15 bp, Homo sapiens
ggggtgagaatgctc

SEQ ID NO: 80528 - DNA, 15 bp, Homo sapiens
tggggtgagaatgct

SEQ ID NO: 80529 - DNA, 15 bp, Homo sapiens
ctggggtgagaatgc

SEQ ID NO: 80530 - DNA, 15 bp, Homo sapiens
actggggtgagaatg

SEQ ID NO: 80531 - DNA, 15 bp, Homo sapiens
gactggggtgagaat

SEQ ID NO: 80532 - DNA, 15 bp, Homo sapiens
tgactggggtgagaa

SEQ ID NO: 80533 - DNA, 15 bp, Homo sapiens
atgactggggtgaga

SEQ ID NO: 80534 - DNA, 15 bp, Homo sapiens
gatgactggggtgag

SEQ ID NO: 80535 - DNA, 15 bp, Homo sapiens
ggatgactggggtga

SEQ ID NO: 80536 - DNA, 15 bp, Homo sapiens
gggatgactggggtg

SEQ ID NO: 80537 - DNA, 15 bp, Homo sapiens
ggggatgactggggt

SEQ ID NO: 80538 - DNA, 15 bp, Homo sapiens
gggggatgactgggg

SEQ ID NO: 80539 - DNA, 15 bp, Homo sapiens
tgggggatgactggg

SEQ ID NO: 80540 - DNA, 15 bp, Homo sapiens
ttgggggatgactgg

SEQ ID NO: 80541 - DNA, 15 bp, Homo sapiens
attgggggatgactg

SEQ ID NO: 80542 - DNA, 15 bp, Homo sapiens
aattgggggatgact

SEQ ID NO: 80543 - DNA, 15 bp, Homo sapiens
gaattgggggatgac

SEQ ID NO: 80544 - DNA, 15 bp, Homo sapiens
agaattgggggatga

SEQ ID NO: 80545 - DNA, 15 bp, Homo sapiens
gagaattgggggatg

SEQ ID NO: 80546 - DNA, 15 bp, Homo sapiens
agagaattgggggat

SEQ ID NO: 80547 - DNA, 15 bp, Homo sapiens
tagagaattggggga

SEQ ID NO: 80548 - DNA, 15 bp, Homo sapiens
gtagagaattggggg

SEQ ID NO: 80549 - DNA, 15 bp, Homo sapiens
agtagagaattgggg

SEQ ID NO: 80550 - DNA, 15 bp, Homo sapiens
gagtagagaattggg

SEQ ID NO: 80551 - DNA, 15 bp, Homo sapiens
tgagtagagaattgg

SEQ ID NO: 80552 - DNA, 15 bp, Homo sapiens
atgagtagagaattg

SEQ ID NO: 80553 - DNA, 15 bp, Homo sapiens
aatgagtagagaatt

SEQ ID NO: 80554 - DNA, 15 bp, Homo sapiens
aaatgagtagagaat

SEQ ID NO: 80555 - DNA, 15 bp, Homo sapiens
caaatgagtagagaa

SEQ ID NO: 80556 - DNA, 15 bp, Homo sapiens
tcaaatgagtagaga

SEQ ID NO: 80557 - DNA, 15 bp, Homo sapiens
ctcaaatgagtagag

SEQ ID NO: 80558 - DNA, 15 bp, Homo sapiens
tctcaaatgagtaga

SEQ ID NO: 80559 - DNA, 15 bp, Homo sapiens
ttctcaaatgagtag

SEQ ID NO: 80560 - DNA, 15 bp, Homo sapiens
gttctcaaatgagta

SEQ ID NO: 80561 - DNA, 15 bp, Homo sapiens
tgttctcaaatgagt

SEQ ID NO: 80562 - DNA, 15 bp, Homo sapiens
atgttctcaaatgag

SEQ ID NO: 80563 - DNA, 15 bp, Homo sapiens
tatgttctcaaatga

SEQ ID NO: 80564 - DNA, 15 bp, Homo sapiens
ttatgttctcaaatg

SEQ ID NO: 80565 - DNA, 15 bp, Homo sapiens
tttatgttctcaaat

SEQ ID NO: 80566 - DNA, 15 bp, Homo sapiens
atttatgttctcaaa

SEQ ID NO: 80567 - DNA, 15 bp, Homo sapiens
aatttatgttctcaa

SEQ ID NO: 80568 - DNA, 15 bp, Homo sapiens
caatttatgttctca

SEQ ID NO: 80569 - DNA, 15 bp, Homo sapiens
ccaatttatgttctc

SEQ ID NO: 80570 - DNA, 15 bp, Homo sapiens
tccaatttatgttct

SEQ ID NO: 80571 - DNA, 15 bp, Homo sapiens
atccaatttatgttc

SEQ ID NO: 80572 - DNA, 15 bp, Homo sapiens
gatccaatttatgtt

SEQ ID NO: 80573 - DNA, 15 bp, Homo sapiens
agatccaatttatgt

SEQ ID NO: 80574 - DNA, 15 bp, Homo sapiens
aagatccaatttatg

SEQ ID NO: 80575 - DNA, 15 bp, Homo sapiens
caagatccaatttat

SEQ ID NO: 80576 - DNA, 15 bp, Homo sapiens
gcaagatccaattta

SEQ ID NO: 80577 - DNA, 15 bp, Homo sapiens
ggcaagatccaattt

SEQ ID NO: 80578 - DNA, 15 bp, Homo sapiens
tggcaagatccaatt

SEQ ID NO: 80579 - DNA, 15 bp, Homo sapiens
ctggcaagatccaat

SEQ ID NO: 80580 - DNA, 15 bp, Homo sapiens
actggcaagatccaa

SEQ ID NO: 80581 - DNA, 15 bp, Homo sapiens
gactggcaagatcca

SEQ ID NO: 80582 - DNA, 15 bp, Homo sapiens
agactggcaagatcc

SEQ ID NO: 80583 - DNA, 15 bp, Homo sapiens
gagactggcaagatc

SEQ ID NO: 80584 - DNA, 15 bp, Homo sapiens
agagactggcaagat

SEQ ID NO: 80585 - DNA, 15 bp, Homo sapiens
tagagactggcaaga

SEQ ID NO: 80586 - DNA, 15 bp, Homo sapiens
gtagagactggcaag

SEQ ID NO: 80587 - DNA, 15 bp, Homo sapiens
agtagagactggcaa

SEQ ID NO: 80588 - DNA, 15 bp, Homo sapiens
gagtagagactggca

SEQ ID NO: 80589 - DNA, 15 bp, Homo sapiens
tgagtagagactggc

SEQ ID NO: 80590 - DNA, 15 bp, Homo sapiens
atgagtagagactgg

SEQ ID NO: 80591 - DNA, 15 bp, Homo sapiens
aatgagtagagactg

SEQ ID NO: 80592 - DNA, 15 bp, Homo sapiens
aaatgagtagagact

SEQ ID NO: 80593 - DNA, 15 bp, Homo sapiens
aaaatgagtagagac

SEQ ID NO: 80594 - DNA, 15 bp, Homo sapiens
aaaaatgagtagaga

SEQ ID NO: 80595 - DNA, 15 bp, Homo sapiens
gaaaaatgagtagag

SEQ ID NO: 80596 - DNA, 15 bp, Homo sapiens
tgaaaaatgagtaga

SEQ ID NO: 80597 - DNA, 15 bp, Homo sapiens
ctgaaaaatgagtag

SEQ ID NO: 80598 - DNA, 15 bp, Homo sapiens
gctgaaaaatgagta

SEQ ID NO: 80599 - DNA, 15 bp, Homo sapiens
tgctgaaaaatgagt

SEQ ID NO: 80600 - DNA, 15 bp, Homo sapiens
gtgctgaaaaatgag

SEQ ID NO: 80601 - DNA, 15 bp, Homo sapiens
tgtgctgaaaaatga

SEQ ID NO: 80602 - DNA, 15 bp, Homo sapiens
atgtgctgaaaaatg

SEQ ID NO: 80603 - DNA, 15 bp, Homo sapiens
gatgtgctgaaaaat

SEQ ID NO: 80604 - DNA, 15 bp, Homo sapiens
cgatgtgctgaaaaa

SEQ ID NO: 80605 - DNA, 15 bp, Homo sapiens
tcgatgtgctgaaaa

SEQ ID NO: 80606 - DNA, 15 bp, Homo sapiens
ctcgatgtgctgaaa

SEQ ID NO: 80607 - DNA, 15 bp, Homo sapiens
gctcgatgtgctgaa

SEQ ID NO: 80608 - DNA, 15 bp, Homo sapiens
tgctcgatgtgctga

SEQ ID NO: 80609 - DNA, 15 bp, Homo sapiens
atgctcgatgtgctg

SEQ ID NO: 80610 - DNA, 15 bp, Homo sapiens
tatgctcgatgtgct

SEQ ID NO: 80611 - DNA, 15 bp, Homo sapiens
ttatgctcgatgtgc

SEQ ID NO: 80612 - DNA, 15 bp, Homo sapiens
cttatgctcgatgtg

SEQ ID NO: 80613 - DNA, 15 bp, Homo sapiens
tcttatgctcgatgt

SEQ ID NO: 80614 - DNA, 15 bp, Homo sapiens
atcttatgctcgatg

SEQ ID NO: 80615 - DNA, 15 bp, Homo sapiens
gatcttatgctcgat

SEQ ID NO: 80616 - DNA, 15 bp, Homo sapiens
ggatcttatgctcga

SEQ ID NO: 80617 - DNA, 15 bp, Homo sapiens
tggatcttatgctcg

SEQ ID NO: 80618 - DNA, 15 bp, Homo sapiens
ctggatcttatgctc

SEQ ID NO: 80619 - DNA, 15 bp, Homo sapiens
tctggatcttatgct

SEQ ID NO: 80620 - DNA, 15 bp, Homo sapiens
gtctggatcttatgc

SEQ ID NO: 80621 - DNA, 15 bp, Homo sapiens
agtctggatcttatg

SEQ ID NO: 80622 - DNA, 15 bp, Homo sapiens
gagtctggatcttat

SEQ ID NO: 80623 - DNA, 15 bp, Homo sapiens
agagtctggatctta

SEQ ID NO: 80624 - DNA, 15 bp, Homo sapiens
aagagtctggatctt

SEQ ID NO: 80625 - DNA, 15 bp, Homo sapiens
aaagagtctggatct

SEQ ID NO: 80626 - DNA, 15 bp, Homo sapiens
gaaagagtctggatc

SEQ ID NO: 80627 - DNA, 15 bp, Homo sapiens
ggaaagagtctggat

SEQ ID NO: 80628 - DNA, 15 bp, Homo sapiens
gggaaagagtctgga

SEQ ID NO: 80629 - DNA, 15 bp, Homo sapiens
tgggaaagagtctgg

SEQ ID NO: 80630 - DNA, 15 bp, Homo sapiens
ctgggaaagagtctg

SEQ ID NO: 80631 - DNA, 15 bp, Homo sapiens
cctgggaaagagtct

SEQ ID NO: 80632 - DNA, 15 bp, Homo sapiens
gcctgggaaagagtc

SEQ ID NO: 80633 - DNA, 15 bp, Homo sapiens
ggcctgggaaagagt

SEQ ID NO: 80634 - DNA, 15 bp, Homo sapiens
aggcctgggaaagag

SEQ ID NO: 80635 - DNA, 15 bp, Homo sapiens
gaggcctgggaaaga

SEQ ID NO: 80636 - DNA, 15 bp, Homo sapiens
agaggcctgggaaag

SEQ ID NO: 80637 - DNA, 15 bp, Homo sapiens
gagaggcctgggaaa

SEQ ID NO: 80638 - DNA, 15 bp, Homo sapiens
agagaggcctgggaa

SEQ ID NO: 80639 - DNA, 15 bp, Homo sapiens
gagagaggcctggga

SEQ ID NO: 80640 - DNA, 15 bp, Homo sapiens
tgagagaggcctggg

SEQ ID NO: 80641 - DNA, 15 bp, Homo sapiens
atgagagaggcctgg

SEQ ID NO: 80642 - DNA, 15 bp, Homo sapiens
gatgagagaggcctg

SEQ ID NO: 80643 - DNA, 15 bp, Homo sapiens
agatgagagaggcct

SEQ ID NO: 80644 - DNA, 15 bp, Homo sapiens
cagatgagagaggcc

SEQ ID NO: 80645 - DNA, 15 bp, Homo sapiens
ccagatgagagaggc

SEQ ID NO: 80646 - DNA, 15 bp, Homo sapiens
gccagatgagagagg

SEQ ID NO: 80647 - DNA, 15 bp, Homo sapiens
agccagatgagagag

SEQ ID NO: 80648 - DNA, 15 bp, Homo sapiens
gagccagatgagaga

SEQ ID NO: 80649 - DNA, 15 bp, Homo sapiens
ggagccagatgagag

SEQ ID NO: 80650 - DNA, 15 bp, Homo sapiens
aggagccagatgaga

SEQ ID NO: 80651 - DNA, 15 bp, Homo sapiens
gaggagccagatgag

SEQ ID NO: 80652 - DNA, 15 bp, Homo sapiens
agaggagccagatga

SEQ ID NO: 80653 - DNA, 15 bp, Homo sapiens
gagaggagccagatg

SEQ ID NO: 80654 - DNA, 15 bp, Homo sapiens
ggagaggagccagat

SEQ ID NO: 80655 - DNA, 15 bp, Homo sapiens
aggagaggagccaga

SEQ ID NO: 80656 - DNA, 15 bp, Homo sapiens
gaggagaggagccag

SEQ ID NO: 80657 - DNA, 15 bp, Homo sapiens
ggaggagaggagcca

SEQ ID NO: 80658 - DNA, 15 bp, Homo sapiens
aggaggagaggagcc

SEQ ID NO: 80659 - DNA, 15 bp, Homo sapiens
gaggaggagaggagc

SEQ ID NO: 80660 - DNA, 15 bp, Homo sapiens
ggaggaggagaggag

SEQ ID NO: 80661 - DNA, 15 bp, Homo sapiens
aggaggaggagagga

SEQ ID NO: 80662 - DNA, 15 bp, Homo sapiens
aaggaggaggagagg

SEQ ID NO: 80663 - DNA, 15 bp, Homo sapiens
aaaggaggaggagag

SEQ ID NO: 80664 - DNA, 15 bp, Homo sapiens
taaaggaggaggaga

SEQ ID NO: 80665 - DNA, 15 bp, Homo sapiens
ataaaggaggaggag

SEQ ID NO: 80666 - DNA, 15 bp, Homo sapiens
gataaaggaggagga

SEQ ID NO: 80667 - DNA, 15 bp, Homo sapiens
tgataaaggaggagg

SEQ ID NO: 80668 - DNA, 15 bp, Homo sapiens
atgataaaggaggag

SEQ ID NO: 80669 - DNA, 15 bp, Homo sapiens
aatgataaaggagga

SEQ ID NO: 80670 - DNA, 15 bp, Homo sapiens
taatgataaaggagg

SEQ ID NO: 80671 - DNA, 15 bp, Homo sapiens
gtaatgataaaggag

SEQ ID NO: 80672 - DNA, 15 bp, Homo sapiens
agtaatgataaagga

SEQ ID NO: 80673 - DNA, 15 bp, Homo sapiens
gagtaatgataaagg

SEQ ID NO: 80674 - DNA, 15 bp, Homo sapiens
agagtaatgataaag

SEQ ID NO: 80675 - DNA, 15 bp, Homo sapiens
aagagtaatgataaa

SEQ ID NO: 80676 - DNA, 15 bp, Homo sapiens
gaagagtaatgataa

SEQ ID NO: 80677 - DNA, 15 bp, Homo sapiens
agaagagtaatgata

SEQ ID NO: 80678 - DNA, 15 bp, Homo sapiens
aagaagagtaatgat

SEQ ID NO: 80679 - DNA, 15 bp, Homo sapiens
gaagaagagtaatga

SEQ ID NO: 80680 - DNA, 15 bp, Homo sapiens
cgaagaagagtaatg

SEQ ID NO: 80681 - DNA, 15 bp, Homo sapiens
acgaagaagagtaat

SEQ ID NO: 80682 - DNA, 15 bp, Homo sapiens
tacgaagaagagtaa

SEQ ID NO: 80683 - DNA, 15 bp, Homo sapiens
ctacgaagaagagta

SEQ ID NO: 80684 - DNA, 15 bp, Homo sapiens
gctacgaagaagagt

SEQ ID NO: 80685 - DNA, 15 bp, Homo sapiens
agctacgaagaagag

SEQ ID NO: 80686 - DNA, 15 bp, Homo sapiens
aagctacgaagaaga

SEQ ID NO: 80687 - DNA, 15 bp, Homo sapiens
taagctacgaagaag

SEQ ID NO: 80688 - DNA, 15 bp, Homo sapiens
ataagctacgaagaa

SEQ ID NO: 80689 - DNA, 15 bp, Homo sapiens
gataagctacgaaga

SEQ ID NO: 80690 - DNA, 15 bp, Homo sapiens
ggataagctacgaag

SEQ ID NO: 80691 - DNA, 15 bp, Homo sapiens
aggataagctacgaa

SEQ ID NO: 80692 - DNA, 15 bp, Homo sapiens
taggataagctacga

SEQ ID NO: 80693 - DNA, 15 bp, Homo sapiens
gtaggataagctacg

SEQ ID NO: 80694 - DNA, 15 bp, Homo sapiens
agtaggataagctac

SEQ ID NO: 80695 - DNA, 15 bp, Homo sapiens
gagtaggataagcta

SEQ ID NO: 80696 - DNA, 15 bp, Homo sapiens
ggagtaggataagct

SEQ ID NO: 80697 - DNA, 15 bp, Homo sapiens
tggagtaggataagc

SEQ ID NO: 80698 - DNA, 15 bp, Homo sapiens
ctggagtaggataag

SEQ ID NO: 80699 - DNA, 15 bp, Homo sapiens
gctggagtaggataa

SEQ ID NO: 80700 - DNA, 15 bp, Homo sapiens
ggctggagtaggata

SEQ ID NO: 80701 - DNA, 15 bp, Homo sapiens
tggctggagtaggat

SEQ ID NO: 80702 - DNA, 15 bp, Homo sapiens
atggctggagtagga

SEQ ID NO: 80703 - DNA, 15 bp, Homo sapiens
catggctggagtagg

SEQ ID NO: 80704 - DNA, 15 bp, Homo sapiens
gcatggctggagtag

SEQ ID NO: 80705 - DNA, 15 bp, Homo sapiens
agcatggctggagta

SEQ ID NO: 80706 - DNA, 15 bp, Homo sapiens
cagcatggctggagt

SEQ ID NO: 80707 - DNA, 15 bp, Homo sapiens
acagcatggctggag

SEQ ID NO: 80708 - DNA, 15 bp, Homo sapiens
gacagcatggctgga

SEQ ID NO: 80709 - DNA, 15 bp, Homo sapiens
agacagcatggctgg

SEQ ID NO: 80710 - DNA, 15 bp, Homo sapiens
aagacagcatggctg

SEQ ID NO: 80711 - DNA, 15 bp, Homo sapiens
gaagacagcatggct

SEQ ID NO: 80712 - DNA, 15 bp, Homo sapiens
ggaagacagcatggc

SEQ ID NO: 80713 - DNA, 15 bp, Homo sapiens
aggaagacagcatgg

SEQ ID NO: 80714 - DNA, 15 bp, Homo sapiens
taggaagacagcatg

SEQ ID NO: 80715 - DNA, 15 bp, Homo sapiens
ataggaagacagcat

SEQ ID NO: 80716 - DNA, 15 bp, Homo sapiens
aataggaagacagca

SEQ ID NO: 80717 - DNA, 15 bp, Homo sapiens
taataggaagacagc

SEQ ID NO: 80718 - DNA, 15 bp, Homo sapiens
ataataggaagacag

SEQ ID NO: 80719 - DNA, 15 bp, Homo sapiens
aataataggaagaca

SEQ ID NO: 80720 - DNA, 15 bp, Homo sapiens
gaataataggaagac

SEQ ID NO: 80721 - DNA, 15 bp, Homo sapiens
ggaataataggaaga

SEQ ID NO: 80722 - DNA, 15 bp, Homo sapiens
aggaataataggaag

SEQ ID NO: 80723 - DNA, 15 bp, Homo sapiens
taggaataataggaa

SEQ ID NO: 80724 - DNA, 15 bp, Homo sapiens
ttaggaataatagga

SEQ ID NO: 80725 - DNA, 15 bp, Homo sapiens
tttaggaataatagg

SEQ ID NO: 80726 - DNA, 15 bp, Homo sapiens
ttttaggaataatag

SEQ ID NO: 80727 - DNA, 15 bp, Homo sapiens
tttttaggaataata

SEQ ID NO: 80728 - DNA, 15 bp, Homo sapiens
ttttttaggaataat

SEQ ID NO: 80729 - DNA, 15 bp, Homo sapiens
attttttaggaataa

SEQ ID NO: 80730 - DNA, 15 bp, Homo sapiens
tattttttaggaata

SEQ ID NO: 80731 - DNA, 15 bp, Homo sapiens
ctattttttaggaat

SEQ ID NO: 80732 - DNA, 15 bp, Homo sapiens
tctattttttaggaa

SEQ ID NO: 80733 - DNA, 15 bp, Homo sapiens
ttctattttttagga

SEQ ID NO: 80734 - DNA, 15 bp, Homo sapiens
tttctattttttagg

SEQ ID NO: 80735 - DNA, 15 bp, Homo sapiens
atttctattttttag

SEQ ID NO: 80736 - DNA, 15 bp, Homo sapiens
catttctatttttta

SEQ ID NO: 80737 - DNA, 15 bp, Homo sapiens
gcatttctatttttt

SEQ ID NO: 80738 - DNA, 15 bp, Homo sapiens
tgcatttctattttt

SEQ ID NO: 80739 - DNA, 15 bp, Homo sapiens
atgcatttctatttt

SEQ ID NO: 80740 - DNA, 15 bp, Homo sapiens
aatgcatttctattt

SEQ ID NO: 80741 - DNA, 15 bp, Homo sapiens
aaatgcatttctatt

SEQ ID NO: 80742 - DNA, 15 bp, Homo sapiens
gaaatgcatttctat

SEQ ID NO: 80743 - DNA, 15 bp, Homo sapiens
agaaatgcatttcta

SEQ ID NO: 80744 - DNA, 15 bp, Homo sapiens
aagaaatgcatttct

SEQ ID NO: 80745 - DNA, 15 bp, Homo sapiens
gaagaaatgcatttc

SEQ ID NO: 80746 - DNA, 15 bp, Homo sapiens
ggaagaaatgcattt

SEQ ID NO: 80747 - DNA, 15 bp, Homo sapiens
aggaagaaatgcatt

SEQ ID NO: 80748 - DNA, 15 bp, Homo sapiens
taggaagaaatgcat

SEQ ID NO: 80749 - DNA, 15 bp, Homo sapiens
ctaggaagaaatgca

SEQ ID NO: 80750 - DNA, 15 bp, Homo sapiens
cctaggaagaaatgc

SEQ ID NO: 80751 - DNA, 15 bp, Homo sapiens
ccctaggaagaaatg

SEQ ID NO: 80752 - DNA, 15 bp, Homo sapiens
gccctaggaagaaat

SEQ ID NO: 80753 - DNA, 15 bp, Homo sapiens
ggccctaggaagaaa

SEQ ID NO: 80754 - DNA, 15 bp, Homo sapiens
aggccctaggaagaa

SEQ ID NO: 80755 - DNA, 15 bp, Homo sapiens
aaggccctaggaaga

SEQ ID NO: 80756 - DNA, 15 bp, Homo sapiens
aaaggccctaggaag

SEQ ID NO: 80757 - DNA, 15 bp, Homo sapiens
caaaggccctaggaa

SEQ ID NO: 80758 - DNA, 15 bp, Homo sapiens
acaaaggccctagga

SEQ ID NO: 80759 - DNA, 15 bp, Homo sapiens
tacaaaggccctagg

SEQ ID NO: 80760 - DNA, 15 bp, Homo sapiens
gtacaaaggccctag

SEQ ID NO: 80761 - DNA, 15 bp, Homo sapiens
ggtacaaaggcccta

SEQ ID NO: 80762 - DNA, 15 bp, Homo sapiens
aggtacaaaggccct

SEQ ID NO: 80763 - DNA, 15 bp, Homo sapiens
caggtacaaaggccc

SEQ ID NO: 80764 - DNA, 15 bp, Homo sapiens
gcaggtacaaaggcc

SEQ ID NO: 80765 - DNA, 15 bp, Homo sapiens
tgcaggtacaaaggc

SEQ ID NO: 80766 - DNA, 15 bp, Homo sapiens
gtgcaggtacaaagg

SEQ ID NO: 80767 - DNA, 15 bp, Homo sapiens
agtgcaggtacaaag

SEQ ID NO: 80768 - DNA, 15 bp, Homo sapiens
aagtgcaggtacaaa

SEQ ID NO: 80769 - DNA, 15 bp, Homo sapiens
caagtgcaggtacaa

SEQ ID NO: 80770 - DNA, 15 bp, Homo sapiens
gcaagtgcaggtaca

SEQ ID NO: 80771 - DNA, 15 bp, Homo sapiens
ggcaagtgcaggtac

SEQ ID NO: 80772 - DNA, 15 bp, Homo sapiens
tggcaagtgcaggta

SEQ ID NO: 80773 - DNA, 15 bp, Homo sapiens
atggcaagtgcaggt

SEQ ID NO: 80774 - DNA, 15 bp, Homo sapiens
gatggcaagtgcagg

SEQ ID NO: 80775 - DNA, 15 bp, Homo sapiens
cgatggcaagtgcag

SEQ ID NO: 80776 - DNA, 15 bp, Homo sapiens
gcgatggcaagtgca

SEQ ID NO: 80777 - DNA, 15 bp, Homo sapiens
agcgatggcaagtgc

SEQ ID NO: 80778 - DNA, 15 bp, Homo sapiens
aagcgatggcaagtg

SEQ ID NO: 80779 - DNA, 15 bp, Homo sapiens
aaagcgatggcaagt

SEQ ID NO: 80780 - DNA, 15 bp, Homo sapiens
aaaagcgatggcaag

SEQ ID NO: 80781 - DNA, 15 bp, Homo sapiens
caaaagcgatggcaa

SEQ ID NO: 80782 - DNA, 15 bp, Homo sapiens
gcaaaagcgatggca

SEQ ID NO: 80783 - DNA, 15 bp, Homo sapiens
agcaaaagcgatggc

SEQ ID NO: 80784 - DNA, 15 bp, Homo sapiens
gagcaaaagcgatgg

SEQ ID NO: 80785 - DNA, 15 bp, Homo sapiens
tgagcaaaagcgatg

SEQ ID NO: 80786 - DNA, 15 bp, Homo sapiens
ctgagcaaaagcgat

SEQ ID NO: 80787 - DNA, 15 bp, Homo sapiens
tctgagcaaaagcga

SEQ ID NO: 80788 - DNA, 15 bp, Homo sapiens
ttctgagcaaaagcg

SEQ ID NO: 80789 - DNA, 15 bp, Homo sapiens
attctgagcaaaagc

SEQ ID NO: 80790 - DNA, 15 bp, Homo sapiens
cattctgagcaaaag

SEQ ID NO: 80791 - DNA, 15 bp, Homo sapiens
acattctgagcaaaa

SEQ ID NO: 80792 - DNA, 15 bp, Homo sapiens
aacattctgagcaaa

SEQ ID NO: 80793 - DNA, 15 bp, Homo sapiens
gaacattctgagcaa

SEQ ID NO: 80794 - DNA, 15 bp, Homo sapiens
agaacattctgagca

SEQ ID NO: 80795 - DNA, 15 bp, Homo sapiens
aagaacattctgagc

SEQ ID NO: 80796 - DNA, 15 bp, Homo sapiens
aaagaacattctgag

SEQ ID NO: 80797 - DNA, 15 bp, Homo sapiens
aaaagaacattctga

SEQ ID NO: 80798 - DNA, 15 bp, Homo sapiens
aaaaagaacattctg

SEQ ID NO: 80799 - DNA, 15 bp, Homo sapiens
caaaaagaacattct

SEQ ID NO: 80800 - DNA, 15 bp, Homo sapiens
gcaaaaagaacattc

SEQ ID NO: 80801 - DNA, 15 bp, Homo sapiens
ggcaaaaagaacatt

SEQ ID NO: 80802 - DNA, 15 bp, Homo sapiens
tggcaaaaagaacat

SEQ ID NO: 80803 - DNA, 15 bp, Homo sapiens
ttggcaaaaagaaca

SEQ ID NO: 80804 - DNA, 15 bp, Homo sapiens
cttggcaaaaagaac

SEQ ID NO: 80805 - DNA, 15 bp, Homo sapiens
gcttggcaaaaagaa

SEQ ID NO: 80806 - DNA, 15 bp, Homo sapiens
agcttggcaaaaaga

SEQ ID NO: 80807 - DNA, 15 bp, Homo sapiens
aagcttggcaaaaag

SEQ ID NO: 80808 - DNA, 15 bp, Homo sapiens
aaagcttggcaaaaa

SEQ ID NO: 80809 - DNA, 15 bp, Homo sapiens
aaaagcttggcaaaa

SEQ ID NO: 80810 - DNA, 15 bp, Homo sapiens
caaaagcttggcaaa

SEQ ID NO: 80811 - DNA, 15 bp, Homo sapiens
gcaaaagcttggcaa

SEQ ID NO: 80812 - DNA, 15 bp, Homo sapiens
ggcaaaagcttggca

SEQ ID NO: 80813 - DNA, 15 bp, Homo sapiens
gggcaaaagcttggc

SEQ ID NO: 80814 - DNA, 15 bp, Homo sapiens
tgggcaaaagcttgg

SEQ ID NO: 80815 - DNA, 15 bp, Homo sapiens
ctgggcaaaagcttg

SEQ ID NO: 80816 - DNA, 15 bp, Homo sapiens
gctgggcaaaagctt

SEQ ID NO: 80817 - DNA, 15 bp, Homo sapiens
agctgggcaaaagct

SEQ ID NO: 80818 - DNA, 15 bp, Homo sapiens
aagctgggcaaaagc

SEQ ID NO: 80819 - DNA, 15 bp, Homo sapiens
caagctgggcaaaag

SEQ ID NO: 80820 - DNA, 15 bp, Homo sapiens
acaagctgggcaaaa

SEQ ID NO: 80821 - DNA, 15 bp, Homo sapiens
aacaagctgggcaaa

SEQ ID NO: 80822 - DNA, 15 bp, Homo sapiens
gaacaagctgggcaa

SEQ ID NO: 80823 - DNA, 15 bp, Homo sapiens
agaacaagctgggca

SEQ ID NO: 80824 - DNA, 15 bp, Homo sapiens
gagaacaagctgggc

SEQ ID NO: 80825 - DNA, 15 bp, Homo sapiens
ggagaacaagctggg

SEQ ID NO: 80826 - DNA, 15 bp, Homo sapiens
tggagaacaagctgg

SEQ ID NO: 80827 - DNA, 15 bp, Homo sapiens
atggagaacaagctg

SEQ ID NO: 80828 - DNA, 15 bp, Homo sapiens
gatggagaacaagct

SEQ ID NO: 80829 - DNA, 15 bp, Homo sapiens
tgatggagaacaagc

SEQ ID NO: 80830 - DNA, 15 bp, Homo sapiens
atgatggagaacaag

SEQ ID NO: 80831 - DNA, 15 bp, Homo sapiens
aatgatggagaacaa

SEQ ID NO: 80832 - DNA, 15 bp, Homo sapiens
caatgatggagaaca

SEQ ID NO: 80833 - DNA, 15 bp, Homo sapiens
acaatgatggagaac

SEQ ID NO: 80834 - DNA, 15 bp, Homo sapiens
aacaatgatggagaa

SEQ ID NO: 80835 - DNA, 15 bp, Homo sapiens
taacaatgatggaga

SEQ ID NO: 80836 - DNA, 15 bp, Homo sapiens
ataacaatgatggag

SEQ ID NO: 80837 - DNA, 15 bp, Homo sapiens
cataacaatgatgga

SEQ ID NO: 80838 - DNA, 15 bp, Homo sapiens
acataacaatgatgg

SEQ ID NO: 80839 - DNA, 15 bp, Homo sapiens
aacataacaatgatg

SEQ ID NO: 80840 - DNA, 15 bp, Homo sapiens
aaacataacaatgat

SEQ ID NO: 80841 - DNA, 15 bp, Homo sapiens
aaaacataacaatga

SEQ ID NO: 80842 - DNA, 15 bp, Homo sapiens
caaaacataacaatg

SEQ ID NO: 80843 - DNA, 15 bp, Homo sapiens
ccaaaacataacaat

SEQ ID NO: 80844 - DNA, 15 bp, Homo sapiens
gccaaaacataacaa

SEQ ID NO: 80845 - DNA, 15 bp, Homo sapiens
agccaaaacataaca

SEQ ID NO: 80846 - DNA, 15 bp, Homo sapiens
cagccaaaacataac

SEQ ID NO: 80847 - DNA, 15 bp, Homo sapiens
tcagccaaaacataa

SEQ ID NO: 80848 - DNA, 15 bp, Homo sapiens
ttcagccaaaacata

SEQ ID NO: 80849 - DNA, 15 bp, Homo sapiens
tttcagccaaaacat

SEQ ID NO: 80850 - DNA, 15 bp, Homo sapiens
atttcagccaaaaca

SEQ ID NO: 80851 - DNA, 15 bp, Homo sapiens
catttcagccaaaac

SEQ ID NO: 80852 - DNA, 15 bp, Homo sapiens
acatttcagccaaaa

SEQ ID NO: 80853 - DNA, 15 bp, Homo sapiens
gacatttcagccaaa

SEQ ID NO: 80854 - DNA, 15 bp, Homo sapiens
agacatttcagccaa

SEQ ID NO: 80855 - DNA, 15 bp, Homo sapiens
aagacatttcagcca

SEQ ID NO: 80856 - DNA, 15 bp, Homo sapiens
gaagacatttcagcc

SEQ ID NO: 80857 - DNA, 15 bp, Homo sapiens
agaagacatttcagc

SEQ ID NO: 80858 - DNA, 15 bp, Homo sapiens
gagaagacatttcag

SEQ ID NO: 80859 - DNA, 15 bp, Homo sapiens
agagaagacatttca

SEQ ID NO: 80860 - DNA, 15 bp, Homo sapiens
aagagaagacatttc

SEQ ID NO: 80861 - DNA, 15 bp, Homo sapiens
taagagaagacattt

SEQ ID NO: 80862 - DNA, 15 bp, Homo sapiens
ctaagagaagacatt

SEQ ID NO: 80863 - DNA, 15 bp, Homo sapiens
actaagagaagacat

SEQ ID NO: 80864 - DNA, 15 bp, Homo sapiens
tactaagagaagaca

SEQ ID NO: 80865 - DNA, 15 bp, Homo sapiens
ctactaagagaagac

SEQ ID NO: 80866 - DNA, 15 bp, Homo sapiens
cctactaagagaaga

SEQ ID NO: 80867 - DNA, 15 bp, Homo sapiens
acctactaagagaag

SEQ ID NO: 80868 - DNA, 15 bp, Homo sapiens
aacctactaagagaa

SEQ ID NO: 80869 - DNA, 15 bp, Homo sapiens
gaacctactaagaga

SEQ ID NO: 80870 - DNA, 15 bp, Homo sapiens
tgaacctactaagag

SEQ ID NO: 80871 - DNA, 15 bp, Homo sapiens
atgaacctactaaga

SEQ ID NO: 80872 - DNA, 15 bp, Homo sapiens
aatgaacctactaag

SEQ ID NO: 80873 - DNA, 15 bp, Homo sapiens
gaatgaacctactaa

SEQ ID NO: 80874 - DNA, 15 bp, Homo sapiens
agaatgaacctacta

SEQ ID NO: 80875 - DNA, 15 bp, Homo sapiens
gagaatgaacctact

SEQ ID NO: 80876 - DNA, 15 bp, Homo sapiens
ggagaatgaacctac

SEQ ID NO: 80877 - DNA, 15 bp, Homo sapiens
gggagaatgaaccta

SEQ ID NO: 80878 - DNA, 15 bp, Homo sapiens
ggggagaatgaacct

SEQ ID NO: 80879 - DNA, 15 bp, Homo sapiens
tggggagaatgaacc

SEQ ID NO: 80880 - DNA, 15 bp, Homo sapiens
ctggggagaatgaac

SEQ ID NO: 80881 - DNA, 15 bp, Homo sapiens
actggggagaatgaa

SEQ ID NO: 80882 - DNA, 15 bp, Homo sapiens
gactggggagaatga

SEQ ID NO: 80883 - DNA, 15 bp, Homo sapiens
tgactggggagaatg

SEQ ID NO: 80884 - DNA, 15 bp, Homo sapiens
gtgactggggagaat

SEQ ID NO: 80885 - DNA, 15 bp, Homo sapiens
agtgactggggagaa

SEQ ID NO: 80886 - DNA, 15 bp, Homo sapiens
cagtgactggggaga

SEQ ID NO: 80887 - DNA, 15 bp, Homo sapiens
acagtgactggggag

SEQ ID NO: 80888 - DNA, 15 bp, Homo sapiens
gacagtgactgggga

SEQ ID NO: 80889 - DNA, 15 bp, Homo sapiens
agacagtgactgggg

SEQ ID NO: 80890 - DNA, 15 bp, Homo sapiens
aagacagtgactggg

SEQ ID NO: 80891 - DNA, 15 bp, Homo sapiens
aaagacagtgactgg

SEQ ID NO: 80892 - DNA, 15 bp, Homo sapiens
aaaagacagtgactg

SEQ ID NO: 80893 - DNA, 15 bp, Homo sapiens
aaaaagacagtgact

SEQ ID NO: 80894 - DNA, 15 bp, Homo sapiens
taaaaagacagtgac

SEQ ID NO: 80895 - DNA, 15 bp, Homo sapiens
ataaaaagacagtga

SEQ ID NO: 80896 - DNA, 15 bp, Homo sapiens
aataaaaagacagtg

SEQ ID NO: 80897 - DNA, 15 bp, Homo sapiens
aaataaaaagacagt

SEQ ID NO: 80898 - DNA, 15 bp, Homo sapiens
aaaataaaaagacag

SEQ ID NO: 80899 - DNA, 15 bp, Homo sapiens
caaaataaaaagaca

SEQ ID NO: 80900 - DNA, 15 bp, Homo sapiens
gcaaaataaaaagac

SEQ ID NO: 80901 - DNA, 15 bp, Homo sapiens
agcaaaataaaaaga

SEQ ID NO: 80902 - DNA, 15 bp, Homo sapiens
aagcaaaataaaaag

SEQ ID NO: 80903 - DNA, 15 bp, Homo sapiens
aaagcaaaataaaaa

SEQ ID NO: 80904 - DNA, 15 bp, Homo sapiens
taaagcaaaataaaa

SEQ ID NO: 80905 - DNA, 15 bp, Homo sapiens
ataaagcaaaataaa

SEQ ID NO: 80906 - DNA, 15 bp, Homo sapiens
aataaagcaaaataa

SEQ ID NO: 80907 - DNA, 15 bp, Homo sapiens
aaataaagcaaaata

SEQ ID NO: 80908 - DNA, 15 bp, Homo sapiens
aaaataaagcaaaat

SEQ ID NO: 80909 - DNA, 15 bp, Homo sapiens
caaaataaagcaaaa

SEQ ID NO: 80910 - DNA, 15 bp, Homo sapiens
ccaaaataaagcaaa

SEQ ID NO: 80911 - DNA, 15 bp, Homo sapiens
cccaaaataaagcaa

SEQ ID NO: 80912 - DNA, 15 bp, Homo sapiens
gcccaaaataaagca

SEQ ID NO: 80913 - DNA, 15 bp, Homo sapiens
ggcccaaaataaagc

SEQ ID NO: 80914 - DNA, 15 bp, Homo sapiens
tggcccaaaataaag

SEQ ID NO: 80915 - DNA, 15 bp, Homo sapiens
atggcccaaaataaa

SEQ ID NO: 80916 - DNA, 15 bp, Homo sapiens
gatggcccaaaataa

SEQ ID NO: 80917 - DNA, 15 bp, Homo sapiens
agatggcccaaaata

SEQ ID NO: 80918 - DNA, 15 bp, Homo sapiens
tagatggcccaaaat

SEQ ID NO: 80919 - DNA, 15 bp, Homo sapiens
ttagatggcccaaaa

SEQ ID NO: 80920 - DNA, 15 bp, Homo sapiens
cttagatggcccaaa

SEQ ID NO: 80921 - DNA, 15 bp, Homo sapiens
ccttagatggcccaa

SEQ ID NO: 80922 - DNA, 15 bp, Homo sapiens
accttagatggccca

SEQ ID NO: 80923 - DNA, 15 bp, Homo sapiens
aaccttagatggccc

SEQ ID NO: 80924 - DNA, 15 bp, Homo sapiens
taaccttagatggcc

SEQ ID NO: 80925 - DNA, 15 bp, Homo sapiens
ataaccttagatggc

SEQ ID NO: 80926 - DNA, 15 bp, Homo sapiens
gataaccttagatgg

SEQ ID NO: 80927 - DNA, 15 bp, Homo sapiens
agataaccttagatg

SEQ ID NO: 80928 - DNA, 15 bp, Homo sapiens
aagataaccttagat

SEQ ID NO: 80929 - DNA, 15 bp, Homo sapiens
taagataaccttaga

SEQ ID NO: 80930 - DNA, 15 bp, Homo sapiens
ataagataaccttag

SEQ ID NO: 80931 - DNA, 15 bp, Homo sapiens
aataagataacctta

SEQ ID NO: 80932 - DNA, 15 bp, Homo sapiens
taataagataacctt

SEQ ID NO: 80933 - DNA, 15 bp, Homo sapiens
ctaataagataacct

SEQ ID NO: 80934 - DNA, 15 bp, Homo sapiens
actaataagataacc

SEQ ID NO: 80935 - DNA, 15 bp, Homo sapiens
cactaataagataac

SEQ ID NO: 80936 - DNA, 15 bp, Homo sapiens
acactaataagataa

SEQ ID NO: 80937 - DNA, 15 bp, Homo sapiens
tacactaataagata

SEQ ID NO: 80938 - DNA, 15 bp, Homo sapiens
atacactaataagat

SEQ ID NO: 80939 - DNA, 15 bp, Homo sapiens
aatacactaataaga

SEQ ID NO: 80940 - DNA, 15 bp, Homo sapiens
aaatacactaataag

SEQ ID NO: 80941 - DNA, 15 bp, Homo sapiens
caaatacactaataa

SEQ ID NO: 80942 - DNA, 15 bp, Homo sapiens
acaaatacactaata

SEQ ID NO: 80943 - DNA, 15 bp, Homo sapiens
aacaaatacactaat

SEQ ID NO: 80944 - DNA, 15 bp, Homo sapiens
caacaaatacactaa

SEQ ID NO: 80945 - DNA, 15 bp, Homo sapiens
acaacaaatacacta

SEQ ID NO: 80946 - DNA, 15 bp, Homo sapiens
aacaacaaatacact

SEQ ID NO: 80947 - DNA, 15 bp, Homo sapiens
gaacaacaaatacac

SEQ ID NO: 80948 - DNA, 15 bp, Homo sapiens
cgaacaacaaataca

SEQ ID NO: 80949 - DNA, 15 bp, Homo sapiens
acgaacaacaaatac

SEQ ID NO: 80950 - DNA, 15 bp, Homo sapiens
gacgaacaacaaata

SEQ ID NO: 80951 - DNA, 15 bp, Homo sapiens
agacgaacaacaaat

SEQ ID NO: 80952 - DNA, 15 bp, Homo sapiens
gagacgaacaacaaa

SEQ ID NO: 80953 - DNA, 15 bp, Homo sapiens
ggagacgaacaacaa

SEQ ID NO: 80954 - DNA, 15 bp, Homo sapiens
aggagacgaacaaca

SEQ ID NO: 80955 - DNA, 15 bp, Homo sapiens
gaggagacgaacaac

SEQ ID NO: 80956 - DNA, 15 bp, Homo sapiens
ggaggagacgaacaa

SEQ ID NO: 80957 - DNA, 15 bp, Homo sapiens
tggaggagacgaaca

SEQ ID NO: 80958 - DNA, 15 bp, Homo sapiens
atggaggagacgaac

SEQ ID NO: 80959 - DNA, 15 bp, Homo sapiens
catggaggagacgaa

SEQ ID NO: 80960 - DNA, 15 bp, Homo sapiens
ccatggaggagacga

SEQ ID NO: 80961 - DNA, 15 bp, Homo sapiens
cccatggaggagacg

SEQ ID NO: 80962 - DNA, 15 bp, Homo sapiens
gcccatggaggagac

SEQ ID NO: 80963 - DNA, 15 bp, Homo sapiens
tgcccatggaggaga

SEQ ID NO: 80964 - DNA, 15 bp, Homo sapiens
atgcccatggaggag

SEQ ID NO: 80965 - DNA, 15 bp, Homo sapiens
tatgcccatggagga

SEQ ID NO: 80966 - DNA, 15 bp, Homo sapiens
gtatgcccatggagg

SEQ ID NO: 80967 - DNA, 15 bp, Homo sapiens
tgtatgcccatggag

SEQ ID NO: 80968 - DNA, 15 bp, Homo sapiens
gtgtatgcccatgga

SEQ ID NO: 80969 - DNA, 15 bp, Homo sapiens
ggtgtatgcccatgg

SEQ ID NO: 80970 - DNA, 15 bp, Homo sapiens
aggtgtatgcccatg

SEQ ID NO: 80971 - DNA, 15 bp, Homo sapiens
gaggtgtatgcccat

SEQ ID NO: 80972 - DNA, 15 bp, Homo sapiens
ggaggtgtatgccca

SEQ ID NO: 80973 - DNA, 15 bp, Homo sapiens
tggaggtgtatgccc

SEQ ID NO: 80974 - DNA, 15 bp, Homo sapiens
atggaggtgtatgcc

SEQ ID NO: 80975 - DNA, 15 bp, Homo sapiens
catggaggtgtatgc

SEQ ID NO: 80976 - DNA, 15 bp, Homo sapiens
tcatggaggtgtatg

SEQ ID NO: 80977 - DNA, 15 bp, Homo sapiens
ttcatggaggtgtat

SEQ ID NO: 80978 - DNA, 15 bp, Homo sapiens
cttcatggaggtgta

SEQ ID NO: 80979 - DNA, 15 bp, Homo sapiens
ccttcatggaggtgt

SEQ ID NO: 80980 - DNA, 15 bp, Homo sapiens
gccttcatggaggtg

SEQ ID NO: 80981 - DNA, 15 bp, Homo sapiens
tgccttcatggaggt

SEQ ID NO: 80982 - DNA, 15 bp, Homo sapiens
ctgccttcatggagg

SEQ ID NO: 80983 - DNA, 15 bp, Homo sapiens
cctgccttcatggag

SEQ ID NO: 80984 - DNA, 15 bp, Homo sapiens
acctgccttcatgga

SEQ ID NO: 80985 - DNA, 15 bp, Homo sapiens
tacctgccttcatgg

SEQ ID NO: 80986 - DNA, 15 bp, Homo sapiens
atacctgccttcatg

SEQ ID NO: 80987 - DNA, 15 bp, Homo sapiens
aatacctgccttcat

SEQ ID NO: 80988 - DNA, 15 bp, Homo sapiens
aaatacctgccttca

SEQ ID NO: 80989 - DNA, 15 bp, Homo sapiens
aaaatacctgccttc

SEQ ID NO: 80990 - DNA, 15 bp, Homo sapiens
gaaaatacctgcctt

SEQ ID NO: 80991 - DNA, 15 bp, Homo sapiens
tgaaaatacctgcct

SEQ ID NO: 80992 - DNA, 15 bp, Homo sapiens
gtgaaaatacctgcc

SEQ ID NO: 80993 - DNA, 15 bp, Homo sapiens
ggtgaaaatacctgc

SEQ ID NO: 80994 - DNA, 15 bp, Homo sapiens
aggtgaaaatacctg

SEQ ID NO: 80995 - DNA, 15 bp, Homo sapiens
aaggtgaaaatacct

SEQ ID NO: 80996 - DNA, 15 bp, Homo sapiens
taaggtgaaaatacc

SEQ ID NO: 80997 - DNA, 15 bp, Homo sapiens
ctaaggtgaaaatac

SEQ ID NO: 80998 - DNA, 15 bp, Homo sapiens
cctaaggtgaaaata

SEQ ID NO: 80999 - DNA, 15 bp, Homo sapiens
gcctaaggtgaaaat

SEQ ID NO: 81000 - DNA, 15 bp, Homo sapiens
ggcctaaggtgaaaa

SEQ ID NO: 81001 - DNA, 15 bp, Homo sapiens
gggcctaaggtgaaa

SEQ ID NO: 81002 - DNA, 15 bp, Homo sapiens
agggcctaaggtgaa

SEQ ID NO: 81003 - DNA, 15 bp, Homo sapiens
gagggcctaaggtga

SEQ ID NO: 81004 - DNA, 15 bp, Homo sapiens
cgagggcctaaggtg

SEQ ID NO: 81005 - DNA, 15 bp, Homo sapiens
tcgagggcctaaggt

SEQ ID NO: 81006 - DNA, 15 bp, Homo sapiens
ttcgagggcctaagg

SEQ ID NO: 81007 - DNA, 15 bp, Homo sapiens
attcgagggcctaag

SEQ ID NO: 81008 - DNA, 15 bp, Homo sapiens
tattcgagggcctaa

SEQ ID NO: 81009 - DNA, 15 bp, Homo sapiens
atattcgagggccta

SEQ ID NO: 81010 - DNA, 15 bp, Homo sapiens
tatattcgagggcct

SEQ ID NO: 81011 - DNA, 15 bp, Homo sapiens
gtatattcgagggcc

SEQ ID NO: 81012 - DNA, 15 bp, Homo sapiens
agtatattcgagggc

SEQ ID NO: 81013 - DNA, 15 bp, Homo sapiens
cagtatattcgaggg

SEQ ID NO: 81014 - DNA, 15 bp, Homo sapiens
ccagtatattcgagg

SEQ ID NO: 81015 - DNA, 15 bp, Homo sapiens
tccagtatattcgag

SEQ ID NO: 81016 - DNA, 15 bp, Homo sapiens
gtccagtatattcga

SEQ ID NO: 81017 - DNA, 15 bp, Homo sapiens
tgtccagtatattcg

SEQ ID NO: 81018 - DNA, 15 bp, Homo sapiens
ctgtccagtatattc

SEQ ID NO: 81019 - DNA, 15 bp, Homo sapiens
gctgtccagtatatt

SEQ ID NO: 81020 - DNA, 15 bp, Homo sapiens
tgctgtccagtatat

SEQ ID NO: 81021 - DNA, 15 bp, Homo sapiens
atgctgtccagtata

SEQ ID NO: 81022 - DNA, 15 bp, Homo sapiens
gatgctgtccagtat

SEQ ID NO: 81023 - DNA, 15 bp, Homo sapiens
agatgctgtccagta

SEQ ID NO: 81024 - DNA, 15 bp, Homo sapiens
cagatgctgtccagt

SEQ ID NO: 81025 - DNA, 15 bp, Homo sapiens
ccagatgctgtccag

SEQ ID NO: 81026 - DNA, 15 bp, Homo sapiens
gccagatgctgtcca

SEQ ID NO: 81027 - DNA, 15 bp, Homo sapiens
tgccagatgctgtcc

SEQ ID NO: 81028 - DNA, 15 bp, Homo sapiens
gtgccagatgctgtc

SEQ ID NO: 81029 - DNA, 15 bp, Homo sapiens
cgtgccagatgctgt

SEQ ID NO: 81030 - DNA, 15 bp, Homo sapiens
acgtgccagatgctg

SEQ ID NO: 81031 - DNA, 15 bp, Homo sapiens
tacgtgccagatgct

SEQ ID NO: 81032 - DNA, 15 bp, Homo sapiens
ctacgtgccagatgc

SEQ ID NO: 81033 - DNA, 15 bp, Homo sapiens
actacgtgccagatg

SEQ ID NO: 81034 - DNA, 15 bp, Homo sapiens
tactacgtgccagat

SEQ ID NO: 81035 - DNA, 15 bp, Homo sapiens
ctactacgtgccaga

SEQ ID NO: 81036 - DNA, 15 bp, Homo sapiens
tctactacgtgccag

SEQ ID NO: 81037 - DNA, 15 bp, Homo sapiens
atctactacgtgcca

SEQ ID NO: 81038 - DNA, 15 bp, Homo sapiens
catctactacgtgcc

SEQ ID NO: 81039 - DNA, 15 bp, Homo sapiens
gcatctactacgtgc

SEQ ID NO: 81040 - DNA, 15 bp, Homo sapiens
agcatctactacgtg

SEQ ID NO: 81041 - DNA, 15 bp, Homo sapiens
gagcatctactacgt

SEQ ID NO: 81042 - DNA, 15 bp, Homo sapiens
tgagcatctactacg

SEQ ID NO: 81043 - DNA, 15 bp, Homo sapiens
ttgagcatctactac

SEQ ID NO: 81044 - DNA, 15 bp, Homo sapiens
gttgagcatctacta

SEQ ID NO: 81045 - DNA, 15 bp, Homo sapiens
cgttgagcatctact

SEQ ID NO: 81046 - DNA, 15 bp, Homo sapiens
tcgttgagcatctac

SEQ ID NO: 81047 - DNA, 15 bp, Homo sapiens
ttcgttgagcatcta

SEQ ID NO: 81048 - DNA, 15 bp, Homo sapiens
attcgttgagcatct

SEQ ID NO: 81049 - DNA, 15 bp, Homo sapiens
cattcgttgagcatc

SEQ ID NO: 81050 - DNA, 15 bp, Homo sapiens
acattcgttgagcat

SEQ ID NO: 81051 - DNA, 15 bp, Homo sapiens
aacattcgttgagca

SEQ ID NO: 81052 - DNA, 15 bp, Homo sapiens
aaacattcgttgagc

SEQ ID NO: 81053 - DNA, 15 bp, Homo sapiens
caaacattcgttgag

SEQ ID NO: 81054 - DNA, 15 bp, Homo sapiens
acaaacattcgttga

SEQ ID NO: 81055 - DNA, 15 bp, Homo sapiens
aacaaacattcgttg

SEQ ID NO: 81056 - DNA, 15 bp, Homo sapiens
caacaaacattcgtt

SEQ ID NO: 81057 - DNA, 15 bp, Homo sapiens
acaacaaacattcgt

SEQ ID NO: 81058 - DNA, 15 bp, Homo sapiens
cacaacaaacattcg

SEQ ID NO: 81059 - DNA, 15 bp, Homo sapiens
acacaacaaacattc

SEQ ID NO: 81060 - DNA, 15 bp, Homo sapiens
cacacaacaaacatt

SEQ ID NO: 81061 - DNA, 15 bp, Homo sapiens
tcacacaacaaacat

SEQ ID NO: 81062 - DNA, 15 bp, Homo sapiens
ctcacacaacaaaca

SEQ ID NO: 81063 - DNA, 15 bp, Homo sapiens
gctcacacaacaaac

SEQ ID NO: 81064 - DNA, 15 bp, Homo sapiens
tgctcacacaacaaa

SEQ ID NO: 81065 - DNA, 15 bp, Homo sapiens
ttgctcacacaacaa

SEQ ID NO: 81066 - DNA, 15 bp, Homo sapiens
tttgctcacacaaca

SEQ ID NO: 81067 - DNA, 15 bp, Homo sapiens
atttgctcacacaac

SEQ ID NO: 81068 - DNA, 15 bp, Homo sapiens
catttgctcacacaa

SEQ ID NO: 81069 - DNA, 15 bp, Homo sapiens
ccatttgctcacaca

SEQ ID NO: 81070 - DNA, 15 bp, Homo sapiens
accatttgctcacac

SEQ ID NO: 81071 - DNA, 15 bp, Homo sapiens
aaccatttgctcaca

SEQ ID NO: 81072 - DNA, 15 bp, Homo sapiens
caaccatttgctcac

SEQ ID NO: 81073 - DNA, 15 bp, Homo sapiens
ccaaccatttgctca

SEQ ID NO: 81074 - DNA, 15 bp, Homo sapiens
accaaccatttgctc

SEQ ID NO: 81075 - DNA, 15 bp, Homo sapiens
aaccaaccatttgct

SEQ ID NO: 81076 - DNA, 15 bp, Homo sapiens
caaccaaccatttgc

SEQ ID NO: 81077 - DNA, 15 bp, Homo sapiens
tcaaccaaccatttg

SEQ ID NO: 81078 - DNA, 15 bp, Homo sapiens
atcaaccaaccattt

SEQ ID NO: 81079 - DNA, 15 bp, Homo sapiens
aatcaaccaaccatt

SEQ ID NO: 81080 - DNA, 15 bp, Homo sapiens
caatcaaccaaccat

SEQ ID NO: 81081 - DNA, 15 bp, Homo sapiens
ccaatcaaccaacca

SEQ ID NO: 81082 - DNA, 15 bp, Homo sapiens
tccaatcaaccaacc

SEQ ID NO: 81083 - DNA, 15 bp, Homo sapiens
atccaatcaaccaac

SEQ ID NO: 81084 - DNA, 15 bp, Homo sapiens
aatccaatcaaccaa

SEQ ID NO: 81085 - DNA, 15 bp, Homo sapiens
caatccaatcaacca

SEQ ID NO: 81086 - DNA, 15 bp, Homo sapiens
tcaatccaatcaacc

SEQ ID NO: 81087 - DNA, 15 bp, Homo sapiens
ttcaatccaatcaac

SEQ ID NO: 81088 - DNA, 15 bp, Homo sapiens
gttcaatccaatcaa

SEQ ID NO: 81089 - DNA, 15 bp, Homo sapiens
agttcaatccaatca

SEQ ID NO: 81090 - DNA, 15 bp, Homo sapiens
cagttcaatccaatc

SEQ ID NO: 81091 - DNA, 15 bp, Homo sapiens
tcagttcaatccaat

SEQ ID NO: 81092 - DNA, 15 bp, Homo sapiens
ctcagttcaatccaa

SEQ ID NO: 81093 - DNA, 15 bp, Homo sapiens
actcagttcaatcca

SEQ ID NO: 81094 - DNA, 15 bp, Homo sapiens
aactcagttcaatcc

SEQ ID NO: 81095 - DNA, 15 bp, Homo sapiens
gaactcagttcaatc

SEQ ID NO: 81096 - DNA, 15 bp, Homo sapiens
tgaactcagttcaat

SEQ ID NO: 81097 - DNA, 15 bp, Homo sapiens
ctgaactcagttcaa

SEQ ID NO: 81098 - DNA, 15 bp, Homo sapiens
actgaactcagttca

SEQ ID NO: 81099 - DNA, 15 bp, Homo sapiens
tactgaactcagttc

SEQ ID NO: 81100 - DNA, 15 bp, Homo sapiens
atactgaactcagtt

SEQ ID NO: 81101 - DNA, 15 bp, Homo sapiens
catactgaactcagt

SEQ ID NO: 81102 - DNA, 15 bp, Homo sapiens
acatactgaactcag

SEQ ID NO: 81103 - DNA, 15 bp, Homo sapiens
tacatactgaactca

SEQ ID NO: 81104 - DNA, 15 bp, Homo sapiens
ttacatactgaactc

SEQ ID NO: 81105 - DNA, 15 bp, Homo sapiens
tttacatactgaact

SEQ ID NO: 81106 - DNA, 15 bp, Homo sapiens
atttacatactgaac

SEQ ID NO: 81107 - DNA, 15 bp, Homo sapiens
tatttacatactgaa

SEQ ID NO: 81108 - DNA, 15 bp, Homo sapiens
atatttacatactga

SEQ ID NO: 81109 - DNA, 15 bp, Homo sapiens
aatatttacatactg

SEQ ID NO: 81110 - DNA, 15 bp, Homo sapiens
aaatatttacatact

SEQ ID NO: 81111 - DNA, 15 bp, Homo sapiens
taaatatttacatac

SEQ ID NO: 81112 - DNA, 15 bp, Homo sapiens
ctaaatatttacata

SEQ ID NO: 81113 - DNA, 15 bp, Homo sapiens
cctaaatatttacat

SEQ ID NO: 81114 - DNA, 15 bp, Homo sapiens
ccctaaatatttaca

SEQ ID NO: 81115 - DNA, 15 bp, Homo sapiens
gccctaaatatttac

SEQ ID NO: 81116 - DNA, 15 bp, Homo sapiens
ggccctaaatattta

SEQ ID NO: 81117 - DNA, 15 bp, Homo sapiens
aggccctaaatattt

SEQ ID NO: 81118 - DNA, 15 bp, Homo sapiens
gaggccctaaatatt

SEQ ID NO: 81119 - DNA, 15 bp, Homo sapiens
agaggccctaaatat

SEQ ID NO: 81120 - DNA, 15 bp, Homo sapiens
aagaggccctaaata

SEQ ID NO: 81121 - DNA, 15 bp, Homo sapiens
aaagaggccctaaat

SEQ ID NO: 81122 - DNA, 15 bp, Homo sapiens
caaagaggccctaaa

SEQ ID NO: 81123 - DNA, 15 bp, Homo sapiens
gcaaagaggccctaa

SEQ ID NO: 81124 - DNA, 15 bp, Homo sapiens
tgcaaagaggcccta

SEQ ID NO: 81125 - DNA, 15 bp, Homo sapiens
atgcaaagaggccct

SEQ ID NO: 81126 - DNA, 15 bp, Homo sapiens
aatgcaaagaggccc

SEQ ID NO: 81127 - DNA, 15 bp, Homo sapiens
gaatgcaaagaggcc

SEQ ID NO: 81128 - DNA, 15 bp, Homo sapiens
agaatgcaaagaggc

SEQ ID NO: 81129 - DNA, 15 bp, Homo sapiens
tagaatgcaaagagg

SEQ ID NO: 81130 - DNA, 15 bp, Homo sapiens
atagaatgcaaagag

SEQ ID NO: 81131 - DNA, 15 bp, Homo sapiens
aatagaatgcaaaga

SEQ ID NO: 81132 - DNA, 15 bp, Homo sapiens
aaatagaatgcaaag

SEQ ID NO: 81133 - DNA, 15 bp, Homo sapiens
aaaatagaatgcaaa

SEQ ID NO: 81134 - DNA, 15 bp, Homo sapiens
taaaatagaatgcaa

SEQ ID NO: 81135 - DNA, 15 bp, Homo sapiens
gtaaaatagaatgca

SEQ ID NO: 81136 - DNA, 15 bp, Homo sapiens
agtaaaatagaatgc

SEQ ID NO: 81137 - DNA, 15 bp, Homo sapiens
aagtaaaatagaatg

SEQ ID NO: 81138 - DNA, 15 bp, Homo sapiens
taagtaaaatagaat

SEQ ID NO: 81139 - DNA, 15 bp, Homo sapiens
ataagtaaaatagaa

SEQ ID NO: 81140 - DNA, 15 bp, Homo sapiens
cataagtaaaataga

SEQ ID NO: 81141 - DNA, 15 bp, Homo sapiens
acataagtaaaatag

SEQ ID NO: 81142 - DNA, 15 bp, Homo sapiens
tacataagtaaaata

SEQ ID NO: 81143 - DNA, 15 bp, Homo sapiens
atacataagtaaaat

SEQ ID NO: 81144 - DNA, 15 bp, Homo sapiens
tatacataagtaaaa

SEQ ID NO: 81145 - DNA, 15 bp, Homo sapiens
ttatacataagtaaa

SEQ ID NO: 81146 - DNA, 15 bp, Homo sapiens
tttatacataagtaa

SEQ ID NO: 81147 - DNA, 15 bp, Homo sapiens
ttttatacataagta

SEQ ID NO: 81148 - DNA, 15 bp, Homo sapiens
attttatacataagt

SEQ ID NO: 81149 - DNA, 15 bp, Homo sapiens
cattttatacataag

SEQ ID NO: 81150 - DNA, 15 bp, Homo sapiens
tcattttatacataa

SEQ ID NO: 81151 - DNA, 15 bp, Homo sapiens
atcattttatacata

SEQ ID NO: 81152 - DNA, 15 bp, Homo sapiens
tatcattttatacat

SEQ ID NO: 81153 - DNA, 15 bp, Homo sapiens
gtatcattttataca

SEQ ID NO: 81154 - DNA, 15 bp, Homo sapiens
tgtatcattttatac

SEQ ID NO: 81155 - DNA, 15 bp, Homo sapiens
atgtatcattttata

SEQ ID NO: 81156 - DNA, 15 bp, Homo sapiens
tatgtatcattttat

SEQ ID NO: 81157 - DNA, 15 bp, Homo sapiens
ttatgtatcatttta

SEQ ID NO: 81158 - DNA, 15 bp, Homo sapiens
attatgtatcatttt

SEQ ID NO: 81159 - DNA, 15 bp, Homo sapiens
cattatgtatcattt

SEQ ID NO: 81160 - DNA, 15 bp, Homo sapiens
tcattatgtatcatt

SEQ ID NO: 81161 - DNA, 15 bp, Homo sapiens
atcattatgtatcat

SEQ ID NO: 81162 - DNA, 15 bp, Homo sapiens
catcattatgtatca

SEQ ID NO: 81163 - DNA, 15 bp, Homo sapiens
tcatcattatgtatc

SEQ ID NO: 81164 - DNA, 15 bp, Homo sapiens
atcatcattatgtat

SEQ ID NO: 81165 - DNA, 15 bp, Homo sapiens
tatcatcattatgta

SEQ ID NO: 81166 - DNA, 15 bp, Homo sapiens
atatcatcattatgt

SEQ ID NO: 81167 - DNA, 15 bp, Homo sapiens
tatatcatcattatg

SEQ ID NO: 81168 - DNA, 15 bp, Homo sapiens
ttatatcatcattat

SEQ ID NO: 81169 - DNA, 15 bp, Homo sapiens
tttatatcatcatta

SEQ ID NO: 81170 - DNA, 15 bp, Homo sapiens
atttatatcatcatt

SEQ ID NO: 81171 - DNA, 15 bp, Homo sapiens
catttatatcatcat

SEQ ID NO: 81172 - DNA, 15 bp, Homo sapiens
tcatttatatcatca

SEQ ID NO: 81173 - DNA, 15 bp, Homo sapiens
atcatttatatcatc

SEQ ID NO: 81174 - DNA, 15 bp, Homo sapiens
catcatttatatcat

SEQ ID NO: 81175 - DNA, 15 bp, Homo sapiens
acatcatttatatca

SEQ ID NO: 81176 - DNA, 15 bp, Homo sapiens
gacatcatttatatc

SEQ ID NO: 81177 - DNA, 15 bp, Homo sapiens
tgacatcatttatat

SEQ ID NO: 81178 - DNA, 15 bp, Homo sapiens
gtgacatcatttata

SEQ ID NO: 81179 - DNA, 15 bp, Homo sapiens
tgtgacatcatttat

SEQ ID NO: 81180 - DNA, 15 bp, Homo sapiens
ctgtgacatcattta

SEQ ID NO: 81181 - DNA, 15 bp, Homo sapiens
actgtgacatcattt

SEQ ID NO: 81182 - DNA, 15 bp, Homo sapiens
cactgtgacatcatt

SEQ ID NO: 81183 - DNA, 15 bp, Homo sapiens
acactgtgacatcat

SEQ ID NO: 81184 - DNA, 15 bp, Homo sapiens
tacactgtgacatca

SEQ ID NO: 81185 - DNA, 15 bp, Homo sapiens
gtacactgtgacatc

SEQ ID NO: 81186 - DNA, 15 bp, Homo sapiens
tgtacactgtgacat

SEQ ID NO: 81187 - DNA, 15 bp, Homo sapiens
ttgtacactgtgaca

SEQ ID NO: 81188 - DNA, 15 bp, Homo sapiens
cttgtacactgtgac

SEQ ID NO: 81189 - DNA, 15 bp, Homo sapiens
ccttgtacactgtga

SEQ ID NO: 81190 - DNA, 15 bp, Homo sapiens
gccttgtacactgtg

SEQ ID NO: 81191 - DNA, 15 bp, Homo sapiens
agccttgtacactgt

SEQ ID NO: 81192 - DNA, 15 bp, Homo sapiens
cagccttgtacactg

SEQ ID NO: 81193 - DNA, 15 bp, Homo sapiens
acagccttgtacact

SEQ ID NO: 81194 - DNA, 15 bp, Homo sapiens
aacagccttgtacac

SEQ ID NO: 81195 - DNA, 15 bp, Homo sapiens
caacagccttgtaca

SEQ ID NO: 81196 - DNA, 15 bp, Homo sapiens
acaacagccttgtac

SEQ ID NO: 81197 - DNA, 15 bp, Homo sapiens
cacaacagccttgta

SEQ ID NO: 81198 - DNA, 15 bp, Homo sapiens
ccacaacagccttgt

SEQ ID NO: 81199 - DNA, 15 bp, Homo sapiens
cccacaacagccttg

SEQ ID NO: 81200 - DNA, 15 bp, Homo sapiens
tcccacaacagcctt

SEQ ID NO: 81201 - DNA, 15 bp, Homo sapiens
atcccacaacagcct

SEQ ID NO: 81202 - DNA, 15 bp, Homo sapiens
gatcccacaacagcc

SEQ ID NO: 81203 - DNA, 15 bp, Homo sapiens
tgatcccacaacagc

SEQ ID NO: 81204 - DNA, 15 bp, Homo sapiens
ttgatcccacaacag

SEQ ID NO: 81205 - DNA, 15 bp, Homo sapiens
cttgatcccacaaca

SEQ ID NO: 81206 - DNA, 15 bp, Homo sapiens
gcttgatcccacaac

SEQ ID NO: 81207 - DNA, 15 bp, Homo sapiens
tgcttgatcccacaa

SEQ ID NO: 81208 - DNA, 15 bp, Homo sapiens
ttgcttgatcccaca

SEQ ID NO: 81209 - DNA, 15 bp, Homo sapiens
attgcttgatcccac

SEQ ID NO: 81210 - DNA, 15 bp, Homo sapiens
gattgcttgatccca

SEQ ID NO: 81211 - DNA, 15 bp, Homo sapiens
tgattgcttgatccc

SEQ ID NO: 81212 - DNA, 15 bp, Homo sapiens
ttgattgcttgatcc

SEQ ID NO: 81213 - DNA, 15 bp, Homo sapiens
tttgattgcttgatc

SEQ ID NO: 81214 - DNA, 15 bp, Homo sapiens
atttgattgcttgat

SEQ ID NO: 81215 - DNA, 15 bp, Homo sapiens
catttgattgcttga

SEQ ID NO: 81216 - DNA, 15 bp, Homo sapiens
tcatttgattgcttg

SEQ ID NO: 81217 - DNA, 15 bp, Homo sapiens
ctcatttgattgctt

SEQ ID NO: 81218 - DNA, 15 bp, Homo sapiens
tctcatttgattgct

SEQ ID NO: 81219 - DNA, 15 bp, Homo sapiens
atctcatttgattgc

SEQ ID NO: 81220 - DNA, 15 bp, Homo sapiens
gatctcatttgattg

SEQ ID NO: 81221 - DNA, 15 bp, Homo sapiens
tgatctcatttgatt

SEQ ID NO: 81222 - DNA, 15 bp, Homo sapiens
atgatctcatttgat

SEQ ID NO: 81223 - DNA, 15 bp, Homo sapiens
catgatctcatttga

SEQ ID NO: 81224 - DNA, 15 bp, Homo sapiens
gcatgatctcatttg

SEQ ID NO: 81225 - DNA, 15 bp, Homo sapiens
agcatgatctcattt

SEQ ID NO: 81226 - DNA, 15 bp, Homo sapiens
aagcatgatctcatt

SEQ ID NO: 81227 - DNA, 15 bp, Homo sapiens
caagcatgatctcat

SEQ ID NO: 81228 - DNA, 15 bp, Homo sapiens
acaagcatgatctca

SEQ ID NO: 81229 - DNA, 15 bp, Homo sapiens
gacaagcatgatctc

SEQ ID NO: 81230 - DNA, 15 bp, Homo sapiens
agacaagcatgatct

SEQ ID NO: 81231 - DNA, 15 bp, Homo sapiens
aagacaagcatgatc

SEQ ID NO: 81232 - DNA, 15 bp, Homo sapiens
aaagacaagcatgat

SEQ ID NO: 81233 - DNA, 15 bp, Homo sapiens
aaaagacaagcatga

SEQ ID NO: 81234 - DNA, 15 bp, Homo sapiens
gaaaagacaagcatg

SEQ ID NO: 81235 - DNA, 15 bp, Homo sapiens
ggaaaagacaagcat

SEQ ID NO: 81236 - DNA, 15 bp, Homo sapiens
tggaaaagacaagca

SEQ ID NO: 81237 - DNA, 15 bp, Homo sapiens
ttggaaaagacaagc

SEQ ID NO: 81238 - DNA, 15 bp, Homo sapiens
tttggaaaagacaag

SEQ ID NO: 81239 - DNA, 15 bp, Homo sapiens
atttggaaaagacaa

SEQ ID NO: 81240 - DNA, 15 bp, Homo sapiens
catttggaaaagaca

SEQ ID NO: 81241 - DNA, 15 bp, Homo sapiens
ccatttggaaaagac

SEQ ID NO: 81242 - DNA, 15 bp, Homo sapiens
accatttggaaaaga

SEQ ID NO: 81243 - DNA, 15 bp, Homo sapiens
caccatttggaaaag

SEQ ID NO: 81244 - DNA, 15 bp, Homo sapiens
tcaccatttggaaaa

SEQ ID NO: 81245 - DNA, 15 bp, Homo sapiens
ctcaccatttggaaa

SEQ ID NO: 81246 - DNA, 15 bp, Homo sapiens
cctcaccatttggaa

SEQ ID NO: 81247 - DNA, 15 bp, Homo sapiens
ccctcaccatttgga

SEQ ID NO: 81248 - DNA, 15 bp, Homo sapiens
tccctcaccatttgg

SEQ ID NO: 81249 - DNA, 15 bp, Homo sapiens
ttccctcaccatttg

SEQ ID NO: 81250 - DNA, 15 bp, Homo sapiens
attccctcaccattt

SEQ ID NO: 81251 - DNA, 15 bp, Homo sapiens
tattccctcaccatt

SEQ ID NO: 81252 - DNA, 15 bp, Homo sapiens
ctattccctcaccat

SEQ ID NO: 81253 - DNA, 15 bp, Homo sapiens
tctattccctcacca

SEQ ID NO: 81254 - DNA, 15 bp, Homo sapiens
atctattccctcacc

SEQ ID NO: 81255 - DNA, 15 bp, Homo sapiens
catctattccctcac

SEQ ID NO: 81256 - DNA, 15 bp, Homo sapiens
gcatctattccctca

SEQ ID NO: 81257 - DNA, 15 bp, Homo sapiens
tgcatctattccctc

SEQ ID NO: 81258 - DNA, 15 bp, Homo sapiens
atgcatctattccct

SEQ ID NO: 81259 - DNA, 15 bp, Homo sapiens
catgcatctattccc

SEQ ID NO: 81260 - DNA, 15 bp, Homo sapiens
acatgcatctattcc

SEQ ID NO: 81261 - DNA, 15 bp, Homo sapiens
aacatgcatctattc

SEQ ID NO: 81262 - DNA, 15 bp, Homo sapiens
aaacatgcatctatt

SEQ ID NO: 81263 - DNA, 15 bp, Homo sapiens
caaacatgcatctat

SEQ ID NO: 81264 - DNA, 15 bp, Homo sapiens
acaaacatgcatcta

SEQ ID NO: 81265 - DNA, 15 bp, Homo sapiens
cacaaacatgcatct

SEQ ID NO: 81266 - DNA, 15 bp, Homo sapiens
ccacaaacatgcatc

SEQ ID NO: 81267 - DNA, 15 bp, Homo sapiens
accacaaacatgcat

SEQ ID NO: 81268 - DNA, 15 bp, Homo sapiens
aaccacaaacatgca

SEQ ID NO: 81269 - DNA, 15 bp, Homo sapiens
caaccacaaacatgc

SEQ ID NO: 81270 - DNA, 15 bp, Homo sapiens
acaaccacaaacatg

SEQ ID NO: 81271 - DNA, 15 bp, Homo sapiens
aacaaccacaaacat

SEQ ID NO: 81272 - DNA, 15 bp, Homo sapiens
taacaaccacaaaca

SEQ ID NO: 81273 - DNA, 15 bp, Homo sapiens
gtaacaaccacaaac

SEQ ID NO: 81274 - DNA, 15 bp, Homo sapiens
cgtaacaaccacaaa

SEQ ID NO: 81275 - DNA, 15 bp, Homo sapiens
ccgtaacaaccacaa

SEQ ID NO: 81276 - DNA, 15 bp, Homo sapiens
tccgtaacaaccaca

SEQ ID NO: 81277 - DNA, 15 bp, Homo sapiens
ttccgtaacaaccac

SEQ ID NO: 81278 - DNA, 15 bp, Homo sapiens
attccgtaacaacca

SEQ ID NO: 81279 - DNA, 15 bp, Homo sapiens
cattccgtaacaacc

SEQ ID NO: 81280 - DNA, 15 bp, Homo sapiens
tcattccgtaacaac

SEQ ID NO: 81281 - DNA, 15 bp, Homo sapiens
atcattccgtaacaa

SEQ ID NO: 81282 - DNA, 15 bp, Homo sapiens
gatcattccgtaaca

SEQ ID NO: 81283 - DNA, 15 bp, Homo sapiens
ggatcattccgtaac

SEQ ID NO: 81284 - DNA, 15 bp, Homo sapiens
aggatcattccgtaa

SEQ ID NO: 81285 - DNA, 15 bp, Homo sapiens
caggatcattccgta

SEQ ID NO: 81286 - DNA, 15 bp, Homo sapiens
acaggatcattccgt

SEQ ID NO: 81287 - DNA, 15 bp, Homo sapiens
cacaggatcattccg

SEQ ID NO: 81288 - DNA, 15 bp, Homo sapiens
gcacaggatcattcc

SEQ ID NO: 81289 - DNA, 15 bp, Homo sapiens
agcacaggatcattc

SEQ ID NO: 81290 - DNA, 15 bp, Homo sapiens
gagcacaggatcatt

SEQ ID NO: 81291 - DNA, 15 bp, Homo sapiens
ggagcacaggatcat

SEQ ID NO: 81292 - DNA, 15 bp, Homo sapiens
aggagcacaggatca

SEQ ID NO: 81293 - DNA, 15 bp, Homo sapiens
caggagcacaggatc

SEQ ID NO: 81294 - DNA, 15 bp, Homo sapiens
tcaggagcacaggat

SEQ ID NO: 81295 - DNA, 15 bp, Homo sapiens
ctcaggagcacagga

SEQ ID NO: 81296 - DNA, 15 bp, Homo sapiens
cctcaggagcacagg

SEQ ID NO: 81297 - DNA, 15 bp, Homo sapiens
gcctcaggagcacag

SEQ ID NO: 81298 - DNA, 15 bp, Homo sapiens
tgcctcaggagcaca

SEQ ID NO: 81299 - DNA, 15 bp, Homo sapiens
ttgcctcaggagcac

SEQ ID NO: 81300 - DNA, 15 bp, Homo sapiens
gttgcctcaggagca

SEQ ID NO: 81301 - DNA, 15 bp, Homo sapiens
tgttgcctcaggagc

SEQ ID NO: 81302 - DNA, 15 bp, Homo sapiens
ctgttgcctcaggag

SEQ ID NO: 81303 - DNA, 15 bp, Homo sapiens
tctgttgcctcagga

SEQ ID NO: 81304 - DNA, 15 bp, Homo sapiens
ttctgttgcctcagg

SEQ ID NO: 81305 - DNA, 15 bp, Homo sapiens
tttctgttgcctcag

SEQ ID NO: 81306 - DNA, 15 bp, Homo sapiens
ctttctgttgcctca

SEQ ID NO: 81307 - DNA, 15 bp, Homo sapiens
cctttctgttgcctc

SEQ ID NO: 81308 - DNA, 15 bp, Homo sapiens
gcctttctgttgcct

SEQ ID NO: 81309 - DNA, 15 bp, Homo sapiens
ggcctttctgttgcc

SEQ ID NO: 81310 - DNA, 15 bp, Homo sapiens
tggcctttctgttgc

SEQ ID NO: 81311 - DNA, 15 bp, Homo sapiens
ctggcctttctgttg

SEQ ID NO: 81312 - DNA, 15 bp, Homo sapiens
cctggcctttctgtt

SEQ ID NO: 81313 - DNA, 15 bp, Homo sapiens
gcctggcctttctgt

SEQ ID NO: 81314 - DNA, 15 bp, Homo sapiens
ggcctggcctttctg

SEQ ID NO: 81315 - DNA, 15 bp, Homo sapiens
tggcctggcctttct

SEQ ID NO: 81316 - DNA, 15 bp, Homo sapiens
atggcctggcctttc

SEQ ID NO: 81317 - DNA, 15 bp, Homo sapiens
gatggcctggccttt

SEQ ID NO: 81318 - DNA, 15 bp, Homo sapiens
agatggcctggcctt

SEQ ID NO: 81319 - DNA, 15 bp, Homo sapiens
gagatggcctggcct

SEQ ID NO: 81320 - DNA, 15 bp, Homo sapiens
agagatggcctggcc

SEQ ID NO: 81321 - DNA, 15 bp, Homo sapiens
cagagatggcctggc

SEQ ID NO: 81322 - DNA, 15 bp, Homo sapiens
ccagagatggcctgg

SEQ ID NO: 81323 - DNA, 15 bp, Homo sapiens
accagagatggcctg

SEQ ID NO: 81324 - DNA, 15 bp, Homo sapiens
taccagagatggcct

SEQ ID NO: 81325 - DNA, 15 bp, Homo sapiens
ttaccagagatggcc

SEQ ID NO: 81326 - DNA, 15 bp, Homo sapiens
attaccagagatggc

SEQ ID NO: 81327 - DNA, 15 bp, Homo sapiens
gattaccagagatgg

SEQ ID NO: 81328 - DNA, 15 bp, Homo sapiens
ggattaccagagatg

SEQ ID NO: 81329 - DNA, 15 bp, Homo sapiens
aggattaccagagat

SEQ ID NO: 81330 - DNA, 15 bp, Homo sapiens
taggattaccagaga

SEQ ID NO: 81331 - DNA, 15 bp, Homo sapiens
gtaggattaccagag

SEQ ID NO: 81332 - DNA, 15 bp, Homo sapiens
agtaggattaccaga

SEQ ID NO: 81333 - DNA, 15 bp, Homo sapiens
gagtaggattaccag

SEQ ID NO: 81334 - DNA, 15 bp, Homo sapiens
agagtaggattacca

SEQ ID NO: 81335 - DNA, 15 bp, Homo sapiens
aagagtaggattacc

SEQ ID NO: 81336 - DNA, 15 bp, Homo sapiens
caagagtaggattac

SEQ ID NO: 81337 - DNA, 15 bp, Homo sapiens
gcaagagtaggatta

SEQ ID NO: 81338 - DNA, 15 bp, Homo sapiens
agcaagagtaggatt

SEQ ID NO: 81339 - DNA, 15 bp, Homo sapiens
cagcaagagtaggat

SEQ ID NO: 81340 - DNA, 15 bp, Homo sapiens
acagcaagagtagga

SEQ ID NO: 81341 - DNA, 15 bp, Homo sapiens
gacagcaagagtagg

SEQ ID NO: 81342 - DNA, 15 bp, Homo sapiens
agacagcaagagtag

SEQ ID NO: 81343 - DNA, 15 bp, Homo sapiens
aagacagcaagagta

SEQ ID NO: 81344 - DNA, 15 bp, Homo sapiens
gaagacagcaagagt

SEQ ID NO: 81345 - DNA, 15 bp, Homo sapiens
ggaagacagcaagag

SEQ ID NO: 81346 - DNA, 15 bp, Homo sapiens
gggaagacagcaaga

SEQ ID NO: 81347 - DNA, 15 bp, Homo sapiens
agggaagacagcaag

SEQ ID NO: 81348 - DNA, 15 bp, Homo sapiens
aagggaagacagcaa

SEQ ID NO: 81349 - DNA, 15 bp, Homo sapiens
aaagggaagacagca

SEQ ID NO: 81350 - DNA, 15 bp, Homo sapiens
caaagggaagacagc

SEQ ID NO: 81351 - DNA, 15 bp, Homo sapiens
gcaaagggaagacag

SEQ ID NO: 81352 - DNA, 15 bp, Homo sapiens
tgcaaagggaagaca

SEQ ID NO: 81353 - DNA, 15 bp, Homo sapiens
ctgcaaagggaagac

SEQ ID NO: 81354 - DNA, 15 bp, Homo sapiens
tctgcaaagggaaga

SEQ ID NO: 81355 - DNA, 15 bp, Homo sapiens
ctctgcaaagggaag

SEQ ID NO: 81356 - DNA, 15 bp, Homo sapiens
tctctgcaaagggaa

SEQ ID NO: 81357 - DNA, 15 bp, Homo sapiens
gtctctgcaaaggga

SEQ ID NO: 81358 - DNA, 15 bp, Homo sapiens
tgtctctgcaaaggg

SEQ ID NO: 81359 - DNA, 15 bp, Homo sapiens
gtgtctctgcaaagg

SEQ ID NO: 81360 - DNA, 15 bp, Homo sapiens
cgtgtctctgcaaag

SEQ ID NO: 81361 - DNA, 15 bp, Homo sapiens
gcgtgtctctgcaaa

SEQ ID NO: 81362 - DNA, 15 bp, Homo sapiens
ggcgtgtctctgcaa

SEQ ID NO: 81363 - DNA, 15 bp, Homo sapiens
gggcgtgtctctgca

SEQ ID NO: 81364 - DNA, 15 bp, Homo sapiens
agggcgtgtctctgc

SEQ ID NO: 81365 - DNA, 15 bp, Homo sapiens
cagggcgtgtctctg

SEQ ID NO: 81366 - DNA, 15 bp, Homo sapiens
gcagggcgtgtctct

SEQ ID NO: 81367 - DNA, 15 bp, Homo sapiens
ggcagggcgtgtctc

SEQ ID NO: 81368 - DNA, 15 bp, Homo sapiens
tggcagggcgtgtct

SEQ ID NO: 81369 - DNA, 15 bp, Homo sapiens
ctggcagggcgtgtc

SEQ ID NO: 81370 - DNA, 15 bp, Homo sapiens
cctggcagggcgtgt

SEQ ID NO: 81371 - DNA, 15 bp, Homo sapiens
gcctggcagggcgtg

SEQ ID NO: 81372 - DNA, 15 bp, Homo sapiens
tgcctggcagggcgt

SEQ ID NO: 81373 - DNA, 15 bp, Homo sapiens
ctgcctggcagggcg

SEQ ID NO: 81374 - DNA, 15 bp, Homo sapiens
cctgcctggcagggc

SEQ ID NO: 81375 - DNA, 15 bp, Homo sapiens
ccctgcctggcaggg

SEQ ID NO: 81376 - DNA, 15 bp, Homo sapiens
cccctgcctggcagg

SEQ ID NO: 81377 - DNA, 15 bp, Homo sapiens
tcccctgcctggcag

SEQ ID NO: 81378 - DNA, 15 bp, Homo sapiens
ctcccctgcctggca

SEQ ID NO: 81379 - DNA, 15 bp, Homo sapiens
cctcccctgcctggc

SEQ ID NO: 81380 - DNA, 15 bp, Homo sapiens
tcctcccctgcctgg

SEQ ID NO: 81381 - DNA, 15 bp, Homo sapiens
ttcctcccctgcctg

SEQ ID NO: 81382 - DNA, 15 bp, Homo sapiens
cttcctcccctgcct

SEQ ID NO: 81383 - DNA, 15 bp, Homo sapiens
tcttcctcccctgcc

SEQ ID NO: 81384 - DNA, 15 bp, Homo sapiens
ctcttcctcccctgc

SEQ ID NO: 81385 - DNA, 15 bp, Homo sapiens
actcttcctcccctg

SEQ ID NO: 81386 - DNA, 15 bp, Homo sapiens
cactcttcctcccct

SEQ ID NO: 81387 - DNA, 15 bp, Homo sapiens
ccactcttcctcccc

SEQ ID NO: 81388 - DNA, 15 bp, Homo sapiens
tccactcttcctccc

SEQ ID NO: 81389 - DNA, 15 bp, Homo sapiens
gtccactcttcctcc

SEQ ID NO: 81390 - DNA, 15 bp, Homo sapiens
ggtccactcttcctc

SEQ ID NO: 81391 - DNA, 15 bp, Homo sapiens
tggtccactcttcct

SEQ ID NO: 81392 - DNA, 15 bp, Homo sapiens
gtggtccactcttcc

SEQ ID NO: 81393 - DNA, 15 bp, Homo sapiens
agtggtccactcttc

SEQ ID NO: 81394 - DNA, 15 bp, Homo sapiens
cagtggtccactctt

SEQ ID NO: 81395 - DNA, 15 bp, Homo sapiens
gcagtggtccactct

SEQ ID NO: 81396 - DNA, 15 bp, Homo sapiens
ggcagtggtccactc

SEQ ID NO: 81397 - DNA, 15 bp, Homo sapiens
gggcagtggtccact

SEQ ID NO: 81398 - DNA, 15 bp, Homo sapiens
ggggcagtggtccac

SEQ ID NO: 81399 - DNA, 15 bp, Homo sapiens
tggggcagtggtcca

SEQ ID NO: 81400 - DNA, 15 bp, Homo sapiens
ctggggcagtggtcc

SEQ ID NO: 81401 - DNA, 15 bp, Homo sapiens
actggggcagtggtc

SEQ ID NO: 81402 - DNA, 15 bp, Homo sapiens
aactggggcagtggt

SEQ ID NO: 81403 - DNA, 15 bp, Homo sapiens
gaactggggcagtgg

SEQ ID NO: 81404 - DNA, 15 bp, Homo sapiens
ggaactggggcagtg

SEQ ID NO: 81405 - DNA, 15 bp, Homo sapiens
gggaactggggcagt

SEQ ID NO: 81406 - DNA, 15 bp, Homo sapiens
ggggaactggggcag

SEQ ID NO: 81407 - DNA, 15 bp, Homo sapiens
tggggaactggggca

SEQ ID NO: 81408 - DNA, 15 bp, Homo sapiens
ctggggaactggggc

SEQ ID NO: 81409 - DNA, 15 bp, Homo sapiens
tctggggaactgggg

SEQ ID NO: 81410 - DNA, 15 bp, Homo sapiens
gtctggggaactggg

SEQ ID NO: 81411 - DNA, 15 bp, Homo sapiens
ggtctggggaactgg

SEQ ID NO: 81412 - DNA, 15 bp, Homo sapiens
tggtctggggaactg

SEQ ID NO: 81413 - DNA, 15 bp, Homo sapiens
atggtctggggaact

SEQ ID NO: 81414 - DNA, 15 bp, Homo sapiens
gatggtctggggaac

SEQ ID NO: 81415 - DNA, 15 bp, Homo sapiens
tgatggtctggggaa

SEQ ID NO: 81416 - DNA, 15 bp, Homo sapiens
atgatggtctgggga

SEQ ID NO: 81417 - DNA, 15 bp, Homo sapiens
catgatggtctgggg

SEQ ID NO: 81418 - DNA, 15 bp, Homo sapiens
ccatgatggtctggg

SEQ ID NO: 81419 - DNA, 15 bp, Homo sapiens
tccatgatggtctgg

SEQ ID NO: 81420 - DNA, 15 bp, Homo sapiens
gtccatgatggtctg

SEQ ID NO: 81421 - DNA, 15 bp, Homo sapiens
ggtccatgatggtct

SEQ ID NO: 81422 - DNA, 15 bp, Homo sapiens
aggtccatgatggtc

SEQ ID NO: 81423 - DNA, 15 bp, Homo sapiens
gaggtccatgatggt

SEQ ID NO: 81424 - DNA, 15 bp, Homo sapiens
agaggtccatgatgg

SEQ ID NO: 81425 - DNA, 15 bp, Homo sapiens
aagaggtccatgatg

SEQ ID NO: 81426 - DNA, 15 bp, Homo sapiens
gaagaggtccatgat

SEQ ID NO: 81427 - DNA, 15 bp, Homo sapiens
ggaagaggtccatga

SEQ ID NO: 81428 - DNA, 15 bp, Homo sapiens
tggaagaggtccatg

SEQ ID NO: 81429 - DNA, 15 bp, Homo sapiens
ctggaagaggtccat

SEQ ID NO: 81430 - DNA, 15 bp, Homo sapiens
tctggaagaggtcca

SEQ ID NO: 81431 - DNA, 15 bp, Homo sapiens
ttctggaagaggtcc

SEQ ID NO: 81432 - DNA, 15 bp, Homo sapiens
attctggaagaggtc

SEQ ID NO: 81433 - DNA, 15 bp, Homo sapiens
cattctggaagaggt

SEQ ID NO: 81434 - DNA, 15 bp, Homo sapiens
ccattctggaagagg

SEQ ID NO: 81435 - DNA, 15 bp, Homo sapiens
cccattctggaagag

SEQ ID NO: 81436 - DNA, 15 bp, Homo sapiens
tcccattctggaaga

SEQ ID NO: 81437 - DNA, 15 bp, Homo sapiens
ttcccattctggaag

SEQ ID NO: 81438 - DNA, 15 bp, Homo sapiens
gttcccattctggaa

SEQ ID NO: 81439 - DNA, 15 bp, Homo sapiens
agttcccattctgga

SEQ ID NO: 81440 - DNA, 15 bp, Homo sapiens
cagttcccattctgg

SEQ ID NO: 81441 - DNA, 15 bp, Homo sapiens
ccagttcccattctg

SEQ ID NO: 81442 - DNA, 15 bp, Homo sapiens
tccagttcccattct

SEQ ID NO: 81443 - DNA, 15 bp, Homo sapiens
gtccagttcccattc

SEQ ID NO: 81444 - DNA, 15 bp, Homo sapiens
tgtccagttcccatt

SEQ ID NO: 81445 - DNA, 15 bp, Homo sapiens
ttgtccagttcccat

SEQ ID NO: 81446 - DNA, 15 bp, Homo sapiens
attgtccagttccca

SEQ ID NO: 81447 - DNA, 15 bp, Homo sapiens
cattgtccagttccc

SEQ ID NO: 81448 - DNA, 15 bp, Homo sapiens
gcattgtccagttcc

SEQ ID NO: 81449 - DNA, 15 bp, Homo sapiens
tgcattgtccagttc

SEQ ID NO: 81450 - DNA, 15 bp, Homo sapiens
ctgcattgtccagtt

SEQ ID NO: 81451 - DNA, 15 bp, Homo sapiens
tctgcattgtccagt

SEQ ID NO: 81452 - DNA, 15 bp, Homo sapiens
ttctgcattgtccag

SEQ ID NO: 81453 - DNA, 15 bp, Homo sapiens
gttctgcattgtcca

SEQ ID NO: 81454 - DNA, 15 bp, Homo sapiens
ggttctgcattgtcc

SEQ ID NO: 81455 - DNA, 15 bp, Homo sapiens
gggttctgcattgtc

SEQ ID NO: 81456 - DNA, 15 bp, Homo sapiens
agggttctgcattgt

SEQ ID NO: 81457 - DNA, 15 bp, Homo sapiens
aagggttctgcattg

SEQ ID NO: 81458 - DNA, 15 bp, Homo sapiens
gaagggttctgcatt

SEQ ID NO: 81459 - DNA, 15 bp, Homo sapiens
tgaagggttctgcat

SEQ ID NO: 81460 - DNA, 15 bp, Homo sapiens
gtgaagggttctgca

SEQ ID NO: 81461 - DNA, 15 bp, Homo sapiens
ggtgaagggttctgc

SEQ ID NO: 81462 - DNA, 15 bp, Homo sapiens
aggtgaagggttctg

SEQ ID NO: 81463 - DNA, 15 bp, Homo sapiens
caggtgaagggttct

SEQ ID NO: 81464 - DNA, 15 bp, Homo sapiens
gcaggtgaagggttc

SEQ ID NO: 81465 - DNA, 15 bp, Homo sapiens
tgcaggtgaagggtt

SEQ ID NO: 81466 - DNA, 15 bp, Homo sapiens
atgcaggtgaagggt

SEQ ID NO: 81467 - DNA, 15 bp, Homo sapiens
catgcaggtgaaggg

SEQ ID NO: 81468 - DNA, 15 bp, Homo sapiens
gcatgcaggtgaagg

SEQ ID NO: 81469 - DNA, 15 bp, Homo sapiens
ggcatgcaggtgaag

SEQ ID NO: 81470 - DNA, 15 bp, Homo sapiens
tggcatgcaggtgaa

SEQ ID NO: 81471 - DNA, 15 bp, Homo sapiens
ctggcatgcaggtga

SEQ ID NO: 81472 - DNA, 15 bp, Homo sapiens
actggcatgcaggtg

SEQ ID NO: 81473 - DNA, 15 bp, Homo sapiens
cactggcatgcaggt

SEQ ID NO: 81474 - DNA, 15 bp, Homo sapiens
acactggcatgcagg

SEQ ID NO: 81475 - DNA, 15 bp, Homo sapiens
tacactggcatgcag

SEQ ID NO: 81476 - DNA, 15 bp, Homo sapiens
ctacactggcatgca

SEQ ID NO: 81477 - DNA, 15 bp, Homo sapiens
gctacactggcatgc

SEQ ID NO: 81478 - DNA, 15 bp, Homo sapiens
tgctacactggcatg

SEQ ID NO: 81479 - DNA, 15 bp, Homo sapiens
ctgctacactggcat

SEQ ID NO: 81480 - DNA, 15 bp, Homo sapiens
gctgctacactggca

SEQ ID NO: 81481 - DNA, 15 bp, Homo sapiens
cgctgctacactggc

SEQ ID NO: 81482 - DNA, 15 bp, Homo sapiens
tcgctgctacactgg

SEQ ID NO: 81483 - DNA, 15 bp, Homo sapiens
gtcgctgctacactg

SEQ ID NO: 81484 - DNA, 15 bp, Homo sapiens
tgtcgctgctacact

SEQ ID NO: 81485 - DNA, 15 bp, Homo sapiens
ttgtcgctgctacac

SEQ ID NO: 81486 - DNA, 15 bp, Homo sapiens
tttgtcgctgctaca

SEQ ID NO: 81487 - DNA, 15 bp, Homo sapiens
ttttgtcgctgctac

SEQ ID NO: 81488 - DNA, 15 bp, Homo sapiens
attttgtcgctgcta

SEQ ID NO: 81489 - DNA, 15 bp, Homo sapiens
gattttgtcgctgct

SEQ ID NO: 81490 - DNA, 15 bp, Homo sapiens
tgattttgtcgctgc

SEQ ID NO: 81491 - DNA, 15 bp, Homo sapiens
ttgattttgtcgctg

SEQ ID NO: 81492 - DNA, 15 bp, Homo sapiens
cttgattttgtcgct

SEQ ID NO: 81493 - DNA, 15 bp, Homo sapiens
tcttgattttgtcgc

SEQ ID NO: 81494 - DNA, 15 bp, Homo sapiens
ttcttgattttgtcg

SEQ ID NO: 81495 - DNA, 15 bp, Homo sapiens
cttcttgattttgtc

SEQ ID NO: 81496 - DNA, 15 bp, Homo sapiens
tcttcttgattttgt

SEQ ID NO: 81497 - DNA, 15 bp, Homo sapiens
atcttcttgattttg

SEQ ID NO: 81498 - DNA, 15 bp, Homo sapiens
catcttcttgatttt

SEQ ID NO: 81499 - DNA, 15 bp, Homo sapiens
gcatcttcttgattt

SEQ ID NO: 81500 - DNA, 15 bp, Homo sapiens
agcatcttcttgatt

SEQ ID NO: 81501 - DNA, 15 bp, Homo sapiens
cagcatcttcttgat

SEQ ID NO: 81502 - DNA, 15 bp, Homo sapiens
gcagcatcttcttga

SEQ ID NO: 81503 - DNA, 15 bp, Homo sapiens
ggcagcatcttcttg

SEQ ID NO: 81504 - DNA, 15 bp, Homo sapiens
aggcagcatcttctt

SEQ ID NO: 81505 - DNA, 15 bp, Homo sapiens
caggcagcatcttct

SEQ ID NO: 81506 - DNA, 15 bp, Homo sapiens
acaggcagcatcttc

SEQ ID NO: 81507 - DNA, 15 bp, Homo sapiens
cacaggcagcatctt

SEQ ID NO: 81508 - DNA, 15 bp, Homo sapiens
acacaggcagcatct

SEQ ID NO: 81509 - DNA, 15 bp, Homo sapiens
cacacaggcagcatc

SEQ ID NO: 81510 - DNA, 15 bp, Homo sapiens
acacacaggcagcat

SEQ ID NO: 81511 - DNA, 15 bp, Homo sapiens
gacacacaggcagca

SEQ ID NO: 81512 - DNA, 15 bp, Homo sapiens
ggacacacaggcagc

SEQ ID NO: 81513 - DNA, 15 bp, Homo sapiens
gggacacacaggcag

SEQ ID NO: 81514 - DNA, 15 bp, Homo sapiens
ggggacacacaggca

SEQ ID NO: 81515 - DNA, 15 bp, Homo sapiens
gggggacacacaggc

SEQ ID NO: 81516 - DNA, 15 bp, Homo sapiens
tgggggacacacagg

SEQ ID NO: 81517 - DNA, 15 bp, Homo sapiens
ctgggggacacacag

SEQ ID NO: 81518 - DNA, 15 bp, Homo sapiens
cctgggggacacaca

SEQ ID NO: 81519 - DNA, 15 bp, Homo sapiens
ccctgggggacacac

SEQ ID NO: 81520 - DNA, 15 bp, Homo sapiens
cccctgggggacaca

SEQ ID NO: 81521 - DNA, 15 bp, Homo sapiens
gcccctgggggacac

SEQ ID NO: 81522 - DNA, 15 bp, Homo sapiens
tgcccctgggggaca

SEQ ID NO: 81523 - DNA, 15 bp, Homo sapiens
ctgcccctgggggac

SEQ ID NO: 81524 - DNA, 15 bp, Homo sapiens
cctgcccctggggga

SEQ ID NO: 81525 - DNA, 15 bp, Homo sapiens
ccctgcccctggggg

SEQ ID NO: 81526 - DNA, 15 bp, Homo sapiens
cccctgcccctgggg

SEQ ID NO: 81527 - DNA, 15 bp, Homo sapiens
ccccctgcccctggg

SEQ ID NO: 81528 - DNA, 15 bp, Homo sapiens
cccccctgcccctgg

SEQ ID NO: 81529 - DNA, 15 bp, Homo sapiens
gcccccctgcccctg

SEQ ID NO: 81530 - DNA, 15 bp, Homo sapiens
agcccccctgcccct

SEQ ID NO: 81531 - DNA, 15 bp, Homo sapiens
cagcccccctgcccc

SEQ ID NO: 81532 - DNA, 15 bp, Homo sapiens
gcagcccccctgccc

SEQ ID NO: 81533 - DNA, 15 bp, Homo sapiens
ggcagcccccctgcc

SEQ ID NO: 81534 - DNA, 15 bp, Homo sapiens
aggcagcccccctgc

SEQ ID NO: 81535 - DNA, 15 bp, Homo sapiens
gaggcagcccccctg

SEQ ID NO: 81536 - DNA, 15 bp, Homo sapiens
ggaggcagcccccct

SEQ ID NO: 81537 - DNA, 15 bp, Homo sapiens
aggaggcagcccccc

SEQ ID NO: 81538 - DNA, 15 bp, Homo sapiens
gaggaggcagccccc

SEQ ID NO: 81539 - DNA, 15 bp, Homo sapiens
ggaggaggcagcccc

SEQ ID NO: 81540 - DNA, 15 bp, Homo sapiens
tggaggaggcagccc

SEQ ID NO: 81541 - DNA, 15 bp, Homo sapiens
gtggaggaggcagcc

SEQ ID NO: 81542 - DNA, 15 bp, Homo sapiens
tgtggaggaggcagc

SEQ ID NO: 81543 - DNA, 15 bp, Homo sapiens
ttgtggaggaggcag

SEQ ID NO: 81544 - DNA, 15 bp, Homo sapiens
cttgtggaggaggca

SEQ ID NO: 81545 - DNA, 15 bp, Homo sapiens
acttgtggaggaggc

SEQ ID NO: 81546 - DNA, 15 bp, Homo sapiens
cacttgtggaggagg

SEQ ID NO: 81547 - DNA, 15 bp, Homo sapiens
tcacttgtggaggag

SEQ ID NO: 81548 - DNA, 15 bp, Homo sapiens
ctcacttgtggagga

SEQ ID NO: 81549 - DNA, 15 bp, Homo sapiens
actcacttgtggagg

SEQ ID NO: 81550 - DNA, 15 bp, Homo sapiens
gactcacttgtggag

SEQ ID NO: 81551 - DNA, 15 bp, Homo sapiens
tgactcacttgtgga

SEQ ID NO: 81552 - DNA, 15 bp, Homo sapiens
gtgactcacttgtgg

SEQ ID NO: 81553 - DNA, 15 bp, Homo sapiens
agtgactcacttgtg

SEQ ID NO: 81554 - DNA, 15 bp, Homo sapiens
aagtgactcacttgt

SEQ ID NO: 81555 - DNA, 15 bp, Homo sapiens
aaagtgactcacttg

SEQ ID NO: 81556 - DNA, 15 bp, Homo sapiens
gaaagtgactcactt

SEQ ID NO: 81557 - DNA, 15 bp, Homo sapiens
tgaaagtgactcact

SEQ ID NO: 81558 - DNA, 15 bp, Homo sapiens
ctgaaagtgactcac

SEQ ID NO: 81559 - DNA, 15 bp, Homo sapiens
cctgaaagtgactca

SEQ ID NO: 81560 - DNA, 15 bp, Homo sapiens
ccctgaaagtgactc

SEQ ID NO: 81561 - DNA, 15 bp, Homo sapiens
cccctgaaagtgact

SEQ ID NO: 81562 - DNA, 15 bp, Homo sapiens
ccccctgaaagtgac

SEQ ID NO: 81563 - DNA, 15 bp, Homo sapiens
accccctgaaagtga

SEQ ID NO: 81564 - DNA, 15 bp, Homo sapiens
caccccctgaaagtg

SEQ ID NO: 81565 - DNA, 15 bp, Homo sapiens
tcaccccctgaaagt

SEQ ID NO: 81566 - DNA, 15 bp, Homo sapiens
atcaccccctgaaag

SEQ ID NO: 81567 - DNA, 15 bp, Homo sapiens
aatcaccccctgaaa

SEQ ID NO: 81568 - DNA, 15 bp, Homo sapiens
caatcaccccctgaa

SEQ ID NO: 81569 - DNA, 15 bp, Homo sapiens
ccaatcaccccctga

SEQ ID NO: 81570 - DNA, 15 bp, Homo sapiens
cccaatcaccccctg

SEQ ID NO: 81571 - DNA, 15 bp, Homo sapiens
gcccaatcaccccct

SEQ ID NO: 81572 - DNA, 15 bp, Homo sapiens
tgcccaatcaccccc

SEQ ID NO: 81573 - DNA, 15 bp, Homo sapiens
ctgcccaatcacccc

SEQ ID NO: 81574 - DNA, 15 bp, Homo sapiens
tctgcccaatcaccc

SEQ ID NO: 81575 - DNA, 15 bp, Homo sapiens
ttctgcccaatcacc

SEQ ID NO: 81576 - DNA, 15 bp, Homo sapiens
cttctgcccaatcac

SEQ ID NO: 81577 - DNA, 15 bp, Homo sapiens
ccttctgcccaatca

SEQ ID NO: 81578 - DNA, 15 bp, Homo sapiens
cccttctgcccaatc

SEQ ID NO: 81579 - DNA, 15 bp, Homo sapiens
ccccttctgcccaat

SEQ ID NO: 81580 - DNA, 15 bp, Homo sapiens
accccttctgcccaa

SEQ ID NO: 81581 - DNA, 15 bp, Homo sapiens
caccccttctgccca

SEQ ID NO: 81582 - DNA, 15 bp, Homo sapiens
gcaccccttctgccc

SEQ ID NO: 81583 - DNA, 15 bp, Homo sapiens
tgcaccccttctgcc

SEQ ID NO: 81584 - DNA, 15 bp, Homo sapiens
ctgcaccccttctgc

SEQ ID NO: 81585 - DNA, 15 bp, Homo sapiens
cctgcaccccttctg

SEQ ID NO: 81586 - DNA, 15 bp, Homo sapiens
tcctgcaccccttct

SEQ ID NO: 81587 - DNA, 15 bp, Homo sapiens
atcctgcaccccttc

SEQ ID NO: 81588 - DNA, 15 bp, Homo sapiens
catcctgcacccctt

SEQ ID NO: 81589 - DNA, 15 bp, Homo sapiens
ccatcctgcacccct

SEQ ID NO: 81590 - DNA, 15 bp, Homo sapiens
cccatcctgcacccc

SEQ ID NO: 81591 - DNA, 15 bp, Homo sapiens
gcccatcctgcaccc

SEQ ID NO: 81592 - DNA, 15 bp, Homo sapiens
agcccatcctgcacc

SEQ ID NO: 81593 - DNA, 15 bp, Homo sapiens
cagcccatcctgcac

SEQ ID NO: 81594 - DNA, 15 bp, Homo sapiens
ccagcccatcctgca

SEQ ID NO: 81595 - DNA, 15 bp, Homo sapiens
accagcccatcctgc

SEQ ID NO: 81596 - DNA, 15 bp, Homo sapiens
taccagcccatcctg

SEQ ID NO: 81597 - DNA, 15 bp, Homo sapiens
ctaccagcccatcct

SEQ ID NO: 81598 - DNA, 15 bp, Homo sapiens
gctaccagcccatcc

SEQ ID NO: 81599 - DNA, 15 bp, Homo sapiens
agctaccagcccatc

SEQ ID NO: 81600 - DNA, 15 bp, Homo sapiens
aagctaccagcccat

SEQ ID NO: 81601 - DNA, 15 bp, Homo sapiens
gaagctaccagccca

SEQ ID NO: 81602 - DNA, 15 bp, Homo sapiens
ggaagctaccagccc

SEQ ID NO: 81603 - DNA, 15 bp, Homo sapiens
cggaagctaccagcc

SEQ ID NO: 81604 - DNA, 15 bp, Homo sapiens
gcggaagctaccagc

SEQ ID NO: 81605 - DNA, 15 bp, Homo sapiens
agcggaagctaccag

SEQ ID NO: 81606 - DNA, 15 bp, Homo sapiens
aagcggaagctacca

SEQ ID NO: 81607 - DNA, 15 bp, Homo sapiens
caagcggaagctacc

SEQ ID NO: 81608 - DNA, 15 bp, Homo sapiens
ccaagcggaagctac

SEQ ID NO: 81609 - DNA, 15 bp, Homo sapiens
tccaagcggaagcta

SEQ ID NO: 81610 - DNA, 15 bp, Homo sapiens
ttccaagcggaagct

SEQ ID NO: 81611 - DNA, 15 bp, Homo sapiens
cttccaagcggaagc

SEQ ID NO: 81612 - DNA, 15 bp, Homo sapiens
gcttccaagcggaag

SEQ ID NO: 81613 - DNA, 15 bp, Homo sapiens
tgcttccaagcggaa

SEQ ID NO: 81614 - DNA, 15 bp, Homo sapiens
ctgcttccaagcgga

SEQ ID NO: 81615 - DNA, 15 bp, Homo sapiens
cctgcttccaagcgg

SEQ ID NO: 81616 - DNA, 15 bp, Homo sapiens
tcctgcttccaagcg

SEQ ID NO: 81617 - DNA, 15 bp, Homo sapiens
ttcctgcttccaagc

SEQ ID NO: 81618 - DNA, 15 bp, Homo sapiens
attcctgcttccaag

SEQ ID NO: 81619 - DNA, 15 bp, Homo sapiens
cattcctgcttccaa

SEQ ID NO: 81620 - DNA, 15 bp, Homo sapiens
tcattcctgcttcca

SEQ ID NO: 81621 - DNA, 15 bp, Homo sapiens
ctcattcctgcttcc

SEQ ID NO: 81622 - DNA, 15 bp, Homo sapiens
actcattcctgcttc

SEQ ID NO: 81623 - DNA, 15 bp, Homo sapiens
cactcattcctgctt

SEQ ID NO: 81624 - DNA, 15 bp, Homo sapiens
tcactcattcctgct

SEQ ID NO: 81625 - DNA, 15 bp, Homo sapiens
ctcactcattcctgc

SEQ ID NO: 81626 - DNA, 15 bp, Homo sapiens
tctcactcattcctg

SEQ ID NO: 81627 - DNA, 15 bp, Homo sapiens
atctcactcattcct

SEQ ID NO: 81628 - DNA, 15 bp, Homo sapiens
tatctcactcattcc

SEQ ID NO: 81629 - DNA, 15 bp, Homo sapiens
atatctcactcattc

SEQ ID NO: 81630 - DNA, 15 bp, Homo sapiens
gatatctcactcatt

SEQ ID NO: 81631 - DNA, 15 bp, Homo sapiens
tgatatctcactcat

SEQ ID NO: 81632 - DNA, 15 bp, Homo sapiens
atgatatctcactca

SEQ ID NO: 81633 - DNA, 15 bp, Homo sapiens
catgatatctcactc

SEQ ID NO: 81634 - DNA, 15 bp, Homo sapiens
acatgatatctcact

SEQ ID NO: 81635 - DNA, 15 bp, Homo sapiens
aacatgatatctcac

SEQ ID NO: 81636 - DNA, 15 bp, Homo sapiens
caacatgatatctca

SEQ ID NO: 81637 - DNA, 15 bp, Homo sapiens
ccaacatgatatctc

SEQ ID NO: 81638 - DNA, 15 bp, Homo sapiens
cccaacatgatatct

SEQ ID NO: 81639 - DNA, 15 bp, Homo sapiens
tcccaacatgatatc

SEQ ID NO: 81640 - DNA, 15 bp, Homo sapiens
ctcccaacatgatat

SEQ ID NO: 81641 - DNA, 15 bp, Homo sapiens
cctcccaacatgata

SEQ ID NO: 81642 - DNA, 15 bp, Homo sapiens
ccctcccaacatgat

SEQ ID NO: 81643 - DNA, 15 bp, Homo sapiens
accctcccaacatga

SEQ ID NO: 81644 - DNA, 15 bp, Homo sapiens
gaccctcccaacatg

SEQ ID NO: 81645 - DNA, 15 bp, Homo sapiens
agaccctcccaacat

SEQ ID NO: 81646 - DNA, 15 bp, Homo sapiens
cagaccctcccaaca

SEQ ID NO: 81647 - DNA, 15 bp, Homo sapiens
acagaccctcccaac

SEQ ID NO: 81648 - DNA, 15 bp, Homo sapiens
aacagaccctcccaa

SEQ ID NO: 81649 - DNA, 15 bp, Homo sapiens
aaacagaccctccca

SEQ ID NO: 81650 - DNA, 15 bp, Homo sapiens
gaaacagaccctccc

SEQ ID NO: 81651 - DNA, 15 bp, Homo sapiens
tgaaacagaccctcc

SEQ ID NO: 81652 - DNA, 15 bp, Homo sapiens
ctgaaacagaccctc

SEQ ID NO: 81653 - DNA, 15 bp, Homo sapiens
actgaaacagaccct

SEQ ID NO: 81654 - DNA, 15 bp, Homo sapiens
gactgaaacagaccc

SEQ ID NO: 81655 - DNA, 15 bp, Homo sapiens
agactgaaacagacc

SEQ ID NO: 81656 - DNA, 15 bp, Homo sapiens
aagactgaaacagac

SEQ ID NO: 81657 - DNA, 15 bp, Homo sapiens
aaagactgaaacaga

SEQ ID NO: 81658 - DNA, 15 bp, Homo sapiens
aaaagactgaaacag

SEQ ID NO: 81659 - DNA, 15 bp, Homo sapiens
aaaaagactgaaaca

SEQ ID NO: 81660 - DNA, 15 bp, Homo sapiens
aaaaaagactgaaac

SEQ ID NO: 81661 - DNA, 15 bp, Homo sapiens
caaaaaagactgaaa

SEQ ID NO: 81662 - DNA, 15 bp, Homo sapiens
acaaaaaagactgaa

SEQ ID NO: 81663 - DNA, 15 bp, Homo sapiens
aacaaaaaagactga

SEQ ID NO: 81664 - DNA, 15 bp, Homo sapiens
aaacaaaaaagactg

SEQ ID NO: 81665 - DNA, 15 bp, Homo sapiens
aaaacaaaaaagact

SEQ ID NO: 81666 - DNA, 15 bp, Homo sapiens
aaaaacaaaaaagac

SEQ ID NO: 81667 - DNA, 15 bp, Homo sapiens
aaaaaacaaaaaaga

SEQ ID NO: 81668 - DNA, 15 bp, Homo sapiens
caaaaaacaaaaaag

SEQ ID NO: 81669 - DNA, 15 bp, Homo sapiens
acaaaaaacaaaaaa

SEQ ID NO: 81670 - DNA, 15 bp, Homo sapiens
aacaaaaaacaaaaa

SEQ ID NO: 81671 - DNA, 15 bp, Homo sapiens
aaacaaaaaacaaaa

SEQ ID NO: 81672 - DNA, 15 bp, Homo sapiens
aaaaaaacaaaaaac

SEQ ID NO: 81673 - DNA, 15 bp, Homo sapiens
gaaaaaaaaacaaaa

SEQ ID NO: 81674 - DNA, 15 bp, Homo sapiens
agaaaaaaaaacaaa

SEQ ID NO: 81675 - DNA, 15 bp, Homo sapiens
cagaaaaaaaaacaa

SEQ ID NO: 81676 - DNA, 15 bp, Homo sapiens
tcagaaaaaaaaaca

SEQ ID NO: 81677 - DNA, 15 bp, Homo sapiens
ctcagaaaaaaaaac

SEQ ID NO: 81678 - DNA, 15 bp, Homo sapiens
cctcagaaaaaaaaa

SEQ ID NO: 81679 - DNA, 15 bp, Homo sapiens
gcctcagaaaaaaaa

SEQ ID NO: 81680 - DNA, 15 bp, Homo sapiens
cgcctcagaaaaaaa

SEQ ID NO: 81681 - DNA, 15 bp, Homo sapiens
ccgcctcagaaaaaa

SEQ ID NO: 81682 - DNA, 15 bp, Homo sapiens
tccgcctcagaaaaa

SEQ ID NO: 81683 - DNA, 15 bp, Homo sapiens
ctccgcctcagaaaa

SEQ ID NO: 81684 - DNA, 15 bp, Homo sapiens
actccgcctcagaaa

SEQ ID NO: 81685 - DNA, 15 bp, Homo sapiens
gactccgcctcagaa

SEQ ID NO: 81686 - DNA, 15 bp, Homo sapiens
agactccgcctcaga

SEQ ID NO: 81687 - DNA, 15 bp, Homo sapiens
aagactccgcctcag

SEQ ID NO: 81688 - DNA, 15 bp, Homo sapiens
caagactccgcctca

SEQ ID NO: 81689 - DNA, 15 bp, Homo sapiens
gcaagactccgcctc

SEQ ID NO: 81690 - DNA, 15 bp, Homo sapiens
agcaagactccgcct

SEQ ID NO: 81691 - DNA, 15 bp, Homo sapiens
gagcaagactccgcc

SEQ ID NO: 81692 - DNA, 15 bp, Homo sapiens
agagcaagactccgc

SEQ ID NO: 81693 - DNA, 15 bp, Homo sapiens
agcactccagcctgg

SEQ ID NO: 81694 - DNA, 15 bp, Homo sapiens
cagcactccagcctg

SEQ ID NO: 81695 - DNA, 15 bp, Homo sapiens
acagcactccagcct

SEQ ID NO: 81696 - DNA, 15 bp, Homo sapiens
cacagcactccagcc

SEQ ID NO: 81697 - DNA, 15 bp, Homo sapiens
ccacagcactccagc

SEQ ID NO: 81698 - DNA, 15 bp, Homo sapiens
gccacagcactccag

SEQ ID NO: 81699 - DNA, 15 bp, Homo sapiens
tgccacagcactcca

SEQ ID NO: 81700 - DNA, 15 bp, Homo sapiens
atgccacagcactcc

SEQ ID NO: 81701 - DNA, 15 bp, Homo sapiens
catgccacagcactc

SEQ ID NO: 81702 - DNA, 15 bp, Homo sapiens
tcatgccacagcact

SEQ ID NO: 81703 - DNA, 15 bp, Homo sapiens
atcatgccacagcac

SEQ ID NO: 81704 - DNA, 15 bp, Homo sapiens
gatcatgccacagca

SEQ ID NO: 81705 - DNA, 15 bp, Homo sapiens
agatcatgccacagc

SEQ ID NO: 81706 - DNA, 15 bp, Homo sapiens
aagatcatgccacag

SEQ ID NO: 81707 - DNA, 15 bp, Homo sapiens
caagatcatgccaca

SEQ ID NO: 81708 - DNA, 15 bp, Homo sapiens
gcaagatcatgccac

SEQ ID NO: 81709 - DNA, 15 bp, Homo sapiens
ggcaagatcatgcca

SEQ ID NO: 81710 - DNA, 15 bp, Homo sapiens
aggcaagatcatgcc

SEQ ID NO: 81711 - DNA, 15 bp, Homo sapiens
gaggcaagatcatgc

SEQ ID NO: 81712 - DNA, 15 bp, Homo sapiens
tgaggcaagatcatg

SEQ ID NO: 81713 - DNA, 15 bp, Homo sapiens
gtgaggcaagatcat

SEQ ID NO: 81714 - DNA, 15 bp, Homo sapiens
agtgaggcaagatca

SEQ ID NO: 81715 - DNA, 15 bp, Homo sapiens
cagtgaggcaagatc

SEQ ID NO: 81716 - DNA, 15 bp, Homo sapiens
gcagtgaggcaagat

SEQ ID NO: 81717 - DNA, 15 bp, Homo sapiens
tgcagtgaggcaaga

SEQ ID NO: 81718 - DNA, 15 bp, Homo sapiens
ttgcagtgaggcaag

SEQ ID NO: 81719 - DNA, 15 bp, Homo sapiens
gttgcagtgaggcaa

SEQ ID NO: 81720 - DNA, 15 bp, Homo sapiens
ggttgcagtgaggca

SEQ ID NO: 81721 - DNA, 15 bp, Homo sapiens
aggttgcagtgaggc

SEQ ID NO: 81722 - DNA, 15 bp, Homo sapiens
gaggttgcagtgagg

SEQ ID NO: 81723 - DNA, 15 bp, Homo sapiens
cgtgcctgtaatccc

SEQ ID NO: 81724 - DNA, 15 bp, Homo sapiens
gcgtgcctgtaatcc

SEQ ID NO: 81725 - DNA, 15 bp, Homo sapiens
tgcgtgcctgtaatc

SEQ ID NO: 81726 - DNA, 15 bp, Homo sapiens
gtgcgtgcctgtaat

SEQ ID NO: 81727 - DNA, 15 bp, Homo sapiens
ggtgcgtgcctgtaa

SEQ ID NO: 81728 - DNA, 15 bp, Homo sapiens
tggtgcgtgcctgta

SEQ ID NO: 81729 - DNA, 15 bp, Homo sapiens
ggtggtgcgtgcctg

SEQ ID NO: 81730 - DNA, 15 bp, Homo sapiens
tggtggtgcgtgcct

SEQ ID NO: 81731 - DNA, 15 bp, Homo sapiens
atggtggtgcgtgcc

SEQ ID NO: 81732 - DNA, 15 bp, Homo sapiens
catggtggtgcgtgc

SEQ ID NO: 81733 - DNA, 15 bp, Homo sapiens
acatggtggtgcgtg

SEQ ID NO: 81734 - DNA, 15 bp, Homo sapiens
gacatggtggtgcgt

SEQ ID NO: 81735 - DNA, 15 bp, Homo sapiens
agacatggtggtgcg

SEQ ID NO: 81736 - DNA, 15 bp, Homo sapiens
cagacatggtggtgc

SEQ ID NO: 81737 - DNA, 15 bp, Homo sapiens
ccagacatggtggtg

SEQ ID NO: 81738 - DNA, 15 bp, Homo sapiens
gccagacatggtggt

SEQ ID NO: 81739 - DNA, 15 bp, Homo sapiens
agccagacatggtgg

SEQ ID NO: 81740 - DNA, 15 bp, Homo sapiens
tagccagacatggtg

SEQ ID NO: 81741 - DNA, 15 bp, Homo sapiens
ttagccagacatggt

SEQ ID NO: 81742 - DNA, 15 bp, Homo sapiens
attagccagacatgg

SEQ ID NO: 81743 - DNA, 15 bp, Homo sapiens
aattagccagacatg

SEQ ID NO: 81744 - DNA, 15 bp, Homo sapiens
aaattagccagacat

SEQ ID NO: 81745 - DNA, 15 bp, Homo sapiens
aaaattagccagaca

SEQ ID NO: 81746 - DNA, 15 bp, Homo sapiens
aaaaattagccagac

SEQ ID NO: 81747 - DNA, 15 bp, Homo sapiens
cacaaaaattagcca

SEQ ID NO: 81748 - DNA, 15 bp, Homo sapiens
acacaaaaattagcc

SEQ ID NO: 81749 - DNA, 15 bp, Homo sapiens
atctctactaaaaac

SEQ ID NO: 81750 - DNA, 15 bp, Homo sapiens
tatctctactaaaaa

SEQ ID NO: 81751 - DNA, 15 bp, Homo sapiens
ctatctctactaaaa

SEQ ID NO: 81752 - DNA, 15 bp, Homo sapiens
cctatctctactaaa

SEQ ID NO: 81753 - DNA, 15 bp, Homo sapiens
ccctatctctactaa

SEQ ID NO: 81754 - DNA, 15 bp, Homo sapiens
accctatctctacta

SEQ ID NO: 81755 - DNA, 15 bp, Homo sapiens
aaccctatctctact

SEQ ID NO: 81756 - DNA, 15 bp, Homo sapiens
aaaccctatctctac

SEQ ID NO: 81757 - DNA, 15 bp, Homo sapiens
gaaaccctatctcta

SEQ ID NO: 81758 - DNA, 15 bp, Homo sapiens
cgaaaccctatctct

SEQ ID NO: 81759 - DNA, 15 bp, Homo sapiens
gcgaaaccctatctc

SEQ ID NO: 81760 - DNA, 15 bp, Homo sapiens
ggcgaaaccctatct

SEQ ID NO: 81761 - DNA, 15 bp, Homo sapiens
cggcgaaaccctatc

SEQ ID NO: 81762 - DNA, 15 bp, Homo sapiens
acggcgaaaccctat

SEQ ID NO: 81763 - DNA, 15 bp, Homo sapiens
cacggcgaaacccta

SEQ ID NO: 81764 - DNA, 15 bp, Homo sapiens
acacggcgaaaccct

SEQ ID NO: 81765 - DNA, 15 bp, Homo sapiens
agccaacacggcgaa

SEQ ID NO: 81766 - DNA, 15 bp, Homo sapiens
tagccaacacggcga

SEQ ID NO: 81767 - DNA, 15 bp, Homo sapiens
ctagccaacacggcg

SEQ ID NO: 81768 - DNA, 15 bp, Homo sapiens
cctagccaacacggc

SEQ ID NO: 81769 - DNA, 15 bp, Homo sapiens
gcctagccaacacgg

SEQ ID NO: 81770 - DNA, 15 bp, Homo sapiens
agcctagccaacacg

SEQ ID NO: 81771 - DNA, 15 bp, Homo sapiens
cagcctagccaacac

SEQ ID NO: 81772 - DNA, 15 bp, Homo sapiens
ccagcctagccaaca

SEQ ID NO: 81773 - DNA, 15 bp, Homo sapiens
accagcctagccaac

SEQ ID NO: 81774 - DNA, 15 bp, Homo sapiens
gaccagcctagccaa

SEQ ID NO: 81775 - DNA, 15 bp, Homo sapiens
cagaccagcctagcc

SEQ ID NO: 81776 - DNA, 15 bp, Homo sapiens
ccagaccagcctagc

SEQ ID NO: 81777 - DNA, 15 bp, Homo sapiens
tccagaccagcctag

SEQ ID NO: 81778 - DNA, 15 bp, Homo sapiens
ttccagaccagccta

SEQ ID NO: 81779 - DNA, 15 bp, Homo sapiens
attccagaccagcct

SEQ ID NO: 81780 - DNA, 15 bp, Homo sapiens
aattccagaccagcc

SEQ ID NO: 81781 - DNA, 15 bp, Homo sapiens
gaattccagaccagc

SEQ ID NO: 81782 - DNA, 15 bp, Homo sapiens
ggaattccagaccag

SEQ ID NO: 81783 - DNA, 15 bp, Homo sapiens
aggaattccagacca

SEQ ID NO: 81784 - DNA, 15 bp, Homo sapiens
caggaattccagacc

SEQ ID NO: 81785 - DNA, 15 bp, Homo sapiens
tcaggaattccagac

SEQ ID NO: 81786 - DNA, 15 bp, Homo sapiens
gtcaggaattccaga

SEQ ID NO: 81787 - DNA, 15 bp, Homo sapiens
ggtcaggaattccag

SEQ ID NO: 81788 - DNA, 15 bp, Homo sapiens
aggtcaggaattcca

SEQ ID NO: 81789 - DNA, 15 bp, Homo sapiens
gaggtcaggaattcc

SEQ ID NO: 81790 - DNA, 15 bp, Homo sapiens
cctgaggtcaggaat

SEQ ID NO: 81791 - DNA, 15 bp, Homo sapiens
acctgaggtcaggaa

SEQ ID NO: 81792 - DNA, 15 bp, Homo sapiens
agtggctcacgcctg

SEQ ID NO: 81793 - DNA, 15 bp, Homo sapiens
tagtggctcacgcct

SEQ ID NO: 81794 - DNA, 15 bp, Homo sapiens
gtagtggctcacgcc

SEQ ID NO: 81795 - DNA, 15 bp, Homo sapiens
cgtagtggctcacgc

SEQ ID NO: 81796 - DNA, 15 bp, Homo sapiens
gcgtagtggctcacg

SEQ ID NO: 81797 - DNA, 15 bp, Homo sapiens
ggcgtagtggctcac

SEQ ID NO: 81798 - DNA, 15 bp, Homo sapiens
gggcgtagtggctca

SEQ ID NO: 81799 - DNA, 15 bp, Homo sapiens
tgggcgtagtggctc

SEQ ID NO: 81800 - DNA, 15 bp, Homo sapiens
ctgggcgtagtggct

SEQ ID NO: 81801 - DNA, 15 bp, Homo sapiens
gctgggcgtagtggc

SEQ ID NO: 81802 - DNA, 15 bp, Homo sapiens
ggctgggcgtagtgg

SEQ ID NO: 81803 - DNA, 15 bp, Homo sapiens
gggctgggcgtagtg

SEQ ID NO: 81804 - DNA, 15 bp, Homo sapiens
agggctgggcgtagt

SEQ ID NO: 81805 - DNA, 15 bp, Homo sapiens
cagggctgggcgtag

SEQ ID NO: 81806 - DNA, 15 bp, Homo sapiens
acagggctgggcgta

SEQ ID NO: 81807 - DNA, 15 bp, Homo sapiens
aacagggctgggcgt

SEQ ID NO: 81808 - DNA, 15 bp, Homo sapiens
aaacagggctgggcg

SEQ ID NO: 81809 - DNA, 15 bp, Homo sapiens
gaaacagggctgggc

SEQ ID NO: 81810 - DNA, 15 bp, Homo sapiens
tgaaacagggctggg

SEQ ID NO: 81811 - DNA, 15 bp, Homo sapiens
ctgaaacagggctgg

SEQ ID NO: 81812 - DNA, 15 bp, Homo sapiens
actgaaacagggctg

SEQ ID NO: 81813 - DNA, 15 bp, Homo sapiens
gactgaaacagggct

SEQ ID NO: 81814 - DNA, 15 bp, Homo sapiens
agactgaaacagggc

SEQ ID NO: 81815 - DNA, 15 bp, Homo sapiens
aagactgaaacaggg

SEQ ID NO: 81816 - DNA, 15 bp, Homo sapiens
aaagactgaaacagg

SEQ ID NO: 81817 - DNA, 15 bp, Homo sapiens
taaagactgaaacag

SEQ ID NO: 81818 - DNA, 15 bp, Homo sapiens
ttaaagactgaaaca

SEQ ID NO: 81819 - DNA, 15 bp, Homo sapiens
gttaaagactgaaac

SEQ ID NO: 81820 - DNA, 15 bp, Homo sapiens
agttaaagactgaaa

SEQ ID NO: 81821 - DNA, 15 bp, Homo sapiens
gagttaaagactgaa

SEQ ID NO: 81822 - DNA, 15 bp, Homo sapiens
cgagttaaagactga

SEQ ID NO: 81823 - DNA, 15 bp, Homo sapiens
gcgagttaaagactg

SEQ ID NO: 81824 - DNA, 15 bp, Homo sapiens
agcgagttaaagact

SEQ ID NO: 81825 - DNA, 15 bp, Homo sapiens
aagcgagttaaagac

SEQ ID NO: 81826 - DNA, 15 bp, Homo sapiens
gaagcgagttaaaga

SEQ ID NO: 81827 - DNA, 15 bp, Homo sapiens
agaagcgagttaaag

SEQ ID NO: 81828 - DNA, 15 bp, Homo sapiens
aagaagcgagttaaa

SEQ ID NO: 81829 - DNA, 15 bp, Homo sapiens
caagaagcgagttaa

SEQ ID NO: 81830 - DNA, 15 bp, Homo sapiens
acaagaagcgagtta

SEQ ID NO: 81831 - DNA, 15 bp, Homo sapiens
gacaagaagcgagtt

SEQ ID NO: 81832 - DNA, 15 bp, Homo sapiens
tgacaagaagcgagt

SEQ ID NO: 81833 - DNA, 15 bp, Homo sapiens
atgacaagaagcgag

SEQ ID NO: 81834 - DNA, 15 bp, Homo sapiens
tatgacaagaagcga

SEQ ID NO: 81835 - DNA, 15 bp, Homo sapiens
ttatgacaagaagcg

SEQ ID NO: 81836 - DNA, 15 bp, Homo sapiens
cttatgacaagaagc

SEQ ID NO: 81837 - DNA, 15 bp, Homo sapiens
tcttatgacaagaag

SEQ ID NO: 81838 - DNA, 15 bp, Homo sapiens
ttcttatgacaagaa

SEQ ID NO: 81839 - DNA, 15 bp, Homo sapiens
tttcttatgacaaga

SEQ ID NO: 81840 - DNA, 15 bp, Homo sapiens
ttttcttatgacaag

SEQ ID NO: 81841 - DNA, 15 bp, Homo sapiens
tttttcttatgacaa

SEQ ID NO: 81842 - DNA, 15 bp, Homo sapiens
ctttttcttatgaca

SEQ ID NO: 81843 - DNA, 15 bp, Homo sapiens
gctttttcttatgac

SEQ ID NO: 81844 - DNA, 15 bp, Homo sapiens
tgctttttcttatga

SEQ ID NO: 81845 - DNA, 15 bp, Homo sapiens
atgctttttcttatg

SEQ ID NO: 81846 - DNA, 15 bp, Homo sapiens
catgctttttcttat

SEQ ID NO: 81847 - DNA, 15 bp, Homo sapiens
acatgctttttctta

SEQ ID NO: 81848 - DNA, 15 bp, Homo sapiens
cacatgctttttctt

SEQ ID NO: 81849 - DNA, 15 bp, Homo sapiens
tcacatgctttttct

SEQ ID NO: 81850 - DNA, 15 bp, Homo sapiens
ctcacatgctttttc

SEQ ID NO: 81851 - DNA, 15 bp, Homo sapiens
actcacatgcttttt

SEQ ID NO: 81852 - DNA, 15 bp, Homo sapiens
aactcacatgctttt

SEQ ID NO: 81853 - DNA, 15 bp, Homo sapiens
aaactcacatgcttt

SEQ ID NO: 81854 - DNA, 15 bp, Homo sapiens
aaaactcacatgctt

SEQ ID NO: 81855 - DNA, 15 bp, Homo sapiens
caaaactcacatgct

SEQ ID NO: 81856 - DNA, 15 bp, Homo sapiens
tcaaaactcacatgc

SEQ ID NO: 81857 - DNA, 15 bp, Homo sapiens
ctcaaaactcacatg

SEQ ID NO: 81858 - DNA, 15 bp, Homo sapiens
cctcaaaactcacat

SEQ ID NO: 81859 - DNA, 15 bp, Homo sapiens
ccctcaaaactcaca

SEQ ID NO: 81860 - DNA, 15 bp, Homo sapiens
cccctcaaaactcac

SEQ ID NO: 81861 - DNA, 15 bp, Homo sapiens
tcccctcaaaactca

SEQ ID NO: 81862 - DNA, 15 bp, Homo sapiens
ctcccctcaaaactc

SEQ ID NO: 81863 - DNA, 15 bp, Homo sapiens
tctcccctcaaaact

SEQ ID NO: 81864 - DNA, 15 bp, Homo sapiens
ttctcccctcaaaac

SEQ ID NO: 81865 - DNA, 15 bp, Homo sapiens
cttctcccctcaaaa

SEQ ID NO: 81866 - DNA, 15 bp, Homo sapiens
ccttctcccctcaaa

SEQ ID NO: 81867 - DNA, 15 bp, Homo sapiens
accttctcccctcaa

SEQ ID NO: 81868 - DNA, 15 bp, Homo sapiens
aaccttctcccctca

SEQ ID NO: 81869 - DNA, 15 bp, Homo sapiens
aaaccttctcccctc

SEQ ID NO: 81870 - DNA, 15 bp, Homo sapiens
caaaccttctcccct

SEQ ID NO: 81871 - DNA, 15 bp, Homo sapiens
ccaaaccttctcccc

SEQ ID NO: 81872 - DNA, 15 bp, Homo sapiens
tccaaaccttctccc

SEQ ID NO: 81873 - DNA, 15 bp, Homo sapiens
gtccaaaccttctcc

SEQ ID NO: 81874 - DNA, 15 bp, Homo sapiens
ggtccaaaccttctc

SEQ ID NO: 81875 - DNA, 15 bp, Homo sapiens
tggtccaaaccttct

SEQ ID NO: 81876 - DNA, 15 bp, Homo sapiens
gtggtccaaaccttc

SEQ ID NO: 81877 - DNA, 15 bp, Homo sapiens
tgtggtccaaacctt

SEQ ID NO: 81878 - DNA, 15 bp, Homo sapiens
gtgtggtccaaacct

SEQ ID NO: 81879 - DNA, 15 bp, Homo sapiens
agtgtggtccaaacc

SEQ ID NO: 81880 - DNA, 15 bp, Homo sapiens
cagtgtggtccaaac

SEQ ID NO: 81881 - DNA, 15 bp, Homo sapiens
acagtgtggtccaaa

SEQ ID NO: 81882 - DNA, 15 bp, Homo sapiens
cacagtgtggtccaa

SEQ ID NO: 81883 - DNA, 15 bp, Homo sapiens
gcacagtgtggtcca

SEQ ID NO: 81884 - DNA, 15 bp, Homo sapiens
ggcacagtgtggtcc

SEQ ID NO: 81885 - DNA, 15 bp, Homo sapiens
gggcacagtgtggtc

SEQ ID NO: 81886 - DNA, 15 bp, Homo sapiens
tgggcacagtgtggt

SEQ ID NO: 81887 - DNA, 15 bp, Homo sapiens
atgggcacagtgtgg

SEQ ID NO: 81888 - DNA, 15 bp, Homo sapiens
catgggcacagtgtg

SEQ ID NO: 81889 - DNA, 15 bp, Homo sapiens
gcatgggcacagtgt

SEQ ID NO: 81890 - DNA, 15 bp, Homo sapiens
ggcatgggcacagtg

SEQ ID NO: 81891 - DNA, 15 bp, Homo sapiens
aggcatgggcacagt

SEQ ID NO: 81892 - DNA, 15 bp, Homo sapiens
caggcatgggcacag

SEQ ID NO: 81893 - DNA, 15 bp, Homo sapiens
acaggcatgggcaca

SEQ ID NO: 81894 - DNA, 15 bp, Homo sapiens
gacaggcatgggcac

SEQ ID NO: 81895 - DNA, 15 bp, Homo sapiens
ggacaggcatgggca

SEQ ID NO: 81896 - DNA, 15 bp, Homo sapiens
gggacaggcatgggc

SEQ ID NO: 81897 - DNA, 15 bp, Homo sapiens
tgggacaggcatggg

SEQ ID NO: 81898 - DNA, 15 bp, Homo sapiens
gtgggacaggcatgg

SEQ ID NO: 81899 - DNA, 15 bp, Homo sapiens
tgtgggacaggcatg

SEQ ID NO: 81900 - DNA, 15 bp, Homo sapiens
ctgtgggacaggcat

SEQ ID NO: 81901 - DNA, 15 bp, Homo sapiens
gctgtgggacaggca

SEQ ID NO: 81902 - DNA, 15 bp, Homo sapiens
tgctgtgggacaggc

SEQ ID NO: 81903 - DNA, 15 bp, Homo sapiens
ctgctgtgggacagg

SEQ ID NO: 81904 - DNA, 15 bp, Homo sapiens
actgctgtgggacag

SEQ ID NO: 81905 - DNA, 15 bp, Homo sapiens
tactgctgtgggaca

SEQ ID NO: 81906 - DNA, 15 bp, Homo sapiens
ttactgctgtgggac

SEQ ID NO: 81907 - DNA, 15 bp, Homo sapiens
tttactgctgtggga

SEQ ID NO: 81908 - DNA, 15 bp, Homo sapiens
ctttactgctgtggg

SEQ ID NO: 81909 - DNA, 15 bp, Homo sapiens
actttactgctgtgg

SEQ ID NO: 81910 - DNA, 15 bp, Homo sapiens
gactttactgctgtg

SEQ ID NO: 81911 - DNA, 15 bp, Homo sapiens
tgactttactgctgt

SEQ ID NO: 81912 - DNA, 15 bp, Homo sapiens
gtgactttactgctg

SEQ ID NO: 81913 - DNA, 15 bp, Homo sapiens
tgtgactttactgct

SEQ ID NO: 81914 - DNA, 15 bp, Homo sapiens
ctgtgactttactgc

SEQ ID NO: 81915 - DNA, 15 bp, Homo sapiens
cctgtgactttactg

SEQ ID NO: 81916 - DNA, 15 bp, Homo sapiens
tcctgtgactttact

SEQ ID NO: 81917 - DNA, 15 bp, Homo sapiens
gtcctgtgactttac

SEQ ID NO: 81918 - DNA, 15 bp, Homo sapiens
ctgtcctgtgacttt

SEQ ID NO: 81919 - DNA, 15 bp, Homo sapiens
tctgtcctgtgactt

SEQ ID NO: 81920 - DNA, 15 bp, Homo sapiens
gtctgtcctgtgact

SEQ ID NO: 81921 - DNA, 15 bp, Homo sapiens
agtctgtcctgtgac

SEQ ID NO: 81922 - DNA, 15 bp, Homo sapiens
cagtctgtcctgtga

SEQ ID NO: 81923 - DNA, 15 bp, Homo sapiens
acagtctgtcctgtg

SEQ ID NO: 81924 - DNA, 15 bp, Homo sapiens
cacagtctgtcctgt

SEQ ID NO: 81925 - DNA, 15 bp, Homo sapiens
ccacagtctgtcctg

SEQ ID NO: 81926 - DNA, 15 bp, Homo sapiens
gccacagtctgtcct

SEQ ID NO: 81927 - DNA, 15 bp, Homo sapiens
tgccacagtctgtcc

SEQ ID NO: 81928 - DNA, 15 bp, Homo sapiens
ctgccacagtctgtc

SEQ ID NO: 81929 - DNA, 15 bp, Homo sapiens
cctgccacagtctgt

SEQ ID NO: 81930 - DNA, 15 bp, Homo sapiens
gcctgccacagtctg

SEQ ID NO: 81931 - DNA, 15 bp, Homo sapiens
ggcctgccacagtct

SEQ ID NO: 81932 - DNA, 15 bp, Homo sapiens
aggcctgccacagtc

SEQ ID NO: 81933 - DNA, 15 bp, Homo sapiens
caggcctgccacagt

SEQ ID NO: 81934 - DNA, 15 bp, Homo sapiens
ccaggcctgccacag

SEQ ID NO: 81935 - DNA, 15 bp, Homo sapiens
gccaggcctgccaca

SEQ ID NO: 81936 - DNA, 15 bp, Homo sapiens
agccaggcctgccac

SEQ ID NO: 81937 - DNA, 15 bp, Homo sapiens
aagccaggcctgcca

SEQ ID NO: 81938 - DNA, 15 bp, Homo sapiens
gaagccaggcctgcc

SEQ ID NO: 81939 - DNA, 15 bp, Homo sapiens
ggaagccaggcctgc

SEQ ID NO: 81940 - DNA, 15 bp, Homo sapiens
tggaagccaggcctg

SEQ ID NO: 81941 - DNA, 15 bp, Homo sapiens
ttggaagccaggcct

SEQ ID NO: 81942 - DNA, 15 bp, Homo sapiens
attggaagccaggcc

SEQ ID NO: 81943 - DNA, 15 bp, Homo sapiens
gattggaagccaggc

SEQ ID NO: 81944 - DNA, 15 bp, Homo sapiens
agattggaagccagg

SEQ ID NO: 81945 - DNA, 15 bp, Homo sapiens
aagattggaagccag

SEQ ID NO: 81946 - DNA, 15 bp, Homo sapiens
caagattggaagcca

SEQ ID NO: 81947 - DNA, 15 bp, Homo sapiens
ccaagattggaagcc

SEQ ID NO: 81948 - DNA, 15 bp, Homo sapiens
gccaagattggaagc

SEQ ID NO: 81949 - DNA, 15 bp, Homo sapiens
agccaagattggaag

SEQ ID NO: 81950 - DNA, 15 bp, Homo sapiens
gagccaagattggaa

SEQ ID NO: 81951 - DNA, 15 bp, Homo sapiens
agagccaagattgga

SEQ ID NO: 81952 - DNA, 15 bp, Homo sapiens
cagagccaagattgg

SEQ ID NO: 81953 - DNA, 15 bp, Homo sapiens
gcagagccaagattg

SEQ ID NO: 81954 - DNA, 15 bp, Homo sapiens
tgcagagccaagatt

SEQ ID NO: 81955 - DNA, 15 bp, Homo sapiens
ttgcagagccaagat

SEQ ID NO: 81956 - DNA, 15 bp, Homo sapiens
gttgcagagccaaga

SEQ ID NO: 81957 - DNA, 15 bp, Homo sapiens
tgttgcagagccaag

SEQ ID NO: 81958 - DNA, 15 bp, Homo sapiens
ttgttgcagagccaa

SEQ ID NO: 81959 - DNA, 15 bp, Homo sapiens
tttgttgcagagcca

SEQ ID NO: 81960 - DNA, 15 bp, Homo sapiens
atttgttgcagagcc

SEQ ID NO: 81961 - DNA, 15 bp, Homo sapiens
catttgttgcagagc

SEQ ID NO: 81962 - DNA, 15 bp, Homo sapiens
tcatttgttgcagag

SEQ ID NO: 81963 - DNA, 15 bp, Homo sapiens
ctcatttgttgcaga

SEQ ID NO: 81964 - DNA, 15 bp, Homo sapiens
gctcatttgttgcag

SEQ ID NO: 81965 - DNA, 15 bp, Homo sapiens
agctcatttgttgca

SEQ ID NO: 81966 - DNA, 15 bp, Homo sapiens
cagctcatttgttgc

SEQ ID NO: 81967 - DNA, 15 bp, Homo sapiens
ccagctcatttgttg

SEQ ID NO: 81968 - DNA, 15 bp, Homo sapiens
accagctcatttgtt

SEQ ID NO: 81969 - DNA, 15 bp, Homo sapiens
taccagctcatttgt

SEQ ID NO: 81970 - DNA, 15 bp, Homo sapiens
ctaccagctcatttg

SEQ ID NO: 81971 - DNA, 15 bp, Homo sapiens
gctaccagctcattt

SEQ ID NO: 81972 - DNA, 15 bp, Homo sapiens
ggctaccagctcatt

SEQ ID NO: 81973 - DNA, 15 bp, Homo sapiens
aggctaccagctcat

SEQ ID NO: 81974 - DNA, 15 bp, Homo sapiens
aaggctaccagctca

SEQ ID NO: 81975 - DNA, 15 bp, Homo sapiens
aaaggctaccagctc

SEQ ID NO: 81976 - DNA, 15 bp, Homo sapiens
caaaggctaccagct

SEQ ID NO: 81977 - DNA, 15 bp, Homo sapiens
tcaaaggctaccagc

SEQ ID NO: 81978 - DNA, 15 bp, Homo sapiens
gtcaaaggctaccag

SEQ ID NO: 81979 - DNA, 15 bp, Homo sapiens
tgtcaaaggctacca

SEQ ID NO: 81980 - DNA, 15 bp, Homo sapiens
ctgtcaaaggctacc

SEQ ID NO: 81981 - DNA, 15 bp, Homo sapiens
cctgtcaaaggctac

SEQ ID NO: 81982 - DNA, 15 bp, Homo sapiens
gcctgtcaaaggcta

SEQ ID NO: 81983 - DNA, 15 bp, Homo sapiens
ggcctgtcaaaggct

SEQ ID NO: 81984 - DNA, 15 bp, Homo sapiens
aggcctgtcaaaggc

SEQ ID NO: 81985 - DNA, 15 bp, Homo sapiens
caggcctgtcaaagg

SEQ ID NO: 81986 - DNA, 15 bp, Homo sapiens
ccaggcctgtcaaag

SEQ ID NO: 81987 - DNA, 15 bp, Homo sapiens
cccaggcctgtcaaa

SEQ ID NO: 81988 - DNA, 15 bp, Homo sapiens
gcccaggcctgtcaa

SEQ ID NO: 81989 - DNA, 15 bp, Homo sapiens
ggcccaggcctgtca

SEQ ID NO: 81990 - DNA, 15 bp, Homo sapiens
aggcccaggcctgtc

SEQ ID NO: 81991 - DNA, 15 bp, Homo sapiens
caggcccaggcctgt

SEQ ID NO: 81992 - DNA, 15 bp, Homo sapiens
acaggcccaggcctg

SEQ ID NO: 81993 - DNA, 15 bp, Homo sapiens
aacaggcccaggcct

SEQ ID NO: 81994 - DNA, 15 bp, Homo sapiens
aaacaggcccaggcc

SEQ ID NO: 81995 - DNA, 15 bp, Homo sapiens
gaaacaggcccaggc

SEQ ID NO: 81996 - DNA, 15 bp, Homo sapiens
agaaacaggcccagg

SEQ ID NO: 81997 - DNA, 15 bp, Homo sapiens
aagaaacaggcccag

SEQ ID NO: 81998 - DNA, 15 bp, Homo sapiens
gaagaaacaggccca

SEQ ID NO: 81999 - DNA, 15 bp, Homo sapiens
tgaagaaacaggccc

SEQ ID NO: 82000 - DNA, 15 bp, Homo sapiens
gtgaagaaacaggcc

SEQ ID NO: 82001 - DNA, 15 bp, Homo sapiens
ggtgaagaaacaggc

SEQ ID NO: 82002 - DNA, 15 bp, Homo sapiens
aggtgaagaaacagg

SEQ ID NO: 82003 - DNA, 15 bp, Homo sapiens
gaggtgaagaaacag

SEQ ID NO: 82004 - DNA, 15 bp, Homo sapiens
agaggtgaagaaaca

SEQ ID NO: 82005 - DNA, 15 bp, Homo sapiens
cagaggtgaagaaac

SEQ ID NO: 82006 - DNA, 15 bp, Homo sapiens
tcagaggtgaagaaa

SEQ ID NO: 82007 - DNA, 15 bp, Homo sapiens
ttcagaggtgaagaa

SEQ ID NO: 82008 - DNA, 15 bp, Homo sapiens
attcagaggtgaaga

SEQ ID NO: 82009 - DNA, 15 bp, Homo sapiens
aattcagaggtgaag

SEQ ID NO: 82010 - DNA, 15 bp, Homo sapiens
taattcagaggtgaa

SEQ ID NO: 82011 - DNA, 15 bp, Homo sapiens
ctaattcagaggtga

SEQ ID NO: 82012 - DNA, 15 bp, Homo sapiens
cctaattcagaggtg

SEQ ID NO: 82013 - DNA, 15 bp, Homo sapiens
ccctaattcagaggt

SEQ ID NO: 82014 - DNA, 15 bp, Homo sapiens
tccctaattcagagg

SEQ ID NO: 82015 - DNA, 15 bp, Homo sapiens
ctccctaattcagag

SEQ ID NO: 82016 - DNA, 15 bp, Homo sapiens
cctccctaattcaga

SEQ ID NO: 82017 - DNA, 15 bp, Homo sapiens
gcctccctaattcag

SEQ ID NO: 82018 - DNA, 15 bp, Homo sapiens
agcctccctaattca

SEQ ID NO: 82019 - DNA, 15 bp, Homo sapiens
cagcctccctaattc

SEQ ID NO: 82020 - DNA, 15 bp, Homo sapiens
ccagcctccctaatt

SEQ ID NO: 82021 - DNA, 15 bp, Homo sapiens
tccagcctccctaat

SEQ ID NO: 82022 - DNA, 15 bp, Homo sapiens
gtccagcctccctaa

SEQ ID NO: 82023 - DNA, 15 bp, Homo sapiens
ggtccagcctcccta

SEQ ID NO: 82024 - DNA, 15 bp, Homo sapiens
tggtccagcctccct

SEQ ID NO: 82025 - DNA, 15 bp, Homo sapiens
ctggtccagcctccc

SEQ ID NO: 82026 - DNA, 15 bp, Homo sapiens
tctggtccagcctcc

SEQ ID NO: 82027 - DNA, 15 bp, Homo sapiens
ttctggtccagcctc

SEQ ID NO: 82028 - DNA, 15 bp, Homo sapiens
tttctggtccagcct

SEQ ID NO: 82029 - DNA, 15 bp, Homo sapiens
ttttctggtccagcc

SEQ ID NO: 82030 - DNA, 15 bp, Homo sapiens
gttttctggtccagc

SEQ ID NO: 82031 - DNA, 15 bp, Homo sapiens
agttttctggtccag

SEQ ID NO: 82032 - DNA, 15 bp, Homo sapiens
gagttttctggtcca

SEQ ID NO: 82033 - DNA, 15 bp, Homo sapiens
ggagttttctggtcc

SEQ ID NO: 82034 - DNA, 15 bp, Homo sapiens
aggagttttctggtc

SEQ ID NO: 82035 - DNA, 15 bp, Homo sapiens
caggagttttctggt

SEQ ID NO: 82036 - DNA, 15 bp, Homo sapiens
acaggagttttctgg

SEQ ID NO: 82037 - DNA, 15 bp, Homo sapiens
cacaggagttttctg

SEQ ID NO: 82038 - DNA, 15 bp, Homo sapiens
ccacaggagttttct

SEQ ID NO: 82039 - DNA, 15 bp, Homo sapiens
tccacaggagttttc

SEQ ID NO: 82040 - DNA, 15 bp, Homo sapiens
atccacaggagtttt

SEQ ID NO: 82041 - DNA, 15 bp, Homo sapiens
gatccacaggagttt

SEQ ID NO: 82042 - DNA, 15 bp, Homo sapiens
agatccacaggagtt

SEQ ID NO: 82043 - DNA, 15 bp, Homo sapiens
aagatccacaggagt

SEQ ID NO: 82044 - DNA, 15 bp, Homo sapiens
caagatccacaggag

SEQ ID NO: 82045 - DNA, 15 bp, Homo sapiens
acaagatccacagga

SEQ ID NO: 82046 - DNA, 15 bp, Homo sapiens
gacaagatccacagg

SEQ ID NO: 82047 - DNA, 15 bp, Homo sapiens
tgacaagatccacag

SEQ ID NO: 82048 - DNA, 15 bp, Homo sapiens
ttgacaagatccaca

SEQ ID NO: 82049 - DNA, 15 bp, Homo sapiens
gttgacaagatccac

SEQ ID NO: 82050 - DNA, 15 bp, Homo sapiens
agttgacaagatcca

SEQ ID NO: 82051 - DNA, 15 bp, Homo sapiens
gagttgacaagatcc

SEQ ID NO: 82052 - DNA, 15 bp, Homo sapiens
agagttgacaagatc

SEQ ID NO: 82053 - DNA, 15 bp, Homo sapiens
cagagttgacaagat

SEQ ID NO: 82054 - DNA, 15 bp, Homo sapiens
ccagagttgacaaga

SEQ ID NO: 82055 - DNA, 15 bp, Homo sapiens
accagagttgacaag

SEQ ID NO: 82056 - DNA, 15 bp, Homo sapiens
taccagagttgacaa

SEQ ID NO: 82057 - DNA, 15 bp, Homo sapiens
ataccagagttgaca

SEQ ID NO: 82058 - DNA, 15 bp, Homo sapiens
aataccagagttgac

SEQ ID NO: 82059 - DNA, 15 bp, Homo sapiens
gaataccagagttga

SEQ ID NO: 82060 - DNA, 15 bp, Homo sapiens
agaataccagagttg

SEQ ID NO: 82061 - DNA, 15 bp, Homo sapiens
aagaataccagagtt

SEQ ID NO: 82062 - DNA, 15 bp, Homo sapiens
taagaataccagagt

SEQ ID NO: 82063 - DNA, 15 bp, Homo sapiens
ctaagaataccagag

SEQ ID NO: 82064 - DNA, 15 bp, Homo sapiens
tctaagaataccaga

SEQ ID NO: 82065 - DNA, 15 bp, Homo sapiens
ctctaagaataccag

SEQ ID NO: 82066 - DNA, 15 bp, Homo sapiens
tctctaagaatacca

SEQ ID NO: 82067 - DNA, 15 bp, Homo sapiens
gtctctaagaatacc

SEQ ID NO: 82068 - DNA, 15 bp, Homo sapiens
agtctctaagaatac

SEQ ID NO: 82069 - DNA, 15 bp, Homo sapiens
gagtctctaagaata

SEQ ID NO: 82070 - DNA, 15 bp, Homo sapiens
agagtctctaagaat

SEQ ID NO: 82071 - DNA, 15 bp, Homo sapiens
cagagtctctaagaa

SEQ ID NO: 82072 - DNA, 15 bp, Homo sapiens
acagagtctctaaga

SEQ ID NO: 82073 - DNA, 15 bp, Homo sapiens
aacagagtctctaag

SEQ ID NO: 82074 - DNA, 15 bp, Homo sapiens
aaacagagtctctaa

SEQ ID NO: 82075 - DNA, 15 bp, Homo sapiens
caaacagagtctcta

SEQ ID NO: 82076 - DNA, 15 bp, Homo sapiens
ccaaacagagtctct

SEQ ID NO: 82077 - DNA, 15 bp, Homo sapiens
cccaaacagagtctc

SEQ ID NO: 82078 - DNA, 15 bp, Homo sapiens
tcccaaacagagtct

SEQ ID NO: 82079 - DNA, 15 bp, Homo sapiens
ttcccaaacagagtc

SEQ ID NO: 82080 - DNA, 15 bp, Homo sapiens
cttcccaaacagagt

SEQ ID NO: 82081 - DNA, 15 bp, Homo sapiens
ccttcccaaacagag

SEQ ID NO: 82082 - DNA, 15 bp, Homo sapiens
tccttcccaaacaga

SEQ ID NO: 82083 - DNA, 15 bp, Homo sapiens
ctccttcccaaacag

SEQ ID NO: 82084 - DNA, 15 bp, Homo sapiens
actccttcccaaaca

SEQ ID NO: 82085 - DNA, 15 bp, Homo sapiens
gactccttcccaaac

SEQ ID NO: 82086 - DNA, 15 bp, Homo sapiens
ggactccttcccaaa

SEQ ID NO: 82087 - DNA, 15 bp, Homo sapiens
aggactccttcccaa

SEQ ID NO: 82088 - DNA, 15 bp, Homo sapiens
caggactccttccca

SEQ ID NO: 82089 - DNA, 15 bp, Homo sapiens
tcaggactccttccc

SEQ ID NO: 82090 - DNA, 15 bp, Homo sapiens
ctcaggactccttcc

SEQ ID NO: 82091 - DNA, 15 bp, Homo sapiens
gctcaggactccttc

SEQ ID NO: 82092 - DNA, 15 bp, Homo sapiens
ggctcaggactcctt

SEQ ID NO: 82093 - DNA, 15 bp, Homo sapiens
tggctcaggactcct

SEQ ID NO: 82094 - DNA, 15 bp, Homo sapiens
atggctcaggactcc

SEQ ID NO: 82095 - DNA, 15 bp, Homo sapiens
aatggctcaggactc

SEQ ID NO: 82096 - DNA, 15 bp, Homo sapiens
aaatggctcaggact

SEQ ID NO: 82097 - DNA, 15 bp, Homo sapiens
aaaatggctcaggac

SEQ ID NO: 82098 - DNA, 15 bp, Homo sapiens
aaaaatggctcagga

SEQ ID NO: 82099 - DNA, 15 bp, Homo sapiens
aaaaaatggctcagg

SEQ ID NO: 82100 - DNA, 15 bp, Homo sapiens
aaaaaaatggctcag

SEQ ID NO: 82101 - DNA, 15 bp, Homo sapiens
aaaaaaaatggctca

SEQ ID NO: 82102 - DNA, 15 bp, Homo sapiens
aaaaaaaaatggctc

SEQ ID NO: 82103 - DNA, 15 bp, Homo sapiens
aaaaaaaaaatggct

SEQ ID NO: 82104 - DNA, 15 bp, Homo sapiens
gaaaaaaaaaatggc

SEQ ID NO: 82105 - DNA, 15 bp, Homo sapiens
agaaaaaaaaaatgg

SEQ ID NO: 82106 - DNA, 15 bp, Homo sapiens
aagaaaaaaaaaatg

SEQ ID NO: 82107 - DNA, 15 bp, Homo sapiens
caagaaaaaaaaaat

SEQ ID NO: 82108 - DNA, 15 bp, Homo sapiens
tcaagaaaaaaaaaa

SEQ ID NO: 82109 - DNA, 15 bp, Homo sapiens
ctcaagaaaaaaaaa

SEQ ID NO: 82110 - DNA, 15 bp, Homo sapiens
tctcaagaaaaaaaa

SEQ ID NO: 82111 - DNA, 15 bp, Homo sapiens
ttctcaagaaaaaaa

SEQ ID NO: 82112 - DNA, 15 bp, Homo sapiens
attctcaagaaaaaa

SEQ ID NO: 82113 - DNA, 15 bp, Homo sapiens
aattctcaagaaaaa

SEQ ID NO: 82114 - DNA, 15 bp, Homo sapiens
aaattctcaagaaaa

SEQ ID NO: 82115 - DNA, 15 bp, Homo sapiens
gaaattctcaagaaa

SEQ ID NO: 82116 - DNA, 15 bp, Homo sapiens
tgaaattctcaagaa

SEQ ID NO: 82117 - DNA, 15 bp, Homo sapiens
ctgaaattctcaaga

SEQ ID NO: 82118 - DNA, 15 bp, Homo sapiens
cctgaaattctcaag

SEQ ID NO: 82119 - DNA, 15 bp, Homo sapiens
tcctgaaattctcaa

SEQ ID NO: 82120 - DNA, 15 bp, Homo sapiens
ttcctgaaattctca

SEQ ID NO: 82121 - DNA, 15 bp, Homo sapiens
cttcctgaaattctc

SEQ ID NO: 82122 - DNA, 15 bp, Homo sapiens
tcttcctgaaattct

SEQ ID NO: 82123 - DNA, 15 bp, Homo sapiens
ctcttcctgaaattc

SEQ ID NO: 82124 - DNA, 15 bp, Homo sapiens
cctcttcctgaaatt

SEQ ID NO: 82125 - DNA, 15 bp, Homo sapiens
tcctcttcctgaaat

SEQ ID NO: 82126 - DNA, 15 bp, Homo sapiens
ctcctcttcctgaaa

SEQ ID NO: 82127 - DNA, 15 bp, Homo sapiens
actcctcttcctgaa

SEQ ID NO: 82128 - DNA, 15 bp, Homo sapiens
cactcctcttcctga

SEQ ID NO: 82129 - DNA, 15 bp, Homo sapiens
gcactcctcttcctg

SEQ ID NO: 82130 - DNA, 15 bp, Homo sapiens
agcactcctcttcct

SEQ ID NO: 82131 - DNA, 15 bp, Homo sapiens
aagcactcctcttcc

SEQ ID NO: 82132 - DNA, 15 bp, Homo sapiens
taagcactcctcttc

SEQ ID NO: 82133 - DNA, 15 bp, Homo sapiens
ataagcactcctctt

SEQ ID NO: 82134 - DNA, 15 bp, Homo sapiens
cataagcactcctct

SEQ ID NO: 82135 - DNA, 15 bp, Homo sapiens
tcataagcactcctc

SEQ ID NO: 82136 - DNA, 15 bp, Homo sapiens
atcataagcactcct

SEQ ID NO: 82137 - DNA, 15 bp, Homo sapiens
tatcataagcactcc

SEQ ID NO: 82138 - DNA, 15 bp, Homo sapiens
ctatcataagcactc

SEQ ID NO: 82139 - DNA, 15 bp, Homo sapiens
gctatcataagcact

SEQ ID NO: 82140 - DNA, 15 bp, Homo sapiens
agctatcataagcac

SEQ ID NO: 82141 - DNA, 15 bp, Homo sapiens
gagctatcataagca

SEQ ID NO: 82142 - DNA, 15 bp, Homo sapiens
agagctatcataagc

SEQ ID NO: 82143 - DNA, 15 bp, Homo sapiens
gagagctatcataag

SEQ ID NO: 82144 - DNA, 15 bp, Homo sapiens
agagagctatcataa

SEQ ID NO: 82145 - DNA, 15 bp, Homo sapiens
cagagagctatcata

SEQ ID NO: 82146 - DNA, 15 bp, Homo sapiens
gcagagagctatcat

SEQ ID NO: 82147 - DNA, 15 bp, Homo sapiens
agcagagagctatca

SEQ ID NO: 82148 - DNA, 15 bp, Homo sapiens
cagcagagagctatc

SEQ ID NO: 82149 - DNA, 15 bp, Homo sapiens
gcagcagagagctat

SEQ ID NO: 82150 - DNA, 15 bp, Homo sapiens
agcagcagagagcta

SEQ ID NO: 82151 - DNA, 15 bp, Homo sapiens
aagcagcagagagct

SEQ ID NO: 82152 - DNA, 15 bp, Homo sapiens
aaagcagcagagagc

SEQ ID NO: 82153 - DNA, 15 bp, Homo sapiens
aaaagcagcagagag

SEQ ID NO: 82154 - DNA, 15 bp, Homo sapiens
taaaagcagcagaga

SEQ ID NO: 82155 - DNA, 15 bp, Homo sapiens
ataaaagcagcagag

SEQ ID NO: 82156 - DNA, 15 bp, Homo sapiens
gataaaagcagcaga

SEQ ID NO: 82157 - DNA, 15 bp, Homo sapiens
tgataaaagcagcag

SEQ ID NO: 82158 - DNA, 15 bp, Homo sapiens
ctgataaaagcagca

SEQ ID NO: 82159 - DNA, 15 bp, Homo sapiens
gctgataaaagcagc

SEQ ID NO: 82160 - DNA, 15 bp, Homo sapiens
tgctgataaaagcag

SEQ ID NO: 82161 - DNA, 15 bp, Homo sapiens
ttgctgataaaagca

SEQ ID NO: 82162 - DNA, 15 bp, Homo sapiens
gttgctgataaaagc

SEQ ID NO: 82163 - DNA, 15 bp, Homo sapiens
ggttgctgataaaag

SEQ ID NO: 82164 - DNA, 15 bp, Homo sapiens
tggttgctgataaaa

SEQ ID NO: 82165 - DNA, 15 bp, Homo sapiens
ttggttgctgataaa

SEQ ID NO: 82166 - DNA, 15 bp, Homo sapiens
tttggttgctgataa

SEQ ID NO: 82167 - DNA, 15 bp, Homo sapiens
atttggttgctgata

SEQ ID NO: 82168 - DNA, 15 bp, Homo sapiens
aatttggttgctgat

SEQ ID NO: 82169 - DNA, 15 bp, Homo sapiens
caatttggttgctga

SEQ ID NO: 82170 - DNA, 15 bp, Homo sapiens
gcaatttggttgctg

SEQ ID NO: 82171 - DNA, 15 bp, Homo sapiens
tgcaatttggttgct

SEQ ID NO: 82172 - DNA, 15 bp, Homo sapiens
ctgcaatttggttgc

SEQ ID NO: 82173 - DNA, 15 bp, Homo sapiens
cctgcaatttggttg

SEQ ID NO: 82174 - DNA, 15 bp, Homo sapiens
tcctgcaatttggtt

SEQ ID NO: 82175 - DNA, 15 bp, Homo sapiens
atcctgcaatttggt

SEQ ID NO: 82176 - DNA, 15 bp, Homo sapiens
catcctgcaatttgg

SEQ ID NO: 82177 - DNA, 15 bp, Homo sapiens
tcatcctgcaatttg

SEQ ID NO: 82178 - DNA, 15 bp, Homo sapiens
ctcatcctgcaattt

SEQ ID NO: 82179 - DNA, 15 bp, Homo sapiens
cctcatcctgcaatt

SEQ ID NO: 82180 - DNA, 15 bp, Homo sapiens
tcctcatcctgcaat

SEQ ID NO: 82181 - DNA, 15 bp, Homo sapiens
gtcctcatcctgcaa

SEQ ID NO: 82182 - DNA, 15 bp, Homo sapiens
tgtcctcatcctgca

SEQ ID NO: 82183 - DNA, 15 bp, Homo sapiens
ttgtcctcatcctgc

SEQ ID NO: 82184 - DNA, 15 bp, Homo sapiens
cttgtcctcatcctg

SEQ ID NO: 82185 - DNA, 15 bp, Homo sapiens
gcttgtcctcatcct

SEQ ID NO: 82186 - DNA, 15 bp, Homo sapiens
tgcttgtcctcatcc

SEQ ID NO: 82187 - DNA, 15 bp, Homo sapiens
ttgcttgtcctcatc

SEQ ID NO: 82188 - DNA, 15 bp, Homo sapiens
attgcttgtcctcat

SEQ ID NO: 82189 - DNA, 15 bp, Homo sapiens
aattgcttgtcctca

SEQ ID NO: 82190 - DNA, 15 bp, Homo sapiens
gaattgcttgtcctc

SEQ ID NO: 82191 - DNA, 15 bp, Homo sapiens
agaattgcttgtcct

SEQ ID NO: 82192 - DNA, 15 bp, Homo sapiens
tagaattgcttgtcc

SEQ ID NO: 82193 - DNA, 15 bp, Homo sapiens
ttagaattgcttgtc

SEQ ID NO: 82194 - DNA, 15 bp, Homo sapiens
tttagaattgcttgt

SEQ ID NO: 82195 - DNA, 15 bp, Homo sapiens
atttagaattgcttg

SEQ ID NO: 82196 - DNA, 15 bp, Homo sapiens
catttagaattgctt

SEQ ID NO: 82197 - DNA, 15 bp, Homo sapiens
tcatttagaattgct

SEQ ID NO: 82198 - DNA, 15 bp, Homo sapiens
ctcatttagaattgc

SEQ ID NO: 82199 - DNA, 15 bp, Homo sapiens
actcatttagaattg

SEQ ID NO: 82200 - DNA, 15 bp, Homo sapiens
tactcatttagaatt

SEQ ID NO: 82201 - DNA, 15 bp, Homo sapiens
gtactcatttagaat

SEQ ID NO: 82202 - DNA, 15 bp, Homo sapiens
tgtactcatttagaa

SEQ ID NO: 82203 - DNA, 15 bp, Homo sapiens
ctgtactcatttaga

SEQ ID NO: 82204 - DNA, 15 bp, Homo sapiens
cctgtactcatttag

SEQ ID NO: 82205 - DNA, 15 bp, Homo sapiens
tcctgtactcattta

SEQ ID NO: 82206 - DNA, 15 bp, Homo sapiens
ttcctgtactcattt

SEQ ID NO: 82207 - DNA, 15 bp, Homo sapiens
gttcctgtactcatt

SEQ ID NO: 82208 - DNA, 15 bp, Homo sapiens
agttcctgtactcat

SEQ ID NO: 82209 - DNA, 15 bp, Homo sapiens
tagttcctgtactca

SEQ ID NO: 82210 - DNA, 15 bp, Homo sapiens
ttagttcctgtactc

SEQ ID NO: 82211 - DNA, 15 bp, Homo sapiens
tttagttcctgtact

SEQ ID NO: 82212 - DNA, 15 bp, Homo sapiens
ttttagttcctgtac

SEQ ID NO: 82213 - DNA, 15 bp, Homo sapiens
cttttagttcctgta

SEQ ID NO: 82214 - DNA, 15 bp, Homo sapiens
tcttttagttcctgt

SEQ ID NO: 82215 - DNA, 15 bp, Homo sapiens
ttcttttagttcctg

SEQ ID NO: 82216 - DNA, 15 bp, Homo sapiens
cttcttttagttcct

SEQ ID NO: 82217 - DNA, 15 bp, Homo sapiens
ccttcttttagttcc

SEQ ID NO: 82218 - DNA, 15 bp, Homo sapiens
gccttcttttagttc

SEQ ID NO: 82219 - DNA, 15 bp, Homo sapiens
agccttcttttagtt

SEQ ID NO: 82220 - DNA, 15 bp, Homo sapiens
aagccttcttttagt

SEQ ID NO: 82221 - DNA, 15 bp, Homo sapiens
caagccttcttttag

SEQ ID NO: 82222 - DNA, 15 bp, Homo sapiens
ccaagccttctttta

SEQ ID NO: 82223 - DNA, 15 bp, Homo sapiens
accaagccttctttt

SEQ ID NO: 82224 - DNA, 15 bp, Homo sapiens
aaccaagccttcttt

SEQ ID NO: 82225 - DNA, 15 bp, Homo sapiens
taaccaagccttctt

SEQ ID NO: 82226 - DNA, 15 bp, Homo sapiens
gtaaccaagccttct

SEQ ID NO: 82227 - DNA, 15 bp, Homo sapiens
ggtaaccaagccttc

SEQ ID NO: 82228 - DNA, 15 bp, Homo sapiens
tggtaaccaagcctt

SEQ ID NO: 82229 - DNA, 15 bp, Homo sapiens
gtggtaaccaagcct

SEQ ID NO: 82230 - DNA, 15 bp, Homo sapiens
agtggtaaccaagcc

SEQ ID NO: 82231 - DNA, 15 bp, Homo sapiens
gagtggtaaccaagc

SEQ ID NO: 82232 - DNA, 15 bp, Homo sapiens
agagtggtaaccaag

SEQ ID NO: 82233 - DNA, 15 bp, Homo sapiens
aagagtggtaaccaa

SEQ ID NO: 82234 - DNA, 15 bp, Homo sapiens
caagagtggtaacca

SEQ ID NO: 82235 - DNA, 15 bp, Homo sapiens
tcaagagtggtaacc

SEQ ID NO: 82236 - DNA, 15 bp, Homo sapiens
ttcaagagtggtaac

SEQ ID NO: 82237 - DNA, 15 bp, Homo sapiens
tttcaagagtggtaa

SEQ ID NO: 82238 - DNA, 15 bp, Homo sapiens
ttttcaagagtggta

SEQ ID NO: 82239 - DNA, 15 bp, Homo sapiens
attttcaagagtggt

SEQ ID NO: 82240 - DNA, 15 bp, Homo sapiens
tattttcaagagtgg

SEQ ID NO: 82241 - DNA, 15 bp, Homo sapiens
ttattttcaagagtg

SEQ ID NO: 82242 - DNA, 15 bp, Homo sapiens
attattttcaagagt

SEQ ID NO: 82243 - DNA, 15 bp, Homo sapiens
tattattttcaagag

SEQ ID NO: 82244 - DNA, 15 bp, Homo sapiens
ctattattttcaaga

SEQ ID NO: 82245 - DNA, 15 bp, Homo sapiens
gctattattttcaag

SEQ ID NO: 82246 - DNA, 15 bp, Homo sapiens
agctattattttcaa

SEQ ID NO: 82247 - DNA, 15 bp, Homo sapiens
tagctattattttca

SEQ ID NO: 82248 - DNA, 15 bp, Homo sapiens
ctagctattattttc

SEQ ID NO: 82249 - DNA, 15 bp, Homo sapiens
actagctattatttt

SEQ ID NO: 82250 - DNA, 15 bp, Homo sapiens
gactagctattattt

SEQ ID NO: 82251 - DNA, 15 bp, Homo sapiens
ggactagctattatt

SEQ ID NO: 82252 - DNA, 15 bp, Homo sapiens
tggactagctattat

SEQ ID NO: 82253 - DNA, 15 bp, Homo sapiens
ctggactagctatta

SEQ ID NO: 82254 - DNA, 15 bp, Homo sapiens
cctggactagctatt

SEQ ID NO: 82255 - DNA, 15 bp, Homo sapiens
acctggactagctat

SEQ ID NO: 82256 - DNA, 15 bp, Homo sapiens
cacctggactagcta

SEQ ID NO: 82257 - DNA, 15 bp, Homo sapiens
gcacctggactagct

SEQ ID NO: 82258 - DNA, 15 bp, Homo sapiens
cgcacctggactagc

SEQ ID NO: 82259 - DNA, 15 bp, Homo sapiens
ccgcacctggactag

SEQ ID NO: 82260 - DNA, 15 bp, Homo sapiens
cccgcacctggacta

SEQ ID NO: 82261 - DNA, 15 bp, Homo sapiens
ccccgcacctggact

SEQ ID NO: 82262 - DNA, 15 bp, Homo sapiens
accccgcacctggac

SEQ ID NO: 82263 - DNA, 15 bp, Homo sapiens
caccccgcacctgga

SEQ ID NO: 82264 - DNA, 15 bp, Homo sapiens
ccaccccgcacctgg

SEQ ID NO: 82265 - DNA, 15 bp, Homo sapiens
gccaccccgcacctg

SEQ ID NO: 82266 - DNA, 15 bp, Homo sapiens
agccaccccgcacct

SEQ ID NO: 82267 - DNA, 15 bp, Homo sapiens
gagccaccccgcacc

SEQ ID NO: 82268 - DNA, 15 bp, Homo sapiens
tgagccaccccgcac

SEQ ID NO: 82269 - DNA, 15 bp, Homo sapiens
gtgagccaccccgca

SEQ ID NO: 82270 - DNA, 15 bp, Homo sapiens
tgtgagccaccccgc

SEQ ID NO: 82271 - DNA, 15 bp, Homo sapiens
gtgtgagccaccccg

SEQ ID NO: 82272 - DNA, 15 bp, Homo sapiens
ggtgtgagccacccc

SEQ ID NO: 82273 - DNA, 15 bp, Homo sapiens
aggtgtgagccaccc

SEQ ID NO: 82274 - DNA, 15 bp, Homo sapiens
agattacaggtgtga

SEQ ID NO: 82275 - DNA, 15 bp, Homo sapiens
gagattacaggtgtg

SEQ ID NO: 82276 - DNA, 15 bp, Homo sapiens
tgagattacaggtgt

SEQ ID NO: 82277 - DNA, 15 bp, Homo sapiens
ctgagattacaggtg

SEQ ID NO: 82278 - DNA, 15 bp, Homo sapiens
actgagattacaggt

SEQ ID NO: 82279 - DNA, 15 bp, Homo sapiens
tactgagattacagg

SEQ ID NO: 82280 - DNA, 15 bp, Homo sapiens
atactgagattacag

SEQ ID NO: 82281 - DNA, 15 bp, Homo sapiens
aatactgagattaca

SEQ ID NO: 82282 - DNA, 15 bp, Homo sapiens
aaatactgagattac

SEQ ID NO: 82283 - DNA, 15 bp, Homo sapiens
aaaatactgagatta

SEQ ID NO: 82284 - DNA, 15 bp, Homo sapiens
caaaatactgagatt

SEQ ID NO: 82285 - DNA, 15 bp, Homo sapiens
ccaaaatactgagat

SEQ ID NO: 82286 - DNA, 15 bp, Homo sapiens
cccaaaatactgaga

SEQ ID NO: 82287 - DNA, 15 bp, Homo sapiens
tcccaaaatactgag

SEQ ID NO: 82288 - DNA, 15 bp, Homo sapiens
atcccaaaatactga

SEQ ID NO: 82289 - DNA, 15 bp, Homo sapiens
catcccaaaatactg

SEQ ID NO: 82290 - DNA, 15 bp, Homo sapiens
gcatcccaaaatact

SEQ ID NO: 82291 - DNA, 15 bp, Homo sapiens
ggcatcccaaaatac

SEQ ID NO: 82292 - DNA, 15 bp, Homo sapiens
cggcatcccaaaata

SEQ ID NO: 82293 - DNA, 15 bp, Homo sapiens
tcggcatcccaaaat

SEQ ID NO: 82294 - DNA, 15 bp, Homo sapiens
ctcggcatcccaaaa

SEQ ID NO: 82295 - DNA, 15 bp, Homo sapiens
cctcggcatcccaaa

SEQ ID NO: 82296 - DNA, 15 bp, Homo sapiens
acctcggcatcccaa

SEQ ID NO: 82297 - DNA, 15 bp, Homo sapiens
cacctcggcatccca

SEQ ID NO: 82298 - DNA, 15 bp, Homo sapiens
ccacctcggcatccc

SEQ ID NO: 82299 - DNA, 15 bp, Homo sapiens
tccacctcggcatcc

SEQ ID NO: 82300 - DNA, 15 bp, Homo sapiens
gtccacctcggcatc

SEQ ID NO: 82301 - DNA, 15 bp, Homo sapiens
agtccacctcggcat

SEQ ID NO: 82302 - DNA, 15 bp, Homo sapiens
cagtccacctcggca

SEQ ID NO: 82303 - DNA, 15 bp, Homo sapiens
tcagtccacctcggc

SEQ ID NO: 82304 - DNA, 15 bp, Homo sapiens
atcagtccacctcgg

SEQ ID NO: 82305 - DNA, 15 bp, Homo sapiens
gatcagtccacctcg

SEQ ID NO: 82306 - DNA, 15 bp, Homo sapiens
tgatcagtccacctc

SEQ ID NO: 82307 - DNA, 15 bp, Homo sapiens
gtgatcagtccacct

SEQ ID NO: 82308 - DNA, 15 bp, Homo sapiens
ggtgatcagtccacc

SEQ ID NO: 82309 - DNA, 15 bp, Homo sapiens
aggtgatcagtccac

SEQ ID NO: 82310 - DNA, 15 bp, Homo sapiens
taggtgatcagtcca

SEQ ID NO: 82311 - DNA, 15 bp, Homo sapiens
ttaggtgatcagtcc

SEQ ID NO: 82312 - DNA, 15 bp, Homo sapiens
cttaggtgatcagtc

SEQ ID NO: 82313 - DNA, 15 bp, Homo sapiens
ccttaggtgatcagt

SEQ ID NO: 82314 - DNA, 15 bp, Homo sapiens
accttaggtgatcag

SEQ ID NO: 82315 - DNA, 15 bp, Homo sapiens
gaccttaggtgatca

SEQ ID NO: 82316 - DNA, 15 bp, Homo sapiens
tgaccttaggtgatc

SEQ ID NO: 82317 - DNA, 15 bp, Homo sapiens
ctgaccttaggtgat

SEQ ID NO: 82318 - DNA, 15 bp, Homo sapiens
cctgaccttaggtga

SEQ ID NO: 82319 - DNA, 15 bp, Homo sapiens
tcctgaccttaggtg

SEQ ID NO: 82320 - DNA, 15 bp, Homo sapiens
ctcctgaccttaggt

SEQ ID NO: 82321 - DNA, 15 bp, Homo sapiens
actcctgaccttagg

SEQ ID NO: 82322 - DNA, 15 bp, Homo sapiens
aactcctgaccttag

SEQ ID NO: 82323 - DNA, 15 bp, Homo sapiens
gaactcctgacctta

SEQ ID NO: 82324 - DNA, 15 bp, Homo sapiens
cgaactcctgacctt

SEQ ID NO: 82325 - DNA, 15 bp, Homo sapiens
ttcgaactcctgacc

SEQ ID NO: 82326 - DNA, 15 bp, Homo sapiens
tttcgaactcctgac

SEQ ID NO: 82327 - DNA, 15 bp, Homo sapiens
gtttcgaactcctga

SEQ ID NO: 82328 - DNA, 15 bp, Homo sapiens
ggtttcgaactcctg

SEQ ID NO: 82329 - DNA, 15 bp, Homo sapiens
tggtttcgaactcct

SEQ ID NO: 82330 - DNA, 15 bp, Homo sapiens
ctggtttcgaactcc

SEQ ID NO: 82331 - DNA, 15 bp, Homo sapiens
gctggtttcgaactc

SEQ ID NO: 82332 - DNA, 15 bp, Homo sapiens
agctggtttcgaact

SEQ ID NO: 82333 - DNA, 15 bp, Homo sapiens
aagctggtttcgaac

SEQ ID NO: 82334 - DNA, 15 bp, Homo sapiens
caagctggtttcgaa

SEQ ID NO: 82335 - DNA, 15 bp, Homo sapiens
ccaagctggtttcga

SEQ ID NO: 82336 - DNA, 15 bp, Homo sapiens
gccaagctggtttcg

SEQ ID NO: 82337 - DNA, 15 bp, Homo sapiens
ggccaagctggtttc

SEQ ID NO: 82338 - DNA, 15 bp, Homo sapiens
tggccaagctggttt

SEQ ID NO: 82339 - DNA, 15 bp, Homo sapiens
ttggccaagctggtt

SEQ ID NO: 82340 - DNA, 15 bp, Homo sapiens
attggccaagctggt

SEQ ID NO: 82341 - DNA, 15 bp, Homo sapiens
cattggccaagctgg

SEQ ID NO: 82342 - DNA, 15 bp, Homo sapiens
acattggccaagctg

SEQ ID NO: 82343 - DNA, 15 bp, Homo sapiens
cacattggccaagct

SEQ ID NO: 82344 - DNA, 15 bp, Homo sapiens
ccacattggccaagc

SEQ ID NO: 82345 - DNA, 15 bp, Homo sapiens
gccacattggccaag

SEQ ID NO: 82346 - DNA, 15 bp, Homo sapiens
cgccacattggccaa

SEQ ID NO: 82347 - DNA, 15 bp, Homo sapiens
tcgccacattggcca

SEQ ID NO: 82348 - DNA, 15 bp, Homo sapiens
ttcgccacattggcc

SEQ ID NO: 82349 - DNA, 15 bp, Homo sapiens
tttcgccacattggc

SEQ ID NO: 82350 - DNA, 15 bp, Homo sapiens
gtttcgccacattgg

SEQ ID NO: 82351 - DNA, 15 bp, Homo sapiens
ggtttcgccacattg

SEQ ID NO: 82352 - DNA, 15 bp, Homo sapiens
gggtttcgccacatt

SEQ ID NO: 82353 - DNA, 15 bp, Homo sapiens
agggtttcgccacat

SEQ ID NO: 82354 - DNA, 15 bp, Homo sapiens
cagggtttcgccaca

SEQ ID NO: 82355 - DNA, 15 bp, Homo sapiens
acagggtttcgccac

SEQ ID NO: 82356 - DNA, 15 bp, Homo sapiens
agtagagacagggtt

SEQ ID NO: 82357 - DNA, 15 bp, Homo sapiens
tagtagagacagggt

SEQ ID NO: 82358 - DNA, 15 bp, Homo sapiens
ttagtagagacaggg

SEQ ID NO: 82359 - DNA, 15 bp, Homo sapiens
aatttttagtagaga

SEQ ID NO: 82360 - DNA, 15 bp, Homo sapiens
gaatttttagtagag

SEQ ID NO: 82361 - DNA, 15 bp, Homo sapiens
tgaatttttagtaga

SEQ ID NO: 82362 - DNA, 15 bp, Homo sapiens
ttgaatttttagtag

SEQ ID NO: 82363 - DNA, 15 bp, Homo sapiens
tttgaatttttagta

SEQ ID NO: 82364 - DNA, 15 bp, Homo sapiens
ttttgaatttttagt

SEQ ID NO: 82365 - DNA, 15 bp, Homo sapiens
tttttgaatttttag

SEQ ID NO: 82366 - DNA, 15 bp, Homo sapiens
atttttgaattttta

SEQ ID NO: 82367 - DNA, 15 bp, Homo sapiens
aatttttgaattttt

SEQ ID NO: 82368 - DNA, 15 bp, Homo sapiens
taatttttgaatttt

SEQ ID NO: 82369 - DNA, 15 bp, Homo sapiens
ctaatttttgaattt

SEQ ID NO: 82370 - DNA, 15 bp, Homo sapiens
gctaatttttgaatt

SEQ ID NO: 82371 - DNA, 15 bp, Homo sapiens
ggctaatttttgaat

SEQ ID NO: 82372 - DNA, 15 bp, Homo sapiens
tggctaatttttgaa

SEQ ID NO: 82373 - DNA, 15 bp, Homo sapiens
ctggctaatttttga

SEQ ID NO: 82374 - DNA, 15 bp, Homo sapiens
tgcctggctaatttt

SEQ ID NO: 82375 - DNA, 15 bp, Homo sapiens
atgcctggctaattt

SEQ ID NO: 82376 - DNA, 15 bp, Homo sapiens
tgccaccatgcctgg

SEQ ID NO: 82377 - DNA, 15 bp, Homo sapiens
gtgccaccatgcctg

SEQ ID NO: 82378 - DNA, 15 bp, Homo sapiens
tgtgccaccatgcct

SEQ ID NO: 82379 - DNA, 15 bp, Homo sapiens
atgtgccaccatgcc

SEQ ID NO: 82380 - DNA, 15 bp, Homo sapiens
catgtgccaccatgc

SEQ ID NO: 82381 - DNA, 15 bp, Homo sapiens
gcatgtgccaccatg

SEQ ID NO: 82382 - DNA, 15 bp, Homo sapiens
ggcatgtgccaccat

SEQ ID NO: 82383 - DNA, 15 bp, Homo sapiens
ttacaggcatgtgcc

SEQ ID NO: 82384 - DNA, 15 bp, Homo sapiens
attacaggcatgtgc

SEQ ID NO: 82385 - DNA, 15 bp, Homo sapiens
gattacaggcatgtg

SEQ ID NO: 82386 - DNA, 15 bp, Homo sapiens
ggattacaggcatgt

SEQ ID NO: 82387 - DNA, 15 bp, Homo sapiens
gggattacaggcatg

SEQ ID NO: 82388 - DNA, 15 bp, Homo sapiens
aactgggattacagg

SEQ ID NO: 82389 - DNA, 15 bp, Homo sapiens
taactgggattacag

SEQ ID NO: 82390 - DNA, 15 bp, Homo sapiens
gtaactgggattaca

SEQ ID NO: 82391 - DNA, 15 bp, Homo sapiens
agtaactgggattac

SEQ ID NO: 82392 - DNA, 15 bp, Homo sapiens
aagtaactgggatta

SEQ ID NO: 82393 - DNA, 15 bp, Homo sapiens
caagtaactgggatt

SEQ ID NO: 82394 - DNA, 15 bp, Homo sapiens
ccaagtaactgggat

SEQ ID NO: 82395 - DNA, 15 bp, Homo sapiens
cccaagtaactggga

SEQ ID NO: 82396 - DNA, 15 bp, Homo sapiens
tcccaagtaactggg

SEQ ID NO: 82397 - DNA, 15 bp, Homo sapiens
ctcccaagtaactgg

SEQ ID NO: 82398 - DNA, 15 bp, Homo sapiens
cctcccaagtaactg

SEQ ID NO: 82399 - DNA, 15 bp, Homo sapiens
gcctcccaagtaact

SEQ ID NO: 82400 - DNA, 15 bp, Homo sapiens
agcctcccaagtaac

SEQ ID NO: 82401 - DNA, 15 bp, Homo sapiens
cagcctcccaagtaa

SEQ ID NO: 82402 - DNA, 15 bp, Homo sapiens
ttcagcctcccaagt

SEQ ID NO: 82403 - DNA, 15 bp, Homo sapiens
cttcagcctcccaag

SEQ ID NO: 82404 - DNA, 15 bp, Homo sapiens
gcttcagcctcccaa

SEQ ID NO: 82405 - DNA, 15 bp, Homo sapiens
tgcttcagcctccca

SEQ ID NO: 82406 - DNA, 15 bp, Homo sapiens
ctgcttcagcctccc

SEQ ID NO: 82407 - DNA, 15 bp, Homo sapiens
cctgcttcagcctcc

SEQ ID NO: 82408 - DNA, 15 bp, Homo sapiens
tcctgcttcagcctc

SEQ ID NO: 82409 - DNA, 15 bp, Homo sapiens
ctcctgcttcagcct

SEQ ID NO: 82410 - DNA, 15 bp, Homo sapiens
tctcctgcttcagcc

SEQ ID NO: 82411 - DNA, 15 bp, Homo sapiens
ttctcctgcttcagc

SEQ ID NO: 82412 - DNA, 15 bp, Homo sapiens
attctcctgcttcag

SEQ ID NO: 82413 - DNA, 15 bp, Homo sapiens
aattctcctgcttca

SEQ ID NO: 82414 - DNA, 15 bp, Homo sapiens
caattctcctgcttc

SEQ ID NO: 82415 - DNA, 15 bp, Homo sapiens
gcaattctcctgctt

SEQ ID NO: 82416 - DNA, 15 bp, Homo sapiens
agcaattctcctgct

SEQ ID NO: 82417 - DNA, 15 bp, Homo sapiens
acctcccaggttcaa

SEQ ID NO: 82418 - DNA, 15 bp, Homo sapiens
cacctcccaggttca

SEQ ID NO: 82419 - DNA, 15 bp, Homo sapiens
ccacctcccaggttc

SEQ ID NO: 82420 - DNA, 15 bp, Homo sapiens
tccacctcccaggtt

SEQ ID NO: 82421 - DNA, 15 bp, Homo sapiens
ctccacctcccaggt

SEQ ID NO: 82422 - DNA, 15 bp, Homo sapiens
cctccacctcccagg

SEQ ID NO: 82423 - DNA, 15 bp, Homo sapiens
acctccacctcccag

SEQ ID NO: 82424 - DNA, 15 bp, Homo sapiens
gacctccacctccca

SEQ ID NO: 82425 - DNA, 15 bp, Homo sapiens
cgacctccacctccc

SEQ ID NO: 82426 - DNA, 15 bp, Homo sapiens
gcgacctccacctcc

SEQ ID NO: 82427 - DNA, 15 bp, Homo sapiens
tgcgacctccacctc

SEQ ID NO: 82428 - DNA, 15 bp, Homo sapiens
ctgcgacctccacct

SEQ ID NO: 82429 - DNA, 15 bp, Homo sapiens
cctgcgacctccacc

SEQ ID NO: 82430 - DNA, 15 bp, Homo sapiens
ccctgcgacctccac

SEQ ID NO: 82431 - DNA, 15 bp, Homo sapiens
tccctgcgacctcca

SEQ ID NO: 82432 - DNA, 15 bp, Homo sapiens
ctccctgcgacctcc

SEQ ID NO: 82433 - DNA, 15 bp, Homo sapiens
gctccctgcgacctc

SEQ ID NO: 82434 - DNA, 15 bp, Homo sapiens
ggctccctgcgacct

SEQ ID NO: 82435 - DNA, 15 bp, Homo sapiens
tggctccctgcgacc

SEQ ID NO: 82436 - DNA, 15 bp, Homo sapiens
ttggctccctgcgac

SEQ ID NO: 82437 - DNA, 15 bp, Homo sapiens
tttggctccctgcga

SEQ ID NO: 82438 - DNA, 15 bp, Homo sapiens
ttttggctccctgcg

SEQ ID NO: 82439 - DNA, 15 bp, Homo sapiens
attttggctccctgc

SEQ ID NO: 82440 - DNA, 15 bp, Homo sapiens
aattttggctccctg

SEQ ID NO: 82441 - DNA, 15 bp, Homo sapiens
caattttggctccct

SEQ ID NO: 82442 - DNA, 15 bp, Homo sapiens
gcaattttggctccc

SEQ ID NO: 82443 - DNA, 15 bp, Homo sapiens
cgcaattttggctcc

SEQ ID NO: 82444 - DNA, 15 bp, Homo sapiens
gcgcaattttggctc

SEQ ID NO: 82445 - DNA, 15 bp, Homo sapiens
ggcgcaattttggct

SEQ ID NO: 82446 - DNA, 15 bp, Homo sapiens
tggcgcaattttggc

SEQ ID NO: 82447 - DNA, 15 bp, Homo sapiens
gtggcgcaattttgg

SEQ ID NO: 82448 - DNA, 15 bp, Homo sapiens
agtggcgcaattttg

SEQ ID NO: 82449 - DNA, 15 bp, Homo sapiens
cagtggcgcaatttt

SEQ ID NO: 82450 - DNA, 15 bp, Homo sapiens
acagtggcgcaattt

SEQ ID NO: 82451 - DNA, 15 bp, Homo sapiens
tacagtggcgcaatt

SEQ ID NO: 82452 - DNA, 15 bp, Homo sapiens
gtacagtggcgcaat

SEQ ID NO: 82453 - DNA, 15 bp, Homo sapiens
agtacagtggcgcaa

SEQ ID NO: 82454 - DNA, 15 bp, Homo sapiens
gagtacagtggcgca

SEQ ID NO: 82455 - DNA, 15 bp, Homo sapiens
ggagtacagtggcgc

SEQ ID NO: 82456 - DNA, 15 bp, Homo sapiens
tggagtacagtggcg

SEQ ID NO: 82457 - DNA, 15 bp, Homo sapiens
ctggagtacagtggc

SEQ ID NO: 82458 - DNA, 15 bp, Homo sapiens
gctggagtacagtgg

SEQ ID NO: 82459 - DNA, 15 bp, Homo sapiens
ggctggagtacagtg

SEQ ID NO: 82460 - DNA, 15 bp, Homo sapiens
tcaggctggagtaca

SEQ ID NO: 82461 - DNA, 15 bp, Homo sapiens
ctcaggctggagtac

SEQ ID NO: 82462 - DNA, 15 bp, Homo sapiens
gctcaggctggagta

SEQ ID NO: 82463 - DNA, 15 bp, Homo sapiens
tgctcaggctggagt

SEQ ID NO: 82464 - DNA, 15 bp, Homo sapiens
ttgctcaggctggag

SEQ ID NO: 82465 - DNA, 15 bp, Homo sapiens
gttgctcaggctgga

SEQ ID NO: 82466 - DNA, 15 bp, Homo sapiens
tgttgctcaggctgg

SEQ ID NO: 82467 - DNA, 15 bp, Homo sapiens
gtgttgctcaggctg

SEQ ID NO: 82468 - DNA, 15 bp, Homo sapiens
tgtgttgctcaggct

SEQ ID NO: 82469 - DNA, 15 bp, Homo sapiens
ctgtgttgctcaggc

SEQ ID NO: 82470 - DNA, 15 bp, Homo sapiens
gctgtgttgctcagg

SEQ ID NO: 82471 - DNA, 15 bp, Homo sapiens
tgctgtgttgctcag

SEQ ID NO: 82472 - DNA, 15 bp, Homo sapiens
ttgctgtgttgctca

SEQ ID NO: 82473 - DNA, 15 bp, Homo sapiens
tttgctgtgttgctc

SEQ ID NO: 82474 - DNA, 15 bp, Homo sapiens
ttttgctgtgttgct

SEQ ID NO: 82475 - DNA, 15 bp, Homo sapiens
gttttgctgtgttgc

SEQ ID NO: 82476 - DNA, 15 bp, Homo sapiens
agttttgctgtgttg

SEQ ID NO: 82477 - DNA, 15 bp, Homo sapiens
gagttttgctgtgtt

SEQ ID NO: 82478 - DNA, 15 bp, Homo sapiens
ggagttttgctgtgt

SEQ ID NO: 82479 - DNA, 15 bp, Homo sapiens
tggagttttgctgtg

SEQ ID NO: 82480 - DNA, 15 bp, Homo sapiens
atggagttttgctgt

SEQ ID NO: 82481 - DNA, 15 bp, Homo sapiens
tatggagttttgctg

SEQ ID NO: 82482 - DNA, 15 bp, Homo sapiens
atatggagttttgct

SEQ ID NO: 82483 - DNA, 15 bp, Homo sapiens
gatatggagttttgc

SEQ ID NO: 82484 - DNA, 15 bp, Homo sapiens
tgatatggagttttg

SEQ ID NO: 82485 - DNA, 15 bp, Homo sapiens
ttgatatggagtttt

SEQ ID NO: 82486 - DNA, 15 bp, Homo sapiens
tttgatatggagttt

SEQ ID NO: 82487 - DNA, 15 bp, Homo sapiens
ttttgatatggagtt

SEQ ID NO: 82488 - DNA, 15 bp, Homo sapiens
tttttgatatggagt

SEQ ID NO: 82489 - DNA, 15 bp, Homo sapiens
ttttttgatatggag

SEQ ID NO: 82490 - DNA, 15 bp, Homo sapiens
attttttgatatgga

SEQ ID NO: 82491 - DNA, 15 bp, Homo sapiens
tattttttgatatgg

SEQ ID NO: 82492 - DNA, 15 bp, Homo sapiens
ttattttttgatatg

SEQ ID NO: 82493 - DNA, 15 bp, Homo sapiens
tttattttttgatat

SEQ ID NO: 82494 - DNA, 15 bp, Homo sapiens
ttttattttttgata

SEQ ID NO: 82495 - DNA, 15 bp, Homo sapiens
attttattttttgat

SEQ ID NO: 82496 - DNA, 15 bp, Homo sapiens
cattttattttttga

SEQ ID NO: 82497 - DNA, 15 bp, Homo sapiens
tcattttattttttg

SEQ ID NO: 82498 - DNA, 15 bp, Homo sapiens
ttcattttatttttt

SEQ ID NO: 82499 - DNA, 15 bp, Homo sapiens
attcattttattttt

SEQ ID NO: 82500 - DNA, 15 bp, Homo sapiens
tattcattttatttt

SEQ ID NO: 82501 - DNA, 15 bp, Homo sapiens
ttattcattttattt

SEQ ID NO: 82502 - DNA, 15 bp, Homo sapiens
tttattcattttatt

SEQ ID NO: 82503 - DNA, 15 bp, Homo sapiens
ttttattcattttat

SEQ ID NO: 82504 - DNA, 15 bp, Homo sapiens
attttattcatttta

SEQ ID NO: 82505 - DNA, 15 bp, Homo sapiens
tattttattcatttt

SEQ ID NO: 82506 - DNA, 15 bp, Homo sapiens
ttattttattcattt

SEQ ID NO: 82507 - DNA, 15 bp, Homo sapiens
gttattttattcatt

SEQ ID NO: 82508 - DNA, 15 bp, Homo sapiens
tgttattttattcat

SEQ ID NO: 82509 - DNA, 15 bp, Homo sapiens
ctgttattttattca

SEQ ID NO: 82510 - DNA, 15 bp, Homo sapiens
gctgttattttattc

SEQ ID NO: 82511 - DNA, 15 bp, Homo sapiens
agctgttattttatt

SEQ ID NO: 82512 - DNA, 15 bp, Homo sapiens
tagctgttattttat

SEQ ID NO: 82513 - DNA, 15 bp, Homo sapiens
ttagctgttatttta

SEQ ID NO: 82514 - DNA, 15 bp, Homo sapiens
attagctgttatttt

SEQ ID NO: 82515 - DNA, 15 bp, Homo sapiens
gattagctgttattt

SEQ ID NO: 82516 - DNA, 15 bp, Homo sapiens
agattagctgttatt

SEQ ID NO: 82517 - DNA, 15 bp, Homo sapiens
tagattagctgttat

SEQ ID NO: 82518 - DNA, 15 bp, Homo sapiens
ctagattagctgtta

SEQ ID NO: 82519 - DNA, 15 bp, Homo sapiens
actagattagctgtt

SEQ ID NO: 82520 - DNA, 15 bp, Homo sapiens
gactagattagctgt

SEQ ID NO: 82521 - DNA, 15 bp, Homo sapiens
tgactagattagctg

SEQ ID NO: 82522 - DNA, 15 bp, Homo sapiens
atgactagattagct

SEQ ID NO: 82523 - DNA, 15 bp, Homo sapiens
gatgactagattagc

SEQ ID NO: 82524 - DNA, 15 bp, Homo sapiens
tgatgactagattag

SEQ ID NO: 82525 - DNA, 15 bp, Homo sapiens
ctgatgactagatta

SEQ ID NO: 82526 - DNA, 15 bp, Homo sapiens
actgatgactagatt

SEQ ID NO: 82527 - DNA, 15 bp, Homo sapiens
tactgatgactagat

SEQ ID NO: 82528 - DNA, 15 bp, Homo sapiens
atactgatgactaga

SEQ ID NO: 82529 - DNA, 15 bp, Homo sapiens
tatactgatgactag

SEQ ID NO: 82530 - DNA, 15 bp, Homo sapiens
ttatactgatgacta

SEQ ID NO: 82531 - DNA, 15 bp, Homo sapiens
gttatactgatgact

SEQ ID NO: 82532 - DNA, 15 bp, Homo sapiens
agttatactgatgac

SEQ ID NO: 82533 - DNA, 15 bp, Homo sapiens
gagttatactgatga

SEQ ID NO: 82534 - DNA, 15 bp, Homo sapiens
ggagttatactgatg

SEQ ID NO: 82535 - DNA, 15 bp, Homo sapiens
tggagttatactgat

SEQ ID NO: 82536 - DNA, 15 bp, Homo sapiens
ctggagttatactga

SEQ ID NO: 82537 - DNA, 15 bp, Homo sapiens
actggagttatactg

SEQ ID NO: 82538 - DNA, 15 bp, Homo sapiens
cactggagttatact

SEQ ID NO: 82539 - DNA, 15 bp, Homo sapiens
tcactggagttatac

SEQ ID NO: 82540 - DNA, 15 bp, Homo sapiens
ttcactggagttata

SEQ ID NO: 82541 - DNA, 15 bp, Homo sapiens
gttcactggagttat

SEQ ID NO: 82542 - DNA, 15 bp, Homo sapiens
tgttcactggagtta

SEQ ID NO: 82543 - DNA, 15 bp, Homo sapiens
ctgttcactggagtt

SEQ ID NO: 82544 - DNA, 15 bp, Homo sapiens
tctgttcactggagt

SEQ ID NO: 82545 - DNA, 15 bp, Homo sapiens
ttctgttcactggag

SEQ ID NO: 82546 - DNA, 15 bp, Homo sapiens
cttctgttcactgga

SEQ ID NO: 82547 - DNA, 15 bp, Homo sapiens
tcttctgttcactgg

SEQ ID NO: 82548 - DNA, 15 bp, Homo sapiens
atcttctgttcactg

SEQ ID NO: 82549 - DNA, 15 bp, Homo sapiens
aatcttctgttcact

SEQ ID NO: 82550 - DNA, 15 bp, Homo sapiens
aaatcttctgttcac

SEQ ID NO: 82551 - DNA, 15 bp, Homo sapiens
taaatcttctgttca

SEQ ID NO: 82552 - DNA, 15 bp, Homo sapiens
ataaatcttctgttc

SEQ ID NO: 82553 - DNA, 15 bp, Homo sapiens
aataaatcttctgtt

SEQ ID NO: 82554 - DNA, 15 bp, Homo sapiens
taataaatcttctgt

SEQ ID NO: 82555 - DNA, 15 bp, Homo sapiens
ctaataaatcttctg

SEQ ID NO: 82556 - DNA, 15 bp, Homo sapiens
cctaataaatcttct

SEQ ID NO: 82557 - DNA, 15 bp, Homo sapiens
gcctaataaatcttc

SEQ ID NO: 82558 - DNA, 15 bp, Homo sapiens
tgcctaataaatctt

SEQ ID NO: 82559 - DNA, 15 bp, Homo sapiens
atgcctaataaatct

SEQ ID NO: 82560 - DNA, 15 bp, Homo sapiens
tatgcctaataaatc

SEQ ID NO: 82561 - DNA, 15 bp, Homo sapiens
ctatgcctaataaat

SEQ ID NO: 82562 - DNA, 15 bp, Homo sapiens
actatgcctaataaa

SEQ ID NO: 82563 - DNA, 15 bp, Homo sapiens
cactatgcctaataa

SEQ ID NO: 82564 - DNA, 15 bp, Homo sapiens
tcactatgcctaata

SEQ ID NO: 82565 - DNA, 15 bp, Homo sapiens
ttcactatgcctaat

SEQ ID NO: 82566 - DNA, 15 bp, Homo sapiens
attcactatgcctaa

SEQ ID NO: 82567 - DNA, 15 bp, Homo sapiens
cattcactatgccta

SEQ ID NO: 82568 - DNA, 15 bp, Homo sapiens
tcattcactatgcct

SEQ ID NO: 82569 - DNA, 15 bp, Homo sapiens
atcattcactatgcc

SEQ ID NO: 82570 - DNA, 15 bp, Homo sapiens
catcattcactatgc

SEQ ID NO: 82571 - DNA, 15 bp, Homo sapiens
ccatcattcactatg

SEQ ID NO: 82572 - DNA, 15 bp, Homo sapiens
accatcattcactat

SEQ ID NO: 82573 - DNA, 15 bp, Homo sapiens
caccatcattcacta

SEQ ID NO: 82574 - DNA, 15 bp, Homo sapiens
gcaccatcattcact

SEQ ID NO: 82575 - DNA, 15 bp, Homo sapiens
agcaccatcattcac

SEQ ID NO: 82576 - DNA, 15 bp, Homo sapiens
aagcaccatcattca

SEQ ID NO: 82577 - DNA, 15 bp, Homo sapiens
gaagcaccatcattc

SEQ ID NO: 82578 - DNA, 15 bp, Homo sapiens
ggaagcaccatcatt

SEQ ID NO: 82579 - DNA, 15 bp, Homo sapiens
aggaagcaccatcat

SEQ ID NO: 82580 - DNA, 15 bp, Homo sapiens
taggaagcaccatca

SEQ ID NO: 82581 - DNA, 15 bp, Homo sapiens
ttaggaagcaccatc

SEQ ID NO: 82582 - DNA, 15 bp, Homo sapiens
tttaggaagcaccat

SEQ ID NO: 82583 - DNA, 15 bp, Homo sapiens
ttttaggaagcacca

SEQ ID NO: 82584 - DNA, 15 bp, Homo sapiens
tttttaggaagcacc

SEQ ID NO: 82585 - DNA, 15 bp, Homo sapiens
atttttaggaagcac

SEQ ID NO: 82586 - DNA, 15 bp, Homo sapiens
gatttttaggaagca

SEQ ID NO: 82587 - DNA, 15 bp, Homo sapiens
agatttttaggaagc

SEQ ID NO: 82588 - DNA, 15 bp, Homo sapiens
gagatttttaggaag

SEQ ID NO: 82589 - DNA, 15 bp, Homo sapiens
agagatttttaggaa

SEQ ID NO: 82590 - DNA, 15 bp, Homo sapiens
aagagatttttagga

SEQ ID NO: 82591 - DNA, 15 bp, Homo sapiens
caagagatttttagg

SEQ ID NO: 82592 - DNA, 15 bp, Homo sapiens
tcaagagatttttag

SEQ ID NO: 82593 - DNA, 15 bp, Homo sapiens
gtcaagagattttta

SEQ ID NO: 82594 - DNA, 15 bp, Homo sapiens
agtcaagagattttt

SEQ ID NO: 82595 - DNA, 15 bp, Homo sapiens
tagtcaagagatttt

SEQ ID NO: 82596 - DNA, 15 bp, Homo sapiens
gtagtcaagagattt

SEQ ID NO: 82597 - DNA, 15 bp, Homo sapiens
tgtagtcaagagatt

SEQ ID NO: 82598 - DNA, 15 bp, Homo sapiens
ttgtagtcaagagat

SEQ ID NO: 82599 - DNA, 15 bp, Homo sapiens
tttgtagtcaagaga

SEQ ID NO: 82600 - DNA, 15 bp, Homo sapiens
ctttgtagtcaagag

SEQ ID NO: 82601 - DNA, 15 bp, Homo sapiens
tctttgtagtcaaga

SEQ ID NO: 82602 - DNA, 15 bp, Homo sapiens
ttctttgtagtcaag

SEQ ID NO: 82603 - DNA, 15 bp, Homo sapiens
attctttgtagtcaa

SEQ ID NO: 82604 - DNA, 15 bp, Homo sapiens
gattctttgtagtca

SEQ ID NO: 82605 - DNA, 15 bp, Homo sapiens
agattctttgtagtc

SEQ ID NO: 82606 - DNA, 15 bp, Homo sapiens
gagattctttgtagt

SEQ ID NO: 82607 - DNA, 15 bp, Homo sapiens
tgagattctttgtag

SEQ ID NO: 82608 - DNA, 15 bp, Homo sapiens
atgagattctttgta

SEQ ID NO: 82609 - DNA, 15 bp, Homo sapiens
aatgagattctttgt

SEQ ID NO: 82610 - DNA, 15 bp, Homo sapiens
aaatgagattctttg

SEQ ID NO: 82611 - DNA, 15 bp, Homo sapiens
gaaatgagattcttt

SEQ ID NO: 82612 - DNA, 15 bp, Homo sapiens
tgaaatgagattctt

SEQ ID NO: 82613 - DNA, 15 bp, Homo sapiens
ttgaaatgagattct

SEQ ID NO: 82614 - DNA, 15 bp, Homo sapiens
attgaaatgagattc

SEQ ID NO: 82615 - DNA, 15 bp, Homo sapiens
cattgaaatgagatt

SEQ ID NO: 82616 - DNA, 15 bp, Homo sapiens
acattgaaatgagat

SEQ ID NO: 82617 - DNA, 15 bp, Homo sapiens
aacattgaaatgaga

SEQ ID NO: 82618 - DNA, 15 bp, Homo sapiens
aaacattgaaatgag

SEQ ID NO: 82619 - DNA, 15 bp, Homo sapiens
taaacattgaaatga

SEQ ID NO: 82620 - DNA, 15 bp, Homo sapiens
ataaacattgaaatg

SEQ ID NO: 82621 - DNA, 15 bp, Homo sapiens
aataaacattgaaat

SEQ ID NO: 82622 - DNA, 15 bp, Homo sapiens
caataaacattgaaa

SEQ ID NO: 82623 - DNA, 15 bp, Homo sapiens
acaataaacattgaa

SEQ ID NO: 82624 - DNA, 15 bp, Homo sapiens
aacaataaacattga

SEQ ID NO: 82625 - DNA, 15 bp, Homo sapiens
aaacaataaacattg

SEQ ID NO: 82626 - DNA, 15 bp, Homo sapiens
taaacaataaacatt

SEQ ID NO: 82627 - DNA, 15 bp, Homo sapiens
ctaaacaataaacat

SEQ ID NO: 82628 - DNA, 15 bp, Homo sapiens
tctaaacaataaaca

SEQ ID NO: 82629 - DNA, 15 bp, Homo sapiens
atctaaacaataaac

SEQ ID NO: 82630 - DNA, 15 bp, Homo sapiens
catctaaacaataaa

SEQ ID NO: 82631 - DNA, 15 bp, Homo sapiens
acatctaaacaataa

SEQ ID NO: 82632 - DNA, 15 bp, Homo sapiens
aacatctaaacaata

SEQ ID NO: 82633 - DNA, 15 bp, Homo sapiens
gaacatctaaacaat

SEQ ID NO: 82634 - DNA, 15 bp, Homo sapiens
tgaacatctaaacaa

SEQ ID NO: 82635 - DNA, 15 bp, Homo sapiens
ctgaacatctaaaca

SEQ ID NO: 82636 - DNA, 15 bp, Homo sapiens
tctgaacatctaaac

SEQ ID NO: 82637 - DNA, 15 bp, Homo sapiens
ttctgaacatctaaa

SEQ ID NO: 82638 - DNA, 15 bp, Homo sapiens
attctgaacatctaa

SEQ ID NO: 82639 - DNA, 15 bp, Homo sapiens
tattctgaacatcta

SEQ ID NO: 82640 - DNA, 15 bp, Homo sapiens
ttattctgaacatct

SEQ ID NO: 82641 - DNA, 15 bp, Homo sapiens
tttattctgaacatc

SEQ ID NO: 82642 - DNA, 15 bp, Homo sapiens
atttattctgaacat

SEQ ID NO: 82643 - DNA, 15 bp, Homo sapiens
aatttattctgaaca

SEQ ID NO: 82644 - DNA, 15 bp, Homo sapiens
gaatttattctgaac

SEQ ID NO: 82645 - DNA, 15 bp, Homo sapiens
agaatttattctgaa

SEQ ID NO: 82646 - DNA, 15 bp, Homo sapiens
aagaatttattctga

SEQ ID NO: 82647 - DNA, 15 bp, Homo sapiens
caagaatttattctg

SEQ ID NO: 82648 - DNA, 15 bp, Homo sapiens
ccaagaatttattct

SEQ ID NO: 82649 - DNA, 15 bp, Homo sapiens
cccaagaatttattc

SEQ ID NO: 82650 - DNA, 15 bp, Homo sapiens
tcccaagaatttatt

SEQ ID NO: 82651 - DNA, 15 bp, Homo sapiens
ttcccaagaatttat

SEQ ID NO: 82652 - DNA, 15 bp, Homo sapiens
tttcccaagaattta

SEQ ID NO: 82653 - DNA, 15 bp, Homo sapiens
ctttcccaagaattt

SEQ ID NO: 82654 - DNA, 15 bp, Homo sapiens
tctttcccaagaatt

SEQ ID NO: 82655 - DNA, 15 bp, Homo sapiens
gtctttcccaagaat

SEQ ID NO: 82656 - DNA, 15 bp, Homo sapiens
ggtctttcccaagaa

SEQ ID NO: 82657 - DNA, 15 bp, Homo sapiens
aggtctttcccaaga

SEQ ID NO: 82658 - DNA, 15 bp, Homo sapiens
aaggtctttcccaag

SEQ ID NO: 82659 - DNA, 15 bp, Homo sapiens
caaggtctttcccaa

SEQ ID NO: 82660 - DNA, 15 bp, Homo sapiens
ccaaggtctttccca

SEQ ID NO: 82661 - DNA, 15 bp, Homo sapiens
gccaaggtctttccc

SEQ ID NO: 82662 - DNA, 15 bp, Homo sapiens
agccaaggtctttcc

SEQ ID NO: 82663 - DNA, 15 bp, Homo sapiens
aagccaaggtctttc

SEQ ID NO: 82664 - DNA, 15 bp, Homo sapiens
caagccaaggtcttt

SEQ ID NO: 82665 - DNA, 15 bp, Homo sapiens
ccaagccaaggtctt

SEQ ID NO: 82666 - DNA, 15 bp, Homo sapiens
accaagccaaggtct

SEQ ID NO: 82667 - DNA, 15 bp, Homo sapiens
caccaagccaaggtc

SEQ ID NO: 82668 - DNA, 15 bp, Homo sapiens
acaccaagccaaggt

SEQ ID NO: 82669 - DNA, 15 bp, Homo sapiens
tacaccaagccaagg

SEQ ID NO: 82670 - DNA, 15 bp, Homo sapiens
ttacaccaagccaag

SEQ ID NO: 82671 - DNA, 15 bp, Homo sapiens
cttacaccaagccaa

SEQ ID NO: 82672 - DNA, 15 bp, Homo sapiens
acttacaccaagcca

SEQ ID NO: 82673 - DNA, 15 bp, Homo sapiens
cacttacaccaagcc

SEQ ID NO: 82674 - DNA, 15 bp, Homo sapiens
tcacttacaccaagc

SEQ ID NO: 82675 - DNA, 15 bp, Homo sapiens
ttcacttacaccaag

SEQ ID NO: 82676 - DNA, 15 bp, Homo sapiens
attcacttacaccaa

SEQ ID NO: 82677 - DNA, 15 bp, Homo sapiens
aattcacttacacca

SEQ ID NO: 82678 - DNA, 15 bp, Homo sapiens
taattcacttacacc

SEQ ID NO: 82679 - DNA, 15 bp, Homo sapiens
gtaattcacttacac

SEQ ID NO: 82680 - DNA, 15 bp, Homo sapiens
ggtaattcacttaca

SEQ ID NO: 82681 - DNA, 15 bp, Homo sapiens
tggtaattcacttac

SEQ ID NO: 82682 - DNA, 15 bp, Homo sapiens
ctggtaattcactta

SEQ ID NO: 82683 - DNA, 15 bp, Homo sapiens
actggtaattcactt

SEQ ID NO: 82684 - DNA, 15 bp, Homo sapiens
cactggtaattcact

SEQ ID NO: 82685 - DNA, 15 bp, Homo sapiens
gcactggtaattcac

SEQ ID NO: 82686 - DNA, 15 bp, Homo sapiens
ggcactggtaattca

SEQ ID NO: 82687 - DNA, 15 bp, Homo sapiens
cggcactggtaattc

SEQ ID NO: 82688 - DNA, 15 bp, Homo sapiens
tcggcactggtaatt

SEQ ID NO: 82689 - DNA, 15 bp, Homo sapiens
ctcggcactggtaat

SEQ ID NO: 82690 - DNA, 15 bp, Homo sapiens
cctcggcactggtaa

SEQ ID NO: 82691 - DNA, 15 bp, Homo sapiens
ccctcggcactggta

SEQ ID NO: 82692 - DNA, 15 bp, Homo sapiens
gccctcggcactggt

SEQ ID NO: 82693 - DNA, 15 bp, Homo sapiens
tgccctcggcactgg

SEQ ID NO: 82694 - DNA, 15 bp, Homo sapiens
ctgccctcggcactg

SEQ ID NO: 82695 - DNA, 15 bp, Homo sapiens
cctgccctcggcact

SEQ ID NO: 82696 - DNA, 15 bp, Homo sapiens
ccctgccctcggcac

SEQ ID NO: 82697 - DNA, 15 bp, Homo sapiens
accctgccctcggca

SEQ ID NO: 82698 - DNA, 15 bp, Homo sapiens
caccctgccctcggc

SEQ ID NO: 82699 - DNA, 15 bp, Homo sapiens
tcaccctgccctcgg

SEQ ID NO: 82700 - DNA, 15 bp, Homo sapiens
ttcaccctgccctcg

SEQ ID NO: 82701 - DNA, 15 bp, Homo sapiens
gttcaccctgccctc

SEQ ID NO: 82702 - DNA, 15 bp, Homo sapiens
ggttcaccctgccct

SEQ ID NO: 82703 - DNA, 15 bp, Homo sapiens
tggttcaccctgccc

SEQ ID NO: 82704 - DNA, 15 bp, Homo sapiens
ttggttcaccctgcc

SEQ ID NO: 82705 - DNA, 15 bp, Homo sapiens
cttggttcaccctgc

SEQ ID NO: 82706 - DNA, 15 bp, Homo sapiens
acttggttcaccctg

SEQ ID NO: 82707 - DNA, 15 bp, Homo sapiens
gacttggttcaccct

SEQ ID NO: 82708 - DNA, 15 bp, Homo sapiens
agacttggttcaccc

SEQ ID NO: 82709 - DNA, 15 bp, Homo sapiens
gagacttggttcacc

SEQ ID NO: 82710 - DNA, 15 bp, Homo sapiens
tgagacttggttcac

SEQ ID NO: 82711 - DNA, 15 bp, Homo sapiens
ctgagacttggttca

SEQ ID NO: 82712 - DNA, 15 bp, Homo sapiens
actgagacttggttc

SEQ ID NO: 82713 - DNA, 15 bp, Homo sapiens
cactgagacttggtt

SEQ ID NO: 82714 - DNA, 15 bp, Homo sapiens
gcactgagacttggt

SEQ ID NO: 82715 - DNA, 15 bp, Homo sapiens
agcactgagacttgg

SEQ ID NO: 82716 - DNA, 15 bp, Homo sapiens
cagcactgagacttg

SEQ ID NO: 82717 - DNA, 15 bp, Homo sapiens
ccagcactgagactt

SEQ ID NO: 82718 - DNA, 15 bp, Homo sapiens
accagcactgagact

SEQ ID NO: 82719 - DNA, 15 bp, Homo sapiens
aaccagcactgagac

SEQ ID NO: 82720 - DNA, 15 bp, Homo sapiens
caaccagcactgaga

SEQ ID NO: 82721 - DNA, 15 bp, Homo sapiens
tcaaccagcactgag

SEQ ID NO: 82722 - DNA, 15 bp, Homo sapiens
gtcaaccagcactga

SEQ ID NO: 82723 - DNA, 15 bp, Homo sapiens
agtcaaccagcactg

SEQ ID NO: 82724 - DNA, 15 bp, Homo sapiens
cagtcaaccagcact

SEQ ID NO: 82725 - DNA, 15 bp, Homo sapiens
tcagtcaaccagcac

SEQ ID NO: 82726 - DNA, 15 bp, Homo sapiens
ctcagtcaaccagca

SEQ ID NO: 82727 - DNA, 15 bp, Homo sapiens
cctcagtcaaccagc

SEQ ID NO: 82728 - DNA, 15 bp, Homo sapiens
ccctcagtcaaccag

SEQ ID NO: 82729 - DNA, 15 bp, Homo sapiens
gccctcagtcaacca

SEQ ID NO: 82730 - DNA, 15 bp, Homo sapiens
tgccctcagtcaacc

SEQ ID NO: 82731 - DNA, 15 bp, Homo sapiens
ctgccctcagtcaac

SEQ ID NO: 82732 - DNA, 15 bp, Homo sapiens
actgccctcagtcaa

SEQ ID NO: 82733 - DNA, 15 bp, Homo sapiens
cactgccctcagtca

SEQ ID NO: 82734 - DNA, 15 bp, Homo sapiens
acactgccctcagtc

SEQ ID NO: 82735 - DNA, 15 bp, Homo sapiens
gacactgccctcagt

SEQ ID NO: 82736 - DNA, 15 bp, Homo sapiens
agacactgccctcag

SEQ ID NO: 82737 - DNA, 15 bp, Homo sapiens
cagacactgccctca

SEQ ID NO: 82738 - DNA, 15 bp, Homo sapiens
ccagacactgccctc

SEQ ID NO: 82739 - DNA, 15 bp, Homo sapiens
cccagacactgccct

SEQ ID NO: 82740 - DNA, 15 bp, Homo sapiens
tcccagacactgccc

SEQ ID NO: 82741 - DNA, 15 bp, Homo sapiens
gtcccagacactgcc

SEQ ID NO: 82742 - DNA, 15 bp, Homo sapiens
ggtcccagacactgc

SEQ ID NO: 82743 - DNA, 15 bp, Homo sapiens
aggtcccagacactg

SEQ ID NO: 82744 - DNA, 15 bp, Homo sapiens
caggtcccagacact

SEQ ID NO: 82745 - DNA, 15 bp, Homo sapiens
acaggtcccagacac

SEQ ID NO: 82746 - DNA, 15 bp, Homo sapiens
tacaggtcccagaca

SEQ ID NO: 82747 - DNA, 15 bp, Homo sapiens
ctacaggtcccagac

SEQ ID NO: 82748 - DNA, 15 bp, Homo sapiens
actacaggtcccaga

SEQ ID NO: 82749 - DNA, 15 bp, Homo sapiens
gactacaggtcccag

SEQ ID NO: 82750 - DNA, 15 bp, Homo sapiens
tgactacaggtccca

SEQ ID NO: 82751 - DNA, 15 bp, Homo sapiens
ctgactacaggtccc

SEQ ID NO: 82752 - DNA, 15 bp, Homo sapiens
cctgactacaggtcc

SEQ ID NO: 82753 - DNA, 15 bp, Homo sapiens
acctgactacaggtc

SEQ ID NO: 82754 - DNA, 15 bp, Homo sapiens
aacctgactacaggt

SEQ ID NO: 82755 - DNA, 15 bp, Homo sapiens
aaacctgactacagg

SEQ ID NO: 82756 - DNA, 15 bp, Homo sapiens
gaaacctgactacag

SEQ ID NO: 82757 - DNA, 15 bp, Homo sapiens
ggaaacctgactaca

SEQ ID NO: 82758 - DNA, 15 bp, Homo sapiens
cggaaacctgactac

SEQ ID NO: 82759 - DNA, 15 bp, Homo sapiens
ccggaaacctgacta

SEQ ID NO: 82760 - DNA, 15 bp, Homo sapiens
accggaaacctgact

SEQ ID NO: 82761 - DNA, 15 bp, Homo sapiens
gaccggaaacctgac

SEQ ID NO: 82762 - DNA, 15 bp, Homo sapiens
tgaccggaaacctga

SEQ ID NO: 82763 - DNA, 15 bp, Homo sapiens
gtgaccggaaacctg

SEQ ID NO: 82764 - DNA, 15 bp, Homo sapiens
tgtgaccggaaacct

SEQ ID NO: 82765 - DNA, 15 bp, Homo sapiens
gtgtgaccggaaacc

SEQ ID NO: 82766 - DNA, 15 bp, Homo sapiens
agtgtgaccggaaac

SEQ ID NO: 82767 - DNA, 15 bp, Homo sapiens
cagtgtgaccggaaa

SEQ ID NO: 82768 - DNA, 15 bp, Homo sapiens
acagtgtgaccggaa

SEQ ID NO: 82769 - DNA, 15 bp, Homo sapiens
cacagtgtgaccgga

SEQ ID NO: 82770 - DNA, 15 bp, Homo sapiens
ccacagtgtgaccgg

SEQ ID NO: 82771 - DNA, 15 bp, Homo sapiens
tccacagtgtgaccg

SEQ ID NO: 82772 - DNA, 15 bp, Homo sapiens
gtccacagtgtgacc

SEQ ID NO: 82773 - DNA, 15 bp, Homo sapiens
tgtccacagtgtgac

SEQ ID NO: 82774 - DNA, 15 bp, Homo sapiens
atgtccacagtgtga

SEQ ID NO: 82775 - DNA, 15 bp, Homo sapiens
catgtccacagtgtg

SEQ ID NO: 82776 - DNA, 15 bp, Homo sapiens
ccatgtccacagtgt

SEQ ID NO: 82777 - DNA, 15 bp, Homo sapiens
accatgtccacagtg

SEQ ID NO: 82778 - DNA, 15 bp, Homo sapiens
gaccatgtccacagt

SEQ ID NO: 82779 - DNA, 15 bp, Homo sapiens
tgaccatgtccacag

SEQ ID NO: 82780 - DNA, 15 bp, Homo sapiens
gtgaccatgtccaca

SEQ ID NO: 82781 - DNA, 15 bp, Homo sapiens
agtgaccatgtccac

SEQ ID NO: 82782 - DNA, 15 bp, Homo sapiens
cagtgaccatgtcca

SEQ ID NO: 82783 - DNA, 15 bp, Homo sapiens
acagtgaccatgtcc

SEQ ID NO: 82784 - DNA, 15 bp, Homo sapiens
aacagtgaccatgtc

SEQ ID NO: 82785 - DNA, 15 bp, Homo sapiens
caacagtgaccatgt

SEQ ID NO: 82786 - DNA, 15 bp, Homo sapiens
acaacagtgaccatg

SEQ ID NO: 82787 - DNA, 15 bp, Homo sapiens
gacaacagtgaccat

SEQ ID NO: 82788 - DNA, 15 bp, Homo sapiens
ggacaacagtgacca

SEQ ID NO: 82789 - DNA, 15 bp, Homo sapiens
aggacaacagtgacc

SEQ ID NO: 82790 - DNA, 15 bp, Homo sapiens
aaggacaacagtgac

SEQ ID NO: 82791 - DNA, 15 bp, Homo sapiens
caaggacaacagtga

SEQ ID NO: 82792 - DNA, 15 bp, Homo sapiens
tcaaggacaacagtg

SEQ ID NO: 82793 - DNA, 15 bp, Homo sapiens
atcaaggacaacagt

SEQ ID NO: 82794 - DNA, 15 bp, Homo sapiens
aatcaaggacaacag

SEQ ID NO: 82795 - DNA, 15 bp, Homo sapiens
aaatcaaggacaaca

SEQ ID NO: 82796 - DNA, 15 bp, Homo sapiens
caaatcaaggacaac

SEQ ID NO: 82797 - DNA, 15 bp, Homo sapiens
acaaatcaaggacaa

SEQ ID NO: 82798 - DNA, 15 bp, Homo sapiens
aacaaatcaaggaca

SEQ ID NO: 82799 - DNA, 15 bp, Homo sapiens
aaacaaatcaaggac

SEQ ID NO: 82800 - DNA, 15 bp, Homo sapiens
aaaacaaatcaagga

SEQ ID NO: 82801 - DNA, 15 bp, Homo sapiens
gaaaacaaatcaagg

SEQ ID NO: 82802 - DNA, 15 bp, Homo sapiens
agaaaacaaatcaag

SEQ ID NO: 82803 - DNA, 15 bp, Homo sapiens
cagaaaacaaatcaa

SEQ ID NO: 82804 - DNA, 15 bp, Homo sapiens
acagaaaacaaatca

SEQ ID NO: 82805 - DNA, 15 bp, Homo sapiens
aacagaaaacaaatc

SEQ ID NO: 82806 - DNA, 15 bp, Homo sapiens
aaacagaaaacaaat

SEQ ID NO: 82807 - DNA, 15 bp, Homo sapiens
gaaacagaaaacaaa

SEQ ID NO: 82808 - DNA, 15 bp, Homo sapiens
tgaaacagaaaacaa

SEQ ID NO: 82809 - DNA, 15 bp, Homo sapiens
ttgaaacagaaaaca

SEQ ID NO: 82810 - DNA, 15 bp, Homo sapiens
attgaaacagaaaac

SEQ ID NO: 82811 - DNA, 15 bp, Homo sapiens
aattgaaacagaaaa

SEQ ID NO: 82812 - DNA, 15 bp, Homo sapiens
gaattgaaacagaaa

SEQ ID NO: 82813 - DNA, 15 bp, Homo sapiens
agaattgaaacagaa

SEQ ID NO: 82814 - DNA, 15 bp, Homo sapiens
aagaattgaaacaga

SEQ ID NO: 82815 - DNA, 15 bp, Homo sapiens
caagaattgaaacag

SEQ ID NO: 82816 - DNA, 15 bp, Homo sapiens
acaagaattgaaaca

SEQ ID NO: 82817 - DNA, 15 bp, Homo sapiens
gacaagaattgaaac

SEQ ID NO: 82818 - DNA, 15 bp, Homo sapiens
agacaagaattgaaa

SEQ ID NO: 82819 - DNA, 15 bp, Homo sapiens
tagacaagaattgaa

SEQ ID NO: 82820 - DNA, 15 bp, Homo sapiens
atagacaagaattga

SEQ ID NO: 82821 - DNA, 15 bp, Homo sapiens
tatagacaagaattg

SEQ ID NO: 82822 - DNA, 15 bp, Homo sapiens
ttatagacaagaatt

SEQ ID NO: 82823 - DNA, 15 bp, Homo sapiens
tttatagacaagaat

SEQ ID NO: 82824 - DNA, 15 bp, Homo sapiens
ctttatagacaagaa

SEQ ID NO: 82825 - DNA, 15 bp, Homo sapiens
tctttatagacaaga

SEQ ID NO: 82826 - DNA, 15 bp, Homo sapiens
gtctttatagacaag

SEQ ID NO: 82827 - DNA, 15 bp, Homo sapiens
ggtctttatagacaa

SEQ ID NO: 82828 - DNA, 15 bp, Homo sapiens
gggtctttatagaca

SEQ ID NO: 82829 - DNA, 15 bp, Homo sapiens
cgggtctttatagac

SEQ ID NO: 82830 - DNA, 15 bp, Homo sapiens
acgggtctttataga

SEQ ID NO: 82831 - DNA, 15 bp, Homo sapiens
tacgggtctttatag

SEQ ID NO: 82832 - DNA, 15 bp, Homo sapiens
atacgggtctttata

SEQ ID NO: 82833 - DNA, 15 bp, Homo sapiens
catacgggtctttat

SEQ ID NO: 82834 - DNA, 15 bp, Homo sapiens
gcatacgggtcttta

SEQ ID NO: 82835 - DNA, 15 bp, Homo sapiens
agcatacgggtcttt

SEQ ID NO: 82836 - DNA, 15 bp, Homo sapiens
aagcatacgggtctt

SEQ ID NO: 82837 - DNA, 15 bp, Homo sapiens
caagcatacgggtct

SEQ ID NO: 82838 - DNA, 15 bp, Homo sapiens
ccaagcatacgggtc

SEQ ID NO: 82839 - DNA, 15 bp, Homo sapiens
accaagcatacgggt

SEQ ID NO: 82840 - DNA, 15 bp, Homo sapiens
aaccaagcatacggg

SEQ ID NO: 82841 - DNA, 15 bp, Homo sapiens
aaaccaagcatacgg

SEQ ID NO: 82842 - DNA, 15 bp, Homo sapiens
aaaaccaagcatacg

SEQ ID NO: 82843 - DNA, 15 bp, Homo sapiens
gaaaaccaagcatac

SEQ ID NO: 82844 - DNA, 15 bp, Homo sapiens
tgaaaaccaagcata

SEQ ID NO: 82845 - DNA, 15 bp, Homo sapiens
atgaaaaccaagcat

SEQ ID NO: 82846 - DNA, 15 bp, Homo sapiens
catgaaaaccaagca

SEQ ID NO: 82847 - DNA, 15 bp, Homo sapiens
acatgaaaaccaagc

SEQ ID NO: 82848 - DNA, 15 bp, Homo sapiens
cacatgaaaaccaag

SEQ ID NO: 82849 - DNA, 15 bp, Homo sapiens
tcacatgaaaaccaa

SEQ ID NO: 82850 - DNA, 15 bp, Homo sapiens
atcacatgaaaacca

SEQ ID NO: 82851 - DNA, 15 bp, Homo sapiens
catcacatgaaaacc

SEQ ID NO: 82852 - DNA, 15 bp, Homo sapiens
tcatcacatgaaaac

SEQ ID NO: 82853 - DNA, 15 bp, Homo sapiens
gtcatcacatgaaaa

SEQ ID NO: 82854 - DNA, 15 bp, Homo sapiens
tgtcatcacatgaaa

SEQ ID NO: 82855 - DNA, 15 bp, Homo sapiens
ctgtcatcacatgaa

SEQ ID NO: 82856 - DNA, 15 bp, Homo sapiens
tctgtcatcacatga

SEQ ID NO: 82857 - DNA, 15 bp, Homo sapiens
ctctgtcatcacatg

SEQ ID NO: 82858 - DNA, 15 bp, Homo sapiens
tctctgtcatcacat

SEQ ID NO: 82859 - DNA, 15 bp, Homo sapiens
ttctctgtcatcaca

SEQ ID NO: 82860 - DNA, 15 bp, Homo sapiens
tttctctgtcatcac

SEQ ID NO: 82861 - DNA, 15 bp, Homo sapiens
ttttctctgtcatca

SEQ ID NO: 82862 - DNA, 15 bp, Homo sapiens
gttttctctgtcatc

SEQ ID NO: 82863 - DNA, 15 bp, Homo sapiens
tgttttctctgtcat

SEQ ID NO: 82864 - DNA, 15 bp, Homo sapiens
ttgttttctctgtca

SEQ ID NO: 82865 - DNA, 15 bp, Homo sapiens
tttgttttctctgtc

SEQ ID NO: 82866 - DNA, 15 bp, Homo sapiens
ttttgttttctctgt

SEQ ID NO: 82867 - DNA, 15 bp, Homo sapiens
gttttgttttctctg

SEQ ID NO: 82868 - DNA, 15 bp, Homo sapiens
tgttttgttttctct

SEQ ID NO: 82869 - DNA, 15 bp, Homo sapiens
gtgttttgttttctc

SEQ ID NO: 82870 - DNA, 15 bp, Homo sapiens
agtgttttgttttct

SEQ ID NO: 82871 - DNA, 15 bp, Homo sapiens
cagtgttttgttttc

SEQ ID NO: 82872 - DNA, 15 bp, Homo sapiens
gcagtgttttgtttt

SEQ ID NO: 82873 - DNA, 15 bp, Homo sapiens
tgcagtgttttgttt

SEQ ID NO: 82874 - DNA, 15 bp, Homo sapiens
ctgcagtgttttgtt

SEQ ID NO: 82875 - DNA, 15 bp, Homo sapiens
tctgcagtgttttgt

SEQ ID NO: 82876 - DNA, 15 bp, Homo sapiens
atctgcagtgttttg

SEQ ID NO: 82877 - DNA, 15 bp, Homo sapiens
tatctgcagtgtttt

SEQ ID NO: 82878 - DNA, 15 bp, Homo sapiens
atatctgcagtgttt

SEQ ID NO: 82879 - DNA, 15 bp, Homo sapiens
gatatctgcagtgtt

SEQ ID NO: 82880 - DNA, 15 bp, Homo sapiens
ggatatctgcagtgt

SEQ ID NO: 82881 - DNA, 15 bp, Homo sapiens
aggatatctgcagtg

SEQ ID NO: 82882 - DNA, 15 bp, Homo sapiens
aaggatatctgcagt

SEQ ID NO: 82883 - DNA, 15 bp, Homo sapiens
gaaggatatctgcag

SEQ ID NO: 82884 - DNA, 15 bp, Homo sapiens
tgaaggatatctgca

SEQ ID NO: 82885 - DNA, 15 bp, Homo sapiens
ctgaaggatatctgc

SEQ ID NO: 82886 - DNA, 15 bp, Homo sapiens
cctgaaggatatctg

SEQ ID NO: 82887 - DNA, 15 bp, Homo sapiens
tcctgaaggatatct

SEQ ID NO: 82888 - DNA, 15 bp, Homo sapiens
gtcctgaaggatatc

SEQ ID NO: 82889 - DNA, 15 bp, Homo sapiens
ggtcctgaaggatat

SEQ ID NO: 82890 - DNA, 15 bp, Homo sapiens
aggtcctgaaggata

SEQ ID NO: 82891 - DNA, 15 bp, Homo sapiens
caggtcctgaaggat

SEQ ID NO: 82892 - DNA, 15 bp, Homo sapiens
tcaggtcctgaagga

SEQ ID NO: 82893 - DNA, 15 bp, Homo sapiens
gtcaggtcctgaagg

SEQ ID NO: 82894 - DNA, 15 bp, Homo sapiens
tgtcaggtcctgaag

SEQ ID NO: 82895 - DNA, 15 bp, Homo sapiens
ctgtcaggtcctgaa

SEQ ID NO: 82896 - DNA, 15 bp, Homo sapiens
cctgtcaggtcctga

SEQ ID NO: 82897 - DNA, 15 bp, Homo sapiens
tcctgtcaggtcctg

SEQ ID NO: 82898 - DNA, 15 bp, Homo sapiens
ttcctgtcaggtcct

SEQ ID NO: 82899 - DNA, 15 bp, Homo sapiens
cttcctgtcaggtcc

SEQ ID NO: 82900 - DNA, 15 bp, Homo sapiens
tcttcctgtcaggtc

SEQ ID NO: 82901 - DNA, 15 bp, Homo sapiens
ttcttcctgtcaggt

SEQ ID NO: 82902 - DNA, 15 bp, Homo sapiens
tttcttcctgtcagg

SEQ ID NO: 82903 - DNA, 15 bp, Homo sapiens
gtttcttcctgtcag

SEQ ID NO: 82904 - DNA, 15 bp, Homo sapiens
tgtttcttcctgtca

SEQ ID NO: 82905 - DNA, 15 bp, Homo sapiens
atgtttcttcctgtc

SEQ ID NO: 82906 - DNA, 15 bp, Homo sapiens
aatgtttcttcctgt

SEQ ID NO: 82907 - DNA, 15 bp, Homo sapiens
aaatgtttcttcctg

SEQ ID NO: 82908 - DNA, 15 bp, Homo sapiens
gaaatgtttcttcct

SEQ ID NO: 82909 - DNA, 15 bp, Homo sapiens
cgaaatgtttcttcc

SEQ ID NO: 82910 - DNA, 15 bp, Homo sapiens
ccgaaatgtttcttc

SEQ ID NO: 82911 - DNA, 15 bp, Homo sapiens
tccgaaatgtttctt

SEQ ID NO: 82912 - DNA, 15 bp, Homo sapiens
atccgaaatgtttct

SEQ ID NO: 82913 - DNA, 15 bp, Homo sapiens
aatccgaaatgtttc

SEQ ID NO: 82914 - DNA, 15 bp, Homo sapiens
taatccgaaatgttt

SEQ ID NO: 82915 - DNA, 15 bp, Homo sapiens
ataatccgaaatgtt

SEQ ID NO: 82916 - DNA, 15 bp, Homo sapiens
gataatccgaaatgt

SEQ ID NO: 82917 - DNA, 15 bp, Homo sapiens
agataatccgaaatg

SEQ ID NO: 82918 - DNA, 15 bp, Homo sapiens
cagataatccgaaat

SEQ ID NO: 82919 - DNA, 15 bp, Homo sapiens
ccagataatccgaaa

SEQ ID NO: 82920 - DNA, 15 bp, Homo sapiens
accagataatccgaa

SEQ ID NO: 82921 - DNA, 15 bp, Homo sapiens
caccagataatccga

SEQ ID NO: 82922 - DNA, 15 bp, Homo sapiens
tcaccagataatccg

SEQ ID NO: 82923 - DNA, 15 bp, Homo sapiens
ttcaccagataatcc

SEQ ID NO: 82924 - DNA, 15 bp, Homo sapiens
cttcaccagataatc

SEQ ID NO: 82925 - DNA, 15 bp, Homo sapiens
tcttcaccagataat

SEQ ID NO: 82926 - DNA, 15 bp, Homo sapiens
gtcttcaccagataa

SEQ ID NO: 82927 - DNA, 15 bp, Homo sapiens
cgtcttcaccagata

SEQ ID NO: 82928 - DNA, 15 bp, Homo sapiens
acgtcttcaccagat

SEQ ID NO: 82929 - DNA, 15 bp, Homo sapiens
tacgtcttcaccaga

SEQ ID NO: 82930 - DNA, 15 bp, Homo sapiens
atacgtcttcaccag

SEQ ID NO: 82931 - DNA, 15 bp, Homo sapiens
catacgtcttcacca

SEQ ID NO: 82932 - DNA, 15 bp, Homo sapiens
acatacgtcttcacc

SEQ ID NO: 82933 - DNA, 15 bp, Homo sapiens
cacatacgtcttcac

SEQ ID NO: 82934 - DNA, 15 bp, Homo sapiens
gcacatacgtcttca

SEQ ID NO: 82935 - DNA, 15 bp, Homo sapiens
tgcacatacgtcttc

SEQ ID NO: 82936 - DNA, 15 bp, Homo sapiens
ctgcacatacgtctt

SEQ ID NO: 82937 - DNA, 15 bp, Homo sapiens
tctgcacatacgtct

SEQ ID NO: 82938 - DNA, 15 bp, Homo sapiens
atctgcacatacgtc

SEQ ID NO: 82939 - DNA, 15 bp, Homo sapiens
gatctgcacatacgt

SEQ ID NO: 82940 - DNA, 15 bp, Homo sapiens
tgatctgcacatacg

SEQ ID NO: 82941 - DNA, 15 bp, Homo sapiens
atgatctgcacatac

SEQ ID NO: 82942 - DNA, 15 bp, Homo sapiens
tatgatctgcacata

SEQ ID NO: 82943 - DNA, 15 bp, Homo sapiens
ctatgatctgcacat

SEQ ID NO: 82944 - DNA, 15 bp, Homo sapiens
gctatgatctgcaca

SEQ ID NO: 82945 - DNA, 15 bp, Homo sapiens
ggctatgatctgcac

SEQ ID NO: 82946 - DNA, 15 bp, Homo sapiens
tggctatgatctgca

SEQ ID NO: 82947 - DNA, 15 bp, Homo sapiens
ttggctatgatctgc

SEQ ID NO: 82948 - DNA, 15 bp, Homo sapiens
tttggctatgatctg

SEQ ID NO: 82949 - DNA, 15 bp, Homo sapiens
ttttggctatgatct

SEQ ID NO: 82950 - DNA, 15 bp, Homo sapiens
cttttggctatgatc

SEQ ID NO: 82951 - DNA, 15 bp, Homo sapiens
ccttttggctatgat

SEQ ID NO: 82952 - DNA, 15 bp, Homo sapiens
accttttggctatga

SEQ ID NO: 82953 - DNA, 15 bp, Homo sapiens
caccttttggctatg

SEQ ID NO: 82954 - DNA, 15 bp, Homo sapiens
tcaccttttggctat

SEQ ID NO: 82955 - DNA, 15 bp, Homo sapiens
gtcaccttttggcta

SEQ ID NO: 82956 - DNA, 15 bp, Homo sapiens
agtcaccttttggct

SEQ ID NO: 82957 - DNA, 15 bp, Homo sapiens
aagtcaccttttggc

SEQ ID NO: 82958 - DNA, 15 bp, Homo sapiens
aaagtcaccttttgg

SEQ ID NO: 82959 - DNA, 15 bp, Homo sapiens
aaaagtcaccttttg

SEQ ID NO: 82960 - DNA, 15 bp, Homo sapiens
aaaaagtcacctttt

SEQ ID NO: 82961 - DNA, 15 bp, Homo sapiens
taaaaagtcaccttt

SEQ ID NO: 82962 - DNA, 15 bp, Homo sapiens
gtaaaaagtcacctt

SEQ ID NO: 82963 - DNA, 15 bp, Homo sapiens
agtaaaaagtcacct

SEQ ID NO: 82964 - DNA, 15 bp, Homo sapiens
tagtaaaaagtcacc

SEQ ID NO: 82965 - DNA, 15 bp, Homo sapiens
ttagtaaaaagtcac

SEQ ID NO: 82966 - DNA, 15 bp, Homo sapiens
tttagtaaaaagtca

SEQ ID NO: 82967 - DNA, 15 bp, Homo sapiens
gtttagtaaaaagtc

SEQ ID NO: 82968 - DNA, 15 bp, Homo sapiens
agtttagtaaaaagt

SEQ ID NO: 82969 - DNA, 15 bp, Homo sapiens
aagtttagtaaaaag

SEQ ID NO: 82970 - DNA, 15 bp, Homo sapiens
caagtttagtaaaaa

SEQ ID NO: 82971 - DNA, 15 bp, Homo sapiens
ccaagtttagtaaaa

SEQ ID NO: 82972 - DNA, 15 bp, Homo sapiens
gccaagtttagtaaa

SEQ ID NO: 82973 - DNA, 15 bp, Homo sapiens
ggccaagtttagtaa

SEQ ID NO: 82974 - DNA, 15 bp, Homo sapiens
gggccaagtttagta

SEQ ID NO: 82975 - DNA, 15 bp, Homo sapiens
ggggccaagtttagt

SEQ ID NO: 82976 - DNA, 15 bp, Homo sapiens
aggggccaagtttag

SEQ ID NO: 82977 - DNA, 15 bp, Homo sapiens
caggggccaagttta

SEQ ID NO: 82978 - DNA, 15 bp, Homo sapiens
gcaggggccaagttt

SEQ ID NO: 82979 - DNA, 15 bp, Homo sapiens
ggcaggggccaagtt

SEQ ID NO: 82980 - DNA, 15 bp, Homo sapiens
cggcaggggccaagt

SEQ ID NO: 82981 - DNA, 15 bp, Homo sapiens
acggcaggggccaag

SEQ ID NO: 82982 - DNA, 15 bp, Homo sapiens
tacggcaggggccaa

SEQ ID NO: 82983 - DNA, 15 bp, Homo sapiens
atacggcaggggcca

SEQ ID NO: 82984 - DNA, 15 bp, Homo sapiens
aatacggcaggggcc

SEQ ID NO: 82985 - DNA, 15 bp, Homo sapiens
taatacggcaggggc

SEQ ID NO: 82986 - DNA, 15 bp, Homo sapiens
ataatacggcagggg

SEQ ID NO: 82987 - DNA, 15 bp, Homo sapiens
aataatacggcaggg

SEQ ID NO: 82988 - DNA, 15 bp, Homo sapiens
taataatacggcagg

SEQ ID NO: 82989 - DNA, 15 bp, Homo sapiens
gtaataatacggcag

SEQ ID NO: 82990 - DNA, 15 bp, Homo sapiens
agtaataatacggca

SEQ ID NO: 82991 - DNA, 15 bp, Homo sapiens
tagtaataatacggc

SEQ ID NO: 82992 - DNA, 15 bp, Homo sapiens
ttagtaataatacgg

SEQ ID NO: 82993 - DNA, 15 bp, Homo sapiens
attagtaataatacg

SEQ ID NO: 82994 - DNA, 15 bp, Homo sapiens
aattagtaataatac

SEQ ID NO: 82995 - DNA, 15 bp, Homo sapiens
taattagtaataata

SEQ ID NO: 82996 - DNA, 15 bp, Homo sapiens
ctaattagtaataat

SEQ ID NO: 82997 - DNA, 15 bp, Homo sapiens
tctaattagtaataa

SEQ ID NO: 82998 - DNA, 15 bp, Homo sapiens
ctctaattagtaata

SEQ ID NO: 82999 - DNA, 15 bp, Homo sapiens
cctctaattagtaat

SEQ ID NO: 83000 - DNA, 15 bp, Homo sapiens
tcctctaattagtaa

SEQ ID NO: 83001 - DNA, 15 bp, Homo sapiens
ttcctctaattagta

SEQ ID NO: 83002 - DNA, 15 bp, Homo sapiens
attcctctaattagt

SEQ ID NO: 83003 - DNA, 15 bp, Homo sapiens
aattcctctaattag

SEQ ID NO: 83004 - DNA, 15 bp, Homo sapiens
taattcctctaatta

SEQ ID NO: 83005 - DNA, 15 bp, Homo sapiens
ttaattcctctaatt

SEQ ID NO: 83006 - DNA, 15 bp, Homo sapiens
tttaattcctctaat

SEQ ID NO: 83007 - DNA, 15 bp, Homo sapiens
ctttaattcctctaa

SEQ ID NO: 83008 - DNA, 15 bp, Homo sapiens
tctttaattcctcta

SEQ ID NO: 83009 - DNA, 15 bp, Homo sapiens
gtctttaattcctct

SEQ ID NO: 83010 - DNA, 15 bp, Homo sapiens
ggtctttaattcctc

SEQ ID NO: 83011 - DNA, 15 bp, Homo sapiens
aggtctttaattcct

SEQ ID NO: 83012 - DNA, 15 bp, Homo sapiens
taggtctttaattcc

SEQ ID NO: 83013 - DNA, 15 bp, Homo sapiens
gtaggtctttaattc

SEQ ID NO: 83014 - DNA, 15 bp, Homo sapiens
tgtaggtctttaatt

SEQ ID NO: 83015 - DNA, 15 bp, Homo sapiens
ttgtaggtctttaat

SEQ ID NO: 83016 - DNA, 15 bp, Homo sapiens
tttgtaggtctttaa

SEQ ID NO: 83017 - DNA, 15 bp, Homo sapiens
atttgtaggtcttta

SEQ ID NO: 83018 - DNA, 15 bp, Homo sapiens
tatttgtaggtcttt

SEQ ID NO: 83019 - DNA, 15 bp, Homo sapiens
ttatttgtaggtctt

SEQ ID NO: 83020 - DNA, 15 bp, Homo sapiens
gttatttgtaggtct

SEQ ID NO: 83021 - DNA, 15 bp, Homo sapiens
tgttatttgtaggtc

SEQ ID NO: 83022 - DNA, 15 bp, Homo sapiens
ctgttatttgtaggt

SEQ ID NO: 83023 - DNA, 15 bp, Homo sapiens
tctgttatttgtagg

SEQ ID NO: 83024 - DNA, 15 bp, Homo sapiens
gtctgttatttgtag

SEQ ID NO: 83025 - DNA, 15 bp, Homo sapiens
agtctgttatttgta

SEQ ID NO: 83026 - DNA, 15 bp, Homo sapiens
cagtctgttatttgt

SEQ ID NO: 83027 - DNA, 15 bp, Homo sapiens
tcagtctgttatttg

SEQ ID NO: 83028 - DNA, 15 bp, Homo sapiens
ttcagtctgttattt

SEQ ID NO: 83029 - DNA, 15 bp, Homo sapiens
tttcagtctgttatt

SEQ ID NO: 83030 - DNA, 15 bp, Homo sapiens
gtttcagtctgttat

SEQ ID NO: 83031 - DNA, 15 bp, Homo sapiens
tgtttcagtctgtta

SEQ ID NO: 83032 - DNA, 15 bp, Homo sapiens
ctgtttcagtctgtt

SEQ ID NO: 83033 - DNA, 15 bp, Homo sapiens
actgtttcagtctgt

SEQ ID NO: 83034 - DNA, 15 bp, Homo sapiens
cactgtttcagtctg

SEQ ID NO: 83035 - DNA, 15 bp, Homo sapiens
ccactgtttcagtct

SEQ ID NO: 83036 - DNA, 15 bp, Homo sapiens
cccactgtttcagtc

SEQ ID NO: 83037 - DNA, 15 bp, Homo sapiens
ccccactgtttcagt

SEQ ID NO: 83038 - DNA, 15 bp, Homo sapiens
cccccactgtttcag

SEQ ID NO: 83039 - DNA, 15 bp, Homo sapiens
tcccccactgtttca

SEQ ID NO: 83040 - DNA, 15 bp, Homo sapiens
ttcccccactgtttc

SEQ ID NO: 83041 - DNA, 15 bp, Homo sapiens
tttcccccactgttt

SEQ ID NO: 83042 - DNA, 15 bp, Homo sapiens
atttcccccactgtt

SEQ ID NO: 83043 - DNA, 15 bp, Homo sapiens
catttcccccactgt

SEQ ID NO: 83044 - DNA, 15 bp, Homo sapiens
gcatttcccccactg

SEQ ID NO: 83045 - DNA, 15 bp, Homo sapiens
ggcatttcccccact

SEQ ID NO: 83046 - DNA, 15 bp, Homo sapiens
tggcatttcccccac

SEQ ID NO: 83047 - DNA, 15 bp, Homo sapiens
ctggcatttccccca

SEQ ID NO: 83048 - DNA, 15 bp, Homo sapiens
tctggcatttccccc

SEQ ID NO: 83049 - DNA, 15 bp, Homo sapiens
atctggcatttcccc

SEQ ID NO: 83050 - DNA, 15 bp, Homo sapiens
aatctggcatttccc

SEQ ID NO: 83051 - DNA, 15 bp, Homo sapiens
taatctggcatttcc

SEQ ID NO: 83052 - DNA, 15 bp, Homo sapiens
ataatctggcatttc

SEQ ID NO: 83053 - DNA, 15 bp, Homo sapiens
cataatctggcattt

SEQ ID NO: 83054 - DNA, 15 bp, Homo sapiens
ccataatctggcatt

SEQ ID NO: 83055 - DNA, 15 bp, Homo sapiens
gccataatctggcat

SEQ ID NO: 83056 - DNA, 15 bp, Homo sapiens
ggccataatctggca

SEQ ID NO: 83057 - DNA, 15 bp, Homo sapiens
aggccataatctggc

SEQ ID NO: 83058 - DNA, 15 bp, Homo sapiens
caggccataatctgg

SEQ ID NO: 83059 - DNA, 15 bp, Homo sapiens
tcaggccataatctg

SEQ ID NO: 83060 - DNA, 15 bp, Homo sapiens
atcaggccataatct

SEQ ID NO: 83061 - DNA, 15 bp, Homo sapiens
aatcaggccataatc

SEQ ID NO: 83062 - DNA, 15 bp, Homo sapiens
gaatcaggccataat

SEQ ID NO: 83063 - DNA, 15 bp, Homo sapiens
agaatcaggccataa

SEQ ID NO: 83064 - DNA, 15 bp, Homo sapiens
cagaatcaggccata

SEQ ID NO: 83065 - DNA, 15 bp, Homo sapiens
acagaatcaggccat

SEQ ID NO: 83066 - DNA, 15 bp, Homo sapiens
gacagaatcaggcca

SEQ ID NO: 83067 - DNA, 15 bp, Homo sapiens
agacagaatcaggcc

SEQ ID NO: 83068 - DNA, 15 bp, Homo sapiens
tagacagaatcaggc

SEQ ID NO: 83069 - DNA, 15 bp, Homo sapiens
atagacagaatcagg

SEQ ID NO: 83070 - DNA, 15 bp, Homo sapiens
aatagacagaatcag

SEQ ID NO: 83071 - DNA, 15 bp, Homo sapiens
caatagacagaatca

SEQ ID NO: 83072 - DNA, 15 bp, Homo sapiens
ccaatagacagaatc

SEQ ID NO: 83073 - DNA, 15 bp, Homo sapiens
tccaatagacagaat

SEQ ID NO: 83074 - DNA, 15 bp, Homo sapiens
ttccaatagacagaa

SEQ ID NO: 83075 - DNA, 15 bp, Homo sapiens
cttccaatagacaga

SEQ ID NO: 83076 - DNA, 15 bp, Homo sapiens
acttccaatagacag

SEQ ID NO: 83077 - DNA, 15 bp, Homo sapiens
aacttccaatagaca

SEQ ID NO: 83078 - DNA, 15 bp, Homo sapiens
aaacttccaatagac

SEQ ID NO: 83079 - DNA, 15 bp, Homo sapiens
taaacttccaataga

SEQ ID NO: 83080 - DNA, 15 bp, Homo sapiens
ctaaacttccaatag

SEQ ID NO: 83081 - DNA, 15 bp, Homo sapiens
cctaaacttccaata

SEQ ID NO: 83082 - DNA, 15 bp, Homo sapiens
tcctaaacttccaat

SEQ ID NO: 83083 - DNA, 15 bp, Homo sapiens
atcctaaacttccaa

SEQ ID NO: 83084 - DNA, 15 bp, Homo sapiens
tatcctaaacttcca

SEQ ID NO: 83085 - DNA, 15 bp, Homo sapiens
atatcctaaacttcc

SEQ ID NO: 83086 - DNA, 15 bp, Homo sapiens
aatatcctaaacttc

SEQ ID NO: 83087 - DNA, 15 bp, Homo sapiens
taatatcctaaactt

SEQ ID NO: 83088 - DNA, 15 bp, Homo sapiens
ataatatcctaaact

SEQ ID NO: 83089 - DNA, 15 bp, Homo sapiens
gataatatcctaaac

SEQ ID NO: 83090 - DNA, 15 bp, Homo sapiens
ggataatatcctaaa

SEQ ID NO: 83091 - DNA, 15 bp, Homo sapiens
gggataatatcctaa

SEQ ID NO: 83092 - DNA, 15 bp, Homo sapiens
tgggataatatccta

SEQ ID NO: 83093 - DNA, 15 bp, Homo sapiens
ttgggataatatcct

SEQ ID NO: 83094 - DNA, 15 bp, Homo sapiens
tttgggataatatcc

SEQ ID NO: 83095 - DNA, 15 bp, Homo sapiens
gtttgggataatatc

SEQ ID NO: 83096 - DNA, 15 bp, Homo sapiens
agtttgggataatat

SEQ ID NO: 83097 - DNA, 15 bp, Homo sapiens
tagtttgggataata

SEQ ID NO: 83098 - DNA, 15 bp, Homo sapiens
ctagtttgggataat

SEQ ID NO: 83099 - DNA, 15 bp, Homo sapiens
tctagtttgggataa

SEQ ID NO: 83100 - DNA, 15 bp, Homo sapiens
ttctagtttgggata

SEQ ID NO: 83101 - DNA, 15 bp, Homo sapiens
tttctagtttgggat

SEQ ID NO: 83102 - DNA, 15 bp, Homo sapiens
ttttctagtttggga

SEQ ID NO: 83103 - DNA, 15 bp, Homo sapiens
cttttctagtttggg

SEQ ID NO: 83104 - DNA, 15 bp, Homo sapiens
tcttttctagtttgg

SEQ ID NO: 83105 - DNA, 15 bp, Homo sapiens
atcttttctagtttg

SEQ ID NO: 83106 - DNA, 15 bp, Homo sapiens
catcttttctagttt

SEQ ID NO: 83107 - DNA, 15 bp, Homo sapiens
tcatcttttctagtt

SEQ ID NO: 83108 - DNA, 15 bp, Homo sapiens
gtcatcttttctagt

SEQ ID NO: 83109 - DNA, 15 bp, Homo sapiens
cgtcatcttttctag

SEQ ID NO: 83110 - DNA, 15 bp, Homo sapiens
tcgtcatcttttcta

SEQ ID NO: 83111 - DNA, 15 bp, Homo sapiens
ctcgtcatcttttct

SEQ ID NO: 83112 - DNA, 15 bp, Homo sapiens
tctcgtcatcttttc

SEQ ID NO: 83113 - DNA, 15 bp, Homo sapiens
ctctcgtcatctttt

SEQ ID NO: 83114 - DNA, 15 bp, Homo sapiens
cctctcgtcatcttt

SEQ ID NO: 83115 - DNA, 15 bp, Homo sapiens
ccctctcgtcatctt

SEQ ID NO: 83116 - DNA, 15 bp, Homo sapiens
tccctctcgtcatct

SEQ ID NO: 83117 - DNA, 15 bp, Homo sapiens
gtccctctcgtcatc

SEQ ID NO: 83118 - DNA, 15 bp, Homo sapiens
agtccctctcgtcat

SEQ ID NO: 83119 - DNA, 15 bp, Homo sapiens
cagtccctctcgtca

SEQ ID NO: 83120 - DNA, 15 bp, Homo sapiens
acagtccctctcgtc

SEQ ID NO: 83121 - DNA, 15 bp, Homo sapiens
cacagtccctctcgt

SEQ ID NO: 83122 - DNA, 15 bp, Homo sapiens
tcacagtccctctcg

SEQ ID NO: 83123 - DNA, 15 bp, Homo sapiens
ttcacagtccctctc

SEQ ID NO: 83124 - DNA, 15 bp, Homo sapiens
gttcacagtccctct

SEQ ID NO: 83125 - DNA, 15 bp, Homo sapiens
tgttcacagtccctc

SEQ ID NO: 83126 - DNA, 15 bp, Homo sapiens
atgttcacagtccct

SEQ ID NO: 83127 - DNA, 15 bp, Homo sapiens
aatgttcacagtccc

SEQ ID NO: 83128 - DNA, 15 bp, Homo sapiens
gaatgttcacagtcc

SEQ ID NO: 83129 - DNA, 15 bp, Homo sapiens
tgaatgttcacagtc

SEQ ID NO: 83130 - DNA, 15 bp, Homo sapiens
ctgaatgttcacagt

SEQ ID NO: 83131 - DNA, 15 bp, Homo sapiens
actgaatgttcacag

SEQ ID NO: 83132 - DNA, 15 bp, Homo sapiens
aactgaatgttcaca

SEQ ID NO: 83133 - DNA, 15 bp, Homo sapiens
caactgaatgttcac

SEQ ID NO: 83134 - DNA, 15 bp, Homo sapiens
acaactgaatgttca

SEQ ID NO: 83135 - DNA, 15 bp, Homo sapiens
gacaactgaatgttc

SEQ ID NO: 83136 - DNA, 15 bp, Homo sapiens
tgacaactgaatgtt

SEQ ID NO: 83137 - DNA, 15 bp, Homo sapiens
ctgacaactgaatgt

SEQ ID NO: 83138 - DNA, 15 bp, Homo sapiens
gctgacaactgaatg

SEQ ID NO: 83139 - DNA, 15 bp, Homo sapiens
agctgacaactgaat

SEQ ID NO: 83140 - DNA, 15 bp, Homo sapiens
aagctgacaactgaa

SEQ ID NO: 83141 - DNA, 15 bp, Homo sapiens
gaagctgacaactga

SEQ ID NO: 83142 - DNA, 15 bp, Homo sapiens
tgaagctgacaactg

SEQ ID NO: 83143 - DNA, 15 bp, Homo sapiens
ttgaagctgacaact

SEQ ID NO: 83144 - DNA, 15 bp, Homo sapiens
cttgaagctgacaac

SEQ ID NO: 83145 - DNA, 15 bp, Homo sapiens
ccttgaagctgacaa

SEQ ID NO: 83146 - DNA, 15 bp, Homo sapiens
gccttgaagctgaca

SEQ ID NO: 83147 - DNA, 15 bp, Homo sapiens
agccttgaagctgac

SEQ ID NO: 83148 - DNA, 15 bp, Homo sapiens
cagccttgaagctga

SEQ ID NO: 83149 - DNA, 15 bp, Homo sapiens
tcagccttgaagctg

SEQ ID NO: 83150 - DNA, 15 bp, Homo sapiens
ctcagccttgaagct

SEQ ID NO: 83151 - DNA, 15 bp, Homo sapiens
cctcagccttgaagc

SEQ ID NO: 83152 - DNA, 15 bp, Homo sapiens
gcctcagccttgaag

SEQ ID NO: 83153 - DNA, 15 bp, Homo sapiens
tgcctcagccttgaa

SEQ ID NO: 83154 - DNA, 15 bp, Homo sapiens
ctgcctcagccttga

SEQ ID NO: 83155 - DNA, 15 bp, Homo sapiens
gctgcctcagccttg

SEQ ID NO: 83156 - DNA, 15 bp, Homo sapiens
ggctgcctcagcctt

SEQ ID NO: 83157 - DNA, 15 bp, Homo sapiens
aggctgcctcagcct

SEQ ID NO: 83158 - DNA, 15 bp, Homo sapiens
caggctgcctcagcc

SEQ ID NO: 83159 - DNA, 15 bp, Homo sapiens
ccaggctgcctcagc

SEQ ID NO: 83160 - DNA, 15 bp, Homo sapiens
accaggctgcctcag

SEQ ID NO: 83161 - DNA, 15 bp, Homo sapiens
gaccaggctgcctca

SEQ ID NO: 83162 - DNA, 15 bp, Homo sapiens
agaccaggctgcctc

SEQ ID NO: 83163 - DNA, 15 bp, Homo sapiens
tagaccaggctgcct

SEQ ID NO: 83164 - DNA, 15 bp, Homo sapiens
ctagaccaggctgcc

SEQ ID NO: 83165 - DNA, 15 bp, Homo sapiens
tctagaccaggctgc

SEQ ID NO: 83166 - DNA, 15 bp, Homo sapiens
ttctagaccaggctg

SEQ ID NO: 83167 - DNA, 15 bp, Homo sapiens
attctagaccaggct

SEQ ID NO: 83168 - DNA, 15 bp, Homo sapiens
cattctagaccaggc

SEQ ID NO: 83169 - DNA, 15 bp, Homo sapiens
tcattctagaccagg

SEQ ID NO: 83170 - DNA, 15 bp, Homo sapiens
ttcattctagaccag

SEQ ID NO: 83171 - DNA, 15 bp, Homo sapiens
tttcattctagacca

SEQ ID NO: 83172 - DNA, 15 bp, Homo sapiens
ttttcattctagacc

SEQ ID NO: 83173 - DNA, 15 bp, Homo sapiens
attttcattctagac

SEQ ID NO: 83174 - DNA, 15 bp, Homo sapiens
tattttcattctaga

SEQ ID NO: 83175 - DNA, 15 bp, Homo sapiens
ctattttcattctag

SEQ ID NO: 83176 - DNA, 15 bp, Homo sapiens
tctattttcattcta

SEQ ID NO: 83177 - DNA, 15 bp, Homo sapiens
ttctattttcattct

SEQ ID NO: 83178 - DNA, 15 bp, Homo sapiens
tttctattttcattc

SEQ ID NO: 83179 - DNA, 15 bp, Homo sapiens
atttctattttcatt

SEQ ID NO: 83180 - DNA, 15 bp, Homo sapiens
catttctattttcat

SEQ ID NO: 83181 - DNA, 15 bp, Homo sapiens
ccatttctattttca

SEQ ID NO: 83182 - DNA, 15 bp, Homo sapiens
tccatttctattttc

SEQ ID NO: 83183 - DNA, 15 bp, Homo sapiens
atccatttctatttt

SEQ ID NO: 83184 - DNA, 15 bp, Homo sapiens
aatccatttctattt

SEQ ID NO: 83185 - DNA, 15 bp, Homo sapiens
gaatccatttctatt

SEQ ID NO: 83186 - DNA, 15 bp, Homo sapiens
tgaatccatttctat

SEQ ID NO: 83187 - DNA, 15 bp, Homo sapiens
ttgaatccatttcta

SEQ ID NO: 83188 - DNA, 15 bp, Homo sapiens
gttgaatccatttct

SEQ ID NO: 83189 - DNA, 15 bp, Homo sapiens
cgttgaatccatttc

SEQ ID NO: 83190 - DNA, 15 bp, Homo sapiens
acgttgaatccattt

SEQ ID NO: 83191 - DNA, 15 bp, Homo sapiens
gacgttgaatccatt

SEQ ID NO: 83192 - DNA, 15 bp, Homo sapiens
tgacgttgaatccat

SEQ ID NO: 83193 - DNA, 15 bp, Homo sapiens
ttgacgttgaatcca

SEQ ID NO: 83194 - DNA, 15 bp, Homo sapiens
tttgacgttgaatcc

SEQ ID NO: 83195 - DNA, 15 bp, Homo sapiens
atttgacgttgaatc

SEQ ID NO: 83196 - DNA, 15 bp, Homo sapiens
aatttgacgttgaat

SEQ ID NO: 83197 - DNA, 15 bp, Homo sapiens
aaatttgacgttgaa

SEQ ID NO: 83198 - DNA, 15 bp, Homo sapiens
aaaatttgacgttga

SEQ ID NO: 83199 - DNA, 15 bp, Homo sapiens
caaaatttgacgttg

SEQ ID NO: 83200 - DNA, 15 bp, Homo sapiens
gcaaaatttgacgtt

SEQ ID NO: 83201 - DNA, 15 bp, Homo sapiens
ggcaaaatttgacgt

SEQ ID NO: 83202 - DNA, 15 bp, Homo sapiens
tggcaaaatttgacg

SEQ ID NO: 83203 - DNA, 15 bp, Homo sapiens
gtggcaaaatttgac

SEQ ID NO: 83204 - DNA, 15 bp, Homo sapiens
agtggcaaaatttga

SEQ ID NO: 83205 - DNA, 15 bp, Homo sapiens
aagtggcaaaatttg

SEQ ID NO: 83206 - DNA, 15 bp, Homo sapiens
taagtggcaaaattt

SEQ ID NO: 83207 - DNA, 15 bp, Homo sapiens
ctaagtggcaaaatt

SEQ ID NO: 83208 - DNA, 15 bp, Homo sapiens
actaagtggcaaaat

SEQ ID NO: 83209 - DNA, 15 bp, Homo sapiens
tactaagtggcaaaa

SEQ ID NO: 83210 - DNA, 15 bp, Homo sapiens
ctactaagtggcaaa

SEQ ID NO: 83211 - DNA, 15 bp, Homo sapiens
gctactaagtggcaa

SEQ ID NO: 83212 - DNA, 15 bp, Homo sapiens
tgctactaagtggca

SEQ ID NO: 83213 - DNA, 15 bp, Homo sapiens
ttgctactaagtggc

SEQ ID NO: 83214 - DNA, 15 bp, Homo sapiens
gttgctactaagtgg

SEQ ID NO: 83215 - DNA, 15 bp, Homo sapiens
agttgctactaagtg

SEQ ID NO: 83216 - DNA, 15 bp, Homo sapiens
aagttgctactaagt

SEQ ID NO: 83217 - DNA, 15 bp, Homo sapiens
caagttgctactaag

SEQ ID NO: 83218 - DNA, 15 bp, Homo sapiens
tcaagttgctactaa

SEQ ID NO: 83219 - DNA, 15 bp, Homo sapiens
gtcaagttgctacta

SEQ ID NO: 83220 - DNA, 15 bp, Homo sapiens
ggtcaagttgctact

SEQ ID NO: 83221 - DNA, 15 bp, Homo sapiens
tggtcaagttgctac

SEQ ID NO: 83222 - DNA, 15 bp, Homo sapiens
ctggtcaagttgcta

SEQ ID NO: 83223 - DNA, 15 bp, Homo sapiens
cctggtcaagttgct

SEQ ID NO: 83224 - DNA, 15 bp, Homo sapiens
acctggtcaagttgc

SEQ ID NO: 83225 - DNA, 15 bp, Homo sapiens
tacctggtcaagttg

SEQ ID NO: 83226 - DNA, 15 bp, Homo sapiens
ttacctggtcaagtt

SEQ ID NO: 83227 - DNA, 15 bp, Homo sapiens
gttacctggtcaagt

SEQ ID NO: 83228 - DNA, 15 bp, Homo sapiens
agttacctggtcaag

SEQ ID NO: 83229 - DNA, 15 bp, Homo sapiens
cagttacctggtcaa

SEQ ID NO: 83230 - DNA, 15 bp, Homo sapiens
ccagttacctggtca

SEQ ID NO: 83231 - DNA, 15 bp, Homo sapiens
accagttacctggtc

SEQ ID NO: 83232 - DNA, 15 bp, Homo sapiens
aaccagttacctggt

SEQ ID NO: 83233 - DNA, 15 bp, Homo sapiens
taaccagttacctgg

SEQ ID NO: 83234 - DNA, 15 bp, Homo sapiens
ataaccagttacctg

SEQ ID NO: 83235 - DNA, 15 bp, Homo sapiens
gataaccagttacct

SEQ ID NO: 83236 - DNA, 15 bp, Homo sapiens
ggataaccagttacc

SEQ ID NO: 83237 - DNA, 15 bp, Homo sapiens
aggataaccagttac

SEQ ID NO: 83238 - DNA, 15 bp, Homo sapiens
aaggataaccagtta

SEQ ID NO: 83239 - DNA, 15 bp, Homo sapiens
aaaggataaccagtt

SEQ ID NO: 83240 - DNA, 15 bp, Homo sapiens
aaaaggataaccagt

SEQ ID NO: 83241 - DNA, 15 bp, Homo sapiens
taaaaggataaccag

SEQ ID NO: 83242 - DNA, 15 bp, Homo sapiens
ttaaaaggataacca

SEQ ID NO: 83243 - DNA, 15 bp, Homo sapiens
tttaaaaggataacc

SEQ ID NO: 83244 - DNA, 15 bp, Homo sapiens
ctttaaaaggataac

SEQ ID NO: 83245 - DNA, 15 bp, Homo sapiens
gctttaaaaggataa

SEQ ID NO: 83246 - DNA, 15 bp, Homo sapiens
ggctttaaaaggata

SEQ ID NO: 83247 - DNA, 15 bp, Homo sapiens
aggctttaaaaggat

SEQ ID NO: 83248 - DNA, 15 bp, Homo sapiens
aaggctttaaaagga

SEQ ID NO: 83249 - DNA, 15 bp, Homo sapiens
taaggctttaaaagg

SEQ ID NO: 83250 - DNA, 15 bp, Homo sapiens
ctaaggctttaaaag

SEQ ID NO: 83251 - DNA, 15 bp, Homo sapiens
actaaggctttaaaa

SEQ ID NO: 83252 - DNA, 15 bp, Homo sapiens
aactaaggctttaaa

SEQ ID NO: 83253 - DNA, 15 bp, Homo sapiens
aaactaaggctttaa

SEQ ID NO: 83254 - DNA, 15 bp, Homo sapiens
taaactaaggcttta

SEQ ID NO: 83255 - DNA, 15 bp, Homo sapiens
ataaactaaggcttt

SEQ ID NO: 83256 - DNA, 15 bp, Homo sapiens
gataaactaaggctt

SEQ ID NO: 83257 - DNA, 15 bp, Homo sapiens
agataaactaaggct

SEQ ID NO: 83258 - DNA, 15 bp, Homo sapiens
tagataaactaaggc

SEQ ID NO: 83259 - DNA, 15 bp, Homo sapiens
ttagataaactaagg

SEQ ID NO: 83260 - DNA, 15 bp, Homo sapiens
tttagataaactaag

SEQ ID NO: 83261 - DNA, 15 bp, Homo sapiens
atttagataaactaa

SEQ ID NO: 83262 - DNA, 15 bp, Homo sapiens
aatttagataaacta

SEQ ID NO: 83263 - DNA, 15 bp, Homo sapiens
caatttagataaact

SEQ ID NO: 83264 - DNA, 15 bp, Homo sapiens
acaatttagataaac

SEQ ID NO: 83265 - DNA, 15 bp, Homo sapiens
cacaatttagataaa

SEQ ID NO: 83266 - DNA, 15 bp, Homo sapiens
tcacaatttagataa

SEQ ID NO: 83267 - DNA, 15 bp, Homo sapiens
atcacaatttagata

SEQ ID NO: 83268 - DNA, 15 bp, Homo sapiens
tatcacaatttagat

SEQ ID NO: 83269 - DNA, 15 bp, Homo sapiens
atatcacaatttaga

SEQ ID NO: 83270 - DNA, 15 bp, Homo sapiens
aatatcacaatttag

SEQ ID NO: 83271 - DNA, 15 bp, Homo sapiens
taatatcacaattta

SEQ ID NO: 83272 - DNA, 15 bp, Homo sapiens
ttaatatcacaattt

SEQ ID NO: 83273 - DNA, 15 bp, Homo sapiens
attaatatcacaatt

SEQ ID NO: 83274 - DNA, 15 bp, Homo sapiens
cattaatatcacaat

SEQ ID NO: 83275 - DNA, 15 bp, Homo sapiens
acattaatatcacaa

SEQ ID NO: 83276 - DNA, 15 bp, Homo sapiens
aacattaatatcaca

SEQ ID NO: 83277 - DNA, 15 bp, Homo sapiens
caacattaatatcac

SEQ ID NO: 83278 - DNA, 15 bp, Homo sapiens
gcaacattaatatca

SEQ ID NO: 83279 - DNA, 15 bp, Homo sapiens
agcaacattaatatc

SEQ ID NO: 83280 - DNA, 15 bp, Homo sapiens
gagcaacattaatat

SEQ ID NO: 83281 - DNA, 15 bp, Homo sapiens
agagcaacattaata

SEQ ID NO: 83282 - DNA, 15 bp, Homo sapiens
aagagcaacattaat

SEQ ID NO: 83283 - DNA, 15 bp, Homo sapiens
taagagcaacattaa

SEQ ID NO: 83284 - DNA, 15 bp, Homo sapiens
ataagagcaacatta

SEQ ID NO: 83285 - DNA, 15 bp, Homo sapiens
tataagagcaacatt

SEQ ID NO: 83286 - DNA, 15 bp, Homo sapiens
ttataagagcaacat

SEQ ID NO: 83287 - DNA, 15 bp, Homo sapiens
cttataagagcaaca

SEQ ID NO: 83288 - DNA, 15 bp, Homo sapiens
acttataagagcaac

SEQ ID NO: 83289 - DNA, 15 bp, Homo sapiens
aacttataagagcaa

SEQ ID NO: 83290 - DNA, 15 bp, Homo sapiens
aaacttataagagca

SEQ ID NO: 83291 - DNA, 15 bp, Homo sapiens
caaacttataagagc

SEQ ID NO: 83292 - DNA, 15 bp, Homo sapiens
acaaacttataagag

SEQ ID NO: 83293 - DNA, 15 bp, Homo sapiens
gacaaacttataaga

SEQ ID NO: 83294 - DNA, 15 bp, Homo sapiens
tgacaaacttataag

SEQ ID NO: 83295 - DNA, 15 bp, Homo sapiens
atgacaaacttataa

SEQ ID NO: 83296 - DNA, 15 bp, Homo sapiens
catgacaaacttata

SEQ ID NO: 83297 - DNA, 15 bp, Homo sapiens
tcatgacaaacttat

SEQ ID NO: 83298 - DNA, 15 bp, Homo sapiens
ctcatgacaaactta

SEQ ID NO: 83299 - DNA, 15 bp, Homo sapiens
cctcatgacaaactt

SEQ ID NO: 83300 - DNA, 15 bp, Homo sapiens
tcctcatgacaaact

SEQ ID NO: 83301 - DNA, 15 bp, Homo sapiens
gtcctcatgacaaac

SEQ ID NO: 83302 - DNA, 15 bp, Homo sapiens
agtcctcatgacaaa

SEQ ID NO: 83303 - DNA, 15 bp, Homo sapiens
tagtcctcatgacaa

SEQ ID NO: 83304 - DNA, 15 bp, Homo sapiens
ttagtcctcatgaca

SEQ ID NO: 83305 - DNA, 15 bp, Homo sapiens
tttagtcctcatgac

SEQ ID NO: 83306 - DNA, 15 bp, Homo sapiens
atttagtcctcatga

SEQ ID NO: 83307 - DNA, 15 bp, Homo sapiens
aatttagtcctcatg

SEQ ID NO: 83308 - DNA, 15 bp, Homo sapiens
taatttagtcctcat

SEQ ID NO: 83309 - DNA, 15 bp, Homo sapiens
ttaatttagtcctca

SEQ ID NO: 83310 - DNA, 15 bp, Homo sapiens
tttaatttagtcctc

SEQ ID NO: 83311 - DNA, 15 bp, Homo sapiens
atttaatttagtcct

SEQ ID NO: 83312 - DNA, 15 bp, Homo sapiens
catttaatttagtcc

SEQ ID NO: 83313 - DNA, 15 bp, Homo sapiens
ccatttaatttagtc

SEQ ID NO: 83314 - DNA, 15 bp, Homo sapiens
accatttaatttagt

SEQ ID NO: 83315 - DNA, 15 bp, Homo sapiens
caccatttaatttag

SEQ ID NO: 83316 - DNA, 15 bp, Homo sapiens
acaccatttaattta

SEQ ID NO: 83317 - DNA, 15 bp, Homo sapiens
tacaccatttaattt

SEQ ID NO: 83318 - DNA, 15 bp, Homo sapiens
gtacaccatttaatt

SEQ ID NO: 83319 - DNA, 15 bp, Homo sapiens
tgtacaccatttaat

SEQ ID NO: 83320 - DNA, 15 bp, Homo sapiens
atgtacaccatttaa

SEQ ID NO: 83321 - DNA, 15 bp, Homo sapiens
tatgtacaccattta

SEQ ID NO: 83322 - DNA, 15 bp, Homo sapiens
ctatgtacaccattt

SEQ ID NO: 83323 - DNA, 15 bp, Homo sapiens
tctatgtacaccatt

SEQ ID NO: 83324 - DNA, 15 bp, Homo sapiens
ctctatgtacaccat

SEQ ID NO: 83325 - DNA, 15 bp, Homo sapiens
actctatgtacacca

SEQ ID NO: 83326 - DNA, 15 bp, Homo sapiens
cactctatgtacacc

SEQ ID NO: 83327 - DNA, 15 bp, Homo sapiens
gcactctatgtacac

SEQ ID NO: 83328 - DNA, 15 bp, Homo sapiens
ggcactctatgtaca

SEQ ID NO: 83329 - DNA, 15 bp, Homo sapiens
aggcactctatgtac

SEQ ID NO: 83330 - DNA, 15 bp, Homo sapiens
aaggcactctatgta

SEQ ID NO: 83331 - DNA, 15 bp, Homo sapiens
caaggcactctatgt

SEQ ID NO: 83332 - DNA, 15 bp, Homo sapiens
ccaaggcactctatg

SEQ ID NO: 83333 - DNA, 15 bp, Homo sapiens
cccaaggcactctat

SEQ ID NO: 83334 - DNA, 15 bp, Homo sapiens
acccaaggcactcta

SEQ ID NO: 83335 - DNA, 15 bp, Homo sapiens
tacccaaggcactct

SEQ ID NO: 83336 - DNA, 15 bp, Homo sapiens
gtacccaaggcactc

SEQ ID NO: 83337 - DNA, 15 bp, Homo sapiens
agtacccaaggcact

SEQ ID NO: 83338 - DNA, 15 bp, Homo sapiens
gagtacccaaggcac

SEQ ID NO: 83339 - DNA, 15 bp, Homo sapiens
agagtacccaaggca

SEQ ID NO: 83340 - DNA, 15 bp, Homo sapiens
gagagtacccaaggc

SEQ ID NO: 83341 - DNA, 15 bp, Homo sapiens
agagagtacccaagg

SEQ ID NO: 83342 - DNA, 15 bp, Homo sapiens
cagagagtacccaag

SEQ ID NO: 83343 - DNA, 15 bp, Homo sapiens
tcagagagtacccaa

SEQ ID NO: 83344 - DNA, 15 bp, Homo sapiens
atcagagagtaccca

SEQ ID NO: 83345 - DNA, 15 bp, Homo sapiens
catcagagagtaccc

SEQ ID NO: 83346 - DNA, 15 bp, Homo sapiens
ccatcagagagtacc

SEQ ID NO: 83347 - DNA, 15 bp, Homo sapiens
cccatcagagagtac

SEQ ID NO: 83348 - DNA, 15 bp, Homo sapiens
ccccatcagagagta

SEQ ID NO: 83349 - DNA, 15 bp, Homo sapiens
cccccatcagagagt

SEQ ID NO: 83350 - DNA, 15 bp, Homo sapiens
tcccccatcagagag

SEQ ID NO: 83351 - DNA, 15 bp, Homo sapiens
gtcccccatcagaga

SEQ ID NO: 83352 - DNA, 15 bp, Homo sapiens
agtcccccatcagag

SEQ ID NO: 83353 - DNA, 15 bp, Homo sapiens
gagtcccccatcaga

SEQ ID NO: 83354 - DNA, 15 bp, Homo sapiens
ggagtcccccatcag

SEQ ID NO: 83355 - DNA, 15 bp, Homo sapiens
tggagtcccccatca

SEQ ID NO: 83356 - DNA, 15 bp, Homo sapiens
atggagtcccccatc

SEQ ID NO: 83357 - DNA, 15 bp, Homo sapiens
catggagtcccccat

SEQ ID NO: 83358 - DNA, 15 bp, Homo sapiens
tcatggagtccccca

SEQ ID NO: 83359 - DNA, 15 bp, Homo sapiens
atcatggagtccccc

SEQ ID NO: 83360 - DNA, 15 bp, Homo sapiens
tatcatggagtcccc

SEQ ID NO: 83361 - DNA, 15 bp, Homo sapiens
ttatcatggagtccc

SEQ ID NO: 83362 - DNA, 15 bp, Homo sapiens
attatcatggagtcc

SEQ ID NO: 83363 - DNA, 15 bp, Homo sapiens
aattatcatggagtc

SEQ ID NO: 83364 - DNA, 15 bp, Homo sapiens
aaattatcatggagt

SEQ ID NO: 83365 - DNA, 15 bp, Homo sapiens
caaattatcatggag

SEQ ID NO: 83366 - DNA, 15 bp, Homo sapiens
acaaattatcatgga

SEQ ID NO: 83367 - DNA, 15 bp, Homo sapiens
cacaaattatcatgg

SEQ ID NO: 83368 - DNA, 15 bp, Homo sapiens
ccacaaattatcatg

SEQ ID NO: 83369 - DNA, 15 bp, Homo sapiens
accacaaattatcat

SEQ ID NO: 83370 - DNA, 15 bp, Homo sapiens
gaccacaaattatca

SEQ ID NO: 83371 - DNA, 15 bp, Homo sapiens
agaccacaaattatc

SEQ ID NO: 83372 - DNA, 15 bp, Homo sapiens
gagaccacaaattat

SEQ ID NO: 83373 - DNA, 15 bp, Homo sapiens
tgagaccacaaatta

SEQ ID NO: 83374 - DNA, 15 bp, Homo sapiens
atgagaccacaaatt

SEQ ID NO: 83375 - DNA, 15 bp, Homo sapiens
catgagaccacaaat

SEQ ID NO: 83376 - DNA, 15 bp, Homo sapiens
ccatgagaccacaaa

SEQ ID NO: 83377 - DNA, 15 bp, Homo sapiens
tccatgagaccacaa

SEQ ID NO: 83378 - DNA, 15 bp, Homo sapiens
ctccatgagaccaca

SEQ ID NO: 83379 - DNA, 15 bp, Homo sapiens
cctccatgagaccac

SEQ ID NO: 83380 - DNA, 15 bp, Homo sapiens
ccctccatgagacca

SEQ ID NO: 83381 - DNA, 15 bp, Homo sapiens
tccctccatgagacc

SEQ ID NO: 83382 - DNA, 15 bp, Homo sapiens
ctccctccatgagac

SEQ ID NO: 83383 - DNA, 15 bp, Homo sapiens
gctccctccatgaga

SEQ ID NO: 83384 - DNA, 15 bp, Homo sapiens
agctccctccatgag

SEQ ID NO: 83385 - DNA, 15 bp, Homo sapiens
gagctccctccatga

SEQ ID NO: 83386 - DNA, 15 bp, Homo sapiens
agagctccctccatg

SEQ ID NO: 83387 - DNA, 15 bp, Homo sapiens
cagagctccctccat

SEQ ID NO: 83388 - DNA, 15 bp, Homo sapiens
ccagagctccctcca

SEQ ID NO: 83389 - DNA, 15 bp, Homo sapiens
cccagagctccctcc

SEQ ID NO: 83390 - DNA, 15 bp, Homo sapiens
tcccagagctccctc

SEQ ID NO: 83391 - DNA, 15 bp, Homo sapiens
ttcccagagctccct

SEQ ID NO: 83392 - DNA, 15 bp, Homo sapiens
cttcccagagctccc

SEQ ID NO: 83393 - DNA, 15 bp, Homo sapiens
ccttcccagagctcc

SEQ ID NO: 83394 - DNA, 15 bp, Homo sapiens
accttcccagagctc

SEQ ID NO: 83395 - DNA, 15 bp, Homo sapiens
aaccttcccagagct

SEQ ID NO: 83396 - DNA, 15 bp, Homo sapiens
aaaccttcccagagc

SEQ ID NO: 83397 - DNA, 15 bp, Homo sapiens
taaaccttcccagag

SEQ ID NO: 83398 - DNA, 15 bp, Homo sapiens
ctaaaccttcccaga

SEQ ID NO: 83399 - DNA, 15 bp, Homo sapiens
cctaaaccttcccag

SEQ ID NO: 83400 - DNA, 15 bp, Homo sapiens
tcctaaaccttccca

SEQ ID NO: 83401 - DNA, 15 bp, Homo sapiens
ctcctaaaccttccc

SEQ ID NO: 83402 - DNA, 15 bp, Homo sapiens
gctcctaaaccttcc

SEQ ID NO: 83403 - DNA, 15 bp, Homo sapiens
ggctcctaaaccttc

SEQ ID NO: 83404 - DNA, 15 bp, Homo sapiens
aggctcctaaacctt

SEQ ID NO: 83405 - DNA, 15 bp, Homo sapiens
caggctcctaaacct

SEQ ID NO: 83406 - DNA, 15 bp, Homo sapiens
gcaggctcctaaacc

SEQ ID NO: 83407 - DNA, 15 bp, Homo sapiens
ggcaggctcctaaac

SEQ ID NO: 83408 - DNA, 15 bp, Homo sapiens
aggcaggctcctaaa

SEQ ID NO: 83409 - DNA, 15 bp, Homo sapiens
aaggcaggctcctaa

SEQ ID NO: 83410 - DNA, 15 bp, Homo sapiens
caaggcaggctccta

SEQ ID NO: 83411 - DNA, 15 bp, Homo sapiens
ccaaggcaggctcct

SEQ ID NO: 83412 - DNA, 15 bp, Homo sapiens
gccaaggcaggctcc

SEQ ID NO: 83413 - DNA, 15 bp, Homo sapiens
agccaaggcaggctc

SEQ ID NO: 83414 - DNA, 15 bp, Homo sapiens
gagccaaggcaggct

SEQ ID NO: 83415 - DNA, 15 bp, Homo sapiens
agagccaaggcaggc

SEQ ID NO: 83416 - DNA, 15 bp, Homo sapiens
cagagccaaggcagg

SEQ ID NO: 83417 - DNA, 15 bp, Homo sapiens
gcagagccaaggcag

SEQ ID NO: 83418 - DNA, 15 bp, Homo sapiens
tgcagagccaaggca

SEQ ID NO: 83419 - DNA, 15 bp, Homo sapiens
ctgcagagccaaggc

SEQ ID NO: 83420 - DNA, 15 bp, Homo sapiens
gctgcagagccaagg

SEQ ID NO: 83421 - DNA, 15 bp, Homo sapiens
ggctgcagagccaag

SEQ ID NO: 83422 - DNA, 15 bp, Homo sapiens
aggctgcagagccaa

SEQ ID NO: 83423 - DNA, 15 bp, Homo sapiens
aaggctgcagagcca

SEQ ID NO: 83424 - DNA, 15 bp, Homo sapiens
caaggctgcagagcc

SEQ ID NO: 83425 - DNA, 15 bp, Homo sapiens
ccaaggctgcagagc

SEQ ID NO: 83426 - DNA, 15 bp, Homo sapiens
cccaaggctgcagag

SEQ ID NO: 83427 - DNA, 15 bp, Homo sapiens
tcccaaggctgcaga

SEQ ID NO: 83428 - DNA, 15 bp, Homo sapiens
ctcccaaggctgcag

SEQ ID NO: 83429 - DNA, 15 bp, Homo sapiens
tctcccaaggctgca

SEQ ID NO: 83430 - DNA, 15 bp, Homo sapiens
ctctcccaaggctgc

SEQ ID NO: 83431 - DNA, 15 bp, Homo sapiens
gctctcccaaggctg

SEQ ID NO: 83432 - DNA, 15 bp, Homo sapiens
ggctctcccaaggct

SEQ ID NO: 83433 - DNA, 15 bp, Homo sapiens
aggctctcccaaggc

SEQ ID NO: 83434 - DNA, 15 bp, Homo sapiens
aaggctctcccaagg

SEQ ID NO: 83435 - DNA, 15 bp, Homo sapiens
gaaggctctcccaag

SEQ ID NO: 83436 - DNA, 15 bp, Homo sapiens
agaaggctctcccaa

SEQ ID NO: 83437 - DNA, 15 bp, Homo sapiens
tagaaggctctccca

SEQ ID NO: 83438 - DNA, 15 bp, Homo sapiens
ctagaaggctctccc

SEQ ID NO: 83439 - DNA, 15 bp, Homo sapiens
gctagaaggctctcc

SEQ ID NO: 83440 - DNA, 15 bp, Homo sapiens
agctagaaggctctc

SEQ ID NO: 83441 - DNA, 15 bp, Homo sapiens
aagctagaaggctct

SEQ ID NO: 83442 - DNA, 15 bp, Homo sapiens
gaagctagaaggctc

SEQ ID NO: 83443 - DNA, 15 bp, Homo sapiens
ggaagctagaaggct

SEQ ID NO: 83444 - DNA, 15 bp, Homo sapiens
gggaagctagaaggc

SEQ ID NO: 83445 - DNA, 15 bp, Homo sapiens
tgggaagctagaagg

SEQ ID NO: 83446 - DNA, 15 bp, Homo sapiens
ctgggaagctagaag

SEQ ID NO: 83447 - DNA, 15 bp, Homo sapiens
cctgggaagctagaa

SEQ ID NO: 83448 - DNA, 15 bp, Homo sapiens
tcctgggaagctaga

SEQ ID NO: 83449 - DNA, 15 bp, Homo sapiens
gtcctgggaagctag

SEQ ID NO: 83450 - DNA, 15 bp, Homo sapiens
tgtcctgggaagcta

SEQ ID NO: 83451 - DNA, 15 bp, Homo sapiens
atgtcctgggaagct

SEQ ID NO: 83452 - DNA, 15 bp, Homo sapiens
catgtcctgggaagc

SEQ ID NO: 83453 - DNA, 15 bp, Homo sapiens
ccatgtcctgggaag

SEQ ID NO: 83454 - DNA, 15 bp, Homo sapiens
gccatgtcctgggaa

SEQ ID NO: 83455 - DNA, 15 bp, Homo sapiens
tgccatgtcctggga

SEQ ID NO: 83456 - DNA, 15 bp, Homo sapiens
ctgccatgtcctggg

SEQ ID NO: 83457 - DNA, 15 bp, Homo sapiens
gctgccatgtcctgg

SEQ ID NO: 83458 - DNA, 15 bp, Homo sapiens
ggctgccatgtcctg

SEQ ID NO: 83459 - DNA, 15 bp, Homo sapiens
aggctgccatgtcct

SEQ ID NO: 83460 - DNA, 15 bp, Homo sapiens
taggctgccatgtcc

SEQ ID NO: 83461 - DNA, 15 bp, Homo sapiens
ctaggctgccatgtc

SEQ ID NO: 83462 - DNA, 15 bp, Homo sapiens
actaggctgccatgt

SEQ ID NO: 83463 - DNA, 15 bp, Homo sapiens
cactaggctgccatg

SEQ ID NO: 83464 - DNA, 15 bp, Homo sapiens
acactaggctgccat

SEQ ID NO: 83465 - DNA, 15 bp, Homo sapiens
aacactaggctgcca

SEQ ID NO: 83466 - DNA, 15 bp, Homo sapiens
caacactaggctgcc

SEQ ID NO: 83467 - DNA, 15 bp, Homo sapiens
tcaacactaggctgc

SEQ ID NO: 83468 - DNA, 15 bp, Homo sapiens
ttcaacactaggctg

SEQ ID NO: 83469 - DNA, 15 bp, Homo sapiens
attcaacactaggct

SEQ ID NO: 83470 - DNA, 15 bp, Homo sapiens
cattcaacactaggc

SEQ ID NO: 83471 - DNA, 15 bp, Homo sapiens
gcattcaacactagg

SEQ ID NO: 83472 - DNA, 15 bp, Homo sapiens
agcattcaacactag

SEQ ID NO: 83473 - DNA, 15 bp, Homo sapiens
aagcattcaacacta

SEQ ID NO: 83474 - DNA, 15 bp, Homo sapiens
caagcattcaacact

SEQ ID NO: 83475 - DNA, 15 bp, Homo sapiens
ccaagcattcaacac

SEQ ID NO: 83476 - DNA, 15 bp, Homo sapiens
gccaagcattcaaca

SEQ ID NO: 83477 - DNA, 15 bp, Homo sapiens
agccaagcattcaac

SEQ ID NO: 83478 - DNA, 15 bp, Homo sapiens
gagccaagcattcaa

SEQ ID NO: 83479 - DNA, 15 bp, Homo sapiens
tgagccaagcattca

SEQ ID NO: 83480 - DNA, 15 bp, Homo sapiens
ctgagccaagcattc

SEQ ID NO: 83481 - DNA, 15 bp, Homo sapiens
gctgagccaagcatt

SEQ ID NO: 83482 - DNA, 15 bp, Homo sapiens
tgctgagccaagcat

SEQ ID NO: 83483 - DNA, 15 bp, Homo sapiens
ttgctgagccaagca

SEQ ID NO: 83484 - DNA, 15 bp, Homo sapiens
tttgctgagccaagc

SEQ ID NO: 83485 - DNA, 15 bp, Homo sapiens
atttgctgagccaag

SEQ ID NO: 83486 - DNA, 15 bp, Homo sapiens
catttgctgagccaa

SEQ ID NO: 83487 - DNA, 15 bp, Homo sapiens
acatttgctgagcca

SEQ ID NO: 83488 - DNA, 15 bp, Homo sapiens
aacatttgctgagcc

SEQ ID NO: 83489 - DNA, 15 bp, Homo sapiens
aaacatttgctgagc

SEQ ID NO: 83490 - DNA, 15 bp, Homo sapiens
caaacatttgctgag

SEQ ID NO: 83491 - DNA, 15 bp, Homo sapiens
gaacaaacatttgct

SEQ ID NO: 83492 - DNA, 15 bp, Homo sapiens
agaacaaacatttgc

SEQ ID NO: 83493 - DNA, 15 bp, Homo sapiens
gagaacaaacatttg

SEQ ID NO: 83494 - DNA, 15 bp, Homo sapiens
cgagaacaaacattt

SEQ ID NO: 83495 - DNA, 15 bp, Homo sapiens
acgagaacaaacatt

SEQ ID NO: 83496 - DNA, 15 bp, Homo sapiens
aacgagaacaaacat

SEQ ID NO: 83497 - DNA, 15 bp, Homo sapiens
aaacgagaacaaaca

SEQ ID NO: 83498 - DNA, 15 bp, Homo sapiens
gaaacgagaacaaac

SEQ ID NO: 83499 - DNA, 15 bp, Homo sapiens
ggaaacgagaacaaa

SEQ ID NO: 83500 - DNA, 15 bp, Homo sapiens
aggaaacgagaacaa

SEQ ID NO: 83501 - DNA, 15 bp, Homo sapiens
aaggaaacgagaaca

SEQ ID NO: 83502 - DNA, 15 bp, Homo sapiens
gaaggaaacgagaac

SEQ ID NO: 83503 - DNA, 15 bp, Homo sapiens
ggaaggaaacgagaa

SEQ ID NO: 83504 - DNA, 15 bp, Homo sapiens
gggaaggaaacgaga

SEQ ID NO: 83505 - DNA, 15 bp, Homo sapiens
tgggaaggaaacgag

SEQ ID NO: 83506 - DNA, 15 bp, Homo sapiens
atgggaaggaaacga

SEQ ID NO: 83507 - DNA, 15 bp, Homo sapiens
gatgggaaggaaacg

SEQ ID NO: 83508 - DNA, 15 bp, Homo sapiens
tgatgggaaggaaac

SEQ ID NO: 83509 - DNA, 15 bp, Homo sapiens
ttgatgggaaggaaa

SEQ ID NO: 83510 - DNA, 15 bp, Homo sapiens
gttgatgggaaggaa

SEQ ID NO: 83511 - DNA, 15 bp, Homo sapiens
agttgatgggaagga

SEQ ID NO: 83512 - DNA, 15 bp, Homo sapiens
aagttgatgggaagg

SEQ ID NO: 83513 - DNA, 15 bp, Homo sapiens
caagttgatgggaag

SEQ ID NO: 83514 - DNA, 15 bp, Homo sapiens
ccaagttgatgggaa

SEQ ID NO: 83515 - DNA, 15 bp, Homo sapiens
accaagttgatggga

SEQ ID NO: 83516 - DNA, 15 bp, Homo sapiens
gaccaagttgatggg

SEQ ID NO: 83517 - DNA, 15 bp, Homo sapiens
tgaccaagttgatgg

SEQ ID NO: 83518 - DNA, 15 bp, Homo sapiens
ctgaccaagttgatg

SEQ ID NO: 83519 - DNA, 15 bp, Homo sapiens
actgaccaagttgat

SEQ ID NO: 83520 - DNA, 15 bp, Homo sapiens
aactgaccaagttga

SEQ ID NO: 83521 - DNA, 15 bp, Homo sapiens
caactgaccaagttg

SEQ ID NO: 83522 - DNA, 15 bp, Homo sapiens
ccaactgaccaagtt

SEQ ID NO: 83523 - DNA, 15 bp, Homo sapiens
cccaactgaccaagt

SEQ ID NO: 83524 - DNA, 15 bp, Homo sapiens
ccccaactgaccaag

SEQ ID NO: 83525 - DNA, 15 bp, Homo sapiens
accccaactgaccaa

SEQ ID NO: 83526 - DNA, 15 bp, Homo sapiens
gaccccaactgacca

SEQ ID NO: 83527 - DNA, 15 bp, Homo sapiens
agaccccaactgacc

SEQ ID NO: 83528 - DNA, 15 bp, Homo sapiens
aagaccccaactgac

SEQ ID NO: 83529 - DNA, 15 bp, Homo sapiens
aaagaccccaactga

SEQ ID NO: 83530 - DNA, 15 bp, Homo sapiens
gaaagaccccaactg

SEQ ID NO: 83531 - DNA, 15 bp, Homo sapiens
tgaaagaccccaact

SEQ ID NO: 83532 - DNA, 15 bp, Homo sapiens
ctgaaagaccccaac

SEQ ID NO: 83533 - DNA, 15 bp, Homo sapiens
actgaaagaccccaa

SEQ ID NO: 83534 - DNA, 15 bp, Homo sapiens
aactgaaagacccca

SEQ ID NO: 83535 - DNA, 15 bp, Homo sapiens
taactgaaagacccc

SEQ ID NO: 83536 - DNA, 15 bp, Homo sapiens
ctaactgaaagaccc

SEQ ID NO: 83537 - DNA, 15 bp, Homo sapiens
cctaactgaaagacc

SEQ ID NO: 83538 - DNA, 15 bp, Homo sapiens
tcctaactgaaagac

SEQ ID NO: 83539 - DNA, 15 bp, Homo sapiens
ctcctaactgaaaga

SEQ ID NO: 83540 - DNA, 15 bp, Homo sapiens
actcctaactgaaag

SEQ ID NO: 83541 - DNA, 15 bp, Homo sapiens
tactcctaactgaaa

SEQ ID NO: 83542 - DNA, 15 bp, Homo sapiens
atactcctaactgaa

SEQ ID NO: 83543 - DNA, 15 bp, Homo sapiens
gatactcctaactga

SEQ ID NO: 83544 - DNA, 15 bp, Homo sapiens
agatactcctaactg

SEQ ID NO: 83545 - DNA, 15 bp, Homo sapiens
gagatactcctaact

SEQ ID NO: 83546 - DNA, 15 bp, Homo sapiens
tgagatactcctaac

SEQ ID NO: 83547 - DNA, 15 bp, Homo sapiens
ctgagatactcctaa

SEQ ID NO: 83548 - DNA, 15 bp, Homo sapiens
actgagatactccta

SEQ ID NO: 83549 - DNA, 15 bp, Homo sapiens
cactgagatactcct

SEQ ID NO: 83550 - DNA, 15 bp, Homo sapiens
tcactgagatactcc

SEQ ID NO: 83551 - DNA, 15 bp, Homo sapiens
gtcactgagatactc

SEQ ID NO: 83552 - DNA, 15 bp, Homo sapiens
agtcactgagatact

SEQ ID NO: 83553 - DNA, 15 bp, Homo sapiens
aagtcactgagatac

SEQ ID NO: 83554 - DNA, 15 bp, Homo sapiens
aaagtcactgagata

SEQ ID NO: 83555 - DNA, 15 bp, Homo sapiens
taaagtcactgagat

SEQ ID NO: 83556 - DNA, 15 bp, Homo sapiens
ttaaagtcactgaga

SEQ ID NO: 83557 - DNA, 15 bp, Homo sapiens
tttaaagtcactgag

SEQ ID NO: 83558 - DNA, 15 bp, Homo sapiens
atttaaagtcactga

SEQ ID NO: 83559 - DNA, 15 bp, Homo sapiens
catttaaagtcactg

SEQ ID NO: 83560 - DNA, 15 bp, Homo sapiens
ccatttaaagtcact

SEQ ID NO: 83561 - DNA, 15 bp, Homo sapiens
gccatttaaagtcac

SEQ ID NO: 83562 - DNA, 15 bp, Homo sapiens
tgccatttaaagtca

SEQ ID NO: 83563 - DNA, 15 bp, Homo sapiens
atgccatttaaagtc

SEQ ID NO: 83564 - DNA, 15 bp, Homo sapiens
catgccatttaaagt

SEQ ID NO: 83565 - DNA, 15 bp, Homo sapiens
ccatgccatttaaag

SEQ ID NO: 83566 - DNA, 15 bp, Homo sapiens
cccatgccatttaaa

SEQ ID NO: 83567 - DNA, 15 bp, Homo sapiens
gcccatgccatttaa

SEQ ID NO: 83568 - DNA, 15 bp, Homo sapiens
tgcccatgccattta

SEQ ID NO: 83569 - DNA, 15 bp, Homo sapiens
atgcccatgccattt

SEQ ID NO: 83570 - DNA, 15 bp, Homo sapiens
catgcccatgccatt

SEQ ID NO: 83571 - DNA, 15 bp, Homo sapiens
gcatgcccatgccat

SEQ ID NO: 83572 - DNA, 15 bp, Homo sapiens
agcatgcccatgcca

SEQ ID NO: 83573 - DNA, 15 bp, Homo sapiens
cagcatgcccatgcc

SEQ ID NO: 83574 - DNA, 15 bp, Homo sapiens
ccagcatgcccatgc

SEQ ID NO: 83575 - DNA, 15 bp, Homo sapiens
tccagcatgcccatg

SEQ ID NO: 83576 - DNA, 15 bp, Homo sapiens
ctccagcatgcccat

SEQ ID NO: 83577 - DNA, 15 bp, Homo sapiens
actccagcatgccca

SEQ ID NO: 83578 - DNA, 15 bp, Homo sapiens
cactccagcatgccc

SEQ ID NO: 83579 - DNA, 15 bp, Homo sapiens
tcactccagcatgcc

SEQ ID NO: 83580 - DNA, 15 bp, Homo sapiens
atcactccagcatgc

SEQ ID NO: 83581 - DNA, 15 bp, Homo sapiens
tatcactccagcatg

SEQ ID NO: 83582 - DNA, 15 bp, Homo sapiens
ctatcactccagcat

SEQ ID NO: 83583 - DNA, 15 bp, Homo sapiens
actatcactccagca

SEQ ID NO: 83584 - DNA, 15 bp, Homo sapiens
cactatcactccagc

SEQ ID NO: 83585 - DNA, 15 bp, Homo sapiens
tcactatcactccag

SEQ ID NO: 83586 - DNA, 15 bp, Homo sapiens
gtcactatcactcca

SEQ ID NO: 83587 - DNA, 15 bp, Homo sapiens
ggtcactatcactcc

SEQ ID NO: 83588 - DNA, 15 bp, Homo sapiens
tggtcactatcactc

SEQ ID NO: 83589 - DNA, 15 bp, Homo sapiens
atggtcactatcact

SEQ ID NO: 83590 - DNA, 15 bp, Homo sapiens
catggtcactatcac

SEQ ID NO: 83591 - DNA, 15 bp, Homo sapiens
tcatggtcactatca

SEQ ID NO: 83592 - DNA, 15 bp, Homo sapiens
ctcatggtcactatc

SEQ ID NO: 83593 - DNA, 15 bp, Homo sapiens
actcatggtcactat

SEQ ID NO: 83594 - DNA, 15 bp, Homo sapiens
aactcatggtcacta

SEQ ID NO: 83595 - DNA, 15 bp, Homo sapiens
aaactcatggtcact

SEQ ID NO: 83596 - DNA, 15 bp, Homo sapiens
gaaactcatggtcac

SEQ ID NO: 83597 - DNA, 15 bp, Homo sapiens
agaaactcatggtca

SEQ ID NO: 83598 - DNA, 15 bp, Homo sapiens
tagaaactcatggtc

SEQ ID NO: 83599 - DNA, 15 bp, Homo sapiens
ttagaaactcatggt

SEQ ID NO: 83600 - DNA, 15 bp, Homo sapiens
cttagaaactcatgg

SEQ ID NO: 83601 - DNA, 15 bp, Homo sapiens
tcttagaaactcatg

SEQ ID NO: 83602 - DNA, 15 bp, Homo sapiens
ttcttagaaactcat

SEQ ID NO: 83603 - DNA, 15 bp, Homo sapiens
tttcttagaaactca

SEQ ID NO: 83604 - DNA, 15 bp, Homo sapiens
ctttcttagaaactc

SEQ ID NO: 83605 - DNA, 15 bp, Homo sapiens
tctttcttagaaact

SEQ ID NO: 83606 - DNA, 15 bp, Homo sapiens
ttctttcttagaaac

SEQ ID NO: 83607 - DNA, 15 bp, Homo sapiens
cttctttcttagaaa

SEQ ID NO: 83608 - DNA, 15 bp, Homo sapiens
gcttctttcttagaa

SEQ ID NO: 83609 - DNA, 15 bp, Homo sapiens
tgcttctttcttaga

SEQ ID NO: 83610 - DNA, 15 bp, Homo sapiens
atgcttctttcttag

SEQ ID NO: 83611 - DNA, 15 bp, Homo sapiens
tatgcttctttctta

SEQ ID NO: 83612 - DNA, 15 bp, Homo sapiens
ttatgcttctttctt

SEQ ID NO: 83613 - DNA, 15 bp, Homo sapiens
attatgcttctttct

SEQ ID NO: 83614 - DNA, 15 bp, Homo sapiens
aattatgcttctttc

SEQ ID NO: 83615 - DNA, 15 bp, Homo sapiens
aaattatgcttcttt

SEQ ID NO: 83616 - DNA, 15 bp, Homo sapiens
gaaattatgcttctt

SEQ ID NO: 83617 - DNA, 15 bp, Homo sapiens
agaaattatgcttct

SEQ ID NO: 83618 - DNA, 15 bp, Homo sapiens
gagaaattatgcttc

SEQ ID NO: 83619 - DNA, 15 bp, Homo sapiens
ggagaaattatgctt

SEQ ID NO: 83620 - DNA, 15 bp, Homo sapiens
tggagaaattatgct

SEQ ID NO: 83621 - DNA, 15 bp, Homo sapiens
atggagaaattatgc

SEQ ID NO: 83622 - DNA, 15 bp, Homo sapiens
tatggagaaattatg

SEQ ID NO: 83623 - DNA, 15 bp, Homo sapiens
atatggagaaattat

SEQ ID NO: 83624 - DNA, 15 bp, Homo sapiens
catatggagaaatta

SEQ ID NO: 83625 - DNA, 15 bp, Homo sapiens
acatatggagaaatt

SEQ ID NO: 83626 - DNA, 15 bp, Homo sapiens
gacatatggagaaat

SEQ ID NO: 83627 - DNA, 15 bp, Homo sapiens
tgacatatggagaaa

SEQ ID NO: 83628 - DNA, 15 bp, Homo sapiens
atgacatatggagaa

SEQ ID NO: 83629 - DNA, 15 bp, Homo sapiens
gatgacatatggaga

SEQ ID NO: 83630 - DNA, 15 bp, Homo sapiens
ggatgacatatggag

SEQ ID NO: 83631 - DNA, 15 bp, Homo sapiens
tggatgacatatgga

SEQ ID NO: 83632 - DNA, 15 bp, Homo sapiens
gtggatgacatatgg

SEQ ID NO: 83633 - DNA, 15 bp, Homo sapiens
tgtggatgacatatg

SEQ ID NO: 83634 - DNA, 15 bp, Homo sapiens
ttgtggatgacatat

SEQ ID NO: 83635 - DNA, 15 bp, Homo sapiens
attgtggatgacata

SEQ ID NO: 83636 - DNA, 15 bp, Homo sapiens
aattgtggatgacat

SEQ ID NO: 83637 - DNA, 15 bp, Homo sapiens
caattgtggatgaca

SEQ ID NO: 83638 - DNA, 15 bp, Homo sapiens
tcaattgtggatgac

SEQ ID NO: 83639 - DNA, 15 bp, Homo sapiens
ttcaattgtggatga

SEQ ID NO: 83640 - DNA, 15 bp, Homo sapiens
tttcaattgtggatg

SEQ ID NO: 83641 - DNA, 15 bp, Homo sapiens
atttcaattgtggat

SEQ ID NO: 83642 - DNA, 15 bp, Homo sapiens
tatttcaattgtgga

SEQ ID NO: 83643 - DNA, 15 bp, Homo sapiens
atatttcaattgtgg

SEQ ID NO: 83644 - DNA, 15 bp, Homo sapiens
aatatttcaattgtg

SEQ ID NO: 83645 - DNA, 15 bp, Homo sapiens
taatatttcaattgt

SEQ ID NO: 83646 - DNA, 15 bp, Homo sapiens
ataatatttcaattg

SEQ ID NO: 83647 - DNA, 15 bp, Homo sapiens
aataatatttcaatt

SEQ ID NO: 83648 - DNA, 15 bp, Homo sapiens
caataatatttcaat

SEQ ID NO: 83649 - DNA, 15 bp, Homo sapiens
acaataatatttcaa

SEQ ID NO: 83650 - DNA, 15 bp, Homo sapiens
aacaataatatttca

SEQ ID NO: 83651 - DNA, 15 bp, Homo sapiens
taacaataatatttc

SEQ ID NO: 83652 - DNA, 15 bp, Homo sapiens
ttaacaataatattt

SEQ ID NO: 83653 - DNA, 15 bp, Homo sapiens
attaacaataatatt

SEQ ID NO: 83654 - DNA, 15 bp, Homo sapiens
aattaacaataatat

SEQ ID NO: 83655 - DNA, 15 bp, Homo sapiens
caattaacaataata

SEQ ID NO: 83656 - DNA, 15 bp, Homo sapiens
tcaattaacaataat

SEQ ID NO: 83657 - DNA, 15 bp, Homo sapiens
ttcaattaacaataa

SEQ ID NO: 83658 - DNA, 15 bp, Homo sapiens
tttcaattaacaata

SEQ ID NO: 83659 - DNA, 15 bp, Homo sapiens
ttttcaattaacaat

SEQ ID NO: 83660 - DNA, 15 bp, Homo sapiens
tttttcaattaacaa

SEQ ID NO: 83661 - DNA, 15 bp, Homo sapiens
ctttttcaattaaca

SEQ ID NO: 83662 - DNA, 15 bp, Homo sapiens
gctttttcaattaac

SEQ ID NO: 83663 - DNA, 15 bp, Homo sapiens
agctttttcaattaa

SEQ ID NO: 83664 - DNA, 15 bp, Homo sapiens
aagctttttcaatta

SEQ ID NO: 83665 - DNA, 15 bp, Homo sapiens
gaagctttttcaatt

SEQ ID NO: 83666 - DNA, 15 bp, Homo sapiens
agaagctttttcaat

SEQ ID NO: 83667 - DNA, 15 bp, Homo sapiens
tagaagctttttcaa

SEQ ID NO: 83668 - DNA, 15 bp, Homo sapiens
ctagaagctttttca

SEQ ID NO: 83669 - DNA, 15 bp, Homo sapiens
cctagaagctttttc

SEQ ID NO: 83670 - DNA, 15 bp, Homo sapiens
gcctagaagcttttt

SEQ ID NO: 83671 - DNA, 15 bp, Homo sapiens
ggcctagaagctttt

SEQ ID NO: 83672 - DNA, 15 bp, Homo sapiens
tggcctagaagcttt

SEQ ID NO: 83673 - DNA, 15 bp, Homo sapiens
ctggcctagaagctt

SEQ ID NO: 83674 - DNA, 15 bp, Homo sapiens
cctggcctagaagct

SEQ ID NO: 83675 - DNA, 15 bp, Homo sapiens
gcctggcctagaagc

SEQ ID NO: 83676 - DNA, 15 bp, Homo sapiens
tgcctggcctagaag

SEQ ID NO: 83677 - DNA, 15 bp, Homo sapiens
gtgcctggcctagaa

SEQ ID NO: 83678 - DNA, 15 bp, Homo sapiens
cgtgcctggcctaga

SEQ ID NO: 83679 - DNA, 15 bp, Homo sapiens
ccgtgcctggcctag

SEQ ID NO: 83680 - DNA, 15 bp, Homo sapiens
accgtgcctggccta

SEQ ID NO: 83681 - DNA, 15 bp, Homo sapiens
caccgtgcctggcct

SEQ ID NO: 83682 - DNA, 15 bp, Homo sapiens
ccaccgtgcctggcc

SEQ ID NO: 83683 - DNA, 15 bp, Homo sapiens
gccaccgtgcctggc

SEQ ID NO: 83684 - DNA, 15 bp, Homo sapiens
agccaccgtgcctgg

SEQ ID NO: 83685 - DNA, 15 bp, Homo sapiens
gagccaccgtgcctg

SEQ ID NO: 83686 - DNA, 15 bp, Homo sapiens
tgagccaccgtgcct

SEQ ID NO: 83687 - DNA, 15 bp, Homo sapiens
atgagccaccgtgcc

SEQ ID NO: 83688 - DNA, 15 bp, Homo sapiens
catgagccaccgtgc

SEQ ID NO: 83689 - DNA, 15 bp, Homo sapiens
gcatgagccaccgtg

SEQ ID NO: 83690 - DNA, 15 bp, Homo sapiens
ggcatgagccaccgt

SEQ ID NO: 83691 - DNA, 15 bp, Homo sapiens
ttacaggcatgagcc

SEQ ID NO: 83692 - DNA, 15 bp, Homo sapiens
attacaggcatgagc

SEQ ID NO: 83693 - DNA, 15 bp, Homo sapiens
gattacaggcatgag

SEQ ID NO: 83694 - DNA, 15 bp, Homo sapiens
ggattacaggcatga

SEQ ID NO: 83695 - DNA, 15 bp, Homo sapiens
taaagtgctgggatt

SEQ ID NO: 83696 - DNA, 15 bp, Homo sapiens
ctaaagtgctgggat

SEQ ID NO: 83697 - DNA, 15 bp, Homo sapiens
cctaaagtgctggga

SEQ ID NO: 83698 - DNA, 15 bp, Homo sapiens
tcctaaagtgctggg

SEQ ID NO: 83699 - DNA, 15 bp, Homo sapiens
ctcctaaagtgctgg

SEQ ID NO: 83700 - DNA, 15 bp, Homo sapiens
cctcctaaagtgctg

SEQ ID NO: 83701 - DNA, 15 bp, Homo sapiens
gcctcctaaagtgct

SEQ ID NO: 83702 - DNA, 15 bp, Homo sapiens
ggcctcctaaagtgc

SEQ ID NO: 83703 - DNA, 15 bp, Homo sapiens
tggcctcctaaagtg

SEQ ID NO: 83704 - DNA, 15 bp, Homo sapiens
ttggcctcctaaagt

SEQ ID NO: 83705 - DNA, 15 bp, Homo sapiens
cttggcctcctaaag

SEQ ID NO: 83706 - DNA, 15 bp, Homo sapiens
ccttggcctcctaaa

SEQ ID NO: 83707 - DNA, 15 bp, Homo sapiens
gccttggcctcctaa

SEQ ID NO: 83708 - DNA, 15 bp, Homo sapiens
cgccttggcctccta

SEQ ID NO: 83709 - DNA, 15 bp, Homo sapiens
ccgccttggcctcct

SEQ ID NO: 83710 - DNA, 15 bp, Homo sapiens
acccgccttggcctc

SEQ ID NO: 83711 - DNA, 15 bp, Homo sapiens
cacccgccttggcct

SEQ ID NO: 83712 - DNA, 15 bp, Homo sapiens
ccacccgccttggcc

SEQ ID NO: 83713 - DNA, 15 bp, Homo sapiens
tccacccgccttggc

SEQ ID NO: 83714 - DNA, 15 bp, Homo sapiens
atccacccgccttgg

SEQ ID NO: 83715 - DNA, 15 bp, Homo sapiens
gatccacccgccttg

SEQ ID NO: 83716 - DNA, 15 bp, Homo sapiens
tgatccacccgcctt

SEQ ID NO: 83717 - DNA, 15 bp, Homo sapiens
agtgatccacccgcc

SEQ ID NO: 83718 - DNA, 15 bp, Homo sapiens
aagtgatccacccgc

SEQ ID NO: 83719 - DNA, 15 bp, Homo sapiens
caagtgatccacccg

SEQ ID NO: 83720 - DNA, 15 bp, Homo sapiens
cccatgttggccagg

SEQ ID NO: 83721 - DNA, 15 bp, Homo sapiens
ccccatgttggccag

SEQ ID NO: 83722 - DNA, 15 bp, Homo sapiens
tccccatgttggcca

SEQ ID NO: 83723 - DNA, 15 bp, Homo sapiens
ttccccatgttggcc

SEQ ID NO: 83724 - DNA, 15 bp, Homo sapiens
tttccccatgttggc

SEQ ID NO: 83725 - DNA, 15 bp, Homo sapiens
gtttccccatgttgg

SEQ ID NO: 83726 - DNA, 15 bp, Homo sapiens
ggtttccccatgttg

SEQ ID NO: 83727 - DNA, 15 bp, Homo sapiens
gggtttccccatgtt

SEQ ID NO: 83728 - DNA, 15 bp, Homo sapiens
agggtttccccatgt

SEQ ID NO: 83729 - DNA, 15 bp, Homo sapiens
cagggtttccccatg

SEQ ID NO: 83730 - DNA, 15 bp, Homo sapiens
acagggtttccccat

SEQ ID NO: 83731 - DNA, 15 bp, Homo sapiens
gacagggtttcccca

SEQ ID NO: 83732 - DNA, 15 bp, Homo sapiens
agacagggtttcccc

SEQ ID NO: 83733 - DNA, 15 bp, Homo sapiens
gagacagggtttccc

SEQ ID NO: 83734 - DNA, 15 bp, Homo sapiens
agagacagggtttcc

SEQ ID NO: 83735 - DNA, 15 bp, Homo sapiens
attttgtatttttag

SEQ ID NO: 83736 - DNA, 15 bp, Homo sapiens
tattttgtattttta

SEQ ID NO: 83737 - DNA, 15 bp, Homo sapiens
ttattttgtattttt

SEQ ID NO: 83738 - DNA, 15 bp, Homo sapiens
cttattttgtatttt

SEQ ID NO: 83739 - DNA, 15 bp, Homo sapiens
gcttattttgtattt

SEQ ID NO: 83740 - DNA, 15 bp, Homo sapiens
agcttattttgtatt

SEQ ID NO: 83741 - DNA, 15 bp, Homo sapiens
cagcttattttgtat

SEQ ID NO: 83742 - DNA, 15 bp, Homo sapiens
ccagcttattttgta

SEQ ID NO: 83743 - DNA, 15 bp, Homo sapiens
cccagcttattttgt

SEQ ID NO: 83744 - DNA, 15 bp, Homo sapiens
gcccagcttattttg

SEQ ID NO: 83745 - DNA, 15 bp, Homo sapiens
cgcccagcttatttt

SEQ ID NO: 83746 - DNA, 15 bp, Homo sapiens
acgcccagcttattt

SEQ ID NO: 83747 - DNA, 15 bp, Homo sapiens
cacgcccagcttatt

SEQ ID NO: 83748 - DNA, 15 bp, Homo sapiens
ccacgcccagcttat

SEQ ID NO: 83749 - DNA, 15 bp, Homo sapiens
accacgcccagctta

SEQ ID NO: 83750 - DNA, 15 bp, Homo sapiens
caccacgcccagctt

SEQ ID NO: 83751 - DNA, 15 bp, Homo sapiens
cgcaccaccacgccc

SEQ ID NO: 83752 - DNA, 15 bp, Homo sapiens
acgcaccaccacgcc

SEQ ID NO: 83753 - DNA, 15 bp, Homo sapiens
caagtagctgggatt

SEQ ID NO: 83754 - DNA, 15 bp, Homo sapiens
attcaagcaattctc

SEQ ID NO: 83755 - DNA, 15 bp, Homo sapiens
gattcaagcaattct

SEQ ID NO: 83756 - DNA, 15 bp, Homo sapiens
agattcaagcaattc

SEQ ID NO: 83757 - DNA, 15 bp, Homo sapiens
cagattcaagcaatt

SEQ ID NO: 83758 - DNA, 15 bp, Homo sapiens
ccagattcaagcaat

SEQ ID NO: 83759 - DNA, 15 bp, Homo sapiens
cccagattcaagcaa

SEQ ID NO: 83760 - DNA, 15 bp, Homo sapiens
tcccagattcaagca

SEQ ID NO: 83761 - DNA, 15 bp, Homo sapiens
ctcccagattcaagc

SEQ ID NO: 83762 - DNA, 15 bp, Homo sapiens
cctcccagattcaag

SEQ ID NO: 83763 - DNA, 15 bp, Homo sapiens
gcctcccagattcaa

SEQ ID NO: 83764 - DNA, 15 bp, Homo sapiens
cgcctcccagattca

SEQ ID NO: 83765 - DNA, 15 bp, Homo sapiens
ccgcctcccagattc

SEQ ID NO: 83766 - DNA, 15 bp, Homo sapiens
tccgcctcccagatt

SEQ ID NO: 83767 - DNA, 15 bp, Homo sapiens
ctccgcctcccagat

SEQ ID NO: 83768 - DNA, 15 bp, Homo sapiens
cctccgcctcccaga

SEQ ID NO: 83769 - DNA, 15 bp, Homo sapiens
actcagctcactgca

SEQ ID NO: 83770 - DNA, 15 bp, Homo sapiens
aactcagctcactgc

SEQ ID NO: 83771 - DNA, 15 bp, Homo sapiens
gaactcagctcactg

SEQ ID NO: 83772 - DNA, 15 bp, Homo sapiens
tgaactcagctcact

SEQ ID NO: 83773 - DNA, 15 bp, Homo sapiens
atgaactcagctcac

SEQ ID NO: 83774 - DNA, 15 bp, Homo sapiens
catgaactcagctca

SEQ ID NO: 83775 - DNA, 15 bp, Homo sapiens
gcatgaactcagctc

SEQ ID NO: 83776 - DNA, 15 bp, Homo sapiens
ggcatgaactcagct

SEQ ID NO: 83777 - DNA, 15 bp, Homo sapiens
tggcatgaactcagc

SEQ ID NO: 83778 - DNA, 15 bp, Homo sapiens
atggcatgaactcag

SEQ ID NO: 83779 - DNA, 15 bp, Homo sapiens
aatggcatgaactca

SEQ ID NO: 83780 - DNA, 15 bp, Homo sapiens
caatggcatgaactc

SEQ ID NO: 83781 - DNA, 15 bp, Homo sapiens
gcaatggcatgaact

SEQ ID NO: 83782 - DNA, 15 bp, Homo sapiens
tgcaatggcatgaac

SEQ ID NO: 83783 - DNA, 15 bp, Homo sapiens
atgcaatggcatgaa

SEQ ID NO: 83784 - DNA, 15 bp, Homo sapiens
aatgcaatggcatga

SEQ ID NO: 83785 - DNA, 15 bp, Homo sapiens
gaatgcaatggcatg

SEQ ID NO: 83786 - DNA, 15 bp, Homo sapiens
ggaatgcaatggcat

SEQ ID NO: 83787 - DNA, 15 bp, Homo sapiens
tggaatgcaatggca

SEQ ID NO: 83788 - DNA, 15 bp, Homo sapiens
ctggaatgcaatggc

SEQ ID NO: 83789 - DNA, 15 bp, Homo sapiens
gctggaatgcaatgg

SEQ ID NO: 83790 - DNA, 15 bp, Homo sapiens
ggctggaatgcaatg

SEQ ID NO: 83791 - DNA, 15 bp, Homo sapiens
aggctggaatgcaat

SEQ ID NO: 83792 - DNA, 15 bp, Homo sapiens
caggctggaatgcaa

SEQ ID NO: 83793 - DNA, 15 bp, Homo sapiens
ccaggctggaatgca

SEQ ID NO: 83794 - DNA, 15 bp, Homo sapiens
cccaggctggaatgc

SEQ ID NO: 83795 - DNA, 15 bp, Homo sapiens
gcccaggctggaatg

SEQ ID NO: 83796 - DNA, 15 bp, Homo sapiens
tgcccaggctggaat

SEQ ID NO: 83797 - DNA, 15 bp, Homo sapiens
ttgcccaggctggaa

SEQ ID NO: 83798 - DNA, 15 bp, Homo sapiens
ggtttcgctcttgtt

SEQ ID NO: 83799 - DNA, 15 bp, Homo sapiens
tggtttcgctcttgt

SEQ ID NO: 83800 - DNA, 15 bp, Homo sapiens
atggtttcgctcttg

SEQ ID NO: 83801 - DNA, 15 bp, Homo sapiens
gatggtttcgctctt

SEQ ID NO: 83802 - DNA, 15 bp, Homo sapiens
agatggtttcgctct

SEQ ID NO: 83803 - DNA, 15 bp, Homo sapiens
gagatggtttcgctc

SEQ ID NO: 83804 - DNA, 15 bp, Homo sapiens
ggagatggtttcgct

SEQ ID NO: 83805 - DNA, 15 bp, Homo sapiens
gggagatggtttcgc

SEQ ID NO: 83806 - DNA, 15 bp, Homo sapiens
tgggagatggtttcg

SEQ ID NO: 83807 - DNA, 15 bp, Homo sapiens
ttgggagatggtttc

SEQ ID NO: 83808 - DNA, 15 bp, Homo sapiens
tttgggagatggttt

SEQ ID NO: 83809 - DNA, 15 bp, Homo sapiens
ttttgggagatggtt

SEQ ID NO: 83810 - DNA, 15 bp, Homo sapiens
cttttgggagatggt

SEQ ID NO: 83811 - DNA, 15 bp, Homo sapiens
tcttttgggagatgg

SEQ ID NO: 83812 - DNA, 15 bp, Homo sapiens
ttcttttgggagatg

SEQ ID NO: 83813 - DNA, 15 bp, Homo sapiens
tttcttttgggagat

SEQ ID NO: 83814 - DNA, 15 bp, Homo sapiens
ttttcttttgggaga

SEQ ID NO: 83815 - DNA, 15 bp, Homo sapiens
tttttcttttgggag

SEQ ID NO: 83816 - DNA, 15 bp, Homo sapiens
ttttttcttttggga

SEQ ID NO: 83817 - DNA, 15 bp, Homo sapiens
tttttttcttttggg

SEQ ID NO: 83818 - DNA, 15 bp, Homo sapiens
ttttttttcttttgg

SEQ ID NO: 83819 - DNA, 15 bp, Homo sapiens
tttttttttcttttg

SEQ ID NO: 83820 - DNA, 15 bp, Homo sapiens
ttttttttttctttt

SEQ ID NO: 83821 - DNA, 15 bp, Homo sapiens
cttttttttttcttt

SEQ ID NO: 83822 - DNA, 15 bp, Homo sapiens
tcttttttttttctt

SEQ ID NO: 83823 - DNA, 15 bp, Homo sapiens
ttcttttttttttct

SEQ ID NO: 83824 - DNA, 15 bp, Homo sapiens
tttcttttttttttc

SEQ ID NO: 83825 - DNA, 15 bp, Homo sapiens
ctttctttttttttt

SEQ ID NO: 83826 - DNA, 15 bp, Homo sapiens
tctttcttttttttt

SEQ ID NO: 83827 - DNA, 15 bp, Homo sapiens
ttctttctttttttt

SEQ ID NO: 83828 - DNA, 15 bp, Homo sapiens
tttctttcttttttt

SEQ ID NO: 83829 - DNA, 15 bp, Homo sapiens
ttttctttctttttt

SEQ ID NO: 83830 - DNA, 15 bp, Homo sapiens
tttttctttcttttt

SEQ ID NO: 83831 - DNA, 15 bp, Homo sapiens
ctttttctttctttt

SEQ ID NO: 83832 - DNA, 15 bp, Homo sapiens
gctttttctttcttt

SEQ ID NO: 83833 - DNA, 15 bp, Homo sapiens
agctttttctttctt

SEQ ID NO: 83834 - DNA, 15 bp, Homo sapiens
aagctttttctttct

SEQ ID NO: 83835 - DNA, 15 bp, Homo sapiens
gaagctttttctttc

SEQ ID NO: 83836 - DNA, 15 bp, Homo sapiens
agaagctttttcttt

SEQ ID NO: 83837 - DNA, 15 bp, Homo sapiens
tagaagctttttctt

SEQ ID NO: 83838 - DNA, 15 bp, Homo sapiens
ctagaagctttttct

SEQ ID NO: 83839 - DNA, 15 bp, Homo sapiens
actagaagctttttc

SEQ ID NO: 83840 - DNA, 15 bp, Homo sapiens
aactagaagcttttt

SEQ ID NO: 83841 - DNA, 15 bp, Homo sapiens
aaactagaagctttt

SEQ ID NO: 83842 - DNA, 15 bp, Homo sapiens
caaactagaagcttt

SEQ ID NO: 83843 - DNA, 15 bp, Homo sapiens
ccaaactagaagctt

SEQ ID NO: 83844 - DNA, 15 bp, Homo sapiens
accaaactagaagct

SEQ ID NO: 83845 - DNA, 15 bp, Homo sapiens
aaccaaactagaagc

SEQ ID NO: 83846 - DNA, 15 bp, Homo sapiens
taaccaaactagaag

SEQ ID NO: 83847 - DNA, 15 bp, Homo sapiens
gtaaccaaactagaa

SEQ ID NO: 83848 - DNA, 15 bp, Homo sapiens
tgtaaccaaactaga

SEQ ID NO: 83849 - DNA, 15 bp, Homo sapiens
atgtaaccaaactag

SEQ ID NO: 83850 - DNA, 15 bp, Homo sapiens
gatgtaaccaaacta

SEQ ID NO: 83851 - DNA, 15 bp, Homo sapiens
agatgtaaccaaact

SEQ ID NO: 83852 - DNA, 15 bp, Homo sapiens
aagatgtaaccaaac

SEQ ID NO: 83853 - DNA, 15 bp, Homo sapiens
caagatgtaaccaaa

SEQ ID NO: 83854 - DNA, 15 bp, Homo sapiens
ccaagatgtaaccaa

SEQ ID NO: 83855 - DNA, 15 bp, Homo sapiens
accaagatgtaacca

SEQ ID NO: 83856 - DNA, 15 bp, Homo sapiens
gaccaagatgtaacc

SEQ ID NO: 83857 - DNA, 15 bp, Homo sapiens
agaccaagatgtaac

SEQ ID NO: 83858 - DNA, 15 bp, Homo sapiens
tagaccaagatgtaa

SEQ ID NO: 83859 - DNA, 15 bp, Homo sapiens
atagaccaagatgta

SEQ ID NO: 83860 - DNA, 15 bp, Homo sapiens
tatagaccaagatgt

SEQ ID NO: 83861 - DNA, 15 bp, Homo sapiens
ttatagaccaagatg

SEQ ID NO: 83862 - DNA, 15 bp, Homo sapiens
cttatagaccaagat

SEQ ID NO: 83863 - DNA, 15 bp, Homo sapiens
ccttatagaccaaga

SEQ ID NO: 83864 - DNA, 15 bp, Homo sapiens
accttatagaccaag

SEQ ID NO: 83865 - DNA, 15 bp, Homo sapiens
caccttatagaccaa

SEQ ID NO: 83866 - DNA, 15 bp, Homo sapiens
ccaccttatagacca

SEQ ID NO: 83867 - DNA, 15 bp, Homo sapiens
accaccttatagacc

SEQ ID NO: 83868 - DNA, 15 bp, Homo sapiens
aaccaccttatagac

SEQ ID NO: 83869 - DNA, 15 bp, Homo sapiens
aaaccaccttataga

SEQ ID NO: 83870 - DNA, 15 bp, Homo sapiens
caaaccaccttatag

SEQ ID NO: 83871 - DNA, 15 bp, Homo sapiens
acaaaccaccttata

SEQ ID NO: 83872 - DNA, 15 bp, Homo sapiens
tacaaaccaccttat

SEQ ID NO: 83873 - DNA, 15 bp, Homo sapiens
ttacaaaccacctta

SEQ ID NO: 83874 - DNA, 15 bp, Homo sapiens
tttacaaaccacctt

SEQ ID NO: 83875 - DNA, 15 bp, Homo sapiens
atttacaaaccacct

SEQ ID NO: 83876 - DNA, 15 bp, Homo sapiens
aatttacaaaccacc

SEQ ID NO: 83877 - DNA, 15 bp, Homo sapiens
caatttacaaaccac

SEQ ID NO: 83878 - DNA, 15 bp, Homo sapiens
ccaatttacaaacca

SEQ ID NO: 83879 - DNA, 15 bp, Homo sapiens
accaatttacaaacc

SEQ ID NO: 83880 - DNA, 15 bp, Homo sapiens
aaccaatttacaaac

SEQ ID NO: 83881 - DNA, 15 bp, Homo sapiens
aaaccaatttacaaa

SEQ ID NO: 83882 - DNA, 15 bp, Homo sapiens
taaaccaatttacaa

SEQ ID NO: 83883 - DNA, 15 bp, Homo sapiens
ttaaaccaatttaca

SEQ ID NO: 83884 - DNA, 15 bp, Homo sapiens
gttaaaccaatttac

SEQ ID NO: 83885 - DNA, 15 bp, Homo sapiens
ggttaaaccaattta

SEQ ID NO: 83886 - DNA, 15 bp, Homo sapiens
gggttaaaccaattt

SEQ ID NO: 83887 - DNA, 15 bp, Homo sapiens
tgggttaaaccaatt

SEQ ID NO: 83888 - DNA, 15 bp, Homo sapiens
ttgggttaaaccaat

SEQ ID NO: 83889 - DNA, 15 bp, Homo sapiens
cttgggttaaaccaa

SEQ ID NO: 83890 - DNA, 15 bp, Homo sapiens
ccttgggttaaacca

SEQ ID NO: 83891 - DNA, 15 bp, Homo sapiens
gccttgggttaaacc

SEQ ID NO: 83892 - DNA, 15 bp, Homo sapiens
ggccttgggttaaac

SEQ ID NO: 83893 - DNA, 15 bp, Homo sapiens
aggccttgggttaaa

SEQ ID NO: 83894 - DNA, 15 bp, Homo sapiens
caggccttgggttaa

SEQ ID NO: 83895 - DNA, 15 bp, Homo sapiens
ccaggccttgggtta

SEQ ID NO: 83896 - DNA, 15 bp, Homo sapiens
accaggccttgggtt

SEQ ID NO: 83897 - DNA, 15 bp, Homo sapiens
aaccaggccttgggt

SEQ ID NO: 83898 - DNA, 15 bp, Homo sapiens
gaaccaggccttggg

SEQ ID NO: 83899 - DNA, 15 bp, Homo sapiens
agaaccaggccttgg

SEQ ID NO: 83900 - DNA, 15 bp, Homo sapiens
gagaaccaggccttg

SEQ ID NO: 83901 - DNA, 15 bp, Homo sapiens
tgagaaccaggcctt

SEQ ID NO: 83902 - DNA, 15 bp, Homo sapiens
atgagaaccaggcct

SEQ ID NO: 83903 - DNA, 15 bp, Homo sapiens
tatgagaaccaggcc

SEQ ID NO: 83904 - DNA, 15 bp, Homo sapiens
atatgagaaccaggc

SEQ ID NO: 83905 - DNA, 15 bp, Homo sapiens
tatatgagaaccagg

SEQ ID NO: 83906 - DNA, 15 bp, Homo sapiens
ttatatgagaaccag

SEQ ID NO: 83907 - DNA, 15 bp, Homo sapiens
cttatatgagaacca

SEQ ID NO: 83908 - DNA, 15 bp, Homo sapiens
acttatatgagaacc

SEQ ID NO: 83909 - DNA, 15 bp, Homo sapiens
tacttatatgagaac

SEQ ID NO: 83910 - DNA, 15 bp, Homo sapiens
ttacttatatgagaa

SEQ ID NO: 83911 - DNA, 15 bp, Homo sapiens
attacttatatgaga

SEQ ID NO: 83912 - DNA, 15 bp, Homo sapiens
tattacttatatgag

SEQ ID NO: 83913 - DNA, 15 bp, Homo sapiens
ctattacttatatga

SEQ ID NO: 83914 - DNA, 15 bp, Homo sapiens
cctattacttatatg

SEQ ID NO: 83915 - DNA, 15 bp, Homo sapiens
ccctattacttatat

SEQ ID NO: 83916 - DNA, 15 bp, Homo sapiens
accctattacttata

SEQ ID NO: 83917 - DNA, 15 bp, Homo sapiens
taccctattacttat

SEQ ID NO: 83918 - DNA, 15 bp, Homo sapiens
ataccctattactta

SEQ ID NO: 83919 - DNA, 15 bp, Homo sapiens
aataccctattactt

SEQ ID NO: 83920 - DNA, 15 bp, Homo sapiens
aaataccctattact

SEQ ID NO: 83921 - DNA, 15 bp, Homo sapiens
taaataccctattac

SEQ ID NO: 83922 - DNA, 15 bp, Homo sapiens
ataaataccctatta

SEQ ID NO: 83923 - DNA, 15 bp, Homo sapiens
cataaataccctatt

SEQ ID NO: 83924 - DNA, 15 bp, Homo sapiens
tcataaataccctat

SEQ ID NO: 83925 - DNA, 15 bp, Homo sapiens
atcataaatacccta

SEQ ID NO: 83926 - DNA, 15 bp, Homo sapiens
catcataaataccct

SEQ ID NO: 83927 - DNA, 15 bp, Homo sapiens
ccatcataaataccc

SEQ ID NO: 83928 - DNA, 15 bp, Homo sapiens
tccatcataaatacc

SEQ ID NO: 83929 - DNA, 15 bp, Homo sapiens
ctccatcataaatac

SEQ ID NO: 83930 - DNA, 15 bp, Homo sapiens
tctccatcataaata

SEQ ID NO: 83931 - DNA, 15 bp, Homo sapiens
ctctccatcataaat

SEQ ID NO: 83932 - DNA, 15 bp, Homo sapiens
tctctccatcataaa

SEQ ID NO: 83933 - DNA, 15 bp, Homo sapiens
ttctctccatcataa

SEQ ID NO: 83934 - DNA, 15 bp, Homo sapiens
cttctctccatcata

SEQ ID NO: 83935 - DNA, 15 bp, Homo sapiens
ccttctctccatcat

SEQ ID NO: 83936 - DNA, 15 bp, Homo sapiens
gccttctctccatca

SEQ ID NO: 83937 - DNA, 15 bp, Homo sapiens
agccttctctccatc

SEQ ID NO: 83938 - DNA, 15 bp, Homo sapiens
cagccttctctccat

SEQ ID NO: 83939 - DNA, 15 bp, Homo sapiens
ccagccttctctcca

SEQ ID NO: 83940 - DNA, 15 bp, Homo sapiens
tccagccttctctcc

SEQ ID NO: 83941 - DNA, 15 bp, Homo sapiens
ttccagccttctctc

SEQ ID NO: 83942 - DNA, 15 bp, Homo sapiens
cttccagccttctct

SEQ ID NO: 83943 - DNA, 15 bp, Homo sapiens
tcttccagccttctc

SEQ ID NO: 83944 - DNA, 15 bp, Homo sapiens
ctcttccagccttct

SEQ ID NO: 83945 - DNA, 15 bp, Homo sapiens
cctcttccagccttc

SEQ ID NO: 83946 - DNA, 15 bp, Homo sapiens
gcctcttccagcctt

SEQ ID NO: 83947 - DNA, 15 bp, Homo sapiens
ggcctcttccagcct

SEQ ID NO: 83948 - DNA, 15 bp, Homo sapiens
aggcctcttccagcc

SEQ ID NO: 83949 - DNA, 15 bp, Homo sapiens
caggcctcttccagc

SEQ ID NO: 83950 - DNA, 15 bp, Homo sapiens
tcaggcctcttccag

SEQ ID NO: 83951 - DNA, 15 bp, Homo sapiens
ttcaggcctcttcca

SEQ ID NO: 83952 - DNA, 15 bp, Homo sapiens
gttcaggcctcttcc

SEQ ID NO: 83953 - DNA, 15 bp, Homo sapiens
tgttcaggcctcttc

SEQ ID NO: 83954 - DNA, 15 bp, Homo sapiens
gtgttcaggcctctt

SEQ ID NO: 83955 - DNA, 15 bp, Homo sapiens
tgtgttcaggcctct

SEQ ID NO: 83956 - DNA, 15 bp, Homo sapiens
ctgtgttcaggcctc

SEQ ID NO: 83957 - DNA, 15 bp, Homo sapiens
cctgtgttcaggcct

SEQ ID NO: 83958 - DNA, 15 bp, Homo sapiens
gcctgtgttcaggcc

SEQ ID NO: 83959 - DNA, 15 bp, Homo sapiens
agcctgtgttcaggc

SEQ ID NO: 83960 - DNA, 15 bp, Homo sapiens
aagcctgtgttcagg

SEQ ID NO: 83961 - DNA, 15 bp, Homo sapiens
gaagcctgtgttcag

SEQ ID NO: 83962 - DNA, 15 bp, Homo sapiens
agaagcctgtgttca

SEQ ID NO: 83963 - DNA, 15 bp, Homo sapiens
aagaagcctgtgttc

SEQ ID NO: 83964 - DNA, 15 bp, Homo sapiens
aaagaagcctgtgtt

SEQ ID NO: 83965 - DNA, 15 bp, Homo sapiens
aaaagaagcctgtgt

SEQ ID NO: 83966 - DNA, 15 bp, Homo sapiens
gaaaagaagcctgtg

SEQ ID NO: 83967 - DNA, 15 bp, Homo sapiens
agaaaagaagcctgt

SEQ ID NO: 83968 - DNA, 15 bp, Homo sapiens
gagaaaagaagcctg

SEQ ID NO: 83969 - DNA, 15 bp, Homo sapiens
agagaaaagaagcct

SEQ ID NO: 83970 - DNA, 15 bp, Homo sapiens
tagagaaaagaagcc

SEQ ID NO: 83971 - DNA, 15 bp, Homo sapiens
ctagagaaaagaagc

SEQ ID NO: 83972 - DNA, 15 bp, Homo sapiens
gctagagaaaagaag

SEQ ID NO: 83973 - DNA, 15 bp, Homo sapiens
tgctagagaaaagaa

SEQ ID NO: 83974 - DNA, 15 bp, Homo sapiens
gtgctagagaaaaga

SEQ ID NO: 83975 - DNA, 15 bp, Homo sapiens
tgtgctagagaaaag

SEQ ID NO: 83976 - DNA, 15 bp, Homo sapiens
ttgtgctagagaaaa

SEQ ID NO: 83977 - DNA, 15 bp, Homo sapiens
gttgtgctagagaaa

SEQ ID NO: 83978 - DNA, 15 bp, Homo sapiens
ggttgtgctagagaa

SEQ ID NO: 83979 - DNA, 15 bp, Homo sapiens
gggttgtgctagaga

SEQ ID NO: 83980 - DNA, 15 bp, Homo sapiens
agggttgtgctagag

SEQ ID NO: 83981 - DNA, 15 bp, Homo sapiens
tagggttgtgctaga

SEQ ID NO: 83982 - DNA, 15 bp, Homo sapiens
gtagggttgtgctag

SEQ ID NO: 83983 - DNA, 15 bp, Homo sapiens
tgtagggttgtgcta

SEQ ID NO: 83984 - DNA, 15 bp, Homo sapiens
ttgtagggttgtgct

SEQ ID NO: 83985 - DNA, 15 bp, Homo sapiens
cttgtagggttgtgc

SEQ ID NO: 83986 - DNA, 15 bp, Homo sapiens
ccttgtagggttgtg

SEQ ID NO: 83987 - DNA, 15 bp, Homo sapiens
gccttgtagggttgt

SEQ ID NO: 83988 - DNA, 15 bp, Homo sapiens
ggccttgtagggttg

SEQ ID NO: 83989 - DNA, 15 bp, Homo sapiens
tggccttgtagggtt

SEQ ID NO: 83990 - DNA, 15 bp, Homo sapiens
ctggccttgtagggt

SEQ ID NO: 83991 - DNA, 15 bp, Homo sapiens
gctggccttgtaggg

SEQ ID NO: 83992 - DNA, 15 bp, Homo sapiens
agctggccttgtagg

SEQ ID NO: 83993 - DNA, 15 bp, Homo sapiens
cagctggccttgtag

SEQ ID NO: 83994 - DNA, 15 bp, Homo sapiens
tcagctggccttgta

SEQ ID NO: 83995 - DNA, 15 bp, Homo sapiens
atcagctggccttgt

SEQ ID NO: 83996 - DNA, 15 bp, Homo sapiens
aatcagctggccttg

SEQ ID NO: 83997 - DNA, 15 bp, Homo sapiens
gaatcagctggcctt

SEQ ID NO: 83998 - DNA, 15 bp, Homo sapiens
agaatcagctggcct

SEQ ID NO: 83999 - DNA, 15 bp, Homo sapiens
tagaatcagctggcc

SEQ ID NO: 84000 - DNA, 15 bp, Homo sapiens
ctagaatcagctggc

SEQ ID NO: 84001 - DNA, 15 bp, Homo sapiens
cctagaatcagctgg

SEQ ID NO: 84002 - DNA, 15 bp, Homo sapiens
ccctagaatcagctg

SEQ ID NO: 84003 - DNA, 15 bp, Homo sapiens
accctagaatcagct

SEQ ID NO: 84004 - DNA, 15 bp, Homo sapiens
aaccctagaatcagc

SEQ ID NO: 84005 - DNA, 15 bp, Homo sapiens
taaccctagaatcag

SEQ ID NO: 84006 - DNA, 15 bp, Homo sapiens
ataaccctagaatca

SEQ ID NO: 84007 - DNA, 15 bp, Homo sapiens
aataaccctagaatc

SEQ ID NO: 84008 - DNA, 15 bp, Homo sapiens
aaataaccctagaat

SEQ ID NO: 84009 - DNA, 15 bp, Homo sapiens
gaaataaccctagaa

SEQ ID NO: 84010 - DNA, 15 bp, Homo sapiens
agaaataaccctaga

SEQ ID NO: 84011 - DNA, 15 bp, Homo sapiens
cagaaataaccctag

SEQ ID NO: 84012 - DNA, 15 bp, Homo sapiens
acagaaataacccta

SEQ ID NO: 84013 - DNA, 15 bp, Homo sapiens
gacagaaataaccct

SEQ ID NO: 84014 - DNA, 15 bp, Homo sapiens
ggacagaaataaccc

SEQ ID NO: 84015 - DNA, 15 bp, Homo sapiens
cggacagaaataacc

SEQ ID NO: 84016 - DNA, 15 bp, Homo sapiens
acggacagaaataac

SEQ ID NO: 84017 - DNA, 15 bp, Homo sapiens
aacggacagaaataa

SEQ ID NO: 84018 - DNA, 15 bp, Homo sapiens
gaacggacagaaata

SEQ ID NO: 84019 - DNA, 15 bp, Homo sapiens
ggaacggacagaaat

SEQ ID NO: 84020 - DNA, 15 bp, Homo sapiens
aggaacggacagaaa

SEQ ID NO: 84021 - DNA, 15 bp, Homo sapiens
aaggaacggacagaa

SEQ ID NO: 84022 - DNA, 15 bp, Homo sapiens
taaggaacggacaga

SEQ ID NO: 84023 - DNA, 15 bp, Homo sapiens
ataaggaacggacag

SEQ ID NO: 84024 - DNA, 15 bp, Homo sapiens
tataaggaacggaca

SEQ ID NO: 84025 - DNA, 15 bp, Homo sapiens
atataaggaacggac

SEQ ID NO: 84026 - DNA, 15 bp, Homo sapiens
gatataaggaacgga

SEQ ID NO: 84027 - DNA, 15 bp, Homo sapiens
ggatataaggaacgg

SEQ ID NO: 84028 - DNA, 15 bp, Homo sapiens
aggatataaggaacg

SEQ ID NO: 84029 - DNA, 15 bp, Homo sapiens
gaggatataaggaac

SEQ ID NO: 84030 - DNA, 15 bp, Homo sapiens
tgaggatataaggaa

SEQ ID NO: 84031 - DNA, 15 bp, Homo sapiens
ctgaggatataagga

SEQ ID NO: 84032 - DNA, 15 bp, Homo sapiens
cctgaggatataagg

SEQ ID NO: 84033 - DNA, 15 bp, Homo sapiens
acctgaggatataag

SEQ ID NO: 84034 - DNA, 15 bp, Homo sapiens
cacctgaggatataa

SEQ ID NO: 84035 - DNA, 15 bp, Homo sapiens
ccacctgaggatata

SEQ ID NO: 84036 - DNA, 15 bp, Homo sapiens
tccacctgaggatat

SEQ ID NO: 84037 - DNA, 15 bp, Homo sapiens
atccacctgaggata

SEQ ID NO: 84038 - DNA, 15 bp, Homo sapiens
tatccacctgaggat

SEQ ID NO: 84039 - DNA, 15 bp, Homo sapiens
atatccacctgagga

SEQ ID NO: 84040 - DNA, 15 bp, Homo sapiens
aatatccacctgagg

SEQ ID NO: 84041 - DNA, 15 bp, Homo sapiens
aaatatccacctgag

SEQ ID NO: 84042 - DNA, 15 bp, Homo sapiens
taaatatccacctga

SEQ ID NO: 84043 - DNA, 15 bp, Homo sapiens
gtaaatatccacctg

SEQ ID NO: 84044 - DNA, 15 bp, Homo sapiens
agtaaatatccacct

SEQ ID NO: 84045 - DNA, 15 bp, Homo sapiens
gagtaaatatccacc

SEQ ID NO: 84046 - DNA, 15 bp, Homo sapiens
ggagtaaatatccac

SEQ ID NO: 84047 - DNA, 15 bp, Homo sapiens
aggagtaaatatcca

SEQ ID NO: 84048 - DNA, 15 bp, Homo sapiens
aaggagtaaatatcc

SEQ ID NO: 84049 - DNA, 15 bp, Homo sapiens
aaaggagtaaatatc

SEQ ID NO: 84050 - DNA, 15 bp, Homo sapiens
aaaaggagtaaatat

SEQ ID NO: 84051 - DNA, 15 bp, Homo sapiens
caaaaggagtaaata

SEQ ID NO: 84052 - DNA, 15 bp, Homo sapiens
gcaaaaggagtaaat

SEQ ID NO: 84053 - DNA, 15 bp, Homo sapiens
tgcaaaaggagtaaa

SEQ ID NO: 84054 - DNA, 15 bp, Homo sapiens
atgcaaaaggagtaa

SEQ ID NO: 84055 - DNA, 15 bp, Homo sapiens
gatgcaaaaggagta

SEQ ID NO: 84056 - DNA, 15 bp, Homo sapiens
tgatgcaaaaggagt

SEQ ID NO: 84057 - DNA, 15 bp, Homo sapiens
atgatgcaaaaggag

SEQ ID NO: 84058 - DNA, 15 bp, Homo sapiens
aatgatgcaaaagga

SEQ ID NO: 84059 - DNA, 15 bp, Homo sapiens
taatgatgcaaaagg

SEQ ID NO: 84060 - DNA, 15 bp, Homo sapiens
ctaatgatgcaaaag

SEQ ID NO: 84061 - DNA, 15 bp, Homo sapiens
cctaatgatgcaaaa

SEQ ID NO: 84062 - DNA, 15 bp, Homo sapiens
tcctaatgatgcaaa

SEQ ID NO: 84063 - DNA, 15 bp, Homo sapiens
ttcctaatgatgcaa

SEQ ID NO: 84064 - DNA, 15 bp, Homo sapiens
attcctaatgatgca

SEQ ID NO: 84065 - DNA, 15 bp, Homo sapiens
tattcctaatgatgc

SEQ ID NO: 84066 - DNA, 15 bp, Homo sapiens
ctattcctaatgatg

SEQ ID NO: 84067 - DNA, 15 bp, Homo sapiens
cctattcctaatgat

SEQ ID NO: 84068 - DNA, 15 bp, Homo sapiens
gcctattcctaatga

SEQ ID NO: 84069 - DNA, 15 bp, Homo sapiens
agcctattcctaatg

SEQ ID NO: 84070 - DNA, 15 bp, Homo sapiens
gagcctattcctaat

SEQ ID NO: 84071 - DNA, 15 bp, Homo sapiens
tgagcctattcctaa

SEQ ID NO: 84072 - DNA, 15 bp, Homo sapiens
ctgagcctattccta

SEQ ID NO: 84073 - DNA, 15 bp, Homo sapiens
actgagcctattcct

SEQ ID NO: 84074 - DNA, 15 bp, Homo sapiens
cactgagcctattcc

SEQ ID NO: 84075 - DNA, 15 bp, Homo sapiens
gcactgagcctattc

SEQ ID NO: 84076 - DNA, 15 bp, Homo sapiens
agcactgagcctatt

SEQ ID NO: 84077 - DNA, 15 bp, Homo sapiens
aagcactgagcctat

SEQ ID NO: 84078 - DNA, 15 bp, Homo sapiens
aaagcactgagccta

SEQ ID NO: 84079 - DNA, 15 bp, Homo sapiens
gaaagcactgagcct

SEQ ID NO: 84080 - DNA, 15 bp, Homo sapiens
agaaagcactgagcc

SEQ ID NO: 84081 - DNA, 15 bp, Homo sapiens
aagaaagcactgagc

SEQ ID NO: 84082 - DNA, 15 bp, Homo sapiens
aaagaaagcactgag

SEQ ID NO: 84083 - DNA, 15 bp, Homo sapiens
caaagaaagcactga

SEQ ID NO: 84084 - DNA, 15 bp, Homo sapiens
tcaaagaaagcactg

SEQ ID NO: 84085 - DNA, 15 bp, Homo sapiens
ttcaaagaaagcact

SEQ ID NO: 84086 - DNA, 15 bp, Homo sapiens
gttcaaagaaagcac

SEQ ID NO: 84087 - DNA, 15 bp, Homo sapiens
agttcaaagaaagca

SEQ ID NO: 84088 - DNA, 15 bp, Homo sapiens
cagttcaaagaaagc

SEQ ID NO: 84089 - DNA, 15 bp, Homo sapiens
tcagttcaaagaaag

SEQ ID NO: 84090 - DNA, 15 bp, Homo sapiens
atcagttcaaagaaa

SEQ ID NO: 84091 - DNA, 15 bp, Homo sapiens
aatcagttcaaagaa

SEQ ID NO: 84092 - DNA, 15 bp, Homo sapiens
aaatcagttcaaaga

SEQ ID NO: 84093 - DNA, 15 bp, Homo sapiens
aaaatcagttcaaag

SEQ ID NO: 84094 - DNA, 15 bp, Homo sapiens
aaaaatcagttcaaa

SEQ ID NO: 84095 - DNA, 15 bp, Homo sapiens
aaaaaatcagttcaa

SEQ ID NO: 84096 - DNA, 15 bp, Homo sapiens
caaaaaatcagttca

SEQ ID NO: 84097 - DNA, 15 bp, Homo sapiens
acaaaaaatcagttc

SEQ ID NO: 84098 - DNA, 15 bp, Homo sapiens
aacaaaaaatcagtt

SEQ ID NO: 84099 - DNA, 15 bp, Homo sapiens
aaacaaaaaatcagt

SEQ ID NO: 84100 - DNA, 15 bp, Homo sapiens
gaaacaaaaaatcag

SEQ ID NO: 84101 - DNA, 15 bp, Homo sapiens
agaaacaaaaaatca

SEQ ID NO: 84102 - DNA, 15 bp, Homo sapiens
aagaaacaaaaaatc

SEQ ID NO: 84103 - DNA, 15 bp, Homo sapiens
aaagaaacaaaaaat

SEQ ID NO: 84104 - DNA, 15 bp, Homo sapiens
caaagaaacaaaaaa

SEQ ID NO: 84105 - DNA, 15 bp, Homo sapiens
acaaagaaacaaaaa

SEQ ID NO: 84106 - DNA, 15 bp, Homo sapiens
gacaaagaaacaaaa

SEQ ID NO: 84107 - DNA, 15 bp, Homo sapiens
agacaaagaaacaaa

SEQ ID NO: 84108 - DNA, 15 bp, Homo sapiens
gagacaaagaaacaa

SEQ ID NO: 84109 - DNA, 15 bp, Homo sapiens
agagacaaagaaaca

SEQ ID NO: 84110 - DNA, 15 bp, Homo sapiens
cagagacaaagaaac

SEQ ID NO: 84111 - DNA, 15 bp, Homo sapiens
gcagagacaaagaaa

SEQ ID NO: 84112 - DNA, 15 bp, Homo sapiens
tgcagagacaaagaa

SEQ ID NO: 84113 - DNA, 15 bp, Homo sapiens
ctgcagagacaaaga

SEQ ID NO: 84114 - DNA, 15 bp, Homo sapiens
gctgcagagacaaag

SEQ ID NO: 84115 - DNA, 15 bp, Homo sapiens
agctgcagagacaaa

SEQ ID NO: 84116 - DNA, 15 bp, Homo sapiens
aagctgcagagacaa

SEQ ID NO: 84117 - DNA, 15 bp, Homo sapiens
taagctgcagagaca

SEQ ID NO: 84118 - DNA, 15 bp, Homo sapiens
ttaagctgcagagac

SEQ ID NO: 84119 - DNA, 15 bp, Homo sapiens
tttaagctgcagaga

SEQ ID NO: 84120 - DNA, 15 bp, Homo sapiens
ctttaagctgcagag

SEQ ID NO: 84121 - DNA, 15 bp, Homo sapiens
tctttaagctgcaga

SEQ ID NO: 84122 - DNA, 15 bp, Homo sapiens
ttctttaagctgcag

SEQ ID NO: 84123 - DNA, 15 bp, Homo sapiens
gttctttaagctgca

SEQ ID NO: 84124 - DNA, 15 bp, Homo sapiens
tgttctttaagctgc

SEQ ID NO: 84125 - DNA, 15 bp, Homo sapiens
ttgttctttaagctg

SEQ ID NO: 84126 - DNA, 15 bp, Homo sapiens
cttgttctttaagct

SEQ ID NO: 84127 - DNA, 15 bp, Homo sapiens
tcttgttctttaagc

SEQ ID NO: 84128 - DNA, 15 bp, Homo sapiens
atcttgttctttaag

SEQ ID NO: 84129 - DNA, 15 bp, Homo sapiens
gatcttgttctttaa

SEQ ID NO: 84130 - DNA, 15 bp, Homo sapiens
agatcttgttcttta

SEQ ID NO: 84131 - DNA, 15 bp, Homo sapiens
cagatcttgttcttt

SEQ ID NO: 84132 - DNA, 15 bp, Homo sapiens
ccagatcttgttctt

SEQ ID NO: 84133 - DNA, 15 bp, Homo sapiens
cccagatcttgttct

SEQ ID NO: 84134 - DNA, 15 bp, Homo sapiens
acccagatcttgttc

SEQ ID NO: 84135 - DNA, 15 bp, Homo sapiens
cacccagatcttgtt

SEQ ID NO: 84136 - DNA, 15 bp, Homo sapiens
tcacccagatcttgt

SEQ ID NO: 84137 - DNA, 15 bp, Homo sapiens
ttcacccagatcttg

SEQ ID NO: 84138 - DNA, 15 bp, Homo sapiens
attcacccagatctt

SEQ ID NO: 84139 - DNA, 15 bp, Homo sapiens
cattcacccagatct

SEQ ID NO: 84140 - DNA, 15 bp, Homo sapiens
tcattcacccagatc

SEQ ID NO: 84141 - DNA, 15 bp, Homo sapiens
ctcattcacccagat

SEQ ID NO: 84142 - DNA, 15 bp, Homo sapiens
actcattcacccaga

SEQ ID NO: 84143 - DNA, 15 bp, Homo sapiens
aactcattcacccag

SEQ ID NO: 84144 - DNA, 15 bp, Homo sapiens
aaactcattcaccca

SEQ ID NO: 84145 - DNA, 15 bp, Homo sapiens
taaactcattcaccc

SEQ ID NO: 84146 - DNA, 15 bp, Homo sapiens
ctaaactcattcacc

SEQ ID NO: 84147 - DNA, 15 bp, Homo sapiens
cctaaactcattcac

SEQ ID NO: 84148 - DNA, 15 bp, Homo sapiens
acctaaactcattca

SEQ ID NO: 84149 - DNA, 15 bp, Homo sapiens
tacctaaactcattc

SEQ ID NO: 84150 - DNA, 15 bp, Homo sapiens
ttacctaaactcatt

SEQ ID NO: 84151 - DNA, 15 bp, Homo sapiens
cttacctaaactcat

SEQ ID NO: 84152 - DNA, 15 bp, Homo sapiens
acttacctaaactca

SEQ ID NO: 84153 - DNA, 15 bp, Homo sapiens
aacttacctaaactc

SEQ ID NO: 84154 - DNA, 15 bp, Homo sapiens
caacttacctaaact

SEQ ID NO: 84155 - DNA, 15 bp, Homo sapiens
gcaacttacctaaac

SEQ ID NO: 84156 - DNA, 15 bp, Homo sapiens
agcaacttacctaaa

SEQ ID NO: 84157 - DNA, 15 bp, Homo sapiens
cagcaacttacctaa

SEQ ID NO: 84158 - DNA, 15 bp, Homo sapiens
acagcaacttaccta

SEQ ID NO: 84159 - DNA, 15 bp, Homo sapiens
gacagcaacttacct

SEQ ID NO: 84160 - DNA, 15 bp, Homo sapiens
agacagcaacttacc

SEQ ID NO: 84161 - DNA, 15 bp, Homo sapiens
aagacagcaacttac

SEQ ID NO: 84162 - DNA, 15 bp, Homo sapiens
aaagacagcaactta

SEQ ID NO: 84163 - DNA, 15 bp, Homo sapiens
gaaagacagcaactt

SEQ ID NO: 84164 - DNA, 15 bp, Homo sapiens
agaaagacagcaact

SEQ ID NO: 84165 - DNA, 15 bp, Homo sapiens
cagaaagacagcaac

SEQ ID NO: 84166 - DNA, 15 bp, Homo sapiens
ccagaaagacagcaa

SEQ ID NO: 84167 - DNA, 15 bp, Homo sapiens
gccagaaagacagca

SEQ ID NO: 84168 - DNA, 15 bp, Homo sapiens
tgccagaaagacagc

SEQ ID NO: 84169 - DNA, 15 bp, Homo sapiens
gtgccagaaagacag

SEQ ID NO: 84170 - DNA, 15 bp, Homo sapiens
cgtgccagaaagaca

SEQ ID NO: 84171 - DNA, 15 bp, Homo sapiens
acgtgccagaaagac

SEQ ID NO: 84172 - DNA, 15 bp, Homo sapiens
aacgtgccagaaaga

SEQ ID NO: 84173 - DNA, 15 bp, Homo sapiens
aaacgtgccagaaag

SEQ ID NO: 84174 - DNA, 15 bp, Homo sapiens
taaacgtgccagaaa

SEQ ID NO: 84175 - DNA, 15 bp, Homo sapiens
ctaaacgtgccagaa

SEQ ID NO: 84176 - DNA, 15 bp, Homo sapiens
gctaaacgtgccaga

SEQ ID NO: 84177 - DNA, 15 bp, Homo sapiens
agctaaacgtgccag

SEQ ID NO: 84178 - DNA, 15 bp, Homo sapiens
gagctaaacgtgcca

SEQ ID NO: 84179 - DNA, 15 bp, Homo sapiens
tgagctaaacgtgcc

SEQ ID NO: 84180 - DNA, 15 bp, Homo sapiens
ctgagctaaacgtgc

SEQ ID NO: 84181 - DNA, 15 bp, Homo sapiens
cctgagctaaacgtg

SEQ ID NO: 84182 - DNA, 15 bp, Homo sapiens
ccctgagctaaacgt

SEQ ID NO: 84183 - DNA, 15 bp, Homo sapiens
cccctgagctaaacg

SEQ ID NO: 84184 - DNA, 15 bp, Homo sapiens
ccccctgagctaaac

SEQ ID NO: 84185 - DNA, 15 bp, Homo sapiens
tccccctgagctaaa

SEQ ID NO: 84186 - DNA, 15 bp, Homo sapiens
ctccccctgagctaa

SEQ ID NO: 84187 - DNA, 15 bp, Homo sapiens
cctccccctgagcta

SEQ ID NO: 84188 - DNA, 15 bp, Homo sapiens
tcctccccctgagct

SEQ ID NO: 84189 - DNA, 15 bp, Homo sapiens
atcctccccctgagc

SEQ ID NO: 84190 - DNA, 15 bp, Homo sapiens
catcctccccctgag

SEQ ID NO: 84191 - DNA, 15 bp, Homo sapiens
ccatcctccccctga

SEQ ID NO: 84192 - DNA, 15 bp, Homo sapiens
accatcctccccctg

SEQ ID NO: 84193 - DNA, 15 bp, Homo sapiens
caccatcctccccct

SEQ ID NO: 84194 - DNA, 15 bp, Homo sapiens
acaccatcctccccc

SEQ ID NO: 84195 - DNA, 15 bp, Homo sapiens
aacaccatcctcccc

SEQ ID NO: 84196 - DNA, 15 bp, Homo sapiens
caacaccatcctccc

SEQ ID NO: 84197 - DNA, 15 bp, Homo sapiens
acaacaccatcctcc

SEQ ID NO: 84198 - DNA, 15 bp, Homo sapiens
tacaacaccatcctc

SEQ ID NO: 84199 - DNA, 15 bp, Homo sapiens
ctacaacaccatcct

SEQ ID NO: 84200 - DNA, 15 bp, Homo sapiens
cctacaacaccatcc

SEQ ID NO: 84201 - DNA, 15 bp, Homo sapiens
acctacaacaccatc

SEQ ID NO: 84202 - DNA, 15 bp, Homo sapiens
cacctacaacaccat

SEQ ID NO: 84203 - DNA, 15 bp, Homo sapiens
acacctacaacacca

SEQ ID NO: 84204 - DNA, 15 bp, Homo sapiens
gacacctacaacacc

SEQ ID NO: 84205 - DNA, 15 bp, Homo sapiens
agacacctacaacac

SEQ ID NO: 84206 - DNA, 15 bp, Homo sapiens
aagacacctacaaca

SEQ ID NO: 84207 - DNA, 15 bp, Homo sapiens
caagacacctacaac

SEQ ID NO: 84208 - DNA, 15 bp, Homo sapiens
ccaagacacctacaa

SEQ ID NO: 84209 - DNA, 15 bp, Homo sapiens
tccaagacacctaca

SEQ ID NO: 84210 - DNA, 15 bp, Homo sapiens
atccaagacacctac

SEQ ID NO: 84211 - DNA, 15 bp, Homo sapiens
aatccaagacaccta

SEQ ID NO: 84212 - DNA, 15 bp, Homo sapiens
caatccaagacacct

SEQ ID NO: 84213 - DNA, 15 bp, Homo sapiens
tcaatccaagacacc

SEQ ID NO: 84214 - DNA, 15 bp, Homo sapiens
ttcaatccaagacac

SEQ ID NO: 84215 - DNA, 15 bp, Homo sapiens
cttcaatccaagaca

SEQ ID NO: 84216 - DNA, 15 bp, Homo sapiens
tcttcaatccaagac

SEQ ID NO: 84217 - DNA, 15 bp, Homo sapiens
ttcttcaatccaaga

SEQ ID NO: 84218 - DNA, 15 bp, Homo sapiens
tttcttcaatccaag

SEQ ID NO: 84219 - DNA, 15 bp, Homo sapiens
ctttcttcaatccaa

SEQ ID NO: 84220 - DNA, 15 bp, Homo sapiens
gctttcttcaatcca

SEQ ID NO: 84221 - DNA, 15 bp, Homo sapiens
ggctttcttcaatcc

SEQ ID NO: 84222 - DNA, 15 bp, Homo sapiens
aggctttcttcaatc

SEQ ID NO: 84223 - DNA, 15 bp, Homo sapiens
aaggctttcttcaat

SEQ ID NO: 84224 - DNA, 15 bp, Homo sapiens
caaggctttcttcaa

SEQ ID NO: 84225 - DNA, 15 bp, Homo sapiens
ccaaggctttcttca

SEQ ID NO: 84226 - DNA, 15 bp, Homo sapiens
cccaaggctttcttc

SEQ ID NO: 84227 - DNA, 15 bp, Homo sapiens
ccccaaggctttctt

SEQ ID NO: 84228 - DNA, 15 bp, Homo sapiens
tccccaaggctttct

SEQ ID NO: 84229 - DNA, 15 bp, Homo sapiens
atccccaaggctttc

SEQ ID NO: 84230 - DNA, 15 bp, Homo sapiens
aatccccaaggcttt

SEQ ID NO: 84231 - DNA, 15 bp, Homo sapiens
caatccccaaggctt

SEQ ID NO: 84232 - DNA, 15 bp, Homo sapiens
acaatccccaaggct

SEQ ID NO: 84233 - DNA, 15 bp, Homo sapiens
aacaatccccaaggc

SEQ ID NO: 84234 - DNA, 15 bp, Homo sapiens
aaacaatccccaagg

SEQ ID NO: 84235 - DNA, 15 bp, Homo sapiens
caaacaatccccaag

SEQ ID NO: 84236 - DNA, 15 bp, Homo sapiens
acaaacaatccccaa

SEQ ID NO: 84237 - DNA, 15 bp, Homo sapiens
gacaaacaatcccca

SEQ ID NO: 84238 - DNA, 15 bp, Homo sapiens
tgacaaacaatcccc

SEQ ID NO: 84239 - DNA, 15 bp, Homo sapiens
gtgacaaacaatccc

SEQ ID NO: 84240 - DNA, 15 bp, Homo sapiens
agtgacaaacaatcc

SEQ ID NO: 84241 - DNA, 15 bp, Homo sapiens
gagtgacaaacaatc

SEQ ID NO: 84242 - DNA, 15 bp, Homo sapiens
tgagtgacaaacaat

SEQ ID NO: 84243 - DNA, 15 bp, Homo sapiens
gtgagtgacaaacaa

SEQ ID NO: 84244 - DNA, 15 bp, Homo sapiens
tgtgagtgacaaaca

SEQ ID NO: 84245 - DNA, 15 bp, Homo sapiens
gtgtgagtgacaaac

SEQ ID NO: 84246 - DNA, 15 bp, Homo sapiens
tgtgtgagtgacaaa

SEQ ID NO: 84247 - DNA, 15 bp, Homo sapiens
gtgtgtgagtgacaa

SEQ ID NO: 84248 - DNA, 15 bp, Homo sapiens
agtgtgtgagtgaca

SEQ ID NO: 84249 - DNA, 15 bp, Homo sapiens
aagtgtgtgagtgac

SEQ ID NO: 84250 - DNA, 15 bp, Homo sapiens
caagtgtgtgagtga

SEQ ID NO: 84251 - DNA, 15 bp, Homo sapiens
acaagtgtgtgagtg

SEQ ID NO: 84252 - DNA, 15 bp, Homo sapiens
cacaagtgtgtgagt

SEQ ID NO: 84253 - DNA, 15 bp, Homo sapiens
ccacaagtgtgtgag

SEQ ID NO: 84254 - DNA, 15 bp, Homo sapiens
cccacaagtgtgtga

SEQ ID NO: 84255 - DNA, 15 bp, Homo sapiens
acccacaagtgtgtg

SEQ ID NO: 84256 - DNA, 15 bp, Homo sapiens
cacccacaagtgtgt

SEQ ID NO: 84257 - DNA, 15 bp, Homo sapiens
gcacccacaagtgtg

SEQ ID NO: 84258 - DNA, 15 bp, Homo sapiens
ggcacccacaagtgt

SEQ ID NO: 84259 - DNA, 15 bp, Homo sapiens
tggcacccacaagtg

SEQ ID NO: 84260 - DNA, 15 bp, Homo sapiens
atggcacccacaagt

SEQ ID NO: 84261 - DNA, 15 bp, Homo sapiens
gatggcacccacaag

SEQ ID NO: 84262 - DNA, 15 bp, Homo sapiens
agatggcacccacaa

SEQ ID NO: 84263 - DNA, 15 bp, Homo sapiens
gagatggcacccaca

SEQ ID NO: 84264 - DNA, 15 bp, Homo sapiens
tgagatggcacccac

SEQ ID NO: 84265 - DNA, 15 bp, Homo sapiens
gtgagatggcaccca

SEQ ID NO: 84266 - DNA, 15 bp, Homo sapiens
agtgagatggcaccc

SEQ ID NO: 84267 - DNA, 15 bp, Homo sapiens
cagtgagatggcacc

SEQ ID NO: 84268 - DNA, 15 bp, Homo sapiens
acagtgagatggcac

SEQ ID NO: 84269 - DNA, 15 bp, Homo sapiens
cacagtgagatggca

SEQ ID NO: 84270 - DNA, 15 bp, Homo sapiens
tcacagtgagatggc

SEQ ID NO: 84271 - DNA, 15 bp, Homo sapiens
ctcacagtgagatgg

SEQ ID NO: 84272 - DNA, 15 bp, Homo sapiens
cctcacagtgagatg

SEQ ID NO: 84273 - DNA, 15 bp, Homo sapiens
tcctcacagtgagat

SEQ ID NO: 84274 - DNA, 15 bp, Homo sapiens
ctcctcacagtgaga

SEQ ID NO: 84275 - DNA, 15 bp, Homo sapiens
cctcctcacagtgag

SEQ ID NO: 84276 - DNA, 15 bp, Homo sapiens
tcctcctcacagtga

SEQ ID NO: 84277 - DNA, 15 bp, Homo sapiens
gtcctcctcacagtg

SEQ ID NO: 84278 - DNA, 15 bp, Homo sapiens
tgtcctcctcacagt

SEQ ID NO: 84279 - DNA, 15 bp, Homo sapiens
ctgtcctcctcacag

SEQ ID NO: 84280 - DNA, 15 bp, Homo sapiens
tctgtcctcctcaca

SEQ ID NO: 84281 - DNA, 15 bp, Homo sapiens
ttctgtcctcctcac

SEQ ID NO: 84282 - DNA, 15 bp, Homo sapiens
cttctgtcctcctca

SEQ ID NO: 84283 - DNA, 15 bp, Homo sapiens
gcttctgtcctcctc

SEQ ID NO: 84284 - DNA, 15 bp, Homo sapiens
ggcttctgtcctcct

SEQ ID NO: 84285 - DNA, 15 bp, Homo sapiens
gggcttctgtcctcc

SEQ ID NO: 84286 - DNA, 15 bp, Homo sapiens
agggcttctgtcctc

SEQ ID NO: 84287 - DNA, 15 bp, Homo sapiens
cagggcttctgtcct

SEQ ID NO: 84288 - DNA, 15 bp, Homo sapiens
acagggcttctgtcc

SEQ ID NO: 84289 - DNA, 15 bp, Homo sapiens
cacagggcttctgtc

SEQ ID NO: 84290 - DNA, 15 bp, Homo sapiens
tcacagggcttctgt

SEQ ID NO: 84291 - DNA, 15 bp, Homo sapiens
ttcacagggcttctg

SEQ ID NO: 84292 - DNA, 15 bp, Homo sapiens
gttcacagggcttct

SEQ ID NO: 84293 - DNA, 15 bp, Homo sapiens
tgttcacagggcttc

SEQ ID NO: 84294 - DNA, 15 bp, Homo sapiens
atgttcacagggctt

SEQ ID NO: 84295 - DNA, 15 bp, Homo sapiens
catgttcacagggct

SEQ ID NO: 84296 - DNA, 15 bp, Homo sapiens
acatgttcacagggc

SEQ ID NO: 84297 - DNA, 15 bp, Homo sapiens
cacatgttcacaggg

SEQ ID NO: 84298 - DNA, 15 bp, Homo sapiens
ccacatgttcacagg

SEQ ID NO: 84299 - DNA, 15 bp, Homo sapiens
tccacatgttcacag

SEQ ID NO: 84300 - DNA, 15 bp, Homo sapiens
ctccacatgttcaca

SEQ ID NO: 84301 - DNA, 15 bp, Homo sapiens
gctccacatgttcac

SEQ ID NO: 84302 - DNA, 15 bp, Homo sapiens
tgctccacatgttca

SEQ ID NO: 84303 - DNA, 15 bp, Homo sapiens
gtgctccacatgttc

SEQ ID NO: 84304 - DNA, 15 bp, Homo sapiens
tgtgctccacatgtt

SEQ ID NO: 84305 - DNA, 15 bp, Homo sapiens
gtgtgctccacatgt

SEQ ID NO: 84306 - DNA, 15 bp, Homo sapiens
tgtgtgctccacatg

SEQ ID NO: 84307 - DNA, 15 bp, Homo sapiens
ctgtgtgctccacat

SEQ ID NO: 84308 - DNA, 15 bp, Homo sapiens
cctgtgtgctccaca

SEQ ID NO: 84309 - DNA, 15 bp, Homo sapiens
ccctgtgtgctccac

SEQ ID NO: 84310 - DNA, 15 bp, Homo sapiens
cccctgtgtgctcca

SEQ ID NO: 84311 - DNA, 15 bp, Homo sapiens
gcccctgtgtgctcc

SEQ ID NO: 84312 - DNA, 15 bp, Homo sapiens
tgcccctgtgtgctc

SEQ ID NO: 84313 - DNA, 15 bp, Homo sapiens
gtgcccctgtgtgct

SEQ ID NO: 84314 - DNA, 15 bp, Homo sapiens
tgtgcccctgtgtgc

SEQ ID NO: 84315 - DNA, 15 bp, Homo sapiens
ctgtgcccctgtgtg

SEQ ID NO: 84316 - DNA, 15 bp, Homo sapiens
tctgtgcccctgtgt

SEQ ID NO: 84317 - DNA, 15 bp, Homo sapiens
gtctgtgcccctgtg

SEQ ID NO: 84318 - DNA, 15 bp, Homo sapiens
tgtctgtgcccctgt

SEQ ID NO: 84319 - DNA, 15 bp, Homo sapiens
ctgtctgtgcccctg

SEQ ID NO: 84320 - DNA, 15 bp, Homo sapiens
tctgtctgtgcccct

SEQ ID NO: 84321 - DNA, 15 bp, Homo sapiens
atctgtctgtgcccc

SEQ ID NO: 84322 - DNA, 15 bp, Homo sapiens
aatctgtctgtgccc

SEQ ID NO: 84323 - DNA, 15 bp, Homo sapiens
aaatctgtctgtgcc

SEQ ID NO: 84324 - DNA, 15 bp, Homo sapiens
taaatctgtctgtgc

SEQ ID NO: 84325 - DNA, 15 bp, Homo sapiens
ctaaatctgtctgtg

SEQ ID NO: 84326 - DNA, 15 bp, Homo sapiens
tctaaatctgtctgt

SEQ ID NO: 84327 - DNA, 15 bp, Homo sapiens
atctaaatctgtctg

SEQ ID NO: 84328 - DNA, 15 bp, Homo sapiens
aatctaaatctgtct

SEQ ID NO: 84329 - DNA, 15 bp, Homo sapiens
taatctaaatctgtc

SEQ ID NO: 84330 - DNA, 15 bp, Homo sapiens
ctaatctaaatctgt

SEQ ID NO: 84331 - DNA, 15 bp, Homo sapiens
cctaatctaaatctg

SEQ ID NO: 84332 - DNA, 15 bp, Homo sapiens
gcctaatctaaatct

SEQ ID NO: 84333 - DNA, 15 bp, Homo sapiens
ggcctaatctaaatc

SEQ ID NO: 84334 - DNA, 15 bp, Homo sapiens
aggcctaatctaaat

SEQ ID NO: 84335 - DNA, 15 bp, Homo sapiens
caggcctaatctaaa

SEQ ID NO: 84336 - DNA, 15 bp, Homo sapiens
gcaggcctaatctaa

SEQ ID NO: 84337 - DNA, 15 bp, Homo sapiens
agcaggcctaatcta

SEQ ID NO: 84338 - DNA, 15 bp, Homo sapiens
aagcaggcctaatct

SEQ ID NO: 84339 - DNA, 15 bp, Homo sapiens
aaagcaggcctaatc

SEQ ID NO: 84340 - DNA, 15 bp, Homo sapiens
taaagcaggcctaat

SEQ ID NO: 84341 - DNA, 15 bp, Homo sapiens
ataaagcaggcctaa

SEQ ID NO: 84342 - DNA, 15 bp, Homo sapiens
tataaagcaggccta

SEQ ID NO: 84343 - DNA, 15 bp, Homo sapiens
ctataaagcaggcct

SEQ ID NO: 84344 - DNA, 15 bp, Homo sapiens
tctataaagcaggcc

SEQ ID NO: 84345 - DNA, 15 bp, Homo sapiens
ctctataaagcaggc

SEQ ID NO: 84346 - DNA, 15 bp, Homo sapiens
actctataaagcagg

SEQ ID NO: 84347 - DNA, 15 bp, Homo sapiens
aactctataaagcag

SEQ ID NO: 84348 - DNA, 15 bp, Homo sapiens
aaactctataaagca

SEQ ID NO: 84349 - DNA, 15 bp, Homo sapiens
gaaactctataaagc

SEQ ID NO: 84350 - DNA, 15 bp, Homo sapiens
agaaactctataaag

SEQ ID NO: 84351 - DNA, 15 bp, Homo sapiens
cagaaactctataaa

SEQ ID NO: 84352 - DNA, 15 bp, Homo sapiens
gcagaaactctataa

SEQ ID NO: 84353 - DNA, 15 bp, Homo sapiens
ggcagaaactctata

SEQ ID NO: 84354 - DNA, 15 bp, Homo sapiens
aggcagaaactctat

SEQ ID NO: 84355 - DNA, 15 bp, Homo sapiens
taggcagaaactcta

SEQ ID NO: 84356 - DNA, 15 bp, Homo sapiens
ctaggcagaaactct

SEQ ID NO: 84357 - DNA, 15 bp, Homo sapiens
tctaggcagaaactc

SEQ ID NO: 84358 - DNA, 15 bp, Homo sapiens
ctctaggcagaaact

SEQ ID NO: 84359 - DNA, 15 bp, Homo sapiens
gctctaggcagaaac

SEQ ID NO: 84360 - DNA, 15 bp, Homo sapiens
tgctctaggcagaaa

SEQ ID NO: 84361 - DNA, 15 bp, Homo sapiens
atgctctaggcagaa

SEQ ID NO: 84362 - DNA, 15 bp, Homo sapiens
gatgctctaggcaga

SEQ ID NO: 84363 - DNA, 15 bp, Homo sapiens
tgatgctctaggcag

SEQ ID NO: 84364 - DNA, 15 bp, Homo sapiens
atgatgctctaggca

SEQ ID NO: 84365 - DNA, 15 bp, Homo sapiens
catgatgctctaggc

SEQ ID NO: 84366 - DNA, 15 bp, Homo sapiens
ccatgatgctctagg

SEQ ID NO: 84367 - DNA, 15 bp, Homo sapiens
gccatgatgctctag

SEQ ID NO: 84368 - DNA, 15 bp, Homo sapiens
agccatgatgctcta

SEQ ID NO: 84369 - DNA, 15 bp, Homo sapiens
gagccatgatgctct

SEQ ID NO: 84370 - DNA, 15 bp, Homo sapiens
tgagccatgatgctc

SEQ ID NO: 84371 - DNA, 15 bp, Homo sapiens
ctgagccatgatgct

SEQ ID NO: 84372 - DNA, 15 bp, Homo sapiens
actgagccatgatgc

SEQ ID NO: 84373 - DNA, 15 bp, Homo sapiens
cactgagccatgatg

SEQ ID NO: 84374 - DNA, 15 bp, Homo sapiens
gcactgagccatgat

SEQ ID NO: 84375 - DNA, 15 bp, Homo sapiens
ggcactgagccatga

SEQ ID NO: 84376 - DNA, 15 bp, Homo sapiens
gggcactgagccatg

SEQ ID NO: 84377 - DNA, 15 bp, Homo sapiens
tgggcactgagccat

SEQ ID NO: 84378 - DNA, 15 bp, Homo sapiens
ctgggcactgagcca

SEQ ID NO: 84379 - DNA, 15 bp, Homo sapiens
gctgggcactgagcc

SEQ ID NO: 84380 - DNA, 15 bp, Homo sapiens
tgctgggcactgagc

SEQ ID NO: 84381 - DNA, 15 bp, Homo sapiens
ctgctgggcactgag

SEQ ID NO: 84382 - DNA, 15 bp, Homo sapiens
gctgctgggcactga

SEQ ID NO: 84383 - DNA, 15 bp, Homo sapiens
ggctgctgggcactg

SEQ ID NO: 84384 - DNA, 15 bp, Homo sapiens
gggctgctgggcact

SEQ ID NO: 84385 - DNA, 15 bp, Homo sapiens
ggggctgctgggcac

SEQ ID NO: 84386 - DNA, 15 bp, Homo sapiens
aggggctgctgggca

SEQ ID NO: 84387 - DNA, 15 bp, Homo sapiens
gaggggctgctgggc

SEQ ID NO: 84388 - DNA, 15 bp, Homo sapiens
ggaggggctgctggg

SEQ ID NO: 84389 - DNA, 15 bp, Homo sapiens
tggaggggctgctgg

SEQ ID NO: 84390 - DNA, 15 bp, Homo sapiens
ctggaggggctgctg

SEQ ID NO: 84391 - DNA, 15 bp, Homo sapiens
tctggaggggctgct

SEQ ID NO: 84392 - DNA, 15 bp, Homo sapiens
ctctggaggggctgc

SEQ ID NO: 84393 - DNA, 15 bp, Homo sapiens
cctctggaggggctg

SEQ ID NO: 84394 - DNA, 15 bp, Homo sapiens
gcctctggaggggct

SEQ ID NO: 84395 - DNA, 15 bp, Homo sapiens
ggcctctggaggggc

SEQ ID NO: 84396 - DNA, 15 bp, Homo sapiens
aggcctctggagggg

SEQ ID NO: 84397 - DNA, 15 bp, Homo sapiens
gaggcctctggaggg

SEQ ID NO: 84398 - DNA, 15 bp, Homo sapiens
agaggcctctggagg

SEQ ID NO: 84399 - DNA, 15 bp, Homo sapiens
cagaggcctctggag

SEQ ID NO: 84400 - DNA, 15 bp, Homo sapiens
tcagaggcctctgga

SEQ ID NO: 84401 - DNA, 15 bp, Homo sapiens
ttcagaggcctctgg

SEQ ID NO: 84402 - DNA, 15 bp, Homo sapiens
tttcagaggcctctg

SEQ ID NO: 84403 - DNA, 15 bp, Homo sapiens
atttcagaggcctct

SEQ ID NO: 84404 - DNA, 15 bp, Homo sapiens
tatttcagaggcctc

SEQ ID NO: 84405 - DNA, 15 bp, Homo sapiens
atatttcagaggcct

SEQ ID NO: 84406 - DNA, 15 bp, Homo sapiens
aatatttcagaggcc

SEQ ID NO: 84407 - DNA, 15 bp, Homo sapiens
aaatatttcagaggc

SEQ ID NO: 84408 - DNA, 15 bp, Homo sapiens
caaatatttcagagg

SEQ ID NO: 84409 - DNA, 15 bp, Homo sapiens
tcaaatatttcagag

SEQ ID NO: 84410 - DNA, 15 bp, Homo sapiens
atcaaatatttcaga

SEQ ID NO: 84411 - DNA, 15 bp, Homo sapiens
tatcaaatatttcag

SEQ ID NO: 84412 - DNA, 15 bp, Homo sapiens
atatcaaatatttca

SEQ ID NO: 84413 - DNA, 15 bp, Homo sapiens
tatatcaaatatttc

SEQ ID NO: 84414 - DNA, 15 bp, Homo sapiens
gtatatcaaatattt

SEQ ID NO: 84415 - DNA, 15 bp, Homo sapiens
agtatatcaaatatt

SEQ ID NO: 84416 - DNA, 15 bp, Homo sapiens
cagtatatcaaatat

SEQ ID NO: 84417 - DNA, 15 bp, Homo sapiens
tcagtatatcaaata

SEQ ID NO: 84418 - DNA, 15 bp, Homo sapiens
atcagtatatcaaat

SEQ ID NO: 84419 - DNA, 15 bp, Homo sapiens
aatcagtatatcaaa

SEQ ID NO: 84420 - DNA, 15 bp, Homo sapiens
aaatcagtatatcaa

SEQ ID NO: 84421 - DNA, 15 bp, Homo sapiens
gaaatcagtatatca

SEQ ID NO: 84422 - DNA, 15 bp, Homo sapiens
ggaaatcagtatatc

SEQ ID NO: 84423 - DNA, 15 bp, Homo sapiens
aggaaatcagtatat

SEQ ID NO: 84424 - DNA, 15 bp, Homo sapiens
aaggaaatcagtata

SEQ ID NO: 84425 - DNA, 15 bp, Homo sapiens
caaggaaatcagtat

SEQ ID NO: 84426 - DNA, 15 bp, Homo sapiens
tcaaggaaatcagta

SEQ ID NO: 84427 - DNA, 15 bp, Homo sapiens
ctcaaggaaatcagt

SEQ ID NO: 84428 - DNA, 15 bp, Homo sapiens
cctcaaggaaatcag

SEQ ID NO: 84429 - DNA, 15 bp, Homo sapiens
tcctcaaggaaatca

SEQ ID NO: 84430 - DNA, 15 bp, Homo sapiens
ctcctcaaggaaatc

SEQ ID NO: 84431 - DNA, 15 bp, Homo sapiens
tctcctcaaggaaat

SEQ ID NO: 84432 - DNA, 15 bp, Homo sapiens
ttctcctcaaggaaa

SEQ ID NO: 84433 - DNA, 15 bp, Homo sapiens
attctcctcaaggaa

SEQ ID NO: 84434 - DNA, 15 bp, Homo sapiens
gattctcctcaagga

SEQ ID NO: 84435 - DNA, 15 bp, Homo sapiens
tgattctcctcaagg

SEQ ID NO: 84436 - DNA, 15 bp, Homo sapiens
ctgattctcctcaag

SEQ ID NO: 84437 - DNA, 15 bp, Homo sapiens
tctgattctcctcaa

SEQ ID NO: 84438 - DNA, 15 bp, Homo sapiens
ttctgattctcctca

SEQ ID NO: 84439 - DNA, 15 bp, Homo sapiens
tttctgattctcctc

SEQ ID NO: 84440 - DNA, 15 bp, Homo sapiens
atttctgattctcct

SEQ ID NO: 84441 - DNA, 15 bp, Homo sapiens
gatttctgattctcc

SEQ ID NO: 84442 - DNA, 15 bp, Homo sapiens
agatttctgattctc

SEQ ID NO: 84443 - DNA, 15 bp, Homo sapiens
gagatttctgattct

SEQ ID NO: 84444 - DNA, 15 bp, Homo sapiens
ggagatttctgattc

SEQ ID NO: 84445 - DNA, 15 bp, Homo sapiens
aggagatttctgatt

SEQ ID NO: 84446 - DNA, 15 bp, Homo sapiens
caggagatttctgat

SEQ ID NO: 84447 - DNA, 15 bp, Homo sapiens
gcaggagatttctga

SEQ ID NO: 84448 - DNA, 15 bp, Homo sapiens
tgcaggagatttctg

SEQ ID NO: 84449 - DNA, 15 bp, Homo sapiens
ctgcaggagatttct

SEQ ID NO: 84450 - DNA, 15 bp, Homo sapiens
cctgcaggagatttc

SEQ ID NO: 84451 - DNA, 15 bp, Homo sapiens
acctgcaggagattt

SEQ ID NO: 84452 - DNA, 15 bp, Homo sapiens
cacctgcaggagatt

SEQ ID NO: 84453 - DNA, 15 bp, Homo sapiens
acacctgcaggagat

SEQ ID NO: 84454 - DNA, 15 bp, Homo sapiens
gacacctgcaggaga

SEQ ID NO: 84455 - DNA, 15 bp, Homo sapiens
agacacctgcaggag

SEQ ID NO: 84456 - DNA, 15 bp, Homo sapiens
tagacacctgcagga

SEQ ID NO: 84457 - DNA, 15 bp, Homo sapiens
ctagacacctgcagg

SEQ ID NO: 84458 - DNA, 15 bp, Homo sapiens
cctagacacctgcag

SEQ ID NO: 84459 - DNA, 15 bp, Homo sapiens
ccctagacacctgca

SEQ ID NO: 84460 - DNA, 15 bp, Homo sapiens
tccctagacacctgc

SEQ ID NO: 84461 - DNA, 15 bp, Homo sapiens
atccctagacacctg

SEQ ID NO: 84462 - DNA, 15 bp, Homo sapiens
aatccctagacacct

SEQ ID NO: 84463 - DNA, 15 bp, Homo sapiens
aaatccctagacacc

SEQ ID NO: 84464 - DNA, 15 bp, Homo sapiens
gaaatccctagacac

SEQ ID NO: 84465 - DNA, 15 bp, Homo sapiens
tgaaatccctagaca

SEQ ID NO: 84466 - DNA, 15 bp, Homo sapiens
ttgaaatccctagac

SEQ ID NO: 84467 - DNA, 15 bp, Homo sapiens
cttgaaatccctaga

SEQ ID NO: 84468 - DNA, 15 bp, Homo sapiens
acttgaaatccctag

SEQ ID NO: 84469 - DNA, 15 bp, Homo sapiens
tacttgaaatcccta

SEQ ID NO: 84470 - DNA, 15 bp, Homo sapiens
ttacttgaaatccct

SEQ ID NO: 84471 - DNA, 15 bp, Homo sapiens
cttacttgaaatccc

SEQ ID NO: 84472 - DNA, 15 bp, Homo sapiens
acttacttgaaatcc

SEQ ID NO: 84473 - DNA, 15 bp, Homo sapiens
tacttacttgaaatc

SEQ ID NO: 84474 - DNA, 15 bp, Homo sapiens
ctacttacttgaaat

SEQ ID NO: 84475 - DNA, 15 bp, Homo sapiens
actacttacttgaaa

SEQ ID NO: 84476 - DNA, 15 bp, Homo sapiens
cactacttacttgaa

SEQ ID NO: 84477 - DNA, 15 bp, Homo sapiens
acactacttacttga

SEQ ID NO: 84478 - DNA, 15 bp, Homo sapiens
aacactacttacttg

SEQ ID NO: 84479 - DNA, 15 bp, Homo sapiens
caacactacttactt

SEQ ID NO: 84480 - DNA, 15 bp, Homo sapiens
acaacactacttact

SEQ ID NO: 84481 - DNA, 15 bp, Homo sapiens
cacaacactacttac

SEQ ID NO: 84482 - DNA, 15 bp, Homo sapiens
tcacaacactactta

SEQ ID NO: 84483 - DNA, 15 bp, Homo sapiens
ctcacaacactactt

SEQ ID NO: 84484 - DNA, 15 bp, Homo sapiens
cctcacaacactact

SEQ ID NO: 84485 - DNA, 15 bp, Homo sapiens
ccctcacaacactac

SEQ ID NO: 84486 - DNA, 15 bp, Homo sapiens
cccctcacaacacta

SEQ ID NO: 84487 - DNA, 15 bp, Homo sapiens
tcccctcacaacact

SEQ ID NO: 84488 - DNA, 15 bp, Homo sapiens
ttcccctcacaacac

SEQ ID NO: 84489 - DNA, 15 bp, Homo sapiens
attcccctcacaaca

SEQ ID NO: 84490 - DNA, 15 bp, Homo sapiens
tattcccctcacaac

SEQ ID NO: 84491 - DNA, 15 bp, Homo sapiens
gtattcccctcacaa

SEQ ID NO: 84492 - DNA, 15 bp, Homo sapiens
ggtattcccctcaca

SEQ ID NO: 84493 - DNA, 15 bp, Homo sapiens
aggtattcccctcac

SEQ ID NO: 84494 - DNA, 15 bp, Homo sapiens
taggtattcccctca

SEQ ID NO: 84495 - DNA, 15 bp, Homo sapiens
gtaggtattcccctc

SEQ ID NO: 84496 - DNA, 15 bp, Homo sapiens
agtaggtattcccct

SEQ ID NO: 84497 - DNA, 15 bp, Homo sapiens
aagtaggtattcccc

SEQ ID NO: 84498 - DNA, 15 bp, Homo sapiens
caagtaggtattccc

SEQ ID NO: 84499 - DNA, 15 bp, Homo sapiens
acaagtaggtattcc

SEQ ID NO: 84500 - DNA, 15 bp, Homo sapiens
tacaagtaggtattc

SEQ ID NO: 84501 - DNA, 15 bp, Homo sapiens
gtacaagtaggtatt

SEQ ID NO: 84502 - DNA, 15 bp, Homo sapiens
agtacaagtaggtat

SEQ ID NO: 84503 - DNA, 15 bp, Homo sapiens
aagtacaagtaggta

SEQ ID NO: 84504 - DNA, 15 bp, Homo sapiens
aaagtacaagtaggt

SEQ ID NO: 84505 - DNA, 15 bp, Homo sapiens
gaaagtacaagtagg

SEQ ID NO: 84506 - DNA, 15 bp, Homo sapiens
ggaaagtacaagtag

SEQ ID NO: 84507 - DNA, 15 bp, Homo sapiens
gggaaagtacaagta

SEQ ID NO: 84508 - DNA, 15 bp, Homo sapiens
ggggaaagtacaagt

SEQ ID NO: 84509 - DNA, 15 bp, Homo sapiens
gggggaaagtacaag

SEQ ID NO: 84510 - DNA, 15 bp, Homo sapiens
ggggggaaagtacaa

SEQ ID NO: 84511 - DNA, 15 bp, Homo sapiens
tggggggaaagtaca

SEQ ID NO: 84512 - DNA, 15 bp, Homo sapiens
ttggggggaaagtac

SEQ ID NO: 84513 - DNA, 15 bp, Homo sapiens
tttggggggaaagta

SEQ ID NO: 84514 - DNA, 15 bp, Homo sapiens
gtttggggggaaagt

SEQ ID NO: 84515 - DNA, 15 bp, Homo sapiens
ggtttggggggaaag

SEQ ID NO: 84516 - DNA, 15 bp, Homo sapiens
tggtttggggggaaa

SEQ ID NO: 84517 - DNA, 15 bp, Homo sapiens
ctggtttggggggaa

SEQ ID NO: 84518 - DNA, 15 bp, Homo sapiens
tctggtttgggggga

SEQ ID NO: 84519 - DNA, 15 bp, Homo sapiens
atctggtttgggggg

SEQ ID NO: 84520 - DNA, 15 bp, Homo sapiens
aatctggtttggggg

SEQ ID NO: 84521 - DNA, 15 bp, Homo sapiens
gaatctggtttgggg

SEQ ID NO: 84522 - DNA, 15 bp, Homo sapiens
ggaatctggtttggg

SEQ ID NO: 84523 - DNA, 15 bp, Homo sapiens
gggaatctggtttgg

SEQ ID NO: 84524 - DNA, 15 bp, Homo sapiens
cgggaatctggtttg

SEQ ID NO: 84525 - DNA, 15 bp, Homo sapiens
tcgggaatctggttt

SEQ ID NO: 84526 - DNA, 15 bp, Homo sapiens
ctcgggaatctggtt

SEQ ID NO: 84527 - DNA, 15 bp, Homo sapiens
cctcgggaatctggt

SEQ ID NO: 84528 - DNA, 15 bp, Homo sapiens
gcctcgggaatctgg

SEQ ID NO: 84529 - DNA, 15 bp, Homo sapiens
agcctcgggaatctg

SEQ ID NO: 84530 - DNA, 15 bp, Homo sapiens
aagcctcgggaatct

SEQ ID NO: 84531 - DNA, 15 bp, Homo sapiens
gaagcctcgggaatc

SEQ ID NO: 84532 - DNA, 15 bp, Homo sapiens
agaagcctcgggaat

SEQ ID NO: 84533 - DNA, 15 bp, Homo sapiens
aagaagcctcgggaa

SEQ ID NO: 84534 - DNA, 15 bp, Homo sapiens
taagaagcctcggga

SEQ ID NO: 84535 - DNA, 15 bp, Homo sapiens
ttaagaagcctcggg

SEQ ID NO: 84536 - DNA, 15 bp, Homo sapiens
cttaagaagcctcgg

SEQ ID NO: 84537 - DNA, 15 bp, Homo sapiens
ccttaagaagcctcg

SEQ ID NO: 84538 - DNA, 15 bp, Homo sapiens
tccttaagaagcctc

SEQ ID NO: 84539 - DNA, 15 bp, Homo sapiens
gtccttaagaagcct

SEQ ID NO: 84540 - DNA, 15 bp, Homo sapiens
agtccttaagaagcc

SEQ ID NO: 84541 - DNA, 15 bp, Homo sapiens
gagtccttaagaagc

SEQ ID NO: 84542 - DNA, 15 bp, Homo sapiens
tgagtccttaagaag

SEQ ID NO: 84543 - DNA, 15 bp, Homo sapiens
ttgagtccttaagaa

SEQ ID NO: 84544 - DNA, 15 bp, Homo sapiens
cttgagtccttaaga

SEQ ID NO: 84545 - DNA, 15 bp, Homo sapiens
ccttgagtccttaag

SEQ ID NO: 84546 - DNA, 15 bp, Homo sapiens
tccttgagtccttaa

SEQ ID NO: 84547 - DNA, 15 bp, Homo sapiens
gtccttgagtcctta

SEQ ID NO: 84548 - DNA, 15 bp, Homo sapiens
tgtccttgagtcctt

SEQ ID NO: 84549 - DNA, 15 bp, Homo sapiens
ttgtccttgagtcct

SEQ ID NO: 84550 - DNA, 15 bp, Homo sapiens
attgtccttgagtcc

SEQ ID NO: 84551 - DNA, 15 bp, Homo sapiens
aattgtccttgagtc

SEQ ID NO: 84552 - DNA, 15 bp, Homo sapiens
aaattgtccttgagt

SEQ ID NO: 84553 - DNA, 15 bp, Homo sapiens
gaaattgtccttgag

SEQ ID NO: 84554 - DNA, 15 bp, Homo sapiens
agaaattgtccttga

SEQ ID NO: 84555 - DNA, 15 bp, Homo sapiens
tagaaattgtccttg

SEQ ID NO: 84556 - DNA, 15 bp, Homo sapiens
ctagaaattgtcctt

SEQ ID NO: 84557 - DNA, 15 bp, Homo sapiens
cctagaaattgtcct

SEQ ID NO: 84558 - DNA, 15 bp, Homo sapiens
gcctagaaattgtcc

SEQ ID NO: 84559 - DNA, 15 bp, Homo sapiens
tgcctagaaattgtc

SEQ ID NO: 84560 - DNA, 15 bp, Homo sapiens
atgcctagaaattgt

SEQ ID NO: 84561 - DNA, 15 bp, Homo sapiens
aatgcctagaaattg

SEQ ID NO: 84562 - DNA, 15 bp, Homo sapiens
aaatgcctagaaatt

SEQ ID NO: 84563 - DNA, 15 bp, Homo sapiens
taaatgcctagaaat

SEQ ID NO: 84564 - DNA, 15 bp, Homo sapiens
ctaaatgcctagaaa

SEQ ID NO: 84565 - DNA, 15 bp, Homo sapiens
gctaaatgcctagaa

SEQ ID NO: 84566 - DNA, 15 bp, Homo sapiens
tgctaaatgcctaga

SEQ ID NO: 84567 - DNA, 15 bp, Homo sapiens
gtgctaaatgcctag

SEQ ID NO: 84568 - DNA, 15 bp, Homo sapiens
cgtgctaaatgccta

SEQ ID NO: 84569 - DNA, 15 bp, Homo sapiens
ccgtgctaaatgcct

SEQ ID NO: 84570 - DNA, 15 bp, Homo sapiens
cccgtgctaaatgcc

SEQ ID NO: 84571 - DNA, 15 bp, Homo sapiens
tcccgtgctaaatgc

SEQ ID NO: 84572 - DNA, 15 bp, Homo sapiens
gtcccgtgctaaatg

SEQ ID NO: 84573 - DNA, 15 bp, Homo sapiens
agtcccgtgctaaat

SEQ ID NO: 84574 - DNA, 15 bp, Homo sapiens
tagtcccgtgctaaa

SEQ ID NO: 84575 - DNA, 15 bp, Homo sapiens
ttagtcccgtgctaa

SEQ ID NO: 84576 - DNA, 15 bp, Homo sapiens
tttagtcccgtgcta

SEQ ID NO: 84577 - DNA, 15 bp, Homo sapiens
ttttagtcccgtgct

SEQ ID NO: 84578 - DNA, 15 bp, Homo sapiens
tttttagtcccgtgc

SEQ ID NO: 84579 - DNA, 15 bp, Homo sapiens
ctttttagtcccgtg

SEQ ID NO: 84580 - DNA, 15 bp, Homo sapiens
cctttttagtcccgt

SEQ ID NO: 84581 - DNA, 15 bp, Homo sapiens
acctttttagtcccg

SEQ ID NO: 84582 - DNA, 15 bp, Homo sapiens
gacctttttagtccc

SEQ ID NO: 84583 - DNA, 15 bp, Homo sapiens
agacctttttagtcc

SEQ ID NO: 84584 - DNA, 15 bp, Homo sapiens
aagacctttttagtc

SEQ ID NO: 84585 - DNA, 15 bp, Homo sapiens
taagacctttttagt

SEQ ID NO: 84586 - DNA, 15 bp, Homo sapiens
ctaagacctttttag

SEQ ID NO: 84587 - DNA, 15 bp, Homo sapiens
tctaagaccttttta

SEQ ID NO: 84588 - DNA, 15 bp, Homo sapiens
ctctaagaccttttt

SEQ ID NO: 84589 - DNA, 15 bp, Homo sapiens
cctctaagacctttt

SEQ ID NO: 84590 - DNA, 15 bp, Homo sapiens
tcctctaagaccttt

SEQ ID NO: 84591 - DNA, 15 bp, Homo sapiens
ttcctctaagacctt

SEQ ID NO: 84592 - DNA, 15 bp, Homo sapiens
tttcctctaagacct

SEQ ID NO: 84593 - DNA, 15 bp, Homo sapiens
atttcctctaagacc

SEQ ID NO: 84594 - DNA, 15 bp, Homo sapiens
tatttcctctaagac

SEQ ID NO: 84595 - DNA, 15 bp, Homo sapiens
ttatttcctctaaga

SEQ ID NO: 84596 - DNA, 15 bp, Homo sapiens
cttatttcctctaag

SEQ ID NO: 84597 - DNA, 15 bp, Homo sapiens
tcttatttcctctaa

SEQ ID NO: 84598 - DNA, 15 bp, Homo sapiens
ttcttatttcctcta

SEQ ID NO: 84599 - DNA, 15 bp, Homo sapiens
cttcttatttcctct

SEQ ID NO: 84600 - DNA, 15 bp, Homo sapiens
gcttcttatttcctc

SEQ ID NO: 84601 - DNA, 15 bp, Homo sapiens
cgcttcttatttcct

SEQ ID NO: 84602 - DNA, 15 bp, Homo sapiens
gcgcttcttatttcc

SEQ ID NO: 84603 - DNA, 15 bp, Homo sapiens
ggcgcttcttatttc

SEQ ID NO: 84604 - DNA, 15 bp, Homo sapiens
tggcgcttcttattt

SEQ ID NO: 84605 - DNA, 15 bp, Homo sapiens
ttggcgcttcttatt

SEQ ID NO: 84606 - DNA, 15 bp, Homo sapiens
tttggcgcttcttat

SEQ ID NO: 84607 - DNA, 15 bp, Homo sapiens
ttttggcgcttctta

SEQ ID NO: 84608 - DNA, 15 bp, Homo sapiens
gttttggcgcttctt

SEQ ID NO: 84609 - DNA, 15 bp, Homo sapiens
ggttttggcgcttct

SEQ ID NO: 84610 - DNA, 15 bp, Homo sapiens
tggttttggcgcttc

SEQ ID NO: 84611 - DNA, 15 bp, Homo sapiens
atggttttggcgctt

SEQ ID NO: 84612 - DNA, 15 bp, Homo sapiens
gatggttttggcgct

SEQ ID NO: 84613 - DNA, 15 bp, Homo sapiens
agatggttttggcgc

SEQ ID NO: 84614 - DNA, 15 bp, Homo sapiens
gagatggttttggcg

SEQ ID NO: 84615 - DNA, 15 bp, Homo sapiens
agagatggttttggc

SEQ ID NO: 84616 - DNA, 15 bp, Homo sapiens
aagagatggttttgg

SEQ ID NO: 84617 - DNA, 15 bp, Homo sapiens
aaagagatggttttg

SEQ ID NO: 84618 - DNA, 15 bp, Homo sapiens
caaagagatggtttt

SEQ ID NO: 84619 - DNA, 15 bp, Homo sapiens
gcaaagagatggttt

SEQ ID NO: 84620 - DNA, 15 bp, Homo sapiens
tgcaaagagatggtt

SEQ ID NO: 84621 - DNA, 15 bp, Homo sapiens
gtgcaaagagatggt

SEQ ID NO: 84622 - DNA, 15 bp, Homo sapiens
agtgcaaagagatgg

SEQ ID NO: 84623 - DNA, 15 bp, Homo sapiens
cagtgcaaagagatg

SEQ ID NO: 84624 - DNA, 15 bp, Homo sapiens
acagtgcaaagagat

SEQ ID NO: 84625 - DNA, 15 bp, Homo sapiens
tacagtgcaaagaga

SEQ ID NO: 84626 - DNA, 15 bp, Homo sapiens
atacagtgcaaagag

SEQ ID NO: 84627 - DNA, 15 bp, Homo sapiens
aatacagtgcaaaga

SEQ ID NO: 84628 - DNA, 15 bp, Homo sapiens
aaatacagtgcaaag

SEQ ID NO: 84629 - DNA, 15 bp, Homo sapiens
gaaatacagtgcaaa

SEQ ID NO: 84630 - DNA, 15 bp, Homo sapiens
tgaaatacagtgcaa

SEQ ID NO: 84631 - DNA, 15 bp, Homo sapiens
ttgaaatacagtgca

SEQ ID NO: 84632 - DNA, 15 bp, Homo sapiens
gttgaaatacagtgc

SEQ ID NO: 84633 - DNA, 15 bp, Homo sapiens
ggttgaaatacagtg

SEQ ID NO: 84634 - DNA, 15 bp, Homo sapiens
gggttgaaatacagt

SEQ ID NO: 84635 - DNA, 15 bp, Homo sapiens
tgggttgaaatacag

SEQ ID NO: 84636 - DNA, 15 bp, Homo sapiens
atgggttgaaataca

SEQ ID NO: 84637 - DNA, 15 bp, Homo sapiens
aatgggttgaaatac

SEQ ID NO: 84638 - DNA, 15 bp, Homo sapiens
aaatgggttgaaata

SEQ ID NO: 84639 - DNA, 15 bp, Homo sapiens
caaatgggttgaaat

SEQ ID NO: 84640 - DNA, 15 bp, Homo sapiens
acaaatgggttgaaa

SEQ ID NO: 84641 - DNA, 15 bp, Homo sapiens
gacaaatgggttgaa

SEQ ID NO: 84642 - DNA, 15 bp, Homo sapiens
ggacaaatgggttga

SEQ ID NO: 84643 - DNA, 15 bp, Homo sapiens
aggacaaatgggttg

SEQ ID NO: 84644 - DNA, 15 bp, Homo sapiens
aaggacaaatgggtt

SEQ ID NO: 84645 - DNA, 15 bp, Homo sapiens
gaaggacaaatgggt

SEQ ID NO: 84646 - DNA, 15 bp, Homo sapiens
agaaggacaaatggg

SEQ ID NO: 84647 - DNA, 15 bp, Homo sapiens
cagaaggacaaatgg

SEQ ID NO: 84648 - DNA, 15 bp, Homo sapiens
ccagaaggacaaatg

SEQ ID NO: 84649 - DNA, 15 bp, Homo sapiens
cccagaaggacaaat

SEQ ID NO: 84650 - DNA, 15 bp, Homo sapiens
acccagaaggacaaa

SEQ ID NO: 84651 - DNA, 15 bp, Homo sapiens
aacccagaaggacaa

SEQ ID NO: 84652 - DNA, 15 bp, Homo sapiens
aaacccagaaggaca

SEQ ID NO: 84653 - DNA, 15 bp, Homo sapiens
aaaacccagaaggac

SEQ ID NO: 84654 - DNA, 15 bp, Homo sapiens
caaaacccagaagga

SEQ ID NO: 84655 - DNA, 15 bp, Homo sapiens
tcaaaacccagaagg

SEQ ID NO: 84656 - DNA, 15 bp, Homo sapiens
ttcaaaacccagaag

SEQ ID NO: 84657 - DNA, 15 bp, Homo sapiens
cttcaaaacccagaa

SEQ ID NO: 84658 - DNA, 15 bp, Homo sapiens
ccttcaaaacccaga

SEQ ID NO: 84659 - DNA, 15 bp, Homo sapiens
tccttcaaaacccag

SEQ ID NO: 84660 - DNA, 15 bp, Homo sapiens
ttccttcaaaaccca

SEQ ID NO: 84661 - DNA, 15 bp, Homo sapiens
gttccttcaaaaccc

SEQ ID NO: 84662 - DNA, 15 bp, Homo sapiens
tgttccttcaaaacc

SEQ ID NO: 84663 - DNA, 15 bp, Homo sapiens
ctgttccttcaaaac

SEQ ID NO: 84664 - DNA, 15 bp, Homo sapiens
cctgttccttcaaaa

SEQ ID NO: 84665 - DNA, 15 bp, Homo sapiens
acctgttccttcaaa

SEQ ID NO: 84666 - DNA, 15 bp, Homo sapiens
cacctgttccttcaa

SEQ ID NO: 84667 - DNA, 15 bp, Homo sapiens
ccacctgttccttca

SEQ ID NO: 84668 - DNA, 15 bp, Homo sapiens
cccacctgttccttc

SEQ ID NO: 84669 - DNA, 15 bp, Homo sapiens
tcccacctgttcctt

SEQ ID NO: 84670 - DNA, 15 bp, Homo sapiens
gtcccacctgttcct

SEQ ID NO: 84671 - DNA, 15 bp, Homo sapiens
agtcccacctgttcc

SEQ ID NO: 84672 - DNA, 15 bp, Homo sapiens
cagtcccacctgttc

SEQ ID NO: 84673 - DNA, 15 bp, Homo sapiens
ccagtcccacctgtt

SEQ ID NO: 84674 - DNA, 15 bp, Homo sapiens
cccagtcccacctgt

SEQ ID NO: 84675 - DNA, 15 bp, Homo sapiens
ccccagtcccacctg

SEQ ID NO: 84676 - DNA, 15 bp, Homo sapiens
tccccagtcccacct

SEQ ID NO: 84677 - DNA, 15 bp, Homo sapiens
gtccccagtcccacc

SEQ ID NO: 84678 - DNA, 15 bp, Homo sapiens
tgtccccagtcccac

SEQ ID NO: 84679 - DNA, 15 bp, Homo sapiens
ctgtccccagtccca

SEQ ID NO: 84680 - DNA, 15 bp, Homo sapiens
tctgtccccagtccc

SEQ ID NO: 84681 - DNA, 15 bp, Homo sapiens
ttctgtccccagtcc

SEQ ID NO: 84682 - DNA, 15 bp, Homo sapiens
cttctgtccccagtc

SEQ ID NO: 84683 - DNA, 15 bp, Homo sapiens
tcttctgtccccagt

SEQ ID NO: 84684 - DNA, 15 bp, Homo sapiens
ctcttctgtccccag

SEQ ID NO: 84685 - DNA, 15 bp, Homo sapiens
actcttctgtcccca

SEQ ID NO: 84686 - DNA, 15 bp, Homo sapiens
aactcttctgtcccc

SEQ ID NO: 84687 - DNA, 15 bp, Homo sapiens
gaactcttctgtccc

SEQ ID NO: 84688 - DNA, 15 bp, Homo sapiens
agaactcttctgtcc

SEQ ID NO: 84689 - DNA, 15 bp, Homo sapiens
aagaactcttctgtc

SEQ ID NO: 84690 - DNA, 15 bp, Homo sapiens
caagaactcttctgt

SEQ ID NO: 84691 - DNA, 15 bp, Homo sapiens
tcaagaactcttctg

SEQ ID NO: 84692 - DNA, 15 bp, Homo sapiens
ttcaagaactcttct

SEQ ID NO: 84693 - DNA, 15 bp, Homo sapiens
cttcaagaactcttc

SEQ ID NO: 84694 - DNA, 15 bp, Homo sapiens
gcttcaagaactctt

SEQ ID NO: 84695 - DNA, 15 bp, Homo sapiens
ggcttcaagaactct

SEQ ID NO: 84696 - DNA, 15 bp, Homo sapiens
tggcttcaagaactc

SEQ ID NO: 84697 - DNA, 15 bp, Homo sapiens
ctggcttcaagaact

SEQ ID NO: 84698 - DNA, 15 bp, Homo sapiens
actggcttcaagaac

SEQ ID NO: 84699 - DNA, 15 bp, Homo sapiens
aactggcttcaagaa

SEQ ID NO: 84700 - DNA, 15 bp, Homo sapiens
aaactggcttcaaga

SEQ ID NO: 84701 - DNA, 15 bp, Homo sapiens
caaactggcttcaag

SEQ ID NO: 84702 - DNA, 15 bp, Homo sapiens
acaaactggcttcaa

SEQ ID NO: 84703 - DNA, 15 bp, Homo sapiens
gacaaactggcttca

SEQ ID NO: 84704 - DNA, 15 bp, Homo sapiens
ggacaaactggcttc

SEQ ID NO: 84705 - DNA, 15 bp, Homo sapiens
tggacaaactggctt

SEQ ID NO: 84706 - DNA, 15 bp, Homo sapiens
atggacaaactggct

SEQ ID NO: 84707 - DNA, 15 bp, Homo sapiens
gatggacaaactggc

SEQ ID NO: 84708 - DNA, 15 bp, Homo sapiens
tgatggacaaactgg

SEQ ID NO: 84709 - DNA, 15 bp, Homo sapiens
atgatggacaaactg

SEQ ID NO: 84710 - DNA, 15 bp, Homo sapiens
catgatggacaaact

SEQ ID NO: 84711 - DNA, 15 bp, Homo sapiens
ccatgatggacaaac

SEQ ID NO: 84712 - DNA, 15 bp, Homo sapiens
tccatgatggacaaa

SEQ ID NO: 84713 - DNA, 15 bp, Homo sapiens
ttccatgatggacaa

SEQ ID NO: 84714 - DNA, 15 bp, Homo sapiens
tttccatgatggaca

SEQ ID NO: 84715 - DNA, 15 bp, Homo sapiens
ttttccatgatggac

SEQ ID NO: 84716 - DNA, 15 bp, Homo sapiens
attttccatgatgga

SEQ ID NO: 84717 - DNA, 15 bp, Homo sapiens
cattttccatgatgg

SEQ ID NO: 84718 - DNA, 15 bp, Homo sapiens
tcattttccatgatg

SEQ ID NO: 84719 - DNA, 15 bp, Homo sapiens
ctcattttccatgat

SEQ ID NO: 84720 - DNA, 15 bp, Homo sapiens
tctcattttccatga

SEQ ID NO: 84721 - DNA, 15 bp, Homo sapiens
atctcattttccatg

SEQ ID NO: 84722 - DNA, 15 bp, Homo sapiens
tatctcattttccat

SEQ ID NO: 84723 - DNA, 15 bp, Homo sapiens
ctatctcattttcca

SEQ ID NO: 84724 - DNA, 15 bp, Homo sapiens
cctatctcattttcc

SEQ ID NO: 84725 - DNA, 15 bp, Homo sapiens
acctatctcattttc

SEQ ID NO: 84726 - DNA, 15 bp, Homo sapiens
cacctatctcatttt

SEQ ID NO: 84727 - DNA, 15 bp, Homo sapiens
tcacctatctcattt

SEQ ID NO: 84728 - DNA, 15 bp, Homo sapiens
atcacctatctcatt

SEQ ID NO: 84729 - DNA, 15 bp, Homo sapiens
catcacctatctcat

SEQ ID NO: 84730 - DNA, 15 bp, Homo sapiens
acatcacctatctca

SEQ ID NO: 84731 - DNA, 15 bp, Homo sapiens
cacatcacctatctc

SEQ ID NO: 84732 - DNA, 15 bp, Homo sapiens
ccacatcacctatct

SEQ ID NO: 84733 - DNA, 15 bp, Homo sapiens
gccacatcacctatc

SEQ ID NO: 84734 - DNA, 15 bp, Homo sapiens
agccacatcacctat

SEQ ID NO: 84735 - DNA, 15 bp, Homo sapiens
tagccacatcaccta

SEQ ID NO: 84736 - DNA, 15 bp, Homo sapiens
gtagccacatcacct

SEQ ID NO: 84737 - DNA, 15 bp, Homo sapiens
cgtagccacatcacc

SEQ ID NO: 84738 - DNA, 15 bp, Homo sapiens
acgtagccacatcac

SEQ ID NO: 84739 - DNA, 15 bp, Homo sapiens
gacgtagccacatca

SEQ ID NO: 84740 - DNA, 15 bp, Homo sapiens
tgacgtagccacatc

SEQ ID NO: 84741 - DNA, 15 bp, Homo sapiens
ctgacgtagccacat

SEQ ID NO: 84742 - DNA, 15 bp, Homo sapiens
cctgacgtagccaca

SEQ ID NO: 84743 - DNA, 15 bp, Homo sapiens
ccctgacgtagccac

SEQ ID NO: 84744 - DNA, 15 bp, Homo sapiens
cccctgacgtagcca

SEQ ID NO: 84745 - DNA, 15 bp, Homo sapiens
ccccctgacgtagcc

SEQ ID NO: 84746 - DNA, 15 bp, Homo sapiens
gccccctgacgtagc

SEQ ID NO: 84747 - DNA, 15 bp, Homo sapiens
ggccccctgacgtag

SEQ ID NO: 84748 - DNA, 15 bp, Homo sapiens
gggccccctgacgta

SEQ ID NO: 84749 - DNA, 15 bp, Homo sapiens
cgggccccctgacgt

SEQ ID NO: 84750 - DNA, 15 bp, Homo sapiens
tcgggccccctgacg

SEQ ID NO: 84751 - DNA, 15 bp, Homo sapiens
ttcgggccccctgac

SEQ ID NO: 84752 - DNA, 15 bp, Homo sapiens
cttcgggccccctga

SEQ ID NO: 84753 - DNA, 15 bp, Homo sapiens
ccttcgggccccctg

SEQ ID NO: 84754 - DNA, 15 bp, Homo sapiens
gccttcgggccccct

SEQ ID NO: 84755 - DNA, 15 bp, Homo sapiens
agccttcgggccccc

SEQ ID NO: 84756 - DNA, 15 bp, Homo sapiens
gagccttcgggcccc

SEQ ID NO: 84757 - DNA, 15 bp, Homo sapiens
ggagccttcgggccc

SEQ ID NO: 84758 - DNA, 15 bp, Homo sapiens
aggagccttcgggcc

SEQ ID NO: 84759 - DNA, 15 bp, Homo sapiens
aaggagccttcgggc

SEQ ID NO: 84760 - DNA, 15 bp, Homo sapiens
caaggagccttcggg

SEQ ID NO: 84761 - DNA, 15 bp, Homo sapiens
acaaggagccttcgg

SEQ ID NO: 84762 - DNA, 15 bp, Homo sapiens
aacaaggagccttcg

SEQ ID NO: 84763 - DNA, 15 bp, Homo sapiens
taacaaggagccttc

SEQ ID NO: 84764 - DNA, 15 bp, Homo sapiens
gtaacaaggagcctt

SEQ ID NO: 84765 - DNA, 15 bp, Homo sapiens
agtaacaaggagcct

SEQ ID NO: 84766 - DNA, 15 bp, Homo sapiens
cagtaacaaggagcc

SEQ ID NO: 84767 - DNA, 15 bp, Homo sapiens
tcagtaacaaggagc

SEQ ID NO: 84768 - DNA, 15 bp, Homo sapiens
atcagtaacaaggag

SEQ ID NO: 84769 - DNA, 15 bp, Homo sapiens
aatcagtaacaagga

SEQ ID NO: 84770 - DNA, 15 bp, Homo sapiens
aaatcagtaacaagg

SEQ ID NO: 84771 - DNA, 15 bp, Homo sapiens
gaaatcagtaacaag

SEQ ID NO: 84772 - DNA, 15 bp, Homo sapiens
ggaaatcagtaacaa

SEQ ID NO: 84773 - DNA, 15 bp, Homo sapiens
cggaaatcagtaaca

SEQ ID NO: 84774 - DNA, 15 bp, Homo sapiens
acggaaatcagtaac

SEQ ID NO: 84775 - DNA, 15 bp, Homo sapiens
gacggaaatcagtaa

SEQ ID NO: 84776 - DNA, 15 bp, Homo sapiens
agacggaaatcagta

SEQ ID NO: 84777 - DNA, 15 bp, Homo sapiens
aagacggaaatcagt

SEQ ID NO: 84778 - DNA, 15 bp, Homo sapiens
aaagacggaaatcag

SEQ ID NO: 84779 - DNA, 15 bp, Homo sapiens
aaaagacggaaatca

SEQ ID NO: 84780 - DNA, 15 bp, Homo sapiens
gaaaagacggaaatc

SEQ ID NO: 84781 - DNA, 15 bp, Homo sapiens
agaaaagacggaaat

SEQ ID NO: 84782 - DNA, 15 bp, Homo sapiens
gagaaaagacggaaa

SEQ ID NO: 84783 - DNA, 15 bp, Homo sapiens
agagaaaagacggaa

SEQ ID NO: 84784 - DNA, 15 bp, Homo sapiens
gagagaaaagacgga

SEQ ID NO: 84785 - DNA, 15 bp, Homo sapiens
agagagaaaagacgg

SEQ ID NO: 84786 - DNA, 15 bp, Homo sapiens
cagagagaaaagacg

SEQ ID NO: 84787 - DNA, 15 bp, Homo sapiens
gcagagagaaaagac

SEQ ID NO: 84788 - DNA, 15 bp, Homo sapiens
ggcagagagaaaaga

SEQ ID NO: 84789 - DNA, 15 bp, Homo sapiens
aggcagagagaaaag

SEQ ID NO: 84790 - DNA, 15 bp, Homo sapiens
aaggcagagagaaaa

SEQ ID NO: 84791 - DNA, 15 bp, Homo sapiens
aaaggcagagagaaa

SEQ ID NO: 84792 - DNA, 15 bp, Homo sapiens
aaaaggcagagagaa

SEQ ID NO: 84793 - DNA, 15 bp, Homo sapiens
gaaaaggcagagaga

SEQ ID NO: 84794 - DNA, 15 bp, Homo sapiens
ggaaaaggcagagag

SEQ ID NO: 84795 - DNA, 15 bp, Homo sapiens
gggaaaaggcagaga

SEQ ID NO: 84796 - DNA, 15 bp, Homo sapiens
ggggaaaaggcagag

SEQ ID NO: 84797 - DNA, 15 bp, Homo sapiens
tggggaaaaggcaga

SEQ ID NO: 84798 - DNA, 15 bp, Homo sapiens
ttggggaaaaggcag

SEQ ID NO: 84799 - DNA, 15 bp, Homo sapiens
cttggggaaaaggca

SEQ ID NO: 84800 - DNA, 15 bp, Homo sapiens
ccttggggaaaaggc

SEQ ID NO: 84801 - DNA, 15 bp, Homo sapiens
cccttggggaaaagg

SEQ ID NO: 84802 - DNA, 15 bp, Homo sapiens
gcccttggggaaaag

SEQ ID NO: 84803 - DNA, 15 bp, Homo sapiens
ggcccttggggaaaa

SEQ ID NO: 84804 - DNA, 15 bp, Homo sapiens
tggcccttggggaaa

SEQ ID NO: 84805 - DNA, 15 bp, Homo sapiens
ctggcccttggggaa

SEQ ID NO: 84806 - DNA, 15 bp, Homo sapiens
cctggcccttgggga

SEQ ID NO: 84807 - DNA, 15 bp, Homo sapiens
tcctggcccttgggg

SEQ ID NO: 84808 - DNA, 15 bp, Homo sapiens
gtcctggcccttggg

SEQ ID NO: 84809 - DNA, 15 bp, Homo sapiens
ggtcctggcccttgg

SEQ ID NO: 84810 - DNA, 15 bp, Homo sapiens
gggtcctggcccttg

SEQ ID NO: 84811 - DNA, 15 bp, Homo sapiens
ggggtcctggccctt

SEQ ID NO: 84812 - DNA, 15 bp, Homo sapiens
aggggtcctggccct

SEQ ID NO: 84813 - DNA, 15 bp, Homo sapiens
caggggtcctggccc

SEQ ID NO: 84814 - DNA, 15 bp, Homo sapiens
ccaggggtcctggcc

SEQ ID NO: 84815 - DNA, 15 bp, Homo sapiens
tccaggggtcctggc

SEQ ID NO: 84816 - DNA, 15 bp, Homo sapiens
atccaggggtcctgg

SEQ ID NO: 84817 - DNA, 15 bp, Homo sapiens
gatccaggggtcctg

SEQ ID NO: 84818 - DNA, 15 bp, Homo sapiens
agatccaggggtcct

SEQ ID NO: 84819 - DNA, 15 bp, Homo sapiens
gagatccaggggtcc

SEQ ID NO: 84820 - DNA, 15 bp, Homo sapiens
agagatccaggggtc

SEQ ID NO: 84821 - DNA, 15 bp, Homo sapiens
cagagatccaggggt

SEQ ID NO: 84822 - DNA, 15 bp, Homo sapiens
ccagagatccagggg

SEQ ID NO: 84823 - DNA, 15 bp, Homo sapiens
cccagagatccaggg

SEQ ID NO: 84824 - DNA, 15 bp, Homo sapiens
gcccagagatccagg

SEQ ID NO: 84825 - DNA, 15 bp, Homo sapiens
tgcccagagatccag

SEQ ID NO: 84826 - DNA, 15 bp, Homo sapiens
ctgcccagagatcca

SEQ ID NO: 84827 - DNA, 15 bp, Homo sapiens
tctgcccagagatcc

SEQ ID NO: 84828 - DNA, 15 bp, Homo sapiens
ctctgcccagagatc

SEQ ID NO: 84829 - DNA, 15 bp, Homo sapiens
gctctgcccagagat

SEQ ID NO: 84830 - DNA, 15 bp, Homo sapiens
tgctctgcccagaga

SEQ ID NO: 84831 - DNA, 15 bp, Homo sapiens
ctgctctgcccagag

SEQ ID NO: 84832 - DNA, 15 bp, Homo sapiens
tctgctctgcccaga

SEQ ID NO: 84833 - DNA, 15 bp, Homo sapiens
gtctgctctgcccag

SEQ ID NO: 84834 - DNA, 15 bp, Homo sapiens
cgtctgctctgccca

SEQ ID NO: 84835 - DNA, 15 bp, Homo sapiens
gcgtctgctctgccc

SEQ ID NO: 84836 - DNA, 15 bp, Homo sapiens
tgcgtctgctctgcc

SEQ ID NO: 84837 - DNA, 15 bp, Homo sapiens
ctgcgtctgctctgc

SEQ ID NO: 84838 - DNA, 15 bp, Homo sapiens
cctgcgtctgctctg

SEQ ID NO: 84839 - DNA, 15 bp, Homo sapiens
gcctgcgtctgctct

SEQ ID NO: 84840 - DNA, 15 bp, Homo sapiens
ggcctgcgtctgctc

SEQ ID NO: 84841 - DNA, 15 bp, Homo sapiens
gggcctgcgtctgct

SEQ ID NO: 84842 - DNA, 15 bp, Homo sapiens
ggggcctgcgtctgc

SEQ ID NO: 84843 - DNA, 15 bp, Homo sapiens
aggggcctgcgtctg

SEQ ID NO: 84844 - DNA, 15 bp, Homo sapiens
taggggcctgcgtct

SEQ ID NO: 84845 - DNA, 15 bp, Homo sapiens
ataggggcctgcgtc

SEQ ID NO: 84846 - DNA, 15 bp, Homo sapiens
tataggggcctgcgt

SEQ ID NO: 84847 - DNA, 15 bp, Homo sapiens
ttataggggcctgcg

SEQ ID NO: 84848 - DNA, 15 bp, Homo sapiens
attataggggcctgc

SEQ ID NO: 84849 - DNA, 15 bp, Homo sapiens
tattataggggcctg

SEQ ID NO: 84850 - DNA, 15 bp, Homo sapiens
ctattataggggcct

SEQ ID NO: 84851 - DNA, 15 bp, Homo sapiens
gctattataggggcc

SEQ ID NO: 84852 - DNA, 15 bp, Homo sapiens
ggctattataggggc

SEQ ID NO: 84853 - DNA, 15 bp, Homo sapiens
gggctattatagggg

SEQ ID NO: 84854 - DNA, 15 bp, Homo sapiens
agggctattataggg

SEQ ID NO: 84855 - DNA, 15 bp, Homo sapiens
gagggctattatagg

SEQ ID NO: 84856 - DNA, 15 bp, Homo sapiens
tgagggctattatag

SEQ ID NO: 84857 - DNA, 15 bp, Homo sapiens
atgagggctattata

SEQ ID NO: 84858 - DNA, 15 bp, Homo sapiens
catgagggctattat

SEQ ID NO: 84859 - DNA, 15 bp, Homo sapiens
gcatgagggctatta

SEQ ID NO: 84860 - DNA, 15 bp, Homo sapiens
agcatgagggctatt

SEQ ID NO: 84861 - DNA, 15 bp, Homo sapiens
tagcatgagggctat

SEQ ID NO: 84862 - DNA, 15 bp, Homo sapiens
ctagcatgagggcta

SEQ ID NO: 84863 - DNA, 15 bp, Homo sapiens
tctagcatgagggct

SEQ ID NO: 84864 - DNA, 15 bp, Homo sapiens
ttctagcatgagggc

SEQ ID NO: 84865 - DNA, 15 bp, Homo sapiens
tttctagcatgaggg

SEQ ID NO: 84866 - DNA, 15 bp, Homo sapiens
ctttctagcatgagg

SEQ ID NO: 84867 - DNA, 15 bp, Homo sapiens
cctttctagcatgag

SEQ ID NO: 84868 - DNA, 15 bp, Homo sapiens
tcctttctagcatga

SEQ ID NO: 84869 - DNA, 15 bp, Homo sapiens
ctcctttctagcatg

SEQ ID NO: 84870 - DNA, 15 bp, Homo sapiens
gctcctttctagcat

SEQ ID NO: 84871 - DNA, 15 bp, Homo sapiens
ggctcctttctagca

SEQ ID NO: 84872 - DNA, 15 bp, Homo sapiens
cggctcctttctagc

SEQ ID NO: 84873 - DNA, 15 bp, Homo sapiens
ccggctcctttctag

SEQ ID NO: 84874 - DNA, 15 bp, Homo sapiens
tccggctcctttcta

SEQ ID NO: 84875 - DNA, 15 bp, Homo sapiens
ctccggctcctttct

SEQ ID NO: 84876 - DNA, 15 bp, Homo sapiens
gctccggctcctttc

SEQ ID NO: 84877 - DNA, 15 bp, Homo sapiens
ggctccggctccttt

SEQ ID NO: 84878 - DNA, 15 bp, Homo sapiens
aggctccggctcctt

SEQ ID NO: 84879 - DNA, 15 bp, Homo sapiens
caggctccggctcct

SEQ ID NO: 84880 - DNA, 15 bp, Homo sapiens
acaggctccggctcc

SEQ ID NO: 84881 - DNA, 15 bp, Homo sapiens
cacaggctccggctc

SEQ ID NO: 84882 - DNA, 15 bp, Homo sapiens
acacaggctccggct

SEQ ID NO: 84883 - DNA, 15 bp, Homo sapiens
tacacaggctccggc

SEQ ID NO: 84884 - DNA, 15 bp, Homo sapiens
atacacaggctccgg

SEQ ID NO: 84885 - DNA, 15 bp, Homo sapiens
tatacacaggctccg

SEQ ID NO: 84886 - DNA, 15 bp, Homo sapiens
ttatacacaggctcc

SEQ ID NO: 84887 - DNA, 15 bp, Homo sapiens
cttatacacaggctc

SEQ ID NO: 84888 - DNA, 15 bp, Homo sapiens
ccttatacacaggct

SEQ ID NO: 84889 - DNA, 15 bp, Homo sapiens
gccttatacacaggc

SEQ ID NO: 84890 - DNA, 15 bp, Homo sapiens
ggccttatacacagg

SEQ ID NO: 84891 - DNA, 15 bp, Homo sapiens
tggccttatacacag

SEQ ID NO: 84892 - DNA, 15 bp, Homo sapiens
ctggccttatacaca

SEQ ID NO: 84893 - DNA, 15 bp, Homo sapiens
gctggccttatacac

SEQ ID NO: 84894 - DNA, 15 bp, Homo sapiens
cgctggccttataca

SEQ ID NO: 84895 - DNA, 15 bp, Homo sapiens
gcgctggccttatac

SEQ ID NO: 84896 - DNA, 15 bp, Homo sapiens
tgcgctggccttata

SEQ ID NO: 84897 - DNA, 15 bp, Homo sapiens
ctgcgctggccttat

SEQ ID NO: 84898 - DNA, 15 bp, Homo sapiens
gctgcgctggcctta

SEQ ID NO: 84899 - DNA, 15 bp, Homo sapiens
ggctgcgctggcctt

SEQ ID NO: 84900 - DNA, 15 bp, Homo sapiens
aggctgcgctggcct

SEQ ID NO: 84901 - DNA, 15 bp, Homo sapiens
taggctgcgctggcc

SEQ ID NO: 84902 - DNA, 15 bp, Homo sapiens
gtaggctgcgctggc

SEQ ID NO: 84903 - DNA, 15 bp, Homo sapiens
agtaggctgcgctgg

SEQ ID NO: 84904 - DNA, 15 bp, Homo sapiens
gagtaggctgcgctg

SEQ ID NO: 84905 - DNA, 15 bp, Homo sapiens
agagtaggctgcgct

SEQ ID NO: 84906 - DNA, 15 bp, Homo sapiens
cagagtaggctgcgc

SEQ ID NO: 84907 - DNA, 15 bp, Homo sapiens
ccagagtaggctgcg

SEQ ID NO: 84908 - DNA, 15 bp, Homo sapiens
tccagagtaggctgc

SEQ ID NO: 84909 - DNA, 15 bp, Homo sapiens
gtccagagtaggctg

SEQ ID NO: 84910 - DNA, 15 bp, Homo sapiens
tgtccagagtaggct

SEQ ID NO: 84911 - DNA, 15 bp, Homo sapiens
ctgtccagagtaggc

SEQ ID NO: 84912 - DNA, 15 bp, Homo sapiens
actgtccagagtagg

SEQ ID NO: 84913 - DNA, 15 bp, Homo sapiens
cactgtccagagtag

SEQ ID NO: 84914 - DNA, 15 bp, Homo sapiens
gcactgtccagagta

SEQ ID NO: 84915 - DNA, 15 bp, Homo sapiens
tgcactgtccagagt

SEQ ID NO: 84916 - DNA, 15 bp, Homo sapiens
ctgcactgtccagag

SEQ ID NO: 84917 - DNA, 15 bp, Homo sapiens
cctgcactgtccaga

SEQ ID NO: 84918 - DNA, 15 bp, Homo sapiens
ccctgcactgtccag

SEQ ID NO: 84919 - DNA, 15 bp, Homo sapiens
accctgcactgtcca

SEQ ID NO: 84920 - DNA, 15 bp, Homo sapiens
aaccctgcactgtcc

SEQ ID NO: 84921 - DNA, 15 bp, Homo sapiens
gaaccctgcactgtc

SEQ ID NO: 84922 - DNA, 15 bp, Homo sapiens
ggaaccctgcactgt

SEQ ID NO: 84923 - DNA, 15 bp, Homo sapiens
gggaaccctgcactg

SEQ ID NO: 84924 - DNA, 15 bp, Homo sapiens
tgggaaccctgcact

SEQ ID NO: 84925 - DNA, 15 bp, Homo sapiens
gtgggaaccctgcac

SEQ ID NO: 84926 - DNA, 15 bp, Homo sapiens
agtgggaaccctgca

SEQ ID NO: 84927 - DNA, 15 bp, Homo sapiens
gagtgggaaccctgc

SEQ ID NO: 84928 - DNA, 15 bp, Homo sapiens
agagtgggaaccctg

SEQ ID NO: 84929 - DNA, 15 bp, Homo sapiens
gagagtgggaaccct

SEQ ID NO: 84930 - DNA, 15 bp, Homo sapiens
ggagagtgggaaccc

SEQ ID NO: 84931 - DNA, 15 bp, Homo sapiens
gggagagtgggaacc

SEQ ID NO: 84932 - DNA, 15 bp, Homo sapiens
tgggagagtgggaac

SEQ ID NO: 84933 - DNA, 15 bp, Homo sapiens
ttgggagagtgggaa

SEQ ID NO: 84934 - DNA, 15 bp, Homo sapiens
gttgggagagtggga

SEQ ID NO: 84935 - DNA, 15 bp, Homo sapiens
agttgggagagtggg

SEQ ID NO: 84936 - DNA, 15 bp, Homo sapiens
gagttgggagagtgg

SEQ ID NO: 84937 - DNA, 15 bp, Homo sapiens
ggagttgggagagtg

SEQ ID NO: 84938 - DNA, 15 bp, Homo sapiens
gggagttgggagagt

SEQ ID NO: 84939 - DNA, 15 bp, Homo sapiens
ggggagttgggagag

SEQ ID NO: 84940 - DNA, 15 bp, Homo sapiens
tggggagttgggaga

SEQ ID NO: 84941 - DNA, 15 bp, Homo sapiens
atggggagttgggag

SEQ ID NO: 84942 - DNA, 15 bp, Homo sapiens
gatggggagttggga

SEQ ID NO: 84943 - DNA, 15 bp, Homo sapiens
agatggggagttggg

SEQ ID NO: 84944 - DNA, 15 bp, Homo sapiens
cagatggggagttgg

SEQ ID NO: 84945 - DNA, 15 bp, Homo sapiens
gcagatggggagttg

SEQ ID NO: 84946 - DNA, 15 bp, Homo sapiens
agcagatggggagtt

SEQ ID NO: 84947 - DNA, 15 bp, Homo sapiens
aagcagatggggagt

SEQ ID NO: 84948 - DNA, 15 bp, Homo sapiens
caagcagatggggag

SEQ ID NO: 84949 - DNA, 15 bp, Homo sapiens
gcaagcagatgggga

SEQ ID NO: 84950 - DNA, 15 bp, Homo sapiens
ggcaagcagatgggg

SEQ ID NO: 84951 - DNA, 15 bp, Homo sapiens
aggcaagcagatggg

SEQ ID NO: 84952 - DNA, 15 bp, Homo sapiens
gaggcaagcagatgg

SEQ ID NO: 84953 - DNA, 15 bp, Homo sapiens
ggaggcaagcagatg

SEQ ID NO: 84954 - DNA, 15 bp, Homo sapiens
tggaggcaagcagat

SEQ ID NO: 84955 - DNA, 15 bp, Homo sapiens
ctggaggcaagcaga

SEQ ID NO: 84956 - DNA, 15 bp, Homo sapiens
tctggaggcaagcag

SEQ ID NO: 84957 - DNA, 15 bp, Homo sapiens
gtctggaggcaagca

SEQ ID NO: 84958 - DNA, 15 bp, Homo sapiens
ggtctggaggcaagc

SEQ ID NO: 84959 - DNA, 15 bp, Homo sapiens
gggtctggaggcaag

SEQ ID NO: 84960 - DNA, 15 bp, Homo sapiens
tgggtctggaggcaa

SEQ ID NO: 84961 - DNA, 15 bp, Homo sapiens
gtgggtctggaggca

SEQ ID NO: 84962 - DNA, 15 bp, Homo sapiens
tgtgggtctggaggc

SEQ ID NO: 84963 - DNA, 15 bp, Homo sapiens
atgtgggtctggagg

SEQ ID NO: 84964 - DNA, 15 bp, Homo sapiens
aatgtgggtctggag

SEQ ID NO: 84965 - DNA, 15 bp, Homo sapiens
gaatgtgggtctgga

SEQ ID NO: 84966 - DNA, 15 bp, Homo sapiens
tgaatgtgggtctgg

SEQ ID NO: 84967 - DNA, 15 bp, Homo sapiens
gtgaatgtgggtctg

SEQ ID NO: 84968 - DNA, 15 bp, Homo sapiens
tgtgaatgtgggtct

SEQ ID NO: 84969 - DNA, 15 bp, Homo sapiens
gtgtgaatgtgggtc

SEQ ID NO: 84970 - DNA, 15 bp, Homo sapiens
tgtgtgaatgtgggt

SEQ ID NO: 84971 - DNA, 15 bp, Homo sapiens
gtgtgtgaatgtggg

SEQ ID NO: 84972 - DNA, 15 bp, Homo sapiens
cgtgtgtgaatgtgg

SEQ ID NO: 84973 - DNA, 15 bp, Homo sapiens
tcgtgtgtgaatgtg

SEQ ID NO: 84974 - DNA, 15 bp, Homo sapiens
ctcgtgtgtgaatgt

SEQ ID NO: 84975 - DNA, 15 bp, Homo sapiens
gctcgtgtgtgaatg

SEQ ID NO: 84976 - DNA, 15 bp, Homo sapiens
ggctcgtgtgtgaat

SEQ ID NO: 84977 - DNA, 15 bp, Homo sapiens
tggctcgtgtgtgaa

SEQ ID NO: 84978 - DNA, 15 bp, Homo sapiens
gtggctcgtgtgtga

SEQ ID NO: 84979 - DNA, 15 bp, Homo sapiens
agtggctcgtgtgtg

SEQ ID NO: 84980 - DNA, 15 bp, Homo sapiens
cagtggctcgtgtgt

SEQ ID NO: 84981 - DNA, 15 bp, Homo sapiens
ccagtggctcgtgtg

SEQ ID NO: 84982 - DNA, 15 bp, Homo sapiens
cccagtggctcgtgt

SEQ ID NO: 84983 - DNA, 15 bp, Homo sapiens
acccagtggctcgtg

SEQ ID NO: 84984 - DNA, 15 bp, Homo sapiens
aacccagtggctcgt

SEQ ID NO: 84985 - DNA, 15 bp, Homo sapiens
caacccagtggctcg

SEQ ID NO: 84986 - DNA, 15 bp, Homo sapiens
ccaacccagtggctc

SEQ ID NO: 84987 - DNA, 15 bp, Homo sapiens
tccaacccagtggct

SEQ ID NO: 84988 - DNA, 15 bp, Homo sapiens
ctccaacccagtggc

SEQ ID NO: 84989 - DNA, 15 bp, Homo sapiens
cctccaacccagtgg

SEQ ID NO: 84990 - DNA, 15 bp, Homo sapiens
tcctccaacccagtg

SEQ ID NO: 84991 - DNA, 15 bp, Homo sapiens
ctcctccaacccagt

SEQ ID NO: 84992 - DNA, 15 bp, Homo sapiens
gctcctccaacccag

SEQ ID NO: 84993 - DNA, 15 bp, Homo sapiens
tgctcctccaaccca

SEQ ID NO: 84994 - DNA, 15 bp, Homo sapiens
atgctcctccaaccc

SEQ ID NO: 84995 - DNA, 15 bp, Homo sapiens
gatgctcctccaacc

SEQ ID NO: 84996 - DNA, 15 bp, Homo sapiens
agatgctcctccaac

SEQ ID NO: 84997 - DNA, 15 bp, Homo sapiens
cagatgctcctccaa

SEQ ID NO: 84998 - DNA, 15 bp, Homo sapiens
acagatgctcctcca

SEQ ID NO: 84999 - DNA, 15 bp, Homo sapiens
cacagatgctcctcc

SEQ ID NO: 85000 - DNA, 15 bp, Homo sapiens
tcacagatgctcctc

SEQ ID NO: 85001 - DNA, 15 bp, Homo sapiens
ctcacagatgctcct

SEQ ID NO: 85002 - DNA, 15 bp, Homo sapiens
tctcacagatgctcc

SEQ ID NO: 85003 - DNA, 15 bp, Homo sapiens
atctcacagatgctc

SEQ ID NO: 85004 - DNA, 15 bp, Homo sapiens
catctcacagatgct

SEQ ID NO: 85005 - DNA, 15 bp, Homo sapiens
tcatctcacagatgc

SEQ ID NO: 85006 - DNA, 15 bp, Homo sapiens
ttcatctcacagatg

SEQ ID NO: 85007 - DNA, 15 bp, Homo sapiens
tttcatctcacagat

SEQ ID NO: 85008 - DNA, 15 bp, Homo sapiens
gtttcatctcacaga

SEQ ID NO: 85009 - DNA, 15 bp, Homo sapiens
tgtttcatctcacag

SEQ ID NO: 85010 - DNA, 15 bp, Homo sapiens
gtgtttcatctcaca

SEQ ID NO: 85011 - DNA, 15 bp, Homo sapiens
ggtgtttcatctcac

SEQ ID NO: 85012 - DNA, 15 bp, Homo sapiens
tggtgtttcatctca

SEQ ID NO: 85013 - DNA, 15 bp, Homo sapiens
atggtgtttcatctc

SEQ ID NO: 85014 - DNA, 15 bp, Homo sapiens
aatggtgtttcatct

SEQ ID NO: 85015 - DNA, 15 bp, Homo sapiens
gaatggtgtttcatc

SEQ ID NO: 85016 - DNA, 15 bp, Homo sapiens
agaatggtgtttcat

SEQ ID NO: 85017 - DNA, 15 bp, Homo sapiens
aagaatggtgtttca

SEQ ID NO: 85018 - DNA, 15 bp, Homo sapiens
aaagaatggtgtttc

SEQ ID NO: 85019 - DNA, 15 bp, Homo sapiens
gaaagaatggtgttt

SEQ ID NO: 85020 - DNA, 15 bp, Homo sapiens
ggaaagaatggtgtt

SEQ ID NO: 85021 - DNA, 15 bp, Homo sapiens
aggaaagaatggtgt

SEQ ID NO: 85022 - DNA, 15 bp, Homo sapiens
gaggaaagaatggtg

SEQ ID NO: 85023 - DNA, 15 bp, Homo sapiens
tgaggaaagaatggt

SEQ ID NO: 85024 - DNA, 15 bp, Homo sapiens
ttgaggaaagaatgg

SEQ ID NO: 85025 - DNA, 15 bp, Homo sapiens
attgaggaaagaatg

SEQ ID NO: 85026 - DNA, 15 bp, Homo sapiens
cattgaggaaagaat

SEQ ID NO: 85027 - DNA, 15 bp, Homo sapiens
acattgaggaaagaa

SEQ ID NO: 85028 - DNA, 15 bp, Homo sapiens
gacattgaggaaaga

SEQ ID NO: 85029 - DNA, 15 bp, Homo sapiens
agacattgaggaaag

SEQ ID NO: 85030 - DNA, 15 bp, Homo sapiens
gagacattgaggaaa

SEQ ID NO: 85031 - DNA, 15 bp, Homo sapiens
tgagacattgaggaa

SEQ ID NO: 85032 - DNA, 15 bp, Homo sapiens
ctgagacattgagga

SEQ ID NO: 85033 - DNA, 15 bp, Homo sapiens
gctgagacattgagg

SEQ ID NO: 85034 - DNA, 15 bp, Homo sapiens
agctgagacattgag

SEQ ID NO: 85035 - DNA, 15 bp, Homo sapiens
tagctgagacattga

SEQ ID NO: 85036 - DNA, 15 bp, Homo sapiens
atagctgagacattg

SEQ ID NO: 85037 - DNA, 15 bp, Homo sapiens
gatagctgagacatt

SEQ ID NO: 85038 - DNA, 15 bp, Homo sapiens
agatagctgagacat

SEQ ID NO: 85039 - DNA, 15 bp, Homo sapiens
tagatagctgagaca

SEQ ID NO: 85040 - DNA, 15 bp, Homo sapiens
ttagatagctgagac

SEQ ID NO: 85041 - DNA, 15 bp, Homo sapiens
gttagatagctgaga

SEQ ID NO: 85042 - DNA, 15 bp, Homo sapiens
agttagatagctgag

SEQ ID NO: 85043 - DNA, 15 bp, Homo sapiens
cagttagatagctga

SEQ ID NO: 85044 - DNA, 15 bp, Homo sapiens
acagttagatagctg

SEQ ID NO: 85045 - DNA, 15 bp, Homo sapiens
cacagttagatagct

SEQ ID NO: 85046 - DNA, 15 bp, Homo sapiens
acacagttagatagc

SEQ ID NO: 85047 - DNA, 15 bp, Homo sapiens
cacacagttagatag

SEQ ID NO: 85048 - DNA, 15 bp, Homo sapiens
acacacagttagata

SEQ ID NO: 85049 - DNA, 15 bp, Homo sapiens
cacacacagttagat

SEQ ID NO: 85050 - DNA, 15 bp, Homo sapiens
acacacacagttaga

SEQ ID NO: 85051 - DNA, 15 bp, Homo sapiens
tacacacacagttag

SEQ ID NO: 85052 - DNA, 15 bp, Homo sapiens
ttacacacacagtta

SEQ ID NO: 85053 - DNA, 15 bp, Homo sapiens
attacacacacagtt

SEQ ID NO: 85054 - DNA, 15 bp, Homo sapiens
gattacacacacagt

SEQ ID NO: 85055 - DNA, 15 bp, Homo sapiens
tgattacacacacag

SEQ ID NO: 85056 - DNA, 15 bp, Homo sapiens
ctgattacacacaca

SEQ ID NO: 85057 - DNA, 15 bp, Homo sapiens
cctgattacacacac

SEQ ID NO: 85058 - DNA, 15 bp, Homo sapiens
gcctgattacacaca

SEQ ID NO: 85059 - DNA, 15 bp, Homo sapiens
ggcctgattacacac

SEQ ID NO: 85060 - DNA, 15 bp, Homo sapiens
tggcctgattacaca

SEQ ID NO: 85061 - DNA, 15 bp, Homo sapiens
ctggcctgattacac

SEQ ID NO: 85062 - DNA, 15 bp, Homo sapiens
cctggcctgattaca

SEQ ID NO: 85063 - DNA, 15 bp, Homo sapiens
acctggcctgattac

SEQ ID NO: 85064 - DNA, 15 bp, Homo sapiens
gacctggcctgatta

SEQ ID NO: 85065 - DNA, 15 bp, Homo sapiens
ggacctggcctgatt

SEQ ID NO: 85066 - DNA, 15 bp, Homo sapiens
aggacctggcctgat

SEQ ID NO: 85067 - DNA, 15 bp, Homo sapiens
gaggacctggcctga

SEQ ID NO: 85068 - DNA, 15 bp, Homo sapiens
ggaggacctggcctg

SEQ ID NO: 85069 - DNA, 15 bp, Homo sapiens
gggaggacctggcct

SEQ ID NO: 85070 - DNA, 15 bp, Homo sapiens
agggaggacctggcc

SEQ ID NO: 85071 - DNA, 15 bp, Homo sapiens
cagggaggacctggc

SEQ ID NO: 85072 - DNA, 15 bp, Homo sapiens
gcagggaggacctgg

SEQ ID NO: 85073 - DNA, 15 bp, Homo sapiens
agcagggaggacctg

SEQ ID NO: 85074 - DNA, 15 bp, Homo sapiens
cagcagggaggacct

SEQ ID NO: 85075 - DNA, 15 bp, Homo sapiens
ccagcagggaggacc

SEQ ID NO: 85076 - DNA, 15 bp, Homo sapiens
cccagcagggaggac

SEQ ID NO: 85077 - DNA, 15 bp, Homo sapiens
gcccagcagggagga

SEQ ID NO: 85078 - DNA, 15 bp, Homo sapiens
tgcccagcagggagg

SEQ ID NO: 85079 - DNA, 15 bp, Homo sapiens
ctgcccagcagggag

SEQ ID NO: 85080 - DNA, 15 bp, Homo sapiens
tctgcccagcaggga

SEQ ID NO: 85081 - DNA, 15 bp, Homo sapiens
ttctgcccagcaggg

SEQ ID NO: 85082 - DNA, 15 bp, Homo sapiens
tttctgcccagcagg

SEQ ID NO: 85083 - DNA, 15 bp, Homo sapiens
gtttctgcccagcag

SEQ ID NO: 85084 - DNA, 15 bp, Homo sapiens
ggtttctgcccagca

SEQ ID NO: 85085 - DNA, 15 bp, Homo sapiens
tggtttctgcccagc

SEQ ID NO: 85086 - DNA, 15 bp, Homo sapiens
atggtttctgcccag

SEQ ID NO: 85087 - DNA, 15 bp, Homo sapiens
catggtttctgccca

SEQ ID NO: 85088 - DNA, 15 bp, Homo sapiens
ccatggtttctgccc

SEQ ID NO: 85089 - DNA, 15 bp, Homo sapiens
cccatggtttctgcc

SEQ ID NO: 85090 - DNA, 15 bp, Homo sapiens
tcccatggtttctgc

SEQ ID NO: 85091 - DNA, 15 bp, Homo sapiens
ctcccatggtttctg

SEQ ID NO: 85092 - DNA, 15 bp, Homo sapiens
actcccatggtttct

SEQ ID NO: 85093 - DNA, 15 bp, Homo sapiens
aactcccatggtttc

SEQ ID NO: 85094 - DNA, 15 bp, Homo sapiens
taactcccatggttt

SEQ ID NO: 85095 - DNA, 15 bp, Homo sapiens
ttaactcccatggtt

SEQ ID NO: 85096 - DNA, 15 bp, Homo sapiens
cttaactcccatggt

SEQ ID NO: 85097 - DNA, 15 bp, Homo sapiens
tcttaactcccatgg

SEQ ID NO: 85098 - DNA, 15 bp, Homo sapiens
ctcttaactcccatg

SEQ ID NO: 85099 - DNA, 15 bp, Homo sapiens
tctcttaactcccat

SEQ ID NO: 85100 - DNA, 15 bp, Homo sapiens
atctcttaactccca

SEQ ID NO: 85101 - DNA, 15 bp, Homo sapiens
aatctcttaactccc

SEQ ID NO: 85102 - DNA, 15 bp, Homo sapiens
caatctcttaactcc

SEQ ID NO: 85103 - DNA, 15 bp, Homo sapiens
gcaatctcttaactc

SEQ ID NO: 85104 - DNA, 15 bp, Homo sapiens
ggcaatctcttaact

SEQ ID NO: 85105 - DNA, 15 bp, Homo sapiens
tggcaatctcttaac

SEQ ID NO: 85106 - DNA, 15 bp, Homo sapiens
ttggcaatctcttaa

SEQ ID NO: 85107 - DNA, 15 bp, Homo sapiens
gttggcaatctctta

SEQ ID NO: 85108 - DNA, 15 bp, Homo sapiens
tgttggcaatctctt

SEQ ID NO: 85109 - DNA, 15 bp, Homo sapiens
atgttggcaatctct

SEQ ID NO: 85110 - DNA, 15 bp, Homo sapiens
aatgttggcaatctc

SEQ ID NO: 85111 - DNA, 15 bp, Homo sapiens
aaatgttggcaatct

SEQ ID NO: 85112 - DNA, 15 bp, Homo sapiens
taaatgttggcaatc

SEQ ID NO: 85113 - DNA, 15 bp, Homo sapiens
ataaatgttggcaat

SEQ ID NO: 85114 - DNA, 15 bp, Homo sapiens
aataaatgttggcaa

SEQ ID NO: 85115 - DNA, 15 bp, Homo sapiens
taataaatgttggca

SEQ ID NO: 85116 - DNA, 15 bp, Homo sapiens
ctaataaatgttggc

SEQ ID NO: 85117 - DNA, 15 bp, Homo sapiens
tctaataaatgttgg

SEQ ID NO: 85118 - DNA, 15 bp, Homo sapiens
ctctaataaatgttg

SEQ ID NO: 85119 - DNA, 15 bp, Homo sapiens
cctctaataaatgtt

SEQ ID NO: 85120 - DNA, 15 bp, Homo sapiens
tcctctaataaatgt

SEQ ID NO: 85121 - DNA, 15 bp, Homo sapiens
ttcctctaataaatg

SEQ ID NO: 85122 - DNA, 15 bp, Homo sapiens
cttcctctaataaat

SEQ ID NO: 85123 - DNA, 15 bp, Homo sapiens
gcttcctctaataaa

SEQ ID NO: 85124 - DNA, 15 bp, Homo sapiens
agcttcctctaataa

SEQ ID NO: 85125 - DNA, 15 bp, Homo sapiens
cagcttcctctaata

SEQ ID NO: 85126 - DNA, 15 bp, Homo sapiens
tcagcttcctctaat

SEQ ID NO: 85127 - DNA, 15 bp, Homo sapiens
gtcagcttcctctaa

SEQ ID NO: 85128 - DNA, 15 bp, Homo sapiens
cgtcagcttcctcta

SEQ ID NO: 85129 - DNA, 15 bp, Homo sapiens
acgtcagcttcctct

SEQ ID NO: 85130 - DNA, 15 bp, Homo sapiens
cacgtcagcttcctc

SEQ ID NO: 85131 - DNA, 15 bp, Homo sapiens
acacgtcagcttcct

SEQ ID NO: 85132 - DNA, 15 bp, Homo sapiens
tacacgtcagcttcc

SEQ ID NO: 85133 - DNA, 15 bp, Homo sapiens
ttacacgtcagcttc

SEQ ID NO: 85134 - DNA, 15 bp, Homo sapiens
gttacacgtcagctt

SEQ ID NO: 85135 - DNA, 15 bp, Homo sapiens
agttacacgtcagct

SEQ ID NO: 85136 - DNA, 15 bp, Homo sapiens
aagttacacgtcagc

SEQ ID NO: 85137 - DNA, 15 bp, Homo sapiens
gaagttacacgtcag

SEQ ID NO: 85138 - DNA, 15 bp, Homo sapiens
agaagttacacgtca

SEQ ID NO: 85139 - DNA, 15 bp, Homo sapiens
gagaagttacacgtc

SEQ ID NO: 85140 - DNA, 15 bp, Homo sapiens
agagaagttacacgt

SEQ ID NO: 85141 - DNA, 15 bp, Homo sapiens
cagagaagttacacg

SEQ ID NO: 85142 - DNA, 15 bp, Homo sapiens
tcagagaagttacac

SEQ ID NO: 85143 - DNA, 15 bp, Homo sapiens
ctcagagaagttaca

SEQ ID NO: 85144 - DNA, 15 bp, Homo sapiens
cctcagagaagttac

SEQ ID NO: 85145 - DNA, 15 bp, Homo sapiens
gcctcagagaagtta

SEQ ID NO: 85146 - DNA, 15 bp, Homo sapiens
tgcctcagagaagtt

SEQ ID NO: 85147 - DNA, 15 bp, Homo sapiens
ttgcctcagagaagt

SEQ ID NO: 85148 - DNA, 15 bp, Homo sapiens
tttgcctcagagaag

SEQ ID NO: 85149 - DNA, 15 bp, Homo sapiens
ttttgcctcagagaa

SEQ ID NO: 85150 - DNA, 15 bp, Homo sapiens
attttgcctcagaga

SEQ ID NO: 85151 - DNA, 15 bp, Homo sapiens
aattttgcctcagag

SEQ ID NO: 85152 - DNA, 15 bp, Homo sapiens
aaattttgcctcaga

SEQ ID NO: 85153 - DNA, 15 bp, Homo sapiens
taaattttgcctcag

SEQ ID NO: 85154 - DNA, 15 bp, Homo sapiens
ctaaattttgcctca

SEQ ID NO: 85155 - DNA, 15 bp, Homo sapiens
gctaaattttgcctc

SEQ ID NO: 85156 - DNA, 15 bp, Homo sapiens
ggctaaattttgcct

SEQ ID NO: 85157 - DNA, 15 bp, Homo sapiens
gggctaaattttgcc

SEQ ID NO: 85158 - DNA, 15 bp, Homo sapiens
agggctaaattttgc

SEQ ID NO: 85159 - DNA, 15 bp, Homo sapiens
gagggctaaattttg

SEQ ID NO: 85160 - DNA, 15 bp, Homo sapiens
ggagggctaaatttt

SEQ ID NO: 85161 - DNA, 15 bp, Homo sapiens
aggagggctaaattt

SEQ ID NO: 85162 - DNA, 15 bp, Homo sapiens
aaggagggctaaatt

SEQ ID NO: 85163 - DNA, 15 bp, Homo sapiens
aaaggagggctaaat

SEQ ID NO: 85164 - DNA, 15 bp, Homo sapiens
caaaggagggctaaa

SEQ ID NO: 85165 - DNA, 15 bp, Homo sapiens
tcaaaggagggctaa

SEQ ID NO: 85166 - DNA, 15 bp, Homo sapiens
ttcaaaggagggcta

SEQ ID NO: 85167 - DNA, 15 bp, Homo sapiens
gttcaaaggagggct

SEQ ID NO: 85168 - DNA, 15 bp, Homo sapiens
tgttcaaaggagggc

SEQ ID NO: 85169 - DNA, 15 bp, Homo sapiens
ctgttcaaaggaggg

SEQ ID NO: 85170 - DNA, 15 bp, Homo sapiens
cctgttcaaaggagg

SEQ ID NO: 85171 - DNA, 15 bp, Homo sapiens
tcctgttcaaaggag

SEQ ID NO: 85172 - DNA, 15 bp, Homo sapiens
ttcctgttcaaagga

SEQ ID NO: 85173 - DNA, 15 bp, Homo sapiens
attcctgttcaaagg

SEQ ID NO: 85174 - DNA, 15 bp, Homo sapiens
aattcctgttcaaag

SEQ ID NO: 85175 - DNA, 15 bp, Homo sapiens
aaattcctgttcaaa

SEQ ID NO: 85176 - DNA, 15 bp, Homo sapiens
caaattcctgttcaa

SEQ ID NO: 85177 - DNA, 15 bp, Homo sapiens
tcaaattcctgttca

SEQ ID NO: 85178 - DNA, 15 bp, Homo sapiens
gtcaaattcctgttc

SEQ ID NO: 85179 - DNA, 15 bp, Homo sapiens
agtcaaattcctgtt

SEQ ID NO: 85180 - DNA, 15 bp, Homo sapiens
gagtcaaattcctgt

SEQ ID NO: 85181 - DNA, 15 bp, Homo sapiens
tgagtcaaattcctg

SEQ ID NO: 85182 - DNA, 15 bp, Homo sapiens
ctgagtcaaattcct

SEQ ID NO: 85183 - DNA, 15 bp, Homo sapiens
actgagtcaaattcc

SEQ ID NO: 85184 - DNA, 15 bp, Homo sapiens
cactgagtcaaattc

SEQ ID NO: 85185 - DNA, 15 bp, Homo sapiens
tcactgagtcaaatt

SEQ ID NO: 85186 - DNA, 15 bp, Homo sapiens
ttcactgagtcaaat

SEQ ID NO: 85187 - DNA, 15 bp, Homo sapiens
gttcactgagtcaaa

SEQ ID NO: 85188 - DNA, 15 bp, Homo sapiens
ggttcactgagtcaa

SEQ ID NO: 85189 - DNA, 15 bp, Homo sapiens
aggttcactgagtca

SEQ ID NO: 85190 - DNA, 15 bp, Homo sapiens
aaggttcactgagtc

SEQ ID NO: 85191 - DNA, 15 bp, Homo sapiens
caaggttcactgagt

SEQ ID NO: 85192 - DNA, 15 bp, Homo sapiens
acaaggttcactgag

SEQ ID NO: 85193 - DNA, 15 bp, Homo sapiens
tacaaggttcactga

SEQ ID NO: 85194 - DNA, 15 bp, Homo sapiens
gtacaaggttcactg

SEQ ID NO: 85195 - DNA, 15 bp, Homo sapiens
tgtacaaggttcact

SEQ ID NO: 85196 - DNA, 15 bp, Homo sapiens
gtgtacaaggttcac

SEQ ID NO: 85197 - DNA, 15 bp, Homo sapiens
tgtgtacaaggttca

SEQ ID NO: 85198 - DNA, 15 bp, Homo sapiens
gtgtgtacaaggttc

SEQ ID NO: 85199 - DNA, 15 bp, Homo sapiens
agtgtgtacaaggtt

SEQ ID NO: 85200 - DNA, 15 bp, Homo sapiens
gagtgtgtacaaggt

SEQ ID NO: 85201 - DNA, 15 bp, Homo sapiens
cgagtgtgtacaagg

SEQ ID NO: 85202 - DNA, 15 bp, Homo sapiens
gcgagtgtgtacaag

SEQ ID NO: 85203 - DNA, 15 bp, Homo sapiens
tgcgagtgtgtacaa

SEQ ID NO: 85204 - DNA, 15 bp, Homo sapiens
gtgcgagtgtgtaca

SEQ ID NO: 85205 - DNA, 15 bp, Homo sapiens
agtgcgagtgtgtac

SEQ ID NO: 85206 - DNA, 15 bp, Homo sapiens
cagtgcgagtgtgta

SEQ ID NO: 85207 - DNA, 15 bp, Homo sapiens
tcagtgcgagtgtgt

SEQ ID NO: 85208 - DNA, 15 bp, Homo sapiens
ctcagtgcgagtgtg

SEQ ID NO: 85209 - DNA, 15 bp, Homo sapiens
actcagtgcgagtgt

SEQ ID NO: 85210 - DNA, 15 bp, Homo sapiens
gactcagtgcgagtg

SEQ ID NO: 85211 - DNA, 15 bp, Homo sapiens
agactcagtgcgagt

SEQ ID NO: 85212 - DNA, 15 bp, Homo sapiens
cagactcagtgcgag

SEQ ID NO: 85213 - DNA, 15 bp, Homo sapiens
gcagactcagtgcga

SEQ ID NO: 85214 - DNA, 15 bp, Homo sapiens
agcagactcagtgcg

SEQ ID NO: 85215 - DNA, 15 bp, Homo sapiens
cagcagactcagtgc

SEQ ID NO: 85216 - DNA, 15 bp, Homo sapiens
gcagcagactcagtg

SEQ ID NO: 85217 - DNA, 15 bp, Homo sapiens
agcagcagactcagt

SEQ ID NO: 85218 - DNA, 15 bp, Homo sapiens
cagcagcagactcag

SEQ ID NO: 85219 - DNA, 15 bp, Homo sapiens
tcagcagcagactca

SEQ ID NO: 85220 - DNA, 15 bp, Homo sapiens
atcagcagcagactc

SEQ ID NO: 85221 - DNA, 15 bp, Homo sapiens
catcagcagcagact

SEQ ID NO: 85222 - DNA, 15 bp, Homo sapiens
tcatcagcagcagac

SEQ ID NO: 85223 - DNA, 15 bp, Homo sapiens
atcatcagcagcaga

SEQ ID NO: 85224 - DNA, 15 bp, Homo sapiens
tatcatcagcagcag

SEQ ID NO: 85225 - DNA, 15 bp, Homo sapiens
gtatcatcagcagca

SEQ ID NO: 85226 - DNA, 15 bp, Homo sapiens
agtatcatcagcagc

SEQ ID NO: 85227 - DNA, 15 bp, Homo sapiens
cagtatcatcagcag

SEQ ID NO: 85228 - DNA, 15 bp, Homo sapiens
acagtatcatcagca

SEQ ID NO: 85229 - DNA, 15 bp, Homo sapiens
cacagtatcatcagc

SEQ ID NO: 85230 - DNA, 15 bp, Homo sapiens
gcacagtatcatcag

SEQ ID NO: 85231 - DNA, 15 bp, Homo sapiens
tgcacagtatcatca

SEQ ID NO: 85232 - DNA, 15 bp, Homo sapiens
gtgcacagtatcatc

SEQ ID NO: 85233 - DNA, 15 bp, Homo sapiens
ggtgcacagtatcat

SEQ ID NO: 85234 - DNA, 15 bp, Homo sapiens
gggtgcacagtatca

SEQ ID NO: 85235 - DNA, 15 bp, Homo sapiens
ggggtgcacagtatc

SEQ ID NO: 85236 - DNA, 15 bp, Homo sapiens
tggggtgcacagtat

SEQ ID NO: 85237 - DNA, 15 bp, Homo sapiens
gtggggtgcacagta

SEQ ID NO: 85238 - DNA, 15 bp, Homo sapiens
agtggggtgcacagt

SEQ ID NO: 85239 - DNA, 15 bp, Homo sapiens
cagtggggtgcacag

SEQ ID NO: 85240 - DNA, 15 bp, Homo sapiens
acagtggggtgcaca

SEQ ID NO: 85241 - DNA, 15 bp, Homo sapiens
gacagtggggtgcac

SEQ ID NO: 85242 - DNA, 15 bp, Homo sapiens
agacagtggggtgca

SEQ ID NO: 85243 - DNA, 15 bp, Homo sapiens
cagacagtggggtgc

SEQ ID NO: 85244 - DNA, 15 bp, Homo sapiens
ccagacagtggggtg

SEQ ID NO: 85245 - DNA, 15 bp, Homo sapiens
cccagacagtggggt

SEQ ID NO: 85246 - DNA, 15 bp, Homo sapiens
acccagacagtgggg

SEQ ID NO: 85247 - DNA, 15 bp, Homo sapiens
aacccagacagtggg

SEQ ID NO: 85248 - DNA, 15 bp, Homo sapiens
aaacccagacagtgg

SEQ ID NO: 85249 - DNA, 15 bp, Homo sapiens
aaaacccagacagtg

SEQ ID NO: 85250 - DNA, 15 bp, Homo sapiens
taaaacccagacagt

SEQ ID NO: 85251 - DNA, 15 bp, Homo sapiens
ttaaaacccagacag

SEQ ID NO: 85252 - DNA, 15 bp, Homo sapiens
attaaaacccagaca

SEQ ID NO: 85253 - DNA, 15 bp, Homo sapiens
cattaaaacccagac

SEQ ID NO: 85254 - DNA, 15 bp, Homo sapiens
acattaaaacccaga

SEQ ID NO: 85255 - DNA, 15 bp, Homo sapiens
gacattaaaacccag

SEQ ID NO: 85256 - DNA, 15 bp, Homo sapiens
tgacattaaaaccca

SEQ ID NO: 85257 - DNA, 15 bp, Homo sapiens
ctgacattaaaaccc

SEQ ID NO: 85258 - DNA, 15 bp, Homo sapiens
cctgacattaaaacc

SEQ ID NO: 85259 - DNA, 15 bp, Homo sapiens
gcctgacattaaaac

SEQ ID NO: 85260 - DNA, 15 bp, Homo sapiens
agcctgacattaaaa

SEQ ID NO: 85261 - DNA, 15 bp, Homo sapiens
cagcctgacattaaa

SEQ ID NO: 85262 - DNA, 15 bp, Homo sapiens
acagcctgacattaa

SEQ ID NO: 85263 - DNA, 15 bp, Homo sapiens
aacagcctgacatta

SEQ ID NO: 85264 - DNA, 15 bp, Homo sapiens
gaacagcctgacatt

SEQ ID NO: 85265 - DNA, 15 bp, Homo sapiens
agaacagcctgacat

SEQ ID NO: 85266 - DNA, 15 bp, Homo sapiens
aagaacagcctgaca

SEQ ID NO: 85267 - DNA, 15 bp, Homo sapiens
aaagaacagcctgac

SEQ ID NO: 85268 - DNA, 15 bp, Homo sapiens
aaaagaacagcctga

SEQ ID NO: 85269 - DNA, 15 bp, Homo sapiens
taaaagaacagcctg

SEQ ID NO: 85270 - DNA, 15 bp, Homo sapiens
ctaaaagaacagcct

SEQ ID NO: 85271 - DNA, 15 bp, Homo sapiens
cctaaaagaacagcc

SEQ ID NO: 85272 - DNA, 15 bp, Homo sapiens
acctaaaagaacagc

SEQ ID NO: 85273 - DNA, 15 bp, Homo sapiens
tacctaaaagaacag

SEQ ID NO: 85274 - DNA, 15 bp, Homo sapiens
atacctaaaagaaca

SEQ ID NO: 85275 - DNA, 15 bp, Homo sapiens
catacctaaaagaac

SEQ ID NO: 85276 - DNA, 15 bp, Homo sapiens
ccatacctaaaagaa

SEQ ID NO: 85277 - DNA, 15 bp, Homo sapiens
gccatacctaaaaga

SEQ ID NO: 85278 - DNA, 15 bp, Homo sapiens
cgccatacctaaaag

SEQ ID NO: 85279 - DNA, 15 bp, Homo sapiens
ccgccatacctaaaa

SEQ ID NO: 85280 - DNA, 15 bp, Homo sapiens
gccgccatacctaaa

SEQ ID NO: 85281 - DNA, 15 bp, Homo sapiens
agccgccatacctaa

SEQ ID NO: 85282 - DNA, 15 bp, Homo sapiens
aagccgccataccta

SEQ ID NO: 85283 - DNA, 15 bp, Homo sapiens
aaagccgccatacct

SEQ ID NO: 85284 - DNA, 15 bp, Homo sapiens
aaaagccgccatacc

SEQ ID NO: 85285 - DNA, 15 bp, Homo sapiens
gaaaagccgccatac

SEQ ID NO: 85286 - DNA, 15 bp, Homo sapiens
ggaaaagccgccata

SEQ ID NO: 85287 - DNA, 15 bp, Homo sapiens
gggaaaagccgccat

SEQ ID NO: 85288 - DNA, 15 bp, Homo sapiens
agggaaaagccgcca

SEQ ID NO: 85289 - DNA, 15 bp, Homo sapiens
cagggaaaagccgcc

SEQ ID NO: 85290 - DNA, 15 bp, Homo sapiens
ccagggaaaagccgc

SEQ ID NO: 85291 - DNA, 15 bp, Homo sapiens
cccagggaaaagccg

SEQ ID NO: 85292 - DNA, 15 bp, Homo sapiens
acccagggaaaagcc

SEQ ID NO: 85293 - DNA, 15 bp, Homo sapiens
cacccagggaaaagc

SEQ ID NO: 85294 - DNA, 15 bp, Homo sapiens
acacccagggaaaag

SEQ ID NO: 85295 - DNA, 15 bp, Homo sapiens
gacacccagggaaaa

SEQ ID NO: 85296 - DNA, 15 bp, Homo sapiens
tgacacccagggaaa

SEQ ID NO: 85297 - DNA, 15 bp, Homo sapiens
ctgacacccagggaa

SEQ ID NO: 85298 - DNA, 15 bp, Homo sapiens
actgacacccaggga

SEQ ID NO: 85299 - DNA, 15 bp, Homo sapiens
tactgacacccaggg

SEQ ID NO: 85300 - DNA, 15 bp, Homo sapiens
ttactgacacccagg

SEQ ID NO: 85301 - DNA, 15 bp, Homo sapiens
attactgacacccag

SEQ ID NO: 85302 - DNA, 15 bp, Homo sapiens
tattactgacaccca

SEQ ID NO: 85303 - DNA, 15 bp, Homo sapiens
gtattactgacaccc

SEQ ID NO: 85304 - DNA, 15 bp, Homo sapiens
agtattactgacacc

SEQ ID NO: 85305 - DNA, 15 bp, Homo sapiens
gagtattactgacac

SEQ ID NO: 85306 - DNA, 15 bp, Homo sapiens
tgagtattactgaca

SEQ ID NO: 85307 - DNA, 15 bp, Homo sapiens
ttgagtattactgac

SEQ ID NO: 85308 - DNA, 15 bp, Homo sapiens
cttgagtattactga

SEQ ID NO: 85309 - DNA, 15 bp, Homo sapiens
gcttgagtattactg

SEQ ID NO: 85310 - DNA, 15 bp, Homo sapiens
tgcttgagtattact

SEQ ID NO: 85311 - DNA, 15 bp, Homo sapiens
gtgcttgagtattac

SEQ ID NO: 85312 - DNA, 15 bp, Homo sapiens
agtgcttgagtatta

SEQ ID NO: 85313 - DNA, 15 bp, Homo sapiens
aagtgcttgagtatt

SEQ ID NO: 85314 - DNA, 15 bp, Homo sapiens
gaagtgcttgagtat

SEQ ID NO: 85315 - DNA, 15 bp, Homo sapiens
ggaagtgcttgagta

SEQ ID NO: 85316 - DNA, 15 bp, Homo sapiens
aggaagtgcttgagt

SEQ ID NO: 85317 - DNA, 15 bp, Homo sapiens
gaggaagtgcttgag

SEQ ID NO: 85318 - DNA, 15 bp, Homo sapiens
ggaggaagtgcttga

SEQ ID NO: 85319 - DNA, 15 bp, Homo sapiens
cggaggaagtgcttg

SEQ ID NO: 85320 - DNA, 15 bp, Homo sapiens
tcggaggaagtgctt

SEQ ID NO: 85321 - DNA, 15 bp, Homo sapiens
ctcggaggaagtgct

SEQ ID NO: 85322 - DNA, 15 bp, Homo sapiens
actcggaggaagtgc

SEQ ID NO: 85323 - DNA, 15 bp, Homo sapiens
gactcggaggaagtg

SEQ ID NO: 85324 - DNA, 15 bp, Homo sapiens
tgactcggaggaagt

SEQ ID NO: 85325 - DNA, 15 bp, Homo sapiens
ttgactcggaggaag

SEQ ID NO: 85326 - DNA, 15 bp, Homo sapiens
cttgactcggaggaa

SEQ ID NO: 85327 - DNA, 15 bp, Homo sapiens
tcttgactcggagga

SEQ ID NO: 85328 - DNA, 15 bp, Homo sapiens
ttcttgactcggagg

SEQ ID NO: 85329 - DNA, 15 bp, Homo sapiens
cttcttgactcggag

SEQ ID NO: 85330 - DNA, 15 bp, Homo sapiens
acttcttgactcgga

SEQ ID NO: 85331 - DNA, 15 bp, Homo sapiens
aacttcttgactcgg

SEQ ID NO: 85332 - DNA, 15 bp, Homo sapiens
taacttcttgactcg

SEQ ID NO: 85333 - DNA, 15 bp, Homo sapiens
ttaacttcttgactc

SEQ ID NO: 85334 - DNA, 15 bp, Homo sapiens
attaacttcttgact

SEQ ID NO: 85335 - DNA, 15 bp, Homo sapiens
cattaacttcttgac

SEQ ID NO: 85336 - DNA, 15 bp, Homo sapiens
tcattaacttcttga

SEQ ID NO: 85337 - DNA, 15 bp, Homo sapiens
atcattaacttcttg

SEQ ID NO: 85338 - DNA, 15 bp, Homo sapiens
catcattaacttctt

SEQ ID NO: 85339 - DNA, 15 bp, Homo sapiens
gcatcattaacttct

SEQ ID NO: 85340 - DNA, 15 bp, Homo sapiens
ggcatcattaacttc

SEQ ID NO: 85341 - DNA, 15 bp, Homo sapiens
tggcatcattaactt

SEQ ID NO: 85342 - DNA, 15 bp, Homo sapiens
atggcatcattaact

SEQ ID NO: 85343 - DNA, 15 bp, Homo sapiens
gatggcatcattaac

SEQ ID NO: 85344 - DNA, 15 bp, Homo sapiens
tgatggcatcattaa

SEQ ID NO: 85345 - DNA, 15 bp, Homo sapiens
ttgatggcatcatta

SEQ ID NO: 85346 - DNA, 15 bp, Homo sapiens
tttgatggcatcatt

SEQ ID NO: 85347 - DNA, 15 bp, Homo sapiens
gtttgatggcatcat

SEQ ID NO: 85348 - DNA, 15 bp, Homo sapiens
tgtttgatggcatca

SEQ ID NO: 85349 - DNA, 15 bp, Homo sapiens
ttgtttgatggcatc

SEQ ID NO: 85350 - DNA, 15 bp, Homo sapiens
tttgtttgatggcat

SEQ ID NO: 85351 - DNA, 15 bp, Homo sapiens
atttgtttgatggca

SEQ ID NO: 85352 - DNA, 15 bp, Homo sapiens
catttgtttgatggc

SEQ ID NO: 85353 - DNA, 15 bp, Homo sapiens
tcatttgtttgatgg

SEQ ID NO: 85354 - DNA, 15 bp, Homo sapiens
ttcatttgtttgatg

SEQ ID NO: 85355 - DNA, 15 bp, Homo sapiens
cttcatttgtttgat

SEQ ID NO: 85356 - DNA, 15 bp, Homo sapiens
tcttcatttgtttga

SEQ ID NO: 85357 - DNA, 15 bp, Homo sapiens
ttcttcatttgtttg

SEQ ID NO: 85358 - DNA, 15 bp, Homo sapiens
tttcttcatttgttt

SEQ ID NO: 85359 - DNA, 15 bp, Homo sapiens
gtttcttcatttgtt

SEQ ID NO: 85360 - DNA, 15 bp, Homo sapiens
tgtttcttcatttgt

SEQ ID NO: 85361 - DNA, 15 bp, Homo sapiens
gtgtttcttcatttg

SEQ ID NO: 85362 - DNA, 15 bp, Homo sapiens
ggtgtttcttcattt

SEQ ID NO: 85363 - DNA, 15 bp, Homo sapiens
aggtgtttcttcatt

SEQ ID NO: 85364 - DNA, 15 bp, Homo sapiens
taggtgtttcttcat

SEQ ID NO: 85365 - DNA, 15 bp, Homo sapiens
ttaggtgtttcttca

SEQ ID NO: 85366 - DNA, 15 bp, Homo sapiens
tttaggtgtttcttc

SEQ ID NO: 85367 - DNA, 15 bp, Homo sapiens
ctttaggtgtttctt

SEQ ID NO: 85368 - DNA, 15 bp, Homo sapiens
gctttaggtgtttct

SEQ ID NO: 85369 - DNA, 15 bp, Homo sapiens
agctttaggtgtttc

SEQ ID NO: 85370 - DNA, 15 bp, Homo sapiens
cagctttaggtgttt

SEQ ID NO: 85371 - DNA, 15 bp, Homo sapiens
ccagctttaggtgtt

SEQ ID NO: 85372 - DNA, 15 bp, Homo sapiens
gccagctttaggtgt

SEQ ID NO: 85373 - DNA, 15 bp, Homo sapiens
ggccagctttaggtg

SEQ ID NO: 85374 - DNA, 15 bp, Homo sapiens
tggccagctttaggt

SEQ ID NO: 85375 - DNA, 15 bp, Homo sapiens
ttggccagctttagg

SEQ ID NO: 85376 - DNA, 15 bp, Homo sapiens
cttggccagctttag

SEQ ID NO: 85377 - DNA, 15 bp, Homo sapiens
ccttggccagcttta

SEQ ID NO: 85378 - DNA, 15 bp, Homo sapiens
accttggccagcttt

SEQ ID NO: 85379 - DNA, 15 bp, Homo sapiens
taccttggccagctt

SEQ ID NO: 85380 - DNA, 15 bp, Homo sapiens
ttaccttggccagct

SEQ ID NO: 85381 - DNA, 15 bp, Homo sapiens
tttaccttggccagc

SEQ ID NO: 85382 - DNA, 15 bp, Homo sapiens
ttttaccttggccag

SEQ ID NO: 85383 - DNA, 15 bp, Homo sapiens
attttaccttggcca

SEQ ID NO: 85384 - DNA, 15 bp, Homo sapiens
tattttaccttggcc

SEQ ID NO: 85385 - DNA, 15 bp, Homo sapiens
atattttaccttggc

SEQ ID NO: 85386 - DNA, 15 bp, Homo sapiens
gatattttaccttgg

SEQ ID NO: 85387 - DNA, 15 bp, Homo sapiens
agatattttaccttg

SEQ ID NO: 85388 - DNA, 15 bp, Homo sapiens
tagatattttacctt

SEQ ID NO: 85389 - DNA, 15 bp, Homo sapiens
atagatattttacct

SEQ ID NO: 85390 - DNA, 15 bp, Homo sapiens
gatagatattttacc

SEQ ID NO: 85391 - DNA, 15 bp, Homo sapiens
cgatagatattttac

SEQ ID NO: 85392 - DNA, 15 bp, Homo sapiens
acgatagatatttta

SEQ ID NO: 85393 - DNA, 15 bp, Homo sapiens
tacgatagatatttt

SEQ ID NO: 85394 - DNA, 15 bp, Homo sapiens
ttacgatagatattt

SEQ ID NO: 85395 - DNA, 15 bp, Homo sapiens
cttacgatagatatt

SEQ ID NO: 85396 - DNA, 15 bp, Homo sapiens
tcttacgatagatat

SEQ ID NO: 85397 - DNA, 15 bp, Homo sapiens
atcttacgatagata

SEQ ID NO: 85398 - DNA, 15 bp, Homo sapiens
catcttacgatagat

SEQ ID NO: 85399 - DNA, 15 bp, Homo sapiens
acatcttacgataga

SEQ ID NO: 85400 - DNA, 15 bp, Homo sapiens
tacatcttacgatag

SEQ ID NO: 85401 - DNA, 15 bp, Homo sapiens
atacatcttacgata

SEQ ID NO: 85402 - DNA, 15 bp, Homo sapiens
gatacatcttacgat

SEQ ID NO: 85403 - DNA, 15 bp, Homo sapiens
tgatacatcttacga

SEQ ID NO: 85404 - DNA, 15 bp, Homo sapiens
ctgatacatcttacg

SEQ ID NO: 85405 - DNA, 15 bp, Homo sapiens
tctgatacatcttac

SEQ ID NO: 85406 - DNA, 15 bp, Homo sapiens
ttctgatacatctta

SEQ ID NO: 85407 - DNA, 15 bp, Homo sapiens
tttctgatacatctt

SEQ ID NO: 85408 - DNA, 15 bp, Homo sapiens
ttttctgatacatct

SEQ ID NO: 85409 - DNA, 15 bp, Homo sapiens
tttttctgatacatc

SEQ ID NO: 85410 - DNA, 15 bp, Homo sapiens
atttttctgatacat

SEQ ID NO: 85411 - DNA, 15 bp, Homo sapiens
catttttctgataca

SEQ ID NO: 85412 - DNA, 15 bp, Homo sapiens
ccatttttctgatac

SEQ ID NO: 85413 - DNA, 15 bp, Homo sapiens
cccatttttctgata

SEQ ID NO: 85414 - DNA, 15 bp, Homo sapiens
gcccatttttctgat

SEQ ID NO: 85415 - DNA, 15 bp, Homo sapiens
tgcccatttttctga

SEQ ID NO: 85416 - DNA, 15 bp, Homo sapiens
atgcccatttttctg

SEQ ID NO: 85417 - DNA, 15 bp, Homo sapiens
catgcccatttttct

SEQ ID NO: 85418 - DNA, 15 bp, Homo sapiens
acatgcccatttttc

SEQ ID NO: 85419 - DNA, 15 bp, Homo sapiens
tacatgcccattttt

SEQ ID NO: 85420 - DNA, 15 bp, Homo sapiens
ctacatgcccatttt

SEQ ID NO: 85421 - DNA, 15 bp, Homo sapiens
gctacatgcccattt

SEQ ID NO: 85422 - DNA, 15 bp, Homo sapiens
agctacatgcccatt

SEQ ID NO: 85423 - DNA, 15 bp, Homo sapiens
cagctacatgcccat

SEQ ID NO: 85424 - DNA, 15 bp, Homo sapiens
gcagctacatgccca

SEQ ID NO: 85425 - DNA, 15 bp, Homo sapiens
agcagctacatgccc

SEQ ID NO: 85426 - DNA, 15 bp, Homo sapiens
cagcagctacatgcc

SEQ ID NO: 85427 - DNA, 15 bp, Homo sapiens
ccagcagctacatgc

SEQ ID NO: 85428 - DNA, 15 bp, Homo sapiens
cccagcagctacatg

SEQ ID NO: 85429 - DNA, 15 bp, Homo sapiens
tcccagcagctacat

SEQ ID NO: 85430 - DNA, 15 bp, Homo sapiens
atcccagcagctaca

SEQ ID NO: 85431 - DNA, 15 bp, Homo sapiens
tatcccagcagctac

SEQ ID NO: 85432 - DNA, 15 bp, Homo sapiens
atatcccagcagcta

SEQ ID NO: 85433 - DNA, 15 bp, Homo sapiens
tatatcccagcagct

SEQ ID NO: 85434 - DNA, 15 bp, Homo sapiens
ctatatcccagcagc

SEQ ID NO: 85435 - DNA, 15 bp, Homo sapiens
cctatatcccagcag

SEQ ID NO: 85436 - DNA, 15 bp, Homo sapiens
tcctatatcccagca

SEQ ID NO: 85437 - DNA, 15 bp, Homo sapiens
ctcctatatcccagc

SEQ ID NO: 85438 - DNA, 15 bp, Homo sapiens
actcctatatcccag

SEQ ID NO: 85439 - DNA, 15 bp, Homo sapiens
tactcctatatccca

SEQ ID NO: 85440 - DNA, 15 bp, Homo sapiens
ctactcctatatccc

SEQ ID NO: 85441 - DNA, 15 bp, Homo sapiens
actactcctatatcc

SEQ ID NO: 85442 - DNA, 15 bp, Homo sapiens
aactactcctatatc

SEQ ID NO: 85443 - DNA, 15 bp, Homo sapiens
caactactcctatat

SEQ ID NO: 85444 - DNA, 15 bp, Homo sapiens
ccaactactcctata

SEQ ID NO: 85445 - DNA, 15 bp, Homo sapiens
gccaactactcctat

SEQ ID NO: 85446 - DNA, 15 bp, Homo sapiens
tgccaactactccta

SEQ ID NO: 85447 - DNA, 15 bp, Homo sapiens
ctgccaactactcct

SEQ ID NO: 85448 - DNA, 15 bp, Homo sapiens
cctgccaactactcc

SEQ ID NO: 85449 - DNA, 15 bp, Homo sapiens
acctgccaactactc

SEQ ID NO: 85450 - DNA, 15 bp, Homo sapiens
aacctgccaactact

SEQ ID NO: 85451 - DNA, 15 bp, Homo sapiens
taacctgccaactac

SEQ ID NO: 85452 - DNA, 15 bp, Homo sapiens
ttaacctgccaacta

SEQ ID NO: 85453 - DNA, 15 bp, Homo sapiens
tttaacctgccaact

SEQ ID NO: 85454 - DNA, 15 bp, Homo sapiens
gtttaacctgccaac

SEQ ID NO: 85455 - DNA, 15 bp, Homo sapiens
cgtttaacctgccaa

SEQ ID NO: 85456 - DNA, 15 bp, Homo sapiens
ccgtttaacctgcca

SEQ ID NO: 85457 - DNA, 15 bp, Homo sapiens
tccgtttaacctgcc

SEQ ID NO: 85458 - DNA, 15 bp, Homo sapiens
atccgtttaacctgc

SEQ ID NO: 85459 - DNA, 15 bp, Homo sapiens
gatccgtttaacctg

SEQ ID NO: 85460 - DNA, 15 bp, Homo sapiens
tgatccgtttaacct

SEQ ID NO: 85461 - DNA, 15 bp, Homo sapiens
gtgatccgtttaacc

SEQ ID NO: 85462 - DNA, 15 bp, Homo sapiens
ggtgatccgtttaac

SEQ ID NO: 85463 - DNA, 15 bp, Homo sapiens
aggtgatccgtttaa

SEQ ID NO: 85464 - DNA, 15 bp, Homo sapiens
caggtgatccgttta

SEQ ID NO: 85465 - DNA, 15 bp, Homo sapiens
ccaggtgatccgttt

SEQ ID NO: 85466 - DNA, 15 bp, Homo sapiens
gccaggtgatccgtt

SEQ ID NO: 85467 - DNA, 15 bp, Homo sapiens
tgccaggtgatccgt

SEQ ID NO: 85468 - DNA, 15 bp, Homo sapiens
ctgccaggtgatccg

SEQ ID NO: 85469 - DNA, 15 bp, Homo sapiens
gctgccaggtgatcc

SEQ ID NO: 85470 - DNA, 15 bp, Homo sapiens
agctgccaggtgatc

SEQ ID NO: 85471 - DNA, 15 bp, Homo sapiens
gagctgccaggtgat

SEQ ID NO: 85472 - DNA, 15 bp, Homo sapiens
tgagctgccaggtga

SEQ ID NO: 85473 - DNA, 15 bp, Homo sapiens
atgagctgccaggtg

SEQ ID NO: 85474 - DNA, 15 bp, Homo sapiens
aatgagctgccaggt

SEQ ID NO: 85475 - DNA, 15 bp, Homo sapiens
caatgagctgccagg

SEQ ID NO: 85476 - DNA, 15 bp, Homo sapiens
acaatgagctgccag

SEQ ID NO: 85477 - DNA, 15 bp, Homo sapiens
aacaatgagctgcca

SEQ ID NO: 85478 - DNA, 15 bp, Homo sapiens
gaacaatgagctgcc

SEQ ID NO: 85479 - DNA, 15 bp, Homo sapiens
agaacaatgagctgc

SEQ ID NO: 85480 - DNA, 15 bp, Homo sapiens
cagaacaatgagctg

SEQ ID NO: 85481 - DNA, 15 bp, Homo sapiens
tcagaacaatgagct

SEQ ID NO: 85482 - DNA, 15 bp, Homo sapiens
ttcagaacaatgagc

SEQ ID NO: 85483 - DNA, 15 bp, Homo sapiens
attcagaacaatgag

SEQ ID NO: 85484 - DNA, 15 bp, Homo sapiens
tattcagaacaatga

SEQ ID NO: 85485 - DNA, 15 bp, Homo sapiens
atattcagaacaatg

SEQ ID NO: 85486 - DNA, 15 bp, Homo sapiens
catattcagaacaat

SEQ ID NO: 85487 - DNA, 15 bp, Homo sapiens
acatattcagaacaa

SEQ ID NO: 85488 - DNA, 15 bp, Homo sapiens
aacatattcagaaca

SEQ ID NO: 85489 - DNA, 15 bp, Homo sapiens
caacatattcagaac

SEQ ID NO: 85490 - DNA, 15 bp, Homo sapiens
ccaacatattcagaa

SEQ ID NO: 85491 - DNA, 15 bp, Homo sapiens
gccaacatattcaga

SEQ ID NO: 85492 - DNA, 15 bp, Homo sapiens
tgccaacatattcag

SEQ ID NO: 85493 - DNA, 15 bp, Homo sapiens
atgccaacatattca

SEQ ID NO: 85494 - DNA, 15 bp, Homo sapiens
tatgccaacatattc

SEQ ID NO: 85495 - DNA, 15 bp, Homo sapiens
gtatgccaacatatt

SEQ ID NO: 85496 - DNA, 15 bp, Homo sapiens
tgtatgccaacatat

SEQ ID NO: 85497 - DNA, 15 bp, Homo sapiens
ctgtatgccaacata

SEQ ID NO: 85498 - DNA, 15 bp, Homo sapiens
tctgtatgccaacat

SEQ ID NO: 85499 - DNA, 15 bp, Homo sapiens
ctctgtatgccaaca

SEQ ID NO: 85500 - DNA, 15 bp, Homo sapiens
gctctgtatgccaac

SEQ ID NO: 85501 - DNA, 15 bp, Homo sapiens
ggctctgtatgccaa

SEQ ID NO: 85502 - DNA, 15 bp, Homo sapiens
cggctctgtatgcca

SEQ ID NO: 85503 - DNA, 15 bp, Homo sapiens
acggctctgtatgcc

SEQ ID NO: 85504 - DNA, 15 bp, Homo sapiens
gacggctctgtatgc

SEQ ID NO: 85505 - DNA, 15 bp, Homo sapiens
agacggctctgtatg

SEQ ID NO: 85506 - DNA, 15 bp, Homo sapiens
aagacggctctgtat

SEQ ID NO: 85507 - DNA, 15 bp, Homo sapiens
aaagacggctctgta

SEQ ID NO: 85508 - DNA, 15 bp, Homo sapiens
caaagacggctctgt

SEQ ID NO: 85509 - DNA, 15 bp, Homo sapiens
ccaaagacggctctg

SEQ ID NO: 85510 - DNA, 15 bp, Homo sapiens
gccaaagacggctct

SEQ ID NO: 85511 - DNA, 15 bp, Homo sapiens
tgccaaagacggctc

SEQ ID NO: 85512 - DNA, 15 bp, Homo sapiens
atgccaaagacggct

SEQ ID NO: 85513 - DNA, 15 bp, Homo sapiens
aatgccaaagacggc

SEQ ID NO: 85514 - DNA, 15 bp, Homo sapiens
aaatgccaaagacgg

SEQ ID NO: 85515 - DNA, 15 bp, Homo sapiens
taaatgccaaagacg

SEQ ID NO: 85516 - DNA, 15 bp, Homo sapiens
ctaaatgccaaagac

SEQ ID NO: 85517 - DNA, 15 bp, Homo sapiens
gctaaatgccaaaga

SEQ ID NO: 85518 - DNA, 15 bp, Homo sapiens
cgctaaatgccaaag

SEQ ID NO: 85519 - DNA, 15 bp, Homo sapiens
tcgctaaatgccaaa

SEQ ID NO: 85520 - DNA, 15 bp, Homo sapiens
atcgctaaatgccaa

SEQ ID NO: 85521 - DNA, 15 bp, Homo sapiens
aatcgctaaatgcca

SEQ ID NO: 85522 - DNA, 15 bp, Homo sapiens
aaatcgctaaatgcc

SEQ ID NO: 85523 - DNA, 15 bp, Homo sapiens
caaatcgctaaatgc

SEQ ID NO: 85524 - DNA, 15 bp, Homo sapiens
tcaaatcgctaaatg

SEQ ID NO: 85525 - DNA, 15 bp, Homo sapiens
ctcaaatcgctaaat

SEQ ID NO: 85526 - DNA, 15 bp, Homo sapiens
gctcaaatcgctaaa

SEQ ID NO: 85527 - DNA, 15 bp, Homo sapiens
ggctcaaatcgctaa

SEQ ID NO: 85528 - DNA, 15 bp, Homo sapiens
tggctcaaatcgcta

SEQ ID NO: 85529 - DNA, 15 bp, Homo sapiens
ctggctcaaatcgct

SEQ ID NO: 85530 - DNA, 15 bp, Homo sapiens
tctggctcaaatcgc

SEQ ID NO: 85531 - DNA, 15 bp, Homo sapiens
gtctggctcaaatcg

SEQ ID NO: 85532 - DNA, 15 bp, Homo sapiens
tgtctggctcaaatc

SEQ ID NO: 85533 - DNA, 15 bp, Homo sapiens
ttgtctggctcaaat

SEQ ID NO: 85534 - DNA, 15 bp, Homo sapiens
tttgtctggctcaaa

SEQ ID NO: 85535 - DNA, 15 bp, Homo sapiens
ttttgtctggctcaa

SEQ ID NO: 85536 - DNA, 15 bp, Homo sapiens
gttttgtctggctca

SEQ ID NO: 85537 - DNA, 15 bp, Homo sapiens
agttttgtctggctc

SEQ ID NO: 85538 - DNA, 15 bp, Homo sapiens
cagttttgtctggct

SEQ ID NO: 85539 - DNA, 15 bp, Homo sapiens
tcagttttgtctggc

SEQ ID NO: 85540 - DNA, 15 bp, Homo sapiens
ttcagttttgtctgg

SEQ ID NO: 85541 - DNA, 15 bp, Homo sapiens
attcagttttgtctg

SEQ ID NO: 85542 - DNA, 15 bp, Homo sapiens
aattcagttttgtct

SEQ ID NO: 85543 - DNA, 15 bp, Homo sapiens
taattcagttttgtc

SEQ ID NO: 85544 - DNA, 15 bp, Homo sapiens
gtaattcagttttgt

SEQ ID NO: 85545 - DNA, 15 bp, Homo sapiens
agtaattcagttttg

SEQ ID NO: 85546 - DNA, 15 bp, Homo sapiens
aagtaattcagtttt

SEQ ID NO: 85547 - DNA, 15 bp, Homo sapiens
taagtaattcagttt

SEQ ID NO: 85548 - DNA, 15 bp, Homo sapiens
ctaagtaattcagtt

SEQ ID NO: 85549 - DNA, 15 bp, Homo sapiens
actaagtaattcagt

SEQ ID NO: 85550 - DNA, 15 bp, Homo sapiens
aactaagtaattcag

SEQ ID NO: 85551 - DNA, 15 bp, Homo sapiens
caactaagtaattca

SEQ ID NO: 85552 - DNA, 15 bp, Homo sapiens
acaactaagtaattc

SEQ ID NO: 85553 - DNA, 15 bp, Homo sapiens
tacaactaagtaatt

SEQ ID NO: 85554 - DNA, 15 bp, Homo sapiens
gtacaactaagtaat

SEQ ID NO: 85555 - DNA, 15 bp, Homo sapiens
cgtacaactaagtaa

SEQ ID NO: 85556 - DNA, 15 bp, Homo sapiens
acgtacaactaagta

SEQ ID NO: 85557 - DNA, 15 bp, Homo sapiens
aacgtacaactaagt

SEQ ID NO: 85558 - DNA, 15 bp, Homo sapiens
aaacgtacaactaag

SEQ ID NO: 85559 - DNA, 15 bp, Homo sapiens
taaacgtacaactaa

SEQ ID NO: 85560 - DNA, 15 bp, Homo sapiens
ttaaacgtacaacta

SEQ ID NO: 85561 - DNA, 15 bp, Homo sapiens
tttaaacgtacaact

SEQ ID NO: 85562 - DNA, 15 bp, Homo sapiens
ttttaaacgtacaac

SEQ ID NO: 85563 - DNA, 15 bp, Homo sapiens
cttttaaacgtacaa

SEQ ID NO: 85564 - DNA, 15 bp, Homo sapiens
acttttaaacgtaca

SEQ ID NO: 85565 - DNA, 15 bp, Homo sapiens
cacttttaaacgtac

SEQ ID NO: 85566 - DNA, 15 bp, Homo sapiens
acacttttaaacgta

SEQ ID NO: 85567 - DNA, 15 bp, Homo sapiens
tacacttttaaacgt

SEQ ID NO: 85568 - DNA, 15 bp, Homo sapiens
ctacacttttaaacg

SEQ ID NO: 85569 - DNA, 15 bp, Homo sapiens
cctacacttttaaac

SEQ ID NO: 85570 - DNA, 15 bp, Homo sapiens
acctacacttttaaa

SEQ ID NO: 85571 - DNA, 15 bp, Homo sapiens
gacctacacttttaa

SEQ ID NO: 85572 - DNA, 15 bp, Homo sapiens
tgacctacactttta

SEQ ID NO: 85573 - DNA, 15 bp, Homo sapiens
ttgacctacactttt

SEQ ID NO: 85574 - DNA, 15 bp, Homo sapiens
tttgacctacacttt

SEQ ID NO: 85575 - DNA, 15 bp, Homo sapiens
ttttgacctacactt

SEQ ID NO: 85576 - DNA, 15 bp, Homo sapiens
tttttgacctacact

SEQ ID NO: 85577 - DNA, 15 bp, Homo sapiens
gtttttgacctacac

SEQ ID NO: 85578 - DNA, 15 bp, Homo sapiens
tgtttttgacctaca

SEQ ID NO: 85579 - DNA, 15 bp, Homo sapiens
ttgtttttgacctac

SEQ ID NO: 85580 - DNA, 15 bp, Homo sapiens
tttgtttttgaccta

SEQ ID NO: 85581 - DNA, 15 bp, Homo sapiens
atttgtttttgacct

SEQ ID NO: 85582 - DNA, 15 bp, Homo sapiens
gatttgtttttgacc

SEQ ID NO: 85583 - DNA, 15 bp, Homo sapiens
ggatttgtttttgac

SEQ ID NO: 85584 - DNA, 15 bp, Homo sapiens
tggatttgtttttga

SEQ ID NO: 85585 - DNA, 15 bp, Homo sapiens
ctggatttgtttttg

SEQ ID NO: 85586 - DNA, 15 bp, Homo sapiens
tctggatttgttttt

SEQ ID NO: 85587 - DNA, 15 bp, Homo sapiens
ctctggatttgtttt

SEQ ID NO: 85588 - DNA, 15 bp, Homo sapiens
cctctggatttgttt

SEQ ID NO: 85589 - DNA, 15 bp, Homo sapiens
gcctctggatttgtt

SEQ ID NO: 85590 - DNA, 15 bp, Homo sapiens
ggcctctggatttgt

SEQ ID NO: 85591 - DNA, 15 bp, Homo sapiens
tggcctctggatttg

SEQ ID NO: 85592 - DNA, 15 bp, Homo sapiens
ctggcctctggattt

SEQ ID NO: 85593 - DNA, 15 bp, Homo sapiens
cctggcctctggatt

SEQ ID NO: 85594 - DNA, 15 bp, Homo sapiens
tcctggcctctggat

SEQ ID NO: 85595 - DNA, 15 bp, Homo sapiens
ctcctggcctctgga

SEQ ID NO: 85596 - DNA, 15 bp, Homo sapiens
gctcctggcctctgg

SEQ ID NO: 85597 - DNA, 15 bp, Homo sapiens
agctcctggcctctg

SEQ ID NO: 85598 - DNA, 15 bp, Homo sapiens
cagctcctggcctct

SEQ ID NO: 85599 - DNA, 15 bp, Homo sapiens
acagctcctggcctc

SEQ ID NO: 85600 - DNA, 15 bp, Homo sapiens
cacagctcctggcct

SEQ ID NO: 85601 - DNA, 15 bp, Homo sapiens
ccacagctcctggcc

SEQ ID NO: 85602 - DNA, 15 bp, Homo sapiens
gccacagctcctggc

SEQ ID NO: 85603 - DNA, 15 bp, Homo sapiens
agccacagctcctgg

SEQ ID NO: 85604 - DNA, 15 bp, Homo sapiens
gagccacagctcctg

SEQ ID NO: 85605 - DNA, 15 bp, Homo sapiens
tgagccacagctcct

SEQ ID NO: 85606 - DNA, 15 bp, Homo sapiens
atgagccacagctcc

SEQ ID NO: 85607 - DNA, 15 bp, Homo sapiens
catgagccacagctc

SEQ ID NO: 85608 - DNA, 15 bp, Homo sapiens
gcatgagccacagct

SEQ ID NO: 85609 - DNA, 15 bp, Homo sapiens
ggcatgagccacagc

SEQ ID NO: 85610 - DNA, 15 bp, Homo sapiens
aggcatgagccacag

SEQ ID NO: 85611 - DNA, 15 bp, Homo sapiens
caggcatgagccaca

SEQ ID NO: 85612 - DNA, 15 bp, Homo sapiens
aggattacaggcatg

SEQ ID NO: 85613 - DNA, 15 bp, Homo sapiens
taggattacaggcat

SEQ ID NO: 85614 - DNA, 15 bp, Homo sapiens
ctaggattacaggca

SEQ ID NO: 85615 - DNA, 15 bp, Homo sapiens
gctaggattacaggc

SEQ ID NO: 85616 - DNA, 15 bp, Homo sapiens
tgctaggattacagg

SEQ ID NO: 85617 - DNA, 15 bp, Homo sapiens
gtgctaggattacag

SEQ ID NO: 85618 - DNA, 15 bp, Homo sapiens
agtgctaggattaca

SEQ ID NO: 85619 - DNA, 15 bp, Homo sapiens
aagtgctaggattac

SEQ ID NO: 85620 - DNA, 15 bp, Homo sapiens
cggcctcccaaagtg

SEQ ID NO: 85621 - DNA, 15 bp, Homo sapiens
tcggcctcccaaagt

SEQ ID NO: 85622 - DNA, 15 bp, Homo sapiens
ttcggcctcccaaag

SEQ ID NO: 85623 - DNA, 15 bp, Homo sapiens
cttcggcctcccaaa

SEQ ID NO: 85624 - DNA, 15 bp, Homo sapiens
gcttcggcctcccaa

SEQ ID NO: 85625 - DNA, 15 bp, Homo sapiens
cgcttcggcctccca

SEQ ID NO: 85626 - DNA, 15 bp, Homo sapiens
ccgcttcggcctccc

SEQ ID NO: 85627 - DNA, 15 bp, Homo sapiens
cccgcttcggcctcc

SEQ ID NO: 85628 - DNA, 15 bp, Homo sapiens
acccgcttcggcctc

SEQ ID NO: 85629 - DNA, 15 bp, Homo sapiens
cacccgcttcggcct

SEQ ID NO: 85630 - DNA, 15 bp, Homo sapiens
ccacccgcttcggcc

SEQ ID NO: 85631 - DNA, 15 bp, Homo sapiens
tccacccgcttcggc

SEQ ID NO: 85632 - DNA, 15 bp, Homo sapiens
atccacccgcttcgg

SEQ ID NO: 85633 - DNA, 15 bp, Homo sapiens
gatccacccgcttcg

SEQ ID NO: 85634 - DNA, 15 bp, Homo sapiens
tgatccacccgcttc

SEQ ID NO: 85635 - DNA, 15 bp, Homo sapiens
gtgatccacccgctt

SEQ ID NO: 85636 - DNA, 15 bp, Homo sapiens
agtgatccacccgct

SEQ ID NO: 85637 - DNA, 15 bp, Homo sapiens
aggccaggctggtct

SEQ ID NO: 85638 - DNA, 15 bp, Homo sapiens
taggccaggctggtc

SEQ ID NO: 85639 - DNA, 15 bp, Homo sapiens
gtaggccaggctggt

SEQ ID NO: 85640 - DNA, 15 bp, Homo sapiens
tgtaggccaggctgg

SEQ ID NO: 85641 - DNA, 15 bp, Homo sapiens
atgtaggccaggctg

SEQ ID NO: 85642 - DNA, 15 bp, Homo sapiens
catgtaggccaggct

SEQ ID NO: 85643 - DNA, 15 bp, Homo sapiens
tcatgtaggccaggc

SEQ ID NO: 85644 - DNA, 15 bp, Homo sapiens
gtcatgtaggccagg

SEQ ID NO: 85645 - DNA, 15 bp, Homo sapiens
tgtcatgtaggccag

SEQ ID NO: 85646 - DNA, 15 bp, Homo sapiens
ttgtcatgtaggcca

SEQ ID NO: 85647 - DNA, 15 bp, Homo sapiens
tttgtcatgtaggcc

SEQ ID NO: 85648 - DNA, 15 bp, Homo sapiens
ttttgtcatgtaggc

SEQ ID NO: 85649 - DNA, 15 bp, Homo sapiens
gttttgtcatgtagg

SEQ ID NO: 85650 - DNA, 15 bp, Homo sapiens
ggttttgtcatgtag

SEQ ID NO: 85651 - DNA, 15 bp, Homo sapiens
gggttttgtcatgta

SEQ ID NO: 85652 - DNA, 15 bp, Homo sapiens
ggggttttgtcatgt

SEQ ID NO: 85653 - DNA, 15 bp, Homo sapiens
cggggttttgtcatg

SEQ ID NO: 85654 - DNA, 15 bp, Homo sapiens
acggggttttgtcat

SEQ ID NO: 85655 - DNA, 15 bp, Homo sapiens
tacggggttttgtca

SEQ ID NO: 85656 - DNA, 15 bp, Homo sapiens
atacggggttttgtc

SEQ ID NO: 85657 - DNA, 15 bp, Homo sapiens
gatacggggttttgt

SEQ ID NO: 85658 - DNA, 15 bp, Homo sapiens
agatacggggttttg

SEQ ID NO: 85659 - DNA, 15 bp, Homo sapiens
tagatacggggtttt

SEQ ID NO: 85660 - DNA, 15 bp, Homo sapiens
gtagatacggggttt

SEQ ID NO: 85661 - DNA, 15 bp, Homo sapiens
agtagatacggggtt

SEQ ID NO: 85662 - DNA, 15 bp, Homo sapiens
tagtagatacggggt

SEQ ID NO: 85663 - DNA, 15 bp, Homo sapiens
ttagtagatacgggg

SEQ ID NO: 85664 - DNA, 15 bp, Homo sapiens
tttagtagatacggg

SEQ ID NO: 85665 - DNA, 15 bp, Homo sapiens
ttttagtagatacgg

SEQ ID NO: 85666 - DNA, 15 bp, Homo sapiens
tttttagtagatacg

SEQ ID NO: 85667 - DNA, 15 bp, Homo sapiens
atttttagtagatac

SEQ ID NO: 85668 - DNA, 15 bp, Homo sapiens
tatttttagtagata

SEQ ID NO: 85669 - DNA, 15 bp, Homo sapiens
gtatttttagtagat

SEQ ID NO: 85670 - DNA, 15 bp, Homo sapiens
tttttttgtattttt

SEQ ID NO: 85671 - DNA, 15 bp, Homo sapiens
atttttttgtatttt

SEQ ID NO: 85672 - DNA, 15 bp, Homo sapiens
aatttttttgtattt

SEQ ID NO: 85673 - DNA, 15 bp, Homo sapiens
taatttttttgtatt

SEQ ID NO: 85674 - DNA, 15 bp, Homo sapiens
ctaatttttttgtat

SEQ ID NO: 85675 - DNA, 15 bp, Homo sapiens
gctaatttttttgta

SEQ ID NO: 85676 - DNA, 15 bp, Homo sapiens
agctaatttttttgt

SEQ ID NO: 85677 - DNA, 15 bp, Homo sapiens
cagctaatttttttg

SEQ ID NO: 85678 - DNA, 15 bp, Homo sapiens
cccagctaatttttt

SEQ ID NO: 85679 - DNA, 15 bp, Homo sapiens
agcccagctaatttt

SEQ ID NO: 85680 - DNA, 15 bp, Homo sapiens
aagcccagctaattt

SEQ ID NO: 85681 - DNA, 15 bp, Homo sapiens
caagcccagctaatt

SEQ ID NO: 85682 - DNA, 15 bp, Homo sapiens
ccaagcccagctaat

SEQ ID NO: 85683 - DNA, 15 bp, Homo sapiens
gccaccaagcccagc

SEQ ID NO: 85684 - DNA, 15 bp, Homo sapiens
tgccaccaagcccag

SEQ ID NO: 85685 - DNA, 15 bp, Homo sapiens
gtgccaccaagccca

SEQ ID NO: 85686 - DNA, 15 bp, Homo sapiens
tgtgccaccaagccc

SEQ ID NO: 85687 - DNA, 15 bp, Homo sapiens
gtgtgccaccaagcc

SEQ ID NO: 85688 - DNA, 15 bp, Homo sapiens
tgtgtgccaccaagc

SEQ ID NO: 85689 - DNA, 15 bp, Homo sapiens
gtgtgtgccaccaag

SEQ ID NO: 85690 - DNA, 15 bp, Homo sapiens
ggtgtgtgccaccaa

SEQ ID NO: 85691 - DNA, 15 bp, Homo sapiens
aggtgtgtgccacca

SEQ ID NO: 85692 - DNA, 15 bp, Homo sapiens
caggtgtgtgccacc

SEQ ID NO: 85693 - DNA, 15 bp, Homo sapiens
acaggtgtgtgccac

SEQ ID NO: 85694 - DNA, 15 bp, Homo sapiens
tacaggtgtgtgcca

SEQ ID NO: 85695 - DNA, 15 bp, Homo sapiens
ttacaggtgtgtgcc

SEQ ID NO: 85696 - DNA, 15 bp, Homo sapiens
attacaggtgtgtgc

SEQ ID NO: 85697 - DNA, 15 bp, Homo sapiens
gattacaggtgtgtg

SEQ ID NO: 85698 - DNA, 15 bp, Homo sapiens
ggattacaggtgtgt

SEQ ID NO: 85699 - DNA, 15 bp, Homo sapiens
agggttcaagcaatt

SEQ ID NO: 85700 - DNA, 15 bp, Homo sapiens
cagggttcaagcaat

SEQ ID NO: 85701 - DNA, 15 bp, Homo sapiens
acagggttcaagcaa

SEQ ID NO: 85702 - DNA, 15 bp, Homo sapiens
tacagggttcaagca

SEQ ID NO: 85703 - DNA, 15 bp, Homo sapiens
ctacagggttcaagc

SEQ ID NO: 85704 - DNA, 15 bp, Homo sapiens
cctacagggttcaag

SEQ ID NO: 85705 - DNA, 15 bp, Homo sapiens
tcctacagggttcaa

SEQ ID NO: 85706 - DNA, 15 bp, Homo sapiens
ttcctacagggttca

SEQ ID NO: 85707 - DNA, 15 bp, Homo sapiens
cttcctacagggttc

SEQ ID NO: 85708 - DNA, 15 bp, Homo sapiens
tcttcctacagggtt

SEQ ID NO: 85709 - DNA, 15 bp, Homo sapiens
ctcttcctacagggt

SEQ ID NO: 85710 - DNA, 15 bp, Homo sapiens
cctcttcctacaggg

SEQ ID NO: 85711 - DNA, 15 bp, Homo sapiens
acctcttcctacagg

SEQ ID NO: 85712 - DNA, 15 bp, Homo sapiens
aacctcttcctacag

SEQ ID NO: 85713 - DNA, 15 bp, Homo sapiens
caacctcttcctaca

SEQ ID NO: 85714 - DNA, 15 bp, Homo sapiens
acaacctcttcctac

SEQ ID NO: 85715 - DNA, 15 bp, Homo sapiens
tacaacctcttccta

SEQ ID NO: 85716 - DNA, 15 bp, Homo sapiens
ctacaacctcttcct

SEQ ID NO: 85717 - DNA, 15 bp, Homo sapiens
actacaacctcttcc

SEQ ID NO: 85718 - DNA, 15 bp, Homo sapiens
cactacaacctcttc

SEQ ID NO: 85719 - DNA, 15 bp, Homo sapiens
tcactacaacctctt

SEQ ID NO: 85720 - DNA, 15 bp, Homo sapiens
ggctcactacaacct

SEQ ID NO: 85721 - DNA, 15 bp, Homo sapiens
tggctcactacaacc

SEQ ID NO: 85722 - DNA, 15 bp, Homo sapiens
ttggctcactacaac

SEQ ID NO: 85723 - DNA, 15 bp, Homo sapiens
cttggctcactacaa

SEQ ID NO: 85724 - DNA, 15 bp, Homo sapiens
tcttggctcactaca

SEQ ID NO: 85725 - DNA, 15 bp, Homo sapiens
atcttggctcactac

SEQ ID NO: 85726 - DNA, 15 bp, Homo sapiens
gatcttggctcacta

SEQ ID NO: 85727 - DNA, 15 bp, Homo sapiens
gcgatcttggctcac

SEQ ID NO: 85728 - DNA, 15 bp, Homo sapiens
tgcgatcttggctca

SEQ ID NO: 85729 - DNA, 15 bp, Homo sapiens
gtgcgatcttggctc

SEQ ID NO: 85730 - DNA, 15 bp, Homo sapiens
ggtgcgatcttggct

SEQ ID NO: 85731 - DNA, 15 bp, Homo sapiens
cggtgcgatcttggc

SEQ ID NO: 85732 - DNA, 15 bp, Homo sapiens
acggtgcgatcttgg

SEQ ID NO: 85733 - DNA, 15 bp, Homo sapiens
aacggtgcgatcttg

SEQ ID NO: 85734 - DNA, 15 bp, Homo sapiens
caacggtgcgatctt

SEQ ID NO: 85735 - DNA, 15 bp, Homo sapiens
gcaacggtgcgatct

SEQ ID NO: 85736 - DNA, 15 bp, Homo sapiens
tgcaacggtgcgatc

SEQ ID NO: 85737 - DNA, 15 bp, Homo sapiens
gtgcaacggtgcgat

SEQ ID NO: 85738 - DNA, 15 bp, Homo sapiens
agtgcaacggtgcga

SEQ ID NO: 85739 - DNA, 15 bp, Homo sapiens
gagtgcaacggtgcg

SEQ ID NO: 85740 - DNA, 15 bp, Homo sapiens
ggagtgcaacggtgc

SEQ ID NO: 85741 - DNA, 15 bp, Homo sapiens
tggagtgcaacggtg

SEQ ID NO: 85742 - DNA, 15 bp, Homo sapiens
ctggagtgcaacggt

SEQ ID NO: 85743 - DNA, 15 bp, Homo sapiens
gctggagtgcaacgg

SEQ ID NO: 85744 - DNA, 15 bp, Homo sapiens
ggctggagtgcaacg

SEQ ID NO: 85745 - DNA, 15 bp, Homo sapiens
aggctggagtgcaac

SEQ ID NO: 85746 - DNA, 15 bp, Homo sapiens
tgctcttgttgccca

SEQ ID NO: 85747 - DNA, 15 bp, Homo sapiens
ttgctcttgttgccc

SEQ ID NO: 85748 - DNA, 15 bp, Homo sapiens
tttgctcttgttgcc

SEQ ID NO: 85749 - DNA, 15 bp, Homo sapiens
ttttgctcttgttgc

SEQ ID NO: 85750 - DNA, 15 bp, Homo sapiens
gttttgctcttgttg

SEQ ID NO: 85751 - DNA, 15 bp, Homo sapiens
agttttgctcttgtt

SEQ ID NO: 85752 - DNA, 15 bp, Homo sapiens
gagttttgctcttgt

SEQ ID NO: 85753 - DNA, 15 bp, Homo sapiens
ggagttttgctcttg

SEQ ID NO: 85754 - DNA, 15 bp, Homo sapiens
tggagttttgctctt

SEQ ID NO: 85755 - DNA, 15 bp, Homo sapiens
atggagttttgctct

SEQ ID NO: 85756 - DNA, 15 bp, Homo sapiens
gatggagttttgctc

SEQ ID NO: 85757 - DNA, 15 bp, Homo sapiens
agatggagttttgct

SEQ ID NO: 85758 - DNA, 15 bp, Homo sapiens
gagatggagttttgc

SEQ ID NO: 85759 - DNA, 15 bp, Homo sapiens
tgagatggagttttg

SEQ ID NO: 85760 - DNA, 15 bp, Homo sapiens
gttttttgagatgga

SEQ ID NO: 85761 - DNA, 15 bp, Homo sapiens
tgttttttgagatgg

SEQ ID NO: 85762 - DNA, 15 bp, Homo sapiens
ttgttttttgagatg

SEQ ID NO: 85763 - DNA, 15 bp, Homo sapiens
tttgttttttgagat

SEQ ID NO: 85764 - DNA, 15 bp, Homo sapiens
atttgttttttgaga

SEQ ID NO: 85765 - DNA, 15 bp, Homo sapiens
aatttgttttttgag

SEQ ID NO: 85766 - DNA, 15 bp, Homo sapiens
taatttgttttttga

SEQ ID NO: 85767 - DNA, 15 bp, Homo sapiens
ttaatttgttttttg

SEQ ID NO: 85768 - DNA, 15 bp, Homo sapiens
tttaatttgtttttt

SEQ ID NO: 85769 - DNA, 15 bp, Homo sapiens
atttaatttgttttt

SEQ ID NO: 85770 - DNA, 15 bp, Homo sapiens
gatttaatttgtttt

SEQ ID NO: 85771 - DNA, 15 bp, Homo sapiens
ggatttaatttgttt

SEQ ID NO: 85772 - DNA, 15 bp, Homo sapiens
tggatttaatttgtt

SEQ ID NO: 85773 - DNA, 15 bp, Homo sapiens
ctggatttaatttgt

SEQ ID NO: 85774 - DNA, 15 bp, Homo sapiens
tctggatttaatttg

SEQ ID NO: 85775 - DNA, 15 bp, Homo sapiens
ctctggatttaattt

SEQ ID NO: 85776 - DNA, 15 bp, Homo sapiens
tctctggatttaatt

SEQ ID NO: 85777 - DNA, 15 bp, Homo sapiens
atctctggatttaat

SEQ ID NO: 85778 - DNA, 15 bp, Homo sapiens
aatctctggatttaa

SEQ ID NO: 85779 - DNA, 15 bp, Homo sapiens
aaatctctggattta

SEQ ID NO: 85780 - DNA, 15 bp, Homo sapiens
taaatctctggattt

SEQ ID NO: 85781 - DNA, 15 bp, Homo sapiens
ttaaatctctggatt

SEQ ID NO: 85782 - DNA, 15 bp, Homo sapiens
tttaaatctctggat

SEQ ID NO: 85783 - DNA, 15 bp, Homo sapiens
ttttaaatctctgga

SEQ ID NO: 85784 - DNA, 15 bp, Homo sapiens
cttttaaatctctgg

SEQ ID NO: 85785 - DNA, 15 bp, Homo sapiens
gcttttaaatctctg

SEQ ID NO: 85786 - DNA, 15 bp, Homo sapiens
agcttttaaatctct

SEQ ID NO: 85787 - DNA, 15 bp, Homo sapiens
gagcttttaaatctc

SEQ ID NO: 85788 - DNA, 15 bp, Homo sapiens
agagcttttaaatct

SEQ ID NO: 85789 - DNA, 15 bp, Homo sapiens
gagagcttttaaatc

SEQ ID NO: 85790 - DNA, 15 bp, Homo sapiens
tgagagcttttaaat

SEQ ID NO: 85791 - DNA, 15 bp, Homo sapiens
ctgagagcttttaaa

SEQ ID NO: 85792 - DNA, 15 bp, Homo sapiens
tctgagagcttttaa

SEQ ID NO: 85793 - DNA, 15 bp, Homo sapiens
ctctgagagctttta

SEQ ID NO: 85794 - DNA, 15 bp, Homo sapiens
cctctgagagctttt

SEQ ID NO: 85795 - DNA, 15 bp, Homo sapiens
gcctctgagagcttt

SEQ ID NO: 85796 - DNA, 15 bp, Homo sapiens
agcctctgagagctt

SEQ ID NO: 85797 - DNA, 15 bp, Homo sapiens
cagcctctgagagct

SEQ ID NO: 85798 - DNA, 15 bp, Homo sapiens
ccagcctctgagagc

SEQ ID NO: 85799 - DNA, 15 bp, Homo sapiens
cccagcctctgagag

SEQ ID NO: 85800 - DNA, 15 bp, Homo sapiens
gcccagcctctgaga

SEQ ID NO: 85801 - DNA, 15 bp, Homo sapiens
cgcccagcctctgag

SEQ ID NO: 85802 - DNA, 15 bp, Homo sapiens
gcgcccagcctctga

SEQ ID NO: 85803 - DNA, 15 bp, Homo sapiens
cgcgcccagcctctg

SEQ ID NO: 85804 - DNA, 15 bp, Homo sapiens
ccgcgcccagcctct

SEQ ID NO: 85805 - DNA, 15 bp, Homo sapiens
accgcgcccagcctc

SEQ ID NO: 85806 - DNA, 15 bp, Homo sapiens
caccgcgcccagcct

SEQ ID NO: 85807 - DNA, 15 bp, Homo sapiens
aagccaccgcgccca

SEQ ID NO: 85808 - DNA, 15 bp, Homo sapiens
taagccaccgcgccc

SEQ ID NO: 85809 - DNA, 15 bp, Homo sapiens
gtaagccaccgcgcc

SEQ ID NO: 85810 - DNA, 15 bp, Homo sapiens
tgtaagccaccgcgc

SEQ ID NO: 85811 - DNA, 15 bp, Homo sapiens
gtgtaagccaccgcg

SEQ ID NO: 85812 - DNA, 15 bp, Homo sapiens
ggtgtaagccaccgc

SEQ ID NO: 85813 - DNA, 15 bp, Homo sapiens
aggtgtaagccaccg

SEQ ID NO: 85814 - DNA, 15 bp, Homo sapiens
caggtgtaagccacc

SEQ ID NO: 85815 - DNA, 15 bp, Homo sapiens
acaggtgtaagccac

SEQ ID NO: 85816 - DNA, 15 bp, Homo sapiens
aacaggtgtaagcca

SEQ ID NO: 85817 - DNA, 15 bp, Homo sapiens
taacaggtgtaagcc

SEQ ID NO: 85818 - DNA, 15 bp, Homo sapiens
ataacaggtgtaagc

SEQ ID NO: 85819 - DNA, 15 bp, Homo sapiens
gataacaggtgtaag

SEQ ID NO: 85820 - DNA, 15 bp, Homo sapiens
ggataacaggtgtaa

SEQ ID NO: 85821 - DNA, 15 bp, Homo sapiens
gggataacaggtgta

SEQ ID NO: 85822 - DNA, 15 bp, Homo sapiens
tgggataacaggtgt

SEQ ID NO: 85823 - DNA, 15 bp, Homo sapiens
ctgggataacaggtg

SEQ ID NO: 85824 - DNA, 15 bp, Homo sapiens
gctgggataacaggt

SEQ ID NO: 85825 - DNA, 15 bp, Homo sapiens
tgctgggataacagg

SEQ ID NO: 85826 - DNA, 15 bp, Homo sapiens
atgctgggataacag

SEQ ID NO: 85827 - DNA, 15 bp, Homo sapiens
aatgctgggataaca

SEQ ID NO: 85828 - DNA, 15 bp, Homo sapiens
aaatgctgggataac

SEQ ID NO: 85829 - DNA, 15 bp, Homo sapiens
aaaatgctgggataa

SEQ ID NO: 85830 - DNA, 15 bp, Homo sapiens
caaaatgctgggata

SEQ ID NO: 85831 - DNA, 15 bp, Homo sapiens
ccaaaatgctgggat

SEQ ID NO: 85832 - DNA, 15 bp, Homo sapiens
cccaaaatgctggga

SEQ ID NO: 85833 - DNA, 15 bp, Homo sapiens
tcccaaaatgctggg

SEQ ID NO: 85834 - DNA, 15 bp, Homo sapiens
atcccaaaatgctgg

SEQ ID NO: 85835 - DNA, 15 bp, Homo sapiens
catcccaaaatgctg

SEQ ID NO: 85836 - DNA, 15 bp, Homo sapiens
gcatcccaaaatgct

SEQ ID NO: 85837 - DNA, 15 bp, Homo sapiens
ggcatcccaaaatgc

SEQ ID NO: 85838 - DNA, 15 bp, Homo sapiens
cggcatcccaaaatg

SEQ ID NO: 85839 - DNA, 15 bp, Homo sapiens
gcctcggcatcccaa

SEQ ID NO: 85840 - DNA, 15 bp, Homo sapiens
cgcctcggcatccca

SEQ ID NO: 85841 - DNA, 15 bp, Homo sapiens
ccgcctcggcatccc

SEQ ID NO: 85842 - DNA, 15 bp, Homo sapiens
cccgcctcggcatcc

SEQ ID NO: 85843 - DNA, 15 bp, Homo sapiens
gcccgcctcggcatc

SEQ ID NO: 85844 - DNA, 15 bp, Homo sapiens
tgcccgcctcggcat

SEQ ID NO: 85845 - DNA, 15 bp, Homo sapiens
ttgcccgcctcggca

SEQ ID NO: 85846 - DNA, 15 bp, Homo sapiens
tttgcccgcctcggc

SEQ ID NO: 85847 - DNA, 15 bp, Homo sapiens
ctttgcccgcctcgg

SEQ ID NO: 85848 - DNA, 15 bp, Homo sapiens
gctttgcccgcctcg

SEQ ID NO: 85849 - DNA, 15 bp, Homo sapiens
tgctttgcccgcctc

SEQ ID NO: 85850 - DNA, 15 bp, Homo sapiens
gtgctttgcccgcct

SEQ ID NO: 85851 - DNA, 15 bp, Homo sapiens
tgtgctttgcccgcc

SEQ ID NO: 85852 - DNA, 15 bp, Homo sapiens
ttgtgctttgcccgc

SEQ ID NO: 85853 - DNA, 15 bp, Homo sapiens
cttgtgctttgcccg

SEQ ID NO: 85854 - DNA, 15 bp, Homo sapiens
ccttgtgctttgccc

SEQ ID NO: 85855 - DNA, 15 bp, Homo sapiens
accttgtgctttgcc

SEQ ID NO: 85856 - DNA, 15 bp, Homo sapiens
gaccttgtgctttgc

SEQ ID NO: 85857 - DNA, 15 bp, Homo sapiens
tgaccttgtgctttg

SEQ ID NO: 85858 - DNA, 15 bp, Homo sapiens
ctgaccttgtgcttt

SEQ ID NO: 85859 - DNA, 15 bp, Homo sapiens
cctgaccttgtgctt

SEQ ID NO: 85860 - DNA, 15 bp, Homo sapiens
tcctgaccttgtgct

SEQ ID NO: 85861 - DNA, 15 bp, Homo sapiens
ctcctgaccttgtgc

SEQ ID NO: 85862 - DNA, 15 bp, Homo sapiens
tatgttggccaggct

SEQ ID NO: 85863 - DNA, 15 bp, Homo sapiens
ctatgttggccaggc

SEQ ID NO: 85864 - DNA, 15 bp, Homo sapiens
agggtttcactatgt

SEQ ID NO: 85865 - DNA, 15 bp, Homo sapiens
cagggtttcactatg

SEQ ID NO: 85866 - DNA, 15 bp, Homo sapiens
acagggtttcactat

SEQ ID NO: 85867 - DNA, 15 bp, Homo sapiens
gacagggtttcacta

SEQ ID NO: 85868 - DNA, 15 bp, Homo sapiens
agacagggtttcact

SEQ ID NO: 85869 - DNA, 15 bp, Homo sapiens
cagagacagggtttc

SEQ ID NO: 85870 - DNA, 15 bp, Homo sapiens
gcagagacagggttt

SEQ ID NO: 85871 - DNA, 15 bp, Homo sapiens
agcagagacagggtt

SEQ ID NO: 85872 - DNA, 15 bp, Homo sapiens
tagcagagacagggt

SEQ ID NO: 85873 - DNA, 15 bp, Homo sapiens
ttagcagagacaggg

SEQ ID NO: 85874 - DNA, 15 bp, Homo sapiens
tttagcagagacagg

SEQ ID NO: 85875 - DNA, 15 bp, Homo sapiens
ttttagcagagacag

SEQ ID NO: 85876 - DNA, 15 bp, Homo sapiens
tttttagcagagaca

SEQ ID NO: 85877 - DNA, 15 bp, Homo sapiens
gtttttagcagagac

SEQ ID NO: 85878 - DNA, 15 bp, Homo sapiens
tgtttttagcagaga

SEQ ID NO: 85879 - DNA, 15 bp, Homo sapiens
atgtttttagcagag

SEQ ID NO: 85880 - DNA, 15 bp, Homo sapiens
tatgtttttagcaga

SEQ ID NO: 85881 - DNA, 15 bp, Homo sapiens
ctatgtttttagcag

SEQ ID NO: 85882 - DNA, 15 bp, Homo sapiens
tctatgtttttagca

SEQ ID NO: 85883 - DNA, 15 bp, Homo sapiens
ttctatgtttttagc

SEQ ID NO: 85884 - DNA, 15 bp, Homo sapiens
tttctatgtttttag

SEQ ID NO: 85885 - DNA, 15 bp, Homo sapiens
ttttctatgttttta

SEQ ID NO: 85886 - DNA, 15 bp, Homo sapiens
tttttctatgttttt

SEQ ID NO: 85887 - DNA, 15 bp, Homo sapiens
atttttctatgtttt

SEQ ID NO: 85888 - DNA, 15 bp, Homo sapiens
aatttttctatgttt

SEQ ID NO: 85889 - DNA, 15 bp, Homo sapiens
taatttttctatgtt

SEQ ID NO: 85890 - DNA, 15 bp, Homo sapiens
ctaatttttctatgt

SEQ ID NO: 85891 - DNA, 15 bp, Homo sapiens
gctaatttttctatg

SEQ ID NO: 85892 - DNA, 15 bp, Homo sapiens
ggctaatttttctat

SEQ ID NO: 85893 - DNA, 15 bp, Homo sapiens
cggctaatttttcta

SEQ ID NO: 85894 - DNA, 15 bp, Homo sapiens
ccggctaatttttct

SEQ ID NO: 85895 - DNA, 15 bp, Homo sapiens
cccggctaatttttc

SEQ ID NO: 85896 - DNA, 15 bp, Homo sapiens
cgccaccatgcccgg

SEQ ID NO: 85897 - DNA, 15 bp, Homo sapiens
acgccaccatgcccg

SEQ ID NO: 85898 - DNA, 15 bp, Homo sapiens
cacgccaccatgccc

SEQ ID NO: 85899 - DNA, 15 bp, Homo sapiens
cgcacgccaccatgc

SEQ ID NO: 85900 - DNA, 15 bp, Homo sapiens
gcgcacgccaccatg

SEQ ID NO: 85901 - DNA, 15 bp, Homo sapiens
ggcgcacgccaccat

SEQ ID NO: 85902 - DNA, 15 bp, Homo sapiens
aggcgcacgccacca

SEQ ID NO: 85903 - DNA, 15 bp, Homo sapiens
caggcgcacgccacc

SEQ ID NO: 85904 - DNA, 15 bp, Homo sapiens
acaggcgcacgccac

SEQ ID NO: 85905 - DNA, 15 bp, Homo sapiens
tacaggcgcacgcca

SEQ ID NO: 85906 - DNA, 15 bp, Homo sapiens
ttacaggcgcacgcc

SEQ ID NO: 85907 - DNA, 15 bp, Homo sapiens
attacaggcgcacgc

SEQ ID NO: 85908 - DNA, 15 bp, Homo sapiens
gattacaggcgcacg

SEQ ID NO: 85909 - DNA, 15 bp, Homo sapiens
ggattacaggcgcac

SEQ ID NO: 85910 - DNA, 15 bp, Homo sapiens
gggattacaggcgca

SEQ ID NO: 85911 - DNA, 15 bp, Homo sapiens
tgggattacaggcgc

SEQ ID NO: 85912 - DNA, 15 bp, Homo sapiens
acctcagcctcccga

SEQ ID NO: 85913 - DNA, 15 bp, Homo sapiens
cacctcagcctcccg

SEQ ID NO: 85914 - DNA, 15 bp, Homo sapiens
tcacctcagcctccc

SEQ ID NO: 85915 - DNA, 15 bp, Homo sapiens
ctcacctcagcctcc

SEQ ID NO: 85916 - DNA, 15 bp, Homo sapiens
tctcacctcagcctc

SEQ ID NO: 85917 - DNA, 15 bp, Homo sapiens
ctctcacctcagcct

SEQ ID NO: 85918 - DNA, 15 bp, Homo sapiens
tctctcacctcagcc

SEQ ID NO: 85919 - DNA, 15 bp, Homo sapiens
ttctctcacctcagc

SEQ ID NO: 85920 - DNA, 15 bp, Homo sapiens
attctctcacctcag

SEQ ID NO: 85921 - DNA, 15 bp, Homo sapiens
aattctctcacctca

SEQ ID NO: 85922 - DNA, 15 bp, Homo sapiens
taattctctcacctc

SEQ ID NO: 85923 - DNA, 15 bp, Homo sapiens
gtaattctctcacct

SEQ ID NO: 85924 - DNA, 15 bp, Homo sapiens
agtaattctctcacc

SEQ ID NO: 85925 - DNA, 15 bp, Homo sapiens
aagtaattctctcac

SEQ ID NO: 85926 - DNA, 15 bp, Homo sapiens
caagtaattctctca

SEQ ID NO: 85927 - DNA, 15 bp, Homo sapiens
tcaagtaattctctc

SEQ ID NO: 85928 - DNA, 15 bp, Homo sapiens
ttcaagtaattctct

SEQ ID NO: 85929 - DNA, 15 bp, Homo sapiens
gttcaagtaattctc

SEQ ID NO: 85930 - DNA, 15 bp, Homo sapiens
ggttcaagtaattct

SEQ ID NO: 85931 - DNA, 15 bp, Homo sapiens
gggttcaagtaattc

SEQ ID NO: 85932 - DNA, 15 bp, Homo sapiens
cgggttcaagtaatt

SEQ ID NO: 85933 - DNA, 15 bp, Homo sapiens
ccgggttcaagtaat

SEQ ID NO: 85934 - DNA, 15 bp, Homo sapiens
cccgggttcaagtaa

SEQ ID NO: 85935 - DNA, 15 bp, Homo sapiens
tcccgggttcaagta

SEQ ID NO: 85936 - DNA, 15 bp, Homo sapiens
ctcccgggttcaagt

SEQ ID NO: 85937 - DNA, 15 bp, Homo sapiens
tccgcctcccgggtt

SEQ ID NO: 85938 - DNA, 15 bp, Homo sapiens
ctccgcctcccgggt

SEQ ID NO: 85939 - DNA, 15 bp, Homo sapiens
cctccgcctcccggg

SEQ ID NO: 85940 - DNA, 15 bp, Homo sapiens
acctccgcctcccgg

SEQ ID NO: 85941 - DNA, 15 bp, Homo sapiens
aacctccgcctcccg

SEQ ID NO: 85942 - DNA, 15 bp, Homo sapiens
gggctcactgcaacc

SEQ ID NO: 85943 - DNA, 15 bp, Homo sapiens
aatctgggctcactg

SEQ ID NO: 85944 - DNA, 15 bp, Homo sapiens
caatctgggctcact

SEQ ID NO: 85945 - DNA, 15 bp, Homo sapiens
gcaatctgggctcac

SEQ ID NO: 85946 - DNA, 15 bp, Homo sapiens
tgcaatctgggctca

SEQ ID NO: 85947 - DNA, 15 bp, Homo sapiens
gtgcaatctgggctc

SEQ ID NO: 85948 - DNA, 15 bp, Homo sapiens
ggtgcaatctgggct

SEQ ID NO: 85949 - DNA, 15 bp, Homo sapiens
tggtgcaatctgggc

SEQ ID NO: 85950 - DNA, 15 bp, Homo sapiens
gtggtgcaatctggg

SEQ ID NO: 85951 - DNA, 15 bp, Homo sapiens
agtggtgcaatctgg

SEQ ID NO: 85952 - DNA, 15 bp, Homo sapiens
cagtggtgcaatctg

SEQ ID NO: 85953 - DNA, 15 bp, Homo sapiens
gcagtggtgcaatct

SEQ ID NO: 85954 - DNA, 15 bp, Homo sapiens
tgcagtggtgcaatc

SEQ ID NO: 85955 - DNA, 15 bp, Homo sapiens
gtgcagtggtgcaat

SEQ ID NO: 85956 - DNA, 15 bp, Homo sapiens
agtgcagtggtgcaa

SEQ ID NO: 85957 - DNA, 15 bp, Homo sapiens
gagtgcagtggtgca

SEQ ID NO: 85958 - DNA, 15 bp, Homo sapiens
ggagtgcagtggtgc

SEQ ID NO: 85959 - DNA, 15 bp, Homo sapiens
ctggagtgcagtggt

SEQ ID NO: 85960 - DNA, 15 bp, Homo sapiens
tgctctgtcgcccag

SEQ ID NO: 85961 - DNA, 15 bp, Homo sapiens
ttgctctgtcgccca

SEQ ID NO: 85962 - DNA, 15 bp, Homo sapiens
cttgctctgtcgccc

SEQ ID NO: 85963 - DNA, 15 bp, Homo sapiens
tcttgctctgtcgcc

SEQ ID NO: 85964 - DNA, 15 bp, Homo sapiens
gtcttgctctgtcgc

SEQ ID NO: 85965 - DNA, 15 bp, Homo sapiens
agtcttgctctgtcg

SEQ ID NO: 85966 - DNA, 15 bp, Homo sapiens
gagtcttgctctgtc

SEQ ID NO: 85967 - DNA, 15 bp, Homo sapiens
ggagtcttgctctgt

SEQ ID NO: 85968 - DNA, 15 bp, Homo sapiens
tggagtcttgctctg

SEQ ID NO: 85969 - DNA, 15 bp, Homo sapiens
atggagtcttgctct

SEQ ID NO: 85970 - DNA, 15 bp, Homo sapiens
gatggagtcttgctc

SEQ ID NO: 85971 - DNA, 15 bp, Homo sapiens
tgagatggagtcttg

SEQ ID NO: 85972 - DNA, 15 bp, Homo sapiens
ttgagatggagtctt

SEQ ID NO: 85973 - DNA, 15 bp, Homo sapiens
ctttttttgagatgg

SEQ ID NO: 85974 - DNA, 15 bp, Homo sapiens
gctttttttgagatg

SEQ ID NO: 85975 - DNA, 15 bp, Homo sapiens
agctttttttgagat

SEQ ID NO: 85976 - DNA, 15 bp, Homo sapiens
gagctttttttgaga

SEQ ID NO: 85977 - DNA, 15 bp, Homo sapiens
agagctttttttgag

SEQ ID NO: 85978 - DNA, 15 bp, Homo sapiens
gagagctttttttga

SEQ ID NO: 85979 - DNA, 15 bp, Homo sapiens
tgagagctttttttg

SEQ ID NO: 85980 - DNA, 15 bp, Homo sapiens
ctgagagcttttttt

SEQ ID NO: 85981 - DNA, 15 bp, Homo sapiens
tctgagagctttttt

SEQ ID NO: 85982 - DNA, 15 bp, Homo sapiens
ttctgagagcttttt

SEQ ID NO: 85983 - DNA, 15 bp, Homo sapiens
gttctgagagctttt

SEQ ID NO: 85984 - DNA, 15 bp, Homo sapiens
tgttctgagagcttt

SEQ ID NO: 85985 - DNA, 15 bp, Homo sapiens
ttgttctgagagctt

SEQ ID NO: 85986 - DNA, 15 bp, Homo sapiens
gttgttctgagagct

SEQ ID NO: 85987 - DNA, 15 bp, Homo sapiens
ggttgttctgagagc

SEQ ID NO: 85988 - DNA, 15 bp, Homo sapiens
tggttgttctgagag

SEQ ID NO: 85989 - DNA, 15 bp, Homo sapiens
ctggttgttctgaga

SEQ ID NO: 85990 - DNA, 15 bp, Homo sapiens
cctggttgttctgag

SEQ ID NO: 85991 - DNA, 15 bp, Homo sapiens
acctggttgttctga

SEQ ID NO: 85992 - DNA, 15 bp, Homo sapiens
aacctggttgttctg

SEQ ID NO: 85993 - DNA, 15 bp, Homo sapiens
aaacctggttgttct

SEQ ID NO: 85994 - DNA, 15 bp, Homo sapiens
taaacctggttgttc

SEQ ID NO: 85995 - DNA, 15 bp, Homo sapiens
gtaaacctggttgtt

SEQ ID NO: 85996 - DNA, 15 bp, Homo sapiens
tgtaaacctggttgt

SEQ ID NO: 85997 - DNA, 15 bp, Homo sapiens
ttgtaaacctggttg

SEQ ID NO: 85998 - DNA, 15 bp, Homo sapiens
tttgtaaacctggtt

SEQ ID NO: 85999 - DNA, 15 bp, Homo sapiens
atttgtaaacctggt

SEQ ID NO: 86000 - DNA, 15 bp, Homo sapiens
aatttgtaaacctgg

SEQ ID NO: 86001 - DNA, 15 bp, Homo sapiens
aaatttgtaaacctg

SEQ ID NO: 86002 - DNA, 15 bp, Homo sapiens
caaatttgtaaacct

SEQ ID NO: 86003 - DNA, 15 bp, Homo sapiens
ccaaatttgtaaacc

SEQ ID NO: 86004 - DNA, 15 bp, Homo sapiens
accaaatttgtaaac

SEQ ID NO: 86005 - DNA, 15 bp, Homo sapiens
gaccaaatttgtaaa

SEQ ID NO: 86006 - DNA, 15 bp, Homo sapiens
tgaccaaatttgtaa

SEQ ID NO: 86007 - DNA, 15 bp, Homo sapiens
ctgaccaaatttgta

SEQ ID NO: 86008 - DNA, 15 bp, Homo sapiens
actgaccaaatttgt

SEQ ID NO: 86009 - DNA, 15 bp, Homo sapiens
aactgaccaaatttg

SEQ ID NO: 86010 - DNA, 15 bp, Homo sapiens
caactgaccaaattt

SEQ ID NO: 86011 - DNA, 15 bp, Homo sapiens
ccaactgaccaaatt

SEQ ID NO: 86012 - DNA, 15 bp, Homo sapiens
accaactgaccaaat

SEQ ID NO: 86013 - DNA, 15 bp, Homo sapiens
taccaactgaccaaa

SEQ ID NO: 86014 - DNA, 15 bp, Homo sapiens
ttaccaactgaccaa

SEQ ID NO: 86015 - DNA, 15 bp, Homo sapiens
tttaccaactgacca

SEQ ID NO: 86016 - DNA, 15 bp, Homo sapiens
atttaccaactgacc

SEQ ID NO: 86017 - DNA, 15 bp, Homo sapiens
tatttaccaactgac

SEQ ID NO: 86018 - DNA, 15 bp, Homo sapiens
ttatttaccaactga

SEQ ID NO: 86019 - DNA, 15 bp, Homo sapiens
tttatttaccaactg

SEQ ID NO: 86020 - DNA, 15 bp, Homo sapiens
gtttatttaccaact

SEQ ID NO: 86021 - DNA, 15 bp, Homo sapiens
agtttatttaccaac

SEQ ID NO: 86022 - DNA, 15 bp, Homo sapiens
cagtttatttaccaa

SEQ ID NO: 86023 - DNA, 15 bp, Homo sapiens
ccagtttatttacca

SEQ ID NO: 86024 - DNA, 15 bp, Homo sapiens
cccagtttatttacc

SEQ ID NO: 86025 - DNA, 15 bp, Homo sapiens
acccagtttatttac

SEQ ID NO: 86026 - DNA, 15 bp, Homo sapiens
aacccagtttattta

SEQ ID NO: 86027 - DNA, 15 bp, Homo sapiens
aaacccagtttattt

SEQ ID NO: 86028 - DNA, 15 bp, Homo sapiens
gaaacccagtttatt

SEQ ID NO: 86029 - DNA, 15 bp, Homo sapiens
tgaaacccagtttat

SEQ ID NO: 86030 - DNA, 15 bp, Homo sapiens
ttgaaacccagttta

SEQ ID NO: 86031 - DNA, 15 bp, Homo sapiens
tttgaaacccagttt

SEQ ID NO: 86032 - DNA, 15 bp, Homo sapiens
gtttgaaacccagtt

SEQ ID NO: 86033 - DNA, 15 bp, Homo sapiens
tgtttgaaacccagt

SEQ ID NO: 86034 - DNA, 15 bp, Homo sapiens
atgtttgaaacccag

SEQ ID NO: 86035 - DNA, 15 bp, Homo sapiens
tatgtttgaaaccca

SEQ ID NO: 86036 - DNA, 15 bp, Homo sapiens
gtatgtttgaaaccc

SEQ ID NO: 86037 - DNA, 15 bp, Homo sapiens
agtatgtttgaaacc

SEQ ID NO: 86038 - DNA, 15 bp, Homo sapiens
aagtatgtttgaaac

SEQ ID NO: 86039 - DNA, 15 bp, Homo sapiens
aaagtatgtttgaaa

SEQ ID NO: 86040 - DNA, 15 bp, Homo sapiens
caaagtatgtttgaa

SEQ ID NO: 86041 - DNA, 15 bp, Homo sapiens
gcaaagtatgtttga

SEQ ID NO: 86042 - DNA, 15 bp, Homo sapiens
agcaaagtatgtttg

SEQ ID NO: 86043 - DNA, 15 bp, Homo sapiens
cagcaaagtatgttt

SEQ ID NO: 86044 - DNA, 15 bp, Homo sapiens
tcagcaaagtatgtt

SEQ ID NO: 86045 - DNA, 15 bp, Homo sapiens
ttcagcaaagtatgt

SEQ ID NO: 86046 - DNA, 15 bp, Homo sapiens
tttcagcaaagtatg

SEQ ID NO: 86047 - DNA, 15 bp, Homo sapiens
gtttcagcaaagtat

SEQ ID NO: 86048 - DNA, 15 bp, Homo sapiens
tgtttcagcaaagta

SEQ ID NO: 86049 - DNA, 15 bp, Homo sapiens
ttgtttcagcaaagt

SEQ ID NO: 86050 - DNA, 15 bp, Homo sapiens
attgtttcagcaaag

SEQ ID NO: 86051 - DNA, 15 bp, Homo sapiens
gattgtttcagcaaa

SEQ ID NO: 86052 - DNA, 15 bp, Homo sapiens
tgattgtttcagcaa

SEQ ID NO: 86053 - DNA, 15 bp, Homo sapiens
gtgattgtttcagca

SEQ ID NO: 86054 - DNA, 15 bp, Homo sapiens
agtgattgtttcagc

SEQ ID NO: 86055 - DNA, 15 bp, Homo sapiens
cagtgattgtttcag

SEQ ID NO: 86056 - DNA, 15 bp, Homo sapiens
tcagtgattgtttca

SEQ ID NO: 86057 - DNA, 15 bp, Homo sapiens
gtcagtgattgtttc

SEQ ID NO: 86058 - DNA, 15 bp, Homo sapiens
agtcagtgattgttt

SEQ ID NO: 86059 - DNA, 15 bp, Homo sapiens
tagtcagtgattgtt

SEQ ID NO: 86060 - DNA, 15 bp, Homo sapiens
ttagtcagtgattgt

SEQ ID NO: 86061 - DNA, 15 bp, Homo sapiens
tttagtcagtgattg

SEQ ID NO: 86062 - DNA, 15 bp, Homo sapiens
atttagtcagtgatt

SEQ ID NO: 86063 - DNA, 15 bp, Homo sapiens
tatttagtcagtgat

SEQ ID NO: 86064 - DNA, 15 bp, Homo sapiens
ctatttagtcagtga

SEQ ID NO: 86065 - DNA, 15 bp, Homo sapiens
cctatttagtcagtg

SEQ ID NO: 86066 - DNA, 15 bp, Homo sapiens
tcctatttagtcagt

SEQ ID NO: 86067 - DNA, 15 bp, Homo sapiens
ttcctatttagtcag

SEQ ID NO: 86068 - DNA, 15 bp, Homo sapiens
tttcctatttagtca

SEQ ID NO: 86069 - DNA, 15 bp, Homo sapiens
atttcctatttagtc

SEQ ID NO: 86070 - DNA, 15 bp, Homo sapiens
catttcctatttagt

SEQ ID NO: 86071 - DNA, 15 bp, Homo sapiens
tcatttcctatttag

SEQ ID NO: 86072 - DNA, 15 bp, Homo sapiens
ttcatttcctattta

SEQ ID NO: 86073 - DNA, 15 bp, Homo sapiens
attcatttcctattt

SEQ ID NO: 86074 - DNA, 15 bp, Homo sapiens
gattcatttcctatt

SEQ ID NO: 86075 - DNA, 15 bp, Homo sapiens
agattcatttcctat

SEQ ID NO: 86076 - DNA, 15 bp, Homo sapiens
aagattcatttccta

SEQ ID NO: 86077 - DNA, 15 bp, Homo sapiens
aaagattcatttcct

SEQ ID NO: 86078 - DNA, 15 bp, Homo sapiens
aaaagattcatttcc

SEQ ID NO: 86079 - DNA, 15 bp, Homo sapiens
aaaaagattcatttc

SEQ ID NO: 86080 - DNA, 15 bp, Homo sapiens
aaaaaagattcattt

SEQ ID NO: 86081 - DNA, 15 bp, Homo sapiens
aaaaaaagattcatt

SEQ ID NO: 86082 - DNA, 15 bp, Homo sapiens
aaaaaaaagattcat

SEQ ID NO: 86083 - DNA, 15 bp, Homo sapiens
aaaaaaaaagattca

SEQ ID NO: 86084 - DNA, 15 bp, Homo sapiens
aaaaaaaaaagattc

SEQ ID NO: 86085 - DNA, 15 bp, Homo sapiens
aaaaaaaaaaagatt

SEQ ID NO: 86086 - DNA, 15 bp, Homo sapiens
gcttaaaaaaaaaaa

SEQ ID NO: 86087 - DNA, 15 bp, Homo sapiens
agcttaaaaaaaaaa

SEQ ID NO: 86088 - DNA, 15 bp, Homo sapiens
cagcttaaaaaaaaa

SEQ ID NO: 86089 - DNA, 15 bp, Homo sapiens
ccagcttaaaaaaaa

SEQ ID NO: 86090 - DNA, 15 bp, Homo sapiens
gccagcttaaaaaaa

SEQ ID NO: 86091 - DNA, 15 bp, Homo sapiens
tgccagcttaaaaaa

SEQ ID NO: 86092 - DNA, 15 bp, Homo sapiens
ttgccagcttaaaaa

SEQ ID NO: 86093 - DNA, 15 bp, Homo sapiens
cttgccagcttaaaa

SEQ ID NO: 86094 - DNA, 15 bp, Homo sapiens
gcttgccagcttaaa

SEQ ID NO: 86095 - DNA, 15 bp, Homo sapiens
agcttgccagcttaa

SEQ ID NO: 86096 - DNA, 15 bp, Homo sapiens
cagcttgccagctta

SEQ ID NO: 86097 - DNA, 15 bp, Homo sapiens
ccagcttgccagctt

SEQ ID NO: 86098 - DNA, 15 bp, Homo sapiens
accagcttgccagct

SEQ ID NO: 86099 - DNA, 15 bp, Homo sapiens
gaccagcttgccagc

SEQ ID NO: 86100 - DNA, 15 bp, Homo sapiens
agaccagcttgccag

SEQ ID NO: 86101 - DNA, 15 bp, Homo sapiens
cagaccagcttgcca

SEQ ID NO: 86102 - DNA, 15 bp, Homo sapiens
acagaccagcttgcc

SEQ ID NO: 86103 - DNA, 15 bp, Homo sapiens
tacagaccagcttgc

SEQ ID NO: 86104 - DNA, 15 bp, Homo sapiens
ctacagaccagcttg

SEQ ID NO: 86105 - DNA, 15 bp, Homo sapiens
cctacagaccagctt

SEQ ID NO: 86106 - DNA, 15 bp, Homo sapiens
tcctacagaccagct

SEQ ID NO: 86107 - DNA, 15 bp, Homo sapiens
gtcctacagaccagc

SEQ ID NO: 86108 - DNA, 15 bp, Homo sapiens
ggtcctacagaccag

SEQ ID NO: 86109 - DNA, 15 bp, Homo sapiens
aggtcctacagacca

SEQ ID NO: 86110 - DNA, 15 bp, Homo sapiens
caggtcctacagacc

SEQ ID NO: 86111 - DNA, 15 bp, Homo sapiens
tcaggtcctacagac

SEQ ID NO: 86112 - DNA, 15 bp, Homo sapiens
atcaggtcctacaga

SEQ ID NO: 86113 - DNA, 15 bp, Homo sapiens
tatcaggtcctacag

SEQ ID NO: 86114 - DNA, 15 bp, Homo sapiens
ttatcaggtcctaca

SEQ ID NO: 86115 - DNA, 15 bp, Homo sapiens
cttatcaggtcctac

SEQ ID NO: 86116 - DNA, 15 bp, Homo sapiens
acttatcaggtccta

SEQ ID NO: 86117 - DNA, 15 bp, Homo sapiens
tacttatcaggtcct

SEQ ID NO: 86118 - DNA, 15 bp, Homo sapiens
gtacttatcaggtcc

SEQ ID NO: 86119 - DNA, 15 bp, Homo sapiens
agtacttatcaggtc

SEQ ID NO: 86120 - DNA, 15 bp, Homo sapiens
gagtacttatcaggt

SEQ ID NO: 86121 - DNA, 15 bp, Homo sapiens
tgagtacttatcagg

SEQ ID NO: 86122 - DNA, 15 bp, Homo sapiens
gtgagtacttatcag

SEQ ID NO: 86123 - DNA, 15 bp, Homo sapiens
agtgagtacttatca

SEQ ID NO: 86124 - DNA, 15 bp, Homo sapiens
aagtgagtacttatc

SEQ ID NO: 86125 - DNA, 15 bp, Homo sapiens
gaagtgagtacttat

SEQ ID NO: 86126 - DNA, 15 bp, Homo sapiens
tgaagtgagtactta

SEQ ID NO: 86127 - DNA, 15 bp, Homo sapiens
atgaagtgagtactt

SEQ ID NO: 86128 - DNA, 15 bp, Homo sapiens
aatgaagtgagtact

SEQ ID NO: 86129 - DNA, 15 bp, Homo sapiens
aaatgaagtgagtac

SEQ ID NO: 86130 - DNA, 15 bp, Homo sapiens
gaaatgaagtgagta

SEQ ID NO: 86131 - DNA, 15 bp, Homo sapiens
agaaatgaagtgagt

SEQ ID NO: 86132 - DNA, 15 bp, Homo sapiens
gagaaatgaagtgag

SEQ ID NO: 86133 - DNA, 15 bp, Homo sapiens
agagaaatgaagtga

SEQ ID NO: 86134 - DNA, 15 bp, Homo sapiens
cagagaaatgaagtg

SEQ ID NO: 86135 - DNA, 15 bp, Homo sapiens
acagagaaatgaagt

SEQ ID NO: 86136 - DNA, 15 bp, Homo sapiens
cacagagaaatgaag

SEQ ID NO: 86137 - DNA, 15 bp, Homo sapiens
acacagagaaatgaa

SEQ ID NO: 86138 - DNA, 15 bp, Homo sapiens
gacacagagaaatga

SEQ ID NO: 86139 - DNA, 15 bp, Homo sapiens
agacacagagaaatg

SEQ ID NO: 86140 - DNA, 15 bp, Homo sapiens
gagacacagagaaat

SEQ ID NO: 86141 - DNA, 15 bp, Homo sapiens
tgagacacagagaaa

SEQ ID NO: 86142 - DNA, 15 bp, Homo sapiens
ctgagacacagagaa

SEQ ID NO: 86143 - DNA, 15 bp, Homo sapiens
cctgagacacagaga

SEQ ID NO: 86144 - DNA, 15 bp, Homo sapiens
acctgagacacagag

SEQ ID NO: 86145 - DNA, 15 bp, Homo sapiens
aacctgagacacaga

SEQ ID NO: 86146 - DNA, 15 bp, Homo sapiens
aaacctgagacacag

SEQ ID NO: 86147 - DNA, 15 bp, Homo sapiens
gaaacctgagacaca

SEQ ID NO: 86148 - DNA, 15 bp, Homo sapiens
ggaaacctgagacac

SEQ ID NO: 86149 - DNA, 15 bp, Homo sapiens
gggaaacctgagaca

SEQ ID NO: 86150 - DNA, 15 bp, Homo sapiens
tgggaaacctgagac

SEQ ID NO: 86151 - DNA, 15 bp, Homo sapiens
atgggaaacctgaga

SEQ ID NO: 86152 - DNA, 15 bp, Homo sapiens
aatgggaaacctgag

SEQ ID NO: 86153 - DNA, 15 bp, Homo sapiens
aaatgggaaacctga

SEQ ID NO: 86154 - DNA, 15 bp, Homo sapiens
aaaatgggaaacctg

SEQ ID NO: 86155 - DNA, 15 bp, Homo sapiens
aaaaatgggaaacct

SEQ ID NO: 86156 - DNA, 15 bp, Homo sapiens
taaaaatgggaaacc

SEQ ID NO: 86157 - DNA, 15 bp, Homo sapiens
ctaaaaatgggaaac

SEQ ID NO: 86158 - DNA, 15 bp, Homo sapiens
cctaaaaatgggaaa

SEQ ID NO: 86159 - DNA, 15 bp, Homo sapiens
acctaaaaatgggaa

SEQ ID NO: 86160 - DNA, 15 bp, Homo sapiens
cacctaaaaatggga

SEQ ID NO: 86161 - DNA, 15 bp, Homo sapiens
tcacctaaaaatggg

SEQ ID NO: 86162 - DNA, 15 bp, Homo sapiens
ctcacctaaaaatgg

SEQ ID NO: 86163 - DNA, 15 bp, Homo sapiens
tctcacctaaaaatg

SEQ ID NO: 86164 - DNA, 15 bp, Homo sapiens
ttctcacctaaaaat

SEQ ID NO: 86165 - DNA, 15 bp, Homo sapiens
attctcacctaaaaa

SEQ ID NO: 86166 - DNA, 15 bp, Homo sapiens
aattctcacctaaaa

SEQ ID NO: 86167 - DNA, 15 bp, Homo sapiens
taattctcacctaaa

SEQ ID NO: 86168 - DNA, 15 bp, Homo sapiens
ttaattctcacctaa

SEQ ID NO: 86169 - DNA, 15 bp, Homo sapiens
cttaattctcaccta

SEQ ID NO: 86170 - DNA, 15 bp, Homo sapiens
ccttaattctcacct

SEQ ID NO: 86171 - DNA, 15 bp, Homo sapiens
cccttaattctcacc

SEQ ID NO: 86172 - DNA, 15 bp, Homo sapiens
ccccttaattctcac

SEQ ID NO: 86173 - DNA, 15 bp, Homo sapiens
gccccttaattctca

SEQ ID NO: 86174 - DNA, 15 bp, Homo sapiens
agccccttaattctc

SEQ ID NO: 86175 - DNA, 15 bp, Homo sapiens
gagccccttaattct

SEQ ID NO: 86176 - DNA, 15 bp, Homo sapiens
agagccccttaattc

SEQ ID NO: 86177 - DNA, 15 bp, Homo sapiens
cagagccccttaatt

SEQ ID NO: 86178 - DNA, 15 bp, Homo sapiens
tcagagccccttaat

SEQ ID NO: 86179 - DNA, 15 bp, Homo sapiens
atcagagccccttaa

SEQ ID NO: 86180 - DNA, 15 bp, Homo sapiens
tatcagagcccctta

SEQ ID NO: 86181 - DNA, 15 bp, Homo sapiens
ttatcagagcccctt

SEQ ID NO: 86182 - DNA, 15 bp, Homo sapiens
tttatcagagcccct

SEQ ID NO: 86183 - DNA, 15 bp, Homo sapiens
ttttatcagagcccc

SEQ ID NO: 86184 - DNA, 15 bp, Homo sapiens
gttttatcagagccc

SEQ ID NO: 86185 - DNA, 15 bp, Homo sapiens
tgttttatcagagcc

SEQ ID NO: 86186 - DNA, 15 bp, Homo sapiens
ctgttttatcagagc

SEQ ID NO: 86187 - DNA, 15 bp, Homo sapiens
tctgttttatcagag

SEQ ID NO: 86188 - DNA, 15 bp, Homo sapiens
gtctgttttatcaga

SEQ ID NO: 86189 - DNA, 15 bp, Homo sapiens
ggtctgttttatcag

SEQ ID NO: 86190 - DNA, 15 bp, Homo sapiens
gggtctgttttatca

SEQ ID NO: 86191 - DNA, 15 bp, Homo sapiens
agggtctgttttatc

SEQ ID NO: 86192 - DNA, 15 bp, Homo sapiens
tagggtctgttttat

SEQ ID NO: 86193 - DNA, 15 bp, Homo sapiens
ctagggtctgtttta

SEQ ID NO: 86194 - DNA, 15 bp, Homo sapiens
cctagggtctgtttt

SEQ ID NO: 86195 - DNA, 15 bp, Homo sapiens
tcctagggtctgttt

SEQ ID NO: 86196 - DNA, 15 bp, Homo sapiens
atcctagggtctgtt

SEQ ID NO: 86197 - DNA, 15 bp, Homo sapiens
aatcctagggtctgt

SEQ ID NO: 86198 - DNA, 15 bp, Homo sapiens
caatcctagggtctg

SEQ ID NO: 86199 - DNA, 15 bp, Homo sapiens
acaatcctagggtct

SEQ ID NO: 86200 - DNA, 15 bp, Homo sapiens
cacaatcctagggtc

SEQ ID NO: 86201 - DNA, 15 bp, Homo sapiens
ccacaatcctagggt

SEQ ID NO: 86202 - DNA, 15 bp, Homo sapiens
tccacaatcctaggg

SEQ ID NO: 86203 - DNA, 15 bp, Homo sapiens
gtccacaatcctagg

SEQ ID NO: 86204 - DNA, 15 bp, Homo sapiens
tgtccacaatcctag

SEQ ID NO: 86205 - DNA, 15 bp, Homo sapiens
ctgtccacaatccta

SEQ ID NO: 86206 - DNA, 15 bp, Homo sapiens
gctgtccacaatcct

SEQ ID NO: 86207 - DNA, 15 bp, Homo sapiens
tgctgtccacaatcc

SEQ ID NO: 86208 - DNA, 15 bp, Homo sapiens
ctgctgtccacaatc

SEQ ID NO: 86209 - DNA, 15 bp, Homo sapiens
actgctgtccacaat

SEQ ID NO: 86210 - DNA, 15 bp, Homo sapiens
cactgctgtccacaa

SEQ ID NO: 86211 - DNA, 15 bp, Homo sapiens
tcactgctgtccaca

SEQ ID NO: 86212 - DNA, 15 bp, Homo sapiens
atcactgctgtccac

SEQ ID NO: 86213 - DNA, 15 bp, Homo sapiens
tatcactgctgtcca

SEQ ID NO: 86214 - DNA, 15 bp, Homo sapiens
ctatcactgctgtcc

SEQ ID NO: 86215 - DNA, 15 bp, Homo sapiens
actatcactgctgtc

SEQ ID NO: 86216 - DNA, 15 bp, Homo sapiens
gactatcactgctgt

SEQ ID NO: 86217 - DNA, 15 bp, Homo sapiens
ggactatcactgctg

SEQ ID NO: 86218 - DNA, 15 bp, Homo sapiens
aggactatcactgct

SEQ ID NO: 86219 - DNA, 15 bp, Homo sapiens
taggactatcactgc

SEQ ID NO: 86220 - DNA, 15 bp, Homo sapiens
ctaggactatcactg

SEQ ID NO: 86221 - DNA, 15 bp, Homo sapiens
tctaggactatcact

SEQ ID NO: 86222 - DNA, 15 bp, Homo sapiens
ctctaggactatcac

SEQ ID NO: 86223 - DNA, 15 bp, Homo sapiens
actctaggactatca

SEQ ID NO: 86224 - DNA, 15 bp, Homo sapiens
gactctaggactatc

SEQ ID NO: 86225 - DNA, 15 bp, Homo sapiens
ggactctaggactat

SEQ ID NO: 86226 - DNA, 15 bp, Homo sapiens
tggactctaggacta

SEQ ID NO: 86227 - DNA, 15 bp, Homo sapiens
gtggactctaggact

SEQ ID NO: 86228 - DNA, 15 bp, Homo sapiens
tgtggactctaggac

SEQ ID NO: 86229 - DNA, 15 bp, Homo sapiens
ttgtggactctagga

SEQ ID NO: 86230 - DNA, 15 bp, Homo sapiens
cttgtggactctagg

SEQ ID NO: 86231 - DNA, 15 bp, Homo sapiens
acttgtggactctag

SEQ ID NO: 86232 - DNA, 15 bp, Homo sapiens
gacttgtggactcta

SEQ ID NO: 86233 - DNA, 15 bp, Homo sapiens
agacttgtggactct

SEQ ID NO: 86234 - DNA, 15 bp, Homo sapiens
cagacttgtggactc

SEQ ID NO: 86235 - DNA, 15 bp, Homo sapiens
gcagacttgtggact

SEQ ID NO: 86236 - DNA, 15 bp, Homo sapiens
agcagacttgtggac

SEQ ID NO: 86237 - DNA, 15 bp, Homo sapiens
aagcagacttgtgga

SEQ ID NO: 86238 - DNA, 15 bp, Homo sapiens
aaagcagacttgtgg

SEQ ID NO: 86239 - DNA, 15 bp, Homo sapiens
aaaagcagacttgtg

SEQ ID NO: 86240 - DNA, 15 bp, Homo sapiens
caaaagcagacttgt

SEQ ID NO: 86241 - DNA, 15 bp, Homo sapiens
tcaaaagcagacttg

SEQ ID NO: 86242 - DNA, 15 bp, Homo sapiens
ctcaaaagcagactt

SEQ ID NO: 86243 - DNA, 15 bp, Homo sapiens
actcaaaagcagact

SEQ ID NO: 86244 - DNA, 15 bp, Homo sapiens
cactcaaaagcagac

SEQ ID NO: 86245 - DNA, 15 bp, Homo sapiens
tcactcaaaagcaga

SEQ ID NO: 86246 - DNA, 15 bp, Homo sapiens
atcactcaaaagcag

SEQ ID NO: 86247 - DNA, 15 bp, Homo sapiens
catcactcaaaagca

SEQ ID NO: 86248 - DNA, 15 bp, Homo sapiens
ccatcactcaaaagc

SEQ ID NO: 86249 - DNA, 15 bp, Homo sapiens
cccatcactcaaaag

SEQ ID NO: 86250 - DNA, 15 bp, Homo sapiens
gcccatcactcaaaa

SEQ ID NO: 86251 - DNA, 15 bp, Homo sapiens
ggcccatcactcaaa

SEQ ID NO: 86252 - DNA, 15 bp, Homo sapiens
gggcccatcactcaa

SEQ ID NO: 86253 - DNA, 15 bp, Homo sapiens
tgggcccatcactca

SEQ ID NO: 86254 - DNA, 15 bp, Homo sapiens
atgggcccatcactc

SEQ ID NO: 86255 - DNA, 15 bp, Homo sapiens
catgggcccatcact

SEQ ID NO: 86256 - DNA, 15 bp, Homo sapiens
acatgggcccatcac

SEQ ID NO: 86257 - DNA, 15 bp, Homo sapiens
tacatgggcccatca

SEQ ID NO: 86258 - DNA, 15 bp, Homo sapiens
atacatgggcccatc

SEQ ID NO: 86259 - DNA, 15 bp, Homo sapiens
gatacatgggcccat

SEQ ID NO: 86260 - DNA, 15 bp, Homo sapiens
agatacatgggccca

SEQ ID NO: 86261 - DNA, 15 bp, Homo sapiens
cagatacatgggccc

SEQ ID NO: 86262 - DNA, 15 bp, Homo sapiens
ccagatacatgggcc

SEQ ID NO: 86263 - DNA, 15 bp, Homo sapiens
gccagatacatgggc

SEQ ID NO: 86264 - DNA, 15 bp, Homo sapiens
tgccagatacatggg

SEQ ID NO: 86265 - DNA, 15 bp, Homo sapiens
gtgccagatacatgg

SEQ ID NO: 86266 - DNA, 15 bp, Homo sapiens
tgtgccagatacatg

SEQ ID NO: 86267 - DNA, 15 bp, Homo sapiens
atgtgccagatacat

SEQ ID NO: 86268 - DNA, 15 bp, Homo sapiens
gatgtgccagataca

SEQ ID NO: 86269 - DNA, 15 bp, Homo sapiens
agatgtgccagatac

SEQ ID NO: 86270 - DNA, 15 bp, Homo sapiens
cagatgtgccagata

SEQ ID NO: 86271 - DNA, 15 bp, Homo sapiens
gcagatgtgccagat

SEQ ID NO: 86272 - DNA, 15 bp, Homo sapiens
tgcagatgtgccaga

SEQ ID NO: 86273 - DNA, 15 bp, Homo sapiens
ctgcagatgtgccag

SEQ ID NO: 86274 - DNA, 15 bp, Homo sapiens
cctgcagatgtgcca

SEQ ID NO: 86275 - DNA, 15 bp, Homo sapiens
gcctgcagatgtgcc

SEQ ID NO: 86276 - DNA, 15 bp, Homo sapiens
tgcctgcagatgtgc

SEQ ID NO: 86277 - DNA, 15 bp, Homo sapiens
ctgcctgcagatgtg

SEQ ID NO: 86278 - DNA, 15 bp, Homo sapiens
tctgcctgcagatgt

SEQ ID NO: 86279 - DNA, 15 bp, Homo sapiens
ctctgcctgcagatg

SEQ ID NO: 86280 - DNA, 15 bp, Homo sapiens
gctctgcctgcagat

SEQ ID NO: 86281 - DNA, 15 bp, Homo sapiens
cgctctgcctgcaga

SEQ ID NO: 86282 - DNA, 15 bp, Homo sapiens
acgctctgcctgcag

SEQ ID NO: 86283 - DNA, 15 bp, Homo sapiens
cacgctctgcctgca

SEQ ID NO: 86284 - DNA, 15 bp, Homo sapiens
ccacgctctgcctgc

SEQ ID NO: 86285 - DNA, 15 bp, Homo sapiens
accacgctctgcctg

SEQ ID NO: 86286 - DNA, 15 bp, Homo sapiens
aaccacgctctgcct

SEQ ID NO: 86287 - DNA, 15 bp, Homo sapiens
gaaccacgctctgcc

SEQ ID NO: 86288 - DNA, 15 bp, Homo sapiens
agaaccacgctctgc

SEQ ID NO: 86289 - DNA, 15 bp, Homo sapiens
cagaaccacgctctg

SEQ ID NO: 86290 - DNA, 15 bp, Homo sapiens
ccagaaccacgctct

SEQ ID NO: 86291 - DNA, 15 bp, Homo sapiens
gccagaaccacgctc

SEQ ID NO: 86292 - DNA, 15 bp, Homo sapiens
agccagaaccacgct

SEQ ID NO: 86293 - DNA, 15 bp, Homo sapiens
gagccagaaccacgc

SEQ ID NO: 86294 - DNA, 15 bp, Homo sapiens
agagccagaaccacg

SEQ ID NO: 86295 - DNA, 15 bp, Homo sapiens
aagagccagaaccac

SEQ ID NO: 86296 - DNA, 15 bp, Homo sapiens
gaagagccagaacca

SEQ ID NO: 86297 - DNA, 15 bp, Homo sapiens
tgaagagccagaacc

SEQ ID NO: 86298 - DNA, 15 bp, Homo sapiens
ctgaagagccagaac

SEQ ID NO: 86299 - DNA, 15 bp, Homo sapiens
tctgaagagccagaa

SEQ ID NO: 86300 - DNA, 15 bp, Homo sapiens
atctgaagagccaga

SEQ ID NO: 86301 - DNA, 15 bp, Homo sapiens
catctgaagagccag

SEQ ID NO: 86302 - DNA, 15 bp, Homo sapiens
tcatctgaagagcca

SEQ ID NO: 86303 - DNA, 15 bp, Homo sapiens
atcatctgaagagcc

SEQ ID NO: 86304 - DNA, 15 bp, Homo sapiens
catcatctgaagagc

SEQ ID NO: 86305 - DNA, 15 bp, Homo sapiens
gcatcatctgaagag

SEQ ID NO: 86306 - DNA, 15 bp, Homo sapiens
ggcatcatctgaaga

SEQ ID NO: 86307 - DNA, 15 bp, Homo sapiens
cggcatcatctgaag

SEQ ID NO: 86308 - DNA, 15 bp, Homo sapiens
ccggcatcatctgaa

SEQ ID NO: 86309 - DNA, 15 bp, Homo sapiens
accggcatcatctga

SEQ ID NO: 86310 - DNA, 15 bp, Homo sapiens
caccggcatcatctg

SEQ ID NO: 86311 - DNA, 15 bp, Homo sapiens
ccaccggcatcatct

SEQ ID NO: 86312 - DNA, 15 bp, Homo sapiens
tccaccggcatcatc

SEQ ID NO: 86313 - DNA, 15 bp, Homo sapiens
ctccaccggcatcat

SEQ ID NO: 86314 - DNA, 15 bp, Homo sapiens
gctccaccggcatca

SEQ ID NO: 86315 - DNA, 15 bp, Homo sapiens
tgctccaccggcatc

SEQ ID NO: 86316 - DNA, 15 bp, Homo sapiens
gtgctccaccggcat

SEQ ID NO: 86317 - DNA, 15 bp, Homo sapiens
agtgctccaccggca

SEQ ID NO: 86318 - DNA, 15 bp, Homo sapiens
aagtgctccaccggc

SEQ ID NO: 86319 - DNA, 15 bp, Homo sapiens
aaagtgctccaccgg

SEQ ID NO: 86320 - DNA, 15 bp, Homo sapiens
caaagtgctccaccg

SEQ ID NO: 86321 - DNA, 15 bp, Homo sapiens
tcaaagtgctccacc

SEQ ID NO: 86322 - DNA, 15 bp, Homo sapiens
ctcaaagtgctccac

SEQ ID NO: 86323 - DNA, 15 bp, Homo sapiens
cctcaaagtgctcca

SEQ ID NO: 86324 - DNA, 15 bp, Homo sapiens
tcctcaaagtgctcc

SEQ ID NO: 86325 - DNA, 15 bp, Homo sapiens
ctcctcaaagtgctc

SEQ ID NO: 86326 - DNA, 15 bp, Homo sapiens
actcctcaaagtgct

SEQ ID NO: 86327 - DNA, 15 bp, Homo sapiens
gactcctcaaagtgc

SEQ ID NO: 86328 - DNA, 15 bp, Homo sapiens
ggactcctcaaagtg

SEQ ID NO: 86329 - DNA, 15 bp, Homo sapiens
aggactcctcaaagt

SEQ ID NO: 86330 - DNA, 15 bp, Homo sapiens
gaggactcctcaaag

SEQ ID NO: 86331 - DNA, 15 bp, Homo sapiens
tgaggactcctcaaa

SEQ ID NO: 86332 - DNA, 15 bp, Homo sapiens
gtgaggactcctcaa

SEQ ID NO: 86333 - DNA, 15 bp, Homo sapiens
ggtgaggactcctca

SEQ ID NO: 86334 - DNA, 15 bp, Homo sapiens
gggtgaggactcctc

SEQ ID NO: 86335 - DNA, 15 bp, Homo sapiens
ggggtgaggactcct

SEQ ID NO: 86336 - DNA, 15 bp, Homo sapiens
tggggtgaggactcc

SEQ ID NO: 86337 - DNA, 15 bp, Homo sapiens
gtggggtgaggactc

SEQ ID NO: 86338 - DNA, 15 bp, Homo sapiens
ggtggggtgaggact

SEQ ID NO: 86339 - DNA, 15 bp, Homo sapiens
cggtggggtgaggac

SEQ ID NO: 86340 - DNA, 15 bp, Homo sapiens
acggtggggtgagga

SEQ ID NO: 86341 - DNA, 15 bp, Homo sapiens
cacggtggggtgagg

SEQ ID NO: 86342 - DNA, 15 bp, Homo sapiens
tcacggtggggtgag

SEQ ID NO: 86343 - DNA, 15 bp, Homo sapiens
atcacggtggggtga

SEQ ID NO: 86344 - DNA, 15 bp, Homo sapiens
tatcacggtggggtg

SEQ ID NO: 86345 - DNA, 15 bp, Homo sapiens
ttatcacggtggggt

SEQ ID NO: 86346 - DNA, 15 bp, Homo sapiens
gttatcacggtgggg

SEQ ID NO: 86347 - DNA, 15 bp, Homo sapiens
ggttatcacggtggg

SEQ ID NO: 86348 - DNA, 15 bp, Homo sapiens
tggttatcacggtgg

SEQ ID NO: 86349 - DNA, 15 bp, Homo sapiens
ctggttatcacggtg

SEQ ID NO: 86350 - DNA, 15 bp, Homo sapiens
tctggttatcacggt

SEQ ID NO: 86351 - DNA, 15 bp, Homo sapiens
gtctggttatcacgg

SEQ ID NO: 86352 - DNA, 15 bp, Homo sapiens
tgtctggttatcacg

SEQ ID NO: 86353 - DNA, 15 bp, Homo sapiens
atgtctggttatcac

SEQ ID NO: 86354 - DNA, 15 bp, Homo sapiens
aatgtctggttatca

SEQ ID NO: 86355 - DNA, 15 bp, Homo sapiens
taatgtctggttatc

SEQ ID NO: 86356 - DNA, 15 bp, Homo sapiens
ttaatgtctggttat

SEQ ID NO: 86357 - DNA, 15 bp, Homo sapiens
tttaatgtctggtta

SEQ ID NO: 86358 - DNA, 15 bp, Homo sapiens
ttttaatgtctggtt

SEQ ID NO: 86359 - DNA, 15 bp, Homo sapiens
attttaatgtctggt

SEQ ID NO: 86360 - DNA, 15 bp, Homo sapiens
gattttaatgtctgg

SEQ ID NO: 86361 - DNA, 15 bp, Homo sapiens
agattttaatgtctg

SEQ ID NO: 86362 - DNA, 15 bp, Homo sapiens
aagattttaatgtct

SEQ ID NO: 86363 - DNA, 15 bp, Homo sapiens
caagattttaatgtc

SEQ ID NO: 86364 - DNA, 15 bp, Homo sapiens
ccaagattttaatgt

SEQ ID NO: 86365 - DNA, 15 bp, Homo sapiens
cccaagattttaatg

SEQ ID NO: 86366 - DNA, 15 bp, Homo sapiens
ccccaagattttaat

SEQ ID NO: 86367 - DNA, 15 bp, Homo sapiens
gccccaagattttaa

SEQ ID NO: 86368 - DNA, 15 bp, Homo sapiens
agccccaagatttta

SEQ ID NO: 86369 - DNA, 15 bp, Homo sapiens
aagccccaagatttt

SEQ ID NO: 86370 - DNA, 15 bp, Homo sapiens
aaagccccaagattt

SEQ ID NO: 86371 - DNA, 15 bp, Homo sapiens
caaagccccaagatt

SEQ ID NO: 86372 - DNA, 15 bp, Homo sapiens
gcaaagccccaagat

SEQ ID NO: 86373 - DNA, 15 bp, Homo sapiens
tgcaaagccccaaga

SEQ ID NO: 86374 - DNA, 15 bp, Homo sapiens
atgcaaagccccaag

SEQ ID NO: 86375 - DNA, 15 bp, Homo sapiens
gatgcaaagccccaa

SEQ ID NO: 86376 - DNA, 15 bp, Homo sapiens
ggatgcaaagcccca

SEQ ID NO: 86377 - DNA, 15 bp, Homo sapiens
gggatgcaaagcccc

SEQ ID NO: 86378 - DNA, 15 bp, Homo sapiens
tgggatgcaaagccc

SEQ ID NO: 86379 - DNA, 15 bp, Homo sapiens
ctgggatgcaaagcc

SEQ ID NO: 86380 - DNA, 15 bp, Homo sapiens
cctgggatgcaaagc

SEQ ID NO: 86381 - DNA, 15 bp, Homo sapiens
tcctgggatgcaaag

SEQ ID NO: 86382 - DNA, 15 bp, Homo sapiens
atcctgggatgcaaa

SEQ ID NO: 86383 - DNA, 15 bp, Homo sapiens
aatcctgggatgcaa

SEQ ID NO: 86384 - DNA, 15 bp, Homo sapiens
aaatcctgggatgca

SEQ ID NO: 86385 - DNA, 15 bp, Homo sapiens
gaaatcctgggatgc

SEQ ID NO: 86386 - DNA, 15 bp, Homo sapiens
agaaatcctgggatg

SEQ ID NO: 86387 - DNA, 15 bp, Homo sapiens
gagaaatcctgggat

SEQ ID NO: 86388 - DNA, 15 bp, Homo sapiens
agagaaatcctggga

SEQ ID NO: 86389 - DNA, 15 bp, Homo sapiens
cagagaaatcctggg

SEQ ID NO: 86390 - DNA, 15 bp, Homo sapiens
acagagaaatcctgg

SEQ ID NO: 86391 - DNA, 15 bp, Homo sapiens
cacagagaaatcctg

SEQ ID NO: 86392 - DNA, 15 bp, Homo sapiens
tcacagagaaatcct

SEQ ID NO: 86393 - DNA, 15 bp, Homo sapiens
atcacagagaaatcc

SEQ ID NO: 86394 - DNA, 15 bp, Homo sapiens
aatcacagagaaatc

SEQ ID NO: 86395 - DNA, 15 bp, Homo sapiens
gaatcacagagaaat

SEQ ID NO: 86396 - DNA, 15 bp, Homo sapiens
ggaatcacagagaaa

SEQ ID NO: 86397 - DNA, 15 bp, Homo sapiens
aggaatcacagagaa

SEQ ID NO: 86398 - DNA, 15 bp, Homo sapiens
aaggaatcacagaga

SEQ ID NO: 86399 - DNA, 15 bp, Homo sapiens
gaaggaatcacagag

SEQ ID NO: 86400 - DNA, 15 bp, Homo sapiens
agaaggaatcacaga

SEQ ID NO: 86401 - DNA, 15 bp, Homo sapiens
tagaaggaatcacag

SEQ ID NO: 86402 - DNA, 15 bp, Homo sapiens
ctagaaggaatcaca

SEQ ID NO: 86403 - DNA, 15 bp, Homo sapiens
tctagaaggaatcac

SEQ ID NO: 86404 - DNA, 15 bp, Homo sapiens
gtctagaaggaatca

SEQ ID NO: 86405 - DNA, 15 bp, Homo sapiens
agtctagaaggaatc

SEQ ID NO: 86406 - DNA, 15 bp, Homo sapiens
aagtctagaaggaat

SEQ ID NO: 86407 - DNA, 15 bp, Homo sapiens
caagtctagaaggaa

SEQ ID NO: 86408 - DNA, 15 bp, Homo sapiens
acaagtctagaagga

SEQ ID NO: 86409 - DNA, 15 bp, Homo sapiens
cacaagtctagaagg

SEQ ID NO: 86410 - DNA, 15 bp, Homo sapiens
ccacaagtctagaag

SEQ ID NO: 86411 - DNA, 15 bp, Homo sapiens
gccacaagtctagaa

SEQ ID NO: 86412 - DNA, 15 bp, Homo sapiens
tgccacaagtctaga

SEQ ID NO: 86413 - DNA, 15 bp, Homo sapiens
atgccacaagtctag

SEQ ID NO: 86414 - DNA, 15 bp, Homo sapiens
gatgccacaagtcta

SEQ ID NO: 86415 - DNA, 15 bp, Homo sapiens
tgatgccacaagtct

SEQ ID NO: 86416 - DNA, 15 bp, Homo sapiens
atgatgccacaagtc

SEQ ID NO: 86417 - DNA, 15 bp, Homo sapiens
catgatgccacaagt

SEQ ID NO: 86418 - DNA, 15 bp, Homo sapiens
ccatgatgccacaag

SEQ ID NO: 86419 - DNA, 15 bp, Homo sapiens
gccatgatgccacaa

SEQ ID NO: 86420 - DNA, 15 bp, Homo sapiens
tgccatgatgccaca

SEQ ID NO: 86421 - DNA, 15 bp, Homo sapiens
ctgccatgatgccac

SEQ ID NO: 86422 - DNA, 15 bp, Homo sapiens
gctgccatgatgcca

SEQ ID NO: 86423 - DNA, 15 bp, Homo sapiens
tgctgccatgatgcc

SEQ ID NO: 86424 - DNA, 15 bp, Homo sapiens
atgctgccatgatgc

SEQ ID NO: 86425 - DNA, 15 bp, Homo sapiens
gatgctgccatgatg

SEQ ID NO: 86426 - DNA, 15 bp, Homo sapiens
tgatgctgccatgat

SEQ ID NO: 86427 - DNA, 15 bp, Homo sapiens
gtgatgctgccatga

SEQ ID NO: 86428 - DNA, 15 bp, Homo sapiens
agtgatgctgccatg

SEQ ID NO: 86429 - DNA, 15 bp, Homo sapiens
cagtgatgctgccat

SEQ ID NO: 86430 - DNA, 15 bp, Homo sapiens
gcagtgatgctgcca

SEQ ID NO: 86431 - DNA, 15 bp, Homo sapiens
agcagtgatgctgcc

SEQ ID NO: 86432 - DNA, 15 bp, Homo sapiens
cagcagtgatgctgc

SEQ ID NO: 86433 - DNA, 15 bp, Homo sapiens
acagcagtgatgctg

SEQ ID NO: 86434 - DNA, 15 bp, Homo sapiens
tacagcagtgatgct

SEQ ID NO: 86435 - DNA, 15 bp, Homo sapiens
ctacagcagtgatgc

SEQ ID NO: 86436 - DNA, 15 bp, Homo sapiens
tctacagcagtgatg

SEQ ID NO: 86437 - DNA, 15 bp, Homo sapiens
atctacagcagtgat

SEQ ID NO: 86438 - DNA, 15 bp, Homo sapiens
aatctacagcagtga

SEQ ID NO: 86439 - DNA, 15 bp, Homo sapiens
aaatctacagcagtg

SEQ ID NO: 86440 - DNA, 15 bp, Homo sapiens
gaaatctacagcagt

SEQ ID NO: 86441 - DNA, 15 bp, Homo sapiens
agaaatctacagcag

SEQ ID NO: 86442 - DNA, 15 bp, Homo sapiens
tagaaatctacagca

SEQ ID NO: 86443 - DNA, 15 bp, Homo sapiens
ctagaaatctacagc

SEQ ID NO: 86444 - DNA, 15 bp, Homo sapiens
actagaaatctacag

SEQ ID NO: 86445 - DNA, 15 bp, Homo sapiens
gactagaaatctaca

SEQ ID NO: 86446 - DNA, 15 bp, Homo sapiens
tgactagaaatctac

SEQ ID NO: 86447 - DNA, 15 bp, Homo sapiens
gtgactagaaatcta

SEQ ID NO: 86448 - DNA, 15 bp, Homo sapiens
agtgactagaaatct

SEQ ID NO: 86449 - DNA, 15 bp, Homo sapiens
aagtgactagaaatc

SEQ ID NO: 86450 - DNA, 15 bp, Homo sapiens
caagtgactagaaat

SEQ ID NO: 86451 - DNA, 15 bp, Homo sapiens
ccaagtgactagaaa

SEQ ID NO: 86452 - DNA, 15 bp, Homo sapiens
accaagtgactagaa

SEQ ID NO: 86453 - DNA, 15 bp, Homo sapiens
aaccaagtgactaga

SEQ ID NO: 86454 - DNA, 15 bp, Homo sapiens
gaaccaagtgactag

SEQ ID NO: 86455 - DNA, 15 bp, Homo sapiens
agaaccaagtgacta

SEQ ID NO: 86456 - DNA, 15 bp, Homo sapiens
gagaaccaagtgact

SEQ ID NO: 86457 - DNA, 15 bp, Homo sapiens
tgagaaccaagtgac

SEQ ID NO: 86458 - DNA, 15 bp, Homo sapiens
ctgagaaccaagtga

SEQ ID NO: 86459 - DNA, 15 bp, Homo sapiens
cctgagaaccaagtg

SEQ ID NO: 86460 - DNA, 15 bp, Homo sapiens
tcctgagaaccaagt

SEQ ID NO: 86461 - DNA, 15 bp, Homo sapiens
ctcctgagaaccaag

SEQ ID NO: 86462 - DNA, 15 bp, Homo sapiens
gctcctgagaaccaa

SEQ ID NO: 86463 - DNA, 15 bp, Homo sapiens
ggctcctgagaacca

SEQ ID NO: 86464 - DNA, 15 bp, Homo sapiens
cggctcctgagaacc

SEQ ID NO: 86465 - DNA, 15 bp, Homo sapiens
acggctcctgagaac

SEQ ID NO: 86466 - DNA, 15 bp, Homo sapiens
aacggctcctgagaa

SEQ ID NO: 86467 - DNA, 15 bp, Homo sapiens
aaacggctcctgaga

SEQ ID NO: 86468 - DNA, 15 bp, Homo sapiens
taaacggctcctgag

SEQ ID NO: 86469 - DNA, 15 bp, Homo sapiens
ataaacggctcctga

SEQ ID NO: 86470 - DNA, 15 bp, Homo sapiens
aataaacggctcctg

SEQ ID NO: 86471 - DNA, 15 bp, Homo sapiens
aaataaacggctcct

SEQ ID NO: 86472 - DNA, 15 bp, Homo sapiens
taaataaacggctcc

SEQ ID NO: 86473 - DNA, 15 bp, Homo sapiens
ttaaataaacggctc

SEQ ID NO: 86474 - DNA, 15 bp, Homo sapiens
attaaataaacggct

SEQ ID NO: 86475 - DNA, 15 bp, Homo sapiens
cattaaataaacggc

SEQ ID NO: 86476 - DNA, 15 bp, Homo sapiens
ccattaaataaacgg

SEQ ID NO: 86477 - DNA, 15 bp, Homo sapiens
gccattaaataaacg

SEQ ID NO: 86478 - DNA, 15 bp, Homo sapiens
agccattaaataaac

SEQ ID NO: 86479 - DNA, 15 bp, Homo sapiens
aagccattaaataaa

SEQ ID NO: 86480 - DNA, 15 bp, Homo sapiens
gaagccattaaataa

SEQ ID NO: 86481 - DNA, 15 bp, Homo sapiens
tgaagccattaaata

SEQ ID NO: 86482 - DNA, 15 bp, Homo sapiens
gtgaagccattaaat

SEQ ID NO: 86483 - DNA, 15 bp, Homo sapiens
tgtgaagccattaaa

SEQ ID NO: 86484 - DNA, 15 bp, Homo sapiens
atgtgaagccattaa

SEQ ID NO: 86485 - DNA, 15 bp, Homo sapiens
aatgtgaagccatta

SEQ ID NO: 86486 - DNA, 15 bp, Homo sapiens
aaatgtgaagccatt

SEQ ID NO: 86487 - DNA, 15 bp, Homo sapiens
taaatgtgaagccat

SEQ ID NO: 86488 - DNA, 15 bp, Homo sapiens
ttaaatgtgaagcca

SEQ ID NO: 86489 - DNA, 15 bp, Homo sapiens
attaaatgtgaagcc

SEQ ID NO: 86490 - DNA, 15 bp, Homo sapiens
aattaaatgtgaagc

SEQ ID NO: 86491 - DNA, 15 bp, Homo sapiens
aaattaaatgtgaag

SEQ ID NO: 86492 - DNA, 15 bp, Homo sapiens
gaaattaaatgtgaa

SEQ ID NO: 86493 - DNA, 15 bp, Homo sapiens
tgaaattaaatgtga

SEQ ID NO: 86494 - DNA, 15 bp, Homo sapiens
ctgaaattaaatgtg

SEQ ID NO: 86495 - DNA, 15 bp, Homo sapiens
actgaaattaaatgt

SEQ ID NO: 86496 - DNA, 15 bp, Homo sapiens
cactgaaattaaatg

SEQ ID NO: 86497 - DNA, 15 bp, Homo sapiens
tcactgaaattaaat

SEQ ID NO: 86498 - DNA, 15 bp, Homo sapiens
ttcactgaaattaaa

SEQ ID NO: 86499 - DNA, 15 bp, Homo sapiens
gttcactgaaattaa

SEQ ID NO: 86500 - DNA, 15 bp, Homo sapiens
tgttcactgaaatta

SEQ ID NO: 86501 - DNA, 15 bp, Homo sapiens
ttgttcactgaaatt

SEQ ID NO: 86502 - DNA, 15 bp, Homo sapiens
cttgttcactgaaat

SEQ ID NO: 86503 - DNA, 15 bp, Homo sapiens
ccttgttcactgaaa

SEQ ID NO: 86504 - DNA, 15 bp, Homo sapiens
accttgttcactgaa

SEQ ID NO: 86505 - DNA, 15 bp, Homo sapiens
taccttgttcactga

SEQ ID NO: 86506 - DNA, 15 bp, Homo sapiens
ctaccttgttcactg

SEQ ID NO: 86507 - DNA, 15 bp, Homo sapiens
actaccttgttcact

SEQ ID NO: 86508 - DNA, 15 bp, Homo sapiens
cactaccttgttcac

SEQ ID NO: 86509 - DNA, 15 bp, Homo sapiens
ccactaccttgttca

SEQ ID NO: 86510 - DNA, 15 bp, Homo sapiens
gccactaccttgttc

SEQ ID NO: 86511 - DNA, 15 bp, Homo sapiens
tgccactaccttgtt

SEQ ID NO: 86512 - DNA, 15 bp, Homo sapiens
atgccactaccttgt

SEQ ID NO: 86513 - DNA, 15 bp, Homo sapiens
aatgccactaccttg

SEQ ID NO: 86514 - DNA, 15 bp, Homo sapiens
caatgccactacctt

SEQ ID NO: 86515 - DNA, 15 bp, Homo sapiens
gcaatgccactacct

SEQ ID NO: 86516 - DNA, 15 bp, Homo sapiens
agcaatgccactacc

SEQ ID NO: 86517 - DNA, 15 bp, Homo sapiens
gagcaatgccactac

SEQ ID NO: 86518 - DNA, 15 bp, Homo sapiens
agagcaatgccacta

SEQ ID NO: 86519 - DNA, 15 bp, Homo sapiens
aagagcaatgccact

SEQ ID NO: 86520 - DNA, 15 bp, Homo sapiens
gaagagcaatgccac

SEQ ID NO: 86521 - DNA, 15 bp, Homo sapiens
tgaagagcaatgcca

SEQ ID NO: 86522 - DNA, 15 bp, Homo sapiens
gtgaagagcaatgcc

SEQ ID NO: 86523 - DNA, 15 bp, Homo sapiens
tgtgaagagcaatgc

SEQ ID NO: 86524 - DNA, 15 bp, Homo sapiens
ctgtgaagagcaatg

SEQ ID NO: 86525 - DNA, 15 bp, Homo sapiens
cctgtgaagagcaat

SEQ ID NO: 86526 - DNA, 15 bp, Homo sapiens
ccctgtgaagagcaa

SEQ ID NO: 86527 - DNA, 15 bp, Homo sapiens
gccctgtgaagagca

SEQ ID NO: 86528 - DNA, 15 bp, Homo sapiens
ggccctgtgaagagc

SEQ ID NO: 86529 - DNA, 15 bp, Homo sapiens
cggccctgtgaagag

SEQ ID NO: 86530 - DNA, 15 bp, Homo sapiens
acggccctgtgaaga

SEQ ID NO: 86531 - DNA, 15 bp, Homo sapiens
gacggccctgtgaag

SEQ ID NO: 86532 - DNA, 15 bp, Homo sapiens
ggacggccctgtgaa

SEQ ID NO: 86533 - DNA, 15 bp, Homo sapiens
aggacggccctgtga

SEQ ID NO: 86534 - DNA, 15 bp, Homo sapiens
caggacggccctgtg

SEQ ID NO: 86535 - DNA, 15 bp, Homo sapiens
acaggacggccctgt

SEQ ID NO: 86536 - DNA, 15 bp, Homo sapiens
aacaggacggccctg

SEQ ID NO: 86537 - DNA, 15 bp, Homo sapiens
caacaggacggccct

SEQ ID NO: 86538 - DNA, 15 bp, Homo sapiens
acaacaggacggccc

SEQ ID NO: 86539 - DNA, 15 bp, Homo sapiens
gacaacaggacggcc

SEQ ID NO: 86540 - DNA, 15 bp, Homo sapiens
ggacaacaggacggc

SEQ ID NO: 86541 - DNA, 15 bp, Homo sapiens
tggacaacaggacgg

SEQ ID NO: 86542 - DNA, 15 bp, Homo sapiens
gtggacaacaggacg

SEQ ID NO: 86543 - DNA, 15 bp, Homo sapiens
tgtggacaacaggac

SEQ ID NO: 86544 - DNA, 15 bp, Homo sapiens
ctgtggacaacagga

SEQ ID NO: 86545 - DNA, 15 bp, Homo sapiens
cctgtggacaacagg

SEQ ID NO: 86546 - DNA, 15 bp, Homo sapiens
acctgtggacaacag

SEQ ID NO: 86547 - DNA, 15 bp, Homo sapiens
aacctgtggacaaca

SEQ ID NO: 86548 - DNA, 15 bp, Homo sapiens
gaacctgtggacaac

SEQ ID NO: 86549 - DNA, 15 bp, Homo sapiens
ggaacctgtggacaa

SEQ ID NO: 86550 - DNA, 15 bp, Homo sapiens
tggaacctgtggaca

SEQ ID NO: 86551 - DNA, 15 bp, Homo sapiens
ctggaacctgtggac

SEQ ID NO: 86552 - DNA, 15 bp, Homo sapiens
tctggaacctgtgga

SEQ ID NO: 86553 - DNA, 15 bp, Homo sapiens
atctggaacctgtgg

SEQ ID NO: 86554 - DNA, 15 bp, Homo sapiens
aatctggaacctgtg

SEQ ID NO: 86555 - DNA, 15 bp, Homo sapiens
caatctggaacctgt

SEQ ID NO: 86556 - DNA, 15 bp, Homo sapiens
tcaatctggaacctg

SEQ ID NO: 86557 - DNA, 15 bp, Homo sapiens
gtcaatctggaacct

SEQ ID NO: 86558 - DNA, 15 bp, Homo sapiens
agtcaatctggaacc

SEQ ID NO: 86559 - DNA, 15 bp, Homo sapiens
cagtcaatctggaac

SEQ ID NO: 86560 - DNA, 15 bp, Homo sapiens
acagtcaatctggaa

SEQ ID NO: 86561 - DNA, 15 bp, Homo sapiens
aacagtcaatctgga

SEQ ID NO: 86562 - DNA, 15 bp, Homo sapiens
caacagtcaatctgg

SEQ ID NO: 86563 - DNA, 15 bp, Homo sapiens
gcaacagtcaatctg

SEQ ID NO: 86564 - DNA, 15 bp, Homo sapiens
ggcaacagtcaatct

SEQ ID NO: 86565 - DNA, 15 bp, Homo sapiens
gggcaacagtcaatc

SEQ ID NO: 86566 - DNA, 15 bp, Homo sapiens
ggggcaacagtcaat

SEQ ID NO: 86567 - DNA, 15 bp, Homo sapiens
aggggcaacagtcaa

SEQ ID NO: 86568 - DNA, 15 bp, Homo sapiens
aaggggcaacagtca

SEQ ID NO: 86569 - DNA, 15 bp, Homo sapiens
taaggggcaacagtc

SEQ ID NO: 86570 - DNA, 15 bp, Homo sapiens
ataaggggcaacagt

SEQ ID NO: 86571 - DNA, 15 bp, Homo sapiens
gataaggggcaacag

SEQ ID NO: 86572 - DNA, 15 bp, Homo sapiens
agataaggggcaaca

SEQ ID NO: 86573 - DNA, 15 bp, Homo sapiens
tagataaggggcaac

SEQ ID NO: 86574 - DNA, 15 bp, Homo sapiens
atagataaggggcaa

SEQ ID NO: 86575 - DNA, 15 bp, Homo sapiens
catagataaggggca

SEQ ID NO: 86576 - DNA, 15 bp, Homo sapiens
acatagataaggggc

SEQ ID NO: 86577 - DNA, 15 bp, Homo sapiens
cacatagataagggg

SEQ ID NO: 86578 - DNA, 15 bp, Homo sapiens
tcacatagataaggg

SEQ ID NO: 86579 - DNA, 15 bp, Homo sapiens
ttcacatagataagg

SEQ ID NO: 86580 - DNA, 15 bp, Homo sapiens
gttcacatagataag

SEQ ID NO: 86581 - DNA, 15 bp, Homo sapiens
tgttcacatagataa

SEQ ID NO: 86582 - DNA, 15 bp, Homo sapiens
ctgttcacatagata

SEQ ID NO: 86583 - DNA, 15 bp, Homo sapiens
actgttcacatagat

SEQ ID NO: 86584 - DNA, 15 bp, Homo sapiens
gactgttcacataga

SEQ ID NO: 86585 - DNA, 15 bp, Homo sapiens
tgactgttcacatag

SEQ ID NO: 86586 - DNA, 15 bp, Homo sapiens
gtgactgttcacata

SEQ ID NO: 86587 - DNA, 15 bp, Homo sapiens
tgtgactgttcacat

SEQ ID NO: 86588 - DNA, 15 bp, Homo sapiens
ttgtgactgttcaca

SEQ ID NO: 86589 - DNA, 15 bp, Homo sapiens
gttgtgactgttcac

SEQ ID NO: 86590 - DNA, 15 bp, Homo sapiens
agttgtgactgttca

SEQ ID NO: 86591 - DNA, 15 bp, Homo sapiens
cagttgtgactgttc

SEQ ID NO: 86592 - DNA, 15 bp, Homo sapiens
tcagttgtgactgtt

SEQ ID NO: 86593 - DNA, 15 bp, Homo sapiens
ctcagttgtgactgt

SEQ ID NO: 86594 - DNA, 15 bp, Homo sapiens
cctcagttgtgactg

SEQ ID NO: 86595 - DNA, 15 bp, Homo sapiens
gcctcagttgtgact

SEQ ID NO: 86596 - DNA, 15 bp, Homo sapiens
tgcctcagttgtgac

SEQ ID NO: 86597 - DNA, 15 bp, Homo sapiens
ctgcctcagttgtga

SEQ ID NO: 86598 - DNA, 15 bp, Homo sapiens
cctgcctcagttgtg

SEQ ID NO: 86599 - DNA, 15 bp, Homo sapiens
acctgcctcagttgt

SEQ ID NO: 86600 - DNA, 15 bp, Homo sapiens
aacctgcctcagttg

SEQ ID NO: 86601 - DNA, 15 bp, Homo sapiens
aaacctgcctcagtt

SEQ ID NO: 86602 - DNA, 15 bp, Homo sapiens
gaaacctgcctcagt

SEQ ID NO: 86603 - DNA, 15 bp, Homo sapiens
agaaacctgcctcag

SEQ ID NO: 86604 - DNA, 15 bp, Homo sapiens
cagaaacctgcctca

SEQ ID NO: 86605 - DNA, 15 bp, Homo sapiens
acagaaacctgcctc

SEQ ID NO: 86606 - DNA, 15 bp, Homo sapiens
aacagaaacctgcct

SEQ ID NO: 86607 - DNA, 15 bp, Homo sapiens
caacagaaacctgcc

SEQ ID NO: 86608 - DNA, 15 bp, Homo sapiens
acaacagaaacctgc

SEQ ID NO: 86609 - DNA, 15 bp, Homo sapiens
aacaacagaaacctg

SEQ ID NO: 86610 - DNA, 15 bp, Homo sapiens
aaacaacagaaacct

SEQ ID NO: 86611 - DNA, 15 bp, Homo sapiens
taaacaacagaaacc

SEQ ID NO: 86612 - DNA, 15 bp, Homo sapiens
gtaaacaacagaaac

SEQ ID NO: 86613 - DNA, 15 bp, Homo sapiens
tgtaaacaacagaaa

SEQ ID NO: 86614 - DNA, 15 bp, Homo sapiens
ctgtaaacaacagaa

SEQ ID NO: 86615 - DNA, 15 bp, Homo sapiens
cctgtaaacaacaga

SEQ ID NO: 86616 - DNA, 15 bp, Homo sapiens
tcctgtaaacaacag

SEQ ID NO: 86617 - DNA, 15 bp, Homo sapiens
gtcctgtaaacaaca

SEQ ID NO: 86618 - DNA, 15 bp, Homo sapiens
tgtcctgtaaacaac

SEQ ID NO: 86619 - DNA, 15 bp, Homo sapiens
ctgtcctgtaaacaa

SEQ ID NO: 86620 - DNA, 15 bp, Homo sapiens
actgtcctgtaaaca

SEQ ID NO: 86621 - DNA, 15 bp, Homo sapiens
aactgtcctgtaaac

SEQ ID NO: 86622 - DNA, 15 bp, Homo sapiens
gaactgtcctgtaaa

SEQ ID NO: 86623 - DNA, 15 bp, Homo sapiens
agaactgtcctgtaa

SEQ ID NO: 86624 - DNA, 15 bp, Homo sapiens
cagaactgtcctgta

SEQ ID NO: 86625 - DNA, 15 bp, Homo sapiens
gcagaactgtcctgt

SEQ ID NO: 86626 - DNA, 15 bp, Homo sapiens
tgcagaactgtcctg

SEQ ID NO: 86627 - DNA, 15 bp, Homo sapiens
ctgcagaactgtcct

SEQ ID NO: 86628 - DNA, 15 bp, Homo sapiens
tctgcagaactgtcc

SEQ ID NO: 86629 - DNA, 15 bp, Homo sapiens
atctgcagaactgtc

SEQ ID NO: 86630 - DNA, 15 bp, Homo sapiens
gatctgcagaactgt

SEQ ID NO: 86631 - DNA, 15 bp, Homo sapiens
cgatctgcagaactg

SEQ ID NO: 86632 - DNA, 15 bp, Homo sapiens
tcgatctgcagaact

SEQ ID NO: 86633 - DNA, 15 bp, Homo sapiens
atcgatctgcagaac

SEQ ID NO: 86634 - DNA, 15 bp, Homo sapiens
aatcgatctgcagaa

SEQ ID NO: 86635 - DNA, 15 bp, Homo sapiens
aaatcgatctgcaga

SEQ ID NO: 86636 - DNA, 15 bp, Homo sapiens
gaaatcgatctgcag

SEQ ID NO: 86637 - DNA, 15 bp, Homo sapiens
agaaatcgatctgca

SEQ ID NO: 86638 - DNA, 15 bp, Homo sapiens
gagaaatcgatctgc

SEQ ID NO: 86639 - DNA, 15 bp, Homo sapiens
tgagaaatcgatctg

SEQ ID NO: 86640 - DNA, 15 bp, Homo sapiens
ttgagaaatcgatct

SEQ ID NO: 86641 - DNA, 15 bp, Homo sapiens
gttgagaaatcgatc

SEQ ID NO: 86642 - DNA, 15 bp, Homo sapiens
tgttgagaaatcgat

SEQ ID NO: 86643 - DNA, 15 bp, Homo sapiens
ctgttgagaaatcga

SEQ ID NO: 86644 - DNA, 15 bp, Homo sapiens
gctgttgagaaatcg

SEQ ID NO: 86645 - DNA, 15 bp, Homo sapiens
agctgttgagaaatc

SEQ ID NO: 86646 - DNA, 15 bp, Homo sapiens
aagctgttgagaaat

SEQ ID NO: 86647 - DNA, 15 bp, Homo sapiens
caagctgttgagaaa

SEQ ID NO: 86648 - DNA, 15 bp, Homo sapiens
ccaagctgttgagaa

SEQ ID NO: 86649 - DNA, 15 bp, Homo sapiens
cccaagctgttgaga

SEQ ID NO: 86650 - DNA, 15 bp, Homo sapiens
tcccaagctgttgag

SEQ ID NO: 86651 - DNA, 15 bp, Homo sapiens
ttcccaagctgttga

SEQ ID NO: 86652 - DNA, 15 bp, Homo sapiens
cttcccaagctgttg

SEQ ID NO: 86653 - DNA, 15 bp, Homo sapiens
tcttcccaagctgtt

SEQ ID NO: 86654 - DNA, 15 bp, Homo sapiens
atcttcccaagctgt

SEQ ID NO: 86655 - DNA, 15 bp, Homo sapiens
aatcttcccaagctg

SEQ ID NO: 86656 - DNA, 15 bp, Homo sapiens
aaatcttcccaagct

SEQ ID NO: 86657 - DNA, 15 bp, Homo sapiens
taaatcttcccaagc

SEQ ID NO: 86658 - DNA, 15 bp, Homo sapiens
ataaatcttcccaag

SEQ ID NO: 86659 - DNA, 15 bp, Homo sapiens
cataaatcttcccaa

SEQ ID NO: 86660 - DNA, 15 bp, Homo sapiens
tcataaatcttccca

SEQ ID NO: 86661 - DNA, 15 bp, Homo sapiens
gtcataaatcttccc

SEQ ID NO: 86662 - DNA, 15 bp, Homo sapiens
tgtcataaatcttcc

SEQ ID NO: 86663 - DNA, 15 bp, Homo sapiens
ctgtcataaatcttc

SEQ ID NO: 86664 - DNA, 15 bp, Homo sapiens
cctgtcataaatctt

SEQ ID NO: 86665 - DNA, 15 bp, Homo sapiens
tcctgtcataaatct

SEQ ID NO: 86666 - DNA, 15 bp, Homo sapiens
gtcctgtcataaatc

SEQ ID NO: 86667 - DNA, 15 bp, Homo sapiens
agtcctgtcataaat

SEQ ID NO: 86668 - DNA, 15 bp, Homo sapiens
cagtcctgtcataaa

SEQ ID NO: 86669 - DNA, 15 bp, Homo sapiens
ccagtcctgtcataa

SEQ ID NO: 86670 - DNA, 15 bp, Homo sapiens
tccagtcctgtcata

SEQ ID NO: 86671 - DNA, 15 bp, Homo sapiens
gtccagtcctgtcat

SEQ ID NO: 86672 - DNA, 15 bp, Homo sapiens
tgtccagtcctgtca

SEQ ID NO: 86673 - DNA, 15 bp, Homo sapiens
gtgtccagtcctgtc

SEQ ID NO: 86674 - DNA, 15 bp, Homo sapiens
ggtgtccagtcctgt

SEQ ID NO: 86675 - DNA, 15 bp, Homo sapiens
tggtgtccagtcctg

SEQ ID NO: 86676 - DNA, 15 bp, Homo sapiens
ttggtgtccagtcct

SEQ ID NO: 86677 - DNA, 15 bp, Homo sapiens
tttggtgtccagtcc

SEQ ID NO: 86678 - DNA, 15 bp, Homo sapiens
ttttggtgtccagtc

SEQ ID NO: 86679 - DNA, 15 bp, Homo sapiens
tttttggtgtccagt

SEQ ID NO: 86680 - DNA, 15 bp, Homo sapiens
atttttggtgtccag

SEQ ID NO: 86681 - DNA, 15 bp, Homo sapiens
tatttttggtgtcca

SEQ ID NO: 86682 - DNA, 15 bp, Homo sapiens
ttatttttggtgtcc

SEQ ID NO: 86683 - DNA, 15 bp, Homo sapiens
attatttttggtgtc

SEQ ID NO: 86684 - DNA, 15 bp, Homo sapiens
cattatttttggtgt

SEQ ID NO: 86685 - DNA, 15 bp, Homo sapiens
acattatttttggtg

SEQ ID NO: 86686 - DNA, 15 bp, Homo sapiens
gacattatttttggt

SEQ ID NO: 86687 - DNA, 15 bp, Homo sapiens
tgacattatttttgg

SEQ ID NO: 86688 - DNA, 15 bp, Homo sapiens
ttgacattatttttg

SEQ ID NO: 86689 - DNA, 15 bp, Homo sapiens
cttgacattattttt

SEQ ID NO: 86690 - DNA, 15 bp, Homo sapiens
ccttgacattatttt

SEQ ID NO: 86691 - DNA, 15 bp, Homo sapiens
accttgacattattt

SEQ ID NO: 86692 - DNA, 15 bp, Homo sapiens
taccttgacattatt

SEQ ID NO: 86693 - DNA, 15 bp, Homo sapiens
ttaccttgacattat

SEQ ID NO: 86694 - DNA, 15 bp, Homo sapiens
tttaccttgacatta

SEQ ID NO: 86695 - DNA, 15 bp, Homo sapiens
gtttaccttgacatt

SEQ ID NO: 86696 - DNA, 15 bp, Homo sapiens
ggtttaccttgacat

SEQ ID NO: 86697 - DNA, 15 bp, Homo sapiens
cggtttaccttgaca

SEQ ID NO: 86698 - DNA, 15 bp, Homo sapiens
gcggtttaccttgac

SEQ ID NO: 86699 - DNA, 15 bp, Homo sapiens
agcggtttaccttga

SEQ ID NO: 86700 - DNA, 15 bp, Homo sapiens
cagcggtttaccttg

SEQ ID NO: 86701 - DNA, 15 bp, Homo sapiens
acagcggtttacctt

SEQ ID NO: 86702 - DNA, 15 bp, Homo sapiens
gacagcggtttacct

SEQ ID NO: 86703 - DNA, 15 bp, Homo sapiens
agacagcggtttacc

SEQ ID NO: 86704 - DNA, 15 bp, Homo sapiens
aagacagcggtttac

SEQ ID NO: 86705 - DNA, 15 bp, Homo sapiens
aaagacagcggttta

SEQ ID NO: 86706 - DNA, 15 bp, Homo sapiens
caaagacagcggttt

SEQ ID NO: 86707 - DNA, 15 bp, Homo sapiens
acaaagacagcggtt

SEQ ID NO: 86708 - DNA, 15 bp, Homo sapiens
aacaaagacagcggt

SEQ ID NO: 86709 - DNA, 15 bp, Homo sapiens
gaacaaagacagcgg

SEQ ID NO: 86710 - DNA, 15 bp, Homo sapiens
agaacaaagacagcg

SEQ ID NO: 86711 - DNA, 15 bp, Homo sapiens
tagaacaaagacagc

SEQ ID NO: 86712 - DNA, 15 bp, Homo sapiens
ctagaacaaagacag

SEQ ID NO: 86713 - DNA, 15 bp, Homo sapiens
actagaacaaagaca

SEQ ID NO: 86714 - DNA, 15 bp, Homo sapiens
tactagaacaaagac

SEQ ID NO: 86715 - DNA, 15 bp, Homo sapiens
ctactagaacaaaga

SEQ ID NO: 86716 - DNA, 15 bp, Homo sapiens
gctactagaacaaag

SEQ ID NO: 86717 - DNA, 15 bp, Homo sapiens
agctactagaacaaa

SEQ ID NO: 86718 - DNA, 15 bp, Homo sapiens
aagctactagaacaa

SEQ ID NO: 86719 - DNA, 15 bp, Homo sapiens
aaagctactagaaca

SEQ ID NO: 86720 - DNA, 15 bp, Homo sapiens
aaaagctactagaac

SEQ ID NO: 86721 - DNA, 15 bp, Homo sapiens
aaaaagctactagaa

SEQ ID NO: 86722 - DNA, 15 bp, Homo sapiens
caaaaagctactaga

SEQ ID NO: 86723 - DNA, 15 bp, Homo sapiens
tcaaaaagctactag

SEQ ID NO: 86724 - DNA, 15 bp, Homo sapiens
atcaaaaagctacta

SEQ ID NO: 86725 - DNA, 15 bp, Homo sapiens
catcaaaaagctact

SEQ ID NO: 86726 - DNA, 15 bp, Homo sapiens
tcatcaaaaagctac

SEQ ID NO: 86727 - DNA, 15 bp, Homo sapiens
ttcatcaaaaagcta

SEQ ID NO: 86728 - DNA, 15 bp, Homo sapiens
gttcatcaaaaagct

SEQ ID NO: 86729 - DNA, 15 bp, Homo sapiens
tgttcatcaaaaagc

SEQ ID NO: 86730 - DNA, 15 bp, Homo sapiens
ttgttcatcaaaaag

SEQ ID NO: 86731 - DNA, 15 bp, Homo sapiens
attgttcatcaaaaa

SEQ ID NO: 86732 - DNA, 15 bp, Homo sapiens
tattgttcatcaaaa

SEQ ID NO: 86733 - DNA, 15 bp, Homo sapiens
ttattgttcatcaaa

SEQ ID NO: 86734 - DNA, 15 bp, Homo sapiens
attattgttcatcaa

SEQ ID NO: 86735 - DNA, 15 bp, Homo sapiens
gattattgttcatca

SEQ ID NO: 86736 - DNA, 15 bp, Homo sapiens
ggattattgttcatc

SEQ ID NO: 86737 - DNA, 15 bp, Homo sapiens
aggattattgttcat

SEQ ID NO: 86738 - DNA, 15 bp, Homo sapiens
aaggattattgttca

SEQ ID NO: 86739 - DNA, 15 bp, Homo sapiens
taaggattattgttc

SEQ ID NO: 86740 - DNA, 15 bp, Homo sapiens
ataaggattattgtt

SEQ ID NO: 86741 - DNA, 15 bp, Homo sapiens
cataaggattattgt

SEQ ID NO: 86742 - DNA, 15 bp, Homo sapiens
acataaggattattg

SEQ ID NO: 86743 - DNA, 15 bp, Homo sapiens
aacataaggattatt

SEQ ID NO: 86744 - DNA, 15 bp, Homo sapiens
aaacataaggattat

SEQ ID NO: 86745 - DNA, 15 bp, Homo sapiens
gaaacataaggatta

SEQ ID NO: 86746 - DNA, 15 bp, Homo sapiens
ggaaacataaggatt

SEQ ID NO: 86747 - DNA, 15 bp, Homo sapiens
aggaaacataaggat

SEQ ID NO: 86748 - DNA, 15 bp, Homo sapiens
caggaaacataagga

SEQ ID NO: 86749 - DNA, 15 bp, Homo sapiens
ccaggaaacataagg

SEQ ID NO: 86750 - DNA, 15 bp, Homo sapiens
tccaggaaacataag

SEQ ID NO: 86751 - DNA, 15 bp, Homo sapiens
ctccaggaaacataa

SEQ ID NO: 86752 - DNA, 15 bp, Homo sapiens
actccaggaaacata

SEQ ID NO: 86753 - DNA, 15 bp, Homo sapiens
tactccaggaaacat

SEQ ID NO: 86754 - DNA, 15 bp, Homo sapiens
gtactccaggaaaca

SEQ ID NO: 86755 - DNA, 15 bp, Homo sapiens
agtactccaggaaac

SEQ ID NO: 86756 - DNA, 15 bp, Homo sapiens
aagtactccaggaaa

SEQ ID NO: 86757 - DNA, 15 bp, Homo sapiens
aaagtactccaggaa

SEQ ID NO: 86758 - DNA, 15 bp, Homo sapiens
gaaagtactccagga

SEQ ID NO: 86759 - DNA, 15 bp, Homo sapiens
tgaaagtactccagg

SEQ ID NO: 86760 - DNA, 15 bp, Homo sapiens
ttgaaagtactccag

SEQ ID NO: 86761 - DNA, 15 bp, Homo sapiens
gttgaaagtactcca

SEQ ID NO: 86762 - DNA, 15 bp, Homo sapiens
agttgaaagtactcc

SEQ ID NO: 86763 - DNA, 15 bp, Homo sapiens
gagttgaaagtactc

SEQ ID NO: 86764 - DNA, 15 bp, Homo sapiens
tgagttgaaagtact

SEQ ID NO: 86765 - DNA, 15 bp, Homo sapiens
atgagttgaaagtac

SEQ ID NO: 86766 - DNA, 15 bp, Homo sapiens
catgagttgaaagta

SEQ ID NO: 86767 - DNA, 15 bp, Homo sapiens
ccatgagttgaaagt

SEQ ID NO: 86768 - DNA, 15 bp, Homo sapiens
accatgagttgaaag

SEQ ID NO: 86769 - DNA, 15 bp, Homo sapiens
taccatgagttgaaa

SEQ ID NO: 86770 - DNA, 15 bp, Homo sapiens
ttaccatgagttgaa

SEQ ID NO: 86771 - DNA, 15 bp, Homo sapiens
tttaccatgagttga

SEQ ID NO: 86772 - DNA, 15 bp, Homo sapiens
ctttaccatgagttg

SEQ ID NO: 86773 - DNA, 15 bp, Homo sapiens
actttaccatgagtt

SEQ ID NO: 86774 - DNA, 15 bp, Homo sapiens
aactttaccatgagt

SEQ ID NO: 86775 - DNA, 15 bp, Homo sapiens
caactttaccatgag

SEQ ID NO: 86776 - DNA, 15 bp, Homo sapiens
ccaactttaccatga

SEQ ID NO: 86777 - DNA, 15 bp, Homo sapiens
gccaactttaccatg

SEQ ID NO: 86778 - DNA, 15 bp, Homo sapiens
tgccaactttaccat

SEQ ID NO: 86779 - DNA, 15 bp, Homo sapiens
ctgccaactttacca

SEQ ID NO: 86780 - DNA, 15 bp, Homo sapiens
cctgccaactttacc

SEQ ID NO: 86781 - DNA, 15 bp, Homo sapiens
ccctgccaactttac

SEQ ID NO: 86782 - DNA, 15 bp, Homo sapiens
cccctgccaacttta

SEQ ID NO: 86783 - DNA, 15 bp, Homo sapiens
gcccctgccaacttt

SEQ ID NO: 86784 - DNA, 15 bp, Homo sapiens
tgcccctgccaactt

SEQ ID NO: 86785 - DNA, 15 bp, Homo sapiens
atgcccctgccaact

SEQ ID NO: 86786 - DNA, 15 bp, Homo sapiens
aatgcccctgccaac

SEQ ID NO: 86787 - DNA, 15 bp, Homo sapiens
gaatgcccctgccaa

SEQ ID NO: 86788 - DNA, 15 bp, Homo sapiens
tgaatgcccctgcca

SEQ ID NO: 86789 - DNA, 15 bp, Homo sapiens
gtgaatgcccctgcc

SEQ ID NO: 86790 - DNA, 15 bp, Homo sapiens
tgtgaatgcccctgc

SEQ ID NO: 86791 - DNA, 15 bp, Homo sapiens
ttgtgaatgcccctg

SEQ ID NO: 86792 - DNA, 15 bp, Homo sapiens
gttgtgaatgcccct

SEQ ID NO: 86793 - DNA, 15 bp, Homo sapiens
tgttgtgaatgcccc

SEQ ID NO: 86794 - DNA, 15 bp, Homo sapiens
ctgttgtgaatgccc

SEQ ID NO: 86795 - DNA, 15 bp, Homo sapiens
tctgttgtgaatgcc

SEQ ID NO: 86796 - DNA, 15 bp, Homo sapiens
ttctgttgtgaatgc

SEQ ID NO: 86797 - DNA, 15 bp, Homo sapiens
tttctgttgtgaatg

SEQ ID NO: 86798 - DNA, 15 bp, Homo sapiens
ttttctgttgtgaat

SEQ ID NO: 86799 - DNA, 15 bp, Homo sapiens
cttttctgttgtgaa

SEQ ID NO: 86800 - DNA, 15 bp, Homo sapiens
tcttttctgttgtga

SEQ ID NO: 86801 - DNA, 15 bp, Homo sapiens
ctcttttctgttgtg

SEQ ID NO: 86802 - DNA, 15 bp, Homo sapiens
gctcttttctgttgt

SEQ ID NO: 86803 - DNA, 15 bp, Homo sapiens
tgctcttttctgttg

SEQ ID NO: 86804 - DNA, 15 bp, Homo sapiens
ttgctcttttctgtt

SEQ ID NO: 86805 - DNA, 15 bp, Homo sapiens
tttgctcttttctgt

SEQ ID NO: 86806 - DNA, 15 bp, Homo sapiens
gtttgctcttttctg

SEQ ID NO: 86807 - DNA, 15 bp, Homo sapiens
agtttgctcttttct

SEQ ID NO: 86808 - DNA, 15 bp, Homo sapiens
tagtttgctcttttc

SEQ ID NO: 86809 - DNA, 15 bp, Homo sapiens
atagtttgctctttt

SEQ ID NO: 86810 - DNA, 15 bp, Homo sapiens
aatagtttgctcttt

SEQ ID NO: 86811 - DNA, 15 bp, Homo sapiens
taatagtttgctctt

SEQ ID NO: 86812 - DNA, 15 bp, Homo sapiens
ttaatagtttgctct

SEQ ID NO: 86813 - DNA, 15 bp, Homo sapiens
gttaatagtttgctc

SEQ ID NO: 86814 - DNA, 15 bp, Homo sapiens
agttaatagtttgct

SEQ ID NO: 86815 - DNA, 15 bp, Homo sapiens
aagttaatagtttgc

SEQ ID NO: 86816 - DNA, 15 bp, Homo sapiens
aaagttaatagtttg

SEQ ID NO: 86817 - DNA, 15 bp, Homo sapiens
taaagttaatagttt

SEQ ID NO: 86818 - DNA, 15 bp, Homo sapiens
gtaaagttaatagtt

SEQ ID NO: 86819 - DNA, 15 bp, Homo sapiens
ggtaaagttaatagt

SEQ ID NO: 86820 - DNA, 15 bp, Homo sapiens
tggtaaagttaatag

SEQ ID NO: 86821 - DNA, 15 bp, Homo sapiens
ctggtaaagttaata

SEQ ID NO: 86822 - DNA, 15 bp, Homo sapiens
actggtaaagttaat

SEQ ID NO: 86823 - DNA, 15 bp, Homo sapiens
cactggtaaagttaa

SEQ ID NO: 86824 - DNA, 15 bp, Homo sapiens
tcactggtaaagtta

SEQ ID NO: 86825 - DNA, 15 bp, Homo sapiens
ctcactggtaaagtt

SEQ ID NO: 86826 - DNA, 15 bp, Homo sapiens
cctcactggtaaagt

SEQ ID NO: 86827 - DNA, 15 bp, Homo sapiens
gcctcactggtaaag

SEQ ID NO: 86828 - DNA, 15 bp, Homo sapiens
tgcctcactggtaaa

SEQ ID NO: 86829 - DNA, 15 bp, Homo sapiens
ctgcctcactggtaa

SEQ ID NO: 86830 - DNA, 15 bp, Homo sapiens
actgcctcactggta

SEQ ID NO: 86831 - DNA, 15 bp, Homo sapiens
tactgcctcactggt

SEQ ID NO: 86832 - DNA, 15 bp, Homo sapiens
gtactgcctcactgg

SEQ ID NO: 86833 - DNA, 15 bp, Homo sapiens
cgtactgcctcactg

SEQ ID NO: 86834 - DNA, 15 bp, Homo sapiens
ccgtactgcctcact

SEQ ID NO: 86835 - DNA, 15 bp, Homo sapiens
accgtactgcctcac

SEQ ID NO: 86836 - DNA, 15 bp, Homo sapiens
caccgtactgcctca

SEQ ID NO: 86837 - DNA, 15 bp, Homo sapiens
acaccgtactgcctc

SEQ ID NO: 86838 - DNA, 15 bp, Homo sapiens
tacaccgtactgcct

SEQ ID NO: 86839 - DNA, 15 bp, Homo sapiens
ctacaccgtactgcc

SEQ ID NO: 86840 - DNA, 15 bp, Homo sapiens
actacaccgtactgc

SEQ ID NO: 86841 - DNA, 15 bp, Homo sapiens
cactacaccgtactg

SEQ ID NO: 86842 - DNA, 15 bp, Homo sapiens
acactacaccgtact

SEQ ID NO: 86843 - DNA, 15 bp, Homo sapiens
tacactacaccgtac

SEQ ID NO: 86844 - DNA, 15 bp, Homo sapiens
ctacactacaccgta

SEQ ID NO: 86845 - DNA, 15 bp, Homo sapiens
actacactacaccgt

SEQ ID NO: 86846 - DNA, 15 bp, Homo sapiens
cactacactacaccg

SEQ ID NO: 86847 - DNA, 15 bp, Homo sapiens
tcactacactacacc

SEQ ID NO: 86848 - DNA, 15 bp, Homo sapiens
atcactacactacac

SEQ ID NO: 86849 - DNA, 15 bp, Homo sapiens
aatcactacactaca

SEQ ID NO: 86850 - DNA, 15 bp, Homo sapiens
gaatcactacactac

SEQ ID NO: 86851 - DNA, 15 bp, Homo sapiens
tgaatcactacacta

SEQ ID NO: 86852 - DNA, 15 bp, Homo sapiens
ctgaatcactacact

SEQ ID NO: 86853 - DNA, 15 bp, Homo sapiens
tctgaatcactacac

SEQ ID NO: 86854 - DNA, 15 bp, Homo sapiens
ctctgaatcactaca

SEQ ID NO: 86855 - DNA, 15 bp, Homo sapiens
tctctgaatcactac

SEQ ID NO: 86856 - DNA, 15 bp, Homo sapiens
ttctctgaatcacta

SEQ ID NO: 86857 - DNA, 15 bp, Homo sapiens
attctctgaatcact

SEQ ID NO: 86858 - DNA, 15 bp, Homo sapiens
aattctctgaatcac

SEQ ID NO: 86859 - DNA, 15 bp, Homo sapiens
aaattctctgaatca

SEQ ID NO: 86860 - DNA, 15 bp, Homo sapiens
caaattctctgaatc

SEQ ID NO: 86861 - DNA, 15 bp, Homo sapiens
gcaaattctctgaat

SEQ ID NO: 86862 - DNA, 15 bp, Homo sapiens
agcaaattctctgaa

SEQ ID NO: 86863 - DNA, 15 bp, Homo sapiens
aagcaaattctctga

SEQ ID NO: 86864 - DNA, 15 bp, Homo sapiens
aaagcaaattctctg

SEQ ID NO: 86865 - DNA, 15 bp, Homo sapiens
caaagcaaattctct

SEQ ID NO: 86866 - DNA, 15 bp, Homo sapiens
gcaaagcaaattctc

SEQ ID NO: 86867 - DNA, 15 bp, Homo sapiens
ggcaaagcaaattct

SEQ ID NO: 86868 - DNA, 15 bp, Homo sapiens
tggcaaagcaaattc

SEQ ID NO: 86869 - DNA, 15 bp, Homo sapiens
gtggcaaagcaaatt

SEQ ID NO: 86870 - DNA, 15 bp, Homo sapiens
ggtggcaaagcaaat

SEQ ID NO: 86871 - DNA, 15 bp, Homo sapiens
tggtggcaaagcaaa

SEQ ID NO: 86872 - DNA, 15 bp, Homo sapiens
ctggtggcaaagcaa

SEQ ID NO: 86873 - DNA, 15 bp, Homo sapiens
tctggtggcaaagca

SEQ ID NO: 86874 - DNA, 15 bp, Homo sapiens
gtctggtggcaaagc

SEQ ID NO: 86875 - DNA, 15 bp, Homo sapiens
tgtctggtggcaaag

SEQ ID NO: 86876 - DNA, 15 bp, Homo sapiens
atgtctggtggcaaa

SEQ ID NO: 86877 - DNA, 15 bp, Homo sapiens
tatgtctggtggcaa

SEQ ID NO: 86878 - DNA, 15 bp, Homo sapiens
gtatgtctggtggca

SEQ ID NO: 86879 - DNA, 15 bp, Homo sapiens
ggtatgtctggtggc

SEQ ID NO: 86880 - DNA, 15 bp, Homo sapiens
tggtatgtctggtgg

SEQ ID NO: 86881 - DNA, 15 bp, Homo sapiens
ctggtatgtctggtg

SEQ ID NO: 86882 - DNA, 15 bp, Homo sapiens
cctggtatgtctggt

SEQ ID NO: 86883 - DNA, 15 bp, Homo sapiens
acctggtatgtctgg

SEQ ID NO: 86884 - DNA, 15 bp, Homo sapiens
tacctggtatgtctg

SEQ ID NO: 86885 - DNA, 15 bp, Homo sapiens
ttacctggtatgtct

SEQ ID NO: 86886 - DNA, 15 bp, Homo sapiens
gttacctggtatgtc

SEQ ID NO: 86887 - DNA, 15 bp, Homo sapiens
ggttacctggtatgt

SEQ ID NO: 86888 - DNA, 15 bp, Homo sapiens
aggttacctggtatg

SEQ ID NO: 86889 - DNA, 15 bp, Homo sapiens
aaggttacctggtat

SEQ ID NO: 86890 - DNA, 15 bp, Homo sapiens
caaggttacctggta

SEQ ID NO: 86891 - DNA, 15 bp, Homo sapiens
tcaaggttacctggt

SEQ ID NO: 86892 - DNA, 15 bp, Homo sapiens
gtcaaggttacctgg

SEQ ID NO: 86893 - DNA, 15 bp, Homo sapiens
agtcaaggttacctg

SEQ ID NO: 86894 - DNA, 15 bp, Homo sapiens
tagtcaaggttacct

SEQ ID NO: 86895 - DNA, 15 bp, Homo sapiens
ttagtcaaggttacc

SEQ ID NO: 86896 - DNA, 15 bp, Homo sapiens
cttagtcaaggttac

SEQ ID NO: 86897 - DNA, 15 bp, Homo sapiens
acttagtcaaggtta

SEQ ID NO: 86898 - DNA, 15 bp, Homo sapiens
aacttagtcaaggtt

SEQ ID NO: 86899 - DNA, 15 bp, Homo sapiens
taacttagtcaaggt

SEQ ID NO: 86900 - DNA, 15 bp, Homo sapiens
gtaacttagtcaagg

SEQ ID NO: 86901 - DNA, 15 bp, Homo sapiens
agtaacttagtcaag

SEQ ID NO: 86902 - DNA, 15 bp, Homo sapiens
aagtaacttagtcaa

SEQ ID NO: 86903 - DNA, 15 bp, Homo sapiens
taagtaacttagtca

SEQ ID NO: 86904 - DNA, 15 bp, Homo sapiens
ttaagtaacttagtc

SEQ ID NO: 86905 - DNA, 15 bp, Homo sapiens
gttaagtaacttagt

SEQ ID NO: 86906 - DNA, 15 bp, Homo sapiens
ggttaagtaacttag

SEQ ID NO: 86907 - DNA, 15 bp, Homo sapiens
aggttaagtaactta

SEQ ID NO: 86908 - DNA, 15 bp, Homo sapiens
taggttaagtaactt

SEQ ID NO: 86909 - DNA, 15 bp, Homo sapiens
ataggttaagtaact

SEQ ID NO: 86910 - DNA, 15 bp, Homo sapiens
gataggttaagtaac

SEQ ID NO: 86911 - DNA, 15 bp, Homo sapiens
agataggttaagtaa

SEQ ID NO: 86912 - DNA, 15 bp, Homo sapiens
tagataggttaagta

SEQ ID NO: 86913 - DNA, 15 bp, Homo sapiens
ttagataggttaagt

SEQ ID NO: 86914 - DNA, 15 bp, Homo sapiens
tttagataggttaag

SEQ ID NO: 86915 - DNA, 15 bp, Homo sapiens
gtttagataggttaa

SEQ ID NO: 86916 - DNA, 15 bp, Homo sapiens
ggtttagataggtta

SEQ ID NO: 86917 - DNA, 15 bp, Homo sapiens
aggtttagataggtt

SEQ ID NO: 86918 - DNA, 15 bp, Homo sapiens
gaggtttagataggt

SEQ ID NO: 86919 - DNA, 15 bp, Homo sapiens
tgaggtttagatagg

SEQ ID NO: 86920 - DNA, 15 bp, Homo sapiens
ctgaggtttagatag

SEQ ID NO: 86921 - DNA, 15 bp, Homo sapiens
actgaggtttagata

SEQ ID NO: 86922 - DNA, 15 bp, Homo sapiens
aactgaggtttagat

SEQ ID NO: 86923 - DNA, 15 bp, Homo sapiens
gaactgaggtttaga

SEQ ID NO: 86924 - DNA, 15 bp, Homo sapiens
ggaactgaggtttag

SEQ ID NO: 86925 - DNA, 15 bp, Homo sapiens
gggaactgaggttta

SEQ ID NO: 86926 - DNA, 15 bp, Homo sapiens
agggaactgaggttt

SEQ ID NO: 86927 - DNA, 15 bp, Homo sapiens
gagggaactgaggtt

SEQ ID NO: 86928 - DNA, 15 bp, Homo sapiens
tgagggaactgaggt

SEQ ID NO: 86929 - DNA, 15 bp, Homo sapiens
atgagggaactgagg

SEQ ID NO: 86930 - DNA, 15 bp, Homo sapiens
gatgagggaactgag

SEQ ID NO: 86931 - DNA, 15 bp, Homo sapiens
agatgagggaactga

SEQ ID NO: 86932 - DNA, 15 bp, Homo sapiens
cagatgagggaactg

SEQ ID NO: 86933 - DNA, 15 bp, Homo sapiens
acagatgagggaact

SEQ ID NO: 86934 - DNA, 15 bp, Homo sapiens
cacagatgagggaac

SEQ ID NO: 86935 - DNA, 15 bp, Homo sapiens
tcacagatgagggaa

SEQ ID NO: 86936 - DNA, 15 bp, Homo sapiens
ttcacagatgaggga

SEQ ID NO: 86937 - DNA, 15 bp, Homo sapiens
tttcacagatgaggg

SEQ ID NO: 86938 - DNA, 15 bp, Homo sapiens
atttcacagatgagg

SEQ ID NO: 86939 - DNA, 15 bp, Homo sapiens
catttcacagatgag

SEQ ID NO: 86940 - DNA, 15 bp, Homo sapiens
ccatttcacagatga

SEQ ID NO: 86941 - DNA, 15 bp, Homo sapiens
tccatttcacagatg

SEQ ID NO: 86942 - DNA, 15 bp, Homo sapiens
ctccatttcacagat

SEQ ID NO: 86943 - DNA, 15 bp, Homo sapiens
tctccatttcacaga

SEQ ID NO: 86944 - DNA, 15 bp, Homo sapiens
gtctccatttcacag

SEQ ID NO: 86945 - DNA, 15 bp, Homo sapiens
tgtctccatttcaca

SEQ ID NO: 86946 - DNA, 15 bp, Homo sapiens
ctgtctccatttcac

SEQ ID NO: 86947 - DNA, 15 bp, Homo sapiens
actgtctccatttca

SEQ ID NO: 86948 - DNA, 15 bp, Homo sapiens
tactgtctccatttc

SEQ ID NO: 86949 - DNA, 15 bp, Homo sapiens
ttactgtctccattt

SEQ ID NO: 86950 - DNA, 15 bp, Homo sapiens
attactgtctccatt

SEQ ID NO: 86951 - DNA, 15 bp, Homo sapiens
gattactgtctccat

SEQ ID NO: 86952 - DNA, 15 bp, Homo sapiens
tgattactgtctcca

SEQ ID NO: 86953 - DNA, 15 bp, Homo sapiens
atgattactgtctcc

SEQ ID NO: 86954 - DNA, 15 bp, Homo sapiens
tatgattactgtctc

SEQ ID NO: 86955 - DNA, 15 bp, Homo sapiens
ctatgattactgtct

SEQ ID NO: 86956 - DNA, 15 bp, Homo sapiens
gctatgattactgtc

SEQ ID NO: 86957 - DNA, 15 bp, Homo sapiens
agctatgattactgt

SEQ ID NO: 86958 - DNA, 15 bp, Homo sapiens
tagctatgattactg

SEQ ID NO: 86959 - DNA, 15 bp, Homo sapiens
atagctatgattact

SEQ ID NO: 86960 - DNA, 15 bp, Homo sapiens
aatagctatgattac

SEQ ID NO: 86961 - DNA, 15 bp, Homo sapiens
aaatagctatgatta

SEQ ID NO: 86962 - DNA, 15 bp, Homo sapiens
gaaatagctatgatt

SEQ ID NO: 86963 - DNA, 15 bp, Homo sapiens
ggaaatagctatgat

SEQ ID NO: 86964 - DNA, 15 bp, Homo sapiens
tggaaatagctatga

SEQ ID NO: 86965 - DNA, 15 bp, Homo sapiens
ttggaaatagctatg

SEQ ID NO: 86966 - DNA, 15 bp, Homo sapiens
tttggaaatagctat

SEQ ID NO: 86967 - DNA, 15 bp, Homo sapiens
gtttggaaatagcta

SEQ ID NO: 86968 - DNA, 15 bp, Homo sapiens
agtttggaaatagct

SEQ ID NO: 86969 - DNA, 15 bp, Homo sapiens
cagtttggaaatagc

SEQ ID NO: 86970 - DNA, 15 bp, Homo sapiens
acagtttggaaatag

SEQ ID NO: 86971 - DNA, 15 bp, Homo sapiens
aacagtttggaaata

SEQ ID NO: 86972 - DNA, 15 bp, Homo sapiens
caacagtttggaaat

SEQ ID NO: 86973 - DNA, 15 bp, Homo sapiens
acaacagtttggaaa

SEQ ID NO: 86974 - DNA, 15 bp, Homo sapiens
cacaacagtttggaa

SEQ ID NO: 86975 - DNA, 15 bp, Homo sapiens
tcacaacagtttgga

SEQ ID NO: 86976 - DNA, 15 bp, Homo sapiens
ctcacaacagtttgg

SEQ ID NO: 86977 - DNA, 15 bp, Homo sapiens
tctcacaacagtttg

SEQ ID NO: 86978 - DNA, 15 bp, Homo sapiens
ttctcacaacagttt

SEQ ID NO: 86979 - DNA, 15 bp, Homo sapiens
attctcacaacagtt

SEQ ID NO: 86980 - DNA, 15 bp, Homo sapiens
aattctcacaacagt

SEQ ID NO: 86981 - DNA, 15 bp, Homo sapiens
gaattctcacaacag

SEQ ID NO: 86982 - DNA, 15 bp, Homo sapiens
tgaattctcacaaca

SEQ ID NO: 86983 - DNA, 15 bp, Homo sapiens
ttgaattctcacaac

SEQ ID NO: 86984 - DNA, 15 bp, Homo sapiens
attgaattctcacaa

SEQ ID NO: 86985 - DNA, 15 bp, Homo sapiens
cattgaattctcaca

SEQ ID NO: 86986 - DNA, 15 bp, Homo sapiens
tcattgaattctcac

SEQ ID NO: 86987 - DNA, 15 bp, Homo sapiens
ctcattgaattctca

SEQ ID NO: 86988 - DNA, 15 bp, Homo sapiens
actcattgaattctc

SEQ ID NO: 86989 - DNA, 15 bp, Homo sapiens
aactcattgaattct

SEQ ID NO: 86990 - DNA, 15 bp, Homo sapiens
taactcattgaattc

SEQ ID NO: 86991 - DNA, 15 bp, Homo sapiens
ttaactcattgaatt

SEQ ID NO: 86992 - DNA, 15 bp, Homo sapiens
tttaactcattgaat

SEQ ID NO: 86993 - DNA, 15 bp, Homo sapiens
ctttaactcattgaa

SEQ ID NO: 86994 - DNA, 15 bp, Homo sapiens
cctttaactcattga

SEQ ID NO: 86995 - DNA, 15 bp, Homo sapiens
acctttaactcattg

SEQ ID NO: 86996 - DNA, 15 bp, Homo sapiens
tacctttaactcatt

SEQ ID NO: 86997 - DNA, 15 bp, Homo sapiens
atacctttaactcat

SEQ ID NO: 86998 - DNA, 15 bp, Homo sapiens
tatacctttaactca

SEQ ID NO: 86999 - DNA, 15 bp, Homo sapiens
ttatacctttaactc

SEQ ID NO: 87000 - DNA, 15 bp, Homo sapiens
cttatacctttaact

SEQ ID NO: 87001 - DNA, 15 bp, Homo sapiens
ccttatacctttaac

SEQ ID NO: 87002 - DNA, 15 bp, Homo sapiens
accttatacctttaa

SEQ ID NO: 87003 - DNA, 15 bp, Homo sapiens
gaccttataccttta

SEQ ID NO: 87004 - DNA, 15 bp, Homo sapiens
ggaccttataccttt

SEQ ID NO: 87005 - DNA, 15 bp, Homo sapiens
aggaccttatacctt

SEQ ID NO: 87006 - DNA, 15 bp, Homo sapiens
gaggaccttatacct

SEQ ID NO: 87007 - DNA, 15 bp, Homo sapiens
tgaggaccttatacc

SEQ ID NO: 87008 - DNA, 15 bp, Homo sapiens
gtgaggaccttatac

SEQ ID NO: 87009 - DNA, 15 bp, Homo sapiens
ggtgaggaccttata

SEQ ID NO: 87010 - DNA, 15 bp, Homo sapiens
tggtgaggaccttat

SEQ ID NO: 87011 - DNA, 15 bp, Homo sapiens
gtggtgaggacctta

SEQ ID NO: 87012 - DNA, 15 bp, Homo sapiens
tgtggtgaggacctt

SEQ ID NO: 87013 - DNA, 15 bp, Homo sapiens
ctgtggtgaggacct

SEQ ID NO: 87014 - DNA, 15 bp, Homo sapiens
gctgtggtgaggacc

SEQ ID NO: 87015 - DNA, 15 bp, Homo sapiens
cgctgtggtgaggac

SEQ ID NO: 87016 - DNA, 15 bp, Homo sapiens
gcgctgtggtgagga

SEQ ID NO: 87017 - DNA, 15 bp, Homo sapiens
ggcgctgtggtgagg

SEQ ID NO: 87018 - DNA, 15 bp, Homo sapiens
aggcgctgtggtgag

SEQ ID NO: 87019 - DNA, 15 bp, Homo sapiens
caggcgctgtggtga

SEQ ID NO: 87020 - DNA, 15 bp, Homo sapiens
gcaggcgctgtggtg

SEQ ID NO: 87021 - DNA, 15 bp, Homo sapiens
ggcaggcgctgtggt

SEQ ID NO: 87022 - DNA, 15 bp, Homo sapiens
gggcaggcgctgtgg

SEQ ID NO: 87023 - DNA, 15 bp, Homo sapiens
tgggcaggcgctgtg

SEQ ID NO: 87024 - DNA, 15 bp, Homo sapiens
gtgggcaggcgctgt

SEQ ID NO: 87025 - DNA, 15 bp, Homo sapiens
tgtgggcaggcgctg

SEQ ID NO: 87026 - DNA, 15 bp, Homo sapiens
atgtgggcaggcgct

SEQ ID NO: 87027 - DNA, 15 bp, Homo sapiens
tatgtgggcaggcgc

SEQ ID NO: 87028 - DNA, 15 bp, Homo sapiens
ctatgtgggcaggcg

SEQ ID NO: 87029 - DNA, 15 bp, Homo sapiens
actatgtgggcaggc

SEQ ID NO: 87030 - DNA, 15 bp, Homo sapiens
gactatgtgggcagg

SEQ ID NO: 87031 - DNA, 15 bp, Homo sapiens
tgactatgtgggcag

SEQ ID NO: 87032 - DNA, 15 bp, Homo sapiens
ctgactatgtgggca

SEQ ID NO: 87033 - DNA, 15 bp, Homo sapiens
actgactatgtgggc

SEQ ID NO: 87034 - DNA, 15 bp, Homo sapiens
cactgactatgtggg

SEQ ID NO: 87035 - DNA, 15 bp, Homo sapiens
tcactgactatgtgg

SEQ ID NO: 87036 - DNA, 15 bp, Homo sapiens
atcactgactatgtg

SEQ ID NO: 87037 - DNA, 15 bp, Homo sapiens
gatcactgactatgt

SEQ ID NO: 87038 - DNA, 15 bp, Homo sapiens
tgatcactgactatg

SEQ ID NO: 87039 - DNA, 15 bp, Homo sapiens
gtgatcactgactat

SEQ ID NO: 87040 - DNA, 15 bp, Homo sapiens
agtgatcactgacta

SEQ ID NO: 87041 - DNA, 15 bp, Homo sapiens
tagtgatcactgact

SEQ ID NO: 87042 - DNA, 15 bp, Homo sapiens
atagtgatcactgac

SEQ ID NO: 87043 - DNA, 15 bp, Homo sapiens
catagtgatcactga

SEQ ID NO: 87044 - DNA, 15 bp, Homo sapiens
acatagtgatcactg

SEQ ID NO: 87045 - DNA, 15 bp, Homo sapiens
gacatagtgatcact

SEQ ID NO: 87046 - DNA, 15 bp, Homo sapiens
ggacatagtgatcac

SEQ ID NO: 87047 - DNA, 15 bp, Homo sapiens
aggacatagtgatca

SEQ ID NO: 87048 - DNA, 15 bp, Homo sapiens
caggacatagtgatc

SEQ ID NO: 87049 - DNA, 15 bp, Homo sapiens
tcaggacatagtgat

SEQ ID NO: 87050 - DNA, 15 bp, Homo sapiens
ttcaggacatagtga

SEQ ID NO: 87051 - DNA, 15 bp, Homo sapiens
gttcaggacatagtg

SEQ ID NO: 87052 - DNA, 15 bp, Homo sapiens
tgttcaggacatagt

SEQ ID NO: 87053 - DNA, 15 bp, Homo sapiens
gtgttcaggacatag

SEQ ID NO: 87054 - DNA, 15 bp, Homo sapiens
agtgttcaggacata

SEQ ID NO: 87055 - DNA, 15 bp, Homo sapiens
cagtgttcaggacat

SEQ ID NO: 87056 - DNA, 15 bp, Homo sapiens
acagtgttcaggaca

SEQ ID NO: 87057 - DNA, 15 bp, Homo sapiens
tacagtgttcaggac

SEQ ID NO: 87058 - DNA, 15 bp, Homo sapiens
ttacagtgttcagga

SEQ ID NO: 87059 - DNA, 15 bp, Homo sapiens
attacagtgttcagg

SEQ ID NO: 87060 - DNA, 15 bp, Homo sapiens
aattacagtgttcag

SEQ ID NO: 87061 - DNA, 15 bp, Homo sapiens
taattacagtgttca

SEQ ID NO: 87062 - DNA, 15 bp, Homo sapiens
gtaattacagtgttc

SEQ ID NO: 87063 - DNA, 15 bp, Homo sapiens
agtaattacagtgtt

SEQ ID NO: 87064 - DNA, 15 bp, Homo sapiens
aagtaattacagtgt

SEQ ID NO: 87065 - DNA, 15 bp, Homo sapiens
gaagtaattacagtg

SEQ ID NO: 87066 - DNA, 15 bp, Homo sapiens
cgaagtaattacagt

SEQ ID NO: 87067 - DNA, 15 bp, Homo sapiens
gcgaagtaattacag

SEQ ID NO: 87068 - DNA, 15 bp, Homo sapiens
ggcgaagtaattaca

SEQ ID NO: 87069 - DNA, 15 bp, Homo sapiens
tggcgaagtaattac

SEQ ID NO: 87070 - DNA, 15 bp, Homo sapiens
atggcgaagtaatta

SEQ ID NO: 87071 - DNA, 15 bp, Homo sapiens
tatggcgaagtaatt

SEQ ID NO: 87072 - DNA, 15 bp, Homo sapiens
atatggcgaagtaat

SEQ ID NO: 87073 - DNA, 15 bp, Homo sapiens
aatatggcgaagtaa

SEQ ID NO: 87074 - DNA, 15 bp, Homo sapiens
gaatatggcgaagta

SEQ ID NO: 87075 - DNA, 15 bp, Homo sapiens
agaatatggcgaagt

SEQ ID NO: 87076 - DNA, 15 bp, Homo sapiens
gagaatatggcgaag

SEQ ID NO: 87077 - DNA, 15 bp, Homo sapiens
agagaatatggcgaa

SEQ ID NO: 87078 - DNA, 15 bp, Homo sapiens
cagagaatatggcga

SEQ ID NO: 87079 - DNA, 15 bp, Homo sapiens
tcagagaatatggcg

SEQ ID NO: 87080 - DNA, 15 bp, Homo sapiens
atcagagaatatggc

SEQ ID NO: 87081 - DNA, 15 bp, Homo sapiens
gatcagagaatatgg

SEQ ID NO: 87082 - DNA, 15 bp, Homo sapiens
tgatcagagaatatg

SEQ ID NO: 87083 - DNA, 15 bp, Homo sapiens
atgatcagagaatat

SEQ ID NO: 87084 - DNA, 15 bp, Homo sapiens
tatgatcagagaata

SEQ ID NO: 87085 - DNA, 15 bp, Homo sapiens
ctatgatcagagaat

SEQ ID NO: 87086 - DNA, 15 bp, Homo sapiens
actatgatcagagaa

SEQ ID NO: 87087 - DNA, 15 bp, Homo sapiens
cactatgatcagaga

SEQ ID NO: 87088 - DNA, 15 bp, Homo sapiens
acactatgatcagag

SEQ ID NO: 87089 - DNA, 15 bp, Homo sapiens
aacactatgatcaga

SEQ ID NO: 87090 - DNA, 15 bp, Homo sapiens
aaacactatgatcag

SEQ ID NO: 87091 - DNA, 15 bp, Homo sapiens
aaaacactatgatca

SEQ ID NO: 87092 - DNA, 15 bp, Homo sapiens
caaaacactatgatc

SEQ ID NO: 87093 - DNA, 15 bp, Homo sapiens
gcaaaacactatgat

SEQ ID NO: 87094 - DNA, 15 bp, Homo sapiens
ggcaaaacactatga

SEQ ID NO: 87095 - DNA, 15 bp, Homo sapiens
aggcaaaacactatg

SEQ ID NO: 87096 - DNA, 15 bp, Homo sapiens
aaggcaaaacactat

SEQ ID NO: 87097 - DNA, 15 bp, Homo sapiens
caaggcaaaacacta

SEQ ID NO: 87098 - DNA, 15 bp, Homo sapiens
ccaaggcaaaacact

SEQ ID NO: 87099 - DNA, 15 bp, Homo sapiens
accaaggcaaaacac

SEQ ID NO: 87100 - DNA, 15 bp, Homo sapiens
taccaaggcaaaaca

SEQ ID NO: 87101 - DNA, 15 bp, Homo sapiens
ataccaaggcaaaac

SEQ ID NO: 87102 - DNA, 15 bp, Homo sapiens
cataccaaggcaaaa

SEQ ID NO: 87103 - DNA, 15 bp, Homo sapiens
acataccaaggcaaa

SEQ ID NO: 87104 - DNA, 15 bp, Homo sapiens
cacataccaaggcaa

SEQ ID NO: 87105 - DNA, 15 bp, Homo sapiens
tcacataccaaggca

SEQ ID NO: 87106 - DNA, 15 bp, Homo sapiens
gtcacataccaaggc

SEQ ID NO: 87107 - DNA, 15 bp, Homo sapiens
agtcacataccaagg

SEQ ID NO: 87108 - DNA, 15 bp, Homo sapiens
tagtcacataccaag

SEQ ID NO: 87109 - DNA, 15 bp, Homo sapiens
ctagtcacataccaa

SEQ ID NO: 87110 - DNA, 15 bp, Homo sapiens
tctagtcacatacca

SEQ ID NO: 87111 - DNA, 15 bp, Homo sapiens
ttctagtcacatacc

SEQ ID NO: 87112 - DNA, 15 bp, Homo sapiens
attctagtcacatac

SEQ ID NO: 87113 - DNA, 15 bp, Homo sapiens
aattctagtcacata

SEQ ID NO: 87114 - DNA, 15 bp, Homo sapiens
aaattctagtcacat

SEQ ID NO: 87115 - DNA, 15 bp, Homo sapiens
gaaattctagtcaca

SEQ ID NO: 87116 - DNA, 15 bp, Homo sapiens
agaaattctagtcac

SEQ ID NO: 87117 - DNA, 15 bp, Homo sapiens
aagaaattctagtca

SEQ ID NO: 87118 - DNA, 15 bp, Homo sapiens
aaagaaattctagtc

SEQ ID NO: 87119 - DNA, 15 bp, Homo sapiens
gaaagaaattctagt

SEQ ID NO: 87120 - DNA, 15 bp, Homo sapiens
agaaagaaattctag

SEQ ID NO: 87121 - DNA, 15 bp, Homo sapiens
cagaaagaaattcta

SEQ ID NO: 87122 - DNA, 15 bp, Homo sapiens
tcagaaagaaattct

SEQ ID NO: 87123 - DNA, 15 bp, Homo sapiens
ctcagaaagaaattc

SEQ ID NO: 87124 - DNA, 15 bp, Homo sapiens
cctcagaaagaaatt

SEQ ID NO: 87125 - DNA, 15 bp, Homo sapiens
acctcagaaagaaat

SEQ ID NO: 87126 - DNA, 15 bp, Homo sapiens
aacctcagaaagaaa

SEQ ID NO: 87127 - DNA, 15 bp, Homo sapiens
aaacctcagaaagaa

SEQ ID NO: 87128 - DNA, 15 bp, Homo sapiens
taaacctcagaaaga

SEQ ID NO: 87129 - DNA, 15 bp, Homo sapiens
ataaacctcagaaag

SEQ ID NO: 87130 - DNA, 15 bp, Homo sapiens
cataaacctcagaaa

SEQ ID NO: 87131 - DNA, 15 bp, Homo sapiens
ccataaacctcagaa

SEQ ID NO: 87132 - DNA, 15 bp, Homo sapiens
cccataaacctcaga

SEQ ID NO: 87133 - DNA, 15 bp, Homo sapiens
gcccataaacctcag

SEQ ID NO: 87134 - DNA, 15 bp, Homo sapiens
tgcccataaacctca

SEQ ID NO: 87135 - DNA, 15 bp, Homo sapiens
atgcccataaacctc

SEQ ID NO: 87136 - DNA, 15 bp, Homo sapiens
catgcccataaacct

SEQ ID NO: 87137 - DNA, 15 bp, Homo sapiens
ccatgcccataaacc

SEQ ID NO: 87138 - DNA, 15 bp, Homo sapiens
accatgcccataaac

SEQ ID NO: 87139 - DNA, 15 bp, Homo sapiens
aaccatgcccataaa

SEQ ID NO: 87140 - DNA, 15 bp, Homo sapiens
caaccatgcccataa

SEQ ID NO: 87141 - DNA, 15 bp, Homo sapiens
ccaaccatgcccata

SEQ ID NO: 87142 - DNA, 15 bp, Homo sapiens
accaaccatgcccat

SEQ ID NO: 87143 - DNA, 15 bp, Homo sapiens
caccaaccatgccca

SEQ ID NO: 87144 - DNA, 15 bp, Homo sapiens
ccaccaaccatgccc

SEQ ID NO: 87145 - DNA, 15 bp, Homo sapiens
cccaccaaccatgcc

SEQ ID NO: 87146 - DNA, 15 bp, Homo sapiens
acccaccaaccatgc

SEQ ID NO: 87147 - DNA, 15 bp, Homo sapiens
tacccaccaaccatg

SEQ ID NO: 87148 - DNA, 15 bp, Homo sapiens
atacccaccaaccat

SEQ ID NO: 87149 - DNA, 15 bp, Homo sapiens
catacccaccaacca

SEQ ID NO: 87150 - DNA, 15 bp, Homo sapiens
gcatacccaccaacc

SEQ ID NO: 87151 - DNA, 15 bp, Homo sapiens
tgcatacccaccaac

SEQ ID NO: 87152 - DNA, 15 bp, Homo sapiens
gtgcatacccaccaa

SEQ ID NO: 87153 - DNA, 15 bp, Homo sapiens
ggtgcatacccacca

SEQ ID NO: 87154 - DNA, 15 bp, Homo sapiens
aggtgcatacccacc

SEQ ID NO: 87155 - DNA, 15 bp, Homo sapiens
caggtgcatacccac

SEQ ID NO: 87156 - DNA, 15 bp, Homo sapiens
gcaggtgcataccca

SEQ ID NO: 87157 - DNA, 15 bp, Homo sapiens
ggcaggtgcataccc

SEQ ID NO: 87158 - DNA, 15 bp, Homo sapiens
aggcaggtgcatacc

SEQ ID NO: 87159 - DNA, 15 bp, Homo sapiens
caggcaggtgcatac

SEQ ID NO: 87160 - DNA, 15 bp, Homo sapiens
gcaggcaggtgcata

SEQ ID NO: 87161 - DNA, 15 bp, Homo sapiens
tgcaggcaggtgcat

SEQ ID NO: 87162 - DNA, 15 bp, Homo sapiens
ctgcaggcaggtgca

SEQ ID NO: 87163 - DNA, 15 bp, Homo sapiens
cctgcaggcaggtgc

SEQ ID NO: 87164 - DNA, 15 bp, Homo sapiens
tcctgcaggcaggtg

SEQ ID NO: 87165 - DNA, 15 bp, Homo sapiens
ctcctgcaggcaggt

SEQ ID NO: 87166 - DNA, 15 bp, Homo sapiens
gctcctgcaggcagg

SEQ ID NO: 87167 - DNA, 15 bp, Homo sapiens
ggctcctgcaggcag

SEQ ID NO: 87168 - DNA, 15 bp, Homo sapiens
gggctcctgcaggca

SEQ ID NO: 87169 - DNA, 15 bp, Homo sapiens
cgggctcctgcaggc

SEQ ID NO: 87170 - DNA, 15 bp, Homo sapiens
ccgggctcctgcagg

SEQ ID NO: 87171 - DNA, 15 bp, Homo sapiens
accgggctcctgcag

SEQ ID NO: 87172 - DNA, 15 bp, Homo sapiens
aaccgggctcctgca

SEQ ID NO: 87173 - DNA, 15 bp, Homo sapiens
aaaccgggctcctgc

SEQ ID NO: 87174 - DNA, 15 bp, Homo sapiens
caaaccgggctcctg

SEQ ID NO: 87175 - DNA, 15 bp, Homo sapiens
ccaaaccgggctcct

SEQ ID NO: 87176 - DNA, 15 bp, Homo sapiens
cccaaaccgggctcc

SEQ ID NO: 87177 - DNA, 15 bp, Homo sapiens
ccccaaaccgggctc

SEQ ID NO: 87178 - DNA, 15 bp, Homo sapiens
cccccaaaccgggct

SEQ ID NO: 87179 - DNA, 15 bp, Homo sapiens
gcccccaaaccgggc

SEQ ID NO: 87180 - DNA, 15 bp, Homo sapiens
tgcccccaaaccggg

SEQ ID NO: 87181 - DNA, 15 bp, Homo sapiens
atgcccccaaaccgg

SEQ ID NO: 87182 - DNA, 15 bp, Homo sapiens
aatgcccccaaaccg

SEQ ID NO: 87183 - DNA, 15 bp, Homo sapiens
taatgcccccaaacc

SEQ ID NO: 87184 - DNA, 15 bp, Homo sapiens
gtaatgcccccaaac

SEQ ID NO: 87185 - DNA, 15 bp, Homo sapiens
ggtaatgcccccaaa

SEQ ID NO: 87186 - DNA, 15 bp, Homo sapiens
aggtaatgcccccaa

SEQ ID NO: 87187 - DNA, 15 bp, Homo sapiens
aaggtaatgccccca

SEQ ID NO: 87188 - DNA, 15 bp, Homo sapiens
caaggtaatgccccc

SEQ ID NO: 87189 - DNA, 15 bp, Homo sapiens
acaaggtaatgcccc

SEQ ID NO: 87190 - DNA, 15 bp, Homo sapiens
tacaaggtaatgccc

SEQ ID NO: 87191 - DNA, 15 bp, Homo sapiens
gtacaaggtaatgcc

SEQ ID NO: 87192 - DNA, 15 bp, Homo sapiens
ggtacaaggtaatgc

SEQ ID NO: 87193 - DNA, 15 bp, Homo sapiens
aggtacaaggtaatg

SEQ ID NO: 87194 - DNA, 15 bp, Homo sapiens
caggtacaaggtaat

SEQ ID NO: 87195 - DNA, 15 bp, Homo sapiens
ccaggtacaaggtaa

SEQ ID NO: 87196 - DNA, 15 bp, Homo sapiens
accaggtacaaggta

SEQ ID NO: 87197 - DNA, 15 bp, Homo sapiens
taccaggtacaaggt

SEQ ID NO: 87198 - DNA, 15 bp, Homo sapiens
ataccaggtacaagg

SEQ ID NO: 87199 - DNA, 15 bp, Homo sapiens
cataccaggtacaag

SEQ ID NO: 87200 - DNA, 15 bp, Homo sapiens
acataccaggtacaa

SEQ ID NO: 87201 - DNA, 15 bp, Homo sapiens
aacataccaggtaca

SEQ ID NO: 87202 - DNA, 15 bp, Homo sapiens
aaacataccaggtac

SEQ ID NO: 87203 - DNA, 15 bp, Homo sapiens
aaaacataccaggta

SEQ ID NO: 87204 - DNA, 15 bp, Homo sapiens
gaaaacataccaggt

SEQ ID NO: 87205 - DNA, 15 bp, Homo sapiens
agaaaacataccagg

SEQ ID NO: 87206 - DNA, 15 bp, Homo sapiens
aagaaaacataccag

SEQ ID NO: 87207 - DNA, 15 bp, Homo sapiens
aaagaaaacatacca

SEQ ID NO: 87208 - DNA, 15 bp, Homo sapiens
gaaagaaaacatacc

SEQ ID NO: 87209 - DNA, 15 bp, Homo sapiens
tgaaagaaaacatac

SEQ ID NO: 87210 - DNA, 15 bp, Homo sapiens
ctgaaagaaaacata

SEQ ID NO: 87211 - DNA, 15 bp, Homo sapiens
cctgaaagaaaacat

SEQ ID NO: 87212 - DNA, 15 bp, Homo sapiens
acctgaaagaaaaca

SEQ ID NO: 87213 - DNA, 15 bp, Homo sapiens
cacctgaaagaaaac

SEQ ID NO: 87214 - DNA, 15 bp, Homo sapiens
acacctgaaagaaaa

SEQ ID NO: 87215 - DNA, 15 bp, Homo sapiens
cacacctgaaagaaa

SEQ ID NO: 87216 - DNA, 15 bp, Homo sapiens
ccacacctgaaagaa

SEQ ID NO: 87217 - DNA, 15 bp, Homo sapiens
accacacctgaaaga

SEQ ID NO: 87218 - DNA, 15 bp, Homo sapiens
aaccacacctgaaag

SEQ ID NO: 87219 - DNA, 15 bp, Homo sapiens
gaaccacacctgaaa

SEQ ID NO: 87220 - DNA, 15 bp, Homo sapiens
tgaaccacacctgaa

SEQ ID NO: 87221 - DNA, 15 bp, Homo sapiens
ttgaaccacacctga

SEQ ID NO: 87222 - DNA, 15 bp, Homo sapiens
attgaaccacacctg

SEQ ID NO: 87223 - DNA, 15 bp, Homo sapiens
tattgaaccacacct

SEQ ID NO: 87224 - DNA, 15 bp, Homo sapiens
ttattgaaccacacc

SEQ ID NO: 87225 - DNA, 15 bp, Homo sapiens
gttattgaaccacac

SEQ ID NO: 87226 - DNA, 15 bp, Homo sapiens
tgttattgaaccaca

SEQ ID NO: 87227 - DNA, 15 bp, Homo sapiens
ttgttattgaaccac

SEQ ID NO: 87228 - DNA, 15 bp, Homo sapiens
cttgttattgaacca

SEQ ID NO: 87229 - DNA, 15 bp, Homo sapiens
ccttgttattgaacc

SEQ ID NO: 87230 - DNA, 15 bp, Homo sapiens
cccttgttattgaac

SEQ ID NO: 87231 - DNA, 15 bp, Homo sapiens
gcccttgttattgaa

SEQ ID NO: 87232 - DNA, 15 bp, Homo sapiens
agcccttgttattga

SEQ ID NO: 87233 - DNA, 15 bp, Homo sapiens
cagcccttgttattg

SEQ ID NO: 87234 - DNA, 15 bp, Homo sapiens
ccagcccttgttatt

SEQ ID NO: 87235 - DNA, 15 bp, Homo sapiens
gccagcccttgttat

SEQ ID NO: 87236 - DNA, 15 bp, Homo sapiens
tgccagcccttgtta

SEQ ID NO: 87237 - DNA, 15 bp, Homo sapiens
atgccagcccttgtt

SEQ ID NO: 87238 - DNA, 15 bp, Homo sapiens
catgccagcccttgt

SEQ ID NO: 87239 - DNA, 15 bp, Homo sapiens
gcatgccagcccttg

SEQ ID NO: 87240 - DNA, 15 bp, Homo sapiens
tgcatgccagccctt

SEQ ID NO: 87241 - DNA, 15 bp, Homo sapiens
ttgcatgccagccct

SEQ ID NO: 87242 - DNA, 15 bp, Homo sapiens
attgcatgccagccc

SEQ ID NO: 87243 - DNA, 15 bp, Homo sapiens
gattgcatgccagcc

SEQ ID NO: 87244 - DNA, 15 bp, Homo sapiens
tgattgcatgccagc

SEQ ID NO: 87245 - DNA, 15 bp, Homo sapiens
ctgattgcatgccag

SEQ ID NO: 87246 - DNA, 15 bp, Homo sapiens
gctgattgcatgcca

SEQ ID NO: 87247 - DNA, 15 bp, Homo sapiens
agctgattgcatgcc

SEQ ID NO: 87248 - DNA, 15 bp, Homo sapiens
gagctgattgcatgc

SEQ ID NO: 87249 - DNA, 15 bp, Homo sapiens
agagctgattgcatg

SEQ ID NO: 87250 - DNA, 15 bp, Homo sapiens
aagagctgattgcat

SEQ ID NO: 87251 - DNA, 15 bp, Homo sapiens
aaagagctgattgca

SEQ ID NO: 87252 - DNA, 15 bp, Homo sapiens
gaaagagctgattgc

SEQ ID NO: 87253 - DNA, 15 bp, Homo sapiens
ggaaagagctgattg

SEQ ID NO: 87254 - DNA, 15 bp, Homo sapiens
aggaaagagctgatt

SEQ ID NO: 87255 - DNA, 15 bp, Homo sapiens
caggaaagagctgat

SEQ ID NO: 87256 - DNA, 15 bp, Homo sapiens
tcaggaaagagctga

SEQ ID NO: 87257 - DNA, 15 bp, Homo sapiens
ttcaggaaagagctg

SEQ ID NO: 87258 - DNA, 15 bp, Homo sapiens
attcaggaaagagct

SEQ ID NO: 87259 - DNA, 15 bp, Homo sapiens
cattcaggaaagagc

SEQ ID NO: 87260 - DNA, 15 bp, Homo sapiens
acattcaggaaagag

SEQ ID NO: 87261 - DNA, 15 bp, Homo sapiens
gacattcaggaaaga

SEQ ID NO: 87262 - DNA, 15 bp, Homo sapiens
tgacattcaggaaag

SEQ ID NO: 87263 - DNA, 15 bp, Homo sapiens
atgacattcaggaaa

SEQ ID NO: 87264 - DNA, 15 bp, Homo sapiens
gatgacattcaggaa

SEQ ID NO: 87265 - DNA, 15 bp, Homo sapiens
tgatgacattcagga

SEQ ID NO: 87266 - DNA, 15 bp, Homo sapiens
ttgatgacattcagg

SEQ ID NO: 87267 - DNA, 15 bp, Homo sapiens
gttgatgacattcag

SEQ ID NO: 87268 - DNA, 15 bp, Homo sapiens
tgttgatgacattca

SEQ ID NO: 87269 - DNA, 15 bp, Homo sapiens
ttgttgatgacattc

SEQ ID NO: 87270 - DNA, 15 bp, Homo sapiens
attgttgatgacatt

SEQ ID NO: 87271 - DNA, 15 bp, Homo sapiens
cattgttgatgacat

SEQ ID NO: 87272 - DNA, 15 bp, Homo sapiens
gcattgttgatgaca

SEQ ID NO: 87273 - DNA, 15 bp, Homo sapiens
ggcattgttgatgac

SEQ ID NO: 87274 - DNA, 15 bp, Homo sapiens
tggcattgttgatga

SEQ ID NO: 87275 - DNA, 15 bp, Homo sapiens
atggcattgttgatg

SEQ ID NO: 87276 - DNA, 15 bp, Homo sapiens
aatggcattgttgat

SEQ ID NO: 87277 - DNA, 15 bp, Homo sapiens
gaatggcattgttga

SEQ ID NO: 87278 - DNA, 15 bp, Homo sapiens
agaatggcattgttg

SEQ ID NO: 87279 - DNA, 15 bp, Homo sapiens
gagaatggcattgtt

SEQ ID NO: 87280 - DNA, 15 bp, Homo sapiens
ggagaatggcattgt

SEQ ID NO: 87281 - DNA, 15 bp, Homo sapiens
cggagaatggcattg

SEQ ID NO: 87282 - DNA, 15 bp, Homo sapiens
ccggagaatggcatt

SEQ ID NO: 87283 - DNA, 15 bp, Homo sapiens
cccggagaatggcat

SEQ ID NO: 87284 - DNA, 15 bp, Homo sapiens
gcccggagaatggca

SEQ ID NO: 87285 - DNA, 15 bp, Homo sapiens
ggcccggagaatggc

SEQ ID NO: 87286 - DNA, 15 bp, Homo sapiens
tggcccggagaatgg

SEQ ID NO: 87287 - DNA, 15 bp, Homo sapiens
ttggcccggagaatg

SEQ ID NO: 87288 - DNA, 15 bp, Homo sapiens
gttggcccggagaat

SEQ ID NO: 87289 - DNA, 15 bp, Homo sapiens
ggttggcccggagaa

SEQ ID NO: 87290 - DNA, 15 bp, Homo sapiens
aggttggcccggaga

SEQ ID NO: 87291 - DNA, 15 bp, Homo sapiens
caggttggcccggag

SEQ ID NO: 87292 - DNA, 15 bp, Homo sapiens
gcaggttggcccgga

SEQ ID NO: 87293 - DNA, 15 bp, Homo sapiens
tgcaggttggcccgg

SEQ ID NO: 87294 - DNA, 15 bp, Homo sapiens
ttgcaggttggcccg

SEQ ID NO: 87295 - DNA, 15 bp, Homo sapiens
tttgcaggttggccc

SEQ ID NO: 87296 - DNA, 15 bp, Homo sapiens
ttttgcaggttggcc

SEQ ID NO: 87297 - DNA, 15 bp, Homo sapiens
cttttgcaggttggc

SEQ ID NO: 87298 - DNA, 15 bp, Homo sapiens
ccttttgcaggttgg

SEQ ID NO: 87299 - DNA, 15 bp, Homo sapiens
cccttttgcaggttg

SEQ ID NO: 87300 - DNA, 15 bp, Homo sapiens
tcccttttgcaggtt

SEQ ID NO: 87301 - DNA, 15 bp, Homo sapiens
ctcccttttgcaggt

SEQ ID NO: 87302 - DNA, 15 bp, Homo sapiens
tctcccttttgcagg

SEQ ID NO: 87303 - DNA, 15 bp, Homo sapiens
ctctcccttttgcag

SEQ ID NO: 87304 - DNA, 15 bp, Homo sapiens
tctctcccttttgca

SEQ ID NO: 87305 - DNA, 15 bp, Homo sapiens
ttctctcccttttgc

SEQ ID NO: 87306 - DNA, 15 bp, Homo sapiens
gttctctcccttttg

SEQ ID NO: 87307 - DNA, 15 bp, Homo sapiens
ggttctctccctttt

SEQ ID NO: 87308 - DNA, 15 bp, Homo sapiens
gggttctctcccttt

SEQ ID NO: 87309 - DNA, 15 bp, Homo sapiens
agggttctctccctt

SEQ ID NO: 87310 - DNA, 15 bp, Homo sapiens
tagggttctctccct

SEQ ID NO: 87311 - DNA, 15 bp, Homo sapiens
ctagggttctctccc

SEQ ID NO: 87312 - DNA, 15 bp, Homo sapiens
gctagggttctctcc

SEQ ID NO: 87313 - DNA, 15 bp, Homo sapiens
ggctagggttctctc

SEQ ID NO: 87314 - DNA, 15 bp, Homo sapiens
tggctagggttctct

SEQ ID NO: 87315 - DNA, 15 bp, Homo sapiens
atggctagggttctc

SEQ ID NO: 87316 - DNA, 15 bp, Homo sapiens
aatggctagggttct

SEQ ID NO: 87317 - DNA, 15 bp, Homo sapiens
taatggctagggttc

SEQ ID NO: 87318 - DNA, 15 bp, Homo sapiens
ataatggctagggtt

SEQ ID NO: 87319 - DNA, 15 bp, Homo sapiens
cataatggctagggt

SEQ ID NO: 87320 - DNA, 15 bp, Homo sapiens
ccataatggctaggg

SEQ ID NO: 87321 - DNA, 15 bp, Homo sapiens
tccataatggctagg

SEQ ID NO: 87322 - DNA, 15 bp, Homo sapiens
ttccataatggctag

SEQ ID NO: 87323 - DNA, 15 bp, Homo sapiens
attccataatggcta

SEQ ID NO: 87324 - DNA, 15 bp, Homo sapiens
aattccataatggct

SEQ ID NO: 87325 - DNA, 15 bp, Homo sapiens
taattccataatggc

SEQ ID NO: 87326 - DNA, 15 bp, Homo sapiens
gtaattccataatgg

SEQ ID NO: 87327 - DNA, 15 bp, Homo sapiens
agtaattccataatg

SEQ ID NO: 87328 - DNA, 15 bp, Homo sapiens
cagtaattccataat

SEQ ID NO: 87329 - DNA, 15 bp, Homo sapiens
gcagtaattccataa

SEQ ID NO: 87330 - DNA, 15 bp, Homo sapiens
agcagtaattccata

SEQ ID NO: 87331 - DNA, 15 bp, Homo sapiens
aagcagtaattccat

SEQ ID NO: 87332 - DNA, 15 bp, Homo sapiens
aaagcagtaattcca

SEQ ID NO: 87333 - DNA, 15 bp, Homo sapiens
gaaagcagtaattcc

SEQ ID NO: 87334 - DNA, 15 bp, Homo sapiens
tgaaagcagtaattc

SEQ ID NO: 87335 - DNA, 15 bp, Homo sapiens
ttgaaagcagtaatt

SEQ ID NO: 87336 - DNA, 15 bp, Homo sapiens
attgaaagcagtaat

SEQ ID NO: 87337 - DNA, 15 bp, Homo sapiens
gattgaaagcagtaa

SEQ ID NO: 87338 - DNA, 15 bp, Homo sapiens
tgattgaaagcagta

SEQ ID NO: 87339 - DNA, 15 bp, Homo sapiens
atgattgaaagcagt

SEQ ID NO: 87340 - DNA, 15 bp, Homo sapiens
gatgattgaaagcag

SEQ ID NO: 87341 - DNA, 15 bp, Homo sapiens
ggatgattgaaagca

SEQ ID NO: 87342 - DNA, 15 bp, Homo sapiens
gggatgattgaaagc

SEQ ID NO: 87343 - DNA, 15 bp, Homo sapiens
ggggatgattgaaag

SEQ ID NO: 87344 - DNA, 15 bp, Homo sapiens
aggggatgattgaaa

SEQ ID NO: 87345 - DNA, 15 bp, Homo sapiens
caggggatgattgaa

SEQ ID NO: 87346 - DNA, 15 bp, Homo sapiens
tcaggggatgattga

SEQ ID NO: 87347 - DNA, 15 bp, Homo sapiens
ttcaggggatgattg

SEQ ID NO: 87348 - DNA, 15 bp, Homo sapiens
attcaggggatgatt

SEQ ID NO: 87349 - DNA, 15 bp, Homo sapiens
gattcaggggatgat

SEQ ID NO: 87350 - DNA, 15 bp, Homo sapiens
agattcaggggatga

SEQ ID NO: 87351 - DNA, 15 bp, Homo sapiens
gagattcaggggatg

SEQ ID NO: 87352 - DNA, 15 bp, Homo sapiens
tgagattcaggggat

SEQ ID NO: 87353 - DNA, 15 bp, Homo sapiens
gtgagattcagggga

SEQ ID NO: 87354 - DNA, 15 bp, Homo sapiens
ggtgagattcagggg

SEQ ID NO: 87355 - DNA, 15 bp, Homo sapiens
tggtgagattcaggg

SEQ ID NO: 87356 - DNA, 15 bp, Homo sapiens
ttggtgagattcagg

SEQ ID NO: 87357 - DNA, 15 bp, Homo sapiens
cttggtgagattcag

SEQ ID NO: 87358 - DNA, 15 bp, Homo sapiens
gcttggtgagattca

SEQ ID NO: 87359 - DNA, 15 bp, Homo sapiens
tgcttggtgagattc

SEQ ID NO: 87360 - DNA, 15 bp, Homo sapiens
ctgcttggtgagatt

SEQ ID NO: 87361 - DNA, 15 bp, Homo sapiens
gctgcttggtgagat

SEQ ID NO: 87362 - DNA, 15 bp, Homo sapiens
tgctgcttggtgaga

SEQ ID NO: 87363 - DNA, 15 bp, Homo sapiens
ctgctgcttggtgag

SEQ ID NO: 87364 - DNA, 15 bp, Homo sapiens
gctgctgcttggtga

SEQ ID NO: 87365 - DNA, 15 bp, Homo sapiens
agctgctgcttggtg

SEQ ID NO: 87366 - DNA, 15 bp, Homo sapiens
gagctgctgcttggt

SEQ ID NO: 87367 - DNA, 15 bp, Homo sapiens
agagctgctgcttgg

SEQ ID NO: 87368 - DNA, 15 bp, Homo sapiens
gagagctgctgcttg

SEQ ID NO: 87369 - DNA, 15 bp, Homo sapiens
tgagagctgctgctt

SEQ ID NO: 87370 - DNA, 15 bp, Homo sapiens
ctgagagctgctgct

SEQ ID NO: 87371 - DNA, 15 bp, Homo sapiens
tctgagagctgctgc

SEQ ID NO: 87372 - DNA, 15 bp, Homo sapiens
ctctgagagctgctg

SEQ ID NO: 87373 - DNA, 15 bp, Homo sapiens
cctctgagagctgct

SEQ ID NO: 87374 - DNA, 15 bp, Homo sapiens
acctctgagagctgc

SEQ ID NO: 87375 - DNA, 15 bp, Homo sapiens
cacctctgagagctg

SEQ ID NO: 87376 - DNA, 15 bp, Homo sapiens
ccacctctgagagct

SEQ ID NO: 87377 - DNA, 15 bp, Homo sapiens
gccacctctgagagc

SEQ ID NO: 87378 - DNA, 15 bp, Homo sapiens
agccacctctgagag

SEQ ID NO: 87379 - DNA, 15 bp, Homo sapiens
gagccacctctgaga

SEQ ID NO: 87380 - DNA, 15 bp, Homo sapiens
agagccacctctgag

SEQ ID NO: 87381 - DNA, 15 bp, Homo sapiens
cagagccacctctga

SEQ ID NO: 87382 - DNA, 15 bp, Homo sapiens
acagagccacctctg

SEQ ID NO: 87383 - DNA, 15 bp, Homo sapiens
tacagagccacctct

SEQ ID NO: 87384 - DNA, 15 bp, Homo sapiens
ttacagagccacctc

SEQ ID NO: 87385 - DNA, 15 bp, Homo sapiens
cttacagagccacct

SEQ ID NO: 87386 - DNA, 15 bp, Homo sapiens
acttacagagccacc

SEQ ID NO: 87387 - DNA, 15 bp, Homo sapiens
cacttacagagccac

SEQ ID NO: 87388 - DNA, 15 bp, Homo sapiens
acacttacagagcca

SEQ ID NO: 87389 - DNA, 15 bp, Homo sapiens
cacacttacagagcc

SEQ ID NO: 87390 - DNA, 15 bp, Homo sapiens
ccacacttacagagc

SEQ ID NO: 87391 - DNA, 15 bp, Homo sapiens
gccacacttacagag

SEQ ID NO: 87392 - DNA, 15 bp, Homo sapiens
agccacacttacaga

SEQ ID NO: 87393 - DNA, 15 bp, Homo sapiens
cagccacacttacag

SEQ ID NO: 87394 - DNA, 15 bp, Homo sapiens
acagccacacttaca

SEQ ID NO: 87395 - DNA, 15 bp, Homo sapiens
cacagccacacttac

SEQ ID NO: 87396 - DNA, 15 bp, Homo sapiens
acacagccacactta

SEQ ID NO: 87397 - DNA, 15 bp, Homo sapiens
gacacagccacactt

SEQ ID NO: 87398 - DNA, 15 bp, Homo sapiens
agacacagccacact

SEQ ID NO: 87399 - DNA, 15 bp, Homo sapiens
cagacacagccacac

SEQ ID NO: 87400 - DNA, 15 bp, Homo sapiens
acagacacagccaca

SEQ ID NO: 87401 - DNA, 15 bp, Homo sapiens
tacagacacagccac

SEQ ID NO: 87402 - DNA, 15 bp, Homo sapiens
atacagacacagcca

SEQ ID NO: 87403 - DNA, 15 bp, Homo sapiens
tatacagacacagcc

SEQ ID NO: 87404 - DNA, 15 bp, Homo sapiens
ctatacagacacagc

SEQ ID NO: 87405 - DNA, 15 bp, Homo sapiens
tctatacagacacag

SEQ ID NO: 87406 - DNA, 15 bp, Homo sapiens
atctatacagacaca

SEQ ID NO: 87407 - DNA, 15 bp, Homo sapiens
catctatacagacac

SEQ ID NO: 87408 - DNA, 15 bp, Homo sapiens
ccatctatacagaca

SEQ ID NO: 87409 - DNA, 15 bp, Homo sapiens
tccatctatacagac

SEQ ID NO: 87410 - DNA, 15 bp, Homo sapiens
ctccatctatacaga

SEQ ID NO: 87411 - DNA, 15 bp, Homo sapiens
actccatctatacag

SEQ ID NO: 87412 - DNA, 15 bp, Homo sapiens
cactccatctataca

SEQ ID NO: 87413 - DNA, 15 bp, Homo sapiens
ccactccatctatac

SEQ ID NO: 87414 - DNA, 15 bp, Homo sapiens
cccactccatctata

SEQ ID NO: 87415 - DNA, 15 bp, Homo sapiens
ccccactccatctat

SEQ ID NO: 87416 - DNA, 15 bp, Homo sapiens
gccccactccatcta

SEQ ID NO: 87417 - DNA, 15 bp, Homo sapiens
tgccccactccatct

SEQ ID NO: 87418 - DNA, 15 bp, Homo sapiens
ttgccccactccatc

SEQ ID NO: 87419 - DNA, 15 bp, Homo sapiens
cttgccccactccat

SEQ ID NO: 87420 - DNA, 15 bp, Homo sapiens
ccttgccccactcca

SEQ ID NO: 87421 - DNA, 15 bp, Homo sapiens
cccttgccccactcc

SEQ ID NO: 87422 - DNA, 15 bp, Homo sapiens
tcccttgccccactc

SEQ ID NO: 87423 - DNA, 15 bp, Homo sapiens
ctcccttgccccact

SEQ ID NO: 87424 - DNA, 15 bp, Homo sapiens
tctcccttgccccac

SEQ ID NO: 87425 - DNA, 15 bp, Homo sapiens
ctctcccttgcccca

SEQ ID NO: 87426 - DNA, 15 bp, Homo sapiens
cctctcccttgcccc

SEQ ID NO: 87427 - DNA, 15 bp, Homo sapiens
ccctctcccttgccc

SEQ ID NO: 87428 - DNA, 15 bp, Homo sapiens
accctctcccttgcc

SEQ ID NO: 87429 - DNA, 15 bp, Homo sapiens
aaccctctcccttgc

SEQ ID NO: 87430 - DNA, 15 bp, Homo sapiens
taaccctctcccttg

SEQ ID NO: 87431 - DNA, 15 bp, Homo sapiens
ataaccctctccctt

SEQ ID NO: 87432 - DNA, 15 bp, Homo sapiens
cataaccctctccct

SEQ ID NO: 87433 - DNA, 15 bp, Homo sapiens
ccataaccctctccc

SEQ ID NO: 87434 - DNA, 15 bp, Homo sapiens
tccataaccctctcc

SEQ ID NO: 87435 - DNA, 15 bp, Homo sapiens
ctccataaccctctc

SEQ ID NO: 87436 - DNA, 15 bp, Homo sapiens
tctccataaccctct

SEQ ID NO: 87437 - DNA, 15 bp, Homo sapiens
ttctccataaccctc

SEQ ID NO: 87438 - DNA, 15 bp, Homo sapiens
cttctccataaccct

SEQ ID NO: 87439 - DNA, 15 bp, Homo sapiens
ccttctccataaccc

SEQ ID NO: 87440 - DNA, 15 bp, Homo sapiens
cccttctccataacc

SEQ ID NO: 87441 - DNA, 15 bp, Homo sapiens
ccccttctccataac

SEQ ID NO: 87442 - DNA, 15 bp, Homo sapiens
tccccttctccataa

SEQ ID NO: 87443 - DNA, 15 bp, Homo sapiens
ctccccttctccata

SEQ ID NO: 87444 - DNA, 15 bp, Homo sapiens
tctccccttctccat

SEQ ID NO: 87445 - DNA, 15 bp, Homo sapiens
ttctccccttctcca

SEQ ID NO: 87446 - DNA, 15 bp, Homo sapiens
tttctccccttctcc

SEQ ID NO: 87447 - DNA, 15 bp, Homo sapiens
ttttctccccttctc

SEQ ID NO: 87448 - DNA, 15 bp, Homo sapiens
tttttctccccttct

SEQ ID NO: 87449 - DNA, 15 bp, Homo sapiens
atttttctccccttc

SEQ ID NO: 87450 - DNA, 15 bp, Homo sapiens
catttttctcccctt

SEQ ID NO: 87451 - DNA, 15 bp, Homo sapiens
acatttttctcccct

SEQ ID NO: 87452 - DNA, 15 bp, Homo sapiens
cacatttttctcccc

SEQ ID NO: 87453 - DNA, 15 bp, Homo sapiens
tcacatttttctccc

SEQ ID NO: 87454 - DNA, 15 bp, Homo sapiens
ttcacatttttctcc

SEQ ID NO: 87455 - DNA, 15 bp, Homo sapiens
attcacatttttctc

SEQ ID NO: 87456 - DNA, 15 bp, Homo sapiens
gattcacatttttct

SEQ ID NO: 87457 - DNA, 15 bp, Homo sapiens
agattcacatttttc

SEQ ID NO: 87458 - DNA, 15 bp, Homo sapiens
gagattcacattttt

SEQ ID NO: 87459 - DNA, 15 bp, Homo sapiens
tgagattcacatttt

SEQ ID NO: 87460 - DNA, 15 bp, Homo sapiens
atgagattcacattt

SEQ ID NO: 87461 - DNA, 15 bp, Homo sapiens
aatgagattcacatt

SEQ ID NO: 87462 - DNA, 15 bp, Homo sapiens
caatgagattcacat

SEQ ID NO: 87463 - DNA, 15 bp, Homo sapiens
acaatgagattcaca

SEQ ID NO: 87464 - DNA, 15 bp, Homo sapiens
tacaatgagattcac

SEQ ID NO: 87465 - DNA, 15 bp, Homo sapiens
ctacaatgagattca

SEQ ID NO: 87466 - DNA, 15 bp, Homo sapiens
cctacaatgagattc

SEQ ID NO: 87467 - DNA, 15 bp, Homo sapiens
ccctacaatgagatt

SEQ ID NO: 87468 - DNA, 15 bp, Homo sapiens
cccctacaatgagat

SEQ ID NO: 87469 - DNA, 15 bp, Homo sapiens
tcccctacaatgaga

SEQ ID NO: 87470 - DNA, 15 bp, Homo sapiens
ttcccctacaatgag

SEQ ID NO: 87471 - DNA, 15 bp, Homo sapiens
gttcccctacaatga

SEQ ID NO: 87472 - DNA, 15 bp, Homo sapiens
tgttcccctacaatg

SEQ ID NO: 87473 - DNA, 15 bp, Homo sapiens
ctgttcccctacaat

SEQ ID NO: 87474 - DNA, 15 bp, Homo sapiens
gctgttcccctacaa

SEQ ID NO: 87475 - DNA, 15 bp, Homo sapiens
agctgttcccctaca

SEQ ID NO: 87476 - DNA, 15 bp, Homo sapiens
cagctgttcccctac

SEQ ID NO: 87477 - DNA, 15 bp, Homo sapiens
gcagctgttccccta

SEQ ID NO: 87478 - DNA, 15 bp, Homo sapiens
tgcagctgttcccct

SEQ ID NO: 87479 - DNA, 15 bp, Homo sapiens
ctgcagctgttcccc

SEQ ID NO: 87480 - DNA, 15 bp, Homo sapiens
tctgcagctgttccc

SEQ ID NO: 87481 - DNA, 15 bp, Homo sapiens
ctctgcagctgttcc

SEQ ID NO: 87482 - DNA, 15 bp, Homo sapiens
tctctgcagctgttc

SEQ ID NO: 87483 - DNA, 15 bp, Homo sapiens
gtctctgcagctgtt

SEQ ID NO: 87484 - DNA, 15 bp, Homo sapiens
ggtctctgcagctgt

SEQ ID NO: 87485 - DNA, 15 bp, Homo sapiens
cggtctctgcagctg

SEQ ID NO: 87486 - DNA, 15 bp, Homo sapiens
acggtctctgcagct

SEQ ID NO: 87487 - DNA, 15 bp, Homo sapiens
aacggtctctgcagc

SEQ ID NO: 87488 - DNA, 15 bp, Homo sapiens
taacggtctctgcag

SEQ ID NO: 87489 - DNA, 15 bp, Homo sapiens
ataacggtctctgca

SEQ ID NO: 87490 - DNA, 15 bp, Homo sapiens
tataacggtctctgc

SEQ ID NO: 87491 - DNA, 15 bp, Homo sapiens
atataacggtctctg

SEQ ID NO: 87492 - DNA, 15 bp, Homo sapiens
aatataacggtctct

SEQ ID NO: 87493 - DNA, 15 bp, Homo sapiens
taatataacggtctc

SEQ ID NO: 87494 - DNA, 15 bp, Homo sapiens
ataatataacggtct

SEQ ID NO: 87495 - DNA, 15 bp, Homo sapiens
cataatataacggtc

SEQ ID NO: 87496 - DNA, 15 bp, Homo sapiens
tcataatataacggt

SEQ ID NO: 87497 - DNA, 15 bp, Homo sapiens
atcataatataacgg

SEQ ID NO: 87498 - DNA, 15 bp, Homo sapiens
tatcataatataacg

SEQ ID NO: 87499 - DNA, 15 bp, Homo sapiens
ttatcataatataac

SEQ ID NO: 87500 - DNA, 15 bp, Homo sapiens
tttatcataatataa

SEQ ID NO: 87501 - DNA, 15 bp, Homo sapiens
atttatcataatata

SEQ ID NO: 87502 - DNA, 15 bp, Homo sapiens
gatttatcataatat

SEQ ID NO: 87503 - DNA, 15 bp, Homo sapiens
agatttatcataata

SEQ ID NO: 87504 - DNA, 15 bp, Homo sapiens
cagatttatcataat

SEQ ID NO: 87505 - DNA, 15 bp, Homo sapiens
ccagatttatcataa

SEQ ID NO: 87506 - DNA, 15 bp, Homo sapiens
tccagatttatcata

SEQ ID NO: 87507 - DNA, 15 bp, Homo sapiens
atccagatttatcat

SEQ ID NO: 87508 - DNA, 15 bp, Homo sapiens
aatccagatttatca

SEQ ID NO: 87509 - DNA, 15 bp, Homo sapiens
caatccagatttatc

SEQ ID NO: 87510 - DNA, 15 bp, Homo sapiens
tcaatccagatttat

SEQ ID NO: 87511 - DNA, 15 bp, Homo sapiens
atcaatccagattta

SEQ ID NO: 87512 - DNA, 15 bp, Homo sapiens
gatcaatccagattt

SEQ ID NO: 87513 - DNA, 15 bp, Homo sapiens
ggatcaatccagatt

SEQ ID NO: 87514 - DNA, 15 bp, Homo sapiens
tggatcaatccagat

SEQ ID NO: 87515 - DNA, 15 bp, Homo sapiens
ctggatcaatccaga

SEQ ID NO: 87516 - DNA, 15 bp, Homo sapiens
cctggatcaatccag

SEQ ID NO: 87517 - DNA, 15 bp, Homo sapiens
gcctggatcaatcca

SEQ ID NO: 87518 - DNA, 15 bp, Homo sapiens
agcctggatcaatcc

SEQ ID NO: 87519 - DNA, 15 bp, Homo sapiens
gagcctggatcaatc

SEQ ID NO: 87520 - DNA, 15 bp, Homo sapiens
agagcctggatcaat

SEQ ID NO: 87521 - DNA, 15 bp, Homo sapiens
cagagcctggatcaa

SEQ ID NO: 87522 - DNA, 15 bp, Homo sapiens
ccagagcctggatca

SEQ ID NO: 87523 - DNA, 15 bp, Homo sapiens
cccagagcctggatc

SEQ ID NO: 87524 - DNA, 15 bp, Homo sapiens
gcccagagcctggat

SEQ ID NO: 87525 - DNA, 15 bp, Homo sapiens
tgcccagagcctgga

SEQ ID NO: 87526 - DNA, 15 bp, Homo sapiens
ctgcccagagcctgg

SEQ ID NO: 87527 - DNA, 15 bp, Homo sapiens
tctgcccagagcctg

SEQ ID NO: 87528 - DNA, 15 bp, Homo sapiens
ttctgcccagagcct

SEQ ID NO: 87529 - DNA, 15 bp, Homo sapiens
cttctgcccagagcc

SEQ ID NO: 87530 - DNA, 15 bp, Homo sapiens
acttctgcccagagc

SEQ ID NO: 87531 - DNA, 15 bp, Homo sapiens
cacttctgcccagag

SEQ ID NO: 87532 - DNA, 15 bp, Homo sapiens
tcacttctgcccaga

SEQ ID NO: 87533 - DNA, 15 bp, Homo sapiens
atcacttctgcccag

SEQ ID NO: 87534 - DNA, 15 bp, Homo sapiens
tatcacttctgccca

SEQ ID NO: 87535 - DNA, 15 bp, Homo sapiens
ttatcacttctgccc

SEQ ID NO: 87536 - DNA, 15 bp, Homo sapiens
cttatcacttctgcc

SEQ ID NO: 87537 - DNA, 15 bp, Homo sapiens
acttatcacttctgc

SEQ ID NO: 87538 - DNA, 15 bp, Homo sapiens
aacttatcacttctg

SEQ ID NO: 87539 - DNA, 15 bp, Homo sapiens
aaacttatcacttct

SEQ ID NO: 87540 - DNA, 15 bp, Homo sapiens
taaacttatcacttc

SEQ ID NO: 87541 - DNA, 15 bp, Homo sapiens
gtaaacttatcactt

SEQ ID NO: 87542 - DNA, 15 bp, Homo sapiens
cgtaaacttatcact

SEQ ID NO: 87543 - DNA, 15 bp, Homo sapiens
tcgtaaacttatcac

SEQ ID NO: 87544 - DNA, 15 bp, Homo sapiens
ttcgtaaacttatca

SEQ ID NO: 87545 - DNA, 15 bp, Homo sapiens
attcgtaaacttatc

SEQ ID NO: 87546 - DNA, 15 bp, Homo sapiens
aattcgtaaacttat

SEQ ID NO: 87547 - DNA, 15 bp, Homo sapiens
caattcgtaaactta

SEQ ID NO: 87548 - DNA, 15 bp, Homo sapiens
ccaattcgtaaactt

SEQ ID NO: 87549 - DNA, 15 bp, Homo sapiens
gccaattcgtaaact

SEQ ID NO: 87550 - DNA, 15 bp, Homo sapiens
agccaattcgtaaac

SEQ ID NO: 87551 - DNA, 15 bp, Homo sapiens
cagccaattcgtaaa

SEQ ID NO: 87552 - DNA, 15 bp, Homo sapiens
ccagccaattcgtaa

SEQ ID NO: 87553 - DNA, 15 bp, Homo sapiens
accagccaattcgta

SEQ ID NO: 87554 - DNA, 15 bp, Homo sapiens
aaccagccaattcgt

SEQ ID NO: 87555 - DNA, 15 bp, Homo sapiens
caaccagccaattcg

SEQ ID NO: 87556 - DNA, 15 bp, Homo sapiens
ccaaccagccaattc

SEQ ID NO: 87557 - DNA, 15 bp, Homo sapiens
cccaaccagccaatt

SEQ ID NO: 87558 - DNA, 15 bp, Homo sapiens
gcccaaccagccaat

SEQ ID NO: 87559 - DNA, 15 bp, Homo sapiens
agcccaaccagccaa

SEQ ID NO: 87560 - DNA, 15 bp, Homo sapiens
aagcccaaccagcca

SEQ ID NO: 87561 - DNA, 15 bp, Homo sapiens
gaagcccaaccagcc

SEQ ID NO: 87562 - DNA, 15 bp, Homo sapiens
agaagcccaaccagc

SEQ ID NO: 87563 - DNA, 15 bp, Homo sapiens
aagaagcccaaccag

SEQ ID NO: 87564 - DNA, 15 bp, Homo sapiens
caagaagcccaacca

SEQ ID NO: 87565 - DNA, 15 bp, Homo sapiens
tcaagaagcccaacc

SEQ ID NO: 87566 - DNA, 15 bp, Homo sapiens
ttcaagaagcccaac

SEQ ID NO: 87567 - DNA, 15 bp, Homo sapiens
gttcaagaagcccaa

SEQ ID NO: 87568 - DNA, 15 bp, Homo sapiens
agttcaagaagccca

SEQ ID NO: 87569 - DNA, 15 bp, Homo sapiens
cagttcaagaagccc

SEQ ID NO: 87570 - DNA, 15 bp, Homo sapiens
gcagttcaagaagcc

SEQ ID NO: 87571 - DNA, 15 bp, Homo sapiens
tgcagttcaagaagc

SEQ ID NO: 87572 - DNA, 15 bp, Homo sapiens
ctgcagttcaagaag

SEQ ID NO: 87573 - DNA, 15 bp, Homo sapiens
tctgcagttcaagaa

SEQ ID NO: 87574 - DNA, 15 bp, Homo sapiens
ttctgcagttcaaga

SEQ ID NO: 87575 - DNA, 15 bp, Homo sapiens
cttctgcagttcaag

SEQ ID NO: 87576 - DNA, 15 bp, Homo sapiens
tcttctgcagttcaa

SEQ ID NO: 87577 - DNA, 15 bp, Homo sapiens
ctcttctgcagttca

SEQ ID NO: 87578 - DNA, 15 bp, Homo sapiens
tctcttctgcagttc

SEQ ID NO: 87579 - DNA, 15 bp, Homo sapiens
ttctcttctgcagtt

SEQ ID NO: 87580 - DNA, 15 bp, Homo sapiens
tttctcttctgcagt

SEQ ID NO: 87581 - DNA, 15 bp, Homo sapiens
ttttctcttctgcag

SEQ ID NO: 87582 - DNA, 15 bp, Homo sapiens
attttctcttctgca

SEQ ID NO: 87583 - DNA, 15 bp, Homo sapiens
cattttctcttctgc

SEQ ID NO: 87584 - DNA, 15 bp, Homo sapiens
tcattttctcttctg

SEQ ID NO: 87585 - DNA, 15 bp, Homo sapiens
gtcattttctcttct

SEQ ID NO: 87586 - DNA, 15 bp, Homo sapiens
tgtcattttctcttc

SEQ ID NO: 87587 - DNA, 15 bp, Homo sapiens
gtgtcattttctctt

SEQ ID NO: 87588 - DNA, 15 bp, Homo sapiens
agtgtcattttctct

SEQ ID NO: 87589 - DNA, 15 bp, Homo sapiens
cagtgtcattttctc

SEQ ID NO: 87590 - DNA, 15 bp, Homo sapiens
tcagtgtcattttct

SEQ ID NO: 87591 - DNA, 15 bp, Homo sapiens
atcagtgtcattttc

SEQ ID NO: 87592 - DNA, 15 bp, Homo sapiens
tatcagtgtcatttt

SEQ ID NO: 87593 - DNA, 15 bp, Homo sapiens
atatcagtgtcattt

SEQ ID NO: 87594 - DNA, 15 bp, Homo sapiens
catatcagtgtcatt

SEQ ID NO: 87595 - DNA, 15 bp, Homo sapiens
acatatcagtgtcat

SEQ ID NO: 87596 - DNA, 15 bp, Homo sapiens
tacatatcagtgtca

SEQ ID NO: 87597 - DNA, 15 bp, Homo sapiens
ttacatatcagtgtc

SEQ ID NO: 87598 - DNA, 15 bp, Homo sapiens
tttacatatcagtgt

SEQ ID NO: 87599 - DNA, 15 bp, Homo sapiens
ttttacatatcagtg

SEQ ID NO: 87600 - DNA, 15 bp, Homo sapiens
tttttacatatcagt

SEQ ID NO: 87601 - DNA, 15 bp, Homo sapiens
atttttacatatcag

SEQ ID NO: 87602 - DNA, 15 bp, Homo sapiens
gatttttacatatca

SEQ ID NO: 87603 - DNA, 15 bp, Homo sapiens
cgatttttacatatc

SEQ ID NO: 87604 - DNA, 15 bp, Homo sapiens
acgatttttacatat

SEQ ID NO: 87605 - DNA, 15 bp, Homo sapiens
tacgatttttacata

SEQ ID NO: 87606 - DNA, 15 bp, Homo sapiens
ttacgatttttacat

SEQ ID NO: 87607 - DNA, 15 bp, Homo sapiens
gttacgatttttaca

SEQ ID NO: 87608 - DNA, 15 bp, Homo sapiens
tgttacgatttttac

SEQ ID NO: 87609 - DNA, 15 bp, Homo sapiens
atgttacgattttta

SEQ ID NO: 87610 - DNA, 15 bp, Homo sapiens
aatgttacgattttt

SEQ ID NO: 87611 - DNA, 15 bp, Homo sapiens
aaatgttacgatttt

SEQ ID NO: 87612 - DNA, 15 bp, Homo sapiens
taaatgttacgattt

SEQ ID NO: 87613 - DNA, 15 bp, Homo sapiens
ctaaatgttacgatt

SEQ ID NO: 87614 - DNA, 15 bp, Homo sapiens
actaaatgttacgat

SEQ ID NO: 87615 - DNA, 15 bp, Homo sapiens
cactaaatgttacga

SEQ ID NO: 87616 - DNA, 15 bp, Homo sapiens
tcactaaatgttacg

SEQ ID NO: 87617 - DNA, 15 bp, Homo sapiens
ttcactaaatgttac

SEQ ID NO: 87618 - DNA, 15 bp, Homo sapiens
attcactaaatgtta

SEQ ID NO: 87619 - DNA, 15 bp, Homo sapiens
aattcactaaatgtt

SEQ ID NO: 87620 - DNA, 15 bp, Homo sapiens
gaattcactaaatgt

SEQ ID NO: 87621 - DNA, 15 bp, Homo sapiens
tgaattcactaaatg

SEQ ID NO: 87622 - DNA, 15 bp, Homo sapiens
atgaattcactaaat

SEQ ID NO: 87623 - DNA, 15 bp, Homo sapiens
tatgaattcactaaa

SEQ ID NO: 87624 - DNA, 15 bp, Homo sapiens
atatgaattcactaa

SEQ ID NO: 87625 - DNA, 15 bp, Homo sapiens
tatatgaattcacta

SEQ ID NO: 87626 - DNA, 15 bp, Homo sapiens
ttatatgaattcact

SEQ ID NO: 87627 - DNA, 15 bp, Homo sapiens
tttatatgaattcac

SEQ ID NO: 87628 - DNA, 15 bp, Homo sapiens
ctttatatgaattca

SEQ ID NO: 87629 - DNA, 15 bp, Homo sapiens
actttatatgaattc

SEQ ID NO: 87630 - DNA, 15 bp, Homo sapiens
cactttatatgaatt

SEQ ID NO: 87631 - DNA, 15 bp, Homo sapiens
tcactttatatgaat

SEQ ID NO: 87632 - DNA, 15 bp, Homo sapiens
ctcactttatatgaa

SEQ ID NO: 87633 - DNA, 15 bp, Homo sapiens
actcactttatatga

SEQ ID NO: 87634 - DNA, 15 bp, Homo sapiens
aactcactttatatg

SEQ ID NO: 87635 - DNA, 15 bp, Homo sapiens
gaactcactttatat

SEQ ID NO: 87636 - DNA, 15 bp, Homo sapiens
tgaactcactttata

SEQ ID NO: 87637 - DNA, 15 bp, Homo sapiens
ttgaactcactttat

SEQ ID NO: 87638 - DNA, 15 bp, Homo sapiens
tttgaactcacttta

SEQ ID NO: 87639 - DNA, 15 bp, Homo sapiens
ttttgaactcacttt

SEQ ID NO: 87640 - DNA, 15 bp, Homo sapiens
tttttgaactcactt

SEQ ID NO: 87641 - DNA, 15 bp, Homo sapiens
atttttgaactcact

SEQ ID NO: 87642 - DNA, 15 bp, Homo sapiens
aatttttgaactcac

SEQ ID NO: 87643 - DNA, 15 bp, Homo sapiens
caatttttgaactca

SEQ ID NO: 87644 - DNA, 15 bp, Homo sapiens
acaatttttgaactc

SEQ ID NO: 87645 - DNA, 15 bp, Homo sapiens
aacaatttttgaact

SEQ ID NO: 87646 - DNA, 15 bp, Homo sapiens
taacaatttttgaac

SEQ ID NO: 87647 - DNA, 15 bp, Homo sapiens
ttaacaatttttgaa

SEQ ID NO: 87648 - DNA, 15 bp, Homo sapiens
attaacaatttttga

SEQ ID NO: 87649 - DNA, 15 bp, Homo sapiens
aattaacaatttttg

SEQ ID NO: 87650 - DNA, 15 bp, Homo sapiens
taattaacaattttt

SEQ ID NO: 87651 - DNA, 15 bp, Homo sapiens
ttaattaacaatttt

SEQ ID NO: 87652 - DNA, 15 bp, Homo sapiens
tttaattaacaattt

SEQ ID NO: 87653 - DNA, 15 bp, Homo sapiens
atttaattaacaatt

SEQ ID NO: 87654 - DNA, 15 bp, Homo sapiens
aatttaattaacaat

SEQ ID NO: 87655 - DNA, 15 bp, Homo sapiens
taatttaattaacaa

SEQ ID NO: 87656 - DNA, 15 bp, Homo sapiens
ataatttaattaaca

SEQ ID NO: 87657 - DNA, 15 bp, Homo sapiens
tataatttaattaac

SEQ ID NO: 87658 - DNA, 15 bp, Homo sapiens
ttataatttaattaa

SEQ ID NO: 87659 - DNA, 15 bp, Homo sapiens
attataatttaatta

SEQ ID NO: 87660 - DNA, 15 bp, Homo sapiens
aattataatttaatt

SEQ ID NO: 87661 - DNA, 15 bp, Homo sapiens
aaattataatttaat

SEQ ID NO: 87662 - DNA, 15 bp, Homo sapiens
taaattataatttaa

SEQ ID NO: 87663 - DNA, 15 bp, Homo sapiens
ttaaattataattta

SEQ ID NO: 87664 - DNA, 15 bp, Homo sapiens
attaaattataattt

SEQ ID NO: 87665 - DNA, 15 bp, Homo sapiens
aattaaattataatt

SEQ ID NO: 87666 - DNA, 15 bp, Homo sapiens
taattaaattataat

SEQ ID NO: 87667 - DNA, 15 bp, Homo sapiens
ataattaaattataa

SEQ ID NO: 87668 - DNA, 15 bp, Homo sapiens
tataattaaattata

SEQ ID NO: 87669 - DNA, 15 bp, Homo sapiens
ttataattaaattat

SEQ ID NO: 87670 - DNA, 15 bp, Homo sapiens
cttataattaaatta

SEQ ID NO: 87671 - DNA, 15 bp, Homo sapiens
acttataattaaatt

SEQ ID NO: 87672 - DNA, 15 bp, Homo sapiens
cacttataattaaat

SEQ ID NO: 87673 - DNA, 15 bp, Homo sapiens
acacttataattaaa

SEQ ID NO: 87674 - DNA, 15 bp, Homo sapiens
aacacttataattaa

SEQ ID NO: 87675 - DNA, 15 bp, Homo sapiens
aaacacttataatta

SEQ ID NO: 87676 - DNA, 15 bp, Homo sapiens
taaacacttataatt

SEQ ID NO: 87677 - DNA, 15 bp, Homo sapiens
ttaaacacttataat

SEQ ID NO: 87678 - DNA, 15 bp, Homo sapiens
attaaacacttataa

SEQ ID NO: 87679 - DNA, 15 bp, Homo sapiens
gattaaacacttata

SEQ ID NO: 87680 - DNA, 15 bp, Homo sapiens
tgattaaacacttat

SEQ ID NO: 87681 - DNA, 15 bp, Homo sapiens
ctgattaaacactta

SEQ ID NO: 87682 - DNA, 15 bp, Homo sapiens
actgattaaacactt

SEQ ID NO: 87683 - DNA, 15 bp, Homo sapiens
aactgattaaacact

SEQ ID NO: 87684 - DNA, 15 bp, Homo sapiens
aaactgattaaacac

SEQ ID NO: 87685 - DNA, 15 bp, Homo sapiens
caaactgattaaaca

SEQ ID NO: 87686 - DNA, 15 bp, Homo sapiens
tcaaactgattaaac

SEQ ID NO: 87687 - DNA, 15 bp, Homo sapiens
atcaaactgattaaa

SEQ ID NO: 87688 - DNA, 15 bp, Homo sapiens
aatcaaactgattaa

SEQ ID NO: 87689 - DNA, 15 bp, Homo sapiens
aaatcaaactgatta

SEQ ID NO: 87690 - DNA, 15 bp, Homo sapiens
caaatcaaactgatt

SEQ ID NO: 87691 - DNA, 15 bp, Homo sapiens
acaaatcaaactgat

SEQ ID NO: 87692 - DNA, 15 bp, Homo sapiens
aacaaatcaaactga

SEQ ID NO: 87693 - DNA, 15 bp, Homo sapiens
aaacaaatcaaactg

SEQ ID NO: 87694 - DNA, 15 bp, Homo sapiens
taaacaaatcaaact

SEQ ID NO: 87695 - DNA, 15 bp, Homo sapiens
ttaaacaaatcaaac

SEQ ID NO: 87696 - DNA, 15 bp, Homo sapiens
tttaaacaaatcaaa

SEQ ID NO: 87697 - DNA, 15 bp, Homo sapiens
ttttaaacaaatcaa

SEQ ID NO: 87698 - DNA, 15 bp, Homo sapiens
tttttaaacaaatca

SEQ ID NO: 87699 - DNA, 15 bp, Homo sapiens
gtttttaaacaaatc

SEQ ID NO: 87700 - DNA, 15 bp, Homo sapiens
ggtttttaaacaaat

SEQ ID NO: 87701 - DNA, 15 bp, Homo sapiens
tggtttttaaacaaa

SEQ ID NO: 87702 - DNA, 15 bp, Homo sapiens
gtggtttttaaacaa

SEQ ID NO: 87703 - DNA, 15 bp, Homo sapiens
agtggtttttaaaca

SEQ ID NO: 87704 - DNA, 15 bp, Homo sapiens
cagtggtttttaaac

SEQ ID NO: 87705 - DNA, 15 bp, Homo sapiens
acagtggtttttaaa

SEQ ID NO: 87706 - DNA, 15 bp, Homo sapiens
aacagtggtttttaa

SEQ ID NO: 87707 - DNA, 15 bp, Homo sapiens
aaacagtggttttta

SEQ ID NO: 87708 - DNA, 15 bp, Homo sapiens
aaaacagtggttttt

SEQ ID NO: 87709 - DNA, 15 bp, Homo sapiens
taaaacagtggtttt

SEQ ID NO: 87710 - DNA, 15 bp, Homo sapiens
ttaaaacagtggttt

SEQ ID NO: 87711 - DNA, 15 bp, Homo sapiens
tttaaaacagtggtt

SEQ ID NO: 87712 - DNA, 15 bp, Homo sapiens
atttaaaacagtggt

SEQ ID NO: 87713 - DNA, 15 bp, Homo sapiens
aatttaaaacagtgg

SEQ ID NO: 87714 - DNA, 15 bp, Homo sapiens
aaatttaaaacagtg

SEQ ID NO: 87715 - DNA, 15 bp, Homo sapiens
caaatttaaaacagt

SEQ ID NO: 87716 - DNA, 15 bp, Homo sapiens
ccaaatttaaaacag

SEQ ID NO: 87717 - DNA, 15 bp, Homo sapiens
accaaatttaaaaca

SEQ ID NO: 87718 - DNA, 15 bp, Homo sapiens
caccaaatttaaaac

SEQ ID NO: 87719 - DNA, 15 bp, Homo sapiens
ccaccaaatttaaaa

SEQ ID NO: 87720 - DNA, 15 bp, Homo sapiens
tccaccaaatttaaa

SEQ ID NO: 87721 - DNA, 15 bp, Homo sapiens
ttccaccaaatttaa

SEQ ID NO: 87722 - DNA, 15 bp, Homo sapiens
attccaccaaattta

SEQ ID NO: 87723 - DNA, 15 bp, Homo sapiens
tattccaccaaattt

SEQ ID NO: 87724 - DNA, 15 bp, Homo sapiens
atattccaccaaatt

SEQ ID NO: 87725 - DNA, 15 bp, Homo sapiens
catattccaccaaat

SEQ ID NO: 87726 - DNA, 15 bp, Homo sapiens
acatattccaccaaa

SEQ ID NO: 87727 - DNA, 15 bp, Homo sapiens
aacatattccaccaa

SEQ ID NO: 87728 - DNA, 15 bp, Homo sapiens
aaacatattccacca

SEQ ID NO: 87729 - DNA, 15 bp, Homo sapiens
aaaacatattccacc

SEQ ID NO: 87730 - DNA, 15 bp, Homo sapiens
aaaaacatattccac

SEQ ID NO: 87731 - DNA, 15 bp, Homo sapiens
taaaaacatattcca

SEQ ID NO: 87732 - DNA, 15 bp, Homo sapiens
ataaaaacatattcc

SEQ ID NO: 87733 - DNA, 15 bp, Homo sapiens
aataaaaacatattc

SEQ ID NO: 87734 - DNA, 15 bp, Homo sapiens
taataaaaacatatt

SEQ ID NO: 87735 - DNA, 15 bp, Homo sapiens
ctaataaaaacatat

SEQ ID NO: 87736 - DNA, 15 bp, Homo sapiens
gctaataaaaacata

SEQ ID NO: 87737 - DNA, 15 bp, Homo sapiens
agctaataaaaacat

SEQ ID NO: 87738 - DNA, 15 bp, Homo sapiens
aagctaataaaaaca

SEQ ID NO: 87739 - DNA, 15 bp, Homo sapiens
caagctaataaaaac

SEQ ID NO: 87740 - DNA, 15 bp, Homo sapiens
acaagctaataaaaa

SEQ ID NO: 87741 - DNA, 15 bp, Homo sapiens
tacaagctaataaaa

SEQ ID NO: 87742 - DNA, 15 bp, Homo sapiens
atacaagctaataaa

SEQ ID NO: 87743 - DNA, 15 bp, Homo sapiens
gatacaagctaataa

SEQ ID NO: 87744 - DNA, 15 bp, Homo sapiens
agatacaagctaata

SEQ ID NO: 87745 - DNA, 15 bp, Homo sapiens
aagatacaagctaat

SEQ ID NO: 87746 - DNA, 15 bp, Homo sapiens
aaagatacaagctaa

SEQ ID NO: 87747 - DNA, 15 bp, Homo sapiens
taaagatacaagcta

SEQ ID NO: 87748 - DNA, 15 bp, Homo sapiens
ttaaagatacaagct

SEQ ID NO: 87749 - DNA, 15 bp, Homo sapiens
attaaagatacaagc

SEQ ID NO: 87750 - DNA, 15 bp, Homo sapiens
aattaaagatacaag

SEQ ID NO: 87751 - DNA, 15 bp, Homo sapiens
gaattaaagatacaa

SEQ ID NO: 87752 - DNA, 15 bp, Homo sapiens
ggaattaaagataca

SEQ ID NO: 87753 - DNA, 15 bp, Homo sapiens
aggaattaaagatac

SEQ ID NO: 87754 - DNA, 15 bp, Homo sapiens
taggaattaaagata

SEQ ID NO: 87755 - DNA, 15 bp, Homo sapiens
ttaggaattaaagat

SEQ ID NO: 87756 - DNA, 15 bp, Homo sapiens
tttaggaattaaaga

SEQ ID NO: 87757 - DNA, 15 bp, Homo sapiens
atttaggaattaaag

SEQ ID NO: 87758 - DNA, 15 bp, Homo sapiens
aatttaggaattaaa

SEQ ID NO: 87759 - DNA, 15 bp, Homo sapiens
taatttaggaattaa

SEQ ID NO: 87760 - DNA, 15 bp, Homo sapiens
ttaatttaggaatta

SEQ ID NO: 87761 - DNA, 15 bp, Homo sapiens
cttaatttaggaatt

SEQ ID NO: 87762 - DNA, 15 bp, Homo sapiens
gcttaatttaggaat

SEQ ID NO: 87763 - DNA, 15 bp, Homo sapiens
agcttaatttaggaa

SEQ ID NO: 87764 - DNA, 15 bp, Homo sapiens
cagcttaatttagga

SEQ ID NO: 87765 - DNA, 15 bp, Homo sapiens
acagcttaatttagg

SEQ ID NO: 87766 - DNA, 15 bp, Homo sapiens
cacagcttaatttag

SEQ ID NO: 87767 - DNA, 15 bp, Homo sapiens
acacagcttaattta

SEQ ID NO: 87768 - DNA, 15 bp, Homo sapiens
cacacagcttaattt

SEQ ID NO: 87769 - DNA, 15 bp, Homo sapiens
acacacagcttaatt

SEQ ID NO: 87770 - DNA, 15 bp, Homo sapiens
cacacacagcttaat

SEQ ID NO: 87771 - DNA, 15 bp, Homo sapiens
acacacacagcttaa

SEQ ID NO: 87772 - DNA, 15 bp, Homo sapiens
cacacacacagctta

SEQ ID NO: 87773 - DNA, 15 bp, Homo sapiens
acacacacacagctt

SEQ ID NO: 87774 - DNA, 15 bp, Homo sapiens
cacacacacacagct

SEQ ID NO: 87775 - DNA, 15 bp, Homo sapiens
cacacacacacacag

SEQ ID NO: 87776 - DNA, 15 bp, Homo sapiens
tcacacacacacaca

SEQ ID NO: 87777 - DNA, 15 bp, Homo sapiens
ttcacacacacacac

SEQ ID NO: 87778 - DNA, 15 bp, Homo sapiens
cttcacacacacaca

SEQ ID NO: 87779 - DNA, 15 bp, Homo sapiens
acttcacacacacac

SEQ ID NO: 87780 - DNA, 15 bp, Homo sapiens
aacttcacacacaca

SEQ ID NO: 87781 - DNA, 15 bp, Homo sapiens
aaacttcacacacac

SEQ ID NO: 87782 - DNA, 15 bp, Homo sapiens
taaacttcacacaca

SEQ ID NO: 87783 - DNA, 15 bp, Homo sapiens
ttaaacttcacacac

SEQ ID NO: 87784 - DNA, 15 bp, Homo sapiens
tttaaacttcacaca

SEQ ID NO: 87785 - DNA, 15 bp, Homo sapiens
ctttaaacttcacac

SEQ ID NO: 87786 - DNA, 15 bp, Homo sapiens
gctttaaacttcaca

SEQ ID NO: 87787 - DNA, 15 bp, Homo sapiens
ggctttaaacttcac

SEQ ID NO: 87788 - DNA, 15 bp, Homo sapiens
tggctttaaacttca

SEQ ID NO: 87789 - DNA, 15 bp, Homo sapiens
ctggctttaaacttc

SEQ ID NO: 87790 - DNA, 15 bp, Homo sapiens
cctggctttaaactt

SEQ ID NO: 87791 - DNA, 15 bp, Homo sapiens
tcctggctttaaact

SEQ ID NO: 87792 - DNA, 15 bp, Homo sapiens
atcctggctttaaac

SEQ ID NO: 87793 - DNA, 15 bp, Homo sapiens
catcctggctttaaa

SEQ ID NO: 87794 - DNA, 15 bp, Homo sapiens
tcatcctggctttaa

SEQ ID NO: 87795 - DNA, 15 bp, Homo sapiens
ctcatcctggcttta

SEQ ID NO: 87796 - DNA, 15 bp, Homo sapiens
gctcatcctggcttt

SEQ ID NO: 87797 - DNA, 15 bp, Homo sapiens
agctcatcctggctt

SEQ ID NO: 87798 - DNA, 15 bp, Homo sapiens
tagctcatcctggct

SEQ ID NO: 87799 - DNA, 15 bp, Homo sapiens
ctagctcatcctggc

SEQ ID NO: 87800 - DNA, 15 bp, Homo sapiens
actagctcatcctgg

SEQ ID NO: 87801 - DNA, 15 bp, Homo sapiens
aactagctcatcctg

SEQ ID NO: 87802 - DNA, 15 bp, Homo sapiens
aaactagctcatcct

SEQ ID NO: 87803 - DNA, 15 bp, Homo sapiens
taaactagctcatcc

SEQ ID NO: 87804 - DNA, 15 bp, Homo sapiens
ttaaactagctcatc

SEQ ID NO: 87805 - DNA, 15 bp, Homo sapiens
tttaaactagctcat

SEQ ID NO: 87806 - DNA, 15 bp, Homo sapiens
ctttaaactagctca

SEQ ID NO: 87807 - DNA, 15 bp, Homo sapiens
actttaaactagctc

SEQ ID NO: 87808 - DNA, 15 bp, Homo sapiens
tactttaaactagct

SEQ ID NO: 87809 - DNA, 15 bp, Homo sapiens
atactttaaactagc

SEQ ID NO: 87810 - DNA, 15 bp, Homo sapiens
catactttaaactag

SEQ ID NO: 87811 - DNA, 15 bp, Homo sapiens
gcatactttaaacta

SEQ ID NO: 87812 - DNA, 15 bp, Homo sapiens
tgcatactttaaact

SEQ ID NO: 87813 - DNA, 15 bp, Homo sapiens
ctgcatactttaaac

SEQ ID NO: 87814 - DNA, 15 bp, Homo sapiens
gctgcatactttaaa

SEQ ID NO: 87815 - DNA, 15 bp, Homo sapiens
ggctgcatactttaa

SEQ ID NO: 87816 - DNA, 15 bp, Homo sapiens
aggctgcatacttta

SEQ ID NO: 87817 - DNA, 15 bp, Homo sapiens
aaggctgcatacttt

SEQ ID NO: 87818 - DNA, 15 bp, Homo sapiens
aaaggctgcatactt

SEQ ID NO: 87819 - DNA, 15 bp, Homo sapiens
caaaggctgcatact

SEQ ID NO: 87820 - DNA, 15 bp, Homo sapiens
ccaaaggctgcatac

SEQ ID NO: 87821 - DNA, 15 bp, Homo sapiens
tccaaaggctgcata

SEQ ID NO: 87822 - DNA, 15 bp, Homo sapiens
ctccaaaggctgcat

SEQ ID NO: 87823 - DNA, 15 bp, Homo sapiens
actccaaaggctgca

SEQ ID NO: 87824 - DNA, 15 bp, Homo sapiens
gactccaaaggctgc

SEQ ID NO: 87825 - DNA, 15 bp, Homo sapiens
tgactccaaaggctg

SEQ ID NO: 87826 - DNA, 15 bp, Homo sapiens
atgactccaaaggct

SEQ ID NO: 87827 - DNA, 15 bp, Homo sapiens
tatgactccaaaggc

SEQ ID NO: 87828 - DNA, 15 bp, Homo sapiens
gtatgactccaaagg

SEQ ID NO: 87829 - DNA, 15 bp, Homo sapiens
tgtatgactccaaag

SEQ ID NO: 87830 - DNA, 15 bp, Homo sapiens
ctgtatgactccaaa

SEQ ID NO: 87831 - DNA, 15 bp, Homo sapiens
tctgtatgactccaa

SEQ ID NO: 87832 - DNA, 15 bp, Homo sapiens
atctgtatgactcca

SEQ ID NO: 87833 - DNA, 15 bp, Homo sapiens
gatctgtatgactcc

SEQ ID NO: 87834 - DNA, 15 bp, Homo sapiens
agatctgtatgactc

SEQ ID NO: 87835 - DNA, 15 bp, Homo sapiens
cagatctgtatgact

SEQ ID NO: 87836 - DNA, 15 bp, Homo sapiens
ccagatctgtatgac

SEQ ID NO: 87837 - DNA, 15 bp, Homo sapiens
cccagatctgtatga

SEQ ID NO: 87838 - DNA, 15 bp, Homo sapiens
acccagatctgtatg

SEQ ID NO: 87839 - DNA, 15 bp, Homo sapiens
aacccagatctgtat

SEQ ID NO: 87840 - DNA, 15 bp, Homo sapiens
aaacccagatctgta

SEQ ID NO: 87841 - DNA, 15 bp, Homo sapiens
caaacccagatctgt

SEQ ID NO: 87842 - DNA, 15 bp, Homo sapiens
tcaaacccagatctg

SEQ ID NO: 87843 - DNA, 15 bp, Homo sapiens
ttcaaacccagatct

SEQ ID NO: 87844 - DNA, 15 bp, Homo sapiens
attcaaacccagatc

SEQ ID NO: 87845 - DNA, 15 bp, Homo sapiens
gattcaaacccagat

SEQ ID NO: 87846 - DNA, 15 bp, Homo sapiens
agattcaaacccaga

SEQ ID NO: 87847 - DNA, 15 bp, Homo sapiens
cagattcaaacccag

SEQ ID NO: 87848 - DNA, 15 bp, Homo sapiens
ccagattcaaaccca

SEQ ID NO: 87849 - DNA, 15 bp, Homo sapiens
accagattcaaaccc

SEQ ID NO: 87850 - DNA, 15 bp, Homo sapiens
gaccagattcaaacc

SEQ ID NO: 87851 - DNA, 15 bp, Homo sapiens
agaccagattcaaac

SEQ ID NO: 87852 - DNA, 15 bp, Homo sapiens
gagaccagattcaaa

SEQ ID NO: 87853 - DNA, 15 bp, Homo sapiens
agagaccagattcaa

SEQ ID NO: 87854 - DNA, 15 bp, Homo sapiens
tagagaccagattca

SEQ ID NO: 87855 - DNA, 15 bp, Homo sapiens
ttagagaccagattc

SEQ ID NO: 87856 - DNA, 15 bp, Homo sapiens
tttagagaccagatt

SEQ ID NO: 87857 - DNA, 15 bp, Homo sapiens
gtttagagaccagat

SEQ ID NO: 87858 - DNA, 15 bp, Homo sapiens
agtttagagaccaga

SEQ ID NO: 87859 - DNA, 15 bp, Homo sapiens
aagtttagagaccag

SEQ ID NO: 87860 - DNA, 15 bp, Homo sapiens
aaagtttagagacca

SEQ ID NO: 87861 - DNA, 15 bp, Homo sapiens
taaagtttagagacc

SEQ ID NO: 87862 - DNA, 15 bp, Homo sapiens
ataaagtttagagac

SEQ ID NO: 87863 - DNA, 15 bp, Homo sapiens
tataaagtttagaga

SEQ ID NO: 87864 - DNA, 15 bp, Homo sapiens
ctataaagtttagag

SEQ ID NO: 87865 - DNA, 15 bp, Homo sapiens
tctataaagtttaga

SEQ ID NO: 87866 - DNA, 15 bp, Homo sapiens
atctataaagtttag

SEQ ID NO: 87867 - DNA, 15 bp, Homo sapiens
catctataaagttta

SEQ ID NO: 87868 - DNA, 15 bp, Homo sapiens
acatctataaagttt

SEQ ID NO: 87869 - DNA, 15 bp, Homo sapiens
tacatctataaagtt

SEQ ID NO: 87870 - DNA, 15 bp, Homo sapiens
atacatctataaagt

SEQ ID NO: 87871 - DNA, 15 bp, Homo sapiens
catacatctataaag

SEQ ID NO: 87872 - DNA, 15 bp, Homo sapiens
tcatacatctataaa

SEQ ID NO: 87873 - DNA, 15 bp, Homo sapiens
atcatacatctataa

SEQ ID NO: 87874 - DNA, 15 bp, Homo sapiens
tatcatacatctata

SEQ ID NO: 87875 - DNA, 15 bp, Homo sapiens
atatcatacatctat

SEQ ID NO: 87876 - DNA, 15 bp, Homo sapiens
aatatcatacatcta

SEQ ID NO: 87877 - DNA, 15 bp, Homo sapiens
taatatcatacatct

SEQ ID NO: 87878 - DNA, 15 bp, Homo sapiens
ttaatatcatacatc

SEQ ID NO: 87879 - DNA, 15 bp, Homo sapiens
tttaatatcatacat

SEQ ID NO: 87880 - DNA, 15 bp, Homo sapiens
atttaatatcataca

SEQ ID NO: 87881 - DNA, 15 bp, Homo sapiens
catttaatatcatac

SEQ ID NO: 87882 - DNA, 15 bp, Homo sapiens
tcatttaatatcata

SEQ ID NO: 87883 - DNA, 15 bp, Homo sapiens
ctcatttaatatcat

SEQ ID NO: 87884 - DNA, 15 bp, Homo sapiens
cctcatttaatatca

SEQ ID NO: 87885 - DNA, 15 bp, Homo sapiens
gcctcatttaatatc

SEQ ID NO: 87886 - DNA, 15 bp, Homo sapiens
tgcctcatttaatat

SEQ ID NO: 87887 - DNA, 15 bp, Homo sapiens
ctgcctcatttaata

SEQ ID NO: 87888 - DNA, 15 bp, Homo sapiens
actgcctcatttaat

SEQ ID NO: 87889 - DNA, 15 bp, Homo sapiens
aactgcctcatttaa

SEQ ID NO: 87890 - DNA, 15 bp, Homo sapiens
gaactgcctcattta

SEQ ID NO: 87891 - DNA, 15 bp, Homo sapiens
tgaactgcctcattt

SEQ ID NO: 87892 - DNA, 15 bp, Homo sapiens
atgaactgcctcatt

SEQ ID NO: 87893 - DNA, 15 bp, Homo sapiens
catgaactgcctcat

SEQ ID NO: 87894 - DNA, 15 bp, Homo sapiens
acatgaactgcctca

SEQ ID NO: 87895 - DNA, 15 bp, Homo sapiens
tacatgaactgcctc

SEQ ID NO: 87896 - DNA, 15 bp, Homo sapiens
ttacatgaactgcct

SEQ ID NO: 87897 - DNA, 15 bp, Homo sapiens
tttacatgaactgcc

SEQ ID NO: 87898 - DNA, 15 bp, Homo sapiens
atttacatgaactgc

SEQ ID NO: 87899 - DNA, 15 bp, Homo sapiens
aatttacatgaactg

SEQ ID NO: 87900 - DNA, 15 bp, Homo sapiens
caatttacatgaact

SEQ ID NO: 87901 - DNA, 15 bp, Homo sapiens
gcaatttacatgaac

SEQ ID NO: 87902 - DNA, 15 bp, Homo sapiens
ggcaatttacatgaa

SEQ ID NO: 87903 - DNA, 15 bp, Homo sapiens
tggcaatttacatga

SEQ ID NO: 87904 - DNA, 15 bp, Homo sapiens
ttggcaatttacatg

SEQ ID NO: 87905 - DNA, 15 bp, Homo sapiens
cttggcaatttacat

SEQ ID NO: 87906 - DNA, 15 bp, Homo sapiens
gcttggcaatttaca

SEQ ID NO: 87907 - DNA, 15 bp, Homo sapiens
ggcttggcaatttac

SEQ ID NO: 87908 - DNA, 15 bp, Homo sapiens
gggcttggcaattta

SEQ ID NO: 87909 - DNA, 15 bp, Homo sapiens
tgggcttggcaattt

SEQ ID NO: 87910 - DNA, 15 bp, Homo sapiens
ctgggcttggcaatt

SEQ ID NO: 87911 - DNA, 15 bp, Homo sapiens
gctgggcttggcaat

SEQ ID NO: 87912 - DNA, 15 bp, Homo sapiens
tgctgggcttggcaa

SEQ ID NO: 87913 - DNA, 15 bp, Homo sapiens
gtgctgggcttggca

SEQ ID NO: 87914 - DNA, 15 bp, Homo sapiens
agtgctgggcttggc

SEQ ID NO: 87915 - DNA, 15 bp, Homo sapiens
gagtgctgggcttgg

SEQ ID NO: 87916 - DNA, 15 bp, Homo sapiens
tgagtgctgggcttg

SEQ ID NO: 87917 - DNA, 15 bp, Homo sapiens
ctgagtgctgggctt

SEQ ID NO: 87918 - DNA, 15 bp, Homo sapiens
gctgagtgctgggct

SEQ ID NO: 87919 - DNA, 15 bp, Homo sapiens
tgctgagtgctgggc

SEQ ID NO: 87920 - DNA, 15 bp, Homo sapiens
gtgctgagtgctggg

SEQ ID NO: 87921 - DNA, 15 bp, Homo sapiens
tgtgctgagtgctgg

SEQ ID NO: 87922 - DNA, 15 bp, Homo sapiens
ctgtgctgagtgctg

SEQ ID NO: 87923 - DNA, 15 bp, Homo sapiens
tctgtgctgagtgct

SEQ ID NO: 87924 - DNA, 15 bp, Homo sapiens
ctctgtgctgagtgc

SEQ ID NO: 87925 - DNA, 15 bp, Homo sapiens
actctgtgctgagtg

SEQ ID NO: 87926 - DNA, 15 bp, Homo sapiens
aactctgtgctgagt

SEQ ID NO: 87927 - DNA, 15 bp, Homo sapiens
caactctgtgctgag

SEQ ID NO: 87928 - DNA, 15 bp, Homo sapiens
tcaactctgtgctga

SEQ ID NO: 87929 - DNA, 15 bp, Homo sapiens
atcaactctgtgctg

SEQ ID NO: 87930 - DNA, 15 bp, Homo sapiens
tatcaactctgtgct

SEQ ID NO: 87931 - DNA, 15 bp, Homo sapiens
atatcaactctgtgc

SEQ ID NO: 87932 - DNA, 15 bp, Homo sapiens
aatatcaactctgtg

SEQ ID NO: 87933 - DNA, 15 bp, Homo sapiens
aaatatcaactctgt

SEQ ID NO: 87934 - DNA, 15 bp, Homo sapiens
gaaatatcaactctg

SEQ ID NO: 87935 - DNA, 15 bp, Homo sapiens
tgaaatatcaactct

SEQ ID NO: 87936 - DNA, 15 bp, Homo sapiens
gtgaaatatcaactc

SEQ ID NO: 87937 - DNA, 15 bp, Homo sapiens
tgtgaaatatcaact

SEQ ID NO: 87938 - DNA, 15 bp, Homo sapiens
gtgtgaaatatcaac

SEQ ID NO: 87939 - DNA, 15 bp, Homo sapiens
tgtgtgaaatatcaa

SEQ ID NO: 87940 - DNA, 15 bp, Homo sapiens
gtgtgtgaaatatca

SEQ ID NO: 87941 - DNA, 15 bp, Homo sapiens
tgtgtgtgaaatatc

SEQ ID NO: 87942 - DNA, 15 bp, Homo sapiens
atgtgtgtgaaatat

SEQ ID NO: 87943 - DNA, 15 bp, Homo sapiens
aatgtgtgtgaaata

SEQ ID NO: 87944 - DNA, 15 bp, Homo sapiens
taatgtgtgtgaaat

SEQ ID NO: 87945 - DNA, 15 bp, Homo sapiens
ctaatgtgtgtgaaa

SEQ ID NO: 87946 - DNA, 15 bp, Homo sapiens
tctaatgtgtgtgaa

SEQ ID NO: 87947 - DNA, 15 bp, Homo sapiens
atctaatgtgtgtga

SEQ ID NO: 87948 - DNA, 15 bp, Homo sapiens
tatctaatgtgtgtg

SEQ ID NO: 87949 - DNA, 15 bp, Homo sapiens
gtatctaatgtgtgt

SEQ ID NO: 87950 - DNA, 15 bp, Homo sapiens
ggtatctaatgtgtg

SEQ ID NO: 87951 - DNA, 15 bp, Homo sapiens
aggtatctaatgtgt

SEQ ID NO: 87952 - DNA, 15 bp, Homo sapiens
aaggtatctaatgtg

SEQ ID NO: 87953 - DNA, 15 bp, Homo sapiens
aaaggtatctaatgt

SEQ ID NO: 87954 - DNA, 15 bp, Homo sapiens
gaaaggtatctaatg

SEQ ID NO: 87955 - DNA, 15 bp, Homo sapiens
ggaaaggtatctaat

SEQ ID NO: 87956 - DNA, 15 bp, Homo sapiens
aggaaaggtatctaa

SEQ ID NO: 87957 - DNA, 15 bp, Homo sapiens
caggaaaggtatcta

SEQ ID NO: 87958 - DNA, 15 bp, Homo sapiens
acaggaaaggtatct

SEQ ID NO: 87959 - DNA, 15 bp, Homo sapiens
tacaggaaaggtatc

SEQ ID NO: 87960 - DNA, 15 bp, Homo sapiens
atacaggaaaggtat

SEQ ID NO: 87961 - DNA, 15 bp, Homo sapiens
catacaggaaaggta

SEQ ID NO: 87962 - DNA, 15 bp, Homo sapiens
acatacaggaaaggt

SEQ ID NO: 87963 - DNA, 15 bp, Homo sapiens
cacatacaggaaagg

SEQ ID NO: 87964 - DNA, 15 bp, Homo sapiens
ccacatacaggaaag

SEQ ID NO: 87965 - DNA, 15 bp, Homo sapiens
tccacatacaggaaa

SEQ ID NO: 87966 - DNA, 15 bp, Homo sapiens
ctccacatacaggaa

SEQ ID NO: 87967 - DNA, 15 bp, Homo sapiens
gctccacatacagga

SEQ ID NO: 87968 - DNA, 15 bp, Homo sapiens
tgctccacatacagg

SEQ ID NO: 87969 - DNA, 15 bp, Homo sapiens
atgctccacatacag

SEQ ID NO: 87970 - DNA, 15 bp, Homo sapiens
catgctccacataca

SEQ ID NO: 87971 - DNA, 15 bp, Homo sapiens
ccatgctccacatac

SEQ ID NO: 87972 - DNA, 15 bp, Homo sapiens
gccatgctccacata

SEQ ID NO: 87973 - DNA, 15 bp, Homo sapiens
tgccatgctccacat

SEQ ID NO: 87974 - DNA, 15 bp, Homo sapiens
ctgccatgctccaca

SEQ ID NO: 87975 - DNA, 15 bp, Homo sapiens
actgccatgctccac

SEQ ID NO: 87976 - DNA, 15 bp, Homo sapiens
aactgccatgctcca

SEQ ID NO: 87977 - DNA, 15 bp, Homo sapiens
gaactgccatgctcc

SEQ ID NO: 87978 - DNA, 15 bp, Homo sapiens
ggaactgccatgctc

SEQ ID NO: 87979 - DNA, 15 bp, Homo sapiens
aggaactgccatgct

SEQ ID NO: 87980 - DNA, 15 bp, Homo sapiens
caggaactgccatgc

SEQ ID NO: 87981 - DNA, 15 bp, Homo sapiens
acaggaactgccatg

SEQ ID NO: 87982 - DNA, 15 bp, Homo sapiens
aacaggaactgccat

SEQ ID NO: 87983 - DNA, 15 bp, Homo sapiens
aaacaggaactgcca

SEQ ID NO: 87984 - DNA, 15 bp, Homo sapiens
gaaacaggaactgcc

SEQ ID NO: 87985 - DNA, 15 bp, Homo sapiens
agaaacaggaactgc

SEQ ID NO: 87986 - DNA, 15 bp, Homo sapiens
cagaaacaggaactg

SEQ ID NO: 87987 - DNA, 15 bp, Homo sapiens
gcagaaacaggaact

SEQ ID NO: 87988 - DNA, 15 bp, Homo sapiens
agcagaaacaggaac

SEQ ID NO: 87989 - DNA, 15 bp, Homo sapiens
aagcagaaacaggaa

SEQ ID NO: 87990 - DNA, 15 bp, Homo sapiens
aaagcagaaacagga

SEQ ID NO: 87991 - DNA, 15 bp, Homo sapiens
taaagcagaaacagg

SEQ ID NO: 87992 - DNA, 15 bp, Homo sapiens
gtaaagcagaaacag

SEQ ID NO: 87993 - DNA, 15 bp, Homo sapiens
agtaaagcagaaaca

SEQ ID NO: 87994 - DNA, 15 bp, Homo sapiens
gagtaaagcagaaac

SEQ ID NO: 87995 - DNA, 15 bp, Homo sapiens
ggagtaaagcagaaa

SEQ ID NO: 87996 - DNA, 15 bp, Homo sapiens
aggagtaaagcagaa

SEQ ID NO: 87997 - DNA, 15 bp, Homo sapiens
taggagtaaagcaga

SEQ ID NO: 87998 - DNA, 15 bp, Homo sapiens
gtaggagtaaagcag

SEQ ID NO: 87999 - DNA, 15 bp, Homo sapiens
tgtaggagtaaagca

SEQ ID NO: 88000 - DNA, 15 bp, Homo sapiens
ctgtaggagtaaagc

SEQ ID NO: 88001 - DNA, 15 bp, Homo sapiens
cctgtaggagtaaag

SEQ ID NO: 88002 - DNA, 15 bp, Homo sapiens
tcctgtaggagtaaa

SEQ ID NO: 88003 - DNA, 15 bp, Homo sapiens
atcctgtaggagtaa

SEQ ID NO: 88004 - DNA, 15 bp, Homo sapiens
tatcctgtaggagta

SEQ ID NO: 88005 - DNA, 15 bp, Homo sapiens
gtatcctgtaggagt

SEQ ID NO: 88006 - DNA, 15 bp, Homo sapiens
agtatcctgtaggag

SEQ ID NO: 88007 - DNA, 15 bp, Homo sapiens
tagtatcctgtagga

SEQ ID NO: 88008 - DNA, 15 bp, Homo sapiens
ttagtatcctgtagg

SEQ ID NO: 88009 - DNA, 15 bp, Homo sapiens
attagtatcctgtag

SEQ ID NO: 88010 - DNA, 15 bp, Homo sapiens
tattagtatcctgta

SEQ ID NO: 88011 - DNA, 15 bp, Homo sapiens
atattagtatcctgt

SEQ ID NO: 88012 - DNA, 15 bp, Homo sapiens
tatattagtatcctg

SEQ ID NO: 88013 - DNA, 15 bp, Homo sapiens
ctatattagtatcct

SEQ ID NO: 88014 - DNA, 15 bp, Homo sapiens
cctatattagtatcc

SEQ ID NO: 88015 - DNA, 15 bp, Homo sapiens
tcctatattagtatc

SEQ ID NO: 88016 - DNA, 15 bp, Homo sapiens
gtcctatattagtat

SEQ ID NO: 88017 - DNA, 15 bp, Homo sapiens
tgtcctatattagta

SEQ ID NO: 88018 - DNA, 15 bp, Homo sapiens
gtgtcctatattagt

SEQ ID NO: 88019 - DNA, 15 bp, Homo sapiens
agtgtcctatattag

SEQ ID NO: 88020 - DNA, 15 bp, Homo sapiens
tagtgtcctatatta

SEQ ID NO: 88021 - DNA, 15 bp, Homo sapiens
ctagtgtcctatatt

SEQ ID NO: 88022 - DNA, 15 bp, Homo sapiens
cctagtgtcctatat

SEQ ID NO: 88023 - DNA, 15 bp, Homo sapiens
tcctagtgtcctata

SEQ ID NO: 88024 - DNA, 15 bp, Homo sapiens
atcctagtgtcctat

SEQ ID NO: 88025 - DNA, 15 bp, Homo sapiens
gatcctagtgtccta

SEQ ID NO: 88026 - DNA, 15 bp, Homo sapiens
agatcctagtgtcct

SEQ ID NO: 88027 - DNA, 15 bp, Homo sapiens
aagatcctagtgtcc

SEQ ID NO: 88028 - DNA, 15 bp, Homo sapiens
aaagatcctagtgtc

SEQ ID NO: 88029 - DNA, 15 bp, Homo sapiens
taaagatcctagtgt

SEQ ID NO: 88030 - DNA, 15 bp, Homo sapiens
ataaagatcctagtg

SEQ ID NO: 88031 - DNA, 15 bp, Homo sapiens
tataaagatcctagt

SEQ ID NO: 88032 - DNA, 15 bp, Homo sapiens
gtataaagatcctag

SEQ ID NO: 88033 - DNA, 15 bp, Homo sapiens
ggtataaagatccta

SEQ ID NO: 88034 - DNA, 15 bp, Homo sapiens
tggtataaagatcct

SEQ ID NO: 88035 - DNA, 15 bp, Homo sapiens
ttggtataaagatcc

SEQ ID NO: 88036 - DNA, 15 bp, Homo sapiens
cttggtataaagatc

SEQ ID NO: 88037 - DNA, 15 bp, Homo sapiens
tcttggtataaagat

SEQ ID NO: 88038 - DNA, 15 bp, Homo sapiens
gtcttggtataaaga

SEQ ID NO: 88039 - DNA, 15 bp, Homo sapiens
ggtcttggtataaag

SEQ ID NO: 88040 - DNA, 15 bp, Homo sapiens
gggtcttggtataaa

SEQ ID NO: 88041 - DNA, 15 bp, Homo sapiens
ggggtcttggtataa

SEQ ID NO: 88042 - DNA, 15 bp, Homo sapiens
tggggtcttggtata

SEQ ID NO: 88043 - DNA, 15 bp, Homo sapiens
atggggtcttggtat

SEQ ID NO: 88044 - DNA, 15 bp, Homo sapiens
catggggtcttggta

SEQ ID NO: 88045 - DNA, 15 bp, Homo sapiens
acatggggtcttggt

SEQ ID NO: 88046 - DNA, 15 bp, Homo sapiens
tacatggggtcttgg

SEQ ID NO: 88047 - DNA, 15 bp, Homo sapiens
ttacatggggtcttg

SEQ ID NO: 88048 - DNA, 15 bp, Homo sapiens
attacatggggtctt

SEQ ID NO: 88049 - DNA, 15 bp, Homo sapiens
cattacatggggtct

SEQ ID NO: 88050 - DNA, 15 bp, Homo sapiens
ccattacatggggtc

SEQ ID NO: 88051 - DNA, 15 bp, Homo sapiens
cccattacatggggt

SEQ ID NO: 88052 - DNA, 15 bp, Homo sapiens
gcccattacatgggg

SEQ ID NO: 88053 - DNA, 15 bp, Homo sapiens
agcccattacatggg

SEQ ID NO: 88054 - DNA, 15 bp, Homo sapiens
aagcccattacatgg

SEQ ID NO: 88055 - DNA, 15 bp, Homo sapiens
taagcccattacatg

SEQ ID NO: 88056 - DNA, 15 bp, Homo sapiens
ataagcccattacat

SEQ ID NO: 88057 - DNA, 15 bp, Homo sapiens
cataagcccattaca

SEQ ID NO: 88058 - DNA, 15 bp, Homo sapiens
tcataagcccattac

SEQ ID NO: 88059 - DNA, 15 bp, Homo sapiens
ctcataagcccatta

SEQ ID NO: 88060 - DNA, 15 bp, Homo sapiens
tctcataagcccatt

SEQ ID NO: 88061 - DNA, 15 bp, Homo sapiens
gtctcataagcccat

SEQ ID NO: 88062 - DNA, 15 bp, Homo sapiens
ggtctcataagccca

SEQ ID NO: 88063 - DNA, 15 bp, Homo sapiens
tggtctcataagccc

SEQ ID NO: 88064 - DNA, 15 bp, Homo sapiens
atggtctcataagcc

SEQ ID NO: 88065 - DNA, 15 bp, Homo sapiens
aatggtctcataagc

SEQ ID NO: 88066 - DNA, 15 bp, Homo sapiens
gaatggtctcataag

SEQ ID NO: 88067 - DNA, 15 bp, Homo sapiens
agaatggtctcataa

SEQ ID NO: 88068 - DNA, 15 bp, Homo sapiens
aagaatggtctcata

SEQ ID NO: 88069 - DNA, 15 bp, Homo sapiens
gaagaatggtctcat

SEQ ID NO: 88070 - DNA, 15 bp, Homo sapiens
agaagaatggtctca

SEQ ID NO: 88071 - DNA, 15 bp, Homo sapiens
aagaagaatggtctc

SEQ ID NO: 88072 - DNA, 15 bp, Homo sapiens
taagaagaatggtct

SEQ ID NO: 88073 - DNA, 15 bp, Homo sapiens
ataagaagaatggtc

SEQ ID NO: 88074 - DNA, 15 bp, Homo sapiens
tataagaagaatggt

SEQ ID NO: 88075 - DNA, 15 bp, Homo sapiens
ttataagaagaatgg

SEQ ID NO: 88076 - DNA, 15 bp, Homo sapiens
tttataagaagaatg

SEQ ID NO: 88077 - DNA, 15 bp, Homo sapiens
ttttataagaagaat

SEQ ID NO: 88078 - DNA, 15 bp, Homo sapiens
tttttataagaagaa

SEQ ID NO: 88079 - DNA, 15 bp, Homo sapiens
atttttataagaaga

SEQ ID NO: 88080 - DNA, 15 bp, Homo sapiens
gatttttataagaag

SEQ ID NO: 88081 - DNA, 15 bp, Homo sapiens
agatttttataagaa

SEQ ID NO: 88082 - DNA, 15 bp, Homo sapiens
cagatttttataaga

SEQ ID NO: 88083 - DNA, 15 bp, Homo sapiens
tcagatttttataag

SEQ ID NO: 88084 - DNA, 15 bp, Homo sapiens
gtcagatttttataa

SEQ ID NO: 88085 - DNA, 15 bp, Homo sapiens
tgtcagatttttata

SEQ ID NO: 88086 - DNA, 15 bp, Homo sapiens
ctgtcagatttttat

SEQ ID NO: 88087 - DNA, 15 bp, Homo sapiens
tctgtcagattttta

SEQ ID NO: 88088 - DNA, 15 bp, Homo sapiens
ttctgtcagattttt

SEQ ID NO: 88089 - DNA, 15 bp, Homo sapiens
attctgtcagatttt

SEQ ID NO: 88090 - DNA, 15 bp, Homo sapiens
aattctgtcagattt

SEQ ID NO: 88091 - DNA, 15 bp, Homo sapiens
aaattctgtcagatt

SEQ ID NO: 88092 - DNA, 15 bp, Homo sapiens
aaaattctgtcagat

SEQ ID NO: 88093 - DNA, 15 bp, Homo sapiens
aaaaattctgtcaga

SEQ ID NO: 88094 - DNA, 15 bp, Homo sapiens
caaaaattctgtcag

SEQ ID NO: 88095 - DNA, 15 bp, Homo sapiens
acaaaaattctgtca

SEQ ID NO: 88096 - DNA, 15 bp, Homo sapiens
tacaaaaattctgtc

SEQ ID NO: 88097 - DNA, 15 bp, Homo sapiens
atacaaaaattctgt

SEQ ID NO: 88098 - DNA, 15 bp, Homo sapiens
catacaaaaattctg

SEQ ID NO: 88099 - DNA, 15 bp, Homo sapiens
acatacaaaaattct

SEQ ID NO: 88100 - DNA, 15 bp, Homo sapiens
cacatacaaaaattc

SEQ ID NO: 88101 - DNA, 15 bp, Homo sapiens
acacatacaaaaatt

SEQ ID NO: 88102 - DNA, 15 bp, Homo sapiens
aacacatacaaaaat

SEQ ID NO: 88103 - DNA, 15 bp, Homo sapiens
taacacatacaaaaa

SEQ ID NO: 88104 - DNA, 15 bp, Homo sapiens
ctaacacatacaaaa

SEQ ID NO: 88105 - DNA, 15 bp, Homo sapiens
tctaacacatacaaa

SEQ ID NO: 88106 - DNA, 15 bp, Homo sapiens
atctaacacatacaa

SEQ ID NO: 88107 - DNA, 15 bp, Homo sapiens
gatctaacacataca

SEQ ID NO: 88108 - DNA, 15 bp, Homo sapiens
tgatctaacacatac

SEQ ID NO: 88109 - DNA, 15 bp, Homo sapiens
ttgatctaacacata

SEQ ID NO: 88110 - DNA, 15 bp, Homo sapiens
attgatctaacacat

SEQ ID NO: 88111 - DNA, 15 bp, Homo sapiens
tattgatctaacaca

SEQ ID NO: 88112 - DNA, 15 bp, Homo sapiens
ctattgatctaacac

SEQ ID NO: 88113 - DNA, 15 bp, Homo sapiens
cctattgatctaaca

SEQ ID NO: 88114 - DNA, 15 bp, Homo sapiens
gcctattgatctaac

SEQ ID NO: 88115 - DNA, 15 bp, Homo sapiens
agcctattgatctaa

SEQ ID NO: 88116 - DNA, 15 bp, Homo sapiens
cagcctattgatcta

SEQ ID NO: 88117 - DNA, 15 bp, Homo sapiens
gcagcctattgatct

SEQ ID NO: 88118 - DNA, 15 bp, Homo sapiens
tgcagcctattgatc

SEQ ID NO: 88119 - DNA, 15 bp, Homo sapiens
atgcagcctattgat

SEQ ID NO: 88120 - DNA, 15 bp, Homo sapiens
tatgcagcctattga

SEQ ID NO: 88121 - DNA, 15 bp, Homo sapiens
gtatgcagcctattg

SEQ ID NO: 88122 - DNA, 15 bp, Homo sapiens
agtatgcagcctatt

SEQ ID NO: 88123 - DNA, 15 bp, Homo sapiens
cagtatgcagcctat

SEQ ID NO: 88124 - DNA, 15 bp, Homo sapiens
acagtatgcagccta

SEQ ID NO: 88125 - DNA, 15 bp, Homo sapiens
aacagtatgcagcct

SEQ ID NO: 88126 - DNA, 15 bp, Homo sapiens
taacagtatgcagcc

SEQ ID NO: 88127 - DNA, 15 bp, Homo sapiens
ataacagtatgcagc

SEQ ID NO: 88128 - DNA, 15 bp, Homo sapiens
aataacagtatgcag

SEQ ID NO: 88129 - DNA, 15 bp, Homo sapiens
aaataacagtatgca

SEQ ID NO: 88130 - DNA, 15 bp, Homo sapiens
aaaataacagtatgc

SEQ ID NO: 88131 - DNA, 15 bp, Homo sapiens
gaaaataacagtatg

SEQ ID NO: 88132 - DNA, 15 bp, Homo sapiens
tgaaaataacagtat

SEQ ID NO: 88133 - DNA, 15 bp, Homo sapiens
ttgaaaataacagta

SEQ ID NO: 88134 - DNA, 15 bp, Homo sapiens
cttgaaaataacagt

SEQ ID NO: 88135 - DNA, 15 bp, Homo sapiens
acttgaaaataacag

SEQ ID NO: 88136 - DNA, 15 bp, Homo sapiens
aacttgaaaataaca

SEQ ID NO: 88137 - DNA, 15 bp, Homo sapiens
caacttgaaaataac

SEQ ID NO: 88138 - DNA, 15 bp, Homo sapiens
tcaacttgaaaataa

SEQ ID NO: 88139 - DNA, 15 bp, Homo sapiens
atcaacttgaaaata

SEQ ID NO: 88140 - DNA, 15 bp, Homo sapiens
aatcaacttgaaaat

SEQ ID NO: 88141 - DNA, 15 bp, Homo sapiens
aaatcaacttgaaaa

SEQ ID NO: 88142 - DNA, 15 bp, Homo sapiens
taaatcaacttgaaa

SEQ ID NO: 88143 - DNA, 15 bp, Homo sapiens
gtaaatcaacttgaa

SEQ ID NO: 88144 - DNA, 15 bp, Homo sapiens
tgtaaatcaacttga

SEQ ID NO: 88145 - DNA, 15 bp, Homo sapiens
ctgtaaatcaacttg

SEQ ID NO: 88146 - DNA, 15 bp, Homo sapiens
gctgtaaatcaactt

SEQ ID NO: 88147 - DNA, 15 bp, Homo sapiens
ggctgtaaatcaact

SEQ ID NO: 88148 - DNA, 15 bp, Homo sapiens
tggctgtaaatcaac

SEQ ID NO: 88149 - DNA, 15 bp, Homo sapiens
ctggctgtaaatcaa

SEQ ID NO: 88150 - DNA, 15 bp, Homo sapiens
tctggctgtaaatca

SEQ ID NO: 88151 - DNA, 15 bp, Homo sapiens
ttctggctgtaaatc

SEQ ID NO: 88152 - DNA, 15 bp, Homo sapiens
tttctggctgtaaat

SEQ ID NO: 88153 - DNA, 15 bp, Homo sapiens
atttctggctgtaaa

SEQ ID NO: 88154 - DNA, 15 bp, Homo sapiens
tatttctggctgtaa

SEQ ID NO: 88155 - DNA, 15 bp, Homo sapiens
atatttctggctgta

SEQ ID NO: 88156 - DNA, 15 bp, Homo sapiens
aatatttctggctgt

SEQ ID NO: 88157 - DNA, 15 bp, Homo sapiens
taatatttctggctg

SEQ ID NO: 88158 - DNA, 15 bp, Homo sapiens
ttaatatttctggct

SEQ ID NO: 88159 - DNA, 15 bp, Homo sapiens
attaatatttctggc

SEQ ID NO: 88160 - DNA, 15 bp, Homo sapiens
aattaatatttctgg

SEQ ID NO: 88161 - DNA, 15 bp, Homo sapiens
aaattaatatttctg

SEQ ID NO: 88162 - DNA, 15 bp, Homo sapiens
taaattaatatttct

SEQ ID NO: 88163 - DNA, 15 bp, Homo sapiens
ataaattaatatttc

SEQ ID NO: 88164 - DNA, 15 bp, Homo sapiens
aataaattaatattt

SEQ ID NO: 88165 - DNA, 15 bp, Homo sapiens
aaataaattaatatt

SEQ ID NO: 88166 - DNA, 15 bp, Homo sapiens
caaataaattaatat

SEQ ID NO: 88167 - DNA, 15 bp, Homo sapiens
tcaaataaattaata

SEQ ID NO: 88168 - DNA, 15 bp, Homo sapiens
ctcaaataaattaat

SEQ ID NO: 88169 - DNA, 15 bp, Homo sapiens
actcaaataaattaa

SEQ ID NO: 88170 - DNA, 15 bp, Homo sapiens
tactcaaataaatta

SEQ ID NO: 88171 - DNA, 15 bp, Homo sapiens
ctactcaaataaatt

SEQ ID NO: 88172 - DNA, 15 bp, Homo sapiens
actactcaaataaat

SEQ ID NO: 88173 - DNA, 15 bp, Homo sapiens
aactactcaaataaa

SEQ ID NO: 88174 - DNA, 15 bp, Homo sapiens
taactactcaaataa

SEQ ID NO: 88175 - DNA, 15 bp, Homo sapiens
gtaactactcaaata

SEQ ID NO: 88176 - DNA, 15 bp, Homo sapiens
tgtaactactcaaat

SEQ ID NO: 88177 - DNA, 15 bp, Homo sapiens
ctgtaactactcaaa

SEQ ID NO: 88178 - DNA, 15 bp, Homo sapiens
tctgtaactactcaa

SEQ ID NO: 88179 - DNA, 15 bp, Homo sapiens
ctctgtaactactca

SEQ ID NO: 88180 - DNA, 15 bp, Homo sapiens
actctgtaactactc

SEQ ID NO: 88181 - DNA, 15 bp, Homo sapiens
tactctgtaactact

SEQ ID NO: 88182 - DNA, 15 bp, Homo sapiens
ttactctgtaactac

SEQ ID NO: 88183 - DNA, 15 bp, Homo sapiens
attactctgtaacta

SEQ ID NO: 88184 - DNA, 15 bp, Homo sapiens
tattactctgtaact

SEQ ID NO: 88185 - DNA, 15 bp, Homo sapiens
atattactctgtaac

SEQ ID NO: 88186 - DNA, 15 bp, Homo sapiens
aatattactctgtaa

SEQ ID NO: 88187 - DNA, 15 bp, Homo sapiens
aaatattactctgta

SEQ ID NO: 88188 - DNA, 15 bp, Homo sapiens
gaaatattactctgt

SEQ ID NO: 88189 - DNA, 15 bp, Homo sapiens
agaaatattactctg

SEQ ID NO: 88190 - DNA, 15 bp, Homo sapiens
cagaaatattactct

SEQ ID NO: 88191 - DNA, 15 bp, Homo sapiens
gcagaaatattactc

SEQ ID NO: 88192 - DNA, 15 bp, Homo sapiens
agcagaaatattact

SEQ ID NO: 88193 - DNA, 15 bp, Homo sapiens
gagcagaaatattac

SEQ ID NO: 88194 - DNA, 15 bp, Homo sapiens
agagcagaaatatta

SEQ ID NO: 88195 - DNA, 15 bp, Homo sapiens
gagagcagaaatatt

SEQ ID NO: 88196 - DNA, 15 bp, Homo sapiens
tgagagcagaaatat

SEQ ID NO: 88197 - DNA, 15 bp, Homo sapiens
atgagagcagaaata

SEQ ID NO: 88198 - DNA, 15 bp, Homo sapiens
aatgagagcagaaat

SEQ ID NO: 88199 - DNA, 15 bp, Homo sapiens
aaatgagagcagaaa

SEQ ID NO: 88200 - DNA, 15 bp, Homo sapiens
taaatgagagcagaa

SEQ ID NO: 88201 - DNA, 15 bp, Homo sapiens
ctaaatgagagcaga

SEQ ID NO: 88202 - DNA, 15 bp, Homo sapiens
actaaatgagagcag

SEQ ID NO: 88203 - DNA, 15 bp, Homo sapiens
aactaaatgagagca

SEQ ID NO: 88204 - DNA, 15 bp, Homo sapiens
aaactaaatgagagc

SEQ ID NO: 88205 - DNA, 15 bp, Homo sapiens
aaaactaaatgagag

SEQ ID NO: 88206 - DNA, 15 bp, Homo sapiens
gaaaactaaatgaga

SEQ ID NO: 88207 - DNA, 15 bp, Homo sapiens
tgaaaactaaatgag

SEQ ID NO: 88208 - DNA, 15 bp, Homo sapiens
ttgaaaactaaatga

SEQ ID NO: 88209 - DNA, 15 bp, Homo sapiens
cttgaaaactaaatg

SEQ ID NO: 88210 - DNA, 15 bp, Homo sapiens
gcttgaaaactaaat

SEQ ID NO: 88211 - DNA, 15 bp, Homo sapiens
ggcttgaaaactaaa

SEQ ID NO: 88212 - DNA, 15 bp, Homo sapiens
gggcttgaaaactaa

SEQ ID NO: 88213 - DNA, 15 bp, Homo sapiens
ggggcttgaaaacta

SEQ ID NO: 88214 - DNA, 15 bp, Homo sapiens
tggggcttgaaaact

SEQ ID NO: 88215 - DNA, 15 bp, Homo sapiens
gtggggcttgaaaac

SEQ ID NO: 88216 - DNA, 15 bp, Homo sapiens
agtggggcttgaaaa

SEQ ID NO: 88217 - DNA, 15 bp, Homo sapiens
tagtggggcttgaaa

SEQ ID NO: 88218 - DNA, 15 bp, Homo sapiens
ctagtggggcttgaa

SEQ ID NO: 88219 - DNA, 15 bp, Homo sapiens
actagtggggcttga

SEQ ID NO: 88220 - DNA, 15 bp, Homo sapiens
gactagtggggcttg

SEQ ID NO: 88221 - DNA, 15 bp, Homo sapiens
ggactagtggggctt

SEQ ID NO: 88222 - DNA, 15 bp, Homo sapiens
aggactagtggggct

SEQ ID NO: 88223 - DNA, 15 bp, Homo sapiens
aaggactagtggggc

SEQ ID NO: 88224 - DNA, 15 bp, Homo sapiens
aaaggactagtgggg

SEQ ID NO: 88225 - DNA, 15 bp, Homo sapiens
caaaggactagtggg

SEQ ID NO: 88226 - DNA, 15 bp, Homo sapiens
acaaaggactagtgg

SEQ ID NO: 88227 - DNA, 15 bp, Homo sapiens
cacaaaggactagtg

SEQ ID NO: 88228 - DNA, 15 bp, Homo sapiens
acacaaaggactagt

SEQ ID NO: 88229 - DNA, 15 bp, Homo sapiens
cacacaaaggactag

SEQ ID NO: 88230 - DNA, 15 bp, Homo sapiens
acacacaaaggacta

SEQ ID NO: 88231 - DNA, 15 bp, Homo sapiens
cacacacaaaggact

SEQ ID NO: 88232 - DNA, 15 bp, Homo sapiens
tcacacacaaaggac

SEQ ID NO: 88233 - DNA, 15 bp, Homo sapiens
ttcacacacaaagga

SEQ ID NO: 88234 - DNA, 15 bp, Homo sapiens
tttcacacacaaagg

SEQ ID NO: 88235 - DNA, 15 bp, Homo sapiens
ttttcacacacaaag

SEQ ID NO: 88236 - DNA, 15 bp, Homo sapiens
attttcacacacaaa

SEQ ID NO: 88237 - DNA, 15 bp, Homo sapiens
aattttcacacacaa

SEQ ID NO: 88238 - DNA, 15 bp, Homo sapiens
aaattttcacacaca

SEQ ID NO: 88239 - DNA, 15 bp, Homo sapiens
taaattttcacacac

SEQ ID NO: 88240 - DNA, 15 bp, Homo sapiens
gtaaattttcacaca

SEQ ID NO: 88241 - DNA, 15 bp, Homo sapiens
tgtaaattttcacac

SEQ ID NO: 88242 - DNA, 15 bp, Homo sapiens
ttgtaaattttcaca

SEQ ID NO: 88243 - DNA, 15 bp, Homo sapiens
gttgtaaattttcac

SEQ ID NO: 88244 - DNA, 15 bp, Homo sapiens
agttgtaaattttca

SEQ ID NO: 88245 - DNA, 15 bp, Homo sapiens
aagttgtaaattttc

SEQ ID NO: 88246 - DNA, 15 bp, Homo sapiens
taagttgtaaatttt

SEQ ID NO: 88247 - DNA, 15 bp, Homo sapiens
gtaagttgtaaattt

SEQ ID NO: 88248 - DNA, 15 bp, Homo sapiens
agtaagttgtaaatt

SEQ ID NO: 88249 - DNA, 15 bp, Homo sapiens
cagtaagttgtaaat

SEQ ID NO: 88250 - DNA, 15 bp, Homo sapiens
gcagtaagttgtaaa

SEQ ID NO: 88251 - DNA, 15 bp, Homo sapiens
agcagtaagttgtaa

SEQ ID NO: 88252 - DNA, 15 bp, Homo sapiens
gagcagtaagttgta

SEQ ID NO: 88253 - DNA, 15 bp, Homo sapiens
agagcagtaagttgt

SEQ ID NO: 88254 - DNA, 15 bp, Homo sapiens
aagagcagtaagttg

SEQ ID NO: 88255 - DNA, 15 bp, Homo sapiens
taagagcagtaagtt

SEQ ID NO: 88256 - DNA, 15 bp, Homo sapiens
gtaagagcagtaagt

SEQ ID NO: 88257 - DNA, 15 bp, Homo sapiens
tgtaagagcagtaag

SEQ ID NO: 88258 - DNA, 15 bp, Homo sapiens
ttgtaagagcagtaa

SEQ ID NO: 88259 - DNA, 15 bp, Homo sapiens
cttgtaagagcagta

SEQ ID NO: 88260 - DNA, 15 bp, Homo sapiens
ccttgtaagagcagt

SEQ ID NO: 88261 - DNA, 15 bp, Homo sapiens
accttgtaagagcag

SEQ ID NO: 88262 - DNA, 15 bp, Homo sapiens
gaccttgtaagagca

SEQ ID NO: 88263 - DNA, 15 bp, Homo sapiens
tgaccttgtaagagc

SEQ ID NO: 88264 - DNA, 15 bp, Homo sapiens
atgaccttgtaagag

SEQ ID NO: 88265 - DNA, 15 bp, Homo sapiens
catgaccttgtaaga

SEQ ID NO: 88266 - DNA, 15 bp, Homo sapiens
tcatgaccttgtaag

SEQ ID NO: 88267 - DNA, 15 bp, Homo sapiens
ttcatgaccttgtaa

SEQ ID NO: 88268 - DNA, 15 bp, Homo sapiens
gttcatgaccttgta

SEQ ID NO: 88269 - DNA, 15 bp, Homo sapiens
tgttcatgaccttgt

SEQ ID NO: 88270 - DNA, 15 bp, Homo sapiens
ctgttcatgaccttg

SEQ ID NO: 88271 - DNA, 15 bp, Homo sapiens
actgttcatgacctt

SEQ ID NO: 88272 - DNA, 15 bp, Homo sapiens
cactgttcatgacct

SEQ ID NO: 88273 - DNA, 15 bp, Homo sapiens
ccactgttcatgacc

SEQ ID NO: 88274 - DNA, 15 bp, Homo sapiens
tccactgttcatgac

SEQ ID NO: 88275 - DNA, 15 bp, Homo sapiens
gtccactgttcatga

SEQ ID NO: 88276 - DNA, 15 bp, Homo sapiens
ggtccactgttcatg

SEQ ID NO: 88277 - DNA, 15 bp, Homo sapiens
tggtccactgttcat

SEQ ID NO: 88278 - DNA, 15 bp, Homo sapiens
ttggtccactgttca

SEQ ID NO: 88279 - DNA, 15 bp, Homo sapiens
tttggtccactgttc

SEQ ID NO: 88280 - DNA, 15 bp, Homo sapiens
ctttggtccactgtt

SEQ ID NO: 88281 - DNA, 15 bp, Homo sapiens
actttggtccactgt

SEQ ID NO: 88282 - DNA, 15 bp, Homo sapiens
cactttggtccactg

SEQ ID NO: 88283 - DNA, 15 bp, Homo sapiens
tcactttggtccact

SEQ ID NO: 88284 - DNA, 15 bp, Homo sapiens
ttcactttggtccac

SEQ ID NO: 88285 - DNA, 15 bp, Homo sapiens
attcactttggtcca

SEQ ID NO: 88286 - DNA, 15 bp, Homo sapiens
cattcactttggtcc

SEQ ID NO: 88287 - DNA, 15 bp, Homo sapiens
gcattcactttggtc

SEQ ID NO: 88288 - DNA, 15 bp, Homo sapiens
ggcattcactttggt

SEQ ID NO: 88289 - DNA, 15 bp, Homo sapiens
tggcattcactttgg

SEQ ID NO: 88290 - DNA, 15 bp, Homo sapiens
atggcattcactttg

SEQ ID NO: 88291 - DNA, 15 bp, Homo sapiens
aatggcattcacttt

SEQ ID NO: 88292 - DNA, 15 bp, Homo sapiens
taatggcattcactt

SEQ ID NO: 88293 - DNA, 15 bp, Homo sapiens
ttaatggcattcact

SEQ ID NO: 88294 - DNA, 15 bp, Homo sapiens
gttaatggcattcac

SEQ ID NO: 88295 - DNA, 15 bp, Homo sapiens
ggttaatggcattca

SEQ ID NO: 88296 - DNA, 15 bp, Homo sapiens
tggttaatggcattc

SEQ ID NO: 88297 - DNA, 15 bp, Homo sapiens
gtggttaatggcatt

SEQ ID NO: 88298 - DNA, 15 bp, Homo sapiens
agtggttaatggcat

SEQ ID NO: 88299 - DNA, 15 bp, Homo sapiens
gagtggttaatggca

SEQ ID NO: 88300 - DNA, 15 bp, Homo sapiens
agagtggttaatggc

SEQ ID NO: 88301 - DNA, 15 bp, Homo sapiens
cagagtggttaatgg

SEQ ID NO: 88302 - DNA, 15 bp, Homo sapiens
tcagagtggttaatg

SEQ ID NO: 88303 - DNA, 15 bp, Homo sapiens
gtcagagtggttaat

SEQ ID NO: 88304 - DNA, 15 bp, Homo sapiens
agtcagagtggttaa

SEQ ID NO: 88305 - DNA, 15 bp, Homo sapiens
aagtcagagtggtta

SEQ ID NO: 88306 - DNA, 15 bp, Homo sapiens
gaagtcagagtggtt

SEQ ID NO: 88307 - DNA, 15 bp, Homo sapiens
ggaagtcagagtggt

SEQ ID NO: 88308 - DNA, 15 bp, Homo sapiens
aggaagtcagagtgg

SEQ ID NO: 88309 - DNA, 15 bp, Homo sapiens
aaggaagtcagagtg

SEQ ID NO: 88310 - DNA, 15 bp, Homo sapiens
gaaggaagtcagagt

SEQ ID NO: 88311 - DNA, 15 bp, Homo sapiens
tgaaggaagtcagag

SEQ ID NO: 88312 - DNA, 15 bp, Homo sapiens
atgaaggaagtcaga

SEQ ID NO: 88313 - DNA, 15 bp, Homo sapiens
aatgaaggaagtcag

SEQ ID NO: 88314 - DNA, 15 bp, Homo sapiens
taatgaaggaagtca

SEQ ID NO: 88315 - DNA, 15 bp, Homo sapiens
ctaatgaaggaagtc

SEQ ID NO: 88316 - DNA, 15 bp, Homo sapiens
actaatgaaggaagt

SEQ ID NO: 88317 - DNA, 15 bp, Homo sapiens
aactaatgaaggaag

SEQ ID NO: 88318 - DNA, 15 bp, Homo sapiens
aaactaatgaaggaa

SEQ ID NO: 88319 - DNA, 15 bp, Homo sapiens
aaaactaatgaagga

SEQ ID NO: 88320 - DNA, 15 bp, Homo sapiens
taaaactaatgaagg

SEQ ID NO: 88321 - DNA, 15 bp, Homo sapiens
ataaaactaatgaag

SEQ ID NO: 88322 - DNA, 15 bp, Homo sapiens
aataaaactaatgaa

SEQ ID NO: 88323 - DNA, 15 bp, Homo sapiens
caataaaactaatga

SEQ ID NO: 88324 - DNA, 15 bp, Homo sapiens
acaataaaactaatg

SEQ ID NO: 88325 - DNA, 15 bp, Homo sapiens
cacaataaaactaat

SEQ ID NO: 88326 - DNA, 15 bp, Homo sapiens
tcacaataaaactaa

SEQ ID NO: 88327 - DNA, 15 bp, Homo sapiens
gtcacaataaaacta

SEQ ID NO: 88328 - DNA, 15 bp, Homo sapiens
tgtcacaataaaact

SEQ ID NO: 88329 - DNA, 15 bp, Homo sapiens
ctgtcacaataaaac

SEQ ID NO: 88330 - DNA, 15 bp, Homo sapiens
actgtcacaataaaa

SEQ ID NO: 88331 - DNA, 15 bp, Homo sapiens
cactgtcacaataaa

SEQ ID NO: 88332 - DNA, 15 bp, Homo sapiens
ccactgtcacaataa

SEQ ID NO: 88333 - DNA, 15 bp, Homo sapiens
tccactgtcacaata

SEQ ID NO: 88334 - DNA, 15 bp, Homo sapiens
gtccactgtcacaat

SEQ ID NO: 88335 - DNA, 15 bp, Homo sapiens
agtccactgtcacaa

SEQ ID NO: 88336 - DNA, 15 bp, Homo sapiens
gagtccactgtcaca

SEQ ID NO: 88337 - DNA, 15 bp, Homo sapiens
agagtccactgtcac

SEQ ID NO: 88338 - DNA, 15 bp, Homo sapiens
aagagtccactgtca

SEQ ID NO: 88339 - DNA, 15 bp, Homo sapiens
aaagagtccactgtc

SEQ ID NO: 88340 - DNA, 15 bp, Homo sapiens
aaaagagtccactgt

SEQ ID NO: 88341 - DNA, 15 bp, Homo sapiens
caaaagagtccactg

SEQ ID NO: 88342 - DNA, 15 bp, Homo sapiens
tcaaaagagtccact

SEQ ID NO: 88343 - DNA, 15 bp, Homo sapiens
gtcaaaagagtccac

SEQ ID NO: 88344 - DNA, 15 bp, Homo sapiens
ggtcaaaagagtcca

SEQ ID NO: 88345 - DNA, 15 bp, Homo sapiens
aggtcaaaagagtcc

SEQ ID NO: 88346 - DNA, 15 bp, Homo sapiens
gaggtcaaaagagtc

SEQ ID NO: 88347 - DNA, 15 bp, Homo sapiens
tgaggtcaaaagagt

SEQ ID NO: 88348 - DNA, 15 bp, Homo sapiens
ctgaggtcaaaagag

SEQ ID NO: 88349 - DNA, 15 bp, Homo sapiens
actgaggtcaaaaga

SEQ ID NO: 88350 - DNA, 15 bp, Homo sapiens
tactgaggtcaaaag

SEQ ID NO: 88351 - DNA, 15 bp, Homo sapiens
ttactgaggtcaaaa

SEQ ID NO: 88352 - DNA, 15 bp, Homo sapiens
attactgaggtcaaa

SEQ ID NO: 88353 - DNA, 15 bp, Homo sapiens
tattactgaggtcaa

SEQ ID NO: 88354 - DNA, 15 bp, Homo sapiens
gtattactgaggtca

SEQ ID NO: 88355 - DNA, 15 bp, Homo sapiens
ggtattactgaggtc

SEQ ID NO: 88356 - DNA, 15 bp, Homo sapiens
tggtattactgaggt

SEQ ID NO: 88357 - DNA, 15 bp, Homo sapiens
ctggtattactgagg

SEQ ID NO: 88358 - DNA, 15 bp, Homo sapiens
actggtattactgag

SEQ ID NO: 88359 - DNA, 15 bp, Homo sapiens
aactggtattactga

SEQ ID NO: 88360 - DNA, 15 bp, Homo sapiens
aaactggtattactg

SEQ ID NO: 88361 - DNA, 15 bp, Homo sapiens
caaactggtattact

SEQ ID NO: 88362 - DNA, 15 bp, Homo sapiens
ccaaactggtattac

SEQ ID NO: 88363 - DNA, 15 bp, Homo sapiens
gccaaactggtatta

SEQ ID NO: 88364 - DNA, 15 bp, Homo sapiens
tgccaaactggtatt

SEQ ID NO: 88365 - DNA, 15 bp, Homo sapiens
atgccaaactggtat

SEQ ID NO: 88366 - DNA, 15 bp, Homo sapiens
aatgccaaactggta

SEQ ID NO: 88367 - DNA, 15 bp, Homo sapiens
aaatgccaaactggt

SEQ ID NO: 88368 - DNA, 15 bp, Homo sapiens
taaatgccaaactgg

SEQ ID NO: 88369 - DNA, 15 bp, Homo sapiens
gtaaatgccaaactg

SEQ ID NO: 88370 - DNA, 15 bp, Homo sapiens
tgtaaatgccaaact

SEQ ID NO: 88371 - DNA, 15 bp, Homo sapiens
atgtaaatgccaaac

SEQ ID NO: 88372 - DNA, 15 bp, Homo sapiens
aatgtaaatgccaaa

SEQ ID NO: 88373 - DNA, 15 bp, Homo sapiens
caatgtaaatgccaa

SEQ ID NO: 88374 - DNA, 15 bp, Homo sapiens
acaatgtaaatgcca

SEQ ID NO: 88375 - DNA, 15 bp, Homo sapiens
gacaatgtaaatgcc

SEQ ID NO: 88376 - DNA, 15 bp, Homo sapiens
tgacaatgtaaatgc

SEQ ID NO: 88377 - DNA, 15 bp, Homo sapiens
atgacaatgtaaatg

SEQ ID NO: 88378 - DNA, 15 bp, Homo sapiens
tatgacaatgtaaat

SEQ ID NO: 88379 - DNA, 15 bp, Homo sapiens
atatgacaatgtaaa

SEQ ID NO: 88380 - DNA, 15 bp, Homo sapiens
aatatgacaatgtaa

SEQ ID NO: 88381 - DNA, 15 bp, Homo sapiens
aaatatgacaatgta

SEQ ID NO: 88382 - DNA, 15 bp, Homo sapiens
aaaatatgacaatgt

SEQ ID NO: 88383 - DNA, 15 bp, Homo sapiens
aaaaatatgacaatg

SEQ ID NO: 88384 - DNA, 15 bp, Homo sapiens
taaaaatatgacaat

SEQ ID NO: 88385 - DNA, 15 bp, Homo sapiens
ctaaaaatatgacaa

SEQ ID NO: 88386 - DNA, 15 bp, Homo sapiens
tctaaaaatatgaca

SEQ ID NO: 88387 - DNA, 15 bp, Homo sapiens
gtctaaaaatatgac

SEQ ID NO: 88388 - DNA, 15 bp, Homo sapiens
agtctaaaaatatga

SEQ ID NO: 88389 - DNA, 15 bp, Homo sapiens
aagtctaaaaatatg

SEQ ID NO: 88390 - DNA, 15 bp, Homo sapiens
taagtctaaaaatat

SEQ ID NO: 88391 - DNA, 15 bp, Homo sapiens
ttaagtctaaaaata

SEQ ID NO: 88392 - DNA, 15 bp, Homo sapiens
tttaagtctaaaaat

SEQ ID NO: 88393 - DNA, 15 bp, Homo sapiens
ttttaagtctaaaaa

SEQ ID NO: 88394 - DNA, 15 bp, Homo sapiens
tttttaagtctaaaa

SEQ ID NO: 88395 - DNA, 15 bp, Homo sapiens
atttttaagtctaaa

SEQ ID NO: 88396 - DNA, 15 bp, Homo sapiens
catttttaagtctaa

SEQ ID NO: 88397 - DNA, 15 bp, Homo sapiens
tcatttttaagtcta

SEQ ID NO: 88398 - DNA, 15 bp, Homo sapiens
atcatttttaagtct

SEQ ID NO: 88399 - DNA, 15 bp, Homo sapiens
gatcatttttaagtc

SEQ ID NO: 88400 - DNA, 15 bp, Homo sapiens
tgatcatttttaagt

SEQ ID NO: 88401 - DNA, 15 bp, Homo sapiens
atgatcatttttaag

SEQ ID NO: 88402 - DNA, 15 bp, Homo sapiens
gatgatcatttttaa

SEQ ID NO: 88403 - DNA, 15 bp, Homo sapiens
agatgatcattttta

SEQ ID NO: 88404 - DNA, 15 bp, Homo sapiens
aagatgatcattttt

SEQ ID NO: 88405 - DNA, 15 bp, Homo sapiens
taagatgatcatttt

SEQ ID NO: 88406 - DNA, 15 bp, Homo sapiens
ttaagatgatcattt

SEQ ID NO: 88407 - DNA, 15 bp, Homo sapiens
gttaagatgatcatt

SEQ ID NO: 88408 - DNA, 15 bp, Homo sapiens
ggttaagatgatcat

SEQ ID NO: 88409 - DNA, 15 bp, Homo sapiens
gggttaagatgatca

SEQ ID NO: 88410 - DNA, 15 bp, Homo sapiens
agggttaagatgatc

SEQ ID NO: 88411 - DNA, 15 bp, Homo sapiens
cagggttaagatgat

SEQ ID NO: 88412 - DNA, 15 bp, Homo sapiens
tcagggttaagatga

SEQ ID NO: 88413 - DNA, 15 bp, Homo sapiens
ttcagggttaagatg

SEQ ID NO: 88414 - DNA, 15 bp, Homo sapiens
attcagggttaagat

SEQ ID NO: 88415 - DNA, 15 bp, Homo sapiens
tattcagggttaaga

SEQ ID NO: 88416 - DNA, 15 bp, Homo sapiens
ttattcagggttaag

SEQ ID NO: 88417 - DNA, 15 bp, Homo sapiens
tttattcagggttaa

SEQ ID NO: 88418 - DNA, 15 bp, Homo sapiens
ttttattcagggtta

SEQ ID NO: 88419 - DNA, 15 bp, Homo sapiens
attttattcagggtt

SEQ ID NO: 88420 - DNA, 15 bp, Homo sapiens
cattttattcagggt

SEQ ID NO: 88421 - DNA, 15 bp, Homo sapiens
acattttattcaggg

SEQ ID NO: 88422 - DNA, 15 bp, Homo sapiens
cacattttattcagg

SEQ ID NO: 88423 - DNA, 15 bp, Homo sapiens
acacattttattcag

SEQ ID NO: 88424 - DNA, 15 bp, Homo sapiens
gacacattttattca

SEQ ID NO: 88425 - DNA, 15 bp, Homo sapiens
agacacattttattc

SEQ ID NO: 88426 - DNA, 15 bp, Homo sapiens
cagacacattttatt

SEQ ID NO: 88427 - DNA, 15 bp, Homo sapiens
ccagacacattttat

SEQ ID NO: 88428 - DNA, 15 bp, Homo sapiens
accagacacatttta

SEQ ID NO: 88429 - DNA, 15 bp, Homo sapiens
caccagacacatttt

SEQ ID NO: 88430 - DNA, 15 bp, Homo sapiens
tcaccagacacattt

SEQ ID NO: 88431 - DNA, 15 bp, Homo sapiens
ttcaccagacacatt

SEQ ID NO: 88432 - DNA, 15 bp, Homo sapiens
gttcaccagacacat

SEQ ID NO: 88433 - DNA, 15 bp, Homo sapiens
tgttcaccagacaca

SEQ ID NO: 88434 - DNA, 15 bp, Homo sapiens
ctgttcaccagacac

SEQ ID NO: 88435 - DNA, 15 bp, Homo sapiens
tctgttcaccagaca

SEQ ID NO: 88436 - DNA, 15 bp, Homo sapiens
atctgttcaccagac

SEQ ID NO: 88437 - DNA, 15 bp, Homo sapiens
catctgttcaccaga

SEQ ID NO: 88438 - DNA, 15 bp, Homo sapiens
acatctgttcaccag

SEQ ID NO: 88439 - DNA, 15 bp, Homo sapiens
aacatctgttcacca

SEQ ID NO: 88440 - DNA, 15 bp, Homo sapiens
aaacatctgttcacc

SEQ ID NO: 88441 - DNA, 15 bp, Homo sapiens
aaaacatctgttcac

SEQ ID NO: 88442 - DNA, 15 bp, Homo sapiens
aaaaacatctgttca

SEQ ID NO: 88443 - DNA, 15 bp, Homo sapiens
gaaaaacatctgttc

SEQ ID NO: 88444 - DNA, 15 bp, Homo sapiens
ggaaaaacatctgtt

SEQ ID NO: 88445 - DNA, 15 bp, Homo sapiens
aggaaaaacatctgt

SEQ ID NO: 88446 - DNA, 15 bp, Homo sapiens
aaggaaaaacatctg

SEQ ID NO: 88447 - DNA, 15 bp, Homo sapiens
caaggaaaaacatct

SEQ ID NO: 88448 - DNA, 15 bp, Homo sapiens
ccaaggaaaaacatc

SEQ ID NO: 88449 - DNA, 15 bp, Homo sapiens
cccaaggaaaaacat

SEQ ID NO: 88450 - DNA, 15 bp, Homo sapiens
gcccaaggaaaaaca

SEQ ID NO: 88451 - DNA, 15 bp, Homo sapiens
agcccaaggaaaaac

SEQ ID NO: 88452 - DNA, 15 bp, Homo sapiens
cagcccaaggaaaaa

SEQ ID NO: 88453 - DNA, 15 bp, Homo sapiens
acagcccaaggaaaa

SEQ ID NO: 88454 - DNA, 15 bp, Homo sapiens
cacagcccaaggaaa

SEQ ID NO: 88455 - DNA, 15 bp, Homo sapiens
gcacagcccaaggaa

SEQ ID NO: 88456 - DNA, 15 bp, Homo sapiens
ggcacagcccaagga

SEQ ID NO: 88457 - DNA, 15 bp, Homo sapiens
aggcacagcccaagg

SEQ ID NO: 88458 - DNA, 15 bp, Homo sapiens
gaggcacagcccaag

SEQ ID NO: 88459 - DNA, 15 bp, Homo sapiens
tgaggcacagcccaa

SEQ ID NO: 88460 - DNA, 15 bp, Homo sapiens
ctgaggcacagccca

SEQ ID NO: 88461 - DNA, 15 bp, Homo sapiens
tctgaggcacagccc

SEQ ID NO: 88462 - DNA, 15 bp, Homo sapiens
atctgaggcacagcc

SEQ ID NO: 88463 - DNA, 15 bp, Homo sapiens
tatctgaggcacagc

SEQ ID NO: 88464 - DNA, 15 bp, Homo sapiens
atatctgaggcacag

SEQ ID NO: 88465 - DNA, 15 bp, Homo sapiens
gatatctgaggcaca

SEQ ID NO: 88466 - DNA, 15 bp, Homo sapiens
agatatctgaggcac

SEQ ID NO: 88467 - DNA, 15 bp, Homo sapiens
gagatatctgaggca

SEQ ID NO: 88468 - DNA, 15 bp, Homo sapiens
agagatatctgaggc

SEQ ID NO: 88469 - DNA, 15 bp, Homo sapiens
cagagatatctgagg

SEQ ID NO: 88470 - DNA, 15 bp, Homo sapiens
acagagatatctgag

SEQ ID NO: 88471 - DNA, 15 bp, Homo sapiens
cacagagatatctga

SEQ ID NO: 88472 - DNA, 15 bp, Homo sapiens
acacagagatatctg

SEQ ID NO: 88473 - DNA, 15 bp, Homo sapiens
cacacagagatatct

SEQ ID NO: 88474 - DNA, 15 bp, Homo sapiens
acacacagagatatc

SEQ ID NO: 88475 - DNA, 15 bp, Homo sapiens
cacacacagagatat

SEQ ID NO: 88476 - DNA, 15 bp, Homo sapiens
acacacacagagata

SEQ ID NO: 88477 - DNA, 15 bp, Homo sapiens
cacacacacagagat

SEQ ID NO: 88478 - DNA, 15 bp, Homo sapiens
acacacacacagaga

SEQ ID NO: 88479 - DNA, 15 bp, Homo sapiens
tacacacacacagag

SEQ ID NO: 88480 - DNA, 15 bp, Homo sapiens
gtacacacacacaga

SEQ ID NO: 88481 - DNA, 15 bp, Homo sapiens
cgtacacacacacag

SEQ ID NO: 88482 - DNA, 15 bp, Homo sapiens
acgtacacacacaca

SEQ ID NO: 88483 - DNA, 15 bp, Homo sapiens
cacgtacacacacac

SEQ ID NO: 88484 - DNA, 15 bp, Homo sapiens
acacgtacacacaca

SEQ ID NO: 88485 - DNA, 15 bp, Homo sapiens
cacacgtacacacac

SEQ ID NO: 88486 - DNA, 15 bp, Homo sapiens
acacacgtacacaca

SEQ ID NO: 88487 - DNA, 15 bp, Homo sapiens
cacacacgtacacac

SEQ ID NO: 88488 - DNA, 15 bp, Homo sapiens
acacacacgtacaca

SEQ ID NO: 88489 - DNA, 15 bp, Homo sapiens
aacacacacgtacac

SEQ ID NO: 88490 - DNA, 15 bp, Homo sapiens
aaacacacacgtaca

SEQ ID NO: 88491 - DNA, 15 bp, Homo sapiens
caaacacacacgtac

SEQ ID NO: 88492 - DNA, 15 bp, Homo sapiens
acaaacacacacgta

SEQ ID NO: 88493 - DNA, 15 bp, Homo sapiens
gacaaacacacacgt

SEQ ID NO: 88494 - DNA, 15 bp, Homo sapiens
agacaaacacacacg

SEQ ID NO: 88495 - DNA, 15 bp, Homo sapiens
cagacaaacacacac

SEQ ID NO: 88496 - DNA, 15 bp, Homo sapiens
acagacaaacacaca

SEQ ID NO: 88497 - DNA, 15 bp, Homo sapiens
cacagacaaacacac

SEQ ID NO: 88498 - DNA, 15 bp, Homo sapiens
acacagacaaacaca

SEQ ID NO: 88499 - DNA, 15 bp, Homo sapiens
cacacagacaaacac

SEQ ID NO: 88500 - DNA, 15 bp, Homo sapiens
acacacagacaaaca

SEQ ID NO: 88501 - DNA, 15 bp, Homo sapiens
gacacacagacaaac

SEQ ID NO: 88502 - DNA, 15 bp, Homo sapiens
ggacacacagacaaa

SEQ ID NO: 88503 - DNA, 15 bp, Homo sapiens
tggacacacagacaa

SEQ ID NO: 88504 - DNA, 15 bp, Homo sapiens
atggacacacagaca

SEQ ID NO: 88505 - DNA, 15 bp, Homo sapiens
catggacacacagac

SEQ ID NO: 88506 - DNA, 15 bp, Homo sapiens
acatggacacacaga

SEQ ID NO: 88507 - DNA, 15 bp, Homo sapiens
gacatggacacacag

SEQ ID NO: 88508 - DNA, 15 bp, Homo sapiens
ggacatggacacaca

SEQ ID NO: 88509 - DNA, 15 bp, Homo sapiens
aggacatggacacac

SEQ ID NO: 88510 - DNA, 15 bp, Homo sapiens
gaggacatggacaca

SEQ ID NO: 88511 - DNA, 15 bp, Homo sapiens
tgaggacatggacac

SEQ ID NO: 88512 - DNA, 15 bp, Homo sapiens
gtgaggacatggaca

SEQ ID NO: 88513 - DNA, 15 bp, Homo sapiens
agtgaggacatggac

SEQ ID NO: 88514 - DNA, 15 bp, Homo sapiens
cagtgaggacatgga

SEQ ID NO: 88515 - DNA, 15 bp, Homo sapiens
tcagtgaggacatgg

SEQ ID NO: 88516 - DNA, 15 bp, Homo sapiens
atcagtgaggacatg

SEQ ID NO: 88517 - DNA, 15 bp, Homo sapiens
aatcagtgaggacat

SEQ ID NO: 88518 - DNA, 15 bp, Homo sapiens
caatcagtgaggaca

SEQ ID NO: 88519 - DNA, 15 bp, Homo sapiens
tcaatcagtgaggac

SEQ ID NO: 88520 - DNA, 15 bp, Homo sapiens
ctcaatcagtgagga

SEQ ID NO: 88521 - DNA, 15 bp, Homo sapiens
gctcaatcagtgagg

SEQ ID NO: 88522 - DNA, 15 bp, Homo sapiens
ggctcaatcagtgag

SEQ ID NO: 88523 - DNA, 15 bp, Homo sapiens
gggctcaatcagtga

SEQ ID NO: 88524 - DNA, 15 bp, Homo sapiens
agggctcaatcagtg

SEQ ID NO: 88525 - DNA, 15 bp, Homo sapiens
tagggctcaatcagt

SEQ ID NO: 88526 - DNA, 15 bp, Homo sapiens
ttagggctcaatcag

SEQ ID NO: 88527 - DNA, 15 bp, Homo sapiens
gttagggctcaatca

SEQ ID NO: 88528 - DNA, 15 bp, Homo sapiens
agttagggctcaatc

SEQ ID NO: 88529 - DNA, 15 bp, Homo sapiens
cagttagggctcaat

SEQ ID NO: 88530 - DNA, 15 bp, Homo sapiens
gcagttagggctcaa

SEQ ID NO: 88531 - DNA, 15 bp, Homo sapiens
tgcagttagggctca

SEQ ID NO: 88532 - DNA, 15 bp, Homo sapiens
atgcagttagggctc

SEQ ID NO: 88533 - DNA, 15 bp, Homo sapiens
gatgcagttagggct

SEQ ID NO: 88534 - DNA, 15 bp, Homo sapiens
tgatgcagttagggc

SEQ ID NO: 88535 - DNA, 15 bp, Homo sapiens
ttgatgcagttaggg

SEQ ID NO: 88536 - DNA, 15 bp, Homo sapiens
tttgatgcagttagg

SEQ ID NO: 88537 - DNA, 15 bp, Homo sapiens
ctttgatgcagttag

SEQ ID NO: 88538 - DNA, 15 bp, Homo sapiens
tctttgatgcagtta

SEQ ID NO: 88539 - DNA, 15 bp, Homo sapiens
gtctttgatgcagtt

SEQ ID NO: 88540 - DNA, 15 bp, Homo sapiens
ggtctttgatgcagt

SEQ ID NO: 88541 - DNA, 15 bp, Homo sapiens
gggtctttgatgcag

SEQ ID NO: 88542 - DNA, 15 bp, Homo sapiens
ggggtctttgatgca

SEQ ID NO: 88543 - DNA, 15 bp, Homo sapiens
aggggtctttgatgc

SEQ ID NO: 88544 - DNA, 15 bp, Homo sapiens
gaggggtctttgatg

SEQ ID NO: 88545 - DNA, 15 bp, Homo sapiens
tgaggggtctttgat

SEQ ID NO: 88546 - DNA, 15 bp, Homo sapiens
ctgaggggtctttga

SEQ ID NO: 88547 - DNA, 15 bp, Homo sapiens
tctgaggggtctttg

SEQ ID NO: 88548 - DNA, 15 bp, Homo sapiens
atctgaggggtcttt

SEQ ID NO: 88549 - DNA, 15 bp, Homo sapiens
aatctgaggggtctt

SEQ ID NO: 88550 - DNA, 15 bp, Homo sapiens
aaatctgaggggtct

SEQ ID NO: 88551 - DNA, 15 bp, Homo sapiens
aaaatctgaggggtc

SEQ ID NO: 88552 - DNA, 15 bp, Homo sapiens
gaaaatctgaggggt

SEQ ID NO: 88553 - DNA, 15 bp, Homo sapiens
tgaaaatctgagggg

SEQ ID NO: 88554 - DNA, 15 bp, Homo sapiens
gtgaaaatctgaggg

SEQ ID NO: 88555 - DNA, 15 bp, Homo sapiens
tgtgaaaatctgagg

SEQ ID NO: 88556 - DNA, 15 bp, Homo sapiens
gtgtgaaaatctgag

SEQ ID NO: 88557 - DNA, 15 bp, Homo sapiens
cgtgtgaaaatctga

SEQ ID NO: 88558 - DNA, 15 bp, Homo sapiens
gcgtgtgaaaatctg

SEQ ID NO: 88559 - DNA, 15 bp, Homo sapiens
agcgtgtgaaaatct

SEQ ID NO: 88560 - DNA, 15 bp, Homo sapiens
aagcgtgtgaaaatc

SEQ ID NO: 88561 - DNA, 15 bp, Homo sapiens
aaagcgtgtgaaaat

SEQ ID NO: 88562 - DNA, 15 bp, Homo sapiens
aaaagcgtgtgaaaa

SEQ ID NO: 88563 - DNA, 15 bp, Homo sapiens
aaaaagcgtgtgaaa

SEQ ID NO: 88564 - DNA, 15 bp, Homo sapiens
gaaaaagcgtgtgaa

SEQ ID NO: 88565 - DNA, 15 bp, Homo sapiens
agaaaaagcgtgtga

SEQ ID NO: 88566 - DNA, 15 bp, Homo sapiens
gagaaaaagcgtgtg

SEQ ID NO: 88567 - DNA, 15 bp, Homo sapiens
agagaaaaagcgtgt

SEQ ID NO: 88568 - DNA, 15 bp, Homo sapiens
gagagaaaaagcgtg

SEQ ID NO: 88569 - DNA, 15 bp, Homo sapiens
ggagagaaaaagcgt

SEQ ID NO: 88570 - DNA, 15 bp, Homo sapiens
tggagagaaaaagcg

SEQ ID NO: 88571 - DNA, 15 bp, Homo sapiens
ctggagagaaaaagc

SEQ ID NO: 88572 - DNA, 15 bp, Homo sapiens
cctggagagaaaaag

SEQ ID NO: 88573 - DNA, 15 bp, Homo sapiens
tcctggagagaaaaa

SEQ ID NO: 88574 - DNA, 15 bp, Homo sapiens
atcctggagagaaaa

SEQ ID NO: 88575 - DNA, 15 bp, Homo sapiens
catcctggagagaaa

SEQ ID NO: 88576 - DNA, 15 bp, Homo sapiens
tcatcctggagagaa

SEQ ID NO: 88577 - DNA, 15 bp, Homo sapiens
gtcatcctggagaga

SEQ ID NO: 88578 - DNA, 15 bp, Homo sapiens
ggtcatcctggagag

SEQ ID NO: 88579 - DNA, 15 bp, Homo sapiens
tggtcatcctggaga

SEQ ID NO: 88580 - DNA, 15 bp, Homo sapiens
gtggtcatcctggag

SEQ ID NO: 88581 - DNA, 15 bp, Homo sapiens
tgtggtcatcctgga

SEQ ID NO: 88582 - DNA, 15 bp, Homo sapiens
atgtggtcatcctgg

SEQ ID NO: 88583 - DNA, 15 bp, Homo sapiens
gatgtggtcatcctg

SEQ ID NO: 88584 - DNA, 15 bp, Homo sapiens
tgatgtggtcatcct

SEQ ID NO: 88585 - DNA, 15 bp, Homo sapiens
ctgatgtggtcatcc

SEQ ID NO: 88586 - DNA, 15 bp, Homo sapiens
actgatgtggtcatc

SEQ ID NO: 88587 - DNA, 15 bp, Homo sapiens
cactgatgtggtcat

SEQ ID NO: 88588 - DNA, 15 bp, Homo sapiens
ccactgatgtggtca

SEQ ID NO: 88589 - DNA, 15 bp, Homo sapiens
tccactgatgtggtc

SEQ ID NO: 88590 - DNA, 15 bp, Homo sapiens
atccactgatgtggt

SEQ ID NO: 88591 - DNA, 15 bp, Homo sapiens
catccactgatgtgg

SEQ ID NO: 88592 - DNA, 15 bp, Homo sapiens
acatccactgatgtg

SEQ ID NO: 88593 - DNA, 15 bp, Homo sapiens
gacatccactgatgt

SEQ ID NO: 88594 - DNA, 15 bp, Homo sapiens
ggacatccactgatg

SEQ ID NO: 88595 - DNA, 15 bp, Homo sapiens
aggacatccactgat

SEQ ID NO: 88596 - DNA, 15 bp, Homo sapiens
aaggacatccactga

SEQ ID NO: 88597 - DNA, 15 bp, Homo sapiens
caaggacatccactg

SEQ ID NO: 88598 - DNA, 15 bp, Homo sapiens
acaaggacatccact

SEQ ID NO: 88599 - DNA, 15 bp, Homo sapiens
cacaaggacatccac

SEQ ID NO: 88600 - DNA, 15 bp, Homo sapiens
acacaaggacatcca

SEQ ID NO: 88601 - DNA, 15 bp, Homo sapiens
gacacaaggacatcc

SEQ ID NO: 88602 - DNA, 15 bp, Homo sapiens
ggacacaaggacatc

SEQ ID NO: 88603 - DNA, 15 bp, Homo sapiens
tggacacaaggacat

SEQ ID NO: 88604 - DNA, 15 bp, Homo sapiens
atggacacaaggaca

SEQ ID NO: 88605 - DNA, 15 bp, Homo sapiens
gatggacacaaggac

SEQ ID NO: 88606 - DNA, 15 bp, Homo sapiens
agatggacacaagga

SEQ ID NO: 88607 - DNA, 15 bp, Homo sapiens
cagatggacacaagg

SEQ ID NO: 88608 - DNA, 15 bp, Homo sapiens
acagatggacacaag

SEQ ID NO: 88609 - DNA, 15 bp, Homo sapiens
cacagatggacacaa

SEQ ID NO: 88610 - DNA, 15 bp, Homo sapiens
acacagatggacaca

SEQ ID NO: 88611 - DNA, 15 bp, Homo sapiens
gacacagatggacac

SEQ ID NO: 88612 - DNA, 15 bp, Homo sapiens
tgacacagatggaca

SEQ ID NO: 88613 - DNA, 15 bp, Homo sapiens
atgacacagatggac

SEQ ID NO: 88614 - DNA, 15 bp, Homo sapiens
gatgacacagatgga

SEQ ID NO: 88615 - DNA, 15 bp, Homo sapiens
agatgacacagatgg

SEQ ID NO: 88616 - DNA, 15 bp, Homo sapiens
aagatgacacagatg

SEQ ID NO: 88617 - DNA, 15 bp, Homo sapiens
aaagatgacacagat

SEQ ID NO: 88618 - DNA, 15 bp, Homo sapiens
caaagatgacacaga

SEQ ID NO: 88619 - DNA, 15 bp, Homo sapiens
gcaaagatgacacag

SEQ ID NO: 88620 - DNA, 15 bp, Homo sapiens
tgcaaagatgacaca

SEQ ID NO: 88621 - DNA, 15 bp, Homo sapiens
ttgcaaagatgacac

SEQ ID NO: 88622 - DNA, 15 bp, Homo sapiens
attgcaaagatgaca

SEQ ID NO: 88623 - DNA, 15 bp, Homo sapiens
cattgcaaagatgac

SEQ ID NO: 88624 - DNA, 15 bp, Homo sapiens
acattgcaaagatga

SEQ ID NO: 88625 - DNA, 15 bp, Homo sapiens
gacattgcaaagatg

SEQ ID NO: 88626 - DNA, 15 bp, Homo sapiens
ggacattgcaaagat

SEQ ID NO: 88627 - DNA, 15 bp, Homo sapiens
aggacattgcaaaga

SEQ ID NO: 88628 - DNA, 15 bp, Homo sapiens
aaggacattgcaaag

SEQ ID NO: 88629 - DNA, 15 bp, Homo sapiens
gaaggacattgcaaa

SEQ ID NO: 88630 - DNA, 15 bp, Homo sapiens
cgaaggacattgcaa

SEQ ID NO: 88631 - DNA, 15 bp, Homo sapiens
acgaaggacattgca

SEQ ID NO: 88632 - DNA, 15 bp, Homo sapiens
gacgaaggacattgc

SEQ ID NO: 88633 - DNA, 15 bp, Homo sapiens
ggacgaaggacattg

SEQ ID NO: 88634 - DNA, 15 bp, Homo sapiens
gggacgaaggacatt

SEQ ID NO: 88635 - DNA, 15 bp, Homo sapiens
tgggacgaaggacat

SEQ ID NO: 88636 - DNA, 15 bp, Homo sapiens
ctgggacgaaggaca

SEQ ID NO: 88637 - DNA, 15 bp, Homo sapiens
gctgggacgaaggac

SEQ ID NO: 88638 - DNA, 15 bp, Homo sapiens
ggctgggacgaagga

SEQ ID NO: 88639 - DNA, 15 bp, Homo sapiens
tggctgggacgaagg

SEQ ID NO: 88640 - DNA, 15 bp, Homo sapiens
ctggctgggacgaag

SEQ ID NO: 88641 - DNA, 15 bp, Homo sapiens
gctggctgggacgaa

SEQ ID NO: 88642 - DNA, 15 bp, Homo sapiens
agctggctgggacga

SEQ ID NO: 88643 - DNA, 15 bp, Homo sapiens
aagctggctgggacg

SEQ ID NO: 88644 - DNA, 15 bp, Homo sapiens
aaagctggctgggac

SEQ ID NO: 88645 - DNA, 15 bp, Homo sapiens
caaagctggctggga

SEQ ID NO: 88646 - DNA, 15 bp, Homo sapiens
acaaagctggctggg

SEQ ID NO: 88647 - DNA, 15 bp, Homo sapiens
gacaaagctggctgg

SEQ ID NO: 88648 - DNA, 15 bp, Homo sapiens
cgacaaagctggctg

SEQ ID NO: 88649 - DNA, 15 bp, Homo sapiens
acgacaaagctggct

SEQ ID NO: 88650 - DNA, 15 bp, Homo sapiens
tacgacaaagctggc

SEQ ID NO: 88651 - DNA, 15 bp, Homo sapiens
atacgacaaagctgg

SEQ ID NO: 88652 - DNA, 15 bp, Homo sapiens
aatacgacaaagctg

SEQ ID NO: 88653 - DNA, 15 bp, Homo sapiens
gaatacgacaaagct

SEQ ID NO: 88654 - DNA, 15 bp, Homo sapiens
ggaatacgacaaagc

SEQ ID NO: 88655 - DNA, 15 bp, Homo sapiens
aggaatacgacaaag

SEQ ID NO: 88656 - DNA, 15 bp, Homo sapiens
caggaatacgacaaa

SEQ ID NO: 88657 - DNA, 15 bp, Homo sapiens
tcaggaatacgacaa

SEQ ID NO: 88658 - DNA, 15 bp, Homo sapiens
atcaggaatacgaca

SEQ ID NO: 88659 - DNA, 15 bp, Homo sapiens
gatcaggaatacgac

SEQ ID NO: 88660 - DNA, 15 bp, Homo sapiens
ggatcaggaatacga

SEQ ID NO: 88661 - DNA, 15 bp, Homo sapiens
tggatcaggaatacg

SEQ ID NO: 88662 - DNA, 15 bp, Homo sapiens
ctggatcaggaatac

SEQ ID NO: 88663 - DNA, 15 bp, Homo sapiens
cctggatcaggaata

SEQ ID NO: 88664 - DNA, 15 bp, Homo sapiens
tcctggatcaggaat

SEQ ID NO: 88665 - DNA, 15 bp, Homo sapiens
ctcctggatcaggaa

SEQ ID NO: 88666 - DNA, 15 bp, Homo sapiens
gctcctggatcagga

SEQ ID NO: 88667 - DNA, 15 bp, Homo sapiens
cgctcctggatcagg

SEQ ID NO: 88668 - DNA, 15 bp, Homo sapiens
ccgctcctggatcag

SEQ ID NO: 88669 - DNA, 15 bp, Homo sapiens
cccgctcctggatca

SEQ ID NO: 88670 - DNA, 15 bp, Homo sapiens
acccgctcctggatc

SEQ ID NO: 88671 - DNA, 15 bp, Homo sapiens
gacccgctcctggat

SEQ ID NO: 88672 - DNA, 15 bp, Homo sapiens
tgacccgctcctgga

SEQ ID NO: 88673 - DNA, 15 bp, Homo sapiens
ctgacccgctcctgg

SEQ ID NO: 88674 - DNA, 15 bp, Homo sapiens
gctgacccgctcctg

SEQ ID NO: 88675 - DNA, 15 bp, Homo sapiens
tgctgacccgctcct

SEQ ID NO: 88676 - DNA, 15 bp, Homo sapiens
ttgctgacccgctcc

SEQ ID NO: 88677 - DNA, 15 bp, Homo sapiens
tttgctgacccgctc

SEQ ID NO: 88678 - DNA, 15 bp, Homo sapiens
ctttgctgacccgct

SEQ ID NO: 88679 - DNA, 15 bp, Homo sapiens
gctttgctgacccgc

SEQ ID NO: 88680 - DNA, 15 bp, Homo sapiens
tgctttgctgacccg

SEQ ID NO: 88681 - DNA, 15 bp, Homo sapiens
ttgctttgctgaccc

SEQ ID NO: 88682 - DNA, 15 bp, Homo sapiens
tttgctttgctgacc

SEQ ID NO: 88683 - DNA, 15 bp, Homo sapiens
ttttgctttgctgac

SEQ ID NO: 88684 - DNA, 15 bp, Homo sapiens
gttttgctttgctga

SEQ ID NO: 88685 - DNA, 15 bp, Homo sapiens
tgttttgctttgctg

SEQ ID NO: 88686 - DNA, 15 bp, Homo sapiens
gtgttttgctttgct

SEQ ID NO: 88687 - DNA, 15 bp, Homo sapiens
ggtgttttgctttgc

SEQ ID NO: 88688 - DNA, 15 bp, Homo sapiens
aggtgttttgctttg

SEQ ID NO: 88689 - DNA, 15 bp, Homo sapiens
caggtgttttgcttt

SEQ ID NO: 88690 - DNA, 15 bp, Homo sapiens
gcaggtgttttgctt

SEQ ID NO: 88691 - DNA, 15 bp, Homo sapiens
tgcaggtgttttgct

SEQ ID NO: 88692 - DNA, 15 bp, Homo sapiens
ctgcaggtgttttgc

SEQ ID NO: 88693 - DNA, 15 bp, Homo sapiens
actgcaggtgttttg

SEQ ID NO: 88694 - DNA, 15 bp, Homo sapiens
aactgcaggtgtttt

SEQ ID NO: 88695 - DNA, 15 bp, Homo sapiens
gaactgcaggtgttt

SEQ ID NO: 88696 - DNA, 15 bp, Homo sapiens
tgaactgcaggtgtt

SEQ ID NO: 88697 - DNA, 15 bp, Homo sapiens
atgaactgcaggtgt

SEQ ID NO: 88698 - DNA, 15 bp, Homo sapiens
gatgaactgcaggtg

SEQ ID NO: 88699 - DNA, 15 bp, Homo sapiens
tgatgaactgcaggt

SEQ ID NO: 88700 - DNA, 15 bp, Homo sapiens
ctgatgaactgcagg

SEQ ID NO: 88701 - DNA, 15 bp, Homo sapiens
actgatgaactgcag

SEQ ID NO: 88702 - DNA, 15 bp, Homo sapiens
cactgatgaactgca

SEQ ID NO: 88703 - DNA, 15 bp, Homo sapiens
ccactgatgaactgc

SEQ ID NO: 88704 - DNA, 15 bp, Homo sapiens
tccactgatgaactg

SEQ ID NO: 88705 - DNA, 15 bp, Homo sapiens
ctccactgatgaact

SEQ ID NO: 88706 - DNA, 15 bp, Homo sapiens
actccactgatgaac

SEQ ID NO: 88707 - DNA, 15 bp, Homo sapiens
cactccactgatgaa

SEQ ID NO: 88708 - DNA, 15 bp, Homo sapiens
tcactccactgatga

SEQ ID NO: 88709 - DNA, 15 bp, Homo sapiens
ttcactccactgatg

SEQ ID NO: 88710 - DNA, 15 bp, Homo sapiens
cttcactccactgat

SEQ ID NO: 88711 - DNA, 15 bp, Homo sapiens
gcttcactccactga

SEQ ID NO: 88712 - DNA, 15 bp, Homo sapiens
ggcttcactccactg

SEQ ID NO: 88713 - DNA, 15 bp, Homo sapiens
aggcttcactccact

SEQ ID NO: 88714 - DNA, 15 bp, Homo sapiens
caggcttcactccac

SEQ ID NO: 88715 - DNA, 15 bp, Homo sapiens
acaggcttcactcca

SEQ ID NO: 88716 - DNA, 15 bp, Homo sapiens
gacaggcttcactcc

SEQ ID NO: 88717 - DNA, 15 bp, Homo sapiens
tgacaggcttcactc

SEQ ID NO: 88718 - DNA, 15 bp, Homo sapiens
atgacaggcttcact

SEQ ID NO: 88719 - DNA, 15 bp, Homo sapiens
gatgacaggcttcac

SEQ ID NO: 88720 - DNA, 15 bp, Homo sapiens
agatgacaggcttca

SEQ ID NO: 88721 - DNA, 15 bp, Homo sapiens
tagatgacaggcttc

SEQ ID NO: 88722 - DNA, 15 bp, Homo sapiens
gtagatgacaggctt

SEQ ID NO: 88723 - DNA, 15 bp, Homo sapiens
agtagatgacaggct

SEQ ID NO: 88724 - DNA, 15 bp, Homo sapiens
cagtagatgacaggc

SEQ ID NO: 88725 - DNA, 15 bp, Homo sapiens
ccagtagatgacagg

SEQ ID NO: 88726 - DNA, 15 bp, Homo sapiens
gccagtagatgacag

SEQ ID NO: 88727 - DNA, 15 bp, Homo sapiens
agccagtagatgaca

SEQ ID NO: 88728 - DNA, 15 bp, Homo sapiens
gagccagtagatgac

SEQ ID NO: 88729 - DNA, 15 bp, Homo sapiens
agagccagtagatga

SEQ ID NO: 88730 - DNA, 15 bp, Homo sapiens
gagagccagtagatg

SEQ ID NO: 88731 - DNA, 15 bp, Homo sapiens
agagagccagtagat

SEQ ID NO: 88732 - DNA, 15 bp, Homo sapiens
tagagagccagtaga

SEQ ID NO: 88733 - DNA, 15 bp, Homo sapiens
ttagagagccagtag

SEQ ID NO: 88734 - DNA, 15 bp, Homo sapiens
attagagagccagta

SEQ ID NO: 88735 - DNA, 15 bp, Homo sapiens
aattagagagccagt

SEQ ID NO: 88736 - DNA, 15 bp, Homo sapiens
aaattagagagccag

SEQ ID NO: 88737 - DNA, 15 bp, Homo sapiens
aaaattagagagcca

SEQ ID NO: 88738 - DNA, 15 bp, Homo sapiens
caaaattagagagcc

SEQ ID NO: 88739 - DNA, 15 bp, Homo sapiens
acaaaattagagagc

SEQ ID NO: 88740 - DNA, 15 bp, Homo sapiens
gacaaaattagagag

SEQ ID NO: 88741 - DNA, 15 bp, Homo sapiens
agacaaaattagaga

SEQ ID NO: 88742 - DNA, 15 bp, Homo sapiens
cagacaaaattagag

SEQ ID NO: 88743 - DNA, 15 bp, Homo sapiens
ccagacaaaattaga

SEQ ID NO: 88744 - DNA, 15 bp, Homo sapiens
cccagacaaaattag

SEQ ID NO: 88745 - DNA, 15 bp, Homo sapiens
tcccagacaaaatta

SEQ ID NO: 88746 - DNA, 15 bp, Homo sapiens
atcccagacaaaatt

SEQ ID NO: 88747 - DNA, 15 bp, Homo sapiens
tatcccagacaaaat

SEQ ID NO: 88748 - DNA, 15 bp, Homo sapiens
atatcccagacaaaa

SEQ ID NO: 88749 - DNA, 15 bp, Homo sapiens
catatcccagacaaa

SEQ ID NO: 88750 - DNA, 15 bp, Homo sapiens
ccatatcccagacaa

SEQ ID NO: 88751 - DNA, 15 bp, Homo sapiens
accatatcccagaca

SEQ ID NO: 88752 - DNA, 15 bp, Homo sapiens
taccatatcccagac

SEQ ID NO: 88753 - DNA, 15 bp, Homo sapiens
ttaccatatcccaga

SEQ ID NO: 88754 - DNA, 15 bp, Homo sapiens
cttaccatatcccag

SEQ ID NO: 88755 - DNA, 15 bp, Homo sapiens
ccttaccatatccca

SEQ ID NO: 88756 - DNA, 15 bp, Homo sapiens
tccttaccatatccc

SEQ ID NO: 88757 - DNA, 15 bp, Homo sapiens
gtccttaccatatcc

SEQ ID NO: 88758 - DNA, 15 bp, Homo sapiens
tgtccttaccatatc

SEQ ID NO: 88759 - DNA, 15 bp, Homo sapiens
gtgtccttaccatat

SEQ ID NO: 88760 - DNA, 15 bp, Homo sapiens
tgtgtccttaccata

SEQ ID NO: 88761 - DNA, 15 bp, Homo sapiens
ctgtgtccttaccat

SEQ ID NO: 88762 - DNA, 15 bp, Homo sapiens
cctgtgtccttacca

SEQ ID NO: 88763 - DNA, 15 bp, Homo sapiens
gcctgtgtccttacc

SEQ ID NO: 88764 - DNA, 15 bp, Homo sapiens
ggcctgtgtccttac

SEQ ID NO: 88765 - DNA, 15 bp, Homo sapiens
aggcctgtgtcctta

SEQ ID NO: 88766 - DNA, 15 bp, Homo sapiens
caggcctgtgtcctt

SEQ ID NO: 88767 - DNA, 15 bp, Homo sapiens
gcaggcctgtgtcct

SEQ ID NO: 88768 - DNA, 15 bp, Homo sapiens
agcaggcctgtgtcc

SEQ ID NO: 88769 - DNA, 15 bp, Homo sapiens
cagcaggcctgtgtc

SEQ ID NO: 88770 - DNA, 15 bp, Homo sapiens
acagcaggcctgtgt

SEQ ID NO: 88771 - DNA, 15 bp, Homo sapiens
tacagcaggcctgtg

SEQ ID NO: 88772 - DNA, 15 bp, Homo sapiens
atacagcaggcctgt

SEQ ID NO: 88773 - DNA, 15 bp, Homo sapiens
gatacagcaggcctg

SEQ ID NO: 88774 - DNA, 15 bp, Homo sapiens
agatacagcaggcct

SEQ ID NO: 88775 - DNA, 15 bp, Homo sapiens
aagatacagcaggcc

SEQ ID NO: 88776 - DNA, 15 bp, Homo sapiens
aaagatacagcaggc

SEQ ID NO: 88777 - DNA, 15 bp, Homo sapiens
gaaagatacagcagg

SEQ ID NO: 88778 - DNA, 15 bp, Homo sapiens
agaaagatacagcag

SEQ ID NO: 88779 - DNA, 15 bp, Homo sapiens
cagaaagatacagca

SEQ ID NO: 88780 - DNA, 15 bp, Homo sapiens
tcagaaagatacagc

SEQ ID NO: 88781 - DNA, 15 bp, Homo sapiens
atcagaaagatacag

SEQ ID NO: 88782 - DNA, 15 bp, Homo sapiens
catcagaaagataca

SEQ ID NO: 88783 - DNA, 15 bp, Homo sapiens
acatcagaaagatac

SEQ ID NO: 88784 - DNA, 15 bp, Homo sapiens
gacatcagaaagata

SEQ ID NO: 88785 - DNA, 15 bp, Homo sapiens
agacatcagaaagat

SEQ ID NO: 88786 - DNA, 15 bp, Homo sapiens
cagacatcagaaaga

SEQ ID NO: 88787 - DNA, 15 bp, Homo sapiens
acagacatcagaaag

SEQ ID NO: 88788 - DNA, 15 bp, Homo sapiens
gacagacatcagaaa

SEQ ID NO: 88789 - DNA, 15 bp, Homo sapiens
tgacagacatcagaa

SEQ ID NO: 88790 - DNA, 15 bp, Homo sapiens
ctgacagacatcaga

SEQ ID NO: 88791 - DNA, 15 bp, Homo sapiens
cctgacagacatcag

SEQ ID NO: 88792 - DNA, 15 bp, Homo sapiens
ccctgacagacatca

SEQ ID NO: 88793 - DNA, 15 bp, Homo sapiens
gccctgacagacatc

SEQ ID NO: 88794 - DNA, 15 bp, Homo sapiens
ggccctgacagacat

SEQ ID NO: 88795 - DNA, 15 bp, Homo sapiens
tggccctgacagaca

SEQ ID NO: 88796 - DNA, 15 bp, Homo sapiens
atggccctgacagac

SEQ ID NO: 88797 - DNA, 15 bp, Homo sapiens
catggccctgacaga

SEQ ID NO: 88798 - DNA, 15 bp, Homo sapiens
ccatggccctgacag

SEQ ID NO: 88799 - DNA, 15 bp, Homo sapiens
tccatggccctgaca

SEQ ID NO: 88800 - DNA, 15 bp, Homo sapiens
atccatggccctgac

SEQ ID NO: 88801 - DNA, 15 bp, Homo sapiens
aatccatggccctga

SEQ ID NO: 88802 - DNA, 15 bp, Homo sapiens
caatccatggccctg

SEQ ID NO: 88803 - DNA, 15 bp, Homo sapiens
tcaatccatggccct

SEQ ID NO: 88804 - DNA, 15 bp, Homo sapiens
atcaatccatggccc

SEQ ID NO: 88805 - DNA, 15 bp, Homo sapiens
tatcaatccatggcc

SEQ ID NO: 88806 - DNA, 15 bp, Homo sapiens
atatcaatccatggc

SEQ ID NO: 88807 - DNA, 15 bp, Homo sapiens
catatcaatccatgg

SEQ ID NO: 88808 - DNA, 15 bp, Homo sapiens
ccatatcaatccatg

SEQ ID NO: 88809 - DNA, 15 bp, Homo sapiens
tccatatcaatccat

SEQ ID NO: 88810 - DNA, 15 bp, Homo sapiens
atccatatcaatcca

SEQ ID NO: 88811 - DNA, 15 bp, Homo sapiens
tatccatatcaatcc

SEQ ID NO: 88812 - DNA, 15 bp, Homo sapiens
ttatccatatcaatc

SEQ ID NO: 88813 - DNA, 15 bp, Homo sapiens
cttatccatatcaat

SEQ ID NO: 88814 - DNA, 15 bp, Homo sapiens
tcttatccatatcaa

SEQ ID NO: 88815 - DNA, 15 bp, Homo sapiens
ttcttatccatatca

SEQ ID NO: 88816 - DNA, 15 bp, Homo sapiens
tttcttatccatatc

SEQ ID NO: 88817 - DNA, 15 bp, Homo sapiens
ctttcttatccatat

SEQ ID NO: 88818 - DNA, 15 bp, Homo sapiens
tctttcttatccata

SEQ ID NO: 88819 - DNA, 15 bp, Homo sapiens
ttctttcttatccat

SEQ ID NO: 88820 - DNA, 15 bp, Homo sapiens
tttctttcttatcca

SEQ ID NO: 88821 - DNA, 15 bp, Homo sapiens
ctttctttcttatcc

SEQ ID NO: 88822 - DNA, 15 bp, Homo sapiens
tctttctttcttatc

SEQ ID NO: 88823 - DNA, 15 bp, Homo sapiens
ctctttctttcttat

SEQ ID NO: 88824 - DNA, 15 bp, Homo sapiens
gctctttctttctta

SEQ ID NO: 88825 - DNA, 15 bp, Homo sapiens
agctctttctttctt

SEQ ID NO: 88826 - DNA, 15 bp, Homo sapiens
gagctctttctttct

SEQ ID NO: 88827 - DNA, 15 bp, Homo sapiens
agagctctttctttc

SEQ ID NO: 88828 - DNA, 15 bp, Homo sapiens
cagagctctttcttt

SEQ ID NO: 88829 - DNA, 15 bp, Homo sapiens
ccagagctctttctt

SEQ ID NO: 88830 - DNA, 15 bp, Homo sapiens
gccagagctctttct

SEQ ID NO: 88831 - DNA, 15 bp, Homo sapiens
agccagagctctttc

SEQ ID NO: 88832 - DNA, 15 bp, Homo sapiens
tagccagagctcttt

SEQ ID NO: 88833 - DNA, 15 bp, Homo sapiens
atagccagagctctt

SEQ ID NO: 88834 - DNA, 15 bp, Homo sapiens
gatagccagagctct

SEQ ID NO: 88835 - DNA, 15 bp, Homo sapiens
tgatagccagagctc

SEQ ID NO: 88836 - DNA, 15 bp, Homo sapiens
atgatagccagagct

SEQ ID NO: 88837 - DNA, 15 bp, Homo sapiens
gatgatagccagagc

SEQ ID NO: 88838 - DNA, 15 bp, Homo sapiens
tgatgatagccagag

SEQ ID NO: 88839 - DNA, 15 bp, Homo sapiens
ctgatgatagccaga

SEQ ID NO: 88840 - DNA, 15 bp, Homo sapiens
cctgatgatagccag

SEQ ID NO: 88841 - DNA, 15 bp, Homo sapiens
tcctgatgatagcca

SEQ ID NO: 88842 - DNA, 15 bp, Homo sapiens
ttcctgatgatagcc

SEQ ID NO: 88843 - DNA, 15 bp, Homo sapiens
tttcctgatgatagc

SEQ ID NO: 88844 - DNA, 15 bp, Homo sapiens
atttcctgatgatag

SEQ ID NO: 88845 - DNA, 15 bp, Homo sapiens
catttcctgatgata

SEQ ID NO: 88846 - DNA, 15 bp, Homo sapiens
acatttcctgatgat

SEQ ID NO: 88847 - DNA, 15 bp, Homo sapiens
aacatttcctgatga

SEQ ID NO: 88848 - DNA, 15 bp, Homo sapiens
gaacatttcctgatg

SEQ ID NO: 88849 - DNA, 15 bp, Homo sapiens
ggaacatttcctgat

SEQ ID NO: 88850 - DNA, 15 bp, Homo sapiens
tggaacatttcctga

SEQ ID NO: 88851 - DNA, 15 bp, Homo sapiens
ctggaacatttcctg

SEQ ID NO: 88852 - DNA, 15 bp, Homo sapiens
gctggaacatttcct

SEQ ID NO: 88853 - DNA, 15 bp, Homo sapiens
agctggaacatttcc

SEQ ID NO: 88854 - DNA, 15 bp, Homo sapiens
tagctggaacatttc

SEQ ID NO: 88855 - DNA, 15 bp, Homo sapiens
gtagctggaacattt

SEQ ID NO: 88856 - DNA, 15 bp, Homo sapiens
agtagctggaacatt

SEQ ID NO: 88857 - DNA, 15 bp, Homo sapiens
gagtagctggaacat

SEQ ID NO: 88858 - DNA, 15 bp, Homo sapiens
agagtagctggaaca

SEQ ID NO: 88859 - DNA, 15 bp, Homo sapiens
tagagtagctggaac

SEQ ID NO: 88860 - DNA, 15 bp, Homo sapiens
ttagagtagctggaa

SEQ ID NO: 88861 - DNA, 15 bp, Homo sapiens
tttagagtagctgga

SEQ ID NO: 88862 - DNA, 15 bp, Homo sapiens
ctttagagtagctgg

SEQ ID NO: 88863 - DNA, 15 bp, Homo sapiens
tctttagagtagctg

SEQ ID NO: 88864 - DNA, 15 bp, Homo sapiens
atctttagagtagct

SEQ ID NO: 88865 - DNA, 15 bp, Homo sapiens
catctttagagtagc

SEQ ID NO: 88866 - DNA, 15 bp, Homo sapiens
acatctttagagtag

SEQ ID NO: 88867 - DNA, 15 bp, Homo sapiens
tacatctttagagta

SEQ ID NO: 88868 - DNA, 15 bp, Homo sapiens
atacatctttagagt

SEQ ID NO: 88869 - DNA, 15 bp, Homo sapiens
catacatctttagag

SEQ ID NO: 88870 - DNA, 15 bp, Homo sapiens
tcatacatctttaga

SEQ ID NO: 88871 - DNA, 15 bp, Homo sapiens
ttcatacatctttag

SEQ ID NO: 88872 - DNA, 15 bp, Homo sapiens
tttcatacatcttta

SEQ ID NO: 88873 - DNA, 15 bp, Homo sapiens
ttttcatacatcttt

SEQ ID NO: 88874 - DNA, 15 bp, Homo sapiens
tttttcatacatctt

SEQ ID NO: 88875 - DNA, 15 bp, Homo sapiens
ctttttcatacatct

SEQ ID NO: 88876 - DNA, 15 bp, Homo sapiens
tctttttcatacatc

SEQ ID NO: 88877 - DNA, 15 bp, Homo sapiens
ttctttttcatacat

SEQ ID NO: 88878 - DNA, 15 bp, Homo sapiens
tttctttttcataca

SEQ ID NO: 88879 - DNA, 15 bp, Homo sapiens
atttctttttcatac

SEQ ID NO: 88880 - DNA, 15 bp, Homo sapiens
tatttctttttcata

SEQ ID NO: 88881 - DNA, 15 bp, Homo sapiens
ctatttctttttcat

SEQ ID NO: 88882 - DNA, 15 bp, Homo sapiens
gctatttctttttca

SEQ ID NO: 88883 - DNA, 15 bp, Homo sapiens
ggctatttctttttc

SEQ ID NO: 88884 - DNA, 15 bp, Homo sapiens
tggctatttcttttt

SEQ ID NO: 88885 - DNA, 15 bp, Homo sapiens
ctggctatttctttt

SEQ ID NO: 88886 - DNA, 15 bp, Homo sapiens
tctggctatttcttt

SEQ ID NO: 88887 - DNA, 15 bp, Homo sapiens
ctctggctatttctt

SEQ ID NO: 88888 - DNA, 15 bp, Homo sapiens
cctctggctatttct

SEQ ID NO: 88889 - DNA, 15 bp, Homo sapiens
gcctctggctatttc

SEQ ID NO: 88890 - DNA, 15 bp, Homo sapiens
tgcctctggctattt

SEQ ID NO: 88891 - DNA, 15 bp, Homo sapiens
ctgcctctggctatt

SEQ ID NO: 88892 - DNA, 15 bp, Homo sapiens
cctgcctctggctat

SEQ ID NO: 88893 - DNA, 15 bp, Homo sapiens
acctgcctctggcta

SEQ ID NO: 88894 - DNA, 15 bp, Homo sapiens
cacctgcctctggct

SEQ ID NO: 88895 - DNA, 15 bp, Homo sapiens
tcacctgcctctggc

SEQ ID NO: 88896 - DNA, 15 bp, Homo sapiens
atcacctgcctctgg

SEQ ID NO: 88897 - DNA, 15 bp, Homo sapiens
gatcacctgcctctg

SEQ ID NO: 88898 - DNA, 15 bp, Homo sapiens
tgatcacctgcctct

SEQ ID NO: 88899 - DNA, 15 bp, Homo sapiens
gtgatcacctgcctc

SEQ ID NO: 88900 - DNA, 15 bp, Homo sapiens
agtgatcacctgcct

SEQ ID NO: 88901 - DNA, 15 bp, Homo sapiens
aagtgatcacctgcc

SEQ ID NO: 88902 - DNA, 15 bp, Homo sapiens
aaagtgatcacctgc

SEQ ID NO: 88903 - DNA, 15 bp, Homo sapiens
gaaagtgatcacctg

SEQ ID NO: 88904 - DNA, 15 bp, Homo sapiens
tgaaagtgatcacct

SEQ ID NO: 88905 - DNA, 15 bp, Homo sapiens
atgaaagtgatcacc

SEQ ID NO: 88906 - DNA, 15 bp, Homo sapiens
catgaaagtgatcac

SEQ ID NO: 88907 - DNA, 15 bp, Homo sapiens
tcatgaaagtgatca

SEQ ID NO: 88908 - DNA, 15 bp, Homo sapiens
gtcatgaaagtgatc

SEQ ID NO: 88909 - DNA, 15 bp, Homo sapiens
tgtcatgaaagtgat

SEQ ID NO: 88910 - DNA, 15 bp, Homo sapiens
gtgtcatgaaagtga

SEQ ID NO: 88911 - DNA, 15 bp, Homo sapiens
ggtgtcatgaaagtg

SEQ ID NO: 88912 - DNA, 15 bp, Homo sapiens
tggtgtcatgaaagt

SEQ ID NO: 88913 - DNA, 15 bp, Homo sapiens
ttggtgtcatgaaag

SEQ ID NO: 88914 - DNA, 15 bp, Homo sapiens
tttggtgtcatgaaa

SEQ ID NO: 88915 - DNA, 15 bp, Homo sapiens
gtttggtgtcatgaa

SEQ ID NO: 88916 - DNA, 15 bp, Homo sapiens
tgtttggtgtcatga

SEQ ID NO: 88917 - DNA, 15 bp, Homo sapiens
gtgtttggtgtcatg

SEQ ID NO: 88918 - DNA, 15 bp, Homo sapiens
tgtgtttggtgtcat

SEQ ID NO: 88919 - DNA, 15 bp, Homo sapiens
ctgtgtttggtgtca

SEQ ID NO: 88920 - DNA, 15 bp, Homo sapiens
gctgtgtttggtgtc

SEQ ID NO: 88921 - DNA, 15 bp, Homo sapiens
tgctgtgtttggtgt

SEQ ID NO: 88922 - DNA, 15 bp, Homo sapiens
atgctgtgtttggtg

SEQ ID NO: 88923 - DNA, 15 bp, Homo sapiens
aatgctgtgtttggt

SEQ ID NO: 88924 - DNA, 15 bp, Homo sapiens
caatgctgtgtttgg

SEQ ID NO: 88925 - DNA, 15 bp, Homo sapiens
ccaatgctgtgtttg

SEQ ID NO: 88926 - DNA, 15 bp, Homo sapiens
cccaatgctgtgttt

SEQ ID NO: 88927 - DNA, 15 bp, Homo sapiens
acccaatgctgtgtt

SEQ ID NO: 88928 - DNA, 15 bp, Homo sapiens
tacccaatgctgtgt

SEQ ID NO: 88929 - DNA, 15 bp, Homo sapiens
gtacccaatgctgtg

SEQ ID NO: 88930 - DNA, 15 bp, Homo sapiens
ggtacccaatgctgt

SEQ ID NO: 88931 - DNA, 15 bp, Homo sapiens
tggtacccaatgctg

SEQ ID NO: 88932 - DNA, 15 bp, Homo sapiens
ctggtacccaatgct

SEQ ID NO: 88933 - DNA, 15 bp, Homo sapiens
tctggtacccaatgc

SEQ ID NO: 88934 - DNA, 15 bp, Homo sapiens
ctctggtacccaatg

SEQ ID NO: 88935 - DNA, 15 bp, Homo sapiens
actctggtacccaat

SEQ ID NO: 88936 - DNA, 15 bp, Homo sapiens
aactctggtacccaa

SEQ ID NO: 88937 - DNA, 15 bp, Homo sapiens
gaactctggtaccca

SEQ ID NO: 88938 - DNA, 15 bp, Homo sapiens
tgaactctggtaccc

SEQ ID NO: 88939 - DNA, 15 bp, Homo sapiens
atgaactctggtacc

SEQ ID NO: 88940 - DNA, 15 bp, Homo sapiens
catgaactctggtac

SEQ ID NO: 88941 - DNA, 15 bp, Homo sapiens
acatgaactctggta

SEQ ID NO: 88942 - DNA, 15 bp, Homo sapiens
gacatgaactctggt

SEQ ID NO: 88943 - DNA, 15 bp, Homo sapiens
tgacatgaactctgg

SEQ ID NO: 88944 - DNA, 15 bp, Homo sapiens
gtgacatgaactctg

SEQ ID NO: 88945 - DNA, 15 bp, Homo sapiens
tgtgacatgaactct

SEQ ID NO: 88946 - DNA, 15 bp, Homo sapiens
gtgtgacatgaactc

SEQ ID NO: 88947 - DNA, 15 bp, Homo sapiens
ggtgtgacatgaact

SEQ ID NO: 88948 - DNA, 15 bp, Homo sapiens
tggtgtgacatgaac

SEQ ID NO: 88949 - DNA, 15 bp, Homo sapiens
ctggtgtgacatgaa

SEQ ID NO: 88950 - DNA, 15 bp, Homo sapiens
tctggtgtgacatga

SEQ ID NO: 88951 - DNA, 15 bp, Homo sapiens
ctctggtgtgacatg

SEQ ID NO: 88952 - DNA, 15 bp, Homo sapiens
cctctggtgtgacat

SEQ ID NO: 88953 - DNA, 15 bp, Homo sapiens
ccctctggtgtgaca

SEQ ID NO: 88954 - DNA, 15 bp, Homo sapiens
tccctctggtgtgac

SEQ ID NO: 88955 - DNA, 15 bp, Homo sapiens
ttccctctggtgtga

SEQ ID NO: 88956 - DNA, 15 bp, Homo sapiens
tttccctctggtgtg

SEQ ID NO: 88957 - DNA, 15 bp, Homo sapiens
ttttccctctggtgt

SEQ ID NO: 88958 - DNA, 15 bp, Homo sapiens
attttccctctggtg

SEQ ID NO: 88959 - DNA, 15 bp, Homo sapiens
aattttccctctggt

SEQ ID NO: 88960 - DNA, 15 bp, Homo sapiens
gaattttccctctgg

SEQ ID NO: 88961 - DNA, 15 bp, Homo sapiens
agaattttccctctg

SEQ ID NO: 88962 - DNA, 15 bp, Homo sapiens
cagaattttccctct

SEQ ID NO: 88963 - DNA, 15 bp, Homo sapiens
acagaattttccctc

SEQ ID NO: 88964 - DNA, 15 bp, Homo sapiens
tacagaattttccct

SEQ ID NO: 88965 - DNA, 15 bp, Homo sapiens
gtacagaattttccc

SEQ ID NO: 88966 - DNA, 15 bp, Homo sapiens
tgtacagaattttcc

SEQ ID NO: 88967 - DNA, 15 bp, Homo sapiens
gtgtacagaattttc

SEQ ID NO: 88968 - DNA, 15 bp, Homo sapiens
tgtgtacagaatttt

SEQ ID NO: 88969 - DNA, 15 bp, Homo sapiens
ttgtgtacagaattt

SEQ ID NO: 88970 - DNA, 15 bp, Homo sapiens
attgtgtacagaatt

SEQ ID NO: 88971 - DNA, 15 bp, Homo sapiens
cattgtgtacagaat

SEQ ID NO: 88972 - DNA, 15 bp, Homo sapiens
tcattgtgtacagaa

SEQ ID NO: 88973 - DNA, 15 bp, Homo sapiens
atcattgtgtacaga

SEQ ID NO: 88974 - DNA, 15 bp, Homo sapiens
catcattgtgtacag

SEQ ID NO: 88975 - DNA, 15 bp, Homo sapiens
tcatcattgtgtaca

SEQ ID NO: 88976 - DNA, 15 bp, Homo sapiens
ttcatcattgtgtac

SEQ ID NO: 88977 - DNA, 15 bp, Homo sapiens
tttcatcattgtgta

SEQ ID NO: 88978 - DNA, 15 bp, Homo sapiens
ttttcatcattgtgt

SEQ ID NO: 88979 - DNA, 15 bp, Homo sapiens
attttcatcattgtg

SEQ ID NO: 88980 - DNA, 15 bp, Homo sapiens
aattttcatcattgt

SEQ ID NO: 88981 - DNA, 15 bp, Homo sapiens
taattttcatcattg

SEQ ID NO: 88982 - DNA, 15 bp, Homo sapiens
ttaattttcatcatt

SEQ ID NO: 88983 - DNA, 15 bp, Homo sapiens
attaattttcatcat

SEQ ID NO: 88984 - DNA, 15 bp, Homo sapiens
tattaattttcatca

SEQ ID NO: 88985 - DNA, 15 bp, Homo sapiens
gtattaattttcatc

SEQ ID NO: 88986 - DNA, 15 bp, Homo sapiens
ggtattaattttcat

SEQ ID NO: 88987 - DNA, 15 bp, Homo sapiens
tggtattaattttca

SEQ ID NO: 88988 - DNA, 15 bp, Homo sapiens
gtggtattaattttc

SEQ ID NO: 88989 - DNA, 15 bp, Homo sapiens
agtggtattaatttt

SEQ ID NO: 88990 - DNA, 15 bp, Homo sapiens
tagtggtattaattt

SEQ ID NO: 88991 - DNA, 15 bp, Homo sapiens
gtagtggtattaatt

SEQ ID NO: 88992 - DNA, 15 bp, Homo sapiens
ggtagtggtattaat

SEQ ID NO: 88993 - DNA, 15 bp, Homo sapiens
tggtagtggtattaa

SEQ ID NO: 88994 - DNA, 15 bp, Homo sapiens
gtggtagtggtatta

SEQ ID NO: 88995 - DNA, 15 bp, Homo sapiens
agtggtagtggtatt

SEQ ID NO: 88996 - DNA, 15 bp, Homo sapiens
aagtggtagtggtat

SEQ ID NO: 88997 - DNA, 15 bp, Homo sapiens
taagtggtagtggta

SEQ ID NO: 88998 - DNA, 15 bp, Homo sapiens
ttaagtggtagtggt

SEQ ID NO: 88999 - DNA, 15 bp, Homo sapiens
cttaagtggtagtgg

SEQ ID NO: 89000 - DNA, 15 bp, Homo sapiens
acttaagtggtagtg

SEQ ID NO: 89001 - DNA, 15 bp, Homo sapiens
aacttaagtggtagt

SEQ ID NO: 89002 - DNA, 15 bp, Homo sapiens
gaacttaagtggtag

SEQ ID NO: 89003 - DNA, 15 bp, Homo sapiens
ggaacttaagtggta

SEQ ID NO: 89004 - DNA, 15 bp, Homo sapiens
aggaacttaagtggt

SEQ ID NO: 89005 - DNA, 15 bp, Homo sapiens
taggaacttaagtgg

SEQ ID NO: 89006 - DNA, 15 bp, Homo sapiens
ataggaacttaagtg

SEQ ID NO: 89007 - DNA, 15 bp, Homo sapiens
cataggaacttaagt

SEQ ID NO: 89008 - DNA, 15 bp, Homo sapiens
acataggaacttaag

SEQ ID NO: 89009 - DNA, 15 bp, Homo sapiens
cacataggaacttaa

SEQ ID NO: 89010 - DNA, 15 bp, Homo sapiens
tcacataggaactta

SEQ ID NO: 89011 - DNA, 15 bp, Homo sapiens
gtcacataggaactt

SEQ ID NO: 89012 - DNA, 15 bp, Homo sapiens
tgtcacataggaact

SEQ ID NO: 89013 - DNA, 15 bp, Homo sapiens
ttgtcacataggaac

SEQ ID NO: 89014 - DNA, 15 bp, Homo sapiens
gttgtcacataggaa

SEQ ID NO: 89015 - DNA, 15 bp, Homo sapiens
agttgtcacatagga

SEQ ID NO: 89016 - DNA, 15 bp, Homo sapiens
aagttgtcacatagg

SEQ ID NO: 89017 - DNA, 15 bp, Homo sapiens
aaagttgtcacatag

SEQ ID NO: 89018 - DNA, 15 bp, Homo sapiens
gaaagttgtcacata

SEQ ID NO: 89019 - DNA, 15 bp, Homo sapiens
ggaaagttgtcacat

SEQ ID NO: 89020 - DNA, 15 bp, Homo sapiens
gggaaagttgtcaca

SEQ ID NO: 89021 - DNA, 15 bp, Homo sapiens
tgggaaagttgtcac

SEQ ID NO: 89022 - DNA, 15 bp, Homo sapiens
ttgggaaagttgtca

SEQ ID NO: 89023 - DNA, 15 bp, Homo sapiens
cttgggaaagttgtc

SEQ ID NO: 89024 - DNA, 15 bp, Homo sapiens
tcttgggaaagttgt

SEQ ID NO: 89025 - DNA, 15 bp, Homo sapiens
ttcttgggaaagttg

SEQ ID NO: 89026 - DNA, 15 bp, Homo sapiens
attcttgggaaagtt

SEQ ID NO: 89027 - DNA, 15 bp, Homo sapiens
gattcttgggaaagt

SEQ ID NO: 89028 - DNA, 15 bp, Homo sapiens
tgattcttgggaaag

SEQ ID NO: 89029 - DNA, 15 bp, Homo sapiens
ctgattcttgggaaa

SEQ ID NO: 89030 - DNA, 15 bp, Homo sapiens
tctgattcttgggaa

SEQ ID NO: 89031 - DNA, 15 bp, Homo sapiens
ctctgattcttggga

SEQ ID NO: 89032 - DNA, 15 bp, Homo sapiens
tctctgattcttggg

SEQ ID NO: 89033 - DNA, 15 bp, Homo sapiens
ctctctgattcttgg

SEQ ID NO: 89034 - DNA, 15 bp, Homo sapiens
tctctctgattcttg

SEQ ID NO: 89035 - DNA, 15 bp, Homo sapiens
atctctctgattctt

SEQ ID NO: 89036 - DNA, 15 bp, Homo sapiens
tatctctctgattct

SEQ ID NO: 89037 - DNA, 15 bp, Homo sapiens
gtatctctctgattc

SEQ ID NO: 89038 - DNA, 15 bp, Homo sapiens
tgtatctctctgatt

SEQ ID NO: 89039 - DNA, 15 bp, Homo sapiens
ttgtatctctctgat

SEQ ID NO: 89040 - DNA, 15 bp, Homo sapiens
cttgtatctctctga

SEQ ID NO: 89041 - DNA, 15 bp, Homo sapiens
acttgtatctctctg

SEQ ID NO: 89042 - DNA, 15 bp, Homo sapiens
gacttgtatctctct

SEQ ID NO: 89043 - DNA, 15 bp, Homo sapiens
tgacttgtatctctc

SEQ ID NO: 89044 - DNA, 15 bp, Homo sapiens
ttgacttgtatctct

SEQ ID NO: 89045 - DNA, 15 bp, Homo sapiens
tttgacttgtatctc

SEQ ID NO: 89046 - DNA, 15 bp, Homo sapiens
ttttgacttgtatct

SEQ ID NO: 89047 - DNA, 15 bp, Homo sapiens
gttttgacttgtatc

SEQ ID NO: 89048 - DNA, 15 bp, Homo sapiens
agttttgacttgtat

SEQ ID NO: 89049 - DNA, 15 bp, Homo sapiens
gagttttgacttgta

SEQ ID NO: 89050 - DNA, 15 bp, Homo sapiens
ggagttttgacttgt

SEQ ID NO: 89051 - DNA, 15 bp, Homo sapiens
tggagttttgacttg

SEQ ID NO: 89052 - DNA, 15 bp, Homo sapiens
ttggagttttgactt

SEQ ID NO: 89053 - DNA, 15 bp, Homo sapiens
cttggagttttgact

SEQ ID NO: 89054 - DNA, 15 bp, Homo sapiens
acttggagttttgac

SEQ ID NO: 89055 - DNA, 15 bp, Homo sapiens
gacttggagttttga

SEQ ID NO: 89056 - DNA, 15 bp, Homo sapiens
tgacttggagttttg

SEQ ID NO: 89057 - DNA, 15 bp, Homo sapiens
ttgacttggagtttt

SEQ ID NO: 89058 - DNA, 15 bp, Homo sapiens
attgacttggagttt

SEQ ID NO: 89059 - DNA, 15 bp, Homo sapiens
cattgacttggagtt

SEQ ID NO: 89060 - DNA, 15 bp, Homo sapiens
gcattgacttggagt

SEQ ID NO: 89061 - DNA, 15 bp, Homo sapiens
ggcattgacttggag

SEQ ID NO: 89062 - DNA, 15 bp, Homo sapiens
aggcattgacttgga

SEQ ID NO: 89063 - DNA, 15 bp, Homo sapiens
gaggcattgacttgg

SEQ ID NO: 89064 - DNA, 15 bp, Homo sapiens
agaggcattgacttg

SEQ ID NO: 89065 - DNA, 15 bp, Homo sapiens
tagaggcattgactt

SEQ ID NO: 89066 - DNA, 15 bp, Homo sapiens
ttagaggcattgact

SEQ ID NO: 89067 - DNA, 15 bp, Homo sapiens
gttagaggcattgac

SEQ ID NO: 89068 - DNA, 15 bp, Homo sapiens
agttagaggcattga

SEQ ID NO: 89069 - DNA, 15 bp, Homo sapiens
aagttagaggcattg

SEQ ID NO: 89070 - DNA, 15 bp, Homo sapiens
gaagttagaggcatt

SEQ ID NO: 89071 - DNA, 15 bp, Homo sapiens
agaagttagaggcat

SEQ ID NO: 89072 - DNA, 15 bp, Homo sapiens
gagaagttagaggca

SEQ ID NO: 89073 - DNA, 15 bp, Homo sapiens
agagaagttagaggc

SEQ ID NO: 89074 - DNA, 15 bp, Homo sapiens
cagagaagttagagg

SEQ ID NO: 89075 - DNA, 15 bp, Homo sapiens
tcagagaagttagag

SEQ ID NO: 89076 - DNA, 15 bp, Homo sapiens
atcagagaagttaga

SEQ ID NO: 89077 - DNA, 15 bp, Homo sapiens
catcagagaagttag

SEQ ID NO: 89078 - DNA, 15 bp, Homo sapiens
ccatcagagaagtta

SEQ ID NO: 89079 - DNA, 15 bp, Homo sapiens
cccatcagagaagtt

SEQ ID NO: 89080 - DNA, 15 bp, Homo sapiens
acccatcagagaagt

SEQ ID NO: 89081 - DNA, 15 bp, Homo sapiens
aacccatcagagaag

SEQ ID NO: 89082 - DNA, 15 bp, Homo sapiens
aaacccatcagagaa

SEQ ID NO: 89083 - DNA, 15 bp, Homo sapiens
aaaacccatcagaga

SEQ ID NO: 89084 - DNA, 15 bp, Homo sapiens
taaaacccatcagag

SEQ ID NO: 89085 - DNA, 15 bp, Homo sapiens
ttaaaacccatcaga

SEQ ID NO: 89086 - DNA, 15 bp, Homo sapiens
gttaaaacccatcag

SEQ ID NO: 89087 - DNA, 15 bp, Homo sapiens
ggttaaaacccatca

SEQ ID NO: 89088 - DNA, 15 bp, Homo sapiens
aggttaaaacccatc

SEQ ID NO: 89089 - DNA, 15 bp, Homo sapiens
gaggttaaaacccat

SEQ ID NO: 89090 - DNA, 15 bp, Homo sapiens
ggaggttaaaaccca

SEQ ID NO: 89091 - DNA, 15 bp, Homo sapiens
tggaggttaaaaccc

SEQ ID NO: 89092 - DNA, 15 bp, Homo sapiens
ctggaggttaaaacc

SEQ ID NO: 89093 - DNA, 15 bp, Homo sapiens
tctggaggttaaaac

SEQ ID NO: 89094 - DNA, 15 bp, Homo sapiens
ctctggaggttaaaa

SEQ ID NO: 89095 - DNA, 15 bp, Homo sapiens
actctggaggttaaa

SEQ ID NO: 89096 - DNA, 15 bp, Homo sapiens
gactctggaggttaa

SEQ ID NO: 89097 - DNA, 15 bp, Homo sapiens
tgactctggaggtta

SEQ ID NO: 89098 - DNA, 15 bp, Homo sapiens
ctgactctggaggtt

SEQ ID NO: 89099 - DNA, 15 bp, Homo sapiens
tctgactctggaggt

SEQ ID NO: 89100 - DNA, 15 bp, Homo sapiens
ttctgactctggagg

SEQ ID NO: 89101 - DNA, 15 bp, Homo sapiens
attctgactctggag

SEQ ID NO: 89102 - DNA, 15 bp, Homo sapiens
cattctgactctgga

SEQ ID NO: 89103 - DNA, 15 bp, Homo sapiens
acattctgactctgg

SEQ ID NO: 89104 - DNA, 15 bp, Homo sapiens
aacattctgactctg

SEQ ID NO: 89105 - DNA, 15 bp, Homo sapiens
gaacattctgactct

SEQ ID NO: 89106 - DNA, 15 bp, Homo sapiens
agaacattctgactc

SEQ ID NO: 89107 - DNA, 15 bp, Homo sapiens
aagaacattctgact

SEQ ID NO: 89108 - DNA, 15 bp, Homo sapiens
aaagaacattctgac

SEQ ID NO: 89109 - DNA, 15 bp, Homo sapiens
caaagaacattctga

SEQ ID NO: 89110 - DNA, 15 bp, Homo sapiens
gcaaagaacattctg

SEQ ID NO: 89111 - DNA, 15 bp, Homo sapiens
ggcaaagaacattct

SEQ ID NO: 89112 - DNA, 15 bp, Homo sapiens
aggcaaagaacattc

SEQ ID NO: 89113 - DNA, 15 bp, Homo sapiens
aaggcaaagaacatt

SEQ ID NO: 89114 - DNA, 15 bp, Homo sapiens
taaggcaaagaacat

SEQ ID NO: 89115 - DNA, 15 bp, Homo sapiens
gtaaggcaaagaaca

SEQ ID NO: 89116 - DNA, 15 bp, Homo sapiens
agtaaggcaaagaac

SEQ ID NO: 89117 - DNA, 15 bp, Homo sapiens
tagtaaggcaaagaa

SEQ ID NO: 89118 - DNA, 15 bp, Homo sapiens
ctagtaaggcaaaga

SEQ ID NO: 89119 - DNA, 15 bp, Homo sapiens
cctagtaaggcaaag

SEQ ID NO: 89120 - DNA, 15 bp, Homo sapiens
tcctagtaaggcaaa

SEQ ID NO: 89121 - DNA, 15 bp, Homo sapiens
ttcctagtaaggcaa

SEQ ID NO: 89122 - DNA, 15 bp, Homo sapiens
tttcctagtaaggca

SEQ ID NO: 89123 - DNA, 15 bp, Homo sapiens
ctttcctagtaaggc

SEQ ID NO: 89124 - DNA, 15 bp, Homo sapiens
gctttcctagtaagg

SEQ ID NO: 89125 - DNA, 15 bp, Homo sapiens
ggctttcctagtaag

SEQ ID NO: 89126 - DNA, 15 bp, Homo sapiens
tggctttcctagtaa

SEQ ID NO: 89127 - DNA, 15 bp, Homo sapiens
atggctttcctagta

SEQ ID NO: 89128 - DNA, 15 bp, Homo sapiens
gatggctttcctagt

SEQ ID NO: 89129 - DNA, 15 bp, Homo sapiens
agatggctttcctag

SEQ ID NO: 89130 - DNA, 15 bp, Homo sapiens
cagatggctttccta

SEQ ID NO: 89131 - DNA, 15 bp, Homo sapiens
acagatggctttcct

SEQ ID NO: 89132 - DNA, 15 bp, Homo sapiens
gacagatggctttcc

SEQ ID NO: 89133 - DNA, 15 bp, Homo sapiens
tgacagatggctttc

SEQ ID NO: 89134 - DNA, 15 bp, Homo sapiens
atgacagatggcttt

SEQ ID NO: 89135 - DNA, 15 bp, Homo sapiens
aatgacagatggctt

SEQ ID NO: 89136 - DNA, 15 bp, Homo sapiens
aaatgacagatggct

SEQ ID NO: 89137 - DNA, 15 bp, Homo sapiens
caaatgacagatggc

SEQ ID NO: 89138 - DNA, 15 bp, Homo sapiens
tcaaatgacagatgg

SEQ ID NO: 89139 - DNA, 15 bp, Homo sapiens
ttcaaatgacagatg

SEQ ID NO: 89140 - DNA, 15 bp, Homo sapiens
tttcaaatgacagat

SEQ ID NO: 89141 - DNA, 15 bp, Homo sapiens
ttttcaaatgacaga

SEQ ID NO: 89142 - DNA, 15 bp, Homo sapiens
gttttcaaatgacag

SEQ ID NO: 89143 - DNA, 15 bp, Homo sapiens
agttttcaaatgaca

SEQ ID NO: 89144 - DNA, 15 bp, Homo sapiens
gagttttcaaatgac

SEQ ID NO: 89145 - DNA, 15 bp, Homo sapiens
agagttttcaaatga

SEQ ID NO: 89146 - DNA, 15 bp, Homo sapiens
cagagttttcaaatg

SEQ ID NO: 89147 - DNA, 15 bp, Homo sapiens
acagagttttcaaat

SEQ ID NO: 89148 - DNA, 15 bp, Homo sapiens
tacagagttttcaaa

SEQ ID NO: 89149 - DNA, 15 bp, Homo sapiens
gtacagagttttcaa

SEQ ID NO: 89150 - DNA, 15 bp, Homo sapiens
tgtacagagttttca

SEQ ID NO: 89151 - DNA, 15 bp, Homo sapiens
atgtacagagttttc

SEQ ID NO: 89152 - DNA, 15 bp, Homo sapiens
aatgtacagagtttt

SEQ ID NO: 89153 - DNA, 15 bp, Homo sapiens
aaatgtacagagttt

SEQ ID NO: 89154 - DNA, 15 bp, Homo sapiens
aaaatgtacagagtt

SEQ ID NO: 89155 - DNA, 15 bp, Homo sapiens
taaaatgtacagagt

SEQ ID NO: 89156 - DNA, 15 bp, Homo sapiens
ataaaatgtacagag

SEQ ID NO: 89157 - DNA, 15 bp, Homo sapiens
gataaaatgtacaga

SEQ ID NO: 89158 - DNA, 15 bp, Homo sapiens
tgataaaatgtacag

SEQ ID NO: 89159 - DNA, 15 bp, Homo sapiens
ctgataaaatgtaca

SEQ ID NO: 89160 - DNA, 15 bp, Homo sapiens
gctgataaaatgtac

SEQ ID NO: 89161 - DNA, 15 bp, Homo sapiens
tgctgataaaatgta

SEQ ID NO: 89162 - DNA, 15 bp, Homo sapiens
ctgctgataaaatgt

SEQ ID NO: 89163 - DNA, 15 bp, Homo sapiens
gctgctgataaaatg

SEQ ID NO: 89164 - DNA, 15 bp, Homo sapiens
agctgctgataaaat

SEQ ID NO: 89165 - DNA, 15 bp, Homo sapiens
aagctgctgataaaa

SEQ ID NO: 89166 - DNA, 15 bp, Homo sapiens
taagctgctgataaa

SEQ ID NO: 89167 - DNA, 15 bp, Homo sapiens
ataagctgctgataa

SEQ ID NO: 89168 - DNA, 15 bp, Homo sapiens
gataagctgctgata

SEQ ID NO: 89169 - DNA, 15 bp, Homo sapiens
ggataagctgctgat

SEQ ID NO: 89170 - DNA, 15 bp, Homo sapiens
tggataagctgctga

SEQ ID NO: 89171 - DNA, 15 bp, Homo sapiens
atggataagctgctg

SEQ ID NO: 89172 - DNA, 15 bp, Homo sapiens
gatggataagctgct

SEQ ID NO: 89173 - DNA, 15 bp, Homo sapiens
ggatggataagctgc

SEQ ID NO: 89174 - DNA, 15 bp, Homo sapiens
tggatggataagctg

SEQ ID NO: 89175 - DNA, 15 bp, Homo sapiens
atggatggataagct

SEQ ID NO: 89176 - DNA, 15 bp, Homo sapiens
aatggatggataagc

SEQ ID NO: 89177 - DNA, 15 bp, Homo sapiens
caatggatggataag

SEQ ID NO: 89178 - DNA, 15 bp, Homo sapiens
gcaatggatggataa

SEQ ID NO: 89179 - DNA, 15 bp, Homo sapiens
tgcaatggatggata

SEQ ID NO: 89180 - DNA, 15 bp, Homo sapiens
ttgcaatggatggat

SEQ ID NO: 89181 - DNA, 15 bp, Homo sapiens
tttgcaatggatgga

SEQ ID NO: 89182 - DNA, 15 bp, Homo sapiens
atttgcaatggatgg

SEQ ID NO: 89183 - DNA, 15 bp, Homo sapiens
tatttgcaatggatg

SEQ ID NO: 89184 - DNA, 15 bp, Homo sapiens
atatttgcaatggat

SEQ ID NO: 89185 - DNA, 15 bp, Homo sapiens
catatttgcaatgga

SEQ ID NO: 89186 - DNA, 15 bp, Homo sapiens
acatatttgcaatgg

SEQ ID NO: 89187 - DNA, 15 bp, Homo sapiens
aacatatttgcaatg

SEQ ID NO: 89188 - DNA, 15 bp, Homo sapiens
aaacatatttgcaat

SEQ ID NO: 89189 - DNA, 15 bp, Homo sapiens
aaaacatatttgcaa

SEQ ID NO: 89190 - DNA, 15 bp, Homo sapiens
aaaaacatatttgca

SEQ ID NO: 89191 - DNA, 15 bp, Homo sapiens
caaaaacatatttgc

SEQ ID NO: 89192 - DNA, 15 bp, Homo sapiens
acaaaaacatatttg

SEQ ID NO: 89193 - DNA, 15 bp, Homo sapiens
cacaaaaacatattt

SEQ ID NO: 89194 - DNA, 15 bp, Homo sapiens
gcacaaaaacatatt

SEQ ID NO: 89195 - DNA, 15 bp, Homo sapiens
ggcacaaaaacatat

SEQ ID NO: 89196 - DNA, 15 bp, Homo sapiens
tggcacaaaaacata

SEQ ID NO: 89197 - DNA, 15 bp, Homo sapiens
ctggcacaaaaacat

SEQ ID NO: 89198 - DNA, 15 bp, Homo sapiens
gctggcacaaaaaca

SEQ ID NO: 89199 - DNA, 15 bp, Homo sapiens
ggctggcacaaaaac

SEQ ID NO: 89200 - DNA, 15 bp, Homo sapiens
tggctggcacaaaaa

SEQ ID NO: 89201 - DNA, 15 bp, Homo sapiens
gtggctggcacaaaa

SEQ ID NO: 89202 - DNA, 15 bp, Homo sapiens
tgtggctggcacaaa

SEQ ID NO: 89203 - DNA, 15 bp, Homo sapiens
ttgtggctggcacaa

SEQ ID NO: 89204 - DNA, 15 bp, Homo sapiens
attgtggctggcaca

SEQ ID NO: 89205 - DNA, 15 bp, Homo sapiens
tattgtggctggcac

SEQ ID NO: 89206 - DNA, 15 bp, Homo sapiens
atattgtggctggca

SEQ ID NO: 89207 - DNA, 15 bp, Homo sapiens
tatattgtggctggc

SEQ ID NO: 89208 - DNA, 15 bp, Homo sapiens
atatattgtggctgg

SEQ ID NO: 89209 - DNA, 15 bp, Homo sapiens
aatatattgtggctg

SEQ ID NO: 89210 - DNA, 15 bp, Homo sapiens
caatatattgtggct

SEQ ID NO: 89211 - DNA, 15 bp, Homo sapiens
gcaatatattgtggc

SEQ ID NO: 89212 - DNA, 15 bp, Homo sapiens
agcaatatattgtgg

SEQ ID NO: 89213 - DNA, 15 bp, Homo sapiens
aagcaatatattgtg

SEQ ID NO: 89214 - DNA, 15 bp, Homo sapiens
gaagcaatatattgt

SEQ ID NO: 89215 - DNA, 15 bp, Homo sapiens
agaagcaatatattg

SEQ ID NO: 89216 - DNA, 15 bp, Homo sapiens
tagaagcaatatatt

SEQ ID NO: 89217 - DNA, 15 bp, Homo sapiens
atagaagcaatatat

SEQ ID NO: 89218 - DNA, 15 bp, Homo sapiens
aatagaagcaatata

SEQ ID NO: 89219 - DNA, 15 bp, Homo sapiens
aaatagaagcaatat

SEQ ID NO: 89220 - DNA, 15 bp, Homo sapiens
caaatagaagcaata

SEQ ID NO: 89221 - DNA, 15 bp, Homo sapiens
ccaaatagaagcaat

SEQ ID NO: 89222 - DNA, 15 bp, Homo sapiens
tccaaatagaagcaa

SEQ ID NO: 89223 - DNA, 15 bp, Homo sapiens
gtccaaatagaagca

SEQ ID NO: 89224 - DNA, 15 bp, Homo sapiens
ggtccaaatagaagc

SEQ ID NO: 89225 - DNA, 15 bp, Homo sapiens
tggtccaaatagaag

SEQ ID NO: 89226 - DNA, 15 bp, Homo sapiens
ttggtccaaatagaa

SEQ ID NO: 89227 - DNA, 15 bp, Homo sapiens
attggtccaaataga

SEQ ID NO: 89228 - DNA, 15 bp, Homo sapiens
tattggtccaaatag

SEQ ID NO: 89229 - DNA, 15 bp, Homo sapiens
atattggtccaaata

SEQ ID NO: 89230 - DNA, 15 bp, Homo sapiens
catattggtccaaat

SEQ ID NO: 89231 - DNA, 15 bp, Homo sapiens
ccatattggtccaaa

SEQ ID NO: 89232 - DNA, 15 bp, Homo sapiens
cccatattggtccaa

SEQ ID NO: 89233 - DNA, 15 bp, Homo sapiens
ccccatattggtcca

SEQ ID NO: 89234 - DNA, 15 bp, Homo sapiens
cccccatattggtcc

SEQ ID NO: 89235 - DNA, 15 bp, Homo sapiens
tcccccatattggtc

SEQ ID NO: 89236 - DNA, 15 bp, Homo sapiens
atcccccatattggt

SEQ ID NO: 89237 - DNA, 15 bp, Homo sapiens
aatcccccatattgg

SEQ ID NO: 89238 - DNA, 15 bp, Homo sapiens
aaatcccccatattg

SEQ ID NO: 89239 - DNA, 15 bp, Homo sapiens
caaatcccccatatt

SEQ ID NO: 89240 - DNA, 15 bp, Homo sapiens
tcaaatcccccatat

SEQ ID NO: 89241 - DNA, 15 bp, Homo sapiens
ttcaaatcccccata

SEQ ID NO: 89242 - DNA, 15 bp, Homo sapiens
cttcaaatcccccat

SEQ ID NO: 89243 - DNA, 15 bp, Homo sapiens
ccttcaaatccccca

SEQ ID NO: 89244 - DNA, 15 bp, Homo sapiens
tccttcaaatccccc

SEQ ID NO: 89245 - DNA, 15 bp, Homo sapiens
ttccttcaaatcccc

SEQ ID NO: 89246 - DNA, 15 bp, Homo sapiens
attccttcaaatccc

SEQ ID NO: 89247 - DNA, 15 bp, Homo sapiens
aattccttcaaatcc

SEQ ID NO: 89248 - DNA, 15 bp, Homo sapiens
gaattccttcaaatc

SEQ ID NO: 89249 - DNA, 15 bp, Homo sapiens
agaattccttcaaat

SEQ ID NO: 89250 - DNA, 15 bp, Homo sapiens
cagaattccttcaaa

SEQ ID NO: 89251 - DNA, 15 bp, Homo sapiens
tcagaattccttcaa

SEQ ID NO: 89252 - DNA, 15 bp, Homo sapiens
ttcagaattccttca

SEQ ID NO: 89253 - DNA, 15 bp, Homo sapiens
cttcagaattccttc

SEQ ID NO: 89254 - DNA, 15 bp, Homo sapiens
acttcagaattcctt

SEQ ID NO: 89255 - DNA, 15 bp, Homo sapiens
aacttcagaattcct

SEQ ID NO: 89256 - DNA, 15 bp, Homo sapiens
gaacttcagaattcc

SEQ ID NO: 89257 - DNA, 15 bp, Homo sapiens
agaacttcagaattc

SEQ ID NO: 89258 - DNA, 15 bp, Homo sapiens
tagaacttcagaatt

SEQ ID NO: 89259 - DNA, 15 bp, Homo sapiens
ttagaacttcagaat

SEQ ID NO: 89260 - DNA, 15 bp, Homo sapiens
attagaacttcagaa

SEQ ID NO: 89261 - DNA, 15 bp, Homo sapiens
aattagaacttcaga

SEQ ID NO: 89262 - DNA, 15 bp, Homo sapiens
taattagaacttcag

SEQ ID NO: 89263 - DNA, 15 bp, Homo sapiens
ataattagaacttca

SEQ ID NO: 89264 - DNA, 15 bp, Homo sapiens
tataattagaacttc

SEQ ID NO: 89265 - DNA, 15 bp, Homo sapiens
atataattagaactt

SEQ ID NO: 89266 - DNA, 15 bp, Homo sapiens
aatataattagaact

SEQ ID NO: 89267 - DNA, 15 bp, Homo sapiens
aaatataattagaac

SEQ ID NO: 89268 - DNA, 15 bp, Homo sapiens
gaaatataattagaa

SEQ ID NO: 89269 - DNA, 15 bp, Homo sapiens
tgaaatataattaga

SEQ ID NO: 89270 - DNA, 15 bp, Homo sapiens
ttgaaatataattag

SEQ ID NO: 89271 - DNA, 15 bp, Homo sapiens
gttgaaatataatta

SEQ ID NO: 89272 - DNA, 15 bp, Homo sapiens
agttgaaatataatt

SEQ ID NO: 89273 - DNA, 15 bp, Homo sapiens
gagttgaaatataat

SEQ ID NO: 89274 - DNA, 15 bp, Homo sapiens
agagttgaaatataa

SEQ ID NO: 89275 - DNA, 15 bp, Homo sapiens
tagagttgaaatata

SEQ ID NO: 89276 - DNA, 15 bp, Homo sapiens
gtagagttgaaatat

SEQ ID NO: 89277 - DNA, 15 bp, Homo sapiens
agtagagttgaaata

SEQ ID NO: 89278 - DNA, 15 bp, Homo sapiens
aagtagagttgaaat

SEQ ID NO: 89279 - DNA, 15 bp, Homo sapiens
aaagtagagttgaaa

SEQ ID NO: 89280 - DNA, 15 bp, Homo sapiens
taaagtagagttgaa

SEQ ID NO: 89281 - DNA, 15 bp, Homo sapiens
gtaaagtagagttga

SEQ ID NO: 89282 - DNA, 15 bp, Homo sapiens
tgtaaagtagagttg

SEQ ID NO: 89283 - DNA, 15 bp, Homo sapiens
ttgtaaagtagagtt

SEQ ID NO: 89284 - DNA, 15 bp, Homo sapiens
attgtaaagtagagt

SEQ ID NO: 89285 - DNA, 15 bp, Homo sapiens
tattgtaaagtagag

SEQ ID NO: 89286 - DNA, 15 bp, Homo sapiens
atattgtaaagtaga

SEQ ID NO: 89287 - DNA, 15 bp, Homo sapiens
gatattgtaaagtag

SEQ ID NO: 89288 - DNA, 15 bp, Homo sapiens
agatattgtaaagta

SEQ ID NO: 89289 - DNA, 15 bp, Homo sapiens
gagatattgtaaagt

SEQ ID NO: 89290 - DNA, 15 bp, Homo sapiens
ggagatattgtaaag

SEQ ID NO: 89291 - DNA, 15 bp, Homo sapiens
gggagatattgtaaa

SEQ ID NO: 89292 - DNA, 15 bp, Homo sapiens
agggagatattgtaa

SEQ ID NO: 89293 - DNA, 15 bp, Homo sapiens
cagggagatattgta

SEQ ID NO: 89294 - DNA, 15 bp, Homo sapiens
tcagggagatattgt

SEQ ID NO: 89295 - DNA, 15 bp, Homo sapiens
ttcagggagatattg

SEQ ID NO: 89296 - DNA, 15 bp, Homo sapiens
tttcagggagatatt

SEQ ID NO: 89297 - DNA, 15 bp, Homo sapiens
atttcagggagatat

SEQ ID NO: 89298 - DNA, 15 bp, Homo sapiens
tatttcagggagata

SEQ ID NO: 89299 - DNA, 15 bp, Homo sapiens
atatttcagggagat

SEQ ID NO: 89300 - DNA, 15 bp, Homo sapiens
tatatttcagggaga

SEQ ID NO: 89301 - DNA, 15 bp, Homo sapiens
atatatttcagggag

SEQ ID NO: 89302 - DNA, 15 bp, Homo sapiens
gatatatttcaggga

SEQ ID NO: 89303 - DNA, 15 bp, Homo sapiens
agatatatttcaggg

SEQ ID NO: 89304 - DNA, 15 bp, Homo sapiens
gagatatatttcagg

SEQ ID NO: 89305 - DNA, 15 bp, Homo sapiens
ggagatatatttcag

SEQ ID NO: 89306 - DNA, 15 bp, Homo sapiens
gggagatatatttca

SEQ ID NO: 89307 - DNA, 15 bp, Homo sapiens
agggagatatatttc

SEQ ID NO: 89308 - DNA, 15 bp, Homo sapiens
cagggagatatattt

SEQ ID NO: 89309 - DNA, 15 bp, Homo sapiens
acagggagatatatt

SEQ ID NO: 89310 - DNA, 15 bp, Homo sapiens
tacagggagatatat

SEQ ID NO: 89311 - DNA, 15 bp, Homo sapiens
ttacagggagatata

SEQ ID NO: 89312 - DNA, 15 bp, Homo sapiens
gttacagggagatat

SEQ ID NO: 89313 - DNA, 15 bp, Homo sapiens
agttacagggagata

SEQ ID NO: 89314 - DNA, 15 bp, Homo sapiens
aagttacagggagat

SEQ ID NO: 89315 - DNA, 15 bp, Homo sapiens
gaagttacagggaga

SEQ ID NO: 89316 - DNA, 15 bp, Homo sapiens
agaagttacagggag

SEQ ID NO: 89317 - DNA, 15 bp, Homo sapiens
tagaagttacaggga

SEQ ID NO: 89318 - DNA, 15 bp, Homo sapiens
atagaagttacaggg

SEQ ID NO: 89319 - DNA, 15 bp, Homo sapiens
aatagaagttacagg

SEQ ID NO: 89320 - DNA, 15 bp, Homo sapiens
taatagaagttacag

SEQ ID NO: 89321 - DNA, 15 bp, Homo sapiens
ttaatagaagttaca

SEQ ID NO: 89322 - DNA, 15 bp, Homo sapiens
attaatagaagttac

SEQ ID NO: 89323 - DNA, 15 bp, Homo sapiens
aattaatagaagtta

SEQ ID NO: 89324 - DNA, 15 bp, Homo sapiens
taattaatagaagtt

SEQ ID NO: 89325 - DNA, 15 bp, Homo sapiens
ataattaatagaagt

SEQ ID NO: 89326 - DNA, 15 bp, Homo sapiens
tataattaatagaag

SEQ ID NO: 89327 - DNA, 15 bp, Homo sapiens
ttataattaatagaa

SEQ ID NO: 89328 - DNA, 15 bp, Homo sapiens
cttataattaataga

SEQ ID NO: 89329 - DNA, 15 bp, Homo sapiens
gcttataattaatag

SEQ ID NO: 89330 - DNA, 15 bp, Homo sapiens
agcttataattaata

SEQ ID NO: 89331 - DNA, 15 bp, Homo sapiens
tagcttataattaat

SEQ ID NO: 89332 - DNA, 15 bp, Homo sapiens
gtagcttataattaa

SEQ ID NO: 89333 - DNA, 15 bp, Homo sapiens
tgtagcttataatta

SEQ ID NO: 89334 - DNA, 15 bp, Homo sapiens
gtgtagcttataatt

SEQ ID NO: 89335 - DNA, 15 bp, Homo sapiens
tgtgtagcttataat

SEQ ID NO: 89336 - DNA, 15 bp, Homo sapiens
ctgtgtagcttataa

SEQ ID NO: 89337 - DNA, 15 bp, Homo sapiens
tctgtgtagcttata

SEQ ID NO: 89338 - DNA, 15 bp, Homo sapiens
ctctgtgtagcttat

SEQ ID NO: 89339 - DNA, 15 bp, Homo sapiens
gctctgtgtagctta

SEQ ID NO: 89340 - DNA, 15 bp, Homo sapiens
tgctctgtgtagctt

SEQ ID NO: 89341 - DNA, 15 bp, Homo sapiens
ttgctctgtgtagct

SEQ ID NO: 89342 - DNA, 15 bp, Homo sapiens
tttgctctgtgtagc

SEQ ID NO: 89343 - DNA, 15 bp, Homo sapiens
atttgctctgtgtag

SEQ ID NO: 89344 - DNA, 15 bp, Homo sapiens
gatttgctctgtgta

SEQ ID NO: 89345 - DNA, 15 bp, Homo sapiens
agatttgctctgtgt

SEQ ID NO: 89346 - DNA, 15 bp, Homo sapiens
tagatttgctctgtg

SEQ ID NO: 89347 - DNA, 15 bp, Homo sapiens
ttagatttgctctgt

SEQ ID NO: 89348 - DNA, 15 bp, Homo sapiens
attagatttgctctg

SEQ ID NO: 89349 - DNA, 15 bp, Homo sapiens
aattagatttgctct

SEQ ID NO: 89350 - DNA, 15 bp, Homo sapiens
gaattagatttgctc

SEQ ID NO: 89351 - DNA, 15 bp, Homo sapiens
agaattagatttgct

SEQ ID NO: 89352 - DNA, 15 bp, Homo sapiens
aagaattagatttgc

SEQ ID NO: 89353 - DNA, 15 bp, Homo sapiens
gaagaattagatttg

SEQ ID NO: 89354 - DNA, 15 bp, Homo sapiens
agaagaattagattt

SEQ ID NO: 89355 - DNA, 15 bp, Homo sapiens
gagaagaattagatt

SEQ ID NO: 89356 - DNA, 15 bp, Homo sapiens
ggagaagaattagat

SEQ ID NO: 89357 - DNA, 15 bp, Homo sapiens
gggagaagaattaga

SEQ ID NO: 89358 - DNA, 15 bp, Homo sapiens
tgggagaagaattag

SEQ ID NO: 89359 - DNA, 15 bp, Homo sapiens
gtgggagaagaatta

SEQ ID NO: 89360 - DNA, 15 bp, Homo sapiens
ggtgggagaagaatt

SEQ ID NO: 89361 - DNA, 15 bp, Homo sapiens
cggtgggagaagaat

SEQ ID NO: 89362 - DNA, 15 bp, Homo sapiens
tcggtgggagaagaa

SEQ ID NO: 89363 - DNA, 15 bp, Homo sapiens
ttcggtgggagaaga

SEQ ID NO: 89364 - DNA, 15 bp, Homo sapiens
gttcggtgggagaag

SEQ ID NO: 89365 - DNA, 15 bp, Homo sapiens
tgttcggtgggagaa

SEQ ID NO: 89366 - DNA, 15 bp, Homo sapiens
ttgttcggtgggaga

SEQ ID NO: 89367 - DNA, 15 bp, Homo sapiens
cttgttcggtgggag

SEQ ID NO: 89368 - DNA, 15 bp, Homo sapiens
acttgttcggtggga

SEQ ID NO: 89369 - DNA, 15 bp, Homo sapiens
gacttgttcggtggg

SEQ ID NO: 89370 - DNA, 15 bp, Homo sapiens
ggacttgttcggtgg

SEQ ID NO: 89371 - DNA, 15 bp, Homo sapiens
gggacttgttcggtg

SEQ ID NO: 89372 - DNA, 15 bp, Homo sapiens
agggacttgttcggt

SEQ ID NO: 89373 - DNA, 15 bp, Homo sapiens
cagggacttgttcgg

SEQ ID NO: 89374 - DNA, 15 bp, Homo sapiens
ccagggacttgttcg

SEQ ID NO: 89375 - DNA, 15 bp, Homo sapiens
tccagggacttgttc

SEQ ID NO: 89376 - DNA, 15 bp, Homo sapiens
atccagggacttgtt

SEQ ID NO: 89377 - DNA, 15 bp, Homo sapiens
tatccagggacttgt

SEQ ID NO: 89378 - DNA, 15 bp, Homo sapiens
atatccagggacttg

SEQ ID NO: 89379 - DNA, 15 bp, Homo sapiens
aatatccagggactt

SEQ ID NO: 89380 - DNA, 15 bp, Homo sapiens
aaatatccagggact

SEQ ID NO: 89381 - DNA, 15 bp, Homo sapiens
taaatatccagggac

SEQ ID NO: 89382 - DNA, 15 bp, Homo sapiens
ttaaatatccaggga

SEQ ID NO: 89383 - DNA, 15 bp, Homo sapiens
tttaaatatccaggg

SEQ ID NO: 89384 - DNA, 15 bp, Homo sapiens
ttttaaatatccagg

SEQ ID NO: 89385 - DNA, 15 bp, Homo sapiens
tttttaaatatccag

SEQ ID NO: 89386 - DNA, 15 bp, Homo sapiens
atttttaaatatcca

SEQ ID NO: 89387 - DNA, 15 bp, Homo sapiens
tatttttaaatatcc

SEQ ID NO: 89388 - DNA, 15 bp, Homo sapiens
ttatttttaaatatc

SEQ ID NO: 89389 - DNA, 15 bp, Homo sapiens
gttatttttaaatat

SEQ ID NO: 89390 - DNA, 15 bp, Homo sapiens
agttatttttaaata

SEQ ID NO: 89391 - DNA, 15 bp, Homo sapiens
gagttatttttaaat

SEQ ID NO: 89392 - DNA, 15 bp, Homo sapiens
agagttatttttaaa

SEQ ID NO: 89393 - DNA, 15 bp, Homo sapiens
gagagttatttttaa

SEQ ID NO: 89394 - DNA, 15 bp, Homo sapiens
tgagagttattttta

SEQ ID NO: 89395 - DNA, 15 bp, Homo sapiens
atgagagttattttt

SEQ ID NO: 89396 - DNA, 15 bp, Homo sapiens
tatgagagttatttt

SEQ ID NO: 89397 - DNA, 15 bp, Homo sapiens
gtatgagagttattt

SEQ ID NO: 89398 - DNA, 15 bp, Homo sapiens
agtatgagagttatt

SEQ ID NO: 89399 - DNA, 15 bp, Homo sapiens
gagtatgagagttat

SEQ ID NO: 89400 - DNA, 15 bp, Homo sapiens
agagtatgagagtta

SEQ ID NO: 89401 - DNA, 15 bp, Homo sapiens
gagagtatgagagtt

SEQ ID NO: 89402 - DNA, 15 bp, Homo sapiens
tgagagtatgagagt

SEQ ID NO: 89403 - DNA, 15 bp, Homo sapiens
atgagagtatgagag

SEQ ID NO: 89404 - DNA, 15 bp, Homo sapiens
aatgagagtatgaga

SEQ ID NO: 89405 - DNA, 15 bp, Homo sapiens
aaatgagagtatgag

SEQ ID NO: 89406 - DNA, 15 bp, Homo sapiens
taaatgagagtatga

SEQ ID NO: 89407 - DNA, 15 bp, Homo sapiens
ttaaatgagagtatg

SEQ ID NO: 89408 - DNA, 15 bp, Homo sapiens
gttaaatgagagtat

SEQ ID NO: 89409 - DNA, 15 bp, Homo sapiens
ggttaaatgagagta

SEQ ID NO: 89410 - DNA, 15 bp, Homo sapiens
aggttaaatgagagt

SEQ ID NO: 89411 - DNA, 15 bp, Homo sapiens
caggttaaatgagag

SEQ ID NO: 89412 - DNA, 15 bp, Homo sapiens
tcaggttaaatgaga

SEQ ID NO: 89413 - DNA, 15 bp, Homo sapiens
ctcaggttaaatgag

SEQ ID NO: 89414 - DNA, 15 bp, Homo sapiens
actcaggttaaatga

SEQ ID NO: 89415 - DNA, 15 bp, Homo sapiens
tactcaggttaaatg

SEQ ID NO: 89416 - DNA, 15 bp, Homo sapiens
atactcaggttaaat

SEQ ID NO: 89417 - DNA, 15 bp, Homo sapiens
aatactcaggttaaa

SEQ ID NO: 89418 - DNA, 15 bp, Homo sapiens
taatactcaggttaa

SEQ ID NO: 89419 - DNA, 15 bp, Homo sapiens
gtaatactcaggtta

SEQ ID NO: 89420 - DNA, 15 bp, Homo sapiens
ggtaatactcaggtt

SEQ ID NO: 89421 - DNA, 15 bp, Homo sapiens
gggtaatactcaggt

SEQ ID NO: 89422 - DNA, 15 bp, Homo sapiens
tgggtaatactcagg

SEQ ID NO: 89423 - DNA, 15 bp, Homo sapiens
ctgggtaatactcag

SEQ ID NO: 89424 - DNA, 15 bp, Homo sapiens
tctgggtaatactca

SEQ ID NO: 89425 - DNA, 15 bp, Homo sapiens
atctgggtaatactc

SEQ ID NO: 89426 - DNA, 15 bp, Homo sapiens
tatctgggtaatact

SEQ ID NO: 89427 - DNA, 15 bp, Homo sapiens
ttatctgggtaatac

SEQ ID NO: 89428 - DNA, 15 bp, Homo sapiens
cttatctgggtaata

SEQ ID NO: 89429 - DNA, 15 bp, Homo sapiens
tcttatctgggtaat

SEQ ID NO: 89430 - DNA, 15 bp, Homo sapiens
atcttatctgggtaa

SEQ ID NO: 89431 - DNA, 15 bp, Homo sapiens
catcttatctgggta

SEQ ID NO: 89432 - DNA, 15 bp, Homo sapiens
tcatcttatctgggt

SEQ ID NO: 89433 - DNA, 15 bp, Homo sapiens
atcatcttatctggg

SEQ ID NO: 89434 - DNA, 15 bp, Homo sapiens
tatcatcttatctgg

SEQ ID NO: 89435 - DNA, 15 bp, Homo sapiens
atatcatcttatctg

SEQ ID NO: 89436 - DNA, 15 bp, Homo sapiens
tatatcatcttatct

SEQ ID NO: 89437 - DNA, 15 bp, Homo sapiens
atatatcatcttatc

SEQ ID NO: 89438 - DNA, 15 bp, Homo sapiens
catatatcatcttat

SEQ ID NO: 89439 - DNA, 15 bp, Homo sapiens
tcatatatcatctta

SEQ ID NO: 89440 - DNA, 15 bp, Homo sapiens
ctcatatatcatctt

SEQ ID NO: 89441 - DNA, 15 bp, Homo sapiens
tctcatatatcatct

SEQ ID NO: 89442 - DNA, 15 bp, Homo sapiens
ttctcatatatcatc

SEQ ID NO: 89443 - DNA, 15 bp, Homo sapiens
attctcatatatcat

SEQ ID NO: 89444 - DNA, 15 bp, Homo sapiens
tattctcatatatca

SEQ ID NO: 89445 - DNA, 15 bp, Homo sapiens
gtattctcatatatc

SEQ ID NO: 89446 - DNA, 15 bp, Homo sapiens
tgtattctcatatat

SEQ ID NO: 89447 - DNA, 15 bp, Homo sapiens
gtgtattctcatata

SEQ ID NO: 89448 - DNA, 15 bp, Homo sapiens
ggtgtattctcatat

SEQ ID NO: 89449 - DNA, 15 bp, Homo sapiens
aggtgtattctcata

SEQ ID NO: 89450 - DNA, 15 bp, Homo sapiens
aaggtgtattctcat

SEQ ID NO: 89451 - DNA, 15 bp, Homo sapiens
caaggtgtattctca

SEQ ID NO: 89452 - DNA, 15 bp, Homo sapiens
acaaggtgtattctc

SEQ ID NO: 89453 - DNA, 15 bp, Homo sapiens
tacaaggtgtattct

SEQ ID NO: 89454 - DNA, 15 bp, Homo sapiens
ttacaaggtgtattc

SEQ ID NO: 89455 - DNA, 15 bp, Homo sapiens
gttacaaggtgtatt

SEQ ID NO: 89456 - DNA, 15 bp, Homo sapiens
ggttacaaggtgtat

SEQ ID NO: 89457 - DNA, 15 bp, Homo sapiens
aggttacaaggtgta

SEQ ID NO: 89458 - DNA, 15 bp, Homo sapiens
gaggttacaaggtgt

SEQ ID NO: 89459 - DNA, 15 bp, Homo sapiens
ggaggttacaaggtg

SEQ ID NO: 89460 - DNA, 15 bp, Homo sapiens
cggaggttacaaggt

SEQ ID NO: 89461 - DNA, 15 bp, Homo sapiens
tcggaggttacaagg

SEQ ID NO: 89462 - DNA, 15 bp, Homo sapiens
ttcggaggttacaag

SEQ ID NO: 89463 - DNA, 15 bp, Homo sapiens
cttcggaggttacaa

SEQ ID NO: 89464 - DNA, 15 bp, Homo sapiens
gcttcggaggttaca

SEQ ID NO: 89465 - DNA, 15 bp, Homo sapiens
tgcttcggaggttac

SEQ ID NO: 89466 - DNA, 15 bp, Homo sapiens
gtgcttcggaggtta

SEQ ID NO: 89467 - DNA, 15 bp, Homo sapiens
agtgcttcggaggtt

SEQ ID NO: 89468 - DNA, 15 bp, Homo sapiens
cagtgcttcggaggt

SEQ ID NO: 89469 - DNA, 15 bp, Homo sapiens
acagtgcttcggagg

SEQ ID NO: 89470 - DNA, 15 bp, Homo sapiens
tacagtgcttcggag

SEQ ID NO: 89471 - DNA, 15 bp, Homo sapiens
gtacagtgcttcgga

SEQ ID NO: 89472 - DNA, 15 bp, Homo sapiens
tgtacagtgcttcgg

SEQ ID NO: 89473 - DNA, 15 bp, Homo sapiens
ttgtacagtgcttcg

SEQ ID NO: 89474 - DNA, 15 bp, Homo sapiens
tttgtacagtgcttc

SEQ ID NO: 89475 - DNA, 15 bp, Homo sapiens
atttgtacagtgctt

SEQ ID NO: 89476 - DNA, 15 bp, Homo sapiens
catttgtacagtgct

SEQ ID NO: 89477 - DNA, 15 bp, Homo sapiens
acatttgtacagtgc

SEQ ID NO: 89478 - DNA, 15 bp, Homo sapiens
cacatttgtacagtg

SEQ ID NO: 89479 - DNA, 15 bp, Homo sapiens
tcacatttgtacagt

SEQ ID NO: 89480 - DNA, 15 bp, Homo sapiens
ctcacatttgtacag

SEQ ID NO: 89481 - DNA, 15 bp, Homo sapiens
gctcacatttgtaca

SEQ ID NO: 89482 - DNA, 15 bp, Homo sapiens
tgctcacatttgtac

SEQ ID NO: 89483 - DNA, 15 bp, Homo sapiens
ttgctcacatttgta

SEQ ID NO: 89484 - DNA, 15 bp, Homo sapiens
attgctcacatttgt

SEQ ID NO: 89485 - DNA, 15 bp, Homo sapiens
cattgctcacatttg

SEQ ID NO: 89486 - DNA, 15 bp, Homo sapiens
tcattgctcacattt

SEQ ID NO: 89487 - DNA, 15 bp, Homo sapiens
atcattgctcacatt

SEQ ID NO: 89488 - DNA, 15 bp, Homo sapiens
catcattgctcacat

SEQ ID NO: 89489 - DNA, 15 bp, Homo sapiens
ccatcattgctcaca

SEQ ID NO: 89490 - DNA, 15 bp, Homo sapiens
accatcattgctcac

SEQ ID NO: 89491 - DNA, 15 bp, Homo sapiens
caccatcattgctca

SEQ ID NO: 89492 - DNA, 15 bp, Homo sapiens
ccaccatcattgctc

SEQ ID NO: 89493 - DNA, 15 bp, Homo sapiens
tccaccatcattgct

SEQ ID NO: 89494 - DNA, 15 bp, Homo sapiens
ctccaccatcattgc

SEQ ID NO: 89495 - DNA, 15 bp, Homo sapiens
tctccaccatcattg

SEQ ID NO: 89496 - DNA, 15 bp, Homo sapiens
atctccaccatcatt

SEQ ID NO: 89497 - DNA, 15 bp, Homo sapiens
catctccaccatcat

SEQ ID NO: 89498 - DNA, 15 bp, Homo sapiens
tcatctccaccatca

SEQ ID NO: 89499 - DNA, 15 bp, Homo sapiens
atcatctccaccatc

SEQ ID NO: 89500 - DNA, 15 bp, Homo sapiens
catcatctccaccat

SEQ ID NO: 89501 - DNA, 15 bp, Homo sapiens
tcatcatctccacca

SEQ ID NO: 89502 - DNA, 15 bp, Homo sapiens
atcatcatctccacc

SEQ ID NO: 89503 - DNA, 15 bp, Homo sapiens
catcatcatctccac

SEQ ID NO: 89504 - DNA, 15 bp, Homo sapiens
tcatcatcatctcca

SEQ ID NO: 89505 - DNA, 15 bp, Homo sapiens
ctcatcatcatctcc

SEQ ID NO: 89506 - DNA, 15 bp, Homo sapiens
tctcatcatcatctc

SEQ ID NO: 89507 - DNA, 15 bp, Homo sapiens
atctcatcatcatct

SEQ ID NO: 89508 - DNA, 15 bp, Homo sapiens
gatctcatcatcatc

SEQ ID NO: 89509 - DNA, 15 bp, Homo sapiens
agatctcatcatcat

SEQ ID NO: 89510 - DNA, 15 bp, Homo sapiens
aagatctcatcatca

SEQ ID NO: 89511 - DNA, 15 bp, Homo sapiens
aaagatctcatcatc

SEQ ID NO: 89512 - DNA, 15 bp, Homo sapiens
caaagatctcatcat

SEQ ID NO: 89513 - DNA, 15 bp, Homo sapiens
gcaaagatctcatca

SEQ ID NO: 89514 - DNA, 15 bp, Homo sapiens
agcaaagatctcatc

SEQ ID NO: 89515 - DNA, 15 bp, Homo sapiens
cagcaaagatctcat

SEQ ID NO: 89516 - DNA, 15 bp, Homo sapiens
acagcaaagatctca

SEQ ID NO: 89517 - DNA, 15 bp, Homo sapiens
aacagcaaagatctc

SEQ ID NO: 89518 - DNA, 15 bp, Homo sapiens
aaacagcaaagatct

SEQ ID NO: 89519 - DNA, 15 bp, Homo sapiens
taaacagcaaagatc

SEQ ID NO: 89520 - DNA, 15 bp, Homo sapiens
ataaacagcaaagat

SEQ ID NO: 89521 - DNA, 15 bp, Homo sapiens
tataaacagcaaaga

SEQ ID NO: 89522 - DNA, 15 bp, Homo sapiens
gtataaacagcaaag

SEQ ID NO: 89523 - DNA, 15 bp, Homo sapiens
ggtataaacagcaaa

SEQ ID NO: 89524 - DNA, 15 bp, Homo sapiens
tggtataaacagcaa

SEQ ID NO: 89525 - DNA, 15 bp, Homo sapiens
ttggtataaacagca

SEQ ID NO: 89526 - DNA, 15 bp, Homo sapiens
cttggtataaacagc

SEQ ID NO: 89527 - DNA, 15 bp, Homo sapiens
gcttggtataaacag

SEQ ID NO: 89528 - DNA, 15 bp, Homo sapiens
ggcttggtataaaca

SEQ ID NO: 89529 - DNA, 15 bp, Homo sapiens
gggcttggtataaac

SEQ ID NO: 89530 - DNA, 15 bp, Homo sapiens
ggggcttggtataaa

SEQ ID NO: 89531 - DNA, 15 bp, Homo sapiens
aggggcttggtataa

SEQ ID NO: 89532 - DNA, 15 bp, Homo sapiens
aaggggcttggtata

SEQ ID NO: 89533 - DNA, 15 bp, Homo sapiens
taaggggcttggtat

SEQ ID NO: 89534 - DNA, 15 bp, Homo sapiens
ctaaggggcttggta

SEQ ID NO: 89535 - DNA, 15 bp, Homo sapiens
tctaaggggcttggt

SEQ ID NO: 89536 - DNA, 15 bp, Homo sapiens
gtctaaggggcttgg

SEQ ID NO: 89537 - DNA, 15 bp, Homo sapiens
agtctaaggggcttg

SEQ ID NO: 89538 - DNA, 15 bp, Homo sapiens
cagtctaaggggctt

SEQ ID NO: 89539 - DNA, 15 bp, Homo sapiens
acagtctaaggggct

SEQ ID NO: 89540 - DNA, 15 bp, Homo sapiens
cacagtctaaggggc

SEQ ID NO: 89541 - DNA, 15 bp, Homo sapiens
acacagtctaagggg

SEQ ID NO: 89542 - DNA, 15 bp, Homo sapiens
gacacagtctaaggg

SEQ ID NO: 89543 - DNA, 15 bp, Homo sapiens
tgacacagtctaagg

SEQ ID NO: 89544 - DNA, 15 bp, Homo sapiens
gtgacacagtctaag

SEQ ID NO: 89545 - DNA, 15 bp, Homo sapiens
agtgacacagtctaa

SEQ ID NO: 89546 - DNA, 15 bp, Homo sapiens
gagtgacacagtcta

SEQ ID NO: 89547 - DNA, 15 bp, Homo sapiens
agagtgacacagtct

SEQ ID NO: 89548 - DNA, 15 bp, Homo sapiens
aagagtgacacagtc

SEQ ID NO: 89549 - DNA, 15 bp, Homo sapiens
gaagagtgacacagt

SEQ ID NO: 89550 - DNA, 15 bp, Homo sapiens
agaagagtgacacag

SEQ ID NO: 89551 - DNA, 15 bp, Homo sapiens
cagaagagtgacaca

SEQ ID NO: 89552 - DNA, 15 bp, Homo sapiens
tcagaagagtgacac

SEQ ID NO: 89553 - DNA, 15 bp, Homo sapiens
atcagaagagtgaca

SEQ ID NO: 89554 - DNA, 15 bp, Homo sapiens
gatcagaagagtgac

SEQ ID NO: 89555 - DNA, 15 bp, Homo sapiens
ggatcagaagagtga

SEQ ID NO: 89556 - DNA, 15 bp, Homo sapiens
cggatcagaagagtg

SEQ ID NO: 89557 - DNA, 15 bp, Homo sapiens
ccggatcagaagagt

SEQ ID NO: 89558 - DNA, 15 bp, Homo sapiens
accggatcagaagag

SEQ ID NO: 89559 - DNA, 15 bp, Homo sapiens
aaccggatcagaaga

SEQ ID NO: 89560 - DNA, 15 bp, Homo sapiens
caaccggatcagaag

SEQ ID NO: 89561 - DNA, 15 bp, Homo sapiens
acaaccggatcagaa

SEQ ID NO: 89562 - DNA, 15 bp, Homo sapiens
gacaaccggatcaga

SEQ ID NO: 89563 - DNA, 15 bp, Homo sapiens
ggacaaccggatcag

SEQ ID NO: 89564 - DNA, 15 bp, Homo sapiens
aggacaaccggatca

SEQ ID NO: 89565 - DNA, 15 bp, Homo sapiens
aaggacaaccggatc

SEQ ID NO: 89566 - DNA, 15 bp, Homo sapiens
caaggacaaccggat

SEQ ID NO: 89567 - DNA, 15 bp, Homo sapiens
acaaggacaaccgga

SEQ ID NO: 89568 - DNA, 15 bp, Homo sapiens
tacaaggacaaccgg

SEQ ID NO: 89569 - DNA, 15 bp, Homo sapiens
atacaaggacaaccg

SEQ ID NO: 89570 - DNA, 15 bp, Homo sapiens
catacaaggacaacc

SEQ ID NO: 89571 - DNA, 15 bp, Homo sapiens
ccatacaaggacaac

SEQ ID NO: 89572 - DNA, 15 bp, Homo sapiens
gccatacaaggacaa

SEQ ID NO: 89573 - DNA, 15 bp, Homo sapiens
ggccatacaaggaca

SEQ ID NO: 89574 - DNA, 15 bp, Homo sapiens
tggccatacaaggac

SEQ ID NO: 89575 - DNA, 15 bp, Homo sapiens
atggccatacaagga

SEQ ID NO: 89576 - DNA, 15 bp, Homo sapiens
catggccatacaagg

SEQ ID NO: 89577 - DNA, 15 bp, Homo sapiens
gcatggccatacaag

SEQ ID NO: 89578 - DNA, 15 bp, Homo sapiens
agcatggccatacaa

SEQ ID NO: 89579 - DNA, 15 bp, Homo sapiens
cagcatggccataca

SEQ ID NO: 89580 - DNA, 15 bp, Homo sapiens
acagcatggccatac

SEQ ID NO: 89581 - DNA, 15 bp, Homo sapiens
tacagcatggccata

SEQ ID NO: 89582 - DNA, 15 bp, Homo sapiens
atacagcatggccat

SEQ ID NO: 89583 - DNA, 15 bp, Homo sapiens
tatacagcatggcca

SEQ ID NO: 89584 - DNA, 15 bp, Homo sapiens
atatacagcatggcc

SEQ ID NO: 89585 - DNA, 15 bp, Homo sapiens
aatatacagcatggc

SEQ ID NO: 89586 - DNA, 15 bp, Homo sapiens
caatatacagcatgg

SEQ ID NO: 89587 - DNA, 15 bp, Homo sapiens
acaatatacagcatg

SEQ ID NO: 89588 - DNA, 15 bp, Homo sapiens
cacaatatacagcat

SEQ ID NO: 89589 - DNA, 15 bp, Homo sapiens
tcacaatatacagca

SEQ ID NO: 89590 - DNA, 15 bp, Homo sapiens
ttcacaatatacagc

SEQ ID NO: 89591 - DNA, 15 bp, Homo sapiens
attcacaatatacag

SEQ ID NO: 89592 - DNA, 15 bp, Homo sapiens
cattcacaatataca

SEQ ID NO: 89593 - DNA, 15 bp, Homo sapiens
acattcacaatatac

SEQ ID NO: 89594 - DNA, 15 bp, Homo sapiens
gacattcacaatata

SEQ ID NO: 89595 - DNA, 15 bp, Homo sapiens
ggacattcacaatat

SEQ ID NO: 89596 - DNA, 15 bp, Homo sapiens
cggacattcacaata

SEQ ID NO: 89597 - DNA, 15 bp, Homo sapiens
acggacattcacaat

SEQ ID NO: 89598 - DNA, 15 bp, Homo sapiens
aacggacattcacaa

SEQ ID NO: 89599 - DNA, 15 bp, Homo sapiens
aaacggacattcaca

SEQ ID NO: 89600 - DNA, 15 bp, Homo sapiens
aaaacggacattcac

SEQ ID NO: 89601 - DNA, 15 bp, Homo sapiens
gaaaacggacattca

SEQ ID NO: 89602 - DNA, 15 bp, Homo sapiens
tgaaaacggacattc

SEQ ID NO: 89603 - DNA, 15 bp, Homo sapiens
ttgaaaacggacatt

SEQ ID NO: 89604 - DNA, 15 bp, Homo sapiens
tttgaaaacggacat

SEQ ID NO: 89605 - DNA, 15 bp, Homo sapiens
ttttgaaaacggaca

SEQ ID NO: 89606 - DNA, 15 bp, Homo sapiens
cttttgaaaacggac

SEQ ID NO: 89607 - DNA, 15 bp, Homo sapiens
gcttttgaaaacgga

SEQ ID NO: 89608 - DNA, 15 bp, Homo sapiens
tgcttttgaaaacgg

SEQ ID NO: 89609 - DNA, 15 bp, Homo sapiens
ttgcttttgaaaacg

SEQ ID NO: 89610 - DNA, 15 bp, Homo sapiens
tttgcttttgaaaac

SEQ ID NO: 89611 - DNA, 15 bp, Homo sapiens
ctttgcttttgaaaa

SEQ ID NO: 89612 - DNA, 15 bp, Homo sapiens
gctttgcttttgaaa

SEQ ID NO: 89613 - DNA, 15 bp, Homo sapiens
ggctttgcttttgaa

SEQ ID NO: 89614 - DNA, 15 bp, Homo sapiens
tggctttgcttttga

SEQ ID NO: 89615 - DNA, 15 bp, Homo sapiens
ttggctttgcttttg

SEQ ID NO: 89616 - DNA, 15 bp, Homo sapiens
cttggctttgctttt

SEQ ID NO: 89617 - DNA, 15 bp, Homo sapiens
tcttggctttgcttt

SEQ ID NO: 89618 - DNA, 15 bp, Homo sapiens
ttcttggctttgctt

SEQ ID NO: 89619 - DNA, 15 bp, Homo sapiens
attcttggctttgct

SEQ ID NO: 89620 - DNA, 15 bp, Homo sapiens
aattcttggctttgc

SEQ ID NO: 89621 - DNA, 15 bp, Homo sapiens
taattcttggctttg

SEQ ID NO: 89622 - DNA, 15 bp, Homo sapiens
ttaattcttggcttt

SEQ ID NO: 89623 - DNA, 15 bp, Homo sapiens
gttaattcttggctt

SEQ ID NO: 89624 - DNA, 15 bp, Homo sapiens
ggttaattcttggct

SEQ ID NO: 89625 - DNA, 15 bp, Homo sapiens
aggttaattcttggc

SEQ ID NO: 89626 - DNA, 15 bp, Homo sapiens
aaggttaattcttgg

SEQ ID NO: 89627 - DNA, 15 bp, Homo sapiens
caaggttaattcttg

SEQ ID NO: 89628 - DNA, 15 bp, Homo sapiens
acaaggttaattctt

SEQ ID NO: 89629 - DNA, 15 bp, Homo sapiens
cacaaggttaattct

SEQ ID NO: 89630 - DNA, 15 bp, Homo sapiens
acacaaggttaattc

SEQ ID NO: 89631 - DNA, 15 bp, Homo sapiens
aacacaaggttaatt

SEQ ID NO: 89632 - DNA, 15 bp, Homo sapiens
gaacacaaggttaat

SEQ ID NO: 89633 - DNA, 15 bp, Homo sapiens
tgaacacaaggttaa

SEQ ID NO: 89634 - DNA, 15 bp, Homo sapiens
ctgaacacaaggtta

SEQ ID NO: 89635 - DNA, 15 bp, Homo sapiens
cctgaacacaaggtt

SEQ ID NO: 89636 - DNA, 15 bp, Homo sapiens
gcctgaacacaaggt

SEQ ID NO: 89637 - DNA, 15 bp, Homo sapiens
agcctgaacacaagg

SEQ ID NO: 89638 - DNA, 15 bp, Homo sapiens
cagcctgaacacaag

SEQ ID NO: 89639 - DNA, 15 bp, Homo sapiens
acagcctgaacacaa

SEQ ID NO: 89640 - DNA, 15 bp, Homo sapiens
cacagcctgaacaca

SEQ ID NO: 89641 - DNA, 15 bp, Homo sapiens
ccacagcctgaacac

SEQ ID NO: 89642 - DNA, 15 bp, Homo sapiens
accacagcctgaaca

SEQ ID NO: 89643 - DNA, 15 bp, Homo sapiens
gaccacagcctgaac

SEQ ID NO: 89644 - DNA, 15 bp, Homo sapiens
agaccacagcctgaa

SEQ ID NO: 89645 - DNA, 15 bp, Homo sapiens
cagaccacagcctga

SEQ ID NO: 89646 - DNA, 15 bp, Homo sapiens
tcagaccacagcctg

SEQ ID NO: 89647 - DNA, 15 bp, Homo sapiens
ttcagaccacagcct

SEQ ID NO: 89648 - DNA, 15 bp, Homo sapiens
attcagaccacagcc

SEQ ID NO: 89649 - DNA, 15 bp, Homo sapiens
cattcagaccacagc

SEQ ID NO: 89650 - DNA, 15 bp, Homo sapiens
ccattcagaccacag

SEQ ID NO: 89651 - DNA, 15 bp, Homo sapiens
accattcagaccaca

SEQ ID NO: 89652 - DNA, 15 bp, Homo sapiens
aaccattcagaccac

SEQ ID NO: 89653 - DNA, 15 bp, Homo sapiens
taaccattcagacca

SEQ ID NO: 89654 - DNA, 15 bp, Homo sapiens
ataaccattcagacc

SEQ ID NO: 89655 - DNA, 15 bp, Homo sapiens
cataaccattcagac

SEQ ID NO: 89656 - DNA, 15 bp, Homo sapiens
ccataaccattcaga

SEQ ID NO: 89657 - DNA, 15 bp, Homo sapiens
cccataaccattcag

SEQ ID NO: 89658 - DNA, 15 bp, Homo sapiens
acccataaccattca

SEQ ID NO: 89659 - DNA, 15 bp, Homo sapiens
gacccataaccattc

SEQ ID NO: 89660 - DNA, 15 bp, Homo sapiens
ggacccataaccatt

SEQ ID NO: 89661 - DNA, 15 bp, Homo sapiens
tggacccataaccat

SEQ ID NO: 89662 - DNA, 15 bp, Homo sapiens
ctggacccataacca

SEQ ID NO: 89663 - DNA, 15 bp, Homo sapiens
tctggacccataacc

SEQ ID NO: 89664 - DNA, 15 bp, Homo sapiens
ctctggacccataac

SEQ ID NO: 89665 - DNA, 15 bp, Homo sapiens
cctctggacccataa

SEQ ID NO: 89666 - DNA, 15 bp, Homo sapiens
ccctctggacccata

SEQ ID NO: 89667 - DNA, 15 bp, Homo sapiens
tccctctggacccat

SEQ ID NO: 89668 - DNA, 15 bp, Homo sapiens
ctccctctggaccca

SEQ ID NO: 89669 - DNA, 15 bp, Homo sapiens
actccctctggaccc

SEQ ID NO: 89670 - DNA, 15 bp, Homo sapiens
aactccctctggacc

SEQ ID NO: 89671 - DNA, 15 bp, Homo sapiens
caactccctctggac

SEQ ID NO: 89672 - DNA, 15 bp, Homo sapiens
tcaactccctctgga

SEQ ID NO: 89673 - DNA, 15 bp, Homo sapiens
atcaactccctctgg

SEQ ID NO: 89674 - DNA, 15 bp, Homo sapiens
gatcaactccctctg

SEQ ID NO: 89675 - DNA, 15 bp, Homo sapiens
agatcaactccctct

SEQ ID NO: 89676 - DNA, 15 bp, Homo sapiens
aagatcaactccctc

SEQ ID NO: 89677 - DNA, 15 bp, Homo sapiens
aaagatcaactccct

SEQ ID NO: 89678 - DNA, 15 bp, Homo sapiens
taaagatcaactccc

SEQ ID NO: 89679 - DNA, 15 bp, Homo sapiens
ctaaagatcaactcc

SEQ ID NO: 89680 - DNA, 15 bp, Homo sapiens
gctaaagatcaactc

SEQ ID NO: 89681 - DNA, 15 bp, Homo sapiens
agctaaagatcaact

SEQ ID NO: 89682 - DNA, 15 bp, Homo sapiens
gagctaaagatcaac

SEQ ID NO: 89683 - DNA, 15 bp, Homo sapiens
tgagctaaagatcaa

SEQ ID NO: 89684 - DNA, 15 bp, Homo sapiens
gtgagctaaagatca

SEQ ID NO: 89685 - DNA, 15 bp, Homo sapiens
tgtgagctaaagatc

SEQ ID NO: 89686 - DNA, 15 bp, Homo sapiens
gtgtgagctaaagat

SEQ ID NO: 89687 - DNA, 15 bp, Homo sapiens
agtgtgagctaaaga

SEQ ID NO: 89688 - DNA, 15 bp, Homo sapiens
aagtgtgagctaaag

SEQ ID NO: 89689 - DNA, 15 bp, Homo sapiens
gaagtgtgagctaaa

SEQ ID NO: 89690 - DNA, 15 bp, Homo sapiens
agaagtgtgagctaa

SEQ ID NO: 89691 - DNA, 15 bp, Homo sapiens
tagaagtgtgagcta

SEQ ID NO: 89692 - DNA, 15 bp, Homo sapiens
atagaagtgtgagct

SEQ ID NO: 89693 - DNA, 15 bp, Homo sapiens
aatagaagtgtgagc

SEQ ID NO: 89694 - DNA, 15 bp, Homo sapiens
taatagaagtgtgag

SEQ ID NO: 89695 - DNA, 15 bp, Homo sapiens
gtaatagaagtgtga

SEQ ID NO: 89696 - DNA, 15 bp, Homo sapiens
agtaatagaagtgtg

SEQ ID NO: 89697 - DNA, 15 bp, Homo sapiens
cagtaatagaagtgt

SEQ ID NO: 89698 - DNA, 15 bp, Homo sapiens
gcagtaatagaagtg

SEQ ID NO: 89699 - DNA, 15 bp, Homo sapiens
tgcagtaatagaagt

SEQ ID NO: 89700 - DNA, 15 bp, Homo sapiens
ctgcagtaatagaag

SEQ ID NO: 89701 - DNA, 15 bp, Homo sapiens
gctgcagtaatagaa

SEQ ID NO: 89702 - DNA, 15 bp, Homo sapiens
tgctgcagtaataga

SEQ ID NO: 89703 - DNA, 15 bp, Homo sapiens
gtgctgcagtaatag

SEQ ID NO: 89704 - DNA, 15 bp, Homo sapiens
tgtgctgcagtaata

SEQ ID NO: 89705 - DNA, 15 bp, Homo sapiens
ttgtgctgcagtaat

SEQ ID NO: 89706 - DNA, 15 bp, Homo sapiens
tttgtgctgcagtaa

SEQ ID NO: 89707 - DNA, 15 bp, Homo sapiens
ctttgtgctgcagta

SEQ ID NO: 89708 - DNA, 15 bp, Homo sapiens
tctttgtgctgcagt

SEQ ID NO: 89709 - DNA, 15 bp, Homo sapiens
atctttgtgctgcag

SEQ ID NO: 89710 - DNA, 15 bp, Homo sapiens
aatctttgtgctgca

SEQ ID NO: 89711 - DNA, 15 bp, Homo sapiens
aaatctttgtgctgc

SEQ ID NO: 89712 - DNA, 15 bp, Homo sapiens
aaaatctttgtgctg

SEQ ID NO: 89713 - DNA, 15 bp, Homo sapiens
caaaatctttgtgct

SEQ ID NO: 89714 - DNA, 15 bp, Homo sapiens
gcaaaatctttgtgc

SEQ ID NO: 89715 - DNA, 15 bp, Homo sapiens
tgcaaaatctttgtg

SEQ ID NO: 89716 - DNA, 15 bp, Homo sapiens
atgcaaaatctttgt

SEQ ID NO: 89717 - DNA, 15 bp, Homo sapiens
aatgcaaaatctttg

SEQ ID NO: 89718 - DNA, 15 bp, Homo sapiens
aaatgcaaaatcttt

SEQ ID NO: 89719 - DNA, 15 bp, Homo sapiens
aaaatgcaaaatctt

SEQ ID NO: 89720 - DNA, 15 bp, Homo sapiens
caaaatgcaaaatct

SEQ ID NO: 89721 - DNA, 15 bp, Homo sapiens
ccaaaatgcaaaatc

SEQ ID NO: 89722 - DNA, 15 bp, Homo sapiens
tccaaaatgcaaaat

SEQ ID NO: 89723 - DNA, 15 bp, Homo sapiens
ttccaaaatgcaaaa

SEQ ID NO: 89724 - DNA, 15 bp, Homo sapiens
cttccaaaatgcaaa

SEQ ID NO: 89725 - DNA, 15 bp, Homo sapiens
ccttccaaaatgcaa

SEQ ID NO: 89726 - DNA, 15 bp, Homo sapiens
tccttccaaaatgca

SEQ ID NO: 89727 - DNA, 15 bp, Homo sapiens
ctccttccaaaatgc

SEQ ID NO: 89728 - DNA, 15 bp, Homo sapiens
gctccttccaaaatg

SEQ ID NO: 89729 - DNA, 15 bp, Homo sapiens
tgctccttccaaaat

SEQ ID NO: 89730 - DNA, 15 bp, Homo sapiens
gtgctccttccaaaa

SEQ ID NO: 89731 - DNA, 15 bp, Homo sapiens
ggtgctccttccaaa

SEQ ID NO: 89732 - DNA, 15 bp, Homo sapiens
cggtgctccttccaa

SEQ ID NO: 89733 - DNA, 15 bp, Homo sapiens
acggtgctccttcca

SEQ ID NO: 89734 - DNA, 15 bp, Homo sapiens
gacggtgctccttcc

SEQ ID NO: 89735 - DNA, 15 bp, Homo sapiens
agacggtgctccttc

SEQ ID NO: 89736 - DNA, 15 bp, Homo sapiens
aagacggtgctcctt

SEQ ID NO: 89737 - DNA, 15 bp, Homo sapiens
taagacggtgctcct

SEQ ID NO: 89738 - DNA, 15 bp, Homo sapiens
gtaagacggtgctcc

SEQ ID NO: 89739 - DNA, 15 bp, Homo sapiens
agtaagacggtgctc

SEQ ID NO: 89740 - DNA, 15 bp, Homo sapiens
cagtaagacggtgct

SEQ ID NO: 89741 - DNA, 15 bp, Homo sapiens
ccagtaagacggtgc

SEQ ID NO: 89742 - DNA, 15 bp, Homo sapiens
gccagtaagacggtg

SEQ ID NO: 89743 - DNA, 15 bp, Homo sapiens
tgccagtaagacggt

SEQ ID NO: 89744 - DNA, 15 bp, Homo sapiens
ttgccagtaagacgg

SEQ ID NO: 89745 - DNA, 15 bp, Homo sapiens
gttgccagtaagacg

SEQ ID NO: 89746 - DNA, 15 bp, Homo sapiens
agttgccagtaagac

SEQ ID NO: 89747 - DNA, 15 bp, Homo sapiens
aagttgccagtaaga

SEQ ID NO: 89748 - DNA, 15 bp, Homo sapiens
taagttgccagtaag

SEQ ID NO: 89749 - DNA, 15 bp, Homo sapiens
ctaagttgccagtaa

SEQ ID NO: 89750 - DNA, 15 bp, Homo sapiens
actaagttgccagta

SEQ ID NO: 89751 - DNA, 15 bp, Homo sapiens
cactaagttgccagt

SEQ ID NO: 89752 - DNA, 15 bp, Homo sapiens
ccactaagttgccag

SEQ ID NO: 89753 - DNA, 15 bp, Homo sapiens
accactaagttgcca

SEQ ID NO: 89754 - DNA, 15 bp, Homo sapiens
taccactaagttgcc

SEQ ID NO: 89755 - DNA, 15 bp, Homo sapiens
ttaccactaagttgc

SEQ ID NO: 89756 - DNA, 15 bp, Homo sapiens
tttaccactaagttg

SEQ ID NO: 89757 - DNA, 15 bp, Homo sapiens
gtttaccactaagtt

SEQ ID NO: 89758 - DNA, 15 bp, Homo sapiens
ggtttaccactaagt

SEQ ID NO: 89759 - DNA, 15 bp, Homo sapiens
tggtttaccactaag

SEQ ID NO: 89760 - DNA, 15 bp, Homo sapiens
ttggtttaccactaa

SEQ ID NO: 89761 - DNA, 15 bp, Homo sapiens
tttggtttaccacta

SEQ ID NO: 89762 - DNA, 15 bp, Homo sapiens
ttttggtttaccact

SEQ ID NO: 89763 - DNA, 15 bp, Homo sapiens
gttttggtttaccac

SEQ ID NO: 89764 - DNA, 15 bp, Homo sapiens
ggttttggtttacca

SEQ ID NO: 89765 - DNA, 15 bp, Homo sapiens
aggttttggtttacc

SEQ ID NO: 89766 - DNA, 15 bp, Homo sapiens
gaggttttggtttac

SEQ ID NO: 89767 - DNA, 15 bp, Homo sapiens
ggaggttttggttta

SEQ ID NO: 89768 - DNA, 15 bp, Homo sapiens
tggaggttttggttt

SEQ ID NO: 89769 - DNA, 15 bp, Homo sapiens
atggaggttttggtt

SEQ ID NO: 89770 - DNA, 15 bp, Homo sapiens
aatggaggttttggt

SEQ ID NO: 89771 - DNA, 15 bp, Homo sapiens
aaatggaggttttgg

SEQ ID NO: 89772 - DNA, 15 bp, Homo sapiens
gaaatggaggttttg

SEQ ID NO: 89773 - DNA, 15 bp, Homo sapiens
tgaaatggaggtttt

SEQ ID NO: 89774 - DNA, 15 bp, Homo sapiens
gtgaaatggaggttt

SEQ ID NO: 89775 - DNA, 15 bp, Homo sapiens
tgtgaaatggaggtt

SEQ ID NO: 89776 - DNA, 15 bp, Homo sapiens
gtgtgaaatggaggt

SEQ ID NO: 89777 - DNA, 15 bp, Homo sapiens
tgtgtgaaatggagg

SEQ ID NO: 89778 - DNA, 15 bp, Homo sapiens
ttgtgtgaaatggag

SEQ ID NO: 89779 - DNA, 15 bp, Homo sapiens
tttgtgtgaaatgga

SEQ ID NO: 89780 - DNA, 15 bp, Homo sapiens
atttgtgtgaaatgg

SEQ ID NO: 89781 - DNA, 15 bp, Homo sapiens
catttgtgtgaaatg

SEQ ID NO: 89782 - DNA, 15 bp, Homo sapiens
tcatttgtgtgaaat

SEQ ID NO: 89783 - DNA, 15 bp, Homo sapiens
atcatttgtgtgaaa

SEQ ID NO: 89784 - DNA, 15 bp, Homo sapiens
aatcatttgtgtgaa

SEQ ID NO: 89785 - DNA, 15 bp, Homo sapiens
caatcatttgtgtga

SEQ ID NO: 89786 - DNA, 15 bp, Homo sapiens
acaatcatttgtgtg

SEQ ID NO: 89787 - DNA, 15 bp, Homo sapiens
cacaatcatttgtgt

SEQ ID NO: 89788 - DNA, 15 bp, Homo sapiens
tcacaatcatttgtg

SEQ ID NO: 89789 - DNA, 15 bp, Homo sapiens
ttcacaatcatttgt

SEQ ID NO: 89790 - DNA, 15 bp, Homo sapiens
tttcacaatcatttg

SEQ ID NO: 89791 - DNA, 15 bp, Homo sapiens
atttcacaatcattt

SEQ ID NO: 89792 - DNA, 15 bp, Homo sapiens
aatttcacaatcatt

SEQ ID NO: 89793 - DNA, 15 bp, Homo sapiens
gaatttcacaatcat

SEQ ID NO: 89794 - DNA, 15 bp, Homo sapiens
cgaatttcacaatca

SEQ ID NO: 89795 - DNA, 15 bp, Homo sapiens
ccgaatttcacaatc

SEQ ID NO: 89796 - DNA, 15 bp, Homo sapiens
cccgaatttcacaat

SEQ ID NO: 89797 - DNA, 15 bp, Homo sapiens
acccgaatttcacaa

SEQ ID NO: 89798 - DNA, 15 bp, Homo sapiens
gacccgaatttcaca

SEQ ID NO: 89799 - DNA, 15 bp, Homo sapiens
agacccgaatttcac

SEQ ID NO: 89800 - DNA, 15 bp, Homo sapiens
gagacccgaatttca

SEQ ID NO: 89801 - DNA, 15 bp, Homo sapiens
ggagacccgaatttc

SEQ ID NO: 89802 - DNA, 15 bp, Homo sapiens
aggagacccgaattt

SEQ ID NO: 89803 - DNA, 15 bp, Homo sapiens
aaggagacccgaatt

SEQ ID NO: 89804 - DNA, 15 bp, Homo sapiens
gaaggagacccgaat

SEQ ID NO: 89805 - DNA, 15 bp, Homo sapiens
tgaaggagacccgaa

SEQ ID NO: 89806 - DNA, 15 bp, Homo sapiens
atgaaggagacccga

SEQ ID NO: 89807 - DNA, 15 bp, Homo sapiens
aatgaaggagacccg

SEQ ID NO: 89808 - DNA, 15 bp, Homo sapiens
gaatgaaggagaccc

SEQ ID NO: 89809 - DNA, 15 bp, Homo sapiens
agaatgaaggagacc

SEQ ID NO: 89810 - DNA, 15 bp, Homo sapiens
tagaatgaaggagac

SEQ ID NO: 89811 - DNA, 15 bp, Homo sapiens
atagaatgaaggaga

SEQ ID NO: 89812 - DNA, 15 bp, Homo sapiens
tatagaatgaaggag

SEQ ID NO: 89813 - DNA, 15 bp, Homo sapiens
gtatagaatgaagga

SEQ ID NO: 89814 - DNA, 15 bp, Homo sapiens
tgtatagaatgaagg

SEQ ID NO: 89815 - DNA, 15 bp, Homo sapiens
ttgtatagaatgaag

SEQ ID NO: 89816 - DNA, 15 bp, Homo sapiens
tttgtatagaatgaa

SEQ ID NO: 89817 - DNA, 15 bp, Homo sapiens
atttgtatagaatga

SEQ ID NO: 89818 - DNA, 15 bp, Homo sapiens
aatttgtatagaatg

SEQ ID NO: 89819 - DNA, 15 bp, Homo sapiens
gaatttgtatagaat

SEQ ID NO: 89820 - DNA, 15 bp, Homo sapiens
tgaatttgtatagaa

SEQ ID NO: 89821 - DNA, 15 bp, Homo sapiens
atgaatttgtataga

SEQ ID NO: 89822 - DNA, 15 bp, Homo sapiens
aatgaatttgtatag

SEQ ID NO: 89823 - DNA, 15 bp, Homo sapiens
aaatgaatttgtata

SEQ ID NO: 89824 - DNA, 15 bp, Homo sapiens
caaatgaatttgtat

SEQ ID NO: 89825 - DNA, 15 bp, Homo sapiens
tcaaatgaatttgta

SEQ ID NO: 89826 - DNA, 15 bp, Homo sapiens
atcaaatgaatttgt

SEQ ID NO: 89827 - DNA, 15 bp, Homo sapiens
aatcaaatgaatttg

SEQ ID NO: 89828 - DNA, 15 bp, Homo sapiens
aaatcaaatgaattt

SEQ ID NO: 89829 - DNA, 15 bp, Homo sapiens
aaaatcaaatgaatt

SEQ ID NO: 89830 - DNA, 15 bp, Homo sapiens
aaaaatcaaatgaat

SEQ ID NO: 89831 - DNA, 15 bp, Homo sapiens
aaaaaatcaaatgaa

SEQ ID NO: 89832 - DNA, 15 bp, Homo sapiens
aaaaaaatcaaatga

SEQ ID NO: 89833 - DNA, 15 bp, Homo sapiens
caaaaaaatcaaatg

SEQ ID NO: 89834 - DNA, 15 bp, Homo sapiens
tcaaaaaaatcaaat

SEQ ID NO: 89835 - DNA, 15 bp, Homo sapiens
ttcaaaaaaatcaaa

SEQ ID NO: 89836 - DNA, 15 bp, Homo sapiens
tttcaaaaaaatcaa

SEQ ID NO: 89837 - DNA, 15 bp, Homo sapiens
gtttcaaaaaaatca

SEQ ID NO: 89838 - DNA, 15 bp, Homo sapiens
agtttcaaaaaaatc

SEQ ID NO: 89839 - DNA, 15 bp, Homo sapiens
tagtttcaaaaaaat

SEQ ID NO: 89840 - DNA, 15 bp, Homo sapiens
ttagtttcaaaaaaa

SEQ ID NO: 89841 - DNA, 15 bp, Homo sapiens
tttagtttcaaaaaa

SEQ ID NO: 89842 - DNA, 15 bp, Homo sapiens
gtttagtttcaaaaa

SEQ ID NO: 89843 - DNA, 15 bp, Homo sapiens
agtttagtttcaaaa

SEQ ID NO: 89844 - DNA, 15 bp, Homo sapiens
aagtttagtttcaaa

SEQ ID NO: 89845 - DNA, 15 bp, Homo sapiens
aaagtttagtttcaa

SEQ ID NO: 89846 - DNA, 15 bp, Homo sapiens
taaagtttagtttca

SEQ ID NO: 89847 - DNA, 15 bp, Homo sapiens
ataaagtttagtttc

SEQ ID NO: 89848 - DNA, 15 bp, Homo sapiens
tataaagtttagttt

SEQ ID NO: 89849 - DNA, 15 bp, Homo sapiens
atataaagtttagtt

SEQ ID NO: 89850 - DNA, 15 bp, Homo sapiens
aatataaagtttagt

SEQ ID NO: 89851 - DNA, 15 bp, Homo sapiens
aaatataaagtttag

SEQ ID NO: 89852 - DNA, 15 bp, Homo sapiens
taaatataaagttta

SEQ ID NO: 89853 - DNA, 15 bp, Homo sapiens
ataaatataaagttt

SEQ ID NO: 89854 - DNA, 15 bp, Homo sapiens
gataaatataaagtt

SEQ ID NO: 89855 - DNA, 15 bp, Homo sapiens
ggataaatataaagt

SEQ ID NO: 89856 - DNA, 15 bp, Homo sapiens
tggataaatataaag

SEQ ID NO: 89857 - DNA, 15 bp, Homo sapiens
atggataaatataaa

SEQ ID NO: 89858 - DNA, 15 bp, Homo sapiens
tatggataaatataa

SEQ ID NO: 89859 - DNA, 15 bp, Homo sapiens
atatggataaatata

SEQ ID NO: 89860 - DNA, 15 bp, Homo sapiens
aatatggataaatat

SEQ ID NO: 89861 - DNA, 15 bp, Homo sapiens
taatatggataaata

SEQ ID NO: 89862 - DNA, 15 bp, Homo sapiens
ttaatatggataaat

SEQ ID NO: 89863 - DNA, 15 bp, Homo sapiens
tttaatatggataaa

SEQ ID NO: 89864 - DNA, 15 bp, Homo sapiens
atttaatatggataa

SEQ ID NO: 89865 - DNA, 15 bp, Homo sapiens
aatttaatatggata

SEQ ID NO: 89866 - DNA, 15 bp, Homo sapiens
taatttaatatggat

SEQ ID NO: 89867 - DNA, 15 bp, Homo sapiens
gtaatttaatatgga

SEQ ID NO: 89868 - DNA, 15 bp, Homo sapiens
tgtaatttaatatgg

SEQ ID NO: 89869 - DNA, 15 bp, Homo sapiens
atgtaatttaatatg

SEQ ID NO: 89870 - DNA, 15 bp, Homo sapiens
catgtaatttaatat

SEQ ID NO: 89871 - DNA, 15 bp, Homo sapiens
ccatgtaatttaata

SEQ ID NO: 89872 - DNA, 15 bp, Homo sapiens
cccatgtaatttaat

SEQ ID NO: 89873 - DNA, 15 bp, Homo sapiens
acccatgtaatttaa

SEQ ID NO: 89874 - DNA, 15 bp, Homo sapiens
aacccatgtaattta

SEQ ID NO: 89875 - DNA, 15 bp, Homo sapiens
aaacccatgtaattt

SEQ ID NO: 89876 - DNA, 15 bp, Homo sapiens
aaaacccatgtaatt

SEQ ID NO: 89877 - DNA, 15 bp, Homo sapiens
taaaacccatgtaat

SEQ ID NO: 89878 - DNA, 15 bp, Homo sapiens
ataaaacccatgtaa

SEQ ID NO: 89879 - DNA, 15 bp, Homo sapiens
aataaaacccatgta

SEQ ID NO: 89880 - DNA, 15 bp, Homo sapiens
aaataaaacccatgt

SEQ ID NO: 89881 - DNA, 15 bp, Homo sapiens
aaaataaaacccatg

SEQ ID NO: 89882 - DNA, 15 bp, Homo sapiens
aaaaataaaacccat

SEQ ID NO: 89883 - DNA, 15 bp, Homo sapiens
caaaaataaaaccca

SEQ ID NO: 89884 - DNA, 15 bp, Homo sapiens
acaaaaataaaaccc

SEQ ID NO: 89885 - DNA, 15 bp, Homo sapiens
aacaaaaataaaacc

SEQ ID NO: 89886 - DNA, 15 bp, Homo sapiens
aaacaaaaataaaac

SEQ ID NO: 89887 - DNA, 15 bp, Homo sapiens
aaaacaaaaataaaa

SEQ ID NO: 89888 - DNA, 15 bp, Homo sapiens
taaaacaaaaataaa

SEQ ID NO: 89889 - DNA, 15 bp, Homo sapiens
ataaaacaaaaataa

SEQ ID NO: 89890 - DNA, 15 bp, Homo sapiens
gataaaacaaaaata

SEQ ID NO: 89891 - DNA, 15 bp, Homo sapiens
agataaaacaaaaat

SEQ ID NO: 89892 - DNA, 15 bp, Homo sapiens
aagataaaacaaaaa

SEQ ID NO: 89893 - DNA, 15 bp, Homo sapiens
caagataaaacaaaa

SEQ ID NO: 89894 - DNA, 15 bp, Homo sapiens
tcaagataaaacaaa

SEQ ID NO: 89895 - DNA, 15 bp, Homo sapiens
atcaagataaaacaa

SEQ ID NO: 89896 - DNA, 15 bp, Homo sapiens
aatcaagataaaaca

SEQ ID NO: 89897 - DNA, 15 bp, Homo sapiens
gaatcaagataaaac

SEQ ID NO: 89898 - DNA, 15 bp, Homo sapiens
tgaatcaagataaaa

SEQ ID NO: 89899 - DNA, 15 bp, Homo sapiens
ctgaatcaagataaa

SEQ ID NO: 89900 - DNA, 15 bp, Homo sapiens
actgaatcaagataa

SEQ ID NO: 89901 - DNA, 15 bp, Homo sapiens
tactgaatcaagata

SEQ ID NO: 89902 - DNA, 15 bp, Homo sapiens
ttactgaatcaagat

SEQ ID NO: 89903 - DNA, 15 bp, Homo sapiens
attactgaatcaaga

SEQ ID NO: 89904 - DNA, 15 bp, Homo sapiens
aattactgaatcaag

SEQ ID NO: 89905 - DNA, 15 bp, Homo sapiens
taattactgaatcaa

SEQ ID NO: 89906 - DNA, 15 bp, Homo sapiens
gtaattactgaatca

SEQ ID NO: 89907 - DNA, 15 bp, Homo sapiens
agtaattactgaatc

SEQ ID NO: 89908 - DNA, 15 bp, Homo sapiens
gagtaattactgaat

SEQ ID NO: 89909 - DNA, 15 bp, Homo sapiens
ggagtaattactgaa

SEQ ID NO: 89910 - DNA, 15 bp, Homo sapiens
aggagtaattactga

SEQ ID NO: 89911 - DNA, 15 bp, Homo sapiens
aaggagtaattactg

SEQ ID NO: 89912 - DNA, 15 bp, Homo sapiens
aaaggagtaattact

SEQ ID NO: 89913 - DNA, 15 bp, Homo sapiens
gaaaggagtaattac

SEQ ID NO: 89914 - DNA, 15 bp, Homo sapiens
tgaaaggagtaatta

SEQ ID NO: 89915 - DNA, 15 bp, Homo sapiens
ctgaaaggagtaatt

SEQ ID NO: 89916 - DNA, 15 bp, Homo sapiens
actgaaaggagtaat

SEQ ID NO: 89917 - DNA, 15 bp, Homo sapiens
tactgaaaggagtaa

SEQ ID NO: 89918 - DNA, 15 bp, Homo sapiens
ttactgaaaggagta

SEQ ID NO: 89919 - DNA, 15 bp, Homo sapiens
tttactgaaaggagt

SEQ ID NO: 89920 - DNA, 15 bp, Homo sapiens
gtttactgaaaggag

SEQ ID NO: 89921 - DNA, 15 bp, Homo sapiens
tgtttactgaaagga

SEQ ID NO: 89922 - DNA, 15 bp, Homo sapiens
gtgtttactgaaagg

SEQ ID NO: 89923 - DNA, 15 bp, Homo sapiens
tgtgtttactgaaag

SEQ ID NO: 89924 - DNA, 15 bp, Homo sapiens
ctgtgtttactgaaa

SEQ ID NO: 89925 - DNA, 15 bp, Homo sapiens
tctgtgtttactgaa

SEQ ID NO: 89926 - DNA, 15 bp, Homo sapiens
gtctgtgtttactga

SEQ ID NO: 89927 - DNA, 15 bp, Homo sapiens
agtctgtgtttactg

SEQ ID NO: 89928 - DNA, 15 bp, Homo sapiens
cagtctgtgtttact

SEQ ID NO: 89929 - DNA, 15 bp, Homo sapiens
tcagtctgtgtttac

SEQ ID NO: 89930 - DNA, 15 bp, Homo sapiens
ctcagtctgtgttta

SEQ ID NO: 89931 - DNA, 15 bp, Homo sapiens
actcagtctgtgttt

SEQ ID NO: 89932 - DNA, 15 bp, Homo sapiens
cactcagtctgtgtt

SEQ ID NO: 89933 - DNA, 15 bp, Homo sapiens
gcactcagtctgtgt

SEQ ID NO: 89934 - DNA, 15 bp, Homo sapiens
agcactcagtctgtg

SEQ ID NO: 89935 - DNA, 15 bp, Homo sapiens
cagcactcagtctgt

SEQ ID NO: 89936 - DNA, 15 bp, Homo sapiens
acagcactcagtctg

SEQ ID NO: 89937 - DNA, 15 bp, Homo sapiens
cacagcactcagtct

SEQ ID NO: 89938 - DNA, 15 bp, Homo sapiens
acacagcactcagtc

SEQ ID NO: 89939 - DNA, 15 bp, Homo sapiens
cacacagcactcagt

SEQ ID NO: 89940 - DNA, 15 bp, Homo sapiens
acacacagcactcag

SEQ ID NO: 89941 - DNA, 15 bp, Homo sapiens
gacacacagcactca

SEQ ID NO: 89942 - DNA, 15 bp, Homo sapiens
agacacacagcactc

SEQ ID NO: 89943 - DNA, 15 bp, Homo sapiens
cagacacacagcact

SEQ ID NO: 89944 - DNA, 15 bp, Homo sapiens
tcagacacacagcac

SEQ ID NO: 89945 - DNA, 15 bp, Homo sapiens
gtcagacacacagca

SEQ ID NO: 89946 - DNA, 15 bp, Homo sapiens
agtcagacacacagc

SEQ ID NO: 89947 - DNA, 15 bp, Homo sapiens
aagtcagacacacag

SEQ ID NO: 89948 - DNA, 15 bp, Homo sapiens
taagtcagacacaca

SEQ ID NO: 89949 - DNA, 15 bp, Homo sapiens
ataagtcagacacac

SEQ ID NO: 89950 - DNA, 15 bp, Homo sapiens
cataagtcagacaca

SEQ ID NO: 89951 - DNA, 15 bp, Homo sapiens
gcataagtcagacac

SEQ ID NO: 89952 - DNA, 15 bp, Homo sapiens
ggcataagtcagaca

SEQ ID NO: 89953 - DNA, 15 bp, Homo sapiens
tggcataagtcagac

SEQ ID NO: 89954 - DNA, 15 bp, Homo sapiens
ctggcataagtcaga

SEQ ID NO: 89955 - DNA, 15 bp, Homo sapiens
cctggcataagtcag

SEQ ID NO: 89956 - DNA, 15 bp, Homo sapiens
gcctggcataagtca

SEQ ID NO: 89957 - DNA, 15 bp, Homo sapiens
tgcctggcataagtc

SEQ ID NO: 89958 - DNA, 15 bp, Homo sapiens
atgcctggcataagt

SEQ ID NO: 89959 - DNA, 15 bp, Homo sapiens
tatgcctggcataag

SEQ ID NO: 89960 - DNA, 15 bp, Homo sapiens
ctatgcctggcataa

SEQ ID NO: 89961 - DNA, 15 bp, Homo sapiens
cctatgcctggcata

SEQ ID NO: 89962 - DNA, 15 bp, Homo sapiens
acctatgcctggcat

SEQ ID NO: 89963 - DNA, 15 bp, Homo sapiens
cacctatgcctggca

SEQ ID NO: 89964 - DNA, 15 bp, Homo sapiens
tcacctatgcctggc

SEQ ID NO: 89965 - DNA, 15 bp, Homo sapiens
atcacctatgcctgg

SEQ ID NO: 89966 - DNA, 15 bp, Homo sapiens
aatcacctatgcctg

SEQ ID NO: 89967 - DNA, 15 bp, Homo sapiens
gaatcacctatgcct

SEQ ID NO: 89968 - DNA, 15 bp, Homo sapiens
tgaatcacctatgcc

SEQ ID NO: 89969 - DNA, 15 bp, Homo sapiens
ctgaatcacctatgc

SEQ ID NO: 89970 - DNA, 15 bp, Homo sapiens
tctgaatcacctatg

SEQ ID NO: 89971 - DNA, 15 bp, Homo sapiens
ctctgaatcacctat

SEQ ID NO: 89972 - DNA, 15 bp, Homo sapiens
tctctgaatcaccta

SEQ ID NO: 89973 - DNA, 15 bp, Homo sapiens
atctctgaatcacct

SEQ ID NO: 89974 - DNA, 15 bp, Homo sapiens
catctctgaatcacc

SEQ ID NO: 89975 - DNA, 15 bp, Homo sapiens
tcatctctgaatcac

SEQ ID NO: 89976 - DNA, 15 bp, Homo sapiens
ttcatctctgaatca

SEQ ID NO: 89977 - DNA, 15 bp, Homo sapiens
tttcatctctgaatc

SEQ ID NO: 89978 - DNA, 15 bp, Homo sapiens
ctttcatctctgaat

SEQ ID NO: 89979 - DNA, 15 bp, Homo sapiens
cctttcatctctgaa

SEQ ID NO: 89980 - DNA, 15 bp, Homo sapiens
acctttcatctctga

SEQ ID NO: 89981 - DNA, 15 bp, Homo sapiens
gacctttcatctctg

SEQ ID NO: 89982 - DNA, 15 bp, Homo sapiens
tgacctttcatctct

SEQ ID NO: 89983 - DNA, 15 bp, Homo sapiens
ttgacctttcatctc

SEQ ID NO: 89984 - DNA, 15 bp, Homo sapiens
cttgacctttcatct

SEQ ID NO: 89985 - DNA, 15 bp, Homo sapiens
acttgacctttcatc

SEQ ID NO: 89986 - DNA, 15 bp, Homo sapiens
gacttgacctttcat

SEQ ID NO: 89987 - DNA, 15 bp, Homo sapiens
ggacttgacctttca

SEQ ID NO: 89988 - DNA, 15 bp, Homo sapiens
gggacttgacctttc

SEQ ID NO: 89989 - DNA, 15 bp, Homo sapiens
agggacttgaccttt

SEQ ID NO: 89990 - DNA, 15 bp, Homo sapiens
cagggacttgacctt

SEQ ID NO: 89991 - DNA, 15 bp, Homo sapiens
tcagggacttgacct

SEQ ID NO: 89992 - DNA, 15 bp, Homo sapiens
ttcagggacttgacc

SEQ ID NO: 89993 - DNA, 15 bp, Homo sapiens
gttcagggacttgac

SEQ ID NO: 89994 - DNA, 15 bp, Homo sapiens
ggttcagggacttga

SEQ ID NO: 89995 - DNA, 15 bp, Homo sapiens
gggttcagggacttg

SEQ ID NO: 89996 - DNA, 15 bp, Homo sapiens
tgggttcagggactt

SEQ ID NO: 89997 - DNA, 15 bp, Homo sapiens
atgggttcagggact

SEQ ID NO: 89998 - DNA, 15 bp, Homo sapiens
gatgggttcagggac

SEQ ID NO: 89999 - DNA, 15 bp, Homo sapiens
agatgggttcaggga

SEQ ID NO: 90000 - DNA, 15 bp, Homo sapiens
gagatgggttcaggg

SEQ ID NO: 90001 - DNA, 15 bp, Homo sapiens
agagatgggttcagg

SEQ ID NO: 90002 - DNA, 15 bp, Homo sapiens
aagagatgggttcag

SEQ ID NO: 90003 - DNA, 15 bp, Homo sapiens
caagagatgggttca

SEQ ID NO: 90004 - DNA, 15 bp, Homo sapiens
acaagagatgggttc

SEQ ID NO: 90005 - DNA, 15 bp, Homo sapiens
gacaagagatgggtt

SEQ ID NO: 90006 - DNA, 15 bp, Homo sapiens
agacaagagatgggt

SEQ ID NO: 90007 - DNA, 15 bp, Homo sapiens
aagacaagagatggg

SEQ ID NO: 90008 - DNA, 15 bp, Homo sapiens
gaagacaagagatgg

SEQ ID NO: 90009 - DNA, 15 bp, Homo sapiens
ggaagacaagagatg

SEQ ID NO: 90010 - DNA, 15 bp, Homo sapiens
aggaagacaagagat

SEQ ID NO: 90011 - DNA, 15 bp, Homo sapiens
caggaagacaagaga

SEQ ID NO: 90012 - DNA, 15 bp, Homo sapiens
ccaggaagacaagag

SEQ ID NO: 90013 - DNA, 15 bp, Homo sapiens
cccaggaagacaaga

SEQ ID NO: 90014 - DNA, 15 bp, Homo sapiens
acccaggaagacaag

SEQ ID NO: 90015 - DNA, 15 bp, Homo sapiens
tacccaggaagacaa

SEQ ID NO: 90016 - DNA, 15 bp, Homo sapiens
atacccaggaagaca

SEQ ID NO: 90017 - DNA, 15 bp, Homo sapiens
aatacccaggaagac

SEQ ID NO: 90018 - DNA, 15 bp, Homo sapiens
taatacccaggaaga

SEQ ID NO: 90019 - DNA, 15 bp, Homo sapiens
ataatacccaggaag

SEQ ID NO: 90020 - DNA, 15 bp, Homo sapiens
gataatacccaggaa

SEQ ID NO: 90021 - DNA, 15 bp, Homo sapiens
agataatacccagga

SEQ ID NO: 90022 - DNA, 15 bp, Homo sapiens
cagataatacccagg

SEQ ID NO: 90023 - DNA, 15 bp, Homo sapiens
acagataatacccag

SEQ ID NO: 90024 - DNA, 15 bp, Homo sapiens
gacagataataccca

SEQ ID NO: 90025 - DNA, 15 bp, Homo sapiens
ggacagataataccc

SEQ ID NO: 90026 - DNA, 15 bp, Homo sapiens
gggacagataatacc

SEQ ID NO: 90027 - DNA, 15 bp, Homo sapiens
agggacagataatac

SEQ ID NO: 90028 - DNA, 15 bp, Homo sapiens
gagggacagataata

SEQ ID NO: 90029 - DNA, 15 bp, Homo sapiens
ggagggacagataat

SEQ ID NO: 90030 - DNA, 15 bp, Homo sapiens
gggagggacagataa

SEQ ID NO: 90031 - DNA, 15 bp, Homo sapiens
agggagggacagata

SEQ ID NO: 90032 - DNA, 15 bp, Homo sapiens
cagggagggacagat

SEQ ID NO: 90033 - DNA, 15 bp, Homo sapiens
gcagggagggacaga

SEQ ID NO: 90034 - DNA, 15 bp, Homo sapiens
agcagggagggacag

SEQ ID NO: 90035 - DNA, 15 bp, Homo sapiens
aagcagggagggaca

SEQ ID NO: 90036 - DNA, 15 bp, Homo sapiens
aaagcagggagggac

SEQ ID NO: 90037 - DNA, 15 bp, Homo sapiens
taaagcagggaggga

SEQ ID NO: 90038 - DNA, 15 bp, Homo sapiens
ctaaagcagggaggg

SEQ ID NO: 90039 - DNA, 15 bp, Homo sapiens
tctaaagcagggagg

SEQ ID NO: 90040 - DNA, 15 bp, Homo sapiens
ctctaaagcagggag

SEQ ID NO: 90041 - DNA, 15 bp, Homo sapiens
gctctaaagcaggga

SEQ ID NO: 90042 - DNA, 15 bp, Homo sapiens
agctctaaagcaggg

SEQ ID NO: 90043 - DNA, 15 bp, Homo sapiens
gagctctaaagcagg

SEQ ID NO: 90044 - DNA, 15 bp, Homo sapiens
ggagctctaaagcag

SEQ ID NO: 90045 - DNA, 15 bp, Homo sapiens
aggagctctaaagca

SEQ ID NO: 90046 - DNA, 15 bp, Homo sapiens
caggagctctaaagc

SEQ ID NO: 90047 - DNA, 15 bp, Homo sapiens
tcaggagctctaaag

SEQ ID NO: 90048 - DNA, 15 bp, Homo sapiens
ttcaggagctctaaa

SEQ ID NO: 90049 - DNA, 15 bp, Homo sapiens
tttcaggagctctaa

SEQ ID NO: 90050 - DNA, 15 bp, Homo sapiens
atttcaggagctcta

SEQ ID NO: 90051 - DNA, 15 bp, Homo sapiens
aatttcaggagctct

SEQ ID NO: 90052 - DNA, 15 bp, Homo sapiens
aaatttcaggagctc

SEQ ID NO: 90053 - DNA, 15 bp, Homo sapiens
caaatttcaggagct

SEQ ID NO: 90054 - DNA, 15 bp, Homo sapiens
gcaaatttcaggagc

SEQ ID NO: 90055 - DNA, 15 bp, Homo sapiens
agcaaatttcaggag

SEQ ID NO: 90056 - DNA, 15 bp, Homo sapiens
tagcaaatttcagga

SEQ ID NO: 90057 - DNA, 15 bp, Homo sapiens
ctagcaaatttcagg

SEQ ID NO: 90058 - DNA, 15 bp, Homo sapiens
tctagcaaatttcag

SEQ ID NO: 90059 - DNA, 15 bp, Homo sapiens
ttctagcaaatttca

SEQ ID NO: 90060 - DNA, 15 bp, Homo sapiens
cttctagcaaatttc

SEQ ID NO: 90061 - DNA, 15 bp, Homo sapiens
gcttctagcaaattt

SEQ ID NO: 90062 - DNA, 15 bp, Homo sapiens
tgcttctagcaaatt

SEQ ID NO: 90063 - DNA, 15 bp, Homo sapiens
atgcttctagcaaat

SEQ ID NO: 90064 - DNA, 15 bp, Homo sapiens
catgcttctagcaaa

SEQ ID NO: 90065 - DNA, 15 bp, Homo sapiens
acatgcttctagcaa

SEQ ID NO: 90066 - DNA, 15 bp, Homo sapiens
gacatgcttctagca

SEQ ID NO: 90067 - DNA, 15 bp, Homo sapiens
agacatgcttctagc

SEQ ID NO: 90068 - DNA, 15 bp, Homo sapiens
aagacatgcttctag

SEQ ID NO: 90069 - DNA, 15 bp, Homo sapiens
gaagacatgcttcta

SEQ ID NO: 90070 - DNA, 15 bp, Homo sapiens
tgaagacatgcttct

SEQ ID NO: 90071 - DNA, 15 bp, Homo sapiens
atgaagacatgcttc

SEQ ID NO: 90072 - DNA, 15 bp, Homo sapiens
gatgaagacatgctt

SEQ ID NO: 90073 - DNA, 15 bp, Homo sapiens
agatgaagacatgct

SEQ ID NO: 90074 - DNA, 15 bp, Homo sapiens
tagatgaagacatgc

SEQ ID NO: 90075 - DNA, 15 bp, Homo sapiens
ttagatgaagacatg

SEQ ID NO: 90076 - DNA, 15 bp, Homo sapiens
cttagatgaagacat

SEQ ID NO: 90077 - DNA, 15 bp, Homo sapiens
acttagatgaagaca

SEQ ID NO: 90078 - DNA, 15 bp, Homo sapiens
aacttagatgaagac

SEQ ID NO: 90079 - DNA, 15 bp, Homo sapiens
caacttagatgaaga

SEQ ID NO: 90080 - DNA, 15 bp, Homo sapiens
acaacttagatgaag

SEQ ID NO: 90081 - DNA, 15 bp, Homo sapiens
aacaacttagatgaa

SEQ ID NO: 90082 - DNA, 15 bp, Homo sapiens
caacaacttagatga

SEQ ID NO: 90083 - DNA, 15 bp, Homo sapiens
tcaacaacttagatg

SEQ ID NO: 90084 - DNA, 15 bp, Homo sapiens
atcaacaacttagat

SEQ ID NO: 90085 - DNA, 15 bp, Homo sapiens
tatcaacaacttaga

SEQ ID NO: 90086 - DNA, 15 bp, Homo sapiens
ttatcaacaacttag

SEQ ID NO: 90087 - DNA, 15 bp, Homo sapiens
tttatcaacaactta

SEQ ID NO: 90088 - DNA, 15 bp, Homo sapiens
gtttatcaacaactt

SEQ ID NO: 90089 - DNA, 15 bp, Homo sapiens
tgtttatcaacaact

SEQ ID NO: 90090 - DNA, 15 bp, Homo sapiens
gtgtttatcaacaac

SEQ ID NO: 90091 - DNA, 15 bp, Homo sapiens
tgtgtttatcaacaa

SEQ ID NO: 90092 - DNA, 15 bp, Homo sapiens
atgtgtttatcaaca

SEQ ID NO: 90093 - DNA, 15 bp, Homo sapiens
gatgtgtttatcaac

SEQ ID NO: 90094 - DNA, 15 bp, Homo sapiens
tgatgtgtttatcaa

SEQ ID NO: 90095 - DNA, 15 bp, Homo sapiens
ttgatgtgtttatca

SEQ ID NO: 90096 - DNA, 15 bp, Homo sapiens
cttgatgtgtttatc

SEQ ID NO: 90097 - DNA, 15 bp, Homo sapiens
acttgatgtgtttat

SEQ ID NO: 90098 - DNA, 15 bp, Homo sapiens
tacttgatgtgttta

SEQ ID NO: 90099 - DNA, 15 bp, Homo sapiens
ctacttgatgtgttt

SEQ ID NO: 90100 - DNA, 15 bp, Homo sapiens
cctacttgatgtgtt

SEQ ID NO: 90101 - DNA, 15 bp, Homo sapiens
tcctacttgatgtgt

SEQ ID NO: 90102 - DNA, 15 bp, Homo sapiens
atcctacttgatgtg

SEQ ID NO: 90103 - DNA, 15 bp, Homo sapiens
aatcctacttgatgt

SEQ ID NO: 90104 - DNA, 15 bp, Homo sapiens
caatcctacttgatg

SEQ ID NO: 90105 - DNA, 15 bp, Homo sapiens
ccaatcctacttgat

SEQ ID NO: 90106 - DNA, 15 bp, Homo sapiens
tccaatcctacttga

SEQ ID NO: 90107 - DNA, 15 bp, Homo sapiens
gtccaatcctacttg

SEQ ID NO: 90108 - DNA, 15 bp, Homo sapiens
agtccaatcctactt

SEQ ID NO: 90109 - DNA, 15 bp, Homo sapiens
cagtccaatcctact

SEQ ID NO: 90110 - DNA, 15 bp, Homo sapiens
tcagtccaatcctac

SEQ ID NO: 90111 - DNA, 15 bp, Homo sapiens
ctcagtccaatccta

SEQ ID NO: 90112 - DNA, 15 bp, Homo sapiens
cctcagtccaatcct

SEQ ID NO: 90113 - DNA, 15 bp, Homo sapiens
gcctcagtccaatcc

SEQ ID NO: 90114 - DNA, 15 bp, Homo sapiens
tgcctcagtccaatc

SEQ ID NO: 90115 - DNA, 15 bp, Homo sapiens
ctgcctcagtccaat

SEQ ID NO: 90116 - DNA, 15 bp, Homo sapiens
tctgcctcagtccaa

SEQ ID NO: 90117 - DNA, 15 bp, Homo sapiens
ctctgcctcagtcca

SEQ ID NO: 90118 - DNA, 15 bp, Homo sapiens
gctctgcctcagtcc

SEQ ID NO: 90119 - DNA, 15 bp, Homo sapiens
ggctctgcctcagtc

SEQ ID NO: 90120 - DNA, 15 bp, Homo sapiens
gggctctgcctcagt

SEQ ID NO: 90121 - DNA, 15 bp, Homo sapiens
agggctctgcctcag

SEQ ID NO: 90122 - DNA, 15 bp, Homo sapiens
cagggctctgcctca

SEQ ID NO: 90123 - DNA, 15 bp, Homo sapiens
acagggctctgcctc

SEQ ID NO: 90124 - DNA, 15 bp, Homo sapiens
tacagggctctgcct

SEQ ID NO: 90125 - DNA, 15 bp, Homo sapiens
ctacagggctctgcc

SEQ ID NO: 90126 - DNA, 15 bp, Homo sapiens
actacagggctctgc

SEQ ID NO: 90127 - DNA, 15 bp, Homo sapiens
gactacagggctctg

SEQ ID NO: 90128 - DNA, 15 bp, Homo sapiens
agactacagggctct

SEQ ID NO: 90129 - DNA, 15 bp, Homo sapiens
cagactacagggctc

SEQ ID NO: 90130 - DNA, 15 bp, Homo sapiens
tcagactacagggct

SEQ ID NO: 90131 - DNA, 15 bp, Homo sapiens
ttcagactacagggc

SEQ ID NO: 90132 - DNA, 15 bp, Homo sapiens
cttcagactacaggg

SEQ ID NO: 90133 - DNA, 15 bp, Homo sapiens
gcttcagactacagg

SEQ ID NO: 90134 - DNA, 15 bp, Homo sapiens
agcttcagactacag

SEQ ID NO: 90135 - DNA, 15 bp, Homo sapiens
cagcttcagactaca

SEQ ID NO: 90136 - DNA, 15 bp, Homo sapiens
gcagcttcagactac

SEQ ID NO: 90137 - DNA, 15 bp, Homo sapiens
tgcagcttcagacta

SEQ ID NO: 90138 - DNA, 15 bp, Homo sapiens
ctgcagcttcagact

SEQ ID NO: 90139 - DNA, 15 bp, Homo sapiens
actgcagcttcagac

SEQ ID NO: 90140 - DNA, 15 bp, Homo sapiens
aactgcagcttcaga

SEQ ID NO: 90141 - DNA, 15 bp, Homo sapiens
gaactgcagcttcag

SEQ ID NO: 90142 - DNA, 15 bp, Homo sapiens
agaactgcagcttca

SEQ ID NO: 90143 - DNA, 15 bp, Homo sapiens
aagaactgcagcttc

SEQ ID NO: 90144 - DNA, 15 bp, Homo sapiens
gaagaactgcagctt

SEQ ID NO: 90145 - DNA, 15 bp, Homo sapiens
agaagaactgcagct

SEQ ID NO: 90146 - DNA, 15 bp, Homo sapiens
tagaagaactgcagc

SEQ ID NO: 90147 - DNA, 15 bp, Homo sapiens
ctagaagaactgcag

SEQ ID NO: 90148 - DNA, 15 bp, Homo sapiens
gctagaagaactgca

SEQ ID NO: 90149 - DNA, 15 bp, Homo sapiens
cgctagaagaactgc

SEQ ID NO: 90150 - DNA, 15 bp, Homo sapiens
ccgctagaagaactg

SEQ ID NO: 90151 - DNA, 15 bp, Homo sapiens
gccgctagaagaact

SEQ ID NO: 90152 - DNA, 15 bp, Homo sapiens
agccgctagaagaac

SEQ ID NO: 90153 - DNA, 15 bp, Homo sapiens
cagccgctagaagaa

SEQ ID NO: 90154 - DNA, 15 bp, Homo sapiens
tcagccgctagaaga

SEQ ID NO: 90155 - DNA, 15 bp, Homo sapiens
gtcagccgctagaag

SEQ ID NO: 90156 - DNA, 15 bp, Homo sapiens
tgtcagccgctagaa

SEQ ID NO: 90157 - DNA, 15 bp, Homo sapiens
ttgtcagccgctaga

SEQ ID NO: 90158 - DNA, 15 bp, Homo sapiens
cttgtcagccgctag

SEQ ID NO: 90159 - DNA, 15 bp, Homo sapiens
gcttgtcagccgcta

SEQ ID NO: 90160 - DNA, 15 bp, Homo sapiens
ggcttgtcagccgct

SEQ ID NO: 90161 - DNA, 15 bp, Homo sapiens
gggcttgtcagccgc

SEQ ID NO: 90162 - DNA, 15 bp, Homo sapiens
ggggcttgtcagccg

SEQ ID NO: 90163 - DNA, 15 bp, Homo sapiens
tggggcttgtcagcc

SEQ ID NO: 90164 - DNA, 15 bp, Homo sapiens
gtggggcttgtcagc

SEQ ID NO: 90165 - DNA, 15 bp, Homo sapiens
agtggggcttgtcag

SEQ ID NO: 90166 - DNA, 15 bp, Homo sapiens
tagtggggcttgtca

SEQ ID NO: 90167 - DNA, 15 bp, Homo sapiens
atagtggggcttgtc

SEQ ID NO: 90168 - DNA, 15 bp, Homo sapiens
gatagtggggcttgt

SEQ ID NO: 90169 - DNA, 15 bp, Homo sapiens
tgatagtggggcttg

SEQ ID NO: 90170 - DNA, 15 bp, Homo sapiens
gtgatagtggggctt

SEQ ID NO: 90171 - DNA, 15 bp, Homo sapiens
agtgatagtggggct

SEQ ID NO: 90172 - DNA, 15 bp, Homo sapiens
aagtgatagtggggc

SEQ ID NO: 90173 - DNA, 15 bp, Homo sapiens
gaagtgatagtgggg

SEQ ID NO: 90174 - DNA, 15 bp, Homo sapiens
ggaagtgatagtggg

SEQ ID NO: 90175 - DNA, 15 bp, Homo sapiens
gggaagtgatagtgg

SEQ ID NO: 90176 - DNA, 15 bp, Homo sapiens
agggaagtgatagtg

SEQ ID NO: 90177 - DNA, 15 bp, Homo sapiens
cagggaagtgatagt

SEQ ID NO: 90178 - DNA, 15 bp, Homo sapiens
gcagggaagtgatag

SEQ ID NO: 90179 - DNA, 15 bp, Homo sapiens
agcagggaagtgata

SEQ ID NO: 90180 - DNA, 15 bp, Homo sapiens
cagcagggaagtgat

SEQ ID NO: 90181 - DNA, 15 bp, Homo sapiens
ccagcagggaagtga

SEQ ID NO: 90182 - DNA, 15 bp, Homo sapiens
accagcagggaagtg

SEQ ID NO: 90183 - DNA, 15 bp, Homo sapiens
caccagcagggaagt

SEQ ID NO: 90184 - DNA, 15 bp, Homo sapiens
gcaccagcagggaag

SEQ ID NO: 90185 - DNA, 15 bp, Homo sapiens
agcaccagcagggaa

SEQ ID NO: 90186 - DNA, 15 bp, Homo sapiens
aagcaccagcaggga

SEQ ID NO: 90187 - DNA, 15 bp, Homo sapiens
aaagcaccagcaggg

SEQ ID NO: 90188 - DNA, 15 bp, Homo sapiens
caaagcaccagcagg

SEQ ID NO: 90189 - DNA, 15 bp, Homo sapiens
gcaaagcaccagcag

SEQ ID NO: 90190 - DNA, 15 bp, Homo sapiens
agcaaagcaccagca

SEQ ID NO: 90191 - DNA, 15 bp, Homo sapiens
gagcaaagcaccagc

SEQ ID NO: 90192 - DNA, 15 bp, Homo sapiens
agagcaaagcaccag

SEQ ID NO: 90193 - DNA, 15 bp, Homo sapiens
cagagcaaagcacca

SEQ ID NO: 90194 - DNA, 15 bp, Homo sapiens
gcagagcaaagcacc

SEQ ID NO: 90195 - DNA, 15 bp, Homo sapiens
ggcagagcaaagcac

SEQ ID NO: 90196 - DNA, 15 bp, Homo sapiens
tggcagagcaaagca

SEQ ID NO: 90197 - DNA, 15 bp, Homo sapiens
ctggcagagcaaagc

SEQ ID NO: 90198 - DNA, 15 bp, Homo sapiens
gctggcagagcaaag

SEQ ID NO: 90199 - DNA, 15 bp, Homo sapiens
agctggcagagcaaa

SEQ ID NO: 90200 - DNA, 15 bp, Homo sapiens
cagctggcagagcaa

SEQ ID NO: 90201 - DNA, 15 bp, Homo sapiens
acagctggcagagca

SEQ ID NO: 90202 - DNA, 15 bp, Homo sapiens
cacagctggcagagc

SEQ ID NO: 90203 - DNA, 15 bp, Homo sapiens
tcacagctggcagag

SEQ ID NO: 90204 - DNA, 15 bp, Homo sapiens
ttcacagctggcaga

SEQ ID NO: 90205 - DNA, 15 bp, Homo sapiens
attcacagctggcag

SEQ ID NO: 90206 - DNA, 15 bp, Homo sapiens
aattcacagctggca

SEQ ID NO: 90207 - DNA, 15 bp, Homo sapiens
gaattcacagctggc

SEQ ID NO: 90208 - DNA, 15 bp, Homo sapiens
agaattcacagctgg

SEQ ID NO: 90209 - DNA, 15 bp, Homo sapiens
gagaattcacagctg

SEQ ID NO: 90210 - DNA, 15 bp, Homo sapiens
tgagaattcacagct

SEQ ID NO: 90211 - DNA, 15 bp, Homo sapiens
atgagaattcacagc

SEQ ID NO: 90212 - DNA, 15 bp, Homo sapiens
tatgagaattcacag

SEQ ID NO: 90213 - DNA, 15 bp, Homo sapiens
ttatgagaattcaca

SEQ ID NO: 90214 - DNA, 15 bp, Homo sapiens
attatgagaattcac

SEQ ID NO: 90215 - DNA, 15 bp, Homo sapiens
aattatgagaattca

SEQ ID NO: 90216 - DNA, 15 bp, Homo sapiens
caattatgagaattc

SEQ ID NO: 90217 - DNA, 15 bp, Homo sapiens
acaattatgagaatt

SEQ ID NO: 90218 - DNA, 15 bp, Homo sapiens
gacaattatgagaat

SEQ ID NO: 90219 - DNA, 15 bp, Homo sapiens
ggacaattatgagaa

SEQ ID NO: 90220 - DNA, 15 bp, Homo sapiens
aggacaattatgaga

SEQ ID NO: 90221 - DNA, 15 bp, Homo sapiens
taggacaattatgag

SEQ ID NO: 90222 - DNA, 15 bp, Homo sapiens
ataggacaattatga

SEQ ID NO: 90223 - DNA, 15 bp, Homo sapiens
gataggacaattatg

SEQ ID NO: 90224 - DNA, 15 bp, Homo sapiens
cgataggacaattat

SEQ ID NO: 90225 - DNA, 15 bp, Homo sapiens
acgataggacaatta

SEQ ID NO: 90226 - DNA, 15 bp, Homo sapiens
gacgataggacaatt

SEQ ID NO: 90227 - DNA, 15 bp, Homo sapiens
tgacgataggacaat

SEQ ID NO: 90228 - DNA, 15 bp, Homo sapiens
ttgacgataggacaa

SEQ ID NO: 90229 - DNA, 15 bp, Homo sapiens
cttgacgataggaca

SEQ ID NO: 90230 - DNA, 15 bp, Homo sapiens
acttgacgataggac

SEQ ID NO: 90231 - DNA, 15 bp, Homo sapiens
gacttgacgatagga

SEQ ID NO: 90232 - DNA, 15 bp, Homo sapiens
agacttgacgatagg

SEQ ID NO: 90233 - DNA, 15 bp, Homo sapiens
aagacttgacgatag

SEQ ID NO: 90234 - DNA, 15 bp, Homo sapiens
aaagacttgacgata

SEQ ID NO: 90235 - DNA, 15 bp, Homo sapiens
taaagacttgacgat

SEQ ID NO: 90236 - DNA, 15 bp, Homo sapiens
ataaagacttgacga

SEQ ID NO: 90237 - DNA, 15 bp, Homo sapiens
aataaagacttgacg

SEQ ID NO: 90238 - DNA, 15 bp, Homo sapiens
aaataaagacttgac

SEQ ID NO: 90239 - DNA, 15 bp, Homo sapiens
gaaataaagacttga

SEQ ID NO: 90240 - DNA, 15 bp, Homo sapiens
agaaataaagacttg

SEQ ID NO: 90241 - DNA, 15 bp, Homo sapiens
cagaaataaagactt

SEQ ID NO: 90242 - DNA, 15 bp, Homo sapiens
gcagaaataaagact

SEQ ID NO: 90243 - DNA, 15 bp, Homo sapiens
tgcagaaataaagac

SEQ ID NO: 90244 - DNA, 15 bp, Homo sapiens
atgcagaaataaaga

SEQ ID NO: 90245 - DNA, 15 bp, Homo sapiens
aatgcagaaataaag

SEQ ID NO: 90246 - DNA, 15 bp, Homo sapiens
aaatgcagaaataaa

SEQ ID NO: 90247 - DNA, 15 bp, Homo sapiens
aaaatgcagaaataa

SEQ ID NO: 90248 - DNA, 15 bp, Homo sapiens
taaaatgcagaaata

SEQ ID NO: 90249 - DNA, 15 bp, Homo sapiens
gtaaaatgcagaaat

SEQ ID NO: 90250 - DNA, 15 bp, Homo sapiens
agtaaaatgcagaaa

SEQ ID NO: 90251 - DNA, 15 bp, Homo sapiens
cagtaaaatgcagaa

SEQ ID NO: 90252 - DNA, 15 bp, Homo sapiens
gcagtaaaatgcaga

SEQ ID NO: 90253 - DNA, 15 bp, Homo sapiens
agcagtaaaatgcag

SEQ ID NO: 90254 - DNA, 15 bp, Homo sapiens
aagcagtaaaatgca

SEQ ID NO: 90255 - DNA, 15 bp, Homo sapiens
caagcagtaaaatgc

SEQ ID NO: 90256 - DNA, 15 bp, Homo sapiens
tcaagcagtaaaatg

SEQ ID NO: 90257 - DNA, 15 bp, Homo sapiens
atcaagcagtaaaat

SEQ ID NO: 90258 - DNA, 15 bp, Homo sapiens
tatcaagcagtaaaa

SEQ ID NO: 90259 - DNA, 15 bp, Homo sapiens
gtatcaagcagtaaa

SEQ ID NO: 90260 - DNA, 15 bp, Homo sapiens
tgtatcaagcagtaa

SEQ ID NO: 90261 - DNA, 15 bp, Homo sapiens
gtgtatcaagcagta

SEQ ID NO: 90262 - DNA, 15 bp, Homo sapiens
agtgtatcaagcagt

SEQ ID NO: 90263 - DNA, 15 bp, Homo sapiens
cagtgtatcaagcag

SEQ ID NO: 90264 - DNA, 15 bp, Homo sapiens
acagtgtatcaagca

SEQ ID NO: 90265 - DNA, 15 bp, Homo sapiens
gacagtgtatcaagc

SEQ ID NO: 90266 - DNA, 15 bp, Homo sapiens
tgacagtgtatcaag

SEQ ID NO: 90267 - DNA, 15 bp, Homo sapiens
ctgacagtgtatcaa

SEQ ID NO: 90268 - DNA, 15 bp, Homo sapiens
cctgacagtgtatca

SEQ ID NO: 90269 - DNA, 15 bp, Homo sapiens
tcctgacagtgtatc

SEQ ID NO: 90270 - DNA, 15 bp, Homo sapiens
gtcctgacagtgtat

SEQ ID NO: 90271 - DNA, 15 bp, Homo sapiens
tgtcctgacagtgta

SEQ ID NO: 90272 - DNA, 15 bp, Homo sapiens
ctgtcctgacagtgt

SEQ ID NO: 90273 - DNA, 15 bp, Homo sapiens
tctgtcctgacagtg

SEQ ID NO: 90274 - DNA, 15 bp, Homo sapiens
gtctgtcctgacagt

SEQ ID NO: 90275 - DNA, 15 bp, Homo sapiens
agtctgtcctgacag

SEQ ID NO: 90276 - DNA, 15 bp, Homo sapiens
aagtctgtcctgaca

SEQ ID NO: 90277 - DNA, 15 bp, Homo sapiens
aaagtctgtcctgac

SEQ ID NO: 90278 - DNA, 15 bp, Homo sapiens
taaagtctgtcctga

SEQ ID NO: 90279 - DNA, 15 bp, Homo sapiens
ttaaagtctgtcctg

SEQ ID NO: 90280 - DNA, 15 bp, Homo sapiens
tttaaagtctgtcct

SEQ ID NO: 90281 - DNA, 15 bp, Homo sapiens
ttttaaagtctgtcc

SEQ ID NO: 90282 - DNA, 15 bp, Homo sapiens
attttaaagtctgtc

SEQ ID NO: 90283 - DNA, 15 bp, Homo sapiens
aattttaaagtctgt

SEQ ID NO: 90284 - DNA, 15 bp, Homo sapiens
taattttaaagtctg

SEQ ID NO: 90285 - DNA, 15 bp, Homo sapiens
ataattttaaagtct

SEQ ID NO: 90286 - DNA, 15 bp, Homo sapiens
aataattttaaagtc

SEQ ID NO: 90287 - DNA, 15 bp, Homo sapiens
gaataattttaaagt

SEQ ID NO: 90288 - DNA, 15 bp, Homo sapiens
agaataattttaaag

SEQ ID NO: 90289 - DNA, 15 bp, Homo sapiens
gagaataattttaaa

SEQ ID NO: 90290 - DNA, 15 bp, Homo sapiens
tgagaataattttaa

SEQ ID NO: 90291 - DNA, 15 bp, Homo sapiens
ctgagaataatttta

SEQ ID NO: 90292 - DNA, 15 bp, Homo sapiens
actgagaataatttt

SEQ ID NO: 90293 - DNA, 15 bp, Homo sapiens
cactgagaataattt

SEQ ID NO: 90294 - DNA, 15 bp, Homo sapiens
gcactgagaataatt

SEQ ID NO: 90295 - DNA, 15 bp, Homo sapiens
cgcactgagaataat

SEQ ID NO: 90296 - DNA, 15 bp, Homo sapiens
tcgcactgagaataa

SEQ ID NO: 90297 - DNA, 15 bp, Homo sapiens
atcgcactgagaata

SEQ ID NO: 90298 - DNA, 15 bp, Homo sapiens
catcgcactgagaat

SEQ ID NO: 90299 - DNA, 15 bp, Homo sapiens
tcatcgcactgagaa

SEQ ID NO: 90300 - DNA, 15 bp, Homo sapiens
ttcatcgcactgaga

SEQ ID NO: 90301 - DNA, 15 bp, Homo sapiens
tttcatcgcactgag

SEQ ID NO: 90302 - DNA, 15 bp, Homo sapiens
gtttcatcgcactga

SEQ ID NO: 90303 - DNA, 15 bp, Homo sapiens
tgtttcatcgcactg

SEQ ID NO: 90304 - DNA, 15 bp, Homo sapiens
ttgtttcatcgcact

SEQ ID NO: 90305 - DNA, 15 bp, Homo sapiens
attgtttcatcgcac

SEQ ID NO: 90306 - DNA, 15 bp, Homo sapiens
aattgtttcatcgca

SEQ ID NO: 90307 - DNA, 15 bp, Homo sapiens
gaattgtttcatcgc

SEQ ID NO: 90308 - DNA, 15 bp, Homo sapiens
agaattgtttcatcg

SEQ ID NO: 90309 - DNA, 15 bp, Homo sapiens
cagaattgtttcatc

SEQ ID NO: 90310 - DNA, 15 bp, Homo sapiens
tcagaattgtttcat

SEQ ID NO: 90311 - DNA, 15 bp, Homo sapiens
gtcagaattgtttca

SEQ ID NO: 90312 - DNA, 15 bp, Homo sapiens
tgtcagaattgtttc

SEQ ID NO: 90313 - DNA, 15 bp, Homo sapiens
atgtcagaattgttt

SEQ ID NO: 90314 - DNA, 15 bp, Homo sapiens
aatgtcagaattgtt

SEQ ID NO: 90315 - DNA, 15 bp, Homo sapiens
gaatgtcagaattgt

SEQ ID NO: 90316 - DNA, 15 bp, Homo sapiens
tgaatgtcagaattg

SEQ ID NO: 90317 - DNA, 15 bp, Homo sapiens
atgaatgtcagaatt

SEQ ID NO: 90318 - DNA, 15 bp, Homo sapiens
catgaatgtcagaat

SEQ ID NO: 90319 - DNA, 15 bp, Homo sapiens
acatgaatgtcagaa

SEQ ID NO: 90320 - DNA, 15 bp, Homo sapiens
aacatgaatgtcaga

SEQ ID NO: 90321 - DNA, 15 bp, Homo sapiens
taacatgaatgtcag

SEQ ID NO: 90322 - DNA, 15 bp, Homo sapiens
ataacatgaatgtca

SEQ ID NO: 90323 - DNA, 15 bp, Homo sapiens
cataacatgaatgtc

SEQ ID NO: 90324 - DNA, 15 bp, Homo sapiens
tcataacatgaatgt

SEQ ID NO: 90325 - DNA, 15 bp, Homo sapiens
ctcataacatgaatg

SEQ ID NO: 90326 - DNA, 15 bp, Homo sapiens
gctcataacatgaat

SEQ ID NO: 90327 - DNA, 15 bp, Homo sapiens
tgctcataacatgaa

SEQ ID NO: 90328 - DNA, 15 bp, Homo sapiens
ctgctcataacatga

SEQ ID NO: 90329 - DNA, 15 bp, Homo sapiens
actgctcataacatg

SEQ ID NO: 90330 - DNA, 15 bp, Homo sapiens
aactgctcataacat

SEQ ID NO: 90331 - DNA, 15 bp, Homo sapiens
taactgctcataaca

SEQ ID NO: 90332 - DNA, 15 bp, Homo sapiens
gtaactgctcataac

SEQ ID NO: 90333 - DNA, 15 bp, Homo sapiens
ggtaactgctcataa

SEQ ID NO: 90334 - DNA, 15 bp, Homo sapiens
aggtaactgctcata

SEQ ID NO: 90335 - DNA, 15 bp, Homo sapiens
gaggtaactgctcat

SEQ ID NO: 90336 - DNA, 15 bp, Homo sapiens
tgaggtaactgctca

SEQ ID NO: 90337 - DNA, 15 bp, Homo sapiens
atgaggtaactgctc

SEQ ID NO: 90338 - DNA, 15 bp, Homo sapiens
tatgaggtaactgct

SEQ ID NO: 90339 - DNA, 15 bp, Homo sapiens
ttatgaggtaactgc

SEQ ID NO: 90340 - DNA, 15 bp, Homo sapiens
tttatgaggtaactg

SEQ ID NO: 90341 - DNA, 15 bp, Homo sapiens
atttatgaggtaact

SEQ ID NO: 90342 - DNA, 15 bp, Homo sapiens
tatttatgaggtaac

SEQ ID NO: 90343 - DNA, 15 bp, Homo sapiens
ctatttatgaggtaa

SEQ ID NO: 90344 - DNA, 15 bp, Homo sapiens
tctatttatgaggta

SEQ ID NO: 90345 - DNA, 15 bp, Homo sapiens
atctatttatgaggt

SEQ ID NO: 90346 - DNA, 15 bp, Homo sapiens
aatctatttatgagg

SEQ ID NO: 90347 - DNA, 15 bp, Homo sapiens
taatctatttatgag

SEQ ID NO: 90348 - DNA, 15 bp, Homo sapiens
gtaatctatttatga

SEQ ID NO: 90349 - DNA, 15 bp, Homo sapiens
tgtaatctatttatg

SEQ ID NO: 90350 - DNA, 15 bp, Homo sapiens
atgtaatctatttat

SEQ ID NO: 90351 - DNA, 15 bp, Homo sapiens
catgtaatctattta

SEQ ID NO: 90352 - DNA, 15 bp, Homo sapiens
acatgtaatctattt

SEQ ID NO: 90353 - DNA, 15 bp, Homo sapiens
cacatgtaatctatt

SEQ ID NO: 90354 - DNA, 15 bp, Homo sapiens
tcacatgtaatctat

SEQ ID NO: 90355 - DNA, 15 bp, Homo sapiens
ctcacatgtaatcta

SEQ ID NO: 90356 - DNA, 15 bp, Homo sapiens
tctcacatgtaatct

SEQ ID NO: 90357 - DNA, 15 bp, Homo sapiens
atctcacatgtaatc

SEQ ID NO: 90358 - DNA, 15 bp, Homo sapiens
aatctcacatgtaat

SEQ ID NO: 90359 - DNA, 15 bp, Homo sapiens
caatctcacatgtaa

SEQ ID NO: 90360 - DNA, 15 bp, Homo sapiens
tcaatctcacatgta

SEQ ID NO: 90361 - DNA, 15 bp, Homo sapiens
ttcaatctcacatgt

SEQ ID NO: 90362 - DNA, 15 bp, Homo sapiens
gttcaatctcacatg

SEQ ID NO: 90363 - DNA, 15 bp, Homo sapiens
agttcaatctcacat

SEQ ID NO: 90364 - DNA, 15 bp, Homo sapiens
aagttcaatctcaca

SEQ ID NO: 90365 - DNA, 15 bp, Homo sapiens
caagttcaatctcac

SEQ ID NO: 90366 - DNA, 15 bp, Homo sapiens
ccaagttcaatctca

SEQ ID NO: 90367 - DNA, 15 bp, Homo sapiens
cccaagttcaatctc

SEQ ID NO: 90368 - DNA, 15 bp, Homo sapiens
gcccaagttcaatct

SEQ ID NO: 90369 - DNA, 15 bp, Homo sapiens
tgcccaagttcaatc

SEQ ID NO: 90370 - DNA, 15 bp, Homo sapiens
ctgcccaagttcaat

SEQ ID NO: 90371 - DNA, 15 bp, Homo sapiens
tctgcccaagttcaa

SEQ ID NO: 90372 - DNA, 15 bp, Homo sapiens
gtctgcccaagttca

SEQ ID NO: 90373 - DNA, 15 bp, Homo sapiens
agtctgcccaagttc

SEQ ID NO: 90374 - DNA, 15 bp, Homo sapiens
tagtctgcccaagtt

SEQ ID NO: 90375 - DNA, 15 bp, Homo sapiens
atagtctgcccaagt

SEQ ID NO: 90376 - DNA, 15 bp, Homo sapiens
tatagtctgcccaag

SEQ ID NO: 90377 - DNA, 15 bp, Homo sapiens
ttatagtctgcccaa

SEQ ID NO: 90378 - DNA, 15 bp, Homo sapiens
attatagtctgccca

SEQ ID NO: 90379 - DNA, 15 bp, Homo sapiens
tattatagtctgccc

SEQ ID NO: 90380 - DNA, 15 bp, Homo sapiens
atattatagtctgcc

SEQ ID NO: 90381 - DNA, 15 bp, Homo sapiens
tatattatagtctgc

SEQ ID NO: 90382 - DNA, 15 bp, Homo sapiens
ctatattatagtctg

SEQ ID NO: 90383 - DNA, 15 bp, Homo sapiens
gctatattatagtct

SEQ ID NO: 90384 - DNA, 15 bp, Homo sapiens
tgctatattatagtc

SEQ ID NO: 90385 - DNA, 15 bp, Homo sapiens
atgctatattatagt

SEQ ID NO: 90386 - DNA, 15 bp, Homo sapiens
aatgctatattatag

SEQ ID NO: 90387 - DNA, 15 bp, Homo sapiens
taatgctatattata

SEQ ID NO: 90388 - DNA, 15 bp, Homo sapiens
ttaatgctatattat

SEQ ID NO: 90389 - DNA, 15 bp, Homo sapiens
attaatgctatatta

SEQ ID NO: 90390 - DNA, 15 bp, Homo sapiens
cattaatgctatatt

SEQ ID NO: 90391 - DNA, 15 bp, Homo sapiens
tcattaatgctatat

SEQ ID NO: 90392 - DNA, 15 bp, Homo sapiens
gtcattaatgctata

SEQ ID NO: 90393 - DNA, 15 bp, Homo sapiens
cgtcattaatgctat

SEQ ID NO: 90394 - DNA, 15 bp, Homo sapiens
tcgtcattaatgcta

SEQ ID NO: 90395 - DNA, 15 bp, Homo sapiens
ttcgtcattaatgct

SEQ ID NO: 90396 - DNA, 15 bp, Homo sapiens
tttcgtcattaatgc

SEQ ID NO: 90397 - DNA, 15 bp, Homo sapiens
gtttcgtcattaatg

SEQ ID NO: 90398 - DNA, 15 bp, Homo sapiens
tgtttcgtcattaat

SEQ ID NO: 90399 - DNA, 15 bp, Homo sapiens
ctgtttcgtcattaa

SEQ ID NO: 90400 - DNA, 15 bp, Homo sapiens
tctgtttcgtcatta

SEQ ID NO: 90401 - DNA, 15 bp, Homo sapiens
gtctgtttcgtcatt

SEQ ID NO: 90402 - DNA, 15 bp, Homo sapiens
tgtctgtttcgtcat

SEQ ID NO: 90403 - DNA, 15 bp, Homo sapiens
gtgtctgtttcgtca

SEQ ID NO: 90404 - DNA, 15 bp, Homo sapiens
tgtgtctgtttcgtc

SEQ ID NO: 90405 - DNA, 15 bp, Homo sapiens
ctgtgtctgtttcgt

SEQ ID NO: 90406 - DNA, 15 bp, Homo sapiens
actgtgtctgtttcg

SEQ ID NO: 90407 - DNA, 15 bp, Homo sapiens
gactgtgtctgtttc

SEQ ID NO: 90408 - DNA, 15 bp, Homo sapiens
tgactgtgtctgttt

SEQ ID NO: 90409 - DNA, 15 bp, Homo sapiens
atgactgtgtctgtt

SEQ ID NO: 90410 - DNA, 15 bp, Homo sapiens
gatgactgtgtctgt

SEQ ID NO: 90411 - DNA, 15 bp, Homo sapiens
agatgactgtgtctg

SEQ ID NO: 90412 - DNA, 15 bp, Homo sapiens
aagatgactgtgtct

SEQ ID NO: 90413 - DNA, 15 bp, Homo sapiens
gaagatgactgtgtc

SEQ ID NO: 90414 - DNA, 15 bp, Homo sapiens
cgaagatgactgtgt

SEQ ID NO: 90415 - DNA, 15 bp, Homo sapiens
ccgaagatgactgtg

SEQ ID NO: 90416 - DNA, 15 bp, Homo sapiens
cccgaagatgactgt

SEQ ID NO: 90417 - DNA, 15 bp, Homo sapiens
tcccgaagatgactg

SEQ ID NO: 90418 - DNA, 15 bp, Homo sapiens
ttcccgaagatgact

SEQ ID NO: 90419 - DNA, 15 bp, Homo sapiens
cttcccgaagatgac

SEQ ID NO: 90420 - DNA, 15 bp, Homo sapiens
tcttcccgaagatga

SEQ ID NO: 90421 - DNA, 15 bp, Homo sapiens
ttcttcccgaagatg

SEQ ID NO: 90422 - DNA, 15 bp, Homo sapiens
cttcttcccgaagat

SEQ ID NO: 90423 - DNA, 15 bp, Homo sapiens
tcttcttcccgaaga

SEQ ID NO: 90424 - DNA, 15 bp, Homo sapiens
ttcttcttcccgaag

SEQ ID NO: 90425 - DNA, 15 bp, Homo sapiens
attcttcttcccgaa

SEQ ID NO: 90426 - DNA, 15 bp, Homo sapiens
tattcttcttcccga

SEQ ID NO: 90427 - DNA, 15 bp, Homo sapiens
ctattcttcttcccg

SEQ ID NO: 90428 - DNA, 15 bp, Homo sapiens
tctattcttcttccc

SEQ ID NO: 90429 - DNA, 15 bp, Homo sapiens
ctctattcttcttcc

SEQ ID NO: 90430 - DNA, 15 bp, Homo sapiens
cctctattcttcttc

SEQ ID NO: 90431 - DNA, 15 bp, Homo sapiens
gcctctattcttctt

SEQ ID NO: 90432 - DNA, 15 bp, Homo sapiens
agcctctattcttct

SEQ ID NO: 90433 - DNA, 15 bp, Homo sapiens
aagcctctattcttc

SEQ ID NO: 90434 - DNA, 15 bp, Homo sapiens
taagcctctattctt

SEQ ID NO: 90435 - DNA, 15 bp, Homo sapiens
ataagcctctattct

SEQ ID NO: 90436 - DNA, 15 bp, Homo sapiens
aataagcctctattc

SEQ ID NO: 90437 - DNA, 15 bp, Homo sapiens
aaataagcctctatt

SEQ ID NO: 90438 - DNA, 15 bp, Homo sapiens
caaataagcctctat

SEQ ID NO: 90439 - DNA, 15 bp, Homo sapiens
gcaaataagcctcta

SEQ ID NO: 90440 - DNA, 15 bp, Homo sapiens
agcaaataagcctct

SEQ ID NO: 90441 - DNA, 15 bp, Homo sapiens
cagcaaataagcctc

SEQ ID NO: 90442 - DNA, 15 bp, Homo sapiens
gcagcaaataagcct

SEQ ID NO: 90443 - DNA, 15 bp, Homo sapiens
ggcagcaaataagcc

SEQ ID NO: 90444 - DNA, 15 bp, Homo sapiens
aggcagcaaataagc

SEQ ID NO: 90445 - DNA, 15 bp, Homo sapiens
caggcagcaaataag

SEQ ID NO: 90446 - DNA, 15 bp, Homo sapiens
acaggcagcaaataa

SEQ ID NO: 90447 - DNA, 15 bp, Homo sapiens
cacaggcagcaaata

SEQ ID NO: 90448 - DNA, 15 bp, Homo sapiens
tcacaggcagcaaat

SEQ ID NO: 90449 - DNA, 15 bp, Homo sapiens
ttcacaggcagcaaa

SEQ ID NO: 90450 - DNA, 15 bp, Homo sapiens
tttcacaggcagcaa

SEQ ID NO: 90451 - DNA, 15 bp, Homo sapiens
atttcacaggcagca

SEQ ID NO: 90452 - DNA, 15 bp, Homo sapiens
aatttcacaggcagc

SEQ ID NO: 90453 - DNA, 15 bp, Homo sapiens
taatttcacaggcag

SEQ ID NO: 90454 - DNA, 15 bp, Homo sapiens
ttaatttcacaggca

SEQ ID NO: 90455 - DNA, 15 bp, Homo sapiens
tttaatttcacaggc

SEQ ID NO: 90456 - DNA, 15 bp, Homo sapiens
ttttaatttcacagg

SEQ ID NO: 90457 - DNA, 15 bp, Homo sapiens
attttaatttcacag

SEQ ID NO: 90458 - DNA, 15 bp, Homo sapiens
aattttaatttcaca

SEQ ID NO: 90459 - DNA, 15 bp, Homo sapiens
taattttaatttcac

SEQ ID NO: 90460 - DNA, 15 bp, Homo sapiens
gtaattttaatttca

SEQ ID NO: 90461 - DNA, 15 bp, Homo sapiens
agtaattttaatttc

SEQ ID NO: 90462 - DNA, 15 bp, Homo sapiens
gagtaattttaattt

SEQ ID NO: 90463 - DNA, 15 bp, Homo sapiens
agagtaattttaatt

SEQ ID NO: 90464 - DNA, 15 bp, Homo sapiens
cagagtaattttaat

SEQ ID NO: 90465 - DNA, 15 bp, Homo sapiens
tcagagtaattttaa

SEQ ID NO: 90466 - DNA, 15 bp, Homo sapiens
gtcagagtaatttta

SEQ ID NO: 90467 - DNA, 15 bp, Homo sapiens
agtcagagtaatttt

SEQ ID NO: 90468 - DNA, 15 bp, Homo sapiens
cagtcagagtaattt

SEQ ID NO: 90469 - DNA, 15 bp, Homo sapiens
ccagtcagagtaatt

SEQ ID NO: 90470 - DNA, 15 bp, Homo sapiens
cccagtcagagtaat

SEQ ID NO: 90471 - DNA, 15 bp, Homo sapiens
tcccagtcagagtaa

SEQ ID NO: 90472 - DNA, 15 bp, Homo sapiens
ttcccagtcagagta

SEQ ID NO: 90473 - DNA, 15 bp, Homo sapiens
attcccagtcagagt

SEQ ID NO: 90474 - DNA, 15 bp, Homo sapiens
gattcccagtcagag

SEQ ID NO: 90475 - DNA, 15 bp, Homo sapiens
ggattcccagtcaga

SEQ ID NO: 90476 - DNA, 15 bp, Homo sapiens
tggattcccagtcag

SEQ ID NO: 90477 - DNA, 15 bp, Homo sapiens
atggattcccagtca

SEQ ID NO: 90478 - DNA, 15 bp, Homo sapiens
gatggattcccagtc

SEQ ID NO: 90479 - DNA, 15 bp, Homo sapiens
cgatggattcccagt

SEQ ID NO: 90480 - DNA, 15 bp, Homo sapiens
acgatggattcccag

SEQ ID NO: 90481 - DNA, 15 bp, Homo sapiens
aacgatggattccca

SEQ ID NO: 90482 - DNA, 15 bp, Homo sapiens
gaacgatggattccc

SEQ ID NO: 90483 - DNA, 15 bp, Homo sapiens
tgaacgatggattcc

SEQ ID NO: 90484 - DNA, 15 bp, Homo sapiens
ctgaacgatggattc

SEQ ID NO: 90485 - DNA, 15 bp, Homo sapiens
actgaacgatggatt

SEQ ID NO: 90486 - DNA, 15 bp, Homo sapiens
tactgaacgatggat

SEQ ID NO: 90487 - DNA, 15 bp, Homo sapiens
ttactgaacgatgga

SEQ ID NO: 90488 - DNA, 15 bp, Homo sapiens
cttactgaacgatgg

SEQ ID NO: 90489 - DNA, 15 bp, Homo sapiens
acttactgaacgatg

SEQ ID NO: 90490 - DNA, 15 bp, Homo sapiens
aacttactgaacgat

SEQ ID NO: 90491 - DNA, 15 bp, Homo sapiens
aaacttactgaacga

SEQ ID NO: 90492 - DNA, 15 bp, Homo sapiens
taaacttactgaacg

SEQ ID NO: 90493 - DNA, 15 bp, Homo sapiens
gtaaacttactgaac

SEQ ID NO: 90494 - DNA, 15 bp, Homo sapiens
agtaaacttactgaa

SEQ ID NO: 90495 - DNA, 15 bp, Homo sapiens
cagtaaacttactga

SEQ ID NO: 90496 - DNA, 15 bp, Homo sapiens
tcagtaaacttactg

SEQ ID NO: 90497 - DNA, 15 bp, Homo sapiens
ctcagtaaacttact

SEQ ID NO: 90498 - DNA, 15 bp, Homo sapiens
actcagtaaacttac

SEQ ID NO: 90499 - DNA, 15 bp, Homo sapiens
cactcagtaaactta

SEQ ID NO: 90500 - DNA, 15 bp, Homo sapiens
acactcagtaaactt

SEQ ID NO: 90501 - DNA, 15 bp, Homo sapiens
cacactcagtaaact

SEQ ID NO: 90502 - DNA, 15 bp, Homo sapiens
tcacactcagtaaac

SEQ ID NO: 90503 - DNA, 15 bp, Homo sapiens
gtcacactcagtaaa

SEQ ID NO: 90504 - DNA, 15 bp, Homo sapiens
tgtcacactcagtaa

SEQ ID NO: 90505 - DNA, 15 bp, Homo sapiens
gtgtcacactcagta

SEQ ID NO: 90506 - DNA, 15 bp, Homo sapiens
ggtgtcacactcagt

SEQ ID NO: 90507 - DNA, 15 bp, Homo sapiens
aggtgtcacactcag

SEQ ID NO: 90508 - DNA, 15 bp, Homo sapiens
aaggtgtcacactca

SEQ ID NO: 90509 - DNA, 15 bp, Homo sapiens
caaggtgtcacactc

SEQ ID NO: 90510 - DNA, 15 bp, Homo sapiens
ccaaggtgtcacact

SEQ ID NO: 90511 - DNA, 15 bp, Homo sapiens
gccaaggtgtcacac

SEQ ID NO: 90512 - DNA, 15 bp, Homo sapiens
agccaaggtgtcaca

SEQ ID NO: 90513 - DNA, 15 bp, Homo sapiens
aagccaaggtgtcac

SEQ ID NO: 90514 - DNA, 15 bp, Homo sapiens
caagccaaggtgtca

SEQ ID NO: 90515 - DNA, 15 bp, Homo sapiens
tcaagccaaggtgtc

SEQ ID NO: 90516 - DNA, 15 bp, Homo sapiens
gtcaagccaaggtgt

SEQ ID NO: 90517 - DNA, 15 bp, Homo sapiens
agtcaagccaaggtg

SEQ ID NO: 90518 - DNA, 15 bp, Homo sapiens
cagtcaagccaaggt

SEQ ID NO: 90519 - DNA, 15 bp, Homo sapiens
acagtcaagccaagg

SEQ ID NO: 90520 - DNA, 15 bp, Homo sapiens
aacagtcaagccaag

SEQ ID NO: 90521 - DNA, 15 bp, Homo sapiens
caacagtcaagccaa

SEQ ID NO: 90522 - DNA, 15 bp, Homo sapiens
ccaacagtcaagcca

SEQ ID NO: 90523 - DNA, 15 bp, Homo sapiens
tccaacagtcaagcc

SEQ ID NO: 90524 - DNA, 15 bp, Homo sapiens
ttccaacagtcaagc

SEQ ID NO: 90525 - DNA, 15 bp, Homo sapiens
tttccaacagtcaag

SEQ ID NO: 90526 - DNA, 15 bp, Homo sapiens
ctttccaacagtcaa

SEQ ID NO: 90527 - DNA, 15 bp, Homo sapiens
tctttccaacagtca

SEQ ID NO: 90528 - DNA, 15 bp, Homo sapiens
gtctttccaacagtc

SEQ ID NO: 90529 - DNA, 15 bp, Homo sapiens
tgtctttccaacagt

SEQ ID NO: 90530 - DNA, 15 bp, Homo sapiens
ctgtctttccaacag

SEQ ID NO: 90531 - DNA, 15 bp, Homo sapiens
tctgtctttccaaca

SEQ ID NO: 90532 - DNA, 15 bp, Homo sapiens
ttctgtctttccaac

SEQ ID NO: 90533 - DNA, 15 bp, Homo sapiens
tttctgtctttccaa

SEQ ID NO: 90534 - DNA, 15 bp, Homo sapiens
ctttctgtctttcca

SEQ ID NO: 90535 - DNA, 15 bp, Homo sapiens
cctttctgtctttcc

SEQ ID NO: 90536 - DNA, 15 bp, Homo sapiens
ccctttctgtctttc

SEQ ID NO: 90537 - DNA, 15 bp, Homo sapiens
gccctttctgtcttt

SEQ ID NO: 90538 - DNA, 15 bp, Homo sapiens
tgccctttctgtctt

SEQ ID NO: 90539 - DNA, 15 bp, Homo sapiens
atgccctttctgtct

SEQ ID NO: 90540 - DNA, 15 bp, Homo sapiens
catgccctttctgtc

SEQ ID NO: 90541 - DNA, 15 bp, Homo sapiens
acatgccctttctgt

SEQ ID NO: 90542 - DNA, 15 bp, Homo sapiens
tacatgccctttctg

SEQ ID NO: 90543 - DNA, 15 bp, Homo sapiens
ctacatgccctttct

SEQ ID NO: 90544 - DNA, 15 bp, Homo sapiens
actacatgccctttc

SEQ ID NO: 90545 - DNA, 15 bp, Homo sapiens
aactacatgcccttt

SEQ ID NO: 90546 - DNA, 15 bp, Homo sapiens
aaactacatgccctt

SEQ ID NO: 90547 - DNA, 15 bp, Homo sapiens
taaactacatgccct

SEQ ID NO: 90548 - DNA, 15 bp, Homo sapiens
ataaactacatgccc

SEQ ID NO: 90549 - DNA, 15 bp, Homo sapiens
tataaactacatgcc

SEQ ID NO: 90550 - DNA, 15 bp, Homo sapiens
ttataaactacatgc

SEQ ID NO: 90551 - DNA, 15 bp, Homo sapiens
tttataaactacatg

SEQ ID NO: 90552 - DNA, 15 bp, Homo sapiens
ttttataaactacat

SEQ ID NO: 90553 - DNA, 15 bp, Homo sapiens
attttataaactaca

SEQ ID NO: 90554 - DNA, 15 bp, Homo sapiens
gattttataaactac

SEQ ID NO: 90555 - DNA, 15 bp, Homo sapiens
tgattttataaacta

SEQ ID NO: 90556 - DNA, 15 bp, Homo sapiens
ctgattttataaact

SEQ ID NO: 90557 - DNA, 15 bp, Homo sapiens
gctgattttataaac

SEQ ID NO: 90558 - DNA, 15 bp, Homo sapiens
ggctgattttataaa

SEQ ID NO: 90559 - DNA, 15 bp, Homo sapiens
tggctgattttataa

SEQ ID NO: 90560 - DNA, 15 bp, Homo sapiens
ttggctgattttata

SEQ ID NO: 90561 - DNA, 15 bp, Homo sapiens
cttggctgattttat

SEQ ID NO: 90562 - DNA, 15 bp, Homo sapiens
ccttggctgatttta

SEQ ID NO: 90563 - DNA, 15 bp, Homo sapiens
cccttggctgatttt

SEQ ID NO: 90564 - DNA, 15 bp, Homo sapiens
ccccttggctgattt

SEQ ID NO: 90565 - DNA, 15 bp, Homo sapiens
tccccttggctgatt

SEQ ID NO: 90566 - DNA, 15 bp, Homo sapiens
ttccccttggctgat

SEQ ID NO: 90567 - DNA, 15 bp, Homo sapiens
tttccccttggctga

SEQ ID NO: 90568 - DNA, 15 bp, Homo sapiens
ttttccccttggctg

SEQ ID NO: 90569 - DNA, 15 bp, Homo sapiens
attttccccttggct

SEQ ID NO: 90570 - DNA, 15 bp, Homo sapiens
cattttccccttggc

SEQ ID NO: 90571 - DNA, 15 bp, Homo sapiens
gcattttccccttgg

SEQ ID NO: 90572 - DNA, 15 bp, Homo sapiens
agcattttccccttg

SEQ ID NO: 90573 - DNA, 15 bp, Homo sapiens
aagcattttcccctt

SEQ ID NO: 90574 - DNA, 15 bp, Homo sapiens
caagcattttcccct

SEQ ID NO: 90575 - DNA, 15 bp, Homo sapiens
acaagcattttcccc

SEQ ID NO: 90576 - DNA, 15 bp, Homo sapiens
gacaagcattttccc

SEQ ID NO: 90577 - DNA, 15 bp, Homo sapiens
tgacaagcattttcc

SEQ ID NO: 90578 - DNA, 15 bp, Homo sapiens
ttgacaagcattttc

SEQ ID NO: 90579 - DNA, 15 bp, Homo sapiens
tttgacaagcatttt

SEQ ID NO: 90580 - DNA, 15 bp, Homo sapiens
ttttgacaagcattt

SEQ ID NO: 90581 - DNA, 15 bp, Homo sapiens
attttgacaagcatt

SEQ ID NO: 90582 - DNA, 15 bp, Homo sapiens
cattttgacaagcat

SEQ ID NO: 90583 - DNA, 15 bp, Homo sapiens
acattttgacaagca

SEQ ID NO: 90584 - DNA, 15 bp, Homo sapiens
tacattttgacaagc

SEQ ID NO: 90585 - DNA, 15 bp, Homo sapiens
atacattttgacaag

SEQ ID NO: 90586 - DNA, 15 bp, Homo sapiens
aatacattttgacaa

SEQ ID NO: 90587 - DNA, 15 bp, Homo sapiens
caatacattttgaca

SEQ ID NO: 90588 - DNA, 15 bp, Homo sapiens
acaatacattttgac

SEQ ID NO: 90589 - DNA, 15 bp, Homo sapiens
gacaatacattttga

SEQ ID NO: 90590 - DNA, 15 bp, Homo sapiens
cgacaatacattttg

SEQ ID NO: 90591 - DNA, 15 bp, Homo sapiens
ccgacaatacatttt

SEQ ID NO: 90592 - DNA, 15 bp, Homo sapiens
cccgacaatacattt

SEQ ID NO: 90593 - DNA, 15 bp, Homo sapiens
acccgacaatacatt

SEQ ID NO: 90594 - DNA, 15 bp, Homo sapiens
tacccgacaatacat

SEQ ID NO: 90595 - DNA, 15 bp, Homo sapiens
atacccgacaataca

SEQ ID NO: 90596 - DNA, 15 bp, Homo sapiens
aatacccgacaatac

SEQ ID NO: 90597 - DNA, 15 bp, Homo sapiens
aaatacccgacaata

SEQ ID NO: 90598 - DNA, 15 bp, Homo sapiens
aaaatacccgacaat

SEQ ID NO: 90599 - DNA, 15 bp, Homo sapiens
caaaatacccgacaa

SEQ ID NO: 90600 - DNA, 15 bp, Homo sapiens
tcaaaatacccgaca

SEQ ID NO: 90601 - DNA, 15 bp, Homo sapiens
atcaaaatacccgac

SEQ ID NO: 90602 - DNA, 15 bp, Homo sapiens
aatcaaaatacccga

SEQ ID NO: 90603 - DNA, 15 bp, Homo sapiens
taatcaaaatacccg

SEQ ID NO: 90604 - DNA, 15 bp, Homo sapiens
ttaatcaaaataccc

SEQ ID NO: 90605 - DNA, 15 bp, Homo sapiens
attaatcaaaatacc

SEQ ID NO: 90606 - DNA, 15 bp, Homo sapiens
tattaatcaaaatac

SEQ ID NO: 90607 - DNA, 15 bp, Homo sapiens
ctattaatcaaaata

SEQ ID NO: 90608 - DNA, 15 bp, Homo sapiens
actattaatcaaaat

SEQ ID NO: 90609 - DNA, 15 bp, Homo sapiens
aactattaatcaaaa

SEQ ID NO: 90610 - DNA, 15 bp, Homo sapiens
aaactattaatcaaa

SEQ ID NO: 90611 - DNA, 15 bp, Homo sapiens
taaactattaatcaa

SEQ ID NO: 90612 - DNA, 15 bp, Homo sapiens
ataaactattaatca

SEQ ID NO: 90613 - DNA, 15 bp, Homo sapiens
cataaactattaatc

SEQ ID NO: 90614 - DNA, 15 bp, Homo sapiens
acataaactattaat

SEQ ID NO: 90615 - DNA, 15 bp, Homo sapiens
cacataaactattaa

SEQ ID NO: 90616 - DNA, 15 bp, Homo sapiens
ccacataaactatta

SEQ ID NO: 90617 - DNA, 15 bp, Homo sapiens
gccacataaactatt

SEQ ID NO: 90618 - DNA, 15 bp, Homo sapiens
agccacataaactat

SEQ ID NO: 90619 - DNA, 15 bp, Homo sapiens
aagccacataaacta

SEQ ID NO: 90620 - DNA, 15 bp, Homo sapiens
gaagccacataaact

SEQ ID NO: 90621 - DNA, 15 bp, Homo sapiens
tgaagccacataaac

SEQ ID NO: 90622 - DNA, 15 bp, Homo sapiens
atgaagccacataaa

SEQ ID NO: 90623 - DNA, 15 bp, Homo sapiens
aatgaagccacataa

SEQ ID NO: 90624 - DNA, 15 bp, Homo sapiens
taatgaagccacata

SEQ ID NO: 90625 - DNA, 15 bp, Homo sapiens
ttaatgaagccacat

SEQ ID NO: 90626 - DNA, 15 bp, Homo sapiens
attaatgaagccaca

SEQ ID NO: 90627 - DNA, 15 bp, Homo sapiens
aattaatgaagccac

SEQ ID NO: 90628 - DNA, 15 bp, Homo sapiens
gaattaatgaagcca

SEQ ID NO: 90629 - DNA, 15 bp, Homo sapiens
tgaattaatgaagcc

SEQ ID NO: 90630 - DNA, 15 bp, Homo sapiens
ctgaattaatgaagc

SEQ ID NO: 90631 - DNA, 15 bp, Homo sapiens
tctgaattaatgaag

SEQ ID NO: 90632 - DNA, 15 bp, Homo sapiens
ctctgaattaatgaa

SEQ ID NO: 90633 - DNA, 15 bp, Homo sapiens
actctgaattaatga

SEQ ID NO: 90634 - DNA, 15 bp, Homo sapiens
aactctgaattaatg

SEQ ID NO: 90635 - DNA, 15 bp, Homo sapiens
taactctgaattaat

SEQ ID NO: 90636 - DNA, 15 bp, Homo sapiens
gtaactctgaattaa

SEQ ID NO: 90637 - DNA, 15 bp, Homo sapiens
agtaactctgaatta

SEQ ID NO: 90638 - DNA, 15 bp, Homo sapiens
gagtaactctgaatt

SEQ ID NO: 90639 - DNA, 15 bp, Homo sapiens
agagtaactctgaat

SEQ ID NO: 90640 - DNA, 15 bp, Homo sapiens
gagagtaactctgaa

SEQ ID NO: 90641 - DNA, 15 bp, Homo sapiens
ggagagtaactctga

SEQ ID NO: 90642 - DNA, 15 bp, Homo sapiens
tggagagtaactctg

SEQ ID NO: 90643 - DNA, 15 bp, Homo sapiens
ttggagagtaactct

SEQ ID NO: 90644 - DNA, 15 bp, Homo sapiens
attggagagtaactc

SEQ ID NO: 90645 - DNA, 15 bp, Homo sapiens
tattggagagtaact

SEQ ID NO: 90646 - DNA, 15 bp, Homo sapiens
atattggagagtaac

SEQ ID NO: 90647 - DNA, 15 bp, Homo sapiens
catattggagagtaa

SEQ ID NO: 90648 - DNA, 15 bp, Homo sapiens
acatattggagagta

SEQ ID NO: 90649 - DNA, 15 bp, Homo sapiens
aacatattggagagt

SEQ ID NO: 90650 - DNA, 15 bp, Homo sapiens
aaacatattggagag

SEQ ID NO: 90651 - DNA, 15 bp, Homo sapiens
taaacatattggaga

SEQ ID NO: 90652 - DNA, 15 bp, Homo sapiens
ataaacatattggag

SEQ ID NO: 90653 - DNA, 15 bp, Homo sapiens
gataaacatattgga

SEQ ID NO: 90654 - DNA, 15 bp, Homo sapiens
agataaacatattgg

SEQ ID NO: 90655 - DNA, 15 bp, Homo sapiens
cagataaacatattg

SEQ ID NO: 90656 - DNA, 15 bp, Homo sapiens
gcagataaacatatt

SEQ ID NO: 90657 - DNA, 15 bp, Homo sapiens
ggcagataaacatat

SEQ ID NO: 90658 - DNA, 15 bp, Homo sapiens
gggcagataaacata

SEQ ID NO: 90659 - DNA, 15 bp, Homo sapiens
agggcagataaacat

SEQ ID NO: 90660 - DNA, 15 bp, Homo sapiens
aagggcagataaaca

SEQ ID NO: 90661 - DNA, 15 bp, Homo sapiens
aaagggcagataaac

SEQ ID NO: 90662 - DNA, 15 bp, Homo sapiens
gaaagggcagataaa

SEQ ID NO: 90663 - DNA, 15 bp, Homo sapiens
agaaagggcagataa

SEQ ID NO: 90664 - DNA, 15 bp, Homo sapiens
aagaaagggcagata

SEQ ID NO: 90665 - DNA, 15 bp, Homo sapiens
caagaaagggcagat

SEQ ID NO: 90666 - DNA, 15 bp, Homo sapiens
acaagaaagggcaga

SEQ ID NO: 90667 - DNA, 15 bp, Homo sapiens
gacaagaaagggcag

SEQ ID NO: 90668 - DNA, 15 bp, Homo sapiens
agacaagaaagggca

SEQ ID NO: 90669 - DNA, 15 bp, Homo sapiens
cagacaagaaagggc

SEQ ID NO: 90670 - DNA, 15 bp, Homo sapiens
tcagacaagaaaggg

SEQ ID NO: 90671 - DNA, 15 bp, Homo sapiens
atcagacaagaaagg

SEQ ID NO: 90672 - DNA, 15 bp, Homo sapiens
tatcagacaagaaag

SEQ ID NO: 90673 - DNA, 15 bp, Homo sapiens
ttatcagacaagaaa

SEQ ID NO: 90674 - DNA, 15 bp, Homo sapiens
attatcagacaagaa

SEQ ID NO: 90675 - DNA, 15 bp, Homo sapiens
cattatcagacaaga

SEQ ID NO: 90676 - DNA, 15 bp, Homo sapiens
ccattatcagacaag

SEQ ID NO: 90677 - DNA, 15 bp, Homo sapiens
accattatcagacaa

SEQ ID NO: 90678 - DNA, 15 bp, Homo sapiens
caccattatcagaca

SEQ ID NO: 90679 - DNA, 15 bp, Homo sapiens
tcaccattatcagac

SEQ ID NO: 90680 - DNA, 15 bp, Homo sapiens
ttcaccattatcaga

SEQ ID NO: 90681 - DNA, 15 bp, Homo sapiens
tttcaccattatcag

SEQ ID NO: 90682 - DNA, 15 bp, Homo sapiens
ttttcaccattatca

SEQ ID NO: 90683 - DNA, 15 bp, Homo sapiens
gttttcaccattatc

SEQ ID NO: 90684 - DNA, 15 bp, Homo sapiens
agttttcaccattat

SEQ ID NO: 90685 - DNA, 15 bp, Homo sapiens
aagttttcaccatta

SEQ ID NO: 90686 - DNA, 15 bp, Homo sapiens
caagttttcaccatt

SEQ ID NO: 90687 - DNA, 15 bp, Homo sapiens
acaagttttcaccat

SEQ ID NO: 90688 - DNA, 15 bp, Homo sapiens
cacaagttttcacca

SEQ ID NO: 90689 - DNA, 15 bp, Homo sapiens
acacaagttttcacc

SEQ ID NO: 90690 - DNA, 15 bp, Homo sapiens
cacacaagttttcac

SEQ ID NO: 90691 - DNA, 15 bp, Homo sapiens
tcacacaagttttca

SEQ ID NO: 90692 - DNA, 15 bp, Homo sapiens
atcacacaagttttc

SEQ ID NO: 90693 - DNA, 15 bp, Homo sapiens
catcacacaagtttt

SEQ ID NO: 90694 - DNA, 15 bp, Homo sapiens
gcatcacacaagttt

SEQ ID NO: 90695 - DNA, 15 bp, Homo sapiens
tgcatcacacaagtt

SEQ ID NO: 90696 - DNA, 15 bp, Homo sapiens
atgcatcacacaagt

SEQ ID NO: 90697 - DNA, 15 bp, Homo sapiens
aatgcatcacacaag

SEQ ID NO: 90698 - DNA, 15 bp, Homo sapiens
caatgcatcacacaa

SEQ ID NO: 90699 - DNA, 15 bp, Homo sapiens
acaatgcatcacaca

SEQ ID NO: 90700 - DNA, 15 bp, Homo sapiens
tacaatgcatcacac

SEQ ID NO: 90701 - DNA, 15 bp, Homo sapiens
atacaatgcatcaca

SEQ ID NO: 90702 - DNA, 15 bp, Homo sapiens
tatacaatgcatcac

SEQ ID NO: 90703 - DNA, 15 bp, Homo sapiens
atatacaatgcatca

SEQ ID NO: 90704 - DNA, 15 bp, Homo sapiens
aatatacaatgcatc

SEQ ID NO: 90705 - DNA, 15 bp, Homo sapiens
aaatatacaatgcat

SEQ ID NO: 90706 - DNA, 15 bp, Homo sapiens
caaatatacaatgca

SEQ ID NO: 90707 - DNA, 15 bp, Homo sapiens
tcaaatatacaatgc

SEQ ID NO: 90708 - DNA, 15 bp, Homo sapiens
atcaaatatacaatg

SEQ ID NO: 90709 - DNA, 15 bp, Homo sapiens
aatcaaatatacaat

SEQ ID NO: 90710 - DNA, 15 bp, Homo sapiens
aaatcaaatatacaa

SEQ ID NO: 90711 - DNA, 15 bp, Homo sapiens
taaatcaaatataca

SEQ ID NO: 90712 - DNA, 15 bp, Homo sapiens
ctaaatcaaatatac

SEQ ID NO: 90713 - DNA, 15 bp, Homo sapiens
cctaaatcaaatata

SEQ ID NO: 90714 - DNA, 15 bp, Homo sapiens
ccctaaatcaaatat

SEQ ID NO: 90715 - DNA, 15 bp, Homo sapiens
cccctaaatcaaata

SEQ ID NO: 90716 - DNA, 15 bp, Homo sapiens
acccctaaatcaaat

SEQ ID NO: 90717 - DNA, 15 bp, Homo sapiens
cacccctaaatcaaa

SEQ ID NO: 90718 - DNA, 15 bp, Homo sapiens
tcacccctaaatcaa

SEQ ID NO: 90719 - DNA, 15 bp, Homo sapiens
ttcacccctaaatca

SEQ ID NO: 90720 - DNA, 15 bp, Homo sapiens
gttcacccctaaatc

SEQ ID NO: 90721 - DNA, 15 bp, Homo sapiens
agttcacccctaaat

SEQ ID NO: 90722 - DNA, 15 bp, Homo sapiens
cagttcacccctaaa

SEQ ID NO: 90723 - DNA, 15 bp, Homo sapiens
ccagttcacccctaa

SEQ ID NO: 90724 - DNA, 15 bp, Homo sapiens
tccagttcaccccta

SEQ ID NO: 90725 - DNA, 15 bp, Homo sapiens
atccagttcacccct

SEQ ID NO: 90726 - DNA, 15 bp, Homo sapiens
catccagttcacccc

SEQ ID NO: 90727 - DNA, 15 bp, Homo sapiens
acatccagttcaccc

SEQ ID NO: 90728 - DNA, 15 bp, Homo sapiens
gacatccagttcacc

SEQ ID NO: 90729 - DNA, 15 bp, Homo sapiens
agacatccagttcac

SEQ ID NO: 90730 - DNA, 15 bp, Homo sapiens
aagacatccagttca

SEQ ID NO: 90731 - DNA, 15 bp, Homo sapiens
aaagacatccagttc

SEQ ID NO: 90732 - DNA, 15 bp, Homo sapiens
caaagacatccagtt

SEQ ID NO: 90733 - DNA, 15 bp, Homo sapiens
acaaagacatccagt

SEQ ID NO: 90734 - DNA, 15 bp, Homo sapiens
aacaaagacatccag

SEQ ID NO: 90735 - DNA, 15 bp, Homo sapiens
aaacaaagacatcca

SEQ ID NO: 90736 - DNA, 15 bp, Homo sapiens
aaaacaaagacatcc

SEQ ID NO: 90737 - DNA, 15 bp, Homo sapiens
gaaaacaaagacatc

SEQ ID NO: 90738 - DNA, 15 bp, Homo sapiens
tgaaaacaaagacat

SEQ ID NO: 90739 - DNA, 15 bp, Homo sapiens
gtgaaaacaaagaca

SEQ ID NO: 90740 - DNA, 15 bp, Homo sapiens
agtgaaaacaaagac

SEQ ID NO: 90741 - DNA, 15 bp, Homo sapiens
aagtgaaaacaaaga

SEQ ID NO: 90742 - DNA, 15 bp, Homo sapiens
aaagtgaaaacaaag

SEQ ID NO: 90743 - DNA, 15 bp, Homo sapiens
aaaagtgaaaacaaa

SEQ ID NO: 90744 - DNA, 15 bp, Homo sapiens
taaaagtgaaaacaa

SEQ ID NO: 90745 - DNA, 15 bp, Homo sapiens
ctaaaagtgaaaaca

SEQ ID NO: 90746 - DNA, 15 bp, Homo sapiens
actaaaagtgaaaac

SEQ ID NO: 90747 - DNA, 15 bp, Homo sapiens
cactaaaagtgaaaa

SEQ ID NO: 90748 - DNA, 15 bp, Homo sapiens
gcactaaaagtgaaa

SEQ ID NO: 90749 - DNA, 15 bp, Homo sapiens
tgcactaaaagtgaa

SEQ ID NO: 90750 - DNA, 15 bp, Homo sapiens
ttgcactaaaagtga

SEQ ID NO: 90751 - DNA, 15 bp, Homo sapiens
attgcactaaaagtg

SEQ ID NO: 90752 - DNA, 15 bp, Homo sapiens
aattgcactaaaagt

SEQ ID NO: 90753 - DNA, 15 bp, Homo sapiens
taattgcactaaaag

SEQ ID NO: 90754 - DNA, 15 bp, Homo sapiens
gtaattgcactaaaa

SEQ ID NO: 90755 - DNA, 15 bp, Homo sapiens
cgtaattgcactaaa

SEQ ID NO: 90756 - DNA, 15 bp, Homo sapiens
acgtaattgcactaa

SEQ ID NO: 90757 - DNA, 15 bp, Homo sapiens
aacgtaattgcacta

SEQ ID NO: 90758 - DNA, 15 bp, Homo sapiens
caacgtaattgcact

SEQ ID NO: 90759 - DNA, 15 bp, Homo sapiens
acaacgtaattgcac

SEQ ID NO: 90760 - DNA, 15 bp, Homo sapiens
gacaacgtaattgca

SEQ ID NO: 90761 - DNA, 15 bp, Homo sapiens
ggacaacgtaattgc

SEQ ID NO: 90762 - DNA, 15 bp, Homo sapiens
gggacaacgtaattg

SEQ ID NO: 90763 - DNA, 15 bp, Homo sapiens
agggacaacgtaatt

SEQ ID NO: 90764 - DNA, 15 bp, Homo sapiens
cagggacaacgtaat

SEQ ID NO: 90765 - DNA, 15 bp, Homo sapiens
gcagggacaacgtaa

SEQ ID NO: 90766 - DNA, 15 bp, Homo sapiens
ggcagggacaacgta

SEQ ID NO: 90767 - DNA, 15 bp, Homo sapiens
tggcagggacaacgt

SEQ ID NO: 90768 - DNA, 15 bp, Homo sapiens
gtggcagggacaacg

SEQ ID NO: 90769 - DNA, 15 bp, Homo sapiens
tgtggcagggacaac

SEQ ID NO: 90770 - DNA, 15 bp, Homo sapiens
gtgtggcagggacaa

SEQ ID NO: 90771 - DNA, 15 bp, Homo sapiens
agtgtggcagggaca

SEQ ID NO: 90772 - DNA, 15 bp, Homo sapiens
cagtgtggcagggac

SEQ ID NO: 90773 - DNA, 15 bp, Homo sapiens
ccagtgtggcaggga

SEQ ID NO: 90774 - DNA, 15 bp, Homo sapiens
accagtgtggcaggg

SEQ ID NO: 90775 - DNA, 15 bp, Homo sapiens
gaccagtgtggcagg

SEQ ID NO: 90776 - DNA, 15 bp, Homo sapiens
tgaccagtgtggcag

SEQ ID NO: 90777 - DNA, 15 bp, Homo sapiens
atgaccagtgtggca

SEQ ID NO: 90778 - DNA, 15 bp, Homo sapiens
aatgaccagtgtggc

SEQ ID NO: 90779 - DNA, 15 bp, Homo sapiens
taatgaccagtgtgg

SEQ ID NO: 90780 - DNA, 15 bp, Homo sapiens
ataatgaccagtgtg

SEQ ID NO: 90781 - DNA, 15 bp, Homo sapiens
gataatgaccagtgt

SEQ ID NO: 90782 - DNA, 15 bp, Homo sapiens
tgataatgaccagtg

SEQ ID NO: 90783 - DNA, 15 bp, Homo sapiens
atgataatgaccagt

SEQ ID NO: 90784 - DNA, 15 bp, Homo sapiens
gatgataatgaccag

SEQ ID NO: 90785 - DNA, 15 bp, Homo sapiens
agatgataatgacca

SEQ ID NO: 90786 - DNA, 15 bp, Homo sapiens
aagatgataatgacc

SEQ ID NO: 90787 - DNA, 15 bp, Homo sapiens
gaagatgataatgac

SEQ ID NO: 90788 - DNA, 15 bp, Homo sapiens
tgaagatgataatga

SEQ ID NO: 90789 - DNA, 15 bp, Homo sapiens
atgaagatgataatg

SEQ ID NO: 90790 - DNA, 15 bp, Homo sapiens
gatgaagatgataat

SEQ ID NO: 90791 - DNA, 15 bp, Homo sapiens
agatgaagatgataa

SEQ ID NO: 90792 - DNA, 15 bp, Homo sapiens
cagatgaagatgata

SEQ ID NO: 90793 - DNA, 15 bp, Homo sapiens
gcagatgaagatgat

SEQ ID NO: 90794 - DNA, 15 bp, Homo sapiens
agcagatgaagatga

SEQ ID NO: 90795 - DNA, 15 bp, Homo sapiens
aagcagatgaagatg

SEQ ID NO: 90796 - DNA, 15 bp, Homo sapiens
gaagcagatgaagat

SEQ ID NO: 90797 - DNA, 15 bp, Homo sapiens
ggaagcagatgaaga

SEQ ID NO: 90798 - DNA, 15 bp, Homo sapiens
tggaagcagatgaag

SEQ ID NO: 90799 - DNA, 15 bp, Homo sapiens
ctggaagcagatgaa

SEQ ID NO: 90800 - DNA, 15 bp, Homo sapiens
gctggaagcagatga

SEQ ID NO: 90801 - DNA, 15 bp, Homo sapiens
tgctggaagcagatg

SEQ ID NO: 90802 - DNA, 15 bp, Homo sapiens
ctgctggaagcagat

SEQ ID NO: 90803 - DNA, 15 bp, Homo sapiens
tctgctggaagcaga

SEQ ID NO: 90804 - DNA, 15 bp, Homo sapiens
ttctgctggaagcag

SEQ ID NO: 90805 - DNA, 15 bp, Homo sapiens
cttctgctggaagca

SEQ ID NO: 90806 - DNA, 15 bp, Homo sapiens
acttctgctggaagc

SEQ ID NO: 90807 - DNA, 15 bp, Homo sapiens
gacttctgctggaag

SEQ ID NO: 90808 - DNA, 15 bp, Homo sapiens
ggacttctgctggaa

SEQ ID NO: 90809 - DNA, 15 bp, Homo sapiens
aggacttctgctgga

SEQ ID NO: 90810 - DNA, 15 bp, Homo sapiens
taggacttctgctgg

SEQ ID NO: 90811 - DNA, 15 bp, Homo sapiens
ataggacttctgctg

SEQ ID NO: 90812 - DNA, 15 bp, Homo sapiens
cataggacttctgct

SEQ ID NO: 90813 - DNA, 15 bp, Homo sapiens
acataggacttctgc

SEQ ID NO: 90814 - DNA, 15 bp, Homo sapiens
cacataggacttctg

SEQ ID NO: 90815 - DNA, 15 bp, Homo sapiens
acacataggacttct

SEQ ID NO: 90816 - DNA, 15 bp, Homo sapiens
gacacataggacttc

SEQ ID NO: 90817 - DNA, 15 bp, Homo sapiens
ggacacataggactt

SEQ ID NO: 90818 - DNA, 15 bp, Homo sapiens
aggacacataggact

SEQ ID NO: 90819 - DNA, 15 bp, Homo sapiens
gaggacacataggac

SEQ ID NO: 90820 - DNA, 15 bp, Homo sapiens
ggaggacacatagga

SEQ ID NO: 90821 - DNA, 15 bp, Homo sapiens
tggaggacacatagg

SEQ ID NO: 90822 - DNA, 15 bp, Homo sapiens
gtggaggacacatag

SEQ ID NO: 90823 - DNA, 15 bp, Homo sapiens
ggtggaggacacata

SEQ ID NO: 90824 - DNA, 15 bp, Homo sapiens
tggtggaggacacat

SEQ ID NO: 90825 - DNA, 15 bp, Homo sapiens
ttggtggaggacaca

SEQ ID NO: 90826 - DNA, 15 bp, Homo sapiens
attggtggaggacac

SEQ ID NO: 90827 - DNA, 15 bp, Homo sapiens
gattggtggaggaca

SEQ ID NO: 90828 - DNA, 15 bp, Homo sapiens
agattggtggaggac

SEQ ID NO: 90829 - DNA, 15 bp, Homo sapiens
cagattggtggagga

SEQ ID NO: 90830 - DNA, 15 bp, Homo sapiens
gcagattggtggagg

SEQ ID NO: 90831 - DNA, 15 bp, Homo sapiens
ggcagattggtggag

SEQ ID NO: 90832 - DNA, 15 bp, Homo sapiens
aggcagattggtgga

SEQ ID NO: 90833 - DNA, 15 bp, Homo sapiens
caggcagattggtgg

SEQ ID NO: 90834 - DNA, 15 bp, Homo sapiens
acaggcagattggtg

SEQ ID NO: 90835 - DNA, 15 bp, Homo sapiens
cacaggcagattggt

SEQ ID NO: 90836 - DNA, 15 bp, Homo sapiens
gcacaggcagattgg

SEQ ID NO: 90837 - DNA, 15 bp, Homo sapiens
agcacaggcagattg

SEQ ID NO: 90838 - DNA, 15 bp, Homo sapiens
tagcacaggcagatt

SEQ ID NO: 90839 - DNA, 15 bp, Homo sapiens
ctagcacaggcagat

SEQ ID NO: 90840 - DNA, 15 bp, Homo sapiens
gctagcacaggcaga

SEQ ID NO: 90841 - DNA, 15 bp, Homo sapiens
ggctagcacaggcag

SEQ ID NO: 90842 - DNA, 15 bp, Homo sapiens
gggctagcacaggca

SEQ ID NO: 90843 - DNA, 15 bp, Homo sapiens
agggctagcacaggc

SEQ ID NO: 90844 - DNA, 15 bp, Homo sapiens
aagggctagcacagg

SEQ ID NO: 90845 - DNA, 15 bp, Homo sapiens
gaagggctagcacag

SEQ ID NO: 90846 - DNA, 15 bp, Homo sapiens
agaagggctagcaca

SEQ ID NO: 90847 - DNA, 15 bp, Homo sapiens
tagaagggctagcac

SEQ ID NO: 90848 - DNA, 15 bp, Homo sapiens
gtagaagggctagca

SEQ ID NO: 90849 - DNA, 15 bp, Homo sapiens
agtagaagggctagc

SEQ ID NO: 90850 - DNA, 15 bp, Homo sapiens
aagtagaagggctag

SEQ ID NO: 90851 - DNA, 15 bp, Homo sapiens
aaagtagaagggcta

SEQ ID NO: 90852 - DNA, 15 bp, Homo sapiens
aaaagtagaagggct

SEQ ID NO: 90853 - DNA, 15 bp, Homo sapiens
caaaagtagaagggc

SEQ ID NO: 90854 - DNA, 15 bp, Homo sapiens
gcaaaagtagaaggg

SEQ ID NO: 90855 - DNA, 15 bp, Homo sapiens
agcaaaagtagaagg

SEQ ID NO: 90856 - DNA, 15 bp, Homo sapiens
cagcaaaagtagaag

SEQ ID NO: 90857 - DNA, 15 bp, Homo sapiens
acagcaaaagtagaa

SEQ ID NO: 90858 - DNA, 15 bp, Homo sapiens
tacagcaaaagtaga

SEQ ID NO: 90859 - DNA, 15 bp, Homo sapiens
atacagcaaaagtag

SEQ ID NO: 90860 - DNA, 15 bp, Homo sapiens
catacagcaaaagta

SEQ ID NO: 90861 - DNA, 15 bp, Homo sapiens
ccatacagcaaaagt

SEQ ID NO: 90862 - DNA, 15 bp, Homo sapiens
cccatacagcaaaag

SEQ ID NO: 90863 - DNA, 15 bp, Homo sapiens
acccatacagcaaaa

SEQ ID NO: 90864 - DNA, 15 bp, Homo sapiens
tacccatacagcaaa

SEQ ID NO: 90865 - DNA, 15 bp, Homo sapiens
ttacccatacagcaa

SEQ ID NO: 90866 - DNA, 15 bp, Homo sapiens
cttacccatacagca

SEQ ID NO: 90867 - DNA, 15 bp, Homo sapiens
acttacccatacagc

SEQ ID NO: 90868 - DNA, 15 bp, Homo sapiens
gacttacccatacag

SEQ ID NO: 90869 - DNA, 15 bp, Homo sapiens
tgacttacccataca

SEQ ID NO: 90870 - DNA, 15 bp, Homo sapiens
gtgacttacccatac

SEQ ID NO: 90871 - DNA, 15 bp, Homo sapiens
ggtgacttacccata

SEQ ID NO: 90872 - DNA, 15 bp, Homo sapiens
aggtgacttacccat

SEQ ID NO: 90873 - DNA, 15 bp, Homo sapiens
gaggtgacttaccca

SEQ ID NO: 90874 - DNA, 15 bp, Homo sapiens
agaggtgacttaccc

SEQ ID NO: 90875 - DNA, 15 bp, Homo sapiens
cagaggtgacttacc

SEQ ID NO: 90876 - DNA, 15 bp, Homo sapiens
tcagaggtgacttac

SEQ ID NO: 90877 - DNA, 15 bp, Homo sapiens
ctcagaggtgactta

SEQ ID NO: 90878 - DNA, 15 bp, Homo sapiens
actcagaggtgactt

SEQ ID NO: 90879 - DNA, 15 bp, Homo sapiens
cactcagaggtgact

SEQ ID NO: 90880 - DNA, 15 bp, Homo sapiens
tcactcagaggtgac

SEQ ID NO: 90881 - DNA, 15 bp, Homo sapiens
ctcactcagaggtga

SEQ ID NO: 90882 - DNA, 15 bp, Homo sapiens
cctcactcagaggtg

SEQ ID NO: 90883 - DNA, 15 bp, Homo sapiens
ccctcactcagaggt

SEQ ID NO: 90884 - DNA, 15 bp, Homo sapiens
tccctcactcagagg

SEQ ID NO: 90885 - DNA, 15 bp, Homo sapiens
ctccctcactcagag

SEQ ID NO: 90886 - DNA, 15 bp, Homo sapiens
gctccctcactcaga

SEQ ID NO: 90887 - DNA, 15 bp, Homo sapiens
agctccctcactcag

SEQ ID NO: 90888 - DNA, 15 bp, Homo sapiens
cagctccctcactca

SEQ ID NO: 90889 - DNA, 15 bp, Homo sapiens
gcagctccctcactc

SEQ ID NO: 90890 - DNA, 15 bp, Homo sapiens
tgcagctccctcact

SEQ ID NO: 90891 - DNA, 15 bp, Homo sapiens
gtgcagctccctcac

SEQ ID NO: 90892 - DNA, 15 bp, Homo sapiens
tgtgcagctccctca

SEQ ID NO: 90893 - DNA, 15 bp, Homo sapiens
ctgtgcagctccctc

SEQ ID NO: 90894 - DNA, 15 bp, Homo sapiens
actgtgcagctccct

SEQ ID NO: 90895 - DNA, 15 bp, Homo sapiens
cactgtgcagctccc

SEQ ID NO: 90896 - DNA, 15 bp, Homo sapiens
ccactgtgcagctcc

SEQ ID NO: 90897 - DNA, 15 bp, Homo sapiens
tccactgtgcagctc

SEQ ID NO: 90898 - DNA, 15 bp, Homo sapiens
atccactgtgcagct

SEQ ID NO: 90899 - DNA, 15 bp, Homo sapiens
tatccactgtgcagc

SEQ ID NO: 90900 - DNA, 15 bp, Homo sapiens
ttatccactgtgcag

SEQ ID NO: 90901 - DNA, 15 bp, Homo sapiens
cttatccactgtgca

SEQ ID NO: 90902 - DNA, 15 bp, Homo sapiens
ccttatccactgtgc

SEQ ID NO: 90903 - DNA, 15 bp, Homo sapiens
gccttatccactgtg

SEQ ID NO: 90904 - DNA, 15 bp, Homo sapiens
tgccttatccactgt

SEQ ID NO: 90905 - DNA, 15 bp, Homo sapiens
atgccttatccactg

SEQ ID NO: 90906 - DNA, 15 bp, Homo sapiens
aatgccttatccact

SEQ ID NO: 90907 - DNA, 15 bp, Homo sapiens
aaatgccttatccac

SEQ ID NO: 90908 - DNA, 15 bp, Homo sapiens
caaatgccttatcca

SEQ ID NO: 90909 - DNA, 15 bp, Homo sapiens
ccaaatgccttatcc

SEQ ID NO: 90910 - DNA, 15 bp, Homo sapiens
accaaatgccttatc

SEQ ID NO: 90911 - DNA, 15 bp, Homo sapiens
caccaaatgccttat

SEQ ID NO: 90912 - DNA, 15 bp, Homo sapiens
gcaccaaatgcctta

SEQ ID NO: 90913 - DNA, 15 bp, Homo sapiens
ggcaccaaatgcctt

SEQ ID NO: 90914 - DNA, 15 bp, Homo sapiens
gggcaccaaatgcct

SEQ ID NO: 90915 - DNA, 15 bp, Homo sapiens
tgggcaccaaatgcc

SEQ ID NO: 90916 - DNA, 15 bp, Homo sapiens
ctgggcaccaaatgc

SEQ ID NO: 90917 - DNA, 15 bp, Homo sapiens
actgggcaccaaatg

SEQ ID NO: 90918 - DNA, 15 bp, Homo sapiens
cactgggcaccaaat

SEQ ID NO: 90919 - DNA, 15 bp, Homo sapiens
acactgggcaccaaa

SEQ ID NO: 90920 - DNA, 15 bp, Homo sapiens
gacactgggcaccaa

SEQ ID NO: 90921 - DNA, 15 bp, Homo sapiens
tgacactgggcacca

SEQ ID NO: 90922 - DNA, 15 bp, Homo sapiens
ctgacactgggcacc

SEQ ID NO: 90923 - DNA, 15 bp, Homo sapiens
tctgacactgggcac

SEQ ID NO: 90924 - DNA, 15 bp, Homo sapiens
ttctgacactgggca

SEQ ID NO: 90925 - DNA, 15 bp, Homo sapiens
cttctgacactgggc

SEQ ID NO: 90926 - DNA, 15 bp, Homo sapiens
ccttctgacactggg

SEQ ID NO: 90927 - DNA, 15 bp, Homo sapiens
tccttctgacactgg

SEQ ID NO: 90928 - DNA, 15 bp, Homo sapiens
ctccttctgacactg

SEQ ID NO: 90929 - DNA, 15 bp, Homo sapiens
cctccttctgacact

SEQ ID NO: 90930 - DNA, 15 bp, Homo sapiens
ccctccttctgacac

SEQ ID NO: 90931 - DNA, 15 bp, Homo sapiens
gccctccttctgaca

SEQ ID NO: 90932 - DNA, 15 bp, Homo sapiens
tgccctccttctgac

SEQ ID NO: 90933 - DNA, 15 bp, Homo sapiens
ctgccctccttctga

SEQ ID NO: 90934 - DNA, 15 bp, Homo sapiens
cctgccctccttctg

SEQ ID NO: 90935 - DNA, 15 bp, Homo sapiens
ccctgccctccttct

SEQ ID NO: 90936 - DNA, 15 bp, Homo sapiens
tccctgccctccttc

SEQ ID NO: 90937 - DNA, 15 bp, Homo sapiens
gtccctgccctcctt

SEQ ID NO: 90938 - DNA, 15 bp, Homo sapiens
agtccctgccctcct

SEQ ID NO: 90939 - DNA, 15 bp, Homo sapiens
gagtccctgccctcc

SEQ ID NO: 90940 - DNA, 15 bp, Homo sapiens
agagtccctgccctc

SEQ ID NO: 90941 - DNA, 15 bp, Homo sapiens
gagagtccctgccct

SEQ ID NO: 90942 - DNA, 15 bp, Homo sapiens
tgagagtccctgccc

SEQ ID NO: 90943 - DNA, 15 bp, Homo sapiens
ctgagagtccctgcc

SEQ ID NO: 90944 - DNA, 15 bp, Homo sapiens
actgagagtccctgc

SEQ ID NO: 90945 - DNA, 15 bp, Homo sapiens
tactgagagtccctg

SEQ ID NO: 90946 - DNA, 15 bp, Homo sapiens
ctactgagagtccct

SEQ ID NO: 90947 - DNA, 15 bp, Homo sapiens
tctactgagagtccc

SEQ ID NO: 90948 - DNA, 15 bp, Homo sapiens
gtctactgagagtcc

SEQ ID NO: 90949 - DNA, 15 bp, Homo sapiens
tgtctactgagagtc

SEQ ID NO: 90950 - DNA, 15 bp, Homo sapiens
gtgtctactgagagt

SEQ ID NO: 90951 - DNA, 15 bp, Homo sapiens
agtgtctactgagag

SEQ ID NO: 90952 - DNA, 15 bp, Homo sapiens
aagtgtctactgaga

SEQ ID NO: 90953 - DNA, 15 bp, Homo sapiens
taagtgtctactgag

SEQ ID NO: 90954 - DNA, 15 bp, Homo sapiens
ataagtgtctactga

SEQ ID NO: 90955 - DNA, 15 bp, Homo sapiens
gataagtgtctactg

SEQ ID NO: 90956 - DNA, 15 bp, Homo sapiens
agataagtgtctact

SEQ ID NO: 90957 - DNA, 15 bp, Homo sapiens
aagataagtgtctac

SEQ ID NO: 90958 - DNA, 15 bp, Homo sapiens
aaagataagtgtcta

SEQ ID NO: 90959 - DNA, 15 bp, Homo sapiens
aaaagataagtgtct

SEQ ID NO: 90960 - DNA, 15 bp, Homo sapiens
aaaaagataagtgtc

SEQ ID NO: 90961 - DNA, 15 bp, Homo sapiens
caaaaagataagtgt

SEQ ID NO: 90962 - DNA, 15 bp, Homo sapiens
acaaaaagataagtg

SEQ ID NO: 90963 - DNA, 15 bp, Homo sapiens
cacaaaaagataagt

SEQ ID NO: 90964 - DNA, 15 bp, Homo sapiens
acacaaaaagataag

SEQ ID NO: 90965 - DNA, 15 bp, Homo sapiens
gacacaaaaagataa

SEQ ID NO: 90966 - DNA, 15 bp, Homo sapiens
agacacaaaaagata

SEQ ID NO: 90967 - DNA, 15 bp, Homo sapiens
gagacacaaaaagat

SEQ ID NO: 90968 - DNA, 15 bp, Homo sapiens
tgagacacaaaaaga

SEQ ID NO: 90969 - DNA, 15 bp, Homo sapiens
ttgagacacaaaaag

SEQ ID NO: 90970 - DNA, 15 bp, Homo sapiens
gttgagacacaaaaa

SEQ ID NO: 90971 - DNA, 15 bp, Homo sapiens
tgttgagacacaaaa

SEQ ID NO: 90972 - DNA, 15 bp, Homo sapiens
ctgttgagacacaaa

SEQ ID NO: 90973 - DNA, 15 bp, Homo sapiens
cctgttgagacacaa

SEQ ID NO: 90974 - DNA, 15 bp, Homo sapiens
acctgttgagacaca

SEQ ID NO: 90975 - DNA, 15 bp, Homo sapiens
cacctgttgagacac

SEQ ID NO: 90976 - DNA, 15 bp, Homo sapiens
ccacctgttgagaca

SEQ ID NO: 90977 - DNA, 15 bp, Homo sapiens
accacctgttgagac

SEQ ID NO: 90978 - DNA, 15 bp, Homo sapiens
gaccacctgttgaga

SEQ ID NO: 90979 - DNA, 15 bp, Homo sapiens
tgaccacctgttgag

SEQ ID NO: 90980 - DNA, 15 bp, Homo sapiens
ttgaccacctgttga

SEQ ID NO: 90981 - DNA, 15 bp, Homo sapiens
attgaccacctgttg

SEQ ID NO: 90982 - DNA, 15 bp, Homo sapiens
gattgaccacctgtt

SEQ ID NO: 90983 - DNA, 15 bp, Homo sapiens
tgattgaccacctgt

SEQ ID NO: 90984 - DNA, 15 bp, Homo sapiens
gtgattgaccacctg

SEQ ID NO: 90985 - DNA, 15 bp, Homo sapiens
tgtgattgaccacct

SEQ ID NO: 90986 - DNA, 15 bp, Homo sapiens
gtgtgattgaccacc

SEQ ID NO: 90987 - DNA, 15 bp, Homo sapiens
ggtgtgattgaccac

SEQ ID NO: 90988 - DNA, 15 bp, Homo sapiens
aggtgtgattgacca

SEQ ID NO: 90989 - DNA, 15 bp, Homo sapiens
gaggtgtgattgacc

SEQ ID NO: 90990 - DNA, 15 bp, Homo sapiens
agaggtgtgattgac

SEQ ID NO: 90991 - DNA, 15 bp, Homo sapiens
gagaggtgtgattga

SEQ ID NO: 90992 - DNA, 15 bp, Homo sapiens
tgagaggtgtgattg

SEQ ID NO: 90993 - DNA, 15 bp, Homo sapiens
atgagaggtgtgatt

SEQ ID NO: 90994 - DNA, 15 bp, Homo sapiens
catgagaggtgtgat

SEQ ID NO: 90995 - DNA, 15 bp, Homo sapiens
acatgagaggtgtga

SEQ ID NO: 90996 - DNA, 15 bp, Homo sapiens
tacatgagaggtgtg

SEQ ID NO: 90997 - DNA, 15 bp, Homo sapiens
gtacatgagaggtgt

SEQ ID NO: 90998 - DNA, 15 bp, Homo sapiens
ggtacatgagaggtg

SEQ ID NO: 90999 - DNA, 15 bp, Homo sapiens
gggtacatgagaggt

SEQ ID NO: 91000 - DNA, 15 bp, Homo sapiens
ctgggtacatgagag

SEQ ID NO: 91001 - DNA, 15 bp, Homo sapiens
gctgggtacatgaga

SEQ ID NO: 91002 - DNA, 15 bp, Homo sapiens
ggctgggtacatgag

SEQ ID NO: 91003 - DNA, 15 bp, Homo sapiens
aggctgggtacatga

SEQ ID NO: 91004 - DNA, 15 bp, Homo sapiens
gaggctgggtacatg

SEQ ID NO: 91005 - DNA, 15 bp, Homo sapiens
ggaggctgggtacat

SEQ ID NO: 91006 - DNA, 15 bp, Homo sapiens
aggaggctgggtaca

SEQ ID NO: 91007 - DNA, 15 bp, Homo sapiens
aaggaggctgggtac

SEQ ID NO: 91008 - DNA, 15 bp, Homo sapiens
aaaggaggctgggta

SEQ ID NO: 91009 - DNA, 15 bp, Homo sapiens
caaaggaggctgggt

SEQ ID NO: 91010 - DNA, 15 bp, Homo sapiens
acaaaggaggctggg

SEQ ID NO: 91011 - DNA, 15 bp, Homo sapiens
cacaaaggaggctgg

SEQ ID NO: 91012 - DNA, 15 bp, Homo sapiens
acacaaaggaggctg

SEQ ID NO: 91013 - DNA, 15 bp, Homo sapiens
aacacaaaggaggct

SEQ ID NO: 91014 - DNA, 15 bp, Homo sapiens
gaacacaaaggaggc

SEQ ID NO: 91015 - DNA, 15 bp, Homo sapiens
tgaacacaaaggagg

SEQ ID NO: 91016 - DNA, 15 bp, Homo sapiens
ttgaacacaaaggag

SEQ ID NO: 91017 - DNA, 15 bp, Homo sapiens
cttgaacacaaagga

SEQ ID NO: 91018 - DNA, 15 bp, Homo sapiens
tcttgaacacaaagg

SEQ ID NO: 91019 - DNA, 15 bp, Homo sapiens
atcttgaacacaaag

SEQ ID NO: 91020 - DNA, 15 bp, Homo sapiens
gatcttgaacacaaa

SEQ ID NO: 91021 - DNA, 15 bp, Homo sapiens
ggatcttgaacacaa

SEQ ID NO: 91022 - DNA, 15 bp, Homo sapiens
gggatcttgaacaca

SEQ ID NO: 91023 - DNA, 15 bp, Homo sapiens
ggggatcttgaacac

SEQ ID NO: 91024 - DNA, 15 bp, Homo sapiens
tggggatcttgaaca

SEQ ID NO: 91025 - DNA, 15 bp, Homo sapiens
ctggggatcttgaac

SEQ ID NO: 91026 - DNA, 15 bp, Homo sapiens
gctggggatcttgaa

SEQ ID NO: 91027 - DNA, 15 bp, Homo sapiens
tgctggggatcttga

SEQ ID NO: 91028 - DNA, 15 bp, Homo sapiens
gtgctggggatcttg

SEQ ID NO: 91029 - DNA, 15 bp, Homo sapiens
tgtgctggggatctt

SEQ ID NO: 91030 - DNA, 15 bp, Homo sapiens
ctgtgctggggatct

SEQ ID NO: 91031 - DNA, 15 bp, Homo sapiens
gctgtgctggggatc

SEQ ID NO: 91032 - DNA, 15 bp, Homo sapiens
ggctgtgctggggat

SEQ ID NO: 91033 - DNA, 15 bp, Homo sapiens
aggctgtgctgggga

SEQ ID NO: 91034 - DNA, 15 bp, Homo sapiens
taggctgtgctgggg

SEQ ID NO: 91035 - DNA, 15 bp, Homo sapiens
ataggctgtgctggg

SEQ ID NO: 91036 - DNA, 15 bp, Homo sapiens
cataggctgtgctgg

SEQ ID NO: 91037 - DNA, 15 bp, Homo sapiens
acataggctgtgctg

SEQ ID NO: 91038 - DNA, 15 bp, Homo sapiens
cacataggctgtgct

SEQ ID NO: 91039 - DNA, 15 bp, Homo sapiens
ccacataggctgtgc

SEQ ID NO: 91040 - DNA, 15 bp, Homo sapiens
accacataggctgtg

SEQ ID NO: 91041 - DNA, 15 bp, Homo sapiens
caccacataggctgt

SEQ ID NO: 91042 - DNA, 15 bp, Homo sapiens
gcaccacataggctg

SEQ ID NO: 91043 - DNA, 15 bp, Homo sapiens
agcaccacataggct

SEQ ID NO: 91044 - DNA, 15 bp, Homo sapiens
gagcaccacataggc

SEQ ID NO: 91045 - DNA, 15 bp, Homo sapiens
tgagcaccacatagg

SEQ ID NO: 91046 - DNA, 15 bp, Homo sapiens
gtgagcaccacatag

SEQ ID NO: 91047 - DNA, 15 bp, Homo sapiens
ggtgagcaccacata

SEQ ID NO: 91048 - DNA, 15 bp, Homo sapiens
tggtgagcaccacat

SEQ ID NO: 91049 - DNA, 15 bp, Homo sapiens
ctggtgagcaccaca

SEQ ID NO: 91050 - DNA, 15 bp, Homo sapiens
gctggtgagcaccac

SEQ ID NO: 91051 - DNA, 15 bp, Homo sapiens
cgctggtgagcacca

SEQ ID NO: 91052 - DNA, 15 bp, Homo sapiens
acgctggtgagcacc

SEQ ID NO: 91053 - DNA, 15 bp, Homo sapiens
cacgctggtgagcac

SEQ ID NO: 91054 - DNA, 15 bp, Homo sapiens
tcacgctggtgagca

SEQ ID NO: 91055 - DNA, 15 bp, Homo sapiens
ttcacgctggtgagc

SEQ ID NO: 91056 - DNA, 15 bp, Homo sapiens
gttcacgctggtgag

SEQ ID NO: 91057 - DNA, 15 bp, Homo sapiens
ggttcacgctggtga

SEQ ID NO: 91058 - DNA, 15 bp, Homo sapiens
aggttcacgctggtg

SEQ ID NO: 91059 - DNA, 15 bp, Homo sapiens
gaggttcacgctggt

SEQ ID NO: 91060 - DNA, 15 bp, Homo sapiens
agaggttcacgctgg

SEQ ID NO: 91061 - DNA, 15 bp, Homo sapiens
aagaggttcacgctg

SEQ ID NO: 91062 - DNA, 15 bp, Homo sapiens
gaagaggttcacgct

SEQ ID NO: 91063 - DNA, 15 bp, Homo sapiens
tgaagaggttcacgc

SEQ ID NO: 91064 - DNA, 15 bp, Homo sapiens
atgaagaggttcacg

SEQ ID NO: 91065 - DNA, 15 bp, Homo sapiens
aatgaagaggttcac

SEQ ID NO: 91066 - DNA, 15 bp, Homo sapiens
caatgaagaggttca

SEQ ID NO: 91067 - DNA, 15 bp, Homo sapiens
ccaatgaagaggttc

SEQ ID NO: 91068 - DNA, 15 bp, Homo sapiens
gccaatgaagaggtt

SEQ ID NO: 91069 - DNA, 15 bp, Homo sapiens
tgccaatgaagaggt

SEQ ID NO: 91070 - DNA, 15 bp, Homo sapiens
atgccaatgaagagg

SEQ ID NO: 91071 - DNA, 15 bp, Homo sapiens
aatgccaatgaagag

SEQ ID NO: 91072 - DNA, 15 bp, Homo sapiens
taatgccaatgaaga

SEQ ID NO: 91073 - DNA, 15 bp, Homo sapiens
ttaatgccaatgaag

SEQ ID NO: 91074 - DNA, 15 bp, Homo sapiens
attaatgccaatgaa

SEQ ID NO: 91075 - DNA, 15 bp, Homo sapiens
cattaatgccaatga

SEQ ID NO: 91076 - DNA, 15 bp, Homo sapiens
ccattaatgccaatg

SEQ ID NO: 91077 - DNA, 15 bp, Homo sapiens
gccattaatgccaat

SEQ ID NO: 91078 - DNA, 15 bp, Homo sapiens
tgccattaatgccaa

SEQ ID NO: 91079 - DNA, 15 bp, Homo sapiens
ctgccattaatgcca

SEQ ID NO: 91080 - DNA, 15 bp, Homo sapiens
gctgccattaatgcc

SEQ ID NO: 91081 - DNA, 15 bp, Homo sapiens
cgctgccattaatgc

SEQ ID NO: 91082 - DNA, 15 bp, Homo sapiens
acgctgccattaatg

SEQ ID NO: 91083 - DNA, 15 bp, Homo sapiens
cacgctgccattaat

SEQ ID NO: 91084 - DNA, 15 bp, Homo sapiens
ccacgctgccattaa

SEQ ID NO: 91085 - DNA, 15 bp, Homo sapiens
gccacgctgccatta

SEQ ID NO: 91086 - DNA, 15 bp, Homo sapiens
ggccacgctgccatt

SEQ ID NO: 91087 - DNA, 15 bp, Homo sapiens
tggccacgctgccat

SEQ ID NO: 91088 - DNA, 15 bp, Homo sapiens
gtggccacgctgcca

SEQ ID NO: 91089 - DNA, 15 bp, Homo sapiens
ggtggccacgctgcc

SEQ ID NO: 91090 - DNA, 15 bp, Homo sapiens
aggtggccacgctgc

SEQ ID NO: 91091 - DNA, 15 bp, Homo sapiens
aaggtggccacgctg

SEQ ID NO: 91092 - DNA, 15 bp, Homo sapiens
aaaggtggccacgct

SEQ ID NO: 91093 - DNA, 15 bp, Homo sapiens
caaaggtggccacgc

SEQ ID NO: 91094 - DNA, 15 bp, Homo sapiens
acaaaggtggccacg

SEQ ID NO: 91095 - DNA, 15 bp, Homo sapiens
cacaaaggtggccac

SEQ ID NO: 91096 - DNA, 15 bp, Homo sapiens
gcacaaaggtggcca

SEQ ID NO: 91097 - DNA, 15 bp, Homo sapiens
agcacaaaggtggcc

SEQ ID NO: 91098 - DNA, 15 bp, Homo sapiens
cagcacaaaggtggc

SEQ ID NO: 91099 - DNA, 15 bp, Homo sapiens
ccagcacaaaggtgg

SEQ ID NO: 91100 - DNA, 15 bp, Homo sapiens
tccagcacaaaggtg

SEQ ID NO: 91101 - DNA, 15 bp, Homo sapiens
ctccagcacaaaggt

SEQ ID NO: 91102 - DNA, 15 bp, Homo sapiens
gctccagcacaaagg

SEQ ID NO: 91103 - DNA, 15 bp, Homo sapiens
agctccagcacaaag

SEQ ID NO: 91104 - DNA, 15 bp, Homo sapiens
cagctccagcacaaa

SEQ ID NO: 91105 - DNA, 15 bp, Homo sapiens
acagctccagcacaa

SEQ ID NO: 91106 - DNA, 15 bp, Homo sapiens
aacagctccagcaca

SEQ ID NO: 91107 - DNA, 15 bp, Homo sapiens
gaacagctccagcac

SEQ ID NO: 91108 - DNA, 15 bp, Homo sapiens
tgaacagctccagca

SEQ ID NO: 91109 - DNA, 15 bp, Homo sapiens
ggtgaacagctccag

SEQ ID NO: 91110 - DNA, 15 bp, Homo sapiens
cggtgaacagctcca

SEQ ID NO: 91111 - DNA, 15 bp, Homo sapiens
tcggtgaacagctcc

SEQ ID NO: 91112 - DNA, 15 bp, Homo sapiens
gtcggtgaacagctc

SEQ ID NO: 91113 - DNA, 15 bp, Homo sapiens
tgtcggtgaacagct

SEQ ID NO: 91114 - DNA, 15 bp, Homo sapiens
ttgtcggtgaacagc

SEQ ID NO: 91115 - DNA, 15 bp, Homo sapiens
attgtcggtgaacag

SEQ ID NO: 91116 - DNA, 15 bp, Homo sapiens
cattgtcggtgaaca

SEQ ID NO: 91117 - DNA, 15 bp, Homo sapiens
acattgtcggtgaac

SEQ ID NO: 91118 - DNA, 15 bp, Homo sapiens
cacattgtcggtgaa

SEQ ID NO: 91119 - DNA, 15 bp, Homo sapiens
tcacattgtcggtga

SEQ ID NO: 91120 - DNA, 15 bp, Homo sapiens
ctcacattgtcggtg

SEQ ID NO: 91121 - DNA, 15 bp, Homo sapiens
actcacattgtcggt

SEQ ID NO: 91122 - DNA, 15 bp, Homo sapiens
gactcacattgtcgg

SEQ ID NO: 91123 - DNA, 15 bp, Homo sapiens
tgactcacattgtcg

SEQ ID NO: 91124 - DNA, 15 bp, Homo sapiens
atgactcacattgtc

SEQ ID NO: 91125 - DNA, 15 bp, Homo sapiens
catgactcacattgt

SEQ ID NO: 91126 - DNA, 15 bp, Homo sapiens
gcatgactcacattg

SEQ ID NO: 91127 - DNA, 15 bp, Homo sapiens
tgcatgactcacatt

SEQ ID NO: 91128 - DNA, 15 bp, Homo sapiens
ctgcatgactcacat

SEQ ID NO: 91129 - DNA, 15 bp, Homo sapiens
tctgcatgactcaca

SEQ ID NO: 91130 - DNA, 15 bp, Homo sapiens
ctctgcatgactcac

SEQ ID NO: 91131 - DNA, 15 bp, Homo sapiens
tctctgcatgactca

SEQ ID NO: 91132 - DNA, 15 bp, Homo sapiens
ctctctgcatgactc

SEQ ID NO: 91133 - DNA, 15 bp, Homo sapiens
tctctctgcatgact

SEQ ID NO: 91134 - DNA, 15 bp, Homo sapiens
ttctctctgcatgac

SEQ ID NO: 91135 - DNA, 15 bp, Homo sapiens
gttctctctgcatga

SEQ ID NO: 91136 - DNA, 15 bp, Homo sapiens
tgttctctctgcatg

SEQ ID NO: 91137 - DNA, 15 bp, Homo sapiens
gtgttctctctgcat

SEQ ID NO: 91138 - DNA, 15 bp, Homo sapiens
agtgttctctctgca

SEQ ID NO: 91139 - DNA, 15 bp, Homo sapiens
gagtgttctctctgc

SEQ ID NO: 91140 - DNA, 15 bp, Homo sapiens
ggagtgttctctctg

SEQ ID NO: 91141 - DNA, 15 bp, Homo sapiens
aggagtgttctctct

SEQ ID NO: 91142 - DNA, 15 bp, Homo sapiens
caggagtgttctctc

SEQ ID NO: 91143 - DNA, 15 bp, Homo sapiens
gcaggagtgttctct

SEQ ID NO: 91144 - DNA, 15 bp, Homo sapiens
agcaggagtgttctc

SEQ ID NO: 91145 - DNA, 15 bp, Homo sapiens
cagcaggagtgttct

SEQ ID NO: 91146 - DNA, 15 bp, Homo sapiens
ccagcaggagtgttc

SEQ ID NO: 91147 - DNA, 15 bp, Homo sapiens
cccagcaggagtgtt

SEQ ID NO: 91148 - DNA, 15 bp, Homo sapiens
tcccagcaggagtgt

SEQ ID NO: 91149 - DNA, 15 bp, Homo sapiens
atcccagcaggagtg

SEQ ID NO: 91150 - DNA, 15 bp, Homo sapiens
catcccagcaggagt

SEQ ID NO: 91151 - DNA, 15 bp, Homo sapiens
tcatcccagcaggag

SEQ ID NO: 91152 - DNA, 15 bp, Homo sapiens
ctcatcccagcagga

SEQ ID NO: 91153 - DNA, 15 bp, Homo sapiens
gctcatcccagcagg

SEQ ID NO: 91154 - DNA, 15 bp, Homo sapiens
tgctcatcccagcag

SEQ ID NO: 91155 - DNA, 15 bp, Homo sapiens
atgctcatcccagca

SEQ ID NO: 91156 - DNA, 15 bp, Homo sapiens
gatgctcatcccagc

SEQ ID NO: 91157 - DNA, 15 bp, Homo sapiens
agatgctcatcccag

SEQ ID NO: 91158 - DNA, 15 bp, Homo sapiens
gagatgctcatccca

SEQ ID NO: 91159 - DNA, 15 bp, Homo sapiens
agagatgctcatccc

SEQ ID NO: 91160 - DNA, 15 bp, Homo sapiens
cagagatgctcatcc

SEQ ID NO: 91161 - DNA, 15 bp, Homo sapiens
ccagagatgctcatc

SEQ ID NO: 91162 - DNA, 15 bp, Homo sapiens
cccagagatgctcat

SEQ ID NO: 91163 - DNA, 15 bp, Homo sapiens
tcccagagatgctca

SEQ ID NO: 91164 - DNA, 15 bp, Homo sapiens
ctcccagagatgctc

SEQ ID NO: 91165 - DNA, 15 bp, Homo sapiens
gctcccagagatgct

SEQ ID NO: 91166 - DNA, 15 bp, Homo sapiens
ggctcccagagatgc

SEQ ID NO: 91167 - DNA, 15 bp, Homo sapiens
tggctcccagagatg

SEQ ID NO: 91168 - DNA, 15 bp, Homo sapiens
ctggctcccagagat

SEQ ID NO: 91169 - DNA, 15 bp, Homo sapiens
tctggctcccagaga

SEQ ID NO: 91170 - DNA, 15 bp, Homo sapiens
ctctggctcccagag

SEQ ID NO: 91171 - DNA, 15 bp, Homo sapiens
cctctggctcccaga

SEQ ID NO: 91172 - DNA, 15 bp, Homo sapiens
tcctctggctcccag

SEQ ID NO: 91173 - DNA, 15 bp, Homo sapiens
gtcctctggctccca

SEQ ID NO: 91174 - DNA, 15 bp, Homo sapiens
tgtcctctggctccc

SEQ ID NO: 91175 - DNA, 15 bp, Homo sapiens
ctgtcctctggctcc

SEQ ID NO: 91176 - DNA, 15 bp, Homo sapiens
actgtcctctggctc

SEQ ID NO: 91177 - DNA, 15 bp, Homo sapiens
cactgtcctctggct

SEQ ID NO: 91178 - DNA, 15 bp, Homo sapiens
acactgtcctctggc

SEQ ID NO: 91179 - DNA, 15 bp, Homo sapiens
aacactgtcctctgg

SEQ ID NO: 91180 - DNA, 15 bp, Homo sapiens
aaacactgtcctctg

SEQ ID NO: 91181 - DNA, 15 bp, Homo sapiens
taaacactgtcctct

SEQ ID NO: 91182 - DNA, 15 bp, Homo sapiens
ttaaacactgtcctc

SEQ ID NO: 91183 - DNA, 15 bp, Homo sapiens
attaaacactgtcct

SEQ ID NO: 91184 - DNA, 15 bp, Homo sapiens
aattaaacactgtcc

SEQ ID NO: 91185 - DNA, 15 bp, Homo sapiens
caattaaacactgtc

SEQ ID NO: 91186 - DNA, 15 bp, Homo sapiens
acaattaaacactgt

SEQ ID NO: 91187 - DNA, 15 bp, Homo sapiens
cacaattaaacactg

SEQ ID NO: 91188 - DNA, 15 bp, Homo sapiens
tcacaattaaacact

SEQ ID NO: 91189 - DNA, 15 bp, Homo sapiens
atcacaattaaacac

SEQ ID NO: 91190 - DNA, 15 bp, Homo sapiens
gatcacaattaaaca

SEQ ID NO: 91191 - DNA, 15 bp, Homo sapiens
agatcacaattaaac

SEQ ID NO: 91192 - DNA, 15 bp, Homo sapiens
aagatcacaattaaa

SEQ ID NO: 91193 - DNA, 15 bp, Homo sapiens
taagatcacaattaa

SEQ ID NO: 91194 - DNA, 15 bp, Homo sapiens
ataagatcacaatta

SEQ ID NO: 91195 - DNA, 15 bp, Homo sapiens
aataagatcacaatt

SEQ ID NO: 91196 - DNA, 15 bp, Homo sapiens
gaataagatcacaat

SEQ ID NO: 91197 - DNA, 15 bp, Homo sapiens
tggaataagatcaca

SEQ ID NO: 91198 - DNA, 15 bp, Homo sapiens
gtggaataagatcac

SEQ ID NO: 91199 - DNA, 15 bp, Homo sapiens
agtggaataagatca

SEQ ID NO: 91200 - DNA, 15 bp, Homo sapiens
aagtggaataagatc

SEQ ID NO: 91201 - DNA, 15 bp, Homo sapiens
caagtggaataagat

SEQ ID NO: 91202 - DNA, 15 bp, Homo sapiens
acaagtggaataaga

SEQ ID NO: 91203 - DNA, 15 bp, Homo sapiens
gacaagtggaataag

SEQ ID NO: 91204 - DNA, 15 bp, Homo sapiens
tgacaagtggaataa

SEQ ID NO: 91205 - DNA, 15 bp, Homo sapiens
ctgacaagtggaata

SEQ ID NO: 91206 - DNA, 15 bp, Homo sapiens
actgacaagtggaat

SEQ ID NO: 91207 - DNA, 15 bp, Homo sapiens
cactgacaagtggaa

SEQ ID NO: 91208 - DNA, 15 bp, Homo sapiens
ccactgacaagtgga

SEQ ID NO: 91209 - DNA, 15 bp, Homo sapiens
accactgacaagtgg

SEQ ID NO: 91210 - DNA, 15 bp, Homo sapiens
taccactgacaagtg

SEQ ID NO: 91211 - DNA, 15 bp, Homo sapiens
ataccactgacaagt

SEQ ID NO: 91212 - DNA, 15 bp, Homo sapiens
aataccactgacaag

SEQ ID NO: 91213 - DNA, 15 bp, Homo sapiens
caataccactgacaa

SEQ ID NO: 91214 - DNA, 15 bp, Homo sapiens
tcaataccactgaca

SEQ ID NO: 91215 - DNA, 15 bp, Homo sapiens
gtcaataccactgac

SEQ ID NO: 91216 - DNA, 15 bp, Homo sapiens
tgtcaataccactga

SEQ ID NO: 91217 - DNA, 15 bp, Homo sapiens
gtgtcaataccactg

SEQ ID NO: 91218 - DNA, 15 bp, Homo sapiens
agtgtcaataccact

SEQ ID NO: 91219 - DNA, 15 bp, Homo sapiens
cagtgtcaataccac

SEQ ID NO: 91220 - DNA, 15 bp, Homo sapiens
gcagtgtcaatacca

SEQ ID NO: 91221 - DNA, 15 bp, Homo sapiens
agcagtgtcaatacc

SEQ ID NO: 91222 - DNA, 15 bp, Homo sapiens
cagcagtgtcaatac

SEQ ID NO: 91223 - DNA, 15 bp, Homo sapiens
tcagcagtgtcaata

SEQ ID NO: 91224 - DNA, 15 bp, Homo sapiens
gtcagcagtgtcaat

SEQ ID NO: 91225 - DNA, 15 bp, Homo sapiens
agtcagcagtgtcaa

SEQ ID NO: 91226 - DNA, 15 bp, Homo sapiens
cagtcagcagtgtca

SEQ ID NO: 91227 - DNA, 15 bp, Homo sapiens
gcagtcagcagtgtc

SEQ ID NO: 91228 - DNA, 15 bp, Homo sapiens
ggcagtcagcagtgt

SEQ ID NO: 91229 - DNA, 15 bp, Homo sapiens
aggcagtcagcagtg

SEQ ID NO: 91230 - DNA, 15 bp, Homo sapiens
aaggcagtcagcagt

SEQ ID NO: 91231 - DNA, 15 bp, Homo sapiens
caaggcagtcagcag

SEQ ID NO: 91232 - DNA, 15 bp, Homo sapiens
acaaggcagtcagca

SEQ ID NO: 91233 - DNA, 15 bp, Homo sapiens
gacaaggcagtcagc

SEQ ID NO: 91234 - DNA, 15 bp, Homo sapiens
ggacaaggcagtcag

SEQ ID NO: 91235 - DNA, 15 bp, Homo sapiens
aggacaaggcagtca

SEQ ID NO: 91236 - DNA, 15 bp, Homo sapiens
caggacaaggcagtc

SEQ ID NO: 91237 - DNA, 15 bp, Homo sapiens
acaggacaaggcagt

SEQ ID NO: 91238 - DNA, 15 bp, Homo sapiens
gacaggacaaggcag

SEQ ID NO: 91239 - DNA, 15 bp, Homo sapiens
agacaggacaaggca

SEQ ID NO: 91240 - DNA, 15 bp, Homo sapiens
aagacaggacaaggc

SEQ ID NO: 91241 - DNA, 15 bp, Homo sapiens
gaagacaggacaagg

SEQ ID NO: 91242 - DNA, 15 bp, Homo sapiens
tgaagacaggacaag

SEQ ID NO: 91243 - DNA, 15 bp, Homo sapiens
ctgaagacaggacaa

SEQ ID NO: 91244 - DNA, 15 bp, Homo sapiens
tctgaagacaggaca

SEQ ID NO: 91245 - DNA, 15 bp, Homo sapiens
ctctgaagacaggac

SEQ ID NO: 91246 - DNA, 15 bp, Homo sapiens
actctgaagacagga

SEQ ID NO: 91247 - DNA, 15 bp, Homo sapiens
gactctgaagacagg

SEQ ID NO: 91248 - DNA, 15 bp, Homo sapiens
agactctgaagacag

SEQ ID NO: 91249 - DNA, 15 bp, Homo sapiens
cagactctgaagaca

SEQ ID NO: 91250 - DNA, 15 bp, Homo sapiens
acagactctgaagac

SEQ ID NO: 91251 - DNA, 15 bp, Homo sapiens
gacagactctgaaga

SEQ ID NO: 91252 - DNA, 15 bp, Homo sapiens
agacagactctgaag

SEQ ID NO: 91253 - DNA, 15 bp, Homo sapiens
aagacagactctgaa

SEQ ID NO: 91254 - DNA, 15 bp, Homo sapiens
gaagacagactctga

SEQ ID NO: 91255 - DNA, 15 bp, Homo sapiens
ggaagacagactctg

SEQ ID NO: 91256 - DNA, 15 bp, Homo sapiens
gggaagacagactct

SEQ ID NO: 91257 - DNA, 15 bp, Homo sapiens
agggaagacagactc

SEQ ID NO: 91258 - DNA, 15 bp, Homo sapiens
cagggaagacagact

SEQ ID NO: 91259 - DNA, 15 bp, Homo sapiens
tcagggaagacagac

SEQ ID NO: 91260 - DNA, 15 bp, Homo sapiens
ctcagggaagacaga

SEQ ID NO: 91261 - DNA, 15 bp, Homo sapiens
tctcagggaagacag

SEQ ID NO: 91262 - DNA, 15 bp, Homo sapiens
ttctcagggaagaca

SEQ ID NO: 91263 - DNA, 15 bp, Homo sapiens
cttctcagggaagac

SEQ ID NO: 91264 - DNA, 15 bp, Homo sapiens
ccttctcagggaaga

SEQ ID NO: 91265 - DNA, 15 bp, Homo sapiens
gccttctcagggaag

SEQ ID NO: 91266 - DNA, 15 bp, Homo sapiens
tgccttctcagggaa

SEQ ID NO: 91267 - DNA, 15 bp, Homo sapiens
ttgccttctcaggga

SEQ ID NO: 91268 - DNA, 15 bp, Homo sapiens
tttgccttctcaggg

SEQ ID NO: 91269 - DNA, 15 bp, Homo sapiens
ctttgccttctcagg

SEQ ID NO: 91270 - DNA, 15 bp, Homo sapiens
gctttgccttctcag

SEQ ID NO: 91271 - DNA, 15 bp, Homo sapiens
tgctttgccttctca

SEQ ID NO: 91272 - DNA, 15 bp, Homo sapiens
gtgctttgccttctc

SEQ ID NO: 91273 - DNA, 15 bp, Homo sapiens
ggtgctttgccttct

SEQ ID NO: 91274 - DNA, 15 bp, Homo sapiens
aggtgctttgccttc

SEQ ID NO: 91275 - DNA, 15 bp, Homo sapiens
aaggtgctttgcctt

SEQ ID NO: 91276 - DNA, 15 bp, Homo sapiens
aaaggtgctttgcct

SEQ ID NO: 91277 - DNA, 15 bp, Homo sapiens
gaaaggtgctttgcc

SEQ ID NO: 91278 - DNA, 15 bp, Homo sapiens
agaaaggtgctttgc

SEQ ID NO: 91279 - DNA, 15 bp, Homo sapiens
aagaaaggtgctttg

SEQ ID NO: 91280 - DNA, 15 bp, Homo sapiens
aaagaaaggtgcttt

SEQ ID NO: 91281 - DNA, 15 bp, Homo sapiens
gaaagaaaggtgctt

SEQ ID NO: 91282 - DNA, 15 bp, Homo sapiens
agaaagaaaggtgct

SEQ ID NO: 91283 - DNA, 15 bp, Homo sapiens
aagaaagaaaggtgc

SEQ ID NO: 91284 - DNA, 15 bp, Homo sapiens
caagaaagaaaggtg

SEQ ID NO: 91285 - DNA, 15 bp, Homo sapiens
gcaagaaagaaaggt

SEQ ID NO: 91286 - DNA, 15 bp, Homo sapiens
agcaagaaagaaagg

SEQ ID NO: 91287 - DNA, 15 bp, Homo sapiens
cagcaagaaagaaag

SEQ ID NO: 91288 - DNA, 15 bp, Homo sapiens
acagcaagaaagaaa

SEQ ID NO: 91289 - DNA, 15 bp, Homo sapiens
cacagcaagaaagaa

SEQ ID NO: 91290 - DNA, 15 bp, Homo sapiens
gcacagcaagaaaga

SEQ ID NO: 91291 - DNA, 15 bp, Homo sapiens
ggcacagcaagaaag

SEQ ID NO: 91292 - DNA, 15 bp, Homo sapiens
aggcacagcaagaaa

SEQ ID NO: 91293 - DNA, 15 bp, Homo sapiens
aaggcacagcaagaa

SEQ ID NO: 91294 - DNA, 15 bp, Homo sapiens
taaggcacagcaaga

SEQ ID NO: 91295 - DNA, 15 bp, Homo sapiens
gtaaggcacagcaag

SEQ ID NO: 91296 - DNA, 15 bp, Homo sapiens
tgtaaggcacagcaa

SEQ ID NO: 91297 - DNA, 15 bp, Homo sapiens
atgtaaggcacagca

SEQ ID NO: 91298 - DNA, 15 bp, Homo sapiens
aatgtaaggcacagc

SEQ ID NO: 91299 - DNA, 15 bp, Homo sapiens
aaatgtaaggcacag

SEQ ID NO: 91300 - DNA, 15 bp, Homo sapiens
aaaatgtaaggcaca

SEQ ID NO: 91301 - DNA, 15 bp, Homo sapiens
caaaatgtaaggcac

SEQ ID NO: 91302 - DNA, 15 bp, Homo sapiens
gcaaaatgtaaggca

SEQ ID NO: 91303 - DNA, 15 bp, Homo sapiens
agcaaaatgtaaggc

SEQ ID NO: 91304 - DNA, 15 bp, Homo sapiens
cagcaaaatgtaagg

SEQ ID NO: 91305 - DNA, 15 bp, Homo sapiens
ccagcaaaatgtaag

SEQ ID NO: 91306 - DNA, 15 bp, Homo sapiens
accagcaaaatgtaa

SEQ ID NO: 91307 - DNA, 15 bp, Homo sapiens
gaccagcaaaatgta

SEQ ID NO: 91308 - DNA, 15 bp, Homo sapiens
tgaccagcaaaatgt

SEQ ID NO: 91309 - DNA, 15 bp, Homo sapiens
ttgaccagcaaaatg

SEQ ID NO: 91310 - DNA, 15 bp, Homo sapiens
cttgaccagcaaaat

SEQ ID NO: 91311 - DNA, 15 bp, Homo sapiens
gcttgaccagcaaaa

SEQ ID NO: 91312 - DNA, 15 bp, Homo sapiens
ggcttgaccagcaaa

SEQ ID NO: 91313 - DNA, 15 bp, Homo sapiens
aggcttgaccagcaa

SEQ ID NO: 91314 - DNA, 15 bp, Homo sapiens
aaggcttgaccagca

SEQ ID NO: 91315 - DNA, 15 bp, Homo sapiens
aaaggcttgaccagc

SEQ ID NO: 91316 - DNA, 15 bp, Homo sapiens
gaaaggcttgaccag

SEQ ID NO: 91317 - DNA, 15 bp, Homo sapiens
tgaaaggcttgacca

SEQ ID NO: 91318 - DNA, 15 bp, Homo sapiens
ctgaaaggcttgacc

SEQ ID NO: 91319 - DNA, 15 bp, Homo sapiens
actgaaaggcttgac

SEQ ID NO: 91320 - DNA, 15 bp, Homo sapiens
aactgaaaggcttga

SEQ ID NO: 91321 - DNA, 15 bp, Homo sapiens
aaactgaaaggcttg

SEQ ID NO: 91322 - DNA, 15 bp, Homo sapiens
gaaactgaaaggctt

SEQ ID NO: 91323 - DNA, 15 bp, Homo sapiens
agaaactgaaaggct

SEQ ID NO: 91324 - DNA, 15 bp, Homo sapiens
aagaaactgaaaggc

SEQ ID NO: 91325 - DNA, 15 bp, Homo sapiens
aaagaaactgaaagg

SEQ ID NO: 91326 - DNA, 15 bp, Homo sapiens
aaaagaaactgaaag

SEQ ID NO: 91327 - DNA, 15 bp, Homo sapiens
caaaagaaactgaaa

SEQ ID NO: 91328 - DNA, 15 bp, Homo sapiens
tcaaaagaaactgaa

SEQ ID NO: 91329 - DNA, 15 bp, Homo sapiens
gtcaaaagaaactga

SEQ ID NO: 91330 - DNA, 15 bp, Homo sapiens
tgtcaaaagaaactg

SEQ ID NO: 91331 - DNA, 15 bp, Homo sapiens
ctgtcaaaagaaact

SEQ ID NO: 91332 - DNA, 15 bp, Homo sapiens
actgtcaaaagaaac

SEQ ID NO: 91333 - DNA, 15 bp, Homo sapiens
aactgtcaaaagaaa

SEQ ID NO: 91334 - DNA, 15 bp, Homo sapiens
aaactgtcaaaagaa

SEQ ID NO: 91335 - DNA, 15 bp, Homo sapiens
aaaactgtcaaaaga

SEQ ID NO: 91336 - DNA, 15 bp, Homo sapiens
aaaaactgtcaaaag

SEQ ID NO: 91337 - DNA, 15 bp, Homo sapiens
aaaaaactgtcaaaa

SEQ ID NO: 91338 - DNA, 15 bp, Homo sapiens
aaaaaaactgtcaaa

SEQ ID NO: 91339 - DNA, 15 bp, Homo sapiens
taaaaaaaactgtca

SEQ ID NO: 91340 - DNA, 15 bp, Homo sapiens
gtaaaaaaaactgtc

SEQ ID NO: 91341 - DNA, 15 bp, Homo sapiens
agtaaaaaaaactgt

SEQ ID NO: 91342 - DNA, 15 bp, Homo sapiens
aagtaaaaaaaactg

SEQ ID NO: 91343 - DNA, 15 bp, Homo sapiens
gaagtaaaaaaaact

SEQ ID NO: 91344 - DNA, 15 bp, Homo sapiens
agaagtaaaaaaaac

SEQ ID NO: 91345 - DNA, 15 bp, Homo sapiens
aagaagtaaaaaaaa

SEQ ID NO: 91346 - DNA, 15 bp, Homo sapiens
aaagaagtaaaaaaa

SEQ ID NO: 91347 - DNA, 15 bp, Homo sapiens
gaaagaagtaaaaaa

SEQ ID NO: 91348 - DNA, 15 bp, Homo sapiens
agaaagaagtaaaaa

SEQ ID NO: 91349 - DNA, 15 bp, Homo sapiens
aagaaagaagtaaaa

SEQ ID NO: 91350 - DNA, 15 bp, Homo sapiens
aaagaaagaagtaaa

SEQ ID NO: 91351 - DNA, 15 bp, Homo sapiens
aaaagaaagaagtaa

SEQ ID NO: 91352 - DNA, 15 bp, Homo sapiens
aaaaagaaagaagta

SEQ ID NO: 91353 - DNA, 15 bp, Homo sapiens
aaaaaagaaagaagt

SEQ ID NO: 91354 - DNA, 15 bp, Homo sapiens
gaaaaaagaaagaag

SEQ ID NO: 91355 - DNA, 15 bp, Homo sapiens
tgaaaaaagaaagaa

SEQ ID NO: 91356 - DNA, 15 bp, Homo sapiens
ttgaaaaaagaaaga

SEQ ID NO: 91357 - DNA, 15 bp, Homo sapiens
attgaaaaaagaaag

SEQ ID NO: 91358 - DNA, 15 bp, Homo sapiens
cattgaaaaaagaaa

SEQ ID NO: 91359 - DNA, 15 bp, Homo sapiens
acattgaaaaaagaa

SEQ ID NO: 91360 - DNA, 15 bp, Homo sapiens
aacattgaaaaaaga

SEQ ID NO: 91361 - DNA, 15 bp, Homo sapiens
caacattgaaaaaag

SEQ ID NO: 91362 - DNA, 15 bp, Homo sapiens
gcaacattgaaaaaa

SEQ ID NO: 91363 - DNA, 15 bp, Homo sapiens
agcaacattgaaaaa

SEQ ID NO: 91364 - DNA, 15 bp, Homo sapiens
gagcaacattgaaaa

SEQ ID NO: 91365 - DNA, 15 bp, Homo sapiens
agagcaacattgaaa

SEQ ID NO: 91366 - DNA, 15 bp, Homo sapiens
aagagcaacattgaa

SEQ ID NO: 91367 - DNA, 15 bp, Homo sapiens
taagagcaacattga

SEQ ID NO: 91368 - DNA, 15 bp, Homo sapiens
gtaagagcaacattg

SEQ ID NO: 91369 - DNA, 15 bp, Homo sapiens
ggtaagagcaacatt

SEQ ID NO: 91370 - DNA, 15 bp, Homo sapiens
tggtaagagcaacat

SEQ ID NO: 91371 - DNA, 15 bp, Homo sapiens
ttggtaagagcaaca

SEQ ID NO: 91372 - DNA, 15 bp, Homo sapiens
cttggtaagagcaac

SEQ ID NO: 91373 - DNA, 15 bp, Homo sapiens
tcttggtaagagcaa

SEQ ID NO: 91374 - DNA, 15 bp, Homo sapiens
ctcttggtaagagca

SEQ ID NO: 91375 - DNA, 15 bp, Homo sapiens
actcttggtaagagc

SEQ ID NO: 91376 - DNA, 15 bp, Homo sapiens
tactcttggtaagag

SEQ ID NO: 91377 - DNA, 15 bp, Homo sapiens
ctactcttggtaaga

SEQ ID NO: 91378 - DNA, 15 bp, Homo sapiens
gctactcttggtaag

SEQ ID NO: 91379 - DNA, 15 bp, Homo sapiens
agctactcttggtaa

SEQ ID NO: 91380 - DNA, 15 bp, Homo sapiens
gagctactcttggta

SEQ ID NO: 91381 - DNA, 15 bp, Homo sapiens
ggagctactcttggt

SEQ ID NO: 91382 - DNA, 15 bp, Homo sapiens
aggagctactcttgg

SEQ ID NO: 91383 - DNA, 15 bp, Homo sapiens
gaggagctactcttg

SEQ ID NO: 91384 - DNA, 15 bp, Homo sapiens
agaggagctactctt

SEQ ID NO: 91385 - DNA, 15 bp, Homo sapiens
cagaggagctactct

SEQ ID NO: 91386 - DNA, 15 bp, Homo sapiens
gcagaggagctactc

SEQ ID NO: 91387 - DNA, 15 bp, Homo sapiens
ggcagaggagctact

SEQ ID NO: 91388 - DNA, 15 bp, Homo sapiens
aggcagaggagctac

SEQ ID NO: 91389 - DNA, 15 bp, Homo sapiens
aaggcagaggagcta

SEQ ID NO: 91390 - DNA, 15 bp, Homo sapiens
gaaggcagaggagct

SEQ ID NO: 91391 - DNA, 15 bp, Homo sapiens
ggaaggcagaggagc

SEQ ID NO: 91392 - DNA, 15 bp, Homo sapiens
tggaaggcagaggag

SEQ ID NO: 91393 - DNA, 15 bp, Homo sapiens
gtggaaggcagagga

SEQ ID NO: 91394 - DNA, 15 bp, Homo sapiens
agtggaaggcagagg

SEQ ID NO: 91395 - DNA, 15 bp, Homo sapiens
aagtggaaggcagag

SEQ ID NO: 91396 - DNA, 15 bp, Homo sapiens
aaagtggaaggcaga

SEQ ID NO: 91397 - DNA, 15 bp, Homo sapiens
taaagtggaaggcag

SEQ ID NO: 91398 - DNA, 15 bp, Homo sapiens
gtaaagtggaaggca

SEQ ID NO: 91399 - DNA, 15 bp, Homo sapiens
tgtaaagtggaaggc

SEQ ID NO: 91400 - DNA, 15 bp, Homo sapiens
gtgtaaagtggaagg

SEQ ID NO: 91401 - DNA, 15 bp, Homo sapiens
tgtgtaaagtggaag

SEQ ID NO: 91402 - DNA, 15 bp, Homo sapiens
atgtgtaaagtggaa

SEQ ID NO: 91403 - DNA, 15 bp, Homo sapiens
catgtgtaaagtgga

SEQ ID NO: 91404 - DNA, 15 bp, Homo sapiens
tcatgtgtaaagtgg

SEQ ID NO: 91405 - DNA, 15 bp, Homo sapiens
ctcatgtgtaaagtg

SEQ ID NO: 91406 - DNA, 15 bp, Homo sapiens
tctcatgtgtaaagt

SEQ ID NO: 91407 - DNA, 15 bp, Homo sapiens
ctctcatgtgtaaag

SEQ ID NO: 91408 - DNA, 15 bp, Homo sapiens
gctctcatgtgtaaa

SEQ ID NO: 91409 - DNA, 15 bp, Homo sapiens
agctctcatgtgtaa

SEQ ID NO: 91410 - DNA, 15 bp, Homo sapiens
cagctctcatgtgta

SEQ ID NO: 91411 - DNA, 15 bp, Homo sapiens
ccagctctcatgtgt

SEQ ID NO: 91412 - DNA, 15 bp, Homo sapiens
cccagctctcatgtg

SEQ ID NO: 91413 - DNA, 15 bp, Homo sapiens
gcccagctctcatgt

SEQ ID NO: 91414 - DNA, 15 bp, Homo sapiens
cgcccagctctcatg

SEQ ID NO: 91415 - DNA, 15 bp, Homo sapiens
tcgcccagctctcat

SEQ ID NO: 91416 - DNA, 15 bp, Homo sapiens
gtcgcccagctctca

SEQ ID NO: 91417 - DNA, 15 bp, Homo sapiens
cgtcgcccagctctc

SEQ ID NO: 91418 - DNA, 15 bp, Homo sapiens
gcgtcgcccagctct

SEQ ID NO: 91419 - DNA, 15 bp, Homo sapiens
ggcgtcgcccagctc

SEQ ID NO: 91420 - DNA, 15 bp, Homo sapiens
tggcgtcgcccagct

SEQ ID NO: 91421 - DNA, 15 bp, Homo sapiens
atggcgtcgcccagc

SEQ ID NO: 91422 - DNA, 15 bp, Homo sapiens
aatggcgtcgcccag

SEQ ID NO: 91423 - DNA, 15 bp, Homo sapiens
gaatggcgtcgccca

SEQ ID NO: 91424 - DNA, 15 bp, Homo sapiens
tgaatggcgtcgccc

SEQ ID NO: 91425 - DNA, 15 bp, Homo sapiens
ctgaatggcgtcgcc

SEQ ID NO: 91426 - DNA, 15 bp, Homo sapiens
actgaatggcgtcgc

SEQ ID NO: 91427 - DNA, 15 bp, Homo sapiens
gactgaatggcgtcg

SEQ ID NO: 91428 - DNA, 15 bp, Homo sapiens
ggactgaatggcgtc

SEQ ID NO: 91429 - DNA, 15 bp, Homo sapiens
aggactgaatggcgt

SEQ ID NO: 91430 - DNA, 15 bp, Homo sapiens
taggactgaatggcg

SEQ ID NO: 91431 - DNA, 15 bp, Homo sapiens
ttaggactgaatggc

SEQ ID NO: 91432 - DNA, 15 bp, Homo sapiens
cttaggactgaatgg

SEQ ID NO: 91433 - DNA, 15 bp, Homo sapiens
ccttaggactgaatg

SEQ ID NO: 91434 - DNA, 15 bp, Homo sapiens
gccttaggactgaat

SEQ ID NO: 91435 - DNA, 15 bp, Homo sapiens
agccttaggactgaa

SEQ ID NO: 91436 - DNA, 15 bp, Homo sapiens
aagccttaggactga

SEQ ID NO: 91437 - DNA, 15 bp, Homo sapiens
aaagccttaggactg

SEQ ID NO: 91438 - DNA, 15 bp, Homo sapiens
aaaagccttaggact

SEQ ID NO: 91439 - DNA, 15 bp, Homo sapiens
taaaagccttaggac

SEQ ID NO: 91440 - DNA, 15 bp, Homo sapiens
gtaaaagccttagga

SEQ ID NO: 91441 - DNA, 15 bp, Homo sapiens
ggtaaaagccttagg

SEQ ID NO: 91442 - DNA, 15 bp, Homo sapiens
tggtaaaagccttag

SEQ ID NO: 91443 - DNA, 15 bp, Homo sapiens
atggtaaaagcctta

SEQ ID NO: 91444 - DNA, 15 bp, Homo sapiens
gatggtaaaagcctt

SEQ ID NO: 91445 - DNA, 15 bp, Homo sapiens
tgatggtaaaagcct

SEQ ID NO: 91446 - DNA, 15 bp, Homo sapiens
gtgatggtaaaagcc

SEQ ID NO: 91447 - DNA, 15 bp, Homo sapiens
ggtgatggtaaaagc

SEQ ID NO: 91448 - DNA, 15 bp, Homo sapiens
aggtgatggtaaaag

SEQ ID NO: 91449 - DNA, 15 bp, Homo sapiens
gaggtgatggtaaaa

SEQ ID NO: 91450 - DNA, 15 bp, Homo sapiens
agaggtgatggtaaa

SEQ ID NO: 91451 - DNA, 15 bp, Homo sapiens
gagaggtgatggtaa

SEQ ID NO: 91452 - DNA, 15 bp, Homo sapiens
agagaggtgatggta

SEQ ID NO: 91453 - DNA, 15 bp, Homo sapiens
aagagaggtgatggt

SEQ ID NO: 91454 - DNA, 15 bp, Homo sapiens
caagagaggtgatgg

SEQ ID NO: 91455 - DNA, 15 bp, Homo sapiens
ccaagagaggtgatg

SEQ ID NO: 91456 - DNA, 15 bp, Homo sapiens
accaagagaggtgat

SEQ ID NO: 91457 - DNA, 15 bp, Homo sapiens
caccaagagaggtga

SEQ ID NO: 91458 - DNA, 15 bp, Homo sapiens
acaccaagagaggtg

SEQ ID NO: 91459 - DNA, 15 bp, Homo sapiens
aacaccaagagaggt

SEQ ID NO: 91460 - DNA, 15 bp, Homo sapiens
aaacaccaagagagg

SEQ ID NO: 91461 - DNA, 15 bp, Homo sapiens
aaaacaccaagagag

SEQ ID NO: 91462 - DNA, 15 bp, Homo sapiens
aaaaacaccaagaga

SEQ ID NO: 91463 - DNA, 15 bp, Homo sapiens
taaaaacaccaagag

SEQ ID NO: 91464 - DNA, 15 bp, Homo sapiens
ataaaaacaccaaga

SEQ ID NO: 91465 - DNA, 15 bp, Homo sapiens
aataaaaacaccaag

SEQ ID NO: 91466 - DNA, 15 bp, Homo sapiens
caataaaaacaccaa

SEQ ID NO: 91467 - DNA, 15 bp, Homo sapiens
acaataaaaacacca

SEQ ID NO: 91468 - DNA, 15 bp, Homo sapiens
gacaataaaaacacc

SEQ ID NO: 91469 - DNA, 15 bp, Homo sapiens
tgacaataaaaacac

SEQ ID NO: 91470 - DNA, 15 bp, Homo sapiens
atgacaataaaaaca

SEQ ID NO: 91471 - DNA, 15 bp, Homo sapiens
gatgacaataaaaac

SEQ ID NO: 91472 - DNA, 15 bp, Homo sapiens
agatgacaataaaaa

SEQ ID NO: 91473 - DNA, 15 bp, Homo sapiens
gagatgacaataaaa

SEQ ID NO: 91474 - DNA, 15 bp, Homo sapiens
agagatgacaataaa

SEQ ID NO: 91475 - DNA, 15 bp, Homo sapiens
tagagatgacaataa

SEQ ID NO: 91476 - DNA, 15 bp, Homo sapiens
ttagagatgacaata

SEQ ID NO: 91477 - DNA, 15 bp, Homo sapiens
cttagagatgacaat

SEQ ID NO: 91478 - DNA, 15 bp, Homo sapiens
tcttagagatgacaa

SEQ ID NO: 91479 - DNA, 15 bp, Homo sapiens
atcttagagatgaca

SEQ ID NO: 91480 - DNA, 15 bp, Homo sapiens
gatcttagagatgac

SEQ ID NO: 91481 - DNA, 15 bp, Homo sapiens
tgatcttagagatga

SEQ ID NO: 91482 - DNA, 15 bp, Homo sapiens
ttgatcttagagatg

SEQ ID NO: 91483 - DNA, 15 bp, Homo sapiens
attgatcttagagat

SEQ ID NO: 91484 - DNA, 15 bp, Homo sapiens
cattgatcttagaga

SEQ ID NO: 91485 - DNA, 15 bp, Homo sapiens
gcattgatcttagag

SEQ ID NO: 91486 - DNA, 15 bp, Homo sapiens
ggcattgatcttaga

SEQ ID NO: 91487 - DNA, 15 bp, Homo sapiens
aggcattgatcttag

SEQ ID NO: 91488 - DNA, 15 bp, Homo sapiens
aaggcattgatctta

SEQ ID NO: 91489 - DNA, 15 bp, Homo sapiens
aaaggcattgatctt

SEQ ID NO: 91490 - DNA, 15 bp, Homo sapiens
taaaggcattgatct

SEQ ID NO: 91491 - DNA, 15 bp, Homo sapiens
ctaaaggcattgatc

SEQ ID NO: 91492 - DNA, 15 bp, Homo sapiens
gctaaaggcattgat

SEQ ID NO: 91493 - DNA, 15 bp, Homo sapiens
ggctaaaggcattga

SEQ ID NO: 91494 - DNA, 15 bp, Homo sapiens
aggctaaaggcattg

SEQ ID NO: 91495 - DNA, 15 bp, Homo sapiens
aaggctaaaggcatt

SEQ ID NO: 91496 - DNA, 15 bp, Homo sapiens
caaggctaaaggcat

SEQ ID NO: 91497 - DNA, 15 bp, Homo sapiens
tcaaggctaaaggca

SEQ ID NO: 91498 - DNA, 15 bp, Homo sapiens
atcaaggctaaaggc

SEQ ID NO: 91499 - DNA, 15 bp, Homo sapiens
gatcaaggctaaagg

SEQ ID NO: 91500 - DNA, 15 bp, Homo sapiens
tgatcaaggctaaag

SEQ ID NO: 91501 - DNA, 15 bp, Homo sapiens
atgatcaaggctaaa

SEQ ID NO: 91502 - DNA, 15 bp, Homo sapiens
tatgatcaaggctaa

SEQ ID NO: 91503 - DNA, 15 bp, Homo sapiens
ttatgatcaaggcta

SEQ ID NO: 91504 - DNA, 15 bp, Homo sapiens
gttatgatcaaggct

SEQ ID NO: 91505 - DNA, 15 bp, Homo sapiens
ggttatgatcaaggc

SEQ ID NO: 91506 - DNA, 15 bp, Homo sapiens
aggttatgatcaagg

SEQ ID NO: 91507 - DNA, 15 bp, Homo sapiens
aaggttatgatcaag

SEQ ID NO: 91508 - DNA, 15 bp, Homo sapiens
caaggttatgatcaa

SEQ ID NO: 91509 - DNA, 15 bp, Homo sapiens
tcaaggttatgatca

SEQ ID NO: 91510 - DNA, 15 bp, Homo sapiens
ttcaaggttatgatc

SEQ ID NO: 91511 - DNA, 15 bp, Homo sapiens
gttcaaggttatgat

SEQ ID NO: 91512 - DNA, 15 bp, Homo sapiens
agttcaaggttatga

SEQ ID NO: 91513 - DNA, 15 bp, Homo sapiens
gagttcaaggttatg

SEQ ID NO: 91514 - DNA, 15 bp, Homo sapiens
agagttcaaggttat

SEQ ID NO: 91515 - DNA, 15 bp, Homo sapiens
tagagttcaaggtta

SEQ ID NO: 91516 - DNA, 15 bp, Homo sapiens
ttagagttcaaggtt

SEQ ID NO: 91517 - DNA, 15 bp, Homo sapiens
attagagttcaaggt

SEQ ID NO: 91518 - DNA, 15 bp, Homo sapiens
gattagagttcaagg

SEQ ID NO: 91519 - DNA, 15 bp, Homo sapiens
agattagagttcaag

SEQ ID NO: 91520 - DNA, 15 bp, Homo sapiens
gagattagagttcaa

SEQ ID NO: 91521 - DNA, 15 bp, Homo sapiens
tgagattagagttca

SEQ ID NO: 91522 - DNA, 15 bp, Homo sapiens
ttgagattagagttc

SEQ ID NO: 91523 - DNA, 15 bp, Homo sapiens
tttgagattagagtt

SEQ ID NO: 91524 - DNA, 15 bp, Homo sapiens
atttgagattagagt

SEQ ID NO: 91525 - DNA, 15 bp, Homo sapiens
aatttgagattagag

SEQ ID NO: 91526 - DNA, 15 bp, Homo sapiens
gaatttgagattaga

SEQ ID NO: 91527 - DNA, 15 bp, Homo sapiens
agaatttgagattag

SEQ ID NO: 91528 - DNA, 15 bp, Homo sapiens
gagaatttgagatta

SEQ ID NO: 91529 - DNA, 15 bp, Homo sapiens
tgagaatttgagatt

SEQ ID NO: 91530 - DNA, 15 bp, Homo sapiens
gtgagaatttgagat

SEQ ID NO: 91531 - DNA, 15 bp, Homo sapiens
agtgagaatttgaga

SEQ ID NO: 91532 - DNA, 15 bp, Homo sapiens
aagtgagaatttgag

SEQ ID NO: 91533 - DNA, 15 bp, Homo sapiens
caagtgagaatttga

SEQ ID NO: 91534 - DNA, 15 bp, Homo sapiens
gcaagtgagaatttg

SEQ ID NO: 91535 - DNA, 15 bp, Homo sapiens
ggcaagtgagaattt

SEQ ID NO: 91536 - DNA, 15 bp, Homo sapiens
aggcaagtgagaatt

SEQ ID NO: 91537 - DNA, 15 bp, Homo sapiens
taggcaagtgagaat

SEQ ID NO: 91538 - DNA, 15 bp, Homo sapiens
ctaggcaagtgagaa

SEQ ID NO: 91539 - DNA, 15 bp, Homo sapiens
actaggcaagtgaga

SEQ ID NO: 91540 - DNA, 15 bp, Homo sapiens
cactaggcaagtgag

SEQ ID NO: 91541 - DNA, 15 bp, Homo sapiens
ccactaggcaagtga

SEQ ID NO: 91542 - DNA, 15 bp, Homo sapiens
tccactaggcaagtg

SEQ ID NO: 91543 - DNA, 15 bp, Homo sapiens
atccactaggcaagt

SEQ ID NO: 91544 - DNA, 15 bp, Homo sapiens
aatccactaggcaag

SEQ ID NO: 91545 - DNA, 15 bp, Homo sapiens
caatccactaggcaa

SEQ ID NO: 91546 - DNA, 15 bp, Homo sapiens
gcaatccactaggca

SEQ ID NO: 91547 - DNA, 15 bp, Homo sapiens
agcaatccactaggc

SEQ ID NO: 91548 - DNA, 15 bp, Homo sapiens
gagcaatccactagg

SEQ ID NO: 91549 - DNA, 15 bp, Homo sapiens
ggagcaatccactag

SEQ ID NO: 91550 - DNA, 15 bp, Homo sapiens
tggagcaatccacta

SEQ ID NO: 91551 - DNA, 15 bp, Homo sapiens
atggagcaatccact

SEQ ID NO: 91552 - DNA, 15 bp, Homo sapiens
aatggagcaatccac

SEQ ID NO: 91553 - DNA, 15 bp, Homo sapiens
aaatggagcaatcca

SEQ ID NO: 91554 - DNA, 15 bp, Homo sapiens
taaatggagcaatcc

SEQ ID NO: 91555 - DNA, 15 bp, Homo sapiens
ctaaatggagcaatc

SEQ ID NO: 91556 - DNA, 15 bp, Homo sapiens
tctaaatggagcaat

SEQ ID NO: 91557 - DNA, 15 bp, Homo sapiens
atctaaatggagcaa

SEQ ID NO: 91558 - DNA, 15 bp, Homo sapiens
tatctaaatggagca

SEQ ID NO: 91559 - DNA, 15 bp, Homo sapiens
ctatctaaatggagc

SEQ ID NO: 91560 - DNA, 15 bp, Homo sapiens
actatctaaatggag

SEQ ID NO: 91561 - DNA, 15 bp, Homo sapiens
tactatctaaatgga

SEQ ID NO: 91562 - DNA, 15 bp, Homo sapiens
atactatctaaatgg

SEQ ID NO: 91563 - DNA, 15 bp, Homo sapiens
tatactatctaaatg

SEQ ID NO: 91564 - DNA, 15 bp, Homo sapiens
atatactatctaaat

SEQ ID NO: 91565 - DNA, 15 bp, Homo sapiens
tatatactatctaaa

SEQ ID NO: 91566 - DNA, 15 bp, Homo sapiens
ctatatactatctaa

SEQ ID NO: 91567 - DNA, 15 bp, Homo sapiens
tctatatactatcta

SEQ ID NO: 91568 - DNA, 15 bp, Homo sapiens
atctatatactatct

SEQ ID NO: 91569 - DNA, 15 bp, Homo sapiens
tatctatatactatc

SEQ ID NO: 91570 - DNA, 15 bp, Homo sapiens
gtatctatatactat

SEQ ID NO: 91571 - DNA, 15 bp, Homo sapiens
ggtatctatatacta

SEQ ID NO: 91572 - DNA, 15 bp, Homo sapiens
gggtatctatatact

SEQ ID NO: 91573 - DNA, 15 bp, Homo sapiens
ggggtatctatatac

SEQ ID NO: 91574 - DNA, 15 bp, Homo sapiens
tggggtatctatata

SEQ ID NO: 91575 - DNA, 15 bp, Homo sapiens
ttggggtatctatat

SEQ ID NO: 91576 - DNA, 15 bp, Homo sapiens
gttggggtatctata

SEQ ID NO: 91577 - DNA, 15 bp, Homo sapiens
ggttggggtatctat

SEQ ID NO: 91578 - DNA, 15 bp, Homo sapiens
aggttggggtatcta

SEQ ID NO: 91579 - DNA, 15 bp, Homo sapiens
caggttggggtatct

SEQ ID NO: 91580 - DNA, 15 bp, Homo sapiens
ccaggttggggtatc

SEQ ID NO: 91581 - DNA, 15 bp, Homo sapiens
tccaggttggggtat

SEQ ID NO: 91582 - DNA, 15 bp, Homo sapiens
atccaggttggggta

SEQ ID NO: 91583 - DNA, 15 bp, Homo sapiens
tatccaggttggggt

SEQ ID NO: 91584 - DNA, 15 bp, Homo sapiens
atatccaggttgggg

SEQ ID NO: 91585 - DNA, 15 bp, Homo sapiens
catatccaggttggg

SEQ ID NO: 91586 - DNA, 15 bp, Homo sapiens
acatatccaggttgg

SEQ ID NO: 91587 - DNA, 15 bp, Homo sapiens
gacatatccaggttg

SEQ ID NO: 91588 - DNA, 15 bp, Homo sapiens
ggacatatccaggtt

SEQ ID NO: 91589 - DNA, 15 bp, Homo sapiens
aggacatatccaggt

SEQ ID NO: 91590 - DNA, 15 bp, Homo sapiens
taggacatatccagg

SEQ ID NO: 91591 - DNA, 15 bp, Homo sapiens
ctaggacatatccag

SEQ ID NO: 91592 - DNA, 15 bp, Homo sapiens
actaggacatatcca

SEQ ID NO: 91593 - DNA, 15 bp, Homo sapiens
aactaggacatatcc

SEQ ID NO: 91594 - DNA, 15 bp, Homo sapiens
aaactaggacatatc

SEQ ID NO: 91595 - DNA, 15 bp, Homo sapiens
aaaactaggacatat

SEQ ID NO: 91596 - DNA, 15 bp, Homo sapiens
gaaaactaggacata

SEQ ID NO: 91597 - DNA, 15 bp, Homo sapiens
agaaaactaggacat

SEQ ID NO: 91598 - DNA, 15 bp, Homo sapiens
aagaaaactaggaca

SEQ ID NO: 91599 - DNA, 15 bp, Homo sapiens
aaagaaaactaggac

SEQ ID NO: 91600 - DNA, 15 bp, Homo sapiens
gaaagaaaactagga

SEQ ID NO: 91601 - DNA, 15 bp, Homo sapiens
ggaaagaaaactagg

SEQ ID NO: 91602 - DNA, 15 bp, Homo sapiens
gggaaagaaaactag

SEQ ID NO: 91603 - DNA, 15 bp, Homo sapiens
ggggaaagaaaacta

SEQ ID NO: 91604 - DNA, 15 bp, Homo sapiens
aggggaaagaaaact

SEQ ID NO: 91605 - DNA, 15 bp, Homo sapiens
aaggggaaagaaaac

SEQ ID NO: 91606 - DNA, 15 bp, Homo sapiens
caaggggaaagaaaa

SEQ ID NO: 91607 - DNA, 15 bp, Homo sapiens
ccaaggggaaagaaa

SEQ ID NO: 91608 - DNA, 15 bp, Homo sapiens
tccaaggggaaagaa

SEQ ID NO: 91609 - DNA, 15 bp, Homo sapiens
ttccaaggggaaaga

SEQ ID NO: 91610 - DNA, 15 bp, Homo sapiens
gttccaaggggaaag

SEQ ID NO: 91611 - DNA, 15 bp, Homo sapiens
agttccaaggggaaa

SEQ ID NO: 91612 - DNA, 15 bp, Homo sapiens
aagttccaaggggaa

SEQ ID NO: 91613 - DNA, 15 bp, Homo sapiens
taagttccaagggga

SEQ ID NO: 91614 - DNA, 15 bp, Homo sapiens
ttaagttccaagggg

SEQ ID NO: 91615 - DNA, 15 bp, Homo sapiens
attaagttccaaggg

SEQ ID NO: 91616 - DNA, 15 bp, Homo sapiens
cattaagttccaagg

SEQ ID NO: 91617 - DNA, 15 bp, Homo sapiens
gcattaagttccaag

SEQ ID NO: 91618 - DNA, 15 bp, Homo sapiens
agcattaagttccaa

SEQ ID NO: 91619 - DNA, 15 bp, Homo sapiens
aagcattaagttcca

SEQ ID NO: 91620 - DNA, 15 bp, Homo sapiens
aaagcattaagttcc

SEQ ID NO: 91621 - DNA, 15 bp, Homo sapiens
aaaagcattaagttc

SEQ ID NO: 91622 - DNA, 15 bp, Homo sapiens
gaaaagcattaagtt

SEQ ID NO: 91623 - DNA, 15 bp, Homo sapiens
agaaaagcattaagt

SEQ ID NO: 91624 - DNA, 15 bp, Homo sapiens
aagaaaagcattaag

SEQ ID NO: 91625 - DNA, 15 bp, Homo sapiens
caagaaaagcattaa

SEQ ID NO: 91626 - DNA, 15 bp, Homo sapiens
gcaagaaaagcatta

SEQ ID NO: 91627 - DNA, 15 bp, Homo sapiens
ggcaagaaaagcatt

SEQ ID NO: 91628 - DNA, 15 bp, Homo sapiens
tggcaagaaaagcat

SEQ ID NO: 91629 - DNA, 15 bp, Homo sapiens
atggcaagaaaagca

SEQ ID NO: 91630 - DNA, 15 bp, Homo sapiens
gatggcaagaaaagc

SEQ ID NO: 91631 - DNA, 15 bp, Homo sapiens
ggatggcaagaaaag

SEQ ID NO: 91632 - DNA, 15 bp, Homo sapiens
gggatggcaagaaaa

SEQ ID NO: 91633 - DNA, 15 bp, Homo sapiens
agggatggcaagaaa

SEQ ID NO: 91634 - DNA, 15 bp, Homo sapiens
cagggatggcaagaa

SEQ ID NO: 91635 - DNA, 15 bp, Homo sapiens
acagggatggcaaga

SEQ ID NO: 91636 - DNA, 15 bp, Homo sapiens
gacagggatggcaag

SEQ ID NO: 91637 - DNA, 15 bp, Homo sapiens
tgacagggatggcaa

SEQ ID NO: 91638 - DNA, 15 bp, Homo sapiens
gtgacagggatggca

SEQ ID NO: 91639 - DNA, 15 bp, Homo sapiens
tgtgacagggatggc

SEQ ID NO: 91640 - DNA, 15 bp, Homo sapiens
gtgtgacagggatgg

SEQ ID NO: 91641 - DNA, 15 bp, Homo sapiens
agtgtgacagggatg

SEQ ID NO: 91642 - DNA, 15 bp, Homo sapiens
gagtgtgacagggat

SEQ ID NO: 91643 - DNA, 15 bp, Homo sapiens
tgagtgtgacaggga

SEQ ID NO: 91644 - DNA, 15 bp, Homo sapiens
ctgagtgtgacaggg

SEQ ID NO: 91645 - DNA, 15 bp, Homo sapiens
actgagtgtgacagg

SEQ ID NO: 91646 - DNA, 15 bp, Homo sapiens
cactgagtgtgacag

SEQ ID NO: 91647 - DNA, 15 bp, Homo sapiens
ccactgagtgtgaca

SEQ ID NO: 91648 - DNA, 15 bp, Homo sapiens
gccactgagtgtgac

SEQ ID NO: 91649 - DNA, 15 bp, Homo sapiens
tgccactgagtgtga

SEQ ID NO: 91650 - DNA, 15 bp, Homo sapiens
gtgccactgagtgtg

SEQ ID NO: 91651 - DNA, 15 bp, Homo sapiens
agtgccactgagtgt

SEQ ID NO: 91652 - DNA, 15 bp, Homo sapiens
tagtgccactgagtg

SEQ ID NO: 91653 - DNA, 15 bp, Homo sapiens
gtagtgccactgagt

SEQ ID NO: 91654 - DNA, 15 bp, Homo sapiens
ggtagtgccactgag

SEQ ID NO: 91655 - DNA, 15 bp, Homo sapiens
tggtagtgccactga

SEQ ID NO: 91656 - DNA, 15 bp, Homo sapiens
atggtagtgccactg

SEQ ID NO: 91657 - DNA, 15 bp, Homo sapiens
gatggtagtgccact

SEQ ID NO: 91658 - DNA, 15 bp, Homo sapiens
ggatggtagtgccac

SEQ ID NO: 91659 - DNA, 15 bp, Homo sapiens
tggatggtagtgcca

SEQ ID NO: 91660 - DNA, 15 bp, Homo sapiens
gtggatggtagtgcc

SEQ ID NO: 91661 - DNA, 15 bp, Homo sapiens
agtggatggtagtgc

SEQ ID NO: 91662 - DNA, 15 bp, Homo sapiens
gagtggatggtagtg

SEQ ID NO: 91663 - DNA, 15 bp, Homo sapiens
cgagtggatggtagt

SEQ ID NO: 91664 - DNA, 15 bp, Homo sapiens
ccgagtggatggtag

SEQ ID NO: 91665 - DNA, 15 bp, Homo sapiens
accgagtggatggta

SEQ ID NO: 91666 - DNA, 15 bp, Homo sapiens
aaccgagtggatggt

SEQ ID NO: 91667 - DNA, 15 bp, Homo sapiens
caaccgagtggatgg

SEQ ID NO: 91668 - DNA, 15 bp, Homo sapiens
gcaaccgagtggatg

SEQ ID NO: 91669 - DNA, 15 bp, Homo sapiens
ggcaaccgagtggat

SEQ ID NO: 91670 - DNA, 15 bp, Homo sapiens
gggcaaccgagtgga

SEQ ID NO: 91671 - DNA, 15 bp, Homo sapiens
tgggcaaccgagtgg

SEQ ID NO: 91672 - DNA, 15 bp, Homo sapiens
ttgggcaaccgagtg

SEQ ID NO: 91673 - DNA, 15 bp, Homo sapiens
cttgggcaaccgagt

SEQ ID NO: 91674 - DNA, 15 bp, Homo sapiens
gcttgggcaaccgag

SEQ ID NO: 91675 - DNA, 15 bp, Homo sapiens
agcttgggcaaccga

SEQ ID NO: 91676 - DNA, 15 bp, Homo sapiens
cagcttgggcaaccg

SEQ ID NO: 91677 - DNA, 15 bp, Homo sapiens
ccagcttgggcaacc

SEQ ID NO: 91678 - DNA, 15 bp, Homo sapiens
gccagcttgggcaac

SEQ ID NO: 91679 - DNA, 15 bp, Homo sapiens
agccagcttgggcaa

SEQ ID NO: 91680 - DNA, 15 bp, Homo sapiens
gagccagcttgggca

SEQ ID NO: 91681 - DNA, 15 bp, Homo sapiens
agagccagcttgggc

SEQ ID NO: 91682 - DNA, 15 bp, Homo sapiens
aagagccagcttggg

SEQ ID NO: 91683 - DNA, 15 bp, Homo sapiens
taagagccagcttgg

SEQ ID NO: 91684 - DNA, 15 bp, Homo sapiens
ctaagagccagcttg

SEQ ID NO: 91685 - DNA, 15 bp, Homo sapiens
tctaagagccagctt

SEQ ID NO: 91686 - DNA, 15 bp, Homo sapiens
ctctaagagccagct

SEQ ID NO: 91687 - DNA, 15 bp, Homo sapiens
actctaagagccagc

SEQ ID NO: 91688 - DNA, 15 bp, Homo sapiens
aactctaagagccag

SEQ ID NO: 91689 - DNA, 15 bp, Homo sapiens
taactctaagagcca

SEQ ID NO: 91690 - DNA, 15 bp, Homo sapiens
ataactctaagagcc

SEQ ID NO: 91691 - DNA, 15 bp, Homo sapiens
gataactctaagagc

SEQ ID NO: 91692 - DNA, 15 bp, Homo sapiens
ggataactctaagag

SEQ ID NO: 91693 - DNA, 15 bp, Homo sapiens
aggataactctaaga

SEQ ID NO: 91694 - DNA, 15 bp, Homo sapiens
taggataactctaag

SEQ ID NO: 91695 - DNA, 15 bp, Homo sapiens
ctaggataactctaa

SEQ ID NO: 91696 - DNA, 15 bp, Homo sapiens
tctaggataactcta

SEQ ID NO: 91697 - DNA, 15 bp, Homo sapiens
atctaggataactct

SEQ ID NO: 91698 - DNA, 15 bp, Homo sapiens
catctaggataactc

SEQ ID NO: 91699 - DNA, 15 bp, Homo sapiens
gcatctaggataact

SEQ ID NO: 91700 - DNA, 15 bp, Homo sapiens
agcatctaggataac

SEQ ID NO: 91701 - DNA, 15 bp, Homo sapiens
aagcatctaggataa

SEQ ID NO: 91702 - DNA, 15 bp, Homo sapiens
caagcatctaggata

SEQ ID NO: 91703 - DNA, 15 bp, Homo sapiens
gcaagcatctaggat

SEQ ID NO: 91704 - DNA, 15 bp, Homo sapiens
agcaagcatctagga

SEQ ID NO: 91705 - DNA, 15 bp, Homo sapiens
aagcaagcatctagg

SEQ ID NO: 91706 - DNA, 15 bp, Homo sapiens
aaagcaagcatctag

SEQ ID NO: 91707 - DNA, 15 bp, Homo sapiens
caaagcaagcatcta

SEQ ID NO: 91708 - DNA, 15 bp, Homo sapiens
gcaaagcaagcatct

SEQ ID NO: 91709 - DNA, 15 bp, Homo sapiens
agcaaagcaagcatc

SEQ ID NO: 91710 - DNA, 15 bp, Homo sapiens
cagcaaagcaagcat

SEQ ID NO: 91711 - DNA, 15 bp, Homo sapiens
acagcaaagcaagca

SEQ ID NO: 91712 - DNA, 15 bp, Homo sapiens
aacagcaaagcaagc

SEQ ID NO: 91713 - DNA, 15 bp, Homo sapiens
caacagcaaagcaag

SEQ ID NO: 91714 - DNA, 15 bp, Homo sapiens
gcaacagcaaagcaa

SEQ ID NO: 91715 - DNA, 15 bp, Homo sapiens
tgcaacagcaaagca

SEQ ID NO: 91716 - DNA, 15 bp, Homo sapiens
ctgcaacagcaaagc

SEQ ID NO: 91717 - DNA, 15 bp, Homo sapiens
tctgcaacagcaaag

SEQ ID NO: 91718 - DNA, 15 bp, Homo sapiens
atctgcaacagcaaa

SEQ ID NO: 91719 - DNA, 15 bp, Homo sapiens
aatctgcaacagcaa

SEQ ID NO: 91720 - DNA, 15 bp, Homo sapiens
aaatctgcaacagca

SEQ ID NO: 91721 - DNA, 15 bp, Homo sapiens
gaaatctgcaacagc

SEQ ID NO: 91722 - DNA, 15 bp, Homo sapiens
ggaaatctgcaacag

SEQ ID NO: 91723 - DNA, 15 bp, Homo sapiens
gggaaatctgcaaca

SEQ ID NO: 91724 - DNA, 15 bp, Homo sapiens
tgggaaatctgcaac

SEQ ID NO: 91725 - DNA, 15 bp, Homo sapiens
gtgggaaatctgcaa

SEQ ID NO: 91726 - DNA, 15 bp, Homo sapiens
tgtgggaaatctgca

SEQ ID NO: 91727 - DNA, 15 bp, Homo sapiens
atgtgggaaatctgc

SEQ ID NO: 91728 - DNA, 15 bp, Homo sapiens
aatgtgggaaatctg

SEQ ID NO: 91729 - DNA, 15 bp, Homo sapiens
gaatgtgggaaatct

SEQ ID NO: 91730 - DNA, 15 bp, Homo sapiens
tgaatgtgggaaatc

SEQ ID NO: 91731 - DNA, 15 bp, Homo sapiens
ttgaatgtgggaaat

SEQ ID NO: 91732 - DNA, 15 bp, Homo sapiens
gttgaatgtgggaaa

SEQ ID NO: 91733 - DNA, 15 bp, Homo sapiens
agttgaatgtgggaa

SEQ ID NO: 91734 - DNA, 15 bp, Homo sapiens
cagttgaatgtggga

SEQ ID NO: 91735 - DNA, 15 bp, Homo sapiens
ccagttgaatgtggg

SEQ ID NO: 91736 - DNA, 15 bp, Homo sapiens
accagttgaatgtgg

SEQ ID NO: 91737 - DNA, 15 bp, Homo sapiens
aaccagttgaatgtg

SEQ ID NO: 91738 - DNA, 15 bp, Homo sapiens
taaccagttgaatgt

SEQ ID NO: 91739 - DNA, 15 bp, Homo sapiens
ataaccagttgaatg

SEQ ID NO: 91740 - DNA, 15 bp, Homo sapiens
cataaccagttgaat

SEQ ID NO: 91741 - DNA, 15 bp, Homo sapiens
acataaccagttgaa

SEQ ID NO: 91742 - DNA, 15 bp, Homo sapiens
aacataaccagttga

SEQ ID NO: 91743 - DNA, 15 bp, Homo sapiens
caacataaccagttg

SEQ ID NO: 91744 - DNA, 15 bp, Homo sapiens
acaacataaccagtt

SEQ ID NO: 91745 - DNA, 15 bp, Homo sapiens
gacaacataaccagt

SEQ ID NO: 91746 - DNA, 15 bp, Homo sapiens
tgacaacataaccag

SEQ ID NO: 91747 - DNA, 15 bp, Homo sapiens
ctgacaacataacca

SEQ ID NO: 91748 - DNA, 15 bp, Homo sapiens
actgacaacataacc

SEQ ID NO: 91749 - DNA, 15 bp, Homo sapiens
aactgacaacataac

SEQ ID NO: 91750 - DNA, 15 bp, Homo sapiens
gaactgacaacataa

SEQ ID NO: 91751 - DNA, 15 bp, Homo sapiens
agaactgacaacata

SEQ ID NO: 91752 - DNA, 15 bp, Homo sapiens
aagaactgacaacat

SEQ ID NO: 91753 - DNA, 15 bp, Homo sapiens
gaagaactgacaaca

SEQ ID NO: 91754 - DNA, 15 bp, Homo sapiens
ggaagaactgacaac

SEQ ID NO: 91755 - DNA, 15 bp, Homo sapiens
tggaagaactgacaa

SEQ ID NO: 91756 - DNA, 15 bp, Homo sapiens
ctggaagaactgaca

SEQ ID NO: 91757 - DNA, 15 bp, Homo sapiens
cctggaagaactgac

SEQ ID NO: 91758 - DNA, 15 bp, Homo sapiens
acctggaagaactga

SEQ ID NO: 91759 - DNA, 15 bp, Homo sapiens
tacctggaagaactg

SEQ ID NO: 91760 - DNA, 15 bp, Homo sapiens
atacctggaagaact

SEQ ID NO: 91761 - DNA, 15 bp, Homo sapiens
catacctggaagaac

SEQ ID NO: 91762 - DNA, 15 bp, Homo sapiens
ccatacctggaagaa

SEQ ID NO: 91763 - DNA, 15 bp, Homo sapiens
tccatacctggaaga

SEQ ID NO: 91764 - DNA, 15 bp, Homo sapiens
gtccatacctggaag

SEQ ID NO: 91765 - DNA, 15 bp, Homo sapiens
ggtccatacctggaa

SEQ ID NO: 91766 - DNA, 15 bp, Homo sapiens
aggtccatacctgga

SEQ ID NO: 91767 - DNA, 15 bp, Homo sapiens
gaggtccatacctgg

SEQ ID NO: 91768 - DNA, 15 bp, Homo sapiens
agaggtccatacctg

SEQ ID NO: 91769 - DNA, 15 bp, Homo sapiens
tagaggtccatacct

SEQ ID NO: 91770 - DNA, 15 bp, Homo sapiens
ttagaggtccatacc

SEQ ID NO: 91771 - DNA, 15 bp, Homo sapiens
tttagaggtccatac

SEQ ID NO: 91772 - DNA, 15 bp, Homo sapiens
ttttagaggtccata

SEQ ID NO: 91773 - DNA, 15 bp, Homo sapiens
attttagaggtccat

SEQ ID NO: 91774 - DNA, 15 bp, Homo sapiens
tattttagaggtcca

SEQ ID NO: 91775 - DNA, 15 bp, Homo sapiens
ttattttagaggtcc

SEQ ID NO: 91776 - DNA, 15 bp, Homo sapiens
cttattttagaggtc

SEQ ID NO: 91777 - DNA, 15 bp, Homo sapiens
ccttattttagaggt

SEQ ID NO: 91778 - DNA, 15 bp, Homo sapiens
gccttattttagagg

SEQ ID NO: 91779 - DNA, 15 bp, Homo sapiens
agccttattttagag

SEQ ID NO: 91780 - DNA, 15 bp, Homo sapiens
aagccttattttaga

SEQ ID NO: 91781 - DNA, 15 bp, Homo sapiens
gaagccttattttag

SEQ ID NO: 91782 - DNA, 15 bp, Homo sapiens
ggaagccttatttta

SEQ ID NO: 91783 - DNA, 15 bp, Homo sapiens
aggaagccttatttt

SEQ ID NO: 91784 - DNA, 15 bp, Homo sapiens
gaggaagccttattt

SEQ ID NO: 91785 - DNA, 15 bp, Homo sapiens
agaggaagccttatt

SEQ ID NO: 91786 - DNA, 15 bp, Homo sapiens
gagaggaagccttat

SEQ ID NO: 91787 - DNA, 15 bp, Homo sapiens
ggagaggaagcctta

SEQ ID NO: 91788 - DNA, 15 bp, Homo sapiens
tggagaggaagcctt

SEQ ID NO: 91789 - DNA, 15 bp, Homo sapiens
atggagaggaagcct

SEQ ID NO: 91790 - DNA, 15 bp, Homo sapiens
aatggagaggaagcc

SEQ ID NO: 91791 - DNA, 15 bp, Homo sapiens
gaatggagaggaagc

SEQ ID NO: 91792 - DNA, 15 bp, Homo sapiens
ggaatggagaggaag

SEQ ID NO: 91793 - DNA, 15 bp, Homo sapiens
cggaatggagaggaa

SEQ ID NO: 91794 - DNA, 15 bp, Homo sapiens
ccggaatggagagga

SEQ ID NO: 91795 - DNA, 15 bp, Homo sapiens
accggaatggagagg

SEQ ID NO: 91796 - DNA, 15 bp, Homo sapiens
aaccggaatggagag

SEQ ID NO: 91797 - DNA, 15 bp, Homo sapiens
caaccggaatggaga

SEQ ID NO: 91798 - DNA, 15 bp, Homo sapiens
acaaccggaatggag

SEQ ID NO: 91799 - DNA, 15 bp, Homo sapiens
gacaaccggaatgga

SEQ ID NO: 91800 - DNA, 15 bp, Homo sapiens
tgacaaccggaatgg

SEQ ID NO: 91801 - DNA, 15 bp, Homo sapiens
atgacaaccggaatg

SEQ ID NO: 91802 - DNA, 15 bp, Homo sapiens
aatgacaaccggaat

SEQ ID NO: 91803 - DNA, 15 bp, Homo sapiens
caatgacaaccggaa

SEQ ID NO: 91804 - DNA, 15 bp, Homo sapiens
gcaatgacaaccgga

SEQ ID NO: 91805 - DNA, 15 bp, Homo sapiens
ggcaatgacaaccgg

SEQ ID NO: 91806 - DNA, 15 bp, Homo sapiens
aggcaatgacaaccg

SEQ ID NO: 91807 - DNA, 15 bp, Homo sapiens
aaggcaatgacaacc

SEQ ID NO: 91808 - DNA, 15 bp, Homo sapiens
aaaggcaatgacaac

SEQ ID NO: 91809 - DNA, 15 bp, Homo sapiens
caaaggcaatgacaa

SEQ ID NO: 91810 - DNA, 15 bp, Homo sapiens
acaaaggcaatgaca

SEQ ID NO: 91811 - DNA, 15 bp, Homo sapiens
gacaaaggcaatgac

SEQ ID NO: 91812 - DNA, 15 bp, Homo sapiens
ggacaaaggcaatga

SEQ ID NO: 91813 - DNA, 15 bp, Homo sapiens
tggacaaaggcaatg

SEQ ID NO: 91814 - DNA, 15 bp, Homo sapiens
ttggacaaaggcaat

SEQ ID NO: 91815 - DNA, 15 bp, Homo sapiens
tttggacaaaggcaa

SEQ ID NO: 91816 - DNA, 15 bp, Homo sapiens
gtttggacaaaggca

SEQ ID NO: 91817 - DNA, 15 bp, Homo sapiens
tgtttggacaaaggc

SEQ ID NO: 91818 - DNA, 15 bp, Homo sapiens
gtgtttggacaaagg

SEQ ID NO: 91819 - DNA, 15 bp, Homo sapiens
tgtgtttggacaaag

SEQ ID NO: 91820 - DNA, 15 bp, Homo sapiens
ctgtgtttggacaaa

SEQ ID NO: 91821 - DNA, 15 bp, Homo sapiens
gctgtgtttggacaa

SEQ ID NO: 91822 - DNA, 15 bp, Homo sapiens
tgctgtgtttggaca

SEQ ID NO: 91823 - DNA, 15 bp, Homo sapiens
gtgctgtgtttggac

SEQ ID NO: 91824 - DNA, 15 bp, Homo sapiens
tgtgctgtgtttgga

SEQ ID NO: 91825 - DNA, 15 bp, Homo sapiens
gtgtgctgtgtttgg

SEQ ID NO: 91826 - DNA, 15 bp, Homo sapiens
tgtgtgctgtgtttg

SEQ ID NO: 91827 - DNA, 15 bp, Homo sapiens
ttgtgtgctgtgttt

SEQ ID NO: 91828 - DNA, 15 bp, Homo sapiens
cttgtgtgctgtgtt

SEQ ID NO: 91829 - DNA, 15 bp, Homo sapiens
ccttgtgtgctgtgt

SEQ ID NO: 91830 - DNA, 15 bp, Homo sapiens
gccttgtgtgctgtg

SEQ ID NO: 91831 - DNA, 15 bp, Homo sapiens
ggccttgtgtgctgt

SEQ ID NO: 91832 - DNA, 15 bp, Homo sapiens
aggccttgtgtgctg

SEQ ID NO: 91833 - DNA, 15 bp, Homo sapiens
aaggccttgtgtgct

SEQ ID NO: 91834 - DNA, 15 bp, Homo sapiens
aaaggccttgtgtgc

SEQ ID NO: 91835 - DNA, 15 bp, Homo sapiens
aaaaggccttgtgtg

SEQ ID NO: 91836 - DNA, 15 bp, Homo sapiens
taaaaggccttgtgt

SEQ ID NO: 91837 - DNA, 15 bp, Homo sapiens
gtaaaaggccttgtg

SEQ ID NO: 91838 - DNA, 15 bp, Homo sapiens
tgtaaaaggccttgt

SEQ ID NO: 91839 - DNA, 15 bp, Homo sapiens
ctgtaaaaggccttg

SEQ ID NO: 91840 - DNA, 15 bp, Homo sapiens
actgtaaaaggcctt

SEQ ID NO: 91841 - DNA, 15 bp, Homo sapiens
aactgtaaaaggcct

SEQ ID NO: 91842 - DNA, 15 bp, Homo sapiens
caactgtaaaaggcc

SEQ ID NO: 91843 - DNA, 15 bp, Homo sapiens
gcaactgtaaaaggc

SEQ ID NO: 91844 - DNA, 15 bp, Homo sapiens
tgcaactgtaaaagg

SEQ ID NO: 91845 - DNA, 15 bp, Homo sapiens
gtgcaactgtaaaag

SEQ ID NO: 91846 - DNA, 15 bp, Homo sapiens
tgtgcaactgtaaaa

SEQ ID NO: 91847 - DNA, 15 bp, Homo sapiens
ttgtgcaactgtaaa

SEQ ID NO: 91848 - DNA, 15 bp, Homo sapiens
gttgtgcaactgtaa

SEQ ID NO: 91849 - DNA, 15 bp, Homo sapiens
agttgtgcaactgta

SEQ ID NO: 91850 - DNA, 15 bp, Homo sapiens
gagttgtgcaactgt

SEQ ID NO: 91851 - DNA, 15 bp, Homo sapiens
agagttgtgcaactg

SEQ ID NO: 91852 - DNA, 15 bp, Homo sapiens
aagagttgtgcaact

SEQ ID NO: 91853 - DNA, 15 bp, Homo sapiens
gaagagttgtgcaac

SEQ ID NO: 91854 - DNA, 15 bp, Homo sapiens
ggaagagttgtgcaa

SEQ ID NO: 91855 - DNA, 15 bp, Homo sapiens
aggaagagttgtgca

SEQ ID NO: 91856 - DNA, 15 bp, Homo sapiens
caggaagagttgtgc

SEQ ID NO: 91857 - DNA, 15 bp, Homo sapiens
acaggaagagttgtg

SEQ ID NO: 91858 - DNA, 15 bp, Homo sapiens
gacaggaagagttgt

SEQ ID NO: 91859 - DNA, 15 bp, Homo sapiens
ggacaggaagagttg

SEQ ID NO: 91860 - DNA, 15 bp, Homo sapiens
tggacaggaagagtt

SEQ ID NO: 91861 - DNA, 15 bp, Homo sapiens
atggacaggaagagt

SEQ ID NO: 91862 - DNA, 15 bp, Homo sapiens
tatggacaggaagag

SEQ ID NO: 91863 - DNA, 15 bp, Homo sapiens
gtatggacaggaaga

SEQ ID NO: 91864 - DNA, 15 bp, Homo sapiens
ggtatggacaggaag

SEQ ID NO: 91865 - DNA, 15 bp, Homo sapiens
gggtatggacaggaa

SEQ ID NO: 91866 - DNA, 15 bp, Homo sapiens
tgggtatggacagga

SEQ ID NO: 91867 - DNA, 15 bp, Homo sapiens
gtgggtatggacagg

SEQ ID NO: 91868 - DNA, 15 bp, Homo sapiens
ggtgggtatggacag

SEQ ID NO: 91869 - DNA, 15 bp, Homo sapiens
tggtgggtatggaca

SEQ ID NO: 91870 - DNA, 15 bp, Homo sapiens
gtggtgggtatggac

SEQ ID NO: 91871 - DNA, 15 bp, Homo sapiens
tgtggtgggtatgga

SEQ ID NO: 91872 - DNA, 15 bp, Homo sapiens
gtgtggtgggtatgg

SEQ ID NO: 91873 - DNA, 15 bp, Homo sapiens
ggtgtggtgggtatg

SEQ ID NO: 91874 - DNA, 15 bp, Homo sapiens
gggtgtggtgggtat

SEQ ID NO: 91875 - DNA, 15 bp, Homo sapiens
agggtgtggtgggta

SEQ ID NO: 91876 - DNA, 15 bp, Homo sapiens
aagggtgtggtgggt

SEQ ID NO: 91877 - DNA, 15 bp, Homo sapiens
aaagggtgtggtggg

SEQ ID NO: 91878 - DNA, 15 bp, Homo sapiens
gaaagggtgtggtgg

SEQ ID NO: 91879 - DNA, 15 bp, Homo sapiens
ggaaagggtgtggtg

SEQ ID NO: 91880 - DNA, 15 bp, Homo sapiens
gggaaagggtgtggt

SEQ ID NO: 91881 - DNA, 15 bp, Homo sapiens
tgggaaagggtgtgg

SEQ ID NO: 91882 - DNA, 15 bp, Homo sapiens
ctgggaaagggtgtg

SEQ ID NO: 91883 - DNA, 15 bp, Homo sapiens
gctgggaaagggtgt

SEQ ID NO: 91884 - DNA, 15 bp, Homo sapiens
agctgggaaagggtg

SEQ ID NO: 91885 - DNA, 15 bp, Homo sapiens
cagctgggaaagggt

SEQ ID NO: 91886 - DNA, 15 bp, Homo sapiens
acagctgggaaaggg

SEQ ID NO: 91887 - DNA, 15 bp, Homo sapiens
tacagctgggaaagg

SEQ ID NO: 91888 - DNA, 15 bp, Homo sapiens
ttacagctgggaaag

SEQ ID NO: 91889 - DNA, 15 bp, Homo sapiens
cttacagctgggaaa

SEQ ID NO: 91890 - DNA, 15 bp, Homo sapiens
gcttacagctgggaa

SEQ ID NO: 91891 - DNA, 15 bp, Homo sapiens
agcttacagctggga

SEQ ID NO: 91892 - DNA, 15 bp, Homo sapiens
aagcttacagctggg

SEQ ID NO: 91893 - DNA, 15 bp, Homo sapiens
gaagcttacagctgg

SEQ ID NO: 91894 - DNA, 15 bp, Homo sapiens
tgaagcttacagctg

SEQ ID NO: 91895 - DNA, 15 bp, Homo sapiens
ctgaagcttacagct

SEQ ID NO: 91896 - DNA, 15 bp, Homo sapiens
tctgaagcttacagc

SEQ ID NO: 91897 - DNA, 15 bp, Homo sapiens
atctgaagcttacag

SEQ ID NO: 91898 - DNA, 15 bp, Homo sapiens
catctgaagcttaca

SEQ ID NO: 91899 - DNA, 15 bp, Homo sapiens
tcatctgaagcttac

SEQ ID NO: 91900 - DNA, 15 bp, Homo sapiens
ctcatctgaagctta

SEQ ID NO: 91901 - DNA, 15 bp, Homo sapiens
actcatctgaagctt

SEQ ID NO: 91902 - DNA, 15 bp, Homo sapiens
aactcatctgaagct

SEQ ID NO: 91903 - DNA, 15 bp, Homo sapiens
caactcatctgaagc

SEQ ID NO: 91904 - DNA, 15 bp, Homo sapiens
gcaactcatctgaag

SEQ ID NO: 91905 - DNA, 15 bp, Homo sapiens
ggcaactcatctgaa

SEQ ID NO: 91906 - DNA, 15 bp, Homo sapiens
aggcaactcatctga

SEQ ID NO: 91907 - DNA, 15 bp, Homo sapiens
gaggcaactcatctg

SEQ ID NO: 91908 - DNA, 15 bp, Homo sapiens
ggaggcaactcatct

SEQ ID NO: 91909 - DNA, 15 bp, Homo sapiens
tggaggcaactcatc

SEQ ID NO: 91910 - DNA, 15 bp, Homo sapiens
ttggaggcaactcat

SEQ ID NO: 91911 - DNA, 15 bp, Homo sapiens
gttggaggcaactca

SEQ ID NO: 91912 - DNA, 15 bp, Homo sapiens
ggttggaggcaactc

SEQ ID NO: 91913 - DNA, 15 bp, Homo sapiens
tggttggaggcaact

SEQ ID NO: 91914 - DNA, 15 bp, Homo sapiens
gtggttggaggcaac

SEQ ID NO: 91915 - DNA, 15 bp, Homo sapiens
ggtggttggaggcaa

SEQ ID NO: 91916 - DNA, 15 bp, Homo sapiens
tggtggttggaggca

SEQ ID NO: 91917 - DNA, 15 bp, Homo sapiens
atggtggttggaggc

SEQ ID NO: 91918 - DNA, 15 bp, Homo sapiens
catggtggttggagg

SEQ ID NO: 91919 - DNA, 15 bp, Homo sapiens
gcatggtggttggag

SEQ ID NO: 91920 - DNA, 15 bp, Homo sapiens
agcatggtggttgga

SEQ ID NO: 91921 - DNA, 15 bp, Homo sapiens
gagcatggtggttgg

SEQ ID NO: 91922 - DNA, 15 bp, Homo sapiens
ggagcatggtggttg

SEQ ID NO: 91923 - DNA, 15 bp, Homo sapiens
aggagcatggtggtt

SEQ ID NO: 91924 - DNA, 15 bp, Homo sapiens
caggagcatggtggt

SEQ ID NO: 91925 - DNA, 15 bp, Homo sapiens
acaggagcatggtgg

SEQ ID NO: 91926 - DNA, 15 bp, Homo sapiens
tacaggagcatggtg

SEQ ID NO: 91927 - DNA, 15 bp, Homo sapiens
ctacaggagcatggt

SEQ ID NO: 91928 - DNA, 15 bp, Homo sapiens
cctacaggagcatgg

SEQ ID NO: 91929 - DNA, 15 bp, Homo sapiens
gcctacaggagcatg

SEQ ID NO: 91930 - DNA, 15 bp, Homo sapiens
ggcctacaggagcat

SEQ ID NO: 91931 - DNA, 15 bp, Homo sapiens
aggcctacaggagca

SEQ ID NO: 91932 - DNA, 15 bp, Homo sapiens
caggcctacaggagc

SEQ ID NO: 91933 - DNA, 15 bp, Homo sapiens
ccaggcctacaggag

SEQ ID NO: 91934 - DNA, 15 bp, Homo sapiens
gccaggcctacagga

SEQ ID NO: 91935 - DNA, 15 bp, Homo sapiens
agccaggcctacagg

SEQ ID NO: 91936 - DNA, 15 bp, Homo sapiens
aagccaggcctacag

SEQ ID NO: 91937 - DNA, 15 bp, Homo sapiens
caagccaggcctaca

SEQ ID NO: 91938 - DNA, 15 bp, Homo sapiens
tcaagccaggcctac

SEQ ID NO: 91939 - DNA, 15 bp, Homo sapiens
ttcaagccaggccta

SEQ ID NO: 91940 - DNA, 15 bp, Homo sapiens
tttcaagccaggcct

SEQ ID NO: 91941 - DNA, 15 bp, Homo sapiens
atttcaagccaggcc

SEQ ID NO: 91942 - DNA, 15 bp, Homo sapiens
catttcaagccaggc

SEQ ID NO: 91943 - DNA, 15 bp, Homo sapiens
gcatttcaagccagg

SEQ ID NO: 91944 - DNA, 15 bp, Homo sapiens
ggcatttcaagccag

SEQ ID NO: 91945 - DNA, 15 bp, Homo sapiens
gggcatttcaagcca

SEQ ID NO: 91946 - DNA, 15 bp, Homo sapiens
agggcatttcaagcc

SEQ ID NO: 91947 - DNA, 15 bp, Homo sapiens
aagggcatttcaagc

SEQ ID NO: 91948 - DNA, 15 bp, Homo sapiens
gaagggcatttcaag

SEQ ID NO: 91949 - DNA, 15 bp, Homo sapiens
agaagggcatttcaa

SEQ ID NO: 91950 - DNA, 15 bp, Homo sapiens
aagaagggcatttca

SEQ ID NO: 91951 - DNA, 15 bp, Homo sapiens
gaagaagggcatttc

SEQ ID NO: 91952 - DNA, 15 bp, Homo sapiens
agaagaagggcattt

SEQ ID NO: 91953 - DNA, 15 bp, Homo sapiens
cagaagaagggcatt

SEQ ID NO: 91954 - DNA, 15 bp, Homo sapiens
acagaagaagggcat

SEQ ID NO: 91955 - DNA, 15 bp, Homo sapiens
gacagaagaagggca

SEQ ID NO: 91956 - DNA, 15 bp, Homo sapiens
tgacagaagaagggc

SEQ ID NO: 91957 - DNA, 15 bp, Homo sapiens
gtgacagaagaaggg

SEQ ID NO: 91958 - DNA, 15 bp, Homo sapiens
tgtgacagaagaagg

SEQ ID NO: 91959 - DNA, 15 bp, Homo sapiens
ctgtgacagaagaag

SEQ ID NO: 91960 - DNA, 15 bp, Homo sapiens
cctgtgacagaagaa

SEQ ID NO: 91961 - DNA, 15 bp, Homo sapiens
ccctgtgacagaaga

SEQ ID NO: 91962 - DNA, 15 bp, Homo sapiens
accctgtgacagaag

SEQ ID NO: 91963 - DNA, 15 bp, Homo sapiens
gaccctgtgacagaa

SEQ ID NO: 91964 - DNA, 15 bp, Homo sapiens
agaccctgtgacaga

SEQ ID NO: 91965 - DNA, 15 bp, Homo sapiens
cagaccctgtgacag

SEQ ID NO: 91966 - DNA, 15 bp, Homo sapiens
ccagaccctgtgaca

SEQ ID NO: 91967 - DNA, 15 bp, Homo sapiens
accagaccctgtgac

SEQ ID NO: 91968 - DNA, 15 bp, Homo sapiens
taccagaccctgtga

SEQ ID NO: 91969 - DNA, 15 bp, Homo sapiens
ctaccagaccctgtg

SEQ ID NO: 91970 - DNA, 15 bp, Homo sapiens
actaccagaccctgt

SEQ ID NO: 91971 - DNA, 15 bp, Homo sapiens
tactaccagaccctg

SEQ ID NO: 91972 - DNA, 15 bp, Homo sapiens
atactaccagaccct

SEQ ID NO: 91973 - DNA, 15 bp, Homo sapiens
tatactaccagaccc

SEQ ID NO: 91974 - DNA, 15 bp, Homo sapiens
atatactaccagacc

SEQ ID NO: 91975 - DNA, 15 bp, Homo sapiens
gatatactaccagac

SEQ ID NO: 91976 - DNA, 15 bp, Homo sapiens
ggatatactaccaga

SEQ ID NO: 91977 - DNA, 15 bp, Homo sapiens
gggatatactaccag

SEQ ID NO: 91978 - DNA, 15 bp, Homo sapiens
agggatatactacca

SEQ ID NO: 91979 - DNA, 15 bp, Homo sapiens
aagggatatactacc

SEQ ID NO: 91980 - DNA, 15 bp, Homo sapiens
caagggatatactac

SEQ ID NO: 91981 - DNA, 15 bp, Homo sapiens
gcaagggatatacta

SEQ ID NO: 91982 - DNA, 15 bp, Homo sapiens
ggcaagggatatact

SEQ ID NO: 91983 - DNA, 15 bp, Homo sapiens
gggcaagggatatac

SEQ ID NO: 91984 - DNA, 15 bp, Homo sapiens
tcaaatacatcagaa

SEQ ID NO: 91985 - DNA, 15 bp, Homo sapiens
ctcaaatacatcaga

SEQ ID NO: 91986 - DNA, 15 bp, Homo sapiens
tctcaaatacatcag

SEQ ID NO: 91987 - DNA, 15 bp, Homo sapiens
ttctcaaatacatca

SEQ ID NO: 91988 - DNA, 15 bp, Homo sapiens
cttctcaaatacatc

SEQ ID NO: 91989 - DNA, 15 bp, Homo sapiens
tcttctcaaatacat

SEQ ID NO: 91990 - DNA, 15 bp, Homo sapiens
ttcttctcaaataca

SEQ ID NO: 91991 - DNA, 15 bp, Homo sapiens
attcttctcaaatac

SEQ ID NO: 91992 - DNA, 15 bp, Homo sapiens
aattcttctcaaata

SEQ ID NO: 91993 - DNA, 15 bp, Homo sapiens
aaattcttctcaaat

SEQ ID NO: 91994 - DNA, 15 bp, Homo sapiens
gaaattcttctcaaa

SEQ ID NO: 91995 - DNA, 15 bp, Homo sapiens
agaaattcttctcaa

SEQ ID NO: 91996 - DNA, 15 bp, Homo sapiens
tagaaattcttctca

SEQ ID NO: 91997 - DNA, 15 bp, Homo sapiens
ttagaaattcttctc

SEQ ID NO: 91998 - DNA, 15 bp, Homo sapiens
tttagaaattcttct

SEQ ID NO: 91999 - DNA, 15 bp, Homo sapiens
ttttagaaattcttc

SEQ ID NO: 92000 - DNA, 15 bp, Homo sapiens
attttagaaattctt

SEQ ID NO: 92001 - DNA, 15 bp, Homo sapiens
aattttagaaattct

SEQ ID NO: 92002 - DNA, 15 bp, Homo sapiens
gaattttagaaattc

SEQ ID NO: 92003 - DNA, 15 bp, Homo sapiens
agaattttagaaatt

SEQ ID NO: 92004 - DNA, 15 bp, Homo sapiens
cagaattttagaaat

SEQ ID NO: 92005 - DNA, 15 bp, Homo sapiens
tcagaattttagaaa

SEQ ID NO: 92006 - DNA, 15 bp, Homo sapiens
gtcagaattttagaa

SEQ ID NO: 92007 - DNA, 15 bp, Homo sapiens
tgtcagaattttaga

SEQ ID NO: 92008 - DNA, 15 bp, Homo sapiens
ttgtcagaattttag

SEQ ID NO: 92009 - DNA, 15 bp, Homo sapiens
tttgtcagaatttta

SEQ ID NO: 92010 - DNA, 15 bp, Homo sapiens
ttttgtcagaatttt

SEQ ID NO: 92011 - DNA, 15 bp, Homo sapiens
attttgtcagaattt

SEQ ID NO: 92012 - DNA, 15 bp, Homo sapiens
gattttgtcagaatt

SEQ ID NO: 92013 - DNA, 15 bp, Homo sapiens
ggattttgtcagaat

SEQ ID NO: 92014 - DNA, 15 bp, Homo sapiens
aggattttgtcagaa

SEQ ID NO: 92015 - DNA, 15 bp, Homo sapiens
caggattttgtcaga

SEQ ID NO: 92016 - DNA, 15 bp, Homo sapiens
tcaggattttgtcag

SEQ ID NO: 92017 - DNA, 15 bp, Homo sapiens
ttcaggattttgtca

SEQ ID NO: 92018 - DNA, 15 bp, Homo sapiens
tttcaggattttgtc

SEQ ID NO: 92019 - DNA, 15 bp, Homo sapiens
gtttcaggattttgt

SEQ ID NO: 92020 - DNA, 15 bp, Homo sapiens
agtttcaggattttg

SEQ ID NO: 92021 - DNA, 15 bp, Homo sapiens
gagtttcaggatttt

SEQ ID NO: 92022 - DNA, 15 bp, Homo sapiens
tgagtttcaggattt

SEQ ID NO: 92023 - DNA, 15 bp, Homo sapiens
ttgagtttcaggatt

SEQ ID NO: 92024 - DNA, 15 bp, Homo sapiens
tttgagtttcaggat

SEQ ID NO: 92025 - DNA, 15 bp, Homo sapiens
atttgagtttcagga

SEQ ID NO: 92026 - DNA, 15 bp, Homo sapiens
tatttgagtttcagg

SEQ ID NO: 92027 - DNA, 15 bp, Homo sapiens
atatttgagtttcag

SEQ ID NO: 92028 - DNA, 15 bp, Homo sapiens
aatatttgagtttca

SEQ ID NO: 92029 - DNA, 15 bp, Homo sapiens
caatatttgagtttc

SEQ ID NO: 92030 - DNA, 15 bp, Homo sapiens
tcaatatttgagttt

SEQ ID NO: 92031 - DNA, 15 bp, Homo sapiens
gtcaatatttgagtt

SEQ ID NO: 92032 - DNA, 15 bp, Homo sapiens
ggtcaatatttgagt

SEQ ID NO: 92033 - DNA, 15 bp, Homo sapiens
gggtcaatatttgag

SEQ ID NO: 92034 - DNA, 15 bp, Homo sapiens
tgggtcaatatttga

SEQ ID NO: 92035 - DNA, 15 bp, Homo sapiens
ctgggtcaatatttg

SEQ ID NO: 92036 - DNA, 15 bp, Homo sapiens
tctgggtcaatattt

SEQ ID NO: 92037 - DNA, 15 bp, Homo sapiens
gtctgggtcaatatt

SEQ ID NO: 92038 - DNA, 15 bp, Homo sapiens
tgtctgggtcaatat

SEQ ID NO: 92039 - DNA, 15 bp, Homo sapiens
atgtctgggtcaata

SEQ ID NO: 92040 - DNA, 15 bp, Homo sapiens
catgtctgggtcaat

SEQ ID NO: 92041 - DNA, 15 bp, Homo sapiens
tcatgtctgggtcaa

SEQ ID NO: 92042 - DNA, 15 bp, Homo sapiens
ctcatgtctgggtca

SEQ ID NO: 92043 - DNA, 15 bp, Homo sapiens
gctcatgtctgggtc

SEQ ID NO: 92044 - DNA, 15 bp, Homo sapiens
tgctcatgtctgggt

SEQ ID NO: 92045 - DNA, 15 bp, Homo sapiens
ttgctcatgtctggg

SEQ ID NO: 92046 - DNA, 15 bp, Homo sapiens
attgctcatgtctgg

SEQ ID NO: 92047 - DNA, 15 bp, Homo sapiens
aattgctcatgtctg

SEQ ID NO: 92048 - DNA, 15 bp, Homo sapiens
aaattgctcatgtct

SEQ ID NO: 92049 - DNA, 15 bp, Homo sapiens
caaattgctcatgtc

SEQ ID NO: 92050 - DNA, 15 bp, Homo sapiens
gcaaattgctcatgt

SEQ ID NO: 92051 - DNA, 15 bp, Homo sapiens
agcaaattgctcatg

SEQ ID NO: 92052 - DNA, 15 bp, Homo sapiens
aagcaaattgctcat

SEQ ID NO: 92053 - DNA, 15 bp, Homo sapiens
aaagcaaattgctca

SEQ ID NO: 92054 - DNA, 15 bp, Homo sapiens
aaaagcaaattgctc

SEQ ID NO: 92055 - DNA, 15 bp, Homo sapiens
gaaaagcaaattgct

SEQ ID NO: 92056 - DNA, 15 bp, Homo sapiens
tgaaaagcaaattgc

SEQ ID NO: 92057 - DNA, 15 bp, Homo sapiens
ttgaaaagcaaattg

SEQ ID NO: 92058 - DNA, 15 bp, Homo sapiens
tttgaaaagcaaatt

SEQ ID NO: 92059 - DNA, 15 bp, Homo sapiens
atttgaaaagcaaat

SEQ ID NO: 92060 - DNA, 15 bp, Homo sapiens
catttgaaaagcaaa

SEQ ID NO: 92061 - DNA, 15 bp, Homo sapiens
gcatttgaaaagcaa

SEQ ID NO: 92062 - DNA, 15 bp, Homo sapiens
agcatttgaaaagca

SEQ ID NO: 92063 - DNA, 15 bp, Homo sapiens
tagcatttgaaaagc

SEQ ID NO: 92064 - DNA, 15 bp, Homo sapiens
ttagcatttgaaaag

SEQ ID NO: 92065 - DNA, 15 bp, Homo sapiens
cttagcatttgaaaa

SEQ ID NO: 92066 - DNA, 15 bp, Homo sapiens
ccttagcatttgaaa

SEQ ID NO: 92067 - DNA, 15 bp, Homo sapiens
cccttagcatttgaa

SEQ ID NO: 92068 - DNA, 15 bp, Homo sapiens
tcccttagcatttga

SEQ ID NO: 92069 - DNA, 15 bp, Homo sapiens
atcccttagcatttg

SEQ ID NO: 92070 - DNA, 15 bp, Homo sapiens
aatcccttagcattt

SEQ ID NO: 92071 - DNA, 15 bp, Homo sapiens
aaatcccttagcatt

SEQ ID NO: 92072 - DNA, 15 bp, Homo sapiens
aaaatcccttagcat

SEQ ID NO: 92073 - DNA, 15 bp, Homo sapiens
aaaaatcccttagca

SEQ ID NO: 92074 - DNA, 15 bp, Homo sapiens
taaaaatcccttagc

SEQ ID NO: 92075 - DNA, 15 bp, Homo sapiens
ttaaaaatcccttag

SEQ ID NO: 92076 - DNA, 15 bp, Homo sapiens
attaaaaatccctta

SEQ ID NO: 92077 - DNA, 15 bp, Homo sapiens
cattaaaaatccctt

SEQ ID NO: 92078 - DNA, 15 bp, Homo sapiens
ccattaaaaatccct

SEQ ID NO: 92079 - DNA, 15 bp, Homo sapiens
tccattaaaaatccc

SEQ ID NO: 92080 - DNA, 15 bp, Homo sapiens
atccattaaaaatcc

SEQ ID NO: 92081 - DNA, 15 bp, Homo sapiens
aatccattaaaaatc

SEQ ID NO: 92082 - DNA, 15 bp, Homo sapiens
aaatccattaaaaat

SEQ ID NO: 92083 - DNA, 15 bp, Homo sapiens
caaatccattaaaaa

SEQ ID NO: 92084 - DNA, 15 bp, Homo sapiens
gcaaatccattaaaa

SEQ ID NO: 92085 - DNA, 15 bp, Homo sapiens
agcaaatccattaaa

SEQ ID NO: 92086 - DNA, 15 bp, Homo sapiens
aagcaaatccattaa

SEQ ID NO: 92087 - DNA, 15 bp, Homo sapiens
aaagcaaatccatta

SEQ ID NO: 92088 - DNA, 15 bp, Homo sapiens
taaagcaaatccatt

SEQ ID NO: 92089 - DNA, 15 bp, Homo sapiens
ttaaagcaaatccat

SEQ ID NO: 92090 - DNA, 15 bp, Homo sapiens
attaaagcaaatcca

SEQ ID NO: 92091 - DNA, 15 bp, Homo sapiens
aattaaagcaaatcc

SEQ ID NO: 92092 - DNA, 15 bp, Homo sapiens
taattaaagcaaatc

SEQ ID NO: 92093 - DNA, 15 bp, Homo sapiens
ttaattaaagcaaat

SEQ ID NO: 92094 - DNA, 15 bp, Homo sapiens
tttaattaaagcaaa

SEQ ID NO: 92095 - DNA, 15 bp, Homo sapiens
atttaattaaagcaa

SEQ ID NO: 92096 - DNA, 15 bp, Homo sapiens
gatttaattaaagca

SEQ ID NO: 92097 - DNA, 15 bp, Homo sapiens
agatttaattaaagc

SEQ ID NO: 92098 - DNA, 15 bp, Homo sapiens
tagatttaattaaag

SEQ ID NO: 92099 - DNA, 15 bp, Homo sapiens
ctagatttaattaaa

SEQ ID NO: 92100 - DNA, 15 bp, Homo sapiens
gctagatttaattaa

SEQ ID NO: 92101 - DNA, 15 bp, Homo sapiens
ggctagatttaatta

SEQ ID NO: 92102 - DNA, 15 bp, Homo sapiens
aggctagatttaatt

SEQ ID NO: 92103 - DNA, 15 bp, Homo sapiens
caggctagatttaat

SEQ ID NO: 92104 - DNA, 15 bp, Homo sapiens
acaggctagatttaa

SEQ ID NO: 92105 - DNA, 15 bp, Homo sapiens
aacaggctagattta

SEQ ID NO: 92106 - DNA, 15 bp, Homo sapiens
aaacaggctagattt

SEQ ID NO: 92107 - DNA, 15 bp, Homo sapiens
gaaacaggctagatt

SEQ ID NO: 92108 - DNA, 15 bp, Homo sapiens
agaaacaggctagat

SEQ ID NO: 92109 - DNA, 15 bp, Homo sapiens
tagaaacaggctaga

SEQ ID NO: 92110 - DNA, 15 bp, Homo sapiens
ttagaaacaggctag

SEQ ID NO: 92111 - DNA, 15 bp, Homo sapiens
cttagaaacaggcta

SEQ ID NO: 92112 - DNA, 15 bp, Homo sapiens
gcttagaaacaggct

SEQ ID NO: 92113 - DNA, 15 bp, Homo sapiens
agcttagaaacaggc

SEQ ID NO: 92114 - DNA, 15 bp, Homo sapiens
aagcttagaaacagg

SEQ ID NO: 92115 - DNA, 15 bp, Homo sapiens
aaagcttagaaacag

SEQ ID NO: 92116 - DNA, 15 bp, Homo sapiens
taaagcttagaaaca

SEQ ID NO: 92117 - DNA, 15 bp, Homo sapiens
ataaagcttagaaac

SEQ ID NO: 92118 - DNA, 15 bp, Homo sapiens
aataaagcttagaaa

SEQ ID NO: 92119 - DNA, 15 bp, Homo sapiens
gaataaagcttagaa

SEQ ID NO: 92120 - DNA, 15 bp, Homo sapiens
tgaataaagcttaga

SEQ ID NO: 92121 - DNA, 15 bp, Homo sapiens
atgaataaagcttag

SEQ ID NO: 92122 - DNA, 15 bp, Homo sapiens
aatgaataaagctta

SEQ ID NO: 92123 - DNA, 15 bp, Homo sapiens
taatgaataaagctt

SEQ ID NO: 92124 - DNA, 15 bp, Homo sapiens
ataatgaataaagct

SEQ ID NO: 92125 - DNA, 15 bp, Homo sapiens
aataatgaataaagc

SEQ ID NO: 92126 - DNA, 15 bp, Homo sapiens
aaataatgaataaag

SEQ ID NO: 92127 - DNA, 15 bp, Homo sapiens
gaaataatgaataaa

SEQ ID NO: 92128 - DNA, 15 bp, Homo sapiens
agaaataatgaataa

SEQ ID NO: 92129 - DNA, 15 bp, Homo sapiens
gagaaataatgaata

SEQ ID NO: 92130 - DNA, 15 bp, Homo sapiens
ggagaaataatgaat

SEQ ID NO: 92131 - DNA, 15 bp, Homo sapiens
tggagaaataatgaa

SEQ ID NO: 92132 - DNA, 15 bp, Homo sapiens
atggagaaataatga

SEQ ID NO: 92133 - DNA, 15 bp, Homo sapiens
tatggagaaataatg

SEQ ID NO: 92134 - DNA, 15 bp, Homo sapiens
gtatggagaaataat

SEQ ID NO: 92135 - DNA, 15 bp, Homo sapiens
agtatggagaaataa

SEQ ID NO: 92136 - DNA, 15 bp, Homo sapiens
gagtatggagaaata

SEQ ID NO: 92137 - DNA, 15 bp, Homo sapiens
tgagtatggagaaat

SEQ ID NO: 92138 - DNA, 15 bp, Homo sapiens
ctgagtatggagaaa

SEQ ID NO: 92139 - DNA, 15 bp, Homo sapiens
tctgagtatggagaa

SEQ ID NO: 92140 - DNA, 15 bp, Homo sapiens
ctctgagtatggaga

SEQ ID NO: 92141 - DNA, 15 bp, Homo sapiens
gctctgagtatggag

SEQ ID NO: 92142 - DNA, 15 bp, Homo sapiens
tgctctgagtatgga

SEQ ID NO: 92143 - DNA, 15 bp, Homo sapiens
atgctctgagtatgg

SEQ ID NO: 92144 - DNA, 15 bp, Homo sapiens
aatgctctgagtatg

SEQ ID NO: 92145 - DNA, 15 bp, Homo sapiens
aaatgctctgagtat

SEQ ID NO: 92146 - DNA, 15 bp, Homo sapiens
gaaatgctctgagta

SEQ ID NO: 92147 - DNA, 15 bp, Homo sapiens
agaaatgctctgagt

SEQ ID NO: 92148 - DNA, 15 bp, Homo sapiens
gagaaatgctctgag

SEQ ID NO: 92149 - DNA, 15 bp, Homo sapiens
ggagaaatgctctga

SEQ ID NO: 92150 - DNA, 15 bp, Homo sapiens
tggagaaatgctctg

SEQ ID NO: 92151 - DNA, 15 bp, Homo sapiens
ctggagaaatgctct

SEQ ID NO: 92152 - DNA, 15 bp, Homo sapiens
tctggagaaatgctc

SEQ ID NO: 92153 - DNA, 15 bp, Homo sapiens
atctggagaaatgct

SEQ ID NO: 92154 - DNA, 15 bp, Homo sapiens
aatctggagaaatgc

SEQ ID NO: 92155 - DNA, 15 bp, Homo sapiens
aaatctggagaaatg

SEQ ID NO: 92156 - DNA, 15 bp, Homo sapiens
aaaatctggagaaat

SEQ ID NO: 92157 - DNA, 15 bp, Homo sapiens
gaaaatctggagaaa

SEQ ID NO: 92158 - DNA, 15 bp, Homo sapiens
agaaaatctggagaa

SEQ ID NO: 92159 - DNA, 15 bp, Homo sapiens
tagaaaatctggaga

SEQ ID NO: 92160 - DNA, 15 bp, Homo sapiens
ttagaaaatctggag

SEQ ID NO: 92161 - DNA, 15 bp, Homo sapiens
tttagaaaatctgga

SEQ ID NO: 92162 - DNA, 15 bp, Homo sapiens
ctttagaaaatctgg

SEQ ID NO: 92163 - DNA, 15 bp, Homo sapiens
tctttagaaaatctg

SEQ ID NO: 92164 - DNA, 15 bp, Homo sapiens
ttctttagaaaatct

SEQ ID NO: 92165 - DNA, 15 bp, Homo sapiens
attctttagaaaatc

SEQ ID NO: 92166 - DNA, 15 bp, Homo sapiens
tattctttagaaaat

SEQ ID NO: 92167 - DNA, 15 bp, Homo sapiens
ctattctttagaaaa

SEQ ID NO: 92168 - DNA, 15 bp, Homo sapiens
tctattctttagaaa

SEQ ID NO: 92169 - DNA, 15 bp, Homo sapiens
ttctattctttagaa

SEQ ID NO: 92170 - DNA, 15 bp, Homo sapiens
attctattctttaga

SEQ ID NO: 92171 - DNA, 15 bp, Homo sapiens
aattctattctttag

SEQ ID NO: 92172 - DNA, 15 bp, Homo sapiens
aaattctattcttta

SEQ ID NO: 92173 - DNA, 15 bp, Homo sapiens
aaaattctattcttt

SEQ ID NO: 92174 - DNA, 15 bp, Homo sapiens
taaaattctattctt

SEQ ID NO: 92175 - DNA, 15 bp, Homo sapiens
ataaaattctattct

SEQ ID NO: 92176 - DNA, 15 bp, Homo sapiens
aataaaattctattc

SEQ ID NO: 92177 - DNA, 15 bp, Homo sapiens
caataaaattctatt

SEQ ID NO: 92178 - DNA, 15 bp, Homo sapiens
gcaataaaattctat

SEQ ID NO: 92179 - DNA, 15 bp, Homo sapiens
agcaataaaattcta

SEQ ID NO: 92180 - DNA, 15 bp, Homo sapiens
tagcaataaaattct

SEQ ID NO: 92181 - DNA, 15 bp, Homo sapiens
gtagcaataaaattc

SEQ ID NO: 92182 - DNA, 15 bp, Homo sapiens
tgtagcaataaaatt

SEQ ID NO: 92183 - DNA, 15 bp, Homo sapiens
atgtagcaataaaat

SEQ ID NO: 92184 - DNA, 15 bp, Homo sapiens
tatgtagcaataaaa

SEQ ID NO: 92185 - DNA, 15 bp, Homo sapiens
atatgtagcaataaa

SEQ ID NO: 92186 - DNA, 15 bp, Homo sapiens
gatatgtagcaataa

SEQ ID NO: 92187 - DNA, 15 bp, Homo sapiens
tgatatgtagcaata

SEQ ID NO: 92188 - DNA, 15 bp, Homo sapiens
atgatatgtagcaat

SEQ ID NO: 92189 - DNA, 15 bp, Homo sapiens
gatgatatgtagcaa

SEQ ID NO: 92190 - DNA, 15 bp, Homo sapiens
tgatgatatgtagca

SEQ ID NO: 92191 - DNA, 15 bp, Homo sapiens
ctgatgatatgtagc

SEQ ID NO: 92192 - DNA, 15 bp, Homo sapiens
gctgatgatatgtag

SEQ ID NO: 92193 - DNA, 15 bp, Homo sapiens
agctgatgatatgta

SEQ ID NO: 92194 - DNA, 15 bp, Homo sapiens
tagctgatgatatgt

SEQ ID NO: 92195 - DNA, 15 bp, Homo sapiens
atagctgatgatatg

SEQ ID NO: 92196 - DNA, 15 bp, Homo sapiens
catagctgatgatat

SEQ ID NO: 92197 - DNA, 15 bp, Homo sapiens
gcatagctgatgata

SEQ ID NO: 92198 - DNA, 15 bp, Homo sapiens
ggcatagctgatgat

SEQ ID NO: 92199 - DNA, 15 bp, Homo sapiens
aggcatagctgatga

SEQ ID NO: 92200 - DNA, 15 bp, Homo sapiens
caggcatagctgatg

SEQ ID NO: 92201 - DNA, 15 bp, Homo sapiens
gcaggcatagctgat

SEQ ID NO: 92202 - DNA, 15 bp, Homo sapiens
agcaggcatagctga

SEQ ID NO: 92203 - DNA, 15 bp, Homo sapiens
cagcaggcatagctg

SEQ ID NO: 92204 - DNA, 15 bp, Homo sapiens
gcagcaggcatagct

SEQ ID NO: 92205 - DNA, 15 bp, Homo sapiens
agcagcaggcatagc

SEQ ID NO: 92206 - DNA, 15 bp, Homo sapiens
tagcagcaggcatag

SEQ ID NO: 92207 - DNA, 15 bp, Homo sapiens
atagcagcaggcata

SEQ ID NO: 92208 - DNA, 15 bp, Homo sapiens
aatagcagcaggcat

SEQ ID NO: 92209 - DNA, 15 bp, Homo sapiens
aaatagcagcaggca

SEQ ID NO: 92210 - DNA, 15 bp, Homo sapiens
taaatagcagcaggc

SEQ ID NO: 92211 - DNA, 15 bp, Homo sapiens
ttaaatagcagcagg

SEQ ID NO: 92212 - DNA, 15 bp, Homo sapiens
attaaatagcagcag

SEQ ID NO: 92213 - DNA, 15 bp, Homo sapiens
aattaaatagcagca

SEQ ID NO: 92214 - DNA, 15 bp, Homo sapiens
caattaaatagcagc

SEQ ID NO: 92215 - DNA, 15 bp, Homo sapiens
ccaattaaatagcag

SEQ ID NO: 92216 - DNA, 15 bp, Homo sapiens
accaattaaatagca

SEQ ID NO: 92217 - DNA, 15 bp, Homo sapiens
taccaattaaatagc

SEQ ID NO: 92218 - DNA, 15 bp, Homo sapiens
ataccaattaaatag

SEQ ID NO: 92219 - DNA, 15 bp, Homo sapiens
gataccaattaaata

SEQ ID NO: 92220 - DNA, 15 bp, Homo sapiens
agataccaattaaat

SEQ ID NO: 92221 - DNA, 15 bp, Homo sapiens
cagataccaattaaa

SEQ ID NO: 92222 - DNA, 15 bp, Homo sapiens
tcagataccaattaa

SEQ ID NO: 92223 - DNA, 15 bp, Homo sapiens
ttcagataccaatta

SEQ ID NO: 92224 - DNA, 15 bp, Homo sapiens
attcagataccaatt

SEQ ID NO: 92225 - DNA, 15 bp, Homo sapiens
aattcagataccaat

SEQ ID NO: 92226 - DNA, 15 bp, Homo sapiens
taattcagataccaa

SEQ ID NO: 92227 - DNA, 15 bp, Homo sapiens
ttaattcagatacca

SEQ ID NO: 92228 - DNA, 15 bp, Homo sapiens
tttaattcagatacc

SEQ ID NO: 92229 - DNA, 15 bp, Homo sapiens
ttttaattcagatac

SEQ ID NO: 92230 - DNA, 15 bp, Homo sapiens
cttttaattcagata

SEQ ID NO: 92231 - DNA, 15 bp, Homo sapiens
ccttttaattcagat

SEQ ID NO: 92232 - DNA, 15 bp, Homo sapiens
accttttaattcaga

SEQ ID NO: 92233 - DNA, 15 bp, Homo sapiens
gaccttttaattcag

SEQ ID NO: 92234 - DNA, 15 bp, Homo sapiens
agaccttttaattca

SEQ ID NO: 92235 - DNA, 15 bp, Homo sapiens
cagaccttttaattc

SEQ ID NO: 92236 - DNA, 15 bp, Homo sapiens
ccagaccttttaatt

SEQ ID NO: 92237 - DNA, 15 bp, Homo sapiens
accagaccttttaat

SEQ ID NO: 92238 - DNA, 15 bp, Homo sapiens
aaccagaccttttaa

SEQ ID NO: 92239 - DNA, 15 bp, Homo sapiens
aaaccagacctttta

SEQ ID NO: 92240 - DNA, 15 bp, Homo sapiens
caaaccagacctttt

SEQ ID NO: 92241 - DNA, 15 bp, Homo sapiens
acaaaccagaccttt

SEQ ID NO: 92242 - DNA, 15 bp, Homo sapiens
gacaaaccagacctt

SEQ ID NO: 92243 - DNA, 15 bp, Homo sapiens
ggacaaaccagacct

SEQ ID NO: 92244 - DNA, 15 bp, Homo sapiens
gggacaaaccagacc

SEQ ID NO: 92245 - DNA, 15 bp, Homo sapiens
agggacaaaccagac

SEQ ID NO: 92246 - DNA, 15 bp, Homo sapiens
tagggacaaaccaga

SEQ ID NO: 92247 - DNA, 15 bp, Homo sapiens
ctagggacaaaccag

SEQ ID NO: 92248 - DNA, 15 bp, Homo sapiens
tctagggacaaacca

SEQ ID NO: 92249 - DNA, 15 bp, Homo sapiens
ctctagggacaaacc

SEQ ID NO: 92250 - DNA, 15 bp, Homo sapiens
tctctagggacaaac

SEQ ID NO: 92251 - DNA, 15 bp, Homo sapiens
ttctctagggacaaa

SEQ ID NO: 92252 - DNA, 15 bp, Homo sapiens
attctctagggacaa

SEQ ID NO: 92253 - DNA, 15 bp, Homo sapiens
gattctctagggaca

SEQ ID NO: 92254 - DNA, 15 bp, Homo sapiens
tgattctctagggac

SEQ ID NO: 92255 - DNA, 15 bp, Homo sapiens
ttgattctctaggga

SEQ ID NO: 92256 - DNA, 15 bp, Homo sapiens
tttgattctctaggg

SEQ ID NO: 92257 - DNA, 15 bp, Homo sapiens
atttgattctctagg

SEQ ID NO: 92258 - DNA, 15 bp, Homo sapiens
aatttgattctctag

SEQ ID NO: 92259 - DNA, 15 bp, Homo sapiens
aaatttgattctcta

SEQ ID NO: 92260 - DNA, 15 bp, Homo sapiens
aaaatttgattctct

SEQ ID NO: 92261 - DNA, 15 bp, Homo sapiens
aaaaatttgattctc

SEQ ID NO: 92262 - DNA, 15 bp, Homo sapiens
aaaaaatttgattct

SEQ ID NO: 92263 - DNA, 15 bp, Homo sapiens
gaaaaaatttgattc

SEQ ID NO: 92264 - DNA, 15 bp, Homo sapiens
agaaaaaatttgatt

SEQ ID NO: 92265 - DNA, 15 bp, Homo sapiens
aagaaaaaatttgat

SEQ ID NO: 92266 - DNA, 15 bp, Homo sapiens
gaagaaaaaatttga

SEQ ID NO: 92267 - DNA, 15 bp, Homo sapiens
tgaagaaaaaatttg

SEQ ID NO: 92268 - DNA, 15 bp, Homo sapiens
gtgaagaaaaaattt

SEQ ID NO: 92269 - DNA, 15 bp, Homo sapiens
agtgaagaaaaaatt

SEQ ID NO: 92270 - DNA, 15 bp, Homo sapiens
gagtgaagaaaaaat

SEQ ID NO: 92271 - DNA, 15 bp, Homo sapiens
ggagtgaagaaaaaa

SEQ ID NO: 92272 - DNA, 15 bp, Homo sapiens
gggagtgaagaaaaa

SEQ ID NO: 92273 - DNA, 15 bp, Homo sapiens
tgggagtgaagaaaa

SEQ ID NO: 92274 - DNA, 15 bp, Homo sapiens
atgggagtgaagaaa

SEQ ID NO: 92275 - DNA, 15 bp, Homo sapiens
tatgggagtgaagaa

SEQ ID NO: 92276 - DNA, 15 bp, Homo sapiens
atatgggagtgaaga

SEQ ID NO: 92277 - DNA, 15 bp, Homo sapiens
aatatgggagtgaag

SEQ ID NO: 92278 - DNA, 15 bp, Homo sapiens
aaatatgggagtgaa

SEQ ID NO: 92279 - DNA, 15 bp, Homo sapiens
gaaatatgggagtga

SEQ ID NO: 92280 - DNA, 15 bp, Homo sapiens
tgaaatatgggagtg

SEQ ID NO: 92281 - DNA, 15 bp, Homo sapiens
ctgaaatatgggagt

SEQ ID NO: 92282 - DNA, 15 bp, Homo sapiens
tctgaaatatgggag

SEQ ID NO: 92283 - DNA, 15 bp, Homo sapiens
ttctgaaatatggga

SEQ ID NO: 92284 - DNA, 15 bp, Homo sapiens
gttctgaaatatggg

SEQ ID NO: 92285 - DNA, 15 bp, Homo sapiens
agttctgaaatatgg

SEQ ID NO: 92286 - DNA, 15 bp, Homo sapiens
aagttctgaaatatg

SEQ ID NO: 92287 - DNA, 15 bp, Homo sapiens
caagttctgaaatat

SEQ ID NO: 92288 - DNA, 15 bp, Homo sapiens
tcaagttctgaaata

SEQ ID NO: 92289 - DNA, 15 bp, Homo sapiens
atcaagttctgaaat

SEQ ID NO: 92290 - DNA, 15 bp, Homo sapiens
tatcaagttctgaaa

SEQ ID NO: 92291 - DNA, 15 bp, Homo sapiens
gtatcaagttctgaa

SEQ ID NO: 92292 - DNA, 15 bp, Homo sapiens
tgtatcaagttctga

SEQ ID NO: 92293 - DNA, 15 bp, Homo sapiens
atgtatcaagttctg

SEQ ID NO: 92294 - DNA, 15 bp, Homo sapiens
aatgtatcaagttct

SEQ ID NO: 92295 - DNA, 15 bp, Homo sapiens
aaatgtatcaagttc

SEQ ID NO: 92296 - DNA, 15 bp, Homo sapiens
aaaatgtatcaagtt

SEQ ID NO: 92297 - DNA, 15 bp, Homo sapiens
aaaaatgtatcaagt

SEQ ID NO: 92298 - DNA, 15 bp, Homo sapiens
taaaaatgtatcaag

SEQ ID NO: 92299 - DNA, 15 bp, Homo sapiens
ctaaaaatgtatcaa

SEQ ID NO: 92300 - DNA, 15 bp, Homo sapiens
cctaaaaatgtatca

SEQ ID NO: 92301 - DNA, 15 bp, Homo sapiens
tcctaaaaatgtatc

SEQ ID NO: 92302 - DNA, 15 bp, Homo sapiens
atcctaaaaatgtat

SEQ ID NO: 92303 - DNA, 15 bp, Homo sapiens
tatcctaaaaatgta

SEQ ID NO: 92304 - DNA, 15 bp, Homo sapiens
ttatcctaaaaatgt

SEQ ID NO: 92305 - DNA, 15 bp, Homo sapiens
tttatcctaaaaatg

SEQ ID NO: 92306 - DNA, 15 bp, Homo sapiens
gtttatcctaaaaat

SEQ ID NO: 92307 - DNA, 15 bp, Homo sapiens
ggtttatcctaaaaa

SEQ ID NO: 92308 - DNA, 15 bp, Homo sapiens
tggtttatcctaaaa

SEQ ID NO: 92309 - DNA, 15 bp, Homo sapiens
atggtttatcctaaa

SEQ ID NO: 92310 - DNA, 15 bp, Homo sapiens
catggtttatcctaa

SEQ ID NO: 92311 - DNA, 15 bp, Homo sapiens
tcatggtttatccta

SEQ ID NO: 92312 - DNA, 15 bp, Homo sapiens
ttcatggtttatcct

SEQ ID NO: 92313 - DNA, 15 bp, Homo sapiens
attcatggtttatcc

SEQ ID NO: 92314 - DNA, 15 bp, Homo sapiens
cattcatggtttatc

SEQ ID NO: 92315 - DNA, 15 bp, Homo sapiens
tcattcatggtttat

SEQ ID NO: 92316 - DNA, 15 bp, Homo sapiens
gtcattcatggttta

SEQ ID NO: 92317 - DNA, 15 bp, Homo sapiens
tgtcattcatggttt

SEQ ID NO: 92318 - DNA, 15 bp, Homo sapiens
gtgtcattcatggtt

SEQ ID NO: 92319 - DNA, 15 bp, Homo sapiens
ggtgtcattcatggt

SEQ ID NO: 92320 - DNA, 15 bp, Homo sapiens
gggtgtcattcatgg

SEQ ID NO: 92321 - DNA, 15 bp, Homo sapiens
cgggtgtcattcatg

SEQ ID NO: 92322 - DNA, 15 bp, Homo sapiens
acgggtgtcattcat

SEQ ID NO: 92323 - DNA, 15 bp, Homo sapiens
aacgggtgtcattca

SEQ ID NO: 92324 - DNA, 15 bp, Homo sapiens
aaacgggtgtcattc

SEQ ID NO: 92325 - DNA, 15 bp, Homo sapiens
gaaacgggtgtcatt

SEQ ID NO: 92326 - DNA, 15 bp, Homo sapiens
agaaacgggtgtcat

SEQ ID NO: 92327 - DNA, 15 bp, Homo sapiens
aagaaacgggtgtca

SEQ ID NO: 92328 - DNA, 15 bp, Homo sapiens
gaagaaacgggtgtc

SEQ ID NO: 92329 - DNA, 15 bp, Homo sapiens
agaagaaacgggtgt

SEQ ID NO: 92330 - DNA, 15 bp, Homo sapiens
gagaagaaacgggtg

SEQ ID NO: 92331 - DNA, 15 bp, Homo sapiens
ggagaagaaacgggt

SEQ ID NO: 92332 - DNA, 15 bp, Homo sapiens
gggagaagaaacggg

SEQ ID NO: 92333 - DNA, 15 bp, Homo sapiens
agggagaagaaacgg

SEQ ID NO: 92334 - DNA, 15 bp, Homo sapiens
gagggagaagaaacg

SEQ ID NO: 92335 - DNA, 15 bp, Homo sapiens
tgagggagaagaaac

SEQ ID NO: 92336 - DNA, 15 bp, Homo sapiens
gtgagggagaagaaa

SEQ ID NO: 92337 - DNA, 15 bp, Homo sapiens
ggtgagggagaagaa

SEQ ID NO: 92338 - DNA, 15 bp, Homo sapiens
gggtgagggagaaga

SEQ ID NO: 92339 - DNA, 15 bp, Homo sapiens
agggtgagggagaag

SEQ ID NO: 92340 - DNA, 15 bp, Homo sapiens
gagggtgagggagaa

SEQ ID NO: 92341 - DNA, 15 bp, Homo sapiens
ggagggtgagggaga

SEQ ID NO: 92342 - DNA, 15 bp, Homo sapiens
gggagggtgagggag

SEQ ID NO: 92343 - DNA, 15 bp, Homo sapiens
agggagggtgaggga

SEQ ID NO: 92344 - DNA, 15 bp, Homo sapiens
aagggagggtgaggg

SEQ ID NO: 92345 - DNA, 15 bp, Homo sapiens
gaagggagggtgagg

SEQ ID NO: 92346 - DNA, 15 bp, Homo sapiens
ggaagggagggtgag

SEQ ID NO: 92347 - DNA, 15 bp, Homo sapiens
gggaagggagggtga

SEQ ID NO: 92348 - DNA, 15 bp, Homo sapiens
agggaagggagggtg

SEQ ID NO: 92349 - DNA, 15 bp, Homo sapiens
gagggaagggagggt

SEQ ID NO: 92350 - DNA, 15 bp, Homo sapiens
ggagggaagggaggg

SEQ ID NO: 92351 - DNA, 15 bp, Homo sapiens
gggagggaagggagg

SEQ ID NO: 92352 - DNA, 15 bp, Homo sapiens
tgggagggaagggag

SEQ ID NO: 92353 - DNA, 15 bp, Homo sapiens
atgggagggaaggga

SEQ ID NO: 92354 - DNA, 15 bp, Homo sapiens
aatgggagggaaggg

SEQ ID NO: 92355 - DNA, 15 bp, Homo sapiens
aaatgggagggaagg

SEQ ID NO: 92356 - DNA, 15 bp, Homo sapiens
aaaatgggagggaag

SEQ ID NO: 92357 - DNA, 15 bp, Homo sapiens
aaaaatgggagggaa

SEQ ID NO: 92358 - DNA, 15 bp, Homo sapiens
aaaaaatgggaggga

SEQ ID NO: 92359 - DNA, 15 bp, Homo sapiens
aaaaaaatgggaggg

SEQ ID NO: 92360 - DNA, 15 bp, Homo sapiens
aaaaaaaatgggagg

SEQ ID NO: 92361 - DNA, 15 bp, Homo sapiens
aaaaaaaaatgggag

SEQ ID NO: 92362 - DNA, 15 bp, Homo sapiens
aaaaaaaaaatggga

SEQ ID NO: 92363 - DNA, 15 bp, Homo sapiens
aaaaaaaaaaatggg

SEQ ID NO: 92364 - DNA, 15 bp, Homo sapiens
aaaaaaaaaaaatgg

SEQ ID NO: 92365 - DNA, 15 bp, Homo sapiens
ttctaaaaaaaaaaa

SEQ ID NO: 92366 - DNA, 15 bp, Homo sapiens
cttctaaaaaaaaaa

SEQ ID NO: 92367 - DNA, 15 bp, Homo sapiens
gcttctaaaaaaaaa

SEQ ID NO: 92368 - DNA, 15 bp, Homo sapiens
agcttctaaaaaaaa

SEQ ID NO: 92369 - DNA, 15 bp, Homo sapiens
cagcttctaaaaaaa

SEQ ID NO: 92370 - DNA, 15 bp, Homo sapiens
tcagcttctaaaaaa

SEQ ID NO: 92371 - DNA, 15 bp, Homo sapiens
ttcagcttctaaaaa

SEQ ID NO: 92372 - DNA, 15 bp, Homo sapiens
attcagcttctaaaa

SEQ ID NO: 92373 - DNA, 15 bp, Homo sapiens
tattcagcttctaaa

SEQ ID NO: 92374 - DNA, 15 bp, Homo sapiens
ttattcagcttctaa

SEQ ID NO: 92375 - DNA, 15 bp, Homo sapiens
attattcagcttcta

SEQ ID NO: 92376 - DNA, 15 bp, Homo sapiens
tattattcagcttct

SEQ ID NO: 92377 - DNA, 15 bp, Homo sapiens
atattattcagcttc

SEQ ID NO: 92378 - DNA, 15 bp, Homo sapiens
gatattattcagctt

SEQ ID NO: 92379 - DNA, 15 bp, Homo sapiens
tgatattattcagct

SEQ ID NO: 92380 - DNA, 15 bp, Homo sapiens
ttgatattattcagc

SEQ ID NO: 92381 - DNA, 15 bp, Homo sapiens
attgatattattcag

SEQ ID NO: 92382 - DNA, 15 bp, Homo sapiens
cattgatattattca

SEQ ID NO: 92383 - DNA, 15 bp, Homo sapiens
tcattgatattattc

SEQ ID NO: 92384 - DNA, 15 bp, Homo sapiens
atcattgatattatt

SEQ ID NO: 92385 - DNA, 15 bp, Homo sapiens
tatcattgatattat

SEQ ID NO: 92386 - DNA, 15 bp, Homo sapiens
atatcattgatatta

SEQ ID NO: 92387 - DNA, 15 bp, Homo sapiens
gatatcattgatatt

SEQ ID NO: 92388 - DNA, 15 bp, Homo sapiens
ggatatcattgatat

SEQ ID NO: 92389 - DNA, 15 bp, Homo sapiens
aggatatcattgata

SEQ ID NO: 92390 - DNA, 15 bp, Homo sapiens
caggatatcattgat

SEQ ID NO: 92391 - DNA, 15 bp, Homo sapiens
tcaggatatcattga

SEQ ID NO: 92392 - DNA, 15 bp, Homo sapiens
ttcaggatatcattg

SEQ ID NO: 92393 - DNA, 15 bp, Homo sapiens
cttcaggatatcatt

SEQ ID NO: 92394 - DNA, 15 bp, Homo sapiens
acttcaggatatcat

SEQ ID NO: 92395 - DNA, 15 bp, Homo sapiens
gacttcaggatatca

SEQ ID NO: 92396 - DNA, 15 bp, Homo sapiens
ggacttcaggatatc

SEQ ID NO: 92397 - DNA, 15 bp, Homo sapiens
cggacttcaggatat

SEQ ID NO: 92398 - DNA, 15 bp, Homo sapiens
acggacttcaggata

SEQ ID NO: 92399 - DNA, 15 bp, Homo sapiens
cacggacttcaggat

SEQ ID NO: 92400 - DNA, 15 bp, Homo sapiens
acacggacttcagga

SEQ ID NO: 92401 - DNA, 15 bp, Homo sapiens
aacacggacttcagg

SEQ ID NO: 92402 - DNA, 15 bp, Homo sapiens
gaacacggacttcag

SEQ ID NO: 92403 - DNA, 15 bp, Homo sapiens
agaacacggacttca

SEQ ID NO: 92404 - DNA, 15 bp, Homo sapiens
aagaacacggacttc

SEQ ID NO: 92405 - DNA, 15 bp, Homo sapiens
caagaacacggactt

SEQ ID NO: 92406 - DNA, 15 bp, Homo sapiens
tcaagaacacggact

SEQ ID NO: 92407 - DNA, 15 bp, Homo sapiens
atcaagaacacggac

SEQ ID NO: 92408 - DNA, 15 bp, Homo sapiens
gatcaagaacacgga

SEQ ID NO: 92409 - DNA, 15 bp, Homo sapiens
agatcaagaacacgg

SEQ ID NO: 92410 - DNA, 15 bp, Homo sapiens
aagatcaagaacacg

SEQ ID NO: 92411 - DNA, 15 bp, Homo sapiens
gaagatcaagaacac

SEQ ID NO: 92412 - DNA, 15 bp, Homo sapiens
ggaagatcaagaaca

SEQ ID NO: 92413 - DNA, 15 bp, Homo sapiens
gggaagatcaagaac

SEQ ID NO: 92414 - DNA, 15 bp, Homo sapiens
tgggaagatcaagaa

SEQ ID NO: 92415 - DNA, 15 bp, Homo sapiens
gtgggaagatcaaga

SEQ ID NO: 92416 - DNA, 15 bp, Homo sapiens
tgtgggaagatcaag

SEQ ID NO: 92417 - DNA, 15 bp, Homo sapiens
atgtgggaagatcaa

SEQ ID NO: 92418 - DNA, 15 bp, Homo sapiens
aatgtgggaagatca

SEQ ID NO: 92419 - DNA, 15 bp, Homo sapiens
aaatgtgggaagatc

SEQ ID NO: 92420 - DNA, 15 bp, Homo sapiens
aaaatgtgggaagat

SEQ ID NO: 92421 - DNA, 15 bp, Homo sapiens
aaaaatgtgggaaga

SEQ ID NO: 92422 - DNA, 15 bp, Homo sapiens
caaaaatgtgggaag

SEQ ID NO: 92423 - DNA, 15 bp, Homo sapiens
gcaaaaatgtgggaa

SEQ ID NO: 92424 - DNA, 15 bp, Homo sapiens
ggcaaaaatgtggga

SEQ ID NO: 92425 - DNA, 15 bp, Homo sapiens
aggcaaaaatgtggg

SEQ ID NO: 92426 - DNA, 15 bp, Homo sapiens
caggcaaaaatgtgg

SEQ ID NO: 92427 - DNA, 15 bp, Homo sapiens
ccaggcaaaaatgtg

SEQ ID NO: 92428 - DNA, 15 bp, Homo sapiens
cccaggcaaaaatgt

SEQ ID NO: 92429 - DNA, 15 bp, Homo sapiens
tcccaggcaaaaatg

SEQ ID NO: 92430 - DNA, 15 bp, Homo sapiens
gtcccaggcaaaaat

SEQ ID NO: 92431 - DNA, 15 bp, Homo sapiens
cgtcccaggcaaaaa

SEQ ID NO: 92432 - DNA, 15 bp, Homo sapiens
tcgtcccaggcaaaa

SEQ ID NO: 92433 - DNA, 15 bp, Homo sapiens
ctcgtcccaggcaaa

SEQ ID NO: 92434 - DNA, 15 bp, Homo sapiens
cctcgtcccaggcaa

SEQ ID NO: 92435 - DNA, 15 bp, Homo sapiens
ccctcgtcccaggca

SEQ ID NO: 92436 - DNA, 15 bp, Homo sapiens
gccctcgtcccaggc

SEQ ID NO: 92437 - DNA, 15 bp, Homo sapiens
agccctcgtcccagg

SEQ ID NO: 92438 - DNA, 15 bp, Homo sapiens
gagccctcgtcccag

SEQ ID NO: 92439 - DNA, 15 bp, Homo sapiens
tgagccctcgtccca

SEQ ID NO: 92440 - DNA, 15 bp, Homo sapiens
atgagccctcgtccc

SEQ ID NO: 92441 - DNA, 15 bp, Homo sapiens
gatgagccctcgtcc

SEQ ID NO: 92442 - DNA, 15 bp, Homo sapiens
cgatgagccctcgtc

SEQ ID NO: 92443 - DNA, 15 bp, Homo sapiens
tcgatgagccctcgt

SEQ ID NO: 92444 - DNA, 15 bp, Homo sapiens
gtcgatgagccctcg

SEQ ID NO: 92445 - DNA, 15 bp, Homo sapiens
tgtcgatgagccctc

SEQ ID NO: 92446 - DNA, 15 bp, Homo sapiens
atgtcgatgagccct

SEQ ID NO: 92447 - DNA, 15 bp, Homo sapiens
catgtcgatgagccc

SEQ ID NO: 92448 - DNA, 15 bp, Homo sapiens
ccatgtcgatgagcc

SEQ ID NO: 92449 - DNA, 15 bp, Homo sapiens
accatgtcgatgagc

SEQ ID NO: 92450 - DNA, 15 bp, Homo sapiens
caccatgtcgatgag

SEQ ID NO: 92451 - DNA, 15 bp, Homo sapiens
tcaccatgtcgatga

SEQ ID NO: 92452 - DNA, 15 bp, Homo sapiens
ttcaccatgtcgatg

SEQ ID NO: 92453 - DNA, 15 bp, Homo sapiens
tttcaccatgtcgat

SEQ ID NO: 92454 - DNA, 15 bp, Homo sapiens
ttttcaccatgtcga

SEQ ID NO: 92455 - DNA, 15 bp, Homo sapiens
tttttcaccatgtcg

SEQ ID NO: 92456 - DNA, 15 bp, Homo sapiens
gtttttcaccatgtc

SEQ ID NO: 92457 - DNA, 15 bp, Homo sapiens
ggtttttcaccatgt

SEQ ID NO: 92458 - DNA, 15 bp, Homo sapiens
tggtttttcaccatg

SEQ ID NO: 92459 - DNA, 15 bp, Homo sapiens
ctggtttttcaccat

SEQ ID NO: 92460 - DNA, 15 bp, Homo sapiens
cctggtttttcacca

SEQ ID NO: 92461 - DNA, 15 bp, Homo sapiens
gcctggtttttcacc

SEQ ID NO: 92462 - DNA, 15 bp, Homo sapiens
tgcctggtttttcac

SEQ ID NO: 92463 - DNA, 15 bp, Homo sapiens
ttgcctggtttttca

SEQ ID NO: 92464 - DNA, 15 bp, Homo sapiens
attgcctggtttttc

SEQ ID NO: 92465 - DNA, 15 bp, Homo sapiens
cattgcctggttttt

SEQ ID NO: 92466 - DNA, 15 bp, Homo sapiens
ccattgcctggtttt

SEQ ID NO: 92467 - DNA, 15 bp, Homo sapiens
gccattgcctggttt

SEQ ID NO: 92468 - DNA, 15 bp, Homo sapiens
agccattgcctggtt

SEQ ID NO: 92469 - DNA, 15 bp, Homo sapiens
cagccattgcctggt

SEQ ID NO: 92470 - DNA, 15 bp, Homo sapiens
tcagccattgcctgg

SEQ ID NO: 92471 - DNA, 15 bp, Homo sapiens
atcagccattgcctg

SEQ ID NO: 92472 - DNA, 15 bp, Homo sapiens
catcagccattgcct

SEQ ID NO: 92473 - DNA, 15 bp, Homo sapiens
gcatcagccattgcc

SEQ ID NO: 92474 - DNA, 15 bp, Homo sapiens
ggcatcagccattgc

SEQ ID NO: 92475 - DNA, 15 bp, Homo sapiens
gggcatcagccattg

SEQ ID NO: 92476 - DNA, 15 bp, Homo sapiens
agggcatcagccatt

SEQ ID NO: 92477 - DNA, 15 bp, Homo sapiens
cagggcatcagccat

SEQ ID NO: 92478 - DNA, 15 bp, Homo sapiens
ccagggcatcagcca

SEQ ID NO: 92479 - DNA, 15 bp, Homo sapiens
tccagggcatcagcc

SEQ ID NO: 92480 - DNA, 15 bp, Homo sapiens
ttccagggcatcagc

SEQ ID NO: 92481 - DNA, 15 bp, Homo sapiens
tttccagggcatcag

SEQ ID NO: 92482 - DNA, 15 bp, Homo sapiens
ctttccagggcatca

SEQ ID NO: 92483 - DNA, 15 bp, Homo sapiens
cctttccagggcatc

SEQ ID NO: 92484 - DNA, 15 bp, Homo sapiens
acctttccagggcat

SEQ ID NO: 92485 - DNA, 15 bp, Homo sapiens
aacctttccagggca

SEQ ID NO: 92486 - DNA, 15 bp, Homo sapiens
aaacctttccagggc

SEQ ID NO: 92487 - DNA, 15 bp, Homo sapiens
caaacctttccaggg

SEQ ID NO: 92488 - DNA, 15 bp, Homo sapiens
ccaaacctttccagg

SEQ ID NO: 92489 - DNA, 15 bp, Homo sapiens
accaaacctttccag

SEQ ID NO: 92490 - DNA, 15 bp, Homo sapiens
caccaaacctttcca

SEQ ID NO: 92491 - DNA, 15 bp, Homo sapiens
tcaccaaacctttcc

SEQ ID NO: 92492 - DNA, 15 bp, Homo sapiens
ctcaccaaacctttc

SEQ ID NO: 92493 - DNA, 15 bp, Homo sapiens
actcaccaaaccttt

SEQ ID NO: 92494 - DNA, 15 bp, Homo sapiens
cactcaccaaacctt

SEQ ID NO: 92495 - DNA, 15 bp, Homo sapiens
tcactcaccaaacct

SEQ ID NO: 92496 - DNA, 15 bp, Homo sapiens
ttcactcaccaaacc

SEQ ID NO: 92497 - DNA, 15 bp, Homo sapiens
cttcactcaccaaac

SEQ ID NO: 92498 - DNA, 15 bp, Homo sapiens
gcttcactcaccaaa

SEQ ID NO: 92499 - DNA, 15 bp, Homo sapiens
tgcttcactcaccaa

SEQ ID NO: 92500 - DNA, 15 bp, Homo sapiens
ctgcttcactcacca

SEQ ID NO: 92501 - DNA, 15 bp, Homo sapiens
actgcttcactcacc

SEQ ID NO: 92502 - DNA, 15 bp, Homo sapiens
cactgcttcactcac

SEQ ID NO: 92503 - DNA, 15 bp, Homo sapiens
ccactgcttcactca

SEQ ID NO: 92504 - DNA, 15 bp, Homo sapiens
gccactgcttcactc

SEQ ID NO: 92505 - DNA, 15 bp, Homo sapiens
agccactgcttcact

SEQ ID NO: 92506 - DNA, 15 bp, Homo sapiens
cagccactgcttcac

SEQ ID NO: 92507 - DNA, 15 bp, Homo sapiens
acagccactgcttca

SEQ ID NO: 92508 - DNA, 15 bp, Homo sapiens
tacagccactgcttc

SEQ ID NO: 92509 - DNA, 15 bp, Homo sapiens
ctacagccactgctt

SEQ ID NO: 92510 - DNA, 15 bp, Homo sapiens
cctacagccactgct

SEQ ID NO: 92511 - DNA, 15 bp, Homo sapiens
tcctacagccactgc

SEQ ID NO: 92512 - DNA, 15 bp, Homo sapiens
atcctacagccactg

SEQ ID NO: 92513 - DNA, 15 bp, Homo sapiens
catcctacagccact

SEQ ID NO: 92514 - DNA, 15 bp, Homo sapiens
gcatcctacagccac

SEQ ID NO: 92515 - DNA, 15 bp, Homo sapiens
agcatcctacagcca

SEQ ID NO: 92516 - DNA, 15 bp, Homo sapiens
aagcatcctacagcc

SEQ ID NO: 92517 - DNA, 15 bp, Homo sapiens
aaagcatcctacagc

SEQ ID NO: 92518 - DNA, 15 bp, Homo sapiens
taaagcatcctacag

SEQ ID NO: 92519 - DNA, 15 bp, Homo sapiens
ttaaagcatcctaca

SEQ ID NO: 92520 - DNA, 15 bp, Homo sapiens
attaaagcatcctac

SEQ ID NO: 92521 - DNA, 15 bp, Homo sapiens
cattaaagcatccta

SEQ ID NO: 92522 - DNA, 15 bp, Homo sapiens
ccattaaagcatcct

SEQ ID NO: 92523 - DNA, 15 bp, Homo sapiens
tccattaaagcatcc

SEQ ID NO: 92524 - DNA, 15 bp, Homo sapiens
ctccattaaagcatc

SEQ ID NO: 92525 - DNA, 15 bp, Homo sapiens
tctccattaaagcat

SEQ ID NO: 92526 - DNA, 15 bp, Homo sapiens
atctccattaaagca

SEQ ID NO: 92527 - DNA, 15 bp, Homo sapiens
catctccattaaagc

SEQ ID NO: 92528 - DNA, 15 bp, Homo sapiens
ccatctccattaaag

SEQ ID NO: 92529 - DNA, 15 bp, Homo sapiens
gccatctccattaaa

SEQ ID NO: 92530 - DNA, 15 bp, Homo sapiens
tgccatctccattaa

SEQ ID NO: 92531 - DNA, 15 bp, Homo sapiens
gtgccatctccatta

SEQ ID NO: 92532 - DNA, 15 bp, Homo sapiens
agtgccatctccatt

SEQ ID NO: 92533 - DNA, 15 bp, Homo sapiens
gagtgccatctccat

SEQ ID NO: 92534 - DNA, 15 bp, Homo sapiens
agagtgccatctcca

SEQ ID NO: 92535 - DNA, 15 bp, Homo sapiens
cagagtgccatctcc

SEQ ID NO: 92536 - DNA, 15 bp, Homo sapiens
gcagagtgccatctc

SEQ ID NO: 92537 - DNA, 15 bp, Homo sapiens
tgcagagtgccatct

SEQ ID NO: 92538 - DNA, 15 bp, Homo sapiens
atgcagagtgccatc

SEQ ID NO: 92539 - DNA, 15 bp, Homo sapiens
tatgcagagtgccat

SEQ ID NO: 92540 - DNA, 15 bp, Homo sapiens
ctatgcagagtgcca

SEQ ID NO: 92541 - DNA, 15 bp, Homo sapiens
cctatgcagagtgcc

SEQ ID NO: 92542 - DNA, 15 bp, Homo sapiens
gcctatgcagagtgc

SEQ ID NO: 92543 - DNA, 15 bp, Homo sapiens
ggcctatgcagagtg

SEQ ID NO: 92544 - DNA, 15 bp, Homo sapiens
aggcctatgcagagt

SEQ ID NO: 92545 - DNA, 15 bp, Homo sapiens
aaggcctatgcagag

SEQ ID NO: 92546 - DNA, 15 bp, Homo sapiens
caaggcctatgcaga

SEQ ID NO: 92547 - DNA, 15 bp, Homo sapiens
ccaaggcctatgcag

SEQ ID NO: 92548 - DNA, 15 bp, Homo sapiens
accaaggcctatgca

SEQ ID NO: 92549 - DNA, 15 bp, Homo sapiens
taccaaggcctatgc

SEQ ID NO: 92550 - DNA, 15 bp, Homo sapiens
gtaccaaggcctatg

SEQ ID NO: 92551 - DNA, 15 bp, Homo sapiens
ggtaccaaggcctat

SEQ ID NO: 92552 - DNA, 15 bp, Homo sapiens
gggtaccaaggccta

SEQ ID NO: 92553 - DNA, 15 bp, Homo sapiens
agggtaccaaggcct

SEQ ID NO: 92554 - DNA, 15 bp, Homo sapiens
cagggtaccaaggcc

SEQ ID NO: 92555 - DNA, 15 bp, Homo sapiens
tcagggtaccaaggc

SEQ ID NO: 92556 - DNA, 15 bp, Homo sapiens
ttcagggtaccaagg

SEQ ID NO: 92557 - DNA, 15 bp, Homo sapiens
gttcagggtaccaag

SEQ ID NO: 92558 - DNA, 15 bp, Homo sapiens
agttcagggtaccaa

SEQ ID NO: 92559 - DNA, 15 bp, Homo sapiens
aagttcagggtacca

SEQ ID NO: 92560 - DNA, 15 bp, Homo sapiens
aaagttcagggtacc

SEQ ID NO: 92561 - DNA, 15 bp, Homo sapiens
caaagttcagggtac

SEQ ID NO: 92562 - DNA, 15 bp, Homo sapiens
acaaagttcagggta

SEQ ID NO: 92563 - DNA, 15 bp, Homo sapiens
aacaaagttcagggt

SEQ ID NO: 92564 - DNA, 15 bp, Homo sapiens
aaacaaagttcaggg

SEQ ID NO: 92565 - DNA, 15 bp, Homo sapiens
aaaacaaagttcagg

SEQ ID NO: 92566 - DNA, 15 bp, Homo sapiens
caaaacaaagttcag

SEQ ID NO: 92567 - DNA, 15 bp, Homo sapiens
ccaaaacaaagttca

SEQ ID NO: 92568 - DNA, 15 bp, Homo sapiens
tccaaaacaaagttc

SEQ ID NO: 92569 - DNA, 15 bp, Homo sapiens
ttccaaaacaaagtt

SEQ ID NO: 92570 - DNA, 15 bp, Homo sapiens
tttccaaaacaaagt

SEQ ID NO: 92571 - DNA, 15 bp, Homo sapiens
ctttccaaaacaaag

SEQ ID NO: 92572 - DNA, 15 bp, Homo sapiens
tctttccaaaacaaa

SEQ ID NO: 92573 - DNA, 15 bp, Homo sapiens
ttctttccaaaacaa

SEQ ID NO: 92574 - DNA, 15 bp, Homo sapiens
cttctttccaaaaca

SEQ ID NO: 92575 - DNA, 15 bp, Homo sapiens
gcttctttccaaaac

SEQ ID NO: 92576 - DNA, 15 bp, Homo sapiens
tgcttctttccaaaa

SEQ ID NO: 92577 - DNA, 15 bp, Homo sapiens
ctgcttctttccaaa

SEQ ID NO: 92578 - DNA, 15 bp, Homo sapiens
cctgcttctttccaa

SEQ ID NO: 92579 - DNA, 15 bp, Homo sapiens
acctgcttctttcca

SEQ ID NO: 92580 - DNA, 15 bp, Homo sapiens
cacctgcttctttcc

SEQ ID NO: 92581 - DNA, 15 bp, Homo sapiens
tcacctgcttctttc

SEQ ID NO: 92582 - DNA, 15 bp, Homo sapiens
gtcacctgcttcttt

SEQ ID NO: 92583 - DNA, 15 bp, Homo sapiens
agtcacctgcttctt

SEQ ID NO: 92584 - DNA, 15 bp, Homo sapiens
tagtcacctgcttct

SEQ ID NO: 92585 - DNA, 15 bp, Homo sapiens
ttagtcacctgcttc

SEQ ID NO: 92586 - DNA, 15 bp, Homo sapiens
cttagtcacctgctt

SEQ ID NO: 92587 - DNA, 15 bp, Homo sapiens
gcttagtcacctgct

SEQ ID NO: 92588 - DNA, 15 bp, Homo sapiens
tgcttagtcacctgc

SEQ ID NO: 92589 - DNA, 15 bp, Homo sapiens
gtgcttagtcacctg

SEQ ID NO: 92590 - DNA, 15 bp, Homo sapiens
tgtgcttagtcacct

SEQ ID NO: 92591 - DNA, 15 bp, Homo sapiens
ctgtgcttagtcacc

SEQ ID NO: 92592 - DNA, 15 bp, Homo sapiens
cctgtgcttagtcac

SEQ ID NO: 92593 - DNA, 15 bp, Homo sapiens
tcctgtgcttagtca

SEQ ID NO: 92594 - DNA, 15 bp, Homo sapiens
atcctgtgcttagtc

SEQ ID NO: 92595 - DNA, 15 bp, Homo sapiens
catcctgtgcttagt

SEQ ID NO: 92596 - DNA, 15 bp, Homo sapiens
acatcctgtgcttag

SEQ ID NO: 92597 - DNA, 15 bp, Homo sapiens
aacatcctgtgctta

SEQ ID NO: 92598 - DNA, 15 bp, Homo sapiens
gaacatcctgtgctt

SEQ ID NO: 92599 - DNA, 15 bp, Homo sapiens
ggaacatcctgtgct

SEQ ID NO: 92600 - DNA, 15 bp, Homo sapiens
gggaacatcctgtgc

SEQ ID NO: 92601 - DNA, 15 bp, Homo sapiens
ggggaacatcctgtg

SEQ ID NO: 92602 - DNA, 15 bp, Homo sapiens
gggggaacatcctgt

SEQ ID NO: 92603 - DNA, 15 bp, Homo sapiens
tgggggaacatcctg

SEQ ID NO: 92604 - DNA, 15 bp, Homo sapiens
gtgggggaacatcct

SEQ ID NO: 92605 - DNA, 15 bp, Homo sapiens
ggtgggggaacatcc

SEQ ID NO: 92606 - DNA, 15 bp, Homo sapiens
gggtgggggaacatc

SEQ ID NO: 92607 - DNA, 15 bp, Homo sapiens
ggggtgggggaacat

SEQ ID NO: 92608 - DNA, 15 bp, Homo sapiens
gggggtgggggaaca

SEQ ID NO: 92609 - DNA, 15 bp, Homo sapiens
tgggggtgggggaac

SEQ ID NO: 92610 - DNA, 15 bp, Homo sapiens
atgggggtgggggaa

SEQ ID NO: 92611 - DNA, 15 bp, Homo sapiens
catgggggtggggga

SEQ ID NO: 92612 - DNA, 15 bp, Homo sapiens
gcatgggggtggggg

SEQ ID NO: 92613 - DNA, 15 bp, Homo sapiens
ggcatgggggtgggg

SEQ ID NO: 92614 - DNA, 15 bp, Homo sapiens
gggcatgggggtggg

SEQ ID NO: 92615 - DNA, 15 bp, Homo sapiens
tgggcatgggggtgg

SEQ ID NO: 92616 - DNA, 15 bp, Homo sapiens
ctgggcatgggggtg

SEQ ID NO: 92617 - DNA, 15 bp, Homo sapiens
actgggcatgggggt

SEQ ID NO: 92618 - DNA, 15 bp, Homo sapiens
cactgggcatggggg

SEQ ID NO: 92619 - DNA, 15 bp, Homo sapiens
tcactgggcatgggg

SEQ ID NO: 92620 - DNA, 15 bp, Homo sapiens
gtcactgggcatggg

SEQ ID NO: 92621 - DNA, 15 bp, Homo sapiens
tgtcactgggcatgg

SEQ ID NO: 92622 - DNA, 15 bp, Homo sapiens
ctgtcactgggcatg

SEQ ID NO: 92623 - DNA, 15 bp, Homo sapiens
cctgtcactgggcat

SEQ ID NO: 92624 - DNA, 15 bp, Homo sapiens
ccctgtcactgggca

SEQ ID NO: 92625 - DNA, 15 bp, Homo sapiens
gccctgtcactgggc

SEQ ID NO: 92626 - DNA, 15 bp, Homo sapiens
agccctgtcactggg

SEQ ID NO: 92627 - DNA, 15 bp, Homo sapiens
gagccctgtcactgg

SEQ ID NO: 92628 - DNA, 15 bp, Homo sapiens
tgagccctgtcactg

SEQ ID NO: 92629 - DNA, 15 bp, Homo sapiens
atgagccctgtcact

SEQ ID NO: 92630 - DNA, 15 bp, Homo sapiens
catgagccctgtcac

SEQ ID NO: 92631 - DNA, 15 bp, Homo sapiens
gcatgagccctgtca

SEQ ID NO: 92632 - DNA, 15 bp, Homo sapiens
ggcatgagccctgtc

SEQ ID NO: 92633 - DNA, 15 bp, Homo sapiens
tggcatgagccctgt

SEQ ID NO: 92634 - DNA, 15 bp, Homo sapiens
ttggcatgagccctg

SEQ ID NO: 92635 - DNA, 15 bp, Homo sapiens
gttggcatgagccct

SEQ ID NO: 92636 - DNA, 15 bp, Homo sapiens
tgttggcatgagccc

SEQ ID NO: 92637 - DNA, 15 bp, Homo sapiens
gtgttggcatgagcc

SEQ ID NO: 92638 - DNA, 15 bp, Homo sapiens
tgtgttggcatgagc

SEQ ID NO: 92639 - DNA, 15 bp, Homo sapiens
ctgtgttggcatgag

SEQ ID NO: 92640 - DNA, 15 bp, Homo sapiens
gctgtgttggcatga

SEQ ID NO: 92641 - DNA, 15 bp, Homo sapiens
agctgtgttggcatg

SEQ ID NO: 92642 - DNA, 15 bp, Homo sapiens
cagctgtgttggcat

SEQ ID NO: 92643 - DNA, 15 bp, Homo sapiens
ccagctgtgttggca

SEQ ID NO: 92644 - DNA, 15 bp, Homo sapiens
accagctgtgttggc

SEQ ID NO: 92645 - DNA, 15 bp, Homo sapiens
aaccagctgtgttgg

SEQ ID NO: 92646 - DNA, 15 bp, Homo sapiens
caaccagctgtgttg

SEQ ID NO: 92647 - DNA, 15 bp, Homo sapiens
acaaccagctgtgtt

SEQ ID NO: 92648 - DNA, 15 bp, Homo sapiens
cacaaccagctgtgt

SEQ ID NO: 92649 - DNA, 15 bp, Homo sapiens
ccacaaccagctgtg

SEQ ID NO: 92650 - DNA, 15 bp, Homo sapiens
gccacaaccagctgt

SEQ ID NO: 92651 - DNA, 15 bp, Homo sapiens
tgccacaaccagctg

SEQ ID NO: 92652 - DNA, 15 bp, Homo sapiens
atgccacaaccagct

SEQ ID NO: 92653 - DNA, 15 bp, Homo sapiens
catgccacaaccagc

SEQ ID NO: 92654 - DNA, 15 bp, Homo sapiens
ccatgccacaaccag

SEQ ID NO: 92655 - DNA, 15 bp, Homo sapiens
cccatgccacaacca

SEQ ID NO: 92656 - DNA, 15 bp, Homo sapiens
acccatgccacaacc

SEQ ID NO: 92657 - DNA, 15 bp, Homo sapiens
aacccatgccacaac

SEQ ID NO: 92658 - DNA, 15 bp, Homo sapiens
aaacccatgccacaa

SEQ ID NO: 92659 - DNA, 15 bp, Homo sapiens
aaaacccatgccaca

SEQ ID NO: 92660 - DNA, 15 bp, Homo sapiens
caaaacccatgccac

SEQ ID NO: 92661 - DNA, 15 bp, Homo sapiens
acaaaacccatgcca

SEQ ID NO: 92662 - DNA, 15 bp, Homo sapiens
cacaaaacccatgcc

SEQ ID NO: 92663 - DNA, 15 bp, Homo sapiens
tcacaaaacccatgc

SEQ ID NO: 92664 - DNA, 15 bp, Homo sapiens
gtcacaaaacccatg

SEQ ID NO: 92665 - DNA, 15 bp, Homo sapiens
tgtcacaaaacccat

SEQ ID NO: 92666 - DNA, 15 bp, Homo sapiens
gtgtcacaaaaccca

SEQ ID NO: 92667 - DNA, 15 bp, Homo sapiens
tgtgtcacaaaaccc

SEQ ID NO: 92668 - DNA, 15 bp, Homo sapiens
ttgtgtcacaaaacc

SEQ ID NO: 92669 - DNA, 15 bp, Homo sapiens
gttgtgtcacaaaac

SEQ ID NO: 92670 - DNA, 15 bp, Homo sapiens
ggttgtgtcacaaaa

SEQ ID NO: 92671 - DNA, 15 bp, Homo sapiens
tggttgtgtcacaaa

SEQ ID NO: 92672 - DNA, 15 bp, Homo sapiens
atggttgtgtcacaa

SEQ ID NO: 92673 - DNA, 15 bp, Homo sapiens
aatggttgtgtcaca

SEQ ID NO: 92674 - DNA, 15 bp, Homo sapiens
aaatggttgtgtcac

SEQ ID NO: 92675 - DNA, 15 bp, Homo sapiens
caaatggttgtgtca

SEQ ID NO: 92676 - DNA, 15 bp, Homo sapiens
acaaatggttgtgtc

SEQ ID NO: 92677 - DNA, 15 bp, Homo sapiens
gacaaatggttgtgt

SEQ ID NO: 92678 - DNA, 15 bp, Homo sapiens
agacaaatggttgtg

SEQ ID NO: 92679 - DNA, 15 bp, Homo sapiens
cagacaaatggttgt

SEQ ID NO: 92680 - DNA, 15 bp, Homo sapiens
acagacaaatggttg

SEQ ID NO: 92681 - DNA, 15 bp, Homo sapiens
cacagacaaatggtt

SEQ ID NO: 92682 - DNA, 15 bp, Homo sapiens
acacagacaaatggt

SEQ ID NO: 92683 - DNA, 15 bp, Homo sapiens
gacacagacaaatgg

SEQ ID NO: 92684 - DNA, 15 bp, Homo sapiens
agacacagacaaatg

SEQ ID NO: 92685 - DNA, 15 bp, Homo sapiens
gagacacagacaaat

SEQ ID NO: 92686 - DNA, 15 bp, Homo sapiens
agagacacagacaaa

SEQ ID NO: 92687 - DNA, 15 bp, Homo sapiens
cagagacacagacaa

SEQ ID NO: 92688 - DNA, 15 bp, Homo sapiens
tcagagacacagaca

SEQ ID NO: 92689 - DNA, 15 bp, Homo sapiens
atcagagacacagac

SEQ ID NO: 92690 - DNA, 15 bp, Homo sapiens
tatcagagacacaga

SEQ ID NO: 92691 - DNA, 15 bp, Homo sapiens
ctatcagagacacag

SEQ ID NO: 92692 - DNA, 15 bp, Homo sapiens
gctatcagagacaca

SEQ ID NO: 92693 - DNA, 15 bp, Homo sapiens
tgctatcagagacac

SEQ ID NO: 92694 - DNA, 15 bp, Homo sapiens
atgctatcagagaca

SEQ ID NO: 92695 - DNA, 15 bp, Homo sapiens
aatgctatcagagac

SEQ ID NO: 92696 - DNA, 15 bp, Homo sapiens
caatgctatcagaga

SEQ ID NO: 92697 - DNA, 15 bp, Homo sapiens
tcaatgctatcagag

SEQ ID NO: 92698 - DNA, 15 bp, Homo sapiens
ctcaatgctatcaga

SEQ ID NO: 92699 - DNA, 15 bp, Homo sapiens
tctcaatgctatcag

SEQ ID NO: 92700 - DNA, 15 bp, Homo sapiens
ttctcaatgctatca

SEQ ID NO: 92701 - DNA, 15 bp, Homo sapiens
tttctcaatgctatc

SEQ ID NO: 92702 - DNA, 15 bp, Homo sapiens
ttttctcaatgctat

SEQ ID NO: 92703 - DNA, 15 bp, Homo sapiens
cttttctcaatgcta

SEQ ID NO: 92704 - DNA, 15 bp, Homo sapiens
acttttctcaatgct

SEQ ID NO: 92705 - DNA, 15 bp, Homo sapiens
cacttttctcaatgc

SEQ ID NO: 92706 - DNA, 15 bp, Homo sapiens
tcacttttctcaatg

SEQ ID NO: 92707 - DNA, 15 bp, Homo sapiens
ttcacttttctcaat

SEQ ID NO: 92708 - DNA, 15 bp, Homo sapiens
tttcacttttctcaa

SEQ ID NO: 92709 - DNA, 15 bp, Homo sapiens
ctttcacttttctca

SEQ ID NO: 92710 - DNA, 15 bp, Homo sapiens
cctttcacttttctc

SEQ ID NO: 92711 - DNA, 15 bp, Homo sapiens
ccctttcacttttct

SEQ ID NO: 92712 - DNA, 15 bp, Homo sapiens
gccctttcacttttc

SEQ ID NO: 92713 - DNA, 15 bp, Homo sapiens
tgccctttcactttt

SEQ ID NO: 92714 - DNA, 15 bp, Homo sapiens
ctgccctttcacttt

SEQ ID NO: 92715 - DNA, 15 bp, Homo sapiens
actgccctttcactt

SEQ ID NO: 92716 - DNA, 15 bp, Homo sapiens
aactgccctttcact

SEQ ID NO: 92717 - DNA, 15 bp, Homo sapiens
aaactgccctttcac

SEQ ID NO: 92718 - DNA, 15 bp, Homo sapiens
aaaactgccctttca

SEQ ID NO: 92719 - DNA, 15 bp, Homo sapiens
caaaactgccctttc

SEQ ID NO: 92720 - DNA, 15 bp, Homo sapiens
tcaaaactgcccttt

SEQ ID NO: 92721 - DNA, 15 bp, Homo sapiens
ttcaaaactgccctt

SEQ ID NO: 92722 - DNA, 15 bp, Homo sapiens
cttcaaaactgccct

SEQ ID NO: 92723 - DNA, 15 bp, Homo sapiens
ccttcaaaactgccc

SEQ ID NO: 92724 - DNA, 15 bp, Homo sapiens
accttcaaaactgcc

SEQ ID NO: 92725 - DNA, 15 bp, Homo sapiens
taccttcaaaactgc

SEQ ID NO: 92726 - DNA, 15 bp, Homo sapiens
ttaccttcaaaactg

SEQ ID NO: 92727 - DNA, 15 bp, Homo sapiens
cttaccttcaaaact

SEQ ID NO: 92728 - DNA, 15 bp, Homo sapiens
ccttaccttcaaaac

SEQ ID NO: 92729 - DNA, 15 bp, Homo sapiens
tccttaccttcaaaa

SEQ ID NO: 92730 - DNA, 15 bp, Homo sapiens
ttccttaccttcaaa

SEQ ID NO: 92731 - DNA, 15 bp, Homo sapiens
tttccttaccttcaa

SEQ ID NO: 92732 - DNA, 15 bp, Homo sapiens
ttttccttaccttca

SEQ ID NO: 92733 - DNA, 15 bp, Homo sapiens
attttccttaccttc

SEQ ID NO: 92734 - DNA, 15 bp, Homo sapiens
tattttccttacctt

SEQ ID NO: 92735 - DNA, 15 bp, Homo sapiens
ctattttccttacct

SEQ ID NO: 92736 - DNA, 15 bp, Homo sapiens
actattttccttacc

SEQ ID NO: 92737 - DNA, 15 bp, Homo sapiens
cactattttccttac

SEQ ID NO: 92738 - DNA, 15 bp, Homo sapiens
ccactattttcctta

SEQ ID NO: 92739 - DNA, 15 bp, Homo sapiens
gccactattttcctt

SEQ ID NO: 92740 - DNA, 15 bp, Homo sapiens
tgccactattttcct

SEQ ID NO: 92741 - DNA, 15 bp, Homo sapiens
atgccactattttcc

SEQ ID NO: 92742 - DNA, 15 bp, Homo sapiens
aatgccactattttc

SEQ ID NO: 92743 - DNA, 15 bp, Homo sapiens
aaatgccactatttt

SEQ ID NO: 92744 - DNA, 15 bp, Homo sapiens
caaatgccactattt

SEQ ID NO: 92745 - DNA, 15 bp, Homo sapiens
gcaaatgccactatt

SEQ ID NO: 92746 - DNA, 15 bp, Homo sapiens
agcaaatgccactat

SEQ ID NO: 92747 - DNA, 15 bp, Homo sapiens
aagcaaatgccacta

SEQ ID NO: 92748 - DNA, 15 bp, Homo sapiens
caagcaaatgccact

SEQ ID NO: 92749 - DNA, 15 bp, Homo sapiens
ccaagcaaatgccac

SEQ ID NO: 92750 - DNA, 15 bp, Homo sapiens
tccaagcaaatgcca

SEQ ID NO: 92751 - DNA, 15 bp, Homo sapiens
atccaagcaaatgcc

SEQ ID NO: 92752 - DNA, 15 bp, Homo sapiens
gatccaagcaaatgc

SEQ ID NO: 92753 - DNA, 15 bp, Homo sapiens
ggatccaagcaaatg

SEQ ID NO: 92754 - DNA, 15 bp, Homo sapiens
tggatccaagcaaat

SEQ ID NO: 92755 - DNA, 15 bp, Homo sapiens
gtggatccaagcaaa

SEQ ID NO: 92756 - DNA, 15 bp, Homo sapiens
agtggatccaagcaa

SEQ ID NO: 92757 - DNA, 15 bp, Homo sapiens
cagtggatccaagca

SEQ ID NO: 92758 - DNA, 15 bp, Homo sapiens
ccagtggatccaagc

SEQ ID NO: 92759 - DNA, 15 bp, Homo sapiens
gccagtggatccaag

SEQ ID NO: 92760 - DNA, 15 bp, Homo sapiens
agccagtggatccaa

SEQ ID NO: 92761 - DNA, 15 bp, Homo sapiens
gagccagtggatcca

SEQ ID NO: 92762 - DNA, 15 bp, Homo sapiens
tgagccagtggatcc

SEQ ID NO: 92763 - DNA, 15 bp, Homo sapiens
atgagccagtggatc

SEQ ID NO: 92764 - DNA, 15 bp, Homo sapiens
catgagccagtggat

SEQ ID NO: 92765 - DNA, 15 bp, Homo sapiens
gcatgagccagtgga

SEQ ID NO: 92766 - DNA, 15 bp, Homo sapiens
ggcatgagccagtgg

SEQ ID NO: 92767 - DNA, 15 bp, Homo sapiens
tggcatgagccagtg

SEQ ID NO: 92768 - DNA, 15 bp, Homo sapiens
gtggcatgagccagt

SEQ ID NO: 92769 - DNA, 15 bp, Homo sapiens
agtggcatgagccag

SEQ ID NO: 92770 - DNA, 15 bp, Homo sapiens
cagtggcatgagcca

SEQ ID NO: 92771 - DNA, 15 bp, Homo sapiens
acagtggcatgagcc

SEQ ID NO: 92772 - DNA, 15 bp, Homo sapiens
gacagtggcatgagc

SEQ ID NO: 92773 - DNA, 15 bp, Homo sapiens
agacagtggcatgag

SEQ ID NO: 92774 - DNA, 15 bp, Homo sapiens
cagacagtggcatga

SEQ ID NO: 92775 - DNA, 15 bp, Homo sapiens
ccagacagtggcatg

SEQ ID NO: 92776 - DNA, 15 bp, Homo sapiens
cccagacagtggcat

SEQ ID NO: 92777 - DNA, 15 bp, Homo sapiens
acccagacagtggca

SEQ ID NO: 92778 - DNA, 15 bp, Homo sapiens
aacccagacagtggc

SEQ ID NO: 92779 - DNA, 15 bp, Homo sapiens
caacccagacagtgg

SEQ ID NO: 92780 - DNA, 15 bp, Homo sapiens
ccaacccagacagtg

SEQ ID NO: 92781 - DNA, 15 bp, Homo sapiens
accaacccagacagt

SEQ ID NO: 92782 - DNA, 15 bp, Homo sapiens
aaccaacccagacag

SEQ ID NO: 92783 - DNA, 15 bp, Homo sapiens
taaccaacccagaca

SEQ ID NO: 92784 - DNA, 15 bp, Homo sapiens
ctaaccaacccagac

SEQ ID NO: 92785 - DNA, 15 bp, Homo sapiens
tctaaccaacccaga

SEQ ID NO: 92786 - DNA, 15 bp, Homo sapiens
ttctaaccaacccag

SEQ ID NO: 92787 - DNA, 15 bp, Homo sapiens
cttctaaccaaccca

SEQ ID NO: 92788 - DNA, 15 bp, Homo sapiens
gcttctaaccaaccc

SEQ ID NO: 92789 - DNA, 15 bp, Homo sapiens
tgcttctaaccaacc

SEQ ID NO: 92790 - DNA, 15 bp, Homo sapiens
gtgcttctaaccaac

SEQ ID NO: 92791 - DNA, 15 bp, Homo sapiens
agtgcttctaaccaa

SEQ ID NO: 92792 - DNA, 15 bp, Homo sapiens
cagtgcttctaacca

SEQ ID NO: 92793 - DNA, 15 bp, Homo sapiens
ccagtgcttctaacc

SEQ ID NO: 92794 - DNA, 15 bp, Homo sapiens
tccagtgcttctaac

SEQ ID NO: 92795 - DNA, 15 bp, Homo sapiens
ttccagtgcttctaa

SEQ ID NO: 92796 - DNA, 15 bp, Homo sapiens
tttccagtgcttcta

SEQ ID NO: 92797 - DNA, 15 bp, Homo sapiens
ttttccagtgcttct

SEQ ID NO: 92798 - DNA, 15 bp, Homo sapiens
cttttccagtgcttc

SEQ ID NO: 92799 - DNA, 15 bp, Homo sapiens
acttttccagtgctt

SEQ ID NO: 92800 - DNA, 15 bp, Homo sapiens
gacttttccagtgct

SEQ ID NO: 92801 - DNA, 15 bp, Homo sapiens
tgacttttccagtgc

SEQ ID NO: 92802 - DNA, 15 bp, Homo sapiens
ttgacttttccagtg

SEQ ID NO: 92803 - DNA, 15 bp, Homo sapiens
tttgacttttccagt

SEQ ID NO: 92804 - DNA, 15 bp, Homo sapiens
gtttgacttttccag

SEQ ID NO: 92805 - DNA, 15 bp, Homo sapiens
ggtttgacttttcca

SEQ ID NO: 92806 - DNA, 15 bp, Homo sapiens
tggtttgacttttcc

SEQ ID NO: 92807 - DNA, 15 bp, Homo sapiens
atggtttgacttttc

SEQ ID NO: 92808 - DNA, 15 bp, Homo sapiens
tatggtttgactttt

SEQ ID NO: 92809 - DNA, 15 bp, Homo sapiens
ttatggtttgacttt

SEQ ID NO: 92810 - DNA, 15 bp, Homo sapiens
gttatggtttgactt

SEQ ID NO: 92811 - DNA, 15 bp, Homo sapiens
agttatggtttgact

SEQ ID NO: 92812 - DNA, 15 bp, Homo sapiens
aagttatggtttgac

SEQ ID NO: 92813 - DNA, 15 bp, Homo sapiens
aaagttatggtttga

SEQ ID NO: 92814 - DNA, 15 bp, Homo sapiens
caaagttatggtttg

SEQ ID NO: 92815 - DNA, 15 bp, Homo sapiens
ctcaaagttatggtt

SEQ ID NO: 92816 - DNA, 15 bp, Homo sapiens
tctcaaagttatggt

SEQ ID NO: 92817 - DNA, 15 bp, Homo sapiens
ttctcaaagttatgg

SEQ ID NO: 92818 - DNA, 15 bp, Homo sapiens
attctcaaagttatg

SEQ ID NO: 92819 - DNA, 15 bp, Homo sapiens
aattctcaaagttat

SEQ ID NO: 92820 - DNA, 15 bp, Homo sapiens
taattctcaaagtta

SEQ ID NO: 92821 - DNA, 15 bp, Homo sapiens
ctaattctcaaagtt

SEQ ID NO: 92822 - DNA, 15 bp, Homo sapiens
cctaattctcaaagt

SEQ ID NO: 92823 - DNA, 15 bp, Homo sapiens
acctaattctcaaag

SEQ ID NO: 92824 - DNA, 15 bp, Homo sapiens
cacctaattctcaaa

SEQ ID NO: 92825 - DNA, 15 bp, Homo sapiens
tcacctaattctcaa

SEQ ID NO: 92826 - DNA, 15 bp, Homo sapiens
atcacctaattctca

SEQ ID NO: 92827 - DNA, 15 bp, Homo sapiens
gatcacctaattctc

SEQ ID NO: 92828 - DNA, 15 bp, Homo sapiens
tgatcacctaattct

SEQ ID NO: 92829 - DNA, 15 bp, Homo sapiens
ctgatcacctaattc

SEQ ID NO: 92830 - DNA, 15 bp, Homo sapiens
cctgatcacctaatt

SEQ ID NO: 92831 - DNA, 15 bp, Homo sapiens
ccctgatcacctaat

SEQ ID NO: 92832 - DNA, 15 bp, Homo sapiens
tccctgatcacctaa

SEQ ID NO: 92833 - DNA, 15 bp, Homo sapiens
ttccctgatcaccta

SEQ ID NO: 92834 - DNA, 15 bp, Homo sapiens
attccctgatcacct

SEQ ID NO: 92835 - DNA, 15 bp, Homo sapiens
gattccctgatcacc

SEQ ID NO: 92836 - DNA, 15 bp, Homo sapiens
tgattccctgatcac

SEQ ID NO: 92837 - DNA, 15 bp, Homo sapiens
ctgattccctgatca

SEQ ID NO: 92838 - DNA, 15 bp, Homo sapiens
tctgattccctgatc

SEQ ID NO: 92839 - DNA, 15 bp, Homo sapiens
ttctgattccctgat

SEQ ID NO: 92840 - DNA, 15 bp, Homo sapiens
cttctgattccctga

SEQ ID NO: 92841 - DNA, 15 bp, Homo sapiens
ccttctgattccctg

SEQ ID NO: 92842 - DNA, 15 bp, Homo sapiens
tccttctgattccct

SEQ ID NO: 92843 - DNA, 15 bp, Homo sapiens
ttccttctgattccc

SEQ ID NO: 92844 - DNA, 15 bp, Homo sapiens
tttccttctgattcc

SEQ ID NO: 92845 - DNA, 15 bp, Homo sapiens
ctttccttctgattc

SEQ ID NO: 92846 - DNA, 15 bp, Homo sapiens
tctttccttctgatt

SEQ ID NO: 92847 - DNA, 15 bp, Homo sapiens
atctttccttctgat

SEQ ID NO: 92848 - DNA, 15 bp, Homo sapiens
catctttccttctga

SEQ ID NO: 92849 - DNA, 15 bp, Homo sapiens
gcatctttccttctg

SEQ ID NO: 92850 - DNA, 15 bp, Homo sapiens
tgcatctttccttct

SEQ ID NO: 92851 - DNA, 15 bp, Homo sapiens
ttgcatctttccttc

SEQ ID NO: 92852 - DNA, 15 bp, Homo sapiens
tttgcatctttcctt

SEQ ID NO: 92853 - DNA, 15 bp, Homo sapiens
gtttgcatctttcct

SEQ ID NO: 92854 - DNA, 15 bp, Homo sapiens
agtttgcatctttcc

SEQ ID NO: 92855 - DNA, 15 bp, Homo sapiens
aagtttgcatctttc

SEQ ID NO: 92856 - DNA, 15 bp, Homo sapiens
aaagtttgcatcttt

SEQ ID NO: 92857 - DNA, 15 bp, Homo sapiens
caaagtttgcatctt

SEQ ID NO: 92858 - DNA, 15 bp, Homo sapiens
ccaaagtttgcatct

SEQ ID NO: 92859 - DNA, 15 bp, Homo sapiens
gccaaagtttgcatc

SEQ ID NO: 92860 - DNA, 15 bp, Homo sapiens
agccaaagtttgcat

SEQ ID NO: 92861 - DNA, 15 bp, Homo sapiens
gagccaaagtttgca

SEQ ID NO: 92862 - DNA, 15 bp, Homo sapiens
agagccaaagtttgc

SEQ ID NO: 92863 - DNA, 15 bp, Homo sapiens
aagagccaaagtttg

SEQ ID NO: 92864 - DNA, 15 bp, Homo sapiens
aaagagccaaagttt

SEQ ID NO: 92865 - DNA, 15 bp, Homo sapiens
aaaagagccaaagtt

SEQ ID NO: 92866 - DNA, 15 bp, Homo sapiens
taaaagagccaaagt

SEQ ID NO: 92867 - DNA, 15 bp, Homo sapiens
ctaaaagagccaaag

SEQ ID NO: 92868 - DNA, 15 bp, Homo sapiens
cctaaaagagccaaa

SEQ ID NO: 92869 - DNA, 15 bp, Homo sapiens
gcctaaaagagccaa

SEQ ID NO: 92870 - DNA, 15 bp, Homo sapiens
cgcctaaaagagcca

SEQ ID NO: 92871 - DNA, 15 bp, Homo sapiens
tcgcctaaaagagcc

SEQ ID NO: 92872 - DNA, 15 bp, Homo sapiens
ttcgcctaaaagagc

SEQ ID NO: 92873 - DNA, 15 bp, Homo sapiens
attcgcctaaaagag

SEQ ID NO: 92874 - DNA, 15 bp, Homo sapiens
gattcgcctaaaaga

SEQ ID NO: 92875 - DNA, 15 bp, Homo sapiens
tgattcgcctaaaag

SEQ ID NO: 92876 - DNA, 15 bp, Homo sapiens
atgattcgcctaaaa

SEQ ID NO: 92877 - DNA, 15 bp, Homo sapiens
catgattcgcctaaa

SEQ ID NO: 92878 - DNA, 15 bp, Homo sapiens
acatgattcgcctaa

SEQ ID NO: 92879 - DNA, 15 bp, Homo sapiens
cacatgattcgccta

SEQ ID NO: 92880 - DNA, 15 bp, Homo sapiens
gcacatgattcgcct

SEQ ID NO: 92881 - DNA, 15 bp, Homo sapiens
ggcacatgattcgcc

SEQ ID NO: 92882 - DNA, 15 bp, Homo sapiens
aggcacatgattcgc

SEQ ID NO: 92883 - DNA, 15 bp, Homo sapiens
caggcacatgattcg

SEQ ID NO: 92884 - DNA, 15 bp, Homo sapiens
gcaggcacatgattc

SEQ ID NO: 92885 - DNA, 15 bp, Homo sapiens
tgcaggcacatgatt

SEQ ID NO: 92886 - DNA, 15 bp, Homo sapiens
ctgcaggcacatgat

SEQ ID NO: 92887 - DNA, 15 bp, Homo sapiens
tctgcaggcacatga

SEQ ID NO: 92888 - DNA, 15 bp, Homo sapiens
atctgcaggcacatg

SEQ ID NO: 92889 - DNA, 15 bp, Homo sapiens
catctgcaggcacat

SEQ ID NO: 92890 - DNA, 15 bp, Homo sapiens
tcatctgcaggcaca

SEQ ID NO: 92891 - DNA, 15 bp, Homo sapiens
ctcatctgcaggcac

SEQ ID NO: 92892 - DNA, 15 bp, Homo sapiens
cctcatctgcaggca

SEQ ID NO: 92893 - DNA, 15 bp, Homo sapiens
acctcatctgcaggc

SEQ ID NO: 92894 - DNA, 15 bp, Homo sapiens
gacctcatctgcagg

SEQ ID NO: 92895 - DNA, 15 bp, Homo sapiens
tgacctcatctgcag

SEQ ID NO: 92896 - DNA, 15 bp, Homo sapiens
atgacctcatctgca

SEQ ID NO: 92897 - DNA, 15 bp, Homo sapiens
aatgacctcatctgc

SEQ ID NO: 92898 - DNA, 15 bp, Homo sapiens
aaatgacctcatctg

SEQ ID NO: 92899 - DNA, 15 bp, Homo sapiens
taaatgacctcatct

SEQ ID NO: 92900 - DNA, 15 bp, Homo sapiens
ataaatgacctcatc

SEQ ID NO: 92901 - DNA, 15 bp, Homo sapiens
aataaatgacctcat

SEQ ID NO: 92902 - DNA, 15 bp, Homo sapiens
taataaatgacctca

SEQ ID NO: 92903 - DNA, 15 bp, Homo sapiens
ataataaatgacctc

SEQ ID NO: 92904 - DNA, 15 bp, Homo sapiens
gataataaatgacct

SEQ ID NO: 92905 - DNA, 15 bp, Homo sapiens
agataataaatgacc

SEQ ID NO: 92906 - DNA, 15 bp, Homo sapiens
aagataataaatgac

SEQ ID NO: 92907 - DNA, 15 bp, Homo sapiens
aaagataataaatga

SEQ ID NO: 92908 - DNA, 15 bp, Homo sapiens
aaaagataataaatg

SEQ ID NO: 92909 - DNA, 15 bp, Homo sapiens
taaaagataataaat

SEQ ID NO: 92910 - DNA, 15 bp, Homo sapiens
gtaaaagataataaa

SEQ ID NO: 92911 - DNA, 15 bp, Homo sapiens
tgtaaaagataataa

SEQ ID NO: 92912 - DNA, 15 bp, Homo sapiens
gtgtaaaagataata

SEQ ID NO: 92913 - DNA, 15 bp, Homo sapiens
tgtgtaaaagataat

SEQ ID NO: 92914 - DNA, 15 bp, Homo sapiens
ctgtgtaaaagataa

SEQ ID NO: 92915 - DNA, 15 bp, Homo sapiens
actgtgtaaaagata

SEQ ID NO: 92916 - DNA, 15 bp, Homo sapiens
gactgtgtaaaagat

SEQ ID NO: 92917 - DNA, 15 bp, Homo sapiens
agactgtgtaaaaga

SEQ ID NO: 92918 - DNA, 15 bp, Homo sapiens
tagactgtgtaaaag

SEQ ID NO: 92919 - DNA, 15 bp, Homo sapiens
atagactgtgtaaaa

SEQ ID NO: 92920 - DNA, 15 bp, Homo sapiens
tatagactgtgtaaa

SEQ ID NO: 92921 - DNA, 15 bp, Homo sapiens
ttatagactgtgtaa

SEQ ID NO: 92922 - DNA, 15 bp, Homo sapiens
tttatagactgtgta

SEQ ID NO: 92923 - DNA, 15 bp, Homo sapiens
ttttatagactgtgt

SEQ ID NO: 92924 - DNA, 15 bp, Homo sapiens
attttatagactgtg

SEQ ID NO: 92925 - DNA, 15 bp, Homo sapiens
aattttatagactgt

SEQ ID NO: 92926 - DNA, 15 bp, Homo sapiens
taattttatagactg

SEQ ID NO: 92927 - DNA, 15 bp, Homo sapiens
ataattttatagact

SEQ ID NO: 92928 - DNA, 15 bp, Homo sapiens
tataattttatagac

SEQ ID NO: 92929 - DNA, 15 bp, Homo sapiens
ttataattttataga

SEQ ID NO: 92930 - DNA, 15 bp, Homo sapiens
attataattttatag

SEQ ID NO: 92931 - DNA, 15 bp, Homo sapiens
cattataattttata

SEQ ID NO: 92932 - DNA, 15 bp, Homo sapiens
acattataattttat

SEQ ID NO: 92933 - DNA, 15 bp, Homo sapiens
tacattataatttta

SEQ ID NO: 92934 - DNA, 15 bp, Homo sapiens
atacattataatttt

SEQ ID NO: 92935 - DNA, 15 bp, Homo sapiens
aatacattataattt

SEQ ID NO: 92936 - DNA, 15 bp, Homo sapiens
taatacattataatt

SEQ ID NO: 92937 - DNA, 15 bp, Homo sapiens
gtaatacattataat

SEQ ID NO: 92938 - DNA, 15 bp, Homo sapiens
tgtaatacattataa

SEQ ID NO: 92939 - DNA, 15 bp, Homo sapiens
atgtaatacattata

SEQ ID NO: 92940 - DNA, 15 bp, Homo sapiens
gatgtaatacattat

SEQ ID NO: 92941 - DNA, 15 bp, Homo sapiens
agatgtaatacatta

SEQ ID NO: 92942 - DNA, 15 bp, Homo sapiens
aagatgtaatacatt

SEQ ID NO: 92943 - DNA, 15 bp, Homo sapiens
aaagatgtaatacat

SEQ ID NO: 92944 - DNA, 15 bp, Homo sapiens
aaaagatgtaataca

SEQ ID NO: 92945 - DNA, 15 bp, Homo sapiens
aaaaagatgtaatac

SEQ ID NO: 92946 - DNA, 15 bp, Homo sapiens
gaaaaagatgtaata

SEQ ID NO: 92947 - DNA, 15 bp, Homo sapiens
agaaaaagatgtaat

SEQ ID NO: 92948 - DNA, 15 bp, Homo sapiens
tagaaaaagatgtaa

SEQ ID NO: 92949 - DNA, 15 bp, Homo sapiens
gtagaaaaagatgta

SEQ ID NO: 92950 - DNA, 15 bp, Homo sapiens
ggtagaaaaagatgt

SEQ ID NO: 92951 - DNA, 15 bp, Homo sapiens
aggtagaaaaagatg

SEQ ID NO: 92952 - DNA, 15 bp, Homo sapiens
aaggtagaaaaagat

SEQ ID NO: 92953 - DNA, 15 bp, Homo sapiens
aaaggtagaaaaaga

SEQ ID NO: 92954 - DNA, 15 bp, Homo sapiens
taaaggtagaaaaag

SEQ ID NO: 92955 - DNA, 15 bp, Homo sapiens
ctaaaggtagaaaaa

SEQ ID NO: 92956 - DNA, 15 bp, Homo sapiens
tctaaaggtagaaaa

SEQ ID NO: 92957 - DNA, 15 bp, Homo sapiens
ttctaaaggtagaaa

SEQ ID NO: 92958 - DNA, 15 bp, Homo sapiens
attctaaaggtagaa

SEQ ID NO: 92959 - DNA, 15 bp, Homo sapiens
cattctaaaggtaga

SEQ ID NO: 92960 - DNA, 15 bp, Homo sapiens
ccattctaaaggtag

SEQ ID NO: 92961 - DNA, 15 bp, Homo sapiens
accattctaaaggta

SEQ ID NO: 92962 - DNA, 15 bp, Homo sapiens
aaccattctaaaggt

SEQ ID NO: 92963 - DNA, 15 bp, Homo sapiens
taaccattctaaagg

SEQ ID NO: 92964 - DNA, 15 bp, Homo sapiens
ttaaccattctaaag

SEQ ID NO: 92965 - DNA, 15 bp, Homo sapiens
tttaaccattctaaa

SEQ ID NO: 92966 - DNA, 15 bp, Homo sapiens
ttttaaccattctaa

SEQ ID NO: 92967 - DNA, 15 bp, Homo sapiens
tttttaaccattcta

SEQ ID NO: 92968 - DNA, 15 bp, Homo sapiens
atttttaaccattct

SEQ ID NO: 92969 - DNA, 15 bp, Homo sapiens
tatttttaaccattc

SEQ ID NO: 92970 - DNA, 15 bp, Homo sapiens
atatttttaaccatt

SEQ ID NO: 92971 - DNA, 15 bp, Homo sapiens
aatatttttaaccat

SEQ ID NO: 92972 - DNA, 15 bp, Homo sapiens
aaatatttttaacca

SEQ ID NO: 92973 - DNA, 15 bp, Homo sapiens
gaaatatttttaacc

SEQ ID NO: 92974 - DNA, 15 bp, Homo sapiens
agaaatatttttaac

SEQ ID NO: 92975 - DNA, 15 bp, Homo sapiens
gagaaatatttttaa

SEQ ID NO: 92976 - DNA, 15 bp, Homo sapiens
ggagaaatattttta

SEQ ID NO: 92977 - DNA, 15 bp, Homo sapiens
cggagaaatattttt

SEQ ID NO: 92978 - DNA, 15 bp, Homo sapiens
ccggagaaatatttt

SEQ ID NO: 92979 - DNA, 15 bp, Homo sapiens
accggagaaatattt

SEQ ID NO: 92980 - DNA, 15 bp, Homo sapiens
taccggagaaatatt

SEQ ID NO: 92981 - DNA, 15 bp, Homo sapiens
ctaccggagaaatat

SEQ ID NO: 92982 - DNA, 15 bp, Homo sapiens
gctaccggagaaata

SEQ ID NO: 92983 - DNA, 15 bp, Homo sapiens
ggctaccggagaaat

SEQ ID NO: 92984 - DNA, 15 bp, Homo sapiens
tggctaccggagaaa

SEQ ID NO: 92985 - DNA, 15 bp, Homo sapiens
atggctaccggagaa

SEQ ID NO: 92986 - DNA, 15 bp, Homo sapiens
tatggctaccggaga

SEQ ID NO: 92987 - DNA, 15 bp, Homo sapiens
atatggctaccggag

SEQ ID NO: 92988 - DNA, 15 bp, Homo sapiens
catatggctaccgga

SEQ ID NO: 92989 - DNA, 15 bp, Homo sapiens
tcatatggctaccgg

SEQ ID NO: 92990 - DNA, 15 bp, Homo sapiens
atcatatggctaccg

SEQ ID NO: 92991 - DNA, 15 bp, Homo sapiens
aatcatatggctacc

SEQ ID NO: 92992 - DNA, 15 bp, Homo sapiens
taatcatatggctac

SEQ ID NO: 92993 - DNA, 15 bp, Homo sapiens
ataatcatatggcta

SEQ ID NO: 92994 - DNA, 15 bp, Homo sapiens
aataatcatatggct

SEQ ID NO: 92995 - DNA, 15 bp, Homo sapiens
taataatcatatggc

SEQ ID NO: 92996 - DNA, 15 bp, Homo sapiens
ataataatcatatgg

SEQ ID NO: 92997 - DNA, 15 bp, Homo sapiens
aataataatcatatg

SEQ ID NO: 92998 - DNA, 15 bp, Homo sapiens
gaataataatcatat

SEQ ID NO: 92999 - DNA, 15 bp, Homo sapiens
tgaataataatcata

SEQ ID NO: 93000 - DNA, 15 bp, Homo sapiens
atgaataataatcat

SEQ ID NO: 93001 - DNA, 15 bp, Homo sapiens
gatgaataataatca

SEQ ID NO: 93002 - DNA, 15 bp, Homo sapiens
ggatgaataataatc

SEQ ID NO: 93003 - DNA, 15 bp, Homo sapiens
tggatgaataataat

SEQ ID NO: 93004 - DNA, 15 bp, Homo sapiens
atggatgaataataa

SEQ ID NO: 93005 - DNA, 15 bp, Homo sapiens
aatggatgaataata

SEQ ID NO: 93006 - DNA, 15 bp, Homo sapiens
taatggatgaataat

SEQ ID NO: 93007 - DNA, 15 bp, Homo sapiens
ctaatggatgaataa

SEQ ID NO: 93008 - DNA, 15 bp, Homo sapiens
tctaatggatgaata

SEQ ID NO: 93009 - DNA, 15 bp, Homo sapiens
atctaatggatgaat

SEQ ID NO: 93010 - DNA, 15 bp, Homo sapiens
tatctaatggatgaa

SEQ ID NO: 93011 - DNA, 15 bp, Homo sapiens
ttatctaatggatga

SEQ ID NO: 93012 - DNA, 15 bp, Homo sapiens
attatctaatggatg

SEQ ID NO: 93013 - DNA, 15 bp, Homo sapiens
tattatctaatggat

SEQ ID NO: 93014 - DNA, 15 bp, Homo sapiens
atattatctaatgga

SEQ ID NO: 93015 - DNA, 15 bp, Homo sapiens
tatattatctaatgg

SEQ ID NO: 93016 - DNA, 15 bp, Homo sapiens
ctatattatctaatg

SEQ ID NO: 93017 - DNA, 15 bp, Homo sapiens
actatattatctaat

SEQ ID NO: 93018 - DNA, 15 bp, Homo sapiens
gactatattatctaa

SEQ ID NO: 93019 - DNA, 15 bp, Homo sapiens
tgactatattatcta

SEQ ID NO: 93020 - DNA, 15 bp, Homo sapiens
ttgactatattatct

SEQ ID NO: 93021 - DNA, 15 bp, Homo sapiens
tttgactatattatc

SEQ ID NO: 93022 - DNA, 15 bp, Homo sapiens
atttgactatattat

SEQ ID NO: 93023 - DNA, 15 bp, Homo sapiens
catttgactatatta

SEQ ID NO: 93024 - DNA, 15 bp, Homo sapiens
ccatttgactatatt

SEQ ID NO: 93025 - DNA, 15 bp, Homo sapiens
cccatttgactatat

SEQ ID NO: 93026 - DNA, 15 bp, Homo sapiens
gcccatttgactata

SEQ ID NO: 93027 - DNA, 15 bp, Homo sapiens
ggcccatttgactat

SEQ ID NO: 93028 - DNA, 15 bp, Homo sapiens
tggcccatttgacta

SEQ ID NO: 93029 - DNA, 15 bp, Homo sapiens
atggcccatttgact

SEQ ID NO: 93030 - DNA, 15 bp, Homo sapiens
catggcccatttgac

SEQ ID NO: 93031 - DNA, 15 bp, Homo sapiens
acatggcccatttga

SEQ ID NO: 93032 - DNA, 15 bp, Homo sapiens
aacatggcccatttg

SEQ ID NO: 93033 - DNA, 15 bp, Homo sapiens
taacatggcccattt

SEQ ID NO: 93034 - DNA, 15 bp, Homo sapiens
ataacatggcccatt

SEQ ID NO: 93035 - DNA, 15 bp, Homo sapiens
aataacatggcccat

SEQ ID NO: 93036 - DNA, 15 bp, Homo sapiens
aaataacatggccca

SEQ ID NO: 93037 - DNA, 15 bp, Homo sapiens
taaataacatggccc

SEQ ID NO: 93038 - DNA, 15 bp, Homo sapiens
gtaaataacatggcc

SEQ ID NO: 93039 - DNA, 15 bp, Homo sapiens
agtaaataacatggc

SEQ ID NO: 93040 - DNA, 15 bp, Homo sapiens
cagtaaataacatgg

SEQ ID NO: 93041 - DNA, 15 bp, Homo sapiens
acagtaaataacatg

SEQ ID NO: 93042 - DNA, 15 bp, Homo sapiens
aacagtaaataacat

SEQ ID NO: 93043 - DNA, 15 bp, Homo sapiens
gaacagtaaataaca

SEQ ID NO: 93044 - DNA, 15 bp, Homo sapiens
tgaacagtaaataac

SEQ ID NO: 93045 - DNA, 15 bp, Homo sapiens
atgaacagtaaataa

SEQ ID NO: 93046 - DNA, 15 bp, Homo sapiens
tatgaacagtaaata

SEQ ID NO: 93047 - DNA, 15 bp, Homo sapiens
ctatgaacagtaaat

SEQ ID NO: 93048 - DNA, 15 bp, Homo sapiens
tctatgaacagtaaa

SEQ ID NO: 93049 - DNA, 15 bp, Homo sapiens
ttctatgaacagtaa

SEQ ID NO: 93050 - DNA, 15 bp, Homo sapiens
cttctatgaacagta

SEQ ID NO: 93051 - DNA, 15 bp, Homo sapiens
tcttctatgaacagt

SEQ ID NO: 93052 - DNA, 15 bp, Homo sapiens
ctcttctatgaacag

SEQ ID NO: 93053 - DNA, 15 bp, Homo sapiens
cctcttctatgaaca

SEQ ID NO: 93054 - DNA, 15 bp, Homo sapiens
ccctcttctatgaac

SEQ ID NO: 93055 - DNA, 15 bp, Homo sapiens
cccctcttctatgaa

SEQ ID NO: 93056 - DNA, 15 bp, Homo sapiens
gcccctcttctatga

SEQ ID NO: 93057 - DNA, 15 bp, Homo sapiens
agcccctcttctatg

SEQ ID NO: 93058 - DNA, 15 bp, Homo sapiens
aagcccctcttctat

SEQ ID NO: 93059 - DNA, 15 bp, Homo sapiens
aaagcccctcttcta

SEQ ID NO: 93060 - DNA, 15 bp, Homo sapiens
aaaagcccctcttct

SEQ ID NO: 93061 - DNA, 15 bp, Homo sapiens
aaaaagcccctcttc

SEQ ID NO: 93062 - DNA, 15 bp, Homo sapiens
caaaaagcccctctt

SEQ ID NO: 93063 - DNA, 15 bp, Homo sapiens
gcaaaaagcccctct

SEQ ID NO: 93064 - DNA, 15 bp, Homo sapiens
tgcaaaaagcccctc

SEQ ID NO: 93065 - DNA, 15 bp, Homo sapiens
ttgcaaaaagcccct

SEQ ID NO: 93066 - DNA, 15 bp, Homo sapiens
gttgcaaaaagcccc

SEQ ID NO: 93067 - DNA, 15 bp, Homo sapiens
agttgcaaaaagccc

SEQ ID NO: 93068 - DNA, 15 bp, Homo sapiens
aagttgcaaaaagcc

SEQ ID NO: 93069 - DNA, 15 bp, Homo sapiens
caagttgcaaaaagc

SEQ ID NO: 93070 - DNA, 15 bp, Homo sapiens
ccaagttgcaaaaag

SEQ ID NO: 93071 - DNA, 15 bp, Homo sapiens
cccaagttgcaaaaa

SEQ ID NO: 93072 - DNA, 15 bp, Homo sapiens
gcccaagttgcaaaa

SEQ ID NO: 93073 - DNA, 15 bp, Homo sapiens
agcccaagttgcaaa

SEQ ID NO: 93074 - DNA, 15 bp, Homo sapiens
tagcccaagttgcaa

SEQ ID NO: 93075 - DNA, 15 bp, Homo sapiens
gtagcccaagttgca

SEQ ID NO: 93076 - DNA, 15 bp, Homo sapiens
tgtagcccaagttgc

SEQ ID NO: 93077 - DNA, 15 bp, Homo sapiens
ttgtagcccaagttg

SEQ ID NO: 93078 - DNA, 15 bp, Homo sapiens
tttgtagcccaagtt

SEQ ID NO: 93079 - DNA, 15 bp, Homo sapiens
ctttgtagcccaagt

SEQ ID NO: 93080 - DNA, 15 bp, Homo sapiens
cctttgtagcccaag

SEQ ID NO: 93081 - DNA, 15 bp, Homo sapiens
tcctttgtagcccaa

SEQ ID NO: 93082 - DNA, 15 bp, Homo sapiens
ctcctttgtagccca

SEQ ID NO: 93083 - DNA, 15 bp, Homo sapiens
tctcctttgtagccc

SEQ ID NO: 93084 - DNA, 15 bp, Homo sapiens
atctcctttgtagcc

SEQ ID NO: 93085 - DNA, 15 bp, Homo sapiens
tatctcctttgtagc

SEQ ID NO: 93086 - DNA, 15 bp, Homo sapiens
atatctcctttgtag

SEQ ID NO: 93087 - DNA, 15 bp, Homo sapiens
catatctcctttgta

SEQ ID NO: 93088 - DNA, 15 bp, Homo sapiens
acatatctcctttgt

SEQ ID NO: 93089 - DNA, 15 bp, Homo sapiens
tacatatctcctttg

SEQ ID NO: 93090 - DNA, 15 bp, Homo sapiens
ttacatatctccttt

SEQ ID NO: 93091 - DNA, 15 bp, Homo sapiens
cttacatatctcctt

SEQ ID NO: 93092 - DNA, 15 bp, Homo sapiens
ccttacatatctcct

SEQ ID NO: 93093 - DNA, 15 bp, Homo sapiens
tccttacatatctcc

SEQ ID NO: 93094 - DNA, 15 bp, Homo sapiens
ttccttacatatctc

SEQ ID NO: 93095 - DNA, 15 bp, Homo sapiens
attccttacatatct

SEQ ID NO: 93096 - DNA, 15 bp, Homo sapiens
aattccttacatatc

SEQ ID NO: 93097 - DNA, 15 bp, Homo sapiens
aaattccttacatat

SEQ ID NO: 93098 - DNA, 15 bp, Homo sapiens
taaattccttacata

SEQ ID NO: 93099 - DNA, 15 bp, Homo sapiens
ttaaattccttacat

SEQ ID NO: 93100 - DNA, 15 bp, Homo sapiens
cttaaattccttaca

SEQ ID NO: 93101 - DNA, 15 bp, Homo sapiens
ccttaaattccttac

SEQ ID NO: 93102 - DNA, 15 bp, Homo sapiens
tccttaaattcctta

SEQ ID NO: 93103 - DNA, 15 bp, Homo sapiens
ttccttaaattcctt

SEQ ID NO: 93104 - DNA, 15 bp, Homo sapiens
attccttaaattcct

SEQ ID NO: 93105 - DNA, 15 bp, Homo sapiens
cattccttaaattcc

SEQ ID NO: 93106 - DNA, 15 bp, Homo sapiens
ccattccttaaattc

SEQ ID NO: 93107 - DNA, 15 bp, Homo sapiens
accattccttaaatt

SEQ ID NO: 93108 - DNA, 15 bp, Homo sapiens
aaccattccttaaat

SEQ ID NO: 93109 - DNA, 15 bp, Homo sapiens
taaccattccttaaa

SEQ ID NO: 93110 - DNA, 15 bp, Homo sapiens
gtaaccattccttaa

SEQ ID NO: 93111 - DNA, 15 bp, Homo sapiens
tgtaaccattcctta

SEQ ID NO: 93112 - DNA, 15 bp, Homo sapiens
atgtaaccattcctt

SEQ ID NO: 93113 - DNA, 15 bp, Homo sapiens
catgtaaccattcct

SEQ ID NO: 93114 - DNA, 15 bp, Homo sapiens
ccatgtaaccattcc

SEQ ID NO: 93115 - DNA, 15 bp, Homo sapiens
tccatgtaaccattc

SEQ ID NO: 93116 - DNA, 15 bp, Homo sapiens
ttccatgtaaccatt

SEQ ID NO: 93117 - DNA, 15 bp, Homo sapiens
gttccatgtaaccat

SEQ ID NO: 93118 - DNA, 15 bp, Homo sapiens
agttccatgtaacca

SEQ ID NO: 93119 - DNA, 15 bp, Homo sapiens
tagttccatgtaacc

SEQ ID NO: 93120 - DNA, 15 bp, Homo sapiens
ctagttccatgtaac

SEQ ID NO: 93121 - DNA, 15 bp, Homo sapiens
tctagttccatgtaa

SEQ ID NO: 93122 - DNA, 15 bp, Homo sapiens
atctagttccatgta

SEQ ID NO: 93123 - DNA, 15 bp, Homo sapiens
aatctagttccatgt

SEQ ID NO: 93124 - DNA, 15 bp, Homo sapiens
aaatctagttccatg

SEQ ID NO: 93125 - DNA, 15 bp, Homo sapiens
taaatctagttccat

SEQ ID NO: 93126 - DNA, 15 bp, Homo sapiens
ttaaatctagttcca

SEQ ID NO: 93127 - DNA, 15 bp, Homo sapiens
attaaatctagttcc

SEQ ID NO: 93128 - DNA, 15 bp, Homo sapiens
aattaaatctagttc

SEQ ID NO: 93129 - DNA, 15 bp, Homo sapiens
caattaaatctagtt

SEQ ID NO: 93130 - DNA, 15 bp, Homo sapiens
tcaattaaatctagt

SEQ ID NO: 93131 - DNA, 15 bp, Homo sapiens
ttcaattaaatctag

SEQ ID NO: 93132 - DNA, 15 bp, Homo sapiens
attcaattaaatcta

SEQ ID NO: 93133 - DNA, 15 bp, Homo sapiens
gattcaattaaatct

SEQ ID NO: 93134 - DNA, 15 bp, Homo sapiens
agattcaattaaatc

SEQ ID NO: 93135 - DNA, 15 bp, Homo sapiens
tagattcaattaaat

SEQ ID NO: 93136 - DNA, 15 bp, Homo sapiens
ctagattcaattaaa

SEQ ID NO: 93137 - DNA, 15 bp, Homo sapiens
actagattcaattaa

SEQ ID NO: 93138 - DNA, 15 bp, Homo sapiens
cactagattcaatta

SEQ ID NO: 93139 - DNA, 15 bp, Homo sapiens
ccactagattcaatt

SEQ ID NO: 93140 - DNA, 15 bp, Homo sapiens
accactagattcaat

SEQ ID NO: 93141 - DNA, 15 bp, Homo sapiens
aaccactagattcaa

SEQ ID NO: 93142 - DNA, 15 bp, Homo sapiens
aaaccactagattca

SEQ ID NO: 93143 - DNA, 15 bp, Homo sapiens
taaaccactagattc

SEQ ID NO: 93144 - DNA, 15 bp, Homo sapiens
ttaaaccactagatt

SEQ ID NO: 93145 - DNA, 15 bp, Homo sapiens
attaaaccactagat

SEQ ID NO: 93146 - DNA, 15 bp, Homo sapiens
aattaaaccactaga

SEQ ID NO: 93147 - DNA, 15 bp, Homo sapiens
caattaaaccactag

SEQ ID NO: 93148 - DNA, 15 bp, Homo sapiens
tcaattaaaccacta

SEQ ID NO: 93149 - DNA, 15 bp, Homo sapiens
atcaattaaaccact

SEQ ID NO: 93150 - DNA, 15 bp, Homo sapiens
aatcaattaaaccac

SEQ ID NO: 93151 - DNA, 15 bp, Homo sapiens
gaatcaattaaacca

SEQ ID NO: 93152 - DNA, 15 bp, Homo sapiens
tgaatcaattaaacc

SEQ ID NO: 93153 - DNA, 15 bp, Homo sapiens
gtgaatcaattaaac

SEQ ID NO: 93154 - DNA, 15 bp, Homo sapiens
agtgaatcaattaaa

SEQ ID NO: 93155 - DNA, 15 bp, Homo sapiens
tagtgaatcaattaa

SEQ ID NO: 93156 - DNA, 15 bp, Homo sapiens
ctagtgaatcaatta

SEQ ID NO: 93157 - DNA, 15 bp, Homo sapiens
cctagtgaatcaatt

SEQ ID NO: 93158 - DNA, 15 bp, Homo sapiens
tcctagtgaatcaat

SEQ ID NO: 93159 - DNA, 15 bp, Homo sapiens
atcctagtgaatcaa

SEQ ID NO: 93160 - DNA, 15 bp, Homo sapiens
tatcctagtgaatca

SEQ ID NO: 93161 - DNA, 15 bp, Homo sapiens
atatcctagtgaatc

SEQ ID NO: 93162 - DNA, 15 bp, Homo sapiens
tatatcctagtgaat

SEQ ID NO: 93163 - DNA, 15 bp, Homo sapiens
atatatcctagtgaa

SEQ ID NO: 93164 - DNA, 15 bp, Homo sapiens
catatatcctagtga

SEQ ID NO: 93165 - DNA, 15 bp, Homo sapiens
gcatatatcctagtg

SEQ ID NO: 93166 - DNA, 15 bp, Homo sapiens
agcatatatcctagt

SEQ ID NO: 93167 - DNA, 15 bp, Homo sapiens
tagcatatatcctag

SEQ ID NO: 93168 - DNA, 15 bp, Homo sapiens
gtagcatatatccta

SEQ ID NO: 93169 - DNA, 15 bp, Homo sapiens
agtagcatatatcct

SEQ ID NO: 93170 - DNA, 15 bp, Homo sapiens
cagtagcatatatcc

SEQ ID NO: 93171 - DNA, 15 bp, Homo sapiens
tcagtagcatatatc

SEQ ID NO: 93172 - DNA, 15 bp, Homo sapiens
ttcagtagcatatat

SEQ ID NO: 93173 - DNA, 15 bp, Homo sapiens
tttcagtagcatata

SEQ ID NO: 93174 - DNA, 15 bp, Homo sapiens
ctttcagtagcatat

SEQ ID NO: 93175 - DNA, 15 bp, Homo sapiens
cctttcagtagcata

SEQ ID NO: 93176 - DNA, 15 bp, Homo sapiens
ccctttcagtagcat

SEQ ID NO: 93177 - DNA, 15 bp, Homo sapiens
cccctttcagtagca

SEQ ID NO: 93178 - DNA, 15 bp, Homo sapiens
tcccctttcagtagc

SEQ ID NO: 93179 - DNA, 15 bp, Homo sapiens
ttcccctttcagtag

SEQ ID NO: 93180 - DNA, 15 bp, Homo sapiens
attcccctttcagta

SEQ ID NO: 93181 - DNA, 15 bp, Homo sapiens
gattcccctttcagt

SEQ ID NO: 93182 - DNA, 15 bp, Homo sapiens
agattcccctttcag

SEQ ID NO: 93183 - DNA, 15 bp, Homo sapiens
cagattcccctttca

SEQ ID NO: 93184 - DNA, 15 bp, Homo sapiens
gcagattcccctttc

SEQ ID NO: 93185 - DNA, 15 bp, Homo sapiens
agcagattccccttt

SEQ ID NO: 93186 - DNA, 15 bp, Homo sapiens
aagcagattcccctt

SEQ ID NO: 93187 - DNA, 15 bp, Homo sapiens
taagcagattcccct

SEQ ID NO: 93188 - DNA, 15 bp, Homo sapiens
ttaagcagattcccc

SEQ ID NO: 93189 - DNA, 15 bp, Homo sapiens
tttaagcagattccc

SEQ ID NO: 93190 - DNA, 15 bp, Homo sapiens
ctttaagcagattcc

SEQ ID NO: 93191 - DNA, 15 bp, Homo sapiens
actttaagcagattc

SEQ ID NO: 93192 - DNA, 15 bp, Homo sapiens
cactttaagcagatt

SEQ ID NO: 93193 - DNA, 15 bp, Homo sapiens
gcactttaagcagat

SEQ ID NO: 93194 - DNA, 15 bp, Homo sapiens
agcactttaagcaga

SEQ ID NO: 93195 - DNA, 15 bp, Homo sapiens
aagcactttaagcag

SEQ ID NO: 93196 - DNA, 15 bp, Homo sapiens
aaagcactttaagca

SEQ ID NO: 93197 - DNA, 15 bp, Homo sapiens
gaaagcactttaagc

SEQ ID NO: 93198 - DNA, 15 bp, Homo sapiens
agaaagcactttaag

SEQ ID NO: 93199 - DNA, 15 bp, Homo sapiens
cagaaagcactttaa

SEQ ID NO: 93200 - DNA, 15 bp, Homo sapiens
tcagaaagcacttta

SEQ ID NO: 93201 - DNA, 15 bp, Homo sapiens
atcagaaagcacttt

SEQ ID NO: 93202 - DNA, 15 bp, Homo sapiens
tatcagaaagcactt

SEQ ID NO: 93203 - DNA, 15 bp, Homo sapiens
atatcagaaagcact

SEQ ID NO: 93204 - DNA, 15 bp, Homo sapiens
aatatcagaaagcac

SEQ ID NO: 93205 - DNA, 15 bp, Homo sapiens
aaatatcagaaagca

SEQ ID NO: 93206 - DNA, 15 bp, Homo sapiens
taaatatcagaaagc

SEQ ID NO: 93207 - DNA, 15 bp, Homo sapiens
ataaatatcagaaag

SEQ ID NO: 93208 - DNA, 15 bp, Homo sapiens
aataaatatcagaaa

SEQ ID NO: 93209 - DNA, 15 bp, Homo sapiens
taataaatatcagaa

SEQ ID NO: 93210 - DNA, 15 bp, Homo sapiens
ataataaatatcaga

SEQ ID NO: 93211 - DNA, 15 bp, Homo sapiens
aataataaatatcag

SEQ ID NO: 93212 - DNA, 15 bp, Homo sapiens
taataataaatatca

SEQ ID NO: 93213 - DNA, 15 bp, Homo sapiens
gtaataataaatatc

SEQ ID NO: 93214 - DNA, 15 bp, Homo sapiens
agtaataataaatat

SEQ ID NO: 93215 - DNA, 15 bp, Homo sapiens
tagtaataataaata

SEQ ID NO: 93216 - DNA, 15 bp, Homo sapiens
ttagtaataataaat

SEQ ID NO: 93217 - DNA, 15 bp, Homo sapiens
tttagtaataataaa

SEQ ID NO: 93218 - DNA, 15 bp, Homo sapiens
ttttagtaataataa

SEQ ID NO: 93219 - DNA, 15 bp, Homo sapiens
gttttagtaataata

SEQ ID NO: 93220 - DNA, 15 bp, Homo sapiens
agttttagtaataat

SEQ ID NO: 93221 - DNA, 15 bp, Homo sapiens
aagttttagtaataa

SEQ ID NO: 93222 - DNA, 15 bp, Homo sapiens
taagttttagtaata

SEQ ID NO: 93223 - DNA, 15 bp, Homo sapiens
ctaagttttagtaat

SEQ ID NO: 93224 - DNA, 15 bp, Homo sapiens
tctaagttttagtaa

SEQ ID NO: 93225 - DNA, 15 bp, Homo sapiens
ttctaagttttagta

SEQ ID NO: 93226 - DNA, 15 bp, Homo sapiens
attctaagttttagt

SEQ ID NO: 93227 - DNA, 15 bp, Homo sapiens
aattctaagttttag

SEQ ID NO: 93228 - DNA, 15 bp, Homo sapiens
aaattctaagtttta

SEQ ID NO: 93229 - DNA, 15 bp, Homo sapiens
taaattctaagtttt

SEQ ID NO: 93230 - DNA, 15 bp, Homo sapiens
ataaattctaagttt

SEQ ID NO: 93231 - DNA, 15 bp, Homo sapiens
aataaattctaagtt

SEQ ID NO: 93232 - DNA, 15 bp, Homo sapiens
taataaattctaagt

SEQ ID NO: 93233 - DNA, 15 bp, Homo sapiens
ttaataaattctaag

SEQ ID NO: 93234 - DNA, 15 bp, Homo sapiens
tttaataaattctaa

SEQ ID NO: 93235 - DNA, 15 bp, Homo sapiens
ttttaataaattcta

SEQ ID NO: 93236 - DNA, 15 bp, Homo sapiens
tttttaataaattct

SEQ ID NO: 93237 - DNA, 15 bp, Homo sapiens
atttttaataaattc

SEQ ID NO: 93238 - DNA, 15 bp, Homo sapiens
tatttttaataaatt

SEQ ID NO: 93239 - DNA, 15 bp, Homo sapiens
gtatttttaataaat

SEQ ID NO: 93240 - DNA, 15 bp, Homo sapiens
agtatttttaataaa

SEQ ID NO: 93241 - DNA, 15 bp, Homo sapiens
cagtatttttaataa

SEQ ID NO: 93242 - DNA, 15 bp, Homo sapiens
tcagtatttttaata

SEQ ID NO: 93243 - DNA, 15 bp, Homo sapiens
gtcagtatttttaat

SEQ ID NO: 93244 - DNA, 15 bp, Homo sapiens
agtcagtatttttaa

SEQ ID NO: 93245 - DNA, 15 bp, Homo sapiens
cagtcagtattttta

SEQ ID NO: 93246 - DNA, 15 bp, Homo sapiens
acagtcagtattttt

SEQ ID NO: 93247 - DNA, 15 bp, Homo sapiens
cacagtcagtatttt

SEQ ID NO: 93248 - DNA, 15 bp, Homo sapiens
tcacagtcagtattt

SEQ ID NO: 93249 - DNA, 15 bp, Homo sapiens
ttcacagtcagtatt

SEQ ID NO: 93250 - DNA, 15 bp, Homo sapiens
tttcacagtcagtat

SEQ ID NO: 93251 - DNA, 15 bp, Homo sapiens
ttttcacagtcagta

SEQ ID NO: 93252 - DNA, 15 bp, Homo sapiens
attttcacagtcagt

SEQ ID NO: 93253 - DNA, 15 bp, Homo sapiens
aattttcacagtcag

SEQ ID NO: 93254 - DNA, 15 bp, Homo sapiens
taattttcacagtca

SEQ ID NO: 93255 - DNA, 15 bp, Homo sapiens
gtaattttcacagtc

SEQ ID NO: 93256 - DNA, 15 bp, Homo sapiens
agtaattttcacagt

SEQ ID NO: 93257 - DNA, 15 bp, Homo sapiens
aagtaattttcacag

SEQ ID NO: 93258 - DNA, 15 bp, Homo sapiens
caagtaattttcaca

SEQ ID NO: 93259 - DNA, 15 bp, Homo sapiens
ccaagtaattttcac

SEQ ID NO: 93260 - DNA, 15 bp, Homo sapiens
cccaagtaattttca

SEQ ID NO: 93261 - DNA, 15 bp, Homo sapiens
acccaagtaattttc

SEQ ID NO: 93262 - DNA, 15 bp, Homo sapiens
gacccaagtaatttt

SEQ ID NO: 93263 - DNA, 15 bp, Homo sapiens
cgacccaagtaattt

SEQ ID NO: 93264 - DNA, 15 bp, Homo sapiens
acgacccaagtaatt

SEQ ID NO: 93265 - DNA, 15 bp, Homo sapiens
aacgacccaagtaat

SEQ ID NO: 93266 - DNA, 15 bp, Homo sapiens
aaacgacccaagtaa

SEQ ID NO: 93267 - DNA, 15 bp, Homo sapiens
caaacgacccaagta

SEQ ID NO: 93268 - DNA, 15 bp, Homo sapiens
gcaaacgacccaagt

SEQ ID NO: 93269 - DNA, 15 bp, Homo sapiens
ggcaaacgacccaag

SEQ ID NO: 93270 - DNA, 15 bp, Homo sapiens
aggcaaacgacccaa

SEQ ID NO: 93271 - DNA, 15 bp, Homo sapiens
aaggcaaacgaccca

SEQ ID NO: 93272 - DNA, 15 bp, Homo sapiens
aaaggcaaacgaccc

SEQ ID NO: 93273 - DNA, 15 bp, Homo sapiens
aaaaggcaaacgacc

SEQ ID NO: 93274 - DNA, 15 bp, Homo sapiens
aaaaaggcaaacgac

SEQ ID NO: 93275 - DNA, 15 bp, Homo sapiens
taaaaaggcaaacga

SEQ ID NO: 93276 - DNA, 15 bp, Homo sapiens
ttaaaaaggcaaacg

SEQ ID NO: 93277 - DNA, 15 bp, Homo sapiens
tttaaaaaggcaaac

SEQ ID NO: 93278 - DNA, 15 bp, Homo sapiens
ttttaaaaaggcaaa

SEQ ID NO: 93279 - DNA, 15 bp, Homo sapiens
cttttaaaaaggcaa

SEQ ID NO: 93280 - DNA, 15 bp, Homo sapiens
ccttttaaaaaggca

SEQ ID NO: 93281 - DNA, 15 bp, Homo sapiens
tccttttaaaaaggc

SEQ ID NO: 93282 - DNA, 15 bp, Homo sapiens
atccttttaaaaagg

SEQ ID NO: 93283 - DNA, 15 bp, Homo sapiens
aatccttttaaaaag

SEQ ID NO: 93284 - DNA, 15 bp, Homo sapiens
aaatccttttaaaaa

SEQ ID NO: 93285 - DNA, 15 bp, Homo sapiens
aaaatccttttaaaa

SEQ ID NO: 93286 - DNA, 15 bp, Homo sapiens
aaaaatccttttaaa

SEQ ID NO: 93287 - DNA, 15 bp, Homo sapiens
caaaaatccttttaa

SEQ ID NO: 93288 - DNA, 15 bp, Homo sapiens
ccaaaaatcctttta

SEQ ID NO: 93289 - DNA, 15 bp, Homo sapiens
gccaaaaatcctttt

SEQ ID NO: 93290 - DNA, 15 bp, Homo sapiens
tgccaaaaatccttt

SEQ ID NO: 93291 - DNA, 15 bp, Homo sapiens
atgccaaaaatcctt

SEQ ID NO: 93292 - DNA, 15 bp, Homo sapiens
catgccaaaaatcct

SEQ ID NO: 93293 - DNA, 15 bp, Homo sapiens
acatgccaaaaatcc

SEQ ID NO: 93294 - DNA, 15 bp, Homo sapiens
gacatgccaaaaatc

SEQ ID NO: 93295 - DNA, 15 bp, Homo sapiens
agacatgccaaaaat

SEQ ID NO: 93296 - DNA, 15 bp, Homo sapiens
gagacatgccaaaaa

SEQ ID NO: 93297 - DNA, 15 bp, Homo sapiens
tgagacatgccaaaa

SEQ ID NO: 93298 - DNA, 15 bp, Homo sapiens
atgagacatgccaaa

SEQ ID NO: 93299 - DNA, 15 bp, Homo sapiens
aatgagacatgccaa

SEQ ID NO: 93300 - DNA, 15 bp, Homo sapiens
taatgagacatgcca

SEQ ID NO: 93301 - DNA, 15 bp, Homo sapiens
ttaatgagacatgcc

SEQ ID NO: 93302 - DNA, 15 bp, Homo sapiens
tttaatgagacatgc

SEQ ID NO: 93303 - DNA, 15 bp, Homo sapiens
ttttaatgagacatg

SEQ ID NO: 93304 - DNA, 15 bp, Homo sapiens
tttttaatgagacat

SEQ ID NO: 93305 - DNA, 15 bp, Homo sapiens
ttttttaatgagaca

SEQ ID NO: 93306 - DNA, 15 bp, Homo sapiens
tttttttaatgagac

SEQ ID NO: 93307 - DNA, 15 bp, Homo sapiens
ctttttttaatgaga

SEQ ID NO: 93308 - DNA, 15 bp, Homo sapiens
tctttttttaatgag

SEQ ID NO: 93309 - DNA, 15 bp, Homo sapiens
ttctttttttaatga

SEQ ID NO: 93310 - DNA, 15 bp, Homo sapiens
tttctttttttaatg

SEQ ID NO: 93311 - DNA, 15 bp, Homo sapiens
atttctttttttaat

SEQ ID NO: 93312 - DNA, 15 bp, Homo sapiens
tatttctttttttaa

SEQ ID NO: 93313 - DNA, 15 bp, Homo sapiens
gtatttcttttttta

SEQ ID NO: 93314 - DNA, 15 bp, Homo sapiens
agtatttcttttttt

SEQ ID NO: 93315 - DNA, 15 bp, Homo sapiens
tagtatttctttttt

SEQ ID NO: 93316 - DNA, 15 bp, Homo sapiens
ctagtatttcttttt

SEQ ID NO: 93317 - DNA, 15 bp, Homo sapiens
tctagtatttctttt

SEQ ID NO: 93318 - DNA, 15 bp, Homo sapiens
atctagtatttcttt

SEQ ID NO: 93319 - DNA, 15 bp, Homo sapiens
tatctagtatttctt

SEQ ID NO: 93320 - DNA, 15 bp, Homo sapiens
atatctagtatttct

SEQ ID NO: 93321 - DNA, 15 bp, Homo sapiens
gatatctagtatttc

SEQ ID NO: 93322 - DNA, 15 bp, Homo sapiens
agatatctagtattt

SEQ ID NO: 93323 - DNA, 15 bp, Homo sapiens
aagatatctagtatt

SEQ ID NO: 93324 - DNA, 15 bp, Homo sapiens
gaagatatctagtat

SEQ ID NO: 93325 - DNA, 15 bp, Homo sapiens
tgaagatatctagta

SEQ ID NO: 93326 - DNA, 15 bp, Homo sapiens
ctgaagatatctagt

SEQ ID NO: 93327 - DNA, 15 bp, Homo sapiens
actgaagatatctag

SEQ ID NO: 93328 - DNA, 15 bp, Homo sapiens
cactgaagatatcta

SEQ ID NO: 93329 - DNA, 15 bp, Homo sapiens
tcactgaagatatct

SEQ ID NO: 93330 - DNA, 15 bp, Homo sapiens
ttcactgaagatatc

SEQ ID NO: 93331 - DNA, 15 bp, Homo sapiens
cttcactgaagatat

SEQ ID NO: 93332 - DNA, 15 bp, Homo sapiens
acttcactgaagata

SEQ ID NO: 93333 - DNA, 15 bp, Homo sapiens
aacttcactgaagat

SEQ ID NO: 93334 - DNA, 15 bp, Homo sapiens
taacttcactgaaga

SEQ ID NO: 93335 - DNA, 15 bp, Homo sapiens
gtaacttcactgaag

SEQ ID NO: 93336 - DNA, 15 bp, Homo sapiens
tgtaacttcactgaa

SEQ ID NO: 93337 - DNA, 15 bp, Homo sapiens
ttgtaacttcactga

SEQ ID NO: 93338 - DNA, 15 bp, Homo sapiens
tttgtaacttcactg

SEQ ID NO: 93339 - DNA, 15 bp, Homo sapiens
atttgtaacttcact

SEQ ID NO: 93340 - DNA, 15 bp, Homo sapiens
gatttgtaacttcac

SEQ ID NO: 93341 - DNA, 15 bp, Homo sapiens
cgatttgtaacttca

SEQ ID NO: 93342 - DNA, 15 bp, Homo sapiens
tcgatttgtaacttc

SEQ ID NO: 93343 - DNA, 15 bp, Homo sapiens
ttcgatttgtaactt

SEQ ID NO: 93344 - DNA, 15 bp, Homo sapiens
attcgatttgtaact

SEQ ID NO: 93345 - DNA, 15 bp, Homo sapiens
tattcgatttgtaac

SEQ ID NO: 93346 - DNA, 15 bp, Homo sapiens
gtattcgatttgtaa

SEQ ID NO: 93347 - DNA, 15 bp, Homo sapiens
tgtattcgatttgta

SEQ ID NO: 93348 - DNA, 15 bp, Homo sapiens
gtgtattcgatttgt

SEQ ID NO: 93349 - DNA, 15 bp, Homo sapiens
tgtgtattcgatttg

SEQ ID NO: 93350 - DNA, 15 bp, Homo sapiens
atgtgtattcgattt

SEQ ID NO: 93351 - DNA, 15 bp, Homo sapiens
aatgtgtattcgatt

SEQ ID NO: 93352 - DNA, 15 bp, Homo sapiens
caatgtgtattcgat

SEQ ID NO: 93353 - DNA, 15 bp, Homo sapiens
ccaatgtgtattcga

SEQ ID NO: 93354 - DNA, 15 bp, Homo sapiens
gccaatgtgtattcg

SEQ ID NO: 93355 - DNA, 15 bp, Homo sapiens
agccaatgtgtattc

SEQ ID NO: 93356 - DNA, 15 bp, Homo sapiens
gagccaatgtgtatt

SEQ ID NO: 93357 - DNA, 15 bp, Homo sapiens
agagccaatgtgtat

SEQ ID NO: 93358 - DNA, 15 bp, Homo sapiens
cagagccaatgtgta

SEQ ID NO: 93359 - DNA, 15 bp, Homo sapiens
tcagagccaatgtgt

SEQ ID NO: 93360 - DNA, 15 bp, Homo sapiens
ttcagagccaatgtg

SEQ ID NO: 93361 - DNA, 15 bp, Homo sapiens
tttcagagccaatgt

SEQ ID NO: 93362 - DNA, 15 bp, Homo sapiens
atttcagagccaatg

SEQ ID NO: 93363 - DNA, 15 bp, Homo sapiens
aatttcagagccaat

SEQ ID NO: 93364 - DNA, 15 bp, Homo sapiens
gaatttcagagccaa

SEQ ID NO: 93365 - DNA, 15 bp, Homo sapiens
agaatttcagagcca

SEQ ID NO: 93366 - DNA, 15 bp, Homo sapiens
cagaatttcagagcc

SEQ ID NO: 93367 - DNA, 15 bp, Homo sapiens
tcagaatttcagagc

SEQ ID NO: 93368 - DNA, 15 bp, Homo sapiens
atcagaatttcagag

SEQ ID NO: 93369 - DNA, 15 bp, Homo sapiens
aatcagaatttcaga

SEQ ID NO: 93370 - DNA, 15 bp, Homo sapiens
caatcagaatttcag

SEQ ID NO: 93371 - DNA, 15 bp, Homo sapiens
tcaatcagaatttca

SEQ ID NO: 93372 - DNA, 15 bp, Homo sapiens
atcaatcagaatttc

SEQ ID NO: 93373 - DNA, 15 bp, Homo sapiens
tatcaatcagaattt

SEQ ID NO: 93374 - DNA, 15 bp, Homo sapiens
gtatcaatcagaatt

SEQ ID NO: 93375 - DNA, 15 bp, Homo sapiens
agtatcaatcagaat

SEQ ID NO: 93376 - DNA, 15 bp, Homo sapiens
cagtatcaatcagaa

SEQ ID NO: 93377 - DNA, 15 bp, Homo sapiens
ccagtatcaatcaga

SEQ ID NO: 93378 - DNA, 15 bp, Homo sapiens
cccagtatcaatcag

SEQ ID NO: 93379 - DNA, 15 bp, Homo sapiens
acccagtatcaatca

SEQ ID NO: 93380 - DNA, 15 bp, Homo sapiens
gacccagtatcaatc

SEQ ID NO: 93381 - DNA, 15 bp, Homo sapiens
tgacccagtatcaat

SEQ ID NO: 93382 - DNA, 15 bp, Homo sapiens
atgacccagtatcaa

SEQ ID NO: 93383 - DNA, 15 bp, Homo sapiens
tatgacccagtatca

SEQ ID NO: 93384 - DNA, 15 bp, Homo sapiens
ttatgacccagtatc

SEQ ID NO: 93385 - DNA, 15 bp, Homo sapiens
tttatgacccagtat

SEQ ID NO: 93386 - DNA, 15 bp, Homo sapiens
ttttatgacccagta

SEQ ID NO: 93387 - DNA, 15 bp, Homo sapiens
tttttatgacccagt

SEQ ID NO: 93388 - DNA, 15 bp, Homo sapiens
ctttttatgacccag

SEQ ID NO: 93389 - DNA, 15 bp, Homo sapiens
actttttatgaccca

SEQ ID NO: 93390 - DNA, 15 bp, Homo sapiens
aactttttatgaccc

SEQ ID NO: 93391 - DNA, 15 bp, Homo sapiens
aaactttttatgacc

SEQ ID NO: 93392 - DNA, 15 bp, Homo sapiens
aaaactttttatgac

SEQ ID NO: 93393 - DNA, 15 bp, Homo sapiens
gaaaactttttatga

SEQ ID NO: 93394 - DNA, 15 bp, Homo sapiens
ggaaaactttttatg

SEQ ID NO: 93395 - DNA, 15 bp, Homo sapiens
gggaaaactttttat

SEQ ID NO: 93396 - DNA, 15 bp, Homo sapiens
tgggaaaacttttta

SEQ ID NO: 93397 - DNA, 15 bp, Homo sapiens
ttgggaaaacttttt

SEQ ID NO: 93398 - DNA, 15 bp, Homo sapiens
tttgggaaaactttt

SEQ ID NO: 93399 - DNA, 15 bp, Homo sapiens
atttgggaaaacttt

SEQ ID NO: 93400 - DNA, 15 bp, Homo sapiens
gatttgggaaaactt

SEQ ID NO: 93401 - DNA, 15 bp, Homo sapiens
tgatttgggaaaact

SEQ ID NO: 93402 - DNA, 15 bp, Homo sapiens
ctgatttgggaaaac

SEQ ID NO: 93403 - DNA, 15 bp, Homo sapiens
tctgatttgggaaaa

SEQ ID NO: 93404 - DNA, 15 bp, Homo sapiens
gtctgatttgggaaa

SEQ ID NO: 93405 - DNA, 15 bp, Homo sapiens
agtctgatttgggaa

SEQ ID NO: 93406 - DNA, 15 bp, Homo sapiens
aagtctgatttggga

SEQ ID NO: 93407 - DNA, 15 bp, Homo sapiens
caagtctgatttggg

SEQ ID NO: 93408 - DNA, 15 bp, Homo sapiens
ccaagtctgatttgg

SEQ ID NO: 93409 - DNA, 15 bp, Homo sapiens
tccaagtctgatttg

SEQ ID NO: 93410 - DNA, 15 bp, Homo sapiens
ttccaagtctgattt

SEQ ID NO: 93411 - DNA, 15 bp, Homo sapiens
tttccaagtctgatt

SEQ ID NO: 93412 - DNA, 15 bp, Homo sapiens
ctttccaagtctgat

SEQ ID NO: 93413 - DNA, 15 bp, Homo sapiens
actttccaagtctga

SEQ ID NO: 93414 - DNA, 15 bp, Homo sapiens
cactttccaagtctg

SEQ ID NO: 93415 - DNA, 15 bp, Homo sapiens
tcactttccaagtct

SEQ ID NO: 93416 - DNA, 15 bp, Homo sapiens
atcactttccaagtc

SEQ ID NO: 93417 - DNA, 15 bp, Homo sapiens
gatcactttccaagt

SEQ ID NO: 93418 - DNA, 15 bp, Homo sapiens
tgatcactttccaag

SEQ ID NO: 93419 - DNA, 15 bp, Homo sapiens
gtgatcactttccaa

SEQ ID NO: 93420 - DNA, 15 bp, Homo sapiens
agtgatcactttcca

SEQ ID NO: 93421 - DNA, 15 bp, Homo sapiens
gagtgatcactttcc

SEQ ID NO: 93422 - DNA, 15 bp, Homo sapiens
agagtgatcactttc

SEQ ID NO: 93423 - DNA, 15 bp, Homo sapiens
gagagtgatcacttt

SEQ ID NO: 93424 - DNA, 15 bp, Homo sapiens
agagagtgatcactt

SEQ ID NO: 93425 - DNA, 15 bp, Homo sapiens
aagagagtgatcact

SEQ ID NO: 93426 - DNA, 15 bp, Homo sapiens
caagagagtgatcac

SEQ ID NO: 93427 - DNA, 15 bp, Homo sapiens
acaagagagtgatca

SEQ ID NO: 93428 - DNA, 15 bp, Homo sapiens
aacaagagagtgatc

SEQ ID NO: 93429 - DNA, 15 bp, Homo sapiens
taacaagagagtgat

SEQ ID NO: 93430 - DNA, 15 bp, Homo sapiens
gtaacaagagagtga

SEQ ID NO: 93431 - DNA, 15 bp, Homo sapiens
agtaacaagagagtg

SEQ ID NO: 93432 - DNA, 15 bp, Homo sapiens
gagtaacaagagagt

SEQ ID NO: 93433 - DNA, 15 bp, Homo sapiens
agagtaacaagagag

SEQ ID NO: 93434 - DNA, 15 bp, Homo sapiens
aagagtaacaagaga

SEQ ID NO: 93435 - DNA, 15 bp, Homo sapiens
aaagagtaacaagag

SEQ ID NO: 93436 - DNA, 15 bp, Homo sapiens
aaaagagtaacaaga

SEQ ID NO: 93437 - DNA, 15 bp, Homo sapiens
aaaaagagtaacaag

SEQ ID NO: 93438 - DNA, 15 bp, Homo sapiens
aaaaaagagtaacaa

SEQ ID NO: 93439 - DNA, 15 bp, Homo sapiens
gaaaaaagagtaaca

SEQ ID NO: 93440 - DNA, 15 bp, Homo sapiens
ggaaaaaagagtaac

SEQ ID NO: 93441 - DNA, 15 bp, Homo sapiens
aggaaaaaagagtaa

SEQ ID NO: 93442 - DNA, 15 bp, Homo sapiens
aaggaaaaaagagta

SEQ ID NO: 93443 - DNA, 15 bp, Homo sapiens
caaggaaaaaagagt

SEQ ID NO: 93444 - DNA, 15 bp, Homo sapiens
acaaggaaaaaagag

SEQ ID NO: 93445 - DNA, 15 bp, Homo sapiens
gacaaggaaaaaaga

SEQ ID NO: 93446 - DNA, 15 bp, Homo sapiens
tgacaaggaaaaaag

SEQ ID NO: 93447 - DNA, 15 bp, Homo sapiens
atgacaaggaaaaaa

SEQ ID NO: 93448 - DNA, 15 bp, Homo sapiens
catgacaaggaaaaa

SEQ ID NO: 93449 - DNA, 15 bp, Homo sapiens
ccatgacaaggaaaa

SEQ ID NO: 93450 - DNA, 15 bp, Homo sapiens
cccatgacaaggaaa

SEQ ID NO: 93451 - DNA, 15 bp, Homo sapiens
acccatgacaaggaa

SEQ ID NO: 93452 - DNA, 15 bp, Homo sapiens
cacccatgacaagga

SEQ ID NO: 93453 - DNA, 15 bp, Homo sapiens
tcacccatgacaagg

SEQ ID NO: 93454 - DNA, 15 bp, Homo sapiens
atcacccatgacaag

SEQ ID NO: 93455 - DNA, 15 bp, Homo sapiens
tatcacccatgacaa

SEQ ID NO: 93456 - DNA, 15 bp, Homo sapiens
ctatcacccatgaca

SEQ ID NO: 93457 - DNA, 15 bp, Homo sapiens
gctatcacccatgac

SEQ ID NO: 93458 - DNA, 15 bp, Homo sapiens
ggctatcacccatga

SEQ ID NO: 93459 - DNA, 15 bp, Homo sapiens
tggctatcacccatg

SEQ ID NO: 93460 - DNA, 15 bp, Homo sapiens
atggctatcacccat

SEQ ID NO: 93461 - DNA, 15 bp, Homo sapiens
aatggctatcaccca

SEQ ID NO: 93462 - DNA, 15 bp, Homo sapiens
aaatggctatcaccc

SEQ ID NO: 93463 - DNA, 15 bp, Homo sapiens
caaatggctatcacc

SEQ ID NO: 93464 - DNA, 15 bp, Homo sapiens
acaaatggctatcac

SEQ ID NO: 93465 - DNA, 15 bp, Homo sapiens
cacaaatggctatca

SEQ ID NO: 93466 - DNA, 15 bp, Homo sapiens
acacaaatggctatc

SEQ ID NO: 93467 - DNA, 15 bp, Homo sapiens
aacacaaatggctat

SEQ ID NO: 93468 - DNA, 15 bp, Homo sapiens
aaacacaaatggcta

SEQ ID NO: 93469 - DNA, 15 bp, Homo sapiens
taaacacaaatggct

SEQ ID NO: 93470 - DNA, 15 bp, Homo sapiens
ataaacacaaatggc

SEQ ID NO: 93471 - DNA, 15 bp, Homo sapiens
aataaacacaaatgg

SEQ ID NO: 93472 - DNA, 15 bp, Homo sapiens
caataaacacaaatg

SEQ ID NO: 93473 - DNA, 15 bp, Homo sapiens
ccaataaacacaaat

SEQ ID NO: 93474 - DNA, 15 bp, Homo sapiens
tccaataaacacaaa

SEQ ID NO: 93475 - DNA, 15 bp, Homo sapiens
ttccaataaacacaa

SEQ ID NO: 93476 - DNA, 15 bp, Homo sapiens
cttccaataaacaca

SEQ ID NO: 93477 - DNA, 15 bp, Homo sapiens
tcttccaataaacac

SEQ ID NO: 93478 - DNA, 15 bp, Homo sapiens
atcttccaataaaca

SEQ ID NO: 93479 - DNA, 15 bp, Homo sapiens
gatcttccaataaac

SEQ ID NO: 93480 - DNA, 15 bp, Homo sapiens
cgatcttccaataaa

SEQ ID NO: 93481 - DNA, 15 bp, Homo sapiens
ccgatcttccaataa

SEQ ID NO: 93482 - DNA, 15 bp, Homo sapiens
accgatcttccaata

SEQ ID NO: 93483 - DNA, 15 bp, Homo sapiens
caccgatcttccaat

SEQ ID NO: 93484 - DNA, 15 bp, Homo sapiens
tcaccgatcttccaa

SEQ ID NO: 93485 - DNA, 15 bp, Homo sapiens
ttcaccgatcttcca

SEQ ID NO: 93486 - DNA, 15 bp, Homo sapiens
attcaccgatcttcc

SEQ ID NO: 93487 - DNA, 15 bp, Homo sapiens
aattcaccgatcttc

SEQ ID NO: 93488 - DNA, 15 bp, Homo sapiens
aaattcaccgatctt

SEQ ID NO: 93489 - DNA, 15 bp, Homo sapiens
aaaattcaccgatct

SEQ ID NO: 93490 - DNA, 15 bp, Homo sapiens
taaaattcaccgatc

SEQ ID NO: 93491 - DNA, 15 bp, Homo sapiens
ttaaaattcaccgat

SEQ ID NO: 93492 - DNA, 15 bp, Homo sapiens
cttaaaattcaccga

SEQ ID NO: 93493 - DNA, 15 bp, Homo sapiens
ccttaaaattcaccg

SEQ ID NO: 93494 - DNA, 15 bp, Homo sapiens
tccttaaaattcacc

SEQ ID NO: 93495 - DNA, 15 bp, Homo sapiens
ttccttaaaattcac

SEQ ID NO: 93496 - DNA, 15 bp, Homo sapiens
gttccttaaaattca

SEQ ID NO: 93497 - DNA, 15 bp, Homo sapiens
tgttccttaaaattc

SEQ ID NO: 93498 - DNA, 15 bp, Homo sapiens
atgttccttaaaatt

SEQ ID NO: 93499 - DNA, 15 bp, Homo sapiens
tatgttccttaaaat

SEQ ID NO: 93500 - DNA, 15 bp, Homo sapiens
ctatgttccttaaaa

SEQ ID NO: 93501 - DNA, 15 bp, Homo sapiens
cctatgttccttaaa

SEQ ID NO: 93502 - DNA, 15 bp, Homo sapiens
gcctatgttccttaa

SEQ ID NO: 93503 - DNA, 15 bp, Homo sapiens
ggcctatgttcctta

SEQ ID NO: 93504 - DNA, 15 bp, Homo sapiens
gggcctatgttcctt

SEQ ID NO: 93505 - DNA, 15 bp, Homo sapiens
tgggcctatgttcct

SEQ ID NO: 93506 - DNA, 15 bp, Homo sapiens
ttgggcctatgttcc

SEQ ID NO: 93507 - DNA, 15 bp, Homo sapiens
tttgggcctatgttc

SEQ ID NO: 93508 - DNA, 15 bp, Homo sapiens
atttgggcctatgtt

SEQ ID NO: 93509 - DNA, 15 bp, Homo sapiens
aatttgggcctatgt

SEQ ID NO: 93510 - DNA, 15 bp, Homo sapiens
aaatttgggcctatg

SEQ ID NO: 93511 - DNA, 15 bp, Homo sapiens
caaatttgggcctat

SEQ ID NO: 93512 - DNA, 15 bp, Homo sapiens
tcaaatttgggccta

SEQ ID NO: 93513 - DNA, 15 bp, Homo sapiens
ctcaaatttgggcct

SEQ ID NO: 93514 - DNA, 15 bp, Homo sapiens
cctcaaatttgggcc

SEQ ID NO: 93515 - DNA, 15 bp, Homo sapiens
tcctcaaatttgggc

SEQ ID NO: 93516 - DNA, 15 bp, Homo sapiens
ttcctcaaatttggg

SEQ ID NO: 93517 - DNA, 15 bp, Homo sapiens
cttcctcaaatttgg

SEQ ID NO: 93518 - DNA, 15 bp, Homo sapiens
ccttcctcaaatttg

SEQ ID NO: 93519 - DNA, 15 bp, Homo sapiens
cccttcctcaaattt

SEQ ID NO: 93520 - DNA, 15 bp, Homo sapiens
gcccttcctcaaatt

SEQ ID NO: 93521 - DNA, 15 bp, Homo sapiens
ggcccttcctcaaat

SEQ ID NO: 93522 - DNA, 15 bp, Homo sapiens
tggcccttcctcaaa

SEQ ID NO: 93523 - DNA, 15 bp, Homo sapiens
atggcccttcctcaa

SEQ ID NO: 93524 - DNA, 15 bp, Homo sapiens
catggcccttcctca

SEQ ID NO: 93525 - DNA, 15 bp, Homo sapiens
ccatggcccttcctc

SEQ ID NO: 93526 - DNA, 15 bp, Homo sapiens
accatggcccttcct

SEQ ID NO: 93527 - DNA, 15 bp, Homo sapiens
aaccatggcccttcc

SEQ ID NO: 93528 - DNA, 15 bp, Homo sapiens
aaaccatggcccttc

SEQ ID NO: 93529 - DNA, 15 bp, Homo sapiens
aaaaccatggccctt

SEQ ID NO: 93530 - DNA, 15 bp, Homo sapiens
aaaaaccatggccct

SEQ ID NO: 93531 - DNA, 15 bp, Homo sapiens
caaaaaccatggccc

SEQ ID NO: 93532 - DNA, 15 bp, Homo sapiens
tcaaaaaccatggcc

SEQ ID NO: 93533 - DNA, 15 bp, Homo sapiens
atcaaaaaccatggc

SEQ ID NO: 93534 - DNA, 15 bp, Homo sapiens
gatcaaaaaccatgg

SEQ ID NO: 93535 - DNA, 15 bp, Homo sapiens
ggatcaaaaaccatg

SEQ ID NO: 93536 - DNA, 15 bp, Homo sapiens
gggatcaaaaaccat

SEQ ID NO: 93537 - DNA, 15 bp, Homo sapiens
agggatcaaaaacca

SEQ ID NO: 93538 - DNA, 15 bp, Homo sapiens
gagggatcaaaaacc

SEQ ID NO: 93539 - DNA, 15 bp, Homo sapiens
ggagggatcaaaaac

SEQ ID NO: 93540 - DNA, 15 bp, Homo sapiens
tggagggatcaaaaa

SEQ ID NO: 93541 - DNA, 15 bp, Homo sapiens
atggagggatcaaaa

SEQ ID NO: 93542 - DNA, 15 bp, Homo sapiens
aatggagggatcaaa

SEQ ID NO: 93543 - DNA, 15 bp, Homo sapiens
gaatggagggatcaa

SEQ ID NO: 93544 - DNA, 15 bp, Homo sapiens
agaatggagggatca

SEQ ID NO: 93545 - DNA, 15 bp, Homo sapiens
cagaatggagggatc

SEQ ID NO: 93546 - DNA, 15 bp, Homo sapiens
tcagaatggagggat

SEQ ID NO: 93547 - DNA, 15 bp, Homo sapiens
gtcagaatggaggga

SEQ ID NO: 93548 - DNA, 15 bp, Homo sapiens
ggtcagaatggaggg

SEQ ID NO: 93549 - DNA, 15 bp, Homo sapiens
cggtcagaatggagg

SEQ ID NO: 93550 - DNA, 15 bp, Homo sapiens
ccggtcagaatggag

SEQ ID NO: 93551 - DNA, 15 bp, Homo sapiens
tccggtcagaatgga

SEQ ID NO: 93552 - DNA, 15 bp, Homo sapiens
atccggtcagaatgg

SEQ ID NO: 93553 - DNA, 15 bp, Homo sapiens
gatccggtcagaatg

SEQ ID NO: 93554 - DNA, 15 bp, Homo sapiens
agatccggtcagaat

SEQ ID NO: 93555 - DNA, 15 bp, Homo sapiens
gagatccggtcagaa

SEQ ID NO: 93556 - DNA, 15 bp, Homo sapiens
agagatccggtcaga

SEQ ID NO: 93557 - DNA, 15 bp, Homo sapiens
cagagatccggtcag

SEQ ID NO: 93558 - DNA, 15 bp, Homo sapiens
gcagagatccggtca

SEQ ID NO: 93559 - DNA, 15 bp, Homo sapiens
tgcagagatccggtc

SEQ ID NO: 93560 - DNA, 15 bp, Homo sapiens
atgcagagatccggt

SEQ ID NO: 93561 - DNA, 15 bp, Homo sapiens
aatgcagagatccgg

SEQ ID NO: 93562 - DNA, 15 bp, Homo sapiens
caatgcagagatccg

SEQ ID NO: 93563 - DNA, 15 bp, Homo sapiens
acaatgcagagatcc

SEQ ID NO: 93564 - DNA, 15 bp, Homo sapiens
cacaatgcagagatc

SEQ ID NO: 93565 - DNA, 15 bp, Homo sapiens
acacaatgcagagat

SEQ ID NO: 93566 - DNA, 15 bp, Homo sapiens
gacacaatgcagaga

SEQ ID NO: 93567 - DNA, 15 bp, Homo sapiens
agacacaatgcagag

SEQ ID NO: 93568 - DNA, 15 bp, Homo sapiens
tagacacaatgcaga

SEQ ID NO: 93569 - DNA, 15 bp, Homo sapiens
gtagacacaatgcag

SEQ ID NO: 93570 - DNA, 15 bp, Homo sapiens
agtagacacaatgca

SEQ ID NO: 93571 - DNA, 15 bp, Homo sapiens
tagtagacacaatgc

SEQ ID NO: 93572 - DNA, 15 bp, Homo sapiens
ctagtagacacaatg

SEQ ID NO: 93573 - DNA, 15 bp, Homo sapiens
cctagtagacacaat

SEQ ID NO: 93574 - DNA, 15 bp, Homo sapiens
ccctagtagacacaa

SEQ ID NO: 93575 - DNA, 15 bp, Homo sapiens
cccctagtagacaca

SEQ ID NO: 93576 - DNA, 15 bp, Homo sapiens
tcccctagtagacac

SEQ ID NO: 93577 - DNA, 15 bp, Homo sapiens
ctcccctagtagaca

SEQ ID NO: 93578 - DNA, 15 bp, Homo sapiens
tctcccctagtagac

SEQ ID NO: 93579 - DNA, 15 bp, Homo sapiens
ttctcccctagtaga

SEQ ID NO: 93580 - DNA, 15 bp, Homo sapiens
attctcccctagtag

SEQ ID NO: 93581 - DNA, 15 bp, Homo sapiens
gattctcccctagta

SEQ ID NO: 93582 - DNA, 15 bp, Homo sapiens
cgattctcccctagt

SEQ ID NO: 93583 - DNA, 15 bp, Homo sapiens
gcgattctcccctag

SEQ ID NO: 93584 - DNA, 15 bp, Homo sapiens
agcgattctccccta

SEQ ID NO: 93585 - DNA, 15 bp, Homo sapiens
aagcgattctcccct

SEQ ID NO: 93586 - DNA, 15 bp, Homo sapiens
aaagcgattctcccc

SEQ ID NO: 93587 - DNA, 15 bp, Homo sapiens
caaagcgattctccc

SEQ ID NO: 93588 - DNA, 15 bp, Homo sapiens
acaaagcgattctcc

SEQ ID NO: 93589 - DNA, 15 bp, Homo sapiens
cacaaagcgattctc

SEQ ID NO: 93590 - DNA, 15 bp, Homo sapiens
acacaaagcgattct

SEQ ID NO: 93591 - DNA, 15 bp, Homo sapiens
gacacaaagcgattc

SEQ ID NO: 93592 - DNA, 15 bp, Homo sapiens
tgacacaaagcgatt

SEQ ID NO: 93593 - DNA, 15 bp, Homo sapiens
gtgacacaaagcgat

SEQ ID NO: 93594 - DNA, 15 bp, Homo sapiens
ggtgacacaaagcga

SEQ ID NO: 93595 - DNA, 15 bp, Homo sapiens
tggtgacacaaagcg

SEQ ID NO: 93596 - DNA, 15 bp, Homo sapiens
atggtgacacaaagc

SEQ ID NO: 93597 - DNA, 15 bp, Homo sapiens
aatggtgacacaaag

SEQ ID NO: 93598 - DNA, 15 bp, Homo sapiens
taatggtgacacaaa

SEQ ID NO: 93599 - DNA, 15 bp, Homo sapiens
ataatggtgacacaa

SEQ ID NO: 93600 - DNA, 15 bp, Homo sapiens
gataatggtgacaca

SEQ ID NO: 93601 - DNA, 15 bp, Homo sapiens
agataatggtgacac

SEQ ID NO: 93602 - DNA, 15 bp, Homo sapiens
aagataatggtgaca

SEQ ID NO: 93603 - DNA, 15 bp, Homo sapiens
caagataatggtgac

SEQ ID NO: 93604 - DNA, 15 bp, Homo sapiens
ccaagataatggtga

SEQ ID NO: 93605 - DNA, 15 bp, Homo sapiens
cccaagataatggtg

SEQ ID NO: 93606 - DNA, 15 bp, Homo sapiens
tcccaagataatggt

SEQ ID NO: 93607 - DNA, 15 bp, Homo sapiens
gtcccaagataatgg

SEQ ID NO: 93608 - DNA, 15 bp, Homo sapiens
agtcccaagataatg

SEQ ID NO: 93609 - DNA, 15 bp, Homo sapiens
aagtcccaagataat

SEQ ID NO: 93610 - DNA, 15 bp, Homo sapiens
caagtcccaagataa

SEQ ID NO: 93611 - DNA, 15 bp, Homo sapiens
ccaagtcccaagata

SEQ ID NO: 93612 - DNA, 15 bp, Homo sapiens
accaagtcccaagat

SEQ ID NO: 93613 - DNA, 15 bp, Homo sapiens
caccaagtcccaaga

SEQ ID NO: 93614 - DNA, 15 bp, Homo sapiens
ccaccaagtcccaag

SEQ ID NO: 93615 - DNA, 15 bp, Homo sapiens
cccaccaagtcccaa

SEQ ID NO: 93616 - DNA, 15 bp, Homo sapiens
tcccaccaagtccca

SEQ ID NO: 93617 - DNA, 15 bp, Homo sapiens
gtcccaccaagtccc

SEQ ID NO: 93618 - DNA, 15 bp, Homo sapiens
cgtcccaccaagtcc

SEQ ID NO: 93619 - DNA, 15 bp, Homo sapiens
tcgtcccaccaagtc

SEQ ID NO: 93620 - DNA, 15 bp, Homo sapiens
ttcgtcccaccaagt

SEQ ID NO: 93621 - DNA, 15 bp, Homo sapiens
tttcgtcccaccaag

SEQ ID NO: 93622 - DNA, 15 bp, Homo sapiens
gtttcgtcccaccaa

SEQ ID NO: 93623 - DNA, 15 bp, Homo sapiens
ggtttcgtcccacca

SEQ ID NO: 93624 - DNA, 15 bp, Homo sapiens
aggtttcgtcccacc

SEQ ID NO: 93625 - DNA, 15 bp, Homo sapiens
gaggtttcgtcccac

SEQ ID NO: 93626 - DNA, 15 bp, Homo sapiens
agaggtttcgtccca

SEQ ID NO: 93627 - DNA, 15 bp, Homo sapiens
aagaggtttcgtccc

SEQ ID NO: 93628 - DNA, 15 bp, Homo sapiens
gaagaggtttcgtcc

SEQ ID NO: 93629 - DNA, 15 bp, Homo sapiens
cgaagaggtttcgtc

SEQ ID NO: 93630 - DNA, 15 bp, Homo sapiens
gcgaagaggtttcgt

SEQ ID NO: 93631 - DNA, 15 bp, Homo sapiens
ggcgaagaggtttcg

SEQ ID NO: 93632 - DNA, 15 bp, Homo sapiens
tggcgaagaggtttc

SEQ ID NO: 93633 - DNA, 15 bp, Homo sapiens
atggcgaagaggttt

SEQ ID NO: 93634 - DNA, 15 bp, Homo sapiens
catggcgaagaggtt

SEQ ID NO: 93635 - DNA, 15 bp, Homo sapiens
ccatggcgaagaggt

SEQ ID NO: 93636 - DNA, 15 bp, Homo sapiens
gccatggcgaagagg

SEQ ID NO: 93637 - DNA, 15 bp, Homo sapiens
ggccatggcgaagag

SEQ ID NO: 93638 - DNA, 15 bp, Homo sapiens
cggccatggcgaaga

SEQ ID NO: 93639 - DNA, 15 bp, Homo sapiens
acggccatggcgaag

SEQ ID NO: 93640 - DNA, 15 bp, Homo sapiens
cacggccatggcgaa

SEQ ID NO: 93641 - DNA, 15 bp, Homo sapiens
ccacggccatggcga

SEQ ID NO: 93642 - DNA, 15 bp, Homo sapiens
tccacggccatggcg

SEQ ID NO: 93643 - DNA, 15 bp, Homo sapiens
ttccacggccatggc

SEQ ID NO: 93644 - DNA, 15 bp, Homo sapiens
cttccacggccatgg

SEQ ID NO: 93645 - DNA, 15 bp, Homo sapiens
ccttccacggccatg

SEQ ID NO: 93646 - DNA, 15 bp, Homo sapiens
cccttccacggccat

SEQ ID NO: 93647 - DNA, 15 bp, Homo sapiens
ccccttccacggcca

SEQ ID NO: 93648 - DNA, 15 bp, Homo sapiens
accccttccacggcc

SEQ ID NO: 93649 - DNA, 15 bp, Homo sapiens
caccccttccacggc

SEQ ID NO: 93650 - DNA, 15 bp, Homo sapiens
ccaccccttccacgg

SEQ ID NO: 93651 - DNA, 15 bp, Homo sapiens
accaccccttccacg

SEQ ID NO: 93652 - DNA, 15 bp, Homo sapiens
caccaccccttccac

SEQ ID NO: 93653 - DNA, 15 bp, Homo sapiens
acaccaccccttcca

SEQ ID NO: 93654 - DNA, 15 bp, Homo sapiens
aacaccaccccttcc

SEQ ID NO: 93655 - DNA, 15 bp, Homo sapiens
gaacaccaccccttc

SEQ ID NO: 93656 - DNA, 15 bp, Homo sapiens
agaacaccacccctt

SEQ ID NO: 93657 - DNA, 15 bp, Homo sapiens
aagaacaccacccct

SEQ ID NO: 93658 - DNA, 15 bp, Homo sapiens
gaagaacaccacccc

SEQ ID NO: 93659 - DNA, 15 bp, Homo sapiens
ggaagaacaccaccc

SEQ ID NO: 93660 - DNA, 15 bp, Homo sapiens
aggaagaacaccacc

SEQ ID NO: 93661 - DNA, 15 bp, Homo sapiens
gaggaagaacaccac

SEQ ID NO: 93662 - DNA, 15 bp, Homo sapiens
tgaggaagaacacca

SEQ ID NO: 93663 - DNA, 15 bp, Homo sapiens
atgaggaagaacacc

SEQ ID NO: 93664 - DNA, 15 bp, Homo sapiens
aatgaggaagaacac

SEQ ID NO: 93665 - DNA, 15 bp, Homo sapiens
taatgaggaagaaca

SEQ ID NO: 93666 - DNA, 15 bp, Homo sapiens
gtaatgaggaagaac

SEQ ID NO: 93667 - DNA, 15 bp, Homo sapiens
agtaatgaggaagaa

SEQ ID NO: 93668 - DNA, 15 bp, Homo sapiens
cagtaatgaggaaga

SEQ ID NO: 93669 - DNA, 15 bp, Homo sapiens
acagtaatgaggaag

SEQ ID NO: 93670 - DNA, 15 bp, Homo sapiens
aacagtaatgaggaa

SEQ ID NO: 93671 - DNA, 15 bp, Homo sapiens
gaacagtaatgagga

SEQ ID NO: 93672 - DNA, 15 bp, Homo sapiens
agaacagtaatgagg

SEQ ID NO: 93673 - DNA, 15 bp, Homo sapiens
cagaacagtaatgag

SEQ ID NO: 93674 - DNA, 15 bp, Homo sapiens
tcagaacagtaatga

SEQ ID NO: 93675 - DNA, 15 bp, Homo sapiens
atcagaacagtaatg

SEQ ID NO: 93676 - DNA, 15 bp, Homo sapiens
gatcagaacagtaat

SEQ ID NO: 93677 - DNA, 15 bp, Homo sapiens
ggatcagaacagtaa

SEQ ID NO: 93678 - DNA, 15 bp, Homo sapiens
tggatcagaacagta

SEQ ID NO: 93679 - DNA, 15 bp, Homo sapiens
ctggatcagaacagt

SEQ ID NO: 93680 - DNA, 15 bp, Homo sapiens
actggatcagaacag

SEQ ID NO: 93681 - DNA, 15 bp, Homo sapiens
tactggatcagaaca

SEQ ID NO: 93682 - DNA, 15 bp, Homo sapiens
gtactggatcagaac

SEQ ID NO: 93683 - DNA, 15 bp, Homo sapiens
tgtactggatcagaa

SEQ ID NO: 93684 - DNA, 15 bp, Homo sapiens
ctgtactggatcaga

SEQ ID NO: 93685 - DNA, 15 bp, Homo sapiens
tctgtactggatcag

SEQ ID NO: 93686 - DNA, 15 bp, Homo sapiens
atctgtactggatca

SEQ ID NO: 93687 - DNA, 15 bp, Homo sapiens
aatctgtactggatc

SEQ ID NO: 93688 - DNA, 15 bp, Homo sapiens
gaatctgtactggat

SEQ ID NO: 93689 - DNA, 15 bp, Homo sapiens
agaatctgtactgga

SEQ ID NO: 93690 - DNA, 15 bp, Homo sapiens
aagaatctgtactgg

SEQ ID NO: 93691 - DNA, 15 bp, Homo sapiens
gaagaatctgtactg

SEQ ID NO: 93692 - DNA, 15 bp, Homo sapiens
tgaagaatctgtact

SEQ ID NO: 93693 - DNA, 15 bp, Homo sapiens
atgaagaatctgtac

SEQ ID NO: 93694 - DNA, 15 bp, Homo sapiens
gatgaagaatctgta

SEQ ID NO: 93695 - DNA, 15 bp, Homo sapiens
tgatgaagaatctgt

SEQ ID NO: 93696 - DNA, 15 bp, Homo sapiens
ctgatgaagaatctg

SEQ ID NO: 93697 - DNA, 15 bp, Homo sapiens
cctgatgaagaatct

SEQ ID NO: 93698 - DNA, 15 bp, Homo sapiens
gcctgatgaagaatc

SEQ ID NO: 93699 - DNA, 15 bp, Homo sapiens
ggcctgatgaagaat

SEQ ID NO: 93700 - DNA, 15 bp, Homo sapiens
gggcctgatgaagaa

SEQ ID NO: 93701 - DNA, 15 bp, Homo sapiens
tgggcctgatgaaga

SEQ ID NO: 93702 - DNA, 15 bp, Homo sapiens
ctgggcctgatgaag

SEQ ID NO: 93703 - DNA, 15 bp, Homo sapiens
cctgggcctgatgaa

SEQ ID NO: 93704 - DNA, 15 bp, Homo sapiens
acctgggcctgatga

SEQ ID NO: 93705 - DNA, 15 bp, Homo sapiens
cacctgggcctgatg

SEQ ID NO: 93706 - DNA, 15 bp, Homo sapiens
tcacctgggcctgat

SEQ ID NO: 93707 - DNA, 15 bp, Homo sapiens
ctcacctgggcctga

SEQ ID NO: 93708 - DNA, 15 bp, Homo sapiens
gctcacctgggcctg

SEQ ID NO: 93709 - DNA, 15 bp, Homo sapiens
agctcacctgggcct

SEQ ID NO: 93710 - DNA, 15 bp, Homo sapiens
aagctcacctgggcc

SEQ ID NO: 93711 - DNA, 15 bp, Homo sapiens
aaagctcacctgggc

SEQ ID NO: 93712 - DNA, 15 bp, Homo sapiens
aaaagctcacctggg

SEQ ID NO: 93713 - DNA, 15 bp, Homo sapiens
aaaaagctcacctgg

SEQ ID NO: 93714 - DNA, 15 bp, Homo sapiens
gaaaaagctcacctg

SEQ ID NO: 93715 - DNA, 15 bp, Homo sapiens
agaaaaagctcacct

SEQ ID NO: 93716 - DNA, 15 bp, Homo sapiens
aagaaaaagctcacc

SEQ ID NO: 93717 - DNA, 15 bp, Homo sapiens
taagaaaaagctcac

SEQ ID NO: 93718 - DNA, 15 bp, Homo sapiens
ctaagaaaaagctca

SEQ ID NO: 93719 - DNA, 15 bp, Homo sapiens
tctaagaaaaagctc

SEQ ID NO: 93720 - DNA, 15 bp, Homo sapiens
ttctaagaaaaagct

SEQ ID NO: 93721 - DNA, 15 bp, Homo sapiens
gttctaagaaaaagc

SEQ ID NO: 93722 - DNA, 15 bp, Homo sapiens
ggttctaagaaaaag

SEQ ID NO: 93723 - DNA, 15 bp, Homo sapiens
gggttctaagaaaaa

SEQ ID NO: 93724 - DNA, 15 bp, Homo sapiens
cgggttctaagaaaa

SEQ ID NO: 93725 - DNA, 15 bp, Homo sapiens
acgggttctaagaaa

SEQ ID NO: 93726 - DNA, 15 bp, Homo sapiens
cacgggttctaagaa

SEQ ID NO: 93727 - DNA, 15 bp, Homo sapiens
ccacgggttctaaga

SEQ ID NO: 93728 - DNA, 15 bp, Homo sapiens
tccacgggttctaag

SEQ ID NO: 93729 - DNA, 15 bp, Homo sapiens
ctccacgggttctaa

SEQ ID NO: 93730 - DNA, 15 bp, Homo sapiens
gctccacgggttcta

SEQ ID NO: 93731 - DNA, 15 bp, Homo sapiens
tgctccacgggttct

SEQ ID NO: 93732 - DNA, 15 bp, Homo sapiens
gtgctccacgggttc

SEQ ID NO: 93733 - DNA, 15 bp, Homo sapiens
ggtgctccacgggtt

SEQ ID NO: 93734 - DNA, 15 bp, Homo sapiens
aggtgctccacgggt

SEQ ID NO: 93735 - DNA, 15 bp, Homo sapiens
caggtgctccacggg

SEQ ID NO: 93736 - DNA, 15 bp, Homo sapiens
ccaggtgctccacgg

SEQ ID NO: 93737 - DNA, 15 bp, Homo sapiens
accaggtgctccacg

SEQ ID NO: 93738 - DNA, 15 bp, Homo sapiens
aaccaggtgctccac

SEQ ID NO: 93739 - DNA, 15 bp, Homo sapiens
caaccaggtgctcca

SEQ ID NO: 93740 - DNA, 15 bp, Homo sapiens
tcaaccaggtgctcc

SEQ ID NO: 93741 - DNA, 15 bp, Homo sapiens
ctcaaccaggtgctc

SEQ ID NO: 93742 - DNA, 15 bp, Homo sapiens
cctcaaccaggtgct

SEQ ID NO: 93743 - DNA, 15 bp, Homo sapiens
ccctcaaccaggtgc

SEQ ID NO: 93744 - DNA, 15 bp, Homo sapiens
accctcaaccaggtg

SEQ ID NO: 93745 - DNA, 15 bp, Homo sapiens
gaccctcaaccaggt

SEQ ID NO: 93746 - DNA, 15 bp, Homo sapiens
tgaccctcaaccagg

SEQ ID NO: 93747 - DNA, 15 bp, Homo sapiens
gtgaccctcaaccag

SEQ ID NO: 93748 - DNA, 15 bp, Homo sapiens
tgtgaccctcaacca

SEQ ID NO: 93749 - DNA, 15 bp, Homo sapiens
ctgtgaccctcaacc

SEQ ID NO: 93750 - DNA, 15 bp, Homo sapiens
tctgtgaccctcaac

SEQ ID NO: 93751 - DNA, 15 bp, Homo sapiens
ctctgtgaccctcaa

SEQ ID NO: 93752 - DNA, 15 bp, Homo sapiens
cctctgtgaccctca

SEQ ID NO: 93753 - DNA, 15 bp, Homo sapiens
tcctctgtgaccctc

SEQ ID NO: 93754 - DNA, 15 bp, Homo sapiens
ctcctctgtgaccct

SEQ ID NO: 93755 - DNA, 15 bp, Homo sapiens
cctcctctgtgaccc

SEQ ID NO: 93756 - DNA, 15 bp, Homo sapiens
gcctcctctgtgacc

SEQ ID NO: 93757 - DNA, 15 bp, Homo sapiens
cgcctcctctgtgac

SEQ ID NO: 93758 - DNA, 15 bp, Homo sapiens
gcgcctcctctgtga

SEQ ID NO: 93759 - DNA, 15 bp, Homo sapiens
tgcgcctcctctgtg

SEQ ID NO: 93760 - DNA, 15 bp, Homo sapiens
gtgcgcctcctctgt

SEQ ID NO: 93761 - DNA, 15 bp, Homo sapiens
tgtgcgcctcctctg

SEQ ID NO: 93762 - DNA, 15 bp, Homo sapiens
ctgtgcgcctcctct

SEQ ID NO: 93763 - DNA, 15 bp, Homo sapiens
cctgtgcgcctcctc

SEQ ID NO: 93764 - DNA, 15 bp, Homo sapiens
ccctgtgcgcctcct

SEQ ID NO: 93765 - DNA, 15 bp, Homo sapiens
tccctgtgcgcctcc

SEQ ID NO: 93766 - DNA, 15 bp, Homo sapiens
ttccctgtgcgcctc

SEQ ID NO: 93767 - DNA, 15 bp, Homo sapiens
tttccctgtgcgcct

SEQ ID NO: 93768 - DNA, 15 bp, Homo sapiens
gtttccctgtgcgcc

SEQ ID NO: 93769 - DNA, 15 bp, Homo sapiens
tgtttccctgtgcgc

SEQ ID NO: 93770 - DNA, 15 bp, Homo sapiens
gtgtttccctgtgcg

SEQ ID NO: 93771 - DNA, 15 bp, Homo sapiens
agtgtttccctgtgc

SEQ ID NO: 93772 - DNA, 15 bp, Homo sapiens
gagtgtttccctgtg

SEQ ID NO: 93773 - DNA, 15 bp, Homo sapiens
tgagtgtttccctgt

SEQ ID NO: 93774 - DNA, 15 bp, Homo sapiens
gtgagtgtttccctg

SEQ ID NO: 93775 - DNA, 15 bp, Homo sapiens
ggtgagtgtttccct

SEQ ID NO: 93776 - DNA, 15 bp, Homo sapiens
tggtgagtgtttccc

SEQ ID NO: 93777 - DNA, 15 bp, Homo sapiens
ttggtgagtgtttcc

SEQ ID NO: 93778 - DNA, 15 bp, Homo sapiens
attggtgagtgtttc

SEQ ID NO: 93779 - DNA, 15 bp, Homo sapiens
cattggtgagtgttt

SEQ ID NO: 93780 - DNA, 15 bp, Homo sapiens
ccattggtgagtgtt

SEQ ID NO: 93781 - DNA, 15 bp, Homo sapiens
cccattggtgagtgt

SEQ ID NO: 93782 - DNA, 15 bp, Homo sapiens
ccccattggtgagtg

SEQ ID NO: 93783 - DNA, 15 bp, Homo sapiens
cccccattggtgagt

SEQ ID NO: 93784 - DNA, 15 bp, Homo sapiens
acccccattggtgag

SEQ ID NO: 93785 - DNA, 15 bp, Homo sapiens
aacccccattggtga

SEQ ID NO: 93786 - DNA, 15 bp, Homo sapiens
caacccccattggtg

SEQ ID NO: 93787 - DNA, 15 bp, Homo sapiens
gcaacccccattggt

SEQ ID NO: 93788 - DNA, 15 bp, Homo sapiens
tgcaacccccattgg

SEQ ID NO: 93789 - DNA, 15 bp, Homo sapiens
atgcaacccccattg

SEQ ID NO: 93790 - DNA, 15 bp, Homo sapiens
aatgcaacccccatt

SEQ ID NO: 93791 - DNA, 15 bp, Homo sapiens
caatgcaacccccat

SEQ ID NO: 93792 - DNA, 15 bp, Homo sapiens
tcaatgcaaccccca

SEQ ID NO: 93793 - DNA, 15 bp, Homo sapiens
ttcaatgcaaccccc

SEQ ID NO: 93794 - DNA, 15 bp, Homo sapiens
gttcaatgcaacccc

SEQ ID NO: 93795 - DNA, 15 bp, Homo sapiens
agttcaatgcaaccc

SEQ ID NO: 93796 - DNA, 15 bp, Homo sapiens
cagttcaatgcaacc

SEQ ID NO: 93797 - DNA, 15 bp, Homo sapiens
tcagttcaatgcaac

SEQ ID NO: 93798 - DNA, 15 bp, Homo sapiens
ttcagttcaatgcaa

SEQ ID NO: 93799 - DNA, 15 bp, Homo sapiens
gttcagttcaatgca

SEQ ID NO: 93800 - DNA, 15 bp, Homo sapiens
agttcagttcaatgc

SEQ ID NO: 93801 - DNA, 15 bp, Homo sapiens
gagttcagttcaatg

SEQ ID NO: 93802 - DNA, 15 bp, Homo sapiens
tgagttcagttcaat

SEQ ID NO: 93803 - DNA, 15 bp, Homo sapiens
ttgagttcagttcaa

SEQ ID NO: 93804 - DNA, 15 bp, Homo sapiens
tttgagttcagttca

SEQ ID NO: 93805 - DNA, 15 bp, Homo sapiens
ttttgagttcagttc

SEQ ID NO: 93806 - DNA, 15 bp, Homo sapiens
attttgagttcagtt

SEQ ID NO: 93807 - DNA, 15 bp, Homo sapiens
tattttgagttcagt

SEQ ID NO: 93808 - DNA, 15 bp, Homo sapiens
atattttgagttcag

SEQ ID NO: 93809 - DNA, 15 bp, Homo sapiens
catattttgagttca

SEQ ID NO: 93810 - DNA, 15 bp, Homo sapiens
acatattttgagttc

SEQ ID NO: 93811 - DNA, 15 bp, Homo sapiens
cacatattttgagtt

SEQ ID NO: 93812 - DNA, 15 bp, Homo sapiens
tcacatattttgagt

SEQ ID NO: 93813 - DNA, 15 bp, Homo sapiens
atcacatattttgag

SEQ ID NO: 93814 - DNA, 15 bp, Homo sapiens
tatcacatattttga

SEQ ID NO: 93815 - DNA, 15 bp, Homo sapiens
ttatcacatattttg

SEQ ID NO: 93816 - DNA, 15 bp, Homo sapiens
tttatcacatatttt

SEQ ID NO: 93817 - DNA, 15 bp, Homo sapiens
ttttatcacatattt

SEQ ID NO: 93818 - DNA, 15 bp, Homo sapiens
gttttatcacatatt

SEQ ID NO: 93819 - DNA, 15 bp, Homo sapiens
agttttatcacatat

SEQ ID NO: 93820 - DNA, 15 bp, Homo sapiens
cagttttatcacata

SEQ ID NO: 93821 - DNA, 15 bp, Homo sapiens
tcagttttatcacat

SEQ ID NO: 93822 - DNA, 15 bp, Homo sapiens
atcagttttatcaca

SEQ ID NO: 93823 - DNA, 15 bp, Homo sapiens
aatcagttttatcac

SEQ ID NO: 93824 - DNA, 15 bp, Homo sapiens
aaatcagttttatca

SEQ ID NO: 93825 - DNA, 15 bp, Homo sapiens
aaaatcagttttatc

SEQ ID NO: 93826 - DNA, 15 bp, Homo sapiens
gaaaatcagttttat

SEQ ID NO: 93827 - DNA, 15 bp, Homo sapiens
ggaaaatcagtttta

SEQ ID NO: 93828 - DNA, 15 bp, Homo sapiens
aggaaaatcagtttt

SEQ ID NO: 93829 - DNA, 15 bp, Homo sapiens
caggaaaatcagttt

SEQ ID NO: 93830 - DNA, 15 bp, Homo sapiens
tcaggaaaatcagtt

SEQ ID NO: 93831 - DNA, 15 bp, Homo sapiens
atcaggaaaatcagt

SEQ ID NO: 93832 - DNA, 15 bp, Homo sapiens
catcaggaaaatcag

SEQ ID NO: 93833 - DNA, 15 bp, Homo sapiens
acatcaggaaaatca

SEQ ID NO: 93834 - DNA, 15 bp, Homo sapiens
cacatcaggaaaatc

SEQ ID NO: 93835 - DNA, 15 bp, Homo sapiens
ccacatcaggaaaat

SEQ ID NO: 93836 - DNA, 15 bp, Homo sapiens
cccacatcaggaaaa

SEQ ID NO: 93837 - DNA, 15 bp, Homo sapiens
gcccacatcaggaaa

SEQ ID NO: 93838 - DNA, 15 bp, Homo sapiens
tgcccacatcaggaa

SEQ ID NO: 93839 - DNA, 15 bp, Homo sapiens
atgcccacatcagga

SEQ ID NO: 93840 - DNA, 15 bp, Homo sapiens
gatgcccacatcagg

SEQ ID NO: 93841 - DNA, 15 bp, Homo sapiens
ggatgcccacatcag

SEQ ID NO: 93842 - DNA, 15 bp, Homo sapiens
gggatgcccacatca

SEQ ID NO: 93843 - DNA, 15 bp, Homo sapiens
cgggatgcccacatc

SEQ ID NO: 93844 - DNA, 15 bp, Homo sapiens
gcgggatgcccacat

SEQ ID NO: 93845 - DNA, 15 bp, Homo sapiens
tgcgggatgcccaca

SEQ ID NO: 93846 - DNA, 15 bp, Homo sapiens
ctgcgggatgcccac

SEQ ID NO: 93847 - DNA, 15 bp, Homo sapiens
gctgcgggatgccca

SEQ ID NO: 93848 - DNA, 15 bp, Homo sapiens
ggctgcgggatgccc

SEQ ID NO: 93849 - DNA, 15 bp, Homo sapiens
gggctgcgggatgcc

SEQ ID NO: 93850 - DNA, 15 bp, Homo sapiens
ggggctgcgggatgc

SEQ ID NO: 93851 - DNA, 15 bp, Homo sapiens
gggggctgcgggatg

SEQ ID NO: 93852 - DNA, 15 bp, Homo sapiens
agggggctgcgggat

SEQ ID NO: 93853 - DNA, 15 bp, Homo sapiens
gagggggctgcggga

SEQ ID NO: 93854 - DNA, 15 bp, Homo sapiens
ggagggggctgcggg

SEQ ID NO: 93855 - DNA, 15 bp, Homo sapiens
gggagggggctgcgg

SEQ ID NO: 93856 - DNA, 15 bp, Homo sapiens
agggagggggctgcg

SEQ ID NO: 93857 - DNA, 15 bp, Homo sapiens
cagggagggggctgc

SEQ ID NO: 93858 - DNA, 15 bp, Homo sapiens
gcagggagggggctg

SEQ ID NO: 93859 - DNA, 15 bp, Homo sapiens
ggcagggagggggct

SEQ ID NO: 93860 - DNA, 15 bp, Homo sapiens
gggcagggagggggc

SEQ ID NO: 93861 - DNA, 15 bp, Homo sapiens
tgggcagggaggggg

SEQ ID NO: 93862 - DNA, 15 bp, Homo sapiens
atgggcagggagggg

SEQ ID NO: 93863 - DNA, 15 bp, Homo sapiens
gatgggcagggaggg

SEQ ID NO: 93864 - DNA, 15 bp, Homo sapiens
ggatgggcagggagg

SEQ ID NO: 93865 - DNA, 15 bp, Homo sapiens
aggatgggcagggag

SEQ ID NO: 93866 - DNA, 15 bp, Homo sapiens
caggatgggcaggga

SEQ ID NO: 93867 - DNA, 15 bp, Homo sapiens
ccaggatgggcaggg

SEQ ID NO: 93868 - DNA, 15 bp, Homo sapiens
tccaggatgggcagg

SEQ ID NO: 93869 - DNA, 15 bp, Homo sapiens
ctccaggatgggcag

SEQ ID NO: 93870 - DNA, 15 bp, Homo sapiens
tctccaggatgggca

SEQ ID NO: 93871 - DNA, 15 bp, Homo sapiens
gtctccaggatgggc

SEQ ID NO: 93872 - DNA, 15 bp, Homo sapiens
agtctccaggatggg

SEQ ID NO: 93873 - DNA, 15 bp, Homo sapiens
cagtctccaggatgg

SEQ ID NO: 93874 - DNA, 15 bp, Homo sapiens
acagtctccaggatg

SEQ ID NO: 93875 - DNA, 15 bp, Homo sapiens
cacagtctccaggat

SEQ ID NO: 93876 - DNA, 15 bp, Homo sapiens
ccacagtctccagga

SEQ ID NO: 93877 - DNA, 15 bp, Homo sapiens
gccacagtctccagg

SEQ ID NO: 93878 - DNA, 15 bp, Homo sapiens
tgccacagtctccag

SEQ ID NO: 93879 - DNA, 15 bp, Homo sapiens
ttgccacagtctcca

SEQ ID NO: 93880 - DNA, 15 bp, Homo sapiens
cttgccacagtctcc

SEQ ID NO: 93881 - DNA, 15 bp, Homo sapiens
acttgccacagtctc

SEQ ID NO: 93882 - DNA, 15 bp, Homo sapiens
tacttgccacagtct

SEQ ID NO: 93883 - DNA, 15 bp, Homo sapiens
ctacttgccacagtc

SEQ ID NO: 93884 - DNA, 15 bp, Homo sapiens
cctacttgccacagt

SEQ ID NO: 93885 - DNA, 15 bp, Homo sapiens
acctacttgccacag

SEQ ID NO: 93886 - DNA, 15 bp, Homo sapiens
aacctacttgccaca

SEQ ID NO: 93887 - DNA, 15 bp, Homo sapiens
aaacctacttgccac

SEQ ID NO: 93888 - DNA, 15 bp, Homo sapiens
aaaacctacttgcca

SEQ ID NO: 93889 - DNA, 15 bp, Homo sapiens
taaaacctacttgcc

SEQ ID NO: 93890 - DNA, 15 bp, Homo sapiens
ataaaacctacttgc

SEQ ID NO: 93891 - DNA, 15 bp, Homo sapiens
tataaaacctacttg

SEQ ID NO: 93892 - DNA, 15 bp, Homo sapiens
ttataaaacctactt

SEQ ID NO: 93893 - DNA, 15 bp, Homo sapiens
attataaaacctact

SEQ ID NO: 93894 - DNA, 15 bp, Homo sapiens
tattataaaacctac

SEQ ID NO: 93895 - DNA, 15 bp, Homo sapiens
gtattataaaaccta

SEQ ID NO: 93896 - DNA, 15 bp, Homo sapiens
agtattataaaacct

SEQ ID NO: 93897 - DNA, 15 bp, Homo sapiens
tagtattataaaacc

SEQ ID NO: 93898 - DNA, 15 bp, Homo sapiens
gtagtattataaaac

SEQ ID NO: 93899 - DNA, 15 bp, Homo sapiens
cgtagtattataaaa

SEQ ID NO: 93900 - DNA, 15 bp, Homo sapiens
acgtagtattataaa

SEQ ID NO: 93901 - DNA, 15 bp, Homo sapiens
aacgtagtattataa

SEQ ID NO: 93902 - DNA, 15 bp, Homo sapiens
taacgtagtattata

SEQ ID NO: 93903 - DNA, 15 bp, Homo sapiens
ctaacgtagtattat

SEQ ID NO: 93904 - DNA, 15 bp, Homo sapiens
tctaacgtagtatta

SEQ ID NO: 93905 - DNA, 15 bp, Homo sapiens
ctctaacgtagtatt

SEQ ID NO: 93906 - DNA, 15 bp, Homo sapiens
tctctaacgtagtat

SEQ ID NO: 93907 - DNA, 15 bp, Homo sapiens
gtctctaacgtagta

SEQ ID NO: 93908 - DNA, 15 bp, Homo sapiens
agtctctaacgtagt

SEQ ID NO: 93909 - DNA, 15 bp, Homo sapiens
cagtctctaacgtag

SEQ ID NO: 93910 - DNA, 15 bp, Homo sapiens
tcagtctctaacgta

SEQ ID NO: 93911 - DNA, 15 bp, Homo sapiens
ttcagtctctaacgt

SEQ ID NO: 93912 - DNA, 15 bp, Homo sapiens
attcagtctctaacg

SEQ ID NO: 93913 - DNA, 15 bp, Homo sapiens
gattcagtctctaac

SEQ ID NO: 93914 - DNA, 15 bp, Homo sapiens
agattcagtctctaa

SEQ ID NO: 93915 - DNA, 15 bp, Homo sapiens
aagattcagtctcta

SEQ ID NO: 93916 - DNA, 15 bp, Homo sapiens
aaagattcagtctct

SEQ ID NO: 93917 - DNA, 15 bp, Homo sapiens
caaagattcagtctc

SEQ ID NO: 93918 - DNA, 15 bp, Homo sapiens
acaaagattcagtct

SEQ ID NO: 93919 - DNA, 15 bp, Homo sapiens
gacaaagattcagtc

SEQ ID NO: 93920 - DNA, 15 bp, Homo sapiens
ggacaaagattcagt

SEQ ID NO: 93921 - DNA, 15 bp, Homo sapiens
aggacaaagattcag

SEQ ID NO: 93922 - DNA, 15 bp, Homo sapiens
caggacaaagattca

SEQ ID NO: 93923 - DNA, 15 bp, Homo sapiens
tcaggacaaagattc

SEQ ID NO: 93924 - DNA, 15 bp, Homo sapiens
ttcaggacaaagatt

SEQ ID NO: 93925 - DNA, 15 bp, Homo sapiens
tttcaggacaaagat

SEQ ID NO: 93926 - DNA, 15 bp, Homo sapiens
ttttcaggacaaaga

SEQ ID NO: 93927 - DNA, 15 bp, Homo sapiens
tttttcaggacaaag

SEQ ID NO: 93928 - DNA, 15 bp, Homo sapiens
atttttcaggacaaa

SEQ ID NO: 93929 - DNA, 15 bp, Homo sapiens
tatttttcaggacaa

SEQ ID NO: 93930 - DNA, 15 bp, Homo sapiens
ctatttttcaggaca

SEQ ID NO: 93931 - DNA, 15 bp, Homo sapiens
actatttttcaggac

SEQ ID NO: 93932 - DNA, 15 bp, Homo sapiens
aactatttttcagga

SEQ ID NO: 93933 - DNA, 15 bp, Homo sapiens
aaactatttttcagg

SEQ ID NO: 93934 - DNA, 15 bp, Homo sapiens
caaactatttttcag

SEQ ID NO: 93935 - DNA, 15 bp, Homo sapiens
tcaaactatttttca

SEQ ID NO: 93936 - DNA, 15 bp, Homo sapiens
ttcaaactatttttc

SEQ ID NO: 93937 - DNA, 15 bp, Homo sapiens
tttcaaactattttt

SEQ ID NO: 93938 - DNA, 15 bp, Homo sapiens
ctttcaaactatttt

SEQ ID NO: 93939 - DNA, 15 bp, Homo sapiens
cctttcaaactattt

SEQ ID NO: 93940 - DNA, 15 bp, Homo sapiens
acctttcaaactatt

SEQ ID NO: 93941 - DNA, 15 bp, Homo sapiens
aacctttcaaactat

SEQ ID NO: 93942 - DNA, 15 bp, Homo sapiens
gaacctttcaaacta

SEQ ID NO: 93943 - DNA, 15 bp, Homo sapiens
tgaacctttcaaact

SEQ ID NO: 93944 - DNA, 15 bp, Homo sapiens
atgaacctttcaaac

SEQ ID NO: 93945 - DNA, 15 bp, Homo sapiens
aatgaacctttcaaa

SEQ ID NO: 93946 - DNA, 15 bp, Homo sapiens
aaatgaacctttcaa

SEQ ID NO: 93947 - DNA, 15 bp, Homo sapiens
aaaatgaacctttca

SEQ ID NO: 93948 - DNA, 15 bp, Homo sapiens
aaaaatgaacctttc

SEQ ID NO: 93949 - DNA, 15 bp, Homo sapiens
gaaaaatgaaccttt

SEQ ID NO: 93950 - DNA, 15 bp, Homo sapiens
agaaaaatgaacctt

SEQ ID NO: 93951 - DNA, 15 bp, Homo sapiens
aagaaaaatgaacct

SEQ ID NO: 93952 - DNA, 15 bp, Homo sapiens
caagaaaaatgaacc

SEQ ID NO: 93953 - DNA, 15 bp, Homo sapiens
acaagaaaaatgaac

SEQ ID NO: 93954 - DNA, 15 bp, Homo sapiens
aacaagaaaaatgaa

SEQ ID NO: 93955 - DNA, 15 bp, Homo sapiens
aaacaagaaaaatga

SEQ ID NO: 93956 - DNA, 15 bp, Homo sapiens
aaaacaagaaaaatg

SEQ ID NO: 93957 - DNA, 15 bp, Homo sapiens
aaaaacaagaaaaat

SEQ ID NO: 93958 - DNA, 15 bp, Homo sapiens
aaaaaacaagaaaaa

SEQ ID NO: 93959 - DNA, 15 bp, Homo sapiens
gaaaaaacaagaaaa

SEQ ID NO: 93960 - DNA, 15 bp, Homo sapiens
ggaaaaaacaagaaa

SEQ ID NO: 93961 - DNA, 15 bp, Homo sapiens
gggaaaaaacaagaa

SEQ ID NO: 93962 - DNA, 15 bp, Homo sapiens
ggggaaaaaacaaga

SEQ ID NO: 93963 - DNA, 15 bp, Homo sapiens
gggggaaaaaacaag

SEQ ID NO: 93964 - DNA, 15 bp, Homo sapiens
tgggggaaaaaacaa

SEQ ID NO: 93965 - DNA, 15 bp, Homo sapiens
ttgggggaaaaaaca

SEQ ID NO: 93966 - DNA, 15 bp, Homo sapiens
cttgggggaaaaaac

SEQ ID NO: 93967 - DNA, 15 bp, Homo sapiens
tcttgggggaaaaaa

SEQ ID NO: 93968 - DNA, 15 bp, Homo sapiens
gtcttgggggaaaaa

SEQ ID NO: 93969 - DNA, 15 bp, Homo sapiens
ggtcttgggggaaaa

SEQ ID NO: 93970 - DNA, 15 bp, Homo sapiens
aggtcttgggggaaa

SEQ ID NO: 93971 - DNA, 15 bp, Homo sapiens
caggtcttgggggaa

SEQ ID NO: 93972 - DNA, 15 bp, Homo sapiens
acaggtcttggggga

SEQ ID NO: 93973 - DNA, 15 bp, Homo sapiens
tacaggtcttggggg

SEQ ID NO: 93974 - DNA, 15 bp, Homo sapiens
ttacaggtcttgggg

SEQ ID NO: 93975 - DNA, 15 bp, Homo sapiens
tttacaggtcttggg

SEQ ID NO: 93976 - DNA, 15 bp, Homo sapiens
atttacaggtcttgg

SEQ ID NO: 93977 - DNA, 15 bp, Homo sapiens
catttacaggtcttg

SEQ ID NO: 93978 - DNA, 15 bp, Homo sapiens
gcatttacaggtctt

SEQ ID NO: 93979 - DNA, 15 bp, Homo sapiens
tgcatttacaggtct

SEQ ID NO: 93980 - DNA, 15 bp, Homo sapiens
ttgcatttacaggtc

SEQ ID NO: 93981 - DNA, 15 bp, Homo sapiens
tttgcatttacaggt

SEQ ID NO: 93982 - DNA, 15 bp, Homo sapiens
ctttgcatttacagg

SEQ ID NO: 93983 - DNA, 15 bp, Homo sapiens
gctttgcatttacag

SEQ ID NO: 93984 - DNA, 15 bp, Homo sapiens
agctttgcatttaca

SEQ ID NO: 93985 - DNA, 15 bp, Homo sapiens
tagctttgcatttac

SEQ ID NO: 93986 - DNA, 15 bp, Homo sapiens
atagctttgcattta

SEQ ID NO: 93987 - DNA, 15 bp, Homo sapiens
gatagctttgcattt

SEQ ID NO: 93988 - DNA, 15 bp, Homo sapiens
agatagctttgcatt

SEQ ID NO: 93989 - DNA, 15 bp, Homo sapiens
gagatagctttgcat

SEQ ID NO: 93990 - DNA, 15 bp, Homo sapiens
ggagatagctttgca

SEQ ID NO: 93991 - DNA, 15 bp, Homo sapiens
aggagatagctttgc

SEQ ID NO: 93992 - DNA, 15 bp, Homo sapiens
gaggagatagctttg

SEQ ID NO: 93993 - DNA, 15 bp, Homo sapiens
agaggagatagcttt

SEQ ID NO: 93994 - DNA, 15 bp, Homo sapiens
cagaggagatagctt

SEQ ID NO: 93995 - DNA, 15 bp, Homo sapiens
tcagaggagatagct

SEQ ID NO: 93996 - DNA, 15 bp, Homo sapiens
ttcagaggagatagc

SEQ ID NO: 93997 - DNA, 15 bp, Homo sapiens
attcagaggagatag

SEQ ID NO: 93998 - DNA, 15 bp, Homo sapiens
cattcagaggagata

SEQ ID NO: 93999 - DNA, 15 bp, Homo sapiens
tcattcagaggagat

SEQ ID NO: 94000 - DNA, 15 bp, Homo sapiens
atcattcagaggaga

SEQ ID NO: 94001 - DNA, 15 bp, Homo sapiens
catcattcagaggag

SEQ ID NO: 94002 - DNA, 15 bp, Homo sapiens
tcatcattcagagga

SEQ ID NO: 94003 - DNA, 15 bp, Homo sapiens
ttcatcattcagagg

SEQ ID NO: 94004 - DNA, 15 bp, Homo sapiens
cttcatcattcagag

SEQ ID NO: 94005 - DNA, 15 bp, Homo sapiens
tcttcatcattcaga

SEQ ID NO: 94006 - DNA, 15 bp, Homo sapiens
atcttcatcattcag

SEQ ID NO: 94007 - DNA, 15 bp, Homo sapiens
catcttcatcattca

SEQ ID NO: 94008 - DNA, 15 bp, Homo sapiens
tcatcttcatcattc

SEQ ID NO: 94009 - DNA, 15 bp, Homo sapiens
ttcatcttcatcatt

SEQ ID NO: 94010 - DNA, 15 bp, Homo sapiens
cttcatcttcatcat

SEQ ID NO: 94011 - DNA, 15 bp, Homo sapiens
tcttcatcttcatca

SEQ ID NO: 94012 - DNA, 15 bp, Homo sapiens
atcttcatcttcatc

SEQ ID NO: 94013 - DNA, 15 bp, Homo sapiens
catcttcatcttcat

SEQ ID NO: 94014 - DNA, 15 bp, Homo sapiens
acatcttcatcttca

SEQ ID NO: 94015 - DNA, 15 bp, Homo sapiens
cacatcttcatcttc

SEQ ID NO: 94016 - DNA, 15 bp, Homo sapiens
tcacatcttcatctt

SEQ ID NO: 94017 - DNA, 15 bp, Homo sapiens
ctcacatcttcatct

SEQ ID NO: 94018 - DNA, 15 bp, Homo sapiens
cctcacatcttcatc

SEQ ID NO: 94019 - DNA, 15 bp, Homo sapiens
gcctcacatcttcat

SEQ ID NO: 94020 - DNA, 15 bp, Homo sapiens
cgcctcacatcttca

SEQ ID NO: 94021 - DNA, 15 bp, Homo sapiens
ccgcctcacatcttc

SEQ ID NO: 94022 - DNA, 15 bp, Homo sapiens
cccgcctcacatctt

SEQ ID NO: 94023 - DNA, 15 bp, Homo sapiens
tcccgcctcacatct

SEQ ID NO: 94024 - DNA, 15 bp, Homo sapiens
ttcccgcctcacatc

SEQ ID NO: 94025 - DNA, 15 bp, Homo sapiens
tttcccgcctcacat

SEQ ID NO: 94026 - DNA, 15 bp, Homo sapiens
ctttcccgcctcaca

SEQ ID NO: 94027 - DNA, 15 bp, Homo sapiens
tctttcccgcctcac

SEQ ID NO: 94028 - DNA, 15 bp, Homo sapiens
gtctttcccgcctca

SEQ ID NO: 94029 - DNA, 15 bp, Homo sapiens
tgtctttcccgcctc

SEQ ID NO: 94030 - DNA, 15 bp, Homo sapiens
ctgtctttcccgcct

SEQ ID NO: 94031 - DNA, 15 bp, Homo sapiens
tctgtctttcccgcc

SEQ ID NO: 94032 - DNA, 15 bp, Homo sapiens
ctctgtctttcccgc

SEQ ID NO: 94033 - DNA, 15 bp, Homo sapiens
tctctgtctttcccg

SEQ ID NO: 94034 - DNA, 15 bp, Homo sapiens
ttctctgtctttccc

SEQ ID NO: 94035 - DNA, 15 bp, Homo sapiens
attctctgtctttcc

SEQ ID NO: 94036 - DNA, 15 bp, Homo sapiens
aattctctgtctttc

SEQ ID NO: 94037 - DNA, 15 bp, Homo sapiens
gaattctctgtcttt

SEQ ID NO: 94038 - DNA, 15 bp, Homo sapiens
agaattctctgtctt

SEQ ID NO: 94039 - DNA, 15 bp, Homo sapiens
aagaattctctgtct

SEQ ID NO: 94040 - DNA, 15 bp, Homo sapiens
caagaattctctgtc

SEQ ID NO: 94041 - DNA, 15 bp, Homo sapiens
tcaagaattctctgt

SEQ ID NO: 94042 - DNA, 15 bp, Homo sapiens
atcaagaattctctg

SEQ ID NO: 94043 - DNA, 15 bp, Homo sapiens
catcaagaattctct

SEQ ID NO: 94044 - DNA, 15 bp, Homo sapiens
ccatcaagaattctc

SEQ ID NO: 94045 - DNA, 15 bp, Homo sapiens
accatcaagaattct

SEQ ID NO: 94046 - DNA, 15 bp, Homo sapiens
caccatcaagaattc

SEQ ID NO: 94047 - DNA, 15 bp, Homo sapiens
ccaccatcaagaatt

SEQ ID NO: 94048 - DNA, 15 bp, Homo sapiens
tccaccatcaagaat

SEQ ID NO: 94049 - DNA, 15 bp, Homo sapiens
ctccaccatcaagaa

SEQ ID NO: 94050 - DNA, 15 bp, Homo sapiens
cctccaccatcaaga

SEQ ID NO: 94051 - DNA, 15 bp, Homo sapiens
gcctccaccatcaag

SEQ ID NO: 94052 - DNA, 15 bp, Homo sapiens
ggcctccaccatcaa

SEQ ID NO: 94053 - DNA, 15 bp, Homo sapiens
tggcctccaccatca

SEQ ID NO: 94054 - DNA, 15 bp, Homo sapiens
ctggcctccaccatc

SEQ ID NO: 94055 - DNA, 15 bp, Homo sapiens
tctggcctccaccat

SEQ ID NO: 94056 - DNA, 15 bp, Homo sapiens
ttctggcctccacca

SEQ ID NO: 94057 - DNA, 15 bp, Homo sapiens
attctggcctccacc

SEQ ID NO: 94058 - DNA, 15 bp, Homo sapiens
cattctggcctccac

SEQ ID NO: 94059 - DNA, 15 bp, Homo sapiens
tcattctggcctcca

SEQ ID NO: 94060 - DNA, 15 bp, Homo sapiens
gtcattctggcctcc

SEQ ID NO: 94061 - DNA, 15 bp, Homo sapiens
tgtcattctggcctc

SEQ ID NO: 94062 - DNA, 15 bp, Homo sapiens
atgtcattctggcct

SEQ ID NO: 94063 - DNA, 15 bp, Homo sapiens
gatgtcattctggcc

SEQ ID NO: 94064 - DNA, 15 bp, Homo sapiens
agatgtcattctggc

SEQ ID NO: 94065 - DNA, 15 bp, Homo sapiens
aagatgtcattctgg

SEQ ID NO: 94066 - DNA, 15 bp, Homo sapiens
taagatgtcattctg

SEQ ID NO: 94067 - DNA, 15 bp, Homo sapiens
ctaagatgtcattct

SEQ ID NO: 94068 - DNA, 15 bp, Homo sapiens
tctaagatgtcattc

SEQ ID NO: 94069 - DNA, 15 bp, Homo sapiens
ttctaagatgtcatt

SEQ ID NO: 94070 - DNA, 15 bp, Homo sapiens
tttctaagatgtcat

SEQ ID NO: 94071 - DNA, 15 bp, Homo sapiens
atttctaagatgtca

SEQ ID NO: 94072 - DNA, 15 bp, Homo sapiens
gatttctaagatgtc

SEQ ID NO: 94073 - DNA, 15 bp, Homo sapiens
tgatttctaagatgt

SEQ ID NO: 94074 - DNA, 15 bp, Homo sapiens
ttgatttctaagatg

SEQ ID NO: 94075 - DNA, 15 bp, Homo sapiens
cttgatttctaagat

SEQ ID NO: 94076 - DNA, 15 bp, Homo sapiens
ccttgatttctaaga

SEQ ID NO: 94077 - DNA, 15 bp, Homo sapiens
tccttgatttctaag

SEQ ID NO: 94078 - DNA, 15 bp, Homo sapiens
ctccttgatttctaa

SEQ ID NO: 94079 - DNA, 15 bp, Homo sapiens
actccttgatttcta

SEQ ID NO: 94080 - DNA, 15 bp, Homo sapiens
aactccttgatttct

SEQ ID NO: 94081 - DNA, 15 bp, Homo sapiens
caactccttgatttc

SEQ ID NO: 94082 - DNA, 15 bp, Homo sapiens
tcaactccttgattt

SEQ ID NO: 94083 - DNA, 15 bp, Homo sapiens
gtcaactccttgatt

SEQ ID NO: 94084 - DNA, 15 bp, Homo sapiens
cgtcaactccttgat

SEQ ID NO: 94085 - DNA, 15 bp, Homo sapiens
tcgtcaactccttga

SEQ ID NO: 94086 - DNA, 15 bp, Homo sapiens
ttcgtcaactccttg

SEQ ID NO: 94087 - DNA, 15 bp, Homo sapiens
cttcgtcaactcctt

SEQ ID NO: 94088 - DNA, 15 bp, Homo sapiens
ccttcgtcaactcct

SEQ ID NO: 94089 - DNA, 15 bp, Homo sapiens
accttcgtcaactcc

SEQ ID NO: 94090 - DNA, 15 bp, Homo sapiens
caccttcgtcaactc

SEQ ID NO: 94091 - DNA, 15 bp, Homo sapiens
tcaccttcgtcaact

SEQ ID NO: 94092 - DNA, 15 bp, Homo sapiens
ctcaccttcgtcaac

SEQ ID NO: 94093 - DNA, 15 bp, Homo sapiens
tctcaccttcgtcaa

SEQ ID NO: 94094 - DNA, 15 bp, Homo sapiens
ctctcaccttcgtca

SEQ ID NO: 94095 - DNA, 15 bp, Homo sapiens
tctctcaccttcgtc

SEQ ID NO: 94096 - DNA, 15 bp, Homo sapiens
ctctctcaccttcgt

SEQ ID NO: 94097 - DNA, 15 bp, Homo sapiens
actctctcaccttcg

SEQ ID NO: 94098 - DNA, 15 bp, Homo sapiens
tactctctcaccttc

SEQ ID NO: 94099 - DNA, 15 bp, Homo sapiens
gtactctctcacctt

SEQ ID NO: 94100 - DNA, 15 bp, Homo sapiens
tgtactctctcacct

SEQ ID NO: 94101 - DNA, 15 bp, Homo sapiens
ctgtactctctcacc

SEQ ID NO: 94102 - DNA, 15 bp, Homo sapiens
cctgtactctctcac

SEQ ID NO: 94103 - DNA, 15 bp, Homo sapiens
acctgtactctctca

SEQ ID NO: 94104 - DNA, 15 bp, Homo sapiens
aacctgtactctctc

SEQ ID NO: 94105 - DNA, 15 bp, Homo sapiens
taacctgtactctct

SEQ ID NO: 94106 - DNA, 15 bp, Homo sapiens
gtaacctgtactctc

SEQ ID NO: 94107 - DNA, 15 bp, Homo sapiens
tgtaacctgtactct

SEQ ID NO: 94108 - DNA, 15 bp, Homo sapiens
ttgtaacctgtactc

SEQ ID NO: 94109 - DNA, 15 bp, Homo sapiens
attgtaacctgtact

SEQ ID NO: 94110 - DNA, 15 bp, Homo sapiens
tattgtaacctgtac

SEQ ID NO: 94111 - DNA, 15 bp, Homo sapiens
ctattgtaacctgta

SEQ ID NO: 94112 - DNA, 15 bp, Homo sapiens
gctattgtaacctgt

SEQ ID NO: 94113 - DNA, 15 bp, Homo sapiens
agctattgtaacctg

SEQ ID NO: 94114 - DNA, 15 bp, Homo sapiens
gagctattgtaacct

SEQ ID NO: 94115 - DNA, 15 bp, Homo sapiens
tgagctattgtaacc

SEQ ID NO: 94116 - DNA, 15 bp, Homo sapiens
atgagctattgtaac

SEQ ID NO: 94117 - DNA, 15 bp, Homo sapiens
gatgagctattgtaa

SEQ ID NO: 94118 - DNA, 15 bp, Homo sapiens
agatgagctattgta

SEQ ID NO: 94119 - DNA, 15 bp, Homo sapiens
aagatgagctattgt

SEQ ID NO: 94120 - DNA, 15 bp, Homo sapiens
gaagatgagctattg

SEQ ID NO: 94121 - DNA, 15 bp, Homo sapiens
tgaagatgagctatt

SEQ ID NO: 94122 - DNA, 15 bp, Homo sapiens
ctgaagatgagctat

SEQ ID NO: 94123 - DNA, 15 bp, Homo sapiens
actgaagatgagcta

SEQ ID NO: 94124 - DNA, 15 bp, Homo sapiens
aactgaagatgagct

SEQ ID NO: 94125 - DNA, 15 bp, Homo sapiens
aaactgaagatgagc

SEQ ID NO: 94126 - DNA, 15 bp, Homo sapiens
aaaactgaagatgag

SEQ ID NO: 94127 - DNA, 15 bp, Homo sapiens
aaaaactgaagatga

SEQ ID NO: 94128 - DNA, 15 bp, Homo sapiens
aaaaaactgaagatg

SEQ ID NO: 94129 - DNA, 15 bp, Homo sapiens
aaaaaaactgaagat

SEQ ID NO: 94130 - DNA, 15 bp, Homo sapiens
gaaaaaaactgaaga

SEQ ID NO: 94131 - DNA, 15 bp, Homo sapiens
tgaaaaaaactgaag

SEQ ID NO: 94132 - DNA, 15 bp, Homo sapiens
ctgaaaaaaactgaa

SEQ ID NO: 94133 - DNA, 15 bp, Homo sapiens
gctgaaaaaaactga

SEQ ID NO: 94134 - DNA, 15 bp, Homo sapiens
agctgaaaaaaactg

SEQ ID NO: 94135 - DNA, 15 bp, Homo sapiens
aagctgaaaaaaact

SEQ ID NO: 94136 - DNA, 15 bp, Homo sapiens
aaagctgaaaaaaac

SEQ ID NO: 94137 - DNA, 15 bp, Homo sapiens
taaagctgaaaaaaa

SEQ ID NO: 94138 - DNA, 15 bp, Homo sapiens
ataaagctgaaaaaa

SEQ ID NO: 94139 - DNA, 15 bp, Homo sapiens
cataaagctgaaaaa

SEQ ID NO: 94140 - DNA, 15 bp, Homo sapiens
acataaagctgaaaa

SEQ ID NO: 94141 - DNA, 15 bp, Homo sapiens
cacataaagctgaaa

SEQ ID NO: 94142 - DNA, 15 bp, Homo sapiens
gcacataaagctgaa

SEQ ID NO: 94143 - DNA, 15 bp, Homo sapiens
agcacataaagctga

SEQ ID NO: 94144 - DNA, 15 bp, Homo sapiens
cagcacataaagctg

SEQ ID NO: 94145 - DNA, 15 bp, Homo sapiens
acagcacataaagct

SEQ ID NO: 94146 - DNA, 15 bp, Homo sapiens
tacagcacataaagc

SEQ ID NO: 94147 - DNA, 15 bp, Homo sapiens
ttacagcacataaag

SEQ ID NO: 94148 - DNA, 15 bp, Homo sapiens
gttacagcacataaa

SEQ ID NO: 94149 - DNA, 15 bp, Homo sapiens
ggttacagcacataa

SEQ ID NO: 94150 - DNA, 15 bp, Homo sapiens
gggttacagcacata

SEQ ID NO: 94151 - DNA, 15 bp, Homo sapiens
tgggttacagcacat

SEQ ID NO: 94152 - DNA, 15 bp, Homo sapiens
ctgggttacagcaca

SEQ ID NO: 94153 - DNA, 15 bp, Homo sapiens
gctgggttacagcac

SEQ ID NO: 94154 - DNA, 15 bp, Homo sapiens
tgctgggttacagca

SEQ ID NO: 94155 - DNA, 15 bp, Homo sapiens
ctgctgggttacagc

SEQ ID NO: 94156 - DNA, 15 bp, Homo sapiens
actgctgggttacag

SEQ ID NO: 94157 - DNA, 15 bp, Homo sapiens
aactgctgggttaca

SEQ ID NO: 94158 - DNA, 15 bp, Homo sapiens
aaactgctgggttac

SEQ ID NO: 94159 - DNA, 15 bp, Homo sapiens
caaactgctgggtta

SEQ ID NO: 94160 - DNA, 15 bp, Homo sapiens
gcaaactgctgggtt

SEQ ID NO: 94161 - DNA, 15 bp, Homo sapiens
agcaaactgctgggt

SEQ ID NO: 94162 - DNA, 15 bp, Homo sapiens
cagcaaactgctggg

SEQ ID NO: 94163 - DNA, 15 bp, Homo sapiens
tcagcaaactgctgg

SEQ ID NO: 94164 - DNA, 15 bp, Homo sapiens
gtcagcaaactgctg

SEQ ID NO: 94165 - DNA, 15 bp, Homo sapiens
agtcagcaaactgct

SEQ ID NO: 94166 - DNA, 15 bp, Homo sapiens
aagtcagcaaactgc

SEQ ID NO: 94167 - DNA, 15 bp, Homo sapiens
caagtcagcaaactg

SEQ ID NO: 94168 - DNA, 15 bp, Homo sapiens
gcaagtcagcaaact

SEQ ID NO: 94169 - DNA, 15 bp, Homo sapiens
agcaagtcagcaaac

SEQ ID NO: 94170 - DNA, 15 bp, Homo sapiens
aagcaagtcagcaaa

SEQ ID NO: 94171 - DNA, 15 bp, Homo sapiens
taagcaagtcagcaa

SEQ ID NO: 94172 - DNA, 15 bp, Homo sapiens
ttaagcaagtcagca

SEQ ID NO: 94173 - DNA, 15 bp, Homo sapiens
attaagcaagtcagc

SEQ ID NO: 94174 - DNA, 15 bp, Homo sapiens
tattaagcaagtcag

SEQ ID NO: 94175 - DNA, 15 bp, Homo sapiens
ttattaagcaagtca

SEQ ID NO: 94176 - DNA, 15 bp, Homo sapiens
tttattaagcaagtc

SEQ ID NO: 94177 - DNA, 15 bp, Homo sapiens
ttttattaagcaagt

SEQ ID NO: 94178 - DNA, 15 bp, Homo sapiens
cttttattaagcaag

SEQ ID NO: 94179 - DNA, 15 bp, Homo sapiens
ccttttattaagcaa

SEQ ID NO: 94180 - DNA, 15 bp, Homo sapiens
cccttttattaagca

SEQ ID NO: 94181 - DNA, 15 bp, Homo sapiens
gcccttttattaagc

SEQ ID NO: 94182 - DNA, 15 bp, Homo sapiens
tgcccttttattaag

SEQ ID NO: 94183 - DNA, 15 bp, Homo sapiens
atgcccttttattaa

SEQ ID NO: 94184 - DNA, 15 bp, Homo sapiens
catgcccttttatta

SEQ ID NO: 94185 - DNA, 15 bp, Homo sapiens
acatgcccttttatt

SEQ ID NO: 94186 - DNA, 15 bp, Homo sapiens
cacatgcccttttat

SEQ ID NO: 94187 - DNA, 15 bp, Homo sapiens
acacatgccctttta

SEQ ID NO: 94188 - DNA, 15 bp, Homo sapiens
aacacatgccctttt

SEQ ID NO: 94189 - DNA, 15 bp, Homo sapiens
gaacacatgcccttt

SEQ ID NO: 94190 - DNA, 15 bp, Homo sapiens
ggaacacatgccctt

SEQ ID NO: 94191 - DNA, 15 bp, Homo sapiens
gggaacacatgccct

SEQ ID NO: 94192 - DNA, 15 bp, Homo sapiens
tgggaacacatgccc

SEQ ID NO: 94193 - DNA, 15 bp, Homo sapiens
ttgggaacacatgcc

SEQ ID NO: 94194 - DNA, 15 bp, Homo sapiens
tttgggaacacatgc

SEQ ID NO: 94195 - DNA, 15 bp, Homo sapiens
ttttgggaacacatg

SEQ ID NO: 94196 - DNA, 15 bp, Homo sapiens
attttgggaacacat

SEQ ID NO: 94197 - DNA, 15 bp, Homo sapiens
cattttgggaacaca

SEQ ID NO: 94198 - DNA, 15 bp, Homo sapiens
acattttgggaacac

SEQ ID NO: 94199 - DNA, 15 bp, Homo sapiens
tacattttgggaaca

SEQ ID NO: 94200 - DNA, 15 bp, Homo sapiens
gtacattttgggaac

SEQ ID NO: 94201 - DNA, 15 bp, Homo sapiens
tgtacattttgggaa

SEQ ID NO: 94202 - DNA, 15 bp, Homo sapiens
atgtacattttggga

SEQ ID NO: 94203 - DNA, 15 bp, Homo sapiens
gatgtacattttggg

SEQ ID NO: 94204 - DNA, 15 bp, Homo sapiens
agatgtacattttgg

SEQ ID NO: 94205 - DNA, 15 bp, Homo sapiens
tagatgtacattttg

SEQ ID NO: 94206 - DNA, 15 bp, Homo sapiens
atagatgtacatttt

SEQ ID NO: 94207 - DNA, 15 bp, Homo sapiens
tatagatgtacattt

SEQ ID NO: 94208 - DNA, 15 bp, Homo sapiens
gtatagatgtacatt

SEQ ID NO: 94209 - DNA, 15 bp, Homo sapiens
ggtatagatgtacat

SEQ ID NO: 94210 - DNA, 15 bp, Homo sapiens
tggtatagatgtaca

SEQ ID NO: 94211 - DNA, 15 bp, Homo sapiens
ttggtatagatgtac

SEQ ID NO: 94212 - DNA, 15 bp, Homo sapiens
cttggtatagatgta

SEQ ID NO: 94213 - DNA, 15 bp, Homo sapiens
ccttggtatagatgt

SEQ ID NO: 94214 - DNA, 15 bp, Homo sapiens
accttggtatagatg

SEQ ID NO: 94215 - DNA, 15 bp, Homo sapiens
aaccttggtatagat

SEQ ID NO: 94216 - DNA, 15 bp, Homo sapiens
gaaccttggtataga

SEQ ID NO: 94217 - DNA, 15 bp, Homo sapiens
agaaccttggtatag

SEQ ID NO: 94218 - DNA, 15 bp, Homo sapiens
cagaaccttggtata

SEQ ID NO: 94219 - DNA, 15 bp, Homo sapiens
acagaaccttggtat

SEQ ID NO: 94220 - DNA, 15 bp, Homo sapiens
gacagaaccttggta

SEQ ID NO: 94221 - DNA, 15 bp, Homo sapiens
tgacagaaccttggt

SEQ ID NO: 94222 - DNA, 15 bp, Homo sapiens
ttgacagaaccttgg

SEQ ID NO: 94223 - DNA, 15 bp, Homo sapiens
attgacagaaccttg

SEQ ID NO: 94224 - DNA, 15 bp, Homo sapiens
aattgacagaacctt

SEQ ID NO: 94225 - DNA, 15 bp, Homo sapiens
aaattgacagaacct

SEQ ID NO: 94226 - DNA, 15 bp, Homo sapiens
aaaattgacagaacc

SEQ ID NO: 94227 - DNA, 15 bp, Homo sapiens
taaaattgacagaac

SEQ ID NO: 94228 - DNA, 15 bp, Homo sapiens
ataaaattgacagaa

SEQ ID NO: 94229 - DNA, 15 bp, Homo sapiens
aataaaattgacaga

SEQ ID NO: 94230 - DNA, 15 bp, Homo sapiens
aaataaaattgacag

SEQ ID NO: 94231 - DNA, 15 bp, Homo sapiens
aaaataaaattgaca

SEQ ID NO: 94232 - DNA, 15 bp, Homo sapiens
taaaataaaattgac

SEQ ID NO: 94233 - DNA, 15 bp, Homo sapiens
tttaaaataaaattg

SEQ ID NO: 94234 - DNA, 15 bp, Homo sapiens
ttttaaaataaaatt

SEQ ID NO: 94235 - DNA, 15 bp, Homo sapiens
tttttaaaataaaat

SEQ ID NO: 94236 - DNA, 15 bp, Homo sapiens
gtttttaaaataaaa

SEQ ID NO: 94237 - DNA, 15 bp, Homo sapiens
tgtttttaaaataaa

SEQ ID NO: 94238 - DNA, 15 bp, Homo sapiens
gtgtttttaaaataa

SEQ ID NO: 94239 - DNA, 15 bp, Homo sapiens
ggtgtttttaaaata

SEQ ID NO: 94240 - DNA, 15 bp, Homo sapiens
tggtgtttttaaaat

SEQ ID NO: 94241 - DNA, 15 bp, Homo sapiens
atggtgtttttaaaa

SEQ ID NO: 94242 - DNA, 15 bp, Homo sapiens
catggtgtttttaaa

SEQ ID NO: 94243 - DNA, 15 bp, Homo sapiens
ccatggtgtttttaa

SEQ ID NO: 94244 - DNA, 15 bp, Homo sapiens
tccatggtgttttta

SEQ ID NO: 94245 - DNA, 15 bp, Homo sapiens
ctccatggtgttttt

SEQ ID NO: 94246 - DNA, 15 bp, Homo sapiens
tctccatggtgtttt

SEQ ID NO: 94247 - DNA, 15 bp, Homo sapiens
gtctccatggtgttt

SEQ ID NO: 94248 - DNA, 15 bp, Homo sapiens
agtctccatggtgtt

SEQ ID NO: 94249 - DNA, 15 bp, Homo sapiens
aagtctccatggtgt

SEQ ID NO: 94250 - DNA, 15 bp, Homo sapiens
gaagtctccatggtg

SEQ ID NO: 94251 - DNA, 15 bp, Homo sapiens
agaagtctccatggt

SEQ ID NO: 94252 - DNA, 15 bp, Homo sapiens
aagaagtctccatgg

SEQ ID NO: 94253 - DNA, 15 bp, Homo sapiens
taagaagtctccatg

SEQ ID NO: 94254 - DNA, 15 bp, Homo sapiens
ttaagaagtctccat

SEQ ID NO: 94255 - DNA, 15 bp, Homo sapiens
tttaagaagtctcca

SEQ ID NO: 94256 - DNA, 15 bp, Homo sapiens
ctttaagaagtctcc

SEQ ID NO: 94257 - DNA, 15 bp, Homo sapiens
tctttaagaagtctc

SEQ ID NO: 94258 - DNA, 15 bp, Homo sapiens
ttctttaagaagtct

SEQ ID NO: 94259 - DNA, 15 bp, Homo sapiens
attctttaagaagtc

SEQ ID NO: 94260 - DNA, 15 bp, Homo sapiens
aattctttaagaagt

SEQ ID NO: 94261 - DNA, 15 bp, Homo sapiens
gaattctttaagaag

SEQ ID NO: 94262 - DNA, 15 bp, Homo sapiens
agaattctttaagaa

SEQ ID NO: 94263 - DNA, 15 bp, Homo sapiens
aagaattctttaaga

SEQ ID NO: 94264 - DNA, 15 bp, Homo sapiens
taagaattctttaag

SEQ ID NO: 94265 - DNA, 15 bp, Homo sapiens
gtaagaattctttaa

SEQ ID NO: 94266 - DNA, 15 bp, Homo sapiens
agtaagaattcttta

SEQ ID NO: 94267 - DNA, 15 bp, Homo sapiens
cagtaagaattcttt

SEQ ID NO: 94268 - DNA, 15 bp, Homo sapiens
tcagtaagaattctt

SEQ ID NO: 94269 - DNA, 15 bp, Homo sapiens
ctcagtaagaattct

SEQ ID NO: 94270 - DNA, 15 bp, Homo sapiens
tctcagtaagaattc

SEQ ID NO: 94271 - DNA, 15 bp, Homo sapiens
ttctcagtaagaatt

SEQ ID NO: 94272 - DNA, 15 bp, Homo sapiens
attctcagtaagaat

SEQ ID NO: 94273 - DNA, 15 bp, Homo sapiens
aattctcagtaagaa

SEQ ID NO: 94274 - DNA, 15 bp, Homo sapiens
gaattctcagtaaga

SEQ ID NO: 94275 - DNA, 15 bp, Homo sapiens
agaattctcagtaag

SEQ ID NO: 94276 - DNA, 15 bp, Homo sapiens
aagaattctcagtaa

SEQ ID NO: 94277 - DNA, 15 bp, Homo sapiens
aaagaattctcagta

SEQ ID NO: 94278 - DNA, 15 bp, Homo sapiens
aaaagaattctcagt

SEQ ID NO: 94279 - DNA, 15 bp, Homo sapiens
caaaagaattctcag

SEQ ID NO: 94280 - DNA, 15 bp, Homo sapiens
acaaaagaattctca

SEQ ID NO: 94281 - DNA, 15 bp, Homo sapiens
cacaaaagaattctc

SEQ ID NO: 94282 - DNA, 15 bp, Homo sapiens
tcacaaaagaattct

SEQ ID NO: 94283 - DNA, 15 bp, Homo sapiens
atcacaaaagaattc

SEQ ID NO: 94284 - DNA, 15 bp, Homo sapiens
tatcacaaaagaatt

SEQ ID NO: 94285 - DNA, 15 bp, Homo sapiens
atatcacaaaagaat

SEQ ID NO: 94286 - DNA, 15 bp, Homo sapiens
catatcacaaaagaa

SEQ ID NO: 94287 - DNA, 15 bp, Homo sapiens
tcatatcacaaaaga

SEQ ID NO: 94288 - DNA, 15 bp, Homo sapiens
ttcatatcacaaaag

SEQ ID NO: 94289 - DNA, 15 bp, Homo sapiens
attcatatcacaaaa

SEQ ID NO: 94290 - DNA, 15 bp, Homo sapiens
aattcatatcacaaa

SEQ ID NO: 94291 - DNA, 15 bp, Homo sapiens
gaattcatatcacaa

SEQ ID NO: 94292 - DNA, 15 bp, Homo sapiens
ggaattcatatcaca

SEQ ID NO: 94293 - DNA, 15 bp, Homo sapiens
gggaattcatatcac

SEQ ID NO: 94294 - DNA, 15 bp, Homo sapiens
tgggaattcatatca

SEQ ID NO: 94295 - DNA, 15 bp, Homo sapiens
atgggaattcatatc

SEQ ID NO: 94296 - DNA, 15 bp, Homo sapiens
aatgggaattcatat

SEQ ID NO: 94297 - DNA, 15 bp, Homo sapiens
gaatgggaattcata

SEQ ID NO: 94298 - DNA, 15 bp, Homo sapiens
agaatgggaattcat

SEQ ID NO: 94299 - DNA, 15 bp, Homo sapiens
gagaatgggaattca

SEQ ID NO: 94300 - DNA, 15 bp, Homo sapiens
cgagaatgggaattc

SEQ ID NO: 94301 - DNA, 15 bp, Homo sapiens
tcgagaatgggaatt

SEQ ID NO: 94302 - DNA, 15 bp, Homo sapiens
ttcgagaatgggaat

SEQ ID NO: 94303 - DNA, 15 bp, Homo sapiens
attcgagaatgggaa

SEQ ID NO: 94304 - DNA, 15 bp, Homo sapiens
tattcgagaatggga

SEQ ID NO: 94305 - DNA, 15 bp, Homo sapiens
gtattcgagaatggg

SEQ ID NO: 94306 - DNA, 15 bp, Homo sapiens
tgtattcgagaatgg

SEQ ID NO: 94307 - DNA, 15 bp, Homo sapiens
atgtattcgagaatg

SEQ ID NO: 94308 - DNA, 15 bp, Homo sapiens
aatgtattcgagaat

SEQ ID NO: 94309 - DNA, 15 bp, Homo sapiens
caatgtattcgagaa

SEQ ID NO: 94310 - DNA, 15 bp, Homo sapiens
ccaatgtattcgaga

SEQ ID NO: 94311 - DNA, 15 bp, Homo sapiens
accaatgtattcgag

SEQ ID NO: 94312 - DNA, 15 bp, Homo sapiens
aaccaatgtattcga

SEQ ID NO: 94313 - DNA, 15 bp, Homo sapiens
aaaccaatgtattcg

SEQ ID NO: 94314 - DNA, 15 bp, Homo sapiens
aaaaccaatgtattc

SEQ ID NO: 94315 - DNA, 15 bp, Homo sapiens
taaaaccaatgtatt

SEQ ID NO: 94316 - DNA, 15 bp, Homo sapiens
ataaaaccaatgtat

SEQ ID NO: 94317 - DNA, 15 bp, Homo sapiens
tataaaaccaatgta

SEQ ID NO: 94318 - DNA, 15 bp, Homo sapiens
atataaaaccaatgt

SEQ ID NO: 94319 - DNA, 15 bp, Homo sapiens
catataaaaccaatg

SEQ ID NO: 94320 - DNA, 15 bp, Homo sapiens
gcatataaaaccaat

SEQ ID NO: 94321 - DNA, 15 bp, Homo sapiens
agcatataaaaccaa

SEQ ID NO: 94322 - DNA, 15 bp, Homo sapiens
aagcatataaaacca

SEQ ID NO: 94323 - DNA, 15 bp, Homo sapiens
taagcatataaaacc

SEQ ID NO: 94324 - DNA, 15 bp, Homo sapiens
gtaagcatataaaac

SEQ ID NO: 94325 - DNA, 15 bp, Homo sapiens
tgtaagcatataaaa

SEQ ID NO: 94326 - DNA, 15 bp, Homo sapiens
atgtaagcatataaa

SEQ ID NO: 94327 - DNA, 15 bp, Homo sapiens
aatgtaagcatataa

SEQ ID NO: 94328 - DNA, 15 bp, Homo sapiens
aaatgtaagcatata

SEQ ID NO: 94329 - DNA, 15 bp, Homo sapiens
taaatgtaagcatat

SEQ ID NO: 94330 - DNA, 15 bp, Homo sapiens
ataaatgtaagcata

SEQ ID NO: 94331 - DNA, 15 bp, Homo sapiens
cataaatgtaagcat

SEQ ID NO: 94332 - DNA, 15 bp, Homo sapiens
acataaatgtaagca

SEQ ID NO: 94333 - DNA, 15 bp, Homo sapiens
cacataaatgtaagc

SEQ ID NO: 94334 - DNA, 15 bp, Homo sapiens
acacataaatgtaag

SEQ ID NO: 94335 - DNA, 15 bp, Homo sapiens
aacacataaatgtaa

SEQ ID NO: 94336 - DNA, 15 bp, Homo sapiens
taacacataaatgta

SEQ ID NO: 94337 - DNA, 15 bp, Homo sapiens
ctaacacataaatgt

SEQ ID NO: 94338 - DNA, 15 bp, Homo sapiens
actaacacataaatg

SEQ ID NO: 94339 - DNA, 15 bp, Homo sapiens
aactaacacataaat

SEQ ID NO: 94340 - DNA, 15 bp, Homo sapiens
taactaacacataaa

SEQ ID NO: 94341 - DNA, 15 bp, Homo sapiens
ataactaacacataa

SEQ ID NO: 94342 - DNA, 15 bp, Homo sapiens
aataactaacacata

SEQ ID NO: 94343 - DNA, 15 bp, Homo sapiens
taataactaacacat

SEQ ID NO: 94344 - DNA, 15 bp, Homo sapiens
ttaataactaacaca

SEQ ID NO: 94345 - DNA, 15 bp, Homo sapiens
tttaataactaacac

SEQ ID NO: 94346 - DNA, 15 bp, Homo sapiens
ttttaataactaaca

SEQ ID NO: 94347 - DNA, 15 bp, Homo sapiens
gttttaataactaac

SEQ ID NO: 94348 - DNA, 15 bp, Homo sapiens
tgttttaataactaa

SEQ ID NO: 94349 - DNA, 15 bp, Homo sapiens
atgttttaataacta

SEQ ID NO: 94350 - DNA, 15 bp, Homo sapiens
tatgttttaataact

SEQ ID NO: 94351 - DNA, 15 bp, Homo sapiens
gtatgttttaataac

SEQ ID NO: 94352 - DNA, 15 bp, Homo sapiens
agtatgttttaataa

SEQ ID NO: 94353 - DNA, 15 bp, Homo sapiens
tagtatgttttaata

SEQ ID NO: 94354 - DNA, 15 bp, Homo sapiens
ttagtatgttttaat

SEQ ID NO: 94355 - DNA, 15 bp, Homo sapiens
attagtatgttttaa

SEQ ID NO: 94356 - DNA, 15 bp, Homo sapiens
tattagtatgtttta

SEQ ID NO: 94357 - DNA, 15 bp, Homo sapiens
atattagtatgtttt

SEQ ID NO: 94358 - DNA, 15 bp, Homo sapiens
aatattagtatgttt

SEQ ID NO: 94359 - DNA, 15 bp, Homo sapiens
caatattagtatgtt

SEQ ID NO: 94360 - DNA, 15 bp, Homo sapiens
acaatattagtatgt

SEQ ID NO: 94361 - DNA, 15 bp, Homo sapiens
tacaatattagtatg

SEQ ID NO: 94362 - DNA, 15 bp, Homo sapiens
atacaatattagtat

SEQ ID NO: 94363 - DNA, 15 bp, Homo sapiens
tatacaatattagta

SEQ ID NO: 94364 - DNA, 15 bp, Homo sapiens
atatacaatattagt

SEQ ID NO: 94365 - DNA, 15 bp, Homo sapiens
gatatacaatattag

SEQ ID NO: 94366 - DNA, 15 bp, Homo sapiens
agatatacaatatta

SEQ ID NO: 94367 - DNA, 15 bp, Homo sapiens
tagatatacaatatt

SEQ ID NO: 94368 - DNA, 15 bp, Homo sapiens
ctagatatacaatat

SEQ ID NO: 94369 - DNA, 15 bp, Homo sapiens
actagatatacaata

SEQ ID NO: 94370 - DNA, 15 bp, Homo sapiens
gactagatatacaat

SEQ ID NO: 94371 - DNA, 15 bp, Homo sapiens
tgactagatatacaa

SEQ ID NO: 94372 - DNA, 15 bp, Homo sapiens
ttgactagatataca

SEQ ID NO: 94373 - DNA, 15 bp, Homo sapiens
tttgactagatatac

SEQ ID NO: 94374 - DNA, 15 bp, Homo sapiens
ttttgactagatata

SEQ ID NO: 94375 - DNA, 15 bp, Homo sapiens
gttttgactagatat

SEQ ID NO: 94376 - DNA, 15 bp, Homo sapiens
agttttgactagata

SEQ ID NO: 94377 - DNA, 15 bp, Homo sapiens
cagttttgactagat

SEQ ID NO: 94378 - DNA, 15 bp, Homo sapiens
tcagttttgactaga

SEQ ID NO: 94379 - DNA, 15 bp, Homo sapiens
ctcagttttgactag

SEQ ID NO: 94380 - DNA, 15 bp, Homo sapiens
cctcagttttgacta

SEQ ID NO: 94381 - DNA, 15 bp, Homo sapiens
acctcagttttgact

SEQ ID NO: 94382 - DNA, 15 bp, Homo sapiens
tacctcagttttgac

SEQ ID NO: 94383 - DNA, 15 bp, Homo sapiens
ctacctcagttttga

SEQ ID NO: 94384 - DNA, 15 bp, Homo sapiens
tctacctcagttttg

SEQ ID NO: 94385 - DNA, 15 bp, Homo sapiens
ctctacctcagtttt

SEQ ID NO: 94386 - DNA, 15 bp, Homo sapiens
tctctacctcagttt

SEQ ID NO: 94387 - DNA, 15 bp, Homo sapiens
ctctctacctcagtt

SEQ ID NO: 94388 - DNA, 15 bp, Homo sapiens
tctctctacctcagt

SEQ ID NO: 94389 - DNA, 15 bp, Homo sapiens
ttctctctacctcag

SEQ ID NO: 94390 - DNA, 15 bp, Homo sapiens
attctctctacctca

SEQ ID NO: 94391 - DNA, 15 bp, Homo sapiens
tattctctctacctc

SEQ ID NO: 94392 - DNA, 15 bp, Homo sapiens
ttattctctctacct

SEQ ID NO: 94393 - DNA, 15 bp, Homo sapiens
tttattctctctacc

SEQ ID NO: 94394 - DNA, 15 bp, Homo sapiens
atttattctctctac

SEQ ID NO: 94395 - DNA, 15 bp, Homo sapiens
catttattctctcta

SEQ ID NO: 94396 - DNA, 15 bp, Homo sapiens
ccatttattctctct

SEQ ID NO: 94397 - DNA, 15 bp, Homo sapiens
accatttattctctc

SEQ ID NO: 94398 - DNA, 15 bp, Homo sapiens
aaccatttattctct

SEQ ID NO: 94399 - DNA, 15 bp, Homo sapiens
caaccatttattctc

SEQ ID NO: 94400 - DNA, 15 bp, Homo sapiens
tcaaccatttattct

SEQ ID NO: 94401 - DNA, 15 bp, Homo sapiens
atcaaccatttattc

SEQ ID NO: 94402 - DNA, 15 bp, Homo sapiens
aatcaaccatttatt

SEQ ID NO: 94403 - DNA, 15 bp, Homo sapiens
aaatcaaccatttat

SEQ ID NO: 94404 - DNA, 15 bp, Homo sapiens
aaaatcaaccattta

SEQ ID NO: 94405 - DNA, 15 bp, Homo sapiens
caaaatcaaccattt

SEQ ID NO: 94406 - DNA, 15 bp, Homo sapiens
tcaaaatcaaccatt

SEQ ID NO: 94407 - DNA, 15 bp, Homo sapiens
ctcaaaatcaaccat

SEQ ID NO: 94408 - DNA, 15 bp, Homo sapiens
actcaaaatcaacca

SEQ ID NO: 94409 - DNA, 15 bp, Homo sapiens
aactcaaaatcaacc

SEQ ID NO: 94410 - DNA, 15 bp, Homo sapiens
aaactcaaaatcaac

SEQ ID NO: 94411 - DNA, 15 bp, Homo sapiens
caaactcaaaatcaa

SEQ ID NO: 94412 - DNA, 15 bp, Homo sapiens
tcaaactcaaaatca

SEQ ID NO: 94413 - DNA, 15 bp, Homo sapiens
ctcaaactcaaaatc

SEQ ID NO: 94414 - DNA, 15 bp, Homo sapiens
actcaaactcaaaat

SEQ ID NO: 94415 - DNA, 15 bp, Homo sapiens
aactcaaactcaaaa

SEQ ID NO: 94416 - DNA, 15 bp, Homo sapiens
aaactcaaactcaaa

SEQ ID NO: 94417 - DNA, 15 bp, Homo sapiens
gaaactcaaactcaa

SEQ ID NO: 94418 - DNA, 15 bp, Homo sapiens
tgaaactcaaactca

SEQ ID NO: 94419 - DNA, 15 bp, Homo sapiens
atgaaactcaaactc

SEQ ID NO: 94420 - DNA, 15 bp, Homo sapiens
tatgaaactcaaact

SEQ ID NO: 94421 - DNA, 15 bp, Homo sapiens
ctatgaaactcaaac

SEQ ID NO: 94422 - DNA, 15 bp, Homo sapiens
actatgaaactcaaa

SEQ ID NO: 94423 - DNA, 15 bp, Homo sapiens
gactatgaaactcaa

SEQ ID NO: 94424 - DNA, 15 bp, Homo sapiens
ggactatgaaactca

SEQ ID NO: 94425 - DNA, 15 bp, Homo sapiens
tggactatgaaactc

SEQ ID NO: 94426 - DNA, 15 bp, Homo sapiens
ttggactatgaaact

SEQ ID NO: 94427 - DNA, 15 bp, Homo sapiens
tttggactatgaaac

SEQ ID NO: 94428 - DNA, 15 bp, Homo sapiens
ttttggactatgaaa

SEQ ID NO: 94429 - DNA, 15 bp, Homo sapiens
tttttggactatgaa

SEQ ID NO: 94430 - DNA, 15 bp, Homo sapiens
ctttttggactatga

SEQ ID NO: 94431 - DNA, 15 bp, Homo sapiens
gctttttggactatg

SEQ ID NO: 94432 - DNA, 15 bp, Homo sapiens
agctttttggactat

SEQ ID NO: 94433 - DNA, 15 bp, Homo sapiens
cagctttttggacta

SEQ ID NO: 94434 - DNA, 15 bp, Homo sapiens
tcagctttttggact

SEQ ID NO: 94435 - DNA, 15 bp, Homo sapiens
atcagctttttggac

SEQ ID NO: 94436 - DNA, 15 bp, Homo sapiens
tatcagctttttgga

SEQ ID NO: 94437 - DNA, 15 bp, Homo sapiens
atatcagctttttgg

SEQ ID NO: 94438 - DNA, 15 bp, Homo sapiens
tatatcagctttttg

SEQ ID NO: 94439 - DNA, 15 bp, Homo sapiens
atatatcagcttttt

SEQ ID NO: 94440 - DNA, 15 bp, Homo sapiens
aatatatcagctttt

SEQ ID NO: 94441 - DNA, 15 bp, Homo sapiens
caatatatcagcttt

SEQ ID NO: 94442 - DNA, 15 bp, Homo sapiens
gcaatatatcagctt

SEQ ID NO: 94443 - DNA, 15 bp, Homo sapiens
ggcaatatatcagct

SEQ ID NO: 94444 - DNA, 15 bp, Homo sapiens
aggcaatatatcagc

SEQ ID NO: 94445 - DNA, 15 bp, Homo sapiens
caggcaatatatcag

SEQ ID NO: 94446 - DNA, 15 bp, Homo sapiens
acaggcaatatatca

SEQ ID NO: 94447 - DNA, 15 bp, Homo sapiens
cacaggcaatatatc

SEQ ID NO: 94448 - DNA, 15 bp, Homo sapiens
acacaggcaatatat

SEQ ID NO: 94449 - DNA, 15 bp, Homo sapiens
aacacaggcaatata

SEQ ID NO: 94450 - DNA, 15 bp, Homo sapiens
gaacacaggcaatat

SEQ ID NO: 94451 - DNA, 15 bp, Homo sapiens
tgaacacaggcaata

SEQ ID NO: 94452 - DNA, 15 bp, Homo sapiens
ttgaacacaggcaat

SEQ ID NO: 94453 - DNA, 15 bp, Homo sapiens
cttgaacacaggcaa

SEQ ID NO: 94454 - DNA, 15 bp, Homo sapiens
tcttgaacacaggca

SEQ ID NO: 94455 - DNA, 15 bp, Homo sapiens
ctcttgaacacaggc

SEQ ID NO: 94456 - DNA, 15 bp, Homo sapiens
cctcttgaacacagg

SEQ ID NO: 94457 - DNA, 15 bp, Homo sapiens
ccctcttgaacacag

SEQ ID NO: 94458 - DNA, 15 bp, Homo sapiens
accctcttgaacaca

SEQ ID NO: 94459 - DNA, 15 bp, Homo sapiens
gaccctcttgaacac

SEQ ID NO: 94460 - DNA, 15 bp, Homo sapiens
agaccctcttgaaca

SEQ ID NO: 94461 - DNA, 15 bp, Homo sapiens
tagaccctcttgaac

SEQ ID NO: 94462 - DNA, 15 bp, Homo sapiens
atagaccctcttgaa

SEQ ID NO: 94463 - DNA, 15 bp, Homo sapiens
tatagaccctcttga

SEQ ID NO: 94464 - DNA, 15 bp, Homo sapiens
atatagaccctcttg

SEQ ID NO: 94465 - DNA, 15 bp, Homo sapiens
gatatagaccctctt

SEQ ID NO: 94466 - DNA, 15 bp, Homo sapiens
tgatatagaccctct

SEQ ID NO: 94467 - DNA, 15 bp, Homo sapiens
ctgatatagaccctc

SEQ ID NO: 94468 - DNA, 15 bp, Homo sapiens
gctgatatagaccct

SEQ ID NO: 94469 - DNA, 15 bp, Homo sapiens
ggctgatatagaccc

SEQ ID NO: 94470 - DNA, 15 bp, Homo sapiens
gggctgatatagacc

SEQ ID NO: 94471 - DNA, 15 bp, Homo sapiens
agggctgatatagac

SEQ ID NO: 94472 - DNA, 15 bp, Homo sapiens
gagggctgatataga

SEQ ID NO: 94473 - DNA, 15 bp, Homo sapiens
agagggctgatatag

SEQ ID NO: 94474 - DNA, 15 bp, Homo sapiens
tagagggctgatata

SEQ ID NO: 94475 - DNA, 15 bp, Homo sapiens
ctagagggctgatat

SEQ ID NO: 94476 - DNA, 15 bp, Homo sapiens
tctagagggctgata

SEQ ID NO: 94477 - DNA, 15 bp, Homo sapiens
atctagagggctgat

SEQ ID NO: 94478 - DNA, 15 bp, Homo sapiens
catctagagggctga

SEQ ID NO: 94479 - DNA, 15 bp, Homo sapiens
gcatctagagggctg

SEQ ID NO: 94480 - DNA, 15 bp, Homo sapiens
ggcatctagagggct

SEQ ID NO: 94481 - DNA, 15 bp, Homo sapiens
tggcatctagagggc

SEQ ID NO: 94482 - DNA, 15 bp, Homo sapiens
ctggcatctagaggg

SEQ ID NO: 94483 - DNA, 15 bp, Homo sapiens
gctggcatctagagg

SEQ ID NO: 94484 - DNA, 15 bp, Homo sapiens
tgctggcatctagag

SEQ ID NO: 94485 - DNA, 15 bp, Homo sapiens
atgctggcatctaga

SEQ ID NO: 94486 - DNA, 15 bp, Homo sapiens
gatgctggcatctag

SEQ ID NO: 94487 - DNA, 15 bp, Homo sapiens
agatgctggcatcta

SEQ ID NO: 94488 - DNA, 15 bp, Homo sapiens
gagatgctggcatct

SEQ ID NO: 94489 - DNA, 15 bp, Homo sapiens
ggagatgctggcatc

SEQ ID NO: 94490 - DNA, 15 bp, Homo sapiens
tggagatgctggcat

SEQ ID NO: 94491 - DNA, 15 bp, Homo sapiens
ttggagatgctggca

SEQ ID NO: 94492 - DNA, 15 bp, Homo sapiens
tttggagatgctggc

SEQ ID NO: 94493 - DNA, 15 bp, Homo sapiens
atttggagatgctgg

SEQ ID NO: 94494 - DNA, 15 bp, Homo sapiens
aatttggagatgctg

SEQ ID NO: 94495 - DNA, 15 bp, Homo sapiens
aaatttggagatgct

SEQ ID NO: 94496 - DNA, 15 bp, Homo sapiens
aaaatttggagatgc

SEQ ID NO: 94497 - DNA, 15 bp, Homo sapiens
taaaatttggagatg

SEQ ID NO: 94498 - DNA, 15 bp, Homo sapiens
gtaaaatttggagat

SEQ ID NO: 94499 - DNA, 15 bp, Homo sapiens
agtaaaatttggaga

SEQ ID NO: 94500 - DNA, 15 bp, Homo sapiens
aagtaaaatttggag

SEQ ID NO: 94501 - DNA, 15 bp, Homo sapiens
aaagtaaaatttgga

SEQ ID NO: 94502 - DNA, 15 bp, Homo sapiens
aaaagtaaaatttgg

SEQ ID NO: 94503 - DNA, 15 bp, Homo sapiens
aaaaagtaaaatttg

SEQ ID NO: 94504 - DNA, 15 bp, Homo sapiens
aaaaaagtaaaattt

SEQ ID NO: 94505 - DNA, 15 bp, Homo sapiens
caaaaaagtaaaatt

SEQ ID NO: 94506 - DNA, 15 bp, Homo sapiens
ccaaaaaagtaaaat

SEQ ID NO: 94507 - DNA, 15 bp, Homo sapiens
tccaaaaaagtaaaa

SEQ ID NO: 94508 - DNA, 15 bp, Homo sapiens
ttccaaaaaagtaaa

SEQ ID NO: 94509 - DNA, 15 bp, Homo sapiens
attccaaaaaagtaa

SEQ ID NO: 94510 - DNA, 15 bp, Homo sapiens
gattccaaaaaagta

SEQ ID NO: 94511 - DNA, 15 bp, Homo sapiens
agattccaaaaaagt

SEQ ID NO: 94512 - DNA, 15 bp, Homo sapiens
cagattccaaaaaag

SEQ ID NO: 94513 - DNA, 15 bp, Homo sapiens
acagattccaaaaaa

SEQ ID NO: 94514 - DNA, 15 bp, Homo sapiens
tacagattccaaaaa

SEQ ID NO: 94515 - DNA, 15 bp, Homo sapiens
gtacagattccaaaa

SEQ ID NO: 94516 - DNA, 15 bp, Homo sapiens
tgtacagattccaaa

SEQ ID NO: 94517 - DNA, 15 bp, Homo sapiens
ctgtacagattccaa

SEQ ID NO: 94518 - DNA, 15 bp, Homo sapiens
actgtacagattcca

SEQ ID NO: 94519 - DNA, 15 bp, Homo sapiens
tactgtacagattcc

SEQ ID NO: 94520 - DNA, 15 bp, Homo sapiens
atactgtacagattc

SEQ ID NO: 94521 - DNA, 15 bp, Homo sapiens
aatactgtacagatt

SEQ ID NO: 94522 - DNA, 15 bp, Homo sapiens
aaatactgtacagat

SEQ ID NO: 94523 - DNA, 15 bp, Homo sapiens
caaatactgtacaga

SEQ ID NO: 94524 - DNA, 15 bp, Homo sapiens
gcaaatactgtacag

SEQ ID NO: 94525 - DNA, 15 bp, Homo sapiens
tgcaaatactgtaca

SEQ ID NO: 94526 - DNA, 15 bp, Homo sapiens
ttgcaaatactgtac

SEQ ID NO: 94527 - DNA, 15 bp, Homo sapiens
attgcaaatactgta

SEQ ID NO: 94528 - DNA, 15 bp, Homo sapiens
tattgcaaatactgt

SEQ ID NO: 94529 - DNA, 15 bp, Homo sapiens
atattgcaaatactg

SEQ ID NO: 94530 - DNA, 15 bp, Homo sapiens
aatattgcaaatact

SEQ ID NO: 94531 - DNA, 15 bp, Homo sapiens
aaatattgcaaatac

SEQ ID NO: 94532 - DNA, 15 bp, Homo sapiens
aaaatattgcaaata

SEQ ID NO: 94533 - DNA, 15 bp, Homo sapiens
aaaaatattgcaaat

SEQ ID NO: 94534 - DNA, 15 bp, Homo sapiens
taaaaatattgcaaa

SEQ ID NO: 94535 - DNA, 15 bp, Homo sapiens
ataaaaatattgcaa

SEQ ID NO: 94536 - DNA, 15 bp, Homo sapiens
aataaaaatattgca

SEQ ID NO: 94537 - DNA, 15 bp, Homo sapiens
taataaaaatattgc

SEQ ID NO: 94538 - DNA, 15 bp, Homo sapiens
gtaataaaaatattg

SEQ ID NO: 94539 - DNA, 15 bp, Homo sapiens
tgtaataaaaatatt

SEQ ID NO: 94540 - DNA, 15 bp, Homo sapiens
ttgtaataaaaatat

SEQ ID NO: 94541 - DNA, 15 bp, Homo sapiens
tttgtaataaaaata

SEQ ID NO: 94542 - DNA, 15 bp, Homo sapiens
atttgtaataaaaat

SEQ ID NO: 94543 - DNA, 15 bp, Homo sapiens
aatttgtaataaaaa

SEQ ID NO: 94544 - DNA, 15 bp, Homo sapiens
aaatttgtaataaaa

SEQ ID NO: 94545 - DNA, 15 bp, Homo sapiens
gaaatttgtaataaa

SEQ ID NO: 94546 - DNA, 15 bp, Homo sapiens
agaaatttgtaataa

SEQ ID NO: 94547 - DNA, 15 bp, Homo sapiens
tagaaatttgtaata

SEQ ID NO: 94548 - DNA, 15 bp, Homo sapiens
gtagaaatttgtaat

SEQ ID NO: 94549 - DNA, 15 bp, Homo sapiens
agtagaaatttgtaa

SEQ ID NO: 94550 - DNA, 15 bp, Homo sapiens
gagtagaaatttgta

SEQ ID NO: 94551 - DNA, 15 bp, Homo sapiens
agagtagaaatttgt

SEQ ID NO: 94552 - DNA, 15 bp, Homo sapiens
cagagtagaaatttg

SEQ ID NO: 94553 - DNA, 15 bp, Homo sapiens
acagagtagaaattt

SEQ ID NO: 94554 - DNA, 15 bp, Homo sapiens
cacagagtagaaatt

SEQ ID NO: 94555 - DNA, 15 bp, Homo sapiens
ccacagagtagaaat

SEQ ID NO: 94556 - DNA, 15 bp, Homo sapiens
tccacagagtagaaa

SEQ ID NO: 94557 - DNA, 15 bp, Homo sapiens
ttccacagagtagaa

SEQ ID NO: 94558 - DNA, 15 bp, Homo sapiens
attccacagagtaga

SEQ ID NO: 94559 - DNA, 15 bp, Homo sapiens
aattccacagagtag

SEQ ID NO: 94560 - DNA, 15 bp, Homo sapiens
aaattccacagagta

SEQ ID NO: 94561 - DNA, 15 bp, Homo sapiens
taaattccacagagt

SEQ ID NO: 94562 - DNA, 15 bp, Homo sapiens
ttaaattccacagag

SEQ ID NO: 94563 - DNA, 15 bp, Homo sapiens
attaaattccacaga

SEQ ID NO: 94564 - DNA, 15 bp, Homo sapiens
aattaaattccacag

SEQ ID NO: 94565 - DNA, 15 bp, Homo sapiens
aaattaaattccaca

SEQ ID NO: 94566 - DNA, 15 bp, Homo sapiens
aaaattaaattccac

SEQ ID NO: 94567 - DNA, 15 bp, Homo sapiens
aaaaattaaattcca

SEQ ID NO: 94568 - DNA, 15 bp, Homo sapiens
taaaaattaaattcc

SEQ ID NO: 94569 - DNA, 15 bp, Homo sapiens
ttaaaaattaaattc

SEQ ID NO: 94570 - DNA, 15 bp, Homo sapiens
tttaaaaattaaatt

SEQ ID NO: 94571 - DNA, 15 bp, Homo sapiens
ttttaaaaattaaat

SEQ ID NO: 94572 - DNA, 15 bp, Homo sapiens
attttaaaaattaaa

SEQ ID NO: 94573 - DNA, 15 bp, Homo sapiens
tattttaaaaattaa

SEQ ID NO: 94574 - DNA, 15 bp, Homo sapiens
gtattttaaaaatta

SEQ ID NO: 94575 - DNA, 15 bp, Homo sapiens
ggtattttaaaaatt

SEQ ID NO: 94576 - DNA, 15 bp, Homo sapiens
aggtattttaaaaat

SEQ ID NO: 94577 - DNA, 15 bp, Homo sapiens
caggtattttaaaaa

SEQ ID NO: 94578 - DNA, 15 bp, Homo sapiens
gcaggtattttaaaa

SEQ ID NO: 94579 - DNA, 15 bp, Homo sapiens
tgcaggtattttaaa

SEQ ID NO: 94580 - DNA, 15 bp, Homo sapiens
ttgcaggtattttaa

SEQ ID NO: 94581 - DNA, 15 bp, Homo sapiens
attgcaggtatttta

SEQ ID NO: 94582 - DNA, 15 bp, Homo sapiens
tattgcaggtatttt

SEQ ID NO: 94583 - DNA, 15 bp, Homo sapiens
gtattgcaggtattt

SEQ ID NO: 94584 - DNA, 15 bp, Homo sapiens
tgtattgcaggtatt

SEQ ID NO: 94585 - DNA, 15 bp, Homo sapiens
atgtattgcaggtat

SEQ ID NO: 94586 - DNA, 15 bp, Homo sapiens
tatgtattgcaggta

SEQ ID NO: 94587 - DNA, 15 bp, Homo sapiens
atatgtattgcaggt

SEQ ID NO: 94588 - DNA, 15 bp, Homo sapiens
tatatgtattgcagg

SEQ ID NO: 94589 - DNA, 15 bp, Homo sapiens
atatatgtattgcag

SEQ ID NO: 94590 - DNA, 15 bp, Homo sapiens
tatatatgtattgca

SEQ ID NO: 94591 - DNA, 15 bp, Homo sapiens
atatatatgtattgc

SEQ ID NO: 94592 - DNA, 15 bp, Homo sapiens
catatatatgtattg

SEQ ID NO: 94593 - DNA, 15 bp, Homo sapiens
acatatatatgtatt

SEQ ID NO: 94594 - DNA, 15 bp, Homo sapiens
aacatatatatgtat

SEQ ID NO: 94595 - DNA, 15 bp, Homo sapiens
caacatatatatgta

SEQ ID NO: 94596 - DNA, 15 bp, Homo sapiens
tcaacatatatatgt

SEQ ID NO: 94597 - DNA, 15 bp, Homo sapiens
ttcaacatatatatg

SEQ ID NO: 94598 - DNA, 15 bp, Homo sapiens
attcaacatatatat

SEQ ID NO: 94599 - DNA, 15 bp, Homo sapiens
tattcaacatatata

SEQ ID NO: 94600 - DNA, 15 bp, Homo sapiens
ctattcaacatatat

SEQ ID NO: 94601 - DNA, 15 bp, Homo sapiens
tctattcaacatata

SEQ ID NO: 94602 - DNA, 15 bp, Homo sapiens
atctattcaacatat

SEQ ID NO: 94603 - DNA, 15 bp, Homo sapiens
catctattcaacata

SEQ ID NO: 94604 - DNA, 15 bp, Homo sapiens
tcatctattcaacat

SEQ ID NO: 94605 - DNA, 15 bp, Homo sapiens
ttcatctattcaaca

SEQ ID NO: 94606 - DNA, 15 bp, Homo sapiens
tttcatctattcaac

SEQ ID NO: 94607 - DNA, 15 bp, Homo sapiens
ttttcatctattcaa

SEQ ID NO: 94608 - DNA, 15 bp, Homo sapiens
tttttcatctattca

SEQ ID NO: 94609 - DNA, 15 bp, Homo sapiens
atttttcatctattc

SEQ ID NO: 94610 - DNA, 15 bp, Homo sapiens
aatttttcatctatt

SEQ ID NO: 94611 - DNA, 15 bp, Homo sapiens
taatttttcatctat

SEQ ID NO: 94612 - DNA, 15 bp, Homo sapiens
ataatttttcatcta

SEQ ID NO: 94613 - DNA, 15 bp, Homo sapiens
cataatttttcatct

SEQ ID NO: 94614 - DNA, 15 bp, Homo sapiens
acataatttttcatc

SEQ ID NO: 94615 - DNA, 15 bp, Homo sapiens
tacataatttttcat

SEQ ID NO: 94616 - DNA, 15 bp, Homo sapiens
ctacataatttttca

SEQ ID NO: 94617 - DNA, 15 bp, Homo sapiens
tctacataatttttc

SEQ ID NO: 94618 - DNA, 15 bp, Homo sapiens
atctacataattttt

SEQ ID NO: 94619 - DNA, 15 bp, Homo sapiens
tatctacataatttt

SEQ ID NO: 94620 - DNA, 15 bp, Homo sapiens
ttatctacataattt

SEQ ID NO: 94621 - DNA, 15 bp, Homo sapiens
attatctacataatt

SEQ ID NO: 94622 - DNA, 15 bp, Homo sapiens
tattatctacataat

SEQ ID NO: 94623 - DNA, 15 bp, Homo sapiens
ttattatctacataa

SEQ ID NO: 94624 - DNA, 15 bp, Homo sapiens
attattatctacata

SEQ ID NO: 94625 - DNA, 15 bp, Homo sapiens
cattattatctacat

SEQ ID NO: 94626 - DNA, 15 bp, Homo sapiens
tcattattatctaca

SEQ ID NO: 94627 - DNA, 15 bp, Homo sapiens
ttcattattatctac

SEQ ID NO: 94628 - DNA, 15 bp, Homo sapiens
attcattattatcta

SEQ ID NO: 94629 - DNA, 15 bp, Homo sapiens
cattcattattatct

SEQ ID NO: 94630 - DNA, 15 bp, Homo sapiens
tcattcattattatc

SEQ ID NO: 94631 - DNA, 15 bp, Homo sapiens
atcattcattattat

SEQ ID NO: 94632 - DNA, 15 bp, Homo sapiens
tatcattcattatta

SEQ ID NO: 94633 - DNA, 15 bp, Homo sapiens
gtatcattcattatt

SEQ ID NO: 94634 - DNA, 15 bp, Homo sapiens
cgtatcattcattat

SEQ ID NO: 94635 - DNA, 15 bp, Homo sapiens
ccgtatcattcatta

SEQ ID NO: 94636 - DNA, 15 bp, Homo sapiens
accgtatcattcatt

SEQ ID NO: 94637 - DNA, 15 bp, Homo sapiens
aaccgtatcattcat

SEQ ID NO: 94638 - DNA, 15 bp, Homo sapiens
gaaccgtatcattca

SEQ ID NO: 94639 - DNA, 15 bp, Homo sapiens
agaaccgtatcattc

SEQ ID NO: 94640 - DNA, 15 bp, Homo sapiens
tagaaccgtatcatt

SEQ ID NO: 94641 - DNA, 15 bp, Homo sapiens
ttagaaccgtatcat

SEQ ID NO: 94642 - DNA, 15 bp, Homo sapiens
tttagaaccgtatca

SEQ ID NO: 94643 - DNA, 15 bp, Homo sapiens
ttttagaaccgtatc

SEQ ID NO: 94644 - DNA, 15 bp, Homo sapiens
tttttagaaccgtat

SEQ ID NO: 94645 - DNA, 15 bp, Homo sapiens
ctttttagaaccgta

SEQ ID NO: 94646 - DNA, 15 bp, Homo sapiens
tctttttagaaccgt

SEQ ID NO: 94647 - DNA, 15 bp, Homo sapiens
gtctttttagaaccg

SEQ ID NO: 94648 - DNA, 15 bp, Homo sapiens
tgtctttttagaacc

SEQ ID NO: 94649 - DNA, 15 bp, Homo sapiens
ctgtctttttagaac

SEQ ID NO: 94650 - DNA, 15 bp, Homo sapiens
cctgtctttttagaa

SEQ ID NO: 94651 - DNA, 15 bp, Homo sapiens
acctgtctttttaga

SEQ ID NO: 94652 - DNA, 15 bp, Homo sapiens
aacctgtctttttag

SEQ ID NO: 94653 - DNA, 15 bp, Homo sapiens
taacctgtcttttta

SEQ ID NO: 94654 - DNA, 15 bp, Homo sapiens
ttaacctgtcttttt

SEQ ID NO: 94655 - DNA, 15 bp, Homo sapiens
tttaacctgtctttt

SEQ ID NO: 94656 - DNA, 15 bp, Homo sapiens
ttttaacctgtcttt

SEQ ID NO: 94657 - DNA, 15 bp, Homo sapiens
tttttaacctgtctt

SEQ ID NO: 94658 - DNA, 15 bp, Homo sapiens
ctttttaacctgtct

SEQ ID NO: 94659 - DNA, 15 bp, Homo sapiens
actttttaacctgtc

SEQ ID NO: 94660 - DNA, 15 bp, Homo sapiens
tactttttaacctgt

SEQ ID NO: 94661 - DNA, 15 bp, Homo sapiens
ttactttttaacctg

SEQ ID NO: 94662 - DNA, 15 bp, Homo sapiens
cttactttttaacct

SEQ ID NO: 94663 - DNA, 15 bp, Homo sapiens
acttactttttaacc

SEQ ID NO: 94664 - DNA, 15 bp, Homo sapiens
aacttactttttaac

SEQ ID NO: 94665 - DNA, 15 bp, Homo sapiens
gaacttactttttaa

SEQ ID NO: 94666 - DNA, 15 bp, Homo sapiens
tgaacttacttttta

SEQ ID NO: 94667 - DNA, 15 bp, Homo sapiens
gtgaacttacttttt

SEQ ID NO: 94668 - DNA, 15 bp, Homo sapiens
agtgaacttactttt

SEQ ID NO: 94669 - DNA, 15 bp, Homo sapiens
aagtgaacttacttt

SEQ ID NO: 94670 - DNA, 15 bp, Homo sapiens
aaagtgaacttactt

SEQ ID NO: 94671 - DNA, 15 bp, Homo sapiens
aaaagtgaacttact

SEQ ID NO: 94672 - DNA, 15 bp, Homo sapiens
taaaagtgaacttac

SEQ ID NO: 94673 - DNA, 15 bp, Homo sapiens
ataaaagtgaactta

SEQ ID NO: 94674 - DNA, 15 bp, Homo sapiens
aataaaagtgaactt

SEQ ID NO: 94675 - DNA, 15 bp, Homo sapiens
aaataaaagtgaact

SEQ ID NO: 94676 - DNA, 15 bp, Homo sapiens
aaaataaaagtgaac

SEQ ID NO: 94677 - DNA, 15 bp, Homo sapiens
caaaataaaagtgaa

SEQ ID NO: 94678 - DNA, 15 bp, Homo sapiens
tcaaaataaaagtga

SEQ ID NO: 94679 - DNA, 15 bp, Homo sapiens
ctcaaaataaaagtg

SEQ ID NO: 94680 - DNA, 15 bp, Homo sapiens
gctcaaaataaaagt

SEQ ID NO: 94681 - DNA, 15 bp, Homo sapiens
agctcaaaataaaag

SEQ ID NO: 94682 - DNA, 15 bp, Homo sapiens
aagctcaaaataaaa

SEQ ID NO: 94683 - DNA, 15 bp, Homo sapiens
gaagctcaaaataaa

SEQ ID NO: 94684 - DNA, 15 bp, Homo sapiens
tgaagctcaaaataa

SEQ ID NO: 94685 - DNA, 15 bp, Homo sapiens
ctgaagctcaaaata

SEQ ID NO: 94686 - DNA, 15 bp, Homo sapiens
tctgaagctcaaaat

SEQ ID NO: 94687 - DNA, 15 bp, Homo sapiens
ttctgaagctcaaaa

SEQ ID NO: 94688 - DNA, 15 bp, Homo sapiens
attctgaagctcaaa

SEQ ID NO: 94689 - DNA, 15 bp, Homo sapiens
gattctgaagctcaa

SEQ ID NO: 94690 - DNA, 15 bp, Homo sapiens
tgattctgaagctca

SEQ ID NO: 94691 - DNA, 15 bp, Homo sapiens
atgattctgaagctc

SEQ ID NO: 94692 - DNA, 15 bp, Homo sapiens
aatgattctgaagct

SEQ ID NO: 94693 - DNA, 15 bp, Homo sapiens
gaatgattctgaagc

SEQ ID NO: 94694 - DNA, 15 bp, Homo sapiens
tgaatgattctgaag

SEQ ID NO: 94695 - DNA, 15 bp, Homo sapiens
ctgaatgattctgaa

SEQ ID NO: 94696 - DNA, 15 bp, Homo sapiens
tctgaatgattctga

SEQ ID NO: 94697 - DNA, 15 bp, Homo sapiens
ttctgaatgattctg

SEQ ID NO: 94698 - DNA, 15 bp, Homo sapiens
cttctgaatgattct

SEQ ID NO: 94699 - DNA, 15 bp, Homo sapiens
gcttctgaatgattc

SEQ ID NO: 94700 - DNA, 15 bp, Homo sapiens
ggcttctgaatgatt

SEQ ID NO: 94701 - DNA, 15 bp, Homo sapiens
tggcttctgaatgat

SEQ ID NO: 94702 - DNA, 15 bp, Homo sapiens
ctggcttctgaatga

SEQ ID NO: 94703 - DNA, 15 bp, Homo sapiens
actggcttctgaatg

SEQ ID NO: 94704 - DNA, 15 bp, Homo sapiens
gactggcttctgaat

SEQ ID NO: 94705 - DNA, 15 bp, Homo sapiens
cgactggcttctgaa

SEQ ID NO: 94706 - DNA, 15 bp, Homo sapiens
gcgactggcttctga

SEQ ID NO: 94707 - DNA, 15 bp, Homo sapiens
ggcgactggcttctg

SEQ ID NO: 94708 - DNA, 15 bp, Homo sapiens
tggcgactggcttct

SEQ ID NO: 94709 - DNA, 15 bp, Homo sapiens
gtggcgactggcttc

SEQ ID NO: 94710 - DNA, 15 bp, Homo sapiens
tgtggcgactggctt

SEQ ID NO: 94711 - DNA, 15 bp, Homo sapiens
ttgtggcgactggct

SEQ ID NO: 94712 - DNA, 15 bp, Homo sapiens
tttgtggcgactggc

SEQ ID NO: 94713 - DNA, 15 bp, Homo sapiens
gtttgtggcgactgg

SEQ ID NO: 94714 - DNA, 15 bp, Homo sapiens
cgtttgtggcgactg

SEQ ID NO: 94715 - DNA, 15 bp, Homo sapiens
gcgtttgtggcgact

SEQ ID NO: 94716 - DNA, 15 bp, Homo sapiens
tgcgtttgtggcgac

SEQ ID NO: 94717 - DNA, 15 bp, Homo sapiens
ctgcgtttgtggcga

SEQ ID NO: 94718 - DNA, 15 bp, Homo sapiens
tctgcgtttgtggcg

SEQ ID NO: 94719 - DNA, 15 bp, Homo sapiens
gtctgcgtttgtggc

SEQ ID NO: 94720 - DNA, 15 bp, Homo sapiens
ggtctgcgtttgtgg

SEQ ID NO: 94721 - DNA, 15 bp, Homo sapiens
tggtctgcgtttgtg

SEQ ID NO: 94722 - DNA, 15 bp, Homo sapiens
ttggtctgcgtttgt

SEQ ID NO: 94723 - DNA, 15 bp, Homo sapiens
cttggtctgcgtttg

SEQ ID NO: 94724 - DNA, 15 bp, Homo sapiens
ccttggtctgcgttt

SEQ ID NO: 94725 - DNA, 15 bp, Homo sapiens
gccttggtctgcgtt

SEQ ID NO: 94726 - DNA, 15 bp, Homo sapiens
agccttggtctgcgt

SEQ ID NO: 94727 - DNA, 15 bp, Homo sapiens
gagccttggtctgcg

SEQ ID NO: 94728 - DNA, 15 bp, Homo sapiens
agagccttggtctgc

SEQ ID NO: 94729 - DNA, 15 bp, Homo sapiens
aagagccttggtctg

SEQ ID NO: 94730 - DNA, 15 bp, Homo sapiens
caagagccttggtct

SEQ ID NO: 94731 - DNA, 15 bp, Homo sapiens
ccaagagccttggtc

SEQ ID NO: 94732 - DNA, 15 bp, Homo sapiens
gccaagagccttggt

SEQ ID NO: 94733 - DNA, 15 bp, Homo sapiens
tgccaagagccttgg

SEQ ID NO: 94734 - DNA, 15 bp, Homo sapiens
gtgccaagagccttg

SEQ ID NO: 94735 - DNA, 15 bp, Homo sapiens
tgtgccaagagcctt

SEQ ID NO: 94736 - DNA, 15 bp, Homo sapiens
atgtgccaagagcct

SEQ ID NO: 94737 - DNA, 15 bp, Homo sapiens
gatgtgccaagagcc

SEQ ID NO: 94738 - DNA, 15 bp, Homo sapiens
tgatgtgccaagagc

SEQ ID NO: 94739 - DNA, 15 bp, Homo sapiens
ttgatgtgccaagag

SEQ ID NO: 94740 - DNA, 15 bp, Homo sapiens
tttgatgtgccaaga

SEQ ID NO: 94741 - DNA, 15 bp, Homo sapiens
atttgatgtgccaag

SEQ ID NO: 94742 - DNA, 15 bp, Homo sapiens
tatttgatgtgccaa

SEQ ID NO: 94743 - DNA, 15 bp, Homo sapiens
atatttgatgtgcca

SEQ ID NO: 94744 - DNA, 15 bp, Homo sapiens
catatttgatgtgcc

SEQ ID NO: 94745 - DNA, 15 bp, Homo sapiens
gcatatttgatgtgc

SEQ ID NO: 94746 - DNA, 15 bp, Homo sapiens
ggcatatttgatgtg

SEQ ID NO: 94747 - DNA, 15 bp, Homo sapiens
aggcatatttgatgt

SEQ ID NO: 94748 - DNA, 15 bp, Homo sapiens
taggcatatttgatg

SEQ ID NO: 94749 - DNA, 15 bp, Homo sapiens
ataggcatatttgat

SEQ ID NO: 94750 - DNA, 15 bp, Homo sapiens
cataggcatatttga

SEQ ID NO: 94751 - DNA, 15 bp, Homo sapiens
ccataggcatatttg

SEQ ID NO: 94752 - DNA, 15 bp, Homo sapiens
gccataggcatattt

SEQ ID NO: 94753 - DNA, 15 bp, Homo sapiens
agccataggcatatt

SEQ ID NO: 94754 - DNA, 15 bp, Homo sapiens
aagccataggcatat

SEQ ID NO: 94755 - DNA, 15 bp, Homo sapiens
taagccataggcata

SEQ ID NO: 94756 - DNA, 15 bp, Homo sapiens
ctaagccataggcat

SEQ ID NO: 94757 - DNA, 15 bp, Homo sapiens
cctaagccataggca

SEQ ID NO: 94758 - DNA, 15 bp, Homo sapiens
ccctaagccataggc

SEQ ID NO: 94759 - DNA, 15 bp, Homo sapiens
accctaagccatagg

SEQ ID NO: 94760 - DNA, 15 bp, Homo sapiens
aaccctaagccatag

SEQ ID NO: 94761 - DNA, 15 bp, Homo sapiens
taaccctaagccata

SEQ ID NO: 94762 - DNA, 15 bp, Homo sapiens
ataaccctaagccat

SEQ ID NO: 94763 - DNA, 15 bp, Homo sapiens
aataaccctaagcca

SEQ ID NO: 94764 - DNA, 15 bp, Homo sapiens
caataaccctaagcc

SEQ ID NO: 94765 - DNA, 15 bp, Homo sapiens
tcaataaccctaagc

SEQ ID NO: 94766 - DNA, 15 bp, Homo sapiens
gtcaataaccctaag

SEQ ID NO: 94767 - DNA, 15 bp, Homo sapiens
tgtcaataaccctaa

SEQ ID NO: 94768 - DNA, 15 bp, Homo sapiens
ttgtcaataacccta

SEQ ID NO: 94769 - DNA, 15 bp, Homo sapiens
cttgtcaataaccct

SEQ ID NO: 94770 - DNA, 15 bp, Homo sapiens
acttgtcaataaccc

SEQ ID NO: 94771 - DNA, 15 bp, Homo sapiens
gacttgtcaataacc

SEQ ID NO: 94772 - DNA, 15 bp, Homo sapiens
agacttgtcaataac

SEQ ID NO: 94773 - DNA, 15 bp, Homo sapiens
aagacttgtcaataa

SEQ ID NO: 94774 - DNA, 15 bp, Homo sapiens
taagacttgtcaata

SEQ ID NO: 94775 - DNA, 15 bp, Homo sapiens
ataagacttgtcaat

SEQ ID NO: 94776 - DNA, 15 bp, Homo sapiens
cataagacttgtcaa

SEQ ID NO: 94777 - DNA, 15 bp, Homo sapiens
acataagacttgtca

SEQ ID NO: 94778 - DNA, 15 bp, Homo sapiens
aacataagacttgtc

SEQ ID NO: 94779 - DNA, 15 bp, Homo sapiens
caacataagacttgt

SEQ ID NO: 94780 - DNA, 15 bp, Homo sapiens
gcaacataagacttg

SEQ ID NO: 94781 - DNA, 15 bp, Homo sapiens
tgcaacataagactt

SEQ ID NO: 94782 - DNA, 15 bp, Homo sapiens
ctgcaacataagact

SEQ ID NO: 94783 - DNA, 15 bp, Homo sapiens
actgcaacataagac

SEQ ID NO: 94784 - DNA, 15 bp, Homo sapiens
cactgcaacataaga

SEQ ID NO: 94785 - DNA, 15 bp, Homo sapiens
acactgcaacataag

SEQ ID NO: 94786 - DNA, 15 bp, Homo sapiens
tacactgcaacataa

SEQ ID NO: 94787 - DNA, 15 bp, Homo sapiens
atacactgcaacata

SEQ ID NO: 94788 - DNA, 15 bp, Homo sapiens
catacactgcaacat

SEQ ID NO: 94789 - DNA, 15 bp, Homo sapiens
acatacactgcaaca

SEQ ID NO: 94790 - DNA, 15 bp, Homo sapiens
cacatacactgcaac

SEQ ID NO: 94791 - DNA, 15 bp, Homo sapiens
ccacatacactgcaa

SEQ ID NO: 94792 - DNA, 15 bp, Homo sapiens
accacatacactgca

SEQ ID NO: 94793 - DNA, 15 bp, Homo sapiens
aaccacatacactgc

SEQ ID NO: 94794 - DNA, 15 bp, Homo sapiens
aaaccacatacactg

SEQ ID NO: 94795 - DNA, 15 bp, Homo sapiens
taaaccacatacact

SEQ ID NO: 94796 - DNA, 15 bp, Homo sapiens
ataaaccacatacac

SEQ ID NO: 94797 - DNA, 15 bp, Homo sapiens
tataaaccacataca

SEQ ID NO: 94798 - DNA, 15 bp, Homo sapiens
ctataaaccacatac

SEQ ID NO: 94799 - DNA, 15 bp, Homo sapiens
actataaaccacata

SEQ ID NO: 94800 - DNA, 15 bp, Homo sapiens
gactataaaccacat

SEQ ID NO: 94801 - DNA, 15 bp, Homo sapiens
ggactataaaccaca

SEQ ID NO: 94802 - DNA, 15 bp, Homo sapiens
aggactataaaccac

SEQ ID NO: 94803 - DNA, 15 bp, Homo sapiens
caggactataaacca

SEQ ID NO: 94804 - DNA, 15 bp, Homo sapiens
gcaggactataaacc

SEQ ID NO: 94805 - DNA, 15 bp, Homo sapiens
ggcaggactataaac

SEQ ID NO: 94806 - DNA, 15 bp, Homo sapiens
aggcaggactataaa

SEQ ID NO: 94807 - DNA, 15 bp, Homo sapiens
aaggcaggactataa

SEQ ID NO: 94808 - DNA, 15 bp, Homo sapiens
gaaggcaggactata

SEQ ID NO: 94809 - DNA, 15 bp, Homo sapiens
ggaaggcaggactat

SEQ ID NO: 94810 - DNA, 15 bp, Homo sapiens
tggaaggcaggacta

SEQ ID NO: 94811 - DNA, 15 bp, Homo sapiens
gtggaaggcaggact

SEQ ID NO: 94812 - DNA, 15 bp, Homo sapiens
tgtggaaggcaggac

SEQ ID NO: 94813 - DNA, 15 bp, Homo sapiens
ctgtggaaggcagga

SEQ ID NO: 94814 - DNA, 15 bp, Homo sapiens
actgtggaaggcagg

SEQ ID NO: 94815 - DNA, 15 bp, Homo sapiens
aactgtggaaggcag

SEQ ID NO: 94816 - DNA, 15 bp, Homo sapiens
caactgtggaaggca

SEQ ID NO: 94817 - DNA, 15 bp, Homo sapiens
gcaactgtggaaggc

SEQ ID NO: 94818 - DNA, 15 bp, Homo sapiens
agcaactgtggaagg

SEQ ID NO: 94819 - DNA, 15 bp, Homo sapiens
aagcaactgtggaag

SEQ ID NO: 94820 - DNA, 15 bp, Homo sapiens
caagcaactgtggaa

SEQ ID NO: 94821 - DNA, 15 bp, Homo sapiens
ccaagcaactgtgga

SEQ ID NO: 94822 - DNA, 15 bp, Homo sapiens
cccaagcaactgtgg

SEQ ID NO: 94823 - DNA, 15 bp, Homo sapiens
tcccaagcaactgtg

SEQ ID NO: 94824 - DNA, 15 bp, Homo sapiens
ctcccaagcaactgt

SEQ ID NO: 94825 - DNA, 15 bp, Homo sapiens
tctcccaagcaactg

SEQ ID NO: 94826 - DNA, 15 bp, Homo sapiens
ctctcccaagcaact

SEQ ID NO: 94827 - DNA, 15 bp, Homo sapiens
gctctcccaagcaac

SEQ ID NO: 94828 - DNA, 15 bp, Homo sapiens
agctctcccaagcaa

SEQ ID NO: 94829 - DNA, 15 bp, Homo sapiens
cagctctcccaagca

SEQ ID NO: 94830 - DNA, 15 bp, Homo sapiens
acagctctcccaagc

SEQ ID NO: 94831 - DNA, 15 bp, Homo sapiens
cacagctctcccaag

SEQ ID NO: 94832 - DNA, 15 bp, Homo sapiens
tcacagctctcccaa

SEQ ID NO: 94833 - DNA, 15 bp, Homo sapiens
ctcacagctctccca

SEQ ID NO: 94834 - DNA, 15 bp, Homo sapiens
actcacagctctccc

SEQ ID NO: 94835 - DNA, 15 bp, Homo sapiens
gactcacagctctcc

SEQ ID NO: 94836 - DNA, 15 bp, Homo sapiens
tgactcacagctctc

SEQ ID NO: 94837 - DNA, 15 bp, Homo sapiens
gtgactcacagctct

SEQ ID NO: 94838 - DNA, 15 bp, Homo sapiens
agtgactcacagctc

SEQ ID NO: 94839 - DNA, 15 bp, Homo sapiens
cagtgactcacagct

SEQ ID NO: 94840 - DNA, 15 bp, Homo sapiens
tcagtgactcacagc

SEQ ID NO: 94841 - DNA, 15 bp, Homo sapiens
ctcagtgactcacag

SEQ ID NO: 94842 - DNA, 15 bp, Homo sapiens
cctcagtgactcaca

SEQ ID NO: 94843 - DNA, 15 bp, Homo sapiens
gcctcagtgactcac

SEQ ID NO: 94844 - DNA, 15 bp, Homo sapiens
agcctcagtgactca

SEQ ID NO: 94845 - DNA, 15 bp, Homo sapiens
aagcctcagtgactc

SEQ ID NO: 94846 - DNA, 15 bp, Homo sapiens
taagcctcagtgact

SEQ ID NO: 94847 - DNA, 15 bp, Homo sapiens
ataagcctcagtgac

SEQ ID NO: 94848 - DNA, 15 bp, Homo sapiens
cataagcctcagtga

SEQ ID NO: 94849 - DNA, 15 bp, Homo sapiens
tcataagcctcagtg

SEQ ID NO: 94850 - DNA, 15 bp, Homo sapiens
ttcataagcctcagt

SEQ ID NO: 94851 - DNA, 15 bp, Homo sapiens
attcataagcctcag

SEQ ID NO: 94852 - DNA, 15 bp, Homo sapiens
cattcataagcctca

SEQ ID NO: 94853 - DNA, 15 bp, Homo sapiens
acattcataagcctc

SEQ ID NO: 94854 - DNA, 15 bp, Homo sapiens
aacattcataagcct

SEQ ID NO: 94855 - DNA, 15 bp, Homo sapiens
aaacattcataagcc

SEQ ID NO: 94856 - DNA, 15 bp, Homo sapiens
taaacattcataagc

SEQ ID NO: 94857 - DNA, 15 bp, Homo sapiens
gtaaacattcataag

SEQ ID NO: 94858 - DNA, 15 bp, Homo sapiens
tgtaaacattcataa

SEQ ID NO: 94859 - DNA, 15 bp, Homo sapiens
atgtaaacattcata

SEQ ID NO: 94860 - DNA, 15 bp, Homo sapiens
aatgtaaacattcat

SEQ ID NO: 94861 - DNA, 15 bp, Homo sapiens
aaatgtaaacattca

SEQ ID NO: 94862 - DNA, 15 bp, Homo sapiens
aaaatgtaaacattc

SEQ ID NO: 94863 - DNA, 15 bp, Homo sapiens
caaaatgtaaacatt

SEQ ID NO: 94864 - DNA, 15 bp, Homo sapiens
acaaaatgtaaacat

SEQ ID NO: 94865 - DNA, 15 bp, Homo sapiens
aacaaaatgtaaaca

SEQ ID NO: 94866 - DNA, 15 bp, Homo sapiens
aaacaaaatgtaaac

SEQ ID NO: 94867 - DNA, 15 bp, Homo sapiens
caaacaaaatgtaaa

SEQ ID NO: 94868 - DNA, 15 bp, Homo sapiens
acaaacaaaatgtaa

SEQ ID NO: 94869 - DNA, 15 bp, Homo sapiens
aacaaacaaaatgta

SEQ ID NO: 94870 - DNA, 15 bp, Homo sapiens
caacaaacaaaatgt

SEQ ID NO: 94871 - DNA, 15 bp, Homo sapiens
gcaacaaacaaaatg

SEQ ID NO: 94872 - DNA, 15 bp, Homo sapiens
tgcaacaaacaaaat

SEQ ID NO: 94873 - DNA, 15 bp, Homo sapiens
ctgcaacaaacaaaa

SEQ ID NO: 94874 - DNA, 15 bp, Homo sapiens
tctgcaacaaacaaa

SEQ ID NO: 94875 - DNA, 15 bp, Homo sapiens
atctgcaacaaacaa

SEQ ID NO: 94876 - DNA, 15 bp, Homo sapiens
tatctgcaacaaaca

SEQ ID NO: 94877 - DNA, 15 bp, Homo sapiens
atatctgcaacaaac

SEQ ID NO: 94878 - DNA, 15 bp, Homo sapiens
tatatctgcaacaaa

SEQ ID NO: 94879 - DNA, 15 bp, Homo sapiens
atatatctgcaacaa

SEQ ID NO: 94880 - DNA, 15 bp, Homo sapiens
tatatatctgcaaca

SEQ ID NO: 94881 - DNA, 15 bp, Homo sapiens
ctatatatctgcaac

SEQ ID NO: 94882 - DNA, 15 bp, Homo sapiens
tctatatatctgcaa

SEQ ID NO: 94883 - DNA, 15 bp, Homo sapiens
ttctatatatctgca

SEQ ID NO: 94884 - DNA, 15 bp, Homo sapiens
cttctatatatctgc

SEQ ID NO: 94885 - DNA, 15 bp, Homo sapiens
ccttctatatatctg

SEQ ID NO: 94886 - DNA, 15 bp, Homo sapiens
tccttctatatatct

SEQ ID NO: 94887 - DNA, 15 bp, Homo sapiens
ttccttctatatatc

SEQ ID NO: 94888 - DNA, 15 bp, Homo sapiens
cttccttctatatat

SEQ ID NO: 94889 - DNA, 15 bp, Homo sapiens
gcttccttctatata

SEQ ID NO: 94890 - DNA, 15 bp, Homo sapiens
cgcttccttctatat

SEQ ID NO: 94891 - DNA, 15 bp, Homo sapiens
ccgcttccttctata

SEQ ID NO: 94892 - DNA, 15 bp, Homo sapiens
tccgcttccttctat

SEQ ID NO: 94893 - DNA, 15 bp, Homo sapiens
ttccgcttccttcta

SEQ ID NO: 94894 - DNA, 15 bp, Homo sapiens
cttccgcttccttct

SEQ ID NO: 94895 - DNA, 15 bp, Homo sapiens
gcttccgcttccttc

SEQ ID NO: 94896 - DNA, 15 bp, Homo sapiens
ggcttccgcttcctt

SEQ ID NO: 94897 - DNA, 15 bp, Homo sapiens
aggcttccgcttcct

SEQ ID NO: 94898 - DNA, 15 bp, Homo sapiens
caggcttccgcttcc

SEQ ID NO: 94899 - DNA, 15 bp, Homo sapiens
gcaggcttccgcttc

SEQ ID NO: 94900 - DNA, 15 bp, Homo sapiens
agcaggcttccgctt

SEQ ID NO: 94901 - DNA, 15 bp, Homo sapiens
cagcaggcttccgct

SEQ ID NO: 94902 - DNA, 15 bp, Homo sapiens
acagcaggcttccgc

SEQ ID NO: 94903 - DNA, 15 bp, Homo sapiens
aacagcaggcttccg

SEQ ID NO: 94904 - DNA, 15 bp, Homo sapiens
caacagcaggcttcc

SEQ ID NO: 94905 - DNA, 15 bp, Homo sapiens
tcaacagcaggcttc

SEQ ID NO: 94906 - DNA, 15 bp, Homo sapiens
gtcaacagcaggctt

SEQ ID NO: 94907 - DNA, 15 bp, Homo sapiens
tgtcaacagcaggct

SEQ ID NO: 94908 - DNA, 15 bp, Homo sapiens
ctgtcaacagcaggc

SEQ ID NO: 94909 - DNA, 15 bp, Homo sapiens
cctgtcaacagcagg

SEQ ID NO: 94910 - DNA, 15 bp, Homo sapiens
tcctgtcaacagcag

SEQ ID NO: 94911 - DNA, 15 bp, Homo sapiens
atcctgtcaacagca

SEQ ID NO: 94912 - DNA, 15 bp, Homo sapiens
aatcctgtcaacagc

SEQ ID NO: 94913 - DNA, 15 bp, Homo sapiens
aaatcctgtcaacag

SEQ ID NO: 94914 - DNA, 15 bp, Homo sapiens
caaatcctgtcaaca

SEQ ID NO: 94915 - DNA, 15 bp, Homo sapiens
gcaaatcctgtcaac

SEQ ID NO: 94916 - DNA, 15 bp, Homo sapiens
cgcaaatcctgtcaa

SEQ ID NO: 94917 - DNA, 15 bp, Homo sapiens
acgcaaatcctgtca

SEQ ID NO: 94918 - DNA, 15 bp, Homo sapiens
cacgcaaatcctgtc

SEQ ID NO: 94919 - DNA, 15 bp, Homo sapiens
ccacgcaaatcctgt

SEQ ID NO: 94920 - DNA, 15 bp, Homo sapiens
cccacgcaaatcctg

SEQ ID NO: 94921 - DNA, 15 bp, Homo sapiens
gcccacgcaaatcct

SEQ ID NO: 94922 - DNA, 15 bp, Homo sapiens
tgcccacgcaaatcc

SEQ ID NO: 94923 - DNA, 15 bp, Homo sapiens
atgcccacgcaaatc

SEQ ID NO: 94924 - DNA, 15 bp, Homo sapiens
aatgcccacgcaaat

SEQ ID NO: 94925 - DNA, 15 bp, Homo sapiens
gaatgcccacgcaaa

SEQ ID NO: 94926 - DNA, 15 bp, Homo sapiens
ggaatgcccacgcaa

SEQ ID NO: 94927 - DNA, 15 bp, Homo sapiens
aggaatgcccacgca

SEQ ID NO: 94928 - DNA, 15 bp, Homo sapiens
gaggaatgcccacgc

SEQ ID NO: 94929 - DNA, 15 bp, Homo sapiens
ggaggaatgcccacg

SEQ ID NO: 94930 - DNA, 15 bp, Homo sapiens
aggaggaatgcccac

SEQ ID NO: 94931 - DNA, 15 bp, Homo sapiens
caggaggaatgccca

SEQ ID NO: 94932 - DNA, 15 bp, Homo sapiens
ccaggaggaatgccc

SEQ ID NO: 94933 - DNA, 15 bp, Homo sapiens
accaggaggaatgcc

SEQ ID NO: 94934 - DNA, 15 bp, Homo sapiens
caccaggaggaatgc

SEQ ID NO: 94935 - DNA, 15 bp, Homo sapiens
tcaccaggaggaatg

SEQ ID NO: 94936 - DNA, 15 bp, Homo sapiens
ctcaccaggaggaat

SEQ ID NO: 94937 - DNA, 15 bp, Homo sapiens
cctcaccaggaggaa

SEQ ID NO: 94938 - DNA, 15 bp, Homo sapiens
acctcaccaggagga

SEQ ID NO: 94939 - DNA, 15 bp, Homo sapiens
tacctcaccaggagg

SEQ ID NO: 94940 - DNA, 15 bp, Homo sapiens
ttacctcaccaggag

SEQ ID NO: 94941 - DNA, 15 bp, Homo sapiens
tttacctcaccagga

SEQ ID NO: 94942 - DNA, 15 bp, Homo sapiens
ctttacctcaccagg

SEQ ID NO: 94943 - DNA, 15 bp, Homo sapiens
tctttacctcaccag

SEQ ID NO: 94944 - DNA, 15 bp, Homo sapiens
gtctttacctcacca

SEQ ID NO: 94945 - DNA, 15 bp, Homo sapiens
tgtctttacctcacc

SEQ ID NO: 94946 - DNA, 15 bp, Homo sapiens
gtgtctttacctcac

SEQ ID NO: 94947 - DNA, 15 bp, Homo sapiens
agtgtctttacctca

SEQ ID NO: 94948 - DNA, 15 bp, Homo sapiens
aagtgtctttacctc

SEQ ID NO: 94949 - DNA, 15 bp, Homo sapiens
aaagtgtctttacct

SEQ ID NO: 94950 - DNA, 15 bp, Homo sapiens
caaagtgtctttacc

SEQ ID NO: 94951 - DNA, 15 bp, Homo sapiens
acaaagtgtctttac

SEQ ID NO: 94952 - DNA, 15 bp, Homo sapiens
gacaaagtgtcttta

SEQ ID NO: 94953 - DNA, 15 bp, Homo sapiens
agacaaagtgtcttt

SEQ ID NO: 94954 - DNA, 15 bp, Homo sapiens
tagacaaagtgtctt

SEQ ID NO: 94955 - DNA, 15 bp, Homo sapiens
atagacaaagtgtct

SEQ ID NO: 94956 - DNA, 15 bp, Homo sapiens
tatagacaaagtgtc

SEQ ID NO: 94957 - DNA, 15 bp, Homo sapiens
atatagacaaagtgt

SEQ ID NO: 94958 - DNA, 15 bp, Homo sapiens
aatatagacaaagtg

SEQ ID NO: 94959 - DNA, 15 bp, Homo sapiens
caatatagacaaagt

SEQ ID NO: 94960 - DNA, 15 bp, Homo sapiens
gcaatatagacaaag

SEQ ID NO: 94961 - DNA, 15 bp, Homo sapiens
cgcaatatagacaaa

SEQ ID NO: 94962 - DNA, 15 bp, Homo sapiens
acgcaatatagacaa

SEQ ID NO: 94963 - DNA, 15 bp, Homo sapiens
aacgcaatatagaca

SEQ ID NO: 94964 - DNA, 15 bp, Homo sapiens
aaacgcaatatagac

SEQ ID NO: 94965 - DNA, 15 bp, Homo sapiens
caaacgcaatataga

SEQ ID NO: 94966 - DNA, 15 bp, Homo sapiens
acaaacgcaatatag

SEQ ID NO: 94967 - DNA, 15 bp, Homo sapiens
gacaaacgcaatata

SEQ ID NO: 94968 - DNA, 15 bp, Homo sapiens
ggacaaacgcaatat

SEQ ID NO: 94969 - DNA, 15 bp, Homo sapiens
gggacaaacgcaata

SEQ ID NO: 94970 - DNA, 15 bp, Homo sapiens
agggacaaacgcaat

SEQ ID NO: 94971 - DNA, 15 bp, Homo sapiens
tagggacaaacgcaa

SEQ ID NO: 94972 - DNA, 15 bp, Homo sapiens
atagggacaaacgca

SEQ ID NO: 94973 - DNA, 15 bp, Homo sapiens
aatagggacaaacgc

SEQ ID NO: 94974 - DNA, 15 bp, Homo sapiens
taatagggacaaacg

SEQ ID NO: 94975 - DNA, 15 bp, Homo sapiens
ctaatagggacaaac

SEQ ID NO: 94976 - DNA, 15 bp, Homo sapiens
actaatagggacaaa

SEQ ID NO: 94977 - DNA, 15 bp, Homo sapiens
aactaatagggacaa

SEQ ID NO: 94978 - DNA, 15 bp, Homo sapiens
gaactaatagggaca

SEQ ID NO: 94979 - DNA, 15 bp, Homo sapiens
tgaactaatagggac

SEQ ID NO: 94980 - DNA, 15 bp, Homo sapiens
ctgaactaataggga

SEQ ID NO: 94981 - DNA, 15 bp, Homo sapiens
tctgaactaataggg

SEQ ID NO: 94982 - DNA, 15 bp, Homo sapiens
gtctgaactaatagg

SEQ ID NO: 94983 - DNA, 15 bp, Homo sapiens
agtctgaactaatag

SEQ ID NO: 94984 - DNA, 15 bp, Homo sapiens
tagtctgaactaata

SEQ ID NO: 94985 - DNA, 15 bp, Homo sapiens
atagtctgaactaat

SEQ ID NO: 94986 - DNA, 15 bp, Homo sapiens
gatagtctgaactaa

SEQ ID NO: 94987 - DNA, 15 bp, Homo sapiens
agatagtctgaacta

SEQ ID NO: 94988 - DNA, 15 bp, Homo sapiens
gagatagtctgaact

SEQ ID NO: 94989 - DNA, 15 bp, Homo sapiens
agagatagtctgaac

SEQ ID NO: 94990 - DNA, 15 bp, Homo sapiens
tagagatagtctgaa

SEQ ID NO: 94991 - DNA, 15 bp, Homo sapiens
gtagagatagtctga

SEQ ID NO: 94992 - DNA, 15 bp, Homo sapiens
ggtagagatagtctg

SEQ ID NO: 94993 - DNA, 15 bp, Homo sapiens
gggtagagatagtct

SEQ ID NO: 94994 - DNA, 15 bp, Homo sapiens
tgggtagagatagtc

SEQ ID NO: 94995 - DNA, 15 bp, Homo sapiens
ttgggtagagatagt

SEQ ID NO: 94996 - DNA, 15 bp, Homo sapiens
attgggtagagatag

SEQ ID NO: 94997 - DNA, 15 bp, Homo sapiens
gattgggtagagata

SEQ ID NO: 94998 - DNA, 15 bp, Homo sapiens
tgattgggtagagat

SEQ ID NO: 94999 - DNA, 15 bp, Homo sapiens
ttgattgggtagaga

SEQ ID NO: 95000 - DNA, 15 bp, Homo sapiens
cttgattgggtagag

SEQ ID NO: 95001 - DNA, 15 bp, Homo sapiens
gcttgattgggtaga

SEQ ID NO: 95002 - DNA, 15 bp, Homo sapiens
tgcttgattgggtag

SEQ ID NO: 95003 - DNA, 15 bp, Homo sapiens
ttgcttgattgggta

SEQ ID NO: 95004 - DNA, 15 bp, Homo sapiens
gttgcttgattgggt

SEQ ID NO: 95005 - DNA, 15 bp, Homo sapiens
cgttgcttgattggg

SEQ ID NO: 95006 - DNA, 15 bp, Homo sapiens
tcgttgcttgattgg

SEQ ID NO: 95007 - DNA, 15 bp, Homo sapiens
atcgttgcttgattg

SEQ ID NO: 95008 - DNA, 15 bp, Homo sapiens
catcgttgcttgatt

SEQ ID NO: 95009 - DNA, 15 bp, Homo sapiens
gcatcgttgcttgat

SEQ ID NO: 95010 - DNA, 15 bp, Homo sapiens
agcatcgttgcttga

SEQ ID NO: 95011 - DNA, 15 bp, Homo sapiens
gagcatcgttgcttg

SEQ ID NO: 95012 - DNA, 15 bp, Homo sapiens
cgagcatcgttgctt

SEQ ID NO: 95013 - DNA, 15 bp, Homo sapiens
acgagcatcgttgct

SEQ ID NO: 95014 - DNA, 15 bp, Homo sapiens
aacgagcatcgttgc

SEQ ID NO: 95015 - DNA, 15 bp, Homo sapiens
taacgagcatcgttg

SEQ ID NO: 95016 - DNA, 15 bp, Homo sapiens
ttaacgagcatcgtt

SEQ ID NO: 95017 - DNA, 15 bp, Homo sapiens
cttaacgagcatcgt

SEQ ID NO: 95018 - DNA, 15 bp, Homo sapiens
tcttaacgagcatcg

SEQ ID NO: 95019 - DNA, 15 bp, Homo sapiens
ctcttaacgagcatc

SEQ ID NO: 95020 - DNA, 15 bp, Homo sapiens
cctcttaacgagcat

SEQ ID NO: 95021 - DNA, 15 bp, Homo sapiens
acctcttaacgagca

SEQ ID NO: 95022 - DNA, 15 bp, Homo sapiens
tacctcttaacgagc

SEQ ID NO: 95023 - DNA, 15 bp, Homo sapiens
ttacctcttaacgag

SEQ ID NO: 95024 - DNA, 15 bp, Homo sapiens
tttacctcttaacga

SEQ ID NO: 95025 - DNA, 15 bp, Homo sapiens
ttttacctcttaacg

SEQ ID NO: 95026 - DNA, 15 bp, Homo sapiens
cttttacctcttaac

SEQ ID NO: 95027 - DNA, 15 bp, Homo sapiens
acttttacctcttaa

SEQ ID NO: 95028 - DNA, 15 bp, Homo sapiens
cacttttacctctta

SEQ ID NO: 95029 - DNA, 15 bp, Homo sapiens
ccacttttacctctt

SEQ ID NO: 95030 - DNA, 15 bp, Homo sapiens
tccacttttacctct

SEQ ID NO: 95031 - DNA, 15 bp, Homo sapiens
atccacttttacctc

SEQ ID NO: 95032 - DNA, 15 bp, Homo sapiens
aatccacttttacct

SEQ ID NO: 95033 - DNA, 15 bp, Homo sapiens
aaatccacttttacc

SEQ ID NO: 95034 - DNA, 15 bp, Homo sapiens
aaaatccacttttac

SEQ ID NO: 95035 - DNA, 15 bp, Homo sapiens
taaaatccactttta

SEQ ID NO: 95036 - DNA, 15 bp, Homo sapiens
ttaaaatccactttt

SEQ ID NO: 95037 - DNA, 15 bp, Homo sapiens
tttaaaatccacttt

SEQ ID NO: 95038 - DNA, 15 bp, Homo sapiens
ctttaaaatccactt

SEQ ID NO: 95039 - DNA, 15 bp, Homo sapiens
cctttaaaatccact

SEQ ID NO: 95040 - DNA, 15 bp, Homo sapiens
gcctttaaaatccac

SEQ ID NO: 95041 - DNA, 15 bp, Homo sapiens
agcctttaaaatcca

SEQ ID NO: 95042 - DNA, 15 bp, Homo sapiens
aagcctttaaaatcc

SEQ ID NO: 95043 - DNA, 15 bp, Homo sapiens
gaagcctttaaaatc

SEQ ID NO: 95044 - DNA, 15 bp, Homo sapiens
agaagcctttaaaat

SEQ ID NO: 95045 - DNA, 15 bp, Homo sapiens
cagaagcctttaaaa

SEQ ID NO: 95046 - DNA, 15 bp, Homo sapiens
acagaagcctttaaa

SEQ ID NO: 95047 - DNA, 15 bp, Homo sapiens
tacagaagcctttaa

SEQ ID NO: 95048 - DNA, 15 bp, Homo sapiens
atacagaagccttta

SEQ ID NO: 95049 - DNA, 15 bp, Homo sapiens
aatacagaagccttt

SEQ ID NO: 95050 - DNA, 15 bp, Homo sapiens
aaatacagaagcctt

SEQ ID NO: 95051 - DNA, 15 bp, Homo sapiens
taaatacagaagcct

SEQ ID NO: 95052 - DNA, 15 bp, Homo sapiens
ataaatacagaagcc

SEQ ID NO: 95053 - DNA, 15 bp, Homo sapiens
cataaatacagaagc

SEQ ID NO: 95054 - DNA, 15 bp, Homo sapiens
gcataaatacagaag

SEQ ID NO: 95055 - DNA, 15 bp, Homo sapiens
ggcataaatacagaa

SEQ ID NO: 95056 - DNA, 15 bp, Homo sapiens
tggcataaatacaga

SEQ ID NO: 95057 - DNA, 15 bp, Homo sapiens
ctggcataaatacag

SEQ ID NO: 95058 - DNA, 15 bp, Homo sapiens
cctggcataaataca

SEQ ID NO: 95059 - DNA, 15 bp, Homo sapiens
tcctggcataaatac

SEQ ID NO: 95060 - DNA, 15 bp, Homo sapiens
atcctggcataaata

SEQ ID NO: 95061 - DNA, 15 bp, Homo sapiens
catcctggcataaat

SEQ ID NO: 95062 - DNA, 15 bp, Homo sapiens
ccatcctggcataaa

SEQ ID NO: 95063 - DNA, 15 bp, Homo sapiens
tccatcctggcataa

SEQ ID NO: 95064 - DNA, 15 bp, Homo sapiens
ctccatcctggcata

SEQ ID NO: 95065 - DNA, 15 bp, Homo sapiens
gctccatcctggcat

SEQ ID NO: 95066 - DNA, 15 bp, Homo sapiens
tgctccatcctggca

SEQ ID NO: 95067 - DNA, 15 bp, Homo sapiens
ttgctccatcctggc

SEQ ID NO: 95068 - DNA, 15 bp, Homo sapiens
attgctccatcctgg

SEQ ID NO: 95069 - DNA, 15 bp, Homo sapiens
aattgctccatcctg

SEQ ID NO: 95070 - DNA, 15 bp, Homo sapiens
taattgctccatcct

SEQ ID NO: 95071 - DNA, 15 bp, Homo sapiens
ctaattgctccatcc

SEQ ID NO: 95072 - DNA, 15 bp, Homo sapiens
actaattgctccatc

SEQ ID NO: 95073 - DNA, 15 bp, Homo sapiens
gactaattgctccat

SEQ ID NO: 95074 - DNA, 15 bp, Homo sapiens
tgactaattgctcca

SEQ ID NO: 95075 - DNA, 15 bp, Homo sapiens
atgactaattgctcc

SEQ ID NO: 95076 - DNA, 15 bp, Homo sapiens
gatgactaattgctc

SEQ ID NO: 95077 - DNA, 15 bp, Homo sapiens
cgatgactaattgct

SEQ ID NO: 95078 - DNA, 15 bp, Homo sapiens
tcgatgactaattgc

SEQ ID NO: 95079 - DNA, 15 bp, Homo sapiens
ctcgatgactaattg

SEQ ID NO: 95080 - DNA, 15 bp, Homo sapiens
tctcgatgactaatt

SEQ ID NO: 95081 - DNA, 15 bp, Homo sapiens
ttctcgatgactaat

SEQ ID NO: 95082 - DNA, 15 bp, Homo sapiens
cttctcgatgactaa

SEQ ID NO: 95083 - DNA, 15 bp, Homo sapiens
tcttctcgatgacta

SEQ ID NO: 95084 - DNA, 15 bp, Homo sapiens
ctcttctcgatgact

SEQ ID NO: 95085 - DNA, 15 bp, Homo sapiens
tctcttctcgatgac

SEQ ID NO: 95086 - DNA, 15 bp, Homo sapiens
ctctcttctcgatga

SEQ ID NO: 95087 - DNA, 15 bp, Homo sapiens
cctctcttctcgatg

SEQ ID NO: 95088 - DNA, 15 bp, Homo sapiens
ccctctcttctcgat

SEQ ID NO: 95089 - DNA, 15 bp, Homo sapiens
tccctctcttctcga

SEQ ID NO: 95090 - DNA, 15 bp, Homo sapiens
gtccctctcttctcg

SEQ ID NO: 95091 - DNA, 15 bp, Homo sapiens
ggtccctctcttctc

SEQ ID NO: 95092 - DNA, 15 bp, Homo sapiens
gggtccctctcttct

SEQ ID NO: 95093 - DNA, 15 bp, Homo sapiens
agggtccctctcttc

SEQ ID NO: 95094 - DNA, 15 bp, Homo sapiens
cagggtccctctctt

SEQ ID NO: 95095 - DNA, 15 bp, Homo sapiens
acagggtccctctct

SEQ ID NO: 95096 - DNA, 15 bp, Homo sapiens
tacagggtccctctc

SEQ ID NO: 95097 - DNA, 15 bp, Homo sapiens
atacagggtccctct

SEQ ID NO: 95098 - DNA, 15 bp, Homo sapiens
catacagggtccctc

SEQ ID NO: 95099 - DNA, 15 bp, Homo sapiens
acatacagggtccct

SEQ ID NO: 95100 - DNA, 15 bp, Homo sapiens
gacatacagggtccc

SEQ ID NO: 95101 - DNA, 15 bp, Homo sapiens
tgacatacagggtcc

SEQ ID NO: 95102 - DNA, 15 bp, Homo sapiens
ttgacatacagggtc

SEQ ID NO: 95103 - DNA, 15 bp, Homo sapiens
cttgacatacagggt

SEQ ID NO: 95104 - DNA, 15 bp, Homo sapiens
tcttgacatacaggg

SEQ ID NO: 95105 - DNA, 15 bp, Homo sapiens
ctcttgacatacagg

SEQ ID NO: 95106 - DNA, 15 bp, Homo sapiens
tctcttgacatacag

SEQ ID NO: 95107 - DNA, 15 bp, Homo sapiens
ttctcttgacataca

SEQ ID NO: 95108 - DNA, 15 bp, Homo sapiens
attctcttgacatac

SEQ ID NO: 95109 - DNA, 15 bp, Homo sapiens
cattctcttgacata

SEQ ID NO: 95110 - DNA, 15 bp, Homo sapiens
tcattctcttgacat

SEQ ID NO: 95111 - DNA, 15 bp, Homo sapiens
atcattctcttgaca

SEQ ID NO: 95112 - DNA, 15 bp, Homo sapiens
aatcattctcttgac

SEQ ID NO: 95113 - DNA, 15 bp, Homo sapiens
aaatcattctcttga

SEQ ID NO: 95114 - DNA, 15 bp, Homo sapiens
gaaatcattctcttg

SEQ ID NO: 95115 - DNA, 15 bp, Homo sapiens
tgaaatcattctctt

SEQ ID NO: 95116 - DNA, 15 bp, Homo sapiens
ctgaaatcattctct

SEQ ID NO: 95117 - DNA, 15 bp, Homo sapiens
tctgaaatcattctc

SEQ ID NO: 95118 - DNA, 15 bp, Homo sapiens
ctctgaaatcattct

SEQ ID NO: 95119 - DNA, 15 bp, Homo sapiens
tctctgaaatcattc

SEQ ID NO: 95120 - DNA, 15 bp, Homo sapiens
ttctctgaaatcatt

SEQ ID NO: 95121 - DNA, 15 bp, Homo sapiens
attctctgaaatcat

SEQ ID NO: 95122 - DNA, 15 bp, Homo sapiens
gattctctgaaatca

SEQ ID NO: 95123 - DNA, 15 bp, Homo sapiens
ggattctctgaaatc

SEQ ID NO: 95124 - DNA, 15 bp, Homo sapiens
tggattctctgaaat

SEQ ID NO: 95125 - DNA, 15 bp, Homo sapiens
ttggattctctgaaa

SEQ ID NO: 95126 - DNA, 15 bp, Homo sapiens
attggattctctgaa

SEQ ID NO: 95127 - DNA, 15 bp, Homo sapiens
tattggattctctga

SEQ ID NO: 95128 - DNA, 15 bp, Homo sapiens
gtattggattctctg

SEQ ID NO: 95129 - DNA, 15 bp, Homo sapiens
tgtattggattctct

SEQ ID NO: 95130 - DNA, 15 bp, Homo sapiens
ttgtattggattctc

SEQ ID NO: 95131 - DNA, 15 bp, Homo sapiens
attgtattggattct

SEQ ID NO: 95132 - DNA, 15 bp, Homo sapiens
aattgtattggattc

SEQ ID NO: 95133 - DNA, 15 bp, Homo sapiens
aaattgtattggatt

SEQ ID NO: 95134 - DNA, 15 bp, Homo sapiens
taaattgtattggat

SEQ ID NO: 95135 - DNA, 15 bp, Homo sapiens
ttaaattgtattgga

SEQ ID NO: 95136 - DNA, 15 bp, Homo sapiens
cttaaattgtattgg

SEQ ID NO: 95137 - DNA, 15 bp, Homo sapiens
tcttaaattgtattg

SEQ ID NO: 95138 - DNA, 15 bp, Homo sapiens
ttcttaaattgtatt

SEQ ID NO: 95139 - DNA, 15 bp, Homo sapiens
tttcttaaattgtat

SEQ ID NO: 95140 - DNA, 15 bp, Homo sapiens
ttttcttaaattgta

SEQ ID NO: 95141 - DNA, 15 bp, Homo sapiens
tttttcttaaattgt

SEQ ID NO: 95142 - DNA, 15 bp, Homo sapiens
ctttttcttaaattg

SEQ ID NO: 95143 - DNA, 15 bp, Homo sapiens
gctttttcttaaatt

SEQ ID NO: 95144 - DNA, 15 bp, Homo sapiens
tgctttttcttaaat

SEQ ID NO: 95145 - DNA, 15 bp, Homo sapiens
atgctttttcttaaa

SEQ ID NO: 95146 - DNA, 15 bp, Homo sapiens
catgctttttcttaa

SEQ ID NO: 95147 - DNA, 15 bp, Homo sapiens
ccatgctttttctta

SEQ ID NO: 95148 - DNA, 15 bp, Homo sapiens
cccatgctttttctt

SEQ ID NO: 95149 - DNA, 15 bp, Homo sapiens
ccccatgctttttct

SEQ ID NO: 95150 - DNA, 15 bp, Homo sapiens
gccccatgctttttc

SEQ ID NO: 95151 - DNA, 15 bp, Homo sapiens
agccccatgcttttt

SEQ ID NO: 95152 - DNA, 15 bp, Homo sapiens
cagccccatgctttt

SEQ ID NO: 95153 - DNA, 15 bp, Homo sapiens
ccagccccatgcttt

SEQ ID NO: 95154 - DNA, 15 bp, Homo sapiens
cccagccccatgctt

SEQ ID NO: 95155 - DNA, 15 bp, Homo sapiens
gcccagccccatgct

SEQ ID NO: 95156 - DNA, 15 bp, Homo sapiens
cgcccagccccatgc

SEQ ID NO: 95157 - DNA, 15 bp, Homo sapiens
gcgcccagccccatg

SEQ ID NO: 95158 - DNA, 15 bp, Homo sapiens
tgcgcccagccccat

SEQ ID NO: 95159 - DNA, 15 bp, Homo sapiens
tcactgcgcccagcc

SEQ ID NO: 95160 - DNA, 15 bp, Homo sapiens
atcactgcgcccagc

SEQ ID NO: 95161 - DNA, 15 bp, Homo sapiens
aatcactgcgcccag

SEQ ID NO: 95162 - DNA, 15 bp, Homo sapiens
gaatcactgcgccca

SEQ ID NO: 95163 - DNA, 15 bp, Homo sapiens
tgaatcactgcgccc

SEQ ID NO: 95164 - DNA, 15 bp, Homo sapiens
gtgaatcactgcgcc

SEQ ID NO: 95165 - DNA, 15 bp, Homo sapiens
agtgaatcactgcgc

SEQ ID NO: 95166 - DNA, 15 bp, Homo sapiens
gagtgaatcactgcg

SEQ ID NO: 95167 - DNA, 15 bp, Homo sapiens
ggagtgaatcactgc

SEQ ID NO: 95168 - DNA, 15 bp, Homo sapiens
aggagtgaatcactg

SEQ ID NO: 95169 - DNA, 15 bp, Homo sapiens
caggagtgaatcact

SEQ ID NO: 95170 - DNA, 15 bp, Homo sapiens
acaggagtgaatcac

SEQ ID NO: 95171 - DNA, 15 bp, Homo sapiens
tacaggagtgaatca

SEQ ID NO: 95172 - DNA, 15 bp, Homo sapiens
ttacaggagtgaatc

SEQ ID NO: 95173 - DNA, 15 bp, Homo sapiens
attacaggagtgaat

SEQ ID NO: 95174 - DNA, 15 bp, Homo sapiens
gattacaggagtgaa

SEQ ID NO: 95175 - DNA, 15 bp, Homo sapiens
ggattacaggagtga

SEQ ID NO: 95176 - DNA, 15 bp, Homo sapiens
gggattacaggagtg

SEQ ID NO: 95177 - DNA, 15 bp, Homo sapiens
tgggattacaggagt

SEQ ID NO: 95178 - DNA, 15 bp, Homo sapiens
ctgggattacaggag

SEQ ID NO: 95179 - DNA, 15 bp, Homo sapiens
gctgggattacagga

SEQ ID NO: 95180 - DNA, 15 bp, Homo sapiens
ctcggcctcccaaag

SEQ ID NO: 95181 - DNA, 15 bp, Homo sapiens
cctcggcctcccaaa

SEQ ID NO: 95182 - DNA, 15 bp, Homo sapiens
acctcggcctcccaa

SEQ ID NO: 95183 - DNA, 15 bp, Homo sapiens
cacctcggcctccca

SEQ ID NO: 95184 - DNA, 15 bp, Homo sapiens
ccacctcggcctccc

SEQ ID NO: 95185 - DNA, 15 bp, Homo sapiens
cccacctcggcctcc

SEQ ID NO: 95186 - DNA, 15 bp, Homo sapiens
gcccacctcggcctc

SEQ ID NO: 95187 - DNA, 15 bp, Homo sapiens
cgcccacctcggcct

SEQ ID NO: 95188 - DNA, 15 bp, Homo sapiens
ccgcccacctcggcc

SEQ ID NO: 95189 - DNA, 15 bp, Homo sapiens
tccgcccacctcggc

SEQ ID NO: 95190 - DNA, 15 bp, Homo sapiens
atccgcccacctcgg

SEQ ID NO: 95191 - DNA, 15 bp, Homo sapiens
gatccgcccacctcg

SEQ ID NO: 95192 - DNA, 15 bp, Homo sapiens
tgatccgcccacctc

SEQ ID NO: 95193 - DNA, 15 bp, Homo sapiens
cgtgatccgcccacc

SEQ ID NO: 95194 - DNA, 15 bp, Homo sapiens
tcgtgatccgcccac

SEQ ID NO: 95195 - DNA, 15 bp, Homo sapiens
ctcgtgatccgccca

SEQ ID NO: 95196 - DNA, 15 bp, Homo sapiens
cctcgtgatccgccc

SEQ ID NO: 95197 - DNA, 15 bp, Homo sapiens
aatctcctgacctcg

SEQ ID NO: 95198 - DNA, 15 bp, Homo sapiens
caatctcctgacctc

SEQ ID NO: 95199 - DNA, 15 bp, Homo sapiens
tcaatctcctgacct

SEQ ID NO: 95200 - DNA, 15 bp, Homo sapiens
ctcaatctcctgacc

SEQ ID NO: 95201 - DNA, 15 bp, Homo sapiens
tctcaatctcctgac

SEQ ID NO: 95202 - DNA, 15 bp, Homo sapiens
gtctcaatctcctga

SEQ ID NO: 95203 - DNA, 15 bp, Homo sapiens
ggtctcaatctcctg

SEQ ID NO: 95204 - DNA, 15 bp, Homo sapiens
tggtctcaatctcct

SEQ ID NO: 95205 - DNA, 15 bp, Homo sapiens
atggtctcaatctcc

SEQ ID NO: 95206 - DNA, 15 bp, Homo sapiens
gatggtctcaatctc

SEQ ID NO: 95207 - DNA, 15 bp, Homo sapiens
ggatggtctcaatct

SEQ ID NO: 95208 - DNA, 15 bp, Homo sapiens
aggatggtctcaatc

SEQ ID NO: 95209 - DNA, 15 bp, Homo sapiens
caggatggtctcaat

SEQ ID NO: 95210 - DNA, 15 bp, Homo sapiens
ccaggatggtctcaa

SEQ ID NO: 95211 - DNA, 15 bp, Homo sapiens
gccaggatggtctca

SEQ ID NO: 95212 - DNA, 15 bp, Homo sapiens
ggggtttcaccatgt

SEQ ID NO: 95213 - DNA, 15 bp, Homo sapiens
tggggtttcaccatg

SEQ ID NO: 95214 - DNA, 15 bp, Homo sapiens
atggggtttcaccat

SEQ ID NO: 95215 - DNA, 15 bp, Homo sapiens
gatggggtttcacca

SEQ ID NO: 95216 - DNA, 15 bp, Homo sapiens
agatggggtttcacc

SEQ ID NO: 95217 - DNA, 15 bp, Homo sapiens
gagatggggtttcac

SEQ ID NO: 95218 - DNA, 15 bp, Homo sapiens
agagatggggtttca

SEQ ID NO: 95219 - DNA, 15 bp, Homo sapiens
tagagatggggtttc

SEQ ID NO: 95220 - DNA, 15 bp, Homo sapiens
gtagagatggggttt

SEQ ID NO: 95221 - DNA, 15 bp, Homo sapiens
agtagagatggggtt

SEQ ID NO: 95222 - DNA, 15 bp, Homo sapiens
tagtagagatggggt

SEQ ID NO: 95223 - DNA, 15 bp, Homo sapiens
atagtagagatgggg

SEQ ID NO: 95224 - DNA, 15 bp, Homo sapiens
tatagtagagatggg

SEQ ID NO: 95225 - DNA, 15 bp, Homo sapiens
ttatagtagagatgg

SEQ ID NO: 95226 - DNA, 15 bp, Homo sapiens
tttatagtagagatg

SEQ ID NO: 95227 - DNA, 15 bp, Homo sapiens
atttatagtagagat

SEQ ID NO: 95228 - DNA, 15 bp, Homo sapiens
tatttatagtagaga

SEQ ID NO: 95229 - DNA, 15 bp, Homo sapiens
gtatttatagtagag

SEQ ID NO: 95230 - DNA, 15 bp, Homo sapiens
tgtatttatagtaga

SEQ ID NO: 95231 - DNA, 15 bp, Homo sapiens
ttgtatttatagtag

SEQ ID NO: 95232 - DNA, 15 bp, Homo sapiens
tttgtatttatagta

SEQ ID NO: 95233 - DNA, 15 bp, Homo sapiens
ttttgtatttatagt

SEQ ID NO: 95234 - DNA, 15 bp, Homo sapiens
tttttgtatttatag

SEQ ID NO: 95235 - DNA, 15 bp, Homo sapiens
atttttgtatttata

SEQ ID NO: 95236 - DNA, 15 bp, Homo sapiens
aatttttgtatttat

SEQ ID NO: 95237 - DNA, 15 bp, Homo sapiens
taatttttgtattta

SEQ ID NO: 95238 - DNA, 15 bp, Homo sapiens
tgcccagctaatttt

SEQ ID NO: 95239 - DNA, 15 bp, Homo sapiens
atgcccagctaattt

SEQ ID NO: 95240 - DNA, 15 bp, Homo sapiens
tatgcccagctaatt

SEQ ID NO: 95241 - DNA, 15 bp, Homo sapiens
ctatgcccagctaat

SEQ ID NO: 95242 - DNA, 15 bp, Homo sapiens
actatgcccagctaa

SEQ ID NO: 95243 - DNA, 15 bp, Homo sapiens
tactatgcccagcta

SEQ ID NO: 95244 - DNA, 15 bp, Homo sapiens
ctactatgcccagct

SEQ ID NO: 95245 - DNA, 15 bp, Homo sapiens
actactatgcccagc

SEQ ID NO: 95246 - DNA, 15 bp, Homo sapiens
cactactatgcccag

SEQ ID NO: 95247 - DNA, 15 bp, Homo sapiens
gcactactatgccca

SEQ ID NO: 95248 - DNA, 15 bp, Homo sapiens
tgcactactatgccc

SEQ ID NO: 95249 - DNA, 15 bp, Homo sapiens
atgcactactatgcc

SEQ ID NO: 95250 - DNA, 15 bp, Homo sapiens
aatgcactactatgc

SEQ ID NO: 95251 - DNA, 15 bp, Homo sapiens
gaatgcactactatg

SEQ ID NO: 95252 - DNA, 15 bp, Homo sapiens
ggaatgcactactat

SEQ ID NO: 95253 - DNA, 15 bp, Homo sapiens
aggaatgcactacta

SEQ ID NO: 95254 - DNA, 15 bp, Homo sapiens
caggaatgcactact

SEQ ID NO: 95255 - DNA, 15 bp, Homo sapiens
acaggaatgcactac

SEQ ID NO: 95256 - DNA, 15 bp, Homo sapiens
tacaggaatgcacta

SEQ ID NO: 95257 - DNA, 15 bp, Homo sapiens
ctacaggaatgcact

SEQ ID NO: 95258 - DNA, 15 bp, Homo sapiens
actacaggaatgcac

SEQ ID NO: 95259 - DNA, 15 bp, Homo sapiens
gactacaggaatgca

SEQ ID NO: 95260 - DNA, 15 bp, Homo sapiens
ggactacaggaatgc

SEQ ID NO: 95261 - DNA, 15 bp, Homo sapiens
gggactacaggaatg

SEQ ID NO: 95262 - DNA, 15 bp, Homo sapiens
tgggactacaggaat

SEQ ID NO: 95263 - DNA, 15 bp, Homo sapiens
ctgggactacaggaa

SEQ ID NO: 95264 - DNA, 15 bp, Homo sapiens
taggttcaagcaatt

SEQ ID NO: 95265 - DNA, 15 bp, Homo sapiens
ctaggttcaagcaat

SEQ ID NO: 95266 - DNA, 15 bp, Homo sapiens
cctaggttcaagcaa

SEQ ID NO: 95267 - DNA, 15 bp, Homo sapiens
tcctaggttcaagca

SEQ ID NO: 95268 - DNA, 15 bp, Homo sapiens
ctcctaggttcaagc

SEQ ID NO: 95269 - DNA, 15 bp, Homo sapiens
cctcctaggttcaag

SEQ ID NO: 95270 - DNA, 15 bp, Homo sapiens
ccctcctaggttcaa

SEQ ID NO: 95271 - DNA, 15 bp, Homo sapiens
cccctcctaggttca

SEQ ID NO: 95272 - DNA, 15 bp, Homo sapiens
ccccctcctaggttc

SEQ ID NO: 95273 - DNA, 15 bp, Homo sapiens
tccccctcctaggtt

SEQ ID NO: 95274 - DNA, 15 bp, Homo sapiens
ctccccctcctaggt

SEQ ID NO: 95275 - DNA, 15 bp, Homo sapiens
cctccccctcctagg

SEQ ID NO: 95276 - DNA, 15 bp, Homo sapiens
acctccccctcctag

SEQ ID NO: 95277 - DNA, 15 bp, Homo sapiens
aacctccccctccta

SEQ ID NO: 95278 - DNA, 15 bp, Homo sapiens
ggcaacctccccctc

SEQ ID NO: 95279 - DNA, 15 bp, Homo sapiens
gggcaacctccccct

SEQ ID NO: 95280 - DNA, 15 bp, Homo sapiens
tgggcaacctccccc

SEQ ID NO: 95281 - DNA, 15 bp, Homo sapiens
ctgggcaacctcccc

SEQ ID NO: 95282 - DNA, 15 bp, Homo sapiens
tctgggcaacctccc

SEQ ID NO: 95283 - DNA, 15 bp, Homo sapiens
atctgggcaacctcc

SEQ ID NO: 95284 - DNA, 15 bp, Homo sapiens
aatctgggcaacctc

SEQ ID NO: 95285 - DNA, 15 bp, Homo sapiens
caatctgggcaacct

SEQ ID NO: 95286 - DNA, 15 bp, Homo sapiens
gcaatctgggcaacc

SEQ ID NO: 95287 - DNA, 15 bp, Homo sapiens
cgcaatctgggcaac

SEQ ID NO: 95288 - DNA, 15 bp, Homo sapiens
gcgcaatctgggcaa

SEQ ID NO: 95289 - DNA, 15 bp, Homo sapiens
agcgcaatctgggca

SEQ ID NO: 95290 - DNA, 15 bp, Homo sapiens
cagcgcaatctgggc

SEQ ID NO: 95291 - DNA, 15 bp, Homo sapiens
gcagcgcaatctggg

SEQ ID NO: 95292 - DNA, 15 bp, Homo sapiens
agcagcgcaatctgg

SEQ ID NO: 95293 - DNA, 15 bp, Homo sapiens
cagcagcgcaatctg

SEQ ID NO: 95294 - DNA, 15 bp, Homo sapiens
gcagcagcgcaatct

SEQ ID NO: 95295 - DNA, 15 bp, Homo sapiens
tgcagcagcgcaatc

SEQ ID NO: 95296 - DNA, 15 bp, Homo sapiens
gtgcagcagcgcaat

SEQ ID NO: 95297 - DNA, 15 bp, Homo sapiens
agtgcagcagcgcaa

SEQ ID NO: 95298 - DNA, 15 bp, Homo sapiens
gagtgcagcagcgca

SEQ ID NO: 95299 - DNA, 15 bp, Homo sapiens
ggagtgcagcagcgc

SEQ ID NO: 95300 - DNA, 15 bp, Homo sapiens
tggagtgcagcagcg

SEQ ID NO: 95301 - DNA, 15 bp, Homo sapiens
ctggagtgcagcagc

SEQ ID NO: 95302 - DNA, 15 bp, Homo sapiens
gctggagtgcagcag

SEQ ID NO: 95303 - DNA, 15 bp, Homo sapiens
ggctggagtgcagca

SEQ ID NO: 95304 - DNA, 15 bp, Homo sapiens
aggctggagtgcagc

SEQ ID NO: 95305 - DNA, 15 bp, Homo sapiens
accaggctggagtgc

SEQ ID NO: 95306 - DNA, 15 bp, Homo sapiens
caccaggctggagtg

SEQ ID NO: 95307 - DNA, 15 bp, Homo sapiens
tcaccaggctggagt

SEQ ID NO: 95308 - DNA, 15 bp, Homo sapiens
gtcaccaggctggag

SEQ ID NO: 95309 - DNA, 15 bp, Homo sapiens
tgtcaccaggctgga

SEQ ID NO: 95310 - DNA, 15 bp, Homo sapiens
ctgtcaccaggctgg

SEQ ID NO: 95311 - DNA, 15 bp, Homo sapiens
tctgtcaccaggctg

SEQ ID NO: 95312 - DNA, 15 bp, Homo sapiens
ctctgtcaccaggct

SEQ ID NO: 95313 - DNA, 15 bp, Homo sapiens
actctgtcaccaggc

SEQ ID NO: 95314 - DNA, 15 bp, Homo sapiens
cactctgtcaccagg

SEQ ID NO: 95315 - DNA, 15 bp, Homo sapiens
tcactctgtcaccag

SEQ ID NO: 95316 - DNA, 15 bp, Homo sapiens
ctcactctgtcacca

SEQ ID NO: 95317 - DNA, 15 bp, Homo sapiens
tgagtctcactctgt

SEQ ID NO: 95318 - DNA, 15 bp, Homo sapiens
atgagtctcactctg

SEQ ID NO: 95319 - DNA, 15 bp, Homo sapiens
catgagtctcactct

SEQ ID NO: 95320 - DNA, 15 bp, Homo sapiens
acatgagtctcactc

SEQ ID NO: 95321 - DNA, 15 bp, Homo sapiens
gacatgagtctcact

SEQ ID NO: 95322 - DNA, 15 bp, Homo sapiens
tgacatgagtctcac

SEQ ID NO: 95323 - DNA, 15 bp, Homo sapiens
ttgacatgagtctca

SEQ ID NO: 95324 - DNA, 15 bp, Homo sapiens
gttgacatgagtctc

SEQ ID NO: 95325 - DNA, 15 bp, Homo sapiens
tgttgacatgagtct

SEQ ID NO: 95326 - DNA, 15 bp, Homo sapiens
ttgttgacatgagtc

SEQ ID NO: 95327 - DNA, 15 bp, Homo sapiens
gttgttgacatgagt

SEQ ID NO: 95328 - DNA, 15 bp, Homo sapiens
tgttgttgacatgag

SEQ ID NO: 95329 - DNA, 15 bp, Homo sapiens
ttgttgttgacatga

SEQ ID NO: 95330 - DNA, 15 bp, Homo sapiens
tttgttgttgacatg

SEQ ID NO: 95331 - DNA, 15 bp, Homo sapiens
ttttgttgttgacat

SEQ ID NO: 95332 - DNA, 15 bp, Homo sapiens
tttttgttgttgaca

SEQ ID NO: 95333 - DNA, 15 bp, Homo sapiens
gtttttgttgttgac

SEQ ID NO: 95334 - DNA, 15 bp, Homo sapiens
tgtttttgttgttga

SEQ ID NO: 95335 - DNA, 15 bp, Homo sapiens
ctgtttttgttgttg

SEQ ID NO: 95336 - DNA, 15 bp, Homo sapiens
tctgtttttgttgtt

SEQ ID NO: 95337 - DNA, 15 bp, Homo sapiens
ttctgtttttgttgt

SEQ ID NO: 95338 - DNA, 15 bp, Homo sapiens
tttctgtttttgttg

SEQ ID NO: 95339 - DNA, 15 bp, Homo sapiens
ttttctgtttttgtt

SEQ ID NO: 95340 - DNA, 15 bp, Homo sapiens
tttttctgtttttgt

SEQ ID NO: 95341 - DNA, 15 bp, Homo sapiens
ctttttctgtttttg

SEQ ID NO: 95342 - DNA, 15 bp, Homo sapiens
gctttttctgttttt

SEQ ID NO: 95343 - DNA, 15 bp, Homo sapiens
gtgctttttctgttt

SEQ ID NO: 95344 - DNA, 15 bp, Homo sapiens
cgtgctttttctgtt

SEQ ID NO: 95345 - DNA, 15 bp, Homo sapiens
gcgtgctttttctgt

SEQ ID NO: 95346 - DNA, 15 bp, Homo sapiens
tgcgtgctttttctg

SEQ ID NO: 95347 - DNA, 15 bp, Homo sapiens
gtgcgtgctttttct

SEQ ID NO: 95348 - DNA, 15 bp, Homo sapiens
tgtgcgtgctttttc

SEQ ID NO: 95349 - DNA, 15 bp, Homo sapiens
atgtgcgtgcttttt

SEQ ID NO: 95350 - DNA, 15 bp, Homo sapiens
gatgtgcgtgctttt

SEQ ID NO: 95351 - DNA, 15 bp, Homo sapiens
agatgtgcgtgcttt

SEQ ID NO: 95352 - DNA, 15 bp, Homo sapiens
tagatgtgcgtgctt

SEQ ID NO: 95353 - DNA, 15 bp, Homo sapiens
ttagatgtgcgtgct

SEQ ID NO: 95354 - DNA, 15 bp, Homo sapiens
tttagatgtgcgtgc

SEQ ID NO: 95355 - DNA, 15 bp, Homo sapiens
ttttagatgtgcgtg

SEQ ID NO: 95356 - DNA, 15 bp, Homo sapiens
gttttagatgtgcgt

SEQ ID NO: 95357 - DNA, 15 bp, Homo sapiens
tgttttagatgtgcg

SEQ ID NO: 95358 - DNA, 15 bp, Homo sapiens
atgttttagatgtgc

SEQ ID NO: 95359 - DNA, 15 bp, Homo sapiens
catgttttagatgtg

SEQ ID NO: 95360 - DNA, 15 bp, Homo sapiens
gcatgttttagatgt

SEQ ID NO: 95361 - DNA, 15 bp, Homo sapiens
agcatgttttagatg

SEQ ID NO: 95362 - DNA, 15 bp, Homo sapiens
aagcatgttttagat

SEQ ID NO: 95363 - DNA, 15 bp, Homo sapiens
aaagcatgttttaga

SEQ ID NO: 95364 - DNA, 15 bp, Homo sapiens
aaaagcatgttttag

SEQ ID NO: 95365 - DNA, 15 bp, Homo sapiens
caaaagcatgtttta

SEQ ID NO: 95366 - DNA, 15 bp, Homo sapiens
acaaaagcatgtttt

SEQ ID NO: 95367 - DNA, 15 bp, Homo sapiens
cacaaaagcatgttt

SEQ ID NO: 95368 - DNA, 15 bp, Homo sapiens
tcacaaaagcatgtt

SEQ ID NO: 95369 - DNA, 15 bp, Homo sapiens
atcacaaaagcatgt

SEQ ID NO: 95370 - DNA, 15 bp, Homo sapiens
gatcacaaaagcatg

SEQ ID NO: 95371 - DNA, 15 bp, Homo sapiens
ggatcacaaaagcat

SEQ ID NO: 95372 - DNA, 15 bp, Homo sapiens
tggatcacaaaagca

SEQ ID NO: 95373 - DNA, 15 bp, Homo sapiens
atggatcacaaaagc

SEQ ID NO: 95374 - DNA, 15 bp, Homo sapiens
aatggatcacaaaag

SEQ ID NO: 95375 - DNA, 15 bp, Homo sapiens
aaatggatcacaaaa

SEQ ID NO: 95376 - DNA, 15 bp, Homo sapiens
caaatggatcacaaa

SEQ ID NO: 95377 - DNA, 15 bp, Homo sapiens
ccaaatggatcacaa

SEQ ID NO: 95378 - DNA, 15 bp, Homo sapiens
cccaaatggatcaca

SEQ ID NO: 95379 - DNA, 15 bp, Homo sapiens
tcccaaatggatcac

SEQ ID NO: 95380 - DNA, 15 bp, Homo sapiens
atcccaaatggatca

SEQ ID NO: 95381 - DNA, 15 bp, Homo sapiens
catcccaaatggatc

SEQ ID NO: 95382 - DNA, 15 bp, Homo sapiens
ccatcccaaatggat

SEQ ID NO: 95383 - DNA, 15 bp, Homo sapiens
accatcccaaatgga

SEQ ID NO: 95384 - DNA, 15 bp, Homo sapiens
caccatcccaaatgg

SEQ ID NO: 95385 - DNA, 15 bp, Homo sapiens
tcaccatcccaaatg

SEQ ID NO: 95386 - DNA, 15 bp, Homo sapiens
atcaccatcccaaat

SEQ ID NO: 95387 - DNA, 15 bp, Homo sapiens
catcaccatcccaaa

SEQ ID NO: 95388 - DNA, 15 bp, Homo sapiens
tcatcaccatcccaa

SEQ ID NO: 95389 - DNA, 15 bp, Homo sapiens
gtcatcaccatccca

SEQ ID NO: 95390 - DNA, 15 bp, Homo sapiens
tgtcatcaccatccc

SEQ ID NO: 95391 - DNA, 15 bp, Homo sapiens
atgtcatcaccatcc

SEQ ID NO: 95392 - DNA, 15 bp, Homo sapiens
aatgtcatcaccatc

SEQ ID NO: 95393 - DNA, 15 bp, Homo sapiens
gaatgtcatcaccat

SEQ ID NO: 95394 - DNA, 15 bp, Homo sapiens
tgaatgtcatcacca

SEQ ID NO: 95395 - DNA, 15 bp, Homo sapiens
ttgaatgtcatcacc

SEQ ID NO: 95396 - DNA, 15 bp, Homo sapiens
tttgaatgtcatcac

SEQ ID NO: 95397 - DNA, 15 bp, Homo sapiens
atttgaatgtcatca

SEQ ID NO: 95398 - DNA, 15 bp, Homo sapiens
tatttgaatgtcatc

SEQ ID NO: 95399 - DNA, 15 bp, Homo sapiens
ctatttgaatgtcat

SEQ ID NO: 95400 - DNA, 15 bp, Homo sapiens
actatttgaatgtca

SEQ ID NO: 95401 - DNA, 15 bp, Homo sapiens
aactatttgaatgtc

SEQ ID NO: 95402 - DNA, 15 bp, Homo sapiens
aaactatttgaatgt

SEQ ID NO: 95403 - DNA, 15 bp, Homo sapiens
aaaactatttgaatg

SEQ ID NO: 95404 - DNA, 15 bp, Homo sapiens
aaaaactatttgaat

SEQ ID NO: 95405 - DNA, 15 bp, Homo sapiens
aaaaaactatttgaa

SEQ ID NO: 95406 - DNA, 15 bp, Homo sapiens
taaaaaactatttga

SEQ ID NO: 95407 - DNA, 15 bp, Homo sapiens
ttaaaaaactatttg

SEQ ID NO: 95408 - DNA, 15 bp, Homo sapiens
tttaaaaaactattt

SEQ ID NO: 95409 - DNA, 15 bp, Homo sapiens
ttttaaaaaactatt

SEQ ID NO: 95410 - DNA, 15 bp, Homo sapiens
tttttaaaaaactat

SEQ ID NO: 95411 - DNA, 15 bp, Homo sapiens
atttttaaaaaacta

SEQ ID NO: 95412 - DNA, 15 bp, Homo sapiens
ctatttttaaaaaac

SEQ ID NO: 95413 - DNA, 15 bp, Homo sapiens
tctatttttaaaaaa

SEQ ID NO: 95414 - DNA, 15 bp, Homo sapiens
atctatttttaaaaa

SEQ ID NO: 95415 - DNA, 15 bp, Homo sapiens
aatctatttttaaaa

SEQ ID NO: 95416 - DNA, 15 bp, Homo sapiens
aaatctatttttaaa

SEQ ID NO: 95417 - DNA, 15 bp, Homo sapiens
aaaatctatttttaa

SEQ ID NO: 95418 - DNA, 15 bp, Homo sapiens
gaaaatctattttta

SEQ ID NO: 95419 - DNA, 15 bp, Homo sapiens
agaaaatctattttt

SEQ ID NO: 95420 - DNA, 15 bp, Homo sapiens
gagaaaatctatttt

SEQ ID NO: 95421 - DNA, 15 bp, Homo sapiens
ggagaaaatctattt

SEQ ID NO: 95422 - DNA, 15 bp, Homo sapiens
aggagaaaatctatt

SEQ ID NO: 95423 - DNA, 15 bp, Homo sapiens
aaggagaaaatctat

SEQ ID NO: 95424 - DNA, 15 bp, Homo sapiens
aaaggagaaaatcta

SEQ ID NO: 95425 - DNA, 15 bp, Homo sapiens
gaaaggagaaaatct

SEQ ID NO: 95426 - DNA, 15 bp, Homo sapiens
agaaaggagaaaatc

SEQ ID NO: 95427 - DNA, 15 bp, Homo sapiens
cagaaaggagaaaat

SEQ ID NO: 95428 - DNA, 15 bp, Homo sapiens
ccagaaaggagaaaa

SEQ ID NO: 95429 - DNA, 15 bp, Homo sapiens
accagaaaggagaaa

SEQ ID NO: 95430 - DNA, 15 bp, Homo sapiens
aaccagaaaggagaa

SEQ ID NO: 95431 - DNA, 15 bp, Homo sapiens
aaaccagaaaggaga

SEQ ID NO: 95432 - DNA, 15 bp, Homo sapiens
gaaaccagaaaggag

SEQ ID NO: 95433 - DNA, 15 bp, Homo sapiens
ggaaaccagaaagga

SEQ ID NO: 95434 - DNA, 15 bp, Homo sapiens
cggaaaccagaaagg

SEQ ID NO: 95435 - DNA, 15 bp, Homo sapiens
acggaaaccagaaag

SEQ ID NO: 95436 - DNA, 15 bp, Homo sapiens
aacggaaaccagaaa

SEQ ID NO: 95437 - DNA, 15 bp, Homo sapiens
aaacggaaaccagaa

SEQ ID NO: 95438 - DNA, 15 bp, Homo sapiens
caaacggaaaccaga

SEQ ID NO: 95439 - DNA, 15 bp, Homo sapiens
acaaacggaaaccag

SEQ ID NO: 95440 - DNA, 15 bp, Homo sapiens
cacaaacggaaacca

SEQ ID NO: 95441 - DNA, 15 bp, Homo sapiens
acacaaacggaaacc

SEQ ID NO: 95442 - DNA, 15 bp, Homo sapiens
aacacaaacggaaac

SEQ ID NO: 95443 - DNA, 15 bp, Homo sapiens
gaacacaaacggaaa

SEQ ID NO: 95444 - DNA, 15 bp, Homo sapiens
agaacacaaacggaa

SEQ ID NO: 95445 - DNA, 15 bp, Homo sapiens
aagaacacaaacgga

SEQ ID NO: 95446 - DNA, 15 bp, Homo sapiens
aaagaacacaaacgg

SEQ ID NO: 95447 - DNA, 15 bp, Homo sapiens
aaaagaacacaaacg

SEQ ID NO: 95448 - DNA, 15 bp, Homo sapiens
taaaagaacacaaac

SEQ ID NO: 95449 - DNA, 15 bp, Homo sapiens
ataaaagaacacaaa

SEQ ID NO: 95450 - DNA, 15 bp, Homo sapiens
cataaaagaacacaa

SEQ ID NO: 95451 - DNA, 15 bp, Homo sapiens
gcataaaagaacaca

SEQ ID NO: 95452 - DNA, 15 bp, Homo sapiens
ggcataaaagaacac

SEQ ID NO: 95453 - DNA, 15 bp, Homo sapiens
gggcataaaagaaca

SEQ ID NO: 95454 - DNA, 15 bp, Homo sapiens
agggcataaaagaac

SEQ ID NO: 95455 - DNA, 15 bp, Homo sapiens
aagggcataaaagaa

SEQ ID NO: 95456 - DNA, 15 bp, Homo sapiens
aaagggcataaaaga

SEQ ID NO: 95457 - DNA, 15 bp, Homo sapiens
aaaagggcataaaag

SEQ ID NO: 95458 - DNA, 15 bp, Homo sapiens
caaaagggcataaaa

SEQ ID NO: 95459 - DNA, 15 bp, Homo sapiens
gcaaaagggcataaa

SEQ ID NO: 95460 - DNA, 15 bp, Homo sapiens
ggcaaaagggcataa

SEQ ID NO: 95461 - DNA, 15 bp, Homo sapiens
tggcaaaagggcata

SEQ ID NO: 95462 - DNA, 15 bp, Homo sapiens
ctggcaaaagggcat

SEQ ID NO: 95463 - DNA, 15 bp, Homo sapiens
tctggcaaaagggca

SEQ ID NO: 95464 - DNA, 15 bp, Homo sapiens
ctctggcaaaagggc

SEQ ID NO: 95465 - DNA, 15 bp, Homo sapiens
actctggcaaaaggg

SEQ ID NO: 95466 - DNA, 15 bp, Homo sapiens
tactctggcaaaagg

SEQ ID NO: 95467 - DNA, 15 bp, Homo sapiens
ctactctggcaaaag

SEQ ID NO: 95468 - DNA, 15 bp, Homo sapiens
cctactctggcaaaa

SEQ ID NO: 95469 - DNA, 15 bp, Homo sapiens
acctactctggcaaa

SEQ ID NO: 95470 - DNA, 15 bp, Homo sapiens
cacctactctggcaa

SEQ ID NO: 95471 - DNA, 15 bp, Homo sapiens
ccacctactctggca

SEQ ID NO: 95472 - DNA, 15 bp, Homo sapiens
accacctactctggc

SEQ ID NO: 95473 - DNA, 15 bp, Homo sapiens
caccacctactctgg

SEQ ID NO: 95474 - DNA, 15 bp, Homo sapiens
gcaccacctactctg

SEQ ID NO: 95475 - DNA, 15 bp, Homo sapiens
tgcaccacctactct

SEQ ID NO: 95476 - DNA, 15 bp, Homo sapiens
ttgcaccacctactc

SEQ ID NO: 95477 - DNA, 15 bp, Homo sapiens
attgcaccacctact

SEQ ID NO: 95478 - DNA, 15 bp, Homo sapiens
aattgcaccacctac

SEQ ID NO: 95479 - DNA, 15 bp, Homo sapiens
aaattgcaccaccta

SEQ ID NO: 95480 - DNA, 15 bp, Homo sapiens
caaattgcaccacct

SEQ ID NO: 95481 - DNA, 15 bp, Homo sapiens
ccaaattgcaccacc

SEQ ID NO: 95482 - DNA, 15 bp, Homo sapiens
gccaaattgcaccac

SEQ ID NO: 95483 - DNA, 15 bp, Homo sapiens
agccaaattgcacca

SEQ ID NO: 95484 - DNA, 15 bp, Homo sapiens
tagccaaattgcacc

SEQ ID NO: 95485 - DNA, 15 bp, Homo sapiens
ctagccaaattgcac

SEQ ID NO: 95486 - DNA, 15 bp, Homo sapiens
gctagccaaattgca

SEQ ID NO: 95487 - DNA, 15 bp, Homo sapiens
agctagccaaattgc

SEQ ID NO: 95488 - DNA, 15 bp, Homo sapiens
cagctagccaaattg

SEQ ID NO: 95489 - DNA, 15 bp, Homo sapiens
ccagctagccaaatt

SEQ ID NO: 95490 - DNA, 15 bp, Homo sapiens
gccagctagccaaat

SEQ ID NO: 95491 - DNA, 15 bp, Homo sapiens
agccagctagccaaa

SEQ ID NO: 95492 - DNA, 15 bp, Homo sapiens
aagccagctagccaa

SEQ ID NO: 95493 - DNA, 15 bp, Homo sapiens
aaagccagctagcca

SEQ ID NO: 95494 - DNA, 15 bp, Homo sapiens
gaaagccagctagcc

SEQ ID NO: 95495 - DNA, 15 bp, Homo sapiens
tgaaagccagctagc

SEQ ID NO: 95496 - DNA, 15 bp, Homo sapiens
atgaaagccagctag

SEQ ID NO: 95497 - DNA, 15 bp, Homo sapiens
aatgaaagccagcta

SEQ ID NO: 95498 - DNA, 15 bp, Homo sapiens
taatgaaagccagct

SEQ ID NO: 95499 - DNA, 15 bp, Homo sapiens
gtaatgaaagccagc

SEQ ID NO: 95500 - DNA, 15 bp, Homo sapiens
agtaatgaaagccag

SEQ ID NO: 95501 - DNA, 15 bp, Homo sapiens
cagtaatgaaagcca

SEQ ID NO: 95502 - DNA, 15 bp, Homo sapiens
acagtaatgaaagcc

SEQ ID NO: 95503 - DNA, 15 bp, Homo sapiens
aacagtaatgaaagc

SEQ ID NO: 95504 - DNA, 15 bp, Homo sapiens
aaacagtaatgaaag

SEQ ID NO: 95505 - DNA, 15 bp, Homo sapiens
aaaacagtaatgaaa

SEQ ID NO: 95506 - DNA, 15 bp, Homo sapiens
aaaaacagtaatgaa

SEQ ID NO: 95507 - DNA, 15 bp, Homo sapiens
gaaaaacagtaatga

SEQ ID NO: 95508 - DNA, 15 bp, Homo sapiens
tgaaaaacagtaatg

SEQ ID NO: 95509 - DNA, 15 bp, Homo sapiens
gtgaaaaacagtaat

SEQ ID NO: 95510 - DNA, 15 bp, Homo sapiens
tgtgaaaaacagtaa

SEQ ID NO: 95511 - DNA, 15 bp, Homo sapiens
gtgtgaaaaacagta

SEQ ID NO: 95512 - DNA, 15 bp, Homo sapiens
tgtgtgaaaaacagt

SEQ ID NO: 95513 - DNA, 15 bp, Homo sapiens
atgtgtgaaaaacag

SEQ ID NO: 95514 - DNA, 15 bp, Homo sapiens
aatgtgtgaaaaaca

SEQ ID NO: 95515 - DNA, 15 bp, Homo sapiens
taatgtgtgaaaaac

SEQ ID NO: 95516 - DNA, 15 bp, Homo sapiens
ttaatgtgtgaaaaa

SEQ ID NO: 95517 - DNA, 15 bp, Homo sapiens
gttaatgtgtgaaaa

SEQ ID NO: 95518 - DNA, 15 bp, Homo sapiens
agttaatgtgtgaaa

SEQ ID NO: 95519 - DNA, 15 bp, Homo sapiens
aagttaatgtgtgaa

SEQ ID NO: 95520 - DNA, 15 bp, Homo sapiens
aaagttaatgtgtga

SEQ ID NO: 95521 - DNA, 15 bp, Homo sapiens
caaagttaatgtgtg

SEQ ID NO: 95522 - DNA, 15 bp, Homo sapiens
ccaaagttaatgtgt

SEQ ID NO: 95523 - DNA, 15 bp, Homo sapiens
gccaaagttaatgtg

SEQ ID NO: 95524 - DNA, 15 bp, Homo sapiens
ggccaaagttaatgt

SEQ ID NO: 95525 - DNA, 15 bp, Homo sapiens
aggccaaagttaatg

SEQ ID NO: 95526 - DNA, 15 bp, Homo sapiens
gaggccaaagttaat

SEQ ID NO: 95527 - DNA, 15 bp, Homo sapiens
tgaggccaaagttaa

SEQ ID NO: 95528 - DNA, 15 bp, Homo sapiens
ttgaggccaaagtta

SEQ ID NO: 95529 - DNA, 15 bp, Homo sapiens
gttgaggccaaagtt

SEQ ID NO: 95530 - DNA, 15 bp, Homo sapiens
agttgaggccaaagt

SEQ ID NO: 95531 - DNA, 15 bp, Homo sapiens
aagttgaggccaaag

SEQ ID NO: 95532 - DNA, 15 bp, Homo sapiens
caagttgaggccaaa

SEQ ID NO: 95533 - DNA, 15 bp, Homo sapiens
tcaagttgaggccaa

SEQ ID NO: 95534 - DNA, 15 bp, Homo sapiens
gtcaagttgaggcca

SEQ ID NO: 95535 - DNA, 15 bp, Homo sapiens
tgtcaagttgaggcc

SEQ ID NO: 95536 - DNA, 15 bp, Homo sapiens
ttgtcaagttgaggc

SEQ ID NO: 95537 - DNA, 15 bp, Homo sapiens
gttgtcaagttgagg

SEQ ID NO: 95538 - DNA, 15 bp, Homo sapiens
agttgtcaagttgag

SEQ ID NO: 95539 - DNA, 15 bp, Homo sapiens
gagttgtcaagttga

SEQ ID NO: 95540 - DNA, 15 bp, Homo sapiens
tgagttgtcaagttg

SEQ ID NO: 95541 - DNA, 15 bp, Homo sapiens
ttgagttgtcaagtt

SEQ ID NO: 95542 - DNA, 15 bp, Homo sapiens
tttgagttgtcaagt

SEQ ID NO: 95543 - DNA, 15 bp, Homo sapiens
atttgagttgtcaag

SEQ ID NO: 95544 - DNA, 15 bp, Homo sapiens
tatttgagttgtcaa

SEQ ID NO: 95545 - DNA, 15 bp, Homo sapiens
ttatttgagttgtca

SEQ ID NO: 95546 - DNA, 15 bp, Homo sapiens
attatttgagttgtc

SEQ ID NO: 95547 - DNA, 15 bp, Homo sapiens
tattatttgagttgt

SEQ ID NO: 95548 - DNA, 15 bp, Homo sapiens
atattatttgagttg

SEQ ID NO: 95549 - DNA, 15 bp, Homo sapiens
aatattatttgagtt

SEQ ID NO: 95550 - DNA, 15 bp, Homo sapiens
aaatattatttgagt

SEQ ID NO: 95551 - DNA, 15 bp, Homo sapiens
taaatattatttgag

SEQ ID NO: 95552 - DNA, 15 bp, Homo sapiens
ataaatattatttga

SEQ ID NO: 95553 - DNA, 15 bp, Homo sapiens
tataaatattatttg

SEQ ID NO: 95554 - DNA, 15 bp, Homo sapiens
ttataaatattattt

SEQ ID NO: 95555 - DNA, 15 bp, Homo sapiens
tttataaatattatt

SEQ ID NO: 95556 - DNA, 15 bp, Homo sapiens
atttataaatattat

SEQ ID NO: 95557 - DNA, 15 bp, Homo sapiens
tatttataaatatta

SEQ ID NO: 95558 - DNA, 15 bp, Homo sapiens
gtatttataaatatt

SEQ ID NO: 95559 - DNA, 15 bp, Homo sapiens
tgtatttataaatat

SEQ ID NO: 95560 - DNA, 15 bp, Homo sapiens
ctgtatttataaata

SEQ ID NO: 95561 - DNA, 15 bp, Homo sapiens
gctgtatttataaat

SEQ ID NO: 95562 - DNA, 15 bp, Homo sapiens
ggctgtatttataaa

SEQ ID NO: 95563 - DNA, 15 bp, Homo sapiens
tggctgtatttataa

SEQ ID NO: 95564 - DNA, 15 bp, Homo sapiens
gtggctgtatttata

SEQ ID NO: 95565 - DNA, 15 bp, Homo sapiens
tgtggctgtatttat

SEQ ID NO: 95566 - DNA, 15 bp, Homo sapiens
gtgtggctgtattta

SEQ ID NO: 95567 - DNA, 15 bp, Homo sapiens
agtgtggctgtattt

SEQ ID NO: 95568 - DNA, 15 bp, Homo sapiens
aagtgtggctgtatt

SEQ ID NO: 95569 - DNA, 15 bp, Homo sapiens
taagtgtggctgtat

SEQ ID NO: 95570 - DNA, 15 bp, Homo sapiens
ttaagtgtggctgta

SEQ ID NO: 95571 - DNA, 15 bp, Homo sapiens
tttaagtgtggctgt

SEQ ID NO: 95572 - DNA, 15 bp, Homo sapiens
ttttaagtgtggctg

SEQ ID NO: 95573 - DNA, 15 bp, Homo sapiens
attttaagtgtggct

SEQ ID NO: 95574 - DNA, 15 bp, Homo sapiens
cattttaagtgtggc

SEQ ID NO: 95575 - DNA, 15 bp, Homo sapiens
ccattttaagtgtgg

SEQ ID NO: 95576 - DNA, 15 bp, Homo sapiens
accattttaagtgtg

SEQ ID NO: 95577 - DNA, 15 bp, Homo sapiens
gaccattttaagtgt

SEQ ID NO: 95578 - DNA, 15 bp, Homo sapiens
ggaccattttaagtg

SEQ ID NO: 95579 - DNA, 15 bp, Homo sapiens
gggaccattttaagt

SEQ ID NO: 95580 - DNA, 15 bp, Homo sapiens
tgggaccattttaag

SEQ ID NO: 95581 - DNA, 15 bp, Homo sapiens
atgggaccattttaa

SEQ ID NO: 95582 - DNA, 15 bp, Homo sapiens
aatgggaccatttta

SEQ ID NO: 95583 - DNA, 15 bp, Homo sapiens
taatgggaccatttt

SEQ ID NO: 95584 - DNA, 15 bp, Homo sapiens
ataatgggaccattt

SEQ ID NO: 95585 - DNA, 15 bp, Homo sapiens
cataatgggaccatt

SEQ ID NO: 95586 - DNA, 15 bp, Homo sapiens
tcataatgggaccat

SEQ ID NO: 95587 - DNA, 15 bp, Homo sapiens
ttcataatgggacca

SEQ ID NO: 95588 - DNA, 15 bp, Homo sapiens
tttcataatgggacc

SEQ ID NO: 95589 - DNA, 15 bp, Homo sapiens
atttcataatgggac

SEQ ID NO: 95590 - DNA, 15 bp, Homo sapiens
tatttcataatggga

SEQ ID NO: 95591 - DNA, 15 bp, Homo sapiens
gtatttcataatggg

SEQ ID NO: 95592 - DNA, 15 bp, Homo sapiens
tgtatttcataatgg

SEQ ID NO: 95593 - DNA, 15 bp, Homo sapiens
atgtatttcataatg

SEQ ID NO: 95594 - DNA, 15 bp, Homo sapiens
tatgtatttcataat

SEQ ID NO: 95595 - DNA, 15 bp, Homo sapiens
atatgtatttcataa

SEQ ID NO: 95596 - DNA, 15 bp, Homo sapiens
aatatgtatttcata

SEQ ID NO: 95597 - DNA, 15 bp, Homo sapiens
aaatatgtatttcat

SEQ ID NO: 95598 - DNA, 15 bp, Homo sapiens
taaatatgtatttca

SEQ ID NO: 95599 - DNA, 15 bp, Homo sapiens
ttaaatatgtatttc

SEQ ID NO: 95600 - DNA, 15 bp, Homo sapiens
tttaaatatgtattt

SEQ ID NO: 95601 - DNA, 15 bp, Homo sapiens
atttaaatatgtatt

SEQ ID NO: 95602 - DNA, 15 bp, Homo sapiens
tatttaaatatgtat

SEQ ID NO: 95603 - DNA, 15 bp, Homo sapiens
atatttaaatatgta

SEQ ID NO: 95604 - DNA, 15 bp, Homo sapiens
gatatttaaatatgt

SEQ ID NO: 95605 - DNA, 15 bp, Homo sapiens
agatatttaaatatg

SEQ ID NO: 95606 - DNA, 15 bp, Homo sapiens
tagatatttaaatat

SEQ ID NO: 95607 - DNA, 15 bp, Homo sapiens
atagatatttaaata

SEQ ID NO: 95608 - DNA, 15 bp, Homo sapiens
tatagatatttaaat

SEQ ID NO: 95609 - DNA, 15 bp, Homo sapiens
gtatagatatttaaa

SEQ ID NO: 95610 - DNA, 15 bp, Homo sapiens
cgtatagatatttaa

SEQ ID NO: 95611 - DNA, 15 bp, Homo sapiens
tcgtatagatattta

SEQ ID NO: 95612 - DNA, 15 bp, Homo sapiens
atcgtatagatattt

SEQ ID NO: 95613 - DNA, 15 bp, Homo sapiens
catcgtatagatatt

SEQ ID NO: 95614 - DNA, 15 bp, Homo sapiens
acatcgtatagatat

SEQ ID NO: 95615 - DNA, 15 bp, Homo sapiens
cacatcgtatagata

SEQ ID NO: 95616 - DNA, 15 bp, Homo sapiens
acacatcgtatagat

SEQ ID NO: 95617 - DNA, 15 bp, Homo sapiens
aacacatcgtataga

SEQ ID NO: 95618 - DNA, 15 bp, Homo sapiens
taacacatcgtatag

SEQ ID NO: 95619 - DNA, 15 bp, Homo sapiens
ttaacacatcgtata

SEQ ID NO: 95620 - DNA, 15 bp, Homo sapiens
tttaacacatcgtat

SEQ ID NO: 95621 - DNA, 15 bp, Homo sapiens
ttttaacacatcgta

SEQ ID NO: 95622 - DNA, 15 bp, Homo sapiens
gttttaacacatcgt

SEQ ID NO: 95623 - DNA, 15 bp, Homo sapiens
ggttttaacacatcg

SEQ ID NO: 95624 - DNA, 15 bp, Homo sapiens
tggttttaacacatc

SEQ ID NO: 95625 - DNA, 15 bp, Homo sapiens
ttggttttaacacat

SEQ ID NO: 95626 - DNA, 15 bp, Homo sapiens
cttggttttaacaca

SEQ ID NO: 95627 - DNA, 15 bp, Homo sapiens
tcttggttttaacac

SEQ ID NO: 95628 - DNA, 15 bp, Homo sapiens
ttcttggttttaaca

SEQ ID NO: 95629 - DNA, 15 bp, Homo sapiens
tttcttggttttaac

SEQ ID NO: 95630 - DNA, 15 bp, Homo sapiens
ttttcttggttttaa

SEQ ID NO: 95631 - DNA, 15 bp, Homo sapiens
attttcttggtttta

SEQ ID NO: 95632 - DNA, 15 bp, Homo sapiens
tattttcttggtttt

SEQ ID NO: 95633 - DNA, 15 bp, Homo sapiens
atattttcttggttt

SEQ ID NO: 95634 - DNA, 15 bp, Homo sapiens
aatattttcttggtt

SEQ ID NO: 95635 - DNA, 15 bp, Homo sapiens
aaatattttcttggt

SEQ ID NO: 95636 - DNA, 15 bp, Homo sapiens
caaatattttcttgg

SEQ ID NO: 95637 - DNA, 15 bp, Homo sapiens
tcaaatattttcttg

SEQ ID NO: 95638 - DNA, 15 bp, Homo sapiens
atcaaatattttctt

SEQ ID NO: 95639 - DNA, 15 bp, Homo sapiens
aatcaaatattttct

SEQ ID NO: 95640 - DNA, 15 bp, Homo sapiens
gaatcaaatattttc

SEQ ID NO: 95641 - DNA, 15 bp, Homo sapiens
agaatcaaatatttt

SEQ ID NO: 95642 - DNA, 15 bp, Homo sapiens
aagaatcaaatattt

SEQ ID NO: 95643 - DNA, 15 bp, Homo sapiens
gaagaatcaaatatt

SEQ ID NO: 95644 - DNA, 15 bp, Homo sapiens
agaagaatcaaatat

SEQ ID NO: 95645 - DNA, 15 bp, Homo sapiens
gagaagaatcaaata

SEQ ID NO: 95646 - DNA, 15 bp, Homo sapiens
agagaagaatcaaat

SEQ ID NO: 95647 - DNA, 15 bp, Homo sapiens
cagagaagaatcaaa

SEQ ID NO: 95648 - DNA, 15 bp, Homo sapiens
tcagagaagaatcaa

SEQ ID NO: 95649 - DNA, 15 bp, Homo sapiens
atcagagaagaatca

SEQ ID NO: 95650 - DNA, 15 bp, Homo sapiens
tatcagagaagaatc

SEQ ID NO: 95651 - DNA, 15 bp, Homo sapiens
atatcagagaagaat

SEQ ID NO: 95652 - DNA, 15 bp, Homo sapiens
aatatcagagaagaa

SEQ ID NO: 95653 - DNA, 15 bp, Homo sapiens
aaatatcagagaaga

SEQ ID NO: 95654 - DNA, 15 bp, Homo sapiens
taaatatcagagaag

SEQ ID NO: 95655 - DNA, 15 bp, Homo sapiens
ttaaatatcagagaa

SEQ ID NO: 95656 - DNA, 15 bp, Homo sapiens
cttaaatatcagaga

SEQ ID NO: 95657 - DNA, 15 bp, Homo sapiens
tcttaaatatcagag

SEQ ID NO: 95658 - DNA, 15 bp, Homo sapiens
ttcttaaatatcaga

SEQ ID NO: 95659 - DNA, 15 bp, Homo sapiens
attcttaaatatcag

SEQ ID NO: 95660 - DNA, 15 bp, Homo sapiens
aattcttaaatatca

SEQ ID NO: 95661 - DNA, 15 bp, Homo sapiens
caattcttaaatatc

SEQ ID NO: 95662 - DNA, 15 bp, Homo sapiens
tcaattcttaaatat

SEQ ID NO: 95663 - DNA, 15 bp, Homo sapiens
ttcaattcttaaata

SEQ ID NO: 95664 - DNA, 15 bp, Homo sapiens
cttcaattcttaaat

SEQ ID NO: 95665 - DNA, 15 bp, Homo sapiens
ccttcaattcttaaa

SEQ ID NO: 95666 - DNA, 15 bp, Homo sapiens
accttcaattcttaa

SEQ ID NO: 95667 - DNA, 15 bp, Homo sapiens
aaccttcaattctta

SEQ ID NO: 95668 - DNA, 15 bp, Homo sapiens
aaaccttcaattctt

SEQ ID NO: 95669 - DNA, 15 bp, Homo sapiens
caaaccttcaattct

SEQ ID NO: 95670 - DNA, 15 bp, Homo sapiens
tcaaaccttcaattc

SEQ ID NO: 95671 - DNA, 15 bp, Homo sapiens
ctcaaaccttcaatt

SEQ ID NO: 95672 - DNA, 15 bp, Homo sapiens
cctcaaaccttcaat

SEQ ID NO: 95673 - DNA, 15 bp, Homo sapiens
acctcaaaccttcaa

SEQ ID NO: 95674 - DNA, 15 bp, Homo sapiens
tacctcaaaccttca

SEQ ID NO: 95675 - DNA, 15 bp, Homo sapiens
ctacctcaaaccttc

SEQ ID NO: 95676 - DNA, 15 bp, Homo sapiens
actacctcaaacctt

SEQ ID NO: 95677 - DNA, 15 bp, Homo sapiens
aactacctcaaacct

SEQ ID NO: 95678 - DNA, 15 bp, Homo sapiens
taactacctcaaacc

SEQ ID NO: 95679 - DNA, 15 bp, Homo sapiens
gtaactacctcaaac

SEQ ID NO: 95680 - DNA, 15 bp, Homo sapiens
cgtaactacctcaaa

SEQ ID NO: 95681 - DNA, 15 bp, Homo sapiens
acgtaactacctcaa

SEQ ID NO: 95682 - DNA, 15 bp, Homo sapiens
cacgtaactacctca

SEQ ID NO: 95683 - DNA, 15 bp, Homo sapiens
acacgtaactacctc

SEQ ID NO: 95684 - DNA, 15 bp, Homo sapiens
aacacgtaactacct

SEQ ID NO: 95685 - DNA, 15 bp, Homo sapiens
taacacgtaactacc

SEQ ID NO: 95686 - DNA, 15 bp, Homo sapiens
ctaacacgtaactac

SEQ ID NO: 95687 - DNA, 15 bp, Homo sapiens
cctaacacgtaacta

SEQ ID NO: 95688 - DNA, 15 bp, Homo sapiens
ccctaacacgtaact

SEQ ID NO: 95689 - DNA, 15 bp, Homo sapiens
cccctaacacgtaac

SEQ ID NO: 95690 - DNA, 15 bp, Homo sapiens
gcccctaacacgtaa

SEQ ID NO: 95691 - DNA, 15 bp, Homo sapiens
tgcccctaacacgta

SEQ ID NO: 95692 - DNA, 15 bp, Homo sapiens
atgcccctaacacgt

SEQ ID NO: 95693 - DNA, 15 bp, Homo sapiens
aatgcccctaacacg

SEQ ID NO: 95694 - DNA, 15 bp, Homo sapiens
aaatgcccctaacac

SEQ ID NO: 95695 - DNA, 15 bp, Homo sapiens
taaatgcccctaaca

SEQ ID NO: 95696 - DNA, 15 bp, Homo sapiens
ataaatgcccctaac

SEQ ID NO: 95697 - DNA, 15 bp, Homo sapiens
tataaatgcccctaa

SEQ ID NO: 95698 - DNA, 15 bp, Homo sapiens
atataaatgccccta

SEQ ID NO: 95699 - DNA, 15 bp, Homo sapiens
aatataaatgcccct

SEQ ID NO: 95700 - DNA, 15 bp, Homo sapiens
gaatataaatgcccc

SEQ ID NO: 95701 - DNA, 15 bp, Homo sapiens
tgaatataaatgccc

SEQ ID NO: 95702 - DNA, 15 bp, Homo sapiens
atgaatataaatgcc

SEQ ID NO: 95703 - DNA, 15 bp, Homo sapiens
catgaatataaatgc

SEQ ID NO: 95704 - DNA, 15 bp, Homo sapiens
acatgaatataaatg

SEQ ID NO: 95705 - DNA, 15 bp, Homo sapiens
aacatgaatataaat

SEQ ID NO: 95706 - DNA, 15 bp, Homo sapiens
aaacatgaatataaa

SEQ ID NO: 95707 - DNA, 15 bp, Homo sapiens
aaaacatgaatataa

SEQ ID NO: 95708 - DNA, 15 bp, Homo sapiens
aaaaacatgaatata

SEQ ID NO: 95709 - DNA, 15 bp, Homo sapiens
taaaaacatgaatat

SEQ ID NO: 95710 - DNA, 15 bp, Homo sapiens
ctaaaaacatgaata

SEQ ID NO: 95711 - DNA, 15 bp, Homo sapiens
tctaaaaacatgaat

SEQ ID NO: 95712 - DNA, 15 bp, Homo sapiens
ctctaaaaacatgaa

SEQ ID NO: 95713 - DNA, 15 bp, Homo sapiens
actctaaaaacatga

SEQ ID NO: 95714 - DNA, 15 bp, Homo sapiens
aactctaaaaacatg

SEQ ID NO: 95715 - DNA, 15 bp, Homo sapiens
aaactctaaaaacat

SEQ ID NO: 95716 - DNA, 15 bp, Homo sapiens
caaactctaaaaaca

SEQ ID NO: 95717 - DNA, 15 bp, Homo sapiens
gcaaactctaaaaac

SEQ ID NO: 95718 - DNA, 15 bp, Homo sapiens
agcaaactctaaaaa

SEQ ID NO: 95719 - DNA, 15 bp, Homo sapiens
aagcaaactctaaaa

SEQ ID NO: 95720 - DNA, 15 bp, Homo sapiens
taagcaaactctaaa

SEQ ID NO: 95721 - DNA, 15 bp, Homo sapiens
ataagcaaactctaa

SEQ ID NO: 95722 - DNA, 15 bp, Homo sapiens
tataagcaaactcta

SEQ ID NO: 95723 - DNA, 15 bp, Homo sapiens
gtataagcaaactct

SEQ ID NO: 95724 - DNA, 15 bp, Homo sapiens
tgtataagcaaactc

SEQ ID NO: 95725 - DNA, 15 bp, Homo sapiens
ttgtataagcaaact

SEQ ID NO: 95726 - DNA, 15 bp, Homo sapiens
gttgtataagcaaac

SEQ ID NO: 95727 - DNA, 15 bp, Homo sapiens
agttgtataagcaaa

SEQ ID NO: 95728 - DNA, 15 bp, Homo sapiens
aagttgtataagcaa

SEQ ID NO: 95729 - DNA, 15 bp, Homo sapiens
taagttgtataagca

SEQ ID NO: 95730 - DNA, 15 bp, Homo sapiens
ttaagttgtataagc

SEQ ID NO: 95731 - DNA, 15 bp, Homo sapiens
attaagttgtataag

SEQ ID NO: 95732 - DNA, 15 bp, Homo sapiens
gattaagttgtataa

SEQ ID NO: 95733 - DNA, 15 bp, Homo sapiens
agattaagttgtata

SEQ ID NO: 95734 - DNA, 15 bp, Homo sapiens
aagattaagttgtat

SEQ ID NO: 95735 - DNA, 15 bp, Homo sapiens
aaagattaagttgta

SEQ ID NO: 95736 - DNA, 15 bp, Homo sapiens
gaaagattaagttgt

SEQ ID NO: 95737 - DNA, 15 bp, Homo sapiens
ggaaagattaagttg

SEQ ID NO: 95738 - DNA, 15 bp, Homo sapiens
aggaaagattaagtt

SEQ ID NO: 95739 - DNA, 15 bp, Homo sapiens
aaggaaagattaagt

SEQ ID NO: 95740 - DNA, 15 bp, Homo sapiens
aaaggaaagattaag

SEQ ID NO: 95741 - DNA, 15 bp, Homo sapiens
aaaaggaaagattaa

SEQ ID NO: 95742 - DNA, 15 bp, Homo sapiens
gaaaaggaaagatta

SEQ ID NO: 95743 - DNA, 15 bp, Homo sapiens
tgaaaaggaaagatt

SEQ ID NO: 95744 - DNA, 15 bp, Homo sapiens
ctgaaaaggaaagat

SEQ ID NO: 95745 - DNA, 15 bp, Homo sapiens
actgaaaaggaaaga

SEQ ID NO: 95746 - DNA, 15 bp, Homo sapiens
cactgaaaaggaaag

SEQ ID NO: 95747 - DNA, 15 bp, Homo sapiens
gcactgaaaaggaaa

SEQ ID NO: 95748 - DNA, 15 bp, Homo sapiens
agcactgaaaaggaa

SEQ ID NO: 95749 - DNA, 15 bp, Homo sapiens
aagcactgaaaagga

SEQ ID NO: 95750 - DNA, 15 bp, Homo sapiens
aaagcactgaaaagg

SEQ ID NO: 95751 - DNA, 15 bp, Homo sapiens
caaagcactgaaaag

SEQ ID NO: 95752 - DNA, 15 bp, Homo sapiens
ccaaagcactgaaaa

SEQ ID NO: 95753 - DNA, 15 bp, Homo sapiens
cccaaagcactgaaa

SEQ ID NO: 95754 - DNA, 15 bp, Homo sapiens
gcccaaagcactgaa

SEQ ID NO: 95755 - DNA, 15 bp, Homo sapiens
agcccaaagcactga

SEQ ID NO: 95756 - DNA, 15 bp, Homo sapiens
gagcccaaagcactg

SEQ ID NO: 95757 - DNA, 15 bp, Homo sapiens
ggagcccaaagcact

SEQ ID NO: 95758 - DNA, 15 bp, Homo sapiens
aggagcccaaagcac

SEQ ID NO: 95759 - DNA, 15 bp, Homo sapiens
caggagcccaaagca

SEQ ID NO: 95760 - DNA, 15 bp, Homo sapiens
ccaggagcccaaagc

SEQ ID NO: 95761 - DNA, 15 bp, Homo sapiens
cccaggagcccaaag

SEQ ID NO: 95762 - DNA, 15 bp, Homo sapiens
tcccaggagcccaaa

SEQ ID NO: 95763 - DNA, 15 bp, Homo sapiens
ctcccaggagcccaa

SEQ ID NO: 95764 - DNA, 15 bp, Homo sapiens
actcccaggagccca

SEQ ID NO: 95765 - DNA, 15 bp, Homo sapiens
aactcccaggagccc

SEQ ID NO: 95766 - DNA, 15 bp, Homo sapiens
taactcccaggagcc

SEQ ID NO: 95767 - DNA, 15 bp, Homo sapiens
ttaactcccaggagc

SEQ ID NO: 95768 - DNA, 15 bp, Homo sapiens
attaactcccaggag

SEQ ID NO: 95769 - DNA, 15 bp, Homo sapiens
cattaactcccagga

SEQ ID NO: 95770 - DNA, 15 bp, Homo sapiens
ccattaactcccagg

SEQ ID NO: 95771 - DNA, 15 bp, Homo sapiens
cccattaactcccag

SEQ ID NO: 95772 - DNA, 15 bp, Homo sapiens
ccccattaactccca

SEQ ID NO: 95773 - DNA, 15 bp, Homo sapiens
gccccattaactccc

SEQ ID NO: 95774 - DNA, 15 bp, Homo sapiens
agccccattaactcc

SEQ ID NO: 95775 - DNA, 15 bp, Homo sapiens
cagccccattaactc

SEQ ID NO: 95776 - DNA, 15 bp, Homo sapiens
ccagccccattaact

SEQ ID NO: 95777 - DNA, 15 bp, Homo sapiens
tccagccccattaac

SEQ ID NO: 95778 - DNA, 15 bp, Homo sapiens
ttccagccccattaa

SEQ ID NO: 95779 - DNA, 15 bp, Homo sapiens
tttccagccccatta

SEQ ID NO: 95780 - DNA, 15 bp, Homo sapiens
ttttccagccccatt

SEQ ID NO: 95781 - DNA, 15 bp, Homo sapiens
attttccagccccat

SEQ ID NO: 95782 - DNA, 15 bp, Homo sapiens
gattttccagcccca

SEQ ID NO: 95783 - DNA, 15 bp, Homo sapiens
tgattttccagcccc

SEQ ID NO: 95784 - DNA, 15 bp, Homo sapiens
atgattttccagccc

SEQ ID NO: 95785 - DNA, 15 bp, Homo sapiens
gatgattttccagcc

SEQ ID NO: 95786 - DNA, 15 bp, Homo sapiens
tgatgattttccagc

SEQ ID NO: 95787 - DNA, 15 bp, Homo sapiens
ttgatgattttccag

SEQ ID NO: 95788 - DNA, 15 bp, Homo sapiens
gttgatgattttcca

SEQ ID NO: 95789 - DNA, 15 bp, Homo sapiens
agttgatgattttcc

SEQ ID NO: 95790 - DNA, 15 bp, Homo sapiens
aagttgatgattttc

SEQ ID NO: 95791 - DNA, 15 bp, Homo sapiens
aaagttgatgatttt

SEQ ID NO: 95792 - DNA, 15 bp, Homo sapiens
gaaagttgatgattt

SEQ ID NO: 95793 - DNA, 15 bp, Homo sapiens
tgaaagttgatgatt

SEQ ID NO: 95794 - DNA, 15 bp, Homo sapiens
ttgaaagttgatgat

SEQ ID NO: 95795 - DNA, 15 bp, Homo sapiens
cttgaaagttgatga

SEQ ID NO: 95796 - DNA, 15 bp, Homo sapiens
tcttgaaagttgatg

SEQ ID NO: 95797 - DNA, 15 bp, Homo sapiens
atcttgaaagttgat

SEQ ID NO: 95798 - DNA, 15 bp, Homo sapiens
catcttgaaagttga

SEQ ID NO: 95799 - DNA, 15 bp, Homo sapiens
acatcttgaaagttg

SEQ ID NO: 95800 - DNA, 15 bp, Homo sapiens
aacatcttgaaagtt

SEQ ID NO: 95801 - DNA, 15 bp, Homo sapiens
taacatcttgaaagt

SEQ ID NO: 95802 - DNA, 15 bp, Homo sapiens
ttaacatcttgaaag

SEQ ID NO: 95803 - DNA, 15 bp, Homo sapiens
gttaacatcttgaaa

SEQ ID NO: 95804 - DNA, 15 bp, Homo sapiens
tgttaacatcttgaa

SEQ ID NO: 95805 - DNA, 15 bp, Homo sapiens
ctgttaacatcttga

SEQ ID NO: 95806 - DNA, 15 bp, Homo sapiens
cctgttaacatcttg

SEQ ID NO: 95807 - DNA, 15 bp, Homo sapiens
tcctgttaacatctt

SEQ ID NO: 95808 - DNA, 15 bp, Homo sapiens
ctcctgttaacatct

SEQ ID NO: 95809 - DNA, 15 bp, Homo sapiens
tctcctgttaacatc

SEQ ID NO: 95810 - DNA, 15 bp, Homo sapiens
atctcctgttaacat

SEQ ID NO: 95811 - DNA, 15 bp, Homo sapiens
tatctcctgttaaca

SEQ ID NO: 95812 - DNA, 15 bp, Homo sapiens
gtatctcctgttaac

SEQ ID NO: 95813 - DNA, 15 bp, Homo sapiens
ggtatctcctgttaa

SEQ ID NO: 95814 - DNA, 15 bp, Homo sapiens
tggtatctcctgtta

SEQ ID NO: 95815 - DNA, 15 bp, Homo sapiens
gtggtatctcctgtt

SEQ ID NO: 95816 - DNA, 15 bp, Homo sapiens
agtggtatctcctgt

SEQ ID NO: 95817 - DNA, 15 bp, Homo sapiens
cagtggtatctcctg

SEQ ID NO: 95818 - DNA, 15 bp, Homo sapiens
acagtggtatctcct

SEQ ID NO: 95819 - DNA, 15 bp, Homo sapiens
aacagtggtatctcc

SEQ ID NO: 95820 - DNA, 15 bp, Homo sapiens
taacagtggtatctc

SEQ ID NO: 95821 - DNA, 15 bp, Homo sapiens
gtaacagtggtatct

SEQ ID NO: 95822 - DNA, 15 bp, Homo sapiens
ggtaacagtggtatc

SEQ ID NO: 95823 - DNA, 15 bp, Homo sapiens
tggtaacagtggtat

SEQ ID NO: 95824 - DNA, 15 bp, Homo sapiens
ctggtaacagtggta

SEQ ID NO: 95825 - DNA, 15 bp, Homo sapiens
tctggtaacagtggt

SEQ ID NO: 95826 - DNA, 15 bp, Homo sapiens
ctctggtaacagtgg

SEQ ID NO: 95827 - DNA, 15 bp, Homo sapiens
cctctggtaacagtg

SEQ ID NO: 95828 - DNA, 15 bp, Homo sapiens
tcctctggtaacagt

SEQ ID NO: 95829 - DNA, 15 bp, Homo sapiens
ctcctctggtaacag

SEQ ID NO: 95830 - DNA, 15 bp, Homo sapiens
tctcctctggtaaca

SEQ ID NO: 95831 - DNA, 15 bp, Homo sapiens
atctcctctggtaac

SEQ ID NO: 95832 - DNA, 15 bp, Homo sapiens
catctcctctggtaa

SEQ ID NO: 95833 - DNA, 15 bp, Homo sapiens
gcatctcctctggta

SEQ ID NO: 95834 - DNA, 15 bp, Homo sapiens
agcatctcctctggt

SEQ ID NO: 95835 - DNA, 15 bp, Homo sapiens
aagcatctcctctgg

SEQ ID NO: 95836 - DNA, 15 bp, Homo sapiens
aaagcatctcctctg

SEQ ID NO: 95837 - DNA, 15 bp, Homo sapiens
gaaagcatctcctct

SEQ ID NO: 95838 - DNA, 15 bp, Homo sapiens
ggaaagcatctcctc

SEQ ID NO: 95839 - DNA, 15 bp, Homo sapiens
aggaaagcatctcct

SEQ ID NO: 95840 - DNA, 15 bp, Homo sapiens
aaggaaagcatctcc

SEQ ID NO: 95841 - DNA, 15 bp, Homo sapiens
taaggaaagcatctc

SEQ ID NO: 95842 - DNA, 15 bp, Homo sapiens
ttaaggaaagcatct

SEQ ID NO: 95843 - DNA, 15 bp, Homo sapiens
gttaaggaaagcatc

SEQ ID NO: 95844 - DNA, 15 bp, Homo sapiens
tgttaaggaaagcat

SEQ ID NO: 95845 - DNA, 15 bp, Homo sapiens
ttgttaaggaaagca

SEQ ID NO: 95846 - DNA, 15 bp, Homo sapiens
tttgttaaggaaagc

SEQ ID NO: 95847 - DNA, 15 bp, Homo sapiens
ttttgttaaggaaag

SEQ ID NO: 95848 - DNA, 15 bp, Homo sapiens
tttttgttaaggaaa

SEQ ID NO: 95849 - DNA, 15 bp, Homo sapiens
atttttgttaaggaa

SEQ ID NO: 95850 - DNA, 15 bp, Homo sapiens
tatttttgttaagga

SEQ ID NO: 95851 - DNA, 15 bp, Homo sapiens
ctatttttgttaagg

SEQ ID NO: 95852 - DNA, 15 bp, Homo sapiens
cctatttttgttaag

SEQ ID NO: 95853 - DNA, 15 bp, Homo sapiens
acctatttttgttaa

SEQ ID NO: 95854 - DNA, 15 bp, Homo sapiens
cacctatttttgtta

SEQ ID NO: 95855 - DNA, 15 bp, Homo sapiens
tcacctatttttgtt

SEQ ID NO: 95856 - DNA, 15 bp, Homo sapiens
ctcacctatttttgt

SEQ ID NO: 95857 - DNA, 15 bp, Homo sapiens
tctcacctatttttg

SEQ ID NO: 95858 - DNA, 15 bp, Homo sapiens
ttctcacctattttt

SEQ ID NO: 95859 - DNA, 15 bp, Homo sapiens
tttctcacctatttt

SEQ ID NO: 95860 - DNA, 15 bp, Homo sapiens
ttttctcacctattt

SEQ ID NO: 95861 - DNA, 15 bp, Homo sapiens
cttttctcacctatt

SEQ ID NO: 95862 - DNA, 15 bp, Homo sapiens
tcttttctcacctat

SEQ ID NO: 95863 - DNA, 15 bp, Homo sapiens
ttcttttctcaccta

SEQ ID NO: 95864 - DNA, 15 bp, Homo sapiens
cttcttttctcacct

SEQ ID NO: 95865 - DNA, 15 bp, Homo sapiens
acttcttttctcacc

SEQ ID NO: 95866 - DNA, 15 bp, Homo sapiens
cacttcttttctcac

SEQ ID NO: 95867 - DNA, 15 bp, Homo sapiens
ccacttcttttctca

SEQ ID NO: 95868 - DNA, 15 bp, Homo sapiens
gccacttcttttctc

SEQ ID NO: 95869 - DNA, 15 bp, Homo sapiens
agccacttcttttct

SEQ ID NO: 95870 - DNA, 15 bp, Homo sapiens
aagccacttcttttc

SEQ ID NO: 95871 - DNA, 15 bp, Homo sapiens
caagccacttctttt

SEQ ID NO: 95872 - DNA, 15 bp, Homo sapiens
acaagccacttcttt

SEQ ID NO: 95873 - DNA, 15 bp, Homo sapiens
tacaagccacttctt

SEQ ID NO: 95874 - DNA, 15 bp, Homo sapiens
atacaagccacttct

SEQ ID NO: 95875 - DNA, 15 bp, Homo sapiens
aatacaagccacttc

SEQ ID NO: 95876 - DNA, 15 bp, Homo sapiens
aaatacaagccactt

SEQ ID NO: 95877 - DNA, 15 bp, Homo sapiens
aaaatacaagccact

SEQ ID NO: 95878 - DNA, 15 bp, Homo sapiens
caaaatacaagccac

SEQ ID NO: 95879 - DNA, 15 bp, Homo sapiens
gcaaaatacaagcca

SEQ ID NO: 95880 - DNA, 15 bp, Homo sapiens
agcaaaatacaagcc

SEQ ID NO: 95881 - DNA, 15 bp, Homo sapiens
cagcaaaatacaagc

SEQ ID NO: 95882 - DNA, 15 bp, Homo sapiens
gcagcaaaatacaag

SEQ ID NO: 95883 - DNA, 15 bp, Homo sapiens
tgcagcaaaatacaa

SEQ ID NO: 95884 - DNA, 15 bp, Homo sapiens
ttgcagcaaaataca

SEQ ID NO: 95885 - DNA, 15 bp, Homo sapiens
tttgcagcaaaatac

SEQ ID NO: 95886 - DNA, 15 bp, Homo sapiens
ctttgcagcaaaata

SEQ ID NO: 95887 - DNA, 15 bp, Homo sapiens
tctttgcagcaaaat

SEQ ID NO: 95888 - DNA, 15 bp, Homo sapiens
gtctttgcagcaaaa

SEQ ID NO: 95889 - DNA, 15 bp, Homo sapiens
agtctttgcagcaaa

SEQ ID NO: 95890 - DNA, 15 bp, Homo sapiens
aagtctttgcagcaa

SEQ ID NO: 95891 - DNA, 15 bp, Homo sapiens
aaagtctttgcagca

SEQ ID NO: 95892 - DNA, 15 bp, Homo sapiens
caaagtctttgcagc

SEQ ID NO: 95893 - DNA, 15 bp, Homo sapiens
acaaagtctttgcag

SEQ ID NO: 95894 - DNA, 15 bp, Homo sapiens
aacaaagtctttgca

SEQ ID NO: 95895 - DNA, 15 bp, Homo sapiens
aaacaaagtctttgc

SEQ ID NO: 95896 - DNA, 15 bp, Homo sapiens
aaaacaaagtctttg

SEQ ID NO: 95897 - DNA, 15 bp, Homo sapiens
aaaaacaaagtcttt

SEQ ID NO: 95898 - DNA, 15 bp, Homo sapiens
taaaaacaaagtctt

SEQ ID NO: 95899 - DNA, 15 bp, Homo sapiens
ttaaaaacaaagtct

SEQ ID NO: 95900 - DNA, 15 bp, Homo sapiens
attaaaaacaaagtc

SEQ ID NO: 95901 - DNA, 15 bp, Homo sapiens
aattaaaaacaaagt

SEQ ID NO: 95902 - DNA, 15 bp, Homo sapiens
aaattaaaaacaaag

SEQ ID NO: 95903 - DNA, 15 bp, Homo sapiens
taaattaaaaacaaa

SEQ ID NO: 95904 - DNA, 15 bp, Homo sapiens
ataaattaaaaacaa

SEQ ID NO: 95905 - DNA, 15 bp, Homo sapiens
aataaattaaaaaca

SEQ ID NO: 95906 - DNA, 15 bp, Homo sapiens
aaataaattaaaaac

SEQ ID NO: 95907 - DNA, 15 bp, Homo sapiens
taaataaattaaaaa

SEQ ID NO: 95908 - DNA, 15 bp, Homo sapiens
ttaaataaattaaaa

SEQ ID NO: 95909 - DNA, 15 bp, Homo sapiens
tttaaataaattaaa

SEQ ID NO: 95910 - DNA, 15 bp, Homo sapiens
ctttaaataaattaa

SEQ ID NO: 95911 - DNA, 15 bp, Homo sapiens
tctttaaataaatta

SEQ ID NO: 95912 - DNA, 15 bp, Homo sapiens
ttctttaaataaatt

SEQ ID NO: 95913 - DNA, 15 bp, Homo sapiens
tttctttaaataaat

SEQ ID NO: 95914 - DNA, 15 bp, Homo sapiens
atttctttaaataaa

SEQ ID NO: 95915 - DNA, 15 bp, Homo sapiens
tatttctttaaataa

SEQ ID NO: 95916 - DNA, 15 bp, Homo sapiens
ctatttctttaaata

SEQ ID NO: 95917 - DNA, 15 bp, Homo sapiens
cctatttctttaaat

SEQ ID NO: 95918 - DNA, 15 bp, Homo sapiens
acctatttctttaaa

SEQ ID NO: 95919 - DNA, 15 bp, Homo sapiens
aacctatttctttaa

SEQ ID NO: 95920 - DNA, 15 bp, Homo sapiens
caacctatttcttta

SEQ ID NO: 95921 - DNA, 15 bp, Homo sapiens
acaacctatttcttt

SEQ ID NO: 95922 - DNA, 15 bp, Homo sapiens
aacaacctatttctt

SEQ ID NO: 95923 - DNA, 15 bp, Homo sapiens
taacaacctatttct

SEQ ID NO: 95924 - DNA, 15 bp, Homo sapiens
ataacaacctatttc

SEQ ID NO: 95925 - DNA, 15 bp, Homo sapiens
aataacaacctattt

SEQ ID NO: 95926 - DNA, 15 bp, Homo sapiens
aaataacaacctatt

SEQ ID NO: 95927 - DNA, 15 bp, Homo sapiens
aaaataacaacctat

SEQ ID NO: 95928 - DNA, 15 bp, Homo sapiens
aaaaataacaaccta

SEQ ID NO: 95929 - DNA, 15 bp, Homo sapiens
caaaaataacaacct

SEQ ID NO: 95930 - DNA, 15 bp, Homo sapiens
tcaaaaataacaacc

SEQ ID NO: 95931 - DNA, 15 bp, Homo sapiens
atcaaaaataacaac

SEQ ID NO: 95932 - DNA, 15 bp, Homo sapiens
aatcaaaaataacaa

SEQ ID NO: 95933 - DNA, 15 bp, Homo sapiens
taatcaaaaataaca

SEQ ID NO: 95934 - DNA, 15 bp, Homo sapiens
gtaatcaaaaataac

SEQ ID NO: 95935 - DNA, 15 bp, Homo sapiens
tgtaatcaaaaataa

SEQ ID NO: 95936 - DNA, 15 bp, Homo sapiens
ctgtaatcaaaaata

SEQ ID NO: 95937 - DNA, 15 bp, Homo sapiens
actgtaatcaaaaat

SEQ ID NO: 95938 - DNA, 15 bp, Homo sapiens
cactgtaatcaaaaa

SEQ ID NO: 95939 - DNA, 15 bp, Homo sapiens
ccactgtaatcaaaa

SEQ ID NO: 95940 - DNA, 15 bp, Homo sapiens
accactgtaatcaaa

SEQ ID NO: 95941 - DNA, 15 bp, Homo sapiens
taccactgtaatcaa

SEQ ID NO: 95942 - DNA, 15 bp, Homo sapiens
ataccactgtaatca

SEQ ID NO: 95943 - DNA, 15 bp, Homo sapiens
aataccactgtaatc

SEQ ID NO: 95944 - DNA, 15 bp, Homo sapiens
aaataccactgtaat

SEQ ID NO: 95945 - DNA, 15 bp, Homo sapiens
aaaataccactgtaa

SEQ ID NO: 95946 - DNA, 15 bp, Homo sapiens
aaaaataccactgta

SEQ ID NO: 95947 - DNA, 15 bp, Homo sapiens
taaaaataccactgt

SEQ ID NO: 95948 - DNA, 15 bp, Homo sapiens
ctaaaaataccactg

SEQ ID NO: 95949 - DNA, 15 bp, Homo sapiens
tctaaaaataccact

SEQ ID NO: 95950 - DNA, 15 bp, Homo sapiens
ctctaaaaataccac

SEQ ID NO: 95951 - DNA, 15 bp, Homo sapiens
actctaaaaatacca

SEQ ID NO: 95952 - DNA, 15 bp, Homo sapiens
aactctaaaaatacc

SEQ ID NO: 95953 - DNA, 15 bp, Homo sapiens
gaactctaaaaatac

SEQ ID NO: 95954 - DNA, 15 bp, Homo sapiens
tgaactctaaaaata

SEQ ID NO: 95955 - DNA, 15 bp, Homo sapiens
atgaactctaaaaat

SEQ ID NO: 95956 - DNA, 15 bp, Homo sapiens
tatgaactctaaaaa

SEQ ID NO: 95957 - DNA, 15 bp, Homo sapiens
ttatgaactctaaaa

SEQ ID NO: 95958 - DNA, 15 bp, Homo sapiens
tttatgaactctaaa

SEQ ID NO: 95959 - DNA, 15 bp, Homo sapiens
ttttatgaactctaa

SEQ ID NO: 95960 - DNA, 15 bp, Homo sapiens
tttttatgaactcta

SEQ ID NO: 95961 - DNA, 15 bp, Homo sapiens
atttttatgaactct

SEQ ID NO: 95962 - DNA, 15 bp, Homo sapiens
catttttatgaactc

SEQ ID NO: 95963 - DNA, 15 bp, Homo sapiens
acatttttatgaact

SEQ ID NO: 95964 - DNA, 15 bp, Homo sapiens
aacatttttatgaac

SEQ ID NO: 95965 - DNA, 15 bp, Homo sapiens
caacatttttatgaa

SEQ ID NO: 95966 - DNA, 15 bp, Homo sapiens
tcaacatttttatga

SEQ ID NO: 95967 - DNA, 15 bp, Homo sapiens
ttcaacatttttatg

SEQ ID NO: 95968 - DNA, 15 bp, Homo sapiens
tttcaacatttttat

SEQ ID NO: 95969 - DNA, 15 bp, Homo sapiens
atttcaacattttta

SEQ ID NO: 95970 - DNA, 15 bp, Homo sapiens
tatttcaacattttt

SEQ ID NO: 95971 - DNA, 15 bp, Homo sapiens
atatttcaacatttt

SEQ ID NO: 95972 - DNA, 15 bp, Homo sapiens
tatatttcaacattt

SEQ ID NO: 95973 - DNA, 15 bp, Homo sapiens
ctatatttcaacatt

SEQ ID NO: 95974 - DNA, 15 bp, Homo sapiens
actatatttcaacat

SEQ ID NO: 95975 - DNA, 15 bp, Homo sapiens
tactatatttcaaca

SEQ ID NO: 95976 - DNA, 15 bp, Homo sapiens
ttactatatttcaac

SEQ ID NO: 95977 - DNA, 15 bp, Homo sapiens
tttactatatttcaa

SEQ ID NO: 95978 - DNA, 15 bp, Homo sapiens
ctttactatatttca

SEQ ID NO: 95979 - DNA, 15 bp, Homo sapiens
cctttactatatttc

SEQ ID NO: 95980 - DNA, 15 bp, Homo sapiens
ccctttactatattt

SEQ ID NO: 95981 - DNA, 15 bp, Homo sapiens
accctttactatatt

SEQ ID NO: 95982 - DNA, 15 bp, Homo sapiens
taccctttactatat

SEQ ID NO: 95983 - DNA, 15 bp, Homo sapiens
ttaccctttactata

SEQ ID NO: 95984 - DNA, 15 bp, Homo sapiens
tttaccctttactat

SEQ ID NO: 95985 - DNA, 15 bp, Homo sapiens
ctttaccctttacta

SEQ ID NO: 95986 - DNA, 15 bp, Homo sapiens
tctttaccctttact

SEQ ID NO: 95987 - DNA, 15 bp, Homo sapiens
ttctttaccctttac

SEQ ID NO: 95988 - DNA, 15 bp, Homo sapiens
cttctttacccttta

SEQ ID NO: 95989 - DNA, 15 bp, Homo sapiens
gcttctttacccttt

SEQ ID NO: 95990 - DNA, 15 bp, Homo sapiens
tgcttctttaccctt

SEQ ID NO: 95991 - DNA, 15 bp, Homo sapiens
gtgcttctttaccct

SEQ ID NO: 95992 - DNA, 15 bp, Homo sapiens
tgtgcttctttaccc

SEQ ID NO: 95993 - DNA, 15 bp, Homo sapiens
atgtgcttctttacc

SEQ ID NO: 95994 - DNA, 15 bp, Homo sapiens
tatgtgcttctttac

SEQ ID NO: 95995 - DNA, 15 bp, Homo sapiens
ttatgtgcttcttta

SEQ ID NO: 95996 - DNA, 15 bp, Homo sapiens
tttatgtgcttcttt

SEQ ID NO: 95997 - DNA, 15 bp, Homo sapiens
ttttatgtgcttctt

SEQ ID NO: 95998 - DNA, 15 bp, Homo sapiens
attttatgtgcttct

SEQ ID NO: 95999 - DNA, 15 bp, Homo sapiens
gattttatgtgcttc

SEQ ID NO: 96000 - DNA, 15 bp, Homo sapiens
tgattttatgtgctt

SEQ ID NO: 96001 - DNA, 15 bp, Homo sapiens
atgattttatgtgct

SEQ ID NO: 96002 - DNA, 15 bp, Homo sapiens
gatgattttatgtgc

SEQ ID NO: 96003 - DNA, 15 bp, Homo sapiens
ggatgattttatgtg

SEQ ID NO: 96004 - DNA, 15 bp, Homo sapiens
tggatgattttatgt

SEQ ID NO: 96005 - DNA, 15 bp, Homo sapiens
atggatgattttatg

SEQ ID NO: 96006 - DNA, 15 bp, Homo sapiens
catggatgattttat

SEQ ID NO: 96007 - DNA, 15 bp, Homo sapiens
tcatggatgatttta

SEQ ID NO: 96008 - DNA, 15 bp, Homo sapiens
atcatggatgatttt

SEQ ID NO: 96009 - DNA, 15 bp, Homo sapiens
aatcatggatgattt

SEQ ID NO: 96010 - DNA, 15 bp, Homo sapiens
aaatcatggatgatt

SEQ ID NO: 96011 - DNA, 15 bp, Homo sapiens
gaaatcatggatgat

SEQ ID NO: 96012 - DNA, 15 bp, Homo sapiens
tgaaatcatggatga

SEQ ID NO: 96013 - DNA, 15 bp, Homo sapiens
ttgaaatcatggatg

SEQ ID NO: 96014 - DNA, 15 bp, Homo sapiens
attgaaatcatggat

SEQ ID NO: 96015 - DNA, 15 bp, Homo sapiens
tattgaaatcatgga

SEQ ID NO: 96016 - DNA, 15 bp, Homo sapiens
atattgaaatcatgg

SEQ ID NO: 96017 - DNA, 15 bp, Homo sapiens
gatattgaaatcatg

SEQ ID NO: 96018 - DNA, 15 bp, Homo sapiens
agatattgaaatcat

SEQ ID NO: 96019 - DNA, 15 bp, Homo sapiens
tagatattgaaatca

SEQ ID NO: 96020 - DNA, 15 bp, Homo sapiens
ctagatattgaaatc

SEQ ID NO: 96021 - DNA, 15 bp, Homo sapiens
tctagatattgaaat

SEQ ID NO: 96022 - DNA, 15 bp, Homo sapiens
ctctagatattgaaa

SEQ ID NO: 96023 - DNA, 15 bp, Homo sapiens
tctctagatattgaa

SEQ ID NO: 96024 - DNA, 15 bp, Homo sapiens
atctctagatattga

SEQ ID NO: 96025 - DNA, 15 bp, Homo sapiens
tatctctagatattg

SEQ ID NO: 96026 - DNA, 15 bp, Homo sapiens
ttatctctagatatt

SEQ ID NO: 96027 - DNA, 15 bp, Homo sapiens
attatctctagatat

SEQ ID NO: 96028 - DNA, 15 bp, Homo sapiens
gattatctctagata

SEQ ID NO: 96029 - DNA, 15 bp, Homo sapiens
tgattatctctagat

SEQ ID NO: 96030 - DNA, 15 bp, Homo sapiens
gtgattatctctaga

SEQ ID NO: 96031 - DNA, 15 bp, Homo sapiens
tgtgattatctctag

SEQ ID NO: 96032 - DNA, 15 bp, Homo sapiens
ttgtgattatctcta

SEQ ID NO: 96033 - DNA, 15 bp, Homo sapiens
attgtgattatctct

SEQ ID NO: 96034 - DNA, 15 bp, Homo sapiens
aattgtgattatctc

SEQ ID NO: 96035 - DNA, 15 bp, Homo sapiens
aaattgtgattatct

SEQ ID NO: 96036 - DNA, 15 bp, Homo sapiens
taaattgtgattatc

SEQ ID NO: 96037 - DNA, 15 bp, Homo sapiens
gtaaattgtgattat

SEQ ID NO: 96038 - DNA, 15 bp, Homo sapiens
tgtaaattgtgatta

SEQ ID NO: 96039 - DNA, 15 bp, Homo sapiens
atgtaaattgtgatt

SEQ ID NO: 96040 - DNA, 15 bp, Homo sapiens
aatgtaaattgtgat

SEQ ID NO: 96041 - DNA, 15 bp, Homo sapiens
aaatgtaaattgtga

SEQ ID NO: 96042 - DNA, 15 bp, Homo sapiens
gaaatgtaaattgtg

SEQ ID NO: 96043 - DNA, 15 bp, Homo sapiens
ggaaatgtaaattgt

SEQ ID NO: 96044 - DNA, 15 bp, Homo sapiens
aggaaatgtaaattg

SEQ ID NO: 96045 - DNA, 15 bp, Homo sapiens
aaggaaatgtaaatt

SEQ ID NO: 96046 - DNA, 15 bp, Homo sapiens
aaaggaaatgtaaat

SEQ ID NO: 96047 - DNA, 15 bp, Homo sapiens
gaaaggaaatgtaaa

SEQ ID NO: 96048 - DNA, 15 bp, Homo sapiens
tgaaaggaaatgtaa

SEQ ID NO: 96049 - DNA, 15 bp, Homo sapiens
ctgaaaggaaatgta

SEQ ID NO: 96050 - DNA, 15 bp, Homo sapiens
actgaaaggaaatgt

SEQ ID NO: 96051 - DNA, 15 bp, Homo sapiens
gactgaaaggaaatg

SEQ ID NO: 96052 - DNA, 15 bp, Homo sapiens
agactgaaaggaaat

SEQ ID NO: 96053 - DNA, 15 bp, Homo sapiens
gagactgaaaggaaa

SEQ ID NO: 96054 - DNA, 15 bp, Homo sapiens
tgagactgaaaggaa

SEQ ID NO: 96055 - DNA, 15 bp, Homo sapiens
atgagactgaaagga

SEQ ID NO: 96056 - DNA, 15 bp, Homo sapiens
aatgagactgaaagg

SEQ ID NO: 96057 - DNA, 15 bp, Homo sapiens
gaatgagactgaaag

SEQ ID NO: 96058 - DNA, 15 bp, Homo sapiens
agaatgagactgaaa

SEQ ID NO: 96059 - DNA, 15 bp, Homo sapiens
gagaatgagactgaa

SEQ ID NO: 96060 - DNA, 15 bp, Homo sapiens
agagaatgagactga

SEQ ID NO: 96061 - DNA, 15 bp, Homo sapiens
aagagaatgagactg

SEQ ID NO: 96062 - DNA, 15 bp, Homo sapiens
gaagagaatgagact

SEQ ID NO: 96063 - DNA, 15 bp, Homo sapiens
agaagagaatgagac

SEQ ID NO: 96064 - DNA, 15 bp, Homo sapiens
aagaagagaatgaga

SEQ ID NO: 96065 - DNA, 15 bp, Homo sapiens
aaagaagagaatgag

SEQ ID NO: 96066 - DNA, 15 bp, Homo sapiens
aaaagaagagaatga

SEQ ID NO: 96067 - DNA, 15 bp, Homo sapiens
taaaagaagagaatg

SEQ ID NO: 96068 - DNA, 15 bp, Homo sapiens
ttaaaagaagagaat

SEQ ID NO: 96069 - DNA, 15 bp, Homo sapiens
gttaaaagaagagaa

SEQ ID NO: 96070 - DNA, 15 bp, Homo sapiens
tgttaaaagaagaga

SEQ ID NO: 96071 - DNA, 15 bp, Homo sapiens
ctgttaaaagaagag

SEQ ID NO: 96072 - DNA, 15 bp, Homo sapiens
gctgttaaaagaaga

SEQ ID NO: 96073 - DNA, 15 bp, Homo sapiens
agctgttaaaagaag

SEQ ID NO: 96074 - DNA, 15 bp, Homo sapiens
aagctgttaaaagaa

SEQ ID NO: 96075 - DNA, 15 bp, Homo sapiens
aaagctgttaaaaga

SEQ ID NO: 96076 - DNA, 15 bp, Homo sapiens
taaagctgttaaaag

SEQ ID NO: 96077 - DNA, 15 bp, Homo sapiens
ataaagctgttaaaa

SEQ ID NO: 96078 - DNA, 15 bp, Homo sapiens
aataaagctgttaaa

SEQ ID NO: 96079 - DNA, 15 bp, Homo sapiens
gaataaagctgttaa

SEQ ID NO: 96080 - DNA, 15 bp, Homo sapiens
tgaataaagctgtta

SEQ ID NO: 96081 - DNA, 15 bp, Homo sapiens
ctgaataaagctgtt

SEQ ID NO: 96082 - DNA, 15 bp, Homo sapiens
cctgaataaagctgt

SEQ ID NO: 96083 - DNA, 15 bp, Homo sapiens
acctgaataaagctg

SEQ ID NO: 96084 - DNA, 15 bp, Homo sapiens
tacctgaataaagct

SEQ ID NO: 96085 - DNA, 15 bp, Homo sapiens
atacctgaataaagc

SEQ ID NO: 96086 - DNA, 15 bp, Homo sapiens
tatacctgaataaag

SEQ ID NO: 96087 - DNA, 15 bp, Homo sapiens
ttatacctgaataaa

SEQ ID NO: 96088 - DNA, 15 bp, Homo sapiens
attatacctgaataa

SEQ ID NO: 96089 - DNA, 15 bp, Homo sapiens
aattatacctgaata

SEQ ID NO: 96090 - DNA, 15 bp, Homo sapiens
aaattatacctgaat

SEQ ID NO: 96091 - DNA, 15 bp, Homo sapiens
taaattatacctgaa

SEQ ID NO: 96092 - DNA, 15 bp, Homo sapiens
gtaaattatacctga

SEQ ID NO: 96093 - DNA, 15 bp, Homo sapiens
atgtaaattatacct

SEQ ID NO: 96094 - DNA, 15 bp, Homo sapiens
tatgtaaattatacc

SEQ ID NO: 96095 - DNA, 15 bp, Homo sapiens
gtatgtaaattatac

SEQ ID NO: 96096 - DNA, 15 bp, Homo sapiens
tgtatgtaaattata

SEQ ID NO: 96097 - DNA, 15 bp, Homo sapiens
ttgtatgtaaattat

SEQ ID NO: 96098 - DNA, 15 bp, Homo sapiens
attgtatgtaaatta

SEQ ID NO: 96099 - DNA, 15 bp, Homo sapiens
tattgtatgtaaatt

SEQ ID NO: 96100 - DNA, 15 bp, Homo sapiens
atattgtatgtaaat

SEQ ID NO: 96101 - DNA, 15 bp, Homo sapiens
tatattgtatgtaaa

SEQ ID NO: 96102 - DNA, 15 bp, Homo sapiens
ttatattgtatgtaa

SEQ ID NO: 96103 - DNA, 15 bp, Homo sapiens
attatattgtatgta

SEQ ID NO: 96104 - DNA, 15 bp, Homo sapiens
aattatattgtatgt

SEQ ID NO: 96105 - DNA, 15 bp, Homo sapiens
aaattatattgtatg

SEQ ID NO: 96106 - DNA, 15 bp, Homo sapiens
caaattatattgtat

SEQ ID NO: 96107 - DNA, 15 bp, Homo sapiens
gcaaattatattgta

SEQ ID NO: 96108 - DNA, 15 bp, Homo sapiens
agcaaattatattgt

SEQ ID NO: 96109 - DNA, 15 bp, Homo sapiens
aagcaaattatattg

SEQ ID NO: 96110 - DNA, 15 bp, Homo sapiens
caagcaaattatatt

SEQ ID NO: 96111 - DNA, 15 bp, Homo sapiens
acaagcaaattatat

SEQ ID NO: 96112 - DNA, 15 bp, Homo sapiens
aacaagcaaattata

SEQ ID NO: 96113 - DNA, 15 bp, Homo sapiens
aaacaagcaaattat

SEQ ID NO: 96114 - DNA, 15 bp, Homo sapiens
aaaacaagcaaatta

SEQ ID NO: 96115 - DNA, 15 bp, Homo sapiens
aaaaacaagcaaatt

SEQ ID NO: 96116 - DNA, 15 bp, Homo sapiens
aaaaaacaagcaaat

SEQ ID NO: 96117 - DNA, 15 bp, Homo sapiens
taaaaaacaagcaaa

SEQ ID NO: 96118 - DNA, 15 bp, Homo sapiens
ttaaaaaacaagcaa

SEQ ID NO: 96119 - DNA, 15 bp, Homo sapiens
cttaaaaaacaagca

SEQ ID NO: 96120 - DNA, 15 bp, Homo sapiens
tcttaaaaaacaagc

SEQ ID NO: 96121 - DNA, 15 bp, Homo sapiens
ctcttaaaaaacaag

SEQ ID NO: 96122 - DNA, 15 bp, Homo sapiens
actcttaaaaaacaa

SEQ ID NO: 96123 - DNA, 15 bp, Homo sapiens
tactcttaaaaaaca

SEQ ID NO: 96124 - DNA, 15 bp, Homo sapiens
atactcttaaaaaac

SEQ ID NO: 96125 - DNA, 15 bp, Homo sapiens
tatactcttaaaaaa

SEQ ID NO: 96126 - DNA, 15 bp, Homo sapiens
ttatactcttaaaaa

SEQ ID NO: 96127 - DNA, 15 bp, Homo sapiens
attatactcttaaaa

SEQ ID NO: 96128 - DNA, 15 bp, Homo sapiens
aattatactcttaaa

SEQ ID NO: 96129 - DNA, 15 bp, Homo sapiens
aaattatactcttaa

SEQ ID NO: 96130 - DNA, 15 bp, Homo sapiens
taaattatactctta

SEQ ID NO: 96131 - DNA, 15 bp, Homo sapiens
ctaaattatactctt

SEQ ID NO: 96132 - DNA, 15 bp, Homo sapiens
actaaattatactct

SEQ ID NO: 96133 - DNA, 15 bp, Homo sapiens
cactaaattatactc

SEQ ID NO: 96134 - DNA, 15 bp, Homo sapiens
tcactaaattatact

SEQ ID NO: 96135 - DNA, 15 bp, Homo sapiens
atcactaaattatac

SEQ ID NO: 96136 - DNA, 15 bp, Homo sapiens
aatcactaaattata

SEQ ID NO: 96137 - DNA, 15 bp, Homo sapiens
aaatcactaaattat

SEQ ID NO: 96138 - DNA, 15 bp, Homo sapiens
aaaatcactaaatta

SEQ ID NO: 96139 - DNA, 15 bp, Homo sapiens
aaaaatcactaaatt

SEQ ID NO: 96140 - DNA, 15 bp, Homo sapiens
caaaaatcactaaat

SEQ ID NO: 96141 - DNA, 15 bp, Homo sapiens
ccaaaaatcactaaa

SEQ ID NO: 96142 - DNA, 15 bp, Homo sapiens
accaaaaatcactaa

SEQ ID NO: 96143 - DNA, 15 bp, Homo sapiens
taccaaaaatcacta

SEQ ID NO: 96144 - DNA, 15 bp, Homo sapiens
ttaccaaaaatcact

SEQ ID NO: 96145 - DNA, 15 bp, Homo sapiens
tttaccaaaaatcac

SEQ ID NO: 96146 - DNA, 15 bp, Homo sapiens
atttaccaaaaatca

SEQ ID NO: 96147 - DNA, 15 bp, Homo sapiens
aatttaccaaaaatc

SEQ ID NO: 96148 - DNA, 15 bp, Homo sapiens
caatttaccaaaaat

SEQ ID NO: 96149 - DNA, 15 bp, Homo sapiens
tcaatttaccaaaaa

SEQ ID NO: 96150 - DNA, 15 bp, Homo sapiens
ctcaatttaccaaaa

SEQ ID NO: 96151 - DNA, 15 bp, Homo sapiens
tctcaatttaccaaa

SEQ ID NO: 96152 - DNA, 15 bp, Homo sapiens
ctctcaatttaccaa

SEQ ID NO: 96153 - DNA, 15 bp, Homo sapiens
actctcaatttacca

SEQ ID NO: 96154 - DNA, 15 bp, Homo sapiens
aactctcaatttacc

SEQ ID NO: 96155 - DNA, 15 bp, Homo sapiens
aaactctcaatttac

SEQ ID NO: 96156 - DNA, 15 bp, Homo sapiens
aaaactctcaattta

SEQ ID NO: 96157 - DNA, 15 bp, Homo sapiens
caaaactctcaattt

SEQ ID NO: 96158 - DNA, 15 bp, Homo sapiens
gcaaaactctcaatt

SEQ ID NO: 96159 - DNA, 15 bp, Homo sapiens
tgcaaaactctcaat

SEQ ID NO: 96160 - DNA, 15 bp, Homo sapiens
ttgcaaaactctcaa

SEQ ID NO: 96161 - DNA, 15 bp, Homo sapiens
gttgcaaaactctca

SEQ ID NO: 96162 - DNA, 15 bp, Homo sapiens
ggttgcaaaactctc

SEQ ID NO: 96163 - DNA, 15 bp, Homo sapiens
tggttgcaaaactct

SEQ ID NO: 96164 - DNA, 15 bp, Homo sapiens
atggttgcaaaactc

SEQ ID NO: 96165 - DNA, 15 bp, Homo sapiens
gatggttgcaaaact

SEQ ID NO: 96166 - DNA, 15 bp, Homo sapiens
tgatggttgcaaaac

SEQ ID NO: 96167 - DNA, 15 bp, Homo sapiens
gtgatggttgcaaaa

SEQ ID NO: 96168 - DNA, 15 bp, Homo sapiens
ggtgatggttgcaaa

SEQ ID NO: 96169 - DNA, 15 bp, Homo sapiens
tggtgatggttgcaa

SEQ ID NO: 96170 - DNA, 15 bp, Homo sapiens
gtggtgatggttgca

SEQ ID NO: 96171 - DNA, 15 bp, Homo sapiens
tgtggtgatggttgc

SEQ ID NO: 96172 - DNA, 15 bp, Homo sapiens
ttgtggtgatggttg

SEQ ID NO: 96173 - DNA, 15 bp, Homo sapiens
attgtggtgatggtt

SEQ ID NO: 96174 - DNA, 15 bp, Homo sapiens
gattgtggtgatggt

SEQ ID NO: 96175 - DNA, 15 bp, Homo sapiens
ggattgtggtgatgg

SEQ ID NO: 96176 - DNA, 15 bp, Homo sapiens
tggattgtggtgatg

SEQ ID NO: 96177 - DNA, 15 bp, Homo sapiens
ctggattgtggtgat

SEQ ID NO: 96178 - DNA, 15 bp, Homo sapiens
actggattgtggtga

SEQ ID NO: 96179 - DNA, 15 bp, Homo sapiens
aactggattgtggtg

SEQ ID NO: 96180 - DNA, 15 bp, Homo sapiens
aaactggattgtggt

SEQ ID NO: 96181 - DNA, 15 bp, Homo sapiens
aaaactggattgtgg

SEQ ID NO: 96182 - DNA, 15 bp, Homo sapiens
taaaactggattgtg

SEQ ID NO: 96183 - DNA, 15 bp, Homo sapiens
ctaaaactggattgt

SEQ ID NO: 96184 - DNA, 15 bp, Homo sapiens
tctaaaactggattg

SEQ ID NO: 96185 - DNA, 15 bp, Homo sapiens
ttctaaaactggatt

SEQ ID NO: 96186 - DNA, 15 bp, Homo sapiens
gttctaaaactggat

SEQ ID NO: 96187 - DNA, 15 bp, Homo sapiens
agttctaaaactgga

SEQ ID NO: 96188 - DNA, 15 bp, Homo sapiens
aagttctaaaactgg

SEQ ID NO: 96189 - DNA, 15 bp, Homo sapiens
aaagttctaaaactg

SEQ ID NO: 96190 - DNA, 15 bp, Homo sapiens
aaaagttctaaaact

SEQ ID NO: 96191 - DNA, 15 bp, Homo sapiens
gaaaagttctaaaac

SEQ ID NO: 96192 - DNA, 15 bp, Homo sapiens
ggaaaagttctaaaa

SEQ ID NO: 96193 - DNA, 15 bp, Homo sapiens
tggaaaagttctaaa

SEQ ID NO: 96194 - DNA, 15 bp, Homo sapiens
atggaaaagttctaa

SEQ ID NO: 96195 - DNA, 15 bp, Homo sapiens
gatggaaaagttcta

SEQ ID NO: 96196 - DNA, 15 bp, Homo sapiens
tgatggaaaagttct

SEQ ID NO: 96197 - DNA, 15 bp, Homo sapiens
gtgatggaaaagttc

SEQ ID NO: 96198 - DNA, 15 bp, Homo sapiens
ggtgatggaaaagtt

SEQ ID NO: 96199 - DNA, 15 bp, Homo sapiens
gggtgatggaaaagt

SEQ ID NO: 96200 - DNA, 15 bp, Homo sapiens
ggggtgatggaaaag

SEQ ID NO: 96201 - DNA, 15 bp, Homo sapiens
tggggtgatggaaaa

SEQ ID NO: 96202 - DNA, 15 bp, Homo sapiens
gtggggtgatggaaa

SEQ ID NO: 96203 - DNA, 15 bp, Homo sapiens
tgtggggtgatggaa

SEQ ID NO: 96204 - DNA, 15 bp, Homo sapiens
atgtggggtgatgga

SEQ ID NO: 96205 - DNA, 15 bp, Homo sapiens
gatgtggggtgatgg

SEQ ID NO: 96206 - DNA, 15 bp, Homo sapiens
agatgtggggtgatg

SEQ ID NO: 96207 - DNA, 15 bp, Homo sapiens
cagatgtggggtgat

SEQ ID NO: 96208 - DNA, 15 bp, Homo sapiens
acagatgtggggtga

SEQ ID NO: 96209 - DNA, 15 bp, Homo sapiens
gacagatgtggggtg

SEQ ID NO: 96210 - DNA, 15 bp, Homo sapiens
agacagatgtggggt

SEQ ID NO: 96211 - DNA, 15 bp, Homo sapiens
aagacagatgtgggg

SEQ ID NO: 96212 - DNA, 15 bp, Homo sapiens
taagacagatgtggg

SEQ ID NO: 96213 - DNA, 15 bp, Homo sapiens
ataagacagatgtgg

SEQ ID NO: 96214 - DNA, 15 bp, Homo sapiens
tataagacagatgtg

SEQ ID NO: 96215 - DNA, 15 bp, Homo sapiens
atataagacagatgt

SEQ ID NO: 96216 - DNA, 15 bp, Homo sapiens
tatataagacagatg

SEQ ID NO: 96217 - DNA, 15 bp, Homo sapiens
gtatataagacagat

SEQ ID NO: 96218 - DNA, 15 bp, Homo sapiens
tgtatataagacaga

SEQ ID NO: 96219 - DNA, 15 bp, Homo sapiens
gtgtatataagacag

SEQ ID NO: 96220 - DNA, 15 bp, Homo sapiens
tgtgtatataagaca

SEQ ID NO: 96221 - DNA, 15 bp, Homo sapiens
atgtgtatataagac

SEQ ID NO: 96222 - DNA, 15 bp, Homo sapiens
tatgtgtatataaga

SEQ ID NO: 96223 - DNA, 15 bp, Homo sapiens
atatgtgtatataag

SEQ ID NO: 96224 - DNA, 15 bp, Homo sapiens
tatatgtgtatataa

SEQ ID NO: 96225 - DNA, 15 bp, Homo sapiens
ttatatgtgtatata

SEQ ID NO: 96226 - DNA, 15 bp, Homo sapiens
tttatatgtgtatat

SEQ ID NO: 96227 - DNA, 15 bp, Homo sapiens
atttatatgtgtata

SEQ ID NO: 96228 - DNA, 15 bp, Homo sapiens
catttatatgtgtat

SEQ ID NO: 96229 - DNA, 15 bp, Homo sapiens
acatttatatgtgta

SEQ ID NO: 96230 - DNA, 15 bp, Homo sapiens
cacatttatatgtgt

SEQ ID NO: 96231 - DNA, 15 bp, Homo sapiens
gcacatttatatgtg

SEQ ID NO: 96232 - DNA, 15 bp, Homo sapiens
ggcacatttatatgt

SEQ ID NO: 96233 - DNA, 15 bp, Homo sapiens
tggcacatttatatg

SEQ ID NO: 96234 - DNA, 15 bp, Homo sapiens
atggcacatttatat

SEQ ID NO: 96235 - DNA, 15 bp, Homo sapiens
tatggcacatttata

SEQ ID NO: 96236 - DNA, 15 bp, Homo sapiens
gtatggcacatttat

SEQ ID NO: 96237 - DNA, 15 bp, Homo sapiens
tgtatggcacattta

SEQ ID NO: 96238 - DNA, 15 bp, Homo sapiens
ttgtatggcacattt

SEQ ID NO: 96239 - DNA, 15 bp, Homo sapiens
attgtatggcacatt

SEQ ID NO: 96240 - DNA, 15 bp, Homo sapiens
aattgtatggcacat

SEQ ID NO: 96241 - DNA, 15 bp, Homo sapiens
caattgtatggcaca

SEQ ID NO: 96242 - DNA, 15 bp, Homo sapiens
tcaattgtatggcac

SEQ ID NO: 96243 - DNA, 15 bp, Homo sapiens
ctcaattgtatggca

SEQ ID NO: 96244 - DNA, 15 bp, Homo sapiens
tctcaattgtatggc

SEQ ID NO: 96245 - DNA, 15 bp, Homo sapiens
atctcaattgtatgg

SEQ ID NO: 96246 - DNA, 15 bp, Homo sapiens
gatctcaattgtatg

SEQ ID NO: 96247 - DNA, 15 bp, Homo sapiens
tgatctcaattgtat

SEQ ID NO: 96248 - DNA, 15 bp, Homo sapiens
atgatctcaattgta

SEQ ID NO: 96249 - DNA, 15 bp, Homo sapiens
tatgatctcaattgt

SEQ ID NO: 96250 - DNA, 15 bp, Homo sapiens
gtatgatctcaattg

SEQ ID NO: 96251 - DNA, 15 bp, Homo sapiens
agtatgatctcaatt

SEQ ID NO: 96252 - DNA, 15 bp, Homo sapiens
cagtatgatctcaat

SEQ ID NO: 96253 - DNA, 15 bp, Homo sapiens
acagtatgatctcaa

SEQ ID NO: 96254 - DNA, 15 bp, Homo sapiens
tacagtatgatctca

SEQ ID NO: 96255 - DNA, 15 bp, Homo sapiens
atacagtatgatctc

SEQ ID NO: 96256 - DNA, 15 bp, Homo sapiens
catacagtatgatct

SEQ ID NO: 96257 - DNA, 15 bp, Homo sapiens
acatacagtatgatc

SEQ ID NO: 96258 - DNA, 15 bp, Homo sapiens
tacatacagtatgat

SEQ ID NO: 96259 - DNA, 15 bp, Homo sapiens
ctacatacagtatga

SEQ ID NO: 96260 - DNA, 15 bp, Homo sapiens
tctacatacagtatg

SEQ ID NO: 96261 - DNA, 15 bp, Homo sapiens
ttctacatacagtat

SEQ ID NO: 96262 - DNA, 15 bp, Homo sapiens
attctacatacagta

SEQ ID NO: 96263 - DNA, 15 bp, Homo sapiens
aattctacatacagt

SEQ ID NO: 96264 - DNA, 15 bp, Homo sapiens
aaattctacatacag

SEQ ID NO: 96265 - DNA, 15 bp, Homo sapiens
taaattctacataca

SEQ ID NO: 96266 - DNA, 15 bp, Homo sapiens
ttaaattctacatac

SEQ ID NO: 96267 - DNA, 15 bp, Homo sapiens
tttaaattctacata

SEQ ID NO: 96268 - DNA, 15 bp, Homo sapiens
ttttaaattctacat

SEQ ID NO: 96269 - DNA, 15 bp, Homo sapiens
attttaaattctaca

SEQ ID NO: 96270 - DNA, 15 bp, Homo sapiens
aattttaaattctac

SEQ ID NO: 96271 - DNA, 15 bp, Homo sapiens
taattttaaattcta

SEQ ID NO: 96272 - DNA, 15 bp, Homo sapiens
ctaattttaaattct

SEQ ID NO: 96273 - DNA, 15 bp, Homo sapiens
actaattttaaattc

SEQ ID NO: 96274 - DNA, 15 bp, Homo sapiens
aactaattttaaatt

SEQ ID NO: 96275 - DNA, 15 bp, Homo sapiens
aaactaattttaaat

SEQ ID NO: 96276 - DNA, 15 bp, Homo sapiens
aaaactaattttaaa

SEQ ID NO: 96277 - DNA, 15 bp, Homo sapiens
aaaaactaattttaa

SEQ ID NO: 96278 - DNA, 15 bp, Homo sapiens
taaaaactaatttta

SEQ ID NO: 96279 - DNA, 15 bp, Homo sapiens
ataaaaactaatttt

SEQ ID NO: 96280 - DNA, 15 bp, Homo sapiens
aataaaaactaattt

SEQ ID NO: 96281 - DNA, 15 bp, Homo sapiens
caataaaaactaatt

SEQ ID NO: 96282 - DNA, 15 bp, Homo sapiens
acaataaaaactaat

SEQ ID NO: 96283 - DNA, 15 bp, Homo sapiens
aacaataaaaactaa

SEQ ID NO: 96284 - DNA, 15 bp, Homo sapiens
taacaataaaaacta

SEQ ID NO: 96285 - DNA, 15 bp, Homo sapiens
ttaacaataaaaact

SEQ ID NO: 96286 - DNA, 15 bp, Homo sapiens
attaacaataaaaac

SEQ ID NO: 96287 - DNA, 15 bp, Homo sapiens
cattaacaataaaaa

SEQ ID NO: 96288 - DNA, 15 bp, Homo sapiens
tcattaacaataaaa

SEQ ID NO: 96289 - DNA, 15 bp, Homo sapiens
ctcattaacaataaa

SEQ ID NO: 96290 - DNA, 15 bp, Homo sapiens
actcattaacaataa

SEQ ID NO: 96291 - DNA, 15 bp, Homo sapiens
cactcattaacaata

SEQ ID NO: 96292 - DNA, 15 bp, Homo sapiens
acactcattaacaat

SEQ ID NO: 96293 - DNA, 15 bp, Homo sapiens
tacactcattaacaa

SEQ ID NO: 96294 - DNA, 15 bp, Homo sapiens
atacactcattaaca

SEQ ID NO: 96295 - DNA, 15 bp, Homo sapiens
aatacactcattaac

SEQ ID NO: 96296 - DNA, 15 bp, Homo sapiens
taatacactcattaa

SEQ ID NO: 96297 - DNA, 15 bp, Homo sapiens
ataatacactcatta

SEQ ID NO: 96298 - DNA, 15 bp, Homo sapiens
cataatacactcatt

SEQ ID NO: 96299 - DNA, 15 bp, Homo sapiens
tcataatacactcat

SEQ ID NO: 96300 - DNA, 15 bp, Homo sapiens
ttcataatacactca

SEQ ID NO: 96301 - DNA, 15 bp, Homo sapiens
attcataatacactc

SEQ ID NO: 96302 - DNA, 15 bp, Homo sapiens
tattcataatacact

SEQ ID NO: 96303 - DNA, 15 bp, Homo sapiens
atattcataatacac

SEQ ID NO: 96304 - DNA, 15 bp, Homo sapiens
aatattcataataca

SEQ ID NO: 96305 - DNA, 15 bp, Homo sapiens
aaatattcataatac

SEQ ID NO: 96306 - DNA, 15 bp, Homo sapiens
gaaatattcataata

SEQ ID NO: 96307 - DNA, 15 bp, Homo sapiens
ggaaatattcataat

SEQ ID NO: 96308 - DNA, 15 bp, Homo sapiens
gggaaatattcataa

SEQ ID NO: 96309 - DNA, 15 bp, Homo sapiens
tgggaaatattcata

SEQ ID NO: 96310 - DNA, 15 bp, Homo sapiens
ctgggaaatattcat

SEQ ID NO: 96311 - DNA, 15 bp, Homo sapiens
actgggaaatattca

SEQ ID NO: 96312 - DNA, 15 bp, Homo sapiens
cactgggaaatattc

SEQ ID NO: 96313 - DNA, 15 bp, Homo sapiens
ccactgggaaatatt

SEQ ID NO: 96314 - DNA, 15 bp, Homo sapiens
cccactgggaaatat

SEQ ID NO: 96315 - DNA, 15 bp, Homo sapiens
acccactgggaaata

SEQ ID NO: 96316 - DNA, 15 bp, Homo sapiens
aacccactgggaaat

SEQ ID NO: 96317 - DNA, 15 bp, Homo sapiens
taacccactgggaaa

SEQ ID NO: 96318 - DNA, 15 bp, Homo sapiens
gtaacccactgggaa

SEQ ID NO: 96319 - DNA, 15 bp, Homo sapiens
tgtaacccactggga

SEQ ID NO: 96320 - DNA, 15 bp, Homo sapiens
atgtaacccactggg

SEQ ID NO: 96321 - DNA, 15 bp, Homo sapiens
aatgtaacccactgg

SEQ ID NO: 96322 - DNA, 15 bp, Homo sapiens
aaatgtaacccactg

SEQ ID NO: 96323 - DNA, 15 bp, Homo sapiens
gaaatgtaacccact

SEQ ID NO: 96324 - DNA, 15 bp, Homo sapiens
ggaaatgtaacccac

SEQ ID NO: 96325 - DNA, 15 bp, Homo sapiens
aggaaatgtaaccca

SEQ ID NO: 96326 - DNA, 15 bp, Homo sapiens
taggaaatgtaaccc

SEQ ID NO: 96327 - DNA, 15 bp, Homo sapiens
ttaggaaatgtaacc

SEQ ID NO: 96328 - DNA, 15 bp, Homo sapiens
cttaggaaatgtaac

SEQ ID NO: 96329 - DNA, 15 bp, Homo sapiens
tcttaggaaatgtaa

SEQ ID NO: 96330 - DNA, 15 bp, Homo sapiens
atcttaggaaatgta

SEQ ID NO: 96331 - DNA, 15 bp, Homo sapiens
catcttaggaaatgt

SEQ ID NO: 96332 - DNA, 15 bp, Homo sapiens
acatcttaggaaatg

SEQ ID NO: 96333 - DNA, 15 bp, Homo sapiens
cacatcttaggaaat

SEQ ID NO: 96334 - DNA, 15 bp, Homo sapiens
ccacatcttaggaaa

SEQ ID NO: 96335 - DNA, 15 bp, Homo sapiens
tccacatcttaggaa

SEQ ID NO: 96336 - DNA, 15 bp, Homo sapiens
ttccacatcttagga

SEQ ID NO: 96337 - DNA, 15 bp, Homo sapiens
attccacatcttagg

SEQ ID NO: 96338 - DNA, 15 bp, Homo sapiens
aattccacatcttag

SEQ ID NO: 96339 - DNA, 15 bp, Homo sapiens
aaattccacatctta

SEQ ID NO: 96340 - DNA, 15 bp, Homo sapiens
aaaattccacatctt

SEQ ID NO: 96341 - DNA, 15 bp, Homo sapiens
taaaattccacatct

SEQ ID NO: 96342 - DNA, 15 bp, Homo sapiens
gtaaaattccacatc

SEQ ID NO: 96343 - DNA, 15 bp, Homo sapiens
tgtaaaattccacat

SEQ ID NO: 96344 - DNA, 15 bp, Homo sapiens
atgtaaaattccaca

SEQ ID NO: 96345 - DNA, 15 bp, Homo sapiens
aatgtaaaattccac

SEQ ID NO: 96346 - DNA, 15 bp, Homo sapiens
caatgtaaaattcca

SEQ ID NO: 96347 - DNA, 15 bp, Homo sapiens
gcaatgtaaaattcc

SEQ ID NO: 96348 - DNA, 15 bp, Homo sapiens
agcaatgtaaaattc

SEQ ID NO: 96349 - DNA, 15 bp, Homo sapiens
tagcaatgtaaaatt

SEQ ID NO: 96350 - DNA, 15 bp, Homo sapiens
gtagcaatgtaaaat

SEQ ID NO: 96351 - DNA, 15 bp, Homo sapiens
tgtagcaatgtaaaa

SEQ ID NO: 96352 - DNA, 15 bp, Homo sapiens
atgtagcaatgtaaa

SEQ ID NO: 96353 - DNA, 15 bp, Homo sapiens
tatgtagcaatgtaa

SEQ ID NO: 96354 - DNA, 15 bp, Homo sapiens
ttatgtagcaatgta

SEQ ID NO: 96355 - DNA, 15 bp, Homo sapiens
tttatgtagcaatgt

SEQ ID NO: 96356 - DNA, 15 bp, Homo sapiens
ttttatgtagcaatg

SEQ ID NO: 96357 - DNA, 15 bp, Homo sapiens
attttatgtagcaat

SEQ ID NO: 96358 - DNA, 15 bp, Homo sapiens
gattttatgtagcaa

SEQ ID NO: 96359 - DNA, 15 bp, Homo sapiens
ggattttatgtagca

SEQ ID NO: 96360 - DNA, 15 bp, Homo sapiens
gggattttatgtagc

SEQ ID NO: 96361 - DNA, 15 bp, Homo sapiens
ggggattttatgtag

SEQ ID NO: 96362 - DNA, 15 bp, Homo sapiens
gggggattttatgta

SEQ ID NO: 96363 - DNA, 15 bp, Homo sapiens
agggggattttatgt

SEQ ID NO: 96364 - DNA, 15 bp, Homo sapiens
tagggggattttatg

SEQ ID NO: 96365 - DNA, 15 bp, Homo sapiens
atagggggattttat

SEQ ID NO: 96366 - DNA, 15 bp, Homo sapiens
catagggggatttta

SEQ ID NO: 96367 - DNA, 15 bp, Homo sapiens
acatagggggatttt

SEQ ID NO: 96368 - DNA, 15 bp, Homo sapiens
tacatagggggattt

SEQ ID NO: 96369 - DNA, 15 bp, Homo sapiens
gtacatagggggatt

SEQ ID NO: 96370 - DNA, 15 bp, Homo sapiens
tgtacatagggggat

SEQ ID NO: 96371 - DNA, 15 bp, Homo sapiens
atgtacataggggga

SEQ ID NO: 96372 - DNA, 15 bp, Homo sapiens
catgtacataggggg

SEQ ID NO: 96373 - DNA, 15 bp, Homo sapiens
acatgtacatagggg

SEQ ID NO: 96374 - DNA, 15 bp, Homo sapiens
tacatgtacataggg

SEQ ID NO: 96375 - DNA, 15 bp, Homo sapiens
gtacatgtacatagg

SEQ ID NO: 96376 - DNA, 15 bp, Homo sapiens
ggtacatgtacatag

SEQ ID NO: 96377 - DNA, 15 bp, Homo sapiens
aggtacatgtacata

SEQ ID NO: 96378 - DNA, 15 bp, Homo sapiens
taggtacatgtacat

SEQ ID NO: 96379 - DNA, 15 bp, Homo sapiens
ataggtacatgtaca

SEQ ID NO: 96380 - DNA, 15 bp, Homo sapiens
tataggtacatgtac

SEQ ID NO: 96381 - DNA, 15 bp, Homo sapiens
ttataggtacatgta

SEQ ID NO: 96382 - DNA, 15 bp, Homo sapiens
attataggtacatgt

SEQ ID NO: 96383 - DNA, 15 bp, Homo sapiens
aattataggtacatg

SEQ ID NO: 96384 - DNA, 15 bp, Homo sapiens
aaattataggtacat

SEQ ID NO: 96385 - DNA, 15 bp, Homo sapiens
taaattataggtaca

SEQ ID NO: 96386 - DNA, 15 bp, Homo sapiens
ataaattataggtac

SEQ ID NO: 96387 - DNA, 15 bp, Homo sapiens
aataaattataggta

SEQ ID NO: 96388 - DNA, 15 bp, Homo sapiens
aaataaattataggt

SEQ ID NO: 96389 - DNA, 15 bp, Homo sapiens
taaataaattatagg

SEQ ID NO: 96390 - DNA, 15 bp, Homo sapiens
ttaaataaattatag

SEQ ID NO: 96391 - DNA, 15 bp, Homo sapiens
attaaataaattata

SEQ ID NO: 96392 - DNA, 15 bp, Homo sapiens
tattaaataaattat

SEQ ID NO: 96393 - DNA, 15 bp, Homo sapiens
ttattaaataaatta

SEQ ID NO: 96394 - DNA, 15 bp, Homo sapiens
tttattaaataaatt

SEQ ID NO: 96395 - DNA, 15 bp, Homo sapiens
atttattaaataaat

SEQ ID NO: 96396 - DNA, 15 bp, Homo sapiens
aatttattaaataaa

SEQ ID NO: 96397 - DNA, 15 bp, Homo sapiens
gaatttattaaataa

SEQ ID NO: 96398 - DNA, 15 bp, Homo sapiens
ggaatttattaaata

SEQ ID NO: 96399 - DNA, 15 bp, Homo sapiens
aggaatttattaaat

SEQ ID NO: 96400 - DNA, 15 bp, Homo sapiens
aaggaatttattaaa

SEQ ID NO: 96401 - DNA, 15 bp, Homo sapiens
taaggaatttattaa

SEQ ID NO: 96402 - DNA, 15 bp, Homo sapiens
ataaggaatttatta

SEQ ID NO: 96403 - DNA, 15 bp, Homo sapiens
tataaggaatttatt

SEQ ID NO: 96404 - DNA, 15 bp, Homo sapiens
ttataaggaatttat

SEQ ID NO: 96405 - DNA, 15 bp, Homo sapiens
tttataaggaattta

SEQ ID NO: 96406 - DNA, 15 bp, Homo sapiens
atttataaggaattt

SEQ ID NO: 96407 - DNA, 15 bp, Homo sapiens
catttataaggaatt

SEQ ID NO: 96408 - DNA, 15 bp, Homo sapiens
acatttataaggaat

SEQ ID NO: 96409 - DNA, 15 bp, Homo sapiens
aacatttataaggaa

SEQ ID NO: 96410 - DNA, 15 bp, Homo sapiens
caacatttataagga

SEQ ID NO: 96411 - DNA, 15 bp, Homo sapiens
ccaacatttataagg

SEQ ID NO: 96412 - DNA, 15 bp, Homo sapiens
tccaacatttataag

SEQ ID NO: 96413 - DNA, 15 bp, Homo sapiens
gtccaacatttataa

SEQ ID NO: 96414 - DNA, 15 bp, Homo sapiens
tgtccaacatttata

SEQ ID NO: 96415 - DNA, 15 bp, Homo sapiens
gtgtccaacatttat

SEQ ID NO: 96416 - DNA, 15 bp, Homo sapiens
tgtgtccaacattta

SEQ ID NO: 96417 - DNA, 15 bp, Homo sapiens
atgtgtccaacattt

SEQ ID NO: 96418 - DNA, 15 bp, Homo sapiens
aatgtgtccaacatt

SEQ ID NO: 96419 - DNA, 15 bp, Homo sapiens
taatgtgtccaacat

SEQ ID NO: 96420 - DNA, 15 bp, Homo sapiens
ctaatgtgtccaaca

SEQ ID NO: 96421 - DNA, 15 bp, Homo sapiens
actaatgtgtccaac

SEQ ID NO: 96422 - DNA, 15 bp, Homo sapiens
aactaatgtgtccaa

SEQ ID NO: 96423 - DNA, 15 bp, Homo sapiens
aaactaatgtgtcca

SEQ ID NO: 96424 - DNA, 15 bp, Homo sapiens
gaaactaatgtgtcc

SEQ ID NO: 96425 - DNA, 15 bp, Homo sapiens
ggaaactaatgtgtc

SEQ ID NO: 96426 - DNA, 15 bp, Homo sapiens
tggaaactaatgtgt

SEQ ID NO: 96427 - DNA, 15 bp, Homo sapiens
atggaaactaatgtg

SEQ ID NO: 96428 - DNA, 15 bp, Homo sapiens
aatggaaactaatgt

SEQ ID NO: 96429 - DNA, 15 bp, Homo sapiens
aaatggaaactaatg

SEQ ID NO: 96430 - DNA, 15 bp, Homo sapiens
aaaatggaaactaat

SEQ ID NO: 96431 - DNA, 15 bp, Homo sapiens
aaaaatggaaactaa

SEQ ID NO: 96432 - DNA, 15 bp, Homo sapiens
gaaaaatggaaacta

SEQ ID NO: 96433 - DNA, 15 bp, Homo sapiens
tgaaaaatggaaact

SEQ ID NO: 96434 - DNA, 15 bp, Homo sapiens
gtgaaaaatggaaac

SEQ ID NO: 96435 - DNA, 15 bp, Homo sapiens
agtgaaaaatggaaa

SEQ ID NO: 96436 - DNA, 15 bp, Homo sapiens
tagtgaaaaatggaa

SEQ ID NO: 96437 - DNA, 15 bp, Homo sapiens
atagtgaaaaatgga

SEQ ID NO: 96438 - DNA, 15 bp, Homo sapiens
catagtgaaaaatgg

SEQ ID NO: 96439 - DNA, 15 bp, Homo sapiens
acatagtgaaaaatg

SEQ ID NO: 96440 - DNA, 15 bp, Homo sapiens
tacatagtgaaaaat

SEQ ID NO: 96441 - DNA, 15 bp, Homo sapiens
ttacatagtgaaaaa

SEQ ID NO: 96442 - DNA, 15 bp, Homo sapiens
tttacatagtgaaaa

SEQ ID NO: 96443 - DNA, 15 bp, Homo sapiens
atttacatagtgaaa

SEQ ID NO: 96444 - DNA, 15 bp, Homo sapiens
tatttacatagtgaa

SEQ ID NO: 96445 - DNA, 15 bp, Homo sapiens
atatttacatagtga

SEQ ID NO: 96446 - DNA, 15 bp, Homo sapiens
catatttacatagtg

SEQ ID NO: 96447 - DNA, 15 bp, Homo sapiens
acatatttacatagt

SEQ ID NO: 96448 - DNA, 15 bp, Homo sapiens
gacatatttacatag

SEQ ID NO: 96449 - DNA, 15 bp, Homo sapiens
ggacatatttacata

SEQ ID NO: 96450 - DNA, 15 bp, Homo sapiens
gggacatatttacat

SEQ ID NO: 96451 - DNA, 15 bp, Homo sapiens
agggacatatttaca

SEQ ID NO: 96452 - DNA, 15 bp, Homo sapiens
cagggacatatttac

SEQ ID NO: 96453 - DNA, 15 bp, Homo sapiens
acagggacatattta

SEQ ID NO: 96454 - DNA, 15 bp, Homo sapiens
tacagggacatattt

SEQ ID NO: 96455 - DNA, 15 bp, Homo sapiens
atacagggacatatt

SEQ ID NO: 96456 - DNA, 15 bp, Homo sapiens
tatacagggacatat

SEQ ID NO: 96457 - DNA, 15 bp, Homo sapiens
gtatacagggacata

SEQ ID NO: 96458 - DNA, 15 bp, Homo sapiens
tgtatacagggacat

SEQ ID NO: 96459 - DNA, 15 bp, Homo sapiens
atgtatacagggaca

SEQ ID NO: 96460 - DNA, 15 bp, Homo sapiens
gatgtatacagggac

SEQ ID NO: 96461 - DNA, 15 bp, Homo sapiens
agatgtatacaggga

SEQ ID NO: 96462 - DNA, 15 bp, Homo sapiens
aagatgtatacaggg

SEQ ID NO: 96463 - DNA, 15 bp, Homo sapiens
aaagatgtatacagg

SEQ ID NO: 96464 - DNA, 15 bp, Homo sapiens
aaaagatgtatacag

SEQ ID NO: 96465 - DNA, 15 bp, Homo sapiens
taaaagatgtataca

SEQ ID NO: 96466 - DNA, 15 bp, Homo sapiens
ataaaagatgtatac

SEQ ID NO: 96467 - DNA, 15 bp, Homo sapiens
aataaaagatgtata

SEQ ID NO: 96468 - DNA, 15 bp, Homo sapiens
taataaaagatgtat

SEQ ID NO: 96469 - DNA, 15 bp, Homo sapiens
ataataaaagatgta

SEQ ID NO: 96470 - DNA, 15 bp, Homo sapiens
aataataaaagatgt

SEQ ID NO: 96471 - DNA, 15 bp, Homo sapiens
aaataataaaagatg

SEQ ID NO: 96472 - DNA, 15 bp, Homo sapiens
gaaataataaaagat

SEQ ID NO: 96473 - DNA, 15 bp, Homo sapiens
ggaaataataaaaga

SEQ ID NO: 96474 - DNA, 15 bp, Homo sapiens
aggaaataataaaag

SEQ ID NO: 96475 - DNA, 15 bp, Homo sapiens
gaggaaataataaaa

SEQ ID NO: 96476 - DNA, 15 bp, Homo sapiens
tgaggaaataataaa

SEQ ID NO: 96477 - DNA, 15 bp, Homo sapiens
ctgaggaaataataa

SEQ ID NO: 96478 - DNA, 15 bp, Homo sapiens
cctgaggaaataata

SEQ ID NO: 96479 - DNA, 15 bp, Homo sapiens
tcctgaggaaataat

SEQ ID NO: 96480 - DNA, 15 bp, Homo sapiens
ttcctgaggaaataa

SEQ ID NO: 96481 - DNA, 15 bp, Homo sapiens
gttcctgaggaaata

SEQ ID NO: 96482 - DNA, 15 bp, Homo sapiens
tgttcctgaggaaat

SEQ ID NO: 96483 - DNA, 15 bp, Homo sapiens
ttgttcctgaggaaa

SEQ ID NO: 96484 - DNA, 15 bp, Homo sapiens
attgttcctgaggaa

SEQ ID NO: 96485 - DNA, 15 bp, Homo sapiens
aattgttcctgagga

SEQ ID NO: 96486 - DNA, 15 bp, Homo sapiens
gaattgttcctgagg

SEQ ID NO: 96487 - DNA, 15 bp, Homo sapiens
ggaattgttcctgag

SEQ ID NO: 96488 - DNA, 15 bp, Homo sapiens
aggaattgttcctga

SEQ ID NO: 96489 - DNA, 15 bp, Homo sapiens
taggaattgttcctg

SEQ ID NO: 96490 - DNA, 15 bp, Homo sapiens
gtaggaattgttcct

SEQ ID NO: 96491 - DNA, 15 bp, Homo sapiens
tgtaggaattgttcc

SEQ ID NO: 96492 - DNA, 15 bp, Homo sapiens
ttgtaggaattgttc

SEQ ID NO: 96493 - DNA, 15 bp, Homo sapiens
tttgtaggaattgtt

SEQ ID NO: 96494 - DNA, 15 bp, Homo sapiens
ctttgtaggaattgt

SEQ ID NO: 96495 - DNA, 15 bp, Homo sapiens
actttgtaggaattg

SEQ ID NO: 96496 - DNA, 15 bp, Homo sapiens
tactttgtaggaatt

SEQ ID NO: 96497 - DNA, 15 bp, Homo sapiens
ttactttgtaggaat

SEQ ID NO: 96498 - DNA, 15 bp, Homo sapiens
tttactttgtaggaa

SEQ ID NO: 96499 - DNA, 15 bp, Homo sapiens
atttactttgtagga

SEQ ID NO: 96500 - DNA, 15 bp, Homo sapiens
aatttactttgtagg

SEQ ID NO: 96501 - DNA, 15 bp, Homo sapiens
caatttactttgtag

SEQ ID NO: 96502 - DNA, 15 bp, Homo sapiens
gcaatttactttgta

SEQ ID NO: 96503 - DNA, 15 bp, Homo sapiens
ggcaatttactttgt

SEQ ID NO: 96504 - DNA, 15 bp, Homo sapiens
gggcaatttactttg

SEQ ID NO: 96505 - DNA, 15 bp, Homo sapiens
agggcaatttacttt

SEQ ID NO: 96506 - DNA, 15 bp, Homo sapiens
gagggcaatttactt

SEQ ID NO: 96507 - DNA, 15 bp, Homo sapiens
agagggcaatttact

SEQ ID NO: 96508 - DNA, 15 bp, Homo sapiens
gagagggcaatttac

SEQ ID NO: 96509 - DNA, 15 bp, Homo sapiens
agagagggcaattta

SEQ ID NO: 96510 - DNA, 15 bp, Homo sapiens
tagagagggcaattt

SEQ ID NO: 96511 - DNA, 15 bp, Homo sapiens
ttagagagggcaatt

SEQ ID NO: 96512 - DNA, 15 bp, Homo sapiens
tttagagagggcaat

SEQ ID NO: 96513 - DNA, 15 bp, Homo sapiens
ctttagagagggcaa

SEQ ID NO: 96514 - DNA, 15 bp, Homo sapiens
tctttagagagggca

SEQ ID NO: 96515 - DNA, 15 bp, Homo sapiens
ctctttagagagggc

SEQ ID NO: 96516 - DNA, 15 bp, Homo sapiens
gctctttagagaggg

SEQ ID NO: 96517 - DNA, 15 bp, Homo sapiens
tgctctttagagagg

SEQ ID NO: 96518 - DNA, 15 bp, Homo sapiens
atgctctttagagag

SEQ ID NO: 96519 - DNA, 15 bp, Homo sapiens
tatgctctttagaga

SEQ ID NO: 96520 - DNA, 15 bp, Homo sapiens
gtatgctctttagag

SEQ ID NO: 96521 - DNA, 15 bp, Homo sapiens
tgtatgctctttaga

SEQ ID NO: 96522 - DNA, 15 bp, Homo sapiens
ttgtatgctctttag

SEQ ID NO: 96523 - DNA, 15 bp, Homo sapiens
tttgtatgctcttta

SEQ ID NO: 96524 - DNA, 15 bp, Homo sapiens
atttgtatgctcttt

SEQ ID NO: 96525 - DNA, 15 bp, Homo sapiens
aatttgtatgctctt

SEQ ID NO: 96526 - DNA, 15 bp, Homo sapiens
caatttgtatgctct

SEQ ID NO: 96527 - DNA, 15 bp, Homo sapiens
tcaatttgtatgctc

SEQ ID NO: 96528 - DNA, 15 bp, Homo sapiens
gtcaatttgtatgct

SEQ ID NO: 96529 - DNA, 15 bp, Homo sapiens
agtcaatttgtatgc

SEQ ID NO: 96530 - DNA, 15 bp, Homo sapiens
cagtcaatttgtatg

SEQ ID NO: 96531 - DNA, 15 bp, Homo sapiens
tcagtcaatttgtat

SEQ ID NO: 96532 - DNA, 15 bp, Homo sapiens
ctcagtcaatttgta

SEQ ID NO: 96533 - DNA, 15 bp, Homo sapiens
gctcagtcaatttgt

SEQ ID NO: 96534 - DNA, 15 bp, Homo sapiens
ggctcagtcaatttg

SEQ ID NO: 96535 - DNA, 15 bp, Homo sapiens
tggctcagtcaattt

SEQ ID NO: 96536 - DNA, 15 bp, Homo sapiens
gtggctcagtcaatt

SEQ ID NO: 96537 - DNA, 15 bp, Homo sapiens
ggtggctcagtcaat

SEQ ID NO: 96538 - DNA, 15 bp, Homo sapiens
cggtggctcagtcaa

SEQ ID NO: 96539 - DNA, 15 bp, Homo sapiens
acggtggctcagtca

SEQ ID NO: 96540 - DNA, 15 bp, Homo sapiens
aacggtggctcagtc

SEQ ID NO: 96541 - DNA, 15 bp, Homo sapiens
taacggtggctcagt

SEQ ID NO: 96542 - DNA, 15 bp, Homo sapiens
ctaacggtggctcag

SEQ ID NO: 96543 - DNA, 15 bp, Homo sapiens
cctaacggtggctca

SEQ ID NO: 96544 - DNA, 15 bp, Homo sapiens
gcctaacggtggctc

SEQ ID NO: 96545 - DNA, 15 bp, Homo sapiens
ggcctaacggtggct

SEQ ID NO: 96546 - DNA, 15 bp, Homo sapiens
tggcctaacggtggc

SEQ ID NO: 96547 - DNA, 15 bp, Homo sapiens
atggcctaacggtgg

SEQ ID NO: 96548 - DNA, 15 bp, Homo sapiens
aatggcctaacggtg

SEQ ID NO: 96549 - DNA, 15 bp, Homo sapiens
aaatggcctaacggt

SEQ ID NO: 96550 - DNA, 15 bp, Homo sapiens
aaaatggcctaacgg

SEQ ID NO: 96551 - DNA, 15 bp, Homo sapiens
gaaaatggcctaacg

SEQ ID NO: 96552 - DNA, 15 bp, Homo sapiens
agaaaatggcctaac

SEQ ID NO: 96553 - DNA, 15 bp, Homo sapiens
cagaaaatggcctaa

SEQ ID NO: 96554 - DNA, 15 bp, Homo sapiens
tcagaaaatggccta

SEQ ID NO: 96555 - DNA, 15 bp, Homo sapiens
ctcagaaaatggcct

SEQ ID NO: 96556 - DNA, 15 bp, Homo sapiens
tctcagaaaatggcc

SEQ ID NO: 96557 - DNA, 15 bp, Homo sapiens
gtctcagaaaatggc

SEQ ID NO: 96558 - DNA, 15 bp, Homo sapiens
agtctcagaaaatgg

SEQ ID NO: 96559 - DNA, 15 bp, Homo sapiens
cagtctcagaaaatg

SEQ ID NO: 96560 - DNA, 15 bp, Homo sapiens
gcagtctcagaaaat

SEQ ID NO: 96561 - DNA, 15 bp, Homo sapiens
tgcagtctcagaaaa

SEQ ID NO: 96562 - DNA, 15 bp, Homo sapiens
gtgcagtctcagaaa

SEQ ID NO: 96563 - DNA, 15 bp, Homo sapiens
tgtgcagtctcagaa

SEQ ID NO: 96564 - DNA, 15 bp, Homo sapiens
ctgtgcagtctcaga

SEQ ID NO: 96565 - DNA, 15 bp, Homo sapiens
cctgtgcagtctcag

SEQ ID NO: 96566 - DNA, 15 bp, Homo sapiens
acctgtgcagtctca

SEQ ID NO: 96567 - DNA, 15 bp, Homo sapiens
gacctgtgcagtctc

SEQ ID NO: 96568 - DNA, 15 bp, Homo sapiens
tgacctgtgcagtct

SEQ ID NO: 96569 - DNA, 15 bp, Homo sapiens
gtgacctgtgcagtc

SEQ ID NO: 96570 - DNA, 15 bp, Homo sapiens
tgtgacctgtgcagt

SEQ ID NO: 96571 - DNA, 15 bp, Homo sapiens
ttgtgacctgtgcag

SEQ ID NO: 96572 - DNA, 15 bp, Homo sapiens
tttgtgacctgtgca

SEQ ID NO: 96573 - DNA, 15 bp, Homo sapiens
ctttgtgacctgtgc

SEQ ID NO: 96574 - DNA, 15 bp, Homo sapiens
gctttgtgacctgtg

SEQ ID NO: 96575 - DNA, 15 bp, Homo sapiens
tgctttgtgacctgt

SEQ ID NO: 96576 - DNA, 15 bp, Homo sapiens
ttgctttgtgacctg

SEQ ID NO: 96577 - DNA, 15 bp, Homo sapiens
attgctttgtgacct

SEQ ID NO: 96578 - DNA, 15 bp, Homo sapiens
gattgctttgtgacc

SEQ ID NO: 96579 - DNA, 15 bp, Homo sapiens
agattgctttgtgac

SEQ ID NO: 96580 - DNA, 15 bp, Homo sapiens
cagattgctttgtga

SEQ ID NO: 96581 - DNA, 15 bp, Homo sapiens
tcagattgctttgtg

SEQ ID NO: 96582 - DNA, 15 bp, Homo sapiens
atcagattgctttgt

SEQ ID NO: 96583 - DNA, 15 bp, Homo sapiens
gatcagattgctttg

SEQ ID NO: 96584 - DNA, 15 bp, Homo sapiens
agatcagattgcttt

SEQ ID NO: 96585 - DNA, 15 bp, Homo sapiens
aagatcagattgctt

SEQ ID NO: 96586 - DNA, 15 bp, Homo sapiens
aaagatcagattgct

SEQ ID NO: 96587 - DNA, 15 bp, Homo sapiens
caaagatcagattgc

SEQ ID NO: 96588 - DNA, 15 bp, Homo sapiens
ccaaagatcagattg

SEQ ID NO: 96589 - DNA, 15 bp, Homo sapiens
cccaaagatcagatt

SEQ ID NO: 96590 - DNA, 15 bp, Homo sapiens
tcccaaagatcagat

SEQ ID NO: 96591 - DNA, 15 bp, Homo sapiens
ttcccaaagatcaga

SEQ ID NO: 96592 - DNA, 15 bp, Homo sapiens
attcccaaagatcag

SEQ ID NO: 96593 - DNA, 15 bp, Homo sapiens
tattcccaaagatca

SEQ ID NO: 96594 - DNA, 15 bp, Homo sapiens
gtattcccaaagatc

SEQ ID NO: 96595 - DNA, 15 bp, Homo sapiens
tgtattcccaaagat

SEQ ID NO: 96596 - DNA, 15 bp, Homo sapiens
ctgtattcccaaaga

SEQ ID NO: 96597 - DNA, 15 bp, Homo sapiens
gctgtattcccaaag

SEQ ID NO: 96598 - DNA, 15 bp, Homo sapiens
agctgtattcccaaa

SEQ ID NO: 96599 - DNA, 15 bp, Homo sapiens
tagctgtattcccaa

SEQ ID NO: 96600 - DNA, 15 bp, Homo sapiens
gtagctgtattccca

SEQ ID NO: 96601 - DNA, 15 bp, Homo sapiens
tgtagctgtattccc

SEQ ID NO: 96602 - DNA, 15 bp, Homo sapiens
atgtagctgtattcc

SEQ ID NO: 96603 - DNA, 15 bp, Homo sapiens
aatgtagctgtattc

SEQ ID NO: 96604 - DNA, 15 bp, Homo sapiens
aaatgtagctgtatt

SEQ ID NO: 96605 - DNA, 15 bp, Homo sapiens
aaaatgtagctgtat

SEQ ID NO: 96606 - DNA, 15 bp, Homo sapiens
taaaatgtagctgta

SEQ ID NO: 96607 - DNA, 15 bp, Homo sapiens
ataaaatgtagctgt

SEQ ID NO: 96608 - DNA, 15 bp, Homo sapiens
tataaaatgtagctg

SEQ ID NO: 96609 - DNA, 15 bp, Homo sapiens
ctataaaatgtagct

SEQ ID NO: 96610 - DNA, 15 bp, Homo sapiens
cctataaaatgtagc

SEQ ID NO: 96611 - DNA, 15 bp, Homo sapiens
gcctataaaatgtag

SEQ ID NO: 96612 - DNA, 15 bp, Homo sapiens
agcctataaaatgta

SEQ ID NO: 96613 - DNA, 15 bp, Homo sapiens
aagcctataaaatgt

SEQ ID NO: 96614 - DNA, 15 bp, Homo sapiens
gaagcctataaaatg

SEQ ID NO: 96615 - DNA, 15 bp, Homo sapiens
agaagcctataaaat

SEQ ID NO: 96616 - DNA, 15 bp, Homo sapiens
aagaagcctataaaa

SEQ ID NO: 96617 - DNA, 15 bp, Homo sapiens
taagaagcctataaa

SEQ ID NO: 96618 - DNA, 15 bp, Homo sapiens
ctaagaagcctataa

SEQ ID NO: 96619 - DNA, 15 bp, Homo sapiens
tctaagaagcctata

SEQ ID NO: 96620 - DNA, 15 bp, Homo sapiens
atctaagaagcctat

SEQ ID NO: 96621 - DNA, 15 bp, Homo sapiens
tatctaagaagccta

SEQ ID NO: 96622 - DNA, 15 bp, Homo sapiens
ttatctaagaagcct

SEQ ID NO: 96623 - DNA, 15 bp, Homo sapiens
attatctaagaagcc

SEQ ID NO: 96624 - DNA, 15 bp, Homo sapiens
cattatctaagaagc

SEQ ID NO: 96625 - DNA, 15 bp, Homo sapiens
acattatctaagaag

SEQ ID NO: 96626 - DNA, 15 bp, Homo sapiens
aacattatctaagaa

SEQ ID NO: 96627 - DNA, 15 bp, Homo sapiens
taacattatctaaga

SEQ ID NO: 96628 - DNA, 15 bp, Homo sapiens
gtaacattatctaag

SEQ ID NO: 96629 - DNA, 15 bp, Homo sapiens
agtaacattatctaa

SEQ ID NO: 96630 - DNA, 15 bp, Homo sapiens
gagtaacattatcta

SEQ ID NO: 96631 - DNA, 15 bp, Homo sapiens
agagtaacattatct

SEQ ID NO: 96632 - DNA, 15 bp, Homo sapiens
tagagtaacattatc

SEQ ID NO: 96633 - DNA, 15 bp, Homo sapiens
ttagagtaacattat

SEQ ID NO: 96634 - DNA, 15 bp, Homo sapiens
cttagagtaacatta

SEQ ID NO: 96635 - DNA, 15 bp, Homo sapiens
acttagagtaacatt

SEQ ID NO: 96636 - DNA, 15 bp, Homo sapiens
tacttagagtaacat

SEQ ID NO: 96637 - DNA, 15 bp, Homo sapiens
gtacttagagtaaca

SEQ ID NO: 96638 - DNA, 15 bp, Homo sapiens
agtacttagagtaac

SEQ ID NO: 96639 - DNA, 15 bp, Homo sapiens
aagtacttagagtaa

SEQ ID NO: 96640 - DNA, 15 bp, Homo sapiens
aaagtacttagagta

SEQ ID NO: 96641 - DNA, 15 bp, Homo sapiens
taaagtacttagagt

SEQ ID NO: 96642 - DNA, 15 bp, Homo sapiens
ttaaagtacttagag

SEQ ID NO: 96643 - DNA, 15 bp, Homo sapiens
tttaaagtacttaga

SEQ ID NO: 96644 - DNA, 15 bp, Homo sapiens
atttaaagtacttag

SEQ ID NO: 96645 - DNA, 15 bp, Homo sapiens
tatttaaagtactta

SEQ ID NO: 96646 - DNA, 15 bp, Homo sapiens
atatttaaagtactt

SEQ ID NO: 96647 - DNA, 15 bp, Homo sapiens
catatttaaagtact

SEQ ID NO: 96648 - DNA, 15 bp, Homo sapiens
acatatttaaagtac

SEQ ID NO: 96649 - DNA, 15 bp, Homo sapiens
cacatatttaaagta

SEQ ID NO: 96650 - DNA, 15 bp, Homo sapiens
ccacatatttaaagt

SEQ ID NO: 96651 - DNA, 15 bp, Homo sapiens
cccacatatttaaag

SEQ ID NO: 96652 - DNA, 15 bp, Homo sapiens
ccccacatatttaaa

SEQ ID NO: 96653 - DNA, 15 bp, Homo sapiens
gccccacatatttaa

SEQ ID NO: 96654 - DNA, 15 bp, Homo sapiens
agccccacatattta

SEQ ID NO: 96655 - DNA, 15 bp, Homo sapiens
aagccccacatattt

SEQ ID NO: 96656 - DNA, 15 bp, Homo sapiens
gaagccccacatatt

SEQ ID NO: 96657 - DNA, 15 bp, Homo sapiens
agaagccccacatat

SEQ ID NO: 96658 - DNA, 15 bp, Homo sapiens
gagaagccccacata

SEQ ID NO: 96659 - DNA, 15 bp, Homo sapiens
agagaagccccacat

SEQ ID NO: 96660 - DNA, 15 bp, Homo sapiens
cagagaagccccaca

SEQ ID NO: 96661 - DNA, 15 bp, Homo sapiens
ccagagaagccccac

SEQ ID NO: 96662 - DNA, 15 bp, Homo sapiens
cccagagaagcccca

SEQ ID NO: 96663 - DNA, 15 bp, Homo sapiens
gcccagagaagcccc

SEQ ID NO: 96664 - DNA, 15 bp, Homo sapiens
agcccagagaagccc

SEQ ID NO: 96665 - DNA, 15 bp, Homo sapiens
aagcccagagaagcc

SEQ ID NO: 96666 - DNA, 15 bp, Homo sapiens
aaagcccagagaagc

SEQ ID NO: 96667 - DNA, 15 bp, Homo sapiens
aaaagcccagagaag

SEQ ID NO: 96668 - DNA, 15 bp, Homo sapiens
aaaaagcccagagaa

SEQ ID NO: 96669 - DNA, 15 bp, Homo sapiens
aaaaaagcccagaga

SEQ ID NO: 96670 - DNA, 15 bp, Homo sapiens
aaaaaaagcccagag

SEQ ID NO: 96671 - DNA, 15 bp, Homo sapiens
aaaaaaaagcccaga

SEQ ID NO: 96672 - DNA, 15 bp, Homo sapiens
aaaaaaaaagcccag

SEQ ID NO: 96673 - DNA, 15 bp, Homo sapiens
aaaaaaaaaagccca

SEQ ID NO: 96674 - DNA, 15 bp, Homo sapiens
aaaaaaaaaaagccc

SEQ ID NO: 96675 - DNA, 15 bp, Homo sapiens
caaaaaaaaaaaagc

SEQ ID NO: 96676 - DNA, 15 bp, Homo sapiens
aactccgtctcaaaa

SEQ ID NO: 96677 - DNA, 15 bp, Homo sapiens
aaactccgtctcaaa

SEQ ID NO: 96678 - DNA, 15 bp, Homo sapiens
gaaactccgtctcaa

SEQ ID NO: 96679 - DNA, 15 bp, Homo sapiens
tgaaactccgtctca

SEQ ID NO: 96680 - DNA, 15 bp, Homo sapiens
gtgaaactccgtctc

SEQ ID NO: 96681 - DNA, 15 bp, Homo sapiens
agtgaaactccgtct

SEQ ID NO: 96682 - DNA, 15 bp, Homo sapiens
gagtgaaactccgtc

SEQ ID NO: 96683 - DNA, 15 bp, Homo sapiens
agagtgaaactccgt

SEQ ID NO: 96684 - DNA, 15 bp, Homo sapiens
aagagtgaaactccg

SEQ ID NO: 96685 - DNA, 15 bp, Homo sapiens
taagagtgaaactcc

SEQ ID NO: 96686 - DNA, 15 bp, Homo sapiens
gtaagagtgaaactc

SEQ ID NO: 96687 - DNA, 15 bp, Homo sapiens
agtaagagtgaaact

SEQ ID NO: 96688 - DNA, 15 bp, Homo sapiens
cagtaagagtgaaac

SEQ ID NO: 96689 - DNA, 15 bp, Homo sapiens
gcagtaagagtgaaa

SEQ ID NO: 96690 - DNA, 15 bp, Homo sapiens
ggcagtaagagtgaa

SEQ ID NO: 96691 - DNA, 15 bp, Homo sapiens
gggcagtaagagtga

SEQ ID NO: 96692 - DNA, 15 bp, Homo sapiens
tgggcagtaagagtg

SEQ ID NO: 96693 - DNA, 15 bp, Homo sapiens
ctgggcagtaagagt

SEQ ID NO: 96694 - DNA, 15 bp, Homo sapiens
cctgggcagtaagag

SEQ ID NO: 96695 - DNA, 15 bp, Homo sapiens
gcctgggcagtaaga

SEQ ID NO: 96696 - DNA, 15 bp, Homo sapiens
agcctgggcagtaag

SEQ ID NO: 96697 - DNA, 15 bp, Homo sapiens
cagcctgggcagtaa

SEQ ID NO: 96698 - DNA, 15 bp, Homo sapiens
ccagcctgggcagta

SEQ ID NO: 96699 - DNA, 15 bp, Homo sapiens
tccagcctgggcagt

SEQ ID NO: 96700 - DNA, 15 bp, Homo sapiens
ctccagcctgggcag

SEQ ID NO: 96701 - DNA, 15 bp, Homo sapiens
tctccagcctgggca

SEQ ID NO: 96702 - DNA, 15 bp, Homo sapiens
ctctccagcctgggc

SEQ ID NO: 96703 - DNA, 15 bp, Homo sapiens
gctctccagcctggg

SEQ ID NO: 96704 - DNA, 15 bp, Homo sapiens
tgctctccagcctgg

SEQ ID NO: 96705 - DNA, 15 bp, Homo sapiens
ttgctctccagcctg

SEQ ID NO: 96706 - DNA, 15 bp, Homo sapiens
attgctctccagcct

SEQ ID NO: 96707 - DNA, 15 bp, Homo sapiens
cattgctctccagcc

SEQ ID NO: 96708 - DNA, 15 bp, Homo sapiens
ccattgctctccagc

SEQ ID NO: 96709 - DNA, 15 bp, Homo sapiens
gccattgctctccag

SEQ ID NO: 96710 - DNA, 15 bp, Homo sapiens
cgccattgctctcca

SEQ ID NO: 96711 - DNA, 15 bp, Homo sapiens
gcgccattgctctcc

SEQ ID NO: 96712 - DNA, 15 bp, Homo sapiens
cgcgccattgctctc

SEQ ID NO: 96713 - DNA, 15 bp, Homo sapiens
tcgcgccattgctct

SEQ ID NO: 96714 - DNA, 15 bp, Homo sapiens
gtcgcgccattgctc

SEQ ID NO: 96715 - DNA, 15 bp, Homo sapiens
ggtcgcgccattgct

SEQ ID NO: 96716 - DNA, 15 bp, Homo sapiens
aggtcgcgccattgc

SEQ ID NO: 96717 - DNA, 15 bp, Homo sapiens
aaggtcgcgccattg

SEQ ID NO: 96718 - DNA, 15 bp, Homo sapiens
caaggtcgcgccatt

SEQ ID NO: 96719 - DNA, 15 bp, Homo sapiens
ccaaggtcgcgccat

SEQ ID NO: 96720 - DNA, 15 bp, Homo sapiens
gccaaggtcgcgcca

SEQ ID NO: 96721 - DNA, 15 bp, Homo sapiens
agccaaggtcgcgcc

SEQ ID NO: 96722 - DNA, 15 bp, Homo sapiens
gagccaaggtcgcgc

SEQ ID NO: 96723 - DNA, 15 bp, Homo sapiens
tgagccaaggtcgcg

SEQ ID NO: 96724 - DNA, 15 bp, Homo sapiens
gtgagccaaggtcgc

SEQ ID NO: 96725 - DNA, 15 bp, Homo sapiens
agtgagccaaggtcg

SEQ ID NO: 96726 - DNA, 15 bp, Homo sapiens
gcagtgagccaaggt

SEQ ID NO: 96727 - DNA, 15 bp, Homo sapiens
tgcagtgagccaagg

SEQ ID NO: 96728 - DNA, 15 bp, Homo sapiens
acctgtaatctcagc

SEQ ID NO: 96729 - DNA, 15 bp, Homo sapiens
cacctgtaatctcag

SEQ ID NO: 96730 - DNA, 15 bp, Homo sapiens
gcacctgtaatctca

SEQ ID NO: 96731 - DNA, 15 bp, Homo sapiens
ggcacctgtaatctc

SEQ ID NO: 96732 - DNA, 15 bp, Homo sapiens
gggcacctgtaatct

SEQ ID NO: 96733 - DNA, 15 bp, Homo sapiens
cgggcacctgtaatc

SEQ ID NO: 96734 - DNA, 15 bp, Homo sapiens
gcgggcacctgtaat

SEQ ID NO: 96735 - DNA, 15 bp, Homo sapiens
ggcgggcacctgtaa

SEQ ID NO: 96736 - DNA, 15 bp, Homo sapiens
tggcgggcacctgta

SEQ ID NO: 96737 - DNA, 15 bp, Homo sapiens
gtggcgggcacctgt

SEQ ID NO: 96738 - DNA, 15 bp, Homo sapiens
tgtggcgggcacctg

SEQ ID NO: 96739 - DNA, 15 bp, Homo sapiens
ttgtggcgggcacct

SEQ ID NO: 96740 - DNA, 15 bp, Homo sapiens
attgtggcgggcacc

SEQ ID NO: 96741 - DNA, 15 bp, Homo sapiens
cattgtggcgggcac

SEQ ID NO: 96742 - DNA, 15 bp, Homo sapiens
gcattgtggcgggca

SEQ ID NO: 96743 - DNA, 15 bp, Homo sapiens
ggcattgtggcgggc

SEQ ID NO: 96744 - DNA, 15 bp, Homo sapiens
aggcattgtggcggg

SEQ ID NO: 96745 - DNA, 15 bp, Homo sapiens
caggcattgtggcgg

SEQ ID NO: 96746 - DNA, 15 bp, Homo sapiens
gcaggcattgtggcg

SEQ ID NO: 96747 - DNA, 15 bp, Homo sapiens
ggcaggcattgtggc

SEQ ID NO: 96748 - DNA, 15 bp, Homo sapiens
aggcaggcattgtgg

SEQ ID NO: 96749 - DNA, 15 bp, Homo sapiens
taggcaggcattgtg

SEQ ID NO: 96750 - DNA, 15 bp, Homo sapiens
ttaggcaggcattgt

SEQ ID NO: 96751 - DNA, 15 bp, Homo sapiens
attaggcaggcattg

SEQ ID NO: 96752 - DNA, 15 bp, Homo sapiens
aattaggcaggcatt

SEQ ID NO: 96753 - DNA, 15 bp, Homo sapiens
aaattaggcaggcat

SEQ ID NO: 96754 - DNA, 15 bp, Homo sapiens
aaaattaggcaggca

SEQ ID NO: 96755 - DNA, 15 bp, Homo sapiens
aaaaattaggcaggc

SEQ ID NO: 96756 - DNA, 15 bp, Homo sapiens
aaaaaattaggcagg

SEQ ID NO: 96757 - DNA, 15 bp, Homo sapiens
aaaaaaattaggcag

SEQ ID NO: 96758 - DNA, 15 bp, Homo sapiens
caaaaaaattaggca

SEQ ID NO: 96759 - DNA, 15 bp, Homo sapiens
acaaaaaaattaggc

SEQ ID NO: 96760 - DNA, 15 bp, Homo sapiens
tacaaaaaaattagg

SEQ ID NO: 96761 - DNA, 15 bp, Homo sapiens
tctggccaacatggt

SEQ ID NO: 96762 - DNA, 15 bp, Homo sapiens
gtctggccaacatgg

SEQ ID NO: 96763 - DNA, 15 bp, Homo sapiens
agtctggccaacatg

SEQ ID NO: 96764 - DNA, 15 bp, Homo sapiens
cagtctggccaacat

SEQ ID NO: 96765 - DNA, 15 bp, Homo sapiens
ccagtctggccaaca

SEQ ID NO: 96766 - DNA, 15 bp, Homo sapiens
gagaccagtctggcc

SEQ ID NO: 96767 - DNA, 15 bp, Homo sapiens
cgagaccagtctggc

SEQ ID NO: 96768 - DNA, 15 bp, Homo sapiens
tcgagaccagtctgg

SEQ ID NO: 96769 - DNA, 15 bp, Homo sapiens
ctcgagaccagtctg

SEQ ID NO: 96770 - DNA, 15 bp, Homo sapiens
gctcgagaccagtct

SEQ ID NO: 96771 - DNA, 15 bp, Homo sapiens
agctcgagaccagtc

SEQ ID NO: 96772 - DNA, 15 bp, Homo sapiens
gagctcgagaccagt

SEQ ID NO: 96773 - DNA, 15 bp, Homo sapiens
aggagctcgagacca

SEQ ID NO: 96774 - DNA, 15 bp, Homo sapiens
caggagctcgagacc

SEQ ID NO: 96775 - DNA, 15 bp, Homo sapiens
tcaggagctcgagac

SEQ ID NO: 96776 - DNA, 15 bp, Homo sapiens
gtcaggagctcgaga

SEQ ID NO: 96777 - DNA, 15 bp, Homo sapiens
ggtcaggagctcgag

SEQ ID NO: 96778 - DNA, 15 bp, Homo sapiens
aggtcaggagctcga

SEQ ID NO: 96779 - DNA, 15 bp, Homo sapiens
gaggtcaggagctcg

SEQ ID NO: 96780 - DNA, 15 bp, Homo sapiens
tgaggtcaggagctc

SEQ ID NO: 96781 - DNA, 15 bp, Homo sapiens
ctgaggtcaggagct

SEQ ID NO: 96782 - DNA, 15 bp, Homo sapiens
cctgaggtcaggagc

SEQ ID NO: 96783 - DNA, 15 bp, Homo sapiens
aggtggatcacctga

SEQ ID NO: 96784 - DNA, 15 bp, Homo sapiens
caggtggatcacctg

SEQ ID NO: 96785 - DNA, 15 bp, Homo sapiens
gcaggtggatcacct

SEQ ID NO: 96786 - DNA, 15 bp, Homo sapiens
ggcaggtggatcacc

SEQ ID NO: 96787 - DNA, 15 bp, Homo sapiens
aactttgggaggctg

SEQ ID NO: 96788 - DNA, 15 bp, Homo sapiens
gaactttgggaggct

SEQ ID NO: 96789 - DNA, 15 bp, Homo sapiens
aagccgggcgcagtg

SEQ ID NO: 96790 - DNA, 15 bp, Homo sapiens
gaagccgggcgcagt

SEQ ID NO: 96791 - DNA, 15 bp, Homo sapiens
agaagccgggcgcag

SEQ ID NO: 96792 - DNA, 15 bp, Homo sapiens
gagaagccgggcgca

SEQ ID NO: 96793 - DNA, 15 bp, Homo sapiens
agagaagccgggcgc

SEQ ID NO: 96794 - DNA, 15 bp, Homo sapiens
cagagaagccgggcg

SEQ ID NO: 96795 - DNA, 15 bp, Homo sapiens
ccagagaagccgggc

SEQ ID NO: 96796 - DNA, 15 bp, Homo sapiens
tccagagaagccggg

SEQ ID NO: 96797 - DNA, 15 bp, Homo sapiens
gtccagagaagccgg

SEQ ID NO: 96798 - DNA, 15 bp, Homo sapiens
agtccagagaagccg

SEQ ID NO: 96799 - DNA, 15 bp, Homo sapiens
aagtccagagaagcc

SEQ ID NO: 96800 - DNA, 15 bp, Homo sapiens
taagtccagagaagc

SEQ ID NO: 96801 - DNA, 15 bp, Homo sapiens
ataagtccagagaag

SEQ ID NO: 96802 - DNA, 15 bp, Homo sapiens
aataagtccagagaa

SEQ ID NO: 96803 - DNA, 15 bp, Homo sapiens
taataagtccagaga

SEQ ID NO: 96804 - DNA, 15 bp, Homo sapiens
ataataagtccagag

SEQ ID NO: 96805 - DNA, 15 bp, Homo sapiens
cataataagtccaga

SEQ ID NO: 96806 - DNA, 15 bp, Homo sapiens
acataataagtccag

SEQ ID NO: 96807 - DNA, 15 bp, Homo sapiens
cacataataagtcca

SEQ ID NO: 96808 - DNA, 15 bp, Homo sapiens
ccacataataagtcc

SEQ ID NO: 96809 - DNA, 15 bp, Homo sapiens
tccacataataagtc

SEQ ID NO: 96810 - DNA, 15 bp, Homo sapiens
ctccacataataagt

SEQ ID NO: 96811 - DNA, 15 bp, Homo sapiens
tctccacataataag

SEQ ID NO: 96812 - DNA, 15 bp, Homo sapiens
ctctccacataataa

SEQ ID NO: 96813 - DNA, 15 bp, Homo sapiens
tctctccacataata

SEQ ID NO: 96814 - DNA, 15 bp, Homo sapiens
atctctccacataat

SEQ ID NO: 96815 - DNA, 15 bp, Homo sapiens
tatctctccacataa

SEQ ID NO: 96816 - DNA, 15 bp, Homo sapiens
ctatctctccacata

SEQ ID NO: 96817 - DNA, 15 bp, Homo sapiens
actatctctccacat

SEQ ID NO: 96818 - DNA, 15 bp, Homo sapiens
tactatctctccaca

SEQ ID NO: 96819 - DNA, 15 bp, Homo sapiens
gtactatctctccac

SEQ ID NO: 96820 - DNA, 15 bp, Homo sapiens
tgtactatctctcca

SEQ ID NO: 96821 - DNA, 15 bp, Homo sapiens
ttgtactatctctcc

SEQ ID NO: 96822 - DNA, 15 bp, Homo sapiens
cttgtactatctctc

SEQ ID NO: 96823 - DNA, 15 bp, Homo sapiens
ccttgtactatctct

SEQ ID NO: 96824 - DNA, 15 bp, Homo sapiens
gccttgtactatctc

SEQ ID NO: 96825 - DNA, 15 bp, Homo sapiens
tgccttgtactatct

SEQ ID NO: 96826 - DNA, 15 bp, Homo sapiens
ctgccttgtactatc

SEQ ID NO: 96827 - DNA, 15 bp, Homo sapiens
actgccttgtactat

SEQ ID NO: 96828 - DNA, 15 bp, Homo sapiens
cactgccttgtacta

SEQ ID NO: 96829 - DNA, 15 bp, Homo sapiens
ccactgccttgtact

SEQ ID NO: 96830 - DNA, 15 bp, Homo sapiens
gccactgccttgtac

SEQ ID NO: 96831 - DNA, 15 bp, Homo sapiens
agccactgccttgta

SEQ ID NO: 96832 - DNA, 15 bp, Homo sapiens
aagccactgccttgt

SEQ ID NO: 96833 - DNA, 15 bp, Homo sapiens
aaagccactgccttg

SEQ ID NO: 96834 - DNA, 15 bp, Homo sapiens
gaaagccactgcctt

SEQ ID NO: 96835 - DNA, 15 bp, Homo sapiens
tgaaagccactgcct

SEQ ID NO: 96836 - DNA, 15 bp, Homo sapiens
ctgaaagccactgcc

SEQ ID NO: 96837 - DNA, 15 bp, Homo sapiens
tctgaaagccactgc

SEQ ID NO: 96838 - DNA, 15 bp, Homo sapiens
ctctgaaagccactg

SEQ ID NO: 96839 - DNA, 15 bp, Homo sapiens
actctgaaagccact

SEQ ID NO: 96840 - DNA, 15 bp, Homo sapiens
aactctgaaagccac

SEQ ID NO: 96841 - DNA, 15 bp, Homo sapiens
aaactctgaaagcca

SEQ ID NO: 96842 - DNA, 15 bp, Homo sapiens
aaaactctgaaagcc

SEQ ID NO: 96843 - DNA, 15 bp, Homo sapiens
aaaaactctgaaagc

SEQ ID NO: 96844 - DNA, 15 bp, Homo sapiens
aaaaaactctgaaag

SEQ ID NO: 96845 - DNA, 15 bp, Homo sapiens
caaaaaactctgaaa

SEQ ID NO: 96846 - DNA, 15 bp, Homo sapiens
tcaaaaaactctgaa

SEQ ID NO: 96847 - DNA, 15 bp, Homo sapiens
gtcaaaaaactctga

SEQ ID NO: 96848 - DNA, 15 bp, Homo sapiens
ggtcaaaaaactctg

SEQ ID NO: 96849 - DNA, 15 bp, Homo sapiens
tggtcaaaaaactct

SEQ ID NO: 96850 - DNA, 15 bp, Homo sapiens
atggtcaaaaaactc

SEQ ID NO: 96851 - DNA, 15 bp, Homo sapiens
catggtcaaaaaact

SEQ ID NO: 96852 - DNA, 15 bp, Homo sapiens
tcatggtcaaaaaac

SEQ ID NO: 96853 - DNA, 15 bp, Homo sapiens
gtcatggtcaaaaaa

SEQ ID NO: 96854 - DNA, 15 bp, Homo sapiens
ggtcatggtcaaaaa

SEQ ID NO: 96855 - DNA, 15 bp, Homo sapiens
cggtcatggtcaaaa

SEQ ID NO: 96856 - DNA, 15 bp, Homo sapiens
acggtcatggtcaaa

SEQ ID NO: 96857 - DNA, 15 bp, Homo sapiens
aacggtcatggtcaa

SEQ ID NO: 96858 - DNA, 15 bp, Homo sapiens
caacggtcatggtca

SEQ ID NO: 96859 - DNA, 15 bp, Homo sapiens
acaacggtcatggtc

SEQ ID NO: 96860 - DNA, 15 bp, Homo sapiens
cacaacggtcatggt

SEQ ID NO: 96861 - DNA, 15 bp, Homo sapiens
ccacaacggtcatgg

SEQ ID NO: 96862 - DNA, 15 bp, Homo sapiens
cccacaacggtcatg

SEQ ID NO: 96863 - DNA, 15 bp, Homo sapiens
tcccacaacggtcat

SEQ ID NO: 96864 - DNA, 15 bp, Homo sapiens
ttcccacaacggtca

SEQ ID NO: 96865 - DNA, 15 bp, Homo sapiens
tttcccacaacggtc

SEQ ID NO: 96866 - DNA, 15 bp, Homo sapiens
atttcccacaacggt

SEQ ID NO: 96867 - DNA, 15 bp, Homo sapiens
tatttcccacaacgg

SEQ ID NO: 96868 - DNA, 15 bp, Homo sapiens
gtatttcccacaacg

SEQ ID NO: 96869 - DNA, 15 bp, Homo sapiens
tgtatttcccacaac

SEQ ID NO: 96870 - DNA, 15 bp, Homo sapiens
atgtatttcccacaa

SEQ ID NO: 96871 - DNA, 15 bp, Homo sapiens
aatgtatttcccaca

SEQ ID NO: 96872 - DNA, 15 bp, Homo sapiens
aaatgtatttcccac

SEQ ID NO: 96873 - DNA, 15 bp, Homo sapiens
aaaatgtatttccca

SEQ ID NO: 96874 - DNA, 15 bp, Homo sapiens
taaaatgtatttccc

SEQ ID NO: 96875 - DNA, 15 bp, Homo sapiens
ataaaatgtatttcc

SEQ ID NO: 96876 - DNA, 15 bp, Homo sapiens
tataaaatgtatttc

SEQ ID NO: 96877 - DNA, 15 bp, Homo sapiens
atataaaatgtattt

SEQ ID NO: 96878 - DNA, 15 bp, Homo sapiens
gatataaaatgtatt

SEQ ID NO: 96879 - DNA, 15 bp, Homo sapiens
agatataaaatgtat

SEQ ID NO: 96880 - DNA, 15 bp, Homo sapiens
gagatataaaatgta

SEQ ID NO: 96881 - DNA, 15 bp, Homo sapiens
tgagatataaaatgt

SEQ ID NO: 96882 - DNA, 15 bp, Homo sapiens
ttgagatataaaatg

SEQ ID NO: 96883 - DNA, 15 bp, Homo sapiens
gttgagatataaaat

SEQ ID NO: 96884 - DNA, 15 bp, Homo sapiens
ggttgagatataaaa

SEQ ID NO: 96885 - DNA, 15 bp, Homo sapiens
aggttgagatataaa

SEQ ID NO: 96886 - DNA, 15 bp, Homo sapiens
taggttgagatataa

SEQ ID NO: 96887 - DNA, 15 bp, Homo sapiens
ctaggttgagatata

SEQ ID NO: 96888 - DNA, 15 bp, Homo sapiens
actaggttgagatat

SEQ ID NO: 96889 - DNA, 15 bp, Homo sapiens
tactaggttgagata

SEQ ID NO: 96890 - DNA, 15 bp, Homo sapiens
atactaggttgagat

SEQ ID NO: 96891 - DNA, 15 bp, Homo sapiens
catactaggttgaga

SEQ ID NO: 96892 - DNA, 15 bp, Homo sapiens
acatactaggttgag

SEQ ID NO: 96893 - DNA, 15 bp, Homo sapiens
tacatactaggttga

SEQ ID NO: 96894 - DNA, 15 bp, Homo sapiens
gtacatactaggttg

SEQ ID NO: 96895 - DNA, 15 bp, Homo sapiens
tgtacatactaggtt

SEQ ID NO: 96896 - DNA, 15 bp, Homo sapiens
gtgtacatactaggt

SEQ ID NO: 96897 - DNA, 15 bp, Homo sapiens
tgtgtacatactagg

SEQ ID NO: 96898 - DNA, 15 bp, Homo sapiens
gtgtgtacatactag

SEQ ID NO: 96899 - DNA, 15 bp, Homo sapiens
tgtgtgtacatacta

SEQ ID NO: 96900 - DNA, 15 bp, Homo sapiens
ctgtgtgtacatact

SEQ ID NO: 96901 - DNA, 15 bp, Homo sapiens
tctgtgtgtacatac

SEQ ID NO: 96902 - DNA, 15 bp, Homo sapiens
gtctgtgtgtacata

SEQ ID NO: 96903 - DNA, 15 bp, Homo sapiens
tgtctgtgtgtacat

SEQ ID NO: 96904 - DNA, 15 bp, Homo sapiens
atgtctgtgtgtaca

SEQ ID NO: 96905 - DNA, 15 bp, Homo sapiens
catgtctgtgtgtac

SEQ ID NO: 96906 - DNA, 15 bp, Homo sapiens
acatgtctgtgtgta

SEQ ID NO: 96907 - DNA, 15 bp, Homo sapiens
tacatgtctgtgtgt

SEQ ID NO: 96908 - DNA, 15 bp, Homo sapiens
ctacatgtctgtgtg

SEQ ID NO: 96909 - DNA, 15 bp, Homo sapiens
tctacatgtctgtgt

SEQ ID NO: 96910 - DNA, 15 bp, Homo sapiens
gtctacatgtctgtg

SEQ ID NO: 96911 - DNA, 15 bp, Homo sapiens
tgtctacatgtctgt

SEQ ID NO: 96912 - DNA, 15 bp, Homo sapiens
gtgtctacatgtctg

SEQ ID NO: 96913 - DNA, 15 bp, Homo sapiens
tgtgtctacatgtct

SEQ ID NO: 96914 - DNA, 15 bp, Homo sapiens
atgtgtctacatgtc

SEQ ID NO: 96915 - DNA, 15 bp, Homo sapiens
catgtgtctacatgt

SEQ ID NO: 96916 - DNA, 15 bp, Homo sapiens
acatgtgtctacatg

SEQ ID NO: 96917 - DNA, 15 bp, Homo sapiens
tacatgtgtctacat

SEQ ID NO: 96918 - DNA, 15 bp, Homo sapiens
atacatgtgtctaca

SEQ ID NO: 96919 - DNA, 15 bp, Homo sapiens
tatacatgtgtctac

SEQ ID NO: 96920 - DNA, 15 bp, Homo sapiens
ttatacatgtgtcta

SEQ ID NO: 96921 - DNA, 15 bp, Homo sapiens
gttatacatgtgtct

SEQ ID NO: 96922 - DNA, 15 bp, Homo sapiens
ggttatacatgtgtc

SEQ ID NO: 96923 - DNA, 15 bp, Homo sapiens
aggttatacatgtgt

SEQ ID NO: 96924 - DNA, 15 bp, Homo sapiens
taggttatacatgtg

SEQ ID NO: 96925 - DNA, 15 bp, Homo sapiens
ttaggttatacatgt

SEQ ID NO: 96926 - DNA, 15 bp, Homo sapiens
tttaggttatacatg

SEQ ID NO: 96927 - DNA, 15 bp, Homo sapiens
ctttaggttatacat

SEQ ID NO: 96928 - DNA, 15 bp, Homo sapiens
actttaggttataca

SEQ ID NO: 96929 - DNA, 15 bp, Homo sapiens
aactttaggttatac

SEQ ID NO: 96930 - DNA, 15 bp, Homo sapiens
aaactttaggttata

SEQ ID NO: 96931 - DNA, 15 bp, Homo sapiens
gaaactttaggttat

SEQ ID NO: 96932 - DNA, 15 bp, Homo sapiens
tgaaactttaggtta

SEQ ID NO: 96933 - DNA, 15 bp, Homo sapiens
atgaaactttaggtt

SEQ ID NO: 96934 - DNA, 15 bp, Homo sapiens
tatgaaactttaggt

SEQ ID NO: 96935 - DNA, 15 bp, Homo sapiens
ttatgaaactttagg

SEQ ID NO: 96936 - DNA, 15 bp, Homo sapiens
tttatgaaactttag

SEQ ID NO: 96937 - DNA, 15 bp, Homo sapiens
ctttatgaaacttta

SEQ ID NO: 96938 - DNA, 15 bp, Homo sapiens
gctttatgaaacttt

SEQ ID NO: 96939 - DNA, 15 bp, Homo sapiens
tgctttatgaaactt

SEQ ID NO: 96940 - DNA, 15 bp, Homo sapiens
ctgctttatgaaact

SEQ ID NO: 96941 - DNA, 15 bp, Homo sapiens
actgctttatgaaac

SEQ ID NO: 96942 - DNA, 15 bp, Homo sapiens
tactgctttatgaaa

SEQ ID NO: 96943 - DNA, 15 bp, Homo sapiens
gtactgctttatgaa

SEQ ID NO: 96944 - DNA, 15 bp, Homo sapiens
ggtactgctttatga

SEQ ID NO: 96945 - DNA, 15 bp, Homo sapiens
aggtactgctttatg

SEQ ID NO: 96946 - DNA, 15 bp, Homo sapiens
taggtactgctttat

SEQ ID NO: 96947 - DNA, 15 bp, Homo sapiens
gtaggtactgcttta

SEQ ID NO: 96948 - DNA, 15 bp, Homo sapiens
agtaggtactgcttt

SEQ ID NO: 96949 - DNA, 15 bp, Homo sapiens
cagtaggtactgctt

SEQ ID NO: 96950 - DNA, 15 bp, Homo sapiens
acagtaggtactgct

SEQ ID NO: 96951 - DNA, 15 bp, Homo sapiens
aacagtaggtactgc

SEQ ID NO: 96952 - DNA, 15 bp, Homo sapiens
taacagtaggtactg

SEQ ID NO: 96953 - DNA, 15 bp, Homo sapiens
gtaacagtaggtact

SEQ ID NO: 96954 - DNA, 15 bp, Homo sapiens
agtaacagtaggtac

SEQ ID NO: 96955 - DNA, 15 bp, Homo sapiens
tagtaacagtaggta

SEQ ID NO: 96956 - DNA, 15 bp, Homo sapiens
ttagtaacagtaggt

SEQ ID NO: 96957 - DNA, 15 bp, Homo sapiens
attagtaacagtagg

SEQ ID NO: 96958 - DNA, 15 bp, Homo sapiens
aattagtaacagtag

SEQ ID NO: 96959 - DNA, 15 bp, Homo sapiens
caattagtaacagta

SEQ ID NO: 96960 - DNA, 15 bp, Homo sapiens
acaattagtaacagt

SEQ ID NO: 96961 - DNA, 15 bp, Homo sapiens
tacaattagtaacag

SEQ ID NO: 96962 - DNA, 15 bp, Homo sapiens
ctacaattagtaaca

SEQ ID NO: 96963 - DNA, 15 bp, Homo sapiens
actacaattagtaac

SEQ ID NO: 96964 - DNA, 15 bp, Homo sapiens
cactacaattagtaa

SEQ ID NO: 96965 - DNA, 15 bp, Homo sapiens
gcactacaattagta

SEQ ID NO: 96966 - DNA, 15 bp, Homo sapiens
tgcactacaattagt

SEQ ID NO: 96967 - DNA, 15 bp, Homo sapiens
gtgcactacaattag

SEQ ID NO: 96968 - DNA, 15 bp, Homo sapiens
agtgcactacaatta

SEQ ID NO: 96969 - DNA, 15 bp, Homo sapiens
gagtgcactacaatt

SEQ ID NO: 96970 - DNA, 15 bp, Homo sapiens
agagtgcactacaat

SEQ ID NO: 96971 - DNA, 15 bp, Homo sapiens
cagagtgcactacaa

SEQ ID NO: 96972 - DNA, 15 bp, Homo sapiens
gcagagtgcactaca

SEQ ID NO: 96973 - DNA, 15 bp, Homo sapiens
agcagagtgcactac

SEQ ID NO: 96974 - DNA, 15 bp, Homo sapiens
tagcagagtgcacta

SEQ ID NO: 96975 - DNA, 15 bp, Homo sapiens
atagcagagtgcact

SEQ ID NO: 96976 - DNA, 15 bp, Homo sapiens
aatagcagagtgcac

SEQ ID NO: 96977 - DNA, 15 bp, Homo sapiens
aaatagcagagtgca

SEQ ID NO: 96978 - DNA, 15 bp, Homo sapiens
gaaatagcagagtgc

SEQ ID NO: 96979 - DNA, 15 bp, Homo sapiens
agaaatagcagagtg

SEQ ID NO: 96980 - DNA, 15 bp, Homo sapiens
aagaaatagcagagt

SEQ ID NO: 96981 - DNA, 15 bp, Homo sapiens
taagaaatagcagag

SEQ ID NO: 96982 - DNA, 15 bp, Homo sapiens
ataagaaatagcaga

SEQ ID NO: 96983 - DNA, 15 bp, Homo sapiens
aataagaaatagcag

SEQ ID NO: 96984 - DNA, 15 bp, Homo sapiens
gaataagaaatagca

SEQ ID NO: 96985 - DNA, 15 bp, Homo sapiens
agaataagaaatagc

SEQ ID NO: 96986 - DNA, 15 bp, Homo sapiens
tagaataagaaatag

SEQ ID NO: 96987 - DNA, 15 bp, Homo sapiens
gtagaataagaaata

SEQ ID NO: 96988 - DNA, 15 bp, Homo sapiens
ggtagaataagaaat

SEQ ID NO: 96989 - DNA, 15 bp, Homo sapiens
aggtagaataagaaa

SEQ ID NO: 96990 - DNA, 15 bp, Homo sapiens
aaggtagaataagaa

SEQ ID NO: 96991 - DNA, 15 bp, Homo sapiens
taaggtagaataaga

SEQ ID NO: 96992 - DNA, 15 bp, Homo sapiens
ataaggtagaataag

SEQ ID NO: 96993 - DNA, 15 bp, Homo sapiens
tataaggtagaataa

SEQ ID NO: 96994 - DNA, 15 bp, Homo sapiens
gtataaggtagaata

SEQ ID NO: 96995 - DNA, 15 bp, Homo sapiens
agtataaggtagaat

SEQ ID NO: 96996 - DNA, 15 bp, Homo sapiens
cagtataaggtagaa

SEQ ID NO: 96997 - DNA, 15 bp, Homo sapiens
gcagtataaggtaga

SEQ ID NO: 96998 - DNA, 15 bp, Homo sapiens
cgcagtataaggtag

SEQ ID NO: 96999 - DNA, 15 bp, Homo sapiens
acgcagtataaggta

SEQ ID NO: 97000 - DNA, 15 bp, Homo sapiens
gacgcagtataaggt

SEQ ID NO: 97001 - DNA, 15 bp, Homo sapiens
tgacgcagtataagg

SEQ ID NO: 97002 - DNA, 15 bp, Homo sapiens
atgacgcagtataag

SEQ ID NO: 97003 - DNA, 15 bp, Homo sapiens
aatgacgcagtataa

SEQ ID NO: 97004 - DNA, 15 bp, Homo sapiens
taatgacgcagtata

SEQ ID NO: 97005 - DNA, 15 bp, Homo sapiens
ttaatgacgcagtat

SEQ ID NO: 97006 - DNA, 15 bp, Homo sapiens
tttaatgacgcagta

SEQ ID NO: 97007 - DNA, 15 bp, Homo sapiens
ttttaatgacgcagt

SEQ ID NO: 97008 - DNA, 15 bp, Homo sapiens
tttttaatgacgcag

SEQ ID NO: 97009 - DNA, 15 bp, Homo sapiens
ttttttaatgacgca

SEQ ID NO: 97010 - DNA, 15 bp, Homo sapiens
cttttttaatgacgc

SEQ ID NO: 97011 - DNA, 15 bp, Homo sapiens
acttttttaatgacg

SEQ ID NO: 97012 - DNA, 15 bp, Homo sapiens
cacttttttaatgac

SEQ ID NO: 97013 - DNA, 15 bp, Homo sapiens
gcacttttttaatga

SEQ ID NO: 97014 - DNA, 15 bp, Homo sapiens
agcacttttttaatg

SEQ ID NO: 97015 - DNA, 15 bp, Homo sapiens
cagcacttttttaat

SEQ ID NO: 97016 - DNA, 15 bp, Homo sapiens
ccagcacttttttaa

SEQ ID NO: 97017 - DNA, 15 bp, Homo sapiens
accagcactttttta

SEQ ID NO: 97018 - DNA, 15 bp, Homo sapiens
gaccagcactttttt

SEQ ID NO: 97019 - DNA, 15 bp, Homo sapiens
tgaccagcacttttt

SEQ ID NO: 97020 - DNA, 15 bp, Homo sapiens
atgaccagcactttt

SEQ ID NO: 97021 - DNA, 15 bp, Homo sapiens
catgaccagcacttt

SEQ ID NO: 97022 - DNA, 15 bp, Homo sapiens
tcatgaccagcactt

SEQ ID NO: 97023 - DNA, 15 bp, Homo sapiens
gtcatgaccagcact

SEQ ID NO: 97024 - DNA, 15 bp, Homo sapiens
ggtcatgaccagcac

SEQ ID NO: 97025 - DNA, 15 bp, Homo sapiens
gggtcatgaccagca

SEQ ID NO: 97026 - DNA, 15 bp, Homo sapiens
tgggtcatgaccagc

SEQ ID NO: 97027 - DNA, 15 bp, Homo sapiens
gtgggtcatgaccag

SEQ ID NO: 97028 - DNA, 15 bp, Homo sapiens
agtgggtcatgacca

SEQ ID NO: 97029 - DNA, 15 bp, Homo sapiens
tagtgggtcatgacc

SEQ ID NO: 97030 - DNA, 15 bp, Homo sapiens
ttagtgggtcatgac

SEQ ID NO: 97031 - DNA, 15 bp, Homo sapiens
tttagtgggtcatga

SEQ ID NO: 97032 - DNA, 15 bp, Homo sapiens
atttagtgggtcatg

SEQ ID NO: 97033 - DNA, 15 bp, Homo sapiens
aatttagtgggtcat

SEQ ID NO: 97034 - DNA, 15 bp, Homo sapiens
aaatttagtgggtca

SEQ ID NO: 97035 - DNA, 15 bp, Homo sapiens
taaatttagtgggtc

SEQ ID NO: 97036 - DNA, 15 bp, Homo sapiens
ataaatttagtgggt

SEQ ID NO: 97037 - DNA, 15 bp, Homo sapiens
aataaatttagtggg

SEQ ID NO: 97038 - DNA, 15 bp, Homo sapiens
aaataaatttagtgg

SEQ ID NO: 97039 - DNA, 15 bp, Homo sapiens
gaaataaatttagtg

SEQ ID NO: 97040 - DNA, 15 bp, Homo sapiens
ggaaataaatttagt

SEQ ID NO: 97041 - DNA, 15 bp, Homo sapiens
gggaaataaatttag

SEQ ID NO: 97042 - DNA, 15 bp, Homo sapiens
tgggaaataaattta

SEQ ID NO: 97043 - DNA, 15 bp, Homo sapiens
ttgggaaataaattt

SEQ ID NO: 97044 - DNA, 15 bp, Homo sapiens
tttgggaaataaatt

SEQ ID NO: 97045 - DNA, 15 bp, Homo sapiens
gtttgggaaataaat

SEQ ID NO: 97046 - DNA, 15 bp, Homo sapiens
ggtttgggaaataaa

SEQ ID NO: 97047 - DNA, 15 bp, Homo sapiens
tggtttgggaaataa

SEQ ID NO: 97048 - DNA, 15 bp, Homo sapiens
gtggtttgggaaata

SEQ ID NO: 97049 - DNA, 15 bp, Homo sapiens
agtggtttgggaaat

SEQ ID NO: 97050 - DNA, 15 bp, Homo sapiens
tagtggtttgggaaa

SEQ ID NO: 97051 - DNA, 15 bp, Homo sapiens
ttagtggtttgggaa

SEQ ID NO: 97052 - DNA, 15 bp, Homo sapiens
attagtggtttggga

SEQ ID NO: 97053 - DNA, 15 bp, Homo sapiens
cattagtggtttggg

SEQ ID NO: 97054 - DNA, 15 bp, Homo sapiens
tcattagtggtttgg

SEQ ID NO: 97055 - DNA, 15 bp, Homo sapiens
ttcattagtggtttg

SEQ ID NO: 97056 - DNA, 15 bp, Homo sapiens
gttcattagtggttt

SEQ ID NO: 97057 - DNA, 15 bp, Homo sapiens
tgttcattagtggtt

SEQ ID NO: 97058 - DNA, 15 bp, Homo sapiens
ttgttcattagtggt

SEQ ID NO: 97059 - DNA, 15 bp, Homo sapiens
attgttcattagtgg

SEQ ID NO: 97060 - DNA, 15 bp, Homo sapiens
cattgttcattagtg

SEQ ID NO: 97061 - DNA, 15 bp, Homo sapiens
tcattgttcattagt

SEQ ID NO: 97062 - DNA, 15 bp, Homo sapiens
gtcattgttcattag

SEQ ID NO: 97063 - DNA, 15 bp, Homo sapiens
agtcattgttcatta

SEQ ID NO: 97064 - DNA, 15 bp, Homo sapiens
gagtcattgttcatt

SEQ ID NO: 97065 - DNA, 15 bp, Homo sapiens
tgagtcattgttcat

SEQ ID NO: 97066 - DNA, 15 bp, Homo sapiens
gtgagtcattgttca

SEQ ID NO: 97067 - DNA, 15 bp, Homo sapiens
tgtgagtcattgttc

SEQ ID NO: 97068 - DNA, 15 bp, Homo sapiens
ttgtgagtcattgtt

SEQ ID NO: 97069 - DNA, 15 bp, Homo sapiens
attgtgagtcattgt

SEQ ID NO: 97070 - DNA, 15 bp, Homo sapiens
aattgtgagtcattg

SEQ ID NO: 97071 - DNA, 15 bp, Homo sapiens
aaattgtgagtcatt

SEQ ID NO: 97072 - DNA, 15 bp, Homo sapiens
caaattgtgagtcat

SEQ ID NO: 97073 - DNA, 15 bp, Homo sapiens
tcaaattgtgagtca

SEQ ID NO: 97074 - DNA, 15 bp, Homo sapiens
ttcaaattgtgagtc

SEQ ID NO: 97075 - DNA, 15 bp, Homo sapiens
gttcaaattgtgagt

SEQ ID NO: 97076 - DNA, 15 bp, Homo sapiens
tgttcaaattgtgag

SEQ ID NO: 97077 - DNA, 15 bp, Homo sapiens
gtgttcaaattgtga

SEQ ID NO: 97078 - DNA, 15 bp, Homo sapiens
tgtgttcaaattgtg

SEQ ID NO: 97079 - DNA, 15 bp, Homo sapiens
gtgtgttcaaattgt

SEQ ID NO: 97080 - DNA, 15 bp, Homo sapiens
agtgtgttcaaattg

SEQ ID NO: 97081 - DNA, 15 bp, Homo sapiens
cagtgtgttcaaatt

SEQ ID NO: 97082 - DNA, 15 bp, Homo sapiens
ccagtgtgttcaaat

SEQ ID NO: 97083 - DNA, 15 bp, Homo sapiens
tccagtgtgttcaaa

SEQ ID NO: 97084 - DNA, 15 bp, Homo sapiens
gtccagtgtgttcaa

SEQ ID NO: 97085 - DNA, 15 bp, Homo sapiens
tgtccagtgtgttca

SEQ ID NO: 97086 - DNA, 15 bp, Homo sapiens
ctgtccagtgtgttc

SEQ ID NO: 97087 - DNA, 15 bp, Homo sapiens
cctgtccagtgtgtt

SEQ ID NO: 97088 - DNA, 15 bp, Homo sapiens
ccctgtccagtgtgt

SEQ ID NO: 97089 - DNA, 15 bp, Homo sapiens
cccctgtccagtgtg

SEQ ID NO: 97090 - DNA, 15 bp, Homo sapiens
ccccctgtccagtgt

SEQ ID NO: 97091 - DNA, 15 bp, Homo sapiens
tccccctgtccagtg

SEQ ID NO: 97092 - DNA, 15 bp, Homo sapiens
atccccctgtccagt

SEQ ID NO: 97093 - DNA, 15 bp, Homo sapiens
tatccccctgtccag

SEQ ID NO: 97094 - DNA, 15 bp, Homo sapiens
ctatccccctgtcca

SEQ ID NO: 97095 - DNA, 15 bp, Homo sapiens
gctatccccctgtcc

SEQ ID NO: 97096 - DNA, 15 bp, Homo sapiens
ggctatccccctgtc

SEQ ID NO: 97097 - DNA, 15 bp, Homo sapiens
tggctatccccctgt

SEQ ID NO: 97098 - DNA, 15 bp, Homo sapiens
ttggctatccccctg

SEQ ID NO: 97099 - DNA, 15 bp, Homo sapiens
attggctatccccct

SEQ ID NO: 97100 - DNA, 15 bp, Homo sapiens
tattggctatccccc

SEQ ID NO: 97101 - DNA, 15 bp, Homo sapiens
ttattggctatcccc

SEQ ID NO: 97102 - DNA, 15 bp, Homo sapiens
tttattggctatccc

SEQ ID NO: 97103 - DNA, 15 bp, Homo sapiens
ttttattggctatcc

SEQ ID NO: 97104 - DNA, 15 bp, Homo sapiens
attttattggctatc

SEQ ID NO: 97105 - DNA, 15 bp, Homo sapiens
aattttattggctat

SEQ ID NO: 97106 - DNA, 15 bp, Homo sapiens
caattttattggcta

SEQ ID NO: 97107 - DNA, 15 bp, Homo sapiens
tcaattttattggct

SEQ ID NO: 97108 - DNA, 15 bp, Homo sapiens
ttcaattttattggc

SEQ ID NO: 97109 - DNA, 15 bp, Homo sapiens
tttcaattttattgg

SEQ ID NO: 97110 - DNA, 15 bp, Homo sapiens
ttttcaattttattg

SEQ ID NO: 97111 - DNA, 15 bp, Homo sapiens
cttttcaattttatt

SEQ ID NO: 97112 - DNA, 15 bp, Homo sapiens
tcttttcaattttat

SEQ ID NO: 97113 - DNA, 15 bp, Homo sapiens
ctcttttcaatttta

SEQ ID NO: 97114 - DNA, 15 bp, Homo sapiens
gctcttttcaatttt

SEQ ID NO: 97115 - DNA, 15 bp, Homo sapiens
tgctcttttcaattt

SEQ ID NO: 97116 - DNA, 15 bp, Homo sapiens
ttgctcttttcaatt

SEQ ID NO: 97117 - DNA, 15 bp, Homo sapiens
cttgctcttttcaat

SEQ ID NO: 97118 - DNA, 15 bp, Homo sapiens
ccttgctcttttcaa

SEQ ID NO: 97119 - DNA, 15 bp, Homo sapiens
tccttgctcttttca

SEQ ID NO: 97120 - DNA, 15 bp, Homo sapiens
ttccttgctcttttc

SEQ ID NO: 97121 - DNA, 15 bp, Homo sapiens
tttccttgctctttt

SEQ ID NO: 97122 - DNA, 15 bp, Homo sapiens
atttccttgctcttt

SEQ ID NO: 97123 - DNA, 15 bp, Homo sapiens
aatttccttgctctt

SEQ ID NO: 97124 - DNA, 15 bp, Homo sapiens
taatttccttgctct

SEQ ID NO: 97125 - DNA, 15 bp, Homo sapiens
ttaatttccttgctc

SEQ ID NO: 97126 - DNA, 15 bp, Homo sapiens
attaatttccttgct

SEQ ID NO: 97127 - DNA, 15 bp, Homo sapiens
cattaatttccttgc

SEQ ID NO: 97128 - DNA, 15 bp, Homo sapiens
acattaatttccttg

SEQ ID NO: 97129 - DNA, 15 bp, Homo sapiens
tacattaatttcctt

SEQ ID NO: 97130 - DNA, 15 bp, Homo sapiens
atacattaatttcct

SEQ ID NO: 97131 - DNA, 15 bp, Homo sapiens
aatacattaatttcc

SEQ ID NO: 97132 - DNA, 15 bp, Homo sapiens
gaatacattaatttc

SEQ ID NO: 97133 - DNA, 15 bp, Homo sapiens
tgaatacattaattt

SEQ ID NO: 97134 - DNA, 15 bp, Homo sapiens
atgaatacattaatt

SEQ ID NO: 97135 - DNA, 15 bp, Homo sapiens
catgaatacattaat

SEQ ID NO: 97136 - DNA, 15 bp, Homo sapiens
tcatgaatacattaa

SEQ ID NO: 97137 - DNA, 15 bp, Homo sapiens
atcatgaatacatta

SEQ ID NO: 97138 - DNA, 15 bp, Homo sapiens
gatcatgaatacatt

SEQ ID NO: 97139 - DNA, 15 bp, Homo sapiens
agatcatgaatacat

SEQ ID NO: 97140 - DNA, 15 bp, Homo sapiens
gagatcatgaataca

SEQ ID NO: 97141 - DNA, 15 bp, Homo sapiens
ggagatcatgaatac

SEQ ID NO: 97142 - DNA, 15 bp, Homo sapiens
aggagatcatgaata

SEQ ID NO: 97143 - DNA, 15 bp, Homo sapiens
gaggagatcatgaat

SEQ ID NO: 97144 - DNA, 15 bp, Homo sapiens
agaggagatcatgaa

SEQ ID NO: 97145 - DNA, 15 bp, Homo sapiens
gagaggagatcatga

SEQ ID NO: 97146 - DNA, 15 bp, Homo sapiens
ggagaggagatcatg

SEQ ID NO: 97147 - DNA, 15 bp, Homo sapiens
aggagaggagatcat

SEQ ID NO: 97148 - DNA, 15 bp, Homo sapiens
caggagaggagatca

SEQ ID NO: 97149 - DNA, 15 bp, Homo sapiens
acaggagaggagatc

SEQ ID NO: 97150 - DNA, 15 bp, Homo sapiens
gacaggagaggagat

SEQ ID NO: 97151 - DNA, 15 bp, Homo sapiens
agacaggagaggaga

SEQ ID NO: 97152 - DNA, 15 bp, Homo sapiens
gagacaggagaggag

SEQ ID NO: 97153 - DNA, 15 bp, Homo sapiens
agagacaggagagga

SEQ ID NO: 97154 - DNA, 15 bp, Homo sapiens
aagagacaggagagg

SEQ ID NO: 97155 - DNA, 15 bp, Homo sapiens
taagagacaggagag

SEQ ID NO: 97156 - DNA, 15 bp, Homo sapiens
gtaagagacaggaga

SEQ ID NO: 97157 - DNA, 15 bp, Homo sapiens
tgtaagagacaggag

SEQ ID NO: 97158 - DNA, 15 bp, Homo sapiens
atgtaagagacagga

SEQ ID NO: 97159 - DNA, 15 bp, Homo sapiens
aatgtaagagacagg

SEQ ID NO: 97160 - DNA, 15 bp, Homo sapiens
aaatgtaagagacag

SEQ ID NO: 97161 - DNA, 15 bp, Homo sapiens
aaaatgtaagagaca

SEQ ID NO: 97162 - DNA, 15 bp, Homo sapiens
aaaaatgtaagagac

SEQ ID NO: 97163 - DNA, 15 bp, Homo sapiens
caaaaatgtaagaga

SEQ ID NO: 97164 - DNA, 15 bp, Homo sapiens
gcaaaaatgtaagag

SEQ ID NO: 97165 - DNA, 15 bp, Homo sapiens
tgcaaaaatgtaaga

SEQ ID NO: 97166 - DNA, 15 bp, Homo sapiens
ctgcaaaaatgtaag

SEQ ID NO: 97167 - DNA, 15 bp, Homo sapiens
actgcaaaaatgtaa

SEQ ID NO: 97168 - DNA, 15 bp, Homo sapiens
tactgcaaaaatgta

SEQ ID NO: 97169 - DNA, 15 bp, Homo sapiens
ctactgcaaaaatgt

SEQ ID NO: 97170 - DNA, 15 bp, Homo sapiens
gctactgcaaaaatg

SEQ ID NO: 97171 - DNA, 15 bp, Homo sapiens
tgctactgcaaaaat

SEQ ID NO: 97172 - DNA, 15 bp, Homo sapiens
ttgctactgcaaaaa

SEQ ID NO: 97173 - DNA, 15 bp, Homo sapiens
attgctactgcaaaa

SEQ ID NO: 97174 - DNA, 15 bp, Homo sapiens
cattgctactgcaaa

SEQ ID NO: 97175 - DNA, 15 bp, Homo sapiens
acattgctactgcaa

SEQ ID NO: 97176 - DNA, 15 bp, Homo sapiens
tacattgctactgca

SEQ ID NO: 97177 - DNA, 15 bp, Homo sapiens
ttacattgctactgc

SEQ ID NO: 97178 - DNA, 15 bp, Homo sapiens
tttacattgctactg

SEQ ID NO: 97179 - DNA, 15 bp, Homo sapiens
ctttacattgctact

SEQ ID NO: 97180 - DNA, 15 bp, Homo sapiens
cctttacattgctac

SEQ ID NO: 97181 - DNA, 15 bp, Homo sapiens
tcctttacattgcta

SEQ ID NO: 97182 - DNA, 15 bp, Homo sapiens
ttcctttacattgct

SEQ ID NO: 97183 - DNA, 15 bp, Homo sapiens
attcctttacattgc

SEQ ID NO: 97184 - DNA, 15 bp, Homo sapiens
gattcctttacattg

SEQ ID NO: 97185 - DNA, 15 bp, Homo sapiens
ggattcctttacatt

SEQ ID NO: 97186 - DNA, 15 bp, Homo sapiens
aggattcctttacat

SEQ ID NO: 97187 - DNA, 15 bp, Homo sapiens
taggattcctttaca

SEQ ID NO: 97188 - DNA, 15 bp, Homo sapiens
ttaggattcctttac

SEQ ID NO: 97189 - DNA, 15 bp, Homo sapiens
cttaggattccttta

SEQ ID NO: 97190 - DNA, 15 bp, Homo sapiens
tcttaggattccttt

SEQ ID NO: 97191 - DNA, 15 bp, Homo sapiens
ctcttaggattcctt

SEQ ID NO: 97192 - DNA, 15 bp, Homo sapiens
tctcttaggattcct

SEQ ID NO: 97193 - DNA, 15 bp, Homo sapiens
ttctcttaggattcc

SEQ ID NO: 97194 - DNA, 15 bp, Homo sapiens
gttctcttaggattc

SEQ ID NO: 97195 - DNA, 15 bp, Homo sapiens
tgttctcttaggatt

SEQ ID NO: 97196 - DNA, 15 bp, Homo sapiens
ctgttctcttaggat

SEQ ID NO: 97197 - DNA, 15 bp, Homo sapiens
tctgttctcttagga

SEQ ID NO: 97198 - DNA, 15 bp, Homo sapiens
gtctgttctcttagg

SEQ ID NO: 97199 - DNA, 15 bp, Homo sapiens
tgtctgttctcttag

SEQ ID NO: 97200 - DNA, 15 bp, Homo sapiens
atgtctgttctctta

SEQ ID NO: 97201 - DNA, 15 bp, Homo sapiens
aatgtctgttctctt

SEQ ID NO: 97202 - DNA, 15 bp, Homo sapiens
gaatgtctgttctct

SEQ ID NO: 97203 - DNA, 15 bp, Homo sapiens
agaatgtctgttctc

SEQ ID NO: 97204 - DNA, 15 bp, Homo sapiens
cagaatgtctgttct

SEQ ID NO: 97205 - DNA, 15 bp, Homo sapiens
ccagaatgtctgttc

SEQ ID NO: 97206 - DNA, 15 bp, Homo sapiens
cccagaatgtctgtt

SEQ ID NO: 97207 - DNA, 15 bp, Homo sapiens
tcccagaatgtctgt

SEQ ID NO: 97208 - DNA, 15 bp, Homo sapiens
ttcccagaatgtctg

SEQ ID NO: 97209 - DNA, 15 bp, Homo sapiens
attcccagaatgtct

SEQ ID NO: 97210 - DNA, 15 bp, Homo sapiens
tattcccagaatgtc

SEQ ID NO: 97211 - DNA, 15 bp, Homo sapiens
ctattcccagaatgt

SEQ ID NO: 97212 - DNA, 15 bp, Homo sapiens
gctattcccagaatg

SEQ ID NO: 97213 - DNA, 15 bp, Homo sapiens
tgctattcccagaat

SEQ ID NO: 97214 - DNA, 15 bp, Homo sapiens
ctgctattcccagaa

SEQ ID NO: 97215 - DNA, 15 bp, Homo sapiens
cctgctattcccaga

SEQ ID NO: 97216 - DNA, 15 bp, Homo sapiens
gcctgctattcccag

SEQ ID NO: 97217 - DNA, 15 bp, Homo sapiens
ggcctgctattccca

SEQ ID NO: 97218 - DNA, 15 bp, Homo sapiens
aggcctgctattccc

SEQ ID NO: 97219 - DNA, 15 bp, Homo sapiens
taggcctgctattcc

SEQ ID NO: 97220 - DNA, 15 bp, Homo sapiens
ctaggcctgctattc

SEQ ID NO: 97221 - DNA, 15 bp, Homo sapiens
gctaggcctgctatt

SEQ ID NO: 97222 - DNA, 15 bp, Homo sapiens
cgctaggcctgctat

SEQ ID NO: 97223 - DNA, 15 bp, Homo sapiens
gcgctaggcctgcta

SEQ ID NO: 97224 - DNA, 15 bp, Homo sapiens
agcgctaggcctgct

SEQ ID NO: 97225 - DNA, 15 bp, Homo sapiens
cagcgctaggcctgc

SEQ ID NO: 97226 - DNA, 15 bp, Homo sapiens
gcagcgctaggcctg

SEQ ID NO: 97227 - DNA, 15 bp, Homo sapiens
tgcagcgctaggcct

SEQ ID NO: 97228 - DNA, 15 bp, Homo sapiens
gtgcagcgctaggcc

SEQ ID NO: 97229 - DNA, 15 bp, Homo sapiens
tgtgcagcgctaggc

SEQ ID NO: 97230 - DNA, 15 bp, Homo sapiens
ttgtgcagcgctagg

SEQ ID NO: 97231 - DNA, 15 bp, Homo sapiens
gttgtgcagcgctag

SEQ ID NO: 97232 - DNA, 15 bp, Homo sapiens
agttgtgcagcgcta

SEQ ID NO: 97233 - DNA, 15 bp, Homo sapiens
cagttgtgcagcgct

SEQ ID NO: 97234 - DNA, 15 bp, Homo sapiens
gcagttgtgcagcgc

SEQ ID NO: 97235 - DNA, 15 bp, Homo sapiens
agcagttgtgcagcg

SEQ ID NO: 97236 - DNA, 15 bp, Homo sapiens
aagcagttgtgcagc

SEQ ID NO: 97237 - DNA, 15 bp, Homo sapiens
aaagcagttgtgcag

SEQ ID NO: 97238 - DNA, 15 bp, Homo sapiens
gaaagcagttgtgca

SEQ ID NO: 97239 - DNA, 15 bp, Homo sapiens
ggaaagcagttgtgc

SEQ ID NO: 97240 - DNA, 15 bp, Homo sapiens
aggaaagcagttgtg

SEQ ID NO: 97241 - DNA, 15 bp, Homo sapiens
taggaaagcagttgt

SEQ ID NO: 97242 - DNA, 15 bp, Homo sapiens
ctaggaaagcagttg

SEQ ID NO: 97243 - DNA, 15 bp, Homo sapiens
cctaggaaagcagtt

SEQ ID NO: 97244 - DNA, 15 bp, Homo sapiens
gcctaggaaagcagt

SEQ ID NO: 97245 - DNA, 15 bp, Homo sapiens
agcctaggaaagcag

SEQ ID NO: 97246 - DNA, 15 bp, Homo sapiens
aagcctaggaaagca

SEQ ID NO: 97247 - DNA, 15 bp, Homo sapiens
caagcctaggaaagc

SEQ ID NO: 97248 - DNA, 15 bp, Homo sapiens
gcaagcctaggaaag

SEQ ID NO: 97249 - DNA, 15 bp, Homo sapiens
agcaagcctaggaaa

SEQ ID NO: 97250 - DNA, 15 bp, Homo sapiens
gagcaagcctaggaa

SEQ ID NO: 97251 - DNA, 15 bp, Homo sapiens
ggagcaagcctagga

SEQ ID NO: 97252 - DNA, 15 bp, Homo sapiens
aggagcaagcctagg

SEQ ID NO: 97253 - DNA, 15 bp, Homo sapiens
taggagcaagcctag

SEQ ID NO: 97254 - DNA, 15 bp, Homo sapiens
ctaggagcaagccta

SEQ ID NO: 97255 - DNA, 15 bp, Homo sapiens
actaggagcaagcct

SEQ ID NO: 97256 - DNA, 15 bp, Homo sapiens
tactaggagcaagcc

SEQ ID NO: 97257 - DNA, 15 bp, Homo sapiens
gtactaggagcaagc

SEQ ID NO: 97258 - DNA, 15 bp, Homo sapiens
ggtactaggagcaag

SEQ ID NO: 97259 - DNA, 15 bp, Homo sapiens
tggtactaggagcaa

SEQ ID NO: 97260 - DNA, 15 bp, Homo sapiens
ttggtactaggagca

SEQ ID NO: 97261 - DNA, 15 bp, Homo sapiens
cttggtactaggagc

SEQ ID NO: 97262 - DNA, 15 bp, Homo sapiens
gcttggtactaggag

SEQ ID NO: 97263 - DNA, 15 bp, Homo sapiens
agcttggtactagga

SEQ ID NO: 97264 - DNA, 15 bp, Homo sapiens
gagcttggtactagg

SEQ ID NO: 97265 - DNA, 15 bp, Homo sapiens
ggagcttggtactag

SEQ ID NO: 97266 - DNA, 15 bp, Homo sapiens
aggagcttggtacta

SEQ ID NO: 97267 - DNA, 15 bp, Homo sapiens
caggagcttggtact

SEQ ID NO: 97268 - DNA, 15 bp, Homo sapiens
tcaggagcttggtac

SEQ ID NO: 97269 - DNA, 15 bp, Homo sapiens
gtcaggagcttggta

SEQ ID NO: 97270 - DNA, 15 bp, Homo sapiens
cgtcaggagcttggt

SEQ ID NO: 97271 - DNA, 15 bp, Homo sapiens
gcgtcaggagcttgg

SEQ ID NO: 97272 - DNA, 15 bp, Homo sapiens
tgcgtcaggagcttg

SEQ ID NO: 97273 - DNA, 15 bp, Homo sapiens
atgcgtcaggagctt

SEQ ID NO: 97274 - DNA, 15 bp, Homo sapiens
tatgcgtcaggagct

SEQ ID NO: 97275 - DNA, 15 bp, Homo sapiens
atatgcgtcaggagc

SEQ ID NO: 97276 - DNA, 15 bp, Homo sapiens
tatatgcgtcaggag

SEQ ID NO: 97277 - DNA, 15 bp, Homo sapiens
ctatatgcgtcagga

SEQ ID NO: 97278 - DNA, 15 bp, Homo sapiens
gctatatgcgtcagg

SEQ ID NO: 97279 - DNA, 15 bp, Homo sapiens
tgctatatgcgtcag

SEQ ID NO: 97280 - DNA, 15 bp, Homo sapiens
ctgctatatgcgtca

SEQ ID NO: 97281 - DNA, 15 bp, Homo sapiens
actgctatatgcgtc

SEQ ID NO: 97282 - DNA, 15 bp, Homo sapiens
cactgctatatgcgt

SEQ ID NO: 97283 - DNA, 15 bp, Homo sapiens
ccactgctatatgcg

SEQ ID NO: 97284 - DNA, 15 bp, Homo sapiens
gccactgctatatgc

SEQ ID NO: 97285 - DNA, 15 bp, Homo sapiens
tgccactgctatatg

SEQ ID NO: 97286 - DNA, 15 bp, Homo sapiens
ctgccactgctatat

SEQ ID NO: 97287 - DNA, 15 bp, Homo sapiens
actgccactgctata

SEQ ID NO: 97288 - DNA, 15 bp, Homo sapiens
tactgccactgctat

SEQ ID NO: 97289 - DNA, 15 bp, Homo sapiens
ttactgccactgcta

SEQ ID NO: 97290 - DNA, 15 bp, Homo sapiens
attactgccactgct

SEQ ID NO: 97291 - DNA, 15 bp, Homo sapiens
tattactgccactgc

SEQ ID NO: 97292 - DNA, 15 bp, Homo sapiens
ttattactgccactg

SEQ ID NO: 97293 - DNA, 15 bp, Homo sapiens
gttattactgccact

SEQ ID NO: 97294 - DNA, 15 bp, Homo sapiens
ggttattactgccac

SEQ ID NO: 97295 - DNA, 15 bp, Homo sapiens
tggttattactgcca

SEQ ID NO: 97296 - DNA, 15 bp, Homo sapiens
ctggttattactgcc

SEQ ID NO: 97297 - DNA, 15 bp, Homo sapiens
gctggttattactgc

SEQ ID NO: 97298 - DNA, 15 bp, Homo sapiens
ggctggttattactg

SEQ ID NO: 97299 - DNA, 15 bp, Homo sapiens
gggctggttattact

SEQ ID NO: 97300 - DNA, 15 bp, Homo sapiens
tgggctggttattac

SEQ ID NO: 97301 - DNA, 15 bp, Homo sapiens
atgggctggttatta

SEQ ID NO: 97302 - DNA, 15 bp, Homo sapiens
tatgggctggttatt

SEQ ID NO: 97303 - DNA, 15 bp, Homo sapiens
ctatgggctggttat

SEQ ID NO: 97304 - DNA, 15 bp, Homo sapiens
actatgggctggtta

SEQ ID NO: 97305 - DNA, 15 bp, Homo sapiens
tactatgggctggtt

SEQ ID NO: 97306 - DNA, 15 bp, Homo sapiens
ttactatgggctggt

SEQ ID NO: 97307 - DNA, 15 bp, Homo sapiens
cttactatgggctgg

SEQ ID NO: 97308 - DNA, 15 bp, Homo sapiens
ccttactatgggctg

SEQ ID NO: 97309 - DNA, 15 bp, Homo sapiens
accttactatgggct

SEQ ID NO: 97310 - DNA, 15 bp, Homo sapiens
aaccttactatgggc

SEQ ID NO: 97311 - DNA, 15 bp, Homo sapiens
aaaccttactatggg

SEQ ID NO: 97312 - DNA, 15 bp, Homo sapiens
caaaccttactatgg

SEQ ID NO: 97313 - DNA, 15 bp, Homo sapiens
acaaaccttactatg

SEQ ID NO: 97314 - DNA, 15 bp, Homo sapiens
gacaaaccttactat

SEQ ID NO: 97315 - DNA, 15 bp, Homo sapiens
tgacaaaccttacta

SEQ ID NO: 97316 - DNA, 15 bp, Homo sapiens
gtgacaaaccttact

SEQ ID NO: 97317 - DNA, 15 bp, Homo sapiens
tgtgacaaaccttac

SEQ ID NO: 97318 - DNA, 15 bp, Homo sapiens
ctgtgacaaacctta

SEQ ID NO: 97319 - DNA, 15 bp, Homo sapiens
cctgtgacaaacctt

SEQ ID NO: 97320 - DNA, 15 bp, Homo sapiens
ccctgtgacaaacct

SEQ ID NO: 97321 - DNA, 15 bp, Homo sapiens
tccctgtgacaaacc

SEQ ID NO: 97322 - DNA, 15 bp, Homo sapiens
gtccctgtgacaaac

SEQ ID NO: 97323 - DNA, 15 bp, Homo sapiens
agtccctgtgacaaa

SEQ ID NO: 97324 - DNA, 15 bp, Homo sapiens
cagtccctgtgacaa

SEQ ID NO: 97325 - DNA, 15 bp, Homo sapiens
ccagtccctgtgaca

SEQ ID NO: 97326 - DNA, 15 bp, Homo sapiens
accagtccctgtgac

SEQ ID NO: 97327 - DNA, 15 bp, Homo sapiens
aaccagtccctgtga

SEQ ID NO: 97328 - DNA, 15 bp, Homo sapiens
caaccagtccctgtg

SEQ ID NO: 97329 - DNA, 15 bp, Homo sapiens
acaaccagtccctgt

SEQ ID NO: 97330 - DNA, 15 bp, Homo sapiens
tacaaccagtccctg

SEQ ID NO: 97331 - DNA, 15 bp, Homo sapiens
ttacaaccagtccct

SEQ ID NO: 97332 - DNA, 15 bp, Homo sapiens
cttacaaccagtccc

SEQ ID NO: 97333 - DNA, 15 bp, Homo sapiens
tcttacaaccagtcc

SEQ ID NO: 97334 - DNA, 15 bp, Homo sapiens
ttcttacaaccagtc

SEQ ID NO: 97335 - DNA, 15 bp, Homo sapiens
gttcttacaaccagt

SEQ ID NO: 97336 - DNA, 15 bp, Homo sapiens
agttcttacaaccag

SEQ ID NO: 97337 - DNA, 15 bp, Homo sapiens
cagttcttacaacca

SEQ ID NO: 97338 - DNA, 15 bp, Homo sapiens
tcagttcttacaacc

SEQ ID NO: 97339 - DNA, 15 bp, Homo sapiens
atcagttcttacaac

SEQ ID NO: 97340 - DNA, 15 bp, Homo sapiens
aatcagttcttacaa

SEQ ID NO: 97341 - DNA, 15 bp, Homo sapiens
aaatcagttcttaca

SEQ ID NO: 97342 - DNA, 15 bp, Homo sapiens
caaatcagttcttac

SEQ ID NO: 97343 - DNA, 15 bp, Homo sapiens
ccaaatcagttctta

SEQ ID NO: 97344 - DNA, 15 bp, Homo sapiens
accaaatcagttctt

SEQ ID NO: 97345 - DNA, 15 bp, Homo sapiens
aaccaaatcagttct

SEQ ID NO: 97346 - DNA, 15 bp, Homo sapiens
caaccaaatcagttc

SEQ ID NO: 97347 - DNA, 15 bp, Homo sapiens
ccaaccaaatcagtt

SEQ ID NO: 97348 - DNA, 15 bp, Homo sapiens
accaaccaaatcagt

SEQ ID NO: 97349 - DNA, 15 bp, Homo sapiens
taccaaccaaatcag

SEQ ID NO: 97350 - DNA, 15 bp, Homo sapiens
ataccaaccaaatca

SEQ ID NO: 97351 - DNA, 15 bp, Homo sapiens
tataccaaccaaatc

SEQ ID NO: 97352 - DNA, 15 bp, Homo sapiens
ctataccaaccaaat

SEQ ID NO: 97353 - DNA, 15 bp, Homo sapiens
gctataccaaccaaa

SEQ ID NO: 97354 - DNA, 15 bp, Homo sapiens
agctataccaaccaa

SEQ ID NO: 97355 - DNA, 15 bp, Homo sapiens
cagctataccaacca

SEQ ID NO: 97356 - DNA, 15 bp, Homo sapiens
acagctataccaacc

SEQ ID NO: 97357 - DNA, 15 bp, Homo sapiens
cacagctataccaac

SEQ ID NO: 97358 - DNA, 15 bp, Homo sapiens
tcacagctataccaa

SEQ ID NO: 97359 - DNA, 15 bp, Homo sapiens
ctcacagctatacca

SEQ ID NO: 97360 - DNA, 15 bp, Homo sapiens
cctcacagctatacc

SEQ ID NO: 97361 - DNA, 15 bp, Homo sapiens
ccctcacagctatac

SEQ ID NO: 97362 - DNA, 15 bp, Homo sapiens
gccctcacagctata

SEQ ID NO: 97363 - DNA, 15 bp, Homo sapiens
ggccctcacagctat

SEQ ID NO: 97364 - DNA, 15 bp, Homo sapiens
aggccctcacagcta

SEQ ID NO: 97365 - DNA, 15 bp, Homo sapiens
caggccctcacagct

SEQ ID NO: 97366 - DNA, 15 bp, Homo sapiens
ccaggccctcacagc

SEQ ID NO: 97367 - DNA, 15 bp, Homo sapiens
gccaggccctcacag

SEQ ID NO: 97368 - DNA, 15 bp, Homo sapiens
tgccaggccctcaca

SEQ ID NO: 97369 - DNA, 15 bp, Homo sapiens
gtgccaggccctcac

SEQ ID NO: 97370 - DNA, 15 bp, Homo sapiens
cgtgccaggccctca

SEQ ID NO: 97371 - DNA, 15 bp, Homo sapiens
ccgtgccaggccctc

SEQ ID NO: 97372 - DNA, 15 bp, Homo sapiens
accgtgccaggccct

SEQ ID NO: 97373 - DNA, 15 bp, Homo sapiens
caccgtgccaggccc

SEQ ID NO: 97374 - DNA, 15 bp, Homo sapiens
acaccgtgccaggcc

SEQ ID NO: 97375 - DNA, 15 bp, Homo sapiens
gacaccgtgccaggc

SEQ ID NO: 97376 - DNA, 15 bp, Homo sapiens
ggacaccgtgccagg

SEQ ID NO: 97377 - DNA, 15 bp, Homo sapiens
tggacaccgtgccag

SEQ ID NO: 97378 - DNA, 15 bp, Homo sapiens
gtggacaccgtgcca

SEQ ID NO: 97379 - DNA, 15 bp, Homo sapiens
cgtggacaccgtgcc

SEQ ID NO: 97380 - DNA, 15 bp, Homo sapiens
acgtggacaccgtgc

SEQ ID NO: 97381 - DNA, 15 bp, Homo sapiens
cacgtggacaccgtg

SEQ ID NO: 97382 - DNA, 15 bp, Homo sapiens
acacgtggacaccgt

SEQ ID NO: 97383 - DNA, 15 bp, Homo sapiens
cacacgtggacaccg

SEQ ID NO: 97384 - DNA, 15 bp, Homo sapiens
gcacacgtggacacc

SEQ ID NO: 97385 - DNA, 15 bp, Homo sapiens
ggcacacgtggacac

SEQ ID NO: 97386 - DNA, 15 bp, Homo sapiens
aggcacacgtggaca

SEQ ID NO: 97387 - DNA, 15 bp, Homo sapiens
gaggcacacgtggac

SEQ ID NO: 97388 - DNA, 15 bp, Homo sapiens
tgaggcacacgtgga

SEQ ID NO: 97389 - DNA, 15 bp, Homo sapiens
ttgaggcacacgtgg

SEQ ID NO: 97390 - DNA, 15 bp, Homo sapiens
attgaggcacacgtg

SEQ ID NO: 97391 - DNA, 15 bp, Homo sapiens
gattgaggcacacgt

SEQ ID NO: 97392 - DNA, 15 bp, Homo sapiens
ggattgaggcacacg

SEQ ID NO: 97393 - DNA, 15 bp, Homo sapiens
aggattgaggcacac

SEQ ID NO: 97394 - DNA, 15 bp, Homo sapiens
taggattgaggcaca

SEQ ID NO: 97395 - DNA, 15 bp, Homo sapiens
ttaggattgaggcac

SEQ ID NO: 97396 - DNA, 15 bp, Homo sapiens
attaggattgaggca

SEQ ID NO: 97397 - DNA, 15 bp, Homo sapiens
aattaggattgaggc

SEQ ID NO: 97398 - DNA, 15 bp, Homo sapiens
gaattaggattgagg

SEQ ID NO: 97399 - DNA, 15 bp, Homo sapiens
agaattaggattgag

SEQ ID NO: 97400 - DNA, 15 bp, Homo sapiens
cagaattaggattga

SEQ ID NO: 97401 - DNA, 15 bp, Homo sapiens
tcagaattaggattg

SEQ ID NO: 97402 - DNA, 15 bp, Homo sapiens
ttcagaattaggatt

SEQ ID NO: 97403 - DNA, 15 bp, Homo sapiens
tttcagaattaggat

SEQ ID NO: 97404 - DNA, 15 bp, Homo sapiens
ttttcagaattagga

SEQ ID NO: 97405 - DNA, 15 bp, Homo sapiens
tttttcagaattagg

SEQ ID NO: 97406 - DNA, 15 bp, Homo sapiens
ctttttcagaattag

SEQ ID NO: 97407 - DNA, 15 bp, Homo sapiens
cctttttcagaatta

SEQ ID NO: 97408 - DNA, 15 bp, Homo sapiens
gcctttttcagaatt

SEQ ID NO: 97409 - DNA, 15 bp, Homo sapiens
agcctttttcagaat

SEQ ID NO: 97410 - DNA, 15 bp, Homo sapiens
cagcctttttcagaa

SEQ ID NO: 97411 - DNA, 15 bp, Homo sapiens
tcagcctttttcaga

SEQ ID NO: 97412 - DNA, 15 bp, Homo sapiens
gtcagcctttttcag

SEQ ID NO: 97413 - DNA, 15 bp, Homo sapiens
ggtcagcctttttca

SEQ ID NO: 97414 - DNA, 15 bp, Homo sapiens
gggtcagcctttttc

SEQ ID NO: 97415 - DNA, 15 bp, Homo sapiens
agggtcagccttttt

SEQ ID NO: 97416 - DNA, 15 bp, Homo sapiens
cagggtcagcctttt

SEQ ID NO: 97417 - DNA, 15 bp, Homo sapiens
ccagggtcagccttt

SEQ ID NO: 97418 - DNA, 15 bp, Homo sapiens
cccagggtcagcctt

SEQ ID NO: 97419 - DNA, 15 bp, Homo sapiens
ccccagggtcagcct

SEQ ID NO: 97420 - DNA, 15 bp, Homo sapiens
cccccagggtcagcc

SEQ ID NO: 97421 - DNA, 15 bp, Homo sapiens
acccccagggtcagc

SEQ ID NO: 97422 - DNA, 15 bp, Homo sapiens
cacccccagggtcag

SEQ ID NO: 97423 - DNA, 15 bp, Homo sapiens
gcacccccagggtca

SEQ ID NO: 97424 - DNA, 15 bp, Homo sapiens
agcacccccagggtc

SEQ ID NO: 97425 - DNA, 15 bp, Homo sapiens
tagcacccccagggt

SEQ ID NO: 97426 - DNA, 15 bp, Homo sapiens
ttagcacccccaggg

SEQ ID NO: 97427 - DNA, 15 bp, Homo sapiens
attagcacccccagg

SEQ ID NO: 97428 - DNA, 15 bp, Homo sapiens
aattagcacccccag

SEQ ID NO: 97429 - DNA, 15 bp, Homo sapiens
taattagcaccccca

SEQ ID NO: 97430 - DNA, 15 bp, Homo sapiens
ctaattagcaccccc

SEQ ID NO: 97431 - DNA, 15 bp, Homo sapiens
tctaattagcacccc

SEQ ID NO: 97432 - DNA, 15 bp, Homo sapiens
atctaattagcaccc

SEQ ID NO: 97433 - DNA, 15 bp, Homo sapiens
tatctaattagcacc

SEQ ID NO: 97434 - DNA, 15 bp, Homo sapiens
gtatctaattagcac

SEQ ID NO: 97435 - DNA, 15 bp, Homo sapiens
tgtatctaattagca

SEQ ID NO: 97436 - DNA, 15 bp, Homo sapiens
gtgtatctaattagc

SEQ ID NO: 97437 - DNA, 15 bp, Homo sapiens
tgtgtatctaattag

SEQ ID NO: 97438 - DNA, 15 bp, Homo sapiens
ctgtgtatctaatta

SEQ ID NO: 97439 - DNA, 15 bp, Homo sapiens
tctgtgtatctaatt

SEQ ID NO: 97440 - DNA, 15 bp, Homo sapiens
ctctgtgtatctaat

SEQ ID NO: 97441 - DNA, 15 bp, Homo sapiens
tctctgtgtatctaa

SEQ ID NO: 97442 - DNA, 15 bp, Homo sapiens
ctctctgtgtatcta

SEQ ID NO: 97443 - DNA, 15 bp, Homo sapiens
cctctctgtgtatct

SEQ ID NO: 97444 - DNA, 15 bp, Homo sapiens
tcctctctgtgtatc

SEQ ID NO: 97445 - DNA, 15 bp, Homo sapiens
ttcctctctgtgtat

SEQ ID NO: 97446 - DNA, 15 bp, Homo sapiens
attcctctctgtgta

SEQ ID NO: 97447 - DNA, 15 bp, Homo sapiens
cattcctctctgtgt

SEQ ID NO: 97448 - DNA, 15 bp, Homo sapiens
tcattcctctctgtg

SEQ ID NO: 97449 - DNA, 15 bp, Homo sapiens
ttcattcctctctgt

SEQ ID NO: 97450 - DNA, 15 bp, Homo sapiens
attcattcctctctg

SEQ ID NO: 97451 - DNA, 15 bp, Homo sapiens
cattcattcctctct

SEQ ID NO: 97452 - DNA, 15 bp, Homo sapiens
gcattcattcctctc

SEQ ID NO: 97453 - DNA, 15 bp, Homo sapiens
agcattcattcctct

SEQ ID NO: 97454 - DNA, 15 bp, Homo sapiens
cagcattcattcctc

SEQ ID NO: 97455 - DNA, 15 bp, Homo sapiens
gcagcattcattcct

SEQ ID NO: 97456 - DNA, 15 bp, Homo sapiens
ggcagcattcattcc

SEQ ID NO: 97457 - DNA, 15 bp, Homo sapiens
tggcagcattcattc

SEQ ID NO: 97458 - DNA, 15 bp, Homo sapiens
ctggcagcattcatt

SEQ ID NO: 97459 - DNA, 15 bp, Homo sapiens
tctggcagcattcat

SEQ ID NO: 97460 - DNA, 15 bp, Homo sapiens
ttctggcagcattca

SEQ ID NO: 97461 - DNA, 15 bp, Homo sapiens
cttctggcagcattc

SEQ ID NO: 97462 - DNA, 15 bp, Homo sapiens
ccttctggcagcatt

SEQ ID NO: 97463 - DNA, 15 bp, Homo sapiens
gccttctggcagcat

SEQ ID NO: 97464 - DNA, 15 bp, Homo sapiens
ggccttctggcagca

SEQ ID NO: 97465 - DNA, 15 bp, Homo sapiens
tggccttctggcagc

SEQ ID NO: 97466 - DNA, 15 bp, Homo sapiens
ttggccttctggcag

SEQ ID NO: 97467 - DNA, 15 bp, Homo sapiens
cttggccttctggca

SEQ ID NO: 97468 - DNA, 15 bp, Homo sapiens
acttggccttctggc

SEQ ID NO: 97469 - DNA, 15 bp, Homo sapiens
aacttggccttctgg

SEQ ID NO: 97470 - DNA, 15 bp, Homo sapiens
gaacttggccttctg

SEQ ID NO: 97471 - DNA, 15 bp, Homo sapiens
tgaacttggccttct

SEQ ID NO: 97472 - DNA, 15 bp, Homo sapiens
atgaacttggccttc

SEQ ID NO: 97473 - DNA, 15 bp, Homo sapiens
catgaacttggcctt

SEQ ID NO: 97474 - DNA, 15 bp, Homo sapiens
ccatgaacttggcct

SEQ ID NO: 97475 - DNA, 15 bp, Homo sapiens
gccatgaacttggcc

SEQ ID NO: 97476 - DNA, 15 bp, Homo sapiens
tgccatgaacttggc

SEQ ID NO: 97477 - DNA, 15 bp, Homo sapiens
ttgccatgaacttgg

SEQ ID NO: 97478 - DNA, 15 bp, Homo sapiens
attgccatgaacttg

SEQ ID NO: 97479 - DNA, 15 bp, Homo sapiens
cattgccatgaactt

SEQ ID NO: 97480 - DNA, 15 bp, Homo sapiens
gcattgccatgaact

SEQ ID NO: 97481 - DNA, 15 bp, Homo sapiens
ggcattgccatgaac

SEQ ID NO: 97482 - DNA, 15 bp, Homo sapiens
cggcattgccatgaa

SEQ ID NO: 97483 - DNA, 15 bp, Homo sapiens
gcggcattgccatga

SEQ ID NO: 97484 - DNA, 15 bp, Homo sapiens
agcggcattgccatg

SEQ ID NO: 97485 - DNA, 15 bp, Homo sapiens
cagcggcattgccat

SEQ ID NO: 97486 - DNA, 15 bp, Homo sapiens
acagcggcattgcca

SEQ ID NO: 97487 - DNA, 15 bp, Homo sapiens
cacagcggcattgcc

SEQ ID NO: 97488 - DNA, 15 bp, Homo sapiens
ccacagcggcattgc

SEQ ID NO: 97489 - DNA, 15 bp, Homo sapiens
gccacagcggcattg

SEQ ID NO: 97490 - DNA, 15 bp, Homo sapiens
agccacagcggcatt

SEQ ID NO: 97491 - DNA, 15 bp, Homo sapiens
cagccacagcggcat

SEQ ID NO: 97492 - DNA, 15 bp, Homo sapiens
tcagccacagcggca

SEQ ID NO: 97493 - DNA, 15 bp, Homo sapiens
ctcagccacagcggc

SEQ ID NO: 97494 - DNA, 15 bp, Homo sapiens
cctcagccacagcgg

SEQ ID NO: 97495 - DNA, 15 bp, Homo sapiens
acctcagccacagcg

SEQ ID NO: 97496 - DNA, 15 bp, Homo sapiens
cacctcagccacagc

SEQ ID NO: 97497 - DNA, 15 bp, Homo sapiens
gcacctcagccacag

SEQ ID NO: 97498 - DNA, 15 bp, Homo sapiens
tgcacctcagccaca

SEQ ID NO: 97499 - DNA, 15 bp, Homo sapiens
ctgcacctcagccac

SEQ ID NO: 97500 - DNA, 15 bp, Homo sapiens
actgcacctcagcca

SEQ ID NO: 97501 - DNA, 15 bp, Homo sapiens
gactgcacctcagcc

SEQ ID NO: 97502 - DNA, 15 bp, Homo sapiens
tgactgcacctcagc

SEQ ID NO: 97503 - DNA, 15 bp, Homo sapiens
atgactgcacctcag

SEQ ID NO: 97504 - DNA, 15 bp, Homo sapiens
gatgactgcacctca

SEQ ID NO: 97505 - DNA, 15 bp, Homo sapiens
tgatgactgcacctc

SEQ ID NO: 97506 - DNA, 15 bp, Homo sapiens
ctgatgactgcacct

SEQ ID NO: 97507 - DNA, 15 bp, Homo sapiens
actgatgactgcacc

SEQ ID NO: 97508 - DNA, 15 bp, Homo sapiens
gactgatgactgcac

SEQ ID NO: 97509 - DNA, 15 bp, Homo sapiens
agactgatgactgca

SEQ ID NO: 97510 - DNA, 15 bp, Homo sapiens
cagactgatgactgc

SEQ ID NO: 97511 - DNA, 15 bp, Homo sapiens
ccagactgatgactg

SEQ ID NO: 97512 - DNA, 15 bp, Homo sapiens
tccagactgatgact

SEQ ID NO: 97513 - DNA, 15 bp, Homo sapiens
ttccagactgatgac

SEQ ID NO: 97514 - DNA, 15 bp, Homo sapiens
gttccagactgatga

SEQ ID NO: 97515 - DNA, 15 bp, Homo sapiens
cgttccagactgatg

SEQ ID NO: 97516 - DNA, 15 bp, Homo sapiens
acgttccagactgat

SEQ ID NO: 97517 - DNA, 15 bp, Homo sapiens
cacgttccagactga

SEQ ID NO: 97518 - DNA, 15 bp, Homo sapiens
tcacgttccagactg

SEQ ID NO: 97519 - DNA, 15 bp, Homo sapiens
ttcacgttccagact

SEQ ID NO: 97520 - DNA, 15 bp, Homo sapiens
gttcacgttccagac

SEQ ID NO: 97521 - DNA, 15 bp, Homo sapiens
tgttcacgttccaga

SEQ ID NO: 97522 - DNA, 15 bp, Homo sapiens
gtgttcacgttccag

SEQ ID NO: 97523 - DNA, 15 bp, Homo sapiens
agtgttcacgttcca

SEQ ID NO: 97524 - DNA, 15 bp, Homo sapiens
cagtgttcacgttcc

SEQ ID NO: 97525 - DNA, 15 bp, Homo sapiens
tcagtgttcacgttc

SEQ ID NO: 97526 - DNA, 15 bp, Homo sapiens
ttcagtgttcacgtt

SEQ ID NO: 97527 - DNA, 15 bp, Homo sapiens
gttcagtgttcacgt

SEQ ID NO: 97528 - DNA, 15 bp, Homo sapiens
agttcagtgttcacg

SEQ ID NO: 97529 - DNA, 15 bp, Homo sapiens
aagttcagtgttcac

SEQ ID NO: 97530 - DNA, 15 bp, Homo sapiens
gaagttcagtgttca

SEQ ID NO: 97531 - DNA, 15 bp, Homo sapiens
agaagttcagtgttc

SEQ ID NO: 97532 - DNA, 15 bp, Homo sapiens
gagaagttcagtgtt

SEQ ID NO: 97533 - DNA, 15 bp, Homo sapiens
agagaagttcagtgt

SEQ ID NO: 97534 - DNA, 15 bp, Homo sapiens
gagagaagttcagtg

SEQ ID NO: 97535 - DNA, 15 bp, Homo sapiens
tgagagaagttcagt

SEQ ID NO: 97536 - DNA, 15 bp, Homo sapiens
gtgagagaagttcag

SEQ ID NO: 97537 - DNA, 15 bp, Homo sapiens
tgtgagagaagttca

SEQ ID NO: 97538 - DNA, 15 bp, Homo sapiens
atgtgagagaagttc

SEQ ID NO: 97539 - DNA, 15 bp, Homo sapiens
catgtgagagaagtt

SEQ ID NO: 97540 - DNA, 15 bp, Homo sapiens
acatgtgagagaagt

SEQ ID NO: 97541 - DNA, 15 bp, Homo sapiens
cacatgtgagagaag

SEQ ID NO: 97542 - DNA, 15 bp, Homo sapiens
tcacatgtgagagaa

SEQ ID NO: 97543 - DNA, 15 bp, Homo sapiens
atcacatgtgagaga

SEQ ID NO: 97544 - DNA, 15 bp, Homo sapiens
aatcacatgtgagag

SEQ ID NO: 97545 - DNA, 15 bp, Homo sapiens
gaatcacatgtgaga

SEQ ID NO: 97546 - DNA, 15 bp, Homo sapiens
agaatcacatgtgag

SEQ ID NO: 97547 - DNA, 15 bp, Homo sapiens
aagaatcacatgtga

SEQ ID NO: 97548 - DNA, 15 bp, Homo sapiens
gaagaatcacatgtg

SEQ ID NO: 97549 - DNA, 15 bp, Homo sapiens
tgaagaatcacatgt

SEQ ID NO: 97550 - DNA, 15 bp, Homo sapiens
gtgaagaatcacatg

SEQ ID NO: 97551 - DNA, 15 bp, Homo sapiens
agtgaagaatcacat

SEQ ID NO: 97552 - DNA, 15 bp, Homo sapiens
aagtgaagaatcaca

SEQ ID NO: 97553 - DNA, 15 bp, Homo sapiens
caagtgaagaatcac

SEQ ID NO: 97554 - DNA, 15 bp, Homo sapiens
tcaagtgaagaatca

SEQ ID NO: 97555 - DNA, 15 bp, Homo sapiens
gtcaagtgaagaatc

SEQ ID NO: 97556 - DNA, 15 bp, Homo sapiens
agtcaagtgaagaat

SEQ ID NO: 97557 - DNA, 15 bp, Homo sapiens
cagtcaagtgaagaa

SEQ ID NO: 97558 - DNA, 15 bp, Homo sapiens
ccagtcaagtgaaga

SEQ ID NO: 97559 - DNA, 15 bp, Homo sapiens
gccagtcaagtgaag

SEQ ID NO: 97560 - DNA, 15 bp, Homo sapiens
agccagtcaagtgaa

SEQ ID NO: 97561 - DNA, 15 bp, Homo sapiens
aagccagtcaagtga

SEQ ID NO: 97562 - DNA, 15 bp, Homo sapiens
gaagccagtcaagtg

SEQ ID NO: 97563 - DNA, 15 bp, Homo sapiens
tgaagccagtcaagt

SEQ ID NO: 97564 - DNA, 15 bp, Homo sapiens
atgaagccagtcaag

SEQ ID NO: 97565 - DNA, 15 bp, Homo sapiens
tatgaagccagtcaa

SEQ ID NO: 97566 - DNA, 15 bp, Homo sapiens
ctatgaagccagtca

SEQ ID NO: 97567 - DNA, 15 bp, Homo sapiens
tctatgaagccagtc

SEQ ID NO: 97568 - DNA, 15 bp, Homo sapiens
ttctatgaagccagt

SEQ ID NO: 97569 - DNA, 15 bp, Homo sapiens
gttctatgaagccag

SEQ ID NO: 97570 - DNA, 15 bp, Homo sapiens
ggttctatgaagcca

SEQ ID NO: 97571 - DNA, 15 bp, Homo sapiens
gggttctatgaagcc

SEQ ID NO: 97572 - DNA, 15 bp, Homo sapiens
ggggttctatgaagc

SEQ ID NO: 97573 - DNA, 15 bp, Homo sapiens
tggggttctatgaag

SEQ ID NO: 97574 - DNA, 15 bp, Homo sapiens
ttggggttctatgaa

SEQ ID NO: 97575 - DNA, 15 bp, Homo sapiens
tttggggttctatga

SEQ ID NO: 97576 - DNA, 15 bp, Homo sapiens
ctttggggttctatg

SEQ ID NO: 97577 - DNA, 15 bp, Homo sapiens
gctttggggttctat

SEQ ID NO: 97578 - DNA, 15 bp, Homo sapiens
ggctttggggttcta

SEQ ID NO: 97579 - DNA, 15 bp, Homo sapiens
tggctttggggttct

SEQ ID NO: 97580 - DNA, 15 bp, Homo sapiens
gtggctttggggttc

SEQ ID NO: 97581 - DNA, 15 bp, Homo sapiens
ggtggctttggggtt

SEQ ID NO: 97582 - DNA, 15 bp, Homo sapiens
gggtggctttggggt

SEQ ID NO: 97583 - DNA, 15 bp, Homo sapiens
ggggtggctttgggg

SEQ ID NO: 97584 - DNA, 15 bp, Homo sapiens
tggggtggctttggg

SEQ ID NO: 97585 - DNA, 15 bp, Homo sapiens
gtggggtggctttgg

SEQ ID NO: 97586 - DNA, 15 bp, Homo sapiens
ggtggggtggctttg

SEQ ID NO: 97587 - DNA, 15 bp, Homo sapiens
tggtggggtggcttt

SEQ ID NO: 97588 - DNA, 15 bp, Homo sapiens
gtggtggggtggctt

SEQ ID NO: 97589 - DNA, 15 bp, Homo sapiens
ggtggtggggtggct

SEQ ID NO: 97590 - DNA, 15 bp, Homo sapiens
tggtggtggggtggc

SEQ ID NO: 97591 - DNA, 15 bp, Homo sapiens
gtggtggtggggtgg

SEQ ID NO: 97592 - DNA, 15 bp, Homo sapiens
tgtggtggtggggtg

SEQ ID NO: 97593 - DNA, 15 bp, Homo sapiens
atgtggtggtggggt

SEQ ID NO: 97594 - DNA, 15 bp, Homo sapiens
tatgtggtggtgggg

SEQ ID NO: 97595 - DNA, 15 bp, Homo sapiens
ttatgtggtggtggg

SEQ ID NO: 97596 - DNA, 15 bp, Homo sapiens
tttatgtggtggtgg

SEQ ID NO: 97597 - DNA, 15 bp, Homo sapiens
atttatgtggtggtg

SEQ ID NO: 97598 - DNA, 15 bp, Homo sapiens
aatttatgtggtggt

SEQ ID NO: 97599 - DNA, 15 bp, Homo sapiens
caatttatgtggtgg

SEQ ID NO: 97600 - DNA, 15 bp, Homo sapiens
acaatttatgtggtg

SEQ ID NO: 97601 - DNA, 15 bp, Homo sapiens
cacaatttatgtggt

SEQ ID NO: 97602 - DNA, 15 bp, Homo sapiens
acacaatttatgtgg

SEQ ID NO: 97603 - DNA, 15 bp, Homo sapiens
gacacaatttatgtg

SEQ ID NO: 97604 - DNA, 15 bp, Homo sapiens
agacacaatttatgt

SEQ ID NO: 97605 - DNA, 15 bp, Homo sapiens
gagacacaatttatg

SEQ ID NO: 97606 - DNA, 15 bp, Homo sapiens
agagacacaatttat

SEQ ID NO: 97607 - DNA, 15 bp, Homo sapiens
tagagacacaattta

SEQ ID NO: 97608 - DNA, 15 bp, Homo sapiens
ctagagacacaattt

SEQ ID NO: 97609 - DNA, 15 bp, Homo sapiens
cctagagacacaatt

SEQ ID NO: 97610 - DNA, 15 bp, Homo sapiens
acctagagacacaat

SEQ ID NO: 97611 - DNA, 15 bp, Homo sapiens
aacctagagacacaa

SEQ ID NO: 97612 - DNA, 15 bp, Homo sapiens
gaacctagagacaca

SEQ ID NO: 97613 - DNA, 15 bp, Homo sapiens
agaacctagagacac

SEQ ID NO: 97614 - DNA, 15 bp, Homo sapiens
cagaacctagagaca

SEQ ID NO: 97615 - DNA, 15 bp, Homo sapiens
acagaacctagagac

SEQ ID NO: 97616 - DNA, 15 bp, Homo sapiens
cacagaacctagaga

SEQ ID NO: 97617 - DNA, 15 bp, Homo sapiens
acacagaacctagag

SEQ ID NO: 97618 - DNA, 15 bp, Homo sapiens
aacacagaacctaga

SEQ ID NO: 97619 - DNA, 15 bp, Homo sapiens
caacacagaacctag

SEQ ID NO: 97620 - DNA, 15 bp, Homo sapiens
gcaacacagaaccta

SEQ ID NO: 97621 - DNA, 15 bp, Homo sapiens
agcaacacagaacct

SEQ ID NO: 97622 - DNA, 15 bp, Homo sapiens
gagcaacacagaacc

SEQ ID NO: 97623 - DNA, 15 bp, Homo sapiens
tgagcaacacagaac

SEQ ID NO: 97624 - DNA, 15 bp, Homo sapiens
gtgagcaacacagaa

SEQ ID NO: 97625 - DNA, 15 bp, Homo sapiens
tgtgagcaacacaga

SEQ ID NO: 97626 - DNA, 15 bp, Homo sapiens
gtgtgagcaacacag

SEQ ID NO: 97627 - DNA, 15 bp, Homo sapiens
agtgtgagcaacaca

SEQ ID NO: 97628 - DNA, 15 bp, Homo sapiens
gagtgtgagcaacac

SEQ ID NO: 97629 - DNA, 15 bp, Homo sapiens
tgagtgtgagcaaca

SEQ ID NO: 97630 - DNA, 15 bp, Homo sapiens
ttgagtgtgagcaac

SEQ ID NO: 97631 - DNA, 15 bp, Homo sapiens
tttgagtgtgagcaa

SEQ ID NO: 97632 - DNA, 15 bp, Homo sapiens
ttttgagtgtgagca

SEQ ID NO: 97633 - DNA, 15 bp, Homo sapiens
attttgagtgtgagc

SEQ ID NO: 97634 - DNA, 15 bp, Homo sapiens
aattttgagtgtgag

SEQ ID NO: 97635 - DNA, 15 bp, Homo sapiens
aaattttgagtgtga

SEQ ID NO: 97636 - DNA, 15 bp, Homo sapiens
gaaattttgagtgtg

SEQ ID NO: 97637 - DNA, 15 bp, Homo sapiens
agaaattttgagtgt

SEQ ID NO: 97638 - DNA, 15 bp, Homo sapiens
cagaaattttgagtg

SEQ ID NO: 97639 - DNA, 15 bp, Homo sapiens
ccagaaattttgagt

SEQ ID NO: 97640 - DNA, 15 bp, Homo sapiens
cccagaaattttgag

SEQ ID NO: 97641 - DNA, 15 bp, Homo sapiens
gcccagaaattttga

SEQ ID NO: 97642 - DNA, 15 bp, Homo sapiens
ggcccagaaattttg

SEQ ID NO: 97643 - DNA, 15 bp, Homo sapiens
aggcccagaaatttt

SEQ ID NO: 97644 - DNA, 15 bp, Homo sapiens
aaggcccagaaattt

SEQ ID NO: 97645 - DNA, 15 bp, Homo sapiens
gaaggcccagaaatt

SEQ ID NO: 97646 - DNA, 15 bp, Homo sapiens
agaaggcccagaaat

SEQ ID NO: 97647 - DNA, 15 bp, Homo sapiens
gagaaggcccagaaa

SEQ ID NO: 97648 - DNA, 15 bp, Homo sapiens
tgagaaggcccagaa

SEQ ID NO: 97649 - DNA, 15 bp, Homo sapiens
atgagaaggcccaga

SEQ ID NO: 97650 - DNA, 15 bp, Homo sapiens
aatgagaaggcccag

SEQ ID NO: 97651 - DNA, 15 bp, Homo sapiens
aaatgagaaggccca

SEQ ID NO: 97652 - DNA, 15 bp, Homo sapiens
caaatgagaaggccc

SEQ ID NO: 97653 - DNA, 15 bp, Homo sapiens
ccaaatgagaaggcc

SEQ ID NO: 97654 - DNA, 15 bp, Homo sapiens
accaaatgagaaggc

SEQ ID NO: 97655 - DNA, 15 bp, Homo sapiens
caccaaatgagaagg

SEQ ID NO: 97656 - DNA, 15 bp, Homo sapiens
gcaccaaatgagaag

SEQ ID NO: 97657 - DNA, 15 bp, Homo sapiens
tgcaccaaatgagaa

SEQ ID NO: 97658 - DNA, 15 bp, Homo sapiens
atgcaccaaatgaga

SEQ ID NO: 97659 - DNA, 15 bp, Homo sapiens
catgcaccaaatgag

SEQ ID NO: 97660 - DNA, 15 bp, Homo sapiens
acatgcaccaaatga

SEQ ID NO: 97661 - DNA, 15 bp, Homo sapiens
cacatgcaccaaatg

SEQ ID NO: 97662 - DNA, 15 bp, Homo sapiens
tcacatgcaccaaat

SEQ ID NO: 97663 - DNA, 15 bp, Homo sapiens
ttcacatgcaccaaa

SEQ ID NO: 97664 - DNA, 15 bp, Homo sapiens
attcacatgcaccaa

SEQ ID NO: 97665 - DNA, 15 bp, Homo sapiens
cattcacatgcacca

SEQ ID NO: 97666 - DNA, 15 bp, Homo sapiens
ccattcacatgcacc

SEQ ID NO: 97667 - DNA, 15 bp, Homo sapiens
accattcacatgcac

SEQ ID NO: 97668 - DNA, 15 bp, Homo sapiens
caccattcacatgca

SEQ ID NO: 97669 - DNA, 15 bp, Homo sapiens
gcaccattcacatgc

SEQ ID NO: 97670 - DNA, 15 bp, Homo sapiens
tgcaccattcacatg

SEQ ID NO: 97671 - DNA, 15 bp, Homo sapiens
atgcaccattcacat

SEQ ID NO: 97672 - DNA, 15 bp, Homo sapiens
tatgcaccattcaca

SEQ ID NO: 97673 - DNA, 15 bp, Homo sapiens
atatgcaccattcac

SEQ ID NO: 97674 - DNA, 15 bp, Homo sapiens
catatgcaccattca

SEQ ID NO: 97675 - DNA, 15 bp, Homo sapiens
tcatatgcaccattc

SEQ ID NO: 97676 - DNA, 15 bp, Homo sapiens
ctcatatgcaccatt

SEQ ID NO: 97677 - DNA, 15 bp, Homo sapiens
actcatatgcaccat

SEQ ID NO: 97678 - DNA, 15 bp, Homo sapiens
cactcatatgcacca

SEQ ID NO: 97679 - DNA, 15 bp, Homo sapiens
tcactcatatgcacc

SEQ ID NO: 97680 - DNA, 15 bp, Homo sapiens
ttcactcatatgcac

SEQ ID NO: 97681 - DNA, 15 bp, Homo sapiens
cttcactcatatgca

SEQ ID NO: 97682 - DNA, 15 bp, Homo sapiens
acttcactcatatgc

SEQ ID NO: 97683 - DNA, 15 bp, Homo sapiens
gacttcactcatatg

SEQ ID NO: 97684 - DNA, 15 bp, Homo sapiens
agacttcactcatat

SEQ ID NO: 97685 - DNA, 15 bp, Homo sapiens
tagacttcactcata

SEQ ID NO: 97686 - DNA, 15 bp, Homo sapiens
ctagacttcactcat

SEQ ID NO: 97687 - DNA, 15 bp, Homo sapiens
cctagacttcactca

SEQ ID NO: 97688 - DNA, 15 bp, Homo sapiens
tcctagacttcactc

SEQ ID NO: 97689 - DNA, 15 bp, Homo sapiens
atcctagacttcact

SEQ ID NO: 97690 - DNA, 15 bp, Homo sapiens
catcctagacttcac

SEQ ID NO: 97691 - DNA, 15 bp, Homo sapiens
ccatcctagacttca

SEQ ID NO: 97692 - DNA, 15 bp, Homo sapiens
cccatcctagacttc

SEQ ID NO: 97693 - DNA, 15 bp, Homo sapiens
ccccatcctagactt

SEQ ID NO: 97694 - DNA, 15 bp, Homo sapiens
gccccatcctagact

SEQ ID NO: 97695 - DNA, 15 bp, Homo sapiens
ggccccatcctagac

SEQ ID NO: 97696 - DNA, 15 bp, Homo sapiens
aggccccatcctaga

SEQ ID NO: 97697 - DNA, 15 bp, Homo sapiens
aaggccccatcctag

SEQ ID NO: 97698 - DNA, 15 bp, Homo sapiens
taaggccccatccta

SEQ ID NO: 97699 - DNA, 15 bp, Homo sapiens
ctaaggccccatcct

SEQ ID NO: 97700 - DNA, 15 bp, Homo sapiens
gctaaggccccatcc

SEQ ID NO: 97701 - DNA, 15 bp, Homo sapiens
cgctaaggccccatc

SEQ ID NO: 97702 - DNA, 15 bp, Homo sapiens
acgctaaggccccat

SEQ ID NO: 97703 - DNA, 15 bp, Homo sapiens
aacgctaaggcccca

SEQ ID NO: 97704 - DNA, 15 bp, Homo sapiens
taacgctaaggcccc

SEQ ID NO: 97705 - DNA, 15 bp, Homo sapiens
ttaacgctaaggccc

SEQ ID NO: 97706 - DNA, 15 bp, Homo sapiens
tttaacgctaaggcc

SEQ ID NO: 97707 - DNA, 15 bp, Homo sapiens
ctttaacgctaaggc

SEQ ID NO: 97708 - DNA, 15 bp, Homo sapiens
gctttaacgctaagg

SEQ ID NO: 97709 - DNA, 15 bp, Homo sapiens
ggctttaacgctaag

SEQ ID NO: 97710 - DNA, 15 bp, Homo sapiens
gggctttaacgctaa

SEQ ID NO: 97711 - DNA, 15 bp, Homo sapiens
agggctttaacgcta

SEQ ID NO: 97712 - DNA, 15 bp, Homo sapiens
cagggctttaacgct

SEQ ID NO: 97713 - DNA, 15 bp, Homo sapiens
ccagggctttaacgc

SEQ ID NO: 97714 - DNA, 15 bp, Homo sapiens
cccagggctttaacg

SEQ ID NO: 97715 - DNA, 15 bp, Homo sapiens
ccccagggctttaac

SEQ ID NO: 97716 - DNA, 15 bp, Homo sapiens
accccagggctttaa

SEQ ID NO: 97717 - DNA, 15 bp, Homo sapiens
taccccagggcttta

SEQ ID NO: 97718 - DNA, 15 bp, Homo sapiens
ctaccccagggcttt

SEQ ID NO: 97719 - DNA, 15 bp, Homo sapiens
actaccccagggctt

SEQ ID NO: 97720 - DNA, 15 bp, Homo sapiens
cactaccccagggct

SEQ ID NO: 97721 - DNA, 15 bp, Homo sapiens
acactaccccagggc

SEQ ID NO: 97722 - DNA, 15 bp, Homo sapiens
cacactaccccaggg

SEQ ID NO: 97723 - DNA, 15 bp, Homo sapiens
tcacactaccccagg

SEQ ID NO: 97724 - DNA, 15 bp, Homo sapiens
gtcacactaccccag

SEQ ID NO: 97725 - DNA, 15 bp, Homo sapiens
agtcacactacccca

SEQ ID NO: 97726 - DNA, 15 bp, Homo sapiens
cagtcacactacccc

SEQ ID NO: 97727 - DNA, 15 bp, Homo sapiens
tcagtcacactaccc

SEQ ID NO: 97728 - DNA, 15 bp, Homo sapiens
ctcagtcacactacc

SEQ ID NO: 97729 - DNA, 15 bp, Homo sapiens
tctcagtcacactac

SEQ ID NO: 97730 - DNA, 15 bp, Homo sapiens
atctcagtcacacta

SEQ ID NO: 97731 - DNA, 15 bp, Homo sapiens
aatctcagtcacact

SEQ ID NO: 97732 - DNA, 15 bp, Homo sapiens
caatctcagtcacac

SEQ ID NO: 97733 - DNA, 15 bp, Homo sapiens
acaatctcagtcaca

SEQ ID NO: 97734 - DNA, 15 bp, Homo sapiens
aacaatctcagtcac

SEQ ID NO: 97735 - DNA, 15 bp, Homo sapiens
caacaatctcagtca

SEQ ID NO: 97736 - DNA, 15 bp, Homo sapiens
ccaacaatctcagtc

SEQ ID NO: 97737 - DNA, 15 bp, Homo sapiens
accaacaatctcagt

SEQ ID NO: 97738 - DNA, 15 bp, Homo sapiens
taccaacaatctcag

SEQ ID NO: 97739 - DNA, 15 bp, Homo sapiens
ttaccaacaatctca

SEQ ID NO: 97740 - DNA, 15 bp, Homo sapiens
tttaccaacaatctc

SEQ ID NO: 97741 - DNA, 15 bp, Homo sapiens
ctttaccaacaatct

SEQ ID NO: 97742 - DNA, 15 bp, Homo sapiens
tctttaccaacaatc

SEQ ID NO: 97743 - DNA, 15 bp, Homo sapiens
ttctttaccaacaat

SEQ ID NO: 97744 - DNA, 15 bp, Homo sapiens
attctttaccaacaa

SEQ ID NO: 97745 - DNA, 15 bp, Homo sapiens
cattctttaccaaca

SEQ ID NO: 97746 - DNA, 15 bp, Homo sapiens
acattctttaccaac

SEQ ID NO: 97747 - DNA, 15 bp, Homo sapiens
cacattctttaccaa

SEQ ID NO: 97748 - DNA, 15 bp, Homo sapiens
gcacattctttacca

SEQ ID NO: 97749 - DNA, 15 bp, Homo sapiens
tgcacattctttacc

SEQ ID NO: 97750 - DNA, 15 bp, Homo sapiens
ctgcacattctttac

SEQ ID NO: 97751 - DNA, 15 bp, Homo sapiens
actgcacattcttta

SEQ ID NO: 97752 - DNA, 15 bp, Homo sapiens
cactgcacattcttt

SEQ ID NO: 97753 - DNA, 15 bp, Homo sapiens
ccactgcacattctt

SEQ ID NO: 97754 - DNA, 15 bp, Homo sapiens
accactgcacattct

SEQ ID NO: 97755 - DNA, 15 bp, Homo sapiens
aaccactgcacattc

SEQ ID NO: 97756 - DNA, 15 bp, Homo sapiens
caaccactgcacatt

SEQ ID NO: 97757 - DNA, 15 bp, Homo sapiens
ccaaccactgcacat

SEQ ID NO: 97758 - DNA, 15 bp, Homo sapiens
gccaaccactgcaca

SEQ ID NO: 97759 - DNA, 15 bp, Homo sapiens
tgccaaccactgcac

SEQ ID NO: 97760 - DNA, 15 bp, Homo sapiens
atgccaaccactgca

SEQ ID NO: 97761 - DNA, 15 bp, Homo sapiens
catgccaaccactgc

SEQ ID NO: 97762 - DNA, 15 bp, Homo sapiens
tcatgccaaccactg

SEQ ID NO: 97763 - DNA, 15 bp, Homo sapiens
gtcatgccaaccact

SEQ ID NO: 97764 - DNA, 15 bp, Homo sapiens
ggtcatgccaaccac

SEQ ID NO: 97765 - DNA, 15 bp, Homo sapiens
aggtcatgccaacca

SEQ ID NO: 97766 - DNA, 15 bp, Homo sapiens
gaggtcatgccaacc

SEQ ID NO: 97767 - DNA, 15 bp, Homo sapiens
tgaggtcatgccaac

SEQ ID NO: 97768 - DNA, 15 bp, Homo sapiens
ctgaggtcatgccaa

SEQ ID NO: 97769 - DNA, 15 bp, Homo sapiens
tctgaggtcatgcca

SEQ ID NO: 97770 - DNA, 15 bp, Homo sapiens
ttctgaggtcatgcc

SEQ ID NO: 97771 - DNA, 15 bp, Homo sapiens
tttctgaggtcatgc

SEQ ID NO: 97772 - DNA, 15 bp, Homo sapiens
atttctgaggtcatg

SEQ ID NO: 97773 - DNA, 15 bp, Homo sapiens
aatttctgaggtcat

SEQ ID NO: 97774 - DNA, 15 bp, Homo sapiens
gaatttctgaggtca

SEQ ID NO: 97775 - DNA, 15 bp, Homo sapiens
agaatttctgaggtc

SEQ ID NO: 97776 - DNA, 15 bp, Homo sapiens
cagaatttctgaggt

SEQ ID NO: 97777 - DNA, 15 bp, Homo sapiens
tcagaatttctgagg

SEQ ID NO: 97778 - DNA, 15 bp, Homo sapiens
ttcagaatttctgag

SEQ ID NO: 97779 - DNA, 15 bp, Homo sapiens
tttcagaatttctga

SEQ ID NO: 97780 - DNA, 15 bp, Homo sapiens
atttcagaatttctg

SEQ ID NO: 97781 - DNA, 15 bp, Homo sapiens
catttcagaatttct

SEQ ID NO: 97782 - DNA, 15 bp, Homo sapiens
ccatttcagaatttc

SEQ ID NO: 97783 - DNA, 15 bp, Homo sapiens
cccatttcagaattt

SEQ ID NO: 97784 - DNA, 15 bp, Homo sapiens
tcccatttcagaatt

SEQ ID NO: 97785 - DNA, 15 bp, Homo sapiens
gtcccatttcagaat

SEQ ID NO: 97786 - DNA, 15 bp, Homo sapiens
agtcccatttcagaa

SEQ ID NO: 97787 - DNA, 15 bp, Homo sapiens
cagtcccatttcaga

SEQ ID NO: 97788 - DNA, 15 bp, Homo sapiens
gcagtcccatttcag

SEQ ID NO: 97789 - DNA, 15 bp, Homo sapiens
tgcagtcccatttca

SEQ ID NO: 97790 - DNA, 15 bp, Homo sapiens
gtgcagtcccatttc

SEQ ID NO: 97791 - DNA, 15 bp, Homo sapiens
ggtgcagtcccattt

SEQ ID NO: 97792 - DNA, 15 bp, Homo sapiens
aggtgcagtcccatt

SEQ ID NO: 97793 - DNA, 15 bp, Homo sapiens
caggtgcagtcccat

SEQ ID NO: 97794 - DNA, 15 bp, Homo sapiens
gcaggtgcagtccca

SEQ ID NO: 97795 - DNA, 15 bp, Homo sapiens
tgcaggtgcagtccc

SEQ ID NO: 97796 - DNA, 15 bp, Homo sapiens
ctgcaggtgcagtcc

SEQ ID NO: 97797 - DNA, 15 bp, Homo sapiens
tctgcaggtgcagtc

SEQ ID NO: 97798 - DNA, 15 bp, Homo sapiens
gtctgcaggtgcagt

SEQ ID NO: 97799 - DNA, 15 bp, Homo sapiens
agtctgcaggtgcag

SEQ ID NO: 97800 - DNA, 15 bp, Homo sapiens
cagtctgcaggtgca

SEQ ID NO: 97801 - DNA, 15 bp, Homo sapiens
tcagtctgcaggtgc

SEQ ID NO: 97802 - DNA, 15 bp, Homo sapiens
ttcagtctgcaggtg

SEQ ID NO: 97803 - DNA, 15 bp, Homo sapiens
cttcagtctgcaggt

SEQ ID NO: 97804 - DNA, 15 bp, Homo sapiens
acttcagtctgcagg

SEQ ID NO: 97805 - DNA, 15 bp, Homo sapiens
cacttcagtctgcag

SEQ ID NO: 97806 - DNA, 15 bp, Homo sapiens
acacttcagtctgca

SEQ ID NO: 97807 - DNA, 15 bp, Homo sapiens
aacacttcagtctgc

SEQ ID NO: 97808 - DNA, 15 bp, Homo sapiens
gaacacttcagtctg

SEQ ID NO: 97809 - DNA, 15 bp, Homo sapiens
tgaacacttcagtct

SEQ ID NO: 97810 - DNA, 15 bp, Homo sapiens
ctgaacacttcagtc

SEQ ID NO: 97811 - DNA, 15 bp, Homo sapiens
tctgaacacttcagt

SEQ ID NO: 97812 - DNA, 15 bp, Homo sapiens
ctctgaacacttcag

SEQ ID NO: 97813 - DNA, 15 bp, Homo sapiens
tctctgaacacttca

SEQ ID NO: 97814 - DNA, 15 bp, Homo sapiens
ctctctgaacacttc

SEQ ID NO: 97815 - DNA, 15 bp, Homo sapiens
gctctctgaacactt

SEQ ID NO: 97816 - DNA, 15 bp, Homo sapiens
ggctctctgaacact

SEQ ID NO: 97817 - DNA, 15 bp, Homo sapiens
tggctctctgaacac

SEQ ID NO: 97818 - DNA, 15 bp, Homo sapiens
ctggctctctgaaca

SEQ ID NO: 97819 - DNA, 15 bp, Homo sapiens
cctggctctctgaac

SEQ ID NO: 97820 - DNA, 15 bp, Homo sapiens
ccctggctctctgaa

SEQ ID NO: 97821 - DNA, 15 bp, Homo sapiens
tccctggctctctga

SEQ ID NO: 97822 - DNA, 15 bp, Homo sapiens
ctccctggctctctg

SEQ ID NO: 97823 - DNA, 15 bp, Homo sapiens
cctccctggctctct

SEQ ID NO: 97824 - DNA, 15 bp, Homo sapiens
acctccctggctctc

SEQ ID NO: 97825 - DNA, 15 bp, Homo sapiens
cacctccctggctct

SEQ ID NO: 97826 - DNA, 15 bp, Homo sapiens
gcacctccctggctc

SEQ ID NO: 97827 - DNA, 15 bp, Homo sapiens
tgcacctccctggct

SEQ ID NO: 97828 - DNA, 15 bp, Homo sapiens
ttgcacctccctggc

SEQ ID NO: 97829 - DNA, 15 bp, Homo sapiens
cttgcacctccctgg

SEQ ID NO: 97830 - DNA, 15 bp, Homo sapiens
ccttgcacctccctg

SEQ ID NO: 97831 - DNA, 15 bp, Homo sapiens
tccttgcacctccct

SEQ ID NO: 97832 - DNA, 15 bp, Homo sapiens
gtccttgcacctccc

SEQ ID NO: 97833 - DNA, 15 bp, Homo sapiens
agtccttgcacctcc

SEQ ID NO: 97834 - DNA, 15 bp, Homo sapiens
cagtccttgcacctc

SEQ ID NO: 97835 - DNA, 15 bp, Homo sapiens
ccagtccttgcacct

SEQ ID NO: 97836 - DNA, 15 bp, Homo sapiens
cccagtccttgcacc

SEQ ID NO: 97837 - DNA, 15 bp, Homo sapiens
ccccagtccttgcac

SEQ ID NO: 97838 - DNA, 15 bp, Homo sapiens
tccccagtccttgca

SEQ ID NO: 97839 - DNA, 15 bp, Homo sapiens
ctccccagtccttgc

SEQ ID NO: 97840 - DNA, 15 bp, Homo sapiens
cctccccagtccttg

SEQ ID NO: 97841 - DNA, 15 bp, Homo sapiens
ccctccccagtcctt

SEQ ID NO: 97842 - DNA, 15 bp, Homo sapiens
accctccccagtcct

SEQ ID NO: 97843 - DNA, 15 bp, Homo sapiens
taccctccccagtcc

SEQ ID NO: 97844 - DNA, 15 bp, Homo sapiens
ctaccctccccagtc

SEQ ID NO: 97845 - DNA, 15 bp, Homo sapiens
tctaccctccccagt

SEQ ID NO: 97846 - DNA, 15 bp, Homo sapiens
ctctaccctccccag

SEQ ID NO: 97847 - DNA, 15 bp, Homo sapiens
cctctaccctcccca

SEQ ID NO: 97848 - DNA, 15 bp, Homo sapiens
gcctctaccctcccc

SEQ ID NO: 97849 - DNA, 15 bp, Homo sapiens
tgcctctaccctccc

SEQ ID NO: 97850 - DNA, 15 bp, Homo sapiens
ctgcctctaccctcc

SEQ ID NO: 97851 - DNA, 15 bp, Homo sapiens
cctgcctctaccctc

SEQ ID NO: 97852 - DNA, 15 bp, Homo sapiens
tcctgcctctaccct

SEQ ID NO: 97853 - DNA, 15 bp, Homo sapiens
ttcctgcctctaccc

SEQ ID NO: 97854 - DNA, 15 bp, Homo sapiens
gttcctgcctctacc

SEQ ID NO: 97855 - DNA, 15 bp, Homo sapiens
ggttcctgcctctac

SEQ ID NO: 97856 - DNA, 15 bp, Homo sapiens
gggttcctgcctcta

SEQ ID NO: 97857 - DNA, 15 bp, Homo sapiens
agggttcctgcctct

SEQ ID NO: 97858 - DNA, 15 bp, Homo sapiens
cagggttcctgcctc

SEQ ID NO: 97859 - DNA, 15 bp, Homo sapiens
gcagggttcctgcct

SEQ ID NO: 97860 - DNA, 15 bp, Homo sapiens
ggcagggttcctgcc

SEQ ID NO: 97861 - DNA, 15 bp, Homo sapiens
aggcagggttcctgc

SEQ ID NO: 97862 - DNA, 15 bp, Homo sapiens
caggcagggttcctg

SEQ ID NO: 97863 - DNA, 15 bp, Homo sapiens
gcaggcagggttcct

SEQ ID NO: 97864 - DNA, 15 bp, Homo sapiens
ggcaggcagggttcc

SEQ ID NO: 97865 - DNA, 15 bp, Homo sapiens
tggcaggcagggttc

SEQ ID NO: 97866 - DNA, 15 bp, Homo sapiens
ctggcaggcagggtt

SEQ ID NO: 97867 - DNA, 15 bp, Homo sapiens
cctggcaggcagggt

SEQ ID NO: 97868 - DNA, 15 bp, Homo sapiens
tcctggcaggcaggg

SEQ ID NO: 97869 - DNA, 15 bp, Homo sapiens
ttcctggcaggcagg

SEQ ID NO: 97870 - DNA, 15 bp, Homo sapiens
cttcctggcaggcag

SEQ ID NO: 97871 - DNA, 15 bp, Homo sapiens
tcttcctggcaggca

SEQ ID NO: 97872 - DNA, 15 bp, Homo sapiens
ctcttcctggcaggc

SEQ ID NO: 97873 - DNA, 15 bp, Homo sapiens
gctcttcctggcagg

SEQ ID NO: 97874 - DNA, 15 bp, Homo sapiens
agctcttcctggcag

SEQ ID NO: 97875 - DNA, 15 bp, Homo sapiens
tagctcttcctggca

SEQ ID NO: 97876 - DNA, 15 bp, Homo sapiens
ctagctcttcctggc

SEQ ID NO: 97877 - DNA, 15 bp, Homo sapiens
gctagctcttcctgg

SEQ ID NO: 97878 - DNA, 15 bp, Homo sapiens
tgctagctcttcctg

SEQ ID NO: 97879 - DNA, 15 bp, Homo sapiens
atgctagctcttcct

SEQ ID NO: 97880 - DNA, 15 bp, Homo sapiens
gatgctagctcttcc

SEQ ID NO: 97881 - DNA, 15 bp, Homo sapiens
ggatgctagctcttc

SEQ ID NO: 97882 - DNA, 15 bp, Homo sapiens
aggatgctagctctt

SEQ ID NO: 97883 - DNA, 15 bp, Homo sapiens
caggatgctagctct

SEQ ID NO: 97884 - DNA, 15 bp, Homo sapiens
ccaggatgctagctc

SEQ ID NO: 97885 - DNA, 15 bp, Homo sapiens
cccaggatgctagct

SEQ ID NO: 97886 - DNA, 15 bp, Homo sapiens
ccccaggatgctagc

SEQ ID NO: 97887 - DNA, 15 bp, Homo sapiens
cccccaggatgctag

SEQ ID NO: 97888 - DNA, 15 bp, Homo sapiens
gcccccaggatgcta

SEQ ID NO: 97889 - DNA, 15 bp, Homo sapiens
tgcccccaggatgct

SEQ ID NO: 97890 - DNA, 15 bp, Homo sapiens
ctgcccccaggatgc

SEQ ID NO: 97891 - DNA, 15 bp, Homo sapiens
tctgcccccaggatg

SEQ ID NO: 97892 - DNA, 15 bp, Homo sapiens
ttctgcccccaggat

SEQ ID NO: 97893 - DNA, 15 bp, Homo sapiens
tttctgcccccagga

SEQ ID NO: 97894 - DNA, 15 bp, Homo sapiens
ctttctgcccccagg

SEQ ID NO: 97895 - DNA, 15 bp, Homo sapiens
cctttctgcccccag

SEQ ID NO: 97896 - DNA, 15 bp, Homo sapiens
gcctttctgccccca

SEQ ID NO: 97897 - DNA, 15 bp, Homo sapiens
agcctttctgccccc

SEQ ID NO: 97898 - DNA, 15 bp, Homo sapiens
cagcctttctgcccc

SEQ ID NO: 97899 - DNA, 15 bp, Homo sapiens
acagcctttctgccc

SEQ ID NO: 97900 - DNA, 15 bp, Homo sapiens
cacagcctttctgcc

SEQ ID NO: 97901 - DNA, 15 bp, Homo sapiens
gcacagcctttctgc

SEQ ID NO: 97902 - DNA, 15 bp, Homo sapiens
agcacagcctttctg

SEQ ID NO: 97903 - DNA, 15 bp, Homo sapiens
aagcacagcctttct

SEQ ID NO: 97904 - DNA, 15 bp, Homo sapiens
aaagcacagcctttc

SEQ ID NO: 97905 - DNA, 15 bp, Homo sapiens
gaaagcacagccttt

SEQ ID NO: 97906 - DNA, 15 bp, Homo sapiens
tgaaagcacagcctt

SEQ ID NO: 97907 - DNA, 15 bp, Homo sapiens
ttgaaagcacagcct

SEQ ID NO: 97908 - DNA, 15 bp, Homo sapiens
cttgaaagcacagcc

SEQ ID NO: 97909 - DNA, 15 bp, Homo sapiens
acttgaaagcacagc

SEQ ID NO: 97910 - DNA, 15 bp, Homo sapiens
tacttgaaagcacag

SEQ ID NO: 97911 - DNA, 15 bp, Homo sapiens
ctacttgaaagcaca

SEQ ID NO: 97912 - DNA, 15 bp, Homo sapiens
gctacttgaaagcac

SEQ ID NO: 97913 - DNA, 15 bp, Homo sapiens
tgctacttgaaagca

SEQ ID NO: 97914 - DNA, 15 bp, Homo sapiens
ctgctacttgaaagc

SEQ ID NO: 97915 - DNA, 15 bp, Homo sapiens
gctgctacttgaaag

SEQ ID NO: 97916 - DNA, 15 bp, Homo sapiens
tgctgctacttgaaa

SEQ ID NO: 97917 - DNA, 15 bp, Homo sapiens
ctgctgctacttgaa

SEQ ID NO: 97918 - DNA, 15 bp, Homo sapiens
tctgctgctacttga

SEQ ID NO: 97919 - DNA, 15 bp, Homo sapiens
atctgctgctacttg

SEQ ID NO: 97920 - DNA, 15 bp, Homo sapiens
catctgctgctactt

SEQ ID NO: 97921 - DNA, 15 bp, Homo sapiens
acatctgctgctact

SEQ ID NO: 97922 - DNA, 15 bp, Homo sapiens
tacatctgctgctac

SEQ ID NO: 97923 - DNA, 15 bp, Homo sapiens
atacatctgctgcta

SEQ ID NO: 97924 - DNA, 15 bp, Homo sapiens
aatacatctgctgct

SEQ ID NO: 97925 - DNA, 15 bp, Homo sapiens
caatacatctgctgc

SEQ ID NO: 97926 - DNA, 15 bp, Homo sapiens
ccaatacatctgctg

SEQ ID NO: 97927 - DNA, 15 bp, Homo sapiens
accaatacatctgct

SEQ ID NO: 97928 - DNA, 15 bp, Homo sapiens
taccaatacatctgc

SEQ ID NO: 97929 - DNA, 15 bp, Homo sapiens
ataccaatacatctg

SEQ ID NO: 97930 - DNA, 15 bp, Homo sapiens
gataccaatacatct

SEQ ID NO: 97931 - DNA, 15 bp, Homo sapiens
agataccaatacatc

SEQ ID NO: 97932 - DNA, 15 bp, Homo sapiens
aagataccaatacat

SEQ ID NO: 97933 - DNA, 15 bp, Homo sapiens
aaagataccaataca

SEQ ID NO: 97934 - DNA, 15 bp, Homo sapiens
caaagataccaatac

SEQ ID NO: 97935 - DNA, 15 bp, Homo sapiens
acaaagataccaata

SEQ ID NO: 97936 - DNA, 15 bp, Homo sapiens
tacaaagataccaat

SEQ ID NO: 97937 - DNA, 15 bp, Homo sapiens
ttacaaagataccaa

SEQ ID NO: 97938 - DNA, 15 bp, Homo sapiens
attacaaagatacca

SEQ ID NO: 97939 - DNA, 15 bp, Homo sapiens
cattacaaagatacc

SEQ ID NO: 97940 - DNA, 15 bp, Homo sapiens
ccattacaaagatac

SEQ ID NO: 97941 - DNA, 15 bp, Homo sapiens
tccattacaaagata

SEQ ID NO: 97942 - DNA, 15 bp, Homo sapiens
ctccattacaaagat

SEQ ID NO: 97943 - DNA, 15 bp, Homo sapiens
tctccattacaaaga

SEQ ID NO: 97944 - DNA, 15 bp, Homo sapiens
ttctccattacaaag

SEQ ID NO: 97945 - DNA, 15 bp, Homo sapiens
cttctccattacaaa

SEQ ID NO: 97946 - DNA, 15 bp, Homo sapiens
gcttctccattacaa

SEQ ID NO: 97947 - DNA, 15 bp, Homo sapiens
tgcttctccattaca

SEQ ID NO: 97948 - DNA, 15 bp, Homo sapiens
atgcttctccattac

SEQ ID NO: 97949 - DNA, 15 bp, Homo sapiens
tatgcttctccatta

SEQ ID NO: 97950 - DNA, 15 bp, Homo sapiens
gtatgcttctccatt

SEQ ID NO: 97951 - DNA, 15 bp, Homo sapiens
agtatgcttctccat

SEQ ID NO: 97952 - DNA, 15 bp, Homo sapiens
aagtatgcttctcca

SEQ ID NO: 97953 - DNA, 15 bp, Homo sapiens
aaagtatgcttctcc

SEQ ID NO: 97954 - DNA, 15 bp, Homo sapiens
taaagtatgcttctc

SEQ ID NO: 97955 - DNA, 15 bp, Homo sapiens
gtaaagtatgcttct

SEQ ID NO: 97956 - DNA, 15 bp, Homo sapiens
tgtaaagtatgcttc

SEQ ID NO: 97957 - DNA, 15 bp, Homo sapiens
ctgtaaagtatgctt

SEQ ID NO: 97958 - DNA, 15 bp, Homo sapiens
cctgtaaagtatgct

SEQ ID NO: 97959 - DNA, 15 bp, Homo sapiens
tcctgtaaagtatgc

SEQ ID NO: 97960 - DNA, 15 bp, Homo sapiens
ttcctgtaaagtatg

SEQ ID NO: 97961 - DNA, 15 bp, Homo sapiens
gttcctgtaaagtat

SEQ ID NO: 97962 - DNA, 15 bp, Homo sapiens
tgttcctgtaaagta

SEQ ID NO: 97963 - DNA, 15 bp, Homo sapiens
atgttcctgtaaagt

SEQ ID NO: 97964 - DNA, 15 bp, Homo sapiens
aatgttcctgtaaag

SEQ ID NO: 97965 - DNA, 15 bp, Homo sapiens
taatgttcctgtaaa

SEQ ID NO: 97966 - DNA, 15 bp, Homo sapiens
ctaatgttcctgtaa

SEQ ID NO: 97967 - DNA, 15 bp, Homo sapiens
cctaatgttcctgta

SEQ ID NO: 97968 - DNA, 15 bp, Homo sapiens
gcctaatgttcctgt

SEQ ID NO: 97969 - DNA, 15 bp, Homo sapiens
ggcctaatgttcctg

SEQ ID NO: 97970 - DNA, 15 bp, Homo sapiens
tggcctaatgttcct

SEQ ID NO: 97971 - DNA, 15 bp, Homo sapiens
ctggcctaatgttcc

SEQ ID NO: 97972 - DNA, 15 bp, Homo sapiens
tctggcctaatgttc

SEQ ID NO: 97973 - DNA, 15 bp, Homo sapiens
atctggcctaatgtt

SEQ ID NO: 97974 - DNA, 15 bp, Homo sapiens
aatctggcctaatgt

SEQ ID NO: 97975 - DNA, 15 bp, Homo sapiens
caatctggcctaatg

SEQ ID NO: 97976 - DNA, 15 bp, Homo sapiens
acaatctggcctaat

SEQ ID NO: 97977 - DNA, 15 bp, Homo sapiens
gacaatctggcctaa

SEQ ID NO: 97978 - DNA, 15 bp, Homo sapiens
agacaatctggccta

SEQ ID NO: 97979 - DNA, 15 bp, Homo sapiens
tagacaatctggcct

SEQ ID NO: 97980 - DNA, 15 bp, Homo sapiens
ttagacaatctggcc

SEQ ID NO: 97981 - DNA, 15 bp, Homo sapiens
gttagacaatctggc

SEQ ID NO: 97982 - DNA, 15 bp, Homo sapiens
ggttagacaatctgg

SEQ ID NO: 97983 - DNA, 15 bp, Homo sapiens
tggttagacaatctg

SEQ ID NO: 97984 - DNA, 15 bp, Homo sapiens
ctggttagacaatct

SEQ ID NO: 97985 - DNA, 15 bp, Homo sapiens
tctggttagacaatc

SEQ ID NO: 97986 - DNA, 15 bp, Homo sapiens
ctctggttagacaat

SEQ ID NO: 97987 - DNA, 15 bp, Homo sapiens
actctggttagacaa

SEQ ID NO: 97988 - DNA, 15 bp, Homo sapiens
tactctggttagaca

SEQ ID NO: 97989 - DNA, 15 bp, Homo sapiens
atactctggttagac

SEQ ID NO: 97990 - DNA, 15 bp, Homo sapiens
gatactctggttaga

SEQ ID NO: 97991 - DNA, 15 bp, Homo sapiens
agatactctggttag

SEQ ID NO: 97992 - DNA, 15 bp, Homo sapiens
gagatactctggtta

SEQ ID NO: 97993 - DNA, 15 bp, Homo sapiens
agagatactctggtt

SEQ ID NO: 97994 - DNA, 15 bp, Homo sapiens
tagagatactctggt

SEQ ID NO: 97995 - DNA, 15 bp, Homo sapiens
gtagagatactctgg

SEQ ID NO: 97996 - DNA, 15 bp, Homo sapiens
ggtagagatactctg

SEQ ID NO: 97997 - DNA, 15 bp, Homo sapiens
aggtagagatactct

SEQ ID NO: 97998 - DNA, 15 bp, Homo sapiens
caggtagagatactc

SEQ ID NO: 97999 - DNA, 15 bp, Homo sapiens
gcaggtagagatact

SEQ ID NO: 98000 - DNA, 15 bp, Homo sapiens
agcaggtagagatac

SEQ ID NO: 98001 - DNA, 15 bp, Homo sapiens
aagcaggtagagata

SEQ ID NO: 98002 - DNA, 15 bp, Homo sapiens
taagcaggtagagat

SEQ ID NO: 98003 - DNA, 15 bp, Homo sapiens
ttaagcaggtagaga

SEQ ID NO: 98004 - DNA, 15 bp, Homo sapiens
tttaagcaggtagag

SEQ ID NO: 98005 - DNA, 15 bp, Homo sapiens
ttttaagcaggtaga

SEQ ID NO: 98006 - DNA, 15 bp, Homo sapiens
attttaagcaggtag

SEQ ID NO: 98007 - DNA, 15 bp, Homo sapiens
gattttaagcaggta

SEQ ID NO: 98008 - DNA, 15 bp, Homo sapiens
agattttaagcaggt

SEQ ID NO: 98009 - DNA, 15 bp, Homo sapiens
tagattttaagcagg

SEQ ID NO: 98010 - DNA, 15 bp, Homo sapiens
ttagattttaagcag

SEQ ID NO: 98011 - DNA, 15 bp, Homo sapiens
cttagattttaagca

SEQ ID NO: 98012 - DNA, 15 bp, Homo sapiens
acttagattttaagc

SEQ ID NO: 98013 - DNA, 15 bp, Homo sapiens
tacttagattttaag

SEQ ID NO: 98014 - DNA, 15 bp, Homo sapiens
ctacttagattttaa

SEQ ID NO: 98015 - DNA, 15 bp, Homo sapiens
actacttagatttta

SEQ ID NO: 98016 - DNA, 15 bp, Homo sapiens
aactacttagatttt

SEQ ID NO: 98017 - DNA, 15 bp, Homo sapiens
aaactacttagattt

SEQ ID NO: 98018 - DNA, 15 bp, Homo sapiens
aaaactacttagatt

SEQ ID NO: 98019 - DNA, 15 bp, Homo sapiens
gaaaactacttagat

SEQ ID NO: 98020 - DNA, 15 bp, Homo sapiens
agaaaactacttaga

SEQ ID NO: 98021 - DNA, 15 bp, Homo sapiens
aagaaaactacttag

SEQ ID NO: 98022 - DNA, 15 bp, Homo sapiens
caagaaaactactta

SEQ ID NO: 98023 - DNA, 15 bp, Homo sapiens
acaagaaaactactt

SEQ ID NO: 98024 - DNA, 15 bp, Homo sapiens
gacaagaaaactact

SEQ ID NO: 98025 - DNA, 15 bp, Homo sapiens
ggacaagaaaactac

SEQ ID NO: 98026 - DNA, 15 bp, Homo sapiens
aggacaagaaaacta

SEQ ID NO: 98027 - DNA, 15 bp, Homo sapiens
aaggacaagaaaact

SEQ ID NO: 98028 - DNA, 15 bp, Homo sapiens
aaaggacaagaaaac

SEQ ID NO: 98029 - DNA, 15 bp, Homo sapiens
caaaggacaagaaaa

SEQ ID NO: 98030 - DNA, 15 bp, Homo sapiens
gcaaaggacaagaaa

SEQ ID NO: 98031 - DNA, 15 bp, Homo sapiens
tgcaaaggacaagaa

SEQ ID NO: 98032 - DNA, 15 bp, Homo sapiens
ctgcaaaggacaaga

SEQ ID NO: 98033 - DNA, 15 bp, Homo sapiens
actgcaaaggacaag

SEQ ID NO: 98034 - DNA, 15 bp, Homo sapiens
tactgcaaaggacaa

SEQ ID NO: 98035 - DNA, 15 bp, Homo sapiens
atactgcaaaggaca

SEQ ID NO: 98036 - DNA, 15 bp, Homo sapiens
gatactgcaaaggac

SEQ ID NO: 98037 - DNA, 15 bp, Homo sapiens
agatactgcaaagga

SEQ ID NO: 98038 - DNA, 15 bp, Homo sapiens
aagatactgcaaagg

SEQ ID NO: 98039 - DNA, 15 bp, Homo sapiens
taagatactgcaaag

SEQ ID NO: 98040 - DNA, 15 bp, Homo sapiens
ataagatactgcaaa

SEQ ID NO: 98041 - DNA, 15 bp, Homo sapiens
gataagatactgcaa

SEQ ID NO: 98042 - DNA, 15 bp, Homo sapiens
tgataagatactgca

SEQ ID NO: 98043 - DNA, 15 bp, Homo sapiens
ttgataagatactgc

SEQ ID NO: 98044 - DNA, 15 bp, Homo sapiens
tttgataagatactg

SEQ ID NO: 98045 - DNA, 15 bp, Homo sapiens
gtttgataagatact

SEQ ID NO: 98046 - DNA, 15 bp, Homo sapiens
tgtttgataagatac

SEQ ID NO: 98047 - DNA, 15 bp, Homo sapiens
atgtttgataagata

SEQ ID NO: 98048 - DNA, 15 bp, Homo sapiens
gatgtttgataagat

SEQ ID NO: 98049 - DNA, 15 bp, Homo sapiens
ggatgtttgataaga

SEQ ID NO: 98050 - DNA, 15 bp, Homo sapiens
tggatgtttgataag

SEQ ID NO: 98051 - DNA, 15 bp, Homo sapiens
atggatgtttgataa

SEQ ID NO: 98052 - DNA, 15 bp, Homo sapiens
catggatgtttgata

SEQ ID NO: 98053 - DNA, 15 bp, Homo sapiens
tcatggatgtttgat

SEQ ID NO: 98054 - DNA, 15 bp, Homo sapiens
ttcatggatgtttga

SEQ ID NO: 98055 - DNA, 15 bp, Homo sapiens
cttcatggatgtttg

SEQ ID NO: 98056 - DNA, 15 bp, Homo sapiens
acttcatggatgttt

SEQ ID NO: 98057 - DNA, 15 bp, Homo sapiens
tacttcatggatgtt

SEQ ID NO: 98058 - DNA, 15 bp, Homo sapiens
gtacttcatggatgt

SEQ ID NO: 98059 - DNA, 15 bp, Homo sapiens
tgtacttcatggatg

SEQ ID NO: 98060 - DNA, 15 bp, Homo sapiens
atgtacttcatggat

SEQ ID NO: 98061 - DNA, 15 bp, Homo sapiens
gatgtacttcatgga

SEQ ID NO: 98062 - DNA, 15 bp, Homo sapiens
tgatgtacttcatgg

SEQ ID NO: 98063 - DNA, 15 bp, Homo sapiens
ctgatgtacttcatg

SEQ ID NO: 98064 - DNA, 15 bp, Homo sapiens
tctgatgtacttcat

SEQ ID NO: 98065 - DNA, 15 bp, Homo sapiens
ttctgatgtacttca

SEQ ID NO: 98066 - DNA, 15 bp, Homo sapiens
gttctgatgtacttc

SEQ ID NO: 98067 - DNA, 15 bp, Homo sapiens
tgttctgatgtactt

SEQ ID NO: 98068 - DNA, 15 bp, Homo sapiens
atgttctgatgtact

SEQ ID NO: 98069 - DNA, 15 bp, Homo sapiens
catgttctgatgtac

SEQ ID NO: 98070 - DNA, 15 bp, Homo sapiens
ccatgttctgatgta

SEQ ID NO: 98071 - DNA, 15 bp, Homo sapiens
cccatgttctgatgt

SEQ ID NO: 98072 - DNA, 15 bp, Homo sapiens
gcccatgttctgatg

SEQ ID NO: 98073 - DNA, 15 bp, Homo sapiens
agcccatgttctgat

SEQ ID NO: 98074 - DNA, 15 bp, Homo sapiens
tagcccatgttctga

SEQ ID NO: 98075 - DNA, 15 bp, Homo sapiens
gtagcccatgttctg

SEQ ID NO: 98076 - DNA, 15 bp, Homo sapiens
agtagcccatgttct

SEQ ID NO: 98077 - DNA, 15 bp, Homo sapiens
cagtagcccatgttc

SEQ ID NO: 98078 - DNA, 15 bp, Homo sapiens
gcagtagcccatgtt

SEQ ID NO: 98079 - DNA, 15 bp, Homo sapiens
ggcagtagcccatgt

SEQ ID NO: 98080 - DNA, 15 bp, Homo sapiens
gggcagtagcccatg

SEQ ID NO: 98081 - DNA, 15 bp, Homo sapiens
agggcagtagcccat

SEQ ID NO: 98082 - DNA, 15 bp, Homo sapiens
gagggcagtagccca

SEQ ID NO: 98083 - DNA, 15 bp, Homo sapiens
tgagggcagtagccc

SEQ ID NO: 98084 - DNA, 15 bp, Homo sapiens
ctgagggcagtagcc

SEQ ID NO: 98085 - DNA, 15 bp, Homo sapiens
actgagggcagtagc

SEQ ID NO: 98086 - DNA, 15 bp, Homo sapiens
aactgagggcagtag

SEQ ID NO: 98087 - DNA, 15 bp, Homo sapiens
aaactgagggcagta

SEQ ID NO: 98088 - DNA, 15 bp, Homo sapiens
caaactgagggcagt

SEQ ID NO: 98089 - DNA, 15 bp, Homo sapiens
tcaaactgagggcag

SEQ ID NO: 98090 - DNA, 15 bp, Homo sapiens
atcaaactgagggca

SEQ ID NO: 98091 - DNA, 15 bp, Homo sapiens
catcaaactgagggc

SEQ ID NO: 98092 - DNA, 15 bp, Homo sapiens
gcatcaaactgaggg

SEQ ID NO: 98093 - DNA, 15 bp, Homo sapiens
ggcatcaaactgagg

SEQ ID NO: 98094 - DNA, 15 bp, Homo sapiens
tggcatcaaactgag

SEQ ID NO: 98095 - DNA, 15 bp, Homo sapiens
atggcatcaaactga

SEQ ID NO: 98096 - DNA, 15 bp, Homo sapiens
gatggcatcaaactg

SEQ ID NO: 98097 - DNA, 15 bp, Homo sapiens
tgatggcatcaaact

SEQ ID NO: 98098 - DNA, 15 bp, Homo sapiens
gtgatggcatcaaac

SEQ ID NO: 98099 - DNA, 15 bp, Homo sapiens
tgtgatggcatcaaa

SEQ ID NO: 98100 - DNA, 15 bp, Homo sapiens
ctgtgatggcatcaa

SEQ ID NO: 98101 - DNA, 15 bp, Homo sapiens
tctgtgatggcatca

SEQ ID NO: 98102 - DNA, 15 bp, Homo sapiens
ctctgtgatggcatc

SEQ ID NO: 98103 - DNA, 15 bp, Homo sapiens
gctctgtgatggcat

SEQ ID NO: 98104 - DNA, 15 bp, Homo sapiens
agctctgtgatggca

SEQ ID NO: 98105 - DNA, 15 bp, Homo sapiens
cagctctgtgatggc

SEQ ID NO: 98106 - DNA, 15 bp, Homo sapiens
acagctctgtgatgg

SEQ ID NO: 98107 - DNA, 15 bp, Homo sapiens
aacagctctgtgatg

SEQ ID NO: 98108 - DNA, 15 bp, Homo sapiens
caacagctctgtgat

SEQ ID NO: 98109 - DNA, 15 bp, Homo sapiens
tcaacagctctgtga

SEQ ID NO: 98110 - DNA, 15 bp, Homo sapiens
gtcaacagctctgtg

SEQ ID NO: 98111 - DNA, 15 bp, Homo sapiens
agtcaacagctctgt

SEQ ID NO: 98112 - DNA, 15 bp, Homo sapiens
cagtcaacagctctg

SEQ ID NO: 98113 - DNA, 15 bp, Homo sapiens
ccagtcaacagctct

SEQ ID NO: 98114 - DNA, 15 bp, Homo sapiens
cccagtcaacagctc

SEQ ID NO: 98115 - DNA, 15 bp, Homo sapiens
tcccagtcaacagct

SEQ ID NO: 98116 - DNA, 15 bp, Homo sapiens
ctcccagtcaacagc

SEQ ID NO: 98117 - DNA, 15 bp, Homo sapiens
tctcccagtcaacag

SEQ ID NO: 98118 - DNA, 15 bp, Homo sapiens
ctctcccagtcaaca

SEQ ID NO: 98119 - DNA, 15 bp, Homo sapiens
tctctcccagtcaac

SEQ ID NO: 98120 - DNA, 15 bp, Homo sapiens
ttctctcccagtcaa

SEQ ID NO: 98121 - DNA, 15 bp, Homo sapiens
gttctctcccagtca

SEQ ID NO: 98122 - DNA, 15 bp, Homo sapiens
tgttctctcccagtc

SEQ ID NO: 98123 - DNA, 15 bp, Homo sapiens
gtgttctctcccagt

SEQ ID NO: 98124 - DNA, 15 bp, Homo sapiens
cgtgttctctcccag

SEQ ID NO: 98125 - DNA, 15 bp, Homo sapiens
acgtgttctctccca

SEQ ID NO: 98126 - DNA, 15 bp, Homo sapiens
cacgtgttctctccc

SEQ ID NO: 98127 - DNA, 15 bp, Homo sapiens
ccacgtgttctctcc

SEQ ID NO: 98128 - DNA, 15 bp, Homo sapiens
tccacgtgttctctc

SEQ ID NO: 98129 - DNA, 15 bp, Homo sapiens
ctccacgtgttctct

SEQ ID NO: 98130 - DNA, 15 bp, Homo sapiens
actccacgtgttctc

SEQ ID NO: 98131 - DNA, 15 bp, Homo sapiens
aactccacgtgttct

SEQ ID NO: 98132 - DNA, 15 bp, Homo sapiens
gaactccacgtgttc

SEQ ID NO: 98133 - DNA, 15 bp, Homo sapiens
agaactccacgtgtt

SEQ ID NO: 98134 - DNA, 15 bp, Homo sapiens
aagaactccacgtgt

SEQ ID NO: 98135 - DNA, 15 bp, Homo sapiens
aaagaactccacgtg

SEQ ID NO: 98136 - DNA, 15 bp, Homo sapiens
caaagaactccacgt

SEQ ID NO: 98137 - DNA, 15 bp, Homo sapiens
gcaaagaactccacg

SEQ ID NO: 98138 - DNA, 15 bp, Homo sapiens
ggcaaagaactccac

SEQ ID NO: 98139 - DNA, 15 bp, Homo sapiens
gggcaaagaactcca

SEQ ID NO: 98140 - DNA, 15 bp, Homo sapiens
agggcaaagaactcc

SEQ ID NO: 98141 - DNA, 15 bp, Homo sapiens
aagggcaaagaactc

SEQ ID NO: 98142 - DNA, 15 bp, Homo sapiens
aaagggcaaagaact

SEQ ID NO: 98143 - DNA, 15 bp, Homo sapiens
aaaagggcaaagaac

SEQ ID NO: 98144 - DNA, 15 bp, Homo sapiens
caaaagggcaaagaa

SEQ ID NO: 98145 - DNA, 15 bp, Homo sapiens
tcaaaagggcaaaga

SEQ ID NO: 98146 - DNA, 15 bp, Homo sapiens
ctcaaaagggcaaag

SEQ ID NO: 98147 - DNA, 15 bp, Homo sapiens
tctcaaaagggcaaa

SEQ ID NO: 98148 - DNA, 15 bp, Homo sapiens
ctctcaaaagggcaa

SEQ ID NO: 98149 - DNA, 15 bp, Homo sapiens
cctctcaaaagggca

SEQ ID NO: 98150 - DNA, 15 bp, Homo sapiens
tcctctcaaaagggc

SEQ ID NO: 98151 - DNA, 15 bp, Homo sapiens
ctcctctcaaaaggg

SEQ ID NO: 98152 - DNA, 15 bp, Homo sapiens
actcctctcaaaagg

SEQ ID NO: 98153 - DNA, 15 bp, Homo sapiens
gactcctctcaaaag

SEQ ID NO: 98154 - DNA, 15 bp, Homo sapiens
ggactcctctcaaaa

SEQ ID NO: 98155 - DNA, 15 bp, Homo sapiens
gggactcctctcaaa

SEQ ID NO: 98156 - DNA, 15 bp, Homo sapiens
tgggactcctctcaa

SEQ ID NO: 98157 - DNA, 15 bp, Homo sapiens
ctgggactcctctca

SEQ ID NO: 98158 - DNA, 15 bp, Homo sapiens
tctgggactcctctc

SEQ ID NO: 98159 - DNA, 15 bp, Homo sapiens
ctctgggactcctct

SEQ ID NO: 98160 - DNA, 15 bp, Homo sapiens
tctctgggactcctc

SEQ ID NO: 98161 - DNA, 15 bp, Homo sapiens
ttctctgggactcct

SEQ ID NO: 98162 - DNA, 15 bp, Homo sapiens
tttctctgggactcc

SEQ ID NO: 98163 - DNA, 15 bp, Homo sapiens
ctttctctgggactc

SEQ ID NO: 98164 - DNA, 15 bp, Homo sapiens
tctttctctgggact

SEQ ID NO: 98165 - DNA, 15 bp, Homo sapiens
ttctttctctgggac

SEQ ID NO: 98166 - DNA, 15 bp, Homo sapiens
cttctttctctggga

SEQ ID NO: 98167 - DNA, 15 bp, Homo sapiens
acttctttctctggg

SEQ ID NO: 98168 - DNA, 15 bp, Homo sapiens
aacttctttctctgg

SEQ ID NO: 98169 - DNA, 15 bp, Homo sapiens
caacttctttctctg

SEQ ID NO: 98170 - DNA, 15 bp, Homo sapiens
ccaacttctttctct

SEQ ID NO: 98171 - DNA, 15 bp, Homo sapiens
gccaacttctttctc

SEQ ID NO: 98172 - DNA, 15 bp, Homo sapiens
tgccaacttctttct

SEQ ID NO: 98173 - DNA, 15 bp, Homo sapiens
ttgccaacttctttc

SEQ ID NO: 98174 - DNA, 15 bp, Homo sapiens
cttgccaacttcttt

SEQ ID NO: 98175 - DNA, 15 bp, Homo sapiens
ccttgccaacttctt

SEQ ID NO: 98176 - DNA, 15 bp, Homo sapiens
accttgccaacttct

SEQ ID NO: 98177 - DNA, 15 bp, Homo sapiens
taccttgccaacttc

SEQ ID NO: 98178 - DNA, 15 bp, Homo sapiens
gtaccttgccaactt

SEQ ID NO: 98179 - DNA, 15 bp, Homo sapiens
agtaccttgccaact

SEQ ID NO: 98180 - DNA, 15 bp, Homo sapiens
cagtaccttgccaac

SEQ ID NO: 98181 - DNA, 15 bp, Homo sapiens
acagtaccttgccaa

SEQ ID NO: 98182 - DNA, 15 bp, Homo sapiens
cacagtaccttgcca

SEQ ID NO: 98183 - DNA, 15 bp, Homo sapiens
ccacagtaccttgcc

SEQ ID NO: 98184 - DNA, 15 bp, Homo sapiens
cccacagtaccttgc

SEQ ID NO: 98185 - DNA, 15 bp, Homo sapiens
gcccacagtaccttg

SEQ ID NO: 98186 - DNA, 15 bp, Homo sapiens
tgcccacagtacctt

SEQ ID NO: 98187 - DNA, 15 bp, Homo sapiens
gtgcccacagtacct

SEQ ID NO: 98188 - DNA, 15 bp, Homo sapiens
ggtgcccacagtacc

SEQ ID NO: 98189 - DNA, 15 bp, Homo sapiens
aggtgcccacagtac

SEQ ID NO: 98190 - DNA, 15 bp, Homo sapiens
caggtgcccacagta

SEQ ID NO: 98191 - DNA, 15 bp, Homo sapiens
tcaggtgcccacagt

SEQ ID NO: 98192 - DNA, 15 bp, Homo sapiens
ttcaggtgcccacag

SEQ ID NO: 98193 - DNA, 15 bp, Homo sapiens
tttcaggtgcccaca

SEQ ID NO: 98194 - DNA, 15 bp, Homo sapiens
ctttcaggtgcccac

SEQ ID NO: 98195 - DNA, 15 bp, Homo sapiens
gctttcaggtgccca

SEQ ID NO: 98196 - DNA, 15 bp, Homo sapiens
ggctttcaggtgccc

SEQ ID NO: 98197 - DNA, 15 bp, Homo sapiens
tggctttcaggtgcc

SEQ ID NO: 98198 - DNA, 15 bp, Homo sapiens
ctggctttcaggtgc

SEQ ID NO: 98199 - DNA, 15 bp, Homo sapiens
gctggctttcaggtg

SEQ ID NO: 98200 - DNA, 15 bp, Homo sapiens
ggctggctttcaggt

SEQ ID NO: 98201 - DNA, 15 bp, Homo sapiens
aggctggctttcagg

SEQ ID NO: 98202 - DNA, 15 bp, Homo sapiens
caggctggctttcag

SEQ ID NO: 98203 - DNA, 15 bp, Homo sapiens
acaggctggctttca

SEQ ID NO: 98204 - DNA, 15 bp, Homo sapiens
gacaggctggctttc

SEQ ID NO: 98205 - DNA, 15 bp, Homo sapiens
agacaggctggcttt

SEQ ID NO: 98206 - DNA, 15 bp, Homo sapiens
gagacaggctggctt

SEQ ID NO: 98207 - DNA, 15 bp, Homo sapiens
ggagacaggctggct

SEQ ID NO: 98208 - DNA, 15 bp, Homo sapiens
aggagacaggctggc

SEQ ID NO: 98209 - DNA, 15 bp, Homo sapiens
aaggagacaggctgg

SEQ ID NO: 98210 - DNA, 15 bp, Homo sapiens
aaaggagacaggctg

SEQ ID NO: 98211 - DNA, 15 bp, Homo sapiens
caaaggagacaggct

SEQ ID NO: 98212 - DNA, 15 bp, Homo sapiens
ccaaaggagacaggc

SEQ ID NO: 98213 - DNA, 15 bp, Homo sapiens
gccaaaggagacagg

SEQ ID NO: 98214 - DNA, 15 bp, Homo sapiens
tgccaaaggagacag

SEQ ID NO: 98215 - DNA, 15 bp, Homo sapiens
atgccaaaggagaca

SEQ ID NO: 98216 - DNA, 15 bp, Homo sapiens
gatgccaaaggagac

SEQ ID NO: 98217 - DNA, 15 bp, Homo sapiens
ggatgccaaaggaga

SEQ ID NO: 98218 - DNA, 15 bp, Homo sapiens
aggatgccaaaggag

SEQ ID NO: 98219 - DNA, 15 bp, Homo sapiens
caggatgccaaagga

SEQ ID NO: 98220 - DNA, 15 bp, Homo sapiens
tcaggatgccaaagg

SEQ ID NO: 98221 - DNA, 15 bp, Homo sapiens
gtcaggatgccaaag

SEQ ID NO: 98222 - DNA, 15 bp, Homo sapiens
tgtcaggatgccaaa

SEQ ID NO: 98223 - DNA, 15 bp, Homo sapiens
ttgtcaggatgccaa

SEQ ID NO: 98224 - DNA, 15 bp, Homo sapiens
attgtcaggatgcca

SEQ ID NO: 98225 - DNA, 15 bp, Homo sapiens
tattgtcaggatgcc

SEQ ID NO: 98226 - DNA, 15 bp, Homo sapiens
atattgtcaggatgc

SEQ ID NO: 98227 - DNA, 15 bp, Homo sapiens
tatattgtcaggatg

SEQ ID NO: 98228 - DNA, 15 bp, Homo sapiens
atatattgtcaggat

SEQ ID NO: 98229 - DNA, 15 bp, Homo sapiens
tatatattgtcagga

SEQ ID NO: 98230 - DNA, 15 bp, Homo sapiens
gtatatattgtcagg

SEQ ID NO: 98231 - DNA, 15 bp, Homo sapiens
ggtatatattgtcag

SEQ ID NO: 98232 - DNA, 15 bp, Homo sapiens
aggtatatattgtca

SEQ ID NO: 98233 - DNA, 15 bp, Homo sapiens
aaggtatatattgtc

SEQ ID NO: 98234 - DNA, 15 bp, Homo sapiens
taaggtatatattgt

SEQ ID NO: 98235 - DNA, 15 bp, Homo sapiens
ataaggtatatattg

SEQ ID NO: 98236 - DNA, 15 bp, Homo sapiens
cataaggtatatatt

SEQ ID NO: 98237 - DNA, 15 bp, Homo sapiens
ccataaggtatatat

SEQ ID NO: 98238 - DNA, 15 bp, Homo sapiens
gccataaggtatata

SEQ ID NO: 98239 - DNA, 15 bp, Homo sapiens
agccataaggtatat

SEQ ID NO: 98240 - DNA, 15 bp, Homo sapiens
aagccataaggtata

SEQ ID NO: 98241 - DNA, 15 bp, Homo sapiens
aaagccataaggtat

SEQ ID NO: 98242 - DNA, 15 bp, Homo sapiens
aaaagccataaggta

SEQ ID NO: 98243 - DNA, 15 bp, Homo sapiens
gaaaagccataaggt

SEQ ID NO: 98244 - DNA, 15 bp, Homo sapiens
ggaaaagccataagg

SEQ ID NO: 98245 - DNA, 15 bp, Homo sapiens
tggaaaagccataag

SEQ ID NO: 98246 - DNA, 15 bp, Homo sapiens
gtggaaaagccataa

SEQ ID NO: 98247 - DNA, 15 bp, Homo sapiens
tgtggaaaagccata

SEQ ID NO: 98248 - DNA, 15 bp, Homo sapiens
gtgtggaaaagccat

SEQ ID NO: 98249 - DNA, 15 bp, Homo sapiens
cgtgtggaaaagcca

SEQ ID NO: 98250 - DNA, 15 bp, Homo sapiens
gcgtgtggaaaagcc

SEQ ID NO: 98251 - DNA, 15 bp, Homo sapiens
tgcgtgtggaaaagc

SEQ ID NO: 98252 - DNA, 15 bp, Homo sapiens
atgcgtgtggaaaag

SEQ ID NO: 98253 - DNA, 15 bp, Homo sapiens
aatgcgtgtggaaaa

SEQ ID NO: 98254 - DNA, 15 bp, Homo sapiens
caatgcgtgtggaaa

SEQ ID NO: 98255 - DNA, 15 bp, Homo sapiens
tcaatgcgtgtggaa

SEQ ID NO: 98256 - DNA, 15 bp, Homo sapiens
gtcaatgcgtgtgga

SEQ ID NO: 98257 - DNA, 15 bp, Homo sapiens
agtcaatgcgtgtgg

SEQ ID NO: 98258 - DNA, 15 bp, Homo sapiens
aagtcaatgcgtgtg

SEQ ID NO: 98259 - DNA, 15 bp, Homo sapiens
gaagtcaatgcgtgt

SEQ ID NO: 98260 - DNA, 15 bp, Homo sapiens
tgaagtcaatgcgtg

SEQ ID NO: 98261 - DNA, 15 bp, Homo sapiens
ctgaagtcaatgcgt

SEQ ID NO: 98262 - DNA, 15 bp, Homo sapiens
cctgaagtcaatgcg

SEQ ID NO: 98263 - DNA, 15 bp, Homo sapiens
gcctgaagtcaatgc

SEQ ID NO: 98264 - DNA, 15 bp, Homo sapiens
agcctgaagtcaatg

SEQ ID NO: 98265 - DNA, 15 bp, Homo sapiens
cagcctgaagtcaat

SEQ ID NO: 98266 - DNA, 15 bp, Homo sapiens
acagcctgaagtcaa

SEQ ID NO: 98267 - DNA, 15 bp, Homo sapiens
aacagcctgaagtca

SEQ ID NO: 98268 - DNA, 15 bp, Homo sapiens
aaacagcctgaagtc

SEQ ID NO: 98269 - DNA, 15 bp, Homo sapiens
aaaacagcctgaagt

SEQ ID NO: 98270 - DNA, 15 bp, Homo sapiens
aaaaacagcctgaag

SEQ ID NO: 98271 - DNA, 15 bp, Homo sapiens
gaaaaacagcctgaa

SEQ ID NO: 98272 - DNA, 15 bp, Homo sapiens
ggaaaaacagcctga

SEQ ID NO: 98273 - DNA, 15 bp, Homo sapiens
aggaaaaacagcctg

SEQ ID NO: 98274 - DNA, 15 bp, Homo sapiens
gaggaaaaacagcct

SEQ ID NO: 98275 - DNA, 15 bp, Homo sapiens
tgaggaaaaacagcc

SEQ ID NO: 98276 - DNA, 15 bp, Homo sapiens
atgaggaaaaacagc

SEQ ID NO: 98277 - DNA, 15 bp, Homo sapiens
catgaggaaaaacag

SEQ ID NO: 98278 - DNA, 15 bp, Homo sapiens
tcatgaggaaaaaca

SEQ ID NO: 98279 - DNA, 15 bp, Homo sapiens
ttcatgaggaaaaac

SEQ ID NO: 98280 - DNA, 15 bp, Homo sapiens
attcatgaggaaaaa

SEQ ID NO: 98281 - DNA, 15 bp, Homo sapiens
cattcatgaggaaaa

SEQ ID NO: 98282 - DNA, 15 bp, Homo sapiens
gcattcatgaggaaa

SEQ ID NO: 98283 - DNA, 15 bp, Homo sapiens
tgcattcatgaggaa

SEQ ID NO: 98284 - DNA, 15 bp, Homo sapiens
ctgcattcatgagga

SEQ ID NO: 98285 - DNA, 15 bp, Homo sapiens
gctgcattcatgagg

SEQ ID NO: 98286 - DNA, 15 bp, Homo sapiens
tgctgcattcatgag

SEQ ID NO: 98287 - DNA, 15 bp, Homo sapiens
ctgctgcattcatga

SEQ ID NO: 98288 - DNA, 15 bp, Homo sapiens
gctgctgcattcatg

SEQ ID NO: 98289 - DNA, 15 bp, Homo sapiens
tgctgctgcattcat

SEQ ID NO: 98290 - DNA, 15 bp, Homo sapiens
gtgctgctgcattca

SEQ ID NO: 98291 - DNA, 15 bp, Homo sapiens
tgtgctgctgcattc

SEQ ID NO: 98292 - DNA, 15 bp, Homo sapiens
ttgtgctgctgcatt

SEQ ID NO: 98293 - DNA, 15 bp, Homo sapiens
tttgtgctgctgcat

SEQ ID NO: 98294 - DNA, 15 bp, Homo sapiens
ttttgtgctgctgca

SEQ ID NO: 98295 - DNA, 15 bp, Homo sapiens
attttgtgctgctgc

SEQ ID NO: 98296 - DNA, 15 bp, Homo sapiens
cattttgtgctgctg

SEQ ID NO: 98297 - DNA, 15 bp, Homo sapiens
gcattttgtgctgct

SEQ ID NO: 98298 - DNA, 15 bp, Homo sapiens
agcattttgtgctgc

SEQ ID NO: 98299 - DNA, 15 bp, Homo sapiens
cagcattttgtgctg

SEQ ID NO: 98300 - DNA, 15 bp, Homo sapiens
ccagcattttgtgct

SEQ ID NO: 98301 - DNA, 15 bp, Homo sapiens
accagcattttgtgc

SEQ ID NO: 98302 - DNA, 15 bp, Homo sapiens
aaccagcattttgtg

SEQ ID NO: 98303 - DNA, 15 bp, Homo sapiens
gaaccagcattttgt

SEQ ID NO: 98304 - DNA, 15 bp, Homo sapiens
agaaccagcattttg

SEQ ID NO: 98305 - DNA, 15 bp, Homo sapiens
aagaaccagcatttt

SEQ ID NO: 98306 - DNA, 15 bp, Homo sapiens
aaagaaccagcattt

SEQ ID NO: 98307 - DNA, 15 bp, Homo sapiens
caaagaaccagcatt

SEQ ID NO: 98308 - DNA, 15 bp, Homo sapiens
acaaagaaccagcat

SEQ ID NO: 98309 - DNA, 15 bp, Homo sapiens
tacaaagaaccagca

SEQ ID NO: 98310 - DNA, 15 bp, Homo sapiens
atacaaagaaccagc

SEQ ID NO: 98311 - DNA, 15 bp, Homo sapiens
gatacaaagaaccag

SEQ ID NO: 98312 - DNA, 15 bp, Homo sapiens
agatacaaagaacca

SEQ ID NO: 98313 - DNA, 15 bp, Homo sapiens
cagatacaaagaacc

SEQ ID NO: 98314 - DNA, 15 bp, Homo sapiens
gcagatacaaagaac

SEQ ID NO: 98315 - DNA, 15 bp, Homo sapiens
agcagatacaaagaa

SEQ ID NO: 98316 - DNA, 15 bp, Homo sapiens
aagcagatacaaaga

SEQ ID NO: 98317 - DNA, 15 bp, Homo sapiens
aaagcagatacaaag

SEQ ID NO: 98318 - DNA, 15 bp, Homo sapiens
gaaagcagatacaaa

SEQ ID NO: 98319 - DNA, 15 bp, Homo sapiens
tgaaagcagatacaa

SEQ ID NO: 98320 - DNA, 15 bp, Homo sapiens
ctgaaagcagataca

SEQ ID NO: 98321 - DNA, 15 bp, Homo sapiens
cctgaaagcagatac

SEQ ID NO: 98322 - DNA, 15 bp, Homo sapiens
ccctgaaagcagata

SEQ ID NO: 98323 - DNA, 15 bp, Homo sapiens
accctgaaagcagat

SEQ ID NO: 98324 - DNA, 15 bp, Homo sapiens
caccctgaaagcaga

SEQ ID NO: 98325 - DNA, 15 bp, Homo sapiens
ccaccctgaaagcag

SEQ ID NO: 98326 - DNA, 15 bp, Homo sapiens
tccaccctgaaagca

SEQ ID NO: 98327 - DNA, 15 bp, Homo sapiens
ttccaccctgaaagc

SEQ ID NO: 98328 - DNA, 15 bp, Homo sapiens
tttccaccctgaaag

SEQ ID NO: 98329 - DNA, 15 bp, Homo sapiens
gtttccaccctgaaa

SEQ ID NO: 98330 - DNA, 15 bp, Homo sapiens
ggtttccaccctgaa

SEQ ID NO: 98331 - DNA, 15 bp, Homo sapiens
aggtttccaccctga

SEQ ID NO: 98332 - DNA, 15 bp, Homo sapiens
caggtttccaccctg

SEQ ID NO: 98333 - DNA, 15 bp, Homo sapiens
acaggtttccaccct

SEQ ID NO: 98334 - DNA, 15 bp, Homo sapiens
tacaggtttccaccc

SEQ ID NO: 98335 - DNA, 15 bp, Homo sapiens
ttacaggtttccacc

SEQ ID NO: 98336 - DNA, 15 bp, Homo sapiens
gttacaggtttccac

SEQ ID NO: 98337 - DNA, 15 bp, Homo sapiens
cgttacaggtttcca

SEQ ID NO: 98338 - DNA, 15 bp, Homo sapiens
ccgttacaggtttcc

SEQ ID NO: 98339 - DNA, 15 bp, Homo sapiens
accgttacaggtttc

SEQ ID NO: 98340 - DNA, 15 bp, Homo sapiens
caccgttacaggttt

SEQ ID NO: 98341 - DNA, 15 bp, Homo sapiens
ccaccgttacaggtt

SEQ ID NO: 98342 - DNA, 15 bp, Homo sapiens
accaccgttacaggt

SEQ ID NO: 98343 - DNA, 15 bp, Homo sapiens
caccaccgttacagg

SEQ ID NO: 98344 - DNA, 15 bp, Homo sapiens
ccaccaccgttacag

SEQ ID NO: 98345 - DNA, 15 bp, Homo sapiens
cccaccaccgttaca

SEQ ID NO: 98346 - DNA, 15 bp, Homo sapiens
ccccaccaccgttac

SEQ ID NO: 98347 - DNA, 15 bp, Homo sapiens
gccccaccaccgtta

SEQ ID NO: 98348 - DNA, 15 bp, Homo sapiens
tgccccaccaccgtt

SEQ ID NO: 98349 - DNA, 15 bp, Homo sapiens
ctgccccaccaccgt

SEQ ID NO: 98350 - DNA, 15 bp, Homo sapiens
cctgccccaccaccg

SEQ ID NO: 98351 - DNA, 15 bp, Homo sapiens
ccctgccccaccacc

SEQ ID NO: 98352 - DNA, 15 bp, Homo sapiens
gccctgccccaccac

SEQ ID NO: 98353 - DNA, 15 bp, Homo sapiens
agccctgccccacca

SEQ ID NO: 98354 - DNA, 15 bp, Homo sapiens
cagccctgccccacc

SEQ ID NO: 98355 - DNA, 15 bp, Homo sapiens
ccagccctgccccac

SEQ ID NO: 98356 - DNA, 15 bp, Homo sapiens
cccagccctgcccca

SEQ ID NO: 98357 - DNA, 15 bp, Homo sapiens
acccagccctgcccc

SEQ ID NO: 98358 - DNA, 15 bp, Homo sapiens
cacccagccctgccc

SEQ ID NO: 98359 - DNA, 15 bp, Homo sapiens
ccacccagccctgcc

SEQ ID NO: 98360 - DNA, 15 bp, Homo sapiens
cccacccagccctgc

SEQ ID NO: 98361 - DNA, 15 bp, Homo sapiens
gcccacccagccctg

SEQ ID NO: 98362 - DNA, 15 bp, Homo sapiens
tgcccacccagccct

SEQ ID NO: 98363 - DNA, 15 bp, Homo sapiens
ctgcccacccagccc

SEQ ID NO: 98364 - DNA, 15 bp, Homo sapiens
tctgcccacccagcc

SEQ ID NO: 98365 - DNA, 15 bp, Homo sapiens
ctctgcccacccagc

SEQ ID NO: 98366 - DNA, 15 bp, Homo sapiens
tctctgcccacccag

SEQ ID NO: 98367 - DNA, 15 bp, Homo sapiens
ctctctgcccaccca

SEQ ID NO: 98368 - DNA, 15 bp, Homo sapiens
cctctctgcccaccc

SEQ ID NO: 98369 - DNA, 15 bp, Homo sapiens
ccctctctgcccacc

SEQ ID NO: 98370 - DNA, 15 bp, Homo sapiens
tccctctctgcccac

SEQ ID NO: 98371 - DNA, 15 bp, Homo sapiens
ctccctctctgccca

SEQ ID NO: 98372 - DNA, 15 bp, Homo sapiens
actccctctctgccc

SEQ ID NO: 98373 - DNA, 15 bp, Homo sapiens
cactccctctctgcc

SEQ ID NO: 98374 - DNA, 15 bp, Homo sapiens
gcactccctctctgc

SEQ ID NO: 98375 - DNA, 15 bp, Homo sapiens
agcactccctctctg

SEQ ID NO: 98376 - DNA, 15 bp, Homo sapiens
cagcactccctctct

SEQ ID NO: 98377 - DNA, 15 bp, Homo sapiens
gcagcactccctctc

SEQ ID NO: 98378 - DNA, 15 bp, Homo sapiens
agcagcactccctct

SEQ ID NO: 98379 - DNA, 15 bp, Homo sapiens
gagcagcactccctc

SEQ ID NO: 98380 - DNA, 15 bp, Homo sapiens
ggagcagcactccct

SEQ ID NO: 98381 - DNA, 15 bp, Homo sapiens
gggagcagcactccc

SEQ ID NO: 98382 - DNA, 15 bp, Homo sapiens
tgggagcagcactcc

SEQ ID NO: 98383 - DNA, 15 bp, Homo sapiens
gtgggagcagcactc

SEQ ID NO: 98384 - DNA, 15 bp, Homo sapiens
ggtgggagcagcact

SEQ ID NO: 98385 - DNA, 15 bp, Homo sapiens
tggtgggagcagcac

SEQ ID NO: 98386 - DNA, 15 bp, Homo sapiens
gtggtgggagcagca

SEQ ID NO: 98387 - DNA, 15 bp, Homo sapiens
tgtggtgggagcagc

SEQ ID NO: 98388 - DNA, 15 bp, Homo sapiens
gtgtggtgggagcag

SEQ ID NO: 98389 - DNA, 15 bp, Homo sapiens
cgtgtggtgggagca

SEQ ID NO: 98390 - DNA, 15 bp, Homo sapiens
tcgtgtggtgggagc

SEQ ID NO: 98391 - DNA, 15 bp, Homo sapiens
ctcgtgtggtgggag

SEQ ID NO: 98392 - DNA, 15 bp, Homo sapiens
actcgtgtggtggga

SEQ ID NO: 98393 - DNA, 15 bp, Homo sapiens
gactcgtgtggtggg

SEQ ID NO: 98394 - DNA, 15 bp, Homo sapiens
ggactcgtgtggtgg

SEQ ID NO: 98395 - DNA, 15 bp, Homo sapiens
gggactcgtgtggtg

SEQ ID NO: 98396 - DNA, 15 bp, Homo sapiens
agggactcgtgtggt

SEQ ID NO: 98397 - DNA, 15 bp, Homo sapiens
aagggactcgtgtgg

SEQ ID NO: 98398 - DNA, 15 bp, Homo sapiens
gaagggactcgtgtg

SEQ ID NO: 98399 - DNA, 15 bp, Homo sapiens
agaagggactcgtgt

SEQ ID NO: 98400 - DNA, 15 bp, Homo sapiens
gagaagggactcgtg

SEQ ID NO: 98401 - DNA, 15 bp, Homo sapiens
ggagaagggactcgt

SEQ ID NO: 98402 - DNA, 15 bp, Homo sapiens
gggagaagggactcg

SEQ ID NO: 98403 - DNA, 15 bp, Homo sapiens
agggagaagggactc

SEQ ID NO: 98404 - DNA, 15 bp, Homo sapiens
cagggagaagggact

SEQ ID NO: 98405 - DNA, 15 bp, Homo sapiens
gcagggagaagggac

SEQ ID NO: 98406 - DNA, 15 bp, Homo sapiens
agcagggagaaggga

SEQ ID NO: 98407 - DNA, 15 bp, Homo sapiens
aagcagggagaaggg

SEQ ID NO: 98408 - DNA, 15 bp, Homo sapiens
aaagcagggagaagg

SEQ ID NO: 98409 - DNA, 15 bp, Homo sapiens
caaagcagggagaag

SEQ ID NO: 98410 - DNA, 15 bp, Homo sapiens
ccaaagcagggagaa

SEQ ID NO: 98411 - DNA, 15 bp, Homo sapiens
gccaaagcagggaga

SEQ ID NO: 98412 - DNA, 15 bp, Homo sapiens
agccaaagcagggag

SEQ ID NO: 98413 - DNA, 15 bp, Homo sapiens
gagccaaagcaggga

SEQ ID NO: 98414 - DNA, 15 bp, Homo sapiens
ggagccaaagcaggg

SEQ ID NO: 98415 - DNA, 15 bp, Homo sapiens
aggagccaaagcagg

SEQ ID NO: 98416 - DNA, 15 bp, Homo sapiens
gaggagccaaagcag

SEQ ID NO: 98417 - DNA, 15 bp, Homo sapiens
tgaggagccaaagca

SEQ ID NO: 98418 - DNA, 15 bp, Homo sapiens
gtgaggagccaaagc

SEQ ID NO: 98419 - DNA, 15 bp, Homo sapiens
ggtgaggagccaaag

SEQ ID NO: 98420 - DNA, 15 bp, Homo sapiens
tggtgaggagccaaa

SEQ ID NO: 98421 - DNA, 15 bp, Homo sapiens
ctggtgaggagccaa

SEQ ID NO: 98422 - DNA, 15 bp, Homo sapiens
actggtgaggagcca

SEQ ID NO: 98423 - DNA, 15 bp, Homo sapiens
aactggtgaggagcc

SEQ ID NO: 98424 - DNA, 15 bp, Homo sapiens
caactggtgaggagc

SEQ ID NO: 98425 - DNA, 15 bp, Homo sapiens
acaactggtgaggag

SEQ ID NO: 98426 - DNA, 15 bp, Homo sapiens
gacaactggtgagga

SEQ ID NO: 98427 - DNA, 15 bp, Homo sapiens
tgacaactggtgagg

SEQ ID NO: 98428 - DNA, 15 bp, Homo sapiens
ctgacaactggtgag

SEQ ID NO: 98429 - DNA, 15 bp, Homo sapiens
cctgacaactggtga

SEQ ID NO: 98430 - DNA, 15 bp, Homo sapiens
acctgacaactggtg

SEQ ID NO: 98431 - DNA, 15 bp, Homo sapiens
aacctgacaactggt

SEQ ID NO: 98432 - DNA, 15 bp, Homo sapiens
taacctgacaactgg

SEQ ID NO: 98433 - DNA, 15 bp, Homo sapiens
ataacctgacaactg

SEQ ID NO: 98434 - DNA, 15 bp, Homo sapiens
cataacctgacaact

SEQ ID NO: 98435 - DNA, 15 bp, Homo sapiens
tcataacctgacaac

SEQ ID NO: 98436 - DNA, 15 bp, Homo sapiens
atcataacctgacaa

SEQ ID NO: 98437 - DNA, 15 bp, Homo sapiens
aatcataacctgaca

SEQ ID NO: 98438 - DNA, 15 bp, Homo sapiens
taatcataacctgac

SEQ ID NO: 98439 - DNA, 15 bp, Homo sapiens
ataatcataacctga

SEQ ID NO: 98440 - DNA, 15 bp, Homo sapiens
tataatcataacctg

SEQ ID NO: 98441 - DNA, 15 bp, Homo sapiens
ctataatcataacct

SEQ ID NO: 98442 - DNA, 15 bp, Homo sapiens
tctataatcataacc

SEQ ID NO: 98443 - DNA, 15 bp, Homo sapiens
ttctataatcataac

SEQ ID NO: 98444 - DNA, 15 bp, Homo sapiens
attctataatcataa

SEQ ID NO: 98445 - DNA, 15 bp, Homo sapiens
gattctataatcata

SEQ ID NO: 98446 - DNA, 15 bp, Homo sapiens
agattctataatcat

SEQ ID NO: 98447 - DNA, 15 bp, Homo sapiens
tagattctataatca

SEQ ID NO: 98448 - DNA, 15 bp, Homo sapiens
ctagattctataatc

SEQ ID NO: 98449 - DNA, 15 bp, Homo sapiens
actagattctataat

SEQ ID NO: 98450 - DNA, 15 bp, Homo sapiens
gactagattctataa

SEQ ID NO: 98451 - DNA, 15 bp, Homo sapiens
ggactagattctata

SEQ ID NO: 98452 - DNA, 15 bp, Homo sapiens
aggactagattctat

SEQ ID NO: 98453 - DNA, 15 bp, Homo sapiens
taggactagattcta

SEQ ID NO: 98454 - DNA, 15 bp, Homo sapiens
gtaggactagattct

SEQ ID NO: 98455 - DNA, 15 bp, Homo sapiens
agtaggactagattc

SEQ ID NO: 98456 - DNA, 15 bp, Homo sapiens
gagtaggactagatt

SEQ ID NO: 98457 - DNA, 15 bp, Homo sapiens
tgagtaggactagat

SEQ ID NO: 98458 - DNA, 15 bp, Homo sapiens
ctgagtaggactaga

SEQ ID NO: 98459 - DNA, 15 bp, Homo sapiens
actgagtaggactag

SEQ ID NO: 98460 - DNA, 15 bp, Homo sapiens
cactgagtaggacta

SEQ ID NO: 98461 - DNA, 15 bp, Homo sapiens
tcactgagtaggact

SEQ ID NO: 98462 - DNA, 15 bp, Homo sapiens
ttcactgagtaggac

SEQ ID NO: 98463 - DNA, 15 bp, Homo sapiens
tttcactgagtagga

SEQ ID NO: 98464 - DNA, 15 bp, Homo sapiens
ctttcactgagtagg

SEQ ID NO: 98465 - DNA, 15 bp, Homo sapiens
tctttcactgagtag

SEQ ID NO: 98466 - DNA, 15 bp, Homo sapiens
ttctttcactgagta

SEQ ID NO: 98467 - DNA, 15 bp, Homo sapiens
gttctttcactgagt

SEQ ID NO: 98468 - DNA, 15 bp, Homo sapiens
agttctttcactgag

SEQ ID NO: 98469 - DNA, 15 bp, Homo sapiens
aagttctttcactga

SEQ ID NO: 98470 - DNA, 15 bp, Homo sapiens
aaagttctttcactg

SEQ ID NO: 98471 - DNA, 15 bp, Homo sapiens
gaaagttctttcact

SEQ ID NO: 98472 - DNA, 15 bp, Homo sapiens
tgaaagttctttcac

SEQ ID NO: 98473 - DNA, 15 bp, Homo sapiens
atgaaagttctttca

SEQ ID NO: 98474 - DNA, 15 bp, Homo sapiens
tatgaaagttctttc

SEQ ID NO: 98475 - DNA, 15 bp, Homo sapiens
gtatgaaagttcttt

SEQ ID NO: 98476 - DNA, 15 bp, Homo sapiens
tgtatgaaagttctt

SEQ ID NO: 98477 - DNA, 15 bp, Homo sapiens
atgtatgaaagttct

SEQ ID NO: 98478 - DNA, 15 bp, Homo sapiens
catgtatgaaagttc

SEQ ID NO: 98479 - DNA, 15 bp, Homo sapiens
acatgtatgaaagtt

SEQ ID NO: 98480 - DNA, 15 bp, Homo sapiens
tacatgtatgaaagt

SEQ ID NO: 98481 - DNA, 15 bp, Homo sapiens
atacatgtatgaaag

SEQ ID NO: 98482 - DNA, 15 bp, Homo sapiens
catacatgtatgaaa

SEQ ID NO: 98483 - DNA, 15 bp, Homo sapiens
acatacatgtatgaa

SEQ ID NO: 98484 - DNA, 15 bp, Homo sapiens
cacatacatgtatga

SEQ ID NO: 98485 - DNA, 15 bp, Homo sapiens
acacatacatgtatg

SEQ ID NO: 98486 - DNA, 15 bp, Homo sapiens
tacacatacatgtat

SEQ ID NO: 98487 - DNA, 15 bp, Homo sapiens
ctacacatacatgta

SEQ ID NO: 98488 - DNA, 15 bp, Homo sapiens
cctacacatacatgt

SEQ ID NO: 98489 - DNA, 15 bp, Homo sapiens
tcctacacatacatg

SEQ ID NO: 98490 - DNA, 15 bp, Homo sapiens
gtcctacacatacat

SEQ ID NO: 98491 - DNA, 15 bp, Homo sapiens
tgtcctacacataca

SEQ ID NO: 98492 - DNA, 15 bp, Homo sapiens
ctgtcctacacatac

SEQ ID NO: 98493 - DNA, 15 bp, Homo sapiens
gctgtcctacacata

SEQ ID NO: 98494 - DNA, 15 bp, Homo sapiens
tgctgtcctacacat

SEQ ID NO: 98495 - DNA, 15 bp, Homo sapiens
atgctgtcctacaca

SEQ ID NO: 98496 - DNA, 15 bp, Homo sapiens
catgctgtcctacac

SEQ ID NO: 98497 - DNA, 15 bp, Homo sapiens
tcatgctgtcctaca

SEQ ID NO: 98498 - DNA, 15 bp, Homo sapiens
atcatgctgtcctac

SEQ ID NO: 98499 - DNA, 15 bp, Homo sapiens
tatcatgctgtccta

SEQ ID NO: 98500 - DNA, 15 bp, Homo sapiens
ttatcatgctgtcct

SEQ ID NO: 98501 - DNA, 15 bp, Homo sapiens
tttatcatgctgtcc

SEQ ID NO: 98502 - DNA, 15 bp, Homo sapiens
ttttatcatgctgtc

SEQ ID NO: 98503 - DNA, 15 bp, Homo sapiens
attttatcatgctgt

SEQ ID NO: 98504 - DNA, 15 bp, Homo sapiens
aattttatcatgctg

SEQ ID NO: 98505 - DNA, 15 bp, Homo sapiens
gaattttatcatgct

SEQ ID NO: 98506 - DNA, 15 bp, Homo sapiens
ggaattttatcatgc

SEQ ID NO: 98507 - DNA, 15 bp, Homo sapiens
gggaattttatcatg

SEQ ID NO: 98508 - DNA, 15 bp, Homo sapiens
tgggaattttatcat

SEQ ID NO: 98509 - DNA, 15 bp, Homo sapiens
ttgggaattttatca

SEQ ID NO: 98510 - DNA, 15 bp, Homo sapiens
cttgggaattttatc

SEQ ID NO: 98511 - DNA, 15 bp, Homo sapiens
gcttgggaattttat

SEQ ID NO: 98512 - DNA, 15 bp, Homo sapiens
ggcttgggaatttta

SEQ ID NO: 98513 - DNA, 15 bp, Homo sapiens
tggcttgggaatttt

SEQ ID NO: 98514 - DNA, 15 bp, Homo sapiens
ctggcttgggaattt

SEQ ID NO: 98515 - DNA, 15 bp, Homo sapiens
tctggcttgggaatt

SEQ ID NO: 98516 - DNA, 15 bp, Homo sapiens
gtctggcttgggaat

SEQ ID NO: 98517 - DNA, 15 bp, Homo sapiens
ggtctggcttgggaa

SEQ ID NO: 98518 - DNA, 15 bp, Homo sapiens
tggtctggcttggga

SEQ ID NO: 98519 - DNA, 15 bp, Homo sapiens
ttggtctggcttggg

SEQ ID NO: 98520 - DNA, 15 bp, Homo sapiens
tttggtctggcttgg

SEQ ID NO: 98521 - DNA, 15 bp, Homo sapiens
ctttggtctggcttg

SEQ ID NO: 98522 - DNA, 15 bp, Homo sapiens
actttggtctggctt

SEQ ID NO: 98523 - DNA, 15 bp, Homo sapiens
gactttggtctggct

SEQ ID NO: 98524 - DNA, 15 bp, Homo sapiens
tgactttggtctggc

SEQ ID NO: 98525 - DNA, 15 bp, Homo sapiens
ttgactttggtctgg

SEQ ID NO: 98526 - DNA, 15 bp, Homo sapiens
cttgactttggtctg

SEQ ID NO: 98527 - DNA, 15 bp, Homo sapiens
ccttgactttggtct

SEQ ID NO: 98528 - DNA, 15 bp, Homo sapiens
accttgactttggtc

SEQ ID NO: 98529 - DNA, 15 bp, Homo sapiens
caccttgactttggt

SEQ ID NO: 98530 - DNA, 15 bp, Homo sapiens
gcaccttgactttgg

SEQ ID NO: 98531 - DNA, 15 bp, Homo sapiens
agcaccttgactttg

SEQ ID NO: 98532 - DNA, 15 bp, Homo sapiens
aagcaccttgacttt

SEQ ID NO: 98533 - DNA, 15 bp, Homo sapiens
aaagcaccttgactt

SEQ ID NO: 98534 - DNA, 15 bp, Homo sapiens
aaaagcaccttgact

SEQ ID NO: 98535 - DNA, 15 bp, Homo sapiens
aaaaagcaccttgac

SEQ ID NO: 98536 - DNA, 15 bp, Homo sapiens
taaaaagcaccttga

SEQ ID NO: 98537 - DNA, 15 bp, Homo sapiens
ataaaaagcaccttg

SEQ ID NO: 98538 - DNA, 15 bp, Homo sapiens
gataaaaagcacctt

SEQ ID NO: 98539 - DNA, 15 bp, Homo sapiens
tgataaaaagcacct

SEQ ID NO: 98540 - DNA, 15 bp, Homo sapiens
gtgataaaaagcacc

SEQ ID NO: 98541 - DNA, 15 bp, Homo sapiens
agtgataaaaagcac

SEQ ID NO: 98542 - DNA, 15 bp, Homo sapiens
cagtgataaaaagca

SEQ ID NO: 98543 - DNA, 15 bp, Homo sapiens
acagtgataaaaagc

SEQ ID NO: 98544 - DNA, 15 bp, Homo sapiens
tacagtgataaaaag

SEQ ID NO: 98545 - DNA, 15 bp, Homo sapiens
ctacagtgataaaaa

SEQ ID NO: 98546 - DNA, 15 bp, Homo sapiens
cctacagtgataaaa

SEQ ID NO: 98547 - DNA, 15 bp, Homo sapiens
acctacagtgataaa

SEQ ID NO: 98548 - DNA, 15 bp, Homo sapiens
aacctacagtgataa

SEQ ID NO: 98549 - DNA, 15 bp, Homo sapiens
caacctacagtgata

SEQ ID NO: 98550 - DNA, 15 bp, Homo sapiens
ccaacctacagtgat

SEQ ID NO: 98551 - DNA, 15 bp, Homo sapiens
accaacctacagtga

SEQ ID NO: 98552 - DNA, 15 bp, Homo sapiens
caccaacctacagtg

SEQ ID NO: 98553 - DNA, 15 bp, Homo sapiens
tcaccaacctacagt

SEQ ID NO: 98554 - DNA, 15 bp, Homo sapiens
ctcaccaacctacag

SEQ ID NO: 98555 - DNA, 15 bp, Homo sapiens
actcaccaacctaca

SEQ ID NO: 98556 - DNA, 15 bp, Homo sapiens
cactcaccaacctac

SEQ ID NO: 98557 - DNA, 15 bp, Homo sapiens
ccactcaccaaccta

SEQ ID NO: 98558 - DNA, 15 bp, Homo sapiens
cccactcaccaacct

SEQ ID NO: 98559 - DNA, 15 bp, Homo sapiens
gcccactcaccaacc

SEQ ID NO: 98560 - DNA, 15 bp, Homo sapiens
cgcccactcaccaac

SEQ ID NO: 98561 - DNA, 15 bp, Homo sapiens
tcgcccactcaccaa

SEQ ID NO: 98562 - DNA, 15 bp, Homo sapiens
atcgcccactcacca

SEQ ID NO: 98563 - DNA, 15 bp, Homo sapiens
aatcgcccactcacc

SEQ ID NO: 98564 - DNA, 15 bp, Homo sapiens
gaatcgcccactcac

SEQ ID NO: 98565 - DNA, 15 bp, Homo sapiens
cgaatcgcccactca

SEQ ID NO: 98566 - DNA, 15 bp, Homo sapiens
ccgaatcgcccactc

SEQ ID NO: 98567 - DNA, 15 bp, Homo sapiens
tccgaatcgcccact

SEQ ID NO: 98568 - DNA, 15 bp, Homo sapiens
ttccgaatcgcccac

SEQ ID NO: 98569 - DNA, 15 bp, Homo sapiens
tttccgaatcgccca

SEQ ID NO: 98570 - DNA, 15 bp, Homo sapiens
gtttccgaatcgccc

SEQ ID NO: 98571 - DNA, 15 bp, Homo sapiens
agtttccgaatcgcc

SEQ ID NO: 98572 - DNA, 15 bp, Homo sapiens
cagtttccgaatcgc

SEQ ID NO: 98573 - DNA, 15 bp, Homo sapiens
ccagtttccgaatcg

SEQ ID NO: 98574 - DNA, 15 bp, Homo sapiens
cccagtttccgaatc

SEQ ID NO: 98575 - DNA, 15 bp, Homo sapiens
gcccagtttccgaat

SEQ ID NO: 98576 - DNA, 15 bp, Homo sapiens
ggcccagtttccgaa

SEQ ID NO: 98577 - DNA, 15 bp, Homo sapiens
aggcccagtttccga

SEQ ID NO: 98578 - DNA, 15 bp, Homo sapiens
gaggcccagtttccg

SEQ ID NO: 98579 - DNA, 15 bp, Homo sapiens
cgaggcccagtttcc

SEQ ID NO: 98580 - DNA, 15 bp, Homo sapiens
acgaggcccagtttc

SEQ ID NO: 98581 - DNA, 15 bp, Homo sapiens
cacgaggcccagttt

SEQ ID NO: 98582 - DNA, 15 bp, Homo sapiens
tcacgaggcccagtt

SEQ ID NO: 98583 - DNA, 15 bp, Homo sapiens
ttcacgaggcccagt

SEQ ID NO: 98584 - DNA, 15 bp, Homo sapiens
cttcacgaggcccag

SEQ ID NO: 98585 - DNA, 15 bp, Homo sapiens
acttcacgaggccca

SEQ ID NO: 98586 - DNA, 15 bp, Homo sapiens
tacttcacgaggccc

SEQ ID NO: 98587 - DNA, 15 bp, Homo sapiens
atacttcacgaggcc

SEQ ID NO: 98588 - DNA, 15 bp, Homo sapiens
catacttcacgaggc

SEQ ID NO: 98589 - DNA, 15 bp, Homo sapiens
ccatacttcacgagg

SEQ ID NO: 98590 - DNA, 15 bp, Homo sapiens
tccatacttcacgag

SEQ ID NO: 98591 - DNA, 15 bp, Homo sapiens
ctccatacttcacga

SEQ ID NO: 98592 - DNA, 15 bp, Homo sapiens
tctccatacttcacg

SEQ ID NO: 98593 - DNA, 15 bp, Homo sapiens
ttctccatacttcac

SEQ ID NO: 98594 - DNA, 15 bp, Homo sapiens
tttctccatacttca

SEQ ID NO: 98595 - DNA, 15 bp, Homo sapiens
ttttctccatacttc

SEQ ID NO: 98596 - DNA, 15 bp, Homo sapiens
tttttctccatactt

SEQ ID NO: 98597 - DNA, 15 bp, Homo sapiens
atttttctccatact

SEQ ID NO: 98598 - DNA, 15 bp, Homo sapiens
tatttttctccatac

SEQ ID NO: 98599 - DNA, 15 bp, Homo sapiens
atatttttctccata

SEQ ID NO: 98600 - DNA, 15 bp, Homo sapiens
catatttttctccat

SEQ ID NO: 98601 - DNA, 15 bp, Homo sapiens
gcatatttttctcca

SEQ ID NO: 98602 - DNA, 15 bp, Homo sapiens
agcatatttttctcc

SEQ ID NO: 98603 - DNA, 15 bp, Homo sapiens
cagcatatttttctc

SEQ ID NO: 98604 - DNA, 15 bp, Homo sapiens
ccagcatatttttct

SEQ ID NO: 98605 - DNA, 15 bp, Homo sapiens
accagcatatttttc

SEQ ID NO: 98606 - DNA, 15 bp, Homo sapiens
taccagcatattttt

SEQ ID NO: 98607 - DNA, 15 bp, Homo sapiens
ttaccagcatatttt

SEQ ID NO: 98608 - DNA, 15 bp, Homo sapiens
gttaccagcatattt

SEQ ID NO: 98609 - DNA, 15 bp, Homo sapiens
agttaccagcatatt

SEQ ID NO: 98610 - DNA, 15 bp, Homo sapiens
tagttaccagcatat

SEQ ID NO: 98611 - DNA, 15 bp, Homo sapiens
atagttaccagcata

SEQ ID NO: 98612 - DNA, 15 bp, Homo sapiens
tatagttaccagcat

SEQ ID NO: 98613 - DNA, 15 bp, Homo sapiens
ctatagttaccagca

SEQ ID NO: 98614 - DNA, 15 bp, Homo sapiens
actatagttaccagc

SEQ ID NO: 98615 - DNA, 15 bp, Homo sapiens
cactatagttaccag

SEQ ID NO: 98616 - DNA, 15 bp, Homo sapiens
ccactatagttacca

SEQ ID NO: 98617 - DNA, 15 bp, Homo sapiens
tccactatagttacc

SEQ ID NO: 98618 - DNA, 15 bp, Homo sapiens
ctccactatagttac

SEQ ID NO: 98619 - DNA, 15 bp, Homo sapiens
cctccactatagtta

SEQ ID NO: 98620 - DNA, 15 bp, Homo sapiens
gcctccactatagtt

SEQ ID NO: 98621 - DNA, 15 bp, Homo sapiens
tgcctccactatagt

SEQ ID NO: 98622 - DNA, 15 bp, Homo sapiens
ttgcctccactatag

SEQ ID NO: 98623 - DNA, 15 bp, Homo sapiens
gttgcctccactata

SEQ ID NO: 98624 - DNA, 15 bp, Homo sapiens
tgttgcctccactat

SEQ ID NO: 98625 - DNA, 15 bp, Homo sapiens
ttgttgcctccacta

SEQ ID NO: 98626 - DNA, 15 bp, Homo sapiens
tttgttgcctccact

SEQ ID NO: 98627 - DNA, 15 bp, Homo sapiens
gtttgttgcctccac

SEQ ID NO: 98628 - DNA, 15 bp, Homo sapiens
cgtttgttgcctcca

SEQ ID NO: 98629 - DNA, 15 bp, Homo sapiens
gcgtttgttgcctcc

SEQ ID NO: 98630 - DNA, 15 bp, Homo sapiens
tgcgtttgttgcctc

SEQ ID NO: 98631 - DNA, 15 bp, Homo sapiens
ttgcgtttgttgcct

SEQ ID NO: 98632 - DNA, 15 bp, Homo sapiens
cttgcgtttgttgcc

SEQ ID NO: 98633 - DNA, 15 bp, Homo sapiens
gcttgcgtttgttgc

SEQ ID NO: 98634 - DNA, 15 bp, Homo sapiens
agcttgcgtttgttg

SEQ ID NO: 98635 - DNA, 15 bp, Homo sapiens
gagcttgcgtttgtt

SEQ ID NO: 98636 - DNA, 15 bp, Homo sapiens
agagcttgcgtttgt

SEQ ID NO: 98637 - DNA, 15 bp, Homo sapiens
gagagcttgcgtttg

SEQ ID NO: 98638 - DNA, 15 bp, Homo sapiens
agagagcttgcgttt

SEQ ID NO: 98639 - DNA, 15 bp, Homo sapiens
tagagagcttgcgtt

SEQ ID NO: 98640 - DNA, 15 bp, Homo sapiens
gtagagagcttgcgt

SEQ ID NO: 98641 - DNA, 15 bp, Homo sapiens
tgtagagagcttgcg

SEQ ID NO: 98642 - DNA, 15 bp, Homo sapiens
ctgtagagagcttgc

SEQ ID NO: 98643 - DNA, 15 bp, Homo sapiens
gctgtagagagcttg

SEQ ID NO: 98644 - DNA, 15 bp, Homo sapiens
ggctgtagagagctt

SEQ ID NO: 98645 - DNA, 15 bp, Homo sapiens
tggctgtagagagct

SEQ ID NO: 98646 - DNA, 15 bp, Homo sapiens
atggctgtagagagc

SEQ ID NO: 98647 - DNA, 15 bp, Homo sapiens
catggctgtagagag

SEQ ID NO: 98648 - DNA, 15 bp, Homo sapiens
ccatggctgtagaga

SEQ ID NO: 98649 - DNA, 15 bp, Homo sapiens
gccatggctgtagag

SEQ ID NO: 98650 - DNA, 15 bp, Homo sapiens
agccatggctgtaga

SEQ ID NO: 98651 - DNA, 15 bp, Homo sapiens
aagccatggctgtag

SEQ ID NO: 98652 - DNA, 15 bp, Homo sapiens
aaagccatggctgta

SEQ ID NO: 98653 - DNA, 15 bp, Homo sapiens
caaagccatggctgt

SEQ ID NO: 98654 - DNA, 15 bp, Homo sapiens
tcaaagccatggctg

SEQ ID NO: 98655 - DNA, 15 bp, Homo sapiens
atcaaagccatggct

SEQ ID NO: 98656 - DNA, 15 bp, Homo sapiens
gatcaaagccatggc

SEQ ID NO: 98657 - DNA, 15 bp, Homo sapiens
cgatcaaagccatgg

SEQ ID NO: 98658 - DNA, 15 bp, Homo sapiens
ccgatcaaagccatg

SEQ ID NO: 98659 - DNA, 15 bp, Homo sapiens
gccgatcaaagccat

SEQ ID NO: 98660 - DNA, 15 bp, Homo sapiens
cgccgatcaaagcca

SEQ ID NO: 98661 - DNA, 15 bp, Homo sapiens
ccgccgatcaaagcc

SEQ ID NO: 98662 - DNA, 15 bp, Homo sapiens
cccgccgatcaaagc

SEQ ID NO: 98663 - DNA, 15 bp, Homo sapiens
gcccgccgatcaaag

SEQ ID NO: 98664 - DNA, 15 bp, Homo sapiens
ggcccgccgatcaaa

SEQ ID NO: 98665 - DNA, 15 bp, Homo sapiens
aggcccgccgatcaa

SEQ ID NO: 98666 - DNA, 15 bp, Homo sapiens
gaggcccgccgatca

SEQ ID NO: 98667 - DNA, 15 bp, Homo sapiens
ggaggcccgccgatc

SEQ ID NO: 98668 - DNA, 15 bp, Homo sapiens
aggaggcccgccgat

SEQ ID NO: 98669 - DNA, 15 bp, Homo sapiens
caggaggcccgccga

SEQ ID NO: 98670 - DNA, 15 bp, Homo sapiens
acaggaggcccgccg

SEQ ID NO: 98671 - DNA, 15 bp, Homo sapiens
cacaggaggcccgcc

SEQ ID NO: 98672 - DNA, 15 bp, Homo sapiens
ccacaggaggcccgc

SEQ ID NO: 98673 - DNA, 15 bp, Homo sapiens
accacaggaggcccg

SEQ ID NO: 98674 - DNA, 15 bp, Homo sapiens
caccacaggaggccc

SEQ ID NO: 98675 - DNA, 15 bp, Homo sapiens
acaccacaggaggcc

SEQ ID NO: 98676 - DNA, 15 bp, Homo sapiens
aacaccacaggaggc

SEQ ID NO: 98677 - DNA, 15 bp, Homo sapiens
aaacaccacaggagg

SEQ ID NO: 98678 - DNA, 15 bp, Homo sapiens
gaaacaccacaggag

SEQ ID NO: 98679 - DNA, 15 bp, Homo sapiens
agaaacaccacagga

SEQ ID NO: 98680 - DNA, 15 bp, Homo sapiens
cagaaacaccacagg

SEQ ID NO: 98681 - DNA, 15 bp, Homo sapiens
ccagaaacaccacag

SEQ ID NO: 98682 - DNA, 15 bp, Homo sapiens
accagaaacaccaca

SEQ ID NO: 98683 - DNA, 15 bp, Homo sapiens
caccagaaacaccac

SEQ ID NO: 98684 - DNA, 15 bp, Homo sapiens
tcaccagaaacacca

SEQ ID NO: 98685 - DNA, 15 bp, Homo sapiens
ctcaccagaaacacc

SEQ ID NO: 98686 - DNA, 15 bp, Homo sapiens
actcaccagaaacac

SEQ ID NO: 98687 - DNA, 15 bp, Homo sapiens
tactcaccagaaaca

SEQ ID NO: 98688 - DNA, 15 bp, Homo sapiens
atactcaccagaaac

SEQ ID NO: 98689 - DNA, 15 bp, Homo sapiens
tatactcaccagaaa

SEQ ID NO: 98690 - DNA, 15 bp, Homo sapiens
ttatactcaccagaa

SEQ ID NO: 98691 - DNA, 15 bp, Homo sapiens
gttatactcaccaga

SEQ ID NO: 98692 - DNA, 15 bp, Homo sapiens
agttatactcaccag

SEQ ID NO: 98693 - DNA, 15 bp, Homo sapiens
cagttatactcacca

SEQ ID NO: 98694 - DNA, 15 bp, Homo sapiens
acagttatactcacc

SEQ ID NO: 98695 - DNA, 15 bp, Homo sapiens
cacagttatactcac

SEQ ID NO: 98696 - DNA, 15 bp, Homo sapiens
ccacagttatactca

SEQ ID NO: 98697 - DNA, 15 bp, Homo sapiens
tccacagttatactc

SEQ ID NO: 98698 - DNA, 15 bp, Homo sapiens
atccacagttatact

SEQ ID NO: 98699 - DNA, 15 bp, Homo sapiens
catccacagttatac

SEQ ID NO: 98700 - DNA, 15 bp, Homo sapiens
ccatccacagttata

SEQ ID NO: 98701 - DNA, 15 bp, Homo sapiens
tccatccacagttat

SEQ ID NO: 98702 - DNA, 15 bp, Homo sapiens
ttccatccacagtta

SEQ ID NO: 98703 - DNA, 15 bp, Homo sapiens
tttccatccacagtt

SEQ ID NO: 98704 - DNA, 15 bp, Homo sapiens
ttttccatccacagt

SEQ ID NO: 98705 - DNA, 15 bp, Homo sapiens
gttttccatccacag

SEQ ID NO: 98706 - DNA, 15 bp, Homo sapiens
agttttccatccaca

SEQ ID NO: 98707 - DNA, 15 bp, Homo sapiens
cagttttccatccac

SEQ ID NO: 98708 - DNA, 15 bp, Homo sapiens
acagttttccatcca

SEQ ID NO: 98709 - DNA, 15 bp, Homo sapiens
aacagttttccatcc

SEQ ID NO: 98710 - DNA, 15 bp, Homo sapiens
caacagttttccatc

SEQ ID NO: 98711 - DNA, 15 bp, Homo sapiens
acaacagttttccat

SEQ ID NO: 98712 - DNA, 15 bp, Homo sapiens
aacaacagttttcca

SEQ ID NO: 98713 - DNA, 15 bp, Homo sapiens
gaacaacagttttcc

SEQ ID NO: 98714 - DNA, 15 bp, Homo sapiens
agaacaacagttttc

SEQ ID NO: 98715 - DNA, 15 bp, Homo sapiens
cagaacaacagtttt

SEQ ID NO: 98716 - DNA, 15 bp, Homo sapiens
ccagaacaacagttt

SEQ ID NO: 98717 - DNA, 15 bp, Homo sapiens
gccagaacaacagtt

SEQ ID NO: 98718 - DNA, 15 bp, Homo sapiens
ggccagaacaacagt

SEQ ID NO: 98719 - DNA, 15 bp, Homo sapiens
aggccagaacaacag

SEQ ID NO: 98720 - DNA, 15 bp, Homo sapiens
caggccagaacaaca

SEQ ID NO: 98721 - DNA, 15 bp, Homo sapiens
tcaggccagaacaac

SEQ ID NO: 98722 - DNA, 15 bp, Homo sapiens
ctcaggccagaacaa

SEQ ID NO: 98723 - DNA, 15 bp, Homo sapiens
actcaggccagaaca

SEQ ID NO: 98724 - DNA, 15 bp, Homo sapiens
cactcaggccagaac

SEQ ID NO: 98725 - DNA, 15 bp, Homo sapiens
ccactcaggccagaa

SEQ ID NO: 98726 - DNA, 15 bp, Homo sapiens
tccactcaggccaga

SEQ ID NO: 98727 - DNA, 15 bp, Homo sapiens
ttccactcaggccag

SEQ ID NO: 98728 - DNA, 15 bp, Homo sapiens
tttccactcaggcca

SEQ ID NO: 98729 - DNA, 15 bp, Homo sapiens
ttttccactcaggcc

SEQ ID NO: 98730 - DNA, 15 bp, Homo sapiens
gttttccactcaggc

SEQ ID NO: 98731 - DNA, 15 bp, Homo sapiens
tgttttccactcagg

SEQ ID NO: 98732 - DNA, 15 bp, Homo sapiens
atgttttccactcag

SEQ ID NO: 98733 - DNA, 15 bp, Homo sapiens
catgttttccactca

SEQ ID NO: 98734 - DNA, 15 bp, Homo sapiens
tcatgttttccactc

SEQ ID NO: 98735 - DNA, 15 bp, Homo sapiens
gtcatgttttccact

SEQ ID NO: 98736 - DNA, 15 bp, Homo sapiens
agtcatgttttccac

SEQ ID NO: 98737 - DNA, 15 bp, Homo sapiens
cagtcatgttttcca

SEQ ID NO: 98738 - DNA, 15 bp, Homo sapiens
acagtcatgttttcc

SEQ ID NO: 98739 - DNA, 15 bp, Homo sapiens
aacagtcatgttttc

SEQ ID NO: 98740 - DNA, 15 bp, Homo sapiens
gaacagtcatgtttt

SEQ ID NO: 98741 - DNA, 15 bp, Homo sapiens
tgaacagtcatgttt

SEQ ID NO: 98742 - DNA, 15 bp, Homo sapiens
ttgaacagtcatgtt

SEQ ID NO: 98743 - DNA, 15 bp, Homo sapiens
tttgaacagtcatgt

SEQ ID NO: 98744 - DNA, 15 bp, Homo sapiens
ttttgaacagtcatg

SEQ ID NO: 98745 - DNA, 15 bp, Homo sapiens
cttttgaacagtcat

SEQ ID NO: 98746 - DNA, 15 bp, Homo sapiens
acttttgaacagtca

SEQ ID NO: 98747 - DNA, 15 bp, Homo sapiens
gacttttgaacagtc

SEQ ID NO: 98748 - DNA, 15 bp, Homo sapiens
ggacttttgaacagt

SEQ ID NO: 98749 - DNA, 15 bp, Homo sapiens
aggacttttgaacag

SEQ ID NO: 98750 - DNA, 15 bp, Homo sapiens
taggacttttgaaca

SEQ ID NO: 98751 - DNA, 15 bp, Homo sapiens
ataggacttttgaac

SEQ ID NO: 98752 - DNA, 15 bp, Homo sapiens
tataggacttttgaa

SEQ ID NO: 98753 - DNA, 15 bp, Homo sapiens
atataggacttttga

SEQ ID NO: 98754 - DNA, 15 bp, Homo sapiens
catataggacttttg

SEQ ID NO: 98755 - DNA, 15 bp, Homo sapiens
acatataggactttt

SEQ ID NO: 98756 - DNA, 15 bp, Homo sapiens
gacatataggacttt

SEQ ID NO: 98757 - DNA, 15 bp, Homo sapiens
ggacatataggactt

SEQ ID NO: 98758 - DNA, 15 bp, Homo sapiens
tggacatataggact

SEQ ID NO: 98759 - DNA, 15 bp, Homo sapiens
ctggacatataggac

SEQ ID NO: 98760 - DNA, 15 bp, Homo sapiens
cctggacatatagga

SEQ ID NO: 98761 - DNA, 15 bp, Homo sapiens
ccctggacatatagg

SEQ ID NO: 98762 - DNA, 15 bp, Homo sapiens
gccctggacatatag

SEQ ID NO: 98763 - DNA, 15 bp, Homo sapiens
agccctggacatata

SEQ ID NO: 98764 - DNA, 15 bp, Homo sapiens
cagccctggacatat

SEQ ID NO: 98765 - DNA, 15 bp, Homo sapiens
acagccctggacata

SEQ ID NO: 98766 - DNA, 15 bp, Homo sapiens
aacagccctggacat

SEQ ID NO: 98767 - DNA, 15 bp, Homo sapiens
caacagccctggaca

SEQ ID NO: 98768 - DNA, 15 bp, Homo sapiens
acaacagccctggac

SEQ ID NO: 98769 - DNA, 15 bp, Homo sapiens
tacaacagccctgga

SEQ ID NO: 98770 - DNA, 15 bp, Homo sapiens
atacaacagccctgg

SEQ ID NO: 98771 - DNA, 15 bp, Homo sapiens
catacaacagccctg

SEQ ID NO: 98772 - DNA, 15 bp, Homo sapiens
tcatacaacagccct

SEQ ID NO: 98773 - DNA, 15 bp, Homo sapiens
atcatacaacagccc

SEQ ID NO: 98774 - DNA, 15 bp, Homo sapiens
aatcatacaacagcc

SEQ ID NO: 98775 - DNA, 15 bp, Homo sapiens
caatcatacaacagc

SEQ ID NO: 98776 - DNA, 15 bp, Homo sapiens
ccaatcatacaacag

SEQ ID NO: 98777 - DNA, 15 bp, Homo sapiens
gccaatcatacaaca

SEQ ID NO: 98778 - DNA, 15 bp, Homo sapiens
agccaatcatacaac

SEQ ID NO: 98779 - DNA, 15 bp, Homo sapiens
aagccaatcatacaa

SEQ ID NO: 98780 - DNA, 15 bp, Homo sapiens
caagccaatcataca

SEQ ID NO: 98781 - DNA, 15 bp, Homo sapiens
acaagccaatcatac

SEQ ID NO: 98782 - DNA, 15 bp, Homo sapiens
gacaagccaatcata

SEQ ID NO: 98783 - DNA, 15 bp, Homo sapiens
agacaagccaatcat

SEQ ID NO: 98784 - DNA, 15 bp, Homo sapiens
aagacaagccaatca

SEQ ID NO: 98785 - DNA, 15 bp, Homo sapiens
gaagacaagccaatc

SEQ ID NO: 98786 - DNA, 15 bp, Homo sapiens
ggaagacaagccaat

SEQ ID NO: 98787 - DNA, 15 bp, Homo sapiens
gggaagacaagccaa

SEQ ID NO: 98788 - DNA, 15 bp, Homo sapiens
ggggaagacaagcca

SEQ ID NO: 98789 - DNA, 15 bp, Homo sapiens
gggggaagacaagcc

SEQ ID NO: 98790 - DNA, 15 bp, Homo sapiens
tgggggaagacaagc

SEQ ID NO: 98791 - DNA, 15 bp, Homo sapiens
ctgggggaagacaag

SEQ ID NO: 98792 - DNA, 15 bp, Homo sapiens
cctgggggaagacaa

SEQ ID NO: 98793 - DNA, 15 bp, Homo sapiens
ccctgggggaagaca

SEQ ID NO: 98794 - DNA, 15 bp, Homo sapiens
tccctgggggaagac

SEQ ID NO: 98795 - DNA, 15 bp, Homo sapiens
gtccctgggggaaga

SEQ ID NO: 98796 - DNA, 15 bp, Homo sapiens
tgtccctgggggaag

SEQ ID NO: 98797 - DNA, 15 bp, Homo sapiens
ctgtccctgggggaa

SEQ ID NO: 98798 - DNA, 15 bp, Homo sapiens
gctgtccctggggga

SEQ ID NO: 98799 - DNA, 15 bp, Homo sapiens
tgctgtccctggggg

SEQ ID NO: 98800 - DNA, 15 bp, Homo sapiens
ctgctgtccctgggg

SEQ ID NO: 98801 - DNA, 15 bp, Homo sapiens
tctgctgtccctggg

SEQ ID NO: 98802 - DNA, 15 bp, Homo sapiens
ctctgctgtccctgg

SEQ ID NO: 98803 - DNA, 15 bp, Homo sapiens
gctctgctgtccctg

SEQ ID NO: 98804 - DNA, 15 bp, Homo sapiens
tgctctgctgtccct

SEQ ID NO: 98805 - DNA, 15 bp, Homo sapiens
ttgctctgctgtccc

SEQ ID NO: 98806 - DNA, 15 bp, Homo sapiens
gttgctctgctgtcc

SEQ ID NO: 98807 - DNA, 15 bp, Homo sapiens
ggttgctctgctgtc

SEQ ID NO: 98808 - DNA, 15 bp, Homo sapiens
aggttgctctgctgt

SEQ ID NO: 98809 - DNA, 15 bp, Homo sapiens
aaggttgctctgctg

SEQ ID NO: 98810 - DNA, 15 bp, Homo sapiens
caaggttgctctgct

SEQ ID NO: 98811 - DNA, 15 bp, Homo sapiens
ccaaggttgctctgc

SEQ ID NO: 98812 - DNA, 15 bp, Homo sapiens
tccaaggttgctctg

SEQ ID NO: 98813 - DNA, 15 bp, Homo sapiens
ttccaaggttgctct

SEQ ID NO: 98814 - DNA, 15 bp, Homo sapiens
tttccaaggttgctc

SEQ ID NO: 98815 - DNA, 15 bp, Homo sapiens
ttttccaaggttgct

SEQ ID NO: 98816 - DNA, 15 bp, Homo sapiens
cttttccaaggttgc

SEQ ID NO: 98817 - DNA, 15 bp, Homo sapiens
gcttttccaaggttg

SEQ ID NO: 98818 - DNA, 15 bp, Homo sapiens
tgcttttccaaggtt

SEQ ID NO: 98819 - DNA, 15 bp, Homo sapiens
ctgcttttccaaggt

SEQ ID NO: 98820 - DNA, 15 bp, Homo sapiens
tctgcttttccaagg

SEQ ID NO: 98821 - DNA, 15 bp, Homo sapiens
ctctgcttttccaag

SEQ ID NO: 98822 - DNA, 15 bp, Homo sapiens
cctctgcttttccaa

SEQ ID NO: 98823 - DNA, 15 bp, Homo sapiens
ccctctgcttttcca

SEQ ID NO: 98824 - DNA, 15 bp, Homo sapiens
tccctctgcttttcc

SEQ ID NO: 98825 - DNA, 15 bp, Homo sapiens
ttccctctgcttttc

SEQ ID NO: 98826 - DNA, 15 bp, Homo sapiens
cttccctctgctttt

SEQ ID NO: 98827 - DNA, 15 bp, Homo sapiens
gcttccctctgcttt

SEQ ID NO: 98828 - DNA, 15 bp, Homo sapiens
agcttccctctgctt

SEQ ID NO: 98829 - DNA, 15 bp, Homo sapiens
aagcttccctctgct

SEQ ID NO: 98830 - DNA, 15 bp, Homo sapiens
gaagcttccctctgc

SEQ ID NO: 98831 - DNA, 15 bp, Homo sapiens
agaagcttccctctg

SEQ ID NO: 98832 - DNA, 15 bp, Homo sapiens
gagaagcttccctct

SEQ ID NO: 98833 - DNA, 15 bp, Homo sapiens
ggagaagcttccctc

SEQ ID NO: 98834 - DNA, 15 bp, Homo sapiens
gggagaagcttccct

SEQ ID NO: 98835 - DNA, 15 bp, Homo sapiens
agggagaagcttccc

SEQ ID NO: 98836 - DNA, 15 bp, Homo sapiens
aagggagaagcttcc

SEQ ID NO: 98837 - DNA, 15 bp, Homo sapiens
caagggagaagcttc

SEQ ID NO: 98838 - DNA, 15 bp, Homo sapiens
ccaagggagaagctt

SEQ ID NO: 98839 - DNA, 15 bp, Homo sapiens
gccaagggagaagct

SEQ ID NO: 98840 - DNA, 15 bp, Homo sapiens
tgccaagggagaagc

SEQ ID NO: 98841 - DNA, 15 bp, Homo sapiens
gtgccaagggagaag

SEQ ID NO: 98842 - DNA, 15 bp, Homo sapiens
tgtgccaagggagaa

SEQ ID NO: 98843 - DNA, 15 bp, Homo sapiens
gtgtgccaagggaga

SEQ ID NO: 98844 - DNA, 15 bp, Homo sapiens
tgtgtgccaagggag

SEQ ID NO: 98845 - DNA, 15 bp, Homo sapiens
gtgtgtgccaaggga

SEQ ID NO: 98846 - DNA, 15 bp, Homo sapiens
agtgtgtgccaaggg

SEQ ID NO: 98847 - DNA, 15 bp, Homo sapiens
cagtgtgtgccaagg

SEQ ID NO: 98848 - DNA, 15 bp, Homo sapiens
ccagtgtgtgccaag

SEQ ID NO: 98849 - DNA, 15 bp, Homo sapiens
cccagtgtgtgccaa

SEQ ID NO: 98850 - DNA, 15 bp, Homo sapiens
ccccagtgtgtgcca

SEQ ID NO: 98851 - DNA, 15 bp, Homo sapiens
accccagtgtgtgcc

SEQ ID NO: 98852 - DNA, 15 bp, Homo sapiens
caccccagtgtgtgc

SEQ ID NO: 98853 - DNA, 15 bp, Homo sapiens
ccaccccagtgtgtg

SEQ ID NO: 98854 - DNA, 15 bp, Homo sapiens
gccaccccagtgtgt

SEQ ID NO: 98855 - DNA, 15 bp, Homo sapiens
agccaccccagtgtg

SEQ ID NO: 98856 - DNA, 15 bp, Homo sapiens
cagccaccccagtgt

SEQ ID NO: 98857 - DNA, 15 bp, Homo sapiens
acagccaccccagtg

SEQ ID NO: 98858 - DNA, 15 bp, Homo sapiens
tacagccaccccagt

SEQ ID NO: 98859 - DNA, 15 bp, Homo sapiens
gtacagccaccccag

SEQ ID NO: 98860 - DNA, 15 bp, Homo sapiens
ggtacagccacccca

SEQ ID NO: 98861 - DNA, 15 bp, Homo sapiens
tggtacagccacccc

SEQ ID NO: 98862 - DNA, 15 bp, Homo sapiens
atggtacagccaccc

SEQ ID NO: 98863 - DNA, 15 bp, Homo sapiens
catggtacagccacc

SEQ ID NO: 98864 - DNA, 15 bp, Homo sapiens
gcatggtacagccac

SEQ ID NO: 98865 - DNA, 15 bp, Homo sapiens
ggcatggtacagcca

SEQ ID NO: 98866 - DNA, 15 bp, Homo sapiens
aggcatggtacagcc

SEQ ID NO: 98867 - DNA, 15 bp, Homo sapiens
caggcatggtacagc

SEQ ID NO: 98868 - DNA, 15 bp, Homo sapiens
gcaggcatggtacag

SEQ ID NO: 98869 - DNA, 15 bp, Homo sapiens
tgcaggcatggtaca

SEQ ID NO: 98870 - DNA, 15 bp, Homo sapiens
ctgcaggcatggtac

SEQ ID NO: 98871 - DNA, 15 bp, Homo sapiens
tctgcaggcatggta

SEQ ID NO: 98872 - DNA, 15 bp, Homo sapiens
atctgcaggcatggt

SEQ ID NO: 98873 - DNA, 15 bp, Homo sapiens
catctgcaggcatgg

SEQ ID NO: 98874 - DNA, 15 bp, Homo sapiens
gcatctgcaggcatg

SEQ ID NO: 98875 - DNA, 15 bp, Homo sapiens
agcatctgcaggcat

SEQ ID NO: 98876 - DNA, 15 bp, Homo sapiens
gagcatctgcaggca

SEQ ID NO: 98877 - DNA, 15 bp, Homo sapiens
ggagcatctgcaggc

SEQ ID NO: 98878 - DNA, 15 bp, Homo sapiens
gggagcatctgcagg

SEQ ID NO: 98879 - DNA, 15 bp, Homo sapiens
tgggagcatctgcag

SEQ ID NO: 98880 - DNA, 15 bp, Homo sapiens
ttgggagcatctgca

SEQ ID NO: 98881 - DNA, 15 bp, Homo sapiens
tttgggagcatctgc

SEQ ID NO: 98882 - DNA, 15 bp, Homo sapiens
atttgggagcatctg

SEQ ID NO: 98883 - DNA, 15 bp, Homo sapiens
tatttgggagcatct

SEQ ID NO: 98884 - DNA, 15 bp, Homo sapiens
ctatttgggagcatc

SEQ ID NO: 98885 - DNA, 15 bp, Homo sapiens
tctatttgggagcat

SEQ ID NO: 98886 - DNA, 15 bp, Homo sapiens
ctctatttgggagca

SEQ ID NO: 98887 - DNA, 15 bp, Homo sapiens
cctctatttgggagc

SEQ ID NO: 98888 - DNA, 15 bp, Homo sapiens
gcctctatttgggag

SEQ ID NO: 98889 - DNA, 15 bp, Homo sapiens
tgcctctatttggga

SEQ ID NO: 98890 - DNA, 15 bp, Homo sapiens
gtgcctctatttggg

SEQ ID NO: 98891 - DNA, 15 bp, Homo sapiens
agtgcctctatttgg

SEQ ID NO: 98892 - DNA, 15 bp, Homo sapiens
gagtgcctctatttg

SEQ ID NO: 98893 - DNA, 15 bp, Homo sapiens
ggagtgcctctattt

SEQ ID NO: 98894 - DNA, 15 bp, Homo sapiens
tggagtgcctctatt

SEQ ID NO: 98895 - DNA, 15 bp, Homo sapiens
ttggagtgcctctat

SEQ ID NO: 98896 - DNA, 15 bp, Homo sapiens
cttggagtgcctcta

SEQ ID NO: 98897 - DNA, 15 bp, Homo sapiens
gcttggagtgcctct

SEQ ID NO: 98898 - DNA, 15 bp, Homo sapiens
tgcttggagtgcctc

SEQ ID NO: 98899 - DNA, 15 bp, Homo sapiens
gtgcttggagtgcct

SEQ ID NO: 98900 - DNA, 15 bp, Homo sapiens
agtgcttggagtgcc

SEQ ID NO: 98901 - DNA, 15 bp, Homo sapiens
aagtgcttggagtgc

SEQ ID NO: 98902 - DNA, 15 bp, Homo sapiens
aaagtgcttggagtg

SEQ ID NO: 98903 - DNA, 15 bp, Homo sapiens
caaagtgcttggagt

SEQ ID NO: 98904 - DNA, 15 bp, Homo sapiens
acaaagtgcttggag

SEQ ID NO: 98905 - DNA, 15 bp, Homo sapiens
aacaaagtgcttgga

SEQ ID NO: 98906 - DNA, 15 bp, Homo sapiens
aaacaaagtgcttgg

SEQ ID NO: 98907 - DNA, 15 bp, Homo sapiens
gaaacaaagtgcttg

SEQ ID NO: 98908 - DNA, 15 bp, Homo sapiens
agaaacaaagtgctt

SEQ ID NO: 98909 - DNA, 15 bp, Homo sapiens
aagaaacaaagtgct

SEQ ID NO: 98910 - DNA, 15 bp, Homo sapiens
taagaaacaaagtgc

SEQ ID NO: 98911 - DNA, 15 bp, Homo sapiens
ctaagaaacaaagtg

SEQ ID NO: 98912 - DNA, 15 bp, Homo sapiens
gctaagaaacaaagt

SEQ ID NO: 98913 - DNA, 15 bp, Homo sapiens
cgctaagaaacaaag

SEQ ID NO: 98914 - DNA, 15 bp, Homo sapiens
acgctaagaaacaaa

SEQ ID NO: 98915 - DNA, 15 bp, Homo sapiens
cacgctaagaaacaa

SEQ ID NO: 98916 - DNA, 15 bp, Homo sapiens
tcacgctaagaaaca

SEQ ID NO: 98917 - DNA, 15 bp, Homo sapiens
atcacgctaagaaac

SEQ ID NO: 98918 - DNA, 15 bp, Homo sapiens
aatcacgctaagaaa

SEQ ID NO: 98919 - DNA, 15 bp, Homo sapiens
caatcacgctaagaa

SEQ ID NO: 98920 - DNA, 15 bp, Homo sapiens
tcaatcacgctaaga

SEQ ID NO: 98921 - DNA, 15 bp, Homo sapiens
ctcaatcacgctaag

SEQ ID NO: 98922 - DNA, 15 bp, Homo sapiens
cctcaatcacgctaa

SEQ ID NO: 98923 - DNA, 15 bp, Homo sapiens
gcctcaatcacgcta

SEQ ID NO: 98924 - DNA, 15 bp, Homo sapiens
agcctcaatcacgct

SEQ ID NO: 98925 - DNA, 15 bp, Homo sapiens
cagcctcaatcacgc

SEQ ID NO: 98926 - DNA, 15 bp, Homo sapiens
ccagcctcaatcacg

SEQ ID NO: 98927 - DNA, 15 bp, Homo sapiens
tccagcctcaatcac

SEQ ID NO: 98928 - DNA, 15 bp, Homo sapiens
atccagcctcaatca

SEQ ID NO: 98929 - DNA, 15 bp, Homo sapiens
tatccagcctcaatc

SEQ ID NO: 98930 - DNA, 15 bp, Homo sapiens
atatccagcctcaat

SEQ ID NO: 98931 - DNA, 15 bp, Homo sapiens
catatccagcctcaa

SEQ ID NO: 98932 - DNA, 15 bp, Homo sapiens
acatatccagcctca

SEQ ID NO: 98933 - DNA, 15 bp, Homo sapiens
cacatatccagcctc

SEQ ID NO: 98934 - DNA, 15 bp, Homo sapiens
tcacatatccagcct

SEQ ID NO: 98935 - DNA, 15 bp, Homo sapiens
atcacatatccagcc

SEQ ID NO: 98936 - DNA, 15 bp, Homo sapiens
aatcacatatccagc

SEQ ID NO: 98937 - DNA, 15 bp, Homo sapiens
aaatcacatatccag

SEQ ID NO: 98938 - DNA, 15 bp, Homo sapiens
caaatcacatatcca

SEQ ID NO: 98939 - DNA, 15 bp, Homo sapiens
tcaaatcacatatcc

SEQ ID NO: 98940 - DNA, 15 bp, Homo sapiens
atcaaatcacatatc

SEQ ID NO: 98941 - DNA, 15 bp, Homo sapiens
gatcaaatcacatat

SEQ ID NO: 98942 - DNA, 15 bp, Homo sapiens
agatcaaatcacata

SEQ ID NO: 98943 - DNA, 15 bp, Homo sapiens
aagatcaaatcacat

SEQ ID NO: 98944 - DNA, 15 bp, Homo sapiens
aaagatcaaatcaca

SEQ ID NO: 98945 - DNA, 15 bp, Homo sapiens
gaaagatcaaatcac

SEQ ID NO: 98946 - DNA, 15 bp, Homo sapiens
agaaagatcaaatca

SEQ ID NO: 98947 - DNA, 15 bp, Homo sapiens
gagaaagatcaaatc

SEQ ID NO: 98948 - DNA, 15 bp, Homo sapiens
agagaaagatcaaat

SEQ ID NO: 98949 - DNA, 15 bp, Homo sapiens
cagagaaagatcaaa

SEQ ID NO: 98950 - DNA, 15 bp, Homo sapiens
ccagagaaagatcaa

SEQ ID NO: 98951 - DNA, 15 bp, Homo sapiens
tccagagaaagatca

SEQ ID NO: 98952 - DNA, 15 bp, Homo sapiens
ttccagagaaagatc

SEQ ID NO: 98953 - DNA, 15 bp, Homo sapiens
gttccagagaaagat

SEQ ID NO: 98954 - DNA, 15 bp, Homo sapiens
tgttccagagaaaga

SEQ ID NO: 98955 - DNA, 15 bp, Homo sapiens
atgttccagagaaag

SEQ ID NO: 98956 - DNA, 15 bp, Homo sapiens
aatgttccagagaaa

SEQ ID NO: 98957 - DNA, 15 bp, Homo sapiens
gaatgttccagagaa

SEQ ID NO: 98958 - DNA, 15 bp, Homo sapiens
agaatgttccagaga

SEQ ID NO: 98959 - DNA, 15 bp, Homo sapiens
aagaatgttccagag

SEQ ID NO: 98960 - DNA, 15 bp, Homo sapiens
aaagaatgttccaga

SEQ ID NO: 98961 - DNA, 15 bp, Homo sapiens
gaaagaatgttccag

SEQ ID NO: 98962 - DNA, 15 bp, Homo sapiens
agaaagaatgttcca

SEQ ID NO: 98963 - DNA, 15 bp, Homo sapiens
tagaaagaatgttcc

SEQ ID NO: 98964 - DNA, 15 bp, Homo sapiens
ttagaaagaatgttc

SEQ ID NO: 98965 - DNA, 15 bp, Homo sapiens
attagaaagaatgtt

SEQ ID NO: 98966 - DNA, 15 bp, Homo sapiens
gattagaaagaatgt

SEQ ID NO: 98967 - DNA, 15 bp, Homo sapiens
tgattagaaagaatg

SEQ ID NO: 98968 - DNA, 15 bp, Homo sapiens
atgattagaaagaat

SEQ ID NO: 98969 - DNA, 15 bp, Homo sapiens
gatgattagaaagaa

SEQ ID NO: 98970 - DNA, 15 bp, Homo sapiens
agatgattagaaaga

SEQ ID NO: 98971 - DNA, 15 bp, Homo sapiens
aagatgattagaaag

SEQ ID NO: 98972 - DNA, 15 bp, Homo sapiens
aaagatgattagaaa

SEQ ID NO: 98973 - DNA, 15 bp, Homo sapiens
caaagatgattagaa

SEQ ID NO: 98974 - DNA, 15 bp, Homo sapiens
acaaagatgattaga

SEQ ID NO: 98975 - DNA, 15 bp, Homo sapiens
cacaaagatgattag

SEQ ID NO: 98976 - DNA, 15 bp, Homo sapiens
acacaaagatgatta

SEQ ID NO: 98977 - DNA, 15 bp, Homo sapiens
aacacaaagatgatt

SEQ ID NO: 98978 - DNA, 15 bp, Homo sapiens
gaacacaaagatgat

SEQ ID NO: 98979 - DNA, 15 bp, Homo sapiens
tgaacacaaagatga

SEQ ID NO: 98980 - DNA, 15 bp, Homo sapiens
atgaacacaaagatg

SEQ ID NO: 98981 - DNA, 15 bp, Homo sapiens
aatgaacacaaagat

SEQ ID NO: 98982 - DNA, 15 bp, Homo sapiens
gaatgaacacaaaga

SEQ ID NO: 98983 - DNA, 15 bp, Homo sapiens
ggaatgaacacaaag

SEQ ID NO: 98984 - DNA, 15 bp, Homo sapiens
gggaatgaacacaaa

SEQ ID NO: 98985 - DNA, 15 bp, Homo sapiens
agggaatgaacacaa

SEQ ID NO: 98986 - DNA, 15 bp, Homo sapiens
cagggaatgaacaca

SEQ ID NO: 98987 - DNA, 15 bp, Homo sapiens
tcagggaatgaacac

SEQ ID NO: 98988 - DNA, 15 bp, Homo sapiens
ttcagggaatgaaca

SEQ ID NO: 98989 - DNA, 15 bp, Homo sapiens
tttcagggaatgaac

SEQ ID NO: 98990 - DNA, 15 bp, Homo sapiens
ttttcagggaatgaa

SEQ ID NO: 98991 - DNA, 15 bp, Homo sapiens
attttcagggaatga

SEQ ID NO: 98992 - DNA, 15 bp, Homo sapiens
cattttcagggaatg

SEQ ID NO: 98993 - DNA, 15 bp, Homo sapiens
tcattttcagggaat

SEQ ID NO: 98994 - DNA, 15 bp, Homo sapiens
ttcattttcagggaa

SEQ ID NO: 98995 - DNA, 15 bp, Homo sapiens
cttcattttcaggga

SEQ ID NO: 98996 - DNA, 15 bp, Homo sapiens
tcttcattttcaggg

SEQ ID NO: 98997 - DNA, 15 bp, Homo sapiens
ctcttcattttcagg

SEQ ID NO: 98998 - DNA, 15 bp, Homo sapiens
actcttcattttcag

SEQ ID NO: 98999 - DNA, 15 bp, Homo sapiens
cactcttcattttca

SEQ ID NO: 99000 - DNA, 15 bp, Homo sapiens
acactcttcattttc

SEQ ID NO: 99001 - DNA, 15 bp, Homo sapiens
cacactcttcatttt

SEQ ID NO: 99002 - DNA, 15 bp, Homo sapiens
ccacactcttcattt

SEQ ID NO: 99003 - DNA, 15 bp, Homo sapiens
tccacactcttcatt

SEQ ID NO: 99004 - DNA, 15 bp, Homo sapiens
gtccacactcttcat

SEQ ID NO: 99005 - DNA, 15 bp, Homo sapiens
tgtccacactcttca

SEQ ID NO: 99006 - DNA, 15 bp, Homo sapiens
gtgtccacactcttc

SEQ ID NO: 99007 - DNA, 15 bp, Homo sapiens
tgtgtccacactctt

SEQ ID NO: 99008 - DNA, 15 bp, Homo sapiens
ctgtgtccacactct

SEQ ID NO: 99009 - DNA, 15 bp, Homo sapiens
gctgtgtccacactc

SEQ ID NO: 99010 - DNA, 15 bp, Homo sapiens
agctgtgtccacact

SEQ ID NO: 99011 - DNA, 15 bp, Homo sapiens
aagctgtgtccacac

SEQ ID NO: 99012 - DNA, 15 bp, Homo sapiens
aaagctgtgtccaca

SEQ ID NO: 99013 - DNA, 15 bp, Homo sapiens
taaagctgtgtccac

SEQ ID NO: 99014 - DNA, 15 bp, Homo sapiens
ttaaagctgtgtcca

SEQ ID NO: 99015 - DNA, 15 bp, Homo sapiens
tttaaagctgtgtcc

SEQ ID NO: 99016 - DNA, 15 bp, Homo sapiens
ttttaaagctgtgtc

SEQ ID NO: 99017 - DNA, 15 bp, Homo sapiens
attttaaagctgtgt

SEQ ID NO: 99018 - DNA, 15 bp, Homo sapiens
gattttaaagctgtg

SEQ ID NO: 99019 - DNA, 15 bp, Homo sapiens
ggattttaaagctgt

SEQ ID NO: 99020 - DNA, 15 bp, Homo sapiens
gggattttaaagctg

SEQ ID NO: 99021 - DNA, 15 bp, Homo sapiens
ggggattttaaagct

SEQ ID NO: 99022 - DNA, 15 bp, Homo sapiens
tggggattttaaagc

SEQ ID NO: 99023 - DNA, 15 bp, Homo sapiens
ttggggattttaaag

SEQ ID NO: 99024 - DNA, 15 bp, Homo sapiens
cttggggattttaaa

SEQ ID NO: 99025 - DNA, 15 bp, Homo sapiens
ccttggggattttaa

SEQ ID NO: 99026 - DNA, 15 bp, Homo sapiens
accttggggatttta

SEQ ID NO: 99027 - DNA, 15 bp, Homo sapiens
taccttggggatttt

SEQ ID NO: 99028 - DNA, 15 bp, Homo sapiens
ctaccttggggattt

SEQ ID NO: 99029 - DNA, 15 bp, Homo sapiens
gctaccttggggatt

SEQ ID NO: 99030 - DNA, 15 bp, Homo sapiens
tgctaccttggggat

SEQ ID NO: 99031 - DNA, 15 bp, Homo sapiens
ttgctaccttgggga

SEQ ID NO: 99032 - DNA, 15 bp, Homo sapiens
gttgctaccttgggg

SEQ ID NO: 99033 - DNA, 15 bp, Homo sapiens
agttgctaccttggg

SEQ ID NO: 99034 - DNA, 15 bp, Homo sapiens
tagttgctaccttgg

SEQ ID NO: 99035 - DNA, 15 bp, Homo sapiens
ctagttgctaccttg

SEQ ID NO: 99036 - DNA, 15 bp, Homo sapiens
cctagttgctacctt

SEQ ID NO: 99037 - DNA, 15 bp, Homo sapiens
acctagttgctacct

SEQ ID NO: 99038 - DNA, 15 bp, Homo sapiens
gacctagttgctacc

SEQ ID NO: 99039 - DNA, 15 bp, Homo sapiens
tgacctagttgctac

SEQ ID NO: 99040 - DNA, 15 bp, Homo sapiens
atgacctagttgcta

SEQ ID NO: 99041 - DNA, 15 bp, Homo sapiens
tatgacctagttgct

SEQ ID NO: 99042 - DNA, 15 bp, Homo sapiens
ctatgacctagttgc

SEQ ID NO: 99043 - DNA, 15 bp, Homo sapiens
actatgacctagttg

SEQ ID NO: 99044 - DNA, 15 bp, Homo sapiens
aactatgacctagtt

SEQ ID NO: 99045 - DNA, 15 bp, Homo sapiens
gaactatgacctagt

SEQ ID NO: 99046 - DNA, 15 bp, Homo sapiens
ggaactatgacctag

SEQ ID NO: 99047 - DNA, 15 bp, Homo sapiens
aggaactatgaccta

SEQ ID NO: 99048 - DNA, 15 bp, Homo sapiens
aaggaactatgacct

SEQ ID NO: 99049 - DNA, 15 bp, Homo sapiens
taaggaactatgacc

SEQ ID NO: 99050 - DNA, 15 bp, Homo sapiens
gtaaggaactatgac

SEQ ID NO: 99051 - DNA, 15 bp, Homo sapiens
tgtaaggaactatga

SEQ ID NO: 99052 - DNA, 15 bp, Homo sapiens
gtgtaaggaactatg

SEQ ID NO: 99053 - DNA, 15 bp, Homo sapiens
tgtgtaaggaactat

SEQ ID NO: 99054 - DNA, 15 bp, Homo sapiens
gtgtgtaaggaacta

SEQ ID NO: 99055 - DNA, 15 bp, Homo sapiens
cgtgtgtaaggaact

SEQ ID NO: 99056 - DNA, 15 bp, Homo sapiens
ccgtgtgtaaggaac

SEQ ID NO: 99057 - DNA, 15 bp, Homo sapiens
tccgtgtgtaaggaa

SEQ ID NO: 99058 - DNA, 15 bp, Homo sapiens
atccgtgtgtaagga

SEQ ID NO: 99059 - DNA, 15 bp, Homo sapiens
tatccgtgtgtaagg

SEQ ID NO: 99060 - DNA, 15 bp, Homo sapiens
ctatccgtgtgtaag

SEQ ID NO: 99061 - DNA, 15 bp, Homo sapiens
tctatccgtgtgtaa

SEQ ID NO: 99062 - DNA, 15 bp, Homo sapiens
atctatccgtgtgta

SEQ ID NO: 99063 - DNA, 15 bp, Homo sapiens
catctatccgtgtgt

SEQ ID NO: 99064 - DNA, 15 bp, Homo sapiens
tcatctatccgtgtg

SEQ ID NO: 99065 - DNA, 15 bp, Homo sapiens
ttcatctatccgtgt

SEQ ID NO: 99066 - DNA, 15 bp, Homo sapiens
tttcatctatccgtg

SEQ ID NO: 99067 - DNA, 15 bp, Homo sapiens
ttttcatctatccgt

SEQ ID NO: 99068 - DNA, 15 bp, Homo sapiens
tttttcatctatccg

SEQ ID NO: 99069 - DNA, 15 bp, Homo sapiens
gtttttcatctatcc

SEQ ID NO: 99070 - DNA, 15 bp, Homo sapiens
tgtttttcatctatc

SEQ ID NO: 99071 - DNA, 15 bp, Homo sapiens
ctgtttttcatctat

SEQ ID NO: 99072 - DNA, 15 bp, Homo sapiens
tctgtttttcatcta

SEQ ID NO: 99073 - DNA, 15 bp, Homo sapiens
atctgtttttcatct

SEQ ID NO: 99074 - DNA, 15 bp, Homo sapiens
gatctgtttttcatc

SEQ ID NO: 99075 - DNA, 15 bp, Homo sapiens
tgatctgtttttcat

SEQ ID NO: 99076 - DNA, 15 bp, Homo sapiens
ctgatctgtttttca

SEQ ID NO: 99077 - DNA, 15 bp, Homo sapiens
tctgatctgtttttc

SEQ ID NO: 99078 - DNA, 15 bp, Homo sapiens
gtctgatctgttttt

SEQ ID NO: 99079 - DNA, 15 bp, Homo sapiens
agtctgatctgtttt

SEQ ID NO: 99080 - DNA, 15 bp, Homo sapiens
cagtctgatctgttt

SEQ ID NO: 99081 - DNA, 15 bp, Homo sapiens
ccagtctgatctgtt

SEQ ID NO: 99082 - DNA, 15 bp, Homo sapiens
cccagtctgatctgt

SEQ ID NO: 99083 - DNA, 15 bp, Homo sapiens
tcccagtctgatctg

SEQ ID NO: 99084 - DNA, 15 bp, Homo sapiens
ttcccagtctgatct

SEQ ID NO: 99085 - DNA, 15 bp, Homo sapiens
cttcccagtctgatc

SEQ ID NO: 99086 - DNA, 15 bp, Homo sapiens
acttcccagtctgat

SEQ ID NO: 99087 - DNA, 15 bp, Homo sapiens
cacttcccagtctga

SEQ ID NO: 99088 - DNA, 15 bp, Homo sapiens
ccacttcccagtctg

SEQ ID NO: 99089 - DNA, 15 bp, Homo sapiens
gccacttcccagtct

SEQ ID NO: 99090 - DNA, 15 bp, Homo sapiens
ggccacttcccagtc

SEQ ID NO: 99091 - DNA, 15 bp, Homo sapiens
gggccacttcccagt

SEQ ID NO: 99092 - DNA, 15 bp, Homo sapiens
agggccacttcccag

SEQ ID NO: 99093 - DNA, 15 bp, Homo sapiens
aagggccacttccca

SEQ ID NO: 99094 - DNA, 15 bp, Homo sapiens
caagggccacttccc

SEQ ID NO: 99095 - DNA, 15 bp, Homo sapiens
tcaagggccacttcc

SEQ ID NO: 99096 - DNA, 15 bp, Homo sapiens
gtcaagggccacttc

SEQ ID NO: 99097 - DNA, 15 bp, Homo sapiens
ggtcaagggccactt

SEQ ID NO: 99098 - DNA, 15 bp, Homo sapiens
aggtcaagggccact

SEQ ID NO: 99099 - DNA, 15 bp, Homo sapiens
aaggtcaagggccac

SEQ ID NO: 99100 - DNA, 15 bp, Homo sapiens
aaaggtcaagggcca

SEQ ID NO: 99101 - DNA, 15 bp, Homo sapiens
aaaaggtcaagggcc

SEQ ID NO: 99102 - DNA, 15 bp, Homo sapiens
aaaaaggtcaagggc

SEQ ID NO: 99103 - DNA, 15 bp, Homo sapiens
aaaaaaggtcaaggg

SEQ ID NO: 99104 - DNA, 15 bp, Homo sapiens
gaaaaaaggtcaagg

SEQ ID NO: 99105 - DNA, 15 bp, Homo sapiens
agaaaaaaggtcaag

SEQ ID NO: 99106 - DNA, 15 bp, Homo sapiens
aagaaaaaaggtcaa

SEQ ID NO: 99107 - DNA, 15 bp, Homo sapiens
gaagaaaaaaggtca

SEQ ID NO: 99108 - DNA, 15 bp, Homo sapiens
agaagaaaaaaggtc

SEQ ID NO: 99109 - DNA, 15 bp, Homo sapiens
cagaagaaaaaaggt

SEQ ID NO: 99110 - DNA, 15 bp, Homo sapiens
acagaagaaaaaagg

SEQ ID NO: 99111 - DNA, 15 bp, Homo sapiens
tacagaagaaaaaag

SEQ ID NO: 99112 - DNA, 15 bp, Homo sapiens
ctacagaagaaaaaa

SEQ ID NO: 99113 - DNA, 15 bp, Homo sapiens
tctacagaagaaaaa

SEQ ID NO: 99114 - DNA, 15 bp, Homo sapiens
tatctacagaagaaa

SEQ ID NO: 99115 - DNA, 15 bp, Homo sapiens
ttatctacagaagaa

SEQ ID NO: 99116 - DNA, 15 bp, Homo sapiens
cttatctacagaaga

SEQ ID NO: 99117 - DNA, 15 bp, Homo sapiens
tcttatctacagaag

SEQ ID NO: 99118 - DNA, 15 bp, Homo sapiens
ctcttatctacagaa

SEQ ID NO: 99119 - DNA, 15 bp, Homo sapiens
gctcttatctacaga

SEQ ID NO: 99120 - DNA, 15 bp, Homo sapiens
tgctcttatctacag

SEQ ID NO: 99121 - DNA, 15 bp, Homo sapiens
atgctcttatctaca

SEQ ID NO: 99122 - DNA, 15 bp, Homo sapiens
aatgctcttatctac

SEQ ID NO: 99123 - DNA, 15 bp, Homo sapiens
caatgctcttatcta

SEQ ID NO: 99124 - DNA, 15 bp, Homo sapiens
tcaatgctcttatct

SEQ ID NO: 99125 - DNA, 15 bp, Homo sapiens
atcaatgctcttatc

SEQ ID NO: 99126 - DNA, 15 bp, Homo sapiens
catcaatgctcttat

SEQ ID NO: 99127 - DNA, 15 bp, Homo sapiens
acatcaatgctctta

SEQ ID NO: 99128 - DNA, 15 bp, Homo sapiens
aacatcaatgctctt

SEQ ID NO: 99129 - DNA, 15 bp, Homo sapiens
taacatcaatgctct

SEQ ID NO: 99130 - DNA, 15 bp, Homo sapiens
ataacatcaatgctc

SEQ ID NO: 99131 - DNA, 15 bp, Homo sapiens
aataacatcaatgct

SEQ ID NO: 99132 - DNA, 15 bp, Homo sapiens
taataacatcaatgc

SEQ ID NO: 99133 - DNA, 15 bp, Homo sapiens
gtaataacatcaatg

SEQ ID NO: 99134 - DNA, 15 bp, Homo sapiens
cgtaataacatcaat

SEQ ID NO: 99135 - DNA, 15 bp, Homo sapiens
ccgtaataacatcaa

SEQ ID NO: 99136 - DNA, 15 bp, Homo sapiens
cccgtaataacatca

SEQ ID NO: 99137 - DNA, 15 bp, Homo sapiens
tcccgtaataacatc

SEQ ID NO: 99138 - DNA, 15 bp, Homo sapiens
ttcccgtaataacat

SEQ ID NO: 99139 - DNA, 15 bp, Homo sapiens
cttcccgtaataaca

SEQ ID NO: 99140 - DNA, 15 bp, Homo sapiens
tcttcccgtaataac

SEQ ID NO: 99141 - DNA, 15 bp, Homo sapiens
ttcttcccgtaataa

SEQ ID NO: 99142 - DNA, 15 bp, Homo sapiens
cttcttcccgtaata

SEQ ID NO: 99143 - DNA, 15 bp, Homo sapiens
gcttcttcccgtaat

SEQ ID NO: 99144 - DNA, 15 bp, Homo sapiens
ggcttcttcccgtaa

SEQ ID NO: 99145 - DNA, 15 bp, Homo sapiens
aggcttcttcccgta

SEQ ID NO: 99146 - DNA, 15 bp, Homo sapiens
aaggcttcttcccgt

SEQ ID NO: 99147 - DNA, 15 bp, Homo sapiens
aaaggcttcttcccg

SEQ ID NO: 99148 - DNA, 15 bp, Homo sapiens
caaaggcttcttccc

SEQ ID NO: 99149 - DNA, 15 bp, Homo sapiens
tcaaaggcttcttcc

SEQ ID NO: 99150 - DNA, 15 bp, Homo sapiens
ctcaaaggcttcttc

SEQ ID NO: 99151 - DNA, 15 bp, Homo sapiens
cctcaaaggcttctt

SEQ ID NO: 99152 - DNA, 15 bp, Homo sapiens
gcctcaaaggcttct

SEQ ID NO: 99153 - DNA, 15 bp, Homo sapiens
agcctcaaaggcttc

SEQ ID NO: 99154 - DNA, 15 bp, Homo sapiens
aagcctcaaaggctt

SEQ ID NO: 99155 - DNA, 15 bp, Homo sapiens
aaagcctcaaaggct

SEQ ID NO: 99156 - DNA, 15 bp, Homo sapiens
aaaagcctcaaaggc

SEQ ID NO: 99157 - DNA, 15 bp, Homo sapiens
taaaagcctcaaagg

SEQ ID NO: 99158 - DNA, 15 bp, Homo sapiens
ataaaagcctcaaag

SEQ ID NO: 99159 - DNA, 15 bp, Homo sapiens
cataaaagcctcaaa

SEQ ID NO: 99160 - DNA, 15 bp, Homo sapiens
acataaaagcctcaa

SEQ ID NO: 99161 - DNA, 15 bp, Homo sapiens
tacataaaagcctca

SEQ ID NO: 99162 - DNA, 15 bp, Homo sapiens
atacataaaagcctc

SEQ ID NO: 99163 - DNA, 15 bp, Homo sapiens
aatacataaaagcct

SEQ ID NO: 99164 - DNA, 15 bp, Homo sapiens
gaatacataaaagcc

SEQ ID NO: 99165 - DNA, 15 bp, Homo sapiens
ggaatacataaaagc

SEQ ID NO: 99166 - DNA, 15 bp, Homo sapiens
tggaatacataaaag

SEQ ID NO: 99167 - DNA, 15 bp, Homo sapiens
gtggaatacataaaa

SEQ ID NO: 99168 - DNA, 15 bp, Homo sapiens
ggtggaatacataaa

SEQ ID NO: 99169 - DNA, 15 bp, Homo sapiens
aggtggaatacataa

SEQ ID NO: 99170 - DNA, 15 bp, Homo sapiens
gaggtggaatacata

SEQ ID NO: 99171 - DNA, 15 bp, Homo sapiens
cgaggtggaatacat

SEQ ID NO: 99172 - DNA, 15 bp, Homo sapiens
ccgaggtggaataca

SEQ ID NO: 99173 - DNA, 15 bp, Homo sapiens
accgaggtggaatac

SEQ ID NO: 99174 - DNA, 15 bp, Homo sapiens
gaccgaggtggaata

SEQ ID NO: 99175 - DNA, 15 bp, Homo sapiens
agaccgaggtggaat

SEQ ID NO: 99176 - DNA, 15 bp, Homo sapiens
cagaccgaggtggaa

SEQ ID NO: 99177 - DNA, 15 bp, Homo sapiens
ccagaccgaggtgga

SEQ ID NO: 99178 - DNA, 15 bp, Homo sapiens
tccagaccgaggtgg

SEQ ID NO: 99179 - DNA, 15 bp, Homo sapiens
ttccagaccgaggtg

SEQ ID NO: 99180 - DNA, 15 bp, Homo sapiens
attccagaccgaggt

SEQ ID NO: 99181 - DNA, 15 bp, Homo sapiens
aattccagaccgagg

SEQ ID NO: 99182 - DNA, 15 bp, Homo sapiens
aaattccagaccgag

SEQ ID NO: 99183 - DNA, 15 bp, Homo sapiens
caaattccagaccga

SEQ ID NO: 99184 - DNA, 15 bp, Homo sapiens
acaaattccagaccg

SEQ ID NO: 99185 - DNA, 15 bp, Homo sapiens
aacaaattccagacc

SEQ ID NO: 99186 - DNA, 15 bp, Homo sapiens
aaacaaattccagac

SEQ ID NO: 99187 - DNA, 15 bp, Homo sapiens
gaaacaaattccaga

SEQ ID NO: 99188 - DNA, 15 bp, Homo sapiens
agaaacaaattccag

SEQ ID NO: 99189 - DNA, 15 bp, Homo sapiens
cagaaacaaattcca

SEQ ID NO: 99190 - DNA, 15 bp, Homo sapiens
acagaaacaaattcc

SEQ ID NO: 99191 - DNA, 15 bp, Homo sapiens
tacagaaacaaattc

SEQ ID NO: 99192 - DNA, 15 bp, Homo sapiens
ttacagaaacaaatt

SEQ ID NO: 99193 - DNA, 15 bp, Homo sapiens
cttacagaaacaaat

SEQ ID NO: 99194 - DNA, 15 bp, Homo sapiens
ccttacagaaacaaa

SEQ ID NO: 99195 - DNA, 15 bp, Homo sapiens
gccttacagaaacaa

SEQ ID NO: 99196 - DNA, 15 bp, Homo sapiens
agccttacagaaaca

SEQ ID NO: 99197 - DNA, 15 bp, Homo sapiens
tagccttacagaaac

SEQ ID NO: 99198 - DNA, 15 bp, Homo sapiens
ttagccttacagaaa

SEQ ID NO: 99199 - DNA, 15 bp, Homo sapiens
gttagccttacagaa

SEQ ID NO: 99200 - DNA, 15 bp, Homo sapiens
tgttagccttacaga

SEQ ID NO: 99201 - DNA, 15 bp, Homo sapiens
ctgttagccttacag

SEQ ID NO: 99202 - DNA, 15 bp, Homo sapiens
actgttagccttaca

SEQ ID NO: 99203 - DNA, 15 bp, Homo sapiens
aactgttagccttac

SEQ ID NO: 99204 - DNA, 15 bp, Homo sapiens
caactgttagcctta

SEQ ID NO: 99205 - DNA, 15 bp, Homo sapiens
gcaactgttagcctt

SEQ ID NO: 99206 - DNA, 15 bp, Homo sapiens
tgcaactgttagcct

SEQ ID NO: 99207 - DNA, 15 bp, Homo sapiens
ttgcaactgttagcc

SEQ ID NO: 99208 - DNA, 15 bp, Homo sapiens
attgcaactgttagc

SEQ ID NO: 99209 - DNA, 15 bp, Homo sapiens
tattgcaactgttag

SEQ ID NO: 99210 - DNA, 15 bp, Homo sapiens
atattgcaactgtta

SEQ ID NO: 99211 - DNA, 15 bp, Homo sapiens
tatattgcaactgtt

SEQ ID NO: 99212 - DNA, 15 bp, Homo sapiens
gtatattgcaactgt

SEQ ID NO: 99213 - DNA, 15 bp, Homo sapiens
agtatattgcaactg

SEQ ID NO: 99214 - DNA, 15 bp, Homo sapiens
tagtatattgcaact

SEQ ID NO: 99215 - DNA, 15 bp, Homo sapiens
ctagtatattgcaac

SEQ ID NO: 99216 - DNA, 15 bp, Homo sapiens
cctagtatattgcaa

SEQ ID NO: 99217 - DNA, 15 bp, Homo sapiens
ccctagtatattgca

SEQ ID NO: 99218 - DNA, 15 bp, Homo sapiens
accctagtatattgc

SEQ ID NO: 99219 - DNA, 15 bp, Homo sapiens
taccctagtatattg

SEQ ID NO: 99220 - DNA, 15 bp, Homo sapiens
ttaccctagtatatt

SEQ ID NO: 99221 - DNA, 15 bp, Homo sapiens
attaccctagtatat

SEQ ID NO: 99222 - DNA, 15 bp, Homo sapiens
gattaccctagtata

SEQ ID NO: 99223 - DNA, 15 bp, Homo sapiens
agattaccctagtat

SEQ ID NO: 99224 - DNA, 15 bp, Homo sapiens
cagattaccctagta

SEQ ID NO: 99225 - DNA, 15 bp, Homo sapiens
tcagattaccctagt

SEQ ID NO: 99226 - DNA, 15 bp, Homo sapiens
ctcagattaccctag

SEQ ID NO: 99227 - DNA, 15 bp, Homo sapiens
actcagattacccta

SEQ ID NO: 99228 - DNA, 15 bp, Homo sapiens
cactcagattaccct

SEQ ID NO: 99229 - DNA, 15 bp, Homo sapiens
tcactcagattaccc

SEQ ID NO: 99230 - DNA, 15 bp, Homo sapiens
ctcactcagattacc

SEQ ID NO: 99231 - DNA, 15 bp, Homo sapiens
gctcactcagattac

SEQ ID NO: 99232 - DNA, 15 bp, Homo sapiens
agctcactcagatta

SEQ ID NO: 99233 - DNA, 15 bp, Homo sapiens
cagctcactcagatt

SEQ ID NO: 99234 - DNA, 15 bp, Homo sapiens
ccagctcactcagat

SEQ ID NO: 99235 - DNA, 15 bp, Homo sapiens
tccagctcactcaga

SEQ ID NO: 99236 - DNA, 15 bp, Homo sapiens
ttccagctcactcag

SEQ ID NO: 99237 - DNA, 15 bp, Homo sapiens
attccagctcactca

SEQ ID NO: 99238 - DNA, 15 bp, Homo sapiens
aattccagctcactc

SEQ ID NO: 99239 - DNA, 15 bp, Homo sapiens
taattccagctcact

SEQ ID NO: 99240 - DNA, 15 bp, Homo sapiens
ttaattccagctcac

SEQ ID NO: 99241 - DNA, 15 bp, Homo sapiens
tttaattccagctca

SEQ ID NO: 99242 - DNA, 15 bp, Homo sapiens
ttttaattccagctc

SEQ ID NO: 99243 - DNA, 15 bp, Homo sapiens
tttttaattccagct

SEQ ID NO: 99244 - DNA, 15 bp, Homo sapiens
ttttttaattccagc

SEQ ID NO: 99245 - DNA, 15 bp, Homo sapiens
tttttttaattccag

SEQ ID NO: 99246 - DNA, 15 bp, Homo sapiens
ttttttttaattcca

SEQ ID NO: 99247 - DNA, 15 bp, Homo sapiens
tttttttttaattcc

SEQ ID NO: 99248 - DNA, 15 bp, Homo sapiens
ttttttttttaattc

SEQ ID NO: 99249 - DNA, 15 bp, Homo sapiens
ctttttttttttaat

SEQ ID NO: 99250 - DNA, 15 bp, Homo sapiens
cctttttttttttaa

SEQ ID NO: 99251 - DNA, 15 bp, Homo sapiens
tccttttttttttta

SEQ ID NO: 99252 - DNA, 15 bp, Homo sapiens
ttccttttttttttt

SEQ ID NO: 99253 - DNA, 15 bp, Homo sapiens
attcctttttttttt

SEQ ID NO: 99254 - DNA, 15 bp, Homo sapiens
aattccttttttttt

SEQ ID NO: 99255 - DNA, 15 bp, Homo sapiens
aaattcctttttttt

SEQ ID NO: 99256 - DNA, 15 bp, Homo sapiens
gaaattccttttttt

SEQ ID NO: 99257 - DNA, 15 bp, Homo sapiens
tgaaattcctttttt

SEQ ID NO: 99258 - DNA, 15 bp, Homo sapiens
gtgaaattccttttt

SEQ ID NO: 99259 - DNA, 15 bp, Homo sapiens
ggtgaaattcctttt

SEQ ID NO: 99260 - DNA, 15 bp, Homo sapiens
gggtgaaattccttt

SEQ ID NO: 99261 - DNA, 15 bp, Homo sapiens
ggggtgaaattcctt

SEQ ID NO: 99262 - DNA, 15 bp, Homo sapiens
tggggtgaaattcct

SEQ ID NO: 99263 - DNA, 15 bp, Homo sapiens
ttggggtgaaattcc

SEQ ID NO: 99264 - DNA, 15 bp, Homo sapiens
attggggtgaaattc

SEQ ID NO: 99265 - DNA, 15 bp, Homo sapiens
gattggggtgaaatt

SEQ ID NO: 99266 - DNA, 15 bp, Homo sapiens
agattggggtgaaat

SEQ ID NO: 99267 - DNA, 15 bp, Homo sapiens
aagattggggtgaaa

SEQ ID NO: 99268 - DNA, 15 bp, Homo sapiens
taagattggggtgaa

SEQ ID NO: 99269 - DNA, 15 bp, Homo sapiens
ataagattggggtga

SEQ ID NO: 99270 - DNA, 15 bp, Homo sapiens
tataagattggggtg

SEQ ID NO: 99271 - DNA, 15 bp, Homo sapiens
gtataagattggggt

SEQ ID NO: 99272 - DNA, 15 bp, Homo sapiens
agtataagattgggg

SEQ ID NO: 99273 - DNA, 15 bp, Homo sapiens
cagtataagattggg

SEQ ID NO: 99274 - DNA, 15 bp, Homo sapiens
tcagtataagattgg

SEQ ID NO: 99275 - DNA, 15 bp, Homo sapiens
gtcagtataagattg

SEQ ID NO: 99276 - DNA, 15 bp, Homo sapiens
agtcagtataagatt

SEQ ID NO: 99277 - DNA, 15 bp, Homo sapiens
aagtcagtataagat

SEQ ID NO: 99278 - DNA, 15 bp, Homo sapiens
gaagtcagtataaga

SEQ ID NO: 99279 - DNA, 15 bp, Homo sapiens
tgaagtcagtataag

SEQ ID NO: 99280 - DNA, 15 bp, Homo sapiens
ttgaagtcagtataa

SEQ ID NO: 99281 - DNA, 15 bp, Homo sapiens
attgaagtcagtata

SEQ ID NO: 99282 - DNA, 15 bp, Homo sapiens
tattgaagtcagtat

SEQ ID NO: 99283 - DNA, 15 bp, Homo sapiens
ctattgaagtcagta

SEQ ID NO: 99284 - DNA, 15 bp, Homo sapiens
tctattgaagtcagt

SEQ ID NO: 99285 - DNA, 15 bp, Homo sapiens
ctctattgaagtcag

SEQ ID NO: 99286 - DNA, 15 bp, Homo sapiens
cctctattgaagtca

SEQ ID NO: 99287 - DNA, 15 bp, Homo sapiens
acctctattgaagtc

SEQ ID NO: 99288 - DNA, 15 bp, Homo sapiens
aacctctattgaagt

SEQ ID NO: 99289 - DNA, 15 bp, Homo sapiens
aaacctctattgaag

SEQ ID NO: 99290 - DNA, 15 bp, Homo sapiens
gaaacctctattgaa

SEQ ID NO: 99291 - DNA, 15 bp, Homo sapiens
tgaaacctctattga

SEQ ID NO: 99292 - DNA, 15 bp, Homo sapiens
ctgaaacctctattg

SEQ ID NO: 99293 - DNA, 15 bp, Homo sapiens
tctgaaacctctatt

SEQ ID NO: 99294 - DNA, 15 bp, Homo sapiens
gtctgaaacctctat

SEQ ID NO: 99295 - DNA, 15 bp, Homo sapiens
tgtctgaaacctcta

SEQ ID NO: 99296 - DNA, 15 bp, Homo sapiens
ttgtctgaaacctct

SEQ ID NO: 99297 - DNA, 15 bp, Homo sapiens
tttgtctgaaacctc

SEQ ID NO: 99298 - DNA, 15 bp, Homo sapiens
ttttgtctgaaacct

SEQ ID NO: 99299 - DNA, 15 bp, Homo sapiens
tttttgtctgaaacc

SEQ ID NO: 99300 - DNA, 15 bp, Homo sapiens
ctttttgtctgaaac

SEQ ID NO: 99301 - DNA, 15 bp, Homo sapiens
actttttgtctgaaa

SEQ ID NO: 99302 - DNA, 15 bp, Homo sapiens
aactttttgtctgaa

SEQ ID NO: 99303 - DNA, 15 bp, Homo sapiens
caactttttgtctga

SEQ ID NO: 99304 - DNA, 15 bp, Homo sapiens
acaactttttgtctg

SEQ ID NO: 99305 - DNA, 15 bp, Homo sapiens
aacaactttttgtct

SEQ ID NO: 99306 - DNA, 15 bp, Homo sapiens
aaacaactttttgtc

SEQ ID NO: 99307 - DNA, 15 bp, Homo sapiens
aaaacaactttttgt

SEQ ID NO: 99308 - DNA, 15 bp, Homo sapiens
caaaacaactttttg

SEQ ID NO: 99309 - DNA, 15 bp, Homo sapiens
acaaaacaacttttt

SEQ ID NO: 99310 - DNA, 15 bp, Homo sapiens
tacaaaacaactttt

SEQ ID NO: 99311 - DNA, 15 bp, Homo sapiens
atacaaaacaacttt

SEQ ID NO: 99312 - DNA, 15 bp, Homo sapiens
tatacaaaacaactt

SEQ ID NO: 99313 - DNA, 15 bp, Homo sapiens
atatacaaaacaact

SEQ ID NO: 99314 - DNA, 15 bp, Homo sapiens
tatatacaaaacaac

SEQ ID NO: 99315 - DNA, 15 bp, Homo sapiens
gtatatacaaaacaa

SEQ ID NO: 99316 - DNA, 15 bp, Homo sapiens
agtatatacaaaaca

SEQ ID NO: 99317 - DNA, 15 bp, Homo sapiens
aagtatatacaaaac

SEQ ID NO: 99318 - DNA, 15 bp, Homo sapiens
taagtatatacaaaa

SEQ ID NO: 99319 - DNA, 15 bp, Homo sapiens
ataagtatatacaaa

SEQ ID NO: 99320 - DNA, 15 bp, Homo sapiens
gataagtatatacaa

SEQ ID NO: 99321 - DNA, 15 bp, Homo sapiens
tgataagtatataca

SEQ ID NO: 99322 - DNA, 15 bp, Homo sapiens
ctgataagtatatac

SEQ ID NO: 99323 - DNA, 15 bp, Homo sapiens
actgataagtatata

SEQ ID NO: 99324 - DNA, 15 bp, Homo sapiens
gactgataagtatat

SEQ ID NO: 99325 - DNA, 15 bp, Homo sapiens
tgactgataagtata

SEQ ID NO: 99326 - DNA, 15 bp, Homo sapiens
atgactgataagtat

SEQ ID NO: 99327 - DNA, 15 bp, Homo sapiens
catgactgataagta

SEQ ID NO: 99328 - DNA, 15 bp, Homo sapiens
tcatgactgataagt

SEQ ID NO: 99329 - DNA, 15 bp, Homo sapiens
ttcatgactgataag

SEQ ID NO: 99330 - DNA, 15 bp, Homo sapiens
tttcatgactgataa

SEQ ID NO: 99331 - DNA, 15 bp, Homo sapiens
ttttcatgactgata

SEQ ID NO: 99332 - DNA, 15 bp, Homo sapiens
cttttcatgactgat

SEQ ID NO: 99333 - DNA, 15 bp, Homo sapiens
tcttttcatgactga

SEQ ID NO: 99334 - DNA, 15 bp, Homo sapiens
atcttttcatgactg

SEQ ID NO: 99335 - DNA, 15 bp, Homo sapiens
tatcttttcatgact

SEQ ID NO: 99336 - DNA, 15 bp, Homo sapiens
ttatcttttcatgac

SEQ ID NO: 99337 - DNA, 15 bp, Homo sapiens
attatcttttcatga

SEQ ID NO: 99338 - DNA, 15 bp, Homo sapiens
aattatcttttcatg

SEQ ID NO: 99339 - DNA, 15 bp, Homo sapiens
taattatcttttcat

SEQ ID NO: 99340 - DNA, 15 bp, Homo sapiens
gtaattatcttttca

SEQ ID NO: 99341 - DNA, 15 bp, Homo sapiens
tgtaattatcttttc

SEQ ID NO: 99342 - DNA, 15 bp, Homo sapiens
ttgtaattatctttt

SEQ ID NO: 99343 - DNA, 15 bp, Homo sapiens
gttgtaattatcttt

SEQ ID NO: 99344 - DNA, 15 bp, Homo sapiens
agttgtaattatctt

SEQ ID NO: 99345 - DNA, 15 bp, Homo sapiens
tagttgtaattatct

SEQ ID NO: 99346 - DNA, 15 bp, Homo sapiens
ttagttgtaattatc

SEQ ID NO: 99347 - DNA, 15 bp, Homo sapiens
tttagttgtaattat

SEQ ID NO: 99348 - DNA, 15 bp, Homo sapiens
atttagttgtaatta

SEQ ID NO: 99349 - DNA, 15 bp, Homo sapiens
catttagttgtaatt

SEQ ID NO: 99350 - DNA, 15 bp, Homo sapiens
ccatttagttgtaat

SEQ ID NO: 99351 - DNA, 15 bp, Homo sapiens
gccatttagttgtaa

SEQ ID NO: 99352 - DNA, 15 bp, Homo sapiens
ggccatttagttgta

SEQ ID NO: 99353 - DNA, 15 bp, Homo sapiens
aggccatttagttgt

SEQ ID NO: 99354 - DNA, 15 bp, Homo sapiens
aaggccatttagttg

SEQ ID NO: 99355 - DNA, 15 bp, Homo sapiens
aaaggccatttagtt

SEQ ID NO: 99356 - DNA, 15 bp, Homo sapiens
aaaaggccatttagt

SEQ ID NO: 99357 - DNA, 15 bp, Homo sapiens
aaaaaggccatttag

SEQ ID NO: 99358 - DNA, 15 bp, Homo sapiens
gaaaaaggccattta

SEQ ID NO: 99359 - DNA, 15 bp, Homo sapiens
ggaaaaaggccattt

SEQ ID NO: 99360 - DNA, 15 bp, Homo sapiens
aggaaaaaggccatt

SEQ ID NO: 99361 - DNA, 15 bp, Homo sapiens
aaggaaaaaggccat

SEQ ID NO: 99362 - DNA, 15 bp, Homo sapiens
gaaggaaaaaggcca

SEQ ID NO: 99363 - DNA, 15 bp, Homo sapiens
ggaaggaaaaaggcc

SEQ ID NO: 99364 - DNA, 15 bp, Homo sapiens
gggaaggaaaaaggc

SEQ ID NO: 99365 - DNA, 15 bp, Homo sapiens
agggaaggaaaaagg

SEQ ID NO: 99366 - DNA, 15 bp, Homo sapiens
tagggaaggaaaaag

SEQ ID NO: 99367 - DNA, 15 bp, Homo sapiens
atagggaaggaaaaa

SEQ ID NO: 99368 - DNA, 15 bp, Homo sapiens
aatagggaaggaaaa

SEQ ID NO: 99369 - DNA, 15 bp, Homo sapiens
aaatagggaaggaaa

SEQ ID NO: 99370 - DNA, 15 bp, Homo sapiens
taaatagggaaggaa

SEQ ID NO: 99371 - DNA, 15 bp, Homo sapiens
ataaatagggaagga

SEQ ID NO: 99372 - DNA, 15 bp, Homo sapiens
aataaatagggaagg

SEQ ID NO: 99373 - DNA, 15 bp, Homo sapiens
aaataaatagggaag

SEQ ID NO: 99374 - DNA, 15 bp, Homo sapiens
caaataaatagggaa

SEQ ID NO: 99375 - DNA, 15 bp, Homo sapiens
ccaaataaataggga

SEQ ID NO: 99376 - DNA, 15 bp, Homo sapiens
tccaaataaataggg

SEQ ID NO: 99377 - DNA, 15 bp, Homo sapiens
ctccaaataaatagg

SEQ ID NO: 99378 - DNA, 15 bp, Homo sapiens
tctccaaataaatag

SEQ ID NO: 99379 - DNA, 15 bp, Homo sapiens
ttctccaaataaata

SEQ ID NO: 99380 - DNA, 15 bp, Homo sapiens
tttctccaaataaat

SEQ ID NO: 99381 - DNA, 15 bp, Homo sapiens
atttctccaaataaa

SEQ ID NO: 99382 - DNA, 15 bp, Homo sapiens
aatttctccaaataa

SEQ ID NO: 99383 - DNA, 15 bp, Homo sapiens
aaatttctccaaata

SEQ ID NO: 99384 - DNA, 15 bp, Homo sapiens
taaatttctccaaat

SEQ ID NO: 99385 - DNA, 15 bp, Homo sapiens
ttaaatttctccaaa

SEQ ID NO: 99386 - DNA, 15 bp, Homo sapiens
attaaatttctccaa

SEQ ID NO: 99387 - DNA, 15 bp, Homo sapiens
aattaaatttctcca

SEQ ID NO: 99388 - DNA, 15 bp, Homo sapiens
taattaaatttctcc

SEQ ID NO: 99389 - DNA, 15 bp, Homo sapiens
gtaattaaatttctc

SEQ ID NO: 99390 - DNA, 15 bp, Homo sapiens
tgtaattaaatttct

SEQ ID NO: 99391 - DNA, 15 bp, Homo sapiens
atgtaattaaatttc

SEQ ID NO: 99392 - DNA, 15 bp, Homo sapiens
tatgtaattaaattt

SEQ ID NO: 99393 - DNA, 15 bp, Homo sapiens
ttatgtaattaaatt

SEQ ID NO: 99394 - DNA, 15 bp, Homo sapiens
tttatgtaattaaat

SEQ ID NO: 99395 - DNA, 15 bp, Homo sapiens
ttttatgtaattaaa

SEQ ID NO: 99396 - DNA, 15 bp, Homo sapiens
tttttatgtaattaa

SEQ ID NO: 99397 - DNA, 15 bp, Homo sapiens
ttttttatgtaatta

SEQ ID NO: 99398 - DNA, 15 bp, Homo sapiens
cttttttatgtaatt

SEQ ID NO: 99399 - DNA, 15 bp, Homo sapiens
acttttttatgtaat

SEQ ID NO: 99400 - DNA, 15 bp, Homo sapiens
tacttttttatgtaa

SEQ ID NO: 99401 - DNA, 15 bp, Homo sapiens
gtacttttttatgta

SEQ ID NO: 99402 - DNA, 15 bp, Homo sapiens
agtacttttttatgt

SEQ ID NO: 99403 - DNA, 15 bp, Homo sapiens
gagtacttttttatg

SEQ ID NO: 99404 - DNA, 15 bp, Homo sapiens
tgagtacttttttat

SEQ ID NO: 99405 - DNA, 15 bp, Homo sapiens
ctgagtactttttta

SEQ ID NO: 99406 - DNA, 15 bp, Homo sapiens
tctgagtactttttt

SEQ ID NO: 99407 - DNA, 15 bp, Homo sapiens
ttctgagtacttttt

SEQ ID NO: 99408 - DNA, 15 bp, Homo sapiens
attctgagtactttt

SEQ ID NO: 99409 - DNA, 15 bp, Homo sapiens
tattctgagtacttt

SEQ ID NO: 99410 - DNA, 15 bp, Homo sapiens
atattctgagtactt

SEQ ID NO: 99411 - DNA, 15 bp, Homo sapiens
aatattctgagtact

SEQ ID NO: 99412 - DNA, 15 bp, Homo sapiens
aaatattctgagtac

SEQ ID NO: 99413 - DNA, 15 bp, Homo sapiens
caaatattctgagta

SEQ ID NO: 99414 - DNA, 15 bp, Homo sapiens
tcaaatattctgagt

SEQ ID NO: 99415 - DNA, 15 bp, Homo sapiens
ctcaaatattctgag

SEQ ID NO: 99416 - DNA, 15 bp, Homo sapiens
actcaaatattctga

SEQ ID NO: 99417 - DNA, 15 bp, Homo sapiens
aactcaaatattctg

SEQ ID NO: 99418 - DNA, 15 bp, Homo sapiens
aaactcaaatattct

SEQ ID NO: 99419 - DNA, 15 bp, Homo sapiens
gaaactcaaatattc

SEQ ID NO: 99420 - DNA, 15 bp, Homo sapiens
ggaaactcaaatatt

SEQ ID NO: 99421 - DNA, 15 bp, Homo sapiens
aggaaactcaaatat

SEQ ID NO: 99422 - DNA, 15 bp, Homo sapiens
caggaaactcaaata

SEQ ID NO: 99423 - DNA, 15 bp, Homo sapiens
gcaggaaactcaaat

SEQ ID NO: 99424 - DNA, 15 bp, Homo sapiens
tgcaggaaactcaaa

SEQ ID NO: 99425 - DNA, 15 bp, Homo sapiens
atgcaggaaactcaa

SEQ ID NO: 99426 - DNA, 15 bp, Homo sapiens
gatgcaggaaactca

SEQ ID NO: 99427 - DNA, 15 bp, Homo sapiens
tgatgcaggaaactc

SEQ ID NO: 99428 - DNA, 15 bp, Homo sapiens
ttgatgcaggaaact

SEQ ID NO: 99429 - DNA, 15 bp, Homo sapiens
attgatgcaggaaac

SEQ ID NO: 99430 - DNA, 15 bp, Homo sapiens
tattgatgcaggaaa

SEQ ID NO: 99431 - DNA, 15 bp, Homo sapiens
ttattgatgcaggaa

SEQ ID NO: 99432 - DNA, 15 bp, Homo sapiens
cttattgatgcagga

SEQ ID NO: 99433 - DNA, 15 bp, Homo sapiens
tcttattgatgcagg

SEQ ID NO: 99434 - DNA, 15 bp, Homo sapiens
gtcttattgatgcag

SEQ ID NO: 99435 - DNA, 15 bp, Homo sapiens
tgtcttattgatgca

SEQ ID NO: 99436 - DNA, 15 bp, Homo sapiens
atgtcttattgatgc

SEQ ID NO: 99437 - DNA, 15 bp, Homo sapiens
aatgtcttattgatg

SEQ ID NO: 99438 - DNA, 15 bp, Homo sapiens
aaatgtcttattgat

SEQ ID NO: 99439 - DNA, 15 bp, Homo sapiens
taaatgtcttattga

SEQ ID NO: 99440 - DNA, 15 bp, Homo sapiens
ataaatgtcttattg

SEQ ID NO: 99441 - DNA, 15 bp, Homo sapiens
tataaatgtcttatt

SEQ ID NO: 99442 - DNA, 15 bp, Homo sapiens
ttataaatgtcttat

SEQ ID NO: 99443 - DNA, 15 bp, Homo sapiens
attataaatgtctta

SEQ ID NO: 99444 - DNA, 15 bp, Homo sapiens
tattataaatgtctt

SEQ ID NO: 99445 - DNA, 15 bp, Homo sapiens
ttattataaatgtct

SEQ ID NO: 99446 - DNA, 15 bp, Homo sapiens
attattataaatgtc

SEQ ID NO: 99447 - DNA, 15 bp, Homo sapiens
cattattataaatgt

SEQ ID NO: 99448 - DNA, 15 bp, Homo sapiens
tcattattataaatg

SEQ ID NO: 99449 - DNA, 15 bp, Homo sapiens
gtcattattataaat

SEQ ID NO: 99450 - DNA, 15 bp, Homo sapiens
ggtcattattataaa

SEQ ID NO: 99451 - DNA, 15 bp, Homo sapiens
aggtcattattataa

SEQ ID NO: 99452 - DNA, 15 bp, Homo sapiens
aaggtcattattata

SEQ ID NO: 99453 - DNA, 15 bp, Homo sapiens
caaggtcattattat

SEQ ID NO: 99454 - DNA, 15 bp, Homo sapiens
acaaggtcattatta

SEQ ID NO: 99455 - DNA, 15 bp, Homo sapiens
aacaaggtcattatt

SEQ ID NO: 99456 - DNA, 15 bp, Homo sapiens
aaacaaggtcattat

SEQ ID NO: 99457 - DNA, 15 bp, Homo sapiens
taaacaaggtcatta

SEQ ID NO: 99458 - DNA, 15 bp, Homo sapiens
gtaaacaaggtcatt

SEQ ID NO: 99459 - DNA, 15 bp, Homo sapiens
tgtaaacaaggtcat

SEQ ID NO: 99460 - DNA, 15 bp, Homo sapiens
ttgtaaacaaggtca

SEQ ID NO: 99461 - DNA, 15 bp, Homo sapiens
tttgtaaacaaggtc

SEQ ID NO: 99462 - DNA, 15 bp, Homo sapiens
atttgtaaacaaggt

SEQ ID NO: 99463 - DNA, 15 bp, Homo sapiens
catttgtaaacaagg

SEQ ID NO: 99464 - DNA, 15 bp, Homo sapiens
tcatttgtaaacaag

SEQ ID NO: 99465 - DNA, 15 bp, Homo sapiens
ttcatttgtaaacaa

SEQ ID NO: 99466 - DNA, 15 bp, Homo sapiens
attcatttgtaaaca

SEQ ID NO: 99467 - DNA, 15 bp, Homo sapiens
aattcatttgtaaac

SEQ ID NO: 99468 - DNA, 15 bp, Homo sapiens
aaattcatttgtaaa

SEQ ID NO: 99469 - DNA, 15 bp, Homo sapiens
caaattcatttgtaa

SEQ ID NO: 99470 - DNA, 15 bp, Homo sapiens
tcaaattcatttgta

SEQ ID NO: 99471 - DNA, 15 bp, Homo sapiens
ttcaaattcatttgt

SEQ ID NO: 99472 - DNA, 15 bp, Homo sapiens
tttcaaattcatttg

SEQ ID NO: 99473 - DNA, 15 bp, Homo sapiens
ctttcaaattcattt

SEQ ID NO: 99474 - DNA, 15 bp, Homo sapiens
actttcaaattcatt

SEQ ID NO: 99475 - DNA, 15 bp, Homo sapiens
aactttcaaattcat

SEQ ID NO: 99476 - DNA, 15 bp, Homo sapiens
taactttcaaattca

SEQ ID NO: 99477 - DNA, 15 bp, Homo sapiens
gtaactttcaaattc

SEQ ID NO: 99478 - DNA, 15 bp, Homo sapiens
agtaactttcaaatt

SEQ ID NO: 99479 - DNA, 15 bp, Homo sapiens
gagtaactttcaaat

SEQ ID NO: 99480 - DNA, 15 bp, Homo sapiens
agagtaactttcaaa

SEQ ID NO: 99481 - DNA, 15 bp, Homo sapiens
tagagtaactttcaa

SEQ ID NO: 99482 - DNA, 15 bp, Homo sapiens
ttagagtaactttca

SEQ ID NO: 99483 - DNA, 15 bp, Homo sapiens
attagagtaactttc

SEQ ID NO: 99484 - DNA, 15 bp, Homo sapiens
aattagagtaacttt

SEQ ID NO: 99485 - DNA, 15 bp, Homo sapiens
gaattagagtaactt

SEQ ID NO: 99486 - DNA, 15 bp, Homo sapiens
agaattagagtaact

SEQ ID NO: 99487 - DNA, 15 bp, Homo sapiens
aagaattagagtaac

SEQ ID NO: 99488 - DNA, 15 bp, Homo sapiens
aaagaattagagtaa

SEQ ID NO: 99489 - DNA, 15 bp, Homo sapiens
caaagaattagagta

SEQ ID NO: 99490 - DNA, 15 bp, Homo sapiens
tcaaagaattagagt

SEQ ID NO: 99491 - DNA, 15 bp, Homo sapiens
atcaaagaattagag

SEQ ID NO: 99492 - DNA, 15 bp, Homo sapiens
aatcaaagaattaga

SEQ ID NO: 99493 - DNA, 15 bp, Homo sapiens
gaatcaaagaattag

SEQ ID NO: 99494 - DNA, 15 bp, Homo sapiens
tgaatcaaagaatta

SEQ ID NO: 99495 - DNA, 15 bp, Homo sapiens
atgaatcaaagaatt

SEQ ID NO: 99496 - DNA, 15 bp, Homo sapiens
gatgaatcaaagaat

SEQ ID NO: 99497 - DNA, 15 bp, Homo sapiens
tgatgaatcaaagaa

SEQ ID NO: 99498 - DNA, 15 bp, Homo sapiens
ttgatgaatcaaaga

SEQ ID NO: 99499 - DNA, 15 bp, Homo sapiens
cttgatgaatcaaag

SEQ ID NO: 99500 - DNA, 15 bp, Homo sapiens
tcttgatgaatcaaa

SEQ ID NO: 99501 - DNA, 15 bp, Homo sapiens
ttcttgatgaatcaa

SEQ ID NO: 99502 - DNA, 15 bp, Homo sapiens
tttcttgatgaatca

SEQ ID NO: 99503 - DNA, 15 bp, Homo sapiens
atttcttgatgaatc

SEQ ID NO: 99504 - DNA, 15 bp, Homo sapiens
tatttcttgatgaat

SEQ ID NO: 99505 - DNA, 15 bp, Homo sapiens
ttatttcttgatgaa

SEQ ID NO: 99506 - DNA, 15 bp, Homo sapiens
gttatttcttgatga

SEQ ID NO: 99507 - DNA, 15 bp, Homo sapiens
agttatttcttgatg

SEQ ID NO: 99508 - DNA, 15 bp, Homo sapiens
tagttatttcttgat

SEQ ID NO: 99509 - DNA, 15 bp, Homo sapiens
ctagttatttcttga

SEQ ID NO: 99510 - DNA, 15 bp, Homo sapiens
tctagttatttcttg

SEQ ID NO: 99511 - DNA, 15 bp, Homo sapiens
ttctagttatttctt

SEQ ID NO: 99512 - DNA, 15 bp, Homo sapiens
attctagttatttct

SEQ ID NO: 99513 - DNA, 15 bp, Homo sapiens
cattctagttatttc

SEQ ID NO: 99514 - DNA, 15 bp, Homo sapiens
ccattctagttattt

SEQ ID NO: 99515 - DNA, 15 bp, Homo sapiens
gccattctagttatt

SEQ ID NO: 99516 - DNA, 15 bp, Homo sapiens
tgccattctagttat

SEQ ID NO: 99517 - DNA, 15 bp, Homo sapiens
ttgccattctagtta

SEQ ID NO: 99518 - DNA, 15 bp, Homo sapiens
cttgccattctagtt

SEQ ID NO: 99519 - DNA, 15 bp, Homo sapiens
acttgccattctagt

SEQ ID NO: 99520 - DNA, 15 bp, Homo sapiens
aacttgccattctag

SEQ ID NO: 99521 - DNA, 15 bp, Homo sapiens
taacttgccattcta

SEQ ID NO: 99522 - DNA, 15 bp, Homo sapiens
ttaacttgccattct

SEQ ID NO: 99523 - DNA, 15 bp, Homo sapiens
tttaacttgccattc

SEQ ID NO: 99524 - DNA, 15 bp, Homo sapiens
ttttaacttgccatt

SEQ ID NO: 99525 - DNA, 15 bp, Homo sapiens
attttaacttgccat

SEQ ID NO: 99526 - DNA, 15 bp, Homo sapiens
aattttaacttgcca

SEQ ID NO: 99527 - DNA, 15 bp, Homo sapiens
aaattttaacttgcc

SEQ ID NO: 99528 - DNA, 15 bp, Homo sapiens
taaattttaacttgc

SEQ ID NO: 99529 - DNA, 15 bp, Homo sapiens
ttaaattttaacttg

SEQ ID NO: 99530 - DNA, 15 bp, Homo sapiens
cttaaattttaactt

SEQ ID NO: 99531 - DNA, 15 bp, Homo sapiens
gcttaaattttaact

SEQ ID NO: 99532 - DNA, 15 bp, Homo sapiens
agcttaaattttaac

SEQ ID NO: 99533 - DNA, 15 bp, Homo sapiens
cagcttaaattttaa

SEQ ID NO: 99534 - DNA, 15 bp, Homo sapiens
acagcttaaatttta

SEQ ID NO: 99535 - DNA, 15 bp, Homo sapiens
aacagcttaaatttt

SEQ ID NO: 99536 - DNA, 15 bp, Homo sapiens
aaacagcttaaattt

SEQ ID NO: 99537 - DNA, 15 bp, Homo sapiens
gaaacagcttaaatt

SEQ ID NO: 99538 - DNA, 15 bp, Homo sapiens
tgaaacagcttaaat

SEQ ID NO: 99539 - DNA, 15 bp, Homo sapiens
ttgaaacagcttaaa

SEQ ID NO: 99540 - DNA, 15 bp, Homo sapiens
tttgaaacagcttaa

SEQ ID NO: 99541 - DNA, 15 bp, Homo sapiens
ctttgaaacagctta

SEQ ID NO: 99542 - DNA, 15 bp, Homo sapiens
tctttgaaacagctt

SEQ ID NO: 99543 - DNA, 15 bp, Homo sapiens
atctttgaaacagct

SEQ ID NO: 99544 - DNA, 15 bp, Homo sapiens
catctttgaaacagc

SEQ ID NO: 99545 - DNA, 15 bp, Homo sapiens
gcatctttgaaacag

SEQ ID NO: 99546 - DNA, 15 bp, Homo sapiens
agcatctttgaaaca

SEQ ID NO: 99547 - DNA, 15 bp, Homo sapiens
aagcatctttgaaac

SEQ ID NO: 99548 - DNA, 15 bp, Homo sapiens
gaagcatctttgaaa

SEQ ID NO: 99549 - DNA, 15 bp, Homo sapiens
agaagcatctttgaa

SEQ ID NO: 99550 - DNA, 15 bp, Homo sapiens
cagaagcatctttga

SEQ ID NO: 99551 - DNA, 15 bp, Homo sapiens
gcagaagcatctttg

SEQ ID NO: 99552 - DNA, 15 bp, Homo sapiens
tgcagaagcatcttt

SEQ ID NO: 99553 - DNA, 15 bp, Homo sapiens
atgcagaagcatctt

SEQ ID NO: 99554 - DNA, 15 bp, Homo sapiens
aatgcagaagcatct

SEQ ID NO: 99555 - DNA, 15 bp, Homo sapiens
aaatgcagaagcatc

SEQ ID NO: 99556 - DNA, 15 bp, Homo sapiens
taaatgcagaagcat

SEQ ID NO: 99557 - DNA, 15 bp, Homo sapiens
ttaaatgcagaagca

SEQ ID NO: 99558 - DNA, 15 bp, Homo sapiens
tttaaatgcagaagc

SEQ ID NO: 99559 - DNA, 15 bp, Homo sapiens
ttttaaatgcagaag

SEQ ID NO: 99560 - DNA, 15 bp, Homo sapiens
tttttaaatgcagaa

SEQ ID NO: 99561 - DNA, 15 bp, Homo sapiens
gtttttaaatgcaga

SEQ ID NO: 99562 - DNA, 15 bp, Homo sapiens
tgtttttaaatgcag

SEQ ID NO: 99563 - DNA, 15 bp, Homo sapiens
ttgtttttaaatgca

SEQ ID NO: 99564 - DNA, 15 bp, Homo sapiens
tttgtttttaaatgc

SEQ ID NO: 99565 - DNA, 15 bp, Homo sapiens
atttgtttttaaatg

SEQ ID NO: 99566 - DNA, 15 bp, Homo sapiens
aatttgtttttaaat

SEQ ID NO: 99567 - DNA, 15 bp, Homo sapiens
aaatttgtttttaaa

SEQ ID NO: 99568 - DNA, 15 bp, Homo sapiens
taaatttgtttttaa

SEQ ID NO: 99569 - DNA, 15 bp, Homo sapiens
ataaatttgttttta

SEQ ID NO: 99570 - DNA, 15 bp, Homo sapiens
gataaatttgttttt

SEQ ID NO: 99571 - DNA, 15 bp, Homo sapiens
agataaatttgtttt

SEQ ID NO: 99572 - DNA, 15 bp, Homo sapiens
aagataaatttgttt

SEQ ID NO: 99573 - DNA, 15 bp, Homo sapiens
aaagataaatttgtt

SEQ ID NO: 99574 - DNA, 15 bp, Homo sapiens
caaagataaatttgt

SEQ ID NO: 99575 - DNA, 15 bp, Homo sapiens
tcaaagataaatttg

SEQ ID NO: 99576 - DNA, 15 bp, Homo sapiens
atcaaagataaattt

SEQ ID NO: 99577 - DNA, 15 bp, Homo sapiens
aatcaaagataaatt

SEQ ID NO: 99578 - DNA, 15 bp, Homo sapiens
aaatcaaagataaat

SEQ ID NO: 99579 - DNA, 15 bp, Homo sapiens
aaaatcaaagataaa

SEQ ID NO: 99580 - DNA, 15 bp, Homo sapiens
aaaaatcaaagataa

SEQ ID NO: 99581 - DNA, 15 bp, Homo sapiens
aaaaaatcaaagata

SEQ ID NO: 99582 - DNA, 15 bp, Homo sapiens
aaaaaaatcaaagat

SEQ ID NO: 99583 - DNA, 15 bp, Homo sapiens
aaaaaaaatcaaaga

SEQ ID NO: 99584 - DNA, 15 bp, Homo sapiens
gaaaaaaaatcaaag

SEQ ID NO: 99585 - DNA, 15 bp, Homo sapiens
ggaaaaaaaatcaaa

SEQ ID NO: 99586 - DNA, 15 bp, Homo sapiens
gggaaaaaaaatcaa

SEQ ID NO: 99587 - DNA, 15 bp, Homo sapiens
ggggaaaaaaaatca

SEQ ID NO: 99588 - DNA, 15 bp, Homo sapiens
gggggaaaaaaaatc

SEQ ID NO: 99589 - DNA, 15 bp, Homo sapiens
ggggggaaaaaaaat

SEQ ID NO: 99590 - DNA, 15 bp, Homo sapiens
tggggggaaaaaaaa

SEQ ID NO: 99591 - DNA, 15 bp, Homo sapiens
ctggggggaaaaaaa

SEQ ID NO: 99592 - DNA, 15 bp, Homo sapiens
gctggggggaaaaaa

SEQ ID NO: 99593 - DNA, 15 bp, Homo sapiens
tgctggggggaaaaa

SEQ ID NO: 99594 - DNA, 15 bp, Homo sapiens
ttgctggggggaaaa

SEQ ID NO: 99595 - DNA, 15 bp, Homo sapiens
tttgctggggggaaa

SEQ ID NO: 99596 - DNA, 15 bp, Homo sapiens
atttgctggggggaa

SEQ ID NO: 99597 - DNA, 15 bp, Homo sapiens
tatttgctgggggga

SEQ ID NO: 99598 - DNA, 15 bp, Homo sapiens
ttatttgctgggggg

SEQ ID NO: 99599 - DNA, 15 bp, Homo sapiens
cttatttgctggggg

SEQ ID NO: 99600 - DNA, 15 bp, Homo sapiens
tcttatttgctgggg

SEQ ID NO: 99601 - DNA, 15 bp, Homo sapiens
gtcttatttgctggg

SEQ ID NO: 99602 - DNA, 15 bp, Homo sapiens
agtcttatttgctgg

SEQ ID NO: 99603 - DNA, 15 bp, Homo sapiens
aagtcttatttgctg

SEQ ID NO: 99604 - DNA, 15 bp, Homo sapiens
taagtcttatttgct

SEQ ID NO: 99605 - DNA, 15 bp, Homo sapiens
ataagtcttatttgc

SEQ ID NO: 99606 - DNA, 15 bp, Homo sapiens
aataagtcttatttg

SEQ ID NO: 99607 - DNA, 15 bp, Homo sapiens
aaataagtcttattt

SEQ ID NO: 99608 - DNA, 15 bp, Homo sapiens
aaaataagtcttatt

SEQ ID NO: 99609 - DNA, 15 bp, Homo sapiens
taaaataagtcttat

SEQ ID NO: 99610 - DNA, 15 bp, Homo sapiens
ataaaataagtctta

SEQ ID NO: 99611 - DNA, 15 bp, Homo sapiens
aataaaataagtctt

SEQ ID NO: 99612 - DNA, 15 bp, Homo sapiens
gaataaaataagtct

SEQ ID NO: 99613 - DNA, 15 bp, Homo sapiens
agaataaaataagtc

SEQ ID NO: 99614 - DNA, 15 bp, Homo sapiens
tagaataaaataagt

SEQ ID NO: 99615 - DNA, 15 bp, Homo sapiens
ttagaataaaataag

SEQ ID NO: 99616 - DNA, 15 bp, Homo sapiens
attagaataaaataa

SEQ ID NO: 99617 - DNA, 15 bp, Homo sapiens
aattagaataaaata

SEQ ID NO: 99618 - DNA, 15 bp, Homo sapiens
taattagaataaaat

SEQ ID NO: 99619 - DNA, 15 bp, Homo sapiens
gtaattagaataaaa

SEQ ID NO: 99620 - DNA, 15 bp, Homo sapiens
tgtaattagaataaa

SEQ ID NO: 99621 - DNA, 15 bp, Homo sapiens
ctgtaattagaataa

SEQ ID NO: 99622 - DNA, 15 bp, Homo sapiens
cctgtaattagaata

SEQ ID NO: 99623 - DNA, 15 bp, Homo sapiens
tcctgtaattagaat

SEQ ID NO: 99624 - DNA, 15 bp, Homo sapiens
atcctgtaattagaa

SEQ ID NO: 99625 - DNA, 15 bp, Homo sapiens
catcctgtaattaga

SEQ ID NO: 99626 - DNA, 15 bp, Homo sapiens
tcatcctgtaattag

SEQ ID NO: 99627 - DNA, 15 bp, Homo sapiens
ttcatcctgtaatta

SEQ ID NO: 99628 - DNA, 15 bp, Homo sapiens
gttcatcctgtaatt

SEQ ID NO: 99629 - DNA, 15 bp, Homo sapiens
ggttcatcctgtaat

SEQ ID NO: 99630 - DNA, 15 bp, Homo sapiens
gggttcatcctgtaa

SEQ ID NO: 99631 - DNA, 15 bp, Homo sapiens
tgggttcatcctgta

SEQ ID NO: 99632 - DNA, 15 bp, Homo sapiens
gtgggttcatcctgt

SEQ ID NO: 99633 - DNA, 15 bp, Homo sapiens
ggtgggttcatcctg

SEQ ID NO: 99634 - DNA, 15 bp, Homo sapiens
tggtgggttcatcct

SEQ ID NO: 99635 - DNA, 15 bp, Homo sapiens
gtggtgggttcatcc

SEQ ID NO: 99636 - DNA, 15 bp, Homo sapiens
tgtggtgggttcatc

SEQ ID NO: 99637 - DNA, 15 bp, Homo sapiens
ctgtggtgggttcat

SEQ ID NO: 99638 - DNA, 15 bp, Homo sapiens
cctgtggtgggttca

SEQ ID NO: 99639 - DNA, 15 bp, Homo sapiens
gcctgtggtgggttc

SEQ ID NO: 99640 - DNA, 15 bp, Homo sapiens
tgcctgtggtgggtt

SEQ ID NO: 99641 - DNA, 15 bp, Homo sapiens
atgcctgtggtgggt

SEQ ID NO: 99642 - DNA, 15 bp, Homo sapiens
catgcctgtggtggg

SEQ ID NO: 99643 - DNA, 15 bp, Homo sapiens
ccatgcctgtggtgg

SEQ ID NO: 99644 - DNA, 15 bp, Homo sapiens
tccatgcctgtggtg

SEQ ID NO: 99645 - DNA, 15 bp, Homo sapiens
atccatgcctgtggt

SEQ ID NO: 99646 - DNA, 15 bp, Homo sapiens
gatccatgcctgtgg

SEQ ID NO: 99647 - DNA, 15 bp, Homo sapiens
ggatccatgcctgtg

SEQ ID NO: 99648 - DNA, 15 bp, Homo sapiens
gggatccatgcctgt

SEQ ID NO: 99649 - DNA, 15 bp, Homo sapiens
tgggatccatgcctg

SEQ ID NO: 99650 - DNA, 15 bp, Homo sapiens
ttgggatccatgcct

SEQ ID NO: 99651 - DNA, 15 bp, Homo sapiens
tttgggatccatgcc

SEQ ID NO: 99652 - DNA, 15 bp, Homo sapiens
ctttgggatccatgc

SEQ ID NO: 99653 - DNA, 15 bp, Homo sapiens
gctttgggatccatg

SEQ ID NO: 99654 - DNA, 15 bp, Homo sapiens
ggctttgggatccat

SEQ ID NO: 99655 - DNA, 15 bp, Homo sapiens
gggctttgggatcca

SEQ ID NO: 99656 - DNA, 15 bp, Homo sapiens
cgggctttgggatcc

SEQ ID NO: 99657 - DNA, 15 bp, Homo sapiens
ccgggctttgggatc

SEQ ID NO: 99658 - DNA, 15 bp, Homo sapiens
gccgggctttgggat

SEQ ID NO: 99659 - DNA, 15 bp, Homo sapiens
cgccgggctttggga

SEQ ID NO: 99660 - DNA, 15 bp, Homo sapiens
ccgccgggctttggg

SEQ ID NO: 99661 - DNA, 15 bp, Homo sapiens
accgccgggctttgg

SEQ ID NO: 99662 - DNA, 15 bp, Homo sapiens
aaccgccgggctttg

SEQ ID NO: 99663 - DNA, 15 bp, Homo sapiens
gaaccgccgggcttt

SEQ ID NO: 99664 - DNA, 15 bp, Homo sapiens
agaaccgccgggctt

SEQ ID NO: 99665 - DNA, 15 bp, Homo sapiens
aagaaccgccgggct

SEQ ID NO: 99666 - DNA, 15 bp, Homo sapiens
caagaaccgccgggc

SEQ ID NO: 99667 - DNA, 15 bp, Homo sapiens
acaagaaccgccggg

SEQ ID NO: 99668 - DNA, 15 bp, Homo sapiens
cacaagaaccgccgg

SEQ ID NO: 99669 - DNA, 15 bp, Homo sapiens
ccacaagaaccgccg

SEQ ID NO: 99670 - DNA, 15 bp, Homo sapiens
tccacaagaaccgcc

SEQ ID NO: 99671 - DNA, 15 bp, Homo sapiens
ttccacaagaaccgc

SEQ ID NO: 99672 - DNA, 15 bp, Homo sapiens
attccacaagaaccg

SEQ ID NO: 99673 - DNA, 15 bp, Homo sapiens
aattccacaagaacc

SEQ ID NO: 99674 - DNA, 15 bp, Homo sapiens
caattccacaagaac

SEQ ID NO: 99675 - DNA, 15 bp, Homo sapiens
acaattccacaagaa

SEQ ID NO: 99676 - DNA, 15 bp, Homo sapiens
cacaattccacaaga

SEQ ID NO: 99677 - DNA, 15 bp, Homo sapiens
gcacaattccacaag

SEQ ID NO: 99678 - DNA, 15 bp, Homo sapiens
ggcacaattccacaa

SEQ ID NO: 99679 - DNA, 15 bp, Homo sapiens
gggcacaattccaca

SEQ ID NO: 99680 - DNA, 15 bp, Homo sapiens
agggcacaattccac

SEQ ID NO: 99681 - DNA, 15 bp, Homo sapiens
tagggcacaattcca

SEQ ID NO: 99682 - DNA, 15 bp, Homo sapiens
ttagggcacaattcc

SEQ ID NO: 99683 - DNA, 15 bp, Homo sapiens
cttagggcacaattc

SEQ ID NO: 99684 - DNA, 15 bp, Homo sapiens
acttagggcacaatt

SEQ ID NO: 99685 - DNA, 15 bp, Homo sapiens
cacttagggcacaat

SEQ ID NO: 99686 - DNA, 15 bp, Homo sapiens
acacttagggcacaa

SEQ ID NO: 99687 - DNA, 15 bp, Homo sapiens
aacacttagggcaca

SEQ ID NO: 99688 - DNA, 15 bp, Homo sapiens
caacacttagggcac

SEQ ID NO: 99689 - DNA, 15 bp, Homo sapiens
acaacacttagggca

SEQ ID NO: 99690 - DNA, 15 bp, Homo sapiens
gacaacacttagggc

SEQ ID NO: 99691 - DNA, 15 bp, Homo sapiens
tgacaacacttaggg

SEQ ID NO: 99692 - DNA, 15 bp, Homo sapiens
ttgacaacacttagg

SEQ ID NO: 99693 - DNA, 15 bp, Homo sapiens
cttgacaacacttag

SEQ ID NO: 99694 - DNA, 15 bp, Homo sapiens
ccttgacaacactta

SEQ ID NO: 99695 - DNA, 15 bp, Homo sapiens
tccttgacaacactt

SEQ ID NO: 99696 - DNA, 15 bp, Homo sapiens
ctccttgacaacact

SEQ ID NO: 99697 - DNA, 15 bp, Homo sapiens
cctccttgacaacac

SEQ ID NO: 99698 - DNA, 15 bp, Homo sapiens
ccctccttgacaaca

SEQ ID NO: 99699 - DNA, 15 bp, Homo sapiens
cccctccttgacaac

SEQ ID NO: 99700 - DNA, 15 bp, Homo sapiens
tcccctccttgacaa

SEQ ID NO: 99701 - DNA, 15 bp, Homo sapiens
ctcccctccttgaca

SEQ ID NO: 99702 - DNA, 15 bp, Homo sapiens
tctcccctccttgac

SEQ ID NO: 99703 - DNA, 15 bp, Homo sapiens
atctcccctccttga

SEQ ID NO: 99704 - DNA, 15 bp, Homo sapiens
gatctcccctccttg

SEQ ID NO: 99705 - DNA, 15 bp, Homo sapiens
tgatctcccctcctt

SEQ ID NO: 99706 - DNA, 15 bp, Homo sapiens
ctgatctcccctcct

SEQ ID NO: 99707 - DNA, 15 bp, Homo sapiens
actgatctcccctcc

SEQ ID NO: 99708 - DNA, 15 bp, Homo sapiens
tactgatctcccctc

SEQ ID NO: 99709 - DNA, 15 bp, Homo sapiens
ctactgatctcccct

SEQ ID NO: 99710 - DNA, 15 bp, Homo sapiens
actactgatctcccc

SEQ ID NO: 99711 - DNA, 15 bp, Homo sapiens
cactactgatctccc

SEQ ID NO: 99712 - DNA, 15 bp, Homo sapiens
gcactactgatctcc

SEQ ID NO: 99713 - DNA, 15 bp, Homo sapiens
agcactactgatctc

SEQ ID NO: 99714 - DNA, 15 bp, Homo sapiens
aagcactactgatct

SEQ ID NO: 99715 - DNA, 15 bp, Homo sapiens
taagcactactgatc

SEQ ID NO: 99716 - DNA, 15 bp, Homo sapiens
gtaagcactactgat

SEQ ID NO: 99717 - DNA, 15 bp, Homo sapiens
tgtaagcactactga

SEQ ID NO: 99718 - DNA, 15 bp, Homo sapiens
atgtaagcactactg

SEQ ID NO: 99719 - DNA, 15 bp, Homo sapiens
gatgtaagcactact

SEQ ID NO: 99720 - DNA, 15 bp, Homo sapiens
agatgtaagcactac

SEQ ID NO: 99721 - DNA, 15 bp, Homo sapiens
gagatgtaagcacta

SEQ ID NO: 99722 - DNA, 15 bp, Homo sapiens
tgagatgtaagcact

SEQ ID NO: 99723 - DNA, 15 bp, Homo sapiens
atgagatgtaagcac

SEQ ID NO: 99724 - DNA, 15 bp, Homo sapiens
tatgagatgtaagca

SEQ ID NO: 99725 - DNA, 15 bp, Homo sapiens
ctatgagatgtaagc

SEQ ID NO: 99726 - DNA, 15 bp, Homo sapiens
cctatgagatgtaag

SEQ ID NO: 99727 - DNA, 15 bp, Homo sapiens
acctatgagatgtaa

SEQ ID NO: 99728 - DNA, 15 bp, Homo sapiens
gacctatgagatgta

SEQ ID NO: 99729 - DNA, 15 bp, Homo sapiens
ggacctatgagatgt

SEQ ID NO: 99730 - DNA, 15 bp, Homo sapiens
cggacctatgagatg

SEQ ID NO: 99731 - DNA, 15 bp, Homo sapiens
acggacctatgagat

SEQ ID NO: 99732 - DNA, 15 bp, Homo sapiens
tacggacctatgaga

SEQ ID NO: 99733 - DNA, 15 bp, Homo sapiens
ctacggacctatgag

SEQ ID NO: 99734 - DNA, 15 bp, Homo sapiens
actacggacctatga

SEQ ID NO: 99735 - DNA, 15 bp, Homo sapiens
tactacggacctatg

SEQ ID NO: 99736 - DNA, 15 bp, Homo sapiens
ttactacggacctat

SEQ ID NO: 99737 - DNA, 15 bp, Homo sapiens
tttactacggaccta

SEQ ID NO: 99738 - DNA, 15 bp, Homo sapiens
ctttactacggacct

SEQ ID NO: 99739 - DNA, 15 bp, Homo sapiens
actttactacggacc

SEQ ID NO: 99740 - DNA, 15 bp, Homo sapiens
gactttactacggac

SEQ ID NO: 99741 - DNA, 15 bp, Homo sapiens
agactttactacgga

SEQ ID NO: 99742 - DNA, 15 bp, Homo sapiens
aagactttactacgg

SEQ ID NO: 99743 - DNA, 15 bp, Homo sapiens
caagactttactacg

SEQ ID NO: 99744 - DNA, 15 bp, Homo sapiens
ccaagactttactac

SEQ ID NO: 99745 - DNA, 15 bp, Homo sapiens
cccaagactttacta

SEQ ID NO: 99746 - DNA, 15 bp, Homo sapiens
acccaagactttact

SEQ ID NO: 99747 - DNA, 15 bp, Homo sapiens
aacccaagactttac

SEQ ID NO: 99748 - DNA, 15 bp, Homo sapiens
gaacccaagacttta

SEQ ID NO: 99749 - DNA, 15 bp, Homo sapiens
ggaacccaagacttt

SEQ ID NO: 99750 - DNA, 15 bp, Homo sapiens
aggaacccaagactt

SEQ ID NO: 99751 - DNA, 15 bp, Homo sapiens
gaggaacccaagact

SEQ ID NO: 99752 - DNA, 15 bp, Homo sapiens
tgaggaacccaagac

SEQ ID NO: 99753 - DNA, 15 bp, Homo sapiens
gtgaggaacccaaga

SEQ ID NO: 99754 - DNA, 15 bp, Homo sapiens
agtgaggaacccaag

SEQ ID NO: 99755 - DNA, 15 bp, Homo sapiens
cagtgaggaacccaa

SEQ ID NO: 99756 - DNA, 15 bp, Homo sapiens
acagtgaggaaccca

SEQ ID NO: 99757 - DNA, 15 bp, Homo sapiens
cacagtgaggaaccc

SEQ ID NO: 99758 - DNA, 15 bp, Homo sapiens
ccacagtgaggaacc

SEQ ID NO: 99759 - DNA, 15 bp, Homo sapiens
cccacagtgaggaac

SEQ ID NO: 99760 - DNA, 15 bp, Homo sapiens
tcccacagtgaggaa

SEQ ID NO: 99761 - DNA, 15 bp, Homo sapiens
atcccacagtgagga

SEQ ID NO: 99762 - DNA, 15 bp, Homo sapiens
catcccacagtgagg

SEQ ID NO: 99763 - DNA, 15 bp, Homo sapiens
acatcccacagtgag

SEQ ID NO: 99764 - DNA, 15 bp, Homo sapiens
aacatcccacagtga

SEQ ID NO: 99765 - DNA, 15 bp, Homo sapiens
aaacatcccacagtg

SEQ ID NO: 99766 - DNA, 15 bp, Homo sapiens
aaaacatcccacagt

SEQ ID NO: 99767 - DNA, 15 bp, Homo sapiens
taaaacatcccacag

SEQ ID NO: 99768 - DNA, 15 bp, Homo sapiens
ttaaaacatcccaca

SEQ ID NO: 99769 - DNA, 15 bp, Homo sapiens
gttaaaacatcccac

SEQ ID NO: 99770 - DNA, 15 bp, Homo sapiens
agttaaaacatccca

SEQ ID NO: 99771 - DNA, 15 bp, Homo sapiens
aagttaaaacatccc

SEQ ID NO: 99772 - DNA, 15 bp, Homo sapiens
aaagttaaaacatcc

SEQ ID NO: 99773 - DNA, 15 bp, Homo sapiens
gaaagttaaaacatc

SEQ ID NO: 99774 - DNA, 15 bp, Homo sapiens
ggaaagttaaaacat

SEQ ID NO: 99775 - DNA, 15 bp, Homo sapiens
tggaaagttaaaaca

SEQ ID NO: 99776 - DNA, 15 bp, Homo sapiens
ttggaaagttaaaac

SEQ ID NO: 99777 - DNA, 15 bp, Homo sapiens
cttggaaagttaaaa

SEQ ID NO: 99778 - DNA, 15 bp, Homo sapiens
acttggaaagttaaa

SEQ ID NO: 99779 - DNA, 15 bp, Homo sapiens
tacttggaaagttaa

SEQ ID NO: 99780 - DNA, 15 bp, Homo sapiens
ctacttggaaagtta

SEQ ID NO: 99781 - DNA, 15 bp, Homo sapiens
tctacttggaaagtt

SEQ ID NO: 99782 - DNA, 15 bp, Homo sapiens
ttctacttggaaagt

SEQ ID NO: 99783 - DNA, 15 bp, Homo sapiens
attctacttggaaag

SEQ ID NO: 99784 - DNA, 15 bp, Homo sapiens
tattctacttggaaa

SEQ ID NO: 99785 - DNA, 15 bp, Homo sapiens
atattctacttggaa

SEQ ID NO: 99786 - DNA, 15 bp, Homo sapiens
catattctacttgga

SEQ ID NO: 99787 - DNA, 15 bp, Homo sapiens
gcatattctacttgg

SEQ ID NO: 99788 - DNA, 15 bp, Homo sapiens
cgcatattctacttg

SEQ ID NO: 99789 - DNA, 15 bp, Homo sapiens
tcgcatattctactt

SEQ ID NO: 99790 - DNA, 15 bp, Homo sapiens
atcgcatattctact

SEQ ID NO: 99791 - DNA, 15 bp, Homo sapiens
gatcgcatattctac

SEQ ID NO: 99792 - DNA, 15 bp, Homo sapiens
tgatcgcatattcta

SEQ ID NO: 99793 - DNA, 15 bp, Homo sapiens
atgatcgcatattct

SEQ ID NO: 99794 - DNA, 15 bp, Homo sapiens
aatgatcgcatattc

SEQ ID NO: 99795 - DNA, 15 bp, Homo sapiens
aaatgatcgcatatt

SEQ ID NO: 99796 - DNA, 15 bp, Homo sapiens
aaaatgatcgcatat

SEQ ID NO: 99797 - DNA, 15 bp, Homo sapiens
caaaatgatcgcata

SEQ ID NO: 99798 - DNA, 15 bp, Homo sapiens
acaaaatgatcgcat

SEQ ID NO: 99799 - DNA, 15 bp, Homo sapiens
tacaaaatgatcgca

SEQ ID NO: 99800 - DNA, 15 bp, Homo sapiens
ttacaaaatgatcgc

SEQ ID NO: 99801 - DNA, 15 bp, Homo sapiens
tttacaaaatgatcg

SEQ ID NO: 99802 - DNA, 15 bp, Homo sapiens
ttttacaaaatgatc

SEQ ID NO: 99803 - DNA, 15 bp, Homo sapiens
tttttacaaaatgat

SEQ ID NO: 99804 - DNA, 15 bp, Homo sapiens
atttttacaaaatga

SEQ ID NO: 99805 - DNA, 15 bp, Homo sapiens
aatttttacaaaatg

SEQ ID NO: 99806 - DNA, 15 bp, Homo sapiens
taatttttacaaaat

SEQ ID NO: 99807 - DNA, 15 bp, Homo sapiens
ctaatttttacaaaa

SEQ ID NO: 99808 - DNA, 15 bp, Homo sapiens
tctaatttttacaaa

SEQ ID NO: 99809 - DNA, 15 bp, Homo sapiens
ttctaatttttacaa

SEQ ID NO: 99810 - DNA, 15 bp, Homo sapiens
tttctaatttttaca

SEQ ID NO: 99811 - DNA, 15 bp, Homo sapiens
ttttctaatttttac

SEQ ID NO: 99812 - DNA, 15 bp, Homo sapiens
attttctaattttta

SEQ ID NO: 99813 - DNA, 15 bp, Homo sapiens
tattttctaattttt

SEQ ID NO: 99814 - DNA, 15 bp, Homo sapiens
gtattttctaatttt

SEQ ID NO: 99815 - DNA, 15 bp, Homo sapiens
tgtattttctaattt

SEQ ID NO: 99816 - DNA, 15 bp, Homo sapiens
ctgtattttctaatt

SEQ ID NO: 99817 - DNA, 15 bp, Homo sapiens
tctgtattttctaat

SEQ ID NO: 99818 - DNA, 15 bp, Homo sapiens
ttctgtattttctaa

SEQ ID NO: 99819 - DNA, 15 bp, Homo sapiens
tttctgtattttcta

SEQ ID NO: 99820 - DNA, 15 bp, Homo sapiens
ttttctgtattttct

SEQ ID NO: 99821 - DNA, 15 bp, Homo sapiens
cttttctgtattttc

SEQ ID NO: 99822 - DNA, 15 bp, Homo sapiens
gcttttctgtatttt

SEQ ID NO: 99823 - DNA, 15 bp, Homo sapiens
tgcttttctgtattt

SEQ ID NO: 99824 - DNA, 15 bp, Homo sapiens
ttgcttttctgtatt

SEQ ID NO: 99825 - DNA, 15 bp, Homo sapiens
tttgcttttctgtat

SEQ ID NO: 99826 - DNA, 15 bp, Homo sapiens
ctttgcttttctgta

SEQ ID NO: 99827 - DNA, 15 bp, Homo sapiens
tctttgcttttctgt

SEQ ID NO: 99828 - DNA, 15 bp, Homo sapiens
ctctttgcttttctg

SEQ ID NO: 99829 - DNA, 15 bp, Homo sapiens
actctttgcttttct

SEQ ID NO: 99830 - DNA, 15 bp, Homo sapiens
tactctttgcttttc

SEQ ID NO: 99831 - DNA, 15 bp, Homo sapiens
ttactctttgctttt

SEQ ID NO: 99832 - DNA, 15 bp, Homo sapiens
tttactctttgcttt

SEQ ID NO: 99833 - DNA, 15 bp, Homo sapiens
ttttactctttgctt

SEQ ID NO: 99834 - DNA, 15 bp, Homo sapiens
gttttactctttgct

SEQ ID NO: 99835 - DNA, 15 bp, Homo sapiens
tgttttactctttgc

SEQ ID NO: 99836 - DNA, 15 bp, Homo sapiens
ttgttttactctttg

SEQ ID NO: 99837 - DNA, 15 bp, Homo sapiens
attgttttactcttt

SEQ ID NO: 99838 - DNA, 15 bp, Homo sapiens
aattgttttactctt

SEQ ID NO: 99839 - DNA, 15 bp, Homo sapiens
taattgttttactct

SEQ ID NO: 99840 - DNA, 15 bp, Homo sapiens
ataattgttttactc

SEQ ID NO: 99841 - DNA, 15 bp, Homo sapiens
aataattgttttact

SEQ ID NO: 99842 - DNA, 15 bp, Homo sapiens
taataattgttttac

SEQ ID NO: 99843 - DNA, 15 bp, Homo sapiens
gtaataattgtttta

SEQ ID NO: 99844 - DNA, 15 bp, Homo sapiens
ggtaataattgtttt

SEQ ID NO: 99845 - DNA, 15 bp, Homo sapiens
aggtaataattgttt

SEQ ID NO: 99846 - DNA, 15 bp, Homo sapiens
caggtaataattgtt

SEQ ID NO: 99847 - DNA, 15 bp, Homo sapiens
tcaggtaataattgt

SEQ ID NO: 99848 - DNA, 15 bp, Homo sapiens
ttcaggtaataattg

SEQ ID NO: 99849 - DNA, 15 bp, Homo sapiens
tttcaggtaataatt

SEQ ID NO: 99850 - DNA, 15 bp, Homo sapiens
atttcaggtaataat

SEQ ID NO: 99851 - DNA, 15 bp, Homo sapiens
aatttcaggtaataa

SEQ ID NO: 99852 - DNA, 15 bp, Homo sapiens
taatttcaggtaata

SEQ ID NO: 99853 - DNA, 15 bp, Homo sapiens
ataatttcaggtaat

SEQ ID NO: 99854 - DNA, 15 bp, Homo sapiens
tataatttcaggtaa

SEQ ID NO: 99855 - DNA, 15 bp, Homo sapiens
atataatttcaggta

SEQ ID NO: 99856 - DNA, 15 bp, Homo sapiens
tatataatttcaggt

SEQ ID NO: 99857 - DNA, 15 bp, Homo sapiens
atatataatttcagg

SEQ ID NO: 99858 - DNA, 15 bp, Homo sapiens
catatataatttcag

SEQ ID NO: 99859 - DNA, 15 bp, Homo sapiens
gcatatataatttca

SEQ ID NO: 99860 - DNA, 15 bp, Homo sapiens
tgcatatataatttc

SEQ ID NO: 99861 - DNA, 15 bp, Homo sapiens
atgcatatataattt

SEQ ID NO: 99862 - DNA, 15 bp, Homo sapiens
tatgcatatataatt

SEQ ID NO: 99863 - DNA, 15 bp, Homo sapiens
atatgcatatataat

SEQ ID NO: 99864 - DNA, 15 bp, Homo sapiens
aatatgcatatataa

SEQ ID NO: 99865 - DNA, 15 bp, Homo sapiens
gaatatgcatatata

SEQ ID NO: 99866 - DNA, 15 bp, Homo sapiens
agaatatgcatatat

SEQ ID NO: 99867 - DNA, 15 bp, Homo sapiens
aagaatatgcatata

SEQ ID NO: 99868 - DNA, 15 bp, Homo sapiens
taagaatatgcatat

SEQ ID NO: 99869 - DNA, 15 bp, Homo sapiens
gtaagaatatgcata

SEQ ID NO: 99870 - DNA, 15 bp, Homo sapiens
tgtaagaatatgcat

SEQ ID NO: 99871 - DNA, 15 bp, Homo sapiens
ttgtaagaatatgca

SEQ ID NO: 99872 - DNA, 15 bp, Homo sapiens
tttgtaagaatatgc

SEQ ID NO: 99873 - DNA, 15 bp, Homo sapiens
ttttgtaagaatatg

SEQ ID NO: 99874 - DNA, 15 bp, Homo sapiens
tttttgtaagaatat

SEQ ID NO: 99875 - DNA, 15 bp, Homo sapiens
atttttgtaagaata

SEQ ID NO: 99876 - DNA, 15 bp, Homo sapiens
catttttgtaagaat

SEQ ID NO: 99877 - DNA, 15 bp, Homo sapiens
gcatttttgtaagaa

SEQ ID NO: 99878 - DNA, 15 bp, Homo sapiens
tgcatttttgtaaga

SEQ ID NO: 99879 - DNA, 15 bp, Homo sapiens
ttgcatttttgtaag

SEQ ID NO: 99880 - DNA, 15 bp, Homo sapiens
cttgcatttttgtaa

SEQ ID NO: 99881 - DNA, 15 bp, Homo sapiens
gcttgcatttttgta

SEQ ID NO: 99882 - DNA, 15 bp, Homo sapiens
ggcttgcatttttgt

SEQ ID NO: 99883 - DNA, 15 bp, Homo sapiens
gggcttgcatttttg

SEQ ID NO: 99884 - DNA, 15 bp, Homo sapiens
tgggcttgcattttt

SEQ ID NO: 99885 - DNA, 15 bp, Homo sapiens
ctgggcttgcatttt

SEQ ID NO: 99886 - DNA, 15 bp, Homo sapiens
actgggcttgcattt

SEQ ID NO: 99887 - DNA, 15 bp, Homo sapiens
tactgggcttgcatt

SEQ ID NO: 99888 - DNA, 15 bp, Homo sapiens
atactgggcttgcat

SEQ ID NO: 99889 - DNA, 15 bp, Homo sapiens
tatactgggcttgca

SEQ ID NO: 99890 - DNA, 15 bp, Homo sapiens
ttatactgggcttgc

SEQ ID NO: 99891 - DNA, 15 bp, Homo sapiens
tttatactgggcttg

SEQ ID NO: 99892 - DNA, 15 bp, Homo sapiens
atttatactgggctt

SEQ ID NO: 99893 - DNA, 15 bp, Homo sapiens
tatttatactgggct

SEQ ID NO: 99894 - DNA, 15 bp, Homo sapiens
gtatttatactgggc

SEQ ID NO: 99895 - DNA, 15 bp, Homo sapiens
agtatttatactggg

SEQ ID NO: 99896 - DNA, 15 bp, Homo sapiens
cagtatttatactgg

SEQ ID NO: 99897 - DNA, 15 bp, Homo sapiens
gcagtatttatactg

SEQ ID NO: 99898 - DNA, 15 bp, Homo sapiens
agcagtatttatact

SEQ ID NO: 99899 - DNA, 15 bp, Homo sapiens
gagcagtatttatac

SEQ ID NO: 99900 - DNA, 15 bp, Homo sapiens
agagcagtatttata

SEQ ID NO: 99901 - DNA, 15 bp, Homo sapiens
aagagcagtatttat

SEQ ID NO: 99902 - DNA, 15 bp, Homo sapiens
aaagagcagtattta

SEQ ID NO: 99903 - DNA, 15 bp, Homo sapiens
aaaagagcagtattt

SEQ ID NO: 99904 - DNA, 15 bp, Homo sapiens
aaaaagagcagtatt

SEQ ID NO: 99905 - DNA, 15 bp, Homo sapiens
gaaaaagagcagtat

SEQ ID NO: 99906 - DNA, 15 bp, Homo sapiens
tgaaaaagagcagta

SEQ ID NO: 99907 - DNA, 15 bp, Homo sapiens
gtgaaaaagagcagt

SEQ ID NO: 99908 - DNA, 15 bp, Homo sapiens
agtgaaaaagagcag

SEQ ID NO: 99909 - DNA, 15 bp, Homo sapiens
aagtgaaaaagagca

SEQ ID NO: 99910 - DNA, 15 bp, Homo sapiens
taagtgaaaaagagc

SEQ ID NO: 99911 - DNA, 15 bp, Homo sapiens
ttaagtgaaaaagag

SEQ ID NO: 99912 - DNA, 15 bp, Homo sapiens
attaagtgaaaaaga

SEQ ID NO: 99913 - DNA, 15 bp, Homo sapiens
tattaagtgaaaaag

SEQ ID NO: 99914 - DNA, 15 bp, Homo sapiens
tatattaagtgaaaa

SEQ ID NO: 99915 - DNA, 15 bp, Homo sapiens
atatattaagtgaaa

SEQ ID NO: 99916 - DNA, 15 bp, Homo sapiens
aatatattaagtgaa

SEQ ID NO: 99917 - DNA, 15 bp, Homo sapiens
caatatattaagtga

SEQ ID NO: 99918 - DNA, 15 bp, Homo sapiens
acaatatattaagtg

SEQ ID NO: 99919 - DNA, 15 bp, Homo sapiens
tacaatatattaagt

SEQ ID NO: 99920 - DNA, 15 bp, Homo sapiens
ttacaatatattaag

SEQ ID NO: 99921 - DNA, 15 bp, Homo sapiens
tttacaatatattaa

SEQ ID NO: 99922 - DNA, 15 bp, Homo sapiens
gtttacaatatatta

SEQ ID NO: 99923 - DNA, 15 bp, Homo sapiens
tgtttacaatatatt

SEQ ID NO: 99924 - DNA, 15 bp, Homo sapiens
atgtttacaatatat

SEQ ID NO: 99925 - DNA, 15 bp, Homo sapiens
aatgtttacaatata

SEQ ID NO: 99926 - DNA, 15 bp, Homo sapiens
taatgtttacaatat

SEQ ID NO: 99927 - DNA, 15 bp, Homo sapiens
ataatgtttacaata

SEQ ID NO: 99928 - DNA, 15 bp, Homo sapiens
aataatgtttacaat

SEQ ID NO: 99929 - DNA, 15 bp, Homo sapiens
gaataatgtttacaa

SEQ ID NO: 99930 - DNA, 15 bp, Homo sapiens
ggaataatgtttaca

SEQ ID NO: 99931 - DNA, 15 bp, Homo sapiens
tggaataatgtttac

SEQ ID NO: 99932 - DNA, 15 bp, Homo sapiens
ttggaataatgttta

SEQ ID NO: 99933 - DNA, 15 bp, Homo sapiens
cttggaataatgttt

SEQ ID NO: 99934 - DNA, 15 bp, Homo sapiens
acttggaataatgtt

SEQ ID NO: 99935 - DNA, 15 bp, Homo sapiens
gacttggaataatgt

SEQ ID NO: 99936 - DNA, 15 bp, Homo sapiens
tgacttggaataatg

SEQ ID NO: 99937 - DNA, 15 bp, Homo sapiens
ctgacttggaataat

SEQ ID NO: 99938 - DNA, 15 bp, Homo sapiens
actgacttggaataa

SEQ ID NO: 99939 - DNA, 15 bp, Homo sapiens
cactgacttggaata

SEQ ID NO: 99940 - DNA, 15 bp, Homo sapiens
gcactgacttggaat

SEQ ID NO: 99941 - DNA, 15 bp, Homo sapiens
tgcactgacttggaa

SEQ ID NO: 99942 - DNA, 15 bp, Homo sapiens
atgcactgacttgga

SEQ ID NO: 99943 - DNA, 15 bp, Homo sapiens
aatgcactgacttgg

SEQ ID NO: 99944 - DNA, 15 bp, Homo sapiens
aaatgcactgacttg

SEQ ID NO: 99945 - DNA, 15 bp, Homo sapiens
taaatgcactgactt

SEQ ID NO: 99946 - DNA, 15 bp, Homo sapiens
ctaaatgcactgact

SEQ ID NO: 99947 - DNA, 15 bp, Homo sapiens
cctaaatgcactgac

SEQ ID NO: 99948 - DNA, 15 bp, Homo sapiens
acctaaatgcactga

SEQ ID NO: 99949 - DNA, 15 bp, Homo sapiens
cacctaaatgcactg

SEQ ID NO: 99950 - DNA, 15 bp, Homo sapiens
acacctaaatgcact

SEQ ID NO: 99951 - DNA, 15 bp, Homo sapiens
gacacctaaatgcac

SEQ ID NO: 99952 - DNA, 15 bp, Homo sapiens
tgacacctaaatgca

SEQ ID NO: 99953 - DNA, 15 bp, Homo sapiens
atgacacctaaatgc

SEQ ID NO: 99954 - DNA, 15 bp, Homo sapiens
aatgacacctaaatg

SEQ ID NO: 99955 - DNA, 15 bp, Homo sapiens
aaatgacacctaaat

SEQ ID NO: 99956 - DNA, 15 bp, Homo sapiens
gaaatgacacctaaa

SEQ ID NO: 99957 - DNA, 15 bp, Homo sapiens
agaaatgacacctaa

SEQ ID NO: 99958 - DNA, 15 bp, Homo sapiens
aagaaatgacaccta

SEQ ID NO: 99959 - DNA, 15 bp, Homo sapiens
taagaaatgacacct

SEQ ID NO: 99960 - DNA, 15 bp, Homo sapiens
ataagaaatgacacc

SEQ ID NO: 99961 - DNA, 15 bp, Homo sapiens
tataagaaatgacac

SEQ ID NO: 99962 - DNA, 15 bp, Homo sapiens
ctataagaaatgaca

SEQ ID NO: 99963 - DNA, 15 bp, Homo sapiens
gctataagaaatgac

SEQ ID NO: 99964 - DNA, 15 bp, Homo sapiens
agctataagaaatga

SEQ ID NO: 99965 - DNA, 15 bp, Homo sapiens
cagctataagaaatg

SEQ ID NO: 99966 - DNA, 15 bp, Homo sapiens
ccagctataagaaat

SEQ ID NO: 99967 - DNA, 15 bp, Homo sapiens
tccagctataagaaa

SEQ ID NO: 99968 - DNA, 15 bp, Homo sapiens
atccagctataagaa

SEQ ID NO: 99969 - DNA, 15 bp, Homo sapiens
tatccagctataaga

SEQ ID NO: 99970 - DNA, 15 bp, Homo sapiens
ctatccagctataag

SEQ ID NO: 99971 - DNA, 15 bp, Homo sapiens
actatccagctataa

SEQ ID NO: 99972 - DNA, 15 bp, Homo sapiens
tactatccagctata

SEQ ID NO: 99973 - DNA, 15 bp, Homo sapiens
atactatccagctat

SEQ ID NO: 99974 - DNA, 15 bp, Homo sapiens
aatactatccagcta

SEQ ID NO: 99975 - DNA, 15 bp, Homo sapiens
gaatactatccagct

SEQ ID NO: 99976 - DNA, 15 bp, Homo sapiens
ggaatactatccagc

SEQ ID NO: 99977 - DNA, 15 bp, Homo sapiens
tggaatactatccag

SEQ ID NO: 99978 - DNA, 15 bp, Homo sapiens
atggaatactatcca

SEQ ID NO: 99979 - DNA, 15 bp, Homo sapiens
aatggaatactatcc

SEQ ID NO: 99980 - DNA, 15 bp, Homo sapiens
taatggaatactatc

SEQ ID NO: 99981 - DNA, 15 bp, Homo sapiens
ctaatggaatactat

SEQ ID NO: 99982 - DNA, 15 bp, Homo sapiens
cctaatggaatacta

SEQ ID NO: 99983 - DNA, 15 bp, Homo sapiens
tcctaatggaatact

SEQ ID NO: 99984 - DNA, 15 bp, Homo sapiens
atcctaatggaatac

SEQ ID NO: 99985 - DNA, 15 bp, Homo sapiens
tatcctaatggaata

SEQ ID NO: 99986 - DNA, 15 bp, Homo sapiens
atatcctaatggaat

SEQ ID NO: 99987 - DNA, 15 bp, Homo sapiens
tatatcctaatggaa

SEQ ID NO: 99988 - DNA, 15 bp, Homo sapiens
gtatatcctaatgga

SEQ ID NO: 99989 - DNA, 15 bp, Homo sapiens
agtatatcctaatgg

SEQ ID NO: 99990 - DNA, 15 bp, Homo sapiens
gagtatatcctaatg

SEQ ID NO: 99991 - DNA, 15 bp, Homo sapiens
agagtatatcctaat

SEQ ID NO: 99992 - DNA, 15 bp, Homo sapiens
aagagtatatcctaa

SEQ ID NO: 99993 - DNA, 15 bp, Homo sapiens
taagagtatatccta

SEQ ID NO: 99994 - DNA, 15 bp, Homo sapiens
ataagagtatatcct

SEQ ID NO: 99995 - DNA, 15 bp, Homo sapiens
aataagagtatatcc

SEQ ID NO: 99996 - DNA, 15 bp, Homo sapiens
aaataagagtatatc

SEQ ID NO: 99997 - DNA, 15 bp, Homo sapiens
taaataagagtatat

SEQ ID NO: 99998 - DNA, 15 bp, Homo sapiens
ttaaataagagtata

SEQ ID NO: 99999 - DNA, 15 bp, Homo sapiens
gttaaataagagtat

SEQ ID NO: 100000 - DNA, 15 bp, Homo sapiens
agttaaataagagta

SEQ ID NO: 100001 - DNA, 15 bp, Homo sapiens
tagttaaataagagt

SEQ ID NO: 100002 - DNA, 15 bp, Homo sapiens
atagttaaataagag

SEQ ID NO: 100003 - DNA, 15 bp, Homo sapiens
aatagttaaataaga

SEQ ID NO: 100004 - DNA, 15 bp, Homo sapiens
gaatagttaaataag

SEQ ID NO: 100005 - DNA, 15 bp, Homo sapiens
ggaatagttaaataa

SEQ ID NO: 100006 - DNA, 15 bp, Homo sapiens
gggaatagttaaata

SEQ ID NO: 100007 - DNA, 15 bp, Homo sapiens
ggggaatagttaaat

SEQ ID NO: 100008 - DNA, 15 bp, Homo sapiens
gggggaatagttaaa

SEQ ID NO: 100009 - DNA, 15 bp, Homo sapiens
agggggaatagttaa

SEQ ID NO: 100010 - DNA, 15 bp, Homo sapiens
aagggggaatagtta

SEQ ID NO: 100011 - DNA, 15 bp, Homo sapiens
aaagggggaatagtt

SEQ ID NO: 100012 - DNA, 15 bp, Homo sapiens
aaaagggggaatagt

SEQ ID NO: 100013 - DNA, 15 bp, Homo sapiens
caaaagggggaatag

SEQ ID NO: 100014 - DNA, 15 bp, Homo sapiens
acaaaagggggaata

SEQ ID NO: 100015 - DNA, 15 bp, Homo sapiens
tacaaaagggggaat

SEQ ID NO: 100016 - DNA, 15 bp, Homo sapiens
ctacaaaagggggaa

SEQ ID NO: 100017 - DNA, 15 bp, Homo sapiens
tctacaaaaggggga

SEQ ID NO: 100018 - DNA, 15 bp, Homo sapiens
gtctacaaaaggggg

SEQ ID NO: 100019 - DNA, 15 bp, Homo sapiens
tgtctacaaaagggg

SEQ ID NO: 100020 - DNA, 15 bp, Homo sapiens
atgtctacaaaaggg

SEQ ID NO: 100021 - DNA, 15 bp, Homo sapiens
aatgtctacaaaagg

SEQ ID NO: 100022 - DNA, 15 bp, Homo sapiens
aaatgtctacaaaag

SEQ ID NO: 100023 - DNA, 15 bp, Homo sapiens
caaatgtctacaaaa

SEQ ID NO: 100024 - DNA, 15 bp, Homo sapiens
ccaaatgtctacaaa

SEQ ID NO: 100025 - DNA, 15 bp, Homo sapiens
tccaaatgtctacaa

SEQ ID NO: 100026 - DNA, 15 bp, Homo sapiens
atccaaatgtctaca

SEQ ID NO: 100027 - DNA, 15 bp, Homo sapiens
aatccaaatgtctac

SEQ ID NO: 100028 - DNA, 15 bp, Homo sapiens
taatccaaatgtcta

SEQ ID NO: 100029 - DNA, 15 bp, Homo sapiens
ataatccaaatgtct

SEQ ID NO: 100030 - DNA, 15 bp, Homo sapiens
aataatccaaatgtc

SEQ ID NO: 100031 - DNA, 15 bp, Homo sapiens
aaataatccaaatgt

SEQ ID NO: 100032 - DNA, 15 bp, Homo sapiens
gaaataatccaaatg

SEQ ID NO: 100033 - DNA, 15 bp, Homo sapiens
ggaaataatccaaat

SEQ ID NO: 100034 - DNA, 15 bp, Homo sapiens
tggaaataatccaaa

SEQ ID NO: 100035 - DNA, 15 bp, Homo sapiens
ttggaaataatccaa

SEQ ID NO: 100036 - DNA, 15 bp, Homo sapiens
gttggaaataatcca

SEQ ID NO: 100037 - DNA, 15 bp, Homo sapiens
agttggaaataatcc

SEQ ID NO: 100038 - DNA, 15 bp, Homo sapiens
aagttggaaataatc

SEQ ID NO: 100039 - DNA, 15 bp, Homo sapiens
caagttggaaataat

SEQ ID NO: 100040 - DNA, 15 bp, Homo sapiens
acaagttggaaataa

SEQ ID NO: 100041 - DNA, 15 bp, Homo sapiens
aacaagttggaaata

SEQ ID NO: 100042 - DNA, 15 bp, Homo sapiens
gaacaagttggaaat

SEQ ID NO: 100043 - DNA, 15 bp, Homo sapiens
tgaacaagttggaaa

SEQ ID NO: 100044 - DNA, 15 bp, Homo sapiens
gtgaacaagttggaa

SEQ ID NO: 100045 - DNA, 15 bp, Homo sapiens
tgtgaacaagttgga

SEQ ID NO: 100046 - DNA, 15 bp, Homo sapiens
ttgtgaacaagttgg

SEQ ID NO: 100047 - DNA, 15 bp, Homo sapiens
attgtgaacaagttg

SEQ ID NO: 100048 - DNA, 15 bp, Homo sapiens
aattgtgaacaagtt

SEQ ID NO: 100049 - DNA, 15 bp, Homo sapiens
caattgtgaacaagt

SEQ ID NO: 100050 - DNA, 15 bp, Homo sapiens
acaattgtgaacaag

SEQ ID NO: 100051 - DNA, 15 bp, Homo sapiens
tacaattgtgaacaa

SEQ ID NO: 100052 - DNA, 15 bp, Homo sapiens
ttacaattgtgaaca

SEQ ID NO: 100053 - DNA, 15 bp, Homo sapiens
tttacaattgtgaac

SEQ ID NO: 100054 - DNA, 15 bp, Homo sapiens
gtttacaattgtgaa

SEQ ID NO: 100055 - DNA, 15 bp, Homo sapiens
tgtttacaattgtga

SEQ ID NO: 100056 - DNA, 15 bp, Homo sapiens
gtgtttacaattgtg

SEQ ID NO: 100057 - DNA, 15 bp, Homo sapiens
ggtgtttacaattgt

SEQ ID NO: 100058 - DNA, 15 bp, Homo sapiens
tggtgtttacaattg

SEQ ID NO: 100059 - DNA, 15 bp, Homo sapiens
gtggtgtttacaatt

SEQ ID NO: 100060 - DNA, 15 bp, Homo sapiens
agtggtgtttacaat

SEQ ID NO: 100061 - DNA, 15 bp, Homo sapiens
tagtggtgtttacaa

SEQ ID NO: 100062 - DNA, 15 bp, Homo sapiens
gtagtggtgtttaca

SEQ ID NO: 100063 - DNA, 15 bp, Homo sapiens
tgtagtggtgtttac

SEQ ID NO: 100064 - DNA, 15 bp, Homo sapiens
gtgtagtggtgttta

SEQ ID NO: 100065 - DNA, 15 bp, Homo sapiens
agtgtagtggtgttt

SEQ ID NO: 100066 - DNA, 15 bp, Homo sapiens
cagtgtagtggtgtt

SEQ ID NO: 100067 - DNA, 15 bp, Homo sapiens
tcagtgtagtggtgt

SEQ ID NO: 100068 - DNA, 15 bp, Homo sapiens
ttcagtgtagtggtg

SEQ ID NO: 100069 - DNA, 15 bp, Homo sapiens
gttcagtgtagtggt

SEQ ID NO: 100070 - DNA, 15 bp, Homo sapiens
tgttcagtgtagtgg

SEQ ID NO: 100071 - DNA, 15 bp, Homo sapiens
ctgttcagtgtagtg

SEQ ID NO: 100072 - DNA, 15 bp, Homo sapiens
gctgttcagtgtagt

SEQ ID NO: 100073 - DNA, 15 bp, Homo sapiens
tgctgttcagtgtag

SEQ ID NO: 100074 - DNA, 15 bp, Homo sapiens
atgctgttcagtgta

SEQ ID NO: 100075 - DNA, 15 bp, Homo sapiens
gatgctgttcagtgt

SEQ ID NO: 100076 - DNA, 15 bp, Homo sapiens
tgatgctgttcagtg

SEQ ID NO: 100077 - DNA, 15 bp, Homo sapiens
atgatgctgttcagt

SEQ ID NO: 100078 - DNA, 15 bp, Homo sapiens
gatgatgctgttcag

SEQ ID NO: 100079 - DNA, 15 bp, Homo sapiens
ggatgatgctgttca

SEQ ID NO: 100080 - DNA, 15 bp, Homo sapiens
gggatgatgctgttc

SEQ ID NO: 100081 - DNA, 15 bp, Homo sapiens
agggatgatgctgtt

SEQ ID NO: 100082 - DNA, 15 bp, Homo sapiens
tagggatgatgctgt

SEQ ID NO: 100083 - DNA, 15 bp, Homo sapiens
atagggatgatgctg

SEQ ID NO: 100084 - DNA, 15 bp, Homo sapiens
tatagggatgatgct

SEQ ID NO: 100085 - DNA, 15 bp, Homo sapiens
atatagggatgatgc

SEQ ID NO: 100086 - DNA, 15 bp, Homo sapiens
gatatagggatgatg

SEQ ID NO: 100087 - DNA, 15 bp, Homo sapiens
ggatatagggatgat

SEQ ID NO: 100088 - DNA, 15 bp, Homo sapiens
tggatatagggatga

SEQ ID NO: 100089 - DNA, 15 bp, Homo sapiens
gtggatatagggatg

SEQ ID NO: 100090 - DNA, 15 bp, Homo sapiens
tgtggatatagggat

SEQ ID NO: 100091 - DNA, 15 bp, Homo sapiens
atgtggatataggga

SEQ ID NO: 100092 - DNA, 15 bp, Homo sapiens
catgtggatataggg

SEQ ID NO: 100093 - DNA, 15 bp, Homo sapiens
acatgtggatatagg

SEQ ID NO: 100094 - DNA, 15 bp, Homo sapiens
tacatgtggatatag

SEQ ID NO: 100095 - DNA, 15 bp, Homo sapiens
gtacatgtggatata

SEQ ID NO: 100096 - DNA, 15 bp, Homo sapiens
agtacatgtggatat

SEQ ID NO: 100097 - DNA, 15 bp, Homo sapiens
aagtacatgtggata

SEQ ID NO: 100098 - DNA, 15 bp, Homo sapiens
caagtacatgtggat

SEQ ID NO: 100099 - DNA, 15 bp, Homo sapiens
acaagtacatgtgga

SEQ ID NO: 100100 - DNA, 15 bp, Homo sapiens
tacaagtacatgtgg

SEQ ID NO: 100101 - DNA, 15 bp, Homo sapiens
ttacaagtacatgtg

SEQ ID NO: 100102 - DNA, 15 bp, Homo sapiens
gttacaagtacatgt

SEQ ID NO: 100103 - DNA, 15 bp, Homo sapiens
tgttacaagtacatg

SEQ ID NO: 100104 - DNA, 15 bp, Homo sapiens
ctgttacaagtacat

SEQ ID NO: 100105 - DNA, 15 bp, Homo sapiens
tctgttacaagtaca

SEQ ID NO: 100106 - DNA, 15 bp, Homo sapiens
ttctgttacaagtac

SEQ ID NO: 100107 - DNA, 15 bp, Homo sapiens
attctgttacaagta

SEQ ID NO: 100108 - DNA, 15 bp, Homo sapiens
tattctgttacaagt

SEQ ID NO: 100109 - DNA, 15 bp, Homo sapiens
gtattctgttacaag

SEQ ID NO: 100110 - DNA, 15 bp, Homo sapiens
tgtattctgttacaa

SEQ ID NO: 100111 - DNA, 15 bp, Homo sapiens
ttgtattctgttaca

SEQ ID NO: 100112 - DNA, 15 bp, Homo sapiens
attgtattctgttac

SEQ ID NO: 100113 - DNA, 15 bp, Homo sapiens
aattgtattctgtta

SEQ ID NO: 100114 - DNA, 15 bp, Homo sapiens
gaattgtattctgtt

SEQ ID NO: 100115 - DNA, 15 bp, Homo sapiens
ggaattgtattctgt

SEQ ID NO: 100116 - DNA, 15 bp, Homo sapiens
gggaattgtattctg

SEQ ID NO: 100117 - DNA, 15 bp, Homo sapiens
agggaattgtattct

SEQ ID NO: 100118 - DNA, 15 bp, Homo sapiens
tagggaattgtattc

SEQ ID NO: 100119 - DNA, 15 bp, Homo sapiens
ctagggaattgtatt

SEQ ID NO: 100120 - DNA, 15 bp, Homo sapiens
cctagggaattgtat

SEQ ID NO: 100121 - DNA, 15 bp, Homo sapiens
tcctagggaattgta

SEQ ID NO: 100122 - DNA, 15 bp, Homo sapiens
ttcctagggaattgt

SEQ ID NO: 100123 - DNA, 15 bp, Homo sapiens
cttcctagggaattg

SEQ ID NO: 100124 - DNA, 15 bp, Homo sapiens
gcttcctagggaatt

SEQ ID NO: 100125 - DNA, 15 bp, Homo sapiens
agcttcctagggaat

SEQ ID NO: 100126 - DNA, 15 bp, Homo sapiens
cagcttcctagggaa

SEQ ID NO: 100127 - DNA, 15 bp, Homo sapiens
ccagcttcctaggga

SEQ ID NO: 100128 - DNA, 15 bp, Homo sapiens
tccagcttcctaggg

SEQ ID NO: 100129 - DNA, 15 bp, Homo sapiens
ttccagcttcctagg

SEQ ID NO: 100130 - DNA, 15 bp, Homo sapiens
attccagcttcctag

SEQ ID NO: 100131 - DNA, 15 bp, Homo sapiens
cattccagcttccta

SEQ ID NO: 100132 - DNA, 15 bp, Homo sapiens
gcattccagcttcct

SEQ ID NO: 100133 - DNA, 15 bp, Homo sapiens
agcattccagcttcc

SEQ ID NO: 100134 - DNA, 15 bp, Homo sapiens
cagcattccagcttc

SEQ ID NO: 100135 - DNA, 15 bp, Homo sapiens
ccagcattccagctt

SEQ ID NO: 100136 - DNA, 15 bp, Homo sapiens
tccagcattccagct

SEQ ID NO: 100137 - DNA, 15 bp, Homo sapiens
ttccagcattccagc

SEQ ID NO: 100138 - DNA, 15 bp, Homo sapiens
cttccagcattccag

SEQ ID NO: 100139 - DNA, 15 bp, Homo sapiens
acttccagcattcca

SEQ ID NO: 100140 - DNA, 15 bp, Homo sapiens
gacttccagcattcc

SEQ ID NO: 100141 - DNA, 15 bp, Homo sapiens
tgacttccagcattc

SEQ ID NO: 100142 - DNA, 15 bp, Homo sapiens
atgacttccagcatt

SEQ ID NO: 100143 - DNA, 15 bp, Homo sapiens
catgacttccagcat

SEQ ID NO: 100144 - DNA, 15 bp, Homo sapiens
ccatgacttccagca

SEQ ID NO: 100145 - DNA, 15 bp, Homo sapiens
accatgacttccagc

SEQ ID NO: 100146 - DNA, 15 bp, Homo sapiens
caccatgacttccag

SEQ ID NO: 100147 - DNA, 15 bp, Homo sapiens
tcaccatgacttcca

SEQ ID NO: 100148 - DNA, 15 bp, Homo sapiens
atcaccatgacttcc

SEQ ID NO: 100149 - DNA, 15 bp, Homo sapiens
catcaccatgacttc

SEQ ID NO: 100150 - DNA, 15 bp, Homo sapiens
acatcaccatgactt

SEQ ID NO: 100151 - DNA, 15 bp, Homo sapiens
aacatcaccatgact

SEQ ID NO: 100152 - DNA, 15 bp, Homo sapiens
gaacatcaccatgac

SEQ ID NO: 100153 - DNA, 15 bp, Homo sapiens
agaacatcaccatga

SEQ ID NO: 100154 - DNA, 15 bp, Homo sapiens
gagaacatcaccatg

SEQ ID NO: 100155 - DNA, 15 bp, Homo sapiens
tgagaacatcaccat

SEQ ID NO: 100156 - DNA, 15 bp, Homo sapiens
atgagaacatcacca

SEQ ID NO: 100157 - DNA, 15 bp, Homo sapiens
catgagaacatcacc

SEQ ID NO: 100158 - DNA, 15 bp, Homo sapiens
ccatgagaacatcac

SEQ ID NO: 100159 - DNA, 15 bp, Homo sapiens
accatgagaacatca

SEQ ID NO: 100160 - DNA, 15 bp, Homo sapiens
aaccatgagaacatc

SEQ ID NO: 100161 - DNA, 15 bp, Homo sapiens
taaccatgagaacat

SEQ ID NO: 100162 - DNA, 15 bp, Homo sapiens
gtaaccatgagaaca

SEQ ID NO: 100163 - DNA, 15 bp, Homo sapiens
tgtaaccatgagaac

SEQ ID NO: 100164 - DNA, 15 bp, Homo sapiens
ctgtaaccatgagaa

SEQ ID NO: 100165 - DNA, 15 bp, Homo sapiens
tctgtaaccatgaga

SEQ ID NO: 100166 - DNA, 15 bp, Homo sapiens
ctctgtaaccatgag

SEQ ID NO: 100167 - DNA, 15 bp, Homo sapiens
tctctgtaaccatga

SEQ ID NO: 100168 - DNA, 15 bp, Homo sapiens
ttctctgtaaccatg

SEQ ID NO: 100169 - DNA, 15 bp, Homo sapiens
attctctgtaaccat

SEQ ID NO: 100170 - DNA, 15 bp, Homo sapiens
gattctctgtaacca

SEQ ID NO: 100171 - DNA, 15 bp, Homo sapiens
agattctctgtaacc

SEQ ID NO: 100172 - DNA, 15 bp, Homo sapiens
gagattctctgtaac

SEQ ID NO: 100173 - DNA, 15 bp, Homo sapiens
agagattctctgtaa

SEQ ID NO: 100174 - DNA, 15 bp, Homo sapiens
gagagattctctgta

SEQ ID NO: 100175 - DNA, 15 bp, Homo sapiens
agagagattctctgt

SEQ ID NO: 100176 - DNA, 15 bp, Homo sapiens
tagagagattctctg

SEQ ID NO: 100177 - DNA, 15 bp, Homo sapiens
ttagagagattctct

SEQ ID NO: 100178 - DNA, 15 bp, Homo sapiens
tttagagagattctc

SEQ ID NO: 100179 - DNA, 15 bp, Homo sapiens
ttttagagagattct

SEQ ID NO: 100180 - DNA, 15 bp, Homo sapiens
gttttagagagattc

SEQ ID NO: 100181 - DNA, 15 bp, Homo sapiens
agttttagagagatt

SEQ ID NO: 100182 - DNA, 15 bp, Homo sapiens
tagttttagagagat

SEQ ID NO: 100183 - DNA, 15 bp, Homo sapiens
ttagttttagagaga

SEQ ID NO: 100184 - DNA, 15 bp, Homo sapiens
tttagttttagagag

SEQ ID NO: 100185 - DNA, 15 bp, Homo sapiens
ttttagttttagaga

SEQ ID NO: 100186 - DNA, 15 bp, Homo sapiens
gttttagttttagag

SEQ ID NO: 100187 - DNA, 15 bp, Homo sapiens
ggttttagttttaga

SEQ ID NO: 100188 - DNA, 15 bp, Homo sapiens
aggttttagttttag

SEQ ID NO: 100189 - DNA, 15 bp, Homo sapiens
gaggttttagtttta

SEQ ID NO: 100190 - DNA, 15 bp, Homo sapiens
agaggttttagtttt

SEQ ID NO: 100191 - DNA, 15 bp, Homo sapiens
aagaggttttagttt

SEQ ID NO: 100192 - DNA, 15 bp, Homo sapiens
aaagaggttttagtt

SEQ ID NO: 100193 - DNA, 15 bp, Homo sapiens
gaaagaggttttagt

SEQ ID NO: 100194 - DNA, 15 bp, Homo sapiens
agaaagaggttttag

SEQ ID NO: 100195 - DNA, 15 bp, Homo sapiens
cagaaagaggtttta

SEQ ID NO: 100196 - DNA, 15 bp, Homo sapiens
acagaaagaggtttt

SEQ ID NO: 100197 - DNA, 15 bp, Homo sapiens
aacagaaagaggttt

SEQ ID NO: 100198 - DNA, 15 bp, Homo sapiens
aaacagaaagaggtt

SEQ ID NO: 100199 - DNA, 15 bp, Homo sapiens
aaaacagaaagaggt

SEQ ID NO: 100200 - DNA, 15 bp, Homo sapiens
taaaacagaaagagg

SEQ ID NO: 100201 - DNA, 15 bp, Homo sapiens
gtaaaacagaaagag

SEQ ID NO: 100202 - DNA, 15 bp, Homo sapiens
ggtaaaacagaaaga

SEQ ID NO: 100203 - DNA, 15 bp, Homo sapiens
cggtaaaacagaaag

SEQ ID NO: 100204 - DNA, 15 bp, Homo sapiens
gcggtaaaacagaaa

SEQ ID NO: 100205 - DNA, 15 bp, Homo sapiens
tgcggtaaaacagaa

SEQ ID NO: 100206 - DNA, 15 bp, Homo sapiens
ctgcggtaaaacaga

SEQ ID NO: 100207 - DNA, 15 bp, Homo sapiens
actgcggtaaaacag

SEQ ID NO: 100208 - DNA, 15 bp, Homo sapiens
tactgcggtaaaaca

SEQ ID NO: 100209 - DNA, 15 bp, Homo sapiens
atactgcggtaaaac

SEQ ID NO: 100210 - DNA, 15 bp, Homo sapiens
catactgcggtaaaa

SEQ ID NO: 100211 - DNA, 15 bp, Homo sapiens
ccatactgcggtaaa

SEQ ID NO: 100212 - DNA, 15 bp, Homo sapiens
tccatactgcggtaa

SEQ ID NO: 100213 - DNA, 15 bp, Homo sapiens
ttccatactgcggta

SEQ ID NO: 100214 - DNA, 15 bp, Homo sapiens
cttccatactgcggt

SEQ ID NO: 100215 - DNA, 15 bp, Homo sapiens
tcttccatactgcgg

SEQ ID NO: 100216 - DNA, 15 bp, Homo sapiens
ttcttccatactgcg

SEQ ID NO: 100217 - DNA, 15 bp, Homo sapiens
attcttccatactgc

SEQ ID NO: 100218 - DNA, 15 bp, Homo sapiens
cattcttccatactg

SEQ ID NO: 100219 - DNA, 15 bp, Homo sapiens
acattcttccatact

SEQ ID NO: 100220 - DNA, 15 bp, Homo sapiens
cacattcttccatac

SEQ ID NO: 100221 - DNA, 15 bp, Homo sapiens
tcacattcttccata

SEQ ID NO: 100222 - DNA, 15 bp, Homo sapiens
ttcacattcttccat

SEQ ID NO: 100223 - DNA, 15 bp, Homo sapiens
cttcacattcttcca

SEQ ID NO: 100224 - DNA, 15 bp, Homo sapiens
gcttcacattcttcc

SEQ ID NO: 100225 - DNA, 15 bp, Homo sapiens
agcttcacattcttc

SEQ ID NO: 100226 - DNA, 15 bp, Homo sapiens
gagcttcacattctt

SEQ ID NO: 100227 - DNA, 15 bp, Homo sapiens
agagcttcacattct

SEQ ID NO: 100228 - DNA, 15 bp, Homo sapiens
aagagcttcacattc

SEQ ID NO: 100229 - DNA, 15 bp, Homo sapiens
aaagagcttcacatt

SEQ ID NO: 100230 - DNA, 15 bp, Homo sapiens
caaagagcttcacat

SEQ ID NO: 100231 - DNA, 15 bp, Homo sapiens
gcaaagagcttcaca

SEQ ID NO: 100232 - DNA, 15 bp, Homo sapiens
tgcaaagagcttcac

SEQ ID NO: 100233 - DNA, 15 bp, Homo sapiens
gtgcaaagagcttca

SEQ ID NO: 100234 - DNA, 15 bp, Homo sapiens
agtgcaaagagcttc

SEQ ID NO: 100235 - DNA, 15 bp, Homo sapiens
tagtgcaaagagctt

SEQ ID NO: 100236 - DNA, 15 bp, Homo sapiens
ctagtgcaaagagct

SEQ ID NO: 100237 - DNA, 15 bp, Homo sapiens
cctagtgcaaagagc

SEQ ID NO: 100238 - DNA, 15 bp, Homo sapiens
tcctagtgcaaagag

SEQ ID NO: 100239 - DNA, 15 bp, Homo sapiens
atcctagtgcaaaga

SEQ ID NO: 100240 - DNA, 15 bp, Homo sapiens
catcctagtgcaaag

SEQ ID NO: 100241 - DNA, 15 bp, Homo sapiens
ccatcctagtgcaaa

SEQ ID NO: 100242 - DNA, 15 bp, Homo sapiens
gccatcctagtgcaa

SEQ ID NO: 100243 - DNA, 15 bp, Homo sapiens
tgccatcctagtgca

SEQ ID NO: 100244 - DNA, 15 bp, Homo sapiens
ttgccatcctagtgc

SEQ ID NO: 100245 - DNA, 15 bp, Homo sapiens
attgccatcctagtg

SEQ ID NO: 100246 - DNA, 15 bp, Homo sapiens
gattgccatcctagt

SEQ ID NO: 100247 - DNA, 15 bp, Homo sapiens
tgattgccatcctag

SEQ ID NO: 100248 - DNA, 15 bp, Homo sapiens
atgattgccatccta

SEQ ID NO: 100249 - DNA, 15 bp, Homo sapiens
catgattgccatcct

SEQ ID NO: 100250 - DNA, 15 bp, Homo sapiens
ccatgattgccatcc

SEQ ID NO: 100251 - DNA, 15 bp, Homo sapiens
accatgattgccatc

SEQ ID NO: 100252 - DNA, 15 bp, Homo sapiens
gaccatgattgccat

SEQ ID NO: 100253 - DNA, 15 bp, Homo sapiens
tgaccatgattgcca

SEQ ID NO: 100254 - DNA, 15 bp, Homo sapiens
ttgaccatgattgcc

SEQ ID NO: 100255 - DNA, 15 bp, Homo sapiens
attgaccatgattgc

SEQ ID NO: 100256 - DNA, 15 bp, Homo sapiens
cattgaccatgattg

SEQ ID NO: 100257 - DNA, 15 bp, Homo sapiens
ccattgaccatgatt

SEQ ID NO: 100258 - DNA, 15 bp, Homo sapiens
tccattgaccatgat

SEQ ID NO: 100259 - DNA, 15 bp, Homo sapiens
ttccattgaccatga

SEQ ID NO: 100260 - DNA, 15 bp, Homo sapiens
cttccattgaccatg

SEQ ID NO: 100261 - DNA, 15 bp, Homo sapiens
ccttccattgaccat

SEQ ID NO: 100262 - DNA, 15 bp, Homo sapiens
accttccattgacca

SEQ ID NO: 100263 - DNA, 15 bp, Homo sapiens
aaccttccattgacc

SEQ ID NO: 100264 - DNA, 15 bp, Homo sapiens
gaaccttccattgac

SEQ ID NO: 100265 - DNA, 15 bp, Homo sapiens
tgaaccttccattga

SEQ ID NO: 100266 - DNA, 15 bp, Homo sapiens
ctgaaccttccattg

SEQ ID NO: 100267 - DNA, 15 bp, Homo sapiens
cctgaaccttccatt

SEQ ID NO: 100268 - DNA, 15 bp, Homo sapiens
acctgaaccttccat

SEQ ID NO: 100269 - DNA, 15 bp, Homo sapiens
cacctgaaccttcca

SEQ ID NO: 100270 - DNA, 15 bp, Homo sapiens
gcacctgaaccttcc

SEQ ID NO: 100271 - DNA, 15 bp, Homo sapiens
ggcacctgaaccttc

SEQ ID NO: 100272 - DNA, 15 bp, Homo sapiens
aggcacctgaacctt

SEQ ID NO: 100273 - DNA, 15 bp, Homo sapiens
aaggcacctgaacct

SEQ ID NO: 100274 - DNA, 15 bp, Homo sapiens
caaggcacctgaacc

SEQ ID NO: 100275 - DNA, 15 bp, Homo sapiens
ccaaggcacctgaac

SEQ ID NO: 100276 - DNA, 15 bp, Homo sapiens
gccaaggcacctgaa

SEQ ID NO: 100277 - DNA, 15 bp, Homo sapiens
tgccaaggcacctga

SEQ ID NO: 100278 - DNA, 15 bp, Homo sapiens
ctgccaaggcacctg

SEQ ID NO: 100279 - DNA, 15 bp, Homo sapiens
actgccaaggcacct

SEQ ID NO: 100280 - DNA, 15 bp, Homo sapiens
cactgccaaggcacc

SEQ ID NO: 100281 - DNA, 15 bp, Homo sapiens
acactgccaaggcac

SEQ ID NO: 100282 - DNA, 15 bp, Homo sapiens
gacactgccaaggca

SEQ ID NO: 100283 - DNA, 15 bp, Homo sapiens
ggacactgccaaggc

SEQ ID NO: 100284 - DNA, 15 bp, Homo sapiens
tggacactgccaagg

SEQ ID NO: 100285 - DNA, 15 bp, Homo sapiens
ctggacactgccaag

SEQ ID NO: 100286 - DNA, 15 bp, Homo sapiens
gctggacactgccaa

SEQ ID NO: 100287 - DNA, 15 bp, Homo sapiens
tgctggacactgcca

SEQ ID NO: 100288 - DNA, 15 bp, Homo sapiens
atgctggacactgcc

SEQ ID NO: 100289 - DNA, 15 bp, Homo sapiens
gatgctggacactgc

SEQ ID NO: 100290 - DNA, 15 bp, Homo sapiens
agatgctggacactg

SEQ ID NO: 100291 - DNA, 15 bp, Homo sapiens
tagatgctggacact

SEQ ID NO: 100292 - DNA, 15 bp, Homo sapiens
ttagatgctggacac

SEQ ID NO: 100293 - DNA, 15 bp, Homo sapiens
tttagatgctggaca

SEQ ID NO: 100294 - DNA, 15 bp, Homo sapiens
ttttagatgctggac

SEQ ID NO: 100295 - DNA, 15 bp, Homo sapiens
tttttagatgctgga

SEQ ID NO: 100296 - DNA, 15 bp, Homo sapiens
ttttttagatgctgg

SEQ ID NO: 100297 - DNA, 15 bp, Homo sapiens
attttttagatgctg

SEQ ID NO: 100298 - DNA, 15 bp, Homo sapiens
tattttttagatgct

SEQ ID NO: 100299 - DNA, 15 bp, Homo sapiens
ctattttttagatgc

SEQ ID NO: 100300 - DNA, 15 bp, Homo sapiens
cctattttttagatg

SEQ ID NO: 100301 - DNA, 15 bp, Homo sapiens
acctattttttagat

SEQ ID NO: 100302 - DNA, 15 bp, Homo sapiens
tacctattttttaga

SEQ ID NO: 100303 - DNA, 15 bp, Homo sapiens
ttacctattttttag

SEQ ID NO: 100304 - DNA, 15 bp, Homo sapiens
attacctatttttta

SEQ ID NO: 100305 - DNA, 15 bp, Homo sapiens
tattacctatttttt

SEQ ID NO: 100306 - DNA, 15 bp, Homo sapiens
ttattacctattttt

SEQ ID NO: 100307 - DNA, 15 bp, Homo sapiens
tttattacctatttt

SEQ ID NO: 100308 - DNA, 15 bp, Homo sapiens
ctttattacctattt

SEQ ID NO: 100309 - DNA, 15 bp, Homo sapiens
tctttattacctatt

SEQ ID NO: 100310 - DNA, 15 bp, Homo sapiens
atctttattacctat

SEQ ID NO: 100311 - DNA, 15 bp, Homo sapiens
tatctttattaccta

SEQ ID NO: 100312 - DNA, 15 bp, Homo sapiens
ttatctttattacct

SEQ ID NO: 100313 - DNA, 15 bp, Homo sapiens
attatctttattacc

SEQ ID NO: 100314 - DNA, 15 bp, Homo sapiens
aattatctttattac

SEQ ID NO: 100315 - DNA, 15 bp, Homo sapiens
aaattatctttatta

SEQ ID NO: 100316 - DNA, 15 bp, Homo sapiens
gaaattatctttatt

SEQ ID NO: 100317 - DNA, 15 bp, Homo sapiens
agaaattatctttat

SEQ ID NO: 100318 - DNA, 15 bp, Homo sapiens
aagaaattatcttta

SEQ ID NO: 100319 - DNA, 15 bp, Homo sapiens
aaagaaattatcttt

SEQ ID NO: 100320 - DNA, 15 bp, Homo sapiens
caaagaaattatctt

SEQ ID NO: 100321 - DNA, 15 bp, Homo sapiens
ccaaagaaattatct

SEQ ID NO: 100322 - DNA, 15 bp, Homo sapiens
cccaaagaaattatc

SEQ ID NO: 100323 - DNA, 15 bp, Homo sapiens
tcccaaagaaattat

SEQ ID NO: 100324 - DNA, 15 bp, Homo sapiens
atcccaaagaaatta

SEQ ID NO: 100325 - DNA, 15 bp, Homo sapiens
tatcccaaagaaatt

SEQ ID NO: 100326 - DNA, 15 bp, Homo sapiens
ctatcccaaagaaat

SEQ ID NO: 100327 - DNA, 15 bp, Homo sapiens
actatcccaaagaaa

SEQ ID NO: 100328 - DNA, 15 bp, Homo sapiens
cactatcccaaagaa

SEQ ID NO: 100329 - DNA, 15 bp, Homo sapiens
gcactatcccaaaga

SEQ ID NO: 100330 - DNA, 15 bp, Homo sapiens
ggcactatcccaaag

SEQ ID NO: 100331 - DNA, 15 bp, Homo sapiens
aggcactatcccaaa

SEQ ID NO: 100332 - DNA, 15 bp, Homo sapiens
taggcactatcccaa

SEQ ID NO: 100333 - DNA, 15 bp, Homo sapiens
ctaggcactatccca

SEQ ID NO: 100334 - DNA, 15 bp, Homo sapiens
actaggcactatccc

SEQ ID NO: 100335 - DNA, 15 bp, Homo sapiens
cactaggcactatcc

SEQ ID NO: 100336 - DNA, 15 bp, Homo sapiens
tcactaggcactatc

SEQ ID NO: 100337 - DNA, 15 bp, Homo sapiens
ctcactaggcactat

SEQ ID NO: 100338 - DNA, 15 bp, Homo sapiens
tctcactaggcacta

SEQ ID NO: 100339 - DNA, 15 bp, Homo sapiens
ttctcactaggcact

SEQ ID NO: 100340 - DNA, 15 bp, Homo sapiens
cttctcactaggcac

SEQ ID NO: 100341 - DNA, 15 bp, Homo sapiens
ccttctcactaggca

SEQ ID NO: 100342 - DNA, 15 bp, Homo sapiens
gccttctcactaggc

SEQ ID NO: 100343 - DNA, 15 bp, Homo sapiens
agccttctcactagg

SEQ ID NO: 100344 - DNA, 15 bp, Homo sapiens
aagccttctcactag

SEQ ID NO: 100345 - DNA, 15 bp, Homo sapiens
caagccttctcacta

SEQ ID NO: 100346 - DNA, 15 bp, Homo sapiens
tcaagccttctcact

SEQ ID NO: 100347 - DNA, 15 bp, Homo sapiens
atcaagccttctcac

SEQ ID NO: 100348 - DNA, 15 bp, Homo sapiens
tatcaagccttctca

SEQ ID NO: 100349 - DNA, 15 bp, Homo sapiens
atatcaagccttctc

SEQ ID NO: 100350 - DNA, 15 bp, Homo sapiens
aatatcaagccttct

SEQ ID NO: 100351 - DNA, 15 bp, Homo sapiens
aaatatcaagccttc

SEQ ID NO: 100352 - DNA, 15 bp, Homo sapiens
taaatatcaagcctt

SEQ ID NO: 100353 - DNA, 15 bp, Homo sapiens
ataaatatcaagcct

SEQ ID NO: 100354 - DNA, 15 bp, Homo sapiens
aataaatatcaagcc

SEQ ID NO: 100355 - DNA, 15 bp, Homo sapiens
gaataaatatcaagc

SEQ ID NO: 100356 - DNA, 15 bp, Homo sapiens
agaataaatatcaag

SEQ ID NO: 100357 - DNA, 15 bp, Homo sapiens
aagaataaatatcaa

SEQ ID NO: 100358 - DNA, 15 bp, Homo sapiens
aaagaataaatatca

SEQ ID NO: 100359 - DNA, 15 bp, Homo sapiens
aaaagaataaatatc

SEQ ID NO: 100360 - DNA, 15 bp, Homo sapiens
caaaagaataaatat

SEQ ID NO: 100361 - DNA, 15 bp, Homo sapiens
acaaaagaataaata

SEQ ID NO: 100362 - DNA, 15 bp, Homo sapiens
cacaaaagaataaat

SEQ ID NO: 100363 - DNA, 15 bp, Homo sapiens
tcacaaaagaataaa

SEQ ID NO: 100364 - DNA, 15 bp, Homo sapiens
ctcacaaaagaataa

SEQ ID NO: 100365 - DNA, 15 bp, Homo sapiens
actcacaaaagaata

SEQ ID NO: 100366 - DNA, 15 bp, Homo sapiens
tactcacaaaagaat

SEQ ID NO: 100367 - DNA, 15 bp, Homo sapiens
atactcacaaaagaa

SEQ ID NO: 100368 - DNA, 15 bp, Homo sapiens
tatactcacaaaaga

SEQ ID NO: 100369 - DNA, 15 bp, Homo sapiens
atatactcacaaaag

SEQ ID NO: 100370 - DNA, 15 bp, Homo sapiens
tatatactcacaaaa

SEQ ID NO: 100371 - DNA, 15 bp, Homo sapiens
ttatatactcacaaa

SEQ ID NO: 100372 - DNA, 15 bp, Homo sapiens
tttatatactcacaa

SEQ ID NO: 100373 - DNA, 15 bp, Homo sapiens
atttatatactcaca

SEQ ID NO: 100374 - DNA, 15 bp, Homo sapiens
catttatatactcac

SEQ ID NO: 100375 - DNA, 15 bp, Homo sapiens
ccatttatatactca

SEQ ID NO: 100376 - DNA, 15 bp, Homo sapiens
accatttatatactc

SEQ ID NO: 100377 - DNA, 15 bp, Homo sapiens
caccatttatatact

SEQ ID NO: 100378 - DNA, 15 bp, Homo sapiens
gcaccatttatatac

SEQ ID NO: 100379 - DNA, 15 bp, Homo sapiens
ggcaccatttatata

SEQ ID NO: 100380 - DNA, 15 bp, Homo sapiens
aggcaccatttatat

SEQ ID NO: 100381 - DNA, 15 bp, Homo sapiens
gaggcaccatttata

SEQ ID NO: 100382 - DNA, 15 bp, Homo sapiens
agaggcaccatttat

SEQ ID NO: 100383 - DNA, 15 bp, Homo sapiens
tagaggcaccattta

SEQ ID NO: 100384 - DNA, 15 bp, Homo sapiens
ttagaggcaccattt

SEQ ID NO: 100385 - DNA, 15 bp, Homo sapiens
gttagaggcaccatt

SEQ ID NO: 100386 - DNA, 15 bp, Homo sapiens
tgttagaggcaccat

SEQ ID NO: 100387 - DNA, 15 bp, Homo sapiens
atgttagaggcacca

SEQ ID NO: 100388 - DNA, 15 bp, Homo sapiens
tatgttagaggcacc

SEQ ID NO: 100389 - DNA, 15 bp, Homo sapiens
ttatgttagaggcac

SEQ ID NO: 100390 - DNA, 15 bp, Homo sapiens
tttatgttagaggca

SEQ ID NO: 100391 - DNA, 15 bp, Homo sapiens
ctttatgttagaggc

SEQ ID NO: 100392 - DNA, 15 bp, Homo sapiens
cctttatgttagagg

SEQ ID NO: 100393 - DNA, 15 bp, Homo sapiens
ccctttatgttagag

SEQ ID NO: 100394 - DNA, 15 bp, Homo sapiens
tccctttatgttaga

SEQ ID NO: 100395 - DNA, 15 bp, Homo sapiens
ttccctttatgttag

SEQ ID NO: 100396 - DNA, 15 bp, Homo sapiens
tttccctttatgtta

SEQ ID NO: 100397 - DNA, 15 bp, Homo sapiens
atttccctttatgtt

SEQ ID NO: 100398 - DNA, 15 bp, Homo sapiens
tatttccctttatgt

SEQ ID NO: 100399 - DNA, 15 bp, Homo sapiens
ttatttccctttatg

SEQ ID NO: 100400 - DNA, 15 bp, Homo sapiens
tttatttccctttat

SEQ ID NO: 100401 - DNA, 15 bp, Homo sapiens
ttttatttcccttta

SEQ ID NO: 100402 - DNA, 15 bp, Homo sapiens
gttttatttcccttt

SEQ ID NO: 100403 - DNA, 15 bp, Homo sapiens
agttttatttccctt

SEQ ID NO: 100404 - DNA, 15 bp, Homo sapiens
cagttttatttccct

SEQ ID NO: 100405 - DNA, 15 bp, Homo sapiens
tcagttttatttccc

SEQ ID NO: 100406 - DNA, 15 bp, Homo sapiens
ctcagttttatttcc

SEQ ID NO: 100407 - DNA, 15 bp, Homo sapiens
gctcagttttatttc

SEQ ID NO: 100408 - DNA, 15 bp, Homo sapiens
tgctcagttttattt

SEQ ID NO: 100409 - DNA, 15 bp, Homo sapiens
ttgctcagttttatt

SEQ ID NO: 100410 - DNA, 15 bp, Homo sapiens
tttgctcagttttat

SEQ ID NO: 100411 - DNA, 15 bp, Homo sapiens
ttttgctcagtttta

SEQ ID NO: 100412 - DNA, 15 bp, Homo sapiens
gttttgctcagtttt

SEQ ID NO: 100413 - DNA, 15 bp, Homo sapiens
tgttttgctcagttt

SEQ ID NO: 100414 - DNA, 15 bp, Homo sapiens
ctgttttgctcagtt

SEQ ID NO: 100415 - DNA, 15 bp, Homo sapiens
actgttttgctcagt

SEQ ID NO: 100416 - DNA, 15 bp, Homo sapiens
tactgttttgctcag

SEQ ID NO: 100417 - DNA, 15 bp, Homo sapiens
atactgttttgctca

SEQ ID NO: 100418 - DNA, 15 bp, Homo sapiens
tatactgttttgctc

SEQ ID NO: 100419 - DNA, 15 bp, Homo sapiens
ctatactgttttgct

SEQ ID NO: 100420 - DNA, 15 bp, Homo sapiens
actatactgttttgc

SEQ ID NO: 100421 - DNA, 15 bp, Homo sapiens
cactatactgttttg

SEQ ID NO: 100422 - DNA, 15 bp, Homo sapiens
ccactatactgtttt

SEQ ID NO: 100423 - DNA, 15 bp, Homo sapiens
tccactatactgttt

SEQ ID NO: 100424 - DNA, 15 bp, Homo sapiens
ttccactatactgtt

SEQ ID NO: 100425 - DNA, 15 bp, Homo sapiens
tttccactatactgt

SEQ ID NO: 100426 - DNA, 15 bp, Homo sapiens
ctttccactatactg

SEQ ID NO: 100427 - DNA, 15 bp, Homo sapiens
tctttccactatact

SEQ ID NO: 100428 - DNA, 15 bp, Homo sapiens
ttctttccactatac

SEQ ID NO: 100429 - DNA, 15 bp, Homo sapiens
attctttccactata

SEQ ID NO: 100430 - DNA, 15 bp, Homo sapiens
cattctttccactat

SEQ ID NO: 100431 - DNA, 15 bp, Homo sapiens
tcattctttccacta

SEQ ID NO: 100432 - DNA, 15 bp, Homo sapiens
ctcattctttccact

SEQ ID NO: 100433 - DNA, 15 bp, Homo sapiens
cctcattctttccac

SEQ ID NO: 100434 - DNA, 15 bp, Homo sapiens
ccctcattctttcca

SEQ ID NO: 100435 - DNA, 15 bp, Homo sapiens
gccctcattctttcc

SEQ ID NO: 100436 - DNA, 15 bp, Homo sapiens
agccctcattctttc

SEQ ID NO: 100437 - DNA, 15 bp, Homo sapiens
aagccctcattcttt

SEQ ID NO: 100438 - DNA, 15 bp, Homo sapiens
aaagccctcattctt

SEQ ID NO: 100439 - DNA, 15 bp, Homo sapiens
caaagccctcattct

SEQ ID NO: 100440 - DNA, 15 bp, Homo sapiens
tcaaagccctcattc

SEQ ID NO: 100441 - DNA, 15 bp, Homo sapiens
ttcaaagccctcatt

SEQ ID NO: 100442 - DNA, 15 bp, Homo sapiens
cttcaaagccctcat

SEQ ID NO: 100443 - DNA, 15 bp, Homo sapiens
acttcaaagccctca

SEQ ID NO: 100444 - DNA, 15 bp, Homo sapiens
gacttcaaagccctc

SEQ ID NO: 100445 - DNA, 15 bp, Homo sapiens
ggacttcaaagccct

SEQ ID NO: 100446 - DNA, 15 bp, Homo sapiens
cggacttcaaagccc

SEQ ID NO: 100447 - DNA, 15 bp, Homo sapiens
tcggacttcaaagcc

SEQ ID NO: 100448 - DNA, 15 bp, Homo sapiens
ttcggacttcaaagc

SEQ ID NO: 100449 - DNA, 15 bp, Homo sapiens
gttcggacttcaaag

SEQ ID NO: 100450 - DNA, 15 bp, Homo sapiens
agttcggacttcaaa

SEQ ID NO: 100451 - DNA, 15 bp, Homo sapiens
cagttcggacttcaa

SEQ ID NO: 100452 - DNA, 15 bp, Homo sapiens
gcagttcggacttca

SEQ ID NO: 100453 - DNA, 15 bp, Homo sapiens
tgcagttcggacttc

SEQ ID NO: 100454 - DNA, 15 bp, Homo sapiens
atgcagttcggactt

SEQ ID NO: 100455 - DNA, 15 bp, Homo sapiens
aatgcagttcggact

SEQ ID NO: 100456 - DNA, 15 bp, Homo sapiens
gaatgcagttcggac

SEQ ID NO: 100457 - DNA, 15 bp, Homo sapiens
tgaatgcagttcgga

SEQ ID NO: 100458 - DNA, 15 bp, Homo sapiens
ttgaatgcagttcgg

SEQ ID NO: 100459 - DNA, 15 bp, Homo sapiens
tttgaatgcagttcg

SEQ ID NO: 100460 - DNA, 15 bp, Homo sapiens
atttgaatgcagttc

SEQ ID NO: 100461 - DNA, 15 bp, Homo sapiens
aatttgaatgcagtt

SEQ ID NO: 100462 - DNA, 15 bp, Homo sapiens
gaatttgaatgcagt

SEQ ID NO: 100463 - DNA, 15 bp, Homo sapiens
agaatttgaatgcag

SEQ ID NO: 100464 - DNA, 15 bp, Homo sapiens
cagaatttgaatgca

SEQ ID NO: 100465 - DNA, 15 bp, Homo sapiens
acagaatttgaatgc

SEQ ID NO: 100466 - DNA, 15 bp, Homo sapiens
gacagaatttgaatg

SEQ ID NO: 100467 - DNA, 15 bp, Homo sapiens
agacagaatttgaat

SEQ ID NO: 100468 - DNA, 15 bp, Homo sapiens
aagacagaatttgaa

SEQ ID NO: 100469 - DNA, 15 bp, Homo sapiens
aaagacagaatttga

SEQ ID NO: 100470 - DNA, 15 bp, Homo sapiens
taaagacagaatttg

SEQ ID NO: 100471 - DNA, 15 bp, Homo sapiens
gtaaagacagaattt

SEQ ID NO: 100472 - DNA, 15 bp, Homo sapiens
ggtaaagacagaatt

SEQ ID NO: 100473 - DNA, 15 bp, Homo sapiens
tggtaaagacagaat

SEQ ID NO: 100474 - DNA, 15 bp, Homo sapiens
atggtaaagacagaa

SEQ ID NO: 100475 - DNA, 15 bp, Homo sapiens
aatggtaaagacaga

SEQ ID NO: 100476 - DNA, 15 bp, Homo sapiens
aaatggtaaagacag

SEQ ID NO: 100477 - DNA, 15 bp, Homo sapiens
taaatggtaaagaca

SEQ ID NO: 100478 - DNA, 15 bp, Homo sapiens
gtaaatggtaaagac

SEQ ID NO: 100479 - DNA, 15 bp, Homo sapiens
agtaaatggtaaaga

SEQ ID NO: 100480 - DNA, 15 bp, Homo sapiens
cagtaaatggtaaag

SEQ ID NO: 100481 - DNA, 15 bp, Homo sapiens
ccagtaaatggtaaa

SEQ ID NO: 100482 - DNA, 15 bp, Homo sapiens
accagtaaatggtaa

SEQ ID NO: 100483 - DNA, 15 bp, Homo sapiens
aaccagtaaatggta

SEQ ID NO: 100484 - DNA, 15 bp, Homo sapiens
gaaccagtaaatggt

SEQ ID NO: 100485 - DNA, 15 bp, Homo sapiens
agaaccagtaaatgg

SEQ ID NO: 100486 - DNA, 15 bp, Homo sapiens
cagaaccagtaaatg

SEQ ID NO: 100487 - DNA, 15 bp, Homo sapiens
acagaaccagtaaat

SEQ ID NO: 100488 - DNA, 15 bp, Homo sapiens
cacagaaccagtaaa

SEQ ID NO: 100489 - DNA, 15 bp, Homo sapiens
tcacagaaccagtaa

SEQ ID NO: 100490 - DNA, 15 bp, Homo sapiens
gtcacagaaccagta

SEQ ID NO: 100491 - DNA, 15 bp, Homo sapiens
agtcacagaaccagt

SEQ ID NO: 100492 - DNA, 15 bp, Homo sapiens
gagtcacagaaccag

SEQ ID NO: 100493 - DNA, 15 bp, Homo sapiens
agagtcacagaacca

SEQ ID NO: 100494 - DNA, 15 bp, Homo sapiens
aagagtcacagaacc

SEQ ID NO: 100495 - DNA, 15 bp, Homo sapiens
caagagtcacagaac

SEQ ID NO: 100496 - DNA, 15 bp, Homo sapiens
ccaagagtcacagaa

SEQ ID NO: 100497 - DNA, 15 bp, Homo sapiens
cccaagagtcacaga

SEQ ID NO: 100498 - DNA, 15 bp, Homo sapiens
gcccaagagtcacag

SEQ ID NO: 100499 - DNA, 15 bp, Homo sapiens
tgcccaagagtcaca

SEQ ID NO: 100500 - DNA, 15 bp, Homo sapiens
ttgcccaagagtcac

SEQ ID NO: 100501 - DNA, 15 bp, Homo sapiens
cttgcccaagagtca

SEQ ID NO: 100502 - DNA, 15 bp, Homo sapiens
acttgcccaagagtc

SEQ ID NO: 100503 - DNA, 15 bp, Homo sapiens
cacttgcccaagagt

SEQ ID NO: 100504 - DNA, 15 bp, Homo sapiens
tcacttgcccaagag

SEQ ID NO: 100505 - DNA, 15 bp, Homo sapiens
gtcacttgcccaaga

SEQ ID NO: 100506 - DNA, 15 bp, Homo sapiens
agtcacttgcccaag

SEQ ID NO: 100507 - DNA, 15 bp, Homo sapiens
aagtcacttgcccaa

SEQ ID NO: 100508 - DNA, 15 bp, Homo sapiens
taagtcacttgccca

SEQ ID NO: 100509 - DNA, 15 bp, Homo sapiens
ttaagtcacttgccc

SEQ ID NO: 100510 - DNA, 15 bp, Homo sapiens
gttaagtcacttgcc

SEQ ID NO: 100511 - DNA, 15 bp, Homo sapiens
agttaagtcacttgc

SEQ ID NO: 100512 - DNA, 15 bp, Homo sapiens
tagttaagtcacttg

SEQ ID NO: 100513 - DNA, 15 bp, Homo sapiens
gtagttaagtcactt

SEQ ID NO: 100514 - DNA, 15 bp, Homo sapiens
agtagttaagtcact

SEQ ID NO: 100515 - DNA, 15 bp, Homo sapiens
cagtagttaagtcac

SEQ ID NO: 100516 - DNA, 15 bp, Homo sapiens
acagtagttaagtca

SEQ ID NO: 100517 - DNA, 15 bp, Homo sapiens
tacagtagttaagtc

SEQ ID NO: 100518 - DNA, 15 bp, Homo sapiens
ttacagtagttaagt

SEQ ID NO: 100519 - DNA, 15 bp, Homo sapiens
cttacagtagttaag

SEQ ID NO: 100520 - DNA, 15 bp, Homo sapiens
tcttacagtagttaa

SEQ ID NO: 100521 - DNA, 15 bp, Homo sapiens
ctcttacagtagtta

SEQ ID NO: 100522 - DNA, 15 bp, Homo sapiens
actcttacagtagtt

SEQ ID NO: 100523 - DNA, 15 bp, Homo sapiens
aactcttacagtagt

SEQ ID NO: 100524 - DNA, 15 bp, Homo sapiens
taactcttacagtag

SEQ ID NO: 100525 - DNA, 15 bp, Homo sapiens
ctaactcttacagta

SEQ ID NO: 100526 - DNA, 15 bp, Homo sapiens
actaactcttacagt

SEQ ID NO: 100527 - DNA, 15 bp, Homo sapiens
aactaactcttacag

SEQ ID NO: 100528 - DNA, 15 bp, Homo sapiens
aaactaactcttaca

SEQ ID NO: 100529 - DNA, 15 bp, Homo sapiens
gaaactaactcttac

SEQ ID NO: 100530 - DNA, 15 bp, Homo sapiens
ggaaactaactctta

SEQ ID NO: 100531 - DNA, 15 bp, Homo sapiens
gggaaactaactctt

SEQ ID NO: 100532 - DNA, 15 bp, Homo sapiens
agggaaactaactct

SEQ ID NO: 100533 - DNA, 15 bp, Homo sapiens
cagggaaactaactc

SEQ ID NO: 100534 - DNA, 15 bp, Homo sapiens
ccagggaaactaact

SEQ ID NO: 100535 - DNA, 15 bp, Homo sapiens
tccagggaaactaac

SEQ ID NO: 100536 - DNA, 15 bp, Homo sapiens
ttccagggaaactaa

SEQ ID NO: 100537 - DNA, 15 bp, Homo sapiens
cttccagggaaacta

SEQ ID NO: 100538 - DNA, 15 bp, Homo sapiens
tcttccagggaaact

SEQ ID NO: 100539 - DNA, 15 bp, Homo sapiens
atcttccagggaaac

SEQ ID NO: 100540 - DNA, 15 bp, Homo sapiens
gatcttccagggaaa

SEQ ID NO: 100541 - DNA, 15 bp, Homo sapiens
agatcttccagggaa

SEQ ID NO: 100542 - DNA, 15 bp, Homo sapiens
tagatcttccaggga

SEQ ID NO: 100543 - DNA, 15 bp, Homo sapiens
gtagatcttccaggg

SEQ ID NO: 100544 - DNA, 15 bp, Homo sapiens
ggtagatcttccagg

SEQ ID NO: 100545 - DNA, 15 bp, Homo sapiens
aggtagatcttccag

SEQ ID NO: 100546 - DNA, 15 bp, Homo sapiens
gaggtagatcttcca

SEQ ID NO: 100547 - DNA, 15 bp, Homo sapiens
ggaggtagatcttcc

SEQ ID NO: 100548 - DNA, 15 bp, Homo sapiens
aggaggtagatcttc

SEQ ID NO: 100549 - DNA, 15 bp, Homo sapiens
taggaggtagatctt

SEQ ID NO: 100550 - DNA, 15 bp, Homo sapiens
ctaggaggtagatct

SEQ ID NO: 100551 - DNA, 15 bp, Homo sapiens
gctaggaggtagatc

SEQ ID NO: 100552 - DNA, 15 bp, Homo sapiens
agctaggaggtagat

SEQ ID NO: 100553 - DNA, 15 bp, Homo sapiens
aagctaggaggtaga

SEQ ID NO: 100554 - DNA, 15 bp, Homo sapiens
aaagctaggaggtag

SEQ ID NO: 100555 - DNA, 15 bp, Homo sapiens
caaagctaggaggta

SEQ ID NO: 100556 - DNA, 15 bp, Homo sapiens
acaaagctaggaggt

SEQ ID NO: 100557 - DNA, 15 bp, Homo sapiens
cacaaagctaggagg

SEQ ID NO: 100558 - DNA, 15 bp, Homo sapiens
gcacaaagctaggag

SEQ ID NO: 100559 - DNA, 15 bp, Homo sapiens
agcacaaagctagga

SEQ ID NO: 100560 - DNA, 15 bp, Homo sapiens
tagcacaaagctagg

SEQ ID NO: 100561 - DNA, 15 bp, Homo sapiens
atagcacaaagctag

SEQ ID NO: 100562 - DNA, 15 bp, Homo sapiens
tatagcacaaagcta

SEQ ID NO: 100563 - DNA, 15 bp, Homo sapiens
ctatagcacaaagct

SEQ ID NO: 100564 - DNA, 15 bp, Homo sapiens
tctatagcacaaagc

SEQ ID NO: 100565 - DNA, 15 bp, Homo sapiens
atctatagcacaaag

SEQ ID NO: 100566 - DNA, 15 bp, Homo sapiens
catctatagcacaaa

SEQ ID NO: 100567 - DNA, 15 bp, Homo sapiens
tcatctatagcacaa

SEQ ID NO: 100568 - DNA, 15 bp, Homo sapiens
ttcatctatagcaca

SEQ ID NO: 100569 - DNA, 15 bp, Homo sapiens
tttcatctatagcac

SEQ ID NO: 100570 - DNA, 15 bp, Homo sapiens
atttcatctatagca

SEQ ID NO: 100571 - DNA, 15 bp, Homo sapiens
catttcatctatagc

SEQ ID NO: 100572 - DNA, 15 bp, Homo sapiens
tcatttcatctatag

SEQ ID NO: 100573 - DNA, 15 bp, Homo sapiens
ttcatttcatctata

SEQ ID NO: 100574 - DNA, 15 bp, Homo sapiens
tttcatttcatctat

SEQ ID NO: 100575 - DNA, 15 bp, Homo sapiens
ttttcatttcatcta

SEQ ID NO: 100576 - DNA, 15 bp, Homo sapiens
tttttcatttcatct

SEQ ID NO: 100577 - DNA, 15 bp, Homo sapiens
ttttttcatttcatc

SEQ ID NO: 100578 - DNA, 15 bp, Homo sapiens
tttttttcatttcat

SEQ ID NO: 100579 - DNA, 15 bp, Homo sapiens
atttttttcatttca

SEQ ID NO: 100580 - DNA, 15 bp, Homo sapiens
aatttttttcatttc

SEQ ID NO: 100581 - DNA, 15 bp, Homo sapiens
aaatttttttcattt

SEQ ID NO: 100582 - DNA, 15 bp, Homo sapiens
taaatttttttcatt

SEQ ID NO: 100583 - DNA, 15 bp, Homo sapiens
gtaaatttttttcat

SEQ ID NO: 100584 - DNA, 15 bp, Homo sapiens
tgtaaatttttttca

SEQ ID NO: 100585 - DNA, 15 bp, Homo sapiens
atgtaaatttttttc

SEQ ID NO: 100586 - DNA, 15 bp, Homo sapiens
catgtaaattttttt

SEQ ID NO: 100587 - DNA, 15 bp, Homo sapiens
acatgtaaatttttt

SEQ ID NO: 100588 - DNA, 15 bp, Homo sapiens
cacatgtaaattttt

SEQ ID NO: 100589 - DNA, 15 bp, Homo sapiens
gcacatgtaaatttt

SEQ ID NO: 100590 - DNA, 15 bp, Homo sapiens
ggcacatgtaaattt

SEQ ID NO: 100591 - DNA, 15 bp, Homo sapiens
tggcacatgtaaatt

SEQ ID NO: 100592 - DNA, 15 bp, Homo sapiens
ctggcacatgtaaat

SEQ ID NO: 100593 - DNA, 15 bp, Homo sapiens
actggcacatgtaaa

SEQ ID NO: 100594 - DNA, 15 bp, Homo sapiens
tactggcacatgtaa

SEQ ID NO: 100595 - DNA, 15 bp, Homo sapiens
gtactggcacatgta

SEQ ID NO: 100596 - DNA, 15 bp, Homo sapiens
agtactggcacatgt

SEQ ID NO: 100597 - DNA, 15 bp, Homo sapiens
cagtactggcacatg

SEQ ID NO: 100598 - DNA, 15 bp, Homo sapiens
ccagtactggcacat

SEQ ID NO: 100599 - DNA, 15 bp, Homo sapiens
accagtactggcaca

SEQ ID NO: 100600 - DNA, 15 bp, Homo sapiens
caccagtactggcac

SEQ ID NO: 100601 - DNA, 15 bp, Homo sapiens
tcaccagtactggca

SEQ ID NO: 100602 - DNA, 15 bp, Homo sapiens
ctcaccagtactggc

SEQ ID NO: 100603 - DNA, 15 bp, Homo sapiens
tctcaccagtactgg

SEQ ID NO: 100604 - DNA, 15 bp, Homo sapiens
ctctcaccagtactg

SEQ ID NO: 100605 - DNA, 15 bp, Homo sapiens
gctctcaccagtact

SEQ ID NO: 100606 - DNA, 15 bp, Homo sapiens
cgctctcaccagtac

SEQ ID NO: 100607 - DNA, 15 bp, Homo sapiens
gcgctctcaccagta

SEQ ID NO: 100608 - DNA, 15 bp, Homo sapiens
tgcgctctcaccagt

SEQ ID NO: 100609 - DNA, 15 bp, Homo sapiens
ttgcgctctcaccag

SEQ ID NO: 100610 - DNA, 15 bp, Homo sapiens
cttgcgctctcacca

SEQ ID NO: 100611 - DNA, 15 bp, Homo sapiens
gcttgcgctctcacc

SEQ ID NO: 100612 - DNA, 15 bp, Homo sapiens
agcttgcgctctcac

SEQ ID NO: 100613 - DNA, 15 bp, Homo sapiens
aagcttgcgctctca

SEQ ID NO: 100614 - DNA, 15 bp, Homo sapiens
aaagcttgcgctctc

SEQ ID NO: 100615 - DNA, 15 bp, Homo sapiens
caaagcttgcgctct

SEQ ID NO: 100616 - DNA, 15 bp, Homo sapiens
ccaaagcttgcgctc

SEQ ID NO: 100617 - DNA, 15 bp, Homo sapiens
tccaaagcttgcgct

SEQ ID NO: 100618 - DNA, 15 bp, Homo sapiens
ctccaaagcttgcgc

SEQ ID NO: 100619 - DNA, 15 bp, Homo sapiens
actccaaagcttgcg

SEQ ID NO: 100620 - DNA, 15 bp, Homo sapiens
gactccaaagcttgc

SEQ ID NO: 100621 - DNA, 15 bp, Homo sapiens
tgactccaaagcttg

SEQ ID NO: 100622 - DNA, 15 bp, Homo sapiens
ttgactccaaagctt

SEQ ID NO: 100623 - DNA, 15 bp, Homo sapiens
tttgactccaaagct

SEQ ID NO: 100624 - DNA, 15 bp, Homo sapiens
tgtttgactccaaag

SEQ ID NO: 100625 - DNA, 15 bp, Homo sapiens
gtgtttgactccaaa

SEQ ID NO: 100626 - DNA, 15 bp, Homo sapiens
tgtgtttgactccaa

SEQ ID NO: 100627 - DNA, 15 bp, Homo sapiens
ttgtgtttgactcca

SEQ ID NO: 100628 - DNA, 15 bp, Homo sapiens
tttgtgtttgactcc

SEQ ID NO: 100629 - DNA, 15 bp, Homo sapiens
atttgtgtttgactc

SEQ ID NO: 100630 - DNA, 15 bp, Homo sapiens
catttgtgtttgact

SEQ ID NO: 100631 - DNA, 15 bp, Homo sapiens
ccatttgtgtttgac

SEQ ID NO: 100632 - DNA, 15 bp, Homo sapiens
cccatttgtgtttga

SEQ ID NO: 100633 - DNA, 15 bp, Homo sapiens
acccatttgtgtttg

SEQ ID NO: 100634 - DNA, 15 bp, Homo sapiens
aacccatttgtgttt

SEQ ID NO: 100635 - DNA, 15 bp, Homo sapiens
aaacccatttgtgtt

SEQ ID NO: 100636 - DNA, 15 bp, Homo sapiens
caaacccatttgtgt

SEQ ID NO: 100637 - DNA, 15 bp, Homo sapiens
gcaaacccatttgtg

SEQ ID NO: 100638 - DNA, 15 bp, Homo sapiens
tgcaaacccatttgt

SEQ ID NO: 100639 - DNA, 15 bp, Homo sapiens
atgcaaacccatttg

SEQ ID NO: 100640 - DNA, 15 bp, Homo sapiens
gatgcaaacccattt

SEQ ID NO: 100641 - DNA, 15 bp, Homo sapiens
ggatgcaaacccatt

SEQ ID NO: 100642 - DNA, 15 bp, Homo sapiens
aggatgcaaacccat

SEQ ID NO: 100643 - DNA, 15 bp, Homo sapiens
caggatgcaaaccca

SEQ ID NO: 100644 - DNA, 15 bp, Homo sapiens
ccaggatgcaaaccc

SEQ ID NO: 100645 - DNA, 15 bp, Homo sapiens
gccaggatgcaaacc

SEQ ID NO: 100646 - DNA, 15 bp, Homo sapiens
ggccaggatgcaaac

SEQ ID NO: 100647 - DNA, 15 bp, Homo sapiens
gggccaggatgcaaa

SEQ ID NO: 100648 - DNA, 15 bp, Homo sapiens
agggccaggatgcaa

SEQ ID NO: 100649 - DNA, 15 bp, Homo sapiens
tagggccaggatgca

SEQ ID NO: 100650 - DNA, 15 bp, Homo sapiens
gtagggccaggatgc

SEQ ID NO: 100651 - DNA, 15 bp, Homo sapiens
ggtagggccaggatg

SEQ ID NO: 100652 - DNA, 15 bp, Homo sapiens
tggtagggccaggat

SEQ ID NO: 100653 - DNA, 15 bp, Homo sapiens
ttggtagggccagga

SEQ ID NO: 100654 - DNA, 15 bp, Homo sapiens
attggtagggccagg

SEQ ID NO: 100655 - DNA, 15 bp, Homo sapiens
aattggtagggccag

SEQ ID NO: 100656 - DNA, 15 bp, Homo sapiens
taattggtagggcca

SEQ ID NO: 100657 - DNA, 15 bp, Homo sapiens
ataattggtagggcc

SEQ ID NO: 100658 - DNA, 15 bp, Homo sapiens
cataattggtagggc

SEQ ID NO: 100659 - DNA, 15 bp, Homo sapiens
tcataattggtaggg

SEQ ID NO: 100660 - DNA, 15 bp, Homo sapiens
ctcataattggtagg

SEQ ID NO: 100661 - DNA, 15 bp, Homo sapiens
gctcataattggtag

SEQ ID NO: 100662 - DNA, 15 bp, Homo sapiens
agctcataattggta

SEQ ID NO: 100663 - DNA, 15 bp, Homo sapiens
gagctcataattggt

SEQ ID NO: 100664 - DNA, 15 bp, Homo sapiens
agagctcataattgg

SEQ ID NO: 100665 - DNA, 15 bp, Homo sapiens
cagagctcataattg

SEQ ID NO: 100666 - DNA, 15 bp, Homo sapiens
tcagagctcataatt

SEQ ID NO: 100667 - DNA, 15 bp, Homo sapiens
ctcagagctcataat

SEQ ID NO: 100668 - DNA, 15 bp, Homo sapiens
gctcagagctcataa

SEQ ID NO: 100669 - DNA, 15 bp, Homo sapiens
ggctcagagctcata

SEQ ID NO: 100670 - DNA, 15 bp, Homo sapiens
tggctcagagctcat

SEQ ID NO: 100671 - DNA, 15 bp, Homo sapiens
atggctcagagctca

SEQ ID NO: 100672 - DNA, 15 bp, Homo sapiens
catggctcagagctc

SEQ ID NO: 100673 - DNA, 15 bp, Homo sapiens
ccatggctcagagct

SEQ ID NO: 100674 - DNA, 15 bp, Homo sapiens
cccatggctcagagc

SEQ ID NO: 100675 - DNA, 15 bp, Homo sapiens
gcccatggctcagag

SEQ ID NO: 100676 - DNA, 15 bp, Homo sapiens
tgcccatggctcaga

SEQ ID NO: 100677 - DNA, 15 bp, Homo sapiens
ttgcccatggctcag

SEQ ID NO: 100678 - DNA, 15 bp, Homo sapiens
cttgcccatggctca

SEQ ID NO: 100679 - DNA, 15 bp, Homo sapiens
acttgcccatggctc

SEQ ID NO: 100680 - DNA, 15 bp, Homo sapiens
cacttgcccatggct

SEQ ID NO: 100681 - DNA, 15 bp, Homo sapiens
tcacttgcccatggc

SEQ ID NO: 100682 - DNA, 15 bp, Homo sapiens
gtcacttgcccatgg

SEQ ID NO: 100683 - DNA, 15 bp, Homo sapiens
agtcacttgcccatg

SEQ ID NO: 100684 - DNA, 15 bp, Homo sapiens
tagtcacttgcccat

SEQ ID NO: 100685 - DNA, 15 bp, Homo sapiens
ttagtcacttgccca

SEQ ID NO: 100686 - DNA, 15 bp, Homo sapiens
gttagtcacttgccc

SEQ ID NO: 100687 - DNA, 15 bp, Homo sapiens
agttagtcacttgcc

SEQ ID NO: 100688 - DNA, 15 bp, Homo sapiens
gagttagtcacttgc

SEQ ID NO: 100689 - DNA, 15 bp, Homo sapiens
ggagttagtcacttg

SEQ ID NO: 100690 - DNA, 15 bp, Homo sapiens
gggagttagtcactt

SEQ ID NO: 100691 - DNA, 15 bp, Homo sapiens
agggagttagtcact

SEQ ID NO: 100692 - DNA, 15 bp, Homo sapiens
cagggagttagtcac

SEQ ID NO: 100693 - DNA, 15 bp, Homo sapiens
ccagggagttagtca

SEQ ID NO: 100694 - DNA, 15 bp, Homo sapiens
cccagggagttagtc

SEQ ID NO: 100695 - DNA, 15 bp, Homo sapiens
gcccagggagttagt

SEQ ID NO: 100696 - DNA, 15 bp, Homo sapiens
ggcccagggagttag

SEQ ID NO: 100697 - DNA, 15 bp, Homo sapiens
aggcccagggagtta

SEQ ID NO: 100698 - DNA, 15 bp, Homo sapiens
gaggcccagggagtt

SEQ ID NO: 100699 - DNA, 15 bp, Homo sapiens
tgaggcccagggagt

SEQ ID NO: 100700 - DNA, 15 bp, Homo sapiens
ctgaggcccagggag

SEQ ID NO: 100701 - DNA, 15 bp, Homo sapiens
actgaggcccaggga

SEQ ID NO: 100702 - DNA, 15 bp, Homo sapiens
aactgaggcccaggg

SEQ ID NO: 100703 - DNA, 15 bp, Homo sapiens
aaactgaggcccagg

SEQ ID NO: 100704 - DNA, 15 bp, Homo sapiens
gaaactgaggcccag

SEQ ID NO: 100705 - DNA, 15 bp, Homo sapiens
agaaactgaggccca

SEQ ID NO: 100706 - DNA, 15 bp, Homo sapiens
gagaaactgaggccc

SEQ ID NO: 100707 - DNA, 15 bp, Homo sapiens
agagaaactgaggcc

SEQ ID NO: 100708 - DNA, 15 bp, Homo sapiens
cagagaaactgaggc

SEQ ID NO: 100709 - DNA, 15 bp, Homo sapiens
acagagaaactgagg

SEQ ID NO: 100710 - DNA, 15 bp, Homo sapiens
tacagagaaactgag

SEQ ID NO: 100711 - DNA, 15 bp, Homo sapiens
ttacagagaaactga

SEQ ID NO: 100712 - DNA, 15 bp, Homo sapiens
gttacagagaaactg

SEQ ID NO: 100713 - DNA, 15 bp, Homo sapiens
tgttacagagaaact

SEQ ID NO: 100714 - DNA, 15 bp, Homo sapiens
atgttacagagaaac

SEQ ID NO: 100715 - DNA, 15 bp, Homo sapiens
gatgttacagagaaa

SEQ ID NO: 100716 - DNA, 15 bp, Homo sapiens
agatgttacagagaa

SEQ ID NO: 100717 - DNA, 15 bp, Homo sapiens
cagatgttacagaga

SEQ ID NO: 100718 - DNA, 15 bp, Homo sapiens
acagatgttacagag

SEQ ID NO: 100719 - DNA, 15 bp, Homo sapiens
gacagatgttacaga

SEQ ID NO: 100720 - DNA, 15 bp, Homo sapiens
tgacagatgttacag

SEQ ID NO: 100721 - DNA, 15 bp, Homo sapiens
ctgacagatgttaca

SEQ ID NO: 100722 - DNA, 15 bp, Homo sapiens
tctgacagatgttac

SEQ ID NO: 100723 - DNA, 15 bp, Homo sapiens
gtctgacagatgtta

SEQ ID NO: 100724 - DNA, 15 bp, Homo sapiens
agtctgacagatgtt

SEQ ID NO: 100725 - DNA, 15 bp, Homo sapiens
aagtctgacagatgt

SEQ ID NO: 100726 - DNA, 15 bp, Homo sapiens
gaagtctgacagatg

SEQ ID NO: 100727 - DNA, 15 bp, Homo sapiens
tgaagtctgacagat

SEQ ID NO: 100728 - DNA, 15 bp, Homo sapiens
atgaagtctgacaga

SEQ ID NO: 100729 - DNA, 15 bp, Homo sapiens
catgaagtctgacag

SEQ ID NO: 100730 - DNA, 15 bp, Homo sapiens
ccatgaagtctgaca

SEQ ID NO: 100731 - DNA, 15 bp, Homo sapiens
cccatgaagtctgac

SEQ ID NO: 100732 - DNA, 15 bp, Homo sapiens
acccatgaagtctga

SEQ ID NO: 100733 - DNA, 15 bp, Homo sapiens
gacccatgaagtctg

SEQ ID NO: 100734 - DNA, 15 bp, Homo sapiens
ggacccatgaagtct

SEQ ID NO: 100735 - DNA, 15 bp, Homo sapiens
tggacccatgaagtc

SEQ ID NO: 100736 - DNA, 15 bp, Homo sapiens
ctggacccatgaagt

SEQ ID NO: 100737 - DNA, 15 bp, Homo sapiens
cctggacccatgaag

SEQ ID NO: 100738 - DNA, 15 bp, Homo sapiens
acctggacccatgaa

SEQ ID NO: 100739 - DNA, 15 bp, Homo sapiens
cacctggacccatga

SEQ ID NO: 100740 - DNA, 15 bp, Homo sapiens
tcacctggacccatg

SEQ ID NO: 100741 - DNA, 15 bp, Homo sapiens
ctcacctggacccat

SEQ ID NO: 100742 - DNA, 15 bp, Homo sapiens
cctcacctggaccca

SEQ ID NO: 100743 - DNA, 15 bp, Homo sapiens
tcctcacctggaccc

SEQ ID NO: 100744 - DNA, 15 bp, Homo sapiens
atcctcacctggacc

SEQ ID NO: 100745 - DNA, 15 bp, Homo sapiens
aatcctcacctggac

SEQ ID NO: 100746 - DNA, 15 bp, Homo sapiens
taatcctcacctgga

SEQ ID NO: 100747 - DNA, 15 bp, Homo sapiens
ttaatcctcacctgg

SEQ ID NO: 100748 - DNA, 15 bp, Homo sapiens
tttaatcctcacctg

SEQ ID NO: 100749 - DNA, 15 bp, Homo sapiens
ctttaatcctcacct

SEQ ID NO: 100750 - DNA, 15 bp, Homo sapiens
cctttaatcctcacc

SEQ ID NO: 100751 - DNA, 15 bp, Homo sapiens
tcctttaatcctcac

SEQ ID NO: 100752 - DNA, 15 bp, Homo sapiens
ctcctttaatcctca

SEQ ID NO: 100753 - DNA, 15 bp, Homo sapiens
tctcctttaatcctc

SEQ ID NO: 100754 - DNA, 15 bp, Homo sapiens
atctcctttaatcct

SEQ ID NO: 100755 - DNA, 15 bp, Homo sapiens
gatctcctttaatcc

SEQ ID NO: 100756 - DNA, 15 bp, Homo sapiens
tgatctcctttaatc

SEQ ID NO: 100757 - DNA, 15 bp, Homo sapiens
atgatctcctttaat

SEQ ID NO: 100758 - DNA, 15 bp, Homo sapiens
catgatctcctttaa

SEQ ID NO: 100759 - DNA, 15 bp, Homo sapiens
acatgatctccttta

SEQ ID NO: 100760 - DNA, 15 bp, Homo sapiens
tacatgatctccttt

SEQ ID NO: 100761 - DNA, 15 bp, Homo sapiens
atacatgatctcctt

SEQ ID NO: 100762 - DNA, 15 bp, Homo sapiens
aatacatgatctcct

SEQ ID NO: 100763 - DNA, 15 bp, Homo sapiens
aaatacatgatctcc

SEQ ID NO: 100764 - DNA, 15 bp, Homo sapiens
taaatacatgatctc

SEQ ID NO: 100765 - DNA, 15 bp, Homo sapiens
gtaaatacatgatct

SEQ ID NO: 100766 - DNA, 15 bp, Homo sapiens
tgtaaatacatgatc

SEQ ID NO: 100767 - DNA, 15 bp, Homo sapiens
ctgtaaatacatgat

SEQ ID NO: 100768 - DNA, 15 bp, Homo sapiens
gctgtaaatacatga

SEQ ID NO: 100769 - DNA, 15 bp, Homo sapiens
tgctgtaaatacatg

SEQ ID NO: 100770 - DNA, 15 bp, Homo sapiens
gtgctgtaaatacat

SEQ ID NO: 100771 - DNA, 15 bp, Homo sapiens
tgtgctgtaaataca

SEQ ID NO: 100772 - DNA, 15 bp, Homo sapiens
atgtgctgtaaatac

SEQ ID NO: 100773 - DNA, 15 bp, Homo sapiens
catgtgctgtaaata

SEQ ID NO: 100774 - DNA, 15 bp, Homo sapiens
ccatgtgctgtaaat

SEQ ID NO: 100775 - DNA, 15 bp, Homo sapiens
gccatgtgctgtaaa

SEQ ID NO: 100776 - DNA, 15 bp, Homo sapiens
tgccatgtgctgtaa

SEQ ID NO: 100777 - DNA, 15 bp, Homo sapiens
atgccatgtgctgta

SEQ ID NO: 100778 - DNA, 15 bp, Homo sapiens
catgccatgtgctgt

SEQ ID NO: 100779 - DNA, 15 bp, Homo sapiens
ccatgccatgtgctg

SEQ ID NO: 100780 - DNA, 15 bp, Homo sapiens
accatgccatgtgct

SEQ ID NO: 100781 - DNA, 15 bp, Homo sapiens
caccatgccatgtgc

SEQ ID NO: 100782 - DNA, 15 bp, Homo sapiens
gcaccatgccatgtg

SEQ ID NO: 100783 - DNA, 15 bp, Homo sapiens
agcaccatgccatgt

SEQ ID NO: 100784 - DNA, 15 bp, Homo sapiens
aagcaccatgccatg

SEQ ID NO: 100785 - DNA, 15 bp, Homo sapiens
gaagcaccatgccat

SEQ ID NO: 100786 - DNA, 15 bp, Homo sapiens
tgaagcaccatgcca

SEQ ID NO: 100787 - DNA, 15 bp, Homo sapiens
gtgaagcaccatgcc

SEQ ID NO: 100788 - DNA, 15 bp, Homo sapiens
tgtgaagcaccatgc

SEQ ID NO: 100789 - DNA, 15 bp, Homo sapiens
atgtgaagcaccatg

SEQ ID NO: 100790 - DNA, 15 bp, Homo sapiens
tatgtgaagcaccat

SEQ ID NO: 100791 - DNA, 15 bp, Homo sapiens
ttatgtgaagcacca

SEQ ID NO: 100792 - DNA, 15 bp, Homo sapiens
tttatgtgaagcacc

SEQ ID NO: 100793 - DNA, 15 bp, Homo sapiens
ttttatgtgaagcac

SEQ ID NO: 100794 - DNA, 15 bp, Homo sapiens
attttatgtgaagca

SEQ ID NO: 100795 - DNA, 15 bp, Homo sapiens
tattttatgtgaagc

SEQ ID NO: 100796 - DNA, 15 bp, Homo sapiens
ttattttatgtgaag

SEQ ID NO: 100797 - DNA, 15 bp, Homo sapiens
cttattttatgtgaa

SEQ ID NO: 100798 - DNA, 15 bp, Homo sapiens
acttattttatgtga

SEQ ID NO: 100799 - DNA, 15 bp, Homo sapiens
tacttattttatgtg

SEQ ID NO: 100800 - DNA, 15 bp, Homo sapiens
atacttattttatgt

SEQ ID NO: 100801 - DNA, 15 bp, Homo sapiens
aatacttattttatg

SEQ ID NO: 100802 - DNA, 15 bp, Homo sapiens
aaatacttattttat

SEQ ID NO: 100803 - DNA, 15 bp, Homo sapiens
taaatacttatttta

SEQ ID NO: 100804 - DNA, 15 bp, Homo sapiens
ctaaatacttatttt

SEQ ID NO: 100805 - DNA, 15 bp, Homo sapiens
actaaatacttattt

SEQ ID NO: 100806 - DNA, 15 bp, Homo sapiens
tactaaatacttatt

SEQ ID NO: 100807 - DNA, 15 bp, Homo sapiens
ttactaaatacttat

SEQ ID NO: 100808 - DNA, 15 bp, Homo sapiens
tttactaaatactta

SEQ ID NO: 100809 - DNA, 15 bp, Homo sapiens
atttactaaatactt

SEQ ID NO: 100810 - DNA, 15 bp, Homo sapiens
catttactaaatact

SEQ ID NO: 100811 - DNA, 15 bp, Homo sapiens
tcatttactaaatac

SEQ ID NO: 100812 - DNA, 15 bp, Homo sapiens
atcatttactaaata

SEQ ID NO: 100813 - DNA, 15 bp, Homo sapiens
tatcatttactaaat

SEQ ID NO: 100814 - DNA, 15 bp, Homo sapiens
ttatcatttactaaa

SEQ ID NO: 100815 - DNA, 15 bp, Homo sapiens
gttatcatttactaa

SEQ ID NO: 100816 - DNA, 15 bp, Homo sapiens
agttatcatttacta

SEQ ID NO: 100817 - DNA, 15 bp, Homo sapiens
cagttatcatttact

SEQ ID NO: 100818 - DNA, 15 bp, Homo sapiens
ccagttatcatttac

SEQ ID NO: 100819 - DNA, 15 bp, Homo sapiens
accagttatcattta

SEQ ID NO: 100820 - DNA, 15 bp, Homo sapiens
aaccagttatcattt

SEQ ID NO: 100821 - DNA, 15 bp, Homo sapiens
gaaccagttatcatt

SEQ ID NO: 100822 - DNA, 15 bp, Homo sapiens
ggaaccagttatcat

SEQ ID NO: 100823 - DNA, 15 bp, Homo sapiens
aggaaccagttatca

SEQ ID NO: 100824 - DNA, 15 bp, Homo sapiens
aaggaaccagttatc

SEQ ID NO: 100825 - DNA, 15 bp, Homo sapiens
gaaggaaccagttat

SEQ ID NO: 100826 - DNA, 15 bp, Homo sapiens
agaaggaaccagtta

SEQ ID NO: 100827 - DNA, 15 bp, Homo sapiens
gagaaggaaccagtt

SEQ ID NO: 100828 - DNA, 15 bp, Homo sapiens
agagaaggaaccagt

SEQ ID NO: 100829 - DNA, 15 bp, Homo sapiens
gagagaaggaaccag

SEQ ID NO: 100830 - DNA, 15 bp, Homo sapiens
tgagagaaggaacca

SEQ ID NO: 100831 - DNA, 15 bp, Homo sapiens
ctgagagaaggaacc

SEQ ID NO: 100832 - DNA, 15 bp, Homo sapiens
tctgagagaaggaac

SEQ ID NO: 100833 - DNA, 15 bp, Homo sapiens
ttctgagagaaggaa

SEQ ID NO: 100834 - DNA, 15 bp, Homo sapiens
tttctgagagaagga

SEQ ID NO: 100835 - DNA, 15 bp, Homo sapiens
gtttctgagagaagg

SEQ ID NO: 100836 - DNA, 15 bp, Homo sapiens
agtttctgagagaag

SEQ ID NO: 100837 - DNA, 15 bp, Homo sapiens
aagtttctgagagaa

SEQ ID NO: 100838 - DNA, 15 bp, Homo sapiens
taagtttctgagaga

SEQ ID NO: 100839 - DNA, 15 bp, Homo sapiens
ataagtttctgagag

SEQ ID NO: 100840 - DNA, 15 bp, Homo sapiens
aataagtttctgaga

SEQ ID NO: 100841 - DNA, 15 bp, Homo sapiens
aaataagtttctgag

SEQ ID NO: 100842 - DNA, 15 bp, Homo sapiens
gaaataagtttctga

SEQ ID NO: 100843 - DNA, 15 bp, Homo sapiens
agaaataagtttctg

SEQ ID NO: 100844 - DNA, 15 bp, Homo sapiens
cagaaataagtttct

SEQ ID NO: 100845 - DNA, 15 bp, Homo sapiens
ccagaaataagtttc

SEQ ID NO: 100846 - DNA, 15 bp, Homo sapiens
cccagaaataagttt

SEQ ID NO: 100847 - DNA, 15 bp, Homo sapiens
gcccagaaataagtt

SEQ ID NO: 100848 - DNA, 15 bp, Homo sapiens
ggcccagaaataagt

SEQ ID NO: 100849 - DNA, 15 bp, Homo sapiens
aggcccagaaataag

SEQ ID NO: 100850 - DNA, 15 bp, Homo sapiens
caggcccagaaataa

SEQ ID NO: 100851 - DNA, 15 bp, Homo sapiens
gcaggcccagaaata

SEQ ID NO: 100852 - DNA, 15 bp, Homo sapiens
ggcaggcccagaaat

SEQ ID NO: 100853 - DNA, 15 bp, Homo sapiens
tggcaggcccagaaa

SEQ ID NO: 100854 - DNA, 15 bp, Homo sapiens
ctggcaggcccagaa

SEQ ID NO: 100855 - DNA, 15 bp, Homo sapiens
cctggcaggcccaga

SEQ ID NO: 100856 - DNA, 15 bp, Homo sapiens
ccctggcaggcccag

SEQ ID NO: 100857 - DNA, 15 bp, Homo sapiens
cccctggcaggccca

SEQ ID NO: 100858 - DNA, 15 bp, Homo sapiens
gcccctggcaggccc

SEQ ID NO: 100859 - DNA, 15 bp, Homo sapiens
ggcccctggcaggcc

SEQ ID NO: 100860 - DNA, 15 bp, Homo sapiens
cggcccctggcaggc

SEQ ID NO: 100861 - DNA, 15 bp, Homo sapiens
gcggcccctggcagg

SEQ ID NO: 100862 - DNA, 15 bp, Homo sapiens
ggcggcccctggcag

SEQ ID NO: 100863 - DNA, 15 bp, Homo sapiens
gggcggcccctggca

SEQ ID NO: 100864 - DNA, 15 bp, Homo sapiens
agggcggcccctggc

SEQ ID NO: 100865 - DNA, 15 bp, Homo sapiens
aagggcggcccctgg

SEQ ID NO: 100866 - DNA, 15 bp, Homo sapiens
aaagggcggcccctg

SEQ ID NO: 100867 - DNA, 15 bp, Homo sapiens
aaaagggcggcccct

SEQ ID NO: 100868 - DNA, 15 bp, Homo sapiens
aaaaagggcggcccc

SEQ ID NO: 100869 - DNA, 15 bp, Homo sapiens
gaaaaagggcggccc

SEQ ID NO: 100870 - DNA, 15 bp, Homo sapiens
tgaaaaagggcggcc

SEQ ID NO: 100871 - DNA, 15 bp, Homo sapiens
atgaaaaagggcggc

SEQ ID NO: 100872 - DNA, 15 bp, Homo sapiens
catgaaaaagggcgg

SEQ ID NO: 100873 - DNA, 15 bp, Homo sapiens
ccatgaaaaagggcg

SEQ ID NO: 100874 - DNA, 15 bp, Homo sapiens
gccatgaaaaagggc

SEQ ID NO: 100875 - DNA, 15 bp, Homo sapiens
tgccatgaaaaaggg

SEQ ID NO: 100876 - DNA, 15 bp, Homo sapiens
gtgccatgaaaaagg

SEQ ID NO: 100877 - DNA, 15 bp, Homo sapiens
tgtgccatgaaaaag

SEQ ID NO: 100878 - DNA, 15 bp, Homo sapiens
ttgtgccatgaaaaa

SEQ ID NO: 100879 - DNA, 15 bp, Homo sapiens
cttgtgccatgaaaa

SEQ ID NO: 100880 - DNA, 15 bp, Homo sapiens
acttgtgccatgaaa

SEQ ID NO: 100881 - DNA, 15 bp, Homo sapiens
aacttgtgccatgaa

SEQ ID NO: 100882 - DNA, 15 bp, Homo sapiens
caacttgtgccatga

SEQ ID NO: 100883 - DNA, 15 bp, Homo sapiens
ccaacttgtgccatg

SEQ ID NO: 100884 - DNA, 15 bp, Homo sapiens
cccaacttgtgccat

SEQ ID NO: 100885 - DNA, 15 bp, Homo sapiens
acccaacttgtgcca

SEQ ID NO: 100886 - DNA, 15 bp, Homo sapiens
aacccaacttgtgcc

SEQ ID NO: 100887 - DNA, 15 bp, Homo sapiens
gaacccaacttgtgc

SEQ ID NO: 100888 - DNA, 15 bp, Homo sapiens
ggaacccaacttgtg

SEQ ID NO: 100889 - DNA, 15 bp, Homo sapiens
gggaacccaacttgt

SEQ ID NO: 100890 - DNA, 15 bp, Homo sapiens
tgggaacccaacttg

SEQ ID NO: 100891 - DNA, 15 bp, Homo sapiens
ctgggaacccaactt

SEQ ID NO: 100892 - DNA, 15 bp, Homo sapiens
cctgggaacccaact

SEQ ID NO: 100893 - DNA, 15 bp, Homo sapiens
ccctgggaacccaac

SEQ ID NO: 100894 - DNA, 15 bp, Homo sapiens
accctgggaacccaa

SEQ ID NO: 100895 - DNA, 15 bp, Homo sapiens
aaccctgggaaccca

SEQ ID NO: 100896 - DNA, 15 bp, Homo sapiens
gaaccctgggaaccc

SEQ ID NO: 100897 - DNA, 15 bp, Homo sapiens
tgaaccctgggaacc

SEQ ID NO: 100898 - DNA, 15 bp, Homo sapiens
ctgaaccctgggaac

SEQ ID NO: 100899 - DNA, 15 bp, Homo sapiens
actgaaccctgggaa

SEQ ID NO: 100900 - DNA, 15 bp, Homo sapiens
tactgaaccctggga

SEQ ID NO: 100901 - DNA, 15 bp, Homo sapiens
atactgaaccctggg

SEQ ID NO: 100902 - DNA, 15 bp, Homo sapiens
aatactgaaccctgg

SEQ ID NO: 100903 - DNA, 15 bp, Homo sapiens
gaatactgaaccctg

SEQ ID NO: 100904 - DNA, 15 bp, Homo sapiens
agaatactgaaccct

SEQ ID NO: 100905 - DNA, 15 bp, Homo sapiens
aagaatactgaaccc

SEQ ID NO: 100906 - DNA, 15 bp, Homo sapiens
aaagaatactgaacc

SEQ ID NO: 100907 - DNA, 15 bp, Homo sapiens
aaaagaatactgaac

SEQ ID NO: 100908 - DNA, 15 bp, Homo sapiens
taaaagaatactgaa

SEQ ID NO: 100909 - DNA, 15 bp, Homo sapiens
ttaaaagaatactga

SEQ ID NO: 100910 - DNA, 15 bp, Homo sapiens
tttaaaagaatactg

SEQ ID NO: 100911 - DNA, 15 bp, Homo sapiens
atttaaaagaatact

SEQ ID NO: 100912 - DNA, 15 bp, Homo sapiens
tatttaaaagaatac

SEQ ID NO: 100913 - DNA, 15 bp, Homo sapiens
ctatttaaaagaata

SEQ ID NO: 100914 - DNA, 15 bp, Homo sapiens
actatttaaaagaat

SEQ ID NO: 100915 - DNA, 15 bp, Homo sapiens
aactatttaaaagaa

SEQ ID NO: 100916 - DNA, 15 bp, Homo sapiens
aaactatttaaaaga

SEQ ID NO: 100917 - DNA, 15 bp, Homo sapiens
aaaactatttaaaag

SEQ ID NO: 100918 - DNA, 15 bp, Homo sapiens
gaaaactatttaaaa

SEQ ID NO: 100919 - DNA, 15 bp, Homo sapiens
agaaaactatttaaa

SEQ ID NO: 100920 - DNA, 15 bp, Homo sapiens
cagaaaactatttaa

SEQ ID NO: 100921 - DNA, 15 bp, Homo sapiens
ccagaaaactattta

SEQ ID NO: 100922 - DNA, 15 bp, Homo sapiens
tccagaaaactattt

SEQ ID NO: 100923 - DNA, 15 bp, Homo sapiens
ctccagaaaactatt

SEQ ID NO: 100924 - DNA, 15 bp, Homo sapiens
tctccagaaaactat

SEQ ID NO: 100925 - DNA, 15 bp, Homo sapiens
atctccagaaaacta

SEQ ID NO: 100926 - DNA, 15 bp, Homo sapiens
gatctccagaaaact

SEQ ID NO: 100927 - DNA, 15 bp, Homo sapiens
ggatctccagaaaac

SEQ ID NO: 100928 - DNA, 15 bp, Homo sapiens
aggatctccagaaaa

SEQ ID NO: 100929 - DNA, 15 bp, Homo sapiens
gaggatctccagaaa

SEQ ID NO: 100930 - DNA, 15 bp, Homo sapiens
ggaggatctccagaa

SEQ ID NO: 100931 - DNA, 15 bp, Homo sapiens
tggaggatctccaga

SEQ ID NO: 100932 - DNA, 15 bp, Homo sapiens
atggaggatctccag

SEQ ID NO: 100933 - DNA, 15 bp, Homo sapiens
aatggaggatctcca

SEQ ID NO: 100934 - DNA, 15 bp, Homo sapiens
aaatggaggatctcc

SEQ ID NO: 100935 - DNA, 15 bp, Homo sapiens
caaatggaggatctc

SEQ ID NO: 100936 - DNA, 15 bp, Homo sapiens
ccaaatggaggatct

SEQ ID NO: 100937 - DNA, 15 bp, Homo sapiens
cccaaatggaggatc

SEQ ID NO: 100938 - DNA, 15 bp, Homo sapiens
acccaaatggaggat

SEQ ID NO: 100939 - DNA, 15 bp, Homo sapiens
tacccaaatggagga

SEQ ID NO: 100940 - DNA, 15 bp, Homo sapiens
atacccaaatggagg

SEQ ID NO: 100941 - DNA, 15 bp, Homo sapiens
aatacccaaatggag

SEQ ID NO: 100942 - DNA, 15 bp, Homo sapiens
aaatacccaaatgga

SEQ ID NO: 100943 - DNA, 15 bp, Homo sapiens
aaaatacccaaatgg

SEQ ID NO: 100944 - DNA, 15 bp, Homo sapiens
aaaaatacccaaatg

SEQ ID NO: 100945 - DNA, 15 bp, Homo sapiens
aaaaaatacccaaat

SEQ ID NO: 100946 - DNA, 15 bp, Homo sapiens
gaaaaaatacccaaa

SEQ ID NO: 100947 - DNA, 15 bp, Homo sapiens
ggaaaaaatacccaa

SEQ ID NO: 100948 - DNA, 15 bp, Homo sapiens
aggaaaaaataccca

SEQ ID NO: 100949 - DNA, 15 bp, Homo sapiens
caggaaaaaataccc

SEQ ID NO: 100950 - DNA, 15 bp, Homo sapiens
gcaggaaaaaatacc

SEQ ID NO: 100951 - DNA, 15 bp, Homo sapiens
agcaggaaaaaatac

SEQ ID NO: 100952 - DNA, 15 bp, Homo sapiens
aagcaggaaaaaata

SEQ ID NO: 100953 - DNA, 15 bp, Homo sapiens
aaagcaggaaaaaat

SEQ ID NO: 100954 - DNA, 15 bp, Homo sapiens
gaaagcaggaaaaaa

SEQ ID NO: 100955 - DNA, 15 bp, Homo sapiens
tgaaagcaggaaaaa

SEQ ID NO: 100956 - DNA, 15 bp, Homo sapiens
ctgaaagcaggaaaa

SEQ ID NO: 100957 - DNA, 15 bp, Homo sapiens
cctgaaagcaggaaa

SEQ ID NO: 100958 - DNA, 15 bp, Homo sapiens
acctgaaagcaggaa

SEQ ID NO: 100959 - DNA, 15 bp, Homo sapiens
aacctgaaagcagga

SEQ ID NO: 100960 - DNA, 15 bp, Homo sapiens
aaacctgaaagcagg

SEQ ID NO: 100961 - DNA, 15 bp, Homo sapiens
caaacctgaaagcag

SEQ ID NO: 100962 - DNA, 15 bp, Homo sapiens
ccaaacctgaaagca

SEQ ID NO: 100963 - DNA, 15 bp, Homo sapiens
tccaaacctgaaagc

SEQ ID NO: 100964 - DNA, 15 bp, Homo sapiens
ctccaaacctgaaag

SEQ ID NO: 100965 - DNA, 15 bp, Homo sapiens
tctccaaacctgaaa

SEQ ID NO: 100966 - DNA, 15 bp, Homo sapiens
atctccaaacctgaa

SEQ ID NO: 100967 - DNA, 15 bp, Homo sapiens
catctccaaacctga

SEQ ID NO: 100968 - DNA, 15 bp, Homo sapiens
ccatctccaaacctg

SEQ ID NO: 100969 - DNA, 15 bp, Homo sapiens
accatctccaaacct

SEQ ID NO: 100970 - DNA, 15 bp, Homo sapiens
aaccatctccaaacc

SEQ ID NO: 100971 - DNA, 15 bp, Homo sapiens
taaccatctccaaac

SEQ ID NO: 100972 - DNA, 15 bp, Homo sapiens
ataaccatctccaaa

SEQ ID NO: 100973 - DNA, 15 bp, Homo sapiens
tataaccatctccaa

SEQ ID NO: 100974 - DNA, 15 bp, Homo sapiens
gtataaccatctcca

SEQ ID NO: 100975 - DNA, 15 bp, Homo sapiens
tgtataaccatctcc

SEQ ID NO: 100976 - DNA, 15 bp, Homo sapiens
ttgtataaccatctc

SEQ ID NO: 100977 - DNA, 15 bp, Homo sapiens
attgtataaccatct

SEQ ID NO: 100978 - DNA, 15 bp, Homo sapiens
tattgtataaccatc

SEQ ID NO: 100979 - DNA, 15 bp, Homo sapiens
ctattgtataaccat

SEQ ID NO: 100980 - DNA, 15 bp, Homo sapiens
actattgtataacca

SEQ ID NO: 100981 - DNA, 15 bp, Homo sapiens
aactattgtataacc

SEQ ID NO: 100982 - DNA, 15 bp, Homo sapiens
caactattgtataac

SEQ ID NO: 100983 - DNA, 15 bp, Homo sapiens
acaactattgtataa

SEQ ID NO: 100984 - DNA, 15 bp, Homo sapiens
tacaactattgtata

SEQ ID NO: 100985 - DNA, 15 bp, Homo sapiens
gtacaactattgtat

SEQ ID NO: 100986 - DNA, 15 bp, Homo sapiens
cgtacaactattgta

SEQ ID NO: 100987 - DNA, 15 bp, Homo sapiens
tcgtacaactattgt

SEQ ID NO: 100988 - DNA, 15 bp, Homo sapiens
ttcgtacaactattg

SEQ ID NO: 100989 - DNA, 15 bp, Homo sapiens
attcgtacaactatt

SEQ ID NO: 100990 - DNA, 15 bp, Homo sapiens
tattcgtacaactat

SEQ ID NO: 100991 - DNA, 15 bp, Homo sapiens
ctattcgtacaacta

SEQ ID NO: 100992 - DNA, 15 bp, Homo sapiens
gctattcgtacaact

SEQ ID NO: 100993 - DNA, 15 bp, Homo sapiens
tgctattcgtacaac

SEQ ID NO: 100994 - DNA, 15 bp, Homo sapiens
ctgctattcgtacaa

SEQ ID NO: 100995 - DNA, 15 bp, Homo sapiens
cctgctattcgtaca

SEQ ID NO: 100996 - DNA, 15 bp, Homo sapiens
ccctgctattcgtac

SEQ ID NO: 100997 - DNA, 15 bp, Homo sapiens
accctgctattcgta

SEQ ID NO: 100998 - DNA, 15 bp, Homo sapiens
gaccctgctattcgt

SEQ ID NO: 100999 - DNA, 15 bp, Homo sapiens
ggaccctgctattcg

SEQ ID NO: 101000 - DNA, 15 bp, Homo sapiens
tggaccctgctattc

SEQ ID NO: 101001 - DNA, 15 bp, Homo sapiens
ttggaccctgctatt

SEQ ID NO: 101002 - DNA, 15 bp, Homo sapiens
gttggaccctgctat

SEQ ID NO: 101003 - DNA, 15 bp, Homo sapiens
ggttggaccctgcta

SEQ ID NO: 101004 - DNA, 15 bp, Homo sapiens
gggttggaccctgct

SEQ ID NO: 101005 - DNA, 15 bp, Homo sapiens
cgggttggaccctgc

SEQ ID NO: 101006 - DNA, 15 bp, Homo sapiens
ccgggttggaccctg

SEQ ID NO: 101007 - DNA, 15 bp, Homo sapiens
tccgggttggaccct

SEQ ID NO: 101008 - DNA, 15 bp, Homo sapiens
gtccgggttggaccc

SEQ ID NO: 101009 - DNA, 15 bp, Homo sapiens
ggtccgggttggacc

SEQ ID NO: 101010 - DNA, 15 bp, Homo sapiens
aggtccgggttggac

SEQ ID NO: 101011 - DNA, 15 bp, Homo sapiens
caggtccgggttgga

SEQ ID NO: 101012 - DNA, 15 bp, Homo sapiens
tcaggtccgggttgg

SEQ ID NO: 101013 - DNA, 15 bp, Homo sapiens
ttcaggtccgggttg

SEQ ID NO: 101014 - DNA, 15 bp, Homo sapiens
cttcaggtccgggtt

SEQ ID NO: 101015 - DNA, 15 bp, Homo sapiens
gcttcaggtccgggt

SEQ ID NO: 101016 - DNA, 15 bp, Homo sapiens
ggcttcaggtccggg

SEQ ID NO: 101017 - DNA, 15 bp, Homo sapiens
aggcttcaggtccgg

SEQ ID NO: 101018 - DNA, 15 bp, Homo sapiens
caggcttcaggtccg

SEQ ID NO: 101019 - DNA, 15 bp, Homo sapiens
acaggcttcaggtcc

SEQ ID NO: 101020 - DNA, 15 bp, Homo sapiens
gacaggcttcaggtc

SEQ ID NO: 101021 - DNA, 15 bp, Homo sapiens
ggacaggcttcaggt

SEQ ID NO: 101022 - DNA, 15 bp, Homo sapiens
tggacaggcttcagg

SEQ ID NO: 101023 - DNA, 15 bp, Homo sapiens
ctggacaggcttcag

SEQ ID NO: 101024 - DNA, 15 bp, Homo sapiens
cctggacaggcttca

SEQ ID NO: 101025 - DNA, 15 bp, Homo sapiens
tcctggacaggcttc

SEQ ID NO: 101026 - DNA, 15 bp, Homo sapiens
atcctggacaggctt

SEQ ID NO: 101027 - DNA, 15 bp, Homo sapiens
aatcctggacaggct

SEQ ID NO: 101028 - DNA, 15 bp, Homo sapiens
aaatcctggacaggc

SEQ ID NO: 101029 - DNA, 15 bp, Homo sapiens
gaaatcctggacagg

SEQ ID NO: 101030 - DNA, 15 bp, Homo sapiens
agaaatcctggacag

SEQ ID NO: 101031 - DNA, 15 bp, Homo sapiens
aagaaatcctggaca

SEQ ID NO: 101032 - DNA, 15 bp, Homo sapiens
aaagaaatcctggac

SEQ ID NO: 101033 - DNA, 15 bp, Homo sapiens
caaagaaatcctgga

SEQ ID NO: 101034 - DNA, 15 bp, Homo sapiens
ccaaagaaatcctgg

SEQ ID NO: 101035 - DNA, 15 bp, Homo sapiens
tccaaagaaatcctg

SEQ ID NO: 101036 - DNA, 15 bp, Homo sapiens
gtccaaagaaatcct

SEQ ID NO: 101037 - DNA, 15 bp, Homo sapiens
agtccaaagaaatcc

SEQ ID NO: 101038 - DNA, 15 bp, Homo sapiens
aagtccaaagaaatc

SEQ ID NO: 101039 - DNA, 15 bp, Homo sapiens
caagtccaaagaaat

SEQ ID NO: 101040 - DNA, 15 bp, Homo sapiens
gcaagtccaaagaaa

SEQ ID NO: 101041 - DNA, 15 bp, Homo sapiens
tgcaagtccaaagaa

SEQ ID NO: 101042 - DNA, 15 bp, Homo sapiens
atgcaagtccaaaga

SEQ ID NO: 101043 - DNA, 15 bp, Homo sapiens
aatgcaagtccaaag

SEQ ID NO: 101044 - DNA, 15 bp, Homo sapiens
aaatgcaagtccaaa

SEQ ID NO: 101045 - DNA, 15 bp, Homo sapiens
gaaatgcaagtccaa

SEQ ID NO: 101046 - DNA, 15 bp, Homo sapiens
ggaaatgcaagtcca

SEQ ID NO: 101047 - DNA, 15 bp, Homo sapiens
aggaaatgcaagtcc

SEQ ID NO: 101048 - DNA, 15 bp, Homo sapiens
caggaaatgcaagtc

SEQ ID NO: 101049 - DNA, 15 bp, Homo sapiens
ccaggaaatgcaagt

SEQ ID NO: 101050 - DNA, 15 bp, Homo sapiens
tccaggaaatgcaag

SEQ ID NO: 101051 - DNA, 15 bp, Homo sapiens
ttccaggaaatgcaa

SEQ ID NO: 101052 - DNA, 15 bp, Homo sapiens
cttccaggaaatgca

SEQ ID NO: 101053 - DNA, 15 bp, Homo sapiens
acttccaggaaatgc

SEQ ID NO: 101054 - DNA, 15 bp, Homo sapiens
cacttccaggaaatg

SEQ ID NO: 101055 - DNA, 15 bp, Homo sapiens
acacttccaggaaat

SEQ ID NO: 101056 - DNA, 15 bp, Homo sapiens
aacacttccaggaaa

SEQ ID NO: 101057 - DNA, 15 bp, Homo sapiens
gaacacttccaggaa

SEQ ID NO: 101058 - DNA, 15 bp, Homo sapiens
agaacacttccagga

SEQ ID NO: 101059 - DNA, 15 bp, Homo sapiens
tagaacacttccagg

SEQ ID NO: 101060 - DNA, 15 bp, Homo sapiens
ttagaacacttccag

SEQ ID NO: 101061 - DNA, 15 bp, Homo sapiens
tttagaacacttcca

SEQ ID NO: 101062 - DNA, 15 bp, Homo sapiens
ttttagaacacttcc

SEQ ID NO: 101063 - DNA, 15 bp, Homo sapiens
cttttagaacacttc

SEQ ID NO: 101064 - DNA, 15 bp, Homo sapiens
tcttttagaacactt

SEQ ID NO: 101065 - DNA, 15 bp, Homo sapiens
ctcttttagaacact

SEQ ID NO: 101066 - DNA, 15 bp, Homo sapiens
tctcttttagaacac

SEQ ID NO: 101067 - DNA, 15 bp, Homo sapiens
ttctcttttagaaca

SEQ ID NO: 101068 - DNA, 15 bp, Homo sapiens
tttctcttttagaac

SEQ ID NO: 101069 - DNA, 15 bp, Homo sapiens
gtttctcttttagaa

SEQ ID NO: 101070 - DNA, 15 bp, Homo sapiens
tgtttctcttttaga

SEQ ID NO: 101071 - DNA, 15 bp, Homo sapiens
gtgtttctcttttag

SEQ ID NO: 101072 - DNA, 15 bp, Homo sapiens
ggtgtttctctttta

SEQ ID NO: 101073 - DNA, 15 bp, Homo sapiens
cggtgtttctctttt

SEQ ID NO: 101074 - DNA, 15 bp, Homo sapiens
ccggtgtttctcttt

SEQ ID NO: 101075 - DNA, 15 bp, Homo sapiens
tccggtgtttctctt

SEQ ID NO: 101076 - DNA, 15 bp, Homo sapiens
ttccggtgtttctct

SEQ ID NO: 101077 - DNA, 15 bp, Homo sapiens
gttccggtgtttctc

SEQ ID NO: 101078 - DNA, 15 bp, Homo sapiens
tgttccggtgtttct

SEQ ID NO: 101079 - DNA, 15 bp, Homo sapiens
atgttccggtgtttc

SEQ ID NO: 101080 - DNA, 15 bp, Homo sapiens
catgttccggtgttt

SEQ ID NO: 101081 - DNA, 15 bp, Homo sapiens
gcatgttccggtgtt

SEQ ID NO: 101082 - DNA, 15 bp, Homo sapiens
agcatgttccggtgt

SEQ ID NO: 101083 - DNA, 15 bp, Homo sapiens
tagcatgttccggtg

SEQ ID NO: 101084 - DNA, 15 bp, Homo sapiens
gtagcatgttccggt

SEQ ID NO: 101085 - DNA, 15 bp, Homo sapiens
tgtagcatgttccgg

SEQ ID NO: 101086 - DNA, 15 bp, Homo sapiens
ttgtagcatgttccg

SEQ ID NO: 101087 - DNA, 15 bp, Homo sapiens
attgtagcatgttcc

SEQ ID NO: 101088 - DNA, 15 bp, Homo sapiens
tattgtagcatgttc

SEQ ID NO: 101089 - DNA, 15 bp, Homo sapiens
gtattgtagcatgtt

SEQ ID NO: 101090 - DNA, 15 bp, Homo sapiens
ggtattgtagcatgt

SEQ ID NO: 101091 - DNA, 15 bp, Homo sapiens
tggtattgtagcatg

SEQ ID NO: 101092 - DNA, 15 bp, Homo sapiens
ctggtattgtagcat

SEQ ID NO: 101093 - DNA, 15 bp, Homo sapiens
gctggtattgtagca

SEQ ID NO: 101094 - DNA, 15 bp, Homo sapiens
agctggtattgtagc

SEQ ID NO: 101095 - DNA, 15 bp, Homo sapiens
aagctggtattgtag

SEQ ID NO: 101096 - DNA, 15 bp, Homo sapiens
gaagctggtattgta

SEQ ID NO: 101097 - DNA, 15 bp, Homo sapiens
ggaagctggtattgt

SEQ ID NO: 101098 - DNA, 15 bp, Homo sapiens
tggaagctggtattg

SEQ ID NO: 101099 - DNA, 15 bp, Homo sapiens
atggaagctggtatt

SEQ ID NO: 101100 - DNA, 15 bp, Homo sapiens
gatggaagctggtat

SEQ ID NO: 101101 - DNA, 15 bp, Homo sapiens
agatggaagctggta

SEQ ID NO: 101102 - DNA, 15 bp, Homo sapiens
aagatggaagctggt

SEQ ID NO: 101103 - DNA, 15 bp, Homo sapiens
gaagatggaagctgg

SEQ ID NO: 101104 - DNA, 15 bp, Homo sapiens
tgaagatggaagctg

SEQ ID NO: 101105 - DNA, 15 bp, Homo sapiens
atgaagatggaagct

SEQ ID NO: 101106 - DNA, 15 bp, Homo sapiens
aatgaagatggaagc

SEQ ID NO: 101107 - DNA, 15 bp, Homo sapiens
taatgaagatggaag

SEQ ID NO: 101108 - DNA, 15 bp, Homo sapiens
ataatgaagatggaa

SEQ ID NO: 101109 - DNA, 15 bp, Homo sapiens
gataatgaagatgga

SEQ ID NO: 101110 - DNA, 15 bp, Homo sapiens
agataatgaagatgg

SEQ ID NO: 101111 - DNA, 15 bp, Homo sapiens
aagataatgaagatg

SEQ ID NO: 101112 - DNA, 15 bp, Homo sapiens
gaagataatgaagat

SEQ ID NO: 101113 - DNA, 15 bp, Homo sapiens
agaagataatgaaga

SEQ ID NO: 101114 - DNA, 15 bp, Homo sapiens
gagaagataatgaag

SEQ ID NO: 101115 - DNA, 15 bp, Homo sapiens
agagaagataatgaa

SEQ ID NO: 101116 - DNA, 15 bp, Homo sapiens
cagagaagataatga

SEQ ID NO: 101117 - DNA, 15 bp, Homo sapiens
ccagagaagataatg

SEQ ID NO: 101118 - DNA, 15 bp, Homo sapiens
gccagagaagataat

SEQ ID NO: 101119 - DNA, 15 bp, Homo sapiens
ggccagagaagataa

SEQ ID NO: 101120 - DNA, 15 bp, Homo sapiens
tggccagagaagata

SEQ ID NO: 101121 - DNA, 15 bp, Homo sapiens
ctggccagagaagat

SEQ ID NO: 101122 - DNA, 15 bp, Homo sapiens
cctggccagagaaga

SEQ ID NO: 101123 - DNA, 15 bp, Homo sapiens
tcctggccagagaag

SEQ ID NO: 101124 - DNA, 15 bp, Homo sapiens
atcctggccagagaa

SEQ ID NO: 101125 - DNA, 15 bp, Homo sapiens
tatcctggccagaga

SEQ ID NO: 101126 - DNA, 15 bp, Homo sapiens
atatcctggccagag

SEQ ID NO: 101127 - DNA, 15 bp, Homo sapiens
aatatcctggccaga

SEQ ID NO: 101128 - DNA, 15 bp, Homo sapiens
gaatatcctggccag

SEQ ID NO: 101129 - DNA, 15 bp, Homo sapiens
tgaatatcctggcca

SEQ ID NO: 101130 - DNA, 15 bp, Homo sapiens
ctgaatatcctggcc

SEQ ID NO: 101131 - DNA, 15 bp, Homo sapiens
gctgaatatcctggc

SEQ ID NO: 101132 - DNA, 15 bp, Homo sapiens
tgctgaatatcctgg

SEQ ID NO: 101133 - DNA, 15 bp, Homo sapiens
atgctgaatatcctg

SEQ ID NO: 101134 - DNA, 15 bp, Homo sapiens
gatgctgaatatcct

SEQ ID NO: 101135 - DNA, 15 bp, Homo sapiens
ggatgctgaatatcc

SEQ ID NO: 101136 - DNA, 15 bp, Homo sapiens
aggatgctgaatatc

SEQ ID NO: 101137 - DNA, 15 bp, Homo sapiens
gaggatgctgaatat

SEQ ID NO: 101138 - DNA, 15 bp, Homo sapiens
agaggatgctgaata

SEQ ID NO: 101139 - DNA, 15 bp, Homo sapiens
gagaggatgctgaat

SEQ ID NO: 101140 - DNA, 15 bp, Homo sapiens
ggagaggatgctgaa

SEQ ID NO: 101141 - DNA, 15 bp, Homo sapiens
gggagaggatgctga

SEQ ID NO: 101142 - DNA, 15 bp, Homo sapiens
tgggagaggatgctg

SEQ ID NO: 101143 - DNA, 15 bp, Homo sapiens
ctgggagaggatgct

SEQ ID NO: 101144 - DNA, 15 bp, Homo sapiens
tctgggagaggatgc

SEQ ID NO: 101145 - DNA, 15 bp, Homo sapiens
ctctgggagaggatg

SEQ ID NO: 101146 - DNA, 15 bp, Homo sapiens
gctctgggagaggat

SEQ ID NO: 101147 - DNA, 15 bp, Homo sapiens
tgctctgggagagga

SEQ ID NO: 101148 - DNA, 15 bp, Homo sapiens
ttgctctgggagagg

SEQ ID NO: 101149 - DNA, 15 bp, Homo sapiens
tttgctctgggagag

SEQ ID NO: 101150 - DNA, 15 bp, Homo sapiens
ttttgctctgggaga

SEQ ID NO: 101151 - DNA, 15 bp, Homo sapiens
tttttgctctgggag

SEQ ID NO: 101152 - DNA, 15 bp, Homo sapiens
ctttttgctctggga

SEQ ID NO: 101153 - DNA, 15 bp, Homo sapiens
gctttttgctctggg

SEQ ID NO: 101154 - DNA, 15 bp, Homo sapiens
cgctttttgctctgg

SEQ ID NO: 101155 - DNA, 15 bp, Homo sapiens
tcgctttttgctctg

SEQ ID NO: 101156 - DNA, 15 bp, Homo sapiens
gtcgctttttgctct

SEQ ID NO: 101157 - DNA, 15 bp, Homo sapiens
agtcgctttttgctc

SEQ ID NO: 101158 - DNA, 15 bp, Homo sapiens
gagtcgctttttgct

SEQ ID NO: 101159 - DNA, 15 bp, Homo sapiens
ggagtcgctttttgc

SEQ ID NO: 101160 - DNA, 15 bp, Homo sapiens
tggagtcgctttttg

SEQ ID NO: 101161 - DNA, 15 bp, Homo sapiens
gtggagtcgcttttt

SEQ ID NO: 101162 - DNA, 15 bp, Homo sapiens
tgtggagtcgctttt

SEQ ID NO: 101163 - DNA, 15 bp, Homo sapiens
atgtggagtcgcttt

SEQ ID NO: 101164 - DNA, 15 bp, Homo sapiens
tatgtggagtcgctt

SEQ ID NO: 101165 - DNA, 15 bp, Homo sapiens
ctatgtggagtcgct

SEQ ID NO: 101166 - DNA, 15 bp, Homo sapiens
tctatgtggagtcgc

SEQ ID NO: 101167 - DNA, 15 bp, Homo sapiens
ttctatgtggagtcg

SEQ ID NO: 101168 - DNA, 15 bp, Homo sapiens
cttctatgtggagtc

SEQ ID NO: 101169 - DNA, 15 bp, Homo sapiens
tcttctatgtggagt

SEQ ID NO: 101170 - DNA, 15 bp, Homo sapiens
gtcttctatgtggag

SEQ ID NO: 101171 - DNA, 15 bp, Homo sapiens
agtcttctatgtgga

SEQ ID NO: 101172 - DNA, 15 bp, Homo sapiens
tagtcttctatgtgg

SEQ ID NO: 101173 - DNA, 15 bp, Homo sapiens
gtagtcttctatgtg

SEQ ID NO: 101174 - DNA, 15 bp, Homo sapiens
agtagtcttctatgt

SEQ ID NO: 101175 - DNA, 15 bp, Homo sapiens
gagtagtcttctatg

SEQ ID NO: 101176 - DNA, 15 bp, Homo sapiens
agagtagtcttctat

SEQ ID NO: 101177 - DNA, 15 bp, Homo sapiens
cagagtagtcttcta

SEQ ID NO: 101178 - DNA, 15 bp, Homo sapiens
acagagtagtcttct

SEQ ID NO: 101179 - DNA, 15 bp, Homo sapiens
aacagagtagtcttc

SEQ ID NO: 101180 - DNA, 15 bp, Homo sapiens
aaacagagtagtctt

SEQ ID NO: 101181 - DNA, 15 bp, Homo sapiens
gaaacagagtagtct

SEQ ID NO: 101182 - DNA, 15 bp, Homo sapiens
agaaacagagtagtc

SEQ ID NO: 101183 - DNA, 15 bp, Homo sapiens
gagaaacagagtagt

SEQ ID NO: 101184 - DNA, 15 bp, Homo sapiens
tgagaaacagagtag

SEQ ID NO: 101185 - DNA, 15 bp, Homo sapiens
ctgagaaacagagta

SEQ ID NO: 101186 - DNA, 15 bp, Homo sapiens
tctgagaaacagagt

SEQ ID NO: 101187 - DNA, 15 bp, Homo sapiens
gtctgagaaacagag

SEQ ID NO: 101188 - DNA, 15 bp, Homo sapiens
tgtctgagaaacaga

SEQ ID NO: 101189 - DNA, 15 bp, Homo sapiens
ttgtctgagaaacag

SEQ ID NO: 101190 - DNA, 15 bp, Homo sapiens
gttgtctgagaaaca

SEQ ID NO: 101191 - DNA, 15 bp, Homo sapiens
tgttgtctgagaaac

SEQ ID NO: 101192 - DNA, 15 bp, Homo sapiens
gtgttgtctgagaaa

SEQ ID NO: 101193 - DNA, 15 bp, Homo sapiens
agtgttgtctgagaa

SEQ ID NO: 101194 - DNA, 15 bp, Homo sapiens
aagtgttgtctgaga

SEQ ID NO: 101195 - DNA, 15 bp, Homo sapiens
caagtgttgtctgag

SEQ ID NO: 101196 - DNA, 15 bp, Homo sapiens
tcaagtgttgtctga

SEQ ID NO: 101197 - DNA, 15 bp, Homo sapiens
gtcaagtgttgtctg

SEQ ID NO: 101198 - DNA, 15 bp, Homo sapiens
ggtcaagtgttgtct

SEQ ID NO: 101199 - DNA, 15 bp, Homo sapiens
tggtcaagtgttgtc

SEQ ID NO: 101200 - DNA, 15 bp, Homo sapiens
ttggtcaagtgttgt

SEQ ID NO: 101201 - DNA, 15 bp, Homo sapiens
cttggtcaagtgttg

SEQ ID NO: 101202 - DNA, 15 bp, Homo sapiens
acttggtcaagtgtt

SEQ ID NO: 101203 - DNA, 15 bp, Homo sapiens
tacttggtcaagtgt

SEQ ID NO: 101204 - DNA, 15 bp, Homo sapiens
ttacttggtcaagtg

SEQ ID NO: 101205 - DNA, 15 bp, Homo sapiens
cttacttggtcaagt

SEQ ID NO: 101206 - DNA, 15 bp, Homo sapiens
gcttacttggtcaag

SEQ ID NO: 101207 - DNA, 15 bp, Homo sapiens
agcttacttggtcaa

SEQ ID NO: 101208 - DNA, 15 bp, Homo sapiens
aagcttacttggtca

SEQ ID NO: 101209 - DNA, 15 bp, Homo sapiens
aaagcttacttggtc

SEQ ID NO: 101210 - DNA, 15 bp, Homo sapiens
caaagcttacttggt

SEQ ID NO: 101211 - DNA, 15 bp, Homo sapiens
tcaaagcttacttgg

SEQ ID NO: 101212 - DNA, 15 bp, Homo sapiens
ctcaaagcttacttg

SEQ ID NO: 101213 - DNA, 15 bp, Homo sapiens
actcaaagcttactt

SEQ ID NO: 101214 - DNA, 15 bp, Homo sapiens
cactcaaagcttact

SEQ ID NO: 101215 - DNA, 15 bp, Homo sapiens
acactcaaagcttac

SEQ ID NO: 101216 - DNA, 15 bp, Homo sapiens
gacactcaaagctta

SEQ ID NO: 101217 - DNA, 15 bp, Homo sapiens
tgacactcaaagctt

SEQ ID NO: 101218 - DNA, 15 bp, Homo sapiens
ttgacactcaaagct

SEQ ID NO: 101219 - DNA, 15 bp, Homo sapiens
tttgacactcaaagc

SEQ ID NO: 101220 - DNA, 15 bp, Homo sapiens
ttttgacactcaaag

SEQ ID NO: 101221 - DNA, 15 bp, Homo sapiens
gttttgacactcaaa

SEQ ID NO: 101222 - DNA, 15 bp, Homo sapiens
tgttttgacactcaa

SEQ ID NO: 101223 - DNA, 15 bp, Homo sapiens
ctgttttgacactca

SEQ ID NO: 101224 - DNA, 15 bp, Homo sapiens
tctgttttgacactc

SEQ ID NO: 101225 - DNA, 15 bp, Homo sapiens
atctgttttgacact

SEQ ID NO: 101226 - DNA, 15 bp, Homo sapiens
aatctgttttgacac

SEQ ID NO: 101227 - DNA, 15 bp, Homo sapiens
aaatctgttttgaca

SEQ ID NO: 101228 - DNA, 15 bp, Homo sapiens
taaatctgttttgac

SEQ ID NO: 101229 - DNA, 15 bp, Homo sapiens
gtaaatctgttttga

SEQ ID NO: 101230 - DNA, 15 bp, Homo sapiens
agtaaatctgttttg

SEQ ID NO: 101231 - DNA, 15 bp, Homo sapiens
aagtaaatctgtttt

SEQ ID NO: 101232 - DNA, 15 bp, Homo sapiens
gaagtaaatctgttt

SEQ ID NO: 101233 - DNA, 15 bp, Homo sapiens
agaagtaaatctgtt

SEQ ID NO: 101234 - DNA, 15 bp, Homo sapiens
gagaagtaaatctgt

SEQ ID NO: 101235 - DNA, 15 bp, Homo sapiens
tgagaagtaaatctg

SEQ ID NO: 101236 - DNA, 15 bp, Homo sapiens
ctgagaagtaaatct

SEQ ID NO: 101237 - DNA, 15 bp, Homo sapiens
cctgagaagtaaatc

SEQ ID NO: 101238 - DNA, 15 bp, Homo sapiens
ccctgagaagtaaat

SEQ ID NO: 101239 - DNA, 15 bp, Homo sapiens
accctgagaagtaaa

SEQ ID NO: 101240 - DNA, 15 bp, Homo sapiens
caccctgagaagtaa

SEQ ID NO: 101241 - DNA, 15 bp, Homo sapiens
acaccctgagaagta

SEQ ID NO: 101242 - DNA, 15 bp, Homo sapiens
cacaccctgagaagt

SEQ ID NO: 101243 - DNA, 15 bp, Homo sapiens
ccacaccctgagaag

SEQ ID NO: 101244 - DNA, 15 bp, Homo sapiens
tccacaccctgagaa

SEQ ID NO: 101245 - DNA, 15 bp, Homo sapiens
atccacaccctgaga

SEQ ID NO: 101246 - DNA, 15 bp, Homo sapiens
aatccacaccctgag

SEQ ID NO: 101247 - DNA, 15 bp, Homo sapiens
gaatccacaccctga

SEQ ID NO: 101248 - DNA, 15 bp, Homo sapiens
ggaatccacaccctg

SEQ ID NO: 101249 - DNA, 15 bp, Homo sapiens
aggaatccacaccct

SEQ ID NO: 101250 - DNA, 15 bp, Homo sapiens
caggaatccacaccc

SEQ ID NO: 101251 - DNA, 15 bp, Homo sapiens
gcaggaatccacacc

SEQ ID NO: 101252 - DNA, 15 bp, Homo sapiens
ggcaggaatccacac

SEQ ID NO: 101253 - DNA, 15 bp, Homo sapiens
gggcaggaatccaca

SEQ ID NO: 101254 - DNA, 15 bp, Homo sapiens
ggggcaggaatccac

SEQ ID NO: 101255 - DNA, 15 bp, Homo sapiens
cggggcaggaatcca

SEQ ID NO: 101256 - DNA, 15 bp, Homo sapiens
tcggggcaggaatcc

SEQ ID NO: 101257 - DNA, 15 bp, Homo sapiens
gtcggggcaggaatc

SEQ ID NO: 101258 - DNA, 15 bp, Homo sapiens
tgtcggggcaggaat

SEQ ID NO: 101259 - DNA, 15 bp, Homo sapiens
gtgtcggggcaggaa

SEQ ID NO: 101260 - DNA, 15 bp, Homo sapiens
agtgtcggggcagga

SEQ ID NO: 101261 - DNA, 15 bp, Homo sapiens
gagtgtcggggcagg

SEQ ID NO: 101262 - DNA, 15 bp, Homo sapiens
ggagtgtcggggcag

SEQ ID NO: 101263 - DNA, 15 bp, Homo sapiens
gggagtgtcggggca

SEQ ID NO: 101264 - DNA, 15 bp, Homo sapiens
cgggagtgtcggggc

SEQ ID NO: 101265 - DNA, 15 bp, Homo sapiens
gcgggagtgtcgggg

SEQ ID NO: 101266 - DNA, 15 bp, Homo sapiens
ggcgggagtgtcggg

SEQ ID NO: 101267 - DNA, 15 bp, Homo sapiens
gggcgggagtgtcgg

SEQ ID NO: 101268 - DNA, 15 bp, Homo sapiens
tgggcgggagtgtcg

SEQ ID NO: 101269 - DNA, 15 bp, Homo sapiens
atgggcgggagtgtc

SEQ ID NO: 101270 - DNA, 15 bp, Homo sapiens
tatgggcgggagtgt

SEQ ID NO: 101271 - DNA, 15 bp, Homo sapiens
ctatgggcgggagtg

SEQ ID NO: 101272 - DNA, 15 bp, Homo sapiens
cctatgggcgggagt

SEQ ID NO: 101273 - DNA, 15 bp, Homo sapiens
acctatgggcgggag

SEQ ID NO: 101274 - DNA, 15 bp, Homo sapiens
gacctatgggcggga

SEQ ID NO: 101275 - DNA, 15 bp, Homo sapiens
ggacctatgggcggg

SEQ ID NO: 101276 - DNA, 15 bp, Homo sapiens
tggacctatgggcgg

SEQ ID NO: 101277 - DNA, 15 bp, Homo sapiens
ttggacctatgggcg

SEQ ID NO: 101278 - DNA, 15 bp, Homo sapiens
cttggacctatgggc

SEQ ID NO: 101279 - DNA, 15 bp, Homo sapiens
tcttggacctatggg

SEQ ID NO: 101280 - DNA, 15 bp, Homo sapiens
ctcttggacctatgg

SEQ ID NO: 101281 - DNA, 15 bp, Homo sapiens
gctcttggacctatg

SEQ ID NO: 101282 - DNA, 15 bp, Homo sapiens
tgctcttggacctat

SEQ ID NO: 101283 - DNA, 15 bp, Homo sapiens
ctgctcttggaccta

SEQ ID NO: 101284 - DNA, 15 bp, Homo sapiens
actgctcttggacct

SEQ ID NO: 101285 - DNA, 15 bp, Homo sapiens
aactgctcttggacc

SEQ ID NO: 101286 - DNA, 15 bp, Homo sapiens
aaactgctcttggac

SEQ ID NO: 101287 - DNA, 15 bp, Homo sapiens
caaactgctcttgga

SEQ ID NO: 101288 - DNA, 15 bp, Homo sapiens
acaaactgctcttgg

SEQ ID NO: 101289 - DNA, 15 bp, Homo sapiens
tacaaactgctcttg

SEQ ID NO: 101290 - DNA, 15 bp, Homo sapiens
atacaaactgctctt

SEQ ID NO: 101291 - DNA, 15 bp, Homo sapiens
gatacaaactgctct

SEQ ID NO: 101292 - DNA, 15 bp, Homo sapiens
agatacaaactgctc

SEQ ID NO: 101293 - DNA, 15 bp, Homo sapiens
aagatacaaactgct

SEQ ID NO: 101294 - DNA, 15 bp, Homo sapiens
caagatacaaactgc

SEQ ID NO: 101295 - DNA, 15 bp, Homo sapiens
tcaagatacaaactg

SEQ ID NO: 101296 - DNA, 15 bp, Homo sapiens
ttcaagatacaaact

SEQ ID NO: 101297 - DNA, 15 bp, Homo sapiens
attcaagatacaaac

SEQ ID NO: 101298 - DNA, 15 bp, Homo sapiens
aattcaagatacaaa

SEQ ID NO: 101299 - DNA, 15 bp, Homo sapiens
caattcaagatacaa

SEQ ID NO: 101300 - DNA, 15 bp, Homo sapiens
ccaattcaagataca

SEQ ID NO: 101301 - DNA, 15 bp, Homo sapiens
accaattcaagatac

SEQ ID NO: 101302 - DNA, 15 bp, Homo sapiens
caccaattcaagata

SEQ ID NO: 101303 - DNA, 15 bp, Homo sapiens
gcaccaattcaagat

SEQ ID NO: 101304 - DNA, 15 bp, Homo sapiens
agcaccaattcaaga

SEQ ID NO: 101305 - DNA, 15 bp, Homo sapiens
aagcaccaattcaag

SEQ ID NO: 101306 - DNA, 15 bp, Homo sapiens
caagcaccaattcaa

SEQ ID NO: 101307 - DNA, 15 bp, Homo sapiens
tcaagcaccaattca

SEQ ID NO: 101308 - DNA, 15 bp, Homo sapiens
ttcaagcaccaattc

SEQ ID NO: 101309 - DNA, 15 bp, Homo sapiens
attcaagcaccaatt

SEQ ID NO: 101310 - DNA, 15 bp, Homo sapiens
aattcaagcaccaat

SEQ ID NO: 101311 - DNA, 15 bp, Homo sapiens
gaattcaagcaccaa

SEQ ID NO: 101312 - DNA, 15 bp, Homo sapiens
ggaattcaagcacca

SEQ ID NO: 101313 - DNA, 15 bp, Homo sapiens
aggaattcaagcacc

SEQ ID NO: 101314 - DNA, 15 bp, Homo sapiens
caggaattcaagcac

SEQ ID NO: 101315 - DNA, 15 bp, Homo sapiens
tcaggaattcaagca

SEQ ID NO: 101316 - DNA, 15 bp, Homo sapiens
atcaggaattcaagc

SEQ ID NO: 101317 - DNA, 15 bp, Homo sapiens
gatcaggaattcaag

SEQ ID NO: 101318 - DNA, 15 bp, Homo sapiens
agatcaggaattcaa

SEQ ID NO: 101319 - DNA, 15 bp, Homo sapiens
tagatcaggaattca

SEQ ID NO: 101320 - DNA, 15 bp, Homo sapiens
gtagatcaggaattc

SEQ ID NO: 101321 - DNA, 15 bp, Homo sapiens
agtagatcaggaatt

SEQ ID NO: 101322 - DNA, 15 bp, Homo sapiens
tagtagatcaggaat

SEQ ID NO: 101323 - DNA, 15 bp, Homo sapiens
atagtagatcaggaa

SEQ ID NO: 101324 - DNA, 15 bp, Homo sapiens
aatagtagatcagga

SEQ ID NO: 101325 - DNA, 15 bp, Homo sapiens
gaatagtagatcagg

SEQ ID NO: 101326 - DNA, 15 bp, Homo sapiens
ggaatagtagatcag

SEQ ID NO: 101327 - DNA, 15 bp, Homo sapiens
aggaatagtagatca

SEQ ID NO: 101328 - DNA, 15 bp, Homo sapiens
taggaatagtagatc

SEQ ID NO: 101329 - DNA, 15 bp, Homo sapiens
ctaggaatagtagat

SEQ ID NO: 101330 - DNA, 15 bp, Homo sapiens
gctaggaatagtaga

SEQ ID NO: 101331 - DNA, 15 bp, Homo sapiens
agctaggaatagtag

SEQ ID NO: 101332 - DNA, 15 bp, Homo sapiens
tagctaggaatagta

SEQ ID NO: 101333 - DNA, 15 bp, Homo sapiens
atagctaggaatagt

SEQ ID NO: 101334 - DNA, 15 bp, Homo sapiens
catagctaggaatag

SEQ ID NO: 101335 - DNA, 15 bp, Homo sapiens
gcatagctaggaata

SEQ ID NO: 101336 - DNA, 15 bp, Homo sapiens
agcatagctaggaat

SEQ ID NO: 101337 - DNA, 15 bp, Homo sapiens
aagcatagctaggaa

SEQ ID NO: 101338 - DNA, 15 bp, Homo sapiens
aaagcatagctagga

SEQ ID NO: 101339 - DNA, 15 bp, Homo sapiens
aaaagcatagctagg

SEQ ID NO: 101340 - DNA, 15 bp, Homo sapiens
aaaaagcatagctag

SEQ ID NO: 101341 - DNA, 15 bp, Homo sapiens
taaaaagcatagcta

SEQ ID NO: 101342 - DNA, 15 bp, Homo sapiens
gtaaaaagcatagct

SEQ ID NO: 101343 - DNA, 15 bp, Homo sapiens
agtaaaaagcatagc

SEQ ID NO: 101344 - DNA, 15 bp, Homo sapiens
tagtaaaaagcatag

SEQ ID NO: 101345 - DNA, 15 bp, Homo sapiens
ttagtaaaaagcata

SEQ ID NO: 101346 - DNA, 15 bp, Homo sapiens
tttagtaaaaagcat

SEQ ID NO: 101347 - DNA, 15 bp, Homo sapiens
gtttagtaaaaagca

SEQ ID NO: 101348 - DNA, 15 bp, Homo sapiens
ggtttagtaaaaagc

SEQ ID NO: 101349 - DNA, 15 bp, Homo sapiens
aggtttagtaaaaag

SEQ ID NO: 101350 - DNA, 15 bp, Homo sapiens
gaggtttagtaaaaa

SEQ ID NO: 101351 - DNA, 15 bp, Homo sapiens
agaggtttagtaaaa

SEQ ID NO: 101352 - DNA, 15 bp, Homo sapiens
gagaggtttagtaaa

SEQ ID NO: 101353 - DNA, 15 bp, Homo sapiens
agagaggtttagtaa

SEQ ID NO: 101354 - DNA, 15 bp, Homo sapiens
cagagaggtttagta

SEQ ID NO: 101355 - DNA, 15 bp, Homo sapiens
tcagagaggtttagt

SEQ ID NO: 101356 - DNA, 15 bp, Homo sapiens
ttcagagaggtttag

SEQ ID NO: 101357 - DNA, 15 bp, Homo sapiens
gttcagagaggttta

SEQ ID NO: 101358 - DNA, 15 bp, Homo sapiens
ggttcagagaggttt

SEQ ID NO: 101359 - DNA, 15 bp, Homo sapiens
aggttcagagaggtt

SEQ ID NO: 101360 - DNA, 15 bp, Homo sapiens
caggttcagagaggt

SEQ ID NO: 101361 - DNA, 15 bp, Homo sapiens
tcaggttcagagagg

SEQ ID NO: 101362 - DNA, 15 bp, Homo sapiens
ttcaggttcagagag

SEQ ID NO: 101363 - DNA, 15 bp, Homo sapiens
tttcaggttcagaga

SEQ ID NO: 101364 - DNA, 15 bp, Homo sapiens
ttttcaggttcagag

SEQ ID NO: 101365 - DNA, 15 bp, Homo sapiens
cttttcaggttcaga

SEQ ID NO: 101366 - DNA, 15 bp, Homo sapiens
ccttttcaggttcag

SEQ ID NO: 101367 - DNA, 15 bp, Homo sapiens
cccttttcaggttca

SEQ ID NO: 101368 - DNA, 15 bp, Homo sapiens
tcccttttcaggttc

SEQ ID NO: 101369 - DNA, 15 bp, Homo sapiens
ctcccttttcaggtt

SEQ ID NO: 101370 - DNA, 15 bp, Homo sapiens
tctcccttttcaggt

SEQ ID NO: 101371 - DNA, 15 bp, Homo sapiens
atctcccttttcagg

SEQ ID NO: 101372 - DNA, 15 bp, Homo sapiens
catctcccttttcag

SEQ ID NO: 101373 - DNA, 15 bp, Homo sapiens
tcatctcccttttca

SEQ ID NO: 101374 - DNA, 15 bp, Homo sapiens
atcatctcccttttc

SEQ ID NO: 101375 - DNA, 15 bp, Homo sapiens
catcatctccctttt

SEQ ID NO: 101376 - DNA, 15 bp, Homo sapiens
gcatcatctcccttt

SEQ ID NO: 101377 - DNA, 15 bp, Homo sapiens
ggcatcatctccctt

SEQ ID NO: 101378 - DNA, 15 bp, Homo sapiens
aggcatcatctccct

SEQ ID NO: 101379 - DNA, 15 bp, Homo sapiens
taggcatcatctccc

SEQ ID NO: 101380 - DNA, 15 bp, Homo sapiens
ataggcatcatctcc

SEQ ID NO: 101381 - DNA, 15 bp, Homo sapiens
cataggcatcatctc

SEQ ID NO: 101382 - DNA, 15 bp, Homo sapiens
acataggcatcatct

SEQ ID NO: 101383 - DNA, 15 bp, Homo sapiens
tacataggcatcatc

SEQ ID NO: 101384 - DNA, 15 bp, Homo sapiens
gtacataggcatcat

SEQ ID NO: 101385 - DNA, 15 bp, Homo sapiens
agtacataggcatca

SEQ ID NO: 101386 - DNA, 15 bp, Homo sapiens
gagtacataggcatc

SEQ ID NO: 101387 - DNA, 15 bp, Homo sapiens
agagtacataggcat

SEQ ID NO: 101388 - DNA, 15 bp, Homo sapiens
tagagtacataggca

SEQ ID NO: 101389 - DNA, 15 bp, Homo sapiens
atagagtacataggc

SEQ ID NO: 101390 - DNA, 15 bp, Homo sapiens
tatagagtacatagg

SEQ ID NO: 101391 - DNA, 15 bp, Homo sapiens
ctatagagtacatag

SEQ ID NO: 101392 - DNA, 15 bp, Homo sapiens
cctatagagtacata

SEQ ID NO: 101393 - DNA, 15 bp, Homo sapiens
tcctatagagtacat

SEQ ID NO: 101394 - DNA, 15 bp, Homo sapiens
atcctatagagtaca

SEQ ID NO: 101395 - DNA, 15 bp, Homo sapiens
aatcctatagagtac

SEQ ID NO: 101396 - DNA, 15 bp, Homo sapiens
taatcctatagagta

SEQ ID NO: 101397 - DNA, 15 bp, Homo sapiens
ataatcctatagagt

SEQ ID NO: 101398 - DNA, 15 bp, Homo sapiens
aataatcctatagag

SEQ ID NO: 101399 - DNA, 15 bp, Homo sapiens
caataatcctataga

SEQ ID NO: 101400 - DNA, 15 bp, Homo sapiens
acaataatcctatag

SEQ ID NO: 101401 - DNA, 15 bp, Homo sapiens
cacaataatcctata

SEQ ID NO: 101402 - DNA, 15 bp, Homo sapiens
tcacaataatcctat

SEQ ID NO: 101403 - DNA, 15 bp, Homo sapiens
ctcacaataatccta

SEQ ID NO: 101404 - DNA, 15 bp, Homo sapiens
tctcacaataatcct

SEQ ID NO: 101405 - DNA, 15 bp, Homo sapiens
ttctcacaataatcc

SEQ ID NO: 101406 - DNA, 15 bp, Homo sapiens
attctcacaataatc

SEQ ID NO: 101407 - DNA, 15 bp, Homo sapiens
aattctcacaataat

SEQ ID NO: 101408 - DNA, 15 bp, Homo sapiens
aaattctcacaataa

SEQ ID NO: 101409 - DNA, 15 bp, Homo sapiens
taaattctcacaata

SEQ ID NO: 101410 - DNA, 15 bp, Homo sapiens
gtaaattctcacaat

SEQ ID NO: 101411 - DNA, 15 bp, Homo sapiens
agtaaattctcacaa

SEQ ID NO: 101412 - DNA, 15 bp, Homo sapiens
cagtaaattctcaca

SEQ ID NO: 101413 - DNA, 15 bp, Homo sapiens
acagtaaattctcac

SEQ ID NO: 101414 - DNA, 15 bp, Homo sapiens
tacagtaaattctca

SEQ ID NO: 101415 - DNA, 15 bp, Homo sapiens
ttacagtaaattctc

SEQ ID NO: 101416 - DNA, 15 bp, Homo sapiens
attacagtaaattct

SEQ ID NO: 101417 - DNA, 15 bp, Homo sapiens
tattacagtaaattc

SEQ ID NO: 101418 - DNA, 15 bp, Homo sapiens
ttattacagtaaatt

SEQ ID NO: 101419 - DNA, 15 bp, Homo sapiens
attattacagtaaat

SEQ ID NO: 101420 - DNA, 15 bp, Homo sapiens
tattattacagtaaa

SEQ ID NO: 101421 - DNA, 15 bp, Homo sapiens
ttattattacagtaa

SEQ ID NO: 101422 - DNA, 15 bp, Homo sapiens
gttattattacagta

SEQ ID NO: 101423 - DNA, 15 bp, Homo sapiens
ggttattattacagt

SEQ ID NO: 101424 - DNA, 15 bp, Homo sapiens
tggttattattacag

SEQ ID NO: 101425 - DNA, 15 bp, Homo sapiens
atggttattattaca

SEQ ID NO: 101426 - DNA, 15 bp, Homo sapiens
tatggttattattac

SEQ ID NO: 101427 - DNA, 15 bp, Homo sapiens
ttatggttattatta

SEQ ID NO: 101428 - DNA, 15 bp, Homo sapiens
tttatggttattatt

SEQ ID NO: 101429 - DNA, 15 bp, Homo sapiens
ttttatggttattat

SEQ ID NO: 101430 - DNA, 15 bp, Homo sapiens
tttttatggttatta

SEQ ID NO: 101431 - DNA, 15 bp, Homo sapiens
gtttttatggttatt

SEQ ID NO: 101432 - DNA, 15 bp, Homo sapiens
agtttttatggttat

SEQ ID NO: 101433 - DNA, 15 bp, Homo sapiens
tagtttttatggtta

SEQ ID NO: 101434 - DNA, 15 bp, Homo sapiens
gtagtttttatggtt

SEQ ID NO: 101435 - DNA, 15 bp, Homo sapiens
ggtagtttttatggt

SEQ ID NO: 101436 - DNA, 15 bp, Homo sapiens
tggtagtttttatgg

SEQ ID NO: 101437 - DNA, 15 bp, Homo sapiens
atggtagtttttatg

SEQ ID NO: 101438 - DNA, 15 bp, Homo sapiens
aatggtagtttttat

SEQ ID NO: 101439 - DNA, 15 bp, Homo sapiens
aaatggtagttttta

SEQ ID NO: 101440 - DNA, 15 bp, Homo sapiens
taaatggtagttttt

SEQ ID NO: 101441 - DNA, 15 bp, Homo sapiens
ctaaatggtagtttt

SEQ ID NO: 101442 - DNA, 15 bp, Homo sapiens
actaaatggtagttt

SEQ ID NO: 101443 - DNA, 15 bp, Homo sapiens
cactaaatggtagtt

SEQ ID NO: 101444 - DNA, 15 bp, Homo sapiens
tcactaaatggtagt

SEQ ID NO: 101445 - DNA, 15 bp, Homo sapiens
ctcactaaatggtag

SEQ ID NO: 101446 - DNA, 15 bp, Homo sapiens
gctcactaaatggta

SEQ ID NO: 101447 - DNA, 15 bp, Homo sapiens
tgctcactaaatggt

SEQ ID NO: 101448 - DNA, 15 bp, Homo sapiens
gtgctcactaaatgg

SEQ ID NO: 101449 - DNA, 15 bp, Homo sapiens
ggtgctcactaaatg

SEQ ID NO: 101450 - DNA, 15 bp, Homo sapiens
aggtgctcactaaat

SEQ ID NO: 101451 - DNA, 15 bp, Homo sapiens
taggtgctcactaaa

SEQ ID NO: 101452 - DNA, 15 bp, Homo sapiens
gtaggtgctcactaa

SEQ ID NO: 101453 - DNA, 15 bp, Homo sapiens
ggtaggtgctcacta

SEQ ID NO: 101454 - DNA, 15 bp, Homo sapiens
tggtaggtgctcact

SEQ ID NO: 101455 - DNA, 15 bp, Homo sapiens
atggtaggtgctcac

SEQ ID NO: 101456 - DNA, 15 bp, Homo sapiens
ccatggtaggtgctc

SEQ ID NO: 101457 - DNA, 15 bp, Homo sapiens
cccatggtaggtgct

SEQ ID NO: 101458 - DNA, 15 bp, Homo sapiens
gcccatggtaggtgc

SEQ ID NO: 101459 - DNA, 15 bp, Homo sapiens
ggcccatggtaggtg

SEQ ID NO: 101460 - DNA, 15 bp, Homo sapiens
tggcccatggtaggt

SEQ ID NO: 101461 - DNA, 15 bp, Homo sapiens
ctggcccatggtagg

SEQ ID NO: 101462 - DNA, 15 bp, Homo sapiens
cctggcccatggtag

SEQ ID NO: 101463 - DNA, 15 bp, Homo sapiens
gcctggcccatggta

SEQ ID NO: 101464 - DNA, 15 bp, Homo sapiens
tgcctggcccatggt

SEQ ID NO: 101465 - DNA, 15 bp, Homo sapiens
atgcctggcccatgg

SEQ ID NO: 101466 - DNA, 15 bp, Homo sapiens
aatgcctggcccatg

SEQ ID NO: 101467 - DNA, 15 bp, Homo sapiens
aaatgcctggcccat

SEQ ID NO: 101468 - DNA, 15 bp, Homo sapiens
aaaatgcctggccca

SEQ ID NO: 101469 - DNA, 15 bp, Homo sapiens
taaaatgcctggccc

SEQ ID NO: 101470 - DNA, 15 bp, Homo sapiens
gtaaaatgcctggcc

SEQ ID NO: 101471 - DNA, 15 bp, Homo sapiens
agtaaaatgcctggc

SEQ ID NO: 101472 - DNA, 15 bp, Homo sapiens
aagtaaaatgcctgg

SEQ ID NO: 101473 - DNA, 15 bp, Homo sapiens
caagtaaaatgcctg

SEQ ID NO: 101474 - DNA, 15 bp, Homo sapiens
ccaagtaaaatgcct

SEQ ID NO: 101475 - DNA, 15 bp, Homo sapiens
accaagtaaaatgcc

SEQ ID NO: 101476 - DNA, 15 bp, Homo sapiens
caccaagtaaaatgc

SEQ ID NO: 101477 - DNA, 15 bp, Homo sapiens
gcaccaagtaaaatg

SEQ ID NO: 101478 - DNA, 15 bp, Homo sapiens
ggcaccaagtaaaat

SEQ ID NO: 101479 - DNA, 15 bp, Homo sapiens
aggcaccaagtaaaa

SEQ ID NO: 101480 - DNA, 15 bp, Homo sapiens
taggcaccaagtaaa

SEQ ID NO: 101481 - DNA, 15 bp, Homo sapiens
ttaggcaccaagtaa

SEQ ID NO: 101482 - DNA, 15 bp, Homo sapiens
attaggcaccaagta

SEQ ID NO: 101483 - DNA, 15 bp, Homo sapiens
gattaggcaccaagt

SEQ ID NO: 101484 - DNA, 15 bp, Homo sapiens
ggattaggcaccaag

SEQ ID NO: 101485 - DNA, 15 bp, Homo sapiens
aggattaggcaccaa

SEQ ID NO: 101486 - DNA, 15 bp, Homo sapiens
taggattaggcacca

SEQ ID NO: 101487 - DNA, 15 bp, Homo sapiens
ataggattaggcacc

SEQ ID NO: 101488 - DNA, 15 bp, Homo sapiens
aataggattaggcac

SEQ ID NO: 101489 - DNA, 15 bp, Homo sapiens
aaataggattaggca

SEQ ID NO: 101490 - DNA, 15 bp, Homo sapiens
taaataggattaggc

SEQ ID NO: 101491 - DNA, 15 bp, Homo sapiens
ttaaataggattagg

SEQ ID NO: 101492 - DNA, 15 bp, Homo sapiens
tttaaataggattag

SEQ ID NO: 101493 - DNA, 15 bp, Homo sapiens
atttaaataggatta

SEQ ID NO: 101494 - DNA, 15 bp, Homo sapiens
aatttaaataggatt

SEQ ID NO: 101495 - DNA, 15 bp, Homo sapiens
taatttaaataggat

SEQ ID NO: 101496 - DNA, 15 bp, Homo sapiens
ctaatttaaatagga

SEQ ID NO: 101497 - DNA, 15 bp, Homo sapiens
tctaatttaaatagg

SEQ ID NO: 101498 - DNA, 15 bp, Homo sapiens
atctaatttaaatag

SEQ ID NO: 101499 - DNA, 15 bp, Homo sapiens
tatctaatttaaata

SEQ ID NO: 101500 - DNA, 15 bp, Homo sapiens
ttatctaatttaaat

SEQ ID NO: 101501 - DNA, 15 bp, Homo sapiens
tttatctaatttaaa

SEQ ID NO: 101502 - DNA, 15 bp, Homo sapiens
ttttatctaatttaa

SEQ ID NO: 101503 - DNA, 15 bp, Homo sapiens
tttttatctaattta

SEQ ID NO: 101504 - DNA, 15 bp, Homo sapiens
ttttttatctaattt

SEQ ID NO: 101505 - DNA, 15 bp, Homo sapiens
cttttttatctaatt

SEQ ID NO: 101506 - DNA, 15 bp, Homo sapiens
acttttttatctaat

SEQ ID NO: 101507 - DNA, 15 bp, Homo sapiens
tacttttttatctaa

SEQ ID NO: 101508 - DNA, 15 bp, Homo sapiens
gtacttttttatcta

SEQ ID NO: 101509 - DNA, 15 bp, Homo sapiens
ggtacttttttatct

SEQ ID NO: 101510 - DNA, 15 bp, Homo sapiens
tggtacttttttatc

SEQ ID NO: 101511 - DNA, 15 bp, Homo sapiens
ttggtacttttttat

SEQ ID NO: 101512 - DNA, 15 bp, Homo sapiens
tttggtactttttta

SEQ ID NO: 101513 - DNA, 15 bp, Homo sapiens
atttggtactttttt

SEQ ID NO: 101514 - DNA, 15 bp, Homo sapiens
tatttggtacttttt

SEQ ID NO: 101515 - DNA, 15 bp, Homo sapiens
ctatttggtactttt

SEQ ID NO: 101516 - DNA, 15 bp, Homo sapiens
cctatttggtacttt

SEQ ID NO: 101517 - DNA, 15 bp, Homo sapiens
acctatttggtactt

SEQ ID NO: 101518 - DNA, 15 bp, Homo sapiens
gacctatttggtact

SEQ ID NO: 101519 - DNA, 15 bp, Homo sapiens
ggacctatttggtac

SEQ ID NO: 101520 - DNA, 15 bp, Homo sapiens
aggacctatttggta

SEQ ID NO: 101521 - DNA, 15 bp, Homo sapiens
caggacctatttggt

SEQ ID NO: 101522 - DNA, 15 bp, Homo sapiens
tcaggacctatttgg

SEQ ID NO: 101523 - DNA, 15 bp, Homo sapiens
gtcaggacctatttg

SEQ ID NO: 101524 - DNA, 15 bp, Homo sapiens
tgtcaggacctattt

SEQ ID NO: 101525 - DNA, 15 bp, Homo sapiens
gtgtcaggacctatt

SEQ ID NO: 101526 - DNA, 15 bp, Homo sapiens
agtgtcaggacctat

SEQ ID NO: 101527 - DNA, 15 bp, Homo sapiens
aagtgtcaggaccta

SEQ ID NO: 101528 - DNA, 15 bp, Homo sapiens
taagtgtcaggacct

SEQ ID NO: 101529 - DNA, 15 bp, Homo sapiens
ttaagtgtcaggacc

SEQ ID NO: 101530 - DNA, 15 bp, Homo sapiens
cttaagtgtcaggac

SEQ ID NO: 101531 - DNA, 15 bp, Homo sapiens
tcttaagtgtcagga

SEQ ID NO: 101532 - DNA, 15 bp, Homo sapiens
ttcttaagtgtcagg

SEQ ID NO: 101533 - DNA, 15 bp, Homo sapiens
cttcttaagtgtcag

SEQ ID NO: 101534 - DNA, 15 bp, Homo sapiens
acttcttaagtgtca

SEQ ID NO: 101535 - DNA, 15 bp, Homo sapiens
tacttcttaagtgtc

SEQ ID NO: 101536 - DNA, 15 bp, Homo sapiens
gtacttcttaagtgt

SEQ ID NO: 101537 - DNA, 15 bp, Homo sapiens
agtacttcttaagtg

SEQ ID NO: 101538 - DNA, 15 bp, Homo sapiens
gagtacttcttaagt

SEQ ID NO: 101539 - DNA, 15 bp, Homo sapiens
tgagtacttcttaag

SEQ ID NO: 101540 - DNA, 15 bp, Homo sapiens
ctgagtacttcttaa

SEQ ID NO: 101541 - DNA, 15 bp, Homo sapiens
actgagtacttctta

SEQ ID NO: 101542 - DNA, 15 bp, Homo sapiens
tactgagtacttctt

SEQ ID NO: 101543 - DNA, 15 bp, Homo sapiens
ttactgagtacttct

SEQ ID NO: 101544 - DNA, 15 bp, Homo sapiens
tttactgagtacttc

SEQ ID NO: 101545 - DNA, 15 bp, Homo sapiens
atttactgagtactt

SEQ ID NO: 101546 - DNA, 15 bp, Homo sapiens
tatttactgagtact

SEQ ID NO: 101547 - DNA, 15 bp, Homo sapiens
atatttactgagtac

SEQ ID NO: 101548 - DNA, 15 bp, Homo sapiens
aatatttactgagta

SEQ ID NO: 101549 - DNA, 15 bp, Homo sapiens
aaatatttactgagt

SEQ ID NO: 101550 - DNA, 15 bp, Homo sapiens
aaaatatttactgag

SEQ ID NO: 101551 - DNA, 15 bp, Homo sapiens
gaaaatatttactga

SEQ ID NO: 101552 - DNA, 15 bp, Homo sapiens
agaaaatatttactg

SEQ ID NO: 101553 - DNA, 15 bp, Homo sapiens
aagaaaatatttact

SEQ ID NO: 101554 - DNA, 15 bp, Homo sapiens
gaagaaaatatttac

SEQ ID NO: 101555 - DNA, 15 bp, Homo sapiens
ggaagaaaatattta

SEQ ID NO: 101556 - DNA, 15 bp, Homo sapiens
gggaagaaaatattt

SEQ ID NO: 101557 - DNA, 15 bp, Homo sapiens
agggaagaaaatatt

SEQ ID NO: 101558 - DNA, 15 bp, Homo sapiens
gagggaagaaaatat

SEQ ID NO: 101559 - DNA, 15 bp, Homo sapiens
agagggaagaaaata

SEQ ID NO: 101560 - DNA, 15 bp, Homo sapiens
aagagggaagaaaat

SEQ ID NO: 101561 - DNA, 15 bp, Homo sapiens
gaagagggaagaaaa

SEQ ID NO: 101562 - DNA, 15 bp, Homo sapiens
ggaagagggaagaaa

SEQ ID NO: 101563 - DNA, 15 bp, Homo sapiens
gggaagagggaagaa

SEQ ID NO: 101564 - DNA, 15 bp, Homo sapiens
agggaagagggaaga

SEQ ID NO: 101565 - DNA, 15 bp, Homo sapiens
aagggaagagggaag

SEQ ID NO: 101566 - DNA, 15 bp, Homo sapiens
aaagggaagagggaa

SEQ ID NO: 101567 - DNA, 15 bp, Homo sapiens
taaagggaagaggga

SEQ ID NO: 101568 - DNA, 15 bp, Homo sapiens
ttaaagggaagaggg

SEQ ID NO: 101569 - DNA, 15 bp, Homo sapiens
attaaagggaagagg

SEQ ID NO: 101570 - DNA, 15 bp, Homo sapiens
gattaaagggaagag

SEQ ID NO: 101571 - DNA, 15 bp, Homo sapiens
tgattaaagggaaga

SEQ ID NO: 101572 - DNA, 15 bp, Homo sapiens
ttgattaaagggaag

SEQ ID NO: 101573 - DNA, 15 bp, Homo sapiens
cttgattaaagggaa

SEQ ID NO: 101574 - DNA, 15 bp, Homo sapiens
tcttgattaaaggga

SEQ ID NO: 101575 - DNA, 15 bp, Homo sapiens
gtcttgattaaaggg

SEQ ID NO: 101576 - DNA, 15 bp, Homo sapiens
ggtcttgattaaagg

SEQ ID NO: 101577 - DNA, 15 bp, Homo sapiens
cggtcttgattaaag

SEQ ID NO: 101578 - DNA, 15 bp, Homo sapiens
acggtcttgattaaa

SEQ ID NO: 101579 - DNA, 15 bp, Homo sapiens
tacggtcttgattaa

SEQ ID NO: 101580 - DNA, 15 bp, Homo sapiens
atacggtcttgatta

SEQ ID NO: 101581 - DNA, 15 bp, Homo sapiens
catacggtcttgatt

SEQ ID NO: 101582 - DNA, 15 bp, Homo sapiens
acatacggtcttgat

SEQ ID NO: 101583 - DNA, 15 bp, Homo sapiens
cacatacggtcttga

SEQ ID NO: 101584 - DNA, 15 bp, Homo sapiens
gcacatacggtcttg

SEQ ID NO: 101585 - DNA, 15 bp, Homo sapiens
ggcacatacggtctt

SEQ ID NO: 101586 - DNA, 15 bp, Homo sapiens
tggcacatacggtct

SEQ ID NO: 101587 - DNA, 15 bp, Homo sapiens
ttggcacatacggtc

SEQ ID NO: 101588 - DNA, 15 bp, Homo sapiens
tttggcacatacggt

SEQ ID NO: 101589 - DNA, 15 bp, Homo sapiens
ctttggcacatacgg

SEQ ID NO: 101590 - DNA, 15 bp, Homo sapiens
actttggcacatacg

SEQ ID NO: 101591 - DNA, 15 bp, Homo sapiens
tactttggcacatac

SEQ ID NO: 101592 - DNA, 15 bp, Homo sapiens
ttactttggcacata

SEQ ID NO: 101593 - DNA, 15 bp, Homo sapiens
tttactttggcacat

SEQ ID NO: 101594 - DNA, 15 bp, Homo sapiens
atttactttggcaca

SEQ ID NO: 101595 - DNA, 15 bp, Homo sapiens
catttactttggcac

SEQ ID NO: 101596 - DNA, 15 bp, Homo sapiens
ccatttactttggca

SEQ ID NO: 101597 - DNA, 15 bp, Homo sapiens
tccatttactttggc

SEQ ID NO: 101598 - DNA, 15 bp, Homo sapiens
atccatttactttgg

SEQ ID NO: 101599 - DNA, 15 bp, Homo sapiens
catccatttactttg

SEQ ID NO: 101600 - DNA, 15 bp, Homo sapiens
tcatccatttacttt

SEQ ID NO: 101601 - DNA, 15 bp, Homo sapiens
gtcatccatttactt

SEQ ID NO: 101602 - DNA, 15 bp, Homo sapiens
agtcatccatttact

SEQ ID NO: 101603 - DNA, 15 bp, Homo sapiens
cagtcatccatttac

SEQ ID NO: 101604 - DNA, 15 bp, Homo sapiens
tcagtcatccattta

SEQ ID NO: 101605 - DNA, 15 bp, Homo sapiens
ctcagtcatccattt

SEQ ID NO: 101606 - DNA, 15 bp, Homo sapiens
gctcagtcatccatt

SEQ ID NO: 101607 - DNA, 15 bp, Homo sapiens
tgctcagtcatccat

SEQ ID NO: 101608 - DNA, 15 bp, Homo sapiens
ctgctcagtcatcca

SEQ ID NO: 101609 - DNA, 15 bp, Homo sapiens
actgctcagtcatcc

SEQ ID NO: 101610 - DNA, 15 bp, Homo sapiens
aactgctcagtcatc

SEQ ID NO: 101611 - DNA, 15 bp, Homo sapiens
caactgctcagtcat

SEQ ID NO: 101612 - DNA, 15 bp, Homo sapiens
ccaactgctcagtca

SEQ ID NO: 101613 - DNA, 15 bp, Homo sapiens
accaactgctcagtc

SEQ ID NO: 101614 - DNA, 15 bp, Homo sapiens
caccaactgctcagt

SEQ ID NO: 101615 - DNA, 15 bp, Homo sapiens
tcaccaactgctcag

SEQ ID NO: 101616 - DNA, 15 bp, Homo sapiens
atcaccaactgctca

SEQ ID NO: 101617 - DNA, 15 bp, Homo sapiens
catcaccaactgctc

SEQ ID NO: 101618 - DNA, 15 bp, Homo sapiens
acatcaccaactgct

SEQ ID NO: 101619 - DNA, 15 bp, Homo sapiens
tacatcaccaactgc

SEQ ID NO: 101620 - DNA, 15 bp, Homo sapiens
ctacatcaccaactg

SEQ ID NO: 101621 - DNA, 15 bp, Homo sapiens
cctacatcaccaact

SEQ ID NO: 101622 - DNA, 15 bp, Homo sapiens
ccctacatcaccaac

SEQ ID NO: 101623 - DNA, 15 bp, Homo sapiens
cccctacatcaccaa

SEQ ID NO: 101624 - DNA, 15 bp, Homo sapiens
acccctacatcacca

SEQ ID NO: 101625 - DNA, 15 bp, Homo sapiens
cacccctacatcacc

SEQ ID NO: 101626 - DNA, 15 bp, Homo sapiens
ccacccctacatcac

SEQ ID NO: 101627 - DNA, 15 bp, Homo sapiens
cccacccctacatca

SEQ ID NO: 101628 - DNA, 15 bp, Homo sapiens
ccccacccctacatc

SEQ ID NO: 101629 - DNA, 15 bp, Homo sapiens
cccccacccctacat

SEQ ID NO: 101630 - DNA, 15 bp, Homo sapiens
ccccccacccctaca

SEQ ID NO: 101631 - DNA, 15 bp, Homo sapiens
gccccccacccctac

SEQ ID NO: 101632 - DNA, 15 bp, Homo sapiens
cgccccccaccccta

SEQ ID NO: 101633 - DNA, 15 bp, Homo sapiens
tcgccccccacccct

SEQ ID NO: 101634 - DNA, 15 bp, Homo sapiens
atcgccccccacccc

SEQ ID NO: 101635 - DNA, 15 bp, Homo sapiens
tatcgccccccaccc

SEQ ID NO: 101636 - DNA, 15 bp, Homo sapiens
atatcgccccccacc

SEQ ID NO: 101637 - DNA, 15 bp, Homo sapiens
tatatcgccccccac

SEQ ID NO: 101638 - DNA, 15 bp, Homo sapiens
ctatatcgcccccca

SEQ ID NO: 101639 - DNA, 15 bp, Homo sapiens
tctatatcgcccccc

SEQ ID NO: 101640 - DNA, 15 bp, Homo sapiens
ttctatatcgccccc

SEQ ID NO: 101641 - DNA, 15 bp, Homo sapiens
tttctatatcgcccc

SEQ ID NO: 101642 - DNA, 15 bp, Homo sapiens
ctttctatatcgccc

SEQ ID NO: 101643 - DNA, 15 bp, Homo sapiens
actttctatatcgcc

SEQ ID NO: 101644 - DNA, 15 bp, Homo sapiens
gactttctatatcgc

SEQ ID NO: 101645 - DNA, 15 bp, Homo sapiens
tgactttctatatcg

SEQ ID NO: 101646 - DNA, 15 bp, Homo sapiens
ctgactttctatatc

SEQ ID NO: 101647 - DNA, 15 bp, Homo sapiens
actgactttctatat

SEQ ID NO: 101648 - DNA, 15 bp, Homo sapiens
aactgactttctata

SEQ ID NO: 101649 - DNA, 15 bp, Homo sapiens
aaactgactttctat

SEQ ID NO: 101650 - DNA, 15 bp, Homo sapiens
aaaactgactttcta

SEQ ID NO: 101651 - DNA, 15 bp, Homo sapiens
aaaaactgactttct

SEQ ID NO: 101652 - DNA, 15 bp, Homo sapiens
caaaaactgactttc

SEQ ID NO: 101653 - DNA, 15 bp, Homo sapiens
ccaaaaactgacttt

SEQ ID NO: 101654 - DNA, 15 bp, Homo sapiens
gccaaaaactgactt

SEQ ID NO: 101655 - DNA, 15 bp, Homo sapiens
ggccaaaaactgact

SEQ ID NO: 101656 - DNA, 15 bp, Homo sapiens
cggccaaaaactgac

SEQ ID NO: 101657 - DNA, 15 bp, Homo sapiens
ccggccaaaaactga

SEQ ID NO: 101658 - DNA, 15 bp, Homo sapiens
cccggccaaaaactg

SEQ ID NO: 101659 - DNA, 15 bp, Homo sapiens
gcccggccaaaaact

SEQ ID NO: 101660 - DNA, 15 bp, Homo sapiens
cgcccggccaaaaac

SEQ ID NO: 101661 - DNA, 15 bp, Homo sapiens
acgcccggccaaaaa

SEQ ID NO: 101662 - DNA, 15 bp, Homo sapiens
cacgcccggccaaaa

SEQ ID NO: 101663 - DNA, 15 bp, Homo sapiens
ccacgcccggccaaa

SEQ ID NO: 101664 - DNA, 15 bp, Homo sapiens
accacgcccggccaa

SEQ ID NO: 101665 - DNA, 15 bp, Homo sapiens
caccacgcccggcca

SEQ ID NO: 101666 - DNA, 15 bp, Homo sapiens
ccaccacgcccggcc

SEQ ID NO: 101667 - DNA, 15 bp, Homo sapiens
gccaccacgcccggc

SEQ ID NO: 101668 - DNA, 15 bp, Homo sapiens
agccaccacgcccgg

SEQ ID NO: 101669 - DNA, 15 bp, Homo sapiens
gagccaccacgcccg

SEQ ID NO: 101670 - DNA, 15 bp, Homo sapiens
tgagccaccacgccc

SEQ ID NO: 101671 - DNA, 15 bp, Homo sapiens
atgagccaccacgcc

SEQ ID NO: 101672 - DNA, 15 bp, Homo sapiens
catgagccaccacgc

SEQ ID NO: 101673 - DNA, 15 bp, Homo sapiens
gcatgagccaccacg

SEQ ID NO: 101674 - DNA, 15 bp, Homo sapiens
ggcatgagccaccac

SEQ ID NO: 101675 - DNA, 15 bp, Homo sapiens
tcctcagcctcccaa

SEQ ID NO: 101676 - DNA, 15 bp, Homo sapiens
ctcctcagcctccca

SEQ ID NO: 101677 - DNA, 15 bp, Homo sapiens
gctcctcagcctccc

SEQ ID NO: 101678 - DNA, 15 bp, Homo sapiens
tgctcctcagcctcc

SEQ ID NO: 101679 - DNA, 15 bp, Homo sapiens
ctgctcctcagcctc

SEQ ID NO: 101680 - DNA, 15 bp, Homo sapiens
cctgctcctcagcct

SEQ ID NO: 101681 - DNA, 15 bp, Homo sapiens
gcctgctcctcagcc

SEQ ID NO: 101682 - DNA, 15 bp, Homo sapiens
tgcctgctcctcagc

SEQ ID NO: 101683 - DNA, 15 bp, Homo sapiens
ctgcctgctcctcag

SEQ ID NO: 101684 - DNA, 15 bp, Homo sapiens
tctgcctgctcctca

SEQ ID NO: 101685 - DNA, 15 bp, Homo sapiens
atctgcctgctcctc

SEQ ID NO: 101686 - DNA, 15 bp, Homo sapiens
gatctgcctgctcct

SEQ ID NO: 101687 - DNA, 15 bp, Homo sapiens
tgatctgcctgctcc

SEQ ID NO: 101688 - DNA, 15 bp, Homo sapiens
atgatctgcctgctc

SEQ ID NO: 101689 - DNA, 15 bp, Homo sapiens
catgatctgcctgct

SEQ ID NO: 101690 - DNA, 15 bp, Homo sapiens
tcatgatctgcctgc

SEQ ID NO: 101691 - DNA, 15 bp, Homo sapiens
ctcatgatctgcctg

SEQ ID NO: 101692 - DNA, 15 bp, Homo sapiens
cctcatgatctgcct

SEQ ID NO: 101693 - DNA, 15 bp, Homo sapiens
acctcatgatctgcc

SEQ ID NO: 101694 - DNA, 15 bp, Homo sapiens
gacctcatgatctgc

SEQ ID NO: 101695 - DNA, 15 bp, Homo sapiens
tgacctcatgatctg

SEQ ID NO: 101696 - DNA, 15 bp, Homo sapiens
ctgacctcatgatct

SEQ ID NO: 101697 - DNA, 15 bp, Homo sapiens
tctcctgacctcatg

SEQ ID NO: 101698 - DNA, 15 bp, Homo sapiens
atctcctgacctcat

SEQ ID NO: 101699 - DNA, 15 bp, Homo sapiens
gatctcctgacctca

SEQ ID NO: 101700 - DNA, 15 bp, Homo sapiens
ggatctcctgacctc

SEQ ID NO: 101701 - DNA, 15 bp, Homo sapiens
tggatctcctgacct

SEQ ID NO: 101702 - DNA, 15 bp, Homo sapiens
ctggatctcctgacc

SEQ ID NO: 101703 - DNA, 15 bp, Homo sapiens
tctggatctcctgac

SEQ ID NO: 101704 - DNA, 15 bp, Homo sapiens
atctggatctcctga

SEQ ID NO: 101705 - DNA, 15 bp, Homo sapiens
tatctggatctcctg

SEQ ID NO: 101706 - DNA, 15 bp, Homo sapiens
ttatctggatctcct

SEQ ID NO: 101707 - DNA, 15 bp, Homo sapiens
attatctggatctcc

SEQ ID NO: 101708 - DNA, 15 bp, Homo sapiens
gattatctggatctc

SEQ ID NO: 101709 - DNA, 15 bp, Homo sapiens
ggattatctggatct

SEQ ID NO: 101710 - DNA, 15 bp, Homo sapiens
aggattatctggatc

SEQ ID NO: 101711 - DNA, 15 bp, Homo sapiens
caggattatctggat

SEQ ID NO: 101712 - DNA, 15 bp, Homo sapiens
ccaggattatctgga

SEQ ID NO: 101713 - DNA, 15 bp, Homo sapiens
gccaggattatctgg

SEQ ID NO: 101714 - DNA, 15 bp, Homo sapiens
ggccaggattatctg

SEQ ID NO: 101715 - DNA, 15 bp, Homo sapiens
tggccaggattatct

SEQ ID NO: 101716 - DNA, 15 bp, Homo sapiens
ttggccaggattatc

SEQ ID NO: 101717 - DNA, 15 bp, Homo sapiens
gttggccaggattat

SEQ ID NO: 101718 - DNA, 15 bp, Homo sapiens
tgttggccaggatta

SEQ ID NO: 101719 - DNA, 15 bp, Homo sapiens
ctgttggccaggatt

SEQ ID NO: 101720 - DNA, 15 bp, Homo sapiens
cctgttggccaggat

SEQ ID NO: 101721 - DNA, 15 bp, Homo sapiens
ccctgttggccagga

SEQ ID NO: 101722 - DNA, 15 bp, Homo sapiens
accctgttggccagg

SEQ ID NO: 101723 - DNA, 15 bp, Homo sapiens
caccctgttggccag

SEQ ID NO: 101724 - DNA, 15 bp, Homo sapiens
tcaccctgttggcca

SEQ ID NO: 101725 - DNA, 15 bp, Homo sapiens
ttcaccctgttggcc

SEQ ID NO: 101726 - DNA, 15 bp, Homo sapiens
tttcaccctgttggc

SEQ ID NO: 101727 - DNA, 15 bp, Homo sapiens
gtttcaccctgttgg

SEQ ID NO: 101728 - DNA, 15 bp, Homo sapiens
ggtttcaccctgttg

SEQ ID NO: 101729 - DNA, 15 bp, Homo sapiens
gggtttcaccctgtt

SEQ ID NO: 101730 - DNA, 15 bp, Homo sapiens
ggggtttcaccctgt

SEQ ID NO: 101731 - DNA, 15 bp, Homo sapiens
cggggtttcaccctg

SEQ ID NO: 101732 - DNA, 15 bp, Homo sapiens
acggggtttcaccct

SEQ ID NO: 101733 - DNA, 15 bp, Homo sapiens
gacggggtttcaccc

SEQ ID NO: 101734 - DNA, 15 bp, Homo sapiens
catgcccagctaatt

SEQ ID NO: 101735 - DNA, 15 bp, Homo sapiens
ccatgcccagctaat

SEQ ID NO: 101736 - DNA, 15 bp, Homo sapiens
accatgcccagctaa

SEQ ID NO: 101737 - DNA, 15 bp, Homo sapiens
caccatgcccagcta

SEQ ID NO: 101738 - DNA, 15 bp, Homo sapiens
ccaccatgcccagct

SEQ ID NO: 101739 - DNA, 15 bp, Homo sapiens
accaccatgcccagc

SEQ ID NO: 101740 - DNA, 15 bp, Homo sapiens
caccaccatgcccag

SEQ ID NO: 101741 - DNA, 15 bp, Homo sapiens
gcaccaccatgccca

SEQ ID NO: 101742 - DNA, 15 bp, Homo sapiens
cgcaccaccatgccc

SEQ ID NO: 101743 - DNA, 15 bp, Homo sapiens
gcgcaccaccatgcc

SEQ ID NO: 101744 - DNA, 15 bp, Homo sapiens
tgcgcaccaccatgc

SEQ ID NO: 101745 - DNA, 15 bp, Homo sapiens
gtgcgcaccaccatg

SEQ ID NO: 101746 - DNA, 15 bp, Homo sapiens
agtgcgcaccaccat

SEQ ID NO: 101747 - DNA, 15 bp, Homo sapiens
aagtgcgcaccacca

SEQ ID NO: 101748 - DNA, 15 bp, Homo sapiens
caagtgcgcaccacc

SEQ ID NO: 101749 - DNA, 15 bp, Homo sapiens
acaagtgcgcaccac

SEQ ID NO: 101750 - DNA, 15 bp, Homo sapiens
tacaagtgcgcacca

SEQ ID NO: 101751 - DNA, 15 bp, Homo sapiens
ctacaagtgcgcacc

SEQ ID NO: 101752 - DNA, 15 bp, Homo sapiens
actacaagtgcgcac

SEQ ID NO: 101753 - DNA, 15 bp, Homo sapiens
gactacaagtgcgca

SEQ ID NO: 101754 - DNA, 15 bp, Homo sapiens
ggactacaagtgcgc

SEQ ID NO: 101755 - DNA, 15 bp, Homo sapiens
gggactacaagtgcg

SEQ ID NO: 101756 - DNA, 15 bp, Homo sapiens
tgggactacaagtgc

SEQ ID NO: 101757 - DNA, 15 bp, Homo sapiens
ctgggactacaagtg

SEQ ID NO: 101758 - DNA, 15 bp, Homo sapiens
gctgggactacaagt

SEQ ID NO: 101759 - DNA, 15 bp, Homo sapiens
agctgggactacaag

SEQ ID NO: 101760 - DNA, 15 bp, Homo sapiens
tagctgggactacaa

SEQ ID NO: 101761 - DNA, 15 bp, Homo sapiens
gcaagtagctgggac

SEQ ID NO: 101762 - DNA, 15 bp, Homo sapiens
cgcaagtagctggga

SEQ ID NO: 101763 - DNA, 15 bp, Homo sapiens
tcgcaagtagctggg

SEQ ID NO: 101764 - DNA, 15 bp, Homo sapiens
ctcgcaagtagctgg

SEQ ID NO: 101765 - DNA, 15 bp, Homo sapiens
cctcgcaagtagctg

SEQ ID NO: 101766 - DNA, 15 bp, Homo sapiens
gcctcgcaagtagct

SEQ ID NO: 101767 - DNA, 15 bp, Homo sapiens
agcctcgcaagtagc

SEQ ID NO: 101768 - DNA, 15 bp, Homo sapiens
cagcctcgcaagtag

SEQ ID NO: 101769 - DNA, 15 bp, Homo sapiens
tcagcctcgcaagta

SEQ ID NO: 101770 - DNA, 15 bp, Homo sapiens
ctcagcctcgcaagt

SEQ ID NO: 101771 - DNA, 15 bp, Homo sapiens
cctcagcctcgcaag

SEQ ID NO: 101772 - DNA, 15 bp, Homo sapiens
gcctcagcctcgcaa

SEQ ID NO: 101773 - DNA, 15 bp, Homo sapiens
tgcctcagcctcgca

SEQ ID NO: 101774 - DNA, 15 bp, Homo sapiens
ctgcctcagcctcgc

SEQ ID NO: 101775 - DNA, 15 bp, Homo sapiens
cctgcctcagcctcg

SEQ ID NO: 101776 - DNA, 15 bp, Homo sapiens
gagcaattctcctgc

SEQ ID NO: 101777 - DNA, 15 bp, Homo sapiens
cgagcaattctcctg

SEQ ID NO: 101778 - DNA, 15 bp, Homo sapiens
tcgagcaattctcct

SEQ ID NO: 101779 - DNA, 15 bp, Homo sapiens
ttcgagcaattctcc

SEQ ID NO: 101780 - DNA, 15 bp, Homo sapiens
gttcgagcaattctc

SEQ ID NO: 101781 - DNA, 15 bp, Homo sapiens
ggttcgagcaattct

SEQ ID NO: 101782 - DNA, 15 bp, Homo sapiens
gggttcgagcaattc

SEQ ID NO: 101783 - DNA, 15 bp, Homo sapiens
tgggttcgagcaatt

SEQ ID NO: 101784 - DNA, 15 bp, Homo sapiens
ctgggttcgagcaat

SEQ ID NO: 101785 - DNA, 15 bp, Homo sapiens
cctgggttcgagcaa

SEQ ID NO: 101786 - DNA, 15 bp, Homo sapiens
tcctgggttcgagca

SEQ ID NO: 101787 - DNA, 15 bp, Homo sapiens
ctcctgggttcgagc

SEQ ID NO: 101788 - DNA, 15 bp, Homo sapiens
cctcctgggttcgag

SEQ ID NO: 101789 - DNA, 15 bp, Homo sapiens
acctcctgggttcga

SEQ ID NO: 101790 - DNA, 15 bp, Homo sapiens
cacctcctgggttcg

SEQ ID NO: 101791 - DNA, 15 bp, Homo sapiens
ctccacctcctgggt

SEQ ID NO: 101792 - DNA, 15 bp, Homo sapiens
cctccacctcctggg

SEQ ID NO: 101793 - DNA, 15 bp, Homo sapiens
acctccacctcctgg

SEQ ID NO: 101794 - DNA, 15 bp, Homo sapiens
aacctccacctcctg

SEQ ID NO: 101795 - DNA, 15 bp, Homo sapiens
taacctccacctcct

SEQ ID NO: 101796 - DNA, 15 bp, Homo sapiens
gtaacctccacctcc

SEQ ID NO: 101797 - DNA, 15 bp, Homo sapiens
tgtaacctccacctc

SEQ ID NO: 101798 - DNA, 15 bp, Homo sapiens
ctgtaacctccacct

SEQ ID NO: 101799 - DNA, 15 bp, Homo sapiens
actgtaacctccacc

SEQ ID NO: 101800 - DNA, 15 bp, Homo sapiens
cactgtaacctccac

SEQ ID NO: 101801 - DNA, 15 bp, Homo sapiens
tcactgtaacctcca

SEQ ID NO: 101802 - DNA, 15 bp, Homo sapiens
ctcactgtaacctcc

SEQ ID NO: 101803 - DNA, 15 bp, Homo sapiens
gctcactgtaacctc

SEQ ID NO: 101804 - DNA, 15 bp, Homo sapiens
ggctcactgtaacct

SEQ ID NO: 101805 - DNA, 15 bp, Homo sapiens
tggctcactgtaacc

SEQ ID NO: 101806 - DNA, 15 bp, Homo sapiens
ttggctcactgtaac

SEQ ID NO: 101807 - DNA, 15 bp, Homo sapiens
cttggctcactgtaa

SEQ ID NO: 101808 - DNA, 15 bp, Homo sapiens
ccttggctcactgta

SEQ ID NO: 101809 - DNA, 15 bp, Homo sapiens
accttggctcactgt

SEQ ID NO: 101810 - DNA, 15 bp, Homo sapiens
gaccttggctcactg

SEQ ID NO: 101811 - DNA, 15 bp, Homo sapiens
agaccttggctcact

SEQ ID NO: 101812 - DNA, 15 bp, Homo sapiens
gagaccttggctcac

SEQ ID NO: 101813 - DNA, 15 bp, Homo sapiens
cgagaccttggctca

SEQ ID NO: 101814 - DNA, 15 bp, Homo sapiens
gcgagaccttggctc

SEQ ID NO: 101815 - DNA, 15 bp, Homo sapiens
ggcgagaccttggct

SEQ ID NO: 101816 - DNA, 15 bp, Homo sapiens
tggcgagaccttggc

SEQ ID NO: 101817 - DNA, 15 bp, Homo sapiens
gtggcgagaccttgg

SEQ ID NO: 101818 - DNA, 15 bp, Homo sapiens
agtggcgagaccttg

SEQ ID NO: 101819 - DNA, 15 bp, Homo sapiens
cagtggcgagacctt

SEQ ID NO: 101820 - DNA, 15 bp, Homo sapiens
gcagtggcgagacct

SEQ ID NO: 101821 - DNA, 15 bp, Homo sapiens
tgcagtggcgagacc

SEQ ID NO: 101822 - DNA, 15 bp, Homo sapiens
gtgcagtggcgagac

SEQ ID NO: 101823 - DNA, 15 bp, Homo sapiens
ccccaggctggagtg

SEQ ID NO: 101824 - DNA, 15 bp, Homo sapiens
tccccaggctggagt

SEQ ID NO: 101825 - DNA, 15 bp, Homo sapiens
gtccccaggctggag

SEQ ID NO: 101826 - DNA, 15 bp, Homo sapiens
tgtccccaggctgga

SEQ ID NO: 101827 - DNA, 15 bp, Homo sapiens
ctgtccccaggctgg

SEQ ID NO: 101828 - DNA, 15 bp, Homo sapiens
tctgtccccaggctg

SEQ ID NO: 101829 - DNA, 15 bp, Homo sapiens
ctctgtccccaggct

SEQ ID NO: 101830 - DNA, 15 bp, Homo sapiens
gctctgtccccaggc

SEQ ID NO: 101831 - DNA, 15 bp, Homo sapiens
tgctctgtccccagg

SEQ ID NO: 101832 - DNA, 15 bp, Homo sapiens
ttgctctgtccccag

SEQ ID NO: 101833 - DNA, 15 bp, Homo sapiens
cttgctctgtcccca

SEQ ID NO: 101834 - DNA, 15 bp, Homo sapiens
tcttgctctgtcccc

SEQ ID NO: 101835 - DNA, 15 bp, Homo sapiens
gtcttgctctgtccc

SEQ ID NO: 101836 - DNA, 15 bp, Homo sapiens
ggtcttgctctgtcc

SEQ ID NO: 101837 - DNA, 15 bp, Homo sapiens
ggggtcttgctctgt

SEQ ID NO: 101838 - DNA, 15 bp, Homo sapiens
tggggtcttgctctg

SEQ ID NO: 101839 - DNA, 15 bp, Homo sapiens
atggggtcttgctct

SEQ ID NO: 101840 - DNA, 15 bp, Homo sapiens
aatggggtcttgctc

SEQ ID NO: 101841 - DNA, 15 bp, Homo sapiens
aaatggggtcttgct

SEQ ID NO: 101842 - DNA, 15 bp, Homo sapiens
gaaatggggtcttgc

SEQ ID NO: 101843 - DNA, 15 bp, Homo sapiens
tgaaatggggtcttg

SEQ ID NO: 101844 - DNA, 15 bp, Homo sapiens
ttgaaatggggtctt

SEQ ID NO: 101845 - DNA, 15 bp, Homo sapiens
cttgaaatggggtct

SEQ ID NO: 101846 - DNA, 15 bp, Homo sapiens
ccttgaaatggggtc

SEQ ID NO: 101847 - DNA, 15 bp, Homo sapiens
cccttgaaatggggt

SEQ ID NO: 101848 - DNA, 15 bp, Homo sapiens
ccccttgaaatgggg

SEQ ID NO: 101849 - DNA, 15 bp, Homo sapiens
cccccttgaaatggg

SEQ ID NO: 101850 - DNA, 15 bp, Homo sapiens
ccccccttgaaatgg

SEQ ID NO: 101851 - DNA, 15 bp, Homo sapiens
tccccccttgaaatg

SEQ ID NO: 101852 - DNA, 15 bp, Homo sapiens
ttccccccttgaaat

SEQ ID NO: 101853 - DNA, 15 bp, Homo sapiens
tttccccccttgaaa

SEQ ID NO: 101854 - DNA, 15 bp, Homo sapiens
ttttccccccttgaa

SEQ ID NO: 101855 - DNA, 15 bp, Homo sapiens
tttttccccccttga

SEQ ID NO: 101856 - DNA, 15 bp, Homo sapiens
ttttttccccccttg

SEQ ID NO: 101857 - DNA, 15 bp, Homo sapiens
tttttttcccccctt

SEQ ID NO: 101858 - DNA, 15 bp, Homo sapiens
ctttttttcccccct

SEQ ID NO: 101859 - DNA, 15 bp, Homo sapiens
actttttttcccccc

SEQ ID NO: 101860 - DNA, 15 bp, Homo sapiens
gactttttttccccc

SEQ ID NO: 101861 - DNA, 15 bp, Homo sapiens
agactttttttcccc

SEQ ID NO: 101862 - DNA, 15 bp, Homo sapiens
tagactttttttccc

SEQ ID NO: 101863 - DNA, 15 bp, Homo sapiens
atagactttttttcc

SEQ ID NO: 101864 - DNA, 15 bp, Homo sapiens
aatagactttttttc

SEQ ID NO: 101865 - DNA, 15 bp, Homo sapiens
aaatagacttttttt

SEQ ID NO: 101866 - DNA, 15 bp, Homo sapiens
aaaatagactttttt

SEQ ID NO: 101867 - DNA, 15 bp, Homo sapiens
aaaaatagacttttt

SEQ ID NO: 101868 - DNA, 15 bp, Homo sapiens
taaaaatagactttt

SEQ ID NO: 101869 - DNA, 15 bp, Homo sapiens
ttaaaaatagacttt

SEQ ID NO: 101870 - DNA, 15 bp, Homo sapiens
cttaaaaatagactt

SEQ ID NO: 101871 - DNA, 15 bp, Homo sapiens
acttaaaaatagact

SEQ ID NO: 101872 - DNA, 15 bp, Homo sapiens
aacttaaaaatagac

SEQ ID NO: 101873 - DNA, 15 bp, Homo sapiens
caacttaaaaataga

SEQ ID NO: 101874 - DNA, 15 bp, Homo sapiens
acaacttaaaaatag

SEQ ID NO: 101875 - DNA, 15 bp, Homo sapiens
aacaacttaaaaata

SEQ ID NO: 101876 - DNA, 15 bp, Homo sapiens
taacaacttaaaaat

SEQ ID NO: 101877 - DNA, 15 bp, Homo sapiens
ataacaacttaaaaa

SEQ ID NO: 101878 - DNA, 15 bp, Homo sapiens
aataacaacttaaaa

SEQ ID NO: 101879 - DNA, 15 bp, Homo sapiens
caataacaacttaaa

SEQ ID NO: 101880 - DNA, 15 bp, Homo sapiens
gcaataacaacttaa

SEQ ID NO: 101881 - DNA, 15 bp, Homo sapiens
agcaataacaactta

SEQ ID NO: 101882 - DNA, 15 bp, Homo sapiens
aagcaataacaactt

SEQ ID NO: 101883 - DNA, 15 bp, Homo sapiens
aaagcaataacaact

SEQ ID NO: 101884 - DNA, 15 bp, Homo sapiens
aaaagcaataacaac

SEQ ID NO: 101885 - DNA, 15 bp, Homo sapiens
aaaaagcaataacaa

SEQ ID NO: 101886 - DNA, 15 bp, Homo sapiens
aaaaaagcaataaca

SEQ ID NO: 101887 - DNA, 15 bp, Homo sapiens
gaaaaaagcaataac

SEQ ID NO: 101888 - DNA, 15 bp, Homo sapiens
tgaaaaaagcaataa

SEQ ID NO: 101889 - DNA, 15 bp, Homo sapiens
ttgaaaaaagcaata

SEQ ID NO: 101890 - DNA, 15 bp, Homo sapiens
cttgaaaaaagcaat

SEQ ID NO: 101891 - DNA, 15 bp, Homo sapiens
acttgaaaaaagcaa

SEQ ID NO: 101892 - DNA, 15 bp, Homo sapiens
tacttgaaaaaagca

SEQ ID NO: 101893 - DNA, 15 bp, Homo sapiens
atacttgaaaaaagc

SEQ ID NO: 101894 - DNA, 15 bp, Homo sapiens
aatacttgaaaaaag

SEQ ID NO: 101895 - DNA, 15 bp, Homo sapiens
gaatacttgaaaaaa

SEQ ID NO: 101896 - DNA, 15 bp, Homo sapiens
agaatacttgaaaaa

SEQ ID NO: 101897 - DNA, 15 bp, Homo sapiens
aagaatacttgaaaa

SEQ ID NO: 101898 - DNA, 15 bp, Homo sapiens
gaagaatacttgaaa

SEQ ID NO: 101899 - DNA, 15 bp, Homo sapiens
ggaagaatacttgaa

SEQ ID NO: 101900 - DNA, 15 bp, Homo sapiens
gggaagaatacttga

SEQ ID NO: 101901 - DNA, 15 bp, Homo sapiens
agggaagaatacttg

SEQ ID NO: 101902 - DNA, 15 bp, Homo sapiens
gagggaagaatactt

SEQ ID NO: 101903 - DNA, 15 bp, Homo sapiens
ggagggaagaatact

SEQ ID NO: 101904 - DNA, 15 bp, Homo sapiens
aggagggaagaatac

SEQ ID NO: 101905 - DNA, 15 bp, Homo sapiens
aaggagggaagaata

SEQ ID NO: 101906 - DNA, 15 bp, Homo sapiens
gaaggagggaagaat

SEQ ID NO: 101907 - DNA, 15 bp, Homo sapiens
tgaaggagggaagaa

SEQ ID NO: 101908 - DNA, 15 bp, Homo sapiens
gtgaaggagggaaga

SEQ ID NO: 101909 - DNA, 15 bp, Homo sapiens
tgtgaaggagggaag

SEQ ID NO: 101910 - DNA, 15 bp, Homo sapiens
gtgtgaaggagggaa

SEQ ID NO: 101911 - DNA, 15 bp, Homo sapiens
tgtgtgaaggaggga

SEQ ID NO: 101912 - DNA, 15 bp, Homo sapiens
gtgtgtgaaggaggg

SEQ ID NO: 101913 - DNA, 15 bp, Homo sapiens
tgtgtgtgaaggagg

SEQ ID NO: 101914 - DNA, 15 bp, Homo sapiens
ctgtgtgtgaaggag

SEQ ID NO: 101915 - DNA, 15 bp, Homo sapiens
actgtgtgtgaagga

SEQ ID NO: 101916 - DNA, 15 bp, Homo sapiens
aactgtgtgtgaagg

SEQ ID NO: 101917 - DNA, 15 bp, Homo sapiens
aaactgtgtgtgaag

SEQ ID NO: 101918 - DNA, 15 bp, Homo sapiens
aaaactgtgtgtgaa

SEQ ID NO: 101919 - DNA, 15 bp, Homo sapiens
gaaaactgtgtgtga

SEQ ID NO: 101920 - DNA, 15 bp, Homo sapiens
agaaaactgtgtgtg

SEQ ID NO: 101921 - DNA, 15 bp, Homo sapiens
tagaaaactgtgtgt

SEQ ID NO: 101922 - DNA, 15 bp, Homo sapiens
ctagaaaactgtgtg

SEQ ID NO: 101923 - DNA, 15 bp, Homo sapiens
actagaaaactgtgt

SEQ ID NO: 101924 - DNA, 15 bp, Homo sapiens
aactagaaaactgtg

SEQ ID NO: 101925 - DNA, 15 bp, Homo sapiens
taactagaaaactgt

SEQ ID NO: 101926 - DNA, 15 bp, Homo sapiens
ttaactagaaaactg

SEQ ID NO: 101927 - DNA, 15 bp, Homo sapiens
attaactagaaaact

SEQ ID NO: 101928 - DNA, 15 bp, Homo sapiens
gattaactagaaaac

SEQ ID NO: 101929 - DNA, 15 bp, Homo sapiens
ggattaactagaaaa

SEQ ID NO: 101930 - DNA, 15 bp, Homo sapiens
tggattaactagaaa

SEQ ID NO: 101931 - DNA, 15 bp, Homo sapiens
atggattaactagaa

SEQ ID NO: 101932 - DNA, 15 bp, Homo sapiens
aatggattaactaga

SEQ ID NO: 101933 - DNA, 15 bp, Homo sapiens
aaatggattaactag

SEQ ID NO: 101934 - DNA, 15 bp, Homo sapiens
taaatggattaacta

SEQ ID NO: 101935 - DNA, 15 bp, Homo sapiens
ataaatggattaact

SEQ ID NO: 101936 - DNA, 15 bp, Homo sapiens
cataaatggattaac

SEQ ID NO: 101937 - DNA, 15 bp, Homo sapiens
acataaatggattaa

SEQ ID NO: 101938 - DNA, 15 bp, Homo sapiens
tacataaatggatta

SEQ ID NO: 101939 - DNA, 15 bp, Homo sapiens
ttacataaatggatt

SEQ ID NO: 101940 - DNA, 15 bp, Homo sapiens
attacataaatggat

SEQ ID NO: 101941 - DNA, 15 bp, Homo sapiens
aattacataaatgga

SEQ ID NO: 101942 - DNA, 15 bp, Homo sapiens
gaattacataaatgg

SEQ ID NO: 101943 - DNA, 15 bp, Homo sapiens
agaattacataaatg

SEQ ID NO: 101944 - DNA, 15 bp, Homo sapiens
cagaattacataaat

SEQ ID NO: 101945 - DNA, 15 bp, Homo sapiens
acagaattacataaa

SEQ ID NO: 101946 - DNA, 15 bp, Homo sapiens
tacagaattacataa

SEQ ID NO: 101947 - DNA, 15 bp, Homo sapiens
atacagaattacata

SEQ ID NO: 101948 - DNA, 15 bp, Homo sapiens
catacagaattacat

SEQ ID NO: 101949 - DNA, 15 bp, Homo sapiens
gcatacagaattaca

SEQ ID NO: 101950 - DNA, 15 bp, Homo sapiens
agcatacagaattac

SEQ ID NO: 101951 - DNA, 15 bp, Homo sapiens
gagcatacagaatta

SEQ ID NO: 101952 - DNA, 15 bp, Homo sapiens
ggagcatacagaatt

SEQ ID NO: 101953 - DNA, 15 bp, Homo sapiens
aggagcatacagaat

SEQ ID NO: 101954 - DNA, 15 bp, Homo sapiens
taggagcatacagaa

SEQ ID NO: 101955 - DNA, 15 bp, Homo sapiens
gtaggagcatacaga

SEQ ID NO: 101956 - DNA, 15 bp, Homo sapiens
agtaggagcatacag

SEQ ID NO: 101957 - DNA, 15 bp, Homo sapiens
aagtaggagcataca

SEQ ID NO: 101958 - DNA, 15 bp, Homo sapiens
caagtaggagcatac

SEQ ID NO: 101959 - DNA, 15 bp, Homo sapiens
tcaagtaggagcata

SEQ ID NO: 101960 - DNA, 15 bp, Homo sapiens
gtcaagtaggagcat

SEQ ID NO: 101961 - DNA, 15 bp, Homo sapiens
ggtcaagtaggagca

SEQ ID NO: 101962 - DNA, 15 bp, Homo sapiens
aggtcaagtaggagc

SEQ ID NO: 101963 - DNA, 15 bp, Homo sapiens
taggtcaagtaggag

SEQ ID NO: 101964 - DNA, 15 bp, Homo sapiens
ttaggtcaagtagga

SEQ ID NO: 101965 - DNA, 15 bp, Homo sapiens
attaggtcaagtagg

SEQ ID NO: 101966 - DNA, 15 bp, Homo sapiens
aattaggtcaagtag

SEQ ID NO: 101967 - DNA, 15 bp, Homo sapiens
aaattaggtcaagta

SEQ ID NO: 101968 - DNA, 15 bp, Homo sapiens
gaaattaggtcaagt

SEQ ID NO: 101969 - DNA, 15 bp, Homo sapiens
tgaaattaggtcaag

SEQ ID NO: 101970 - DNA, 15 bp, Homo sapiens
ttgaaattaggtcaa

SEQ ID NO: 101971 - DNA, 15 bp, Homo sapiens
gttgaaattaggtca

SEQ ID NO: 101972 - DNA, 15 bp, Homo sapiens
tgttgaaattaggtc

SEQ ID NO: 101973 - DNA, 15 bp, Homo sapiens
atgttgaaattaggt

SEQ ID NO: 101974 - DNA, 15 bp, Homo sapiens
gatgttgaaattagg

SEQ ID NO: 101975 - DNA, 15 bp, Homo sapiens
agatgttgaaattag

SEQ ID NO: 101976 - DNA, 15 bp, Homo sapiens
cagatgttgaaatta

SEQ ID NO: 101977 - DNA, 15 bp, Homo sapiens
ccagatgttgaaatt

SEQ ID NO: 101978 - DNA, 15 bp, Homo sapiens
tccagatgttgaaat

SEQ ID NO: 101979 - DNA, 15 bp, Homo sapiens
ttccagatgttgaaa

SEQ ID NO: 101980 - DNA, 15 bp, Homo sapiens
tttccagatgttgaa

SEQ ID NO: 101981 - DNA, 15 bp, Homo sapiens
ttttccagatgttga

SEQ ID NO: 101982 - DNA, 15 bp, Homo sapiens
tttttccagatgttg

SEQ ID NO: 101983 - DNA, 15 bp, Homo sapiens
atttttccagatgtt

SEQ ID NO: 101984 - DNA, 15 bp, Homo sapiens
tatttttccagatgt

SEQ ID NO: 101985 - DNA, 15 bp, Homo sapiens
ctatttttccagatg

SEQ ID NO: 101986 - DNA, 15 bp, Homo sapiens
tctatttttccagat

SEQ ID NO: 101987 - DNA, 15 bp, Homo sapiens
ttctatttttccaga

SEQ ID NO: 101988 - DNA, 15 bp, Homo sapiens
gttctatttttccag

SEQ ID NO: 101989 - DNA, 15 bp, Homo sapiens
agttctatttttcca

SEQ ID NO: 101990 - DNA, 15 bp, Homo sapiens
tagttctatttttcc

SEQ ID NO: 101991 - DNA, 15 bp, Homo sapiens
ctagttctatttttc

SEQ ID NO: 101992 - DNA, 15 bp, Homo sapiens
tctagttctattttt

SEQ ID NO: 101993 - DNA, 15 bp, Homo sapiens
ttctagttctatttt

SEQ ID NO: 101994 - DNA, 15 bp, Homo sapiens
attctagttctattt

SEQ ID NO: 101995 - DNA, 15 bp, Homo sapiens
tattctagttctatt

SEQ ID NO: 101996 - DNA, 15 bp, Homo sapiens
ttattctagttctat

SEQ ID NO: 101997 - DNA, 15 bp, Homo sapiens
tttattctagttcta

SEQ ID NO: 101998 - DNA, 15 bp, Homo sapiens
ctttattctagttct

SEQ ID NO: 101999 - DNA, 15 bp, Homo sapiens
tctttattctagttc

SEQ ID NO: 102000 - DNA, 15 bp, Homo sapiens
ttctttattctagtt

SEQ ID NO: 102001 - DNA, 15 bp, Homo sapiens
attctttattctagt

SEQ ID NO: 102002 - DNA, 15 bp, Homo sapiens
cattctttattctag

SEQ ID NO: 102003 - DNA, 15 bp, Homo sapiens
tcattctttattcta

SEQ ID NO: 102004 - DNA, 15 bp, Homo sapiens
ctcattctttattct

SEQ ID NO: 102005 - DNA, 15 bp, Homo sapiens
gctcattctttattc

SEQ ID NO: 102006 - DNA, 15 bp, Homo sapiens
tgctcattctttatt

SEQ ID NO: 102007 - DNA, 15 bp, Homo sapiens
ttgctcattctttat

SEQ ID NO: 102008 - DNA, 15 bp, Homo sapiens
cttgctcattcttta

SEQ ID NO: 102009 - DNA, 15 bp, Homo sapiens
acttgctcattcttt

SEQ ID NO: 102010 - DNA, 15 bp, Homo sapiens
aacttgctcattctt

SEQ ID NO: 102011 - DNA, 15 bp, Homo sapiens
caacttgctcattct

SEQ ID NO: 102012 - DNA, 15 bp, Homo sapiens
tcaacttgctcattc

SEQ ID NO: 102013 - DNA, 15 bp, Homo sapiens
ctcaacttgctcatt

SEQ ID NO: 102014 - DNA, 15 bp, Homo sapiens
actcaacttgctcat

SEQ ID NO: 102015 - DNA, 15 bp, Homo sapiens
cactcaacttgctca

SEQ ID NO: 102016 - DNA, 15 bp, Homo sapiens
ccactcaacttgctc

SEQ ID NO: 102017 - DNA, 15 bp, Homo sapiens
accactcaacttgct

SEQ ID NO: 102018 - DNA, 15 bp, Homo sapiens
taccactcaacttgc

SEQ ID NO: 102019 - DNA, 15 bp, Homo sapiens
ataccactcaacttg

SEQ ID NO: 102020 - DNA, 15 bp, Homo sapiens
aataccactcaactt

SEQ ID NO: 102021 - DNA, 15 bp, Homo sapiens
aaataccactcaact

SEQ ID NO: 102022 - DNA, 15 bp, Homo sapiens
taaataccactcaac

SEQ ID NO: 102023 - DNA, 15 bp, Homo sapiens
ataaataccactcaa

SEQ ID NO: 102024 - DNA, 15 bp, Homo sapiens
tataaataccactca

SEQ ID NO: 102025 - DNA, 15 bp, Homo sapiens
ttataaataccactc

SEQ ID NO: 102026 - DNA, 15 bp, Homo sapiens
tttataaataccact

SEQ ID NO: 102027 - DNA, 15 bp, Homo sapiens
ctttataaataccac

SEQ ID NO: 102028 - DNA, 15 bp, Homo sapiens
cctttataaatacca

SEQ ID NO: 102029 - DNA, 15 bp, Homo sapiens
acctttataaatacc

SEQ ID NO: 102030 - DNA, 15 bp, Homo sapiens
gacctttataaatac

SEQ ID NO: 102031 - DNA, 15 bp, Homo sapiens
ggacctttataaata

SEQ ID NO: 102032 - DNA, 15 bp, Homo sapiens
tggacctttataaat

SEQ ID NO: 102033 - DNA, 15 bp, Homo sapiens
atggacctttataaa

SEQ ID NO: 102034 - DNA, 15 bp, Homo sapiens
gatggacctttataa

SEQ ID NO: 102035 - DNA, 15 bp, Homo sapiens
agatggacctttata

SEQ ID NO: 102036 - DNA, 15 bp, Homo sapiens
aagatggacctttat

SEQ ID NO: 102037 - DNA, 15 bp, Homo sapiens
taagatggaccttta

SEQ ID NO: 102038 - DNA, 15 bp, Homo sapiens
ttaagatggaccttt

SEQ ID NO: 102039 - DNA, 15 bp, Homo sapiens
attaagatggacctt

SEQ ID NO: 102040 - DNA, 15 bp, Homo sapiens
gattaagatggacct

SEQ ID NO: 102041 - DNA, 15 bp, Homo sapiens
agattaagatggacc

SEQ ID NO: 102042 - DNA, 15 bp, Homo sapiens
aagattaagatggac

SEQ ID NO: 102043 - DNA, 15 bp, Homo sapiens
aaagattaagatgga

SEQ ID NO: 102044 - DNA, 15 bp, Homo sapiens
aaaagattaagatgg

SEQ ID NO: 102045 - DNA, 15 bp, Homo sapiens
taaaagattaagatg

SEQ ID NO: 102046 - DNA, 15 bp, Homo sapiens
ttaaaagattaagat

SEQ ID NO: 102047 - DNA, 15 bp, Homo sapiens
gttaaaagattaaga

SEQ ID NO: 102048 - DNA, 15 bp, Homo sapiens
tgttaaaagattaag

SEQ ID NO: 102049 - DNA, 15 bp, Homo sapiens
ctgttaaaagattaa

SEQ ID NO: 102050 - DNA, 15 bp, Homo sapiens
cctgttaaaagatta

SEQ ID NO: 102051 - DNA, 15 bp, Homo sapiens
acctgttaaaagatt

SEQ ID NO: 102052 - DNA, 15 bp, Homo sapiens
tacctgttaaaagat

SEQ ID NO: 102053 - DNA, 15 bp, Homo sapiens
atacctgttaaaaga

SEQ ID NO: 102054 - DNA, 15 bp, Homo sapiens
aatacctgttaaaag

SEQ ID NO: 102055 - DNA, 15 bp, Homo sapiens
aaatacctgttaaaa

SEQ ID NO: 102056 - DNA, 15 bp, Homo sapiens
caaatacctgttaaa

SEQ ID NO: 102057 - DNA, 15 bp, Homo sapiens
acaaatacctgttaa

SEQ ID NO: 102058 - DNA, 15 bp, Homo sapiens
cacaaatacctgtta

SEQ ID NO: 102059 - DNA, 15 bp, Homo sapiens
tcacaaatacctgtt

SEQ ID NO: 102060 - DNA, 15 bp, Homo sapiens
ttcacaaatacctgt

SEQ ID NO: 102061 - DNA, 15 bp, Homo sapiens
gttcacaaatacctg

SEQ ID NO: 102062 - DNA, 15 bp, Homo sapiens
agttcacaaatacct

SEQ ID NO: 102063 - DNA, 15 bp, Homo sapiens
aagttcacaaatacc

SEQ ID NO: 102064 - DNA, 15 bp, Homo sapiens
aaagttcacaaatac

SEQ ID NO: 102065 - DNA, 15 bp, Homo sapiens
caaagttcacaaata

SEQ ID NO: 102066 - DNA, 15 bp, Homo sapiens
gcaaagttcacaaat

SEQ ID NO: 102067 - DNA, 15 bp, Homo sapiens
ggcaaagttcacaaa

SEQ ID NO: 102068 - DNA, 15 bp, Homo sapiens
tggcaaagttcacaa

SEQ ID NO: 102069 - DNA, 15 bp, Homo sapiens
ttggcaaagttcaca

SEQ ID NO: 102070 - DNA, 15 bp, Homo sapiens
cttggcaaagttcac

SEQ ID NO: 102071 - DNA, 15 bp, Homo sapiens
ccttggcaaagttca

SEQ ID NO: 102072 - DNA, 15 bp, Homo sapiens
tccttggcaaagttc

SEQ ID NO: 102073 - DNA, 15 bp, Homo sapiens
gtccttggcaaagtt

SEQ ID NO: 102074 - DNA, 15 bp, Homo sapiens
ggtccttggcaaagt

SEQ ID NO: 102075 - DNA, 15 bp, Homo sapiens
tggtccttggcaaag

SEQ ID NO: 102076 - DNA, 15 bp, Homo sapiens
ttggtccttggcaaa

SEQ ID NO: 102077 - DNA, 15 bp, Homo sapiens
tttggtccttggcaa

SEQ ID NO: 102078 - DNA, 15 bp, Homo sapiens
ctttggtccttggca

SEQ ID NO: 102079 - DNA, 15 bp, Homo sapiens
actttggtccttggc

SEQ ID NO: 102080 - DNA, 15 bp, Homo sapiens
cactttggtccttgg

SEQ ID NO: 102081 - DNA, 15 bp, Homo sapiens
tcactttggtccttg

SEQ ID NO: 102082 - DNA, 15 bp, Homo sapiens
atcactttggtcctt

SEQ ID NO: 102083 - DNA, 15 bp, Homo sapiens
catcactttggtcct

SEQ ID NO: 102084 - DNA, 15 bp, Homo sapiens
tcatcactttggtcc

SEQ ID NO: 102085 - DNA, 15 bp, Homo sapiens
atcatcactttggtc

SEQ ID NO: 102086 - DNA, 15 bp, Homo sapiens
catcatcactttggt

SEQ ID NO: 102087 - DNA, 15 bp, Homo sapiens
tcatcatcactttgg

SEQ ID NO: 102088 - DNA, 15 bp, Homo sapiens
gtcatcatcactttg

SEQ ID NO: 102089 - DNA, 15 bp, Homo sapiens
ggtcatcatcacttt

SEQ ID NO: 102090 - DNA, 15 bp, Homo sapiens
tggtcatcatcactt

SEQ ID NO: 102091 - DNA, 15 bp, Homo sapiens
gtggtcatcatcact

SEQ ID NO: 102092 - DNA, 15 bp, Homo sapiens
agtggtcatcatcac

SEQ ID NO: 102093 - DNA, 15 bp, Homo sapiens
aagtggtcatcatca

SEQ ID NO: 102094 - DNA, 15 bp, Homo sapiens
taagtggtcatcatc

SEQ ID NO: 102095 - DNA, 15 bp, Homo sapiens
ttaagtggtcatcat

SEQ ID NO: 102096 - DNA, 15 bp, Homo sapiens
tttaagtggtcatca

SEQ ID NO: 102097 - DNA, 15 bp, Homo sapiens
ttttaagtggtcatc

SEQ ID NO: 102098 - DNA, 15 bp, Homo sapiens
cttttaagtggtcat

SEQ ID NO: 102099 - DNA, 15 bp, Homo sapiens
tcttttaagtggtca

SEQ ID NO: 102100 - DNA, 15 bp, Homo sapiens
gtcttttaagtggtc

SEQ ID NO: 102101 - DNA, 15 bp, Homo sapiens
ggtcttttaagtggt

SEQ ID NO: 102102 - DNA, 15 bp, Homo sapiens
aggtcttttaagtgg

SEQ ID NO: 102103 - DNA, 15 bp, Homo sapiens
gaggtcttttaagtg

SEQ ID NO: 102104 - DNA, 15 bp, Homo sapiens
agaggtcttttaagt

SEQ ID NO: 102105 - DNA, 15 bp, Homo sapiens
gagaggtcttttaag

SEQ ID NO: 102106 - DNA, 15 bp, Homo sapiens
tgagaggtcttttaa

SEQ ID NO: 102107 - DNA, 15 bp, Homo sapiens
atgagaggtctttta

SEQ ID NO: 102108 - DNA, 15 bp, Homo sapiens
aatgagaggtctttt

SEQ ID NO: 102109 - DNA, 15 bp, Homo sapiens
taatgagaggtcttt

SEQ ID NO: 102110 - DNA, 15 bp, Homo sapiens
gtaatgagaggtctt

SEQ ID NO: 102111 - DNA, 15 bp, Homo sapiens
tgtaatgagaggtct

SEQ ID NO: 102112 - DNA, 15 bp, Homo sapiens
gtgtaatgagaggtc

SEQ ID NO: 102113 - DNA, 15 bp, Homo sapiens
tgtgtaatgagaggt

SEQ ID NO: 102114 - DNA, 15 bp, Homo sapiens
ttgtgtaatgagagg

SEQ ID NO: 102115 - DNA, 15 bp, Homo sapiens
tttgtgtaatgagag

SEQ ID NO: 102116 - DNA, 15 bp, Homo sapiens
ttttgtgtaatgaga

SEQ ID NO: 102117 - DNA, 15 bp, Homo sapiens
tttttgtgtaatgag

SEQ ID NO: 102118 - DNA, 15 bp, Homo sapiens
gtttttgtgtaatga

SEQ ID NO: 102119 - DNA, 15 bp, Homo sapiens
ggtttttgtgtaatg

SEQ ID NO: 102120 - DNA, 15 bp, Homo sapiens
tggtttttgtgtaat

SEQ ID NO: 102121 - DNA, 15 bp, Homo sapiens
ctggtttttgtgtaa

SEQ ID NO: 102122 - DNA, 15 bp, Homo sapiens
tctggtttttgtgta

SEQ ID NO: 102123 - DNA, 15 bp, Homo sapiens
gtctggtttttgtgt

SEQ ID NO: 102124 - DNA, 15 bp, Homo sapiens
tgtctggtttttgtg

SEQ ID NO: 102125 - DNA, 15 bp, Homo sapiens
ctgtctggtttttgt

SEQ ID NO: 102126 - DNA, 15 bp, Homo sapiens
actgtctggtttttg

SEQ ID NO: 102127 - DNA, 15 bp, Homo sapiens
tactgtctggttttt

SEQ ID NO: 102128 - DNA, 15 bp, Homo sapiens
ctactgtctggtttt

SEQ ID NO: 102129 - DNA, 15 bp, Homo sapiens
actactgtctggttt

SEQ ID NO: 102130 - DNA, 15 bp, Homo sapiens
cactactgtctggtt

SEQ ID NO: 102131 - DNA, 15 bp, Homo sapiens
ccactactgtctggt

SEQ ID NO: 102132 - DNA, 15 bp, Homo sapiens
tccactactgtctgg

SEQ ID NO: 102133 - DNA, 15 bp, Homo sapiens
gtccactactgtctg

SEQ ID NO: 102134 - DNA, 15 bp, Homo sapiens
cgtccactactgtct

SEQ ID NO: 102135 - DNA, 15 bp, Homo sapiens
acgtccactactgtc

SEQ ID NO: 102136 - DNA, 15 bp, Homo sapiens
aacgtccactactgt

SEQ ID NO: 102137 - DNA, 15 bp, Homo sapiens
caacgtccactactg

SEQ ID NO: 102138 - DNA, 15 bp, Homo sapiens
gcaacgtccactact

SEQ ID NO: 102139 - DNA, 15 bp, Homo sapiens
tgcaacgtccactac

SEQ ID NO: 102140 - DNA, 15 bp, Homo sapiens
ctgcaacgtccacta

SEQ ID NO: 102141 - DNA, 15 bp, Homo sapiens
actgcaacgtccact

SEQ ID NO: 102142 - DNA, 15 bp, Homo sapiens
aactgcaacgtccac

SEQ ID NO: 102143 - DNA, 15 bp, Homo sapiens
gaactgcaacgtcca

SEQ ID NO: 102144 - DNA, 15 bp, Homo sapiens
agaactgcaacgtcc

SEQ ID NO: 102145 - DNA, 15 bp, Homo sapiens
gagaactgcaacgtc

SEQ ID NO: 102146 - DNA, 15 bp, Homo sapiens
tgagaactgcaacgt

SEQ ID NO: 102147 - DNA, 15 bp, Homo sapiens
gtgagaactgcaacg

SEQ ID NO: 102148 - DNA, 15 bp, Homo sapiens
tgtgagaactgcaac

SEQ ID NO: 102149 - DNA, 15 bp, Homo sapiens
atgtgagaactgcaa

SEQ ID NO: 102150 - DNA, 15 bp, Homo sapiens
gatgtgagaactgca

SEQ ID NO: 102151 - DNA, 15 bp, Homo sapiens
agatgtgagaactgc

SEQ ID NO: 102152 - DNA, 15 bp, Homo sapiens
aagatgtgagaactg

SEQ ID NO: 102153 - DNA, 15 bp, Homo sapiens
aaagatgtgagaact

SEQ ID NO: 102154 - DNA, 15 bp, Homo sapiens
aaaagatgtgagaac

SEQ ID NO: 102155 - DNA, 15 bp, Homo sapiens
gaaaagatgtgagaa

SEQ ID NO: 102156 - DNA, 15 bp, Homo sapiens
agaaaagatgtgaga

SEQ ID NO: 102157 - DNA, 15 bp, Homo sapiens
tagaaaagatgtgag

SEQ ID NO: 102158 - DNA, 15 bp, Homo sapiens
gtagaaaagatgtga

SEQ ID NO: 102159 - DNA, 15 bp, Homo sapiens
tgtagaaaagatgtg

SEQ ID NO: 102160 - DNA, 15 bp, Homo sapiens
ctgtagaaaagatgt

SEQ ID NO: 102161 - DNA, 15 bp, Homo sapiens
cctgtagaaaagatg

SEQ ID NO: 102162 - DNA, 15 bp, Homo sapiens
tcctgtagaaaagat

SEQ ID NO: 102163 - DNA, 15 bp, Homo sapiens
atcctgtagaaaaga

SEQ ID NO: 102164 - DNA, 15 bp, Homo sapiens
catcctgtagaaaag

SEQ ID NO: 102165 - DNA, 15 bp, Homo sapiens
tcatcctgtagaaaa

SEQ ID NO: 102166 - DNA, 15 bp, Homo sapiens
ctcatcctgtagaaa

SEQ ID NO: 102167 - DNA, 15 bp, Homo sapiens
tctcatcctgtagaa

SEQ ID NO: 102168 - DNA, 15 bp, Homo sapiens
ttctcatcctgtaga

SEQ ID NO: 102169 - DNA, 15 bp, Homo sapiens
tttctcatcctgtag

SEQ ID NO: 102170 - DNA, 15 bp, Homo sapiens
ctttctcatcctgta

SEQ ID NO: 102171 - DNA, 15 bp, Homo sapiens
actttctcatcctgt

SEQ ID NO: 102172 - DNA, 15 bp, Homo sapiens
cactttctcatcctg

SEQ ID NO: 102173 - DNA, 15 bp, Homo sapiens
tcactttctcatcct

SEQ ID NO: 102174 - DNA, 15 bp, Homo sapiens
ttcactttctcatcc

SEQ ID NO: 102175 - DNA, 15 bp, Homo sapiens
tttcactttctcatc

SEQ ID NO: 102176 - DNA, 15 bp, Homo sapiens
ctttcactttctcat

SEQ ID NO: 102177 - DNA, 15 bp, Homo sapiens
tctttcactttctca

SEQ ID NO: 102178 - DNA, 15 bp, Homo sapiens
ttctttcactttctc

SEQ ID NO: 102179 - DNA, 15 bp, Homo sapiens
tttctttcactttct

SEQ ID NO: 102180 - DNA, 15 bp, Homo sapiens
ctttctttcactttc

SEQ ID NO: 102181 - DNA, 15 bp, Homo sapiens
gctttctttcacttt

SEQ ID NO: 102182 - DNA, 15 bp, Homo sapiens
agctttctttcactt

SEQ ID NO: 102183 - DNA, 15 bp, Homo sapiens
tagctttctttcact

SEQ ID NO: 102184 - DNA, 15 bp, Homo sapiens
atagctttctttcac

SEQ ID NO: 102185 - DNA, 15 bp, Homo sapiens
catagctttctttca

SEQ ID NO: 102186 - DNA, 15 bp, Homo sapiens
acatagctttctttc

SEQ ID NO: 102187 - DNA, 15 bp, Homo sapiens
tacatagctttcttt

SEQ ID NO: 102188 - DNA, 15 bp, Homo sapiens
atacatagctttctt

SEQ ID NO: 102189 - DNA, 15 bp, Homo sapiens
catacatagctttct

SEQ ID NO: 102190 - DNA, 15 bp, Homo sapiens
tcatacatagctttc

SEQ ID NO: 102191 - DNA, 15 bp, Homo sapiens
ttcatacatagcttt

SEQ ID NO: 102192 - DNA, 15 bp, Homo sapiens
cttcatacatagctt

SEQ ID NO: 102193 - DNA, 15 bp, Homo sapiens
tcttcatacatagct

SEQ ID NO: 102194 - DNA, 15 bp, Homo sapiens
ttcttcatacatagc

SEQ ID NO: 102195 - DNA, 15 bp, Homo sapiens
attcttcatacatag

SEQ ID NO: 102196 - DNA, 15 bp, Homo sapiens
gattcttcatacata

SEQ ID NO: 102197 - DNA, 15 bp, Homo sapiens
ggattcttcatacat

SEQ ID NO: 102198 - DNA, 15 bp, Homo sapiens
aggattcttcataca

SEQ ID NO: 102199 - DNA, 15 bp, Homo sapiens
caggattcttcatac

SEQ ID NO: 102200 - DNA, 15 bp, Homo sapiens
acaggattcttcata

SEQ ID NO: 102201 - DNA, 15 bp, Homo sapiens
aacaggattcttcat

SEQ ID NO: 102202 - DNA, 15 bp, Homo sapiens
gaacaggattcttca

SEQ ID NO: 102203 - DNA, 15 bp, Homo sapiens
tgaacaggattcttc

SEQ ID NO: 102204 - DNA, 15 bp, Homo sapiens
atgaacaggattctt

SEQ ID NO: 102205 - DNA, 15 bp, Homo sapiens
tatgaacaggattct

SEQ ID NO: 102206 - DNA, 15 bp, Homo sapiens
gtatgaacaggattc

SEQ ID NO: 102207 - DNA, 15 bp, Homo sapiens
cgtatgaacaggatt

SEQ ID NO: 102208 - DNA, 15 bp, Homo sapiens
ccgtatgaacaggat

SEQ ID NO: 102209 - DNA, 15 bp, Homo sapiens
cccgtatgaacagga

SEQ ID NO: 102210 - DNA, 15 bp, Homo sapiens
ccccgtatgaacagg

SEQ ID NO: 102211 - DNA, 15 bp, Homo sapiens
accccgtatgaacag

SEQ ID NO: 102212 - DNA, 15 bp, Homo sapiens
caccccgtatgaaca

SEQ ID NO: 102213 - DNA, 15 bp, Homo sapiens
ccaccccgtatgaac

SEQ ID NO: 102214 - DNA, 15 bp, Homo sapiens
gccaccccgtatgaa

SEQ ID NO: 102215 - DNA, 15 bp, Homo sapiens
agccaccccgtatga

SEQ ID NO: 102216 - DNA, 15 bp, Homo sapiens
cagccaccccgtatg

SEQ ID NO: 102217 - DNA, 15 bp, Homo sapiens
tcagccaccccgtat

SEQ ID NO: 102218 - DNA, 15 bp, Homo sapiens
ttcagccaccccgta

SEQ ID NO: 102219 - DNA, 15 bp, Homo sapiens
tttcagccaccccgt

SEQ ID NO: 102220 - DNA, 15 bp, Homo sapiens
ctttcagccaccccg

SEQ ID NO: 102221 - DNA, 15 bp, Homo sapiens
actttcagccacccc

SEQ ID NO: 102222 - DNA, 15 bp, Homo sapiens
tactttcagccaccc

SEQ ID NO: 102223 - DNA, 15 bp, Homo sapiens
ttactttcagccacc

SEQ ID NO: 102224 - DNA, 15 bp, Homo sapiens
tttactttcagccac

SEQ ID NO: 102225 - DNA, 15 bp, Homo sapiens
ctttactttcagcca

SEQ ID NO: 102226 - DNA, 15 bp, Homo sapiens
tctttactttcagcc

SEQ ID NO: 102227 - DNA, 15 bp, Homo sapiens
ctctttactttcagc

SEQ ID NO: 102228 - DNA, 15 bp, Homo sapiens
cctctttactttcag

SEQ ID NO: 102229 - DNA, 15 bp, Homo sapiens
tcctctttactttca

SEQ ID NO: 102230 - DNA, 15 bp, Homo sapiens
ttcctctttactttc

SEQ ID NO: 102231 - DNA, 15 bp, Homo sapiens
gttcctctttacttt

SEQ ID NO: 102232 - DNA, 15 bp, Homo sapiens
agttcctctttactt

SEQ ID NO: 102233 - DNA, 15 bp, Homo sapiens
tagttcctctttact

SEQ ID NO: 102234 - DNA, 15 bp, Homo sapiens
ctagttcctctttac

SEQ ID NO: 102235 - DNA, 15 bp, Homo sapiens
tctagttcctcttta

SEQ ID NO: 102236 - DNA, 15 bp, Homo sapiens
gtctagttcctcttt

SEQ ID NO: 102237 - DNA, 15 bp, Homo sapiens
agtctagttcctctt

SEQ ID NO: 102238 - DNA, 15 bp, Homo sapiens
aagtctagttcctct

SEQ ID NO: 102239 - DNA, 15 bp, Homo sapiens
aaagtctagttcctc

SEQ ID NO: 102240 - DNA, 15 bp, Homo sapiens
gaaagtctagttcct

SEQ ID NO: 102241 - DNA, 15 bp, Homo sapiens
ggaaagtctagttcc

SEQ ID NO: 102242 - DNA, 15 bp, Homo sapiens
aggaaagtctagttc

SEQ ID NO: 102243 - DNA, 15 bp, Homo sapiens
aaggaaagtctagtt

SEQ ID NO: 102244 - DNA, 15 bp, Homo sapiens
aaaggaaagtctagt

SEQ ID NO: 102245 - DNA, 15 bp, Homo sapiens
caaaggaaagtctag

SEQ ID NO: 102246 - DNA, 15 bp, Homo sapiens
gcaaaggaaagtcta

SEQ ID NO: 102247 - DNA, 15 bp, Homo sapiens
tgcaaaggaaagtct

SEQ ID NO: 102248 - DNA, 15 bp, Homo sapiens
gtgcaaaggaaagtc

SEQ ID NO: 102249 - DNA, 15 bp, Homo sapiens
ggtgcaaaggaaagt

SEQ ID NO: 102250 - DNA, 15 bp, Homo sapiens
tggtgcaaaggaaag

SEQ ID NO: 102251 - DNA, 15 bp, Homo sapiens
atggtgcaaaggaaa

SEQ ID NO: 102252 - DNA, 15 bp, Homo sapiens
catggtgcaaaggaa

SEQ ID NO: 102253 - DNA, 15 bp, Homo sapiens
acatggtgcaaagga

SEQ ID NO: 102254 - DNA, 15 bp, Homo sapiens
cacatggtgcaaagg

SEQ ID NO: 102255 - DNA, 15 bp, Homo sapiens
tcacatggtgcaaag

SEQ ID NO: 102256 - DNA, 15 bp, Homo sapiens
ttcacatggtgcaaa

SEQ ID NO: 102257 - DNA, 15 bp, Homo sapiens
cttcacatggtgcaa

SEQ ID NO: 102258 - DNA, 15 bp, Homo sapiens
acttcacatggtgca

SEQ ID NO: 102259 - DNA, 15 bp, Homo sapiens
cacttcacatggtgc

SEQ ID NO: 102260 - DNA, 15 bp, Homo sapiens
acacttcacatggtg

SEQ ID NO: 102261 - DNA, 15 bp, Homo sapiens
aacacttcacatggt

SEQ ID NO: 102262 - DNA, 15 bp, Homo sapiens
caacacttcacatgg

SEQ ID NO: 102263 - DNA, 15 bp, Homo sapiens
acaacacttcacatg

SEQ ID NO: 102264 - DNA, 15 bp, Homo sapiens
cacaacacttcacat

SEQ ID NO: 102265 - DNA, 15 bp, Homo sapiens
ccacaacacttcaca

SEQ ID NO: 102266 - DNA, 15 bp, Homo sapiens
tccacaacacttcac

SEQ ID NO: 102267 - DNA, 15 bp, Homo sapiens
ctccacaacacttca

SEQ ID NO: 102268 - DNA, 15 bp, Homo sapiens
tctccacaacacttc

SEQ ID NO: 102269 - DNA, 15 bp, Homo sapiens
ttctccacaacactt

SEQ ID NO: 102270 - DNA, 15 bp, Homo sapiens
tttctccacaacact

SEQ ID NO: 102271 - DNA, 15 bp, Homo sapiens
ttttctccacaacac

SEQ ID NO: 102272 - DNA, 15 bp, Homo sapiens
cttttctccacaaca

SEQ ID NO: 102273 - DNA, 15 bp, Homo sapiens
tcttttctccacaac

SEQ ID NO: 102274 - DNA, 15 bp, Homo sapiens
ctcttttctccacaa

SEQ ID NO: 102275 - DNA, 15 bp, Homo sapiens
gctcttttctccaca

SEQ ID NO: 102276 - DNA, 15 bp, Homo sapiens
ggctcttttctccac

SEQ ID NO: 102277 - DNA, 15 bp, Homo sapiens
tggctcttttctcca

SEQ ID NO: 102278 - DNA, 15 bp, Homo sapiens
ctggctcttttctcc

SEQ ID NO: 102279 - DNA, 15 bp, Homo sapiens
tctggctcttttctc

SEQ ID NO: 102280 - DNA, 15 bp, Homo sapiens
ttctggctcttttct

SEQ ID NO: 102281 - DNA, 15 bp, Homo sapiens
cttctggctcttttc

SEQ ID NO: 102282 - DNA, 15 bp, Homo sapiens
acttctggctctttt

SEQ ID NO: 102283 - DNA, 15 bp, Homo sapiens
aacttctggctcttt

SEQ ID NO: 102284 - DNA, 15 bp, Homo sapiens
caacttctggctctt

SEQ ID NO: 102285 - DNA, 15 bp, Homo sapiens
tcaacttctggctct

SEQ ID NO: 102286 - DNA, 15 bp, Homo sapiens
atcaacttctggctc

SEQ ID NO: 102287 - DNA, 15 bp, Homo sapiens
catcaacttctggct

SEQ ID NO: 102288 - DNA, 15 bp, Homo sapiens
acatcaacttctggc

SEQ ID NO: 102289 - DNA, 15 bp, Homo sapiens
cacatcaacttctgg

SEQ ID NO: 102290 - DNA, 15 bp, Homo sapiens
ccacatcaacttctg

SEQ ID NO: 102291 - DNA, 15 bp, Homo sapiens
cccacatcaacttct

SEQ ID NO: 102292 - DNA, 15 bp, Homo sapiens
tcccacatcaacttc

SEQ ID NO: 102293 - DNA, 15 bp, Homo sapiens
ttcccacatcaactt

SEQ ID NO: 102294 - DNA, 15 bp, Homo sapiens
cttcccacatcaact

SEQ ID NO: 102295 - DNA, 15 bp, Homo sapiens
tcttcccacatcaac

SEQ ID NO: 102296 - DNA, 15 bp, Homo sapiens
ttcttcccacatcaa

SEQ ID NO: 102297 - DNA, 15 bp, Homo sapiens
cttcttcccacatca

SEQ ID NO: 102298 - DNA, 15 bp, Homo sapiens
acttcttcccacatc

SEQ ID NO: 102299 - DNA, 15 bp, Homo sapiens
tacttcttcccacat

SEQ ID NO: 102300 - DNA, 15 bp, Homo sapiens
ttacttcttcccaca

SEQ ID NO: 102301 - DNA, 15 bp, Homo sapiens
tttacttcttcccac

SEQ ID NO: 102302 - DNA, 15 bp, Homo sapiens
gtttacttcttccca

SEQ ID NO: 102303 - DNA, 15 bp, Homo sapiens
agtttacttcttccc

SEQ ID NO: 102304 - DNA, 15 bp, Homo sapiens
cagtttacttcttcc

SEQ ID NO: 102305 - DNA, 15 bp, Homo sapiens
ccagtttacttcttc

SEQ ID NO: 102306 - DNA, 15 bp, Homo sapiens
tccagtttacttctt

SEQ ID NO: 102307 - DNA, 15 bp, Homo sapiens
atccagtttacttct

SEQ ID NO: 102308 - DNA, 15 bp, Homo sapiens
tatccagtttacttc

SEQ ID NO: 102309 - DNA, 15 bp, Homo sapiens
gtatccagtttactt

SEQ ID NO: 102310 - DNA, 15 bp, Homo sapiens
agtatccagtttact

SEQ ID NO: 102311 - DNA, 15 bp, Homo sapiens
cagtatccagtttac

SEQ ID NO: 102312 - DNA, 15 bp, Homo sapiens
acagtatccagttta

SEQ ID NO: 102313 - DNA, 15 bp, Homo sapiens
tacagtatccagttt

SEQ ID NO: 102314 - DNA, 15 bp, Homo sapiens
gtacagtatccagtt

SEQ ID NO: 102315 - DNA, 15 bp, Homo sapiens
agtacagtatccagt

SEQ ID NO: 102316 - DNA, 15 bp, Homo sapiens
cagtacagtatccag

SEQ ID NO: 102317 - DNA, 15 bp, Homo sapiens
tcagtacagtatcca

SEQ ID NO: 102318 - DNA, 15 bp, Homo sapiens
atcagtacagtatcc

SEQ ID NO: 102319 - DNA, 15 bp, Homo sapiens
tatcagtacagtatc

SEQ ID NO: 102320 - DNA, 15 bp, Homo sapiens
gtatcagtacagtat

SEQ ID NO: 102321 - DNA, 15 bp, Homo sapiens
agtatcagtacagta

SEQ ID NO: 102322 - DNA, 15 bp, Homo sapiens
tagtatcagtacagt

SEQ ID NO: 102323 - DNA, 15 bp, Homo sapiens
atagtatcagtacag

SEQ ID NO: 102324 - DNA, 15 bp, Homo sapiens
aatagtatcagtaca

SEQ ID NO: 102325 - DNA, 15 bp, Homo sapiens
gaatagtatcagtac

SEQ ID NO: 102326 - DNA, 15 bp, Homo sapiens
tgaatagtatcagta

SEQ ID NO: 102327 - DNA, 15 bp, Homo sapiens
ttgaatagtatcagt

SEQ ID NO: 102328 - DNA, 15 bp, Homo sapiens
attgaatagtatcag

SEQ ID NO: 102329 - DNA, 15 bp, Homo sapiens
cattgaatagtatca

SEQ ID NO: 102330 - DNA, 15 bp, Homo sapiens
gcattgaatagtatc

SEQ ID NO: 102331 - DNA, 15 bp, Homo sapiens
tgcattgaatagtat

SEQ ID NO: 102332 - DNA, 15 bp, Homo sapiens
ttgcattgaatagta

SEQ ID NO: 102333 - DNA, 15 bp, Homo sapiens
attgcattgaatagt

SEQ ID NO: 102334 - DNA, 15 bp, Homo sapiens
cattgcattgaatag

SEQ ID NO: 102335 - DNA, 15 bp, Homo sapiens
gcattgcattgaata

SEQ ID NO: 102336 - DNA, 15 bp, Homo sapiens
tgcattgcattgaat

SEQ ID NO: 102337 - DNA, 15 bp, Homo sapiens
ttgcattgcattgaa

SEQ ID NO: 102338 - DNA, 15 bp, Homo sapiens
attgcattgcattga

SEQ ID NO: 102339 - DNA, 15 bp, Homo sapiens
aattgcattgcattg

SEQ ID NO: 102340 - DNA, 15 bp, Homo sapiens
gaattgcattgcatt

SEQ ID NO: 102341 - DNA, 15 bp, Homo sapiens
tgaattgcattgcat

SEQ ID NO: 102342 - DNA, 15 bp, Homo sapiens
ttgaattgcattgca

SEQ ID NO: 102343 - DNA, 15 bp, Homo sapiens
attgaattgcattgc

SEQ ID NO: 102344 - DNA, 15 bp, Homo sapiens
cattgaattgcattg

SEQ ID NO: 102345 - DNA, 15 bp, Homo sapiens
gcattgaattgcatt

SEQ ID NO: 102346 - DNA, 15 bp, Homo sapiens
tgcattgaattgcat

SEQ ID NO: 102347 - DNA, 15 bp, Homo sapiens
ttgcattgaattgca

SEQ ID NO: 102348 - DNA, 15 bp, Homo sapiens
attgcattgaattgc

SEQ ID NO: 102349 - DNA, 15 bp, Homo sapiens
cattgcattgaattg

SEQ ID NO: 102350 - DNA, 15 bp, Homo sapiens
tcattgcattgaatt

SEQ ID NO: 102351 - DNA, 15 bp, Homo sapiens
ttcattgcattgaat

SEQ ID NO: 102352 - DNA, 15 bp, Homo sapiens
tttcattgcattgaa

SEQ ID NO: 102353 - DNA, 15 bp, Homo sapiens
ttttcattgcattga

SEQ ID NO: 102354 - DNA, 15 bp, Homo sapiens
gttttcattgcattg

SEQ ID NO: 102355 - DNA, 15 bp, Homo sapiens
tgttttcattgcatt

SEQ ID NO: 102356 - DNA, 15 bp, Homo sapiens
ttgttttcattgcat

SEQ ID NO: 102357 - DNA, 15 bp, Homo sapiens
tttgttttcattgca

SEQ ID NO: 102358 - DNA, 15 bp, Homo sapiens
ttttgttttcattgc

SEQ ID NO: 102359 - DNA, 15 bp, Homo sapiens
attttgttttcattg

SEQ ID NO: 102360 - DNA, 15 bp, Homo sapiens
aattttgttttcatt

SEQ ID NO: 102361 - DNA, 15 bp, Homo sapiens
gaattttgttttcat

SEQ ID NO: 102362 - DNA, 15 bp, Homo sapiens
ggaattttgttttca

SEQ ID NO: 102363 - DNA, 15 bp, Homo sapiens
tggaattttgttttc

SEQ ID NO: 102364 - DNA, 15 bp, Homo sapiens
atggaattttgtttt

SEQ ID NO: 102365 - DNA, 15 bp, Homo sapiens
aatggaattttgttt

SEQ ID NO: 102366 - DNA, 15 bp, Homo sapiens
taatggaattttgtt

SEQ ID NO: 102367 - DNA, 15 bp, Homo sapiens
gtaatggaattttgt

SEQ ID NO: 102368 - DNA, 15 bp, Homo sapiens
tgtaatggaattttg

SEQ ID NO: 102369 - DNA, 15 bp, Homo sapiens
ctgtaatggaatttt

SEQ ID NO: 102370 - DNA, 15 bp, Homo sapiens
cctgtaatggaattt

SEQ ID NO: 102371 - DNA, 15 bp, Homo sapiens
ccctgtaatggaatt

SEQ ID NO: 102372 - DNA, 15 bp, Homo sapiens
cccctgtaatggaat

SEQ ID NO: 102373 - DNA, 15 bp, Homo sapiens
gcccctgtaatggaa

SEQ ID NO: 102374 - DNA, 15 bp, Homo sapiens
tgcccctgtaatgga

SEQ ID NO: 102375 - DNA, 15 bp, Homo sapiens
ctgcccctgtaatgg

SEQ ID NO: 102376 - DNA, 15 bp, Homo sapiens
actgcccctgtaatg

SEQ ID NO: 102377 - DNA, 15 bp, Homo sapiens
cactgcccctgtaat

SEQ ID NO: 102378 - DNA, 15 bp, Homo sapiens
gcactgcccctgtaa

SEQ ID NO: 102379 - DNA, 15 bp, Homo sapiens
ggcactgcccctgta

SEQ ID NO: 102380 - DNA, 15 bp, Homo sapiens
aggcactgcccctgt

SEQ ID NO: 102381 - DNA, 15 bp, Homo sapiens
aaggcactgcccctg

SEQ ID NO: 102382 - DNA, 15 bp, Homo sapiens
aaaggcactgcccct

SEQ ID NO: 102383 - DNA, 15 bp, Homo sapiens
caaaggcactgcccc

SEQ ID NO: 102384 - DNA, 15 bp, Homo sapiens
acaaaggcactgccc

SEQ ID NO: 102385 - DNA, 15 bp, Homo sapiens
tacaaaggcactgcc

SEQ ID NO: 102386 - DNA, 15 bp, Homo sapiens
ctacaaaggcactgc

SEQ ID NO: 102387 - DNA, 15 bp, Homo sapiens
gctacaaaggcactg

SEQ ID NO: 102388 - DNA, 15 bp, Homo sapiens
ggctacaaaggcact

SEQ ID NO: 102389 - DNA, 15 bp, Homo sapiens
aggctacaaaggcac

SEQ ID NO: 102390 - DNA, 15 bp, Homo sapiens
taggctacaaaggca

SEQ ID NO: 102391 - DNA, 15 bp, Homo sapiens
ataggctacaaaggc

SEQ ID NO: 102392 - DNA, 15 bp, Homo sapiens
cataggctacaaagg

SEQ ID NO: 102393 - DNA, 15 bp, Homo sapiens
acataggctacaaag

SEQ ID NO: 102394 - DNA, 15 bp, Homo sapiens
gacataggctacaaa

SEQ ID NO: 102395 - DNA, 15 bp, Homo sapiens
agacataggctacaa

SEQ ID NO: 102396 - DNA, 15 bp, Homo sapiens
aagacataggctaca

SEQ ID NO: 102397 - DNA, 15 bp, Homo sapiens
caagacataggctac

SEQ ID NO: 102398 - DNA, 15 bp, Homo sapiens
acaagacataggcta

SEQ ID NO: 102399 - DNA, 15 bp, Homo sapiens
tacaagacataggct

SEQ ID NO: 102400 - DNA, 15 bp, Homo sapiens
atacaagacataggc

SEQ ID NO: 102401 - DNA, 15 bp, Homo sapiens
catacaagacatagg

SEQ ID NO: 102402 - DNA, 15 bp, Homo sapiens
ccatacaagacatag

SEQ ID NO: 102403 - DNA, 15 bp, Homo sapiens
gccatacaagacata

SEQ ID NO: 102404 - DNA, 15 bp, Homo sapiens
agccatacaagacat

SEQ ID NO: 102405 - DNA, 15 bp, Homo sapiens
gagccatacaagaca

SEQ ID NO: 102406 - DNA, 15 bp, Homo sapiens
agagccatacaagac

SEQ ID NO: 102407 - DNA, 15 bp, Homo sapiens
gagagccatacaaga

SEQ ID NO: 102408 - DNA, 15 bp, Homo sapiens
tgagagccatacaag

SEQ ID NO: 102409 - DNA, 15 bp, Homo sapiens
ttgagagccatacaa

SEQ ID NO: 102410 - DNA, 15 bp, Homo sapiens
cttgagagccataca

SEQ ID NO: 102411 - DNA, 15 bp, Homo sapiens
acttgagagccatac

SEQ ID NO: 102412 - DNA, 15 bp, Homo sapiens
cacttgagagccata

SEQ ID NO: 102413 - DNA, 15 bp, Homo sapiens
tcacttgagagccat

SEQ ID NO: 102414 - DNA, 15 bp, Homo sapiens
ttcacttgagagcca

SEQ ID NO: 102415 - DNA, 15 bp, Homo sapiens
tttcacttgagagcc

SEQ ID NO: 102416 - DNA, 15 bp, Homo sapiens
ctttcacttgagagc

SEQ ID NO: 102417 - DNA, 15 bp, Homo sapiens
tctttcacttgagag

SEQ ID NO: 102418 - DNA, 15 bp, Homo sapiens
gtctttcacttgaga

SEQ ID NO: 102419 - DNA, 15 bp, Homo sapiens
agtctttcacttgag

SEQ ID NO: 102420 - DNA, 15 bp, Homo sapiens
aagtctttcacttga

SEQ ID NO: 102421 - DNA, 15 bp, Homo sapiens
caagtctttcacttg

SEQ ID NO: 102422 - DNA, 15 bp, Homo sapiens
tcaagtctttcactt

SEQ ID NO: 102423 - DNA, 15 bp, Homo sapiens
ttcaagtctttcact

SEQ ID NO: 102424 - DNA, 15 bp, Homo sapiens
attcaagtctttcac

SEQ ID NO: 102425 - DNA, 15 bp, Homo sapiens
aattcaagtctttca

SEQ ID NO: 102426 - DNA, 15 bp, Homo sapiens
aaattcaagtctttc

SEQ ID NO: 102427 - DNA, 15 bp, Homo sapiens
taaattcaagtcttt

SEQ ID NO: 102428 - DNA, 15 bp, Homo sapiens
ctaaattcaagtctt

SEQ ID NO: 102429 - DNA, 15 bp, Homo sapiens
actaaattcaagtct

SEQ ID NO: 102430 - DNA, 15 bp, Homo sapiens
aactaaattcaagtc

SEQ ID NO: 102431 - DNA, 15 bp, Homo sapiens
aaactaaattcaagt

SEQ ID NO: 102432 - DNA, 15 bp, Homo sapiens
aaaactaaattcaag

SEQ ID NO: 102433 - DNA, 15 bp, Homo sapiens
aaaaactaaattcaa

SEQ ID NO: 102434 - DNA, 15 bp, Homo sapiens
aaaaaactaaattca

SEQ ID NO: 102435 - DNA, 15 bp, Homo sapiens
taaaaaactaaattc

SEQ ID NO: 102436 - DNA, 15 bp, Homo sapiens
gtaaaaaactaaatt

SEQ ID NO: 102437 - DNA, 15 bp, Homo sapiens
ggtaaaaaactaaat

SEQ ID NO: 102438 - DNA, 15 bp, Homo sapiens
aggtaaaaaactaaa

SEQ ID NO: 102439 - DNA, 15 bp, Homo sapiens
taggtaaaaaactaa

SEQ ID NO: 102440 - DNA, 15 bp, Homo sapiens
ataggtaaaaaacta

SEQ ID NO: 102441 - DNA, 15 bp, Homo sapiens
tataggtaaaaaact

SEQ ID NO: 102442 - DNA, 15 bp, Homo sapiens
gtataggtaaaaaac

SEQ ID NO: 102443 - DNA, 15 bp, Homo sapiens
ggtataggtaaaaaa

SEQ ID NO: 102444 - DNA, 15 bp, Homo sapiens
aggtataggtaaaaa

SEQ ID NO: 102445 - DNA, 15 bp, Homo sapiens
taggtataggtaaaa

SEQ ID NO: 102446 - DNA, 15 bp, Homo sapiens
ataggtataggtaaa

SEQ ID NO: 102447 - DNA, 15 bp, Homo sapiens
cataggtataggtaa

SEQ ID NO: 102448 - DNA, 15 bp, Homo sapiens
acataggtataggta

SEQ ID NO: 102449 - DNA, 15 bp, Homo sapiens
cacataggtataggt

SEQ ID NO: 102450 - DNA, 15 bp, Homo sapiens
tcacataggtatagg

SEQ ID NO: 102451 - DNA, 15 bp, Homo sapiens
ttcacataggtatag

SEQ ID NO: 102452 - DNA, 15 bp, Homo sapiens
tttcacataggtata

SEQ ID NO: 102453 - DNA, 15 bp, Homo sapiens
gtttcacataggtat

SEQ ID NO: 102454 - DNA, 15 bp, Homo sapiens
agtttcacataggta

SEQ ID NO: 102455 - DNA, 15 bp, Homo sapiens
gagtttcacataggt

SEQ ID NO: 102456 - DNA, 15 bp, Homo sapiens
agagtttcacatagg

SEQ ID NO: 102457 - DNA, 15 bp, Homo sapiens
tagagtttcacatag

SEQ ID NO: 102458 - DNA, 15 bp, Homo sapiens
atagagtttcacata

SEQ ID NO: 102459 - DNA, 15 bp, Homo sapiens
aatagagtttcacat

SEQ ID NO: 102460 - DNA, 15 bp, Homo sapiens
taatagagtttcaca

SEQ ID NO: 102461 - DNA, 15 bp, Homo sapiens
ataatagagtttcac

SEQ ID NO: 102462 - DNA, 15 bp, Homo sapiens
cataatagagtttca

SEQ ID NO: 102463 - DNA, 15 bp, Homo sapiens
ccataatagagtttc

SEQ ID NO: 102464 - DNA, 15 bp, Homo sapiens
tccataatagagttt

SEQ ID NO: 102465 - DNA, 15 bp, Homo sapiens
ttccataatagagtt

SEQ ID NO: 102466 - DNA, 15 bp, Homo sapiens
gttccataatagagt

SEQ ID NO: 102467 - DNA, 15 bp, Homo sapiens
ggttccataatagag

SEQ ID NO: 102468 - DNA, 15 bp, Homo sapiens
gggttccataataga

SEQ ID NO: 102469 - DNA, 15 bp, Homo sapiens
tgggttccataatag

SEQ ID NO: 102470 - DNA, 15 bp, Homo sapiens
ttgggttccataata

SEQ ID NO: 102471 - DNA, 15 bp, Homo sapiens
attgggttccataat

SEQ ID NO: 102472 - DNA, 15 bp, Homo sapiens
cattgggttccataa

SEQ ID NO: 102473 - DNA, 15 bp, Homo sapiens
ccattgggttccata

SEQ ID NO: 102474 - DNA, 15 bp, Homo sapiens
tccattgggttccat

SEQ ID NO: 102475 - DNA, 15 bp, Homo sapiens
gtccattgggttcca

SEQ ID NO: 102476 - DNA, 15 bp, Homo sapiens
tgtccattgggttcc

SEQ ID NO: 102477 - DNA, 15 bp, Homo sapiens
atgtccattgggttc

SEQ ID NO: 102478 - DNA, 15 bp, Homo sapiens
tatgtccattgggtt

SEQ ID NO: 102479 - DNA, 15 bp, Homo sapiens
atatgtccattgggt

SEQ ID NO: 102480 - DNA, 15 bp, Homo sapiens
catatgtccattggg

SEQ ID NO: 102481 - DNA, 15 bp, Homo sapiens
ccatatgtccattgg

SEQ ID NO: 102482 - DNA, 15 bp, Homo sapiens
cccatatgtccattg

SEQ ID NO: 102483 - DNA, 15 bp, Homo sapiens
acccatatgtccatt

SEQ ID NO: 102484 - DNA, 15 bp, Homo sapiens
aacccatatgtccat

SEQ ID NO: 102485 - DNA, 15 bp, Homo sapiens
aaacccatatgtcca

SEQ ID NO: 102486 - DNA, 15 bp, Homo sapiens
caaacccatatgtcc

SEQ ID NO: 102487 - DNA, 15 bp, Homo sapiens
tcaaacccatatgtc

SEQ ID NO: 102488 - DNA, 15 bp, Homo sapiens
ttcaaacccatatgt

SEQ ID NO: 102489 - DNA, 15 bp, Homo sapiens
gttcaaacccatatg

SEQ ID NO: 102490 - DNA, 15 bp, Homo sapiens
agttcaaacccatat

SEQ ID NO: 102491 - DNA, 15 bp, Homo sapiens
gagttcaaacccata

SEQ ID NO: 102492 - DNA, 15 bp, Homo sapiens
tgagttcaaacccat

SEQ ID NO: 102493 - DNA, 15 bp, Homo sapiens
gtgagttcaaaccca

SEQ ID NO: 102494 - DNA, 15 bp, Homo sapiens
tgtgagttcaaaccc

SEQ ID NO: 102495 - DNA, 15 bp, Homo sapiens
gtgtgagttcaaacc

SEQ ID NO: 102496 - DNA, 15 bp, Homo sapiens
agtgtgagttcaaac

SEQ ID NO: 102497 - DNA, 15 bp, Homo sapiens
aagtgtgagttcaaa

SEQ ID NO: 102498 - DNA, 15 bp, Homo sapiens
aaagtgtgagttcaa

SEQ ID NO: 102499 - DNA, 15 bp, Homo sapiens
aaaagtgtgagttca

SEQ ID NO: 102500 - DNA, 15 bp, Homo sapiens
aaaaagtgtgagttc

SEQ ID NO: 102501 - DNA, 15 bp, Homo sapiens
aaaaaagtgtgagtt

SEQ ID NO: 102502 - DNA, 15 bp, Homo sapiens
aaaaaaagtgtgagt

SEQ ID NO: 102503 - DNA, 15 bp, Homo sapiens
aaaaaaaagtgtgag

SEQ ID NO: 102504 - DNA, 15 bp, Homo sapiens
aaaaaaaaagtgtga

SEQ ID NO: 102505 - DNA, 15 bp, Homo sapiens
aaaaaaaaaagtgtg

SEQ ID NO: 102506 - DNA, 15 bp, Homo sapiens
aaaaaaaaaaagtgt

SEQ ID NO: 102507 - DNA, 15 bp, Homo sapiens
gaacaaaaaaaaaaa

SEQ ID NO: 102508 - DNA, 15 bp, Homo sapiens
ggaacaaaaaaaaaa

SEQ ID NO: 102509 - DNA, 15 bp, Homo sapiens
aggaacaaaaaaaaa

SEQ ID NO: 102510 - DNA, 15 bp, Homo sapiens
caggaacaaaaaaaa

SEQ ID NO: 102511 - DNA, 15 bp, Homo sapiens
acaggaacaaaaaaa

SEQ ID NO: 102512 - DNA, 15 bp, Homo sapiens
cacaggaacaaaaaa

SEQ ID NO: 102513 - DNA, 15 bp, Homo sapiens
acacaggaacaaaaa

SEQ ID NO: 102514 - DNA, 15 bp, Homo sapiens
tacacaggaacaaaa

SEQ ID NO: 102515 - DNA, 15 bp, Homo sapiens
atacacaggaacaaa

SEQ ID NO: 102516 - DNA, 15 bp, Homo sapiens
aatacacaggaacaa

SEQ ID NO: 102517 - DNA, 15 bp, Homo sapiens
gaatacacaggaaca

SEQ ID NO: 102518 - DNA, 15 bp, Homo sapiens
agaatacacaggaac

SEQ ID NO: 102519 - DNA, 15 bp, Homo sapiens
gagaatacacaggaa

SEQ ID NO: 102520 - DNA, 15 bp, Homo sapiens
tgagaatacacagga

SEQ ID NO: 102521 - DNA, 15 bp, Homo sapiens
atgagaatacacagg

SEQ ID NO: 102522 - DNA, 15 bp, Homo sapiens
aatgagaatacacag

SEQ ID NO: 102523 - DNA, 15 bp, Homo sapiens
caatgagaatacaca

SEQ ID NO: 102524 - DNA, 15 bp, Homo sapiens
ccaatgagaatacac

SEQ ID NO: 102525 - DNA, 15 bp, Homo sapiens
cccaatgagaataca

SEQ ID NO: 102526 - DNA, 15 bp, Homo sapiens
ccccaatgagaatac

SEQ ID NO: 102527 - DNA, 15 bp, Homo sapiens
accccaatgagaata

SEQ ID NO: 102528 - DNA, 15 bp, Homo sapiens
aaccccaatgagaat

SEQ ID NO: 102529 - DNA, 15 bp, Homo sapiens
caaccccaatgagaa

SEQ ID NO: 102530 - DNA, 15 bp, Homo sapiens
gcaaccccaatgaga

SEQ ID NO: 102531 - DNA, 15 bp, Homo sapiens
tgcaaccccaatgag

SEQ ID NO: 102532 - DNA, 15 bp, Homo sapiens
ttgcaaccccaatga

SEQ ID NO: 102533 - DNA, 15 bp, Homo sapiens
gttgcaaccccaatg

SEQ ID NO: 102534 - DNA, 15 bp, Homo sapiens
tgttgcaaccccaat

SEQ ID NO: 102535 - DNA, 15 bp, Homo sapiens
ttgttgcaaccccaa

SEQ ID NO: 102536 - DNA, 15 bp, Homo sapiens
attgttgcaacccca

SEQ ID NO: 102537 - DNA, 15 bp, Homo sapiens
tattgttgcaacccc

SEQ ID NO: 102538 - DNA, 15 bp, Homo sapiens
ttattgttgcaaccc

SEQ ID NO: 102539 - DNA, 15 bp, Homo sapiens
attattgttgcaacc

SEQ ID NO: 102540 - DNA, 15 bp, Homo sapiens
aattattgttgcaac

SEQ ID NO: 102541 - DNA, 15 bp, Homo sapiens
gaattattgttgcaa

SEQ ID NO: 102542 - DNA, 15 bp, Homo sapiens
tgaattattgttgca

SEQ ID NO: 102543 - DNA, 15 bp, Homo sapiens
atgaattattgttgc

SEQ ID NO: 102544 - DNA, 15 bp, Homo sapiens
gatgaattattgttg

SEQ ID NO: 102545 - DNA, 15 bp, Homo sapiens
tgatgaattattgtt

SEQ ID NO: 102546 - DNA, 15 bp, Homo sapiens
ttgatgaattattgt

SEQ ID NO: 102547 - DNA, 15 bp, Homo sapiens
cttgatgaattattg

SEQ ID NO: 102548 - DNA, 15 bp, Homo sapiens
acttgatgaattatt

SEQ ID NO: 102549 - DNA, 15 bp, Homo sapiens
tacttgatgaattat

SEQ ID NO: 102550 - DNA, 15 bp, Homo sapiens
ttacttgatgaatta

SEQ ID NO: 102551 - DNA, 15 bp, Homo sapiens
attacttgatgaatt

SEQ ID NO: 102552 - DNA, 15 bp, Homo sapiens
gattacttgatgaat

SEQ ID NO: 102553 - DNA, 15 bp, Homo sapiens
tgattacttgatgaa

SEQ ID NO: 102554 - DNA, 15 bp, Homo sapiens
atgattacttgatga

SEQ ID NO: 102555 - DNA, 15 bp, Homo sapiens
catgattacttgatg

SEQ ID NO: 102556 - DNA, 15 bp, Homo sapiens
ccatgattacttgat

SEQ ID NO: 102557 - DNA, 15 bp, Homo sapiens
gccatgattacttga

SEQ ID NO: 102558 - DNA, 15 bp, Homo sapiens
ggccatgattacttg

SEQ ID NO: 102559 - DNA, 15 bp, Homo sapiens
tggccatgattactt

SEQ ID NO: 102560 - DNA, 15 bp, Homo sapiens
ctggccatgattact

SEQ ID NO: 102561 - DNA, 15 bp, Homo sapiens
gctggccatgattac

SEQ ID NO: 102562 - DNA, 15 bp, Homo sapiens
cgctggccatgatta

SEQ ID NO: 102563 - DNA, 15 bp, Homo sapiens
tcgctggccatgatt

SEQ ID NO: 102564 - DNA, 15 bp, Homo sapiens
atcgctggccatgat

SEQ ID NO: 102565 - DNA, 15 bp, Homo sapiens
aatcgctggccatga

SEQ ID NO: 102566 - DNA, 15 bp, Homo sapiens
taatcgctggccatg

SEQ ID NO: 102567 - DNA, 15 bp, Homo sapiens
ataatcgctggccat

SEQ ID NO: 102568 - DNA, 15 bp, Homo sapiens
aataatcgctggcca

SEQ ID NO: 102569 - DNA, 15 bp, Homo sapiens
caataatcgctggcc

SEQ ID NO: 102570 - DNA, 15 bp, Homo sapiens
tcaataatcgctggc

SEQ ID NO: 102571 - DNA, 15 bp, Homo sapiens
atcaataatcgctgg

SEQ ID NO: 102572 - DNA, 15 bp, Homo sapiens
gatcaataatcgctg

SEQ ID NO: 102573 - DNA, 15 bp, Homo sapiens
tgatcaataatcgct

SEQ ID NO: 102574 - DNA, 15 bp, Homo sapiens
ttgatcaataatcgc

SEQ ID NO: 102575 - DNA, 15 bp, Homo sapiens
tttgatcaataatcg

SEQ ID NO: 102576 - DNA, 15 bp, Homo sapiens
ttttgatcaataatc

SEQ ID NO: 102577 - DNA, 15 bp, Homo sapiens
attttgatcaataat

SEQ ID NO: 102578 - DNA, 15 bp, Homo sapiens
gattttgatcaataa

SEQ ID NO: 102579 - DNA, 15 bp, Homo sapiens
tgattttgatcaata

SEQ ID NO: 102580 - DNA, 15 bp, Homo sapiens
ttgattttgatcaat

SEQ ID NO: 102581 - DNA, 15 bp, Homo sapiens
tttgattttgatcaa

SEQ ID NO: 102582 - DNA, 15 bp, Homo sapiens
ttttgattttgatca

SEQ ID NO: 102583 - DNA, 15 bp, Homo sapiens
cttttgattttgatc

SEQ ID NO: 102584 - DNA, 15 bp, Homo sapiens
ccttttgattttgat

SEQ ID NO: 102585 - DNA, 15 bp, Homo sapiens
accttttgattttga

SEQ ID NO: 102586 - DNA, 15 bp, Homo sapiens
taccttttgattttg

SEQ ID NO: 102587 - DNA, 15 bp, Homo sapiens
ttaccttttgatttt

SEQ ID NO: 102588 - DNA, 15 bp, Homo sapiens
attaccttttgattt

SEQ ID NO: 102589 - DNA, 15 bp, Homo sapiens
cattaccttttgatt

SEQ ID NO: 102590 - DNA, 15 bp, Homo sapiens
gcattaccttttgat

SEQ ID NO: 102591 - DNA, 15 bp, Homo sapiens
tgcattaccttttga

SEQ ID NO: 102592 - DNA, 15 bp, Homo sapiens
gtgcattaccttttg

SEQ ID NO: 102593 - DNA, 15 bp, Homo sapiens
tgtgcattacctttt

SEQ ID NO: 102594 - DNA, 15 bp, Homo sapiens
atgtgcattaccttt

SEQ ID NO: 102595 - DNA, 15 bp, Homo sapiens
gatgtgcattacctt

SEQ ID NO: 102596 - DNA, 15 bp, Homo sapiens
ggatgtgcattacct

SEQ ID NO: 102597 - DNA, 15 bp, Homo sapiens
aggatgtgcattacc

SEQ ID NO: 102598 - DNA, 15 bp, Homo sapiens
gaggatgtgcattac

SEQ ID NO: 102599 - DNA, 15 bp, Homo sapiens
tgaggatgtgcatta

SEQ ID NO: 102600 - DNA, 15 bp, Homo sapiens
atgaggatgtgcatt

SEQ ID NO: 102601 - DNA, 15 bp, Homo sapiens
aatgaggatgtgcat

SEQ ID NO: 102602 - DNA, 15 bp, Homo sapiens
gaatgaggatgtgca

SEQ ID NO: 102603 - DNA, 15 bp, Homo sapiens
tgaatgaggatgtgc

SEQ ID NO: 102604 - DNA, 15 bp, Homo sapiens
gtgaatgaggatgtg

SEQ ID NO: 102605 - DNA, 15 bp, Homo sapiens
agtgaatgaggatgt

SEQ ID NO: 102606 - DNA, 15 bp, Homo sapiens
tagtgaatgaggatg

SEQ ID NO: 102607 - DNA, 15 bp, Homo sapiens
ttagtgaatgaggat

SEQ ID NO: 102608 - DNA, 15 bp, Homo sapiens
cttagtgaatgagga

SEQ ID NO: 102609 - DNA, 15 bp, Homo sapiens
gcttagtgaatgagg

SEQ ID NO: 102610 - DNA, 15 bp, Homo sapiens
ggcttagtgaatgag

SEQ ID NO: 102611 - DNA, 15 bp, Homo sapiens
tggcttagtgaatga

SEQ ID NO: 102612 - DNA, 15 bp, Homo sapiens
atggcttagtgaatg

SEQ ID NO: 102613 - DNA, 15 bp, Homo sapiens
catggcttagtgaat

SEQ ID NO: 102614 - DNA, 15 bp, Homo sapiens
gcatggcttagtgaa

SEQ ID NO: 102615 - DNA, 15 bp, Homo sapiens
ggcatggcttagtga

SEQ ID NO: 102616 - DNA, 15 bp, Homo sapiens
tggcatggcttagtg

SEQ ID NO: 102617 - DNA, 15 bp, Homo sapiens
atggcatggcttagt

SEQ ID NO: 102618 - DNA, 15 bp, Homo sapiens
catggcatggcttag

SEQ ID NO: 102619 - DNA, 15 bp, Homo sapiens
gcatggcatggctta

SEQ ID NO: 102620 - DNA, 15 bp, Homo sapiens
ggcatggcatggctt

SEQ ID NO: 102621 - DNA, 15 bp, Homo sapiens
gggcatggcatggct

SEQ ID NO: 102622 - DNA, 15 bp, Homo sapiens
tgggcatggcatggc

SEQ ID NO: 102623 - DNA, 15 bp, Homo sapiens
ctgggcatggcatgg

SEQ ID NO: 102624 - DNA, 15 bp, Homo sapiens
cctgggcatggcatg

SEQ ID NO: 102625 - DNA, 15 bp, Homo sapiens
tcctgggcatggcat

SEQ ID NO: 102626 - DNA, 15 bp, Homo sapiens
ctcctgggcatggca

SEQ ID NO: 102627 - DNA, 15 bp, Homo sapiens
tctcctgggcatggc

SEQ ID NO: 102628 - DNA, 15 bp, Homo sapiens
gtctcctgggcatgg

SEQ ID NO: 102629 - DNA, 15 bp, Homo sapiens
agtctcctgggcatg

SEQ ID NO: 102630 - DNA, 15 bp, Homo sapiens
cagtctcctgggcat

SEQ ID NO: 102631 - DNA, 15 bp, Homo sapiens
ccagtctcctgggca

SEQ ID NO: 102632 - DNA, 15 bp, Homo sapiens
accagtctcctgggc

SEQ ID NO: 102633 - DNA, 15 bp, Homo sapiens
aaccagtctcctggg

SEQ ID NO: 102634 - DNA, 15 bp, Homo sapiens
aaaccagtctcctgg

SEQ ID NO: 102635 - DNA, 15 bp, Homo sapiens
gaaaccagtctcctg

SEQ ID NO: 102636 - DNA, 15 bp, Homo sapiens
ggaaaccagtctcct

SEQ ID NO: 102637 - DNA, 15 bp, Homo sapiens
gggaaaccagtctcc

SEQ ID NO: 102638 - DNA, 15 bp, Homo sapiens
cgggaaaccagtctc

SEQ ID NO: 102639 - DNA, 15 bp, Homo sapiens
ccgggaaaccagtct

SEQ ID NO: 102640 - DNA, 15 bp, Homo sapiens
accgggaaaccagtc

SEQ ID NO: 102641 - DNA, 15 bp, Homo sapiens
caccgggaaaccagt

SEQ ID NO: 102642 - DNA, 15 bp, Homo sapiens
tcaccgggaaaccag

SEQ ID NO: 102643 - DNA, 15 bp, Homo sapiens
gtcaccgggaaacca

SEQ ID NO: 102644 - DNA, 15 bp, Homo sapiens
tgtcaccgggaaacc

SEQ ID NO: 102645 - DNA, 15 bp, Homo sapiens
gtgtcaccgggaaac

SEQ ID NO: 102646 - DNA, 15 bp, Homo sapiens
tgtgtcaccgggaaa

SEQ ID NO: 102647 - DNA, 15 bp, Homo sapiens
atgtgtcaccgggaa

SEQ ID NO: 102648 - DNA, 15 bp, Homo sapiens
gatgtgtcaccggga

SEQ ID NO: 102649 - DNA, 15 bp, Homo sapiens
ggatgtgtcaccggg

SEQ ID NO: 102650 - DNA, 15 bp, Homo sapiens
tggatgtgtcaccgg

SEQ ID NO: 102651 - DNA, 15 bp, Homo sapiens
atggatgtgtcaccg

SEQ ID NO: 102652 - DNA, 15 bp, Homo sapiens
aatggatgtgtcacc

SEQ ID NO: 102653 - DNA, 15 bp, Homo sapiens
caatggatgtgtcac

SEQ ID NO: 102654 - DNA, 15 bp, Homo sapiens
gcaatggatgtgtca

SEQ ID NO: 102655 - DNA, 15 bp, Homo sapiens
agcaatggatgtgtc

SEQ ID NO: 102656 - DNA, 15 bp, Homo sapiens
cagcaatggatgtgt

SEQ ID NO: 102657 - DNA, 15 bp, Homo sapiens
ccagcaatggatgtg

SEQ ID NO: 102658 - DNA, 15 bp, Homo sapiens
gccagcaatggatgt

SEQ ID NO: 102659 - DNA, 15 bp, Homo sapiens
tgccagcaatggatg

SEQ ID NO: 102660 - DNA, 15 bp, Homo sapiens
ttgccagcaatggat

SEQ ID NO: 102661 - DNA, 15 bp, Homo sapiens
attgccagcaatgga

SEQ ID NO: 102662 - DNA, 15 bp, Homo sapiens
cattgccagcaatgg

SEQ ID NO: 102663 - DNA, 15 bp, Homo sapiens
tcattgccagcaatg

SEQ ID NO: 102664 - DNA, 15 bp, Homo sapiens
ctcattgccagcaat

SEQ ID NO: 102665 - DNA, 15 bp, Homo sapiens
actcattgccagcaa

SEQ ID NO: 102666 - DNA, 15 bp, Homo sapiens
cactcattgccagca

SEQ ID NO: 102667 - DNA, 15 bp, Homo sapiens
acactcattgccagc

SEQ ID NO: 102668 - DNA, 15 bp, Homo sapiens
cacactcattgccag

SEQ ID NO: 102669 - DNA, 15 bp, Homo sapiens
gcacactcattgcca

SEQ ID NO: 102670 - DNA, 15 bp, Homo sapiens
ggcacactcattgcc

SEQ ID NO: 102671 - DNA, 15 bp, Homo sapiens
tggcacactcattgc

SEQ ID NO: 102672 - DNA, 15 bp, Homo sapiens
ctggcacactcattg

SEQ ID NO: 102673 - DNA, 15 bp, Homo sapiens
tctggcacactcatt

SEQ ID NO: 102674 - DNA, 15 bp, Homo sapiens
ctctggcacactcat

SEQ ID NO: 102675 - DNA, 15 bp, Homo sapiens
actctggcacactca

SEQ ID NO: 102676 - DNA, 15 bp, Homo sapiens
aactctggcacactc

SEQ ID NO: 102677 - DNA, 15 bp, Homo sapiens
taactctggcacact

SEQ ID NO: 102678 - DNA, 15 bp, Homo sapiens
ataactctggcacac

SEQ ID NO: 102679 - DNA, 15 bp, Homo sapiens
aataactctggcaca

SEQ ID NO: 102680 - DNA, 15 bp, Homo sapiens
taataactctggcac

SEQ ID NO: 102681 - DNA, 15 bp, Homo sapiens
ctaataactctggca

SEQ ID NO: 102682 - DNA, 15 bp, Homo sapiens
actaataactctggc

SEQ ID NO: 102683 - DNA, 15 bp, Homo sapiens
cactaataactctgg

SEQ ID NO: 102684 - DNA, 15 bp, Homo sapiens
gcactaataactctg

SEQ ID NO: 102685 - DNA, 15 bp, Homo sapiens
ggcactaataactct

SEQ ID NO: 102686 - DNA, 15 bp, Homo sapiens
tggcactaataactc

SEQ ID NO: 102687 - DNA, 15 bp, Homo sapiens
ttggcactaataact

SEQ ID NO: 102688 - DNA, 15 bp, Homo sapiens
cttggcactaataac

SEQ ID NO: 102689 - DNA, 15 bp, Homo sapiens
acttggcactaataa

SEQ ID NO: 102690 - DNA, 15 bp, Homo sapiens
aacttggcactaata

SEQ ID NO: 102691 - DNA, 15 bp, Homo sapiens
aaacttggcactaat

SEQ ID NO: 102692 - DNA, 15 bp, Homo sapiens
aaaacttggcactaa

SEQ ID NO: 102693 - DNA, 15 bp, Homo sapiens
aaaaacttggcacta

SEQ ID NO: 102694 - DNA, 15 bp, Homo sapiens
gaaaaacttggcact

SEQ ID NO: 102695 - DNA, 15 bp, Homo sapiens
tgaaaaacttggcac

SEQ ID NO: 102696 - DNA, 15 bp, Homo sapiens
ctgaaaaacttggca

SEQ ID NO: 102697 - DNA, 15 bp, Homo sapiens
tctgaaaaacttggc

SEQ ID NO: 102698 - DNA, 15 bp, Homo sapiens
ttctgaaaaacttgg

SEQ ID NO: 102699 - DNA, 15 bp, Homo sapiens
tttctgaaaaacttg

SEQ ID NO: 102700 - DNA, 15 bp, Homo sapiens
ctttctgaaaaactt

SEQ ID NO: 102701 - DNA, 15 bp, Homo sapiens
actttctgaaaaact

SEQ ID NO: 102702 - DNA, 15 bp, Homo sapiens
aactttctgaaaaac

SEQ ID NO: 102703 - DNA, 15 bp, Homo sapiens
aaactttctgaaaaa

SEQ ID NO: 102704 - DNA, 15 bp, Homo sapiens
caaactttctgaaaa

SEQ ID NO: 102705 - DNA, 15 bp, Homo sapiens
tcaaactttctgaaa

SEQ ID NO: 102706 - DNA, 15 bp, Homo sapiens
ttcaaactttctgaa

SEQ ID NO: 102707 - DNA, 15 bp, Homo sapiens
cttcaaactttctga

SEQ ID NO: 102708 - DNA, 15 bp, Homo sapiens
gcttcaaactttctg

SEQ ID NO: 102709 - DNA, 15 bp, Homo sapiens
tgcttcaaactttct

SEQ ID NO: 102710 - DNA, 15 bp, Homo sapiens
gtgcttcaaactttc

SEQ ID NO: 102711 - DNA, 15 bp, Homo sapiens
ggtgcttcaaacttt

SEQ ID NO: 102712 - DNA, 15 bp, Homo sapiens
tggtgcttcaaactt

SEQ ID NO: 102713 - DNA, 15 bp, Homo sapiens
atggtgcttcaaact

SEQ ID NO: 102714 - DNA, 15 bp, Homo sapiens
catggtgcttcaaac

SEQ ID NO: 102715 - DNA, 15 bp, Homo sapiens
ccatggtgcttcaaa

SEQ ID NO: 102716 - DNA, 15 bp, Homo sapiens
accatggtgcttcaa

SEQ ID NO: 102717 - DNA, 15 bp, Homo sapiens
caccatggtgcttca

SEQ ID NO: 102718 - DNA, 15 bp, Homo sapiens
acaccatggtgcttc

SEQ ID NO: 102719 - DNA, 15 bp, Homo sapiens
cacaccatggtgctt

SEQ ID NO: 102720 - DNA, 15 bp, Homo sapiens
acacaccatggtgct

SEQ ID NO: 102721 - DNA, 15 bp, Homo sapiens
gacacaccatggtgc

SEQ ID NO: 102722 - DNA, 15 bp, Homo sapiens
tgacacaccatggtg

SEQ ID NO: 102723 - DNA, 15 bp, Homo sapiens
atgacacaccatggt

SEQ ID NO: 102724 - DNA, 15 bp, Homo sapiens
catgacacaccatgg

SEQ ID NO: 102725 - DNA, 15 bp, Homo sapiens
gcatgacacaccatg

SEQ ID NO: 102726 - DNA, 15 bp, Homo sapiens
agcatgacacaccat

SEQ ID NO: 102727 - DNA, 15 bp, Homo sapiens
gagcatgacacacca

SEQ ID NO: 102728 - DNA, 15 bp, Homo sapiens
tgagcatgacacacc

SEQ ID NO: 102729 - DNA, 15 bp, Homo sapiens
gtgagcatgacacac

SEQ ID NO: 102730 - DNA, 15 bp, Homo sapiens
agtgagcatgacaca

SEQ ID NO: 102731 - DNA, 15 bp, Homo sapiens
aagtgagcatgacac

SEQ ID NO: 102732 - DNA, 15 bp, Homo sapiens
aaagtgagcatgaca

SEQ ID NO: 102733 - DNA, 15 bp, Homo sapiens
aaaagtgagcatgac

SEQ ID NO: 102734 - DNA, 15 bp, Homo sapiens
caaaagtgagcatga

SEQ ID NO: 102735 - DNA, 15 bp, Homo sapiens
acaaaagtgagcatg

SEQ ID NO: 102736 - DNA, 15 bp, Homo sapiens
cacaaaagtgagcat

SEQ ID NO: 102737 - DNA, 15 bp, Homo sapiens
tcacaaaagtgagca

SEQ ID NO: 102738 - DNA, 15 bp, Homo sapiens
ttcacaaaagtgagc

SEQ ID NO: 102739 - DNA, 15 bp, Homo sapiens
tttcacaaaagtgag

SEQ ID NO: 102740 - DNA, 15 bp, Homo sapiens
ctttcacaaaagtga

SEQ ID NO: 102741 - DNA, 15 bp, Homo sapiens
gctttcacaaaagtg

SEQ ID NO: 102742 - DNA, 15 bp, Homo sapiens
agctttcacaaaagt

SEQ ID NO: 102743 - DNA, 15 bp, Homo sapiens
cagctttcacaaaag

SEQ ID NO: 102744 - DNA, 15 bp, Homo sapiens
gcagctttcacaaaa

SEQ ID NO: 102745 - DNA, 15 bp, Homo sapiens
agcagctttcacaaa

SEQ ID NO: 102746 - DNA, 15 bp, Homo sapiens
gagcagctttcacaa

SEQ ID NO: 102747 - DNA, 15 bp, Homo sapiens
agagcagctttcaca

SEQ ID NO: 102748 - DNA, 15 bp, Homo sapiens
cagagcagctttcac

SEQ ID NO: 102749 - DNA, 15 bp, Homo sapiens
gcagagcagctttca

SEQ ID NO: 102750 - DNA, 15 bp, Homo sapiens
agcagagcagctttc

SEQ ID NO: 102751 - DNA, 15 bp, Homo sapiens
gagcagagcagcttt

SEQ ID NO: 102752 - DNA, 15 bp, Homo sapiens
tgagcagagcagctt

SEQ ID NO: 102753 - DNA, 15 bp, Homo sapiens
ctgagcagagcagct

SEQ ID NO: 102754 - DNA, 15 bp, Homo sapiens
tctgagcagagcagc

SEQ ID NO: 102755 - DNA, 15 bp, Homo sapiens
ctctgagcagagcag

SEQ ID NO: 102756 - DNA, 15 bp, Homo sapiens
actctgagcagagca

SEQ ID NO: 102757 - DNA, 15 bp, Homo sapiens
gactctgagcagagc

SEQ ID NO: 102758 - DNA, 15 bp, Homo sapiens
agactctgagcagag

SEQ ID NO: 102759 - DNA, 15 bp, Homo sapiens
tagactctgagcaga

SEQ ID NO: 102760 - DNA, 15 bp, Homo sapiens
atagactctgagcag

SEQ ID NO: 102761 - DNA, 15 bp, Homo sapiens
gatagactctgagca

SEQ ID NO: 102762 - DNA, 15 bp, Homo sapiens
tgatagactctgagc

SEQ ID NO: 102763 - DNA, 15 bp, Homo sapiens
ttgatagactctgag

SEQ ID NO: 102764 - DNA, 15 bp, Homo sapiens
gttgatagactctga

SEQ ID NO: 102765 - DNA, 15 bp, Homo sapiens
tgttgatagactctg

SEQ ID NO: 102766 - DNA, 15 bp, Homo sapiens
atgttgatagactct

SEQ ID NO: 102767 - DNA, 15 bp, Homo sapiens
aatgttgatagactc

SEQ ID NO: 102768 - DNA, 15 bp, Homo sapiens
caatgttgatagact

SEQ ID NO: 102769 - DNA, 15 bp, Homo sapiens
tcaatgttgatagac

SEQ ID NO: 102770 - DNA, 15 bp, Homo sapiens
ttcaatgttgataga

SEQ ID NO: 102771 - DNA, 15 bp, Homo sapiens
attcaatgttgatag

SEQ ID NO: 102772 - DNA, 15 bp, Homo sapiens
tattcaatgttgata

SEQ ID NO: 102773 - DNA, 15 bp, Homo sapiens
atattcaatgttgat

SEQ ID NO: 102774 - DNA, 15 bp, Homo sapiens
gatattcaatgttga

SEQ ID NO: 102775 - DNA, 15 bp, Homo sapiens
tgatattcaatgttg

SEQ ID NO: 102776 - DNA, 15 bp, Homo sapiens
ctgatattcaatgtt

SEQ ID NO: 102777 - DNA, 15 bp, Homo sapiens
actgatattcaatgt

SEQ ID NO: 102778 - DNA, 15 bp, Homo sapiens
aactgatattcaatg

SEQ ID NO: 102779 - DNA, 15 bp, Homo sapiens
caactgatattcaat

SEQ ID NO: 102780 - DNA, 15 bp, Homo sapiens
tcaactgatattcaa

SEQ ID NO: 102781 - DNA, 15 bp, Homo sapiens
gtcaactgatattca

SEQ ID NO: 102782 - DNA, 15 bp, Homo sapiens
tgtcaactgatattc

SEQ ID NO: 102783 - DNA, 15 bp, Homo sapiens
ctgtcaactgatatt

SEQ ID NO: 102784 - DNA, 15 bp, Homo sapiens
tctgtcaactgatat

SEQ ID NO: 102785 - DNA, 15 bp, Homo sapiens
ttctgtcaactgata

SEQ ID NO: 102786 - DNA, 15 bp, Homo sapiens
attctgtcaactgat

SEQ ID NO: 102787 - DNA, 15 bp, Homo sapiens
cattctgtcaactga

SEQ ID NO: 102788 - DNA, 15 bp, Homo sapiens
ccattctgtcaactg

SEQ ID NO: 102789 - DNA, 15 bp, Homo sapiens
accattctgtcaact

SEQ ID NO: 102790 - DNA, 15 bp, Homo sapiens
caccattctgtcaac

SEQ ID NO: 102791 - DNA, 15 bp, Homo sapiens
gcaccattctgtcaa

SEQ ID NO: 102792 - DNA, 15 bp, Homo sapiens
ggcaccattctgtca

SEQ ID NO: 102793 - DNA, 15 bp, Homo sapiens
tggcaccattctgtc

SEQ ID NO: 102794 - DNA, 15 bp, Homo sapiens
atggcaccattctgt

SEQ ID NO: 102795 - DNA, 15 bp, Homo sapiens
catggcaccattctg

SEQ ID NO: 102796 - DNA, 15 bp, Homo sapiens
gcatggcaccattct

SEQ ID NO: 102797 - DNA, 15 bp, Homo sapiens
cgcatggcaccattc

SEQ ID NO: 102798 - DNA, 15 bp, Homo sapiens
acgcatggcaccatt

SEQ ID NO: 102799 - DNA, 15 bp, Homo sapiens
cacgcatggcaccat

SEQ ID NO: 102800 - DNA, 15 bp, Homo sapiens
ccacgcatggcacca

SEQ ID NO: 102801 - DNA, 15 bp, Homo sapiens
gccacgcatggcacc

SEQ ID NO: 102802 - DNA, 15 bp, Homo sapiens
agccacgcatggcac

SEQ ID NO: 102803 - DNA, 15 bp, Homo sapiens
tagccacgcatggca

SEQ ID NO: 102804 - DNA, 15 bp, Homo sapiens
ttagccacgcatggc

SEQ ID NO: 102805 - DNA, 15 bp, Homo sapiens
gttagccacgcatgg

SEQ ID NO: 102806 - DNA, 15 bp, Homo sapiens
tgttagccacgcatg

SEQ ID NO: 102807 - DNA, 15 bp, Homo sapiens
atgttagccacgcat

SEQ ID NO: 102808 - DNA, 15 bp, Homo sapiens
gatgttagccacgca

SEQ ID NO: 102809 - DNA, 15 bp, Homo sapiens
ggatgttagccacgc

SEQ ID NO: 102810 - DNA, 15 bp, Homo sapiens
aggatgttagccacg

SEQ ID NO: 102811 - DNA, 15 bp, Homo sapiens
caggatgttagccac

SEQ ID NO: 102812 - DNA, 15 bp, Homo sapiens
gcaggatgttagcca

SEQ ID NO: 102813 - DNA, 15 bp, Homo sapiens
agcaggatgttagcc

SEQ ID NO: 102814 - DNA, 15 bp, Homo sapiens
aagcaggatgttagc

SEQ ID NO: 102815 - DNA, 15 bp, Homo sapiens
aaagcaggatgttag

SEQ ID NO: 102816 - DNA, 15 bp, Homo sapiens
caaagcaggatgtta

SEQ ID NO: 102817 - DNA, 15 bp, Homo sapiens
tcaaagcaggatgtt

SEQ ID NO: 102818 - DNA, 15 bp, Homo sapiens
atcaaagcaggatgt

SEQ ID NO: 102819 - DNA, 15 bp, Homo sapiens
aatcaaagcaggatg

SEQ ID NO: 102820 - DNA, 15 bp, Homo sapiens
gaatcaaagcaggat

SEQ ID NO: 102821 - DNA, 15 bp, Homo sapiens
ggaatcaaagcagga

SEQ ID NO: 102822 - DNA, 15 bp, Homo sapiens
gggaatcaaagcagg

SEQ ID NO: 102823 - DNA, 15 bp, Homo sapiens
agggaatcaaagcag

SEQ ID NO: 102824 - DNA, 15 bp, Homo sapiens
gagggaatcaaagca

SEQ ID NO: 102825 - DNA, 15 bp, Homo sapiens
agagggaatcaaagc

SEQ ID NO: 102826 - DNA, 15 bp, Homo sapiens
cagagggaatcaaag

SEQ ID NO: 102827 - DNA, 15 bp, Homo sapiens
tcagagggaatcaaa

SEQ ID NO: 102828 - DNA, 15 bp, Homo sapiens
atcagagggaatcaa

SEQ ID NO: 102829 - DNA, 15 bp, Homo sapiens
tatcagagggaatca

SEQ ID NO: 102830 - DNA, 15 bp, Homo sapiens
ttatcagagggaatc

SEQ ID NO: 102831 - DNA, 15 bp, Homo sapiens
cttatcagagggaat

SEQ ID NO: 102832 - DNA, 15 bp, Homo sapiens
gcttatcagagggaa

SEQ ID NO: 102833 - DNA, 15 bp, Homo sapiens
agcttatcagaggga

SEQ ID NO: 102834 - DNA, 15 bp, Homo sapiens
cagcttatcagaggg

SEQ ID NO: 102835 - DNA, 15 bp, Homo sapiens
acagcttatcagagg

SEQ ID NO: 102836 - DNA, 15 bp, Homo sapiens
aacagcttatcagag

SEQ ID NO: 102837 - DNA, 15 bp, Homo sapiens
gaacagcttatcaga

SEQ ID NO: 102838 - DNA, 15 bp, Homo sapiens
agaacagcttatcag

SEQ ID NO: 102839 - DNA, 15 bp, Homo sapiens
cagaacagcttatca

SEQ ID NO: 102840 - DNA, 15 bp, Homo sapiens
ccagaacagcttatc

SEQ ID NO: 102841 - DNA, 15 bp, Homo sapiens
accagaacagcttat

SEQ ID NO: 102842 - DNA, 15 bp, Homo sapiens
caccagaacagctta

SEQ ID NO: 102843 - DNA, 15 bp, Homo sapiens
ccaccagaacagctt

SEQ ID NO: 102844 - DNA, 15 bp, Homo sapiens
gccaccagaacagct

SEQ ID NO: 102845 - DNA, 15 bp, Homo sapiens
tgccaccagaacagc

SEQ ID NO: 102846 - DNA, 15 bp, Homo sapiens
ctgccaccagaacag

SEQ ID NO: 102847 - DNA, 15 bp, Homo sapiens
actgccaccagaaca

SEQ ID NO: 102848 - DNA, 15 bp, Homo sapiens
tactgccaccagaac

SEQ ID NO: 102849 - DNA, 15 bp, Homo sapiens
ttactgccaccagaa

SEQ ID NO: 102850 - DNA, 15 bp, Homo sapiens
gttactgccaccaga

SEQ ID NO: 102851 - DNA, 15 bp, Homo sapiens
tgttactgccaccag

SEQ ID NO: 102852 - DNA, 15 bp, Homo sapiens
atgttactgccacca

SEQ ID NO: 102853 - DNA, 15 bp, Homo sapiens
catgttactgccacc

SEQ ID NO: 102854 - DNA, 15 bp, Homo sapiens
gcatgttactgccac

SEQ ID NO: 102855 - DNA, 15 bp, Homo sapiens
tgcatgttactgcca

SEQ ID NO: 102856 - DNA, 15 bp, Homo sapiens
ttgcatgttactgcc

SEQ ID NO: 102857 - DNA, 15 bp, Homo sapiens
gttgcatgttactgc

SEQ ID NO: 102858 - DNA, 15 bp, Homo sapiens
tgttgcatgttactg

SEQ ID NO: 102859 - DNA, 15 bp, Homo sapiens
ttgttgcatgttact

SEQ ID NO: 102860 - DNA, 15 bp, Homo sapiens
tttgttgcatgttac

SEQ ID NO: 102861 - DNA, 15 bp, Homo sapiens
ttttgttgcatgtta

SEQ ID NO: 102862 - DNA, 15 bp, Homo sapiens
tttttgttgcatgtt

SEQ ID NO: 102863 - DNA, 15 bp, Homo sapiens
atttttgttgcatgt

SEQ ID NO: 102864 - DNA, 15 bp, Homo sapiens
catttttgttgcatg

SEQ ID NO: 102865 - DNA, 15 bp, Homo sapiens
acatttttgttgcat

SEQ ID NO: 102866 - DNA, 15 bp, Homo sapiens
cacatttttgttgca

SEQ ID NO: 102867 - DNA, 15 bp, Homo sapiens
ccacatttttgttgc

SEQ ID NO: 102868 - DNA, 15 bp, Homo sapiens
cccacatttttgttg

SEQ ID NO: 102869 - DNA, 15 bp, Homo sapiens
acccacatttttgtt

SEQ ID NO: 102870 - DNA, 15 bp, Homo sapiens
cacccacatttttgt

SEQ ID NO: 102871 - DNA, 15 bp, Homo sapiens
acacccacatttttg

SEQ ID NO: 102872 - DNA, 15 bp, Homo sapiens
gacacccacattttt

SEQ ID NO: 102873 - DNA, 15 bp, Homo sapiens
agacacccacatttt

SEQ ID NO: 102874 - DNA, 15 bp, Homo sapiens
gagacacccacattt

SEQ ID NO: 102875 - DNA, 15 bp, Homo sapiens
ggagacacccacatt

SEQ ID NO: 102876 - DNA, 15 bp, Homo sapiens
tggagacacccacat

SEQ ID NO: 102877 - DNA, 15 bp, Homo sapiens
ctggagacacccaca

SEQ ID NO: 102878 - DNA, 15 bp, Homo sapiens
cctggagacacccac

SEQ ID NO: 102879 - DNA, 15 bp, Homo sapiens
gcctggagacaccca

SEQ ID NO: 102880 - DNA, 15 bp, Homo sapiens
tgcctggagacaccc

SEQ ID NO: 102881 - DNA, 15 bp, Homo sapiens
gtgcctggagacacc

SEQ ID NO: 102882 - DNA, 15 bp, Homo sapiens
cgtgcctggagacac

SEQ ID NO: 102883 - DNA, 15 bp, Homo sapiens
ccgtgcctggagaca

SEQ ID NO: 102884 - DNA, 15 bp, Homo sapiens
cccgtgcctggagac

SEQ ID NO: 102885 - DNA, 15 bp, Homo sapiens
tcccgtgcctggaga

SEQ ID NO: 102886 - DNA, 15 bp, Homo sapiens
ttcccgtgcctggag

SEQ ID NO: 102887 - DNA, 15 bp, Homo sapiens
tttcccgtgcctgga

SEQ ID NO: 102888 - DNA, 15 bp, Homo sapiens
gtttcccgtgcctgg

SEQ ID NO: 102889 - DNA, 15 bp, Homo sapiens
agtttcccgtgcctg

SEQ ID NO: 102890 - DNA, 15 bp, Homo sapiens
aagtttcccgtgcct

SEQ ID NO: 102891 - DNA, 15 bp, Homo sapiens
caagtttcccgtgcc

SEQ ID NO: 102892 - DNA, 15 bp, Homo sapiens
ccaagtttcccgtgc

SEQ ID NO: 102893 - DNA, 15 bp, Homo sapiens
accaagtttcccgtg

SEQ ID NO: 102894 - DNA, 15 bp, Homo sapiens
aaccaagtttcccgt

SEQ ID NO: 102895 - DNA, 15 bp, Homo sapiens
gaaccaagtttcccg

SEQ ID NO: 102896 - DNA, 15 bp, Homo sapiens
ggaaccaagtttccc

SEQ ID NO: 102897 - DNA, 15 bp, Homo sapiens
tggaaccaagtttcc

SEQ ID NO: 102898 - DNA, 15 bp, Homo sapiens
atggaaccaagtttc

SEQ ID NO: 102899 - DNA, 15 bp, Homo sapiens
aatggaaccaagttt

SEQ ID NO: 102900 - DNA, 15 bp, Homo sapiens
caatggaaccaagtt

SEQ ID NO: 102901 - DNA, 15 bp, Homo sapiens
acaatggaaccaagt

SEQ ID NO: 102902 - DNA, 15 bp, Homo sapiens
aacaatggaaccaag

SEQ ID NO: 102903 - DNA, 15 bp, Homo sapiens
taacaatggaaccaa

SEQ ID NO: 102904 - DNA, 15 bp, Homo sapiens
ataacaatggaacca

SEQ ID NO: 102905 - DNA, 15 bp, Homo sapiens
tataacaatggaacc

SEQ ID NO: 102906 - DNA, 15 bp, Homo sapiens
atataacaatggaac

SEQ ID NO: 102907 - DNA, 15 bp, Homo sapiens
aatataacaatggaa

SEQ ID NO: 102908 - DNA, 15 bp, Homo sapiens
caatataacaatgga

SEQ ID NO: 102909 - DNA, 15 bp, Homo sapiens
acaatataacaatgg

SEQ ID NO: 102910 - DNA, 15 bp, Homo sapiens
gacaatataacaatg

SEQ ID NO: 102911 - DNA, 15 bp, Homo sapiens
ggacaatataacaat

SEQ ID NO: 102912 - DNA, 15 bp, Homo sapiens
aggacaatataacaa

SEQ ID NO: 102913 - DNA, 15 bp, Homo sapiens
taggacaatataaca

SEQ ID NO: 102914 - DNA, 15 bp, Homo sapiens
ataggacaatataac

SEQ ID NO: 102915 - DNA, 15 bp, Homo sapiens
cataggacaatataa

SEQ ID NO: 102916 - DNA, 15 bp, Homo sapiens
gcataggacaatata

SEQ ID NO: 102917 - DNA, 15 bp, Homo sapiens
agcataggacaatat

SEQ ID NO: 102918 - DNA, 15 bp, Homo sapiens
aagcataggacaata

SEQ ID NO: 102919 - DNA, 15 bp, Homo sapiens
gaagcataggacaat

SEQ ID NO: 102920 - DNA, 15 bp, Homo sapiens
cgaagcataggacaa

SEQ ID NO: 102921 - DNA, 15 bp, Homo sapiens
tcgaagcataggaca

SEQ ID NO: 102922 - DNA, 15 bp, Homo sapiens
ctcgaagcataggac

SEQ ID NO: 102923 - DNA, 15 bp, Homo sapiens
gctcgaagcatagga

SEQ ID NO: 102924 - DNA, 15 bp, Homo sapiens
ggctcgaagcatagg

SEQ ID NO: 102925 - DNA, 15 bp, Homo sapiens
tggctcgaagcatag

SEQ ID NO: 102926 - DNA, 15 bp, Homo sapiens
atggctcgaagcata

SEQ ID NO: 102927 - DNA, 15 bp, Homo sapiens
catggctcgaagcat

SEQ ID NO: 102928 - DNA, 15 bp, Homo sapiens
ccatggctcgaagca

SEQ ID NO: 102929 - DNA, 15 bp, Homo sapiens
cccatggctcgaagc

SEQ ID NO: 102930 - DNA, 15 bp, Homo sapiens
acccatggctcgaag

SEQ ID NO: 102931 - DNA, 15 bp, Homo sapiens
gacccatggctcgaa

SEQ ID NO: 102932 - DNA, 15 bp, Homo sapiens
agacccatggctcga

SEQ ID NO: 102933 - DNA, 15 bp, Homo sapiens
tagacccatggctcg

SEQ ID NO: 102934 - DNA, 15 bp, Homo sapiens
gtagacccatggctc

SEQ ID NO: 102935 - DNA, 15 bp, Homo sapiens
tgtagacccatggct

SEQ ID NO: 102936 - DNA, 15 bp, Homo sapiens
ctgtagacccatggc

SEQ ID NO: 102937 - DNA, 15 bp, Homo sapiens
cctgtagacccatgg

SEQ ID NO: 102938 - DNA, 15 bp, Homo sapiens
ccctgtagacccatg

SEQ ID NO: 102939 - DNA, 15 bp, Homo sapiens
accctgtagacccat

SEQ ID NO: 102940 - DNA, 15 bp, Homo sapiens
gaccctgtagaccca

SEQ ID NO: 102941 - DNA, 15 bp, Homo sapiens
tgaccctgtagaccc

SEQ ID NO: 102942 - DNA, 15 bp, Homo sapiens
atgaccctgtagacc

SEQ ID NO: 102943 - DNA, 15 bp, Homo sapiens
gatgaccctgtagac

SEQ ID NO: 102944 - DNA, 15 bp, Homo sapiens
ggatgaccctgtaga

SEQ ID NO: 102945 - DNA, 15 bp, Homo sapiens
aggatgaccctgtag

SEQ ID NO: 102946 - DNA, 15 bp, Homo sapiens
aaggatgaccctgta

SEQ ID NO: 102947 - DNA, 15 bp, Homo sapiens
taaggatgaccctgt

SEQ ID NO: 102948 - DNA, 15 bp, Homo sapiens
ataaggatgaccctg

SEQ ID NO: 102949 - DNA, 15 bp, Homo sapiens
cataaggatgaccct

SEQ ID NO: 102950 - DNA, 15 bp, Homo sapiens
tcataaggatgaccc

SEQ ID NO: 102951 - DNA, 15 bp, Homo sapiens
ctcataaggatgacc

SEQ ID NO: 102952 - DNA, 15 bp, Homo sapiens
tctcataaggatgac

SEQ ID NO: 102953 - DNA, 15 bp, Homo sapiens
gtctcataaggatga

SEQ ID NO: 102954 - DNA, 15 bp, Homo sapiens
agtctcataaggatg

SEQ ID NO: 102955 - DNA, 15 bp, Homo sapiens
gagtctcataaggat

SEQ ID NO: 102956 - DNA, 15 bp, Homo sapiens
agagtctcataagga

SEQ ID NO: 102957 - DNA, 15 bp, Homo sapiens
aagagtctcataagg

SEQ ID NO: 102958 - DNA, 15 bp, Homo sapiens
taagagtctcataag

SEQ ID NO: 102959 - DNA, 15 bp, Homo sapiens
ttaagagtctcataa

SEQ ID NO: 102960 - DNA, 15 bp, Homo sapiens
tttaagagtctcata

SEQ ID NO: 102961 - DNA, 15 bp, Homo sapiens
atttaagagtctcat

SEQ ID NO: 102962 - DNA, 15 bp, Homo sapiens
tatttaagagtctca

SEQ ID NO: 102963 - DNA, 15 bp, Homo sapiens
atatttaagagtctc

SEQ ID NO: 102964 - DNA, 15 bp, Homo sapiens
tatatttaagagtct

SEQ ID NO: 102965 - DNA, 15 bp, Homo sapiens
gtatatttaagagtc

SEQ ID NO: 102966 - DNA, 15 bp, Homo sapiens
agtatatttaagagt

SEQ ID NO: 102967 - DNA, 15 bp, Homo sapiens
aagtatatttaagag

SEQ ID NO: 102968 - DNA, 15 bp, Homo sapiens
taagtatatttaaga

SEQ ID NO: 102969 - DNA, 15 bp, Homo sapiens
ctaagtatatttaag

SEQ ID NO: 102970 - DNA, 15 bp, Homo sapiens
tctaagtatatttaa

SEQ ID NO: 102971 - DNA, 15 bp, Homo sapiens
atctaagtatattta

SEQ ID NO: 102972 - DNA, 15 bp, Homo sapiens
gatctaagtatattt

SEQ ID NO: 102973 - DNA, 15 bp, Homo sapiens
ggatctaagtatatt

SEQ ID NO: 102974 - DNA, 15 bp, Homo sapiens
aggatctaagtatat

SEQ ID NO: 102975 - DNA, 15 bp, Homo sapiens
caggatctaagtata

SEQ ID NO: 102976 - DNA, 15 bp, Homo sapiens
ccaggatctaagtat

SEQ ID NO: 102977 - DNA, 15 bp, Homo sapiens
accaggatctaagta

SEQ ID NO: 102978 - DNA, 15 bp, Homo sapiens
taccaggatctaagt

SEQ ID NO: 102979 - DNA, 15 bp, Homo sapiens
ttaccaggatctaag

SEQ ID NO: 102980 - DNA, 15 bp, Homo sapiens
cttaccaggatctaa

SEQ ID NO: 102981 - DNA, 15 bp, Homo sapiens
tcttaccaggatcta

SEQ ID NO: 102982 - DNA, 15 bp, Homo sapiens
ctcttaccaggatct

SEQ ID NO: 102983 - DNA, 15 bp, Homo sapiens
cctcttaccaggatc

SEQ ID NO: 102984 - DNA, 15 bp, Homo sapiens
gcctcttaccaggat

SEQ ID NO: 102985 - DNA, 15 bp, Homo sapiens
tgcctcttaccagga

SEQ ID NO: 102986 - DNA, 15 bp, Homo sapiens
ttgcctcttaccagg

SEQ ID NO: 102987 - DNA, 15 bp, Homo sapiens
tttgcctcttaccag

SEQ ID NO: 102988 - DNA, 15 bp, Homo sapiens
ctttgcctcttacca

SEQ ID NO: 102989 - DNA, 15 bp, Homo sapiens
tctttgcctcttacc

SEQ ID NO: 102990 - DNA, 15 bp, Homo sapiens
ttctttgcctcttac

SEQ ID NO: 102991 - DNA, 15 bp, Homo sapiens
attctttgcctctta

SEQ ID NO: 102992 - DNA, 15 bp, Homo sapiens
gattctttgcctctt

SEQ ID NO: 102993 - DNA, 15 bp, Homo sapiens
tgattctttgcctct

SEQ ID NO: 102994 - DNA, 15 bp, Homo sapiens
ttgattctttgcctc

SEQ ID NO: 102995 - DNA, 15 bp, Homo sapiens
gttgattctttgcct

SEQ ID NO: 102996 - DNA, 15 bp, Homo sapiens
tgttgattctttgcc

SEQ ID NO: 102997 - DNA, 15 bp, Homo sapiens
ctgttgattctttgc

SEQ ID NO: 102998 - DNA, 15 bp, Homo sapiens
gctgttgattctttg

SEQ ID NO: 102999 - DNA, 15 bp, Homo sapiens
ggctgttgattcttt

SEQ ID NO: 103000 - DNA, 15 bp, Homo sapiens
tggctgttgattctt

SEQ ID NO: 103001 - DNA, 15 bp, Homo sapiens
ttggctgttgattct

SEQ ID NO: 103002 - DNA, 15 bp, Homo sapiens
tttggctgttgattc

SEQ ID NO: 103003 - DNA, 15 bp, Homo sapiens
gtttggctgttgatt

SEQ ID NO: 103004 - DNA, 15 bp, Homo sapiens
agtttggctgttgat

SEQ ID NO: 103005 - DNA, 15 bp, Homo sapiens
cagtttggctgttga

SEQ ID NO: 103006 - DNA, 15 bp, Homo sapiens
gcagtttggctgttg

SEQ ID NO: 103007 - DNA, 15 bp, Homo sapiens
agcagtttggctgtt

SEQ ID NO: 103008 - DNA, 15 bp, Homo sapiens
cagcagtttggctgt

SEQ ID NO: 103009 - DNA, 15 bp, Homo sapiens
ccagcagtttggctg

SEQ ID NO: 103010 - DNA, 15 bp, Homo sapiens
cccagcagtttggct

SEQ ID NO: 103011 - DNA, 15 bp, Homo sapiens
ccccagcagtttggc

SEQ ID NO: 103012 - DNA, 15 bp, Homo sapiens
gccccagcagtttgg

SEQ ID NO: 103013 - DNA, 15 bp, Homo sapiens
agccccagcagtttg

SEQ ID NO: 103014 - DNA, 15 bp, Homo sapiens
cagccccagcagttt

SEQ ID NO: 103015 - DNA, 15 bp, Homo sapiens
gcagccccagcagtt

SEQ ID NO: 103016 - DNA, 15 bp, Homo sapiens
tgcagccccagcagt

SEQ ID NO: 103017 - DNA, 15 bp, Homo sapiens
ttgcagccccagcag

SEQ ID NO: 103018 - DNA, 15 bp, Homo sapiens
cttgcagccccagca

SEQ ID NO: 103019 - DNA, 15 bp, Homo sapiens
gcttgcagccccagc

SEQ ID NO: 103020 - DNA, 15 bp, Homo sapiens
agcttgcagccccag

SEQ ID NO: 103021 - DNA, 15 bp, Homo sapiens
cagcttgcagcccca

SEQ ID NO: 103022 - DNA, 15 bp, Homo sapiens
gcagcttgcagcccc

SEQ ID NO: 103023 - DNA, 15 bp, Homo sapiens
agcagcttgcagccc

SEQ ID NO: 103024 - DNA, 15 bp, Homo sapiens
cagcagcttgcagcc

SEQ ID NO: 103025 - DNA, 15 bp, Homo sapiens
tcagcagcttgcagc

SEQ ID NO: 103026 - DNA, 15 bp, Homo sapiens
ttcagcagcttgcag

SEQ ID NO: 103027 - DNA, 15 bp, Homo sapiens
cttcagcagcttgca

SEQ ID NO: 103028 - DNA, 15 bp, Homo sapiens
gcttcagcagcttgc

SEQ ID NO: 103029 - DNA, 15 bp, Homo sapiens
ggcttcagcagcttg

SEQ ID NO: 103030 - DNA, 15 bp, Homo sapiens
tggcttcagcagctt

SEQ ID NO: 103031 - DNA, 15 bp, Homo sapiens
ctggcttcagcagct

SEQ ID NO: 103032 - DNA, 15 bp, Homo sapiens
cctggcttcagcagc

SEQ ID NO: 103033 - DNA, 15 bp, Homo sapiens
ccctggcttcagcag

SEQ ID NO: 103034 - DNA, 15 bp, Homo sapiens
gccctggcttcagca

SEQ ID NO: 103035 - DNA, 15 bp, Homo sapiens
tgccctggcttcagc

SEQ ID NO: 103036 - DNA, 15 bp, Homo sapiens
atgccctggcttcag

SEQ ID NO: 103037 - DNA, 15 bp, Homo sapiens
catgccctggcttca

SEQ ID NO: 103038 - DNA, 15 bp, Homo sapiens
ccatgccctggcttc

SEQ ID NO: 103039 - DNA, 15 bp, Homo sapiens
cccatgccctggctt

SEQ ID NO: 103040 - DNA, 15 bp, Homo sapiens
tcccatgccctggct

SEQ ID NO: 103041 - DNA, 15 bp, Homo sapiens
atcccatgccctggc

SEQ ID NO: 103042 - DNA, 15 bp, Homo sapiens
aatcccatgccctgg

SEQ ID NO: 103043 - DNA, 15 bp, Homo sapiens
taatcccatgccctg

SEQ ID NO: 103044 - DNA, 15 bp, Homo sapiens
ttaatcccatgccct

SEQ ID NO: 103045 - DNA, 15 bp, Homo sapiens
tttaatcccatgccc

SEQ ID NO: 103046 - DNA, 15 bp, Homo sapiens
ctttaatcccatgcc

SEQ ID NO: 103047 - DNA, 15 bp, Homo sapiens
tctttaatcccatgc

SEQ ID NO: 103048 - DNA, 15 bp, Homo sapiens
ctctttaatcccatg

SEQ ID NO: 103049 - DNA, 15 bp, Homo sapiens
tctctttaatcccat

SEQ ID NO: 103050 - DNA, 15 bp, Homo sapiens
atctctttaatccca

SEQ ID NO: 103051 - DNA, 15 bp, Homo sapiens
aatctctttaatccc

SEQ ID NO: 103052 - DNA, 15 bp, Homo sapiens
caatctctttaatcc

SEQ ID NO: 103053 - DNA, 15 bp, Homo sapiens
acaatctctttaatc

SEQ ID NO: 103054 - DNA, 15 bp, Homo sapiens
cacaatctctttaat

SEQ ID NO: 103055 - DNA, 15 bp, Homo sapiens
gcacaatctctttaa

SEQ ID NO: 103056 - DNA, 15 bp, Homo sapiens
cgcacaatctcttta

SEQ ID NO: 103057 - DNA, 15 bp, Homo sapiens
acgcacaatctcttt

SEQ ID NO: 103058 - DNA, 15 bp, Homo sapiens
aacgcacaatctctt

SEQ ID NO: 103059 - DNA, 15 bp, Homo sapiens
gaacgcacaatctct

SEQ ID NO: 103060 - DNA, 15 bp, Homo sapiens
tgaacgcacaatctc

SEQ ID NO: 103061 - DNA, 15 bp, Homo sapiens
ttgaacgcacaatct

SEQ ID NO: 103062 - DNA, 15 bp, Homo sapiens
tttgaacgcacaatc

SEQ ID NO: 103063 - DNA, 15 bp, Homo sapiens
gtttgaacgcacaat

SEQ ID NO: 103064 - DNA, 15 bp, Homo sapiens
ggtttgaacgcacaa

SEQ ID NO: 103065 - DNA, 15 bp, Homo sapiens
aggtttgaacgcaca

SEQ ID NO: 103066 - DNA, 15 bp, Homo sapiens
taggtttgaacgcac

SEQ ID NO: 103067 - DNA, 15 bp, Homo sapiens
ctaggtttgaacgca

SEQ ID NO: 103068 - DNA, 15 bp, Homo sapiens
cctaggtttgaacgc

SEQ ID NO: 103069 - DNA, 15 bp, Homo sapiens
ccctaggtttgaacg

SEQ ID NO: 103070 - DNA, 15 bp, Homo sapiens
tccctaggtttgaac

SEQ ID NO: 103071 - DNA, 15 bp, Homo sapiens
ttccctaggtttgaa

SEQ ID NO: 103072 - DNA, 15 bp, Homo sapiens
cttccctaggtttga

SEQ ID NO: 103073 - DNA, 15 bp, Homo sapiens
gcttccctaggtttg

SEQ ID NO: 103074 - DNA, 15 bp, Homo sapiens
ggcttccctaggttt

SEQ ID NO: 103075 - DNA, 15 bp, Homo sapiens
aggcttccctaggtt

SEQ ID NO: 103076 - DNA, 15 bp, Homo sapiens
caggcttccctaggt

SEQ ID NO: 103077 - DNA, 15 bp, Homo sapiens
acaggcttccctagg

SEQ ID NO: 103078 - DNA, 15 bp, Homo sapiens
cacaggcttccctag

SEQ ID NO: 103079 - DNA, 15 bp, Homo sapiens
gcacaggcttcccta

SEQ ID NO: 103080 - DNA, 15 bp, Homo sapiens
ggcacaggcttccct

SEQ ID NO: 103081 - DNA, 15 bp, Homo sapiens
gggcacaggcttccc

SEQ ID NO: 103082 - DNA, 15 bp, Homo sapiens
tgggcacaggcttcc

SEQ ID NO: 103083 - DNA, 15 bp, Homo sapiens
atgggcacaggcttc

SEQ ID NO: 103084 - DNA, 15 bp, Homo sapiens
aatgggcacaggctt

SEQ ID NO: 103085 - DNA, 15 bp, Homo sapiens
aaatgggcacaggct

SEQ ID NO: 103086 - DNA, 15 bp, Homo sapiens
caaatgggcacaggc

SEQ ID NO: 103087 - DNA, 15 bp, Homo sapiens
acaaatgggcacagg

SEQ ID NO: 103088 - DNA, 15 bp, Homo sapiens
gacaaatgggcacag

SEQ ID NO: 103089 - DNA, 15 bp, Homo sapiens
ggacaaatgggcaca

SEQ ID NO: 103090 - DNA, 15 bp, Homo sapiens
aggacaaatgggcac

SEQ ID NO: 103091 - DNA, 15 bp, Homo sapiens
caggacaaatgggca

SEQ ID NO: 103092 - DNA, 15 bp, Homo sapiens
tcaggacaaatgggc

SEQ ID NO: 103093 - DNA, 15 bp, Homo sapiens
gtcaggacaaatggg

SEQ ID NO: 103094 - DNA, 15 bp, Homo sapiens
agtcaggacaaatgg

SEQ ID NO: 103095 - DNA, 15 bp, Homo sapiens
cagtcaggacaaatg

SEQ ID NO: 103096 - DNA, 15 bp, Homo sapiens
acagtcaggacaaat

SEQ ID NO: 103097 - DNA, 15 bp, Homo sapiens
gacagtcaggacaaa

SEQ ID NO: 103098 - DNA, 15 bp, Homo sapiens
agacagtcaggacaa

SEQ ID NO: 103099 - DNA, 15 bp, Homo sapiens
cagacagtcaggaca

SEQ ID NO: 103100 - DNA, 15 bp, Homo sapiens
gcagacagtcaggac

SEQ ID NO: 103101 - DNA, 15 bp, Homo sapiens
agcagacagtcagga

SEQ ID NO: 103102 - DNA, 15 bp, Homo sapiens
tagcagacagtcagg

SEQ ID NO: 103103 - DNA, 15 bp, Homo sapiens
ttagcagacagtcag

SEQ ID NO: 103104 - DNA, 15 bp, Homo sapiens
gttagcagacagtca

SEQ ID NO: 103105 - DNA, 15 bp, Homo sapiens
tgttagcagacagtc

SEQ ID NO: 103106 - DNA, 15 bp, Homo sapiens
atgttagcagacagt

SEQ ID NO: 103107 - DNA, 15 bp, Homo sapiens
catgttagcagacag

SEQ ID NO: 103108 - DNA, 15 bp, Homo sapiens
ccatgttagcagaca

SEQ ID NO: 103109 - DNA, 15 bp, Homo sapiens
accatgttagcagac

SEQ ID NO: 103110 - DNA, 15 bp, Homo sapiens
taccatgttagcaga

SEQ ID NO: 103111 - DNA, 15 bp, Homo sapiens
gtaccatgttagcag

SEQ ID NO: 103112 - DNA, 15 bp, Homo sapiens
tgtaccatgttagca

SEQ ID NO: 103113 - DNA, 15 bp, Homo sapiens
gtgtaccatgttagc

SEQ ID NO: 103114 - DNA, 15 bp, Homo sapiens
agtgtaccatgttag

SEQ ID NO: 103115 - DNA, 15 bp, Homo sapiens
cagtgtaccatgtta

SEQ ID NO: 103116 - DNA, 15 bp, Homo sapiens
gcagtgtaccatgtt

SEQ ID NO: 103117 - DNA, 15 bp, Homo sapiens
tgcagtgtaccatgt

SEQ ID NO: 103118 - DNA, 15 bp, Homo sapiens
atgcagtgtaccatg

SEQ ID NO: 103119 - DNA, 15 bp, Homo sapiens
gatgcagtgtaccat

SEQ ID NO: 103120 - DNA, 15 bp, Homo sapiens
agatgcagtgtacca

SEQ ID NO: 103121 - DNA, 15 bp, Homo sapiens
gagatgcagtgtacc

SEQ ID NO: 103122 - DNA, 15 bp, Homo sapiens
tgagatgcagtgtac

SEQ ID NO: 103123 - DNA, 15 bp, Homo sapiens
ttgagatgcagtgta

SEQ ID NO: 103124 - DNA, 15 bp, Homo sapiens
cttgagatgcagtgt

SEQ ID NO: 103125 - DNA, 15 bp, Homo sapiens
tcttgagatgcagtg

SEQ ID NO: 103126 - DNA, 15 bp, Homo sapiens
atcttgagatgcagt

SEQ ID NO: 103127 - DNA, 15 bp, Homo sapiens
catcttgagatgcag

SEQ ID NO: 103128 - DNA, 15 bp, Homo sapiens
acatcttgagatgca

SEQ ID NO: 103129 - DNA, 15 bp, Homo sapiens
aacatcttgagatgc

SEQ ID NO: 103130 - DNA, 15 bp, Homo sapiens
aaacatcttgagatg

SEQ ID NO: 103131 - DNA, 15 bp, Homo sapiens
taaacatcttgagat

SEQ ID NO: 103132 - DNA, 15 bp, Homo sapiens
ataaacatcttgaga

SEQ ID NO: 103133 - DNA, 15 bp, Homo sapiens
gataaacatcttgag

SEQ ID NO: 103134 - DNA, 15 bp, Homo sapiens
agataaacatcttga

SEQ ID NO: 103135 - DNA, 15 bp, Homo sapiens
cagataaacatcttg

SEQ ID NO: 103136 - DNA, 15 bp, Homo sapiens
tcagataaacatctt

SEQ ID NO: 103137 - DNA, 15 bp, Homo sapiens
gtcagataaacatct

SEQ ID NO: 103138 - DNA, 15 bp, Homo sapiens
tgtcagataaacatc

SEQ ID NO: 103139 - DNA, 15 bp, Homo sapiens
gtgtcagataaacat

SEQ ID NO: 103140 - DNA, 15 bp, Homo sapiens
tgtgtcagataaaca

SEQ ID NO: 103141 - DNA, 15 bp, Homo sapiens
ttgtgtcagataaac

SEQ ID NO: 103142 - DNA, 15 bp, Homo sapiens
cttgtgtcagataaa

SEQ ID NO: 103143 - DNA, 15 bp, Homo sapiens
acttgtgtcagataa

SEQ ID NO: 103144 - DNA, 15 bp, Homo sapiens
cacttgtgtcagata

SEQ ID NO: 103145 - DNA, 15 bp, Homo sapiens
acacttgtgtcagat

SEQ ID NO: 103146 - DNA, 15 bp, Homo sapiens
tacacttgtgtcaga

SEQ ID NO: 103147 - DNA, 15 bp, Homo sapiens
atacacttgtgtcag

SEQ ID NO: 103148 - DNA, 15 bp, Homo sapiens
aatacacttgtgtca

SEQ ID NO: 103149 - DNA, 15 bp, Homo sapiens
taatacacttgtgtc

SEQ ID NO: 103150 - DNA, 15 bp, Homo sapiens
ataatacacttgtgt

SEQ ID NO: 103151 - DNA, 15 bp, Homo sapiens
aataatacacttgtg

SEQ ID NO: 103152 - DNA, 15 bp, Homo sapiens
aaataatacacttgt

SEQ ID NO: 103153 - DNA, 15 bp, Homo sapiens
gaaataatacacttg

SEQ ID NO: 103154 - DNA, 15 bp, Homo sapiens
agaaataatacactt

SEQ ID NO: 103155 - DNA, 15 bp, Homo sapiens
cagaaataatacact

SEQ ID NO: 103156 - DNA, 15 bp, Homo sapiens
ccagaaataatacac

SEQ ID NO: 103157 - DNA, 15 bp, Homo sapiens
gccagaaataataca

SEQ ID NO: 103158 - DNA, 15 bp, Homo sapiens
agccagaaataatac

SEQ ID NO: 103159 - DNA, 15 bp, Homo sapiens
aagccagaaataata

SEQ ID NO: 103160 - DNA, 15 bp, Homo sapiens
aaagccagaaataat

SEQ ID NO: 103161 - DNA, 15 bp, Homo sapiens
aaaagccagaaataa

SEQ ID NO: 103162 - DNA, 15 bp, Homo sapiens
aaaaagccagaaata

SEQ ID NO: 103163 - DNA, 15 bp, Homo sapiens
caaaaagccagaaat

SEQ ID NO: 103164 - DNA, 15 bp, Homo sapiens
tcaaaaagccagaaa

SEQ ID NO: 103165 - DNA, 15 bp, Homo sapiens
ttcaaaaagccagaa

SEQ ID NO: 103166 - DNA, 15 bp, Homo sapiens
attcaaaaagccaga

SEQ ID NO: 103167 - DNA, 15 bp, Homo sapiens
aattcaaaaagccag

SEQ ID NO: 103168 - DNA, 15 bp, Homo sapiens
taattcaaaaagcca

SEQ ID NO: 103169 - DNA, 15 bp, Homo sapiens
ttaattcaaaaagcc

SEQ ID NO: 103170 - DNA, 15 bp, Homo sapiens
attaattcaaaaagc

SEQ ID NO: 103171 - DNA, 15 bp, Homo sapiens
gattaattcaaaaag

SEQ ID NO: 103172 - DNA, 15 bp, Homo sapiens
agattaattcaaaaa

SEQ ID NO: 103173 - DNA, 15 bp, Homo sapiens
tagattaattcaaaa

SEQ ID NO: 103174 - DNA, 15 bp, Homo sapiens
ctagattaattcaaa

SEQ ID NO: 103175 - DNA, 15 bp, Homo sapiens
tctagattaattcaa

SEQ ID NO: 103176 - DNA, 15 bp, Homo sapiens
ttctagattaattca

SEQ ID NO: 103177 - DNA, 15 bp, Homo sapiens
tttctagattaattc

SEQ ID NO: 103178 - DNA, 15 bp, Homo sapiens
ttttctagattaatt

SEQ ID NO: 103179 - DNA, 15 bp, Homo sapiens
attttctagattaat

SEQ ID NO: 103180 - DNA, 15 bp, Homo sapiens
cattttctagattaa

SEQ ID NO: 103181 - DNA, 15 bp, Homo sapiens
tcattttctagatta

SEQ ID NO: 103182 - DNA, 15 bp, Homo sapiens
ttcattttctagatt

SEQ ID NO: 103183 - DNA, 15 bp, Homo sapiens
tttcattttctagat

SEQ ID NO: 103184 - DNA, 15 bp, Homo sapiens
ttttcattttctaga

SEQ ID NO: 103185 - DNA, 15 bp, Homo sapiens
cttttcattttctag

SEQ ID NO: 103186 - DNA, 15 bp, Homo sapiens
tcttttcattttcta

SEQ ID NO: 103187 - DNA, 15 bp, Homo sapiens
atcttttcattttct

SEQ ID NO: 103188 - DNA, 15 bp, Homo sapiens
catcttttcattttc

SEQ ID NO: 103189 - DNA, 15 bp, Homo sapiens
ccatcttttcatttt

SEQ ID NO: 103190 - DNA, 15 bp, Homo sapiens
tccatcttttcattt

SEQ ID NO: 103191 - DNA, 15 bp, Homo sapiens
ctccatcttttcatt

SEQ ID NO: 103192 - DNA, 15 bp, Homo sapiens
actccatcttttcat

SEQ ID NO: 103193 - DNA, 15 bp, Homo sapiens
aactccatcttttca

SEQ ID NO: 103194 - DNA, 15 bp, Homo sapiens
caactccatcttttc

SEQ ID NO: 103195 - DNA, 15 bp, Homo sapiens
acaactccatctttt

SEQ ID NO: 103196 - DNA, 15 bp, Homo sapiens
tacaactccatcttt

SEQ ID NO: 103197 - DNA, 15 bp, Homo sapiens
atacaactccatctt

SEQ ID NO: 103198 - DNA, 15 bp, Homo sapiens
aatacaactccatct

SEQ ID NO: 103199 - DNA, 15 bp, Homo sapiens
aaatacaactccatc

SEQ ID NO: 103200 - DNA, 15 bp, Homo sapiens
aaaatacaactccat

SEQ ID NO: 103201 - DNA, 15 bp, Homo sapiens
caaaatacaactcca

SEQ ID NO: 103202 - DNA, 15 bp, Homo sapiens
tcaaaatacaactcc

SEQ ID NO: 103203 - DNA, 15 bp, Homo sapiens
gtcaaaatacaactc

SEQ ID NO: 103204 - DNA, 15 bp, Homo sapiens
tgtcaaaatacaact

SEQ ID NO: 103205 - DNA, 15 bp, Homo sapiens
ttgtcaaaatacaac

SEQ ID NO: 103206 - DNA, 15 bp, Homo sapiens
tttgtcaaaatacaa

SEQ ID NO: 103207 - DNA, 15 bp, Homo sapiens
ttttgtcaaaataca

SEQ ID NO: 103208 - DNA, 15 bp, Homo sapiens
tttttgtcaaaatac

SEQ ID NO: 103209 - DNA, 15 bp, Homo sapiens
atttttgtcaaaata

SEQ ID NO: 103210 - DNA, 15 bp, Homo sapiens
catttttgtcaaaat

SEQ ID NO: 103211 - DNA, 15 bp, Homo sapiens
acatttttgtcaaaa

SEQ ID NO: 103212 - DNA, 15 bp, Homo sapiens
aacatttttgtcaaa

SEQ ID NO: 103213 - DNA, 15 bp, Homo sapiens
aaacatttttgtcaa

SEQ ID NO: 103214 - DNA, 15 bp, Homo sapiens
caaacatttttgtca

SEQ ID NO: 103215 - DNA, 15 bp, Homo sapiens
acaaacatttttgtc

SEQ ID NO: 103216 - DNA, 15 bp, Homo sapiens
tacaaacatttttgt

SEQ ID NO: 103217 - DNA, 15 bp, Homo sapiens
gtacaaacatttttg

SEQ ID NO: 103218 - DNA, 15 bp, Homo sapiens
agtacaaacattttt

SEQ ID NO: 103219 - DNA, 15 bp, Homo sapiens
aagtacaaacatttt

SEQ ID NO: 103220 - DNA, 15 bp, Homo sapiens
aaagtacaaacattt

SEQ ID NO: 103221 - DNA, 15 bp, Homo sapiens
aaaagtacaaacatt

SEQ ID NO: 103222 - DNA, 15 bp, Homo sapiens
aaaaagtacaaacat

SEQ ID NO: 103223 - DNA, 15 bp, Homo sapiens
taaaaagtacaaaca

SEQ ID NO: 103224 - DNA, 15 bp, Homo sapiens
ttaaaaagtacaaac

SEQ ID NO: 103225 - DNA, 15 bp, Homo sapiens
attaaaaagtacaaa

SEQ ID NO: 103226 - DNA, 15 bp, Homo sapiens
cattaaaaagtacaa

SEQ ID NO: 103227 - DNA, 15 bp, Homo sapiens
acattaaaaagtaca

SEQ ID NO: 103228 - DNA, 15 bp, Homo sapiens
aacattaaaaagtac

SEQ ID NO: 103229 - DNA, 15 bp, Homo sapiens
taacattaaaaagta

SEQ ID NO: 103230 - DNA, 15 bp, Homo sapiens
ataacattaaaaagt

SEQ ID NO: 103231 - DNA, 15 bp, Homo sapiens
aataacattaaaaag

SEQ ID NO: 103232 - DNA, 15 bp, Homo sapiens
aaataacattaaaaa

SEQ ID NO: 103233 - DNA, 15 bp, Homo sapiens
caaataacattaaaa

SEQ ID NO: 103234 - DNA, 15 bp, Homo sapiens
ccaaataacattaaa

SEQ ID NO: 103235 - DNA, 15 bp, Homo sapiens
tccaaataacattaa

SEQ ID NO: 103236 - DNA, 15 bp, Homo sapiens
ttccaaataacatta

SEQ ID NO: 103237 - DNA, 15 bp, Homo sapiens
attccaaataacatt

SEQ ID NO: 103238 - DNA, 15 bp, Homo sapiens
aattccaaataacat

SEQ ID NO: 103239 - DNA, 15 bp, Homo sapiens
aaattccaaataaca

SEQ ID NO: 103240 - DNA, 15 bp, Homo sapiens
aaaattccaaataac

SEQ ID NO: 103241 - DNA, 15 bp, Homo sapiens
taaaattccaaataa

SEQ ID NO: 103242 - DNA, 15 bp, Homo sapiens
ttaaaattccaaata

SEQ ID NO: 103243 - DNA, 15 bp, Homo sapiens
cttaaaattccaaat

SEQ ID NO: 103244 - DNA, 15 bp, Homo sapiens
acttaaaattccaaa

SEQ ID NO: 103245 - DNA, 15 bp, Homo sapiens
aacttaaaattccaa

SEQ ID NO: 103246 - DNA, 15 bp, Homo sapiens
gaacttaaaattcca

SEQ ID NO: 103247 - DNA, 15 bp, Homo sapiens
agaacttaaaattcc

SEQ ID NO: 103248 - DNA, 15 bp, Homo sapiens
tagaacttaaaattc

SEQ ID NO: 103249 - DNA, 15 bp, Homo sapiens
atagaacttaaaatt

SEQ ID NO: 103250 - DNA, 15 bp, Homo sapiens
gatagaacttaaaat

SEQ ID NO: 103251 - DNA, 15 bp, Homo sapiens
tgatagaacttaaaa

SEQ ID NO: 103252 - DNA, 15 bp, Homo sapiens
ctgatagaacttaaa

SEQ ID NO: 103253 - DNA, 15 bp, Homo sapiens
actgatagaacttaa

SEQ ID NO: 103254 - DNA, 15 bp, Homo sapiens
cactgatagaactta

SEQ ID NO: 103255 - DNA, 15 bp, Homo sapiens
tcactgatagaactt

SEQ ID NO: 103256 - DNA, 15 bp, Homo sapiens
gtcactgatagaact

SEQ ID NO: 103257 - DNA, 15 bp, Homo sapiens
agtcactgatagaac

SEQ ID NO: 103258 - DNA, 15 bp, Homo sapiens
aagtcactgatagaa

SEQ ID NO: 103259 - DNA, 15 bp, Homo sapiens
gaagtcactgataga

SEQ ID NO: 103260 - DNA, 15 bp, Homo sapiens
agaagtcactgatag

SEQ ID NO: 103261 - DNA, 15 bp, Homo sapiens
cagaagtcactgata

SEQ ID NO: 103262 - DNA, 15 bp, Homo sapiens
tcagaagtcactgat

SEQ ID NO: 103263 - DNA, 15 bp, Homo sapiens
ttcagaagtcactga

SEQ ID NO: 103264 - DNA, 15 bp, Homo sapiens
attcagaagtcactg

SEQ ID NO: 103265 - DNA, 15 bp, Homo sapiens
gattcagaagtcact

SEQ ID NO: 103266 - DNA, 15 bp, Homo sapiens
ggattcagaagtcac

SEQ ID NO: 103267 - DNA, 15 bp, Homo sapiens
aggattcagaagtca

SEQ ID NO: 103268 - DNA, 15 bp, Homo sapiens
aaggattcagaagtc

SEQ ID NO: 103269 - DNA, 15 bp, Homo sapiens
taaggattcagaagt

SEQ ID NO: 103270 - DNA, 15 bp, Homo sapiens
ctaaggattcagaag

SEQ ID NO: 103271 - DNA, 15 bp, Homo sapiens
tctaaggattcagaa

SEQ ID NO: 103272 - DNA, 15 bp, Homo sapiens
ttctaaggattcaga

SEQ ID NO: 103273 - DNA, 15 bp, Homo sapiens
attctaaggattcag

SEQ ID NO: 103274 - DNA, 15 bp, Homo sapiens
cattctaaggattca

SEQ ID NO: 103275 - DNA, 15 bp, Homo sapiens
ccattctaaggattc

SEQ ID NO: 103276 - DNA, 15 bp, Homo sapiens
gccattctaaggatt

SEQ ID NO: 103277 - DNA, 15 bp, Homo sapiens
ggccattctaaggat

SEQ ID NO: 103278 - DNA, 15 bp, Homo sapiens
aggccattctaagga

SEQ ID NO: 103279 - DNA, 15 bp, Homo sapiens
gaggccattctaagg

SEQ ID NO: 103280 - DNA, 15 bp, Homo sapiens
agaggccattctaag

SEQ ID NO: 103281 - DNA, 15 bp, Homo sapiens
aagaggccattctaa

SEQ ID NO: 103282 - DNA, 15 bp, Homo sapiens
aaagaggccattcta

SEQ ID NO: 103283 - DNA, 15 bp, Homo sapiens
caaagaggccattct

SEQ ID NO: 103284 - DNA, 15 bp, Homo sapiens
acaaagaggccattc

SEQ ID NO: 103285 - DNA, 15 bp, Homo sapiens
tacaaagaggccatt

SEQ ID NO: 103286 - DNA, 15 bp, Homo sapiens
ctacaaagaggccat

SEQ ID NO: 103287 - DNA, 15 bp, Homo sapiens
tctacaaagaggcca

SEQ ID NO: 103288 - DNA, 15 bp, Homo sapiens
ttctacaaagaggcc

SEQ ID NO: 103289 - DNA, 15 bp, Homo sapiens
gttctacaaagaggc

SEQ ID NO: 103290 - DNA, 15 bp, Homo sapiens
ggttctacaaagagg

SEQ ID NO: 103291 - DNA, 15 bp, Homo sapiens
gggttctacaaagag

SEQ ID NO: 103292 - DNA, 15 bp, Homo sapiens
agggttctacaaaga

SEQ ID NO: 103293 - DNA, 15 bp, Homo sapiens
cagggttctacaaag

SEQ ID NO: 103294 - DNA, 15 bp, Homo sapiens
acagggttctacaaa

SEQ ID NO: 103295 - DNA, 15 bp, Homo sapiens
cacagggttctacaa

SEQ ID NO: 103296 - DNA, 15 bp, Homo sapiens
ccacagggttctaca

SEQ ID NO: 103297 - DNA, 15 bp, Homo sapiens
accacagggttctac

SEQ ID NO: 103298 - DNA, 15 bp, Homo sapiens
taccacagggttcta

SEQ ID NO: 103299 - DNA, 15 bp, Homo sapiens
ataccacagggttct

SEQ ID NO: 103300 - DNA, 15 bp, Homo sapiens
tataccacagggttc

SEQ ID NO: 103301 - DNA, 15 bp, Homo sapiens
ctataccacagggtt

SEQ ID NO: 103302 - DNA, 15 bp, Homo sapiens
tctataccacagggt

SEQ ID NO: 103303 - DNA, 15 bp, Homo sapiens
ctctataccacaggg

SEQ ID NO: 103304 - DNA, 15 bp, Homo sapiens
cctctataccacagg

SEQ ID NO: 103305 - DNA, 15 bp, Homo sapiens
tcctctataccacag

SEQ ID NO: 103306 - DNA, 15 bp, Homo sapiens
ctcctctataccaca

SEQ ID NO: 103307 - DNA, 15 bp, Homo sapiens
actcctctataccac

SEQ ID NO: 103308 - DNA, 15 bp, Homo sapiens
tactcctctatacca

SEQ ID NO: 103309 - DNA, 15 bp, Homo sapiens
atactcctctatacc

SEQ ID NO: 103310 - DNA, 15 bp, Homo sapiens
catactcctctatac

SEQ ID NO: 103311 - DNA, 15 bp, Homo sapiens
ccatactcctctata

SEQ ID NO: 103312 - DNA, 15 bp, Homo sapiens
gccatactcctctat

SEQ ID NO: 103313 - DNA, 15 bp, Homo sapiens
ggccatactcctcta

SEQ ID NO: 103314 - DNA, 15 bp, Homo sapiens
tggccatactcctct

SEQ ID NO: 103315 - DNA, 15 bp, Homo sapiens
gtggccatactcctc

SEQ ID NO: 103316 - DNA, 15 bp, Homo sapiens
agtggccatactcct

SEQ ID NO: 103317 - DNA, 15 bp, Homo sapiens
cagtggccatactcc

SEQ ID NO: 103318 - DNA, 15 bp, Homo sapiens
gcagtggccatactc

SEQ ID NO: 103319 - DNA, 15 bp, Homo sapiens
ggcagtggccatact

SEQ ID NO: 103320 - DNA, 15 bp, Homo sapiens
gggcagtggccatac

SEQ ID NO: 103321 - DNA, 15 bp, Homo sapiens
ggggcagtggccata

SEQ ID NO: 103322 - DNA, 15 bp, Homo sapiens
tggggcagtggccat

SEQ ID NO: 103323 - DNA, 15 bp, Homo sapiens
gtggggcagtggcca

SEQ ID NO: 103324 - DNA, 15 bp, Homo sapiens
agtggggcagtggcc

SEQ ID NO: 103325 - DNA, 15 bp, Homo sapiens
tagtggggcagtggc

SEQ ID NO: 103326 - DNA, 15 bp, Homo sapiens
atagtggggcagtgg

SEQ ID NO: 103327 - DNA, 15 bp, Homo sapiens
aatagtggggcagtg

SEQ ID NO: 103328 - DNA, 15 bp, Homo sapiens
aaatagtggggcagt

SEQ ID NO: 103329 - DNA, 15 bp, Homo sapiens
aaaatagtggggcag

SEQ ID NO: 103330 - DNA, 15 bp, Homo sapiens
aaaaatagtggggca

SEQ ID NO: 103331 - DNA, 15 bp, Homo sapiens
taaaaatagtggggc

SEQ ID NO: 103332 - DNA, 15 bp, Homo sapiens
ataaaaatagtgggg

SEQ ID NO: 103333 - DNA, 15 bp, Homo sapiens
aataaaaatagtggg

SEQ ID NO: 103334 - DNA, 15 bp, Homo sapiens
aaataaaaatagtgg

SEQ ID NO: 103335 - DNA, 15 bp, Homo sapiens
aaaataaaaatagtg

SEQ ID NO: 103336 - DNA, 15 bp, Homo sapiens
gaaaataaaaatagt

SEQ ID NO: 103337 - DNA, 15 bp, Homo sapiens
agaaaataaaaatag

SEQ ID NO: 103338 - DNA, 15 bp, Homo sapiens
aagaaaataaaaata

SEQ ID NO: 103339 - DNA, 15 bp, Homo sapiens
taagaaaataaaaat

SEQ ID NO: 103340 - DNA, 15 bp, Homo sapiens
ataagaaaataaaaa

SEQ ID NO: 103341 - DNA, 15 bp, Homo sapiens
cataagaaaataaaa

SEQ ID NO: 103342 - DNA, 15 bp, Homo sapiens
acataagaaaataaa

SEQ ID NO: 103343 - DNA, 15 bp, Homo sapiens
tacataagaaaataa

SEQ ID NO: 103344 - DNA, 15 bp, Homo sapiens
ttacataagaaaata

SEQ ID NO: 103345 - DNA, 15 bp, Homo sapiens
cttacataagaaaat

SEQ ID NO: 103346 - DNA, 15 bp, Homo sapiens
acttacataagaaaa

SEQ ID NO: 103347 - DNA, 15 bp, Homo sapiens
aacttacataagaaa

SEQ ID NO: 103348 - DNA, 15 bp, Homo sapiens
aaacttacataagaa

SEQ ID NO: 103349 - DNA, 15 bp, Homo sapiens
caaacttacataaga

SEQ ID NO: 103350 - DNA, 15 bp, Homo sapiens
gcaaacttacataag

SEQ ID NO: 103351 - DNA, 15 bp, Homo sapiens
tgcaaacttacataa

SEQ ID NO: 103352 - DNA, 15 bp, Homo sapiens
atgcaaacttacata

SEQ ID NO: 103353 - DNA, 15 bp, Homo sapiens
tatgcaaacttacat

SEQ ID NO: 103354 - DNA, 15 bp, Homo sapiens
atatgcaaacttaca

SEQ ID NO: 103355 - DNA, 15 bp, Homo sapiens
gatatgcaaacttac

SEQ ID NO: 103356 - DNA, 15 bp, Homo sapiens
tgatatgcaaactta

SEQ ID NO: 103357 - DNA, 15 bp, Homo sapiens
ctgatatgcaaactt

SEQ ID NO: 103358 - DNA, 15 bp, Homo sapiens
actgatatgcaaact

SEQ ID NO: 103359 - DNA, 15 bp, Homo sapiens
gactgatatgcaaac

SEQ ID NO: 103360 - DNA, 15 bp, Homo sapiens
tgactgatatgcaaa

SEQ ID NO: 103361 - DNA, 15 bp, Homo sapiens
atgactgatatgcaa

SEQ ID NO: 103362 - DNA, 15 bp, Homo sapiens
catgactgatatgca

SEQ ID NO: 103363 - DNA, 15 bp, Homo sapiens
tcatgactgatatgc

SEQ ID NO: 103364 - DNA, 15 bp, Homo sapiens
gtcatgactgatatg

SEQ ID NO: 103365 - DNA, 15 bp, Homo sapiens
agtcatgactgatat

SEQ ID NO: 103366 - DNA, 15 bp, Homo sapiens
tagtcatgactgata

SEQ ID NO: 103367 - DNA, 15 bp, Homo sapiens
ctagtcatgactgat

SEQ ID NO: 103368 - DNA, 15 bp, Homo sapiens
actagtcatgactga

SEQ ID NO: 103369 - DNA, 15 bp, Homo sapiens
cactagtcatgactg

SEQ ID NO: 103370 - DNA, 15 bp, Homo sapiens
gcactagtcatgact

SEQ ID NO: 103371 - DNA, 15 bp, Homo sapiens
ggcactagtcatgac

SEQ ID NO: 103372 - DNA, 15 bp, Homo sapiens
aggcactagtcatga

SEQ ID NO: 103373 - DNA, 15 bp, Homo sapiens
taggcactagtcatg

SEQ ID NO: 103374 - DNA, 15 bp, Homo sapiens
ctaggcactagtcat

SEQ ID NO: 103375 - DNA, 15 bp, Homo sapiens
tctaggcactagtca

SEQ ID NO: 103376 - DNA, 15 bp, Homo sapiens
ttctaggcactagtc

SEQ ID NO: 103377 - DNA, 15 bp, Homo sapiens
tttctaggcactagt

SEQ ID NO: 103378 - DNA, 15 bp, Homo sapiens
ctttctaggcactag

SEQ ID NO: 103379 - DNA, 15 bp, Homo sapiens
gctttctaggcacta

SEQ ID NO: 103380 - DNA, 15 bp, Homo sapiens
tgctttctaggcact

SEQ ID NO: 103381 - DNA, 15 bp, Homo sapiens
ttgctttctaggcac

SEQ ID NO: 103382 - DNA, 15 bp, Homo sapiens
attgctttctaggca

SEQ ID NO: 103383 - DNA, 15 bp, Homo sapiens
cattgctttctaggc

SEQ ID NO: 103384 - DNA, 15 bp, Homo sapiens
acattgctttctagg

SEQ ID NO: 103385 - DNA, 15 bp, Homo sapiens
cacattgctttctag

SEQ ID NO: 103386 - DNA, 15 bp, Homo sapiens
tcacattgctttcta

SEQ ID NO: 103387 - DNA, 15 bp, Homo sapiens
atcacattgctttct

SEQ ID NO: 103388 - DNA, 15 bp, Homo sapiens
catcacattgctttc

SEQ ID NO: 103389 - DNA, 15 bp, Homo sapiens
ccatcacattgcttt

SEQ ID NO: 103390 - DNA, 15 bp, Homo sapiens
accatcacattgctt

SEQ ID NO: 103391 - DNA, 15 bp, Homo sapiens
gaccatcacattgct

SEQ ID NO: 103392 - DNA, 15 bp, Homo sapiens
tgaccatcacattgc

SEQ ID NO: 103393 - DNA, 15 bp, Homo sapiens
ctgaccatcacattg

SEQ ID NO: 103394 - DNA, 15 bp, Homo sapiens
cctgaccatcacatt

SEQ ID NO: 103395 - DNA, 15 bp, Homo sapiens
tcctgaccatcacat

SEQ ID NO: 103396 - DNA, 15 bp, Homo sapiens
atcctgaccatcaca

SEQ ID NO: 103397 - DNA, 15 bp, Homo sapiens
gatcctgaccatcac

SEQ ID NO: 103398 - DNA, 15 bp, Homo sapiens
agatcctgaccatca

SEQ ID NO: 103399 - DNA, 15 bp, Homo sapiens
gagatcctgaccatc

SEQ ID NO: 103400 - DNA, 15 bp, Homo sapiens
tgagatcctgaccat

SEQ ID NO: 103401 - DNA, 15 bp, Homo sapiens
atgagatcctgacca

SEQ ID NO: 103402 - DNA, 15 bp, Homo sapiens
catgagatcctgacc

SEQ ID NO: 103403 - DNA, 15 bp, Homo sapiens
tcatgagatcctgac

SEQ ID NO: 103404 - DNA, 15 bp, Homo sapiens
gtcatgagatcctga

SEQ ID NO: 103405 - DNA, 15 bp, Homo sapiens
tgtcatgagatcctg

SEQ ID NO: 103406 - DNA, 15 bp, Homo sapiens
atgtcatgagatcct

SEQ ID NO: 103407 - DNA, 15 bp, Homo sapiens
aatgtcatgagatcc

SEQ ID NO: 103408 - DNA, 15 bp, Homo sapiens
taatgtcatgagatc

SEQ ID NO: 103409 - DNA, 15 bp, Homo sapiens
ataatgtcatgagat

SEQ ID NO: 103410 - DNA, 15 bp, Homo sapiens
tataatgtcatgaga

SEQ ID NO: 103411 - DNA, 15 bp, Homo sapiens
atataatgtcatgag

SEQ ID NO: 103412 - DNA, 15 bp, Homo sapiens
aatataatgtcatga

SEQ ID NO: 103413 - DNA, 15 bp, Homo sapiens
aaatataatgtcatg

SEQ ID NO: 103414 - DNA, 15 bp, Homo sapiens
caaatataatgtcat

SEQ ID NO: 103415 - DNA, 15 bp, Homo sapiens
tcaaatataatgtca

SEQ ID NO: 103416 - DNA, 15 bp, Homo sapiens
ctcaaatataatgtc

SEQ ID NO: 103417 - DNA, 15 bp, Homo sapiens
actcaaatataatgt

SEQ ID NO: 103418 - DNA, 15 bp, Homo sapiens
aactcaaatataatg

SEQ ID NO: 103419 - DNA, 15 bp, Homo sapiens
aaactcaaatataat

SEQ ID NO: 103420 - DNA, 15 bp, Homo sapiens
gaaactcaaatataa

SEQ ID NO: 103421 - DNA, 15 bp, Homo sapiens
agaaactcaaatata

SEQ ID NO: 103422 - DNA, 15 bp, Homo sapiens
aagaaactcaaatat

SEQ ID NO: 103423 - DNA, 15 bp, Homo sapiens
aaagaaactcaaata

SEQ ID NO: 103424 - DNA, 15 bp, Homo sapiens
gaaagaaactcaaat

SEQ ID NO: 103425 - DNA, 15 bp, Homo sapiens
tgaaagaaactcaaa

SEQ ID NO: 103426 - DNA, 15 bp, Homo sapiens
ctgaaagaaactcaa

SEQ ID NO: 103427 - DNA, 15 bp, Homo sapiens
tctgaaagaaactca

SEQ ID NO: 103428 - DNA, 15 bp, Homo sapiens
atctgaaagaaactc

SEQ ID NO: 103429 - DNA, 15 bp, Homo sapiens
gatctgaaagaaact

SEQ ID NO: 103430 - DNA, 15 bp, Homo sapiens
tgatctgaaagaaac

SEQ ID NO: 103431 - DNA, 15 bp, Homo sapiens
atgatctgaaagaaa

SEQ ID NO: 103432 - DNA, 15 bp, Homo sapiens
aatgatctgaaagaa

SEQ ID NO: 103433 - DNA, 15 bp, Homo sapiens
aaatgatctgaaaga

SEQ ID NO: 103434 - DNA, 15 bp, Homo sapiens
taaatgatctgaaag

SEQ ID NO: 103435 - DNA, 15 bp, Homo sapiens
ctaaatgatctgaaa

SEQ ID NO: 103436 - DNA, 15 bp, Homo sapiens
cctaaatgatctgaa

SEQ ID NO: 103437 - DNA, 15 bp, Homo sapiens
tcctaaatgatctga

SEQ ID NO: 103438 - DNA, 15 bp, Homo sapiens
atcctaaatgatctg

SEQ ID NO: 103439 - DNA, 15 bp, Homo sapiens
tatcctaaatgatct

SEQ ID NO: 103440 - DNA, 15 bp, Homo sapiens
gtatcctaaatgatc

SEQ ID NO: 103441 - DNA, 15 bp, Homo sapiens
agtatcctaaatgat

SEQ ID NO: 103442 - DNA, 15 bp, Homo sapiens
gagtatcctaaatga

SEQ ID NO: 103443 - DNA, 15 bp, Homo sapiens
agagtatcctaaatg

SEQ ID NO: 103444 - DNA, 15 bp, Homo sapiens
aagagtatcctaaat

SEQ ID NO: 103445 - DNA, 15 bp, Homo sapiens
taagagtatcctaaa

SEQ ID NO: 103446 - DNA, 15 bp, Homo sapiens
ttaagagtatcctaa

SEQ ID NO: 103447 - DNA, 15 bp, Homo sapiens
attaagagtatccta

SEQ ID NO: 103448 - DNA, 15 bp, Homo sapiens
gattaagagtatcct

SEQ ID NO: 103449 - DNA, 15 bp, Homo sapiens
agattaagagtatcc

SEQ ID NO: 103450 - DNA, 15 bp, Homo sapiens
gagattaagagtatc

SEQ ID NO: 103451 - DNA, 15 bp, Homo sapiens
tgagattaagagtat

SEQ ID NO: 103452 - DNA, 15 bp, Homo sapiens
gtgagattaagagta

SEQ ID NO: 103453 - DNA, 15 bp, Homo sapiens
agtgagattaagagt

SEQ ID NO: 103454 - DNA, 15 bp, Homo sapiens
aagtgagattaagag

SEQ ID NO: 103455 - DNA, 15 bp, Homo sapiens
gaagtgagattaaga

SEQ ID NO: 103456 - DNA, 15 bp, Homo sapiens
tgaagtgagattaag

SEQ ID NO: 103457 - DNA, 15 bp, Homo sapiens
atgaagtgagattaa

SEQ ID NO: 103458 - DNA, 15 bp, Homo sapiens
gatgaagtgagatta

SEQ ID NO: 103459 - DNA, 15 bp, Homo sapiens
tgatgaagtgagatt

SEQ ID NO: 103460 - DNA, 15 bp, Homo sapiens
ttgatgaagtgagat

SEQ ID NO: 103461 - DNA, 15 bp, Homo sapiens
attgatgaagtgaga

SEQ ID NO: 103462 - DNA, 15 bp, Homo sapiens
gattgatgaagtgag

SEQ ID NO: 103463 - DNA, 15 bp, Homo sapiens
tgattgatgaagtga

SEQ ID NO: 103464 - DNA, 15 bp, Homo sapiens
ttgattgatgaagtg

SEQ ID NO: 103465 - DNA, 15 bp, Homo sapiens
tttgattgatgaagt

SEQ ID NO: 103466 - DNA, 15 bp, Homo sapiens
atttgattgatgaag

SEQ ID NO: 103467 - DNA, 15 bp, Homo sapiens
tatttgattgatgaa

SEQ ID NO: 103468 - DNA, 15 bp, Homo sapiens
atatttgattgatga

SEQ ID NO: 103469 - DNA, 15 bp, Homo sapiens
aatatttgattgatg

SEQ ID NO: 103470 - DNA, 15 bp, Homo sapiens
aaatatttgattgat

SEQ ID NO: 103471 - DNA, 15 bp, Homo sapiens
aaaatatttgattga

SEQ ID NO: 103472 - DNA, 15 bp, Homo sapiens
aaaaatatttgattg

SEQ ID NO: 103473 - DNA, 15 bp, Homo sapiens
aaaaaatatttgatt

SEQ ID NO: 103474 - DNA, 15 bp, Homo sapiens
caaaaaatatttgat

SEQ ID NO: 103475 - DNA, 15 bp, Homo sapiens
tcaaaaaatatttga

SEQ ID NO: 103476 - DNA, 15 bp, Homo sapiens
ctcaaaaaatatttg

SEQ ID NO: 103477 - DNA, 15 bp, Homo sapiens
actcaaaaaatattt

SEQ ID NO: 103478 - DNA, 15 bp, Homo sapiens
cactcaaaaaatatt

SEQ ID NO: 103479 - DNA, 15 bp, Homo sapiens
acactcaaaaaatat

SEQ ID NO: 103480 - DNA, 15 bp, Homo sapiens
tacactcaaaaaata

SEQ ID NO: 103481 - DNA, 15 bp, Homo sapiens
atacactcaaaaaat

SEQ ID NO: 103482 - DNA, 15 bp, Homo sapiens
catacactcaaaaaa

SEQ ID NO: 103483 - DNA, 15 bp, Homo sapiens
gcatacactcaaaaa

SEQ ID NO: 103484 - DNA, 15 bp, Homo sapiens
agcatacactcaaaa

SEQ ID NO: 103485 - DNA, 15 bp, Homo sapiens
cagcatacactcaaa

SEQ ID NO: 103486 - DNA, 15 bp, Homo sapiens
acagcatacactcaa

SEQ ID NO: 103487 - DNA, 15 bp, Homo sapiens
tacagcatacactca

SEQ ID NO: 103488 - DNA, 15 bp, Homo sapiens
ctacagcatacactc

SEQ ID NO: 103489 - DNA, 15 bp, Homo sapiens
gctacagcatacact

SEQ ID NO: 103490 - DNA, 15 bp, Homo sapiens
agctacagcatacac

SEQ ID NO: 103491 - DNA, 15 bp, Homo sapiens
cagctacagcataca

SEQ ID NO: 103492 - DNA, 15 bp, Homo sapiens
tcagctacagcatac

SEQ ID NO: 103493 - DNA, 15 bp, Homo sapiens
ttcagctacagcata

SEQ ID NO: 103494 - DNA, 15 bp, Homo sapiens
tttcagctacagcat

SEQ ID NO: 103495 - DNA, 15 bp, Homo sapiens
ctttcagctacagca

SEQ ID NO: 103496 - DNA, 15 bp, Homo sapiens
tctttcagctacagc

SEQ ID NO: 103497 - DNA, 15 bp, Homo sapiens
ctctttcagctacag

SEQ ID NO: 103498 - DNA, 15 bp, Homo sapiens
actctttcagctaca

SEQ ID NO: 103499 - DNA, 15 bp, Homo sapiens
tactctttcagctac

SEQ ID NO: 103500 - DNA, 15 bp, Homo sapiens
atactctttcagcta

SEQ ID NO: 103501 - DNA, 15 bp, Homo sapiens
catactctttcagct

SEQ ID NO: 103502 - DNA, 15 bp, Homo sapiens
acatactctttcagc

SEQ ID NO: 103503 - DNA, 15 bp, Homo sapiens
tacatactctttcag

SEQ ID NO: 103504 - DNA, 15 bp, Homo sapiens
gtacatactctttca

SEQ ID NO: 103505 - DNA, 15 bp, Homo sapiens
cgtacatactctttc

SEQ ID NO: 103506 - DNA, 15 bp, Homo sapiens
acgtacatactcttt

SEQ ID NO: 103507 - DNA, 15 bp, Homo sapiens
tacgtacatactctt

SEQ ID NO: 103508 - DNA, 15 bp, Homo sapiens
gtacgtacatactct

SEQ ID NO: 103509 - DNA, 15 bp, Homo sapiens
cgtacgtacatactc

SEQ ID NO: 103510 - DNA, 15 bp, Homo sapiens
acgtacgtacatact

SEQ ID NO: 103511 - DNA, 15 bp, Homo sapiens
tacgtacgtacatac

SEQ ID NO: 103512 - DNA, 15 bp, Homo sapiens
atacgtacgtacata

SEQ ID NO: 103513 - DNA, 15 bp, Homo sapiens
tatacgtacgtacat

SEQ ID NO: 103514 - DNA, 15 bp, Homo sapiens
ttatacgtacgtaca

SEQ ID NO: 103515 - DNA, 15 bp, Homo sapiens
cttatacgtacgtac

SEQ ID NO: 103516 - DNA, 15 bp, Homo sapiens
tcttatacgtacgta

SEQ ID NO: 103517 - DNA, 15 bp, Homo sapiens
gtcttatacgtacgt

SEQ ID NO: 103518 - DNA, 15 bp, Homo sapiens
agtcttatacgtacg

SEQ ID NO: 103519 - DNA, 15 bp, Homo sapiens
tagtcttatacgtac

SEQ ID NO: 103520 - DNA, 15 bp, Homo sapiens
ctagtcttatacgta

SEQ ID NO: 103521 - DNA, 15 bp, Homo sapiens
tctagtcttatacgt

SEQ ID NO: 103522 - DNA, 15 bp, Homo sapiens
ctctagtcttatacg

SEQ ID NO: 103523 - DNA, 15 bp, Homo sapiens
tctctagtcttatac

SEQ ID NO: 103524 - DNA, 15 bp, Homo sapiens
ctctctagtcttata

SEQ ID NO: 103525 - DNA, 15 bp, Homo sapiens
tctctctagtcttat

SEQ ID NO: 103526 - DNA, 15 bp, Homo sapiens
atctctctagtctta

SEQ ID NO: 103527 - DNA, 15 bp, Homo sapiens
tatctctctagtctt

SEQ ID NO: 103528 - DNA, 15 bp, Homo sapiens
atatctctctagtct

SEQ ID NO: 103529 - DNA, 15 bp, Homo sapiens
aatatctctctagtc

SEQ ID NO: 103530 - DNA, 15 bp, Homo sapiens
taatatctctctagt

SEQ ID NO: 103531 - DNA, 15 bp, Homo sapiens
ttaatatctctctag

SEQ ID NO: 103532 - DNA, 15 bp, Homo sapiens
cttaatatctctcta

SEQ ID NO: 103533 - DNA, 15 bp, Homo sapiens
acttaatatctctct

SEQ ID NO: 103534 - DNA, 15 bp, Homo sapiens
gacttaatatctctc

SEQ ID NO: 103535 - DNA, 15 bp, Homo sapiens
agacttaatatctct

SEQ ID NO: 103536 - DNA, 15 bp, Homo sapiens
gagacttaatatctc

SEQ ID NO: 103537 - DNA, 15 bp, Homo sapiens
tgagacttaatatct

SEQ ID NO: 103538 - DNA, 15 bp, Homo sapiens
ctgagacttaatatc

SEQ ID NO: 103539 - DNA, 15 bp, Homo sapiens
actgagacttaatat

SEQ ID NO: 103540 - DNA, 15 bp, Homo sapiens
tactgagacttaata

SEQ ID NO: 103541 - DNA, 15 bp, Homo sapiens
gtactgagacttaat

SEQ ID NO: 103542 - DNA, 15 bp, Homo sapiens
tgtactgagacttaa

SEQ ID NO: 103543 - DNA, 15 bp, Homo sapiens
gtgtactgagactta

SEQ ID NO: 103544 - DNA, 15 bp, Homo sapiens
agtgtactgagactt

SEQ ID NO: 103545 - DNA, 15 bp, Homo sapiens
aagtgtactgagact

SEQ ID NO: 103546 - DNA, 15 bp, Homo sapiens
gaagtgtactgagac

SEQ ID NO: 103547 - DNA, 15 bp, Homo sapiens
ggaagtgtactgaga

SEQ ID NO: 103548 - DNA, 15 bp, Homo sapiens
aggaagtgtactgag

SEQ ID NO: 103549 - DNA, 15 bp, Homo sapiens
caggaagtgtactga

SEQ ID NO: 103550 - DNA, 15 bp, Homo sapiens
acaggaagtgtactg

SEQ ID NO: 103551 - DNA, 15 bp, Homo sapiens
cacaggaagtgtact

SEQ ID NO: 103552 - DNA, 15 bp, Homo sapiens
gcacaggaagtgtac

SEQ ID NO: 103553 - DNA, 15 bp, Homo sapiens
ggcacaggaagtgta

SEQ ID NO: 103554 - DNA, 15 bp, Homo sapiens
tggcacaggaagtgt

SEQ ID NO: 103555 - DNA, 15 bp, Homo sapiens
atggcacaggaagtg

SEQ ID NO: 103556 - DNA, 15 bp, Homo sapiens
catggcacaggaagt

SEQ ID NO: 103557 - DNA, 15 bp, Homo sapiens
acatggcacaggaag

SEQ ID NO: 103558 - DNA, 15 bp, Homo sapiens
aacatggcacaggaa

SEQ ID NO: 103559 - DNA, 15 bp, Homo sapiens
taacatggcacagga

SEQ ID NO: 103560 - DNA, 15 bp, Homo sapiens
ataacatggcacagg

SEQ ID NO: 103561 - DNA, 15 bp, Homo sapiens
aataacatggcacag

SEQ ID NO: 103562 - DNA, 15 bp, Homo sapiens
gaataacatggcaca

SEQ ID NO: 103563 - DNA, 15 bp, Homo sapiens
tgaataacatggcac

SEQ ID NO: 103564 - DNA, 15 bp, Homo sapiens
ctgaataacatggca

SEQ ID NO: 103565 - DNA, 15 bp, Homo sapiens
gctgaataacatggc

SEQ ID NO: 103566 - DNA, 15 bp, Homo sapiens
agctgaataacatgg

SEQ ID NO: 103567 - DNA, 15 bp, Homo sapiens
gagctgaataacatg

SEQ ID NO: 103568 - DNA, 15 bp, Homo sapiens
tgagctgaataacat

SEQ ID NO: 103569 - DNA, 15 bp, Homo sapiens
gtgagctgaataaca

SEQ ID NO: 103570 - DNA, 15 bp, Homo sapiens
agtgagctgaataac

SEQ ID NO: 103571 - DNA, 15 bp, Homo sapiens
cagtgagctgaataa

SEQ ID NO: 103572 - DNA, 15 bp, Homo sapiens
ccagtgagctgaata

SEQ ID NO: 103573 - DNA, 15 bp, Homo sapiens
accagtgagctgaat

SEQ ID NO: 103574 - DNA, 15 bp, Homo sapiens
aaccagtgagctgaa

SEQ ID NO: 103575 - DNA, 15 bp, Homo sapiens
aaaccagtgagctga

SEQ ID NO: 103576 - DNA, 15 bp, Homo sapiens
taaaccagtgagctg

SEQ ID NO: 103577 - DNA, 15 bp, Homo sapiens
gtaaaccagtgagct

SEQ ID NO: 103578 - DNA, 15 bp, Homo sapiens
tgtaaaccagtgagc

SEQ ID NO: 103579 - DNA, 15 bp, Homo sapiens
ttgtaaaccagtgag

SEQ ID NO: 103580 - DNA, 15 bp, Homo sapiens
tttgtaaaccagtga

SEQ ID NO: 103581 - DNA, 15 bp, Homo sapiens
atttgtaaaccagtg

SEQ ID NO: 103582 - DNA, 15 bp, Homo sapiens
tatttgtaaaccagt

SEQ ID NO: 103583 - DNA, 15 bp, Homo sapiens
atatttgtaaaccag

SEQ ID NO: 103584 - DNA, 15 bp, Homo sapiens
tatatttgtaaacca

SEQ ID NO: 103585 - DNA, 15 bp, Homo sapiens
ctatatttgtaaacc

SEQ ID NO: 103586 - DNA, 15 bp, Homo sapiens
cctatatttgtaaac

SEQ ID NO: 103587 - DNA, 15 bp, Homo sapiens
acctatatttgtaaa

SEQ ID NO: 103588 - DNA, 15 bp, Homo sapiens
aacctatatttgtaa

SEQ ID NO: 103589 - DNA, 15 bp, Homo sapiens
caacctatatttgta

SEQ ID NO: 103590 - DNA, 15 bp, Homo sapiens
acaacctatatttgt

SEQ ID NO: 103591 - DNA, 15 bp, Homo sapiens
gacaacctatatttg

SEQ ID NO: 103592 - DNA, 15 bp, Homo sapiens
agacaacctatattt

SEQ ID NO: 103593 - DNA, 15 bp, Homo sapiens
aagacaacctatatt

SEQ ID NO: 103594 - DNA, 15 bp, Homo sapiens
caagacaacctatat

SEQ ID NO: 103595 - DNA, 15 bp, Homo sapiens
acaagacaacctata

SEQ ID NO: 103596 - DNA, 15 bp, Homo sapiens
cacaagacaacctat

SEQ ID NO: 103597 - DNA, 15 bp, Homo sapiens
ccacaagacaaccta

SEQ ID NO: 103598 - DNA, 15 bp, Homo sapiens
accacaagacaacct

SEQ ID NO: 103599 - DNA, 15 bp, Homo sapiens
aaccacaagacaacc

SEQ ID NO: 103600 - DNA, 15 bp, Homo sapiens
caaccacaagacaac

SEQ ID NO: 103601 - DNA, 15 bp, Homo sapiens
acaaccacaagacaa

SEQ ID NO: 103602 - DNA, 15 bp, Homo sapiens
tacaaccacaagaca

SEQ ID NO: 103603 - DNA, 15 bp, Homo sapiens
ctacaaccacaagac

SEQ ID NO: 103604 - DNA, 15 bp, Homo sapiens
cctacaaccacaaga

SEQ ID NO: 103605 - DNA, 15 bp, Homo sapiens
tcctacaaccacaag

SEQ ID NO: 103606 - DNA, 15 bp, Homo sapiens
ctcctacaaccacaa

SEQ ID NO: 103607 - DNA, 15 bp, Homo sapiens
gctcctacaaccaca

SEQ ID NO: 103608 - DNA, 15 bp, Homo sapiens
ggctcctacaaccac

SEQ ID NO: 103609 - DNA, 15 bp, Homo sapiens
gggctcctacaacca

SEQ ID NO: 103610 - DNA, 15 bp, Homo sapiens
tgggctcctacaacc

SEQ ID NO: 103611 - DNA, 15 bp, Homo sapiens
gtgggctcctacaac

SEQ ID NO: 103612 - DNA, 15 bp, Homo sapiens
agtgggctcctacaa

SEQ ID NO: 103613 - DNA, 15 bp, Homo sapiens
cagtgggctcctaca

SEQ ID NO: 103614 - DNA, 15 bp, Homo sapiens
acagtgggctcctac

SEQ ID NO: 103615 - DNA, 15 bp, Homo sapiens
tacagtgggctccta

SEQ ID NO: 103616 - DNA, 15 bp, Homo sapiens
ttacagtgggctcct

SEQ ID NO: 103617 - DNA, 15 bp, Homo sapiens
gttacagtgggctcc

SEQ ID NO: 103618 - DNA, 15 bp, Homo sapiens
tgttacagtgggctc

SEQ ID NO: 103619 - DNA, 15 bp, Homo sapiens
ttgttacagtgggct

SEQ ID NO: 103620 - DNA, 15 bp, Homo sapiens
attgttacagtgggc

SEQ ID NO: 103621 - DNA, 15 bp, Homo sapiens
tattgttacagtggg

SEQ ID NO: 103622 - DNA, 15 bp, Homo sapiens
gtattgttacagtgg

SEQ ID NO: 103623 - DNA, 15 bp, Homo sapiens
agtattgttacagtg

SEQ ID NO: 103624 - DNA, 15 bp, Homo sapiens
cagtattgttacagt

SEQ ID NO: 103625 - DNA, 15 bp, Homo sapiens
ccagtattgttacag

SEQ ID NO: 103626 - DNA, 15 bp, Homo sapiens
cccagtattgttaca

SEQ ID NO: 103627 - DNA, 15 bp, Homo sapiens
gcccagtattgttac

SEQ ID NO: 103628 - DNA, 15 bp, Homo sapiens
tgcccagtattgtta

SEQ ID NO: 103629 - DNA, 15 bp, Homo sapiens
ctgcccagtattgtt

SEQ ID NO: 103630 - DNA, 15 bp, Homo sapiens
gctgcccagtattgt

SEQ ID NO: 103631 - DNA, 15 bp, Homo sapiens
ggctgcccagtattg

SEQ ID NO: 103632 - DNA, 15 bp, Homo sapiens
aggctgcccagtatt

SEQ ID NO: 103633 - DNA, 15 bp, Homo sapiens
aaggctgcccagtat

SEQ ID NO: 103634 - DNA, 15 bp, Homo sapiens
aaaggctgcccagta

SEQ ID NO: 103635 - DNA, 15 bp, Homo sapiens
aaaaggctgcccagt

SEQ ID NO: 103636 - DNA, 15 bp, Homo sapiens
aaaaaggctgcccag

SEQ ID NO: 103637 - DNA, 15 bp, Homo sapiens
aaaaaaggctgccca

SEQ ID NO: 103638 - DNA, 15 bp, Homo sapiens
aaaaaaaggctgccc

SEQ ID NO: 103639 - DNA, 15 bp, Homo sapiens
aaaaaaaaggctgcc

SEQ ID NO: 103640 - DNA, 15 bp, Homo sapiens
aaaaaaaaaggctgc

SEQ ID NO: 103641 - DNA, 15 bp, Homo sapiens
aaaaaaaaaaggctg

SEQ ID NO: 103642 - DNA, 15 bp, Homo sapiens
aaaaaaaaaaaggct

SEQ ID NO: 103643 - DNA, 15 bp, Homo sapiens
aaaaaaaaaaaaggc

SEQ ID NO: 103644 - DNA, 15 bp, Homo sapiens
caattaaaaaaaaaa

SEQ ID NO: 103645 - DNA, 15 bp, Homo sapiens
gcaattaaaaaaaaa

SEQ ID NO: 103646 - DNA, 15 bp, Homo sapiens
tgcaattaaaaaaaa

SEQ ID NO: 103647 - DNA, 15 bp, Homo sapiens
ttgcaattaaaaaaa

SEQ ID NO: 103648 - DNA, 15 bp, Homo sapiens
gttgcaattaaaaaa

SEQ ID NO: 103649 - DNA, 15 bp, Homo sapiens
tgttgcaattaaaaa

SEQ ID NO: 103650 - DNA, 15 bp, Homo sapiens
ttgttgcaattaaaa

SEQ ID NO: 103651 - DNA, 15 bp, Homo sapiens
attgttgcaattaaa

SEQ ID NO: 103652 - DNA, 15 bp, Homo sapiens
cattgttgcaattaa

SEQ ID NO: 103653 - DNA, 15 bp, Homo sapiens
gcattgttgcaatta

SEQ ID NO: 103654 - DNA, 15 bp, Homo sapiens
tgcattgttgcaatt

SEQ ID NO: 103655 - DNA, 15 bp, Homo sapiens
ttgcattgttgcaat

SEQ ID NO: 103656 - DNA, 15 bp, Homo sapiens
tttgcattgttgcaa

SEQ ID NO: 103657 - DNA, 15 bp, Homo sapiens
ttttgcattgttgca

SEQ ID NO: 103658 - DNA, 15 bp, Homo sapiens
cttttgcattgttgc

SEQ ID NO: 103659 - DNA, 15 bp, Homo sapiens
gcttttgcattgttg

SEQ ID NO: 103660 - DNA, 15 bp, Homo sapiens
ggcttttgcattgtt

SEQ ID NO: 103661 - DNA, 15 bp, Homo sapiens
tggcttttgcattgt

SEQ ID NO: 103662 - DNA, 15 bp, Homo sapiens
ttggcttttgcattg

SEQ ID NO: 103663 - DNA, 15 bp, Homo sapiens
cttggcttttgcatt

SEQ ID NO: 103664 - DNA, 15 bp, Homo sapiens
tcttggcttttgcat

SEQ ID NO: 103665 - DNA, 15 bp, Homo sapiens
ttcttggcttttgca

SEQ ID NO: 103666 - DNA, 15 bp, Homo sapiens
tttcttggcttttgc

SEQ ID NO: 103667 - DNA, 15 bp, Homo sapiens
ctttcttggcttttg

SEQ ID NO: 103668 - DNA, 15 bp, Homo sapiens
actttcttggctttt

SEQ ID NO: 103669 - DNA, 15 bp, Homo sapiens
tactttcttggcttt

SEQ ID NO: 103670 - DNA, 15 bp, Homo sapiens
atactttcttggctt

SEQ ID NO: 103671 - DNA, 15 bp, Homo sapiens
tatactttcttggct

SEQ ID NO: 103672 - DNA, 15 bp, Homo sapiens
ttatactttcttggc

SEQ ID NO: 103673 - DNA, 15 bp, Homo sapiens
cttatactttcttgg

SEQ ID NO: 103674 - DNA, 15 bp, Homo sapiens
ccttatactttcttg

SEQ ID NO: 103675 - DNA, 15 bp, Homo sapiens
cccttatactttctt

SEQ ID NO: 103676 - DNA, 15 bp, Homo sapiens
acccttatactttct

SEQ ID NO: 103677 - DNA, 15 bp, Homo sapiens
gacccttatactttc

SEQ ID NO: 103678 - DNA, 15 bp, Homo sapiens
tgacccttatacttt

SEQ ID NO: 103679 - DNA, 15 bp, Homo sapiens
gtgacccttatactt

SEQ ID NO: 103680 - DNA, 15 bp, Homo sapiens
tgtgacccttatact

SEQ ID NO: 103681 - DNA, 15 bp, Homo sapiens
ttgtgacccttatac

SEQ ID NO: 103682 - DNA, 15 bp, Homo sapiens
cttgtgacccttata

SEQ ID NO: 103683 - DNA, 15 bp, Homo sapiens
acttgtgacccttat

SEQ ID NO: 103684 - DNA, 15 bp, Homo sapiens
gacttgtgaccctta

SEQ ID NO: 103685 - DNA, 15 bp, Homo sapiens
agacttgtgaccctt

SEQ ID NO: 103686 - DNA, 15 bp, Homo sapiens
tagacttgtgaccct

SEQ ID NO: 103687 - DNA, 15 bp, Homo sapiens
ttagacttgtgaccc

SEQ ID NO: 103688 - DNA, 15 bp, Homo sapiens
tttagacttgtgacc

SEQ ID NO: 103689 - DNA, 15 bp, Homo sapiens
gtttagacttgtgac

SEQ ID NO: 103690 - DNA, 15 bp, Homo sapiens
tgtttagacttgtga

SEQ ID NO: 103691 - DNA, 15 bp, Homo sapiens
ttgtttagacttgtg

SEQ ID NO: 103692 - DNA, 15 bp, Homo sapiens
attgtttagacttgt

SEQ ID NO: 103693 - DNA, 15 bp, Homo sapiens
cattgtttagacttg

SEQ ID NO: 103694 - DNA, 15 bp, Homo sapiens
tcattgtttagactt

SEQ ID NO: 103695 - DNA, 15 bp, Homo sapiens
ttcattgtttagact

SEQ ID NO: 103696 - DNA, 15 bp, Homo sapiens
attcattgtttagac

SEQ ID NO: 103697 - DNA, 15 bp, Homo sapiens
aattcattgtttaga

SEQ ID NO: 103698 - DNA, 15 bp, Homo sapiens
gaattcattgtttag

SEQ ID NO: 103699 - DNA, 15 bp, Homo sapiens
agaattcattgttta

SEQ ID NO: 103700 - DNA, 15 bp, Homo sapiens
aagaattcattgttt

SEQ ID NO: 103701 - DNA, 15 bp, Homo sapiens
gaagaattcattgtt

SEQ ID NO: 103702 - DNA, 15 bp, Homo sapiens
tgaagaattcattgt

SEQ ID NO: 103703 - DNA, 15 bp, Homo sapiens
ttgaagaattcattg

SEQ ID NO: 103704 - DNA, 15 bp, Homo sapiens
gttgaagaattcatt

SEQ ID NO: 103705 - DNA, 15 bp, Homo sapiens
tgttgaagaattcat

SEQ ID NO: 103706 - DNA, 15 bp, Homo sapiens
ctgttgaagaattca

SEQ ID NO: 103707 - DNA, 15 bp, Homo sapiens
cctgttgaagaattc

SEQ ID NO: 103708 - DNA, 15 bp, Homo sapiens
ccctgttgaagaatt

SEQ ID NO: 103709 - DNA, 15 bp, Homo sapiens
tccctgttgaagaat

SEQ ID NO: 103710 - DNA, 15 bp, Homo sapiens
ttccctgttgaagaa

SEQ ID NO: 103711 - DNA, 15 bp, Homo sapiens
tttccctgttgaaga

SEQ ID NO: 103712 - DNA, 15 bp, Homo sapiens
ttttccctgttgaag

SEQ ID NO: 103713 - DNA, 15 bp, Homo sapiens
gttttccctgttgaa

SEQ ID NO: 103714 - DNA, 15 bp, Homo sapiens
tgttttccctgttga

SEQ ID NO: 103715 - DNA, 15 bp, Homo sapiens
ctgttttccctgttg

SEQ ID NO: 103716 - DNA, 15 bp, Homo sapiens
gctgttttccctgtt

SEQ ID NO: 103717 - DNA, 15 bp, Homo sapiens
agctgttttccctgt

SEQ ID NO: 103718 - DNA, 15 bp, Homo sapiens
tagctgttttccctg

SEQ ID NO: 103719 - DNA, 15 bp, Homo sapiens
ctagctgttttccct

SEQ ID NO: 103720 - DNA, 15 bp, Homo sapiens
gctagctgttttccc

SEQ ID NO: 103721 - DNA, 15 bp, Homo sapiens
agctagctgttttcc

SEQ ID NO: 103722 - DNA, 15 bp, Homo sapiens
aagctagctgttttc

SEQ ID NO: 103723 - DNA, 15 bp, Homo sapiens
caagctagctgtttt

SEQ ID NO: 103724 - DNA, 15 bp, Homo sapiens
tcaagctagctgttt

SEQ ID NO: 103725 - DNA, 15 bp, Homo sapiens
ttcaagctagctgtt

SEQ ID NO: 103726 - DNA, 15 bp, Homo sapiens
tttcaagctagctgt

SEQ ID NO: 103727 - DNA, 15 bp, Homo sapiens
ttttcaagctagctg

SEQ ID NO: 103728 - DNA, 15 bp, Homo sapiens
gttttcaagctagct

SEQ ID NO: 103729 - DNA, 15 bp, Homo sapiens
agttttcaagctagc

SEQ ID NO: 103730 - DNA, 15 bp, Homo sapiens
aagttttcaagctag

SEQ ID NO: 103731 - DNA, 15 bp, Homo sapiens
caagttttcaagcta

SEQ ID NO: 103732 - DNA, 15 bp, Homo sapiens
gcaagttttcaagct

SEQ ID NO: 103733 - DNA, 15 bp, Homo sapiens
agcaagttttcaagc

SEQ ID NO: 103734 - DNA, 15 bp, Homo sapiens
cagcaagttttcaag

SEQ ID NO: 103735 - DNA, 15 bp, Homo sapiens
tcagcaagttttcaa

SEQ ID NO: 103736 - DNA, 15 bp, Homo sapiens
ttcagcaagttttca

SEQ ID NO: 103737 - DNA, 15 bp, Homo sapiens
tttcagcaagttttc

SEQ ID NO: 103738 - DNA, 15 bp, Homo sapiens
ttttcagcaagtttt

SEQ ID NO: 103739 - DNA, 15 bp, Homo sapiens
tttttcagcaagttt

SEQ ID NO: 103740 - DNA, 15 bp, Homo sapiens
gtttttcagcaagtt

SEQ ID NO: 103741 - DNA, 15 bp, Homo sapiens
tgtttttcagcaagt

SEQ ID NO: 103742 - DNA, 15 bp, Homo sapiens
gtgtttttcagcaag

SEQ ID NO: 103743 - DNA, 15 bp, Homo sapiens
tgtgtttttcagcaa

SEQ ID NO: 103744 - DNA, 15 bp, Homo sapiens
ttgtgtttttcagca

SEQ ID NO: 103745 - DNA, 15 bp, Homo sapiens
gttgtgtttttcagc

SEQ ID NO: 103746 - DNA, 15 bp, Homo sapiens
agttgtgtttttcag

SEQ ID NO: 103747 - DNA, 15 bp, Homo sapiens
aagttgtgtttttca

SEQ ID NO: 103748 - DNA, 15 bp, Homo sapiens
caagttgtgtttttc

SEQ ID NO: 103749 - DNA, 15 bp, Homo sapiens
acaagttgtgttttt

SEQ ID NO: 103750 - DNA, 15 bp, Homo sapiens
cacaagttgtgtttt

SEQ ID NO: 103751 - DNA, 15 bp, Homo sapiens
acacaagttgtgttt

SEQ ID NO: 103752 - DNA, 15 bp, Homo sapiens
aacacaagttgtgtt

SEQ ID NO: 103753 - DNA, 15 bp, Homo sapiens
aaacacaagttgtgt

SEQ ID NO: 103754 - DNA, 15 bp, Homo sapiens
taaacacaagttgtg

SEQ ID NO: 103755 - DNA, 15 bp, Homo sapiens
ataaacacaagttgt

SEQ ID NO: 103756 - DNA, 15 bp, Homo sapiens
cataaacacaagttg

SEQ ID NO: 103757 - DNA, 15 bp, Homo sapiens
ccataaacacaagtt

SEQ ID NO: 103758 - DNA, 15 bp, Homo sapiens
gccataaacacaagt

SEQ ID NO: 103759 - DNA, 15 bp, Homo sapiens
tgccataaacacaag

SEQ ID NO: 103760 - DNA, 15 bp, Homo sapiens
atgccataaacacaa

SEQ ID NO: 103761 - DNA, 15 bp, Homo sapiens
aatgccataaacaca

SEQ ID NO: 103762 - DNA, 15 bp, Homo sapiens
aaatgccataaacac

SEQ ID NO: 103763 - DNA, 15 bp, Homo sapiens
taaatgccataaaca

SEQ ID NO: 103764 - DNA, 15 bp, Homo sapiens
ctaaatgccataaac

SEQ ID NO: 103765 - DNA, 15 bp, Homo sapiens
actaaatgccataaa

SEQ ID NO: 103766 - DNA, 15 bp, Homo sapiens
tactaaatgccataa

SEQ ID NO: 103767 - DNA, 15 bp, Homo sapiens
gtactaaatgccata

SEQ ID NO: 103768 - DNA, 15 bp, Homo sapiens
ggtactaaatgccat

SEQ ID NO: 103769 - DNA, 15 bp, Homo sapiens
aggtactaaatgcca

SEQ ID NO: 103770 - DNA, 15 bp, Homo sapiens
aaggtactaaatgcc

SEQ ID NO: 103771 - DNA, 15 bp, Homo sapiens
gaaggtactaaatgc

SEQ ID NO: 103772 - DNA, 15 bp, Homo sapiens
tgaaggtactaaatg

SEQ ID NO: 103773 - DNA, 15 bp, Homo sapiens
ttgaaggtactaaat

SEQ ID NO: 103774 - DNA, 15 bp, Homo sapiens
tttgaaggtactaaa

SEQ ID NO: 103775 - DNA, 15 bp, Homo sapiens
atttgaaggtactaa

SEQ ID NO: 103776 - DNA, 15 bp, Homo sapiens
tatttgaaggtacta

SEQ ID NO: 103777 - DNA, 15 bp, Homo sapiens
ttatttgaaggtact

SEQ ID NO: 103778 - DNA, 15 bp, Homo sapiens
attatttgaaggtac

SEQ ID NO: 103779 - DNA, 15 bp, Homo sapiens
aattatttgaaggta

SEQ ID NO: 103780 - DNA, 15 bp, Homo sapiens
caattatttgaaggt

SEQ ID NO: 103781 - DNA, 15 bp, Homo sapiens
ccaattatttgaagg

SEQ ID NO: 103782 - DNA, 15 bp, Homo sapiens
gccaattatttgaag

SEQ ID NO: 103783 - DNA, 15 bp, Homo sapiens
agccaattatttgaa

SEQ ID NO: 103784 - DNA, 15 bp, Homo sapiens
aagccaattatttga

SEQ ID NO: 103785 - DNA, 15 bp, Homo sapiens
aaagccaattatttg

SEQ ID NO: 103786 - DNA, 15 bp, Homo sapiens
caaagccaattattt

SEQ ID NO: 103787 - DNA, 15 bp, Homo sapiens
gcaaagccaattatt

SEQ ID NO: 103788 - DNA, 15 bp, Homo sapiens
tgcaaagccaattat

SEQ ID NO: 103789 - DNA, 15 bp, Homo sapiens
ctgcaaagccaatta

SEQ ID NO: 103790 - DNA, 15 bp, Homo sapiens
tctgcaaagccaatt

SEQ ID NO: 103791 - DNA, 15 bp, Homo sapiens
atctgcaaagccaat

SEQ ID NO: 103792 - DNA, 15 bp, Homo sapiens
tatctgcaaagccaa

SEQ ID NO: 103793 - DNA, 15 bp, Homo sapiens
atatctgcaaagcca

SEQ ID NO: 103794 - DNA, 15 bp, Homo sapiens
aatatctgcaaagcc

SEQ ID NO: 103795 - DNA, 15 bp, Homo sapiens
caatatctgcaaagc

SEQ ID NO: 103796 - DNA, 15 bp, Homo sapiens
ccaatatctgcaaag

SEQ ID NO: 103797 - DNA, 15 bp, Homo sapiens
tccaatatctgcaaa

SEQ ID NO: 103798 - DNA, 15 bp, Homo sapiens
atccaatatctgcaa

SEQ ID NO: 103799 - DNA, 15 bp, Homo sapiens
tatccaatatctgca

SEQ ID NO: 103800 - DNA, 15 bp, Homo sapiens
gtatccaatatctgc

SEQ ID NO: 103801 - DNA, 15 bp, Homo sapiens
ggtatccaatatctg

SEQ ID NO: 103802 - DNA, 15 bp, Homo sapiens
gggtatccaatatct

SEQ ID NO: 103803 - DNA, 15 bp, Homo sapiens
ggggtatccaatatc

SEQ ID NO: 103804 - DNA, 15 bp, Homo sapiens
tggggtatccaatat

SEQ ID NO: 103805 - DNA, 15 bp, Homo sapiens
atggggtatccaata

SEQ ID NO: 103806 - DNA, 15 bp, Homo sapiens
aatggggtatccaat

SEQ ID NO: 103807 - DNA, 15 bp, Homo sapiens
taatggggtatccaa

SEQ ID NO: 103808 - DNA, 15 bp, Homo sapiens
ttaatggggtatcca

SEQ ID NO: 103809 - DNA, 15 bp, Homo sapiens
tttaatggggtatcc

SEQ ID NO: 103810 - DNA, 15 bp, Homo sapiens
atttaatggggtatc

SEQ ID NO: 103811 - DNA, 15 bp, Homo sapiens
gatttaatggggtat

SEQ ID NO: 103812 - DNA, 15 bp, Homo sapiens
agatttaatggggta

SEQ ID NO: 103813 - DNA, 15 bp, Homo sapiens
cagatttaatggggt

SEQ ID NO: 103814 - DNA, 15 bp, Homo sapiens
tcagatttaatgggg

SEQ ID NO: 103815 - DNA, 15 bp, Homo sapiens
gtcagatttaatggg

SEQ ID NO: 103816 - DNA, 15 bp, Homo sapiens
tgtcagatttaatgg

SEQ ID NO: 103817 - DNA, 15 bp, Homo sapiens
ctgtcagatttaatg

SEQ ID NO: 103818 - DNA, 15 bp, Homo sapiens
actgtcagatttaat

SEQ ID NO: 103819 - DNA, 15 bp, Homo sapiens
gactgtcagatttaa

SEQ ID NO: 103820 - DNA, 15 bp, Homo sapiens
agactgtcagattta

SEQ ID NO: 103821 - DNA, 15 bp, Homo sapiens
gagactgtcagattt

SEQ ID NO: 103822 - DNA, 15 bp, Homo sapiens
tgagactgtcagatt

SEQ ID NO: 103823 - DNA, 15 bp, Homo sapiens
ttgagactgtcagat

SEQ ID NO: 103824 - DNA, 15 bp, Homo sapiens
tttgagactgtcaga

SEQ ID NO: 103825 - DNA, 15 bp, Homo sapiens
atttgagactgtcag

SEQ ID NO: 103826 - DNA, 15 bp, Homo sapiens
aatttgagactgtca

SEQ ID NO: 103827 - DNA, 15 bp, Homo sapiens
aaatttgagactgtc

SEQ ID NO: 103828 - DNA, 15 bp, Homo sapiens
aaaatttgagactgt

SEQ ID NO: 103829 - DNA, 15 bp, Homo sapiens
aaaaatttgagactg

SEQ ID NO: 103830 - DNA, 15 bp, Homo sapiens
gaaaaatttgagact

SEQ ID NO: 103831 - DNA, 15 bp, Homo sapiens
tgaaaaatttgagac

SEQ ID NO: 103832 - DNA, 15 bp, Homo sapiens
atgaaaaatttgaga

SEQ ID NO: 103833 - DNA, 15 bp, Homo sapiens
gatgaaaaatttgag

SEQ ID NO: 103834 - DNA, 15 bp, Homo sapiens
agatgaaaaatttga

SEQ ID NO: 103835 - DNA, 15 bp, Homo sapiens
gagatgaaaaatttg

SEQ ID NO: 103836 - DNA, 15 bp, Homo sapiens
agagatgaaaaattt

SEQ ID NO: 103837 - DNA, 15 bp, Homo sapiens
aagagatgaaaaatt

SEQ ID NO: 103838 - DNA, 15 bp, Homo sapiens
gaagagatgaaaaat

SEQ ID NO: 103839 - DNA, 15 bp, Homo sapiens
tgaagagatgaaaaa

SEQ ID NO: 103840 - DNA, 15 bp, Homo sapiens
ttgaagagatgaaaa

SEQ ID NO: 103841 - DNA, 15 bp, Homo sapiens
attgaagagatgaaa

SEQ ID NO: 103842 - DNA, 15 bp, Homo sapiens
gattgaagagatgaa

SEQ ID NO: 103843 - DNA, 15 bp, Homo sapiens
tgattgaagagatga

SEQ ID NO: 103844 - DNA, 15 bp, Homo sapiens
gtgattgaagagatg

SEQ ID NO: 103845 - DNA, 15 bp, Homo sapiens
agtgattgaagagat

SEQ ID NO: 103846 - DNA, 15 bp, Homo sapiens
tagtgattgaagaga

SEQ ID NO: 103847 - DNA, 15 bp, Homo sapiens
ctagtgattgaagag

SEQ ID NO: 103848 - DNA, 15 bp, Homo sapiens
actagtgattgaaga

SEQ ID NO: 103849 - DNA, 15 bp, Homo sapiens
gactagtgattgaag

SEQ ID NO: 103850 - DNA, 15 bp, Homo sapiens
tgactagtgattgaa

SEQ ID NO: 103851 - DNA, 15 bp, Homo sapiens
ttgactagtgattga

SEQ ID NO: 103852 - DNA, 15 bp, Homo sapiens
cttgactagtgattg

SEQ ID NO: 103853 - DNA, 15 bp, Homo sapiens
tcttgactagtgatt

SEQ ID NO: 103854 - DNA, 15 bp, Homo sapiens
ttcttgactagtgat

SEQ ID NO: 103855 - DNA, 15 bp, Homo sapiens
tttcttgactagtga

SEQ ID NO: 103856 - DNA, 15 bp, Homo sapiens
ttttcttgactagtg

SEQ ID NO: 103857 - DNA, 15 bp, Homo sapiens
tttttcttgactagt

SEQ ID NO: 103858 - DNA, 15 bp, Homo sapiens
atttttcttgactag

SEQ ID NO: 103859 - DNA, 15 bp, Homo sapiens
tatttttcttgacta

SEQ ID NO: 103860 - DNA, 15 bp, Homo sapiens
atatttttcttgact

SEQ ID NO: 103861 - DNA, 15 bp, Homo sapiens
tatatttttcttgac

SEQ ID NO: 103862 - DNA, 15 bp, Homo sapiens
ttatatttttcttga

SEQ ID NO: 103863 - DNA, 15 bp, Homo sapiens
tttatatttttcttg

SEQ ID NO: 103864 - DNA, 15 bp, Homo sapiens
ttttatatttttctt

SEQ ID NO: 103865 - DNA, 15 bp, Homo sapiens
tttttatatttttct

SEQ ID NO: 103866 - DNA, 15 bp, Homo sapiens
gtttttatatttttc

SEQ ID NO: 103867 - DNA, 15 bp, Homo sapiens
tgtttttatattttt

SEQ ID NO: 103868 - DNA, 15 bp, Homo sapiens
ttgtttttatatttt

SEQ ID NO: 103869 - DNA, 15 bp, Homo sapiens
gttgtttttatattt

SEQ ID NO: 103870 - DNA, 15 bp, Homo sapiens
tgttgtttttatatt

SEQ ID NO: 103871 - DNA, 15 bp, Homo sapiens
ttgttgtttttatat

SEQ ID NO: 103872 - DNA, 15 bp, Homo sapiens
tttgttgtttttata

SEQ ID NO: 103873 - DNA, 15 bp, Homo sapiens
atttgttgtttttat

SEQ ID NO: 103874 - DNA, 15 bp, Homo sapiens
tatttgttgttttta

SEQ ID NO: 103875 - DNA, 15 bp, Homo sapiens
gtatttgttgttttt

SEQ ID NO: 103876 - DNA, 15 bp, Homo sapiens
agtatttgttgtttt

SEQ ID NO: 103877 - DNA, 15 bp, Homo sapiens
aagtatttgttgttt

SEQ ID NO: 103878 - DNA, 15 bp, Homo sapiens
gaagtatttgttgtt

SEQ ID NO: 103879 - DNA, 15 bp, Homo sapiens
ggaagtatttgttgt

SEQ ID NO: 103880 - DNA, 15 bp, Homo sapiens
tggaagtatttgttg

SEQ ID NO: 103881 - DNA, 15 bp, Homo sapiens
atggaagtatttgtt

SEQ ID NO: 103882 - DNA, 15 bp, Homo sapiens
tatggaagtatttgt

SEQ ID NO: 103883 - DNA, 15 bp, Homo sapiens
atatggaagtatttg

SEQ ID NO: 103884 - DNA, 15 bp, Homo sapiens
catatggaagtattt

SEQ ID NO: 103885 - DNA, 15 bp, Homo sapiens
ccatatggaagtatt

SEQ ID NO: 103886 - DNA, 15 bp, Homo sapiens
tccatatggaagtat

SEQ ID NO: 103887 - DNA, 15 bp, Homo sapiens
ctccatatggaagta

SEQ ID NO: 103888 - DNA, 15 bp, Homo sapiens
gctccatatggaagt

SEQ ID NO: 103889 - DNA, 15 bp, Homo sapiens
tgctccatatggaag

SEQ ID NO: 103890 - DNA, 15 bp, Homo sapiens
atgctccatatggaa

SEQ ID NO: 103891 - DNA, 15 bp, Homo sapiens
aatgctccatatgga

SEQ ID NO: 103892 - DNA, 15 bp, Homo sapiens
aaatgctccatatgg

SEQ ID NO: 103893 - DNA, 15 bp, Homo sapiens
aaaatgctccatatg

SEQ ID NO: 103894 - DNA, 15 bp, Homo sapiens
aaaaatgctccatat

SEQ ID NO: 103895 - DNA, 15 bp, Homo sapiens
gaaaaatgctccata

SEQ ID NO: 103896 - DNA, 15 bp, Homo sapiens
tgaaaaatgctccat

SEQ ID NO: 103897 - DNA, 15 bp, Homo sapiens
ctgaaaaatgctcca

SEQ ID NO: 103898 - DNA, 15 bp, Homo sapiens
tctgaaaaatgctcc

SEQ ID NO: 103899 - DNA, 15 bp, Homo sapiens
ctctgaaaaatgctc

SEQ ID NO: 103900 - DNA, 15 bp, Homo sapiens
actctgaaaaatgct

SEQ ID NO: 103901 - DNA, 15 bp, Homo sapiens
aactctgaaaaatgc

SEQ ID NO: 103902 - DNA, 15 bp, Homo sapiens
aaactctgaaaaatg

SEQ ID NO: 103903 - DNA, 15 bp, Homo sapiens
aaaactctgaaaaat

SEQ ID NO: 103904 - DNA, 15 bp, Homo sapiens
gaaaactctgaaaaa

SEQ ID NO: 103905 - DNA, 15 bp, Homo sapiens
agaaaactctgaaaa

SEQ ID NO: 103906 - DNA, 15 bp, Homo sapiens
tagaaaactctgaaa

SEQ ID NO: 103907 - DNA, 15 bp, Homo sapiens
ttagaaaactctgaa

SEQ ID NO: 103908 - DNA, 15 bp, Homo sapiens
gttagaaaactctga

SEQ ID NO: 103909 - DNA, 15 bp, Homo sapiens
ggttagaaaactctg

SEQ ID NO: 103910 - DNA, 15 bp, Homo sapiens
gggttagaaaactct

SEQ ID NO: 103911 - DNA, 15 bp, Homo sapiens
tgggttagaaaactc

SEQ ID NO: 103912 - DNA, 15 bp, Homo sapiens
ctgggttagaaaact

SEQ ID NO: 103913 - DNA, 15 bp, Homo sapiens
actgggttagaaaac

SEQ ID NO: 103914 - DNA, 15 bp, Homo sapiens
gactgggttagaaaa

SEQ ID NO: 103915 - DNA, 15 bp, Homo sapiens
agactgggttagaaa

SEQ ID NO: 103916 - DNA, 15 bp, Homo sapiens
aagactgggttagaa

SEQ ID NO: 103917 - DNA, 15 bp, Homo sapiens
taagactgggttaga

SEQ ID NO: 103918 - DNA, 15 bp, Homo sapiens
ataagactgggttag

SEQ ID NO: 103919 - DNA, 15 bp, Homo sapiens
aataagactgggtta

SEQ ID NO: 103920 - DNA, 15 bp, Homo sapiens
aaataagactgggtt

SEQ ID NO: 103921 - DNA, 15 bp, Homo sapiens
aaaataagactgggt

SEQ ID NO: 103922 - DNA, 15 bp, Homo sapiens
aaaaataagactggg

SEQ ID NO: 103923 - DNA, 15 bp, Homo sapiens
gaaaaataagactgg

SEQ ID NO: 103924 - DNA, 15 bp, Homo sapiens
agaaaaataagactg

SEQ ID NO: 103925 - DNA, 15 bp, Homo sapiens
tagaaaaataagact

SEQ ID NO: 103926 - DNA, 15 bp, Homo sapiens
ctagaaaaataagac

SEQ ID NO: 103927 - DNA, 15 bp, Homo sapiens
actagaaaaataaga

SEQ ID NO: 103928 - DNA, 15 bp, Homo sapiens
gactagaaaaataag

SEQ ID NO: 103929 - DNA, 15 bp, Homo sapiens
tgactagaaaaataa

SEQ ID NO: 103930 - DNA, 15 bp, Homo sapiens
ctgactagaaaaata

SEQ ID NO: 103931 - DNA, 15 bp, Homo sapiens
actgactagaaaaat

SEQ ID NO: 103932 - DNA, 15 bp, Homo sapiens
tactgactagaaaaa

SEQ ID NO: 103933 - DNA, 15 bp, Homo sapiens
ttactgactagaaaa

SEQ ID NO: 103934 - DNA, 15 bp, Homo sapiens
tttactgactagaaa

SEQ ID NO: 103935 - DNA, 15 bp, Homo sapiens
gtttactgactagaa

SEQ ID NO: 103936 - DNA, 15 bp, Homo sapiens
tgtttactgactaga

SEQ ID NO: 103937 - DNA, 15 bp, Homo sapiens
atgtttactgactag

SEQ ID NO: 103938 - DNA, 15 bp, Homo sapiens
aatgtttactgacta

SEQ ID NO: 103939 - DNA, 15 bp, Homo sapiens
aaatgtttactgact

SEQ ID NO: 103940 - DNA, 15 bp, Homo sapiens
caaatgtttactgac

SEQ ID NO: 103941 - DNA, 15 bp, Homo sapiens
acaaatgtttactga

SEQ ID NO: 103942 - DNA, 15 bp, Homo sapiens
tacaaatgtttactg

SEQ ID NO: 103943 - DNA, 15 bp, Homo sapiens
ttacaaatgtttact

SEQ ID NO: 103944 - DNA, 15 bp, Homo sapiens
tttacaaatgtttac

SEQ ID NO: 103945 - DNA, 15 bp, Homo sapiens
ttttacaaatgttta

SEQ ID NO: 103946 - DNA, 15 bp, Homo sapiens
tttttacaaatgttt

SEQ ID NO: 103947 - DNA, 15 bp, Homo sapiens
atttttacaaatgtt

SEQ ID NO: 103948 - DNA, 15 bp, Homo sapiens
tatttttacaaatgt

SEQ ID NO: 103949 - DNA, 15 bp, Homo sapiens
gtatttttacaaatg

SEQ ID NO: 103950 - DNA, 15 bp, Homo sapiens
agtatttttacaaat

SEQ ID NO: 103951 - DNA, 15 bp, Homo sapiens
cagtatttttacaaa

SEQ ID NO: 103952 - DNA, 15 bp, Homo sapiens
acagtatttttacaa

SEQ ID NO: 103953 - DNA, 15 bp, Homo sapiens
aacagtatttttaca

SEQ ID NO: 103954 - DNA, 15 bp, Homo sapiens
aaacagtatttttac

SEQ ID NO: 103955 - DNA, 15 bp, Homo sapiens
gaaacagtattttta

SEQ ID NO: 103956 - DNA, 15 bp, Homo sapiens
tgaaacagtattttt

SEQ ID NO: 103957 - DNA, 15 bp, Homo sapiens
gtgaaacagtatttt

SEQ ID NO: 103958 - DNA, 15 bp, Homo sapiens
agtgaaacagtattt

SEQ ID NO: 103959 - DNA, 15 bp, Homo sapiens
tagtgaaacagtatt

SEQ ID NO: 103960 - DNA, 15 bp, Homo sapiens
ttagtgaaacagtat

SEQ ID NO: 103961 - DNA, 15 bp, Homo sapiens
attagtgaaacagta

SEQ ID NO: 103962 - DNA, 15 bp, Homo sapiens
tattagtgaaacagt

SEQ ID NO: 103963 - DNA, 15 bp, Homo sapiens
gtattagtgaaacag

SEQ ID NO: 103964 - DNA, 15 bp, Homo sapiens
agtattagtgaaaca

SEQ ID NO: 103965 - DNA, 15 bp, Homo sapiens
aagtattagtgaaac

SEQ ID NO: 103966 - DNA, 15 bp, Homo sapiens
taagtattagtgaaa

SEQ ID NO: 103967 - DNA, 15 bp, Homo sapiens
gtaagtattagtgaa

SEQ ID NO: 103968 - DNA, 15 bp, Homo sapiens
agtaagtattagtga

SEQ ID NO: 103969 - DNA, 15 bp, Homo sapiens
cagtaagtattagtg

SEQ ID NO: 103970 - DNA, 15 bp, Homo sapiens
acagtaagtattagt

SEQ ID NO: 103971 - DNA, 15 bp, Homo sapiens
aacagtaagtattag

SEQ ID NO: 103972 - DNA, 15 bp, Homo sapiens
taacagtaagtatta

SEQ ID NO: 103973 - DNA, 15 bp, Homo sapiens
ttaacagtaagtatt

SEQ ID NO: 103974 - DNA, 15 bp, Homo sapiens
gttaacagtaagtat

SEQ ID NO: 103975 - DNA, 15 bp, Homo sapiens
agttaacagtaagta

SEQ ID NO: 103976 - DNA, 15 bp, Homo sapiens
cagttaacagtaagt

SEQ ID NO: 103977 - DNA, 15 bp, Homo sapiens
acagttaacagtaag

SEQ ID NO: 103978 - DNA, 15 bp, Homo sapiens
gacagttaacagtaa

SEQ ID NO: 103979 - DNA, 15 bp, Homo sapiens
agacagttaacagta

SEQ ID NO: 103980 - DNA, 15 bp, Homo sapiens
aagacagttaacagt

SEQ ID NO: 103981 - DNA, 15 bp, Homo sapiens
caagacagttaacag

SEQ ID NO: 103982 - DNA, 15 bp, Homo sapiens
tcaagacagttaaca

SEQ ID NO: 103983 - DNA, 15 bp, Homo sapiens
ctcaagacagttaac

SEQ ID NO: 103984 - DNA, 15 bp, Homo sapiens
tctcaagacagttaa

SEQ ID NO: 103985 - DNA, 15 bp, Homo sapiens
ctctcaagacagtta

SEQ ID NO: 103986 - DNA, 15 bp, Homo sapiens
tctctcaagacagtt

SEQ ID NO: 103987 - DNA, 15 bp, Homo sapiens
ttctctcaagacagt

SEQ ID NO: 103988 - DNA, 15 bp, Homo sapiens
tttctctcaagacag

SEQ ID NO: 103989 - DNA, 15 bp, Homo sapiens
ttttctctcaagaca

SEQ ID NO: 103990 - DNA, 15 bp, Homo sapiens
cttttctctcaagac

SEQ ID NO: 103991 - DNA, 15 bp, Homo sapiens
tcttttctctcaaga

SEQ ID NO: 103992 - DNA, 15 bp, Homo sapiens
ttcttttctctcaag

SEQ ID NO: 103993 - DNA, 15 bp, Homo sapiens
tttcttttctctcaa

SEQ ID NO: 103994 - DNA, 15 bp, Homo sapiens
ttttcttttctctca

SEQ ID NO: 103995 - DNA, 15 bp, Homo sapiens
tttttcttttctctc

SEQ ID NO: 103996 - DNA, 15 bp, Homo sapiens
atttttcttttctct

SEQ ID NO: 103997 - DNA, 15 bp, Homo sapiens
tatttttcttttctc

SEQ ID NO: 103998 - DNA, 15 bp, Homo sapiens
atatttttcttttct

SEQ ID NO: 103999 - DNA, 15 bp, Homo sapiens
catatttttcttttc

SEQ ID NO: 104000 - DNA, 15 bp, Homo sapiens
tcatatttttctttt

SEQ ID NO: 104001 - DNA, 15 bp, Homo sapiens
ctcatatttttcttt

SEQ ID NO: 104002 - DNA, 15 bp, Homo sapiens
tctcatatttttctt

SEQ ID NO: 104003 - DNA, 15 bp, Homo sapiens
ctctcatatttttct

SEQ ID NO: 104004 - DNA, 15 bp, Homo sapiens
tctctcatatttttc

SEQ ID NO: 104005 - DNA, 15 bp, Homo sapiens
ttctctcatattttt

SEQ ID NO: 104006 - DNA, 15 bp, Homo sapiens
gttctctcatatttt

SEQ ID NO: 104007 - DNA, 15 bp, Homo sapiens
agttctctcatattt

SEQ ID NO: 104008 - DNA, 15 bp, Homo sapiens
tagttctctcatatt

SEQ ID NO: 104009 - DNA, 15 bp, Homo sapiens
atagttctctcatat

SEQ ID NO: 104010 - DNA, 15 bp, Homo sapiens
aatagttctctcata

SEQ ID NO: 104011 - DNA, 15 bp, Homo sapiens
caatagttctctcat

SEQ ID NO: 104012 - DNA, 15 bp, Homo sapiens
acaatagttctctca

SEQ ID NO: 104013 - DNA, 15 bp, Homo sapiens
aacaatagttctctc

SEQ ID NO: 104014 - DNA, 15 bp, Homo sapiens
aaacaatagttctct

SEQ ID NO: 104015 - DNA, 15 bp, Homo sapiens
caaacaatagttctc

SEQ ID NO: 104016 - DNA, 15 bp, Homo sapiens
ccaaacaatagttct

SEQ ID NO: 104017 - DNA, 15 bp, Homo sapiens
cccaaacaatagttc

SEQ ID NO: 104018 - DNA, 15 bp, Homo sapiens
ccccaaacaatagtt

SEQ ID NO: 104019 - DNA, 15 bp, Homo sapiens
tccccaaacaatagt

SEQ ID NO: 104020 - DNA, 15 bp, Homo sapiens
ttccccaaacaatag

SEQ ID NO: 104021 - DNA, 15 bp, Homo sapiens
cttccccaaacaata

SEQ ID NO: 104022 - DNA, 15 bp, Homo sapiens
acttccccaaacaat

SEQ ID NO: 104023 - DNA, 15 bp, Homo sapiens
aacttccccaaacaa

SEQ ID NO: 104024 - DNA, 15 bp, Homo sapiens
gaacttccccaaaca

SEQ ID NO: 104025 - DNA, 15 bp, Homo sapiens
tgaacttccccaaac

SEQ ID NO: 104026 - DNA, 15 bp, Homo sapiens
ttgaacttccccaaa

SEQ ID NO: 104027 - DNA, 15 bp, Homo sapiens
cttgaacttccccaa

SEQ ID NO: 104028 - DNA, 15 bp, Homo sapiens
acttgaacttcccca

SEQ ID NO: 104029 - DNA, 15 bp, Homo sapiens
cacttgaacttcccc

SEQ ID NO: 104030 - DNA, 15 bp, Homo sapiens
tcacttgaacttccc

SEQ ID NO: 104031 - DNA, 15 bp, Homo sapiens
atcacttgaacttcc

SEQ ID NO: 104032 - DNA, 15 bp, Homo sapiens
gatcacttgaacttc

SEQ ID NO: 104033 - DNA, 15 bp, Homo sapiens
agatcacttgaactt

SEQ ID NO: 104034 - DNA, 15 bp, Homo sapiens
aagatcacttgaact

SEQ ID NO: 104035 - DNA, 15 bp, Homo sapiens
aaagatcacttgaac

SEQ ID NO: 104036 - DNA, 15 bp, Homo sapiens
gaaagatcacttgaa

SEQ ID NO: 104037 - DNA, 15 bp, Homo sapiens
tgaaagatcacttga

SEQ ID NO: 104038 - DNA, 15 bp, Homo sapiens
ttgaaagatcacttg

SEQ ID NO: 104039 - DNA, 15 bp, Homo sapiens
attgaaagatcactt

SEQ ID NO: 104040 - DNA, 15 bp, Homo sapiens
tattgaaagatcact

SEQ ID NO: 104041 - DNA, 15 bp, Homo sapiens
atattgaaagatcac

SEQ ID NO: 104042 - DNA, 15 bp, Homo sapiens
gatattgaaagatca

SEQ ID NO: 104043 - DNA, 15 bp, Homo sapiens
tgatattgaaagatc

SEQ ID NO: 104044 - DNA, 15 bp, Homo sapiens
atgatattgaaagat

SEQ ID NO: 104045 - DNA, 15 bp, Homo sapiens
aatgatattgaaaga

SEQ ID NO: 104046 - DNA, 15 bp, Homo sapiens
taatgatattgaaag

SEQ ID NO: 104047 - DNA, 15 bp, Homo sapiens
gtaatgatattgaaa

SEQ ID NO: 104048 - DNA, 15 bp, Homo sapiens
agtaatgatattgaa

SEQ ID NO: 104049 - DNA, 15 bp, Homo sapiens
tagtaatgatattga

SEQ ID NO: 104050 - DNA, 15 bp, Homo sapiens
ttagtaatgatattg

SEQ ID NO: 104051 - DNA, 15 bp, Homo sapiens
gttagtaatgatatt

SEQ ID NO: 104052 - DNA, 15 bp, Homo sapiens
agttagtaatgatat

SEQ ID NO: 104053 - DNA, 15 bp, Homo sapiens
aagttagtaatgata

SEQ ID NO: 104054 - DNA, 15 bp, Homo sapiens
gaagttagtaatgat

SEQ ID NO: 104055 - DNA, 15 bp, Homo sapiens
agaagttagtaatga

SEQ ID NO: 104056 - DNA, 15 bp, Homo sapiens
aagaagttagtaatg

SEQ ID NO: 104057 - DNA, 15 bp, Homo sapiens
gaagaagttagtaat

SEQ ID NO: 104058 - DNA, 15 bp, Homo sapiens
ggaagaagttagtaa

SEQ ID NO: 104059 - DNA, 15 bp, Homo sapiens
tggaagaagttagta

SEQ ID NO: 104060 - DNA, 15 bp, Homo sapiens
gtggaagaagttagt

SEQ ID NO: 104061 - DNA, 15 bp, Homo sapiens
agtggaagaagttag

SEQ ID NO: 104062 - DNA, 15 bp, Homo sapiens
aagtggaagaagtta

SEQ ID NO: 104063 - DNA, 15 bp, Homo sapiens
aaagtggaagaagtt

SEQ ID NO: 104064 - DNA, 15 bp, Homo sapiens
aaaagtggaagaagt

SEQ ID NO: 104065 - DNA, 15 bp, Homo sapiens
aaaaagtggaagaag

SEQ ID NO: 104066 - DNA, 15 bp, Homo sapiens
gaaaaagtggaagaa

SEQ ID NO: 104067 - DNA, 15 bp, Homo sapiens
ggaaaaagtggaaga

SEQ ID NO: 104068 - DNA, 15 bp, Homo sapiens
tggaaaaagtggaag

SEQ ID NO: 104069 - DNA, 15 bp, Homo sapiens
ctggaaaaagtggaa

SEQ ID NO: 104070 - DNA, 15 bp, Homo sapiens
tctggaaaaagtgga

SEQ ID NO: 104071 - DNA, 15 bp, Homo sapiens
ttctggaaaaagtgg

SEQ ID NO: 104072 - DNA, 15 bp, Homo sapiens
attctggaaaaagtg

SEQ ID NO: 104073 - DNA, 15 bp, Homo sapiens
aattctggaaaaagt

SEQ ID NO: 104074 - DNA, 15 bp, Homo sapiens
aaattctggaaaaag

SEQ ID NO: 104075 - DNA, 15 bp, Homo sapiens
caaattctggaaaaa

SEQ ID NO: 104076 - DNA, 15 bp, Homo sapiens
tcaaattctggaaaa

SEQ ID NO: 104077 - DNA, 15 bp, Homo sapiens
ttcaaattctggaaa

SEQ ID NO: 104078 - DNA, 15 bp, Homo sapiens
attcaaattctggaa

SEQ ID NO: 104079 - DNA, 15 bp, Homo sapiens
tattcaaattctgga

SEQ ID NO: 104080 - DNA, 15 bp, Homo sapiens
atattcaaattctgg

SEQ ID NO: 104081 - DNA, 15 bp, Homo sapiens
aatattcaaattctg

SEQ ID NO: 104082 - DNA, 15 bp, Homo sapiens
taatattcaaattct

SEQ ID NO: 104083 - DNA, 15 bp, Homo sapiens
ttaatattcaaattc

SEQ ID NO: 104084 - DNA, 15 bp, Homo sapiens
gttaatattcaaatt

SEQ ID NO: 104085 - DNA, 15 bp, Homo sapiens
cgttaatattcaaat

SEQ ID NO: 104086 - DNA, 15 bp, Homo sapiens
gcgttaatattcaaa

SEQ ID NO: 104087 - DNA, 15 bp, Homo sapiens
agcgttaatattcaa

SEQ ID NO: 104088 - DNA, 15 bp, Homo sapiens
tagcgttaatattca

SEQ ID NO: 104089 - DNA, 15 bp, Homo sapiens
ttagcgttaatattc

SEQ ID NO: 104090 - DNA, 15 bp, Homo sapiens
tttagcgttaatatt

SEQ ID NO: 104091 - DNA, 15 bp, Homo sapiens
ctttagcgttaatat

SEQ ID NO: 104092 - DNA, 15 bp, Homo sapiens
cctttagcgttaata

SEQ ID NO: 104093 - DNA, 15 bp, Homo sapiens
acctttagcgttaat

SEQ ID NO: 104094 - DNA, 15 bp, Homo sapiens
cacctttagcgttaa

SEQ ID NO: 104095 - DNA, 15 bp, Homo sapiens
acacctttagcgtta

SEQ ID NO: 104096 - DNA, 15 bp, Homo sapiens
tacacctttagcgtt

SEQ ID NO: 104097 - DNA, 15 bp, Homo sapiens
ttacacctttagcgt

SEQ ID NO: 104098 - DNA, 15 bp, Homo sapiens
cttacacctttagcg

SEQ ID NO: 104099 - DNA, 15 bp, Homo sapiens
tcttacacctttagc

SEQ ID NO: 104100 - DNA, 15 bp, Homo sapiens
gtcttacacctttag

SEQ ID NO: 104101 - DNA, 15 bp, Homo sapiens
agtcttacaccttta

SEQ ID NO: 104102 - DNA, 15 bp, Homo sapiens
aagtcttacaccttt

SEQ ID NO: 104103 - DNA, 15 bp, Homo sapiens
gaagtcttacacctt

SEQ ID NO: 104104 - DNA, 15 bp, Homo sapiens
tgaagtcttacacct

SEQ ID NO: 104105 - DNA, 15 bp, Homo sapiens
ctgaagtcttacacc

SEQ ID NO: 104106 - DNA, 15 bp, Homo sapiens
tctgaagtcttacac

SEQ ID NO: 104107 - DNA, 15 bp, Homo sapiens
atctgaagtcttaca

SEQ ID NO: 104108 - DNA, 15 bp, Homo sapiens
aatctgaagtcttac

SEQ ID NO: 104109 - DNA, 15 bp, Homo sapiens
aaatctgaagtctta

SEQ ID NO: 104110 - DNA, 15 bp, Homo sapiens
gaaatctgaagtctt

SEQ ID NO: 104111 - DNA, 15 bp, Homo sapiens
tgaaatctgaagtct

SEQ ID NO: 104112 - DNA, 15 bp, Homo sapiens
ttgaaatctgaagtc

SEQ ID NO: 104113 - DNA, 15 bp, Homo sapiens
tttgaaatctgaagt

SEQ ID NO: 104114 - DNA, 15 bp, Homo sapiens
atttgaaatctgaag

SEQ ID NO: 104115 - DNA, 15 bp, Homo sapiens
aatttgaaatctgaa

SEQ ID NO: 104116 - DNA, 15 bp, Homo sapiens
taatttgaaatctga

SEQ ID NO: 104117 - DNA, 15 bp, Homo sapiens
ttaatttgaaatctg

SEQ ID NO: 104118 - DNA, 15 bp, Homo sapiens
attaatttgaaatct

SEQ ID NO: 104119 - DNA, 15 bp, Homo sapiens
gattaatttgaaatc

SEQ ID NO: 104120 - DNA, 15 bp, Homo sapiens
agattaatttgaaat

SEQ ID NO: 104121 - DNA, 15 bp, Homo sapiens
aagattaatttgaaa

SEQ ID NO: 104122 - DNA, 15 bp, Homo sapiens
aaagattaatttgaa

SEQ ID NO: 104123 - DNA, 15 bp, Homo sapiens
gaaagattaatttga

SEQ ID NO: 104124 - DNA, 15 bp, Homo sapiens
agaaagattaatttg

SEQ ID NO: 104125 - DNA, 15 bp, Homo sapiens
tagaaagattaattt

SEQ ID NO: 104126 - DNA, 15 bp, Homo sapiens
atagaaagattaatt

SEQ ID NO: 104127 - DNA, 15 bp, Homo sapiens
tatagaaagattaat

SEQ ID NO: 104128 - DNA, 15 bp, Homo sapiens
atatagaaagattaa

SEQ ID NO: 104129 - DNA, 15 bp, Homo sapiens
aatatagaaagatta

SEQ ID NO: 104130 - DNA, 15 bp, Homo sapiens
aaatatagaaagatt

SEQ ID NO: 104131 - DNA, 15 bp, Homo sapiens
aaaatatagaaagat

SEQ ID NO: 104132 - DNA, 15 bp, Homo sapiens
aaaaatatagaaaga

SEQ ID NO: 104133 - DNA, 15 bp, Homo sapiens
aaaaaatatagaaag

SEQ ID NO: 104134 - DNA, 15 bp, Homo sapiens
taaaaaatatagaaa

SEQ ID NO: 104135 - DNA, 15 bp, Homo sapiens
ttaaaaaatatagaa

SEQ ID NO: 104136 - DNA, 15 bp, Homo sapiens
tttaaaaaatataga

SEQ ID NO: 104137 - DNA, 15 bp, Homo sapiens
atttaaaaaatatag

SEQ ID NO: 104138 - DNA, 15 bp, Homo sapiens
aaatttaaaaaatat

SEQ ID NO: 104139 - DNA, 15 bp, Homo sapiens
taaatttaaaaaata

SEQ ID NO: 104140 - DNA, 15 bp, Homo sapiens
gtaaatttaaaaaat

SEQ ID NO: 104141 - DNA, 15 bp, Homo sapiens
tgtaaatttaaaaaa

SEQ ID NO: 104142 - DNA, 15 bp, Homo sapiens
tctgtaaatttaaaa

SEQ ID NO: 104143 - DNA, 15 bp, Homo sapiens
ttctgtaaatttaaa

SEQ ID NO: 104144 - DNA, 15 bp, Homo sapiens
attctgtaaatttaa

SEQ ID NO: 104145 - DNA, 15 bp, Homo sapiens
tattctgtaaattta

SEQ ID NO: 104146 - DNA, 15 bp, Homo sapiens
atattctgtaaattt

SEQ ID NO: 104147 - DNA, 15 bp, Homo sapiens
aatattctgtaaatt

SEQ ID NO: 104148 - DNA, 15 bp, Homo sapiens
taatattctgtaaat

SEQ ID NO: 104149 - DNA, 15 bp, Homo sapiens
ataatattctgtaaa

SEQ ID NO: 104150 - DNA, 15 bp, Homo sapiens
tataatattctgtaa

SEQ ID NO: 104151 - DNA, 15 bp, Homo sapiens
atataatattctgta

SEQ ID NO: 104152 - DNA, 15 bp, Homo sapiens
tatataatattctgt

SEQ ID NO: 104153 - DNA, 15 bp, Homo sapiens
ttatataatattctg

SEQ ID NO: 104154 - DNA, 15 bp, Homo sapiens
gttatataatattct

SEQ ID NO: 104155 - DNA, 15 bp, Homo sapiens
ggttatataatattc

SEQ ID NO: 104156 - DNA, 15 bp, Homo sapiens
gggttatataatatt

SEQ ID NO: 104157 - DNA, 15 bp, Homo sapiens
tgggttatataatat

SEQ ID NO: 104158 - DNA, 15 bp, Homo sapiens
gtgggttatataata

SEQ ID NO: 104159 - DNA, 15 bp, Homo sapiens
agtgggttatataat

SEQ ID NO: 104160 - DNA, 15 bp, Homo sapiens
cagtgggttatataa

SEQ ID NO: 104161 - DNA, 15 bp, Homo sapiens
gcagtgggttatata

SEQ ID NO: 104162 - DNA, 15 bp, Homo sapiens
agcagtgggttatat

SEQ ID NO: 104163 - DNA, 15 bp, Homo sapiens
cagcagtgggttata

SEQ ID NO: 104164 - DNA, 15 bp, Homo sapiens
tcagcagtgggttat

SEQ ID NO: 104165 - DNA, 15 bp, Homo sapiens
ttcagcagtgggtta

SEQ ID NO: 104166 - DNA, 15 bp, Homo sapiens
tttcagcagtgggtt

SEQ ID NO: 104167 - DNA, 15 bp, Homo sapiens
ttttcagcagtgggt

SEQ ID NO: 104168 - DNA, 15 bp, Homo sapiens
tttttcagcagtggg

SEQ ID NO: 104169 - DNA, 15 bp, Homo sapiens
ctttttcagcagtgg

SEQ ID NO: 104170 - DNA, 15 bp, Homo sapiens
tctttttcagcagtg

SEQ ID NO: 104171 - DNA, 15 bp, Homo sapiens
ttctttttcagcagt

SEQ ID NO: 104172 - DNA, 15 bp, Homo sapiens
tttctttttcagcag

SEQ ID NO: 104173 - DNA, 15 bp, Homo sapiens
ttttctttttcagca

SEQ ID NO: 104174 - DNA, 15 bp, Homo sapiens
tttttctttttcagc

SEQ ID NO: 104175 - DNA, 15 bp, Homo sapiens
ttttttctttttcag

SEQ ID NO: 104176 - DNA, 15 bp, Homo sapiens
tttttttctttttca

SEQ ID NO: 104177 - DNA, 15 bp, Homo sapiens
atttttttctttttc

SEQ ID NO: 104178 - DNA, 15 bp, Homo sapiens
catttttttcttttt

SEQ ID NO: 104179 - DNA, 15 bp, Homo sapiens
tcatttttttctttt

SEQ ID NO: 104180 - DNA, 15 bp, Homo sapiens
atcatttttttcttt

SEQ ID NO: 104181 - DNA, 15 bp, Homo sapiens
aatcatttttttctt

SEQ ID NO: 104182 - DNA, 15 bp, Homo sapiens
caatcatttttttct

SEQ ID NO: 104183 - DNA, 15 bp, Homo sapiens
acaatcatttttttc

SEQ ID NO: 104184 - DNA, 15 bp, Homo sapiens
aacaatcattttttt

SEQ ID NO: 104185 - DNA, 15 bp, Homo sapiens
aaacaatcatttttt

SEQ ID NO: 104186 - DNA, 15 bp, Homo sapiens
aaaacaatcattttt

SEQ ID NO: 104187 - DNA, 15 bp, Homo sapiens
taaaacaatcatttt

SEQ ID NO: 104188 - DNA, 15 bp, Homo sapiens
ctaaaacaatcattt

SEQ ID NO: 104189 - DNA, 15 bp, Homo sapiens
tctaaaacaatcatt

SEQ ID NO: 104190 - DNA, 15 bp, Homo sapiens
ttctaaaacaatcat

SEQ ID NO: 104191 - DNA, 15 bp, Homo sapiens
cttctaaaacaatca

SEQ ID NO: 104192 - DNA, 15 bp, Homo sapiens
acttctaaaacaatc

SEQ ID NO: 104193 - DNA, 15 bp, Homo sapiens
aacttctaaaacaat

SEQ ID NO: 104194 - DNA, 15 bp, Homo sapiens
taacttctaaaacaa

SEQ ID NO: 104195 - DNA, 15 bp, Homo sapiens
ttaacttctaaaaca

SEQ ID NO: 104196 - DNA, 15 bp, Homo sapiens
tttaacttctaaaac

SEQ ID NO: 104197 - DNA, 15 bp, Homo sapiens
ctttaacttctaaaa

SEQ ID NO: 104198 - DNA, 15 bp, Homo sapiens
actttaacttctaaa

SEQ ID NO: 104199 - DNA, 15 bp, Homo sapiens
gactttaacttctaa

SEQ ID NO: 104200 - DNA, 15 bp, Homo sapiens
tgactttaacttcta

SEQ ID NO: 104201 - DNA, 15 bp, Homo sapiens
ttgactttaacttct

SEQ ID NO: 104202 - DNA, 15 bp, Homo sapiens
attgactttaacttc

SEQ ID NO: 104203 - DNA, 15 bp, Homo sapiens
tattgactttaactt

SEQ ID NO: 104204 - DNA, 15 bp, Homo sapiens
atattgactttaact

SEQ ID NO: 104205 - DNA, 15 bp, Homo sapiens
aatattgactttaac

SEQ ID NO: 104206 - DNA, 15 bp, Homo sapiens
caatattgactttaa

SEQ ID NO: 104207 - DNA, 15 bp, Homo sapiens
tcaatattgacttta

SEQ ID NO: 104208 - DNA, 15 bp, Homo sapiens
atcaatattgacttt

SEQ ID NO: 104209 - DNA, 15 bp, Homo sapiens
aatcaatattgactt

SEQ ID NO: 104210 - DNA, 15 bp, Homo sapiens
aaatcaatattgact

SEQ ID NO: 104211 - DNA, 15 bp, Homo sapiens
aaaatcaatattgac

SEQ ID NO: 104212 - DNA, 15 bp, Homo sapiens
taaaatcaatattga

SEQ ID NO: 104213 - DNA, 15 bp, Homo sapiens
ttaaaatcaatattg

SEQ ID NO: 104214 - DNA, 15 bp, Homo sapiens
tttaaaatcaatatt

SEQ ID NO: 104215 - DNA, 15 bp, Homo sapiens
atttaaaatcaatat

SEQ ID NO: 104216 - DNA, 15 bp, Homo sapiens
tatttaaaatcaata

SEQ ID NO: 104217 - DNA, 15 bp, Homo sapiens
atatttaaaatcaat

SEQ ID NO: 104218 - DNA, 15 bp, Homo sapiens
tatatttaaaatcaa

SEQ ID NO: 104219 - DNA, 15 bp, Homo sapiens
ttatatttaaaatca

SEQ ID NO: 104220 - DNA, 15 bp, Homo sapiens
cttatatttaaaatc

SEQ ID NO: 104221 - DNA, 15 bp, Homo sapiens
acttatatttaaaat

SEQ ID NO: 104222 - DNA, 15 bp, Homo sapiens
tacttatatttaaaa

SEQ ID NO: 104223 - DNA, 15 bp, Homo sapiens
ttacttatatttaaa

SEQ ID NO: 104224 - DNA, 15 bp, Homo sapiens
attacttatatttaa

SEQ ID NO: 104225 - DNA, 15 bp, Homo sapiens
cattacttatattta

SEQ ID NO: 104226 - DNA, 15 bp, Homo sapiens
tcattacttatattt

SEQ ID NO: 104227 - DNA, 15 bp, Homo sapiens
ttcattacttatatt

SEQ ID NO: 104228 - DNA, 15 bp, Homo sapiens
cttcattacttatat

SEQ ID NO: 104229 - DNA, 15 bp, Homo sapiens
ccttcattacttata

SEQ ID NO: 104230 - DNA, 15 bp, Homo sapiens
gccttcattacttat

SEQ ID NO: 104231 - DNA, 15 bp, Homo sapiens
tgccttcattactta

SEQ ID NO: 104232 - DNA, 15 bp, Homo sapiens
atgccttcattactt

SEQ ID NO: 104233 - DNA, 15 bp, Homo sapiens
tatgccttcattact

SEQ ID NO: 104234 - DNA, 15 bp, Homo sapiens
atatgccttcattac

SEQ ID NO: 104235 - DNA, 15 bp, Homo sapiens
aatatgccttcatta

SEQ ID NO: 104236 - DNA, 15 bp, Homo sapiens
aaatatgccttcatt

SEQ ID NO: 104237 - DNA, 15 bp, Homo sapiens
gaaatatgccttcat

SEQ ID NO: 104238 - DNA, 15 bp, Homo sapiens
ggaaatatgccttca

SEQ ID NO: 104239 - DNA, 15 bp, Homo sapiens
tggaaatatgccttc

SEQ ID NO: 104240 - DNA, 15 bp, Homo sapiens
ttggaaatatgcctt

SEQ ID NO: 104241 - DNA, 15 bp, Homo sapiens
attggaaatatgcct

SEQ ID NO: 104242 - DNA, 15 bp, Homo sapiens
tattggaaatatgcc

SEQ ID NO: 104243 - DNA, 15 bp, Homo sapiens
ttattggaaatatgc

SEQ ID NO: 104244 - DNA, 15 bp, Homo sapiens
gttattggaaatatg

SEQ ID NO: 104245 - DNA, 15 bp, Homo sapiens
agttattggaaatat

SEQ ID NO: 104246 - DNA, 15 bp, Homo sapiens
tagttattggaaata

SEQ ID NO: 104247 - DNA, 15 bp, Homo sapiens
ctagttattggaaat

SEQ ID NO: 104248 - DNA, 15 bp, Homo sapiens
actagttattggaaa

SEQ ID NO: 104249 - DNA, 15 bp, Homo sapiens
cactagttattggaa

SEQ ID NO: 104250 - DNA, 15 bp, Homo sapiens
tcactagttattgga

SEQ ID NO: 104251 - DNA, 15 bp, Homo sapiens
atcactagttattgg

SEQ ID NO: 104252 - DNA, 15 bp, Homo sapiens
tatcactagttattg

SEQ ID NO: 104253 - DNA, 15 bp, Homo sapiens
atatcactagttatt

SEQ ID NO: 104254 - DNA, 15 bp, Homo sapiens
catatcactagttat

SEQ ID NO: 104255 - DNA, 15 bp, Homo sapiens
ccatatcactagtta

SEQ ID NO: 104256 - DNA, 15 bp, Homo sapiens
gccatatcactagtt

SEQ ID NO: 104257 - DNA, 15 bp, Homo sapiens
tgccatatcactagt

SEQ ID NO: 104258 - DNA, 15 bp, Homo sapiens
atgccatatcactag

SEQ ID NO: 104259 - DNA, 15 bp, Homo sapiens
gatgccatatcacta

SEQ ID NO: 104260 - DNA, 15 bp, Homo sapiens
cgatgccatatcact

SEQ ID NO: 104261 - DNA, 15 bp, Homo sapiens
acgatgccatatcac

SEQ ID NO: 104262 - DNA, 15 bp, Homo sapiens
aacgatgccatatca

SEQ ID NO: 104263 - DNA, 15 bp, Homo sapiens
caacgatgccatatc

SEQ ID NO: 104264 - DNA, 15 bp, Homo sapiens
gcaacgatgccatat

SEQ ID NO: 104265 - DNA, 15 bp, Homo sapiens
tgcaacgatgccata

SEQ ID NO: 104266 - DNA, 15 bp, Homo sapiens
atgcaacgatgccat

SEQ ID NO: 104267 - DNA, 15 bp, Homo sapiens
aatgcaacgatgcca

SEQ ID NO: 104268 - DNA, 15 bp, Homo sapiens
aaatgcaacgatgcc

SEQ ID NO: 104269 - DNA, 15 bp, Homo sapiens
aaaatgcaacgatgc

SEQ ID NO: 104270 - DNA, 15 bp, Homo sapiens
taaaatgcaacgatg

SEQ ID NO: 104271 - DNA, 15 bp, Homo sapiens
gtaaaatgcaacgat

SEQ ID NO: 104272 - DNA, 15 bp, Homo sapiens
tgtaaaatgcaacga

SEQ ID NO: 104273 - DNA, 15 bp, Homo sapiens
ctgtaaaatgcaacg

SEQ ID NO: 104274 - DNA, 15 bp, Homo sapiens
actgtaaaatgcaac

SEQ ID NO: 104275 - DNA, 15 bp, Homo sapiens
tactgtaaaatgcaa

SEQ ID NO: 104276 - DNA, 15 bp, Homo sapiens
atactgtaaaatgca

SEQ ID NO: 104277 - DNA, 15 bp, Homo sapiens
gatactgtaaaatgc

SEQ ID NO: 104278 - DNA, 15 bp, Homo sapiens
agatactgtaaaatg

SEQ ID NO: 104279 - DNA, 15 bp, Homo sapiens
aagatactgtaaaat

SEQ ID NO: 104280 - DNA, 15 bp, Homo sapiens
gaagatactgtaaaa

SEQ ID NO: 104281 - DNA, 15 bp, Homo sapiens
tgaagatactgtaaa

SEQ ID NO: 104282 - DNA, 15 bp, Homo sapiens
ttgaagatactgtaa

SEQ ID NO: 104283 - DNA, 15 bp, Homo sapiens
tttgaagatactgta

SEQ ID NO: 104284 - DNA, 15 bp, Homo sapiens
ttttgaagatactgt

SEQ ID NO: 104285 - DNA, 15 bp, Homo sapiens
tttttgaagatactg

SEQ ID NO: 104286 - DNA, 15 bp, Homo sapiens
atttttgaagatact

SEQ ID NO: 104287 - DNA, 15 bp, Homo sapiens
tatttttgaagatac

SEQ ID NO: 104288 - DNA, 15 bp, Homo sapiens
gtatttttgaagata

SEQ ID NO: 104289 - DNA, 15 bp, Homo sapiens
tgtatttttgaagat

SEQ ID NO: 104290 - DNA, 15 bp, Homo sapiens
ctgtatttttgaaga

SEQ ID NO: 104291 - DNA, 15 bp, Homo sapiens
tctgtatttttgaag

SEQ ID NO: 104292 - DNA, 15 bp, Homo sapiens
ttctgtatttttgaa

SEQ ID NO: 104293 - DNA, 15 bp, Homo sapiens
attctgtatttttga

SEQ ID NO: 104294 - DNA, 15 bp, Homo sapiens
aattctgtatttttg

SEQ ID NO: 104295 - DNA, 15 bp, Homo sapiens
aaattctgtattttt

SEQ ID NO: 104296 - DNA, 15 bp, Homo sapiens
taaattctgtatttt

SEQ ID NO: 104297 - DNA, 15 bp, Homo sapiens
ataaattctgtattt

SEQ ID NO: 104298 - DNA, 15 bp, Homo sapiens
tataaattctgtatt

SEQ ID NO: 104299 - DNA, 15 bp, Homo sapiens
ctataaattctgtat

SEQ ID NO: 104300 - DNA, 15 bp, Homo sapiens
tctataaattctgta

SEQ ID NO: 104301 - DNA, 15 bp, Homo sapiens
ttctataaattctgt

SEQ ID NO: 104302 - DNA, 15 bp, Homo sapiens
attctataaattctg

SEQ ID NO: 104303 - DNA, 15 bp, Homo sapiens
tattctataaattct

SEQ ID NO: 104304 - DNA, 15 bp, Homo sapiens
ttattctataaattc

SEQ ID NO: 104305 - DNA, 15 bp, Homo sapiens
attattctataaatt

SEQ ID NO: 104306 - DNA, 15 bp, Homo sapiens
aattattctataaat

SEQ ID NO: 104307 - DNA, 15 bp, Homo sapiens
aaattattctataaa

SEQ ID NO: 104308 - DNA, 15 bp, Homo sapiens
gaaattattctataa

SEQ ID NO: 104309 - DNA, 15 bp, Homo sapiens
agaaattattctata

SEQ ID NO: 104310 - DNA, 15 bp, Homo sapiens
gagaaattattctat

SEQ ID NO: 104311 - DNA, 15 bp, Homo sapiens
ggagaaattattcta

SEQ ID NO: 104312 - DNA, 15 bp, Homo sapiens
aggagaaattattct

SEQ ID NO: 104313 - DNA, 15 bp, Homo sapiens
gaggagaaattattc

SEQ ID NO: 104314 - DNA, 15 bp, Homo sapiens
tgaggagaaattatt

SEQ ID NO: 104315 - DNA, 15 bp, Homo sapiens
atgaggagaaattat

SEQ ID NO: 104316 - DNA, 15 bp, Homo sapiens
aatgaggagaaatta

SEQ ID NO: 104317 - DNA, 15 bp, Homo sapiens
aaatgaggagaaatt

SEQ ID NO: 104318 - DNA, 15 bp, Homo sapiens
taaatgaggagaaat

SEQ ID NO: 104319 - DNA, 15 bp, Homo sapiens
ttaaatgaggagaaa

SEQ ID NO: 104320 - DNA, 15 bp, Homo sapiens
attaaatgaggagaa

SEQ ID NO: 104321 - DNA, 15 bp, Homo sapiens
tattaaatgaggaga

SEQ ID NO: 104322 - DNA, 15 bp, Homo sapiens
atattaaatgaggag

SEQ ID NO: 104323 - DNA, 15 bp, Homo sapiens
aatattaaatgagga

SEQ ID NO: 104324 - DNA, 15 bp, Homo sapiens
aaatattaaatgagg

SEQ ID NO: 104325 - DNA, 15 bp, Homo sapiens
aaaatattaaatgag

SEQ ID NO: 104326 - DNA, 15 bp, Homo sapiens
aaaaatattaaatga

SEQ ID NO: 104327 - DNA, 15 bp, Homo sapiens
gaaaaatattaaatg

SEQ ID NO: 104328 - DNA, 15 bp, Homo sapiens
tgaaaaatattaaat

SEQ ID NO: 104329 - DNA, 15 bp, Homo sapiens
ttgaaaaatattaaa

SEQ ID NO: 104330 - DNA, 15 bp, Homo sapiens
tttgaaaaatattaa

SEQ ID NO: 104331 - DNA, 15 bp, Homo sapiens
ttttgaaaaatatta

SEQ ID NO: 104332 - DNA, 15 bp, Homo sapiens
attttgaaaaatatt

SEQ ID NO: 104333 - DNA, 15 bp, Homo sapiens
gattttgaaaaatat

SEQ ID NO: 104334 - DNA, 15 bp, Homo sapiens
tgattttgaaaaata

SEQ ID NO: 104335 - DNA, 15 bp, Homo sapiens
ttgattttgaaaaat

SEQ ID NO: 104336 - DNA, 15 bp, Homo sapiens
tttgattttgaaaaa

SEQ ID NO: 104337 - DNA, 15 bp, Homo sapiens
ctttgattttgaaaa

SEQ ID NO: 104338 - DNA, 15 bp, Homo sapiens
actttgattttgaaa

SEQ ID NO: 104339 - DNA, 15 bp, Homo sapiens
aactttgattttgaa

SEQ ID NO: 104340 - DNA, 15 bp, Homo sapiens
taactttgattttga

SEQ ID NO: 104341 - DNA, 15 bp, Homo sapiens
ataactttgattttg

SEQ ID NO: 104342 - DNA, 15 bp, Homo sapiens
cataactttgatttt

SEQ ID NO: 104343 - DNA, 15 bp, Homo sapiens
ccataactttgattt

SEQ ID NO: 104344 - DNA, 15 bp, Homo sapiens
accataactttgatt

SEQ ID NO: 104345 - DNA, 15 bp, Homo sapiens
aaccataactttgat

SEQ ID NO: 104346 - DNA, 15 bp, Homo sapiens
gaaaccataactttg

SEQ ID NO: 104347 - DNA, 15 bp, Homo sapiens
ggaaaccataacttt

SEQ ID NO: 104348 - DNA, 15 bp, Homo sapiens
aggaaaccataactt

SEQ ID NO: 104349 - DNA, 15 bp, Homo sapiens
gaggaaaccataact

SEQ ID NO: 104350 - DNA, 15 bp, Homo sapiens
tgaggaaaccataac

SEQ ID NO: 104351 - DNA, 15 bp, Homo sapiens
atgaggaaaccataa

SEQ ID NO: 104352 - DNA, 15 bp, Homo sapiens
aatgaggaaaccata

SEQ ID NO: 104353 - DNA, 15 bp, Homo sapiens
aaatgaggaaaccat

SEQ ID NO: 104354 - DNA, 15 bp, Homo sapiens
aaaatgaggaaacca

SEQ ID NO: 104355 - DNA, 15 bp, Homo sapiens
taaaatgaggaaacc

SEQ ID NO: 104356 - DNA, 15 bp, Homo sapiens
gtaaaatgaggaaac

SEQ ID NO: 104357 - DNA, 15 bp, Homo sapiens
agtaaaatgaggaaa

SEQ ID NO: 104358 - DNA, 15 bp, Homo sapiens
tagtaaaatgaggaa

SEQ ID NO: 104359 - DNA, 15 bp, Homo sapiens
ttagtaaaatgagga

SEQ ID NO: 104360 - DNA, 15 bp, Homo sapiens
tttagtaaaatgagg

SEQ ID NO: 104361 - DNA, 15 bp, Homo sapiens
ttttagtaaaatgag

SEQ ID NO: 104362 - DNA, 15 bp, Homo sapiens
attttagtaaaatga

SEQ ID NO: 104363 - DNA, 15 bp, Homo sapiens
gattttagtaaaatg

SEQ ID NO: 104364 - DNA, 15 bp, Homo sapiens
cgattttagtaaaat

SEQ ID NO: 104365 - DNA, 15 bp, Homo sapiens
acgattttagtaaaa

SEQ ID NO: 104366 - DNA, 15 bp, Homo sapiens
tacgattttagtaaa

SEQ ID NO: 104367 - DNA, 15 bp, Homo sapiens
atacgattttagtaa

SEQ ID NO: 104368 - DNA, 15 bp, Homo sapiens
aatacgattttagta

SEQ ID NO: 104369 - DNA, 15 bp, Homo sapiens
gaatacgattttagt

SEQ ID NO: 104370 - DNA, 15 bp, Homo sapiens
agaatacgattttag

SEQ ID NO: 104371 - DNA, 15 bp, Homo sapiens
tagaatacgatttta

SEQ ID NO: 104372 - DNA, 15 bp, Homo sapiens
ttagaatacgatttt

SEQ ID NO: 104373 - DNA, 15 bp, Homo sapiens
attagaatacgattt

SEQ ID NO: 104374 - DNA, 15 bp, Homo sapiens
aattagaatacgatt

SEQ ID NO: 104375 - DNA, 15 bp, Homo sapiens
gaattagaatacgat

SEQ ID NO: 104376 - DNA, 15 bp, Homo sapiens
agaattagaatacga

SEQ ID NO: 104377 - DNA, 15 bp, Homo sapiens
aagaattagaatacg

SEQ ID NO: 104378 - DNA, 15 bp, Homo sapiens
gaagaattagaatac

SEQ ID NO: 104379 - DNA, 15 bp, Homo sapiens
tgaagaattagaata

SEQ ID NO: 104380 - DNA, 15 bp, Homo sapiens
atgaagaattagaat

SEQ ID NO: 104381 - DNA, 15 bp, Homo sapiens
aatgaagaattagaa

SEQ ID NO: 104382 - DNA, 15 bp, Homo sapiens
taatgaagaattaga

SEQ ID NO: 104383 - DNA, 15 bp, Homo sapiens
ataatgaagaattag

SEQ ID NO: 104384 - DNA, 15 bp, Homo sapiens
tataatgaagaatta

SEQ ID NO: 104385 - DNA, 15 bp, Homo sapiens
ctataatgaagaatt

SEQ ID NO: 104386 - DNA, 15 bp, Homo sapiens
actataatgaagaat

SEQ ID NO: 104387 - DNA, 15 bp, Homo sapiens
tactataatgaagaa

SEQ ID NO: 104388 - DNA, 15 bp, Homo sapiens
ttactataatgaaga

SEQ ID NO: 104389 - DNA, 15 bp, Homo sapiens
tttactataatgaag

SEQ ID NO: 104390 - DNA, 15 bp, Homo sapiens
atttactataatgaa

SEQ ID NO: 104391 - DNA, 15 bp, Homo sapiens
gatttactataatga

SEQ ID NO: 104392 - DNA, 15 bp, Homo sapiens
agatttactataatg

SEQ ID NO: 104393 - DNA, 15 bp, Homo sapiens
tagatttactataat

SEQ ID NO: 104394 - DNA, 15 bp, Homo sapiens
atagatttactataa

SEQ ID NO: 104395 - DNA, 15 bp, Homo sapiens
catagatttactata

SEQ ID NO: 104396 - DNA, 15 bp, Homo sapiens
tcatagatttactat

SEQ ID NO: 104397 - DNA, 15 bp, Homo sapiens
ctcatagatttacta

SEQ ID NO: 104398 - DNA, 15 bp, Homo sapiens
gctcatagatttact

SEQ ID NO: 104399 - DNA, 15 bp, Homo sapiens
tgctcatagatttac

SEQ ID NO: 104400 - DNA, 15 bp, Homo sapiens
ttgctcatagattta

SEQ ID NO: 104401 - DNA, 15 bp, Homo sapiens
gttgctcatagattt

SEQ ID NO: 104402 - DNA, 15 bp, Homo sapiens
agttgctcatagatt

SEQ ID NO: 104403 - DNA, 15 bp, Homo sapiens
gagttgctcatagat

SEQ ID NO: 104404 - DNA, 15 bp, Homo sapiens
ggagttgctcataga

SEQ ID NO: 104405 - DNA, 15 bp, Homo sapiens
aggagttgctcatag

SEQ ID NO: 104406 - DNA, 15 bp, Homo sapiens
aaggagttgctcata

SEQ ID NO: 104407 - DNA, 15 bp, Homo sapiens
taaggagttgctcat

SEQ ID NO: 104408 - DNA, 15 bp, Homo sapiens
gtaaggagttgctca

SEQ ID NO: 104409 - DNA, 15 bp, Homo sapiens
agtaaggagttgctc

SEQ ID NO: 104410 - DNA, 15 bp, Homo sapiens
aagtaaggagttgct

SEQ ID NO: 104411 - DNA, 15 bp, Homo sapiens
gaagtaaggagttgc

SEQ ID NO: 104412 - DNA, 15 bp, Homo sapiens
cgaagtaaggagttg

SEQ ID NO: 104413 - DNA, 15 bp, Homo sapiens
ccgaagtaaggagtt

SEQ ID NO: 104414 - DNA, 15 bp, Homo sapiens
accgaagtaaggagt

SEQ ID NO: 104415 - DNA, 15 bp, Homo sapiens
aaccgaagtaaggag

SEQ ID NO: 104416 - DNA, 15 bp, Homo sapiens
gaaccgaagtaagga

SEQ ID NO: 104417 - DNA, 15 bp, Homo sapiens
ggaaccgaagtaagg

SEQ ID NO: 104418 - DNA, 15 bp, Homo sapiens
aggaaccgaagtaag

SEQ ID NO: 104419 - DNA, 15 bp, Homo sapiens
gaggaaccgaagtaa

SEQ ID NO: 104420 - DNA, 15 bp, Homo sapiens
agaggaaccgaagta

SEQ ID NO: 104421 - DNA, 15 bp, Homo sapiens
cagaggaaccgaagt

SEQ ID NO: 104422 - DNA, 15 bp, Homo sapiens
tcagaggaaccgaag

SEQ ID NO: 104423 - DNA, 15 bp, Homo sapiens
atcagaggaaccgaa

SEQ ID NO: 104424 - DNA, 15 bp, Homo sapiens
aatcagaggaaccga

SEQ ID NO: 104425 - DNA, 15 bp, Homo sapiens
aaatcagaggaaccg

SEQ ID NO: 104426 - DNA, 15 bp, Homo sapiens
gaaatcagaggaacc

SEQ ID NO: 104427 - DNA, 15 bp, Homo sapiens
tgaaatcagaggaac

SEQ ID NO: 104428 - DNA, 15 bp, Homo sapiens
ttgaaatcagaggaa

SEQ ID NO: 104429 - DNA, 15 bp, Homo sapiens
cttgaaatcagagga

SEQ ID NO: 104430 - DNA, 15 bp, Homo sapiens
ccttgaaatcagagg

SEQ ID NO: 104431 - DNA, 15 bp, Homo sapiens
gccttgaaatcagag

SEQ ID NO: 104432 - DNA, 15 bp, Homo sapiens
ggccttgaaatcaga

SEQ ID NO: 104433 - DNA, 15 bp, Homo sapiens
tggccttgaaatcag

SEQ ID NO: 104434 - DNA, 15 bp, Homo sapiens
atggccttgaaatca

SEQ ID NO: 104435 - DNA, 15 bp, Homo sapiens
tatggccttgaaatc

SEQ ID NO: 104436 - DNA, 15 bp, Homo sapiens
atatggccttgaaat

SEQ ID NO: 104437 - DNA, 15 bp, Homo sapiens
aatatggccttgaaa

SEQ ID NO: 104438 - DNA, 15 bp, Homo sapiens
aaatatggccttgaa

SEQ ID NO: 104439 - DNA, 15 bp, Homo sapiens
aaaatatggccttga

SEQ ID NO: 104440 - DNA, 15 bp, Homo sapiens
taaaatatggccttg

SEQ ID NO: 104441 - DNA, 15 bp, Homo sapiens
ttaaaatatggcctt

SEQ ID NO: 104442 - DNA, 15 bp, Homo sapiens
tttaaaatatggcct

SEQ ID NO: 104443 - DNA, 15 bp, Homo sapiens
ttttaaaatatggcc

SEQ ID NO: 104444 - DNA, 15 bp, Homo sapiens
tttttaaaatatggc

SEQ ID NO: 104445 - DNA, 15 bp, Homo sapiens
ttttttaaaatatgg

SEQ ID NO: 104446 - DNA, 15 bp, Homo sapiens
attttttaaaatatg

SEQ ID NO: 104447 - DNA, 15 bp, Homo sapiens
gattttttaaaatat

SEQ ID NO: 104448 - DNA, 15 bp, Homo sapiens
tgattttttaaaata

SEQ ID NO: 104449 - DNA, 15 bp, Homo sapiens
ttgattttttaaaat

SEQ ID NO: 104450 - DNA, 15 bp, Homo sapiens
tttgattttttaaaa

SEQ ID NO: 104451 - DNA, 15 bp, Homo sapiens
ttttgattttttaaa

SEQ ID NO: 104452 - DNA, 15 bp, Homo sapiens
cttttgattttttaa

SEQ ID NO: 104453 - DNA, 15 bp, Homo sapiens
ccttttgatttttta

SEQ ID NO: 104454 - DNA, 15 bp, Homo sapiens
gccttttgatttttt

SEQ ID NO: 104455 - DNA, 15 bp, Homo sapiens
tgccttttgattttt

SEQ ID NO: 104456 - DNA, 15 bp, Homo sapiens
gtgccttttgatttt

SEQ ID NO: 104457 - DNA, 15 bp, Homo sapiens
agtgccttttgattt

SEQ ID NO: 104458 - DNA, 15 bp, Homo sapiens
cagtgccttttgatt

SEQ ID NO: 104459 - DNA, 15 bp, Homo sapiens
acagtgccttttgat

SEQ ID NO: 104460 - DNA, 15 bp, Homo sapiens
cacagtgccttttga

SEQ ID NO: 104461 - DNA, 15 bp, Homo sapiens
tcacagtgccttttg

SEQ ID NO: 104462 - DNA, 15 bp, Homo sapiens
ttcacagtgcctttt

SEQ ID NO: 104463 - DNA, 15 bp, Homo sapiens
gttcacagtgccttt

SEQ ID NO: 104464 - DNA, 15 bp, Homo sapiens
agttcacagtgcctt

SEQ ID NO: 104465 - DNA, 15 bp, Homo sapiens
tagttcacagtgcct

SEQ ID NO: 104466 - DNA, 15 bp, Homo sapiens
atagttcacagtgcc

SEQ ID NO: 104467 - DNA, 15 bp, Homo sapiens
aatagttcacagtgc

SEQ ID NO: 104468 - DNA, 15 bp, Homo sapiens
aaatagttcacagtg

SEQ ID NO: 104469 - DNA, 15 bp, Homo sapiens
aaaatagttcacagt

SEQ ID NO: 104470 - DNA, 15 bp, Homo sapiens
caaaatagttcacag

SEQ ID NO: 104471 - DNA, 15 bp, Homo sapiens
tcaaaatagttcaca

SEQ ID NO: 104472 - DNA, 15 bp, Homo sapiens
ttcaaaatagttcac

SEQ ID NO: 104473 - DNA, 15 bp, Homo sapiens
cttcaaaatagttca

SEQ ID NO: 104474 - DNA, 15 bp, Homo sapiens
tcttcaaaatagttc

SEQ ID NO: 104475 - DNA, 15 bp, Homo sapiens
ttcttcaaaatagtt

SEQ ID NO: 104476 - DNA, 15 bp, Homo sapiens
tttcttcaaaatagt

SEQ ID NO: 104477 - DNA, 15 bp, Homo sapiens
ttttcttcaaaatag

SEQ ID NO: 104478 - DNA, 15 bp, Homo sapiens
gttttcttcaaaata

SEQ ID NO: 104479 - DNA, 15 bp, Homo sapiens
tgttttcttcaaaat

SEQ ID NO: 104480 - DNA, 15 bp, Homo sapiens
gtgttttcttcaaaa

SEQ ID NO: 104481 - DNA, 15 bp, Homo sapiens
tgtgttttcttcaaa

SEQ ID NO: 104482 - DNA, 15 bp, Homo sapiens
ttgtgttttcttcaa

SEQ ID NO: 104483 - DNA, 15 bp, Homo sapiens
gttgtgttttcttca

SEQ ID NO: 104484 - DNA, 15 bp, Homo sapiens
tgttgtgttttcttc

SEQ ID NO: 104485 - DNA, 15 bp, Homo sapiens
atgttgtgttttctt

SEQ ID NO: 104486 - DNA, 15 bp, Homo sapiens
aatgttgtgttttct

SEQ ID NO: 104487 - DNA, 15 bp, Homo sapiens
aaatgttgtgttttc

SEQ ID NO: 104488 - DNA, 15 bp, Homo sapiens
aaaatgttgtgtttt

SEQ ID NO: 104489 - DNA, 15 bp, Homo sapiens
taaaatgttgtgttt

SEQ ID NO: 104490 - DNA, 15 bp, Homo sapiens
ttaaaatgttgtgtt

SEQ ID NO: 104491 - DNA, 15 bp, Homo sapiens
attaaaatgttgtgt

SEQ ID NO: 104492 - DNA, 15 bp, Homo sapiens
tattaaaatgttgtg

SEQ ID NO: 104493 - DNA, 15 bp, Homo sapiens
gtattaaaatgttgt

SEQ ID NO: 104494 - DNA, 15 bp, Homo sapiens
tgtattaaaatgttg

SEQ ID NO: 104495 - DNA, 15 bp, Homo sapiens
ctgtattaaaatgtt

SEQ ID NO: 104496 - DNA, 15 bp, Homo sapiens
tctgtattaaaatgt

SEQ ID NO: 104497 - DNA, 15 bp, Homo sapiens
atctgtattaaaatg

SEQ ID NO: 104498 - DNA, 15 bp, Homo sapiens
aatctgtattaaaat

SEQ ID NO: 104499 - DNA, 15 bp, Homo sapiens
caatctgtattaaaa

SEQ ID NO: 104500 - DNA, 15 bp, Homo sapiens
tcaatctgtattaaa

SEQ ID NO: 104501 - DNA, 15 bp, Homo sapiens
ttcaatctgtattaa

SEQ ID NO: 104502 - DNA, 15 bp, Homo sapiens
tttcaatctgtatta

SEQ ID NO: 104503 - DNA, 15 bp, Homo sapiens
ctttcaatctgtatt

SEQ ID NO: 104504 - DNA, 15 bp, Homo sapiens
cctttcaatctgtat

SEQ ID NO: 104505 - DNA, 15 bp, Homo sapiens
tcctttcaatctgta

SEQ ID NO: 104506 - DNA, 15 bp, Homo sapiens
gtcctttcaatctgt

SEQ ID NO: 104507 - DNA, 15 bp, Homo sapiens
ggtcctttcaatctg

SEQ ID NO: 104508 - DNA, 15 bp, Homo sapiens
aggtcctttcaatct

SEQ ID NO: 104509 - DNA, 15 bp, Homo sapiens
gaggtcctttcaatc

SEQ ID NO: 104510 - DNA, 15 bp, Homo sapiens
agaggtcctttcaat

SEQ ID NO: 104511 - DNA, 15 bp, Homo sapiens
aagaggtcctttcaa

SEQ ID NO: 104512 - DNA, 15 bp, Homo sapiens
gaagaggtcctttca

SEQ ID NO: 104513 - DNA, 15 bp, Homo sapiens
agaagaggtcctttc

SEQ ID NO: 104514 - DNA, 15 bp, Homo sapiens
cagaagaggtccttt

SEQ ID NO: 104515 - DNA, 15 bp, Homo sapiens
tcagaagaggtcctt

SEQ ID NO: 104516 - DNA, 15 bp, Homo sapiens
ttcagaagaggtcct

SEQ ID NO: 104517 - DNA, 15 bp, Homo sapiens
cttcagaagaggtcc

SEQ ID NO: 104518 - DNA, 15 bp, Homo sapiens
gcttcagaagaggtc

SEQ ID NO: 104519 - DNA, 15 bp, Homo sapiens
agcttcagaagaggt

SEQ ID NO: 104520 - DNA, 15 bp, Homo sapiens
tagcttcagaagagg

SEQ ID NO: 104521 - DNA, 15 bp, Homo sapiens
ctagcttcagaagag

SEQ ID NO: 104522 - DNA, 15 bp, Homo sapiens
tctagcttcagaaga

SEQ ID NO: 104523 - DNA, 15 bp, Homo sapiens
ttctagcttcagaag

SEQ ID NO: 104524 - DNA, 15 bp, Homo sapiens
tttctagcttcagaa

SEQ ID NO: 104525 - DNA, 15 bp, Homo sapiens
gtttctagcttcaga

SEQ ID NO: 104526 - DNA, 15 bp, Homo sapiens
tgtttctagcttcag

SEQ ID NO: 104527 - DNA, 15 bp, Homo sapiens
ttgtttctagcttca

SEQ ID NO: 104528 - DNA, 15 bp, Homo sapiens
attgtttctagcttc

SEQ ID NO: 104529 - DNA, 15 bp, Homo sapiens
gattgtttctagctt

SEQ ID NO: 104530 - DNA, 15 bp, Homo sapiens
agattgtttctagct

SEQ ID NO: 104531 - DNA, 15 bp, Homo sapiens
tagattgtttctagc

SEQ ID NO: 104532 - DNA, 15 bp, Homo sapiens
atagattgtttctag

SEQ ID NO: 104533 - DNA, 15 bp, Homo sapiens
tatagattgtttcta

SEQ ID NO: 104534 - DNA, 15 bp, Homo sapiens
ctatagattgtttct

SEQ ID NO: 104535 - DNA, 15 bp, Homo sapiens
actatagattgtttc

SEQ ID NO: 104536 - DNA, 15 bp, Homo sapiens
aactatagattgttt

SEQ ID NO: 104537 - DNA, 15 bp, Homo sapiens
taactatagattgtt

SEQ ID NO: 104538 - DNA, 15 bp, Homo sapiens
ataactatagattgt

SEQ ID NO: 104539 - DNA, 15 bp, Homo sapiens
tataactatagattg

SEQ ID NO: 104540 - DNA, 15 bp, Homo sapiens
gtataactatagatt

SEQ ID NO: 104541 - DNA, 15 bp, Homo sapiens
tgtataactatagat

SEQ ID NO: 104542 - DNA, 15 bp, Homo sapiens
atgtataactataga

SEQ ID NO: 104543 - DNA, 15 bp, Homo sapiens
gatgtataactatag

SEQ ID NO: 104544 - DNA, 15 bp, Homo sapiens
agatgtataactata

SEQ ID NO: 104545 - DNA, 15 bp, Homo sapiens
aagatgtataactat

SEQ ID NO: 104546 - DNA, 15 bp, Homo sapiens
gaagatgtataacta

SEQ ID NO: 104547 - DNA, 15 bp, Homo sapiens
tgaagatgtataact

SEQ ID NO: 104548 - DNA, 15 bp, Homo sapiens
atgaagatgtataac

SEQ ID NO: 104549 - DNA, 15 bp, Homo sapiens
aatgaagatgtataa

SEQ ID NO: 104550 - DNA, 15 bp, Homo sapiens
taatgaagatgtata

SEQ ID NO: 104551 - DNA, 15 bp, Homo sapiens
ttaatgaagatgtat

SEQ ID NO: 104552 - DNA, 15 bp, Homo sapiens
attaatgaagatgta

SEQ ID NO: 104553 - DNA, 15 bp, Homo sapiens
tattaatgaagatgt

SEQ ID NO: 104554 - DNA, 15 bp, Homo sapiens
gtattaatgaagatg

SEQ ID NO: 104555 - DNA, 15 bp, Homo sapiens
agtattaatgaagat

SEQ ID NO: 104556 - DNA, 15 bp, Homo sapiens
cagtattaatgaaga

SEQ ID NO: 104557 - DNA, 15 bp, Homo sapiens
acagtattaatgaag

SEQ ID NO: 104558 - DNA, 15 bp, Homo sapiens
cacagtattaatgaa

SEQ ID NO: 104559 - DNA, 15 bp, Homo sapiens
acacagtattaatga

SEQ ID NO: 104560 - DNA, 15 bp, Homo sapiens
aacacagtattaatg

SEQ ID NO: 104561 - DNA, 15 bp, Homo sapiens
taacacagtattaat

SEQ ID NO: 104562 - DNA, 15 bp, Homo sapiens
gtaacacagtattaa

SEQ ID NO: 104563 - DNA, 15 bp, Homo sapiens
ggtaacacagtatta

SEQ ID NO: 104564 - DNA, 15 bp, Homo sapiens
aggtaacacagtatt

SEQ ID NO: 104565 - DNA, 15 bp, Homo sapiens
aaggtaacacagtat

SEQ ID NO: 104566 - DNA, 15 bp, Homo sapiens
aaaggtaacacagta

SEQ ID NO: 104567 - DNA, 15 bp, Homo sapiens
aaaaggtaacacagt

SEQ ID NO: 104568 - DNA, 15 bp, Homo sapiens
taaaaggtaacacag

SEQ ID NO: 104569 - DNA, 15 bp, Homo sapiens
ttaaaaggtaacaca

SEQ ID NO: 104570 - DNA, 15 bp, Homo sapiens
tttaaaaggtaacac

SEQ ID NO: 104571 - DNA, 15 bp, Homo sapiens
ttttaaaaggtaaca

SEQ ID NO: 104572 - DNA, 15 bp, Homo sapiens
attttaaaaggtaac

SEQ ID NO: 104573 - DNA, 15 bp, Homo sapiens
tattttaaaaggtaa

SEQ ID NO: 104574 - DNA, 15 bp, Homo sapiens
ctattttaaaaggta

SEQ ID NO: 104575 - DNA, 15 bp, Homo sapiens
actattttaaaaggt

SEQ ID NO: 104576 - DNA, 15 bp, Homo sapiens
tactattttaaaagg

SEQ ID NO: 104577 - DNA, 15 bp, Homo sapiens
ttactattttaaaag

SEQ ID NO: 104578 - DNA, 15 bp, Homo sapiens
attactattttaaaa

SEQ ID NO: 104579 - DNA, 15 bp, Homo sapiens
aattactattttaaa

SEQ ID NO: 104580 - DNA, 15 bp, Homo sapiens
aaattactattttaa

SEQ ID NO: 104581 - DNA, 15 bp, Homo sapiens
aaaattactatttta

SEQ ID NO: 104582 - DNA, 15 bp, Homo sapiens
aaaaattactatttt

SEQ ID NO: 104583 - DNA, 15 bp, Homo sapiens
aaaaaattactattt

SEQ ID NO: 104584 - DNA, 15 bp, Homo sapiens
taaaaaattactatt

SEQ ID NO: 104585 - DNA, 15 bp, Homo sapiens
gtaaaaaattactat

SEQ ID NO: 104586 - DNA, 15 bp, Homo sapiens
tgtaaaaaattacta

SEQ ID NO: 104587 - DNA, 15 bp, Homo sapiens
atgtaaaaaattact

SEQ ID NO: 104588 - DNA, 15 bp, Homo sapiens
aatgtaaaaaattac

SEQ ID NO: 104589 - DNA, 15 bp, Homo sapiens
aaatgtaaaaaatta

SEQ ID NO: 104590 - DNA, 15 bp, Homo sapiens
aaaatgtaaaaaatt

SEQ ID NO: 104591 - DNA, 15 bp, Homo sapiens
gaaaatgtaaaaaat

SEQ ID NO: 104592 - DNA, 15 bp, Homo sapiens
ggaaaatgtaaaaaa

SEQ ID NO: 104593 - DNA, 15 bp, Homo sapiens
aggaaaatgtaaaaa

SEQ ID NO: 104594 - DNA, 15 bp, Homo sapiens
caggaaaatgtaaaa

SEQ ID NO: 104595 - DNA, 15 bp, Homo sapiens
acaggaaaatgtaaa

SEQ ID NO: 104596 - DNA, 15 bp, Homo sapiens
cacaggaaaatgtaa

SEQ ID NO: 104597 - DNA, 15 bp, Homo sapiens
acacaggaaaatgta

SEQ ID NO: 104598 - DNA, 15 bp, Homo sapiens
tacacaggaaaatgt

SEQ ID NO: 104599 - DNA, 15 bp, Homo sapiens
ttacacaggaaaatg

SEQ ID NO: 104600 - DNA, 15 bp, Homo sapiens
tttacacaggaaaat

SEQ ID NO: 104601 - DNA, 15 bp, Homo sapiens
gtttacacaggaaaa

SEQ ID NO: 104602 - DNA, 15 bp, Homo sapiens
ggtttacacaggaaa

SEQ ID NO: 104603 - DNA, 15 bp, Homo sapiens
aggtttacacaggaa

SEQ ID NO: 104604 - DNA, 15 bp, Homo sapiens
taggtttacacagga

SEQ ID NO: 104605 - DNA, 15 bp, Homo sapiens
ttaggtttacacagg

SEQ ID NO: 104606 - DNA, 15 bp, Homo sapiens
attaggtttacacag

SEQ ID NO: 104607 - DNA, 15 bp, Homo sapiens
aattaggtttacaca

SEQ ID NO: 104608 - DNA, 15 bp, Homo sapiens
caattaggtttacac

SEQ ID NO: 104609 - DNA, 15 bp, Homo sapiens
acaattaggtttaca

SEQ ID NO: 104610 - DNA, 15 bp, Homo sapiens
cacaattaggtttac

SEQ ID NO: 104611 - DNA, 15 bp, Homo sapiens
ccacaattaggttta

SEQ ID NO: 104612 - DNA, 15 bp, Homo sapiens
accacaattaggttt

SEQ ID NO: 104613 - DNA, 15 bp, Homo sapiens
taccacaattaggtt

SEQ ID NO: 104614 - DNA, 15 bp, Homo sapiens
ctaccacaattaggt

SEQ ID NO: 104615 - DNA, 15 bp, Homo sapiens
tctaccacaattagg

SEQ ID NO: 104616 - DNA, 15 bp, Homo sapiens
ttctaccacaattag

SEQ ID NO: 104617 - DNA, 15 bp, Homo sapiens
tttctaccacaatta

SEQ ID NO: 104618 - DNA, 15 bp, Homo sapiens
atttctaccacaatt

SEQ ID NO: 104619 - DNA, 15 bp, Homo sapiens
aatttctaccacaat

SEQ ID NO: 104620 - DNA, 15 bp, Homo sapiens
aaatttctaccacaa

SEQ ID NO: 104621 - DNA, 15 bp, Homo sapiens
aaaatttctaccaca

SEQ ID NO: 104622 - DNA, 15 bp, Homo sapiens
aaaaatttctaccac

SEQ ID NO: 104623 - DNA, 15 bp, Homo sapiens
taaaaatttctacca

SEQ ID NO: 104624 - DNA, 15 bp, Homo sapiens
gtaaaaatttctacc

SEQ ID NO: 104625 - DNA, 15 bp, Homo sapiens
ggtaaaaatttctac

SEQ ID NO: 104626 - DNA, 15 bp, Homo sapiens
tggtaaaaatttcta

SEQ ID NO: 104627 - DNA, 15 bp, Homo sapiens
ttggtaaaaatttct

SEQ ID NO: 104628 - DNA, 15 bp, Homo sapiens
gttggtaaaaatttc

SEQ ID NO: 104629 - DNA, 15 bp, Homo sapiens
agttggtaaaaattt

SEQ ID NO: 104630 - DNA, 15 bp, Homo sapiens
gagttggtaaaaatt

SEQ ID NO: 104631 - DNA, 15 bp, Homo sapiens
agagttggtaaaaat

SEQ ID NO: 104632 - DNA, 15 bp, Homo sapiens
tagagttggtaaaaa

SEQ ID NO: 104633 - DNA, 15 bp, Homo sapiens
atagagttggtaaaa

SEQ ID NO: 104634 - DNA, 15 bp, Homo sapiens
tatagagttggtaaa

SEQ ID NO: 104635 - DNA, 15 bp, Homo sapiens
gtatagagttggtaa

SEQ ID NO: 104636 - DNA, 15 bp, Homo sapiens
agtatagagttggta

SEQ ID NO: 104637 - DNA, 15 bp, Homo sapiens
gagtatagagttggt

SEQ ID NO: 104638 - DNA, 15 bp, Homo sapiens
tgagtatagagttgg

SEQ ID NO: 104639 - DNA, 15 bp, Homo sapiens
ttgagtatagagttg

SEQ ID NO: 104640 - DNA, 15 bp, Homo sapiens
attgagtatagagtt

SEQ ID NO: 104641 - DNA, 15 bp, Homo sapiens
gattgagtatagagt

SEQ ID NO: 104642 - DNA, 15 bp, Homo sapiens
tgattgagtatagag

SEQ ID NO: 104643 - DNA, 15 bp, Homo sapiens
ttgattgagtataga

SEQ ID NO: 104644 - DNA, 15 bp, Homo sapiens
cttgattgagtatag

SEQ ID NO: 104645 - DNA, 15 bp, Homo sapiens
gcttgattgagtata

SEQ ID NO: 104646 - DNA, 15 bp, Homo sapiens
tgcttgattgagtat

SEQ ID NO: 104647 - DNA, 15 bp, Homo sapiens
ttgcttgattgagta

SEQ ID NO: 104648 - DNA, 15 bp, Homo sapiens
tttgcttgattgagt

SEQ ID NO: 104649 - DNA, 15 bp, Homo sapiens
ttttgcttgattgag

SEQ ID NO: 104650 - DNA, 15 bp, Homo sapiens
attttgcttgattga

SEQ ID NO: 104651 - DNA, 15 bp, Homo sapiens
aattttgcttgattg

SEQ ID NO: 104652 - DNA, 15 bp, Homo sapiens
aaattttgcttgatt

SEQ ID NO: 104653 - DNA, 15 bp, Homo sapiens
gaaattttgcttgat

SEQ ID NO: 104654 - DNA, 15 bp, Homo sapiens
agaaattttgcttga

SEQ ID NO: 104655 - DNA, 15 bp, Homo sapiens
cagaaattttgcttg

SEQ ID NO: 104656 - DNA, 15 bp, Homo sapiens
acagaaattttgctt

SEQ ID NO: 104657 - DNA, 15 bp, Homo sapiens
tacagaaattttgct

SEQ ID NO: 104658 - DNA, 15 bp, Homo sapiens
atacagaaattttgc

SEQ ID NO: 104659 - DNA, 15 bp, Homo sapiens
tatacagaaattttg

SEQ ID NO: 104660 - DNA, 15 bp, Homo sapiens
atatacagaaatttt

SEQ ID NO: 104661 - DNA, 15 bp, Homo sapiens
aatatacagaaattt

SEQ ID NO: 104662 - DNA, 15 bp, Homo sapiens
gaatatacagaaatt

SEQ ID NO: 104663 - DNA, 15 bp, Homo sapiens
ggaatatacagaaat

SEQ ID NO: 104664 - DNA, 15 bp, Homo sapiens
gggaatatacagaaa

SEQ ID NO: 104665 - DNA, 15 bp, Homo sapiens
agggaatatacagaa

SEQ ID NO: 104666 - DNA, 15 bp, Homo sapiens
cagggaatatacaga

SEQ ID NO: 104667 - DNA, 15 bp, Homo sapiens
acagggaatatacag

SEQ ID NO: 104668 - DNA, 15 bp, Homo sapiens
cacagggaatataca

SEQ ID NO: 104669 - DNA, 15 bp, Homo sapiens
ccacagggaatatac

SEQ ID NO: 104670 - DNA, 15 bp, Homo sapiens
tccacagggaatata

SEQ ID NO: 104671 - DNA, 15 bp, Homo sapiens
ttccacagggaatat

SEQ ID NO: 104672 - DNA, 15 bp, Homo sapiens
attccacagggaata

SEQ ID NO: 104673 - DNA, 15 bp, Homo sapiens
cattccacagggaat

SEQ ID NO: 104674 - DNA, 15 bp, Homo sapiens
acattccacagggaa

SEQ ID NO: 104675 - DNA, 15 bp, Homo sapiens
tacattccacaggga

SEQ ID NO: 104676 - DNA, 15 bp, Homo sapiens
gtacattccacaggg

SEQ ID NO: 104677 - DNA, 15 bp, Homo sapiens
ggtacattccacagg

SEQ ID NO: 104678 - DNA, 15 bp, Homo sapiens
aggtacattccacag

SEQ ID NO: 104679 - DNA, 15 bp, Homo sapiens
taggtacattccaca

SEQ ID NO: 104680 - DNA, 15 bp, Homo sapiens
ataggtacattccac

SEQ ID NO: 104681 - DNA, 15 bp, Homo sapiens
cataggtacattcca

SEQ ID NO: 104682 - DNA, 15 bp, Homo sapiens
acataggtacattcc

SEQ ID NO: 104683 - DNA, 15 bp, Homo sapiens
cacataggtacattc

SEQ ID NO: 104684 - DNA, 15 bp, Homo sapiens
tcacataggtacatt

SEQ ID NO: 104685 - DNA, 15 bp, Homo sapiens
ctcacataggtacat

SEQ ID NO: 104686 - DNA, 15 bp, Homo sapiens
actcacataggtaca

SEQ ID NO: 104687 - DNA, 15 bp, Homo sapiens
aactcacataggtac

SEQ ID NO: 104688 - DNA, 15 bp, Homo sapiens
aaactcacataggta

SEQ ID NO: 104689 - DNA, 15 bp, Homo sapiens
gaaactcacataggt

SEQ ID NO: 104690 - DNA, 15 bp, Homo sapiens
tgaaactcacatagg

SEQ ID NO: 104691 - DNA, 15 bp, Homo sapiens
ctgaaactcacatag

SEQ ID NO: 104692 - DNA, 15 bp, Homo sapiens
tctgaaactcacata

SEQ ID NO: 104693 - DNA, 15 bp, Homo sapiens
ttctgaaactcacat

SEQ ID NO: 104694 - DNA, 15 bp, Homo sapiens
tttctgaaactcaca

SEQ ID NO: 104695 - DNA, 15 bp, Homo sapiens
atttctgaaactcac

SEQ ID NO: 104696 - DNA, 15 bp, Homo sapiens
aatttctgaaactca

SEQ ID NO: 104697 - DNA, 15 bp, Homo sapiens
gaatttctgaaactc

SEQ ID NO: 104698 - DNA, 15 bp, Homo sapiens
agaatttctgaaact

SEQ ID NO: 104699 - DNA, 15 bp, Homo sapiens
gagaatttctgaaac

SEQ ID NO: 104700 - DNA, 15 bp, Homo sapiens
tgagaatttctgaaa

SEQ ID NO: 104701 - DNA, 15 bp, Homo sapiens
ttgagaatttctgaa

SEQ ID NO: 104702 - DNA, 15 bp, Homo sapiens
tttgagaatttctga

SEQ ID NO: 104703 - DNA, 15 bp, Homo sapiens
ttttgagaatttctg

SEQ ID NO: 104704 - DNA, 15 bp, Homo sapiens
attttgagaatttct

SEQ ID NO: 104705 - DNA, 15 bp, Homo sapiens
tattttgagaatttc

SEQ ID NO: 104706 - DNA, 15 bp, Homo sapiens
gtattttgagaattt

SEQ ID NO: 104707 - DNA, 15 bp, Homo sapiens
cgtattttgagaatt

SEQ ID NO: 104708 - DNA, 15 bp, Homo sapiens
acgtattttgagaat

SEQ ID NO: 104709 - DNA, 15 bp, Homo sapiens
cacgtattttgagaa

SEQ ID NO: 104710 - DNA, 15 bp, Homo sapiens
acacgtattttgaga

SEQ ID NO: 104711 - DNA, 15 bp, Homo sapiens
aacacgtattttgag

SEQ ID NO: 104712 - DNA, 15 bp, Homo sapiens
gaacacgtattttga

SEQ ID NO: 104713 - DNA, 15 bp, Homo sapiens
tgaacacgtattttg

SEQ ID NO: 104714 - DNA, 15 bp, Homo sapiens
ttgaacacgtatttt

SEQ ID NO: 104715 - DNA, 15 bp, Homo sapiens
tttgaacacgtattt

SEQ ID NO: 104716 - DNA, 15 bp, Homo sapiens
ttttgaacacgtatt

SEQ ID NO: 104717 - DNA, 15 bp, Homo sapiens
tttttgaacacgtat

SEQ ID NO: 104718 - DNA, 15 bp, Homo sapiens
atttttgaacacgta

SEQ ID NO: 104719 - DNA, 15 bp, Homo sapiens
aatttttgaacacgt

SEQ ID NO: 104720 - DNA, 15 bp, Homo sapiens
aaatttttgaacacg

SEQ ID NO: 104721 - DNA, 15 bp, Homo sapiens
gaaatttttgaacac

SEQ ID NO: 104722 - DNA, 15 bp, Homo sapiens
agaaatttttgaaca

SEQ ID NO: 104723 - DNA, 15 bp, Homo sapiens
cagaaatttttgaac

SEQ ID NO: 104724 - DNA, 15 bp, Homo sapiens
gcagaaatttttgaa

SEQ ID NO: 104725 - DNA, 15 bp, Homo sapiens
agcagaaatttttga

SEQ ID NO: 104726 - DNA, 15 bp, Homo sapiens
aagcagaaatttttg

SEQ ID NO: 104727 - DNA, 15 bp, Homo sapiens
aaaagcagaaatttt

SEQ ID NO: 104728 - DNA, 15 bp, Homo sapiens
caaaagcagaaattt

SEQ ID NO: 104729 - DNA, 15 bp, Homo sapiens
gcaaaagcagaaatt

SEQ ID NO: 104730 - DNA, 15 bp, Homo sapiens
tgcaaaagcagaaat

SEQ ID NO: 104731 - DNA, 15 bp, Homo sapiens
atgcaaaagcagaaa

SEQ ID NO: 104732 - DNA, 15 bp, Homo sapiens
gatgcaaaagcagaa

SEQ ID NO: 104733 - DNA, 15 bp, Homo sapiens
agatgcaaaagcaga

SEQ ID NO: 104734 - DNA, 15 bp, Homo sapiens
aagatgcaaaagcag

SEQ ID NO: 104735 - DNA, 15 bp, Homo sapiens
aaagatgcaaaagca

SEQ ID NO: 104736 - DNA, 15 bp, Homo sapiens
caaagatgcaaaagc

SEQ ID NO: 104737 - DNA, 15 bp, Homo sapiens
ccaaagatgcaaaag

SEQ ID NO: 104738 - DNA, 15 bp, Homo sapiens
cccaaagatgcaaaa

SEQ ID NO: 104739 - DNA, 15 bp, Homo sapiens
tcccaaagatgcaaa

SEQ ID NO: 104740 - DNA, 15 bp, Homo sapiens
gtcccaaagatgcaa

SEQ ID NO: 104741 - DNA, 15 bp, Homo sapiens
tgtcccaaagatgca

SEQ ID NO: 104742 - DNA, 15 bp, Homo sapiens
gtgtcccaaagatgc

SEQ ID NO: 104743 - DNA, 15 bp, Homo sapiens
ggtgtcccaaagatg

SEQ ID NO: 104744 - DNA, 15 bp, Homo sapiens
aggtgtcccaaagat

SEQ ID NO: 104745 - DNA, 15 bp, Homo sapiens
gaggtgtcccaaaga

SEQ ID NO: 104746 - DNA, 15 bp, Homo sapiens
tgaggtgtcccaaag

SEQ ID NO: 104747 - DNA, 15 bp, Homo sapiens
ctgaggtgtcccaaa

SEQ ID NO: 104748 - DNA, 15 bp, Homo sapiens
tctgaggtgtcccaa

SEQ ID NO: 104749 - DNA, 15 bp, Homo sapiens
ttctgaggtgtccca

SEQ ID NO: 104750 - DNA, 15 bp, Homo sapiens
tttctgaggtgtccc

SEQ ID NO: 104751 - DNA, 15 bp, Homo sapiens
ttttctgaggtgtcc

SEQ ID NO: 104752 - DNA, 15 bp, Homo sapiens
gttttctgaggtgtc

SEQ ID NO: 104753 - DNA, 15 bp, Homo sapiens
agttttctgaggtgt

SEQ ID NO: 104754 - DNA, 15 bp, Homo sapiens
aagttttctgaggtg

SEQ ID NO: 104755 - DNA, 15 bp, Homo sapiens
taagttttctgaggt

SEQ ID NO: 104756 - DNA, 15 bp, Homo sapiens
ataagttttctgagg

SEQ ID NO: 104757 - DNA, 15 bp, Homo sapiens
aataagttttctgag

SEQ ID NO: 104758 - DNA, 15 bp, Homo sapiens
taataagttttctga

SEQ ID NO: 104759 - DNA, 15 bp, Homo sapiens
ttaataagttttctg

SEQ ID NO: 104760 - DNA, 15 bp, Homo sapiens
gttaataagttttct

SEQ ID NO: 104761 - DNA, 15 bp, Homo sapiens
tgttaataagttttc

SEQ ID NO: 104762 - DNA, 15 bp, Homo sapiens
ttgttaataagtttt

SEQ ID NO: 104763 - DNA, 15 bp, Homo sapiens
gttgttaataagttt

SEQ ID NO: 104764 - DNA, 15 bp, Homo sapiens
agttgttaataagtt

SEQ ID NO: 104765 - DNA, 15 bp, Homo sapiens
cagttgttaataagt

SEQ ID NO: 104766 - DNA, 15 bp, Homo sapiens
acagttgttaataag

SEQ ID NO: 104767 - DNA, 15 bp, Homo sapiens
cacagttgttaataa

SEQ ID NO: 104768 - DNA, 15 bp, Homo sapiens
tcacagttgttaata

SEQ ID NO: 104769 - DNA, 15 bp, Homo sapiens
ttcacagttgttaat

SEQ ID NO: 104770 - DNA, 15 bp, Homo sapiens
attcacagttgttaa

SEQ ID NO: 104771 - DNA, 15 bp, Homo sapiens
tattcacagttgtta

SEQ ID NO: 104772 - DNA, 15 bp, Homo sapiens
atattcacagttgtt

SEQ ID NO: 104773 - DNA, 15 bp, Homo sapiens
catattcacagttgt

SEQ ID NO: 104774 - DNA, 15 bp, Homo sapiens
tcatattcacagttg

SEQ ID NO: 104775 - DNA, 15 bp, Homo sapiens
ctcatattcacagtt

SEQ ID NO: 104776 - DNA, 15 bp, Homo sapiens
tctcatattcacagt

SEQ ID NO: 104777 - DNA, 15 bp, Homo sapiens
ttctcatattcacag

SEQ ID NO: 104778 - DNA, 15 bp, Homo sapiens
tttctcatattcaca

SEQ ID NO: 104779 - DNA, 15 bp, Homo sapiens
atttctcatattcac

SEQ ID NO: 104780 - DNA, 15 bp, Homo sapiens
tatttctcatattca

SEQ ID NO: 104781 - DNA, 15 bp, Homo sapiens
gtatttctcatattc

SEQ ID NO: 104782 - DNA, 15 bp, Homo sapiens
tgtatttctcatatt

SEQ ID NO: 104783 - DNA, 15 bp, Homo sapiens
ctgtatttctcatat

SEQ ID NO: 104784 - DNA, 15 bp, Homo sapiens
tctgtatttctcata

SEQ ID NO: 104785 - DNA, 15 bp, Homo sapiens
ttctgtatttctcat

SEQ ID NO: 104786 - DNA, 15 bp, Homo sapiens
cttctgtatttctca

SEQ ID NO: 104787 - DNA, 15 bp, Homo sapiens
tcttctgtatttctc

SEQ ID NO: 104788 - DNA, 15 bp, Homo sapiens
ttcttctgtatttct

SEQ ID NO: 104789 - DNA, 15 bp, Homo sapiens
tttcttctgtatttc

SEQ ID NO: 104790 - DNA, 15 bp, Homo sapiens
ttttcttctgtattt

SEQ ID NO: 104791 - DNA, 15 bp, Homo sapiens
attttcttctgtatt

SEQ ID NO: 104792 - DNA, 15 bp, Homo sapiens
tattttcttctgtat

SEQ ID NO: 104793 - DNA, 15 bp, Homo sapiens
ttattttcttctgta

SEQ ID NO: 104794 - DNA, 15 bp, Homo sapiens
attattttcttctgt

SEQ ID NO: 104795 - DNA, 15 bp, Homo sapiens
tattattttcttctg

SEQ ID NO: 104796 - DNA, 15 bp, Homo sapiens
ttattattttcttct

SEQ ID NO: 104797 - DNA, 15 bp, Homo sapiens
cttattattttcttc

SEQ ID NO: 104798 - DNA, 15 bp, Homo sapiens
gcttattattttctt

SEQ ID NO: 104799 - DNA, 15 bp, Homo sapiens
ggcttattattttct

SEQ ID NO: 104800 - DNA, 15 bp, Homo sapiens
gggcttattattttc

SEQ ID NO: 104801 - DNA, 15 bp, Homo sapiens
agggcttattatttt

SEQ ID NO: 104802 - DNA, 15 bp, Homo sapiens
gagggcttattattt

SEQ ID NO: 104803 - DNA, 15 bp, Homo sapiens
agagggcttattatt

SEQ ID NO: 104804 - DNA, 15 bp, Homo sapiens
tagagggcttattat

SEQ ID NO: 104805 - DNA, 15 bp, Homo sapiens
atagagggcttatta

SEQ ID NO: 104806 - DNA, 15 bp, Homo sapiens
tatagagggcttatt

SEQ ID NO: 104807 - DNA, 15 bp, Homo sapiens
gtatagagggcttat

SEQ ID NO: 104808 - DNA, 15 bp, Homo sapiens
tgtatagagggctta

SEQ ID NO: 104809 - DNA, 15 bp, Homo sapiens
atgtatagagggctt

SEQ ID NO: 104810 - DNA, 15 bp, Homo sapiens
tatgtatagagggct

SEQ ID NO: 104811 - DNA, 15 bp, Homo sapiens
ttatgtatagagggc

SEQ ID NO: 104812 - DNA, 15 bp, Homo sapiens
tttatgtatagaggg

SEQ ID NO: 104813 - DNA, 15 bp, Homo sapiens
atttatgtatagagg

SEQ ID NO: 104814 - DNA, 15 bp, Homo sapiens
catttatgtatagag

SEQ ID NO: 104815 - DNA, 15 bp, Homo sapiens
gcatttatgtataga

SEQ ID NO: 104816 - DNA, 15 bp, Homo sapiens
ggcatttatgtatag

SEQ ID NO: 104817 - DNA, 15 bp, Homo sapiens
gggcatttatgtata

SEQ ID NO: 104818 - DNA, 15 bp, Homo sapiens
tgggcatttatgtat

SEQ ID NO: 104819 - DNA, 15 bp, Homo sapiens
ctgggcatttatgta

SEQ ID NO: 104820 - DNA, 15 bp, Homo sapiens
gctgggcatttatgt

SEQ ID NO: 104821 - DNA, 15 bp, Homo sapiens
tgctgggcatttatg

SEQ ID NO: 104822 - DNA, 15 bp, Homo sapiens
gtgctgggcatttat

SEQ ID NO: 104823 - DNA, 15 bp, Homo sapiens
tgtgctgggcattta

SEQ ID NO: 104824 - DNA, 15 bp, Homo sapiens
ttgtgctgggcattt

SEQ ID NO: 104825 - DNA, 15 bp, Homo sapiens
attgtgctgggcatt

SEQ ID NO: 104826 - DNA, 15 bp, Homo sapiens
aattgtgctgggcat

SEQ ID NO: 104827 - DNA, 15 bp, Homo sapiens
gaattgtgctgggca

SEQ ID NO: 104828 - DNA, 15 bp, Homo sapiens
tgaattgtgctgggc

SEQ ID NO: 104829 - DNA, 15 bp, Homo sapiens
atgaattgtgctggg

SEQ ID NO: 104830 - DNA, 15 bp, Homo sapiens
aatgaattgtgctgg

SEQ ID NO: 104831 - DNA, 15 bp, Homo sapiens
caatgaattgtgctg

SEQ ID NO: 104832 - DNA, 15 bp, Homo sapiens
acaatgaattgtgct

SEQ ID NO: 104833 - DNA, 15 bp, Homo sapiens
aacaatgaattgtgc

SEQ ID NO: 104834 - DNA, 15 bp, Homo sapiens
taacaatgaattgtg

SEQ ID NO: 104835 - DNA, 15 bp, Homo sapiens
ttaacaatgaattgt

SEQ ID NO: 104836 - DNA, 15 bp, Homo sapiens
tttaacaatgaattg

SEQ ID NO: 104837 - DNA, 15 bp, Homo sapiens
ttttaacaatgaatt

SEQ ID NO: 104838 - DNA, 15 bp, Homo sapiens
tttttaacaatgaat

SEQ ID NO: 104839 - DNA, 15 bp, Homo sapiens
ttttttaacaatgaa

SEQ ID NO: 104840 - DNA, 15 bp, Homo sapiens
gttttttaacaatga

SEQ ID NO: 104841 - DNA, 15 bp, Homo sapiens
tgttttttaacaatg

SEQ ID NO: 104842 - DNA, 15 bp, Homo sapiens
ttgttttttaacaat

SEQ ID NO: 104843 - DNA, 15 bp, Homo sapiens
gttgttttttaacaa

SEQ ID NO: 104844 - DNA, 15 bp, Homo sapiens
ggttgttttttaaca

SEQ ID NO: 104845 - DNA, 15 bp, Homo sapiens
tggttgttttttaac

SEQ ID NO: 104846 - DNA, 15 bp, Homo sapiens
ttggttgttttttaa

SEQ ID NO: 104847 - DNA, 15 bp, Homo sapiens
tttggttgtttttta

SEQ ID NO: 104848 - DNA, 15 bp, Homo sapiens
gtttggttgtttttt

SEQ ID NO: 104849 - DNA, 15 bp, Homo sapiens
ggtttggttgttttt

SEQ ID NO: 104850 - DNA, 15 bp, Homo sapiens
aggtttggttgtttt

SEQ ID NO: 104851 - DNA, 15 bp, Homo sapiens
gaggtttggttgttt

SEQ ID NO: 104852 - DNA, 15 bp, Homo sapiens
tgaggtttggttgtt

SEQ ID NO: 104853 - DNA, 15 bp, Homo sapiens
gtgaggtttggttgt

SEQ ID NO: 104854 - DNA, 15 bp, Homo sapiens
tgtgaggtttggttg

SEQ ID NO: 104855 - DNA, 15 bp, Homo sapiens
gtgtgaggtttggtt

SEQ ID NO: 104856 - DNA, 15 bp, Homo sapiens
agtgtgaggtttggt

SEQ ID NO: 104857 - DNA, 15 bp, Homo sapiens
tagtgtgaggtttgg

SEQ ID NO: 104858 - DNA, 15 bp, Homo sapiens
gtagtgtgaggtttg

SEQ ID NO: 104859 - DNA, 15 bp, Homo sapiens
agtagtgtgaggttt

SEQ ID NO: 104860 - DNA, 15 bp, Homo sapiens
cagtagtgtgaggtt

SEQ ID NO: 104861 - DNA, 15 bp, Homo sapiens
acagtagtgtgaggt

SEQ ID NO: 104862 - DNA, 15 bp, Homo sapiens
tacagtagtgtgagg

SEQ ID NO: 104863 - DNA, 15 bp, Homo sapiens
atacagtagtgtgag

SEQ ID NO: 104864 - DNA, 15 bp, Homo sapiens
aatacagtagtgtga

SEQ ID NO: 104865 - DNA, 15 bp, Homo sapiens
aaatacagtagtgtg

SEQ ID NO: 104866 - DNA, 15 bp, Homo sapiens
gaaatacagtagtgt

SEQ ID NO: 104867 - DNA, 15 bp, Homo sapiens
tgaaatacagtagtg

SEQ ID NO: 104868 - DNA, 15 bp, Homo sapiens
atgaaatacagtagt

SEQ ID NO: 104869 - DNA, 15 bp, Homo sapiens
aatgaaatacagtag

SEQ ID NO: 104870 - DNA, 15 bp, Homo sapiens
taatgaaatacagta

SEQ ID NO: 104871 - DNA, 15 bp, Homo sapiens
ataatgaaatacagt

SEQ ID NO: 104872 - DNA, 15 bp, Homo sapiens
gataatgaaatacag

SEQ ID NO: 104873 - DNA, 15 bp, Homo sapiens
agataatgaaataca

SEQ ID NO: 104874 - DNA, 15 bp, Homo sapiens
cagataatgaaatac

SEQ ID NO: 104875 - DNA, 15 bp, Homo sapiens
acagataatgaaata

SEQ ID NO: 104876 - DNA, 15 bp, Homo sapiens
tacagataatgaaat

SEQ ID NO: 104877 - DNA, 15 bp, Homo sapiens
gtacagataatgaaa

SEQ ID NO: 104878 - DNA, 15 bp, Homo sapiens
agtacagataatgaa

SEQ ID NO: 104879 - DNA, 15 bp, Homo sapiens
cagtacagataatga

SEQ ID NO: 104880 - DNA, 15 bp, Homo sapiens
tcagtacagataatg

SEQ ID NO: 104881 - DNA, 15 bp, Homo sapiens
ttcagtacagataat

SEQ ID NO: 104882 - DNA, 15 bp, Homo sapiens
tttcagtacagataa

SEQ ID NO: 104883 - DNA, 15 bp, Homo sapiens
ctttcagtacagata

SEQ ID NO: 104884 - DNA, 15 bp, Homo sapiens
gctttcagtacagat

SEQ ID NO: 104885 - DNA, 15 bp, Homo sapiens
tgctttcagtacaga

SEQ ID NO: 104886 - DNA, 15 bp, Homo sapiens
ttgctttcagtacag

SEQ ID NO: 104887 - DNA, 15 bp, Homo sapiens
tttgctttcagtaca

SEQ ID NO: 104888 - DNA, 15 bp, Homo sapiens
atttgctttcagtac

SEQ ID NO: 104889 - DNA, 15 bp, Homo sapiens
catttgctttcagta

SEQ ID NO: 104890 - DNA, 15 bp, Homo sapiens
gcatttgctttcagt

SEQ ID NO: 104891 - DNA, 15 bp, Homo sapiens
agcatttgctttcag

SEQ ID NO: 104892 - DNA, 15 bp, Homo sapiens
aagcatttgctttca

SEQ ID NO: 104893 - DNA, 15 bp, Homo sapiens
aaagcatttgctttc

SEQ ID NO: 104894 - DNA, 15 bp, Homo sapiens
caaagcatttgcttt

SEQ ID NO: 104895 - DNA, 15 bp, Homo sapiens
acaaagcatttgctt

SEQ ID NO: 104896 - DNA, 15 bp, Homo sapiens
cacaaagcatttgct

SEQ ID NO: 104897 - DNA, 15 bp, Homo sapiens
tcacaaagcatttgc

SEQ ID NO: 104898 - DNA, 15 bp, Homo sapiens
gtcacaaagcatttg

SEQ ID NO: 104899 - DNA, 15 bp, Homo sapiens
agtcacaaagcattt

SEQ ID NO: 104900 - DNA, 15 bp, Homo sapiens
tagtcacaaagcatt

SEQ ID NO: 104901 - DNA, 15 bp, Homo sapiens
atagtcacaaagcat

SEQ ID NO: 104902 - DNA, 15 bp, Homo sapiens
aatagtcacaaagca

SEQ ID NO: 104903 - DNA, 15 bp, Homo sapiens
taatagtcacaaagc

SEQ ID NO: 104904 - DNA, 15 bp, Homo sapiens
ttaatagtcacaaag

SEQ ID NO: 104905 - DNA, 15 bp, Homo sapiens
tttaatagtcacaaa

SEQ ID NO: 104906 - DNA, 15 bp, Homo sapiens
atttaatagtcacaa

SEQ ID NO: 104907 - DNA, 15 bp, Homo sapiens
catttaatagtcaca

SEQ ID NO: 104908 - DNA, 15 bp, Homo sapiens
acatttaatagtcac

SEQ ID NO: 104909 - DNA, 15 bp, Homo sapiens
aacatttaatagtca

SEQ ID NO: 104910 - DNA, 15 bp, Homo sapiens
caacatttaatagtc

SEQ ID NO: 104911 - DNA, 15 bp, Homo sapiens
gcaacatttaatagt

SEQ ID NO: 104912 - DNA, 15 bp, Homo sapiens
tgcaacatttaatag

SEQ ID NO: 104913 - DNA, 15 bp, Homo sapiens
gtgcaacatttaata

SEQ ID NO: 104914 - DNA, 15 bp, Homo sapiens
tgtgcaacatttaat

SEQ ID NO: 104915 - DNA, 15 bp, Homo sapiens
atgtgcaacatttaa

SEQ ID NO: 104916 - DNA, 15 bp, Homo sapiens
gatgtgcaacattta

SEQ ID NO: 104917 - DNA, 15 bp, Homo sapiens
tgatgtgcaacattt

SEQ ID NO: 104918 - DNA, 15 bp, Homo sapiens
atgatgtgcaacatt

SEQ ID NO: 104919 - DNA, 15 bp, Homo sapiens
aatgatgtgcaacat

SEQ ID NO: 104920 - DNA, 15 bp, Homo sapiens
gaatgatgtgcaaca

SEQ ID NO: 104921 - DNA, 15 bp, Homo sapiens
tgaatgatgtgcaac

SEQ ID NO: 104922 - DNA, 15 bp, Homo sapiens
atgaatgatgtgcaa

SEQ ID NO: 104923 - DNA, 15 bp, Homo sapiens
aatgaatgatgtgca

SEQ ID NO: 104924 - DNA, 15 bp, Homo sapiens
gaatgaatgatgtgc

SEQ ID NO: 104925 - DNA, 15 bp, Homo sapiens
tgaatgaatgatgtg

SEQ ID NO: 104926 - DNA, 15 bp, Homo sapiens
gtgaatgaatgatgt

SEQ ID NO: 104927 - DNA, 15 bp, Homo sapiens
agtgaatgaatgatg

SEQ ID NO: 104928 - DNA, 15 bp, Homo sapiens
cagtgaatgaatgat

SEQ ID NO: 104929 - DNA, 15 bp, Homo sapiens
acagtgaatgaatga

SEQ ID NO: 104930 - DNA, 15 bp, Homo sapiens
tacagtgaatgaatg

SEQ ID NO: 104931 - DNA, 15 bp, Homo sapiens
atacagtgaatgaat

SEQ ID NO: 104932 - DNA, 15 bp, Homo sapiens
tatacagtgaatgaa

SEQ ID NO: 104933 - DNA, 15 bp, Homo sapiens
ctatacagtgaatga

SEQ ID NO: 104934 - DNA, 15 bp, Homo sapiens
actatacagtgaatg

SEQ ID NO: 104935 - DNA, 15 bp, Homo sapiens
tactatacagtgaat

SEQ ID NO: 104936 - DNA, 15 bp, Homo sapiens
ttactatacagtgaa

SEQ ID NO: 104937 - DNA, 15 bp, Homo sapiens
attactatacagtga

SEQ ID NO: 104938 - DNA, 15 bp, Homo sapiens
gattactatacagtg

SEQ ID NO: 104939 - DNA, 15 bp, Homo sapiens
tgattactatacagt

SEQ ID NO: 104940 - DNA, 15 bp, Homo sapiens
atgattactatacag

SEQ ID NO: 104941 - DNA, 15 bp, Homo sapiens
aatgattactataca

SEQ ID NO: 104942 - DNA, 15 bp, Homo sapiens
caatgattactatac

SEQ ID NO: 104943 - DNA, 15 bp, Homo sapiens
tcaatgattactata

SEQ ID NO: 104944 - DNA, 15 bp, Homo sapiens
gtcaatgattactat

SEQ ID NO: 104945 - DNA, 15 bp, Homo sapiens
agtcaatgattacta

SEQ ID NO: 104946 - DNA, 15 bp, Homo sapiens
tagtcaatgattact

SEQ ID NO: 104947 - DNA, 15 bp, Homo sapiens
ttagtcaatgattac

SEQ ID NO: 104948 - DNA, 15 bp, Homo sapiens
tttagtcaatgatta

SEQ ID NO: 104949 - DNA, 15 bp, Homo sapiens
ctttagtcaatgatt

SEQ ID NO: 104950 - DNA, 15 bp, Homo sapiens
gctttagtcaatgat

SEQ ID NO: 104951 - DNA, 15 bp, Homo sapiens
ggctttagtcaatga

SEQ ID NO: 104952 - DNA, 15 bp, Homo sapiens
tggctttagtcaatg

SEQ ID NO: 104953 - DNA, 15 bp, Homo sapiens
atggctttagtcaat

SEQ ID NO: 104954 - DNA, 15 bp, Homo sapiens
aatggctttagtcaa

SEQ ID NO: 104955 - DNA, 15 bp, Homo sapiens
aaatggctttagtca

SEQ ID NO: 104956 - DNA, 15 bp, Homo sapiens
caaatggctttagtc

SEQ ID NO: 104957 - DNA, 15 bp, Homo sapiens
acaaatggctttagt

SEQ ID NO: 104958 - DNA, 15 bp, Homo sapiens
gacaaatggctttag

SEQ ID NO: 104959 - DNA, 15 bp, Homo sapiens
agacaaatggcttta

SEQ ID NO: 104960 - DNA, 15 bp, Homo sapiens
cagacaaatggcttt

SEQ ID NO: 104961 - DNA, 15 bp, Homo sapiens
acagacaaatggctt

SEQ ID NO: 104962 - DNA, 15 bp, Homo sapiens
cacagacaaatggct

SEQ ID NO: 104963 - DNA, 15 bp, Homo sapiens
acacagacaaatggc

SEQ ID NO: 104964 - DNA, 15 bp, Homo sapiens
aacacagacaaatgg

SEQ ID NO: 104965 - DNA, 15 bp, Homo sapiens
aaacacagacaaatg

SEQ ID NO: 104966 - DNA, 15 bp, Homo sapiens
aaaacacagacaaat

SEQ ID NO: 104967 - DNA, 15 bp, Homo sapiens
gaaaacacagacaaa

SEQ ID NO: 104968 - DNA, 15 bp, Homo sapiens
agaaaacacagacaa

SEQ ID NO: 104969 - DNA, 15 bp, Homo sapiens
aagaaaacacagaca

SEQ ID NO: 104970 - DNA, 15 bp, Homo sapiens
gaagaaaacacagac

SEQ ID NO: 104971 - DNA, 15 bp, Homo sapiens
agaagaaaacacaga

SEQ ID NO: 104972 - DNA, 15 bp, Homo sapiens
aagaagaaaacacag

SEQ ID NO: 104973 - DNA, 15 bp, Homo sapiens
caagaagaaaacaca

SEQ ID NO: 104974 - DNA, 15 bp, Homo sapiens
acaagaagaaaacac

SEQ ID NO: 104975 - DNA, 15 bp, Homo sapiens
cacaagaagaaaaca

SEQ ID NO: 104976 - DNA, 15 bp, Homo sapiens
ccacaagaagaaaac

SEQ ID NO: 104977 - DNA, 15 bp, Homo sapiens
accacaagaagaaaa

SEQ ID NO: 104978 - DNA, 15 bp, Homo sapiens
aaccacaagaagaaa

SEQ ID NO: 104979 - DNA, 15 bp, Homo sapiens
caaccacaagaagaa

SEQ ID NO: 104980 - DNA, 15 bp, Homo sapiens
acaaccacaagaaga

SEQ ID NO: 104981 - DNA, 15 bp, Homo sapiens
tacaaccacaagaag

SEQ ID NO: 104982 - DNA, 15 bp, Homo sapiens
atacaaccacaagaa

SEQ ID NO: 104983 - DNA, 15 bp, Homo sapiens
tatacaaccacaaga

SEQ ID NO: 104984 - DNA, 15 bp, Homo sapiens
atatacaaccacaag

SEQ ID NO: 104985 - DNA, 15 bp, Homo sapiens
tatatacaaccacaa

SEQ ID NO: 104986 - DNA, 15 bp, Homo sapiens
atatatacaaccaca

SEQ ID NO: 104987 - DNA, 15 bp, Homo sapiens
gatatatacaaccac

SEQ ID NO: 104988 - DNA, 15 bp, Homo sapiens
tgatatatacaacca

SEQ ID NO: 104989 - DNA, 15 bp, Homo sapiens
ctgatatatacaacc

SEQ ID NO: 104990 - DNA, 15 bp, Homo sapiens
cctgatatatacaac

SEQ ID NO: 104991 - DNA, 15 bp, Homo sapiens
acctgatatatacaa

SEQ ID NO: 104992 - DNA, 15 bp, Homo sapiens
tacctgatatataca

SEQ ID NO: 104993 - DNA, 15 bp, Homo sapiens
ttacctgatatatac

SEQ ID NO: 104994 - DNA, 15 bp, Homo sapiens
tttacctgatatata

SEQ ID NO: 104995 - DNA, 15 bp, Homo sapiens
ttttacctgatatat

SEQ ID NO: 104996 - DNA, 15 bp, Homo sapiens
attttacctgatata

SEQ ID NO: 104997 - DNA, 15 bp, Homo sapiens
tattttacctgatat

SEQ ID NO: 104998 - DNA, 15 bp, Homo sapiens
atattttacctgata

SEQ ID NO: 104999 - DNA, 15 bp, Homo sapiens
aatattttacctgat

SEQ ID NO: 105000 - DNA, 15 bp, Homo sapiens
aaatattttacctga

SEQ ID NO: 105001 - DNA, 15 bp, Homo sapiens
aaaatattttacctg

SEQ ID NO: 105002 - DNA, 15 bp, Homo sapiens
gaaaatattttacct

SEQ ID NO: 105003 - DNA, 15 bp, Homo sapiens
ggaaaatattttacc

SEQ ID NO: 105004 - DNA, 15 bp, Homo sapiens
tggaaaatattttac

SEQ ID NO: 105005 - DNA, 15 bp, Homo sapiens
ttggaaaatatttta

SEQ ID NO: 105006 - DNA, 15 bp, Homo sapiens
tttggaaaatatttt

SEQ ID NO: 105007 - DNA, 15 bp, Homo sapiens
ctttggaaaatattt

SEQ ID NO: 105008 - DNA, 15 bp, Homo sapiens
tctttggaaaatatt

SEQ ID NO: 105009 - DNA, 15 bp, Homo sapiens
ctctttggaaaatat

SEQ ID NO: 105010 - DNA, 15 bp, Homo sapiens
gctctttggaaaata

SEQ ID NO: 105011 - DNA, 15 bp, Homo sapiens
ggctctttggaaaat

SEQ ID NO: 105012 - DNA, 15 bp, Homo sapiens
tggctctttggaaaa

SEQ ID NO: 105013 - DNA, 15 bp, Homo sapiens
atggctctttggaaa

SEQ ID NO: 105014 - DNA, 15 bp, Homo sapiens
catggctctttggaa

SEQ ID NO: 105015 - DNA, 15 bp, Homo sapiens
acatggctctttgga

SEQ ID NO: 105016 - DNA, 15 bp, Homo sapiens
cacatggctctttgg

SEQ ID NO: 105017 - DNA, 15 bp, Homo sapiens
acacatggctctttg

SEQ ID NO: 105018 - DNA, 15 bp, Homo sapiens
gacacatggctcttt

SEQ ID NO: 105019 - DNA, 15 bp, Homo sapiens
tgacacatggctctt

SEQ ID NO: 105020 - DNA, 15 bp, Homo sapiens
atgacacatggctct

SEQ ID NO: 105021 - DNA, 15 bp, Homo sapiens
catgacacatggctc

SEQ ID NO: 105022 - DNA, 15 bp, Homo sapiens
acatgacacatggct

SEQ ID NO: 105023 - DNA, 15 bp, Homo sapiens
tacatgacacatggc

SEQ ID NO: 105024 - DNA, 15 bp, Homo sapiens
ttacatgacacatgg

SEQ ID NO: 105025 - DNA, 15 bp, Homo sapiens
attacatgacacatg

SEQ ID NO: 105026 - DNA, 15 bp, Homo sapiens
tattacatgacacat

SEQ ID NO: 105027 - DNA, 15 bp, Homo sapiens
gtattacatgacaca

SEQ ID NO: 105028 - DNA, 15 bp, Homo sapiens
agtattacatgacac

SEQ ID NO: 105029 - DNA, 15 bp, Homo sapiens
cagtattacatgaca

SEQ ID NO: 105030 - DNA, 15 bp, Homo sapiens
tcagtattacatgac

SEQ ID NO: 105031 - DNA, 15 bp, Homo sapiens
ttcagtattacatga

SEQ ID NO: 105032 - DNA, 15 bp, Homo sapiens
gttcagtattacatg

SEQ ID NO: 105033 - DNA, 15 bp, Homo sapiens
ggttcagtattacat

SEQ ID NO: 105034 - DNA, 15 bp, Homo sapiens
tggttcagtattaca

SEQ ID NO: 105035 - DNA, 15 bp, Homo sapiens
gtggttcagtattac

SEQ ID NO: 105036 - DNA, 15 bp, Homo sapiens
agtggttcagtatta

SEQ ID NO: 105037 - DNA, 15 bp, Homo sapiens
aagtggttcagtatt

SEQ ID NO: 105038 - DNA, 15 bp, Homo sapiens
aaagtggttcagtat

SEQ ID NO: 105039 - DNA, 15 bp, Homo sapiens
caaagtggttcagta

SEQ ID NO: 105040 - DNA, 15 bp, Homo sapiens
tcaaagtggttcagt

SEQ ID NO: 105041 - DNA, 15 bp, Homo sapiens
atcaaagtggttcag

SEQ ID NO: 105042 - DNA, 15 bp, Homo sapiens
tatcaaagtggttca

SEQ ID NO: 105043 - DNA, 15 bp, Homo sapiens
atatcaaagtggttc

SEQ ID NO: 105044 - DNA, 15 bp, Homo sapiens
aatatcaaagtggtt

SEQ ID NO: 105045 - DNA, 15 bp, Homo sapiens
caatatcaaagtggt

SEQ ID NO: 105046 - DNA, 15 bp, Homo sapiens
tcaatatcaaagtgg

SEQ ID NO: 105047 - DNA, 15 bp, Homo sapiens
ctcaatatcaaagtg

SEQ ID NO: 105048 - DNA, 15 bp, Homo sapiens
tctcaatatcaaagt

SEQ ID NO: 105049 - DNA, 15 bp, Homo sapiens
gtctcaatatcaaag

SEQ ID NO: 105050 - DNA, 15 bp, Homo sapiens
tgtctcaatatcaaa

SEQ ID NO: 105051 - DNA, 15 bp, Homo sapiens
atgtctcaatatcaa

SEQ ID NO: 105052 - DNA, 15 bp, Homo sapiens
aatgtctcaatatca

SEQ ID NO: 105053 - DNA, 15 bp, Homo sapiens
taatgtctcaatatc

SEQ ID NO: 105054 - DNA, 15 bp, Homo sapiens
ttaatgtctcaatat

SEQ ID NO: 105055 - DNA, 15 bp, Homo sapiens
attaatgtctcaata

SEQ ID NO: 105056 - DNA, 15 bp, Homo sapiens
aattaatgtctcaat

SEQ ID NO: 105057 - DNA, 15 bp, Homo sapiens
aaattaatgtctcaa

SEQ ID NO: 105058 - DNA, 15 bp, Homo sapiens
caaattaatgtctca

SEQ ID NO: 105059 - DNA, 15 bp, Homo sapiens
acaaattaatgtctc

SEQ ID NO: 105060 - DNA, 15 bp, Homo sapiens
tacaaattaatgtct

SEQ ID NO: 105061 - DNA, 15 bp, Homo sapiens
gtacaaattaatgtc

SEQ ID NO: 105062 - DNA, 15 bp, Homo sapiens
ggtacaaattaatgt

SEQ ID NO: 105063 - DNA, 15 bp, Homo sapiens
gggtacaaattaatg

SEQ ID NO: 105064 - DNA, 15 bp, Homo sapiens
agggtacaaattaat

SEQ ID NO: 105065 - DNA, 15 bp, Homo sapiens
aagggtacaaattaa

SEQ ID NO: 105066 - DNA, 15 bp, Homo sapiens
caagggtacaaatta

SEQ ID NO: 105067 - DNA, 15 bp, Homo sapiens
acaagggtacaaatt

SEQ ID NO: 105068 - DNA, 15 bp, Homo sapiens
aacaagggtacaaat

SEQ ID NO: 105069 - DNA, 15 bp, Homo sapiens
taacaagggtacaaa

SEQ ID NO: 105070 - DNA, 15 bp, Homo sapiens
ataacaagggtacaa

SEQ ID NO: 105071 - DNA, 15 bp, Homo sapiens
aataacaagggtaca

SEQ ID NO: 105072 - DNA, 15 bp, Homo sapiens
taataacaagggtac

SEQ ID NO: 105073 - DNA, 15 bp, Homo sapiens
ataataacaagggta

SEQ ID NO: 105074 - DNA, 15 bp, Homo sapiens
gataataacaagggt

SEQ ID NO: 105075 - DNA, 15 bp, Homo sapiens
agataataacaaggg

SEQ ID NO: 105076 - DNA, 15 bp, Homo sapiens
tagataataacaagg

SEQ ID NO: 105077 - DNA, 15 bp, Homo sapiens
gtagataataacaag

SEQ ID NO: 105078 - DNA, 15 bp, Homo sapiens
agtagataataacaa

SEQ ID NO: 105079 - DNA, 15 bp, Homo sapiens
tagtagataataaca

SEQ ID NO: 105080 - DNA, 15 bp, Homo sapiens
ctagtagataataac

SEQ ID NO: 105081 - DNA, 15 bp, Homo sapiens
actagtagataataa

SEQ ID NO: 105082 - DNA, 15 bp, Homo sapiens
tactagtagataata

SEQ ID NO: 105083 - DNA, 15 bp, Homo sapiens
ttactagtagataat

SEQ ID NO: 105084 - DNA, 15 bp, Homo sapiens
attactagtagataa

SEQ ID NO: 105085 - DNA, 15 bp, Homo sapiens
tattactagtagata

SEQ ID NO: 105086 - DNA, 15 bp, Homo sapiens
ttattactagtagat

SEQ ID NO: 105087 - DNA, 15 bp, Homo sapiens
attattactagtaga

SEQ ID NO: 105088 - DNA, 15 bp, Homo sapiens
cattattactagtag

SEQ ID NO: 105089 - DNA, 15 bp, Homo sapiens
acattattactagta

SEQ ID NO: 105090 - DNA, 15 bp, Homo sapiens
tacattattactagt

SEQ ID NO: 105091 - DNA, 15 bp, Homo sapiens
ttacattattactag

SEQ ID NO: 105092 - DNA, 15 bp, Homo sapiens
attacattattacta

SEQ ID NO: 105093 - DNA, 15 bp, Homo sapiens
tattacattattact

SEQ ID NO: 105094 - DNA, 15 bp, Homo sapiens
gtattacattattac

SEQ ID NO: 105095 - DNA, 15 bp, Homo sapiens
agtattacattatta

SEQ ID NO: 105096 - DNA, 15 bp, Homo sapiens
cagtattacattatt

SEQ ID NO: 105097 - DNA, 15 bp, Homo sapiens
acagtattacattat

SEQ ID NO: 105098 - DNA, 15 bp, Homo sapiens
tacagtattacatta

SEQ ID NO: 105099 - DNA, 15 bp, Homo sapiens
ctacagtattacatt

SEQ ID NO: 105100 - DNA, 15 bp, Homo sapiens
tctacagtattacat

SEQ ID NO: 105101 - DNA, 15 bp, Homo sapiens
ttctacagtattaca

SEQ ID NO: 105102 - DNA, 15 bp, Homo sapiens
tttctacagtattac

SEQ ID NO: 105103 - DNA, 15 bp, Homo sapiens
atttctacagtatta

SEQ ID NO: 105104 - DNA, 15 bp, Homo sapiens
tatttctacagtatt

SEQ ID NO: 105105 - DNA, 15 bp, Homo sapiens
atatttctacagtat

SEQ ID NO: 105106 - DNA, 15 bp, Homo sapiens
aatatttctacagta

SEQ ID NO: 105107 - DNA, 15 bp, Homo sapiens
caatatttctacagt

SEQ ID NO: 105108 - DNA, 15 bp, Homo sapiens
gcaatatttctacag

SEQ ID NO: 105109 - DNA, 15 bp, Homo sapiens
agcaatatttctaca

SEQ ID NO: 105110 - DNA, 15 bp, Homo sapiens
gagcaatatttctac

SEQ ID NO: 105111 - DNA, 15 bp, Homo sapiens
agagcaatatttcta

SEQ ID NO: 105112 - DNA, 15 bp, Homo sapiens
tagagcaatatttct

SEQ ID NO: 105113 - DNA, 15 bp, Homo sapiens
ttagagcaatatttc

SEQ ID NO: 105114 - DNA, 15 bp, Homo sapiens
attagagcaatattt

SEQ ID NO: 105115 - DNA, 15 bp, Homo sapiens
aattagagcaatatt

SEQ ID NO: 105116 - DNA, 15 bp, Homo sapiens
gaattagagcaatat

SEQ ID NO: 105117 - DNA, 15 bp, Homo sapiens
agaattagagcaata

SEQ ID NO: 105118 - DNA, 15 bp, Homo sapiens
aagaattagagcaat

SEQ ID NO: 105119 - DNA, 15 bp, Homo sapiens
aaagaattagagcaa

SEQ ID NO: 105120 - DNA, 15 bp, Homo sapiens
aaaagaattagagca

SEQ ID NO: 105121 - DNA, 15 bp, Homo sapiens
gaaaagaattagagc

SEQ ID NO: 105122 - DNA, 15 bp, Homo sapiens
tgaaaagaattagag

SEQ ID NO: 105123 - DNA, 15 bp, Homo sapiens
ttgaaaagaattaga

SEQ ID NO: 105124 - DNA, 15 bp, Homo sapiens
tttgaaaagaattag

SEQ ID NO: 105125 - DNA, 15 bp, Homo sapiens
ttttgaaaagaatta

SEQ ID NO: 105126 - DNA, 15 bp, Homo sapiens
attttgaaaagaatt

SEQ ID NO: 105127 - DNA, 15 bp, Homo sapiens
aattttgaaaagaat

SEQ ID NO: 105128 - DNA, 15 bp, Homo sapiens
caattttgaaaagaa

SEQ ID NO: 105129 - DNA, 15 bp, Homo sapiens
acaattttgaaaaga

SEQ ID NO: 105130 - DNA, 15 bp, Homo sapiens
aacaattttgaaaag

SEQ ID NO: 105131 - DNA, 15 bp, Homo sapiens
caacaattttgaaaa

SEQ ID NO: 105132 - DNA, 15 bp, Homo sapiens
gcaacaattttgaaa

SEQ ID NO: 105133 - DNA, 15 bp, Homo sapiens
tgcaacaattttgaa

SEQ ID NO: 105134 - DNA, 15 bp, Homo sapiens
atgcaacaattttga

SEQ ID NO: 105135 - DNA, 15 bp, Homo sapiens
gatgcaacaattttg

SEQ ID NO: 105136 - DNA, 15 bp, Homo sapiens
ggatgcaacaatttt

SEQ ID NO: 105137 - DNA, 15 bp, Homo sapiens
gggatgcaacaattt

SEQ ID NO: 105138 - DNA, 15 bp, Homo sapiens
ggggatgcaacaatt

SEQ ID NO: 105139 - DNA, 15 bp, Homo sapiens
gggggatgcaacaat

SEQ ID NO: 105140 - DNA, 15 bp, Homo sapiens
agggggatgcaacaa

SEQ ID NO: 105141 - DNA, 15 bp, Homo sapiens
aagggggatgcaaca

SEQ ID NO: 105142 - DNA, 15 bp, Homo sapiens
taagggggatgcaac

SEQ ID NO: 105143 - DNA, 15 bp, Homo sapiens
ctaagggggatgcaa

SEQ ID NO: 105144 - DNA, 15 bp, Homo sapiens
tctaagggggatgca

SEQ ID NO: 105145 - DNA, 15 bp, Homo sapiens
ttctaagggggatgc

SEQ ID NO: 105146 - DNA, 15 bp, Homo sapiens
attctaagggggatg

SEQ ID NO: 105147 - DNA, 15 bp, Homo sapiens
cattctaagggggat

SEQ ID NO: 105148 - DNA, 15 bp, Homo sapiens
acattctaaggggga

SEQ ID NO: 105149 - DNA, 15 bp, Homo sapiens
aacattctaaggggg

SEQ ID NO: 105150 - DNA, 15 bp, Homo sapiens
aaacattctaagggg

SEQ ID NO: 105151 - DNA, 15 bp, Homo sapiens
gaaacattctaaggg

SEQ ID NO: 105152 - DNA, 15 bp, Homo sapiens
agaaacattctaagg

SEQ ID NO: 105153 - DNA, 15 bp, Homo sapiens
tagaaacattctaag

SEQ ID NO: 105154 - DNA, 15 bp, Homo sapiens
atagaaacattctaa

SEQ ID NO: 105155 - DNA, 15 bp, Homo sapiens
aatagaaacattcta

SEQ ID NO: 105156 - DNA, 15 bp, Homo sapiens
aaatagaaacattct

SEQ ID NO: 105157 - DNA, 15 bp, Homo sapiens
gaaatagaaacattc

SEQ ID NO: 105158 - DNA, 15 bp, Homo sapiens
ggaaatagaaacatt

SEQ ID NO: 105159 - DNA, 15 bp, Homo sapiens
tggaaatagaaacat

SEQ ID NO: 105160 - DNA, 15 bp, Homo sapiens
atggaaatagaaaca

SEQ ID NO: 105161 - DNA, 15 bp, Homo sapiens
tatggaaatagaaac

SEQ ID NO: 105162 - DNA, 15 bp, Homo sapiens
ttatggaaatagaaa

SEQ ID NO: 105163 - DNA, 15 bp, Homo sapiens
cttatggaaatagaa

SEQ ID NO: 105164 - DNA, 15 bp, Homo sapiens
ccttatggaaataga

SEQ ID NO: 105165 - DNA, 15 bp, Homo sapiens
tccttatggaaatag

SEQ ID NO: 105166 - DNA, 15 bp, Homo sapiens
atccttatggaaata

SEQ ID NO: 105167 - DNA, 15 bp, Homo sapiens
aatccttatggaaat

SEQ ID NO: 105168 - DNA, 15 bp, Homo sapiens
aaatccttatggaaa

SEQ ID NO: 105169 - DNA, 15 bp, Homo sapiens
taaatccttatggaa

SEQ ID NO: 105170 - DNA, 15 bp, Homo sapiens
ctaaatccttatgga

SEQ ID NO: 105171 - DNA, 15 bp, Homo sapiens
cctaaatccttatgg

SEQ ID NO: 105172 - DNA, 15 bp, Homo sapiens
acctaaatccttatg

SEQ ID NO: 105173 - DNA, 15 bp, Homo sapiens
tacctaaatccttat

SEQ ID NO: 105174 - DNA, 15 bp, Homo sapiens
atacctaaatcctta

SEQ ID NO: 105175 - DNA, 15 bp, Homo sapiens
catacctaaatcctt

SEQ ID NO: 105176 - DNA, 15 bp, Homo sapiens
gcatacctaaatcct

SEQ ID NO: 105177 - DNA, 15 bp, Homo sapiens
agcatacctaaatcc

SEQ ID NO: 105178 - DNA, 15 bp, Homo sapiens
tagcatacctaaatc

SEQ ID NO: 105179 - DNA, 15 bp, Homo sapiens
atagcatacctaaat

SEQ ID NO: 105180 - DNA, 15 bp, Homo sapiens
aatagcatacctaaa

SEQ ID NO: 105181 - DNA, 15 bp, Homo sapiens
taatagcatacctaa

SEQ ID NO: 105182 - DNA, 15 bp, Homo sapiens
ataatagcataccta

SEQ ID NO: 105183 - DNA, 15 bp, Homo sapiens
gataatagcatacct

SEQ ID NO: 105184 - DNA, 15 bp, Homo sapiens
ggataatagcatacc

SEQ ID NO: 105185 - DNA, 15 bp, Homo sapiens
gggataatagcatac

SEQ ID NO: 105186 - DNA, 15 bp, Homo sapiens
agggataatagcata

SEQ ID NO: 105187 - DNA, 15 bp, Homo sapiens
aagggataatagcat

SEQ ID NO: 105188 - DNA, 15 bp, Homo sapiens
gaagggataatagca

SEQ ID NO: 105189 - DNA, 15 bp, Homo sapiens
agaagggataatagc

SEQ ID NO: 105190 - DNA, 15 bp, Homo sapiens
aagaagggataatag

SEQ ID NO: 105191 - DNA, 15 bp, Homo sapiens
taagaagggataata

SEQ ID NO: 105192 - DNA, 15 bp, Homo sapiens
ataagaagggataat

SEQ ID NO: 105193 - DNA, 15 bp, Homo sapiens
tataagaagggataa

SEQ ID NO: 105194 - DNA, 15 bp, Homo sapiens
gtataagaagggata

SEQ ID NO: 105195 - DNA, 15 bp, Homo sapiens
ggtataagaagggat

SEQ ID NO: 105196 - DNA, 15 bp, Homo sapiens
gggtataagaaggga

SEQ ID NO: 105197 - DNA, 15 bp, Homo sapiens
agggtataagaaggg

SEQ ID NO: 105198 - DNA, 15 bp, Homo sapiens
tagggtataagaagg

SEQ ID NO: 105199 - DNA, 15 bp, Homo sapiens
ttagggtataagaag

SEQ ID NO: 105200 - DNA, 15 bp, Homo sapiens
cttagggtataagaa

SEQ ID NO: 105201 - DNA, 15 bp, Homo sapiens
tcttagggtataaga

SEQ ID NO: 105202 - DNA, 15 bp, Homo sapiens
atcttagggtataag

SEQ ID NO: 105203 - DNA, 15 bp, Homo sapiens
catcttagggtataa

SEQ ID NO: 105204 - DNA, 15 bp, Homo sapiens
tcatcttagggtata

SEQ ID NO: 105205 - DNA, 15 bp, Homo sapiens
ttcatcttagggtat

SEQ ID NO: 105206 - DNA, 15 bp, Homo sapiens
cttcatcttagggta

SEQ ID NO: 105207 - DNA, 15 bp, Homo sapiens
gcttcatcttagggt

SEQ ID NO: 105208 - DNA, 15 bp, Homo sapiens
agcttcatcttaggg

SEQ ID NO: 105209 - DNA, 15 bp, Homo sapiens
cagcttcatcttagg

SEQ ID NO: 105210 - DNA, 15 bp, Homo sapiens
acagcttcatcttag

SEQ ID NO: 105211 - DNA, 15 bp, Homo sapiens
aacagcttcatctta

SEQ ID NO: 105212 - DNA, 15 bp, Homo sapiens
aaacagcttcatctt

SEQ ID NO: 105213 - DNA, 15 bp, Homo sapiens
aaaacagcttcatct

SEQ ID NO: 105214 - DNA, 15 bp, Homo sapiens
aaaaacagcttcatc

SEQ ID NO: 105215 - DNA, 15 bp, Homo sapiens
caaaaacagcttcat

SEQ ID NO: 105216 - DNA, 15 bp, Homo sapiens
acaaaaacagcttca

SEQ ID NO: 105217 - DNA, 15 bp, Homo sapiens
cacaaaaacagcttc

SEQ ID NO: 105218 - DNA, 15 bp, Homo sapiens
gcacaaaaacagctt

SEQ ID NO: 105219 - DNA, 15 bp, Homo sapiens
agcacaaaaacagct

SEQ ID NO: 105220 - DNA, 15 bp, Homo sapiens
gagcacaaaaacagc

SEQ ID NO: 105221 - DNA, 15 bp, Homo sapiens
agagcacaaaaacag

SEQ ID NO: 105222 - DNA, 15 bp, Homo sapiens
aagagcacaaaaaca

SEQ ID NO: 105223 - DNA, 15 bp, Homo sapiens
aaagagcacaaaaac

SEQ ID NO: 105224 - DNA, 15 bp, Homo sapiens
caaagagcacaaaaa

SEQ ID NO: 105225 - DNA, 15 bp, Homo sapiens
acaaagagcacaaaa

SEQ ID NO: 105226 - DNA, 15 bp, Homo sapiens
aacaaagagcacaaa

SEQ ID NO: 105227 - DNA, 15 bp, Homo sapiens
gaacaaagagcacaa

SEQ ID NO: 105228 - DNA, 15 bp, Homo sapiens
tgaacaaagagcaca

SEQ ID NO: 105229 - DNA, 15 bp, Homo sapiens
atgaacaaagagcac

SEQ ID NO: 105230 - DNA, 15 bp, Homo sapiens
gatgaacaaagagca

SEQ ID NO: 105231 - DNA, 15 bp, Homo sapiens
tgatgaacaaagagc

SEQ ID NO: 105232 - DNA, 15 bp, Homo sapiens
atgatgaacaaagag

SEQ ID NO: 105233 - DNA, 15 bp, Homo sapiens
aatgatgaacaaaga

SEQ ID NO: 105234 - DNA, 15 bp, Homo sapiens
caatgatgaacaaag

SEQ ID NO: 105235 - DNA, 15 bp, Homo sapiens
ccaatgatgaacaaa

SEQ ID NO: 105236 - DNA, 15 bp, Homo sapiens
gccaatgatgaacaa

SEQ ID NO: 105237 - DNA, 15 bp, Homo sapiens
ggccaatgatgaaca

SEQ ID NO: 105238 - DNA, 15 bp, Homo sapiens
gggccaatgatgaac

SEQ ID NO: 105239 - DNA, 15 bp, Homo sapiens
agggccaatgatgaa

SEQ ID NO: 105240 - DNA, 15 bp, Homo sapiens
gagggccaatgatga

SEQ ID NO: 105241 - DNA, 15 bp, Homo sapiens
tgagggccaatgatg

SEQ ID NO: 105242 - DNA, 15 bp, Homo sapiens
atgagggccaatgat

SEQ ID NO: 105243 - DNA, 15 bp, Homo sapiens
aatgagggccaatga

SEQ ID NO: 105244 - DNA, 15 bp, Homo sapiens
gaatgagggccaatg

SEQ ID NO: 105245 - DNA, 15 bp, Homo sapiens
ggaatgagggccaat

SEQ ID NO: 105246 - DNA, 15 bp, Homo sapiens
tggaatgagggccaa

SEQ ID NO: 105247 - DNA, 15 bp, Homo sapiens
ttggaatgagggcca

SEQ ID NO: 105248 - DNA, 15 bp, Homo sapiens
cttggaatgagggcc

SEQ ID NO: 105249 - DNA, 15 bp, Homo sapiens
gcttggaatgagggc

SEQ ID NO: 105250 - DNA, 15 bp, Homo sapiens
tgcttggaatgaggg

SEQ ID NO: 105251 - DNA, 15 bp, Homo sapiens
gtgcttggaatgagg

SEQ ID NO: 105252 - DNA, 15 bp, Homo sapiens
agtgcttggaatgag

SEQ ID NO: 105253 - DNA, 15 bp, Homo sapiens
aagtgcttggaatga

SEQ ID NO: 105254 - DNA, 15 bp, Homo sapiens
aaagtgcttggaatg

SEQ ID NO: 105255 - DNA, 15 bp, Homo sapiens
taaagtgcttggaat

SEQ ID NO: 105256 - DNA, 15 bp, Homo sapiens
gtaaagtgcttggaa

SEQ ID NO: 105257 - DNA, 15 bp, Homo sapiens
cgtaaagtgcttgga

SEQ ID NO: 105258 - DNA, 15 bp, Homo sapiens
gcgtaaagtgcttgg

SEQ ID NO: 105259 - DNA, 15 bp, Homo sapiens
agcgtaaagtgcttg

SEQ ID NO: 105260 - DNA, 15 bp, Homo sapiens
cagcgtaaagtgctt

SEQ ID NO: 105261 - DNA, 15 bp, Homo sapiens
acagcgtaaagtgct

SEQ ID NO: 105262 - DNA, 15 bp, Homo sapiens
gacagcgtaaagtgc

SEQ ID NO: 105263 - DNA, 15 bp, Homo sapiens
agacagcgtaaagtg

SEQ ID NO: 105264 - DNA, 15 bp, Homo sapiens
cagacagcgtaaagt

SEQ ID NO: 105265 - DNA, 15 bp, Homo sapiens
acagacagcgtaaag

SEQ ID NO: 105266 - DNA, 15 bp, Homo sapiens
tacagacagcgtaaa

SEQ ID NO: 105267 - DNA, 15 bp, Homo sapiens
ttacagacagcgtaa

SEQ ID NO: 105268 - DNA, 15 bp, Homo sapiens
attacagacagcgta

SEQ ID NO: 105269 - DNA, 15 bp, Homo sapiens
cattacagacagcgt

SEQ ID NO: 105270 - DNA, 15 bp, Homo sapiens
ccattacagacagcg

SEQ ID NO: 105271 - DNA, 15 bp, Homo sapiens
cccattacagacagc

SEQ ID NO: 105272 - DNA, 15 bp, Homo sapiens
tcccattacagacag

SEQ ID NO: 105273 - DNA, 15 bp, Homo sapiens
atcccattacagaca

SEQ ID NO: 105274 - DNA, 15 bp, Homo sapiens
gatcccattacagac

SEQ ID NO: 105275 - DNA, 15 bp, Homo sapiens
agatcccattacaga

SEQ ID NO: 105276 - DNA, 15 bp, Homo sapiens
tagatcccattacag

SEQ ID NO: 105277 - DNA, 15 bp, Homo sapiens
atagatcccattaca

SEQ ID NO: 105278 - DNA, 15 bp, Homo sapiens
aatagatcccattac

SEQ ID NO: 105279 - DNA, 15 bp, Homo sapiens
aaatagatcccatta

SEQ ID NO: 105280 - DNA, 15 bp, Homo sapiens
aaaatagatcccatt

SEQ ID NO: 105281 - DNA, 15 bp, Homo sapiens
aaaaatagatcccat

SEQ ID NO: 105282 - DNA, 15 bp, Homo sapiens
caaaaatagatccca

SEQ ID NO: 105283 - DNA, 15 bp, Homo sapiens
gcaaaaatagatccc

SEQ ID NO: 105284 - DNA, 15 bp, Homo sapiens
tgcaaaaatagatcc

SEQ ID NO: 105285 - DNA, 15 bp, Homo sapiens
gtgcaaaaatagatc

SEQ ID NO: 105286 - DNA, 15 bp, Homo sapiens
agtgcaaaaatagat

SEQ ID NO: 105287 - DNA, 15 bp, Homo sapiens
cagtgcaaaaataga

SEQ ID NO: 105288 - DNA, 15 bp, Homo sapiens
ccagtgcaaaaatag

SEQ ID NO: 105289 - DNA, 15 bp, Homo sapiens
tccagtgcaaaaata

SEQ ID NO: 105290 - DNA, 15 bp, Homo sapiens
ttccagtgcaaaaat

SEQ ID NO: 105291 - DNA, 15 bp, Homo sapiens
attccagtgcaaaaa

SEQ ID NO: 105292 - DNA, 15 bp, Homo sapiens
tattccagtgcaaaa

SEQ ID NO: 105293 - DNA, 15 bp, Homo sapiens
atattccagtgcaaa

SEQ ID NO: 105294 - DNA, 15 bp, Homo sapiens
gatattccagtgcaa

SEQ ID NO: 105295 - DNA, 15 bp, Homo sapiens
agatattccagtgca

SEQ ID NO: 105296 - DNA, 15 bp, Homo sapiens
cagatattccagtgc

SEQ ID NO: 105297 - DNA, 15 bp, Homo sapiens
tcagatattccagtg

SEQ ID NO: 105298 - DNA, 15 bp, Homo sapiens
ctcagatattccagt

SEQ ID NO: 105299 - DNA, 15 bp, Homo sapiens
tctcagatattccag

SEQ ID NO: 105300 - DNA, 15 bp, Homo sapiens
ttctcagatattcca

SEQ ID NO: 105301 - DNA, 15 bp, Homo sapiens
attctcagatattcc

SEQ ID NO: 105302 - DNA, 15 bp, Homo sapiens
aattctcagatattc

SEQ ID NO: 105303 - DNA, 15 bp, Homo sapiens
caattctcagatatt

SEQ ID NO: 105304 - DNA, 15 bp, Homo sapiens
gcaattctcagatat

SEQ ID NO: 105305 - DNA, 15 bp, Homo sapiens
tgcaattctcagata

SEQ ID NO: 105306 - DNA, 15 bp, Homo sapiens
ttgcaattctcagat

SEQ ID NO: 105307 - DNA, 15 bp, Homo sapiens
tttgcaattctcaga

SEQ ID NO: 105308 - DNA, 15 bp, Homo sapiens
ttttgcaattctcag

SEQ ID NO: 105309 - DNA, 15 bp, Homo sapiens
gttttgcaattctca

SEQ ID NO: 105310 - DNA, 15 bp, Homo sapiens
agttttgcaattctc

SEQ ID NO: 105311 - DNA, 15 bp, Homo sapiens
tagttttgcaattct

SEQ ID NO: 105312 - DNA, 15 bp, Homo sapiens
ctagttttgcaattc

SEQ ID NO: 105313 - DNA, 15 bp, Homo sapiens
tctagttttgcaatt

SEQ ID NO: 105314 - DNA, 15 bp, Homo sapiens
gtctagttttgcaat

SEQ ID NO: 105315 - DNA, 15 bp, Homo sapiens
tgtctagttttgcaa

SEQ ID NO: 105316 - DNA, 15 bp, Homo sapiens
ttgtctagttttgca

SEQ ID NO: 105317 - DNA, 15 bp, Homo sapiens
tttgtctagttttgc

SEQ ID NO: 105318 - DNA, 15 bp, Homo sapiens
ttttgtctagttttg

SEQ ID NO: 105319 - DNA, 15 bp, Homo sapiens
cttttgtctagtttt

SEQ ID NO: 105320 - DNA, 15 bp, Homo sapiens
acttttgtctagttt

SEQ ID NO: 105321 - DNA, 15 bp, Homo sapiens
aacttttgtctagtt

SEQ ID NO: 105322 - DNA, 15 bp, Homo sapiens
aaacttttgtctagt

SEQ ID NO: 105323 - DNA, 15 bp, Homo sapiens
gaaacttttgtctag

SEQ ID NO: 105324 - DNA, 15 bp, Homo sapiens
tgaaacttttgtcta

SEQ ID NO: 105325 - DNA, 15 bp, Homo sapiens
gtgaaacttttgtct

SEQ ID NO: 105326 - DNA, 15 bp, Homo sapiens
tgtgaaacttttgtc

SEQ ID NO: 105327 - DNA, 15 bp, Homo sapiens
ttgtgaaacttttgt

SEQ ID NO: 105328 - DNA, 15 bp, Homo sapiens
gttgtgaaacttttg

SEQ ID NO: 105329 - DNA, 15 bp, Homo sapiens
tgttgtgaaactttt

SEQ ID NO: 105330 - DNA, 15 bp, Homo sapiens
ctgttgtgaaacttt

SEQ ID NO: 105331 - DNA, 15 bp, Homo sapiens
tctgttgtgaaactt

SEQ ID NO: 105332 - DNA, 15 bp, Homo sapiens
atctgttgtgaaact

SEQ ID NO: 105333 - DNA, 15 bp, Homo sapiens
aatctgttgtgaaac

SEQ ID NO: 105334 - DNA, 15 bp, Homo sapiens
aaatctgttgtgaaa

SEQ ID NO: 105335 - DNA, 15 bp, Homo sapiens
gaaatctgttgtgaa

SEQ ID NO: 105336 - DNA, 15 bp, Homo sapiens
agaaatctgttgtga

SEQ ID NO: 105337 - DNA, 15 bp, Homo sapiens
tagaaatctgttgtg

SEQ ID NO: 105338 - DNA, 15 bp, Homo sapiens
ttagaaatctgttgt

SEQ ID NO: 105339 - DNA, 15 bp, Homo sapiens
cttagaaatctgttg

SEQ ID NO: 105340 - DNA, 15 bp, Homo sapiens
acttagaaatctgtt

SEQ ID NO: 105341 - DNA, 15 bp, Homo sapiens
aacttagaaatctgt

SEQ ID NO: 105342 - DNA, 15 bp, Homo sapiens
taacttagaaatctg

SEQ ID NO: 105343 - DNA, 15 bp, Homo sapiens
ttaacttagaaatct

SEQ ID NO: 105344 - DNA, 15 bp, Homo sapiens
tttaacttagaaatc

SEQ ID NO: 105345 - DNA, 15 bp, Homo sapiens
atttaacttagaaat

SEQ ID NO: 105346 - DNA, 15 bp, Homo sapiens
gatttaacttagaaa

SEQ ID NO: 105347 - DNA, 15 bp, Homo sapiens
tgatttaacttagaa

SEQ ID NO: 105348 - DNA, 15 bp, Homo sapiens
atgatttaacttaga

SEQ ID NO: 105349 - DNA, 15 bp, Homo sapiens
aatgatttaacttag

SEQ ID NO: 105350 - DNA, 15 bp, Homo sapiens
aaatgatttaactta

SEQ ID NO: 105351 - DNA, 15 bp, Homo sapiens
aaaatgatttaactt

SEQ ID NO: 105352 - DNA, 15 bp, Homo sapiens
gaaaatgatttaact

SEQ ID NO: 105353 - DNA, 15 bp, Homo sapiens
tgaaaatgatttaac

SEQ ID NO: 105354 - DNA, 15 bp, Homo sapiens
atgaaaatgatttaa

SEQ ID NO: 105355 - DNA, 15 bp, Homo sapiens
aatgaaaatgattta

SEQ ID NO: 105356 - DNA, 15 bp, Homo sapiens
taatgaaaatgattt

SEQ ID NO: 105357 - DNA, 15 bp, Homo sapiens
ttaatgaaaatgatt

SEQ ID NO: 105358 - DNA, 15 bp, Homo sapiens
tttaatgaaaatgat

SEQ ID NO: 105359 - DNA, 15 bp, Homo sapiens
ttttaatgaaaatga

SEQ ID NO: 105360 - DNA, 15 bp, Homo sapiens
cttttaatgaaaatg

SEQ ID NO: 105361 - DNA, 15 bp, Homo sapiens
ccttttaatgaaaat

SEQ ID NO: 105362 - DNA, 15 bp, Homo sapiens
tccttttaatgaaaa

SEQ ID NO: 105363 - DNA, 15 bp, Homo sapiens
ttccttttaatgaaa

SEQ ID NO: 105364 - DNA, 15 bp, Homo sapiens
tttccttttaatgaa

SEQ ID NO: 105365 - DNA, 15 bp, Homo sapiens
ttttccttttaatga

SEQ ID NO: 105366 - DNA, 15 bp, Homo sapiens
tttttccttttaatg

SEQ ID NO: 105367 - DNA, 15 bp, Homo sapiens
ttttttccttttaat

SEQ ID NO: 105368 - DNA, 15 bp, Homo sapiens
cttttttccttttaa

SEQ ID NO: 105369 - DNA, 15 bp, Homo sapiens
tcttttttcctttta

SEQ ID NO: 105370 - DNA, 15 bp, Homo sapiens
ttcttttttcctttt

SEQ ID NO: 105371 - DNA, 15 bp, Homo sapiens
tttcttttttccttt

SEQ ID NO: 105372 - DNA, 15 bp, Homo sapiens
ttttcttttttcctt

SEQ ID NO: 105373 - DNA, 15 bp, Homo sapiens
tttttcttttttcct

SEQ ID NO: 105374 - DNA, 15 bp, Homo sapiens
ttttttcttttttcc

SEQ ID NO: 105375 - DNA, 15 bp, Homo sapiens
attttttttcttttt

SEQ ID NO: 105376 - DNA, 15 bp, Homo sapiens
aattttttttctttt

SEQ ID NO: 105377 - DNA, 15 bp, Homo sapiens
aaattttttttcttt

SEQ ID NO: 105378 - DNA, 15 bp, Homo sapiens
aaaattttttttctt

SEQ ID NO: 105379 - DNA, 15 bp, Homo sapiens
caaaattttttttct

SEQ ID NO: 105380 - DNA, 15 bp, Homo sapiens
acaaaattttttttc

SEQ ID NO: 105381 - DNA, 15 bp, Homo sapiens
tacaaaatttttttt

SEQ ID NO: 105382 - DNA, 15 bp, Homo sapiens
atacaaaattttttt

SEQ ID NO: 105383 - DNA, 15 bp, Homo sapiens
catacaaaatttttt

SEQ ID NO: 105384 - DNA, 15 bp, Homo sapiens
acatacaaaattttt

SEQ ID NO: 105385 - DNA, 15 bp, Homo sapiens
gacatacaaaatttt

SEQ ID NO: 105386 - DNA, 15 bp, Homo sapiens
tgacatacaaaattt

SEQ ID NO: 105387 - DNA, 15 bp, Homo sapiens
ttgacatacaaaatt

SEQ ID NO: 105388 - DNA, 15 bp, Homo sapiens
attgacatacaaaat

SEQ ID NO: 105389 - DNA, 15 bp, Homo sapiens
tattgacatacaaaa

SEQ ID NO: 105390 - DNA, 15 bp, Homo sapiens
ttattgacatacaaa

SEQ ID NO: 105391 - DNA, 15 bp, Homo sapiens
gttattgacatacaa

SEQ ID NO: 105392 - DNA, 15 bp, Homo sapiens
agttattgacataca

SEQ ID NO: 105393 - DNA, 15 bp, Homo sapiens
aagttattgacatac

SEQ ID NO: 105394 - DNA, 15 bp, Homo sapiens
aaagttattgacata

SEQ ID NO: 105395 - DNA, 15 bp, Homo sapiens
taaagttattgacat

SEQ ID NO: 105396 - DNA, 15 bp, Homo sapiens
ataaagttattgaca

SEQ ID NO: 105397 - DNA, 15 bp, Homo sapiens
tataaagttattgac

SEQ ID NO: 105398 - DNA, 15 bp, Homo sapiens
atataaagttattga

SEQ ID NO: 105399 - DNA, 15 bp, Homo sapiens
catataaagttattg

SEQ ID NO: 105400 - DNA, 15 bp, Homo sapiens
tcatataaagttatt

SEQ ID NO: 105401 - DNA, 15 bp, Homo sapiens
ttcatataaagttat

SEQ ID NO: 105402 - DNA, 15 bp, Homo sapiens
cttcatataaagtta

SEQ ID NO: 105403 - DNA, 15 bp, Homo sapiens
acttcatataaagtt

SEQ ID NO: 105404 - DNA, 15 bp, Homo sapiens
tacttcatataaagt

SEQ ID NO: 105405 - DNA, 15 bp, Homo sapiens
atacttcatataaag

SEQ ID NO: 105406 - DNA, 15 bp, Homo sapiens
aatacttcatataaa

SEQ ID NO: 105407 - DNA, 15 bp, Homo sapiens
taatacttcatataa

SEQ ID NO: 105408 - DNA, 15 bp, Homo sapiens
ttaatacttcatata

SEQ ID NO: 105409 - DNA, 15 bp, Homo sapiens
tttaatacttcatat

SEQ ID NO: 105410 - DNA, 15 bp, Homo sapiens
ttttaatacttcata

SEQ ID NO: 105411 - DNA, 15 bp, Homo sapiens
attttaatacttcat

SEQ ID NO: 105412 - DNA, 15 bp, Homo sapiens
cattttaatacttca

SEQ ID NO: 105413 - DNA, 15 bp, Homo sapiens
gcattttaatacttc

SEQ ID NO: 105414 - DNA, 15 bp, Homo sapiens
tgcattttaatactt

SEQ ID NO: 105415 - DNA, 15 bp, Homo sapiens
atgcattttaatact

SEQ ID NO: 105416 - DNA, 15 bp, Homo sapiens
tatgcattttaatac

SEQ ID NO: 105417 - DNA, 15 bp, Homo sapiens
atatgcattttaata

SEQ ID NO: 105418 - DNA, 15 bp, Homo sapiens
aatatgcattttaat

SEQ ID NO: 105419 - DNA, 15 bp, Homo sapiens
aaatatgcattttaa

SEQ ID NO: 105420 - DNA, 15 bp, Homo sapiens
gaaatatgcatttta

SEQ ID NO: 105421 - DNA, 15 bp, Homo sapiens
agaaatatgcatttt

SEQ ID NO: 105422 - DNA, 15 bp, Homo sapiens
tagaaatatgcattt

SEQ ID NO: 105423 - DNA, 15 bp, Homo sapiens
atagaaatatgcatt

SEQ ID NO: 105424 - DNA, 15 bp, Homo sapiens
catagaaatatgcat

SEQ ID NO: 105425 - DNA, 15 bp, Homo sapiens
acatagaaatatgca

SEQ ID NO: 105426 - DNA, 15 bp, Homo sapiens
aacatagaaatatgc

SEQ ID NO: 105427 - DNA, 15 bp, Homo sapiens
caacatagaaatatg

SEQ ID NO: 105428 - DNA, 15 bp, Homo sapiens
acaacatagaaatat

SEQ ID NO: 105429 - DNA, 15 bp, Homo sapiens
tacaacatagaaata

SEQ ID NO: 105430 - DNA, 15 bp, Homo sapiens
ttacaacatagaaat

SEQ ID NO: 105431 - DNA, 15 bp, Homo sapiens
attacaacatagaaa

SEQ ID NO: 105432 - DNA, 15 bp, Homo sapiens
tattacaacatagaa

SEQ ID NO: 105433 - DNA, 15 bp, Homo sapiens
atattacaacataga

SEQ ID NO: 105434 - DNA, 15 bp, Homo sapiens
tatattacaacatag

SEQ ID NO: 105435 - DNA, 15 bp, Homo sapiens
ttatattacaacata

SEQ ID NO: 105436 - DNA, 15 bp, Homo sapiens
attatattacaacat

SEQ ID NO: 105437 - DNA, 15 bp, Homo sapiens
cattatattacaaca

SEQ ID NO: 105438 - DNA, 15 bp, Homo sapiens
tcattatattacaac

SEQ ID NO: 105439 - DNA, 15 bp, Homo sapiens
ctcattatattacaa

SEQ ID NO: 105440 - DNA, 15 bp, Homo sapiens
actcattatattaca

SEQ ID NO: 105441 - DNA, 15 bp, Homo sapiens
gactcattatattac

SEQ ID NO: 105442 - DNA, 15 bp, Homo sapiens
tgactcattatatta

SEQ ID NO: 105443 - DNA, 15 bp, Homo sapiens
gtgactcattatatt

SEQ ID NO: 105444 - DNA, 15 bp, Homo sapiens
tgtgactcattatat

SEQ ID NO: 105445 - DNA, 15 bp, Homo sapiens
ttgtgactcattata

SEQ ID NO: 105446 - DNA, 15 bp, Homo sapiens
tttgtgactcattat

SEQ ID NO: 105447 - DNA, 15 bp, Homo sapiens
ttttgtgactcatta

SEQ ID NO: 105448 - DNA, 15 bp, Homo sapiens
attttgtgactcatt

SEQ ID NO: 105449 - DNA, 15 bp, Homo sapiens
tattttgtgactcat

SEQ ID NO: 105450 - DNA, 15 bp, Homo sapiens
ttattttgtgactca

SEQ ID NO: 105451 - DNA, 15 bp, Homo sapiens
tttattttgtgactc

SEQ ID NO: 105452 - DNA, 15 bp, Homo sapiens
ctttattttgtgact

SEQ ID NO: 105453 - DNA, 15 bp, Homo sapiens
gctttattttgtgac

SEQ ID NO: 105454 - DNA, 15 bp, Homo sapiens
agctttattttgtga

SEQ ID NO: 105455 - DNA, 15 bp, Homo sapiens
cagctttattttgtg

SEQ ID NO: 105456 - DNA, 15 bp, Homo sapiens
acagctttattttgt

SEQ ID NO: 105457 - DNA, 15 bp, Homo sapiens
cacagctttattttg

SEQ ID NO: 105458 - DNA, 15 bp, Homo sapiens
tcacagctttatttt

SEQ ID NO: 105459 - DNA, 15 bp, Homo sapiens
gtcacagctttattt

SEQ ID NO: 105460 - DNA, 15 bp, Homo sapiens
tgtcacagctttatt

SEQ ID NO: 105461 - DNA, 15 bp, Homo sapiens
ctgtcacagctttat

SEQ ID NO: 105462 - DNA, 15 bp, Homo sapiens
actgtcacagcttta

SEQ ID NO: 105463 - DNA, 15 bp, Homo sapiens
aactgtcacagcttt

SEQ ID NO: 105464 - DNA, 15 bp, Homo sapiens
gaactgtcacagctt

SEQ ID NO: 105465 - DNA, 15 bp, Homo sapiens
agaactgtcacagct

SEQ ID NO: 105466 - DNA, 15 bp, Homo sapiens
cagaactgtcacagc

SEQ ID NO: 105467 - DNA, 15 bp, Homo sapiens
acagaactgtcacag

SEQ ID NO: 105468 - DNA, 15 bp, Homo sapiens
aacagaactgtcaca

SEQ ID NO: 105469 - DNA, 15 bp, Homo sapiens
caacagaactgtcac

SEQ ID NO: 105470 - DNA, 15 bp, Homo sapiens
ccaacagaactgtca

SEQ ID NO: 105471 - DNA, 15 bp, Homo sapiens
accaacagaactgtc

SEQ ID NO: 105472 - DNA, 15 bp, Homo sapiens
gaccaacagaactgt

SEQ ID NO: 105473 - DNA, 15 bp, Homo sapiens
agaccaacagaactg

SEQ ID NO: 105474 - DNA, 15 bp, Homo sapiens
tagaccaacagaact

SEQ ID NO: 105475 - DNA, 15 bp, Homo sapiens
gtagaccaacagaac

SEQ ID NO: 105476 - DNA, 15 bp, Homo sapiens
tgtagaccaacagaa

SEQ ID NO: 105477 - DNA, 15 bp, Homo sapiens
ctgtagaccaacaga

SEQ ID NO: 105478 - DNA, 15 bp, Homo sapiens
tctgtagaccaacag

SEQ ID NO: 105479 - DNA, 15 bp, Homo sapiens
ttctgtagaccaaca

SEQ ID NO: 105480 - DNA, 15 bp, Homo sapiens
tttctgtagaccaac

SEQ ID NO: 105481 - DNA, 15 bp, Homo sapiens
atttctgtagaccaa

SEQ ID NO: 105482 - DNA, 15 bp, Homo sapiens
aatttctgtagacca

SEQ ID NO: 105483 - DNA, 15 bp, Homo sapiens
aaatttctgtagacc

SEQ ID NO: 105484 - DNA, 15 bp, Homo sapiens
taaatttctgtagac

SEQ ID NO: 105485 - DNA, 15 bp, Homo sapiens
gtaaatttctgtaga

SEQ ID NO: 105486 - DNA, 15 bp, Homo sapiens
agtaaatttctgtag

SEQ ID NO: 105487 - DNA, 15 bp, Homo sapiens
aagtaaatttctgta

SEQ ID NO: 105488 - DNA, 15 bp, Homo sapiens
aaagtaaatttctgt

SEQ ID NO: 105489 - DNA, 15 bp, Homo sapiens
aaaagtaaatttctg

SEQ ID NO: 105490 - DNA, 15 bp, Homo sapiens
caaaagtaaatttct

SEQ ID NO: 105491 - DNA, 15 bp, Homo sapiens
acaaaagtaaatttc

SEQ ID NO: 105492 - DNA, 15 bp, Homo sapiens
cacaaaagtaaattt

SEQ ID NO: 105493 - DNA, 15 bp, Homo sapiens
gcacaaaagtaaatt

SEQ ID NO: 105494 - DNA, 15 bp, Homo sapiens
tgcacaaaagtaaat

SEQ ID NO: 105495 - DNA, 15 bp, Homo sapiens
atgcacaaaagtaaa

SEQ ID NO: 105496 - DNA, 15 bp, Homo sapiens
aatgcacaaaagtaa

SEQ ID NO: 105497 - DNA, 15 bp, Homo sapiens
aaatgcacaaaagta

SEQ ID NO: 105498 - DNA, 15 bp, Homo sapiens
caaatgcacaaaagt

SEQ ID NO: 105499 - DNA, 15 bp, Homo sapiens
acaaatgcacaaaag

SEQ ID NO: 105500 - DNA, 15 bp, Homo sapiens
cacaaatgcacaaaa

SEQ ID NO: 105501 - DNA, 15 bp, Homo sapiens
ccacaaatgcacaaa

SEQ ID NO: 105502 - DNA, 15 bp, Homo sapiens
gccacaaatgcacaa

SEQ ID NO: 105503 - DNA, 15 bp, Homo sapiens
tgccacaaatgcaca

SEQ ID NO: 105504 - DNA, 15 bp, Homo sapiens
gtgccacaaatgcac

SEQ ID NO: 105505 - DNA, 15 bp, Homo sapiens
ggtgccacaaatgca

SEQ ID NO: 105506 - DNA, 15 bp, Homo sapiens
tggtgccacaaatgc

SEQ ID NO: 105507 - DNA, 15 bp, Homo sapiens
gtggtgccacaaatg

SEQ ID NO: 105508 - DNA, 15 bp, Homo sapiens
ggtggtgccacaaat

SEQ ID NO: 105509 - DNA, 15 bp, Homo sapiens
aggtggtgccacaaa

SEQ ID NO: 105510 - DNA, 15 bp, Homo sapiens
taggtggtgccacaa

SEQ ID NO: 105511 - DNA, 15 bp, Homo sapiens
gtaggtggtgccaca

SEQ ID NO: 105512 - DNA, 15 bp, Homo sapiens
agtaggtggtgccac

SEQ ID NO: 105513 - DNA, 15 bp, Homo sapiens
cagtaggtggtgcca

SEQ ID NO: 105514 - DNA, 15 bp, Homo sapiens
acagtaggtggtgcc

SEQ ID NO: 105515 - DNA, 15 bp, Homo sapiens
aacagtaggtggtgc

SEQ ID NO: 105516 - DNA, 15 bp, Homo sapiens
caacagtaggtggtg

SEQ ID NO: 105517 - DNA, 15 bp, Homo sapiens
tcaacagtaggtggt

SEQ ID NO: 105518 - DNA, 15 bp, Homo sapiens
ttcaacagtaggtgg

SEQ ID NO: 105519 - DNA, 15 bp, Homo sapiens
cttcaacagtaggtg

SEQ ID NO: 105520 - DNA, 15 bp, Homo sapiens
ccttcaacagtaggt

SEQ ID NO: 105521 - DNA, 15 bp, Homo sapiens
cccttcaacagtagg

SEQ ID NO: 105522 - DNA, 15 bp, Homo sapiens
acccttcaacagtag

SEQ ID NO: 105523 - DNA, 15 bp, Homo sapiens
aacccttcaacagta

SEQ ID NO: 105524 - DNA, 15 bp, Homo sapiens
taacccttcaacagt

SEQ ID NO: 105525 - DNA, 15 bp, Homo sapiens
ataacccttcaacag

SEQ ID NO: 105526 - DNA, 15 bp, Homo sapiens
tataacccttcaaca

SEQ ID NO: 105527 - DNA, 15 bp, Homo sapiens
ttataacccttcaac

SEQ ID NO: 105528 - DNA, 15 bp, Homo sapiens
tttataacccttcaa

SEQ ID NO: 105529 - DNA, 15 bp, Homo sapiens
ctttataacccttca

SEQ ID NO: 105530 - DNA, 15 bp, Homo sapiens
gctttataacccttc

SEQ ID NO: 105531 - DNA, 15 bp, Homo sapiens
ggctttataaccctt

SEQ ID NO: 105532 - DNA, 15 bp, Homo sapiens
tggctttataaccct

SEQ ID NO: 105533 - DNA, 15 bp, Homo sapiens
atggctttataaccc

SEQ ID NO: 105534 - DNA, 15 bp, Homo sapiens
aatggctttataacc

SEQ ID NO: 105535 - DNA, 15 bp, Homo sapiens
taatggctttataac

SEQ ID NO: 105536 - DNA, 15 bp, Homo sapiens
ctaatggctttataa

SEQ ID NO: 105537 - DNA, 15 bp, Homo sapiens
tctaatggctttata

SEQ ID NO: 105538 - DNA, 15 bp, Homo sapiens
ttctaatggctttat

SEQ ID NO: 105539 - DNA, 15 bp, Homo sapiens
tttctaatggcttta

SEQ ID NO: 105540 - DNA, 15 bp, Homo sapiens
ttttctaatggcttt

SEQ ID NO: 105541 - DNA, 15 bp, Homo sapiens
cttttctaatggctt

SEQ ID NO: 105542 - DNA, 15 bp, Homo sapiens
acttttctaatggct

SEQ ID NO: 105543 - DNA, 15 bp, Homo sapiens
tacttttctaatggc

SEQ ID NO: 105544 - DNA, 15 bp, Homo sapiens
ctacttttctaatgg

SEQ ID NO: 105545 - DNA, 15 bp, Homo sapiens
tctacttttctaatg

SEQ ID NO: 105546 - DNA, 15 bp, Homo sapiens
ctctacttttctaat

SEQ ID NO: 105547 - DNA, 15 bp, Homo sapiens
cctctacttttctaa

SEQ ID NO: 105548 - DNA, 15 bp, Homo sapiens
ccctctacttttcta

SEQ ID NO: 105549 - DNA, 15 bp, Homo sapiens
cccctctacttttct

SEQ ID NO: 105550 - DNA, 15 bp, Homo sapiens
tcccctctacttttc

SEQ ID NO: 105551 - DNA, 15 bp, Homo sapiens
ttcccctctactttt

SEQ ID NO: 105552 - DNA, 15 bp, Homo sapiens
cttcccctctacttt

SEQ ID NO: 105553 - DNA, 15 bp, Homo sapiens
acttcccctctactt

SEQ ID NO: 105554 - DNA, 15 bp, Homo sapiens
cacttcccctctact

SEQ ID NO: 105555 - DNA, 15 bp, Homo sapiens
tcacttcccctctac

SEQ ID NO: 105556 - DNA, 15 bp, Homo sapiens
atcacttcccctcta

SEQ ID NO: 105557 - DNA, 15 bp, Homo sapiens
aatcacttcccctct

SEQ ID NO: 105558 - DNA, 15 bp, Homo sapiens
aaatcacttcccctc

SEQ ID NO: 105559 - DNA, 15 bp, Homo sapiens
caaatcacttcccct

SEQ ID NO: 105560 - DNA, 15 bp, Homo sapiens
ccaaatcacttcccc

SEQ ID NO: 105561 - DNA, 15 bp, Homo sapiens
tccaaatcacttccc

SEQ ID NO: 105562 - DNA, 15 bp, Homo sapiens
atccaaatcacttcc

SEQ ID NO: 105563 - DNA, 15 bp, Homo sapiens
gatccaaatcacttc

SEQ ID NO: 105564 - DNA, 15 bp, Homo sapiens
tgatccaaatcactt

SEQ ID NO: 105565 - DNA, 15 bp, Homo sapiens
ttgatccaaatcact

SEQ ID NO: 105566 - DNA, 15 bp, Homo sapiens
tttgatccaaatcac

SEQ ID NO: 105567 - DNA, 15 bp, Homo sapiens
ttttgatccaaatca

SEQ ID NO: 105568 - DNA, 15 bp, Homo sapiens
cttttgatccaaatc

SEQ ID NO: 105569 - DNA, 15 bp, Homo sapiens
ccttttgatccaaat

SEQ ID NO: 105570 - DNA, 15 bp, Homo sapiens
tccttttgatccaaa

SEQ ID NO: 105571 - DNA, 15 bp, Homo sapiens
ttccttttgatccaa

SEQ ID NO: 105572 - DNA, 15 bp, Homo sapiens
tttccttttgatcca

SEQ ID NO: 105573 - DNA, 15 bp, Homo sapiens
ttttccttttgatcc

SEQ ID NO: 105574 - DNA, 15 bp, Homo sapiens
tttttccttttgatc

SEQ ID NO: 105575 - DNA, 15 bp, Homo sapiens
gtttttccttttgat

SEQ ID NO: 105576 - DNA, 15 bp, Homo sapiens
agtttttccttttga

SEQ ID NO: 105577 - DNA, 15 bp, Homo sapiens
aagtttttccttttg

SEQ ID NO: 105578 - DNA, 15 bp, Homo sapiens
aaagtttttcctttt

SEQ ID NO: 105579 - DNA, 15 bp, Homo sapiens
taaagtttttccttt

SEQ ID NO: 105580 - DNA, 15 bp, Homo sapiens
ctaaagtttttcctt

SEQ ID NO: 105581 - DNA, 15 bp, Homo sapiens
tctaaagtttttcct

SEQ ID NO: 105582 - DNA, 15 bp, Homo sapiens
ttctaaagtttttcc

SEQ ID NO: 105583 - DNA, 15 bp, Homo sapiens
tttctaaagtttttc

SEQ ID NO: 105584 - DNA, 15 bp, Homo sapiens
ttttctaaagttttt

SEQ ID NO: 105585 - DNA, 15 bp, Homo sapiens
cttttctaaagtttt

SEQ ID NO: 105586 - DNA, 15 bp, Homo sapiens
tcttttctaaagttt

SEQ ID NO: 105587 - DNA, 15 bp, Homo sapiens
atcttttctaaagtt

SEQ ID NO: 105588 - DNA, 15 bp, Homo sapiens
aatcttttctaaagt

SEQ ID NO: 105589 - DNA, 15 bp, Homo sapiens
gaatcttttctaaag

SEQ ID NO: 105590 - DNA, 15 bp, Homo sapiens
tgaatcttttctaaa

SEQ ID NO: 105591 - DNA, 15 bp, Homo sapiens
ttgaatcttttctaa

SEQ ID NO: 105592 - DNA, 15 bp, Homo sapiens
tttgaatcttttcta

SEQ ID NO: 105593 - DNA, 15 bp, Homo sapiens
atttgaatcttttct

SEQ ID NO: 105594 - DNA, 15 bp, Homo sapiens
catttgaatcttttc

SEQ ID NO: 105595 - DNA, 15 bp, Homo sapiens
acatttgaatctttt

SEQ ID NO: 105596 - DNA, 15 bp, Homo sapiens
aacatttgaatcttt

SEQ ID NO: 105597 - DNA, 15 bp, Homo sapiens
gaacatttgaatctt

SEQ ID NO: 105598 - DNA, 15 bp, Homo sapiens
ggaacatttgaatct

SEQ ID NO: 105599 - DNA, 15 bp, Homo sapiens
gggaacatttgaatc

SEQ ID NO: 105600 - DNA, 15 bp, Homo sapiens
agggaacatttgaat

SEQ ID NO: 105601 - DNA, 15 bp, Homo sapiens
aagggaacatttgaa

SEQ ID NO: 105602 - DNA, 15 bp, Homo sapiens
taagggaacatttga

SEQ ID NO: 105603 - DNA, 15 bp, Homo sapiens
ttaagggaacatttg

SEQ ID NO: 105604 - DNA, 15 bp, Homo sapiens
attaagggaacattt

SEQ ID NO: 105605 - DNA, 15 bp, Homo sapiens
gattaagggaacatt

SEQ ID NO: 105606 - DNA, 15 bp, Homo sapiens
tgattaagggaacat

SEQ ID NO: 105607 - DNA, 15 bp, Homo sapiens
atgattaagggaaca

SEQ ID NO: 105608 - DNA, 15 bp, Homo sapiens
tatgattaagggaac

SEQ ID NO: 105609 - DNA, 15 bp, Homo sapiens
ttatgattaagggaa

SEQ ID NO: 105610 - DNA, 15 bp, Homo sapiens
tttatgattaaggga

SEQ ID NO: 105611 - DNA, 15 bp, Homo sapiens
ttttatgattaaggg

SEQ ID NO: 105612 - DNA, 15 bp, Homo sapiens
cttttatgattaagg

SEQ ID NO: 105613 - DNA, 15 bp, Homo sapiens
tcttttatgattaag

SEQ ID NO: 105614 - DNA, 15 bp, Homo sapiens
ctcttttatgattaa

SEQ ID NO: 105615 - DNA, 15 bp, Homo sapiens
tctcttttatgatta

SEQ ID NO: 105616 - DNA, 15 bp, Homo sapiens
ttctcttttatgatt

SEQ ID NO: 105617 - DNA, 15 bp, Homo sapiens
gttctcttttatgat

SEQ ID NO: 105618 - DNA, 15 bp, Homo sapiens
agttctcttttatga

SEQ ID NO: 105619 - DNA, 15 bp, Homo sapiens
cagttctcttttatg

SEQ ID NO: 105620 - DNA, 15 bp, Homo sapiens
tcagttctcttttat

SEQ ID NO: 105621 - DNA, 15 bp, Homo sapiens
ctcagttctctttta

SEQ ID NO: 105622 - DNA, 15 bp, Homo sapiens
cctcagttctctttt

SEQ ID NO: 105623 - DNA, 15 bp, Homo sapiens
ccctcagttctcttt

SEQ ID NO: 105624 - DNA, 15 bp, Homo sapiens
cccctcagttctctt

SEQ ID NO: 105625 - DNA, 15 bp, Homo sapiens
tcccctcagttctct

SEQ ID NO: 105626 - DNA, 15 bp, Homo sapiens
gtcccctcagttctc

SEQ ID NO: 105627 - DNA, 15 bp, Homo sapiens
agtcccctcagttct

SEQ ID NO: 105628 - DNA, 15 bp, Homo sapiens
tagtcccctcagttc

SEQ ID NO: 105629 - DNA, 15 bp, Homo sapiens
gtagtcccctcagtt

SEQ ID NO: 105630 - DNA, 15 bp, Homo sapiens
agtagtcccctcagt

SEQ ID NO: 105631 - DNA, 15 bp, Homo sapiens
aagtagtcccctcag

SEQ ID NO: 105632 - DNA, 15 bp, Homo sapiens
caagtagtcccctca

SEQ ID NO: 105633 - DNA, 15 bp, Homo sapiens
tcaagtagtcccctc

SEQ ID NO: 105634 - DNA, 15 bp, Homo sapiens
ttcaagtagtcccct

SEQ ID NO: 105635 - DNA, 15 bp, Homo sapiens
tttcaagtagtcccc

SEQ ID NO: 105636 - DNA, 15 bp, Homo sapiens
ttttcaagtagtccc

SEQ ID NO: 105637 - DNA, 15 bp, Homo sapiens
attttcaagtagtcc

SEQ ID NO: 105638 - DNA, 15 bp, Homo sapiens
tattttcaagtagtc

SEQ ID NO: 105639 - DNA, 15 bp, Homo sapiens
ttattttcaagtagt

SEQ ID NO: 105640 - DNA, 15 bp, Homo sapiens
tttattttcaagtag

SEQ ID NO: 105641 - DNA, 15 bp, Homo sapiens
ttttattttcaagta

SEQ ID NO: 105642 - DNA, 15 bp, Homo sapiens
cttttattttcaagt

SEQ ID NO: 105643 - DNA, 15 bp, Homo sapiens
ccttttattttcaag

SEQ ID NO: 105644 - DNA, 15 bp, Homo sapiens
accttttattttcaa

SEQ ID NO: 105645 - DNA, 15 bp, Homo sapiens
aaccttttattttca

SEQ ID NO: 105646 - DNA, 15 bp, Homo sapiens
caaccttttattttc

SEQ ID NO: 105647 - DNA, 15 bp, Homo sapiens
acaaccttttatttt

SEQ ID NO: 105648 - DNA, 15 bp, Homo sapiens
aacaaccttttattt

SEQ ID NO: 105649 - DNA, 15 bp, Homo sapiens
aaacaaccttttatt

SEQ ID NO: 105650 - DNA, 15 bp, Homo sapiens
aaaacaaccttttat

SEQ ID NO: 105651 - DNA, 15 bp, Homo sapiens
caaaacaacctttta

SEQ ID NO: 105652 - DNA, 15 bp, Homo sapiens
acaaaacaacctttt

SEQ ID NO: 105653 - DNA, 15 bp, Homo sapiens
tacaaaacaaccttt

SEQ ID NO: 105654 - DNA, 15 bp, Homo sapiens
atacaaaacaacctt

SEQ ID NO: 105655 - DNA, 15 bp, Homo sapiens
aatacaaaacaacct

SEQ ID NO: 105656 - DNA, 15 bp, Homo sapiens
aaatacaaaacaacc

SEQ ID NO: 105657 - DNA, 15 bp, Homo sapiens
aaaatacaaaacaac

SEQ ID NO: 105658 - DNA, 15 bp, Homo sapiens
gaaaatacaaaacaa

SEQ ID NO: 105659 - DNA, 15 bp, Homo sapiens
tgaaaatacaaaaca

SEQ ID NO: 105660 - DNA, 15 bp, Homo sapiens
atgaaaatacaaaac

SEQ ID NO: 105661 - DNA, 15 bp, Homo sapiens
catgaaaatacaaaa

SEQ ID NO: 105662 - DNA, 15 bp, Homo sapiens
acatgaaaatacaaa

SEQ ID NO: 105663 - DNA, 15 bp, Homo sapiens
aacatgaaaatacaa

SEQ ID NO: 105664 - DNA, 15 bp, Homo sapiens
caacatgaaaataca

SEQ ID NO: 105665 - DNA, 15 bp, Homo sapiens
ccaacatgaaaatac

SEQ ID NO: 105666 - DNA, 15 bp, Homo sapiens
accaacatgaaaata

SEQ ID NO: 105667 - DNA, 15 bp, Homo sapiens
aaccaacatgaaaat

SEQ ID NO: 105668 - DNA, 15 bp, Homo sapiens
taaccaacatgaaaa

SEQ ID NO: 105669 - DNA, 15 bp, Homo sapiens
ttaaccaacatgaaa

SEQ ID NO: 105670 - DNA, 15 bp, Homo sapiens
cttaaccaacatgaa

SEQ ID NO: 105671 - DNA, 15 bp, Homo sapiens
tcttaaccaacatga

SEQ ID NO: 105672 - DNA, 15 bp, Homo sapiens
atcttaaccaacatg

SEQ ID NO: 105673 - DNA, 15 bp, Homo sapiens
tatcttaaccaacat

SEQ ID NO: 105674 - DNA, 15 bp, Homo sapiens
gtatcttaaccaaca

SEQ ID NO: 105675 - DNA, 15 bp, Homo sapiens
agtatcttaaccaac

SEQ ID NO: 105676 - DNA, 15 bp, Homo sapiens
cagtatcttaaccaa

SEQ ID NO: 105677 - DNA, 15 bp, Homo sapiens
tcagtatcttaacca

SEQ ID NO: 105678 - DNA, 15 bp, Homo sapiens
ctcagtatcttaacc

SEQ ID NO: 105679 - DNA, 15 bp, Homo sapiens
actcagtatcttaac

SEQ ID NO: 105680 - DNA, 15 bp, Homo sapiens
tactcagtatcttaa

SEQ ID NO: 105681 - DNA, 15 bp, Homo sapiens
ttactcagtatctta

SEQ ID NO: 105682 - DNA, 15 bp, Homo sapiens
gttactcagtatctt

SEQ ID NO: 105683 - DNA, 15 bp, Homo sapiens
agttactcagtatct

SEQ ID NO: 105684 - DNA, 15 bp, Homo sapiens
cagttactcagtatc

SEQ ID NO: 105685 - DNA, 15 bp, Homo sapiens
ccagttactcagtat

SEQ ID NO: 105686 - DNA, 15 bp, Homo sapiens
accagttactcagta

SEQ ID NO: 105687 - DNA, 15 bp, Homo sapiens
taccagttactcagt

SEQ ID NO: 105688 - DNA, 15 bp, Homo sapiens
ataccagttactcag

SEQ ID NO: 105689 - DNA, 15 bp, Homo sapiens
aataccagttactca

SEQ ID NO: 105690 - DNA, 15 bp, Homo sapiens
taataccagttactc

SEQ ID NO: 105691 - DNA, 15 bp, Homo sapiens
ttaataccagttact

SEQ ID NO: 105692 - DNA, 15 bp, Homo sapiens
cttaataccagttac

SEQ ID NO: 105693 - DNA, 15 bp, Homo sapiens
acttaataccagtta

SEQ ID NO: 105694 - DNA, 15 bp, Homo sapiens
cacttaataccagtt

SEQ ID NO: 105695 - DNA, 15 bp, Homo sapiens
acacttaataccagt

SEQ ID NO: 105696 - DNA, 15 bp, Homo sapiens
aacacttaataccag

SEQ ID NO: 105697 - DNA, 15 bp, Homo sapiens
taacacttaatacca

SEQ ID NO: 105698 - DNA, 15 bp, Homo sapiens
ctaacacttaatacc

SEQ ID NO: 105699 - DNA, 15 bp, Homo sapiens
tctaacacttaatac

SEQ ID NO: 105700 - DNA, 15 bp, Homo sapiens
ctctaacacttaata

SEQ ID NO: 105701 - DNA, 15 bp, Homo sapiens
cctctaacacttaat

SEQ ID NO: 105702 - DNA, 15 bp, Homo sapiens
acctctaacacttaa

SEQ ID NO: 105703 - DNA, 15 bp, Homo sapiens
aacctctaacactta

SEQ ID NO: 105704 - DNA, 15 bp, Homo sapiens
aaacctctaacactt

SEQ ID NO: 105705 - DNA, 15 bp, Homo sapiens
aaaacctctaacact

SEQ ID NO: 105706 - DNA, 15 bp, Homo sapiens
aaaaacctctaacac

SEQ ID NO: 105707 - DNA, 15 bp, Homo sapiens
taaaaacctctaaca

SEQ ID NO: 105708 - DNA, 15 bp, Homo sapiens
ctaaaaacctctaac

SEQ ID NO: 105709 - DNA, 15 bp, Homo sapiens
tctaaaaacctctaa

SEQ ID NO: 105710 - DNA, 15 bp, Homo sapiens
atctaaaaacctcta

SEQ ID NO: 105711 - DNA, 15 bp, Homo sapiens
tatctaaaaacctct

SEQ ID NO: 105712 - DNA, 15 bp, Homo sapiens
ttatctaaaaacctc

SEQ ID NO: 105713 - DNA, 15 bp, Homo sapiens
tttatctaaaaacct

SEQ ID NO: 105714 - DNA, 15 bp, Homo sapiens
atttatctaaaaacc

SEQ ID NO: 105715 - DNA, 15 bp, Homo sapiens
tatttatctaaaaac

SEQ ID NO: 105716 - DNA, 15 bp, Homo sapiens
atatttatctaaaaa

SEQ ID NO: 105717 - DNA, 15 bp, Homo sapiens
aatatttatctaaaa

SEQ ID NO: 105718 - DNA, 15 bp, Homo sapiens
gaatatttatctaaa

SEQ ID NO: 105719 - DNA, 15 bp, Homo sapiens
agaatatttatctaa

SEQ ID NO: 105720 - DNA, 15 bp, Homo sapiens
cagaatatttatcta

SEQ ID NO: 105721 - DNA, 15 bp, Homo sapiens
gcagaatatttatct

SEQ ID NO: 105722 - DNA, 15 bp, Homo sapiens
agcagaatatttatc

SEQ ID NO: 105723 - DNA, 15 bp, Homo sapiens
aagcagaatatttat

SEQ ID NO: 105724 - DNA, 15 bp, Homo sapiens
taagcagaatattta

SEQ ID NO: 105725 - DNA, 15 bp, Homo sapiens
ttaagcagaatattt

SEQ ID NO: 105726 - DNA, 15 bp, Homo sapiens
attaagcagaatatt

SEQ ID NO: 105727 - DNA, 15 bp, Homo sapiens
cattaagcagaatat

SEQ ID NO: 105728 - DNA, 15 bp, Homo sapiens
tcattaagcagaata

SEQ ID NO: 105729 - DNA, 15 bp, Homo sapiens
atcattaagcagaat

SEQ ID NO: 105730 - DNA, 15 bp, Homo sapiens
aatcattaagcagaa

SEQ ID NO: 105731 - DNA, 15 bp, Homo sapiens
taatcattaagcaga

SEQ ID NO: 105732 - DNA, 15 bp, Homo sapiens
ataatcattaagcag

SEQ ID NO: 105733 - DNA, 15 bp, Homo sapiens
cataatcattaagca

SEQ ID NO: 105734 - DNA, 15 bp, Homo sapiens
tcataatcattaagc

SEQ ID NO: 105735 - DNA, 15 bp, Homo sapiens
ttcataatcattaag

SEQ ID NO: 105736 - DNA, 15 bp, Homo sapiens
cttcataatcattaa

SEQ ID NO: 105737 - DNA, 15 bp, Homo sapiens
gcttcataatcatta

SEQ ID NO: 105738 - DNA, 15 bp, Homo sapiens
agcttcataatcatt

SEQ ID NO: 105739 - DNA, 15 bp, Homo sapiens
cagcttcataatcat

SEQ ID NO: 105740 - DNA, 15 bp, Homo sapiens
gcagcttcataatca

SEQ ID NO: 105741 - DNA, 15 bp, Homo sapiens
tgcagcttcataatc

SEQ ID NO: 105742 - DNA, 15 bp, Homo sapiens
gtgcagcttcataat

SEQ ID NO: 105743 - DNA, 15 bp, Homo sapiens
agtgcagcttcataa

SEQ ID NO: 105744 - DNA, 15 bp, Homo sapiens
cagtgcagcttcata

SEQ ID NO: 105745 - DNA, 15 bp, Homo sapiens
tcagtgcagcttcat

SEQ ID NO: 105746 - DNA, 15 bp, Homo sapiens
ctcagtgcagcttca

SEQ ID NO: 105747 - DNA, 15 bp, Homo sapiens
tctcagtgcagcttc

SEQ ID NO: 105748 - DNA, 15 bp, Homo sapiens
atctcagtgcagctt

SEQ ID NO: 105749 - DNA, 15 bp, Homo sapiens
aatctcagtgcagct

SEQ ID NO: 105750 - DNA, 15 bp, Homo sapiens
aaatctcagtgcagc

SEQ ID NO: 105751 - DNA, 15 bp, Homo sapiens
gaaatctcagtgcag

SEQ ID NO: 105752 - DNA, 15 bp, Homo sapiens
agaaatctcagtgca

SEQ ID NO: 105753 - DNA, 15 bp, Homo sapiens
cagaaatctcagtgc

SEQ ID NO: 105754 - DNA, 15 bp, Homo sapiens
tcagaaatctcagtg

SEQ ID NO: 105755 - DNA, 15 bp, Homo sapiens
ttcagaaatctcagt

SEQ ID NO: 105756 - DNA, 15 bp, Homo sapiens
tttcagaaatctcag

SEQ ID NO: 105757 - DNA, 15 bp, Homo sapiens
ttttcagaaatctca

SEQ ID NO: 105758 - DNA, 15 bp, Homo sapiens
attttcagaaatctc

SEQ ID NO: 105759 - DNA, 15 bp, Homo sapiens
cattttcagaaatct

SEQ ID NO: 105760 - DNA, 15 bp, Homo sapiens
gcattttcagaaatc

SEQ ID NO: 105761 - DNA, 15 bp, Homo sapiens
agcattttcagaaat

SEQ ID NO: 105762 - DNA, 15 bp, Homo sapiens
gagcattttcagaaa

SEQ ID NO: 105763 - DNA, 15 bp, Homo sapiens
agagcattttcagaa

SEQ ID NO: 105764 - DNA, 15 bp, Homo sapiens
cagagcattttcaga

SEQ ID NO: 105765 - DNA, 15 bp, Homo sapiens
acagagcattttcag

SEQ ID NO: 105766 - DNA, 15 bp, Homo sapiens
tacagagcattttca

SEQ ID NO: 105767 - DNA, 15 bp, Homo sapiens
ctacagagcattttc

SEQ ID NO: 105768 - DNA, 15 bp, Homo sapiens
gctacagagcatttt

SEQ ID NO: 105769 - DNA, 15 bp, Homo sapiens
agctacagagcattt

SEQ ID NO: 105770 - DNA, 15 bp, Homo sapiens
cagctacagagcatt

SEQ ID NO: 105771 - DNA, 15 bp, Homo sapiens
tcagctacagagcat

SEQ ID NO: 105772 - DNA, 15 bp, Homo sapiens
ctcagctacagagca

SEQ ID NO: 105773 - DNA, 15 bp, Homo sapiens
gctcagctacagagc

SEQ ID NO: 105774 - DNA, 15 bp, Homo sapiens
agctcagctacagag

SEQ ID NO: 105775 - DNA, 15 bp, Homo sapiens
aagctcagctacaga

SEQ ID NO: 105776 - DNA, 15 bp, Homo sapiens
taagctcagctacag

SEQ ID NO: 105777 - DNA, 15 bp, Homo sapiens
ataagctcagctaca

SEQ ID NO: 105778 - DNA, 15 bp, Homo sapiens
aataagctcagctac

SEQ ID NO: 105779 - DNA, 15 bp, Homo sapiens
aaataagctcagcta

SEQ ID NO: 105780 - DNA, 15 bp, Homo sapiens
taaataagctcagct

SEQ ID NO: 105781 - DNA, 15 bp, Homo sapiens
ttaaataagctcagc

SEQ ID NO: 105782 - DNA, 15 bp, Homo sapiens
attaaataagctcag

SEQ ID NO: 105783 - DNA, 15 bp, Homo sapiens
tattaaataagctca

SEQ ID NO: 105784 - DNA, 15 bp, Homo sapiens
ttattaaataagctc

SEQ ID NO: 105785 - DNA, 15 bp, Homo sapiens
tttattaaataagct

SEQ ID NO: 105786 - DNA, 15 bp, Homo sapiens
atttattaaataagc

SEQ ID NO: 105787 - DNA, 15 bp, Homo sapiens
catttattaaataag

SEQ ID NO: 105788 - DNA, 15 bp, Homo sapiens
acatttattaaataa

SEQ ID NO: 105789 - DNA, 15 bp, Homo sapiens
aacatttattaaata

SEQ ID NO: 105790 - DNA, 15 bp, Homo sapiens
gaacatttattaaat

SEQ ID NO: 105791 - DNA, 15 bp, Homo sapiens
tgaacatttattaaa

SEQ ID NO: 105792 - DNA, 15 bp, Homo sapiens
gtgaacatttattaa

SEQ ID NO: 105793 - DNA, 15 bp, Homo sapiens
agtgaacatttatta

SEQ ID NO: 105794 - DNA, 15 bp, Homo sapiens
aagtgaacatttatt

SEQ ID NO: 105795 - DNA, 15 bp, Homo sapiens
caagtgaacatttat

SEQ ID NO: 105796 - DNA, 15 bp, Homo sapiens
ccaagtgaacattta

SEQ ID NO: 105797 - DNA, 15 bp, Homo sapiens
accaagtgaacattt

SEQ ID NO: 105798 - DNA, 15 bp, Homo sapiens
taccaagtgaacatt

SEQ ID NO: 105799 - DNA, 15 bp, Homo sapiens
ataccaagtgaacat

SEQ ID NO: 105800 - DNA, 15 bp, Homo sapiens
tataccaagtgaaca

SEQ ID NO: 105801 - DNA, 15 bp, Homo sapiens
ctataccaagtgaac

SEQ ID NO: 105802 - DNA, 15 bp, Homo sapiens
cctataccaagtgaa

SEQ ID NO: 105803 - DNA, 15 bp, Homo sapiens
ccctataccaagtga

SEQ ID NO: 105804 - DNA, 15 bp, Homo sapiens
cccctataccaagtg

SEQ ID NO: 105805 - DNA, 15 bp, Homo sapiens
tcccctataccaagt

SEQ ID NO: 105806 - DNA, 15 bp, Homo sapiens
ttcccctataccaag

SEQ ID NO: 105807 - DNA, 15 bp, Homo sapiens
cttcccctataccaa

SEQ ID NO: 105808 - DNA, 15 bp, Homo sapiens
gcttcccctatacca

SEQ ID NO: 105809 - DNA, 15 bp, Homo sapiens
agcttcccctatacc

SEQ ID NO: 105810 - DNA, 15 bp, Homo sapiens
tagcttcccctatac

SEQ ID NO: 105811 - DNA, 15 bp, Homo sapiens
gtagcttcccctata

SEQ ID NO: 105812 - DNA, 15 bp, Homo sapiens
tgtagcttcccctat

SEQ ID NO: 105813 - DNA, 15 bp, Homo sapiens
ttgtagcttccccta

SEQ ID NO: 105814 - DNA, 15 bp, Homo sapiens
tttgtagcttcccct

SEQ ID NO: 105815 - DNA, 15 bp, Homo sapiens
ctttgtagcttcccc

SEQ ID NO: 105816 - DNA, 15 bp, Homo sapiens
cctttgtagcttccc

SEQ ID NO: 105817 - DNA, 15 bp, Homo sapiens
gcctttgtagcttcc

SEQ ID NO: 105818 - DNA, 15 bp, Homo sapiens
tgcctttgtagcttc

SEQ ID NO: 105819 - DNA, 15 bp, Homo sapiens
ctgcctttgtagctt

SEQ ID NO: 105820 - DNA, 15 bp, Homo sapiens
gctgcctttgtagct

SEQ ID NO: 105821 - DNA, 15 bp, Homo sapiens
ggctgcctttgtagc

SEQ ID NO: 105822 - DNA, 15 bp, Homo sapiens
aggctgcctttgtag

SEQ ID NO: 105823 - DNA, 15 bp, Homo sapiens
aaggctgcctttgta

SEQ ID NO: 105824 - DNA, 15 bp, Homo sapiens
gaaggctgcctttgt

SEQ ID NO: 105825 - DNA, 15 bp, Homo sapiens
tgaaggctgcctttg

SEQ ID NO: 105826 - DNA, 15 bp, Homo sapiens
ctgaaggctgccttt

SEQ ID NO: 105827 - DNA, 15 bp, Homo sapiens
actgaaggctgcctt

SEQ ID NO: 105828 - DNA, 15 bp, Homo sapiens
cactgaaggctgcct

SEQ ID NO: 105829 - DNA, 15 bp, Homo sapiens
acactgaaggctgcc

SEQ ID NO: 105830 - DNA, 15 bp, Homo sapiens
gacactgaaggctgc

SEQ ID NO: 105831 - DNA, 15 bp, Homo sapiens
ggacactgaaggctg

SEQ ID NO: 105832 - DNA, 15 bp, Homo sapiens
aggacactgaaggct

SEQ ID NO: 105833 - DNA, 15 bp, Homo sapiens
aaggacactgaaggc

SEQ ID NO: 105834 - DNA, 15 bp, Homo sapiens
aaaggacactgaagg

SEQ ID NO: 105835 - DNA, 15 bp, Homo sapiens
aaaaggacactgaag

SEQ ID NO: 105836 - DNA, 15 bp, Homo sapiens
caaaaggacactgaa

SEQ ID NO: 105837 - DNA, 15 bp, Homo sapiens
acaaaaggacactga

SEQ ID NO: 105838 - DNA, 15 bp, Homo sapiens
aacaaaaggacactg

SEQ ID NO: 105839 - DNA, 15 bp, Homo sapiens
aaacaaaaggacact

SEQ ID NO: 105840 - DNA, 15 bp, Homo sapiens
taaacaaaaggacac

SEQ ID NO: 105841 - DNA, 15 bp, Homo sapiens
ataaacaaaaggaca

SEQ ID NO: 105842 - DNA, 15 bp, Homo sapiens
aataaacaaaaggac

SEQ ID NO: 105843 - DNA, 15 bp, Homo sapiens
gaataaacaaaagga

SEQ ID NO: 105844 - DNA, 15 bp, Homo sapiens
tgaataaacaaaagg

SEQ ID NO: 105845 - DNA, 15 bp, Homo sapiens
ttgaataaacaaaag

SEQ ID NO: 105846 - DNA, 15 bp, Homo sapiens
gttgaataaacaaaa

SEQ ID NO: 105847 - DNA, 15 bp, Homo sapiens
ggttgaataaacaaa

SEQ ID NO: 105848 - DNA, 15 bp, Homo sapiens
tggttgaataaacaa

SEQ ID NO: 105849 - DNA, 15 bp, Homo sapiens
ttggttgaataaaca

SEQ ID NO: 105850 - DNA, 15 bp, Homo sapiens
tttggttgaataaac

SEQ ID NO: 105851 - DNA, 15 bp, Homo sapiens
ttttggttgaataaa

SEQ ID NO: 105852 - DNA, 15 bp, Homo sapiens
tttttggttgaataa

SEQ ID NO: 105853 - DNA, 15 bp, Homo sapiens
atttttggttgaata

SEQ ID NO: 105854 - DNA, 15 bp, Homo sapiens
tatttttggttgaat

SEQ ID NO: 105855 - DNA, 15 bp, Homo sapiens
atatttttggttgaa

SEQ ID NO: 105856 - DNA, 15 bp, Homo sapiens
tatatttttggttga

SEQ ID NO: 105857 - DNA, 15 bp, Homo sapiens
ttatatttttggttg

SEQ ID NO: 105858 - DNA, 15 bp, Homo sapiens
cttatatttttggtt

SEQ ID NO: 105859 - DNA, 15 bp, Homo sapiens
ccttatatttttggt

SEQ ID NO: 105860 - DNA, 15 bp, Homo sapiens
tccttatatttttgg

SEQ ID NO: 105861 - DNA, 15 bp, Homo sapiens
gtccttatatttttg

SEQ ID NO: 105862 - DNA, 15 bp, Homo sapiens
tgtccttatattttt

SEQ ID NO: 105863 - DNA, 15 bp, Homo sapiens
gtgtccttatatttt

SEQ ID NO: 105864 - DNA, 15 bp, Homo sapiens
tgtgtccttatattt

SEQ ID NO: 105865 - DNA, 15 bp, Homo sapiens
ttgtgtccttatatt

SEQ ID NO: 105866 - DNA, 15 bp, Homo sapiens
attgtgtccttatat

SEQ ID NO: 105867 - DNA, 15 bp, Homo sapiens
cattgtgtccttata

SEQ ID NO: 105868 - DNA, 15 bp, Homo sapiens
acattgtgtccttat

SEQ ID NO: 105869 - DNA, 15 bp, Homo sapiens
tacattgtgtcctta

SEQ ID NO: 105870 - DNA, 15 bp, Homo sapiens
ctacattgtgtcctt

SEQ ID NO: 105871 - DNA, 15 bp, Homo sapiens
gctacattgtgtcct

SEQ ID NO: 105872 - DNA, 15 bp, Homo sapiens
tgctacattgtgtcc

SEQ ID NO: 105873 - DNA, 15 bp, Homo sapiens
ctgctacattgtgtc

SEQ ID NO: 105874 - DNA, 15 bp, Homo sapiens
actgctacattgtgt

SEQ ID NO: 105875 - DNA, 15 bp, Homo sapiens
aactgctacattgtg

SEQ ID NO: 105876 - DNA, 15 bp, Homo sapiens
taactgctacattgt

SEQ ID NO: 105877 - DNA, 15 bp, Homo sapiens
ataactgctacattg

SEQ ID NO: 105878 - DNA, 15 bp, Homo sapiens
tataactgctacatt

SEQ ID NO: 105879 - DNA, 15 bp, Homo sapiens
gtataactgctacat

SEQ ID NO: 105880 - DNA, 15 bp, Homo sapiens
agtataactgctaca

SEQ ID NO: 105881 - DNA, 15 bp, Homo sapiens
cagtataactgctac

SEQ ID NO: 105882 - DNA, 15 bp, Homo sapiens
ccagtataactgcta

SEQ ID NO: 105883 - DNA, 15 bp, Homo sapiens
cccagtataactgct

SEQ ID NO: 105884 - DNA, 15 bp, Homo sapiens
tcccagtataactgc

SEQ ID NO: 105885 - DNA, 15 bp, Homo sapiens
ttcccagtataactg

SEQ ID NO: 105886 - DNA, 15 bp, Homo sapiens
cttcccagtataact

SEQ ID NO: 105887 - DNA, 15 bp, Homo sapiens
ccttcccagtataac

SEQ ID NO: 105888 - DNA, 15 bp, Homo sapiens
accttcccagtataa

SEQ ID NO: 105889 - DNA, 15 bp, Homo sapiens
caccttcccagtata

SEQ ID NO: 105890 - DNA, 15 bp, Homo sapiens
gcaccttcccagtat

SEQ ID NO: 105891 - DNA, 15 bp, Homo sapiens
agcaccttcccagta

SEQ ID NO: 105892 - DNA, 15 bp, Homo sapiens
cagcaccttcccagt

SEQ ID NO: 105893 - DNA, 15 bp, Homo sapiens
ccagcaccttcccag

SEQ ID NO: 105894 - DNA, 15 bp, Homo sapiens
cccagcaccttccca

SEQ ID NO: 105895 - DNA, 15 bp, Homo sapiens
ccccagcaccttccc

SEQ ID NO: 105896 - DNA, 15 bp, Homo sapiens
cccccagcaccttcc

SEQ ID NO: 105897 - DNA, 15 bp, Homo sapiens
acccccagcaccttc

SEQ ID NO: 105898 - DNA, 15 bp, Homo sapiens
cacccccagcacctt

SEQ ID NO: 105899 - DNA, 15 bp, Homo sapiens
ccacccccagcacct

SEQ ID NO: 105900 - DNA, 15 bp, Homo sapiens
accacccccagcacc

SEQ ID NO: 105901 - DNA, 15 bp, Homo sapiens
caccacccccagcac

SEQ ID NO: 105902 - DNA, 15 bp, Homo sapiens
ccaccacccccagca

SEQ ID NO: 105903 - DNA, 15 bp, Homo sapiens
gccaccacccccagc

SEQ ID NO: 105904 - DNA, 15 bp, Homo sapiens
tgccaccacccccag

SEQ ID NO: 105905 - DNA, 15 bp, Homo sapiens
ttgccaccaccccca

SEQ ID NO: 105906 - DNA, 15 bp, Homo sapiens
attgccaccaccccc

SEQ ID NO: 105907 - DNA, 15 bp, Homo sapiens
cattgccaccacccc

SEQ ID NO: 105908 - DNA, 15 bp, Homo sapiens
ccattgccaccaccc

SEQ ID NO: 105909 - DNA, 15 bp, Homo sapiens
accattgccaccacc

SEQ ID NO: 105910 - DNA, 15 bp, Homo sapiens
caccattgccaccac

SEQ ID NO: 105911 - DNA, 15 bp, Homo sapiens
tcaccattgccacca

SEQ ID NO: 105912 - DNA, 15 bp, Homo sapiens
ctcaccattgccacc

SEQ ID NO: 105913 - DNA, 15 bp, Homo sapiens
gctcaccattgccac

SEQ ID NO: 105914 - DNA, 15 bp, Homo sapiens
tgctcaccattgcca

SEQ ID NO: 105915 - DNA, 15 bp, Homo sapiens
ctgctcaccattgcc

SEQ ID NO: 105916 - DNA, 15 bp, Homo sapiens
cctgctcaccattgc

SEQ ID NO: 105917 - DNA, 15 bp, Homo sapiens
tcctgctcaccattg

SEQ ID NO: 105918 - DNA, 15 bp, Homo sapiens
ttcctgctcaccatt

SEQ ID NO: 105919 - DNA, 15 bp, Homo sapiens
cttcctgctcaccat

SEQ ID NO: 105920 - DNA, 15 bp, Homo sapiens
ccttcctgctcacca

SEQ ID NO: 105921 - DNA, 15 bp, Homo sapiens
gccttcctgctcacc

SEQ ID NO: 105922 - DNA, 15 bp, Homo sapiens
cgccttcctgctcac

SEQ ID NO: 105923 - DNA, 15 bp, Homo sapiens
tcgccttcctgctca

SEQ ID NO: 105924 - DNA, 15 bp, Homo sapiens
ttcgccttcctgctc

SEQ ID NO: 105925 - DNA, 15 bp, Homo sapiens
aggcagttaagatta

SEQ ID NO: 105926 - DNA, 15 bp, Homo sapiens
taggcagttaagatt

SEQ ID NO: 105927 - DNA, 15 bp, Homo sapiens
ctaggcagttaagat

SEQ ID NO: 105928 - DNA, 15 bp, Homo sapiens
tctaggcagttaaga

SEQ ID NO: 105929 - DNA, 15 bp, Homo sapiens
atctaggcagttaag

SEQ ID NO: 105930 - DNA, 15 bp, Homo sapiens
tatctaggcagttaa

SEQ ID NO: 105931 - DNA, 15 bp, Homo sapiens
ttatctaggcagtta

SEQ ID NO: 105932 - DNA, 15 bp, Homo sapiens
tttatctaggcagtt

SEQ ID NO: 105933 - DNA, 15 bp, Homo sapiens
gtttatctaggcagt

SEQ ID NO: 105934 - DNA, 15 bp, Homo sapiens
ggtttatctaggcag

SEQ ID NO: 105935 - DNA, 15 bp, Homo sapiens
aggtttatctaggca

SEQ ID NO: 105936 - DNA, 15 bp, Homo sapiens
aaggtttatctaggc

SEQ ID NO: 105937 - DNA, 15 bp, Homo sapiens
aaaggtttatctagg

SEQ ID NO: 105938 - DNA, 15 bp, Homo sapiens
taaaggtttatctag

SEQ ID NO: 105939 - DNA, 15 bp, Homo sapiens
ataaaggtttatcta

SEQ ID NO: 105940 - DNA, 15 bp, Homo sapiens
gataaaggtttatct

SEQ ID NO: 105941 - DNA, 15 bp, Homo sapiens
tgataaaggtttatc

SEQ ID NO: 105942 - DNA, 15 bp, Homo sapiens
ttgataaaggtttat

SEQ ID NO: 105943 - DNA, 15 bp, Homo sapiens
gttgataaaggttta

SEQ ID NO: 105944 - DNA, 15 bp, Homo sapiens
tgttgataaaggttt

SEQ ID NO: 105945 - DNA, 15 bp, Homo sapiens
atgttgataaaggtt

SEQ ID NO: 105946 - DNA, 15 bp, Homo sapiens
tatgttgataaaggt

SEQ ID NO: 105947 - DNA, 15 bp, Homo sapiens
atatgttgataaagg

SEQ ID NO: 105948 - DNA, 15 bp, Homo sapiens
catatgttgataaag

SEQ ID NO: 105949 - DNA, 15 bp, Homo sapiens
ccatatgttgataaa

SEQ ID NO: 105950 - DNA, 15 bp, Homo sapiens
accatatgttgataa

SEQ ID NO: 105951 - DNA, 15 bp, Homo sapiens
caccatatgttgata

SEQ ID NO: 105952 - DNA, 15 bp, Homo sapiens
acaccatatgttgat

SEQ ID NO: 105953 - DNA, 15 bp, Homo sapiens
cacaccatatgttga

SEQ ID NO: 105954 - DNA, 15 bp, Homo sapiens
acacaccatatgttg

SEQ ID NO: 105955 - DNA, 15 bp, Homo sapiens
aacacaccatatgtt

SEQ ID NO: 105956 - DNA, 15 bp, Homo sapiens
aaacacaccatatgt

SEQ ID NO: 105957 - DNA, 15 bp, Homo sapiens
gaaacacaccatatg

SEQ ID NO: 105958 - DNA, 15 bp, Homo sapiens
ggaaacacaccatat

SEQ ID NO: 105959 - DNA, 15 bp, Homo sapiens
aggaaacacaccata

SEQ ID NO: 105960 - DNA, 15 bp, Homo sapiens
aaggaaacacaccat

SEQ ID NO: 105961 - DNA, 15 bp, Homo sapiens
aaaggaaacacacca

SEQ ID NO: 105962 - DNA, 15 bp, Homo sapiens
taaaggaaacacacc

SEQ ID NO: 105963 - DNA, 15 bp, Homo sapiens
ttaaaggaaacacac

SEQ ID NO: 105964 - DNA, 15 bp, Homo sapiens
tttaaaggaaacaca

SEQ ID NO: 105965 - DNA, 15 bp, Homo sapiens
ttttaaaggaaacac

SEQ ID NO: 105966 - DNA, 15 bp, Homo sapiens
tttttaaaggaaaca

SEQ ID NO: 105967 - DNA, 15 bp, Homo sapiens
ttttttaaaggaaac

SEQ ID NO: 105968 - DNA, 15 bp, Homo sapiens
tttttttaaaggaaa

SEQ ID NO: 105969 - DNA, 15 bp, Homo sapiens
ttttttttaaaggaa

SEQ ID NO: 105970 - DNA, 15 bp, Homo sapiens
attttttttaaagga

SEQ ID NO: 105971 - DNA, 15 bp, Homo sapiens
aattttttttaaagg

SEQ ID NO: 105972 - DNA, 15 bp, Homo sapiens
taattttttttaaag

SEQ ID NO: 105973 - DNA, 15 bp, Homo sapiens
ctaattttttttaaa

SEQ ID NO: 105974 - DNA, 15 bp, Homo sapiens
actaattttttttaa

SEQ ID NO: 105975 - DNA, 15 bp, Homo sapiens
tactaatttttttta

SEQ ID NO: 105976 - DNA, 15 bp, Homo sapiens
ttactaatttttttt

SEQ ID NO: 105977 - DNA, 15 bp, Homo sapiens
tttactaattttttt

SEQ ID NO: 105978 - DNA, 15 bp, Homo sapiens
gtttactaatttttt

SEQ ID NO: 105979 - DNA, 15 bp, Homo sapiens
ggtttactaattttt

SEQ ID NO: 105980 - DNA, 15 bp, Homo sapiens
tggtttactaatttt

SEQ ID NO: 105981 - DNA, 15 bp, Homo sapiens
ttggtttactaattt

SEQ ID NO: 105982 - DNA, 15 bp, Homo sapiens
tttggtttactaatt

SEQ ID NO: 105983 - DNA, 15 bp, Homo sapiens
atttggtttactaat

SEQ ID NO: 105984 - DNA, 15 bp, Homo sapiens
aatttggtttactaa

SEQ ID NO: 105985 - DNA, 15 bp, Homo sapiens
taatttggtttacta

SEQ ID NO: 105986 - DNA, 15 bp, Homo sapiens
ctaatttggtttact

SEQ ID NO: 105987 - DNA, 15 bp, Homo sapiens
cctaatttggtttac

SEQ ID NO: 105988 - DNA, 15 bp, Homo sapiens
ccctaatttggttta

SEQ ID NO: 105989 - DNA, 15 bp, Homo sapiens
accctaatttggttt

SEQ ID NO: 105990 - DNA, 15 bp, Homo sapiens
gaccctaatttggtt

SEQ ID NO: 105991 - DNA, 15 bp, Homo sapiens
agaccctaatttggt

SEQ ID NO: 105992 - DNA, 15 bp, Homo sapiens
aagaccctaatttgg

SEQ ID NO: 105993 - DNA, 15 bp, Homo sapiens
taagaccctaatttg

SEQ ID NO: 105994 - DNA, 15 bp, Homo sapiens
ctaagaccctaattt

SEQ ID NO: 105995 - DNA, 15 bp, Homo sapiens
actaagaccctaatt

SEQ ID NO: 105996 - DNA, 15 bp, Homo sapiens
cactaagaccctaat

SEQ ID NO: 105997 - DNA, 15 bp, Homo sapiens
acactaagaccctaa

SEQ ID NO: 105998 - DNA, 15 bp, Homo sapiens
tacactaagacccta

SEQ ID NO: 105999 - DNA, 15 bp, Homo sapiens
atacactaagaccct

SEQ ID NO: 106000 - DNA, 15 bp, Homo sapiens
tatacactaagaccc

SEQ ID NO: 106001 - DNA, 15 bp, Homo sapiens
atatacactaagacc

SEQ ID NO: 106002 - DNA, 15 bp, Homo sapiens
aatatacactaagac

SEQ ID NO: 106003 - DNA, 15 bp, Homo sapiens
taatatacactaaga

SEQ ID NO: 106004 - DNA, 15 bp, Homo sapiens
ataatatacactaag

SEQ ID NO: 106005 - DNA, 15 bp, Homo sapiens
tataatatacactaa

SEQ ID NO: 106006 - DNA, 15 bp, Homo sapiens
gtataatatacacta

SEQ ID NO: 106007 - DNA, 15 bp, Homo sapiens
agtataatatacact

SEQ ID NO: 106008 - DNA, 15 bp, Homo sapiens
aagtataatatacac

SEQ ID NO: 106009 - DNA, 15 bp, Homo sapiens
taagtataatataca

SEQ ID NO: 106010 - DNA, 15 bp, Homo sapiens
ctaagtataatatac

SEQ ID NO: 106011 - DNA, 15 bp, Homo sapiens
actaagtataatata

SEQ ID NO: 106012 - DNA, 15 bp, Homo sapiens
tactaagtataatat

SEQ ID NO: 106013 - DNA, 15 bp, Homo sapiens
ttactaagtataata

SEQ ID NO: 106014 - DNA, 15 bp, Homo sapiens
gttactaagtataat

SEQ ID NO: 106015 - DNA, 15 bp, Homo sapiens
tgttactaagtataa

SEQ ID NO: 106016 - DNA, 15 bp, Homo sapiens
ctgttactaagtata

SEQ ID NO: 106017 - DNA, 15 bp, Homo sapiens
tctgttactaagtat

SEQ ID NO: 106018 - DNA, 15 bp, Homo sapiens
atctgttactaagta

SEQ ID NO: 106019 - DNA, 15 bp, Homo sapiens
aatctgttactaagt

SEQ ID NO: 106020 - DNA, 15 bp, Homo sapiens
aaatctgttactaag

SEQ ID NO: 106021 - DNA, 15 bp, Homo sapiens
aaaatctgttactaa

SEQ ID NO: 106022 - DNA, 15 bp, Homo sapiens
aaaaatctgttacta

SEQ ID NO: 106023 - DNA, 15 bp, Homo sapiens
aaaaaatctgttact

SEQ ID NO: 106024 - DNA, 15 bp, Homo sapiens
taaaaaatctgttac

SEQ ID NO: 106025 - DNA, 15 bp, Homo sapiens
ttaaaaaatctgtta

SEQ ID NO: 106026 - DNA, 15 bp, Homo sapiens
tttaaaaaatctgtt

SEQ ID NO: 106027 - DNA, 15 bp, Homo sapiens
ttttaaaaaatctgt

SEQ ID NO: 106028 - DNA, 15 bp, Homo sapiens
attttaaaaaatctg

SEQ ID NO: 106029 - DNA, 15 bp, Homo sapiens
cattttaaaaaatct

SEQ ID NO: 106030 - DNA, 15 bp, Homo sapiens
gcattttaaaaaatc

SEQ ID NO: 106031 - DNA, 15 bp, Homo sapiens
agcattttaaaaaat

SEQ ID NO: 106032 - DNA, 15 bp, Homo sapiens
cagcattttaaaaaa

SEQ ID NO: 106033 - DNA, 15 bp, Homo sapiens
gcagcattttaaaaa

SEQ ID NO: 106034 - DNA, 15 bp, Homo sapiens
tgcagcattttaaaa

SEQ ID NO: 106035 - DNA, 15 bp, Homo sapiens
ttgcagcattttaaa

SEQ ID NO: 106036 - DNA, 15 bp, Homo sapiens
gttgcagcattttaa

SEQ ID NO: 106037 - DNA, 15 bp, Homo sapiens
tgttgcagcatttta

SEQ ID NO: 106038 - DNA, 15 bp, Homo sapiens
ttgttgcagcatttt

SEQ ID NO: 106039 - DNA, 15 bp, Homo sapiens
attgttgcagcattt

SEQ ID NO: 106040 - DNA, 15 bp, Homo sapiens
cattgttgcagcatt

SEQ ID NO: 106041 - DNA, 15 bp, Homo sapiens
acattgttgcagcat

SEQ ID NO: 106042 - DNA, 15 bp, Homo sapiens
cacattgttgcagca

SEQ ID NO: 106043 - DNA, 15 bp, Homo sapiens
tcacattgttgcagc

SEQ ID NO: 106044 - DNA, 15 bp, Homo sapiens
ctcacattgttgcag

SEQ ID NO: 106045 - DNA, 15 bp, Homo sapiens
tctcacattgttgca

SEQ ID NO: 106046 - DNA, 15 bp, Homo sapiens
ttctcacattgttgc

SEQ ID NO: 106047 - DNA, 15 bp, Homo sapiens
attctcacattgttg

SEQ ID NO: 106048 - DNA, 15 bp, Homo sapiens
aattctcacattgtt

SEQ ID NO: 106049 - DNA, 15 bp, Homo sapiens
aaattctcacattgt

SEQ ID NO: 106050 - DNA, 15 bp, Homo sapiens
aaaattctcacattg

SEQ ID NO: 106051 - DNA, 15 bp, Homo sapiens
gaaaattctcacatt

SEQ ID NO: 106052 - DNA, 15 bp, Homo sapiens
agaaaattctcacat

SEQ ID NO: 106053 - DNA, 15 bp, Homo sapiens
tagaaaattctcaca

SEQ ID NO: 106054 - DNA, 15 bp, Homo sapiens
atagaaaattctcac

SEQ ID NO: 106055 - DNA, 15 bp, Homo sapiens
catagaaaattctca

SEQ ID NO: 106056 - DNA, 15 bp, Homo sapiens
acatagaaaattctc

SEQ ID NO: 106057 - DNA, 15 bp, Homo sapiens
gacatagaaaattct

SEQ ID NO: 106058 - DNA, 15 bp, Homo sapiens
tgacatagaaaattc

SEQ ID NO: 106059 - DNA, 15 bp, Homo sapiens
ttgacatagaaaatt

SEQ ID NO: 106060 - DNA, 15 bp, Homo sapiens
attgacatagaaaat

SEQ ID NO: 106061 - DNA, 15 bp, Homo sapiens
cattgacatagaaaa

SEQ ID NO: 106062 - DNA, 15 bp, Homo sapiens
tcattgacatagaaa

SEQ ID NO: 106063 - DNA, 15 bp, Homo sapiens
atcattgacatagaa

SEQ ID NO: 106064 - DNA, 15 bp, Homo sapiens
tatcattgacataga

SEQ ID NO: 106065 - DNA, 15 bp, Homo sapiens
atatcattgacatag

SEQ ID NO: 106066 - DNA, 15 bp, Homo sapiens
aatatcattgacata

SEQ ID NO: 106067 - DNA, 15 bp, Homo sapiens
taatatcattgacat

SEQ ID NO: 106068 - DNA, 15 bp, Homo sapiens
ttaatatcattgaca

SEQ ID NO: 106069 - DNA, 15 bp, Homo sapiens
attaatatcattgac

SEQ ID NO: 106070 - DNA, 15 bp, Homo sapiens
aattaatatcattga

SEQ ID NO: 106071 - DNA, 15 bp, Homo sapiens
aaattaatatcattg

SEQ ID NO: 106072 - DNA, 15 bp, Homo sapiens
aaaattaatatcatt

SEQ ID NO: 106073 - DNA, 15 bp, Homo sapiens
caaaattaatatcat

SEQ ID NO: 106074 - DNA, 15 bp, Homo sapiens
tcaaaattaatatca

SEQ ID NO: 106075 - DNA, 15 bp, Homo sapiens
ttcaaaattaatatc

SEQ ID NO: 106076 - DNA, 15 bp, Homo sapiens
attcaaaattaatat

SEQ ID NO: 106077 - DNA, 15 bp, Homo sapiens
cattcaaaattaata

SEQ ID NO: 106078 - DNA, 15 bp, Homo sapiens
tcattcaaaattaat

SEQ ID NO: 106079 - DNA, 15 bp, Homo sapiens
gtcattcaaaattaa

SEQ ID NO: 106080 - DNA, 15 bp, Homo sapiens
tgtcattcaaaatta

SEQ ID NO: 106081 - DNA, 15 bp, Homo sapiens
ttgtcattcaaaatt

SEQ ID NO: 106082 - DNA, 15 bp, Homo sapiens
tttgtcattcaaaat

SEQ ID NO: 106083 - DNA, 15 bp, Homo sapiens
ctttgtcattcaaaa

SEQ ID NO: 106084 - DNA, 15 bp, Homo sapiens
tctttgtcattcaaa

SEQ ID NO: 106085 - DNA, 15 bp, Homo sapiens
gtctttgtcattcaa

SEQ ID NO: 106086 - DNA, 15 bp, Homo sapiens
tgtctttgtcattca

SEQ ID NO: 106087 - DNA, 15 bp, Homo sapiens
gtgtctttgtcattc

SEQ ID NO: 106088 - DNA, 15 bp, Homo sapiens
ggtgtctttgtcatt

SEQ ID NO: 106089 - DNA, 15 bp, Homo sapiens
tggtgtctttgtcat

SEQ ID NO: 106090 - DNA, 15 bp, Homo sapiens
ttggtgtctttgtca

SEQ ID NO: 106091 - DNA, 15 bp, Homo sapiens
tttggtgtctttgtc

SEQ ID NO: 106092 - DNA, 15 bp, Homo sapiens
ttttggtgtctttgt

SEQ ID NO: 106093 - DNA, 15 bp, Homo sapiens
tttttggtgtctttg

SEQ ID NO: 106094 - DNA, 15 bp, Homo sapiens
gtttttggtgtcttt

SEQ ID NO: 106095 - DNA, 15 bp, Homo sapiens
tgtttttggtgtctt

SEQ ID NO: 106096 - DNA, 15 bp, Homo sapiens
ttgtttttggtgtct

SEQ ID NO: 106097 - DNA, 15 bp, Homo sapiens
attgtttttggtgtc

SEQ ID NO: 106098 - DNA, 15 bp, Homo sapiens
gattgtttttggtgt

SEQ ID NO: 106099 - DNA, 15 bp, Homo sapiens
tgattgtttttggtg

SEQ ID NO: 106100 - DNA, 15 bp, Homo sapiens
atgattgtttttggt

SEQ ID NO: 106101 - DNA, 15 bp, Homo sapiens
catgattgtttttgg

SEQ ID NO: 106102 - DNA, 15 bp, Homo sapiens
tcatgattgtttttg

SEQ ID NO: 106103 - DNA, 15 bp, Homo sapiens
atcatgattgttttt

SEQ ID NO: 106104 - DNA, 15 bp, Homo sapiens
tatcatgattgtttt

SEQ ID NO: 106105 - DNA, 15 bp, Homo sapiens
ttatcatgattgttt

SEQ ID NO: 106106 - DNA, 15 bp, Homo sapiens
tttatcatgattgtt

SEQ ID NO: 106107 - DNA, 15 bp, Homo sapiens
ttttatcatgattgt

SEQ ID NO: 106108 - DNA, 15 bp, Homo sapiens
tttttatcatgattg

SEQ ID NO: 106109 - DNA, 15 bp, Homo sapiens
gtttttatcatgatt

SEQ ID NO: 106110 - DNA, 15 bp, Homo sapiens
tgtttttatcatgat

SEQ ID NO: 106111 - DNA, 15 bp, Homo sapiens
ttgtttttatcatga

SEQ ID NO: 106112 - DNA, 15 bp, Homo sapiens
tttgtttttatcatg

SEQ ID NO: 106113 - DNA, 15 bp, Homo sapiens
ttttgtttttatcat

SEQ ID NO: 106114 - DNA, 15 bp, Homo sapiens
tttttgtttttatca

SEQ ID NO: 106115 - DNA, 15 bp, Homo sapiens
atttttgtttttatc

SEQ ID NO: 106116 - DNA, 15 bp, Homo sapiens
aatttttgtttttat

SEQ ID NO: 106117 - DNA, 15 bp, Homo sapiens
caatttttgttttta

SEQ ID NO: 106118 - DNA, 15 bp, Homo sapiens
tcaatttttgttttt

SEQ ID NO: 106119 - DNA, 15 bp, Homo sapiens
gtcaatttttgtttt

SEQ ID NO: 106120 - DNA, 15 bp, Homo sapiens
tgtcaatttttgttt

SEQ ID NO: 106121 - DNA, 15 bp, Homo sapiens
ttgtcaatttttgtt

SEQ ID NO: 106122 - DNA, 15 bp, Homo sapiens
tttgtcaatttttgt

SEQ ID NO: 106123 - DNA, 15 bp, Homo sapiens
atttgtcaatttttg

SEQ ID NO: 106124 - DNA, 15 bp, Homo sapiens
catttgtcaattttt

SEQ ID NO: 106125 - DNA, 15 bp, Homo sapiens
ccatttgtcaatttt

SEQ ID NO: 106126 - DNA, 15 bp, Homo sapiens
accatttgtcaattt

SEQ ID NO: 106127 - DNA, 15 bp, Homo sapiens
taccatttgtcaatt

SEQ ID NO: 106128 - DNA, 15 bp, Homo sapiens
ataccatttgtcaat

SEQ ID NO: 106129 - DNA, 15 bp, Homo sapiens
gataccatttgtcaa

SEQ ID NO: 106130 - DNA, 15 bp, Homo sapiens
agataccatttgtca

SEQ ID NO: 106131 - DNA, 15 bp, Homo sapiens
tagataccatttgtc

SEQ ID NO: 106132 - DNA, 15 bp, Homo sapiens
ttagataccatttgt

SEQ ID NO: 106133 - DNA, 15 bp, Homo sapiens
attagataccatttg

SEQ ID NO: 106134 - DNA, 15 bp, Homo sapiens
aattagataccattt

SEQ ID NO: 106135 - DNA, 15 bp, Homo sapiens
taattagataccatt

SEQ ID NO: 106136 - DNA, 15 bp, Homo sapiens
gtaattagataccat

SEQ ID NO: 106137 - DNA, 15 bp, Homo sapiens
tgtaattagatacca

SEQ ID NO: 106138 - DNA, 15 bp, Homo sapiens
gtgtaattagatacc

SEQ ID NO: 106139 - DNA, 15 bp, Homo sapiens
agtgtaattagatac

SEQ ID NO: 106140 - DNA, 15 bp, Homo sapiens
aagtgtaattagata

SEQ ID NO: 106141 - DNA, 15 bp, Homo sapiens
taagtgtaattagat

SEQ ID NO: 106142 - DNA, 15 bp, Homo sapiens
ttaagtgtaattaga

SEQ ID NO: 106143 - DNA, 15 bp, Homo sapiens
cttaagtgtaattag

SEQ ID NO: 106144 - DNA, 15 bp, Homo sapiens
tcttaagtgtaatta

SEQ ID NO: 106145 - DNA, 15 bp, Homo sapiens
ctcttaagtgtaatt

SEQ ID NO: 106146 - DNA, 15 bp, Homo sapiens
gctcttaagtgtaat

SEQ ID NO: 106147 - DNA, 15 bp, Homo sapiens
agctcttaagtgtaa

SEQ ID NO: 106148 - DNA, 15 bp, Homo sapiens
aagctcttaagtgta

SEQ ID NO: 106149 - DNA, 15 bp, Homo sapiens
gaagctcttaagtgt

SEQ ID NO: 106150 - DNA, 15 bp, Homo sapiens
agaagctcttaagtg

SEQ ID NO: 106151 - DNA, 15 bp, Homo sapiens
cagaagctcttaagt

SEQ ID NO: 106152 - DNA, 15 bp, Homo sapiens
gcagaagctcttaag

SEQ ID NO: 106153 - DNA, 15 bp, Homo sapiens
tgcagaagctcttaa

SEQ ID NO: 106154 - DNA, 15 bp, Homo sapiens
gtgcagaagctctta

SEQ ID NO: 106155 - DNA, 15 bp, Homo sapiens
tgtgcagaagctctt

SEQ ID NO: 106156 - DNA, 15 bp, Homo sapiens
ctgtgcagaagctct

SEQ ID NO: 106157 - DNA, 15 bp, Homo sapiens
gctgtgcagaagctc

SEQ ID NO: 106158 - DNA, 15 bp, Homo sapiens
tgctgtgcagaagct

SEQ ID NO: 106159 - DNA, 15 bp, Homo sapiens
ttgctgtgcagaagc

SEQ ID NO: 106160 - DNA, 15 bp, Homo sapiens
tttgctgtgcagaag

SEQ ID NO: 106161 - DNA, 15 bp, Homo sapiens
ttttgctgtgcagaa

SEQ ID NO: 106162 - DNA, 15 bp, Homo sapiens
tttttgctgtgcaga

SEQ ID NO: 106163 - DNA, 15 bp, Homo sapiens
ttttttgctgtgcag

SEQ ID NO: 106164 - DNA, 15 bp, Homo sapiens
tttttttgctgtgca

SEQ ID NO: 106165 - DNA, 15 bp, Homo sapiens
ttttttttgctgtgc

SEQ ID NO: 106166 - DNA, 15 bp, Homo sapiens
tttttttttgctgtg

SEQ ID NO: 106167 - DNA, 15 bp, Homo sapiens
ttttttttttgctgt

SEQ ID NO: 106168 - DNA, 15 bp, Homo sapiens
tttttttttttgctg

SEQ ID NO: 106169 - DNA, 15 bp, Homo sapiens
gtttttttttttgct

SEQ ID NO: 106170 - DNA, 15 bp, Homo sapiens
tgtttttttttttgc

SEQ ID NO: 106171 - DNA, 15 bp, Homo sapiens
ttgtttttttttttg

SEQ ID NO: 106172 - DNA, 15 bp, Homo sapiens
tttgttttttttttt

SEQ ID NO: 106173 - DNA, 15 bp, Homo sapiens
ttttgtttttttttt

SEQ ID NO: 106174 - DNA, 15 bp, Homo sapiens
tttttgttttttttt

SEQ ID NO: 106175 - DNA, 15 bp, Homo sapiens
ttttttgtttttttt

SEQ ID NO: 106176 - DNA, 15 bp, Homo sapiens
tttttttgttttttt

SEQ ID NO: 106177 - DNA, 15 bp, Homo sapiens
ttttttttgtttttt

SEQ ID NO: 106178 - DNA, 15 bp, Homo sapiens
tttttttttgttttt

SEQ ID NO: 106179 - DNA, 15 bp, Homo sapiens
ttttttttttgtttt

SEQ ID NO: 106180 - DNA, 15 bp, Homo sapiens
gttttttttttgttt

SEQ ID NO: 106181 - DNA, 15 bp, Homo sapiens
agttttttttttgtt

SEQ ID NO: 106182 - DNA, 15 bp, Homo sapiens
cagttttttttttgt

SEQ ID NO: 106183 - DNA, 15 bp, Homo sapiens
acagttttttttttg

SEQ ID NO: 106184 - DNA, 15 bp, Homo sapiens
gacagtttttttttt

SEQ ID NO: 106185 - DNA, 15 bp, Homo sapiens
tgacagttttttttt

SEQ ID NO: 106186 - DNA, 15 bp, Homo sapiens
ttgacagtttttttt

SEQ ID NO: 106187 - DNA, 15 bp, Homo sapiens
gttgacagttttttt

SEQ ID NO: 106188 - DNA, 15 bp, Homo sapiens
tgttgacagtttttt

SEQ ID NO: 106189 - DNA, 15 bp, Homo sapiens
ctgttgacagttttt

SEQ ID NO: 106190 - DNA, 15 bp, Homo sapiens
tctgttgacagtttt

SEQ ID NO: 106191 - DNA, 15 bp, Homo sapiens
ctctgttgacagttt

SEQ ID NO: 106192 - DNA, 15 bp, Homo sapiens
actctgttgacagtt

SEQ ID NO: 106193 - DNA, 15 bp, Homo sapiens
tactctgttgacagt

SEQ ID NO: 106194 - DNA, 15 bp, Homo sapiens
ttactctgttgacag

SEQ ID NO: 106195 - DNA, 15 bp, Homo sapiens
tttactctgttgaca

SEQ ID NO: 106196 - DNA, 15 bp, Homo sapiens
gtttactctgttgac

SEQ ID NO: 106197 - DNA, 15 bp, Homo sapiens
tgtttactctgttga

SEQ ID NO: 106198 - DNA, 15 bp, Homo sapiens
ctgtttactctgttg

SEQ ID NO: 106199 - DNA, 15 bp, Homo sapiens
tctgtttactctgtt

SEQ ID NO: 106200 - DNA, 15 bp, Homo sapiens
gtctgtttactctgt

SEQ ID NO: 106201 - DNA, 15 bp, Homo sapiens
tgtctgtttactctg

SEQ ID NO: 106202 - DNA, 15 bp, Homo sapiens
ttgtctgtttactct

SEQ ID NO: 106203 - DNA, 15 bp, Homo sapiens
gttgtctgtttactc

SEQ ID NO: 106204 - DNA, 15 bp, Homo sapiens
ggttgtctgtttact

SEQ ID NO: 106205 - DNA, 15 bp, Homo sapiens
aggttgtctgtttac

SEQ ID NO: 106206 - DNA, 15 bp, Homo sapiens
gaggttgtctgttta

SEQ ID NO: 106207 - DNA, 15 bp, Homo sapiens
ggaggttgtctgttt

SEQ ID NO: 106208 - DNA, 15 bp, Homo sapiens
tggaggttgtctgtt

SEQ ID NO: 106209 - DNA, 15 bp, Homo sapiens
ctggaggttgtctgt

SEQ ID NO: 106210 - DNA, 15 bp, Homo sapiens
tctggaggttgtctg

SEQ ID NO: 106211 - DNA, 15 bp, Homo sapiens
ttctggaggttgtct

SEQ ID NO: 106212 - DNA, 15 bp, Homo sapiens
attctggaggttgtc

SEQ ID NO: 106213 - DNA, 15 bp, Homo sapiens
cattctggaggttgt

SEQ ID NO: 106214 - DNA, 15 bp, Homo sapiens
ccattctggaggttg

SEQ ID NO: 106215 - DNA, 15 bp, Homo sapiens
cccattctggaggtt

SEQ ID NO: 106216 - DNA, 15 bp, Homo sapiens
tcccattctggaggt

SEQ ID NO: 106217 - DNA, 15 bp, Homo sapiens
ctcccattctggagg

SEQ ID NO: 106218 - DNA, 15 bp, Homo sapiens
tctcccattctggag

SEQ ID NO: 106219 - DNA, 15 bp, Homo sapiens
ttctcccattctgga

SEQ ID NO: 106220 - DNA, 15 bp, Homo sapiens
tttctcccattctgg

SEQ ID NO: 106221 - DNA, 15 bp, Homo sapiens
ttttctcccattctg

SEQ ID NO: 106222 - DNA, 15 bp, Homo sapiens
attttctcccattct

SEQ ID NO: 106223 - DNA, 15 bp, Homo sapiens
aattttctcccattc

SEQ ID NO: 106224 - DNA, 15 bp, Homo sapiens
aaattttctcccatt

SEQ ID NO: 106225 - DNA, 15 bp, Homo sapiens
aaaattttctcccat

SEQ ID NO: 106226 - DNA, 15 bp, Homo sapiens
aaaaattttctccca

SEQ ID NO: 106227 - DNA, 15 bp, Homo sapiens
caaaaattttctccc

SEQ ID NO: 106228 - DNA, 15 bp, Homo sapiens
gcaaaaattttctcc

SEQ ID NO: 106229 - DNA, 15 bp, Homo sapiens
tgcaaaaattttctc

SEQ ID NO: 106230 - DNA, 15 bp, Homo sapiens
ttgcaaaaattttct

SEQ ID NO: 106231 - DNA, 15 bp, Homo sapiens
tttgcaaaaattttc

SEQ ID NO: 106232 - DNA, 15 bp, Homo sapiens
gtttgcaaaaatttt

SEQ ID NO: 106233 - DNA, 15 bp, Homo sapiens
agtttgcaaaaattt

SEQ ID NO: 106234 - DNA, 15 bp, Homo sapiens
tagtttgcaaaaatt

SEQ ID NO: 106235 - DNA, 15 bp, Homo sapiens
gtagtttgcaaaaat

SEQ ID NO: 106236 - DNA, 15 bp, Homo sapiens
cgtagtttgcaaaaa

SEQ ID NO: 106237 - DNA, 15 bp, Homo sapiens
gcgtagtttgcaaaa

SEQ ID NO: 106238 - DNA, 15 bp, Homo sapiens
tgcgtagtttgcaaa

SEQ ID NO: 106239 - DNA, 15 bp, Homo sapiens
atgcgtagtttgcaa

SEQ ID NO: 106240 - DNA, 15 bp, Homo sapiens
gatgcgtagtttgca

SEQ ID NO: 106241 - DNA, 15 bp, Homo sapiens
agatgcgtagtttgc

SEQ ID NO: 106242 - DNA, 15 bp, Homo sapiens
cagatgcgtagtttg

SEQ ID NO: 106243 - DNA, 15 bp, Homo sapiens
tcagatgcgtagttt

SEQ ID NO: 106244 - DNA, 15 bp, Homo sapiens
gtcagatgcgtagtt

SEQ ID NO: 106245 - DNA, 15 bp, Homo sapiens
tgtcagatgcgtagt

SEQ ID NO: 106246 - DNA, 15 bp, Homo sapiens
ttgtcagatgcgtag

SEQ ID NO: 106247 - DNA, 15 bp, Homo sapiens
tttgtcagatgcgta

SEQ ID NO: 106248 - DNA, 15 bp, Homo sapiens
ctttgtcagatgcgt

SEQ ID NO: 106249 - DNA, 15 bp, Homo sapiens
cctttgtcagatgcg

SEQ ID NO: 106250 - DNA, 15 bp, Homo sapiens
gcctttgtcagatgc

SEQ ID NO: 106251 - DNA, 15 bp, Homo sapiens
ggcctttgtcagatg

SEQ ID NO: 106252 - DNA, 15 bp, Homo sapiens
aggcctttgtcagat

SEQ ID NO: 106253 - DNA, 15 bp, Homo sapiens
taggcctttgtcaga

SEQ ID NO: 106254 - DNA, 15 bp, Homo sapiens
ttaggcctttgtcag

SEQ ID NO: 106255 - DNA, 15 bp, Homo sapiens
attaggcctttgtca

SEQ ID NO: 106256 - DNA, 15 bp, Homo sapiens
tattaggcctttgtc

SEQ ID NO: 106257 - DNA, 15 bp, Homo sapiens
atattaggcctttgt

SEQ ID NO: 106258 - DNA, 15 bp, Homo sapiens
gatattaggcctttg

SEQ ID NO: 106259 - DNA, 15 bp, Homo sapiens
ggatattaggccttt

SEQ ID NO: 106260 - DNA, 15 bp, Homo sapiens
tggatattaggcctt

SEQ ID NO: 106261 - DNA, 15 bp, Homo sapiens
ctggatattaggcct

SEQ ID NO: 106262 - DNA, 15 bp, Homo sapiens
gctggatattaggcc

SEQ ID NO: 106263 - DNA, 15 bp, Homo sapiens
ggctggatattaggc

SEQ ID NO: 106264 - DNA, 15 bp, Homo sapiens
aggctggatattagg

SEQ ID NO: 106265 - DNA, 15 bp, Homo sapiens
gaggctggatattag

SEQ ID NO: 106266 - DNA, 15 bp, Homo sapiens
agaggctggatatta

SEQ ID NO: 106267 - DNA, 15 bp, Homo sapiens
tagaggctggatatt

SEQ ID NO: 106268 - DNA, 15 bp, Homo sapiens
atagaggctggatat

SEQ ID NO: 106269 - DNA, 15 bp, Homo sapiens
tatagaggctggata

SEQ ID NO: 106270 - DNA, 15 bp, Homo sapiens
ttatagaggctggat

SEQ ID NO: 106271 - DNA, 15 bp, Homo sapiens
cttatagaggctgga

SEQ ID NO: 106272 - DNA, 15 bp, Homo sapiens
ccttatagaggctgg

SEQ ID NO: 106273 - DNA, 15 bp, Homo sapiens
tccttatagaggctg

SEQ ID NO: 106274 - DNA, 15 bp, Homo sapiens
ttccttatagaggct

SEQ ID NO: 106275 - DNA, 15 bp, Homo sapiens
gttccttatagaggc

SEQ ID NO: 106276 - DNA, 15 bp, Homo sapiens
agttccttatagagg

SEQ ID NO: 106277 - DNA, 15 bp, Homo sapiens
aagttccttatagag

SEQ ID NO: 106278 - DNA, 15 bp, Homo sapiens
taagttccttataga

SEQ ID NO: 106279 - DNA, 15 bp, Homo sapiens
ttaagttccttatag

SEQ ID NO: 106280 - DNA, 15 bp, Homo sapiens
tttaagttccttata

SEQ ID NO: 106281 - DNA, 15 bp, Homo sapiens
gtttaagttccttat

SEQ ID NO: 106282 - DNA, 15 bp, Homo sapiens
tgtttaagttcctta

SEQ ID NO: 106283 - DNA, 15 bp, Homo sapiens
ttgtttaagttcctt

SEQ ID NO: 106284 - DNA, 15 bp, Homo sapiens
cttgtttaagttcct

SEQ ID NO: 106285 - DNA, 15 bp, Homo sapiens
acttgtttaagttcc

SEQ ID NO: 106286 - DNA, 15 bp, Homo sapiens
aacttgtttaagttc

SEQ ID NO: 106287 - DNA, 15 bp, Homo sapiens
aaacttgtttaagtt

SEQ ID NO: 106288 - DNA, 15 bp, Homo sapiens
taaacttgtttaagt

SEQ ID NO: 106289 - DNA, 15 bp, Homo sapiens
ataaacttgtttaag

SEQ ID NO: 106290 - DNA, 15 bp, Homo sapiens
tataaacttgtttaa

SEQ ID NO: 106291 - DNA, 15 bp, Homo sapiens
ttataaacttgttta

SEQ ID NO: 106292 - DNA, 15 bp, Homo sapiens
cttataaacttgttt

SEQ ID NO: 106293 - DNA, 15 bp, Homo sapiens
tcttataaacttgtt

SEQ ID NO: 106294 - DNA, 15 bp, Homo sapiens
ctcttataaacttgt

SEQ ID NO: 106295 - DNA, 15 bp, Homo sapiens
tctcttataaacttg

SEQ ID NO: 106296 - DNA, 15 bp, Homo sapiens
ttctcttataaactt

SEQ ID NO: 106297 - DNA, 15 bp, Homo sapiens
tttctcttataaact

SEQ ID NO: 106298 - DNA, 15 bp, Homo sapiens
ttttctcttataaac

SEQ ID NO: 106299 - DNA, 15 bp, Homo sapiens
tttttctcttataaa

SEQ ID NO: 106300 - DNA, 15 bp, Homo sapiens
ttttttctcttataa

SEQ ID NO: 106301 - DNA, 15 bp, Homo sapiens
tttttttctcttata

SEQ ID NO: 106302 - DNA, 15 bp, Homo sapiens
ctttttttctcttat

SEQ ID NO: 106303 - DNA, 15 bp, Homo sapiens
tctttttttctctta

SEQ ID NO: 106304 - DNA, 15 bp, Homo sapiens
ttctttttttctctt

SEQ ID NO: 106305 - DNA, 15 bp, Homo sapiens
attctttttttctct

SEQ ID NO: 106306 - DNA, 15 bp, Homo sapiens
gattctttttttctc

SEQ ID NO: 106307 - DNA, 15 bp, Homo sapiens
ggattctttttttct

SEQ ID NO: 106308 - DNA, 15 bp, Homo sapiens
gggattctttttttc

SEQ ID NO: 106309 - DNA, 15 bp, Homo sapiens
tgggattcttttttt

SEQ ID NO: 106310 - DNA, 15 bp, Homo sapiens
atgggattctttttt

SEQ ID NO: 106311 - DNA, 15 bp, Homo sapiens
aatgggattcttttt

SEQ ID NO: 106312 - DNA, 15 bp, Homo sapiens
taatgggattctttt

SEQ ID NO: 106313 - DNA, 15 bp, Homo sapiens
ttaatgggattcttt

SEQ ID NO: 106314 - DNA, 15 bp, Homo sapiens
tttaatgggattctt

SEQ ID NO: 106315 - DNA, 15 bp, Homo sapiens
ttttaatgggattct

SEQ ID NO: 106316 - DNA, 15 bp, Homo sapiens
tttttaatgggattc

SEQ ID NO: 106317 - DNA, 15 bp, Homo sapiens
ctttttaatgggatt

SEQ ID NO: 106318 - DNA, 15 bp, Homo sapiens
actttttaatgggat

SEQ ID NO: 106319 - DNA, 15 bp, Homo sapiens
tactttttaatggga

SEQ ID NO: 106320 - DNA, 15 bp, Homo sapiens
ctactttttaatggg

SEQ ID NO: 106321 - DNA, 15 bp, Homo sapiens
cctactttttaatgg

SEQ ID NO: 106322 - DNA, 15 bp, Homo sapiens
acctactttttaatg

SEQ ID NO: 106323 - DNA, 15 bp, Homo sapiens
tacctactttttaat

SEQ ID NO: 106324 - DNA, 15 bp, Homo sapiens
ttacctactttttaa

SEQ ID NO: 106325 - DNA, 15 bp, Homo sapiens
tttacctacttttta

SEQ ID NO: 106326 - DNA, 15 bp, Homo sapiens
ctttacctacttttt

SEQ ID NO: 106327 - DNA, 15 bp, Homo sapiens
cctttacctactttt

SEQ ID NO: 106328 - DNA, 15 bp, Homo sapiens
ccctttacctacttt

SEQ ID NO: 106329 - DNA, 15 bp, Homo sapiens
gccctttacctactt

SEQ ID NO: 106330 - DNA, 15 bp, Homo sapiens
tgccctttacctact

SEQ ID NO: 106331 - DNA, 15 bp, Homo sapiens
atgccctttacctac

SEQ ID NO: 106332 - DNA, 15 bp, Homo sapiens
catgccctttaccta

SEQ ID NO: 106333 - DNA, 15 bp, Homo sapiens
tcatgccctttacct

SEQ ID NO: 106334 - DNA, 15 bp, Homo sapiens
ttcatgccctttacc

SEQ ID NO: 106335 - DNA, 15 bp, Homo sapiens
attcatgccctttac

SEQ ID NO: 106336 - DNA, 15 bp, Homo sapiens
tattcatgcccttta

SEQ ID NO: 106337 - DNA, 15 bp, Homo sapiens
ctattcatgcccttt

SEQ ID NO: 106338 - DNA, 15 bp, Homo sapiens
actattcatgccctt

SEQ ID NO: 106339 - DNA, 15 bp, Homo sapiens
gactattcatgccct

SEQ ID NO: 106340 - DNA, 15 bp, Homo sapiens
tgactattcatgccc

SEQ ID NO: 106341 - DNA, 15 bp, Homo sapiens
gtgactattcatgcc

SEQ ID NO: 106342 - DNA, 15 bp, Homo sapiens
agtgactattcatgc

SEQ ID NO: 106343 - DNA, 15 bp, Homo sapiens
aagtgactattcatg

SEQ ID NO: 106344 - DNA, 15 bp, Homo sapiens
aaagtgactattcat

SEQ ID NO: 106345 - DNA, 15 bp, Homo sapiens
aaaagtgactattca

SEQ ID NO: 106346 - DNA, 15 bp, Homo sapiens
gaaaagtgactattc

SEQ ID NO: 106347 - DNA, 15 bp, Homo sapiens
agaaaagtgactatt

SEQ ID NO: 106348 - DNA, 15 bp, Homo sapiens
tagaaaagtgactat

SEQ ID NO: 106349 - DNA, 15 bp, Homo sapiens
ttagaaaagtgacta

SEQ ID NO: 106350 - DNA, 15 bp, Homo sapiens
tttagaaaagtgact

SEQ ID NO: 106351 - DNA, 15 bp, Homo sapiens
ctttagaaaagtgac

SEQ ID NO: 106352 - DNA, 15 bp, Homo sapiens
tctttagaaaagtga

SEQ ID NO: 106353 - DNA, 15 bp, Homo sapiens
ttctttagaaaagtg

SEQ ID NO: 106354 - DNA, 15 bp, Homo sapiens
cttctttagaaaagt

SEQ ID NO: 106355 - DNA, 15 bp, Homo sapiens
tcttctttagaaaag

SEQ ID NO: 106356 - DNA, 15 bp, Homo sapiens
gtcttctttagaaaa

SEQ ID NO: 106357 - DNA, 15 bp, Homo sapiens
tgtcttctttagaaa

SEQ ID NO: 106358 - DNA, 15 bp, Homo sapiens
atgtcttctttagaa

SEQ ID NO: 106359 - DNA, 15 bp, Homo sapiens
tatgtcttctttaga

SEQ ID NO: 106360 - DNA, 15 bp, Homo sapiens
atatgtcttctttag

SEQ ID NO: 106361 - DNA, 15 bp, Homo sapiens
tatatgtcttcttta

SEQ ID NO: 106362 - DNA, 15 bp, Homo sapiens
atatatgtcttcttt

SEQ ID NO: 106363 - DNA, 15 bp, Homo sapiens
catatatgtcttctt

SEQ ID NO: 106364 - DNA, 15 bp, Homo sapiens
tcatatatgtcttct

SEQ ID NO: 106365 - DNA, 15 bp, Homo sapiens
ctcatatatgtcttc

SEQ ID NO: 106366 - DNA, 15 bp, Homo sapiens
tctcatatatgtctt

SEQ ID NO: 106367 - DNA, 15 bp, Homo sapiens
gtctcatatatgtct

SEQ ID NO: 106368 - DNA, 15 bp, Homo sapiens
ggtctcatatatgtc

SEQ ID NO: 106369 - DNA, 15 bp, Homo sapiens
tggtctcatatatgt

SEQ ID NO: 106370 - DNA, 15 bp, Homo sapiens
ttggtctcatatatg

SEQ ID NO: 106371 - DNA, 15 bp, Homo sapiens
gttggtctcatatat

SEQ ID NO: 106372 - DNA, 15 bp, Homo sapiens
tgttggtctcatata

SEQ ID NO: 106373 - DNA, 15 bp, Homo sapiens
ttgttggtctcatat

SEQ ID NO: 106374 - DNA, 15 bp, Homo sapiens
tttgttggtctcata

SEQ ID NO: 106375 - DNA, 15 bp, Homo sapiens
gtttgttggtctcat

SEQ ID NO: 106376 - DNA, 15 bp, Homo sapiens
agtttgttggtctca

SEQ ID NO: 106377 - DNA, 15 bp, Homo sapiens
aagtttgttggtctc

SEQ ID NO: 106378 - DNA, 15 bp, Homo sapiens
taagtttgttggtct

SEQ ID NO: 106379 - DNA, 15 bp, Homo sapiens
ataagtttgttggtc

SEQ ID NO: 106380 - DNA, 15 bp, Homo sapiens
cataagtttgttggt

SEQ ID NO: 106381 - DNA, 15 bp, Homo sapiens
tcataagtttgttgg

SEQ ID NO: 106382 - DNA, 15 bp, Homo sapiens
ctcataagtttgttg

SEQ ID NO: 106383 - DNA, 15 bp, Homo sapiens
tctcataagtttgtt

SEQ ID NO: 106384 - DNA, 15 bp, Homo sapiens
ttctcataagtttgt

SEQ ID NO: 106385 - DNA, 15 bp, Homo sapiens
tttctcataagtttg

SEQ ID NO: 106386 - DNA, 15 bp, Homo sapiens
ttttctcataagttt

SEQ ID NO: 106387 - DNA, 15 bp, Homo sapiens
attttctcataagtt

SEQ ID NO: 106388 - DNA, 15 bp, Homo sapiens
cattttctcataagt

SEQ ID NO: 106389 - DNA, 15 bp, Homo sapiens
gcattttctcataag

SEQ ID NO: 106390 - DNA, 15 bp, Homo sapiens
agcattttctcataa

SEQ ID NO: 106391 - DNA, 15 bp, Homo sapiens
gagcattttctcata

SEQ ID NO: 106392 - DNA, 15 bp, Homo sapiens
tgagcattttctcat

SEQ ID NO: 106393 - DNA, 15 bp, Homo sapiens
ttgagcattttctca

SEQ ID NO: 106394 - DNA, 15 bp, Homo sapiens
attgagcattttctc

SEQ ID NO: 106395 - DNA, 15 bp, Homo sapiens
tattgagcattttct

SEQ ID NO: 106396 - DNA, 15 bp, Homo sapiens
atattgagcattttc

SEQ ID NO: 106397 - DNA, 15 bp, Homo sapiens
gatattgagcatttt

SEQ ID NO: 106398 - DNA, 15 bp, Homo sapiens
tgatattgagcattt

SEQ ID NO: 106399 - DNA, 15 bp, Homo sapiens
gtgatattgagcatt

SEQ ID NO: 106400 - DNA, 15 bp, Homo sapiens
agtgatattgagcat

SEQ ID NO: 106401 - DNA, 15 bp, Homo sapiens
cagtgatattgagca

SEQ ID NO: 106402 - DNA, 15 bp, Homo sapiens
tcagtgatattgagc

SEQ ID NO: 106403 - DNA, 15 bp, Homo sapiens
atcagtgatattgag

SEQ ID NO: 106404 - DNA, 15 bp, Homo sapiens
gatcagtgatattga

SEQ ID NO: 106405 - DNA, 15 bp, Homo sapiens
tgatcagtgatattg

SEQ ID NO: 106406 - DNA, 15 bp, Homo sapiens
atgatcagtgatatt

SEQ ID NO: 106407 - DNA, 15 bp, Homo sapiens
aatgatcagtgatat

SEQ ID NO: 106408 - DNA, 15 bp, Homo sapiens
taatgatcagtgata

SEQ ID NO: 106409 - DNA, 15 bp, Homo sapiens
ctaatgatcagtgat

SEQ ID NO: 106410 - DNA, 15 bp, Homo sapiens
tctaatgatcagtga

SEQ ID NO: 106411 - DNA, 15 bp, Homo sapiens
ctctaatgatcagtg

SEQ ID NO: 106412 - DNA, 15 bp, Homo sapiens
tctctaatgatcagt

SEQ ID NO: 106413 - DNA, 15 bp, Homo sapiens
ttctctaatgatcag

SEQ ID NO: 106414 - DNA, 15 bp, Homo sapiens
attctctaatgatca

SEQ ID NO: 106415 - DNA, 15 bp, Homo sapiens
cattctctaatgatc

SEQ ID NO: 106416 - DNA, 15 bp, Homo sapiens
gcattctctaatgat

SEQ ID NO: 106417 - DNA, 15 bp, Homo sapiens
tgcattctctaatga

SEQ ID NO: 106418 - DNA, 15 bp, Homo sapiens
ttgcattctctaatg

SEQ ID NO: 106419 - DNA, 15 bp, Homo sapiens
tttgcattctctaat

SEQ ID NO: 106420 - DNA, 15 bp, Homo sapiens
atttgcattctctaa

SEQ ID NO: 106421 - DNA, 15 bp, Homo sapiens
tatttgcattctcta

SEQ ID NO: 106422 - DNA, 15 bp, Homo sapiens
atatttgcattctct

SEQ ID NO: 106423 - DNA, 15 bp, Homo sapiens
tatatttgcattctc

SEQ ID NO: 106424 - DNA, 15 bp, Homo sapiens
ttatatttgcattct

SEQ ID NO: 106425 - DNA, 15 bp, Homo sapiens
tttatatttgcattc

SEQ ID NO: 106426 - DNA, 15 bp, Homo sapiens
gtttatatttgcatt

SEQ ID NO: 106427 - DNA, 15 bp, Homo sapiens
ggtttatatttgcat

SEQ ID NO: 106428 - DNA, 15 bp, Homo sapiens
tggtttatatttgca

SEQ ID NO: 106429 - DNA, 15 bp, Homo sapiens
gtggtttatatttgc

SEQ ID NO: 106430 - DNA, 15 bp, Homo sapiens
tgtggtttatatttg

SEQ ID NO: 106431 - DNA, 15 bp, Homo sapiens
ttgtggtttatattt

SEQ ID NO: 106432 - DNA, 15 bp, Homo sapiens
attgtggtttatatt

SEQ ID NO: 106433 - DNA, 15 bp, Homo sapiens
aattgtggtttatat

SEQ ID NO: 106434 - DNA, 15 bp, Homo sapiens
taattgtggtttata

SEQ ID NO: 106435 - DNA, 15 bp, Homo sapiens
ctaattgtggtttat

SEQ ID NO: 106436 - DNA, 15 bp, Homo sapiens
tctaattgtggttta

SEQ ID NO: 106437 - DNA, 15 bp, Homo sapiens
atctaattgtggttt

SEQ ID NO: 106438 - DNA, 15 bp, Homo sapiens
tatctaattgtggtt

SEQ ID NO: 106439 - DNA, 15 bp, Homo sapiens
gtatctaattgtggt

SEQ ID NO: 106440 - DNA, 15 bp, Homo sapiens
ggtatctaattgtgg

SEQ ID NO: 106441 - DNA, 15 bp, Homo sapiens
tggtatctaattgtg

SEQ ID NO: 106442 - DNA, 15 bp, Homo sapiens
atggtatctaattgt

SEQ ID NO: 106443 - DNA, 15 bp, Homo sapiens
gatggtatctaattg

SEQ ID NO: 106444 - DNA, 15 bp, Homo sapiens
agatggtatctaatt

SEQ ID NO: 106445 - DNA, 15 bp, Homo sapiens
gagatggtatctaat

SEQ ID NO: 106446 - DNA, 15 bp, Homo sapiens
tgagatggtatctaa

SEQ ID NO: 106447 - DNA, 15 bp, Homo sapiens
gtgagatggtatcta

SEQ ID NO: 106448 - DNA, 15 bp, Homo sapiens
tgtgagatggtatct

SEQ ID NO: 106449 - DNA, 15 bp, Homo sapiens
gtgtgagatggtatc

SEQ ID NO: 106450 - DNA, 15 bp, Homo sapiens
ggtgtgagatggtat

SEQ ID NO: 106451 - DNA, 15 bp, Homo sapiens
tggtgtgagatggta

SEQ ID NO: 106452 - DNA, 15 bp, Homo sapiens
ctggtgtgagatggt

SEQ ID NO: 106453 - DNA, 15 bp, Homo sapiens
actggtgtgagatgg

SEQ ID NO: 106454 - DNA, 15 bp, Homo sapiens
gactggtgtgagatg

SEQ ID NO: 106455 - DNA, 15 bp, Homo sapiens
tgactggtgtgagat

SEQ ID NO: 106456 - DNA, 15 bp, Homo sapiens
ctgactggtgtgaga

SEQ ID NO: 106457 - DNA, 15 bp, Homo sapiens
tctgactggtgtgag

SEQ ID NO: 106458 - DNA, 15 bp, Homo sapiens
ttctgactggtgtga

SEQ ID NO: 106459 - DNA, 15 bp, Homo sapiens
attctgactggtgtg

SEQ ID NO: 106460 - DNA, 15 bp, Homo sapiens
cattctgactggtgt

SEQ ID NO: 106461 - DNA, 15 bp, Homo sapiens
gcattctgactggtg

SEQ ID NO: 106462 - DNA, 15 bp, Homo sapiens
ggcattctgactggt

SEQ ID NO: 106463 - DNA, 15 bp, Homo sapiens
aggcattctgactgg

SEQ ID NO: 106464 - DNA, 15 bp, Homo sapiens
caggcattctgactg

SEQ ID NO: 106465 - DNA, 15 bp, Homo sapiens
acaggcattctgact

SEQ ID NO: 106466 - DNA, 15 bp, Homo sapiens
aacaggcattctgac

SEQ ID NO: 106467 - DNA, 15 bp, Homo sapiens
taacaggcattctga

SEQ ID NO: 106468 - DNA, 15 bp, Homo sapiens
gtaacaggcattctg

SEQ ID NO: 106469 - DNA, 15 bp, Homo sapiens
agtaacaggcattct

SEQ ID NO: 106470 - DNA, 15 bp, Homo sapiens
tagtaacaggcattc

SEQ ID NO: 106471 - DNA, 15 bp, Homo sapiens
ttagtaacaggcatt

SEQ ID NO: 106472 - DNA, 15 bp, Homo sapiens
tttagtaacaggcat

SEQ ID NO: 106473 - DNA, 15 bp, Homo sapiens
ttttagtaacaggca

SEQ ID NO: 106474 - DNA, 15 bp, Homo sapiens
tttttagtaacaggc

SEQ ID NO: 106475 - DNA, 15 bp, Homo sapiens
ctttttagtaacagg

SEQ ID NO: 106476 - DNA, 15 bp, Homo sapiens
actttttagtaacag

SEQ ID NO: 106477 - DNA, 15 bp, Homo sapiens
gactttttagtaaca

SEQ ID NO: 106478 - DNA, 15 bp, Homo sapiens
tgactttttagtaac

SEQ ID NO: 106479 - DNA, 15 bp, Homo sapiens
ttgactttttagtaa

SEQ ID NO: 106480 - DNA, 15 bp, Homo sapiens
tttgactttttagta

SEQ ID NO: 106481 - DNA, 15 bp, Homo sapiens
ttttgactttttagt

SEQ ID NO: 106482 - DNA, 15 bp, Homo sapiens
tttttgactttttag

SEQ ID NO: 106483 - DNA, 15 bp, Homo sapiens
ttttttgacttttta

SEQ ID NO: 106484 - DNA, 15 bp, Homo sapiens
attttttgacttttt

SEQ ID NO: 106485 - DNA, 15 bp, Homo sapiens
tattttttgactttt

SEQ ID NO: 106486 - DNA, 15 bp, Homo sapiens
ttattttttgacttt

SEQ ID NO: 106487 - DNA, 15 bp, Homo sapiens
gttattttttgactt

SEQ ID NO: 106488 - DNA, 15 bp, Homo sapiens
tgttattttttgact

SEQ ID NO: 106489 - DNA, 15 bp, Homo sapiens
ctgttattttttgac

SEQ ID NO: 106490 - DNA, 15 bp, Homo sapiens
tctgttattttttga

SEQ ID NO: 106491 - DNA, 15 bp, Homo sapiens
atctgttattttttg

SEQ ID NO: 106492 - DNA, 15 bp, Homo sapiens
catctgttatttttt

SEQ ID NO: 106493 - DNA, 15 bp, Homo sapiens
gcatctgttattttt

SEQ ID NO: 106494 - DNA, 15 bp, Homo sapiens
agcatctgttatttt

SEQ ID NO: 106495 - DNA, 15 bp, Homo sapiens
cagcatctgttattt

SEQ ID NO: 106496 - DNA, 15 bp, Homo sapiens
ccagcatctgttatt

SEQ ID NO: 106497 - DNA, 15 bp, Homo sapiens
accagcatctgttat

SEQ ID NO: 106498 - DNA, 15 bp, Homo sapiens
caccagcatctgtta

SEQ ID NO: 106499 - DNA, 15 bp, Homo sapiens
tcaccagcatctgtt

SEQ ID NO: 106500 - DNA, 15 bp, Homo sapiens
ctcaccagcatctgt

SEQ ID NO: 106501 - DNA, 15 bp, Homo sapiens
cctcaccagcatctg

SEQ ID NO: 106502 - DNA, 15 bp, Homo sapiens
acctcaccagcatct

SEQ ID NO: 106503 - DNA, 15 bp, Homo sapiens
aacctcaccagcatc

SEQ ID NO: 106504 - DNA, 15 bp, Homo sapiens
caacctcaccagcat

SEQ ID NO: 106505 - DNA, 15 bp, Homo sapiens
acaacctcaccagca

SEQ ID NO: 106506 - DNA, 15 bp, Homo sapiens
cacaacctcaccagc

SEQ ID NO: 106507 - DNA, 15 bp, Homo sapiens
tcacaacctcaccag

SEQ ID NO: 106508 - DNA, 15 bp, Homo sapiens
ttcacaacctcacca

SEQ ID NO: 106509 - DNA, 15 bp, Homo sapiens
tttcacaacctcacc

SEQ ID NO: 106510 - DNA, 15 bp, Homo sapiens
ttttcacaacctcac

SEQ ID NO: 106511 - DNA, 15 bp, Homo sapiens
tttttcacaacctca

SEQ ID NO: 106512 - DNA, 15 bp, Homo sapiens
ttttttcacaacctc

SEQ ID NO: 106513 - DNA, 15 bp, Homo sapiens
tttttttcacaacct

SEQ ID NO: 106514 - DNA, 15 bp, Homo sapiens
ctttttttcacaacc

SEQ ID NO: 106515 - DNA, 15 bp, Homo sapiens
cctttttttcacaac

SEQ ID NO: 106516 - DNA, 15 bp, Homo sapiens
ccctttttttcacaa

SEQ ID NO: 106517 - DNA, 15 bp, Homo sapiens
tccctttttttcaca

SEQ ID NO: 106518 - DNA, 15 bp, Homo sapiens
ttccctttttttcac

SEQ ID NO: 106519 - DNA, 15 bp, Homo sapiens
gttccctttttttca

SEQ ID NO: 106520 - DNA, 15 bp, Homo sapiens
tgttccctttttttc

SEQ ID NO: 106521 - DNA, 15 bp, Homo sapiens
gtgttcccttttttt

SEQ ID NO: 106522 - DNA, 15 bp, Homo sapiens
agtgttccctttttt

SEQ ID NO: 106523 - DNA, 15 bp, Homo sapiens
aagtgttcccttttt

SEQ ID NO: 106524 - DNA, 15 bp, Homo sapiens
taagtgttccctttt

SEQ ID NO: 106525 - DNA, 15 bp, Homo sapiens
gtaagtgttcccttt

SEQ ID NO: 106526 - DNA, 15 bp, Homo sapiens
tgtaagtgttccctt

SEQ ID NO: 106527 - DNA, 15 bp, Homo sapiens
gtgtaagtgttccct

SEQ ID NO: 106528 - DNA, 15 bp, Homo sapiens
ggtgtaagtgttccc

SEQ ID NO: 106529 - DNA, 15 bp, Homo sapiens
gggtgtaagtgttcc

SEQ ID NO: 106530 - DNA, 15 bp, Homo sapiens
agggtgtaagtgttc

SEQ ID NO: 106531 - DNA, 15 bp, Homo sapiens
cagggtgtaagtgtt

SEQ ID NO: 106532 - DNA, 15 bp, Homo sapiens
acagggtgtaagtgt

SEQ ID NO: 106533 - DNA, 15 bp, Homo sapiens
aacagggtgtaagtg

SEQ ID NO: 106534 - DNA, 15 bp, Homo sapiens
caacagggtgtaagt

SEQ ID NO: 106535 - DNA, 15 bp, Homo sapiens
ccaacagggtgtaag

SEQ ID NO: 106536 - DNA, 15 bp, Homo sapiens
accaacagggtgtaa

SEQ ID NO: 106537 - DNA, 15 bp, Homo sapiens
caccaacagggtgta

SEQ ID NO: 106538 - DNA, 15 bp, Homo sapiens
ccaccaacagggtgt

SEQ ID NO: 106539 - DNA, 15 bp, Homo sapiens
cccaccaacagggtg

SEQ ID NO: 106540 - DNA, 15 bp, Homo sapiens
tcccaccaacagggt

SEQ ID NO: 106541 - DNA, 15 bp, Homo sapiens
ctcccaccaacaggg

SEQ ID NO: 106542 - DNA, 15 bp, Homo sapiens
actcccaccaacagg

SEQ ID NO: 106543 - DNA, 15 bp, Homo sapiens
cactcccaccaacag

SEQ ID NO: 106544 - DNA, 15 bp, Homo sapiens
acactcccaccaaca

SEQ ID NO: 106545 - DNA, 15 bp, Homo sapiens
tacactcccaccaac

SEQ ID NO: 106546 - DNA, 15 bp, Homo sapiens
ttacactcccaccaa

SEQ ID NO: 106547 - DNA, 15 bp, Homo sapiens
tttacactcccacca

SEQ ID NO: 106548 - DNA, 15 bp, Homo sapiens
atttacactcccacc

SEQ ID NO: 106549 - DNA, 15 bp, Homo sapiens
aatttacactcccac

SEQ ID NO: 106550 - DNA, 15 bp, Homo sapiens
taatttacactccca

SEQ ID NO: 106551 - DNA, 15 bp, Homo sapiens
ctaatttacactccc

SEQ ID NO: 106552 - DNA, 15 bp, Homo sapiens
actaatttacactcc

SEQ ID NO: 106553 - DNA, 15 bp, Homo sapiens
aactaatttacactc

SEQ ID NO: 106554 - DNA, 15 bp, Homo sapiens
gaactaatttacact

SEQ ID NO: 106555 - DNA, 15 bp, Homo sapiens
tgaactaatttacac

SEQ ID NO: 106556 - DNA, 15 bp, Homo sapiens
ttgaactaatttaca

SEQ ID NO: 106557 - DNA, 15 bp, Homo sapiens
gttgaactaatttac

SEQ ID NO: 106558 - DNA, 15 bp, Homo sapiens
ggttgaactaattta

SEQ ID NO: 106559 - DNA, 15 bp, Homo sapiens
tggttgaactaattt

SEQ ID NO: 106560 - DNA, 15 bp, Homo sapiens
atggttgaactaatt

SEQ ID NO: 106561 - DNA, 15 bp, Homo sapiens
aatggttgaactaat

SEQ ID NO: 106562 - DNA, 15 bp, Homo sapiens
taatggttgaactaa

SEQ ID NO: 106563 - DNA, 15 bp, Homo sapiens
ataatggttgaacta

SEQ ID NO: 106564 - DNA, 15 bp, Homo sapiens
cataatggttgaact

SEQ ID NO: 106565 - DNA, 15 bp, Homo sapiens
ccataatggttgaac

SEQ ID NO: 106566 - DNA, 15 bp, Homo sapiens
tccataatggttgaa

SEQ ID NO: 106567 - DNA, 15 bp, Homo sapiens
ttccataatggttga

SEQ ID NO: 106568 - DNA, 15 bp, Homo sapiens
tttccataatggttg

SEQ ID NO: 106569 - DNA, 15 bp, Homo sapiens
ctttccataatggtt

SEQ ID NO: 106570 - DNA, 15 bp, Homo sapiens
gctttccataatggt

SEQ ID NO: 106571 - DNA, 15 bp, Homo sapiens
tgctttccataatgg

SEQ ID NO: 106572 - DNA, 15 bp, Homo sapiens
ctgctttccataatg

SEQ ID NO: 106573 - DNA, 15 bp, Homo sapiens
actgctttccataat

SEQ ID NO: 106574 - DNA, 15 bp, Homo sapiens
tactgctttccataa

SEQ ID NO: 106575 - DNA, 15 bp, Homo sapiens
atactgctttccata

SEQ ID NO: 106576 - DNA, 15 bp, Homo sapiens
catactgctttccat

SEQ ID NO: 106577 - DNA, 15 bp, Homo sapiens
ccatactgctttcca

SEQ ID NO: 106578 - DNA, 15 bp, Homo sapiens
accatactgctttcc

SEQ ID NO: 106579 - DNA, 15 bp, Homo sapiens
caccatactgctttc

SEQ ID NO: 106580 - DNA, 15 bp, Homo sapiens
tcaccatactgcttt

SEQ ID NO: 106581 - DNA, 15 bp, Homo sapiens
atcaccatactgctt

SEQ ID NO: 106582 - DNA, 15 bp, Homo sapiens
aatcaccatactgct

SEQ ID NO: 106583 - DNA, 15 bp, Homo sapiens
gaatcaccatactgc

SEQ ID NO: 106584 - DNA, 15 bp, Homo sapiens
ggaatcaccatactg

SEQ ID NO: 106585 - DNA, 15 bp, Homo sapiens
aggaatcaccatact

SEQ ID NO: 106586 - DNA, 15 bp, Homo sapiens
gaggaatcaccatac

SEQ ID NO: 106587 - DNA, 15 bp, Homo sapiens
tgaggaatcaccata

SEQ ID NO: 106588 - DNA, 15 bp, Homo sapiens
ttgaggaatcaccat

SEQ ID NO: 106589 - DNA, 15 bp, Homo sapiens
tttgaggaatcacca

SEQ ID NO: 106590 - DNA, 15 bp, Homo sapiens
ctttgaggaatcacc

SEQ ID NO: 106591 - DNA, 15 bp, Homo sapiens
tctttgaggaatcac

SEQ ID NO: 106592 - DNA, 15 bp, Homo sapiens
ctctttgaggaatca

SEQ ID NO: 106593 - DNA, 15 bp, Homo sapiens
gctctttgaggaatc

SEQ ID NO: 106594 - DNA, 15 bp, Homo sapiens
agctctttgaggaat

SEQ ID NO: 106595 - DNA, 15 bp, Homo sapiens
tagctctttgaggaa

SEQ ID NO: 106596 - DNA, 15 bp, Homo sapiens
ttagctctttgagga

SEQ ID NO: 106597 - DNA, 15 bp, Homo sapiens
tttagctctttgagg

SEQ ID NO: 106598 - DNA, 15 bp, Homo sapiens
ttttagctctttgag

SEQ ID NO: 106599 - DNA, 15 bp, Homo sapiens
cttttagctctttga

SEQ ID NO: 106600 - DNA, 15 bp, Homo sapiens
gcttttagctctttg

SEQ ID NO: 106601 - DNA, 15 bp, Homo sapiens
tgcttttagctcttt

SEQ ID NO: 106602 - DNA, 15 bp, Homo sapiens
ctgcttttagctctt

SEQ ID NO: 106603 - DNA, 15 bp, Homo sapiens
tctgcttttagctct

SEQ ID NO: 106604 - DNA, 15 bp, Homo sapiens
ttctgcttttagctc

SEQ ID NO: 106605 - DNA, 15 bp, Homo sapiens
gttctgcttttagct

SEQ ID NO: 106606 - DNA, 15 bp, Homo sapiens
agttctgcttttagc

SEQ ID NO: 106607 - DNA, 15 bp, Homo sapiens
cagttctgcttttag

SEQ ID NO: 106608 - DNA, 15 bp, Homo sapiens
gcagttctgctttta

SEQ ID NO: 106609 - DNA, 15 bp, Homo sapiens
ggcagttctgctttt

SEQ ID NO: 106610 - DNA, 15 bp, Homo sapiens
tggcagttctgcttt

SEQ ID NO: 106611 - DNA, 15 bp, Homo sapiens
atggcagttctgctt

SEQ ID NO: 106612 - DNA, 15 bp, Homo sapiens
aatggcagttctgct

SEQ ID NO: 106613 - DNA, 15 bp, Homo sapiens
gaatggcagttctgc

SEQ ID NO: 106614 - DNA, 15 bp, Homo sapiens
cgaatggcagttctg

SEQ ID NO: 106615 - DNA, 15 bp, Homo sapiens
tcgaatggcagttct

SEQ ID NO: 106616 - DNA, 15 bp, Homo sapiens
gtcgaatggcagttc

SEQ ID NO: 106617 - DNA, 15 bp, Homo sapiens
ggtcgaatggcagtt

SEQ ID NO: 106618 - DNA, 15 bp, Homo sapiens
gggtcgaatggcagt

SEQ ID NO: 106619 - DNA, 15 bp, Homo sapiens
tgggtcgaatggcag

SEQ ID NO: 106620 - DNA, 15 bp, Homo sapiens
ttgggtcgaatggca

SEQ ID NO: 106621 - DNA, 15 bp, Homo sapiens
gttgggtcgaatggc

SEQ ID NO: 106622 - DNA, 15 bp, Homo sapiens
tgttgggtcgaatgg

SEQ ID NO: 106623 - DNA, 15 bp, Homo sapiens
ttgttgggtcgaatg

SEQ ID NO: 106624 - DNA, 15 bp, Homo sapiens
attgttgggtcgaat

SEQ ID NO: 106625 - DNA, 15 bp, Homo sapiens
gattgttgggtcgaa

SEQ ID NO: 106626 - DNA, 15 bp, Homo sapiens
ggattgttgggtcga

SEQ ID NO: 106627 - DNA, 15 bp, Homo sapiens
gggattgttgggtcg

SEQ ID NO: 106628 - DNA, 15 bp, Homo sapiens
tgggattgttgggtc

SEQ ID NO: 106629 - DNA, 15 bp, Homo sapiens
atgggattgttgggt

SEQ ID NO: 106630 - DNA, 15 bp, Homo sapiens
aatgggattgttggg

SEQ ID NO: 106631 - DNA, 15 bp, Homo sapiens
taatgggattgttgg

SEQ ID NO: 106632 - DNA, 15 bp, Homo sapiens
gtaatgggattgttg

SEQ ID NO: 106633 - DNA, 15 bp, Homo sapiens
agtaatgggattgtt

SEQ ID NO: 106634 - DNA, 15 bp, Homo sapiens
cagtaatgggattgt

SEQ ID NO: 106635 - DNA, 15 bp, Homo sapiens
ccagtaatgggattg

SEQ ID NO: 106636 - DNA, 15 bp, Homo sapiens
tccagtaatgggatt

SEQ ID NO: 106637 - DNA, 15 bp, Homo sapiens
atccagtaatgggat

SEQ ID NO: 106638 - DNA, 15 bp, Homo sapiens
tatccagtaatggga

SEQ ID NO: 106639 - DNA, 15 bp, Homo sapiens
atatccagtaatggg

SEQ ID NO: 106640 - DNA, 15 bp, Homo sapiens
tatatccagtaatgg

SEQ ID NO: 106641 - DNA, 15 bp, Homo sapiens
atatatccagtaatg

SEQ ID NO: 106642 - DNA, 15 bp, Homo sapiens
tatatatccagtaat

SEQ ID NO: 106643 - DNA, 15 bp, Homo sapiens
gtatatatccagtaa

SEQ ID NO: 106644 - DNA, 15 bp, Homo sapiens
ggtatatatccagta

SEQ ID NO: 106645 - DNA, 15 bp, Homo sapiens
gggtatatatccagt

SEQ ID NO: 106646 - DNA, 15 bp, Homo sapiens
tgggtatatatccag

SEQ ID NO: 106647 - DNA, 15 bp, Homo sapiens
ctgggtatatatcca

SEQ ID NO: 106648 - DNA, 15 bp, Homo sapiens
tctgggtatatatcc

SEQ ID NO: 106649 - DNA, 15 bp, Homo sapiens
ctctgggtatatatc

SEQ ID NO: 106650 - DNA, 15 bp, Homo sapiens
tctctgggtatatat

SEQ ID NO: 106651 - DNA, 15 bp, Homo sapiens
ttctctgggtatata

SEQ ID NO: 106652 - DNA, 15 bp, Homo sapiens
tttctctgggtatat

SEQ ID NO: 106653 - DNA, 15 bp, Homo sapiens
atttctctgggtata

SEQ ID NO: 106654 - DNA, 15 bp, Homo sapiens
tatttctctgggtat

SEQ ID NO: 106655 - DNA, 15 bp, Homo sapiens
atatttctctgggta

SEQ ID NO: 106656 - DNA, 15 bp, Homo sapiens
tatatttctctgggt

SEQ ID NO: 106657 - DNA, 15 bp, Homo sapiens
ttatatttctctggg

SEQ ID NO: 106658 - DNA, 15 bp, Homo sapiens
tttatatttctctgg

SEQ ID NO: 106659 - DNA, 15 bp, Homo sapiens
atttatatttctctg

SEQ ID NO: 106660 - DNA, 15 bp, Homo sapiens
gatttatatttctct

SEQ ID NO: 106661 - DNA, 15 bp, Homo sapiens
tgatttatatttctc

SEQ ID NO: 106662 - DNA, 15 bp, Homo sapiens
atgatttatatttct

SEQ ID NO: 106663 - DNA, 15 bp, Homo sapiens
aatgatttatatttc

SEQ ID NO: 106664 - DNA, 15 bp, Homo sapiens
aaatgatttatattt

SEQ ID NO: 106665 - DNA, 15 bp, Homo sapiens
aaaatgatttatatt

SEQ ID NO: 106666 - DNA, 15 bp, Homo sapiens
taaaatgatttatat

SEQ ID NO: 106667 - DNA, 15 bp, Homo sapiens
gtaaaatgatttata

SEQ ID NO: 106668 - DNA, 15 bp, Homo sapiens
ggtaaaatgatttat

SEQ ID NO: 106669 - DNA, 15 bp, Homo sapiens
tggtaaaatgattta

SEQ ID NO: 106670 - DNA, 15 bp, Homo sapiens
atggtaaaatgattt

SEQ ID NO: 106671 - DNA, 15 bp, Homo sapiens
tatggtaaaatgatt

SEQ ID NO: 106672 - DNA, 15 bp, Homo sapiens
ttatggtaaaatgat

SEQ ID NO: 106673 - DNA, 15 bp, Homo sapiens
tttatggtaaaatga

SEQ ID NO: 106674 - DNA, 15 bp, Homo sapiens
ctttatggtaaaatg

SEQ ID NO: 106675 - DNA, 15 bp, Homo sapiens
tctttatggtaaaat

SEQ ID NO: 106676 - DNA, 15 bp, Homo sapiens
gtctttatggtaaaa

SEQ ID NO: 106677 - DNA, 15 bp, Homo sapiens
tgtctttatggtaaa

SEQ ID NO: 106678 - DNA, 15 bp, Homo sapiens
atgtctttatggtaa

SEQ ID NO: 106679 - DNA, 15 bp, Homo sapiens
catgtctttatggta

SEQ ID NO: 106680 - DNA, 15 bp, Homo sapiens
acatgtctttatggt

SEQ ID NO: 106681 - DNA, 15 bp, Homo sapiens
cacatgtctttatgg

SEQ ID NO: 106682 - DNA, 15 bp, Homo sapiens
gcacatgtctttatg

SEQ ID NO: 106683 - DNA, 15 bp, Homo sapiens
tgcacatgtctttat

SEQ ID NO: 106684 - DNA, 15 bp, Homo sapiens
gtgcacatgtcttta

SEQ ID NO: 106685 - DNA, 15 bp, Homo sapiens
cgtgcacatgtcttt

SEQ ID NO: 106686 - DNA, 15 bp, Homo sapiens
acgtgcacatgtctt

SEQ ID NO: 106687 - DNA, 15 bp, Homo sapiens
cacgtgcacatgtct

SEQ ID NO: 106688 - DNA, 15 bp, Homo sapiens
tcacgtgcacatgtc

SEQ ID NO: 106689 - DNA, 15 bp, Homo sapiens
ttcacgtgcacatgt

SEQ ID NO: 106690 - DNA, 15 bp, Homo sapiens
attcacgtgcacatg

SEQ ID NO: 106691 - DNA, 15 bp, Homo sapiens
cattcacgtgcacat

SEQ ID NO: 106692 - DNA, 15 bp, Homo sapiens
acattcacgtgcaca

SEQ ID NO: 106693 - DNA, 15 bp, Homo sapiens
aacattcacgtgcac

SEQ ID NO: 106694 - DNA, 15 bp, Homo sapiens
gaacattcacgtgca

SEQ ID NO: 106695 - DNA, 15 bp, Homo sapiens
tgaacattcacgtgc

SEQ ID NO: 106696 - DNA, 15 bp, Homo sapiens
gtgaacattcacgtg

SEQ ID NO: 106697 - DNA, 15 bp, Homo sapiens
agtgaacattcacgt

SEQ ID NO: 106698 - DNA, 15 bp, Homo sapiens
cagtgaacattcacg

SEQ ID NO: 106699 - DNA, 15 bp, Homo sapiens
gcagtgaacattcac

SEQ ID NO: 106700 - DNA, 15 bp, Homo sapiens
tgcagtgaacattca

SEQ ID NO: 106701 - DNA, 15 bp, Homo sapiens
ctgcagtgaacattc

SEQ ID NO: 106702 - DNA, 15 bp, Homo sapiens
gctgcagtgaacatt

SEQ ID NO: 106703 - DNA, 15 bp, Homo sapiens
tgctgcagtgaacat

SEQ ID NO: 106704 - DNA, 15 bp, Homo sapiens
gtgctgcagtgaaca

SEQ ID NO: 106705 - DNA, 15 bp, Homo sapiens
agtgctgcagtgaac

SEQ ID NO: 106706 - DNA, 15 bp, Homo sapiens
tagtgctgcagtgaa

SEQ ID NO: 106707 - DNA, 15 bp, Homo sapiens
atagtgctgcagtga

SEQ ID NO: 106708 - DNA, 15 bp, Homo sapiens
aatagtgctgcagtg

SEQ ID NO: 106709 - DNA, 15 bp, Homo sapiens
gaatagtgctgcagt

SEQ ID NO: 106710 - DNA, 15 bp, Homo sapiens
tgaatagtgctgcag

SEQ ID NO: 106711 - DNA, 15 bp, Homo sapiens
gtgaatagtgctgca

SEQ ID NO: 106712 - DNA, 15 bp, Homo sapiens
tgtgaatagtgctgc

SEQ ID NO: 106713 - DNA, 15 bp, Homo sapiens
ttgtgaatagtgctg

SEQ ID NO: 106714 - DNA, 15 bp, Homo sapiens
attgtgaatagtgct

SEQ ID NO: 106715 - DNA, 15 bp, Homo sapiens
tattgtgaatagtgc

SEQ ID NO: 106716 - DNA, 15 bp, Homo sapiens
ctattgtgaatagtg

SEQ ID NO: 106717 - DNA, 15 bp, Homo sapiens
gctattgtgaatagt

SEQ ID NO: 106718 - DNA, 15 bp, Homo sapiens
tgctattgtgaatag

SEQ ID NO: 106719 - DNA, 15 bp, Homo sapiens
ttgctattgtgaata

SEQ ID NO: 106720 - DNA, 15 bp, Homo sapiens
tttgctattgtgaat

SEQ ID NO: 106721 - DNA, 15 bp, Homo sapiens
ttttgctattgtgaa

SEQ ID NO: 106722 - DNA, 15 bp, Homo sapiens
tttttgctattgtga

SEQ ID NO: 106723 - DNA, 15 bp, Homo sapiens
gtttttgctattgtg

SEQ ID NO: 106724 - DNA, 15 bp, Homo sapiens
agtttttgctattgt

SEQ ID NO: 106725 - DNA, 15 bp, Homo sapiens
aagtttttgctattg

SEQ ID NO: 106726 - DNA, 15 bp, Homo sapiens
caagtttttgctatt

SEQ ID NO: 106727 - DNA, 15 bp, Homo sapiens
ccaagtttttgctat

SEQ ID NO: 106728 - DNA, 15 bp, Homo sapiens
tccaagtttttgcta

SEQ ID NO: 106729 - DNA, 15 bp, Homo sapiens
ttccaagtttttgct

SEQ ID NO: 106730 - DNA, 15 bp, Homo sapiens
attccaagtttttgc

SEQ ID NO: 106731 - DNA, 15 bp, Homo sapiens
gattccaagtttttg

SEQ ID NO: 106732 - DNA, 15 bp, Homo sapiens
agattccaagttttt

SEQ ID NO: 106733 - DNA, 15 bp, Homo sapiens
aagattccaagtttt

SEQ ID NO: 106734 - DNA, 15 bp, Homo sapiens
aaagattccaagttt

SEQ ID NO: 106735 - DNA, 15 bp, Homo sapiens
aaaagattccaagtt

SEQ ID NO: 106736 - DNA, 15 bp, Homo sapiens
gaaaagattccaagt

SEQ ID NO: 106737 - DNA, 15 bp, Homo sapiens
tgaaaagattccaag

SEQ ID NO: 106738 - DNA, 15 bp, Homo sapiens
atgaaaagattccaa

SEQ ID NO: 106739 - DNA, 15 bp, Homo sapiens
catgaaaagattcca

SEQ ID NO: 106740 - DNA, 15 bp, Homo sapiens
tcatgaaaagattcc

SEQ ID NO: 106741 - DNA, 15 bp, Homo sapiens
ttcatgaaaagattc

SEQ ID NO: 106742 - DNA, 15 bp, Homo sapiens
tttcatgaaaagatt

SEQ ID NO: 106743 - DNA, 15 bp, Homo sapiens
ttttcatgaaaagat

SEQ ID NO: 106744 - DNA, 15 bp, Homo sapiens
gttttcatgaaaaga

SEQ ID NO: 106745 - DNA, 15 bp, Homo sapiens
ggttttcatgaaaag

SEQ ID NO: 106746 - DNA, 15 bp, Homo sapiens
aggttttcatgaaaa

SEQ ID NO: 106747 - DNA, 15 bp, Homo sapiens
taggttttcatgaaa

SEQ ID NO: 106748 - DNA, 15 bp, Homo sapiens
ataggttttcatgaa

SEQ ID NO: 106749 - DNA, 15 bp, Homo sapiens
tataggttttcatga

SEQ ID NO: 106750 - DNA, 15 bp, Homo sapiens
atataggttttcatg

SEQ ID NO: 106751 - DNA, 15 bp, Homo sapiens
catataggttttcat

SEQ ID NO: 106752 - DNA, 15 bp, Homo sapiens
gcatataggttttca

SEQ ID NO: 106753 - DNA, 15 bp, Homo sapiens
ggcatataggttttc

SEQ ID NO: 106754 - DNA, 15 bp, Homo sapiens
gggcatataggtttt

SEQ ID NO: 106755 - DNA, 15 bp, Homo sapiens
tgggcatataggttt

SEQ ID NO: 106756 - DNA, 15 bp, Homo sapiens
gtgggcatataggtt

SEQ ID NO: 106757 - DNA, 15 bp, Homo sapiens
ggtgggcatataggt

SEQ ID NO: 106758 - DNA, 15 bp, Homo sapiens
tggtgggcatatagg

SEQ ID NO: 106759 - DNA, 15 bp, Homo sapiens
ttggtgggcatatag

SEQ ID NO: 106760 - DNA, 15 bp, Homo sapiens
gttggtgggcatata

SEQ ID NO: 106761 - DNA, 15 bp, Homo sapiens
tgttggtgggcatat

SEQ ID NO: 106762 - DNA, 15 bp, Homo sapiens
ttgttggtgggcata

SEQ ID NO: 106763 - DNA, 15 bp, Homo sapiens
gttgttggtgggcat

SEQ ID NO: 106764 - DNA, 15 bp, Homo sapiens
tgttgttggtgggca

SEQ ID NO: 106765 - DNA, 15 bp, Homo sapiens
ctgttgttggtgggc

SEQ ID NO: 106766 - DNA, 15 bp, Homo sapiens
tctgttgttggtggg

SEQ ID NO: 106767 - DNA, 15 bp, Homo sapiens
atctgttgttggtgg

SEQ ID NO: 106768 - DNA, 15 bp, Homo sapiens
aatctgttgttggtg

SEQ ID NO: 106769 - DNA, 15 bp, Homo sapiens
caatctgttgttggt

SEQ ID NO: 106770 - DNA, 15 bp, Homo sapiens
ccaatctgttgttgg

SEQ ID NO: 106771 - DNA, 15 bp, Homo sapiens
tccaatctgttgttg

SEQ ID NO: 106772 - DNA, 15 bp, Homo sapiens
atccaatctgttgtt

SEQ ID NO: 106773 - DNA, 15 bp, Homo sapiens
tatccaatctgttgt

SEQ ID NO: 106774 - DNA, 15 bp, Homo sapiens
ttatccaatctgttg

SEQ ID NO: 106775 - DNA, 15 bp, Homo sapiens
tttatccaatctgtt

SEQ ID NO: 106776 - DNA, 15 bp, Homo sapiens
ctttatccaatctgt

SEQ ID NO: 106777 - DNA, 15 bp, Homo sapiens
tctttatccaatctg

SEQ ID NO: 106778 - DNA, 15 bp, Homo sapiens
ttctttatccaatct

SEQ ID NO: 106779 - DNA, 15 bp, Homo sapiens
tttctttatccaatc

SEQ ID NO: 106780 - DNA, 15 bp, Homo sapiens
ttttctttatccaat

SEQ ID NO: 106781 - DNA, 15 bp, Homo sapiens
attttctttatccaa

SEQ ID NO: 106782 - DNA, 15 bp, Homo sapiens
cattttctttatcca

SEQ ID NO: 106783 - DNA, 15 bp, Homo sapiens
acattttctttatcc

SEQ ID NO: 106784 - DNA, 15 bp, Homo sapiens
cacattttctttatc

SEQ ID NO: 106785 - DNA, 15 bp, Homo sapiens
ccacattttctttat

SEQ ID NO: 106786 - DNA, 15 bp, Homo sapiens
accacattttcttta

SEQ ID NO: 106787 - DNA, 15 bp, Homo sapiens
taccacattttcttt

SEQ ID NO: 106788 - DNA, 15 bp, Homo sapiens
gtaccacattttctt

SEQ ID NO: 106789 - DNA, 15 bp, Homo sapiens
tgtaccacattttct

SEQ ID NO: 106790 - DNA, 15 bp, Homo sapiens
atgtaccacattttc

SEQ ID NO: 106791 - DNA, 15 bp, Homo sapiens
tatgtaccacatttt

SEQ ID NO: 106792 - DNA, 15 bp, Homo sapiens
gtatgtaccacattt

SEQ ID NO: 106793 - DNA, 15 bp, Homo sapiens
tgtatgtaccacatt

SEQ ID NO: 106794 - DNA, 15 bp, Homo sapiens
gtgtatgtaccacat

SEQ ID NO: 106795 - DNA, 15 bp, Homo sapiens
tgtgtatgtaccaca

SEQ ID NO: 106796 - DNA, 15 bp, Homo sapiens
gtgtgtatgtaccac

SEQ ID NO: 106797 - DNA, 15 bp, Homo sapiens
ggtgtgtatgtacca

SEQ ID NO: 106798 - DNA, 15 bp, Homo sapiens
tggtgtgtatgtacc

SEQ ID NO: 106799 - DNA, 15 bp, Homo sapiens
atggtgtgtatgtac

SEQ ID NO: 106800 - DNA, 15 bp, Homo sapiens
catggtgtgtatgta

SEQ ID NO: 106801 - DNA, 15 bp, Homo sapiens
ccatggtgtgtatgt

SEQ ID NO: 106802 - DNA, 15 bp, Homo sapiens
tccatggtgtgtatg

SEQ ID NO: 106803 - DNA, 15 bp, Homo sapiens
ttccatggtgtgtat

SEQ ID NO: 106804 - DNA, 15 bp, Homo sapiens
attccatggtgtgta

SEQ ID NO: 106805 - DNA, 15 bp, Homo sapiens
tattccatggtgtgt

SEQ ID NO: 106806 - DNA, 15 bp, Homo sapiens
gtattccatggtgtg

SEQ ID NO: 106807 - DNA, 15 bp, Homo sapiens
ggtattccatggtgt

SEQ ID NO: 106808 - DNA, 15 bp, Homo sapiens
tggtattccatggtg

SEQ ID NO: 106809 - DNA, 15 bp, Homo sapiens
atggtattccatggt

SEQ ID NO: 106810 - DNA, 15 bp, Homo sapiens
catggtattccatgg

SEQ ID NO: 106811 - DNA, 15 bp, Homo sapiens
gcatggtattccatg

SEQ ID NO: 106812 - DNA, 15 bp, Homo sapiens
tgcatggtattccat

SEQ ID NO: 106813 - DNA, 15 bp, Homo sapiens
ctgcatggtattcca

SEQ ID NO: 106814 - DNA, 15 bp, Homo sapiens
gctgcatggtattcc

SEQ ID NO: 106815 - DNA, 15 bp, Homo sapiens
ggctgcatggtattc

SEQ ID NO: 106816 - DNA, 15 bp, Homo sapiens
tggctgcatggtatt

SEQ ID NO: 106817 - DNA, 15 bp, Homo sapiens
atggctgcatggtat

SEQ ID NO: 106818 - DNA, 15 bp, Homo sapiens
tatggctgcatggta

SEQ ID NO: 106819 - DNA, 15 bp, Homo sapiens
ttatggctgcatggt

SEQ ID NO: 106820 - DNA, 15 bp, Homo sapiens
tttatggctgcatgg

SEQ ID NO: 106821 - DNA, 15 bp, Homo sapiens
ttttatggctgcatg

SEQ ID NO: 106822 - DNA, 15 bp, Homo sapiens
tttttatggctgcat

SEQ ID NO: 106823 - DNA, 15 bp, Homo sapiens
ttttttatggctgca

SEQ ID NO: 106824 - DNA, 15 bp, Homo sapiens
cttttttatggctgc

SEQ ID NO: 106825 - DNA, 15 bp, Homo sapiens
tcttttttatggctg

SEQ ID NO: 106826 - DNA, 15 bp, Homo sapiens
ttcttttttatggct

SEQ ID NO: 106827 - DNA, 15 bp, Homo sapiens
gttcttttttatggc

SEQ ID NO: 106828 - DNA, 15 bp, Homo sapiens
ggttcttttttatgg

SEQ ID NO: 106829 - DNA, 15 bp, Homo sapiens
tggttcttttttatg

SEQ ID NO: 106830 - DNA, 15 bp, Homo sapiens
ctggttcttttttat

SEQ ID NO: 106831 - DNA, 15 bp, Homo sapiens
tctggttctttttta

SEQ ID NO: 106832 - DNA, 15 bp, Homo sapiens
atctggttctttttt

SEQ ID NO: 106833 - DNA, 15 bp, Homo sapiens
aatctggttcttttt

SEQ ID NO: 106834 - DNA, 15 bp, Homo sapiens
taatctggttctttt

SEQ ID NO: 106835 - DNA, 15 bp, Homo sapiens
ataatctggttcttt

SEQ ID NO: 106836 - DNA, 15 bp, Homo sapiens
tataatctggttctt

SEQ ID NO: 106837 - DNA, 15 bp, Homo sapiens
ttataatctggttct

SEQ ID NO: 106838 - DNA, 15 bp, Homo sapiens
gttataatctggttc

SEQ ID NO: 106839 - DNA, 15 bp, Homo sapiens
agttataatctggtt

SEQ ID NO: 106840 - DNA, 15 bp, Homo sapiens
aagttataatctggt

SEQ ID NO: 106841 - DNA, 15 bp, Homo sapiens
aaagttataatctgg

SEQ ID NO: 106842 - DNA, 15 bp, Homo sapiens
aaaagttataatctg

SEQ ID NO: 106843 - DNA, 15 bp, Homo sapiens
caaaagttataatct

SEQ ID NO: 106844 - DNA, 15 bp, Homo sapiens
acaaaagttataatc

SEQ ID NO: 106845 - DNA, 15 bp, Homo sapiens
cacaaaagttataat

SEQ ID NO: 106846 - DNA, 15 bp, Homo sapiens
ccacaaaagttataa

SEQ ID NO: 106847 - DNA, 15 bp, Homo sapiens
cccacaaaagttata

SEQ ID NO: 106848 - DNA, 15 bp, Homo sapiens
tcccacaaaagttat

SEQ ID NO: 106849 - DNA, 15 bp, Homo sapiens
ttcccacaaaagtta

SEQ ID NO: 106850 - DNA, 15 bp, Homo sapiens
gttcccacaaaagtt

SEQ ID NO: 106851 - DNA, 15 bp, Homo sapiens
tgttcccacaaaagt

SEQ ID NO: 106852 - DNA, 15 bp, Homo sapiens
atgttcccacaaaag

SEQ ID NO: 106853 - DNA, 15 bp, Homo sapiens
catgttcccacaaaa

SEQ ID NO: 106854 - DNA, 15 bp, Homo sapiens
ccatgttcccacaaa

SEQ ID NO: 106855 - DNA, 15 bp, Homo sapiens
tccatgttcccacaa

SEQ ID NO: 106856 - DNA, 15 bp, Homo sapiens
atccatgttcccaca

SEQ ID NO: 106857 - DNA, 15 bp, Homo sapiens
catccatgttcccac

SEQ ID NO: 106858 - DNA, 15 bp, Homo sapiens
acatccatgttccca

SEQ ID NO: 106859 - DNA, 15 bp, Homo sapiens
tacatccatgttccc

SEQ ID NO: 106860 - DNA, 15 bp, Homo sapiens
ctacatccatgttcc

SEQ ID NO: 106861 - DNA, 15 bp, Homo sapiens
gctacatccatgttc

SEQ ID NO: 106862 - DNA, 15 bp, Homo sapiens
agctacatccatgtt

SEQ ID NO: 106863 - DNA, 15 bp, Homo sapiens
tagctacatccatgt

SEQ ID NO: 106864 - DNA, 15 bp, Homo sapiens
ctagctacatccatg

SEQ ID NO: 106865 - DNA, 15 bp, Homo sapiens
tctagctacatccat

SEQ ID NO: 106866 - DNA, 15 bp, Homo sapiens
ctctagctacatcca

SEQ ID NO: 106867 - DNA, 15 bp, Homo sapiens
cctctagctacatcc

SEQ ID NO: 106868 - DNA, 15 bp, Homo sapiens
gcctctagctacatc

SEQ ID NO: 106869 - DNA, 15 bp, Homo sapiens
agcctctagctacat

SEQ ID NO: 106870 - DNA, 15 bp, Homo sapiens
tagcctctagctaca

SEQ ID NO: 106871 - DNA, 15 bp, Homo sapiens
atagcctctagctac

SEQ ID NO: 106872 - DNA, 15 bp, Homo sapiens
aatagcctctagcta

SEQ ID NO: 106873 - DNA, 15 bp, Homo sapiens
taatagcctctagct

SEQ ID NO: 106874 - DNA, 15 bp, Homo sapiens
ataatagcctctagc

SEQ ID NO: 106875 - DNA, 15 bp, Homo sapiens
gataatagcctctag

SEQ ID NO: 106876 - DNA, 15 bp, Homo sapiens
ggataatagcctcta

SEQ ID NO: 106877 - DNA, 15 bp, Homo sapiens
aggataatagcctct

SEQ ID NO: 106878 - DNA, 15 bp, Homo sapiens
gaggataatagcctc

SEQ ID NO: 106879 - DNA, 15 bp, Homo sapiens
tgaggataatagcct

SEQ ID NO: 106880 - DNA, 15 bp, Homo sapiens
ctgaggataatagcc

SEQ ID NO: 106881 - DNA, 15 bp, Homo sapiens
gctgaggataatagc

SEQ ID NO: 106882 - DNA, 15 bp, Homo sapiens
tgctgaggataatag

SEQ ID NO: 106883 - DNA, 15 bp, Homo sapiens
ttgctgaggataata

SEQ ID NO: 106884 - DNA, 15 bp, Homo sapiens
tttgctgaggataat

SEQ ID NO: 106885 - DNA, 15 bp, Homo sapiens
gtttgctgaggataa

SEQ ID NO: 106886 - DNA, 15 bp, Homo sapiens
ggtttgctgaggata

SEQ ID NO: 106887 - DNA, 15 bp, Homo sapiens
tggtttgctgaggat

SEQ ID NO: 106888 - DNA, 15 bp, Homo sapiens
ttggtttgctgagga

SEQ ID NO: 106889 - DNA, 15 bp, Homo sapiens
gttggtttgctgagg

SEQ ID NO: 106890 - DNA, 15 bp, Homo sapiens
tgttggtttgctgag

SEQ ID NO: 106891 - DNA, 15 bp, Homo sapiens
ctgttggtttgctga

SEQ ID NO: 106892 - DNA, 15 bp, Homo sapiens
tctgttggtttgctg

SEQ ID NO: 106893 - DNA, 15 bp, Homo sapiens
ctctgttggtttgct

SEQ ID NO: 106894 - DNA, 15 bp, Homo sapiens
cctctgttggtttgc

SEQ ID NO: 106895 - DNA, 15 bp, Homo sapiens
tcctctgttggtttg

SEQ ID NO: 106896 - DNA, 15 bp, Homo sapiens
ttcctctgttggttt

SEQ ID NO: 106897 - DNA, 15 bp, Homo sapiens
tttcctctgttggtt

SEQ ID NO: 106898 - DNA, 15 bp, Homo sapiens
ttttcctctgttggt

SEQ ID NO: 106899 - DNA, 15 bp, Homo sapiens
cttttcctctgttgg

SEQ ID NO: 106900 - DNA, 15 bp, Homo sapiens
tcttttcctctgttg

SEQ ID NO: 106901 - DNA, 15 bp, Homo sapiens
ttcttttcctctgtt

SEQ ID NO: 106902 - DNA, 15 bp, Homo sapiens
tttcttttcctctgt

SEQ ID NO: 106903 - DNA, 15 bp, Homo sapiens
ttttcttttcctctg

SEQ ID NO: 106904 - DNA, 15 bp, Homo sapiens
gttttcttttcctct

SEQ ID NO: 106905 - DNA, 15 bp, Homo sapiens
ggttttcttttcctc

SEQ ID NO: 106906 - DNA, 15 bp, Homo sapiens
tggttttcttttcct

SEQ ID NO: 106907 - DNA, 15 bp, Homo sapiens
ctggttttcttttcc

SEQ ID NO: 106908 - DNA, 15 bp, Homo sapiens
tctggttttcttttc

SEQ ID NO: 106909 - DNA, 15 bp, Homo sapiens
atctggttttctttt

SEQ ID NO: 106910 - DNA, 15 bp, Homo sapiens
tatctggttttcttt

SEQ ID NO: 106911 - DNA, 15 bp, Homo sapiens
gtatctggttttctt

SEQ ID NO: 106912 - DNA, 15 bp, Homo sapiens
ggtatctggttttct

SEQ ID NO: 106913 - DNA, 15 bp, Homo sapiens
tggtatctggttttc

SEQ ID NO: 106914 - DNA, 15 bp, Homo sapiens
gtggtatctggtttt

SEQ ID NO: 106915 - DNA, 15 bp, Homo sapiens
tgtggtatctggttt

SEQ ID NO: 106916 - DNA, 15 bp, Homo sapiens
atgtggtatctggtt

SEQ ID NO: 106917 - DNA, 15 bp, Homo sapiens
catgtggtatctggt

SEQ ID NO: 106918 - DNA, 15 bp, Homo sapiens
acatgtggtatctgg

SEQ ID NO: 106919 - DNA, 15 bp, Homo sapiens
aacatgtggtatctg

SEQ ID NO: 106920 - DNA, 15 bp, Homo sapiens
gaacatgtggtatct

SEQ ID NO: 106921 - DNA, 15 bp, Homo sapiens
agaacatgtggtatc

SEQ ID NO: 106922 - DNA, 15 bp, Homo sapiens
gagaacatgtggtat

SEQ ID NO: 106923 - DNA, 15 bp, Homo sapiens
tgagaacatgtggta

SEQ ID NO: 106924 - DNA, 15 bp, Homo sapiens
gtgagaacatgtggt

SEQ ID NO: 106925 - DNA, 15 bp, Homo sapiens
agtgagaacatgtgg

SEQ ID NO: 106926 - DNA, 15 bp, Homo sapiens
aagtgagaacatgtg

SEQ ID NO: 106927 - DNA, 15 bp, Homo sapiens
taagtgagaacatgt

SEQ ID NO: 106928 - DNA, 15 bp, Homo sapiens
ataagtgagaacatg

SEQ ID NO: 106929 - DNA, 15 bp, Homo sapiens
tataagtgagaacat

SEQ ID NO: 106930 - DNA, 15 bp, Homo sapiens
ttataagtgagaaca

SEQ ID NO: 106931 - DNA, 15 bp, Homo sapiens
tttataagtgagaac

SEQ ID NO: 106932 - DNA, 15 bp, Homo sapiens
gtttataagtgagaa

SEQ ID NO: 106933 - DNA, 15 bp, Homo sapiens
cgtttataagtgaga

SEQ ID NO: 106934 - DNA, 15 bp, Homo sapiens
ccgtttataagtgag

SEQ ID NO: 106935 - DNA, 15 bp, Homo sapiens
cccgtttataagtga

SEQ ID NO: 106936 - DNA, 15 bp, Homo sapiens
tcccgtttataagtg

SEQ ID NO: 106937 - DNA, 15 bp, Homo sapiens
ctcccgtttataagt

SEQ ID NO: 106938 - DNA, 15 bp, Homo sapiens
gctcccgtttataag

SEQ ID NO: 106939 - DNA, 15 bp, Homo sapiens
agctcccgtttataa

SEQ ID NO: 106940 - DNA, 15 bp, Homo sapiens
tagctcccgtttata

SEQ ID NO: 106941 - DNA, 15 bp, Homo sapiens
ttagctcccgtttat

SEQ ID NO: 106942 - DNA, 15 bp, Homo sapiens
tttagctcccgttta

SEQ ID NO: 106943 - DNA, 15 bp, Homo sapiens
atttagctcccgttt

SEQ ID NO: 106944 - DNA, 15 bp, Homo sapiens
catttagctcccgtt

SEQ ID NO: 106945 - DNA, 15 bp, Homo sapiens
tcatttagctcccgt

SEQ ID NO: 106946 - DNA, 15 bp, Homo sapiens
atcatttagctcccg

SEQ ID NO: 106947 - DNA, 15 bp, Homo sapiens
catcatttagctccc

SEQ ID NO: 106948 - DNA, 15 bp, Homo sapiens
tcatcatttagctcc

SEQ ID NO: 106949 - DNA, 15 bp, Homo sapiens
ctcatcatttagctc

SEQ ID NO: 106950 - DNA, 15 bp, Homo sapiens
tctcatcatttagct

SEQ ID NO: 106951 - DNA, 15 bp, Homo sapiens
ttctcatcatttagc

SEQ ID NO: 106952 - DNA, 15 bp, Homo sapiens
attctcatcatttag

SEQ ID NO: 106953 - DNA, 15 bp, Homo sapiens
aattctcatcattta

SEQ ID NO: 106954 - DNA, 15 bp, Homo sapiens
aaattctcatcattt

SEQ ID NO: 106955 - DNA, 15 bp, Homo sapiens
taaattctcatcatt

SEQ ID NO: 106956 - DNA, 15 bp, Homo sapiens
ataaattctcatcat

SEQ ID NO: 106957 - DNA, 15 bp, Homo sapiens
cataaattctcatca

SEQ ID NO: 106958 - DNA, 15 bp, Homo sapiens
tcataaattctcatc

SEQ ID NO: 106959 - DNA, 15 bp, Homo sapiens
ttcataaattctcat

SEQ ID NO: 106960 - DNA, 15 bp, Homo sapiens
gttcataaattctca

SEQ ID NO: 106961 - DNA, 15 bp, Homo sapiens
tgttcataaattctc

SEQ ID NO: 106962 - DNA, 15 bp, Homo sapiens
gtgttcataaattct

SEQ ID NO: 106963 - DNA, 15 bp, Homo sapiens
tgtgttcataaattc

SEQ ID NO: 106964 - DNA, 15 bp, Homo sapiens
ttgtgttcataaatt

SEQ ID NO: 106965 - DNA, 15 bp, Homo sapiens
tttgtgttcataaat

SEQ ID NO: 106966 - DNA, 15 bp, Homo sapiens
ctttgtgttcataaa

SEQ ID NO: 106967 - DNA, 15 bp, Homo sapiens
tctttgtgttcataa

SEQ ID NO: 106968 - DNA, 15 bp, Homo sapiens
ttctttgtgttcata

SEQ ID NO: 106969 - DNA, 15 bp, Homo sapiens
cttctttgtgttcat

SEQ ID NO: 106970 - DNA, 15 bp, Homo sapiens
ccttctttgtgttca

SEQ ID NO: 106971 - DNA, 15 bp, Homo sapiens
tccttctttgtgttc

SEQ ID NO: 106972 - DNA, 15 bp, Homo sapiens
ttccttctttgtgtt

SEQ ID NO: 106973 - DNA, 15 bp, Homo sapiens
tttccttctttgtgt

SEQ ID NO: 106974 - DNA, 15 bp, Homo sapiens
gtttccttctttgtg

SEQ ID NO: 106975 - DNA, 15 bp, Homo sapiens
tgtttccttctttgt

SEQ ID NO: 106976 - DNA, 15 bp, Homo sapiens
ttgtttccttctttg

SEQ ID NO: 106977 - DNA, 15 bp, Homo sapiens
gttgtttccttcttt

SEQ ID NO: 106978 - DNA, 15 bp, Homo sapiens
tgttgtttccttctt

SEQ ID NO: 106979 - DNA, 15 bp, Homo sapiens
ctgttgtttccttct

SEQ ID NO: 106980 - DNA, 15 bp, Homo sapiens
tctgttgtttccttc

SEQ ID NO: 106981 - DNA, 15 bp, Homo sapiens
gtctgttgtttcctt

SEQ ID NO: 106982 - DNA, 15 bp, Homo sapiens
tgtctgttgtttcct

SEQ ID NO: 106983 - DNA, 15 bp, Homo sapiens
gtgtctgttgtttcc

SEQ ID NO: 106984 - DNA, 15 bp, Homo sapiens
agtgtctgttgtttc

SEQ ID NO: 106985 - DNA, 15 bp, Homo sapiens
cagtgtctgttgttt

SEQ ID NO: 106986 - DNA, 15 bp, Homo sapiens
ccagtgtctgttgtt

SEQ ID NO: 106987 - DNA, 15 bp, Homo sapiens
cccagtgtctgttgt

SEQ ID NO: 106988 - DNA, 15 bp, Homo sapiens
ccccagtgtctgttg

SEQ ID NO: 106989 - DNA, 15 bp, Homo sapiens
accccagtgtctgtt

SEQ ID NO: 106990 - DNA, 15 bp, Homo sapiens
gaccccagtgtctgt

SEQ ID NO: 106991 - DNA, 15 bp, Homo sapiens
agaccccagtgtctg

SEQ ID NO: 106992 - DNA, 15 bp, Homo sapiens
tagaccccagtgtct

SEQ ID NO: 106993 - DNA, 15 bp, Homo sapiens
gtagaccccagtgtc

SEQ ID NO: 106994 - DNA, 15 bp, Homo sapiens
agtagaccccagtgt

SEQ ID NO: 106995 - DNA, 15 bp, Homo sapiens
aagtagaccccagtg

SEQ ID NO: 106996 - DNA, 15 bp, Homo sapiens
caagtagaccccagt

SEQ ID NO: 106997 - DNA, 15 bp, Homo sapiens
tcaagtagaccccag

SEQ ID NO: 106998 - DNA, 15 bp, Homo sapiens
ctcaagtagacccca

SEQ ID NO: 106999 - DNA, 15 bp, Homo sapiens
tctcaagtagacccc

SEQ ID NO: 107000 - DNA, 15 bp, Homo sapiens
ttctcaagtagaccc

SEQ ID NO: 107001 - DNA, 15 bp, Homo sapiens
attctcaagtagacc

SEQ ID NO: 107002 - DNA, 15 bp, Homo sapiens
cattctcaagtagac

SEQ ID NO: 107003 - DNA, 15 bp, Homo sapiens
ccattctcaagtaga

SEQ ID NO: 107004 - DNA, 15 bp, Homo sapiens
tccattctcaagtag

SEQ ID NO: 107005 - DNA, 15 bp, Homo sapiens
ttccattctcaagta

SEQ ID NO: 107006 - DNA, 15 bp, Homo sapiens
cttccattctcaagt

SEQ ID NO: 107007 - DNA, 15 bp, Homo sapiens
tcttccattctcaag

SEQ ID NO: 107008 - DNA, 15 bp, Homo sapiens
atcttccattctcaa

SEQ ID NO: 107009 - DNA, 15 bp, Homo sapiens
catcttccattctca

SEQ ID NO: 107010 - DNA, 15 bp, Homo sapiens
ccatcttccattctc

SEQ ID NO: 107011 - DNA, 15 bp, Homo sapiens
cccatcttccattct

SEQ ID NO: 107012 - DNA, 15 bp, Homo sapiens
tcccatcttccattc

SEQ ID NO: 107013 - DNA, 15 bp, Homo sapiens
ctcccatcttccatt

SEQ ID NO: 107014 - DNA, 15 bp, Homo sapiens
cctcccatcttccat

SEQ ID NO: 107015 - DNA, 15 bp, Homo sapiens
tcctcccatcttcca

SEQ ID NO: 107016 - DNA, 15 bp, Homo sapiens
ctcctcccatcttcc

SEQ ID NO: 107017 - DNA, 15 bp, Homo sapiens
cctcctcccatcttc

SEQ ID NO: 107018 - DNA, 15 bp, Homo sapiens
ccctcctcccatctt

SEQ ID NO: 107019 - DNA, 15 bp, Homo sapiens
tccctcctcccatct

SEQ ID NO: 107020 - DNA, 15 bp, Homo sapiens
ctccctcctcccatc

SEQ ID NO: 107021 - DNA, 15 bp, Homo sapiens
tctccctcctcccat

SEQ ID NO: 107022 - DNA, 15 bp, Homo sapiens
ctctccctcctccca

SEQ ID NO: 107023 - DNA, 15 bp, Homo sapiens
cctctccctcctccc

SEQ ID NO: 107024 - DNA, 15 bp, Homo sapiens
tcctctccctcctcc

SEQ ID NO: 107025 - DNA, 15 bp, Homo sapiens
atcctctccctcctc

SEQ ID NO: 107026 - DNA, 15 bp, Homo sapiens
aatcctctccctcct

SEQ ID NO: 107027 - DNA, 15 bp, Homo sapiens
taatcctctccctcc

SEQ ID NO: 107028 - DNA, 15 bp, Homo sapiens
ctaatcctctccctc

SEQ ID NO: 107029 - DNA, 15 bp, Homo sapiens
tctaatcctctccct

SEQ ID NO: 107030 - DNA, 15 bp, Homo sapiens
ttctaatcctctccc

SEQ ID NO: 107031 - DNA, 15 bp, Homo sapiens
tttctaatcctctcc

SEQ ID NO: 107032 - DNA, 15 bp, Homo sapiens
ttttctaatcctctc

SEQ ID NO: 107033 - DNA, 15 bp, Homo sapiens
cttttctaatcctct

SEQ ID NO: 107034 - DNA, 15 bp, Homo sapiens
tcttttctaatcctc

SEQ ID NO: 107035 - DNA, 15 bp, Homo sapiens
atcttttctaatcct

SEQ ID NO: 107036 - DNA, 15 bp, Homo sapiens
tatcttttctaatcc

SEQ ID NO: 107037 - DNA, 15 bp, Homo sapiens
ttatcttttctaatc

SEQ ID NO: 107038 - DNA, 15 bp, Homo sapiens
gttatcttttctaat

SEQ ID NO: 107039 - DNA, 15 bp, Homo sapiens
tgttatcttttctaa

SEQ ID NO: 107040 - DNA, 15 bp, Homo sapiens
ttgttatcttttcta

SEQ ID NO: 107041 - DNA, 15 bp, Homo sapiens
attgttatcttttct

SEQ ID NO: 107042 - DNA, 15 bp, Homo sapiens
aattgttatcttttc

SEQ ID NO: 107043 - DNA, 15 bp, Homo sapiens
caattgttatctttt

SEQ ID NO: 107044 - DNA, 15 bp, Homo sapiens
ccaattgttatcttt

SEQ ID NO: 107045 - DNA, 15 bp, Homo sapiens
cccaattgttatctt

SEQ ID NO: 107046 - DNA, 15 bp, Homo sapiens
acccaattgttatct

SEQ ID NO: 107047 - DNA, 15 bp, Homo sapiens
tacccaattgttatc

SEQ ID NO: 107048 - DNA, 15 bp, Homo sapiens
gtacccaattgttat

SEQ ID NO: 107049 - DNA, 15 bp, Homo sapiens
agtacccaattgtta

SEQ ID NO: 107050 - DNA, 15 bp, Homo sapiens
cagtacccaattgtt

SEQ ID NO: 107051 - DNA, 15 bp, Homo sapiens
ccagtacccaattgt

SEQ ID NO: 107052 - DNA, 15 bp, Homo sapiens
cccagtacccaattg

SEQ ID NO: 107053 - DNA, 15 bp, Homo sapiens
gcccagtacccaatt

SEQ ID NO: 107054 - DNA, 15 bp, Homo sapiens
agcccagtacccaat

SEQ ID NO: 107055 - DNA, 15 bp, Homo sapiens
aagcccagtacccaa

SEQ ID NO: 107056 - DNA, 15 bp, Homo sapiens
taagcccagtaccca

SEQ ID NO: 107057 - DNA, 15 bp, Homo sapiens
ttaagcccagtaccc

SEQ ID NO: 107058 - DNA, 15 bp, Homo sapiens
attaagcccagtacc

SEQ ID NO: 107059 - DNA, 15 bp, Homo sapiens
tattaagcccagtac

SEQ ID NO: 107060 - DNA, 15 bp, Homo sapiens
gtattaagcccagta

SEQ ID NO: 107061 - DNA, 15 bp, Homo sapiens
ggtattaagcccagt

SEQ ID NO: 107062 - DNA, 15 bp, Homo sapiens
aggtattaagcccag

SEQ ID NO: 107063 - DNA, 15 bp, Homo sapiens
caggtattaagccca

SEQ ID NO: 107064 - DNA, 15 bp, Homo sapiens
tcaggtattaagccc

SEQ ID NO: 107065 - DNA, 15 bp, Homo sapiens
ctcaggtattaagcc

SEQ ID NO: 107066 - DNA, 15 bp, Homo sapiens
actcaggtattaagc

SEQ ID NO: 107067 - DNA, 15 bp, Homo sapiens
cactcaggtattaag

SEQ ID NO: 107068 - DNA, 15 bp, Homo sapiens
tcactcaggtattaa

SEQ ID NO: 107069 - DNA, 15 bp, Homo sapiens
atcactcaggtatta

SEQ ID NO: 107070 - DNA, 15 bp, Homo sapiens
aatcactcaggtatt

SEQ ID NO: 107071 - DNA, 15 bp, Homo sapiens
taatcactcaggtat

SEQ ID NO: 107072 - DNA, 15 bp, Homo sapiens
ttaatcactcaggta

SEQ ID NO: 107073 - DNA, 15 bp, Homo sapiens
tttaatcactcaggt

SEQ ID NO: 107074 - DNA, 15 bp, Homo sapiens
atttaatcactcagg

SEQ ID NO: 107075 - DNA, 15 bp, Homo sapiens
tatttaatcactcag

SEQ ID NO: 107076 - DNA, 15 bp, Homo sapiens
ttatttaatcactca

SEQ ID NO: 107077 - DNA, 15 bp, Homo sapiens
attatttaatcactc

SEQ ID NO: 107078 - DNA, 15 bp, Homo sapiens
gattatttaatcact

SEQ ID NO: 107079 - DNA, 15 bp, Homo sapiens
agattatttaatcac

SEQ ID NO: 107080 - DNA, 15 bp, Homo sapiens
cagattatttaatca

SEQ ID NO: 107081 - DNA, 15 bp, Homo sapiens
acagattatttaatc

SEQ ID NO: 107082 - DNA, 15 bp, Homo sapiens
tacagattatttaat

SEQ ID NO: 107083 - DNA, 15 bp, Homo sapiens
gtacagattatttaa

SEQ ID NO: 107084 - DNA, 15 bp, Homo sapiens
tgtacagattattta

SEQ ID NO: 107085 - DNA, 15 bp, Homo sapiens
ttgtacagattattt

SEQ ID NO: 107086 - DNA, 15 bp, Homo sapiens
gttgtacagattatt

SEQ ID NO: 107087 - DNA, 15 bp, Homo sapiens
tgttgtacagattat

SEQ ID NO: 107088 - DNA, 15 bp, Homo sapiens
ttgttgtacagatta

SEQ ID NO: 107089 - DNA, 15 bp, Homo sapiens
tttgttgtacagatt

SEQ ID NO: 107090 - DNA, 15 bp, Homo sapiens
gtttgttgtacagat

SEQ ID NO: 107091 - DNA, 15 bp, Homo sapiens
ggtttgttgtacaga

SEQ ID NO: 107092 - DNA, 15 bp, Homo sapiens
gggtttgttgtacag

SEQ ID NO: 107093 - DNA, 15 bp, Homo sapiens
ggggtttgttgtaca

SEQ ID NO: 107094 - DNA, 15 bp, Homo sapiens
gggggtttgttgtac

SEQ ID NO: 107095 - DNA, 15 bp, Homo sapiens
tgggggtttgttgta

SEQ ID NO: 107096 - DNA, 15 bp, Homo sapiens
atgggggtttgttgt

SEQ ID NO: 107097 - DNA, 15 bp, Homo sapiens
catgggggtttgttg

SEQ ID NO: 107098 - DNA, 15 bp, Homo sapiens
tcatgggggtttgtt

SEQ ID NO: 107099 - DNA, 15 bp, Homo sapiens
gtcatgggggtttgt

SEQ ID NO: 107100 - DNA, 15 bp, Homo sapiens
tgtcatgggggtttg

SEQ ID NO: 107101 - DNA, 15 bp, Homo sapiens
atgtcatgggggttt

SEQ ID NO: 107102 - DNA, 15 bp, Homo sapiens
catgtcatgggggtt

SEQ ID NO: 107103 - DNA, 15 bp, Homo sapiens
ccatgtcatgggggt

SEQ ID NO: 107104 - DNA, 15 bp, Homo sapiens
cccatgtcatggggg

SEQ ID NO: 107105 - DNA, 15 bp, Homo sapiens
acccatgtcatgggg

SEQ ID NO: 107106 - DNA, 15 bp, Homo sapiens
aacccatgtcatggg

SEQ ID NO: 107107 - DNA, 15 bp, Homo sapiens
aaacccatgtcatgg

SEQ ID NO: 107108 - DNA, 15 bp, Homo sapiens
taaacccatgtcatg

SEQ ID NO: 107109 - DNA, 15 bp, Homo sapiens
gtaaacccatgtcat

SEQ ID NO: 107110 - DNA, 15 bp, Homo sapiens
ggtaaacccatgtca

SEQ ID NO: 107111 - DNA, 15 bp, Homo sapiens
aggtaaacccatgtc

SEQ ID NO: 107112 - DNA, 15 bp, Homo sapiens
taggtaaacccatgt

SEQ ID NO: 107113 - DNA, 15 bp, Homo sapiens
ttaggtaaacccatg

SEQ ID NO: 107114 - DNA, 15 bp, Homo sapiens
cttaggtaaacccat

SEQ ID NO: 107115 - DNA, 15 bp, Homo sapiens
acttaggtaaaccca

SEQ ID NO: 107116 - DNA, 15 bp, Homo sapiens
tacttaggtaaaccc

SEQ ID NO: 107117 - DNA, 15 bp, Homo sapiens
ttacttaggtaaacc

SEQ ID NO: 107118 - DNA, 15 bp, Homo sapiens
gttacttaggtaaac

SEQ ID NO: 107119 - DNA, 15 bp, Homo sapiens
tgttacttaggtaaa

SEQ ID NO: 107120 - DNA, 15 bp, Homo sapiens
ttgttacttaggtaa

SEQ ID NO: 107121 - DNA, 15 bp, Homo sapiens
tttgttacttaggta

SEQ ID NO: 107122 - DNA, 15 bp, Homo sapiens
atttgttacttaggt

SEQ ID NO: 107123 - DNA, 15 bp, Homo sapiens
gatttgttacttagg

SEQ ID NO: 107124 - DNA, 15 bp, Homo sapiens
agatttgttacttag

SEQ ID NO: 107125 - DNA, 15 bp, Homo sapiens
aagatttgttactta

SEQ ID NO: 107126 - DNA, 15 bp, Homo sapiens
gaagatttgttactt

SEQ ID NO: 107127 - DNA, 15 bp, Homo sapiens
tgaagatttgttact

SEQ ID NO: 107128 - DNA, 15 bp, Homo sapiens
gtgaagatttgttac

SEQ ID NO: 107129 - DNA, 15 bp, Homo sapiens
tgtgaagatttgtta

SEQ ID NO: 107130 - DNA, 15 bp, Homo sapiens
atgtgaagatttgtt

SEQ ID NO: 107131 - DNA, 15 bp, Homo sapiens
catgtgaagatttgt

SEQ ID NO: 107132 - DNA, 15 bp, Homo sapiens
acatgtgaagatttg

SEQ ID NO: 107133 - DNA, 15 bp, Homo sapiens
tacatgtgaagattt

SEQ ID NO: 107134 - DNA, 15 bp, Homo sapiens
gtacatgtgaagatt

SEQ ID NO: 107135 - DNA, 15 bp, Homo sapiens
ggtacatgtgaagat

SEQ ID NO: 107136 - DNA, 15 bp, Homo sapiens
gggtacatgtgaaga

SEQ ID NO: 107137 - DNA, 15 bp, Homo sapiens
ggggtacatgtgaag

SEQ ID NO: 107138 - DNA, 15 bp, Homo sapiens
cggggtacatgtgaa

SEQ ID NO: 107139 - DNA, 15 bp, Homo sapiens
acggggtacatgtga

SEQ ID NO: 107140 - DNA, 15 bp, Homo sapiens
cacggggtacatgtg

SEQ ID NO: 107141 - DNA, 15 bp, Homo sapiens
tcacggggtacatgt

SEQ ID NO: 107142 - DNA, 15 bp, Homo sapiens
ttcacggggtacatg

SEQ ID NO: 107143 - DNA, 15 bp, Homo sapiens
gttcacggggtacat

SEQ ID NO: 107144 - DNA, 15 bp, Homo sapiens
ggttcacggggtaca

SEQ ID NO: 107145 - DNA, 15 bp, Homo sapiens
aggttcacggggtac

SEQ ID NO: 107146 - DNA, 15 bp, Homo sapiens
taggttcacggggta

SEQ ID NO: 107147 - DNA, 15 bp, Homo sapiens
ttaggttcacggggt

SEQ ID NO: 107148 - DNA, 15 bp, Homo sapiens
tttaggttcacgggg

SEQ ID NO: 107149 - DNA, 15 bp, Homo sapiens
ttttaggttcacggg

SEQ ID NO: 107150 - DNA, 15 bp, Homo sapiens
attttaggttcacgg

SEQ ID NO: 107151 - DNA, 15 bp, Homo sapiens
tattttaggttcacg

SEQ ID NO: 107152 - DNA, 15 bp, Homo sapiens
ttattttaggttcac

SEQ ID NO: 107153 - DNA, 15 bp, Homo sapiens
tttattttaggttca

SEQ ID NO: 107154 - DNA, 15 bp, Homo sapiens
ttttattttaggttc

SEQ ID NO: 107155 - DNA, 15 bp, Homo sapiens
cttttattttaggtt

SEQ ID NO: 107156 - DNA, 15 bp, Homo sapiens
acttttattttaggt

SEQ ID NO: 107157 - DNA, 15 bp, Homo sapiens
aacttttattttagg

SEQ ID NO: 107158 - DNA, 15 bp, Homo sapiens
taacttttattttag

SEQ ID NO: 107159 - DNA, 15 bp, Homo sapiens
ttaacttttatttta

SEQ ID NO: 107160 - DNA, 15 bp, Homo sapiens
tttaacttttatttt

SEQ ID NO: 107161 - DNA, 15 bp, Homo sapiens
ttttaacttttattt

SEQ ID NO: 107162 - DNA, 15 bp, Homo sapiens
tttttaacttttatt

SEQ ID NO: 107163 - DNA, 15 bp, Homo sapiens
ttttttaacttttat

SEQ ID NO: 107164 - DNA, 15 bp, Homo sapiens
gttttttaactttta

SEQ ID NO: 107165 - DNA, 15 bp, Homo sapiens
tgttttttaactttt

SEQ ID NO: 107166 - DNA, 15 bp, Homo sapiens
ttgttttttaacttt

SEQ ID NO: 107167 - DNA, 15 bp, Homo sapiens
tttgttttttaactt

SEQ ID NO: 107168 - DNA, 15 bp, Homo sapiens
gtttgttttttaact

SEQ ID NO: 107169 - DNA, 15 bp, Homo sapiens
tgtttgttttttaac

SEQ ID NO: 107170 - DNA, 15 bp, Homo sapiens
gtgtttgttttttaa

SEQ ID NO: 107171 - DNA, 15 bp, Homo sapiens
ggtgtttgtttttta

SEQ ID NO: 107172 - DNA, 15 bp, Homo sapiens
tggtgtttgtttttt

SEQ ID NO: 107173 - DNA, 15 bp, Homo sapiens
ctggtgtttgttttt

SEQ ID NO: 107174 - DNA, 15 bp, Homo sapiens
actggtgtttgtttt

SEQ ID NO: 107175 - DNA, 15 bp, Homo sapiens
aactggtgtttgttt

SEQ ID NO: 107176 - DNA, 15 bp, Homo sapiens
gaactggtgtttgtt

SEQ ID NO: 107177 - DNA, 15 bp, Homo sapiens
tgaactggtgtttgt

SEQ ID NO: 107178 - DNA, 15 bp, Homo sapiens
ctgaactggtgtttg

SEQ ID NO: 107179 - DNA, 15 bp, Homo sapiens
gctgaactggtgttt

SEQ ID NO: 107180 - DNA, 15 bp, Homo sapiens
tgctgaactggtgtt

SEQ ID NO: 107181 - DNA, 15 bp, Homo sapiens
atgctgaactggtgt

SEQ ID NO: 107182 - DNA, 15 bp, Homo sapiens
aatgctgaactggtg

SEQ ID NO: 107183 - DNA, 15 bp, Homo sapiens
aaatgctgaactggt

SEQ ID NO: 107184 - DNA, 15 bp, Homo sapiens
caaatgctgaactgg

SEQ ID NO: 107185 - DNA, 15 bp, Homo sapiens
tcaaatgctgaactg

SEQ ID NO: 107186 - DNA, 15 bp, Homo sapiens
ttcaaatgctgaact

SEQ ID NO: 107187 - DNA, 15 bp, Homo sapiens
tttcaaatgctgaac

SEQ ID NO: 107188 - DNA, 15 bp, Homo sapiens
ttttcaaatgctgaa

SEQ ID NO: 107189 - DNA, 15 bp, Homo sapiens
tttttcaaatgctga

SEQ ID NO: 107190 - DNA, 15 bp, Homo sapiens
ctttttcaaatgctg

SEQ ID NO: 107191 - DNA, 15 bp, Homo sapiens
cctttttcaaatgct

SEQ ID NO: 107192 - DNA, 15 bp, Homo sapiens
gcctttttcaaatgc

SEQ ID NO: 107193 - DNA, 15 bp, Homo sapiens
agcctttttcaaatg

SEQ ID NO: 107194 - DNA, 15 bp, Homo sapiens
gagcctttttcaaat

SEQ ID NO: 107195 - DNA, 15 bp, Homo sapiens
ggagcctttttcaaa

SEQ ID NO: 107196 - DNA, 15 bp, Homo sapiens
tggagcctttttcaa

SEQ ID NO: 107197 - DNA, 15 bp, Homo sapiens
atggagcctttttca

SEQ ID NO: 107198 - DNA, 15 bp, Homo sapiens
tatggagcctttttc

SEQ ID NO: 107199 - DNA, 15 bp, Homo sapiens
ttatggagccttttt

SEQ ID NO: 107200 - DNA, 15 bp, Homo sapiens
tttatggagcctttt

SEQ ID NO: 107201 - DNA, 15 bp, Homo sapiens
ctttatggagccttt

SEQ ID NO: 107202 - DNA, 15 bp, Homo sapiens
actttatggagcctt

SEQ ID NO: 107203 - DNA, 15 bp, Homo sapiens
tactttatggagcct

SEQ ID NO: 107204 - DNA, 15 bp, Homo sapiens
atactttatggagcc

SEQ ID NO: 107205 - DNA, 15 bp, Homo sapiens
aatactttatggagc

SEQ ID NO: 107206 - DNA, 15 bp, Homo sapiens
taatactttatggag

SEQ ID NO: 107207 - DNA, 15 bp, Homo sapiens
ttaatactttatgga

SEQ ID NO: 107208 - DNA, 15 bp, Homo sapiens
gttaatactttatgg

SEQ ID NO: 107209 - DNA, 15 bp, Homo sapiens
tgttaatactttatg

SEQ ID NO: 107210 - DNA, 15 bp, Homo sapiens
atgttaatactttat

SEQ ID NO: 107211 - DNA, 15 bp, Homo sapiens
aatgttaatacttta

SEQ ID NO: 107212 - DNA, 15 bp, Homo sapiens
gaatgttaatacttt

SEQ ID NO: 107213 - DNA, 15 bp, Homo sapiens
agaatgttaatactt

SEQ ID NO: 107214 - DNA, 15 bp, Homo sapiens
tagaatgttaatact

SEQ ID NO: 107215 - DNA, 15 bp, Homo sapiens
ttagaatgttaatac

SEQ ID NO: 107216 - DNA, 15 bp, Homo sapiens
tttagaatgttaata

SEQ ID NO: 107217 - DNA, 15 bp, Homo sapiens
ttttagaatgttaat

SEQ ID NO: 107218 - DNA, 15 bp, Homo sapiens
tttttagaatgttaa

SEQ ID NO: 107219 - DNA, 15 bp, Homo sapiens
ttttttagaatgtta

SEQ ID NO: 107220 - DNA, 15 bp, Homo sapiens
tttttttagaatgtt

SEQ ID NO: 107221 - DNA, 15 bp, Homo sapiens
atttttttagaatgt

SEQ ID NO: 107222 - DNA, 15 bp, Homo sapiens
tatttttttagaatg

SEQ ID NO: 107223 - DNA, 15 bp, Homo sapiens
ttatttttttagaat

SEQ ID NO: 107224 - DNA, 15 bp, Homo sapiens
cttatttttttagaa

SEQ ID NO: 107225 - DNA, 15 bp, Homo sapiens
tcttatttttttaga

SEQ ID NO: 107226 - DNA, 15 bp, Homo sapiens
atcttatttttttag

SEQ ID NO: 107227 - DNA, 15 bp, Homo sapiens
catcttattttttta

SEQ ID NO: 107228 - DNA, 15 bp, Homo sapiens
acatcttattttttt

SEQ ID NO: 107229 - DNA, 15 bp, Homo sapiens
tacatcttatttttt

SEQ ID NO: 107230 - DNA, 15 bp, Homo sapiens
ttacatcttattttt

SEQ ID NO: 107231 - DNA, 15 bp, Homo sapiens
tttacatcttatttt

SEQ ID NO: 107232 - DNA, 15 bp, Homo sapiens
ttttacatcttattt

SEQ ID NO: 107233 - DNA, 15 bp, Homo sapiens
attttacatcttatt

SEQ ID NO: 107234 - DNA, 15 bp, Homo sapiens
tattttacatcttat

SEQ ID NO: 107235 - DNA, 15 bp, Homo sapiens
ttattttacatctta

SEQ ID NO: 107236 - DNA, 15 bp, Homo sapiens
cttattttacatctt

SEQ ID NO: 107237 - DNA, 15 bp, Homo sapiens
tcttattttacatct

SEQ ID NO: 107238 - DNA, 15 bp, Homo sapiens
atcttattttacatc

SEQ ID NO: 107239 - DNA, 15 bp, Homo sapiens
catcttattttacat

SEQ ID NO: 107240 - DNA, 15 bp, Homo sapiens
gcatcttattttaca

SEQ ID NO: 107241 - DNA, 15 bp, Homo sapiens
agcatcttattttac

SEQ ID NO: 107242 - DNA, 15 bp, Homo sapiens
aagcatcttatttta

SEQ ID NO: 107243 - DNA, 15 bp, Homo sapiens
taagcatcttatttt

SEQ ID NO: 107244 - DNA, 15 bp, Homo sapiens
ataagcatcttattt

SEQ ID NO: 107245 - DNA, 15 bp, Homo sapiens
tataagcatcttatt

SEQ ID NO: 107246 - DNA, 15 bp, Homo sapiens
ctataagcatcttat

SEQ ID NO: 107247 - DNA, 15 bp, Homo sapiens
tctataagcatctta

SEQ ID NO: 107248 - DNA, 15 bp, Homo sapiens
atctataagcatctt

SEQ ID NO: 107249 - DNA, 15 bp, Homo sapiens
aatctataagcatct

SEQ ID NO: 107250 - DNA, 15 bp, Homo sapiens
aaatctataagcatc

SEQ ID NO: 107251 - DNA, 15 bp, Homo sapiens
aaaatctataagcat

SEQ ID NO: 107252 - DNA, 15 bp, Homo sapiens
aaaaatctataagca

SEQ ID NO: 107253 - DNA, 15 bp, Homo sapiens
aaaaaatctataagc

SEQ ID NO: 107254 - DNA, 15 bp, Homo sapiens
gaaaaaatctataag

SEQ ID NO: 107255 - DNA, 15 bp, Homo sapiens
tgaaaaaatctataa

SEQ ID NO: 107256 - DNA, 15 bp, Homo sapiens
ttgaaaaaatctata

SEQ ID NO: 107257 - DNA, 15 bp, Homo sapiens
attgaaaaaatctat

SEQ ID NO: 107258 - DNA, 15 bp, Homo sapiens
gattgaaaaaatcta

SEQ ID NO: 107259 - DNA, 15 bp, Homo sapiens
ggattgaaaaaatct

SEQ ID NO: 107260 - DNA, 15 bp, Homo sapiens
aggattgaaaaaatc

SEQ ID NO: 107261 - DNA, 15 bp, Homo sapiens
taggattgaaaaaat

SEQ ID NO: 107262 - DNA, 15 bp, Homo sapiens
ataggattgaaaaaa

SEQ ID NO: 107263 - DNA, 15 bp, Homo sapiens
tataggattgaaaaa

SEQ ID NO: 107264 - DNA, 15 bp, Homo sapiens
ttataggattgaaaa

SEQ ID NO: 107265 - DNA, 15 bp, Homo sapiens
tttataggattgaaa

SEQ ID NO: 107266 - DNA, 15 bp, Homo sapiens
gtttataggattgaa

SEQ ID NO: 107267 - DNA, 15 bp, Homo sapiens
tgtttataggattga

SEQ ID NO: 107268 - DNA, 15 bp, Homo sapiens
ttgtttataggattg

SEQ ID NO: 107269 - DNA, 15 bp, Homo sapiens
gttgtttataggatt

SEQ ID NO: 107270 - DNA, 15 bp, Homo sapiens
tgttgtttataggat

SEQ ID NO: 107271 - DNA, 15 bp, Homo sapiens
ttgttgtttatagga

SEQ ID NO: 107272 - DNA, 15 bp, Homo sapiens
tttgttgtttatagg

SEQ ID NO: 107273 - DNA, 15 bp, Homo sapiens
gtttgttgtttatag

SEQ ID NO: 107274 - DNA, 15 bp, Homo sapiens
agtttgttgtttata

SEQ ID NO: 107275 - DNA, 15 bp, Homo sapiens
gagtttgttgtttat

SEQ ID NO: 107276 - DNA, 15 bp, Homo sapiens
agagtttgttgttta

SEQ ID NO: 107277 - DNA, 15 bp, Homo sapiens
tagagtttgttgttt

SEQ ID NO: 107278 - DNA, 15 bp, Homo sapiens
ttagagtttgttgtt

SEQ ID NO: 107279 - DNA, 15 bp, Homo sapiens
tttagagtttgttgt

SEQ ID NO: 107280 - DNA, 15 bp, Homo sapiens
ttttagagtttgttg

SEQ ID NO: 107281 - DNA, 15 bp, Homo sapiens
tttttagagtttgtt

SEQ ID NO: 107282 - DNA, 15 bp, Homo sapiens
atttttagagtttgt

SEQ ID NO: 107283 - DNA, 15 bp, Homo sapiens
aatttttagagtttg

SEQ ID NO: 107284 - DNA, 15 bp, Homo sapiens
aaatttttagagttt

SEQ ID NO: 107285 - DNA, 15 bp, Homo sapiens
caaatttttagagtt

SEQ ID NO: 107286 - DNA, 15 bp, Homo sapiens
ccaaatttttagagt

SEQ ID NO: 107287 - DNA, 15 bp, Homo sapiens
tccaaatttttagag

SEQ ID NO: 107288 - DNA, 15 bp, Homo sapiens
ctccaaatttttaga

SEQ ID NO: 107289 - DNA, 15 bp, Homo sapiens
tctccaaatttttag

SEQ ID NO: 107290 - DNA, 15 bp, Homo sapiens
atctccaaattttta

SEQ ID NO: 107291 - DNA, 15 bp, Homo sapiens
tatctccaaattttt

SEQ ID NO: 107292 - DNA, 15 bp, Homo sapiens
ttatctccaaatttt

SEQ ID NO: 107293 - DNA, 15 bp, Homo sapiens
tttatctccaaattt

SEQ ID NO: 107294 - DNA, 15 bp, Homo sapiens
ttttatctccaaatt

SEQ ID NO: 107295 - DNA, 15 bp, Homo sapiens
tttttatctccaaat

SEQ ID NO: 107296 - DNA, 15 bp, Homo sapiens
atttttatctccaaa

SEQ ID NO: 107297 - DNA, 15 bp, Homo sapiens
aatttttatctccaa

SEQ ID NO: 107298 - DNA, 15 bp, Homo sapiens
taatttttatctcca

SEQ ID NO: 107299 - DNA, 15 bp, Homo sapiens
ttaatttttatctcc

SEQ ID NO: 107300 - DNA, 15 bp, Homo sapiens
tttaatttttatctc

SEQ ID NO: 107301 - DNA, 15 bp, Homo sapiens
ttttaatttttatct

SEQ ID NO: 107302 - DNA, 15 bp, Homo sapiens
gttttaatttttatc

SEQ ID NO: 107303 - DNA, 15 bp, Homo sapiens
tgttttaatttttat

SEQ ID NO: 107304 - DNA, 15 bp, Homo sapiens
ctgttttaattttta

SEQ ID NO: 107305 - DNA, 15 bp, Homo sapiens
cctgttttaattttt

SEQ ID NO: 107306 - DNA, 15 bp, Homo sapiens
acctgttttaatttt

SEQ ID NO: 107307 - DNA, 15 bp, Homo sapiens
tacctgttttaattt

SEQ ID NO: 107308 - DNA, 15 bp, Homo sapiens
gtacctgttttaatt

SEQ ID NO: 107309 - DNA, 15 bp, Homo sapiens
ggtacctgttttaat

SEQ ID NO: 107310 - DNA, 15 bp, Homo sapiens
tggtacctgttttaa

SEQ ID NO: 107311 - DNA, 15 bp, Homo sapiens
ttggtacctgtttta

SEQ ID NO: 107312 - DNA, 15 bp, Homo sapiens
tttggtacctgtttt

SEQ ID NO: 107313 - DNA, 15 bp, Homo sapiens
ttttggtacctgttt

SEQ ID NO: 107314 - DNA, 15 bp, Homo sapiens
attttggtacctgtt

SEQ ID NO: 107315 - DNA, 15 bp, Homo sapiens
cattttggtacctgt

SEQ ID NO: 107316 - DNA, 15 bp, Homo sapiens
tcattttggtacctg

SEQ ID NO: 107317 - DNA, 15 bp, Homo sapiens
ttcattttggtacct

SEQ ID NO: 107318 - DNA, 15 bp, Homo sapiens
tttcattttggtacc

SEQ ID NO: 107319 - DNA, 15 bp, Homo sapiens
ttttcattttggtac

SEQ ID NO: 107320 - DNA, 15 bp, Homo sapiens
tttttcattttggta

SEQ ID NO: 107321 - DNA, 15 bp, Homo sapiens
ctttttcattttggt

SEQ ID NO: 107322 - DNA, 15 bp, Homo sapiens
tctttttcattttgg

SEQ ID NO: 107323 - DNA, 15 bp, Homo sapiens
ctctttttcattttg

SEQ ID NO: 107324 - DNA, 15 bp, Homo sapiens
tctctttttcatttt

SEQ ID NO: 107325 - DNA, 15 bp, Homo sapiens
ctctctttttcattt

SEQ ID NO: 107326 - DNA, 15 bp, Homo sapiens
tctctctttttcatt

SEQ ID NO: 107327 - DNA, 15 bp, Homo sapiens
gtctctctttttcat

SEQ ID NO: 107328 - DNA, 15 bp, Homo sapiens
cgtctctctttttca

SEQ ID NO: 107329 - DNA, 15 bp, Homo sapiens
tcgtctctctttttc

SEQ ID NO: 107330 - DNA, 15 bp, Homo sapiens
ttcgtctctcttttt

SEQ ID NO: 107331 - DNA, 15 bp, Homo sapiens
gttcgtctctctttt

SEQ ID NO: 107332 - DNA, 15 bp, Homo sapiens
agttcgtctctcttt

SEQ ID NO: 107333 - DNA, 15 bp, Homo sapiens
cagttcgtctctctt

SEQ ID NO: 107334 - DNA, 15 bp, Homo sapiens
tcagttcgtctctct

SEQ ID NO: 107335 - DNA, 15 bp, Homo sapiens
atcagttcgtctctc

SEQ ID NO: 107336 - DNA, 15 bp, Homo sapiens
gatcagttcgtctct

SEQ ID NO: 107337 - DNA, 15 bp, Homo sapiens
agatcagttcgtctc

SEQ ID NO: 107338 - DNA, 15 bp, Homo sapiens
tagatcagttcgtct

SEQ ID NO: 107339 - DNA, 15 bp, Homo sapiens
ttagatcagttcgtc

SEQ ID NO: 107340 - DNA, 15 bp, Homo sapiens
attagatcagttcgt

SEQ ID NO: 107341 - DNA, 15 bp, Homo sapiens
tattagatcagttcg

SEQ ID NO: 107342 - DNA, 15 bp, Homo sapiens
gtattagatcagttc

SEQ ID NO: 107343 - DNA, 15 bp, Homo sapiens
tgtattagatcagtt

SEQ ID NO: 107344 - DNA, 15 bp, Homo sapiens
gtgtattagatcagt

SEQ ID NO: 107345 - DNA, 15 bp, Homo sapiens
tgtgtattagatcag

SEQ ID NO: 107346 - DNA, 15 bp, Homo sapiens
atgtgtattagatca

SEQ ID NO: 107347 - DNA, 15 bp, Homo sapiens
catgtgtattagatc

SEQ ID NO: 107348 - DNA, 15 bp, Homo sapiens
ccatgtgtattagat

SEQ ID NO: 107349 - DNA, 15 bp, Homo sapiens
gccatgtgtattaga

SEQ ID NO: 107350 - DNA, 15 bp, Homo sapiens
tgccatgtgtattag

SEQ ID NO: 107351 - DNA, 15 bp, Homo sapiens
ttgccatgtgtatta

SEQ ID NO: 107352 - DNA, 15 bp, Homo sapiens
gttgccatgtgtatt

SEQ ID NO: 107353 - DNA, 15 bp, Homo sapiens
agttgccatgtgtat

SEQ ID NO: 107354 - DNA, 15 bp, Homo sapiens
aagttgccatgtgta

SEQ ID NO: 107355 - DNA, 15 bp, Homo sapiens
gaagttgccatgtgt

SEQ ID NO: 107356 - DNA, 15 bp, Homo sapiens
tgaagttgccatgtg

SEQ ID NO: 107357 - DNA, 15 bp, Homo sapiens
atgaagttgccatgt

SEQ ID NO: 107358 - DNA, 15 bp, Homo sapiens
tatgaagttgccatg

SEQ ID NO: 107359 - DNA, 15 bp, Homo sapiens
ctatgaagttgccat

SEQ ID NO: 107360 - DNA, 15 bp, Homo sapiens
tctatgaagttgcca

SEQ ID NO: 107361 - DNA, 15 bp, Homo sapiens
ttctatgaagttgcc

SEQ ID NO: 107362 - DNA, 15 bp, Homo sapiens
gttctatgaagttgc

SEQ ID NO: 107363 - DNA, 15 bp, Homo sapiens
tgttctatgaagttg

SEQ ID NO: 107364 - DNA, 15 bp, Homo sapiens
ttgttctatgaagtt

SEQ ID NO: 107365 - DNA, 15 bp, Homo sapiens
tttgttctatgaagt

SEQ ID NO: 107366 - DNA, 15 bp, Homo sapiens
atttgttctatgaag

SEQ ID NO: 107367 - DNA, 15 bp, Homo sapiens
catttgttctatgaa

SEQ ID NO: 107368 - DNA, 15 bp, Homo sapiens
ccatttgttctatga

SEQ ID NO: 107369 - DNA, 15 bp, Homo sapiens
tccatttgttctatg

SEQ ID NO: 107370 - DNA, 15 bp, Homo sapiens
gtccatttgttctat

SEQ ID NO: 107371 - DNA, 15 bp, Homo sapiens
tgtccatttgttcta

SEQ ID NO: 107372 - DNA, 15 bp, Homo sapiens
ttgtccatttgttct

SEQ ID NO: 107373 - DNA, 15 bp, Homo sapiens
gttgtccatttgttc

SEQ ID NO: 107374 - DNA, 15 bp, Homo sapiens
agttgtccatttgtt

SEQ ID NO: 107375 - DNA, 15 bp, Homo sapiens
cagttgtccatttgt

SEQ ID NO: 107376 - DNA, 15 bp, Homo sapiens
acagttgtccatttg

SEQ ID NO: 107377 - DNA, 15 bp, Homo sapiens
tacagttgtccattt

SEQ ID NO: 107378 - DNA, 15 bp, Homo sapiens
gtacagttgtccatt

SEQ ID NO: 107379 - DNA, 15 bp, Homo sapiens
ggtacagttgtccat

SEQ ID NO: 107380 - DNA, 15 bp, Homo sapiens
aggtacagttgtcca

SEQ ID NO: 107381 - DNA, 15 bp, Homo sapiens
gaggtacagttgtcc

SEQ ID NO: 107382 - DNA, 15 bp, Homo sapiens
agaggtacagttgtc

SEQ ID NO: 107383 - DNA, 15 bp, Homo sapiens
cagaggtacagttgt

SEQ ID NO: 107384 - DNA, 15 bp, Homo sapiens
acagaggtacagttg

SEQ ID NO: 107385 - DNA, 15 bp, Homo sapiens
aacagaggtacagtt

SEQ ID NO: 107386 - DNA, 15 bp, Homo sapiens
caacagaggtacagt

SEQ ID NO: 107387 - DNA, 15 bp, Homo sapiens
tcaacagaggtacag

SEQ ID NO: 107388 - DNA, 15 bp, Homo sapiens
ctcaacagaggtaca

SEQ ID NO: 107389 - DNA, 15 bp, Homo sapiens
actcaacagaggtac

SEQ ID NO: 107390 - DNA, 15 bp, Homo sapiens
aactcaacagaggta

SEQ ID NO: 107391 - DNA, 15 bp, Homo sapiens
gaactcaacagaggt

SEQ ID NO: 107392 - DNA, 15 bp, Homo sapiens
agaactcaacagagg

SEQ ID NO: 107393 - DNA, 15 bp, Homo sapiens
gagaactcaacagag

SEQ ID NO: 107394 - DNA, 15 bp, Homo sapiens
ggagaactcaacaga

SEQ ID NO: 107395 - DNA, 15 bp, Homo sapiens
tggagaactcaacag

SEQ ID NO: 107396 - DNA, 15 bp, Homo sapiens
atggagaactcaaca

SEQ ID NO: 107397 - DNA, 15 bp, Homo sapiens
tatggagaactcaac

SEQ ID NO: 107398 - DNA, 15 bp, Homo sapiens
atatggagaactcaa

SEQ ID NO: 107399 - DNA, 15 bp, Homo sapiens
aatatggagaactca

SEQ ID NO: 107400 - DNA, 15 bp, Homo sapiens
gaatatggagaactc

SEQ ID NO: 107401 - DNA, 15 bp, Homo sapiens
agaatatggagaact

SEQ ID NO: 107402 - DNA, 15 bp, Homo sapiens
cagaatatggagaac

SEQ ID NO: 107403 - DNA, 15 bp, Homo sapiens
acagaatatggagaa

SEQ ID NO: 107404 - DNA, 15 bp, Homo sapiens
cacagaatatggaga

SEQ ID NO: 107405 - DNA, 15 bp, Homo sapiens
acacagaatatggag

SEQ ID NO: 107406 - DNA, 15 bp, Homo sapiens
cacacagaatatgga

SEQ ID NO: 107407 - DNA, 15 bp, Homo sapiens
ccacacagaatatgg

SEQ ID NO: 107408 - DNA, 15 bp, Homo sapiens
tccacacagaatatg

SEQ ID NO: 107409 - DNA, 15 bp, Homo sapiens
ttccacacagaatat

SEQ ID NO: 107410 - DNA, 15 bp, Homo sapiens
tttccacacagaata

SEQ ID NO: 107411 - DNA, 15 bp, Homo sapiens
ttttccacacagaat

SEQ ID NO: 107412 - DNA, 15 bp, Homo sapiens
gttttccacacagaa

SEQ ID NO: 107413 - DNA, 15 bp, Homo sapiens
tgttttccacacaga

SEQ ID NO: 107414 - DNA, 15 bp, Homo sapiens
gtgttttccacacag

SEQ ID NO: 107415 - DNA, 15 bp, Homo sapiens
ggtgttttccacaca

SEQ ID NO: 107416 - DNA, 15 bp, Homo sapiens
tggtgttttccacac

SEQ ID NO: 107417 - DNA, 15 bp, Homo sapiens
ttggtgttttccaca

SEQ ID NO: 107418 - DNA, 15 bp, Homo sapiens
gttggtgttttccac

SEQ ID NO: 107419 - DNA, 15 bp, Homo sapiens
agttggtgttttcca

SEQ ID NO: 107420 - DNA, 15 bp, Homo sapiens
tagttggtgttttcc

SEQ ID NO: 107421 - DNA, 15 bp, Homo sapiens
gtagttggtgttttc

SEQ ID NO: 107422 - DNA, 15 bp, Homo sapiens
agtagttggtgtttt

SEQ ID NO: 107423 - DNA, 15 bp, Homo sapiens
aagtagttggtgttt

SEQ ID NO: 107424 - DNA, 15 bp, Homo sapiens
aaagtagttggtgtt

SEQ ID NO: 107425 - DNA, 15 bp, Homo sapiens
aaaagtagttggtgt

SEQ ID NO: 107426 - DNA, 15 bp, Homo sapiens
caaaagtagttggtg

SEQ ID NO: 107427 - DNA, 15 bp, Homo sapiens
acaaaagtagttggt

SEQ ID NO: 107428 - DNA, 15 bp, Homo sapiens
cacaaaagtagttgg

SEQ ID NO: 107429 - DNA, 15 bp, Homo sapiens
acacaaaagtagttg

SEQ ID NO: 107430 - DNA, 15 bp, Homo sapiens
tacacaaaagtagtt

SEQ ID NO: 107431 - DNA, 15 bp, Homo sapiens
ctacacaaaagtagt

SEQ ID NO: 107432 - DNA, 15 bp, Homo sapiens
gctacacaaaagtag

SEQ ID NO: 107433 - DNA, 15 bp, Homo sapiens
ggctacacaaaagta

SEQ ID NO: 107434 - DNA, 15 bp, Homo sapiens
aggctacacaaaagt

SEQ ID NO: 107435 - DNA, 15 bp, Homo sapiens
taggctacacaaaag

SEQ ID NO: 107436 - DNA, 15 bp, Homo sapiens
ttaggctacacaaaa

SEQ ID NO: 107437 - DNA, 15 bp, Homo sapiens
tttaggctacacaaa

SEQ ID NO: 107438 - DNA, 15 bp, Homo sapiens
atttaggctacacaa

SEQ ID NO: 107439 - DNA, 15 bp, Homo sapiens
aatttaggctacaca

SEQ ID NO: 107440 - DNA, 15 bp, Homo sapiens
caatttaggctacac

SEQ ID NO: 107441 - DNA, 15 bp, Homo sapiens
tcaatttaggctaca

SEQ ID NO: 107442 - DNA, 15 bp, Homo sapiens
gtcaatttaggctac

SEQ ID NO: 107443 - DNA, 15 bp, Homo sapiens
tgtcaatttaggcta

SEQ ID NO: 107444 - DNA, 15 bp, Homo sapiens
atgtcaatttaggct

SEQ ID NO: 107445 - DNA, 15 bp, Homo sapiens
catgtcaatttaggc

SEQ ID NO: 107446 - DNA, 15 bp, Homo sapiens
ccatgtcaatttagg

SEQ ID NO: 107447 - DNA, 15 bp, Homo sapiens
cccatgtcaatttag

SEQ ID NO: 107448 - DNA, 15 bp, Homo sapiens
gcccatgtcaattta

SEQ ID NO: 107449 - DNA, 15 bp, Homo sapiens
tgcccatgtcaattt

SEQ ID NO: 107450 - DNA, 15 bp, Homo sapiens
atgcccatgtcaatt

SEQ ID NO: 107451 - DNA, 15 bp, Homo sapiens
aatgcccatgtcaat

SEQ ID NO: 107452 - DNA, 15 bp, Homo sapiens
taatgcccatgtcaa

SEQ ID NO: 107453 - DNA, 15 bp, Homo sapiens
ttaatgcccatgtca

SEQ ID NO: 107454 - DNA, 15 bp, Homo sapiens
attaatgcccatgtc

SEQ ID NO: 107455 - DNA, 15 bp, Homo sapiens
aattaatgcccatgt

SEQ ID NO: 107456 - DNA, 15 bp, Homo sapiens
caattaatgcccatg

SEQ ID NO: 107457 - DNA, 15 bp, Homo sapiens
gcaattaatgcccat

SEQ ID NO: 107458 - DNA, 15 bp, Homo sapiens
agcaattaatgccca

SEQ ID NO: 107459 - DNA, 15 bp, Homo sapiens
gagcaattaatgccc

SEQ ID NO: 107460 - DNA, 15 bp, Homo sapiens
agagcaattaatgcc

SEQ ID NO: 107461 - DNA, 15 bp, Homo sapiens
aagagcaattaatgc

SEQ ID NO: 107462 - DNA, 15 bp, Homo sapiens
aaagagcaattaatg

SEQ ID NO: 107463 - DNA, 15 bp, Homo sapiens
gaaagagcaattaat

SEQ ID NO: 107464 - DNA, 15 bp, Homo sapiens
tgaaagagcaattaa

SEQ ID NO: 107465 - DNA, 15 bp, Homo sapiens
ttgaaagagcaatta

SEQ ID NO: 107466 - DNA, 15 bp, Homo sapiens
tttgaaagagcaatt

SEQ ID NO: 107467 - DNA, 15 bp, Homo sapiens
atttgaaagagcaat

SEQ ID NO: 107468 - DNA, 15 bp, Homo sapiens
catttgaaagagcaa

SEQ ID NO: 107469 - DNA, 15 bp, Homo sapiens
gcatttgaaagagca

SEQ ID NO: 107470 - DNA, 15 bp, Homo sapiens
tgcatttgaaagagc

SEQ ID NO: 107471 - DNA, 15 bp, Homo sapiens
atgcatttgaaagag

SEQ ID NO: 107472 - DNA, 15 bp, Homo sapiens
gatgcatttgaaaga

SEQ ID NO: 107473 - DNA, 15 bp, Homo sapiens
tgatgcatttgaaag

SEQ ID NO: 107474 - DNA, 15 bp, Homo sapiens
gtgatgcatttgaaa

SEQ ID NO: 107475 - DNA, 15 bp, Homo sapiens
ggtgatgcatttgaa

SEQ ID NO: 107476 - DNA, 15 bp, Homo sapiens
gggtgatgcatttga

SEQ ID NO: 107477 - DNA, 15 bp, Homo sapiens
ggggtgatgcatttg

SEQ ID NO: 107478 - DNA, 15 bp, Homo sapiens
tggggtgatgcattt

SEQ ID NO: 107479 - DNA, 15 bp, Homo sapiens
gtggggtgatgcatt

SEQ ID NO: 107480 - DNA, 15 bp, Homo sapiens
tgtggggtgatgcat

SEQ ID NO: 107481 - DNA, 15 bp, Homo sapiens
ctgtggggtgatgca

SEQ ID NO: 107482 - DNA, 15 bp, Homo sapiens
tctgtggggtgatgc

SEQ ID NO: 107483 - DNA, 15 bp, Homo sapiens
ctctgtggggtgatg

SEQ ID NO: 107484 - DNA, 15 bp, Homo sapiens
gctctgtggggtgat

SEQ ID NO: 107485 - DNA, 15 bp, Homo sapiens
agctctgtggggtga

SEQ ID NO: 107486 - DNA, 15 bp, Homo sapiens
cagctctgtggggtg

SEQ ID NO: 107487 - DNA, 15 bp, Homo sapiens
ccagctctgtggggt

SEQ ID NO: 107488 - DNA, 15 bp, Homo sapiens
gccagctctgtgggg

SEQ ID NO: 107489 - DNA, 15 bp, Homo sapiens
ggccagctctgtggg

SEQ ID NO: 107490 - DNA, 15 bp, Homo sapiens
gggccagctctgtgg

SEQ ID NO: 107491 - DNA, 15 bp, Homo sapiens
tgggccagctctgtg

SEQ ID NO: 107492 - DNA, 15 bp, Homo sapiens
gtgggccagctctgt

SEQ ID NO: 107493 - DNA, 15 bp, Homo sapiens
ggtgggccagctctg

SEQ ID NO: 107494 - DNA, 15 bp, Homo sapiens
tggtgggccagctct

SEQ ID NO: 107495 - DNA, 15 bp, Homo sapiens
ctggtgggccagctc

SEQ ID NO: 107496 - DNA, 15 bp, Homo sapiens
cctggtgggccagct

SEQ ID NO: 107497 - DNA, 15 bp, Homo sapiens
acctggtgggccagc

SEQ ID NO: 107498 - DNA, 15 bp, Homo sapiens
aacctggtgggccag

SEQ ID NO: 107499 - DNA, 15 bp, Homo sapiens
aaacctggtgggcca

SEQ ID NO: 107500 - DNA, 15 bp, Homo sapiens
gaaacctggtgggcc

SEQ ID NO: 107501 - DNA, 15 bp, Homo sapiens
tgaaacctggtgggc

SEQ ID NO: 107502 - DNA, 15 bp, Homo sapiens
atgaaacctggtggg

SEQ ID NO: 107503 - DNA, 15 bp, Homo sapiens
gatgaaacctggtgg

SEQ ID NO: 107504 - DNA, 15 bp, Homo sapiens
agatgaaacctggtg

SEQ ID NO: 107505 - DNA, 15 bp, Homo sapiens
cagatgaaacctggt

SEQ ID NO: 107506 - DNA, 15 bp, Homo sapiens
tcagatgaaacctgg

SEQ ID NO: 107507 - DNA, 15 bp, Homo sapiens
ttcagatgaaacctg

SEQ ID NO: 107508 - DNA, 15 bp, Homo sapiens
tttcagatgaaacct

SEQ ID NO: 107509 - DNA, 15 bp, Homo sapiens
ttttcagatgaaacc

SEQ ID NO: 107510 - DNA, 15 bp, Homo sapiens
tttttcagatgaaac

SEQ ID NO: 107511 - DNA, 15 bp, Homo sapiens
gtttttcagatgaaa

SEQ ID NO: 107512 - DNA, 15 bp, Homo sapiens
tgtttttcagatgaa

SEQ ID NO: 107513 - DNA, 15 bp, Homo sapiens
ctgtttttcagatga

SEQ ID NO: 107514 - DNA, 15 bp, Homo sapiens
gctgtttttcagatg

SEQ ID NO: 107515 - DNA, 15 bp, Homo sapiens
agctgtttttcagat

SEQ ID NO: 107516 - DNA, 15 bp, Homo sapiens
tagctgtttttcaga

SEQ ID NO: 107517 - DNA, 15 bp, Homo sapiens
ctagctgtttttcag

SEQ ID NO: 107518 - DNA, 15 bp, Homo sapiens
actagctgtttttca

SEQ ID NO: 107519 - DNA, 15 bp, Homo sapiens
aactagctgtttttc

SEQ ID NO: 107520 - DNA, 15 bp, Homo sapiens
gaactagctgttttt

SEQ ID NO: 107521 - DNA, 15 bp, Homo sapiens
tgaactagctgtttt

SEQ ID NO: 107522 - DNA, 15 bp, Homo sapiens
atgaactagctgttt

SEQ ID NO: 107523 - DNA, 15 bp, Homo sapiens
tatgaactagctgtt

SEQ ID NO: 107524 - DNA, 15 bp, Homo sapiens
ctatgaactagctgt

SEQ ID NO: 107525 - DNA, 15 bp, Homo sapiens
tctatgaactagctg

SEQ ID NO: 107526 - DNA, 15 bp, Homo sapiens
gtctatgaactagct

SEQ ID NO: 107527 - DNA, 15 bp, Homo sapiens
agtctatgaactagc

SEQ ID NO: 107528 - DNA, 15 bp, Homo sapiens
gagtctatgaactag

SEQ ID NO: 107529 - DNA, 15 bp, Homo sapiens
ggagtctatgaacta

SEQ ID NO: 107530 - DNA, 15 bp, Homo sapiens
aggagtctatgaact

SEQ ID NO: 107531 - DNA, 15 bp, Homo sapiens
taggagtctatgaac

SEQ ID NO: 107532 - DNA, 15 bp, Homo sapiens
ctaggagtctatgaa

SEQ ID NO: 107533 - DNA, 15 bp, Homo sapiens
tctaggagtctatga

SEQ ID NO: 107534 - DNA, 15 bp, Homo sapiens
ttctaggagtctatg

SEQ ID NO: 107535 - DNA, 15 bp, Homo sapiens
attctaggagtctat

SEQ ID NO: 107536 - DNA, 15 bp, Homo sapiens
tattctaggagtcta

SEQ ID NO: 107537 - DNA, 15 bp, Homo sapiens
ctattctaggagtct

SEQ ID NO: 107538 - DNA, 15 bp, Homo sapiens
cctattctaggagtc

SEQ ID NO: 107539 - DNA, 15 bp, Homo sapiens
ccctattctaggagt

SEQ ID NO: 107540 - DNA, 15 bp, Homo sapiens
tccctattctaggag

SEQ ID NO: 107541 - DNA, 15 bp, Homo sapiens
ctccctattctagga

SEQ ID NO: 107542 - DNA, 15 bp, Homo sapiens
tctccctattctagg

SEQ ID NO: 107543 - DNA, 15 bp, Homo sapiens
ttctccctattctag

SEQ ID NO: 107544 - DNA, 15 bp, Homo sapiens
tttctccctattcta

SEQ ID NO: 107545 - DNA, 15 bp, Homo sapiens
ttttctccctattct

SEQ ID NO: 107546 - DNA, 15 bp, Homo sapiens
tttttctccctattc

SEQ ID NO: 107547 - DNA, 15 bp, Homo sapiens
atttttctccctatt

SEQ ID NO: 107548 - DNA, 15 bp, Homo sapiens
tatttttctccctat

SEQ ID NO: 107549 - DNA, 15 bp, Homo sapiens
ttatttttctcccta

SEQ ID NO: 107550 - DNA, 15 bp, Homo sapiens
attatttttctccct

SEQ ID NO: 107551 - DNA, 15 bp, Homo sapiens
aattatttttctccc

SEQ ID NO: 107552 - DNA, 15 bp, Homo sapiens
taattatttttctcc

SEQ ID NO: 107553 - DNA, 15 bp, Homo sapiens
ataattatttttctc

SEQ ID NO: 107554 - DNA, 15 bp, Homo sapiens
aataattatttttct

SEQ ID NO: 107555 - DNA, 15 bp, Homo sapiens
aaataattatttttc

SEQ ID NO: 107556 - DNA, 15 bp, Homo sapiens
gaaataattattttt

SEQ ID NO: 107557 - DNA, 15 bp, Homo sapiens
tgaaataattatttt

SEQ ID NO: 107558 - DNA, 15 bp, Homo sapiens
gtgaaataattattt

SEQ ID NO: 107559 - DNA, 15 bp, Homo sapiens
tgtgaaataattatt

SEQ ID NO: 107560 - DNA, 15 bp, Homo sapiens
ctgtgaaataattat

SEQ ID NO: 107561 - DNA, 15 bp, Homo sapiens
tctgtgaaataatta

SEQ ID NO: 107562 - DNA, 15 bp, Homo sapiens
ttctgtgaaataatt

SEQ ID NO: 107563 - DNA, 15 bp, Homo sapiens
cttctgtgaaataat

SEQ ID NO: 107564 - DNA, 15 bp, Homo sapiens
tcttctgtgaaataa

SEQ ID NO: 107565 - DNA, 15 bp, Homo sapiens
gtcttctgtgaaata

SEQ ID NO: 107566 - DNA, 15 bp, Homo sapiens
tgtcttctgtgaaat

SEQ ID NO: 107567 - DNA, 15 bp, Homo sapiens
atgtcttctgtgaaa

SEQ ID NO: 107568 - DNA, 15 bp, Homo sapiens
aatgtcttctgtgaa

SEQ ID NO: 107569 - DNA, 15 bp, Homo sapiens
gaatgtcttctgtga

SEQ ID NO: 107570 - DNA, 15 bp, Homo sapiens
tgaatgtcttctgtg

SEQ ID NO: 107571 - DNA, 15 bp, Homo sapiens
ttgaatgtcttctgt

SEQ ID NO: 107572 - DNA, 15 bp, Homo sapiens
tttgaatgtcttctg

SEQ ID NO: 107573 - DNA, 15 bp, Homo sapiens
gtttgaatgtcttct

SEQ ID NO: 107574 - DNA, 15 bp, Homo sapiens
tgtttgaatgtcttc

SEQ ID NO: 107575 - DNA, 15 bp, Homo sapiens
ttgtttgaatgtctt

SEQ ID NO: 107576 - DNA, 15 bp, Homo sapiens
attgtttgaatgtct

SEQ ID NO: 107577 - DNA, 15 bp, Homo sapiens
aattgtttgaatgtc

SEQ ID NO: 107578 - DNA, 15 bp, Homo sapiens
aaattgtttgaatgt

SEQ ID NO: 107579 - DNA, 15 bp, Homo sapiens
gaaattgtttgaatg

SEQ ID NO: 107580 - DNA, 15 bp, Homo sapiens
agaaattgtttgaat

SEQ ID NO: 107581 - DNA, 15 bp, Homo sapiens
tagaaattgtttgaa

SEQ ID NO: 107582 - DNA, 15 bp, Homo sapiens
ttagaaattgtttga

SEQ ID NO: 107583 - DNA, 15 bp, Homo sapiens
gttagaaattgtttg

SEQ ID NO: 107584 - DNA, 15 bp, Homo sapiens
ggttagaaattgttt

SEQ ID NO: 107585 - DNA, 15 bp, Homo sapiens
tggttagaaattgtt

SEQ ID NO: 107586 - DNA, 15 bp, Homo sapiens
ctggttagaaattgt

SEQ ID NO: 107587 - DNA, 15 bp, Homo sapiens
cctggttagaaattg

SEQ ID NO: 107588 - DNA, 15 bp, Homo sapiens
acctggttagaaatt

SEQ ID NO: 107589 - DNA, 15 bp, Homo sapiens
aacctggttagaaat

SEQ ID NO: 107590 - DNA, 15 bp, Homo sapiens
aaacctggttagaaa

SEQ ID NO: 107591 - DNA, 15 bp, Homo sapiens
aaaacctggttagaa

SEQ ID NO: 107592 - DNA, 15 bp, Homo sapiens
gaaaacctggttaga

SEQ ID NO: 107593 - DNA, 15 bp, Homo sapiens
ggaaaacctggttag

SEQ ID NO: 107594 - DNA, 15 bp, Homo sapiens
aggaaaacctggtta

SEQ ID NO: 107595 - DNA, 15 bp, Homo sapiens
caggaaaacctggtt

SEQ ID NO: 107596 - DNA, 15 bp, Homo sapiens
tcaggaaaacctggt

SEQ ID NO: 107597 - DNA, 15 bp, Homo sapiens
atcaggaaaacctgg

SEQ ID NO: 107598 - DNA, 15 bp, Homo sapiens
aatcaggaaaacctg

SEQ ID NO: 107599 - DNA, 15 bp, Homo sapiens
aaatcaggaaaacct

SEQ ID NO: 107600 - DNA, 15 bp, Homo sapiens
gaaatcaggaaaacc

SEQ ID NO: 107601 - DNA, 15 bp, Homo sapiens
tgaaatcaggaaaac

SEQ ID NO: 107602 - DNA, 15 bp, Homo sapiens
atgaaatcaggaaaa

SEQ ID NO: 107603 - DNA, 15 bp, Homo sapiens
aatgaaatcaggaaa

SEQ ID NO: 107604 - DNA, 15 bp, Homo sapiens
taatgaaatcaggaa

SEQ ID NO: 107605 - DNA, 15 bp, Homo sapiens
ctaatgaaatcagga

SEQ ID NO: 107606 - DNA, 15 bp, Homo sapiens
tctaatgaaatcagg

SEQ ID NO: 107607 - DNA, 15 bp, Homo sapiens
ttctaatgaaatcag

SEQ ID NO: 107608 - DNA, 15 bp, Homo sapiens
cttctaatgaaatca

SEQ ID NO: 107609 - DNA, 15 bp, Homo sapiens
ccttctaatgaaatc

SEQ ID NO: 107610 - DNA, 15 bp, Homo sapiens
gccttctaatgaaat

SEQ ID NO: 107611 - DNA, 15 bp, Homo sapiens
agccttctaatgaaa

SEQ ID NO: 107612 - DNA, 15 bp, Homo sapiens
tagccttctaatgaa

SEQ ID NO: 107613 - DNA, 15 bp, Homo sapiens
ttagccttctaatga

SEQ ID NO: 107614 - DNA, 15 bp, Homo sapiens
gttagccttctaatg

SEQ ID NO: 107615 - DNA, 15 bp, Homo sapiens
ggttagccttctaat

SEQ ID NO: 107616 - DNA, 15 bp, Homo sapiens
tggttagccttctaa

SEQ ID NO: 107617 - DNA, 15 bp, Homo sapiens
ttggttagccttcta

SEQ ID NO: 107618 - DNA, 15 bp, Homo sapiens
attggttagccttct

SEQ ID NO: 107619 - DNA, 15 bp, Homo sapiens
cattggttagccttc

SEQ ID NO: 107620 - DNA, 15 bp, Homo sapiens
tcattggttagcctt

SEQ ID NO: 107621 - DNA, 15 bp, Homo sapiens
ttcattggttagcct

SEQ ID NO: 107622 - DNA, 15 bp, Homo sapiens
cttcattggttagcc

SEQ ID NO: 107623 - DNA, 15 bp, Homo sapiens
acttcattggttagc

SEQ ID NO: 107624 - DNA, 15 bp, Homo sapiens
aacttcattggttag

SEQ ID NO: 107625 - DNA, 15 bp, Homo sapiens
taacttcattggtta

SEQ ID NO: 107626 - DNA, 15 bp, Homo sapiens
ctaacttcattggtt

SEQ ID NO: 107627 - DNA, 15 bp, Homo sapiens
tctaacttcattggt

SEQ ID NO: 107628 - DNA, 15 bp, Homo sapiens
ctctaacttcattgg

SEQ ID NO: 107629 - DNA, 15 bp, Homo sapiens
cctctaacttcattg

SEQ ID NO: 107630 - DNA, 15 bp, Homo sapiens
tcctctaacttcatt

SEQ ID NO: 107631 - DNA, 15 bp, Homo sapiens
atcctctaacttcat

SEQ ID NO: 107632 - DNA, 15 bp, Homo sapiens
tatcctctaacttca

SEQ ID NO: 107633 - DNA, 15 bp, Homo sapiens
ttatcctctaacttc

SEQ ID NO: 107634 - DNA, 15 bp, Homo sapiens
attatcctctaactt

SEQ ID NO: 107635 - DNA, 15 bp, Homo sapiens
gattatcctctaact

SEQ ID NO: 107636 - DNA, 15 bp, Homo sapiens
ggattatcctctaac

SEQ ID NO: 107637 - DNA, 15 bp, Homo sapiens
tggattatcctctaa

SEQ ID NO: 107638 - DNA, 15 bp, Homo sapiens
atggattatcctcta

SEQ ID NO: 107639 - DNA, 15 bp, Homo sapiens
catggattatcctct

SEQ ID NO: 107640 - DNA, 15 bp, Homo sapiens
acatggattatcctc

SEQ ID NO: 107641 - DNA, 15 bp, Homo sapiens
tacatggattatcct

SEQ ID NO: 107642 - DNA, 15 bp, Homo sapiens
atacatggattatcc

SEQ ID NO: 107643 - DNA, 15 bp, Homo sapiens
tatacatggattatc

SEQ ID NO: 107644 - DNA, 15 bp, Homo sapiens
gtatacatggattat

SEQ ID NO: 107645 - DNA, 15 bp, Homo sapiens
tgtatacatggatta

SEQ ID NO: 107646 - DNA, 15 bp, Homo sapiens
atgtatacatggatt

SEQ ID NO: 107647 - DNA, 15 bp, Homo sapiens
tatgtatacatggat

SEQ ID NO: 107648 - DNA, 15 bp, Homo sapiens
gtatgtatacatgga

SEQ ID NO: 107649 - DNA, 15 bp, Homo sapiens
tgtatgtatacatgg

SEQ ID NO: 107650 - DNA, 15 bp, Homo sapiens
atgtatgtatacatg

SEQ ID NO: 107651 - DNA, 15 bp, Homo sapiens
tatgtatgtatacat

SEQ ID NO: 107652 - DNA, 15 bp, Homo sapiens
atatgtatgtataca

SEQ ID NO: 107653 - DNA, 15 bp, Homo sapiens
catatgtatgtatac

SEQ ID NO: 107654 - DNA, 15 bp, Homo sapiens
gcatatgtatgtata

SEQ ID NO: 107655 - DNA, 15 bp, Homo sapiens
tgcatatgtatgtat

SEQ ID NO: 107656 - DNA, 15 bp, Homo sapiens
ctgcatatgtatgta

SEQ ID NO: 107657 - DNA, 15 bp, Homo sapiens
actgcatatgtatgt

SEQ ID NO: 107658 - DNA, 15 bp, Homo sapiens
gactgcatatgtatg

SEQ ID NO: 107659 - DNA, 15 bp, Homo sapiens
tgactgcatatgtat

SEQ ID NO: 107660 - DNA, 15 bp, Homo sapiens
gtgactgcatatgta

SEQ ID NO: 107661 - DNA, 15 bp, Homo sapiens
tgtgactgcatatgt

SEQ ID NO: 107662 - DNA, 15 bp, Homo sapiens
atgtgactgcatatg

SEQ ID NO: 107663 - DNA, 15 bp, Homo sapiens
aatgtgactgcatat

SEQ ID NO: 107664 - DNA, 15 bp, Homo sapiens
aaatgtgactgcata

SEQ ID NO: 107665 - DNA, 15 bp, Homo sapiens
taaatgtgactgcat

SEQ ID NO: 107666 - DNA, 15 bp, Homo sapiens
ataaatgtgactgca

SEQ ID NO: 107667 - DNA, 15 bp, Homo sapiens
aataaatgtgactgc

SEQ ID NO: 107668 - DNA, 15 bp, Homo sapiens
caataaatgtgactg

SEQ ID NO: 107669 - DNA, 15 bp, Homo sapiens
tcaataaatgtgact

SEQ ID NO: 107670 - DNA, 15 bp, Homo sapiens
atcaataaatgtgac

SEQ ID NO: 107671 - DNA, 15 bp, Homo sapiens
aatcaataaatgtga

SEQ ID NO: 107672 - DNA, 15 bp, Homo sapiens
gaatcaataaatgtg

SEQ ID NO: 107673 - DNA, 15 bp, Homo sapiens
agaatcaataaatgt

SEQ ID NO: 107674 - DNA, 15 bp, Homo sapiens
gagaatcaataaatg

SEQ ID NO: 107675 - DNA, 15 bp, Homo sapiens
agagaatcaataaat

SEQ ID NO: 107676 - DNA, 15 bp, Homo sapiens
cagagaatcaataaa

SEQ ID NO: 107677 - DNA, 15 bp, Homo sapiens
gcagagaatcaataa

SEQ ID NO: 107678 - DNA, 15 bp, Homo sapiens
tgcagagaatcaata

SEQ ID NO: 107679 - DNA, 15 bp, Homo sapiens
atgcagagaatcaat

SEQ ID NO: 107680 - DNA, 15 bp, Homo sapiens
aatgcagagaatcaa

SEQ ID NO: 107681 - DNA, 15 bp, Homo sapiens
taatgcagagaatca

SEQ ID NO: 107682 - DNA, 15 bp, Homo sapiens
ataatgcagagaatc

SEQ ID NO: 107683 - DNA, 15 bp, Homo sapiens
aataatgcagagaat

SEQ ID NO: 107684 - DNA, 15 bp, Homo sapiens
aaataatgcagagaa

SEQ ID NO: 107685 - DNA, 15 bp, Homo sapiens
aaaataatgcagaga

SEQ ID NO: 107686 - DNA, 15 bp, Homo sapiens
aaaaataatgcagag

SEQ ID NO: 107687 - DNA, 15 bp, Homo sapiens
gaaaaataatgcaga

SEQ ID NO: 107688 - DNA, 15 bp, Homo sapiens
agaaaaataatgcag

SEQ ID NO: 107689 - DNA, 15 bp, Homo sapiens
aagaaaaataatgca

SEQ ID NO: 107690 - DNA, 15 bp, Homo sapiens
aaagaaaaataatgc

SEQ ID NO: 107691 - DNA, 15 bp, Homo sapiens
caaagaaaaataatg

SEQ ID NO: 107692 - DNA, 15 bp, Homo sapiens
gcaaagaaaaataat

SEQ ID NO: 107693 - DNA, 15 bp, Homo sapiens
agcaaagaaaaataa

SEQ ID NO: 107694 - DNA, 15 bp, Homo sapiens
aagcaaagaaaaata

SEQ ID NO: 107695 - DNA, 15 bp, Homo sapiens
aaagcaaagaaaaat

SEQ ID NO: 107696 - DNA, 15 bp, Homo sapiens
aaaagcaaagaaaaa

SEQ ID NO: 107697 - DNA, 15 bp, Homo sapiens
taaaagcaaagaaaa

SEQ ID NO: 107698 - DNA, 15 bp, Homo sapiens
ataaaagcaaagaaa

SEQ ID NO: 107699 - DNA, 15 bp, Homo sapiens
cataaaagcaaagaa

SEQ ID NO: 107700 - DNA, 15 bp, Homo sapiens
acataaaagcaaaga

SEQ ID NO: 107701 - DNA, 15 bp, Homo sapiens
aacataaaagcaaag

SEQ ID NO: 107702 - DNA, 15 bp, Homo sapiens
aaacataaaagcaaa

SEQ ID NO: 107703 - DNA, 15 bp, Homo sapiens
taaacataaaagcaa

SEQ ID NO: 107704 - DNA, 15 bp, Homo sapiens
ctaaacataaaagca

SEQ ID NO: 107705 - DNA, 15 bp, Homo sapiens
tctaaacataaaagc

SEQ ID NO: 107706 - DNA, 15 bp, Homo sapiens
ttctaaacataaaag

SEQ ID NO: 107707 - DNA, 15 bp, Homo sapiens
tttctaaacataaaa

SEQ ID NO: 107708 - DNA, 15 bp, Homo sapiens
ctttctaaacataaa

SEQ ID NO: 107709 - DNA, 15 bp, Homo sapiens
actttctaaacataa

SEQ ID NO: 107710 - DNA, 15 bp, Homo sapiens
gactttctaaacata

SEQ ID NO: 107711 - DNA, 15 bp, Homo sapiens
agactttctaaacat

SEQ ID NO: 107712 - DNA, 15 bp, Homo sapiens
aagactttctaaaca

SEQ ID NO: 107713 - DNA, 15 bp, Homo sapiens
aaagactttctaaac

SEQ ID NO: 107714 - DNA, 15 bp, Homo sapiens
caaagactttctaaa

SEQ ID NO: 107715 - DNA, 15 bp, Homo sapiens
acaaagactttctaa

SEQ ID NO: 107716 - DNA, 15 bp, Homo sapiens
gacaaagactttcta

SEQ ID NO: 107717 - DNA, 15 bp, Homo sapiens
ggacaaagactttct

SEQ ID NO: 107718 - DNA, 15 bp, Homo sapiens
tggacaaagactttc

SEQ ID NO: 107719 - DNA, 15 bp, Homo sapiens
atggacaaagacttt

SEQ ID NO: 107720 - DNA, 15 bp, Homo sapiens
catggacaaagactt

SEQ ID NO: 107721 - DNA, 15 bp, Homo sapiens
acatggacaaagact

SEQ ID NO: 107722 - DNA, 15 bp, Homo sapiens
aacatggacaaagac

SEQ ID NO: 107723 - DNA, 15 bp, Homo sapiens
aaacatggacaaaga

SEQ ID NO: 107724 - DNA, 15 bp, Homo sapiens
taaacatggacaaag

SEQ ID NO: 107725 - DNA, 15 bp, Homo sapiens
ttaaacatggacaaa

SEQ ID NO: 107726 - DNA, 15 bp, Homo sapiens
cttaaacatggacaa

SEQ ID NO: 107727 - DNA, 15 bp, Homo sapiens
ccttaaacatggaca

SEQ ID NO: 107728 - DNA, 15 bp, Homo sapiens
cccttaaacatggac

SEQ ID NO: 107729 - DNA, 15 bp, Homo sapiens
acccttaaacatgga

SEQ ID NO: 107730 - DNA, 15 bp, Homo sapiens
gacccttaaacatgg

SEQ ID NO: 107731 - DNA, 15 bp, Homo sapiens
tgacccttaaacatg

SEQ ID NO: 107732 - DNA, 15 bp, Homo sapiens
ctgacccttaaacat

SEQ ID NO: 107733 - DNA, 15 bp, Homo sapiens
actgacccttaaaca

SEQ ID NO: 107734 - DNA, 15 bp, Homo sapiens
aactgacccttaaac

SEQ ID NO: 107735 - DNA, 15 bp, Homo sapiens
caactgacccttaaa

SEQ ID NO: 107736 - DNA, 15 bp, Homo sapiens
acaactgacccttaa

SEQ ID NO: 107737 - DNA, 15 bp, Homo sapiens
aacaactgaccctta

SEQ ID NO: 107738 - DNA, 15 bp, Homo sapiens
taacaactgaccctt

SEQ ID NO: 107739 - DNA, 15 bp, Homo sapiens
ttaacaactgaccct

SEQ ID NO: 107740 - DNA, 15 bp, Homo sapiens
tttaacaactgaccc

SEQ ID NO: 107741 - DNA, 15 bp, Homo sapiens
ttttaacaactgacc

SEQ ID NO: 107742 - DNA, 15 bp, Homo sapiens
attttaacaactgac

SEQ ID NO: 107743 - DNA, 15 bp, Homo sapiens
aattttaacaactga

SEQ ID NO: 107744 - DNA, 15 bp, Homo sapiens
taattttaacaactg

SEQ ID NO: 107745 - DNA, 15 bp, Homo sapiens
ttaattttaacaact

SEQ ID NO: 107746 - DNA, 15 bp, Homo sapiens
attaattttaacaac

SEQ ID NO: 107747 - DNA, 15 bp, Homo sapiens
gattaattttaacaa

SEQ ID NO: 107748 - DNA, 15 bp, Homo sapiens
tgattaattttaaca

SEQ ID NO: 107749 - DNA, 15 bp, Homo sapiens
atgattaattttaac

SEQ ID NO: 107750 - DNA, 15 bp, Homo sapiens
tatgattaattttaa

SEQ ID NO: 107751 - DNA, 15 bp, Homo sapiens
ttatgattaatttta

SEQ ID NO: 107752 - DNA, 15 bp, Homo sapiens
tttatgattaatttt

SEQ ID NO: 107753 - DNA, 15 bp, Homo sapiens
ctttatgattaattt

SEQ ID NO: 107754 - DNA, 15 bp, Homo sapiens
tctttatgattaatt

SEQ ID NO: 107755 - DNA, 15 bp, Homo sapiens
ttctttatgattaat

SEQ ID NO: 107756 - DNA, 15 bp, Homo sapiens
tttctttatgattaa

SEQ ID NO: 107757 - DNA, 15 bp, Homo sapiens
ttttctttatgatta

SEQ ID NO: 107758 - DNA, 15 bp, Homo sapiens
attttctttatgatt

SEQ ID NO: 107759 - DNA, 15 bp, Homo sapiens
tattttctttatgat

SEQ ID NO: 107760 - DNA, 15 bp, Homo sapiens
ttattttctttatga

SEQ ID NO: 107761 - DNA, 15 bp, Homo sapiens
tttattttctttatg

SEQ ID NO: 107762 - DNA, 15 bp, Homo sapiens
ctttattttctttat

SEQ ID NO: 107763 - DNA, 15 bp, Homo sapiens
tctttattttcttta

SEQ ID NO: 107764 - DNA, 15 bp, Homo sapiens
ttctttattttcttt

SEQ ID NO: 107765 - DNA, 15 bp, Homo sapiens
tttctttattttctt

SEQ ID NO: 107766 - DNA, 15 bp, Homo sapiens
ttttctttattttct

SEQ ID NO: 107767 - DNA, 15 bp, Homo sapiens
tttttctttattttc

SEQ ID NO: 107768 - DNA, 15 bp, Homo sapiens
ctttttctttatttt

SEQ ID NO: 107769 - DNA, 15 bp, Homo sapiens
cctttttctttattt

SEQ ID NO: 107770 - DNA, 15 bp, Homo sapiens
tcctttttctttatt

SEQ ID NO: 107771 - DNA, 15 bp, Homo sapiens
gtcctttttctttat

SEQ ID NO: 107772 - DNA, 15 bp, Homo sapiens
agtcctttttcttta

SEQ ID NO: 107773 - DNA, 15 bp, Homo sapiens
cagtcctttttcttt

SEQ ID NO: 107774 - DNA, 15 bp, Homo sapiens
ccagtcctttttctt

SEQ ID NO: 107775 - DNA, 15 bp, Homo sapiens
tccagtcctttttct

SEQ ID NO: 107776 - DNA, 15 bp, Homo sapiens
ttccagtcctttttc

SEQ ID NO: 107777 - DNA, 15 bp, Homo sapiens
cttccagtccttttt

SEQ ID NO: 107778 - DNA, 15 bp, Homo sapiens
gcttccagtcctttt

SEQ ID NO: 107779 - DNA, 15 bp, Homo sapiens
agcttccagtccttt

SEQ ID NO: 107780 - DNA, 15 bp, Homo sapiens
tagcttccagtcctt

SEQ ID NO: 107781 - DNA, 15 bp, Homo sapiens
atagcttccagtcct

SEQ ID NO: 107782 - DNA, 15 bp, Homo sapiens
tatagcttccagtcc

SEQ ID NO: 107783 - DNA, 15 bp, Homo sapiens
atatagcttccagtc

SEQ ID NO: 107784 - DNA, 15 bp, Homo sapiens
tatatagcttccagt

SEQ ID NO: 107785 - DNA, 15 bp, Homo sapiens
atatatagcttccag

SEQ ID NO: 107786 - DNA, 15 bp, Homo sapiens
tatatatagcttcca

SEQ ID NO: 107787 - DNA, 15 bp, Homo sapiens
ttatatatagcttcc

SEQ ID NO: 107788 - DNA, 15 bp, Homo sapiens
tttatatatagcttc

SEQ ID NO: 107789 - DNA, 15 bp, Homo sapiens
gtttatatatagctt

SEQ ID NO: 107790 - DNA, 15 bp, Homo sapiens
agtttatatatagct

SEQ ID NO: 107791 - DNA, 15 bp, Homo sapiens
tagtttatatatagc

SEQ ID NO: 107792 - DNA, 15 bp, Homo sapiens
gtagtttatatatag

SEQ ID NO: 107793 - DNA, 15 bp, Homo sapiens
tgtagtttatatata

SEQ ID NO: 107794 - DNA, 15 bp, Homo sapiens
gtgtagtttatatat

SEQ ID NO: 107795 - DNA, 15 bp, Homo sapiens
agtgtagtttatata

SEQ ID NO: 107796 - DNA, 15 bp, Homo sapiens
gagtgtagtttatat

SEQ ID NO: 107797 - DNA, 15 bp, Homo sapiens
agagtgtagtttata

SEQ ID NO: 107798 - DNA, 15 bp, Homo sapiens
cagagtgtagtttat

SEQ ID NO: 107799 - DNA, 15 bp, Homo sapiens
tcagagtgtagttta

SEQ ID NO: 107800 - DNA, 15 bp, Homo sapiens
ttcagagtgtagttt

SEQ ID NO: 107801 - DNA, 15 bp, Homo sapiens
tttcagagtgtagtt

SEQ ID NO: 107802 - DNA, 15 bp, Homo sapiens
atttcagagtgtagt

SEQ ID NO: 107803 - DNA, 15 bp, Homo sapiens
tatttcagagtgtag

SEQ ID NO: 107804 - DNA, 15 bp, Homo sapiens
atatttcagagtgta

SEQ ID NO: 107805 - DNA, 15 bp, Homo sapiens
aatatttcagagtgt

SEQ ID NO: 107806 - DNA, 15 bp, Homo sapiens
aaatatttcagagtg

SEQ ID NO: 107807 - DNA, 15 bp, Homo sapiens
aaaatatttcagagt

SEQ ID NO: 107808 - DNA, 15 bp, Homo sapiens
aaaaatatttcagag

SEQ ID NO: 107809 - DNA, 15 bp, Homo sapiens
taaaaatatttcaga

SEQ ID NO: 107810 - DNA, 15 bp, Homo sapiens
ttaaaaatatttcag

SEQ ID NO: 107811 - DNA, 15 bp, Homo sapiens
attaaaaatatttca

SEQ ID NO: 107812 - DNA, 15 bp, Homo sapiens
gattaaaaatatttc

SEQ ID NO: 107813 - DNA, 15 bp, Homo sapiens
agattaaaaatattt

SEQ ID NO: 107814 - DNA, 15 bp, Homo sapiens
tagattaaaaatatt

SEQ ID NO: 107815 - DNA, 15 bp, Homo sapiens
atagattaaaaatat

SEQ ID NO: 107816 - DNA, 15 bp, Homo sapiens
tatagattaaaaata

SEQ ID NO: 107817 - DNA, 15 bp, Homo sapiens
ttatagattaaaaat

SEQ ID NO: 107818 - DNA, 15 bp, Homo sapiens
tttatagattaaaaa

SEQ ID NO: 107819 - DNA, 15 bp, Homo sapiens
ttttatagattaaaa

SEQ ID NO: 107820 - DNA, 15 bp, Homo sapiens
attttatagattaaa

SEQ ID NO: 107821 - DNA, 15 bp, Homo sapiens
aattttatagattaa

SEQ ID NO: 107822 - DNA, 15 bp, Homo sapiens
aaattttatagatta

SEQ ID NO: 107823 - DNA, 15 bp, Homo sapiens
caaattttatagatt

SEQ ID NO: 107824 - DNA, 15 bp, Homo sapiens
acaaattttatagat

SEQ ID NO: 107825 - DNA, 15 bp, Homo sapiens
gacaaattttataga

SEQ ID NO: 107826 - DNA, 15 bp, Homo sapiens
tgacaaattttatag

SEQ ID NO: 107827 - DNA, 15 bp, Homo sapiens
ctgacaaattttata

SEQ ID NO: 107828 - DNA, 15 bp, Homo sapiens
cctgacaaattttat

SEQ ID NO: 107829 - DNA, 15 bp, Homo sapiens
tcctgacaaatttta

SEQ ID NO: 107830 - DNA, 15 bp, Homo sapiens
ttcctgacaaatttt

SEQ ID NO: 107831 - DNA, 15 bp, Homo sapiens
tttcctgacaaattt

SEQ ID NO: 107832 - DNA, 15 bp, Homo sapiens
ttttcctgacaaatt

SEQ ID NO: 107833 - DNA, 15 bp, Homo sapiens
gttttcctgacaaat

SEQ ID NO: 107834 - DNA, 15 bp, Homo sapiens
tgttttcctgacaaa

SEQ ID NO: 107835 - DNA, 15 bp, Homo sapiens
ctgttttcctgacaa

SEQ ID NO: 107836 - DNA, 15 bp, Homo sapiens
tctgttttcctgaca

SEQ ID NO: 107837 - DNA, 15 bp, Homo sapiens
atctgttttcctgac

SEQ ID NO: 107838 - DNA, 15 bp, Homo sapiens
tatctgttttcctga

SEQ ID NO: 107839 - DNA, 15 bp, Homo sapiens
gtatctgttttcctg

SEQ ID NO: 107840 - DNA, 15 bp, Homo sapiens
agtatctgttttcct

SEQ ID NO: 107841 - DNA, 15 bp, Homo sapiens
cagtatctgttttcc

SEQ ID NO: 107842 - DNA, 15 bp, Homo sapiens
tcagtatctgttttc

SEQ ID NO: 107843 - DNA, 15 bp, Homo sapiens
ctcagtatctgtttt

SEQ ID NO: 107844 - DNA, 15 bp, Homo sapiens
tctcagtatctgttt

SEQ ID NO: 107845 - DNA, 15 bp, Homo sapiens
ttctcagtatctgtt

SEQ ID NO: 107846 - DNA, 15 bp, Homo sapiens
attctcagtatctgt

SEQ ID NO: 107847 - DNA, 15 bp, Homo sapiens
cattctcagtatctg

SEQ ID NO: 107848 - DNA, 15 bp, Homo sapiens
acattctcagtatct

SEQ ID NO: 107849 - DNA, 15 bp, Homo sapiens
tacattctcagtatc

SEQ ID NO: 107850 - DNA, 15 bp, Homo sapiens
atacattctcagtat

SEQ ID NO: 107851 - DNA, 15 bp, Homo sapiens
tatacattctcagta

SEQ ID NO: 107852 - DNA, 15 bp, Homo sapiens
ttatacattctcagt

SEQ ID NO: 107853 - DNA, 15 bp, Homo sapiens
attatacattctcag

SEQ ID NO: 107854 - DNA, 15 bp, Homo sapiens
cattatacattctca

SEQ ID NO: 107855 - DNA, 15 bp, Homo sapiens
tcattatacattctc

SEQ ID NO: 107856 - DNA, 15 bp, Homo sapiens
ttcattatacattct

SEQ ID NO: 107857 - DNA, 15 bp, Homo sapiens
cttcattatacattc

SEQ ID NO: 107858 - DNA, 15 bp, Homo sapiens
gcttcattatacatt

SEQ ID NO: 107859 - DNA, 15 bp, Homo sapiens
tgcttcattatacat

SEQ ID NO: 107860 - DNA, 15 bp, Homo sapiens
ctgcttcattataca

SEQ ID NO: 107861 - DNA, 15 bp, Homo sapiens
tctgcttcattatac

SEQ ID NO: 107862 - DNA, 15 bp, Homo sapiens
ttctgcttcattata

SEQ ID NO: 107863 - DNA, 15 bp, Homo sapiens
attctgcttcattat

SEQ ID NO: 107864 - DNA, 15 bp, Homo sapiens
aattctgcttcatta

SEQ ID NO: 107865 - DNA, 15 bp, Homo sapiens
aaattctgcttcatt

SEQ ID NO: 107866 - DNA, 15 bp, Homo sapiens
aaaattctgcttcat

SEQ ID NO: 107867 - DNA, 15 bp, Homo sapiens
gaaaattctgcttca

SEQ ID NO: 107868 - DNA, 15 bp, Homo sapiens
tgaaaattctgcttc

SEQ ID NO: 107869 - DNA, 15 bp, Homo sapiens
ttgaaaattctgctt

SEQ ID NO: 107870 - DNA, 15 bp, Homo sapiens
cttgaaaattctgct

SEQ ID NO: 107871 - DNA, 15 bp, Homo sapiens
gcttgaaaattctgc

SEQ ID NO: 107872 - DNA, 15 bp, Homo sapiens
agcttgaaaattctg

SEQ ID NO: 107873 - DNA, 15 bp, Homo sapiens
cagcttgaaaattct

SEQ ID NO: 107874 - DNA, 15 bp, Homo sapiens
gcagcttgaaaattc

SEQ ID NO: 107875 - DNA, 15 bp, Homo sapiens
ggcagcttgaaaatt

SEQ ID NO: 107876 - DNA, 15 bp, Homo sapiens
aggcagcttgaaaat

SEQ ID NO: 107877 - DNA, 15 bp, Homo sapiens
caggcagcttgaaaa

SEQ ID NO: 107878 - DNA, 15 bp, Homo sapiens
acaggcagcttgaaa

SEQ ID NO: 107879 - DNA, 15 bp, Homo sapiens
gacaggcagcttgaa

SEQ ID NO: 107880 - DNA, 15 bp, Homo sapiens
agacaggcagcttga

SEQ ID NO: 107881 - DNA, 15 bp, Homo sapiens
tagacaggcagcttg

SEQ ID NO: 107882 - DNA, 15 bp, Homo sapiens
gtagacaggcagctt

SEQ ID NO: 107883 - DNA, 15 bp, Homo sapiens
tgtagacaggcagct

SEQ ID NO: 107884 - DNA, 15 bp, Homo sapiens
gtgtagacaggcagc

SEQ ID NO: 107885 - DNA, 15 bp, Homo sapiens
agtgtagacaggcag

SEQ ID NO: 107886 - DNA, 15 bp, Homo sapiens
aagtgtagacaggca

SEQ ID NO: 107887 - DNA, 15 bp, Homo sapiens
aaagtgtagacaggc

SEQ ID NO: 107888 - DNA, 15 bp, Homo sapiens
aaaagtgtagacagg

SEQ ID NO: 107889 - DNA, 15 bp, Homo sapiens
aaaaagtgtagacag

SEQ ID NO: 107890 - DNA, 15 bp, Homo sapiens
taaaaagtgtagaca

SEQ ID NO: 107891 - DNA, 15 bp, Homo sapiens
ttaaaaagtgtagac

SEQ ID NO: 107892 - DNA, 15 bp, Homo sapiens
tttaaaaagtgtaga

SEQ ID NO: 107893 - DNA, 15 bp, Homo sapiens
ttttaaaaagtgtag

SEQ ID NO: 107894 - DNA, 15 bp, Homo sapiens
tttttaaaaagtgta

SEQ ID NO: 107895 - DNA, 15 bp, Homo sapiens
ttttttaaaaagtgt

SEQ ID NO: 107896 - DNA, 15 bp, Homo sapiens
cttttttaaaaagtg

SEQ ID NO: 107897 - DNA, 15 bp, Homo sapiens
tcttttttaaaaagt

SEQ ID NO: 107898 - DNA, 15 bp, Homo sapiens
ttcttttttaaaaag

SEQ ID NO: 107899 - DNA, 15 bp, Homo sapiens
tttcttttttaaaaa

SEQ ID NO: 107900 - DNA, 15 bp, Homo sapiens
atttcttttttaaaa

SEQ ID NO: 107901 - DNA, 15 bp, Homo sapiens
catttcttttttaaa

SEQ ID NO: 107902 - DNA, 15 bp, Homo sapiens
gcatttcttttttaa

SEQ ID NO: 107903 - DNA, 15 bp, Homo sapiens
tgcatttctttttta

SEQ ID NO: 107904 - DNA, 15 bp, Homo sapiens
atgcatttctttttt

SEQ ID NO: 107905 - DNA, 15 bp, Homo sapiens
tatgcatttcttttt

SEQ ID NO: 107906 - DNA, 15 bp, Homo sapiens
ttatgcatttctttt

SEQ ID NO: 107907 - DNA, 15 bp, Homo sapiens
cttatgcatttcttt

SEQ ID NO: 107908 - DNA, 15 bp, Homo sapiens
tcttatgcatttctt

SEQ ID NO: 107909 - DNA, 15 bp, Homo sapiens
ctcttatgcatttct

SEQ ID NO: 107910 - DNA, 15 bp, Homo sapiens
tctcttatgcatttc

SEQ ID NO: 107911 - DNA, 15 bp, Homo sapiens
ttctcttatgcattt

SEQ ID NO: 107912 - DNA, 15 bp, Homo sapiens
cttctcttatgcatt

SEQ ID NO: 107913 - DNA, 15 bp, Homo sapiens
acttctcttatgcat

SEQ ID NO: 107914 - DNA, 15 bp, Homo sapiens
tacttctcttatgca

SEQ ID NO: 107915 - DNA, 15 bp, Homo sapiens
gtacttctcttatgc

SEQ ID NO: 107916 - DNA, 15 bp, Homo sapiens
agtacttctcttatg

SEQ ID NO: 107917 - DNA, 15 bp, Homo sapiens
aagtacttctcttat

SEQ ID NO: 107918 - DNA, 15 bp, Homo sapiens
aaagtacttctctta

SEQ ID NO: 107919 - DNA, 15 bp, Homo sapiens
gaaagtacttctctt

SEQ ID NO: 107920 - DNA, 15 bp, Homo sapiens
agaaagtacttctct

SEQ ID NO: 107921 - DNA, 15 bp, Homo sapiens
cagaaagtacttctc

SEQ ID NO: 107922 - DNA, 15 bp, Homo sapiens
tcagaaagtacttct

SEQ ID NO: 107923 - DNA, 15 bp, Homo sapiens
atcagaaagtacttc

SEQ ID NO: 107924 - DNA, 15 bp, Homo sapiens
tatcagaaagtactt

SEQ ID NO: 107925 - DNA, 15 bp, Homo sapiens
atatcagaaagtact

SEQ ID NO: 107926 - DNA, 15 bp, Homo sapiens
gatatcagaaagtac

SEQ ID NO: 107927 - DNA, 15 bp, Homo sapiens
ggatatcagaaagta

SEQ ID NO: 107928 - DNA, 15 bp, Homo sapiens
aggatatcagaaagt

SEQ ID NO: 107929 - DNA, 15 bp, Homo sapiens
taggatatcagaaag

SEQ ID NO: 107930 - DNA, 15 bp, Homo sapiens
gtaggatatcagaaa

SEQ ID NO: 107931 - DNA, 15 bp, Homo sapiens
tgtaggatatcagaa

SEQ ID NO: 107932 - DNA, 15 bp, Homo sapiens
atgtaggatatcaga

SEQ ID NO: 107933 - DNA, 15 bp, Homo sapiens
aatgtaggatatcag

SEQ ID NO: 107934 - DNA, 15 bp, Homo sapiens
aaatgtaggatatca

SEQ ID NO: 107935 - DNA, 15 bp, Homo sapiens
gaaatgtaggatatc

SEQ ID NO: 107936 - DNA, 15 bp, Homo sapiens
ggaaatgtaggatat

SEQ ID NO: 107937 - DNA, 15 bp, Homo sapiens
aggaaatgtaggata

SEQ ID NO: 107938 - DNA, 15 bp, Homo sapiens
aaggaaatgtaggat

SEQ ID NO: 107939 - DNA, 15 bp, Homo sapiens
gaaggaaatgtagga

SEQ ID NO: 107940 - DNA, 15 bp, Homo sapiens
agaaggaaatgtagg

SEQ ID NO: 107941 - DNA, 15 bp, Homo sapiens
gagaaggaaatgtag

SEQ ID NO: 107942 - DNA, 15 bp, Homo sapiens
ggagaaggaaatgta

SEQ ID NO: 107943 - DNA, 15 bp, Homo sapiens
aggagaaggaaatgt

SEQ ID NO: 107944 - DNA, 15 bp, Homo sapiens
aaggagaaggaaatg

SEQ ID NO: 107945 - DNA, 15 bp, Homo sapiens
aaaggagaaggaaat

SEQ ID NO: 107946 - DNA, 15 bp, Homo sapiens
aaaaggagaaggaaa

SEQ ID NO: 107947 - DNA, 15 bp, Homo sapiens
gaaaaggagaaggaa

SEQ ID NO: 107948 - DNA, 15 bp, Homo sapiens
tgaaaaggagaagga

SEQ ID NO: 107949 - DNA, 15 bp, Homo sapiens
ttgaaaaggagaagg

SEQ ID NO: 107950 - DNA, 15 bp, Homo sapiens
attgaaaaggagaag

SEQ ID NO: 107951 - DNA, 15 bp, Homo sapiens
aattgaaaaggagaa

SEQ ID NO: 107952 - DNA, 15 bp, Homo sapiens
aaattgaaaaggaga

SEQ ID NO: 107953 - DNA, 15 bp, Homo sapiens
aaaattgaaaaggag

SEQ ID NO: 107954 - DNA, 15 bp, Homo sapiens
caaaattgaaaagga

SEQ ID NO: 107955 - DNA, 15 bp, Homo sapiens
tcaaaattgaaaagg

SEQ ID NO: 107956 - DNA, 15 bp, Homo sapiens
ctcaaaattgaaaag

SEQ ID NO: 107957 - DNA, 15 bp, Homo sapiens
tctcaaaattgaaaa

SEQ ID NO: 107958 - DNA, 15 bp, Homo sapiens
ctctcaaaattgaaa

SEQ ID NO: 107959 - DNA, 15 bp, Homo sapiens
cctctcaaaattgaa

SEQ ID NO: 107960 - DNA, 15 bp, Homo sapiens
tcctctcaaaattga

SEQ ID NO: 107961 - DNA, 15 bp, Homo sapiens
ttcctctcaaaattg

SEQ ID NO: 107962 - DNA, 15 bp, Homo sapiens
tttcctctcaaaatt

SEQ ID NO: 107963 - DNA, 15 bp, Homo sapiens
atttcctctcaaaat

SEQ ID NO: 107964 - DNA, 15 bp, Homo sapiens
tatttcctctcaaaa

SEQ ID NO: 107965 - DNA, 15 bp, Homo sapiens
ttatttcctctcaaa

SEQ ID NO: 107966 - DNA, 15 bp, Homo sapiens
gttatttcctctcaa

SEQ ID NO: 107967 - DNA, 15 bp, Homo sapiens
agttatttcctctca

SEQ ID NO: 107968 - DNA, 15 bp, Homo sapiens
aagttatttcctctc

SEQ ID NO: 107969 - DNA, 15 bp, Homo sapiens
aaagttatttcctct

SEQ ID NO: 107970 - DNA, 15 bp, Homo sapiens
aaaagttatttcctc

SEQ ID NO: 107971 - DNA, 15 bp, Homo sapiens
aaaaagttatttcct

SEQ ID NO: 107972 - DNA, 15 bp, Homo sapiens
gaaaaagttatttcc

SEQ ID NO: 107973 - DNA, 15 bp, Homo sapiens
ggaaaaagttatttc

SEQ ID NO: 107974 - DNA, 15 bp, Homo sapiens
aggaaaaagttattt

SEQ ID NO: 107975 - DNA, 15 bp, Homo sapiens
aaggaaaaagttatt

SEQ ID NO: 107976 - DNA, 15 bp, Homo sapiens
aaaggaaaaagttat

SEQ ID NO: 107977 - DNA, 15 bp, Homo sapiens
caaaggaaaaagtta

SEQ ID NO: 107978 - DNA, 15 bp, Homo sapiens
acaaaggaaaaagtt

SEQ ID NO: 107979 - DNA, 15 bp, Homo sapiens
tacaaaggaaaaagt

SEQ ID NO: 107980 - DNA, 15 bp, Homo sapiens
atacaaaggaaaaag

SEQ ID NO: 107981 - DNA, 15 bp, Homo sapiens
tatacaaaggaaaaa

SEQ ID NO: 107982 - DNA, 15 bp, Homo sapiens
ttatacaaaggaaaa

SEQ ID NO: 107983 - DNA, 15 bp, Homo sapiens
attatacaaaggaaa

SEQ ID NO: 107984 - DNA, 15 bp, Homo sapiens
aattatacaaaggaa

SEQ ID NO: 107985 - DNA, 15 bp, Homo sapiens
aaattatacaaagga

SEQ ID NO: 107986 - DNA, 15 bp, Homo sapiens
aaaattatacaaagg

SEQ ID NO: 107987 - DNA, 15 bp, Homo sapiens
gaaaattatacaaag

SEQ ID NO: 107988 - DNA, 15 bp, Homo sapiens
agaaaattatacaaa

SEQ ID NO: 107989 - DNA, 15 bp, Homo sapiens
gagaaaattatacaa

SEQ ID NO: 107990 - DNA, 15 bp, Homo sapiens
ggagaaaattataca

SEQ ID NO: 107991 - DNA, 15 bp, Homo sapiens
cggagaaaattatac

SEQ ID NO: 107992 - DNA, 15 bp, Homo sapiens
ccggagaaaattata

SEQ ID NO: 107993 - DNA, 15 bp, Homo sapiens
accggagaaaattat

SEQ ID NO: 107994 - DNA, 15 bp, Homo sapiens
taccggagaaaatta

SEQ ID NO: 107995 - DNA, 15 bp, Homo sapiens
ctaccggagaaaatt

SEQ ID NO: 107996 - DNA, 15 bp, Homo sapiens
cctaccggagaaaat

SEQ ID NO: 107997 - DNA, 15 bp, Homo sapiens
tcctaccggagaaaa

SEQ ID NO: 107998 - DNA, 15 bp, Homo sapiens
atcctaccggagaaa

SEQ ID NO: 107999 - DNA, 15 bp, Homo sapiens
aatcctaccggagaa

SEQ ID NO: 108000 - DNA, 15 bp, Homo sapiens
gaatcctaccggaga

SEQ ID NO: 108001 - DNA, 15 bp, Homo sapiens
agaatcctaccggag

SEQ ID NO: 108002 - DNA, 15 bp, Homo sapiens
tagaatcctaccgga

SEQ ID NO: 108003 - DNA, 15 bp, Homo sapiens
atagaatcctaccgg

SEQ ID NO: 108004 - DNA, 15 bp, Homo sapiens
aatagaatcctaccg

SEQ ID NO: 108005 - DNA, 15 bp, Homo sapiens
aaatagaatcctacc

SEQ ID NO: 108006 - DNA, 15 bp, Homo sapiens
gaaatagaatcctac

SEQ ID NO: 108007 - DNA, 15 bp, Homo sapiens
agaaatagaatccta

SEQ ID NO: 108008 - DNA, 15 bp, Homo sapiens
tagaaatagaatcct

SEQ ID NO: 108009 - DNA, 15 bp, Homo sapiens
ctagaaatagaatcc

SEQ ID NO: 108010 - DNA, 15 bp, Homo sapiens
actagaaatagaatc

SEQ ID NO: 108011 - DNA, 15 bp, Homo sapiens
aactagaaatagaat

SEQ ID NO: 108012 - DNA, 15 bp, Homo sapiens
caactagaaatagaa

SEQ ID NO: 108013 - DNA, 15 bp, Homo sapiens
tcaactagaaataga

SEQ ID NO: 108014 - DNA, 15 bp, Homo sapiens
gtcaactagaaatag

SEQ ID NO: 108015 - DNA, 15 bp, Homo sapiens
ggtcaactagaaata

SEQ ID NO: 108016 - DNA, 15 bp, Homo sapiens
gggtcaactagaaat

SEQ ID NO: 108017 - DNA, 15 bp, Homo sapiens
tgggtcaactagaaa

SEQ ID NO: 108018 - DNA, 15 bp, Homo sapiens
ttgggtcaactagaa

SEQ ID NO: 108019 - DNA, 15 bp, Homo sapiens
tttgggtcaactaga

SEQ ID NO: 108020 - DNA, 15 bp, Homo sapiens
ctttgggtcaactag

SEQ ID NO: 108021 - DNA, 15 bp, Homo sapiens
actttgggtcaacta

SEQ ID NO: 108022 - DNA, 15 bp, Homo sapiens
gactttgggtcaact

SEQ ID NO: 108023 - DNA, 15 bp, Homo sapiens
tgactttgggtcaac

SEQ ID NO: 108024 - DNA, 15 bp, Homo sapiens
atgactttgggtcaa

SEQ ID NO: 108025 - DNA, 15 bp, Homo sapiens
catgactttgggtca

SEQ ID NO: 108026 - DNA, 15 bp, Homo sapiens
acatgactttgggtc

SEQ ID NO: 108027 - DNA, 15 bp, Homo sapiens
gacatgactttgggt

SEQ ID NO: 108028 - DNA, 15 bp, Homo sapiens
agacatgactttggg

SEQ ID NO: 108029 - DNA, 15 bp, Homo sapiens
cagacatgactttgg

SEQ ID NO: 108030 - DNA, 15 bp, Homo sapiens
tcagacatgactttg

SEQ ID NO: 108031 - DNA, 15 bp, Homo sapiens
ctcagacatgacttt

SEQ ID NO: 108032 - DNA, 15 bp, Homo sapiens
gctcagacatgactt

SEQ ID NO: 108033 - DNA, 15 bp, Homo sapiens
ggctcagacatgact

SEQ ID NO: 108034 - DNA, 15 bp, Homo sapiens
aggctcagacatgac

SEQ ID NO: 108035 - DNA, 15 bp, Homo sapiens
aaggctcagacatga

SEQ ID NO: 108036 - DNA, 15 bp, Homo sapiens
aaaggctcagacatg

SEQ ID NO: 108037 - DNA, 15 bp, Homo sapiens
taaaggctcagacat

SEQ ID NO: 108038 - DNA, 15 bp, Homo sapiens
ttaaaggctcagaca

SEQ ID NO: 108039 - DNA, 15 bp, Homo sapiens
cttaaaggctcagac

SEQ ID NO: 108040 - DNA, 15 bp, Homo sapiens
ccttaaaggctcaga

SEQ ID NO: 108041 - DNA, 15 bp, Homo sapiens
tccttaaaggctcag

SEQ ID NO: 108042 - DNA, 15 bp, Homo sapiens
ttccttaaaggctca

SEQ ID NO: 108043 - DNA, 15 bp, Homo sapiens
tttccttaaaggctc

SEQ ID NO: 108044 - DNA, 15 bp, Homo sapiens
ttttccttaaaggct

SEQ ID NO: 108045 - DNA, 15 bp, Homo sapiens
tttttccttaaaggc

SEQ ID NO: 108046 - DNA, 15 bp, Homo sapiens
ttttttccttaaagg

SEQ ID NO: 108047 - DNA, 15 bp, Homo sapiens
tttttttccttaaag

SEQ ID NO: 108048 - DNA, 15 bp, Homo sapiens
ctttttttccttaaa

SEQ ID NO: 108049 - DNA, 15 bp, Homo sapiens
tctttttttccttaa

SEQ ID NO: 108050 - DNA, 15 bp, Homo sapiens
ttctttttttcctta

SEQ ID NO: 108051 - DNA, 15 bp, Homo sapiens
tttctttttttcctt

SEQ ID NO: 108052 - DNA, 15 bp, Homo sapiens
ttttctttttttcct

SEQ ID NO: 108053 - DNA, 15 bp, Homo sapiens
gttttctttttttcc

SEQ ID NO: 108054 - DNA, 15 bp, Homo sapiens
ggttttctttttttc

SEQ ID NO: 108055 - DNA, 15 bp, Homo sapiens
gggttttcttttttt

SEQ ID NO: 108056 - DNA, 15 bp, Homo sapiens
agggttttctttttt

SEQ ID NO: 108057 - DNA, 15 bp, Homo sapiens
gagggttttcttttt

SEQ ID NO: 108058 - DNA, 15 bp, Homo sapiens
tgagggttttctttt

SEQ ID NO: 108059 - DNA, 15 bp, Homo sapiens
ttgagggttttcttt

SEQ ID NO: 108060 - DNA, 15 bp, Homo sapiens
cttgagggttttctt

SEQ ID NO: 108061 - DNA, 15 bp, Homo sapiens
ccttgagggttttct

SEQ ID NO: 108062 - DNA, 15 bp, Homo sapiens
tccttgagggttttc

SEQ ID NO: 108063 - DNA, 15 bp, Homo sapiens
ctccttgagggtttt

SEQ ID NO: 108064 - DNA, 15 bp, Homo sapiens
tctccttgagggttt

SEQ ID NO: 108065 - DNA, 15 bp, Homo sapiens
atctccttgagggtt

SEQ ID NO: 108066 - DNA, 15 bp, Homo sapiens
catctccttgagggt

SEQ ID NO: 108067 - DNA, 15 bp, Homo sapiens
ccatctccttgaggg

SEQ ID NO: 108068 - DNA, 15 bp, Homo sapiens
accatctccttgagg

SEQ ID NO: 108069 - DNA, 15 bp, Homo sapiens
aaccatctccttgag

SEQ ID NO: 108070 - DNA, 15 bp, Homo sapiens
aaaccatctccttga

SEQ ID NO: 108071 - DNA, 15 bp, Homo sapiens
aaaaccatctccttg

SEQ ID NO: 108072 - DNA, 15 bp, Homo sapiens
taaaaccatctcctt

SEQ ID NO: 108073 - DNA, 15 bp, Homo sapiens
ataaaaccatctcct

SEQ ID NO: 108074 - DNA, 15 bp, Homo sapiens
aataaaaccatctcc

SEQ ID NO: 108075 - DNA, 15 bp, Homo sapiens
gaataaaaccatctc

SEQ ID NO: 108076 - DNA, 15 bp, Homo sapiens
agaataaaaccatct

SEQ ID NO: 108077 - DNA, 15 bp, Homo sapiens
aagaataaaaccatc

SEQ ID NO: 108078 - DNA, 15 bp, Homo sapiens
gaagaataaaaccat

SEQ ID NO: 108079 - DNA, 15 bp, Homo sapiens
ggaagaataaaacca

SEQ ID NO: 108080 - DNA, 15 bp, Homo sapiens
aggaagaataaaacc

SEQ ID NO: 108081 - DNA, 15 bp, Homo sapiens
taggaagaataaaac

SEQ ID NO: 108082 - DNA, 15 bp, Homo sapiens
ttaggaagaataaaa

SEQ ID NO: 108083 - DNA, 15 bp, Homo sapiens
tttaggaagaataaa

SEQ ID NO: 108084 - DNA, 15 bp, Homo sapiens
atttaggaagaataa

SEQ ID NO: 108085 - DNA, 15 bp, Homo sapiens
tatttaggaagaata

SEQ ID NO: 108086 - DNA, 15 bp, Homo sapiens
atatttaggaagaat

SEQ ID NO: 108087 - DNA, 15 bp, Homo sapiens
gatatttaggaagaa

SEQ ID NO: 108088 - DNA, 15 bp, Homo sapiens
ggatatttaggaaga

SEQ ID NO: 108089 - DNA, 15 bp, Homo sapiens
tggatatttaggaag

SEQ ID NO: 108090 - DNA, 15 bp, Homo sapiens
ctggatatttaggaa

SEQ ID NO: 108091 - DNA, 15 bp, Homo sapiens
cctggatatttagga

SEQ ID NO: 108092 - DNA, 15 bp, Homo sapiens
acctggatatttagg

SEQ ID NO: 108093 - DNA, 15 bp, Homo sapiens
tacctggatatttag

SEQ ID NO: 108094 - DNA, 15 bp, Homo sapiens
ttacctggatattta

SEQ ID NO: 108095 - DNA, 15 bp, Homo sapiens
tttacctggatattt

SEQ ID NO: 108096 - DNA, 15 bp, Homo sapiens
atttacctggatatt

SEQ ID NO: 108097 - DNA, 15 bp, Homo sapiens
catttacctggatat

SEQ ID NO: 108098 - DNA, 15 bp, Homo sapiens
gcatttacctggata

SEQ ID NO: 108099 - DNA, 15 bp, Homo sapiens
agcatttacctggat

SEQ ID NO: 108100 - DNA, 15 bp, Homo sapiens
aagcatttacctgga

SEQ ID NO: 108101 - DNA, 15 bp, Homo sapiens
taagcatttacctgg

SEQ ID NO: 108102 - DNA, 15 bp, Homo sapiens
ttaagcatttacctg

SEQ ID NO: 108103 - DNA, 15 bp, Homo sapiens
tttaagcatttacct

SEQ ID NO: 108104 - DNA, 15 bp, Homo sapiens
ttttaagcatttacc

SEQ ID NO: 108105 - DNA, 15 bp, Homo sapiens
tttttaagcatttac

SEQ ID NO: 108106 - DNA, 15 bp, Homo sapiens
gtttttaagcattta

SEQ ID NO: 108107 - DNA, 15 bp, Homo sapiens
ggtttttaagcattt

SEQ ID NO: 108108 - DNA, 15 bp, Homo sapiens
tggtttttaagcatt

SEQ ID NO: 108109 - DNA, 15 bp, Homo sapiens
atggtttttaagcat

SEQ ID NO: 108110 - DNA, 15 bp, Homo sapiens
aatggtttttaagca

SEQ ID NO: 108111 - DNA, 15 bp, Homo sapiens
gaatggtttttaagc

SEQ ID NO: 108112 - DNA, 15 bp, Homo sapiens
agaatggtttttaag

SEQ ID NO: 108113 - DNA, 15 bp, Homo sapiens
tagaatggtttttaa

SEQ ID NO: 108114 - DNA, 15 bp, Homo sapiens
gtagaatggttttta

SEQ ID NO: 108115 - DNA, 15 bp, Homo sapiens
ggtagaatggttttt

SEQ ID NO: 108116 - DNA, 15 bp, Homo sapiens
aggtagaatggtttt

SEQ ID NO: 108117 - DNA, 15 bp, Homo sapiens
aaggtagaatggttt

SEQ ID NO: 108118 - DNA, 15 bp, Homo sapiens
gaaggtagaatggtt

SEQ ID NO: 108119 - DNA, 15 bp, Homo sapiens
agaaggtagaatggt

SEQ ID NO: 108120 - DNA, 15 bp, Homo sapiens
cagaaggtagaatgg

SEQ ID NO: 108121 - DNA, 15 bp, Homo sapiens
ccagaaggtagaatg

SEQ ID NO: 108122 - DNA, 15 bp, Homo sapiens
gccagaaggtagaat

SEQ ID NO: 108123 - DNA, 15 bp, Homo sapiens
ggccagaaggtagaa

SEQ ID NO: 108124 - DNA, 15 bp, Homo sapiens
tggccagaaggtaga

SEQ ID NO: 108125 - DNA, 15 bp, Homo sapiens
ctggccagaaggtag

SEQ ID NO: 108126 - DNA, 15 bp, Homo sapiens
tctggccagaaggta

SEQ ID NO: 108127 - DNA, 15 bp, Homo sapiens
ttctggccagaaggt

SEQ ID NO: 108128 - DNA, 15 bp, Homo sapiens
cttctggccagaagg

SEQ ID NO: 108129 - DNA, 15 bp, Homo sapiens
acttctggccagaag

SEQ ID NO: 108130 - DNA, 15 bp, Homo sapiens
tacttctggccagaa

SEQ ID NO: 108131 - DNA, 15 bp, Homo sapiens
atacttctggccaga

SEQ ID NO: 108132 - DNA, 15 bp, Homo sapiens
tatacttctggccag

SEQ ID NO: 108133 - DNA, 15 bp, Homo sapiens
ttatacttctggcca

SEQ ID NO: 108134 - DNA, 15 bp, Homo sapiens
cttatacttctggcc

SEQ ID NO: 108135 - DNA, 15 bp, Homo sapiens
tcttatacttctggc

SEQ ID NO: 108136 - DNA, 15 bp, Homo sapiens
atcttatacttctgg

SEQ ID NO: 108137 - DNA, 15 bp, Homo sapiens
catcttatacttctg

SEQ ID NO: 108138 - DNA, 15 bp, Homo sapiens
ccatcttatacttct

SEQ ID NO: 108139 - DNA, 15 bp, Homo sapiens
cccatcttatacttc

SEQ ID NO: 108140 - DNA, 15 bp, Homo sapiens
acccatcttatactt

SEQ ID NO: 108141 - DNA, 15 bp, Homo sapiens
cacccatcttatact

SEQ ID NO: 108142 - DNA, 15 bp, Homo sapiens
ccacccatcttatac

SEQ ID NO: 108143 - DNA, 15 bp, Homo sapiens
tccacccatcttata

SEQ ID NO: 108144 - DNA, 15 bp, Homo sapiens
ctccacccatcttat

SEQ ID NO: 108145 - DNA, 15 bp, Homo sapiens
tctccacccatctta

SEQ ID NO: 108146 - DNA, 15 bp, Homo sapiens
ctctccacccatctt

SEQ ID NO: 108147 - DNA, 15 bp, Homo sapiens
tctctccacccatct

SEQ ID NO: 108148 - DNA, 15 bp, Homo sapiens
ttctctccacccatc

SEQ ID NO: 108149 - DNA, 15 bp, Homo sapiens
tttctctccacccat

SEQ ID NO: 108150 - DNA, 15 bp, Homo sapiens
ctttctctccaccca

SEQ ID NO: 108151 - DNA, 15 bp, Homo sapiens
tctttctctccaccc

SEQ ID NO: 108152 - DNA, 15 bp, Homo sapiens
ttctttctctccacc

SEQ ID NO: 108153 - DNA, 15 bp, Homo sapiens
tttctttctctccac

SEQ ID NO: 108154 - DNA, 15 bp, Homo sapiens
gtttctttctctcca

SEQ ID NO: 108155 - DNA, 15 bp, Homo sapiens
agtttctttctctcc

SEQ ID NO: 108156 - DNA, 15 bp, Homo sapiens
tagtttctttctctc

SEQ ID NO: 108157 - DNA, 15 bp, Homo sapiens
ctagtttctttctct

SEQ ID NO: 108158 - DNA, 15 bp, Homo sapiens
tctagtttctttctc

SEQ ID NO: 108159 - DNA, 15 bp, Homo sapiens
ctctagtttctttct

SEQ ID NO: 108160 - DNA, 15 bp, Homo sapiens
cctctagtttctttc

SEQ ID NO: 108161 - DNA, 15 bp, Homo sapiens
tcctctagtttcttt

SEQ ID NO: 108162 - DNA, 15 bp, Homo sapiens
gtcctctagtttctt

SEQ ID NO: 108163 - DNA, 15 bp, Homo sapiens
tgtcctctagtttct

SEQ ID NO: 108164 - DNA, 15 bp, Homo sapiens
ttgtcctctagtttc

SEQ ID NO: 108165 - DNA, 15 bp, Homo sapiens
cttgtcctctagttt

SEQ ID NO: 108166 - DNA, 15 bp, Homo sapiens
ccttgtcctctagtt

SEQ ID NO: 108167 - DNA, 15 bp, Homo sapiens
accttgtcctctagt

SEQ ID NO: 108168 - DNA, 15 bp, Homo sapiens
taccttgtcctctag

SEQ ID NO: 108169 - DNA, 15 bp, Homo sapiens
ctaccttgtcctcta

SEQ ID NO: 108170 - DNA, 15 bp, Homo sapiens
tctaccttgtcctct

SEQ ID NO: 108171 - DNA, 15 bp, Homo sapiens
atctaccttgtcctc

SEQ ID NO: 108172 - DNA, 15 bp, Homo sapiens
aatctaccttgtcct

SEQ ID NO: 108173 - DNA, 15 bp, Homo sapiens
caatctaccttgtcc

SEQ ID NO: 108174 - DNA, 15 bp, Homo sapiens
ccaatctaccttgtc

SEQ ID NO: 108175 - DNA, 15 bp, Homo sapiens
tccaatctaccttgt

SEQ ID NO: 108176 - DNA, 15 bp, Homo sapiens
gtccaatctaccttg

SEQ ID NO: 108177 - DNA, 15 bp, Homo sapiens
tgtccaatctacctt

SEQ ID NO: 108178 - DNA, 15 bp, Homo sapiens
ttgtccaatctacct

SEQ ID NO: 108179 - DNA, 15 bp, Homo sapiens
cttgtccaatctacc

SEQ ID NO: 108180 - DNA, 15 bp, Homo sapiens
tcttgtccaatctac

SEQ ID NO: 108181 - DNA, 15 bp, Homo sapiens
ttcttgtccaatcta

SEQ ID NO: 108182 - DNA, 15 bp, Homo sapiens
tttcttgtccaatct

SEQ ID NO: 108183 - DNA, 15 bp, Homo sapiens
ttttcttgtccaatc

SEQ ID NO: 108184 - DNA, 15 bp, Homo sapiens
tttttcttgtccaat

SEQ ID NO: 108185 - DNA, 15 bp, Homo sapiens
ctttttcttgtccaa

SEQ ID NO: 108186 - DNA, 15 bp, Homo sapiens
cctttttcttgtcca

SEQ ID NO: 108187 - DNA, 15 bp, Homo sapiens
tcctttttcttgtcc

SEQ ID NO: 108188 - DNA, 15 bp, Homo sapiens
ttcctttttcttgtc

SEQ ID NO: 108189 - DNA, 15 bp, Homo sapiens
tttcctttttcttgt

SEQ ID NO: 108190 - DNA, 15 bp, Homo sapiens
ctttcctttttcttg

SEQ ID NO: 108191 - DNA, 15 bp, Homo sapiens
tctttcctttttctt

SEQ ID NO: 108192 - DNA, 15 bp, Homo sapiens
ttctttcctttttct

SEQ ID NO: 108193 - DNA, 15 bp, Homo sapiens
tttctttcctttttc

SEQ ID NO: 108194 - DNA, 15 bp, Homo sapiens
atttctttccttttt

SEQ ID NO: 108195 - DNA, 15 bp, Homo sapiens
tatttctttcctttt

SEQ ID NO: 108196 - DNA, 15 bp, Homo sapiens
gtatttctttccttt

SEQ ID NO: 108197 - DNA, 15 bp, Homo sapiens
tgtatttctttcctt

SEQ ID NO: 108198 - DNA, 15 bp, Homo sapiens
ttgtatttctttcct

SEQ ID NO: 108199 - DNA, 15 bp, Homo sapiens
tttgtatttctttcc

SEQ ID NO: 108200 - DNA, 15 bp, Homo sapiens
ctttgtatttctttc

SEQ ID NO: 108201 - DNA, 15 bp, Homo sapiens
actttgtatttcttt

SEQ ID NO: 108202 - DNA, 15 bp, Homo sapiens
aactttgtatttctt

SEQ ID NO: 108203 - DNA, 15 bp, Homo sapiens
taactttgtatttct

SEQ ID NO: 108204 - DNA, 15 bp, Homo sapiens
gtaactttgtatttc

SEQ ID NO: 108205 - DNA, 15 bp, Homo sapiens
agtaactttgtattt

SEQ ID NO: 108206 - DNA, 15 bp, Homo sapiens
tagtaactttgtatt

SEQ ID NO: 108207 - DNA, 15 bp, Homo sapiens
ttagtaactttgtat

SEQ ID NO: 108208 - DNA, 15 bp, Homo sapiens
tttagtaactttgta

SEQ ID NO: 108209 - DNA, 15 bp, Homo sapiens
ctttagtaactttgt

SEQ ID NO: 108210 - DNA, 15 bp, Homo sapiens
tctttagtaactttg

SEQ ID NO: 108211 - DNA, 15 bp, Homo sapiens
ttctttagtaacttt

SEQ ID NO: 108212 - DNA, 15 bp, Homo sapiens
attctttagtaactt

SEQ ID NO: 108213 - DNA, 15 bp, Homo sapiens
aattctttagtaact

SEQ ID NO: 108214 - DNA, 15 bp, Homo sapiens
taattctttagtaac

SEQ ID NO: 108215 - DNA, 15 bp, Homo sapiens
ataattctttagtaa

SEQ ID NO: 108216 - DNA, 15 bp, Homo sapiens
cataattctttagta

SEQ ID NO: 108217 - DNA, 15 bp, Homo sapiens
tcataattctttagt

SEQ ID NO: 108218 - DNA, 15 bp, Homo sapiens
ttcataattctttag

SEQ ID NO: 108219 - DNA, 15 bp, Homo sapiens
gttcataattcttta

SEQ ID NO: 108220 - DNA, 15 bp, Homo sapiens
tgttcataattcttt

SEQ ID NO: 108221 - DNA, 15 bp, Homo sapiens
ttgttcataattctt

SEQ ID NO: 108222 - DNA, 15 bp, Homo sapiens
gttgttcataattct

SEQ ID NO: 108223 - DNA, 15 bp, Homo sapiens
tgttgttcataattc

SEQ ID NO: 108224 - DNA, 15 bp, Homo sapiens
atgttgttcataatt

SEQ ID NO: 108225 - DNA, 15 bp, Homo sapiens
tatgttgttcataat

SEQ ID NO: 108226 - DNA, 15 bp, Homo sapiens
ctatgttgttcataa

SEQ ID NO: 108227 - DNA, 15 bp, Homo sapiens
tctatgttgttcata

SEQ ID NO: 108228 - DNA, 15 bp, Homo sapiens
ctctatgttgttcat

SEQ ID NO: 108229 - DNA, 15 bp, Homo sapiens
cctctatgttgttca

SEQ ID NO: 108230 - DNA, 15 bp, Homo sapiens
tcctctatgttgttc

SEQ ID NO: 108231 - DNA, 15 bp, Homo sapiens
ttcctctatgttgtt

SEQ ID NO: 108232 - DNA, 15 bp, Homo sapiens
cttcctctatgttgt

SEQ ID NO: 108233 - DNA, 15 bp, Homo sapiens
ccttcctctatgttg

SEQ ID NO: 108234 - DNA, 15 bp, Homo sapiens
cccttcctctatgtt

SEQ ID NO: 108235 - DNA, 15 bp, Homo sapiens
tcccttcctctatgt

SEQ ID NO: 108236 - DNA, 15 bp, Homo sapiens
ttcccttcctctatg

SEQ ID NO: 108237 - DNA, 15 bp, Homo sapiens
gttcccttcctctat

SEQ ID NO: 108238 - DNA, 15 bp, Homo sapiens
agttcccttcctcta

SEQ ID NO: 108239 - DNA, 15 bp, Homo sapiens
tagttcccttcctct

SEQ ID NO: 108240 - DNA, 15 bp, Homo sapiens
atagttcccttcctc

SEQ ID NO: 108241 - DNA, 15 bp, Homo sapiens
aatagttcccttcct

SEQ ID NO: 108242 - DNA, 15 bp, Homo sapiens
taatagttcccttcc

SEQ ID NO: 108243 - DNA, 15 bp, Homo sapiens
ttaatagttcccttc

SEQ ID NO: 108244 - DNA, 15 bp, Homo sapiens
attaatagttccctt

SEQ ID NO: 108245 - DNA, 15 bp, Homo sapiens
tattaatagttccct

SEQ ID NO: 108246 - DNA, 15 bp, Homo sapiens
ttattaatagttccc

SEQ ID NO: 108247 - DNA, 15 bp, Homo sapiens
cttattaatagttcc

SEQ ID NO: 108248 - DNA, 15 bp, Homo sapiens
tcttattaatagttc

SEQ ID NO: 108249 - DNA, 15 bp, Homo sapiens
gtcttattaatagtt

SEQ ID NO: 108250 - DNA, 15 bp, Homo sapiens
agtcttattaatagt

SEQ ID NO: 108251 - DNA, 15 bp, Homo sapiens
aagtcttattaatag

SEQ ID NO: 108252 - DNA, 15 bp, Homo sapiens
caagtcttattaata

SEQ ID NO: 108253 - DNA, 15 bp, Homo sapiens
tcaagtcttattaat

SEQ ID NO: 108254 - DNA, 15 bp, Homo sapiens
gtcaagtcttattaa

SEQ ID NO: 108255 - DNA, 15 bp, Homo sapiens
tgtcaagtcttatta

SEQ ID NO: 108256 - DNA, 15 bp, Homo sapiens
gtgtcaagtcttatt

SEQ ID NO: 108257 - DNA, 15 bp, Homo sapiens
agtgtcaagtcttat

SEQ ID NO: 108258 - DNA, 15 bp, Homo sapiens
cagtgtcaagtctta

SEQ ID NO: 108259 - DNA, 15 bp, Homo sapiens
tcagtgtcaagtctt

SEQ ID NO: 108260 - DNA, 15 bp, Homo sapiens
ctcagtgtcaagtct

SEQ ID NO: 108261 - DNA, 15 bp, Homo sapiens
tctcagtgtcaagtc

SEQ ID NO: 108262 - DNA, 15 bp, Homo sapiens
ttctcagtgtcaagt

SEQ ID NO: 108263 - DNA, 15 bp, Homo sapiens
cttctcagtgtcaag

SEQ ID NO: 108264 - DNA, 15 bp, Homo sapiens
acttctcagtgtcaa

SEQ ID NO: 108265 - DNA, 15 bp, Homo sapiens
gacttctcagtgtca

SEQ ID NO: 108266 - DNA, 15 bp, Homo sapiens
tgacttctcagtgtc

SEQ ID NO: 108267 - DNA, 15 bp, Homo sapiens
ttgacttctcagtgt

SEQ ID NO: 108268 - DNA, 15 bp, Homo sapiens
gttgacttctcagtg

SEQ ID NO: 108269 - DNA, 15 bp, Homo sapiens
agttgacttctcagt

SEQ ID NO: 108270 - DNA, 15 bp, Homo sapiens
cagttgacttctcag

SEQ ID NO: 108271 - DNA, 15 bp, Homo sapiens
acagttgacttctca

SEQ ID NO: 108272 - DNA, 15 bp, Homo sapiens
aacagttgacttctc

SEQ ID NO: 108273 - DNA, 15 bp, Homo sapiens
aaacagttgacttct

SEQ ID NO: 108274 - DNA, 15 bp, Homo sapiens
aaaacagttgacttc

SEQ ID NO: 108275 - DNA, 15 bp, Homo sapiens
taaaacagttgactt

SEQ ID NO: 108276 - DNA, 15 bp, Homo sapiens
gtaaaacagttgact

SEQ ID NO: 108277 - DNA, 15 bp, Homo sapiens
agtaaaacagttgac

SEQ ID NO: 108278 - DNA, 15 bp, Homo sapiens
aagtaaaacagttga

SEQ ID NO: 108279 - DNA, 15 bp, Homo sapiens
taagtaaaacagttg

SEQ ID NO: 108280 - DNA, 15 bp, Homo sapiens
ctaagtaaaacagtt

SEQ ID NO: 108281 - DNA, 15 bp, Homo sapiens
actaagtaaaacagt

SEQ ID NO: 108282 - DNA, 15 bp, Homo sapiens
cactaagtaaaacag

SEQ ID NO: 108283 - DNA, 15 bp, Homo sapiens
gcactaagtaaaaca

SEQ ID NO: 108284 - DNA, 15 bp, Homo sapiens
agcactaagtaaaac

SEQ ID NO: 108285 - DNA, 15 bp, Homo sapiens
cagcactaagtaaaa

SEQ ID NO: 108286 - DNA, 15 bp, Homo sapiens
tcagcactaagtaaa

SEQ ID NO: 108287 - DNA, 15 bp, Homo sapiens
ttcagcactaagtaa

SEQ ID NO: 108288 - DNA, 15 bp, Homo sapiens
tttcagcactaagta

SEQ ID NO: 108289 - DNA, 15 bp, Homo sapiens
ctttcagcactaagt

SEQ ID NO: 108290 - DNA, 15 bp, Homo sapiens
actttcagcactaag

SEQ ID NO: 108291 - DNA, 15 bp, Homo sapiens
aactttcagcactaa

SEQ ID NO: 108292 - DNA, 15 bp, Homo sapiens
taactttcagcacta

SEQ ID NO: 108293 - DNA, 15 bp, Homo sapiens
ttaactttcagcact

SEQ ID NO: 108294 - DNA, 15 bp, Homo sapiens
cttaactttcagcac

SEQ ID NO: 108295 - DNA, 15 bp, Homo sapiens
ccttaactttcagca

SEQ ID NO: 108296 - DNA, 15 bp, Homo sapiens
cccttaactttcagc

SEQ ID NO: 108297 - DNA, 15 bp, Homo sapiens
ccccttaactttcag

SEQ ID NO: 108298 - DNA, 15 bp, Homo sapiens
tccccttaactttca

SEQ ID NO: 108299 - DNA, 15 bp, Homo sapiens
ctccccttaactttc

SEQ ID NO: 108300 - DNA, 15 bp, Homo sapiens
actccccttaacttt

SEQ ID NO: 108301 - DNA, 15 bp, Homo sapiens
aactccccttaactt

SEQ ID NO: 108302 - DNA, 15 bp, Homo sapiens
aaactccccttaact

SEQ ID NO: 108303 - DNA, 15 bp, Homo sapiens
aaaactccccttaac

SEQ ID NO: 108304 - DNA, 15 bp, Homo sapiens
taaaactccccttaa

SEQ ID NO: 108305 - DNA, 15 bp, Homo sapiens
ttaaaactcccctta

SEQ ID NO: 108306 - DNA, 15 bp, Homo sapiens
cttaaaactcccctt

SEQ ID NO: 108307 - DNA, 15 bp, Homo sapiens
acttaaaactcccct

SEQ ID NO: 108308 - DNA, 15 bp, Homo sapiens
tacttaaaactcccc

SEQ ID NO: 108309 - DNA, 15 bp, Homo sapiens
gtacttaaaactccc

SEQ ID NO: 108310 - DNA, 15 bp, Homo sapiens
tgtacttaaaactcc

SEQ ID NO: 108311 - DNA, 15 bp, Homo sapiens
atgtacttaaaactc

SEQ ID NO: 108312 - DNA, 15 bp, Homo sapiens
aatgtacttaaaact

SEQ ID NO: 108313 - DNA, 15 bp, Homo sapiens
taatgtacttaaaac

SEQ ID NO: 108314 - DNA, 15 bp, Homo sapiens
ctaatgtacttaaaa

SEQ ID NO: 108315 - DNA, 15 bp, Homo sapiens
tctaatgtacttaaa

SEQ ID NO: 108316 - DNA, 15 bp, Homo sapiens
ttctaatgtacttaa

SEQ ID NO: 108317 - DNA, 15 bp, Homo sapiens
attctaatgtactta

SEQ ID NO: 108318 - DNA, 15 bp, Homo sapiens
gattctaatgtactt

SEQ ID NO: 108319 - DNA, 15 bp, Homo sapiens
ggattctaatgtact

SEQ ID NO: 108320 - DNA, 15 bp, Homo sapiens
tggattctaatgtac

SEQ ID NO: 108321 - DNA, 15 bp, Homo sapiens
ttggattctaatgta

SEQ ID NO: 108322 - DNA, 15 bp, Homo sapiens
tttggattctaatgt

SEQ ID NO: 108323 - DNA, 15 bp, Homo sapiens
gtttggattctaatg

SEQ ID NO: 108324 - DNA, 15 bp, Homo sapiens
tgtttggattctaat

SEQ ID NO: 108325 - DNA, 15 bp, Homo sapiens
ttgtttggattctaa

SEQ ID NO: 108326 - DNA, 15 bp, Homo sapiens
cttgtttggattcta

SEQ ID NO: 108327 - DNA, 15 bp, Homo sapiens
tcttgtttggattct

SEQ ID NO: 108328 - DNA, 15 bp, Homo sapiens
gtcttgtttggattc

SEQ ID NO: 108329 - DNA, 15 bp, Homo sapiens
agtcttgtttggatt

SEQ ID NO: 108330 - DNA, 15 bp, Homo sapiens
aagtcttgtttggat

SEQ ID NO: 108331 - DNA, 15 bp, Homo sapiens
aaagtcttgtttgga

SEQ ID NO: 108332 - DNA, 15 bp, Homo sapiens
aaaagtcttgtttgg

SEQ ID NO: 108333 - DNA, 15 bp, Homo sapiens
gaaaagtcttgtttg

SEQ ID NO: 108334 - DNA, 15 bp, Homo sapiens
tgaaaagtcttgttt

SEQ ID NO: 108335 - DNA, 15 bp, Homo sapiens
ttgaaaagtcttgtt

SEQ ID NO: 108336 - DNA, 15 bp, Homo sapiens
tttgaaaagtcttgt

SEQ ID NO: 108337 - DNA, 15 bp, Homo sapiens
atttgaaaagtcttg

SEQ ID NO: 108338 - DNA, 15 bp, Homo sapiens
gatttgaaaagtctt

SEQ ID NO: 108339 - DNA, 15 bp, Homo sapiens
agatttgaaaagtct

SEQ ID NO: 108340 - DNA, 15 bp, Homo sapiens
gagatttgaaaagtc

SEQ ID NO: 108341 - DNA, 15 bp, Homo sapiens
agagatttgaaaagt

SEQ ID NO: 108342 - DNA, 15 bp, Homo sapiens
aagagatttgaaaag

SEQ ID NO: 108343 - DNA, 15 bp, Homo sapiens
taagagatttgaaaa

SEQ ID NO: 108344 - DNA, 15 bp, Homo sapiens
ataagagatttgaaa

SEQ ID NO: 108345 - DNA, 15 bp, Homo sapiens
tataagagatttgaa

SEQ ID NO: 108346 - DNA, 15 bp, Homo sapiens
ttataagagatttga

SEQ ID NO: 108347 - DNA, 15 bp, Homo sapiens
attataagagatttg

SEQ ID NO: 108348 - DNA, 15 bp, Homo sapiens
gattataagagattt

SEQ ID NO: 108349 - DNA, 15 bp, Homo sapiens
agattataagagatt

SEQ ID NO: 108350 - DNA, 15 bp, Homo sapiens
tagattataagagat

SEQ ID NO: 108351 - DNA, 15 bp, Homo sapiens
ttagattataagaga

SEQ ID NO: 108352 - DNA, 15 bp, Homo sapiens
tttagattataagag

SEQ ID NO: 108353 - DNA, 15 bp, Homo sapiens
ttttagattataaga

SEQ ID NO: 108354 - DNA, 15 bp, Homo sapiens
attttagattataag

SEQ ID NO: 108355 - DNA, 15 bp, Homo sapiens
tattttagattataa

SEQ ID NO: 108356 - DNA, 15 bp, Homo sapiens
ttattttagattata

SEQ ID NO: 108357 - DNA, 15 bp, Homo sapiens
tttattttagattat

SEQ ID NO: 108358 - DNA, 15 bp, Homo sapiens
ttttattttagatta

SEQ ID NO: 108359 - DNA, 15 bp, Homo sapiens
attttattttagatt

SEQ ID NO: 108360 - DNA, 15 bp, Homo sapiens
tattttattttagat

SEQ ID NO: 108361 - DNA, 15 bp, Homo sapiens
gtattttattttaga

SEQ ID NO: 108362 - DNA, 15 bp, Homo sapiens
tgtattttattttag

SEQ ID NO: 108363 - DNA, 15 bp, Homo sapiens
ttgtattttatttta

SEQ ID NO: 108364 - DNA, 15 bp, Homo sapiens
tttgtattttatttt

SEQ ID NO: 108365 - DNA, 15 bp, Homo sapiens
ctttgtattttattt

SEQ ID NO: 108366 - DNA, 15 bp, Homo sapiens
actttgtattttatt

SEQ ID NO: 108367 - DNA, 15 bp, Homo sapiens
aactttgtattttat

SEQ ID NO: 108368 - DNA, 15 bp, Homo sapiens
caactttgtatttta

SEQ ID NO: 108369 - DNA, 15 bp, Homo sapiens
tcaactttgtatttt

SEQ ID NO: 108370 - DNA, 15 bp, Homo sapiens
ctcaactttgtattt

SEQ ID NO: 108371 - DNA, 15 bp, Homo sapiens
actcaactttgtatt

SEQ ID NO: 108372 - DNA, 15 bp, Homo sapiens
aactcaactttgtat

SEQ ID NO: 108373 - DNA, 15 bp, Homo sapiens
aaactcaactttgta

SEQ ID NO: 108374 - DNA, 15 bp, Homo sapiens
taaactcaactttgt

SEQ ID NO: 108375 - DNA, 15 bp, Homo sapiens
ataaactcaactttg

SEQ ID NO: 108376 - DNA, 15 bp, Homo sapiens
cataaactcaacttt

SEQ ID NO: 108377 - DNA, 15 bp, Homo sapiens
ccataaactcaactt

SEQ ID NO: 108378 - DNA, 15 bp, Homo sapiens
cccataaactcaact

SEQ ID NO: 108379 - DNA, 15 bp, Homo sapiens
tcccataaactcaac

SEQ ID NO: 108380 - DNA, 15 bp, Homo sapiens
ctcccataaactcaa

SEQ ID NO: 108381 - DNA, 15 bp, Homo sapiens
tctcccataaactca

SEQ ID NO: 108382 - DNA, 15 bp, Homo sapiens
gtctcccataaactc

SEQ ID NO: 108383 - DNA, 15 bp, Homo sapiens
tgtctcccataaact

SEQ ID NO: 108384 - DNA, 15 bp, Homo sapiens
atgtctcccataaac

SEQ ID NO: 108385 - DNA, 15 bp, Homo sapiens
tatgtctcccataaa

SEQ ID NO: 108386 - DNA, 15 bp, Homo sapiens
ttatgtctcccataa

SEQ ID NO: 108387 - DNA, 15 bp, Homo sapiens
tttatgtctcccata

SEQ ID NO: 108388 - DNA, 15 bp, Homo sapiens
ttttatgtctcccat

SEQ ID NO: 108389 - DNA, 15 bp, Homo sapiens
attttatgtctccca

SEQ ID NO: 108390 - DNA, 15 bp, Homo sapiens
cattttatgtctccc

SEQ ID NO: 108391 - DNA, 15 bp, Homo sapiens
tcattttatgtctcc

SEQ ID NO: 108392 - DNA, 15 bp, Homo sapiens
ttcattttatgtctc

SEQ ID NO: 108393 - DNA, 15 bp, Homo sapiens
tttcattttatgtct

SEQ ID NO: 108394 - DNA, 15 bp, Homo sapiens
atttcattttatgtc

SEQ ID NO: 108395 - DNA, 15 bp, Homo sapiens
aatttcattttatgt

SEQ ID NO: 108396 - DNA, 15 bp, Homo sapiens
aaatttcattttatg

SEQ ID NO: 108397 - DNA, 15 bp, Homo sapiens
taaatttcattttat

SEQ ID NO: 108398 - DNA, 15 bp, Homo sapiens
ttaaatttcatttta

SEQ ID NO: 108399 - DNA, 15 bp, Homo sapiens
tttaaatttcatttt

SEQ ID NO: 108400 - DNA, 15 bp, Homo sapiens
atttaaatttcattt

SEQ ID NO: 108401 - DNA, 15 bp, Homo sapiens
aatttaaatttcatt

SEQ ID NO: 108402 - DNA, 15 bp, Homo sapiens
taatttaaatttcat

SEQ ID NO: 108403 - DNA, 15 bp, Homo sapiens
ctaatttaaatttca

SEQ ID NO: 108404 - DNA, 15 bp, Homo sapiens
actaatttaaatttc

SEQ ID NO: 108405 - DNA, 15 bp, Homo sapiens
aactaatttaaattt

SEQ ID NO: 108406 - DNA, 15 bp, Homo sapiens
aaactaatttaaatt

SEQ ID NO: 108407 - DNA, 15 bp, Homo sapiens
taaactaatttaaat

SEQ ID NO: 108408 - DNA, 15 bp, Homo sapiens
ataaactaatttaaa

SEQ ID NO: 108409 - DNA, 15 bp, Homo sapiens
cataaactaatttaa

SEQ ID NO: 108410 - DNA, 15 bp, Homo sapiens
gcataaactaattta

SEQ ID NO: 108411 - DNA, 15 bp, Homo sapiens
agcataaactaattt

SEQ ID NO: 108412 - DNA, 15 bp, Homo sapiens
aagcataaactaatt

SEQ ID NO: 108413 - DNA, 15 bp, Homo sapiens
aaagcataaactaat

SEQ ID NO: 108414 - DNA, 15 bp, Homo sapiens
aaaagcataaactaa

SEQ ID NO: 108415 - DNA, 15 bp, Homo sapiens
gaaaagcataaacta

SEQ ID NO: 108416 - DNA, 15 bp, Homo sapiens
cgaaaagcataaact

SEQ ID NO: 108417 - DNA, 15 bp, Homo sapiens
tcgaaaagcataaac

SEQ ID NO: 108418 - DNA, 15 bp, Homo sapiens
ttcgaaaagcataaa

SEQ ID NO: 108419 - DNA, 15 bp, Homo sapiens
attcgaaaagcataa

SEQ ID NO: 108420 - DNA, 15 bp, Homo sapiens
gattcgaaaagcata

SEQ ID NO: 108421 - DNA, 15 bp, Homo sapiens
agattcgaaaagcat

SEQ ID NO: 108422 - DNA, 15 bp, Homo sapiens
cagattcgaaaagca

SEQ ID NO: 108423 - DNA, 15 bp, Homo sapiens
tcagattcgaaaagc

SEQ ID NO: 108424 - DNA, 15 bp, Homo sapiens
gtcagattcgaaaag

SEQ ID NO: 108425 - DNA, 15 bp, Homo sapiens
ggtcagattcgaaaa

SEQ ID NO: 108426 - DNA, 15 bp, Homo sapiens
aggtcagattcgaaa

SEQ ID NO: 108427 - DNA, 15 bp, Homo sapiens
gaggtcagattcgaa

SEQ ID NO: 108428 - DNA, 15 bp, Homo sapiens
agaggtcagattcga

SEQ ID NO: 108429 - DNA, 15 bp, Homo sapiens
cagaggtcagattcg

SEQ ID NO: 108430 - DNA, 15 bp, Homo sapiens
acagaggtcagattc

SEQ ID NO: 108431 - DNA, 15 bp, Homo sapiens
aacagaggtcagatt

SEQ ID NO: 108432 - DNA, 15 bp, Homo sapiens
aaacagaggtcagat

SEQ ID NO: 108433 - DNA, 15 bp, Homo sapiens
taaacagaggtcaga

SEQ ID NO: 108434 - DNA, 15 bp, Homo sapiens
ttaaacagaggtcag

SEQ ID NO: 108435 - DNA, 15 bp, Homo sapiens
tttaaacagaggtca

SEQ ID NO: 108436 - DNA, 15 bp, Homo sapiens
ttttaaacagaggtc

SEQ ID NO: 108437 - DNA, 15 bp, Homo sapiens
attttaaacagaggt

SEQ ID NO: 108438 - DNA, 15 bp, Homo sapiens
aattttaaacagagg

SEQ ID NO: 108439 - DNA, 15 bp, Homo sapiens
taattttaaacagag

SEQ ID NO: 108440 - DNA, 15 bp, Homo sapiens
ctaattttaaacaga

SEQ ID NO: 108441 - DNA, 15 bp, Homo sapiens
tctaattttaaacag

SEQ ID NO: 108442 - DNA, 15 bp, Homo sapiens
atctaattttaaaca

SEQ ID NO: 108443 - DNA, 15 bp, Homo sapiens
tatctaattttaaac

SEQ ID NO: 108444 - DNA, 15 bp, Homo sapiens
ctatctaattttaaa

SEQ ID NO: 108445 - DNA, 15 bp, Homo sapiens
tctatctaattttaa

SEQ ID NO: 108446 - DNA, 15 bp, Homo sapiens
ctctatctaatttta

SEQ ID NO: 108447 - DNA, 15 bp, Homo sapiens
cctctatctaatttt

SEQ ID NO: 108448 - DNA, 15 bp, Homo sapiens
acctctatctaattt

SEQ ID NO: 108449 - DNA, 15 bp, Homo sapiens
tacctctatctaatt

SEQ ID NO: 108450 - DNA, 15 bp, Homo sapiens
ttacctctatctaat

SEQ ID NO: 108451 - DNA, 15 bp, Homo sapiens
attacctctatctaa

SEQ ID NO: 108452 - DNA, 15 bp, Homo sapiens
aattacctctatcta

SEQ ID NO: 108453 - DNA, 15 bp, Homo sapiens
taattacctctatct

SEQ ID NO: 108454 - DNA, 15 bp, Homo sapiens
ataattacctctatc

SEQ ID NO: 108455 - DNA, 15 bp, Homo sapiens
aataattacctctat

SEQ ID NO: 108456 - DNA, 15 bp, Homo sapiens
aaataattacctcta

SEQ ID NO: 108457 - DNA, 15 bp, Homo sapiens
gaaataattacctct

SEQ ID NO: 108458 - DNA, 15 bp, Homo sapiens
ggaaataattacctc

SEQ ID NO: 108459 - DNA, 15 bp, Homo sapiens
aggaaataattacct

SEQ ID NO: 108460 - DNA, 15 bp, Homo sapiens
aaggaaataattacc

SEQ ID NO: 108461 - DNA, 15 bp, Homo sapiens
aaaggaaataattac

SEQ ID NO: 108462 - DNA, 15 bp, Homo sapiens
taaaggaaataatta

SEQ ID NO: 108463 - DNA, 15 bp, Homo sapiens
ctaaaggaaataatt

SEQ ID NO: 108464 - DNA, 15 bp, Homo sapiens
actaaaggaaataat

SEQ ID NO: 108465 - DNA, 15 bp, Homo sapiens
cactaaaggaaataa

SEQ ID NO: 108466 - DNA, 15 bp, Homo sapiens
tcactaaaggaaata

SEQ ID NO: 108467 - DNA, 15 bp, Homo sapiens
ctcactaaaggaaat

SEQ ID NO: 108468 - DNA, 15 bp, Homo sapiens
gctcactaaaggaaa

SEQ ID NO: 108469 - DNA, 15 bp, Homo sapiens
tgctcactaaaggaa

SEQ ID NO: 108470 - DNA, 15 bp, Homo sapiens
ttgctcactaaagga

SEQ ID NO: 108471 - DNA, 15 bp, Homo sapiens
cttgctcactaaagg

SEQ ID NO: 108472 - DNA, 15 bp, Homo sapiens
tcttgctcactaaag

SEQ ID NO: 108473 - DNA, 15 bp, Homo sapiens
ttcttgctcactaaa

SEQ ID NO: 108474 - DNA, 15 bp, Homo sapiens
cttcttgctcactaa

SEQ ID NO: 108475 - DNA, 15 bp, Homo sapiens
acttcttgctcacta

SEQ ID NO: 108476 - DNA, 15 bp, Homo sapiens
cacttcttgctcact

SEQ ID NO: 108477 - DNA, 15 bp, Homo sapiens
tcacttcttgctcac

SEQ ID NO: 108478 - DNA, 15 bp, Homo sapiens
ttcacttcttgctca

SEQ ID NO: 108479 - DNA, 15 bp, Homo sapiens
tttcacttcttgctc

SEQ ID NO: 108480 - DNA, 15 bp, Homo sapiens
atttcacttcttgct

SEQ ID NO: 108481 - DNA, 15 bp, Homo sapiens
gatttcacttcttgc

SEQ ID NO: 108482 - DNA, 15 bp, Homo sapiens
tgatttcacttcttg

SEQ ID NO: 108483 - DNA, 15 bp, Homo sapiens
ctgatttcacttctt

SEQ ID NO: 108484 - DNA, 15 bp, Homo sapiens
cctgatttcacttct

SEQ ID NO: 108485 - DNA, 15 bp, Homo sapiens
tcctgatttcacttc

SEQ ID NO: 108486 - DNA, 15 bp, Homo sapiens
ttcctgatttcactt

SEQ ID NO: 108487 - DNA, 15 bp, Homo sapiens
cttcctgatttcact

SEQ ID NO: 108488 - DNA, 15 bp, Homo sapiens
tcttcctgatttcac

SEQ ID NO: 108489 - DNA, 15 bp, Homo sapiens
ttcttcctgatttca

SEQ ID NO: 108490 - DNA, 15 bp, Homo sapiens
cttcttcctgatttc

SEQ ID NO: 108491 - DNA, 15 bp, Homo sapiens
tcttcttcctgattt

SEQ ID NO: 108492 - DNA, 15 bp, Homo sapiens
gtcttcttcctgatt

SEQ ID NO: 108493 - DNA, 15 bp, Homo sapiens
tgtcttcttcctgat

SEQ ID NO: 108494 - DNA, 15 bp, Homo sapiens
ttgtcttcttcctga

SEQ ID NO: 108495 - DNA, 15 bp, Homo sapiens
tttgtcttcttcctg

SEQ ID NO: 108496 - DNA, 15 bp, Homo sapiens
atttgtcttcttcct

SEQ ID NO: 108497 - DNA, 15 bp, Homo sapiens
gatttgtcttcttcc

SEQ ID NO: 108498 - DNA, 15 bp, Homo sapiens
agatttgtcttcttc

SEQ ID NO: 108499 - DNA, 15 bp, Homo sapiens
aagatttgtcttctt

SEQ ID NO: 108500 - DNA, 15 bp, Homo sapiens
aaagatttgtcttct

SEQ ID NO: 108501 - DNA, 15 bp, Homo sapiens
aaaagatttgtcttc

SEQ ID NO: 108502 - DNA, 15 bp, Homo sapiens
gaaaagatttgtctt

SEQ ID NO: 108503 - DNA, 15 bp, Homo sapiens
tgaaaagatttgtct

SEQ ID NO: 108504 - DNA, 15 bp, Homo sapiens
ttgaaaagatttgtc

SEQ ID NO: 108505 - DNA, 15 bp, Homo sapiens
tttgaaaagatttgt

SEQ ID NO: 108506 - DNA, 15 bp, Homo sapiens
gtttgaaaagatttg

SEQ ID NO: 108507 - DNA, 15 bp, Homo sapiens
agtttgaaaagattt

SEQ ID NO: 108508 - DNA, 15 bp, Homo sapiens
cagtttgaaaagatt

SEQ ID NO: 108509 - DNA, 15 bp, Homo sapiens
tcagtttgaaaagat

SEQ ID NO: 108510 - DNA, 15 bp, Homo sapiens
ctcagtttgaaaaga

SEQ ID NO: 108511 - DNA, 15 bp, Homo sapiens
tctcagtttgaaaag

SEQ ID NO: 108512 - DNA, 15 bp, Homo sapiens
ttctcagtttgaaaa

SEQ ID NO: 108513 - DNA, 15 bp, Homo sapiens
tttctcagtttgaaa

SEQ ID NO: 108514 - DNA, 15 bp, Homo sapiens
gtttctcagtttgaa

SEQ ID NO: 108515 - DNA, 15 bp, Homo sapiens
tgtttctcagtttga

SEQ ID NO: 108516 - DNA, 15 bp, Homo sapiens
ttgtttctcagtttg

SEQ ID NO: 108517 - DNA, 15 bp, Homo sapiens
cttgtttctcagttt

SEQ ID NO: 108518 - DNA, 15 bp, Homo sapiens
tcttgtttctcagtt

SEQ ID NO: 108519 - DNA, 15 bp, Homo sapiens
ttcttgtttctcagt

SEQ ID NO: 108520 - DNA, 15 bp, Homo sapiens
tttcttgtttctcag

SEQ ID NO: 108521 - DNA, 15 bp, Homo sapiens
ctttcttgtttctca

SEQ ID NO: 108522 - DNA, 15 bp, Homo sapiens
tctttcttgtttctc

SEQ ID NO: 108523 - DNA, 15 bp, Homo sapiens
ctctttcttgtttct

SEQ ID NO: 108524 - DNA, 15 bp, Homo sapiens
cctctttcttgtttc

SEQ ID NO: 108525 - DNA, 15 bp, Homo sapiens
tcctctttcttgttt

SEQ ID NO: 108526 - DNA, 15 bp, Homo sapiens
ttcctctttcttgtt

SEQ ID NO: 108527 - DNA, 15 bp, Homo sapiens
cttcctctttcttgt

SEQ ID NO: 108528 - DNA, 15 bp, Homo sapiens
tcttcctctttcttg

SEQ ID NO: 108529 - DNA, 15 bp, Homo sapiens
gtcttcctctttctt

SEQ ID NO: 108530 - DNA, 15 bp, Homo sapiens
tgtcttcctctttct

SEQ ID NO: 108531 - DNA, 15 bp, Homo sapiens
gtgtcttcctctttc

SEQ ID NO: 108532 - DNA, 15 bp, Homo sapiens
tgtgtcttcctcttt

SEQ ID NO: 108533 - DNA, 15 bp, Homo sapiens
ttgtgtcttcctctt

SEQ ID NO: 108534 - DNA, 15 bp, Homo sapiens
tttgtgtcttcctct

SEQ ID NO: 108535 - DNA, 15 bp, Homo sapiens
ttttgtgtcttcctc

SEQ ID NO: 108536 - DNA, 15 bp, Homo sapiens
cttttgtgtcttcct

SEQ ID NO: 108537 - DNA, 15 bp, Homo sapiens
acttttgtgtcttcc

SEQ ID NO: 108538 - DNA, 15 bp, Homo sapiens
aacttttgtgtcttc

SEQ ID NO: 108539 - DNA, 15 bp, Homo sapiens
taacttttgtgtctt

SEQ ID NO: 108540 - DNA, 15 bp, Homo sapiens
ttaacttttgtgtct

SEQ ID NO: 108541 - DNA, 15 bp, Homo sapiens
tttaacttttgtgtc

SEQ ID NO: 108542 - DNA, 15 bp, Homo sapiens
gtttaacttttgtgt

SEQ ID NO: 108543 - DNA, 15 bp, Homo sapiens
agtttaacttttgtg

SEQ ID NO: 108544 - DNA, 15 bp, Homo sapiens
tagtttaacttttgt

SEQ ID NO: 108545 - DNA, 15 bp, Homo sapiens
gtagtttaacttttg

SEQ ID NO: 108546 - DNA, 15 bp, Homo sapiens
tgtagtttaactttt

SEQ ID NO: 108547 - DNA, 15 bp, Homo sapiens
ttgtagtttaacttt

SEQ ID NO: 108548 - DNA, 15 bp, Homo sapiens
attgtagtttaactt

SEQ ID NO: 108549 - DNA, 15 bp, Homo sapiens
tattgtagtttaact

SEQ ID NO: 108550 - DNA, 15 bp, Homo sapiens
ttattgtagtttaac

SEQ ID NO: 108551 - DNA, 15 bp, Homo sapiens
attattgtagtttaa

SEQ ID NO: 108552 - DNA, 15 bp, Homo sapiens
cattattgtagttta

SEQ ID NO: 108553 - DNA, 15 bp, Homo sapiens
acattattgtagttt

SEQ ID NO: 108554 - DNA, 15 bp, Homo sapiens
tacattattgtagtt

SEQ ID NO: 108555 - DNA, 15 bp, Homo sapiens
ctacattattgtagt

SEQ ID NO: 108556 - DNA, 15 bp, Homo sapiens
gctacattattgtag

SEQ ID NO: 108557 - DNA, 15 bp, Homo sapiens
agctacattattgta

SEQ ID NO: 108558 - DNA, 15 bp, Homo sapiens
aagctacattattgt

SEQ ID NO: 108559 - DNA, 15 bp, Homo sapiens
taagctacattattg

SEQ ID NO: 108560 - DNA, 15 bp, Homo sapiens
ctaagctacattatt

SEQ ID NO: 108561 - DNA, 15 bp, Homo sapiens
gctaagctacattat

SEQ ID NO: 108562 - DNA, 15 bp, Homo sapiens
tgctaagctacatta

SEQ ID NO: 108563 - DNA, 15 bp, Homo sapiens
ctgctaagctacatt

SEQ ID NO: 108564 - DNA, 15 bp, Homo sapiens
actgctaagctacat

SEQ ID NO: 108565 - DNA, 15 bp, Homo sapiens
cactgctaagctaca

SEQ ID NO: 108566 - DNA, 15 bp, Homo sapiens
acactgctaagctac

SEQ ID NO: 108567 - DNA, 15 bp, Homo sapiens
tacactgctaagcta

SEQ ID NO: 108568 - DNA, 15 bp, Homo sapiens
ttacactgctaagct

SEQ ID NO: 108569 - DNA, 15 bp, Homo sapiens
cttacactgctaagc

SEQ ID NO: 108570 - DNA, 15 bp, Homo sapiens
acttacactgctaag

SEQ ID NO: 108571 - DNA, 15 bp, Homo sapiens
aacttacactgctaa

SEQ ID NO: 108572 - DNA, 15 bp, Homo sapiens
taacttacactgcta

SEQ ID NO: 108573 - DNA, 15 bp, Homo sapiens
ttaacttacactgct

SEQ ID NO: 108574 - DNA, 15 bp, Homo sapiens
attaacttacactgc

SEQ ID NO: 108575 - DNA, 15 bp, Homo sapiens
aattaacttacactg

SEQ ID NO: 108576 - DNA, 15 bp, Homo sapiens
gaattaacttacact

SEQ ID NO: 108577 - DNA, 15 bp, Homo sapiens
tgaattaacttacac

SEQ ID NO: 108578 - DNA, 15 bp, Homo sapiens
atgaattaacttaca

SEQ ID NO: 108579 - DNA, 15 bp, Homo sapiens
aatgaattaacttac

SEQ ID NO: 108580 - DNA, 15 bp, Homo sapiens
gaatgaattaactta

SEQ ID NO: 108581 - DNA, 15 bp, Homo sapiens
ggaatgaattaactt

SEQ ID NO: 108582 - DNA, 15 bp, Homo sapiens
gggaatgaattaact

SEQ ID NO: 108583 - DNA, 15 bp, Homo sapiens
ggggaatgaattaac

SEQ ID NO: 108584 - DNA, 15 bp, Homo sapiens
gggggaatgaattaa

SEQ ID NO: 108585 - DNA, 15 bp, Homo sapiens
tgggggaatgaatta

SEQ ID NO: 108586 - DNA, 15 bp, Homo sapiens
ttgggggaatgaatt

SEQ ID NO: 108587 - DNA, 15 bp, Homo sapiens
tttgggggaatgaat

SEQ ID NO: 108588 - DNA, 15 bp, Homo sapiens
ttttgggggaatgaa

SEQ ID NO: 108589 - DNA, 15 bp, Homo sapiens
gttttgggggaatga

SEQ ID NO: 108590 - DNA, 15 bp, Homo sapiens
tgttttgggggaatg

SEQ ID NO: 108591 - DNA, 15 bp, Homo sapiens
ctgttttgggggaat

SEQ ID NO: 108592 - DNA, 15 bp, Homo sapiens
actgttttgggggaa

SEQ ID NO: 108593 - DNA, 15 bp, Homo sapiens
gactgttttggggga

SEQ ID NO: 108594 - DNA, 15 bp, Homo sapiens
tgactgttttggggg

SEQ ID NO: 108595 - DNA, 15 bp, Homo sapiens
ctgactgttttgggg

SEQ ID NO: 108596 - DNA, 15 bp, Homo sapiens
actgactgttttggg

SEQ ID NO: 108597 - DNA, 15 bp, Homo sapiens
aactgactgttttgg

SEQ ID NO: 108598 - DNA, 15 bp, Homo sapiens
aaactgactgttttg

SEQ ID NO: 108599 - DNA, 15 bp, Homo sapiens
taaactgactgtttt

SEQ ID NO: 108600 - DNA, 15 bp, Homo sapiens
gtaaactgactgttt

SEQ ID NO: 108601 - DNA, 15 bp, Homo sapiens
tgtaaactgactgtt

SEQ ID NO: 108602 - DNA, 15 bp, Homo sapiens
ttgtaaactgactgt

SEQ ID NO: 108603 - DNA, 15 bp, Homo sapiens
cttgtaaactgactg

SEQ ID NO: 108604 - DNA, 15 bp, Homo sapiens
gcttgtaaactgact

SEQ ID NO: 108605 - DNA, 15 bp, Homo sapiens
tgcttgtaaactgac

SEQ ID NO: 108606 - DNA, 15 bp, Homo sapiens
ttgcttgtaaactga

SEQ ID NO: 108607 - DNA, 15 bp, Homo sapiens
tttgcttgtaaactg

SEQ ID NO: 108608 - DNA, 15 bp, Homo sapiens
ctttgcttgtaaact

SEQ ID NO: 108609 - DNA, 15 bp, Homo sapiens
tctttgcttgtaaac

SEQ ID NO: 108610 - DNA, 15 bp, Homo sapiens
atctttgcttgtaaa

SEQ ID NO: 108611 - DNA, 15 bp, Homo sapiens
catctttgcttgtaa

SEQ ID NO: 108612 - DNA, 15 bp, Homo sapiens
acatctttgcttgta

SEQ ID NO: 108613 - DNA, 15 bp, Homo sapiens
tacatctttgcttgt

SEQ ID NO: 108614 - DNA, 15 bp, Homo sapiens
gtacatctttgcttg

SEQ ID NO: 108615 - DNA, 15 bp, Homo sapiens
agtacatctttgctt

SEQ ID NO: 108616 - DNA, 15 bp, Homo sapiens
aagtacatctttgct

SEQ ID NO: 108617 - DNA, 15 bp, Homo sapiens
taagtacatctttgc

SEQ ID NO: 108618 - DNA, 15 bp, Homo sapiens
ttaagtacatctttg

SEQ ID NO: 108619 - DNA, 15 bp, Homo sapiens
attaagtacatcttt

SEQ ID NO: 108620 - DNA, 15 bp, Homo sapiens
cattaagtacatctt

SEQ ID NO: 108621 - DNA, 15 bp, Homo sapiens
tcattaagtacatct

SEQ ID NO: 108622 - DNA, 15 bp, Homo sapiens
atcattaagtacatc

SEQ ID NO: 108623 - DNA, 15 bp, Homo sapiens
aatcattaagtacat

SEQ ID NO: 108624 - DNA, 15 bp, Homo sapiens
aaatcattaagtaca

SEQ ID NO: 108625 - DNA, 15 bp, Homo sapiens
taaatcattaagtac

SEQ ID NO: 108626 - DNA, 15 bp, Homo sapiens
ttaaatcattaagta

SEQ ID NO: 108627 - DNA, 15 bp, Homo sapiens
cttaaatcattaagt

SEQ ID NO: 108628 - DNA, 15 bp, Homo sapiens
tcttaaatcattaag

SEQ ID NO: 108629 - DNA, 15 bp, Homo sapiens
atcttaaatcattaa

SEQ ID NO: 108630 - DNA, 15 bp, Homo sapiens
aatcttaaatcatta

SEQ ID NO: 108631 - DNA, 15 bp, Homo sapiens
taatcttaaatcatt

SEQ ID NO: 108632 - DNA, 15 bp, Homo sapiens
ctaatcttaaatcat

SEQ ID NO: 108633 - DNA, 15 bp, Homo sapiens
gctaatcttaaatca

SEQ ID NO: 108634 - DNA, 15 bp, Homo sapiens
agctaatcttaaatc

SEQ ID NO: 108635 - DNA, 15 bp, Homo sapiens
cagctaatcttaaat

SEQ ID NO: 108636 - DNA, 15 bp, Homo sapiens
tcagctaatcttaaa

SEQ ID NO: 108637 - DNA, 15 bp, Homo sapiens
gtcagctaatcttaa

SEQ ID NO: 108638 - DNA, 15 bp, Homo sapiens
agtcagctaatctta

SEQ ID NO: 108639 - DNA, 15 bp, Homo sapiens
aagtcagctaatctt

SEQ ID NO: 108640 - DNA, 15 bp, Homo sapiens
aaagtcagctaatct

SEQ ID NO: 108641 - DNA, 15 bp, Homo sapiens
caaagtcagctaatc

SEQ ID NO: 108642 - DNA, 15 bp, Homo sapiens
acaaagtcagctaat

SEQ ID NO: 108643 - DNA, 15 bp, Homo sapiens
cacaaagtcagctaa

SEQ ID NO: 108644 - DNA, 15 bp, Homo sapiens
ccacaaagtcagcta

SEQ ID NO: 108645 - DNA, 15 bp, Homo sapiens
tccacaaagtcagct

SEQ ID NO: 108646 - DNA, 15 bp, Homo sapiens
ttccacaaagtcagc

SEQ ID NO: 108647 - DNA, 15 bp, Homo sapiens
tttccacaaagtcag

SEQ ID NO: 108648 - DNA, 15 bp, Homo sapiens
ttttccacaaagtca

SEQ ID NO: 108649 - DNA, 15 bp, Homo sapiens
tttttccacaaagtc

SEQ ID NO: 108650 - DNA, 15 bp, Homo sapiens
ttttttccacaaagt

SEQ ID NO: 108651 - DNA, 15 bp, Homo sapiens
attttttccacaaag

SEQ ID NO: 108652 - DNA, 15 bp, Homo sapiens
tattttttccacaaa

SEQ ID NO: 108653 - DNA, 15 bp, Homo sapiens
gtattttttccacaa

SEQ ID NO: 108654 - DNA, 15 bp, Homo sapiens
agtattttttccaca

SEQ ID NO: 108655 - DNA, 15 bp, Homo sapiens
aagtattttttccac

SEQ ID NO: 108656 - DNA, 15 bp, Homo sapiens
aaagtattttttcca

SEQ ID NO: 108657 - DNA, 15 bp, Homo sapiens
aaaagtattttttcc

SEQ ID NO: 108658 - DNA, 15 bp, Homo sapiens
taaaagtattttttc

SEQ ID NO: 108659 - DNA, 15 bp, Homo sapiens
ataaaagtatttttt

SEQ ID NO: 108660 - DNA, 15 bp, Homo sapiens
tataaaagtattttt

SEQ ID NO: 108661 - DNA, 15 bp, Homo sapiens
atataaaagtatttt

SEQ ID NO: 108662 - DNA, 15 bp, Homo sapiens
aatataaaagtattt

SEQ ID NO: 108663 - DNA, 15 bp, Homo sapiens
aaatataaaagtatt

SEQ ID NO: 108664 - DNA, 15 bp, Homo sapiens
taaatataaaagtat

SEQ ID NO: 108665 - DNA, 15 bp, Homo sapiens
ttaaatataaaagta

SEQ ID NO: 108666 - DNA, 15 bp, Homo sapiens
tttaaatataaaagt

SEQ ID NO: 108667 - DNA, 15 bp, Homo sapiens
ttttaaatataaaag

SEQ ID NO: 108668 - DNA, 15 bp, Homo sapiens
cttttaaatataaaa

SEQ ID NO: 108669 - DNA, 15 bp, Homo sapiens
acttttaaatataaa

SEQ ID NO: 108670 - DNA, 15 bp, Homo sapiens
aacttttaaatataa

SEQ ID NO: 108671 - DNA, 15 bp, Homo sapiens
aaacttttaaatata

SEQ ID NO: 108672 - DNA, 15 bp, Homo sapiens
taaacttttaaatat

SEQ ID NO: 108673 - DNA, 15 bp, Homo sapiens
ataaacttttaaata

SEQ ID NO: 108674 - DNA, 15 bp, Homo sapiens
tataaacttttaaat

SEQ ID NO: 108675 - DNA, 15 bp, Homo sapiens
gtataaacttttaaa

SEQ ID NO: 108676 - DNA, 15 bp, Homo sapiens
tgtataaacttttaa

SEQ ID NO: 108677 - DNA, 15 bp, Homo sapiens
atgtataaactttta

SEQ ID NO: 108678 - DNA, 15 bp, Homo sapiens
aatgtataaactttt

SEQ ID NO: 108679 - DNA, 15 bp, Homo sapiens
aaatgtataaacttt

SEQ ID NO: 108680 - DNA, 15 bp, Homo sapiens
aaaatgtataaactt

SEQ ID NO: 108681 - DNA, 15 bp, Homo sapiens
taaaatgtataaact

SEQ ID NO: 108682 - DNA, 15 bp, Homo sapiens
ttaaaatgtataaac

SEQ ID NO: 108683 - DNA, 15 bp, Homo sapiens
tttaaaatgtataaa

SEQ ID NO: 108684 - DNA, 15 bp, Homo sapiens
ttttaaaatgtataa

SEQ ID NO: 108685 - DNA, 15 bp, Homo sapiens
gttttaaaatgtata

SEQ ID NO: 108686 - DNA, 15 bp, Homo sapiens
agttttaaaatgtat

SEQ ID NO: 108687 - DNA, 15 bp, Homo sapiens
cagttttaaaatgta

SEQ ID NO: 108688 - DNA, 15 bp, Homo sapiens
acagttttaaaatgt

SEQ ID NO: 108689 - DNA, 15 bp, Homo sapiens
cacagttttaaaatg

SEQ ID NO: 108690 - DNA, 15 bp, Homo sapiens
tcacagttttaaaat

SEQ ID NO: 108691 - DNA, 15 bp, Homo sapiens
gtcacagttttaaaa

SEQ ID NO: 108692 - DNA, 15 bp, Homo sapiens
tgtcacagttttaaa

SEQ ID NO: 108693 - DNA, 15 bp, Homo sapiens
ttgtcacagttttaa

SEQ ID NO: 108694 - DNA, 15 bp, Homo sapiens
tttgtcacagtttta

SEQ ID NO: 108695 - DNA, 15 bp, Homo sapiens
ttttgtcacagtttt

SEQ ID NO: 108696 - DNA, 15 bp, Homo sapiens
attttgtcacagttt

SEQ ID NO: 108697 - DNA, 15 bp, Homo sapiens
aattttgtcacagtt

SEQ ID NO: 108698 - DNA, 15 bp, Homo sapiens
aaattttgtcacagt

SEQ ID NO: 108699 - DNA, 15 bp, Homo sapiens
gaaattttgtcacag

SEQ ID NO: 108700 - DNA, 15 bp, Homo sapiens
tgaaattttgtcaca

SEQ ID NO: 108701 - DNA, 15 bp, Homo sapiens
atgaaattttgtcac

SEQ ID NO: 108702 - DNA, 15 bp, Homo sapiens
catgaaattttgtca

SEQ ID NO: 108703 - DNA, 15 bp, Homo sapiens
tcatgaaattttgtc

SEQ ID NO: 108704 - DNA, 15 bp, Homo sapiens
ttcatgaaattttgt

SEQ ID NO: 108705 - DNA, 15 bp, Homo sapiens
gttcatgaaattttg

SEQ ID NO: 108706 - DNA, 15 bp, Homo sapiens
agttcatgaaatttt

SEQ ID NO: 108707 - DNA, 15 bp, Homo sapiens
tagttcatgaaattt

SEQ ID NO: 108708 - DNA, 15 bp, Homo sapiens
gtagttcatgaaatt

SEQ ID NO: 108709 - DNA, 15 bp, Homo sapiens
cgtagttcatgaaat

SEQ ID NO: 108710 - DNA, 15 bp, Homo sapiens
tcgtagttcatgaaa

SEQ ID NO: 108711 - DNA, 15 bp, Homo sapiens
gtcgtagttcatgaa

SEQ ID NO: 108712 - DNA, 15 bp, Homo sapiens
agtcgtagttcatga

SEQ ID NO: 108713 - DNA, 15 bp, Homo sapiens
gagtcgtagttcatg

SEQ ID NO: 108714 - DNA, 15 bp, Homo sapiens
tgagtcgtagttcat

SEQ ID NO: 108715 - DNA, 15 bp, Homo sapiens
atgagtcgtagttca

SEQ ID NO: 108716 - DNA, 15 bp, Homo sapiens
gatgagtcgtagttc

SEQ ID NO: 108717 - DNA, 15 bp, Homo sapiens
agatgagtcgtagtt

SEQ ID NO: 108718 - DNA, 15 bp, Homo sapiens
tagatgagtcgtagt

SEQ ID NO: 108719 - DNA, 15 bp, Homo sapiens
gtagatgagtcgtag

SEQ ID NO: 108720 - DNA, 15 bp, Homo sapiens
ggtagatgagtcgta

SEQ ID NO: 108721 - DNA, 15 bp, Homo sapiens
aggtagatgagtcgt

SEQ ID NO: 108722 - DNA, 15 bp, Homo sapiens
taggtagatgagtcg

SEQ ID NO: 108723 - DNA, 15 bp, Homo sapiens
gtaggtagatgagtc

SEQ ID NO: 108724 - DNA, 15 bp, Homo sapiens
tgtaggtagatgagt

SEQ ID NO: 108725 - DNA, 15 bp, Homo sapiens
gtgtaggtagatgag

SEQ ID NO: 108726 - DNA, 15 bp, Homo sapiens
ggtgtaggtagatga

SEQ ID NO: 108727 - DNA, 15 bp, Homo sapiens
aggtgtaggtagatg

SEQ ID NO: 108728 - DNA, 15 bp, Homo sapiens
caggtgtaggtagat

SEQ ID NO: 108729 - DNA, 15 bp, Homo sapiens
acaggtgtaggtaga

SEQ ID NO: 108730 - DNA, 15 bp, Homo sapiens
aacaggtgtaggtag

SEQ ID NO: 108731 - DNA, 15 bp, Homo sapiens
aaacaggtgtaggta

SEQ ID NO: 108732 - DNA, 15 bp, Homo sapiens
aaaacaggtgtaggt

SEQ ID NO: 108733 - DNA, 15 bp, Homo sapiens
gaaaacaggtgtagg

SEQ ID NO: 108734 - DNA, 15 bp, Homo sapiens
ggaaaacaggtgtag

SEQ ID NO: 108735 - DNA, 15 bp, Homo sapiens
aggaaaacaggtgta

SEQ ID NO: 108736 - DNA, 15 bp, Homo sapiens
taggaaaacaggtgt

SEQ ID NO: 108737 - DNA, 15 bp, Homo sapiens
ctaggaaaacaggtg

SEQ ID NO: 108738 - DNA, 15 bp, Homo sapiens
gctaggaaaacaggt

SEQ ID NO: 108739 - DNA, 15 bp, Homo sapiens
agctaggaaaacagg

SEQ ID NO: 108740 - DNA, 15 bp, Homo sapiens
gagctaggaaaacag

SEQ ID NO: 108741 - DNA, 15 bp, Homo sapiens
ggagctaggaaaaca

SEQ ID NO: 108742 - DNA, 15 bp, Homo sapiens
gggagctaggaaaac

SEQ ID NO: 108743 - DNA, 15 bp, Homo sapiens
tgggagctaggaaaa

SEQ ID NO: 108744 - DNA, 15 bp, Homo sapiens
ttgggagctaggaaa

SEQ ID NO: 108745 - DNA, 15 bp, Homo sapiens
cttgggagctaggaa

SEQ ID NO: 108746 - DNA, 15 bp, Homo sapiens
gcttgggagctagga

SEQ ID NO: 108747 - DNA, 15 bp, Homo sapiens
ggcttgggagctagg

SEQ ID NO: 108748 - DNA, 15 bp, Homo sapiens
gggcttgggagctag

SEQ ID NO: 108749 - DNA, 15 bp, Homo sapiens
ggggcttgggagcta

SEQ ID NO: 108750 - DNA, 15 bp, Homo sapiens
tggggcttgggagct

SEQ ID NO: 108751 - DNA, 15 bp, Homo sapiens
gtggggcttgggagc

SEQ ID NO: 108752 - DNA, 15 bp, Homo sapiens
agtggggcttgggag

SEQ ID NO: 108753 - DNA, 15 bp, Homo sapiens
aagtggggcttggga

SEQ ID NO: 108754 - DNA, 15 bp, Homo sapiens
aaagtggggcttggg

SEQ ID NO: 108755 - DNA, 15 bp, Homo sapiens
aaaagtggggcttgg

SEQ ID NO: 108756 - DNA, 15 bp, Homo sapiens
aaaaagtggggcttg

SEQ ID NO: 108757 - DNA, 15 bp, Homo sapiens
gaaaaagtggggctt

SEQ ID NO: 108758 - DNA, 15 bp, Homo sapiens
tgaaaaagtggggct

SEQ ID NO: 108759 - DNA, 15 bp, Homo sapiens
gtgaaaaagtggggc

SEQ ID NO: 108760 - DNA, 15 bp, Homo sapiens
ggtgaaaaagtgggg

SEQ ID NO: 108761 - DNA, 15 bp, Homo sapiens
aggtgaaaaagtggg

SEQ ID NO: 108762 - DNA, 15 bp, Homo sapiens
caggtgaaaaagtgg

SEQ ID NO: 108763 - DNA, 15 bp, Homo sapiens
acaggtgaaaaagtg

SEQ ID NO: 108764 - DNA, 15 bp, Homo sapiens
tacaggtgaaaaagt

SEQ ID NO: 108765 - DNA, 15 bp, Homo sapiens
atacaggtgaaaaag

SEQ ID NO: 108766 - DNA, 15 bp, Homo sapiens
aatacaggtgaaaaa

SEQ ID NO: 108767 - DNA, 15 bp, Homo sapiens
caatacaggtgaaaa

SEQ ID NO: 108768 - DNA, 15 bp, Homo sapiens
tcaatacaggtgaaa

SEQ ID NO: 108769 - DNA, 15 bp, Homo sapiens
gtcaatacaggtgaa

SEQ ID NO: 108770 - DNA, 15 bp, Homo sapiens
ggtcaatacaggtga

SEQ ID NO: 108771 - DNA, 15 bp, Homo sapiens
tggtcaatacaggtg

SEQ ID NO: 108772 - DNA, 15 bp, Homo sapiens
atggtcaatacaggt

SEQ ID NO: 108773 - DNA, 15 bp, Homo sapiens
catggtcaatacagg

SEQ ID NO: 108774 - DNA, 15 bp, Homo sapiens
acatggtcaatacag

SEQ ID NO: 108775 - DNA, 15 bp, Homo sapiens
gacatggtcaataca

SEQ ID NO: 108776 - DNA, 15 bp, Homo sapiens
tgacatggtcaatac

SEQ ID NO: 108777 - DNA, 15 bp, Homo sapiens
ttgacatggtcaata

SEQ ID NO: 108778 - DNA, 15 bp, Homo sapiens
gttgacatggtcaat

SEQ ID NO: 108779 - DNA, 15 bp, Homo sapiens
agttgacatggtcaa

SEQ ID NO: 108780 - DNA, 15 bp, Homo sapiens
aagttgacatggtca

SEQ ID NO: 108781 - DNA, 15 bp, Homo sapiens
aaagttgacatggtc

SEQ ID NO: 108782 - DNA, 15 bp, Homo sapiens
aaaagttgacatggt

SEQ ID NO: 108783 - DNA, 15 bp, Homo sapiens
caaaagttgacatgg

SEQ ID NO: 108784 - DNA, 15 bp, Homo sapiens
acaaaagttgacatg

SEQ ID NO: 108785 - DNA, 15 bp, Homo sapiens
aacaaaagttgacat

SEQ ID NO: 108786 - DNA, 15 bp, Homo sapiens
taacaaaagttgaca

SEQ ID NO: 108787 - DNA, 15 bp, Homo sapiens
ctaacaaaagttgac

SEQ ID NO: 108788 - DNA, 15 bp, Homo sapiens
cctaacaaaagttga

SEQ ID NO: 108789 - DNA, 15 bp, Homo sapiens
gcctaacaaaagttg

SEQ ID NO: 108790 - DNA, 15 bp, Homo sapiens
tgcctaacaaaagtt

SEQ ID NO: 108791 - DNA, 15 bp, Homo sapiens
atgcctaacaaaagt

SEQ ID NO: 108792 - DNA, 15 bp, Homo sapiens
gatgcctaacaaaag

SEQ ID NO: 108793 - DNA, 15 bp, Homo sapiens
ggatgcctaacaaaa

SEQ ID NO: 108794 - DNA, 15 bp, Homo sapiens
cggatgcctaacaaa

SEQ ID NO: 108795 - DNA, 15 bp, Homo sapiens
acggatgcctaacaa

SEQ ID NO: 108796 - DNA, 15 bp, Homo sapiens
aacggatgcctaaca

SEQ ID NO: 108797 - DNA, 15 bp, Homo sapiens
taacggatgcctaac

SEQ ID NO: 108798 - DNA, 15 bp, Homo sapiens
ctaacggatgcctaa

SEQ ID NO: 108799 - DNA, 15 bp, Homo sapiens
tctaacggatgccta

SEQ ID NO: 108800 - DNA, 15 bp, Homo sapiens
atctaacggatgcct

SEQ ID NO: 108801 - DNA, 15 bp, Homo sapiens
aatctaacggatgcc

SEQ ID NO: 108802 - DNA, 15 bp, Homo sapiens
aaatctaacggatgc

SEQ ID NO: 108803 - DNA, 15 bp, Homo sapiens
gaaatctaacggatg

SEQ ID NO: 108804 - DNA, 15 bp, Homo sapiens
tgaaatctaacggat

SEQ ID NO: 108805 - DNA, 15 bp, Homo sapiens
ttgaaatctaacgga

SEQ ID NO: 108806 - DNA, 15 bp, Homo sapiens
attgaaatctaacgg

SEQ ID NO: 108807 - DNA, 15 bp, Homo sapiens
tattgaaatctaacg

SEQ ID NO: 108808 - DNA, 15 bp, Homo sapiens
atattgaaatctaac

SEQ ID NO: 108809 - DNA, 15 bp, Homo sapiens
catattgaaatctaa

SEQ ID NO: 108810 - DNA, 15 bp, Homo sapiens
ccatattgaaatcta

SEQ ID NO: 108811 - DNA, 15 bp, Homo sapiens
tccatattgaaatct

SEQ ID NO: 108812 - DNA, 15 bp, Homo sapiens
ttccatattgaaatc

SEQ ID NO: 108813 - DNA, 15 bp, Homo sapiens
tttccatattgaaat

SEQ ID NO: 108814 - DNA, 15 bp, Homo sapiens
ttttccatattgaaa

SEQ ID NO: 108815 - DNA, 15 bp, Homo sapiens
tttttccatattgaa

SEQ ID NO: 108816 - DNA, 15 bp, Homo sapiens
atttttccatattga

SEQ ID NO: 108817 - DNA, 15 bp, Homo sapiens
tatttttccatattg

SEQ ID NO: 108818 - DNA, 15 bp, Homo sapiens
gtatttttccatatt

SEQ ID NO: 108819 - DNA, 15 bp, Homo sapiens
agtatttttccatat

SEQ ID NO: 108820 - DNA, 15 bp, Homo sapiens
aagtatttttccata

SEQ ID NO: 108821 - DNA, 15 bp, Homo sapiens
gaagtatttttccat

SEQ ID NO: 108822 - DNA, 15 bp, Homo sapiens
tgaagtatttttcca

SEQ ID NO: 108823 - DNA, 15 bp, Homo sapiens
atgaagtatttttcc

SEQ ID NO: 108824 - DNA, 15 bp, Homo sapiens
aatgaagtatttttc

SEQ ID NO: 108825 - DNA, 15 bp, Homo sapiens
aaatgaagtattttt

SEQ ID NO: 108826 - DNA, 15 bp, Homo sapiens
aaaatgaagtatttt

SEQ ID NO: 108827 - DNA, 15 bp, Homo sapiens
aaaaatgaagtattt

SEQ ID NO: 108828 - DNA, 15 bp, Homo sapiens
aaaaaatgaagtatt

SEQ ID NO: 108829 - DNA, 15 bp, Homo sapiens
caaaaaatgaagtat

SEQ ID NO: 108830 - DNA, 15 bp, Homo sapiens
acaaaaaatgaagta

SEQ ID NO: 108831 - DNA, 15 bp, Homo sapiens
aacaaaaaatgaagt

SEQ ID NO: 108832 - DNA, 15 bp, Homo sapiens
aaacaaaaaatgaag

SEQ ID NO: 108833 - DNA, 15 bp, Homo sapiens
aaaacaaaaaatgaa

SEQ ID NO: 108834 - DNA, 15 bp, Homo sapiens
taaaacaaaaaatga

SEQ ID NO: 108835 - DNA, 15 bp, Homo sapiens
ttaaaacaaaaaatg

SEQ ID NO: 108836 - DNA, 15 bp, Homo sapiens
cttaaaacaaaaaat

SEQ ID NO: 108837 - DNA, 15 bp, Homo sapiens
ccttaaaacaaaaaa

SEQ ID NO: 108838 - DNA, 15 bp, Homo sapiens
tccttaaaacaaaaa

SEQ ID NO: 108839 - DNA, 15 bp, Homo sapiens
atccttaaaacaaaa

SEQ ID NO: 108840 - DNA, 15 bp, Homo sapiens
tatccttaaaacaaa

SEQ ID NO: 108841 - DNA, 15 bp, Homo sapiens
ttatccttaaaacaa

SEQ ID NO: 108842 - DNA, 15 bp, Homo sapiens
cttatccttaaaaca

SEQ ID NO: 108843 - DNA, 15 bp, Homo sapiens
gcttatccttaaaac

SEQ ID NO: 108844 - DNA, 15 bp, Homo sapiens
tgcttatccttaaaa

SEQ ID NO: 108845 - DNA, 15 bp, Homo sapiens
ttgcttatccttaaa

SEQ ID NO: 108846 - DNA, 15 bp, Homo sapiens
attgcttatccttaa

SEQ ID NO: 108847 - DNA, 15 bp, Homo sapiens
cattgcttatcctta

SEQ ID NO: 108848 - DNA, 15 bp, Homo sapiens
acattgcttatcctt

SEQ ID NO: 108849 - DNA, 15 bp, Homo sapiens
aacattgcttatcct

SEQ ID NO: 108850 - DNA, 15 bp, Homo sapiens
aaacattgcttatcc

SEQ ID NO: 108851 - DNA, 15 bp, Homo sapiens
taaacattgcttatc

SEQ ID NO: 108852 - DNA, 15 bp, Homo sapiens
ttaaacattgcttat

SEQ ID NO: 108853 - DNA, 15 bp, Homo sapiens
cttaaacattgctta

SEQ ID NO: 108854 - DNA, 15 bp, Homo sapiens
ccttaaacattgctt

SEQ ID NO: 108855 - DNA, 15 bp, Homo sapiens
tccttaaacattgct

SEQ ID NO: 108856 - DNA, 15 bp, Homo sapiens
atccttaaacattgc

SEQ ID NO: 108857 - DNA, 15 bp, Homo sapiens
tatccttaaacattg

SEQ ID NO: 108858 - DNA, 15 bp, Homo sapiens
ttatccttaaacatt

SEQ ID NO: 108859 - DNA, 15 bp, Homo sapiens
cttatccttaaacat

SEQ ID NO: 108860 - DNA, 15 bp, Homo sapiens
gcttatccttaaaca

SEQ ID NO: 108861 - DNA, 15 bp, Homo sapiens
agcttatccttaaac

SEQ ID NO: 108862 - DNA, 15 bp, Homo sapiens
gagcttatccttaaa

SEQ ID NO: 108863 - DNA, 15 bp, Homo sapiens
tgagcttatccttaa

SEQ ID NO: 108864 - DNA, 15 bp, Homo sapiens
ttgagcttatcctta

SEQ ID NO: 108865 - DNA, 15 bp, Homo sapiens
attgagcttatcctt

SEQ ID NO: 108866 - DNA, 15 bp, Homo sapiens
cattgagcttatcct

SEQ ID NO: 108867 - DNA, 15 bp, Homo sapiens
acattgagcttatcc

SEQ ID NO: 108868 - DNA, 15 bp, Homo sapiens
aacattgagcttatc

SEQ ID NO: 108869 - DNA, 15 bp, Homo sapiens
aaacattgagcttat

SEQ ID NO: 108870 - DNA, 15 bp, Homo sapiens
aaaacattgagctta

SEQ ID NO: 108871 - DNA, 15 bp, Homo sapiens
taaaacattgagctt

SEQ ID NO: 108872 - DNA, 15 bp, Homo sapiens
ttaaaacattgagct

SEQ ID NO: 108873 - DNA, 15 bp, Homo sapiens
cttaaaacattgagc

SEQ ID NO: 108874 - DNA, 15 bp, Homo sapiens
ccttaaaacattgag

SEQ ID NO: 108875 - DNA, 15 bp, Homo sapiens
tccttaaaacattga

SEQ ID NO: 108876 - DNA, 15 bp, Homo sapiens
atccttaaaacattg

SEQ ID NO: 108877 - DNA, 15 bp, Homo sapiens
tatccttaaaacatt

SEQ ID NO: 108878 - DNA, 15 bp, Homo sapiens
ttatccttaaaacat

SEQ ID NO: 108879 - DNA, 15 bp, Homo sapiens
tttgcttatccttaa

SEQ ID NO: 108880 - DNA, 15 bp, Homo sapiens
ctttgcttatcctta

SEQ ID NO: 108881 - DNA, 15 bp, Homo sapiens
tctttgcttatcctt

SEQ ID NO: 108882 - DNA, 15 bp, Homo sapiens
ctctttgcttatcct

SEQ ID NO: 108883 - DNA, 15 bp, Homo sapiens
gctctttgcttatcc

SEQ ID NO: 108884 - DNA, 15 bp, Homo sapiens
agctctttgcttatc

SEQ ID NO: 108885 - DNA, 15 bp, Homo sapiens
gagctctttgcttat

SEQ ID NO: 108886 - DNA, 15 bp, Homo sapiens
agagctctttgctta

SEQ ID NO: 108887 - DNA, 15 bp, Homo sapiens
tagagctctttgctt

SEQ ID NO: 108888 - DNA, 15 bp, Homo sapiens
ctagagctctttgct

SEQ ID NO: 108889 - DNA, 15 bp, Homo sapiens
tctagagctctttgc

SEQ ID NO: 108890 - DNA, 15 bp, Homo sapiens
ttctagagctctttg

SEQ ID NO: 108891 - DNA, 15 bp, Homo sapiens
gttctagagctcttt

SEQ ID NO: 108892 - DNA, 15 bp, Homo sapiens
agttctagagctctt

SEQ ID NO: 108893 - DNA, 15 bp, Homo sapiens
gagttctagagctct

SEQ ID NO: 108894 - DNA, 15 bp, Homo sapiens
agagttctagagctc

SEQ ID NO: 108895 - DNA, 15 bp, Homo sapiens
tagagttctagagct

SEQ ID NO: 108896 - DNA, 15 bp, Homo sapiens
ttagagttctagagc

SEQ ID NO: 108897 - DNA, 15 bp, Homo sapiens
attagagttctagag

SEQ ID NO: 108898 - DNA, 15 bp, Homo sapiens
aattagagttctaga

SEQ ID NO: 108899 - DNA, 15 bp, Homo sapiens
gaattagagttctag

SEQ ID NO: 108900 - DNA, 15 bp, Homo sapiens
agaattagagttcta

SEQ ID NO: 108901 - DNA, 15 bp, Homo sapiens
gagaattagagttct

SEQ ID NO: 108902 - DNA, 15 bp, Homo sapiens
agagaattagagttc

SEQ ID NO: 108903 - DNA, 15 bp, Homo sapiens
aagagaattagagtt

SEQ ID NO: 108904 - DNA, 15 bp, Homo sapiens
aaagagaattagagt

SEQ ID NO: 108905 - DNA, 15 bp, Homo sapiens
aaaagagaattagag

SEQ ID NO: 108906 - DNA, 15 bp, Homo sapiens
aaaaagagaattaga

SEQ ID NO: 108907 - DNA, 15 bp, Homo sapiens
aaaaaagagaattag

SEQ ID NO: 108908 - DNA, 15 bp, Homo sapiens
aaaaaaagagaatta

SEQ ID NO: 108909 - DNA, 15 bp, Homo sapiens
aaaaaaaagagaatt

SEQ ID NO: 108910 - DNA, 15 bp, Homo sapiens
aaaaaaaaagagaat

SEQ ID NO: 108911 - DNA, 15 bp, Homo sapiens
atctcgccactgcac

SEQ ID NO: 108912 - DNA, 15 bp, Homo sapiens
gatctcgccactgca

SEQ ID NO: 108913 - DNA, 15 bp, Homo sapiens
agatctcgccactgc

SEQ ID NO: 108914 - DNA, 15 bp, Homo sapiens
gagatctcgccactg

SEQ ID NO: 108915 - DNA, 15 bp, Homo sapiens
cgagatctcgccact

SEQ ID NO: 108916 - DNA, 15 bp, Homo sapiens
ccgagatctcgccac

SEQ ID NO: 108917 - DNA, 15 bp, Homo sapiens
gccgagatctcgcca

SEQ ID NO: 108918 - DNA, 15 bp, Homo sapiens
agccgagatctcgcc

SEQ ID NO: 108919 - DNA, 15 bp, Homo sapiens
gagccgagatctcgc

SEQ ID NO: 108920 - DNA, 15 bp, Homo sapiens
tgagccgagatctcg

SEQ ID NO: 108921 - DNA, 15 bp, Homo sapiens
gtgagccgagatctc

SEQ ID NO: 108922 - DNA, 15 bp, Homo sapiens
agtgagccgagatct

SEQ ID NO: 108923 - DNA, 15 bp, Homo sapiens
ccagtgagccgagat

SEQ ID NO: 108924 - DNA, 15 bp, Homo sapiens
tccagtgagccgaga

SEQ ID NO: 108925 - DNA, 15 bp, Homo sapiens
ttccagtgagccgag

SEQ ID NO: 108926 - DNA, 15 bp, Homo sapiens
cttccagtgagccga

SEQ ID NO: 108927 - DNA, 15 bp, Homo sapiens
gcttccagtgagccg

SEQ ID NO: 108928 - DNA, 15 bp, Homo sapiens
agcttccagtgagcc

SEQ ID NO: 108929 - DNA, 15 bp, Homo sapiens
gagcttccagtgagc

SEQ ID NO: 108930 - DNA, 15 bp, Homo sapiens
ggagcttccagtgag

SEQ ID NO: 108931 - DNA, 15 bp, Homo sapiens
cggagcttccagtga

SEQ ID NO: 108932 - DNA, 15 bp, Homo sapiens
gcggagcttccagtg

SEQ ID NO: 108933 - DNA, 15 bp, Homo sapiens
ggcggagcttccagt

SEQ ID NO: 108934 - DNA, 15 bp, Homo sapiens
aggcggagcttccag

SEQ ID NO: 108935 - DNA, 15 bp, Homo sapiens
aaggcggagcttcca

SEQ ID NO: 108936 - DNA, 15 bp, Homo sapiens
gaaggcggagcttcc

SEQ ID NO: 108937 - DNA, 15 bp, Homo sapiens
agaaggcggagcttc

SEQ ID NO: 108938 - DNA, 15 bp, Homo sapiens
cagaaggcggagctt

SEQ ID NO: 108939 - DNA, 15 bp, Homo sapiens
ccagaaggcggagct

SEQ ID NO: 108940 - DNA, 15 bp, Homo sapiens
cccagaaggcggagc

SEQ ID NO: 108941 - DNA, 15 bp, Homo sapiens
acccagaaggcggag

SEQ ID NO: 108942 - DNA, 15 bp, Homo sapiens
aacccagaaggcgga

SEQ ID NO: 108943 - DNA, 15 bp, Homo sapiens
gaacccagaaggcgg

SEQ ID NO: 108944 - DNA, 15 bp, Homo sapiens
tgaacccagaaggcg

SEQ ID NO: 108945 - DNA, 15 bp, Homo sapiens
gtgaacccagaaggc

SEQ ID NO: 108946 - DNA, 15 bp, Homo sapiens
cgtgaacccagaagg

SEQ ID NO: 108947 - DNA, 15 bp, Homo sapiens
gcgtgaacccagaag

SEQ ID NO: 108948 - DNA, 15 bp, Homo sapiens
ggcgtgaacccagaa

SEQ ID NO: 108949 - DNA, 15 bp, Homo sapiens
tggcgtgaacccaga

SEQ ID NO: 108950 - DNA, 15 bp, Homo sapiens
atggcgtgaacccag

SEQ ID NO: 108951 - DNA, 15 bp, Homo sapiens
aatggcgtgaaccca

SEQ ID NO: 108952 - DNA, 15 bp, Homo sapiens
ggaatggcgtgaacc

SEQ ID NO: 108953 - DNA, 15 bp, Homo sapiens
gggaatggcgtgaac

SEQ ID NO: 108954 - DNA, 15 bp, Homo sapiens
ggggaatggcgtgaa

SEQ ID NO: 108955 - DNA, 15 bp, Homo sapiens
aggggaatggcgtga

SEQ ID NO: 108956 - DNA, 15 bp, Homo sapiens
caggggaatggcgtg

SEQ ID NO: 108957 - DNA, 15 bp, Homo sapiens
gcaggggaatggcgt

SEQ ID NO: 108958 - DNA, 15 bp, Homo sapiens
ggcaggggaatggcg

SEQ ID NO: 108959 - DNA, 15 bp, Homo sapiens
aggcaggggaatggc

SEQ ID NO: 108960 - DNA, 15 bp, Homo sapiens
gaggcaggggaatgg

SEQ ID NO: 108961 - DNA, 15 bp, Homo sapiens
tgaggcaggggaatg

SEQ ID NO: 108962 - DNA, 15 bp, Homo sapiens
ctgaggcaggggaat

SEQ ID NO: 108963 - DNA, 15 bp, Homo sapiens
gctgaggcaggggaa

SEQ ID NO: 108964 - DNA, 15 bp, Homo sapiens
ggctgaggcagggga

SEQ ID NO: 108965 - DNA, 15 bp, Homo sapiens
aggctgaggcagggg

SEQ ID NO: 108966 - DNA, 15 bp, Homo sapiens
gaggctgaggcaggg

SEQ ID NO: 108967 - DNA, 15 bp, Homo sapiens
gtcccagctactagg

SEQ ID NO: 108968 - DNA, 15 bp, Homo sapiens
agtcccagctactag

SEQ ID NO: 108969 - DNA, 15 bp, Homo sapiens
tagtcccagctacta

SEQ ID NO: 108970 - DNA, 15 bp, Homo sapiens
gcatgcctgtagtcc

SEQ ID NO: 108971 - DNA, 15 bp, Homo sapiens
tgcatgcctgtagtc

SEQ ID NO: 108972 - DNA, 15 bp, Homo sapiens
gggtgtggtggtgca

SEQ ID NO: 108973 - DNA, 15 bp, Homo sapiens
tgggtgtggtggtgc

SEQ ID NO: 108974 - DNA, 15 bp, Homo sapiens
ctgggtgtggtggtg

SEQ ID NO: 108975 - DNA, 15 bp, Homo sapiens
gctgggtgtggtggt

SEQ ID NO: 108976 - DNA, 15 bp, Homo sapiens
agctgggtgtggtgg

SEQ ID NO: 108977 - DNA, 15 bp, Homo sapiens
tagctgggtgtggtg

SEQ ID NO: 108978 - DNA, 15 bp, Homo sapiens
ttagctgggtgtggt

SEQ ID NO: 108979 - DNA, 15 bp, Homo sapiens
attagctgggtgtgg

SEQ ID NO: 108980 - DNA, 15 bp, Homo sapiens
aattagctgggtgtg

SEQ ID NO: 108981 - DNA, 15 bp, Homo sapiens
aaattagctgggtgt

SEQ ID NO: 108982 - DNA, 15 bp, Homo sapiens
aaaattagctgggtg

SEQ ID NO: 108983 - DNA, 15 bp, Homo sapiens
aaaaattagctgggt

SEQ ID NO: 108984 - DNA, 15 bp, Homo sapiens
caaaaatacaaaaat

SEQ ID NO: 108985 - DNA, 15 bp, Homo sapiens
ccaaaaatacaaaaa

SEQ ID NO: 108986 - DNA, 15 bp, Homo sapiens
accaaaaatacaaaa

SEQ ID NO: 108987 - DNA, 15 bp, Homo sapiens
taccaaaaatacaaa

SEQ ID NO: 108988 - DNA, 15 bp, Homo sapiens
ctaccaaaaatacaa

SEQ ID NO: 108989 - DNA, 15 bp, Homo sapiens
tctaccaaaaataca

SEQ ID NO: 108990 - DNA, 15 bp, Homo sapiens
ctctaccaaaaatac

SEQ ID NO: 108991 - DNA, 15 bp, Homo sapiens
tctctaccaaaaata

SEQ ID NO: 108992 - DNA, 15 bp, Homo sapiens
atctctaccaaaaat

SEQ ID NO: 108993 - DNA, 15 bp, Homo sapiens
catctctaccaaaaa

SEQ ID NO: 108994 - DNA, 15 bp, Homo sapiens
ccatctctaccaaaa

SEQ ID NO: 108995 - DNA, 15 bp, Homo sapiens
cccatctctaccaaa

SEQ ID NO: 108996 - DNA, 15 bp, Homo sapiens
ccccatctctaccaa

SEQ ID NO: 108997 - DNA, 15 bp, Homo sapiens
gccccatctctacca

SEQ ID NO: 108998 - DNA, 15 bp, Homo sapiens
agccccatctctacc

SEQ ID NO: 108999 - DNA, 15 bp, Homo sapiens
aagccccatctctac

SEQ ID NO: 109000 - DNA, 15 bp, Homo sapiens
gaagccccatctcta

SEQ ID NO: 109001 - DNA, 15 bp, Homo sapiens
tgaagccccatctct

SEQ ID NO: 109002 - DNA, 15 bp, Homo sapiens
gtgaagccccatctc

SEQ ID NO: 109003 - DNA, 15 bp, Homo sapiens
agtgaagccccatct

SEQ ID NO: 109004 - DNA, 15 bp, Homo sapiens
tagtgaagccccatc

SEQ ID NO: 109005 - DNA, 15 bp, Homo sapiens
gtagtgaagccccat

SEQ ID NO: 109006 - DNA, 15 bp, Homo sapiens
cgtagtgaagcccca

SEQ ID NO: 109007 - DNA, 15 bp, Homo sapiens
acgtagtgaagcccc

SEQ ID NO: 109008 - DNA, 15 bp, Homo sapiens
aacgtagtgaagccc

SEQ ID NO: 109009 - DNA, 15 bp, Homo sapiens
caacgtagtgaagcc

SEQ ID NO: 109010 - DNA, 15 bp, Homo sapiens
tcaacgtagtgaagc

SEQ ID NO: 109011 - DNA, 15 bp, Homo sapiens
gtcaacgtagtgaag

SEQ ID NO: 109012 - DNA, 15 bp, Homo sapiens
ggtcaacgtagtgaa

SEQ ID NO: 109013 - DNA, 15 bp, Homo sapiens
tggtcaacgtagtga

SEQ ID NO: 109014 - DNA, 15 bp, Homo sapiens
ctggtcaacgtagtg

SEQ ID NO: 109015 - DNA, 15 bp, Homo sapiens
cctggtcaacgtagt

SEQ ID NO: 109016 - DNA, 15 bp, Homo sapiens
gcctggtcaacgtag

SEQ ID NO: 109017 - DNA, 15 bp, Homo sapiens
cgcctggtcaacgta

SEQ ID NO: 109018 - DNA, 15 bp, Homo sapiens
ccgcctggtcaacgt

SEQ ID NO: 109019 - DNA, 15 bp, Homo sapiens
tccgcctggtcaacg

SEQ ID NO: 109020 - DNA, 15 bp, Homo sapiens
atccgcctggtcaac

SEQ ID NO: 109021 - DNA, 15 bp, Homo sapiens
gatccgcctggtcaa

SEQ ID NO: 109022 - DNA, 15 bp, Homo sapiens
agatccgcctggtca

SEQ ID NO: 109023 - DNA, 15 bp, Homo sapiens
aagatccgcctggtc

SEQ ID NO: 109024 - DNA, 15 bp, Homo sapiens
caagatccgcctggt

SEQ ID NO: 109025 - DNA, 15 bp, Homo sapiens
tcaagatccgcctgg

SEQ ID NO: 109026 - DNA, 15 bp, Homo sapiens
ttcaagatccgcctg

SEQ ID NO: 109027 - DNA, 15 bp, Homo sapiens
attcaagatccgcct

SEQ ID NO: 109028 - DNA, 15 bp, Homo sapiens
aattcaagatccgcc

SEQ ID NO: 109029 - DNA, 15 bp, Homo sapiens
gaattcaagatccgc

SEQ ID NO: 109030 - DNA, 15 bp, Homo sapiens
agaattcaagatccg

SEQ ID NO: 109031 - DNA, 15 bp, Homo sapiens
aagaattcaagatcc

SEQ ID NO: 109032 - DNA, 15 bp, Homo sapiens
caagaattcaagatc

SEQ ID NO: 109033 - DNA, 15 bp, Homo sapiens
tcaagaattcaagat

SEQ ID NO: 109034 - DNA, 15 bp, Homo sapiens
gtcaagaattcaaga

SEQ ID NO: 109035 - DNA, 15 bp, Homo sapiens
ggtcaagaattcaag

SEQ ID NO: 109036 - DNA, 15 bp, Homo sapiens
aggtcaagaattcaa

SEQ ID NO: 109037 - DNA, 15 bp, Homo sapiens
gaggtcaagaattca

SEQ ID NO: 109038 - DNA, 15 bp, Homo sapiens
tgaggtcaagaattc

SEQ ID NO: 109039 - DNA, 15 bp, Homo sapiens
ttgaggtcaagaatt

SEQ ID NO: 109040 - DNA, 15 bp, Homo sapiens
cttgaggtcaagaat

SEQ ID NO: 109041 - DNA, 15 bp, Homo sapiens
acttgaggtcaagaa

SEQ ID NO: 109042 - DNA, 15 bp, Homo sapiens
cacttgaggtcaaga

SEQ ID NO: 109043 - DNA, 15 bp, Homo sapiens
tcacttgaggtcaag

SEQ ID NO: 109044 - DNA, 15 bp, Homo sapiens
atcacttgaggtcaa

SEQ ID NO: 109045 - DNA, 15 bp, Homo sapiens
gaatcacttgaggtc

SEQ ID NO: 109046 - DNA, 15 bp, Homo sapiens
cgaatcacttgaggt

SEQ ID NO: 109047 - DNA, 15 bp, Homo sapiens
gcgaatcacttgagg

SEQ ID NO: 109048 - DNA, 15 bp, Homo sapiens
ggcgaatcacttgag

SEQ ID NO: 109049 - DNA, 15 bp, Homo sapiens
gggcgaatcacttga

SEQ ID NO: 109050 - DNA, 15 bp, Homo sapiens
cgggcgaatcacttg

SEQ ID NO: 109051 - DNA, 15 bp, Homo sapiens
gcgggcgaatcactt

SEQ ID NO: 109052 - DNA, 15 bp, Homo sapiens
ggcgggcgaatcact

SEQ ID NO: 109053 - DNA, 15 bp, Homo sapiens
cgaggcgggcgaatc

SEQ ID NO: 109054 - DNA, 15 bp, Homo sapiens
ccgaggcgggcgaat

SEQ ID NO: 109055 - DNA, 15 bp, Homo sapiens
gccgaggcgggcgaa

SEQ ID NO: 109056 - DNA, 15 bp, Homo sapiens
ggccgaggcgggcga

SEQ ID NO: 109057 - DNA, 15 bp, Homo sapiens
aaggccgaggcgggc

SEQ ID NO: 109058 - DNA, 15 bp, Homo sapiens
gaaggccgaggcggg

SEQ ID NO: 109059 - DNA, 15 bp, Homo sapiens
ggaaggccgaggcgg

SEQ ID NO: 109060 - DNA, 15 bp, Homo sapiens
tggaaggccgaggcg

SEQ ID NO: 109061 - DNA, 15 bp, Homo sapiens
ttggaaggccgaggc

SEQ ID NO: 109062 - DNA, 15 bp, Homo sapiens
tttggaaggccgagg

SEQ ID NO: 109063 - DNA, 15 bp, Homo sapiens
ctttggaaggccgag

SEQ ID NO: 109064 - DNA, 15 bp, Homo sapiens
actttggaaggccga

SEQ ID NO: 109065 - DNA, 15 bp, Homo sapiens
cactttggaaggccg

SEQ ID NO: 109066 - DNA, 15 bp, Homo sapiens
tcagcactttggaag

SEQ ID NO: 109067 - DNA, 15 bp, Homo sapiens
ctcagcactttggaa

SEQ ID NO: 109068 - DNA, 15 bp, Homo sapiens
tctcagcactttgga

SEQ ID NO: 109069 - DNA, 15 bp, Homo sapiens
atctcagcactttgg

SEQ ID NO: 109070 - DNA, 15 bp, Homo sapiens
aatctcagcactttg

SEQ ID NO: 109071 - DNA, 15 bp, Homo sapiens
taatctcagcacttt

SEQ ID NO: 109072 - DNA, 15 bp, Homo sapiens
ataatctcagcactt

SEQ ID NO: 109073 - DNA, 15 bp, Homo sapiens
tataatctcagcact

SEQ ID NO: 109074 - DNA, 15 bp, Homo sapiens
ctataatctcagcac

SEQ ID NO: 109075 - DNA, 15 bp, Homo sapiens
cctataatctcagca

SEQ ID NO: 109076 - DNA, 15 bp, Homo sapiens
gcctataatctcagc

SEQ ID NO: 109077 - DNA, 15 bp, Homo sapiens
cgcctataatctcag

SEQ ID NO: 109078 - DNA, 15 bp, Homo sapiens
acgcctataatctca

SEQ ID NO: 109079 - DNA, 15 bp, Homo sapiens
cacgcctataatctc

SEQ ID NO: 109080 - DNA, 15 bp, Homo sapiens
tcacgcctataatct

SEQ ID NO: 109081 - DNA, 15 bp, Homo sapiens
tgggcgcggtggctc

SEQ ID NO: 109082 - DNA, 15 bp, Homo sapiens
ctgggcgcggtggct

SEQ ID NO: 109083 - DNA, 15 bp, Homo sapiens
actgggcgcggtggc

SEQ ID NO: 109084 - DNA, 15 bp, Homo sapiens
gactgggcgcggtgg

SEQ ID NO: 109085 - DNA, 15 bp, Homo sapiens
agactgggcgcggtg

SEQ ID NO: 109086 - DNA, 15 bp, Homo sapiens
gagactgggcgcggt

SEQ ID NO: 109087 - DNA, 15 bp, Homo sapiens
agagactgggcgcgg

SEQ ID NO: 109088 - DNA, 15 bp, Homo sapiens
tagagactgggcgcg

SEQ ID NO: 109089 - DNA, 15 bp, Homo sapiens
ttagagactgggcgc

SEQ ID NO: 109090 - DNA, 15 bp, Homo sapiens
attagagactgggcg

SEQ ID NO: 109091 - DNA, 15 bp, Homo sapiens
aattagagactgggc

SEQ ID NO: 109092 - DNA, 15 bp, Homo sapiens
gaattagagactggg

SEQ ID NO: 109093 - DNA, 15 bp, Homo sapiens
tgaattagagactgg

SEQ ID NO: 109094 - DNA, 15 bp, Homo sapiens
atgaattagagactg

SEQ ID NO: 109095 - DNA, 15 bp, Homo sapiens
aatgaattagagact

SEQ ID NO: 109096 - DNA, 15 bp, Homo sapiens
aaatgaattagagac

SEQ ID NO: 109097 - DNA, 15 bp, Homo sapiens
aaaatgaattagaga

SEQ ID NO: 109098 - DNA, 15 bp, Homo sapiens
aaaaatgaattagag

SEQ ID NO: 109099 - DNA, 15 bp, Homo sapiens
taaaaatgaattaga

SEQ ID NO: 109100 - DNA, 15 bp, Homo sapiens
ataaaaatgaattag

SEQ ID NO: 109101 - DNA, 15 bp, Homo sapiens
gataaaaatgaatta

SEQ ID NO: 109102 - DNA, 15 bp, Homo sapiens
agataaaaatgaatt

SEQ ID NO: 109103 - DNA, 15 bp, Homo sapiens
gagataaaaatgaat

SEQ ID NO: 109104 - DNA, 15 bp, Homo sapiens
ggagataaaaatgaa

SEQ ID NO: 109105 - DNA, 15 bp, Homo sapiens
tggagataaaaatga

SEQ ID NO: 109106 - DNA, 15 bp, Homo sapiens
ctggagataaaaatg

SEQ ID NO: 109107 - DNA, 15 bp, Homo sapiens
tctggagataaaaat

SEQ ID NO: 109108 - DNA, 15 bp, Homo sapiens
gtctggagataaaaa

SEQ ID NO: 109109 - DNA, 15 bp, Homo sapiens
agtctggagataaaa

SEQ ID NO: 109110 - DNA, 15 bp, Homo sapiens
gagtctggagataaa

SEQ ID NO: 109111 - DNA, 15 bp, Homo sapiens
tgagtctggagataa

SEQ ID NO: 109112 - DNA, 15 bp, Homo sapiens
atgagtctggagata

SEQ ID NO: 109113 - DNA, 15 bp, Homo sapiens
gatgagtctggagat

SEQ ID NO: 109114 - DNA, 15 bp, Homo sapiens
tgatgagtctggaga

SEQ ID NO: 109115 - DNA, 15 bp, Homo sapiens
atgatgagtctggag

SEQ ID NO: 109116 - DNA, 15 bp, Homo sapiens
tatgatgagtctgga

SEQ ID NO: 109117 - DNA, 15 bp, Homo sapiens
atatgatgagtctgg

SEQ ID NO: 109118 - DNA, 15 bp, Homo sapiens
tatatgatgagtctg

SEQ ID NO: 109119 - DNA, 15 bp, Homo sapiens
atatatgatgagtct

SEQ ID NO: 109120 - DNA, 15 bp, Homo sapiens
aatatatgatgagtc

SEQ ID NO: 109121 - DNA, 15 bp, Homo sapiens
taatatatgatgagt

SEQ ID NO: 109122 - DNA, 15 bp, Homo sapiens
ataatatatgatgag

SEQ ID NO: 109123 - DNA, 15 bp, Homo sapiens
aataatatatgatga

SEQ ID NO: 109124 - DNA, 15 bp, Homo sapiens
taataatatatgatg

SEQ ID NO: 109125 - DNA, 15 bp, Homo sapiens
ataataatatatgat

SEQ ID NO: 109126 - DNA, 15 bp, Homo sapiens
tataataatatatga

SEQ ID NO: 109127 - DNA, 15 bp, Homo sapiens
atataataatatatg

SEQ ID NO: 109128 - DNA, 15 bp, Homo sapiens
tatataataatatat

SEQ ID NO: 109129 - DNA, 15 bp, Homo sapiens
ttatataataatata

SEQ ID NO: 109130 - DNA, 15 bp, Homo sapiens
tttatataataatat

SEQ ID NO: 109131 - DNA, 15 bp, Homo sapiens
ttttatataataata

SEQ ID NO: 109132 - DNA, 15 bp, Homo sapiens
gttttatataataat

SEQ ID NO: 109133 - DNA, 15 bp, Homo sapiens
tgttttatataataa

SEQ ID NO: 109134 - DNA, 15 bp, Homo sapiens
ttgttttatataata

SEQ ID NO: 109135 - DNA, 15 bp, Homo sapiens
tttgttttatataat

SEQ ID NO: 109136 - DNA, 15 bp, Homo sapiens
ctttgttttatataa

SEQ ID NO: 109137 - DNA, 15 bp, Homo sapiens
tctttgttttatata

SEQ ID NO: 109138 - DNA, 15 bp, Homo sapiens
ttctttgttttatat

SEQ ID NO: 109139 - DNA, 15 bp, Homo sapiens
attctttgttttata

SEQ ID NO: 109140 - DNA, 15 bp, Homo sapiens
aattctttgttttat

SEQ ID NO: 109141 - DNA, 15 bp, Homo sapiens
taattctttgtttta

SEQ ID NO: 109142 - DNA, 15 bp, Homo sapiens
ataattctttgtttt

SEQ ID NO: 109143 - DNA, 15 bp, Homo sapiens
tataattctttgttt

SEQ ID NO: 109144 - DNA, 15 bp, Homo sapiens
atataattctttgtt

SEQ ID NO: 109145 - DNA, 15 bp, Homo sapiens
tatataattctttgt

SEQ ID NO: 109146 - DNA, 15 bp, Homo sapiens
atatataattctttg

SEQ ID NO: 109147 - DNA, 15 bp, Homo sapiens
aatatataattcttt

SEQ ID NO: 109148 - DNA, 15 bp, Homo sapiens
aaatatataattctt

SEQ ID NO: 109149 - DNA, 15 bp, Homo sapiens
aaaatatataattct

SEQ ID NO: 109150 - DNA, 15 bp, Homo sapiens
aaaaatatataattc

SEQ ID NO: 109151 - DNA, 15 bp, Homo sapiens
aaaaaatatataatt

SEQ ID NO: 109152 - DNA, 15 bp, Homo sapiens
aaaaaaatatataat

SEQ ID NO: 109153 - DNA, 15 bp, Homo sapiens
gaaaaaaatatataa

SEQ ID NO: 109154 - DNA, 15 bp, Homo sapiens
ggaaaaaaatatata

SEQ ID NO: 109155 - DNA, 15 bp, Homo sapiens
aggaaaaaaatatat

SEQ ID NO: 109156 - DNA, 15 bp, Homo sapiens
taggaaaaaaatata

SEQ ID NO: 109157 - DNA, 15 bp, Homo sapiens
ataggaaaaaaatat

SEQ ID NO: 109158 - DNA, 15 bp, Homo sapiens
tataggaaaaaaata

SEQ ID NO: 109159 - DNA, 15 bp, Homo sapiens
ctataggaaaaaaat

SEQ ID NO: 109160 - DNA, 15 bp, Homo sapiens
tctataggaaaaaaa

SEQ ID NO: 109161 - DNA, 15 bp, Homo sapiens
ttctataggaaaaaa

SEQ ID NO: 109162 - DNA, 15 bp, Homo sapiens
gttctataggaaaaa

SEQ ID NO: 109163 - DNA, 15 bp, Homo sapiens
agttctataggaaaa

SEQ ID NO: 109164 - DNA, 15 bp, Homo sapiens
aagttctataggaaa

SEQ ID NO: 109165 - DNA, 15 bp, Homo sapiens
aaagttctataggaa

SEQ ID NO: 109166 - DNA, 15 bp, Homo sapiens
taaagttctatagga

SEQ ID NO: 109167 - DNA, 15 bp, Homo sapiens
gtaaagttctatagg

SEQ ID NO: 109168 - DNA, 15 bp, Homo sapiens
agtaaagttctatag

SEQ ID NO: 109169 - DNA, 15 bp, Homo sapiens
gagtaaagttctata

SEQ ID NO: 109170 - DNA, 15 bp, Homo sapiens
agagtaaagttctat

SEQ ID NO: 109171 - DNA, 15 bp, Homo sapiens
aagagtaaagttcta

SEQ ID NO: 109172 - DNA, 15 bp, Homo sapiens
aaagagtaaagttct

SEQ ID NO: 109173 - DNA, 15 bp, Homo sapiens
taaagagtaaagttc

SEQ ID NO: 109174 - DNA, 15 bp, Homo sapiens
ataaagagtaaagtt

SEQ ID NO: 109175 - DNA, 15 bp, Homo sapiens
tataaagagtaaagt

SEQ ID NO: 109176 - DNA, 15 bp, Homo sapiens
ttataaagagtaaag

SEQ ID NO: 109177 - DNA, 15 bp, Homo sapiens
gttataaagagtaaa

SEQ ID NO: 109178 - DNA, 15 bp, Homo sapiens
agttataaagagtaa

SEQ ID NO: 109179 - DNA, 15 bp, Homo sapiens
aagttataaagagta

SEQ ID NO: 109180 - DNA, 15 bp, Homo sapiens
aaagttataaagagt

SEQ ID NO: 109181 - DNA, 15 bp, Homo sapiens
taaagttataaagag

SEQ ID NO: 109182 - DNA, 15 bp, Homo sapiens
ctaaagttataaaga

SEQ ID NO: 109183 - DNA, 15 bp, Homo sapiens
cctaaagttataaag

SEQ ID NO: 109184 - DNA, 15 bp, Homo sapiens
acctaaagttataaa

SEQ ID NO: 109185 - DNA, 15 bp, Homo sapiens
gacctaaagttataa

SEQ ID NO: 109186 - DNA, 15 bp, Homo sapiens
agacctaaagttata

SEQ ID NO: 109187 - DNA, 15 bp, Homo sapiens
aagacctaaagttat

SEQ ID NO: 109188 - DNA, 15 bp, Homo sapiens
aaagacctaaagtta

SEQ ID NO: 109189 - DNA, 15 bp, Homo sapiens
taaagacctaaagtt

SEQ ID NO: 109190 - DNA, 15 bp, Homo sapiens
ctaaagacctaaagt

SEQ ID NO: 109191 - DNA, 15 bp, Homo sapiens
actaaagacctaaag

SEQ ID NO: 109192 - DNA, 15 bp, Homo sapiens
tactaaagacctaaa

SEQ ID NO: 109193 - DNA, 15 bp, Homo sapiens
atactaaagacctaa

SEQ ID NO: 109194 - DNA, 15 bp, Homo sapiens
aatactaaagaccta

SEQ ID NO: 109195 - DNA, 15 bp, Homo sapiens
aaatactaaagacct

SEQ ID NO: 109196 - DNA, 15 bp, Homo sapiens
aaaatactaaagacc

SEQ ID NO: 109197 - DNA, 15 bp, Homo sapiens
taaaatactaaagac

SEQ ID NO: 109198 - DNA, 15 bp, Homo sapiens
gtaaaatactaaaga

SEQ ID NO: 109199 - DNA, 15 bp, Homo sapiens
agtaaaatactaaag

SEQ ID NO: 109200 - DNA, 15 bp, Homo sapiens
gagtaaaatactaaa

SEQ ID NO: 109201 - DNA, 15 bp, Homo sapiens
tgagtaaaatactaa

SEQ ID NO: 109202 - DNA, 15 bp, Homo sapiens
atgagtaaaatacta

SEQ ID NO: 109203 - DNA, 15 bp, Homo sapiens
aatgagtaaaatact

SEQ ID NO: 109204 - DNA, 15 bp, Homo sapiens
taatgagtaaaatac

SEQ ID NO: 109205 - DNA, 15 bp, Homo sapiens
ttaatgagtaaaata

SEQ ID NO: 109206 - DNA, 15 bp, Homo sapiens
tttaatgagtaaaat

SEQ ID NO: 109207 - DNA, 15 bp, Homo sapiens
ttttaatgagtaaaa

SEQ ID NO: 109208 - DNA, 15 bp, Homo sapiens
gttttaatgagtaaa

SEQ ID NO: 109209 - DNA, 15 bp, Homo sapiens
agttttaatgagtaa

SEQ ID NO: 109210 - DNA, 15 bp, Homo sapiens
gagttttaatgagta

SEQ ID NO: 109211 - DNA, 15 bp, Homo sapiens
tgagttttaatgagt

SEQ ID NO: 109212 - DNA, 15 bp, Homo sapiens
atgagttttaatgag

SEQ ID NO: 109213 - DNA, 15 bp, Homo sapiens
tatgagttttaatga

SEQ ID NO: 109214 - DNA, 15 bp, Homo sapiens
ctatgagttttaatg

SEQ ID NO: 109215 - DNA, 15 bp, Homo sapiens
actatgagttttaat

SEQ ID NO: 109216 - DNA, 15 bp, Homo sapiens
gactatgagttttaa

SEQ ID NO: 109217 - DNA, 15 bp, Homo sapiens
agactatgagtttta

SEQ ID NO: 109218 - DNA, 15 bp, Homo sapiens
tagactatgagtttt

SEQ ID NO: 109219 - DNA, 15 bp, Homo sapiens
ttagactatgagttt

SEQ ID NO: 109220 - DNA, 15 bp, Homo sapiens
cttagactatgagtt

SEQ ID NO: 109221 - DNA, 15 bp, Homo sapiens
tcttagactatgagt

SEQ ID NO: 109222 - DNA, 15 bp, Homo sapiens
ctcttagactatgag

SEQ ID NO: 109223 - DNA, 15 bp, Homo sapiens
cctcttagactatga

SEQ ID NO: 109224 - DNA, 15 bp, Homo sapiens
ccctcttagactatg

SEQ ID NO: 109225 - DNA, 15 bp, Homo sapiens
tccctcttagactat

SEQ ID NO: 109226 - DNA, 15 bp, Homo sapiens
ttccctcttagacta

SEQ ID NO: 109227 - DNA, 15 bp, Homo sapiens
cttccctcttagact

SEQ ID NO: 109228 - DNA, 15 bp, Homo sapiens
tcttccctcttagac

SEQ ID NO: 109229 - DNA, 15 bp, Homo sapiens
ttcttccctcttaga

SEQ ID NO: 109230 - DNA, 15 bp, Homo sapiens
gttcttccctcttag

SEQ ID NO: 109231 - DNA, 15 bp, Homo sapiens
agttcttccctctta

SEQ ID NO: 109232 - DNA, 15 bp, Homo sapiens
gagttcttccctctt

SEQ ID NO: 109233 - DNA, 15 bp, Homo sapiens
tgagttcttccctct

SEQ ID NO: 109234 - DNA, 15 bp, Homo sapiens
gtgagttcttccctc

SEQ ID NO: 109235 - DNA, 15 bp, Homo sapiens
ggtgagttcttccct

SEQ ID NO: 109236 - DNA, 15 bp, Homo sapiens
aggtgagttcttccc

SEQ ID NO: 109237 - DNA, 15 bp, Homo sapiens
aaggtgagttcttcc

SEQ ID NO: 109238 - DNA, 15 bp, Homo sapiens
gaaggtgagttcttc

SEQ ID NO: 109239 - DNA, 15 bp, Homo sapiens
agaaggtgagttctt

SEQ ID NO: 109240 - DNA, 15 bp, Homo sapiens
aagaaggtgagttct

SEQ ID NO: 109241 - DNA, 15 bp, Homo sapiens
aaagaaggtgagttc

SEQ ID NO: 109242 - DNA, 15 bp, Homo sapiens
aaaagaaggtgagtt

SEQ ID NO: 109243 - DNA, 15 bp, Homo sapiens
caaaagaaggtgagt

SEQ ID NO: 109244 - DNA, 15 bp, Homo sapiens
ccaaaagaaggtgag

SEQ ID NO: 109245 - DNA, 15 bp, Homo sapiens
tccaaaagaaggtga

SEQ ID NO: 109246 - DNA, 15 bp, Homo sapiens
ctccaaaagaaggtg

SEQ ID NO: 109247 - DNA, 15 bp, Homo sapiens
cctccaaaagaaggt

SEQ ID NO: 109248 - DNA, 15 bp, Homo sapiens
gcctccaaaagaagg

SEQ ID NO: 109249 - DNA, 15 bp, Homo sapiens
agcctccaaaagaag

SEQ ID NO: 109250 - DNA, 15 bp, Homo sapiens
aagcctccaaaagaa

SEQ ID NO: 109251 - DNA, 15 bp, Homo sapiens
aaagcctccaaaaga

SEQ ID NO: 109252 - DNA, 15 bp, Homo sapiens
aaaagcctccaaaag

SEQ ID NO: 109253 - DNA, 15 bp, Homo sapiens
gaaaagcctccaaaa

SEQ ID NO: 109254 - DNA, 15 bp, Homo sapiens
tctcggagctttcag

SEQ ID NO: 109255 - DNA, 15 bp, Homo sapiens
ctctcggagctttca

SEQ ID NO: 109256 - DNA, 15 bp, Homo sapiens
actctcggagctttc

SEQ ID NO: 109257 - DNA, 15 bp, Homo sapiens
tactctcggagcttt

SEQ ID NO: 109258 - DNA, 15 bp, Homo sapiens
ttactctcggagctt

SEQ ID NO: 109259 - DNA, 15 bp, Homo sapiens
attactctcggagct

SEQ ID NO: 109260 - DNA, 15 bp, Homo sapiens
aattactctcggagc

SEQ ID NO: 109261 - DNA, 15 bp, Homo sapiens
gaattactctcggag

SEQ ID NO: 109262 - DNA, 15 bp, Homo sapiens
agaattactctcgga

SEQ ID NO: 109263 - DNA, 15 bp, Homo sapiens
gagaattactctcgg

SEQ ID NO: 109264 - DNA, 15 bp, Homo sapiens
tgagaattactctcg

SEQ ID NO: 109265 - DNA, 15 bp, Homo sapiens
atgagaattactctc

SEQ ID NO: 109266 - DNA, 15 bp, Homo sapiens
catgagaattactct

SEQ ID NO: 109267 - DNA, 15 bp, Homo sapiens
acatgagaattactc

SEQ ID NO: 109268 - DNA, 15 bp, Homo sapiens
cacatgagaattact

SEQ ID NO: 109269 - DNA, 15 bp, Homo sapiens
gcacatgagaattac

SEQ ID NO: 109270 - DNA, 15 bp, Homo sapiens
tgcacatgagaatta

SEQ ID NO: 109271 - DNA, 15 bp, Homo sapiens
atgcacatgagaatt

SEQ ID NO: 109272 - DNA, 15 bp, Homo sapiens
aatgcacatgagaat

SEQ ID NO: 109273 - DNA, 15 bp, Homo sapiens
aaatgcacatgagaa

SEQ ID NO: 109274 - DNA, 15 bp, Homo sapiens
taaatgcacatgaga

SEQ ID NO: 109275 - DNA, 15 bp, Homo sapiens
ctaaatgcacatgag

SEQ ID NO: 109276 - DNA, 15 bp, Homo sapiens
cctaaatgcacatga

SEQ ID NO: 109277 - DNA, 15 bp, Homo sapiens
acctaaatgcacatg

SEQ ID NO: 109278 - DNA, 15 bp, Homo sapiens
aacctaaatgcacat

SEQ ID NO: 109279 - DNA, 15 bp, Homo sapiens
aaacctaaatgcaca

SEQ ID NO: 109280 - DNA, 15 bp, Homo sapiens
caaacctaaatgcac

SEQ ID NO: 109281 - DNA, 15 bp, Homo sapiens
ccaaacctaaatgca

SEQ ID NO: 109282 - DNA, 15 bp, Homo sapiens
cccaaacctaaatgc

SEQ ID NO: 109283 - DNA, 15 bp, Homo sapiens
tcccaaacctaaatg

SEQ ID NO: 109284 - DNA, 15 bp, Homo sapiens
ttcccaaacctaaat

SEQ ID NO: 109285 - DNA, 15 bp, Homo sapiens
attcccaaacctaaa

SEQ ID NO: 109286 - DNA, 15 bp, Homo sapiens
tattcccaaacctaa

SEQ ID NO: 109287 - DNA, 15 bp, Homo sapiens
ctattcccaaaccta

SEQ ID NO: 109288 - DNA, 15 bp, Homo sapiens
tctattcccaaacct

SEQ ID NO: 109289 - DNA, 15 bp, Homo sapiens
atctattcccaaacc

SEQ ID NO: 109290 - DNA, 15 bp, Homo sapiens
gatctattcccaaac

SEQ ID NO: 109291 - DNA, 15 bp, Homo sapiens
tgatctattcccaaa

SEQ ID NO: 109292 - DNA, 15 bp, Homo sapiens
gtgatctattcccaa

SEQ ID NO: 109293 - DNA, 15 bp, Homo sapiens
agtgatctattccca

SEQ ID NO: 109294 - DNA, 15 bp, Homo sapiens
cagtgatctattccc

SEQ ID NO: 109295 - DNA, 15 bp, Homo sapiens
acagtgatctattcc

SEQ ID NO: 109296 - DNA, 15 bp, Homo sapiens
aacagtgatctattc

SEQ ID NO: 109297 - DNA, 15 bp, Homo sapiens
taacagtgatctatt

SEQ ID NO: 109298 - DNA, 15 bp, Homo sapiens
ttaacagtgatctat

SEQ ID NO: 109299 - DNA, 15 bp, Homo sapiens
attaacagtgatcta

SEQ ID NO: 109300 - DNA, 15 bp, Homo sapiens
aattaacagtgatct

SEQ ID NO: 109301 - DNA, 15 bp, Homo sapiens
gaattaacagtgatc

SEQ ID NO: 109302 - DNA, 15 bp, Homo sapiens
tgaattaacagtgat

SEQ ID NO: 109303 - DNA, 15 bp, Homo sapiens
ttgaattaacagtga

SEQ ID NO: 109304 - DNA, 15 bp, Homo sapiens
gttgaattaacagtg

SEQ ID NO: 109305 - DNA, 15 bp, Homo sapiens
tgttgaattaacagt

SEQ ID NO: 109306 - DNA, 15 bp, Homo sapiens
ctgttgaattaacag

SEQ ID NO: 109307 - DNA, 15 bp, Homo sapiens
tctgttgaattaaca

SEQ ID NO: 109308 - DNA, 15 bp, Homo sapiens
ctctgttgaattaac

SEQ ID NO: 109309 - DNA, 15 bp, Homo sapiens
tctctgttgaattaa

SEQ ID NO: 109310 - DNA, 15 bp, Homo sapiens
ttctctgttgaatta

SEQ ID NO: 109311 - DNA, 15 bp, Homo sapiens
tttctctgttgaatt

SEQ ID NO: 109312 - DNA, 15 bp, Homo sapiens
atttctctgttgaat

SEQ ID NO: 109313 - DNA, 15 bp, Homo sapiens
catttctctgttgaa

SEQ ID NO: 109314 - DNA, 15 bp, Homo sapiens
tcatttctctgttga

SEQ ID NO: 109315 - DNA, 15 bp, Homo sapiens
ttcatttctctgttg

SEQ ID NO: 109316 - DNA, 15 bp, Homo sapiens
tttcatttctctgtt

SEQ ID NO: 109317 - DNA, 15 bp, Homo sapiens
ctttcatttctctgt

SEQ ID NO: 109318 - DNA, 15 bp, Homo sapiens
tctttcatttctctg

SEQ ID NO: 109319 - DNA, 15 bp, Homo sapiens
ttctttcatttctct

SEQ ID NO: 109320 - DNA, 15 bp, Homo sapiens
cttctttcatttctc

SEQ ID NO: 109321 - DNA, 15 bp, Homo sapiens
tcttctttcatttct

SEQ ID NO: 109322 - DNA, 15 bp, Homo sapiens
ctcttctttcatttc

SEQ ID NO: 109323 - DNA, 15 bp, Homo sapiens
tctcttctttcattt

SEQ ID NO: 109324 - DNA, 15 bp, Homo sapiens
ttctcttctttcatt

SEQ ID NO: 109325 - DNA, 15 bp, Homo sapiens
cttctcttctttcat

SEQ ID NO: 109326 - DNA, 15 bp, Homo sapiens
ccttctcttctttca

SEQ ID NO: 109327 - DNA, 15 bp, Homo sapiens
accttctcttctttc

SEQ ID NO: 109328 - DNA, 15 bp, Homo sapiens
aaccttctcttcttt

SEQ ID NO: 109329 - DNA, 15 bp, Homo sapiens
gaaccttctcttctt

SEQ ID NO: 109330 - DNA, 15 bp, Homo sapiens
cgaaccttctcttct

SEQ ID NO: 109331 - DNA, 15 bp, Homo sapiens
ccgaaccttctcttc

SEQ ID NO: 109332 - DNA, 15 bp, Homo sapiens
accgaaccttctctt

SEQ ID NO: 109333 - DNA, 15 bp, Homo sapiens
caccgaaccttctct

SEQ ID NO: 109334 - DNA, 15 bp, Homo sapiens
ccaccgaaccttctc

SEQ ID NO: 109335 - DNA, 15 bp, Homo sapiens
cccaccgaaccttct

SEQ ID NO: 109336 - DNA, 15 bp, Homo sapiens
ccccaccgaaccttc

SEQ ID NO: 109337 - DNA, 15 bp, Homo sapiens
accccaccgaacctt

SEQ ID NO: 109338 - DNA, 15 bp, Homo sapiens
gaccccaccgaacct

SEQ ID NO: 109339 - DNA, 15 bp, Homo sapiens
ggaccccaccgaacc

SEQ ID NO: 109340 - DNA, 15 bp, Homo sapiens
tggaccccaccgaac

SEQ ID NO: 109341 - DNA, 15 bp, Homo sapiens
ctggaccccaccgaa

SEQ ID NO: 109342 - DNA, 15 bp, Homo sapiens
gctggaccccaccga

SEQ ID NO: 109343 - DNA, 15 bp, Homo sapiens
ggctggaccccaccg

SEQ ID NO: 109344 - DNA, 15 bp, Homo sapiens
tggctggaccccacc

SEQ ID NO: 109345 - DNA, 15 bp, Homo sapiens
atggctggaccccac

SEQ ID NO: 109346 - DNA, 15 bp, Homo sapiens
catggctggacccca

SEQ ID NO: 109347 - DNA, 15 bp, Homo sapiens
gcatggctggacccc

SEQ ID NO: 109348 - DNA, 15 bp, Homo sapiens
ggcatggctggaccc

SEQ ID NO: 109349 - DNA, 15 bp, Homo sapiens
gggcatggctggacc

SEQ ID NO: 109350 - DNA, 15 bp, Homo sapiens
agggcatggctggac

SEQ ID NO: 109351 - DNA, 15 bp, Homo sapiens
cagggcatggctgga

SEQ ID NO: 109352 - DNA, 15 bp, Homo sapiens
acagggcatggctgg

SEQ ID NO: 109353 - DNA, 15 bp, Homo sapiens
aacagggcatggctg

SEQ ID NO: 109354 - DNA, 15 bp, Homo sapiens
taacagggcatggct

SEQ ID NO: 109355 - DNA, 15 bp, Homo sapiens
gtaacagggcatggc

SEQ ID NO: 109356 - DNA, 15 bp, Homo sapiens
cgtaacagggcatgg

SEQ ID NO: 109357 - DNA, 15 bp, Homo sapiens
acgtaacagggcatg

SEQ ID NO: 109358 - DNA, 15 bp, Homo sapiens
cacgtaacagggcat

SEQ ID NO: 109359 - DNA, 15 bp, Homo sapiens
ccacgtaacagggca

SEQ ID NO: 109360 - DNA, 15 bp, Homo sapiens
tccacgtaacagggc

SEQ ID NO: 109361 - DNA, 15 bp, Homo sapiens
ttccacgtaacaggg

SEQ ID NO: 109362 - DNA, 15 bp, Homo sapiens
attccacgtaacagg

SEQ ID NO: 109363 - DNA, 15 bp, Homo sapiens
aattccacgtaacag

SEQ ID NO: 109364 - DNA, 15 bp, Homo sapiens
aaattccacgtaaca

SEQ ID NO: 109365 - DNA, 15 bp, Homo sapiens
aaaattccacgtaac

SEQ ID NO: 109366 - DNA, 15 bp, Homo sapiens
aaaaattccacgtaa

SEQ ID NO: 109367 - DNA, 15 bp, Homo sapiens
aaaaaattccacgta

SEQ ID NO: 109368 - DNA, 15 bp, Homo sapiens
gaaaaaattccacgt

SEQ ID NO: 109369 - DNA, 15 bp, Homo sapiens
ggaaaaaattccacg

SEQ ID NO: 109370 - DNA, 15 bp, Homo sapiens
gggaaaaaattccac

SEQ ID NO: 109371 - DNA, 15 bp, Homo sapiens
agggaaaaaattcca

SEQ ID NO: 109372 - DNA, 15 bp, Homo sapiens
tagggaaaaaattcc

SEQ ID NO: 109373 - DNA, 15 bp, Homo sapiens
ttagggaaaaaattc

SEQ ID NO: 109374 - DNA, 15 bp, Homo sapiens
cttagggaaaaaatt

SEQ ID NO: 109375 - DNA, 15 bp, Homo sapiens
ccttagggaaaaaat

SEQ ID NO: 109376 - DNA, 15 bp, Homo sapiens
cccttagggaaaaaa

SEQ ID NO: 109377 - DNA, 15 bp, Homo sapiens
acccttagggaaaaa

SEQ ID NO: 109378 - DNA, 15 bp, Homo sapiens
cacccttagggaaaa

SEQ ID NO: 109379 - DNA, 15 bp, Homo sapiens
acacccttagggaaa

SEQ ID NO: 109380 - DNA, 15 bp, Homo sapiens
cacacccttagggaa

SEQ ID NO: 109381 - DNA, 15 bp, Homo sapiens
ccacacccttaggga

SEQ ID NO: 109382 - DNA, 15 bp, Homo sapiens
accacacccttaggg

SEQ ID NO: 109383 - DNA, 15 bp, Homo sapiens
gaccacacccttagg

SEQ ID NO: 109384 - DNA, 15 bp, Homo sapiens
ggaccacacccttag

SEQ ID NO: 109385 - DNA, 15 bp, Homo sapiens
gggaccacaccctta

SEQ ID NO: 109386 - DNA, 15 bp, Homo sapiens
ggggaccacaccctt

SEQ ID NO: 109387 - DNA, 15 bp, Homo sapiens
aggggaccacaccct

SEQ ID NO: 109388 - DNA, 15 bp, Homo sapiens
gaggggaccacaccc

SEQ ID NO: 109389 - DNA, 15 bp, Homo sapiens
ggaggggaccacacc

SEQ ID NO: 109390 - DNA, 15 bp, Homo sapiens
gggaggggaccacac

SEQ ID NO: 109391 - DNA, 15 bp, Homo sapiens
ggggaggggaccaca

SEQ ID NO: 109392 - DNA, 15 bp, Homo sapiens
aggggaggggaccac

SEQ ID NO: 109393 - DNA, 15 bp, Homo sapiens
taggggaggggacca

SEQ ID NO: 109394 - DNA, 15 bp, Homo sapiens
gtaggggaggggacc

SEQ ID NO: 109395 - DNA, 15 bp, Homo sapiens
tgtaggggaggggac

SEQ ID NO: 109396 - DNA, 15 bp, Homo sapiens
ctgtaggggagggga

SEQ ID NO: 109397 - DNA, 15 bp, Homo sapiens
gctgtaggggagggg

SEQ ID NO: 109398 - DNA, 15 bp, Homo sapiens
agctgtaggggaggg

SEQ ID NO: 109399 - DNA, 15 bp, Homo sapiens
gagctgtaggggagg

SEQ ID NO: 109400 - DNA, 15 bp, Homo sapiens
cgagctgtaggggag

SEQ ID NO: 109401 - DNA, 15 bp, Homo sapiens
acgagctgtagggga

SEQ ID NO: 109402 - DNA, 15 bp, Homo sapiens
gacgagctgtagggg

SEQ ID NO: 109403 - DNA, 15 bp, Homo sapiens
agacgagctgtaggg

SEQ ID NO: 109404 - DNA, 15 bp, Homo sapiens
aagacgagctgtagg

SEQ ID NO: 109405 - DNA, 15 bp, Homo sapiens
aaagacgagctgtag

SEQ ID NO: 109406 - DNA, 15 bp, Homo sapiens
aaaagacgagctgta

SEQ ID NO: 109407 - DNA, 15 bp, Homo sapiens
caaaagacgagctgt

SEQ ID NO: 109408 - DNA, 15 bp, Homo sapiens
ccaaaagacgagctg

SEQ ID NO: 109409 - DNA, 15 bp, Homo sapiens
tccaaaagacgagct

SEQ ID NO: 109410 - DNA, 15 bp, Homo sapiens
ctccaaaagacgagc

SEQ ID NO: 109411 - DNA, 15 bp, Homo sapiens
cctccaaaagacgag

SEQ ID NO: 109412 - DNA, 15 bp, Homo sapiens
ccctccaaaagacga

SEQ ID NO: 109413 - DNA, 15 bp, Homo sapiens
gccctccaaaagacg

SEQ ID NO: 109414 - DNA, 15 bp, Homo sapiens
agccctccaaaagac

SEQ ID NO: 109415 - DNA, 15 bp, Homo sapiens
cagccctccaaaaga

SEQ ID NO: 109416 - DNA, 15 bp, Homo sapiens
ccagccctccaaaag

SEQ ID NO: 109417 - DNA, 15 bp, Homo sapiens
accagccctccaaaa

SEQ ID NO: 109418 - DNA, 15 bp, Homo sapiens
gaccagccctccaaa

SEQ ID NO: 109419 - DNA, 15 bp, Homo sapiens
ggaccagccctccaa

SEQ ID NO: 109420 - DNA, 15 bp, Homo sapiens
tggaccagccctcca

SEQ ID NO: 109421 - DNA, 15 bp, Homo sapiens
ctggaccagccctcc

SEQ ID NO: 109422 - DNA, 15 bp, Homo sapiens
cctggaccagccctc

SEQ ID NO: 109423 - DNA, 15 bp, Homo sapiens
gcctggaccagccct

SEQ ID NO: 109424 - DNA, 15 bp, Homo sapiens
agcctggaccagccc

SEQ ID NO: 109425 - DNA, 15 bp, Homo sapiens
gagcctggaccagcc

SEQ ID NO: 109426 - DNA, 15 bp, Homo sapiens
ggagcctggaccagc

SEQ ID NO: 109427 - DNA, 15 bp, Homo sapiens
aggagcctggaccag

SEQ ID NO: 109428 - DNA, 15 bp, Homo sapiens
gaggagcctggacca

SEQ ID NO: 109429 - DNA, 15 bp, Homo sapiens
agaggagcctggacc

SEQ ID NO: 109430 - DNA, 15 bp, Homo sapiens
tagaggagcctggac

SEQ ID NO: 109431 - DNA, 15 bp, Homo sapiens
ttagaggagcctgga

SEQ ID NO: 109432 - DNA, 15 bp, Homo sapiens
cttagaggagcctgg

SEQ ID NO: 109433 - DNA, 15 bp, Homo sapiens
gcttagaggagcctg

SEQ ID NO: 109434 - DNA, 15 bp, Homo sapiens
ggcttagaggagcct

SEQ ID NO: 109435 - DNA, 15 bp, Homo sapiens
tggcttagaggagcc

SEQ ID NO: 109436 - DNA, 15 bp, Homo sapiens
atggcttagaggagc

SEQ ID NO: 109437 - DNA, 15 bp, Homo sapiens
catggcttagaggag

SEQ ID NO: 109438 - DNA, 15 bp, Homo sapiens
tcatggcttagagga

SEQ ID NO: 109439 - DNA, 15 bp, Homo sapiens
gtcatggcttagagg

SEQ ID NO: 109440 - DNA, 15 bp, Homo sapiens
cgtcatggcttagag

SEQ ID NO: 109441 - DNA, 15 bp, Homo sapiens
gcgtcatggcttaga

SEQ ID NO: 109442 - DNA, 15 bp, Homo sapiens
ggcgtcatggcttag

SEQ ID NO: 109443 - DNA, 15 bp, Homo sapiens
cggcgtcatggctta

SEQ ID NO: 109444 - DNA, 15 bp, Homo sapiens
ccggcgtcatggctt

SEQ ID NO: 109445 - DNA, 15 bp, Homo sapiens
gccggcgtcatggct

SEQ ID NO: 109446 - DNA, 15 bp, Homo sapiens
agccggcgtcatggc

SEQ ID NO: 109447 - DNA, 15 bp, Homo sapiens
cagccggcgtcatgg

SEQ ID NO: 109448 - DNA, 15 bp, Homo sapiens
tcagccggcgtcatg

SEQ ID NO: 109449 - DNA, 15 bp, Homo sapiens
ctcagccggcgtcat

SEQ ID NO: 109450 - DNA, 15 bp, Homo sapiens
cctcagccggcgtca

SEQ ID NO: 109451 - DNA, 15 bp, Homo sapiens
tcctcagccggcgtc

SEQ ID NO: 109452 - DNA, 15 bp, Homo sapiens
atcctcagccggcgt

SEQ ID NO: 109453 - DNA, 15 bp, Homo sapiens
gatcctcagccggcg

SEQ ID NO: 109454 - DNA, 15 bp, Homo sapiens
tgatcctcagccggc

SEQ ID NO: 109455 - DNA, 15 bp, Homo sapiens
ctgatcctcagccgg

SEQ ID NO: 109456 - DNA, 15 bp, Homo sapiens
gctgatcctcagccg

SEQ ID NO: 109457 - DNA, 15 bp, Homo sapiens
cgctgatcctcagcc

SEQ ID NO: 109458 - DNA, 15 bp, Homo sapiens
ccgctgatcctcagc

SEQ ID NO: 109459 - DNA, 15 bp, Homo sapiens
accgctgatcctcag

SEQ ID NO: 109460 - DNA, 15 bp, Homo sapiens
aaccgctgatcctca

SEQ ID NO: 109461 - DNA, 15 bp, Homo sapiens
caaccgctgatcctc

SEQ ID NO: 109462 - DNA, 15 bp, Homo sapiens
ccaaccgctgatcct

SEQ ID NO: 109463 - DNA, 15 bp, Homo sapiens
accaaccgctgatcc

SEQ ID NO: 109464 - DNA, 15 bp, Homo sapiens
caccaaccgctgatc

SEQ ID NO: 109465 - DNA, 15 bp, Homo sapiens
acaccaaccgctgat

SEQ ID NO: 109466 - DNA, 15 bp, Homo sapiens
tacaccaaccgctga

SEQ ID NO: 109467 - DNA, 15 bp, Homo sapiens
gtacaccaaccgctg

SEQ ID NO: 109468 - DNA, 15 bp, Homo sapiens
tgtacaccaaccgct

SEQ ID NO: 109469 - DNA, 15 bp, Homo sapiens
atgtacaccaaccgc

SEQ ID NO: 109470 - DNA, 15 bp, Homo sapiens
catgtacaccaaccg

SEQ ID NO: 109471 - DNA, 15 bp, Homo sapiens
tcatgtacaccaacc

SEQ ID NO: 109472 - DNA, 15 bp, Homo sapiens
atcatgtacaccaac

SEQ ID NO: 109473 - DNA, 15 bp, Homo sapiens
gatcatgtacaccaa

SEQ ID NO: 109474 - DNA, 15 bp, Homo sapiens
agatcatgtacacca

SEQ ID NO: 109475 - DNA, 15 bp, Homo sapiens
gagatcatgtacacc

SEQ ID NO: 109476 - DNA, 15 bp, Homo sapiens
ggagatcatgtacac

SEQ ID NO: 109477 - DNA, 15 bp, Homo sapiens
aggagatcatgtaca

SEQ ID NO: 109478 - DNA, 15 bp, Homo sapiens
gaggagatcatgtac

SEQ ID NO: 109479 - DNA, 15 bp, Homo sapiens
tgaggagatcatgta

SEQ ID NO: 109480 - DNA, 15 bp, Homo sapiens
ctgaggagatcatgt

SEQ ID NO: 109481 - DNA, 15 bp, Homo sapiens
gctgaggagatcatg

SEQ ID NO: 109482 - DNA, 15 bp, Homo sapiens
ggctgaggagatcat

SEQ ID NO: 109483 - DNA, 15 bp, Homo sapiens
aggctgaggagatca

SEQ ID NO: 109484 - DNA, 15 bp, Homo sapiens
aaggctgaggagatc

SEQ ID NO: 109485 - DNA, 15 bp, Homo sapiens
caaggctgaggagat

SEQ ID NO: 109486 - DNA, 15 bp, Homo sapiens
gcaaggctgaggaga

SEQ ID NO: 109487 - DNA, 15 bp, Homo sapiens
ggcaaggctgaggag

SEQ ID NO: 109488 - DNA, 15 bp, Homo sapiens
gggcaaggctgagga

SEQ ID NO: 109489 - DNA, 15 bp, Homo sapiens
tgggcaaggctgagg

SEQ ID NO: 109490 - DNA, 15 bp, Homo sapiens
atgggcaaggctgag

SEQ ID NO: 109491 - DNA, 15 bp, Homo sapiens
aatgggcaaggctga

SEQ ID NO: 109492 - DNA, 15 bp, Homo sapiens
caatgggcaaggctg

SEQ ID NO: 109493 - DNA, 15 bp, Homo sapiens
acaatgggcaaggct

SEQ ID NO: 109494 - DNA, 15 bp, Homo sapiens
gacaatgggcaaggc

SEQ ID NO: 109495 - DNA, 15 bp, Homo sapiens
ggacaatgggcaagg

SEQ ID NO: 109496 - DNA, 15 bp, Homo sapiens
gggacaatgggcaag

SEQ ID NO: 109497 - DNA, 15 bp, Homo sapiens
agggacaatgggcaa

SEQ ID NO: 109498 - DNA, 15 bp, Homo sapiens
aagggacaatgggca

SEQ ID NO: 109499 - DNA, 15 bp, Homo sapiens
caagggacaatgggc

SEQ ID NO: 109500 - DNA, 15 bp, Homo sapiens
gcaagggacaatggg

SEQ ID NO: 109501 - DNA, 15 bp, Homo sapiens
tgcaagggacaatgg

SEQ ID NO: 109502 - DNA, 15 bp, Homo sapiens
ttgcaagggacaatg

SEQ ID NO: 109503 - DNA, 15 bp, Homo sapiens
cttgcaagggacaat

SEQ ID NO: 109504 - DNA, 15 bp, Homo sapiens
tcttgcaagggacaa

SEQ ID NO: 109505 - DNA, 15 bp, Homo sapiens
gtcttgcaagggaca

SEQ ID NO: 109506 - DNA, 15 bp, Homo sapiens
tgtcttgcaagggac

SEQ ID NO: 109507 - DNA, 15 bp, Homo sapiens
atgtcttgcaaggga

SEQ ID NO: 109508 - DNA, 15 bp, Homo sapiens
aatgtcttgcaaggg

SEQ ID NO: 109509 - DNA, 15 bp, Homo sapiens
aaatgtcttgcaagg

SEQ ID NO: 109510 - DNA, 15 bp, Homo sapiens
gaaatgtcttgcaag

SEQ ID NO: 109511 - DNA, 15 bp, Homo sapiens
agaaatgtcttgcaa

SEQ ID NO: 109512 - DNA, 15 bp, Homo sapiens
aagaaatgtcttgca

SEQ ID NO: 109513 - DNA, 15 bp, Homo sapiens
caagaaatgtcttgc

SEQ ID NO: 109514 - DNA, 15 bp, Homo sapiens
ccaagaaatgtcttg

SEQ ID NO: 109515 - DNA, 15 bp, Homo sapiens
tccaagaaatgtctt

SEQ ID NO: 109516 - DNA, 15 bp, Homo sapiens
atccaagaaatgtct

SEQ ID NO: 109517 - DNA, 15 bp, Homo sapiens
catccaagaaatgtc

SEQ ID NO: 109518 - DNA, 15 bp, Homo sapiens
ccatccaagaaatgt

SEQ ID NO: 109519 - DNA, 15 bp, Homo sapiens
cccatccaagaaatg

SEQ ID NO: 109520 - DNA, 15 bp, Homo sapiens
tcccatccaagaaat

SEQ ID NO: 109521 - DNA, 15 bp, Homo sapiens
ctcccatccaagaaa

SEQ ID NO: 109522 - DNA, 15 bp, Homo sapiens
actcccatccaagaa

SEQ ID NO: 109523 - DNA, 15 bp, Homo sapiens
aactcccatccaaga

SEQ ID NO: 109524 - DNA, 15 bp, Homo sapiens
aaactcccatccaag

SEQ ID NO: 109525 - DNA, 15 bp, Homo sapiens
gaaactcccatccaa

SEQ ID NO: 109526 - DNA, 15 bp, Homo sapiens
ggaaactcccatcca

SEQ ID NO: 109527 - DNA, 15 bp, Homo sapiens
tggaaactcccatcc

SEQ ID NO: 109528 - DNA, 15 bp, Homo sapiens
ctggaaactcccatc

SEQ ID NO: 109529 - DNA, 15 bp, Homo sapiens
actggaaactcccat

SEQ ID NO: 109530 - DNA, 15 bp, Homo sapiens
cactggaaactccca

SEQ ID NO: 109531 - DNA, 15 bp, Homo sapiens
gcactggaaactccc

SEQ ID NO: 109532 - DNA, 15 bp, Homo sapiens
agcactggaaactcc

SEQ ID NO: 109533 - DNA, 15 bp, Homo sapiens
cagcactggaaactc

SEQ ID NO: 109534 - DNA, 15 bp, Homo sapiens
ccagcactggaaact

SEQ ID NO: 109535 - DNA, 15 bp, Homo sapiens
cccagcactggaaac

SEQ ID NO: 109536 - DNA, 15 bp, Homo sapiens
tcccagcactggaaa

SEQ ID NO: 109537 - DNA, 15 bp, Homo sapiens
ctcccagcactggaa

SEQ ID NO: 109538 - DNA, 15 bp, Homo sapiens
tctcccagcactgga

SEQ ID NO: 109539 - DNA, 15 bp, Homo sapiens
ttctcccagcactgg

SEQ ID NO: 109540 - DNA, 15 bp, Homo sapiens
cttctcccagcactg

SEQ ID NO: 109541 - DNA, 15 bp, Homo sapiens
acttctcccagcact

SEQ ID NO: 109542 - DNA, 15 bp, Homo sapiens
aacttctcccagcac

SEQ ID NO: 109543 - DNA, 15 bp, Homo sapiens
gaacttctcccagca

SEQ ID NO: 109544 - DNA, 15 bp, Homo sapiens
ggaacttctcccagc

SEQ ID NO: 109545 - DNA, 15 bp, Homo sapiens
cggaacttctcccag

SEQ ID NO: 109546 - DNA, 15 bp, Homo sapiens
gcggaacttctccca

SEQ ID NO: 109547 - DNA, 15 bp, Homo sapiens
ggcggaacttctccc

SEQ ID NO: 109548 - DNA, 15 bp, Homo sapiens
gggcggaacttctcc

SEQ ID NO: 109549 - DNA, 15 bp, Homo sapiens
ggggcggaacttctc

SEQ ID NO: 109550 - DNA, 15 bp, Homo sapiens
tggggcggaacttct

SEQ ID NO: 109551 - DNA, 15 bp, Homo sapiens
gtggggcggaacttc

SEQ ID NO: 109552 - DNA, 15 bp, Homo sapiens
agtggggcggaactt

SEQ ID NO: 109553 - DNA, 15 bp, Homo sapiens
cagtggggcggaact

SEQ ID NO: 109554 - DNA, 15 bp, Homo sapiens
tcagtggggcggaac

SEQ ID NO: 109555 - DNA, 15 bp, Homo sapiens
gtcagtggggcggaa

SEQ ID NO: 109556 - DNA, 15 bp, Homo sapiens
agtcagtggggcgga

SEQ ID NO: 109557 - DNA, 15 bp, Homo sapiens
gagtcagtggggcgg

SEQ ID NO: 109558 - DNA, 15 bp, Homo sapiens
agagtcagtggggcg

SEQ ID NO: 109559 - DNA, 15 bp, Homo sapiens
tagagtcagtggggc

SEQ ID NO: 109560 - DNA, 15 bp, Homo sapiens
atagagtcagtgggg

SEQ ID NO: 109561 - DNA, 15 bp, Homo sapiens
aatagagtcagtggg

SEQ ID NO: 109562 - DNA, 15 bp, Homo sapiens
gaatagagtcagtgg

SEQ ID NO: 109563 - DNA, 15 bp, Homo sapiens
agaatagagtcagtg

SEQ ID NO: 109564 - DNA, 15 bp, Homo sapiens
cagaatagagtcagt

SEQ ID NO: 109565 - DNA, 15 bp, Homo sapiens
gcagaatagagtcag

SEQ ID NO: 109566 - DNA, 15 bp, Homo sapiens
agcagaatagagtca

SEQ ID NO: 109567 - DNA, 15 bp, Homo sapiens
cagcagaatagagtc

SEQ ID NO: 109568 - DNA, 15 bp, Homo sapiens
acagcagaatagagt

SEQ ID NO: 109569 - DNA, 15 bp, Homo sapiens
cacagcagaatagag

SEQ ID NO: 109570 - DNA, 15 bp, Homo sapiens
acacagcagaataga

SEQ ID NO: 109571 - DNA, 15 bp, Homo sapiens
gacacagcagaatag

SEQ ID NO: 109572 - DNA, 15 bp, Homo sapiens
agacacagcagaata

SEQ ID NO: 109573 - DNA, 15 bp, Homo sapiens
gagacacagcagaat

SEQ ID NO: 109574 - DNA, 15 bp, Homo sapiens
ggagacacagcagaa

SEQ ID NO: 109575 - DNA, 15 bp, Homo sapiens
aggagacacagcaga

SEQ ID NO: 109576 - DNA, 15 bp, Homo sapiens
gaggagacacagcag

SEQ ID NO: 109577 - DNA, 15 bp, Homo sapiens
tgaggagacacagca

SEQ ID NO: 109578 - DNA, 15 bp, Homo sapiens
ctgaggagacacagc

SEQ ID NO: 109579 - DNA, 15 bp, Homo sapiens
tctgaggagacacag

SEQ ID NO: 109580 - DNA, 15 bp, Homo sapiens
ctctgaggagacaca

SEQ ID NO: 109581 - DNA, 15 bp, Homo sapiens
gctctgaggagacac

SEQ ID NO: 109582 - DNA, 15 bp, Homo sapiens
ggctctgaggagaca

SEQ ID NO: 109583 - DNA, 15 bp, Homo sapiens
aggctctgaggagac

SEQ ID NO: 109584 - DNA, 15 bp, Homo sapiens
caggctctgaggaga

SEQ ID NO: 109585 - DNA, 15 bp, Homo sapiens
acaggctctgaggag

SEQ ID NO: 109586 - DNA, 15 bp, Homo sapiens
gacaggctctgagga

SEQ ID NO: 109587 - DNA, 15 bp, Homo sapiens
tgacaggctctgagg

SEQ ID NO: 109588 - DNA, 15 bp, Homo sapiens
atgacaggctctgag

SEQ ID NO: 109589 - DNA, 15 bp, Homo sapiens
tatgacaggctctga

SEQ ID NO: 109590 - DNA, 15 bp, Homo sapiens
ctatgacaggctctg

SEQ ID NO: 109591 - DNA, 15 bp, Homo sapiens
cctatgacaggctct

SEQ ID NO: 109592 - DNA, 15 bp, Homo sapiens
ccctatgacaggctc

SEQ ID NO: 109593 - DNA, 15 bp, Homo sapiens
tccctatgacaggct

SEQ ID NO: 109594 - DNA, 15 bp, Homo sapiens
ttccctatgacaggc

SEQ ID NO: 109595 - DNA, 15 bp, Homo sapiens
gttccctatgacagg

SEQ ID NO: 109596 - DNA, 15 bp, Homo sapiens
agttccctatgacag

SEQ ID NO: 109597 - DNA, 15 bp, Homo sapiens
cagttccctatgaca

SEQ ID NO: 109598 - DNA, 15 bp, Homo sapiens
gcagttccctatgac

SEQ ID NO: 109599 - DNA, 15 bp, Homo sapiens
tgcagttccctatga

SEQ ID NO: 109600 - DNA, 15 bp, Homo sapiens
atgcagttccctatg

SEQ ID NO: 109601 - DNA, 15 bp, Homo sapiens
catgcagttccctat

SEQ ID NO: 109602 - DNA, 15 bp, Homo sapiens
ccatgcagttcccta

SEQ ID NO: 109603 - DNA, 15 bp, Homo sapiens
tccatgcagttccct

SEQ ID NO: 109604 - DNA, 15 bp, Homo sapiens
atccatgcagttccc

SEQ ID NO: 109605 - DNA, 15 bp, Homo sapiens
tatccatgcagttcc

SEQ ID NO: 109606 - DNA, 15 bp, Homo sapiens
ctatccatgcagttc

SEQ ID NO: 109607 - DNA, 15 bp, Homo sapiens
tctatccatgcagtt

SEQ ID NO: 109608 - DNA, 15 bp, Homo sapiens
ttctatccatgcagt

SEQ ID NO: 109609 - DNA, 15 bp, Homo sapiens
cttctatccatgcag

SEQ ID NO: 109610 - DNA, 15 bp, Homo sapiens
acttctatccatgca

SEQ ID NO: 109611 - DNA, 15 bp, Homo sapiens
aacttctatccatgc

SEQ ID NO: 109612 - DNA, 15 bp, Homo sapiens
gaacttctatccatg

SEQ ID NO: 109613 - DNA, 15 bp, Homo sapiens
agaacttctatccat

SEQ ID NO: 109614 - DNA, 15 bp, Homo sapiens
gagaacttctatcca

SEQ ID NO: 109615 - DNA, 15 bp, Homo sapiens
ggagaacttctatcc

SEQ ID NO: 109616 - DNA, 15 bp, Homo sapiens
tggagaacttctatc

SEQ ID NO: 109617 - DNA, 15 bp, Homo sapiens
ctggagaacttctat

SEQ ID NO: 109618 - DNA, 15 bp, Homo sapiens
cctggagaacttcta

SEQ ID NO: 109619 - DNA, 15 bp, Homo sapiens
tcctggagaacttct

SEQ ID NO: 109620 - DNA, 15 bp, Homo sapiens
gtcctggagaacttc

SEQ ID NO: 109621 - DNA, 15 bp, Homo sapiens
tgtcctggagaactt

SEQ ID NO: 109622 - DNA, 15 bp, Homo sapiens
ttgtcctggagaact

SEQ ID NO: 109623 - DNA, 15 bp, Homo sapiens
cttgtcctggagaac

SEQ ID NO: 109624 - DNA, 15 bp, Homo sapiens
gcttgtcctggagaa

SEQ ID NO: 109625 - DNA, 15 bp, Homo sapiens
tgcttgtcctggaga

SEQ ID NO: 109626 - DNA, 15 bp, Homo sapiens
ctgcttgtcctggag

SEQ ID NO: 109627 - DNA, 15 bp, Homo sapiens
actgcttgtcctgga

SEQ ID NO: 109628 - DNA, 15 bp, Homo sapiens
cactgcttgtcctgg

SEQ ID NO: 109629 - DNA, 15 bp, Homo sapiens
ccactgcttgtcctg

SEQ ID NO: 109630 - DNA, 15 bp, Homo sapiens
tccactgcttgtcct

SEQ ID NO: 109631 - DNA, 15 bp, Homo sapiens
ctccactgcttgtcc

SEQ ID NO: 109632 - DNA, 15 bp, Homo sapiens
gctccactgcttgtc

SEQ ID NO: 109633 - DNA, 15 bp, Homo sapiens
agctccactgcttgt

SEQ ID NO: 109634 - DNA, 15 bp, Homo sapiens
cagctccactgcttg

SEQ ID NO: 109635 - DNA, 15 bp, Homo sapiens
gcagctccactgctt

SEQ ID NO: 109636 - DNA, 15 bp, Homo sapiens
ggcagctccactgct

SEQ ID NO: 109637 - DNA, 15 bp, Homo sapiens
cggcagctccactgc

SEQ ID NO: 109638 - DNA, 15 bp, Homo sapiens
ccggcagctccactg

SEQ ID NO: 109639 - DNA, 15 bp, Homo sapiens
tccggcagctccact

SEQ ID NO: 109640 - DNA, 15 bp, Homo sapiens
atccggcagctccac

SEQ ID NO: 109641 - DNA, 15 bp, Homo sapiens
gatccggcagctcca

SEQ ID NO: 109642 - DNA, 15 bp, Homo sapiens
tgatccggcagctcc

SEQ ID NO: 109643 - DNA, 15 bp, Homo sapiens
gtgatccggcagctc

SEQ ID NO: 109644 - DNA, 15 bp, Homo sapiens
tgtgatccggcagct

SEQ ID NO: 109645 - DNA, 15 bp, Homo sapiens
ttgtgatccggcagc

SEQ ID NO: 109646 - DNA, 15 bp, Homo sapiens
attgtgatccggcag

SEQ ID NO: 109647 - DNA, 15 bp, Homo sapiens
cattgtgatccggca

SEQ ID NO: 109648 - DNA, 15 bp, Homo sapiens
ccattgtgatccggc

SEQ ID NO: 109649 - DNA, 15 bp, Homo sapiens
cccattgtgatccgg

SEQ ID NO: 109650 - DNA, 15 bp, Homo sapiens
gcccattgtgatccg

SEQ ID NO: 109651 - DNA, 15 bp, Homo sapiens
agcccattgtgatcc

SEQ ID NO: 109652 - DNA, 15 bp, Homo sapiens
gagcccattgtgatc

SEQ ID NO: 109653 - DNA, 15 bp, Homo sapiens
cgagcccattgtgat

SEQ ID NO: 109654 - DNA, 15 bp, Homo sapiens
ccgagcccattgtga

SEQ ID NO: 109655 - DNA, 15 bp, Homo sapiens
cccgagcccattgtg

SEQ ID NO: 109656 - DNA, 15 bp, Homo sapiens
acccgagcccattgt

SEQ ID NO: 109657 - DNA, 15 bp, Homo sapiens
tacccgagcccattg

SEQ ID NO: 109658 - DNA, 15 bp, Homo sapiens
gtacccgagcccatt

SEQ ID NO: 109659 - DNA, 15 bp, Homo sapiens
ggtacccgagcccat

SEQ ID NO: 109660 - DNA, 15 bp, Homo sapiens
gggtacccgagccca

SEQ ID NO: 109661 - DNA, 15 bp, Homo sapiens
tgggtacccgagccc

SEQ ID NO: 109662 - DNA, 15 bp, Homo sapiens
ctgggtacccgagcc

SEQ ID NO: 109663 - DNA, 15 bp, Homo sapiens
gctgggtacccgagc

SEQ ID NO: 109664 - DNA, 15 bp, Homo sapiens
tgctgggtacccgag

SEQ ID NO: 109665 - DNA, 15 bp, Homo sapiens
gtgctgggtacccga

SEQ ID NO: 109666 - DNA, 15 bp, Homo sapiens
cgtgctgggtacccg

SEQ ID NO: 109667 - DNA, 15 bp, Homo sapiens
gcgtgctgggtaccc

SEQ ID NO: 109668 - DNA, 15 bp, Homo sapiens
ggcgtgctgggtacc

SEQ ID NO: 109669 - DNA, 15 bp, Homo sapiens
gggcgtgctgggtac

SEQ ID NO: 109670 - DNA, 15 bp, Homo sapiens
ggggcgtgctgggta

SEQ ID NO: 109671 - DNA, 15 bp, Homo sapiens
aggggcgtgctgggt

SEQ ID NO: 109672 - DNA, 15 bp, Homo sapiens
gaggggcgtgctggg

SEQ ID NO: 109673 - DNA, 15 bp, Homo sapiens
ggaggggcgtgctgg

SEQ ID NO: 109674 - DNA, 15 bp, Homo sapiens
cggaggggcgtgctg

SEQ ID NO: 109675 - DNA, 15 bp, Homo sapiens
acggaggggcgtgct

SEQ ID NO: 109676 - DNA, 15 bp, Homo sapiens
gacggaggggcgtgc

SEQ ID NO: 109677 - DNA, 15 bp, Homo sapiens
ggacggaggggcgtg

SEQ ID NO: 109678 - DNA, 15 bp, Homo sapiens
tggacggaggggcgt

SEQ ID NO: 109679 - DNA, 15 bp, Homo sapiens
atggacggaggggcg

SEQ ID NO: 109680 - DNA, 15 bp, Homo sapiens
catggacggaggggc

SEQ ID NO: 109681 - DNA, 15 bp, Homo sapiens
tcatggacggagggg

SEQ ID NO: 109682 - DNA, 15 bp, Homo sapiens
ctcatggacggaggg

SEQ ID NO: 109683 - DNA, 15 bp, Homo sapiens
gctcatggacggagg

SEQ ID NO: 109684 - DNA, 15 bp, Homo sapiens
tgctcatggacggag

SEQ ID NO: 109685 - DNA, 15 bp, Homo sapiens
gtgctcatggacgga

SEQ ID NO: 109686 - DNA, 15 bp, Homo sapiens
ggtgctcatggacgg

SEQ ID NO: 109687 - DNA, 15 bp, Homo sapiens
tggtgctcatggacg

SEQ ID NO: 109688 - DNA, 15 bp, Homo sapiens
gtggtgctcatggac

SEQ ID NO: 109689 - DNA, 15 bp, Homo sapiens
tgtggtgctcatgga

SEQ ID NO: 109690 - DNA, 15 bp, Homo sapiens
ctgtggtgctcatgg

SEQ ID NO: 109691 - DNA, 15 bp, Homo sapiens
cctgtggtgctcatg

SEQ ID NO: 109692 - DNA, 15 bp, Homo sapiens
gcctgtggtgctcat

SEQ ID NO: 109693 - DNA, 15 bp, Homo sapiens
ggcctgtggtgctca

SEQ ID NO: 109694 - DNA, 15 bp, Homo sapiens
gggcctgtggtgctc

SEQ ID NO: 109695 - DNA, 15 bp, Homo sapiens
ggggcctgtggtgct

SEQ ID NO: 109696 - DNA, 15 bp, Homo sapiens
cggggcctgtggtgc

SEQ ID NO: 109697 - DNA, 15 bp, Homo sapiens
ccggggcctgtggtg

SEQ ID NO: 109698 - DNA, 15 bp, Homo sapiens
cccggggcctgtggt

SEQ ID NO: 109699 - DNA, 15 bp, Homo sapiens
gcccggggcctgtgg

SEQ ID NO: 109700 - DNA, 15 bp, Homo sapiens
ggcccggggcctgtg

SEQ ID NO: 109701 - DNA, 15 bp, Homo sapiens
gggcccggggcctgt

SEQ ID NO: 109702 - DNA, 15 bp, Homo sapiens
agggcccggggcctg

SEQ ID NO: 109703 - DNA, 15 bp, Homo sapiens
gagggcccggggcct

SEQ ID NO: 109704 - DNA, 15 bp, Homo sapiens
ggagggcccggggcc

SEQ ID NO: 109705 - DNA, 15 bp, Homo sapiens
tggagggcccggggc

SEQ ID NO: 109706 - DNA, 15 bp, Homo sapiens
ctggagggcccgggg

SEQ ID NO: 109707 - DNA, 15 bp, Homo sapiens
tctggagggcccggg

SEQ ID NO: 109708 - DNA, 15 bp, Homo sapiens
ctctggagggcccgg

SEQ ID NO: 109709 - DNA, 15 bp, Homo sapiens
tctctggagggcccg

SEQ ID NO: 109710 - DNA, 15 bp, Homo sapiens
gtctctggagggccc

SEQ ID NO: 109711 - DNA, 15 bp, Homo sapiens
tgtctctggagggcc

SEQ ID NO: 109712 - DNA, 15 bp, Homo sapiens
gtgtctctggagggc

SEQ ID NO: 109713 - DNA, 15 bp, Homo sapiens
ggtgtctctggaggg

SEQ ID NO: 109714 - DNA, 15 bp, Homo sapiens
tggtgtctctggagg

SEQ ID NO: 109715 - DNA, 15 bp, Homo sapiens
gtggtgtctctggag

SEQ ID NO: 109716 - DNA, 15 bp, Homo sapiens
tgtggtgtctctgga

SEQ ID NO: 109717 - DNA, 15 bp, Homo sapiens
gtgtggtgtctctgg

SEQ ID NO: 109718 - DNA, 15 bp, Homo sapiens
cgtgtggtgtctctg

SEQ ID NO: 109719 - DNA, 15 bp, Homo sapiens
tcgtgtggtgtctct

SEQ ID NO: 109720 - DNA, 15 bp, Homo sapiens
atcgtgtggtgtctc

SEQ ID NO: 109721 - DNA, 15 bp, Homo sapiens
gatcgtgtggtgtct

SEQ ID NO: 109722 - DNA, 15 bp, Homo sapiens
ggatcgtgtggtgtc

SEQ ID NO: 109723 - DNA, 15 bp, Homo sapiens
tggatcgtgtggtgt

SEQ ID NO: 109724 - DNA, 15 bp, Homo sapiens
ctggatcgtgtggtg

SEQ ID NO: 109725 - DNA, 15 bp, Homo sapiens
tctggatcgtgtggt

SEQ ID NO: 109726 - DNA, 15 bp, Homo sapiens
ttctggatcgtgtgg

SEQ ID NO: 109727 - DNA, 15 bp, Homo sapiens
gttctggatcgtgtg

SEQ ID NO: 109728 - DNA, 15 bp, Homo sapiens
tgttctggatcgtgt

SEQ ID NO: 109729 - DNA, 15 bp, Homo sapiens
ctgttctggatcgtg

SEQ ID NO: 109730 - DNA, 15 bp, Homo sapiens
gctgttctggatcgt

SEQ ID NO: 109731 - DNA, 15 bp, Homo sapiens
cgctgttctggatcg

SEQ ID NO: 109732 - DNA, 15 bp, Homo sapiens
tcgctgttctggatc

SEQ ID NO: 109733 - DNA, 15 bp, Homo sapiens
gtcgctgttctggat

SEQ ID NO: 109734 - DNA, 15 bp, Homo sapiens
cgtcgctgttctgga

SEQ ID NO: 109735 - DNA, 15 bp, Homo sapiens
tcgtcgctgttctgg

SEQ ID NO: 109736 - DNA, 15 bp, Homo sapiens
atcgtcgctgttctg

SEQ ID NO: 109737 - DNA, 15 bp, Homo sapiens
catcgtcgctgttct

SEQ ID NO: 109738 - DNA, 15 bp, Homo sapiens
gcatcgtcgctgttc

SEQ ID NO: 109739 - DNA, 15 bp, Homo sapiens
agcatcgtcgctgtt

SEQ ID NO: 109740 - DNA, 15 bp, Homo sapiens
aagcatcgtcgctgt

SEQ ID NO: 109741 - DNA, 15 bp, Homo sapiens
taagcatcgtcgctg

SEQ ID NO: 109742 - DNA, 15 bp, Homo sapiens
ataagcatcgtcgct

SEQ ID NO: 109743 - DNA, 15 bp, Homo sapiens
cataagcatcgtcgc

SEQ ID NO: 109744 - DNA, 15 bp, Homo sapiens
acataagcatcgtcg

SEQ ID NO: 109745 - DNA, 15 bp, Homo sapiens
tacataagcatcgtc

SEQ ID NO: 109746 - DNA, 15 bp, Homo sapiens
atacataagcatcgt

SEQ ID NO: 109747 - DNA, 15 bp, Homo sapiens
catacataagcatcg

SEQ ID NO: 109748 - DNA, 15 bp, Homo sapiens
acatacataagcatc

SEQ ID NO: 109749 - DNA, 15 bp, Homo sapiens
aacatacataagcat

SEQ ID NO: 109750 - DNA, 15 bp, Homo sapiens
caacatacataagca

SEQ ID NO: 109751 - DNA, 15 bp, Homo sapiens
ccaacatacataagc

SEQ ID NO: 109752 - DNA, 15 bp, Homo sapiens
accaacatacataag

SEQ ID NO: 109753 - DNA, 15 bp, Homo sapiens
gaccaacatacataa

SEQ ID NO: 109754 - DNA, 15 bp, Homo sapiens
ggaccaacatacata

SEQ ID NO: 109755 - DNA, 15 bp, Homo sapiens
gggaccaacatacat

SEQ ID NO: 109756 - DNA, 15 bp, Homo sapiens
tgggaccaacataca

SEQ ID NO: 109757 - DNA, 15 bp, Homo sapiens
gtgggaccaacatac

SEQ ID NO: 109758 - DNA, 15 bp, Homo sapiens
ggtgggaccaacata

SEQ ID NO: 109759 - DNA, 15 bp, Homo sapiens
aggtgggaccaacat

SEQ ID NO: 109760 - DNA, 15 bp, Homo sapiens
caggtgggaccaaca

SEQ ID NO: 109761 - DNA, 15 bp, Homo sapiens
gcaggtgggaccaac

SEQ ID NO: 109762 - DNA, 15 bp, Homo sapiens
agcaggtgggaccaa

SEQ ID NO: 109763 - DNA, 15 bp, Homo sapiens
cagcaggtgggacca

SEQ ID NO: 109764 - DNA, 15 bp, Homo sapiens
gcagcaggtgggacc

SEQ ID NO: 109765 - DNA, 15 bp, Homo sapiens
tgcagcaggtgggac

SEQ ID NO: 109766 - DNA, 15 bp, Homo sapiens
gtgcagcaggtggga

SEQ ID NO: 109767 - DNA, 15 bp, Homo sapiens
tgtgcagcaggtggg

SEQ ID NO: 109768 - DNA, 15 bp, Homo sapiens
ctgtgcagcaggtgg

SEQ ID NO: 109769 - DNA, 15 bp, Homo sapiens
tctgtgcagcaggtg

SEQ ID NO: 109770 - DNA, 15 bp, Homo sapiens
ctctgtgcagcaggt

SEQ ID NO: 109771 - DNA, 15 bp, Homo sapiens
cctctgtgcagcagg

SEQ ID NO: 109772 - DNA, 15 bp, Homo sapiens
acctctgtgcagcag

SEQ ID NO: 109773 - DNA, 15 bp, Homo sapiens
cacctctgtgcagca

SEQ ID NO: 109774 - DNA, 15 bp, Homo sapiens
ccacctctgtgcagc

SEQ ID NO: 109775 - DNA, 15 bp, Homo sapiens
tccacctctgtgcag

SEQ ID NO: 109776 - DNA, 15 bp, Homo sapiens
atccacctctgtgca

SEQ ID NO: 109777 - DNA, 15 bp, Homo sapiens
gatccacctctgtgc

SEQ ID NO: 109778 - DNA, 15 bp, Homo sapiens
ggatccacctctgtg

SEQ ID NO: 109779 - DNA, 15 bp, Homo sapiens
aggatccacctctgt

SEQ ID NO: 109780 - DNA, 15 bp, Homo sapiens
gaggatccacctctg

SEQ ID NO: 109781 - DNA, 15 bp, Homo sapiens
ggaggatccacctct

SEQ ID NO: 109782 - DNA, 15 bp, Homo sapiens
gggaggatccacctc

SEQ ID NO: 109783 - DNA, 15 bp, Homo sapiens
tgggaggatccacct

SEQ ID NO: 109784 - DNA, 15 bp, Homo sapiens
ctgggaggatccacc

SEQ ID NO: 109785 - DNA, 15 bp, Homo sapiens
actgggaggatccac

SEQ ID NO: 109786 - DNA, 15 bp, Homo sapiens
gactgggaggatcca

SEQ ID NO: 109787 - DNA, 15 bp, Homo sapiens
ggactgggaggatcc

SEQ ID NO: 109788 - DNA, 15 bp, Homo sapiens
gggactgggaggatc

SEQ ID NO: 109789 - DNA, 15 bp, Homo sapiens
tgggactgggaggat

SEQ ID NO: 109790 - DNA, 15 bp, Homo sapiens
ctgggactgggagga

SEQ ID NO: 109791 - DNA, 15 bp, Homo sapiens
gctgggactgggagg

SEQ ID NO: 109792 - DNA, 15 bp, Homo sapiens
ggctgggactgggag

SEQ ID NO: 109793 - DNA, 15 bp, Homo sapiens
aggctgggactggga

SEQ ID NO: 109794 - DNA, 15 bp, Homo sapiens
aaggctgggactggg

SEQ ID NO: 109795 - DNA, 15 bp, Homo sapiens
caaggctgggactgg

SEQ ID NO: 109796 - DNA, 15 bp, Homo sapiens
tcaaggctgggactg

SEQ ID NO: 109797 - DNA, 15 bp, Homo sapiens
ttcaaggctgggact

SEQ ID NO: 109798 - DNA, 15 bp, Homo sapiens
tttcaaggctgggac

SEQ ID NO: 109799 - DNA, 15 bp, Homo sapiens
gtttcaaggctggga

SEQ ID NO: 109800 - DNA, 15 bp, Homo sapiens
tgtttcaaggctggg

SEQ ID NO: 109801 - DNA, 15 bp, Homo sapiens
ctgtttcaaggctgg

SEQ ID NO: 109802 - DNA, 15 bp, Homo sapiens
tctgtttcaaggctg

SEQ ID NO: 109803 - DNA, 15 bp, Homo sapiens
ctctgtttcaaggct

SEQ ID NO: 109804 - DNA, 15 bp, Homo sapiens
actctgtttcaaggc

SEQ ID NO: 109805 - DNA, 15 bp, Homo sapiens
tactctgtttcaagg

SEQ ID NO: 109806 - DNA, 15 bp, Homo sapiens
atactctgtttcaag

SEQ ID NO: 109807 - DNA, 15 bp, Homo sapiens
tatactctgtttcaa

SEQ ID NO: 109808 - DNA, 15 bp, Homo sapiens
ctatactctgtttca

SEQ ID NO: 109809 - DNA, 15 bp, Homo sapiens
actatactctgtttc

SEQ ID NO: 109810 - DNA, 15 bp, Homo sapiens
cactatactctgttt

SEQ ID NO: 109811 - DNA, 15 bp, Homo sapiens
tcactatactctgtt

SEQ ID NO: 109812 - DNA, 15 bp, Homo sapiens
atcactatactctgt

SEQ ID NO: 109813 - DNA, 15 bp, Homo sapiens
catcactatactctg

SEQ ID NO: 109814 - DNA, 15 bp, Homo sapiens
acatcactatactct

SEQ ID NO: 109815 - DNA, 15 bp, Homo sapiens
cacatcactatactc

SEQ ID NO: 109816 - DNA, 15 bp, Homo sapiens
ccacatcactatact

SEQ ID NO: 109817 - DNA, 15 bp, Homo sapiens
cccacatcactatac

SEQ ID NO: 109818 - DNA, 15 bp, Homo sapiens
ccccacatcactata

SEQ ID NO: 109819 - DNA, 15 bp, Homo sapiens
accccacatcactat

SEQ ID NO: 109820 - DNA, 15 bp, Homo sapiens
taccccacatcacta

SEQ ID NO: 109821 - DNA, 15 bp, Homo sapiens
ctaccccacatcact

SEQ ID NO: 109822 - DNA, 15 bp, Homo sapiens
gctaccccacatcac

SEQ ID NO: 109823 - DNA, 15 bp, Homo sapiens
ggctaccccacatca

SEQ ID NO: 109824 - DNA, 15 bp, Homo sapiens
aggctaccccacatc

SEQ ID NO: 109825 - DNA, 15 bp, Homo sapiens
gaggctaccccacat

SEQ ID NO: 109826 - DNA, 15 bp, Homo sapiens
agaggctaccccaca

SEQ ID NO: 109827 - DNA, 15 bp, Homo sapiens
gagaggctaccccac

SEQ ID NO: 109828 - DNA, 15 bp, Homo sapiens
agagaggctacccca

SEQ ID NO: 109829 - DNA, 15 bp, Homo sapiens
aagagaggctacccc

SEQ ID NO: 109830 - DNA, 15 bp, Homo sapiens
caagagaggctaccc

SEQ ID NO: 109831 - DNA, 15 bp, Homo sapiens
ccaagagaggctacc

SEQ ID NO: 109832 - DNA, 15 bp, Homo sapiens
gccaagagaggctac

SEQ ID NO: 109833 - DNA, 15 bp, Homo sapiens
ggccaagagaggcta

SEQ ID NO: 109834 - DNA, 15 bp, Homo sapiens
cggccaagagaggct

SEQ ID NO: 109835 - DNA, 15 bp, Homo sapiens
gcggccaagagaggc

SEQ ID NO: 109836 - DNA, 15 bp, Homo sapiens
agcggccaagagagg

SEQ ID NO: 109837 - DNA, 15 bp, Homo sapiens
gagcggccaagagag

SEQ ID NO: 109838 - DNA, 15 bp, Homo sapiens
agagcggccaagaga

SEQ ID NO: 109839 - DNA, 15 bp, Homo sapiens
gagagcggccaagag

SEQ ID NO: 109840 - DNA, 15 bp, Homo sapiens
ggagagcggccaaga

SEQ ID NO: 109841 - DNA, 15 bp, Homo sapiens
aggagagcggccaag

SEQ ID NO: 109842 - DNA, 15 bp, Homo sapiens
gaggagagcggccaa

SEQ ID NO: 109843 - DNA, 15 bp, Homo sapiens
tgaggagagcggcca

SEQ ID NO: 109844 - DNA, 15 bp, Homo sapiens
ctgaggagagcggcc

SEQ ID NO: 109845 - DNA, 15 bp, Homo sapiens
actgaggagagcggc

SEQ ID NO: 109846 - DNA, 15 bp, Homo sapiens
gactgaggagagcgg

SEQ ID NO: 109847 - DNA, 15 bp, Homo sapiens
tgactgaggagagcg

SEQ ID NO: 109848 - DNA, 15 bp, Homo sapiens
ctgactgaggagagc

SEQ ID NO: 109849 - DNA, 15 bp, Homo sapiens
gctgactgaggagag

SEQ ID NO: 109850 - DNA, 15 bp, Homo sapiens
tgctgactgaggaga

SEQ ID NO: 109851 - DNA, 15 bp, Homo sapiens
atgctgactgaggag

SEQ ID NO: 109852 - DNA, 15 bp, Homo sapiens
aatgctgactgagga

SEQ ID NO: 109853 - DNA, 15 bp, Homo sapiens
gaatgctgactgagg

SEQ ID NO: 109854 - DNA, 15 bp, Homo sapiens
tgaatgctgactgag

SEQ ID NO: 109855 - DNA, 15 bp, Homo sapiens
ctgaatgctgactga

SEQ ID NO: 109856 - DNA, 15 bp, Homo sapiens
gctgaatgctgactg

SEQ ID NO: 109857 - DNA, 15 bp, Homo sapiens
ggctgaatgctgact

SEQ ID NO: 109858 - DNA, 15 bp, Homo sapiens
aggctgaatgctgac

SEQ ID NO: 109859 - DNA, 15 bp, Homo sapiens
aaggctgaatgctga

SEQ ID NO: 109860 - DNA, 15 bp, Homo sapiens
aaaggctgaatgctg

SEQ ID NO: 109861 - DNA, 15 bp, Homo sapiens
gaaaggctgaatgct

SEQ ID NO: 109862 - DNA, 15 bp, Homo sapiens
agaaaggctgaatgc

SEQ ID NO: 109863 - DNA, 15 bp, Homo sapiens
cagaaaggctgaatg

SEQ ID NO: 109864 - DNA, 15 bp, Homo sapiens
ccagaaaggctgaat

SEQ ID NO: 109865 - DNA, 15 bp, Homo sapiens
tccagaaaggctgaa

SEQ ID NO: 109866 - DNA, 15 bp, Homo sapiens
ttccagaaaggctga

SEQ ID NO: 109867 - DNA, 15 bp, Homo sapiens
tttccagaaaggctg

SEQ ID NO: 109868 - DNA, 15 bp, Homo sapiens
gtttccagaaaggct

SEQ ID NO: 109869 - DNA, 15 bp, Homo sapiens
cgtttccagaaaggc

SEQ ID NO: 109870 - DNA, 15 bp, Homo sapiens
ccgtttccagaaagg

SEQ ID NO: 109871 - DNA, 15 bp, Homo sapiens
accgtttccagaaag

SEQ ID NO: 109872 - DNA, 15 bp, Homo sapiens
caccgtttccagaaa

SEQ ID NO: 109873 - DNA, 15 bp, Homo sapiens
ccaccgtttccagaa

SEQ ID NO: 109874 - DNA, 15 bp, Homo sapiens
cccaccgtttccaga

SEQ ID NO: 109875 - DNA, 15 bp, Homo sapiens
ccccaccgtttccag

SEQ ID NO: 109876 - DNA, 15 bp, Homo sapiens
tccccaccgtttcca

SEQ ID NO: 109877 - DNA, 15 bp, Homo sapiens
ctccccaccgtttcc

SEQ ID NO: 109878 - DNA, 15 bp, Homo sapiens
gctccccaccgtttc

SEQ ID NO: 109879 - DNA, 15 bp, Homo sapiens
tgctccccaccgttt

SEQ ID NO: 109880 - DNA, 15 bp, Homo sapiens
atgctccccaccgtt

SEQ ID NO: 109881 - DNA, 15 bp, Homo sapiens
aatgctccccaccgt

SEQ ID NO: 109882 - DNA, 15 bp, Homo sapiens
aaatgctccccaccg

SEQ ID NO: 109883 - DNA, 15 bp, Homo sapiens
gaaatgctccccacc

SEQ ID NO: 109884 - DNA, 15 bp, Homo sapiens
agaaatgctccccac

SEQ ID NO: 109885 - DNA, 15 bp, Homo sapiens
aagaaatgctcccca

SEQ ID NO: 109886 - DNA, 15 bp, Homo sapiens
aaagaaatgctcccc

SEQ ID NO: 109887 - DNA, 15 bp, Homo sapiens
aaaagaaatgctccc

SEQ ID NO: 109888 - DNA, 15 bp, Homo sapiens
aaaaagaaatgctcc

SEQ ID NO: 109889 - DNA, 15 bp, Homo sapiens
aaaaaagaaatgctc

SEQ ID NO: 109890 - DNA, 15 bp, Homo sapiens
aaaaaaagaaatgct

SEQ ID NO: 109891 - DNA, 15 bp, Homo sapiens
aaaaaaaagaaatgc

SEQ ID NO: 109892 - DNA, 15 bp, Homo sapiens
aaaaaaaaagaaatg

SEQ ID NO: 109893 - DNA, 15 bp, Homo sapiens
gaaaaaaaaagaaat

SEQ ID NO: 109894 - DNA, 15 bp, Homo sapiens
agaaaaaaaaagaaa

SEQ ID NO: 109895 - DNA, 15 bp, Homo sapiens
aagaaaaaaaaagaa

SEQ ID NO: 109896 - DNA, 15 bp, Homo sapiens
aaagaaaaaaaaaga

SEQ ID NO: 109897 - DNA, 15 bp, Homo sapiens
aaaagaaaaaaaaag

SEQ ID NO: 109898 - DNA, 15 bp, Homo sapiens
aaaaagaaaaaaaaa

SEQ ID NO: 109899 - DNA, 15 bp, Homo sapiens
aaaaaagaaaaaaaa

SEQ ID NO: 109900 - DNA, 15 bp, Homo sapiens
caaaaaagaaaaaaa

SEQ ID NO: 109901 - DNA, 15 bp, Homo sapiens
tcaaaaaagaaaaaa

SEQ ID NO: 109902 - DNA, 15 bp, Homo sapiens
ctcaaaaaagaaaaa

SEQ ID NO: 109903 - DNA, 15 bp, Homo sapiens
tctcaaaaaagaaaa

SEQ ID NO: 109904 - DNA, 15 bp, Homo sapiens
atctcaaaaaagaaa

SEQ ID NO: 109905 - DNA, 15 bp, Homo sapiens
catctcaaaaaagaa

SEQ ID NO: 109906 - DNA, 15 bp, Homo sapiens
ccatctcaaaaaaga

SEQ ID NO: 109907 - DNA, 15 bp, Homo sapiens
tccatctcaaaaaag

SEQ ID NO: 109908 - DNA, 15 bp, Homo sapiens
ctccatctcaaaaaa

SEQ ID NO: 109909 - DNA, 15 bp, Homo sapiens
actccatctcaaaaa

SEQ ID NO: 109910 - DNA, 15 bp, Homo sapiens
gactccatctcaaaa

SEQ ID NO: 109911 - DNA, 15 bp, Homo sapiens
agactccatctcaaa

SEQ ID NO: 109912 - DNA, 15 bp, Homo sapiens
gagactccatctcaa

SEQ ID NO: 109913 - DNA, 15 bp, Homo sapiens
tgagactccatctca

SEQ ID NO: 109914 - DNA, 15 bp, Homo sapiens
gtgagactccatctc

SEQ ID NO: 109915 - DNA, 15 bp, Homo sapiens
agtgagactccatct

SEQ ID NO: 109916 - DNA, 15 bp, Homo sapiens
gagtgagactccatc

SEQ ID NO: 109917 - DNA, 15 bp, Homo sapiens
agagtgagactccat

SEQ ID NO: 109918 - DNA, 15 bp, Homo sapiens
cagagtgagactcca

SEQ ID NO: 109919 - DNA, 15 bp, Homo sapiens
acagagtgagactcc

SEQ ID NO: 109920 - DNA, 15 bp, Homo sapiens
gacagagtgagactc

SEQ ID NO: 109921 - DNA, 15 bp, Homo sapiens
cgacagagtgagact

SEQ ID NO: 109922 - DNA, 15 bp, Homo sapiens
gcgacagagtgagac

SEQ ID NO: 109923 - DNA, 15 bp, Homo sapiens
ggcgacagagtgaga

SEQ ID NO: 109924 - DNA, 15 bp, Homo sapiens
gggcgacagagtgag

SEQ ID NO: 109925 - DNA, 15 bp, Homo sapiens
tgggcgacagagtga

SEQ ID NO: 109926 - DNA, 15 bp, Homo sapiens
ctgggcgacagagtg

SEQ ID NO: 109927 - DNA, 15 bp, Homo sapiens
cctgggcgacagagt

SEQ ID NO: 109928 - DNA, 15 bp, Homo sapiens
cgcctgggcgacaga

SEQ ID NO: 109929 - DNA, 15 bp, Homo sapiens
ccgcctgggcgacag

SEQ ID NO: 109930 - DNA, 15 bp, Homo sapiens
cccgcctgggcgaca

SEQ ID NO: 109931 - DNA, 15 bp, Homo sapiens
tcccgcctgggcgac

SEQ ID NO: 109932 - DNA, 15 bp, Homo sapiens
ctcccgcctgggcga

SEQ ID NO: 109933 - DNA, 15 bp, Homo sapiens
cctcccgcctgggcg

SEQ ID NO: 109934 - DNA, 15 bp, Homo sapiens
tcctcccgcctgggc

SEQ ID NO: 109935 - DNA, 15 bp, Homo sapiens
gtcctcccgcctggg

SEQ ID NO: 109936 - DNA, 15 bp, Homo sapiens
tgtcctcccgcctgg

SEQ ID NO: 109937 - DNA, 15 bp, Homo sapiens
ctgtcctcccgcctg

SEQ ID NO: 109938 - DNA, 15 bp, Homo sapiens
actgtcctcccgcct

SEQ ID NO: 109939 - DNA, 15 bp, Homo sapiens
cactgtcctcccgcc

SEQ ID NO: 109940 - DNA, 15 bp, Homo sapiens
ccactgtcctcccgc

SEQ ID NO: 109941 - DNA, 15 bp, Homo sapiens
gccactgtcctcccg

SEQ ID NO: 109942 - DNA, 15 bp, Homo sapiens
cgccactgtcctccc

SEQ ID NO: 109943 - DNA, 15 bp, Homo sapiens
gcgccactgtcctcc

SEQ ID NO: 109944 - DNA, 15 bp, Homo sapiens
cgcgccactgtcctc

SEQ ID NO: 109945 - DNA, 15 bp, Homo sapiens
tcgcgccactgtcct

SEQ ID NO: 109946 - DNA, 15 bp, Homo sapiens
atcgcgccactgtcc

SEQ ID NO: 109947 - DNA, 15 bp, Homo sapiens
tatcgcgccactgtc

SEQ ID NO: 109948 - DNA, 15 bp, Homo sapiens
atatcgcgccactgt

SEQ ID NO: 109949 - DNA, 15 bp, Homo sapiens
gatatcgcgccactg

SEQ ID NO: 109950 - DNA, 15 bp, Homo sapiens
tgatatcgcgccact

SEQ ID NO: 109951 - DNA, 15 bp, Homo sapiens
ctgatatcgcgccac

SEQ ID NO: 109952 - DNA, 15 bp, Homo sapiens
gctgatatcgcgcca

SEQ ID NO: 109953 - DNA, 15 bp, Homo sapiens
agctgatatcgcgcc

SEQ ID NO: 109954 - DNA, 15 bp, Homo sapiens
gagctgatatcgcgc

SEQ ID NO: 109955 - DNA, 15 bp, Homo sapiens
tgagctgatatcgcg

SEQ ID NO: 109956 - DNA, 15 bp, Homo sapiens
gtgagctgatatcgc

SEQ ID NO: 109957 - DNA, 15 bp, Homo sapiens
agtgagctgatatcg

SEQ ID NO: 109958 - DNA, 15 bp, Homo sapiens
cagtgagctgatatc

SEQ ID NO: 109959 - DNA, 15 bp, Homo sapiens
gcagtgagctgatat

SEQ ID NO: 109960 - DNA, 15 bp, Homo sapiens
tgcagtgagctgata

SEQ ID NO: 109961 - DNA, 15 bp, Homo sapiens
ttgcagtgagctgat

SEQ ID NO: 109962 - DNA, 15 bp, Homo sapiens
agttgcagtgagctg

SEQ ID NO: 109963 - DNA, 15 bp, Homo sapiens
aagttgcagtgagct

SEQ ID NO: 109964 - DNA, 15 bp, Homo sapiens
gaagttgcagtgagc

SEQ ID NO: 109965 - DNA, 15 bp, Homo sapiens
agaagttgcagtgag

SEQ ID NO: 109966 - DNA, 15 bp, Homo sapiens
tagaagttgcagtga

SEQ ID NO: 109967 - DNA, 15 bp, Homo sapiens
gtagaagttgcagtg

SEQ ID NO: 109968 - DNA, 15 bp, Homo sapiens
ggtagaagttgcagt

SEQ ID NO: 109969 - DNA, 15 bp, Homo sapiens
aggtagaagttgcag

SEQ ID NO: 109970 - DNA, 15 bp, Homo sapiens
gaggtagaagttgca

SEQ ID NO: 109971 - DNA, 15 bp, Homo sapiens
ggaggtagaagttgc

SEQ ID NO: 109972 - DNA, 15 bp, Homo sapiens
gggaggtagaagttg

SEQ ID NO: 109973 - DNA, 15 bp, Homo sapiens
ggggaggtagaagtt

SEQ ID NO: 109974 - DNA, 15 bp, Homo sapiens
tggggaggtagaagt

SEQ ID NO: 109975 - DNA, 15 bp, Homo sapiens
ctggggaggtagaag

SEQ ID NO: 109976 - DNA, 15 bp, Homo sapiens
actggggaggtagaa

SEQ ID NO: 109977 - DNA, 15 bp, Homo sapiens
aactggggaggtaga

SEQ ID NO: 109978 - DNA, 15 bp, Homo sapiens
gaactggggaggtag

SEQ ID NO: 109979 - DNA, 15 bp, Homo sapiens
tgaactggggaggta

SEQ ID NO: 109980 - DNA, 15 bp, Homo sapiens
ttgaactggggaggt

SEQ ID NO: 109981 - DNA, 15 bp, Homo sapiens
cttgaactggggagg

SEQ ID NO: 109982 - DNA, 15 bp, Homo sapiens
acttgaactggggag

SEQ ID NO: 109983 - DNA, 15 bp, Homo sapiens
cacttgaactgggga

SEQ ID NO: 109984 - DNA, 15 bp, Homo sapiens
tcacttgaactgggg

SEQ ID NO: 109985 - DNA, 15 bp, Homo sapiens
gtcacttgaactggg

SEQ ID NO: 109986 - DNA, 15 bp, Homo sapiens
agtcacttgaactgg

SEQ ID NO: 109987 - DNA, 15 bp, Homo sapiens
aagtcacttgaactg

SEQ ID NO: 109988 - DNA, 15 bp, Homo sapiens
aaagtcacttgaact

SEQ ID NO: 109989 - DNA, 15 bp, Homo sapiens
aaaagtcacttgaac

SEQ ID NO: 109990 - DNA, 15 bp, Homo sapiens
caaaagtcacttgaa

SEQ ID NO: 109991 - DNA, 15 bp, Homo sapiens
acaaaagtcacttga

SEQ ID NO: 109992 - DNA, 15 bp, Homo sapiens
cacaaaagtcacttg

SEQ ID NO: 109993 - DNA, 15 bp, Homo sapiens
gcacaaaagtcactt

SEQ ID NO: 109994 - DNA, 15 bp, Homo sapiens
ggcacaaaagtcact

SEQ ID NO: 109995 - DNA, 15 bp, Homo sapiens
aggcacaaaagtcac

SEQ ID NO: 109996 - DNA, 15 bp, Homo sapiens
gaggcacaaaagtca

SEQ ID NO: 109997 - DNA, 15 bp, Homo sapiens
tgaggcacaaaagtc

SEQ ID NO: 109998 - DNA, 15 bp, Homo sapiens
ctgaggcacaaaagt

SEQ ID NO: 109999 - DNA, 15 bp, Homo sapiens
gctgaggcacaaaag

SEQ ID NO: 110000 - DNA, 15 bp, Homo sapiens
agctgaggcacaaaa

SEQ ID NO: 110001 - DNA, 15 bp, Homo sapiens
aagctgaggcacaaa

SEQ ID NO: 110002 - DNA, 15 bp, Homo sapiens
gaagctgaggcacaa

SEQ ID NO: 110003 - DNA, 15 bp, Homo sapiens
ggaagctgaggcaca

SEQ ID NO: 110004 - DNA, 15 bp, Homo sapiens
aggaagctgaggcac

SEQ ID NO: 110005 - DNA, 15 bp, Homo sapiens
cccagctactcagga

SEQ ID NO: 110006 - DNA, 15 bp, Homo sapiens
tcccagctactcagg

SEQ ID NO: 110007 - DNA, 15 bp, Homo sapiens
gtggtggcaggcacc

SEQ ID NO: 110008 - DNA, 15 bp, Homo sapiens
tgtggtggcaggcac

SEQ ID NO: 110009 - DNA, 15 bp, Homo sapiens
gtgtggtggcaggca

SEQ ID NO: 110010 - DNA, 15 bp, Homo sapiens
ggtgtggtggcaggc

SEQ ID NO: 110011 - DNA, 15 bp, Homo sapiens
cctactaaaaataca

SEQ ID NO: 110012 - DNA, 15 bp, Homo sapiens
gcctactaaaaatac

SEQ ID NO: 110013 - DNA, 15 bp, Homo sapiens
tgcctactaaaaata

SEQ ID NO: 110014 - DNA, 15 bp, Homo sapiens
atgcctactaaaaat

SEQ ID NO: 110015 - DNA, 15 bp, Homo sapiens
catgcctactaaaaa

SEQ ID NO: 110016 - DNA, 15 bp, Homo sapiens
ccatgcctactaaaa

SEQ ID NO: 110017 - DNA, 15 bp, Homo sapiens
cccatgcctactaaa

SEQ ID NO: 110018 - DNA, 15 bp, Homo sapiens
ccccatgcctactaa

SEQ ID NO: 110019 - DNA, 15 bp, Homo sapiens
accccatgcctacta

SEQ ID NO: 110020 - DNA, 15 bp, Homo sapiens
aaccccatgcctact

SEQ ID NO: 110021 - DNA, 15 bp, Homo sapiens
aaaccccatgcctac

SEQ ID NO: 110022 - DNA, 15 bp, Homo sapiens
aaaaccccatgccta

SEQ ID NO: 110023 - DNA, 15 bp, Homo sapiens
taaaaccccatgcct

SEQ ID NO: 110024 - DNA, 15 bp, Homo sapiens
gtaaaaccccatgcc

SEQ ID NO: 110025 - DNA, 15 bp, Homo sapiens
ggtaaaaccccatgc

SEQ ID NO: 110026 - DNA, 15 bp, Homo sapiens
tggtaaaaccccatg

SEQ ID NO: 110027 - DNA, 15 bp, Homo sapiens
atggtaaaaccccat

SEQ ID NO: 110028 - DNA, 15 bp, Homo sapiens
catggtaaaacccca

SEQ ID NO: 110029 - DNA, 15 bp, Homo sapiens
acatggtaaaacccc

SEQ ID NO: 110030 - DNA, 15 bp, Homo sapiens
aacatggtaaaaccc

SEQ ID NO: 110031 - DNA, 15 bp, Homo sapiens
caacatggtaaaacc

SEQ ID NO: 110032 - DNA, 15 bp, Homo sapiens
ccaacatggtaaaac

SEQ ID NO: 110033 - DNA, 15 bp, Homo sapiens
gccaacatggtaaaa

SEQ ID NO: 110034 - DNA, 15 bp, Homo sapiens
agccaacatggtaaa

SEQ ID NO: 110035 - DNA, 15 bp, Homo sapiens
tagccaacatggtaa

SEQ ID NO: 110036 - DNA, 15 bp, Homo sapiens
ctagccaacatggta

SEQ ID NO: 110037 - DNA, 15 bp, Homo sapiens
cctagccaacatggt

SEQ ID NO: 110038 - DNA, 15 bp, Homo sapiens
gcctagccaacatgg

SEQ ID NO: 110039 - DNA, 15 bp, Homo sapiens
agcctagccaacatg

SEQ ID NO: 110040 - DNA, 15 bp, Homo sapiens
cagcctagccaacat

SEQ ID NO: 110041 - DNA, 15 bp, Homo sapiens
agaccagcctagcca

SEQ ID NO: 110042 - DNA, 15 bp, Homo sapiens
gagaccagcctagcc

SEQ ID NO: 110043 - DNA, 15 bp, Homo sapiens
cgagaccagcctagc

SEQ ID NO: 110044 - DNA, 15 bp, Homo sapiens
tcgagaccagcctag

SEQ ID NO: 110045 - DNA, 15 bp, Homo sapiens
ttcgagaccagccta

SEQ ID NO: 110046 - DNA, 15 bp, Homo sapiens
ctcaggaattcgaga

SEQ ID NO: 110047 - DNA, 15 bp, Homo sapiens
gctcaggaattcgag

SEQ ID NO: 110048 - DNA, 15 bp, Homo sapiens
agctcaggaattcga

SEQ ID NO: 110049 - DNA, 15 bp, Homo sapiens
gagctcaggaattcg

SEQ ID NO: 110050 - DNA, 15 bp, Homo sapiens
tgagctcaggaattc

SEQ ID NO: 110051 - DNA, 15 bp, Homo sapiens
ctgagctcaggaatt

SEQ ID NO: 110052 - DNA, 15 bp, Homo sapiens
cctgagctcaggaat

SEQ ID NO: 110053 - DNA, 15 bp, Homo sapiens
gcctgagctcaggaa

SEQ ID NO: 110054 - DNA, 15 bp, Homo sapiens
aattgcctgagctca

SEQ ID NO: 110055 - DNA, 15 bp, Homo sapiens
gaattgcctgagctc

SEQ ID NO: 110056 - DNA, 15 bp, Homo sapiens
cgaattgcctgagct

SEQ ID NO: 110057 - DNA, 15 bp, Homo sapiens
gcgaattgcctgagc

SEQ ID NO: 110058 - DNA, 15 bp, Homo sapiens
ggcgaattgcctgag

SEQ ID NO: 110059 - DNA, 15 bp, Homo sapiens
aggcgaattgcctga

SEQ ID NO: 110060 - DNA, 15 bp, Homo sapiens
taggcgaattgcctg

SEQ ID NO: 110061 - DNA, 15 bp, Homo sapiens
gtaggcgaattgcct

SEQ ID NO: 110062 - DNA, 15 bp, Homo sapiens
ggtaggcgaattgcc

SEQ ID NO: 110063 - DNA, 15 bp, Homo sapiens
aggtaggcgaattgc

SEQ ID NO: 110064 - DNA, 15 bp, Homo sapiens
aaggtaggcgaattg

SEQ ID NO: 110065 - DNA, 15 bp, Homo sapiens
taaggtaggcgaatt
